United States Patent Application Publication US 2007/0042381 A1 - sequence listing, part 44

SEQ ID NO: 1969515 - RNA, 16 nt, Human
cuugucggcuccaguc

SEQ ID NO: 1969516 - RNA, 19 nt, Human
cuugucuuuggacccugag

SEQ ID NO: 1969517 - RNA, 18 nt, Human
cuugucuuuggacccuga

SEQ ID NO: 1969518 - RNA, 15 nt, Human
cuugucuuuggaccc

SEQ ID NO: 1969519 - RNA, 13 nt, Human
cuugucuuuggac

SEQ ID NO: 1969520 - RNA, 15 nt, Human
cuugucuuucugggg

SEQ ID NO: 1969521 - RNA, 16 nt, Human
cuugucuuucuggggu

SEQ ID NO: 1969522 - RNA, 21 nt, Human
cuugugaaaauaauugacagg

SEQ ID NO: 1969523 - RNA, 14 nt, Human
cuucuucagagacu

SEQ ID NO: 1969524 - RNA, 13 nt, Human
cuucuucagagac

SEQ ID NO: 1969525 - RNA, 16 nt, Human
cuucucuuccaggcag

SEQ ID NO: 1969526 - RNA, 17 nt, Human
cuucucuuccaggcagc

SEQ ID NO: 1969527 - RNA, 13 nt, Human
cuuccuccuggug

SEQ ID NO: 1969528 - RNA, 14 nt, Human
cuuccucugagccu

SEQ ID NO: 1969529 - RNA, 15 nt, Human
cuuccucugagccuu

SEQ ID NO: 1969530 - RNA, 13 nt, Human
cuuccucuccacu

SEQ ID NO: 1969531 - RNA, 14 nt, Human
cuuccucuccacug

SEQ ID NO: 1969532 - RNA, 15 nt, Human
cuuccucuccacugc

SEQ ID NO: 1969533 - RNA, 21 nt, Human
cuuccucuuuccaucuacccu

SEQ ID NO: 1969534 - RNA, 16 nt, Human
cuuccucugaggcuga

SEQ ID NO: 1969535 - RNA, 22 nt, Human
cuuccucuuuccaucuacccuc

SEQ ID NO: 1969536 - RNA, 22 nt, Human
cuuccucugaggcugaaauuca

SEQ ID NO: 1969537 - RNA, 13 nt, Human
cuucucacauuua

SEQ ID NO: 1969538 - RNA, 20 nt, Human
cuucucacauuuauauuuuu

SEQ ID NO: 1969539 - RNA, 13 nt, Human
cuuccugagggga

SEQ ID NO: 1969540 - RNA, 21 nt, Human
cuuccugaggggagacagagc

SEQ ID NO: 1969541 - RNA, 22 nt, Human
cuuccugaggggagacagagca

SEQ ID NO: 1969542 - RNA, 12 nt, Human
cuugauucauaa

SEQ ID NO: 1969543 - RNA, 16 nt, Human
cuugauuugagauuuu

SEQ ID NO: 1969544 - RNA, 16 nt, Human
cuugcaaaauuccuga

SEQ ID NO: 1969545 - RNA, 13 nt, Human
cuugauuuuccau

SEQ ID NO: 1969546 - RNA, 14 nt, Human
cuugauuuuccauc

SEQ ID NO: 1969547 - RNA, 22 nt, Human
cuugauuuuccaucuaaaaaua

SEQ ID NO: 1969548 - RNA, 23 nt, Human
cuugauuuuccaucuaaaaauau

SEQ ID NO: 1969549 - RNA, 12 nt, Human
cuugcaaaguau

SEQ ID NO: 1969550 - RNA, 17 nt, Human
cuugcaaaauuccugac

SEQ ID NO: 1969551 - RNA, 22 nt, Human
cuugcuaccacggccuccuuuc

SEQ ID NO: 1969552 - RNA, 13 nt, Human
cuuggccucagag

SEQ ID NO: 1969553 - RNA, 17 nt, Human
cuugcucccugacuggg

SEQ ID NO: 1969554 - RNA, 20 nt, Human
cuuggcaauaaauuuugaaa

SEQ ID NO: 1969555 - RNA, 22 nt, Human
cuuggcaauaaauuuugaaaag

SEQ ID NO: 1969556 - RNA, 21 nt, Human
cuuggcaauaaauuuugaaaa

SEQ ID NO: 1969557 - RNA, 20 nt, Human
cuuggccucacccucuggcu

SEQ ID NO: 1969558 - RNA, 24 nt, Human
cuuggauuguccccgacccuugcc

SEQ ID NO: 1969559 - RNA, 23 nt, Human
cuuggauuguccccgacccuugc

SEQ ID NO: 1969560 - RNA, 15 nt, Human
cuugcucccugacug

SEQ ID NO: 1969561 - RNA, 21 nt, Human
cuugaauggcaauguuuugcu

SEQ ID NO: 1969562 - RNA, 23 nt, Human
cuugaauggcaauguuuugcuuu

SEQ ID NO: 1969563 - RNA, 15 nt, Human
cuugaauuaagaaga

SEQ ID NO: 1969564 - RNA, 16 nt, Human
cuugacaucaacugca

SEQ ID NO: 1969565 - RNA, 20 nt, Human
cuugauuaagaucucagugg

SEQ ID NO: 1969566 - RNA, 18 nt, Human
cuugauguguuaucucuu

SEQ ID NO: 1969567 - RNA, 22 nt, Human
cuugaucaguaguuugcauuuc

SEQ ID NO: 1969568 - RNA, 20 nt, Human
cuugaucaguaguuugcauu

SEQ ID NO: 1969569 - RNA, 21 nt, Human
cuugaucaguaguuugcauuu

SEQ ID NO: 1969570 - RNA, 18 nt, Human
cuugaucaguaguuugca

SEQ ID NO: 1969571 - RNA, 23 nt, Human
cuugauauuuguauuuauucuuu

SEQ ID NO: 1969572 - RNA, 13 nt, Human
cuugauauuugua

SEQ ID NO: 1969573 - RNA, 14 nt, Human
cuugauauuuguau

SEQ ID NO: 1969574 - RNA, 16 nt, Human
cuugauauuuguauuu

SEQ ID NO: 1969575 - RNA, 18 nt, Human
cuugauauuuguauuuau

SEQ ID NO: 1969576 - RNA, 17 nt, Human
cuugauauccucuuuga

SEQ ID NO: 1969577 - RNA, 22 nt, Human
cuugauauccucuuugagugaa

SEQ ID NO: 1969578 - RNA, 22 nt, Human
gaaaaaaaugucaaaaguagaa

SEQ ID NO: 1969579 - RNA, 22 nt, Human
gaaaaaaccguguuugucucuu

SEQ ID NO: 1969580 - RNA, 10 nt, Human
gaaaaaagag

SEQ ID NO: 1969581 - RNA, 16 nt, Human
gaaaaaagagaaaaga

SEQ ID NO: 1969582 - RNA, 21 nt, Human
gaaaacuuuaugcuaagugaa

SEQ ID NO: 1969583 - RNA, 18 nt, Human
gaaaacuuguauuaugug

SEQ ID NO: 1969584 - RNA, 23 nt, Human
gaaaagaaaaaugagccuggcaa

SEQ ID NO: 1969585 - RNA, 22 nt, Human
gaaaacuuguauuauguguguu

SEQ ID NO: 1969586 - RNA, 19 nt, Human
gaaaacuuguauuaugugu

SEQ ID NO: 1969587 - RNA, 23 nt, Human
gaaaaaaguuguaggcgaaucau

SEQ ID NO: 1969588 - RNA, 14 nt, Human
gaaaaaaguuguag

SEQ ID NO: 1969589 - RNA, 22 nt, Human
gaaaaaaguuguaggcgaauca

SEQ ID NO: 1969590 - RNA, 17 nt, Human
gaaaaaagagaaaagaa

SEQ ID NO: 1969591 - RNA, 18 nt, Human
gaaaaaagagaaaagaaa

SEQ ID NO: 1969592 - RNA, 22 nt, Human
gaaaagaaaucuaugauuccag

SEQ ID NO: 1969593 - RNA, 13 nt, Human
gaaaagaaaucua

SEQ ID NO: 1969594 - RNA, 14 nt, Human
gaaaagaaacucua

SEQ ID NO: 1969595 - RNA, 22 nt, Human
gaaaagaaacucuauggucuua

SEQ ID NO: 1969596 - RNA, 21 nt, Human
gaaaagaaaucuauagaaagu

SEQ ID NO: 1969597 - RNA, 22 nt, Human
gaaaagaaaucuauagaaagug

SEQ ID NO: 1969598 - RNA, 23 nt, Human
gaaaagaaaucuauagaaagugu

SEQ ID NO: 1969599 - RNA, 24 nt, Human
gaaaagaaaucuauagaaaguguu

SEQ ID NO: 1969600 - RNA, 14 nt, Human
gaaaagaauagaag

SEQ ID NO: 1969601 - RNA, 17 nt, Human
gaaaagacuaagaucgg

SEQ ID NO: 1969602 - RNA, 15 nt, Human
gaaaauguucuucca

SEQ ID NO: 1969603 - RNA, 21 nt, Human
gaaaagauguagauuuauuuc

SEQ ID NO: 1969604 - RNA, 14 nt, Human
gaaaagauguagau

SEQ ID NO: 1969605 - RNA, 17 nt, Human
gaaaagauguagauuua

SEQ ID NO: 1969606 - RNA, 18 nt, Human
gaaaagauguagauuuau

SEQ ID NO: 1969607 - RNA, 19 nt, Human
gaaaagauguagauuuauu

SEQ ID NO: 1969608 - RNA, 12 nt, Human
gaaaaugugugu

SEQ ID NO: 1969609 - RNA, 15 nt, Human
gaaaaugugugugug

SEQ ID NO: 1969610 - RNA, 21 nt, Human
gaaacaagucagucauucaga

SEQ ID NO: 1969611 - RNA, 21 nt, Human
gaaacaacagcuuuaaaagaa

SEQ ID NO: 1969612 - RNA, 15 nt, Human
gaaacaacagcuuua

SEQ ID NO: 1969613 - RNA, 24 nt, Human
gaaacaaagcauuugacuuucugu

SEQ ID NO: 1969614 - RNA, 13 nt, Human
gaaacuggauuaa

SEQ ID NO: 1969615 - RNA, 17 nt, Human
gaaacuggauuaaacuu

SEQ ID NO: 1969616 - RNA, 18 nt, Human
gaaagaaaaucaggcugg

SEQ ID NO: 1969617 - RNA, 22 nt, Human
gaaacuggaaauacuagauuug

SEQ ID NO: 1969618 - RNA, 15 nt, Human
gaaaggcuccaggag

SEQ ID NO: 1969619 - RNA, 14 nt, Human
gaaaggcuccagga

SEQ ID NO: 1969620 - RNA, 13 nt, Human
gaaaggcuccagg

SEQ ID NO: 1969621 - RNA, 13 nt, Human
gaaagaaagagga

SEQ ID NO: 1969622 - RNA, 15 nt, Human
gaaagaaagaggaaa

SEQ ID NO: 1969623 - RNA, 16 nt, Human
gaaaggcuccaggagc

SEQ ID NO: 1969624 - RNA, 20 nt, Human
gaaagaacgcugauuuaaag

SEQ ID NO: 1969625 - RNA, 13 nt, Human
gaaagggcccaga

SEQ ID NO: 1969626 - RNA, 14 nt, Human
gaacaaaucuuccu

SEQ ID NO: 1969627 - RNA, 16 nt, Human
gaacaaagaccaauuu

SEQ ID NO: 1969628 - RNA, 13 nt, Human
gaacaaaucuucc

SEQ ID NO: 1969629 - RNA, 20 nt, Human
gaacaaguugagcuaugacu

SEQ ID NO: 1969630 - RNA, 21 nt, Human
gaacaaguugagcuaugacuu

SEQ ID NO: 1969631 - RNA, 22 nt, Human
gaacaaguugagcuaugacuua

SEQ ID NO: 1969632 - RNA, 22 nt, Human
gaacacauuucuuuuuaaaaaa

SEQ ID NO: 1969633 - RNA, 23 nt, Human
gaacacauuucuuuuuaaaaaaa

SEQ ID NO: 1969634 - RNA, 17 nt, Human
gaacacauaauucagga

SEQ ID NO: 1969635 - RNA, 20 nt, Human
gaacacauaauucaggaagc

SEQ ID NO: 1969636 - RNA, 11 nt, Human
gaaaugaaaaa

SEQ ID NO: 1969637 - RNA, 15 nt, Human
gaaaucucuuugccc

SEQ ID NO: 1969638 - RNA, 23 nt, Human
gaaaucugaggaauggacauuuc

SEQ ID NO: 1969639 - RNA, 16 nt, Human
gaacaaaauaaauugg

SEQ ID NO: 1969640 - RNA, 14 nt, Human
gaacaaaauaaauu

SEQ ID NO: 1969641 - RNA, 15 nt, Human
gaacaaaauaaauug

SEQ ID NO: 1969642 - RNA, 17 nt, Human
gaaaggggauuacaguu

SEQ ID NO: 1969643 - RNA, 20 nt, Human
gaaaucuaugauuccaggug

SEQ ID NO: 1969644 - RNA, 19 nt, Human
gaaaucuauagaaaguguu

SEQ ID NO: 1969645 - RNA, 23 nt, Human
gaaaucuauagaaaguguucugu

SEQ ID NO: 1969646 - RNA, 18 nt, Human
gaaaucuaugauuccagg

SEQ ID NO: 1969647 - RNA, 14 nt, Human
gaaaucuauagaaa

SEQ ID NO: 1969648 - RNA, 15 nt, Human
gaaagggcccagaga

SEQ ID NO: 1969649 - RNA, 16 nt, Human
gaaagggcccagagag

SEQ ID NO: 1969650 - RNA, 18 nt, Human
gaaccaccacacccagcc

SEQ ID NO: 1969651 - RNA, 20 nt, Human
gaaccaccacacccagccca

SEQ ID NO: 1969652 - RNA, 21 nt, Human
gaaccaccacacccagcccac

SEQ ID NO: 1969653 - RNA, 22 nt, Human
gaaccaccacacccagcccacu

SEQ ID NO: 1969654 - RNA, 13 nt, Human
gaagacagcucuu

SEQ ID NO: 1969655 - RNA, 12 nt, Human
gaagacagcucu

SEQ ID NO: 1969656 - RNA, 15 nt, Human
gaagacagagcuaca

SEQ ID NO: 1969657 - RNA, 13 nt, Human
gaagacagagcua

SEQ ID NO: 1969658 - RNA, 21 nt, Human
gaagacacugaugggcaaccc

SEQ ID NO: 1969659 - RNA, 17 nt, Human
gaacugcagucacugca

SEQ ID NO: 1969660 - RNA, 16 nt, Human
gaagacacugaugggc

SEQ ID NO: 1969661 - RNA, 20 nt, Human
gaagaccuaaccagggccag

SEQ ID NO: 1969662 - RNA, 23 nt, Human
gaagaccuaaccagggccagaag

SEQ ID NO: 1969663 - RNA, 13 nt, Human
gaagaccuaacca

SEQ ID NO: 1969664 - RNA, 18 nt, Human
gaagaccuaaccagggcc

SEQ ID NO: 1969665 - RNA, 15 nt, Human
gaagacagcucuuau

SEQ ID NO: 1969666 - RNA, 14 nt, Human
gaagacagcucuua

SEQ ID NO: 1969667 - RNA, 17 nt, Human
gaagcagguuaaauguu

SEQ ID NO: 1969668 - RNA, 18 nt, Human
gaagcagguuaaauguuu

SEQ ID NO: 1969669 - RNA, 19 nt, Human
gaagcagguuaaauguuuu

SEQ ID NO: 1969670 - RNA, 19 nt, Human
gaagcaggugugagggcag

SEQ ID NO: 1969671 - RNA, 15 nt, Human
gaagcagguuaaaug

SEQ ID NO: 1969672 - RNA, 16 nt, Human
gaagcagguuaaaugu

SEQ ID NO: 1969673 - RNA, 16 nt, Human
gaagcaccauaacuuu

SEQ ID NO: 1969674 - RNA, 21 nt, Human
gaagcacaugccucucucagg

SEQ ID NO: 1969675 - RNA, 22 nt, Human
gaagcacaugccucucucaggc

SEQ ID NO: 1969676 - RNA, 17 nt, Human
gaagcacagugaucaag

SEQ ID NO: 1969677 - RNA, 14 nt, Human
gaagcacaugccuc

SEQ ID NO: 1969678 - RNA, 13 nt, Human
gaagcacagcuuc

SEQ ID NO: 1969679 - RNA, 14 nt, Human
gaagcacagcuuca

SEQ ID NO: 1969680 - RNA, 17 nt, Human
gaagacucauucuucug

SEQ ID NO: 1969681 - RNA, 18 nt, Human
gaagacucauucuucugu

SEQ ID NO: 1969682 - RNA, 16 nt, Human
gaagacucauucuucu

SEQ ID NO: 1969683 - RNA, 17 nt, Human
gaacugauguaaguaaa

SEQ ID NO: 1969684 - RNA, 15 nt, Human
gaacugagcuuggaa

SEQ ID NO: 1969685 - RNA, 16 nt, Human
gaacugagcuuggaag

SEQ ID NO: 1969686 - RNA, 21 nt, Human
gaacugagcuuggaagcuucu

SEQ ID NO: 1969687 - RNA, 22 nt, Human
gaacugagcuuggaagcuucug

SEQ ID NO: 1969688 - RNA, 14 nt, Human
gaacugagcuugga

SEQ ID NO: 1969689 - RNA, 19 nt, Human
gaacucuucucauuacuug

SEQ ID NO: 1969690 - RNA, 15 nt, Human
gaacucuugacagcu

SEQ ID NO: 1969691 - RNA, 22 nt, Human
gaacugaaaggcuuuucaacca

SEQ ID NO: 1969692 - RNA, 17 nt, Human
gaacccgggaggcagag

SEQ ID NO: 1969693 - RNA, 19 nt, Human
gaacccgggaggcagaggu

SEQ ID NO: 1969694 - RNA, 14 nt, Human
gaacuccugaccuc

SEQ ID NO: 1969695 - RNA, 13 nt, Human
gaacuccuggccu

SEQ ID NO: 1969696 - RNA, 15 nt, Human
gaacuccuggccuca

SEQ ID NO: 1969697 - RNA, 14 nt, Human
gaacuccuggccuc

SEQ ID NO: 1969698 - RNA, 12 nt, Human
gaacucuuccuc

SEQ ID NO: 1969699 - RNA, 22 nt, Human
gaacucuuccuccaaggacaga

SEQ ID NO: 1969700 - RNA, 14 nt, Human
gaacucuucucauu

SEQ ID NO: 1969701 - RNA, 17 nt, Human
gaacucuucucauuacu

SEQ ID NO: 1969702 - RNA, 23 nt, Human
gaaccaccacacccagcccacuu

SEQ ID NO: 1969703 - RNA, 13 nt, Human
gaaccacuuguag

SEQ ID NO: 1969704 - RNA, 14 nt, Human
gaaccacuuguaga

SEQ ID NO: 1969705 - RNA, 20 nt, Human
gaaccacuuguagauuugau

SEQ ID NO: 1969706 - RNA, 15 nt, Human
gaaccacuuguagau

SEQ ID NO: 1969707 - RNA, 18 nt, Human
gaaccacuuguagauuug

SEQ ID NO: 1969708 - RNA, 22 nt, Human
gaaccauaguugacaguuccaa

SEQ ID NO: 1969709 - RNA, 22 nt, Human
gaaccauggucggaaaacaugc

SEQ ID NO: 1969710 - RNA, 14 nt, Human
gaaccauaaaaugu

SEQ ID NO: 1969711 - RNA, 18 nt, Human
gaaccauaaaauguccag

SEQ ID NO: 1969712 - RNA, 19 nt, Human
gaaccauaaaauguccagu

SEQ ID NO: 1969713 - RNA, 20 nt, Human
gaaccauaguuacuguaaaa

SEQ ID NO: 1969714 - RNA, 21 nt, Human
gaaccauaguuacuguaaaau

SEQ ID NO: 1969715 - RNA, 23 nt, Human
gaaccauaguuacuguaaaaugc

SEQ ID NO: 1969716 - RNA, 18 nt, Human
gaaccccuggcuccaggc

SEQ ID NO: 1969717 - RNA, 22 nt, Human
gaaccccuggcuccaggccagg

SEQ ID NO: 1969718 - RNA, 17 nt, Human
gagaagcggcuggcagc

SEQ ID NO: 1969719 - RNA, 23 nt, Human
gacuuuucuguccgagcuuugaa

SEQ ID NO: 1969720 - RNA, 21 nt, Human
gacuuuucuguccgagcuuug

SEQ ID NO: 1969721 - RNA, 17 nt, Human
gacuuuuccaauaugug

SEQ ID NO: 1969722 - RNA, 22 nt, Human
gacuuuuccaauaugugauuuu

SEQ ID NO: 1969723 - RNA, 22 nt, Human
gacuuuguuaguuucuccaagc

SEQ ID NO: 1969724 - RNA, 14 nt, Human
gacuuuggaaagag

SEQ ID NO: 1969725 - RNA, 14 nt, Human
gacuuuggaaagac

SEQ ID NO: 1969726 - RNA, 18 nt, Human
gacuuugaaaauauauac

SEQ ID NO: 1969727 - RNA, 18 nt, Human
gacuuugaugucagcagu

SEQ ID NO: 1969728 - RNA, 22 nt, Human
gacuuugaugucagcaguugcu

SEQ ID NO: 1969729 - RNA, 18 nt, Human
gacuguuuucucuugaga

SEQ ID NO: 1969730 - RNA, 16 nt, Human
gacuguuuucucuuga

SEQ ID NO: 1969731 - RNA, 14 nt, Human
gacucaaugcacug

SEQ ID NO: 1969732 - RNA, 17 nt, Human
gacucaaugcacugaca

SEQ ID NO: 1969733 - RNA, 22 nt, Human
gacuguacaaaguagaagucuu

SEQ ID NO: 1969734 - RNA, 16 nt, Human
gacuguacuccuccca

SEQ ID NO: 1969735 - RNA, 17 nt, Human
gacuguacuccucccag

SEQ ID NO: 1969736 - RNA, 20 nt, Human
gacugugugcucaggagccc

SEQ ID NO: 1969737 - RNA, 17 nt, Human
gacugugugcucaggag

SEQ ID NO: 1969738 - RNA, 16 nt, Human
gacugugugcucagga

SEQ ID NO: 1969739 - RNA, 14 nt, Human
gacugugugcucag

SEQ ID NO: 1969740 - RNA, 22 nt, Human
gacugucucaagagggcacugg

SEQ ID NO: 1969741 - RNA, 23 nt, Human
gacugucucaagagggcacuggu

SEQ ID NO: 1969742 - RNA, 21 nt, Human
gacugucucaagagggcacug

SEQ ID NO: 1969743 - RNA, 22 nt, Human
gacucaaaugcucagaccagcu

SEQ ID NO: 1969744 - RNA, 15 nt, Human
gacuauggagcugag

SEQ ID NO: 1969745 - RNA, 18 nt, Human
gacuaugcuuuucucaaa

SEQ ID NO: 1969746 - RNA, 13 nt, Human
gacgcugugcugc

SEQ ID NO: 1969747 - RNA, 12 nt, Human
gacgcugugcug

SEQ ID NO: 1969748 - RNA, 13 nt, Human
gacgcucugcugu

SEQ ID NO: 1969749 - RNA, 22 nt, Human
gacgcucugcugugggcacagg

SEQ ID NO: 1969750 - RNA, 22 nt, Human
gacccuccaaggccaggccuug

SEQ ID NO: 1969751 - RNA, 18 nt, Human
gacaggggcaggaggaag

SEQ ID NO: 1969752 - RNA, 20 nt, Human
gacaggggagggggcaaagg

SEQ ID NO: 1969753 - RNA, 20 nt, Human
gacaggggcaggaggaaggg

SEQ ID NO: 1969754 - RNA, 17 nt, Human
gacagggggccagaaca

SEQ ID NO: 1969755 - RNA, 14 nt, Human
gacagggguuccuu

SEQ ID NO: 1969756 - RNA, 20 nt, Human
gacagggguuccuucugggc

SEQ ID NO: 1969757 - RNA, 21 nt, Human
gacagggguuccuucugggca

SEQ ID NO: 1969758 - RNA, 13 nt, Human
gacagcuccuucu

SEQ ID NO: 1969759 - RNA, 11 nt, Human
gacagccuggc

SEQ ID NO: 1969760 - RNA, 12 nt, Human
gacagccuggca

SEQ ID NO: 1969761 - RNA, 14 nt, Human
gacagcuccuucug

SEQ ID NO: 1969762 - RNA, 15 nt, Human
gacagcuccuucugu

SEQ ID NO: 1969763 - RNA, 20 nt, Human
gacagaaagcagaacaguga

SEQ ID NO: 1969764 - RNA, 14 nt, Human
gacacuuuuucuuu

SEQ ID NO: 1969765 - RNA, 13 nt, Human
gacagaaaauaug

SEQ ID NO: 1969766 - RNA, 17 nt, Human
gacagaaaauauguauu

SEQ ID NO: 1969767 - RNA, 22 nt, Human
gacagaaaauauguauuaacac

SEQ ID NO: 1969768 - RNA, 14 nt, Human
gacagaaagcagaa

SEQ ID NO: 1969769 - RNA, 18 nt, Human
gaagcaugaacagugcac

SEQ ID NO: 1969770 - RNA, 12 nt, Human
gaagcagugccc

SEQ ID NO: 1969771 - RNA, 15 nt, Human
gaagcagugcccagg

SEQ ID NO: 1969772 - RNA, 16 nt, Human
gaagcagugcccaggu

SEQ ID NO: 1969773 - RNA, 18 nt, Human
gaagcagugcccaggugg

SEQ ID NO: 1969774 - RNA, 20 nt, Human
gacaguauggcagcuuuccu

SEQ ID NO: 1969775 - RNA, 22 nt, Human
gacagguuugggaccccuggug

SEQ ID NO: 1969776 - RNA, 19 nt, Human
gacagguuugggaccccug

SEQ ID NO: 1969777 - RNA, 17 nt, Human
gacaggguuucaccaug

SEQ ID NO: 1969778 - RNA, 15 nt, Human
gaccaucccugaagg

SEQ ID NO: 1969779 - RNA, 14 nt, Human
gaccaucccugaag

SEQ ID NO: 1969780 - RNA, 18 nt, Human
gaccagggcuggggcagc

SEQ ID NO: 1969781 - RNA, 19 nt, Human
gaccagggcuggggcagcc

SEQ ID NO: 1969782 - RNA, 22 nt, Human
gaccagggcuggggcagccucu

SEQ ID NO: 1969783 - RNA, 20 nt, Human
gaccaggguuggcaccuucc

SEQ ID NO: 1969784 - RNA, 16 nt, Human
gacccuauugcugcuu

SEQ ID NO: 1969785 - RNA, 12 nt, Human
gacccggcugcg

SEQ ID NO: 1969786 - RNA, 13 nt, Human
gacccggcugcgu

SEQ ID NO: 1969787 - RNA, 21 nt, Human
gaccccuggcuuuucacugcu

SEQ ID NO: 1969788 - RNA, 22 nt, Human
gaccccuggcuuuucacugcug

SEQ ID NO: 1969789 - RNA, 13 nt, Human
gaccccuggcuuu

SEQ ID NO: 1969790 - RNA, 16 nt, Human
gaccauucuccaccug

SEQ ID NO: 1969791 - RNA, 23 nt, Human
gaccaugcugucuggcacagccu

SEQ ID NO: 1969792 - RNA, 17 nt, Human
gaccaucccugaaggcc

SEQ ID NO: 1969793 - RNA, 16 nt, Human
gaccaucccugaaggc

SEQ ID NO: 1969794 - RNA, 15 nt, Human
gaccaugcugucugg

SEQ ID NO: 1969795 - RNA, 19 nt, Human
gaccaugcugucuggcaca

SEQ ID NO: 1969796 - RNA, 20 nt, Human
gaccaugcugucuggcacag

SEQ ID NO: 1969797 - RNA, 22 nt, Human
gaccaugcugucuggcacagcc

SEQ ID NO: 1969798 - RNA, 18 nt, Human
gagguggaauuauuuuaa

SEQ ID NO: 1969799 - RNA, 13 nt, Human
gaggugggauccu

SEQ ID NO: 1969800 - RNA, 16 nt, Human
gaggugggauccucca

SEQ ID NO: 1969801 - RNA, 15 nt, Human
gaggugggauccucc

SEQ ID NO: 1969802 - RNA, 21 nt, Human
gagucacuggaacacuaauga

SEQ ID NO: 1969803 - RNA, 14 nt, Human
gagucacuggaaca

SEQ ID NO: 1969804 - RNA, 17 nt, Human
gaggugggauccuccag

SEQ ID NO: 1969805 - RNA, 21 nt, Human
gagucauuuuguguugaagag

SEQ ID NO: 1969806 - RNA, 16 nt, Human
gaguccaaacuggaau

SEQ ID NO: 1969807 - RNA, 14 nt, Human
gagucauuucugau

SEQ ID NO: 1969808 - RNA, 18 nt, Human
gagucagaaguuucugcc

SEQ ID NO: 1969809 - RNA, 15 nt, Human
gagucauuucugauu

SEQ ID NO: 1969810 - RNA, 19 nt, Human
gaguccaaacuggaaugag

SEQ ID NO: 1969811 - RNA, 14 nt, Human
gagugagacagacu

SEQ ID NO: 1969812 - RNA, 14 nt, Human
gagugagacucugu

SEQ ID NO: 1969813 - RNA, 18 nt, Human
gagugagacucugucuca

SEQ ID NO: 1969814 - RNA, 19 nt, Human
gagugccgcaucucacagc

SEQ ID NO: 1969815 - RNA, 19 nt, Human
gaguugauacuacaguuug

SEQ ID NO: 1969816 - RNA, 21 nt, Human
gaguugauagcacagacccug

SEQ ID NO: 1969817 - RNA, 22 nt, Human
gaguugauacuacaguuuguua

SEQ ID NO: 1969818 - RNA, 13 nt, Human
gagugcagugagc

SEQ ID NO: 1969819 - RNA, 18 nt, Human
gagugcagugagccgaga

SEQ ID NO: 1969820 - RNA, 15 nt, Human
gagugagaggggagg

SEQ ID NO: 1969821 - RNA, 18 nt, Human
gagugagaggggaggcca

SEQ ID NO: 1969822 - RNA, 19 nt, Human
gagugagaggggaggccaa

SEQ ID NO: 1969823 - RNA, 20 nt, Human
gagugagaggggaggccaag

SEQ ID NO: 1969824 - RNA, 18 nt, Human
gagugccaacuucuuuca

SEQ ID NO: 1969825 - RNA, 20 nt, Human
gaggccagagacacaagccu

SEQ ID NO: 1969826 - RNA, 17 nt, Human
gaggcucugcccuuggu

SEQ ID NO: 1969827 - RNA, 15 nt, Human
gaggcucugcccuug

SEQ ID NO: 1969828 - RNA, 19 nt, Human
gaggcucuggagcccacug

SEQ ID NO: 1969829 - RNA, 14 nt, Human
gaggcucuggagcc

SEQ ID NO: 1969830 - RNA, 14 nt, Human
gaggcucugcccuu

SEQ ID NO: 1969831 - RNA, 13 nt, Human
gaggcucugcccu

SEQ ID NO: 1969832 - RNA, 12 nt, Human
gaggcucugccc

SEQ ID NO: 1969833 - RNA, 14 nt, Human
gaggcuccaggcag

SEQ ID NO: 1969834 - RNA, 15 nt, Human
gaggcuccaggcagc

SEQ ID NO: 1969835 - RNA, 15 nt, Human
gagggcuccagacac

SEQ ID NO: 1969836 - RNA, 14 nt, Human
gagggcuccagaca

SEQ ID NO: 1969837 - RNA, 13 nt, Human
gagggcuccagac

SEQ ID NO: 1969838 - RNA, 12 nt, Human
gagggcuccaga

SEQ ID NO: 1969839 - RNA, 12 nt, Human
gaggggaacaga

SEQ ID NO: 1969840 - RNA, 14 nt, Human
gaggcugccucucc

SEQ ID NO: 1969841 - RNA, 13 nt, Human
gagggccugggcc

SEQ ID NO: 1969842 - RNA, 15 nt, Human
gagggccugggccug

SEQ ID NO: 1969843 - RNA, 17 nt, Human
gagggccugggccuggc

SEQ ID NO: 1969844 - RNA, 20 nt, Human
gagggccugggccuggcucc

SEQ ID NO: 1969845 - RNA, 16 nt, Human
gaggcuccaggcagca

SEQ ID NO: 1969846 - RNA, 22 nt, Human
gagcugugggcaaaagagugua

SEQ ID NO: 1969847 - RNA, 20 nt, Human
gagcugugcaucagcuagaa

SEQ ID NO: 1969848 - RNA, 20 nt, Human
gagcugccuguucagcucca

SEQ ID NO: 1969849 - RNA, 17 nt, Human
gagcggagaaaggaagg

SEQ ID NO: 1969850 - RNA, 15 nt, Human
gagcugccuguucag

SEQ ID NO: 1969851 - RNA, 16 nt, Human
gagcugccuguucagc

SEQ ID NO: 1969852 - RNA, 19 nt, Human
gagcugccuguucagcucc

SEQ ID NO: 1969853 - RNA, 13 nt, Human
gagcgacagugag

SEQ ID NO: 1969854 - RNA, 15 nt, Human
gagcgacagugagac

SEQ ID NO: 1969855 - RNA, 13 nt, Human
gagccuuccaggg

SEQ ID NO: 1969856 - RNA, 12 nt, Human
gagccuuccagg

SEQ ID NO: 1969857 - RNA, 17 nt, Human
gagcaucaggccaggcc

SEQ ID NO: 1969858 - RNA, 14 nt, Human
gagccuuaaaacau

SEQ ID NO: 1969859 - RNA, 15 nt, Human
gagcagugggccugg

SEQ ID NO: 1969860 - RNA, 17 nt, Human
gagcagugggccuggcc

SEQ ID NO: 1969861 - RNA, 18 nt, Human
gagcagugggccuggcca

SEQ ID NO: 1969862 - RNA, 22 nt, Human
gagcaucaggccaggcccucug

SEQ ID NO: 1969863 - RNA, 20 nt, Human
gagcaucaggccaggcccuc

SEQ ID NO: 1969864 - RNA, 20 nt, Human
gagcagugauauucuuuguu

SEQ ID NO: 1969865 - RNA, 22 nt, Human
gcacuauagccuaggugacaga

SEQ ID NO: 1969866 - RNA, 17 nt, Human
gcacuccagccugggug

SEQ ID NO: 1969867 - RNA, 15 nt, Human
gcacuauugagucuu

SEQ ID NO: 1969868 - RNA, 18 nt, Human
gcacucaaaucuuaagaa

SEQ ID NO: 1969869 - RNA, 20 nt, Human
gcacucaaaucuuaagaaau

SEQ ID NO: 1969870 - RNA, 21 nt, Human
gcacucaaaucuuaagaaaua

SEQ ID NO: 1969871 - RNA, 11 nt, Human
gcaccuccucg

SEQ ID NO: 1969872 - RNA, 20 nt, Human
gcaccuccucggcuggcugu

SEQ ID NO: 1969873 - RNA, 21 nt, Human
gcaccuccucggcuggcuguc

SEQ ID NO: 1969874 - RNA, 12 nt, Human
gcaccuccugcc

SEQ ID NO: 1969875 - RNA, 16 nt, Human
gcaccggcuggccugg

SEQ ID NO: 1969876 - RNA, 15 nt, Human
gcaccggcuggccug

SEQ ID NO: 1969877 - RNA, 17 nt, Human
gcaccggcuggccuggc

SEQ ID NO: 1969878 - RNA, 17 nt, Human
gcaccuaccaccacgcc

SEQ ID NO: 1969879 - RNA, 18 nt, Human
gcaccuaccaccacgccc

SEQ ID NO: 1969880 - RNA, 12 nt, Human
gcacacauuuuu

SEQ ID NO: 1969881 - RNA, 15 nt, Human
gcacacaucaucugu

SEQ ID NO: 1969882 - RNA, 16 nt, Human
gcacacaucaucugua

SEQ ID NO: 1969883 - RNA, 17 nt, Human
gcacacaucaucuguaa

SEQ ID NO: 1969884 - RNA, 20 nt, Human
gcacacaucaucuguaagcu

SEQ ID NO: 1969885 - RNA, 11 nt, Human
gcacacauuuu

SEQ ID NO: 1969886 - RNA, 20 nt, Human
gcacacaccagagcccaccu

SEQ ID NO: 1969887 - RNA, 23 nt, Human
gcacacagcacgggggccaagga

SEQ ID NO: 1969888 - RNA, 11 nt, Human
gcacacagcac

SEQ ID NO: 1969889 - RNA, 19 nt, Human
gcaaguuuucccugaaguu

SEQ ID NO: 1969890 - RNA, 20 nt, Human
gcaaguuuucccugaaguua

SEQ ID NO: 1969891 - RNA, 11 nt, Human
gcaauaaagca

SEQ ID NO: 1969892 - RNA, 16 nt, Human
gcaauaaaagcccagg

SEQ ID NO: 1969893 - RNA, 17 nt, Human
gcaauaaaagcccagga

SEQ ID NO: 1969894 - RNA, 18 nt, Human
gcaauaaaagcccaggag

SEQ ID NO: 1969895 - RNA, 19 nt, Human
gcaauaaaagcccaggagc

SEQ ID NO: 1969896 - RNA, 23 nt, Human
gcaauaaggggagaguaacccug

SEQ ID NO: 1969897 - RNA, 22 nt, Human
gcaauaaaagcccaggagccca

SEQ ID NO: 1969898 - RNA, 12 nt, Human
gcacacaccaga

SEQ ID NO: 1969899 - RNA, 14 nt, Human
gcacacaccagagc

SEQ ID NO: 1969900 - RNA, 15 nt, Human
gcacacaccagagcc

SEQ ID NO: 1969901 - RNA, 16 nt, Human
gcacacaccagagccc

SEQ ID NO: 1969902 - RNA, 17 nt, Human
gcacacaccagagccca

SEQ ID NO: 1969903 - RNA, 18 nt, Human
gcacacaccagagcccac

SEQ ID NO: 1969904 - RNA, 19 nt, Human
gcacacaccagagcccacc

SEQ ID NO: 1969905 - RNA, 15 nt, Human
gcaaaagaugcuucu

SEQ ID NO: 1969906 - RNA, 21 nt, Human
gcaaaaccagguuuuguuccg

SEQ ID NO: 1969907 - RNA, 19 nt, Human
gcaaaacacaaaacaaauc

SEQ ID NO: 1969908 - RNA, 16 nt, Human
gcaaaagaugcuucuc

SEQ ID NO: 1969909 - RNA, 17 nt, Human
gcaacccccagccugcu

SEQ ID NO: 1969910 - RNA, 18 nt, Human
gcaacccccagccugcua

SEQ ID NO: 1969911 - RNA, 22 nt, Human
gcaaccccuggaccccagccuc

SEQ ID NO: 1969912 - RNA, 19 nt, Human
gcaaccccuggaccccagc

SEQ ID NO: 1969913 - RNA, 21 nt, Human
gcaaccccuggaccccagccu

SEQ ID NO: 1969914 - RNA, 12 nt, Human
gcaaaagagugu

SEQ ID NO: 1969915 - RNA, 21 nt, Human
gcaaaagaguguaaaauauuu

SEQ ID NO: 1969916 - RNA, 13 nt, Human
gcaaccccuggac

SEQ ID NO: 1969917 - RNA, 14 nt, Human
gcaaccccuggacc

SEQ ID NO: 1969918 - RNA, 22 nt, Human
gcaacccuggugaccagcacca

SEQ ID NO: 1969919 - RNA, 18 nt, Human
gcaaccuccgccucuugg

SEQ ID NO: 1969920 - RNA, 19 nt, Human
gauucuccugccucagccu

SEQ ID NO: 1969921 - RNA, 20 nt, Human
gauucuccugccucagccuc

SEQ ID NO: 1969922 - RNA, 21 nt, Human
gauucuccugccucagccucc

SEQ ID NO: 1969923 - RNA, 20 nt, Human
gauuuaacagaaauguacag

SEQ ID NO: 1969924 - RNA, 23 nt, Human
gauuuaacagaaauguacagcaa

SEQ ID NO: 1969925 - RNA, 15 nt, Human
gauucuuuagagaag

SEQ ID NO: 1969926 - RNA, 20 nt, Human
gauucuuguuuugcuucccc

SEQ ID NO: 1969927 - RNA, 21 nt, Human
gauucuuguuuugcuuccccu

SEQ ID NO: 1969928 - RNA, 15 nt, Human
gauucuuguuuugcu

SEQ ID NO: 1969929 - RNA, 16 nt, Human
gauucuuguuuugcuu

SEQ ID NO: 1969930 - RNA, 23 nt, Human
gauucuuauggacaaugacccag

SEQ ID NO: 1969931 - RNA, 21 nt, Human
gauucuucugcuucagccucc

SEQ ID NO: 1969932 - RNA, 23 nt, Human
gauuuuuuuuuccuucagugccu

SEQ ID NO: 1969933 - RNA, 22 nt, Human
gauuuuuuuuuccuucagugcc

SEQ ID NO: 1969934 - RNA, 12 nt, Human
gauuucagaaac

SEQ ID NO: 1969935 - RNA, 12 nt, Human
gcaaaaaaaguu

SEQ ID NO: 1969936 - RNA, 17 nt, Human
gcaaaaaaaguuguaug

SEQ ID NO: 1969937 - RNA, 18 nt, Human
gcaaaaaaaguuguauga

SEQ ID NO: 1969938 - RNA, 19 nt, Human
gcaaaaaaaguuguaugau

SEQ ID NO: 1969939 - RNA, 18 nt, Human
gauuucacucuccuuggu

SEQ ID NO: 1969940 - RNA, 17 nt, Human
gauuucacucuccuugg

SEQ ID NO: 1969941 - RNA, 15 nt, Human
gauuucagcucacug

SEQ ID NO: 1969942 - RNA, 17 nt, Human
gauuucagcucacugca

SEQ ID NO: 1969943 - RNA, 20 nt, Human
gauuucagcucacugcaacc

SEQ ID NO: 1969944 - RNA, 16 nt, Human
gauuucacucuccuug

SEQ ID NO: 1969945 - RNA, 13 nt, Human
gauuucacucucc

SEQ ID NO: 1969946 - RNA, 22 nt, Human
gaugugagaaaaccccuuccca

SEQ ID NO: 1969947 - RNA, 14 nt, Human
gaugugagaaaacc

SEQ ID NO: 1969948 - RNA, 20 nt, Human
gaucuggguucacugcaacc

SEQ ID NO: 1969949 - RNA, 22 nt, Human
gaguugauagcacagacccugc

SEQ ID NO: 1969950 - RNA, 18 nt, Human
gaucuggguucacugcaa

SEQ ID NO: 1969951 - RNA, 13 nt, Human
gaugaggcaaccc

SEQ ID NO: 1969952 - RNA, 14 nt, Human
gaugaugacuaugg

SEQ ID NO: 1969953 - RNA, 23 nt, Human
gaugcuucucacugccaugccag

SEQ ID NO: 1969954 - RNA, 14 nt, Human
gaugauugaagaaa

SEQ ID NO: 1969955 - RNA, 15 nt, Human
gaugauugaagaaac

SEQ ID NO: 1969956 - RNA, 14 nt, Human
gaugcuuguacaua

SEQ ID NO: 1969957 - RNA, 16 nt, Human
gaugcuuguacauaau

SEQ ID NO: 1969958 - RNA, 23 nt, Human
gauggaggaaaaccaagccgugg

SEQ ID NO: 1969959 - RNA, 14 nt, Human
gauguaaagauguu

SEQ ID NO: 1969960 - RNA, 13 nt, Human
gauguaaagaugu

SEQ ID NO: 1969961 - RNA, 18 nt, Human
gaugucccaacuuguaaa

SEQ ID NO: 1969962 - RNA, 17 nt, Human
gaugucccaacuuguaa

SEQ ID NO: 1969963 - RNA, 19 nt, Human
gaugucagcaguugcuggu

SEQ ID NO: 1969964 - RNA, 13 nt, Human
gauguaauuuugu

SEQ ID NO: 1969965 - RNA, 19 nt, Human
gauggauauauguuuuuga

SEQ ID NO: 1969966 - RNA, 12 nt, Human
gauguaaauuuu

SEQ ID NO: 1969967 - RNA, 19 nt, Human
gauguaauuuuguguaaga

SEQ ID NO: 1969968 - RNA, 21 nt, Human
gccaaggagggugagugcaag

SEQ ID NO: 1969969 - RNA, 20 nt, Human
gccaaggagggugagugcaa

SEQ ID NO: 1969970 - RNA, 11 nt, Human
gccaaggccaa

SEQ ID NO: 1969971 - RNA, 17 nt, Human
gccaaggccaaaggaag

SEQ ID NO: 1969972 - RNA, 19 nt, Human
gccaaggccaaaggaagca

SEQ ID NO: 1969973 - RNA, 17 nt, Human
gccaagaggcugcagcc

SEQ ID NO: 1969974 - RNA, 18 nt, Human
gccaagagcccgucugcu

SEQ ID NO: 1969975 - RNA, 21 nt, Human
gccaagagguuuggcuccugc

SEQ ID NO: 1969976 - RNA, 22 nt, Human
gccaagagguuuggcuccugcc

SEQ ID NO: 1969977 - RNA, 14 nt, Human
gccaagaguggccc

SEQ ID NO: 1969978 - RNA, 18 nt, Human
gccaagaguggccccacc

SEQ ID NO: 1969979 - RNA, 20 nt, Human
gccaagaguggccccaccug

SEQ ID NO: 1969980 - RNA, 21 nt, Human
gccaagaguggccccaccugg

SEQ ID NO: 1969981 - RNA, 22 nt, Human
gccaagaguggccccaccuggc

SEQ ID NO: 1969982 - RNA, 22 nt, Human
gccaagcaccuagccucgcucu

SEQ ID NO: 1969983 - RNA, 17 nt, Human
gcauccuggcacccggc

SEQ ID NO: 1969984 - RNA, 21 nt, Human
gcauccuggcacccggccccu

SEQ ID NO: 1969985 - RNA, 13 nt, Human
gcaucgcaaugua

SEQ ID NO: 1969986 - RNA, 22 nt, Human
gcauccuggcacccggccccug

SEQ ID NO: 1969987 - RNA, 23 nt, Human
gcauccuggcacccggccccugc

SEQ ID NO: 1969988 - RNA, 14 nt, Human
gcauggccaggugg

SEQ ID NO: 1969989 - RNA, 17 nt, Human
gcauggccagguggcca

SEQ ID NO: 1969990 - RNA, 13 nt, Human
gcauggccaggug

SEQ ID NO: 1969991 - RNA, 14 nt, Human
gcauggcagcccuc

SEQ ID NO: 1969992 - RNA, 17 nt, Human
gcaugugaugagaggaa

SEQ ID NO: 1969993 - RNA, 16 nt, Human
gcaugucuuauuuaaa

SEQ ID NO: 1969994 - RNA, 23 nt, Human
gcaugucccuaccgagucucuuc

SEQ ID NO: 1969995 - RNA, 22 nt, Human
gcaugucccaugugagcugcug

SEQ ID NO: 1969996 - RNA, 20 nt, Human
gcauuguaaaagcauuuugu

SEQ ID NO: 1969997 - RNA, 12 nt, Human
gcauuguaagcg

SEQ ID NO: 1969998 - RNA, 21 nt, Human
gcauuguaagcguauggcuuu

SEQ ID NO: 1969999 - RNA, 22 nt, Human
gcauuguaagcguauggcuuua

SEQ ID NO: 1970000 - RNA, 18 nt, Human
gcauuguaucugucuuuc

SEQ ID NO: 1970001 - RNA, 19 nt, Human
gcauuguaucugucuuucc

SEQ ID NO: 1970002 - RNA, 19 nt, Human
gcauuggggauguuuuucu

SEQ ID NO: 1970003 - RNA, 16 nt, Human
gcauugggugaucauu

SEQ ID NO: 1970004 - RNA, 16 nt, Human
gcaugggaaugaaugu

SEQ ID NO: 1970005 - RNA, 13 nt, Human
gcaugggaaugaa

SEQ ID NO: 1970006 - RNA, 19 nt, Human
gcaugggaaugaaugucag

SEQ ID NO: 1970007 - RNA, 19 nt, Human
gcaugggcaguuucaguuu

SEQ ID NO: 1970008 - RNA, 14 nt, Human
gcaugggccaccac

SEQ ID NO: 1970009 - RNA, 12 nt, Human
gccaagaggcug

SEQ ID NO: 1970010 - RNA, 13 nt, Human
gccaagaggcugc

SEQ ID NO: 1970011 - RNA, 14 nt, Human
gccaagaggcugca

SEQ ID NO: 1970012 - RNA, 15 nt, Human
gccaagaauuagauu

SEQ ID NO: 1970013 - RNA, 21 nt, Human
gccaacuuuccccacguuaaa

SEQ ID NO: 1970014 - RNA, 18 nt, Human
gccaagaaguuuaaggaa

SEQ ID NO: 1970015 - RNA, 18 nt, Human
gccaagaauucuuaaaua

SEQ ID NO: 1970016 - RNA, 14 nt, Human
gccaagaauucuua

SEQ ID NO: 1970017 - RNA, 19 nt, Human
gccaacuauggccugugga

SEQ ID NO: 1970018 - RNA, 17 nt, Human
gccaacugaucuguuau

SEQ ID NO: 1970019 - RNA, 14 nt, Human
gccaaccucgcucc

SEQ ID NO: 1970020 - RNA, 15 nt, Human
gccaaccucgcucca

SEQ ID NO: 1970021 - RNA, 23 nt, Human
gccaaccucgcuccaacuccaac

SEQ ID NO: 1970022 - RNA, 18 nt, Human
gccaacggccccagcuuc

SEQ ID NO: 1970023 - RNA, 15 nt, Human
gccaacuauggccug

SEQ ID NO: 1970024 - RNA, 14 nt, Human
gccaacuauggccu

SEQ ID NO: 1970025 - RNA, 15 nt, Human
gcauuucccacccug

SEQ ID NO: 1970026 - RNA, 21 nt, Human
gcauuucagaaagccuuucau

SEQ ID NO: 1970027 - RNA, 12 nt, Human
gcauuucagaaa

SEQ ID NO: 1970028 - RNA, 19 nt, Human
gcauuucacuugaguggag

SEQ ID NO: 1970029 - RNA, 23 nt, Human
gcauuuaugguaaucauauuaga

SEQ ID NO: 1970030 - RNA, 22 nt, Human
gcauuuagggaguauucuaaua

SEQ ID NO: 1970031 - RNA, 23 nt, Human
gcauuuagggaguauucuaauaa

SEQ ID NO: 1970032 - RNA, 18 nt, Human
gcauuuaugguaaucaua

SEQ ID NO: 1970033 - RNA, 20 nt, Human
gcauuuaugguaaucauauu

SEQ ID NO: 1970034 - RNA, 12 nt, Human
gcauuuaaaaga

SEQ ID NO: 1970035 - RNA, 15 nt, Human
gcauuuaaaagauac

SEQ ID NO: 1970036 - RNA, 21 nt, Human
gccaacagguagcauagcucu

SEQ ID NO: 1970037 - RNA, 14 nt, Human
gcauuugaaaauuu

SEQ ID NO: 1970038 - RNA, 16 nt, Human
gcauuugaaaauuuug

SEQ ID NO: 1970039 - RNA, 16 nt, Human
gcacuuuguucuggcu

SEQ ID NO: 1970040 - RNA, 18 nt, Human
gcacuuucuucuucccau

SEQ ID NO: 1970041 - RNA, 23 nt, Human
gcacuuugacagcgcacagcugc

SEQ ID NO: 1970042 - RNA, 9 nt, Human
gcacugaag

SEQ ID NO: 1970043 - RNA, 13 nt, Human
gcacucuggcagc

SEQ ID NO: 1970044 - RNA, 14 nt, Human
gcacucuggcagca

SEQ ID NO: 1970045 - RNA, 22 nt, Human
gcagcugcgguccacccaggag

SEQ ID NO: 1970046 - RNA, 23 nt, Human
gcagcugcgguccacccaggagc

SEQ ID NO: 1970047 - RNA, 13 nt, Human
gcagcugcuuuug

SEQ ID NO: 1970048 - RNA, 20 nt, Human
gcagcugcuuuugucuaugg

SEQ ID NO: 1970049 - RNA, 15 nt, Human
gcagcuuauucacaa

SEQ ID NO: 1970050 - RNA, 16 nt, Human
gcagcuugaggguugg

SEQ ID NO: 1970051 - RNA, 20 nt, Human
gcagcuguugucucuucucc

SEQ ID NO: 1970052 - RNA, 10 nt, Human
gcagcuguug

SEQ ID NO: 1970053 - RNA, 16 nt, Human
gcagcuguugucucuu

SEQ ID NO: 1970054 - RNA, 18 nt, Human
gcagcuguugucucuucu

SEQ ID NO: 1970055 - RNA, 19 nt, Human
gcagcuguugucucuucuc

SEQ ID NO: 1970056 - RNA, 17 nt, Human
gcaggcucucaggccag

SEQ ID NO: 1970057 - RNA, 18 nt, Human
gcaggcucucaggccagc

SEQ ID NO: 1970058 - RNA, 22 nt, Human
gcagggaaacagcuaaugggac

SEQ ID NO: 1970059 - RNA, 14 nt, Human
gcagggaaggccug

SEQ ID NO: 1970060 - RNA, 15 nt, Human
gcagggaaggccuga

SEQ ID NO: 1970061 - RNA, 13 nt, Human
gcaggcuggcccu

SEQ ID NO: 1970062 - RNA, 16 nt, Human
gcaggcucucaggcca

SEQ ID NO: 1970063 - RNA, 15 nt, Human
gcaggcucucaggcc

SEQ ID NO: 1970064 - RNA, 14 nt, Human
gcaggcucucaggc

SEQ ID NO: 1970065 - RNA, 13 nt, Human
gcaggcucucagg

SEQ ID NO: 1970066 - RNA, 12 nt, Human
gcaggcucucag

SEQ ID NO: 1970067 - RNA, 22 nt, Human
gcaggcucgggcuccccagccc

SEQ ID NO: 1970068 - RNA, 19 nt, Human
gcagcuugaggguugggcu

SEQ ID NO: 1970069 - RNA, 21 nt, Human
gcagcuugaggguugggcugg

SEQ ID NO: 1970070 - RNA, 15 nt, Human
gcaguugcccagccu

SEQ ID NO: 1970071 - RNA, 15 nt, Human
gcauaccacuuuugu

SEQ ID NO: 1970072 - RNA, 16 nt, Human
gcauaccacuuuuguu

SEQ ID NO: 1970073 - RNA, 23 nt, Human
gcaguugccagucaccccggcca

SEQ ID NO: 1970074 - RNA, 14 nt, Human
gcaguugccaguca

SEQ ID NO: 1970075 - RNA, 15 nt, Human
gcauaaaaauuagcc

SEQ ID NO: 1970076 - RNA, 14 nt, Human
gcaguugcccagcc

SEQ ID NO: 1970077 - RNA, 18 nt, Human
gcauacaaacaagcauau

SEQ ID NO: 1970078 - RNA, 12 nt, Human
gcauacaaacaa

SEQ ID NO: 1970079 - RNA, 23 nt, Human
gcagguuaaauguuuuguaaacu

SEQ ID NO: 1970080 - RNA, 13 nt, Human
gcagguucaguuu

SEQ ID NO: 1970081 - RNA, 21 nt, Human
gcaguugagaggacacucccg

SEQ ID NO: 1970082 - RNA, 18 nt, Human
gcaguugaauuuuuauau

SEQ ID NO: 1970083 - RNA, 16 nt, Human
gcagggaaggccugac

SEQ ID NO: 1970084 - RNA, 15 nt, Human
gcagggacagggccg

SEQ ID NO: 1970085 - RNA, 18 nt, Human
gcaggugugagggcagug

SEQ ID NO: 1970086 - RNA, 13 nt, Human
gcagguuaaaugu

SEQ ID NO: 1970087 - RNA, 14 nt, Human
gcagguuaaauguu

SEQ ID NO: 1970088 - RNA, 15 nt, Human
gcagguuaaauguuu

SEQ ID NO: 1970089 - RNA, 18 nt, Human
gcagguuaaauguuuugu

SEQ ID NO: 1970090 - RNA, 19 nt, Human
gcagguuaaauguuuugua

SEQ ID NO: 1970091 - RNA, 19 nt, Human
gcucuaaaauauuuaugaa

SEQ ID NO: 1970092 - RNA, 23 nt, Human
gcucuaaaauauuuaugaagaaa

SEQ ID NO: 1970093 - RNA, 13 nt, Human
gcucuaaaauauu

SEQ ID NO: 1970094 - RNA, 15 nt, Human
gcucuaaaauauuua

SEQ ID NO: 1970095 - RNA, 11 nt, Human
gcucugcccuu

SEQ ID NO: 1970096 - RNA, 22 nt, Human
gcucugccccagcuugggcaga

SEQ ID NO: 1970097 - RNA, 13 nt, Human
gcucugccccagc

SEQ ID NO: 1970098 - RNA, 23 nt, Human
gcucugcaagaauugaagcagga

SEQ ID NO: 1970099 - RNA, 23 nt, Human
gcucugaucauccacugugccau

SEQ ID NO: 1970100 - RNA, 17 nt, Human
gcucugaucauccacug

SEQ ID NO: 1970101 - RNA, 23 nt, Human
gcuccaccccgcaagcaccaucc

SEQ ID NO: 1970102 - RNA, 15 nt, Human
gcuccacuuggucug

SEQ ID NO: 1970103 - RNA, 20 nt, Human
gcuccagcucaccagcccca

SEQ ID NO: 1970104 - RNA, 21 nt, Human
gcuccagcucaccagccccag

SEQ ID NO: 1970105 - RNA, 16 nt, Human
gcucccacaggcccuu

SEQ ID NO: 1970106 - RNA, 17 nt, Human
gcucccacaggcccuuc

SEQ ID NO: 1970107 - RNA, 20 nt, Human
gcucccacaggcccuuccuc

SEQ ID NO: 1970108 - RNA, 21 nt, Human
gcucccacaggcccuuccucu

SEQ ID NO: 1970109 - RNA, 18 nt, Human
gcuccacuuggucuguga

SEQ ID NO: 1970110 - RNA, 19 nt, Human
gcuccacuuggucugugag

SEQ ID NO: 1970111 - RNA, 18 nt, Human
gcuccagcucaccagccc

SEQ ID NO: 1970112 - RNA, 13 nt, Human
gcucccaggagcc

SEQ ID NO: 1970113 - RNA, 22 nt, Human
gcucccacaggcccuuccucuc

SEQ ID NO: 1970114 - RNA, 17 nt, Human
gcucccacuucugccag

SEQ ID NO: 1970115 - RNA, 18 nt, Human
gcucccacuucugccaga

SEQ ID NO: 1970116 - RNA, 17 nt, Human
gcucccaggcauucccc

SEQ ID NO: 1970117 - RNA, 20 nt, Human
gcucccaggagccugcccag

SEQ ID NO: 1970118 - RNA, 21 nt, Human
gcucccaggagccugcccagc

SEQ ID NO: 1970119 - RNA, 13 nt, Human
gcucccccagcuc

SEQ ID NO: 1970120 - RNA, 14 nt, Human
gcucccccagcucc

SEQ ID NO: 1970121 - RNA, 20 nt, Human
gcucccccagcuccccccac

SEQ ID NO: 1970122 - RNA, 11 nt, Human
gcuccccccag

SEQ ID NO: 1970123 - RNA, 19 nt, Human
gcuccuggcccacugcauc

SEQ ID NO: 1970124 - RNA, 18 nt, Human
gcuccuggcccacugcau

SEQ ID NO: 1970125 - RNA, 20 nt, Human
gcuccuggcccacugcaucg

SEQ ID NO: 1970126 - RNA, 15 nt, Human
gcuccuggcccacug

SEQ ID NO: 1970127 - RNA, 14 nt, Human
gcuccuggcccacu

SEQ ID NO: 1970128 - RNA, 21 nt, Human
gcuccugccaccacgcccggc

SEQ ID NO: 1970129 - RNA, 12 nt, Human
gcuccugagccc

SEQ ID NO: 1970130 - RNA, 16 nt, Human
gcuccugagcccccag

SEQ ID NO: 1970131 - RNA, 12 nt, Human
gcuccugccacc

SEQ ID NO: 1970132 - RNA, 18 nt, Human
gcuccugccaccacgccc

SEQ ID NO: 1970133 - RNA, 17 nt, Human
gcucccccuccaccugc

SEQ ID NO: 1970134 - RNA, 18 nt, Human
gcucccccuccaccugcu

SEQ ID NO: 1970135 - RNA, 12 nt, Human
gcuccccucuuc

SEQ ID NO: 1970136 - RNA, 13 nt, Human
gcuccccucuucc

SEQ ID NO: 1970137 - RNA, 15 nt, Human
gcuccccucuuccuc

SEQ ID NO: 1970138 - RNA, 16 nt, Human
gcuccccucuuccucu

SEQ ID NO: 1970139 - RNA, 13 nt, Human
gcucccgccucca

SEQ ID NO: 1970140 - RNA, 19 nt, Human
gcucccgccuccaaccccu

SEQ ID NO: 1970141 - RNA, 13 nt, Human
gcuccccuucccc

SEQ ID NO: 1970142 - RNA, 16 nt, Human
gcuccccuuccccuuc

SEQ ID NO: 1970143 - RNA, 20 nt, Human
gcuccccuuccccuuccuuc

SEQ ID NO: 1970144 - RNA, 16 nt, Human
gcuaggccuggccaga

SEQ ID NO: 1970145 - RNA, 17 nt, Human
gcuaggccuggccagau

SEQ ID NO: 1970146 - RNA, 23 nt, Human
gcuaggccuggccagaugcacca

SEQ ID NO: 1970147 - RNA, 16 nt, Human
gcuagucuuaagaacu

SEQ ID NO: 1970148 - RNA, 22 nt, Human
gcuagugugguguuuccuggca

SEQ ID NO: 1970149 - RNA, 21 nt, Human
gcuagugugguguuuccuggc

SEQ ID NO: 1970150 - RNA, 14 nt, Human
gcuaugagggccuu

SEQ ID NO: 1970151 - RNA, 12 nt, Human
gcuaugcauuug

SEQ ID NO: 1970152 - RNA, 19 nt, Human
gcuauucaguaauaacucu

SEQ ID NO: 1970153 - RNA, 18 nt, Human
gcuaugauguuaguuuuc

SEQ ID NO: 1970154 - RNA, 13 nt, Human
gcuaugcauuuga

SEQ ID NO: 1970155 - RNA, 16 nt, Human
gcucagaccagcucuu

SEQ ID NO: 1970156 - RNA, 13 nt, Human
gcucagagagggu

SEQ ID NO: 1970157 - RNA, 20 nt, Human
gcucacugcauccuccgccu

SEQ ID NO: 1970158 - RNA, 17 nt, Human
gcucacugcagccuccg

SEQ ID NO: 1970159 - RNA, 14 nt, Human
gcucagagagggug

SEQ ID NO: 1970160 - RNA, 17 nt, Human
gcucagggaaaagcagc

SEQ ID NO: 1970161 - RNA, 15 nt, Human
gcucagggaaaagca

SEQ ID NO: 1970162 - RNA, 23 nt, Human
gcucagguggggucacucuggca

SEQ ID NO: 1970163 - RNA, 14 nt, Human
gcucaggugucccu

SEQ ID NO: 1970164 - RNA, 16 nt, Human
gcucaggugucccugc

SEQ ID NO: 1970165 - RNA, 17 nt, Human
gcucaggugucccugca

SEQ ID NO: 1970166 - RNA, 17 nt, Human
gcucacugcagccucaa

SEQ ID NO: 1970167 - RNA, 16 nt, Human
gcucacugcauccucc

SEQ ID NO: 1970168 - RNA, 15 nt, Human
gcucacugcagccuc

SEQ ID NO: 1970169 - RNA, 16 nt, Human
gcucacugcagccuca

SEQ ID NO: 1970170 - RNA, 11 nt, Human
gcucacugcag

SEQ ID NO: 1970171 - RNA, 12 nt, Human
gcucacugcagc

SEQ ID NO: 1970172 - RNA, 13 nt, Human
gcucacugcagcc

SEQ ID NO: 1970173 - RNA, 14 nt, Human
gcucacugcagccu

SEQ ID NO: 1970174 - RNA, 21 nt, Human
gcuauuuuaaaccaauugcag

SEQ ID NO: 1970175 - RNA, 20 nt, Human
gcuauucaguaauaacucua

SEQ ID NO: 1970176 - RNA, 15 nt, Human
gcuauggccugugcg

SEQ ID NO: 1970177 - RNA, 16 nt, Human
gcuagaacucccuuuc

SEQ ID NO: 1970178 - RNA, 18 nt, Human
gcuagaacucccuuucaa

SEQ ID NO: 1970179 - RNA, 20 nt, Human
gcuacugccaaccucgcucc

SEQ ID NO: 1970180 - RNA, 12 nt, Human
gcuagaacuccc

SEQ ID NO: 1970181 - RNA, 13 nt, Human
gcuagaacucccu

SEQ ID NO: 1970182 - RNA, 14 nt, Human
gcuagaacucccuu

SEQ ID NO: 1970183 - RNA, 15 nt, Human
gcuagaacucccuuu

SEQ ID NO: 1970184 - RNA, 19 nt, Human
gcuacucgugagcgccagu

SEQ ID NO: 1970185 - RNA, 19 nt, Human
gcuacugaaaggcaguagu

SEQ ID NO: 1970186 - RNA, 20 nt, Human
gcgugcacacaccagagccc

SEQ ID NO: 1970187 - RNA, 21 nt, Human
gcgggaggauguucugggaca

SEQ ID NO: 1970188 - RNA, 22 nt, Human
gcgggaggauguucugggacac

SEQ ID NO: 1970189 - RNA, 20 nt, Human
gcgggaggauguucugggac

SEQ ID NO: 1970190 - RNA, 18 nt, Human
gcguuucuaugacacaug

SEQ ID NO: 1970191 - RNA, 19 nt, Human
gcgugcacacaccagagcc

SEQ ID NO: 1970192 - RNA, 23 nt, Human
gcgugcacacaccagagcccacc

SEQ ID NO: 1970193 - RNA, 22 nt, Human
gcuaauucuuugaccuguuggg

SEQ ID NO: 1970194 - RNA, 13 nt, Human
gcuaauucuuugc

SEQ ID NO: 1970195 - RNA, 15 nt, Human
gcuaaugggacacua

SEQ ID NO: 1970196 - RNA, 13 nt, Human
gcuaaugggacac

SEQ ID NO: 1970197 - RNA, 17 nt, Human
gcuaaucuugugaaaau

SEQ ID NO: 1970198 - RNA, 23 nt, Human
gcuaagugauccucccaccucag

SEQ ID NO: 1970199 - RNA, 22 nt, Human
gcuaaacguguauguuuuucag

SEQ ID NO: 1970200 - RNA, 18 nt, Human
gcuaaacguguauguuuu

SEQ ID NO: 1970201 - RNA, 19 nt, Human
gcuaaacguguauguuuuu

SEQ ID NO: 1970202 - RNA, 12 nt, Human
gcuaaaauguuu

SEQ ID NO: 1970203 - RNA, 13 nt, Human
gcuaaaauguuuu

SEQ ID NO: 1970204 - RNA, 14 nt, Human
gcuaaaauguuuuc

SEQ ID NO: 1970205 - RNA, 15 nt, Human
gcuaaaauguuuuca

SEQ ID NO: 1970206 - RNA, 16 nt, Human
gcuaaaauguuuucag

SEQ ID NO: 1970207 - RNA, 17 nt, Human
gcuaaaauguuuucagc

SEQ ID NO: 1970208 - RNA, 14 nt, Human
gcuaaucagcauuc

SEQ ID NO: 1970209 - RNA, 16 nt, Human
gcuaaucagcauucuc

SEQ ID NO: 1970210 - RNA, 17 nt, Human
gcuaaucagcauucuca

SEQ ID NO: 1970211 - RNA, 22 nt, Human
gcuaaucagcauucucacuccu

SEQ ID NO: 1970212 - RNA, 22 nt, Human
gccugcccaggccccugccacc

SEQ ID NO: 1970213 - RNA, 15 nt, Human
gccugcccaggcccc

SEQ ID NO: 1970214 - RNA, 12 nt, Human
gccuccauccug

SEQ ID NO: 1970215 - RNA, 17 nt, Human
gccucgaacuggcugca

SEQ ID NO: 1970216 - RNA, 19 nt, Human
gccuccugugugugcgccu

SEQ ID NO: 1970217 - RNA, 23 nt, Human
gccuccugugugugcgccuacag

SEQ ID NO: 1970218 - RNA, 16 nt, Human
gccucccaaagugcug

SEQ ID NO: 1970219 - RNA, 17 nt, Human
gccucccaaagugcugg

SEQ ID NO: 1970220 - RNA, 21 nt, Human
gccucuuaugggcuggguucu

SEQ ID NO: 1970221 - RNA, 14 nt, Human
gccucuuggguuca

SEQ ID NO: 1970222 - RNA, 20 nt, Human
gccucuucccgccgcccagc

SEQ ID NO: 1970223 - RNA, 12 nt, Human
gccucuugucuu

SEQ ID NO: 1970224 - RNA, 13 nt, Human
gccugcccaggcc

SEQ ID NO: 1970225 - RNA, 14 nt, Human
gccugcccaggccc

SEQ ID NO: 1970226 - RNA, 14 nt, Human
gccucuuucccuuc

SEQ ID NO: 1970227 - RNA, 17 nt, Human
gccucuuucccuuccag

SEQ ID NO: 1970228 - RNA, 16 nt, Human
gccucuugucuuccua

SEQ ID NO: 1970229 - RNA, 23 nt, Human
gccucuugucuuccuauuucaga

SEQ ID NO: 1970230 - RNA, 12 nt, Human
gccucuuucccu

SEQ ID NO: 1970231 - RNA, 16 nt, Human
gccucuuaugggcugg

SEQ ID NO: 1970232 - RNA, 18 nt, Human
gccucuuaugggcugggu

SEQ ID NO: 1970233 - RNA, 17 nt, Human
gccucuuaugggcuggg

SEQ ID NO: 1970234 - RNA, 17 nt, Human
gccucgacacagagugg

SEQ ID NO: 1970235 - RNA, 20 nt, Human
gccucgaacuggcugcaaag

SEQ ID NO: 1970236 - RNA, 22 nt, Human
gccucgaacuggcugcaaaggg

SEQ ID NO: 1970237 - RNA, 20 nt, Human
gcgcagcauauucaggaagc

SEQ ID NO: 1970238 - RNA, 19 nt, Human
gcgcaagggaggcccagcg

SEQ ID NO: 1970239 - RNA, 14 nt, Human
gcgcacagcugcuc

SEQ ID NO: 1970240 - RNA, 22 nt, Human
gcgaucuggguucacugcaacc

SEQ ID NO: 1970241 - RNA, 18 nt, Human
gcgcaagggaggcccagc

SEQ ID NO: 1970242 - RNA, 21 nt, Human
gccuucggccuccauccugag

SEQ ID NO: 1970243 - RNA, 23 nt, Human
gccuucggccuccauccugaggc

SEQ ID NO: 1970244 - RNA, 20 nt, Human
gccuucggccuccauccuga

SEQ ID NO: 1970245 - RNA, 21 nt, Human
gccuguugggccaggagccuc

SEQ ID NO: 1970246 - RNA, 21 nt, Human
gccuugaccauucuccaccug

SEQ ID NO: 1970247 - RNA, 20 nt, Human
gccuugaccauucuccaccu

SEQ ID NO: 1970248 - RNA, 19 nt, Human
gccuugaccauucuccacc

SEQ ID NO: 1970249 - RNA, 17 nt, Human
gccuugaccauucucca

SEQ ID NO: 1970250 - RNA, 17 nt, Human
gccuugcccacuccugc

SEQ ID NO: 1970251 - RNA, 18 nt, Human
gccuugcccacuccugcu

SEQ ID NO: 1970252 - RNA, 22 nt, Human
gccuugcccacuccugcucugc

SEQ ID NO: 1970253 - RNA, 23 nt, Human
gccuugcccacuccugcucugcu

SEQ ID NO: 1970254 - RNA, 17 nt, Human
gcgagcccugguggcag

SEQ ID NO: 1970255 - RNA, 15 nt, Human
gcgagcccugguggc

SEQ ID NO: 1970256 - RNA, 20 nt, Human
gccuggccugagcugggaug

SEQ ID NO: 1970257 - RNA, 23 nt, Human
gccuggcucacacuuggcucuga

SEQ ID NO: 1970258 - RNA, 18 nt, Human
gccuggccugagcuggga

SEQ ID NO: 1970259 - RNA, 14 nt, Human
gccuggccugagcu

SEQ ID NO: 1970260 - RNA, 13 nt, Human
gccuggccugagc

SEQ ID NO: 1970261 - RNA, 20 nt, Human
gccuguugggccaggagccu

SEQ ID NO: 1970262 - RNA, 18 nt, Human
gccuguugggccaggagc

SEQ ID NO: 1970263 - RNA, 16 nt, Human
gccuguugggccagga

SEQ ID NO: 1970264 - RNA, 15 nt, Human
gccuguugggccagg

SEQ ID NO: 1970265 - RNA, 14 nt, Human
gccuguugggccag

SEQ ID NO: 1970266 - RNA, 23 nt, Human
gccuguucccauucuugcauggc

SEQ ID NO: 1970267 - RNA, 19 nt, Human
gccuguucccauucuugca

SEQ ID NO: 1970268 - RNA, 18 nt, Human
gccugugccucugggacu

SEQ ID NO: 1970269 - RNA, 17 nt, Human
gccugugccucugggac

SEQ ID NO: 1970270 - RNA, 16 nt, Human
gccugugccucuggga

SEQ ID NO: 1970271 - RNA, 13 nt, Human
gccuggcucaggu

SEQ ID NO: 1970272 - RNA, 12 nt, Human
gcccccacuggu

SEQ ID NO: 1970273 - RNA, 11 nt, Human
gccccugccag

SEQ ID NO: 1970274 - RNA, 16 nt, Human
gccccugccagacccc

SEQ ID NO: 1970275 - RNA, 17 nt, Human
gccccugccacccuggg

SEQ ID NO: 1970276 - RNA, 16 nt, Human
gccccugccacccugg

SEQ ID NO: 1970277 - RNA, 23 nt, Human
gcccgggcucugccucccaucac

SEQ ID NO: 1970278 - RNA, 19 nt, Human
gcccggugggggggcagag

SEQ ID NO: 1970279 - RNA, 23 nt, Human
gccccugccucucugcagguccc

SEQ ID NO: 1970280 - RNA, 20 nt, Human
gccccugccucucugcaggu

SEQ ID NO: 1970281 - RNA, 14 nt, Human
gccccugcuacugc

SEQ ID NO: 1970282 - RNA, 17 nt, Human
gccccugcuacugccaa

SEQ ID NO: 1970283 - RNA, 21 nt, Human
gccccugccuuggggucaggu

SEQ ID NO: 1970284 - RNA, 15 nt, Human
gcccucacccugggg

SEQ ID NO: 1970285 - RNA, 16 nt, Human
gcccuaaugcgcaggc

SEQ ID NO: 1970286 - RNA, 17 nt, Human
gcccuaaugcgcaggcu

SEQ ID NO: 1970287 - RNA, 19 nt, Human
gcccuaaugcgcaggcugg

SEQ ID NO: 1970288 - RNA, 20 nt, Human
gcccuaaugcgcaggcuggc

SEQ ID NO: 1970289 - RNA, 14 nt, Human
gcccuaagggagug

SEQ ID NO: 1970290 - RNA, 19 nt, Human
gccuauaagccaaaauuaa

SEQ ID NO: 1970291 - RNA, 20 nt, Human
gccuaggugacagagugaga

SEQ ID NO: 1970292 - RNA, 18 nt, Human
gccuaggauucacacccc

SEQ ID NO: 1970293 - RNA, 21 nt, Human
gccuaggauucacaccccacc

SEQ ID NO: 1970294 - RNA, 22 nt, Human
gccuaggauucacaccccaccu

SEQ ID NO: 1970295 - RNA, 23 nt, Human
gccuaggauucacaccccaccug

SEQ ID NO: 1970296 - RNA, 13 nt, Human
gccuaggugacag

SEQ ID NO: 1970297 - RNA, 14 nt, Human
gccuaggugacaga

SEQ ID NO: 1970298 - RNA, 15 nt, Human
gccuaggugacagag

SEQ ID NO: 1970299 - RNA, 23 nt, Human
gccuagcauacguacacauuuua

SEQ ID NO: 1970300 - RNA, 23 nt, Human
gccgccgcuagguagagucugag

SEQ ID NO: 1970301 - RNA, 22 nt, Human
gccgccggcaauaaaagcccag

SEQ ID NO: 1970302 - RNA, 23 nt, Human
gccgccggcaauaaaagcccagg

SEQ ID NO: 1970303 - RNA, 21 nt, Human
gccuagcauacguacacauuu

SEQ ID NO: 1970304 - RNA, 22 nt, Human
gccuagcauacguacacauuuu

SEQ ID NO: 1970305 - RNA, 20 nt, Human
gccuagcauacguacacauu

SEQ ID NO: 1970306 - RNA, 20 nt, Human
gccgccgcuagguagagucu

SEQ ID NO: 1970307 - RNA, 22 nt, Human
gcccugcccaccuggccucugc

SEQ ID NO: 1970308 - RNA, 21 nt, Human
gcccugcccaccuggccucug

SEQ ID NO: 1970309 - RNA, 20 nt, Human
gcccugcccaccuggccucu

SEQ ID NO: 1970310 - RNA, 17 nt, Human
gcccugcccaccuggcc

SEQ ID NO: 1970311 - RNA, 11 nt, Human
gcccugccucc

SEQ ID NO: 1970312 - RNA, 12 nt, Human
gcccugcccugg

SEQ ID NO: 1970313 - RNA, 16 nt, Human
gcccugcccugguuuc

SEQ ID NO: 1970314 - RNA, 11 nt, Human
gcccugcccug

SEQ ID NO: 1970315 - RNA, 18 nt, Human
gcccugcagagggcacag

SEQ ID NO: 1970316 - RNA, 12 nt, Human
gcccugcagcuc

SEQ ID NO: 1970317 - RNA, 16 nt, Human
gcccugcagagggcac

SEQ ID NO: 1970318 - RNA, 13 nt, Human
gcccugcagcucu

SEQ ID NO: 1970319 - RNA, 19 nt, Human
gcccugcagcucucaugcu

SEQ ID NO: 1970320 - RNA, 13 nt, Human
gcccugccuccuu

SEQ ID NO: 1970321 - RNA, 12 nt, Human
gcccugccuccu

SEQ ID NO: 1970322 - RNA, 14 nt, Human
gcccugccuccuuu

SEQ ID NO: 1970323 - RNA, 18 nt, Human
gcccugcccugguuuccu

SEQ ID NO: 1970324 - RNA, 20 nt, Human
gcccuuagcagggaaacagc

SEQ ID NO: 1970325 - RNA, 22 nt, Human
gcccuguccugccuaaggcuga

SEQ ID NO: 1970326 - RNA, 20 nt, Human
gccgcagcccugcagagggc

SEQ ID NO: 1970327 - RNA, 19 nt, Human
gccgcagcccugcagaggg

SEQ ID NO: 1970328 - RNA, 22 nt, Human
gcccuuagcagggaaacagcua

SEQ ID NO: 1970329 - RNA, 15 nt, Human
gccgcaucucacagc

SEQ ID NO: 1970330 - RNA, 18 nt, Human
gccgcaucucacagcuau

SEQ ID NO: 1970331 - RNA, 23 nt, Human
gccgcaucucacagcuaugcaaa

SEQ ID NO: 1970332 - RNA, 13 nt, Human
ggaagagaaaaaa

SEQ ID NO: 1970333 - RNA, 18 nt, Human
ggaagacuuuggaaagag

SEQ ID NO: 1970334 - RNA, 15 nt, Human
ggaagagaaaaaaua

SEQ ID NO: 1970335 - RNA, 12 nt, Human
ggaagacuuugg

SEQ ID NO: 1970336 - RNA, 17 nt, Human
ggaagacuuuggaaaga

SEQ ID NO: 1970337 - RNA, 13 nt, Human
ggaagacuuugga

SEQ ID NO: 1970338 - RNA, 22 nt, Human
ggaagacaaugugaaaagaaaa

SEQ ID NO: 1970339 - RNA, 14 nt, Human
ggaagacagcucuu

SEQ ID NO: 1970340 - RNA, 13 nt, Human
ggaagacagcucu

SEQ ID NO: 1970341 - RNA, 14 nt, Human
ggaacacucugaga

SEQ ID NO: 1970342 - RNA, 12 nt, Human
ggaacacucuga

SEQ ID NO: 1970343 - RNA, 20 nt, Human
ggaacugcugggcuuggcag

SEQ ID NO: 1970344 - RNA, 16 nt, Human
ggaacacucugagacu

SEQ ID NO: 1970345 - RNA, 15 nt, Human
ggaacacucugagac

SEQ ID NO: 1970346 - RNA, 23 nt, Human
ggaacagaagaggaaagagagac

SEQ ID NO: 1970347 - RNA, 21 nt, Human
ggaagcggcccuaagggagug

SEQ ID NO: 1970348 - RNA, 15 nt, Human
ggaagccgcuggggc

SEQ ID NO: 1970349 - RNA, 23 nt, Human
ggaagcucagggccuggcucagg

SEQ ID NO: 1970350 - RNA, 15 nt, Human
ggaagcucagggccu

SEQ ID NO: 1970351 - RNA, 11 nt, Human
ggaagcuccgc

SEQ ID NO: 1970352 - RNA, 16 nt, Human
ggaaggaaacccagcu

SEQ ID NO: 1970353 - RNA, 15 nt, Human
ggaagcuggccugag

SEQ ID NO: 1970354 - RNA, 13 nt, Human
ggaagcugcuacu

SEQ ID NO: 1970355 - RNA, 12 nt, Human
ggaagugugggu

SEQ ID NO: 1970356 - RNA, 21 nt, Human
ggaagugugggucugugugug

SEQ ID NO: 1970357 - RNA, 22 nt, Human
ggaagugugggucugugugugu

SEQ ID NO: 1970358 - RNA, 16 nt, Human
ggaaguuaaaagcaca

SEQ ID NO: 1970359 - RNA, 22 nt, Human
ggaaguuaaagggaagaaaaca

SEQ ID NO: 1970360 - RNA, 20 nt, Human
ggaaggaaacccagcucugg

SEQ ID NO: 1970361 - RNA, 19 nt, Human
ggaaggaaacccagcucug

SEQ ID NO: 1970362 - RNA, 14 nt, Human
ggacacagcucuuc

SEQ ID NO: 1970363 - RNA, 17 nt, Human
ggacaaggugcaggcag

SEQ ID NO: 1970364 - RNA, 18 nt, Human
ggacaaggugcaggcagg

SEQ ID NO: 1970365 - RNA, 19 nt, Human
ggacaaggacuaggguccu

SEQ ID NO: 1970366 - RNA, 22 nt, Human
ggacaagggaaaauaaaaaaag

SEQ ID NO: 1970367 - RNA, 21 nt, Human
ggacacagcucuucuccaggc

SEQ ID NO: 1970368 - RNA, 15 nt, Human
ggacacagcucuucu

SEQ ID NO: 1970369 - RNA, 18 nt, Human
ggacacagcucuucucca

SEQ ID NO: 1970370 - RNA, 20 nt, Human
ggacagcuccuucuguccua

SEQ ID NO: 1970371 - RNA, 22 nt, Human
ggacacuaaccacgcuggaccu

SEQ ID NO: 1970372 - RNA, 19 nt, Human
ggacagcuccuucuguccu

SEQ ID NO: 1970373 - RNA, 17 nt, Human
ggacacuaaccacgcug

SEQ ID NO: 1970374 - RNA, 19 nt, Human
ggaaugaagauacugaaau

SEQ ID NO: 1970375 - RNA, 21 nt, Human
ggaaucuagccagugaacaua

SEQ ID NO: 1970376 - RNA, 22 nt, Human
ggaaucuagccagugaacauaa

SEQ ID NO: 1970377 - RNA, 23 nt, Human
ggacaaggaugaucuaggaagac

SEQ ID NO: 1970378 - RNA, 22 nt, Human
ggacaaggaugaucuaggaaga

SEQ ID NO: 1970379 - RNA, 13 nt, Human
ggacaagagcagg

SEQ ID NO: 1970380 - RNA, 16 nt, Human
ggaauccagacccggc

SEQ ID NO: 1970381 - RNA, 17 nt, Human
ggaaucauuguccagag

SEQ ID NO: 1970382 - RNA, 20 nt, Human
ggaaucauuguccagagcug

SEQ ID NO: 1970383 - RNA, 18 nt, Human
ggaauaacauguaauuaa

SEQ ID NO: 1970384 - RNA, 23 nt, Human
ggacaggcauguucucugaggac

SEQ ID NO: 1970385 - RNA, 18 nt, Human
ggacaggagaugcugugc

SEQ ID NO: 1970386 - RNA, 19 nt, Human
ggacaggagaugcugugcc

SEQ ID NO: 1970387 - RNA, 12 nt, Human
ggacccccugaa

SEQ ID NO: 1970388 - RNA, 11 nt, Human
ggacccugagg

SEQ ID NO: 1970389 - RNA, 17 nt, Human
ggacccuccaaggccag

SEQ ID NO: 1970390 - RNA, 18 nt, Human
ggacccuccaaggccagg

SEQ ID NO: 1970391 - RNA, 21 nt, Human
ggacccuccaaggccaggccu

SEQ ID NO: 1970392 - RNA, 14 nt, Human
ggacccugaaaugu

SEQ ID NO: 1970393 - RNA, 16 nt, Human
ggacccugaaaugugu

SEQ ID NO: 1970394 - RNA, 17 nt, Human
ggacccugccaggcaca

SEQ ID NO: 1970395 - RNA, 24 nt, Human
ggacccugccaggcacaggcaggg

SEQ ID NO: 1970396 - RNA, 18 nt, Human
ggacccugccaggcacag

SEQ ID NO: 1970397 - RNA, 20 nt, Human
ggacccugccaggcacaggc

SEQ ID NO: 1970398 - RNA, 21 nt, Human
ggacccugccaggcacaggca

SEQ ID NO: 1970399 - RNA, 22 nt, Human
ggacccugccaggcacaggcag

SEQ ID NO: 1970400 - RNA, 13 nt, Human
ggacccugaggcc

SEQ ID NO: 1970401 - RNA, 12 nt, Human
ggacccugaggc

SEQ ID NO: 1970402 - RNA, 13 nt, Human
ggaccucaggccu

SEQ ID NO: 1970403 - RNA, 15 nt, Human
ggaccucaggccugg

SEQ ID NO: 1970404 - RNA, 14 nt, Human
ggaccucaggccug

SEQ ID NO: 1970405 - RNA, 20 nt, Human
ggaccucaggccugggggcu

SEQ ID NO: 1970406 - RNA, 13 nt, Human
ggacguccuccaa

SEQ ID NO: 1970407 - RNA, 20 nt, Human
ggacguguuaugacuccaga

SEQ ID NO: 1970408 - RNA, 13 nt, Human
ggagaaacuggaa

SEQ ID NO: 1970409 - RNA, 16 nt, Human
ggagaaaggaagggcu

SEQ ID NO: 1970410 - RNA, 9 nt, Human
ggacuuugu

SEQ ID NO: 1970411 - RNA, 14 nt, Human
ggacuuggaagcuc

SEQ ID NO: 1970412 - RNA, 17 nt, Human
ggacuuucucuaauaau

SEQ ID NO: 1970413 - RNA, 20 nt, Human
ggacuuucucuaauaauaaa

SEQ ID NO: 1970414 - RNA, 22 nt, Human
ggacuuucucuaauaauaaaua

SEQ ID NO: 1970415 - RNA, 16 nt, Human
ggacucaaugcacuga

SEQ ID NO: 1970416 - RNA, 18 nt, Human
ggacucaaugcacugaca

SEQ ID NO: 1970417 - RNA, 15 nt, Human
ggacucaaugcacug

SEQ ID NO: 1970418 - RNA, 24 nt, Human
ggacuaacuugucuuuggacccug

SEQ ID NO: 1970419 - RNA, 14 nt, Human
ggacuacaggugug

SEQ ID NO: 1970420 - RNA, 20 nt, Human
ggacuaacuugucuuuggac

SEQ ID NO: 1970421 - RNA, 10 nt, Human
ggacuaaauu

SEQ ID NO: 1970422 - RNA, 16 nt, Human
ggacguggcaccuccu

SEQ ID NO: 1970423 - RNA, 20 nt, Human
gcuggccuggggucaggccg

SEQ ID NO: 1970424 - RNA, 15 nt, Human
gcuggagugcagugg

SEQ ID NO: 1970425 - RNA, 20 nt, Human
gcuggcgugcaguggugcga

SEQ ID NO: 1970426 - RNA, 18 nt, Human
gcuggagugcagugagcc

SEQ ID NO: 1970427 - RNA, 17 nt, Human
gcuggagugcagugagc

SEQ ID NO: 1970428 - RNA, 20 nt, Human
gcuggccuggccccucaggg

SEQ ID NO: 1970429 - RNA, 22 nt, Human
gcuggagugcagugagccgaga

SEQ ID NO: 1970430 - RNA, 18 nt, Human
gcugcugaaggcucgagc

SEQ ID NO: 1970431 - RNA, 13 nt, Human
gcugcuggcuggu

SEQ ID NO: 1970432 - RNA, 15 nt, Human
gcugcugaaggcucg

SEQ ID NO: 1970433 - RNA, 14 nt, Human
gcugcugaaggcuc

SEQ ID NO: 1970434 - RNA, 13 nt, Human
gcugcugaaggcu

SEQ ID NO: 1970435 - RNA, 23 nt, Human
gcucugguccauagagagcaaga

SEQ ID NO: 1970436 - RNA, 16 nt, Human
gcucugguccauagag

SEQ ID NO: 1970437 - RNA, 15 nt, Human
gcucugguccauaga

SEQ ID NO: 1970438 - RNA, 13 nt, Human
gcucugcccuugg

SEQ ID NO: 1970439 - RNA, 23 nt, Human
gcuggguggcaccagcagccugg

SEQ ID NO: 1970440 - RNA, 22 nt, Human
gcuggguggcaccagcagccug

SEQ ID NO: 1970441 - RNA, 21 nt, Human
gcuggguggcaccagcagccu

SEQ ID NO: 1970442 - RNA, 12 nt, Human
gcugggucgccc

SEQ ID NO: 1970443 - RNA, 22 nt, Human
gcugggccccugccucucugca

SEQ ID NO: 1970444 - RNA, 21 nt, Human
gcugggccccugccucucugc

SEQ ID NO: 1970445 - RNA, 23 nt, Human
gcugggccccugccucucugcag

SEQ ID NO: 1970446 - RNA, 13 nt, Human
gcugggcucccgu

SEQ ID NO: 1970447 - RNA, 15 nt, Human
gcuggcuguuggcug

SEQ ID NO: 1970448 - RNA, 16 nt, Human
gcuggcuguuggcugg

SEQ ID NO: 1970449 - RNA, 17 nt, Human
gcuggcuguuggcuggg

SEQ ID NO: 1970450 - RNA, 14 nt, Human
gcuggcuccagccu

SEQ ID NO: 1970451 - RNA, 15 nt, Human
gcuggcuccagccug

SEQ ID NO: 1970452 - RNA, 22 nt, Human
gcuuccucauaguaugguggcu

SEQ ID NO: 1970453 - RNA, 17 nt, Human
gcuuccuauaauuuuga

SEQ ID NO: 1970454 - RNA, 18 nt, Human
gcuuccuauaauuuugau

SEQ ID NO: 1970455 - RNA, 23 nt, Human
gcuuccuauaauuuugauagugg

SEQ ID NO: 1970456 - RNA, 16 nt, Human
gcuucuucugaggccu

SEQ ID NO: 1970457 - RNA, 20 nt, Human
gcuuucuuucguuuguuugu

SEQ ID NO: 1970458 - RNA, 21 nt, Human
gcuuucuuucguuuguuuguu

SEQ ID NO: 1970459 - RNA, 12 nt, Human
gcuuguacauaa

SEQ ID NO: 1970460 - RNA, 13 nt, Human
gcuuguaguucuu

SEQ ID NO: 1970461 - RNA, 16 nt, Human
gcuugucauagccagu

SEQ ID NO: 1970462 - RNA, 17 nt, Human
gcuugucauagccagug

SEQ ID NO: 1970463 - RNA, 16 nt, Human
gcuuguaguucuuuaa

SEQ ID NO: 1970464 - RNA, 17 nt, Human
gcuuguaguucuuuaaa

SEQ ID NO: 1970465 - RNA, 17 nt, Human
gcuucuucugaggccug

SEQ ID NO: 1970466 - RNA, 14 nt, Human
gcuugagcucagga

SEQ ID NO: 1970467 - RNA, 20 nt, Human
gcuuguaaauagcucaggug

SEQ ID NO: 1970468 - RNA, 17 nt, Human
gcuuguaacuaaaauaa

SEQ ID NO: 1970469 - RNA, 22 nt, Human
gcuuguaacuaaaauaauuuug

SEQ ID NO: 1970470 - RNA, 23 nt, Human
gcuuguaacuaaaauaauuuugu

SEQ ID NO: 1970471 - RNA, 21 nt, Human
gcuucagccucccacagugcu

SEQ ID NO: 1970472 - RNA, 18 nt, Human
gcuucacggaagagccuu

SEQ ID NO: 1970473 - RNA, 19 nt, Human
gcuucacggaagagccuug

SEQ ID NO: 1970474 - RNA, 12 nt, Human
gcuucagccucc

SEQ ID NO: 1970475 - RNA, 14 nt, Human
gcuucagccuccca

SEQ ID NO: 1970476 - RNA, 18 nt, Human
gcuucagccucccacagu

SEQ ID NO: 1970477 - RNA, 19 nt, Human
gcuucagccucccacagug

SEQ ID NO: 1970478 - RNA, 15 nt, Human
gcuucacggaagagc

SEQ ID NO: 1970479 - RNA, 17 nt, Human
gcuucacggaagagccu

SEQ ID NO: 1970480 - RNA, 21 nt, Human
gcuucaaggauccugagccag

SEQ ID NO: 1970481 - RNA, 20 nt, Human
gcuucaaggauccugagcca

SEQ ID NO: 1970482 - RNA, 19 nt, Human
gcuucaaggauccugagcc

SEQ ID NO: 1970483 - RNA, 18 nt, Human
gcuucaaggauccugagc

SEQ ID NO: 1970484 - RNA, 17 nt, Human
ggccaguuggucccccu

SEQ ID NO: 1970485 - RNA, 14 nt, Human
ggccaguugguccc

SEQ ID NO: 1970486 - RNA, 13 nt, Human
ggccauaagcaac

SEQ ID NO: 1970487 - RNA, 23 nt, Human
ggccauaagcaacaauuuucaga

SEQ ID NO: 1970488 - RNA, 23 nt, Human
ggccagucccugaggcagguccc

SEQ ID NO: 1970489 - RNA, 17 nt, Human
ggccagucccugaggca

SEQ ID NO: 1970490 - RNA, 20 nt, Human
ggccagugugacaaggauug

SEQ ID NO: 1970491 - RNA, 13 nt, Human
ggccccugcuggu

SEQ ID NO: 1970492 - RNA, 14 nt, Human
ggccccugcugguu

SEQ ID NO: 1970493 - RNA, 13 nt, Human
ggcccggcuccag

SEQ ID NO: 1970494 - RNA, 23 nt, Human
ggccccugcugguucaggguugg

SEQ ID NO: 1970495 - RNA, 22 nt, Human
ggcccuccgaccacuuccaggg

SEQ ID NO: 1970496 - RNA, 15 nt, Human
ggcccggcuccaggc

SEQ ID NO: 1970497 - RNA, 21 nt, Human
ggcccuucucuccagccccug

SEQ ID NO: 1970498 - RNA, 20 nt, Human
ggcccuucucuccagccccu

SEQ ID NO: 1970499 - RNA, 19 nt, Human
ggcccuucucuccagcccc

SEQ ID NO: 1970500 - RNA, 14 nt, Human
ggccuccauccuga

SEQ ID NO: 1970501 - RNA, 15 nt, Human
ggccuccauccugag

SEQ ID NO: 1970502 - RNA, 16 nt, Human
ggccuccauccugagg

SEQ ID NO: 1970503 - RNA, 23 nt, Human
ggccucaagugauucuccugccu

SEQ ID NO: 1970504 - RNA, 19 nt, Human
ggccucacuaggcuucugg

SEQ ID NO: 1970505 - RNA, 23 nt, Human
ggcccuucucuccagccccugga

SEQ ID NO: 1970506 - RNA, 22 nt, Human
ggcccuucucuccagccccugg

SEQ ID NO: 1970507 - RNA, 19 nt, Human
ggcccuuuccuuccagauc

SEQ ID NO: 1970508 - RNA, 19 nt, Human
ggcacagaaaauggaagac

SEQ ID NO: 1970509 - RNA, 21 nt, Human
ggcacagaaaauggaagacag

SEQ ID NO: 1970510 - RNA, 20 nt, Human
ggcacagaaaauggaagaca

SEQ ID NO: 1970511 - RNA, 23 nt, Human
ggcacagaaaauggaagacagcu

SEQ ID NO: 1970512 - RNA, 13 nt, Human
ggcacaucagcac

SEQ ID NO: 1970513 - RNA, 19 nt, Human
ggcacugagagagcgcagc

SEQ ID NO: 1970514 - RNA, 23 nt, Human
ggcacucagaagacacugauggg

SEQ ID NO: 1970515 - RNA, 23 nt, Human
ggcagccccauucugccugccca

SEQ ID NO: 1970516 - RNA, 11 nt, Human
ggcagccccug

SEQ ID NO: 1970517 - RNA, 16 nt, Human
ggcagacauggugggg

SEQ ID NO: 1970518 - RNA, 21 nt, Human
ggcagacaugguggggucucc

SEQ ID NO: 1970519 - RNA, 15 nt, Human
ggcacugguggcccg

SEQ ID NO: 1970520 - RNA, 21 nt, Human
ggcacugccgccgcuagguag

SEQ ID NO: 1970521 - RNA, 13 nt, Human
ggcacuucugccu

SEQ ID NO: 1970522 - RNA, 15 nt, Human
ggcacuucugccuga

SEQ ID NO: 1970523 - RNA, 16 nt, Human
ggagagaagagaaugc

SEQ ID NO: 1970524 - RNA, 15 nt, Human
ggagagaaauauuuu

SEQ ID NO: 1970525 - RNA, 18 nt, Human
ggagagaaauauuuuaau

SEQ ID NO: 1970526 - RNA, 19 nt, Human
ggagacuuugaugucagca

SEQ ID NO: 1970527 - RNA, 21 nt, Human
ggagacuuugaugucagcagu

SEQ ID NO: 1970528 - RNA, 18 nt, Human
ggagacugcuccugagcc

SEQ ID NO: 1970529 - RNA, 19 nt, Human
ggagacugcuccugagccc

SEQ ID NO: 1970530 - RNA, 20 nt, Human
ggagacugcuccugagcccc

SEQ ID NO: 1970531 - RNA, 21 nt, Human
ggagacugcuccugagccccc

SEQ ID NO: 1970532 - RNA, 16 nt, Human
ggcaggggaggccauc

SEQ ID NO: 1970533 - RNA, 15 nt, Human
ggcagggcugaggcc

SEQ ID NO: 1970534 - RNA, 22 nt, Human
ggcagccccuguucuggcagag

SEQ ID NO: 1970535 - RNA, 17 nt, Human
ggcagcccgcaucagcu

SEQ ID NO: 1970536 - RNA, 19 nt, Human
ggcagccgcggugcccaac

SEQ ID NO: 1970537 - RNA, 16 nt, Human
ggcaguugcccagccu

SEQ ID NO: 1970538 - RNA, 20 nt, Human
ggcaguggugguuuucuguu

SEQ ID NO: 1970539 - RNA, 21 nt, Human
ggcaguggugguuuucuguuc

SEQ ID NO: 1970540 - RNA, 23 nt, Human
ggcuccacacacacaaaaaaaga

SEQ ID NO: 1970541 - RNA, 14 nt, Human
ggcuccacuugguc

SEQ ID NO: 1970542 - RNA, 14 nt, Human
ggcuccacacacac

SEQ ID NO: 1970543 - RNA, 22 nt, Human
ggcuccacacacacaaaaaaag

SEQ ID NO: 1970544 - RNA, 14 nt, Human
ggcucagagugggg

SEQ ID NO: 1970545 - RNA, 18 nt, Human
ggcucagcggggacagcu

SEQ ID NO: 1970546 - RNA, 20 nt, Human
ggcucagguggggucacucu

SEQ ID NO: 1970547 - RNA, 19 nt, Human
ggcucagguggggucacuc

SEQ ID NO: 1970548 - RNA, 19 nt, Human
ggcucagcggggacagcuc

SEQ ID NO: 1970549 - RNA, 20 nt, Human
ggcucagcggggacagcucc

SEQ ID NO: 1970550 - RNA, 16 nt, Human
ggcucagauuguaaua

SEQ ID NO: 1970551 - RNA, 15 nt, Human
ggcucaggcugagcu

SEQ ID NO: 1970552 - RNA, 16 nt, Human
ggcugggagagccuuc

SEQ ID NO: 1970553 - RNA, 15 nt, Human
ggcugggagagccuu

SEQ ID NO: 1970554 - RNA, 14 nt, Human
ggcugggagagccu

SEQ ID NO: 1970555 - RNA, 13 nt, Human
ggcugcugaaggc

SEQ ID NO: 1970556 - RNA, 13 nt, Human
ggcugggagagcc

SEQ ID NO: 1970557 - RNA, 17 nt, Human
ggcugcggggcgggcac

SEQ ID NO: 1970558 - RNA, 11 nt, Human
ggcucucaggc

SEQ ID NO: 1970559 - RNA, 22 nt, Human
ggcuccuuaggguuuucucucu

SEQ ID NO: 1970560 - RNA, 12 nt, Human
ggcucuuccagg

SEQ ID NO: 1970561 - RNA, 12 nt, Human
ggcucuucuccu

SEQ ID NO: 1970562 - RNA, 13 nt, Human
ggcucuucuccuu

SEQ ID NO: 1970563 - RNA, 13 nt, Human
ggcucucaggcca

SEQ ID NO: 1970564 - RNA, 14 nt, Human
ggcucucaggccag

SEQ ID NO: 1970565 - RNA, 17 nt, Human
ggcucucaaugcuguuu

SEQ ID NO: 1970566 - RNA, 21 nt, Human
ggcugccaaugggagcucaug

SEQ ID NO: 1970567 - RNA, 13 nt, Human
ggcugcccuggug

SEQ ID NO: 1970568 - RNA, 14 nt, Human
ggcugcccuggugc

SEQ ID NO: 1970569 - RNA, 15 nt, Human
ggcugcccuggugcu

SEQ ID NO: 1970570 - RNA, 16 nt, Human
ggcugcccuggugcug

SEQ ID NO: 1970571 - RNA, 19 nt, Human
ggcugcccuggugcugcca

SEQ ID NO: 1970572 - RNA, 22 nt, Human
ggcugcggaaugaaccacaucu

SEQ ID NO: 1970573 - RNA, 16 nt, Human
ggcugccuuagaaccu

SEQ ID NO: 1970574 - RNA, 22 nt, Human
ggcugcccuggugcugccacac

SEQ ID NO: 1970575 - RNA, 20 nt, Human
ggcugccaaugggagcucau

SEQ ID NO: 1970576 - RNA, 19 nt, Human
ggcugccaaugggagcuca

SEQ ID NO: 1970577 - RNA, 16 nt, Human
ggcucuucuccuuuca

SEQ ID NO: 1970578 - RNA, 22 nt, Human
ggcugacagacagcccuccauc

SEQ ID NO: 1970579 - RNA, 14 nt, Human
ggcucuucuccuuu

SEQ ID NO: 1970580 - RNA, 15 nt, Human
ggcucuucuccuuuc

SEQ ID NO: 1970581 - RNA, 23 nt, Human
ggcucuucuccuuucacaaccuu

SEQ ID NO: 1970582 - RNA, 9 nt, Human
ggcuucaua

SEQ ID NO: 1970583 - RNA, 11 nt, Human
ggcuucauaca

SEQ ID NO: 1970584 - RNA, 18 nt, Human
ggcuucauccuccucaga

SEQ ID NO: 1970585 - RNA, 22 nt, Human
ggcuucauccuccucagaucuu

SEQ ID NO: 1970586 - RNA, 12 nt, Human
ggcuucauacac

SEQ ID NO: 1970587 - RNA, 14 nt, Human
ggcuucccgcucag

SEQ ID NO: 1970588 - RNA, 16 nt, Human
ggcuuccucauaguau

SEQ ID NO: 1970589 - RNA, 19 nt, Human
ggcuucccgcucagcccuc

SEQ ID NO: 1970590 - RNA, 21 nt, Human
ggcuucccgcucagcccuccc

SEQ ID NO: 1970591 - RNA, 15 nt, Human
ggcuucccgcucagc

SEQ ID NO: 1970592 - RNA, 16 nt, Human
ggcuucccgcucagcc

SEQ ID NO: 1970593 - RNA, 17 nt, Human
ggcuucccgcucagccc

SEQ ID NO: 1970594 - RNA, 18 nt, Human
ggcuucccgcucagcccu

SEQ ID NO: 1970595 - RNA, 18 nt, Human
ggcuucaguggcagcugc

SEQ ID NO: 1970596 - RNA, 17 nt, Human
ggcuucaguggcagcug

SEQ ID NO: 1970597 - RNA, 19 nt, Human
ggcuucaguggcagcugcu

SEQ ID NO: 1970598 - RNA, 20 nt, Human
ggcuucaguggcagcugcuu

SEQ ID NO: 1970599 - RNA, 18 nt, Human
ggcuguaucccaugagcc

SEQ ID NO: 1970600 - RNA, 21 nt, Human
ggcuggguucuacccaggugc

SEQ ID NO: 1970601 - RNA, 19 nt, Human
ggcuggguucuacccaggu

SEQ ID NO: 1970602 - RNA, 19 nt, Human
ggcuggguggcaccagcag

SEQ ID NO: 1970603 - RNA, 20 nt, Human
ggcugggucgcccuggacug

SEQ ID NO: 1970604 - RNA, 17 nt, Human
ggcugggucgcccugga

SEQ ID NO: 1970605 - RNA, 14 nt, Human
ggcugggucgcccu

SEQ ID NO: 1970606 - RNA, 15 nt, Human
ggcugggggccucag

SEQ ID NO: 1970607 - RNA, 16 nt, Human
ggcugggggccucagu

SEQ ID NO: 1970608 - RNA, 17 nt, Human
ggcugggggccucagug

SEQ ID NO: 1970609 - RNA, 19 nt, Human
ggcugggggccucagugcc

SEQ ID NO: 1970610 - RNA, 18 nt, Human
aaaaauaacuguaauuau

SEQ ID NO: 1970611 - RNA, 19 nt, Human
aaaaauaacuguaauuauu

SEQ ID NO: 1970612 - RNA, 11 nt, Human
aaaaauaaagc

SEQ ID NO: 1970613 - RNA, 12 nt, Human
aaaaauaaagca

SEQ ID NO: 1970614 - RNA, 14 nt, Human
aaaaauaacaauga

SEQ ID NO: 1970615 - RNA, 21 nt, Human
ggcuuccuccugguguggaag

SEQ ID NO: 1970616 - RNA, 22 nt, Human
ggcuucccgcucagcccucccu

SEQ ID NO: 1970617 - RNA, 16 nt, Human
ggcuucugugcccaga

SEQ ID NO: 1970618 - RNA, 12 nt, Human
gggaacgcccac

SEQ ID NO: 1970619 - RNA, 16 nt, Human
gggaacgcccacuucc

SEQ ID NO: 1970620 - RNA, 19 nt, Human
gggaacgcccacuucccug

SEQ ID NO: 1970621 - RNA, 20 nt, Human
gggaacgcccacuucccugg

SEQ ID NO: 1970622 - RNA, 15 nt, Human
gggaacguucucuuu

SEQ ID NO: 1970623 - RNA, 18 nt, Human
gggaagaagcucucuccu

SEQ ID NO: 1970624 - RNA, 13 nt, Human
gggaaccugaccc

SEQ ID NO: 1970625 - RNA, 17 nt, Human
gggacaggggcaggagg

SEQ ID NO: 1970626 - RNA, 18 nt, Human
gggacaggggcaggagga

SEQ ID NO: 1970627 - RNA, 15 nt, Human
gggacagcuccuucu

SEQ ID NO: 1970628 - RNA, 12 nt, Human
gggacagucuca

SEQ ID NO: 1970629 - RNA, 15 nt, Human
gggacagucucacca

SEQ ID NO: 1970630 - RNA, 22 nt, Human
gggacauccugucaucugagaa

SEQ ID NO: 1970631 - RNA, 13 nt, Human
gggacagagcaga

SEQ ID NO: 1970632 - RNA, 12 nt, Human
gggacagcuccu

SEQ ID NO: 1970633 - RNA, 13 nt, Human
gggacagcuccuu

SEQ ID NO: 1970634 - RNA, 13 nt, Human
gggaagagacuug

SEQ ID NO: 1970635 - RNA, 17 nt, Human
aaaaaugguuuaaaugg

SEQ ID NO: 1970636 - RNA, 12 nt, Human
gggaccagcuug

SEQ ID NO: 1970637 - RNA, 21 nt, Human
gggaccacaggugcccgccac

SEQ ID NO: 1970638 - RNA, 20 nt, Human
gggaccagagcugccaccug

SEQ ID NO: 1970639 - RNA, 14 nt, Human
gggaccagagcugc

SEQ ID NO: 1970640 - RNA, 11 nt, Human
aaaaccaggcc

SEQ ID NO: 1970641 - RNA, 12 nt, Human
aaaacccaagug

SEQ ID NO: 1970642 - RNA, 22 nt, Human
aaaacaucauuccuuuuuauuu

SEQ ID NO: 1970643 - RNA, 13 nt, Human
aaaacaugcuaca

SEQ ID NO: 1970644 - RNA, 14 nt, Human
aaaacaugcuacac

SEQ ID NO: 1970645 - RNA, 23 nt, Human
aaaagauguagauuuauuucauc

SEQ ID NO: 1970646 - RNA, 15 nt, Human
aaaacuucagacaua

SEQ ID NO: 1970647 - RNA, 23 nt, Human
aaaacugaaagugaaaguccaga

SEQ ID NO: 1970648 - RNA, 21 nt, Human
aaaacucuuuaacuuguaaua

SEQ ID NO: 1970649 - RNA, 13 nt, Human
aaaacucuuuaac

SEQ ID NO: 1970650 - RNA, 12 nt, Human
aaaacucuuuaa

SEQ ID NO: 1970651 - RNA, 18 nt, Human
aaaacucuccucugcugc

SEQ ID NO: 1970652 - RNA, 15 nt, Human
aaaacgauuuaauuu

SEQ ID NO: 1970653 - RNA, 16 nt, Human
aaaacgauuuaauuua

SEQ ID NO: 1970654 - RNA, 17 nt, Human
aaaacgauuuaauuuau

SEQ ID NO: 1970655 - RNA, 18 nt, Human
aaaaccugggauuauaua

SEQ ID NO: 1970656 - RNA, 14 nt, Human
aaaaccaggcuuuc

SEQ ID NO: 1970657 - RNA, 16 nt, Human
aaaaccaggcuuucua

SEQ ID NO: 1970658 - RNA, 13 nt, Human
aaaagcuuuguuu

SEQ ID NO: 1970659 - RNA, 19 nt, Human
aaaagcuuuguuuguucuu

SEQ ID NO: 1970660 - RNA, 18 nt, Human
aaaagccaagaggcugca

SEQ ID NO: 1970661 - RNA, 16 nt, Human
aaaagcauuuuguaau

SEQ ID NO: 1970662 - RNA, 14 nt, Human
aaaagcauuuugua

SEQ ID NO: 1970663 - RNA, 15 nt, Human
aaaagcauuuuguaa

SEQ ID NO: 1970664 - RNA, 23 nt, Human
aaaagccagguuccacagaggac

SEQ ID NO: 1970665 - RNA, 14 nt, Human
aaaagcccaggagc

SEQ ID NO: 1970666 - RNA, 17 nt, Human
aaaagcccaggagccca

SEQ ID NO: 1970667 - RNA, 13 nt, Human
aaaagcccaaccu

SEQ ID NO: 1970668 - RNA, 15 nt, Human
aaaagcccaaccucu

SEQ ID NO: 1970669 - RNA, 20 nt, Human
aaaagcccaaccucuuccuc

SEQ ID NO: 1970670 - RNA, 21 nt, Human
gggagaaccaaaaagaggcua

SEQ ID NO: 1970671 - RNA, 15 nt, Human
gggacuuggaagcuc

SEQ ID NO: 1970672 - RNA, 17 nt, Human
gggacuuggaagcuccg

SEQ ID NO: 1970673 - RNA, 18 nt, Human
gggacuuggaagcuccgc

SEQ ID NO: 1970674 - RNA, 23 nt, Human
gggacuuggaagcuccgcuuucu

SEQ ID NO: 1970675 - RNA, 13 nt, Human
gggagccaggagg

SEQ ID NO: 1970676 - RNA, 15 nt, Human
gggagcagggaaggc

SEQ ID NO: 1970677 - RNA, 19 nt, Human
gggagagccuuccaggggu

SEQ ID NO: 1970678 - RNA, 15 nt, Human
gggagagccuuccag

SEQ ID NO: 1970679 - RNA, 23 nt, Human
gggagcaggcucgggcuccccag

SEQ ID NO: 1970680 - RNA, 12 nt, Human
gggagagcugaa

SEQ ID NO: 1970681 - RNA, 16 nt, Human
gggagggagggcucca

SEQ ID NO: 1970682 - RNA, 15 nt, Human
gggagggagggcucc

SEQ ID NO: 1970683 - RNA, 18 nt, Human
gggaggucaaggcugcag

SEQ ID NO: 1970684 - RNA, 15 nt, Human
gggaggucgaggcag

SEQ ID NO: 1970685 - RNA, 14 nt, Human
guagacuacuguuc

SEQ ID NO: 1970686 - RNA, 18 nt, Human
guagacuggccugaacca

SEQ ID NO: 1970687 - RNA, 11 nt, Human
guagagacagg

SEQ ID NO: 1970688 - RNA, 12 nt, Human
guagagacaggg

SEQ ID NO: 1970689 - RNA, 15 nt, Human
guagagccagggucu

SEQ ID NO: 1970690 - RNA, 18 nt, Human
guagagccagggucucac

SEQ ID NO: 1970691 - RNA, 21 nt, Human
guagccucaaucgagugagac

SEQ ID NO: 1970692 - RNA, 13 nt, Human
guagagacagggu

SEQ ID NO: 1970693 - RNA, 10 nt, Human
guagagccag

SEQ ID NO: 1970694 - RNA, 15 nt, Human
guagagccagagguc

SEQ ID NO: 1970695 - RNA, 23 nt, Human
guagagacaggguuucaccaugu

SEQ ID NO: 1970696 - RNA, 11 nt, Human
guagagccagg

SEQ ID NO: 1970697 - RNA, 14 nt, Human
guagaauguuuuca

SEQ ID NO: 1970698 - RNA, 18 nt, Human
guagaaugaccuuguaau

SEQ ID NO: 1970699 - RNA, 20 nt, Human
guagaaugaccuuguaaugu

SEQ ID NO: 1970700 - RNA, 22 nt, Human
guagaaugaccuuguaauguaa

SEQ ID NO: 1970701 - RNA, 23 nt, Human
guagaaugaccuuguaauguaac

SEQ ID NO: 1970702 - RNA, 18 nt, Human
guagaagcccuucuaccu

SEQ ID NO: 1970703 - RNA, 21 nt, Human
guagaacuuuguauaguuaug

SEQ ID NO: 1970704 - RNA, 21 nt, Human
guagaagucuuagauguauau

SEQ ID NO: 1970705 - RNA, 16 nt, Human
guagaacgccagggac

SEQ ID NO: 1970706 - RNA, 22 nt, Human
guagaacgccagggaccccaga

SEQ ID NO: 1970707 - RNA, 13 nt, Human
guagaacuuugua

SEQ ID NO: 1970708 - RNA, 14 nt, Human
guagaacuuuguau

SEQ ID NO: 1970709 - RNA, 15 nt, Human
guagaacuuuguaua

SEQ ID NO: 1970710 - RNA, 23 nt, Human
guagaaauaucugaaaauguaug

SEQ ID NO: 1970711 - RNA, 21 nt, Human
guagaaauaucugaaaaugua

SEQ ID NO: 1970712 - RNA, 20 nt, Human
guagaaauaucugaaaaugu

SEQ ID NO: 1970713 - RNA, 19 nt, Human
guacuccacauauuucagu

SEQ ID NO: 1970714 - RNA, 14 nt, Human
guacuccucccagg

SEQ ID NO: 1970715 - RNA, 17 nt, Human
guacuauguaucaauga

SEQ ID NO: 1970716 - RNA, 15 nt, Human
guacuauguaucaau

SEQ ID NO: 1970717 - RNA, 19 nt, Human
guacuaguggcauggagaa

SEQ ID NO: 1970718 - RNA, 17 nt, Human
guacuacaguccuccca

SEQ ID NO: 1970719 - RNA, 13 nt, Human
guacuauguauca

SEQ ID NO: 1970720 - RNA, 20 nt, Human
guacuaguggcauggagaau

SEQ ID NO: 1970721 - RNA, 19 nt, Human
guacuaucuuaucucagau

SEQ ID NO: 1970722 - RNA, 19 nt, Human
guacuacaguccucccauc

SEQ ID NO: 1970723 - RNA, 18 nt, Human
guacuacaguccucccau

SEQ ID NO: 1970724 - RNA, 13 nt, Human
guacccacugcuc

SEQ ID NO: 1970725 - RNA, 14 nt, Human
guacccacugcucu

SEQ ID NO: 1970726 - RNA, 16 nt, Human
guacuggagaaaaugg

SEQ ID NO: 1970727 - RNA, 14 nt, Human
guacuggauuuaac

SEQ ID NO: 1970728 - RNA, 17 nt, Human
guacugagcagugauau

SEQ ID NO: 1970729 - RNA, 23 nt, Human
guacugaaagccuuagggaagcu

SEQ ID NO: 1970730 - RNA, 14 nt, Human
guacugaaagccuu

SEQ ID NO: 1970731 - RNA, 22 nt, Human
guacugaaagccuuagggaagc

SEQ ID NO: 1970732 - RNA, 21 nt, Human
guacugccccccaugaggaag

SEQ ID NO: 1970733 - RNA, 22 nt, Human
guacugccccccaugaggaagg

SEQ ID NO: 1970734 - RNA, 23 nt, Human
guacugccccccaugaggaagga

SEQ ID NO: 1970735 - RNA, 19 nt, Human
guacugccccccaugagga

SEQ ID NO: 1970736 - RNA, 11 nt, Human
guacugugaau

SEQ ID NO: 1970737 - RNA, 21 nt, Human
aaaucagacuaugaaguuuuu

SEQ ID NO: 1970738 - RNA, 14 nt, Human
aaaucagacuauga

SEQ ID NO: 1970739 - RNA, 15 nt, Human
aaauauuccugcauu

SEQ ID NO: 1970740 - RNA, 14 nt, Human
aaauauuagcaaag

SEQ ID NO: 1970741 - RNA, 21 nt, Human
aaauauacauguuuauguaaa

SEQ ID NO: 1970742 - RNA, 23 nt, Human
aaauauacauguuuauguaaaca

SEQ ID NO: 1970743 - RNA, 17 nt, Human
aaauauacauguuuaug

SEQ ID NO: 1970744 - RNA, 18 nt, Human
aaauauacauguuuaugu

SEQ ID NO: 1970745 - RNA, 19 nt, Human
aaauauacauguuuaugua

SEQ ID NO: 1970746 - RNA, 20 nt, Human
aaauauacauguuuauguaa

SEQ ID NO: 1970747 - RNA, 18 nt, Human
aaaucagccugcuccagc

SEQ ID NO: 1970748 - RNA, 16 nt, Human
aaaucagcugcuacua

SEQ ID NO: 1970749 - RNA, 12 nt, Human
aaaucagccugc

SEQ ID NO: 1970750 - RNA, 19 nt, Human
aaaucagccguguaaccau

SEQ ID NO: 1970751 - RNA, 15 nt, Human
aaaucaguaaacacu

SEQ ID NO: 1970752 - RNA, 15 nt, Human
aaauccacuuuaucu

SEQ ID NO: 1970753 - RNA, 15 nt, Human
aaauccaaauauugu

SEQ ID NO: 1970754 - RNA, 14 nt, Human
aaauccaaauauug

SEQ ID NO: 1970755 - RNA, 16 nt, Human
aaauccaaauauuguu

SEQ ID NO: 1970756 - RNA, 17 nt, Human
aaauccaaauauuguua

SEQ ID NO: 1970757 - RNA, 18 nt, Human
aaauccaaauauuguuaa

SEQ ID NO: 1970758 - RNA, 22 nt, Human
aaaucauacuccuaugcuuuag

SEQ ID NO: 1970759 - RNA, 14 nt, Human
guaccauuaaaaua

SEQ ID NO: 1970760 - RNA, 15 nt, Human
guaccauuaaaauau

SEQ ID NO: 1970761 - RNA, 22 nt, Human
guaccauuuaauggggaggaca

SEQ ID NO: 1970762 - RNA, 16 nt, Human
guaccauuaaaauaug

SEQ ID NO: 1970763 - RNA, 17 nt, Human
guaccauuaaaauaugc

SEQ ID NO: 1970764 - RNA, 21 nt, Human
guaccaguucuuuaagaagau

SEQ ID NO: 1970765 - RNA, 18 nt, Human
guaccauuaaaauaugca

SEQ ID NO: 1970766 - RNA, 23 nt, Human
guaccauuuaauggggaggacaa

SEQ ID NO: 1970767 - RNA, 12 nt, Human
guacccacugcu

SEQ ID NO: 1970768 - RNA, 18 nt, Human
guaccacugaaucuguac

SEQ ID NO: 1970769 - RNA, 19 nt, Human
guaccacugaaucuguaca

SEQ ID NO: 1970770 - RNA, 13 nt, Human
guaccagccccac

SEQ ID NO: 1970771 - RNA, 16 nt, Human
guaccagccccacccu

SEQ ID NO: 1970772 - RNA, 23 nt, Human
guaccaagacuacuagggaaaug

SEQ ID NO: 1970773 - RNA, 20 nt, Human
guaccaagacuacuagggaa

SEQ ID NO: 1970774 - RNA, 17 nt, Human
guaccacugaaucugua

SEQ ID NO: 1970775 - RNA, 22 nt, Human
guaccaaugcagaacucccaag

SEQ ID NO: 1970776 - RNA, 14 nt, Human
guacauuuuuugaa

SEQ ID NO: 1970777 - RNA, 20 nt, Human
guacauuuuuugaaaugcug

SEQ ID NO: 1970778 - RNA, 19 nt, Human
guacauuuuuugaaaugcu

SEQ ID NO: 1970779 - RNA, 18 nt, Human
guacauuucuaagucaaa

SEQ ID NO: 1970780 - RNA, 15 nt, Human
guacauucucaguuu

SEQ ID NO: 1970781 - RNA, 14 nt, Human
guacaugaaaacac

SEQ ID NO: 1970782 - RNA, 15 nt, Human
guacaugaaaacaca

SEQ ID NO: 1970783 - RNA, 16 nt, Human
guacaugaaaacacau

SEQ ID NO: 1970784 - RNA, 11 nt, Human
aaauccagaaa

SEQ ID NO: 1970785 - RNA, 22 nt, Human
aaauccagaaacuuguucuucc

SEQ ID NO: 1970786 - RNA, 23 nt, Human
aaauccagaaacuuguucuucca

SEQ ID NO: 1970787 - RNA, 11 nt, Human
aaauccaggac

SEQ ID NO: 1970788 - RNA, 12 nt, Human
aaauccaggacc

SEQ ID NO: 1970789 - RNA, 13 nt, Human
aaauccaggaccc

SEQ ID NO: 1970790 - RNA, 19 nt, Human
aaauccaggacccugccag

SEQ ID NO: 1970791 - RNA, 21 nt, Human
aaauccaggacccugccaggc

SEQ ID NO: 1970792 - RNA, 17 nt, Human
guacaugaaaacacauu

SEQ ID NO: 1970793 - RNA, 18 nt, Human
guacaugaaaacacauuu

SEQ ID NO: 1970794 - RNA, 19 nt, Human
guacaugaaaacacauuuu

SEQ ID NO: 1970795 - RNA, 20 nt, Human
guacaugaaaacacauuuuu

SEQ ID NO: 1970796 - RNA, 12 nt, Human
guacaugggacu

SEQ ID NO: 1970797 - RNA, 19 nt, Human
guacauggaauaacaugua

SEQ ID NO: 1970798 - RNA, 22 nt, Human
guacaugggacuaugcuuuucu

SEQ ID NO: 1970799 - RNA, 13 nt, Human
guacauguauuaa

SEQ ID NO: 1970800 - RNA, 16 nt, Human
guacauguauuaaauu

SEQ ID NO: 1970801 - RNA, 20 nt, Human
aaagguauuuuaaucaccaa

SEQ ID NO: 1970802 - RNA, 20 nt, Human
aaaguacacuguuucaaacu

SEQ ID NO: 1970803 - RNA, 20 nt, Human
aaaggucaccucacucagca

SEQ ID NO: 1970804 - RNA, 24 nt, Human
aaaggucaccucacucagcaccac

SEQ ID NO: 1970805 - RNA, 16 nt, Human
aaaggucaccucacuc

SEQ ID NO: 1970806 - RNA, 19 nt, Human
aaaggucaccucacucagc

SEQ ID NO: 1970807 - RNA, 18 nt, Human
aaaguacagguacuuugu

SEQ ID NO: 1970808 - RNA, 20 nt, Human
aaaguacagguacuuugucu

SEQ ID NO: 1970809 - RNA, 22 nt, Human
aaaguacagguacuuugucuaa

SEQ ID NO: 1970810 - RNA, 23 nt, Human
aaaggucuuggugccucugcagu

SEQ ID NO: 1970811 - RNA, 14 nt, Human
aaaguacagguacu

SEQ ID NO: 1970812 - RNA, 16 nt, Human
aaaguacagguacuuu

SEQ ID NO: 1970813 - RNA, 19 nt, Human
aaaguacuucuccacccug

SEQ ID NO: 1970814 - RNA, 15 nt, Human
aaaguacauuuuuug

SEQ ID NO: 1970815 - RNA, 18 nt, Human
aaaguacauuuuuugaaa

SEQ ID NO: 1970816 - RNA, 19 nt, Human
aaaguacauuuuuugaaau

SEQ ID NO: 1970817 - RNA, 18 nt, Human
aaaguacugagcagugau

SEQ ID NO: 1970818 - RNA, 18 nt, Human
aaaguaucccuacuguaa

SEQ ID NO: 1970819 - RNA, 23 nt, Human
aaaguacuucuccacccugcucu

SEQ ID NO: 1970820 - RNA, 21 nt, Human
aaaguacugagcagugauauu

SEQ ID NO: 1970821 - RNA, 20 nt, Human
aaaguacuucuccacccugc

SEQ ID NO: 1970822 - RNA, 21 nt, Human
aaaguacuucuccacccugcu

SEQ ID NO: 1970823 - RNA, 16 nt, Human
aaaguauucucuuuuc

SEQ ID NO: 1970824 - RNA, 13 nt, Human
aaaguauugccaa

SEQ ID NO: 1970825 - RNA, 14 nt, Human
aaaguauugccaaa

SEQ ID NO: 1970826 - RNA, 15 nt, Human
aaaguauugccaaac

SEQ ID NO: 1970827 - RNA, 18 nt, Human
aaaguauugccaaacauu

SEQ ID NO: 1970828 - RNA, 16 nt, Human
aaaguuaccagugccu

SEQ ID NO: 1970829 - RNA, 22 nt, Human
aaaguuaccagugccuuaaacu

SEQ ID NO: 1970830 - RNA, 14 nt, Human
aaaguauucucuuu

SEQ ID NO: 1970831 - RNA, 16 nt, Human
aaaguauguuuuacuu

SEQ ID NO: 1970832 - RNA, 19 nt, Human
aaaguauugccaaacauua

SEQ ID NO: 1970833 - RNA, 15 nt, Human
aaaguuauuaaaauu

SEQ ID NO: 1970834 - RNA, 16 nt, Human
aaaguuauuaaaauug

SEQ ID NO: 1970835 - RNA, 23 nt, Human
aaaguucugcagauaaacaguag

SEQ ID NO: 1970836 - RNA, 12 nt, Human
aaauaagaaaag

SEQ ID NO: 1970837 - RNA, 13 nt, Human
aaauaagaaaaga

SEQ ID NO: 1970838 - RNA, 22 nt, Human
aaauaagaaaagauguagauuu

SEQ ID NO: 1970839 - RNA, 18 nt, Human
aaauaauaucucuaauau

SEQ ID NO: 1970840 - RNA, 19 nt, Human
aaauaauaccuuagaaggu

SEQ ID NO: 1970841 - RNA, 12 nt, Human
aaauaauuuugu

SEQ ID NO: 1970842 - RNA, 16 nt, Human
aaauaauuuacuguga

SEQ ID NO: 1970843 - RNA, 13 nt, Human
aaauaauuuugua

SEQ ID NO: 1970844 - RNA, 14 nt, Human
aaauaauuuuguaa

SEQ ID NO: 1970845 - RNA, 22 nt, Human
aaauaauucuuuuuuauuaauc

SEQ ID NO: 1970846 - RNA, 18 nt, Human
aaauaauuuuauuccaga

SEQ ID NO: 1970847 - RNA, 15 nt, Human
guaaacaucucagag

SEQ ID NO: 1970848 - RNA, 14 nt, Human
guaaaccugucuga

SEQ ID NO: 1970849 - RNA, 13 nt, Human
aaauaacuguaau

SEQ ID NO: 1970850 - RNA, 15 nt, Human
aaauaacuguaauua

SEQ ID NO: 1970851 - RNA, 16 nt, Human
aaauaacuguaauuau

SEQ ID NO: 1970852 - RNA, 21 nt, Human
aaauaacuguaauuauuugaa

SEQ ID NO: 1970853 - RNA, 22 nt, Human
aaauaacuguaauuauuugaau

SEQ ID NO: 1970854 - RNA, 18 nt, Human
aaaguuguaugaucugug

SEQ ID NO: 1970855 - RNA, 19 nt, Human
aaaguuguaugaucugugc

SEQ ID NO: 1970856 - RNA, 14 nt, Human
aaaguuguacuuua

SEQ ID NO: 1970857 - RNA, 15 nt, Human
aaaguuguacuuuaa

SEQ ID NO: 1970858 - RNA, 16 nt, Human
aaaguuguacuuuaaa

SEQ ID NO: 1970859 - RNA, 19 nt, Human
aaaguuguacuuuaaaaau

SEQ ID NO: 1970860 - RNA, 17 nt, Human
aaaguuguaugaucugu

SEQ ID NO: 1970861 - RNA, 17 nt, Human
aaaguugguaaaccuuu

SEQ ID NO: 1970862 - RNA, 16 nt, Human
aaaguugguaaaccuu

SEQ ID NO: 1970863 - RNA, 14 nt, Human
guaauaugcacaca

SEQ ID NO: 1970864 - RNA, 16 nt, Human
guaauaugcacacauu

SEQ ID NO: 1970865 - RNA, 17 nt, Human
guaauaugcacacauuu

SEQ ID NO: 1970866 - RNA, 18 nt, Human
guaauaugcacacauuuu

SEQ ID NO: 1970867 - RNA, 21 nt, Human
guaauccaagcaaaugugaau

SEQ ID NO: 1970868 - RNA, 12 nt, Human
guaauauauuua

SEQ ID NO: 1970869 - RNA, 19 nt, Human
guaauuuaaaauugugaug

SEQ ID NO: 1970870 - RNA, 20 nt, Human
guaauuuaaaauugugaugu

SEQ ID NO: 1970871 - RNA, 17 nt, Human
guaauuguuguuuguau

SEQ ID NO: 1970872 - RNA, 19 nt, Human
guaauuguuguuuguaugu

SEQ ID NO: 1970873 - RNA, 21 nt, Human
guaauuguuguuuguauguau

SEQ ID NO: 1970874 - RNA, 23 nt, Human
guaauuguuguuuguauguauaa

SEQ ID NO: 1970875 - RNA, 12 nt, Human
guaauuguucca

SEQ ID NO: 1970876 - RNA, 21 nt, Human
guaauuguuccagagacaaau

SEQ ID NO: 1970877 - RNA, 23 nt, Human
guaauuuaaaauugugauguguc

SEQ ID NO: 1970878 - RNA, 22 nt, Human
guaauuugugauacaaugcugu

SEQ ID NO: 1970879 - RNA, 20 nt, Human
guaauaggcguaacuaauuu

SEQ ID NO: 1970880 - RNA, 14 nt, Human
guaauauaauacac

SEQ ID NO: 1970881 - RNA, 21 nt, Human
guaauauaauacacaaaauca

SEQ ID NO: 1970882 - RNA, 22 nt, Human
guaauauaauacacaaaaucaa

SEQ ID NO: 1970883 - RNA, 15 nt, Human
guaauaaagacucua

SEQ ID NO: 1970884 - RNA, 14 nt, Human
guaaacuuugaaau

SEQ ID NO: 1970885 - RNA, 16 nt, Human
guaaacuuugaaauau

SEQ ID NO: 1970886 - RNA, 14 nt, Human
guaaagaaaaauau

SEQ ID NO: 1970887 - RNA, 15 nt, Human
guaaagaaaaauauu

SEQ ID NO: 1970888 - RNA, 17 nt, Human
guaaagaaaaauauuua

SEQ ID NO: 1970889 - RNA, 21 nt, Human
guaaagaaaaauauuuaaugu

SEQ ID NO: 1970890 - RNA, 22 nt, Human
guaacugcucuugggcaauauu

SEQ ID NO: 1970891 - RNA, 13 nt, Human
aaauauacauguu

SEQ ID NO: 1970892 - RNA, 14 nt, Human
aaauauacauguuu

SEQ ID NO: 1970893 - RNA, 15 nt, Human
aaauauacauguuua

SEQ ID NO: 1970894 - RNA, 16 nt, Human
aaauauacauguuuau

SEQ ID NO: 1970895 - RNA, 14 nt, Human
aaauacuguacaau

SEQ ID NO: 1970896 - RNA, 15 nt, Human
aaauacuguacaaug

SEQ ID NO: 1970897 - RNA, 22 nt, Human
aaauacgugggcauucaaaugu

SEQ ID NO: 1970898 - RNA, 17 nt, Human
aaauacauuuaaaacau

SEQ ID NO: 1970899 - RNA, 19 nt, Human
aaauacauucuuuuugcuc

SEQ ID NO: 1970900 - RNA, 23 nt, Human
aaauaccaaaccuucugacuuug

SEQ ID NO: 1970901 - RNA, 20 nt, Human
aaauaccacaaucaccgaug

SEQ ID NO: 1970902 - RNA, 18 nt, Human
aaauaccagccaguaaau

SEQ ID NO: 1970903 - RNA, 18 nt, Human
aaauacauucuuuuugcu

SEQ ID NO: 1970904 - RNA, 13 nt, Human
aaauacauucuuu

SEQ ID NO: 1970905 - RNA, 17 nt, Human
aaauacagauagauaua

SEQ ID NO: 1970906 - RNA, 15 nt, Human
aaauacagacuggau

SEQ ID NO: 1970907 - RNA, 16 nt, Human
aaauacagauaaauga

SEQ ID NO: 1970908 - RNA, 20 nt, Human
aaauacagauaaaugauuca

SEQ ID NO: 1970909 - RNA, 22 nt, Human
aaauacagauaaaugauucaaa

SEQ ID NO: 1970910 - RNA, 14 nt, Human
aaauacaugaugau

SEQ ID NO: 1970911 - RNA, 20 nt, Human
aaauacaugaugauuucaga

SEQ ID NO: 1970912 - RNA, 17 nt, Human
guacacugaauuuuuau

SEQ ID NO: 1970913 - RNA, 13 nt, Human
guacacugccugc

SEQ ID NO: 1970914 - RNA, 17 nt, Human
guacacugccugccuua

SEQ ID NO: 1970915 - RNA, 14 nt, Human
guaauuuuguguaa

SEQ ID NO: 1970916 - RNA, 16 nt, Human
guaauuuuguguaaga

SEQ ID NO: 1970917 - RNA, 20 nt, Human
guaauuuuguguaagaaaua

SEQ ID NO: 1970918 - RNA, 13 nt, Human
guaauuuuucugu

SEQ ID NO: 1970919 - RNA, 15 nt, Human
guaauuuuucuguau

SEQ ID NO: 1970920 - RNA, 16 nt, Human
guaauuuuucuguaua

SEQ ID NO: 1970921 - RNA, 21 nt, Human
guaauuuuucuguauagacag

SEQ ID NO: 1970922 - RNA, 16 nt, Human
guacacccaugaaaga

SEQ ID NO: 1970923 - RNA, 17 nt, Human
guacacccaugaaagaa

SEQ ID NO: 1970924 - RNA, 18 nt, Human
guacacccaugaaagaaa

SEQ ID NO: 1970925 - RNA, 15 nt, Human
ggggccucagugcca

SEQ ID NO: 1970926 - RNA, 12 nt, Human
gggggccucagu

SEQ ID NO: 1970927 - RNA, 15 nt, Human
gggggccucagugcc

SEQ ID NO: 1970928 - RNA, 17 nt, Human
gggggccucagugccac

SEQ ID NO: 1970929 - RNA, 18 nt, Human
gggggccucagugccacu

SEQ ID NO: 1970930 - RNA, 11 nt, Human
ggggagaaagu

SEQ ID NO: 1970931 - RNA, 15 nt, Human
ggggacugccaccuc

SEQ ID NO: 1970932 - RNA, 17 nt, Human
ggggacugccaccuccc

SEQ ID NO: 1970933 - RNA, 14 nt, Human
ggggacugccaccu

SEQ ID NO: 1970934 - RNA, 12 nt, Human
aaacauguaugu

SEQ ID NO: 1970935 - RNA, 13 nt, Human
aaacauguaugug

SEQ ID NO: 1970936 - RNA, 17 nt, Human
aaacauggccuuugcuu

SEQ ID NO: 1970937 - RNA, 17 nt, Human
aaacaugguuugacucu

SEQ ID NO: 1970938 - RNA, 16 nt, Human
aaacauggccuuugcu

SEQ ID NO: 1970939 - RNA, 14 nt, Human
aaacaguagugaua

SEQ ID NO: 1970940 - RNA, 20 nt, Human
ggggacaaccuuggcuuggc

SEQ ID NO: 1970941 - RNA, 16 nt, Human
ggggaccagagcugcc

SEQ ID NO: 1970942 - RNA, 15 nt, Human
ggggaccagagcugc

SEQ ID NO: 1970943 - RNA, 15 nt, Human
ggggaccagcuuggc

SEQ ID NO: 1970944 - RNA, 18 nt, Human
ggggaauguuugccucug

SEQ ID NO: 1970945 - RNA, 22 nt, Human
ggggaauguuugccucugccuc

SEQ ID NO: 1970946 - RNA, 13 nt, Human
ggggaaggcaggg

SEQ ID NO: 1970947 - RNA, 11 nt, Human
aaacacauuuu

SEQ ID NO: 1970948 - RNA, 14 nt, Human
aaacacauaauuaa

SEQ ID NO: 1970949 - RNA, 18 nt, Human
aaacacauaauuaacacu

SEQ ID NO: 1970950 - RNA, 19 nt, Human
aaacacauaauuaacacuu

SEQ ID NO: 1970951 - RNA, 17 nt, Human
aaacaaaucuuuccaua

SEQ ID NO: 1970952 - RNA, 18 nt, Human
aaacacaaaacaaauccu

SEQ ID NO: 1970953 - RNA, 13 nt, Human
aaacaauucaaag

SEQ ID NO: 1970954 - RNA, 19 nt, Human
aaacacaaacgggcucagc

SEQ ID NO: 1970955 - RNA, 20 nt, Human
aaaauuuugauguuuuaagg

SEQ ID NO: 1970956 - RNA, 19 nt, Human
aaaauuuuaggcaaguuuu

SEQ ID NO: 1970957 - RNA, 20 nt, Human
aaacaaaggccuaauucuau

SEQ ID NO: 1970958 - RNA, 19 nt, Human
aaaauuuagaaauauaauu

SEQ ID NO: 1970959 - RNA, 19 nt, Human
aaaauuuacuacaauaugu

SEQ ID NO: 1970960 - RNA, 21 nt, Human
aaaauuuacuacaauauguac

SEQ ID NO: 1970961 - RNA, 12 nt, Human
aaaauuuuaagc

SEQ ID NO: 1970962 - RNA, 13 nt, Human
aaaauuuuaagcu

SEQ ID NO: 1970963 - RNA, 12 nt, Human
aaaauguuuuca

SEQ ID NO: 1970964 - RNA, 14 nt, Human
aaaauguuuucagc

SEQ ID NO: 1970965 - RNA, 17 nt, Human
gggaugauugaagaaac

SEQ ID NO: 1970966 - RNA, 15 nt, Human
gggaugauugaagaa

SEQ ID NO: 1970967 - RNA, 16 nt, Human
gggaugauugaagaaa

SEQ ID NO: 1970968 - RNA, 13 nt, Human
gggaugagaaagg

SEQ ID NO: 1970969 - RNA, 13 nt, Human
aaacucaucugga

SEQ ID NO: 1970970 - RNA, 18 nt, Human
aaacuauuuaaagaaaua

SEQ ID NO: 1970971 - RNA, 17 nt, Human
aaacucaaccaaauggu

SEQ ID NO: 1970972 - RNA, 18 nt, Human
aaacucaaccaaauggua

SEQ ID NO: 1970973 - RNA, 20 nt, Human
aaacucaaccaaaugguaca

SEQ ID NO: 1970974 - RNA, 22 nt, Human
aaacucaaccaaaugguacaaa

SEQ ID NO: 1970975 - RNA, 14 nt, Human
aaacucaagcuucu

SEQ ID NO: 1970976 - RNA, 13 nt, Human
aaacgucuuaaau

SEQ ID NO: 1970977 - RNA, 18 nt, Human
aaacguauaauauguaca

SEQ ID NO: 1970978 - RNA, 14 nt, Human
aaacgucuuaaaua

SEQ ID NO: 1970979 - RNA, 18 nt, Human
aaacuaggugcauauuua

SEQ ID NO: 1970980 - RNA, 15 nt, Human
aaacuaggcuccuuc

SEQ ID NO: 1970981 - RNA, 22 nt, Human
aaacuaggugcauauuuauaaa

SEQ ID NO: 1970982 - RNA, 20 nt, Human
ggguggcaucauuccaggcc

SEQ ID NO: 1970983 - RNA, 19 nt, Human
ggguggcaccagcagccug

SEQ ID NO: 1970984 - RNA, 17 nt, Human
aaacuuaaucuaaaugg

SEQ ID NO: 1970985 - RNA, 18 nt, Human
aaacuuaaucuaaaugga

SEQ ID NO: 1970986 - RNA, 16 nt, Human
aaacuuaaucuaaaug

SEQ ID NO: 1970987 - RNA, 14 nt, Human
aaacuuaaucuaaa

SEQ ID NO: 1970988 - RNA, 13 nt, Human
aaacucuccucug

SEQ ID NO: 1970989 - RNA, 22 nt, Human
aaacugcccccucugcccugcg

SEQ ID NO: 1970990 - RNA, 13 nt, Human
aaacucuaugguc

SEQ ID NO: 1970991 - RNA, 17 nt, Human
aaacucuauggucuuau

SEQ ID NO: 1970992 - RNA, 18 nt, Human
aaacucuauuuagaugca

SEQ ID NO: 1970993 - RNA, 19 nt, Human
aaacugcuuccuuucuuga

SEQ ID NO: 1970994 - RNA, 20 nt, Human
aaacugcuuccuuucuugau

SEQ ID NO: 1970995 - RNA, 14 nt, Human
aaacuggaaauacu

SEQ ID NO: 1970996 - RNA, 21 nt, Human
aaacuggaaauacuagauuug

SEQ ID NO: 1970997 - RNA, 13 nt, Human
aaacuggaaugag

SEQ ID NO: 1970998 - RNA, 15 nt, Human
aaacuggaaugagca

SEQ ID NO: 1970999 - RNA, 14 nt, Human
aaacuggaaugagc

SEQ ID NO: 1971000 - RNA, 21 nt, Human
aaacugucgugucauacucga

SEQ ID NO: 1971001 - RNA, 23 nt, Human
aaaccaagucaagugaaaaagga

SEQ ID NO: 1971002 - RNA, 16 nt, Human
aaaccaagccguggcu

SEQ ID NO: 1971003 - RNA, 15 nt, Human
aaacauuaugaugug

SEQ ID NO: 1971004 - RNA, 17 nt, Human
aaacauuaguacuuuau

SEQ ID NO: 1971005 - RNA, 21 nt, Human
aaacauuaguacuuuauagaa

SEQ ID NO: 1971006 - RNA, 24 nt, Human
aaacauuaguacuuuauagaagaa

SEQ ID NO: 1971007 - RNA, 14 nt, Human
aaacauuaauguug

SEQ ID NO: 1971008 - RNA, 15 nt, Human
aaacauuaauguuga

SEQ ID NO: 1971009 - RNA, 16 nt, Human
aaacauuaauguugau

SEQ ID NO: 1971010 - RNA, 19 nt, Human
aaacauuaauguugauuuc

SEQ ID NO: 1971011 - RNA, 20 nt, Human
aaacauuaauguugauuucu

SEQ ID NO: 1971012 - RNA, 22 nt, Human
aaacauuaauguugauuucuag

SEQ ID NO: 1971013 - RNA, 24 nt, Human
aaacauuaauguugauuucuaguu

SEQ ID NO: 1971014 - RNA, 14 nt, Human
aaacauuaguacuu

SEQ ID NO: 1971015 - RNA, 22 nt, Human
aaaccucuccucauguucugcu

SEQ ID NO: 1971016 - RNA, 11 nt, Human
aaaccucuccu

SEQ ID NO: 1971017 - RNA, 12 nt, Human
aaaccuuucccc

SEQ ID NO: 1971018 - RNA, 18 nt, Human
aaaccuuucuauaauuuu

SEQ ID NO: 1971019 - RNA, 18 nt, Human
aaaccuuuuauauuuagu

SEQ ID NO: 1971020 - RNA, 18 nt, Human
aaaccuuuguuugcaucu

SEQ ID NO: 1971021 - RNA, 15 nt, Human
aaacgggcucagcaa

SEQ ID NO: 1971022 - RNA, 21 nt, Human
aaaccuuucuauaauuuuaca

SEQ ID NO: 1971023 - RNA, 19 nt, Human
ggguccaguggaugccaca

SEQ ID NO: 1971024 - RNA, 20 nt, Human
ggguccaggccuacuccugu

SEQ ID NO: 1971025 - RNA, 19 nt, Human
gggggugcugggccccugc

SEQ ID NO: 1971026 - RNA, 11 nt, Human
ggggggcagag

SEQ ID NO: 1971027 - RNA, 13 nt, Human
ggggggcagagcc

SEQ ID NO: 1971028 - RNA, 15 nt, Human
gggucgcccuggacu

SEQ ID NO: 1971029 - RNA, 13 nt, Human
gggucgcccugga

SEQ ID NO: 1971030 - RNA, 14 nt, Human
gggucgccuguccu

SEQ ID NO: 1971031 - RNA, 17 nt, Human
ggguccccuccaggagu

SEQ ID NO: 1971032 - RNA, 16 nt, Human
ggguccccagcccuuc

SEQ ID NO: 1971033 - RNA, 16 nt, Human
ggguccccuccaggag

SEQ ID NO: 1971034 - RNA, 15 nt, Human
ggguccuucuccaca

SEQ ID NO: 1971035 - RNA, 15 nt, Human
aaagaggaaugaagu

SEQ ID NO: 1971036 - RNA, 21 nt, Human
aaagagauuuaaacucugaau

SEQ ID NO: 1971037 - RNA, 14 nt, Human
aaagaugcuucuca

SEQ ID NO: 1971038 - RNA, 17 nt, Human
aaagaugcuucucacug

SEQ ID NO: 1971039 - RNA, 19 nt, Human
aaagaugcuucucacugcc

SEQ ID NO: 1971040 - RNA, 13 nt, Human
aaagacuguacaa

SEQ ID NO: 1971041 - RNA, 23 nt, Human
aaagacugaguacguugugcauu

SEQ ID NO: 1971042 - RNA, 14 nt, Human
aaagacugaucuca

SEQ ID NO: 1971043 - RNA, 11 nt, Human
aaagacuggca

SEQ ID NO: 1971044 - RNA, 19 nt, Human
aaagagaugaugaaaauau

SEQ ID NO: 1971045 - RNA, 20 nt, Human
aaagagaugaugaaaauauu

SEQ ID NO: 1971046 - RNA, 22 nt, Human
aaagagaugaugaaaauauuua

SEQ ID NO: 1971047 - RNA, 15 nt, Human
aaagagauuuaaacu

SEQ ID NO: 1971048 - RNA, 14 nt, Human
aaagacuguacaaa

SEQ ID NO: 1971049 - RNA, 14 nt, Human
gguccugcugcagu

SEQ ID NO: 1971050 - RNA, 12 nt, Human
gguccugcugca

SEQ ID NO: 1971051 - RNA, 11 nt, Human
gguccugcugc

SEQ ID NO: 1971052 - RNA, 14 nt, Human
gguccuucuccaca

SEQ ID NO: 1971053 - RNA, 13 nt, Human
gguccugcucagc

SEQ ID NO: 1971054 - RNA, 23 nt, Human
aaagauggcugugccucugccug

SEQ ID NO: 1971055 - RNA, 21 nt, Human
aaagauggcugugccucugcc

SEQ ID NO: 1971056 - RNA, 22 nt, Human
aaagauggcugugccucugccu

SEQ ID NO: 1971057 - RNA, 22 nt, Human
aaagacagggcugauaagcuaa

SEQ ID NO: 1971058 - RNA, 14 nt, Human
aaagacaugaaauu

SEQ ID NO: 1971059 - RNA, 15 nt, Human
aaagacccaggggga

SEQ ID NO: 1971060 - RNA, 16 nt, Human
aaagacccagggggag

SEQ ID NO: 1971061 - RNA, 22 nt, Human
aaagaccuggggcugcugugaa

SEQ ID NO: 1971062 - RNA, 13 nt, Human
aaagacagugaaa

SEQ ID NO: 1971063 - RNA, 19 nt, Human
ggguggggggcuucauaca

SEQ ID NO: 1971064 - RNA, 19 nt, Human
aaacuucagacauagaauu

SEQ ID NO: 1971065 - RNA, 17 nt, Human
ggguggggggcuucaua

SEQ ID NO: 1971066 - RNA, 14 nt, Human
ggguggccucccaa

SEQ ID NO: 1971067 - RNA, 19 nt, Human
aaacuuguaaauaaaggaa

SEQ ID NO: 1971068 - RNA, 16 nt, Human
aaacuuguauuaugug

SEQ ID NO: 1971069 - RNA, 21 nt, Human
aaacuuugagaucuaaaaaua

SEQ ID NO: 1971070 - RNA, 22 nt, Human
aaacuuugagaucuaaaaauaa

SEQ ID NO: 1971071 - RNA, 20 nt, Human
aaacuuugagaucuaaaaau

SEQ ID NO: 1971072 - RNA, 13 nt, Human
aaacuuugaaaua

SEQ ID NO: 1971073 - RNA, 15 nt, Human
aaacuuugaaauaua

SEQ ID NO: 1971074 - RNA, 12 nt, Human
aaacuuuguagu

SEQ ID NO: 1971075 - RNA, 21 nt, Human
aaacuuucuacucauuuuaau

SEQ ID NO: 1971076 - RNA, 15 nt, Human
aaacuuucuuaauau

SEQ ID NO: 1971077 - RNA, 12 nt, Human
aaacuuugaaau

SEQ ID NO: 1971078 - RNA, 22 nt, Human
aaaggaaagagggagguaagga

SEQ ID NO: 1971079 - RNA, 21 nt, Human
aaaggagagcuagcagcaggg

SEQ ID NO: 1971080 - RNA, 17 nt, Human
aaaggagauuggaagga

SEQ ID NO: 1971081 - RNA, 23 nt, Human
aaaggaagguaguucaagaaaug

SEQ ID NO: 1971082 - RNA, 14 nt, Human
aaagguaaaucaga

SEQ ID NO: 1971083 - RNA, 22 nt, Human
aaagggucuccgaaaugcuguc

SEQ ID NO: 1971084 - RNA, 16 nt, Human
aaaggagcaagaacuu

SEQ ID NO: 1971085 - RNA, 20 nt, Human
aaagggacugagaaauuuau

SEQ ID NO: 1971086 - RNA, 22 nt, Human
aaagggacuuggaagcuccgcu

SEQ ID NO: 1971087 - RNA, 21 nt, Human
aaagcugcucagggaaaagca

SEQ ID NO: 1971088 - RNA, 14 nt, Human
aaagcugcugugau

SEQ ID NO: 1971089 - RNA, 13 nt, Human
aaagcugcugaca

SEQ ID NO: 1971090 - RNA, 12 nt, Human
aaagcugaaaac

SEQ ID NO: 1971091 - RNA, 20 nt, Human
aaagcuuuguuuguucuugu

SEQ ID NO: 1971092 - RNA, 14 nt, Human
aaagcuuuguuugu

SEQ ID NO: 1971093 - RNA, 15 nt, Human
aaagcuuguuaagau

SEQ ID NO: 1971094 - RNA, 15 nt, Human
aaagcucacuuuacu

SEQ ID NO: 1971095 - RNA, 15 nt, Human
aaagcugaaaacugc

SEQ ID NO: 1971096 - RNA, 16 nt, Human
ggugcaaugaccuuuc

SEQ ID NO: 1971097 - RNA, 13 nt, Human
ggugcaaugaccu

SEQ ID NO: 1971098 - RNA, 18 nt, Human
ggugcaaaguucccuacu

SEQ ID NO: 1971099 - RNA, 12 nt, Human
ggugcaaugacc

SEQ ID NO: 1971100 - RNA, 18 nt, Human
ggugauccacccaccuca

SEQ ID NO: 1971101 - RNA, 23 nt, Human
ggugauccacccaccucagccuc

SEQ ID NO: 1971102 - RNA, 24 nt, Human
ggugauccacccaccucagccucc

SEQ ID NO: 1971103 - RNA, 13 nt, Human
ggugaacagaaca

SEQ ID NO: 1971104 - RNA, 13 nt, Human
ggucgaggcagga

SEQ ID NO: 1971105 - RNA, 14 nt, Human
ggucgcccuggacu

SEQ ID NO: 1971106 - RNA, 13 nt, Human
gguccuuuagaaa

SEQ ID NO: 1971107 - RNA, 15 nt, Human
gguggaauuauuuua

SEQ ID NO: 1971108 - RNA, 13 nt, Human
gguggaugccugg

SEQ ID NO: 1971109 - RNA, 10 nt, Human
ggugcuuucc

SEQ ID NO: 1971110 - RNA, 16 nt, Human
ggugcugggccccugc

SEQ ID NO: 1971111 - RNA, 15 nt, Human
ggugcugggccccug

SEQ ID NO: 1971112 - RNA, 13 nt, Human
ggugcugggcccc

SEQ ID NO: 1971113 - RNA, 11 nt, Human
ggugcugggcc

SEQ ID NO: 1971114 - RNA, 21 nt, Human
ggugcauuugaggucuguucu

SEQ ID NO: 1971115 - RNA, 21 nt, Human
ggugcauauuuauaaaaauaa

SEQ ID NO: 1971116 - RNA, 12 nt, Human
ggugcaggcagg

SEQ ID NO: 1971117 - RNA, 20 nt, Human
auuuuaaaagauaaauauua

SEQ ID NO: 1971118 - RNA, 20 nt, Human
auuuuaaaagaugcaaugua

SEQ ID NO: 1971119 - RNA, 23 nt, Human
auuuuaaaacuucaucugucugu

SEQ ID NO: 1971120 - RNA, 13 nt, Human
auuuuaaaacaau

SEQ ID NO: 1971121 - RNA, 18 nt, Human
auuuuaaaacaauaggau

SEQ ID NO: 1971122 - RNA, 14 nt, Human
auuuuaaaauaaac

SEQ ID NO: 1971123 - RNA, 16 nt, Human
auuuuaaaauaaacuu

SEQ ID NO: 1971124 - RNA, 17 nt, Human
auuuuaaaauaaacuuu

SEQ ID NO: 1971125 - RNA, 19 nt, Human
auuuuaaaauaaacuuucu

SEQ ID NO: 1971126 - RNA, 13 nt, Human
auuuuaacuuaga

SEQ ID NO: 1971127 - RNA, 12 nt, Human
auuuuaaaaugu

SEQ ID NO: 1971128 - RNA, 13 nt, Human
auuuuaaaaugua

SEQ ID NO: 1971129 - RNA, 14 nt, Human
auuuuaaaauguac

SEQ ID NO: 1971130 - RNA, 15 nt, Human
auuuuaaaauguaca

SEQ ID NO: 1971131 - RNA, 18 nt, Human
auuuuaaaauguacaugu

SEQ ID NO: 1971132 - RNA, 22 nt, Human
auuuuaaaauguacauguauua

SEQ ID NO: 1971133 - RNA, 22 nt, Human
auuuuaaaaauacagauagaua

SEQ ID NO: 1971134 - RNA, 23 nt, Human
auuugugaaaugauggugaaagu

SEQ ID NO: 1971135 - RNA, 15 nt, Human
auuugucauuuucau

SEQ ID NO: 1971136 - RNA, 17 nt, Human
auuugucauuuucauua

SEQ ID NO: 1971137 - RNA, 21 nt, Human
auuugucauuuucauuagcaa

SEQ ID NO: 1971138 - RNA, 21 nt, Human
auuugugaagguggaaauaaa

SEQ ID NO: 1971139 - RNA, 18 nt, Human
auuugugaagguggaaau

SEQ ID NO: 1971140 - RNA, 18 nt, Human
auuugggagaagggcaga

SEQ ID NO: 1971141 - RNA, 22 nt, Human
auuugggagaagggcagaguua

SEQ ID NO: 1971142 - RNA, 18 nt, Human
auuuguaaauuuauguga

SEQ ID NO: 1971143 - RNA, 14 nt, Human
auuugggcagagag

SEQ ID NO: 1971144 - RNA, 19 nt, Human
auuuguaaauuuaugugau

SEQ ID NO: 1971145 - RNA, 18 nt, Human
auuugacuuucugucugu

SEQ ID NO: 1971146 - RNA, 15 nt, Human
auuugacuguuauuu

SEQ ID NO: 1971147 - RNA, 16 nt, Human
auuugucacugcuuca

SEQ ID NO: 1971148 - RNA, 22 nt, Human
auuugucaguguagaucaacuc

SEQ ID NO: 1971149 - RNA, 14 nt, Human
auuugucauuuuca

SEQ ID NO: 1971150 - RNA, 20 nt, Human
auuuguauuaauuuguaaga

SEQ ID NO: 1971151 - RNA, 16 nt, Human
auuuguauuuauucuu

SEQ ID NO: 1971152 - RNA, 17 nt, Human
auuuguauuuauucuuu

SEQ ID NO: 1971153 - RNA, 19 nt, Human
auuucccaaagcagugcau

SEQ ID NO: 1971154 - RNA, 23 nt, Human
auuucccagcccucuucuucuca

SEQ ID NO: 1971155 - RNA, 18 nt, Human
auuucccaacacaaagau

SEQ ID NO: 1971156 - RNA, 19 nt, Human
auuucccaacacaaagauu

SEQ ID NO: 1971157 - RNA, 14 nt, Human
auuuauuuaaauuu

SEQ ID NO: 1971158 - RNA, 12 nt, Human
auuuauuuaaau

SEQ ID NO: 1971159 - RNA, 16 nt, Human
auuuauuuauuuauuc

SEQ ID NO: 1971160 - RNA, 20 nt, Human
auuuauuucuuuuuugccaa

SEQ ID NO: 1971161 - RNA, 14 nt, Human
auuuauuucaucau

SEQ ID NO: 1971162 - RNA, 17 nt, Human
auuucuaggacugaauu

SEQ ID NO: 1971163 - RNA, 18 nt, Human
auuucuaggacugaauua

SEQ ID NO: 1971164 - RNA, 17 nt, Human
auuucccugaaggaacc

SEQ ID NO: 1971165 - RNA, 23 nt, Human
auuucccugaaggaaccaaagcg

SEQ ID NO: 1971166 - RNA, 20 nt, Human
auuucuaggacugaauuaug

SEQ ID NO: 1971167 - RNA, 23 nt, Human
auuucuaggacugaauuaugaaa

SEQ ID NO: 1971168 - RNA, 15 nt, Human
auuucuaguuauuua

SEQ ID NO: 1971169 - RNA, 16 nt, Human
auuucuaguuauuuau

SEQ ID NO: 1971170 - RNA, 17 nt, Human
auuucuaguuauuuauu

SEQ ID NO: 1971171 - RNA, 23 nt, Human
auuucuuccacaagagcccaggc

SEQ ID NO: 1971172 - RNA, 20 nt, Human
auuucuuccacaagagccca

SEQ ID NO: 1971173 - RNA, 18 nt, Human
auuugaaacacuuugcau

SEQ ID NO: 1971174 - RNA, 13 nt, Human
auuugaaacauug

SEQ ID NO: 1971175 - RNA, 17 nt, Human
auuugaaacauugcuuu

SEQ ID NO: 1971176 - RNA, 19 nt, Human
auuugaaacauugcuuuua

SEQ ID NO: 1971177 - RNA, 20 nt, Human
auuugaaacauugcuuuuaa

SEQ ID NO: 1971178 - RNA, 13 nt, Human
auuugaaagugcc

SEQ ID NO: 1971179 - RNA, 14 nt, Human
auuugaaagugccu

SEQ ID NO: 1971180 - RNA, 16 nt, Human
auuugaaaauuuugau

SEQ ID NO: 1971181 - RNA, 15 nt, Human
auuugaaaauuuuga

SEQ ID NO: 1971182 - RNA, 18 nt, Human
auuucuaguuauuuauuc

SEQ ID NO: 1971183 - RNA, 23 nt, Human
auuggguggggggcuucauacac

SEQ ID NO: 1971184 - RNA, 18 nt, Human
auugguaaagaauggaag

SEQ ID NO: 1971185 - RNA, 15 nt, Human
auugguaccuugcac

SEQ ID NO: 1971186 - RNA, 17 nt, Human
auugguaccuugcacac

SEQ ID NO: 1971187 - RNA, 18 nt, Human
auugguaccuugcacaca

SEQ ID NO: 1971188 - RNA, 19 nt, Human
auugguaccuugcacacau

SEQ ID NO: 1971189 - RNA, 23 nt, Human
auugguacugccuuaaagauaca

SEQ ID NO: 1971190 - RNA, 14 nt, Human
auugguuucucuuc

SEQ ID NO: 1971191 - RNA, 15 nt, Human
auugguuucucuucu

SEQ ID NO: 1971192 - RNA, 16 nt, Human
auugguuucucuucuc

SEQ ID NO: 1971193 - RNA, 17 nt, Human
auugguuucucuucucc

SEQ ID NO: 1971194 - RNA, 18 nt, Human
auugguuucucuucuccc

SEQ ID NO: 1971195 - RNA, 19 nt, Human
auugguuucucuucucccc

SEQ ID NO: 1971196 - RNA, 14 nt, Human
auugguuuuaugau

SEQ ID NO: 1971197 - RNA, 15 nt, Human
auugguuuuaugaug

SEQ ID NO: 1971198 - RNA, 17 nt, Human
auugguuuuaugaugac

SEQ ID NO: 1971199 - RNA, 18 nt, Human
auugguuuuaugaugacg

SEQ ID NO: 1971200 - RNA, 17 nt, Human
auuggauuuuauguuga

SEQ ID NO: 1971201 - RNA, 18 nt, Human
auuggauuuuauguugac

SEQ ID NO: 1971202 - RNA, 21 nt, Human
auuggauuuuauguugacauu

SEQ ID NO: 1971203 - RNA, 22 nt, Human
auuggauuuuauguugacauuu

SEQ ID NO: 1971204 - RNA, 19 nt, Human
auuggauucugagagcugu

SEQ ID NO: 1971205 - RNA, 22 nt, Human
auuggauucugagagcugugca

SEQ ID NO: 1971206 - RNA, 13 nt, Human
auuggauuuuaug

SEQ ID NO: 1971207 - RNA, 14 nt, Human
auugauugcuuuuu

SEQ ID NO: 1971208 - RNA, 15 nt, Human
auugauuguauauag

SEQ ID NO: 1971209 - RNA, 21 nt, Human
auugauuuccguuaaaauacc

SEQ ID NO: 1971210 - RNA, 12 nt, Human
auugcuuuuaaa

SEQ ID NO: 1971211 - RNA, 13 nt, Human
auugcuuuuaaaa

SEQ ID NO: 1971212 - RNA, 15 nt, Human
auugcuuuuaaaacu

SEQ ID NO: 1971213 - RNA, 16 nt, Human
auugcuuuuaaaacua

SEQ ID NO: 1971214 - RNA, 18 nt, Human
auugcuuuuaaaacuacu

SEQ ID NO: 1971215 - RNA, 16 nt, Human
auugcuuuuaaaauuu

SEQ ID NO: 1971216 - RNA, 17 nt, Human
auugcuuuuaaaauuuu

SEQ ID NO: 1971217 - RNA, 19 nt, Human
auugcuuuuaaaauuuuaa

SEQ ID NO: 1971218 - RNA, 19 nt, Human
auuggacaguaaaauccac

SEQ ID NO: 1971219 - RNA, 21 nt, Human
auugcuuuuaaaauuuuaagc

SEQ ID NO: 1971220 - RNA, 15 nt, Human
auuggaaaagacuaa

SEQ ID NO: 1971221 - RNA, 21 nt, Human
auuggaguuggaguagaaugu

SEQ ID NO: 1971222 - RNA, 20 nt, Human
auuggaguuggaguagaaug

SEQ ID NO: 1971223 - RNA, 18 nt, Human
auugucccuggcuuccuu

SEQ ID NO: 1971224 - RNA, 14 nt, Human
auuguccuauuagu

SEQ ID NO: 1971225 - RNA, 18 nt, Human
auuguccuauuaguguua

SEQ ID NO: 1971226 - RNA, 20 nt, Human
auuguccuauuaguguuaua

SEQ ID NO: 1971227 - RNA, 21 nt, Human
auuguccuauuaguguuauau

SEQ ID NO: 1971228 - RNA, 23 nt, Human
auuguccuauuaguguuauauga

SEQ ID NO: 1971229 - RNA, 14 nt, Human
auugucauuaguga

SEQ ID NO: 1971230 - RNA, 13 nt, Human
auugugggaaggg

SEQ ID NO: 1971231 - RNA, 14 nt, Human
auugugggaagggg

SEQ ID NO: 1971232 - RNA, 16 nt, Human
auugucaaagugguga

SEQ ID NO: 1971233 - RNA, 23 nt, Human
auugucaaaguggugagaggcau

SEQ ID NO: 1971234 - RNA, 19 nt, Human
auugucaaugcuggagaaa

SEQ ID NO: 1971235 - RNA, 21 nt, Human
auugucaaugcuggagaaaaa

SEQ ID NO: 1971236 - RNA, 16 nt, Human
auugucaccugcuucu

SEQ ID NO: 1971237 - RNA, 17 nt, Human
auugucaccugcuucuc

SEQ ID NO: 1971238 - RNA, 19 nt, Human
auugucaccugcuucucug

SEQ ID NO: 1971239 - RNA, 21 nt, Human
auugucaccugcuucucugcc

SEQ ID NO: 1971240 - RNA, 14 nt, Human
auuuaaaagauaca

SEQ ID NO: 1971241 - RNA, 16 nt, Human
auuuaaaagauacagu

SEQ ID NO: 1971242 - RNA, 17 nt, Human
auuuaaaagauacaguu

SEQ ID NO: 1971243 - RNA, 13 nt, Human
auuuaaaagauac

SEQ ID NO: 1971244 - RNA, 21 nt, Human
auuguuuggggaugagaaagg

SEQ ID NO: 1971245 - RNA, 18 nt, Human
auuuaaagaaauauguau

SEQ ID NO: 1971246 - RNA, 23 nt, Human
auuuaaagaaauauguauucugu

SEQ ID NO: 1971247 - RNA, 15 nt, Human
auuuaaacucugaau

SEQ ID NO: 1971248 - RNA, 18 nt, Human
auuuaaacucugaauuua

SEQ ID NO: 1971249 - RNA, 21 nt, Human
auuuaaacucugaauuuaucu

SEQ ID NO: 1971250 - RNA, 23 nt, Human
auuuaaacucugaauuuaucuuu

SEQ ID NO: 1971251 - RNA, 18 nt, Human
auuuaaagaaaaaaaugu

SEQ ID NO: 1971252 - RNA, 19 nt, Human
auuuaaagaaaaaaauguc

SEQ ID NO: 1971253 - RNA, 16 nt, Human
auuugaaagugccuuu

SEQ ID NO: 1971254 - RNA, 20 nt, Human
auuuuggaaaauaaauuauu

SEQ ID NO: 1971255 - RNA, 12 nt, Human
auuuugcuuuaa

SEQ ID NO: 1971256 - RNA, 16 nt, Human
auuuugcuuuaauuuu

SEQ ID NO: 1971257 - RNA, 19 nt, Human
auuuuggaaaauaaauuau

SEQ ID NO: 1971258 - RNA, 14 nt, Human
auuuuggaaaauaa

SEQ ID NO: 1971259 - RNA, 12 nt, Human
auuuugcuuugu

SEQ ID NO: 1971260 - RNA, 11 nt, Human
auuuugcuuua

SEQ ID NO: 1971261 - RNA, 18 nt, Human
auuuugcuuugugauuuu

SEQ ID NO: 1971262 - RNA, 20 nt, Human
auuuugcuuugugauuuuug

SEQ ID NO: 1971263 - RNA, 14 nt, Human
auuuuguaauaaua

SEQ ID NO: 1971264 - RNA, 19 nt, Human
auuuuguaauaauaaagaa

SEQ ID NO: 1971265 - RNA, 22 nt, Human
auuuuguaauaauaaagaauag

SEQ ID NO: 1971266 - RNA, 20 nt, Human
auuuuguaauguaucaaaua

SEQ ID NO: 1971267 - RNA, 23 nt, Human
auuuuguaauguaucaaauacau

SEQ ID NO: 1971268 - RNA, 20 nt, Human
auuuuguaugcaagcaguuu

SEQ ID NO: 1971269 - RNA, 23 nt, Human
auuuuguaugcaagcaguuucaa

SEQ ID NO: 1971270 - RNA, 12 nt, Human
auuuuguaugca

SEQ ID NO: 1971271 - RNA, 13 nt, Human
auuuuguaugcaa

SEQ ID NO: 1971272 - RNA, 19 nt, Human
auuuugugcccccauguaa

SEQ ID NO: 1971273 - RNA, 15 nt, Human
auuuugugaguuugu

SEQ ID NO: 1971274 - RNA, 18 nt, Human
auuuugugaguuuguuuc

SEQ ID NO: 1971275 - RNA, 19 nt, Human
auuuugugaguuuguuucu

SEQ ID NO: 1971276 - RNA, 23 nt, Human
auuuugugaguuuguuucuuuga

SEQ ID NO: 1971277 - RNA, 16 nt, Human
auuuuguguaagaaau

SEQ ID NO: 1971278 - RNA, 17 nt, Human
auuuuguguaagaaaua

SEQ ID NO: 1971279 - RNA, 18 nt, Human
auuuuguguaagaaauac

SEQ ID NO: 1971280 - RNA, 20 nt, Human
auuuuguguaagaaauacag

SEQ ID NO: 1971281 - RNA, 19 nt, Human
auuuugugaaacagacuug

SEQ ID NO: 1971282 - RNA, 20 nt, Human
auuuugugaaacagacuugu

SEQ ID NO: 1971283 - RNA, 21 nt, Human
auuuugugaaacagacuugua

SEQ ID NO: 1971284 - RNA, 22 nt, Human
auuuugugaaacagacuuguau

SEQ ID NO: 1971285 - RNA, 24 nt, Human
auuuugugaaacagacuuguauau

SEQ ID NO: 1971286 - RNA, 18 nt, Human
auuuugugaagugaagga

SEQ ID NO: 1971287 - RNA, 23 nt, Human
auuuugucauauaagauucauau

SEQ ID NO: 1971288 - RNA, 20 nt, Human
auuuugucugccccaaguuu

SEQ ID NO: 1971289 - RNA, 16 nt, Human
auuuuguuucagugca

SEQ ID NO: 1971290 - RNA, 19 nt, Human
auuuuguguuuauucuuga

SEQ ID NO: 1971291 - RNA, 20 nt, Human
auuuuguguuuauucuugau

SEQ ID NO: 1971292 - RNA, 17 nt, Human
auuuuguguuuaggaac

SEQ ID NO: 1971293 - RNA, 17 nt, Human
auuuuguguugaagagc

SEQ ID NO: 1971294 - RNA, 17 nt, Human
auuuuguguuuauucuu

SEQ ID NO: 1971295 - RNA, 18 nt, Human
auuuuguguuuauucuug

SEQ ID NO: 1971296 - RNA, 20 nt, Human
auuuugcuaaaugugaauga

SEQ ID NO: 1971297 - RNA, 17 nt, Human
auuuugcgucagagaaa

SEQ ID NO: 1971298 - RNA, 21 nt, Human
auuuugcugucccuuuuccuu

SEQ ID NO: 1971299 - RNA, 18 nt, Human
auuuugcgucagagaaau

SEQ ID NO: 1971300 - RNA, 23 nt, Human
auuuugcuaaguaaaucucuucu

SEQ ID NO: 1971301 - RNA, 20 nt, Human
auuuugcauauccuuuuagu

SEQ ID NO: 1971302 - RNA, 22 nt, Human
auuuugcagaggcuaugggaag

SEQ ID NO: 1971303 - RNA, 15 nt, Human
auuuugcccuugaca

SEQ ID NO: 1971304 - RNA, 23 nt, Human
auuuugcccuugacaaagucaag

SEQ ID NO: 1971305 - RNA, 18 nt, Human
auuuugccagugggaacu

SEQ ID NO: 1971306 - RNA, 18 nt, Human
auuuugauguaaagaugu

SEQ ID NO: 1971307 - RNA, 17 nt, Human
auuuugauguaaagaug

SEQ ID NO: 1971308 - RNA, 15 nt, Human
auuuugauguuuuaa

SEQ ID NO: 1971309 - RNA, 17 nt, Human
auuuugauguuuuaagg

SEQ ID NO: 1971310 - RNA, 20 nt, Human
auuuugaucucacauuuuua

SEQ ID NO: 1971311 - RNA, 19 nt, Human
auuuugauccaagcugguc

SEQ ID NO: 1971312 - RNA, 19 nt, Human
auuuuccuguugucaagaa

SEQ ID NO: 1971313 - RNA, 20 nt, Human
auuuuccaucuaaaaauaua

SEQ ID NO: 1971314 - RNA, 19 nt, Human
auuuucccccuuggcucuc

SEQ ID NO: 1971315 - RNA, 17 nt, Human
auuuuaauaaacacucu

SEQ ID NO: 1971316 - RNA, 16 nt, Human
auuuuaauaaacacuc

SEQ ID NO: 1971317 - RNA, 15 nt, Human
auuuuaauaaacacu

SEQ ID NO: 1971318 - RNA, 19 nt, Human
auuuucccuauuagagaag

SEQ ID NO: 1971319 - RNA, 16 nt, Human
auuuuccugccaggca

SEQ ID NO: 1971320 - RNA, 22 nt, Human
auuuucccucagaaaaugagua

SEQ ID NO: 1971321 - RNA, 12 nt, Human
auuuuccugaua

SEQ ID NO: 1971322 - RNA, 14 nt, Human
auuuucuauaauuu

SEQ ID NO: 1971323 - RNA, 15 nt, Human
auuuucuauaauuua

SEQ ID NO: 1971324 - RNA, 22 nt, Human
auuuuucuuagggaaggauaca

SEQ ID NO: 1971325 - RNA, 20 nt, Human
auuuuucuuaaaaaguaacu

SEQ ID NO: 1971326 - RNA, 14 nt, Human
auuuuugcaggagc

SEQ ID NO: 1971327 - RNA, 10 nt, Human
auuuuugcuu

SEQ ID NO: 1971328 - RNA, 18 nt, Human
auuuuugagcccuuguuu

SEQ ID NO: 1971329 - RNA, 22 nt, Human
auuuuuggugggugaaaggaau

SEQ ID NO: 1971330 - RNA, 15 nt, Human
auuuuugguugaaua

SEQ ID NO: 1971331 - RNA, 17 nt, Human
auuuuugguugaauaaa

SEQ ID NO: 1971332 - RNA, 19 nt, Human
auuuuugguugaauaaacu

SEQ ID NO: 1971333 - RNA, 21 nt, Human
auuuuugcuuuugauaagaaa

SEQ ID NO: 1971334 - RNA, 14 nt, Human
auuuuugcuuuuga

SEQ ID NO: 1971335 - RNA, 15 nt, Human
auuuuugcuuuugau

SEQ ID NO: 1971336 - RNA, 12 nt, Human
auuuuucauauu

SEQ ID NO: 1971337 - RNA, 12 nt, Human
auuuuucucaug

SEQ ID NO: 1971338 - RNA, 21 nt, Human
auuuuucuuagggaaggauac

SEQ ID NO: 1971339 - RNA, 18 nt, Human
auuuuucuacugcucuuu

SEQ ID NO: 1971340 - RNA, 21 nt, Human
auuuuguuuuugucuuaaaaa

SEQ ID NO: 1971341 - RNA, 12 nt, Human
auuuuuguaauu

SEQ ID NO: 1971342 - RNA, 19 nt, Human
auuuuuguagagccagggu

SEQ ID NO: 1971343 - RNA, 18 nt, Human
auuuuuguauucaauuaa

SEQ ID NO: 1971344 - RNA, 19 nt, Human
auuuuuguauucaauuaaa

SEQ ID NO: 1971345 - RNA, 12 nt, Human
auuuuuguuguu

SEQ ID NO: 1971346 - RNA, 22 nt, Human
auuuuugugauuuugugauuga

SEQ ID NO: 1971347 - RNA, 13 nt, Human
auuuuuuaaaugc

SEQ ID NO: 1971348 - RNA, 14 nt, Human
auuuuuuaaaugca

SEQ ID NO: 1971349 - RNA, 18 nt, Human
auuuuuuaaauugaauuc

SEQ ID NO: 1971350 - RNA, 12 nt, Human
auuuuuugugug

SEQ ID NO: 1971351 - RNA, 18 nt, Human
auuuuuugguauuggcca

SEQ ID NO: 1971352 - RNA, 18 nt, Human
auuuuuuguuaaaugauu

SEQ ID NO: 1971353 - RNA, 13 nt, Human
auuuuuugaaaug

SEQ ID NO: 1971354 - RNA, 14 nt, Human
auuuuuugaaaugc

SEQ ID NO: 1971355 - RNA, 15 nt, Human
auuuuuugaaaugcu

SEQ ID NO: 1971356 - RNA, 16 nt, Human
auuuuuugaaaugcug

SEQ ID NO: 1971357 - RNA, 19 nt, Human
auuuuuugaaaugcugaaa

SEQ ID NO: 1971358 - RNA, 21 nt, Human
auuuuuugaaaugcugaaaau

SEQ ID NO: 1971359 - RNA, 19 nt, Human
auuuuuuacagcugccugc

SEQ ID NO: 1971360 - RNA, 21 nt, Human
auuuuuuaagugaaaauauag

SEQ ID NO: 1971361 - RNA, 20 nt, Human
auuuuuuauauauaugcaua

SEQ ID NO: 1971362 - RNA, 18 nt, Human
auuuuuuauauuucaagu

SEQ ID NO: 1971363 - RNA, 14 nt, Human
auuuuuuccuguuu

SEQ ID NO: 1971364 - RNA, 19 nt, Human
auucagacagcugccuggg

SEQ ID NO: 1971365 - RNA, 21 nt, Human
auuaguuuugaagauucuaug

SEQ ID NO: 1971366 - RNA, 21 nt, Human
auuaguuuagaacagguuuuu

SEQ ID NO: 1971367 - RNA, 15 nt, Human
auuaguuuagaacag

SEQ ID NO: 1971368 - RNA, 17 nt, Human
auuaguuuagaacaggu

SEQ ID NO: 1971369 - RNA, 19 nt, Human
auuaguguuauaugaacau

SEQ ID NO: 1971370 - RNA, 21 nt, Human
auuaguguuauaugaacauac

SEQ ID NO: 1971371 - RNA, 15 nt, Human
auuaguguuauauga

SEQ ID NO: 1971372 - RNA, 16 nt, Human
auuaguguuauaugaa

SEQ ID NO: 1971373 - RNA, 17 nt, Human
auuaguguuauaugaac

SEQ ID NO: 1971374 - RNA, 12 nt, Human
auuaguuuagaa

SEQ ID NO: 1971375 - RNA, 13 nt, Human
auuaguuuagaac

SEQ ID NO: 1971376 - RNA, 11 nt, Human
uuuguggaaaa

SEQ ID NO: 1971377 - RNA, 14 nt, Human
auuauauuaugaag

SEQ ID NO: 1971378 - RNA, 16 nt, Human
auuauauucauucuuu

SEQ ID NO: 1971379 - RNA, 20 nt, Human
auuauauuccucuugcauuu

SEQ ID NO: 1971380 - RNA, 15 nt, Human
auuauauuuacaaau

SEQ ID NO: 1971381 - RNA, 19 nt, Human
auuauacccccugcaaagc

SEQ ID NO: 1971382 - RNA, 15 nt, Human
auuauaccuguugcu

SEQ ID NO: 1971383 - RNA, 22 nt, Human
auuauacagaccgaacuguugu

SEQ ID NO: 1971384 - RNA, 17 nt, Human
auuauacaugaaauuca

SEQ ID NO: 1971385 - RNA, 16 nt, Human
auuccccacccucccc

SEQ ID NO: 1971386 - RNA, 13 nt, Human
auucaggaagcuc

SEQ ID NO: 1971387 - RNA, 21 nt, Human
auuccagagaguggcuccucc

SEQ ID NO: 1971388 - RNA, 19 nt, Human
auuccagagaguggcuccu

SEQ ID NO: 1971389 - RNA, 12 nt, Human
auuccagaggaa

SEQ ID NO: 1971390 - RNA, 20 nt, Human
auuccagcacuucaggaggc

SEQ ID NO: 1971391 - RNA, 17 nt, Human
auuccagagcugccagu

SEQ ID NO: 1971392 - RNA, 20 nt, Human
auucuaauaagcuaguugaa

SEQ ID NO: 1971393 - RNA, 14 nt, Human
auucuaauaagcua

SEQ ID NO: 1971394 - RNA, 16 nt, Human
auucuaauaagcuagu

SEQ ID NO: 1971395 - RNA, 19 nt, Human
auucuaauaagcuaguuga

SEQ ID NO: 1971396 - RNA, 14 nt, Human
auuccccuuccugu

SEQ ID NO: 1971397 - RNA, 23 nt, Human
auuccccgucucugguuccuccc

SEQ ID NO: 1971398 - RNA, 20 nt, Human
auucccgggugcagaauugu

SEQ ID NO: 1971399 - RNA, 17 nt, Human
auucagacagcugccug

SEQ ID NO: 1971400 - RNA, 16 nt, Human
auucagacagcugccu

SEQ ID NO: 1971401 - RNA, 15 nt, Human
auucagacagcugcc

SEQ ID NO: 1971402 - RNA, 14 nt, Human
auucagacagcugc

SEQ ID NO: 1971403 - RNA, 12 nt, Human
auucaggaagcu

SEQ ID NO: 1971404 - RNA, 22 nt, Human
auucaggaagcagcuuucccca

SEQ ID NO: 1971405 - RNA, 18 nt, Human
auucagacagcugccugg

SEQ ID NO: 1971406 - RNA, 20 nt, Human
auucacauuguauucagagu

SEQ ID NO: 1971407 - RNA, 13 nt, Human
auucacauuguau

SEQ ID NO: 1971408 - RNA, 21 nt, Human
auucacauguuuucaaaugga

SEQ ID NO: 1971409 - RNA, 16 nt, Human
auucaccaguacauuc

SEQ ID NO: 1971410 - RNA, 13 nt, Human
auucagacagcug

SEQ ID NO: 1971411 - RNA, 12 nt, Human
auucagacagcu

SEQ ID NO: 1971412 - RNA, 11 nt, Human
auucagacagc

SEQ ID NO: 1971413 - RNA, 15 nt, Human
auuauuauuuggccc

SEQ ID NO: 1971414 - RNA, 14 nt, Human
auuauuauucagaa

SEQ ID NO: 1971415 - RNA, 13 nt, Human
auuauguuaauau

SEQ ID NO: 1971416 - RNA, 14 nt, Human
auuauguuaauauu

SEQ ID NO: 1971417 - RNA, 16 nt, Human
auuauguuaauauuuc

SEQ ID NO: 1971418 - RNA, 17 nt, Human
auuauguuaauauuucu

SEQ ID NO: 1971419 - RNA, 14 nt, Human
auuaucuagauacu

SEQ ID NO: 1971420 - RNA, 18 nt, Human
auuaucuagauacuguau

SEQ ID NO: 1971421 - RNA, 16 nt, Human
auuauauuuggaugca

SEQ ID NO: 1971422 - RNA, 17 nt, Human
auuauauuuggaugcag

SEQ ID NO: 1971423 - RNA, 12 nt, Human
auuauauuugga

SEQ ID NO: 1971424 - RNA, 15 nt, Human
auuauauuuggaugc

SEQ ID NO: 1971425 - RNA, 15 nt, Human
auucacauguuuuca

SEQ ID NO: 1971426 - RNA, 16 nt, Human
auucacauguuuucaa

SEQ ID NO: 1971427 - RNA, 17 nt, Human
auucacauguuuucaaa

SEQ ID NO: 1971428 - RNA, 18 nt, Human
auucacauguuuucaaau

SEQ ID NO: 1971429 - RNA, 19 nt, Human
auucacauguuuucaaaug

SEQ ID NO: 1971430 - RNA, 13 nt, Human
auuauuuugauua

SEQ ID NO: 1971431 - RNA, 16 nt, Human
auuauuugaaugacua

SEQ ID NO: 1971432 - RNA, 14 nt, Human
auucuuaaauaugu

SEQ ID NO: 1971433 - RNA, 23 nt, Human
auucuucccaacuugccuuugaa

SEQ ID NO: 1971434 - RNA, 20 nt, Human
auucuucccaacuugccuuu

SEQ ID NO: 1971435 - RNA, 21 nt, Human
auucuucccaacuugccuuug

SEQ ID NO: 1971436 - RNA, 13 nt, Human
auucuuccucccu

SEQ ID NO: 1971437 - RNA, 18 nt, Human
auugaaaucuuuuugcuu

SEQ ID NO: 1971438 - RNA, 17 nt, Human
auugaaaucuuuuugcu

SEQ ID NO: 1971439 - RNA, 20 nt, Human
auugaaaucuuuuugcuuug

SEQ ID NO: 1971440 - RNA, 13 nt, Human
auucuuuuugcuc

SEQ ID NO: 1971441 - RNA, 14 nt, Human
auucuuuuugcucu

SEQ ID NO: 1971442 - RNA, 15 nt, Human
auucuuuuugcucua

SEQ ID NO: 1971443 - RNA, 19 nt, Human
auucuuuuugcucuaaaau

SEQ ID NO: 1971444 - RNA, 20 nt, Human
auucuuuuugcucuaaaaua

SEQ ID NO: 1971445 - RNA, 21 nt, Human
auucuuuuugcucuaaaauau

SEQ ID NO: 1971446 - RNA, 22 nt, Human
auucuuuuugcucuaaaauauu

SEQ ID NO: 1971447 - RNA, 14 nt, Human
auucuuuuuuauua

SEQ ID NO: 1971448 - RNA, 15 nt, Human
auucuuuuuuauuaa

SEQ ID NO: 1971449 - RNA, 16 nt, Human
auucuuuuuuauuaau

SEQ ID NO: 1971450 - RNA, 17 nt, Human
auucuuuuuuauuaauc

SEQ ID NO: 1971451 - RNA, 19 nt, Human
auucuuuuuuauuaaucac

SEQ ID NO: 1971452 - RNA, 20 nt, Human
auucuuuuuuauuaaucacu

SEQ ID NO: 1971453 - RNA, 21 nt, Human
auucuuuuuuauuaaucacug

SEQ ID NO: 1971454 - RNA, 15 nt, Human
auugaaaaaccauuu

SEQ ID NO: 1971455 - RNA, 22 nt, Human
auucuuuuuuauuaaucacugu

SEQ ID NO: 1971456 - RNA, 18 nt, Human
auucuuuuuuucucuaga

SEQ ID NO: 1971457 - RNA, 18 nt, Human
auugacacaguaccauuu

SEQ ID NO: 1971458 - RNA, 14 nt, Human
auugacaaguuuaa

SEQ ID NO: 1971459 - RNA, 19 nt, Human
auugacacuuaaaaauggu

SEQ ID NO: 1971460 - RNA, 17 nt, Human
auugaccugaggcccuu

SEQ ID NO: 1971461 - RNA, 11 nt, Human
auugacuucuu

SEQ ID NO: 1971462 - RNA, 16 nt, Human
auugacucuugaguug

SEQ ID NO: 1971463 - RNA, 19 nt, Human
auugacucuugaguuguuu

SEQ ID NO: 1971464 - RNA, 22 nt, Human
auugacucuugaguuguuuuug

SEQ ID NO: 1971465 - RNA, 13 nt, Human
auugacucuugag

SEQ ID NO: 1971466 - RNA, 14 nt, Human
auugacucuugagu

SEQ ID NO: 1971467 - RNA, 15 nt, Human
auugacucuugaguu

SEQ ID NO: 1971468 - RNA, 12 nt, Human
auugacaaguuu

SEQ ID NO: 1971469 - RNA, 15 nt, Human
auugacacuuaaaaa

SEQ ID NO: 1971470 - RNA, 17 nt, Human
auugacacuuaaaaaug

SEQ ID NO: 1971471 - RNA, 15 nt, Human
auugaacucugagag

SEQ ID NO: 1971472 - RNA, 18 nt, Human
auucugcucacauaucug

SEQ ID NO: 1971473 - RNA, 20 nt, Human
auucugccugcccaggcccc

SEQ ID NO: 1971474 - RNA, 21 nt, Human
auucugccugcccaggccccu

SEQ ID NO: 1971475 - RNA, 19 nt, Human
auucugcucacauaucugu

SEQ ID NO: 1971476 - RNA, 20 nt, Human
auucugcucacauaucuguc

SEQ ID NO: 1971477 - RNA, 21 nt, Human
auucugcucacauaucuguca

SEQ ID NO: 1971478 - RNA, 22 nt, Human
auucugcucacauaucugucau

SEQ ID NO: 1971479 - RNA, 15 nt, Human
auucuguaaaagaaa

SEQ ID NO: 1971480 - RNA, 17 nt, Human
auucuguaaaagaaaaa

SEQ ID NO: 1971481 - RNA, 19 nt, Human
auucuguuggccaguguga

SEQ ID NO: 1971482 - RNA, 21 nt, Human
auucuguuggccagugugaca

SEQ ID NO: 1971483 - RNA, 14 nt, Human
auucuguuggccag

SEQ ID NO: 1971484 - RNA, 11 nt, Human
auucugccugc

SEQ ID NO: 1971485 - RNA, 13 nt, Human
auucugccugccc

SEQ ID NO: 1971486 - RNA, 14 nt, Human
auucugccugccca

SEQ ID NO: 1971487 - RNA, 15 nt, Human
auucugccugcccag

SEQ ID NO: 1971488 - RNA, 16 nt, Human
auucugccugcccagg

SEQ ID NO: 1971489 - RNA, 17 nt, Human
auucugccugcccaggc

SEQ ID NO: 1971490 - RNA, 18 nt, Human
auucugccugcccaggcc

SEQ ID NO: 1971491 - RNA, 19 nt, Human
auucugccugcccaggccc

SEQ ID NO: 1971492 - RNA, 17 nt, Human
auucucauuugucacac

SEQ ID NO: 1971493 - RNA, 22 nt, Human
auucucaugccucagccuccug

SEQ ID NO: 1971494 - RNA, 12 nt, Human
auucucauucuu

SEQ ID NO: 1971495 - RNA, 21 nt, Human
auucucaugccucagccuccu

SEQ ID NO: 1971496 - RNA, 17 nt, Human
auucuaggaccuguguc

SEQ ID NO: 1971497 - RNA, 15 nt, Human
auucuagcuuugagc

SEQ ID NO: 1971498 - RNA, 16 nt, Human
auucuaggaccugugu

SEQ ID NO: 1971499 - RNA, 18 nt, Human
augggccuccugugugug

SEQ ID NO: 1971500 - RNA, 12 nt, Human
augggccugagu

SEQ ID NO: 1971501 - RNA, 20 nt, Human
uuugaaaugcugaaaauugc

SEQ ID NO: 1971502 - RNA, 13 nt, Human
uuugaaauggaaa

SEQ ID NO: 1971503 - RNA, 20 nt, Human
auggggauagauguguggac

SEQ ID NO: 1971504 - RNA, 14 nt, Human
auggggcagaaauc

SEQ ID NO: 1971505 - RNA, 20 nt, Human
augggcuggguucuacccag

SEQ ID NO: 1971506 - RNA, 15 nt, Human
augggcucaggaucu

SEQ ID NO: 1971507 - RNA, 20 nt, Human
uuucuuuuugaaucuuuaau

SEQ ID NO: 1971508 - RNA, 16 nt, Human
uuucuuuuugaaucuu

SEQ ID NO: 1971509 - RNA, 17 nt, Human
uuucuuuuugaaucuuu

SEQ ID NO: 1971510 - RNA, 19 nt, Human
uuucuuuuugaaucuuuaa

SEQ ID NO: 1971511 - RNA, 22 nt, Human
uuucuuugccaucucugcucca

SEQ ID NO: 1971512 - RNA, 20 nt, Human
uuucuuuuguuuuuugaagu

SEQ ID NO: 1971513 - RNA, 21 nt, Human
uuucuuuuguuuuuugaagug

SEQ ID NO: 1971514 - RNA, 14 nt, Human
uuugaaaucaguaa

SEQ ID NO: 1971515 - RNA, 15 nt, Human
uuugaaaucaguaaa

SEQ ID NO: 1971516 - RNA, 20 nt, Human
uuugaaaucaguaaacacug

SEQ ID NO: 1971517 - RNA, 21 nt, Human
uuugaaaucaguaaacacugu

SEQ ID NO: 1971518 - RNA, 12 nt, Human
uuugaaaugcug

SEQ ID NO: 1971519 - RNA, 14 nt, Human
uuugaaaacagaaa

SEQ ID NO: 1971520 - RNA, 16 nt, Human
uuugaaaacagaaauu

SEQ ID NO: 1971521 - RNA, 12 nt, Human
auggggcugcac

SEQ ID NO: 1971522 - RNA, 24 nt, Human
auggggcugcaccggcuggccugg

SEQ ID NO: 1971523 - RNA, 14 nt, Human
augggggugcauuu

SEQ ID NO: 1971524 - RNA, 17 nt, Human
augggggcacugaggac

SEQ ID NO: 1971525 - RNA, 16 nt, Human
auggggucucucacag

SEQ ID NO: 1971526 - RNA, 19 nt, Human
auggggucucucacagaca

SEQ ID NO: 1971527 - RNA, 20 nt, Human
auggggucucucacagacag

SEQ ID NO: 1971528 - RNA, 21 nt, Human
auggggucucucacagacagg

SEQ ID NO: 1971529 - RNA, 15 nt, Human
augggggugcauuug

SEQ ID NO: 1971530 - RNA, 22 nt, Human
auggguagggcucugacaaagc

SEQ ID NO: 1971531 - RNA, 23 nt, Human
auggguagggcucugacaaagcu

SEQ ID NO: 1971532 - RNA, 10 nt, Human
uuucuccccc

SEQ ID NO: 1971533 - RNA, 19 nt, Human
uuucugcagccacuauugu

SEQ ID NO: 1971534 - RNA, 15 nt, Human
uuucuggcuaugcau

SEQ ID NO: 1971535 - RNA, 16 nt, Human
uuucuggcuaugcauu

SEQ ID NO: 1971536 - RNA, 18 nt, Human
uuucuggcuaugcauuug

SEQ ID NO: 1971537 - RNA, 19 nt, Human
uuucuggcuaugcauuuga

SEQ ID NO: 1971538 - RNA, 15 nt, Human
augggauccuggagu

SEQ ID NO: 1971539 - RNA, 19 nt, Human
augggaugauugaagaaac

SEQ ID NO: 1971540 - RNA, 16 nt, Human
augggaugauugaaga

SEQ ID NO: 1971541 - RNA, 17 nt, Human
augggaugauugaagaa

SEQ ID NO: 1971542 - RNA, 18 nt, Human
augggaugauugaagaaa

SEQ ID NO: 1971543 - RNA, 12 nt, Human
uuucuguauaga

SEQ ID NO: 1971544 - RNA, 21 nt, Human
uuucugcagccacuauuguua

SEQ ID NO: 1971545 - RNA, 23 nt, Human
uuucugggcaccggggccucgga

SEQ ID NO: 1971546 - RNA, 16 nt, Human
uuucugggguuuuucu

SEQ ID NO: 1971547 - RNA, 19 nt, Human
uuucugggguuuuucuguu

SEQ ID NO: 1971548 - RNA, 11 nt, Human
uuucuuucagu

SEQ ID NO: 1971549 - RNA, 11 nt, Human
uuucuuugaaa

SEQ ID NO: 1971550 - RNA, 16 nt, Human
uuucuuugaauuuuca

SEQ ID NO: 1971551 - RNA, 17 nt, Human
uuucuuugaauuuucau

SEQ ID NO: 1971552 - RNA, 20 nt, Human
uuucuuugaauuuucauuuu

SEQ ID NO: 1971553 - RNA, 12 nt, Human
uuucuuugauca

SEQ ID NO: 1971554 - RNA, 16 nt, Human
uuucuuugaucaugaa

SEQ ID NO: 1971555 - RNA, 15 nt, Human
uuucuuugccaucuc

SEQ ID NO: 1971556 - RNA, 19 nt, Human
uuucuuugccaucucugcu

SEQ ID NO: 1971557 - RNA, 14 nt, Human
uuucuguauagaca

SEQ ID NO: 1971558 - RNA, 20 nt, Human
uuucuguucagcguuuugca

SEQ ID NO: 1971559 - RNA, 13 nt, Human
uuucuguguuuau

SEQ ID NO: 1971560 - RNA, 14 nt, Human
uuucuguuaaaaug

SEQ ID NO: 1971561 - RNA, 17 nt, Human
uuucuguuaaaaugcau

SEQ ID NO: 1971562 - RNA, 22 nt, Human
uuucuguucagcguuuugcaag

SEQ ID NO: 1971563 - RNA, 17 nt, Human
auggugcaaugaccuuu

SEQ ID NO: 1971564 - RNA, 16 nt, Human
auggugcaaugaccuu

SEQ ID NO: 1971565 - RNA, 16 nt, Human
auggugauuuuaaaug

SEQ ID NO: 1971566 - RNA, 17 nt, Human
auggugauuuuaaaugu

SEQ ID NO: 1971567 - RNA, 19 nt, Human
auggugauuuuaaaugugu

SEQ ID NO: 1971568 - RNA, 19 nt, Human
auggugcaaugaccuuuca

SEQ ID NO: 1971569 - RNA, 15 nt, Human
auggugcaaugaccu

SEQ ID NO: 1971570 - RNA, 13 nt, Human
auggugcaaugac

SEQ ID NO: 1971571 - RNA, 12 nt, Human
auggugcaauga

SEQ ID NO: 1971572 - RNA, 19 nt, Human
auggugaugcagucuuaga

SEQ ID NO: 1971573 - RNA, 20 nt, Human
auggugaugcagucuuagau

SEQ ID NO: 1971574 - RNA, 13 nt, Human
auggugauguuga

SEQ ID NO: 1971575 - RNA, 12 nt, Human
auggugauuuua

SEQ ID NO: 1971576 - RNA, 14 nt, Human
auggugauuuuaaa

SEQ ID NO: 1971577 - RNA, 20 nt, Human
auggugagggauacccaucc

SEQ ID NO: 1971578 - RNA, 15 nt, Human
augggugcuuggagg

SEQ ID NO: 1971579 - RNA, 16 nt, Human
auggugaugaaaugua

SEQ ID NO: 1971580 - RNA, 17 nt, Human
auggugaugaaauguaa

SEQ ID NO: 1971581 - RNA, 14 nt, Human
auggugaugaaaug

SEQ ID NO: 1971582 - RNA, 19 nt, Human
augguguucaaaaaacuug

SEQ ID NO: 1971583 - RNA, 24 nt, Human
auggugguugggacccaguggcag

SEQ ID NO: 1971584 - RNA, 21 nt, Human
augguuaccucugcauaaaua

SEQ ID NO: 1971585 - RNA, 12 nt, Human
augguggcuggg

SEQ ID NO: 1971586 - RNA, 13 nt, Human
augguggcugggu

SEQ ID NO: 1971587 - RNA, 15 nt, Human
augguggcuggguug

SEQ ID NO: 1971588 - RNA, 16 nt, Human
augguggggucuccuc

SEQ ID NO: 1971589 - RNA, 23 nt, Human
augguggggucuccucaggacca

SEQ ID NO: 1971590 - RNA, 17 nt, Human
augguggcuggguugga

SEQ ID NO: 1971591 - RNA, 15 nt, Human
augguuuucaaaaua

SEQ ID NO: 1971592 - RNA, 14 nt, Human
augguuuucaaaau

SEQ ID NO: 1971593 - RNA, 14 nt, Human
augguuuucuugug

SEQ ID NO: 1971594 - RNA, 16 nt, Human
augguuuucaaaauaa

SEQ ID NO: 1971595 - RNA, 11 nt, Human
auguaaaaagg

SEQ ID NO: 1971596 - RNA, 14 nt, Human
auguaaaaauaacc

SEQ ID NO: 1971597 - RNA, 16 nt, Human
augguucucaggccug

SEQ ID NO: 1971598 - RNA, 19 nt, Human
augguuccccuguucacuc

SEQ ID NO: 1971599 - RNA, 20 nt, Human
augguuccccuguucacucu

SEQ ID NO: 1971600 - RNA, 13 nt, Human
augguuguacaua

SEQ ID NO: 1971601 - RNA, 13 nt, Human
auguaaaagccua

SEQ ID NO: 1971602 - RNA, 13 nt, Human
auguaaacaaauc

SEQ ID NO: 1971603 - RNA, 15 nt, Human
auguaaacaaaucuu

SEQ ID NO: 1971604 - RNA, 16 nt, Human
auguaaacaaaucuuu

SEQ ID NO: 1971605 - RNA, 22 nt, Human
auguaaacaaaucuuuccauau

SEQ ID NO: 1971606 - RNA, 21 nt, Human
auguaaagcaaccaaaaagaa

SEQ ID NO: 1971607 - RNA, 13 nt, Human
auguaaauaauuc

SEQ ID NO: 1971608 - RNA, 14 nt, Human
auguaaauaauucu

SEQ ID NO: 1971609 - RNA, 16 nt, Human
auguaaauaauucuuu

SEQ ID NO: 1971610 - RNA, 13 nt, Human
auguacauguauu

SEQ ID NO: 1971611 - RNA, 14 nt, Human
auguacauguauua

SEQ ID NO: 1971612 - RNA, 19 nt, Human
augugaugagaggaaauca

SEQ ID NO: 1971613 - RNA, 17 nt, Human
augugaugagaggaaau

SEQ ID NO: 1971614 - RNA, 16 nt, Human
augugaugagaggaaa

SEQ ID NO: 1971615 - RNA, 23 nt, Human
augucucuuuaaugucacaggca

SEQ ID NO: 1971616 - RNA, 23 nt, Human
augugacauuugucauuuucauu

SEQ ID NO: 1971617 - RNA, 14 nt, Human
augugaugcuggaa

SEQ ID NO: 1971618 - RNA, 23 nt, Human
augugcacaugcacgugugugca

SEQ ID NO: 1971619 - RNA, 19 nt, Human
uuuguaauaauaaagaaua

SEQ ID NO: 1971620 - RNA, 19 nt, Human
augugcacaucuguuuugu

SEQ ID NO: 1971621 - RNA, 21 nt, Human
augugcaaacccacucagaga

SEQ ID NO: 1971622 - RNA, 12 nt, Human
uuuguauaaaag

SEQ ID NO: 1971623 - RNA, 14 nt, Human
uuuguaaugaaaac

SEQ ID NO: 1971624 - RNA, 13 nt, Human
uuuguaaugaaaa

SEQ ID NO: 1971625 - RNA, 21 nt, Human
uuuguaauaauaaagaauagc

SEQ ID NO: 1971626 - RNA, 18 nt, Human
uuugugaaacagacuugu

SEQ ID NO: 1971627 - RNA, 20 nt, Human
uuugugaaacagacuuguau

SEQ ID NO: 1971628 - RNA, 22 nt, Human
uuugugaaaugauggugaaagu

SEQ ID NO: 1971629 - RNA, 12 nt, Human
uuugugaaauuu

SEQ ID NO: 1971630 - RNA, 17 nt, Human
uuugugaaauuuuucau

SEQ ID NO: 1971631 - RNA, 18 nt, Human
uuugugaaauuuuucaua

SEQ ID NO: 1971632 - RNA, 20 nt, Human
uuugugaaauuuuucauauu

SEQ ID NO: 1971633 - RNA, 22 nt, Human
uuugugaacaagucccuguaau

SEQ ID NO: 1971634 - RNA, 21 nt, Human
uuugugaaauuuuucauauuu

SEQ ID NO: 1971635 - RNA, 20 nt, Human
uuugugaagguggaaauaaa

SEQ ID NO: 1971636 - RNA, 23 nt, Human
uuugugaagugaaggauuugugu

SEQ ID NO: 1971637 - RNA, 17 nt, Human
augucucugagcauuag

SEQ ID NO: 1971638 - RNA, 13 nt, Human
augucgccucugc

SEQ ID NO: 1971639 - RNA, 14 nt, Human
augucgccucugca

SEQ ID NO: 1971640 - RNA, 21 nt, Human
auguccugugucaguuuaugu

SEQ ID NO: 1971641 - RNA, 18 nt, Human
auguccugugucaguuua

SEQ ID NO: 1971642 - RNA, 20 nt, Human
auguccugugucaguuuaug

SEQ ID NO: 1971643 - RNA, 11 nt, Human
auguccugugu

SEQ ID NO: 1971644 - RNA, 13 nt, Human
auguccuguguca

SEQ ID NO: 1971645 - RNA, 17 nt, Human
augucucaggucccugc

SEQ ID NO: 1971646 - RNA, 22 nt, Human
augucucaggucccugcagggc

SEQ ID NO: 1971647 - RNA, 17 nt, Human
auguccacugguucuuc

SEQ ID NO: 1971648 - RNA, 13 nt, Human
augucagugugac

SEQ ID NO: 1971649 - RNA, 12 nt, Human
augucaguguga

SEQ ID NO: 1971650 - RNA, 16 nt, Human
auguccaguaagauca

SEQ ID NO: 1971651 - RNA, 18 nt, Human
auguccaguaagaucacu

SEQ ID NO: 1971652 - RNA, 19 nt, Human
auguccaguaagaucacug

SEQ ID NO: 1971653 - RNA, 20 nt, Human
auguccaguaagaucacugu

SEQ ID NO: 1971654 - RNA, 16 nt, Human
augucaguauguggaa

SEQ ID NO: 1971655 - RNA, 22 nt, Human
auguauuacaguggggaaugaa

SEQ ID NO: 1971656 - RNA, 21 nt, Human
auguauuaaauuacauuugua

SEQ ID NO: 1971657 - RNA, 12 nt, Human
auguauuaaauu

SEQ ID NO: 1971658 - RNA, 16 nt, Human
auguauuaaauuacau

SEQ ID NO: 1971659 - RNA, 23 nt, Human
auguauuaacacuacucaaagca

SEQ ID NO: 1971660 - RNA, 21 nt, Human
auguauguguuuagaauugaa

SEQ ID NO: 1971661 - RNA, 18 nt, Human
auguauguguuuagaauu

SEQ ID NO: 1971662 - RNA, 20 nt, Human
auguauguguuuagaauuga

SEQ ID NO: 1971663 - RNA, 16 nt, Human
auguauguguaaguau

SEQ ID NO: 1971664 - RNA, 12 nt, Human
auguauguguuu

SEQ ID NO: 1971665 - RNA, 14 nt, Human
auguauguguuuag

SEQ ID NO: 1971666 - RNA, 15 nt, Human
auguauguguuuaga

SEQ ID NO: 1971667 - RNA, 16 nt, Human
auguauguguuuagaa

SEQ ID NO: 1971668 - RNA, 17 nt, Human
auguauguguuuagaau

SEQ ID NO: 1971669 - RNA, 14 nt, Human
auguaugcuucaua

SEQ ID NO: 1971670 - RNA, 13 nt, Human
auguaugcauaau

SEQ ID NO: 1971671 - RNA, 17 nt, Human
auguaugcauaauaauc

SEQ ID NO: 1971672 - RNA, 15 nt, Human
auguaugcuucauac

SEQ ID NO: 1971673 - RNA, 16 nt, Human
auguaugcuucauaca

SEQ ID NO: 1971674 - RNA, 15 nt, Human
auguauguguaagua

SEQ ID NO: 1971675 - RNA, 15 nt, Human
uuuggcacucugacu

SEQ ID NO: 1971676 - RNA, 18 nt, Human
auguaugagguacaaccu

SEQ ID NO: 1971677 - RNA, 19 nt, Human
uuugacagcgcacagcugc

SEQ ID NO: 1971678 - RNA, 12 nt, Human
uuugaccucugc

SEQ ID NO: 1971679 - RNA, 18 nt, Human
uuugacagcgcacagcug

SEQ ID NO: 1971680 - RNA, 23 nt, Human
auguagcaaacccugucaaacau

SEQ ID NO: 1971681 - RNA, 20 nt, Human
auguagcaaacccugucaaa

SEQ ID NO: 1971682 - RNA, 20 nt, Human
auguagauuuauuucaucau

SEQ ID NO: 1971683 - RNA, 16 nt, Human
auguagauuuauuuca

SEQ ID NO: 1971684 - RNA, 17 nt, Human
auguagauuuauuucau

SEQ ID NO: 1971685 - RNA, 19 nt, Human
auguagccccucuccugga

SEQ ID NO: 1971686 - RNA, 19 nt, Human
auguagaggggaaaagaga

SEQ ID NO: 1971687 - RNA, 17 nt, Human
auguagaggagaaacug

SEQ ID NO: 1971688 - RNA, 19 nt, Human
auguagaggagaaacugga

SEQ ID NO: 1971689 - RNA, 12 nt, Human
auguagaggaga

SEQ ID NO: 1971690 - RNA, 13 nt, Human
auguagaggagaa

SEQ ID NO: 1971691 - RNA, 20 nt, Human
auguagagcacaauggaauu

SEQ ID NO: 1971692 - RNA, 14 nt, Human
auguacuauaacau

SEQ ID NO: 1971693 - RNA, 17 nt, Human
auguacuauaacauaga

SEQ ID NO: 1971694 - RNA, 17 nt, Human
auguacauguauuaaau

SEQ ID NO: 1971695 - RNA, 22 nt, Human
uuugauucagacagcugccugg

SEQ ID NO: 1971696 - RNA, 15 nt, Human
uuugccguuauuaaa

SEQ ID NO: 1971697 - RNA, 13 nt, Human
uuugccucugccu

SEQ ID NO: 1971698 - RNA, 21 nt, Human
uuugcuccccuuccccuuccu

SEQ ID NO: 1971699 - RNA, 19 nt, Human
uuugcucuaaaauauuuau

SEQ ID NO: 1971700 - RNA, 22 nt, Human
uuugcuccccuuccccuuccuu

SEQ ID NO: 1971701 - RNA, 23 nt, Human
uuugcuccccuuccccuuccuuc

SEQ ID NO: 1971702 - RNA, 15 nt, Human
uuugcucuaaaauau

SEQ ID NO: 1971703 - RNA, 23 nt, Human
uuuggcaaacucuccaccacacg

SEQ ID NO: 1971704 - RNA, 14 nt, Human
uuuggcacucugac

SEQ ID NO: 1971705 - RNA, 18 nt, Human
uuugcugaacauuggaga

SEQ ID NO: 1971706 - RNA, 22 nt, Human
uuugauguucuuucacccuuuu

SEQ ID NO: 1971707 - RNA, 13 nt, Human
uuugauuaaauuc

SEQ ID NO: 1971708 - RNA, 14 nt, Human
uuugaugucagcag

SEQ ID NO: 1971709 - RNA, 16 nt, Human
uuugaugucagcaguu

SEQ ID NO: 1971710 - RNA, 17 nt, Human
uuugaugucagcaguug

SEQ ID NO: 1971711 - RNA, 20 nt, Human
uuugaugucagcaguugcug

SEQ ID NO: 1971712 - RNA, 21 nt, Human
uuugaugucagcaguugcugg

SEQ ID NO: 1971713 - RNA, 21 nt, Human
uuugauguguuguucuuggca

SEQ ID NO: 1971714 - RNA, 18 nt, Human
uuugauuaaauucuugca

SEQ ID NO: 1971715 - RNA, 21 nt, Human
uuugauuaaauucuugcaaag

SEQ ID NO: 1971716 - RNA, 21 nt, Human
uuugauucagacagcugccug

SEQ ID NO: 1971717 - RNA, 23 nt, Human
uuugauuaaauucuugcaaagua

SEQ ID NO: 1971718 - RNA, 19 nt, Human
uuugacgccaucccagccc

SEQ ID NO: 1971719 - RNA, 16 nt, Human
uuugacgccaucccag

SEQ ID NO: 1971720 - RNA, 14 nt, Human
uuugacgccauccc

SEQ ID NO: 1971721 - RNA, 13 nt, Human
uuugacgccaucc

SEQ ID NO: 1971722 - RNA, 20 nt, Human
uuugacgccaucccagcccc

SEQ ID NO: 1971723 - RNA, 20 nt, Human
uuugauguaaagauguucug

SEQ ID NO: 1971724 - RNA, 18 nt, Human
augcagccucacaguccu

SEQ ID NO: 1971725 - RNA, 14 nt, Human
augcagcucuuccu

SEQ ID NO: 1971726 - RNA, 15 nt, Human
augcagcucuuccug

SEQ ID NO: 1971727 - RNA, 16 nt, Human
augcagcucuuccugg

SEQ ID NO: 1971728 - RNA, 22 nt, Human
augcagauuuugcccuugacaa

SEQ ID NO: 1971729 - RNA, 16 nt, Human
uuuacaaccuagaagu

SEQ ID NO: 1971730 - RNA, 15 nt, Human
augcagaugccuggg

SEQ ID NO: 1971731 - RNA, 17 nt, Human
augcagcaucuaaguaa

SEQ ID NO: 1971732 - RNA, 17 nt, Human
augcagccacuuaggac

SEQ ID NO: 1971733 - RNA, 18 nt, Human
augcagccacuuaggaca

SEQ ID NO: 1971734 - RNA, 17 nt, Human
uuuacaaacaaaagcau

SEQ ID NO: 1971735 - RNA, 22 nt, Human
uuuaauuugaagguagaauguu

SEQ ID NO: 1971736 - RNA, 20 nt, Human
uuuacaacacuuuaaugggu

SEQ ID NO: 1971737 - RNA, 14 nt, Human
uuuacaacacuuua

SEQ ID NO: 1971738 - RNA, 19 nt, Human
uuuacaacacuuuaauggg

SEQ ID NO: 1971739 - RNA, 13 nt, Human
uuuacaaaggcug

SEQ ID NO: 1971740 - RNA, 23 nt, Human
uuuacaaaggcuguauucagcaa

SEQ ID NO: 1971741 - RNA, 19 nt, Human
uuuaauuuuuuugagacag

SEQ ID NO: 1971742 - RNA, 16 nt, Human
uuuaauuugaaauaug

SEQ ID NO: 1971743 - RNA, 23 nt, Human
uuuaauuucaagcuuauuuugga

SEQ ID NO: 1971744 - RNA, 13 nt, Human
uuuaauuucaagc

SEQ ID NO: 1971745 - RNA, 20 nt, Human
uuuaauuucaagcuuauuuu

SEQ ID NO: 1971746 - RNA, 17 nt, Human
uuuaaggucuguuugcu

SEQ ID NO: 1971747 - RNA, 13 nt, Human
uuuaagugaaauu

SEQ ID NO: 1971748 - RNA, 14 nt, Human
uuuaagugaaauuu

SEQ ID NO: 1971749 - RNA, 18 nt, Human
uuuaaauauaugcuaagu

SEQ ID NO: 1971750 - RNA, 18 nt, Human
uuuaauguugaacaaaau

SEQ ID NO: 1971751 - RNA, 23 nt, Human
uuuaauguugaacaaaauaaauu

SEQ ID NO: 1971752 - RNA, 13 nt, Human
uuuaauguugaac

SEQ ID NO: 1971753 - RNA, 12 nt, Human
uuuaauucaguu

SEQ ID NO: 1971754 - RNA, 21 nt, Human
augccaaagaaugaauuucaa

SEQ ID NO: 1971755 - RNA, 18 nt, Human
augccaaaaaaagacagg

SEQ ID NO: 1971756 - RNA, 13 nt, Human
augcauuuggaac

SEQ ID NO: 1971757 - RNA, 13 nt, Human
augcagugcuucc

SEQ ID NO: 1971758 - RNA, 23 nt, Human
augcagugguaugaucacggcuc

SEQ ID NO: 1971759 - RNA, 22 nt, Human
augcaguuacaaauuauaaugu

SEQ ID NO: 1971760 - RNA, 19 nt, Human
augcaguuacaaauuauaa

SEQ ID NO: 1971761 - RNA, 20 nt, Human
augcaguuacaaauuauaau

SEQ ID NO: 1971762 - RNA, 13 nt, Human
augccaauuucuc

SEQ ID NO: 1971763 - RNA, 11 nt, Human
augcccagccc

SEQ ID NO: 1971764 - RNA, 21 nt, Human
augcgguguuugguuuuuugu

SEQ ID NO: 1971765 - RNA, 14 nt, Human
augcccagccccuu

SEQ ID NO: 1971766 - RNA, 13 nt, Human
augcccagccccu

SEQ ID NO: 1971767 - RNA, 12 nt, Human
augcccagcccc

SEQ ID NO: 1971768 - RNA, 14 nt, Human
augcccuggaucca

SEQ ID NO: 1971769 - RNA, 16 nt, Human
augccucagccuccug

SEQ ID NO: 1971770 - RNA, 15 nt, Human
uuguugaaagaaagu

SEQ ID NO: 1971771 - RNA, 15 nt, Human
uuguugaacuguuag

SEQ ID NO: 1971772 - RNA, 18 nt, Human
uuguugaacuguuagaau

SEQ ID NO: 1971773 - RNA, 15 nt, Human
uuguucuuuguucuu

SEQ ID NO: 1971774 - RNA, 20 nt, Human
uuguucuuguuuuuaaguuu

SEQ ID NO: 1971775 - RNA, 15 nt, Human
uuguucuuguuuuua

SEQ ID NO: 1971776 - RNA, 12 nt, Human
uuguuccagaga

SEQ ID NO: 1971777 - RNA, 11 nt, Human
uuguuccaguu

SEQ ID NO: 1971778 - RNA, 22 nt, Human
uuguugaacuguuagaauguaa

SEQ ID NO: 1971779 - RNA, 21 nt, Human
uuguuccacaaguuaaauaaa

SEQ ID NO: 1971780 - RNA, 21 nt, Human
uuguucauuucauccuuucac

SEQ ID NO: 1971781 - RNA, 13 nt, Human
uuguguucaccuu

SEQ ID NO: 1971782 - RNA, 15 nt, Human
uuguguuacuaaguu

SEQ ID NO: 1971783 - RNA, 20 nt, Human
uuguguuacuaaguuuuuau

SEQ ID NO: 1971784 - RNA, 13 nt, Human
uuguguuacuaag

SEQ ID NO: 1971785 - RNA, 15 nt, Human
augaucuaggaagac

SEQ ID NO: 1971786 - RNA, 20 nt, Human
augaucuaggaagacuuugg

SEQ ID NO: 1971787 - RNA, 17 nt, Human
augaucuaggaagacuu

SEQ ID NO: 1971788 - RNA, 17 nt, Human
augauacuugaaaauua

SEQ ID NO: 1971789 - RNA, 21 nt, Human
augauacuugaaaauuaacau

SEQ ID NO: 1971790 - RNA, 17 nt, Human
augauaugcuuguaacu

SEQ ID NO: 1971791 - RNA, 23 nt, Human
augauaugcuuguaacuaaaaua

SEQ ID NO: 1971792 - RNA, 12 nt, Human
augauugaaaau

SEQ ID NO: 1971793 - RNA, 13 nt, Human
augauugaagaaa

SEQ ID NO: 1971794 - RNA, 12 nt, Human
augauugcagaa

SEQ ID NO: 1971795 - RNA, 19 nt, Human
augauugcagaauuguuua

SEQ ID NO: 1971796 - RNA, 21 nt, Human
augauugcagaauuguuuaga

SEQ ID NO: 1971797 - RNA, 13 nt, Human
augauugcuuuua

SEQ ID NO: 1971798 - RNA, 14 nt, Human
augauugcuuuuaa

SEQ ID NO: 1971799 - RNA, 15 nt, Human
augauugcuuuuaaa

SEQ ID NO: 1971800 - RNA, 15 nt, Human
augcaaccauuugaa

SEQ ID NO: 1971801 - RNA, 17 nt, Human
augauugcuuuuaaaau

SEQ ID NO: 1971802 - RNA, 13 nt, Human
augcaagcaguuu

SEQ ID NO: 1971803 - RNA, 15 nt, Human
augcaagcaguuuca

SEQ ID NO: 1971804 - RNA, 16 nt, Human
augcaagcaguuucaa

SEQ ID NO: 1971805 - RNA, 22 nt, Human
augcaagcaguuucaauaaagu

SEQ ID NO: 1971806 - RNA, 23 nt, Human
augcaagcaguuucaauaaaguu

SEQ ID NO: 1971807 - RNA, 20 nt, Human
augcacuuuguucuggcucu

SEQ ID NO: 1971808 - RNA, 19 nt, Human
augcacuuuguucuggcuc

SEQ ID NO: 1971809 - RNA, 17 nt, Human
augcacuuuguucuggc

SEQ ID NO: 1971810 - RNA, 16 nt, Human
augcacuuuguucugg

SEQ ID NO: 1971811 - RNA, 13 nt, Human
augcaccuggaau

SEQ ID NO: 1971812 - RNA, 22 nt, Human
augcaccagcccuuagcaggga

SEQ ID NO: 1971813 - RNA, 13 nt, Human
uuuaaagaaugcu

SEQ ID NO: 1971814 - RNA, 15 nt, Human
uuuaaagaauuucuu

SEQ ID NO: 1971815 - RNA, 16 nt, Human
uuuaaauaaaacccuu

SEQ ID NO: 1971816 - RNA, 21 nt, Human
uuuaaagguuucuauuuucuc

SEQ ID NO: 1971817 - RNA, 13 nt, Human
uuguuuugcuucc

SEQ ID NO: 1971818 - RNA, 14 nt, Human
uuguuuugcuuccc

SEQ ID NO: 1971819 - RNA, 16 nt, Human
uuguuuugcuuccccu

SEQ ID NO: 1971820 - RNA, 14 nt, Human
uuguuuugcuuuuu

SEQ ID NO: 1971821 - RNA, 14 nt, Human
uuuaaaaauuuacu

SEQ ID NO: 1971822 - RNA, 23 nt, Human
uuuaaaaauuagccuaagauaua

SEQ ID NO: 1971823 - RNA, 12 nt, Human
uuuaaaaauuua

SEQ ID NO: 1971824 - RNA, 19 nt, Human
augcuguucaugaaagauu

SEQ ID NO: 1971825 - RNA, 13 nt, Human
augcuuccagaaa

SEQ ID NO: 1971826 - RNA, 14 nt, Human
augcuuccagaaac

SEQ ID NO: 1971827 - RNA, 22 nt, Human
augcuuccagaaacacccacag

SEQ ID NO: 1971828 - RNA, 13 nt, Human
augcuucucacug

SEQ ID NO: 1971829 - RNA, 16 nt, Human
augcuccccugugcca

SEQ ID NO: 1971830 - RNA, 17 nt, Human
augcuccccugugccag

SEQ ID NO: 1971831 - RNA, 22 nt, Human
augcugugcccuaaaguguauu

SEQ ID NO: 1971832 - RNA, 17 nt, Human
augcuguucaugaaaga

SEQ ID NO: 1971833 - RNA, 18 nt, Human
uuucaaaauaaaauauca

SEQ ID NO: 1971834 - RNA, 22 nt, Human
uuucaaaauuguuacaaauugu

SEQ ID NO: 1971835 - RNA, 16 nt, Human
uuucaaacuuuacuau

SEQ ID NO: 1971836 - RNA, 22 nt, Human
uuucaaacuuuacuauggcccu

SEQ ID NO: 1971837 - RNA, 20 nt, Human
uuuauuuuguguuuaggaac

SEQ ID NO: 1971838 - RNA, 18 nt, Human
uuuauuuuuaaauuaugu

SEQ ID NO: 1971839 - RNA, 16 nt, Human
uuuauuuuguguuuag

SEQ ID NO: 1971840 - RNA, 23 nt, Human
uuuauuuuuagaauuuugugaaa

SEQ ID NO: 1971841 - RNA, 16 nt, Human
uuuauuuuuaagaaag

SEQ ID NO: 1971842 - RNA, 17 nt, Human
uuuauuuuuaagaaaga

SEQ ID NO: 1971843 - RNA, 16 nt, Human
uuuauuuuuagaauuu

SEQ ID NO: 1971844 - RNA, 19 nt, Human
uuuauuuuuagaauuuugu

SEQ ID NO: 1971845 - RNA, 13 nt, Human
uuucaaaaaucug

SEQ ID NO: 1971846 - RNA, 19 nt, Human
uuucaaaaaucugaagauu

SEQ ID NO: 1971847 - RNA, 21 nt, Human
uuucaaaaaucugaagauugu

SEQ ID NO: 1971848 - RNA, 23 nt, Human
uuucaaaaaucugaagauuguuu

SEQ ID NO: 1971849 - RNA, 24 nt, Human
uuucaaaaaucugaagauuguuua

SEQ ID NO: 1971850 - RNA, 14 nt, Human
augcuaugucauuu

SEQ ID NO: 1971851 - RNA, 17 nt, Human
augcuaugucauuucau

SEQ ID NO: 1971852 - RNA, 20 nt, Human
uuuauuaagcacguauuuau

SEQ ID NO: 1971853 - RNA, 15 nt, Human
uuuauuaaucacugu

SEQ ID NO: 1971854 - RNA, 13 nt, Human
uuuauuaaucacu

SEQ ID NO: 1971855 - RNA, 19 nt, Human
uuuauuaaucacuguguau

SEQ ID NO: 1971856 - RNA, 21 nt, Human
uuuauuaaucacuguguauau

SEQ ID NO: 1971857 - RNA, 20 nt, Human
augcuagaacucccuuucaa

SEQ ID NO: 1971858 - RNA, 21 nt, Human
augcuagaacucccuuucaac

SEQ ID NO: 1971859 - RNA, 22 nt, Human
augcuagaacucccuuucaaca

SEQ ID NO: 1971860 - RNA, 17 nt, Human
uuuaucaugugaaauca

SEQ ID NO: 1971861 - RNA, 18 nt, Human
uuuaucaugugaaaucau

SEQ ID NO: 1971862 - RNA, 18 nt, Human
uuuauauuucaaguacac

SEQ ID NO: 1971863 - RNA, 20 nt, Human
uuuauauuucaaguacacug

SEQ ID NO: 1971864 - RNA, 21 nt, Human
uuuauauuucaaguacacuga

SEQ ID NO: 1971865 - RNA, 14 nt, Human
uuuauauuuggaug

SEQ ID NO: 1971866 - RNA, 16 nt, Human
augcuaagaauuuuuu

SEQ ID NO: 1971867 - RNA, 20 nt, Human
uuuauauguauguguuuaga

SEQ ID NO: 1971868 - RNA, 21 nt, Human
uuuauauguauguguuuagaa

SEQ ID NO: 1971869 - RNA, 16 nt, Human
augcuaagacucagug

SEQ ID NO: 1971870 - RNA, 13 nt, Human
augcuaagaauuu

SEQ ID NO: 1971871 - RNA, 21 nt, Human
uuuauauuuauugacucuuga

SEQ ID NO: 1971872 - RNA, 13 nt, Human
uuuauauuucaag

SEQ ID NO: 1971873 - RNA, 14 nt, Human
uuuauauuucaagu

SEQ ID NO: 1971874 - RNA, 15 nt, Human
uuuauauuucaagua

SEQ ID NO: 1971875 - RNA, 16 nt, Human
uuuccaucuaaaaaua

SEQ ID NO: 1971876 - RNA, 17 nt, Human
uuucccccuuggcucuc

SEQ ID NO: 1971877 - RNA, 13 nt, Human
uuucccccuuucu

SEQ ID NO: 1971878 - RNA, 14 nt, Human
uuucccccuuucuu

SEQ ID NO: 1971879 - RNA, 17 nt, Human
uuucccccuuucuuccu

SEQ ID NO: 1971880 - RNA, 18 nt, Human
uuucccccuuucuuccuc

SEQ ID NO: 1971881 - RNA, 21 nt, Human
uuucccccuuucuuccucauu

SEQ ID NO: 1971882 - RNA, 13 nt, Human
uuuccaucuaaaa

SEQ ID NO: 1971883 - RNA, 22 nt, Human
uuuccauauuuuuuuccuuaca

SEQ ID NO: 1971884 - RNA, 18 nt, Human
uuuccaugaguccccugu

SEQ ID NO: 1971885 - RNA, 17 nt, Human
uuuccaugaguccccug

SEQ ID NO: 1971886 - RNA, 12 nt, Human
uuucauuagcaa

SEQ ID NO: 1971887 - RNA, 13 nt, Human
uuucauuagcaaa

SEQ ID NO: 1971888 - RNA, 17 nt, Human
uuucaacaguuucaaaa

SEQ ID NO: 1971889 - RNA, 14 nt, Human
uuucauuagcaaaa

SEQ ID NO: 1971890 - RNA, 15 nt, Human
uuucauuagcaaaaa

SEQ ID NO: 1971891 - RNA, 16 nt, Human
uuucauuagcaaaaaa

SEQ ID NO: 1971892 - RNA, 19 nt, Human
uuucauuagcaaaaaaagu

SEQ ID NO: 1971893 - RNA, 21 nt, Human
uuucauuagcaaaaaaaguug

SEQ ID NO: 1971894 - RNA, 23 nt, Human
uuucauuagcaaaaaaaguugua

SEQ ID NO: 1971895 - RNA, 14 nt, Human
uuucaaauguucuc

SEQ ID NO: 1971896 - RNA, 19 nt, Human
auggacuaacuugucuuug

SEQ ID NO: 1971897 - RNA, 18 nt, Human
auggacucagaaacucca

SEQ ID NO: 1971898 - RNA, 18 nt, Human
auggaauuuuuuuguacg

SEQ ID NO: 1971899 - RNA, 15 nt, Human
auggaauuuuuuugu

SEQ ID NO: 1971900 - RNA, 16 nt, Human
auggaauuuuuuugua

SEQ ID NO: 1971901 - RNA, 17 nt, Human
auggaauuuuuuuguac

SEQ ID NO: 1971902 - RNA, 12 nt, Human
auggacuuuguu

SEQ ID NO: 1971903 - RNA, 11 nt, Human
auggacuuugu

SEQ ID NO: 1971904 - RNA, 19 nt, Human
auggcuaagcaaaauguga

SEQ ID NO: 1971905 - RNA, 18 nt, Human
auggcuaauguacugcau

SEQ ID NO: 1971906 - RNA, 15 nt, Human
augggagagaagaga

SEQ ID NO: 1971907 - RNA, 22 nt, Human
augggagaaauaguguggaaau

SEQ ID NO: 1971908 - RNA, 17 nt, Human
augggaggggaaauggg

SEQ ID NO: 1971909 - RNA, 15 nt, Human
augggaggcuggagu

SEQ ID NO: 1971910 - RNA, 19 nt, Human
augggagagaagagaaugc

SEQ ID NO: 1971911 - RNA, 18 nt, Human
auggagacugucucaaga

SEQ ID NO: 1971912 - RNA, 14 nt, Human
auggcagcugccac

SEQ ID NO: 1971913 - RNA, 22 nt, Human
uucugaacuuggcgcugccccu

SEQ ID NO: 1971914 - RNA, 19 nt, Human
uucugaacuuggcgcugcc

SEQ ID NO: 1971915 - RNA, 23 nt, Human
uucugaacuuggcgcugccccug

SEQ ID NO: 1971916 - RNA, 15 nt, Human
uucugccauauucug

SEQ ID NO: 1971917 - RNA, 21 nt, Human
uucugccugcccaggccccug

SEQ ID NO: 1971918 - RNA, 15 nt, Human
uucuggcucuuccag

SEQ ID NO: 1971919 - RNA, 17 nt, Human
uucugccugcccaggcc

SEQ ID NO: 1971920 - RNA, 18 nt, Human
uucugccugcccaggccc

SEQ ID NO: 1971921 - RNA, 17 nt, Human
uucuggcucuuccaggc

SEQ ID NO: 1971922 - RNA, 16 nt, Human
uucuggcucuuccagg

SEQ ID NO: 1971923 - RNA, 15 nt, Human
uucucuaguuugauu

SEQ ID NO: 1971924 - RNA, 17 nt, Human
uucucuaguuugauuaa

SEQ ID NO: 1971925 - RNA, 23 nt, Human
aucagggaggaaaguuucuuuga

SEQ ID NO: 1971926 - RNA, 20 nt, Human
uucucuaguuugauuaaauu

SEQ ID NO: 1971927 - RNA, 22 nt, Human
uucucuuccaaccauuuaucuu

SEQ ID NO: 1971928 - RNA, 15 nt, Human
uucucuuccaggcag

SEQ ID NO: 1971929 - RNA, 16 nt, Human
uucucuuccaggcagc

SEQ ID NO: 1971930 - RNA, 19 nt, Human
uucucuucuccccuuccau

SEQ ID NO: 1971931 - RNA, 20 nt, Human
uucucuucuccccuuccauu

SEQ ID NO: 1971932 - RNA, 21 nt, Human
uucucuucuccccuuccauuu

SEQ ID NO: 1971933 - RNA, 14 nt, Human
uucucuugccucag

SEQ ID NO: 1971934 - RNA, 22 nt, Human
uucucuugccucagcuucccca

SEQ ID NO: 1971935 - RNA, 12 nt, Human
uucucuugccuc

SEQ ID NO: 1971936 - RNA, 23 nt, Human
uucucuucuccccuuccauuucu

SEQ ID NO: 1971937 - RNA, 23 nt, Human
aucaguaguuugcauuucagaaa

SEQ ID NO: 1971938 - RNA, 18 nt, Human
aucaguaguuugcauuuc

SEQ ID NO: 1971939 - RNA, 19 nt, Human
aucaguaguuugcauuuca

SEQ ID NO: 1971940 - RNA, 21 nt, Human
aucaguaguuugcauuucaga

SEQ ID NO: 1971941 - RNA, 20 nt, Human
uucuccugcguguucucaga

SEQ ID NO: 1971942 - RNA, 20 nt, Human
uucuccuuaagagacaauuu

SEQ ID NO: 1971943 - RNA, 21 nt, Human
uucuccuuguguuacuaaguu

SEQ ID NO: 1971944 - RNA, 15 nt, Human
aucaguacuuguuuc

SEQ ID NO: 1971945 - RNA, 17 nt, Human
aucaguagcuuaagaaa

SEQ ID NO: 1971946 - RNA, 19 nt, Human
aucaguaaacacuguguau

SEQ ID NO: 1971947 - RNA, 14 nt, Human
aucaggugcugcca

SEQ ID NO: 1971948 - RNA, 17 nt, Human
aucagguuaggcaguau

SEQ ID NO: 1971949 - RNA, 22 nt, Human
aucagguuaggcaguauaaaga

SEQ ID NO: 1971950 - RNA, 13 nt, Human
aucaguaaacacu

SEQ ID NO: 1971951 - RNA, 14 nt, Human
aucaguaaacacug

SEQ ID NO: 1971952 - RNA, 15 nt, Human
aucaguaaacacugu

SEQ ID NO: 1971953 - RNA, 20 nt, Human
aucccaaacccuucagugcc

SEQ ID NO: 1971954 - RNA, 19 nt, Human
aucccaaacccuucagugc

SEQ ID NO: 1971955 - RNA, 12 nt, Human
aucccagcccca

SEQ ID NO: 1971956 - RNA, 15 nt, Human
auccaucagugccaa

SEQ ID NO: 1971957 - RNA, 22 nt, Human
auccauuuuuuauauuucaagu

SEQ ID NO: 1971958 - RNA, 18 nt, Human
aucccauaugccugggca

SEQ ID NO: 1971959 - RNA, 20 nt, Human
aucccagcuucggcauuuga

SEQ ID NO: 1971960 - RNA, 22 nt, Human
aucccagcuucggcauuugauc

SEQ ID NO: 1971961 - RNA, 19 nt, Human
auccauagcaccuccacau

SEQ ID NO: 1971962 - RNA, 21 nt, Human
auccaguaucuugaagacuuu

SEQ ID NO: 1971963 - RNA, 19 nt, Human
auccauauuaaguaagucu

SEQ ID NO: 1971964 - RNA, 21 nt, Human
auccauauuaaguaagucuca

SEQ ID NO: 1971965 - RNA, 21 nt, Human
auccauacuaacccuuuucca

SEQ ID NO: 1971966 - RNA, 14 nt, Human
auccauagugacuu

SEQ ID NO: 1971967 - RNA, 15 nt, Human
auccauagugacuuu

SEQ ID NO: 1971968 - RNA, 16 nt, Human
auccauagugacuuuu

SEQ ID NO: 1971969 - RNA, 22 nt, Human
auccauagugacuuuucaagua

SEQ ID NO: 1971970 - RNA, 13 nt, Human
auccaucaggcca

SEQ ID NO: 1971971 - RNA, 13 nt, Human
auccaucagugcc

SEQ ID NO: 1971972 - RNA, 14 nt, Human
auccaucagugcca

SEQ ID NO: 1971973 - RNA, 13 nt, Human
auccacccaccuc

SEQ ID NO: 1971974 - RNA, 15 nt, Human
auccacccaccucag

SEQ ID NO: 1971975 - RNA, 16 nt, Human
auccaguaucuugaag

SEQ ID NO: 1971976 - RNA, 16 nt, Human
auccacccaccucagc

SEQ ID NO: 1971977 - RNA, 18 nt, Human
auccaagcuggucccacu

SEQ ID NO: 1971978 - RNA, 21 nt, Human
auccaagcuggucccacucag

SEQ ID NO: 1971979 - RNA, 18 nt, Human
auccaagcaaaugugaau

SEQ ID NO: 1971980 - RNA, 20 nt, Human
aucauuuuaccuuugacaaa

SEQ ID NO: 1971981 - RNA, 23 nt, Human
uucuggggagcuggacaguggag

SEQ ID NO: 1971982 - RNA, 11 nt, Human
uugaaaugcug

SEQ ID NO: 1971983 - RNA, 13 nt, Human
uugaaaugcugaa

SEQ ID NO: 1971984 - RNA, 17 nt, Human
uugaaaugcugaaaauu

SEQ ID NO: 1971985 - RNA, 15 nt, Human
uugaaauggaaauua

SEQ ID NO: 1971986 - RNA, 15 nt, Human
uugaaagugccuuug

SEQ ID NO: 1971987 - RNA, 17 nt, Human
uugaaagugccuuugca

SEQ ID NO: 1971988 - RNA, 19 nt, Human
uugaacccgggaggcagag

SEQ ID NO: 1971989 - RNA, 17 nt, Human
uugaaauuguauuacaa

SEQ ID NO: 1971990 - RNA, 16 nt, Human
auccggggccagcucc

SEQ ID NO: 1971991 - RNA, 17 nt, Human
auccggggccagcuccg

SEQ ID NO: 1971992 - RNA, 12 nt, Human
auccuaagcuau

SEQ ID NO: 1971993 - RNA, 21 nt, Human
auccuaagcuauucaguaaua

SEQ ID NO: 1971994 - RNA, 18 nt, Human
auccuacaagacacagug

SEQ ID NO: 1971995 - RNA, 19 nt, Human
auccuacaagacacaguga

SEQ ID NO: 1971996 - RNA, 16 nt, Human
auccuaggcauuugcu

SEQ ID NO: 1971997 - RNA, 16 nt, Human
auccuccucagaucuu

SEQ ID NO: 1971998 - RNA, 24 nt, Human
auccuacgaguaauugcauuugcu

SEQ ID NO: 1971999 - RNA, 21 nt, Human
auccuacgaguaauugcauuu

SEQ ID NO: 1972000 - RNA, 15 nt, Human
uucuuuguaaugaaa

SEQ ID NO: 1972001 - RNA, 12 nt, Human
uucuuuuugaau

SEQ ID NO: 1972002 - RNA, 18 nt, Human
uucuuuuugaaucuuuaa

SEQ ID NO: 1972003 - RNA, 17 nt, Human
uucuuuuugaucaucuu

SEQ ID NO: 1972004 - RNA, 12 nt, Human
uucuuuuugcuc

SEQ ID NO: 1972005 - RNA, 13 nt, Human
uucuuuuugcucu

SEQ ID NO: 1972006 - RNA, 14 nt, Human
uucuuuuugcucua

SEQ ID NO: 1972007 - RNA, 20 nt, Human
uucuuuuugcucuaaaauau

SEQ ID NO: 1972008 - RNA, 21 nt, Human
uucuuuuugcucuaaaauauu

SEQ ID NO: 1972009 - RNA, 14 nt, Human
uucuuuuuuuguga

SEQ ID NO: 1972010 - RNA, 17 nt, Human
uugaaagaauguaaagc

SEQ ID NO: 1972011 - RNA, 22 nt, Human
uucuuuuuuauuaaucacugug

SEQ ID NO: 1972012 - RNA, 20 nt, Human
uucuuuuuuauuaaucacug

SEQ ID NO: 1972013 - RNA, 21 nt, Human
uucuuuuuuauuaaucacugu

SEQ ID NO: 1972014 - RNA, 14 nt, Human
uucuuuuuuauuaa

SEQ ID NO: 1972015 - RNA, 15 nt, Human
uucuuuuuuauuaau

SEQ ID NO: 1972016 - RNA, 16 nt, Human
uucuuuuuuauuaauc

SEQ ID NO: 1972017 - RNA, 23 nt, Human
uucuugaauggcaauguuuugcu

SEQ ID NO: 1972018 - RNA, 14 nt, Human
uucuuugcccuuua

SEQ ID NO: 1972019 - RNA, 20 nt, Human
uucuucugcuucagccuccc

SEQ ID NO: 1972020 - RNA, 14 nt, Human
uucuucugaggccu

SEQ ID NO: 1972021 - RNA, 19 nt, Human
uucuucugaucacugaaau

SEQ ID NO: 1972022 - RNA, 20 nt, Human
uucuucugaucacugaaaua

SEQ ID NO: 1972023 - RNA, 24 nt, Human
aucccauaugccugggcagaagga

SEQ ID NO: 1972024 - RNA, 14 nt, Human
aucccucauccuca

SEQ ID NO: 1972025 - RNA, 13 nt, Human
aucccaugagccu

SEQ ID NO: 1972026 - RNA, 23 nt, Human
aucccucauccucauacccaccc

SEQ ID NO: 1972027 - RNA, 21 nt, Human
aucccucauccucauacccac

SEQ ID NO: 1972028 - RNA, 13 nt, Human
aucccucauccuc

SEQ ID NO: 1972029 - RNA, 13 nt, Human
uucuuaaccaucu

SEQ ID NO: 1972030 - RNA, 14 nt, Human
uucuucucccucag

SEQ ID NO: 1972031 - RNA, 13 nt, Human
uucuucugcuuca

SEQ ID NO: 1972032 - RNA, 15 nt, Human
uucuucugcuucagc

SEQ ID NO: 1972033 - RNA, 18 nt, Human
uucuuaauauauagcauu

SEQ ID NO: 1972034 - RNA, 14 nt, Human
uucuuaaucauuuu

SEQ ID NO: 1972035 - RNA, 13 nt, Human
uucuucucccuca

SEQ ID NO: 1972036 - RNA, 22 nt, Human
uuccucuuuccaucuacccucc

SEQ ID NO: 1972037 - RNA, 17 nt, Human
uuccucuuuccaucuac

SEQ ID NO: 1972038 - RNA, 13 nt, Human
uuccucuuuccau

SEQ ID NO: 1972039 - RNA, 14 nt, Human
uuccucugcuaaau

SEQ ID NO: 1972040 - RNA, 16 nt, Human
uuccucugcuaaauug

SEQ ID NO: 1972041 - RNA, 19 nt, Human
uuccucugcuaaauugaug

SEQ ID NO: 1972042 - RNA, 15 nt, Human
uuccugaacaggaua

SEQ ID NO: 1972043 - RNA, 18 nt, Human
uuccugaagaauugaaaa

SEQ ID NO: 1972044 - RNA, 14 nt, Human
uuccugaacaggau

SEQ ID NO: 1972045 - RNA, 17 nt, Human
uuccucugcuaaauuga

SEQ ID NO: 1972046 - RNA, 14 nt, Human
uuccugaaccgaug

SEQ ID NO: 1972047 - RNA, 20 nt, Human
uuccuaaauauauuuuaaga

SEQ ID NO: 1972048 - RNA, 17 nt, Human
uuccuaauccucuagga

SEQ ID NO: 1972049 - RNA, 22 nt, Human
uuccguuugauuugucacugcu

SEQ ID NO: 1972050 - RNA, 12 nt, Human
uuccuaaaacag

SEQ ID NO: 1972051 - RNA, 16 nt, Human
uuccuaauuccacagc

SEQ ID NO: 1972052 - RNA, 17 nt, Human
uuccuaauuccacagcu

SEQ ID NO: 1972053 - RNA, 18 nt, Human
uuccuaauuccacagcug

SEQ ID NO: 1972054 - RNA, 14 nt, Human
uuccucugagccuu

SEQ ID NO: 1972055 - RNA, 17 nt, Human
uuccucugagccuuggg

SEQ ID NO: 1972056 - RNA, 21 nt, Human
uuccucugaggcugaaauuca

SEQ ID NO: 1972057 - RNA, 14 nt, Human
uuccuacacaggac

SEQ ID NO: 1972058 - RNA, 15 nt, Human
uuccuacacaggaca

SEQ ID NO: 1972059 - RNA, 20 nt, Human
uucccucaccuuucccaucu

SEQ ID NO: 1972060 - RNA, 15 nt, Human
uucccuauuagagaa

SEQ ID NO: 1972061 - RNA, 16 nt, Human
uucccgcucagcccuc

SEQ ID NO: 1972062 - RNA, 18 nt, Human
uucccgcucagcccuccc

SEQ ID NO: 1972063 - RNA, 21 nt, Human
uucccgcucagcccucccugc

SEQ ID NO: 1972064 - RNA, 22 nt, Human
uucccgcucagcccucccugcc

SEQ ID NO: 1972065 - RNA, 15 nt, Human
auagcaaaaucaaga

SEQ ID NO: 1972066 - RNA, 19 nt, Human
auagauugugaauaaugau

SEQ ID NO: 1972067 - RNA, 14 nt, Human
uuccgucacauccc

SEQ ID NO: 1972068 - RNA, 19 nt, Human
uuccgucacaucccacccc

SEQ ID NO: 1972069 - RNA, 14 nt, Human
uuccguuaaaauac

SEQ ID NO: 1972070 - RNA, 16 nt, Human
uuccguuaaaauacca

SEQ ID NO: 1972071 - RNA, 19 nt, Human
uuccguagguuauuuucag

SEQ ID NO: 1972072 - RNA, 13 nt, Human
uucccucccugcu

SEQ ID NO: 1972073 - RNA, 23 nt, Human
uucccucccugcugucauugcuu

SEQ ID NO: 1972074 - RNA, 15 nt, Human
uucccucccugcugu

SEQ ID NO: 1972075 - RNA, 16 nt, Human
uucccucccugcuguc

SEQ ID NO: 1972076 - RNA, 17 nt, Human
aucaaauuaauugugug

SEQ ID NO: 1972077 - RNA, 16 nt, Human
aucaaauuaauugugu

SEQ ID NO: 1972078 - RNA, 20 nt, Human
auauuuuuuguuaaaugauu

SEQ ID NO: 1972079 - RNA, 18 nt, Human
auauuuuuuguuaaauga

SEQ ID NO: 1972080 - RNA, 21 nt, Human
aucaagaugugacauguuuua

SEQ ID NO: 1972081 - RNA, 14 nt, Human
aucaacagauaaau

SEQ ID NO: 1972082 - RNA, 16 nt, Human
aucaacacacauuuua

SEQ ID NO: 1972083 - RNA, 11 nt, Human
uuccugugucu

SEQ ID NO: 1972084 - RNA, 14 nt, Human
uuccugugccaggu

SEQ ID NO: 1972085 - RNA, 16 nt, Human
uuccuguguccaugug

SEQ ID NO: 1972086 - RNA, 16 nt, Human
uuccugugccagguga

SEQ ID NO: 1972087 - RNA, 18 nt, Human
aucacggcucacugcagc

SEQ ID NO: 1972088 - RNA, 19 nt, Human
aucacggcucacugcagcc

SEQ ID NO: 1972089 - RNA, 13 nt, Human
aucacgccacugc

SEQ ID NO: 1972090 - RNA, 14 nt, Human
aucacgccacugca

SEQ ID NO: 1972091 - RNA, 15 nt, Human
aucacggcucacugc

SEQ ID NO: 1972092 - RNA, 14 nt, Human
aucaaugaguaaca

SEQ ID NO: 1972093 - RNA, 14 nt, Human
aucaaugaguguga

SEQ ID NO: 1972094 - RNA, 15 nt, Human
aucaaucuuuagaaa

SEQ ID NO: 1972095 - RNA, 21 nt, Human
aucaaucuuuagaaaaggcau

SEQ ID NO: 1972096 - RNA, 21 nt, Human
aucaagggccuaucuuggaga

SEQ ID NO: 1972097 - RNA, 11 nt, Human
aucagaauucu

SEQ ID NO: 1972098 - RNA, 18 nt, Human
aucagaaguuucucagcu

SEQ ID NO: 1972099 - RNA, 13 nt, Human
uucuaggacugaa

SEQ ID NO: 1972100 - RNA, 14 nt, Human
uucuaggacugaau

SEQ ID NO: 1972101 - RNA, 16 nt, Human
uucuaggacugaauua

SEQ ID NO: 1972102 - RNA, 13 nt, Human
uucucaccagcug

SEQ ID NO: 1972103 - RNA, 16 nt, Human
uucucacuccuaccug

SEQ ID NO: 1972104 - RNA, 14 nt, Human
uucucaccagcugu

SEQ ID NO: 1972105 - RNA, 16 nt, Human
uucuaggaccuguguc

SEQ ID NO: 1972106 - RNA, 18 nt, Human
uucucacuccuaccuggu

SEQ ID NO: 1972107 - RNA, 18 nt, Human
aucaggccaggcccucug

SEQ ID NO: 1972108 - RNA, 16 nt, Human
aucaggccaggcccuc

SEQ ID NO: 1972109 - RNA, 15 nt, Human
aucaggccaggcccu

SEQ ID NO: 1972110 - RNA, 13 nt, Human
aucagcacgauuu

SEQ ID NO: 1972111 - RNA, 20 nt, Human
aucagaauaaccuucaaaua

SEQ ID NO: 1972112 - RNA, 12 nt, Human
aucagaauucuc

SEQ ID NO: 1972113 - RNA, 13 nt, Human
aucaggccauugu

SEQ ID NO: 1972114 - RNA, 16 nt, Human
aucaggccauuguccc

SEQ ID NO: 1972115 - RNA, 13 nt, Human
aucaggcucccag

SEQ ID NO: 1972116 - RNA, 14 nt, Human
aucaggcucccagg

SEQ ID NO: 1972117 - RNA, 18 nt, Human
aucagggaccaccagagg

SEQ ID NO: 1972118 - RNA, 13 nt, Human
aucagguccugcu

SEQ ID NO: 1972119 - RNA, 14 nt, Human
aucagguccugcuc

SEQ ID NO: 1972120 - RNA, 19 nt, Human
aucagguccugcucagcag

SEQ ID NO: 1972121 - RNA, 21 nt, Human
aucagguccugcucagcagug

SEQ ID NO: 1972122 - RNA, 23 nt, Human
uucuaagaagugaaaaucuacac

SEQ ID NO: 1972123 - RNA, 13 nt, Human
uucuaagaaguga

SEQ ID NO: 1972124 - RNA, 16 nt, Human
uucuagcauggcugcc

SEQ ID NO: 1972125 - RNA, 15 nt, Human
uucgcuccugugucu

SEQ ID NO: 1972126 - RNA, 19 nt, Human
uucgcuccugugucuugca

SEQ ID NO: 1972127 - RNA, 14 nt, Human
uucggccuccaucc

SEQ ID NO: 1972128 - RNA, 15 nt, Human
uucggccuccauccu

SEQ ID NO: 1972129 - RNA, 19 nt, Human
uucuaaaggcuaccuuugu

SEQ ID NO: 1972130 - RNA, 12 nt, Human
uucggcauuuga

SEQ ID NO: 1972131 - RNA, 20 nt, Human
uucuaaaggcuaccuuugua

SEQ ID NO: 1972132 - RNA, 21 nt, Human
uucuaaaggcuaccuuuguau

SEQ ID NO: 1972133 - RNA, 21 nt, Human
uucuaaaucuccaaaauaaaa

SEQ ID NO: 1972134 - RNA, 15 nt, Human
aucucuugagccugg

SEQ ID NO: 1972135 - RNA, 14 nt, Human
aucugaaaauguau

SEQ ID NO: 1972136 - RNA, 18 nt, Human
aucucuugagccugggag

SEQ ID NO: 1972137 - RNA, 22 nt, Human
aucugaaaauguauguguaagu

SEQ ID NO: 1972138 - RNA, 20 nt, Human
aucugaaaauguauguguaa

SEQ ID NO: 1972139 - RNA, 19 nt, Human
aucugaaaauguaugugua

SEQ ID NO: 1972140 - RNA, 16 nt, Human
aucugaaaauguaugu

SEQ ID NO: 1972141 - RNA, 17 nt, Human
aucucccccagccccau

SEQ ID NO: 1972142 - RNA, 16 nt, Human
aucucccccagcccca

SEQ ID NO: 1972143 - RNA, 21 nt, Human
aucucuucuggguuccuuccu

SEQ ID NO: 1972144 - RNA, 13 nt, Human
aucucuucugugu

SEQ ID NO: 1972145 - RNA, 18 nt, Human
aucuccaagaccagagau

SEQ ID NO: 1972146 - RNA, 15 nt, Human
aucucccccagcccc

SEQ ID NO: 1972147 - RNA, 17 nt, Human
aucuccaaaauaaaacu

SEQ ID NO: 1972148 - RNA, 20 nt, Human
aucuccaaaauaaaacuuuu

SEQ ID NO: 1972149 - RNA, 21 nt, Human
aucuccaaaauaaaacuuuuu

SEQ ID NO: 1972150 - RNA, 20 nt, Human
aucucauuguucaauuccca

SEQ ID NO: 1972151 - RNA, 14 nt, Human
aucuccaaaauaaa

SEQ ID NO: 1972152 - RNA, 16 nt, Human
aucucagggccugguc

SEQ ID NO: 1972153 - RNA, 18 nt, Human
aucuacugcauuuaggga

SEQ ID NO: 1972154 - RNA, 12 nt, Human
aucugaaaaugu

SEQ ID NO: 1972155 - RNA, 23 nt, Human
aucugaaaauguauguguaagua

SEQ ID NO: 1972156 - RNA, 16 nt, Human
aucugaauuggaaugc

SEQ ID NO: 1972157 - RNA, 13 nt, Human
uugauuaaagaug

SEQ ID NO: 1972158 - RNA, 13 nt, Human
uugauuaaauucu

SEQ ID NO: 1972159 - RNA, 23 nt, Human
uugauguuuuaaggaugcuugua

SEQ ID NO: 1972160 - RNA, 13 nt, Human
uugauucacaugu

SEQ ID NO: 1972161 - RNA, 16 nt, Human
uugcaagccuccugau

SEQ ID NO: 1972162 - RNA, 22 nt, Human
uugauuaagaucucagugguua

SEQ ID NO: 1972163 - RNA, 14 nt, Human
uugauuaaagauga

SEQ ID NO: 1972164 - RNA, 14 nt, Human
uugauuaaauucuu

SEQ ID NO: 1972165 - RNA, 18 nt, Human
uugcaccacugcacucca

SEQ ID NO: 1972166 - RNA, 16 nt, Human
uugcaccacugcacuc

SEQ ID NO: 1972167 - RNA, 15 nt, Human
uugcaccacugcacu

SEQ ID NO: 1972168 - RNA, 14 nt, Human
uugcaccacugcac

SEQ ID NO: 1972169 - RNA, 16 nt, Human
uugcaauggcagccuu

SEQ ID NO: 1972170 - RNA, 21 nt, Human
uugcaagggcggccuuuccca

SEQ ID NO: 1972171 - RNA, 22 nt, Human
uugcaagggcggccuuucccac

SEQ ID NO: 1972172 - RNA, 23 nt, Human
uugcaagggcggccuuucccacu

SEQ ID NO: 1972173 - RNA, 18 nt, Human
uugcaagguaaaauuuua

SEQ ID NO: 1972174 - RNA, 17 nt, Human
uugcaauggcagccuug

SEQ ID NO: 1972175 - RNA, 19 nt, Human
uugcaauggcagccuuggc

SEQ ID NO: 1972176 - RNA, 22 nt, Human
uugcauauauuucaugaauaca

SEQ ID NO: 1972177 - RNA, 16 nt, Human
uugcauucuuauucau

SEQ ID NO: 1972178 - RNA, 23 nt, Human
uugcauauaacuuauauuguaag

SEQ ID NO: 1972179 - RNA, 17 nt, Human
uugcauaguucuagugc

SEQ ID NO: 1972180 - RNA, 14 nt, Human
uugcauauaacuua

SEQ ID NO: 1972181 - RNA, 17 nt, Human
uugcauauaacuuauau

SEQ ID NO: 1972182 - RNA, 22 nt, Human
uugcauauaacuuauauuguaa

SEQ ID NO: 1972183 - RNA, 12 nt, Human
uugaauacuuga

SEQ ID NO: 1972184 - RNA, 14 nt, Human
uugaauacuugaac

SEQ ID NO: 1972185 - RNA, 16 nt, Human
uugaauacuugaacca

SEQ ID NO: 1972186 - RNA, 17 nt, Human
uugaauacuugaaccau

SEQ ID NO: 1972187 - RNA, 13 nt, Human
uugaaucacagua

SEQ ID NO: 1972188 - RNA, 15 nt, Human
uugaaggcagaaagc

SEQ ID NO: 1972189 - RNA, 17 nt, Human
uugaaggcagaaagcaa

SEQ ID NO: 1972190 - RNA, 13 nt, Human
uugaagccuuugu

SEQ ID NO: 1972191 - RNA, 19 nt, Human
uugaagccugcuccuuccc

SEQ ID NO: 1972192 - RNA, 13 nt, Human
uugaagccugcuc

SEQ ID NO: 1972193 - RNA, 15 nt, Human
uugaagccugcuccu

SEQ ID NO: 1972194 - RNA, 16 nt, Human
uugaagccugcuccuu

SEQ ID NO: 1972195 - RNA, 23 nt, Human
uugaauaaacaccacuggauuaa

SEQ ID NO: 1972196 - RNA, 21 nt, Human
uugaauaaacaccacuggauu

SEQ ID NO: 1972197 - RNA, 22 nt, Human
uugaauaaacaccacuggauua

SEQ ID NO: 1972198 - RNA, 12 nt, Human
uugaauaaacua

SEQ ID NO: 1972199 - RNA, 17 nt, Human
uugaagggaaauuucag

SEQ ID NO: 1972200 - RNA, 17 nt, Human
aucuaaauggaaccacu

SEQ ID NO: 1972201 - RNA, 18 nt, Human
aucuaaauggaaccacuc

SEQ ID NO: 1972202 - RNA, 13 nt, Human
aucuaaauggaac

SEQ ID NO: 1972203 - RNA, 16 nt, Human
aucuaaaaauaacugu

SEQ ID NO: 1972204 - RNA, 18 nt, Human
aucuaaaaauaacuguaa

SEQ ID NO: 1972205 - RNA, 20 nt, Human
aucuaaaaauaacuguaauu

SEQ ID NO: 1972206 - RNA, 16 nt, Human
aucuaaaucuguccaa

SEQ ID NO: 1972207 - RNA, 17 nt, Human
auccucuguacagagcc

SEQ ID NO: 1972208 - RNA, 16 nt, Human
auccucuguacagagc

SEQ ID NO: 1972209 - RNA, 14 nt, Human
auccuccuccuucc

SEQ ID NO: 1972210 - RNA, 17 nt, Human
auccuccuccuuccuag

SEQ ID NO: 1972211 - RNA, 18 nt, Human
auccuccuccuuccuagu

SEQ ID NO: 1972212 - RNA, 13 nt, Human
auccuccuccuuc

SEQ ID NO: 1972213 - RNA, 12 nt, Human
uugacagcucag

SEQ ID NO: 1972214 - RNA, 23 nt, Human
uugacagagagagauacucuggg

SEQ ID NO: 1972215 - RNA, 17 nt, Human
uugacagagccugcccc

SEQ ID NO: 1972216 - RNA, 19 nt, Human
uugacagagccugccccag

SEQ ID NO: 1972217 - RNA, 23 nt, Human
uugacagagccugccccagcgcu

SEQ ID NO: 1972218 - RNA, 12 nt, Human
uugagacagagu

SEQ ID NO: 1972219 - RNA, 16 nt, Human
uugagaucagccuggg

SEQ ID NO: 1972220 - RNA, 15 nt, Human
uugagaucagccugg

SEQ ID NO: 1972221 - RNA, 16 nt, Human
uugagaccgugaagau

SEQ ID NO: 1972222 - RNA, 21 nt, Human
uugagaccgugaagauacuuu

SEQ ID NO: 1972223 - RNA, 22 nt, Human
uugagaccgugaagauacuuug

SEQ ID NO: 1972224 - RNA, 18 nt, Human
uugaguauauuauaauag

SEQ ID NO: 1972225 - RNA, 13 nt, Human
uugagucauuuua

SEQ ID NO: 1972226 - RNA, 16 nt, Human
uugagauguguucaca

SEQ ID NO: 1972227 - RNA, 11 nt, Human
uugagucuuuu

SEQ ID NO: 1972228 - RNA, 21 nt, Human
uugagucuuuuuuuuuuaagu

SEQ ID NO: 1972229 - RNA, 20 nt, Human
uugagugaagcugggagaac

SEQ ID NO: 1972230 - RNA, 20 nt, Human
uugaguugauucagcucugc

SEQ ID NO: 1972231 - RNA, 17 nt, Human
uugaguuguuuuuguau

SEQ ID NO: 1972232 - RNA, 18 nt, Human
uugaguuguuuuuguaua

SEQ ID NO: 1972233 - RNA, 19 nt, Human
uugaguuguuuuuguauau

SEQ ID NO: 1972234 - RNA, 14 nt, Human
uugauaauuuuccu

SEQ ID NO: 1972235 - RNA, 16 nt, Human
uugauaauuuuccuuu

SEQ ID NO: 1972236 - RNA, 17 nt, Human
uugauaauuuuccuuua

SEQ ID NO: 1972237 - RNA, 18 nt, Human
uugauaauuuuccuuuaa

SEQ ID NO: 1972238 - RNA, 19 nt, Human
aucuacacuccagugagac

SEQ ID NO: 1972239 - RNA, 12 nt, Human
aucuaccaacuu

SEQ ID NO: 1972240 - RNA, 13 nt, Human
aucuacugcauuu

SEQ ID NO: 1972241 - RNA, 14 nt, Human
aucuacugcauuua

SEQ ID NO: 1972242 - RNA, 18 nt, Human
aucuacacuccagugaga

SEQ ID NO: 1972243 - RNA, 12 nt, Human
aucuaauuucaa

SEQ ID NO: 1972244 - RNA, 18 nt, Human
aucuaauauguaacaagc

SEQ ID NO: 1972245 - RNA, 19 nt, Human
augaaagggcccagagagg

SEQ ID NO: 1972246 - RNA, 13 nt, Human
augaaauguaugu

SEQ ID NO: 1972247 - RNA, 14 nt, Human
augaaaugcuaugu

SEQ ID NO: 1972248 - RNA, 22 nt, Human
augaaaugcuaugucauuucau

SEQ ID NO: 1972249 - RNA, 23 nt, Human
augaaaugcuaugucauuucaug

SEQ ID NO: 1972250 - RNA, 16 nt, Human
augaaagucaguuuaa

SEQ ID NO: 1972251 - RNA, 15 nt, Human
augaaagguauguag

SEQ ID NO: 1972252 - RNA, 16 nt, Human
augaagaauuuaaaga

SEQ ID NO: 1972253 - RNA, 13 nt, Human
augaagaauuuaa

SEQ ID NO: 1972254 - RNA, 16 nt, Human
augaauauuuaguguu

SEQ ID NO: 1972255 - RNA, 16 nt, Human
augaagagcuguugau

SEQ ID NO: 1972256 - RNA, 11 nt, Human
augaagaggag

SEQ ID NO: 1972257 - RNA, 23 nt, Human
augaauggcuaagcaaaauguga

SEQ ID NO: 1972258 - RNA, 21 nt, Human
augaauauuuaguguucauaa

SEQ ID NO: 1972259 - RNA, 23 nt, Human
uuggggacaggggcaggaggaag

SEQ ID NO: 1972260 - RNA, 18 nt, Human
uuggggaccagagcugcc

SEQ ID NO: 1972261 - RNA, 17 nt, Human
uuggugaauuucacaag

SEQ ID NO: 1972262 - RNA, 17 nt, Human
uuggcucccaucuuuug

SEQ ID NO: 1972263 - RNA, 22 nt, Human
uuggcucccaucuuuuguuacu

SEQ ID NO: 1972264 - RNA, 22 nt, Human
uuggcuccugcccacugauagc

SEQ ID NO: 1972265 - RNA, 15 nt, Human
aucuuugauguguug

SEQ ID NO: 1972266 - RNA, 16 nt, Human
aucuuugauguguugu

SEQ ID NO: 1972267 - RNA, 17 nt, Human
aucuuugauguguuguu

SEQ ID NO: 1972268 - RNA, 19 nt, Human
aucuuugauguguuguucu

SEQ ID NO: 1972269 - RNA, 12 nt, Human
aucuuugaugug

SEQ ID NO: 1972270 - RNA, 14 nt, Human
aucuuugauguguu

SEQ ID NO: 1972271 - RNA, 22 nt, Human
aucuuuucauuuaggugaggaa

SEQ ID NO: 1972272 - RNA, 17 nt, Human
aucuuugcagacaggca

SEQ ID NO: 1972273 - RNA, 21 nt, Human
aucuuugauguguuguucuug

SEQ ID NO: 1972274 - RNA, 16 nt, Human
aucuuuucugaaucuu

SEQ ID NO: 1972275 - RNA, 18 nt, Human
aucuuuucugaaucuucu

SEQ ID NO: 1972276 - RNA, 18 nt, Human
augaaagggcccagagag

SEQ ID NO: 1972277 - RNA, 14 nt, Human
uuggagggccuggg

SEQ ID NO: 1972278 - RNA, 15 nt, Human
uuggagggccugggc

SEQ ID NO: 1972279 - RNA, 14 nt, Human
uugcuugaaagaaa

SEQ ID NO: 1972280 - RNA, 21 nt, Human
uugcuugaagcaaacaguuga

SEQ ID NO: 1972281 - RNA, 11 nt, Human
uuggagacaga

SEQ ID NO: 1972282 - RNA, 16 nt, Human
uuggagggugucccaa

SEQ ID NO: 1972283 - RNA, 17 nt, Human
uuggaguagaauguagu

SEQ ID NO: 1972284 - RNA, 14 nt, Human
uuggaguagaaugu

SEQ ID NO: 1972285 - RNA, 21 nt, Human
uuggcccagggggcuuccuga

SEQ ID NO: 1972286 - RNA, 18 nt, Human
uuggccccugcccggcug

SEQ ID NO: 1972287 - RNA, 23 nt, Human
uuggccugagaugccuggugagc

SEQ ID NO: 1972288 - RNA, 14 nt, Human
uuggcccuuuccuu

SEQ ID NO: 1972289 - RNA, 19 nt, Human
uuggcccuuuccuuccaga

SEQ ID NO: 1972290 - RNA, 22 nt, Human
uuggccucugcaaaggaaauac

SEQ ID NO: 1972291 - RNA, 13 nt, Human
uuggccucagagg

SEQ ID NO: 1972292 - RNA, 14 nt, Human
aucuugugaaaaua

SEQ ID NO: 1972293 - RNA, 15 nt, Human
aucuugugaaaauaa

SEQ ID NO: 1972294 - RNA, 18 nt, Human
aucuugugaaaauaauug

SEQ ID NO: 1972295 - RNA, 19 nt, Human
aucuugugaaaauaauuga

SEQ ID NO: 1972296 - RNA, 13 nt, Human
uugcuucuucuga

SEQ ID NO: 1972297 - RNA, 21 nt, Human
uugcucucuuuuauucugugc

SEQ ID NO: 1972298 - RNA, 12 nt, Human
uugcuccuugac

SEQ ID NO: 1972299 - RNA, 18 nt, Human
uugcucuaaaauauuuau

SEQ ID NO: 1972300 - RNA, 20 nt, Human
uugcucuaaaauauuuauga

SEQ ID NO: 1972301 - RNA, 21 nt, Human
uugcucuaaaauauuuaugaa

SEQ ID NO: 1972302 - RNA, 22 nt, Human
uugcucuaaaauauuuaugaag

SEQ ID NO: 1972303 - RNA, 20 nt, Human
uugcucacaguuauuacaua

SEQ ID NO: 1972304 - RNA, 19 nt, Human
uugcucacaguuauuacau

SEQ ID NO: 1972305 - RNA, 21 nt, Human
aucuguuuuauaccuugcuua

SEQ ID NO: 1972306 - RNA, 15 nt, Human
aucuguuuacagugu

SEQ ID NO: 1972307 - RNA, 17 nt, Human
aucuguuuacaguguuc

SEQ ID NO: 1972308 - RNA, 11 nt, Human
aucugucuuuc

SEQ ID NO: 1972309 - RNA, 13 nt, Human
aucugucuuucca

SEQ ID NO: 1972310 - RNA, 17 nt, Human
aucugucuuuccacucu

SEQ ID NO: 1972311 - RNA, 20 nt, Human
aucugucuuuccacucugga

SEQ ID NO: 1972312 - RNA, 21 nt, Human
aucugucuuuccacucuggau

SEQ ID NO: 1972313 - RNA, 18 nt, Human
aucugugaaaggaaagag

SEQ ID NO: 1972314 - RNA, 20 nt, Human
aucuuggucagauuugaacu

SEQ ID NO: 1972315 - RNA, 13 nt, Human
aucuugcucugcu

SEQ ID NO: 1972316 - RNA, 17 nt, Human
aucuugcucucuuuuau

SEQ ID NO: 1972317 - RNA, 14 nt, Human
aucuuauaauuuaa

SEQ ID NO: 1972318 - RNA, 14 nt, Human
uugcauuucagaaa

SEQ ID NO: 1972319 - RNA, 20 nt, Human
uugcauuucagaaagccuuu

SEQ ID NO: 1972320 - RNA, 14 nt, Human
uugcauuugcuuuu

SEQ ID NO: 1972321 - RNA, 13 nt, Human
uugcauuucagaa

SEQ ID NO: 1972322 - RNA, 12 nt, Human
uugcauuuuugc

SEQ ID NO: 1972323 - RNA, 17 nt, Human
uugccaaaacccagcug

SEQ ID NO: 1972324 - RNA, 18 nt, Human
uugccaaaacccagcugc

SEQ ID NO: 1972325 - RNA, 19 nt, Human
uugccaaaacccagcugca

SEQ ID NO: 1972326 - RNA, 21 nt, Human
uugccaaaacccagcugcacc

SEQ ID NO: 1972327 - RNA, 22 nt, Human
uugccaaaacccagcugcaccc

SEQ ID NO: 1972328 - RNA, 19 nt, Human
uugccaaacauuaauguug

SEQ ID NO: 1972329 - RNA, 20 nt, Human
uugccaaacauuaauguuga

SEQ ID NO: 1972330 - RNA, 23 nt, Human
uugccaaaacccagcugcacccc

SEQ ID NO: 1972331 - RNA, 13 nt, Human
uugccaaaauggu

SEQ ID NO: 1972332 - RNA, 13 nt, Human
uugccaaacauua

SEQ ID NO: 1972333 - RNA, 14 nt, Human
uugccaaacauuaa

SEQ ID NO: 1972334 - RNA, 15 nt, Human
uugccaaacauuaau

SEQ ID NO: 1972335 - RNA, 14 nt, Human
aucuguaugauucu

SEQ ID NO: 1972336 - RNA, 15 nt, Human
aucuguaugauucua

SEQ ID NO: 1972337 - RNA, 19 nt, Human
aucuguaugauucuaugga

SEQ ID NO: 1972338 - RNA, 11 nt, Human
aucugucugcu

SEQ ID NO: 1972339 - RNA, 14 nt, Human
aucugucugcuggu

SEQ ID NO: 1972340 - RNA, 17 nt, Human
aucugugaaaggaaaga

SEQ ID NO: 1972341 - RNA, 23 nt, Human
aucugucugcuggucacuucuuc

SEQ ID NO: 1972342 - RNA, 17 nt, Human
aucuggugacuuuccuc

SEQ ID NO: 1972343 - RNA, 16 nt, Human
aucuggugacuuuccu

SEQ ID NO: 1972344 - RNA, 10 nt, Human
aucuggugac

SEQ ID NO: 1972345 - RNA, 13 nt, Human
aucugguuuucuc

SEQ ID NO: 1972346 - RNA, 15 nt, Human
aucugguuuucucuc

SEQ ID NO: 1972347 - RNA, 13 nt, Human
auaauuuuaaaug

SEQ ID NO: 1972348 - RNA, 12 nt, Human
auaauuuuaaau

SEQ ID NO: 1972349 - RNA, 14 nt, Human
auaauuuuaaaugu

SEQ ID NO: 1972350 - RNA, 18 nt, Human
auaauuugguauccuuau

SEQ ID NO: 1972351 - RNA, 18 nt, Human
uuagaugugcugcuuuga

SEQ ID NO: 1972352 - RNA, 23 nt, Human
auaauucacauuguauucagagu

SEQ ID NO: 1972353 - RNA, 19 nt, Human
auaauuauuugucucagau

SEQ ID NO: 1972354 - RNA, 20 nt, Human
auaauucaggaagcagcuuu

SEQ ID NO: 1972355 - RNA, 13 nt, Human
auaauuuacugug

SEQ ID NO: 1972356 - RNA, 21 nt, Human
auaauuuacugugacuuuauu

SEQ ID NO: 1972357 - RNA, 18 nt, Human
auaauauguuuccuuccc

SEQ ID NO: 1972358 - RNA, 19 nt, Human
auaauauguuuccuucccu

SEQ ID NO: 1972359 - RNA, 16 nt, Human
auaauaucucuaauau

SEQ ID NO: 1972360 - RNA, 20 nt, Human
auaaucaagagccuuaaaac

SEQ ID NO: 1972361 - RNA, 21 nt, Human
auaaucaagagccuuaaaaca

SEQ ID NO: 1972362 - RNA, 22 nt, Human
auaaucaagagccuuaaaacau

SEQ ID NO: 1972363 - RNA, 20 nt, Human
auaauauguuuccuucccuc

SEQ ID NO: 1972364 - RNA, 17 nt, Human
auaaucaagagccuuaa

SEQ ID NO: 1972365 - RNA, 16 nt, Human
auaaucaagagccuua

SEQ ID NO: 1972366 - RNA, 18 nt, Human
auaaucacaacccuucag

SEQ ID NO: 1972367 - RNA, 22 nt, Human
auaaucuggacuccucugucca

SEQ ID NO: 1972368 - RNA, 22 nt, Human
auaagccaaaaaaugcuugcuu

SEQ ID NO: 1972369 - RNA, 21 nt, Human
auaagauucauauuuacuucu

SEQ ID NO: 1972370 - RNA, 15 nt, Human
auaagcaguuaugug

SEQ ID NO: 1972371 - RNA, 14 nt, Human
auaagccagacauc

SEQ ID NO: 1972372 - RNA, 14 nt, Human
auaagccaaaauua

SEQ ID NO: 1972373 - RNA, 18 nt, Human
uuagguuggcaaaaaggc

SEQ ID NO: 1972374 - RNA, 13 nt, Human
uuaguaaucauau

SEQ ID NO: 1972375 - RNA, 14 nt, Human
uuaguaaucauauu

SEQ ID NO: 1972376 - RNA, 13 nt, Human
uuaguaagucuug

SEQ ID NO: 1972377 - RNA, 15 nt, Human
uuaggugaggaagca

SEQ ID NO: 1972378 - RNA, 19 nt, Human
uuaggugugggggaagcac

SEQ ID NO: 1972379 - RNA, 15 nt, Human
uuagauuaagaaaua

SEQ ID NO: 1972380 - RNA, 19 nt, Human
uuagauuaagaaauagaca

SEQ ID NO: 1972381 - RNA, 20 nt, Human
uuagaugugcugcuuugaua

SEQ ID NO: 1972382 - RNA, 14 nt, Human
uuagggaguauucu

SEQ ID NO: 1972383 - RNA, 17 nt, Human
uuagggaguauucuaau

SEQ ID NO: 1972384 - RNA, 18 nt, Human
uuagggaguauucuaaua

SEQ ID NO: 1972385 - RNA, 15 nt, Human
uuagggcucuaauuu

SEQ ID NO: 1972386 - RNA, 22 nt, Human
uuauaaaacguguuuguauugu

SEQ ID NO: 1972387 - RNA, 19 nt, Human
uuauaaaacagaguaaucu

SEQ ID NO: 1972388 - RNA, 22 nt, Human
uuauaaaacagaguaaucuugu

SEQ ID NO: 1972389 - RNA, 22 nt, Human
uuauaaaaauaaaaaacacugg

SEQ ID NO: 1972390 - RNA, 21 nt, Human
uuauaaaaauaaaaaacacug

SEQ ID NO: 1972391 - RNA, 15 nt, Human
uuauaaaauuuacug

SEQ ID NO: 1972392 - RNA, 13 nt, Human
uuauaaacaagaa

SEQ ID NO: 1972393 - RNA, 13 nt, Human
uuauaaacuuuac

SEQ ID NO: 1972394 - RNA, 20 nt, Human
uuauaaacaagaaugaaggu

SEQ ID NO: 1972395 - RNA, 21 nt, Human
uuauaaacaagaaugaagguu

SEQ ID NO: 1972396 - RNA, 18 nt, Human
uuauaaacucauuuugcu

SEQ ID NO: 1972397 - RNA, 15 nt, Human
uuauaaaaauaaaaa

SEQ ID NO: 1972398 - RNA, 21 nt, Human
uuaguacuuuauagaagaaug

SEQ ID NO: 1972399 - RNA, 14 nt, Human
uuaguagagacagg

SEQ ID NO: 1972400 - RNA, 19 nt, Human
uuaguacuccccuccuuga

SEQ ID NO: 1972401 - RNA, 13 nt, Human
uuaguagagacag

SEQ ID NO: 1972402 - RNA, 12 nt, Human
uuaguacuuuau

SEQ ID NO: 1972403 - RNA, 13 nt, Human
uuaguacuuuaua

SEQ ID NO: 1972404 - RNA, 16 nt, Human
uuaguacuuuauagaa

SEQ ID NO: 1972405 - RNA, 17 nt, Human
uuaguacuuuauagaag

SEQ ID NO: 1972406 - RNA, 19 nt, Human
uuaguacuuuauagaagaa

SEQ ID NO: 1972407 - RNA, 17 nt, Human
uuagaaucccuguguua

SEQ ID NO: 1972408 - RNA, 20 nt, Human
uuagaaucccuguguuaauu

SEQ ID NO: 1972409 - RNA, 23 nt, Human
uuagaaucccuguguuaauuuaa

SEQ ID NO: 1972410 - RNA, 13 nt, Human
uuagaauguugaa

SEQ ID NO: 1972411 - RNA, 18 nt, Human
uuagaauggugauuuuaa

SEQ ID NO: 1972412 - RNA, 19 nt, Human
uuagaauggugauuuuaaa

SEQ ID NO: 1972413 - RNA, 21 nt, Human
uuagaauggugauuuuaaaug

SEQ ID NO: 1972414 - RNA, 13 nt, Human
uuagaagguauua

SEQ ID NO: 1972415 - RNA, 18 nt, Human
uuagaagguauuaagauu

SEQ ID NO: 1972416 - RNA, 16 nt, Human
uuagaagucacacagu

SEQ ID NO: 1972417 - RNA, 14 nt, Human
auaagauucauauu

SEQ ID NO: 1972418 - RNA, 22 nt, Human
auaagaaaagauguagauuuau

SEQ ID NO: 1972419 - RNA, 11 nt, Human
auaagaaaaga

SEQ ID NO: 1972420 - RNA, 12 nt, Human
auaagaaaagau

SEQ ID NO: 1972421 - RNA, 18 nt, Human
auaagaaaagauguagau

SEQ ID NO: 1972422 - RNA, 21 nt, Human
auaagaaaagauguagauuua

SEQ ID NO: 1972423 - RNA, 13 nt, Human
uuacuguacauga

SEQ ID NO: 1972424 - RNA, 14 nt, Human
uuacuguacaugaa

SEQ ID NO: 1972425 - RNA, 22 nt, Human
uuacuguacaugaaaacacauu

SEQ ID NO: 1972426 - RNA, 23 nt, Human
uuacuguacaugaaaacacauuu

SEQ ID NO: 1972427 - RNA, 12 nt, Human
uuacuguacaug

SEQ ID NO: 1972428 - RNA, 23 nt, Human
uuacuguacagacagaaaaaacu

SEQ ID NO: 1972429 - RNA, 18 nt, Human
uuaccagugccuuaaacu

SEQ ID NO: 1972430 - RNA, 17 nt, Human
uuaccauaguuuucuca

SEQ ID NO: 1972431 - RNA, 15 nt, Human
uuacugcagcuuugu

SEQ ID NO: 1972432 - RNA, 23 nt, Human
uuacuccauauauauauaugugu

SEQ ID NO: 1972433 - RNA, 18 nt, Human
uuacaaaggcuguauuca

SEQ ID NO: 1972434 - RNA, 17 nt, Human
uuacaaaauguaacugu

SEQ ID NO: 1972435 - RNA, 18 nt, Human
uuacaaaauguaacuguu

SEQ ID NO: 1972436 - RNA, 19 nt, Human
uuacaaaauguaacuguua

SEQ ID NO: 1972437 - RNA, 21 nt, Human
uuaaucuacugcauuuaggga

SEQ ID NO: 1972438 - RNA, 21 nt, Human
auaaaucuaaugacauucaau

SEQ ID NO: 1972439 - RNA, 21 nt, Human
uuacaaaugauugcuuuuaaa

SEQ ID NO: 1972440 - RNA, 23 nt, Human
uuacaaaugauugcuuuuaaaau

SEQ ID NO: 1972441 - RNA, 14 nt, Human
uuacaaaugauugc

SEQ ID NO: 1972442 - RNA, 17 nt, Human
uuacaaaugauugcuuu

SEQ ID NO: 1972443 - RNA, 19 nt, Human
uuacaaaugauugcuuuua

SEQ ID NO: 1972444 - RNA, 20 nt, Human
uuacaaaugauugcuuuuaa

SEQ ID NO: 1972445 - RNA, 12 nt, Human
uuacaaaugauu

SEQ ID NO: 1972446 - RNA, 13 nt, Human
auaaauugcuccu

SEQ ID NO: 1972447 - RNA, 16 nt, Human
auaaauugcuccuuga

SEQ ID NO: 1972448 - RNA, 18 nt, Human
auaaaugauucaaaaagu

SEQ ID NO: 1972449 - RNA, 17 nt, Human
uuacaguggggaaugaa

SEQ ID NO: 1972450 - RNA, 17 nt, Human
uuacagugccuaaaaua

SEQ ID NO: 1972451 - RNA, 20 nt, Human
uuacaggugauuaacuugga

SEQ ID NO: 1972452 - RNA, 13 nt, Human
uuacaguguuccg

SEQ ID NO: 1972453 - RNA, 18 nt, Human
uuacagugccuaaaauaa

SEQ ID NO: 1972454 - RNA, 13 nt, Human
uuacaguuacuuu

SEQ ID NO: 1972455 - RNA, 14 nt, Human
uuacaguuacuuuu

SEQ ID NO: 1972456 - RNA, 16 nt, Human
uuacaguuacuuuucc

SEQ ID NO: 1972457 - RNA, 18 nt, Human
uuacaguuacuuuuccuu

SEQ ID NO: 1972458 - RNA, 19 nt, Human
uuacaguuacuuuuccuug

SEQ ID NO: 1972459 - RNA, 19 nt, Human
uuaccagcagagcaccuua

SEQ ID NO: 1972460 - RNA, 14 nt, Human
uuacauaaacauca

SEQ ID NO: 1972461 - RNA, 18 nt, Human
uuacauaaacaucagguu

SEQ ID NO: 1972462 - RNA, 16 nt, Human
uuacaguuauagaaag

SEQ ID NO: 1972463 - RNA, 17 nt, Human
uuacagguaccaguucu

SEQ ID NO: 1972464 - RNA, 13 nt, Human
uuacaggugauua

SEQ ID NO: 1972465 - RNA, 15 nt, Human
uuacaggugauuaac

SEQ ID NO: 1972466 - RNA, 14 nt, Human
uuacaggugugaac

SEQ ID NO: 1972467 - RNA, 18 nt, Human
auaaauugcuccuugaca

SEQ ID NO: 1972468 - RNA, 15 nt, Human
auaacuauguugaua

SEQ ID NO: 1972469 - RNA, 11 nt, Human
uuaaucacugu

SEQ ID NO: 1972470 - RNA, 13 nt, Human
uuaaucacugugu

SEQ ID NO: 1972471 - RNA, 14 nt, Human
uuaaucacugugua

SEQ ID NO: 1972472 - RNA, 15 nt, Human
uuaaucacuguguau

SEQ ID NO: 1972473 - RNA, 17 nt, Human
uuaaucacuguguauau

SEQ ID NO: 1972474 - RNA, 20 nt, Human
uuaaucacuguguauauuug

SEQ ID NO: 1972475 - RNA, 15 nt, Human
uuaaucagaagaaaa

SEQ ID NO: 1972476 - RNA, 15 nt, Human
uuaaucuaaauggaa

SEQ ID NO: 1972477 - RNA, 14 nt, Human
uuaaucuacugcau

SEQ ID NO: 1972478 - RNA, 15 nt, Human
uuaaucuacugcauu

SEQ ID NO: 1972479 - RNA, 16 nt, Human
uuaaucuacugcauuu

SEQ ID NO: 1972480 - RNA, 12 nt, Human
uuaaucauuuuu

SEQ ID NO: 1972481 - RNA, 22 nt, Human
uuaagagagucuauuuacggaa

SEQ ID NO: 1972482 - RNA, 22 nt, Human
uuaagacgaaacauuuguucua

SEQ ID NO: 1972483 - RNA, 20 nt, Human
uuaaguuuugacaagcuggc

SEQ ID NO: 1972484 - RNA, 13 nt, Human
uuaaguuugcacu

SEQ ID NO: 1972485 - RNA, 16 nt, Human
uuaauuugguuuucac

SEQ ID NO: 1972486 - RNA, 13 nt, Human
uuaauuuggacca

SEQ ID NO: 1972487 - RNA, 18 nt, Human
uuaauuuggaccauuuuc

SEQ ID NO: 1972488 - RNA, 19 nt, Human
uuaauuuggaccauuuucc

SEQ ID NO: 1972489 - RNA, 21 nt, Human
uuaauuuggaccauuuuccug

SEQ ID NO: 1972490 - RNA, 15 nt, Human
uuaauuuuuaaaugc

SEQ ID NO: 1972491 - RNA, 16 nt, Human
uuaauuuuuaaaugca

SEQ ID NO: 1972492 - RNA, 12 nt, Human
uuaauuuugucu

SEQ ID NO: 1972493 - RNA, 23 nt, Human
uuaauuuugucugccccaaguuu

SEQ ID NO: 1972494 - RNA, 14 nt, Human
uuaauuuuuaaaug

SEQ ID NO: 1972495 - RNA, 13 nt, Human
uuaaucuuuaauu

SEQ ID NO: 1972496 - RNA, 17 nt, Human
uuaaucuuuaauuuuac

SEQ ID NO: 1972497 - RNA, 14 nt, Human
uuaauuucaagcuu

SEQ ID NO: 1972498 - RNA, 14 nt, Human
uuaauuucaguaag

SEQ ID NO: 1972499 - RNA, 13 nt, Human
uuaauuugaaaua

SEQ ID NO: 1972500 - RNA, 15 nt, Human
uuaauuugaaauaug

SEQ ID NO: 1972501 - RNA, 23 nt, Human
uuaacuuuuauaaacuuuaccuu

SEQ ID NO: 1972502 - RNA, 22 nt, Human
uuaacuuuuauaaacuuuaccu

SEQ ID NO: 1972503 - RNA, 20 nt, Human
auaaaagccuguuuaagaga

SEQ ID NO: 1972504 - RNA, 13 nt, Human
auaaaaaaaagaa

SEQ ID NO: 1972505 - RNA, 19 nt, Human
auaaaagccuguuuaagag

SEQ ID NO: 1972506 - RNA, 22 nt, Human
uuaagacacuuccgucacaucc

SEQ ID NO: 1972507 - RNA, 18 nt, Human
uuaagacauuuuuggaag

SEQ ID NO: 1972508 - RNA, 23 nt, Human
uuaagacauuuuuggaaggggac

SEQ ID NO: 1972509 - RNA, 19 nt, Human
uuaagacgaaacauuuguu

SEQ ID NO: 1972510 - RNA, 11 nt, Human
uuaagaaaaaa

SEQ ID NO: 1972511 - RNA, 22 nt, Human
uuaagaaugaguuucuuagacu

SEQ ID NO: 1972512 - RNA, 23 nt, Human
uuaagaaugaguuucuuagacuu

SEQ ID NO: 1972513 - RNA, 16 nt, Human
uuaagaauuucacaag

SEQ ID NO: 1972514 - RNA, 18 nt, Human
uuaagaaugaguuucuua

SEQ ID NO: 1972515 - RNA, 20 nt, Human
uuaagaaugaguuucuuaga

SEQ ID NO: 1972516 - RNA, 20 nt, Human
aguuuuucauaagauauuuu

SEQ ID NO: 1972517 - RNA, 11 nt, Human
aguuuuucugu

SEQ ID NO: 1972518 - RNA, 13 nt, Human
aguuuuucugucc

SEQ ID NO: 1972519 - RNA, 15 nt, Human
aguuuuuuuuauaca

SEQ ID NO: 1972520 - RNA, 12 nt, Human
aguuuuucuuaa

SEQ ID NO: 1972521 - RNA, 16 nt, Human
aguuuugugaaauuuu

SEQ ID NO: 1972522 - RNA, 18 nt, Human
aguuuugugaaauuuuuc

SEQ ID NO: 1972523 - RNA, 19 nt, Human
aguuuugugaaauuuuuca

SEQ ID NO: 1972524 - RNA, 20 nt, Human
aguuuugugaaauuuuucau

SEQ ID NO: 1972525 - RNA, 21 nt, Human
aguuuugugaaauuuuucaua

SEQ ID NO: 1972526 - RNA, 17 nt, Human
aguuuuacccuauaucu

SEQ ID NO: 1972527 - RNA, 19 nt, Human
aguuuuacccuauaucuau

SEQ ID NO: 1972528 - RNA, 18 nt, Human
aguuuuaggguacaugug

SEQ ID NO: 1972529 - RNA, 19 nt, Human
aguuuuaggguacaugugc

SEQ ID NO: 1972530 - RNA, 12 nt, Human
uuaaaguuucaa

SEQ ID NO: 1972531 - RNA, 13 nt, Human
uuaaaguuucaaa

SEQ ID NO: 1972532 - RNA, 14 nt, Human
uuaaaguuucaaaa

SEQ ID NO: 1972533 - RNA, 16 nt, Human
uuaaaguuucaaaaau

SEQ ID NO: 1972534 - RNA, 18 nt, Human
uuaaaguuucaaaaaucu

SEQ ID NO: 1972535 - RNA, 19 nt, Human
uuaaaguuucaaaaaucug

SEQ ID NO: 1972536 - RNA, 20 nt, Human
uuaaaguuucaaaaaucuga

SEQ ID NO: 1972537 - RNA, 21 nt, Human
uuaaaguuucaaaaaucugaa

SEQ ID NO: 1972538 - RNA, 12 nt, Human
uuaacagaaaug

SEQ ID NO: 1972539 - RNA, 17 nt, Human
uuaaauuuuuuuguaug

SEQ ID NO: 1972540 - RNA, 20 nt, Human
uuaaauuuuuuuguaugaaa

SEQ ID NO: 1972541 - RNA, 21 nt, Human
uuaaauuuuuuuguaugaaaa

SEQ ID NO: 1972542 - RNA, 22 nt, Human
uuaaauuuuuuuguaugaaaac

SEQ ID NO: 1972543 - RNA, 13 nt, Human
uuaacagaaaugu

SEQ ID NO: 1972544 - RNA, 14 nt, Human
uuaacagaaaugua

SEQ ID NO: 1972545 - RNA, 17 nt, Human
aguuuaugucucaguuu

SEQ ID NO: 1972546 - RNA, 23 nt, Human
uuaaauuuuuuuguaugaaaaca

SEQ ID NO: 1972547 - RNA, 16 nt, Human
uuaacagaaauguaca

SEQ ID NO: 1972548 - RNA, 19 nt, Human
aguuucugccgcagcccug

SEQ ID NO: 1972549 - RNA, 22 nt, Human
aguuuguuaguaugaggcauuu

SEQ ID NO: 1972550 - RNA, 15 nt, Human
aguuuuacaguguuu

SEQ ID NO: 1972551 - RNA, 22 nt, Human
aguuuguuucuuugaauuuuca

SEQ ID NO: 1972552 - RNA, 23 nt, Human
aguuuguuucuuugaauuuucau

SEQ ID NO: 1972553 - RNA, 15 nt, Human
aguuuguugaaacac

SEQ ID NO: 1972554 - RNA, 16 nt, Human
aguuuguuucuuugaa

SEQ ID NO: 1972555 - RNA, 17 nt, Human
aguuuguuucuuugaau

SEQ ID NO: 1972556 - RNA, 18 nt, Human
aguuuguuucuuugaauu

SEQ ID NO: 1972557 - RNA, 20 nt, Human
aguuuguuucuuugaauuuu

SEQ ID NO: 1972558 - RNA, 15 nt, Human
aguuucugccgcagc

SEQ ID NO: 1972559 - RNA, 14 nt, Human
aguuucucuuuuca

SEQ ID NO: 1972560 - RNA, 13 nt, Human
aguuucucagcuc

SEQ ID NO: 1972561 - RNA, 12 nt, Human
aguuuauguuuu

SEQ ID NO: 1972562 - RNA, 14 nt, Human
aguuuauguuuugg

SEQ ID NO: 1972563 - RNA, 16 nt, Human
aguuuauguuuugguc

SEQ ID NO: 1972564 - RNA, 16 nt, Human
aguuuauuccagagcu

SEQ ID NO: 1972565 - RNA, 21 nt, Human
aguuuauuccagagcugccag

SEQ ID NO: 1972566 - RNA, 22 nt, Human
aguuuauuccagagcugccagu

SEQ ID NO: 1972567 - RNA, 19 nt, Human
uuaaaaugagaaaucuaaa

SEQ ID NO: 1972568 - RNA, 12 nt, Human
uuaaaaugagaa

SEQ ID NO: 1972569 - RNA, 21 nt, Human
uuaaaaugcaugauugcagaa

SEQ ID NO: 1972570 - RNA, 13 nt, Human
uuaaaaucuuauu

SEQ ID NO: 1972571 - RNA, 15 nt, Human
uuaaaaucuuauuaa

SEQ ID NO: 1972572 - RNA, 16 nt, Human
uuaaaaucuuauuaaa

SEQ ID NO: 1972573 - RNA, 19 nt, Human
uuaaaaucuuauuaaaguu

SEQ ID NO: 1972574 - RNA, 20 nt, Human
uuaaaaucuuauuaaaguuu

SEQ ID NO: 1972575 - RNA, 19 nt, Human
uuaaaaugauugaaaauaa

SEQ ID NO: 1972576 - RNA, 14 nt, Human
uuaaaauguacaug

SEQ ID NO: 1972577 - RNA, 15 nt, Human
uuaaaauguacaugu

SEQ ID NO: 1972578 - RNA, 17 nt, Human
uuaaaauguacauguau

SEQ ID NO: 1972579 - RNA, 19 nt, Human
uuaaaauguacauguauua

SEQ ID NO: 1972580 - RNA, 21 nt, Human
uuaaaauguacauguauuaaa

SEQ ID NO: 1972581 - RNA, 19 nt, Human
uuaaaaaucucaaauuucu

SEQ ID NO: 1972582 - RNA, 20 nt, Human
uuaaaaaucucaaauuucua

SEQ ID NO: 1972583 - RNA, 17 nt, Human
aguuuaaauuguaauag

SEQ ID NO: 1972584 - RNA, 20 nt, Human
aguuuaaauuguaauaggcg

SEQ ID NO: 1972585 - RNA, 15 nt, Human
aguuuacugagaaug

SEQ ID NO: 1972586 - RNA, 12 nt, Human
aguuuagaacag

SEQ ID NO: 1972587 - RNA, 16 nt, Human
aguuuagaacagguuu

SEQ ID NO: 1972588 - RNA, 17 nt, Human
aguuuagaacagguuuu

SEQ ID NO: 1972589 - RNA, 16 nt, Human
auacagggaugguguu

SEQ ID NO: 1972590 - RNA, 20 nt, Human
auacaggcuggaaaguaagg

SEQ ID NO: 1972591 - RNA, 17 nt, Human
auacaggauuauuuuga

SEQ ID NO: 1972592 - RNA, 19 nt, Human
auacaggauuauuuugauu

SEQ ID NO: 1972593 - RNA, 21 nt, Human
auacaggaugaugacuaugga

SEQ ID NO: 1972594 - RNA, 18 nt, Human
auacaguuacucagaauu

SEQ ID NO: 1972595 - RNA, 23 nt, Human
auacagauagauauaugcucugc

SEQ ID NO: 1972596 - RNA, 13 nt, Human
auacagauaaaug

SEQ ID NO: 1972597 - RNA, 17 nt, Human
auacagauaaaugauuc

SEQ ID NO: 1972598 - RNA, 18 nt, Human
auacagauaaaugauuca

SEQ ID NO: 1972599 - RNA, 23 nt, Human
auacaggaaaagcugcugacagu

SEQ ID NO: 1972600 - RNA, 16 nt, Human
auacaugaugauuuca

SEQ ID NO: 1972601 - RNA, 19 nt, Human
auacaugaugauuucagaa

SEQ ID NO: 1972602 - RNA, 20 nt, Human
auacaguuacucagaauucu

SEQ ID NO: 1972603 - RNA, 20 nt, Human
auacauaaacaagaccacgu

SEQ ID NO: 1972604 - RNA, 17 nt, Human
auacagaggcaacugca

SEQ ID NO: 1972605 - RNA, 16 nt, Human
auacagaggcaacugc

SEQ ID NO: 1972606 - RNA, 21 nt, Human
auacagaccgaacuguuguau

SEQ ID NO: 1972607 - RNA, 18 nt, Human
auacagaccgaacuguug

SEQ ID NO: 1972608 - RNA, 20 nt, Human
auacagaccgaacuguugua

SEQ ID NO: 1972609 - RNA, 17 nt, Human
uuauaaacuuuaccuuu

SEQ ID NO: 1972610 - RNA, 18 nt, Human
uuauaaacuuuaccuuuu

SEQ ID NO: 1972611 - RNA, 16 nt, Human
uuauaaacuuuuuucu

SEQ ID NO: 1972612 - RNA, 12 nt, Human
uuauaaacuuuu

SEQ ID NO: 1972613 - RNA, 22 nt, Human
uuauaaacuuuuuucuuacugu

SEQ ID NO: 1972614 - RNA, 12 nt, Human
uuauaaaggaau

SEQ ID NO: 1972615 - RNA, 20 nt, Human
auacaacaccaaaaaauauc

SEQ ID NO: 1972616 - RNA, 21 nt, Human
auacaacaccaaaaaauaucu

SEQ ID NO: 1972617 - RNA, 17 nt, Human
auaccacuuuuguucuu

SEQ ID NO: 1972618 - RNA, 18 nt, Human
auaccacuuuuguucuug

SEQ ID NO: 1972619 - RNA, 22 nt, Human
auacauguuuauguaaacaaau

SEQ ID NO: 1972620 - RNA, 19 nt, Human
auacauguuuauguaaaca

SEQ ID NO: 1972621 - RNA, 21 nt, Human
auacauguuuauguaaacaaa

SEQ ID NO: 1972622 - RNA, 14 nt, Human
auacauguuuaugu

SEQ ID NO: 1972623 - RNA, 16 nt, Human
auacauguuuauguaa

SEQ ID NO: 1972624 - RNA, 17 nt, Human
auaccagccaguaaaug

SEQ ID NO: 1972625 - RNA, 14 nt, Human
auaccuuuuuuaga

SEQ ID NO: 1972626 - RNA, 14 nt, Human
auacguacacauuu

SEQ ID NO: 1972627 - RNA, 15 nt, Human
auacguacacauuuu

SEQ ID NO: 1972628 - RNA, 18 nt, Human
auacgugggcauucaaau

SEQ ID NO: 1972629 - RNA, 19 nt, Human
auacgugggcauucaaaug

SEQ ID NO: 1972630 - RNA, 16 nt, Human
auacguacacauuuua

SEQ ID NO: 1972631 - RNA, 13 nt, Human
auacguacacauu

SEQ ID NO: 1972632 - RNA, 13 nt, Human
auacuaaccagca

SEQ ID NO: 1972633 - RNA, 21 nt, Human
auacguuucaaaaacaccccc

SEQ ID NO: 1972634 - RNA, 18 nt, Human
auacguuuuucaguuuca

SEQ ID NO: 1972635 - RNA, 19 nt, Human
auacuaaccagcagaaaug

SEQ ID NO: 1972636 - RNA, 20 nt, Human
auacuaaccagcagaaaugc

SEQ ID NO: 1972637 - RNA, 16 nt, Human
uuaucaauagcccagg

SEQ ID NO: 1972638 - RNA, 17 nt, Human
uuauauuuuucuuaaaa

SEQ ID NO: 1972639 - RNA, 20 nt, Human
uuauauuuuucuuaaaaagu

SEQ ID NO: 1972640 - RNA, 21 nt, Human
uuauauuuuucuuaaaaagua

SEQ ID NO: 1972641 - RNA, 17 nt, Human
uuaucaauagcccagga

SEQ ID NO: 1972642 - RNA, 15 nt, Human
uuauauuuggaugca

SEQ ID NO: 1972643 - RNA, 20 nt, Human
uuauauuuggaugcagaguu

SEQ ID NO: 1972644 - RNA, 22 nt, Human
uuauauuuggaugcagaguuca

SEQ ID NO: 1972645 - RNA, 14 nt, Human
uuauauuuuucuua

SEQ ID NO: 1972646 - RNA, 15 nt, Human
uuauauuuuucuuaa

SEQ ID NO: 1972647 - RNA, 16 nt, Human
uuauauuuuucuuaaa

SEQ ID NO: 1972648 - RNA, 10 nt, Human
uuaugugugu

SEQ ID NO: 1972649 - RNA, 12 nt, Human
uuaugugugugu

SEQ ID NO: 1972650 - RNA, 14 nt, Human
uuaugugugugugu

SEQ ID NO: 1972651 - RNA, 13 nt, Human
uuauguguaugug

SEQ ID NO: 1972652 - RNA, 20 nt, Human
uuauguguaugugaguauuc

SEQ ID NO: 1972653 - RNA, 22 nt, Human
uuaugugccagauuuaugcaua

SEQ ID NO: 1972654 - RNA, 15 nt, Human
uuaugugaaacaugu

SEQ ID NO: 1972655 - RNA, 13 nt, Human
uuauguauauggu

SEQ ID NO: 1972656 - RNA, 15 nt, Human
uuauguaaauaauuc

SEQ ID NO: 1972657 - RNA, 16 nt, Human
uuauguaaauaauucu

SEQ ID NO: 1972658 - RNA, 13 nt, Human
uuaugugaaacau

SEQ ID NO: 1972659 - RNA, 20 nt, Human
uuaugucauucucuuucuca

SEQ ID NO: 1972660 - RNA, 22 nt, Human
uuaugggcuggguucuacccag

SEQ ID NO: 1972661 - RNA, 16 nt, Human
uuaugguaaucauauu

SEQ ID NO: 1972662 - RNA, 15 nt, Human
uuauguaaacaaauc

SEQ ID NO: 1972663 - RNA, 17 nt, Human
uuauguaaacaaaucuu

SEQ ID NO: 1972664 - RNA, 18 nt, Human
uuaugguaaucauauuag

SEQ ID NO: 1972665 - RNA, 22 nt, Human
uuauguaaacaaaucuuuccau

SEQ ID NO: 1972666 - RNA, 23 nt, Human
uuauguaaacaaaucuuuccaua

SEQ ID NO: 1972667 - RNA, 12 nt, Human
uuauguaaauaa

SEQ ID NO: 1972668 - RNA, 13 nt, Human
uuauguaaauaau

SEQ ID NO: 1972669 - RNA, 19 nt, Human
uuauggcuuuugugcauua

SEQ ID NO: 1972670 - RNA, 13 nt, Human
uuaugggcugggu

SEQ ID NO: 1972671 - RNA, 15 nt, Human
uuaugaugacguaca

SEQ ID NO: 1972672 - RNA, 22 nt, Human
uuaugaugacguacaaguaguu

SEQ ID NO: 1972673 - RNA, 23 nt, Human
uuaugaugacguacaaguaguuc

SEQ ID NO: 1972674 - RNA, 13 nt, Human
uuaugagccaggc

SEQ ID NO: 1972675 - RNA, 20 nt, Human
uuaugauacuugaaaauuaa

SEQ ID NO: 1972676 - RNA, 22 nt, Human
uuaugauagcaaauggccucau

SEQ ID NO: 1972677 - RNA, 11 nt, Human
uuaugacucca

SEQ ID NO: 1972678 - RNA, 23 nt, Human
uuaugaagaaaauacuuaaaugu

SEQ ID NO: 1972679 - RNA, 17 nt, Human
uuaugaaacuuuuggaa

SEQ ID NO: 1972680 - RNA, 18 nt, Human
uuaugaaacuuuuggaag

SEQ ID NO: 1972681 - RNA, 14 nt, Human
uuaugaaacuuuug

SEQ ID NO: 1972682 - RNA, 19 nt, Human
uuaugaaacuuuuggaagg

SEQ ID NO: 1972683 - RNA, 12 nt, Human
uuaugaagaaaa

SEQ ID NO: 1972684 - RNA, 20 nt, Human
uuaugaagcuuuuaugugaa

SEQ ID NO: 1972685 - RNA, 23 nt, Human
uuaugaagaugggggccucuuuc

SEQ ID NO: 1972686 - RNA, 21 nt, Human
uuaugaagaaaaauuugaaaa

SEQ ID NO: 1972687 - RNA, 13 nt, Human
uuaugaagaaaau

SEQ ID NO: 1972688 - RNA, 20 nt, Human
uuaugaagaaaauacuuaaa

SEQ ID NO: 1972689 - RNA, 22 nt, Human
uuaugaagaaaauacuuaaaug

SEQ ID NO: 1972690 - RNA, 17 nt, Human
uuaucacccagaagaaa

SEQ ID NO: 1972691 - RNA, 18 nt, Human
uuaucacccagaagaaaa

SEQ ID NO: 1972692 - RNA, 19 nt, Human
uuaucacccagaagaaaau

SEQ ID NO: 1972693 - RNA, 21 nt, Human
uuaucacccagaagaaaauag

SEQ ID NO: 1972694 - RNA, 19 nt, Human
uuaucauuuuuuccuguuu

SEQ ID NO: 1972695 - RNA, 20 nt, Human
auacugccuuguuuaauggu

SEQ ID NO: 1972696 - RNA, 13 nt, Human
auacugccucccc

SEQ ID NO: 1972697 - RNA, 15 nt, Human
auacugccuccccca

SEQ ID NO: 1972698 - RNA, 18 nt, Human
auacugccuuguuuaaug

SEQ ID NO: 1972699 - RNA, 19 nt, Human
auacugcuugaauaaacac

SEQ ID NO: 1972700 - RNA, 12 nt, Human
auacugaaccac

SEQ ID NO: 1972701 - RNA, 18 nt, Human
auacugaaccacuuguag

SEQ ID NO: 1972702 - RNA, 19 nt, Human
auacugaaccacuuguaga

SEQ ID NO: 1972703 - RNA, 23 nt, Human
auacugaaccacuuguagauuug

SEQ ID NO: 1972704 - RNA, 22 nt, Human
auacugauggaauuuuuuugua

SEQ ID NO: 1972705 - RNA, 13 nt, Human
auacugauguguu

SEQ ID NO: 1972706 - RNA, 21 nt, Human
auacugcaaacuauuuaaaga

SEQ ID NO: 1972707 - RNA, 13 nt, Human
auacugauggaau

SEQ ID NO: 1972708 - RNA, 14 nt, Human
auacugauggaauu

SEQ ID NO: 1972709 - RNA, 16 nt, Human
auacuccuaugcuuua

SEQ ID NO: 1972710 - RNA, 17 nt, Human
auacuccuaugcuuuag

SEQ ID NO: 1972711 - RNA, 14 nt, Human
auacucccaucugu

SEQ ID NO: 1972712 - RNA, 17 nt, Human
auacuccuccaagguua

SEQ ID NO: 1972713 - RNA, 16 nt, Human
auacucugcuuagaau

SEQ ID NO: 1972714 - RNA, 14 nt, Human
auacucuuauaucu

SEQ ID NO: 1972715 - RNA, 18 nt, Human
auacucuuauaucuauau

SEQ ID NO: 1972716 - RNA, 18 nt, Human
auacucuuauagacaaca

SEQ ID NO: 1972717 - RNA, 12 nt, Human
uuauuccauauu

SEQ ID NO: 1972718 - RNA, 17 nt, Human
uuauuccauauuagaaa

SEQ ID NO: 1972719 - RNA, 19 nt, Human
uuauuccauauuagaaaac

SEQ ID NO: 1972720 - RNA, 20 nt, Human
uuauuccauauuagaaaacu

SEQ ID NO: 1972721 - RNA, 23 nt, Human
uuauuccauauuagaaaacuuug

SEQ ID NO: 1972722 - RNA, 16 nt, Human
auacucauuaggaugg

SEQ ID NO: 1972723 - RNA, 11 nt, Human
auacucccauc

SEQ ID NO: 1972724 - RNA, 12 nt, Human
uuauuauuuauu

SEQ ID NO: 1972725 - RNA, 13 nt, Human
uuauucaacagca

SEQ ID NO: 1972726 - RNA, 14 nt, Human
uuauucaacagcaa

SEQ ID NO: 1972727 - RNA, 13 nt, Human
uuauuaugcauga

SEQ ID NO: 1972728 - RNA, 22 nt, Human
uuauucaacagcaagugugaau

SEQ ID NO: 1972729 - RNA, 20 nt, Human
uuauucacuuuuauuuagca

SEQ ID NO: 1972730 - RNA, 12 nt, Human
uuauucauaauu

SEQ ID NO: 1972731 - RNA, 21 nt, Human
uuauucauuaguuuugaagau

SEQ ID NO: 1972732 - RNA, 18 nt, Human
uuauucauuaguuuugaa

SEQ ID NO: 1972733 - RNA, 16 nt, Human
uuauguugacauuugu

SEQ ID NO: 1972734 - RNA, 17 nt, Human
uuauguugacauuuguu

SEQ ID NO: 1972735 - RNA, 10 nt, Human
uuauguugac

SEQ ID NO: 1972736 - RNA, 13 nt, Human
uuauguugacauu

SEQ ID NO: 1972737 - RNA, 14 nt, Human
uuauguugacauuu

SEQ ID NO: 1972738 - RNA, 15 nt, Human
uuauguugacauuug

SEQ ID NO: 1972739 - RNA, 14 nt, Human
uuauuauauuuaca

SEQ ID NO: 1972740 - RNA, 13 nt, Human
uuauguuaauauu

SEQ ID NO: 1972741 - RNA, 12 nt, Human
uuauuaugcaug

SEQ ID NO: 1972742 - RNA, 22 nt, Human
uuauuaucauuguucuuuucaa

SEQ ID NO: 1972743 - RNA, 17 nt, Human
uuauuaucaaguagacu

SEQ ID NO: 1972744 - RNA, 15 nt, Human
uuauuauauuuacaa

SEQ ID NO: 1972745 - RNA, 16 nt, Human
auagacaauuuauuau

SEQ ID NO: 1972746 - RNA, 22 nt, Human
auagacaauuuauuauggcaca

SEQ ID NO: 1972747 - RNA, 18 nt, Human
auagaauugcaaucuaua

SEQ ID NO: 1972748 - RNA, 15 nt, Human
auagacagcaugaga

SEQ ID NO: 1972749 - RNA, 22 nt, Human
auagacaggagaagaaagaacu

SEQ ID NO: 1972750 - RNA, 23 nt, Human
auagacaauuuauuauggcacau

SEQ ID NO: 1972751 - RNA, 23 nt, Human
auagaagucuucaugaaaugcua

SEQ ID NO: 1972752 - RNA, 17 nt, Human
auagaauuaacacauga

SEQ ID NO: 1972753 - RNA, 22 nt, Human
auagaauaaaauuuuuaaucuu

SEQ ID NO: 1972754 - RNA, 19 nt, Human
auagaauaaaauuuuuaau

SEQ ID NO: 1972755 - RNA, 14 nt, Human
auagaauaaaauuu

SEQ ID NO: 1972756 - RNA, 14 nt, Human
auagaacaacauau

SEQ ID NO: 1972757 - RNA, 18 nt, Human
auagaacaacauauacaa

SEQ ID NO: 1972758 - RNA, 17 nt, Human
auagaaauguuugcuga

SEQ ID NO: 1972759 - RNA, 20 nt, Human
auacuguacaaugacuuuau

SEQ ID NO: 1972760 - RNA, 18 nt, Human
auacuguagauaauuaac

SEQ ID NO: 1972761 - RNA, 19 nt, Human
auagaaggcuauggggaua

SEQ ID NO: 1972762 - RNA, 16 nt, Human
auagaagaaugcaugc

SEQ ID NO: 1972763 - RNA, 17 nt, Human
auagaagaaugcaugcu

SEQ ID NO: 1972764 - RNA, 18 nt, Human
auagaagaaugcaugcuu

SEQ ID NO: 1972765 - RNA, 23 nt, Human
auagaagaaugcaugcuuuccau

SEQ ID NO: 1972766 - RNA, 12 nt, Human
auagaagaaugc

SEQ ID NO: 1972767 - RNA, 13 nt, Human
auagaagaaugca

SEQ ID NO: 1972768 - RNA, 13 nt, Human
auagaaguaaaaa

SEQ ID NO: 1972769 - RNA, 18 nt, Human
auagaagucuucaugaaa

SEQ ID NO: 1972770 - RNA, 19 nt, Human
auagaagucuucaugaaau

SEQ ID NO: 1972771 - RNA, 20 nt, Human
auagaagucuucaugaaaug

SEQ ID NO: 1972772 - RNA, 21 nt, Human
auagaagucuucaugaaaugc

SEQ ID NO: 1972773 - RNA, 13 nt, Human
auagaagucuuca

SEQ ID NO: 1972774 - RNA, 14 nt, Human
auagaagucuucau

SEQ ID NO: 1972775 - RNA, 15 nt, Human
auagaagucuucaug

SEQ ID NO: 1972776 - RNA, 17 nt, Human
auagaagucuucaugaa

SEQ ID NO: 1972777 - RNA, 14 nt, Human
auagagagagacca

SEQ ID NO: 1972778 - RNA, 18 nt, Human
auagacccacaagaggca

SEQ ID NO: 1972779 - RNA, 16 nt, Human
auagagcagaaauucu

SEQ ID NO: 1972780 - RNA, 19 nt, Human
auagagcagaaauucuguu

SEQ ID NO: 1972781 - RNA, 14 nt, Human
auagagcagaaauu

SEQ ID NO: 1972782 - RNA, 15 nt, Human
auagagcagaaauuc

SEQ ID NO: 1972783 - RNA, 17 nt, Human
auagaguacacugccug

SEQ ID NO: 1972784 - RNA, 23 nt, Human
auagaguaaaaagaaaacaaaac

SEQ ID NO: 1972785 - RNA, 14 nt, Human
auagaguacacugc

SEQ ID NO: 1972786 - RNA, 18 nt, Human
auagauaggucagugcaa

SEQ ID NO: 1972787 - RNA, 14 nt, Human
auagauguguggac

SEQ ID NO: 1972788 - RNA, 12 nt, Human
auagauuaaauc

SEQ ID NO: 1972789 - RNA, 14 nt, Human
auagauuaaaucau

SEQ ID NO: 1972790 - RNA, 20 nt, Human
auagauuaaaucauacuccu

SEQ ID NO: 1972791 - RNA, 13 nt, Human
auagauugugaau

SEQ ID NO: 1972792 - RNA, 15 nt, Human
auagauugugaauaa

SEQ ID NO: 1972793 - RNA, 18 nt, Human
auagauugugaauaauga

SEQ ID NO: 1972794 - RNA, 12 nt, Human
auagaugugugg

SEQ ID NO: 1972795 - RNA, 13 nt, Human
auagaugugugga

SEQ ID NO: 1972796 - RNA, 11 nt, Human
auagaugugug

SEQ ID NO: 1972797 - RNA, 23 nt, Human
agugcaaaaggcuugcagaacuu

SEQ ID NO: 1972798 - RNA, 12 nt, Human
agugcaaaaggc

SEQ ID NO: 1972799 - RNA, 13 nt, Human
agugaggcucugc

SEQ ID NO: 1972800 - RNA, 14 nt, Human
agugaggaugucug

SEQ ID NO: 1972801 - RNA, 14 nt, Human
agugaggagaauga

SEQ ID NO: 1972802 - RNA, 12 nt, Human
agugaggcucug

SEQ ID NO: 1972803 - RNA, 16 nt, Human
agugaggaugaaaaaa

SEQ ID NO: 1972804 - RNA, 20 nt, Human
agugaggaaaucaaagugcu

SEQ ID NO: 1972805 - RNA, 17 nt, Human
agugaggaauggcagug

SEQ ID NO: 1972806 - RNA, 22 nt, Human
uguggauucugaggcccugccc

SEQ ID NO: 1972807 - RNA, 17 nt, Human
uguggauucugaggccc

SEQ ID NO: 1972808 - RNA, 14 nt, Human
agugaggaaaucaa

SEQ ID NO: 1972809 - RNA, 15 nt, Human
agugaggaaaucaaa

SEQ ID NO: 1972810 - RNA, 17 nt, Human
agugaggaaaucaaagu

SEQ ID NO: 1972811 - RNA, 18 nt, Human
agugccaggauggaauga

SEQ ID NO: 1972812 - RNA, 14 nt, Human
agugccaaaaacaa

SEQ ID NO: 1972813 - RNA, 18 nt, Human
agugcauguacuaucuua

SEQ ID NO: 1972814 - RNA, 14 nt, Human
agugcaugcugucc

SEQ ID NO: 1972815 - RNA, 16 nt, Human
agugcaugcugucccu

SEQ ID NO: 1972816 - RNA, 14 nt, Human
agugcacuaaugug

SEQ ID NO: 1972817 - RNA, 17 nt, Human
agugcaagccccugcuc

SEQ ID NO: 1972818 - RNA, 15 nt, Human
agugcaagccccugc

SEQ ID NO: 1972819 - RNA, 18 nt, Human
agugcaagccccugcucc

SEQ ID NO: 1972820 - RNA, 17 nt, Human
agugcacuaauguguaa

SEQ ID NO: 1972821 - RNA, 21 nt, Human
agugcacuaauguguaagaca

SEQ ID NO: 1972822 - RNA, 12 nt, Human
agugcagaacug

SEQ ID NO: 1972823 - RNA, 12 nt, Human
agugcacugauu

SEQ ID NO: 1972824 - RNA, 17 nt, Human
agugcagugagccgaga

SEQ ID NO: 1972825 - RNA, 15 nt, Human
agugcagcagggcag

SEQ ID NO: 1972826 - RNA, 16 nt, Human
agugcagcagggcagu

SEQ ID NO: 1972827 - RNA, 22 nt, Human
agugcaguggcgaaaucccugc

SEQ ID NO: 1972828 - RNA, 14 nt, Human
agugcaauauauuu

SEQ ID NO: 1972829 - RNA, 21 nt, Human
ugugcugcccugcccaccugg

SEQ ID NO: 1972830 - RNA, 20 nt, Human
ugugcugcccugcccaccug

SEQ ID NO: 1972831 - RNA, 19 nt, Human
ugugcugcccugcccaccu

SEQ ID NO: 1972832 - RNA, 18 nt, Human
ugugcugcccugcccacc

SEQ ID NO: 1972833 - RNA, 19 nt, Human
ugugcuguguuugcucccc

SEQ ID NO: 1972834 - RNA, 21 nt, Human
uguggaucaaauccagccugc

SEQ ID NO: 1972835 - RNA, 14 nt, Human
uguggaugauaaaa

SEQ ID NO: 1972836 - RNA, 15 nt, Human
ugugcuguguuugcu

SEQ ID NO: 1972837 - RNA, 19 nt, Human
uguggauuuaacagaaaug

SEQ ID NO: 1972838 - RNA, 20 nt, Human
uguggauuuaacagaaaugu

SEQ ID NO: 1972839 - RNA, 22 nt, Human
uguggauuuaacagaaauguac

SEQ ID NO: 1972840 - RNA, 23 nt, Human
agugagcugguuuuuagcggaga

SEQ ID NO: 1972841 - RNA, 14 nt, Human
ugugauucaaugcc

SEQ ID NO: 1972842 - RNA, 16 nt, Human
ugugauucaaugccuc

SEQ ID NO: 1972843 - RNA, 20 nt, Human
ugugcucaggagcccuggga

SEQ ID NO: 1972844 - RNA, 17 nt, Human
ugugccuaauguguuug

SEQ ID NO: 1972845 - RNA, 18 nt, Human
ugugccuaauguguuuga

SEQ ID NO: 1972846 - RNA, 14 nt, Human
ugugccgagcccuu

SEQ ID NO: 1972847 - RNA, 23 nt, Human
ugugccuaaauaaguuauaaaga

SEQ ID NO: 1972848 - RNA, 14 nt, Human
ugugccuaaugugu

SEQ ID NO: 1972849 - RNA, 15 nt, Human
ugugccuaauguguu

SEQ ID NO: 1972850 - RNA, 12 nt, Human
ugugcugcccug

SEQ ID NO: 1972851 - RNA, 13 nt, Human
ugugcugcagugc

SEQ ID NO: 1972852 - RNA, 19 nt, Human
ugugcugagucugaaggcu

SEQ ID NO: 1972853 - RNA, 18 nt, Human
ugugcugagucugaaggc

SEQ ID NO: 1972854 - RNA, 21 nt, Human
ugugcucaggagcccugggag

SEQ ID NO: 1972855 - RNA, 16 nt, Human
ugugcucaucagaaac

SEQ ID NO: 1972856 - RNA, 19 nt, Human
ugugcucuccaagcccagu

SEQ ID NO: 1972857 - RNA, 14 nt, Human
ugugcucuccaagc

SEQ ID NO: 1972858 - RNA, 22 nt, Human
agugaacaaauuuacagagaca

SEQ ID NO: 1972859 - RNA, 23 nt, Human
agugaacaaauuuacagagacag

SEQ ID NO: 1972860 - RNA, 16 nt, Human
agugaacuugggccac

SEQ ID NO: 1972861 - RNA, 20 nt, Human
agugaacauaauucuuauua

SEQ ID NO: 1972862 - RNA, 21 nt, Human
agugacugauggcuaauguac

SEQ ID NO: 1972863 - RNA, 21 nt, Human
agugaacaaauuuacagagac

SEQ ID NO: 1972864 - RNA, 18 nt, Human
agucuuucacauuuaaau

SEQ ID NO: 1972865 - RNA, 16 nt, Human
agucuuucacauuuaa

SEQ ID NO: 1972866 - RNA, 14 nt, Human
agugagcacuaagg

SEQ ID NO: 1972867 - RNA, 22 nt, Human
agugagcacuaaggugugcucu

SEQ ID NO: 1972868 - RNA, 16 nt, Human
agugagaaaaugaaca

SEQ ID NO: 1972869 - RNA, 17 nt, Human
agugagaggggaggcca

SEQ ID NO: 1972870 - RNA, 20 nt, Human
agugacuuuucaaguauuua

SEQ ID NO: 1972871 - RNA, 12 nt, Human
agugagcugguu

SEQ ID NO: 1972872 - RNA, 19 nt, Human
agugagaggggaggccaag

SEQ ID NO: 1972873 - RNA, 19 nt, Human
ugugaugagaggaaaucac

SEQ ID NO: 1972874 - RNA, 22 nt, Human
ugugaugaugaaaugaggucag

SEQ ID NO: 1972875 - RNA, 22 nt, Human
ugugagaaaaccccuucccauu

SEQ ID NO: 1972876 - RNA, 11 nt, Human
ugugaggaagc

SEQ ID NO: 1972877 - RNA, 16 nt, Human
ugugagcugcugccau

SEQ ID NO: 1972878 - RNA, 12 nt, Human
ugugagcugcac

SEQ ID NO: 1972879 - RNA, 15 nt, Human
ugugagcugcaccag

SEQ ID NO: 1972880 - RNA, 20 nt, Human
ugugagcugcaccagguaga

SEQ ID NO: 1972881 - RNA, 16 nt, Human
ugugacugaucucucg

SEQ ID NO: 1972882 - RNA, 15 nt, Human
ugucuccuacugagg

SEQ ID NO: 1972883 - RNA, 18 nt, Human
ugugacuucagcucuguu

SEQ ID NO: 1972884 - RNA, 19 nt, Human
ugugacuucagcucuguuu

SEQ ID NO: 1972885 - RNA, 18 nt, Human
ugugacuuccuuggaaau

SEQ ID NO: 1972886 - RNA, 13 nt, Human
ugugacuuugaaa

SEQ ID NO: 1972887 - RNA, 14 nt, Human
ugugacuuugaaaa

SEQ ID NO: 1972888 - RNA, 20 nt, Human
ugugacuuugaaaauauaua

SEQ ID NO: 1972889 - RNA, 16 nt, Human
ugucuccuacugagga

SEQ ID NO: 1972890 - RNA, 20 nt, Human
ugugagaaaaccccuuccca

SEQ ID NO: 1972891 - RNA, 14 nt, Human
ugugacuuuugcuu

SEQ ID NO: 1972892 - RNA, 16 nt, Human
ugugacuuuugcuuua

SEQ ID NO: 1972893 - RNA, 17 nt, Human
ugugacuuuugcuuuaa

SEQ ID NO: 1972894 - RNA, 23 nt, Human
ugugacuuuugcuuuaauuccau

SEQ ID NO: 1972895 - RNA, 17 nt, Human
agucucuugauucauaa

SEQ ID NO: 1972896 - RNA, 16 nt, Human
agucucuugauucaua

SEQ ID NO: 1972897 - RNA, 21 nt, Human
agucucuucuccacuggaugg

SEQ ID NO: 1972898 - RNA, 19 nt, Human
agucucgcucuguugccca

SEQ ID NO: 1972899 - RNA, 21 nt, Human
agucucgcucuguugcccagg

SEQ ID NO: 1972900 - RNA, 23 nt, Human
agucucgcucuguugcccaggcu

SEQ ID NO: 1972901 - RNA, 19 nt, Human
agucucuucuccacuggau

SEQ ID NO: 1972902 - RNA, 23 nt, Human
agucuuagauguauauauuuccu

SEQ ID NO: 1972903 - RNA, 16 nt, Human
agucuuagauguauau

SEQ ID NO: 1972904 - RNA, 14 nt, Human
agucuuagauguau

SEQ ID NO: 1972905 - RNA, 13 nt, Human
agucuuagaugua

SEQ ID NO: 1972906 - RNA, 12 nt, Human
agucugaaggcu

SEQ ID NO: 1972907 - RNA, 16 nt, Human
agucucuuuuuuacaa

SEQ ID NO: 1972908 - RNA, 17 nt, Human
agucucuuuuuuacaaa

SEQ ID NO: 1972909 - RNA, 18 nt, Human
agucucuuuuuuacaaag

SEQ ID NO: 1972910 - RNA, 19 nt, Human
agucucuuuuuuacaaagg

SEQ ID NO: 1972911 - RNA, 20 nt, Human
agucucuuuuuuacaaaggc

SEQ ID NO: 1972912 - RNA, 21 nt, Human
agucucuuuuuuacaaaggcu

SEQ ID NO: 1972913 - RNA, 22 nt, Human
agucucuuuuuuacaaaggcug

SEQ ID NO: 1972914 - RNA, 9 nt, Human
aguguguaa

SEQ ID NO: 1972915 - RNA, 22 nt, Human
agugugguuaugaacuuuauag

SEQ ID NO: 1972916 - RNA, 13 nt, Human
agugugguuucuu

SEQ ID NO: 1972917 - RNA, 14 nt, Human
agugugguuucuuu

SEQ ID NO: 1972918 - RNA, 21 nt, Human
agugugguuucuuuuugaauc

SEQ ID NO: 1972919 - RNA, 22 nt, Human
agugugguguuuccuggcacug

SEQ ID NO: 1972920 - RNA, 22 nt, Human
agugugguuucuuuuugaaucu

SEQ ID NO: 1972921 - RNA, 17 nt, Human
uguuaugacuccagaau

SEQ ID NO: 1972922 - RNA, 13 nt, Human
uguuaugacucca

SEQ ID NO: 1972923 - RNA, 21 nt, Human
uguucgauuacgucaucaaaa

SEQ ID NO: 1972924 - RNA, 19 nt, Human
uguuccacaaguuaaauaa

SEQ ID NO: 1972925 - RNA, 21 nt, Human
uguuccugccuccuugauauu

SEQ ID NO: 1972926 - RNA, 17 nt, Human
aguguggaaauuaagaa

SEQ ID NO: 1972927 - RNA, 19 nt, Human
aguguggaaauuaagaaga

SEQ ID NO: 1972928 - RNA, 21 nt, Human
agugugccugaagucccagau

SEQ ID NO: 1972929 - RNA, 18 nt, Human
aguguggccucuucugag

SEQ ID NO: 1972930 - RNA, 15 nt, Human
agugugggggguccu

SEQ ID NO: 1972931 - RNA, 16 nt, Human
aguguggcaguuuggc

SEQ ID NO: 1972932 - RNA, 17 nt, Human
aguguggcaguuuggca

SEQ ID NO: 1972933 - RNA, 20 nt, Human
agugugccugaagucccaga

SEQ ID NO: 1972934 - RNA, 20 nt, Human
agugugacugaucucucgug

SEQ ID NO: 1972935 - RNA, 15 nt, Human
uguucuaagaaguga

SEQ ID NO: 1972936 - RNA, 22 nt, Human
uguucuaaauaucccuuggaca

SEQ ID NO: 1972937 - RNA, 13 nt, Human
uguugcacugaag

SEQ ID NO: 1972938 - RNA, 15 nt, Human
uguugcacugaaguu

SEQ ID NO: 1972939 - RNA, 15 nt, Human
uguugcauagaauaa

SEQ ID NO: 1972940 - RNA, 19 nt, Human
uguugcacugaaguuugau

SEQ ID NO: 1972941 - RNA, 22 nt, Human
uguugcacugaaguuugauaaa

SEQ ID NO: 1972942 - RNA, 23 nt, Human
uguugcacugaaguuugauaaau

SEQ ID NO: 1972943 - RNA, 18 nt, Human
uguugcauagguuagaua

SEQ ID NO: 1972944 - RNA, 21 nt, Human
uguugccaaaaugguggccug

SEQ ID NO: 1972945 - RNA, 16 nt, Human
uguugccaagagcccg

SEQ ID NO: 1972946 - RNA, 16 nt, Human
uguugccacuuuccaa

SEQ ID NO: 1972947 - RNA, 18 nt, Human
uguugccacuuuccaagu

SEQ ID NO: 1972948 - RNA, 23 nt, Human
uguugcccaggcuggcgugcagu

SEQ ID NO: 1972949 - RNA, 20 nt, Human
uguugcccaggcuggcgugc

SEQ ID NO: 1972950 - RNA, 19 nt, Human
aguguguggucaacauuuc

SEQ ID NO: 1972951 - RNA, 23 nt, Human
uguugccuauaagccaaaauuaa

SEQ ID NO: 1972952 - RNA, 17 nt, Human
uguugccuauaagccaa

SEQ ID NO: 1972953 - RNA, 18 nt, Human
uguugccuauaagccaaa

SEQ ID NO: 1972954 - RNA, 22 nt, Human
uguugccuauaagccaaaauua

SEQ ID NO: 1972955 - RNA, 19 nt, Human
aguguuguggauuuaacag

SEQ ID NO: 1972956 - RNA, 20 nt, Human
aguguuguggauuuaacaga

SEQ ID NO: 1972957 - RNA, 22 nt, Human
aguguugggguuugguuuuguu

SEQ ID NO: 1972958 - RNA, 13 nt, Human
aguuacucagaau

SEQ ID NO: 1972959 - RNA, 23 nt, Human
aguuacuaucaugucaaacguga

SEQ ID NO: 1972960 - RNA, 14 nt, Human
aguuagagaaucug

SEQ ID NO: 1972961 - RNA, 16 nt, Human
aguuagccuuuaucua

SEQ ID NO: 1972962 - RNA, 23 nt, Human
aguuagccuuuaucuaccaacuu

SEQ ID NO: 1972963 - RNA, 15 nt, Human
aguguucuguuacaa

SEQ ID NO: 1972964 - RNA, 16 nt, Human
aguguucuguuacaaa

SEQ ID NO: 1972965 - RNA, 17 nt, Human
aguguucuguuacaaaa

SEQ ID NO: 1972966 - RNA, 18 nt, Human
aguguucuguuacaaaau

SEQ ID NO: 1972967 - RNA, 20 nt, Human
aguguucuguuacaaaaugu

SEQ ID NO: 1972968 - RNA, 21 nt, Human
aguguucuguuacaaaaugua

SEQ ID NO: 1972969 - RNA, 22 nt, Human
aguguucuguuacaaaauguaa

SEQ ID NO: 1972970 - RNA, 23 nt, Human
aguguucuguuacaaaauguaac

SEQ ID NO: 1972971 - RNA, 16 nt, Human
aguguuguggauuuaa

SEQ ID NO: 1972972 - RNA, 16 nt, Human
aguguucuuucucuuu

SEQ ID NO: 1972973 - RNA, 21 nt, Human
aguguucauaaauaaaguuug

SEQ ID NO: 1972974 - RNA, 18 nt, Human
aguguguguuuuucauaa

SEQ ID NO: 1972975 - RNA, 21 nt, Human
aguguuccgugguuaaacucg

SEQ ID NO: 1972976 - RNA, 19 nt, Human
aguggacccugaaaugugu

SEQ ID NO: 1972977 - RNA, 21 nt, Human
aguggacccugaaaugugugu

SEQ ID NO: 1972978 - RNA, 21 nt, Human
aguggacuguucccugaggug

SEQ ID NO: 1972979 - RNA, 20 nt, Human
aguggacuggaggagcuggg

SEQ ID NO: 1972980 - RNA, 22 nt, Human
aguggcaaagcuguucuuccug

SEQ ID NO: 1972981 - RNA, 13 nt, Human
aguggcaccuguc

SEQ ID NO: 1972982 - RNA, 16 nt, Human
aguggcaccugucugc

SEQ ID NO: 1972983 - RNA, 17 nt, Human
aguggcaccugucugcu

SEQ ID NO: 1972984 - RNA, 21 nt, Human
aguggcaccugucugcuccag

SEQ ID NO: 1972985 - RNA, 22 nt, Human
aguggcaccugucugcuccagc

SEQ ID NO: 1972986 - RNA, 17 nt, Human
aguggauggaaggggcu

SEQ ID NO: 1972987 - RNA, 16 nt, Human
agugggguagguuggg

SEQ ID NO: 1972988 - RNA, 19 nt, Human
aguggggggaacgcccacu

SEQ ID NO: 1972989 - RNA, 22 nt, Human
aguggggggaacgcccacuucc

SEQ ID NO: 1972990 - RNA, 17 nt, Human
aguggggggaacgccca

SEQ ID NO: 1972991 - RNA, 18 nt, Human
aguggggggaacgcccac

SEQ ID NO: 1972992 - RNA, 16 nt, Human
aguggggaaugaagau

SEQ ID NO: 1972993 - RNA, 15 nt, Human
aguggggacagagca

SEQ ID NO: 1972994 - RNA, 14 nt, Human
aguggggaggggcu

SEQ ID NO: 1972995 - RNA, 22 nt, Human
agugggcccaaugcacuuuguu

SEQ ID NO: 1972996 - RNA, 19 nt, Human
uguuacauaagauaaaugu

SEQ ID NO: 1972997 - RNA, 18 nt, Human
uguuacacuuuuuggaag

SEQ ID NO: 1972998 - RNA, 15 nt, Human
uguuacaauguaacu

SEQ ID NO: 1972999 - RNA, 22 nt, Human
uguuaauaaagugcacugccac

SEQ ID NO: 1973000 - RNA, 18 nt, Human
uguuacaaauuguagaag

SEQ ID NO: 1973001 - RNA, 17 nt, Human
uguuacaaauuguagaa

SEQ ID NO: 1973002 - RNA, 13 nt, Human
uguuaauauuuua

SEQ ID NO: 1973003 - RNA, 22 nt, Human
uguuaaguugauggugaugaaa

SEQ ID NO: 1973004 - RNA, 13 nt, Human
uguuaagcaucua

SEQ ID NO: 1973005 - RNA, 23 nt, Human
uguguuaucacccagaagaaaau

SEQ ID NO: 1973006 - RNA, 22 nt, Human
uguguuaucacccagaagaaaa

SEQ ID NO: 1973007 - RNA, 13 nt, Human
uguguuaauuuaa

SEQ ID NO: 1973008 - RNA, 14 nt, Human
uguguuaauuuaag

SEQ ID NO: 1973009 - RNA, 18 nt, Human
uguguuaauuuaaguuuu

SEQ ID NO: 1973010 - RNA, 16 nt, Human
uguuaacugagugccu

SEQ ID NO: 1973011 - RNA, 22 nt, Human
uguuaacugagugccuuuuggu

SEQ ID NO: 1973012 - RNA, 21 nt, Human
agugccccgucuacagcuccc

SEQ ID NO: 1973013 - RNA, 23 nt, Human
agugccccgucuacagcuccccc

SEQ ID NO: 1973014 - RNA, 16 nt, Human
agugcccuccaggaua

SEQ ID NO: 1973015 - RNA, 22 nt, Human
uguggucaacauuucucauguu

SEQ ID NO: 1973016 - RNA, 16 nt, Human
ugugguuucuuuuuga

SEQ ID NO: 1973017 - RNA, 12 nt, Human
ugugguuucuuu

SEQ ID NO: 1973018 - RNA, 15 nt, Human
uguguaaauuauuga

SEQ ID NO: 1973019 - RNA, 13 nt, Human
ugugucaguuuau

SEQ ID NO: 1973020 - RNA, 15 nt, Human
ugugucaguuuaugu

SEQ ID NO: 1973021 - RNA, 22 nt, Human
ugugucaucuagcauuagguau

SEQ ID NO: 1973022 - RNA, 18 nt, Human
ugugucaguuuauguuuu

SEQ ID NO: 1973023 - RNA, 19 nt, Human
ugugucaguuuauguuuug

SEQ ID NO: 1973024 - RNA, 20 nt, Human
ugugucaguuuauguuuugg

SEQ ID NO: 1973025 - RNA, 16 nt, Human
uguguccaaaacugcc

SEQ ID NO: 1973026 - RNA, 15 nt, Human
uguguccaccguugu

SEQ ID NO: 1973027 - RNA, 15 nt, Human
uguguccggcccagu

SEQ ID NO: 1973028 - RNA, 14 nt, Human
uguguccucaggga

SEQ ID NO: 1973029 - RNA, 18 nt, Human
uguguguuguguguggga

SEQ ID NO: 1973030 - RNA, 11 nt, Human
uguguguuuau

SEQ ID NO: 1973031 - RNA, 12 nt, Human
uguguguugcuu

SEQ ID NO: 1973032 - RNA, 18 nt, Human
uguguguugcuuauguug

SEQ ID NO: 1973033 - RNA, 20 nt, Human
ugugucuugcaauggcagcc

SEQ ID NO: 1973034 - RNA, 22 nt, Human
ugugucucuugguccugcugca

SEQ ID NO: 1973035 - RNA, 16 nt, Human
ugugucugccacauua

SEQ ID NO: 1973036 - RNA, 16 nt, Human
aguaauugcauuugcu

SEQ ID NO: 1973037 - RNA, 17 nt, Human
aguaauugcauuugcuu

SEQ ID NO: 1973038 - RNA, 18 nt, Human
aguaauugcauuugcuuu

SEQ ID NO: 1973039 - RNA, 22 nt, Human
aguaauugcauuugcuuuugua

SEQ ID NO: 1973040 - RNA, 23 nt, Human
aguacacuguuucaaacuuuacu

SEQ ID NO: 1973041 - RNA, 21 nt, Human
aguacacuguuucaaacuuua

SEQ ID NO: 1973042 - RNA, 18 nt, Human
aguaauuguuccagagac

SEQ ID NO: 1973043 - RNA, 23 nt, Human
aguaauugguuaucaugggaaag

SEQ ID NO: 1973044 - RNA, 16 nt, Human
aguaauuguuccagag

SEQ ID NO: 1973045 - RNA, 23 nt, Human
aguaaaaacaaagaaauuaugug

SEQ ID NO: 1973046 - RNA, 16 nt, Human
aguaaaaacaaagaaa

SEQ ID NO: 1973047 - RNA, 21 nt, Human
uguacauggaauaacauguaa

SEQ ID NO: 1973048 - RNA, 20 nt, Human
uguacauguauuaaauuaca

SEQ ID NO: 1973049 - RNA, 21 nt, Human
uguacauguauuaaauuacau

SEQ ID NO: 1973050 - RNA, 14 nt, Human
uguacaugggacua

SEQ ID NO: 1973051 - RNA, 19 nt, Human
uguacaugggacuaugcuu

SEQ ID NO: 1973052 - RNA, 20 nt, Human
uguacaugggacuaugcuuu

SEQ ID NO: 1973053 - RNA, 23 nt, Human
uguacaugggacuaugcuuuucu

SEQ ID NO: 1973054 - RNA, 13 nt, Human
uguacauguauua

SEQ ID NO: 1973055 - RNA, 14 nt, Human
uguacauguauuaa

SEQ ID NO: 1973056 - RNA, 18 nt, Human
aguaauacaggauuauuu

SEQ ID NO: 1973057 - RNA, 14 nt, Human
aguaauaaagacuc

SEQ ID NO: 1973058 - RNA, 15 nt, Human
aguaagucucaaggu

SEQ ID NO: 1973059 - RNA, 16 nt, Human
aguaagucucaaggua

SEQ ID NO: 1973060 - RNA, 23 nt, Human
aguaagucuugccuauauuuucc

SEQ ID NO: 1973061 - RNA, 19 nt, Human
aguaaaaagaaaacaaaac

SEQ ID NO: 1973062 - RNA, 19 nt, Human
uguauaguuauguaaauaa

SEQ ID NO: 1973063 - RNA, 13 nt, Human
uguauaguuaugu

SEQ ID NO: 1973064 - RNA, 14 nt, Human
uguauaguuaugua

SEQ ID NO: 1973065 - RNA, 15 nt, Human
uguauaguuauguaa

SEQ ID NO: 1973066 - RNA, 16 nt, Human
uguauaguuauguaaa

SEQ ID NO: 1973067 - RNA, 17 nt, Human
uguauaguuauguaaau

SEQ ID NO: 1973068 - RNA, 18 nt, Human
uguauaguuauguaaaua

SEQ ID NO: 1973069 - RNA, 15 nt, Human
uguauaguauuugaa

SEQ ID NO: 1973070 - RNA, 16 nt, Human
uguauaguauuugaaa

SEQ ID NO: 1973071 - RNA, 17 nt, Human
uguauaguauuugaaaa

SEQ ID NO: 1973072 - RNA, 19 nt, Human
uguauaguauuugaaaaca

SEQ ID NO: 1973073 - RNA, 20 nt, Human
uguauaguauuugaaaacag

SEQ ID NO: 1973074 - RNA, 21 nt, Human
uguauaguauuugaaaacaga

SEQ ID NO: 1973075 - RNA, 22 nt, Human
uguauauauuuccuauauuguu

SEQ ID NO: 1973076 - RNA, 18 nt, Human
uguauauauuuccuauau

SEQ ID NO: 1973077 - RNA, 20 nt, Human
uguauauauaccugcgcuug

SEQ ID NO: 1973078 - RNA, 17 nt, Human
uguaggguuauaauaau

SEQ ID NO: 1973079 - RNA, 16 nt, Human
uguaggguuauaauaa

SEQ ID NO: 1973080 - RNA, 13 nt, Human
aguagcaggcccg

SEQ ID NO: 1973081 - RNA, 22 nt, Human
aguagcacaggcugagugcagg

SEQ ID NO: 1973082 - RNA, 16 nt, Human
aguagcacaggcugag

SEQ ID NO: 1973083 - RNA, 21 nt, Human
aguagcacaggcugagugcag

SEQ ID NO: 1973084 - RNA, 14 nt, Human
aguagcacaggcug

SEQ ID NO: 1973085 - RNA, 15 nt, Human
aguagcacaggcuga

SEQ ID NO: 1973086 - RNA, 20 nt, Human
aguagcaaaugagacagcag

SEQ ID NO: 1973087 - RNA, 16 nt, Human
aguaccagccccaccc

SEQ ID NO: 1973088 - RNA, 13 nt, Human
aguacauuuuuug

SEQ ID NO: 1973089 - RNA, 15 nt, Human
aguacauuuuuugaa

SEQ ID NO: 1973090 - RNA, 18 nt, Human
aguacauuuuuugaaaug

SEQ ID NO: 1973091 - RNA, 20 nt, Human
aguacauuuuuugaaaugcu

SEQ ID NO: 1973092 - RNA, 21 nt, Human
aguacauuuuuugaaaugcug

SEQ ID NO: 1973093 - RNA, 22 nt, Human
aguacauuuuuugaaaugcuga

SEQ ID NO: 1973094 - RNA, 12 nt, Human
aggugggaggau

SEQ ID NO: 1973095 - RNA, 13 nt, Human
ugggcugcccugg

SEQ ID NO: 1973096 - RNA, 14 nt, Human
ugggcugcccuggu

SEQ ID NO: 1973097 - RNA, 15 nt, Human
ugggcugcccuggug

SEQ ID NO: 1973098 - RNA, 16 nt, Human
ugggcugcccuggugc

SEQ ID NO: 1973099 - RNA, 15 nt, Human
ugggcucugcugagu

SEQ ID NO: 1973100 - RNA, 12 nt, Human
ugggcucugcug

SEQ ID NO: 1973101 - RNA, 13 nt, Human
ugggcucugcuga

SEQ ID NO: 1973102 - RNA, 16 nt, Human
aggugucccugcacuu

SEQ ID NO: 1973103 - RNA, 20 nt, Human
aggugucccugcacuugcag

SEQ ID NO: 1973104 - RNA, 21 nt, Human
aggugugagucaccaagccca

SEQ ID NO: 1973105 - RNA, 22 nt, Human
aggugugagucaccaagcccag

SEQ ID NO: 1973106 - RNA, 13 nt, Human
agguucuuugugu

SEQ ID NO: 1973107 - RNA, 20 nt, Human
agguugaagaccuaaccagg

SEQ ID NO: 1973108 - RNA, 22 nt, Human
agguugaagaccuaaccagggc

SEQ ID NO: 1973109 - RNA, 23 nt, Human
agguugaagaccuaaccagggcc

SEQ ID NO: 1973110 - RNA, 14 nt, Human
aggugugcaagaga

SEQ ID NO: 1973111 - RNA, 12 nt, Human
aggugugcucug

SEQ ID NO: 1973112 - RNA, 14 nt, Human
agguugcagugagc

SEQ ID NO: 1973113 - RNA, 14 nt, Human
agguugaagcacca

SEQ ID NO: 1973114 - RNA, 16 nt, Human
uguacaugaaaacaca

SEQ ID NO: 1973115 - RNA, 14 nt, Human
uguacaugaaaaca

SEQ ID NO: 1973116 - RNA, 20 nt, Human
uguaauuuuuuuaucgucac

SEQ ID NO: 1973117 - RNA, 19 nt, Human
uguaauuuuucuguauaga

SEQ ID NO: 1973118 - RNA, 20 nt, Human
uguaauuuuucuguauagac

SEQ ID NO: 1973119 - RNA, 15 nt, Human
uguaauuuuguguaa

SEQ ID NO: 1973120 - RNA, 16 nt, Human
uguaauuguuguuugu

SEQ ID NO: 1973121 - RNA, 16 nt, Human
uguaauuuuguguaag

SEQ ID NO: 1973122 - RNA, 20 nt, Human
uguaauuuuguguaagaaau

SEQ ID NO: 1973123 - RNA, 15 nt, Human
uguaauuuuucugua

SEQ ID NO: 1973124 - RNA, 16 nt, Human
uguaauuuuucuguau

SEQ ID NO: 1973125 - RNA, 17 nt, Human
uguaauuuuucuguaua

SEQ ID NO: 1973126 - RNA, 19 nt, Human
uguacauaaugcgugcaua

SEQ ID NO: 1973127 - RNA, 20 nt, Human
uguacauaaugcgugcauac

SEQ ID NO: 1973128 - RNA, 22 nt, Human
uguaaggccaaguacacugaga

SEQ ID NO: 1973129 - RNA, 14 nt, Human
agguuucuauuuuc

SEQ ID NO: 1973130 - RNA, 20 nt, Human
agguuggcaaaaaggcagga

SEQ ID NO: 1973131 - RNA, 18 nt, Human
uguaauuaaguacuaugu

SEQ ID NO: 1973132 - RNA, 21 nt, Human
uguaauuaaguacuauguauc

SEQ ID NO: 1973133 - RNA, 19 nt, Human
uguaauuaaguacuaugua

SEQ ID NO: 1973134 - RNA, 16 nt, Human
uguaauuauuugaaug

SEQ ID NO: 1973135 - RNA, 13 nt, Human
uguaauugauugu

SEQ ID NO: 1973136 - RNA, 15 nt, Human
uguccaaaacugccu

SEQ ID NO: 1973137 - RNA, 20 nt, Human
ugucagcaguugcugguaaa

SEQ ID NO: 1973138 - RNA, 16 nt, Human
uguccaaaacugccuc

SEQ ID NO: 1973139 - RNA, 15 nt, Human
uguccaagaagccca

SEQ ID NO: 1973140 - RNA, 14 nt, Human
uguccaagaagccc

SEQ ID NO: 1973141 - RNA, 23 nt, Human
uguccaacugagaaguaccuuau

SEQ ID NO: 1973142 - RNA, 17 nt, Human
ugucagguggggcagcu

SEQ ID NO: 1973143 - RNA, 18 nt, Human
ugucagguggggcagcuu

SEQ ID NO: 1973144 - RNA, 20 nt, Human
ugucagguggggcagcuuga

SEQ ID NO: 1973145 - RNA, 20 nt, Human
ugucauuugagcagggcuca

SEQ ID NO: 1973146 - RNA, 21 nt, Human
ugucauuugagcagggcucag

SEQ ID NO: 1973147 - RNA, 22 nt, Human
ugucauuugagcagggcucagc

SEQ ID NO: 1973148 - RNA, 22 nt, Human
uguccaagaagcccaggaaagg

SEQ ID NO: 1973149 - RNA, 18 nt, Human
uguccaagaagcccagga

SEQ ID NO: 1973150 - RNA, 17 nt, Human
uguccaagaagcccagg

SEQ ID NO: 1973151 - RNA, 16 nt, Human
uguccaagaagcccag

SEQ ID NO: 1973152 - RNA, 20 nt, Human
uguccagagcugcuuccccg

SEQ ID NO: 1973153 - RNA, 20 nt, Human
ugucccugcacuugcagacu

SEQ ID NO: 1973154 - RNA, 22 nt, Human
ugucccugcacuugcagacucu

SEQ ID NO: 1973155 - RNA, 23 nt, Human
ugucccugcacuugcagacucua

SEQ ID NO: 1973156 - RNA, 16 nt, Human
aguauuaauucucuuu

SEQ ID NO: 1973157 - RNA, 17 nt, Human
aguauacucuuaggcca

SEQ ID NO: 1973158 - RNA, 14 nt, Human
aguauguuuuacuu

SEQ ID NO: 1973159 - RNA, 12 nt, Human
uguauauuugau

SEQ ID NO: 1973160 - RNA, 14 nt, Human
uguauauuugauuu

SEQ ID NO: 1973161 - RNA, 16 nt, Human
uguauauuugauuuau

SEQ ID NO: 1973162 - RNA, 17 nt, Human
uguauauuugauuuauu

SEQ ID NO: 1973163 - RNA, 22 nt, Human
uguauauuugauuuauuaacuu

SEQ ID NO: 1973164 - RNA, 19 nt, Human
uguauauuugauuuauuaa

SEQ ID NO: 1973165 - RNA, 21 nt, Human
uguauauugguuuuaugauga

SEQ ID NO: 1973166 - RNA, 18 nt, Human
uguauauucuauuuuaca

SEQ ID NO: 1973167 - RNA, 13 nt, Human
uguauauugguuu

SEQ ID NO: 1973168 - RNA, 14 nt, Human
uguauauugguuuu

SEQ ID NO: 1973169 - RNA, 20 nt, Human
uguauauugguuuuaugaug

SEQ ID NO: 1973170 - RNA, 17 nt, Human
agucaccccggccaccu

SEQ ID NO: 1973171 - RNA, 15 nt, Human
agucaccaagcccag

SEQ ID NO: 1973172 - RNA, 21 nt, Human
aguauuuuccuguugucaaga

SEQ ID NO: 1973173 - RNA, 21 nt, Human
aguauuuuaguggacccugaa

SEQ ID NO: 1973174 - RNA, 12 nt, Human
aguauuuuagug

SEQ ID NO: 1973175 - RNA, 14 nt, Human
aguauuugugggga

SEQ ID NO: 1973176 - RNA, 19 nt, Human
aguauucuuauuuaaugaa

SEQ ID NO: 1973177 - RNA, 16 nt, Human
aguauucuaauaagcu

SEQ ID NO: 1973178 - RNA, 17 nt, Human
aguauucuaauaagcua

SEQ ID NO: 1973179 - RNA, 21 nt, Human
aguauucuaauaagcuaguug

SEQ ID NO: 1973180 - RNA, 23 nt, Human
aguauucuaauaagcuaguugaa

SEQ ID NO: 1973181 - RNA, 15 nt, Human
aguauucucauucuu

SEQ ID NO: 1973182 - RNA, 16 nt, Human
aguauucucauucuuc

SEQ ID NO: 1973183 - RNA, 16 nt, Human
aguauucucuuuucaa

SEQ ID NO: 1973184 - RNA, 15 nt, Human
agucuauuuacggaa

SEQ ID NO: 1973185 - RNA, 20 nt, Human
agucuauuuacggaacucaa

SEQ ID NO: 1973186 - RNA, 23 nt, Human
agucucacuguugcccaggcugg

SEQ ID NO: 1973187 - RNA, 14 nt, Human
agucuaucauuguu

SEQ ID NO: 1973188 - RNA, 20 nt, Human
agucuaaauuuauuauuuaa

SEQ ID NO: 1973189 - RNA, 23 nt, Human
agucuaacaacugcccaguuucc

SEQ ID NO: 1973190 - RNA, 12 nt, Human
aguccuccagaa

SEQ ID NO: 1973191 - RNA, 14 nt, Human
aguccuccagaacu

SEQ ID NO: 1973192 - RNA, 19 nt, Human
aguccuccagaacucuucc

SEQ ID NO: 1973193 - RNA, 20 nt, Human
aguccuccagaacucuuccu

SEQ ID NO: 1973194 - RNA, 21 nt, Human
aguccuccagaacucuuccuc

SEQ ID NO: 1973195 - RNA, 16 nt, Human
agucccccugccccag

SEQ ID NO: 1973196 - RNA, 16 nt, Human
aguccucccaucucac

SEQ ID NO: 1973197 - RNA, 14 nt, Human
aguccucccaucuc

SEQ ID NO: 1973198 - RNA, 21 nt, Human
agucgccuuucagcaggcagc

SEQ ID NO: 1973199 - RNA, 22 nt, Human
agucgccuuucagcaggcagcc

SEQ ID NO: 1973200 - RNA, 22 nt, Human
aguccuccagaacucuuccucc

SEQ ID NO: 1973201 - RNA, 16 nt, Human
agucggcacagccugg

SEQ ID NO: 1973202 - RNA, 18 nt, Human
agucccaccuuggcugca

SEQ ID NO: 1973203 - RNA, 19 nt, Human
agucccaccuuggcugcag

SEQ ID NO: 1973204 - RNA, 12 nt, Human
agucccagcagc

SEQ ID NO: 1973205 - RNA, 14 nt, Human
agucccagcagcca

SEQ ID NO: 1973206 - RNA, 15 nt, Human
agucccagcagccag

SEQ ID NO: 1973207 - RNA, 16 nt, Human
agucccagcagccagc

SEQ ID NO: 1973208 - RNA, 17 nt, Human
agucccaggcugagccu

SEQ ID NO: 1973209 - RNA, 18 nt, Human
agucccaggcugagccuc

SEQ ID NO: 1973210 - RNA, 17 nt, Human
agucccagcagccagcc

SEQ ID NO: 1973211 - RNA, 18 nt, Human
agucccagcagccagcca

SEQ ID NO: 1973212 - RNA, 19 nt, Human
agucccagcagccagccaa

SEQ ID NO: 1973213 - RNA, 19 nt, Human
agucccaggcugagccuca

SEQ ID NO: 1973214 - RNA, 14 nt, Human
aguccccccacucc

SEQ ID NO: 1973215 - RNA, 15 nt, Human
agucccaccuuggcu

SEQ ID NO: 1973216 - RNA, 16 nt, Human
agucccaccuuggcug

SEQ ID NO: 1973217 - RNA, 23 nt, Human
ugucccuuacgugaguccuggca

SEQ ID NO: 1973218 - RNA, 19 nt, Human
ugucccuuacgugaguccu

SEQ ID NO: 1973219 - RNA, 16 nt, Human
ugucccuggcuuccuu

SEQ ID NO: 1973220 - RNA, 17 nt, Human
ugucccuggcuuccuua

SEQ ID NO: 1973221 - RNA, 15 nt, Human
ugucccuggcuuccu

SEQ ID NO: 1973222 - RNA, 14 nt, Human
ugucgccucugcau

SEQ ID NO: 1973223 - RNA, 13 nt, Human
ugucgccucugca

SEQ ID NO: 1973224 - RNA, 17 nt, Human
agucagaaacuguuucu

SEQ ID NO: 1973225 - RNA, 16 nt, Human
agucagccucgcaggc

SEQ ID NO: 1973226 - RNA, 23 nt, Human
agucagccucgcaggccucccug

SEQ ID NO: 1973227 - RNA, 14 nt, Human
ugggcauucucucu

SEQ ID NO: 1973228 - RNA, 17 nt, Human
agggagggagggcucca

SEQ ID NO: 1973229 - RNA, 19 nt, Human
agggagggcuccagacaca

SEQ ID NO: 1973230 - RNA, 17 nt, Human
agggagggcuccagaca

SEQ ID NO: 1973231 - RNA, 12 nt, Human
agggagggcucc

SEQ ID NO: 1973232 - RNA, 13 nt, Human
agggagggccugg

SEQ ID NO: 1973233 - RNA, 15 nt, Human
agggagggccugggc

SEQ ID NO: 1973234 - RNA, 22 nt, Human
agggagggcuccagacacaugu

SEQ ID NO: 1973235 - RNA, 19 nt, Human
agggaggugugaggcagga

SEQ ID NO: 1973236 - RNA, 20 nt, Human
agggaguccgaaagggacuu

SEQ ID NO: 1973237 - RNA, 23 nt, Human
agggaguccgaaagggacuugga

SEQ ID NO: 1973238 - RNA, 15 nt, Human
agggaguauucuaau

SEQ ID NO: 1973239 - RNA, 14 nt, Human
agggagucagcugu

SEQ ID NO: 1973240 - RNA, 20 nt, Human
agggagugaguugauagcac

SEQ ID NO: 1973241 - RNA, 20 nt, Human
agggagugacagaggcagcc

SEQ ID NO: 1973242 - RNA, 12 nt, Human
agggcccagaga

SEQ ID NO: 1973243 - RNA, 13 nt, Human
agggcccagagag

SEQ ID NO: 1973244 - RNA, 17 nt, Human
agggcauggccaggugg

SEQ ID NO: 1973245 - RNA, 23 nt, Human
agggcauuguaucugucuuucca

SEQ ID NO: 1973246 - RNA, 14 nt, Human
agggccaaaagcuu

SEQ ID NO: 1973247 - RNA, 18 nt, Human
agggccaaaagcuucccu

SEQ ID NO: 1973248 - RNA, 19 nt, Human
agggccaaaagcuucccuc

SEQ ID NO: 1973249 - RNA, 21 nt, Human
agggccaaaagcuucccuccc

SEQ ID NO: 1973250 - RNA, 17 nt, Human
agggcacugguggcccg

SEQ ID NO: 1973251 - RNA, 16 nt, Human
agggcagugcaaggag

SEQ ID NO: 1973252 - RNA, 19 nt, Human
agggcagugcaaggaggga

SEQ ID NO: 1973253 - RNA, 20 nt, Human
agggcuccagacacaugucc

SEQ ID NO: 1973254 - RNA, 14 nt, Human
agggcccagagagg

SEQ ID NO: 1973255 - RNA, 18 nt, Human
agggcuggggcagccucu

SEQ ID NO: 1973256 - RNA, 19 nt, Human
agggcuguggccucccugc

SEQ ID NO: 1973257 - RNA, 14 nt, Human
ugggcucccuuccc

SEQ ID NO: 1973258 - RNA, 13 nt, Human
ugggcuccccucu

SEQ ID NO: 1973259 - RNA, 14 nt, Human
ugggcuccccucuu

SEQ ID NO: 1973260 - RNA, 16 nt, Human
ugggcuccccucuucc

SEQ ID NO: 1973261 - RNA, 14 nt, Human
ugggcucagcacau

SEQ ID NO: 1973262 - RNA, 10 nt, Human
ugggcucagc

SEQ ID NO: 1973263 - RNA, 15 nt, Human
ugggcucccuuccca

SEQ ID NO: 1973264 - RNA, 21 nt, Human
ugggcucccuucccaccucuc

SEQ ID NO: 1973265 - RNA, 18 nt, Human
agggacuuggaagcuccg

SEQ ID NO: 1973266 - RNA, 19 nt, Human
agggacuuggaagcuccgc

SEQ ID NO: 1973267 - RNA, 15 nt, Human
agggacuuggaagcu

SEQ ID NO: 1973268 - RNA, 12 nt, Human
agggaaagacug

SEQ ID NO: 1973269 - RNA, 16 nt, Human
agggaaagacuggcaa

SEQ ID NO: 1973270 - RNA, 16 nt, Human
agggaaagcauuuaaa

SEQ ID NO: 1973271 - RNA, 20 nt, Human
agggacuuggaagcuccgcu

SEQ ID NO: 1973272 - RNA, 16 nt, Human
agggagcagggaaggc

SEQ ID NO: 1973273 - RNA, 23 nt, Human
agggagcagacuuuuaaagacuu

SEQ ID NO: 1973274 - RNA, 15 nt, Human
ugggagaaaugaaaa

SEQ ID NO: 1973275 - RNA, 14 nt, Human
ugggacuggccucu

SEQ ID NO: 1973276 - RNA, 16 nt, Human
ugggacuggccucugc

SEQ ID NO: 1973277 - RNA, 20 nt, Human
ugggacugggaacagaacuc

SEQ ID NO: 1973278 - RNA, 18 nt, Human
ugggacucaaugcacuga

SEQ ID NO: 1973279 - RNA, 13 nt, Human
ugggacuggccuc

SEQ ID NO: 1973280 - RNA, 19 nt, Human
ugggacuaugcuuuucuca

SEQ ID NO: 1973281 - RNA, 20 nt, Human
ugggacuaugcuuuucucaa

SEQ ID NO: 1973282 - RNA, 16 nt, Human
ugggacuacaggugug

SEQ ID NO: 1973283 - RNA, 18 nt, Human
agggagcaucagugcccu

SEQ ID NO: 1973284 - RNA, 19 nt, Human
agggagcagggaaggccug

SEQ ID NO: 1973285 - RNA, 14 nt, Human
agggagcaguggcu

SEQ ID NO: 1973286 - RNA, 18 nt, Human
ugggacuacaggcaccca

SEQ ID NO: 1973287 - RNA, 21 nt, Human
ugggagaaccaaaaagaggcu

SEQ ID NO: 1973288 - RNA, 16 nt, Human
ugggagaaaugaaaaa

SEQ ID NO: 1973289 - RNA, 21 nt, Human
ugggaggauugcuugagcuca

SEQ ID NO: 1973290 - RNA, 18 nt, Human
ugggaggauugcuugagc

SEQ ID NO: 1973291 - RNA, 22 nt, Human
ugggaggauugcuugagcucag

SEQ ID NO: 1973292 - RNA, 15 nt, Human
ugggaggcuggaguu

SEQ ID NO: 1973293 - RNA, 19 nt, Human
ugggaggcugagaugggag

SEQ ID NO: 1973294 - RNA, 23 nt, Human
ugggaggcucuggagcccacugu

SEQ ID NO: 1973295 - RNA, 17 nt, Human
ugggaggcucuggagcc

SEQ ID NO: 1973296 - RNA, 14 nt, Human
ugggaggcucugga

SEQ ID NO: 1973297 - RNA, 20 nt, Human
ugggcagaaggaagacuuca

SEQ ID NO: 1973298 - RNA, 16 nt, Human
ugggcagaaggaagac

SEQ ID NO: 1973299 - RNA, 14 nt, Human
ugggcauucaaaug

SEQ ID NO: 1973300 - RNA, 13 nt, Human
ugggcauucaaau

SEQ ID NO: 1973301 - RNA, 23 nt, Human
ugggcagaaggaagacuucaucc

SEQ ID NO: 1973302 - RNA, 13 nt, Human
ugggcaauauucu

SEQ ID NO: 1973303 - RNA, 17 nt, Human
ugggcaauauucucugu

SEQ ID NO: 1973304 - RNA, 18 nt, Human
ugggcaauauucucugua

SEQ ID NO: 1973305 - RNA, 19 nt, Human
ugggcaauauucucuguac

SEQ ID NO: 1973306 - RNA, 20 nt, Human
ugggcaauauucucuguaca

SEQ ID NO: 1973307 - RNA, 21 nt, Human
ugggcaauauucucuguacau

SEQ ID NO: 1973308 - RNA, 13 nt, Human
ugggcagaaggaa

SEQ ID NO: 1973309 - RNA, 16 nt, Human
ugggauuuggucaaca

SEQ ID NO: 1973310 - RNA, 15 nt, Human
ugggcaaaagagugu

SEQ ID NO: 1973311 - RNA, 21 nt, Human
ugggcaacccccagccugcua

SEQ ID NO: 1973312 - RNA, 17 nt, Human
uggcucaagucuggccc

SEQ ID NO: 1973313 - RNA, 13 nt, Human
uggcucacgccug

SEQ ID NO: 1973314 - RNA, 19 nt, Human
uggcuaauguacugcauau

SEQ ID NO: 1973315 - RNA, 17 nt, Human
uggcuaauguacugcau

SEQ ID NO: 1973316 - RNA, 23 nt, Human
aggcuccaggagcagccacauuc

SEQ ID NO: 1973317 - RNA, 19 nt, Human
aggcuccaggagcagccac

SEQ ID NO: 1973318 - RNA, 18 nt, Human
aggcuccaggagcagcca

SEQ ID NO: 1973319 - RNA, 17 nt, Human
aggcuccaggagcagcc

SEQ ID NO: 1973320 - RNA, 14 nt, Human
uggcuaaauucaug

SEQ ID NO: 1973321 - RNA, 18 nt, Human
uggcuaagcaaaauguga

SEQ ID NO: 1973322 - RNA, 13 nt, Human
aggcuccaggcag

SEQ ID NO: 1973323 - RNA, 14 nt, Human
aggcuccaggcagc

SEQ ID NO: 1973324 - RNA, 15 nt, Human
aggcuccaggcagca

SEQ ID NO: 1973325 - RNA, 13 nt, Human
aggcuccugccac

SEQ ID NO: 1973326 - RNA, 16 nt, Human
uggcuguggagugugg

SEQ ID NO: 1973327 - RNA, 22 nt, Human
uggcugugccucugccugucuc

SEQ ID NO: 1973328 - RNA, 18 nt, Human
uggcugugccucugccug

SEQ ID NO: 1973329 - RNA, 19 nt, Human
uggcugugccucugccugu

SEQ ID NO: 1973330 - RNA, 21 nt, Human
uggcuguggaauaggaacgcu

SEQ ID NO: 1973331 - RNA, 16 nt, Human
uggcuguuggcugggg

SEQ ID NO: 1973332 - RNA, 18 nt, Human
uggcuguuggcugggggc

SEQ ID NO: 1973333 - RNA, 14 nt, Human
uggcuucacggaag

SEQ ID NO: 1973334 - RNA, 23 nt, Human
uggcuguuggcugggggccucag

SEQ ID NO: 1973335 - RNA, 15 nt, Human
uggcugcagagcagu

SEQ ID NO: 1973336 - RNA, 18 nt, Human
uggcugcagagcaguggg

SEQ ID NO: 1973337 - RNA, 22 nt, Human
uggcugcagagcagugggccug

SEQ ID NO: 1973338 - RNA, 23 nt, Human
uggcugcaaaggguaucaggugc

SEQ ID NO: 1973339 - RNA, 14 nt, Human
uggcugugccucug

SEQ ID NO: 1973340 - RNA, 15 nt, Human
uggcugugccucugc

SEQ ID NO: 1973341 - RNA, 16 nt, Human
uggcugugccucugcc

SEQ ID NO: 1973342 - RNA, 17 nt, Human
uggcugugccucugccu

SEQ ID NO: 1973343 - RNA, 15 nt, Human
ugggaaacagaggcu

SEQ ID NO: 1973344 - RNA, 20 nt, Human
ugggaacaccauaggucacc

SEQ ID NO: 1973345 - RNA, 23 nt, Human
ugggaaaugcugauuuaaacuuc

SEQ ID NO: 1973346 - RNA, 17 nt, Human
ugggaaagagauuuaaa

SEQ ID NO: 1973347 - RNA, 20 nt, Human
uggcuucacggaagagccuu

SEQ ID NO: 1973348 - RNA, 17 nt, Human
uggcuucacggaagagc

SEQ ID NO: 1973349 - RNA, 15 nt, Human
uggcuuuugugcauu

SEQ ID NO: 1973350 - RNA, 16 nt, Human
uggcuuuugugcauua

SEQ ID NO: 1973351 - RNA, 21 nt, Human
uggcuuuugugcauuaucuag

SEQ ID NO: 1973352 - RNA, 18 nt, Human
uggcuuaaaaaaaacucu

SEQ ID NO: 1973353 - RNA, 18 nt, Human
ugggaaacaaaaggauaa

SEQ ID NO: 1973354 - RNA, 12 nt, Human
aggcuugcagaa

SEQ ID NO: 1973355 - RNA, 15 nt, Human
aggcuugcugcagau

SEQ ID NO: 1973356 - RNA, 23 nt, Human
aggcuucugguugaugccuguga

SEQ ID NO: 1973357 - RNA, 21 nt, Human
aggcuuagucacugagacagc

SEQ ID NO: 1973358 - RNA, 22 nt, Human
aggcuuagucacugagacagcc

SEQ ID NO: 1973359 - RNA, 23 nt, Human
aggcuuagucacugagacagccc

SEQ ID NO: 1973360 - RNA, 14 nt, Human
aggcuuauaaaaca

SEQ ID NO: 1973361 - RNA, 16 nt, Human
aggcuuauaaaacaga

SEQ ID NO: 1973362 - RNA, 14 nt, Human
aggcuuauauuugu

SEQ ID NO: 1973363 - RNA, 22 nt, Human
aggcuuauauuuguguaauuuu

SEQ ID NO: 1973364 - RNA, 16 nt, Human
agggaaaagcagcucu

SEQ ID NO: 1973365 - RNA, 22 nt, Human
agggaaaauaaaaaaagaaaaa

SEQ ID NO: 1973366 - RNA, 23 nt, Human
agggaaaauaaaaaaagaaaaaa

SEQ ID NO: 1973367 - RNA, 15 nt, Human
aggcuuuuuuaucau

SEQ ID NO: 1973368 - RNA, 21 nt, Human
aggcuuuuuuaucaugugaaa

SEQ ID NO: 1973369 - RNA, 18 nt, Human
aggcuuuuuuaucaugug

SEQ ID NO: 1973370 - RNA, 23 nt, Human
agggaaaaaucaaguauuauaaa

SEQ ID NO: 1973371 - RNA, 22 nt, Human
aggcugggggaagaagcucucu

SEQ ID NO: 1973372 - RNA, 10 nt, Human
aggcuggguc

SEQ ID NO: 1973373 - RNA, 18 nt, Human
aggcugggucgcccugga

SEQ ID NO: 1973374 - RNA, 15 nt, Human
aggcugggucgcccu

SEQ ID NO: 1973375 - RNA, 17 nt, Human
aggcuggguucugaucc

SEQ ID NO: 1973376 - RNA, 14 nt, Human
aggcuggguucuga

SEQ ID NO: 1973377 - RNA, 21 nt, Human
aggcugggucgcccuggacug

SEQ ID NO: 1973378 - RNA, 20 nt, Human
aggcugggucgcccuggacu

SEQ ID NO: 1973379 - RNA, 18 nt, Human
aggcugggcuucaguggc

SEQ ID NO: 1973380 - RNA, 19 nt, Human
aggcugggcuucaguggca

SEQ ID NO: 1973381 - RNA, 20 nt, Human
aggcugggcuucaguggcag

SEQ ID NO: 1973382 - RNA, 21 nt, Human
aggcugggcuucaguggcagc

SEQ ID NO: 1973383 - RNA, 17 nt, Human
aggcugggggaagaagc

SEQ ID NO: 1973384 - RNA, 19 nt, Human
aggcugggcugggcacugc

SEQ ID NO: 1973385 - RNA, 21 nt, Human
aggcugggcugggcacugcuc

SEQ ID NO: 1973386 - RNA, 22 nt, Human
aggcugggcugggcacugcucu

SEQ ID NO: 1973387 - RNA, 22 nt, Human
aggcugggcuucaguggcagcu

SEQ ID NO: 1973388 - RNA, 23 nt, Human
aggcugggcuucaguggcagcug

SEQ ID NO: 1973389 - RNA, 18 nt, Human
aggcugggcucccuuccc

SEQ ID NO: 1973390 - RNA, 14 nt, Human
aggcugggcucccu

SEQ ID NO: 1973391 - RNA, 13 nt, Human
aggcugggcuccc

SEQ ID NO: 1973392 - RNA, 23 nt, Human
aggcugggcucccuucccaccuc

SEQ ID NO: 1973393 - RNA, 21 nt, Human
aggcugggcucccuucccacc

SEQ ID NO: 1973394 - RNA, 15 nt, Human
aggcugggcugggca

SEQ ID NO: 1973395 - RNA, 16 nt, Human
aggcugggcugggcac

SEQ ID NO: 1973396 - RNA, 18 nt, Human
aggcugggcugggcacug

SEQ ID NO: 1973397 - RNA, 14 nt, Human
aggcugggcuucag

SEQ ID NO: 1973398 - RNA, 21 nt, Human
aggcugggagagccuuccagg

SEQ ID NO: 1973399 - RNA, 20 nt, Human
aggcugggagagccuuccag

SEQ ID NO: 1973400 - RNA, 22 nt, Human
aggcugggagagccuuccaggg

SEQ ID NO: 1973401 - RNA, 16 nt, Human
aggcugggagagccuu

SEQ ID NO: 1973402 - RNA, 19 nt, Human
aggcugggagagccuucca

SEQ ID NO: 1973403 - RNA, 13 nt, Human
aggccuggccaga

SEQ ID NO: 1973404 - RNA, 16 nt, Human
aggccugacucucagc

SEQ ID NO: 1973405 - RNA, 20 nt, Human
aggccugaauccaaaagaaa

SEQ ID NO: 1973406 - RNA, 23 nt, Human
aggccugaauccaaaagaaaaac

SEQ ID NO: 1973407 - RNA, 12 nt, Human
aggccuggccag

SEQ ID NO: 1973408 - RNA, 19 nt, Human
aggccuaauucuaugccug

SEQ ID NO: 1973409 - RNA, 22 nt, Human
aggccuaauucuaugccugucu

SEQ ID NO: 1973410 - RNA, 22 nt, Human
aggccuacaugcuuugugaaca

SEQ ID NO: 1973411 - RNA, 21 nt, Human
aggccguugccgcugauguuu

SEQ ID NO: 1973412 - RNA, 18 nt, Human
aggccguugcugacuuag

SEQ ID NO: 1973413 - RNA, 21 nt, Human
aggccguugcugacuuagaau

SEQ ID NO: 1973414 - RNA, 23 nt, Human
aggccguugcugacuuagaaucc

SEQ ID NO: 1973415 - RNA, 17 nt, Human
aggccuacuccugucuu

SEQ ID NO: 1973416 - RNA, 13 nt, Human
aggccuacuccug

SEQ ID NO: 1973417 - RNA, 14 nt, Human
aggccuacuccugu

SEQ ID NO: 1973418 - RNA, 15 nt, Human
aggccuacuccuguc

SEQ ID NO: 1973419 - RNA, 23 nt, Human
aggccuacaugcuuugugaacaa

SEQ ID NO: 1973420 - RNA, 17 nt, Human
aggcccggcuccaggcu

SEQ ID NO: 1973421 - RNA, 13 nt, Human
aggccgggcagag

SEQ ID NO: 1973422 - RNA, 14 nt, Human
aggccgggcagagc

SEQ ID NO: 1973423 - RNA, 16 nt, Human
aggccgggcagagcac

SEQ ID NO: 1973424 - RNA, 19 nt, Human
aggccgggcagagcacagc

SEQ ID NO: 1973425 - RNA, 14 nt, Human
aggcccggcuccag

SEQ ID NO: 1973426 - RNA, 15 nt, Human
aggcccggcuccagg

SEQ ID NO: 1973427 - RNA, 16 nt, Human
aggcccggcuccaggc

SEQ ID NO: 1973428 - RNA, 20 nt, Human
aggcccagagggccugcaag

SEQ ID NO: 1973429 - RNA, 19 nt, Human
aggcccagagggccugcaa

SEQ ID NO: 1973430 - RNA, 13 nt, Human
aggccccugccac

SEQ ID NO: 1973431 - RNA, 15 nt, Human
aggccccugccaccc

SEQ ID NO: 1973432 - RNA, 17 nt, Human
aggccccugccacccug

SEQ ID NO: 1973433 - RNA, 18 nt, Human
aggccccugccacccugg

SEQ ID NO: 1973434 - RNA, 21 nt, Human
aggccccugccacccugggga

SEQ ID NO: 1973435 - RNA, 17 nt, Human
aggcauaugcuucuuua

SEQ ID NO: 1973436 - RNA, 18 nt, Human
aggcauaugcuucuuuaa

SEQ ID NO: 1973437 - RNA, 19 nt, Human
aggcauaugcuucuuuaaa

SEQ ID NO: 1973438 - RNA, 14 nt, Human
uggcacagccugca

SEQ ID NO: 1973439 - RNA, 16 nt, Human
uggcacagggcagugg

SEQ ID NO: 1973440 - RNA, 15 nt, Human
uggcacagggcagug

SEQ ID NO: 1973441 - RNA, 17 nt, Human
uggcacagccugcacuu

SEQ ID NO: 1973442 - RNA, 13 nt, Human
uggcagaugcagc

SEQ ID NO: 1973443 - RNA, 15 nt, Human
uggcagaugcagcuc

SEQ ID NO: 1973444 - RNA, 16 nt, Human
uggcagaugcagcucu

SEQ ID NO: 1973445 - RNA, 17 nt, Human
uggcagaugcagcucuu

SEQ ID NO: 1973446 - RNA, 21 nt, Human
uggcagaugcagcucuuccug

SEQ ID NO: 1973447 - RNA, 17 nt, Human
uggcaccagcagccugg

SEQ ID NO: 1973448 - RNA, 16 nt, Human
uggcaccagcagccug

SEQ ID NO: 1973449 - RNA, 20 nt, Human
uggcagcaccgccucuuccc

SEQ ID NO: 1973450 - RNA, 23 nt, Human
uggcagcaccgccucuucccgcc

SEQ ID NO: 1973451 - RNA, 17 nt, Human
uggcagccgugccuuca

SEQ ID NO: 1973452 - RNA, 18 nt, Human
aggccagagacacaagcc

SEQ ID NO: 1973453 - RNA, 13 nt, Human
aggccagagacac

SEQ ID NO: 1973454 - RNA, 18 nt, Human
uggcagcucagagagggu

SEQ ID NO: 1973455 - RNA, 16 nt, Human
uggcagcucagagagg

SEQ ID NO: 1973456 - RNA, 15 nt, Human
uggcagcucagagag

SEQ ID NO: 1973457 - RNA, 14 nt, Human
uggcagcucagaga

SEQ ID NO: 1973458 - RNA, 18 nt, Human
uggcagccgugccuucag

SEQ ID NO: 1973459 - RNA, 19 nt, Human
uggcagccgugccuucagc

SEQ ID NO: 1973460 - RNA, 20 nt, Human
uggcagccgugccuucagcu

SEQ ID NO: 1973461 - RNA, 21 nt, Human
uggcagccgugccuucagcuc

SEQ ID NO: 1973462 - RNA, 16 nt, Human
aggcccagagggccug

SEQ ID NO: 1973463 - RNA, 15 nt, Human
aggcccagagggccu

SEQ ID NO: 1973464 - RNA, 20 nt, Human
aggccauuccccgucucugg

SEQ ID NO: 1973465 - RNA, 23 nt, Human
aggccagagacacaagccuucgg

SEQ ID NO: 1973466 - RNA, 22 nt, Human
uggcagccgugccuucagcucu

SEQ ID NO: 1973467 - RNA, 18 nt, Human
aggccaugggccuccugu

SEQ ID NO: 1973468 - RNA, 21 nt, Human
uggccugaugaccaauuuuaa

SEQ ID NO: 1973469 - RNA, 21 nt, Human
uggccugugcgaucccacccg

SEQ ID NO: 1973470 - RNA, 22 nt, Human
uggccugugcgaucccacccgu

SEQ ID NO: 1973471 - RNA, 19 nt, Human
uggccucugcacuccccug

SEQ ID NO: 1973472 - RNA, 20 nt, Human
uggccucugcacuccccugc

SEQ ID NO: 1973473 - RNA, 21 nt, Human
uggccucugcugauccuccca

SEQ ID NO: 1973474 - RNA, 13 nt, Human
uggcccugcccug

SEQ ID NO: 1973475 - RNA, 13 nt, Human
uggcccuuuccuu

SEQ ID NO: 1973476 - RNA, 18 nt, Human
uggcccuuuccuuccaga

SEQ ID NO: 1973477 - RNA, 12 nt, Human
uggcccugcccu

SEQ ID NO: 1973478 - RNA, 24 nt, Human
uggcccucucugaaggaggccacc

SEQ ID NO: 1973479 - RNA, 14 nt, Human
uggcccacugcauc

SEQ ID NO: 1973480 - RNA, 13 nt, Human
uggcccacugcau

SEQ ID NO: 1973481 - RNA, 19 nt, Human
uggcccacgcacuucggga

SEQ ID NO: 1973482 - RNA, 22 nt, Human
uggcaugggaaugaaugucagu

SEQ ID NO: 1973483 - RNA, 21 nt, Human
uggcauggugguugggaccca

SEQ ID NO: 1973484 - RNA, 22 nt, Human
uggcauggugguugggacccag

SEQ ID NO: 1973485 - RNA, 21 nt, Human
aggcuauuguccccuaaacca

SEQ ID NO: 1973486 - RNA, 14 nt, Human
aggcucaaauuuug

SEQ ID NO: 1973487 - RNA, 20 nt, Human
aggcgcaagggaggcccagc

SEQ ID NO: 1973488 - RNA, 19 nt, Human
aggcgcaagggaggcccag

SEQ ID NO: 1973489 - RNA, 14 nt, Human
aggcgccccuuccc

SEQ ID NO: 1973490 - RNA, 13 nt, Human
aggcgcuaacuug

SEQ ID NO: 1973491 - RNA, 15 nt, Human
aggcgcuaacuugcu

SEQ ID NO: 1973492 - RNA, 23 nt, Human
aggcgcuaacuugcuuaaaugug

SEQ ID NO: 1973493 - RNA, 15 nt, Human
aggcgcuagcacagc

SEQ ID NO: 1973494 - RNA, 19 nt, Human
aggcgcuagcacagcuccc

SEQ ID NO: 1973495 - RNA, 18 nt, Human
aggccuugggcucugcug

SEQ ID NO: 1973496 - RNA, 19 nt, Human
aggccuugggcucugcuga

SEQ ID NO: 1973497 - RNA, 23 nt, Human
aggccuuuaguuauaaaggaauc

SEQ ID NO: 1973498 - RNA, 21 nt, Human
aggcgaaagaaaacucuauuu

SEQ ID NO: 1973499 - RNA, 22 nt, Human
aggcgaggaggccguugccgcu

SEQ ID NO: 1973500 - RNA, 17 nt, Human
aggccuucucugaagga

SEQ ID NO: 1973501 - RNA, 18 nt, Human
aggccuucucugaaggac

SEQ ID NO: 1973502 - RNA, 17 nt, Human
aggccuugggcucugcu

SEQ ID NO: 1973503 - RNA, 11 nt, Human
aggcuccacuu

SEQ ID NO: 1973504 - RNA, 17 nt, Human
aggcuccacuuggucug

SEQ ID NO: 1973505 - RNA, 21 nt, Human
aggcuccacuuggucugugag

SEQ ID NO: 1973506 - RNA, 22 nt, Human
aggcuccacuuggucugugaga

SEQ ID NO: 1973507 - RNA, 16 nt, Human
aggcuccaggagcagc

SEQ ID NO: 1973508 - RNA, 14 nt, Human
aggcuccaggagca

SEQ ID NO: 1973509 - RNA, 13 nt, Human
aggcuccaggagc

SEQ ID NO: 1973510 - RNA, 12 nt, Human
aggcaggucccc

SEQ ID NO: 1973511 - RNA, 13 nt, Human
aggcaggucccca

SEQ ID NO: 1973512 - RNA, 14 nt, Human
aggcagguccccag

SEQ ID NO: 1973513 - RNA, 15 nt, Human
aggcagguccccaga

SEQ ID NO: 1973514 - RNA, 16 nt, Human
aggcagguccccagac

SEQ ID NO: 1973515 - RNA, 23 nt, Human
aggcaguaggacaaggugcaggc

SEQ ID NO: 1973516 - RNA, 21 nt, Human
aggcaggucuugaacuccugg

SEQ ID NO: 1973517 - RNA, 16 nt, Human
aggcaguauaaagaau

SEQ ID NO: 1973518 - RNA, 17 nt, Human
aggcaguugcccagccu

SEQ ID NO: 1973519 - RNA, 19 nt, Human
aggcaguugcccagccucu

SEQ ID NO: 1973520 - RNA, 20 nt, Human
aggcaguugcccagccucuu

SEQ ID NO: 1973521 - RNA, 15 nt, Human
aggcaguuugaggau

SEQ ID NO: 1973522 - RNA, 20 nt, Human
aggcaguuugaggauuaguu

SEQ ID NO: 1973523 - RNA, 15 nt, Human
aggcagggugucugc

SEQ ID NO: 1973524 - RNA, 20 nt, Human
aggcagggcaggaccagccc

SEQ ID NO: 1973525 - RNA, 21 nt, Human
aggcagggcaggaccagccca

SEQ ID NO: 1973526 - RNA, 22 nt, Human
aggcagggcaggaccagcccac

SEQ ID NO: 1973527 - RNA, 22 nt, Human
aggcagggucucacucugucgc

SEQ ID NO: 1973528 - RNA, 11 nt, Human
aggcagguccc

SEQ ID NO: 1973529 - RNA, 19 nt, Human
aggcagggugucugccccc

SEQ ID NO: 1973530 - RNA, 14 nt, Human
aggcagguccaggg

SEQ ID NO: 1973531 - RNA, 19 nt, Human
aggcagggucucacucugu

SEQ ID NO: 1973532 - RNA, 18 nt, Human
aggcagggucucacucug

SEQ ID NO: 1973533 - RNA, 20 nt, Human
aggcagggucucacucuguc

SEQ ID NO: 1973534 - RNA, 21 nt, Human
aggcagggucucacucugucg

SEQ ID NO: 1973535 - RNA, 21 nt, Human
aggcaggaccuucgggcugug

SEQ ID NO: 1973536 - RNA, 22 nt, Human
aggcaggaccuucgggcugugc

SEQ ID NO: 1973537 - RNA, 23 nt, Human
aggcaggaccuucgggcugugcc

SEQ ID NO: 1973538 - RNA, 12 nt, Human
aggcaggauggc

SEQ ID NO: 1973539 - RNA, 20 nt, Human
aggcaggaguuucguuuuca

SEQ ID NO: 1973540 - RNA, 16 nt, Human
aggcagggagggccug

SEQ ID NO: 1973541 - RNA, 12 nt, Human
aggcagggcagg

SEQ ID NO: 1973542 - RNA, 15 nt, Human
aggcagggcaggacc

SEQ ID NO: 1973543 - RNA, 16 nt, Human
aggcagggcaggacca

SEQ ID NO: 1973544 - RNA, 17 nt, Human
aggcagggcaggaccag

SEQ ID NO: 1973545 - RNA, 15 nt, Human
aggcaggagagacag

SEQ ID NO: 1973546 - RNA, 15 nt, Human
aggcacccaccauca

SEQ ID NO: 1973547 - RNA, 19 nt, Human
aggcagccccauucugccu

SEQ ID NO: 1973548 - RNA, 20 nt, Human
aggcagccccauucugccug

SEQ ID NO: 1973549 - RNA, 21 nt, Human
aggcagccccauucugccugc

SEQ ID NO: 1973550 - RNA, 22 nt, Human
aggcagccccauucugccugcc

SEQ ID NO: 1973551 - RNA, 17 nt, Human
aggcagccugagagucu

SEQ ID NO: 1973552 - RNA, 24 nt, Human
uggacuuuguuaguuucuccaagc

SEQ ID NO: 1973553 - RNA, 17 nt, Human
uggagaaaaauaucugu

SEQ ID NO: 1973554 - RNA, 23 nt, Human
uggagaaaaauaucuguaagagu

SEQ ID NO: 1973555 - RNA, 16 nt, Human
uggagcccacuguacu

SEQ ID NO: 1973556 - RNA, 23 nt, Human
uggagcccacuguacuugcucuu

SEQ ID NO: 1973557 - RNA, 19 nt, Human
uggagcccacuguacuugc

SEQ ID NO: 1973558 - RNA, 11 nt, Human
uggacuuuguu

SEQ ID NO: 1973559 - RNA, 22 nt, Human
uggacuuuguuaguuucuccaa

SEQ ID NO: 1973560 - RNA, 14 nt, Human
uggacccugaaaug

SEQ ID NO: 1973561 - RNA, 15 nt, Human
uggacccugaaaugu

SEQ ID NO: 1973562 - RNA, 16 nt, Human
uggacccugaaaugug

SEQ ID NO: 1973563 - RNA, 17 nt, Human
uggacccugaaaugugu

SEQ ID NO: 1973564 - RNA, 13 nt, Human
uggaccccagccu

SEQ ID NO: 1973565 - RNA, 14 nt, Human
uggaccccagccuc

SEQ ID NO: 1973566 - RNA, 15 nt, Human
uggaccccagccuca

SEQ ID NO: 1973567 - RNA, 16 nt, Human
uggaccccaucuguga

SEQ ID NO: 1973568 - RNA, 18 nt, Human
uggaccccaucugugaau

SEQ ID NO: 1973569 - RNA, 20 nt, Human
uggaccccaucugugaauaa

SEQ ID NO: 1973570 - RNA, 21 nt, Human
uggaccccaucugugaauaag

SEQ ID NO: 1973571 - RNA, 14 nt, Human
uggagcccaggagu

SEQ ID NO: 1973572 - RNA, 11 nt, Human
uggagccugca

SEQ ID NO: 1973573 - RNA, 13 nt, Human
uggagccugacag

SEQ ID NO: 1973574 - RNA, 16 nt, Human
uggagccugcagagcu

SEQ ID NO: 1973575 - RNA, 17 nt, Human
uggagccugacagccag

SEQ ID NO: 1973576 - RNA, 18 nt, Human
uggagccugacagccaga

SEQ ID NO: 1973577 - RNA, 21 nt, Human
uggagcugaggacucucacga

SEQ ID NO: 1973578 - RNA, 15 nt, Human
aggcaaugcuggcug

SEQ ID NO: 1973579 - RNA, 21 nt, Human
uggaggaaaaccaagccgugg

SEQ ID NO: 1973580 - RNA, 23 nt, Human
uggaggaaaaccaagccguggcu

SEQ ID NO: 1973581 - RNA, 16 nt, Human
aggcaaugcuggcugu

SEQ ID NO: 1973582 - RNA, 18 nt, Human
aggcacauggaauauauu

SEQ ID NO: 1973583 - RNA, 21 nt, Human
aggcacauggaauauauuuua

SEQ ID NO: 1973584 - RNA, 15 nt, Human
aggcacaggcagggc

SEQ ID NO: 1973585 - RNA, 16 nt, Human
aggcacaggcagggca

SEQ ID NO: 1973586 - RNA, 17 nt, Human
aggcacaggcagggcag

SEQ ID NO: 1973587 - RNA, 18 nt, Human
aggcacaggcagggcagg

SEQ ID NO: 1973588 - RNA, 13 nt, Human
uggaagugugggu

SEQ ID NO: 1973589 - RNA, 14 nt, Human
uggaaguguggguc

SEQ ID NO: 1973590 - RNA, 14 nt, Human
uggaagugcuaauu

SEQ ID NO: 1973591 - RNA, 18 nt, Human
uggaagugaaaacuuugu

SEQ ID NO: 1973592 - RNA, 19 nt, Human
uggaagugaaaacuuugua

SEQ ID NO: 1973593 - RNA, 20 nt, Human
uggaagugugggucugugug

SEQ ID NO: 1973594 - RNA, 14 nt, Human
aggaggccaccucc

SEQ ID NO: 1973595 - RNA, 15 nt, Human
aggaggccagccuug

SEQ ID NO: 1973596 - RNA, 21 nt, Human
aggaguuugagaccaaccugg

SEQ ID NO: 1973597 - RNA, 19 nt, Human
aggaguuucguuuucaaaa

SEQ ID NO: 1973598 - RNA, 20 nt, Human
aggaggccuugggcucugcu

SEQ ID NO: 1973599 - RNA, 22 nt, Human
aggaguuucuuuagcugacaga

SEQ ID NO: 1973600 - RNA, 17 nt, Human
aggauaugccugcucuu

SEQ ID NO: 1973601 - RNA, 16 nt, Human
aggauauggacacugg

SEQ ID NO: 1973602 - RNA, 18 nt, Human
aggauauggacacuggug

SEQ ID NO: 1973603 - RNA, 20 nt, Human
uggaaguacuauaauuuacc

SEQ ID NO: 1973604 - RNA, 12 nt, Human
uggaacacucug

SEQ ID NO: 1973605 - RNA, 14 nt, Human
uggaacacucugag

SEQ ID NO: 1973606 - RNA, 13 nt, Human
uggaagcuccgcu

SEQ ID NO: 1973607 - RNA, 12 nt, Human
ugcugcccugcc

SEQ ID NO: 1973608 - RNA, 10 nt, Human
ugcugcccug

SEQ ID NO: 1973609 - RNA, 15 nt, Human
ugcugccccugccuu

SEQ ID NO: 1973610 - RNA, 14 nt, Human
uggaauuugaaaca

SEQ ID NO: 1973611 - RNA, 16 nt, Human
aggcaacuugggaacu

SEQ ID NO: 1973612 - RNA, 19 nt, Human
aggcaacugcauuggcuuu

SEQ ID NO: 1973613 - RNA, 14 nt, Human
aggcaagcaccucc

SEQ ID NO: 1973614 - RNA, 16 nt, Human
aggcaagauggcacag

SEQ ID NO: 1973615 - RNA, 16 nt, Human
aggcaagauugauguu

SEQ ID NO: 1973616 - RNA, 14 nt, Human
uggacaaaauggaa

SEQ ID NO: 1973617 - RNA, 18 nt, Human
uggaauuuuuuuguacga

SEQ ID NO: 1973618 - RNA, 17 nt, Human
uggacaaaauggaauac

SEQ ID NO: 1973619 - RNA, 15 nt, Human
uggacaccggaaaca

SEQ ID NO: 1973620 - RNA, 13 nt, Human
uggacaagaaagu

SEQ ID NO: 1973621 - RNA, 12 nt, Human
aggaucucuuga

SEQ ID NO: 1973622 - RNA, 15 nt, Human
aggaugcuuguacau

SEQ ID NO: 1973623 - RNA, 16 nt, Human
aggaugcuuguacaua

SEQ ID NO: 1973624 - RNA, 21 nt, Human
aggauccugagccagauuuca

SEQ ID NO: 1973625 - RNA, 12 nt, Human
aggaucagucug

SEQ ID NO: 1973626 - RNA, 18 nt, Human
aggaugcuuguacauaau

SEQ ID NO: 1973627 - RNA, 22 nt, Human
aggauugcuacuguccuaccca

SEQ ID NO: 1973628 - RNA, 13 nt, Human
aggaauuuugcua

SEQ ID NO: 1973629 - RNA, 22 nt, Human
aggaauuuuauuuuuuucugaa

SEQ ID NO: 1973630 - RNA, 11 nt, Human
ugcugccaucc

SEQ ID NO: 1973631 - RNA, 22 nt, Human
ugcugccacacuucaggcucuu

SEQ ID NO: 1973632 - RNA, 20 nt, Human
aggacaaaucugcaaagcau

SEQ ID NO: 1973633 - RNA, 21 nt, Human
aggacaaaucugcaaagcaug

SEQ ID NO: 1973634 - RNA, 15 nt, Human
ugcugccacacuuca

SEQ ID NO: 1973635 - RNA, 16 nt, Human
ugcugccacacuucag

SEQ ID NO: 1973636 - RNA, 19 nt, Human
ugcugccacacuucaggcu

SEQ ID NO: 1973637 - RNA, 21 nt, Human
ugcugccauccagguucagcu

SEQ ID NO: 1973638 - RNA, 22 nt, Human
ugcugccauccagguucagcuu

SEQ ID NO: 1973639 - RNA, 14 nt, Human
ugcugcccagccuc

SEQ ID NO: 1973640 - RNA, 17 nt, Human
ugcugccaguaccagcc

SEQ ID NO: 1973641 - RNA, 19 nt, Human
ugcugccaguaccagcccc

SEQ ID NO: 1973642 - RNA, 20 nt, Human
ugcugccaguaccagcccca

SEQ ID NO: 1973643 - RNA, 16 nt, Human
ugcugcccagccucca

SEQ ID NO: 1973644 - RNA, 12 nt, Human
ugcugccaucca

SEQ ID NO: 1973645 - RNA, 13 nt, Human
ugcugccauccag

SEQ ID NO: 1973646 - RNA, 14 nt, Human
ugcugccauccagg

SEQ ID NO: 1973647 - RNA, 15 nt, Human
ugcugccauccaggu

SEQ ID NO: 1973648 - RNA, 15 nt, Human
aggaagacuuuggaa

SEQ ID NO: 1973649 - RNA, 13 nt, Human
aggaaaucaaagu

SEQ ID NO: 1973650 - RNA, 14 nt, Human
aggaaaucaaagug

SEQ ID NO: 1973651 - RNA, 19 nt, Human
aggaaaucaaagugcuauu

SEQ ID NO: 1973652 - RNA, 14 nt, Human
aggaagagaaaaaa

SEQ ID NO: 1973653 - RNA, 22 nt, Human
aggaagcucagggccuggcuca

SEQ ID NO: 1973654 - RNA, 18 nt, Human
aggaagcucagggccugg

SEQ ID NO: 1973655 - RNA, 17 nt, Human
aggaagcucagggccug

SEQ ID NO: 1973656 - RNA, 19 nt, Human
aggaauugacccacaagaa

SEQ ID NO: 1973657 - RNA, 23 nt, Human
aggaauccagacccggcugcgug

SEQ ID NO: 1973658 - RNA, 22 nt, Human
aggaaaggcuccaggagcagcc

SEQ ID NO: 1973659 - RNA, 20 nt, Human
aggaaaggcuccaggagcag

SEQ ID NO: 1973660 - RNA, 18 nt, Human
aggaaaggcuccaggagc

SEQ ID NO: 1973661 - RNA, 24 nt, Human
ugcugacuguuuucucuugagagg

SEQ ID NO: 1973662 - RNA, 21 nt, Human
ugcugacuguuuucucuugag

SEQ ID NO: 1973663 - RNA, 15 nt, Human
ugcugagucccaggc

SEQ ID NO: 1973664 - RNA, 18 nt, Human
ugcugagucccaggcuga

SEQ ID NO: 1973665 - RNA, 22 nt, Human
ugcugagucccaggcugagccu

SEQ ID NO: 1973666 - RNA, 20 nt, Human
ugcugaguccgaccuggccu

SEQ ID NO: 1973667 - RNA, 13 nt, Human
aggaaagcacaga

SEQ ID NO: 1973668 - RNA, 22 nt, Human
ugcucugaucauccacugugcc

SEQ ID NO: 1973669 - RNA, 18 nt, Human
ugcucugaugaagaggag

SEQ ID NO: 1973670 - RNA, 19 nt, Human
ugcucugaugaagaggagu

SEQ ID NO: 1973671 - RNA, 19 nt, Human
ugcucugaucauccacugu

SEQ ID NO: 1973672 - RNA, 15 nt, Human
ugcuaucaguuuuau

SEQ ID NO: 1973673 - RNA, 18 nt, Human
ugcuaucaguuuuauagc

SEQ ID NO: 1973674 - RNA, 18 nt, Human
ugcucugcauguuacaua

SEQ ID NO: 1973675 - RNA, 15 nt, Human
ugcucugcauguuac

SEQ ID NO: 1973676 - RNA, 15 nt, Human
ugcucugccccagcu

SEQ ID NO: 1973677 - RNA, 14 nt, Human
ugcucugccccagc

SEQ ID NO: 1973678 - RNA, 17 nt, Human
ugcucuggacaggcaug

SEQ ID NO: 1973679 - RNA, 19 nt, Human
ugcucugugcccacccucc

SEQ ID NO: 1973680 - RNA, 17 nt, Human
ugcugacuguuuucucu

SEQ ID NO: 1973681 - RNA, 15 nt, Human
agcuuaucucagggg

SEQ ID NO: 1973682 - RNA, 14 nt, Human
agcuuaucucaggg

SEQ ID NO: 1973683 - RNA, 12 nt, Human
agcuuaucucag

SEQ ID NO: 1973684 - RNA, 20 nt, Human
agcuuaaaggggcuagagug

SEQ ID NO: 1973685 - RNA, 20 nt, Human
agcuguuugguuuuaaaaua

SEQ ID NO: 1973686 - RNA, 23 nt, Human
agcuguuugguuuuaaaauacug

SEQ ID NO: 1973687 - RNA, 24 nt, Human
agcuguuugguuuuaaaauacugu

SEQ ID NO: 1973688 - RNA, 17 nt, Human
agcuguuugguuuuaaa

SEQ ID NO: 1973689 - RNA, 19 nt, Human
agcuguuugguuuuaaaau

SEQ ID NO: 1973690 - RNA, 20 nt, Human
ugcggacagccacggccagg

SEQ ID NO: 1973691 - RNA, 21 nt, Human
ugcggacagccacggccaggc

SEQ ID NO: 1973692 - RNA, 23 nt, Human
agcuuucugagcaagaggauuuu

SEQ ID NO: 1973693 - RNA, 14 nt, Human
agcuuucugagcaa

SEQ ID NO: 1973694 - RNA, 22 nt, Human
agcuuucugagcaagaggauuu

SEQ ID NO: 1973695 - RNA, 19 nt, Human
agcuuguaaauagcucagg

SEQ ID NO: 1973696 - RNA, 17 nt, Human
agcuuggcccuuuccuu

SEQ ID NO: 1973697 - RNA, 16 nt, Human
agcuuggcucaggcug

SEQ ID NO: 1973698 - RNA, 20 nt, Human
agcuuguaaauagcucaggu

SEQ ID NO: 1973699 - RNA, 21 nt, Human
agcuuguaaauagcucaggug

SEQ ID NO: 1973700 - RNA, 19 nt, Human
agcuuugaaaauucagugg

SEQ ID NO: 1973701 - RNA, 18 nt, Human
agcuuugaaaauucagug

SEQ ID NO: 1973702 - RNA, 16 nt, Human
agcuuugaaaauucag

SEQ ID NO: 1973703 - RNA, 12 nt, Human
agcuuugaaaau

SEQ ID NO: 1973704 - RNA, 17 nt, Human
aggaaacccagcucugg

SEQ ID NO: 1973705 - RNA, 16 nt, Human
aggaaacccagcucug

SEQ ID NO: 1973706 - RNA, 15 nt, Human
aggaaacccagcucu

SEQ ID NO: 1973707 - RNA, 20 nt, Human
aggaaacccagcucuggucc

SEQ ID NO: 1973708 - RNA, 18 nt, Human
aggaaacccagcucuggu

SEQ ID NO: 1973709 - RNA, 21 nt, Human
aggaaacccagcucuggucca

SEQ ID NO: 1973710 - RNA, 23 nt, Human
aggaaaccaguuaggucucaaua

SEQ ID NO: 1973711 - RNA, 21 nt, Human
ugcuauaacuauguugauaaa

SEQ ID NO: 1973712 - RNA, 16 nt, Human
ugcuagucuuaagaac

SEQ ID NO: 1973713 - RNA, 19 nt, Human
aggaaagcaaaggagauug

SEQ ID NO: 1973714 - RNA, 16 nt, Human
aggaaagaagcauuuc

SEQ ID NO: 1973715 - RNA, 17 nt, Human
aggaaagcaaaggagau

SEQ ID NO: 1973716 - RNA, 16 nt, Human
aggaaagaggcucugg

SEQ ID NO: 1973717 - RNA, 13 nt, Human
aggaaagaggcuc

SEQ ID NO: 1973718 - RNA, 12 nt, Human
aggaaagaggcu

SEQ ID NO: 1973719 - RNA, 15 nt, Human
agcuggggaugucuc

SEQ ID NO: 1973720 - RNA, 20 nt, Human
agcuggggccaggcuggguc

SEQ ID NO: 1973721 - RNA, 19 nt, Human
ugccuugugaaggaauuau

SEQ ID NO: 1973722 - RNA, 21 nt, Human
ugccuuagaaccuuucuuaca

SEQ ID NO: 1973723 - RNA, 14 nt, Human
ugccuuagaaccuu

SEQ ID NO: 1973724 - RNA, 17 nt, Human
ugccuuagaaccuuucu

SEQ ID NO: 1973725 - RNA, 15 nt, Human
ugccuguucagcucc

SEQ ID NO: 1973726 - RNA, 16 nt, Human
ugccuguucagcucca

SEQ ID NO: 1973727 - RNA, 17 nt, Human
ugccuguucagcuccag

SEQ ID NO: 1973728 - RNA, 13 nt, Human
ugcgaaaggauga

SEQ ID NO: 1973729 - RNA, 18 nt, Human
ugcggacagccacggcca

SEQ ID NO: 1973730 - RNA, 15 nt, Human
ugcgaggcuaugagu

SEQ ID NO: 1973731 - RNA, 19 nt, Human
ugcgaaaggaugaaaguga

SEQ ID NO: 1973732 - RNA, 19 nt, Human
agcugccugggaucccuca

SEQ ID NO: 1973733 - RNA, 13 nt, Human
agcugccugggau

SEQ ID NO: 1973734 - RNA, 21 nt, Human
agcugccugggaucccucauc

SEQ ID NO: 1973735 - RNA, 10 nt, Human
agcugccugu

SEQ ID NO: 1973736 - RNA, 22 nt, Human
ugccucugacacacagcucugu

SEQ ID NO: 1973737 - RNA, 20 nt, Human
agcugccuccccucuccuuc

SEQ ID NO: 1973738 - RNA, 23 nt, Human
agcugccuccccucuccuuccug

SEQ ID NO: 1973739 - RNA, 17 nt, Human
agcugccugaaaaucaa

SEQ ID NO: 1973740 - RNA, 19 nt, Human
agcugccugaaaaucaaga

SEQ ID NO: 1973741 - RNA, 14 nt, Human
agcugggcagguug

SEQ ID NO: 1973742 - RNA, 22 nt, Human
agcugggauuacaggcuccugc

SEQ ID NO: 1973743 - RNA, 23 nt, Human
agcugggauuacaggcuccugcc

SEQ ID NO: 1973744 - RNA, 17 nt, Human
agcuggggccaggcugg

SEQ ID NO: 1973745 - RNA, 23 nt, Human
agcugggaugauuggagggggga

SEQ ID NO: 1973746 - RNA, 18 nt, Human
agcugggauuacaggcuc

SEQ ID NO: 1973747 - RNA, 21 nt, Human
agcugggauuacaggcuccug

SEQ ID NO: 1973748 - RNA, 22 nt, Human
agcugggaucacauguggacuu

SEQ ID NO: 1973749 - RNA, 17 nt, Human
agcugggacuacaggug

SEQ ID NO: 1973750 - RNA, 19 nt, Human
agcugggacuacaggugug

SEQ ID NO: 1973751 - RNA, 15 nt, Human
agcuggagaggagcc

SEQ ID NO: 1973752 - RNA, 16 nt, Human
agcuggagaggagccc

SEQ ID NO: 1973753 - RNA, 19 nt, Human
agcuggagaggagcccugc

SEQ ID NO: 1973754 - RNA, 17 nt, Human
agcuggagaggagcccu

SEQ ID NO: 1973755 - RNA, 18 nt, Human
agcuggagaggagcccug

SEQ ID NO: 1973756 - RNA, 20 nt, Human
ugcccuccaagaccuucucc

SEQ ID NO: 1973757 - RNA, 19 nt, Human
ugcccuccaagaccuucuc

SEQ ID NO: 1973758 - RNA, 22 nt, Human
ugcccuccaagaccuucuccuu

SEQ ID NO: 1973759 - RNA, 15 nt, Human
agcucuccccucaga

SEQ ID NO: 1973760 - RNA, 22 nt, Human
agcucucaugcugccccugccu

SEQ ID NO: 1973761 - RNA, 17 nt, Human
agcucuaucaccaagga

SEQ ID NO: 1973762 - RNA, 22 nt, Human
agcucuaucaccaaggagccaa

SEQ ID NO: 1973763 - RNA, 16 nt, Human
agcucucuccucccuu

SEQ ID NO: 1973764 - RNA, 20 nt, Human
agcucugguccauagagagc

SEQ ID NO: 1973765 - RNA, 22 nt, Human
agcucugcuccucuccccagca

SEQ ID NO: 1973766 - RNA, 12 nt, Human
agcucugcuccu

SEQ ID NO: 1973767 - RNA, 11 nt, Human
agcucugccuu

SEQ ID NO: 1973768 - RNA, 22 nt, Human
agcugcacccucaggcaggugg

SEQ ID NO: 1973769 - RNA, 20 nt, Human
agcugcacccucaggcaggu

SEQ ID NO: 1973770 - RNA, 19 nt, Human
agcugcacccucaggcagg

SEQ ID NO: 1973771 - RNA, 18 nt, Human
agcugcacccucaggcag

SEQ ID NO: 1973772 - RNA, 20 nt, Human
agcugauguguugccacuuu

SEQ ID NO: 1973773 - RNA, 17 nt, Human
agcugcacccucaggca

SEQ ID NO: 1973774 - RNA, 13 nt, Human
agcugcacccuca

SEQ ID NO: 1973775 - RNA, 18 nt, Human
agcucuucuccaggcugu

SEQ ID NO: 1973776 - RNA, 12 nt, Human
agcucuguccug

SEQ ID NO: 1973777 - RNA, 14 nt, Human
ugccucucucaggc

SEQ ID NO: 1973778 - RNA, 13 nt, Human
ugccucucucagg

SEQ ID NO: 1973779 - RNA, 19 nt, Human
ugccucccaucacccgcua

SEQ ID NO: 1973780 - RNA, 14 nt, Human
ugccucccaucacc

SEQ ID NO: 1973781 - RNA, 13 nt, Human
ugccucccaucac

SEQ ID NO: 1973782 - RNA, 15 nt, Human
ugccucucucaggcc

SEQ ID NO: 1973783 - RNA, 16 nt, Human
ugccucucucaggcca

SEQ ID NO: 1973784 - RNA, 18 nt, Human
ugccucucugcagguccc

SEQ ID NO: 1973785 - RNA, 16 nt, Human
ugccucucugcagguc

SEQ ID NO: 1973786 - RNA, 20 nt, Human
ugccucucugcaggucccua

SEQ ID NO: 1973787 - RNA, 19 nt, Human
ugccucucugcaggucccu

SEQ ID NO: 1973788 - RNA, 20 nt, Human
ugccucugacacacagcucu

SEQ ID NO: 1973789 - RNA, 21 nt, Human
ugccucugacacacagcucug

SEQ ID NO: 1973790 - RNA, 20 nt, Human
ugccgcgucgcccucccagg

SEQ ID NO: 1973791 - RNA, 13 nt, Human
ugccgcugauguu

SEQ ID NO: 1973792 - RNA, 18 nt, Human
ugccgggugcagcaucug

SEQ ID NO: 1973793 - RNA, 22 nt, Human
ugccgcugauguuuggccguga

SEQ ID NO: 1973794 - RNA, 21 nt, Human
ugccgcgucgcccucccaggc

SEQ ID NO: 1973795 - RNA, 16 nt, Human
ugccgcgucgcccucc

SEQ ID NO: 1973796 - RNA, 15 nt, Human
ugcccuuucugggca

SEQ ID NO: 1973797 - RNA, 21 nt, Human
ugcccuuuacuugucuuucug

SEQ ID NO: 1973798 - RNA, 15 nt, Human
ugcccuuuguccucc

SEQ ID NO: 1973799 - RNA, 17 nt, Human
ugcccuuuguccuccug

SEQ ID NO: 1973800 - RNA, 19 nt, Human
ugcccuuuguccuccugcu

SEQ ID NO: 1973801 - RNA, 20 nt, Human
ugcccuuuguccuccugcug

SEQ ID NO: 1973802 - RNA, 18 nt, Human
agcugcauacaguuugca

SEQ ID NO: 1973803 - RNA, 17 nt, Human
agcugcaccccuuccug

SEQ ID NO: 1973804 - RNA, 21 nt, Human
agcugcaccccuuccugggca

SEQ ID NO: 1973805 - RNA, 17 nt, Human
agcugcauaucuucauc

SEQ ID NO: 1973806 - RNA, 13 nt, Human
agcugccaccugc

SEQ ID NO: 1973807 - RNA, 14 nt, Human
agcugccagccgag

SEQ ID NO: 1973808 - RNA, 17 nt, Human
agcggcucaagcccagg

SEQ ID NO: 1973809 - RNA, 18 nt, Human
agcggcucaagcccagga

SEQ ID NO: 1973810 - RNA, 19 nt, Human
agcggcucaagcccaggag

SEQ ID NO: 1973811 - RNA, 17 nt, Human
agcggcccuaagggagu

SEQ ID NO: 1973812 - RNA, 14 nt, Human
agcgcucuggugcu

SEQ ID NO: 1973813 - RNA, 22 nt, Human
agcgcugacgugucaggaaaac

SEQ ID NO: 1973814 - RNA, 16 nt, Human
agcggauugcaaagca

SEQ ID NO: 1973815 - RNA, 11 nt, Human
agcgcucccuu

SEQ ID NO: 1973816 - RNA, 17 nt, Human
agcgcggacauccccug

SEQ ID NO: 1973817 - RNA, 19 nt, Human
agcgcggacauccccugcu

SEQ ID NO: 1973818 - RNA, 21 nt, Human
agccugcgccaccgcccagag

SEQ ID NO: 1973819 - RNA, 18 nt, Human
agccugccccagcgcuga

SEQ ID NO: 1973820 - RNA, 19 nt, Human
agccugccccagcgcugac

SEQ ID NO: 1973821 - RNA, 15 nt, Human
agccugccuugccca

SEQ ID NO: 1973822 - RNA, 23 nt, Human
agccugccuugcccacuccugcu

SEQ ID NO: 1973823 - RNA, 20 nt, Human
agcgcccacuagacccacug

SEQ ID NO: 1973824 - RNA, 14 nt, Human
agccugcuccagcu

SEQ ID NO: 1973825 - RNA, 14 nt, Human
agcgcccaguuggg

SEQ ID NO: 1973826 - RNA, 22 nt, Human
agcgcccaguuggguggaugcc

SEQ ID NO: 1973827 - RNA, 20 nt, Human
agcggcuggaauuggguggg

SEQ ID NO: 1973828 - RNA, 17 nt, Human
agcggcuggacuuggag

SEQ ID NO: 1973829 - RNA, 15 nt, Human
ugcauucuuauucau

SEQ ID NO: 1973830 - RNA, 17 nt, Human
ugcauucuuauucauca

SEQ ID NO: 1973831 - RNA, 15 nt, Human
ugcauucuucugauc

SEQ ID NO: 1973832 - RNA, 19 nt, Human
ugcauuugaaaauuuugau

SEQ ID NO: 1973833 - RNA, 23 nt, Human
ugcauuugaaaauuuugauguuu

SEQ ID NO: 1973834 - RNA, 13 nt, Human
ugcauuuccugac

SEQ ID NO: 1973835 - RNA, 14 nt, Human
ugcauuuccugaca

SEQ ID NO: 1973836 - RNA, 15 nt, Human
agcgugagccacugc

SEQ ID NO: 1973837 - RNA, 16 nt, Human
agcggggacagcuccu

SEQ ID NO: 1973838 - RNA, 17 nt, Human
agcggggacagcuccuu

SEQ ID NO: 1973839 - RNA, 15 nt, Human
agcggggacagcucc

SEQ ID NO: 1973840 - RNA, 20 nt, Human
ugccauauucuguuggccag

SEQ ID NO: 1973841 - RNA, 21 nt, Human
ugccauauucuguuggccagu

SEQ ID NO: 1973842 - RNA, 20 nt, Human
agcgugguggacaugcacag

SEQ ID NO: 1973843 - RNA, 16 nt, Human
agcgugagccacugca

SEQ ID NO: 1973844 - RNA, 17 nt, Human
agcgugagccacugcac

SEQ ID NO: 1973845 - RNA, 23 nt, Human
agcgugguggacaugcacagcua

SEQ ID NO: 1973846 - RNA, 20 nt, Human
ugccagucaccccggccacc

SEQ ID NO: 1973847 - RNA, 18 nt, Human
ugccagucaccccggcca

SEQ ID NO: 1973848 - RNA, 16 nt, Human
ugccagucaccccggc

SEQ ID NO: 1973849 - RNA, 15 nt, Human
ugccagucaccccgg

SEQ ID NO: 1973850 - RNA, 23 nt, Human
ugccacugccucuuccucccuca

SEQ ID NO: 1973851 - RNA, 12 nt, Human
ugccacacuuca

SEQ ID NO: 1973852 - RNA, 20 nt, Human
ugccacuggcaaauguaacu

SEQ ID NO: 1973853 - RNA, 23 nt, Human
ugccagucaccccggccaccugc

SEQ ID NO: 1973854 - RNA, 22 nt, Human
ugccagucaccccggccaccug

SEQ ID NO: 1973855 - RNA, 19 nt, Human
ugccagucccccugcccca

SEQ ID NO: 1973856 - RNA, 17 nt, Human
ugccagucccccugccc

SEQ ID NO: 1973857 - RNA, 16 nt, Human
ugccauauucuguugg

SEQ ID NO: 1973858 - RNA, 17 nt, Human
ugccauauucuguuggc

SEQ ID NO: 1973859 - RNA, 15 nt, Human
ugccauauucuguug

SEQ ID NO: 1973860 - RNA, 13 nt, Human
ugccacuuuccaa

SEQ ID NO: 1973861 - RNA, 18 nt, Human
ugcccaaccugcucuccu

SEQ ID NO: 1973862 - RNA, 22 nt, Human
ugcccaaccugcucuccucuug

SEQ ID NO: 1973863 - RNA, 23 nt, Human
ugcccaaccugcucuccucuugc

SEQ ID NO: 1973864 - RNA, 24 nt, Human
ugcccaaccugcucuccucuugcc

SEQ ID NO: 1973865 - RNA, 18 nt, Human
agcucagggccuggcuca

SEQ ID NO: 1973866 - RNA, 20 nt, Human
ugccauguuggccaggcugg

SEQ ID NO: 1973867 - RNA, 21 nt, Human
ugccauguuggccaggcuggu

SEQ ID NO: 1973868 - RNA, 16 nt, Human
agcucagggccuggcu

SEQ ID NO: 1973869 - RNA, 15 nt, Human
agcucagggccuggc

SEQ ID NO: 1973870 - RNA, 17 nt, Human
agcucagggccuggcuc

SEQ ID NO: 1973871 - RNA, 17 nt, Human
ugccauguuggccaggc

SEQ ID NO: 1973872 - RNA, 18 nt, Human
ugccauguuggccaggcu

SEQ ID NO: 1973873 - RNA, 19 nt, Human
ugccauguuggccaggcug

SEQ ID NO: 1973874 - RNA, 19 nt, Human
agcuaguugaauacuugaa

SEQ ID NO: 1973875 - RNA, 20 nt, Human
agcuaguugaauacuugaac

SEQ ID NO: 1973876 - RNA, 16 nt, Human
agcuauaaauuauauu

SEQ ID NO: 1973877 - RNA, 18 nt, Human
agcuauaauuauuauuca

SEQ ID NO: 1973878 - RNA, 24 nt, Human
agcuaguugaauacuugaaccaua

SEQ ID NO: 1973879 - RNA, 22 nt, Human
agcuaguugaauacuugaacca

SEQ ID NO: 1973880 - RNA, 23 nt, Human
agcuaguugaauacuugaaccau

SEQ ID NO: 1973881 - RNA, 19 nt, Human
agcuauggugucauaggcu

SEQ ID NO: 1973882 - RNA, 13 nt, Human
agcuauaggaaau

SEQ ID NO: 1973883 - RNA, 12 nt, Human
agcuaugacuua

SEQ ID NO: 1973884 - RNA, 16 nt, Human
agcuaugacuuaacau

SEQ ID NO: 1973885 - RNA, 13 nt, Human
agcuaugagagga

SEQ ID NO: 1973886 - RNA, 13 nt, Human
agcuaugcaaaaa

SEQ ID NO: 1973887 - RNA, 17 nt, Human
agcuaugcaaaaagcua

SEQ ID NO: 1973888 - RNA, 20 nt, Human
agcuauggacagcauugcca

SEQ ID NO: 1973889 - RNA, 15 nt, Human
ugcccaggccugccu

SEQ ID NO: 1973890 - RNA, 17 nt, Human
ugcccaggccugccugu

SEQ ID NO: 1973891 - RNA, 12 nt, Human
ugcccaggcccc

SEQ ID NO: 1973892 - RNA, 14 nt, Human
ugcccaggccccug

SEQ ID NO: 1973893 - RNA, 20 nt, Human
ugcccaggccccugccaccc

SEQ ID NO: 1973894 - RNA, 22 nt, Human
ugcccaggccccugccacccug

SEQ ID NO: 1973895 - RNA, 14 nt, Human
ugcccacaggauca

SEQ ID NO: 1973896 - RNA, 15 nt, Human
ugcccaggcaggucu

SEQ ID NO: 1973897 - RNA, 20 nt, Human
ugcccaaugagacucuaggg

SEQ ID NO: 1973898 - RNA, 21 nt, Human
ugcccaaugagacucuagggu

SEQ ID NO: 1973899 - RNA, 16 nt, Human
ugcccaggcaggucuu

SEQ ID NO: 1973900 - RNA, 17 nt, Human
ugcccaggcaggucuug

SEQ ID NO: 1973901 - RNA, 20 nt, Human
ugcccaggcaggucuugaac

SEQ ID NO: 1973902 - RNA, 11 nt, Human
ugcccaggccc

SEQ ID NO: 1973903 - RNA, 12 nt, Human
ugccccccagcc

SEQ ID NO: 1973904 - RNA, 19 nt, Human
ugccccucaacucuccucc

SEQ ID NO: 1973905 - RNA, 16 nt, Human
ugccccgucccccucu

SEQ ID NO: 1973906 - RNA, 18 nt, Human
ugccccgucccccucugg

SEQ ID NO: 1973907 - RNA, 19 nt, Human
ugccccgucuacagcuccc

SEQ ID NO: 1973908 - RNA, 20 nt, Human
ugccccgucuacagcucccc

SEQ ID NO: 1973909 - RNA, 18 nt, Human
agccuaaaaauaaagcac

SEQ ID NO: 1973910 - RNA, 23 nt, Human
agccuaaaaauaaagcacaaacc

SEQ ID NO: 1973911 - RNA, 12 nt, Human
agccuaaagauu

SEQ ID NO: 1973912 - RNA, 16 nt, Human
agccuaaagauuuuga

SEQ ID NO: 1973913 - RNA, 20 nt, Human
agccuaaagauuuugaucuc

SEQ ID NO: 1973914 - RNA, 17 nt, Human
agccuaagauauacuug

SEQ ID NO: 1973915 - RNA, 18 nt, Human
agccuaagauauacuugu

SEQ ID NO: 1973916 - RNA, 21 nt, Human
agccuaagauauacuuguuuu

SEQ ID NO: 1973917 - RNA, 23 nt, Human
agccguuuguuccccaagacauu

SEQ ID NO: 1973918 - RNA, 13 nt, Human
agccuaaaaauaa

SEQ ID NO: 1973919 - RNA, 14 nt, Human
agccuaaaaauaaa

SEQ ID NO: 1973920 - RNA, 16 nt, Human
agccuaaaaauaaagc

SEQ ID NO: 1973921 - RNA, 17 nt, Human
agccuaaaaauaaagca

SEQ ID NO: 1973922 - RNA, 15 nt, Human
agccuaggugacaga

SEQ ID NO: 1973923 - RNA, 17 nt, Human
agccuaggugacagagu

SEQ ID NO: 1973924 - RNA, 18 nt, Human
agccucaaaacaaaggcc

SEQ ID NO: 1973925 - RNA, 15 nt, Human
agccucaaccuccug

SEQ ID NO: 1973926 - RNA, 20 nt, Human
agccucaaaacaaaggccua

SEQ ID NO: 1973927 - RNA, 16 nt, Human
agccucaaauccagga

SEQ ID NO: 1973928 - RNA, 18 nt, Human
agccucaaauccaggacc

SEQ ID NO: 1973929 - RNA, 19 nt, Human
agccucaaauccaggaccc

SEQ ID NO: 1973930 - RNA, 20 nt, Human
agccucaaauccaggacccu

SEQ ID NO: 1973931 - RNA, 21 nt, Human
agccucaaauccaggacccug

SEQ ID NO: 1973932 - RNA, 22 nt, Human
agccucaaauccaggacccugc

SEQ ID NO: 1973933 - RNA, 22 nt, Human
ugcagacucuacagaggccaug

SEQ ID NO: 1973934 - RNA, 19 nt, Human
agcccuuccaugucgccuc

SEQ ID NO: 1973935 - RNA, 22 nt, Human
agcccuuccaugucgccucugc

SEQ ID NO: 1973936 - RNA, 23 nt, Human
agcccuuccaugucgccucugca

SEQ ID NO: 1973937 - RNA, 12 nt, Human
agcccuuccucu

SEQ ID NO: 1973938 - RNA, 13 nt, Human
agcccuucauuug

SEQ ID NO: 1973939 - RNA, 14 nt, Human
agcccuucauuugg

SEQ ID NO: 1973940 - RNA, 15 nt, Human
ugcacuccccugcug

SEQ ID NO: 1973941 - RNA, 21 nt, Human
ugcacuuuucuaaacuaggcu

SEQ ID NO: 1973942 - RNA, 14 nt, Human
ugcacuuuuucuua

SEQ ID NO: 1973943 - RNA, 20 nt, Human
ugcacuuuuucuuaaucauu

SEQ ID NO: 1973944 - RNA, 19 nt, Human
ugcagacucuacagaggcc

SEQ ID NO: 1973945 - RNA, 20 nt, Human
ugcagacucuacagaggcca

SEQ ID NO: 1973946 - RNA, 16 nt, Human
ugcacuaagucucuuu

SEQ ID NO: 1973947 - RNA, 16 nt, Human
ugcacguuuucaucuc

SEQ ID NO: 1973948 - RNA, 23 nt, Human
ugcacuaagucucuuuuuuacaa

SEQ ID NO: 1973949 - RNA, 13 nt, Human
ugcacuccccugc

SEQ ID NO: 1973950 - RNA, 12 nt, Human
ugcacuccccug

SEQ ID NO: 1973951 - RNA, 22 nt, Human
ugcacuauagccuaggugacag

SEQ ID NO: 1973952 - RNA, 15 nt, Human
ugcaccacugcacuc

SEQ ID NO: 1973953 - RNA, 14 nt, Human
ugcaccacugcacu

SEQ ID NO: 1973954 - RNA, 14 nt, Human
ugcacaagcugcac

SEQ ID NO: 1973955 - RNA, 15 nt, Human
ugcacacaccagagc

SEQ ID NO: 1973956 - RNA, 13 nt, Human
ugcacaauuccau

SEQ ID NO: 1973957 - RNA, 21 nt, Human
ugcacaauuccaugacaauau

SEQ ID NO: 1973958 - RNA, 22 nt, Human
ugcacaugauuucacaaauauu

SEQ ID NO: 1973959 - RNA, 23 nt, Human
ugcacaugauuucacaaauauua

SEQ ID NO: 1973960 - RNA, 18 nt, Human
ugcacaugauuucacaaa

SEQ ID NO: 1973961 - RNA, 19 nt, Human
ugcacaugauuucacaaau

SEQ ID NO: 1973962 - RNA, 20 nt, Human
ugcacaugauuucacaaaua

SEQ ID NO: 1973963 - RNA, 21 nt, Human
ugcacaugauuucacaaauau

SEQ ID NO: 1973964 - RNA, 12 nt, Human
ugcacaugauuu

SEQ ID NO: 1973965 - RNA, 14 nt, Human
ugcacaugauuuca

SEQ ID NO: 1973966 - RNA, 15 nt, Human
ugcacaugauuucac

SEQ ID NO: 1973967 - RNA, 16 nt, Human
ugcacaugauuucaca

SEQ ID NO: 1973968 - RNA, 17 nt, Human
ugcacaugauuucacaa

SEQ ID NO: 1973969 - RNA, 23 nt, Human
ugcacaagcuccaagcucccagg

SEQ ID NO: 1973970 - RNA, 22 nt, Human
ugcacaagcuccaagcucccag

SEQ ID NO: 1973971 - RNA, 20 nt, Human
ugcacaagcuccaagcuccc

SEQ ID NO: 1973972 - RNA, 18 nt, Human
ugcacaagcuccaagcuc

SEQ ID NO: 1973973 - RNA, 16 nt, Human
ugcacaagcuccaagc

SEQ ID NO: 1973974 - RNA, 15 nt, Human
ugcacaagcuccaag

SEQ ID NO: 1973975 - RNA, 23 nt, Human
agcagcaaggucuugcucuccua

SEQ ID NO: 1973976 - RNA, 13 nt, Human
agcagcacccauc

SEQ ID NO: 1973977 - RNA, 14 nt, Human
agcagcaaggucuu

SEQ ID NO: 1973978 - RNA, 18 nt, Human
agcagcaaggucuugcuc

SEQ ID NO: 1973979 - RNA, 12 nt, Human
agccugcagagc

SEQ ID NO: 1973980 - RNA, 13 nt, Human
agccugcagagcu

SEQ ID NO: 1973981 - RNA, 14 nt, Human
agccugcagagcug

SEQ ID NO: 1973982 - RNA, 15 nt, Human
agccugcagagcugc

SEQ ID NO: 1973983 - RNA, 20 nt, Human
agccugcacuugggggcuca

SEQ ID NO: 1973984 - RNA, 16 nt, Human
ugcaugcugucccuua

SEQ ID NO: 1973985 - RNA, 18 nt, Human
agccugaucaccugcccu

SEQ ID NO: 1973986 - RNA, 19 nt, Human
agccugaucaccugcccug

SEQ ID NO: 1973987 - RNA, 19 nt, Human
agccugccucuucucuacu

SEQ ID NO: 1973988 - RNA, 16 nt, Human
agccugccucuucucu

SEQ ID NO: 1973989 - RNA, 18 nt, Human
agccugccacucaggccc

SEQ ID NO: 1973990 - RNA, 12 nt, Human
agccugcccucc

SEQ ID NO: 1973991 - RNA, 12 nt, Human
agccugcccagc

SEQ ID NO: 1973992 - RNA, 23 nt, Human
agccugcccagcccccuggucuu

SEQ ID NO: 1973993 - RNA, 14 nt, Human
agccugccccagcg

SEQ ID NO: 1973994 - RNA, 16 nt, Human
agccugccccagcgcu

SEQ ID NO: 1973995 - RNA, 23 nt, Human
agccugcaguuauuaacacuaac

SEQ ID NO: 1973996 - RNA, 23 nt, Human
agccugcacuugggggcucagca

SEQ ID NO: 1973997 - RNA, 21 nt, Human
ugcaugaggcuaguguggugu

SEQ ID NO: 1973998 - RNA, 22 nt, Human
ugcaugaaguaauaugcacaca

SEQ ID NO: 1973999 - RNA, 20 nt, Human
ugcaugaaguaauaugcaca

SEQ ID NO: 1974000 - RNA, 20 nt, Human
ugcaucuggguagcuguaag

SEQ ID NO: 1974001 - RNA, 21 nt, Human
ugcaucuggguagcuguaagg

SEQ ID NO: 1974002 - RNA, 15 nt, Human
ugcaugcugucccuu

SEQ ID NO: 1974003 - RNA, 14 nt, Human
ugcaugcugucccu

SEQ ID NO: 1974004 - RNA, 13 nt, Human
ugcaugcuguccc

SEQ ID NO: 1974005 - RNA, 18 nt, Human
ugcaucuggguagcugua

SEQ ID NO: 1974006 - RNA, 19 nt, Human
ugcaucuggguagcuguaa

SEQ ID NO: 1974007 - RNA, 12 nt, Human
ugcauacaaaca

SEQ ID NO: 1974008 - RNA, 13 nt, Human
ugcauacaaacaa

SEQ ID NO: 1974009 - RNA, 20 nt, Human
ugcauacaaacaagcauaua

SEQ ID NO: 1974010 - RNA, 22 nt, Human
ugcauacaaacaagcauauaaa

SEQ ID NO: 1974011 - RNA, 23 nt, Human
ugcauacaaacaagcauauaaaa

SEQ ID NO: 1974012 - RNA, 21 nt, Human
ugcauaccacuuuuguucuug

SEQ ID NO: 1974013 - RNA, 22 nt, Human
ugcauaccacuuuuguucuugg

SEQ ID NO: 1974014 - RNA, 17 nt, Human
agccucaaccuccuggg

SEQ ID NO: 1974015 - RNA, 18 nt, Human
agccucaaccuccugggc

SEQ ID NO: 1974016 - RNA, 13 nt, Human
agccucagcaucc

SEQ ID NO: 1974017 - RNA, 14 nt, Human
agccucagcauccu

SEQ ID NO: 1974018 - RNA, 16 nt, Human
agccucagcauccugg

SEQ ID NO: 1974019 - RNA, 15 nt, Human
agccucagcauccug

SEQ ID NO: 1974020 - RNA, 18 nt, Human
agccugagcgacagugag

SEQ ID NO: 1974021 - RNA, 18 nt, Human
ugcagccucaaccuccug

SEQ ID NO: 1974022 - RNA, 19 nt, Human
ugcagccucaaccuccugg

SEQ ID NO: 1974023 - RNA, 19 nt, Human
agccugagcgacagugaga

SEQ ID NO: 1974024 - RNA, 13 nt, Human
agccugagagucu

SEQ ID NO: 1974025 - RNA, 19 nt, Human
ugcagugagccgagauugu

SEQ ID NO: 1974026 - RNA, 11 nt, Human
ugcauaaaaug

SEQ ID NO: 1974027 - RNA, 22 nt, Human
ugcagucuuagaucauaguuuu

SEQ ID NO: 1974028 - RNA, 15 nt, Human
ugcauaauggucaga

SEQ ID NO: 1974029 - RNA, 19 nt, Human
ugcauaauucugaaguuau

SEQ ID NO: 1974030 - RNA, 23 nt, Human
ugcauaauucugaaguuauauuu

SEQ ID NO: 1974031 - RNA, 11 nt, Human
ugcauaauaau

SEQ ID NO: 1974032 - RNA, 23 nt, Human
ugcauaauaauccugcaaaguac

SEQ ID NO: 1974033 - RNA, 20 nt, Human
ugcaggucccuaauaaagcu

SEQ ID NO: 1974034 - RNA, 19 nt, Human
ugcaggucccuaauaaagc

SEQ ID NO: 1974035 - RNA, 18 nt, Human
ugcaggucccuaauaaag

SEQ ID NO: 1974036 - RNA, 14 nt, Human
ugcagugagccgag

SEQ ID NO: 1974037 - RNA, 17 nt, Human
ugcaggucccuaauaaa

SEQ ID NO: 1974038 - RNA, 21 nt, Human
ugcaggucccuaauaaagcug

SEQ ID NO: 1974039 - RNA, 18 nt, Human
acuuuaccuuuuuuauac

SEQ ID NO: 1974040 - RNA, 13 nt, Human
acuuguuguuuaa

SEQ ID NO: 1974041 - RNA, 16 nt, Human
acuuguuguuuaaugu

SEQ ID NO: 1974042 - RNA, 18 nt, Human
acuuguuguuuaauguuu

SEQ ID NO: 1974043 - RNA, 20 nt, Human
acuuguuguuuaauguuuaa

SEQ ID NO: 1974044 - RNA, 13 nt, Human
acuuguuuaauaa

SEQ ID NO: 1974045 - RNA, 16 nt, Human
acuuguugccuauaag

SEQ ID NO: 1974046 - RNA, 21 nt, Human
acuuguugccuauaagccaaa

SEQ ID NO: 1974047 - RNA, 19 nt, Human
acuuuaccuuuuuuauaca

SEQ ID NO: 1974048 - RNA, 22 nt, Human
acuuuaccuuuuuuauacauaa

SEQ ID NO: 1974049 - RNA, 23 nt, Human
acuuuaccuuuuuuauacauaaa

SEQ ID NO: 1974050 - RNA, 12 nt, Human
acuuguuucuau

SEQ ID NO: 1974051 - RNA, 14 nt, Human
acuuguuuaauaaa

SEQ ID NO: 1974052 - RNA, 19 nt, Human
acuuugaccucugcagcaa

SEQ ID NO: 1974053 - RNA, 23 nt, Human
acuuugaccucugcagcaauaaa

SEQ ID NO: 1974054 - RNA, 14 nt, Human
acuuuggaaagacu

SEQ ID NO: 1974055 - RNA, 13 nt, Human
acuuuggaaagac

SEQ ID NO: 1974056 - RNA, 16 nt, Human
acuuugagaucuaaaa

SEQ ID NO: 1974057 - RNA, 17 nt, Human
acuuugagaucuaaaaa

SEQ ID NO: 1974058 - RNA, 18 nt, Human
acuuugagaucuaaaaau

SEQ ID NO: 1974059 - RNA, 19 nt, Human
acuuugagaucuaaaaaua

SEQ ID NO: 1974060 - RNA, 21 nt, Human
acuuugagaucuaaaaauaac

SEQ ID NO: 1974061 - RNA, 17 nt, Human
acuuuggaaagacuuuu

SEQ ID NO: 1974062 - RNA, 18 nt, Human
acuuuuuugaaaucagua

SEQ ID NO: 1974063 - RNA, 16 nt, Human
acuuuuuugaaaucag

SEQ ID NO: 1974064 - RNA, 22 nt, Human
acuuuuuuuuuuuaagaguaaa

SEQ ID NO: 1974065 - RNA, 14 nt, Human
acuuuuggaaggua

SEQ ID NO: 1974066 - RNA, 14 nt, Human
acuuuuggcauuuu

SEQ ID NO: 1974067 - RNA, 19 nt, Human
acuuuuucuuaaucauuuu

SEQ ID NO: 1974068 - RNA, 18 nt, Human
ucucccuuggauuguccc

SEQ ID NO: 1974069 - RNA, 11 nt, Human
ucucccuugga

SEQ ID NO: 1974070 - RNA, 18 nt, Human
ucucccaaagugcuggga

SEQ ID NO: 1974071 - RNA, 19 nt, Human
ucuccauuuuggugucuuu

SEQ ID NO: 1974072 - RNA, 22 nt, Human
ucuccauuuuggugucuuucuc

SEQ ID NO: 1974073 - RNA, 14 nt, Human
ucucccacaugcca

SEQ ID NO: 1974074 - RNA, 17 nt, Human
ucuccauuucacuggcu

SEQ ID NO: 1974075 - RNA, 20 nt, Human
acuguauagcucuuuuccua

SEQ ID NO: 1974076 - RNA, 23 nt, Human
acuguagauaauuaaccaaggua

SEQ ID NO: 1974077 - RNA, 21 nt, Human
ucucccuuggauuguccccga

SEQ ID NO: 1974078 - RNA, 19 nt, Human
ucucccuuggauugucccc

SEQ ID NO: 1974079 - RNA, 15 nt, Human
ucuccgccccugagc

SEQ ID NO: 1974080 - RNA, 16 nt, Human
ucuccgccccugagcc

SEQ ID NO: 1974081 - RNA, 17 nt, Human
ucuccgccccugagccc

SEQ ID NO: 1974082 - RNA, 18 nt, Human
ucuccgccccugagccca

SEQ ID NO: 1974083 - RNA, 19 nt, Human
ucuccgccccugagcccac

SEQ ID NO: 1974084 - RNA, 20 nt, Human
ucuccgccccugagcccacu

SEQ ID NO: 1974085 - RNA, 12 nt, Human
ucuccucugcug

SEQ ID NO: 1974086 - RNA, 21 nt, Human
ucuccgccccugagcccacug

SEQ ID NO: 1974087 - RNA, 14 nt, Human
ucuccucugcugcu

SEQ ID NO: 1974088 - RNA, 13 nt, Human
ucuccucugcugc

SEQ ID NO: 1974089 - RNA, 19 nt, Human
acuuguugauuaauggaaa

SEQ ID NO: 1974090 - RNA, 12 nt, Human
acuuguucuucc

SEQ ID NO: 1974091 - RNA, 13 nt, Human
acuuguucuucca

SEQ ID NO: 1974092 - RNA, 19 nt, Human
acuuguucuuccaaagcag

SEQ ID NO: 1974093 - RNA, 21 nt, Human
acuuguucuuccaaagcagag

SEQ ID NO: 1974094 - RNA, 21 nt, Human
acuuguugauuaauggaaaug

SEQ ID NO: 1974095 - RNA, 14 nt, Human
acuuguugaauuua

SEQ ID NO: 1974096 - RNA, 15 nt, Human
acuuguugccuauaa

SEQ ID NO: 1974097 - RNA, 15 nt, Human
ucucuccagccccug

SEQ ID NO: 1974098 - RNA, 20 nt, Human
ucucuccuguaccucuugag

SEQ ID NO: 1974099 - RNA, 22 nt, Human
ucucuccuguaccucuugagcc

SEQ ID NO: 1974100 - RNA, 13 nt, Human
ucuccuuccugug

SEQ ID NO: 1974101 - RNA, 14 nt, Human
ucuccuuccugugu

SEQ ID NO: 1974102 - RNA, 16 nt, Human
ucuccuuccugugugu

SEQ ID NO: 1974103 - RNA, 14 nt, Human
ucucuccagccccu

SEQ ID NO: 1974104 - RNA, 13 nt, Human
ucucuccagcccc

SEQ ID NO: 1974105 - RNA, 18 nt, Human
acuuuuuuuuuauuuuau

SEQ ID NO: 1974106 - RNA, 14 nt, Human
agaaaaaaaaagaa

SEQ ID NO: 1974107 - RNA, 15 nt, Human
agaaaaaaaaagaaa

SEQ ID NO: 1974108 - RNA, 16 nt, Human
agaaaaaaaaagaaaa

SEQ ID NO: 1974109 - RNA, 18 nt, Human
ucuccuucaccuuugucc

SEQ ID NO: 1974110 - RNA, 20 nt, Human
ucuccuucaccuuugucccc

SEQ ID NO: 1974111 - RNA, 14 nt, Human
ucucuugagagggu

SEQ ID NO: 1974112 - RNA, 21 nt, Human
ucucuucuggguuccuuccuc

SEQ ID NO: 1974113 - RNA, 13 nt, Human
ucucuucuguguu

SEQ ID NO: 1974114 - RNA, 14 nt, Human
ucucuucuguguuu

SEQ ID NO: 1974115 - RNA, 18 nt, Human
ucucuucuggguuccuuc

SEQ ID NO: 1974116 - RNA, 19 nt, Human
ucucuucuggguuccuucc

SEQ ID NO: 1974117 - RNA, 20 nt, Human
ucucuucuggguuccuuccu

SEQ ID NO: 1974118 - RNA, 13 nt, Human
ucucuggccuucg

SEQ ID NO: 1974119 - RNA, 16 nt, Human
ucucuggccuucggcc

SEQ ID NO: 1974120 - RNA, 17 nt, Human
ucucuggccuucggccu

SEQ ID NO: 1974121 - RNA, 22 nt, Human
ucucugcccuaaugcgcaggcu

SEQ ID NO: 1974122 - RNA, 11 nt, Human
ucucugcccua

SEQ ID NO: 1974123 - RNA, 15 nt, Human
ucucugcccagcuuu

SEQ ID NO: 1974124 - RNA, 19 nt, Human
ucucugcccagcuuuucau

SEQ ID NO: 1974125 - RNA, 22 nt, Human
agaaaaccaaacaaaaauguua

SEQ ID NO: 1974126 - RNA, 19 nt, Human
agaaaccaggaguaaaaga

SEQ ID NO: 1974127 - RNA, 13 nt, Human
agaaacuggaacu

SEQ ID NO: 1974128 - RNA, 15 nt, Human
agaaacuggaacucu

SEQ ID NO: 1974129 - RNA, 19 nt, Human
agaaacucuauggucuuau

SEQ ID NO: 1974130 - RNA, 12 nt, Human
agaaagaaauua

SEQ ID NO: 1974131 - RNA, 16 nt, Human
agaaagaacuaucuuc

SEQ ID NO: 1974132 - RNA, 14 nt, Human
agaaagaacuaucu

SEQ ID NO: 1974133 - RNA, 17 nt, Human
agaaacuggaaauacua

SEQ ID NO: 1974134 - RNA, 18 nt, Human
agaaaacacuguuaucau

SEQ ID NO: 1974135 - RNA, 21 nt, Human
agaaaacacuguuaucauuuu

SEQ ID NO: 1974136 - RNA, 14 nt, Human
agaaaacaauggaa

SEQ ID NO: 1974137 - RNA, 13 nt, Human
agaaaacacuguu

SEQ ID NO: 1974138 - RNA, 14 nt, Human
agaaaacacuguua

SEQ ID NO: 1974139 - RNA, 17 nt, Human
agaaaaaugagccuggc

SEQ ID NO: 1974140 - RNA, 11 nt, Human
agaaaaauauu

SEQ ID NO: 1974141 - RNA, 15 nt, Human
agaaaaauaucugua

SEQ ID NO: 1974142 - RNA, 18 nt, Human
agaaaaauaucuguaaga

SEQ ID NO: 1974143 - RNA, 12 nt, Human
agaaaaauauuu

SEQ ID NO: 1974144 - RNA, 13 nt, Human
agaaaaauauuua

SEQ ID NO: 1974145 - RNA, 18 nt, Human
agaaaaaggaugcacaga

SEQ ID NO: 1974146 - RNA, 19 nt, Human
agaaaaauaugaccacacu

SEQ ID NO: 1974147 - RNA, 15 nt, Human
ucucuugagccuggg

SEQ ID NO: 1974148 - RNA, 14 nt, Human
ucucuugagccugg

SEQ ID NO: 1974149 - RNA, 13 nt, Human
ucucuugagccug

SEQ ID NO: 1974150 - RNA, 22 nt, Human
ucucuuuaaugucacaggcagg

SEQ ID NO: 1974151 - RNA, 11 nt, Human
ucuggcccuau

SEQ ID NO: 1974152 - RNA, 21 nt, Human
ucuggccccacaccagcccca

SEQ ID NO: 1974153 - RNA, 16 nt, Human
ucuggcagcucagaga

SEQ ID NO: 1974154 - RNA, 18 nt, Human
agaagcuaagguuuagau

SEQ ID NO: 1974155 - RNA, 16 nt, Human
agaagcggcuggcagc

SEQ ID NO: 1974156 - RNA, 15 nt, Human
agaagcggcuggcag

SEQ ID NO: 1974157 - RNA, 22 nt, Human
ucuggcagcaccgccucuuccc

SEQ ID NO: 1974158 - RNA, 13 nt, Human
ucuggauucagcc

SEQ ID NO: 1974159 - RNA, 14 nt, Human
ucuggauucagccu

SEQ ID NO: 1974160 - RNA, 15 nt, Human
ucuggauucagccuu

SEQ ID NO: 1974161 - RNA, 16 nt, Human
ucuggauucagccuuc

SEQ ID NO: 1974162 - RNA, 17 nt, Human
ucuggauucagccuucu

SEQ ID NO: 1974163 - RNA, 18 nt, Human
ucuggauucagccuucuu

SEQ ID NO: 1974164 - RNA, 19 nt, Human
ucuggauucagccuucuuu

SEQ ID NO: 1974165 - RNA, 15 nt, Human
ucuggauucauauuu

SEQ ID NO: 1974166 - RNA, 15 nt, Human
ucuggcagcucagag

SEQ ID NO: 1974167 - RNA, 14 nt, Human
ucuggcagcucaga

SEQ ID NO: 1974168 - RNA, 18 nt, Human
ucuggauuauauuaugaa

SEQ ID NO: 1974169 - RNA, 12 nt, Human
ucuggauuauau

SEQ ID NO: 1974170 - RNA, 23 nt, Human
ucugcuuuuuaaagaaugcucuu

SEQ ID NO: 1974171 - RNA, 18 nt, Human
ucuggagguacgaaaaga

SEQ ID NO: 1974172 - RNA, 12 nt, Human
ucugcuuaaaaa

SEQ ID NO: 1974173 - RNA, 16 nt, Human
ucugcuuaaaaacuca

SEQ ID NO: 1974174 - RNA, 22 nt, Human
ucugcugugggcacaggucagg

SEQ ID NO: 1974175 - RNA, 23 nt, Human
ucugcugugggcacaggucaggc

SEQ ID NO: 1974176 - RNA, 17 nt, Human
ucugcucacauaucugu

SEQ ID NO: 1974177 - RNA, 13 nt, Human
ucugcuagagagu

SEQ ID NO: 1974178 - RNA, 16 nt, Human
ucugcucacauaucug

SEQ ID NO: 1974179 - RNA, 13 nt, Human
ucugccuuugcuc

SEQ ID NO: 1974180 - RNA, 21 nt, Human
ucugccuuuuguucauuucau

SEQ ID NO: 1974181 - RNA, 14 nt, Human
ucugcccuccaaga

SEQ ID NO: 1974182 - RNA, 13 nt, Human
agaagaaagaacu

SEQ ID NO: 1974183 - RNA, 15 nt, Human
agaagaaagaacuau

SEQ ID NO: 1974184 - RNA, 13 nt, Human
agaagaaacuagg

SEQ ID NO: 1974185 - RNA, 19 nt, Human
ucugagggcuuguaguucu

SEQ ID NO: 1974186 - RNA, 20 nt, Human
ucugagggcuuguaguucuu

SEQ ID NO: 1974187 - RNA, 17 nt, Human
ucugagggcuuguaguu

SEQ ID NO: 1974188 - RNA, 16 nt, Human
ucugauacagaaaagu

SEQ ID NO: 1974189 - RNA, 17 nt, Human
ucugauacagaaaaguu

SEQ ID NO: 1974190 - RNA, 13 nt, Human
ucugauacuuuuu

SEQ ID NO: 1974191 - RNA, 17 nt, Human
ucugauacuuuuuugaa

SEQ ID NO: 1974192 - RNA, 19 nt, Human
ucugauacuuuuuugaaau

SEQ ID NO: 1974193 - RNA, 16 nt, Human
ucugaucacugaaaua

SEQ ID NO: 1974194 - RNA, 22 nt, Human
ucugaucacugaaauaaaagcu

SEQ ID NO: 1974195 - RNA, 14 nt, Human
ucugauauguuugu

SEQ ID NO: 1974196 - RNA, 19 nt, Human
ucugauucccaagcucugc

SEQ ID NO: 1974197 - RNA, 20 nt, Human
ucugauucccaagcucugcu

SEQ ID NO: 1974198 - RNA, 21 nt, Human
ucugauucccaagcucugcuc

SEQ ID NO: 1974199 - RNA, 22 nt, Human
ucugcacuccccugcugggugu

SEQ ID NO: 1974200 - RNA, 18 nt, Human
ucugaucacugaaauaaa

SEQ ID NO: 1974201 - RNA, 19 nt, Human
ucugacccugcuucaaaua

SEQ ID NO: 1974202 - RNA, 19 nt, Human
ucugacuuuagccuaccua

SEQ ID NO: 1974203 - RNA, 11 nt, Human
agaaauguguu

SEQ ID NO: 1974204 - RNA, 12 nt, Human
ucugcagagcag

SEQ ID NO: 1974205 - RNA, 19 nt, Human
agaaaugucccuuucuucu

SEQ ID NO: 1974206 - RNA, 12 nt, Human
agaaauuaacuu

SEQ ID NO: 1974207 - RNA, 13 nt, Human
agaaauuaacuua

SEQ ID NO: 1974208 - RNA, 14 nt, Human
agaaauugguaccu

SEQ ID NO: 1974209 - RNA, 17 nt, Human
agaaauguacagcaagg

SEQ ID NO: 1974210 - RNA, 16 nt, Human
agaaauguacagcaag

SEQ ID NO: 1974211 - RNA, 20 nt, Human
agaacaaaggggcuuaauua

SEQ ID NO: 1974212 - RNA, 23 nt, Human
agaaauugguaccuugcacacau

SEQ ID NO: 1974213 - RNA, 21 nt, Human
agaaauugguaccuugcacac

SEQ ID NO: 1974214 - RNA, 22 nt, Human
agaaauugguaccuugcacaca

SEQ ID NO: 1974215 - RNA, 16 nt, Human
agaaauugguaccuug

SEQ ID NO: 1974216 - RNA, 18 nt, Human
agaaauugguaccuugca

SEQ ID NO: 1974217 - RNA, 19 nt, Human
agaaauugguaccuugcac

SEQ ID NO: 1974218 - RNA, 20 nt, Human
agaaauugguaccuugcaca

SEQ ID NO: 1974219 - RNA, 17 nt, Human
agaacuaaaauguucua

SEQ ID NO: 1974220 - RNA, 15 nt, Human
agaacucaugugauu

SEQ ID NO: 1974221 - RNA, 18 nt, Human
agaacucaugugauuuac

SEQ ID NO: 1974222 - RNA, 14 nt, Human
agaacucccuuuca

SEQ ID NO: 1974223 - RNA, 20 nt, Human
agaacucgguguccccacca

SEQ ID NO: 1974224 - RNA, 12 nt, Human
agaacucugccu

SEQ ID NO: 1974225 - RNA, 18 nt, Human
agaacucgguguccccac

SEQ ID NO: 1974226 - RNA, 19 nt, Human
agaacucgguguccccacc

SEQ ID NO: 1974227 - RNA, 13 nt, Human
agaacucugccug

SEQ ID NO: 1974228 - RNA, 14 nt, Human
agaacucugccugc

SEQ ID NO: 1974229 - RNA, 17 nt, Human
agaacucugccugcccu

SEQ ID NO: 1974230 - RNA, 23 nt, Human
agaacucugccugcccuuugucc

SEQ ID NO: 1974231 - RNA, 13 nt, Human
agaacucuuccuc

SEQ ID NO: 1974232 - RNA, 22 nt, Human
agaacucuuccuccaaggacag

SEQ ID NO: 1974233 - RNA, 12 nt, Human
agaacucuuccu

SEQ ID NO: 1974234 - RNA, 16 nt, Human
agaacugaaaggcuuu

SEQ ID NO: 1974235 - RNA, 20 nt, Human
agaacugaaaggcuuuucaa

SEQ ID NO: 1974236 - RNA, 14 nt, Human
agaaggaagcaggu

SEQ ID NO: 1974237 - RNA, 15 nt, Human
ucuggggaccagcuu

SEQ ID NO: 1974238 - RNA, 23 nt, Human
ucuggggaccagcuuggcucagg

SEQ ID NO: 1974239 - RNA, 17 nt, Human
ucuggggagcuggacag

SEQ ID NO: 1974240 - RNA, 18 nt, Human
ucugguccauagagagca

SEQ ID NO: 1974241 - RNA, 16 nt, Human
ucuggguuccuuccuc

SEQ ID NO: 1974242 - RNA, 22 nt, Human
ucugggugcaggagcgcucccu

SEQ ID NO: 1974243 - RNA, 11 nt, Human
ucuggggcugu

SEQ ID NO: 1974244 - RNA, 14 nt, Human
ucuggguucacugc

SEQ ID NO: 1974245 - RNA, 16 nt, Human
ucuggguucacugcaa

SEQ ID NO: 1974246 - RNA, 20 nt, Human
ucugucauuugagcagggcu

SEQ ID NO: 1974247 - RNA, 23 nt, Human
ucugucauuugagcagggcucag

SEQ ID NO: 1974248 - RNA, 18 nt, Human
ucuguccaacugagaagu

SEQ ID NO: 1974249 - RNA, 15 nt, Human
ucugucauuugagca

SEQ ID NO: 1974250 - RNA, 20 nt, Human
ucuguauagacaggagaaga

SEQ ID NO: 1974251 - RNA, 23 nt, Human
ucuguauagacaggagaagaaag

SEQ ID NO: 1974252 - RNA, 20 nt, Human
ucuggucuauaccuuaagaa

SEQ ID NO: 1974253 - RNA, 20 nt, Human
agaauugucuuucugucucu

SEQ ID NO: 1974254 - RNA, 12 nt, Human
agaauuggaaaa

SEQ ID NO: 1974255 - RNA, 18 nt, Human
agaauuggaaaagacuaa

SEQ ID NO: 1974256 - RNA, 14 nt, Human
agaauuguuuagau

SEQ ID NO: 1974257 - RNA, 23 nt, Human
ucuguuggguggcaucauuccag

SEQ ID NO: 1974258 - RNA, 14 nt, Human
ucuguuugcuguug

SEQ ID NO: 1974259 - RNA, 15 nt, Human
agaauuguuuagauu

SEQ ID NO: 1974260 - RNA, 12 nt, Human
agaauuuaaaga

SEQ ID NO: 1974261 - RNA, 13 nt, Human
agaauuuaaagaa

SEQ ID NO: 1974262 - RNA, 21 nt, Human
agaauuuaaagaaaaaaaugu

SEQ ID NO: 1974263 - RNA, 18 nt, Human
agaauuucccaaagcagu

SEQ ID NO: 1974264 - RNA, 17 nt, Human
agaauuucccaaagcag

SEQ ID NO: 1974265 - RNA, 13 nt, Human
agaauuucuagga

SEQ ID NO: 1974266 - RNA, 21 nt, Human
agaauuucuaggacugaauua

SEQ ID NO: 1974267 - RNA, 23 nt, Human
agaauuucccaaagcagugcaug

SEQ ID NO: 1974268 - RNA, 20 nt, Human
ucugugccuuuuuuauaucu

SEQ ID NO: 1974269 - RNA, 21 nt, Human
ucugugaaaggaaagagggag

SEQ ID NO: 1974270 - RNA, 15 nt, Human
ucugugaaaggaaag

SEQ ID NO: 1974271 - RNA, 24 nt, Human
ucuguccaggcacugcugcccagc

SEQ ID NO: 1974272 - RNA, 12 nt, Human
ucugucuuucca

SEQ ID NO: 1974273 - RNA, 16 nt, Human
ucugucuuuccacucu

SEQ ID NO: 1974274 - RNA, 17 nt, Human
ucugucuuuccacucug

SEQ ID NO: 1974275 - RNA, 19 nt, Human
ucuguccaacugagaagua

SEQ ID NO: 1974276 - RNA, 24 nt, Human
ucuguuccauaguuaaagaagaca

SEQ ID NO: 1974277 - RNA, 17 nt, Human
ucuguuccauaguuaaa

SEQ ID NO: 1974278 - RNA, 18 nt, Human
ucuguuggccagugugac

SEQ ID NO: 1974279 - RNA, 19 nt, Human
ucuguuggccagugugaca

SEQ ID NO: 1974280 - RNA, 20 nt, Human
ucuguuggccagugugacaa

SEQ ID NO: 1974281 - RNA, 17 nt, Human
agacacccuuggagcuc

SEQ ID NO: 1974282 - RNA, 18 nt, Human
agacacccuuggagcucu

SEQ ID NO: 1974283 - RNA, 20 nt, Human
agaauuugauaugugaacag

SEQ ID NO: 1974284 - RNA, 18 nt, Human
agaauuugauaugugaac

SEQ ID NO: 1974285 - RNA, 19 nt, Human
agaauuugauaugugaaca

SEQ ID NO: 1974286 - RNA, 17 nt, Human
agaauuugauaugugaa

SEQ ID NO: 1974287 - RNA, 13 nt, Human
agaauuucuuuau

SEQ ID NO: 1974288 - RNA, 14 nt, Human
agacagacuagaag

SEQ ID NO: 1974289 - RNA, 18 nt, Human
agacagaaucucgcucug

SEQ ID NO: 1974290 - RNA, 22 nt, Human
agacagaaucucgcucugucgc

SEQ ID NO: 1974291 - RNA, 17 nt, Human
agacagucccugccaau

SEQ ID NO: 1974292 - RNA, 16 nt, Human
agacagucccugccaa

SEQ ID NO: 1974293 - RNA, 15 nt, Human
agacagucccugcca

SEQ ID NO: 1974294 - RNA, 19 nt, Human
agacagucccugccaaugg

SEQ ID NO: 1974295 - RNA, 14 nt, Human
ucuuaauacuguua

SEQ ID NO: 1974296 - RNA, 15 nt, Human
ucuuaauacuguuau

SEQ ID NO: 1974297 - RNA, 18 nt, Human
ucuuaauacuguuauucu

SEQ ID NO: 1974298 - RNA, 19 nt, Human
ucuuaauacuguuauucuu

SEQ ID NO: 1974299 - RNA, 22 nt, Human
ucuuaauacuguuauucuuugc

SEQ ID NO: 1974300 - RNA, 21 nt, Human
agacaggguuuugccauguug

SEQ ID NO: 1974301 - RNA, 15 nt, Human
agacaggaccaggga

SEQ ID NO: 1974302 - RNA, 23 nt, Human
agacaggcaagcaccuccugccu

SEQ ID NO: 1974303 - RNA, 20 nt, Human
agacaggcaggugaucugcu

SEQ ID NO: 1974304 - RNA, 13 nt, Human
ucuucacucacag

SEQ ID NO: 1974305 - RNA, 22 nt, Human
ucuucaaaauauaaaaugccaa

SEQ ID NO: 1974306 - RNA, 23 nt, Human
ucuuagacuuuuccaauauguga

SEQ ID NO: 1974307 - RNA, 16 nt, Human
ucuuagaucauaguuu

SEQ ID NO: 1974308 - RNA, 17 nt, Human
ucuuagaucauaguuuu

SEQ ID NO: 1974309 - RNA, 17 nt, Human
ucuucaaaaugagcccu

SEQ ID NO: 1974310 - RNA, 22 nt, Human
ucuuccaggcugggagagccuu

SEQ ID NO: 1974311 - RNA, 19 nt, Human
ucuuccaguuacuuuccaa

SEQ ID NO: 1974312 - RNA, 18 nt, Human
ucuuccaguuacuuucca

SEQ ID NO: 1974313 - RNA, 19 nt, Human
ucuucccugguaagaaaaa

SEQ ID NO: 1974314 - RNA, 20 nt, Human
ucuucccugguaagaaaaag

SEQ ID NO: 1974315 - RNA, 18 nt, Human
ucuucccugguaagaaaa

SEQ ID NO: 1974316 - RNA, 14 nt, Human
ucuuaugggcuggg

SEQ ID NO: 1974317 - RNA, 16 nt, Human
ucuuaugggcuggguu

SEQ ID NO: 1974318 - RNA, 15 nt, Human
ucuuaugggcugggu

SEQ ID NO: 1974319 - RNA, 18 nt, Human
ucuuaugggcuggguucu

SEQ ID NO: 1974320 - RNA, 16 nt, Human
ucuuagacuuuuccaa

SEQ ID NO: 1974321 - RNA, 17 nt, Human
ucuuagacuuuuccaau

SEQ ID NO: 1974322 - RNA, 14 nt, Human
ucuuauugcccacg

SEQ ID NO: 1974323 - RNA, 18 nt, Human
ucuuauugcccacgcugg

SEQ ID NO: 1974324 - RNA, 22 nt, Human
ucuuauugcccacgcuggagug

SEQ ID NO: 1974325 - RNA, 22 nt, Human
ucuuaauauuuuuacaugcaga

SEQ ID NO: 1974326 - RNA, 14 nt, Human
ucuuaaucauuuuu

SEQ ID NO: 1974327 - RNA, 20 nt, Human
ucuuaaucauuuuuuauaua

SEQ ID NO: 1974328 - RNA, 22 nt, Human
ucuuaaucauuuuuuauauaua

SEQ ID NO: 1974329 - RNA, 14 nt, Human
ucuuaauccagucu

SEQ ID NO: 1974330 - RNA, 17 nt, Human
agacuguguuugguccu

SEQ ID NO: 1974331 - RNA, 21 nt, Human
agacuguguuugguccuguag

SEQ ID NO: 1974332 - RNA, 23 nt, Human
agacuguguuugguccuguagga

SEQ ID NO: 1974333 - RNA, 19 nt, Human
agacuguggagacugcucc

SEQ ID NO: 1974334 - RNA, 20 nt, Human
agacuguggagacugcuccu

SEQ ID NO: 1974335 - RNA, 18 nt, Human
agacuguggagacugcuc

SEQ ID NO: 1974336 - RNA, 17 nt, Human
agacuucaucccucugg

SEQ ID NO: 1974337 - RNA, 22 nt, Human
agacuucagggagucagcuguu

SEQ ID NO: 1974338 - RNA, 13 nt, Human
agacuucuguuuu

SEQ ID NO: 1974339 - RNA, 14 nt, Human
agacuucaucccuc

SEQ ID NO: 1974340 - RNA, 14 nt, Human
agacuucagggagu

SEQ ID NO: 1974341 - RNA, 17 nt, Human
agacuuauuuucacaug

SEQ ID NO: 1974342 - RNA, 11 nt, Human
agacuuugaug

SEQ ID NO: 1974343 - RNA, 13 nt, Human
agacuuugauguc

SEQ ID NO: 1974344 - RNA, 22 nt, Human
agacuugaaaagagacaggcag

SEQ ID NO: 1974345 - RNA, 20 nt, Human
agacuugaaaagagacaggc

SEQ ID NO: 1974346 - RNA, 21 nt, Human
agacuugaaaagagacaggca

SEQ ID NO: 1974347 - RNA, 15 nt, Human
agacuucuguuuuca

SEQ ID NO: 1974348 - RNA, 17 nt, Human
agacuucuguuuucaau

SEQ ID NO: 1974349 - RNA, 18 nt, Human
agacuucuguuuucaauc

SEQ ID NO: 1974350 - RNA, 12 nt, Human
agacuugaaaag

SEQ ID NO: 1974351 - RNA, 15 nt, Human
agacuugaaaagaga

SEQ ID NO: 1974352 - RNA, 17 nt, Human
agacuugaaaagagaca

SEQ ID NO: 1974353 - RNA, 18 nt, Human
agacuugaaaagagacag

SEQ ID NO: 1974354 - RNA, 19 nt, Human
agacuugaaaagagacagg

SEQ ID NO: 1974355 - RNA, 14 nt, Human
agagaccaucccug

SEQ ID NO: 1974356 - RNA, 13 nt, Human
agagaccaucccu

SEQ ID NO: 1974357 - RNA, 15 nt, Human
agagaccaucccuga

SEQ ID NO: 1974358 - RNA, 12 nt, Human
agacuuuggaaa

SEQ ID NO: 1974359 - RNA, 18 nt, Human
agacuuugaugucagcag

SEQ ID NO: 1974360 - RNA, 14 nt, Human
agacuuugauguca

SEQ ID NO: 1974361 - RNA, 17 nt, Human
agacuuugaugucagca

SEQ ID NO: 1974362 - RNA, 14 nt, Human
agacuuuggaaaga

SEQ ID NO: 1974363 - RNA, 18 nt, Human
agagaaugaaagggccca

SEQ ID NO: 1974364 - RNA, 15 nt, Human
agacuuuggaaagac

SEQ ID NO: 1974365 - RNA, 17 nt, Human
agacuccugcaggcagc

SEQ ID NO: 1974366 - RNA, 16 nt, Human
agacuccugcaggcag

SEQ ID NO: 1974367 - RNA, 15 nt, Human
agacuccugcaggca

SEQ ID NO: 1974368 - RNA, 14 nt, Human
agacuccugcaggc

SEQ ID NO: 1974369 - RNA, 16 nt, Human
ucuuuccugaggcugg

SEQ ID NO: 1974370 - RNA, 15 nt, Human
ucuuuccugaggcug

SEQ ID NO: 1974371 - RNA, 14 nt, Human
ucuuuccugaggcu

SEQ ID NO: 1974372 - RNA, 13 nt, Human
ucuuuccugaggc

SEQ ID NO: 1974373 - RNA, 23 nt, Human
agacuccugcaggcagccaggcc

SEQ ID NO: 1974374 - RNA, 20 nt, Human
agacuccugcaggcagccag

SEQ ID NO: 1974375 - RNA, 19 nt, Human
agacuccugcaggcagcca

SEQ ID NO: 1974376 - RNA, 18 nt, Human
agacuccugcaggcagcc

SEQ ID NO: 1974377 - RNA, 19 nt, Human
agacucuacagaggccaug

SEQ ID NO: 1974378 - RNA, 21 nt, Human
agacucgcgacaaugcaaacc

SEQ ID NO: 1974379 - RNA, 17 nt, Human
agacucuacagaggcca

SEQ ID NO: 1974380 - RNA, 15 nt, Human
ucuuggagccugcag

SEQ ID NO: 1974381 - RNA, 18 nt, Human
ucuuggagccugcagagc

SEQ ID NO: 1974382 - RNA, 19 nt, Human
ucuuggagccugcagagcu

SEQ ID NO: 1974383 - RNA, 24 nt, Human
ucuuggcaauaaauuuugaaaagu

SEQ ID NO: 1974384 - RNA, 17 nt, Human
ucuuggcaauaaauuuu

SEQ ID NO: 1974385 - RNA, 19 nt, Human
ucuuggcaauaaauuuuga

SEQ ID NO: 1974386 - RNA, 20 nt, Human
ucuuggcaauaaauuuugaa

SEQ ID NO: 1974387 - RNA, 22 nt, Human
ucuuggcaauaaauuuugaaaa

SEQ ID NO: 1974388 - RNA, 16 nt, Human
ucuuggcaauaaauuu

SEQ ID NO: 1974389 - RNA, 15 nt, Human
ucuuuaaacugucgu

SEQ ID NO: 1974390 - RNA, 15 nt, Human
ucuuuacuucaugga

SEQ ID NO: 1974391 - RNA, 15 nt, Human
ucuuuagaaaaggca

SEQ ID NO: 1974392 - RNA, 16 nt, Human
ucuuuagaaaaggcau

SEQ ID NO: 1974393 - RNA, 23 nt, Human
agacccugcccugugggccccca

SEQ ID NO: 1974394 - RNA, 21 nt, Human
agacccugcccugugggcccc

SEQ ID NO: 1974395 - RNA, 19 nt, Human
agacccugcccugugggcc

SEQ ID NO: 1974396 - RNA, 16 nt, Human
agacccugcccugugg

SEQ ID NO: 1974397 - RNA, 15 nt, Human
agacccuuguggucc

SEQ ID NO: 1974398 - RNA, 13 nt, Human
agacccuuguggu

SEQ ID NO: 1974399 - RNA, 13 nt, Human
agacccuggagga

SEQ ID NO: 1974400 - RNA, 23 nt, Human
agacccuuguggucccaccccac

SEQ ID NO: 1974401 - RNA, 22 nt, Human
agacccuuguggucccacccca

SEQ ID NO: 1974402 - RNA, 20 nt, Human
agacccuuguggucccaccc

SEQ ID NO: 1974403 - RNA, 19 nt, Human
agacccuuguggucccacc

SEQ ID NO: 1974404 - RNA, 17 nt, Human
agaccuaaccagggcca

SEQ ID NO: 1974405 - RNA, 20 nt, Human
agaccgugaagauacuuugu

SEQ ID NO: 1974406 - RNA, 21 nt, Human
agaccgugaagauacuuugua

SEQ ID NO: 1974407 - RNA, 12 nt, Human
agaccuaaccag

SEQ ID NO: 1974408 - RNA, 16 nt, Human
agaccuaaccagggcc

SEQ ID NO: 1974409 - RNA, 14 nt, Human
agacccugcccugu

SEQ ID NO: 1974410 - RNA, 13 nt, Human
agacccugcccug

SEQ ID NO: 1974411 - RNA, 12 nt, Human
agacccugcccu

SEQ ID NO: 1974412 - RNA, 16 nt, Human
ucuuccuacucuucuc

SEQ ID NO: 1974413 - RNA, 22 nt, Human
ucuuccuacucuucucucugcu

SEQ ID NO: 1974414 - RNA, 22 nt, Human
ucuuccuaucaaaaagauauca

SEQ ID NO: 1974415 - RNA, 14 nt, Human
ucuuccuauuucag

SEQ ID NO: 1974416 - RNA, 15 nt, Human
ucuuccuauuucaga

SEQ ID NO: 1974417 - RNA, 16 nt, Human
ucuuccuauuucagaa

SEQ ID NO: 1974418 - RNA, 17 nt, Human
ucuuccuauuucagaag

SEQ ID NO: 1974419 - RNA, 20 nt, Human
ucuuccuauuucagaaguuu

SEQ ID NO: 1974420 - RNA, 18 nt, Human
agacaugguggggucucc

SEQ ID NO: 1974421 - RNA, 17 nt, Human
agacauguaauuugugu

SEQ ID NO: 1974422 - RNA, 18 nt, Human
agacauguaauuugugua

SEQ ID NO: 1974423 - RNA, 21 nt, Human
agacauguaauuuguguaaau

SEQ ID NO: 1974424 - RNA, 18 nt, Human
agacuaucuaaauguuga

SEQ ID NO: 1974425 - RNA, 17 nt, Human
agacuaucuaaauguug

SEQ ID NO: 1974426 - RNA, 19 nt, Human
agacuaucuaaauguugaa

SEQ ID NO: 1974427 - RNA, 12 nt, Human
agaccugccccu

SEQ ID NO: 1974428 - RNA, 17 nt, Human
agacucauucuucugua

SEQ ID NO: 1974429 - RNA, 18 nt, Human
agacucauucuucuguac

SEQ ID NO: 1974430 - RNA, 16 nt, Human
ucuugaugaaaagcuu

SEQ ID NO: 1974431 - RNA, 22 nt, Human
ucuugaugaaaagcuuuguuug

SEQ ID NO: 1974432 - RNA, 14 nt, Human
ucuugaugccuggc

SEQ ID NO: 1974433 - RNA, 20 nt, Human
ucuugaugccuggcggggug

SEQ ID NO: 1974434 - RNA, 17 nt, Human
ucuugcaaaauuccuga

SEQ ID NO: 1974435 - RNA, 17 nt, Human
ucuugcaauggcagccu

SEQ ID NO: 1974436 - RNA, 13 nt, Human
ucuugcaauggca

SEQ ID NO: 1974437 - RNA, 16 nt, Human
ucuugcaauggcagcc

SEQ ID NO: 1974438 - RNA, 13 nt, Human
ucuuggagccugc

SEQ ID NO: 1974439 - RNA, 14 nt, Human
ucuuggagccugca

SEQ ID NO: 1974440 - RNA, 12 nt, Human
ucuuggagccug

SEQ ID NO: 1974441 - RNA, 18 nt, Human
ugaagguggaaauaaacu

SEQ ID NO: 1974442 - RNA, 15 nt, Human
ugaaugcauaaaaug

SEQ ID NO: 1974443 - RNA, 16 nt, Human
ugaaugcauaaaaugu

SEQ ID NO: 1974444 - RNA, 22 nt, Human
ugaauggacgguuuaggugaaa

SEQ ID NO: 1974445 - RNA, 13 nt, Human
agaguccucugaa

SEQ ID NO: 1974446 - RNA, 12 nt, Human
agaguccucuga

SEQ ID NO: 1974447 - RNA, 14 nt, Human
agaguccucugaau

SEQ ID NO: 1974448 - RNA, 18 nt, Human
ugaaugucagugugacug

SEQ ID NO: 1974449 - RNA, 15 nt, Human
ugaaugucaguguga

SEQ ID NO: 1974450 - RNA, 19 nt, Human
ugaauggcaauguuuugcu

SEQ ID NO: 1974451 - RNA, 14 nt, Human
ugaaugucagugug

SEQ ID NO: 1974452 - RNA, 18 nt, Human
agagucuauuuacggaac

SEQ ID NO: 1974453 - RNA, 22 nt, Human
agagugaacaaauuuacagaga

SEQ ID NO: 1974454 - RNA, 15 nt, Human
agagugagacucugu

SEQ ID NO: 1974455 - RNA, 16 nt, Human
agagugagacucuguc

SEQ ID NO: 1974456 - RNA, 20 nt, Human
agagucucacuguugcccag

SEQ ID NO: 1974457 - RNA, 14 nt, Human
agagugaacaaauu

SEQ ID NO: 1974458 - RNA, 22 nt, Human
agagucucacuguugcccaggc

SEQ ID NO: 1974459 - RNA, 21 nt, Human
agaucaaccccuucgcuccug

SEQ ID NO: 1974460 - RNA, 15 nt, Human
agaucaacucauguu

SEQ ID NO: 1974461 - RNA, 18 nt, Human
agaucacuguuuagauuu

SEQ ID NO: 1974462 - RNA, 19 nt, Human
agaucacuguuuagauuug

SEQ ID NO: 1974463 - RNA, 15 nt, Human
agaucacuguuuaga

SEQ ID NO: 1974464 - RNA, 16 nt, Human
agaucacuguuuagau

SEQ ID NO: 1974465 - RNA, 17 nt, Human
agaucacuguuuagauu

SEQ ID NO: 1974466 - RNA, 14 nt, Human
agaucaaccccuuc

SEQ ID NO: 1974467 - RNA, 19 nt, Human
agaucaaccccuucgcucc

SEQ ID NO: 1974468 - RNA, 22 nt, Human
agauauuuugcuuugugauuuu

SEQ ID NO: 1974469 - RNA, 18 nt, Human
agauaccuuaaaauuuga

SEQ ID NO: 1974470 - RNA, 20 nt, Human
agauaccuuaaaauuugaaa

SEQ ID NO: 1974471 - RNA, 22 nt, Human
agauaccuuaaaauuugaaaca

SEQ ID NO: 1974472 - RNA, 19 nt, Human
agauacaggaaaagcugcu

SEQ ID NO: 1974473 - RNA, 15 nt, Human
agauaccaagcaugu

SEQ ID NO: 1974474 - RNA, 19 nt, Human
agauaaggguaucugguga

SEQ ID NO: 1974475 - RNA, 17 nt, Human
agauaaggguaucuggu

SEQ ID NO: 1974476 - RNA, 19 nt, Human
agauaaaccuagauaaaga

SEQ ID NO: 1974477 - RNA, 18 nt, Human
agauaaaaaaacagcuuu

SEQ ID NO: 1974478 - RNA, 13 nt, Human
agauaaagauugu

SEQ ID NO: 1974479 - RNA, 19 nt, Human
agagugagacucugucuca

SEQ ID NO: 1974480 - RNA, 17 nt, Human
agauaaaaaaacagcuu

SEQ ID NO: 1974481 - RNA, 14 nt, Human
agauaaguuggaaa

SEQ ID NO: 1974482 - RNA, 15 nt, Human
agauaaguggccuug

SEQ ID NO: 1974483 - RNA, 16 nt, Human
agauaaagauugugug

SEQ ID NO: 1974484 - RNA, 23 nt, Human
agauaaguggccuugacacauua

SEQ ID NO: 1974485 - RNA, 15 nt, Human
agauaaguuggaaac

SEQ ID NO: 1974486 - RNA, 16 nt, Human
agauaaguuggaaaca

SEQ ID NO: 1974487 - RNA, 18 nt, Human
agauaaguuggaaacacu

SEQ ID NO: 1974488 - RNA, 19 nt, Human
agauaaguuggaaacacua

SEQ ID NO: 1974489 - RNA, 20 nt, Human
agauaaguuggaaacacuaa

SEQ ID NO: 1974490 - RNA, 21 nt, Human
agauaaguuggaaacacuaaa

SEQ ID NO: 1974491 - RNA, 22 nt, Human
agauaaguuggaaacacuaaau

SEQ ID NO: 1974492 - RNA, 18 nt, Human
agauaauucuagcuuuga

SEQ ID NO: 1974493 - RNA, 11 nt, Human
ugaagacaaug

SEQ ID NO: 1974494 - RNA, 13 nt, Human
ugaagacaaugac

SEQ ID NO: 1974495 - RNA, 17 nt, Human
ugaagacaaugacuuac

SEQ ID NO: 1974496 - RNA, 16 nt, Human
ugaacuuugaccucug

SEQ ID NO: 1974497 - RNA, 17 nt, Human
ugaacuuugaccucugc

SEQ ID NO: 1974498 - RNA, 21 nt, Human
ucuuuggucuacacugugcug

SEQ ID NO: 1974499 - RNA, 14 nt, Human
ucuuuggucuacac

SEQ ID NO: 1974500 - RNA, 12 nt, Human
ucuuuguaauga

SEQ ID NO: 1974501 - RNA, 11 nt, Human
ugaacuuugac

SEQ ID NO: 1974502 - RNA, 15 nt, Human
ucuuuguaaugaaaa

SEQ ID NO: 1974503 - RNA, 13 nt, Human
ucuuuguaaugaa

SEQ ID NO: 1974504 - RNA, 18 nt, Human
agaggcaacugcauuggc

SEQ ID NO: 1974505 - RNA, 21 nt, Human
agaggaaaucaccgaaaacgu

SEQ ID NO: 1974506 - RNA, 17 nt, Human
agaggaaaguacauuuu

SEQ ID NO: 1974507 - RNA, 12 nt, Human
agaggaaaucac

SEQ ID NO: 1974508 - RNA, 11 nt, Human
agaggaaauca

SEQ ID NO: 1974509 - RNA, 19 nt, Human
agaggaaagcaaaggagau

SEQ ID NO: 1974510 - RNA, 18 nt, Human
agaggaaagcaaaggaga

SEQ ID NO: 1974511 - RNA, 16 nt, Human
agaggaaagcaaagga

SEQ ID NO: 1974512 - RNA, 12 nt, Human
agaggaaagcaa

SEQ ID NO: 1974513 - RNA, 21 nt, Human
ugaagacaaugacuuacugua

SEQ ID NO: 1974514 - RNA, 19 nt, Human
agagcugggugucaagagg

SEQ ID NO: 1974515 - RNA, 15 nt, Human
agagcuucuggcacu

SEQ ID NO: 1974516 - RNA, 19 nt, Human
agagcuucuguugcugccu

SEQ ID NO: 1974517 - RNA, 20 nt, Human
agagcuucuguugcugccuc

SEQ ID NO: 1974518 - RNA, 21 nt, Human
agagcuucuguugcugccuca

SEQ ID NO: 1974519 - RNA, 21 nt, Human
agaggccuuuaguuauaaagg

SEQ ID NO: 1974520 - RNA, 14 nt, Human
agaggcuaaaaugu

SEQ ID NO: 1974521 - RNA, 15 nt, Human
agaggcuaaaauguu

SEQ ID NO: 1974522 - RNA, 16 nt, Human
agaggcuaaaauguuu

SEQ ID NO: 1974523 - RNA, 17 nt, Human
agaggcuaaaauguuuu

SEQ ID NO: 1974524 - RNA, 21 nt, Human
agaggcgcaugaauuugugaa

SEQ ID NO: 1974525 - RNA, 19 nt, Human
agagggaccucucccaggg

SEQ ID NO: 1974526 - RNA, 16 nt, Human
agagggaccucuccca

SEQ ID NO: 1974527 - RNA, 15 nt, Human
agagggaccucuccc

SEQ ID NO: 1974528 - RNA, 20 nt, Human
agagggagggagggcuccag

SEQ ID NO: 1974529 - RNA, 21 nt, Human
agagggagggagggcuccaga

SEQ ID NO: 1974530 - RNA, 16 nt, Human
agaggugcacuugggg

SEQ ID NO: 1974531 - RNA, 22 nt, Human
agagggagggagggcuccagac

SEQ ID NO: 1974532 - RNA, 17 nt, Human
ugaagauguagaggaga

SEQ ID NO: 1974533 - RNA, 14 nt, Human
agaggugggagggc

SEQ ID NO: 1974534 - RNA, 17 nt, Human
agaggugggagggcccu

SEQ ID NO: 1974535 - RNA, 22 nt, Human
agaggugcacuuggggcacagg

SEQ ID NO: 1974536 - RNA, 18 nt, Human
ugaagauguagaggagaa

SEQ ID NO: 1974537 - RNA, 21 nt, Human
ugaagauucuauguuaauauu

SEQ ID NO: 1974538 - RNA, 18 nt, Human
ugaagccugcuccuuccc

SEQ ID NO: 1974539 - RNA, 13 nt, Human
ugaagccugcucc

SEQ ID NO: 1974540 - RNA, 15 nt, Human
ugaagccugcuccuu

SEQ ID NO: 1974541 - RNA, 17 nt, Human
ugaagccugcuccuucc

SEQ ID NO: 1974542 - RNA, 23 nt, Human
agaugcuagaacucccuuucaac

SEQ ID NO: 1974543 - RNA, 16 nt, Human
agaugcuucucacugc

SEQ ID NO: 1974544 - RNA, 18 nt, Human
agaugcuucucacugcca

SEQ ID NO: 1974545 - RNA, 16 nt, Human
agauggcacagggcau

SEQ ID NO: 1974546 - RNA, 22 nt, Human
agauggcacagggcaugaaaug

SEQ ID NO: 1974547 - RNA, 23 nt, Human
agauggcacagggcaugaaauga

SEQ ID NO: 1974548 - RNA, 17 nt, Human
agauggauaugaccagu

SEQ ID NO: 1974549 - RNA, 14 nt, Human
agaugucucuaaaa

SEQ ID NO: 1974550 - RNA, 13 nt, Human
agaugucuuccua

SEQ ID NO: 1974551 - RNA, 20 nt, Human
agaugugggccaccauugca

SEQ ID NO: 1974552 - RNA, 17 nt, Human
agauguccuaaugguga

SEQ ID NO: 1974553 - RNA, 20 nt, Human
agaugugguuaauuuugcau

SEQ ID NO: 1974554 - RNA, 16 nt, Human
agauguguaauuuuuc

SEQ ID NO: 1974555 - RNA, 17 nt, Human
agauguguaauuuuucu

SEQ ID NO: 1974556 - RNA, 21 nt, Human
agauguguaauuuuucuguau

SEQ ID NO: 1974557 - RNA, 18 nt, Human
agauguguucacaaugga

SEQ ID NO: 1974558 - RNA, 15 nt, Human
agauguguucacaau

SEQ ID NO: 1974559 - RNA, 12 nt, Human
ugaccugaggcc

SEQ ID NO: 1974560 - RNA, 14 nt, Human
ugaccucugccuga

SEQ ID NO: 1974561 - RNA, 13 nt, Human
ugaccucugccug

SEQ ID NO: 1974562 - RNA, 19 nt, Human
ugaccccucauagcccuca

SEQ ID NO: 1974563 - RNA, 20 nt, Human
ugaccccucauagcccucac

SEQ ID NO: 1974564 - RNA, 22 nt, Human
ugacccccaaccaaguggcucc

SEQ ID NO: 1974565 - RNA, 15 nt, Human
ugacccccccagcuu

SEQ ID NO: 1974566 - RNA, 19 nt, Human
ugacccccccagcuucacu

SEQ ID NO: 1974567 - RNA, 17 nt, Human
ugaccccucauagcccu

SEQ ID NO: 1974568 - RNA, 17 nt, Human
ugacagguuugggaccc

SEQ ID NO: 1974569 - RNA, 15 nt, Human
ugaauuuaucuuuga

SEQ ID NO: 1974570 - RNA, 16 nt, Human
ugaauuuaucuuugau

SEQ ID NO: 1974571 - RNA, 14 nt, Human
agaucagccagaag

SEQ ID NO: 1974572 - RNA, 13 nt, Human
ugaauuuaucuuu

SEQ ID NO: 1974573 - RNA, 20 nt, Human
agaucacuguuuagauuugc

SEQ ID NO: 1974574 - RNA, 12 nt, Human
agaucagccaga

SEQ ID NO: 1974575 - RNA, 18 nt, Human
ugacauuguagagcuucu

SEQ ID NO: 1974576 - RNA, 24 nt, Human
ugacauuuguuugguuauagugca

SEQ ID NO: 1974577 - RNA, 14 nt, Human
agaucgguuaacaa

SEQ ID NO: 1974578 - RNA, 15 nt, Human
agaucgguuaacaaa

SEQ ID NO: 1974579 - RNA, 17 nt, Human
agaucgguuaacaaaua

SEQ ID NO: 1974580 - RNA, 18 nt, Human
agaucgguuaacaaauaa

SEQ ID NO: 1974581 - RNA, 17 nt, Human
agaucauuugaguucag

SEQ ID NO: 1974582 - RNA, 21 nt, Human
agaucauugugaaauuauuca

SEQ ID NO: 1974583 - RNA, 12 nt, Human
ugaccacacucc

SEQ ID NO: 1974584 - RNA, 17 nt, Human
ugaccacacuccagcug

SEQ ID NO: 1974585 - RNA, 19 nt, Human
ugaccacacuccagcuggg

SEQ ID NO: 1974586 - RNA, 20 nt, Human
ugaccacacuccagcuggga

SEQ ID NO: 1974587 - RNA, 13 nt, Human
ugaccaauuuuaa

SEQ ID NO: 1974588 - RNA, 16 nt, Human
ugaccaauuuuaacuu

SEQ ID NO: 1974589 - RNA, 19 nt, Human
ugaccaaauaucaccagga

SEQ ID NO: 1974590 - RNA, 21 nt, Human
ugaccaaauaucaccaggacu

SEQ ID NO: 1974591 - RNA, 22 nt, Human
ugaccaaauaucaccaggacug

SEQ ID NO: 1974592 - RNA, 22 nt, Human
agcaaccauauagaaagcuuug

SEQ ID NO: 1974593 - RNA, 18 nt, Human
agcaaccccuggacccca

SEQ ID NO: 1974594 - RNA, 19 nt, Human
agcaaccccuggaccccag

SEQ ID NO: 1974595 - RNA, 20 nt, Human
agcaaccccuggaccccagc

SEQ ID NO: 1974596 - RNA, 22 nt, Human
agcaacauuuuacccacacaca

SEQ ID NO: 1974597 - RNA, 14 nt, Human
agcaaccaaaaaga

SEQ ID NO: 1974598 - RNA, 20 nt, Human
agcaacauuuuacccacaca

SEQ ID NO: 1974599 - RNA, 14 nt, Human
agcaacaauuuuca

SEQ ID NO: 1974600 - RNA, 15 nt, Human
agcaacaauuuucag

SEQ ID NO: 1974601 - RNA, 16 nt, Human
agcaacaauuuucaga

SEQ ID NO: 1974602 - RNA, 17 nt, Human
agcaacaauuuucagau

SEQ ID NO: 1974603 - RNA, 14 nt, Human
agauuucacucucc

SEQ ID NO: 1974604 - RNA, 13 nt, Human
agauuucacucuc

SEQ ID NO: 1974605 - RNA, 21 nt, Human
agauuugccauagaguacacu

SEQ ID NO: 1974606 - RNA, 12 nt, Human
agauuugggaga

SEQ ID NO: 1974607 - RNA, 12 nt, Human
agauuugcacaa

SEQ ID NO: 1974608 - RNA, 14 nt, Human
agauuugcacaaaa

SEQ ID NO: 1974609 - RNA, 15 nt, Human
agauuugcacaaaaa

SEQ ID NO: 1974610 - RNA, 17 nt, Human
agauuugcacaaaaaga

SEQ ID NO: 1974611 - RNA, 18 nt, Human
agauuugccauagaguac

SEQ ID NO: 1974612 - RNA, 19 nt, Human
agauuugccauagaguaca

SEQ ID NO: 1974613 - RNA, 14 nt, Human
agauuuaugcauau

SEQ ID NO: 1974614 - RNA, 13 nt, Human
agauugugaauaa

SEQ ID NO: 1974615 - RNA, 14 nt, Human
agauugugaauaau

SEQ ID NO: 1974616 - RNA, 18 nt, Human
agauugugaauaaugauu

SEQ ID NO: 1974617 - RNA, 16 nt, Human
agauugugccccugca

SEQ ID NO: 1974618 - RNA, 21 nt, Human
agauugugccccugcacucca

SEQ ID NO: 1974619 - RNA, 21 nt, Human
ugacugugguagccagcaucg

SEQ ID NO: 1974620 - RNA, 23 nt, Human
ugacuccagaauuucccaaagca

SEQ ID NO: 1974621 - RNA, 20 nt, Human
ugacuccagaauuucccaaa

SEQ ID NO: 1974622 - RNA, 15 nt, Human
ugaccugaggcccuu

SEQ ID NO: 1974623 - RNA, 14 nt, Human
ugaccugaggcccu

SEQ ID NO: 1974624 - RNA, 17 nt, Human
ugaccugaggcccuucu

SEQ ID NO: 1974625 - RNA, 19 nt, Human
ugacuccagaauuucccaa

SEQ ID NO: 1974626 - RNA, 17 nt, Human
ugacuccagaauuuccc

SEQ ID NO: 1974627 - RNA, 23 nt, Human
agauuauauauauuuuuuucuga

SEQ ID NO: 1974628 - RNA, 20 nt, Human
agauuauaggcaccuaccac

SEQ ID NO: 1974629 - RNA, 15 nt, Human
ugacuuuauuauuua

SEQ ID NO: 1974630 - RNA, 16 nt, Human
ugacuuuauuauuuau

SEQ ID NO: 1974631 - RNA, 17 nt, Human
ugacuuuauuauuuauu

SEQ ID NO: 1974632 - RNA, 20 nt, Human
ugacuuuauuauuuauuuuu

SEQ ID NO: 1974633 - RNA, 22 nt, Human
ugacuuucaaaguggaugcaau

SEQ ID NO: 1974634 - RNA, 15 nt, Human
ugacuuucaggaauu

SEQ ID NO: 1974635 - RNA, 21 nt, Human
ugacuuucaggaauugcccau

SEQ ID NO: 1974636 - RNA, 22 nt, Human
agauucaaugccccugaauuua

SEQ ID NO: 1974637 - RNA, 21 nt, Human
agauucaaugccccugaauuu

SEQ ID NO: 1974638 - RNA, 16 nt, Human
agauucaaucccagga

SEQ ID NO: 1974639 - RNA, 21 nt, Human
ugacuucugcuggcaucaaga

SEQ ID NO: 1974640 - RNA, 20 nt, Human
ugacuuccccaauaucuugc

SEQ ID NO: 1974641 - RNA, 21 nt, Human
ugacuuccccaauaucuugcu

SEQ ID NO: 1974642 - RNA, 21 nt, Human
agcacagcagccccugcacaa

SEQ ID NO: 1974643 - RNA, 22 nt, Human
agcaagugagagcuggguguca

SEQ ID NO: 1974644 - RNA, 15 nt, Human
agcaagugugaauac

SEQ ID NO: 1974645 - RNA, 21 nt, Human
agcaagugugaauacugcuug

SEQ ID NO: 1974646 - RNA, 23 nt, Human
agcaagugugaauacugcuugaa

SEQ ID NO: 1974647 - RNA, 18 nt, Human
agcaagugagagcugggu

SEQ ID NO: 1974648 - RNA, 14 nt, Human
agcaagugagagcu

SEQ ID NO: 1974649 - RNA, 22 nt, Human
ugagccagauuucacucuccuu

SEQ ID NO: 1974650 - RNA, 17 nt, Human
ugagccagauuucacuc

SEQ ID NO: 1974651 - RNA, 20 nt, Human
agcaagugagacccugucuc

SEQ ID NO: 1974652 - RNA, 13 nt, Human
agcaagugagagc

SEQ ID NO: 1974653 - RNA, 16 nt, Human
agcaccaaaauaagaa

SEQ ID NO: 1974654 - RNA, 17 nt, Human
agcaccaaaauaagaaa

SEQ ID NO: 1974655 - RNA, 18 nt, Human
agcaccaaaauaagaaaa

SEQ ID NO: 1974656 - RNA, 19 nt, Human
agcaccaaaauaagaaaag

SEQ ID NO: 1974657 - RNA, 20 nt, Human
agcaccaaaauaagaaaaga

SEQ ID NO: 1974658 - RNA, 21 nt, Human
agcaccaaaauaagaaaagau

SEQ ID NO: 1974659 - RNA, 14 nt, Human
agcacaugccucuc

SEQ ID NO: 1974660 - RNA, 22 nt, Human
agcaccaaaagcuuaccaaggg

SEQ ID NO: 1974661 - RNA, 13 nt, Human
agcacaugccucu

SEQ ID NO: 1974662 - RNA, 15 nt, Human
agcacagugaucaag

SEQ ID NO: 1974663 - RNA, 15 nt, Human
agcacagcucccuuc

SEQ ID NO: 1974664 - RNA, 16 nt, Human
agcacagcucccuucu

SEQ ID NO: 1974665 - RNA, 18 nt, Human
agcacagucagguugaag

SEQ ID NO: 1974666 - RNA, 16 nt, Human
agcacagcuucauuuc

SEQ ID NO: 1974667 - RNA, 12 nt, Human
agcacagcuccc

SEQ ID NO: 1974668 - RNA, 14 nt, Human
agcacagcucccuu

SEQ ID NO: 1974669 - RNA, 21 nt, Human
ugagcaucaggccaggcccuc

SEQ ID NO: 1974670 - RNA, 24 nt, Human
ugagcaucaggccaggcccucugc

SEQ ID NO: 1974671 - RNA, 22 nt, Human
ugagcaucaggccaggcccucu

SEQ ID NO: 1974672 - RNA, 15 nt, Human
ugagccaccacgccc

SEQ ID NO: 1974673 - RNA, 14 nt, Human
ugagccaccgugcc

SEQ ID NO: 1974674 - RNA, 23 nt, Human
ugagcaucgcuuaggagaagucu

SEQ ID NO: 1974675 - RNA, 21 nt, Human
ugagccacugcaccgggccac

SEQ ID NO: 1974676 - RNA, 18 nt, Human
ugagccacugcaccgggc

SEQ ID NO: 1974677 - RNA, 18 nt, Human
ugagccaccgugccuggc

SEQ ID NO: 1974678 - RNA, 19 nt, Human
ugagccaccgugccuggcc

SEQ ID NO: 1974679 - RNA, 20 nt, Human
ugagccaccgugccuggcca

SEQ ID NO: 1974680 - RNA, 21 nt, Human
ugagccaccgugccuggccac

SEQ ID NO: 1974681 - RNA, 16 nt, Human
ugagccagauuucacu

SEQ ID NO: 1974682 - RNA, 14 nt, Human
ugagccagauuuca

SEQ ID NO: 1974683 - RNA, 13 nt, Human
ugagccagauuuc

SEQ ID NO: 1974684 - RNA, 23 nt, Human
ugagccacugcaccgggccacag

SEQ ID NO: 1974685 - RNA, 15 nt, Human
ugagcaauccugcaa

SEQ ID NO: 1974686 - RNA, 15 nt, Human
ugagcaaauguggcu

SEQ ID NO: 1974687 - RNA, 15 nt, Human
ugagcaacaagaauc

SEQ ID NO: 1974688 - RNA, 16 nt, Human
ugagcaaauguggcuc

SEQ ID NO: 1974689 - RNA, 19 nt, Human
agcaacgaucacaaaugac

SEQ ID NO: 1974690 - RNA, 20 nt, Human
agcaacgaucacaaaugacu

SEQ ID NO: 1974691 - RNA, 21 nt, Human
agcaacgaucacaaaugacuu

SEQ ID NO: 1974692 - RNA, 22 nt, Human
agcaacgaucacaaaugacuuu

SEQ ID NO: 1974693 - RNA, 18 nt, Human
ugagcaaauguggcuccu

SEQ ID NO: 1974694 - RNA, 19 nt, Human
ugagcaaauguggcuccug

SEQ ID NO: 1974695 - RNA, 18 nt, Human
agcaacgaucacaaauga

SEQ ID NO: 1974696 - RNA, 24 nt, Human
agcaaccccuggaccccagccuca

SEQ ID NO: 1974697 - RNA, 21 nt, Human
agcaaccccuggaccccagcc

SEQ ID NO: 1974698 - RNA, 23 nt, Human
agcaaccccuggaccccagccuc

SEQ ID NO: 1974699 - RNA, 20 nt, Human
ugagcacuaaggugugcucu

SEQ ID NO: 1974700 - RNA, 21 nt, Human
ugagcacuaaggugugcucug

SEQ ID NO: 1974701 - RNA, 22 nt, Human
ugagcacuaaggugugcucuga

SEQ ID NO: 1974702 - RNA, 23 nt, Human
ugagcacuaaggugugcucugau

SEQ ID NO: 1974703 - RNA, 14 nt, Human
ugagcaagcccagg

SEQ ID NO: 1974704 - RNA, 15 nt, Human
ugagcaagcccagga

SEQ ID NO: 1974705 - RNA, 13 nt, Human
agcagaaggaagg

SEQ ID NO: 1974706 - RNA, 14 nt, Human
agcagaacagugau

SEQ ID NO: 1974707 - RNA, 21 nt, Human
agcagaaauucuguuuuuaaa

SEQ ID NO: 1974708 - RNA, 19 nt, Human
agcagaaaugccuuacccu

SEQ ID NO: 1974709 - RNA, 14 nt, Human
agcagaaauucugu

SEQ ID NO: 1974710 - RNA, 16 nt, Human
agcagaaauucuguuu

SEQ ID NO: 1974711 - RNA, 20 nt, Human
agcagaaauucuguuuuuaa

SEQ ID NO: 1974712 - RNA, 12 nt, Human
agcagaaaugcc

SEQ ID NO: 1974713 - RNA, 13 nt, Human
agcagaaaugccu

SEQ ID NO: 1974714 - RNA, 14 nt, Human
agcacuuuuuaaaa

SEQ ID NO: 1974715 - RNA, 23 nt, Human
agcacuuugggaggccaaggugg

SEQ ID NO: 1974716 - RNA, 22 nt, Human
agcacuuugggaggccaaggug

SEQ ID NO: 1974717 - RNA, 22 nt, Human
agcaccuuagacagucccugcc

SEQ ID NO: 1974718 - RNA, 21 nt, Human
agcaccuuagacagucccugc

SEQ ID NO: 1974719 - RNA, 20 nt, Human
agcaccuuagacagucccug

SEQ ID NO: 1974720 - RNA, 19 nt, Human
agcaccuuagacagucccu

SEQ ID NO: 1974721 - RNA, 10 nt, Human
agcaccaggg

SEQ ID NO: 1974722 - RNA, 12 nt, Human
agcaccagggaa

SEQ ID NO: 1974723 - RNA, 13 nt, Human
agcaccagggaag

SEQ ID NO: 1974724 - RNA, 18 nt, Human
agcaccacucaagaccaa

SEQ ID NO: 1974725 - RNA, 15 nt, Human
agcaccacccuccuu

SEQ ID NO: 1974726 - RNA, 16 nt, Human
agcaccacccuccuuc

SEQ ID NO: 1974727 - RNA, 18 nt, Human
agcaccacccuccuuccc

SEQ ID NO: 1974728 - RNA, 23 nt, Human
agcaccuuagacagucccugcca

SEQ ID NO: 1974729 - RNA, 13 nt, Human
agcacgauuucug

SEQ ID NO: 1974730 - RNA, 14 nt, Human
agcacgauuucugu

SEQ ID NO: 1974731 - RNA, 15 nt, Human
agcacgauuucuguu

SEQ ID NO: 1974732 - RNA, 16 nt, Human
agcacgauuucuguuu

SEQ ID NO: 1974733 - RNA, 13 nt, Human
ugagcgacaguga

SEQ ID NO: 1974734 - RNA, 14 nt, Human
ugagcgacagugag

SEQ ID NO: 1974735 - RNA, 16 nt, Human
ugagcgacagugagac

SEQ ID NO: 1974736 - RNA, 20 nt, Human
ugagcgacagugagacucug

SEQ ID NO: 1974737 - RNA, 15 nt, Human
ugagccuugaacuuu

SEQ ID NO: 1974738 - RNA, 17 nt, Human
ugagccuugaacuuuga

SEQ ID NO: 1974739 - RNA, 18 nt, Human
ugagccuugaacuuugac

SEQ ID NO: 1974740 - RNA, 19 nt, Human
ugagccuugaacuuugacc

SEQ ID NO: 1974741 - RNA, 14 nt, Human
ugagccuugaacuu

SEQ ID NO: 1974742 - RNA, 22 nt, Human
ugagccugggaggucaaggcug

SEQ ID NO: 1974743 - RNA, 19 nt, Human
ugagccugggaggucaagg

SEQ ID NO: 1974744 - RNA, 16 nt, Human
ugagccuggcaagaau

SEQ ID NO: 1974745 - RNA, 11 nt, Human
ugagccuggca

SEQ ID NO: 1974746 - RNA, 14 nt, Human
ugagccugggaggu

SEQ ID NO: 1974747 - RNA, 10 nt, Human
ugagccuggc

SEQ ID NO: 1974748 - RNA, 18 nt, Human
agcagacuuuuaaagacu

SEQ ID NO: 1974749 - RNA, 16 nt, Human
agcagagaccaucccu

SEQ ID NO: 1974750 - RNA, 15 nt, Human
agcagagaccauccc

SEQ ID NO: 1974751 - RNA, 21 nt, Human
agcagagaauucucuuaucca

SEQ ID NO: 1974752 - RNA, 14 nt, Human
agcagagaauucuc

SEQ ID NO: 1974753 - RNA, 22 nt, Human
agcagagaaugaaagggcccag

SEQ ID NO: 1974754 - RNA, 23 nt, Human
agcagagaaugaaagggcccaga

SEQ ID NO: 1974755 - RNA, 21 nt, Human
agcagagaaugaaagggccca

SEQ ID NO: 1974756 - RNA, 17 nt, Human
agcagacacccuuggag

SEQ ID NO: 1974757 - RNA, 18 nt, Human
agcagaauugaccgacag

SEQ ID NO: 1974758 - RNA, 13 nt, Human
agcagaauuggaa

SEQ ID NO: 1974759 - RNA, 14 nt, Human
agcagaauuggaaa

SEQ ID NO: 1974760 - RNA, 17 nt, Human
agcagaauuggaaaaga

SEQ ID NO: 1974761 - RNA, 19 nt, Human
agcagaauuggaaaagacu

SEQ ID NO: 1974762 - RNA, 20 nt, Human
ugaggcccagagggccugca

SEQ ID NO: 1974763 - RNA, 18 nt, Human
ugaggcccagagggccug

SEQ ID NO: 1974764 - RNA, 17 nt, Human
ugaggcccagagggccu

SEQ ID NO: 1974765 - RNA, 15 nt, Human
ugaggcccagagggc

SEQ ID NO: 1974766 - RNA, 22 nt, Human
ugaggcccagagggccugcaag

SEQ ID NO: 1974767 - RNA, 21 nt, Human
ugaggcccagagggccugcaa

SEQ ID NO: 1974768 - RNA, 23 nt, Human
ugaggcccagagggccugcaagg

SEQ ID NO: 1974769 - RNA, 16 nt, Human
ugaggccagagacaca

SEQ ID NO: 1974770 - RNA, 14 nt, Human
ugaggccagagaca

SEQ ID NO: 1974771 - RNA, 20 nt, Human
ugaggccagagacacaagcc

SEQ ID NO: 1974772 - RNA, 13 nt, Human
ugaggcccagagg

SEQ ID NO: 1974773 - RNA, 12 nt, Human
ugaggcccagag

SEQ ID NO: 1974774 - RNA, 17 nt, Human
ugaggacauaaaucuuc

SEQ ID NO: 1974775 - RNA, 19 nt, Human
ugaggacauggcuucugaa

SEQ ID NO: 1974776 - RNA, 12 nt, Human
ugaggccagaga

SEQ ID NO: 1974777 - RNA, 21 nt, Human
ugaggacacuaaccacgcugg

SEQ ID NO: 1974778 - RNA, 21 nt, Human
ugaggaauccagacccggcug

SEQ ID NO: 1974779 - RNA, 22 nt, Human
ugaggaauccagacccggcugc

SEQ ID NO: 1974780 - RNA, 18 nt, Human
ugaggaauggacauuucu

SEQ ID NO: 1974781 - RNA, 13 nt, Human
ugaggacaagaga

SEQ ID NO: 1974782 - RNA, 22 nt, Human
ugaggacaagagaaaaaagcca

SEQ ID NO: 1974783 - RNA, 17 nt, Human
ugaggaagagggacugu

SEQ ID NO: 1974784 - RNA, 21 nt, Human
ugaggaagccgcuggggccag

SEQ ID NO: 1974785 - RNA, 19 nt, Human
ugaggaagccgcuggggcc

SEQ ID NO: 1974786 - RNA, 18 nt, Human
ugaggaagccgcuggggc

SEQ ID NO: 1974787 - RNA, 17 nt, Human
ugaggaagccgcugggg

SEQ ID NO: 1974788 - RNA, 14 nt, Human
ugaggaagccgcug

SEQ ID NO: 1974789 - RNA, 22 nt, Human
ugaggaagcaaaagcaucuaug

SEQ ID NO: 1974790 - RNA, 16 nt, Human
ugaggaaacaacagcu

SEQ ID NO: 1974791 - RNA, 18 nt, Human
ugaggaaaaauaugugaa

SEQ ID NO: 1974792 - RNA, 19 nt, Human
ugaggaaaaauaugugaag

SEQ ID NO: 1974793 - RNA, 15 nt, Human
ugaggaaaaauaugu

SEQ ID NO: 1974794 - RNA, 16 nt, Human
ugaggaaaaauaugug

SEQ ID NO: 1974795 - RNA, 15 nt, Human
ugaggaagcaaaagc

SEQ ID NO: 1974796 - RNA, 15 nt, Human
ugaggaaaucaaagu

SEQ ID NO: 1974797 - RNA, 16 nt, Human
ugaggaaaucaaagug

SEQ ID NO: 1974798 - RNA, 18 nt, Human
ugaggaaaucaaagugcu

SEQ ID NO: 1974799 - RNA, 22 nt, Human
ugaggaaaucaaagugcuauua

SEQ ID NO: 1974800 - RNA, 14 nt, Human
ugaggaaauuugca

SEQ ID NO: 1974801 - RNA, 15 nt, Human
ugaggaaauuugcag

SEQ ID NO: 1974802 - RNA, 16 nt, Human
ugaggaaauuugcagc

SEQ ID NO: 1974803 - RNA, 13 nt, Human
ugagcuacaaaug

SEQ ID NO: 1974804 - RNA, 14 nt, Human
ugagcuacaaaugc

SEQ ID NO: 1974805 - RNA, 14 nt, Human
ugagccuucugagc

SEQ ID NO: 1974806 - RNA, 14 nt, Human
ugagcuaggaauug

SEQ ID NO: 1974807 - RNA, 14 nt, Human
ugagcuaugacuua

SEQ ID NO: 1974808 - RNA, 15 nt, Human
ugagcuaugacuuaa

SEQ ID NO: 1974809 - RNA, 19 nt, Human
ugagcuaugacuuaacaua

SEQ ID NO: 1974810 - RNA, 16 nt, Human
ugagcuacaaaugcau

SEQ ID NO: 1974811 - RNA, 20 nt, Human
agcagagcaccuuagacagu

SEQ ID NO: 1974812 - RNA, 20 nt, Human
agcagagaccaucccugaag

SEQ ID NO: 1974813 - RNA, 19 nt, Human
ugagguacaaccuguucug

SEQ ID NO: 1974814 - RNA, 19 nt, Human
agcagagagcauuauaauc

SEQ ID NO: 1974815 - RNA, 19 nt, Human
agcagagaccaucccugaa

SEQ ID NO: 1974816 - RNA, 18 nt, Human
agcagagaccaucccuga

SEQ ID NO: 1974817 - RNA, 17 nt, Human
agcagagaccaucccug

SEQ ID NO: 1974818 - RNA, 17 nt, Human
ugaggucagagccugca

SEQ ID NO: 1974819 - RNA, 14 nt, Human
ugaggucagagccu

SEQ ID NO: 1974820 - RNA, 16 nt, Human
ugaggucagagccugc

SEQ ID NO: 1974821 - RNA, 22 nt, Human
ugagguacugagagugaacaaa

SEQ ID NO: 1974822 - RNA, 13 nt, Human
ugaggucagagcc

SEQ ID NO: 1974823 - RNA, 17 nt, Human
ugagguacugagaguga

SEQ ID NO: 1974824 - RNA, 18 nt, Human
ugaggguuucagagagcc

SEQ ID NO: 1974825 - RNA, 22 nt, Human
ugagggugacuauggagcugag

SEQ ID NO: 1974826 - RNA, 20 nt, Human
ugaggguugggcugguguca

SEQ ID NO: 1974827 - RNA, 19 nt, Human
agcagaugcaaugacucag

SEQ ID NO: 1974828 - RNA, 19 nt, Human
agcagauggagaccccuug

SEQ ID NO: 1974829 - RNA, 17 nt, Human
agcagaggaaggagagg

SEQ ID NO: 1974830 - RNA, 24 nt, Human
ugaggcccuucucuccagccccug

SEQ ID NO: 1974831 - RNA, 23 nt, Human
ugaggcccuucucuccagccccu

SEQ ID NO: 1974832 - RNA, 22 nt, Human
ugaggcccuucucuccagcccc

SEQ ID NO: 1974833 - RNA, 20 nt, Human
ugaggcccuucucuccagcc

SEQ ID NO: 1974834 - RNA, 19 nt, Human
ugaggcccuucucuccagc

SEQ ID NO: 1974835 - RNA, 18 nt, Human
ugaggcccuucucuccag

SEQ ID NO: 1974836 - RNA, 16 nt, Human
ugaggcccuucucucc

SEQ ID NO: 1974837 - RNA, 19 nt, Human
ugagggauacccaucccau

SEQ ID NO: 1974838 - RNA, 15 nt, Human
ugagggauuaucuuu

SEQ ID NO: 1974839 - RNA, 14 nt, Human
ugaggcccugccca

SEQ ID NO: 1974840 - RNA, 14 nt, Human
ugaggccguugcug

SEQ ID NO: 1974841 - RNA, 17 nt, Human
ugaggccguugcugacu

SEQ ID NO: 1974842 - RNA, 19 nt, Human
ugaggccguugcugacuua

SEQ ID NO: 1974843 - RNA, 20 nt, Human
ugaggccguugcugacuuag

SEQ ID NO: 1974844 - RNA, 21 nt, Human
ugaggccguugcugacuuaga

SEQ ID NO: 1974845 - RNA, 22 nt, Human
ugaggccguugcugacuuagaa

SEQ ID NO: 1974846 - RNA, 12 nt, Human
ugaggggccucu

SEQ ID NO: 1974847 - RNA, 18 nt, Human
ugaggggcagccugccuu

SEQ ID NO: 1974848 - RNA, 14 nt, Human
ugaggggagccagg

SEQ ID NO: 1974849 - RNA, 15 nt, Human
ugaggggagccagga

SEQ ID NO: 1974850 - RNA, 18 nt, Human
ugaggggagccaggaggg

SEQ ID NO: 1974851 - RNA, 23 nt, Human
ugaggggagacagagcaaccccu

SEQ ID NO: 1974852 - RNA, 13 nt, Human
ugagggcuuguag

SEQ ID NO: 1974853 - RNA, 14 nt, Human
ugagggcagugcaa

SEQ ID NO: 1974854 - RNA, 15 nt, Human
ugagggcagugcaag

SEQ ID NO: 1974855 - RNA, 13 nt, Human
ugaggggccucuu

SEQ ID NO: 1974856 - RNA, 14 nt, Human
ugaggguaaguauu

SEQ ID NO: 1974857 - RNA, 13 nt, Human
ucaccucccccau

SEQ ID NO: 1974858 - RNA, 15 nt, Human
ucaccucccccaucu

SEQ ID NO: 1974859 - RNA, 15 nt, Human
accaggccccccugu

SEQ ID NO: 1974860 - RNA, 19 nt, Human
ucaccugaagacucauucu

SEQ ID NO: 1974861 - RNA, 23 nt, Human
ucaccugaagacucauucuucug

SEQ ID NO: 1974862 - RNA, 19 nt, Human
accaggcaacuugggaacu

SEQ ID NO: 1974863 - RNA, 19 nt, Human
accaggcaccuccccuccc

SEQ ID NO: 1974864 - RNA, 15 nt, Human
accaggcaccucccc

SEQ ID NO: 1974865 - RNA, 23 nt, Human
accaggcaccuccccucccgccc

SEQ ID NO: 1974866 - RNA, 23 nt, Human
accagcgcacugauggucacugg

SEQ ID NO: 1974867 - RNA, 19 nt, Human
accagagcccaccuuggcu

SEQ ID NO: 1974868 - RNA, 22 nt, Human
accagagcccaccuuggcucaa

SEQ ID NO: 1974869 - RNA, 22 nt, Human
accagacaccuugacagggcac

SEQ ID NO: 1974870 - RNA, 23 nt, Human
accagacaccuugacagggcaca

SEQ ID NO: 1974871 - RNA, 12 nt, Human
accacuuuuguu

SEQ ID NO: 1974872 - RNA, 17 nt, Human
accagacaccuugacag

SEQ ID NO: 1974873 - RNA, 13 nt, Human
accacugcagaag

SEQ ID NO: 1974874 - RNA, 14 nt, Human
accacugaaucugu

SEQ ID NO: 1974875 - RNA, 14 nt, Human
accacugcagaaga

SEQ ID NO: 1974876 - RNA, 19 nt, Human
accacugcagaagacagua

SEQ ID NO: 1974877 - RNA, 14 nt, Human
accacuucagcuga

SEQ ID NO: 1974878 - RNA, 13 nt, Human
accacuucagcug

SEQ ID NO: 1974879 - RNA, 15 nt, Human
accacuucagcugac

SEQ ID NO: 1974880 - RNA, 16 nt, Human
accacucaagaccaaa

SEQ ID NO: 1974881 - RNA, 20 nt, Human
accacucuaucaaguauuau

SEQ ID NO: 1974882 - RNA, 16 nt, Human
accacaucuugcucug

SEQ ID NO: 1974883 - RNA, 20 nt, Human
accacaucuugcucugcuga

SEQ ID NO: 1974884 - RNA, 21 nt, Human
accacaucuugcucugcugac

SEQ ID NO: 1974885 - RNA, 24 nt, Human
accacaucuugcucugcugacaga

SEQ ID NO: 1974886 - RNA, 20 nt, Human
accacacuugucggcuccag

SEQ ID NO: 1974887 - RNA, 22 nt, Human
uauuucauucgggccccaccug

SEQ ID NO: 1974888 - RNA, 20 nt, Human
uauuucaugaauacauugua

SEQ ID NO: 1974889 - RNA, 19 nt, Human
uauuucaucagaacagcug

SEQ ID NO: 1974890 - RNA, 22 nt, Human
uauuucaguuauugucccuggc

SEQ ID NO: 1974891 - RNA, 18 nt, Human
uauuucagcaaacuuguu

SEQ ID NO: 1974892 - RNA, 23 nt, Human
uauuucaguuauugucccuggcu

SEQ ID NO: 1974893 - RNA, 20 nt, Human
uauuucaucagaacagcugu

SEQ ID NO: 1974894 - RNA, 20 nt, Human
uauuucaucauauuauacag

SEQ ID NO: 1974895 - RNA, 21 nt, Human
uauuucaucauauuauacaga

SEQ ID NO: 1974896 - RNA, 14 nt, Human
uauuucagaaguuu

SEQ ID NO: 1974897 - RNA, 16 nt, Human
uauuucagaaguuuaa

SEQ ID NO: 1974898 - RNA, 23 nt, Human
uauuucagaaguuuaaauauuaa

SEQ ID NO: 1974899 - RNA, 16 nt, Human
uauuucagcaaacuug

SEQ ID NO: 1974900 - RNA, 20 nt, Human
uauuucacuuuaguuuuuga

SEQ ID NO: 1974901 - RNA, 12 nt, Human
uauuucagaaau

SEQ ID NO: 1974902 - RNA, 13 nt, Human
uauuucagaaaua

SEQ ID NO: 1974903 - RNA, 14 nt, Human
uauuucagaaauac

SEQ ID NO: 1974904 - RNA, 12 nt, Human
accacagacuuu

SEQ ID NO: 1974905 - RNA, 23 nt, Human
accacagacuuuagcuuucugag

SEQ ID NO: 1974906 - RNA, 23 nt, Human
accacagcaacgaucacaaauga

SEQ ID NO: 1974907 - RNA, 21 nt, Human
accacagacauacuaaccagc

SEQ ID NO: 1974908 - RNA, 22 nt, Human
accacagacauacuaaccagca

SEQ ID NO: 1974909 - RNA, 14 nt, Human
accacaucuugcuc

SEQ ID NO: 1974910 - RNA, 18 nt, Human
accacauacguaaaaauc

SEQ ID NO: 1974911 - RNA, 22 nt, Human
accacaguguaccauuaaaaua

SEQ ID NO: 1974912 - RNA, 15 nt, Human
ucacugagacagccc

SEQ ID NO: 1974913 - RNA, 14 nt, Human
ucacugagacagcc

SEQ ID NO: 1974914 - RNA, 13 nt, Human
ucacugagacagc

SEQ ID NO: 1974915 - RNA, 16 nt, Human
ucaccugccccucaac

SEQ ID NO: 1974916 - RNA, 23 nt, Human
ucaccugcuucucugcccagcuu

SEQ ID NO: 1974917 - RNA, 13 nt, Human
ucaccugcuucuc

SEQ ID NO: 1974918 - RNA, 15 nt, Human
ucaccugcuucucug

SEQ ID NO: 1974919 - RNA, 17 nt, Human
ucaccugcuucucugcc

SEQ ID NO: 1974920 - RNA, 22 nt, Human
ucaccugcuucucugcccagcu

SEQ ID NO: 1974921 - RNA, 16 nt, Human
ucacuguccuccaagc

SEQ ID NO: 1974922 - RNA, 15 nt, Human
ucacuguccuccaag

SEQ ID NO: 1974923 - RNA, 19 nt, Human
ucacuguccuccaagccag

SEQ ID NO: 1974924 - RNA, 14 nt, Human
ucacugucugucug

SEQ ID NO: 1974925 - RNA, 16 nt, Human
ucacuguugcccaggc

SEQ ID NO: 1974926 - RNA, 13 nt, Human
ucacugcagccuc

SEQ ID NO: 1974927 - RNA, 12 nt, Human
ucacugcagccu

SEQ ID NO: 1974928 - RNA, 20 nt, Human
ucacugcacagugcaucuca

SEQ ID NO: 1974929 - RNA, 22 nt, Human
ucacugcacagugcaucucagc

SEQ ID NO: 1974930 - RNA, 24 nt, Human
ucacugcacagugcaucucagccc

SEQ ID NO: 1974931 - RNA, 15 nt, Human
accagggccagaagu

SEQ ID NO: 1974932 - RNA, 22 nt, Human
accagggccagaaguagcuuug

SEQ ID NO: 1974933 - RNA, 19 nt, Human
ucacuguugcccaggcugg

SEQ ID NO: 1974934 - RNA, 17 nt, Human
ucacuguugcccaggcu

SEQ ID NO: 1974935 - RNA, 18 nt, Human
ucacuguugcccaggcug

SEQ ID NO: 1974936 - RNA, 21 nt, Human
accaguguuguggauuuaaca

SEQ ID NO: 1974937 - RNA, 12 nt, Human
accagugccuua

SEQ ID NO: 1974938 - RNA, 15 nt, Human
accaguucugggcaa

SEQ ID NO: 1974939 - RNA, 18 nt, Human
accauucuccaccugcca

SEQ ID NO: 1974940 - RNA, 16 nt, Human
accauucuccaccugc

SEQ ID NO: 1974941 - RNA, 13 nt, Human
accauucuccacc

SEQ ID NO: 1974942 - RNA, 22 nt, Human
accaugauuaaccacuucagcu

SEQ ID NO: 1974943 - RNA, 23 nt, Human
accaugauuaaccacuucagcug

SEQ ID NO: 1974944 - RNA, 15 nt, Human
accauuccccauggg

SEQ ID NO: 1974945 - RNA, 12 nt, Human
accauuccccau

SEQ ID NO: 1974946 - RNA, 13 nt, Human
accauuuaucuug

SEQ ID NO: 1974947 - RNA, 15 nt, Human
accauuuaucuugaa

SEQ ID NO: 1974948 - RNA, 16 nt, Human
accauuuaucuugaag

SEQ ID NO: 1974949 - RNA, 23 nt, Human
accauuucaguaaaccugucuga

SEQ ID NO: 1974950 - RNA, 16 nt, Human
accauuuccccagggc

SEQ ID NO: 1974951 - RNA, 17 nt, Human
accauuuccccagggca

SEQ ID NO: 1974952 - RNA, 18 nt, Human
accauuuccccagggcac

SEQ ID NO: 1974953 - RNA, 19 nt, Human
accauuuccccagggcacg

SEQ ID NO: 1974954 - RNA, 19 nt, Human
accauuuccguaauucuua

SEQ ID NO: 1974955 - RNA, 22 nt, Human
accauuuugggguacccacugc

SEQ ID NO: 1974956 - RNA, 13 nt, Human
acccaaaaggcag

SEQ ID NO: 1974957 - RNA, 15 nt, Human
acccaaaaggcagaa

SEQ ID NO: 1974958 - RNA, 23 nt, Human
accauuuugggguacccacugcu

SEQ ID NO: 1974959 - RNA, 16 nt, Human
acccagcccacuucug

SEQ ID NO: 1974960 - RNA, 17 nt, Human
acccagcccacuucugc

SEQ ID NO: 1974961 - RNA, 20 nt, Human
acccagaaacgccacauccc

SEQ ID NO: 1974962 - RNA, 21 nt, Human
acccagaaacgccacaucccc

SEQ ID NO: 1974963 - RNA, 21 nt, Human
acccagaaaaucugaauugga

SEQ ID NO: 1974964 - RNA, 18 nt, Human
acccagcccacuucugcc

SEQ ID NO: 1974965 - RNA, 14 nt, Human
ucagaacaaauuca

SEQ ID NO: 1974966 - RNA, 14 nt, Human
ucagaacagcuguu

SEQ ID NO: 1974967 - RNA, 16 nt, Human
ucagaacagcuguuga

SEQ ID NO: 1974968 - RNA, 12 nt, Human
ucagaacagcug

SEQ ID NO: 1974969 - RNA, 16 nt, Human
ucagaacaaauucagg

SEQ ID NO: 1974970 - RNA, 21 nt, Human
acccaaauguucaucaaugaa

SEQ ID NO: 1974971 - RNA, 18 nt, Human
acccaaaaggcagaagca

SEQ ID NO: 1974972 - RNA, 16 nt, Human
acccagaagaaaauag

SEQ ID NO: 1974973 - RNA, 19 nt, Human
acccacuugcuuuuaaaau

SEQ ID NO: 1974974 - RNA, 15 nt, Human
acccaagcaggaggc

SEQ ID NO: 1974975 - RNA, 19 nt, Human
accccuggcuccaggccag

SEQ ID NO: 1974976 - RNA, 20 nt, Human
accccuggcuccaggccagg

SEQ ID NO: 1974977 - RNA, 22 nt, Human
accccuggcuccaggccagggg

SEQ ID NO: 1974978 - RNA, 12 nt, Human
accccuggcuuu

SEQ ID NO: 1974979 - RNA, 18 nt, Human
accccuggaccccagccu

SEQ ID NO: 1974980 - RNA, 20 nt, Human
accccuggaccccagccuca

SEQ ID NO: 1974981 - RNA, 23 nt, Human
accccuggaccccagccucaaau

SEQ ID NO: 1974982 - RNA, 12 nt, Human
ucagccugggca

SEQ ID NO: 1974983 - RNA, 10 nt, Human
ucagccuggg

SEQ ID NO: 1974984 - RNA, 19 nt, Human
ucagccuggcuucaaauug

SEQ ID NO: 1974985 - RNA, 17 nt, Human
accccuucccauuccau

SEQ ID NO: 1974986 - RNA, 15 nt, Human
accccuggcuuuuca

SEQ ID NO: 1974987 - RNA, 17 nt, Human
accccuggcuuuucacu

SEQ ID NO: 1974988 - RNA, 15 nt, Human
acccccauucugucc

SEQ ID NO: 1974989 - RNA, 16 nt, Human
acccccauucuguccu

SEQ ID NO: 1974990 - RNA, 16 nt, Human
acccccaggaccccug

SEQ ID NO: 1974991 - RNA, 12 nt, Human
acccccagcucc

SEQ ID NO: 1974992 - RNA, 13 nt, Human
acccccagcuccc

SEQ ID NO: 1974993 - RNA, 15 nt, Human
accccaucugugaau

SEQ ID NO: 1974994 - RNA, 16 nt, Human
accccaucugugaaua

SEQ ID NO: 1974995 - RNA, 18 nt, Human
accccaucugugaauaag

SEQ ID NO: 1974996 - RNA, 14 nt, Human
accccauggccggc

SEQ ID NO: 1974997 - RNA, 20 nt, Human
accccauggccggcuuucag

SEQ ID NO: 1974998 - RNA, 14 nt, Human
acccccagccugcu

SEQ ID NO: 1974999 - RNA, 15 nt, Human
acccccagccugcua

SEQ ID NO: 1975000 - RNA, 19 nt, Human
ucagcccucccugccccuc

SEQ ID NO: 1975001 - RNA, 18 nt, Human
ucagcccucccugccccu

SEQ ID NO: 1975002 - RNA, 22 nt, Human
acccagcuaugguucucucgca

SEQ ID NO: 1975003 - RNA, 15 nt, Human
acccagcucuggucc

SEQ ID NO: 1975004 - RNA, 13 nt, Human
acccagcucuggu

SEQ ID NO: 1975005 - RNA, 16 nt, Human
acccagguguggccua

SEQ ID NO: 1975006 - RNA, 13 nt, Human
acccagcugcacc

SEQ ID NO: 1975007 - RNA, 14 nt, Human
acccagcugcaccc

SEQ ID NO: 1975008 - RNA, 20 nt, Human
acccagcugcaccccuuccu

SEQ ID NO: 1975009 - RNA, 20 nt, Human
acccagguuuugcacucuug

SEQ ID NO: 1975010 - RNA, 15 nt, Human
ucagaacuguuuuug

SEQ ID NO: 1975011 - RNA, 13 nt, Human
ucagaucuucugu

SEQ ID NO: 1975012 - RNA, 13 nt, Human
ucagaagacacug

SEQ ID NO: 1975013 - RNA, 14 nt, Human
ucagaagaaaauua

SEQ ID NO: 1975014 - RNA, 13 nt, Human
ucagauguuuaaa

SEQ ID NO: 1975015 - RNA, 15 nt, Human
ucagauguuuaaaac

SEQ ID NO: 1975016 - RNA, 17 nt, Human
ucagauguuuaaaacac

SEQ ID NO: 1975017 - RNA, 16 nt, Human
ucagauguuuaaaaca

SEQ ID NO: 1975018 - RNA, 13 nt, Human
ucagauucaggca

SEQ ID NO: 1975019 - RNA, 16 nt, Human
ucagauucaggcauuu

SEQ ID NO: 1975020 - RNA, 15 nt, Human
ucaggccgaaggagg

SEQ ID NO: 1975021 - RNA, 14 nt, Human
ucaggcccaaagcc

SEQ ID NO: 1975022 - RNA, 22 nt, Human
ucaggcauuuucccccuuggcu

SEQ ID NO: 1975023 - RNA, 12 nt, Human
ucaggccaggcc

SEQ ID NO: 1975024 - RNA, 11 nt, Human
ucaggccaggc

SEQ ID NO: 1975025 - RNA, 20 nt, Human
ucaggccagcugcuugggcu

SEQ ID NO: 1975026 - RNA, 15 nt, Human
ucaggccagcugcuu

SEQ ID NO: 1975027 - RNA, 18 nt, Human
ucagggucccugguggca

SEQ ID NO: 1975028 - RNA, 14 nt, Human
ucagggucccuggu

SEQ ID NO: 1975029 - RNA, 13 nt, Human
ucagggucccugg

SEQ ID NO: 1975030 - RNA, 13 nt, Human
ucagguaacaggc

SEQ ID NO: 1975031 - RNA, 15 nt, Human
ucagguaacaggcag

SEQ ID NO: 1975032 - RNA, 16 nt, Human
ucagguaacaggcaga

SEQ ID NO: 1975033 - RNA, 19 nt, Human
accccuucgcuccuguguc

SEQ ID NO: 1975034 - RNA, 20 nt, Human
ucaggaagcucagggccugg

SEQ ID NO: 1975035 - RNA, 19 nt, Human
ucaggaagcucagggccug

SEQ ID NO: 1975036 - RNA, 17 nt, Human
ucaggaagcucagggcc

SEQ ID NO: 1975037 - RNA, 16 nt, Human
ucaggaagcucagggc

SEQ ID NO: 1975038 - RNA, 17 nt, Human
ucaggcauuuucccccu

SEQ ID NO: 1975039 - RNA, 23 nt, Human
ucaggccaaacucaccugccccu

SEQ ID NO: 1975040 - RNA, 20 nt, Human
ucaggccaaacucaccugcc

SEQ ID NO: 1975041 - RNA, 15 nt, Human
ucagcggggacagcu

SEQ ID NO: 1975042 - RNA, 16 nt, Human
ucagcggggacagcuc

SEQ ID NO: 1975043 - RNA, 17 nt, Human
ucagcggggacagcucc

SEQ ID NO: 1975044 - RNA, 18 nt, Human
ucagcggggacagcuccu

SEQ ID NO: 1975045 - RNA, 23 nt, Human
acccuuccaucugauuccagcac

SEQ ID NO: 1975046 - RNA, 15 nt, Human
acccuugugguccca

SEQ ID NO: 1975047 - RNA, 19 nt, Human
acccuuguggucccacccc

SEQ ID NO: 1975048 - RNA, 17 nt, Human
acccuuguggucccacc

SEQ ID NO: 1975049 - RNA, 16 nt, Human
acccuuguggucccac

SEQ ID NO: 1975050 - RNA, 12 nt, Human
acccugcccugu

SEQ ID NO: 1975051 - RNA, 11 nt, Human
acccugcccug

SEQ ID NO: 1975052 - RNA, 13 nt, Human
acccugcccugug

SEQ ID NO: 1975053 - RNA, 14 nt, Human
acccugcccugugg

SEQ ID NO: 1975054 - RNA, 14 nt, Human
acccucuuagaaaa

SEQ ID NO: 1975055 - RNA, 15 nt, Human
acccuccacucuccu

SEQ ID NO: 1975056 - RNA, 23 nt, Human
acccucccucuacugggagccua

SEQ ID NO: 1975057 - RNA, 12 nt, Human
acccuccaaggc

SEQ ID NO: 1975058 - RNA, 14 nt, Human
acccuccaaggcca

SEQ ID NO: 1975059 - RNA, 15 nt, Human
acccgagcugggacc

SEQ ID NO: 1975060 - RNA, 15 nt, Human
acccgacuccagucc

SEQ ID NO: 1975061 - RNA, 20 nt, Human
accccuucgcuccugugucu

SEQ ID NO: 1975062 - RNA, 14 nt, Human
accccuugauuuuc

SEQ ID NO: 1975063 - RNA, 22 nt, Human
ucaugauagaaggcuaugggga

SEQ ID NO: 1975064 - RNA, 22 nt, Human
accuccucggcuggcuguccac

SEQ ID NO: 1975065 - RNA, 19 nt, Human
ucaugacaaagacugagua

SEQ ID NO: 1975066 - RNA, 19 nt, Human
ucauccacugugccaugug

SEQ ID NO: 1975067 - RNA, 21 nt, Human
ucauccacugugccaugugcc

SEQ ID NO: 1975068 - RNA, 23 nt, Human
ucauccacugugccaugugccag

SEQ ID NO: 1975069 - RNA, 11 nt, Human
ucauguucuua

SEQ ID NO: 1975070 - RNA, 17 nt, Human
ucauguucuuaauucuu

SEQ ID NO: 1975071 - RNA, 22 nt, Human
ucauuaaccuuaucauaaauuc

SEQ ID NO: 1975072 - RNA, 14 nt, Human
ucaugugaaaucau

SEQ ID NO: 1975073 - RNA, 13 nt, Human
ucaugucuggcua

SEQ ID NO: 1975074 - RNA, 20 nt, Human
ucauguccugugucaguuua

SEQ ID NO: 1975075 - RNA, 15 nt, Human
ucauguccuguguca

SEQ ID NO: 1975076 - RNA, 16 nt, Human
ucauguccugugucag

SEQ ID NO: 1975077 - RNA, 18 nt, Human
ucauguccugugucaguu

SEQ ID NO: 1975078 - RNA, 19 nt, Human
ucauguccugugucaguuu

SEQ ID NO: 1975079 - RNA, 18 nt, Human
ucauguuaauugauagaa

SEQ ID NO: 1975080 - RNA, 19 nt, Human
ucauguucccacuucaaaa

SEQ ID NO: 1975081 - RNA, 22 nt, Human
ucauguucccacuucaaaacaa

SEQ ID NO: 1975082 - RNA, 23 nt, Human
ucauguucccacuucaaaacaaa

SEQ ID NO: 1975083 - RNA, 22 nt, Human
ucauugaccugaggcccuucuc

SEQ ID NO: 1975084 - RNA, 12 nt, Human
ucauugcuucuu

SEQ ID NO: 1975085 - RNA, 14 nt, Human
ucauugcuucuucu

SEQ ID NO: 1975086 - RNA, 16 nt, Human
ucauugcuucuucuga

SEQ ID NO: 1975087 - RNA, 17 nt, Human
ucauugcuucuucugag

SEQ ID NO: 1975088 - RNA, 22 nt, Human
ucauucuaaagauagaguaaaa

SEQ ID NO: 1975089 - RNA, 12 nt, Human
ucauucuaaaga

SEQ ID NO: 1975090 - RNA, 13 nt, Human
ucauucuaaagau

SEQ ID NO: 1975091 - RNA, 23 nt, Human
ucauucgcuacuaugauuuaauu

SEQ ID NO: 1975092 - RNA, 18 nt, Human
ucauuccuuuuuauuuau

SEQ ID NO: 1975093 - RNA, 20 nt, Human
ucauuccuuuuuauuuauau

SEQ ID NO: 1975094 - RNA, 18 nt, Human
ucauucgggccccaccug

SEQ ID NO: 1975095 - RNA, 21 nt, Human
ucauucgggccccaccugcag

SEQ ID NO: 1975096 - RNA, 21 nt, Human
ucauucuccuuguguuacuaa

SEQ ID NO: 1975097 - RNA, 19 nt, Human
ucauugaccugaggcccuu

SEQ ID NO: 1975098 - RNA, 21 nt, Human
ucauuggauucugagagcugu

SEQ ID NO: 1975099 - RNA, 13 nt, Human
ucauuguaauguu

SEQ ID NO: 1975100 - RNA, 22 nt, Human
ucauugggccauguuuaagugu

SEQ ID NO: 1975101 - RNA, 18 nt, Human
accucuaaauucuuucau

SEQ ID NO: 1975102 - RNA, 17 nt, Human
accucggugccuuccuc

SEQ ID NO: 1975103 - RNA, 18 nt, Human
accucgcuccaacuccaa

SEQ ID NO: 1975104 - RNA, 19 nt, Human
accucgcuccaacuccaac

SEQ ID NO: 1975105 - RNA, 14 nt, Human
accucuccucaugu

SEQ ID NO: 1975106 - RNA, 19 nt, Human
accucucucacuccuugaa

SEQ ID NO: 1975107 - RNA, 14 nt, Human
accucucucacucc

SEQ ID NO: 1975108 - RNA, 23 nt, Human
accucucccuuggauuguccccg

SEQ ID NO: 1975109 - RNA, 21 nt, Human
accugaagggguuuucuugau

SEQ ID NO: 1975110 - RNA, 23 nt, Human
accugaagggguuuucuugauaa

SEQ ID NO: 1975111 - RNA, 12 nt, Human
accucugcacaa

SEQ ID NO: 1975112 - RNA, 21 nt, Human
accucuaaauucuuucauuuu

SEQ ID NO: 1975113 - RNA, 16 nt, Human
accucuagcccugccc

SEQ ID NO: 1975114 - RNA, 18 nt, Human
accucuagcccugcccgg

SEQ ID NO: 1975115 - RNA, 12 nt, Human
accucuagaauu

SEQ ID NO: 1975116 - RNA, 13 nt, Human
accucuagaauuu

SEQ ID NO: 1975117 - RNA, 19 nt, Human
accucuagaauuuuaagcc

SEQ ID NO: 1975118 - RNA, 15 nt, Human
accucuagcccugcc

SEQ ID NO: 1975119 - RNA, 15 nt, Human
accucucccuuggau

SEQ ID NO: 1975120 - RNA, 14 nt, Human
accucucccuugga

SEQ ID NO: 1975121 - RNA, 13 nt, Human
accucucccuugg

SEQ ID NO: 1975122 - RNA, 16 nt, Human
accgccuccuacagcc

SEQ ID NO: 1975123 - RNA, 13 nt, Human
accgccucuuccc

SEQ ID NO: 1975124 - RNA, 14 nt, Human
accgccucuucccg

SEQ ID NO: 1975125 - RNA, 20 nt, Human
accgcagacaggaccaggga

SEQ ID NO: 1975126 - RNA, 20 nt, Human
accgaugcaaacauuggaag

SEQ ID NO: 1975127 - RNA, 20 nt, Human
accgagucucuucuccacug

SEQ ID NO: 1975128 - RNA, 21 nt, Human
accgagucucuucuccacugg

SEQ ID NO: 1975129 - RNA, 24 nt, Human
accgagucucuucuccacuggaug

SEQ ID NO: 1975130 - RNA, 17 nt, Human
accgccaaggcuggggg

SEQ ID NO: 1975131 - RNA, 21 nt, Human
accgaacugggcauauuucua

SEQ ID NO: 1975132 - RNA, 16 nt, Human
ucauauuuacuucuua

SEQ ID NO: 1975133 - RNA, 22 nt, Human
ucauauuuacuucuuauacauu

SEQ ID NO: 1975134 - RNA, 21 nt, Human
ucauauuuacuucuuauacau

SEQ ID NO: 1975135 - RNA, 20 nt, Human
ucauauuuacuucuuauaca

SEQ ID NO: 1975136 - RNA, 18 nt, Human
accgagucucuucuccac

SEQ ID NO: 1975137 - RNA, 15 nt, Human
accgacuagacacac

SEQ ID NO: 1975138 - RNA, 22 nt, Human
accgacuagacacacaaagcag

SEQ ID NO: 1975139 - RNA, 11 nt, Human
accgacaagca

SEQ ID NO: 1975140 - RNA, 10 nt, Human
acccuuuucu

SEQ ID NO: 1975141 - RNA, 15 nt, Human
acccuuuuccauuuu

SEQ ID NO: 1975142 - RNA, 13 nt, Human
ucauauuacaaua

SEQ ID NO: 1975143 - RNA, 14 nt, Human
ucauauuacaauau

SEQ ID NO: 1975144 - RNA, 15 nt, Human
ucauauuacaauauu

SEQ ID NO: 1975145 - RNA, 13 nt, Human
ucauauuagacuu

SEQ ID NO: 1975146 - RNA, 18 nt, Human
ucauauuagacuucuguu

SEQ ID NO: 1975147 - RNA, 20 nt, Human
ucauauuagacuucuguuuu

SEQ ID NO: 1975148 - RNA, 12 nt, Human
ucauauuauaca

SEQ ID NO: 1975149 - RNA, 22 nt, Human
ucauauuagacuucuguuuuca

SEQ ID NO: 1975150 - RNA, 15 nt, Human
ucauauucagcuugc

SEQ ID NO: 1975151 - RNA, 14 nt, Human
ucauauucaugcaa

SEQ ID NO: 1975152 - RNA, 21 nt, Human
ucauauucaugcaaguauucu

SEQ ID NO: 1975153 - RNA, 20 nt, Human
accuccgccucuuggguuca

SEQ ID NO: 1975154 - RNA, 11 nt, Human
accucccccac

SEQ ID NO: 1975155 - RNA, 16 nt, Human
accucccccacuccca

SEQ ID NO: 1975156 - RNA, 13 nt, Human
accuccucacauu

SEQ ID NO: 1975157 - RNA, 22 nt, Human
accuccuaaaaggcccagagag

SEQ ID NO: 1975158 - RNA, 19 nt, Human
accuccuaaaaggcccaga

SEQ ID NO: 1975159 - RNA, 21 nt, Human
accuccuaaaaggcccagaga

SEQ ID NO: 1975160 - RNA, 17 nt, Human
accuccuaaaaggccca

SEQ ID NO: 1975161 - RNA, 18 nt, Human
accuccuaaaaggcccag

SEQ ID NO: 1975162 - RNA, 14 nt, Human
accuccucccacug

SEQ ID NO: 1975163 - RNA, 15 nt, Human
accuccucccacugc

SEQ ID NO: 1975164 - RNA, 16 nt, Human
accuccucccacugcc

SEQ ID NO: 1975165 - RNA, 18 nt, Human
accuccucccacugccca

SEQ ID NO: 1975166 - RNA, 19 nt, Human
accuccucccacugcccac

SEQ ID NO: 1975167 - RNA, 18 nt, Human
accguguuugucucuucu

SEQ ID NO: 1975168 - RNA, 19 nt, Human
accguguuugucucuucug

SEQ ID NO: 1975169 - RNA, 15 nt, Human
accguguuugucucu

SEQ ID NO: 1975170 - RNA, 17 nt, Human
accuaugagugagaaua

SEQ ID NO: 1975171 - RNA, 13 nt, Human
accuagccuuaga

SEQ ID NO: 1975172 - RNA, 22 nt, Human
uccacucucucuuguucuuacu

SEQ ID NO: 1975173 - RNA, 19 nt, Human
uccacucuggauucagccu

SEQ ID NO: 1975174 - RNA, 20 nt, Human
uccacucuggauucagccuu

SEQ ID NO: 1975175 - RNA, 21 nt, Human
uccacucuggauucagccuuc

SEQ ID NO: 1975176 - RNA, 22 nt, Human
uccacucuggauucagccuucu

SEQ ID NO: 1975177 - RNA, 12 nt, Human
uccagaaugaag

SEQ ID NO: 1975178 - RNA, 19 nt, Human
uccagaaugaagaauucag

SEQ ID NO: 1975179 - RNA, 22 nt, Human
uccagaaguuugagaucagccu

SEQ ID NO: 1975180 - RNA, 23 nt, Human
accuuuguauucucuccuguacc

SEQ ID NO: 1975181 - RNA, 15 nt, Human
accuuuggcuuaauu

SEQ ID NO: 1975182 - RNA, 18 nt, Human
accuuuggcuuaauucca

SEQ ID NO: 1975183 - RNA, 15 nt, Human
accuuuguauucucu

SEQ ID NO: 1975184 - RNA, 19 nt, Human
accuuuguauucucuccug

SEQ ID NO: 1975185 - RNA, 11 nt, Human
uccagccugcc

SEQ ID NO: 1975186 - RNA, 21 nt, Human
uccagccugagcgacagugag

SEQ ID NO: 1975187 - RNA, 20 nt, Human
uccagccugagcgacaguga

SEQ ID NO: 1975188 - RNA, 22 nt, Human
uccagccccuggaugcagccuc

SEQ ID NO: 1975189 - RNA, 23 nt, Human
uccagaccccuggcuuuucacug

SEQ ID NO: 1975190 - RNA, 21 nt, Human
uccagccccuggaugcagccu

SEQ ID NO: 1975191 - RNA, 19 nt, Human
uccagccccuggaugcagc

SEQ ID NO: 1975192 - RNA, 17 nt, Human
uccagccccuggaugca

SEQ ID NO: 1975193 - RNA, 16 nt, Human
uccagccccuggaugc

SEQ ID NO: 1975194 - RNA, 15 nt, Human
uccagccccuggaug

SEQ ID NO: 1975195 - RNA, 15 nt, Human
uccagaccccuggcu

SEQ ID NO: 1975196 - RNA, 16 nt, Human
uccagaccccuggcuu

SEQ ID NO: 1975197 - RNA, 17 nt, Human
uccagaccccuggcuuu

SEQ ID NO: 1975198 - RNA, 18 nt, Human
uccagaccccuggcuuuu

SEQ ID NO: 1975199 - RNA, 13 nt, Human
accuucuccuuca

SEQ ID NO: 1975200 - RNA, 12 nt, Human
accuucuguggc

SEQ ID NO: 1975201 - RNA, 13 nt, Human
accuucuguggcu

SEQ ID NO: 1975202 - RNA, 15 nt, Human
accuucuguggcuca

SEQ ID NO: 1975203 - RNA, 16 nt, Human
accuucuguggcucac

SEQ ID NO: 1975204 - RNA, 15 nt, Human
accuugacagggcac

SEQ ID NO: 1975205 - RNA, 15 nt, Human
accuugaaugaugcc

SEQ ID NO: 1975206 - RNA, 14 nt, Human
accuugacagggca

SEQ ID NO: 1975207 - RNA, 17 nt, Human
accuuccaagagccuga

SEQ ID NO: 1975208 - RNA, 20 nt, Human
accuucuauagcaucacuua

SEQ ID NO: 1975209 - RNA, 17 nt, Human
accuucuauagcaucac

SEQ ID NO: 1975210 - RNA, 18 nt, Human
accuucuauagcaucacu

SEQ ID NO: 1975211 - RNA, 12 nt, Human
accuucuccuuc

SEQ ID NO: 1975212 - RNA, 17 nt, Human
accuuagacagucccug

SEQ ID NO: 1975213 - RNA, 14 nt, Human
accuuagccugccc

SEQ ID NO: 1975214 - RNA, 21 nt, Human
accuuagaagguauuaagauu

SEQ ID NO: 1975215 - RNA, 15 nt, Human
uccaccaucaagcca

SEQ ID NO: 1975216 - RNA, 22 nt, Human
accuggucacaggacucugccu

SEQ ID NO: 1975217 - RNA, 23 nt, Human
accuggucacaggacucugccuc

SEQ ID NO: 1975218 - RNA, 13 nt, Human
uccaagcucccag

SEQ ID NO: 1975219 - RNA, 12 nt, Human
uccaagcuccca

SEQ ID NO: 1975220 - RNA, 15 nt, Human
uccaagcucccaggc

SEQ ID NO: 1975221 - RNA, 14 nt, Human
uccaagcucccagg

SEQ ID NO: 1975222 - RNA, 16 nt, Human
uccaagcucccaggca

SEQ ID NO: 1975223 - RNA, 18 nt, Human
uccaagcuccaucuccac

SEQ ID NO: 1975224 - RNA, 15 nt, Human
uccaacauccacucu

SEQ ID NO: 1975225 - RNA, 22 nt, Human
uccaacgaggcuaaguuaaugc

SEQ ID NO: 1975226 - RNA, 14 nt, Human
uccaaaugcagcuu

SEQ ID NO: 1975227 - RNA, 15 nt, Human
uccaaaugcagcuuu

SEQ ID NO: 1975228 - RNA, 20 nt, Human
uccaaauaauauguuuccuu

SEQ ID NO: 1975229 - RNA, 17 nt, Human
uccaauaugugauuuuu

SEQ ID NO: 1975230 - RNA, 14 nt, Human
uccaauaugugauu

SEQ ID NO: 1975231 - RNA, 16 nt, Human
uccaauaugugauuuu

SEQ ID NO: 1975232 - RNA, 22 nt, Human
uccaaguggccuccgucacuac

SEQ ID NO: 1975233 - RNA, 11 nt, Human
uccaagcuggu

SEQ ID NO: 1975234 - RNA, 22 nt, Human
uccaccaagccuggucagccca

SEQ ID NO: 1975235 - RNA, 23 nt, Human
uccaccaagccuggucagcccaa

SEQ ID NO: 1975236 - RNA, 18 nt, Human
uccaccaagccuggucag

SEQ ID NO: 1975237 - RNA, 18 nt, Human
accugcggugcuaucucc

SEQ ID NO: 1975238 - RNA, 22 nt, Human
accugaagucuuuguacagaca

SEQ ID NO: 1975239 - RNA, 15 nt, Human
accugaagucuuugu

SEQ ID NO: 1975240 - RNA, 22 nt, Human
accugcggugcuaucuccccca

SEQ ID NO: 1975241 - RNA, 19 nt, Human
accugcggugcuaucuccc

SEQ ID NO: 1975242 - RNA, 23 nt, Human
accugcggugcuaucucccccag

SEQ ID NO: 1975243 - RNA, 18 nt, Human
accugcucuccucuugcc

SEQ ID NO: 1975244 - RNA, 17 nt, Human
accugcucuccucuugc

SEQ ID NO: 1975245 - RNA, 19 nt, Human
accugcucuccucuugcca

SEQ ID NO: 1975246 - RNA, 12 nt, Human
accugcucugcu

SEQ ID NO: 1975247 - RNA, 13 nt, Human
accugcucugcug

SEQ ID NO: 1975248 - RNA, 14 nt, Human
accugcucugcuga

SEQ ID NO: 1975249 - RNA, 14 nt, Human
accuggaauauaua

SEQ ID NO: 1975250 - RNA, 17 nt, Human
accuggaauauauaacc

SEQ ID NO: 1975251 - RNA, 19 nt, Human
ucauuugagcagggcucag

SEQ ID NO: 1975252 - RNA, 18 nt, Human
accuggaaggcccagcac

SEQ ID NO: 1975253 - RNA, 19 nt, Human
accuggaaggcccagcacc

SEQ ID NO: 1975254 - RNA, 13 nt, Human
ucauuuuuuuuaa

SEQ ID NO: 1975255 - RNA, 23 nt, Human
uccaaagucucuggaauuugaaa

SEQ ID NO: 1975256 - RNA, 22 nt, Human
ucauuuucaagacugaauucca

SEQ ID NO: 1975257 - RNA, 11 nt, Human
ucauuuucauu

SEQ ID NO: 1975258 - RNA, 12 nt, Human
ucauuuucauua

SEQ ID NO: 1975259 - RNA, 17 nt, Human
ucauuuucauuagcaaa

SEQ ID NO: 1975260 - RNA, 21 nt, Human
ucauuuuuuauauauaugcau

SEQ ID NO: 1975261 - RNA, 22 nt, Human
ucauuuuuuauauauaugcaua

SEQ ID NO: 1975262 - RNA, 23 nt, Human
ucauuuuuuauggcugcauagua

SEQ ID NO: 1975263 - RNA, 12 nt, Human
ucauuuuuuccu

SEQ ID NO: 1975264 - RNA, 13 nt, Human
ucauuuuuuccug

SEQ ID NO: 1975265 - RNA, 17 nt, Human
ucauuuuuuccuguuug

SEQ ID NO: 1975266 - RNA, 23 nt, Human
ucauuuuuuccuguuugggaaga

SEQ ID NO: 1975267 - RNA, 21 nt, Human
ucauuugagcagggcucagcg

SEQ ID NO: 1975268 - RNA, 18 nt, Human
ucauuugugccagaaugc

SEQ ID NO: 1975269 - RNA, 14 nt, Human
ucauuugcuuugga

SEQ ID NO: 1975270 - RNA, 20 nt, Human
ucauuuuagggguagcauuu

SEQ ID NO: 1975271 - RNA, 22 nt, Human
ucauuuuacaguuacuuuuccu

SEQ ID NO: 1975272 - RNA, 22 nt, Human
ucauuuuauauaugaaaacuaa

SEQ ID NO: 1975273 - RNA, 14 nt, Human
ucauuuuacaguua

SEQ ID NO: 1975274 - RNA, 19 nt, Human
ucauuuuacaguuacuuuu

SEQ ID NO: 1975275 - RNA, 16 nt, Human
acugcaaccuccgccu

SEQ ID NO: 1975276 - RNA, 22 nt, Human
acugcaaccuccgccucuuggg

SEQ ID NO: 1975277 - RNA, 20 nt, Human
acugcaaccuucgccaccug

SEQ ID NO: 1975278 - RNA, 23 nt, Human
acugcaaccuucgccaccugggu

SEQ ID NO: 1975279 - RNA, 13 nt, Human
acugcaaccuccg

SEQ ID NO: 1975280 - RNA, 14 nt, Human
acugcaaccuccgc

SEQ ID NO: 1975281 - RNA, 19 nt, Human
acugaguuagaauguugaa

SEQ ID NO: 1975282 - RNA, 22 nt, Human
acugaguacguugugcauuugg

SEQ ID NO: 1975283 - RNA, 23 nt, Human
acugaguacguugugcauuuggu

SEQ ID NO: 1975284 - RNA, 16 nt, Human
acugagugccuuuugg

SEQ ID NO: 1975285 - RNA, 19 nt, Human
acugaguacguugugcauu

SEQ ID NO: 1975286 - RNA, 21 nt, Human
acugaguacguugugcauuug

SEQ ID NO: 1975287 - RNA, 18 nt, Human
acugaguacguugugcau

SEQ ID NO: 1975288 - RNA, 12 nt, Human
acugagcuugga

SEQ ID NO: 1975289 - RNA, 13 nt, Human
acugagcuuggaa

SEQ ID NO: 1975290 - RNA, 16 nt, Human
acugagcuuggaagcu

SEQ ID NO: 1975291 - RNA, 17 nt, Human
acugagcuuggaagcuu

SEQ ID NO: 1975292 - RNA, 15 nt, Human
uccucuccccagcaa

SEQ ID NO: 1975293 - RNA, 14 nt, Human
acugaggaucagag

SEQ ID NO: 1975294 - RNA, 15 nt, Human
acugaggaccagcca

SEQ ID NO: 1975295 - RNA, 18 nt, Human
acugaggcaguuugagga

SEQ ID NO: 1975296 - RNA, 20 nt, Human
acugaggcaguuugaggauu

SEQ ID NO: 1975297 - RNA, 17 nt, Human
acugaggggaggggagc

SEQ ID NO: 1975298 - RNA, 22 nt, Human
acugaggggaggggagcauggg

SEQ ID NO: 1975299 - RNA, 20 nt, Human
uccugaguagcugggauuac

SEQ ID NO: 1975300 - RNA, 23 nt, Human
uccugaggugaugaagacagccc

SEQ ID NO: 1975301 - RNA, 23 nt, Human
uccugauagcauaugacaaaugu

SEQ ID NO: 1975302 - RNA, 16 nt, Human
acugcacagugcaucu

SEQ ID NO: 1975303 - RNA, 18 nt, Human
acugcacagugcaucuca

SEQ ID NO: 1975304 - RNA, 15 nt, Human
uccugcaggcagcca

SEQ ID NO: 1975305 - RNA, 16 nt, Human
uccugcacugacucug

SEQ ID NO: 1975306 - RNA, 17 nt, Human
uccugcacugacucugg

SEQ ID NO: 1975307 - RNA, 21 nt, Human
uccugcacugacucuggaaaa

SEQ ID NO: 1975308 - RNA, 20 nt, Human
uccugcaaccaaacucccau

SEQ ID NO: 1975309 - RNA, 23 nt, Human
uccugcaaccaaacucccaucag

SEQ ID NO: 1975310 - RNA, 21 nt, Human
uccugauugguuucucuucuc

SEQ ID NO: 1975311 - RNA, 23 nt, Human
uccugauugguuucucuucuccc

SEQ ID NO: 1975312 - RNA, 20 nt, Human
uccugauugguuucucuucu

SEQ ID NO: 1975313 - RNA, 20 nt, Human
uccugcaggcagccaggcca

SEQ ID NO: 1975314 - RNA, 19 nt, Human
uccugcaggcagccaggcc

SEQ ID NO: 1975315 - RNA, 17 nt, Human
uccugcaggcagccagg

SEQ ID NO: 1975316 - RNA, 16 nt, Human
uccugcaggcagccag

SEQ ID NO: 1975317 - RNA, 20 nt, Human
uccugcaggccaggccagcu

SEQ ID NO: 1975318 - RNA, 19 nt, Human
uccugcaggccaggccagc

SEQ ID NO: 1975319 - RNA, 14 nt, Human
uccugcaggccagg

SEQ ID NO: 1975320 - RNA, 22 nt, Human
uccugcaggcagccaggccaca

SEQ ID NO: 1975321 - RNA, 19 nt, Human
uccugccucagccucccaa

SEQ ID NO: 1975322 - RNA, 23 nt, Human
uccugcauugggugaucauucac

SEQ ID NO: 1975323 - RNA, 21 nt, Human
uccugccucgaacuggcugca

SEQ ID NO: 1975324 - RNA, 21 nt, Human
uccugccuccuugauauuugu

SEQ ID NO: 1975325 - RNA, 15 nt, Human
uccugcguguucuca

SEQ ID NO: 1975326 - RNA, 20 nt, Human
uccugccucgaacuggcugc

SEQ ID NO: 1975327 - RNA, 13 nt, Human
uccugcucagcag

SEQ ID NO: 1975328 - RNA, 11 nt, Human
uccugcucugc

SEQ ID NO: 1975329 - RNA, 12 nt, Human
uccugcucugcu

SEQ ID NO: 1975330 - RNA, 13 nt, Human
uccugcucugcuc

SEQ ID NO: 1975331 - RNA, 18 nt, Human
uccuggggaaccugaccc

SEQ ID NO: 1975332 - RNA, 19 nt, Human
uccuggggaaccugacccc

SEQ ID NO: 1975333 - RNA, 20 nt, Human
uccugggcuuuuguuuugcu

SEQ ID NO: 1975334 - RNA, 23 nt, Human
uccugggcuuuuguuuugcuuuu

SEQ ID NO: 1975335 - RNA, 19 nt, Human
uccuggggcauccaugggg

SEQ ID NO: 1975336 - RNA, 21 nt, Human
uccuggggguucuuucuuccu

SEQ ID NO: 1975337 - RNA, 22 nt, Human
uccuggggguucuuucuuccuc

SEQ ID NO: 1975338 - RNA, 23 nt, Human
uccuggggguucuuucuuccucu

SEQ ID NO: 1975339 - RNA, 13 nt, Human
uccugcugcaguu

SEQ ID NO: 1975340 - RNA, 13 nt, Human
uccugugccaggu

SEQ ID NO: 1975341 - RNA, 18 nt, Human
uccugugacuucagcucu

SEQ ID NO: 1975342 - RNA, 17 nt, Human
uccuguggccugccagu

SEQ ID NO: 1975343 - RNA, 19 nt, Human
uccuguggccugccaguca

SEQ ID NO: 1975344 - RNA, 16 nt, Human
uccugucuucugcuuu

SEQ ID NO: 1975345 - RNA, 17 nt, Human
uccugucuucugcuuug

SEQ ID NO: 1975346 - RNA, 19 nt, Human
uccugucuucugcuuuguu

SEQ ID NO: 1975347 - RNA, 12 nt, Human
uccugucuucug

SEQ ID NO: 1975348 - RNA, 13 nt, Human
uccugucuucugc

SEQ ID NO: 1975349 - RNA, 14 nt, Human
uccugucuucugcu

SEQ ID NO: 1975350 - RNA, 15 nt, Human
uccugucuucugcuu

SEQ ID NO: 1975351 - RNA, 23 nt, Human
uccuggguuuucuuaaccaucuu

SEQ ID NO: 1975352 - RNA, 19 nt, Human
uccuguucccaugagauga

SEQ ID NO: 1975353 - RNA, 17 nt, Human
uccuguugucaagaaua

SEQ ID NO: 1975354 - RNA, 16 nt, Human
uccuguuucaaguuca

SEQ ID NO: 1975355 - RNA, 20 nt, Human
uccuguuucucagucucaca

SEQ ID NO: 1975356 - RNA, 23 nt, Human
uccuguuugggaagagcuuagaa

SEQ ID NO: 1975357 - RNA, 18 nt, Human
uccugugugugcgccuac

SEQ ID NO: 1975358 - RNA, 13 nt, Human
uccugugugugcg

SEQ ID NO: 1975359 - RNA, 14 nt, Human
uccugugugugcgc

SEQ ID NO: 1975360 - RNA, 22 nt, Human
uccuguguguccaaaacugccu

SEQ ID NO: 1975361 - RNA, 14 nt, Human
uccugugucaguuu

SEQ ID NO: 1975362 - RNA, 16 nt, Human
uccugugucaguuuau

SEQ ID NO: 1975363 - RNA, 23 nt, Human
uccugugucuugcaauggcagcc

SEQ ID NO: 1975364 - RNA, 24 nt, Human
uccugugucuugcaauggcagccu

SEQ ID NO: 1975365 - RNA, 13 nt, Human
acugcacuguuuu

SEQ ID NO: 1975366 - RNA, 19 nt, Human
acugcagccucaaccuccu

SEQ ID NO: 1975367 - RNA, 12 nt, Human
acugcagaacag

SEQ ID NO: 1975368 - RNA, 16 nt, Human
uccuuaagagacaauu

SEQ ID NO: 1975369 - RNA, 21 nt, Human
acugcagccucaaccuccugg

SEQ ID NO: 1975370 - RNA, 22 nt, Human
acugcagccucaaccuccuggg

SEQ ID NO: 1975371 - RNA, 23 nt, Human
acugcagccucaaccuccugggc

SEQ ID NO: 1975372 - RNA, 22 nt, Human
acugcagccuccgcuucccugg

SEQ ID NO: 1975373 - RNA, 17 nt, Human
acugcagggacugccag

SEQ ID NO: 1975374 - RNA, 18 nt, Human
acugcagggacugccagu

SEQ ID NO: 1975375 - RNA, 16 nt, Human
acugcagggacugcca

SEQ ID NO: 1975376 - RNA, 16 nt, Human
acuguaaggcaaucau

SEQ ID NO: 1975377 - RNA, 20 nt, Human
acuggguacuuguggacaca

SEQ ID NO: 1975378 - RNA, 23 nt, Human
acuggguacuuguggacacagcu

SEQ ID NO: 1975379 - RNA, 19 nt, Human
acuggguacuuguggacac

SEQ ID NO: 1975380 - RNA, 15 nt, Human
acuggggagucuuug

SEQ ID NO: 1975381 - RNA, 12 nt, Human
acugggagccua

SEQ ID NO: 1975382 - RNA, 23 nt, Human
acugggagccuacccacccccag

SEQ ID NO: 1975383 - RNA, 22 nt, Human
acugggaugggaggagaggaca

SEQ ID NO: 1975384 - RNA, 15 nt, Human
acugggccaggggag

SEQ ID NO: 1975385 - RNA, 22 nt, Human
acugggcuuggggaccagagcu

SEQ ID NO: 1975386 - RNA, 12 nt, Human
ucgcuccugugu

SEQ ID NO: 1975387 - RNA, 17 nt, Human
acugggagaaaugaaaa

SEQ ID NO: 1975388 - RNA, 13 nt, Human
ucgcuccuguguc

SEQ ID NO: 1975389 - RNA, 23 nt, Human
acuguacaugaaaacacauuuuu

SEQ ID NO: 1975390 - RNA, 13 nt, Human
acuguacaugaaa

SEQ ID NO: 1975391 - RNA, 14 nt, Human
acuguacaugaaaa

SEQ ID NO: 1975392 - RNA, 15 nt, Human
acuguacuccuccca

SEQ ID NO: 1975393 - RNA, 21 nt, Human
acuguacaugggacuaugcuu

SEQ ID NO: 1975394 - RNA, 13 nt, Human
acuguacuccucc

SEQ ID NO: 1975395 - RNA, 14 nt, Human
acuguacuccuccc

SEQ ID NO: 1975396 - RNA, 16 nt, Human
acuguaauuauuugaa

SEQ ID NO: 1975397 - RNA, 17 nt, Human
acuguaauuauuugaau

SEQ ID NO: 1975398 - RNA, 18 nt, Human
acuguaauuauuugaaug

SEQ ID NO: 1975399 - RNA, 20 nt, Human
acuguaauuauuugaaugac

SEQ ID NO: 1975400 - RNA, 13 nt, Human
acuguacaaagua

SEQ ID NO: 1975401 - RNA, 19 nt, Human
acuguaauuugugauacaa

SEQ ID NO: 1975402 - RNA, 15 nt, Human
acuguacaaaguaga

SEQ ID NO: 1975403 - RNA, 14 nt, Human
acuguacaaaguag

SEQ ID NO: 1975404 - RNA, 20 nt, Human
acuguacagacagaaaaaac

SEQ ID NO: 1975405 - RNA, 15 nt, Human
ucgagcaugccugga

SEQ ID NO: 1975406 - RNA, 14 nt, Human
ucgagcaugccugg

SEQ ID NO: 1975407 - RNA, 12 nt, Human
ucgacacagagu

SEQ ID NO: 1975408 - RNA, 21 nt, Human
ucgacacgugggcuccccucu

SEQ ID NO: 1975409 - RNA, 13 nt, Human
ucgaccugccucg

SEQ ID NO: 1975410 - RNA, 22 nt, Human
ucgacgcccgaguuagccucac

SEQ ID NO: 1975411 - RNA, 14 nt, Human
ucgaggacagggag

SEQ ID NO: 1975412 - RNA, 17 nt, Human
ucgaggacagggaggug

SEQ ID NO: 1975413 - RNA, 13 nt, Human
ucgcgacaaugca

SEQ ID NO: 1975414 - RNA, 14 nt, Human
ucgcgacaaugcaa

SEQ ID NO: 1975415 - RNA, 22 nt, Human
ucgccuuucagcaggcagccuu

SEQ ID NO: 1975416 - RNA, 19 nt, Human
ucgccuuucagcaggcagc

SEQ ID NO: 1975417 - RNA, 20 nt, Human
ucgccuuucagcaggcagcc

SEQ ID NO: 1975418 - RNA, 14 nt, Human
ucgccuuucagcag

SEQ ID NO: 1975419 - RNA, 16 nt, Human
ucgccuuucagcaggc

SEQ ID NO: 1975420 - RNA, 15 nt, Human
ucgccuuccaccucu

SEQ ID NO: 1975421 - RNA, 19 nt, Human
ucgccuuccaccucuggga

SEQ ID NO: 1975422 - RNA, 16 nt, Human
uccuuucacaaccuuc

SEQ ID NO: 1975423 - RNA, 18 nt, Human
uccuuucacaaccuucug

SEQ ID NO: 1975424 - RNA, 19 nt, Human
uccuuucacaaccuucugu

SEQ ID NO: 1975425 - RNA, 20 nt, Human
uccuuucacaaccuucugug

SEQ ID NO: 1975426 - RNA, 15 nt, Human
uccuuucaccacaug

SEQ ID NO: 1975427 - RNA, 13 nt, Human
uccuuucacuucu

SEQ ID NO: 1975428 - RNA, 16 nt, Human
uccuuucacuucuuuc

SEQ ID NO: 1975429 - RNA, 18 nt, Human
uccuuucacuucuuuccc

SEQ ID NO: 1975430 - RNA, 20 nt, Human
uccuuucaguggcuuggacu

SEQ ID NO: 1975431 - RNA, 14 nt, Human
ucgaacuggcugca

SEQ ID NO: 1975432 - RNA, 13 nt, Human
ucgaacuggcugc

SEQ ID NO: 1975433 - RNA, 15 nt, Human
ucgaacuggcugcaa

SEQ ID NO: 1975434 - RNA, 13 nt, Human
acugcagucacug

SEQ ID NO: 1975435 - RNA, 19 nt, Human
acugcuauuuuccuguucu

SEQ ID NO: 1975436 - RNA, 19 nt, Human
acugcuagucuuaagaacu

SEQ ID NO: 1975437 - RNA, 12 nt, Human
acugcucugaug

SEQ ID NO: 1975438 - RNA, 22 nt, Human
acugcucuugggcaauauucuc

SEQ ID NO: 1975439 - RNA, 19 nt, Human
acugcucuugggcaauauu

SEQ ID NO: 1975440 - RNA, 23 nt, Human
acugcuuccagugaggcucugcc

SEQ ID NO: 1975441 - RNA, 22 nt, Human
acugcuuccagugaggcucugc

SEQ ID NO: 1975442 - RNA, 21 nt, Human
acugcuuccagugaggcucug

SEQ ID NO: 1975443 - RNA, 18 nt, Human
acugcuuccagugaggcu

SEQ ID NO: 1975444 - RNA, 21 nt, Human
acugcugcccagccuccaagc

SEQ ID NO: 1975445 - RNA, 16 nt, Human
acugcugcccagccuc

SEQ ID NO: 1975446 - RNA, 18 nt, Human
acugcugcccagccucca

SEQ ID NO: 1975447 - RNA, 12 nt, Human
acugcuggcugc

SEQ ID NO: 1975448 - RNA, 20 nt, Human
acugcugcuucauguuugcc

SEQ ID NO: 1975449 - RNA, 15 nt, Human
acuggauuauucagg

SEQ ID NO: 1975450 - RNA, 22 nt, Human
acuggauuaaacuuaaucuaaa

SEQ ID NO: 1975451 - RNA, 13 nt, Human
acugcuggcugcc

SEQ ID NO: 1975452 - RNA, 17 nt, Human
acugcuuccuauaauuu

SEQ ID NO: 1975453 - RNA, 18 nt, Human
acugcuuccuauaauuuu

SEQ ID NO: 1975454 - RNA, 21 nt, Human
acugcuuccuauaauuuugau

SEQ ID NO: 1975455 - RNA, 22 nt, Human
acugcuuccuauaauuuugaua

SEQ ID NO: 1975456 - RNA, 13 nt, Human
acugcuugaauaa

SEQ ID NO: 1975457 - RNA, 17 nt, Human
acugcuuccuuucuuga

SEQ ID NO: 1975458 - RNA, 18 nt, Human
acugcuuccuuucuugau

SEQ ID NO: 1975459 - RNA, 16 nt, Human
uccuuccucugagccu

SEQ ID NO: 1975460 - RNA, 22 nt, Human
uccuuccuaguucaucccuucu

SEQ ID NO: 1975461 - RNA, 17 nt, Human
uccuuccucugagccuu

SEQ ID NO: 1975462 - RNA, 16 nt, Human
uccuuccucugaggcu

SEQ ID NO: 1975463 - RNA, 17 nt, Human
uccuucccuugcuacca

SEQ ID NO: 1975464 - RNA, 13 nt, Human
uccuucagccuga

SEQ ID NO: 1975465 - RNA, 11 nt, Human
uccuucagugc

SEQ ID NO: 1975466 - RNA, 12 nt, Human
uccuucagugcc

SEQ ID NO: 1975467 - RNA, 20 nt, Human
uccuucagugccuuauggaa

SEQ ID NO: 1975468 - RNA, 13 nt, Human
uccuucagugccu

SEQ ID NO: 1975469 - RNA, 22 nt, Human
uccuucagugccuuauggaaca

SEQ ID NO: 1975470 - RNA, 15 nt, Human
uccuucagauauuuu

SEQ ID NO: 1975471 - RNA, 17 nt, Human
uccuucagauauuuuua

SEQ ID NO: 1975472 - RNA, 14 nt, Human
uccuucagauauuu

SEQ ID NO: 1975473 - RNA, 22 nt, Human
acuggcugcaaaggguaucagg

SEQ ID NO: 1975474 - RNA, 23 nt, Human
acuggccucugcugauccuccca

SEQ ID NO: 1975475 - RNA, 16 nt, Human
acuggccucugcugau

SEQ ID NO: 1975476 - RNA, 18 nt, Human
acuggcagggauaacaaa

SEQ ID NO: 1975477 - RNA, 14 nt, Human
acuggcaagaaaag

SEQ ID NO: 1975478 - RNA, 16 nt, Human
acuggcaaugguaguu

SEQ ID NO: 1975479 - RNA, 14 nt, Human
uccccuccaggagu

SEQ ID NO: 1975480 - RNA, 18 nt, Human
uccccucagaaggucugu

SEQ ID NO: 1975481 - RNA, 15 nt, Human
ucccgaauagcuggg

SEQ ID NO: 1975482 - RNA, 16 nt, Human
ucccgaauagcuggga

SEQ ID NO: 1975483 - RNA, 14 nt, Human
uccccuugcagccg

SEQ ID NO: 1975484 - RNA, 14 nt, Human
uccccuugccagcu

SEQ ID NO: 1975485 - RNA, 15 nt, Human
uccccuugccagcug

SEQ ID NO: 1975486 - RNA, 16 nt, Human
uccccuugccagcugc

SEQ ID NO: 1975487 - RNA, 17 nt, Human
uccccuugccagcugcu

SEQ ID NO: 1975488 - RNA, 22 nt, Human
uccccuugccagcugcugagcc

SEQ ID NO: 1975489 - RNA, 18 nt, Human
ucccgcccaaaccuuucc

SEQ ID NO: 1975490 - RNA, 20 nt, Human
ucccgaguagcugggacuac

SEQ ID NO: 1975491 - RNA, 18 nt, Human
ucccgaauagcugggacu

SEQ ID NO: 1975492 - RNA, 13 nt, Human
ucccgcucagccc

SEQ ID NO: 1975493 - RNA, 19 nt, Human
ucccgcccaaaccuuuccc

SEQ ID NO: 1975494 - RNA, 20 nt, Human
ucccgcccaaaccuuucccc

SEQ ID NO: 1975495 - RNA, 15 nt, Human
ucccgccuccaaccc

SEQ ID NO: 1975496 - RNA, 21 nt, Human
ucccgccuccaaccccucgcc

SEQ ID NO: 1975497 - RNA, 14 nt, Human
ucccgcucagcccu

SEQ ID NO: 1975498 - RNA, 15 nt, Human
ucccgcucagcccuc

SEQ ID NO: 1975499 - RNA, 16 nt, Human
ucccgcucagcccucc

SEQ ID NO: 1975500 - RNA, 20 nt, Human
ucccgcucagcccucccugc

SEQ ID NO: 1975501 - RNA, 18 nt, Human
ucccuauuagagaagaga

SEQ ID NO: 1975502 - RNA, 19 nt, Human
acuauguugcccaggcagg

SEQ ID NO: 1975503 - RNA, 20 nt, Human
acuauguugcccaggcaggu

SEQ ID NO: 1975504 - RNA, 23 nt, Human
acuauguugcccaggcaggucuu

SEQ ID NO: 1975505 - RNA, 22 nt, Human
acuauguuuuaucguccaguga

SEQ ID NO: 1975506 - RNA, 15 nt, Human
acucaaccaaauggu

SEQ ID NO: 1975507 - RNA, 16 nt, Human
acucaaccaaauggua

SEQ ID NO: 1975508 - RNA, 21 nt, Human
acucaaccaaaugguacaaaa

SEQ ID NO: 1975509 - RNA, 22 nt, Human
acuaugaaguuuuuuuuauaca

SEQ ID NO: 1975510 - RNA, 13 nt, Human
acuaucuucaucu

SEQ ID NO: 1975511 - RNA, 18 nt, Human
acuauguugcccaggcag

SEQ ID NO: 1975512 - RNA, 22 nt, Human
acuaucaugucaaacgugaaaa

SEQ ID NO: 1975513 - RNA, 16 nt, Human
acuaucccggcugccc

SEQ ID NO: 1975514 - RNA, 17 nt, Human
acuaucccggcugcccu

SEQ ID NO: 1975515 - RNA, 18 nt, Human
acuaucccggcugcccuu

SEQ ID NO: 1975516 - RNA, 22 nt, Human
acuaucuuaucucagauauuug

SEQ ID NO: 1975517 - RNA, 24 nt, Human
uccccaccgcagacaggaccaggg

SEQ ID NO: 1975518 - RNA, 23 nt, Human
uccccaauaucuugcuugaacuu

SEQ ID NO: 1975519 - RNA, 16 nt, Human
uccccaggcaccucac

SEQ ID NO: 1975520 - RNA, 23 nt, Human
uccccaggaggccagccuugacc

SEQ ID NO: 1975521 - RNA, 23 nt, Human
acuauaauuuaccugaagucuuu

SEQ ID NO: 1975522 - RNA, 17 nt, Human
acuauagccuaggugac

SEQ ID NO: 1975523 - RNA, 14 nt, Human
acguuucuaaaggc

SEQ ID NO: 1975524 - RNA, 19 nt, Human
acguuuuaaggacugacug

SEQ ID NO: 1975525 - RNA, 13 nt, Human
acuaaaaauacaa

SEQ ID NO: 1975526 - RNA, 24 nt, Human
uccagccugggugacagagcaagu

SEQ ID NO: 1975527 - RNA, 13 nt, Human
uccagccugggug

SEQ ID NO: 1975528 - RNA, 12 nt, Human
acguuucuaaag

SEQ ID NO: 1975529 - RNA, 15 nt, Human
uccagcucaccagcc

SEQ ID NO: 1975530 - RNA, 14 nt, Human
uccagcucaccagc

SEQ ID NO: 1975531 - RNA, 22 nt, Human
acuaaacucugaauaagcacuu

SEQ ID NO: 1975532 - RNA, 21 nt, Human
acuaaacucugaauaagcacu

SEQ ID NO: 1975533 - RNA, 15 nt, Human
acuaaaguuguacuu

SEQ ID NO: 1975534 - RNA, 20 nt, Human
acuaaaguuguacuuuaaaa

SEQ ID NO: 1975535 - RNA, 20 nt, Human
acuaaaauaauuuuguaaug

SEQ ID NO: 1975536 - RNA, 14 nt, Human
acuaaaauguucua

SEQ ID NO: 1975537 - RNA, 15 nt, Human
acuaaaauaauuuug

SEQ ID NO: 1975538 - RNA, 16 nt, Human
acuaaaauaauuuugu

SEQ ID NO: 1975539 - RNA, 17 nt, Human
acuaaaauaauuuugua

SEQ ID NO: 1975540 - RNA, 19 nt, Human
acuaaaauaauuuuguaau

SEQ ID NO: 1975541 - RNA, 14 nt, Human
acuaaaauaauuuu

SEQ ID NO: 1975542 - RNA, 16 nt, Human
acuaaccagcagaaau

SEQ ID NO: 1975543 - RNA, 13 nt, Human
acuaaccacgcug

SEQ ID NO: 1975544 - RNA, 22 nt, Human
acuaaaguuguacuuuaaaaau

SEQ ID NO: 1975545 - RNA, 15 nt, Human
acuacaguccuccca

SEQ ID NO: 1975546 - RNA, 17 nt, Human
acuaaccagcagaaaug

SEQ ID NO: 1975547 - RNA, 23 nt, Human
acuacaggugugagucaccaagc

SEQ ID NO: 1975548 - RNA, 16 nt, Human
acuacauauugaauag

SEQ ID NO: 1975549 - RNA, 16 nt, Human
acuacaguccucccau

SEQ ID NO: 1975550 - RNA, 17 nt, Human
acuacaguccucccauc

SEQ ID NO: 1975551 - RNA, 22 nt, Human
ucccagugccgagaaggaagcc

SEQ ID NO: 1975552 - RNA, 19 nt, Human
ucccagugccgagaaggaa

SEQ ID NO: 1975553 - RNA, 19 nt, Human
ucccaucucacacaugagc

SEQ ID NO: 1975554 - RNA, 14 nt, Human
ucccaucucacaca

SEQ ID NO: 1975555 - RNA, 13 nt, Human
ucccaucucacac

SEQ ID NO: 1975556 - RNA, 15 nt, Human
ucccauaugccuggg

SEQ ID NO: 1975557 - RNA, 16 nt, Human
ucccauaugccugggc

SEQ ID NO: 1975558 - RNA, 20 nt, Human
ucccauaucaaaagacacag

SEQ ID NO: 1975559 - RNA, 21 nt, Human
uccccaaggcccccugccugc

SEQ ID NO: 1975560 - RNA, 23 nt, Human
uccccaaggcccccugccugccc

SEQ ID NO: 1975561 - RNA, 19 nt, Human
uccccaaggcccccugccu

SEQ ID NO: 1975562 - RNA, 20 nt, Human
uccccaaggcccccugccug

SEQ ID NO: 1975563 - RNA, 15 nt, Human
uccccaagccuggca

SEQ ID NO: 1975564 - RNA, 22 nt, Human
ucccuuacgugaguccuggcau

SEQ ID NO: 1975565 - RNA, 18 nt, Human
ucccuuacgugaguccug

SEQ ID NO: 1975566 - RNA, 11 nt, Human
ucccuucaacc

SEQ ID NO: 1975567 - RNA, 15 nt, Human
ucccuuaucccugcu

SEQ ID NO: 1975568 - RNA, 21 nt, Human
ucccuucaaccauuccccaug

SEQ ID NO: 1975569 - RNA, 22 nt, Human
ucccuuuccaaaugcccagcuu

SEQ ID NO: 1975570 - RNA, 20 nt, Human
ucccuuuagcuguguuauua

SEQ ID NO: 1975571 - RNA, 17 nt, Human
ucccuuucauuugcuau

SEQ ID NO: 1975572 - RNA, 17 nt, Human
ucccuuuagcuguguua

SEQ ID NO: 1975573 - RNA, 18 nt, Human
ucccuuuagcuguguuau

SEQ ID NO: 1975574 - RNA, 20 nt, Human
ucccuguaauuguuguuugu

SEQ ID NO: 1975575 - RNA, 21 nt, Human
ucccuguaauuguuguuugua

SEQ ID NO: 1975576 - RNA, 23 nt, Human
acuccugcacacgcuccuuccuc

SEQ ID NO: 1975577 - RNA, 14 nt, Human
ucccugguucaagc

SEQ ID NO: 1975578 - RNA, 18 nt, Human
ucccugguucaagcgauu

SEQ ID NO: 1975579 - RNA, 14 nt, Human
uccgucacuaccug

SEQ ID NO: 1975580 - RNA, 15 nt, Human
uccgucacuaccugg

SEQ ID NO: 1975581 - RNA, 16 nt, Human
uccgucacuaccuggc

SEQ ID NO: 1975582 - RNA, 17 nt, Human
uccgucacuaccuggcu

SEQ ID NO: 1975583 - RNA, 18 nt, Human
uccgucacuaccuggcug

SEQ ID NO: 1975584 - RNA, 23 nt, Human
ucccuuugacgccaucccagccc

SEQ ID NO: 1975585 - RNA, 22 nt, Human
ucccuuugacgccaucccagcc

SEQ ID NO: 1975586 - RNA, 13 nt, Human
uccuaaaaggccc

SEQ ID NO: 1975587 - RNA, 15 nt, Human
uccuaaaaggcccag

SEQ ID NO: 1975588 - RNA, 16 nt, Human
uccuaaaaggcccaga

SEQ ID NO: 1975589 - RNA, 18 nt, Human
uccuaaaaggcccagaga

SEQ ID NO: 1975590 - RNA, 21 nt, Human
uccuaaaaggcccagagagaa

SEQ ID NO: 1975591 - RNA, 20 nt, Human
uccguuugauuugucacugc

SEQ ID NO: 1975592 - RNA, 21 nt, Human
uccguuugauuugucacugcu

SEQ ID NO: 1975593 - RNA, 14 nt, Human
uccuaggcauuugc

SEQ ID NO: 1975594 - RNA, 20 nt, Human
uccuagcacuuugggaggcc

SEQ ID NO: 1975595 - RNA, 15 nt, Human
acuccaacauccacu

SEQ ID NO: 1975596 - RNA, 16 nt, Human
acuccaacauccacuc

SEQ ID NO: 1975597 - RNA, 17 nt, Human
acuccaacauccacucu

SEQ ID NO: 1975598 - RNA, 18 nt, Human
acuccaacauccacucuc

SEQ ID NO: 1975599 - RNA, 19 nt, Human
acuccaacauccacucucu

SEQ ID NO: 1975600 - RNA, 20 nt, Human
acuccagcuggguuggaaaa

SEQ ID NO: 1975601 - RNA, 14 nt, Human
acuccuaccuggua

SEQ ID NO: 1975602 - RNA, 23 nt, Human
acuccaguagcgagagacggcac

SEQ ID NO: 1975603 - RNA, 20 nt, Human
acucauugcaucauuuacaa

SEQ ID NO: 1975604 - RNA, 17 nt, Human
acucaugcaugcaaauu

SEQ ID NO: 1975605 - RNA, 18 nt, Human
acucaucuagguaaauua

SEQ ID NO: 1975606 - RNA, 16 nt, Human
acucaucuagguaaau

SEQ ID NO: 1975607 - RNA, 23 nt, Human
ucccucauuccaccuucccaugc

SEQ ID NO: 1975608 - RNA, 21 nt, Human
ucccucagucuggcccuuccu

SEQ ID NO: 1975609 - RNA, 22 nt, Human
ucccucauccucauacccaccc

SEQ ID NO: 1975610 - RNA, 18 nt, Human
acucgcgacaaugcaaac

SEQ ID NO: 1975611 - RNA, 23 nt, Human
uccuagggcauuguaucugucuu

SEQ ID NO: 1975612 - RNA, 19 nt, Human
uccuaggcauuugcugaau

SEQ ID NO: 1975613 - RNA, 23 nt, Human
acucgcgacaaugcaaaccauca

SEQ ID NO: 1975614 - RNA, 20 nt, Human
acucgcgacaaugcaaacca

SEQ ID NO: 1975615 - RNA, 17 nt, Human
acucuccucugcugcug

SEQ ID NO: 1975616 - RNA, 14 nt, Human
acucggugucccca

SEQ ID NO: 1975617 - RNA, 18 nt, Human
acucgguguccccaccau

SEQ ID NO: 1975618 - RNA, 22 nt, Human
acucgguguccccaccaucugc

SEQ ID NO: 1975619 - RNA, 23 nt, Human
acucgguguccccaccaucugcu

SEQ ID NO: 1975620 - RNA, 19 nt, Human
acucuccucugcugcuggc

SEQ ID NO: 1975621 - RNA, 18 nt, Human
acucuccucugcugcugg

SEQ ID NO: 1975622 - RNA, 21 nt, Human
acucuccucugcugcuggcug

SEQ ID NO: 1975623 - RNA, 19 nt, Human
acucugaauuuaucuuuga

SEQ ID NO: 1975624 - RNA, 17 nt, Human
acucugaauuuaucuuu

SEQ ID NO: 1975625 - RNA, 18 nt, Human
acucugaauuuaucuuug

SEQ ID NO: 1975626 - RNA, 20 nt, Human
acucugaauaagcacuuuuu

SEQ ID NO: 1975627 - RNA, 22 nt, Human
acucugaauaagcacuuuuuaa

SEQ ID NO: 1975628 - RNA, 23 nt, Human
acucugaauaagcacuuuuuaaa

SEQ ID NO: 1975629 - RNA, 15 nt, Human
acucugaauuuaucu

SEQ ID NO: 1975630 - RNA, 21 nt, Human
acucuggagguuuguuuagaa

SEQ ID NO: 1975631 - RNA, 14 nt, Human
acucuggacuuucu

SEQ ID NO: 1975632 - RNA, 16 nt, Human
acucuggacuuucucu

SEQ ID NO: 1975633 - RNA, 17 nt, Human
acucuggacuuucucua

SEQ ID NO: 1975634 - RNA, 21 nt, Human
acucuggacuuucucuaauaa

SEQ ID NO: 1975635 - RNA, 22 nt, Human
acucuggacuuucucuaauaau

SEQ ID NO: 1975636 - RNA, 23 nt, Human
acucuggacuuucucuaauaaua

SEQ ID NO: 1975637 - RNA, 22 nt, Human
acucuuauaucuauauuuuaca

SEQ ID NO: 1975638 - RNA, 23 nt, Human
acucuuauaucuauauuuuacau

SEQ ID NO: 1975639 - RNA, 17 nt, Human
acucuggaaaaggcaua

SEQ ID NO: 1975640 - RNA, 12 nt, Human
acucuggaaaag

SEQ ID NO: 1975641 - RNA, 13 nt, Human
acucugcagacug

SEQ ID NO: 1975642 - RNA, 18 nt, Human
uccucauacccaccccca

SEQ ID NO: 1975643 - RNA, 14 nt, Human
uccucauacccacc

SEQ ID NO: 1975644 - RNA, 22 nt, Human
uccucauacccacccccaccca

SEQ ID NO: 1975645 - RNA, 16 nt, Human
uccuccccuccuccug

SEQ ID NO: 1975646 - RNA, 18 nt, Human
uccuccccuccuccugga

SEQ ID NO: 1975647 - RNA, 20 nt, Human
uccuccccuccuccuggacu

SEQ ID NO: 1975648 - RNA, 22 nt, Human
uccuccccuccuccuggacucc

SEQ ID NO: 1975649 - RNA, 14 nt, Human
uccuccccuggacu

SEQ ID NO: 1975650 - RNA, 15 nt, Human
uccuccccuggacuc

SEQ ID NO: 1975651 - RNA, 12 nt, Human
uccucuccacug

SEQ ID NO: 1975652 - RNA, 13 nt, Human
uccucuccacugc

SEQ ID NO: 1975653 - RNA, 14 nt, Human
uccucuccacugcc

SEQ ID NO: 1975654 - RNA, 12 nt, Human
uccucuccccag

SEQ ID NO: 1975655 - RNA, 15 nt, Human
uccucuccacugccu

SEQ ID NO: 1975656 - RNA, 16 nt, Human
uccucuccacugccuu

SEQ ID NO: 1975657 - RNA, 15 nt, Human
uccucccucccucuu

SEQ ID NO: 1975658 - RNA, 17 nt, Human
uccucccucccucuuuc

SEQ ID NO: 1975659 - RNA, 19 nt, Human
uccucccucccucuuuccc

SEQ ID NO: 1975660 - RNA, 20 nt, Human
uccucacaggugucuccaua

SEQ ID NO: 1975661 - RNA, 16 nt, Human
acucuuauugcccacg

SEQ ID NO: 1975662 - RNA, 19 nt, Human
acucuuauugcccacgcug

SEQ ID NO: 1975663 - RNA, 17 nt, Human
uccucaaaaugggagau

SEQ ID NO: 1975664 - RNA, 20 nt, Human
uccucagaucuucugugggu

SEQ ID NO: 1975665 - RNA, 16 nt, Human
uauggcuuuugugcau

SEQ ID NO: 1975666 - RNA, 21 nt, Human
uauggcuuuauuuuuuugaac

SEQ ID NO: 1975667 - RNA, 21 nt, Human
uauggcugcauaguauuccau

SEQ ID NO: 1975668 - RNA, 17 nt, Human
uauggggauagaugugu

SEQ ID NO: 1975669 - RNA, 18 nt, Human
uauggggauagaugugug

SEQ ID NO: 1975670 - RNA, 19 nt, Human
uauggggauagaugugugg

SEQ ID NO: 1975671 - RNA, 14 nt, Human
acagccuggcacag

SEQ ID NO: 1975672 - RNA, 15 nt, Human
acagccuggcacagg

SEQ ID NO: 1975673 - RNA, 15 nt, Human
acagcuaacauggaa

SEQ ID NO: 1975674 - RNA, 14 nt, Human
acagcuaacaugga

SEQ ID NO: 1975675 - RNA, 20 nt, Human
acagccuggucgccuuccac

SEQ ID NO: 1975676 - RNA, 21 nt, Human
acagccuggucgccuuccacc

SEQ ID NO: 1975677 - RNA, 15 nt, Human
acagcuccaagaauu

SEQ ID NO: 1975678 - RNA, 17 nt, Human
acagcuaacauggaagu

SEQ ID NO: 1975679 - RNA, 20 nt, Human
acagcuaaucagcauucuca

SEQ ID NO: 1975680 - RNA, 19 nt, Human
uaugauguuaguuuuccuu

SEQ ID NO: 1975681 - RNA, 18 nt, Human
uaugcucugcauguuaca

SEQ ID NO: 1975682 - RNA, 14 nt, Human
uaugcucugcaugu

SEQ ID NO: 1975683 - RNA, 20 nt, Human
uaugauguuaguuuuccuua

SEQ ID NO: 1975684 - RNA, 12 nt, Human
uaugauuaaaaa

SEQ ID NO: 1975685 - RNA, 14 nt, Human
uaugauuaaaaaua

SEQ ID NO: 1975686 - RNA, 21 nt, Human
uaugaugacguacaaguaguu

SEQ ID NO: 1975687 - RNA, 14 nt, Human
uauggccuguggau

SEQ ID NO: 1975688 - RNA, 22 nt, Human
uauggccugugagcuaggaauu

SEQ ID NO: 1975689 - RNA, 23 nt, Human
uaugauuaaaaauaucaaauuaa

SEQ ID NO: 1975690 - RNA, 17 nt, Human
uaugauuaaaaauauca

SEQ ID NO: 1975691 - RNA, 21 nt, Human
uaugauuaaaaauaucaaauu

SEQ ID NO: 1975692 - RNA, 19 nt, Human
uaugcucugcauguuacau

SEQ ID NO: 1975693 - RNA, 15 nt, Human
uaucuugaagacuuu

SEQ ID NO: 1975694 - RNA, 15 nt, Human
uaucuugaauaaugu

SEQ ID NO: 1975695 - RNA, 14 nt, Human
uaucuugaaggaaa

SEQ ID NO: 1975696 - RNA, 17 nt, Human
uaucuugaaggaaaaau

SEQ ID NO: 1975697 - RNA, 13 nt, Human
uaucuugcuugaa

SEQ ID NO: 1975698 - RNA, 20 nt, Human
uaucuugcuugaacuuacag

SEQ ID NO: 1975699 - RNA, 13 nt, Human
uaugaggcauuug

SEQ ID NO: 1975700 - RNA, 21 nt, Human
uaugaucacggcucacugcag

SEQ ID NO: 1975701 - RNA, 23 nt, Human
uaugaucacggcucacugcagcc

SEQ ID NO: 1975702 - RNA, 13 nt, Human
uaugauaaauuug

SEQ ID NO: 1975703 - RNA, 14 nt, Human
uaugaucacggcuc

SEQ ID NO: 1975704 - RNA, 18 nt, Human
acagcagccccugcacaa

SEQ ID NO: 1975705 - RNA, 20 nt, Human
acagaguuuucacucuuauu

SEQ ID NO: 1975706 - RNA, 17 nt, Human
acagauaaagauugugu

SEQ ID NO: 1975707 - RNA, 14 nt, Human
acagauaaaugauu

SEQ ID NO: 1975708 - RNA, 13 nt, Human
acagauaaagauu

SEQ ID NO: 1975709 - RNA, 18 nt, Human
acagaguuuucacucuua

SEQ ID NO: 1975710 - RNA, 13 nt, Human
acagcccaccugg

SEQ ID NO: 1975711 - RNA, 13 nt, Human
acagacuucugaa

SEQ ID NO: 1975712 - RNA, 14 nt, Human
acagacuucugaaa

SEQ ID NO: 1975713 - RNA, 12 nt, Human
acagacuuguau

SEQ ID NO: 1975714 - RNA, 20 nt, Human
acagacuggauguaccacca

SEQ ID NO: 1975715 - RNA, 20 nt, Human
acagacuuuagcuuucugag

SEQ ID NO: 1975716 - RNA, 14 nt, Human
acagacuuguauau

SEQ ID NO: 1975717 - RNA, 16 nt, Human
acagacuuuagcuuuc

SEQ ID NO: 1975718 - RNA, 17 nt, Human
acagacuuuagcuuucu

SEQ ID NO: 1975719 - RNA, 19 nt, Human
acagacuuuagcuuucuga

SEQ ID NO: 1975720 - RNA, 19 nt, Human
acagagagagauacucugg

SEQ ID NO: 1975721 - RNA, 20 nt, Human
acagagagagauacucuggg

SEQ ID NO: 1975722 - RNA, 20 nt, Human
acagagcccacgcccccacu

SEQ ID NO: 1975723 - RNA, 17 nt, Human
acagagccguaaaaacu

SEQ ID NO: 1975724 - RNA, 16 nt, Human
acagagcuacacaggg

SEQ ID NO: 1975725 - RNA, 12 nt, Human
acagagccugcc

SEQ ID NO: 1975726 - RNA, 15 nt, Human
acagagccugcccca

SEQ ID NO: 1975727 - RNA, 19 nt, Human
acagagccugccccagcgc

SEQ ID NO: 1975728 - RNA, 16 nt, Human
acagagcgacagagca

SEQ ID NO: 1975729 - RNA, 17 nt, Human
acagagcgacagagcag

SEQ ID NO: 1975730 - RNA, 22 nt, Human
acagaguggacuguucccugag

SEQ ID NO: 1975731 - RNA, 22 nt, Human
acagagugccaacuucuuucau

SEQ ID NO: 1975732 - RNA, 16 nt, Human
acagagugcuuuucug

SEQ ID NO: 1975733 - RNA, 18 nt, Human
acagagcuacacagggga

SEQ ID NO: 1975734 - RNA, 21 nt, Human
acagagugagacucugucuca

SEQ ID NO: 1975735 - RNA, 10 nt, Human
uaucagaauu

SEQ ID NO: 1975736 - RNA, 13 nt, Human
uaucuacuugugu

SEQ ID NO: 1975737 - RNA, 15 nt, Human
uaucuagauacugua

SEQ ID NO: 1975738 - RNA, 16 nt, Human
uaucuagauacuguau

SEQ ID NO: 1975739 - RNA, 19 nt, Human
uaucuagauacuguaucau

SEQ ID NO: 1975740 - RNA, 13 nt, Human
uaucuagauguaa

SEQ ID NO: 1975741 - RNA, 15 nt, Human
uaucuagauguaaau

SEQ ID NO: 1975742 - RNA, 17 nt, Human
uaucuagauguaaauuu

SEQ ID NO: 1975743 - RNA, 13 nt, Human
uaucuagcugcau

SEQ ID NO: 1975744 - RNA, 18 nt, Human
uaucuagcugcauaucuu

SEQ ID NO: 1975745 - RNA, 14 nt, Human
uaucuaguaauaua

SEQ ID NO: 1975746 - RNA, 17 nt, Human
uaucucccccagcccca

SEQ ID NO: 1975747 - RNA, 23 nt, Human
uaucuaguaauauauuuaaaggg

SEQ ID NO: 1975748 - RNA, 15 nt, Human
uaucuaguguuugau

SEQ ID NO: 1975749 - RNA, 16 nt, Human
uaucuaguguuugauu

SEQ ID NO: 1975750 - RNA, 18 nt, Human
uaucucccccagccccau

SEQ ID NO: 1975751 - RNA, 16 nt, Human
uauauugauccagaaa

SEQ ID NO: 1975752 - RNA, 14 nt, Human
acagacuggaagca

SEQ ID NO: 1975753 - RNA, 20 nt, Human
acagacucaaaugcucagac

SEQ ID NO: 1975754 - RNA, 20 nt, Human
acagacccugcccugugggc

SEQ ID NO: 1975755 - RNA, 18 nt, Human
acagacccugcccugugg

SEQ ID NO: 1975756 - RNA, 16 nt, Human
acagacccugcccugu

SEQ ID NO: 1975757 - RNA, 17 nt, Human
acagacccugcccugug

SEQ ID NO: 1975758 - RNA, 21 nt, Human
acagacacucccacuuggcau

SEQ ID NO: 1975759 - RNA, 13 nt, Human
acagacagcccuc

SEQ ID NO: 1975760 - RNA, 15 nt, Human
acagacagcccucca

SEQ ID NO: 1975761 - RNA, 11 nt, Human
acacuccuuca

SEQ ID NO: 1975762 - RNA, 23 nt, Human
acagacacaggcccggcuccagg

SEQ ID NO: 1975763 - RNA, 18 nt, Human
uaucacccagaagaaaau

SEQ ID NO: 1975764 - RNA, 18 nt, Human
uaucaaguauuauaccuu

SEQ ID NO: 1975765 - RNA, 18 nt, Human
uauauuuacaacacuuua

SEQ ID NO: 1975766 - RNA, 21 nt, Human
uaucaaguauuauaccuuuuu

SEQ ID NO: 1975767 - RNA, 15 nt, Human
uauauuuacaaaugg

SEQ ID NO: 1975768 - RNA, 14 nt, Human
uauauuuacaaaug

SEQ ID NO: 1975769 - RNA, 19 nt, Human
uauauugcacaauuauaaa

SEQ ID NO: 1975770 - RNA, 15 nt, Human
uauauugguuuuaug

SEQ ID NO: 1975771 - RNA, 16 nt, Human
uauauugguuuuauga

SEQ ID NO: 1975772 - RNA, 17 nt, Human
uauauugguuuuaugau

SEQ ID NO: 1975773 - RNA, 19 nt, Human
uauauugguuuuaugauga

SEQ ID NO: 1975774 - RNA, 20 nt, Human
uauaaccaguguuguggauu

SEQ ID NO: 1975775 - RNA, 22 nt, Human
uauaagagcuuccaauuuuccu

SEQ ID NO: 1975776 - RNA, 18 nt, Human
uauaagccaaaauuaagg

SEQ ID NO: 1975777 - RNA, 19 nt, Human
uauaagccaaaauuaaggu

SEQ ID NO: 1975778 - RNA, 21 nt, Human
uauaagccaaaauuaaggugu

SEQ ID NO: 1975779 - RNA, 22 nt, Human
uauaagccaaaauuaagguguu

SEQ ID NO: 1975780 - RNA, 23 nt, Human
uauaagccaaaauuaagguguuu

SEQ ID NO: 1975781 - RNA, 21 nt, Human
uauaagcccuugauuggaagg

SEQ ID NO: 1975782 - RNA, 21 nt, Human
uauaauuuaccugaagucuuu

SEQ ID NO: 1975783 - RNA, 20 nt, Human
acaccucaacuaaauccaaa

SEQ ID NO: 1975784 - RNA, 14 nt, Human
uauaauuuugauag

SEQ ID NO: 1975785 - RNA, 15 nt, Human
uauaauuuugauagu

SEQ ID NO: 1975786 - RNA, 21 nt, Human
uauacacuuacacuuuaugca

SEQ ID NO: 1975787 - RNA, 13 nt, Human
uauacauaaacaa

SEQ ID NO: 1975788 - RNA, 14 nt, Human
uauacauaaacaag

SEQ ID NO: 1975789 - RNA, 14 nt, Human
uauacauuugauaa

SEQ ID NO: 1975790 - RNA, 20 nt, Human
uauacauguuuauguaaaca

SEQ ID NO: 1975791 - RNA, 13 nt, Human
uauaccauuuccg

SEQ ID NO: 1975792 - RNA, 17 nt, Human
uauaccauuuccguaau

SEQ ID NO: 1975793 - RNA, 21 nt, Human
uauauauuuuuuucugaaauu

SEQ ID NO: 1975794 - RNA, 22 nt, Human
uauauauuuuuuucugaaauuu

SEQ ID NO: 1975795 - RNA, 20 nt, Human
uauauauuuuuuucugaaau

SEQ ID NO: 1975796 - RNA, 13 nt, Human
uauauauaugugu

SEQ ID NO: 1975797 - RNA, 23 nt, Human
uauauauuuuuuucugaaauuuc

SEQ ID NO: 1975798 - RNA, 15 nt, Human
uauaucagacugcuu

SEQ ID NO: 1975799 - RNA, 21 nt, Human
uauaucagacugcuuugagaa

SEQ ID NO: 1975800 - RNA, 13 nt, Human
uauauaucaaaua

SEQ ID NO: 1975801 - RNA, 13 nt, Human
uauauauauaucu

SEQ ID NO: 1975802 - RNA, 13 nt, Human
uauauauaucugu

SEQ ID NO: 1975803 - RNA, 13 nt, Human
uauauauaugcau

SEQ ID NO: 1975804 - RNA, 14 nt, Human
uauauauaugcaua

SEQ ID NO: 1975805 - RNA, 15 nt, Human
uauauauaugcauau

SEQ ID NO: 1975806 - RNA, 23 nt, Human
acacucauugaccugaggcccuu

SEQ ID NO: 1975807 - RNA, 21 nt, Human
acacucauugaccugaggccc

SEQ ID NO: 1975808 - RNA, 11 nt, Human
acacuccaacg

SEQ ID NO: 1975809 - RNA, 19 nt, Human
acacucauugaccugaggc

SEQ ID NO: 1975810 - RNA, 16 nt, Human
uauaucccugauaaau

SEQ ID NO: 1975811 - RNA, 19 nt, Human
uauaucccugauaaauauu

SEQ ID NO: 1975812 - RNA, 16 nt, Human
uauaucauucuaaaga

SEQ ID NO: 1975813 - RNA, 17 nt, Human
uauaucauucuaaagau

SEQ ID NO: 1975814 - RNA, 13 nt, Human
uauaggaauugac

SEQ ID NO: 1975815 - RNA, 14 nt, Human
uauaggaauugacc

SEQ ID NO: 1975816 - RNA, 19 nt, Human
uauaggaauugacccacaa

SEQ ID NO: 1975817 - RNA, 20 nt, Human
uauagccuaggugacagagu

SEQ ID NO: 1975818 - RNA, 20 nt, Human
uaguuccucauuagcauuuu

SEQ ID NO: 1975819 - RNA, 14 nt, Human
uaguuacuguaaaa

SEQ ID NO: 1975820 - RNA, 20 nt, Human
uaguuacuguaaaaugcaaa

SEQ ID NO: 1975821 - RNA, 11 nt, Human
uagugacuuuu

SEQ ID NO: 1975822 - RNA, 19 nt, Human
uagugacuuuucaaguauu

SEQ ID NO: 1975823 - RNA, 12 nt, Human
uaguucuguauu

SEQ ID NO: 1975824 - RNA, 14 nt, Human
uaguucuguauuug

SEQ ID NO: 1975825 - RNA, 15 nt, Human
uaguucuguauuuga

SEQ ID NO: 1975826 - RNA, 9 nt, Human
uaguucugu

SEQ ID NO: 1975827 - RNA, 16 nt, Human
uaguucuguauuugaa

SEQ ID NO: 1975828 - RNA, 23 nt, Human
uaguucuagugcagcugaaauug

SEQ ID NO: 1975829 - RNA, 22 nt, Human
uaguucuagugcagcugaaauu

SEQ ID NO: 1975830 - RNA, 21 nt, Human
uagucagcgcaggaaugcaca

SEQ ID NO: 1975831 - RNA, 17 nt, Human
uagucauuuucaagacu

SEQ ID NO: 1975832 - RNA, 23 nt, Human
acaagcugcacccucaggcaggu

SEQ ID NO: 1975833 - RNA, 22 nt, Human
acaagcugcacccucaggcagg

SEQ ID NO: 1975834 - RNA, 21 nt, Human
acaagcugcacccucaggcag

SEQ ID NO: 1975835 - RNA, 19 nt, Human
acaagcugcacccucaggc

SEQ ID NO: 1975836 - RNA, 21 nt, Human
uagucaggugccucaagagaa

SEQ ID NO: 1975837 - RNA, 14 nt, Human
acaaggaagaaauu

SEQ ID NO: 1975838 - RNA, 19 nt, Human
acaaggaagaaauuaacuu

SEQ ID NO: 1975839 - RNA, 23 nt, Human
acaagcuauucccucaaaucuga

SEQ ID NO: 1975840 - RNA, 13 nt, Human
acaagcuggcuua

SEQ ID NO: 1975841 - RNA, 19 nt, Human
acaagcuggcuuacacugg

SEQ ID NO: 1975842 - RNA, 20 nt, Human
acaagcuguugaccaggcac

SEQ ID NO: 1975843 - RNA, 22 nt, Human
acaagcuguugaccaggcaccu

SEQ ID NO: 1975844 - RNA, 19 nt, Human
acacaugcaaggucauuuu

SEQ ID NO: 1975845 - RNA, 20 nt, Human
acacaugcaaggucauuuuu

SEQ ID NO: 1975846 - RNA, 18 nt, Human
acacaugcaaggucauuu

SEQ ID NO: 1975847 - RNA, 14 nt, Human
acacaucaucugua

SEQ ID NO: 1975848 - RNA, 15 nt, Human
acacaucaucuguaa

SEQ ID NO: 1975849 - RNA, 16 nt, Human
acacaucaucuguaag

SEQ ID NO: 1975850 - RNA, 17 nt, Human
uauaaaagccuguuuaa

SEQ ID NO: 1975851 - RNA, 14 nt, Human
uauaaaagccuguu

SEQ ID NO: 1975852 - RNA, 12 nt, Human
uauaaaagccug

SEQ ID NO: 1975853 - RNA, 13 nt, Human
uaguuuucucagc

SEQ ID NO: 1975854 - RNA, 23 nt, Human
uaguuuuauuuucuaaaguacug

SEQ ID NO: 1975855 - RNA, 14 nt, Human
uaguuuuauuuaua

SEQ ID NO: 1975856 - RNA, 15 nt, Human
uaguuuuauuuauau

SEQ ID NO: 1975857 - RNA, 21 nt, Human
uaguuuuauuuauauuuauug

SEQ ID NO: 1975858 - RNA, 22 nt, Human
uaguuuuauuuauauuuauuga

SEQ ID NO: 1975859 - RNA, 15 nt, Human
uaguuuuauuuucua

SEQ ID NO: 1975860 - RNA, 17 nt, Human
uaguuuuauuuucuaaa

SEQ ID NO: 1975861 - RNA, 19 nt, Human
uaguuuuauuuucuaaagu

SEQ ID NO: 1975862 - RNA, 21 nt, Human
acacaugcaaggucauuuuuu

SEQ ID NO: 1975863 - RNA, 19 nt, Human
acacccagcccacuucugc

SEQ ID NO: 1975864 - RNA, 20 nt, Human
acacccagcccacuucugcc

SEQ ID NO: 1975865 - RNA, 21 nt, Human
acacccagcccacuucugcca

SEQ ID NO: 1975866 - RNA, 18 nt, Human
acacccugugauggggcc

SEQ ID NO: 1975867 - RNA, 12 nt, Human
acacccugugau

SEQ ID NO: 1975868 - RNA, 11 nt, Human
acacccuguga

SEQ ID NO: 1975869 - RNA, 16 nt, Human
acaccgggccuggaga

SEQ ID NO: 1975870 - RNA, 12 nt, Human
uauugacaguug

SEQ ID NO: 1975871 - RNA, 12 nt, Human
uauucuuucucc

SEQ ID NO: 1975872 - RNA, 16 nt, Human
uauucuuucuccuuuu

SEQ ID NO: 1975873 - RNA, 14 nt, Human
uauucuuugcacuu

SEQ ID NO: 1975874 - RNA, 16 nt, Human
uauucuuugcacuuuu

SEQ ID NO: 1975875 - RNA, 22 nt, Human
uauucuuugcacuuuuucuuaa

SEQ ID NO: 1975876 - RNA, 12 nt, Human
uauucuuuguua

SEQ ID NO: 1975877 - RNA, 15 nt, Human
uauucuugaugaaaa

SEQ ID NO: 1975878 - RNA, 19 nt, Human
uauucuugaugaaaagcuu

SEQ ID NO: 1975879 - RNA, 19 nt, Human
uauucuugaucaguaguuu

SEQ ID NO: 1975880 - RNA, 22 nt, Human
uauucuugaucaguaguuugca

SEQ ID NO: 1975881 - RNA, 23 nt, Human
uauucuugaucaguaguuugcau

SEQ ID NO: 1975882 - RNA, 14 nt, Human
uauucuugaugaaa

SEQ ID NO: 1975883 - RNA, 16 nt, Human
uauugaaaugauuuca

SEQ ID NO: 1975884 - RNA, 13 nt, Human
uauucuuuguuaa

SEQ ID NO: 1975885 - RNA, 15 nt, Human
uauucuuuguuaauu

SEQ ID NO: 1975886 - RNA, 17 nt, Human
uauucuuuguuaauuug

SEQ ID NO: 1975887 - RNA, 19 nt, Human
uauucuuuguuaauuugga

SEQ ID NO: 1975888 - RNA, 17 nt, Human
uauucuuuuuuucucua

SEQ ID NO: 1975889 - RNA, 19 nt, Human
uauugaggaaaaauaugug

SEQ ID NO: 1975890 - RNA, 21 nt, Human
uauugaggaaaaauaugugaa

SEQ ID NO: 1975891 - RNA, 22 nt, Human
uauugaggaaaaauaugugaag

SEQ ID NO: 1975892 - RNA, 20 nt, Human
uauugagggaaauguuuuca

SEQ ID NO: 1975893 - RNA, 17 nt, Human
uauugacaguugugcag

SEQ ID NO: 1975894 - RNA, 16 nt, Human
uauugagagagaugug

SEQ ID NO: 1975895 - RNA, 19 nt, Human
uauugagagagauguguaa

SEQ ID NO: 1975896 - RNA, 22 nt, Human
uauugagagagauguguaauuu

SEQ ID NO: 1975897 - RNA, 15 nt, Human
uauugaggaaaaaua

SEQ ID NO: 1975898 - RNA, 17 nt, Human
uauugaggaaaaauaug

SEQ ID NO: 1975899 - RNA, 15 nt, Human
uauugguauacuguu

SEQ ID NO: 1975900 - RNA, 14 nt, Human
uauugguauauccu

SEQ ID NO: 1975901 - RNA, 17 nt, Human
uauugguauauccuuuu

SEQ ID NO: 1975902 - RNA, 19 nt, Human
uauugguauauccuuuucu

SEQ ID NO: 1975903 - RNA, 17 nt, Human
uauugguguaagguacu

SEQ ID NO: 1975904 - RNA, 13 nt, Human
uauugguuuuaug

SEQ ID NO: 1975905 - RNA, 14 nt, Human
uauugguuuuauga

SEQ ID NO: 1975906 - RNA, 15 nt, Human
uauugguuuuaugau

SEQ ID NO: 1975907 - RNA, 16 nt, Human
uauuguaacuauguuu

SEQ ID NO: 1975908 - RNA, 11 nt, Human
uauuguaagaa

SEQ ID NO: 1975909 - RNA, 17 nt, Human
uauuguaagaaauacug

SEQ ID NO: 1975910 - RNA, 19 nt, Human
uauuguaagaaauacugua

SEQ ID NO: 1975911 - RNA, 16 nt, Human
acaguucucuccuucu

SEQ ID NO: 1975912 - RNA, 19 nt, Human
acaguuccaaucaguagcu

SEQ ID NO: 1975913 - RNA, 23 nt, Human
acaguucggugagcuacaaaugc

SEQ ID NO: 1975914 - RNA, 19 nt, Human
acaguucggugagcuacaa

SEQ ID NO: 1975915 - RNA, 22 nt, Human
acaguucggugagcuacaaaug

SEQ ID NO: 1975916 - RNA, 13 nt, Human
acaguuacucaga

SEQ ID NO: 1975917 - RNA, 20 nt, Human
acaguuacucagaauucucu

SEQ ID NO: 1975918 - RNA, 13 nt, Human
acaguuauuacau

SEQ ID NO: 1975919 - RNA, 16 nt, Human
acaguuauagaaagca

SEQ ID NO: 1975920 - RNA, 12 nt, Human
acaguuacuuuu

SEQ ID NO: 1975921 - RNA, 13 nt, Human
acaguuacuuuuc

SEQ ID NO: 1975922 - RNA, 14 nt, Human
acaguuacuuuucc

SEQ ID NO: 1975923 - RNA, 15 nt, Human
acaguuacuuuuccu

SEQ ID NO: 1975924 - RNA, 16 nt, Human
acaguuacuuuuccuu

SEQ ID NO: 1975925 - RNA, 20 nt, Human
acaguuacuuuuccuugcau

SEQ ID NO: 1975926 - RNA, 23 nt, Human
acaguuacuuuuccuugcauaca

SEQ ID NO: 1975927 - RNA, 20 nt, Human
acaguucaauucucauuugu

SEQ ID NO: 1975928 - RNA, 19 nt, Human
acaguucauucagggccga

SEQ ID NO: 1975929 - RNA, 17 nt, Human
acaguucucuccuucuu

SEQ ID NO: 1975930 - RNA, 13 nt, Human
uauucucuguaca

SEQ ID NO: 1975931 - RNA, 14 nt, Human
uauucucuguacau

SEQ ID NO: 1975932 - RNA, 15 nt, Human
uauucucuguacaua

SEQ ID NO: 1975933 - RNA, 16 nt, Human
uauucucuguacauau

SEQ ID NO: 1975934 - RNA, 20 nt, Human
uauucucuccuguaccucuu

SEQ ID NO: 1975935 - RNA, 24 nt, Human
uauucucuccuguaccucuugagc

SEQ ID NO: 1975936 - RNA, 22 nt, Human
uauucugugcuguuacaguuuu

SEQ ID NO: 1975937 - RNA, 16 nt, Human
uauucuguuggccagu

SEQ ID NO: 1975938 - RNA, 15 nt, Human
uauucuuauuuaaug

SEQ ID NO: 1975939 - RNA, 13 nt, Human
uauucucuuuuca

SEQ ID NO: 1975940 - RNA, 18 nt, Human
uauucucuguacauauua

SEQ ID NO: 1975941 - RNA, 21 nt, Human
uauucugggaauguauaguau

SEQ ID NO: 1975942 - RNA, 23 nt, Human
uauucugggaauguauaguauuu

SEQ ID NO: 1975943 - RNA, 16 nt, Human
uauucugggaauguau

SEQ ID NO: 1975944 - RNA, 17 nt, Human
uauucugggaauguaua

SEQ ID NO: 1975945 - RNA, 19 nt, Human
uauucugggaauguauagu

SEQ ID NO: 1975946 - RNA, 15 nt, Human
uauucugucuucauc

SEQ ID NO: 1975947 - RNA, 19 nt, Human
uauuucaaguacacugaau

SEQ ID NO: 1975948 - RNA, 20 nt, Human
uauuuauuuuuuuuaauugu

SEQ ID NO: 1975949 - RNA, 22 nt, Human
uauuuauuuuuuuuaauuguau

SEQ ID NO: 1975950 - RNA, 14 nt, Human
uauuuauuuauuua

SEQ ID NO: 1975951 - RNA, 14 nt, Human
uauuuauuuaaauu

SEQ ID NO: 1975952 - RNA, 14 nt, Human
uauuuauuuaguau

SEQ ID NO: 1975953 - RNA, 13 nt, Human
uauuuauuuaaau

SEQ ID NO: 1975954 - RNA, 19 nt, Human
uauuuaguguucauaaaua

SEQ ID NO: 1975955 - RNA, 12 nt, Human
uauuuaauguug

SEQ ID NO: 1975956 - RNA, 13 nt, Human
uauuuaauguuga

SEQ ID NO: 1975957 - RNA, 14 nt, Human
uauuuaauguugaa

SEQ ID NO: 1975958 - RNA, 15 nt, Human
uauuuaauguugaac

SEQ ID NO: 1975959 - RNA, 17 nt, Human
uauuuaauguugaacaa

SEQ ID NO: 1975960 - RNA, 18 nt, Human
uauuuaauguugaacaaa

SEQ ID NO: 1975961 - RNA, 20 nt, Human
uauuuaauguugaacaaaau

SEQ ID NO: 1975962 - RNA, 23 nt, Human
uauuuaauguugaacaaaauaaa

SEQ ID NO: 1975963 - RNA, 14 nt, Human
uauuuaauucaugu

SEQ ID NO: 1975964 - RNA, 13 nt, Human
uauuuaauuugaa

SEQ ID NO: 1975965 - RNA, 16 nt, Human
uauuuaauuugaaggu

SEQ ID NO: 1975966 - RNA, 23 nt, Human
uauuuaauuugaagguagaaugu

SEQ ID NO: 1975967 - RNA, 23 nt, Human
uauuuaauuuuuuugagacagag

SEQ ID NO: 1975968 - RNA, 16 nt, Human
uauuuacaaccuagaa

SEQ ID NO: 1975969 - RNA, 20 nt, Human
uauuuacaacacuuuaaugg

SEQ ID NO: 1975970 - RNA, 15 nt, Human
uauuuacacaauuua

SEQ ID NO: 1975971 - RNA, 18 nt, Human
uauuuacuucuuauacau

SEQ ID NO: 1975972 - RNA, 20 nt, Human
uauuuagcaccagggaaggg

SEQ ID NO: 1975973 - RNA, 20 nt, Human
uauuuagaugcauauuacug

SEQ ID NO: 1975974 - RNA, 17 nt, Human
uauuguagcauccugga

SEQ ID NO: 1975975 - RNA, 18 nt, Human
uauuguagcauccuggaa

SEQ ID NO: 1975976 - RNA, 20 nt, Human
uauuguagcauccuggaaua

SEQ ID NO: 1975977 - RNA, 21 nt, Human
uauuguagcauccuggaauau

SEQ ID NO: 1975978 - RNA, 22 nt, Human
uauuguaucaaucuuuagaaaa

SEQ ID NO: 1975979 - RNA, 17 nt, Human
uauugucaaagugguga

SEQ ID NO: 1975980 - RNA, 13 nt, Human
uauugucaaagug

SEQ ID NO: 1975981 - RNA, 17 nt, Human
uauuuaaccucuaaauu

SEQ ID NO: 1975982 - RNA, 18 nt, Human
uauuuaaccucuaaauuc

SEQ ID NO: 1975983 - RNA, 22 nt, Human
uauuguccuauuaguguuauau

SEQ ID NO: 1975984 - RNA, 21 nt, Human
uauugucccuggcuuccuuac

SEQ ID NO: 1975985 - RNA, 22 nt, Human
uauugucccuggcuuccuuacu

SEQ ID NO: 1975986 - RNA, 17 nt, Human
uauuguccuauuagugu

SEQ ID NO: 1975987 - RNA, 18 nt, Human
uauuguccuauuaguguu

SEQ ID NO: 1975988 - RNA, 20 nt, Human
uauugucccuggcuuccuua

SEQ ID NO: 1975989 - RNA, 14 nt, Human
uauuuaauagguuu

SEQ ID NO: 1975990 - RNA, 21 nt, Human
uauuuaaugaaagacuguaca

SEQ ID NO: 1975991 - RNA, 15 nt, Human
uauuuaaugaaagac

SEQ ID NO: 1975992 - RNA, 24 nt, Human
uauuuaagccuaaagauuuugauc

SEQ ID NO: 1975993 - RNA, 17 nt, Human
uauuuaagccuaaagau

SEQ ID NO: 1975994 - RNA, 18 nt, Human
uauuuaagccuaaagauu

SEQ ID NO: 1975995 - RNA, 22 nt, Human
uauuuaagccuaaagauuuuga

SEQ ID NO: 1975996 - RNA, 14 nt, Human
acagugugauuuug

SEQ ID NO: 1975997 - RNA, 22 nt, Human
acaguguguggucaacauuucu

SEQ ID NO: 1975998 - RNA, 14 nt, Human
acagugagacucug

SEQ ID NO: 1975999 - RNA, 18 nt, Human
acagugagacucugucuc

SEQ ID NO: 1976000 - RNA, 11 nt, Human
acaguguuccg

SEQ ID NO: 1976001 - RNA, 16 nt, Human
acaguguugagaacua

SEQ ID NO: 1976002 - RNA, 15 nt, Human
acaguuaagagaaau

SEQ ID NO: 1976003 - RNA, 18 nt, Human
acaguuaaggagaaucau

SEQ ID NO: 1976004 - RNA, 22 nt, Human
acaguccuuaccagcagagcac

SEQ ID NO: 1976005 - RNA, 21 nt, Human
acaguccuuaccagcagagca

SEQ ID NO: 1976006 - RNA, 12 nt, Human
acagucucacca

SEQ ID NO: 1976007 - RNA, 18 nt, Human
acagucucaccauuuccc

SEQ ID NO: 1976008 - RNA, 22 nt, Human
acagucucaccauuuccccagg

SEQ ID NO: 1976009 - RNA, 13 nt, Human
acagucuccccca

SEQ ID NO: 1976010 - RNA, 18 nt, Human
acagucucugagaacugg

SEQ ID NO: 1976011 - RNA, 20 nt, Human
acagugaaagaaaauaacaa

SEQ ID NO: 1976012 - RNA, 15 nt, Human
acaguccucccaucu

SEQ ID NO: 1976013 - RNA, 14 nt, Human
acaguccucccauc

SEQ ID NO: 1976014 - RNA, 13 nt, Human
acaguccucccau

SEQ ID NO: 1976015 - RNA, 15 nt, Human
acagucccugccaau

SEQ ID NO: 1976016 - RNA, 20 nt, Human
acaguccuuaccagcagagc

SEQ ID NO: 1976017 - RNA, 18 nt, Human
acaguccuuaccagcaga

SEQ ID NO: 1976018 - RNA, 17 nt, Human
acaguccucccaucuca

SEQ ID NO: 1976019 - RNA, 22 nt, Human
acaguccuauuuagacauguaa

SEQ ID NO: 1976020 - RNA, 13 nt, Human
acagucccugcca

SEQ ID NO: 1976021 - RNA, 15 nt, Human
acaguauuacuucug

SEQ ID NO: 1976022 - RNA, 16 nt, Human
acaguauuacuucugc

SEQ ID NO: 1976023 - RNA, 17 nt, Human
acaguauuacuucugcu

SEQ ID NO: 1976024 - RNA, 19 nt, Human
acaguauuacuucugcuac

SEQ ID NO: 1976025 - RNA, 21 nt, Human
acaguauggcagcuuuccuca

SEQ ID NO: 1976026 - RNA, 16 nt, Human
acagggcaugaaauga

SEQ ID NO: 1976027 - RNA, 21 nt, Human
acaggcugggcuucaguggca

SEQ ID NO: 1976028 - RNA, 15 nt, Human
acaggcugggcuggg

SEQ ID NO: 1976029 - RNA, 17 nt, Human
acaggcugggcugggca

SEQ ID NO: 1976030 - RNA, 14 nt, Human
acaggcugggcuuc

SEQ ID NO: 1976031 - RNA, 17 nt, Human
acaggcugggcuucagu

SEQ ID NO: 1976032 - RNA, 22 nt, Human
acagguuuuccugaagaauuga

SEQ ID NO: 1976033 - RNA, 22 nt, Human
acagggcacaccgggcacucag

SEQ ID NO: 1976034 - RNA, 21 nt, Human
acaggcugggcugggcacugc

SEQ ID NO: 1976035 - RNA, 23 nt, Human
uauuaguguuauaugaacauaca

SEQ ID NO: 1976036 - RNA, 13 nt, Human
uauuauaaacaag

SEQ ID NO: 1976037 - RNA, 19 nt, Human
uauuauaaacaagaaugaa

SEQ ID NO: 1976038 - RNA, 23 nt, Human
uauuauaaacaagaaugaagguu

SEQ ID NO: 1976039 - RNA, 21 nt, Human
uauuagcgacaacagauugga

SEQ ID NO: 1976040 - RNA, 23 nt, Human
uauuagcgacaacagauuggauu

SEQ ID NO: 1976041 - RNA, 13 nt, Human
uauuaguguuaua

SEQ ID NO: 1976042 - RNA, 14 nt, Human
uauuaguguuauau

SEQ ID NO: 1976043 - RNA, 16 nt, Human
uauuaguguuauauga

SEQ ID NO: 1976044 - RNA, 17 nt, Human
uauuaguguuauaugaa

SEQ ID NO: 1976045 - RNA, 18 nt, Human
uauuaguguuauaugaac

SEQ ID NO: 1976046 - RNA, 21 nt, Human
uauuaguguuauaugaacaua

SEQ ID NO: 1976047 - RNA, 23 nt, Human
uauuagcagcugacuuucaaagu

SEQ ID NO: 1976048 - RNA, 18 nt, Human
uauuagcgacaacagauu

SEQ ID NO: 1976049 - RNA, 20 nt, Human
uauuagcgacaacagauugg

SEQ ID NO: 1976050 - RNA, 20 nt, Human
uauuaccaccaucccgugcu

SEQ ID NO: 1976051 - RNA, 16 nt, Human
uauuaccacagacaua

SEQ ID NO: 1976052 - RNA, 20 nt, Human
uauuacgaaguucaagauca

SEQ ID NO: 1976053 - RNA, 21 nt, Human
uauuacgaaguucaagaucaa

SEQ ID NO: 1976054 - RNA, 12 nt, Human
uauuagagaaga

SEQ ID NO: 1976055 - RNA, 17 nt, Human
uauuagacuucuguuuu

SEQ ID NO: 1976056 - RNA, 20 nt, Human
uauuagacuucuguuuucaa

SEQ ID NO: 1976057 - RNA, 21 nt, Human
uauuagacuucuguuuucaau

SEQ ID NO: 1976058 - RNA, 23 nt, Human
uauuagacuucuguuuucaaucu

SEQ ID NO: 1976059 - RNA, 14 nt, Human
uauucauaauuauu

SEQ ID NO: 1976060 - RNA, 17 nt, Human
uauucauaguagaacuu

SEQ ID NO: 1976061 - RNA, 23 nt, Human
uauucauagcagcuuauucacaa

SEQ ID NO: 1976062 - RNA, 13 nt, Human
uauucauauuugu

SEQ ID NO: 1976063 - RNA, 15 nt, Human
uauucauauuuguac

SEQ ID NO: 1976064 - RNA, 16 nt, Human
uauucauauuuguacu

SEQ ID NO: 1976065 - RNA, 17 nt, Human
uauucauauuuguacuu

SEQ ID NO: 1976066 - RNA, 22 nt, Human
uauucauauuuguacuuucugu

SEQ ID NO: 1976067 - RNA, 23 nt, Human
uauucauauuuguacuuucuguu

SEQ ID NO: 1976068 - RNA, 22 nt, Human
uauucaggaagcucagggccug

SEQ ID NO: 1976069 - RNA, 18 nt, Human
uauucaggaagcucaggg

SEQ ID NO: 1976070 - RNA, 15 nt, Human
uauucaggcuuuagg

SEQ ID NO: 1976071 - RNA, 19 nt, Human
uauucaggggaaacuugau

SEQ ID NO: 1976072 - RNA, 22 nt, Human
uauucagcaaggcgcuaacuug

SEQ ID NO: 1976073 - RNA, 23 nt, Human
uauucagcaaggcgcuaacuugc

SEQ ID NO: 1976074 - RNA, 15 nt, Human
uauucagcucaugga

SEQ ID NO: 1976075 - RNA, 12 nt, Human
acagcuccccca

SEQ ID NO: 1976076 - RNA, 16 nt, Human
acagcucccccagcuc

SEQ ID NO: 1976077 - RNA, 11 nt, Human
uaugugugugu

SEQ ID NO: 1976078 - RNA, 14 nt, Human
uauguguguguguu

SEQ ID NO: 1976079 - RNA, 22 nt, Human
uauguguguguguugugugugg

SEQ ID NO: 1976080 - RNA, 16 nt, Human
uauuaaaaaucucaaa

SEQ ID NO: 1976081 - RNA, 18 nt, Human
uauuaaaaaucucaaauu

SEQ ID NO: 1976082 - RNA, 20 nt, Human
uauuaaaaaucucaaauuuc

SEQ ID NO: 1976083 - RNA, 22 nt, Human
uauuaaaaaucucaaauuucua

SEQ ID NO: 1976084 - RNA, 23 nt, Human
uauguguguguguuguguguggg

SEQ ID NO: 1976085 - RNA, 17 nt, Human
uauguuuuaagaggcag

SEQ ID NO: 1976086 - RNA, 19 nt, Human
uauguuuuaagaggcaggg

SEQ ID NO: 1976087 - RNA, 23 nt, Human
uauuacaguggggaaugaagaua

SEQ ID NO: 1976088 - RNA, 21 nt, Human
uauuaaaguuucaaaaaucug

SEQ ID NO: 1976089 - RNA, 22 nt, Human
uauuaaaguuucaaaaaucuga

SEQ ID NO: 1976090 - RNA, 13 nt, Human
uauuaaaguuuca

SEQ ID NO: 1976091 - RNA, 14 nt, Human
uauuaaaguuucaa

SEQ ID NO: 1976092 - RNA, 15 nt, Human
uauuaaaguuucaaa

SEQ ID NO: 1976093 - RNA, 16 nt, Human
uauuaaaguuucaaaa

SEQ ID NO: 1976094 - RNA, 18 nt, Human
uauuaaaguuucaaaaau

SEQ ID NO: 1976095 - RNA, 23 nt, Human
uauuaaaaaucucaaauuucuaa

SEQ ID NO: 1976096 - RNA, 13 nt, Human
aauuuaucuuuga

SEQ ID NO: 1976097 - RNA, 15 nt, Human
aauuuaccugaaguc

SEQ ID NO: 1976098 - RNA, 17 nt, Human
aauuuagaaauauaauu

SEQ ID NO: 1976099 - RNA, 14 nt, Human
aauuuaugugaugg

SEQ ID NO: 1976100 - RNA, 15 nt, Human
aauuuaucuuugaua

SEQ ID NO: 1976101 - RNA, 16 nt, Human
aauuuaucuuugauaa

SEQ ID NO: 1976102 - RNA, 13 nt, Human
aauuucuaaaucu

SEQ ID NO: 1976103 - RNA, 21 nt, Human
aauuucuaaaucuccaaaaua

SEQ ID NO: 1976104 - RNA, 19 nt, Human
aauuugauaugugaacagu

SEQ ID NO: 1976105 - RNA, 15 nt, Human
aauuugauaugugaa

SEQ ID NO: 1976106 - RNA, 16 nt, Human
aauuugauaugugaac

SEQ ID NO: 1976107 - RNA, 18 nt, Human
aauuugauaugugaacag

SEQ ID NO: 1976108 - RNA, 20 nt, Human
aauuugaaacacuuugcaua

SEQ ID NO: 1976109 - RNA, 12 nt, Human
aauuugaaacau

SEQ ID NO: 1976110 - RNA, 13 nt, Human
aauuugaaacauu

SEQ ID NO: 1976111 - RNA, 14 nt, Human
aauuugaaacauug

SEQ ID NO: 1976112 - RNA, 15 nt, Human
aauuugaaacauugc

SEQ ID NO: 1976113 - RNA, 21 nt, Human
aauuugaaacauugcuuuuaa

SEQ ID NO: 1976114 - RNA, 23 nt, Human
aauuucucuuaaguacugaaaua

SEQ ID NO: 1976115 - RNA, 15 nt, Human
aauuugaaacacuuu

SEQ ID NO: 1976116 - RNA, 15 nt, Human
aauuuaaauagcuuu

SEQ ID NO: 1976117 - RNA, 16 nt, Human
aauuuaaauagcuuuu

SEQ ID NO: 1976118 - RNA, 12 nt, Human
aauuuaaguuuu

SEQ ID NO: 1976119 - RNA, 15 nt, Human
aauuuaaguuuugac

SEQ ID NO: 1976120 - RNA, 17 nt, Human
aauuuaaguuuugacaa

SEQ ID NO: 1976121 - RNA, 20 nt, Human
aauuuaaguuuugacaagcu

SEQ ID NO: 1976122 - RNA, 23 nt, Human
aauuuaaguuuugacaagcuggc

SEQ ID NO: 1976123 - RNA, 24 nt, Human
aauuuaaguuuugacaagcuggcu

SEQ ID NO: 1976124 - RNA, 19 nt, Human
aauuuacauacucugcuua

SEQ ID NO: 1976125 - RNA, 20 nt, Human
aauuuaaagaaaaaaauguc

SEQ ID NO: 1976126 - RNA, 13 nt, Human
aauuuaaaauaua

SEQ ID NO: 1976127 - RNA, 13 nt, Human
aauuuaaaagucu

SEQ ID NO: 1976128 - RNA, 17 nt, Human
aauuuaaaaagcccaac

SEQ ID NO: 1976129 - RNA, 20 nt, Human
aauuguuguccgguuuacuu

SEQ ID NO: 1976130 - RNA, 22 nt, Human
aauuguuguccgguuuacuuua

SEQ ID NO: 1976131 - RNA, 23 nt, Human
aauuguuguccgguuuacuuuaa

SEQ ID NO: 1976132 - RNA, 22 nt, Human
aauuguuuagauuuuguguuua

SEQ ID NO: 1976133 - RNA, 14 nt, Human
aauuguuuagauuu

SEQ ID NO: 1976134 - RNA, 22 nt, Human
aauuguuuggggaugagaaagg

SEQ ID NO: 1976135 - RNA, 13 nt, Human
aauuguuguuugu

SEQ ID NO: 1976136 - RNA, 14 nt, Human
aauuguuguuugua

SEQ ID NO: 1976137 - RNA, 17 nt, Human
aauuguuguuuguaugu

SEQ ID NO: 1976138 - RNA, 19 nt, Human
aauuguuguuuguauguau

SEQ ID NO: 1976139 - RNA, 21 nt, Human
aauuguuguuuguauguauaa

SEQ ID NO: 1976140 - RNA, 22 nt, Human
aauuguuguuuguauguauaau

SEQ ID NO: 1976141 - RNA, 23 nt, Human
aauuguuguuuguauguauaauu

SEQ ID NO: 1976142 - RNA, 12 nt, Human
aauugcuccuug

SEQ ID NO: 1976143 - RNA, 17 nt, Human
aauugcucacaguuauu

SEQ ID NO: 1976144 - RNA, 21 nt, Human
aauugcucacaguuauuacau

SEQ ID NO: 1976145 - RNA, 13 nt, Human
aauugcucacagu

SEQ ID NO: 1976146 - RNA, 23 nt, Human
uacuguaaaaugcaaaaaaucuu

SEQ ID NO: 1976147 - RNA, 15 nt, Human
aauugugugaacuug

SEQ ID NO: 1976148 - RNA, 18 nt, Human
aauugugugaacuuggaa

SEQ ID NO: 1976149 - RNA, 15 nt, Human
aauugugugauauuu

SEQ ID NO: 1976150 - RNA, 19 nt, Human
aauugugugauauuucaga

SEQ ID NO: 1976151 - RNA, 21 nt, Human
aauugugugauauuucagaaa

SEQ ID NO: 1976152 - RNA, 22 nt, Human
aauugugugauauuucagaaau

SEQ ID NO: 1976153 - RNA, 23 nt, Human
aauugugugauauuucagaaaua

SEQ ID NO: 1976154 - RNA, 22 nt, Human
aauugcucacaguuauuacaua

SEQ ID NO: 1976155 - RNA, 13 nt, Human
aauugcugaggca

SEQ ID NO: 1976156 - RNA, 18 nt, Human
aauucuuugaccuguugg

SEQ ID NO: 1976157 - RNA, 22 nt, Human
aauucuuugaccuguugggagu

SEQ ID NO: 1976158 - RNA, 14 nt, Human
aauucuuucauuuu

SEQ ID NO: 1976159 - RNA, 17 nt, Human
aauucuuugcaaaaauc

SEQ ID NO: 1976160 - RNA, 18 nt, Human
aauucuuugcaaaaaucc

SEQ ID NO: 1976161 - RNA, 13 nt, Human
aauucuuuuuuau

SEQ ID NO: 1976162 - RNA, 14 nt, Human
aauucuuuuuuauu

SEQ ID NO: 1976163 - RNA, 16 nt, Human
aauucuuuuuuauuaa

SEQ ID NO: 1976164 - RNA, 17 nt, Human
aauucuuuuuuauuaau

SEQ ID NO: 1976165 - RNA, 18 nt, Human
aauucuuuuuuauuaauc

SEQ ID NO: 1976166 - RNA, 21 nt, Human
aauucuuuuuuauuaaucacu

SEQ ID NO: 1976167 - RNA, 22 nt, Human
aauucuuuuuuauuaaucacug

SEQ ID NO: 1976168 - RNA, 23 nt, Human
aauucuuuuuuauuaaucacugu

SEQ ID NO: 1976169 - RNA, 14 nt, Human
aauugaaaaguuau

SEQ ID NO: 1976170 - RNA, 13 nt, Human
aauucuuuaauga

SEQ ID NO: 1976171 - RNA, 19 nt, Human
aauucuuuaaugauuccua

SEQ ID NO: 1976172 - RNA, 13 nt, Human
aauugacccacaa

SEQ ID NO: 1976173 - RNA, 16 nt, Human
aauugaagguuuuuga

SEQ ID NO: 1976174 - RNA, 18 nt, Human
aauugaagguuuuugaua

SEQ ID NO: 1976175 - RNA, 19 nt, Human
aauugaagguuuuugauag

SEQ ID NO: 1976176 - RNA, 16 nt, Human
aauugacccacaagaa

SEQ ID NO: 1976177 - RNA, 19 nt, Human
aauugacccacaagaaaug

SEQ ID NO: 1976178 - RNA, 15 nt, Human
uacguacacauuuua

SEQ ID NO: 1976179 - RNA, 21 nt, Human
aauugaagguuuuugauagca

SEQ ID NO: 1976180 - RNA, 23 nt, Human
aauucuuauuccauauuagaaaa

SEQ ID NO: 1976181 - RNA, 21 nt, Human
aauucuuauuacuagacugcc

SEQ ID NO: 1976182 - RNA, 18 nt, Human
aauucuuauuccauauua

SEQ ID NO: 1976183 - RNA, 19 nt, Human
aauucuuauuccauauuag

SEQ ID NO: 1976184 - RNA, 22 nt, Human
aauucuuauuccauauuagaaa

SEQ ID NO: 1976185 - RNA, 16 nt, Human
uacccuuuuucuugaa

SEQ ID NO: 1976186 - RNA, 22 nt, Human
aauucuucuccacuuucuagcc

SEQ ID NO: 1976187 - RNA, 14 nt, Human
aauucuugcaaagu

SEQ ID NO: 1976188 - RNA, 20 nt, Human
aauucuugcaaaguaucccu

SEQ ID NO: 1976189 - RNA, 21 nt, Human
aauucuugccaaauauaaaua

SEQ ID NO: 1976190 - RNA, 16 nt, Human
uacuauguaucaauga

SEQ ID NO: 1976191 - RNA, 21 nt, Human
uacuauaacauagaauugcaa

SEQ ID NO: 1976192 - RNA, 16 nt, Human
uacuauaauuuaccug

SEQ ID NO: 1976193 - RNA, 14 nt, Human
uacgugugcaugug

SEQ ID NO: 1976194 - RNA, 13 nt, Human
uacguugugcauu

SEQ ID NO: 1976195 - RNA, 14 nt, Human
uacguugugcauuu

SEQ ID NO: 1976196 - RNA, 12 nt, Human
uacguaguucua

SEQ ID NO: 1976197 - RNA, 14 nt, Human
uacgucugacaggc

SEQ ID NO: 1976198 - RNA, 14 nt, Human
uacguuaccaggca

SEQ ID NO: 1976199 - RNA, 13 nt, Human
uacucuucucucu

SEQ ID NO: 1976200 - RNA, 16 nt, Human
uacucuucucucugcu

SEQ ID NO: 1976201 - RNA, 17 nt, Human
uacucuucucucugcuc

SEQ ID NO: 1976202 - RNA, 18 nt, Human
uacucuucucucugcucu

SEQ ID NO: 1976203 - RNA, 22 nt, Human
uacucuuauaucuauauuuuac

SEQ ID NO: 1976204 - RNA, 22 nt, Human
uacucuucaguuaagccuuugg

SEQ ID NO: 1976205 - RNA, 20 nt, Human
uacucuuauaucuauauuuu

SEQ ID NO: 1976206 - RNA, 18 nt, Human
uacucuuauagacaacau

SEQ ID NO: 1976207 - RNA, 14 nt, Human
uacucacagccagc

SEQ ID NO: 1976208 - RNA, 21 nt, Human
uacucugugucagguggggca

SEQ ID NO: 1976209 - RNA, 19 nt, Human
uacucuucucucugcucug

SEQ ID NO: 1976210 - RNA, 14 nt, Human
uacucuugggacau

SEQ ID NO: 1976211 - RNA, 16 nt, Human
uacugaaccacuugua

SEQ ID NO: 1976212 - RNA, 17 nt, Human
uacugaaccacuuguag

SEQ ID NO: 1976213 - RNA, 19 nt, Human
uacugaaccacuuguagau

SEQ ID NO: 1976214 - RNA, 22 nt, Human
uacugaaccacuuguagauuug

SEQ ID NO: 1976215 - RNA, 23 nt, Human
uacugaaccacuuguagauuuga

SEQ ID NO: 1976216 - RNA, 20 nt, Human
uacuguaaaaugcaaaaaau

SEQ ID NO: 1976217 - RNA, 17 nt, Human
uagaagucuuagaugua

SEQ ID NO: 1976218 - RNA, 16 nt, Human
uagaagucuuagaugu

SEQ ID NO: 1976219 - RNA, 23 nt, Human
uagaagucacauuccugaacagg

SEQ ID NO: 1976220 - RNA, 16 nt, Human
uagaagucacacagua

SEQ ID NO: 1976221 - RNA, 19 nt, Human
uagaagucuuagauguaua

SEQ ID NO: 1976222 - RNA, 18 nt, Human
uagaagucuuagauguau

SEQ ID NO: 1976223 - RNA, 20 nt, Human
uagaagucuuagauguauau

SEQ ID NO: 1976224 - RNA, 19 nt, Human
uagaauugaagguuuuuga

SEQ ID NO: 1976225 - RNA, 17 nt, Human
uagaauugcaaucuaua

SEQ ID NO: 1976226 - RNA, 20 nt, Human
uagaauugaagguuuuugau

SEQ ID NO: 1976227 - RNA, 21 nt, Human
uagaauugaagguuuuugaua

SEQ ID NO: 1976228 - RNA, 23 nt, Human
uagaauugaagguuuuugauagc

SEQ ID NO: 1976229 - RNA, 18 nt, Human
uagaauugcaaucuauaa

SEQ ID NO: 1976230 - RNA, 20 nt, Human
uagaauugcaaucuauaaua

SEQ ID NO: 1976231 - RNA, 18 nt, Human
uagacaauauaagagcuu

SEQ ID NO: 1976232 - RNA, 16 nt, Human
uagacaauuuauuaug

SEQ ID NO: 1976233 - RNA, 14 nt, Human
uagacagcaugaga

SEQ ID NO: 1976234 - RNA, 22 nt, Human
uagacaggaaaagcaugucuua

SEQ ID NO: 1976235 - RNA, 15 nt, Human
uagaacucccuuuca

SEQ ID NO: 1976236 - RNA, 23 nt, Human
uagaacgccagggaccccagaau

SEQ ID NO: 1976237 - RNA, 17 nt, Human
uacuucaaaaguuuguu

SEQ ID NO: 1976238 - RNA, 22 nt, Human
uacuucaaaaguuuguuugcuu

SEQ ID NO: 1976239 - RNA, 15 nt, Human
uagaagucacacagu

SEQ ID NO: 1976240 - RNA, 18 nt, Human
aauuuuuauuaaauuaug

SEQ ID NO: 1976241 - RNA, 17 nt, Human
aauuuuuauuaaauuau

SEQ ID NO: 1976242 - RNA, 13 nt, Human
aauuuuuaugugu

SEQ ID NO: 1976243 - RNA, 14 nt, Human
aauuuuuaugugug

SEQ ID NO: 1976244 - RNA, 20 nt, Human
aauuuuaagccuuuguugaa

SEQ ID NO: 1976245 - RNA, 23 nt, Human
aauuuuaagccuuuguugaacug

SEQ ID NO: 1976246 - RNA, 18 nt, Human
aauuuuaagcuaggaaaa

SEQ ID NO: 1976247 - RNA, 23 nt, Human
aauuuuaagcuaggaaaagaaau

SEQ ID NO: 1976248 - RNA, 14 nt, Human
uagacagucccugc

SEQ ID NO: 1976249 - RNA, 12 nt, Human
uagacagucccu

SEQ ID NO: 1976250 - RNA, 15 nt, Human
uagacaggagaagaa

SEQ ID NO: 1976251 - RNA, 18 nt, Human
uagacaggagaagaaaga

SEQ ID NO: 1976252 - RNA, 19 nt, Human
uagacaggagaagaaagaa

SEQ ID NO: 1976253 - RNA, 17 nt, Human
aauuuguaccauuucag

SEQ ID NO: 1976254 - RNA, 21 nt, Human
aauuuuuuaagugaaaauaua

SEQ ID NO: 1976255 - RNA, 14 nt, Human
aauuuuuguauuuu

SEQ ID NO: 1976256 - RNA, 14 nt, Human
aauuuuucuguaua

SEQ ID NO: 1976257 - RNA, 18 nt, Human
aauuuuucuguauagaca

SEQ ID NO: 1976258 - RNA, 12 nt, Human
aauuuuucugua

SEQ ID NO: 1976259 - RNA, 13 nt, Human
aauuuuucuguau

SEQ ID NO: 1976260 - RNA, 13 nt, Human
aauuuuucauauu

SEQ ID NO: 1976261 - RNA, 14 nt, Human
aauuuuucauauuu

SEQ ID NO: 1976262 - RNA, 13 nt, Human
acaaaaacauggc

SEQ ID NO: 1976263 - RNA, 17 nt, Human
aauuuuuuugagacaga

SEQ ID NO: 1976264 - RNA, 14 nt, Human
aauuuuuuuguaug

SEQ ID NO: 1976265 - RNA, 15 nt, Human
aauuuuuuuguauga

SEQ ID NO: 1976266 - RNA, 15 nt, Human
acaagacaacauugu

SEQ ID NO: 1976267 - RNA, 18 nt, Human
acaagagcccaggccucc

SEQ ID NO: 1976268 - RNA, 17 nt, Human
acaagagcccaggccuc

SEQ ID NO: 1976269 - RNA, 18 nt, Human
acaagcacuaaacaaaga

SEQ ID NO: 1976270 - RNA, 17 nt, Human
acaagacaacauuguaa

SEQ ID NO: 1976271 - RNA, 17 nt, Human
acaagcauauaaaaugg

SEQ ID NO: 1976272 - RNA, 19 nt, Human
acaagcauauaaaauggca

SEQ ID NO: 1976273 - RNA, 15 nt, Human
acaagcauauaaaau

SEQ ID NO: 1976274 - RNA, 20 nt, Human
acaagcgugagccacugcac

SEQ ID NO: 1976275 - RNA, 21 nt, Human
acaagcgugagccacugcacc

SEQ ID NO: 1976276 - RNA, 13 nt, Human
acaagcugcaccc

SEQ ID NO: 1976277 - RNA, 12 nt, Human
acaagccacccc

SEQ ID NO: 1976278 - RNA, 18 nt, Human
acaagccacgaaugaaug

SEQ ID NO: 1976279 - RNA, 15 nt, Human
acaaauuauaaugua

SEQ ID NO: 1976280 - RNA, 16 nt, Human
acaaauuauaauguau

SEQ ID NO: 1976281 - RNA, 17 nt, Human
acaaauuauaauguauu

SEQ ID NO: 1976282 - RNA, 20 nt, Human
acaaauuauaauguauucau

SEQ ID NO: 1976283 - RNA, 18 nt, Human
acaaauuaugcuaagaau

SEQ ID NO: 1976284 - RNA, 21 nt, Human
acaaauuaugcuaagaauuuu

SEQ ID NO: 1976285 - RNA, 15 nt, Human
uagcauuuggugcuu

SEQ ID NO: 1976286 - RNA, 13 nt, Human
acaaauguuucua

SEQ ID NO: 1976287 - RNA, 19 nt, Human
uagcauuuguguugaagag

SEQ ID NO: 1976288 - RNA, 22 nt, Human
uagcauugucuauuuuucucuu

SEQ ID NO: 1976289 - RNA, 15 nt, Human
uagcauuuaugguaa

SEQ ID NO: 1976290 - RNA, 22 nt, Human
uagcauuuaugguaaucauauu

SEQ ID NO: 1976291 - RNA, 18 nt, Human
uagcauuguaaaagcauu

SEQ ID NO: 1976292 - RNA, 19 nt, Human
uagcauuguaaaagcauuu

SEQ ID NO: 1976293 - RNA, 22 nt, Human
uagcauuguaagcguauggcuu

SEQ ID NO: 1976294 - RNA, 15 nt, Human
acaacaacaaaauga

SEQ ID NO: 1976295 - RNA, 18 nt, Human
acaaauucugucucugga

SEQ ID NO: 1976296 - RNA, 15 nt, Human
acaacaaccugguca

SEQ ID NO: 1976297 - RNA, 12 nt, Human
acaacacucaca

SEQ ID NO: 1976298 - RNA, 22 nt, Human
acaagaaaugaaagcagggacu

SEQ ID NO: 1976299 - RNA, 19 nt, Human
acaacaccaaaaaauaucu

SEQ ID NO: 1976300 - RNA, 23 nt, Human
acaagaaugaagguuuuuguaaa

SEQ ID NO: 1976301 - RNA, 15 nt, Human
acaagaaugaagguu

SEQ ID NO: 1976302 - RNA, 17 nt, Human
acaagaauaaaggcagc

SEQ ID NO: 1976303 - RNA, 18 nt, Human
acaagaauaaaggcagcu

SEQ ID NO: 1976304 - RNA, 16 nt, Human
acaaaaagcauaaaaa

SEQ ID NO: 1976305 - RNA, 12 nt, Human
uagagcagaaau

SEQ ID NO: 1976306 - RNA, 20 nt, Human
acaaaaagauaccuuaaaau

SEQ ID NO: 1976307 - RNA, 13 nt, Human
uagagcagaaauu

SEQ ID NO: 1976308 - RNA, 14 nt, Human
uagagcagaaauuc

SEQ ID NO: 1976309 - RNA, 15 nt, Human
uagagcagaaauucu

SEQ ID NO: 1976310 - RNA, 15 nt, Human
uagagcuucuggcac

SEQ ID NO: 1976311 - RNA, 22 nt, Human
uagaucaacucauguuaauuga

SEQ ID NO: 1976312 - RNA, 13 nt, Human
uagaucauaguuu

SEQ ID NO: 1976313 - RNA, 19 nt, Human
uagcacagacccugcccug

SEQ ID NO: 1976314 - RNA, 18 nt, Human
uagcacagacccugcccu

SEQ ID NO: 1976315 - RNA, 17 nt, Human
uagcacagacccugccc

SEQ ID NO: 1976316 - RNA, 16 nt, Human
uagcacagacccugcc

SEQ ID NO: 1976317 - RNA, 22 nt, Human
uagauuuuagacccuauugcug

SEQ ID NO: 1976318 - RNA, 17 nt, Human
uagaucauaguuuuauu

SEQ ID NO: 1976319 - RNA, 19 nt, Human
uagaucauaguuuuauuua

SEQ ID NO: 1976320 - RNA, 21 nt, Human
uagcaugucgucaaagcugaa

SEQ ID NO: 1976321 - RNA, 18 nt, Human
uagcaugucgucaaagcu

SEQ ID NO: 1976322 - RNA, 16 nt, Human
uagcaccagggaaggg

SEQ ID NO: 1976323 - RNA, 13 nt, Human
uagcaccagggaa

SEQ ID NO: 1976324 - RNA, 14 nt, Human
uagcaccagggaag

SEQ ID NO: 1976325 - RNA, 13 nt, Human
uagcacagcuccc

SEQ ID NO: 1976326 - RNA, 14 nt, Human
uagcacagcucccu

SEQ ID NO: 1976327 - RNA, 12 nt, Human
uagcacaggcug

SEQ ID NO: 1976328 - RNA, 13 nt, Human
uagcacaggcuga

SEQ ID NO: 1976329 - RNA, 15 nt, Human
uagcacaggcugagu

SEQ ID NO: 1976330 - RNA, 19 nt, Human
uagcacaggcugagugcag

SEQ ID NO: 1976331 - RNA, 20 nt, Human
uagcacaggcugagugcagg

SEQ ID NO: 1976332 - RNA, 21 nt, Human
uagcacaggcugagugcaggc

SEQ ID NO: 1976333 - RNA, 20 nt, Human
uagcacagcguuaugugucu

SEQ ID NO: 1976334 - RNA, 12 nt, Human
uagcacagcucc

SEQ ID NO: 1976335 - RNA, 15 nt, Human
uagauuuuguguuua

SEQ ID NO: 1976336 - RNA, 21 nt, Human
uagauuuuguguuuauucuug

SEQ ID NO: 1976337 - RNA, 22 nt, Human
uagauuuuguguuuauucuuga

SEQ ID NO: 1976338 - RNA, 23 nt, Human
uagauuuuguguuuauucuugau

SEQ ID NO: 1976339 - RNA, 22 nt, Human
uaauacaccacuacauucuguu

SEQ ID NO: 1976340 - RNA, 21 nt, Human
uaauacaccacuacauucugu

SEQ ID NO: 1976341 - RNA, 23 nt, Human
uaauacaccacuacauucuguua

SEQ ID NO: 1976342 - RNA, 21 nt, Human
aauacauaugauaaauuugac

SEQ ID NO: 1976343 - RNA, 20 nt, Human
aauacaguaucucagggccu

SEQ ID NO: 1976344 - RNA, 18 nt, Human
uaauacuugcuuuggaaa

SEQ ID NO: 1976345 - RNA, 13 nt, Human
uaauacuguuauu

SEQ ID NO: 1976346 - RNA, 15 nt, Human
uaauacuguuauucu

SEQ ID NO: 1976347 - RNA, 16 nt, Human
uaauacuguuauucuu

SEQ ID NO: 1976348 - RNA, 17 nt, Human
uaauacuguuauucuuu

SEQ ID NO: 1976349 - RNA, 20 nt, Human
uaauacuguuauucuuugca

SEQ ID NO: 1976350 - RNA, 22 nt, Human
uaauacuguuauucuuugcacu

SEQ ID NO: 1976351 - RNA, 13 nt, Human
uaauaccucccuu

SEQ ID NO: 1976352 - RNA, 22 nt, Human
uaauacaggauuauuuugauua

SEQ ID NO: 1976353 - RNA, 22 nt, Human
uaauccaagcaaaugugaauca

SEQ ID NO: 1976354 - RNA, 12 nt, Human
uaaucauuuuuu

SEQ ID NO: 1976355 - RNA, 17 nt, Human
uaaucuuuaauuuuaca

SEQ ID NO: 1976356 - RNA, 21 nt, Human
uaauauugauaugcuuauaca

SEQ ID NO: 1976357 - RNA, 20 nt, Human
uaaucagggaccaccagagg

SEQ ID NO: 1976358 - RNA, 17 nt, Human
uaauguaagcucuacug

SEQ ID NO: 1976359 - RNA, 16 nt, Human
uaauguaagcucuacu

SEQ ID NO: 1976360 - RNA, 15 nt, Human
uaauguaagacaaau

SEQ ID NO: 1976361 - RNA, 19 nt, Human
uaaucuugugaaaauaauu

SEQ ID NO: 1976362 - RNA, 16 nt, Human
uaaucuugugaaaaua

SEQ ID NO: 1976363 - RNA, 12 nt, Human
uaaugugaaacu

SEQ ID NO: 1976364 - RNA, 20 nt, Human
uaaugugaaacuggauuaaa

SEQ ID NO: 1976365 - RNA, 22 nt, Human
uaaugugaaacuggauuaaacu

SEQ ID NO: 1976366 - RNA, 23 nt, Human
uaaugugaaacuggauuaaacuu

SEQ ID NO: 1976367 - RNA, 16 nt, Human
uaaugucacaggcagg

SEQ ID NO: 1976368 - RNA, 17 nt, Human
uaaugucacaggcaggu

SEQ ID NO: 1976369 - RNA, 15 nt, Human
uaaugucacaggcag

SEQ ID NO: 1976370 - RNA, 13 nt, Human
uaauguggcuucu

SEQ ID NO: 1976371 - RNA, 13 nt, Human
aaucuugaaaaug

SEQ ID NO: 1976372 - RNA, 23 nt, Human
aaucuucugaacuuggcgcugcc

SEQ ID NO: 1976373 - RNA, 15 nt, Human
aaugaaugaaugaau

SEQ ID NO: 1976374 - RNA, 14 nt, Human
aaugaaugaaacau

SEQ ID NO: 1976375 - RNA, 14 nt, Human
aaugaaugucagug

SEQ ID NO: 1976376 - RNA, 15 nt, Human
aaugaaugucagugu

SEQ ID NO: 1976377 - RNA, 23 nt, Human
aaucuuuuccaggaaaaagaacu

SEQ ID NO: 1976378 - RNA, 14 nt, Human
aaucuuuucugaau

SEQ ID NO: 1976379 - RNA, 22 nt, Human
aaucuuuucugaaucuucugaa

SEQ ID NO: 1976380 - RNA, 20 nt, Human
uaauuugaagguagaauguu

SEQ ID NO: 1976381 - RNA, 21 nt, Human
uaauuuuuguauuuuuaguag

SEQ ID NO: 1976382 - RNA, 18 nt, Human
uaauuuaccugaagucuu

SEQ ID NO: 1976383 - RNA, 17 nt, Human
uaauuuaccugaagucu

SEQ ID NO: 1976384 - RNA, 20 nt, Human
uaauuuaaguuuugacaagc

SEQ ID NO: 1976385 - RNA, 17 nt, Human
uaauuuccuuaaagcaa

SEQ ID NO: 1976386 - RNA, 14 nt, Human
uaauuuaaguuuug

SEQ ID NO: 1976387 - RNA, 15 nt, Human
uaauuuaaguuuuga

SEQ ID NO: 1976388 - RNA, 13 nt, Human
uaauucauguugc

SEQ ID NO: 1976389 - RNA, 16 nt, Human
uacaaaaacauggccu

SEQ ID NO: 1976390 - RNA, 16 nt, Human
uacaagcgugagccac

SEQ ID NO: 1976391 - RNA, 18 nt, Human
uacaagcgugagccacug

SEQ ID NO: 1976392 - RNA, 19 nt, Human
uacaagcgugagccacugc

SEQ ID NO: 1976393 - RNA, 20 nt, Human
uacaagcgugagccacugca

SEQ ID NO: 1976394 - RNA, 21 nt, Human
uacaagcgugagccacugcac

SEQ ID NO: 1976395 - RNA, 20 nt, Human
uacaauaaaaucuugaaaau

SEQ ID NO: 1976396 - RNA, 16 nt, Human
aaugcaaaccaucauu

SEQ ID NO: 1976397 - RNA, 15 nt, Human
aaugaccuuucaaua

SEQ ID NO: 1976398 - RNA, 14 nt, Human
aaugaccuuucaau

SEQ ID NO: 1976399 - RNA, 13 nt, Human
aaugaccuuucaa

SEQ ID NO: 1976400 - RNA, 13 nt, Human
aaugaccuuguaa

SEQ ID NO: 1976401 - RNA, 14 nt, Human
aaugaccuuguaau

SEQ ID NO: 1976402 - RNA, 16 nt, Human
aaugaccuuguaaugu

SEQ ID NO: 1976403 - RNA, 18 nt, Human
aaugaccuuguaauguaa

SEQ ID NO: 1976404 - RNA, 21 nt, Human
aaugaaugucagugugacuga

SEQ ID NO: 1976405 - RNA, 20 nt, Human
aaugaaugucagugugacug

SEQ ID NO: 1976406 - RNA, 23 nt, Human
aaugcaaaccaucauugaaaucu

SEQ ID NO: 1976407 - RNA, 22 nt, Human
aaugcaaaccaucauugaaauc

SEQ ID NO: 1976408 - RNA, 19 nt, Human
aaugaccuuguaauguaac

SEQ ID NO: 1976409 - RNA, 20 nt, Human
aaugaccuuguaauguaacu

SEQ ID NO: 1976410 - RNA, 21 nt, Human
aaugaccuuguaauguaacug

SEQ ID NO: 1976411 - RNA, 22 nt, Human
aaugaccuuguaauguaacugc

SEQ ID NO: 1976412 - RNA, 13 nt, Human
aaugcaaccauuu

SEQ ID NO: 1976413 - RNA, 17 nt, Human
aaugcaaccauuugaaa

SEQ ID NO: 1976414 - RNA, 18 nt, Human
aaugcaaccauuugaaac

SEQ ID NO: 1976415 - RNA, 18 nt, Human
aaugcacaaacagaggcc

SEQ ID NO: 1976416 - RNA, 16 nt, Human
aaugcacuuuguucug

SEQ ID NO: 1976417 - RNA, 13 nt, Human
aaugcacuuuguu

SEQ ID NO: 1976418 - RNA, 20 nt, Human
aaugcacaaacagaggccgc

SEQ ID NO: 1976419 - RNA, 19 nt, Human
aaugcacaaacagaggccg

SEQ ID NO: 1976420 - RNA, 20 nt, Human
aaugcacuuuguucuggcuc

SEQ ID NO: 1976421 - RNA, 19 nt, Human
aaugcacuuuguucuggcu

SEQ ID NO: 1976422 - RNA, 23 nt, Human
uaauuaguuccucauuagcauuu

SEQ ID NO: 1976423 - RNA, 20 nt, Human
uaauuauacccccugcaaag

SEQ ID NO: 1976424 - RNA, 15 nt, Human
aaugcaauaugugaa

SEQ ID NO: 1976425 - RNA, 20 nt, Human
aauguaggggaaaguuucau

SEQ ID NO: 1976426 - RNA, 12 nt, Human
aauguagagggg

SEQ ID NO: 1976427 - RNA, 15 nt, Human
aauguaugcuucaua

SEQ ID NO: 1976428 - RNA, 16 nt, Human
aauguaugcuucauac

SEQ ID NO: 1976429 - RNA, 17 nt, Human
aauguaugcuucauaca

SEQ ID NO: 1976430 - RNA, 15 nt, Human
aauguaguuugagga

SEQ ID NO: 1976431 - RNA, 22 nt, Human
aaugugaaacuggauuaaacuu

SEQ ID NO: 1976432 - RNA, 14 nt, Human
aaugucacaggcag

SEQ ID NO: 1976433 - RNA, 13 nt, Human
aaugucacaggca

SEQ ID NO: 1976434 - RNA, 18 nt, Human
aaugucaaaaauauuuag

SEQ ID NO: 1976435 - RNA, 14 nt, Human
aaugucaaaaguag

SEQ ID NO: 1976436 - RNA, 15 nt, Human
aaugucaaaaguaga

SEQ ID NO: 1976437 - RNA, 19 nt, Human
aaugucaaaaguagaacuu

SEQ ID NO: 1976438 - RNA, 23 nt, Human
aaugucaaaaguagaacuuugua

SEQ ID NO: 1976439 - RNA, 18 nt, Human
uacaguccucccaucuca

SEQ ID NO: 1976440 - RNA, 17 nt, Human
uacaguccucccaucuc

SEQ ID NO: 1976441 - RNA, 15 nt, Human
uacaguccucccauc

SEQ ID NO: 1976442 - RNA, 12 nt, Human
uacaguccuccc

SEQ ID NO: 1976443 - RNA, 18 nt, Human
uacaguaucucagggccu

SEQ ID NO: 1976444 - RNA, 20 nt, Human
uacaguggggaaugaagaua

SEQ ID NO: 1976445 - RNA, 15 nt, Human
uacauaaugcgugca

SEQ ID NO: 1976446 - RNA, 23 nt, Human
uacauaauacugaaccacuugua

SEQ ID NO: 1976447 - RNA, 20 nt, Human
uacauaauacugaaccacuu

SEQ ID NO: 1976448 - RNA, 16 nt, Human
uacagugccuaaaaua

SEQ ID NO: 1976449 - RNA, 22 nt, Human
aaugguuuucuuguguguuuau

SEQ ID NO: 1976450 - RNA, 18 nt, Human
aaugguuuucuugugugu

SEQ ID NO: 1976451 - RNA, 17 nt, Human
aaugguuuucuugugug

SEQ ID NO: 1976452 - RNA, 15 nt, Human
aauguaagcucuacu

SEQ ID NO: 1976453 - RNA, 13 nt, Human
aauguaagcucua

SEQ ID NO: 1976454 - RNA, 13 nt, Human
aauguaagacaaa

SEQ ID NO: 1976455 - RNA, 23 nt, Human
aauguaaaaaggaauaugaaagu

SEQ ID NO: 1976456 - RNA, 17 nt, Human
uacaauauuugugugcu

SEQ ID NO: 1976457 - RNA, 16 nt, Human
aaugguuuaaaugguc

SEQ ID NO: 1976458 - RNA, 15 nt, Human
uacaauauguacauu

SEQ ID NO: 1976459 - RNA, 16 nt, Human
uacaauauguacauuu

SEQ ID NO: 1976460 - RNA, 21 nt, Human
uacaauauguacauuucuaag

SEQ ID NO: 1976461 - RNA, 22 nt, Human
uacagcaaggagauuuacaacu

SEQ ID NO: 1976462 - RNA, 19 nt, Human
uacagacuggauguaccac

SEQ ID NO: 1976463 - RNA, 15 nt, Human
uacagagaaagaaau

SEQ ID NO: 1976464 - RNA, 16 nt, Human
uacagagaaagaaauu

SEQ ID NO: 1976465 - RNA, 22 nt, Human
uacacgguucaaaccugugaag

SEQ ID NO: 1976466 - RNA, 21 nt, Human
aauguacagcaaggagauuua

SEQ ID NO: 1976467 - RNA, 23 nt, Human
aauguacagcaaggagauuuaca

SEQ ID NO: 1976468 - RNA, 14 nt, Human
aauguacauguauu

SEQ ID NO: 1976469 - RNA, 16 nt, Human
aauguacauguauuaa

SEQ ID NO: 1976470 - RNA, 20 nt, Human
aauguacauguauuaaauua

SEQ ID NO: 1976471 - RNA, 12 nt, Human
aauguugauuuc

SEQ ID NO: 1976472 - RNA, 13 nt, Human
aauguugauuucu

SEQ ID NO: 1976473 - RNA, 14 nt, Human
aauguugauuucua

SEQ ID NO: 1976474 - RNA, 15 nt, Human
aauguugauuucuag

SEQ ID NO: 1976475 - RNA, 16 nt, Human
aauguugauuucuagu

SEQ ID NO: 1976476 - RNA, 22 nt, Human
aauguugauuucuaguuauuua

SEQ ID NO: 1976477 - RNA, 23 nt, Human
aauguugauuucuaguuauuuau

SEQ ID NO: 1976478 - RNA, 17 nt, Human
aauguugauuucuaguu

SEQ ID NO: 1976479 - RNA, 18 nt, Human
aauguugauuucuaguua

SEQ ID NO: 1976480 - RNA, 20 nt, Human
aauguugauuucuaguuauu

SEQ ID NO: 1976481 - RNA, 21 nt, Human
aauguugauuucuaguuauuu

SEQ ID NO: 1976482 - RNA, 16 nt, Human
aauguugaagaacuca

SEQ ID NO: 1976483 - RNA, 23 nt, Human
aauguugaagaacucaugugauu

SEQ ID NO: 1976484 - RNA, 16 nt, Human
aauguugaacaaaaua

SEQ ID NO: 1976485 - RNA, 17 nt, Human
aauguugaacaaaauaa

SEQ ID NO: 1976486 - RNA, 21 nt, Human
aauguugaacaaaauaaauug

SEQ ID NO: 1976487 - RNA, 22 nt, Human
aauguugaacaaaauaaauugg

SEQ ID NO: 1976488 - RNA, 12 nt, Human
aaugugaauuac

SEQ ID NO: 1976489 - RNA, 17 nt, Human
aaugugaauuacuaacu

SEQ ID NO: 1976490 - RNA, 19 nt, Human
aaugugaacagcggcugga

SEQ ID NO: 1976491 - RNA, 15 nt, Human
aaugucaaaugugaa

SEQ ID NO: 1976492 - RNA, 18 nt, Human
aauuaacuuuuauaaacu

SEQ ID NO: 1976493 - RNA, 20 nt, Human
aauuaacuuuuauaaacuuu

SEQ ID NO: 1976494 - RNA, 22 nt, Human
aauuaacuuuuauaaacuuuac

SEQ ID NO: 1976495 - RNA, 15 nt, Human
aauuaagagagucua

SEQ ID NO: 1976496 - RNA, 17 nt, Human
aauuaacacuuaagguu

SEQ ID NO: 1976497 - RNA, 19 nt, Human
aauuaacaugaauauuuag

SEQ ID NO: 1976498 - RNA, 19 nt, Human
uacauuagcaguuugcuuu

SEQ ID NO: 1976499 - RNA, 20 nt, Human
uacauuagcaguuugcuuug

SEQ ID NO: 1976500 - RNA, 19 nt, Human
uacauguuuauguaaacaa

SEQ ID NO: 1976501 - RNA, 21 nt, Human
uacauguuuauguaaacaaau

SEQ ID NO: 1976502 - RNA, 14 nt, Human
uacauguuuaugua

SEQ ID NO: 1976503 - RNA, 15 nt, Human
uacauguuuauguaa

SEQ ID NO: 1976504 - RNA, 18 nt, Human
uacauguuuauguaaaca

SEQ ID NO: 1976505 - RNA, 23 nt, Human
uacauggcuggagcuagaauuug

SEQ ID NO: 1976506 - RNA, 20 nt, Human
aauuaagguguuugaaaaua

SEQ ID NO: 1976507 - RNA, 13 nt, Human
uacaugggacuau

SEQ ID NO: 1976508 - RNA, 18 nt, Human
uacaugggacuaugcuuu

SEQ ID NO: 1976509 - RNA, 19 nt, Human
uacaugggacuaugcuuuu

SEQ ID NO: 1976510 - RNA, 17 nt, Human
uacauguacugauuacu

SEQ ID NO: 1976511 - RNA, 19 nt, Human
uacauguaucaagccuaga

SEQ ID NO: 1976512 - RNA, 17 nt, Human
uacauguauuaaauuac

SEQ ID NO: 1976513 - RNA, 18 nt, Human
uacauguauuaaauuaca

SEQ ID NO: 1976514 - RNA, 19 nt, Human
uacauguauuaaauuacau

SEQ ID NO: 1976515 - RNA, 20 nt, Human
uacauguauuaaauuacauu

SEQ ID NO: 1976516 - RNA, 23 nt, Human
uacauguauuaaauuacauuugu

SEQ ID NO: 1976517 - RNA, 13 nt, Human
aauuaaguacuau

SEQ ID NO: 1976518 - RNA, 13 nt, Human
aauuaagguguuu

SEQ ID NO: 1976519 - RNA, 15 nt, Human
aauuaagguguuuga

SEQ ID NO: 1976520 - RNA, 16 nt, Human
aauuaagguguuugaa

SEQ ID NO: 1976521 - RNA, 17 nt, Human
aauuaagguguuugaaa

SEQ ID NO: 1976522 - RNA, 18 nt, Human
aauuaagguguuugaaaa

SEQ ID NO: 1976523 - RNA, 15 nt, Human
uacauuuaaaacauu

SEQ ID NO: 1976524 - RNA, 16 nt, Human
uacauuuaaaacauua

SEQ ID NO: 1976525 - RNA, 19 nt, Human
uacauuuaaaacauuaaaa

SEQ ID NO: 1976526 - RNA, 20 nt, Human
uacauuuaaaacauuaaaau

SEQ ID NO: 1976527 - RNA, 17 nt, Human
uaccacuuuuguucuug

SEQ ID NO: 1976528 - RNA, 19 nt, Human
uaccacugaaucuguacag

SEQ ID NO: 1976529 - RNA, 20 nt, Human
uaccacugaaucuguacaga

SEQ ID NO: 1976530 - RNA, 11 nt, Human
uaccacugaau

SEQ ID NO: 1976531 - RNA, 15 nt, Human
uaccacugaaucugu

SEQ ID NO: 1976532 - RNA, 16 nt, Human
uaccacugaaucugua

SEQ ID NO: 1976533 - RNA, 18 nt, Human
uaccacugaaucuguaca

SEQ ID NO: 1976534 - RNA, 15 nt, Human
uaccacuuuagauga

SEQ ID NO: 1976535 - RNA, 19 nt, Human
uaccccaagcgcccuggcc

SEQ ID NO: 1976536 - RNA, 17 nt, Human
uaccauccccuguagag

SEQ ID NO: 1976537 - RNA, 16 nt, Human
uaccccauggaccaug

SEQ ID NO: 1976538 - RNA, 22 nt, Human
uacccuggcacuauaauguaag

SEQ ID NO: 1976539 - RNA, 20 nt, Human
uacccuggcacuauaaugua

SEQ ID NO: 1976540 - RNA, 16 nt, Human
uacccucauguucuua

SEQ ID NO: 1976541 - RNA, 15 nt, Human
uacccucauguucuu

SEQ ID NO: 1976542 - RNA, 23 nt, Human
uaccccucccggcccugccugcu

SEQ ID NO: 1976543 - RNA, 20 nt, Human
uacccgggaagggggcuggg

SEQ ID NO: 1976544 - RNA, 21 nt, Human
uaccccucccggcccugccug

SEQ ID NO: 1976545 - RNA, 22 nt, Human
uaccccucccggcccugccugc

SEQ ID NO: 1976546 - RNA, 16 nt, Human
guucugugacuaggaa

SEQ ID NO: 1976547 - RNA, 12 nt, Human
guucucugcccu

SEQ ID NO: 1976548 - RNA, 15 nt, Human
guucuguauuugaaa

SEQ ID NO: 1976549 - RNA, 20 nt, Human
guucuguauuugaaagugcc

SEQ ID NO: 1976550 - RNA, 20 nt, Human
guucuccagucauuauguua

SEQ ID NO: 1976551 - RNA, 18 nt, Human
guucuccagucauuaugu

SEQ ID NO: 1976552 - RNA, 11 nt, Human
guucucugccc

SEQ ID NO: 1976553 - RNA, 16 nt, Human
guucucugaggacacu

SEQ ID NO: 1976554 - RNA, 18 nt, Human
guuccccuguucacucua

SEQ ID NO: 1976555 - RNA, 24 nt, Human
guuccccuggaagcagugcccagg

SEQ ID NO: 1976556 - RNA, 13 nt, Human
guucuguuacaaa

SEQ ID NO: 1976557 - RNA, 14 nt, Human
guucuguuacaaaa

SEQ ID NO: 1976558 - RNA, 18 nt, Human
guucuguuacaaaaugua

SEQ ID NO: 1976559 - RNA, 19 nt, Human
guucuguuacaaaauguaa

SEQ ID NO: 1976560 - RNA, 20 nt, Human
guucuguuacaaaauguaac

SEQ ID NO: 1976561 - RNA, 13 nt, Human
guugaauuuuaca

SEQ ID NO: 1976562 - RNA, 21 nt, Human
guucuguuacaaaauguaacu

SEQ ID NO: 1976563 - RNA, 22 nt, Human
guucuguuacaaaauguaacug

SEQ ID NO: 1976564 - RNA, 22 nt, Human
guugauagcacagacccugccc

SEQ ID NO: 1976565 - RNA, 12 nt, Human
guugagcuauga

SEQ ID NO: 1976566 - RNA, 15 nt, Human
guugagcuaugacuu

SEQ ID NO: 1976567 - RNA, 16 nt, Human
guugagcuaugacuua

SEQ ID NO: 1976568 - RNA, 23 nt, Human
guugauagcacagacccugcccu

SEQ ID NO: 1976569 - RNA, 14 nt, Human
guugagaggacacu

SEQ ID NO: 1976570 - RNA, 19 nt, Human
guugacaucacuggcaugg

SEQ ID NO: 1976571 - RNA, 18 nt, Human
guugagaggacacucccg

SEQ ID NO: 1976572 - RNA, 22 nt, Human
aagcucccaggcauuccccagg

SEQ ID NO: 1976573 - RNA, 12 nt, Human
aagcucccaggc

SEQ ID NO: 1976574 - RNA, 23 nt, Human
aagcucccaggcauuccccagga

SEQ ID NO: 1976575 - RNA, 13 nt, Human
guguuuauuguca

SEQ ID NO: 1976576 - RNA, 15 nt, Human
guguuuauucuugau

SEQ ID NO: 1976577 - RNA, 11 nt, Human
aagcucccagg

SEQ ID NO: 1976578 - RNA, 16 nt, Human
aagcuccaucuuauuu

SEQ ID NO: 1976579 - RNA, 12 nt, Human
guguuuaugugu

SEQ ID NO: 1976580 - RNA, 18 nt, Human
guguuuauaucuccuuug

SEQ ID NO: 1976581 - RNA, 17 nt, Human
guguuuaucagaaaggg

SEQ ID NO: 1976582 - RNA, 16 nt, Human
guguuuaugugugugu

SEQ ID NO: 1976583 - RNA, 14 nt, Human
guguuuauucuuga

SEQ ID NO: 1976584 - RNA, 22 nt, Human
guguuuaagacauuuuuggaag

SEQ ID NO: 1976585 - RNA, 12 nt, Human
guguuuaacuga

SEQ ID NO: 1976586 - RNA, 15 nt, Human
guguuuagaauugaa

SEQ ID NO: 1976587 - RNA, 14 nt, Human
guguuuacagagau

SEQ ID NO: 1976588 - RNA, 18 nt, Human
guguuuagaauugaaggu

SEQ ID NO: 1976589 - RNA, 20 nt, Human
aagcuuuguugaaagaaagu

SEQ ID NO: 1976590 - RNA, 16 nt, Human
aagcuuuguuuguucu

SEQ ID NO: 1976591 - RNA, 17 nt, Human
aagcuguuugguuuuaa

SEQ ID NO: 1976592 - RNA, 18 nt, Human
aagcuguuacugucuuca

SEQ ID NO: 1976593 - RNA, 13 nt, Human
aagcucugcuccu

SEQ ID NO: 1976594 - RNA, 14 nt, Human
aagcuguucuuccu

SEQ ID NO: 1976595 - RNA, 15 nt, Human
aagcuguucuuccug

SEQ ID NO: 1976596 - RNA, 16 nt, Human
aagcuguucuuccugg

SEQ ID NO: 1976597 - RNA, 18 nt, Human
aagcuguugaccaggcac

SEQ ID NO: 1976598 - RNA, 19 nt, Human
aagcuguuggccucugcaa

SEQ ID NO: 1976599 - RNA, 16 nt, Human
aagcuuuuaugugaaa

SEQ ID NO: 1976600 - RNA, 12 nt, Human
guuccccuggaa

SEQ ID NO: 1976601 - RNA, 21 nt, Human
guuccccuggaagcagugccc

SEQ ID NO: 1976602 - RNA, 15 nt, Human
guuccccuguucacu

SEQ ID NO: 1976603 - RNA, 17 nt, Human
guuccccuguucacucu

SEQ ID NO: 1976604 - RNA, 16 nt, Human
aaggaaaaaauaacaa

SEQ ID NO: 1976605 - RNA, 19 nt, Human
aaggaaaaaauaacaauga

SEQ ID NO: 1976606 - RNA, 22 nt, Human
aaggauccugagccagauuuca

SEQ ID NO: 1976607 - RNA, 20 nt, Human
aaggauccugagccagauuu

SEQ ID NO: 1976608 - RNA, 12 nt, Human
aaggauccugag

SEQ ID NO: 1976609 - RNA, 11 nt, Human
aaggauccuga

SEQ ID NO: 1976610 - RNA, 11 nt, Human
aaggauaaagu

SEQ ID NO: 1976611 - RNA, 20 nt, Human
aaggaggaagagaaaaaaua

SEQ ID NO: 1976612 - RNA, 21 nt, Human
aaggauaaaguugguaaaccu

SEQ ID NO: 1976613 - RNA, 23 nt, Human
aaggauaaaguugguaaaccuuu

SEQ ID NO: 1976614 - RNA, 13 nt, Human
aaggauaaugaau

SEQ ID NO: 1976615 - RNA, 15 nt, Human
aaggaaacccagcuc

SEQ ID NO: 1976616 - RNA, 16 nt, Human
aaggaaacccagcucu

SEQ ID NO: 1976617 - RNA, 16 nt, Human
aaggaagguaaaaagu

SEQ ID NO: 1976618 - RNA, 18 nt, Human
aaggaagguaaaaaguua

SEQ ID NO: 1976619 - RNA, 17 nt, Human
aaggaagguaguucaag

SEQ ID NO: 1976620 - RNA, 18 nt, Human
aaggagauuuacaacugg

SEQ ID NO: 1976621 - RNA, 22 nt, Human
aaggagcaagucagaauagaaa

SEQ ID NO: 1976622 - RNA, 17 nt, Human
aaggagauuuacaacug

SEQ ID NO: 1976623 - RNA, 14 nt, Human
aaggagacuguguu

SEQ ID NO: 1976624 - RNA, 18 nt, Human
aaggagaaucauguuucu

SEQ ID NO: 1976625 - RNA, 19 nt, Human
aaggagaaucauguuucuu

SEQ ID NO: 1976626 - RNA, 20 nt, Human
aaggagaaucauguuucuuu

SEQ ID NO: 1976627 - RNA, 22 nt, Human
aaggagaaucauguuucuuuga

SEQ ID NO: 1976628 - RNA, 19 nt, Human
aaggaugcccaaagaugca

SEQ ID NO: 1976629 - RNA, 22 nt, Human
aaggaugccaagaaguuuaagg

SEQ ID NO: 1976630 - RNA, 14 nt, Human
aaggaugcccaaag

SEQ ID NO: 1976631 - RNA, 24 nt, Human
aaggaugcacagaguuguuacauu

SEQ ID NO: 1976632 - RNA, 20 nt, Human
aaggaugccaagaaguuuaa

SEQ ID NO: 1976633 - RNA, 22 nt, Human
aaggaugcacagaguuguuaca

SEQ ID NO: 1976634 - RNA, 16 nt, Human
aaggccccgcccaggc

SEQ ID NO: 1976635 - RNA, 14 nt, Human
aaggccccgcccag

SEQ ID NO: 1976636 - RNA, 19 nt, Human
aaggcccccugccugcccu

SEQ ID NO: 1976637 - RNA, 14 nt, Human
aaggcccccugccu

SEQ ID NO: 1976638 - RNA, 15 nt, Human
aaggcccccugccug

SEQ ID NO: 1976639 - RNA, 19 nt, Human
aaggccccgcccaggcuua

SEQ ID NO: 1976640 - RNA, 13 nt, Human
aaggcuaccuuug

SEQ ID NO: 1976641 - RNA, 18 nt, Human
aaggcgcuaacuugcuua

SEQ ID NO: 1976642 - RNA, 22 nt, Human
aaggcgcuaacuugcuuaaaug

SEQ ID NO: 1976643 - RNA, 23 nt, Human
aaggcgcuaacuugcuuaaaugu

SEQ ID NO: 1976644 - RNA, 15 nt, Human
aaggcuaccuuugua

SEQ ID NO: 1976645 - RNA, 14 nt, Human
guugcccaggcugg

SEQ ID NO: 1976646 - RNA, 21 nt, Human
guugggggaggggagacuuug

SEQ ID NO: 1976647 - RNA, 22 nt, Human
guugguuccaagucuuugcuau

SEQ ID NO: 1976648 - RNA, 14 nt, Human
guugggagaauguc

SEQ ID NO: 1976649 - RNA, 21 nt, Human
guugggagaaugucaguaugu

SEQ ID NO: 1976650 - RNA, 17 nt, Human
guugggcuggugucacc

SEQ ID NO: 1976651 - RNA, 23 nt, Human
guugggacccaguggcagggcac

SEQ ID NO: 1976652 - RNA, 21 nt, Human
guugggacccaguggcagggc

SEQ ID NO: 1976653 - RNA, 22 nt, Human
guugggacccaguggcagggca

SEQ ID NO: 1976654 - RNA, 16 nt, Human
guugggacccaguggc

SEQ ID NO: 1976655 - RNA, 20 nt, Human
guugggacccaguggcaggg

SEQ ID NO: 1976656 - RNA, 15 nt, Human
guugcccaggcuggc

SEQ ID NO: 1976657 - RNA, 20 nt, Human
guugcccaggcuggagugca

SEQ ID NO: 1976658 - RNA, 16 nt, Human
guugcccaggcuggcg

SEQ ID NO: 1976659 - RNA, 17 nt, Human
guugcccaggcuggcgu

SEQ ID NO: 1976660 - RNA, 23 nt, Human
guuggcugggggccucagugcca

SEQ ID NO: 1976661 - RNA, 15 nt, Human
guugcugacuuagaa

SEQ ID NO: 1976662 - RNA, 13 nt, Human
guugcugauuuua

SEQ ID NO: 1976663 - RNA, 14 nt, Human
guugcugauuuuau

SEQ ID NO: 1976664 - RNA, 18 nt, Human
guugcugauuuuauucuu

SEQ ID NO: 1976665 - RNA, 20 nt, Human
guugcugauuuuauucuuga

SEQ ID NO: 1976666 - RNA, 15 nt, Human
aaguacuauguauca

SEQ ID NO: 1976667 - RNA, 16 nt, Human
aaguacuauguaucaa

SEQ ID NO: 1976668 - RNA, 15 nt, Human
guuuuauauccauuu

SEQ ID NO: 1976669 - RNA, 16 nt, Human
aaguacugagcaguga

SEQ ID NO: 1976670 - RNA, 23 nt, Human
aaguacugagcagugauauucuu

SEQ ID NO: 1976671 - RNA, 15 nt, Human
aaguacuggagaaaa

SEQ ID NO: 1976672 - RNA, 21 nt, Human
aaguacuucuccacccugcuc

SEQ ID NO: 1976673 - RNA, 22 nt, Human
aaguacuucuccacccugcucu

SEQ ID NO: 1976674 - RNA, 23 nt, Human
aaguacuucuccacccugcucuc

SEQ ID NO: 1976675 - RNA, 15 nt, Human
aaguauguuuuacuu

SEQ ID NO: 1976676 - RNA, 13 nt, Human
aaguauucucuuu

SEQ ID NO: 1976677 - RNA, 20 nt, Human
aagucacauuccugaacagg

SEQ ID NO: 1976678 - RNA, 16 nt, Human
aagucacaguuaagga

SEQ ID NO: 1976679 - RNA, 13 nt, Human
aagucacacagug

SEQ ID NO: 1976680 - RNA, 13 nt, Human
aagucacaguuaa

SEQ ID NO: 1976681 - RNA, 14 nt, Human
aagucacugcacag

SEQ ID NO: 1976682 - RNA, 12 nt, Human
aagucacugcac

SEQ ID NO: 1976683 - RNA, 19 nt, Human
aagucacugcaaaaccagg

SEQ ID NO: 1976684 - RNA, 22 nt, Human
aagucacugcaaaaccagguuu

SEQ ID NO: 1976685 - RNA, 19 nt, Human
aagucacaguuaaggagaa

SEQ ID NO: 1976686 - RNA, 21 nt, Human
aagucaagugaaaaaggagga

SEQ ID NO: 1976687 - RNA, 24 nt, Human
aagucacacaguauuacuucugcu

SEQ ID NO: 1976688 - RNA, 19 nt, Human
aagucaaggguaggguggg

SEQ ID NO: 1976689 - RNA, 18 nt, Human
aaguauucucuuuucaag

SEQ ID NO: 1976690 - RNA, 19 nt, Human
aaguauucuuauuuaauga

SEQ ID NO: 1976691 - RNA, 18 nt, Human
aaguauucuuauuuaaug

SEQ ID NO: 1976692 - RNA, 18 nt, Human
guuuuucuaggccugggg

SEQ ID NO: 1976693 - RNA, 14 nt, Human
aagugacgguuccu

SEQ ID NO: 1976694 - RNA, 15 nt, Human
aagugacgguuccua

SEQ ID NO: 1976695 - RNA, 17 nt, Human
aagugacgguuccuaca

SEQ ID NO: 1976696 - RNA, 18 nt, Human
aagugaccaucauuucac

SEQ ID NO: 1976697 - RNA, 17 nt, Human
aagucuuagauguauau

SEQ ID NO: 1976698 - RNA, 13 nt, Human
aagucaugauguu

SEQ ID NO: 1976699 - RNA, 17 nt, Human
aagucaugauguuuuua

SEQ ID NO: 1976700 - RNA, 18 nt, Human
aagucaugauguuuuuaa

SEQ ID NO: 1976701 - RNA, 19 nt, Human
aagucaugauguuuuuaaa

SEQ ID NO: 1976702 - RNA, 21 nt, Human
aagucaugauguuuuuaaaau

SEQ ID NO: 1976703 - RNA, 22 nt, Human
aagucaugauguuuuuaaaauc

SEQ ID NO: 1976704 - RNA, 23 nt, Human
aagucaugauguuuuuaaaaucu

SEQ ID NO: 1976705 - RNA, 19 nt, Human
aagucuuagauguauauau

SEQ ID NO: 1976706 - RNA, 18 nt, Human
aagucuuagauguauaua

SEQ ID NO: 1976707 - RNA, 16 nt, Human
guuuuugucuuaaaaa

SEQ ID NO: 1976708 - RNA, 12 nt, Human
guuuuuguaaag

SEQ ID NO: 1976709 - RNA, 13 nt, Human
guuuuuguaaaga

SEQ ID NO: 1976710 - RNA, 15 nt, Human
guuuuuguaaagaaa

SEQ ID NO: 1976711 - RNA, 19 nt, Human
guuuuuguaaagaaaaaua

SEQ ID NO: 1976712 - RNA, 20 nt, Human
guuuuuguaaagaaaaauau

SEQ ID NO: 1976713 - RNA, 21 nt, Human
guuuuuguaaagaaaaauauu

SEQ ID NO: 1976714 - RNA, 15 nt, Human
guuuuuguaaagauu

SEQ ID NO: 1976715 - RNA, 14 nt, Human
guuuuuguuuuguu

SEQ ID NO: 1976716 - RNA, 17 nt, Human
guuuuuguuuuguugca

SEQ ID NO: 1976717 - RNA, 19 nt, Human
guuuuuguuuuuguuuugu

SEQ ID NO: 1976718 - RNA, 18 nt, Human
guuuuuuaaaaaucugug

SEQ ID NO: 1976719 - RNA, 22 nt, Human
guuuuuguaaagauuucuguuc

SEQ ID NO: 1976720 - RNA, 14 nt, Human
guuuuuguauauug

SEQ ID NO: 1976721 - RNA, 16 nt, Human
guuuuucugcuuuaga

SEQ ID NO: 1976722 - RNA, 18 nt, Human
guuuuucugcuuuagacu

SEQ ID NO: 1976723 - RNA, 19 nt, Human
guuuuucugcuuuagacuu

SEQ ID NO: 1976724 - RNA, 22 nt, Human
guuuuucugcuuuagacuugaa

SEQ ID NO: 1976725 - RNA, 15 nt, Human
guuuuucugauaugu

SEQ ID NO: 1976726 - RNA, 14 nt, Human
guuuuucugcuuua

SEQ ID NO: 1976727 - RNA, 18 nt, Human
guuuuuuguuuuucugcu

SEQ ID NO: 1976728 - RNA, 15 nt, Human
guuuuuuuuuaaaga

SEQ ID NO: 1976729 - RNA, 18 nt, Human
guuuuuuguucuugcgau

SEQ ID NO: 1976730 - RNA, 9 nt, Human
guuuuuugu

SEQ ID NO: 1976731 - RNA, 17 nt, Human
guuuuuugaaguguugg

SEQ ID NO: 1976732 - RNA, 9 nt, Human
guuuuuuga

SEQ ID NO: 1976733 - RNA, 16 nt, Human
guuuuuugaaguguug

SEQ ID NO: 1976734 - RNA, 19 nt, Human
aagggugauguacacaugu

SEQ ID NO: 1976735 - RNA, 21 nt, Human
guuucuaagguaacaagauga

SEQ ID NO: 1976736 - RNA, 17 nt, Human
aaguaaaucucuucugu

SEQ ID NO: 1976737 - RNA, 15 nt, Human
aaguaaaucucuucu

SEQ ID NO: 1976738 - RNA, 16 nt, Human
aaguaaaucucuucug

SEQ ID NO: 1976739 - RNA, 14 nt, Human
aaggggcaguggug

SEQ ID NO: 1976740 - RNA, 17 nt, Human
aaggguaucaggugcug

SEQ ID NO: 1976741 - RNA, 17 nt, Human
aaggggcaguggugguu

SEQ ID NO: 1976742 - RNA, 16 nt, Human
aaggguaucuggugac

SEQ ID NO: 1976743 - RNA, 19 nt, Human
aaggguaucaggugcugcc

SEQ ID NO: 1976744 - RNA, 15 nt, Human
aagggcccagagagg

SEQ ID NO: 1976745 - RNA, 13 nt, Human
aagggcccagaga

SEQ ID NO: 1976746 - RNA, 19 nt, Human
aaggcugagaggagagaga

SEQ ID NO: 1976747 - RNA, 18 nt, Human
guuuuacugcagcuuugu

SEQ ID NO: 1976748 - RNA, 16 nt, Human
guuuuacugcagcuuu

SEQ ID NO: 1976749 - RNA, 18 nt, Human
guuuuaaggacugacuga

SEQ ID NO: 1976750 - RNA, 19 nt, Human
guuuuaaggacugacugag

SEQ ID NO: 1976751 - RNA, 14 nt, Human
guuuuaagaggcag

SEQ ID NO: 1976752 - RNA, 18 nt, Human
guuuuaaggaugcuugua

SEQ ID NO: 1976753 - RNA, 16 nt, Human
guuuuaagaggcaggg

SEQ ID NO: 1976754 - RNA, 22 nt, Human
guuugcuccccuuccccuuccu

SEQ ID NO: 1976755 - RNA, 14 nt, Human
guuugcuccccuuc

SEQ ID NO: 1976756 - RNA, 18 nt, Human
guuucugccgcagcccug

SEQ ID NO: 1976757 - RNA, 22 nt, Human
guuucugccgcagcccugcaga

SEQ ID NO: 1976758 - RNA, 15 nt, Human
guuucucccgugcuu

SEQ ID NO: 1976759 - RNA, 14 nt, Human
guuucucagcuccc

SEQ ID NO: 1976760 - RNA, 19 nt, Human
guuugcaucugaaaauuga

SEQ ID NO: 1976761 - RNA, 17 nt, Human
guuugccucugccucug

SEQ ID NO: 1976762 - RNA, 13 nt, Human
guuugcuaaguga

SEQ ID NO: 1976763 - RNA, 17 nt, Human
guuugcacucaaaucuu

SEQ ID NO: 1976764 - RNA, 19 nt, Human
guuugcacucaaaucuuaa

SEQ ID NO: 1976765 - RNA, 21 nt, Human
guuugcacucaaaucuuaaga

SEQ ID NO: 1976766 - RNA, 22 nt, Human
guuugcacucaaaucuuaagaa

SEQ ID NO: 1976767 - RNA, 23 nt, Human
guuugcacucaaaucuuaagaaa

SEQ ID NO: 1976768 - RNA, 17 nt, Human
aaguucugcagauaaac

SEQ ID NO: 1976769 - RNA, 14 nt, Human
aaguuaaauaaauc

SEQ ID NO: 1976770 - RNA, 12 nt, Human
aaguuaaauaaa

SEQ ID NO: 1976771 - RNA, 11 nt, Human
aaguuaaaggg

SEQ ID NO: 1976772 - RNA, 14 nt, Human
aaguuaaagggaag

SEQ ID NO: 1976773 - RNA, 21 nt, Human
aaguguucuguuacaaaaugu

SEQ ID NO: 1976774 - RNA, 22 nt, Human
aaguguucuguuacaaaaugua

SEQ ID NO: 1976775 - RNA, 23 nt, Human
aaguguucuguuacaaaauguaa

SEQ ID NO: 1976776 - RNA, 23 nt, Human
aaguguugggguuugguuuuguu

SEQ ID NO: 1976777 - RNA, 17 nt, Human
guuuuuuuuuaaagacu

SEQ ID NO: 1976778 - RNA, 16 nt, Human
aaguguucuguuacaa

SEQ ID NO: 1976779 - RNA, 17 nt, Human
aaguguucuguuacaaa

SEQ ID NO: 1976780 - RNA, 19 nt, Human
aaguguucuguuacaaaau

SEQ ID NO: 1976781 - RNA, 20 nt, Human
aaguguucuguuacaaaaug

SEQ ID NO: 1976782 - RNA, 20 nt, Human
aaguuugcacucaaaucuua

SEQ ID NO: 1976783 - RNA, 11 nt, Human
aaguuugcacu

SEQ ID NO: 1976784 - RNA, 15 nt, Human
aaguuucaaaaaucu

SEQ ID NO: 1976785 - RNA, 16 nt, Human
aaguuucaaaaaucug

SEQ ID NO: 1976786 - RNA, 17 nt, Human
aaguuucaaaaaucuga

SEQ ID NO: 1976787 - RNA, 21 nt, Human
aaguuucaaaaaucugaagau

SEQ ID NO: 1976788 - RNA, 14 nt, Human
aaguuuaugucuca

SEQ ID NO: 1976789 - RNA, 14 nt, Human
aaguuucaaaaauc

SEQ ID NO: 1976790 - RNA, 22 nt, Human
aaguuuucccuugaggaaacaa

SEQ ID NO: 1976791 - RNA, 21 nt, Human
aaguuuucccuugaggaaaca

SEQ ID NO: 1976792 - RNA, 16 nt, Human
aaguuuucccugaagu

SEQ ID NO: 1976793 - RNA, 23 nt, Human
aaguuuucccugaaguuaugugu

SEQ ID NO: 1976794 - RNA, 19 nt, Human
aaguuuuaggguacaugug

SEQ ID NO: 1976795 - RNA, 15 nt, Human
aaguuuugacaagcu

SEQ ID NO: 1976796 - RNA, 19 nt, Human
aaguuuugacaagcuggcu

SEQ ID NO: 1976797 - RNA, 20 nt, Human
aaguuuugacaagcuggcuu

SEQ ID NO: 1976798 - RNA, 12 nt, Human
uaaaauguuuuc

SEQ ID NO: 1976799 - RNA, 13 nt, Human
uaaaauguuuuca

SEQ ID NO: 1976800 - RNA, 14 nt, Human
uaaaauguuuucag

SEQ ID NO: 1976801 - RNA, 16 nt, Human
uaaaauguuuucagcu

SEQ ID NO: 1976802 - RNA, 21 nt, Human
uaaaauguuuucagcuaggaa

SEQ ID NO: 1976803 - RNA, 17 nt, Human
uaaaauuuuuaaucuuu

SEQ ID NO: 1976804 - RNA, 19 nt, Human
uaaaauuuuaagcuaggaa

SEQ ID NO: 1976805 - RNA, 17 nt, Human
uaaaauuuuaggcaagu

SEQ ID NO: 1976806 - RNA, 21 nt, Human
uaaaauuuuaggcaaguuuuc

SEQ ID NO: 1976807 - RNA, 21 nt, Human
uaaaauuaucaccuuugucag

SEQ ID NO: 1976808 - RNA, 18 nt, Human
uaaaauuuuaagcuagga

SEQ ID NO: 1976809 - RNA, 16 nt, Human
uaaaauuaaagcugaa

SEQ ID NO: 1976810 - RNA, 18 nt, Human
uaaaauuaaagcugaaaa

SEQ ID NO: 1976811 - RNA, 19 nt, Human
uaaaauuaaagcugaaaac

SEQ ID NO: 1976812 - RNA, 23 nt, Human
uaaaauguuuucagcuaggaaca

SEQ ID NO: 1976813 - RNA, 15 nt, Human
uaaaauuauaccugu

SEQ ID NO: 1976814 - RNA, 19 nt, Human
uaaaccaaggcuagaacca

SEQ ID NO: 1976815 - RNA, 19 nt, Human
uaaaauuuuuaaucuuuaa

SEQ ID NO: 1976816 - RNA, 21 nt, Human
uaaaggcuaccuuuguauucu

SEQ ID NO: 1976817 - RNA, 19 nt, Human
uaaaggcuaccuuuguauu

SEQ ID NO: 1976818 - RNA, 21 nt, Human
uaaagcaaccaaaaagaaaaa

SEQ ID NO: 1976819 - RNA, 19 nt, Human
uaaagcaaccaaaaagaaa

SEQ ID NO: 1976820 - RNA, 19 nt, Human
uaaagauuuugaucucaca

SEQ ID NO: 1976821 - RNA, 21 nt, Human
uaaagauuuugaucucacauu

SEQ ID NO: 1976822 - RNA, 14 nt, Human
uaaagauuuugauc

SEQ ID NO: 1976823 - RNA, 15 nt, Human
uaaagauuuugaucu

SEQ ID NO: 1976824 - RNA, 14 nt, Human
uaaagauuucuguu

SEQ ID NO: 1976825 - RNA, 15 nt, Human
uaaagauuucuguuc

SEQ ID NO: 1976826 - RNA, 16 nt, Human
uaaagauguagcaaac

SEQ ID NO: 1976827 - RNA, 20 nt, Human
uaaagauguagcaaacccug

SEQ ID NO: 1976828 - RNA, 13 nt, Human
uaaagauugugug

SEQ ID NO: 1976829 - RNA, 17 nt, Human
uaaagauuuaggccaau

SEQ ID NO: 1976830 - RNA, 12 nt, Human
uaaagauuucug

SEQ ID NO: 1976831 - RNA, 13 nt, Human
uaaagauuucugu

SEQ ID NO: 1976832 - RNA, 19 nt, Human
uaaagaugagcuuugucua

SEQ ID NO: 1976833 - RNA, 18 nt, Human
uaaagaguuaguuugagu

SEQ ID NO: 1976834 - RNA, 12 nt, Human
uaaagaaauaau

SEQ ID NO: 1976835 - RNA, 14 nt, Human
uaaagaaauaauuu

SEQ ID NO: 1976836 - RNA, 14 nt, Human
uaaagaagguuuca

SEQ ID NO: 1976837 - RNA, 14 nt, Human
uaaagaauaggacu

SEQ ID NO: 1976838 - RNA, 15 nt, Human
uaaagaauaggacuu

SEQ ID NO: 1976839 - RNA, 14 nt, Human
uaaagaauuucuuu

SEQ ID NO: 1976840 - RNA, 16 nt, Human
uaaagaauuucuuuau

SEQ ID NO: 1976841 - RNA, 14 nt, Human
uaaagaauuuguca

SEQ ID NO: 1976842 - RNA, 20 nt, Human
uaaagaauuugucacaggaa

SEQ ID NO: 1976843 - RNA, 16 nt, Human
uaaagacuuuuaugau

SEQ ID NO: 1976844 - RNA, 11 nt, Human
uaaagacucua

SEQ ID NO: 1976845 - RNA, 15 nt, Human
uaaagacaccuacug

SEQ ID NO: 1976846 - RNA, 19 nt, Human
uaaagacccagggggagaa

SEQ ID NO: 1976847 - RNA, 21 nt, Human
uaaagacccagggggagaaug

SEQ ID NO: 1976848 - RNA, 21 nt, Human
uaaacucugaauuuaucuuug

SEQ ID NO: 1976849 - RNA, 13 nt, Human
uaaacucugaaua

SEQ ID NO: 1976850 - RNA, 14 nt, Human
uaaacucugaauaa

SEQ ID NO: 1976851 - RNA, 19 nt, Human
uaaacucugaauaagcacu

SEQ ID NO: 1976852 - RNA, 22 nt, Human
uaaacucugaauaagcacuuuu

SEQ ID NO: 1976853 - RNA, 17 nt, Human
uaaacucugaauuuauc

SEQ ID NO: 1976854 - RNA, 18 nt, Human
uaaacucugaauuuaucu

SEQ ID NO: 1976855 - RNA, 12 nt, Human
uaaacugccccc

SEQ ID NO: 1976856 - RNA, 18 nt, Human
uaaaccgccaaggcuggg

SEQ ID NO: 1976857 - RNA, 16 nt, Human
uaaaccgccaaggcug

SEQ ID NO: 1976858 - RNA, 13 nt, Human
uaaacgucuuaaa

SEQ ID NO: 1976859 - RNA, 17 nt, Human
uaaacgucuuaaauauu

SEQ ID NO: 1976860 - RNA, 13 nt, Human
uaaacguggagaa

SEQ ID NO: 1976861 - RNA, 23 nt, Human
uaaacguggagaaucacaggcug

SEQ ID NO: 1976862 - RNA, 22 nt, Human
uaaacguguauguuuuucaguu

SEQ ID NO: 1976863 - RNA, 23 nt, Human
uaaacguguauguuuuucaguuc

SEQ ID NO: 1976864 - RNA, 20 nt, Human
uaaacguguauguuuuucag

SEQ ID NO: 1976865 - RNA, 18 nt, Human
uaaacguguauguuuuuc

SEQ ID NO: 1976866 - RNA, 15 nt, Human
aauacaccacuacau

SEQ ID NO: 1976867 - RNA, 16 nt, Human
aauacacaaaaucaaa

SEQ ID NO: 1976868 - RNA, 16 nt, Human
aauacaccacuacauu

SEQ ID NO: 1976869 - RNA, 18 nt, Human
aauacaccacuacauucu

SEQ ID NO: 1976870 - RNA, 20 nt, Human
aauacaccacuacauucugu

SEQ ID NO: 1976871 - RNA, 21 nt, Human
aauacaccacuacauucuguu

SEQ ID NO: 1976872 - RNA, 17 nt, Human
uaaauaauucuuuuuua

SEQ ID NO: 1976873 - RNA, 23 nt, Human
uaaauaauucuuuuuuauuaauc

SEQ ID NO: 1976874 - RNA, 12 nt, Human
uaaauagcuuuu

SEQ ID NO: 1976875 - RNA, 19 nt, Human
uaaauaguaaaaauaaaau

SEQ ID NO: 1976876 - RNA, 20 nt, Human
uaaauaguaaaaauaaaauu

SEQ ID NO: 1976877 - RNA, 19 nt, Human
uaaaucuccaaaauaaaac

SEQ ID NO: 1976878 - RNA, 12 nt, Human
uaaauaguguua

SEQ ID NO: 1976879 - RNA, 15 nt, Human
uaaauaguguuauug

SEQ ID NO: 1976880 - RNA, 16 nt, Human
uaaauaguguuauuga

SEQ ID NO: 1976881 - RNA, 19 nt, Human
uaaauaguguuauugagag

SEQ ID NO: 1976882 - RNA, 18 nt, Human
uaacaaauaacaacuuuu

SEQ ID NO: 1976883 - RNA, 21 nt, Human
uaaauuuuuuuguaugaaaac

SEQ ID NO: 1976884 - RNA, 22 nt, Human
uaaauuuuuuuguaugaaaaca

SEQ ID NO: 1976885 - RNA, 15 nt, Human
uaaauuuuuuuguau

SEQ ID NO: 1976886 - RNA, 16 nt, Human
uaaauuuuuuuguaug

SEQ ID NO: 1976887 - RNA, 17 nt, Human
uaaauuuuuuuguauga

SEQ ID NO: 1976888 - RNA, 18 nt, Human
uaaauuuuuuuguaugaa

SEQ ID NO: 1976889 - RNA, 15 nt, Human
uaaauuuugaaaagu

SEQ ID NO: 1976890 - RNA, 22 nt, Human
uaaauuuugaaaaguaauauuu

SEQ ID NO: 1976891 - RNA, 14 nt, Human
uaaauuuugaaaag

SEQ ID NO: 1976892 - RNA, 13 nt, Human
uaacaagccaccc

SEQ ID NO: 1976893 - RNA, 16 nt, Human
uaacaacuaugauuug

SEQ ID NO: 1976894 - RNA, 21 nt, Human
uaacaacuaugauuuggaaaa

SEQ ID NO: 1976895 - RNA, 22 nt, Human
uaacaacuaugauuuggaaaau

SEQ ID NO: 1976896 - RNA, 15 nt, Human
uaacaacugcccagu

SEQ ID NO: 1976897 - RNA, 20 nt, Human
uaacaacuuuuuuuucuuuu

SEQ ID NO: 1976898 - RNA, 14 nt, Human
uaacaagaaaauga

SEQ ID NO: 1976899 - RNA, 13 nt, Human
uaacaagaagcaa

SEQ ID NO: 1976900 - RNA, 22 nt, Human
uaaauuaacuuuuauaaacuuu

SEQ ID NO: 1976901 - RNA, 23 nt, Human
uaaauguuuuguaaacuuugaaa

SEQ ID NO: 1976902 - RNA, 20 nt, Human
uaaauguuuuuuuuuaaaga

SEQ ID NO: 1976903 - RNA, 12 nt, Human
uaaauguuuugu

SEQ ID NO: 1976904 - RNA, 14 nt, Human
uaaauguuuuguaa

SEQ ID NO: 1976905 - RNA, 15 nt, Human
uaaauguuuuguaaa

SEQ ID NO: 1976906 - RNA, 16 nt, Human
uaaauguuuuguaaac

SEQ ID NO: 1976907 - RNA, 18 nt, Human
uaaauguuuuguaaacuu

SEQ ID NO: 1976908 - RNA, 19 nt, Human
uaaauguuuuguaaacuuu

SEQ ID NO: 1976909 - RNA, 21 nt, Human
uaaauguuuuguaaacuuuga

SEQ ID NO: 1976910 - RNA, 22 nt, Human
uaaauguuuuguaaacuuugaa

SEQ ID NO: 1976911 - RNA, 21 nt, Human
uaaauuacauuuguaauuuaa

SEQ ID NO: 1976912 - RNA, 18 nt, Human
uaaauuaguacagcacuu

SEQ ID NO: 1976913 - RNA, 15 nt, Human
uaaauuacauuugua

SEQ ID NO: 1976914 - RNA, 16 nt, Human
uaaauuacauuuguaa

SEQ ID NO: 1976915 - RNA, 17 nt, Human
uaaauuacauuuguaau

SEQ ID NO: 1976916 - RNA, 17 nt, Human
uaaaugauuucauucaa

SEQ ID NO: 1976917 - RNA, 20 nt, Human
uaaaugauucaaaaagucac

SEQ ID NO: 1976918 - RNA, 14 nt, Human
uaaaugauucaaaa

SEQ ID NO: 1976919 - RNA, 11 nt, Human
uaaauguuuug

SEQ ID NO: 1976920 - RNA, 20 nt, Human
uaaaucuccaaaauaaaacu

SEQ ID NO: 1976921 - RNA, 21 nt, Human
uaaaucuccaaaauaaaacuu

SEQ ID NO: 1976922 - RNA, 22 nt, Human
uaaaucuccaaaauaaaacuuu

SEQ ID NO: 1976923 - RNA, 19 nt, Human
aauaauuacagugccuaaa

SEQ ID NO: 1976924 - RNA, 22 nt, Human
aauaauuacagugccuaaaaua

SEQ ID NO: 1976925 - RNA, 21 nt, Human
aauaagggaaaaaucaaguau

SEQ ID NO: 1976926 - RNA, 15 nt, Human
aauaacuaaaaggua

SEQ ID NO: 1976927 - RNA, 20 nt, Human
aauaacagccgcuccagagu

SEQ ID NO: 1976928 - RNA, 15 nt, Human
aauaacuagaacaaa

SEQ ID NO: 1976929 - RNA, 23 nt, Human
aauaagcuaguugaauacuugaa

SEQ ID NO: 1976930 - RNA, 20 nt, Human
aauaagcuaguugaauacuu

SEQ ID NO: 1976931 - RNA, 22 nt, Human
aauaagcuaguugaauacuuga

SEQ ID NO: 1976932 - RNA, 17 nt, Human
aauaagcacuuuuuaaa

SEQ ID NO: 1976933 - RNA, 16 nt, Human
aauaagcuaguugaau

SEQ ID NO: 1976934 - RNA, 17 nt, Human
aauaagcuaguugaaua

SEQ ID NO: 1976935 - RNA, 18 nt, Human
aauaagcuaguugaauac

SEQ ID NO: 1976936 - RNA, 18 nt, Human
aauaaaguuugaucuucc

SEQ ID NO: 1976937 - RNA, 19 nt, Human
aauaaaguuugaucuuccu

SEQ ID NO: 1976938 - RNA, 10 nt, Human
aauaaauagu

SEQ ID NO: 1976939 - RNA, 15 nt, Human
aauaaauaguucuuc

SEQ ID NO: 1976940 - RNA, 12 nt, Human
aauaaauuauuu

SEQ ID NO: 1976941 - RNA, 22 nt, Human
aauaacauguaauuaaguacua

SEQ ID NO: 1976942 - RNA, 19 nt, Human
aauaacauguaauuaagua

SEQ ID NO: 1976943 - RNA, 12 nt, Human
aauaacauguaa

SEQ ID NO: 1976944 - RNA, 13 nt, Human
aauaacagccgcu

SEQ ID NO: 1976945 - RNA, 12 nt, Human
aauaaauuuuga

SEQ ID NO: 1976946 - RNA, 13 nt, Human
aauaaauuuugaa

SEQ ID NO: 1976947 - RNA, 14 nt, Human
aauaaauuuugaaa

SEQ ID NO: 1976948 - RNA, 22 nt, Human
aauaaauuuugaaaaguaauau

SEQ ID NO: 1976949 - RNA, 15 nt, Human
aauaaauuuugaaaa

SEQ ID NO: 1976950 - RNA, 16 nt, Human
aauaaauuuugaaaag

SEQ ID NO: 1976951 - RNA, 18 nt, Human
aauaaauuuugaaaagua

SEQ ID NO: 1976952 - RNA, 20 nt, Human
aauaaauuuugaaaaguaau

SEQ ID NO: 1976953 - RNA, 15 nt, Human
aauaacaauaaaaga

SEQ ID NO: 1976954 - RNA, 21 nt, Human
uaaagucuguugauuaaagau

SEQ ID NO: 1976955 - RNA, 23 nt, Human
uaaagggaagaaaacacuguuau

SEQ ID NO: 1976956 - RNA, 13 nt, Human
uaaagucaggggu

SEQ ID NO: 1976957 - RNA, 13 nt, Human
uaaagggaagaaa

SEQ ID NO: 1976958 - RNA, 14 nt, Human
uaaagggaagaaaa

SEQ ID NO: 1976959 - RNA, 17 nt, Human
uaaagggaagaaaacac

SEQ ID NO: 1976960 - RNA, 22 nt, Human
uaaagggaagaaaacacuguua

SEQ ID NO: 1976961 - RNA, 22 nt, Human
uaaagucuguugauuaaagaug

SEQ ID NO: 1976962 - RNA, 14 nt, Human
uaaaguguauuuuu

SEQ ID NO: 1976963 - RNA, 15 nt, Human
uaaaguguauuuuuu

SEQ ID NO: 1976964 - RNA, 19 nt, Human
uaaaguguauuuuuuuacu

SEQ ID NO: 1976965 - RNA, 17 nt, Human
aauaaaaaaagaaaaaa

SEQ ID NO: 1976966 - RNA, 17 nt, Human
aauaaaaaaaagaaaaa

SEQ ID NO: 1976967 - RNA, 18 nt, Human
aauaaaaaaaagaaaaaa

SEQ ID NO: 1976968 - RNA, 15 nt, Human
aauaaaagcccagga

SEQ ID NO: 1976969 - RNA, 17 nt, Human
aauaaaagcccaggagc

SEQ ID NO: 1976970 - RNA, 19 nt, Human
aauaaaagcccaggagccc

SEQ ID NO: 1976971 - RNA, 13 nt, Human
aauaaaagcccag

SEQ ID NO: 1976972 - RNA, 14 nt, Human
aauaaaagcccagg

SEQ ID NO: 1976973 - RNA, 12 nt, Human
aauaaaaauaau

SEQ ID NO: 1976974 - RNA, 23 nt, Human
aauaaaggcagcuguugucucuu

SEQ ID NO: 1976975 - RNA, 14 nt, Human
aauaaaguaauuau

SEQ ID NO: 1976976 - RNA, 16 nt, Human
aauaaaguacaagagc

SEQ ID NO: 1976977 - RNA, 16 nt, Human
aauaaaaucuugaaaa

SEQ ID NO: 1976978 - RNA, 14 nt, Human
guggaagagggcug

SEQ ID NO: 1976979 - RNA, 17 nt, Human
guggaagagggcugcaa

SEQ ID NO: 1976980 - RNA, 20 nt, Human
guggaauuauuuuaaaagau

SEQ ID NO: 1976981 - RNA, 12 nt, Human
gugcugugaaaa

SEQ ID NO: 1976982 - RNA, 14 nt, Human
guggacacagcucu

SEQ ID NO: 1976983 - RNA, 15 nt, Human
guggacacagcucuu

SEQ ID NO: 1976984 - RNA, 17 nt, Human
guggacacagcucuucu

SEQ ID NO: 1976985 - RNA, 24 nt, Human
guggacacagcucuucuccaggcu

SEQ ID NO: 1976986 - RNA, 20 nt, Human
gugcugcccugcccaccugg

SEQ ID NO: 1976987 - RNA, 19 nt, Human
gugcugcccugcccaccug

SEQ ID NO: 1976988 - RNA, 21 nt, Human
gugcugcccugcccaccuggc

SEQ ID NO: 1976989 - RNA, 12 nt, Human
gugcugcuuuga

SEQ ID NO: 1976990 - RNA, 18 nt, Human
gugcugcccugcccaccu

SEQ ID NO: 1976991 - RNA, 23 nt, Human
aagaagguuucagaaagaagugg

SEQ ID NO: 1976992 - RNA, 16 nt, Human
gugcugggccccugcc

SEQ ID NO: 1976993 - RNA, 13 nt, Human
gugcugcuuugau

SEQ ID NO: 1976994 - RNA, 19 nt, Human
gugcugggccccugccucu

SEQ ID NO: 1976995 - RNA, 15 nt, Human
aagaauauuugaaug

SEQ ID NO: 1976996 - RNA, 21 nt, Human
aagaaucaccuaauuaauuuc

SEQ ID NO: 1976997 - RNA, 11 nt, Human
aagaauauuug

SEQ ID NO: 1976998 - RNA, 17 nt, Human
guggcagcugcggucca

SEQ ID NO: 1976999 - RNA, 24 nt, Human
aagaauuucuaggacugaauuaug

SEQ ID NO: 1977000 - RNA, 14 nt, Human
aagaauucagauug

SEQ ID NO: 1977001 - RNA, 13 nt, Human
aagacccaaaagg

SEQ ID NO: 1977002 - RNA, 23 nt, Human
aagaccagagauaguggggagac

SEQ ID NO: 1977003 - RNA, 16 nt, Human
aagaauuuuuuauuuu

SEQ ID NO: 1977004 - RNA, 20 nt, Human
aagaauuuuuuauuuuuugg

SEQ ID NO: 1977005 - RNA, 14 nt, Human
aagaauuuuuuauu

SEQ ID NO: 1977006 - RNA, 19 nt, Human
aagaauuucuuuauaaaau

SEQ ID NO: 1977007 - RNA, 14 nt, Human
guggcaccagcagc

SEQ ID NO: 1977008 - RNA, 13 nt, Human
guggcaccagcag

SEQ ID NO: 1977009 - RNA, 22 nt, Human
guggcagcucaccucucccuug

SEQ ID NO: 1977010 - RNA, 14 nt, Human
guggcagcugcggu

SEQ ID NO: 1977011 - RNA, 22 nt, Human
guggcaaagcuguucuuccugg

SEQ ID NO: 1977012 - RNA, 23 nt, Human
guggauuuaacagaaauguacag

SEQ ID NO: 1977013 - RNA, 21 nt, Human
guggauuuaacagaaauguac

SEQ ID NO: 1977014 - RNA, 15 nt, Human
aagaagcucucuccu

SEQ ID NO: 1977015 - RNA, 14 nt, Human
aagaagcucucucc

SEQ ID NO: 1977016 - RNA, 17 nt, Human
aagaagcccaggaaagg

SEQ ID NO: 1977017 - RNA, 16 nt, Human
aagaagcccaggaaag

SEQ ID NO: 1977018 - RNA, 12 nt, Human
aagaagcauuuc

SEQ ID NO: 1977019 - RNA, 13 nt, Human
aagaaaaccaaac

SEQ ID NO: 1977020 - RNA, 22 nt, Human
aagaaaauaaaaaaaagaaaaa

SEQ ID NO: 1977021 - RNA, 23 nt, Human
aagaaaauaaaaaaaagaaaaaa

SEQ ID NO: 1977022 - RNA, 13 nt, Human
aagaaaauaaaaa

SEQ ID NO: 1977023 - RNA, 18 nt, Human
aagaaaauaaaaaaaaga

SEQ ID NO: 1977024 - RNA, 21 nt, Human
aagaaaauaaaaaaaagaaaa

SEQ ID NO: 1977025 - RNA, 22 nt, Human
aagaaaaaggaugcacagaguu

SEQ ID NO: 1977026 - RNA, 11 nt, Human
aagaaaaauau

SEQ ID NO: 1977027 - RNA, 12 nt, Human
aagaaaaauauu

SEQ ID NO: 1977028 - RNA, 13 nt, Human
aagaaaaauauuu

SEQ ID NO: 1977029 - RNA, 19 nt, Human
aagaaaaaggaugcacaga

SEQ ID NO: 1977030 - RNA, 20 nt, Human
aagaaaaaggaugcacagag

SEQ ID NO: 1977031 - RNA, 18 nt, Human
aacuuguaauaaacccuu

SEQ ID NO: 1977032 - RNA, 13 nt, Human
aacuuguuuucug

SEQ ID NO: 1977033 - RNA, 19 nt, Human
aacuuguucuuccaaagca

SEQ ID NO: 1977034 - RNA, 20 nt, Human
aacuuguucuuccaaagcag

SEQ ID NO: 1977035 - RNA, 16 nt, Human
aacuuguugaauuuau

SEQ ID NO: 1977036 - RNA, 16 nt, Human
aacuuguuuaauaaag

SEQ ID NO: 1977037 - RNA, 14 nt, Human
gugccaagcagagg

SEQ ID NO: 1977038 - RNA, 15 nt, Human
gugcauuuggugguu

SEQ ID NO: 1977039 - RNA, 21 nt, Human
gugcauuugaggucuguucuu

SEQ ID NO: 1977040 - RNA, 22 nt, Human
gugcauuugaggucuguucuuu

SEQ ID NO: 1977041 - RNA, 20 nt, Human
gugcacuaauguguaagaca

SEQ ID NO: 1977042 - RNA, 20 nt, Human
gugcauuugaggucuguucu

SEQ ID NO: 1977043 - RNA, 16 nt, Human
aacugcagucacugca

SEQ ID NO: 1977044 - RNA, 12 nt, Human
gugcacacacca

SEQ ID NO: 1977045 - RNA, 14 nt, Human
gugcacacaccaga

SEQ ID NO: 1977046 - RNA, 18 nt, Human
gugcacguacacacacau

SEQ ID NO: 1977047 - RNA, 17 nt, Human
gugcacacaccagagcc

SEQ ID NO: 1977048 - RNA, 23 nt, Human
aacuugguucccauuugcuccuu

SEQ ID NO: 1977049 - RNA, 17 nt, Human
aacuuggcgcugccccu

SEQ ID NO: 1977050 - RNA, 15 nt, Human
aacuuguaaaugugg

SEQ ID NO: 1977051 - RNA, 18 nt, Human
aacuugcuuaaaugugaa

SEQ ID NO: 1977052 - RNA, 19 nt, Human
aacuugcuuaaaugugaau

SEQ ID NO: 1977053 - RNA, 20 nt, Human
aacuugcuuaaaugugaauu

SEQ ID NO: 1977054 - RNA, 21 nt, Human
aacuugcuuaaaugugaauua

SEQ ID NO: 1977055 - RNA, 17 nt, Human
aacuuggaugaguuuug

SEQ ID NO: 1977056 - RNA, 16 nt, Human
aacuuggaugaguuuu

SEQ ID NO: 1977057 - RNA, 14 nt, Human
aacuuggcgcugcc

SEQ ID NO: 1977058 - RNA, 15 nt, Human
gugccucugggacug

SEQ ID NO: 1977059 - RNA, 14 nt, Human
gugccucugggacu

SEQ ID NO: 1977060 - RNA, 16 nt, Human
gugccuggccacgccc

SEQ ID NO: 1977061 - RNA, 23 nt, Human
gugccugcuucagccucccacag

SEQ ID NO: 1977062 - RNA, 12 nt, Human
gugccugcuuca

SEQ ID NO: 1977063 - RNA, 13 nt, Human
gugccugcuucag

SEQ ID NO: 1977064 - RNA, 21 nt, Human
gugccugcuucagccucccac

SEQ ID NO: 1977065 - RNA, 15 nt, Human
gugugguguuuccug

SEQ ID NO: 1977066 - RNA, 13 nt, Human
gugugagucacca

SEQ ID NO: 1977067 - RNA, 18 nt, Human
gugugagucaccaagccc

SEQ ID NO: 1977068 - RNA, 21 nt, Human
gugucuugcaauggcagccuu

SEQ ID NO: 1977069 - RNA, 19 nt, Human
gugucuugcaauggcagcc

SEQ ID NO: 1977070 - RNA, 20 nt, Human
gugucccaaaaagaaaggag

SEQ ID NO: 1977071 - RNA, 13 nt, Human
guguucugugaua

SEQ ID NO: 1977072 - RNA, 13 nt, Human
guguguguguugc

SEQ ID NO: 1977073 - RNA, 13 nt, Human
guguguuacaaug

SEQ ID NO: 1977074 - RNA, 15 nt, Human
guguguuacaaugua

SEQ ID NO: 1977075 - RNA, 19 nt, Human
guguguuacaauguaacuu

SEQ ID NO: 1977076 - RNA, 13 nt, Human
guguucuguuaca

SEQ ID NO: 1977077 - RNA, 14 nt, Human
guguucuguuacaa

SEQ ID NO: 1977078 - RNA, 15 nt, Human
guguucuguuacaaa

SEQ ID NO: 1977079 - RNA, 17 nt, Human
guguucuguuacaaaau

SEQ ID NO: 1977080 - RNA, 18 nt, Human
guguucuguuacaaaaug

SEQ ID NO: 1977081 - RNA, 19 nt, Human
guguucuguuacaaaaugu

SEQ ID NO: 1977082 - RNA, 13 nt, Human
guguuuaagacau

SEQ ID NO: 1977083 - RNA, 14 nt, Human
guguuuaagacauu

SEQ ID NO: 1977084 - RNA, 21 nt, Human
guguugaagagcagcuccuuc

SEQ ID NO: 1977085 - RNA, 13 nt, Human
guguguguaugug

SEQ ID NO: 1977086 - RNA, 21 nt, Human
guguguaagaugucuuccuau

SEQ ID NO: 1977087 - RNA, 23 nt, Human
guguguggucaacauuucucaug

SEQ ID NO: 1977088 - RNA, 15 nt, Human
gugugguuaugaacu

SEQ ID NO: 1977089 - RNA, 19 nt, Human
gugugguguuuccuggcac

SEQ ID NO: 1977090 - RNA, 17 nt, Human
guguguguugugugugg

SEQ ID NO: 1977091 - RNA, 14 nt, Human
guguguguaugugg

SEQ ID NO: 1977092 - RNA, 19 nt, Human
guguguguaugcgugugug

SEQ ID NO: 1977093 - RNA, 17 nt, Human
aagauauuuugcuuugu

SEQ ID NO: 1977094 - RNA, 20 nt, Human
aagauauuuugcuuugugau

SEQ ID NO: 1977095 - RNA, 20 nt, Human
aagaguaggaagacuuugga

SEQ ID NO: 1977096 - RNA, 22 nt, Human
aagauauuuugcuuugugauuu

SEQ ID NO: 1977097 - RNA, 12 nt, Human
aagaucacuguu

SEQ ID NO: 1977098 - RNA, 14 nt, Human
aagaucacuguuua

SEQ ID NO: 1977099 - RNA, 20 nt, Human
aagaucacuguuuagauuug

SEQ ID NO: 1977100 - RNA, 20 nt, Human
gugguucacucuuggagccu

SEQ ID NO: 1977101 - RNA, 21 nt, Human
gugguucacucuuggagccug

SEQ ID NO: 1977102 - RNA, 18 nt, Human
gugguuauggagagggug

SEQ ID NO: 1977103 - RNA, 19 nt, Human
gugguguuuccuggcacug

SEQ ID NO: 1977104 - RNA, 15 nt, Human
aagauauuuugcuuu

SEQ ID NO: 1977105 - RNA, 19 nt, Human
aagaguaggaagacuuugg

SEQ ID NO: 1977106 - RNA, 18 nt, Human
aagaguaggaagacuuug

SEQ ID NO: 1977107 - RNA, 16 nt, Human
aagaguaggaagacuu

SEQ ID NO: 1977108 - RNA, 19 nt, Human
aagauguagaggagaaacu

SEQ ID NO: 1977109 - RNA, 20 nt, Human
aagaugagaacagauaaaga

SEQ ID NO: 1977110 - RNA, 22 nt, Human
aagaugagaacagauaaagauu

SEQ ID NO: 1977111 - RNA, 19 nt, Human
aagaugagaacagauaaag

SEQ ID NO: 1977112 - RNA, 13 nt, Human
aagcaaaauguga

SEQ ID NO: 1977113 - RNA, 19 nt, Human
aagauguagauuuauuuca

SEQ ID NO: 1977114 - RNA, 22 nt, Human
aagauguagauuuauuucauca

SEQ ID NO: 1977115 - RNA, 13 nt, Human
aagauguagcaaa

SEQ ID NO: 1977116 - RNA, 14 nt, Human
aagauguagcaaac

SEQ ID NO: 1977117 - RNA, 18 nt, Human
aagauguagcaaacccug

SEQ ID NO: 1977118 - RNA, 23 nt, Human
aagauguagcaaacccugucaaa

SEQ ID NO: 1977119 - RNA, 15 nt, Human
aagaugcaauguaga

SEQ ID NO: 1977120 - RNA, 16 nt, Human
aagauguagauuuauu

SEQ ID NO: 1977121 - RNA, 22 nt, Human
aagauguagaggagaaacugga

SEQ ID NO: 1977122 - RNA, 14 nt, Human
aagcaaaugugaau

SEQ ID NO: 1977123 - RNA, 13 nt, Human
aagcaaaugugaa

SEQ ID NO: 1977124 - RNA, 12 nt, Human
aagcaaaugucu

SEQ ID NO: 1977125 - RNA, 22 nt, Human
aagcaaacugguuauuuaaaau

SEQ ID NO: 1977126 - RNA, 14 nt, Human
aagacuccagaaau

SEQ ID NO: 1977127 - RNA, 12 nt, Human
aagacuccagaa

SEQ ID NO: 1977128 - RNA, 13 nt, Human
aagacuccagaaa

SEQ ID NO: 1977129 - RNA, 17 nt, Human
aagacucauucuucugu

SEQ ID NO: 1977130 - RNA, 23 nt, Human
aagacgcugugcugcccugccca

SEQ ID NO: 1977131 - RNA, 20 nt, Human
aagacgcugugcugcccugc

SEQ ID NO: 1977132 - RNA, 22 nt, Human
aagacgcugugcugcccugccc

SEQ ID NO: 1977133 - RNA, 21 nt, Human
aagacgcugugcugcccugcc

SEQ ID NO: 1977134 - RNA, 12 nt, Human
aagaccagucca

SEQ ID NO: 1977135 - RNA, 23 nt, Human
aagaccccuuaccacugcucuga

SEQ ID NO: 1977136 - RNA, 19 nt, Human
aagagauugugguuucauu

SEQ ID NO: 1977137 - RNA, 16 nt, Human
aagagauugugguuuc

SEQ ID NO: 1977138 - RNA, 20 nt, Human
aagagaugaugaaaauauuu

SEQ ID NO: 1977139 - RNA, 23 nt, Human
aagagauggcuuacaaaaagaaa

SEQ ID NO: 1977140 - RNA, 16 nt, Human
aagacuguacaaagua

SEQ ID NO: 1977141 - RNA, 14 nt, Human
aagagcccaggccu

SEQ ID NO: 1977142 - RNA, 12 nt, Human
aagagcccaggc

SEQ ID NO: 1977143 - RNA, 12 nt, Human
aagagccccacu

SEQ ID NO: 1977144 - RNA, 16 nt, Human
aagagcccaggccucc

SEQ ID NO: 1977145 - RNA, 22 nt, Human
aagagcuaggcagggugucugc

SEQ ID NO: 1977146 - RNA, 18 nt, Human
aagagccccacucucaga

SEQ ID NO: 1977147 - RNA, 19 nt, Human
aagagccccacucucagag

SEQ ID NO: 1977148 - RNA, 13 nt, Human
aagagccccacuc

SEQ ID NO: 1977149 - RNA, 16 nt, Human
aagagccccacucuca

SEQ ID NO: 1977150 - RNA, 17 nt, Human
aagagccccacucucag

SEQ ID NO: 1977151 - RNA, 13 nt, Human
aagagcuaggcag

SEQ ID NO: 1977152 - RNA, 16 nt, Human
aagagcuaggcagggu

SEQ ID NO: 1977153 - RNA, 13 nt, Human
guggccccaccug

SEQ ID NO: 1977154 - RNA, 22 nt, Human
guggccccaccuggcccucucu

SEQ ID NO: 1977155 - RNA, 16 nt, Human
guggcccgacagccug

SEQ ID NO: 1977156 - RNA, 12 nt, Human
gugggagcugag

SEQ ID NO: 1977157 - RNA, 18 nt, Human
gugggauccuccaggugc

SEQ ID NO: 1977158 - RNA, 15 nt, Human
gugggauccuccagg

SEQ ID NO: 1977159 - RNA, 14 nt, Human
guggccucccaacu

SEQ ID NO: 1977160 - RNA, 13 nt, Human
guggccucccaac

SEQ ID NO: 1977161 - RNA, 17 nt, Human
guggcccgacagccugg

SEQ ID NO: 1977162 - RNA, 15 nt, Human
guggccucccaacuc

SEQ ID NO: 1977163 - RNA, 21 nt, Human
guggcuucccgcucagcccuc

SEQ ID NO: 1977164 - RNA, 20 nt, Human
gugguguuuccugcaggcca

SEQ ID NO: 1977165 - RNA, 16 nt, Human
gugguguuuccuggca

SEQ ID NO: 1977166 - RNA, 15 nt, Human
gugguguuuccuggc

SEQ ID NO: 1977167 - RNA, 14 nt, Human
gugggucuggagga

SEQ ID NO: 1977168 - RNA, 21 nt, Human
gugggucaugaugcucuuucc

SEQ ID NO: 1977169 - RNA, 15 nt, Human
gugggggucugugug

SEQ ID NO: 1977170 - RNA, 16 nt, Human
gugggggucugugugu

SEQ ID NO: 1977171 - RNA, 14 nt, Human
gugggggucugugu

SEQ ID NO: 1977172 - RNA, 16 nt, Human
gugggcaaaagagugu

SEQ ID NO: 1977173 - RNA, 18 nt, Human
guggggggggugcugggc

SEQ ID NO: 1977174 - RNA, 13 nt, Human
gugggggguccuu

SEQ ID NO: 1977175 - RNA, 20 nt, Human
aacauacucccaucugugaa

SEQ ID NO: 1977176 - RNA, 15 nt, Human
aacauaauucuuauu

SEQ ID NO: 1977177 - RNA, 16 nt, Human
aacauacucccaucug

SEQ ID NO: 1977178 - RNA, 18 nt, Human
aacauacucccaucugug

SEQ ID NO: 1977179 - RNA, 22 nt, Human
aacauguuuuucuucucccuca

SEQ ID NO: 1977180 - RNA, 14 nt, Human
aacaucaacaucuu

SEQ ID NO: 1977181 - RNA, 21 nt, Human
aacauagaauugcaaucuaua

SEQ ID NO: 1977182 - RNA, 22 nt, Human
aacauagaauugcaaucuauaa

SEQ ID NO: 1977183 - RNA, 13 nt, Human
guccuacccaccc

SEQ ID NO: 1977184 - RNA, 20 nt, Human
aacagacuggaagcacagcu

SEQ ID NO: 1977185 - RNA, 21 nt, Human
guccuaauggugaugcagucu

SEQ ID NO: 1977186 - RNA, 12 nt, Human
aacagaggacca

SEQ ID NO: 1977187 - RNA, 13 nt, Human
aacagaggaccag

SEQ ID NO: 1977188 - RNA, 12 nt, Human
aacagaggauau

SEQ ID NO: 1977189 - RNA, 18 nt, Human
aacagaggaccagcacac

SEQ ID NO: 1977190 - RNA, 20 nt, Human
aacagaggaccagcacacuc

SEQ ID NO: 1977191 - RNA, 14 nt, Human
aacagauaaagauu

SEQ ID NO: 1977192 - RNA, 18 nt, Human
aacagaugaccccugccc

SEQ ID NO: 1977193 - RNA, 21 nt, Human
aacagaggaccagcacacucc

SEQ ID NO: 1977194 - RNA, 16 nt, Human
aacagaguaaucuugu

SEQ ID NO: 1977195 - RNA, 19 nt, Human
aacagaugaccccugccca

SEQ ID NO: 1977196 - RNA, 14 nt, Human
aacagaugcucuga

SEQ ID NO: 1977197 - RNA, 17 nt, Human
aacagaugcucugagag

SEQ ID NO: 1977198 - RNA, 19 nt, Human
aacagguuuuccugaagaa

SEQ ID NO: 1977199 - RNA, 24 nt, Human
aacagauuggauuuuauguugaca

SEQ ID NO: 1977200 - RNA, 23 nt, Human
aacagauuggauuuuauguugac

SEQ ID NO: 1977201 - RNA, 17 nt, Human
aacagauuggauuuuau

SEQ ID NO: 1977202 - RNA, 18 nt, Human
aacagauuggauuuuaug

SEQ ID NO: 1977203 - RNA, 14 nt, Human
aacagauucuuuua

SEQ ID NO: 1977204 - RNA, 17 nt, Human
aacagauucuuuuaugu

SEQ ID NO: 1977205 - RNA, 16 nt, Human
aacagauuggauuuua

SEQ ID NO: 1977206 - RNA, 20 nt, Human
guccgaccuggccugucugu

SEQ ID NO: 1977207 - RNA, 13 nt, Human
guccuaaugguga

SEQ ID NO: 1977208 - RNA, 18 nt, Human
guccuaaggaaccuuccu

SEQ ID NO: 1977209 - RNA, 15 nt, Human
guccuaaggaaccuu

SEQ ID NO: 1977210 - RNA, 22 nt, Human
guccgaaagggacuuggaagcu

SEQ ID NO: 1977211 - RNA, 13 nt, Human
gucccuuuuccuu

SEQ ID NO: 1977212 - RNA, 21 nt, Human
guccgaaagggacuuggaagc

SEQ ID NO: 1977213 - RNA, 16 nt, Human
guccccgcacugggcu

SEQ ID NO: 1977214 - RNA, 15 nt, Human
guccccgcacugggc

SEQ ID NO: 1977215 - RNA, 13 nt, Human
gucccccugacaa

SEQ ID NO: 1977216 - RNA, 12 nt, Human
guccccuucccg

SEQ ID NO: 1977217 - RNA, 23 nt, Human
guccccuguuuguuucugaaagg

SEQ ID NO: 1977218 - RNA, 12 nt, Human
guccccucccag

SEQ ID NO: 1977219 - RNA, 19 nt, Human
gucccaccuuggcugcagg

SEQ ID NO: 1977220 - RNA, 12 nt, Human
gucccccucugg

SEQ ID NO: 1977221 - RNA, 14 nt, Human
gucccccucuggcu

SEQ ID NO: 1977222 - RNA, 17 nt, Human
guccccccacucccagc

SEQ ID NO: 1977223 - RNA, 17 nt, Human
gucccaccuuggcugca

SEQ ID NO: 1977224 - RNA, 18 nt, Human
gucccaccuuggcugcag

SEQ ID NO: 1977225 - RNA, 13 nt, Human
guccauucucaag

SEQ ID NO: 1977226 - RNA, 22 nt, Human
guagcucuaggagggcuggcaa

SEQ ID NO: 1977227 - RNA, 22 nt, Human
guagccucaaucgagugagaca

SEQ ID NO: 1977228 - RNA, 16 nt, Human
guagcuaacuuuuauu

SEQ ID NO: 1977229 - RNA, 22 nt, Human
aaccacaguguaccauuaaaau

SEQ ID NO: 1977230 - RNA, 23 nt, Human
aaccacaguguaccauuaaaaua

SEQ ID NO: 1977231 - RNA, 13 nt, Human
aaccacaucuugc

SEQ ID NO: 1977232 - RNA, 13 nt, Human
aaccacagcuccu

SEQ ID NO: 1977233 - RNA, 18 nt, Human
aaccacagcuccuuuucc

SEQ ID NO: 1977234 - RNA, 19 nt, Human
aaccacagcuccuuuucca

SEQ ID NO: 1977235 - RNA, 17 nt, Human
aaccacaguguaccauu

SEQ ID NO: 1977236 - RNA, 18 nt, Human
aaccacaguguaccauua

SEQ ID NO: 1977237 - RNA, 21 nt, Human
aaccacaguguaccauuaaaa

SEQ ID NO: 1977238 - RNA, 13 nt, Human
gucuccauguuug

SEQ ID NO: 1977239 - RNA, 14 nt, Human
aacauuuucucuua

SEQ ID NO: 1977240 - RNA, 17 nt, Human
aacauuuucucuuagaa

SEQ ID NO: 1977241 - RNA, 17 nt, Human
aacauuuuacccacaca

SEQ ID NO: 1977242 - RNA, 15 nt, Human
aacauuuuacccaca

SEQ ID NO: 1977243 - RNA, 16 nt, Human
aacauuuugucauaua

SEQ ID NO: 1977244 - RNA, 18 nt, Human
aacauuuucucuuagaaa

SEQ ID NO: 1977245 - RNA, 19 nt, Human
aacauuuucucuuagaaaa

SEQ ID NO: 1977246 - RNA, 22 nt, Human
aacauuuguucuauagcuuuuc

SEQ ID NO: 1977247 - RNA, 22 nt, Human
gucucaaacucuugaccucagg

SEQ ID NO: 1977248 - RNA, 14 nt, Human
gucuaugggacuca

SEQ ID NO: 1977249 - RNA, 15 nt, Human
gucuaugggacucaa

SEQ ID NO: 1977250 - RNA, 20 nt, Human
gucucaagagggcacuggug

SEQ ID NO: 1977251 - RNA, 22 nt, Human
gucucaagagggcacugguggc

SEQ ID NO: 1977252 - RNA, 15 nt, Human
gucucaagagggcac

SEQ ID NO: 1977253 - RNA, 17 nt, Human
gucucaagagggcacug

SEQ ID NO: 1977254 - RNA, 14 nt, Human
gucucaaaggccag

SEQ ID NO: 1977255 - RNA, 23 nt, Human
gucucaguccaugaagauguaga

SEQ ID NO: 1977256 - RNA, 16 nt, Human
gucucaggucccugca

SEQ ID NO: 1977257 - RNA, 15 nt, Human
gucucaggucccugc

SEQ ID NO: 1977258 - RNA, 16 nt, Human
guccugcugcaguugc

SEQ ID NO: 1977259 - RNA, 13 nt, Human
guccugcugcagu

SEQ ID NO: 1977260 - RNA, 15 nt, Human
guccugcucagcagu

SEQ ID NO: 1977261 - RNA, 17 nt, Human
guccugcugcaguugcc

SEQ ID NO: 1977262 - RNA, 12 nt, Human
guccuuuagaaa

SEQ ID NO: 1977263 - RNA, 13 nt, Human
guccuuuagaaac

SEQ ID NO: 1977264 - RNA, 13 nt, Human
aacauuaaaauau

SEQ ID NO: 1977265 - RNA, 12 nt, Human
aacauuaauguu

SEQ ID NO: 1977266 - RNA, 14 nt, Human
aacauuaauguuga

SEQ ID NO: 1977267 - RNA, 15 nt, Human
aacauuaauguugau

SEQ ID NO: 1977268 - RNA, 17 nt, Human
aacauuaauguugauuu

SEQ ID NO: 1977269 - RNA, 19 nt, Human
aacauuaauguugauuucu

SEQ ID NO: 1977270 - RNA, 20 nt, Human
aacauuaauguugauuucua

SEQ ID NO: 1977271 - RNA, 24 nt, Human
aacauuaguacuuuauagaagaau

SEQ ID NO: 1977272 - RNA, 21 nt, Human
aacauuaggcagguugcuuaa

SEQ ID NO: 1977273 - RNA, 15 nt, Human
aacauuaguacuuua

SEQ ID NO: 1977274 - RNA, 16 nt, Human
aacauuaguacuuuau

SEQ ID NO: 1977275 - RNA, 17 nt, Human
aacauuaguacuuuaua

SEQ ID NO: 1977276 - RNA, 20 nt, Human
gucgcccaggcuggagugca

SEQ ID NO: 1977277 - RNA, 15 nt, Human
gucgcccaggcugga

SEQ ID NO: 1977278 - RNA, 14 nt, Human
gucgcccaggcugg

SEQ ID NO: 1977279 - RNA, 13 nt, Human
gucgcccagucug

SEQ ID NO: 1977280 - RNA, 14 nt, Human
gucgcccagucugg

SEQ ID NO: 1977281 - RNA, 13 nt, Human
gucgaaaguuagu

SEQ ID NO: 1977282 - RNA, 14 nt, Human
gucgaggacaggga

SEQ ID NO: 1977283 - RNA, 21 nt, Human
gucgagccugggggcuggagc

SEQ ID NO: 1977284 - RNA, 13 nt, Human
gucgagcuccccc

SEQ ID NO: 1977285 - RNA, 20 nt, Human
gucuaccugaggggccucuu

SEQ ID NO: 1977286 - RNA, 15 nt, Human
gucgcccucccaggc

SEQ ID NO: 1977287 - RNA, 18 nt, Human
gucgcccuggacugugug

SEQ ID NO: 1977288 - RNA, 14 nt, Human
gucgcccuggacug

SEQ ID NO: 1977289 - RNA, 23 nt, Human
gucgcccagucuggaaugcagug

SEQ ID NO: 1977290 - RNA, 16 nt, Human
gucuauaccuuaagaa

SEQ ID NO: 1977291 - RNA, 14 nt, Human
gucuaucauuguug

SEQ ID NO: 1977292 - RNA, 22 nt, Human
gucuauaccuuaagaaugccaa

SEQ ID NO: 1977293 - RNA, 18 nt, Human
aaccugauugugucucuu

SEQ ID NO: 1977294 - RNA, 19 nt, Human
gucuuuuaaaaaguauugc

SEQ ID NO: 1977295 - RNA, 23 nt, Human
gucuuuuaaaaaguauugccaaa

SEQ ID NO: 1977296 - RNA, 19 nt, Human
aaccugauugugucucuug

SEQ ID NO: 1977297 - RNA, 13 nt, Human
aaccuguucugcu

SEQ ID NO: 1977298 - RNA, 17 nt, Human
aaccuguucugcuuucc

SEQ ID NO: 1977299 - RNA, 10 nt, Human
gucuuuuaaa

SEQ ID NO: 1977300 - RNA, 14 nt, Human
gucuuuuaaaaagu

SEQ ID NO: 1977301 - RNA, 15 nt, Human
gucuuuuaaaaagua

SEQ ID NO: 1977302 - RNA, 17 nt, Human
gucuuuuaaaaaguauu

SEQ ID NO: 1977303 - RNA, 16 nt, Human
gucuuuguacagacaa

SEQ ID NO: 1977304 - RNA, 15 nt, Human
gucuuuguacagaca

SEQ ID NO: 1977305 - RNA, 16 nt, Human
gucuucaguaagccgu

SEQ ID NO: 1977306 - RNA, 18 nt, Human
gucuucauccccucagaa

SEQ ID NO: 1977307 - RNA, 13 nt, Human
gucuucaugaaau

SEQ ID NO: 1977308 - RNA, 15 nt, Human
gucuucaugaaaugc

SEQ ID NO: 1977309 - RNA, 16 nt, Human
gucuucaugaaaugcu

SEQ ID NO: 1977310 - RNA, 23 nt, Human
gucuucaugaaaugcuaugucau

SEQ ID NO: 1977311 - RNA, 17 nt, Human
gucuucauguucccacu

SEQ ID NO: 1977312 - RNA, 23 nt, Human
aacguggcugcuucaaggauccu

SEQ ID NO: 1977313 - RNA, 16 nt, Human
aaccuuucuauaauuu

SEQ ID NO: 1977314 - RNA, 20 nt, Human
aacguguauguuuuucaguu

SEQ ID NO: 1977315 - RNA, 22 nt, Human
aacguguauguuuuucaguuca

SEQ ID NO: 1977316 - RNA, 16 nt, Human
aacgugugcuguguuu

SEQ ID NO: 1977317 - RNA, 19 nt, Human
aacgugugcuguguuugcu

SEQ ID NO: 1977318 - RNA, 14 nt, Human
aacguguauguuuu

SEQ ID NO: 1977319 - RNA, 11 nt, Human
aaccuuucccc

SEQ ID NO: 1977320 - RNA, 13 nt, Human
aaccuuuccccca

SEQ ID NO: 1977321 - RNA, 13 nt, Human
aacuagaacaaau

SEQ ID NO: 1977322 - RNA, 18 nt, Human
gucuggaggaccugcccg

SEQ ID NO: 1977323 - RNA, 21 nt, Human
gucugacaggcaaugcuggcu

SEQ ID NO: 1977324 - RNA, 17 nt, Human
gucugaagucacugcac

SEQ ID NO: 1977325 - RNA, 19 nt, Human
gucugaagucacugcacag

SEQ ID NO: 1977326 - RNA, 22 nt, Human
gucugacaggcaaugcuggcug

SEQ ID NO: 1977327 - RNA, 23 nt, Human
gucugacaggcaaugcuggcugu

SEQ ID NO: 1977328 - RNA, 23 nt, Human
gucuggaugcgggcauggcagcc

SEQ ID NO: 1977329 - RNA, 15 nt, Human
gucuggggaccagcu

SEQ ID NO: 1977330 - RNA, 18 nt, Human
gucucuuuaaugucacag

SEQ ID NO: 1977331 - RNA, 19 nt, Human
gucucuuuaaugucacagg

SEQ ID NO: 1977332 - RNA, 20 nt, Human
gucucuuuaaugucacaggc

SEQ ID NO: 1977333 - RNA, 19 nt, Human
gucugaaggcuggguucug

SEQ ID NO: 1977334 - RNA, 14 nt, Human
gucugaaggcuggg

SEQ ID NO: 1977335 - RNA, 16 nt, Human
gucugaagucacugca

SEQ ID NO: 1977336 - RNA, 22 nt, Human
gucucuuuaaugucacaggcag

SEQ ID NO: 1977337 - RNA, 23 nt, Human
gucucuuuaaugucacaggcagg

SEQ ID NO: 1977338 - RNA, 19 nt, Human
gucucuugguccugcugca

SEQ ID NO: 1977339 - RNA, 18 nt, Human
gucucuugguccugcugc

SEQ ID NO: 1977340 - RNA, 20 nt, Human
gucucuugguccugcugcag

SEQ ID NO: 1977341 - RNA, 13 nt, Human
gucucuugguccu

SEQ ID NO: 1977342 - RNA, 17 nt, Human
gucucuugguccugcug

SEQ ID NO: 1977343 - RNA, 12 nt, Human
gugagagcuggg

SEQ ID NO: 1977344 - RNA, 13 nt, Human
gugacuuuugcuu

SEQ ID NO: 1977345 - RNA, 15 nt, Human
gugacuuuugcuuua

SEQ ID NO: 1977346 - RNA, 18 nt, Human
gugacuuuucaaguauuu

SEQ ID NO: 1977347 - RNA, 12 nt, Human
gugaccccaggu

SEQ ID NO: 1977348 - RNA, 17 nt, Human
gugaguacuacaguccu

SEQ ID NO: 1977349 - RNA, 15 nt, Human
gugagcaggcuguga

SEQ ID NO: 1977350 - RNA, 21 nt, Human
gugagcacuaaggugugcucu

SEQ ID NO: 1977351 - RNA, 15 nt, Human
gugagcaauccugca

SEQ ID NO: 1977352 - RNA, 12 nt, Human
gugagacagacu

SEQ ID NO: 1977353 - RNA, 17 nt, Human
gugagaggggaggccaa

SEQ ID NO: 1977354 - RNA, 13 nt, Human
gugagagcugggu

SEQ ID NO: 1977355 - RNA, 16 nt, Human
gugagaggggaacaga

SEQ ID NO: 1977356 - RNA, 14 nt, Human
aacugaacucugac

SEQ ID NO: 1977357 - RNA, 21 nt, Human
gugaguacuacaguccuccca

SEQ ID NO: 1977358 - RNA, 19 nt, Human
gugaguacuacaguccucc

SEQ ID NO: 1977359 - RNA, 17 nt, Human
gugaguccuggcauggg

SEQ ID NO: 1977360 - RNA, 14 nt, Human
gugaguccuccaga

SEQ ID NO: 1977361 - RNA, 20 nt, Human
gugaguccuggcaugggaau

SEQ ID NO: 1977362 - RNA, 15 nt, Human
gugagucgaggacag

SEQ ID NO: 1977363 - RNA, 16 nt, Human
gugaguccuccagaac

SEQ ID NO: 1977364 - RNA, 17 nt, Human
gugaguccuccagaacu

SEQ ID NO: 1977365 - RNA, 12 nt, Human
aacucugccugc

SEQ ID NO: 1977366 - RNA, 18 nt, Human
gugaguccuccagaacuc

SEQ ID NO: 1977367 - RNA, 23 nt, Human
gugaagacaaugacuuacuguac

SEQ ID NO: 1977368 - RNA, 14 nt, Human
gugaagacuccaga

SEQ ID NO: 1977369 - RNA, 16 nt, Human
gugaagacuccagaaa

SEQ ID NO: 1977370 - RNA, 16 nt, Human
gugaagagcaagagag

SEQ ID NO: 1977371 - RNA, 21 nt, Human
gugaaggaggcuccaggcagc

SEQ ID NO: 1977372 - RNA, 21 nt, Human
gugaaggaccuucacucuaag

SEQ ID NO: 1977373 - RNA, 23 nt, Human
gugaaggaccuucacucuaagau

SEQ ID NO: 1977374 - RNA, 16 nt, Human
gugaaggaggcuccag

SEQ ID NO: 1977375 - RNA, 17 nt, Human
gugaaggaggcuccagg

SEQ ID NO: 1977376 - RNA, 16 nt, Human
gugaagccagggcccg

SEQ ID NO: 1977377 - RNA, 13 nt, Human
gugaagauacuuu

SEQ ID NO: 1977378 - RNA, 15 nt, Human
gugaagauacuuugu

SEQ ID NO: 1977379 - RNA, 18 nt, Human
gugaagauacuuuguauu

SEQ ID NO: 1977380 - RNA, 20 nt, Human
gugaagauacuuuguauugu

SEQ ID NO: 1977381 - RNA, 14 nt, Human
gugaagugaagaca

SEQ ID NO: 1977382 - RNA, 14 nt, Human
gugacaugucuuuu

SEQ ID NO: 1977383 - RNA, 22 nt, Human
gugacauccacaaaugcaguuu

SEQ ID NO: 1977384 - RNA, 20 nt, Human
gugacaucucuauuccccac

SEQ ID NO: 1977385 - RNA, 16 nt, Human
gugacagaggcagccc

SEQ ID NO: 1977386 - RNA, 18 nt, Human
gugacagaggcagcccca

SEQ ID NO: 1977387 - RNA, 19 nt, Human
gugacagaggcagccccau

SEQ ID NO: 1977388 - RNA, 17 nt, Human
gugaccaaugaugguca

SEQ ID NO: 1977389 - RNA, 23 nt, Human
gugacauuugucauuuucauuag

SEQ ID NO: 1977390 - RNA, 21 nt, Human
gugaccagcaccaucucuccu

SEQ ID NO: 1977391 - RNA, 18 nt, Human
gugaccagcaccaucucu

SEQ ID NO: 1977392 - RNA, 18 nt, Human
gugaccauguuuuguuua

SEQ ID NO: 1977393 - RNA, 16 nt, Human
caaccugauugugucu

SEQ ID NO: 1977394 - RNA, 17 nt, Human
caacgagccuuuucacc

SEQ ID NO: 1977395 - RNA, 19 nt, Human
caacucuccuccagaguca

SEQ ID NO: 1977396 - RNA, 18 nt, Human
caacgcagcccugcuuug

SEQ ID NO: 1977397 - RNA, 20 nt, Human
caacgaucacaaaugacuuu

SEQ ID NO: 1977398 - RNA, 12 nt, Human
caacgcagcccu

SEQ ID NO: 1977399 - RNA, 16 nt, Human
caacgaucacaaauga

SEQ ID NO: 1977400 - RNA, 18 nt, Human
caacgaucacaaaugacu

SEQ ID NO: 1977401 - RNA, 19 nt, Human
caacgaucacaaaugacuu

SEQ ID NO: 1977402 - RNA, 13 nt, Human
caacgcagcccug

SEQ ID NO: 1977403 - RNA, 15 nt, Human
caacgcagcccugcu

SEQ ID NO: 1977404 - RNA, 16 nt, Human
caaccucuuccuccug

SEQ ID NO: 1977405 - RNA, 20 nt, Human
caaccucuuccuccugacac

SEQ ID NO: 1977406 - RNA, 15 nt, Human
caacccucaucacca

SEQ ID NO: 1977407 - RNA, 12 nt, Human
caacccucauca

SEQ ID NO: 1977408 - RNA, 21 nt, Human
caacucugaaggguaauuaua

SEQ ID NO: 1977409 - RNA, 20 nt, Human
caacucuccuccagagucag

SEQ ID NO: 1977410 - RNA, 16 nt, Human
caacugcauuggcuuu

SEQ ID NO: 1977411 - RNA, 18 nt, Human
caacucuucccugaacuu

SEQ ID NO: 1977412 - RNA, 17 nt, Human
caacuuucaagaacuug

SEQ ID NO: 1977413 - RNA, 17 nt, Human
caacuuacauaugucuu

SEQ ID NO: 1977414 - RNA, 12 nt, Human
caacuuuguaua

SEQ ID NO: 1977415 - RNA, 11 nt, Human
caacuuuguau

SEQ ID NO: 1977416 - RNA, 23 nt, Human
caacaugccagccacugugauag

SEQ ID NO: 1977417 - RNA, 21 nt, Human
caacauggcuacuugcuuuga

SEQ ID NO: 1977418 - RNA, 21 nt, Human
caaccacacuugucggcucca

SEQ ID NO: 1977419 - RNA, 20 nt, Human
caaccacacuugucggcucc

SEQ ID NO: 1977420 - RNA, 13 nt, Human
caaccacaaaacu

SEQ ID NO: 1977421 - RNA, 12 nt, Human
caaccaaauggu

SEQ ID NO: 1977422 - RNA, 22 nt, Human
caaccaaguaugaaucuauuug

SEQ ID NO: 1977423 - RNA, 16 nt, Human
caacauuguagccuca

SEQ ID NO: 1977424 - RNA, 22 nt, Human
caacauuucucauguugaaacu

SEQ ID NO: 1977425 - RNA, 21 nt, Human
caaccccuucgcuccuguguc

SEQ ID NO: 1977426 - RNA, 21 nt, Human
caacccucagagccaccccua

SEQ ID NO: 1977427 - RNA, 18 nt, Human
caacccucagagccaccc

SEQ ID NO: 1977428 - RNA, 18 nt, Human
caaccccuucgcuccugu

SEQ ID NO: 1977429 - RNA, 19 nt, Human
caaccccuucgcuccugug

SEQ ID NO: 1977430 - RNA, 15 nt, Human
caacagguuuuccug

SEQ ID NO: 1977431 - RNA, 18 nt, Human
caacaggguuuuuuucca

SEQ ID NO: 1977432 - RNA, 19 nt, Human
caacagguuuuccugaaga

SEQ ID NO: 1977433 - RNA, 21 nt, Human
caacagguagcauagcucugu

SEQ ID NO: 1977434 - RNA, 22 nt, Human
caacaucuuggucagauuugaa

SEQ ID NO: 1977435 - RNA, 13 nt, Human
caacauccacucu

SEQ ID NO: 1977436 - RNA, 14 nt, Human
caacauccacucuc

SEQ ID NO: 1977437 - RNA, 15 nt, Human
caaauuuacagagac

SEQ ID NO: 1977438 - RNA, 23 nt, Human
caacaggcugggcuucaguggca

SEQ ID NO: 1977439 - RNA, 24 nt, Human
caacaggcugggcuucaguggcag

SEQ ID NO: 1977440 - RNA, 13 nt, Human
caaauuuaacagg

SEQ ID NO: 1977441 - RNA, 15 nt, Human
caaauucugucucug

SEQ ID NO: 1977442 - RNA, 14 nt, Human
caaauuuacagaga

SEQ ID NO: 1977443 - RNA, 23 nt, Human
caaggugggaggauugcuugagc

SEQ ID NO: 1977444 - RNA, 12 nt, Human
caaggugggagg

SEQ ID NO: 1977445 - RNA, 19 nt, Human
caaggugcaggcaggcugg

SEQ ID NO: 1977446 - RNA, 19 nt, Human
caagggccuggccugagcu

SEQ ID NO: 1977447 - RNA, 16 nt, Human
caagggcggccuuucc

SEQ ID NO: 1977448 - RNA, 18 nt, Human
caagggcggccuuuccca

SEQ ID NO: 1977449 - RNA, 19 nt, Human
caagggcggccuuucccac

SEQ ID NO: 1977450 - RNA, 15 nt, Human
caaggauugcuacug

SEQ ID NO: 1977451 - RNA, 16 nt, Human
caagggccuggccuga

SEQ ID NO: 1977452 - RNA, 13 nt, Human
caagggcuuuccu

SEQ ID NO: 1977453 - RNA, 18 nt, Human
caagggcuuuccugugcc

SEQ ID NO: 1977454 - RNA, 21 nt, Human
caagggcuuuccugugccagg

SEQ ID NO: 1977455 - RNA, 14 nt, Human
caaggugcaggcag

SEQ ID NO: 1977456 - RNA, 15 nt, Human
caaggugcaggcagg

SEQ ID NO: 1977457 - RNA, 17 nt, Human
caaggugcaggcaggcu

SEQ ID NO: 1977458 - RNA, 13 nt, Human
caaggucuugcuc

SEQ ID NO: 1977459 - RNA, 15 nt, Human
caaggucuugcucuc

SEQ ID NO: 1977460 - RNA, 22 nt, Human
caagugugguagagugugccug

SEQ ID NO: 1977461 - RNA, 21 nt, Human
caagucuuugcuauugugaau

SEQ ID NO: 1977462 - RNA, 21 nt, Human
caagugauucuccugccucag

SEQ ID NO: 1977463 - RNA, 22 nt, Human
caagugauucuccugccucagc

SEQ ID NO: 1977464 - RNA, 19 nt, Human
caagugaaaaaggaggaag

SEQ ID NO: 1977465 - RNA, 22 nt, Human
caagugauucucaugccucagc

SEQ ID NO: 1977466 - RNA, 16 nt, Human
caagugauucuccugc

SEQ ID NO: 1977467 - RNA, 17 nt, Human
caagugauucuccugcc

SEQ ID NO: 1977468 - RNA, 21 nt, Human
caaggaugaucuaggaagacu

SEQ ID NO: 1977469 - RNA, 19 nt, Human
caaggaugccccguccccc

SEQ ID NO: 1977470 - RNA, 13 nt, Human
caaggauccugag

SEQ ID NO: 1977471 - RNA, 15 nt, Human
caaggacgcuucaca

SEQ ID NO: 1977472 - RNA, 20 nt, Human
caaggacgcuucacaggaca

SEQ ID NO: 1977473 - RNA, 21 nt, Human
caaggacgcuucacaggacag

SEQ ID NO: 1977474 - RNA, 17 nt, Human
caagcgugagccacugc

SEQ ID NO: 1977475 - RNA, 18 nt, Human
caagcgugagccacugca

SEQ ID NO: 1977476 - RNA, 18 nt, Human
caaggacagccccuccuc

SEQ ID NO: 1977477 - RNA, 13 nt, Human
caaggaagaaauu

SEQ ID NO: 1977478 - RNA, 18 nt, Human
caaggaagaaauuaacuu

SEQ ID NO: 1977479 - RNA, 21 nt, Human
caagccccugcuccagaagau

SEQ ID NO: 1977480 - RNA, 21 nt, Human
caagccaccaacauacuccca

SEQ ID NO: 1977481 - RNA, 16 nt, Human
caagcgugagccacug

SEQ ID NO: 1977482 - RNA, 17 nt, Human
caagcgcccuggccccc

SEQ ID NO: 1977483 - RNA, 18 nt, Human
caagcgcccuggccccca

SEQ ID NO: 1977484 - RNA, 19 nt, Human
caagcgcccuggcccccac

SEQ ID NO: 1977485 - RNA, 23 nt, Human
caagcgcccuggcccccacaugg

SEQ ID NO: 1977486 - RNA, 14 nt, Human
caagccguggcuuc

SEQ ID NO: 1977487 - RNA, 15 nt, Human
caagccguggcuucc

SEQ ID NO: 1977488 - RNA, 16 nt, Human
caagccguggcuuccc

SEQ ID NO: 1977489 - RNA, 18 nt, Human
caagcaccuccugccucg

SEQ ID NO: 1977490 - RNA, 20 nt, Human
caagaaacaaacaaaagcug

SEQ ID NO: 1977491 - RNA, 12 nt, Human
caagaaaagagu

SEQ ID NO: 1977492 - RNA, 17 nt, Human
caagcacuaaacaaaga

SEQ ID NO: 1977493 - RNA, 22 nt, Human
caagcacuucaggccuauguuu

SEQ ID NO: 1977494 - RNA, 17 nt, Human
caaagcuuucuuuguuu

SEQ ID NO: 1977495 - RNA, 17 nt, Human
caaaggagcucgaagga

SEQ ID NO: 1977496 - RNA, 19 nt, Human
caaaggagcucgaaggaua

SEQ ID NO: 1977497 - RNA, 16 nt, Human
caaagcuuguuaagau

SEQ ID NO: 1977498 - RNA, 18 nt, Human
caaagcuguucuuccugg

SEQ ID NO: 1977499 - RNA, 20 nt, Human
caaagcuucccgauuaacug

SEQ ID NO: 1977500 - RNA, 20 nt, Human
caaagccaaagcuaggccug

SEQ ID NO: 1977501 - RNA, 20 nt, Human
caaagcauuugacuuucugu

SEQ ID NO: 1977502 - RNA, 21 nt, Human
caaagccaaagcuaggccugg

SEQ ID NO: 1977503 - RNA, 15 nt, Human
caaagcuaggccugg

SEQ ID NO: 1977504 - RNA, 16 nt, Human
caaagcuaggccuggc

SEQ ID NO: 1977505 - RNA, 17 nt, Human
caaagcuaggccuggcc

SEQ ID NO: 1977506 - RNA, 18 nt, Human
caaagcuaggccuggcca

SEQ ID NO: 1977507 - RNA, 16 nt, Human
caaagcuguucuuccu

SEQ ID NO: 1977508 - RNA, 17 nt, Human
caaagcuguucuuccug

SEQ ID NO: 1977509 - RNA, 23 nt, Human
caaagaggcaguugcccagccuc

SEQ ID NO: 1977510 - RNA, 17 nt, Human
caaagcauguuuugcau

SEQ ID NO: 1977511 - RNA, 13 nt, Human
caaacuucuuuca

SEQ ID NO: 1977512 - RNA, 19 nt, Human
caaaaaauaucuaguaaua

SEQ ID NO: 1977513 - RNA, 23 nt, Human
caaaaaauaucuaguaauauauu

SEQ ID NO: 1977514 - RNA, 13 nt, Human
caaaaaaucuuaa

SEQ ID NO: 1977515 - RNA, 19 nt, Human
caaaaaaucuuaauacugu

SEQ ID NO: 1977516 - RNA, 16 nt, Human
caaaaaaauccagaaa

SEQ ID NO: 1977517 - RNA, 18 nt, Human
auuuuuuuacuaauagac

SEQ ID NO: 1977518 - RNA, 16 nt, Human
caaaucagcugcuacu

SEQ ID NO: 1977519 - RNA, 15 nt, Human
caaaugucuuccugg

SEQ ID NO: 1977520 - RNA, 18 nt, Human
caaaugucuuccuggauu

SEQ ID NO: 1977521 - RNA, 13 nt, Human
caaaucagcugcu

SEQ ID NO: 1977522 - RNA, 21 nt, Human
caaauguucaucaaugaauga

SEQ ID NO: 1977523 - RNA, 20 nt, Human
caaauguucaucaaugaaug

SEQ ID NO: 1977524 - RNA, 14 nt, Human
caaauguggcuccu

SEQ ID NO: 1977525 - RNA, 22 nt, Human
caaauucugcuugcuugcuuuu

SEQ ID NO: 1977526 - RNA, 17 nt, Human
caaauguguuuuggucc

SEQ ID NO: 1977527 - RNA, 15 nt, Human
caaaugugugcccag

SEQ ID NO: 1977528 - RNA, 16 nt, Human
caaaugugugcccagc

SEQ ID NO: 1977529 - RNA, 17 nt, Human
caaaugugugcccagcu

SEQ ID NO: 1977530 - RNA, 18 nt, Human
caaaugugugcccagcuu

SEQ ID NO: 1977531 - RNA, 21 nt, Human
caaaggaugcccaaagaugca

SEQ ID NO: 1977532 - RNA, 20 nt, Human
caaaguuuucaugugcucag

SEQ ID NO: 1977533 - RNA, 18 nt, Human
caaauaauaccuuagaag

SEQ ID NO: 1977534 - RNA, 19 nt, Human
caaauaauaccuuagaagg

SEQ ID NO: 1977535 - RNA, 22 nt, Human
caaauaauauguuuccuucccu

SEQ ID NO: 1977536 - RNA, 19 nt, Human
caaauacauuuaaaacauu

SEQ ID NO: 1977537 - RNA, 12 nt, Human
caaauauauuca

SEQ ID NO: 1977538 - RNA, 23 nt, Human
caaauaguaggcaagauggcaca

SEQ ID NO: 1977539 - RNA, 14 nt, Human
cacacucauccccu

SEQ ID NO: 1977540 - RNA, 18 nt, Human
cacacuucaggcucuucu

SEQ ID NO: 1977541 - RNA, 20 nt, Human
cacacuucaggcucuucucc

SEQ ID NO: 1977542 - RNA, 21 nt, Human
cacacuucaggcucuucuccu

SEQ ID NO: 1977543 - RNA, 22 nt, Human
cacacuucaggcucuucuccuu

SEQ ID NO: 1977544 - RNA, 14 nt, Human
cacacuucaggcuc

SEQ ID NO: 1977545 - RNA, 17 nt, Human
cacacuucaggcucuuc

SEQ ID NO: 1977546 - RNA, 16 nt, Human
cacacuuagcuggaga

SEQ ID NO: 1977547 - RNA, 12 nt, Human
cacacuuagcug

SEQ ID NO: 1977548 - RNA, 21 nt, Human
cacacuugacaucaacugcau

SEQ ID NO: 1977549 - RNA, 17 nt, Human
cacacuugucggcucca

SEQ ID NO: 1977550 - RNA, 18 nt, Human
cacacuugucggcuccag

SEQ ID NO: 1977551 - RNA, 22 nt, Human
cacacuugucggcuccaguccc

SEQ ID NO: 1977552 - RNA, 23 nt, Human
cacacuugucggcuccagucccc

SEQ ID NO: 1977553 - RNA, 16 nt, Human
cacagaguuguuacau

SEQ ID NO: 1977554 - RNA, 17 nt, Human
cacagaguuguuacauu

SEQ ID NO: 1977555 - RNA, 20 nt, Human
cacagacuuuagcuuucuga

SEQ ID NO: 1977556 - RNA, 18 nt, Human
cacagacucaaaugcuca

SEQ ID NO: 1977557 - RNA, 12 nt, Human
cacacagaaggg

SEQ ID NO: 1977558 - RNA, 22 nt, Human
cacacagaaggggacugccacc

SEQ ID NO: 1977559 - RNA, 19 nt, Human
cacacagaggcugccucuc

SEQ ID NO: 1977560 - RNA, 12 nt, Human
cacacagcucug

SEQ ID NO: 1977561 - RNA, 14 nt, Human
cacacaccagagcc

SEQ ID NO: 1977562 - RNA, 13 nt, Human
cacacccagccca

SEQ ID NO: 1977563 - RNA, 23 nt, Human
cacaccaaucuuacuuuguaaau

SEQ ID NO: 1977564 - RNA, 15 nt, Human
cacaccagagcccac

SEQ ID NO: 1977565 - RNA, 12 nt, Human
cacaccagagcc

SEQ ID NO: 1977566 - RNA, 13 nt, Human
cacaccagagccc

SEQ ID NO: 1977567 - RNA, 16 nt, Human
cacaccuguaauucca

SEQ ID NO: 1977568 - RNA, 23 nt, Human
cacaccuccucccacugcccacu

SEQ ID NO: 1977569 - RNA, 17 nt, Human
cacaccgggcacucaga

SEQ ID NO: 1977570 - RNA, 14 nt, Human
cacacccuguuuua

SEQ ID NO: 1977571 - RNA, 19 nt, Human
cacaccccaccugcgcuuc

SEQ ID NO: 1977572 - RNA, 16 nt, Human
cacaccccaccugcgc

SEQ ID NO: 1977573 - RNA, 17 nt, Human
cacaccccaccugcgcu

SEQ ID NO: 1977574 - RNA, 12 nt, Human
cacaccccaccu

SEQ ID NO: 1977575 - RNA, 13 nt, Human
cacaccccaccug

SEQ ID NO: 1977576 - RNA, 14 nt, Human
cacaccccaccugc

SEQ ID NO: 1977577 - RNA, 15 nt, Human
cacaccccaccugcg

SEQ ID NO: 1977578 - RNA, 19 nt, Human
caaugugaaaagaaaaaug

SEQ ID NO: 1977579 - RNA, 22 nt, Human
caaugaaugaaugaauggcuaa

SEQ ID NO: 1977580 - RNA, 18 nt, Human
caaugcaaaccaucauug

SEQ ID NO: 1977581 - RNA, 17 nt, Human
caaugcaaaccaucauu

SEQ ID NO: 1977582 - RNA, 20 nt, Human
caaugcaaaccaucauugaa

SEQ ID NO: 1977583 - RNA, 19 nt, Human
caaugcaaaccaucauuga

SEQ ID NO: 1977584 - RNA, 23 nt, Human
caaugcacuuuguucuggcucuu

SEQ ID NO: 1977585 - RNA, 13 nt, Human
caaugcagaacuc

SEQ ID NO: 1977586 - RNA, 20 nt, Human
caauaggaaaaacugauuuu

SEQ ID NO: 1977587 - RNA, 21 nt, Human
caauaggaaaaacugauuuuu

SEQ ID NO: 1977588 - RNA, 21 nt, Human
caauaggaugggcuucugugc

SEQ ID NO: 1977589 - RNA, 14 nt, Human
caauuuucagauuu

SEQ ID NO: 1977590 - RNA, 16 nt, Human
caauuuucagauuugc

SEQ ID NO: 1977591 - RNA, 19 nt, Human
caauuuucagauuugcaca

SEQ ID NO: 1977592 - RNA, 12 nt, Human
caauuuucagau

SEQ ID NO: 1977593 - RNA, 22 nt, Human
caauuuuauaaggacuuccuga

SEQ ID NO: 1977594 - RNA, 11 nt, Human
caauuuuccuu

SEQ ID NO: 1977595 - RNA, 21 nt, Human
caauuuuccuucagauauuuu

SEQ ID NO: 1977596 - RNA, 22 nt, Human
caauuuuaacuuagagcuuuuu

SEQ ID NO: 1977597 - RNA, 22 nt, Human
caaugccaaaaaaagacagggc

SEQ ID NO: 1977598 - RNA, 17 nt, Human
caauuaaagaaauaauu

SEQ ID NO: 1977599 - RNA, 18 nt, Human
caauuaaagaaauaauuu

SEQ ID NO: 1977600 - RNA, 13 nt, Human
caauuaaagaaau

SEQ ID NO: 1977601 - RNA, 15 nt, Human
caauuaaagaaauaa

SEQ ID NO: 1977602 - RNA, 21 nt, Human
cacaaauucugucucuggauu

SEQ ID NO: 1977603 - RNA, 20 nt, Human
cacaaauuaugcuaagaauu

SEQ ID NO: 1977604 - RNA, 15 nt, Human
cacaaauuucucugu

SEQ ID NO: 1977605 - RNA, 17 nt, Human
cacaaccuucuguggcu

SEQ ID NO: 1977606 - RNA, 18 nt, Human
cacaaccuucuguggcuc

SEQ ID NO: 1977607 - RNA, 19 nt, Human
cacaaccuucuguggcuca

SEQ ID NO: 1977608 - RNA, 23 nt, Human
cacaaccuucuguggcucacaga

SEQ ID NO: 1977609 - RNA, 22 nt, Human
cacaacacacagauuugagcuc

SEQ ID NO: 1977610 - RNA, 14 nt, Human
cacaacccccagcu

SEQ ID NO: 1977611 - RNA, 15 nt, Human
cacaacccccagcuc

SEQ ID NO: 1977612 - RNA, 16 nt, Human
cacaacccccagcucc

SEQ ID NO: 1977613 - RNA, 17 nt, Human
cacaacccccagcuccc

SEQ ID NO: 1977614 - RNA, 18 nt, Human
cacaacccccagcucccg

SEQ ID NO: 1977615 - RNA, 22 nt, Human
cacaaaaagauaccuuaaaauu

SEQ ID NO: 1977616 - RNA, 16 nt, Human
cacaaaaguuucucuu

SEQ ID NO: 1977617 - RNA, 18 nt, Human
cacaaaaguuucucuuuu

SEQ ID NO: 1977618 - RNA, 19 nt, Human
cacaggcagggcaggacca

SEQ ID NO: 1977619 - RNA, 19 nt, Human
cacagugagucgaggacag

SEQ ID NO: 1977620 - RNA, 20 nt, Human
cacagugagucgaggacagg

SEQ ID NO: 1977621 - RNA, 18 nt, Human
cacagugagucgaggaca

SEQ ID NO: 1977622 - RNA, 15 nt, Human
cacaggcccuuccuc

SEQ ID NO: 1977623 - RNA, 12 nt, Human
cacaggcagggc

SEQ ID NO: 1977624 - RNA, 13 nt, Human
cacaggcagggca

SEQ ID NO: 1977625 - RNA, 14 nt, Human
cacaggcagggcag

SEQ ID NO: 1977626 - RNA, 18 nt, Human
cacaggcagggcaggacc

SEQ ID NO: 1977627 - RNA, 20 nt, Human
cacaggcccggcuccaggcu

SEQ ID NO: 1977628 - RNA, 23 nt, Human
cacaggcccggcuccaggcuccu

SEQ ID NO: 1977629 - RNA, 15 nt, Human
cacauaauuaacacu

SEQ ID NO: 1977630 - RNA, 17 nt, Human
cacauacacacacacgc

SEQ ID NO: 1977631 - RNA, 23 nt, Human
cacauauaaauugucuuaaugga

SEQ ID NO: 1977632 - RNA, 22 nt, Human
cacauaauucaggaagcagcuu

SEQ ID NO: 1977633 - RNA, 10 nt, Human
cacaggcagg

SEQ ID NO: 1977634 - RNA, 16 nt, Human
cacaggcccggcucca

SEQ ID NO: 1977635 - RNA, 17 nt, Human
cacaggcccggcuccag

SEQ ID NO: 1977636 - RNA, 18 nt, Human
cacaggcccggcuccagg

SEQ ID NO: 1977637 - RNA, 19 nt, Human
cacaggcccggcuccaggc

SEQ ID NO: 1977638 - RNA, 12 nt, Human
cacaggaucagu

SEQ ID NO: 1977639 - RNA, 15 nt, Human
cacaggaucagucug

SEQ ID NO: 1977640 - RNA, 16 nt, Human
cacaggaucagucuga

SEQ ID NO: 1977641 - RNA, 15 nt, Human
cacaggaaguagagg

SEQ ID NO: 1977642 - RNA, 14 nt, Human
cacagcauuucaag

SEQ ID NO: 1977643 - RNA, 18 nt, Human
cacagaugggugcuugga

SEQ ID NO: 1977644 - RNA, 14 nt, Human
cacagaugggugcu

SEQ ID NO: 1977645 - RNA, 20 nt, Human
cacagaguuguuacauuuuu

SEQ ID NO: 1977646 - RNA, 20 nt, Human
cacagaugggugcuuggagg

SEQ ID NO: 1977647 - RNA, 16 nt, Human
cacagcagccccugca

SEQ ID NO: 1977648 - RNA, 20 nt, Human
cacagcacgggggccaagga

SEQ ID NO: 1977649 - RNA, 21 nt, Human
cacagcacuugaguaaaauac

SEQ ID NO: 1977650 - RNA, 15 nt, Human
cacagcacccuauau

SEQ ID NO: 1977651 - RNA, 22 nt, Human
caccaagccuggucagcccaaa

SEQ ID NO: 1977652 - RNA, 12 nt, Human
cacauugugcag

SEQ ID NO: 1977653 - RNA, 21 nt, Human
cacauuggucuaucuacuggc

SEQ ID NO: 1977654 - RNA, 13 nt, Human
caccacacccagc

SEQ ID NO: 1977655 - RNA, 15 nt, Human
caccacacccagccc

SEQ ID NO: 1977656 - RNA, 17 nt, Human
caccacacccagcccac

SEQ ID NO: 1977657 - RNA, 17 nt, Human
cacauuggaaacaaguc

SEQ ID NO: 1977658 - RNA, 18 nt, Human
cacauuggagauguuuag

SEQ ID NO: 1977659 - RNA, 19 nt, Human
caccaagccuggucagccc

SEQ ID NO: 1977660 - RNA, 20 nt, Human
caccaagccuggucagccca

SEQ ID NO: 1977661 - RNA, 21 nt, Human
caccaagccuggucagcccaa

SEQ ID NO: 1977662 - RNA, 15 nt, Human
caccaagcccaguua

SEQ ID NO: 1977663 - RNA, 23 nt, Human
caccacauaaggucagcucagag

SEQ ID NO: 1977664 - RNA, 19 nt, Human
caccacaugugcacaugca

SEQ ID NO: 1977665 - RNA, 15 nt, Human
caccacaugugcaca

SEQ ID NO: 1977666 - RNA, 18 nt, Human
caccacaugugcacaugc

SEQ ID NO: 1977667 - RNA, 17 nt, Human
caccacccuccuuccca

SEQ ID NO: 1977668 - RNA, 14 nt, Human
caccaccucuuugg

SEQ ID NO: 1977669 - RNA, 16 nt, Human
caccacuacauucugu

SEQ ID NO: 1977670 - RNA, 17 nt, Human
caccacuacauucuguu

SEQ ID NO: 1977671 - RNA, 18 nt, Human
caccacuacauucuguua

SEQ ID NO: 1977672 - RNA, 19 nt, Human
caccacuacauucuguuaa

SEQ ID NO: 1977673 - RNA, 20 nt, Human
caccacuacauucuguuaau

SEQ ID NO: 1977674 - RNA, 18 nt, Human
cacaugccucucucaggc

SEQ ID NO: 1977675 - RNA, 17 nt, Human
cacaugccucucucagg

SEQ ID NO: 1977676 - RNA, 13 nt, Human
cacaugccucucu

SEQ ID NO: 1977677 - RNA, 19 nt, Human
cacaucagcacgauuucug

SEQ ID NO: 1977678 - RNA, 18 nt, Human
cacaucagcacgauuucu

SEQ ID NO: 1977679 - RNA, 17 nt, Human
cacauauuucagugagg

SEQ ID NO: 1977680 - RNA, 12 nt, Human
cacauaucuguc

SEQ ID NO: 1977681 - RNA, 14 nt, Human
cacauaucugucau

SEQ ID NO: 1977682 - RNA, 22 nt, Human
cacauggugacuuuugaaaaga

SEQ ID NO: 1977683 - RNA, 12 nt, Human
cacauggugaug

SEQ ID NO: 1977684 - RNA, 15 nt, Human
cacauggugauguug

SEQ ID NO: 1977685 - RNA, 14 nt, Human
cacaugguuuuccu

SEQ ID NO: 1977686 - RNA, 23 nt, Human
cacauguccaagaagcccaggaa

SEQ ID NO: 1977687 - RNA, 14 nt, Human
cacauauuuuucca

SEQ ID NO: 1977688 - RNA, 19 nt, Human
cacaugccucucucaggcc

SEQ ID NO: 1977689 - RNA, 20 nt, Human
cacauuacuagaguuggcau

SEQ ID NO: 1977690 - RNA, 16 nt, Human
cacauguuuucaaaug

SEQ ID NO: 1977691 - RNA, 18 nt, Human
cacauguuuucaaaugga

SEQ ID NO: 1977692 - RNA, 16 nt, Human
cacauuccugaacagg

SEQ ID NO: 1977693 - RNA, 16 nt, Human
cacauuccugaugcuu

SEQ ID NO: 1977694 - RNA, 14 nt, Human
cacaugugcacaug

SEQ ID NO: 1977695 - RNA, 15 nt, Human
cacaugugcacaugc

SEQ ID NO: 1977696 - RNA, 17 nt, Human
cacaugugcacaugcac

SEQ ID NO: 1977697 - RNA, 13 nt, Human
cacauguggacuu

SEQ ID NO: 1977698 - RNA, 12 nt, Human
cacauguuuuca

SEQ ID NO: 1977699 - RNA, 13 nt, Human
cacauguuuucaa

SEQ ID NO: 1977700 - RNA, 14 nt, Human
cacauguuuucaaa

SEQ ID NO: 1977701 - RNA, 15 nt, Human
cacauguuuucaaau

SEQ ID NO: 1977702 - RNA, 17 nt, Human
caccccggccaccugcg

SEQ ID NO: 1977703 - RNA, 16 nt, Human
caccccggccaccugc

SEQ ID NO: 1977704 - RNA, 15 nt, Human
caccccggccaccug

SEQ ID NO: 1977705 - RNA, 14 nt, Human
caccccggccaccu

SEQ ID NO: 1977706 - RNA, 14 nt, Human
caccccuaaagaga

SEQ ID NO: 1977707 - RNA, 22 nt, Human
cacccccacccaagggccuggc

SEQ ID NO: 1977708 - RNA, 13 nt, Human
caccccagcccca

SEQ ID NO: 1977709 - RNA, 12 nt, Human
caccccagcccc

SEQ ID NO: 1977710 - RNA, 15 nt, Human
caccccauggccggc

SEQ ID NO: 1977711 - RNA, 12 nt, Human
caccccauccuc

SEQ ID NO: 1977712 - RNA, 12 nt, Human
cacccaccucag

SEQ ID NO: 1977713 - RNA, 13 nt, Human
cacccaccucagc

SEQ ID NO: 1977714 - RNA, 14 nt, Human
cacccaccucagcc

SEQ ID NO: 1977715 - RNA, 16 nt, Human
cacccaccucagccuc

SEQ ID NO: 1977716 - RNA, 20 nt, Human
cacccaccaucaugucuggc

SEQ ID NO: 1977717 - RNA, 22 nt, Human
cacccaccaucaugucuggcua

SEQ ID NO: 1977718 - RNA, 13 nt, Human
caccagaagccca

SEQ ID NO: 1977719 - RNA, 14 nt, Human
caccagaagcccag

SEQ ID NO: 1977720 - RNA, 15 nt, Human
caccagaagcccaga

SEQ ID NO: 1977721 - RNA, 16 nt, Human
caccacucaagaccaa

SEQ ID NO: 1977722 - RNA, 18 nt, Human
cacccaagggccuggccu

SEQ ID NO: 1977723 - RNA, 17 nt, Human
cacccaagggccuggcc

SEQ ID NO: 1977724 - RNA, 16 nt, Human
caccagaagcccagaa

SEQ ID NO: 1977725 - RNA, 17 nt, Human
caccagaagcccagaau

SEQ ID NO: 1977726 - RNA, 16 nt, Human
cacccaagggccuggc

SEQ ID NO: 1977727 - RNA, 23 nt, Human
cacccaagggccuggccugagcu

SEQ ID NO: 1977728 - RNA, 21 nt, Human
cacccaagggccuggccugag

SEQ ID NO: 1977729 - RNA, 20 nt, Human
cacccaagggccuggccuga

SEQ ID NO: 1977730 - RNA, 19 nt, Human
cacccaagggccuggccug

SEQ ID NO: 1977731 - RNA, 15 nt, Human
cacccacaggcaugu

SEQ ID NO: 1977732 - RNA, 15 nt, Human
caccccuaaagagau

SEQ ID NO: 1977733 - RNA, 11 nt, Human
uuuguggggag

SEQ ID NO: 1977734 - RNA, 13 nt, Human
uuuguggugauuu

SEQ ID NO: 1977735 - RNA, 12 nt, Human
uuuguguaaauu

SEQ ID NO: 1977736 - RNA, 21 nt, Human
uuuguguaaauuauugaugaa

SEQ ID NO: 1977737 - RNA, 21 nt, Human
uugaagagguuuuaaagcuuc

SEQ ID NO: 1977738 - RNA, 19 nt, Human
uugaagaggggagcucagu

SEQ ID NO: 1977739 - RNA, 14 nt, Human
uugaagagugaaau

SEQ ID NO: 1977740 - RNA, 13 nt, Human
uugaagauucuau

SEQ ID NO: 1977741 - RNA, 22 nt, Human
uugaagauucuauguuaauauu

SEQ ID NO: 1977742 - RNA, 23 nt, Human
uugaagauucuauguuaauauuu

SEQ ID NO: 1977743 - RNA, 20 nt, Human
uugaagcacagugaucaagu

SEQ ID NO: 1977744 - RNA, 16 nt, Human
uugaagcaaacaguug

SEQ ID NO: 1977745 - RNA, 16 nt, Human
uugaagagguuuuaaa

SEQ ID NO: 1977746 - RNA, 18 nt, Human
uugaagagcagcuccuuc

SEQ ID NO: 1977747 - RNA, 20 nt, Human
uugaacuuugaccucugcag

SEQ ID NO: 1977748 - RNA, 17 nt, Human
uugaacuuugaccucug

SEQ ID NO: 1977749 - RNA, 18 nt, Human
uugaacuuugaccucugc

SEQ ID NO: 1977750 - RNA, 22 nt, Human
uugaaugacuaagaggaaagua

SEQ ID NO: 1977751 - RNA, 16 nt, Human
uugaaugaugccauga

SEQ ID NO: 1977752 - RNA, 12 nt, Human
uugaaugaugcc

SEQ ID NO: 1977753 - RNA, 15 nt, Human
uugaacuuugaccuc

SEQ ID NO: 1977754 - RNA, 11 nt, Human
uugaaacauug

SEQ ID NO: 1977755 - RNA, 12 nt, Human
uugaaacauugc

SEQ ID NO: 1977756 - RNA, 14 nt, Human
uugaaacauugcuu

SEQ ID NO: 1977757 - RNA, 18 nt, Human
uugaaacauugcuuuuaa

SEQ ID NO: 1977758 - RNA, 19 nt, Human
uugaaacauugcuuuuaaa

SEQ ID NO: 1977759 - RNA, 14 nt, Human
uugaaaauaguuua

SEQ ID NO: 1977760 - RNA, 23 nt, Human
uugaaaauaguuuauuuuaaaac

SEQ ID NO: 1977761 - RNA, 14 nt, Human
uucuuucccuuccu

SEQ ID NO: 1977762 - RNA, 18 nt, Human
uugaaaauuaacaugaau

SEQ ID NO: 1977763 - RNA, 11 nt, Human
uucuuuacaaa

SEQ ID NO: 1977764 - RNA, 21 nt, Human
uucuuuccugaggcugggcuc

SEQ ID NO: 1977765 - RNA, 21 nt, Human
uugaaaaucuuauaauuuaaa

SEQ ID NO: 1977766 - RNA, 14 nt, Human
uucuggccucccac

SEQ ID NO: 1977767 - RNA, 15 nt, Human
uucuggccucccaca

SEQ ID NO: 1977768 - RNA, 16 nt, Human
uucuggcuaugcauuu

SEQ ID NO: 1977769 - RNA, 20 nt, Human
uucuggcagaguugaagaca

SEQ ID NO: 1977770 - RNA, 15 nt, Human
uucuggcagaggagg

SEQ ID NO: 1977771 - RNA, 20 nt, Human
uucuaaguugaguauauuau

SEQ ID NO: 1977772 - RNA, 23 nt, Human
uucuaagucaaacacuugugacu

SEQ ID NO: 1977773 - RNA, 11 nt, Human
uucuguauuug

SEQ ID NO: 1977774 - RNA, 13 nt, Human
uucuguauuugaa

SEQ ID NO: 1977775 - RNA, 18 nt, Human
uucuguauagacaggaga

SEQ ID NO: 1977776 - RNA, 23 nt, Human
uucuguauagacaggagaagaaa

SEQ ID NO: 1977777 - RNA, 24 nt, Human
uucugugcccagaauacugaugga

SEQ ID NO: 1977778 - RNA, 19 nt, Human
uucugugcccagaauacug

SEQ ID NO: 1977779 - RNA, 20 nt, Human
uucugugcccagaauacuga

SEQ ID NO: 1977780 - RNA, 23 nt, Human
uucugugcccagaauacugaugg

SEQ ID NO: 1977781 - RNA, 23 nt, Human
uucugugcuguuacaguuuucuu

SEQ ID NO: 1977782 - RNA, 17 nt, Human
uucuuagggaaggauac

SEQ ID NO: 1977783 - RNA, 13 nt, Human
uucuucagagacu

SEQ ID NO: 1977784 - RNA, 17 nt, Human
uucuuauguugcccagu

SEQ ID NO: 1977785 - RNA, 17 nt, Human
uucuuauuacuagacug

SEQ ID NO: 1977786 - RNA, 14 nt, Human
uucuuguguguuua

SEQ ID NO: 1977787 - RNA, 17 nt, Human
uucuuauuccauauuag

SEQ ID NO: 1977788 - RNA, 13 nt, Human
uugcacugaaguu

SEQ ID NO: 1977789 - RNA, 16 nt, Human
uugcacugaaguuuga

SEQ ID NO: 1977790 - RNA, 11 nt, Human
uugcacugaag

SEQ ID NO: 1977791 - RNA, 12 nt, Human
uugcacugaagu

SEQ ID NO: 1977792 - RNA, 15 nt, Human
uugcacuuucagacu

SEQ ID NO: 1977793 - RNA, 21 nt, Human
uugcacuuucagacucucucu

SEQ ID NO: 1977794 - RNA, 17 nt, Human
uugcacuuuuucuuaau

SEQ ID NO: 1977795 - RNA, 22 nt, Human
uugcacuuuuucuuaaucauuu

SEQ ID NO: 1977796 - RNA, 17 nt, Human
uugauucauaaugacuu

SEQ ID NO: 1977797 - RNA, 13 nt, Human
uugauucauaaug

SEQ ID NO: 1977798 - RNA, 18 nt, Human
uugcagcucagaaccaca

SEQ ID NO: 1977799 - RNA, 23 nt, Human
uugcagacaggcaagcaccuccu

SEQ ID NO: 1977800 - RNA, 17 nt, Human
uugcagcacagcugaga

SEQ ID NO: 1977801 - RNA, 16 nt, Human
uugcauaacguauaaa

SEQ ID NO: 1977802 - RNA, 19 nt, Human
uugccaguaacacaggcca

SEQ ID NO: 1977803 - RNA, 12 nt, Human
uugccagcccau

SEQ ID NO: 1977804 - RNA, 15 nt, Human
uugccagcccauuug

SEQ ID NO: 1977805 - RNA, 20 nt, Human
uugccagcccauuugggcag

SEQ ID NO: 1977806 - RNA, 17 nt, Human
uugccagcugcugagcc

SEQ ID NO: 1977807 - RNA, 20 nt, Human
uugccagcugcugagccgca

SEQ ID NO: 1977808 - RNA, 22 nt, Human
uugccagcugcugagccgcaga

SEQ ID NO: 1977809 - RNA, 16 nt, Human
uugccauguuggccag

SEQ ID NO: 1977810 - RNA, 17 nt, Human
uugccauguuggccagg

SEQ ID NO: 1977811 - RNA, 18 nt, Human
uugccauguuggccaggc

SEQ ID NO: 1977812 - RNA, 19 nt, Human
uugccauguuggccaggcu

SEQ ID NO: 1977813 - RNA, 15 nt, Human
uugccaucucugcuc

SEQ ID NO: 1977814 - RNA, 17 nt, Human
uugccaucucugcucca

SEQ ID NO: 1977815 - RNA, 16 nt, Human
uugauaugugaacagu

SEQ ID NO: 1977816 - RNA, 16 nt, Human
uugauaugcuuauaca

SEQ ID NO: 1977817 - RNA, 20 nt, Human
uugaggcuuauauuugugua

SEQ ID NO: 1977818 - RNA, 17 nt, Human
uugaucaguaguuugca

SEQ ID NO: 1977819 - RNA, 18 nt, Human
uugaucaguaguuugcau

SEQ ID NO: 1977820 - RNA, 22 nt, Human
uugauauuuguauuuauucuuu

SEQ ID NO: 1977821 - RNA, 22 nt, Human
uugauauuuucaacgcagcccu

SEQ ID NO: 1977822 - RNA, 13 nt, Human
uugauauuuguau

SEQ ID NO: 1977823 - RNA, 15 nt, Human
uugauauuuguauuu

SEQ ID NO: 1977824 - RNA, 16 nt, Human
uugauucagcucugca

SEQ ID NO: 1977825 - RNA, 23 nt, Human
uugauucagacagcugccuggga

SEQ ID NO: 1977826 - RNA, 21 nt, Human
uugauucagacagcugccugg

SEQ ID NO: 1977827 - RNA, 17 nt, Human
uugauucagacagcugc

SEQ ID NO: 1977828 - RNA, 17 nt, Human
uugauccagaaagaaaa

SEQ ID NO: 1977829 - RNA, 14 nt, Human
uugaucucacauuu

SEQ ID NO: 1977830 - RNA, 12 nt, Human
uugaucucccca

SEQ ID NO: 1977831 - RNA, 18 nt, Human
uugaucucccuuuccuau

SEQ ID NO: 1977832 - RNA, 14 nt, Human
uugagccugggagg

SEQ ID NO: 1977833 - RNA, 14 nt, Human
uugagccuugaacu

SEQ ID NO: 1977834 - RNA, 15 nt, Human
uugagccuugaacuu

SEQ ID NO: 1977835 - RNA, 16 nt, Human
uugagccuugaacuuu

SEQ ID NO: 1977836 - RNA, 15 nt, Human
uugagcuaugacuua

SEQ ID NO: 1977837 - RNA, 16 nt, Human
uugagcuaugacuuaa

SEQ ID NO: 1977838 - RNA, 13 nt, Human
uugagcucagccc

SEQ ID NO: 1977839 - RNA, 12 nt, Human
uugagcucccac

SEQ ID NO: 1977840 - RNA, 22 nt, Human
uugagcucccacuucugccaga

SEQ ID NO: 1977841 - RNA, 13 nt, Human
uugagcuccuggg

SEQ ID NO: 1977842 - RNA, 19 nt, Human
uugagccuugaacuuugac

SEQ ID NO: 1977843 - RNA, 15 nt, Human
uugagccugucaaga

SEQ ID NO: 1977844 - RNA, 11 nt, Human
uugagcuauga

SEQ ID NO: 1977845 - RNA, 14 nt, Human
uugagcuaugacuu

SEQ ID NO: 1977846 - RNA, 16 nt, Human
uugaggagcacugaaa

SEQ ID NO: 1977847 - RNA, 14 nt, Human
uugaggauuaguuu

SEQ ID NO: 1977848 - RNA, 17 nt, Human
uugaggauuaguuuaga

SEQ ID NO: 1977849 - RNA, 18 nt, Human
uugaggauuaguuuagaa

SEQ ID NO: 1977850 - RNA, 19 nt, Human
uugaggauuaguuuagaac

SEQ ID NO: 1977851 - RNA, 15 nt, Human
uugucucuucuccuu

SEQ ID NO: 1977852 - RNA, 17 nt, Human
uugucugaagucacugc

SEQ ID NO: 1977853 - RNA, 18 nt, Human
uugucugaagucacugca

SEQ ID NO: 1977854 - RNA, 13 nt, Human
uugucuuaaugga

SEQ ID NO: 1977855 - RNA, 22 nt, Human
uugucuuaaaaaguggaaaaau

SEQ ID NO: 1977856 - RNA, 20 nt, Human
uugucuaugggacucaaugc

SEQ ID NO: 1977857 - RNA, 22 nt, Human
uugucaagaauagcauuguaaa

SEQ ID NO: 1977858 - RNA, 23 nt, Human
uugucuauuuuucucuucauauu

SEQ ID NO: 1977859 - RNA, 22 nt, Human
uugucaaaguggugagaggcau

SEQ ID NO: 1977860 - RNA, 14 nt, Human
uugucuaugggacu

SEQ ID NO: 1977861 - RNA, 15 nt, Human
uuguauuuuuccaga

SEQ ID NO: 1977862 - RNA, 16 nt, Human
uuguauuuuuguuguu

SEQ ID NO: 1977863 - RNA, 19 nt, Human
uuguauuuuuguuguuggg

SEQ ID NO: 1977864 - RNA, 22 nt, Human
uuguaugaaagauggcugugcc

SEQ ID NO: 1977865 - RNA, 20 nt, Human
uuguaugauccuaaugaaug

SEQ ID NO: 1977866 - RNA, 12 nt, Human
uuguaugaaaac

SEQ ID NO: 1977867 - RNA, 13 nt, Human
uuguaugaucugu

SEQ ID NO: 1977868 - RNA, 19 nt, Human
uuguaugaucugugccuuu

SEQ ID NO: 1977869 - RNA, 19 nt, Human
uuguaugcaagcaguuuca

SEQ ID NO: 1977870 - RNA, 20 nt, Human
uuguaugcaagcaguuucaa

SEQ ID NO: 1977871 - RNA, 22 nt, Human
uuguaugcaagcaguuucaaua

SEQ ID NO: 1977872 - RNA, 24 nt, Human
uuguaugcaagcaguuucaauaaa

SEQ ID NO: 1977873 - RNA, 15 nt, Human
uuguagauuugauuu

SEQ ID NO: 1977874 - RNA, 15 nt, Human
uuguagcauccugga

SEQ ID NO: 1977875 - RNA, 14 nt, Human
uuguaucugucuuu

SEQ ID NO: 1977876 - RNA, 15 nt, Human
uuguaucugucuuuc

SEQ ID NO: 1977877 - RNA, 16 nt, Human
uuguaucugucuuucc

SEQ ID NO: 1977878 - RNA, 18 nt, Human
uuguaucugucuuuccac

SEQ ID NO: 1977879 - RNA, 17 nt, Human
uuguagaagucacauuc

SEQ ID NO: 1977880 - RNA, 20 nt, Human
uuguacuuucuguuaaaaug

SEQ ID NO: 1977881 - RNA, 22 nt, Human
uuguacuuucuguuaaaaugca

SEQ ID NO: 1977882 - RNA, 22 nt, Human
uuguagaagucacauuccugaa

SEQ ID NO: 1977883 - RNA, 18 nt, Human
uuguacuuuagggaagua

SEQ ID NO: 1977884 - RNA, 15 nt, Human
uuguacuuuaaaaau

SEQ ID NO: 1977885 - RNA, 13 nt, Human
uuguacuuucugu

SEQ ID NO: 1977886 - RNA, 15 nt, Human
uuguacuuucuguua

SEQ ID NO: 1977887 - RNA, 17 nt, Human
uuguacuuucuguuaaa

SEQ ID NO: 1977888 - RNA, 20 nt, Human
uuguaaaauggugugaccac

SEQ ID NO: 1977889 - RNA, 12 nt, Human
uuguaaacuuug

SEQ ID NO: 1977890 - RNA, 13 nt, Human
uuguaaacuuuga

SEQ ID NO: 1977891 - RNA, 14 nt, Human
uuguaaacuuugaa

SEQ ID NO: 1977892 - RNA, 15 nt, Human
uuguaaacuuugaaa

SEQ ID NO: 1977893 - RNA, 17 nt, Human
uuguaaacuuugaaaua

SEQ ID NO: 1977894 - RNA, 16 nt, Human
uuguaccgcaauguga

SEQ ID NO: 1977895 - RNA, 18 nt, Human
uuguaaacuuugaaauau

SEQ ID NO: 1977896 - RNA, 19 nt, Human
uuguaaacuuugaaauaua

SEQ ID NO: 1977897 - RNA, 21 nt, Human
uuguaaacuuugaaauauaug

SEQ ID NO: 1977898 - RNA, 17 nt, Human
uuguaaagaaaaauauu

SEQ ID NO: 1977899 - RNA, 14 nt, Human
uugggaccccuggu

SEQ ID NO: 1977900 - RNA, 15 nt, Human
uugggaccccuggug

SEQ ID NO: 1977901 - RNA, 16 nt, Human
uugggaccccuggugg

SEQ ID NO: 1977902 - RNA, 20 nt, Human
uugggaccccuggugguuca

SEQ ID NO: 1977903 - RNA, 17 nt, Human
uugggaagagcuuagaa

SEQ ID NO: 1977904 - RNA, 18 nt, Human
uugggaagagcuuagaaa

SEQ ID NO: 1977905 - RNA, 22 nt, Human
uugggaaguuaaagggaagaaa

SEQ ID NO: 1977906 - RNA, 14 nt, Human
uugggaauuuuauu

SEQ ID NO: 1977907 - RNA, 15 nt, Human
uugggacccaguggc

SEQ ID NO: 1977908 - RNA, 20 nt, Human
uugggacccaguggcagggc

SEQ ID NO: 1977909 - RNA, 22 nt, Human
uugggacccaguggcagggcac

SEQ ID NO: 1977910 - RNA, 23 nt, Human
uuggcuucacggaagagccuugc

SEQ ID NO: 1977911 - RNA, 13 nt, Human
uuggcuuggcccu

SEQ ID NO: 1977912 - RNA, 16 nt, Human
uuggcuugccauuuuu

SEQ ID NO: 1977913 - RNA, 19 nt, Human
uuggcagguaggaauauua

SEQ ID NO: 1977914 - RNA, 20 nt, Human
uuggcagguaggaauauuau

SEQ ID NO: 1977915 - RNA, 19 nt, Human
uugggauccaggccccucc

SEQ ID NO: 1977916 - RNA, 21 nt, Human
uugggauccaggccccucccu

SEQ ID NO: 1977917 - RNA, 19 nt, Human
uugggcaauauucucugua

SEQ ID NO: 1977918 - RNA, 21 nt, Human
uugggcaauauucucuguaca

SEQ ID NO: 1977919 - RNA, 22 nt, Human
uugggcaauauucucuguacau

SEQ ID NO: 1977920 - RNA, 15 nt, Human
uuggucugugagaug

SEQ ID NO: 1977921 - RNA, 12 nt, Human
uuguaaaauggu

SEQ ID NO: 1977922 - RNA, 13 nt, Human
uuguaaaauggug

SEQ ID NO: 1977923 - RNA, 20 nt, Human
uuggucugacccacugcuuu

SEQ ID NO: 1977924 - RNA, 21 nt, Human
uugguccuggaggcucaaauu

SEQ ID NO: 1977925 - RNA, 16 nt, Human
uuggcagcucuacucu

SEQ ID NO: 1977926 - RNA, 16 nt, Human
uuggcaccuucccccu

SEQ ID NO: 1977927 - RNA, 23 nt, Human
uuggcaccuucccccucccccag

SEQ ID NO: 1977928 - RNA, 22 nt, Human
uuggcagaugcagcucuuccug

SEQ ID NO: 1977929 - RNA, 13 nt, Human
uuggcagaugcag

SEQ ID NO: 1977930 - RNA, 16 nt, Human
uuggcagaugcagcuc

SEQ ID NO: 1977931 - RNA, 21 nt, Human
uuggcagaugcagcucuuccu

SEQ ID NO: 1977932 - RNA, 22 nt, Human
uuggauuuuauguugacauuug

SEQ ID NO: 1977933 - RNA, 24 nt, Human
uuggauuuuauguugacauuuguu

SEQ ID NO: 1977934 - RNA, 20 nt, Human
uuggcaauaaauuuugaaaa

SEQ ID NO: 1977935 - RNA, 22 nt, Human
uuggcaauaaauuuugaaaagu

SEQ ID NO: 1977936 - RNA, 21 nt, Human
uuggacccugaggcccagagg

SEQ ID NO: 1977937 - RNA, 19 nt, Human
uuggacccugaggcccaga

SEQ ID NO: 1977938 - RNA, 18 nt, Human
uuggacccugaggcccag

SEQ ID NO: 1977939 - RNA, 15 nt, Human
uuggacccugaggcc

SEQ ID NO: 1977940 - RNA, 14 nt, Human
uuggauuuggagag

SEQ ID NO: 1977941 - RNA, 19 nt, Human
uuggauuuggagagaaaua

SEQ ID NO: 1977942 - RNA, 13 nt, Human
uuggauuuuaugu

SEQ ID NO: 1977943 - RNA, 17 nt, Human
uuggauuuuauguugac

SEQ ID NO: 1977944 - RNA, 18 nt, Human
uuggauuuuauguugaca

SEQ ID NO: 1977945 - RNA, 20 nt, Human
uuggauuuuauguugacauu

SEQ ID NO: 1977946 - RNA, 15 nt, Human
uuggauuguccccga

SEQ ID NO: 1977947 - RNA, 15 nt, Human
uuggacauuuuaugu

SEQ ID NO: 1977948 - RNA, 19 nt, Human
uuggaagcuccgcuuucua

SEQ ID NO: 1977949 - RNA, 19 nt, Human
uuggaagcagguuaaaugu

SEQ ID NO: 1977950 - RNA, 20 nt, Human
uuggaagcagguuaaauguu

SEQ ID NO: 1977951 - RNA, 21 nt, Human
uuggaagcagguuaaauguuu

SEQ ID NO: 1977952 - RNA, 22 nt, Human
uuggaagcacaccaaucuuacu

SEQ ID NO: 1977953 - RNA, 18 nt, Human
uuggaagcagguuaaaug

SEQ ID NO: 1977954 - RNA, 19 nt, Human
uugcugugacagugauggc

SEQ ID NO: 1977955 - RNA, 18 nt, Human
uuggacaaaauggaauac

SEQ ID NO: 1977956 - RNA, 23 nt, Human
uuggaauuagaacccuugcacag

SEQ ID NO: 1977957 - RNA, 21 nt, Human
uuggaaugcacucagacugua

SEQ ID NO: 1977958 - RNA, 23 nt, Human
uuggaaugcacucagacuguaua

SEQ ID NO: 1977959 - RNA, 18 nt, Human
uugcugucccuuuuccuu

SEQ ID NO: 1977960 - RNA, 16 nt, Human
uugcugucccuuuucc

SEQ ID NO: 1977961 - RNA, 14 nt, Human
uugcuggaaagagc

SEQ ID NO: 1977962 - RNA, 16 nt, Human
uugcugcuugaggcaa

SEQ ID NO: 1977963 - RNA, 14 nt, Human
uugcugcuugaggc

SEQ ID NO: 1977964 - RNA, 20 nt, Human
uugccauguuggccaggcug

SEQ ID NO: 1977965 - RNA, 21 nt, Human
uugccauguuggccaggcugg

SEQ ID NO: 1977966 - RNA, 13 nt, Human
uugccaugugcuu

SEQ ID NO: 1977967 - RNA, 20 nt, Human
uugccaugugcuucugccac

SEQ ID NO: 1977968 - RNA, 16 nt, Human
uugccuugacaaacuu

SEQ ID NO: 1977969 - RNA, 12 nt, Human
uugccuuucugu

SEQ ID NO: 1977970 - RNA, 14 nt, Human
uugccuuucugugu

SEQ ID NO: 1977971 - RNA, 17 nt, Human
uugccuuucuguguuua

SEQ ID NO: 1977972 - RNA, 19 nt, Human
uugccuuucuguguuuauu

SEQ ID NO: 1977973 - RNA, 14 nt, Human
uugccuuugaagag

SEQ ID NO: 1977974 - RNA, 17 nt, Human
uugccuuugaagaguga

SEQ ID NO: 1977975 - RNA, 21 nt, Human
uugcgaauauuuuguaaauua

SEQ ID NO: 1977976 - RNA, 21 nt, Human
uuuaucgcccuggcaggcagg

SEQ ID NO: 1977977 - RNA, 17 nt, Human
uuuaucuugaaggaaaa

SEQ ID NO: 1977978 - RNA, 21 nt, Human
uuuaucuugaaggaaaaauuc

SEQ ID NO: 1977979 - RNA, 15 nt, Human
uuuaucccuuaagaa

SEQ ID NO: 1977980 - RNA, 16 nt, Human
uuuaucccuuaagaau

SEQ ID NO: 1977981 - RNA, 18 nt, Human
uuuaucccuuaagaauga

SEQ ID NO: 1977982 - RNA, 17 nt, Human
uuuauaccuguuuaaau

SEQ ID NO: 1977983 - RNA, 18 nt, Human
uuuauaccuguuuaaauu

SEQ ID NO: 1977984 - RNA, 15 nt, Human
uuuauacgagaacag

SEQ ID NO: 1977985 - RNA, 16 nt, Human
uuuauaccuguuuaaa

SEQ ID NO: 1977986 - RNA, 12 nt, Human
uuuauacauaaa

SEQ ID NO: 1977987 - RNA, 20 nt, Human
uuuauacauaaacaagacca

SEQ ID NO: 1977988 - RNA, 18 nt, Human
uuuauaaacuuuaccuuu

SEQ ID NO: 1977989 - RNA, 23 nt, Human
uuuauacagaugccauauagugu

SEQ ID NO: 1977990 - RNA, 22 nt, Human
uuuagacccuauugcugcuuga

SEQ ID NO: 1977991 - RNA, 21 nt, Human
uuuagacauguaauuugugua

SEQ ID NO: 1977992 - RNA, 18 nt, Human
uuuaguugcaacuuugua

SEQ ID NO: 1977993 - RNA, 17 nt, Human
uuuaguugcaacuuugu

SEQ ID NO: 1977994 - RNA, 19 nt, Human
uuuagacccuauugcugcu

SEQ ID NO: 1977995 - RNA, 16 nt, Human
uuuacccuauaucuau

SEQ ID NO: 1977996 - RNA, 18 nt, Human
uuuacccuauaucuauaa

SEQ ID NO: 1977997 - RNA, 15 nt, Human
uuuacccuauaucua

SEQ ID NO: 1977998 - RNA, 14 nt, Human
uuuaacagaaaugu

SEQ ID NO: 1977999 - RNA, 15 nt, Human
uuuaacagaaaugua

SEQ ID NO: 1978000 - RNA, 14 nt, Human
uuuaaccucuaaau

SEQ ID NO: 1978001 - RNA, 15 nt, Human
uuuaauaaacacucu

SEQ ID NO: 1978002 - RNA, 14 nt, Human
uuuaauaaacacuc

SEQ ID NO: 1978003 - RNA, 15 nt, Human
uuuaauaauuagaaa

SEQ ID NO: 1978004 - RNA, 13 nt, Human
uuuaauaaaccau

SEQ ID NO: 1978005 - RNA, 22 nt, Human
uuuaauaaacacucuugaaaaa

SEQ ID NO: 1978006 - RNA, 20 nt, Human
uuuacagaggacaguauuug

SEQ ID NO: 1978007 - RNA, 21 nt, Human
uuuacagagaugucucuuaua

SEQ ID NO: 1978008 - RNA, 13 nt, Human
uuuacagagacag

SEQ ID NO: 1978009 - RNA, 16 nt, Human
uuuaauaugaaauuuu

SEQ ID NO: 1978010 - RNA, 15 nt, Human
uuuaauaugaaauuu

SEQ ID NO: 1978011 - RNA, 19 nt, Human
uuuacccacacacagauaa

SEQ ID NO: 1978012 - RNA, 16 nt, Human
uuuacauggcuggagc

SEQ ID NO: 1978013 - RNA, 13 nt, Human
uuuacagcugccu

SEQ ID NO: 1978014 - RNA, 19 nt, Human
uuuacaguguuucuggcuu

SEQ ID NO: 1978015 - RNA, 15 nt, Human
uuuacaguuacuuuu

SEQ ID NO: 1978016 - RNA, 19 nt, Human
uuuacaguuacuuuuccuu

SEQ ID NO: 1978017 - RNA, 21 nt, Human
uuuacaguuacuuuuccuugc

SEQ ID NO: 1978018 - RNA, 15 nt, Human
uuuacaguuauagaa

SEQ ID NO: 1978019 - RNA, 20 nt, Human
uuuaaaagcccuuuccaaag

SEQ ID NO: 1978020 - RNA, 13 nt, Human
uuuaaaauaaacu

SEQ ID NO: 1978021 - RNA, 12 nt, Human
uuuaaaauacug

SEQ ID NO: 1978022 - RNA, 15 nt, Human
uuuaaaauacuguag

SEQ ID NO: 1978023 - RNA, 16 nt, Human
uuuaaaauacuguaga

SEQ ID NO: 1978024 - RNA, 17 nt, Human
uuuaaaauacuguagau

SEQ ID NO: 1978025 - RNA, 18 nt, Human
uuuaaaauacuguagaua

SEQ ID NO: 1978026 - RNA, 16 nt, Human
uuuaaaaucuuauuaa

SEQ ID NO: 1978027 - RNA, 20 nt, Human
uuuaaaaucuuauuaaaguu

SEQ ID NO: 1978028 - RNA, 21 nt, Human
uuuaaaaucuuauuaaaguuu

SEQ ID NO: 1978029 - RNA, 22 nt, Human
uuuaaaaucuuauuaaaguuuc

SEQ ID NO: 1978030 - RNA, 18 nt, Human
uuuaaaagaugcaaugua

SEQ ID NO: 1978031 - RNA, 19 nt, Human
uuuaaaagcccuuuccaaa

SEQ ID NO: 1978032 - RNA, 20 nt, Human
uuuaaaagauaaauauuaua

SEQ ID NO: 1978033 - RNA, 13 nt, Human
uuuaaaagauaca

SEQ ID NO: 1978034 - RNA, 13 nt, Human
uuuaaaacuacuu

SEQ ID NO: 1978035 - RNA, 16 nt, Human
uuuaaaacuacuuagc

SEQ ID NO: 1978036 - RNA, 13 nt, Human
uuuaacagaaaug

SEQ ID NO: 1978037 - RNA, 21 nt, Human
uuuaaacucugaauuuaucuu

SEQ ID NO: 1978038 - RNA, 15 nt, Human
uuuaaacugucgugu

SEQ ID NO: 1978039 - RNA, 16 nt, Human
uuuaaaauugugaugu

SEQ ID NO: 1978040 - RNA, 19 nt, Human
uuuaaaauucucuuccaac

SEQ ID NO: 1978041 - RNA, 13 nt, Human
uuuaaaauguaca

SEQ ID NO: 1978042 - RNA, 20 nt, Human
uuuaaaauguacauguauua

SEQ ID NO: 1978043 - RNA, 21 nt, Human
uuuaaaauguacauguauuaa

SEQ ID NO: 1978044 - RNA, 13 nt, Human
uuuaaaauuucuu

SEQ ID NO: 1978045 - RNA, 19 nt, Human
uuuaaaauuucuuagaaaa

SEQ ID NO: 1978046 - RNA, 14 nt, Human
uuuaaaauuuuaag

SEQ ID NO: 1978047 - RNA, 16 nt, Human
uuuaaaaugagaaauc

SEQ ID NO: 1978048 - RNA, 12 nt, Human
uuuaaaaugucu

SEQ ID NO: 1978049 - RNA, 15 nt, Human
uuguuuagaagaagu

SEQ ID NO: 1978050 - RNA, 18 nt, Human
uuguuuagaagaagugug

SEQ ID NO: 1978051 - RNA, 12 nt, Human
uuguuuaauggu

SEQ ID NO: 1978052 - RNA, 23 nt, Human
uuguuuaaugguaguuuuacagu

SEQ ID NO: 1978053 - RNA, 15 nt, Human
uuguuauuuauugaa

SEQ ID NO: 1978054 - RNA, 20 nt, Human
uuguuauuuauugaaaugau

SEQ ID NO: 1978055 - RNA, 12 nt, Human
uugucuuucugg

SEQ ID NO: 1978056 - RNA, 18 nt, Human
uugucuuguguauuucag

SEQ ID NO: 1978057 - RNA, 15 nt, Human
uugucuuuggacccu

SEQ ID NO: 1978058 - RNA, 15 nt, Human
uugucuuauugacag

SEQ ID NO: 1978059 - RNA, 19 nt, Human
uugucuuccuauuucagaa

SEQ ID NO: 1978060 - RNA, 17 nt, Human
uugucuuaauggaugaa

SEQ ID NO: 1978061 - RNA, 19 nt, Human
uugucuuaauggaugaaau

SEQ ID NO: 1978062 - RNA, 23 nt, Human
uugucuuccuauuucagaaguuu

SEQ ID NO: 1978063 - RNA, 24 nt, Human
uugucuuuggacccugaggcccag

SEQ ID NO: 1978064 - RNA, 20 nt, Human
uugucuuuggacccugaggc

SEQ ID NO: 1978065 - RNA, 14 nt, Human
uugucuuucugggg

SEQ ID NO: 1978066 - RNA, 17 nt, Human
uuguuuaucuagaugua

SEQ ID NO: 1978067 - RNA, 19 nt, Human
uuguuuaucuagauguaaa

SEQ ID NO: 1978068 - RNA, 19 nt, Human
uuguuuagauuuuguguuu

SEQ ID NO: 1978069 - RNA, 20 nt, Human
uuguuuagauuuuguguuua

SEQ ID NO: 1978070 - RNA, 23 nt, Human
uuguuuagucuuuauacugcaaa

SEQ ID NO: 1978071 - RNA, 16 nt, Human
uuguuucuuucucuga

SEQ ID NO: 1978072 - RNA, 19 nt, Human
uuguuucuuucucugagga

SEQ ID NO: 1978073 - RNA, 20 nt, Human
uuguuuggggaugagaaagg

SEQ ID NO: 1978074 - RNA, 22 nt, Human
uuguuuguauguauaauucaaa

SEQ ID NO: 1978075 - RNA, 21 nt, Human
uuguuugguuauagugcaaua

SEQ ID NO: 1978076 - RNA, 13 nt, Human
uuguuuguaugua

SEQ ID NO: 1978077 - RNA, 19 nt, Human
uuguuuguauguauaauuc

SEQ ID NO: 1978078 - RNA, 18 nt, Human
uuguuugguuauagugca

SEQ ID NO: 1978079 - RNA, 12 nt, Human
uuguuuguuuca

SEQ ID NO: 1978080 - RNA, 13 nt, Human
uuguuuguuucaa

SEQ ID NO: 1978081 - RNA, 19 nt, Human
uuguuuguuaauaaagugc

SEQ ID NO: 1978082 - RNA, 18 nt, Human
uuuaaaacaccuucuaua

SEQ ID NO: 1978083 - RNA, 23 nt, Human
uuucauuuugcuuuaauuuuagc

SEQ ID NO: 1978084 - RNA, 15 nt, Human
uuucauuuugcuuua

SEQ ID NO: 1978085 - RNA, 16 nt, Human
uuucauuuugcuuuaa

SEQ ID NO: 1978086 - RNA, 20 nt, Human
uuucauuuugcuuuaauuuu

SEQ ID NO: 1978087 - RNA, 21 nt, Human
uuuccacuaagaacaccugca

SEQ ID NO: 1978088 - RNA, 19 nt, Human
uuuccacuccuccuagcca

SEQ ID NO: 1978089 - RNA, 14 nt, Human
uuuccacucuggau

SEQ ID NO: 1978090 - RNA, 18 nt, Human
uuuccacuccuccuagcc

SEQ ID NO: 1978091 - RNA, 20 nt, Human
uuuccuaaauauauuuuaag

SEQ ID NO: 1978092 - RNA, 19 nt, Human
uuucaguaaaccugucuga

SEQ ID NO: 1978093 - RNA, 16 nt, Human
uuucaguaagaucaag

SEQ ID NO: 1978094 - RNA, 21 nt, Human
uuucauuuuacaguuacuuuu

SEQ ID NO: 1978095 - RNA, 22 nt, Human
uuucagcuaggaacaaaucuuc

SEQ ID NO: 1978096 - RNA, 15 nt, Human
uuucagcuaggaaca

SEQ ID NO: 1978097 - RNA, 19 nt, Human
uuucagcuaggaacaaauc

SEQ ID NO: 1978098 - RNA, 21 nt, Human
uuucagcuaggaacaaaucuu

SEQ ID NO: 1978099 - RNA, 16 nt, Human
uuucaggugcucaaaa

SEQ ID NO: 1978100 - RNA, 19 nt, Human
uuucaggugcucaaaaugc

SEQ ID NO: 1978101 - RNA, 20 nt, Human
uuucaggugcucaaaaugca

SEQ ID NO: 1978102 - RNA, 22 nt, Human
uuucaggugcucaaaaugcaaa

SEQ ID NO: 1978103 - RNA, 23 nt, Human
uuucaaugugauauaaacagcuu

SEQ ID NO: 1978104 - RNA, 22 nt, Human
uuuaugauacuugaaaauuaac

SEQ ID NO: 1978105 - RNA, 17 nt, Human
uuucagccaagaauucu

SEQ ID NO: 1978106 - RNA, 14 nt, Human
uuucagccuaagag

SEQ ID NO: 1978107 - RNA, 16 nt, Human
uuucacagugugauuu

SEQ ID NO: 1978108 - RNA, 22 nt, Human
uuucacaguguguggucaacau

SEQ ID NO: 1978109 - RNA, 20 nt, Human
uuucacagugugauuuugau

SEQ ID NO: 1978110 - RNA, 23 nt, Human
uuuccuggcacugcuuccaguga

SEQ ID NO: 1978111 - RNA, 22 nt, Human
uuuccucuuagucgagccaagu

SEQ ID NO: 1978112 - RNA, 19 nt, Human
uuuccugggacaucuucug

SEQ ID NO: 1978113 - RNA, 19 nt, Human
uuuccuggcacugcuucca

SEQ ID NO: 1978114 - RNA, 19 nt, Human
uuucuaauuggcuuuacua

SEQ ID NO: 1978115 - RNA, 14 nt, Human
uuucuaaaguacug

SEQ ID NO: 1978116 - RNA, 19 nt, Human
uuucuaaaucuccaaaaua

SEQ ID NO: 1978117 - RNA, 22 nt, Human
uuucuaaaguaaaaacaaagaa

SEQ ID NO: 1978118 - RNA, 17 nt, Human
uuucuaaaguaaaaaca

SEQ ID NO: 1978119 - RNA, 12 nt, Human
uuucugaaauuu

SEQ ID NO: 1978120 - RNA, 20 nt, Human
uuucucuuugaaacaugcuu

SEQ ID NO: 1978121 - RNA, 19 nt, Human
uuucucucuauuucccccu

SEQ ID NO: 1978122 - RNA, 15 nt, Human
uuucucuuugaaaca

SEQ ID NO: 1978123 - RNA, 14 nt, Human
uuucugaaauaaca

SEQ ID NO: 1978124 - RNA, 22 nt, Human
uuucuacccagcgagcccuggu

SEQ ID NO: 1978125 - RNA, 15 nt, Human
uuucuacccagcgag

SEQ ID NO: 1978126 - RNA, 18 nt, Human
uuucuacccagcgagccc

SEQ ID NO: 1978127 - RNA, 17 nt, Human
uuucuacucauuuuaau

SEQ ID NO: 1978128 - RNA, 16 nt, Human
uuucuccuuuuguguu

SEQ ID NO: 1978129 - RNA, 19 nt, Human
uuucuccuuuuguguucca

SEQ ID NO: 1978130 - RNA, 13 nt, Human
uuucuacucauuu

SEQ ID NO: 1978131 - RNA, 15 nt, Human
uuucucuaauaauaa

SEQ ID NO: 1978132 - RNA, 17 nt, Human
uuucucuaauaauaaau

SEQ ID NO: 1978133 - RNA, 21 nt, Human
uuucucuaauaauaaauaguu

SEQ ID NO: 1978134 - RNA, 19 nt, Human
uuugaucaugaauaacuga

SEQ ID NO: 1978135 - RNA, 21 nt, Human
uuugcauuucagaaagccuuu

SEQ ID NO: 1978136 - RNA, 10 nt, Human
uuugccagcc

SEQ ID NO: 1978137 - RNA, 17 nt, Human
uuugccagcccauuugg

SEQ ID NO: 1978138 - RNA, 14 nt, Human
uuugauaugugaac

SEQ ID NO: 1978139 - RNA, 15 nt, Human
uuugauaugugaaca

SEQ ID NO: 1978140 - RNA, 17 nt, Human
uuugauaugugaacagu

SEQ ID NO: 1978141 - RNA, 14 nt, Human
uuugauccaagcug

SEQ ID NO: 1978142 - RNA, 15 nt, Human
uuugcauuucagaaa

SEQ ID NO: 1978143 - RNA, 12 nt, Human
uuugaucaugaa

SEQ ID NO: 1978144 - RNA, 13 nt, Human
uuugaucaugaau

SEQ ID NO: 1978145 - RNA, 17 nt, Human
uuugcuuuaauuuuagc

SEQ ID NO: 1978146 - RNA, 19 nt, Human
uuuggacccugaggcccag

SEQ ID NO: 1978147 - RNA, 15 nt, Human
uuuggacccugaggc

SEQ ID NO: 1978148 - RNA, 23 nt, Human
uuugcuuguggcuccacacacac

SEQ ID NO: 1978149 - RNA, 12 nt, Human
uuugcuuuaauu

SEQ ID NO: 1978150 - RNA, 14 nt, Human
uuugcuugaaagaa

SEQ ID NO: 1978151 - RNA, 16 nt, Human
uuugcuugaaagaaaa

SEQ ID NO: 1978152 - RNA, 18 nt, Human
uuuguaaagauuucuguu

SEQ ID NO: 1978153 - RNA, 15 nt, Human
uuuguaaacuuugaa

SEQ ID NO: 1978154 - RNA, 16 nt, Human
uuuguaaacuuugaaa

SEQ ID NO: 1978155 - RNA, 19 nt, Human
uuuguaaacuuugaaauau

SEQ ID NO: 1978156 - RNA, 21 nt, Human
uuuguaaacuuugaaauauau

SEQ ID NO: 1978157 - RNA, 15 nt, Human
uuuguaaagaaaaau

SEQ ID NO: 1978158 - RNA, 16 nt, Human
uuuguaaagaaaaaua

SEQ ID NO: 1978159 - RNA, 17 nt, Human
uuuguaaagaaaaauau

SEQ ID NO: 1978160 - RNA, 18 nt, Human
uuuguaaagaaaaauauu

SEQ ID NO: 1978161 - RNA, 15 nt, Human
uuuguauucucuccu

SEQ ID NO: 1978162 - RNA, 22 nt, Human
uuuguauucaauuaaagaaaua

SEQ ID NO: 1978163 - RNA, 16 nt, Human
uuuguaugcacuuugu

SEQ ID NO: 1978164 - RNA, 14 nt, Human
uuuguauguauaau

SEQ ID NO: 1978165 - RNA, 15 nt, Human
uuuguauguauaauu

SEQ ID NO: 1978166 - RNA, 14 nt, Human
uuugguugaauaaa

SEQ ID NO: 1978167 - RNA, 15 nt, Human
uuugguugaauaaac

SEQ ID NO: 1978168 - RNA, 17 nt, Human
uuugguugaauaaacua

SEQ ID NO: 1978169 - RNA, 15 nt, Human
uuuggagagaaauau

SEQ ID NO: 1978170 - RNA, 14 nt, Human
uuuggagagaaaua

SEQ ID NO: 1978171 - RNA, 19 nt, Human
uuuggagagaaauauuuua

SEQ ID NO: 1978172 - RNA, 23 nt, Human
uuugauaacagggauugauuuua

SEQ ID NO: 1978173 - RNA, 15 nt, Human
uuugauaagaaaacc

SEQ ID NO: 1978174 - RNA, 13 nt, Human
uuugauaaauagu

SEQ ID NO: 1978175 - RNA, 14 nt, Human
uuugauaaauagug

SEQ ID NO: 1978176 - RNA, 14 nt, Human
uuugagaucuaaaa

SEQ ID NO: 1978177 - RNA, 16 nt, Human
uuugagaucuaaaaau

SEQ ID NO: 1978178 - RNA, 17 nt, Human
uuugagaucuaaaaaua

SEQ ID NO: 1978179 - RNA, 18 nt, Human
uuugagaucuaaaaauaa

SEQ ID NO: 1978180 - RNA, 21 nt, Human
uuugagaucuaaaaauaacug

SEQ ID NO: 1978181 - RNA, 16 nt, Human
uuugaggauuaguuua

SEQ ID NO: 1978182 - RNA, 23 nt, Human
uuugaggauuaguuuagaacagg

SEQ ID NO: 1978183 - RNA, 20 nt, Human
uuugaggcucaccagaauua

SEQ ID NO: 1978184 - RNA, 17 nt, Human
uuugaggauuaguuuag

SEQ ID NO: 1978185 - RNA, 18 nt, Human
uuugaggauuaguuuaga

SEQ ID NO: 1978186 - RNA, 19 nt, Human
uuugaggauuaguuuagaa

SEQ ID NO: 1978187 - RNA, 22 nt, Human
uuugaggauuaguuuagaacag

SEQ ID NO: 1978188 - RNA, 17 nt, Human
uuugagaucagccuggg

SEQ ID NO: 1978189 - RNA, 16 nt, Human
uuugagaucagccugg

SEQ ID NO: 1978190 - RNA, 21 nt, Human
uuugaagguagaauguuuuca

SEQ ID NO: 1978191 - RNA, 18 nt, Human
uuucuuaaccagaucauu

SEQ ID NO: 1978192 - RNA, 23 nt, Human
uuucugaucugaugcaagcaaga

SEQ ID NO: 1978193 - RNA, 13 nt, Human
uuucuugcucccu

SEQ ID NO: 1978194 - RNA, 18 nt, Human
uuucuugcucccugacug

SEQ ID NO: 1978195 - RNA, 14 nt, Human
uuucuuaaccaucu

SEQ ID NO: 1978196 - RNA, 15 nt, Human
uuucuuaaccaucuu

SEQ ID NO: 1978197 - RNA, 19 nt, Human
uuucuuguguguuuauugu

SEQ ID NO: 1978198 - RNA, 18 nt, Human
uuugaagcacagugauca

SEQ ID NO: 1978199 - RNA, 21 nt, Human
uuugaaauuguauuacaaauc

SEQ ID NO: 1978200 - RNA, 19 nt, Human
uucaaaggagcaagaacuu

SEQ ID NO: 1978201 - RNA, 17 nt, Human
uucaaagucaugauguu

SEQ ID NO: 1978202 - RNA, 18 nt, Human
uucaaagucaugauguuu

SEQ ID NO: 1978203 - RNA, 19 nt, Human
uucaaagucaugauguuuu

SEQ ID NO: 1978204 - RNA, 21 nt, Human
uucaaagucaugauguuuuua

SEQ ID NO: 1978205 - RNA, 20 nt, Human
uuauuuuauguugcauagaa

SEQ ID NO: 1978206 - RNA, 17 nt, Human
uucaacugaccagccuc

SEQ ID NO: 1978207 - RNA, 20 nt, Human
uucaacgcagcccugcuuug

SEQ ID NO: 1978208 - RNA, 16 nt, Human
uucaacgcagcccugc

SEQ ID NO: 1978209 - RNA, 19 nt, Human
uucaacgcagcccugcuuu

SEQ ID NO: 1978210 - RNA, 19 nt, Human
uuauuggugaguuaggaac

SEQ ID NO: 1978211 - RNA, 20 nt, Human
uuauugccaaaacccagcug

SEQ ID NO: 1978212 - RNA, 21 nt, Human
uuauugccaaaacccagcugc

SEQ ID NO: 1978213 - RNA, 22 nt, Human
uuauugccaaaacccagcugca

SEQ ID NO: 1978214 - RNA, 18 nt, Human
uuauugucaaagugguga

SEQ ID NO: 1978215 - RNA, 17 nt, Human
uuauugucaaaguggug

SEQ ID NO: 1978216 - RNA, 16 nt, Human
uucacucuaagauguu

SEQ ID NO: 1978217 - RNA, 17 nt, Human
uucacucuaagauguua

SEQ ID NO: 1978218 - RNA, 18 nt, Human
uucacucuaagauguuau

SEQ ID NO: 1978219 - RNA, 13 nt, Human
uucacucuccuug

SEQ ID NO: 1978220 - RNA, 16 nt, Human
uucagacauagaauua

SEQ ID NO: 1978221 - RNA, 21 nt, Human
uucagacagcugccugggauc

SEQ ID NO: 1978222 - RNA, 20 nt, Human
uucagacauagaauuaacac

SEQ ID NO: 1978223 - RNA, 19 nt, Human
uucagagacuccugcaggc

SEQ ID NO: 1978224 - RNA, 22 nt, Human
uucagaguugaugguuguacau

SEQ ID NO: 1978225 - RNA, 21 nt, Human
uucagaguugaugguuguaca

SEQ ID NO: 1978226 - RNA, 22 nt, Human
uucacucuaagauguuauauuu

SEQ ID NO: 1978227 - RNA, 20 nt, Human
uucaauaggaaaaacugauu

SEQ ID NO: 1978228 - RNA, 18 nt, Human
uucaauaggaaaaacuga

SEQ ID NO: 1978229 - RNA, 15 nt, Human
uucaauaggaaaaac

SEQ ID NO: 1978230 - RNA, 13 nt, Human
uucaauaggaaaa

SEQ ID NO: 1978231 - RNA, 19 nt, Human
uucacgucauaggaaguua

SEQ ID NO: 1978232 - RNA, 18 nt, Human
uucacggaagagccuugc

SEQ ID NO: 1978233 - RNA, 15 nt, Human
uucacgugguccuaa

SEQ ID NO: 1978234 - RNA, 13 nt, Human
uuaguugcaacuu

SEQ ID NO: 1978235 - RNA, 14 nt, Human
uuaguuccuugagu

SEQ ID NO: 1978236 - RNA, 16 nt, Human
uuaguuccucauuagc

SEQ ID NO: 1978237 - RNA, 16 nt, Human
uuaucuagauacugua

SEQ ID NO: 1978238 - RNA, 11 nt, Human
uuaguuuagaa

SEQ ID NO: 1978239 - RNA, 16 nt, Human
uuaguuuagaacaggu

SEQ ID NO: 1978240 - RNA, 20 nt, Human
uuaguugcaacuuuguauaa

SEQ ID NO: 1978241 - RNA, 20 nt, Human
uuaucuugaauaauguaaga

SEQ ID NO: 1978242 - RNA, 14 nt, Human
uuaucuagcugcau

SEQ ID NO: 1978243 - RNA, 17 nt, Human
uuaucuagauacuguau

SEQ ID NO: 1978244 - RNA, 18 nt, Human
uuaucuagauguaaauuu

SEQ ID NO: 1978245 - RNA, 19 nt, Human
uuaucuagauguaaauuuu

SEQ ID NO: 1978246 - RNA, 14 nt, Human
uuaucuagauguaa

SEQ ID NO: 1978247 - RNA, 15 nt, Human
uuaucuagauguaaa

SEQ ID NO: 1978248 - RNA, 16 nt, Human
uuaucuagauguaaau

SEQ ID NO: 1978249 - RNA, 17 nt, Human
uuaucuagauguaaauu

SEQ ID NO: 1978250 - RNA, 19 nt, Human
uuaucuuggccuuacugua

SEQ ID NO: 1978251 - RNA, 11 nt, Human
uuaucuuugau

SEQ ID NO: 1978252 - RNA, 16 nt, Human
uuaugcaugaaguaau

SEQ ID NO: 1978253 - RNA, 22 nt, Human
uuaugcaugaaguaauaugcac

SEQ ID NO: 1978254 - RNA, 10 nt, Human
uuaugcuaag

SEQ ID NO: 1978255 - RNA, 15 nt, Human
uuaugcuaagaauuu

SEQ ID NO: 1978256 - RNA, 16 nt, Human
uuaugcuaagaauuuu

SEQ ID NO: 1978257 - RNA, 20 nt, Human
uuaugcuaagaauuuuuuau

SEQ ID NO: 1978258 - RNA, 22 nt, Human
uuaugcaaggucuugcauuuaa

SEQ ID NO: 1978259 - RNA, 16 nt, Human
uuauggaacacucuga

SEQ ID NO: 1978260 - RNA, 18 nt, Human
uuaugcuguaaaagcaag

SEQ ID NO: 1978261 - RNA, 14 nt, Human
uuaugcuuccagaa

SEQ ID NO: 1978262 - RNA, 15 nt, Human
uuaugcuuccagaaa

SEQ ID NO: 1978263 - RNA, 16 nt, Human
uuaugcuuccagaaac

SEQ ID NO: 1978264 - RNA, 14 nt, Human
uuauugacucuuga

SEQ ID NO: 1978265 - RNA, 18 nt, Human
uuauugacaguugugcag

SEQ ID NO: 1978266 - RNA, 11 nt, Human
uuauucugcuc

SEQ ID NO: 1978267 - RNA, 19 nt, Human
uuauucugggaauguauag

SEQ ID NO: 1978268 - RNA, 20 nt, Human
uuauucugggaauguauagu

SEQ ID NO: 1978269 - RNA, 17 nt, Human
uuauucuuugcacuuuu

SEQ ID NO: 1978270 - RNA, 22 nt, Human
uuauucuuuuuuucucuagagu

SEQ ID NO: 1978271 - RNA, 15 nt, Human
uuauucuuucuccuu

SEQ ID NO: 1978272 - RNA, 14 nt, Human
uuauucuuugcacu

SEQ ID NO: 1978273 - RNA, 15 nt, Human
uuauucuuugcacuu

SEQ ID NO: 1978274 - RNA, 11 nt, Human
uuauucuugau

SEQ ID NO: 1978275 - RNA, 13 nt, Human
uuauucuugauca

SEQ ID NO: 1978276 - RNA, 14 nt, Human
uuauucuugaugaa

SEQ ID NO: 1978277 - RNA, 15 nt, Human
uuauucuugaugaaa

SEQ ID NO: 1978278 - RNA, 23 nt, Human
uuauugaggaaaaauaugugaag

SEQ ID NO: 1978279 - RNA, 13 nt, Human
uuauugaugaaaa

SEQ ID NO: 1978280 - RNA, 15 nt, Human
uuauugauguuuuca

SEQ ID NO: 1978281 - RNA, 14 nt, Human
uuauugaugaaaau

SEQ ID NO: 1978282 - RNA, 15 nt, Human
uuauugcccacgcug

SEQ ID NO: 1978283 - RNA, 21 nt, Human
uuauugaggaaaaauauguga

SEQ ID NO: 1978284 - RNA, 22 nt, Human
uuauugaggaaaaauaugugaa

SEQ ID NO: 1978285 - RNA, 16 nt, Human
uuauugacucuugagu

SEQ ID NO: 1978286 - RNA, 17 nt, Human
uuauugacucuugaguu

SEQ ID NO: 1978287 - RNA, 20 nt, Human
uuauugacucuugaguuguu

SEQ ID NO: 1978288 - RNA, 21 nt, Human
uuauugacucuugaguuguuu

SEQ ID NO: 1978289 - RNA, 18 nt, Human
uuauugagagagaugugu

SEQ ID NO: 1978290 - RNA, 19 nt, Human
uuauugagagagaugugua

SEQ ID NO: 1978291 - RNA, 20 nt, Human
uuauugagagagauguguaa

SEQ ID NO: 1978292 - RNA, 22 nt, Human
uuauugagagagauguguaauu

SEQ ID NO: 1978293 - RNA, 19 nt, Human
uuauugaggaaaaauaugu

SEQ ID NO: 1978294 - RNA, 14 nt, Human
uuauuaaucacugu

SEQ ID NO: 1978295 - RNA, 16 nt, Human
uuauuaaucacugugu

SEQ ID NO: 1978296 - RNA, 18 nt, Human
uuauuaaucacuguguau

SEQ ID NO: 1978297 - RNA, 14 nt, Human
uuauuaaaguuuca

SEQ ID NO: 1978298 - RNA, 15 nt, Human
uuauuaaaguuucaa

SEQ ID NO: 1978299 - RNA, 17 nt, Human
uuauuaaaguuucaaaa

SEQ ID NO: 1978300 - RNA, 19 nt, Human
uuauuaaaguuucaaaaau

SEQ ID NO: 1978301 - RNA, 12 nt, Human
uuauuaaaauug

SEQ ID NO: 1978302 - RNA, 13 nt, Human
uuauuaaaauugu

SEQ ID NO: 1978303 - RNA, 13 nt, Human
uuauuaaugcuuu

SEQ ID NO: 1978304 - RNA, 14 nt, Human
uuauuaaugcuuug

SEQ ID NO: 1978305 - RNA, 18 nt, Human
uuauuaauuuuuaaggau

SEQ ID NO: 1978306 - RNA, 12 nt, Human
uuauucuaauua

SEQ ID NO: 1978307 - RNA, 20 nt, Human
uuauuccugcccugcuguuu

SEQ ID NO: 1978308 - RNA, 13 nt, Human
uucaggaagcuca

SEQ ID NO: 1978309 - RNA, 11 nt, Human
uucaggaagcu

SEQ ID NO: 1978310 - RNA, 19 nt, Human
uucaggaaagcagcaguuu

SEQ ID NO: 1978311 - RNA, 15 nt, Human
uucaugaaagauuca

SEQ ID NO: 1978312 - RNA, 17 nt, Human
uucaugaaagauucaau

SEQ ID NO: 1978313 - RNA, 21 nt, Human
uucaucuugaauuguaaggaa

SEQ ID NO: 1978314 - RNA, 17 nt, Human
uucaugcaaacuuuauu

SEQ ID NO: 1978315 - RNA, 14 nt, Human
uucaugcaaguauu

SEQ ID NO: 1978316 - RNA, 15 nt, Human
uucauuuccuguguc

SEQ ID NO: 1978317 - RNA, 16 nt, Human
uucauuuccugugucu

SEQ ID NO: 1978318 - RNA, 12 nt, Human
uucauuugcuuu

SEQ ID NO: 1978319 - RNA, 13 nt, Human
uucauuugcuauc

SEQ ID NO: 1978320 - RNA, 21 nt, Human
uuccacuccuccuagccaccc

SEQ ID NO: 1978321 - RNA, 20 nt, Human
uuccagagacaaauauuucu

SEQ ID NO: 1978322 - RNA, 19 nt, Human
uuccacucuggauucagcc

SEQ ID NO: 1978323 - RNA, 21 nt, Human
uuccacucuggauucagccuu

SEQ ID NO: 1978324 - RNA, 23 nt, Human
uuccacucuggauucagccuucu

SEQ ID NO: 1978325 - RNA, 16 nt, Human
uuccacuccuccuagc

SEQ ID NO: 1978326 - RNA, 18 nt, Human
uuccacuccuccuagcca

SEQ ID NO: 1978327 - RNA, 17 nt, Human
uuccagagaguggcucc

SEQ ID NO: 1978328 - RNA, 18 nt, Human
uuccagagaguggcuccu

SEQ ID NO: 1978329 - RNA, 19 nt, Human
uuccagagaguggcuccuc

SEQ ID NO: 1978330 - RNA, 20 nt, Human
uuccagagaguggcuccucc

SEQ ID NO: 1978331 - RNA, 21 nt, Human
uuccagagaguggcuccuccc

SEQ ID NO: 1978332 - RNA, 10 nt, Human
uuccagagca

SEQ ID NO: 1978333 - RNA, 20 nt, Human
uuccaaauaauauguuuccu

SEQ ID NO: 1978334 - RNA, 14 nt, Human
uuccaaacaugguu

SEQ ID NO: 1978335 - RNA, 16 nt, Human
uucauuugcuuuggaa

SEQ ID NO: 1978336 - RNA, 22 nt, Human
uuccaaacaugagguucucucu

SEQ ID NO: 1978337 - RNA, 15 nt, Human
uuccaaauucugcuu

SEQ ID NO: 1978338 - RNA, 23 nt, Human
uuccaaauaauauguuuccuucc

SEQ ID NO: 1978339 - RNA, 23 nt, Human
uuccacuaagaacaccugcauuc

SEQ ID NO: 1978340 - RNA, 20 nt, Human
uuccccaggaggccagccuu

SEQ ID NO: 1978341 - RNA, 19 nt, Human
uuccccaggaggccagccu

SEQ ID NO: 1978342 - RNA, 18 nt, Human
uuccccaggaggccagcc

SEQ ID NO: 1978343 - RNA, 17 nt, Human
uuccccaggaggccagc

SEQ ID NO: 1978344 - RNA, 21 nt, Human
uuccccaggaggccagccuug

SEQ ID NO: 1978345 - RNA, 14 nt, Human
uuccccauacaaau

SEQ ID NO: 1978346 - RNA, 18 nt, Human
uuccccauacaaauaagc

SEQ ID NO: 1978347 - RNA, 11 nt, Human
uuccccauggg

SEQ ID NO: 1978348 - RNA, 19 nt, Human
uuccccaugucucgacuca

SEQ ID NO: 1978349 - RNA, 22 nt, Human
uuccccauuauaucacacuuau

SEQ ID NO: 1978350 - RNA, 20 nt, Human
uucccucccuuccucuuucc

SEQ ID NO: 1978351 - RNA, 17 nt, Human
uucccucccuuccucuu

SEQ ID NO: 1978352 - RNA, 11 nt, Human
uucccucccuu

SEQ ID NO: 1978353 - RNA, 13 nt, Human
uucccaucuccuu

SEQ ID NO: 1978354 - RNA, 21 nt, Human
uucccaucuccuuucucuggu

SEQ ID NO: 1978355 - RNA, 14 nt, Human
uucccauucuugca

SEQ ID NO: 1978356 - RNA, 11 nt, Human
uucccauucca

SEQ ID NO: 1978357 - RNA, 16 nt, Human
uuccccaggaggccag

SEQ ID NO: 1978358 - RNA, 15 nt, Human
uuccccaggaggcca

SEQ ID NO: 1978359 - RNA, 16 nt, Human
uucccauuugcuccuu

SEQ ID NO: 1978360 - RNA, 13 nt, Human
uucccauuuagaa

SEQ ID NO: 1978361 - RNA, 14 nt, Human
uucccauuuagaau

SEQ ID NO: 1978362 - RNA, 15 nt, Human
uucccauuuagaaug

SEQ ID NO: 1978363 - RNA, 22 nt, Human
uucccauuuagaauggugauuu

SEQ ID NO: 1978364 - RNA, 20 nt, Human
uuccagcaauucuccugccu

SEQ ID NO: 1978365 - RNA, 21 nt, Human
uuccagcaauucuccugccuc

SEQ ID NO: 1978366 - RNA, 22 nt, Human
uuccagcaauucuccugccuca

SEQ ID NO: 1978367 - RNA, 23 nt, Human
uuccagcaauucuccugccucag

SEQ ID NO: 1978368 - RNA, 21 nt, Human
uuccagaugcugguuuuuccc

SEQ ID NO: 1978369 - RNA, 15 nt, Human
uuccugaugcuucuu

SEQ ID NO: 1978370 - RNA, 19 nt, Human
uuccugaugcuucuucaga

SEQ ID NO: 1978371 - RNA, 18 nt, Human
uuccugaugcuucuucag

SEQ ID NO: 1978372 - RNA, 15 nt, Human
uuccugcauuuguga

SEQ ID NO: 1978373 - RNA, 16 nt, Human
uuccugcauuugugaa

SEQ ID NO: 1978374 - RNA, 18 nt, Human
uuccugcauuugugaaau

SEQ ID NO: 1978375 - RNA, 17 nt, Human
uuccugccaggcauggu

SEQ ID NO: 1978376 - RNA, 14 nt, Human
uuccuggcacugcu

SEQ ID NO: 1978377 - RNA, 18 nt, Human
uuccuggacaggccaggu

SEQ ID NO: 1978378 - RNA, 20 nt, Human
uuccuugaguugauucagcu

SEQ ID NO: 1978379 - RNA, 15 nt, Human
uuccuucuuugcccu

SEQ ID NO: 1978380 - RNA, 20 nt, Human
uuccuucuuugcccuuuacu

SEQ ID NO: 1978381 - RNA, 17 nt, Human
uucuaaagcugccagcc

SEQ ID NO: 1978382 - RNA, 13 nt, Human
uucuaaagcugcc

SEQ ID NO: 1978383 - RNA, 18 nt, Human
uucuaaaacuguacuuug

SEQ ID NO: 1978384 - RNA, 19 nt, Human
uucuaaaacuguacuuuga

SEQ ID NO: 1978385 - RNA, 20 nt, Human
uucuaaaacuguacuuugau

SEQ ID NO: 1978386 - RNA, 14 nt, Human
uucgggcugugccc

SEQ ID NO: 1978387 - RNA, 14 nt, Human
uucguucucugcca

SEQ ID NO: 1978388 - RNA, 17 nt, Human
uucguuuguuuguuuca

SEQ ID NO: 1978389 - RNA, 12 nt, Human
uucuaaaacugu

SEQ ID NO: 1978390 - RNA, 13 nt, Human
uucuaaaacugua

SEQ ID NO: 1978391 - RNA, 15 nt, Human
uucuaaaacuguacu

SEQ ID NO: 1978392 - RNA, 16 nt, Human
uucuaaaacuguacuu

SEQ ID NO: 1978393 - RNA, 20 nt, Human
uuccuugaggggagccagga

SEQ ID NO: 1978394 - RNA, 22 nt, Human
uuccuugaggggagccaggagg

SEQ ID NO: 1978395 - RNA, 23 nt, Human
uuccuugaggggagccaggaggg

SEQ ID NO: 1978396 - RNA, 20 nt, Human
uucgggaggucgaggcagga

SEQ ID NO: 1978397 - RNA, 12 nt, Human
uucgggcugugc

SEQ ID NO: 1978398 - RNA, 13 nt, Human
uucgggcugugcc

SEQ ID NO: 1978399 - RNA, 13 nt, Human
uucccuuccucca

SEQ ID NO: 1978400 - RNA, 14 nt, Human
uucccuuccuccau

SEQ ID NO: 1978401 - RNA, 17 nt, Human
uucccuuccuccauccu

SEQ ID NO: 1978402 - RNA, 16 nt, Human
uucccugaaggaacca

SEQ ID NO: 1978403 - RNA, 12 nt, Human
uucccugaggug

SEQ ID NO: 1978404 - RNA, 19 nt, Human
uucccccuccaaucccacc

SEQ ID NO: 1978405 - RNA, 17 nt, Human
uucccucgucuuuccca

SEQ ID NO: 1978406 - RNA, 18 nt, Human
uucccucggaguucuucu

SEQ ID NO: 1978407 - RNA, 19 nt, Human
uucccucggaguucuucuu

SEQ ID NO: 1978408 - RNA, 13 nt, Human
uuccucauuagca

SEQ ID NO: 1978409 - RNA, 14 nt, Human
uuccuccauccucc

SEQ ID NO: 1978410 - RNA, 18 nt, Human
uuccuccauccuccuccu

SEQ ID NO: 1978411 - RNA, 22 nt, Human
uuccuccauccuccuccuuccu

SEQ ID NO: 1978412 - RNA, 24 nt, Human
uuccuccauccuccuccuuccuag

SEQ ID NO: 1978413 - RNA, 16 nt, Human
uuccuauuucagaagu

SEQ ID NO: 1978414 - RNA, 23 nt, Human
uuccuauuucagaaguuuaaaua

SEQ ID NO: 1978415 - RNA, 13 nt, Human
uuccuauuucaga

SEQ ID NO: 1978416 - RNA, 15 nt, Human
uuccuauuucagaag

SEQ ID NO: 1978417 - RNA, 20 nt, Human
uucccuuugacgccauccca

SEQ ID NO: 1978418 - RNA, 22 nt, Human
uucccuuugacgccaucccagc

SEQ ID NO: 1978419 - RNA, 21 nt, Human
uucccuuugacgccaucccag

SEQ ID NO: 1978420 - RNA, 18 nt, Human
uucccuuugccacacugu

SEQ ID NO: 1978421 - RNA, 18 nt, Human
uuccuauaccauuuccgu

SEQ ID NO: 1978422 - RNA, 17 nt, Human
uuccuaucaaaaagaua

SEQ ID NO: 1978423 - RNA, 18 nt, Human
uuccuaucaaaaagauau

SEQ ID NO: 1978424 - RNA, 13 nt, Human
uuacuaaguuuuu

SEQ ID NO: 1978425 - RNA, 14 nt, Human
uuacuaaguuuuua

SEQ ID NO: 1978426 - RNA, 16 nt, Human
uuacuaauagacaauu

SEQ ID NO: 1978427 - RNA, 11 nt, Human
uuacuaacuuc

SEQ ID NO: 1978428 - RNA, 15 nt, Human
uuacuaacuucuaaa

SEQ ID NO: 1978429 - RNA, 17 nt, Human
uuacuaacuucuaaaac

SEQ ID NO: 1978430 - RNA, 19 nt, Human
uuacuaacuucuaaaacug

SEQ ID NO: 1978431 - RNA, 20 nt, Human
uuacuaacuucuaaaacugu

SEQ ID NO: 1978432 - RNA, 21 nt, Human
uuacuaacuucuaaaacugua

SEQ ID NO: 1978433 - RNA, 21 nt, Human
uuacuaggugcccagaaugag

SEQ ID NO: 1978434 - RNA, 17 nt, Human
uuacuaguuucccuugc

SEQ ID NO: 1978435 - RNA, 21 nt, Human
uuacuaucaugucaaacguga

SEQ ID NO: 1978436 - RNA, 19 nt, Human
uuacuaucaugucaaacgu

SEQ ID NO: 1978437 - RNA, 17 nt, Human
uuacuaccuccucuccu

SEQ ID NO: 1978438 - RNA, 17 nt, Human
uuacuacaauauguaca

SEQ ID NO: 1978439 - RNA, 19 nt, Human
uuacuacaauauguacauu

SEQ ID NO: 1978440 - RNA, 14 nt, Human
uuaaugauuccuau

SEQ ID NO: 1978441 - RNA, 11 nt, Human
uuacuucugcu

SEQ ID NO: 1978442 - RNA, 23 nt, Human
uuacuucuuauacauuugauaaa

SEQ ID NO: 1978443 - RNA, 12 nt, Human
uuacuucugcua

SEQ ID NO: 1978444 - RNA, 18 nt, Human
uuacuuagguguggggga

SEQ ID NO: 1978445 - RNA, 19 nt, Human
uuacugucuuuuuucuaaa

SEQ ID NO: 1978446 - RNA, 19 nt, Human
uuacuauggcccuggccua

SEQ ID NO: 1978447 - RNA, 17 nt, Human
uuacugucuuuuuucua

SEQ ID NO: 1978448 - RNA, 21 nt, Human
uuacuuaaaccgccaaggcug

SEQ ID NO: 1978449 - RNA, 23 nt, Human
uuacuguucauuugauuuguaca

SEQ ID NO: 1978450 - RNA, 24 nt, Human
uuagagacagagcgacagagcagu

SEQ ID NO: 1978451 - RNA, 21 nt, Human
uuagacuuuuccaauauguga

SEQ ID NO: 1978452 - RNA, 22 nt, Human
uuagacuuuuccaauaugugau

SEQ ID NO: 1978453 - RNA, 12 nt, Human
uuagacuugaaa

SEQ ID NO: 1978454 - RNA, 13 nt, Human
uuagacuugaaaa

SEQ ID NO: 1978455 - RNA, 19 nt, Human
uuagacuugaaaagagaca

SEQ ID NO: 1978456 - RNA, 20 nt, Human
uuagacuugaaaagagacag

SEQ ID NO: 1978457 - RNA, 14 nt, Human
uuagacuucuguuu

SEQ ID NO: 1978458 - RNA, 15 nt, Human
uuagacuucuguuuu

SEQ ID NO: 1978459 - RNA, 17 nt, Human
uuagacuucuguuuuca

SEQ ID NO: 1978460 - RNA, 18 nt, Human
uuagacuucuguuuucaa

SEQ ID NO: 1978461 - RNA, 19 nt, Human
uuagacuucuguuuucaau

SEQ ID NO: 1978462 - RNA, 14 nt, Human
uuagacugccagcu

SEQ ID NO: 1978463 - RNA, 16 nt, Human
uuagacugccagcucu

SEQ ID NO: 1978464 - RNA, 17 nt, Human
uuagacugccagcucuu

SEQ ID NO: 1978465 - RNA, 13 nt, Human
uuagacugccagc

SEQ ID NO: 1978466 - RNA, 22 nt, Human
uuagaaaaggugauaaaaucau

SEQ ID NO: 1978467 - RNA, 14 nt, Human
uuagacagucccug

SEQ ID NO: 1978468 - RNA, 18 nt, Human
uuagacagucccugccaa

SEQ ID NO: 1978469 - RNA, 17 nt, Human
uuagacagucccugcca

SEQ ID NO: 1978470 - RNA, 16 nt, Human
uuagacagucccugcc

SEQ ID NO: 1978471 - RNA, 17 nt, Human
uuagacauguaauuugu

SEQ ID NO: 1978472 - RNA, 19 nt, Human
uuacuuuuccuugcauaca

SEQ ID NO: 1978473 - RNA, 23 nt, Human
uuacuuuguaaauucugauuucu

SEQ ID NO: 1978474 - RNA, 14 nt, Human
uuacuuuguguuca

SEQ ID NO: 1978475 - RNA, 15 nt, Human
uuagacagucccugc

SEQ ID NO: 1978476 - RNA, 13 nt, Human
uuagaaaacuuug

SEQ ID NO: 1978477 - RNA, 20 nt, Human
uuacuuuuccuugcauacaa

SEQ ID NO: 1978478 - RNA, 14 nt, Human
uuagaaaacuuugu

SEQ ID NO: 1978479 - RNA, 15 nt, Human
uuagaaaacuuuguu

SEQ ID NO: 1978480 - RNA, 16 nt, Human
uuagaaaacuuuguua

SEQ ID NO: 1978481 - RNA, 12 nt, Human
uuagaaaaggca

SEQ ID NO: 1978482 - RNA, 20 nt, Human
uuagaaaaggugauaaaauc

SEQ ID NO: 1978483 - RNA, 21 nt, Human
uuagaaaaggugauaaaauca

SEQ ID NO: 1978484 - RNA, 17 nt, Human
uuacuuuaaaaggagcc

SEQ ID NO: 1978485 - RNA, 18 nt, Human
uuacuuuaaaaggagcca

SEQ ID NO: 1978486 - RNA, 15 nt, Human
uuacuugauaaggga

SEQ ID NO: 1978487 - RNA, 17 nt, Human
uuacuugauaagggacu

SEQ ID NO: 1978488 - RNA, 21 nt, Human
uuacuugucuuucugggguuu

SEQ ID NO: 1978489 - RNA, 13 nt, Human
uuacuuuagaaaa

SEQ ID NO: 1978490 - RNA, 17 nt, Human
uuacuuguugccuauaa

SEQ ID NO: 1978491 - RNA, 23 nt, Human
uuacuuguugccuauaagccaaa

SEQ ID NO: 1978492 - RNA, 22 nt, Human
uuacuuuaacuuaguuuugcau

SEQ ID NO: 1978493 - RNA, 11 nt, Human
uuacuuuguaa

SEQ ID NO: 1978494 - RNA, 13 nt, Human
uuacuuuguaaau

SEQ ID NO: 1978495 - RNA, 19 nt, Human
uuacuuuccaauucuccuu

SEQ ID NO: 1978496 - RNA, 14 nt, Human
uuacuuuguaaauu

SEQ ID NO: 1978497 - RNA, 17 nt, Human
uuacuuuguaaauucug

SEQ ID NO: 1978498 - RNA, 18 nt, Human
uuacuuuguaaauucuga

SEQ ID NO: 1978499 - RNA, 19 nt, Human
uuacuuuguaaauucugau

SEQ ID NO: 1978500 - RNA, 20 nt, Human
uuacuuuguaaauucugauu

SEQ ID NO: 1978501 - RNA, 22 nt, Human
uuacuuuguaaauucugauuuc

SEQ ID NO: 1978502 - RNA, 14 nt, Human
uuagaguugauacu

SEQ ID NO: 1978503 - RNA, 22 nt, Human
uuagagcuuuuuuuuuuuaauu

SEQ ID NO: 1978504 - RNA, 16 nt, Human
uuagaucauaguuuua

SEQ ID NO: 1978505 - RNA, 22 nt, Human
uuagauaauacaccacuacauu

SEQ ID NO: 1978506 - RNA, 15 nt, Human
uuagauaaauauuga

SEQ ID NO: 1978507 - RNA, 15 nt, Human
uuagaucauaguuuu

SEQ ID NO: 1978508 - RNA, 17 nt, Human
uuagaucauaguuuuau

SEQ ID NO: 1978509 - RNA, 18 nt, Human
uuagcuacguuuacucac

SEQ ID NO: 1978510 - RNA, 13 nt, Human
uuagcuguaacag

SEQ ID NO: 1978511 - RNA, 18 nt, Human
uuagcugccugaaaauca

SEQ ID NO: 1978512 - RNA, 12 nt, Human
uuagcugggaga

SEQ ID NO: 1978513 - RNA, 20 nt, Human
uuagcuuucugagcaagagg

SEQ ID NO: 1978514 - RNA, 17 nt, Human
uuagcuguaacaguucu

SEQ ID NO: 1978515 - RNA, 14 nt, Human
uuagcuguguuauu

SEQ ID NO: 1978516 - RNA, 18 nt, Human
uuagcuguguuauuauag

SEQ ID NO: 1978517 - RNA, 14 nt, Human
uuaguguucauaaa

SEQ ID NO: 1978518 - RNA, 20 nt, Human
uuagucucaguucucuuaau

SEQ ID NO: 1978519 - RNA, 12 nt, Human
uuagugugauug

SEQ ID NO: 1978520 - RNA, 14 nt, Human
uuaguguuauauga

SEQ ID NO: 1978521 - RNA, 15 nt, Human
uuaguguuauaugaa

SEQ ID NO: 1978522 - RNA, 15 nt, Human
uuaguuccacugaga

SEQ ID NO: 1978523 - RNA, 16 nt, Human
uuaguuccacugagac

SEQ ID NO: 1978524 - RNA, 22 nt, Human
uuaguuacuaccuccucuccug

SEQ ID NO: 1978525 - RNA, 18 nt, Human
uuaguaugaggcauuugu

SEQ ID NO: 1978526 - RNA, 16 nt, Human
uuaguaugaggcauuu

SEQ ID NO: 1978527 - RNA, 22 nt, Human
uuaguaggauaugccugcucuu

SEQ ID NO: 1978528 - RNA, 17 nt, Human
uuaguagagacaggguu

SEQ ID NO: 1978529 - RNA, 16 nt, Human
uuaguaggauaugccu

SEQ ID NO: 1978530 - RNA, 19 nt, Human
uuaguaggauaugccugcu

SEQ ID NO: 1978531 - RNA, 18 nt, Human
uuaggcaguauaaagaau

SEQ ID NO: 1978532 - RNA, 19 nt, Human
uuaggccaaagacaaauag

SEQ ID NO: 1978533 - RNA, 20 nt, Human
uuaggcaguauaaagaauag

SEQ ID NO: 1978534 - RNA, 18 nt, Human
uuaggcaugguuuugggc

SEQ ID NO: 1978535 - RNA, 15 nt, Human
uuaggccaaagacaa

SEQ ID NO: 1978536 - RNA, 18 nt, Human
uuaggccaaagacaaaua

SEQ ID NO: 1978537 - RNA, 20 nt, Human
uuaggagaagucuucuauuu

SEQ ID NO: 1978538 - RNA, 12 nt, Human
uuaggacaaauc

SEQ ID NO: 1978539 - RNA, 18 nt, Human
uuaggauguugaaaaagu

SEQ ID NO: 1978540 - RNA, 15 nt, Human
uuaggaguuuugaga

SEQ ID NO: 1978541 - RNA, 11 nt, Human
uuaaaauacug

SEQ ID NO: 1978542 - RNA, 12 nt, Human
uuaaaauacugu

SEQ ID NO: 1978543 - RNA, 13 nt, Human
uuaaaauacugua

SEQ ID NO: 1978544 - RNA, 16 nt, Human
uuaaaauacuguagau

SEQ ID NO: 1978545 - RNA, 17 nt, Human
uuaaaauacuguagaua

SEQ ID NO: 1978546 - RNA, 18 nt, Human
uuaaaauacuguagauaa

SEQ ID NO: 1978547 - RNA, 20 nt, Human
uuaaaauacuguagauaauu

SEQ ID NO: 1978548 - RNA, 22 nt, Human
uuaaacucugaauuuaucuuug

SEQ ID NO: 1978549 - RNA, 13 nt, Human
uuaaacucugaau

SEQ ID NO: 1978550 - RNA, 20 nt, Human
uuaaacucugaauuuaucuu

SEQ ID NO: 1978551 - RNA, 20 nt, Human
uuaaagaaauauguauucug

SEQ ID NO: 1978552 - RNA, 13 nt, Human
uuaaagaagacau

SEQ ID NO: 1978553 - RNA, 20 nt, Human
uuaaacugucgugucauacu

SEQ ID NO: 1978554 - RNA, 21 nt, Human
uuaaaagaugcaauguagagg

SEQ ID NO: 1978555 - RNA, 21 nt, Human
uuaaaauaccagccaguaaau

SEQ ID NO: 1978556 - RNA, 21 nt, Human
uuaaaagccuuggccucagag

SEQ ID NO: 1978557 - RNA, 22 nt, Human
uguuuuguugcacugaaguuug

SEQ ID NO: 1978558 - RNA, 18 nt, Human
uguuuuuuguuuuucugc

SEQ ID NO: 1978559 - RNA, 17 nt, Human
uguuuuguuuggagaca

SEQ ID NO: 1978560 - RNA, 14 nt, Human
uguuuuguugcacu

SEQ ID NO: 1978561 - RNA, 18 nt, Human
uguuuuguugcacugaag

SEQ ID NO: 1978562 - RNA, 20 nt, Human
uguuuuguugcacugaaguu

SEQ ID NO: 1978563 - RNA, 18 nt, Human
uguuuuaaggaugcuugu

SEQ ID NO: 1978564 - RNA, 22 nt, Human
uguuuuaagaggcagggucuca

SEQ ID NO: 1978565 - RNA, 23 nt, Human
uguuugugcaguaacuugggagu

SEQ ID NO: 1978566 - RNA, 15 nt, Human
uguuuuguacagaug

SEQ ID NO: 1978567 - RNA, 16 nt, Human
uguuuuguacagaugu

SEQ ID NO: 1978568 - RNA, 14 nt, Human
uuaaaagauacagu

SEQ ID NO: 1978569 - RNA, 17 nt, Human
uuaaaagauacaguuac

SEQ ID NO: 1978570 - RNA, 18 nt, Human
uguuuuuuuuuaaagacu

SEQ ID NO: 1978571 - RNA, 18 nt, Human
uguuuuuuuuuuccacuu

SEQ ID NO: 1978572 - RNA, 19 nt, Human
uguuuuuuuuuuccacuua

SEQ ID NO: 1978573 - RNA, 22 nt, Human
uuaaaagaaaauaaaaaaaaga

SEQ ID NO: 1978574 - RNA, 23 nt, Human
uuaaaagaaaauaaaaaaaagaa

SEQ ID NO: 1978575 - RNA, 15 nt, Human
uguuucauccuuccc

SEQ ID NO: 1978576 - RNA, 18 nt, Human
uguuucauccuucccacu

SEQ ID NO: 1978577 - RNA, 16 nt, Human
uguuucauuaacugug

SEQ ID NO: 1978578 - RNA, 23 nt, Human
uguuuccuggcacugcuuccagu

SEQ ID NO: 1978579 - RNA, 13 nt, Human
uguuuccuucccu

SEQ ID NO: 1978580 - RNA, 23 nt, Human
uguuuccuugaggggagccagga

SEQ ID NO: 1978581 - RNA, 22 nt, Human
uguuucuaagguaacaagauga

SEQ ID NO: 1978582 - RNA, 16 nt, Human
uguuucuagaguuccu

SEQ ID NO: 1978583 - RNA, 17 nt, Human
uguuuguacaagauugu

SEQ ID NO: 1978584 - RNA, 18 nt, Human
uguuuguacaagauuguc

SEQ ID NO: 1978585 - RNA, 20 nt, Human
uguuuguacaagauugucau

SEQ ID NO: 1978586 - RNA, 16 nt, Human
uguuuguaaaaaugua

SEQ ID NO: 1978587 - RNA, 16 nt, Human
uguuuguaacaagaaa

SEQ ID NO: 1978588 - RNA, 15 nt, Human
uguuuguauguauaa

SEQ ID NO: 1978589 - RNA, 14 nt, Human
uguuugguuauagu

SEQ ID NO: 1978590 - RNA, 18 nt, Human
uguuugguuauagugcaa

SEQ ID NO: 1978591 - RNA, 16 nt, Human
uguuugguuuuaaaau

SEQ ID NO: 1978592 - RNA, 21 nt, Human
uguuugguuuuaaaauacugu

SEQ ID NO: 1978593 - RNA, 22 nt, Human
uguuugguuuuaaaauacugua

SEQ ID NO: 1978594 - RNA, 24 nt, Human
uguuugguuuuuuguucuugcgau

SEQ ID NO: 1978595 - RNA, 14 nt, Human
uguuugucucuucu

SEQ ID NO: 1978596 - RNA, 13 nt, Human
uguuugugauuga

SEQ ID NO: 1978597 - RNA, 20 nt, Human
uguuuuaagaggcagggucu

SEQ ID NO: 1978598 - RNA, 15 nt, Human
uguuugucucuucug

SEQ ID NO: 1978599 - RNA, 17 nt, Human
uguuugugcaguaacuu

SEQ ID NO: 1978600 - RNA, 16 nt, Human
uguuuagaagaagugu

SEQ ID NO: 1978601 - RNA, 19 nt, Human
uguuuagaagaaguguguc

SEQ ID NO: 1978602 - RNA, 12 nt, Human
uguuuagaauug

SEQ ID NO: 1978603 - RNA, 14 nt, Human
uguuuagaauugaa

SEQ ID NO: 1978604 - RNA, 15 nt, Human
uguuuagaauugaag

SEQ ID NO: 1978605 - RNA, 17 nt, Human
uguuuagaauugaaggu

SEQ ID NO: 1978606 - RNA, 23 nt, Human
uguuuagaauugaagguuuuuga

SEQ ID NO: 1978607 - RNA, 16 nt, Human
uguuuagauaauacac

SEQ ID NO: 1978608 - RNA, 15 nt, Human
uguuucaaacuuuac

SEQ ID NO: 1978609 - RNA, 12 nt, Human
uguuucauccuu

SEQ ID NO: 1978610 - RNA, 21 nt, Human
uguuucagaggcucagauugu

SEQ ID NO: 1978611 - RNA, 22 nt, Human
uguuucaaguucacaccugcag

SEQ ID NO: 1978612 - RNA, 22 nt, Human
uuaauauugauaugcuuauaca

SEQ ID NO: 1978613 - RNA, 18 nt, Human
uuaauauugauaugcuua

SEQ ID NO: 1978614 - RNA, 21 nt, Human
uuaaugauaugcuuguaacua

SEQ ID NO: 1978615 - RNA, 11 nt, Human
uuaagcugcag

SEQ ID NO: 1978616 - RNA, 17 nt, Human
uuaagcuguuacugucu

SEQ ID NO: 1978617 - RNA, 22 nt, Human
uuaagcuaggaaaagaaaucua

SEQ ID NO: 1978618 - RNA, 18 nt, Human
uuaagccuuuguugaacu

SEQ ID NO: 1978619 - RNA, 19 nt, Human
uuaagcuaggaaaagaaau

SEQ ID NO: 1978620 - RNA, 17 nt, Human
uuaagccuuuguugaac

SEQ ID NO: 1978621 - RNA, 15 nt, Human
uuaagccuuuggaaa

SEQ ID NO: 1978622 - RNA, 16 nt, Human
uuaagccuuuggaaac

SEQ ID NO: 1978623 - RNA, 19 nt, Human
uuaaugguaguuuuacagu

SEQ ID NO: 1978624 - RNA, 21 nt, Human
uuacaagcgugagccacugca

SEQ ID NO: 1978625 - RNA, 20 nt, Human
uuacaagcgugagccacugc

SEQ ID NO: 1978626 - RNA, 17 nt, Human
uuaauguugauuucuag

SEQ ID NO: 1978627 - RNA, 21 nt, Human
uuaauguugauuucuaguuau

SEQ ID NO: 1978628 - RNA, 17 nt, Human
uuaauguugaacaaaau

SEQ ID NO: 1978629 - RNA, 23 nt, Human
uuaauguugaacaaaauaaauug

SEQ ID NO: 1978630 - RNA, 14 nt, Human
uuaauguugauuuc

SEQ ID NO: 1978631 - RNA, 15 nt, Human
uuaauguugauuucu

SEQ ID NO: 1978632 - RNA, 12 nt, Human
uuaacucagucu

SEQ ID NO: 1978633 - RNA, 17 nt, Human
uuaacugcucaguguuu

SEQ ID NO: 1978634 - RNA, 15 nt, Human
uuaacugcuuccuau

SEQ ID NO: 1978635 - RNA, 24 nt, Human
uuaacugcuuccuauaauuuugau

SEQ ID NO: 1978636 - RNA, 18 nt, Human
uuaacuuuuauaaacuuu

SEQ ID NO: 1978637 - RNA, 18 nt, Human
uuaagcagaauuggaaaa

SEQ ID NO: 1978638 - RNA, 22 nt, Human
uuaagcagaauuggaaaagacu

SEQ ID NO: 1978639 - RNA, 16 nt, Human
uuaacuuuuauaaacu

SEQ ID NO: 1978640 - RNA, 17 nt, Human
uuaacuuuuauaaacuu

SEQ ID NO: 1978641 - RNA, 15 nt, Human
uuaacuuuuauaaac

SEQ ID NO: 1978642 - RNA, 18 nt, Human
uuaacuuaguuuugcaua

SEQ ID NO: 1978643 - RNA, 16 nt, Human
uuaacuucacauauug

SEQ ID NO: 1978644 - RNA, 14 nt, Human
uuaacuuaauaauc

SEQ ID NO: 1978645 - RNA, 16 nt, Human
uuaacuuaauaaucaa

SEQ ID NO: 1978646 - RNA, 17 nt, Human
uuaacuuaauaaucaag

SEQ ID NO: 1978647 - RNA, 14 nt, Human
uuaacuuaguuuug

SEQ ID NO: 1978648 - RNA, 17 nt, Human
uuaacuuaguuuugcau

SEQ ID NO: 1978649 - RNA, 17 nt, Human
uuaaccacuucagcuga

SEQ ID NO: 1978650 - RNA, 23 nt, Human
uuaaauguuuuuuuuuaaagacu

SEQ ID NO: 1978651 - RNA, 21 nt, Human
uuaaauguuuuuuuuuaaaga

SEQ ID NO: 1978652 - RNA, 17 nt, Human
uuaaauuacauuuguaa

SEQ ID NO: 1978653 - RNA, 18 nt, Human
uuaaauuacauuuguaau

SEQ ID NO: 1978654 - RNA, 16 nt, Human
uuaaauuacauuugua

SEQ ID NO: 1978655 - RNA, 21 nt, Human
uuaaauguuuuguaaacuuug

SEQ ID NO: 1978656 - RNA, 23 nt, Human
uuaaauguuuuguaaacuuugaa

SEQ ID NO: 1978657 - RNA, 17 nt, Human
uuaaagaauuucuuuau

SEQ ID NO: 1978658 - RNA, 11 nt, Human
uuaaauguuuu

SEQ ID NO: 1978659 - RNA, 12 nt, Human
uuaaauguuuug

SEQ ID NO: 1978660 - RNA, 14 nt, Human
uuaaauguuuugua

SEQ ID NO: 1978661 - RNA, 15 nt, Human
uuaaauguuuuguaa

SEQ ID NO: 1978662 - RNA, 18 nt, Human
uuaaauguuuuguaaacu

SEQ ID NO: 1978663 - RNA, 19 nt, Human
uuaaauguuuuguaaacuu

SEQ ID NO: 1978664 - RNA, 20 nt, Human
uuaaauguuuuguaaacuuu

SEQ ID NO: 1978665 - RNA, 16 nt, Human
uggggauagaugugug

SEQ ID NO: 1978666 - RNA, 17 nt, Human
uggggauagaugugugg

SEQ ID NO: 1978667 - RNA, 18 nt, Human
uggggauagaugugugga

SEQ ID NO: 1978668 - RNA, 20 nt, Human
uggggauagauguguggaca

SEQ ID NO: 1978669 - RNA, 16 nt, Human
ugggcuucugugccca

SEQ ID NO: 1978670 - RNA, 14 nt, Human
ugggcuugcugugg

SEQ ID NO: 1978671 - RNA, 12 nt, Human
ugggccuucagg

SEQ ID NO: 1978672 - RNA, 12 nt, Human
ugggcuucugug

SEQ ID NO: 1978673 - RNA, 20 nt, Human
uggggccaguuggucccccu

SEQ ID NO: 1978674 - RNA, 22 nt, Human
uggggccaggcugggucgcccu

SEQ ID NO: 1978675 - RNA, 21 nt, Human
uggggccaggcugggucgccc

SEQ ID NO: 1978676 - RNA, 15 nt, Human
uggggaugagaaagg

SEQ ID NO: 1978677 - RNA, 20 nt, Human
uggggccaggcugggucgcc

SEQ ID NO: 1978678 - RNA, 23 nt, Human
uggggaugagaaagguugaagca

SEQ ID NO: 1978679 - RNA, 14 nt, Human
ugggggucugugug

SEQ ID NO: 1978680 - RNA, 16 nt, Human
ugggggaguggccaca

SEQ ID NO: 1978681 - RNA, 13 nt, Human
uggggggggugcu

SEQ ID NO: 1978682 - RNA, 20 nt, Human
ugggggaggggagacuuuga

SEQ ID NO: 1978683 - RNA, 22 nt, Human
uggggguguucagccacugagg

SEQ ID NO: 1978684 - RNA, 15 nt, Human
uggggguucuuucuu

SEQ ID NO: 1978685 - RNA, 19 nt, Human
uggggguucuuucuuccuc

SEQ ID NO: 1978686 - RNA, 20 nt, Human
uggggguucuuucuuccucu

SEQ ID NO: 1978687 - RNA, 22 nt, Human
uggggguucuuucuuccucugc

SEQ ID NO: 1978688 - RNA, 17 nt, Human
uggguacuuguggacac

SEQ ID NO: 1978689 - RNA, 18 nt, Human
uggguacuuguggacaca

SEQ ID NO: 1978690 - RNA, 13 nt, Human
ugggauccuccag

SEQ ID NO: 1978691 - RNA, 12 nt, Human
ugggauccucca

SEQ ID NO: 1978692 - RNA, 14 nt, Human
ugggauccuccagg

SEQ ID NO: 1978693 - RNA, 15 nt, Human
ugggauccaggcccc

SEQ ID NO: 1978694 - RNA, 18 nt, Human
ugggauccaggccccucc

SEQ ID NO: 1978695 - RNA, 20 nt, Human
ugggauccaggccccucccu

SEQ ID NO: 1978696 - RNA, 22 nt, Human
ugggcagagcagagaccauccc

SEQ ID NO: 1978697 - RNA, 17 nt, Human
ugggauuacaggcguga

SEQ ID NO: 1978698 - RNA, 18 nt, Human
ugggcagagcagagacca

SEQ ID NO: 1978699 - RNA, 22 nt, Human
ugggauuacaagcgugagccac

SEQ ID NO: 1978700 - RNA, 16 nt, Human
ugggagugggcccaau

SEQ ID NO: 1978701 - RNA, 14 nt, Human
ugggagugggccca

SEQ ID NO: 1978702 - RNA, 11 nt, Human
ugggagugugu

SEQ ID NO: 1978703 - RNA, 13 nt, Human
ugggaguguguaa

SEQ ID NO: 1978704 - RNA, 19 nt, Human
ugggaucacauguggacuu

SEQ ID NO: 1978705 - RNA, 18 nt, Human
ugggagugugguuucuuu

SEQ ID NO: 1978706 - RNA, 16 nt, Human
uggcugggggccucag

SEQ ID NO: 1978707 - RNA, 17 nt, Human
uggcugggggccucagu

SEQ ID NO: 1978708 - RNA, 22 nt, Human
ugggagugaggaugucugggcc

SEQ ID NO: 1978709 - RNA, 20 nt, Human
uggcugggggccucagugcc

SEQ ID NO: 1978710 - RNA, 19 nt, Human
ugggccuggcucccucacu

SEQ ID NO: 1978711 - RNA, 14 nt, Human
ugggccuggcuccc

SEQ ID NO: 1978712 - RNA, 11 nt, Human
ugggccuucag

SEQ ID NO: 1978713 - RNA, 21 nt, Human
ugggccuggcucccucacucu

SEQ ID NO: 1978714 - RNA, 23 nt, Human
ugggccccugccucucugcaggu

SEQ ID NO: 1978715 - RNA, 21 nt, Human
ugggccccugccucucugcag

SEQ ID NO: 1978716 - RNA, 14 nt, Human
ugggcaggagacug

SEQ ID NO: 1978717 - RNA, 23 nt, Human
ugggcagagcagagaccaucccu

SEQ ID NO: 1978718 - RNA, 14 nt, Human
uggucggaaaacau

SEQ ID NO: 1978719 - RNA, 18 nt, Human
uggucgccuuccaccucu

SEQ ID NO: 1978720 - RNA, 17 nt, Human
uggucggaaaacaugcu

SEQ ID NO: 1978721 - RNA, 14 nt, Human
uggucuaauguuua

SEQ ID NO: 1978722 - RNA, 19 nt, Human
uggucguaaacaucucaga

SEQ ID NO: 1978723 - RNA, 20 nt, Human
uggucgaaaguuaguaggau

SEQ ID NO: 1978724 - RNA, 20 nt, Human
ugguccuggaggcucaaauu

SEQ ID NO: 1978725 - RNA, 13 nt, Human
ugguccuguagga

SEQ ID NO: 1978726 - RNA, 20 nt, Human
ugguccuguaggaguucuau

SEQ ID NO: 1978727 - RNA, 18 nt, Human
uggucuacacugugcuga

SEQ ID NO: 1978728 - RNA, 17 nt, Human
uggucuacacugugcug

SEQ ID NO: 1978729 - RNA, 16 nt, Human
uggucuacacugugcu

SEQ ID NO: 1978730 - RNA, 15 nt, Human
uggucuacacugugc

SEQ ID NO: 1978731 - RNA, 19 nt, Human
uggucuacacugugcugag

SEQ ID NO: 1978732 - RNA, 21 nt, Human
uggucuaauguuuaagcagaa

SEQ ID NO: 1978733 - RNA, 15 nt, Human
uggucuaauguuuaa

SEQ ID NO: 1978734 - RNA, 19 nt, Human
uggucuaauguuuaagcag

SEQ ID NO: 1978735 - RNA, 16 nt, Human
uggugaauuucacaag

SEQ ID NO: 1978736 - RNA, 13 nt, Human
uggugaccucugc

SEQ ID NO: 1978737 - RNA, 14 nt, Human
uggugaccucugcc

SEQ ID NO: 1978738 - RNA, 23 nt, Human
uggugcacgcuggggaagaauuu

SEQ ID NO: 1978739 - RNA, 21 nt, Human
uggugcaaugaccuuucaaua

SEQ ID NO: 1978740 - RNA, 14 nt, Human
uggugaugcagucu

SEQ ID NO: 1978741 - RNA, 15 nt, Human
uggugaguuaggaac

SEQ ID NO: 1978742 - RNA, 16 nt, Human
uggugacuuugcuuca

SEQ ID NO: 1978743 - RNA, 12 nt, Human
uggugagcauua

SEQ ID NO: 1978744 - RNA, 18 nt, Human
uggugagcauuacaggca

SEQ ID NO: 1978745 - RNA, 21 nt, Human
uggugaccuuccaagagccug

SEQ ID NO: 1978746 - RNA, 22 nt, Human
uggugaccuuccaagagccuga

SEQ ID NO: 1978747 - RNA, 19 nt, Human
uggugacuuuccucuuugg

SEQ ID NO: 1978748 - RNA, 15 nt, Human
uggugaccucugccu

SEQ ID NO: 1978749 - RNA, 16 nt, Human
uggugaccucugccug

SEQ ID NO: 1978750 - RNA, 17 nt, Human
uggugaccucugccuga

SEQ ID NO: 1978751 - RNA, 22 nt, Human
uggugaccucugccugaaguca

SEQ ID NO: 1978752 - RNA, 21 nt, Human
uggucaaacaaacucucugaa

SEQ ID NO: 1978753 - RNA, 16 nt, Human
uggucaaacaaacucu

SEQ ID NO: 1978754 - RNA, 22 nt, Human
ugguaugcuugcauauauuuca

SEQ ID NO: 1978755 - RNA, 22 nt, Human
uggucaaacaaacucucugaac

SEQ ID NO: 1978756 - RNA, 17 nt, Human
uggucacaggaaguaga

SEQ ID NO: 1978757 - RNA, 22 nt, Human
uggucacaggaaguagaggagg

SEQ ID NO: 1978758 - RNA, 18 nt, Human
uggucacaggacucugcc

SEQ ID NO: 1978759 - RNA, 14 nt, Human
uggucaacauuucu

SEQ ID NO: 1978760 - RNA, 14 nt, Human
uggucccccuucca

SEQ ID NO: 1978761 - RNA, 19 nt, Human
uggucacaggacucugccu

SEQ ID NO: 1978762 - RNA, 23 nt, Human
ugguccugcugcaguugccaguc

SEQ ID NO: 1978763 - RNA, 15 nt, Human
ugguccugcugcagu

SEQ ID NO: 1978764 - RNA, 13 nt, Human
ugguccugcugca

SEQ ID NO: 1978765 - RNA, 14 nt, Human
ugguccucacacuc

SEQ ID NO: 1978766 - RNA, 19 nt, Human
ugguccuaaucuucugaac

SEQ ID NO: 1978767 - RNA, 17 nt, Human
ugguccuaaucuucuga

SEQ ID NO: 1978768 - RNA, 23 nt, Human
uggucccccuuccauggacuuug

SEQ ID NO: 1978769 - RNA, 18 nt, Human
uggucccccuuccaugga

SEQ ID NO: 1978770 - RNA, 16 nt, Human
uggucccccuuccaug

SEQ ID NO: 1978771 - RNA, 15 nt, Human
uggucccccuuccau

SEQ ID NO: 1978772 - RNA, 17 nt, Human
uggcaauaaauuuugaa

SEQ ID NO: 1978773 - RNA, 18 nt, Human
uggcaauaaauuuugaaa

SEQ ID NO: 1978774 - RNA, 20 nt, Human
uggcaauaaauuuugaaaag

SEQ ID NO: 1978775 - RNA, 21 nt, Human
uggcaauaaauuuugaaaagu

SEQ ID NO: 1978776 - RNA, 16 nt, Human
uggcacuauaauguaa

SEQ ID NO: 1978777 - RNA, 15 nt, Human
uggcacuauaaugua

SEQ ID NO: 1978778 - RNA, 19 nt, Human
uggcaaacucuccaccaca

SEQ ID NO: 1978779 - RNA, 20 nt, Human
uggcaaagcuguucuuccug

SEQ ID NO: 1978780 - RNA, 17 nt, Human
uggcaaagcuguucuuc

SEQ ID NO: 1978781 - RNA, 19 nt, Human
uggcaaagcuguucuuccu

SEQ ID NO: 1978782 - RNA, 23 nt, Human
uggcaaagcagcaacacacaugc

SEQ ID NO: 1978783 - RNA, 12 nt, Human
uggcaaaaaggc

SEQ ID NO: 1978784 - RNA, 19 nt, Human
uggaucugugaggggcucu

SEQ ID NO: 1978785 - RNA, 16 nt, Human
uggcaaaaaggcagga

SEQ ID NO: 1978786 - RNA, 15 nt, Human
uggaucugugagggg

SEQ ID NO: 1978787 - RNA, 16 nt, Human
uggaguuggaguucau

SEQ ID NO: 1978788 - RNA, 19 nt, Human
uggaguuggggcagaggag

SEQ ID NO: 1978789 - RNA, 23 nt, Human
uggaggaaggaaacccagcucug

SEQ ID NO: 1978790 - RNA, 21 nt, Human
uggaggaaggaaacccagcuc

SEQ ID NO: 1978791 - RNA, 14 nt, Human
uggagacugucuca

SEQ ID NO: 1978792 - RNA, 13 nt, Human
uggacuccucugu

SEQ ID NO: 1978793 - RNA, 21 nt, Human
uggagaagcucccugaaguaa

SEQ ID NO: 1978794 - RNA, 15 nt, Human
uggagaaucacaggc

SEQ ID NO: 1978795 - RNA, 16 nt, Human
uggagaaucacaggcu

SEQ ID NO: 1978796 - RNA, 17 nt, Human
uggagaaucacaggcug

SEQ ID NO: 1978797 - RNA, 18 nt, Human
uggagaaucacaggcugg

SEQ ID NO: 1978798 - RNA, 19 nt, Human
uggagaaucacaggcuggg

SEQ ID NO: 1978799 - RNA, 20 nt, Human
uggagaaucacaggcugggc

SEQ ID NO: 1978800 - RNA, 22 nt, Human
uggagaaucacaggcugggcug

SEQ ID NO: 1978801 - RNA, 23 nt, Human
uggagaaucacaggcugggcugg

SEQ ID NO: 1978802 - RNA, 20 nt, Human
uggagaaucucaacaugucu

SEQ ID NO: 1978803 - RNA, 21 nt, Human
uggagaaugcaccauacucau

SEQ ID NO: 1978804 - RNA, 22 nt, Human
uggagaaugcaccauacucaug

SEQ ID NO: 1978805 - RNA, 20 nt, Human
uggagacugcuccugagccc

SEQ ID NO: 1978806 - RNA, 22 nt, Human
uggagacugcuccugagccccc

SEQ ID NO: 1978807 - RNA, 23 nt, Human
uggagacugcuccugagccccca

SEQ ID NO: 1978808 - RNA, 17 nt, Human
ugcuguugcugauuuua

SEQ ID NO: 1978809 - RNA, 22 nt, Human
ugcuguuuaucccuuaagaaug

SEQ ID NO: 1978810 - RNA, 23 nt, Human
ugcuguuucccggggaggaaaca

SEQ ID NO: 1978811 - RNA, 19 nt, Human
uggccagaugcaccagccc

SEQ ID NO: 1978812 - RNA, 16 nt, Human
uggccaggcugcucuu

SEQ ID NO: 1978813 - RNA, 17 nt, Human
uggccaggcugcucuug

SEQ ID NO: 1978814 - RNA, 13 nt, Human
uggccaggcugcu

SEQ ID NO: 1978815 - RNA, 17 nt, Human
uggccaggcugcucuca

SEQ ID NO: 1978816 - RNA, 19 nt, Human
uggccaggcugcucucaaa

SEQ ID NO: 1978817 - RNA, 21 nt, Human
uggccaggaaguagcacaggc

SEQ ID NO: 1978818 - RNA, 22 nt, Human
uggccaggaaguagcacaggcu

SEQ ID NO: 1978819 - RNA, 20 nt, Human
uggccaggaaguagcacagg

SEQ ID NO: 1978820 - RNA, 19 nt, Human
uggccaggaaguagcacag

SEQ ID NO: 1978821 - RNA, 15 nt, Human
uggcagaguugaaga

SEQ ID NO: 1978822 - RNA, 12 nt, Human
uggcagaggagg

SEQ ID NO: 1978823 - RNA, 21 nt, Human
uggcagaguggauucuugaac

SEQ ID NO: 1978824 - RNA, 19 nt, Human
uggcagaguugaagacaga

SEQ ID NO: 1978825 - RNA, 17 nt, Human
uggcagaguugaagaca

SEQ ID NO: 1978826 - RNA, 17 nt, Human
uggccagaugcaccagc

SEQ ID NO: 1978827 - RNA, 18 nt, Human
uggccagaugcaccagcc

SEQ ID NO: 1978828 - RNA, 19 nt, Human
uggcccagggggcuuccug

SEQ ID NO: 1978829 - RNA, 21 nt, Human
uggcccagggggcuuccugag

SEQ ID NO: 1978830 - RNA, 23 nt, Human
uggcccagggugagguggcaugg

SEQ ID NO: 1978831 - RNA, 20 nt, Human
uggccaggcugcucuugaac

SEQ ID NO: 1978832 - RNA, 13 nt, Human
uggccaggcuggu

SEQ ID NO: 1978833 - RNA, 14 nt, Human
uggccccugcccgg

SEQ ID NO: 1978834 - RNA, 15 nt, Human
uggccccugcccggc

SEQ ID NO: 1978835 - RNA, 16 nt, Human
uggccccugcccggcu

SEQ ID NO: 1978836 - RNA, 20 nt, Human
uggccccugcccggcugcgg

SEQ ID NO: 1978837 - RNA, 23 nt, Human
uggcgcugccccuggcagccccu

SEQ ID NO: 1978838 - RNA, 16 nt, Human
uggcgcugccccuggc

SEQ ID NO: 1978839 - RNA, 23 nt, Human
uggcgcagcauauucaggaagcu

SEQ ID NO: 1978840 - RNA, 22 nt, Human
uggcgcagcauauucaggaagc

SEQ ID NO: 1978841 - RNA, 18 nt, Human
uggccucccacagacuca

SEQ ID NO: 1978842 - RNA, 23 nt, Human
uggccucccaacucaccccagcc

SEQ ID NO: 1978843 - RNA, 22 nt, Human
uggccucagaggacccuuucca

SEQ ID NO: 1978844 - RNA, 15 nt, Human
uggcgggguggggug

SEQ ID NO: 1978845 - RNA, 14 nt, Human
uggcucccacaggc

SEQ ID NO: 1978846 - RNA, 17 nt, Human
uggcucccacaggcccu

SEQ ID NO: 1978847 - RNA, 20 nt, Human
uggcucccacaggcccuucc

SEQ ID NO: 1978848 - RNA, 15 nt, Human
uggcugcuucaagga

SEQ ID NO: 1978849 - RNA, 11 nt, Human
uggcugcuuca

SEQ ID NO: 1978850 - RNA, 18 nt, Human
uggcuccucccggugccc

SEQ ID NO: 1978851 - RNA, 19 nt, Human
uggcuccucccggugccca

SEQ ID NO: 1978852 - RNA, 14 nt, Human
uggcuccucccggu

SEQ ID NO: 1978853 - RNA, 16 nt, Human
uggcuccucccggugc

SEQ ID NO: 1978854 - RNA, 18 nt, Human
ugcccaggcuggcgugca

SEQ ID NO: 1978855 - RNA, 19 nt, Human
ugcccaggcuggcgugcag

SEQ ID NO: 1978856 - RNA, 20 nt, Human
ugcccaggcuggcgugcagu

SEQ ID NO: 1978857 - RNA, 23 nt, Human
ugccccaaauggauuccuguuuc

SEQ ID NO: 1978858 - RNA, 19 nt, Human
ugcccauuguuuuucugau

SEQ ID NO: 1978859 - RNA, 22 nt, Human
ugccccaaguuuugugaaauuu

SEQ ID NO: 1978860 - RNA, 12 nt, Human
ugcccggcugcg

SEQ ID NO: 1978861 - RNA, 14 nt, Human
ugcccggcugcgga

SEQ ID NO: 1978862 - RNA, 13 nt, Human
ugcccgccaccac

SEQ ID NO: 1978863 - RNA, 16 nt, Human
ugccccuggcagcccc

SEQ ID NO: 1978864 - RNA, 19 nt, Human
ugccccuccucucugcccu

SEQ ID NO: 1978865 - RNA, 20 nt, Human
ugccccuccucucugcccua

SEQ ID NO: 1978866 - RNA, 15 nt, Human
ugccccucccuucaa

SEQ ID NO: 1978867 - RNA, 16 nt, Human
ugccccucccuucaac

SEQ ID NO: 1978868 - RNA, 17 nt, Human
ugccccuccucucugcc

SEQ ID NO: 1978869 - RNA, 18 nt, Human
ugccccuccucucugccc

SEQ ID NO: 1978870 - RNA, 19 nt, Human
ugcccugucaggaggcaga

SEQ ID NO: 1978871 - RNA, 16 nt, Human
ugcccugucaggaggc

SEQ ID NO: 1978872 - RNA, 23 nt, Human
ugcccugguuuccugcccuggga

SEQ ID NO: 1978873 - RNA, 19 nt, Human
ugcccugguuuccugcccu

SEQ ID NO: 1978874 - RNA, 20 nt, Human
ugcccugguuuccugcccug

SEQ ID NO: 1978875 - RNA, 12 nt, Human
ugcccuggugcu

SEQ ID NO: 1978876 - RNA, 14 nt, Human
ugcccuggugcugc

SEQ ID NO: 1978877 - RNA, 16 nt, Human
ugcccuggugcugcca

SEQ ID NO: 1978878 - RNA, 17 nt, Human
ugcccuggugcugccac

SEQ ID NO: 1978879 - RNA, 17 nt, Human
ugcccugguuuccugcc

SEQ ID NO: 1978880 - RNA, 18 nt, Human
ugcccugguuuccugccc

SEQ ID NO: 1978881 - RNA, 20 nt, Human
ugcccugcccaccuggccuc

SEQ ID NO: 1978882 - RNA, 16 nt, Human
ugcccugcccaccugg

SEQ ID NO: 1978883 - RNA, 14 nt, Human
ugcccugcccaccu

SEQ ID NO: 1978884 - RNA, 15 nt, Human
ugcccugcccaccug

SEQ ID NO: 1978885 - RNA, 13 nt, Human
ugcccugggaggc

SEQ ID NO: 1978886 - RNA, 15 nt, Human
ugcccugggaggcag

SEQ ID NO: 1978887 - RNA, 17 nt, Human
ugcccugggaggcagug

SEQ ID NO: 1978888 - RNA, 18 nt, Human
ugcccugggaggcaguga

SEQ ID NO: 1978889 - RNA, 16 nt, Human
ugccucggauccccuu

SEQ ID NO: 1978890 - RNA, 23 nt, Human
ugccucgacacgugggcuccccu

SEQ ID NO: 1978891 - RNA, 24 nt, Human
ugccucgacacgugggcuccccuc

SEQ ID NO: 1978892 - RNA, 18 nt, Human
ugccucggauccccuucc

SEQ ID NO: 1978893 - RNA, 14 nt, Human
ugccuccucuucaa

SEQ ID NO: 1978894 - RNA, 16 nt, Human
ugccuccucuucaacu

SEQ ID NO: 1978895 - RNA, 14 nt, Human
ugccucaagagaag

SEQ ID NO: 1978896 - RNA, 15 nt, Human
ugccucaagagaagg

SEQ ID NO: 1978897 - RNA, 16 nt, Human
ugccuauaagccaaaa

SEQ ID NO: 1978898 - RNA, 17 nt, Human
ugccuauaagccaaaau

SEQ ID NO: 1978899 - RNA, 20 nt, Human
ugccuauaagccaaaauuaa

SEQ ID NO: 1978900 - RNA, 21 nt, Human
ugccuauaagccaaaauuaag

SEQ ID NO: 1978901 - RNA, 15 nt, Human
ugccuauauuuuccu

SEQ ID NO: 1978902 - RNA, 16 nt, Human
ugccuaacaaaauauu

SEQ ID NO: 1978903 - RNA, 12 nt, Human
ugccuaaaauaa

SEQ ID NO: 1978904 - RNA, 20 nt, Human
ugccuaaauaaguuauaaag

SEQ ID NO: 1978905 - RNA, 21 nt, Human
ugcauuuggugguuucagaaa

SEQ ID NO: 1978906 - RNA, 14 nt, Human
ugcauuugcuuuug

SEQ ID NO: 1978907 - RNA, 13 nt, Human
ugcauuuggaaca

SEQ ID NO: 1978908 - RNA, 12 nt, Human
ugccaaacauua

SEQ ID NO: 1978909 - RNA, 19 nt, Human
ugccaaacauuaauguuga

SEQ ID NO: 1978910 - RNA, 20 nt, Human
ugccaaacauuaauguugau

SEQ ID NO: 1978911 - RNA, 23 nt, Human
ugcauuuggugguuucagaaaug

SEQ ID NO: 1978912 - RNA, 14 nt, Human
ugccaggcauggug

SEQ ID NO: 1978913 - RNA, 22 nt, Human
ugccaggaagccagcaggcucu

SEQ ID NO: 1978914 - RNA, 20 nt, Human
ugccaggaagccagcaggcu

SEQ ID NO: 1978915 - RNA, 16 nt, Human
ugccacuaaauugaca

SEQ ID NO: 1978916 - RNA, 10 nt, Human
ugccaccucc

SEQ ID NO: 1978917 - RNA, 13 nt, Human
ugccaccuccccu

SEQ ID NO: 1978918 - RNA, 17 nt, Human
ugccaccuccccuugcc

SEQ ID NO: 1978919 - RNA, 18 nt, Human
ugccaccuccccuugcca

SEQ ID NO: 1978920 - RNA, 21 nt, Human
ugccaccuccccuugccagcu

SEQ ID NO: 1978921 - RNA, 22 nt, Human
ugccaccuccccuugccagcug

SEQ ID NO: 1978922 - RNA, 13 nt, Human
ugcagggaguccg

SEQ ID NO: 1978923 - RNA, 15 nt, Human
ugauuuaauuugaaa

SEQ ID NO: 1978924 - RNA, 13 nt, Human
ugcaguuacaaau

SEQ ID NO: 1978925 - RNA, 18 nt, Human
ugcaguuacaaauuauaa

SEQ ID NO: 1978926 - RNA, 21 nt, Human
ugcaguuacacuaaaagguga

SEQ ID NO: 1978927 - RNA, 19 nt, Human
ugcaguuacaaauuauaau

SEQ ID NO: 1978928 - RNA, 21 nt, Human
ugcaguuacaaauuauaaugu

SEQ ID NO: 1978929 - RNA, 13 nt, Human
ugcaguucccauc

SEQ ID NO: 1978930 - RNA, 23 nt, Human
ugcaguuacaaauuauaauguau

SEQ ID NO: 1978931 - RNA, 23 nt, Human
ugcaguuccccuggaagcagugc

SEQ ID NO: 1978932 - RNA, 20 nt, Human
ugcaguggugcgaucugggu

SEQ ID NO: 1978933 - RNA, 21 nt, Human
ugcaguggugcgaucuggguu

SEQ ID NO: 1978934 - RNA, 16 nt, Human
ugcaguugccagucac

SEQ ID NO: 1978935 - RNA, 20 nt, Human
ugcauagguuagauauagag

SEQ ID NO: 1978936 - RNA, 18 nt, Human
ugcauauaacuuauauug

SEQ ID NO: 1978937 - RNA, 13 nt, Human
ugcauauuacugu

SEQ ID NO: 1978938 - RNA, 22 nt, Human
ugcauauuacuguacaugggac

SEQ ID NO: 1978939 - RNA, 18 nt, Human
ugcauauuauuuuauguu

SEQ ID NO: 1978940 - RNA, 22 nt, Human
ugcauaguaaauguaguucaua

SEQ ID NO: 1978941 - RNA, 14 nt, Human
ugcauaguauucca

SEQ ID NO: 1978942 - RNA, 14 nt, Human
ugcauauaacuuau

SEQ ID NO: 1978943 - RNA, 15 nt, Human
ugcauauaacuuaua

SEQ ID NO: 1978944 - RNA, 16 nt, Human
ugcauauaacuuauau

SEQ ID NO: 1978945 - RNA, 22 nt, Human
ugcauauucuaguaauaaagac

SEQ ID NO: 1978946 - RNA, 17 nt, Human
ugcgccaccgcccagag

SEQ ID NO: 1978947 - RNA, 15 nt, Human
ugcgcauaggccugc

SEQ ID NO: 1978948 - RNA, 20 nt, Human
ugcgcauaggccugcuuugu

SEQ ID NO: 1978949 - RNA, 13 nt, Human
ugcgcaguugcug

SEQ ID NO: 1978950 - RNA, 11 nt, Human
ugcgcuucacu

SEQ ID NO: 1978951 - RNA, 14 nt, Human
ugcgcuucacuugg

SEQ ID NO: 1978952 - RNA, 15 nt, Human
ugcgcuucacuuggg

SEQ ID NO: 1978953 - RNA, 16 nt, Human
ugcgcuucacuugggu

SEQ ID NO: 1978954 - RNA, 23 nt, Human
ugccuugcccacuccugcucugc

SEQ ID NO: 1978955 - RNA, 21 nt, Human
ugcgcaggcuggcccugcccu

SEQ ID NO: 1978956 - RNA, 22 nt, Human
ugcgcaggcuggcccugcccug

SEQ ID NO: 1978957 - RNA, 23 nt, Human
ugcgcaggcuggcccugcccugg

SEQ ID NO: 1978958 - RNA, 20 nt, Human
ugccuugcauaauggucaga

SEQ ID NO: 1978959 - RNA, 19 nt, Human
ugccuugcccacuccugcu

SEQ ID NO: 1978960 - RNA, 16 nt, Human
ugcuaagaauuuuuua

SEQ ID NO: 1978961 - RNA, 19 nt, Human
ugcuaagaauuuuuuauuu

SEQ ID NO: 1978962 - RNA, 20 nt, Human
ugcuaagaauuuuuuauuuu

SEQ ID NO: 1978963 - RNA, 17 nt, Human
ugcuaagaauauuugaa

SEQ ID NO: 1978964 - RNA, 21 nt, Human
ugcuaagaauauuugaaugua

SEQ ID NO: 1978965 - RNA, 22 nt, Human
ugcuaagaauauuugaauguau

SEQ ID NO: 1978966 - RNA, 21 nt, Human
ugcuacuguccuacccacccu

SEQ ID NO: 1978967 - RNA, 22 nt, Human
ugcuacuguccuacccacccuc

SEQ ID NO: 1978968 - RNA, 13 nt, Human
ugcuagaaaaauu

SEQ ID NO: 1978969 - RNA, 14 nt, Human
ugcuaagaaaccag

SEQ ID NO: 1978970 - RNA, 15 nt, Human
ugcuaaacguguaug

SEQ ID NO: 1978971 - RNA, 16 nt, Human
ugcuaaacguguaugu

SEQ ID NO: 1978972 - RNA, 17 nt, Human
ugcggacagccacggcc

SEQ ID NO: 1978973 - RNA, 22 nt, Human
ugcgcuucacuuggguccaggc

SEQ ID NO: 1978974 - RNA, 19 nt, Human
ugcgcuuguuuuaaagugg

SEQ ID NO: 1978975 - RNA, 15 nt, Human
ugcguguucucagag

SEQ ID NO: 1978976 - RNA, 20 nt, Human
ugcuaggaacacuccuucac

SEQ ID NO: 1978977 - RNA, 21 nt, Human
ugcuaggaacacuccuucaca

SEQ ID NO: 1978978 - RNA, 22 nt, Human
ugcuaggaacacuccuucacag

SEQ ID NO: 1978979 - RNA, 13 nt, Human
ugcuagaacuccc

SEQ ID NO: 1978980 - RNA, 14 nt, Human
ugcuagaacucccu

SEQ ID NO: 1978981 - RNA, 15 nt, Human
ugcuagaacucccuu

SEQ ID NO: 1978982 - RNA, 17 nt, Human
ugcuagaacucccuuuc

SEQ ID NO: 1978983 - RNA, 19 nt, Human
ugcucagggaaaagcagcu

SEQ ID NO: 1978984 - RNA, 14 nt, Human
ugcucagaccagcu

SEQ ID NO: 1978985 - RNA, 20 nt, Human
ugcucaggagcccugggagg

SEQ ID NO: 1978986 - RNA, 19 nt, Human
ugcucaggagcccugggag

SEQ ID NO: 1978987 - RNA, 18 nt, Human
ugcucaggagcccuggga

SEQ ID NO: 1978988 - RNA, 17 nt, Human
ugcucacauaucuguca

SEQ ID NO: 1978989 - RNA, 15 nt, Human
ugcucaggagcccug

SEQ ID NO: 1978990 - RNA, 23 nt, Human
ugcucuaaaauauuuaugaagaa

SEQ ID NO: 1978991 - RNA, 13 nt, Human
ugcucuaaaauau

SEQ ID NO: 1978992 - RNA, 14 nt, Human
ugcucuaaaauauu

SEQ ID NO: 1978993 - RNA, 15 nt, Human
ugcucuaaaauauuu

SEQ ID NO: 1978994 - RNA, 19 nt, Human
ugcucuaaaauauuuauga

SEQ ID NO: 1978995 - RNA, 20 nt, Human
ugcucuaaaauauuuaugaa

SEQ ID NO: 1978996 - RNA, 12 nt, Human
ugcucuaaaaua

SEQ ID NO: 1978997 - RNA, 15 nt, Human
ugcucaguguuucau

SEQ ID NO: 1978998 - RNA, 16 nt, Human
ugcucaguguuucaua

SEQ ID NO: 1978999 - RNA, 17 nt, Human
ugcucuugaugccuggc

SEQ ID NO: 1979000 - RNA, 15 nt, Human
ugcucuugggcaaua

SEQ ID NO: 1979001 - RNA, 17 nt, Human
ugcucuugggcaauauu

SEQ ID NO: 1979002 - RNA, 18 nt, Human
ugcucuugggcaauauuc

SEQ ID NO: 1979003 - RNA, 19 nt, Human
ugcucuugggcaauauucu

SEQ ID NO: 1979004 - RNA, 21 nt, Human
ugcucuugggcaauauucucu

SEQ ID NO: 1979005 - RNA, 24 nt, Human
ugcucuugggcaauauucucugua

SEQ ID NO: 1979006 - RNA, 16 nt, Human
ugcucuuucccaccca

SEQ ID NO: 1979007 - RNA, 19 nt, Human
ugcucuuucccacccagcc

SEQ ID NO: 1979008 - RNA, 20 nt, Human
ugcucuuucccacccagccu

SEQ ID NO: 1979009 - RNA, 21 nt, Human
ugcucuuucccacccagccug

SEQ ID NO: 1979010 - RNA, 23 nt, Human
ugcucuccgaccagacaccuuga

SEQ ID NO: 1979011 - RNA, 12 nt, Human
ugcucuccucuu

SEQ ID NO: 1979012 - RNA, 13 nt, Human
ugcuggguguggc

SEQ ID NO: 1979013 - RNA, 22 nt, Human
ugcuggugggcuugucauagcc

SEQ ID NO: 1979014 - RNA, 14 nt, Human
ugcugguaaaauga

SEQ ID NO: 1979015 - RNA, 16 nt, Human
ugcugguaaaaugaag

SEQ ID NO: 1979016 - RNA, 17 nt, Human
ugcugguaaaaugaaga

SEQ ID NO: 1979017 - RNA, 18 nt, Human
ugcugguaaaaugaagaa

SEQ ID NO: 1979018 - RNA, 19 nt, Human
ugcugguaaaaugaagaau

SEQ ID NO: 1979019 - RNA, 20 nt, Human
ugcugggggggauuguaaaa

SEQ ID NO: 1979020 - RNA, 17 nt, Human
ugcugggcuugucugua

SEQ ID NO: 1979021 - RNA, 16 nt, Human
ugcuguuaucccugcc

SEQ ID NO: 1979022 - RNA, 18 nt, Human
ugcuguuacaguuuucuu

SEQ ID NO: 1979023 - RNA, 13 nt, Human
ugcuguuacaugc

SEQ ID NO: 1979024 - RNA, 18 nt, Human
ugcuguguguggcuucug

SEQ ID NO: 1979025 - RNA, 21 nt, Human
ugcuguguguugccugggaca

SEQ ID NO: 1979026 - RNA, 13 nt, Human
ugcuguguuugcu

SEQ ID NO: 1979027 - RNA, 17 nt, Human
ugcuguuacaguuuucu

SEQ ID NO: 1979028 - RNA, 16 nt, Human
ugcuguucaugaaaga

SEQ ID NO: 1979029 - RNA, 17 nt, Human
ugcuguucaugaaagau

SEQ ID NO: 1979030 - RNA, 13 nt, Human
ugcugguuuuagu

SEQ ID NO: 1979031 - RNA, 15 nt, Human
ugcuguaaaagcaag

SEQ ID NO: 1979032 - RNA, 18 nt, Human
ugcuguaacuuucugaaa

SEQ ID NO: 1979033 - RNA, 17 nt, Human
ugcugcauuuaaaagau

SEQ ID NO: 1979034 - RNA, 18 nt, Human
ugcugcauuuaaaagaua

SEQ ID NO: 1979035 - RNA, 19 nt, Human
ugcugcauuuaaaagauac

SEQ ID NO: 1979036 - RNA, 23 nt, Human
ugcugcauuuaaaagauacaguu

SEQ ID NO: 1979037 - RNA, 14 nt, Human
ugcugcauuuaaaa

SEQ ID NO: 1979038 - RNA, 17 nt, Human
ugcugccugcuuuuuau

SEQ ID NO: 1979039 - RNA, 15 nt, Human
ugcugccugcuuuuu

SEQ ID NO: 1979040 - RNA, 19 nt, Human
ugcugccucggauccccuu

SEQ ID NO: 1979041 - RNA, 20 nt, Human
ugcugccucggauccccuuc

SEQ ID NO: 1979042 - RNA, 22 nt, Human
ugcugccucggauccccuuccu

SEQ ID NO: 1979043 - RNA, 24 nt, Human
ugcugggccccugccucucugcag

SEQ ID NO: 1979044 - RNA, 23 nt, Human
ugcugggccccugccucucugca

SEQ ID NO: 1979045 - RNA, 22 nt, Human
ugcugggccccugccucucugc

SEQ ID NO: 1979046 - RNA, 21 nt, Human
ugcugggccccugccucucug

SEQ ID NO: 1979047 - RNA, 19 nt, Human
ugcugggccccugccucuc

SEQ ID NO: 1979048 - RNA, 18 nt, Human
ugcugggccccugccucu

SEQ ID NO: 1979049 - RNA, 17 nt, Human
ugcugggccccugccuc

SEQ ID NO: 1979050 - RNA, 16 nt, Human
ugcugggccccugccu

SEQ ID NO: 1979051 - RNA, 14 nt, Human
ugcugggccccugc

SEQ ID NO: 1979052 - RNA, 19 nt, Human
ugcugcuugaggcaacuca

SEQ ID NO: 1979053 - RNA, 20 nt, Human
ugcugggauuacagguguga

SEQ ID NO: 1979054 - RNA, 12 nt, Human
ugcugcuugagg

SEQ ID NO: 1979055 - RNA, 15 nt, Human
ugcugcuucauguuu

SEQ ID NO: 1979056 - RNA, 21 nt, Human
ugauuggaggggggagguggg

SEQ ID NO: 1979057 - RNA, 22 nt, Human
ugauuggaagggcuuuucaaaa

SEQ ID NO: 1979058 - RNA, 23 nt, Human
ugauuggaagggcuuuucaaaau

SEQ ID NO: 1979059 - RNA, 13 nt, Human
ugauuggaggggg

SEQ ID NO: 1979060 - RNA, 14 nt, Human
ugauugcuuuuaaa

SEQ ID NO: 1979061 - RNA, 16 nt, Human
ugauugcuuuuaaaau

SEQ ID NO: 1979062 - RNA, 17 nt, Human
ugauugcuuuuaaaauu

SEQ ID NO: 1979063 - RNA, 19 nt, Human
ugauugcuuuuaaaauuuu

SEQ ID NO: 1979064 - RNA, 20 nt, Human
ugauugcuuuuaaaauuuua

SEQ ID NO: 1979065 - RNA, 22 nt, Human
ugauugcuuuuaaaauuuuaag

SEQ ID NO: 1979066 - RNA, 19 nt, Human
ugauuggaagggcuuuuca

SEQ ID NO: 1979067 - RNA, 20 nt, Human
ugauuggaagggcuuuucaa

SEQ ID NO: 1979068 - RNA, 20 nt, Human
ugauuggcaggaguuggaag

SEQ ID NO: 1979069 - RNA, 17 nt, Human
ugauugguuucucuucu

SEQ ID NO: 1979070 - RNA, 16 nt, Human
ugauugugucucuugg

SEQ ID NO: 1979071 - RNA, 13 nt, Human
ugauuuaaacuuc

SEQ ID NO: 1979072 - RNA, 21 nt, Human
ugauuuaaacuucuuaacugg

SEQ ID NO: 1979073 - RNA, 11 nt, Human
ugauucucucc

SEQ ID NO: 1979074 - RNA, 12 nt, Human
ugauugaagaaa

SEQ ID NO: 1979075 - RNA, 14 nt, Human
ugauugaagaaaca

SEQ ID NO: 1979076 - RNA, 20 nt, Human
ugauugcagaauuguuuaga

SEQ ID NO: 1979077 - RNA, 18 nt, Human
ugauugaagaaacagcua

SEQ ID NO: 1979078 - RNA, 21 nt, Human
ugauugcagaauuguuuagau

SEQ ID NO: 1979079 - RNA, 21 nt, Human
ugauucagacagcugccuggg

SEQ ID NO: 1979080 - RNA, 20 nt, Human
ugauucagacagcugccugg

SEQ ID NO: 1979081 - RNA, 19 nt, Human
ugauucagacagcugccug

SEQ ID NO: 1979082 - RNA, 18 nt, Human
ugauucagacagcugccu

SEQ ID NO: 1979083 - RNA, 23 nt, Human
ugauucagacagcugccugggau

SEQ ID NO: 1979084 - RNA, 21 nt, Human
ugauucuccugccucagccuc

SEQ ID NO: 1979085 - RNA, 20 nt, Human
ugauucacauguuuucaaau

SEQ ID NO: 1979086 - RNA, 21 nt, Human
ugauucacauguuuucaaaug

SEQ ID NO: 1979087 - RNA, 12 nt, Human
ugauucacagug

SEQ ID NO: 1979088 - RNA, 13 nt, Human
ugauucacauguu

SEQ ID NO: 1979089 - RNA, 14 nt, Human
ugauucacauguuu

SEQ ID NO: 1979090 - RNA, 15 nt, Human
ugauucacauguuuu

SEQ ID NO: 1979091 - RNA, 16 nt, Human
ugauucacauguuuuc

SEQ ID NO: 1979092 - RNA, 17 nt, Human
ugauucacauguuuuca

SEQ ID NO: 1979093 - RNA, 18 nt, Human
ugauucacauguuuucaa

SEQ ID NO: 1979094 - RNA, 19 nt, Human
ugauucacauguuuucaaa

SEQ ID NO: 1979095 - RNA, 16 nt, Human
ugauucagacagcugc

SEQ ID NO: 1979096 - RNA, 15 nt, Human
ugauucagacagcug

SEQ ID NO: 1979097 - RNA, 14 nt, Human
ugauucagacagcu

SEQ ID NO: 1979098 - RNA, 13 nt, Human
ugauucagacagc

SEQ ID NO: 1979099 - RNA, 20 nt, Human
ugauucaacagguuuuccug

SEQ ID NO: 1979100 - RNA, 16 nt, Human
ugauuaccagggacug

SEQ ID NO: 1979101 - RNA, 15 nt, Human
ugauguugaugcaau

SEQ ID NO: 1979102 - RNA, 19 nt, Human
ugauguugaugcaauccuu

SEQ ID NO: 1979103 - RNA, 20 nt, Human
ugauguugacaucacuggca

SEQ ID NO: 1979104 - RNA, 14 nt, Human
ugauguugaugcaa

SEQ ID NO: 1979105 - RNA, 20 nt, Human
ugauguucuuucacccuuuu

SEQ ID NO: 1979106 - RNA, 14 nt, Human
ugauuaguaagucu

SEQ ID NO: 1979107 - RNA, 21 nt, Human
ugauuaguaagucuugccuau

SEQ ID NO: 1979108 - RNA, 13 nt, Human
ugauuauauguca

SEQ ID NO: 1979109 - RNA, 16 nt, Human
ugauguguuaucucuu

SEQ ID NO: 1979110 - RNA, 18 nt, Human
ugauguguugccacuuuc

SEQ ID NO: 1979111 - RNA, 20 nt, Human
ugauguguugccacuuucca

SEQ ID NO: 1979112 - RNA, 22 nt, Human
ugauguguuguucuuggcaaua

SEQ ID NO: 1979113 - RNA, 14 nt, Human
ugauguguuguucu

SEQ ID NO: 1979114 - RNA, 19 nt, Human
ugaugucccaacuuguaaa

SEQ ID NO: 1979115 - RNA, 18 nt, Human
ugaugucagcaguugcug

SEQ ID NO: 1979116 - RNA, 22 nt, Human
ugaugucagcaguugcugguaa

SEQ ID NO: 1979117 - RNA, 23 nt, Human
ugaugucagcaguugcugguaaa

SEQ ID NO: 1979118 - RNA, 18 nt, Human
ugaugcuucuucagagac

SEQ ID NO: 1979119 - RNA, 13 nt, Human
ugaugcuguauuc

SEQ ID NO: 1979120 - RNA, 17 nt, Human
ugaugcuucuucagaga

SEQ ID NO: 1979121 - RNA, 16 nt, Human
ugaugcuucuucagag

SEQ ID NO: 1979122 - RNA, 14 nt, Human
ugaugguuguacau

SEQ ID NO: 1979123 - RNA, 18 nt, Human
ugaugucaauaacaguau

SEQ ID NO: 1979124 - RNA, 13 nt, Human
ugaugguuguaca

SEQ ID NO: 1979125 - RNA, 14 nt, Human
ugaugguuccccug

SEQ ID NO: 1979126 - RNA, 18 nt, Human
ugaucuuugcagacaggc

SEQ ID NO: 1979127 - RNA, 15 nt, Human
ugaugauuucagaaa

SEQ ID NO: 1979128 - RNA, 16 nt, Human
ugaugauuucagaaac

SEQ ID NO: 1979129 - RNA, 18 nt, Human
ugaugcaauccuuacaaa

SEQ ID NO: 1979130 - RNA, 19 nt, Human
ugaugcaauccuuacaaau

SEQ ID NO: 1979131 - RNA, 23 nt, Human
ugaugcaauccuuacaaaugauu

SEQ ID NO: 1979132 - RNA, 16 nt, Human
ugaucuuugcagacag

SEQ ID NO: 1979133 - RNA, 17 nt, Human
ugaugcauuaaaagaaa

SEQ ID NO: 1979134 - RNA, 18 nt, Human
ugaugcauuaaaagaaaa

SEQ ID NO: 1979135 - RNA, 19 nt, Human
ugaugcauuaaaagaaaau

SEQ ID NO: 1979136 - RNA, 21 nt, Human
ugaugcauuaaaagaaaauaa

SEQ ID NO: 1979137 - RNA, 16 nt, Human
ugaugcgcaguugcug

SEQ ID NO: 1979138 - RNA, 21 nt, Human
ugaugccugugaacugaacuc

SEQ ID NO: 1979139 - RNA, 23 nt, Human
ugaugcuacaggauuugaaauug

SEQ ID NO: 1979140 - RNA, 11 nt, Human
ugaugccuggc

SEQ ID NO: 1979141 - RNA, 15 nt, Human
ugaugccugugaacu

SEQ ID NO: 1979142 - RNA, 20 nt, Human
ugaugccugugaacugaacu

SEQ ID NO: 1979143 - RNA, 20 nt, Human
ugaugcuacaggauuugaaa

SEQ ID NO: 1979144 - RNA, 12 nt, Human
ugaucuucacua

SEQ ID NO: 1979145 - RNA, 16 nt, Human
ugaucuuccucugcua

SEQ ID NO: 1979146 - RNA, 17 nt, Human
ugaucuuccucugcuaa

SEQ ID NO: 1979147 - RNA, 15 nt, Human
ugaucuguuauaggu

SEQ ID NO: 1979148 - RNA, 20 nt, Human
ugaucuucuuuauaauucua

SEQ ID NO: 1979149 - RNA, 18 nt, Human
ugaucuuccucugcuaaa

SEQ ID NO: 1979150 - RNA, 20 nt, Human
ugaucuuccucugcuaaauu

SEQ ID NO: 1979151 - RNA, 21 nt, Human
ugaucuuccucugcuaaauug

SEQ ID NO: 1979152 - RNA, 15 nt, Human
ugaucugugggcaca

SEQ ID NO: 1979153 - RNA, 14 nt, Human
ugaucugugccuuu

SEQ ID NO: 1979154 - RNA, 23 nt, Human
ugaucugugccuuuuuuauaucu

SEQ ID NO: 1979155 - RNA, 17 nt, Human
ugaucucucgugauuga

SEQ ID NO: 1979156 - RNA, 17 nt, Human
ugauccacccaccucag

SEQ ID NO: 1979157 - RNA, 18 nt, Human
ugauccacccaccucagc

SEQ ID NO: 1979158 - RNA, 19 nt, Human
ugauccacccaccucagcc

SEQ ID NO: 1979159 - RNA, 19 nt, Human
ugaucauucaccaguacau

SEQ ID NO: 1979160 - RNA, 14 nt, Human
ugaucucauuguuc

SEQ ID NO: 1979161 - RNA, 16 nt, Human
ugauagcaaaaucaag

SEQ ID NO: 1979162 - RNA, 12 nt, Human
ugauaagaaaac

SEQ ID NO: 1979163 - RNA, 14 nt, Human
ugauagcacagacc

SEQ ID NO: 1979164 - RNA, 13 nt, Human
ugauagcacagac

SEQ ID NO: 1979165 - RNA, 17 nt, Human
ugaucaguaguuugcau

SEQ ID NO: 1979166 - RNA, 19 nt, Human
ugaucaguaguuugcauuu

SEQ ID NO: 1979167 - RNA, 18 nt, Human
ugauagcaaauggccuca

SEQ ID NO: 1979168 - RNA, 17 nt, Human
ugauagcaaaaucaaga

SEQ ID NO: 1979169 - RNA, 13 nt, Human
ugauccaagcugg

SEQ ID NO: 1979170 - RNA, 14 nt, Human
ugauccaagcuggu

SEQ ID NO: 1979171 - RNA, 15 nt, Human
ugauccaagcugguc

SEQ ID NO: 1979172 - RNA, 19 nt, Human
ugaguccagaaguuugaga

SEQ ID NO: 1979173 - RNA, 13 nt, Human
ugaguccagaagu

SEQ ID NO: 1979174 - RNA, 21 nt, Human
ugaggugggaggaucucuuga

SEQ ID NO: 1979175 - RNA, 18 nt, Human
ugagguggcaugguccau

SEQ ID NO: 1979176 - RNA, 15 nt, Human
ugagucccaggcuga

SEQ ID NO: 1979177 - RNA, 19 nt, Human
ugagucgaggacagggagg

SEQ ID NO: 1979178 - RNA, 19 nt, Human
ugagucccaggcugagccu

SEQ ID NO: 1979179 - RNA, 18 nt, Human
ugagucuucauguuccca

SEQ ID NO: 1979180 - RNA, 19 nt, Human
ugagucuucauguucccac

SEQ ID NO: 1979181 - RNA, 17 nt, Human
ugagucuguucugguaa

SEQ ID NO: 1979182 - RNA, 14 nt, Human
ugagucuguucugg

SEQ ID NO: 1979183 - RNA, 16 nt, Human
ugagucuguucuggua

SEQ ID NO: 1979184 - RNA, 22 nt, Human
ugagucuuuuuuuuuuaaguga

SEQ ID NO: 1979185 - RNA, 13 nt, Human
ugagugagaauau

SEQ ID NO: 1979186 - RNA, 15 nt, Human
ugagugagaggggag

SEQ ID NO: 1979187 - RNA, 12 nt, Human
ugagucuuuuuu

SEQ ID NO: 1979188 - RNA, 20 nt, Human
ugagucuuuuuuuuuuaagu

SEQ ID NO: 1979189 - RNA, 18 nt, Human
ugagucugaaggcugggu

SEQ ID NO: 1979190 - RNA, 17 nt, Human
ugagucugaaggcuggg

SEQ ID NO: 1979191 - RNA, 15 nt, Human
ugagucugaaggcug

SEQ ID NO: 1979192 - RNA, 13 nt, Human
ugagucugaaggc

SEQ ID NO: 1979193 - RNA, 13 nt, Human
ugaguuuguuucu

SEQ ID NO: 1979194 - RNA, 14 nt, Human
ugaguuuguuucuu

SEQ ID NO: 1979195 - RNA, 19 nt, Human
ugaguuuguuucuuugaau

SEQ ID NO: 1979196 - RNA, 20 nt, Human
ugaguuuguuucuuugaauu

SEQ ID NO: 1979197 - RNA, 22 nt, Human
ugaguuuugggaaguuaaaggg

SEQ ID NO: 1979198 - RNA, 19 nt, Human
ugaguuuugggaaguuaaa

SEQ ID NO: 1979199 - RNA, 17 nt, Human
ugauaacaauguuuuaa

SEQ ID NO: 1979200 - RNA, 20 nt, Human
ugauaacaauguuuuaacaa

SEQ ID NO: 1979201 - RNA, 21 nt, Human
ugauaacaauguuuuaacaag

SEQ ID NO: 1979202 - RNA, 20 nt, Human
ugauaacagggauugauuuu

SEQ ID NO: 1979203 - RNA, 21 nt, Human
ugauaacagggauugauuuua

SEQ ID NO: 1979204 - RNA, 22 nt, Human
ugauaacagggauugauuuuaa

SEQ ID NO: 1979205 - RNA, 23 nt, Human
ugauaacagggauugauuuuaaa

SEQ ID NO: 1979206 - RNA, 20 nt, Human
ugauaaccauagcauuaaua

SEQ ID NO: 1979207 - RNA, 20 nt, Human
ugaguugauagcacagaccc

SEQ ID NO: 1979208 - RNA, 16 nt, Human
ugaguugauagcacag

SEQ ID NO: 1979209 - RNA, 14 nt, Human
ugagugagcaugcc

SEQ ID NO: 1979210 - RNA, 13 nt, Human
ugaguuucuuaga

SEQ ID NO: 1979211 - RNA, 14 nt, Human
ugaguuucuuagac

SEQ ID NO: 1979212 - RNA, 22 nt, Human
ugaguuugggccccagaggcug

SEQ ID NO: 1979213 - RNA, 23 nt, Human
ugaguuugggccccagaggcugg

SEQ ID NO: 1979214 - RNA, 12 nt, Human
ugaggcauuugu

SEQ ID NO: 1979215 - RNA, 23 nt, Human
ugaggcaucgcaauguaagacuc

SEQ ID NO: 1979216 - RNA, 14 nt, Human
ugaggcaguuugag

SEQ ID NO: 1979217 - RNA, 19 nt, Human
ugaggcauuuguuugaacu

SEQ ID NO: 1979218 - RNA, 20 nt, Human
ugaggcauuuguuugaacug

SEQ ID NO: 1979219 - RNA, 17 nt, Human
ugaggcuaguguggugu

SEQ ID NO: 1979220 - RNA, 21 nt, Human
ugaggcauuuguuugaacuga

SEQ ID NO: 1979221 - RNA, 23 nt, Human
ugaggcuagugugguguuuccug

SEQ ID NO: 1979222 - RNA, 23 nt, Human
ugaggcauuuguuugaacugaua

SEQ ID NO: 1979223 - RNA, 20 nt, Human
ugagcuggggaugucucuca

SEQ ID NO: 1979224 - RNA, 13 nt, Human
ugagcugggauga

SEQ ID NO: 1979225 - RNA, 14 nt, Human
ugaggcaggucccc

SEQ ID NO: 1979226 - RNA, 16 nt, Human
ugaggcagguccccag

SEQ ID NO: 1979227 - RNA, 17 nt, Human
ugaggcagguccccaga

SEQ ID NO: 1979228 - RNA, 16 nt, Human
ugaggagcuugaaacc

SEQ ID NO: 1979229 - RNA, 14 nt, Human
ugaggugggagaug

SEQ ID NO: 1979230 - RNA, 13 nt, Human
ugaggugggagga

SEQ ID NO: 1979231 - RNA, 12 nt, Human
ugaggugggagg

SEQ ID NO: 1979232 - RNA, 18 nt, Human
ugaggcuccacuuggucu

SEQ ID NO: 1979233 - RNA, 20 nt, Human
ugaggcuccacuuggucugu

SEQ ID NO: 1979234 - RNA, 14 nt, Human
ugaggcucugcccu

SEQ ID NO: 1979235 - RNA, 13 nt, Human
ugaggcucugccc

SEQ ID NO: 1979236 - RNA, 21 nt, Human
ugagggaagaauaaagagcug

SEQ ID NO: 1979237 - RNA, 17 nt, Human
ugagggaacagagaggu

SEQ ID NO: 1979238 - RNA, 23 nt, Human
ugaggcuccuuaggguuuucucu

SEQ ID NO: 1979239 - RNA, 17 nt, Human
ugagcugcuuuuuuuga

SEQ ID NO: 1979240 - RNA, 18 nt, Human
ugagcugcuuuuuuugaa

SEQ ID NO: 1979241 - RNA, 19 nt, Human
ugagcugcuuuuuuugaaa

SEQ ID NO: 1979242 - RNA, 12 nt, Human
ugagcuccuggg

SEQ ID NO: 1979243 - RNA, 19 nt, Human
ugagccgagaucacgccac

SEQ ID NO: 1979244 - RNA, 18 nt, Human
ugagcccuguccugccua

SEQ ID NO: 1979245 - RNA, 21 nt, Human
ugagccgagaucacgccacug

SEQ ID NO: 1979246 - RNA, 17 nt, Human
ugagccucagcauccug

SEQ ID NO: 1979247 - RNA, 22 nt, Human
ugagccucagcauccuggcacc

SEQ ID NO: 1979248 - RNA, 14 nt, Human
ugagccucagucuc

SEQ ID NO: 1979249 - RNA, 16 nt, Human
ugagcccugaggaggc

SEQ ID NO: 1979250 - RNA, 24 nt, Human
ugagcccuucggaggaccagggcu

SEQ ID NO: 1979251 - RNA, 15 nt, Human
ugagcccuuguuuca

SEQ ID NO: 1979252 - RNA, 18 nt, Human
ugagccucagcauccugg

SEQ ID NO: 1979253 - RNA, 21 nt, Human
ugagccucagcauccuggcac

SEQ ID NO: 1979254 - RNA, 20 nt, Human
ugagcaucaggccaggcccu

SEQ ID NO: 1979255 - RNA, 19 nt, Human
ugagcaucaggccaggccc

SEQ ID NO: 1979256 - RNA, 18 nt, Human
ugagcaucaggccaggcc

SEQ ID NO: 1979257 - RNA, 13 nt, Human
ugagcccccagcu

SEQ ID NO: 1979258 - RNA, 15 nt, Human
ugagcccccagcuuc

SEQ ID NO: 1979259 - RNA, 16 nt, Human
ugagcccccagcuucc

SEQ ID NO: 1979260 - RNA, 17 nt, Human
ugagcccccagcuucca

SEQ ID NO: 1979261 - RNA, 22 nt, Human
ugagcccccagcuuccagcagg

SEQ ID NO: 1979262 - RNA, 19 nt, Human
ugagcagggcucagcgggg

SEQ ID NO: 1979263 - RNA, 14 nt, Human
ugagcagugauauu

SEQ ID NO: 1979264 - RNA, 17 nt, Human
ugagcagugauauucuu

SEQ ID NO: 1979265 - RNA, 20 nt, Human
ugagcagugauauucuuugu

SEQ ID NO: 1979266 - RNA, 22 nt, Human
ugagcagugauauucuuuguua

SEQ ID NO: 1979267 - RNA, 16 nt, Human
ugagcagggcucagcg

SEQ ID NO: 1979268 - RNA, 17 nt, Human
ugagcagggcucagcgg

SEQ ID NO: 1979269 - RNA, 16 nt, Human
ugagcaucaggccagg

SEQ ID NO: 1979270 - RNA, 23 nt, Human
ugagcagugauauucuuuguuaa

SEQ ID NO: 1979271 - RNA, 15 nt, Human
ugagaucagccuggg

SEQ ID NO: 1979272 - RNA, 14 nt, Human
ugagaucagccugg

SEQ ID NO: 1979273 - RNA, 15 nt, Human
ugagaucaaaacggu

SEQ ID NO: 1979274 - RNA, 12 nt, Human
ugagcagggcuc

SEQ ID NO: 1979275 - RNA, 13 nt, Human
ugagcagggcuca

SEQ ID NO: 1979276 - RNA, 14 nt, Human
ugagcagggcucag

SEQ ID NO: 1979277 - RNA, 15 nt, Human
ugagcagggcucagc

SEQ ID NO: 1979278 - RNA, 23 nt, Human
ugagacucgcgacaaugcaaacc

SEQ ID NO: 1979279 - RNA, 22 nt, Human
ugagacucgcgacaaugcaaac

SEQ ID NO: 1979280 - RNA, 21 nt, Human
ugagacucgcgacaaugcaaa

SEQ ID NO: 1979281 - RNA, 20 nt, Human
ugagacucgcgacaaugcaa

SEQ ID NO: 1979282 - RNA, 16 nt, Human
ugagagugaacaaauu

SEQ ID NO: 1979283 - RNA, 17 nt, Human
ugagaaauuuauaaacu

SEQ ID NO: 1979284 - RNA, 17 nt, Human
ugagaacagauaaagau

SEQ ID NO: 1979285 - RNA, 18 nt, Human
ugagaacagauaaagauu

SEQ ID NO: 1979286 - RNA, 23 nt, Human
ugagaacagauaaagauugugug

SEQ ID NO: 1979287 - RNA, 20 nt, Human
ugaccgacagcuuuccagua

SEQ ID NO: 1979288 - RNA, 22 nt, Human
ugaccucagcuuugauauuuca

SEQ ID NO: 1979289 - RNA, 16 nt, Human
ugaccucagcuuugau

SEQ ID NO: 1979290 - RNA, 20 nt, Human
ugaccucaggugauccaccc

SEQ ID NO: 1979291 - RNA, 21 nt, Human
ugaccucaggugauccaccca

SEQ ID NO: 1979292 - RNA, 19 nt, Human
ugagacucgcgacaaugca

SEQ ID NO: 1979293 - RNA, 17 nt, Human
ugaaagccuuagggaag

SEQ ID NO: 1979294 - RNA, 18 nt, Human
ugaaagcccugagcuuuc

SEQ ID NO: 1979295 - RNA, 19 nt, Human
ugaaagauggcugugccuc

SEQ ID NO: 1979296 - RNA, 18 nt, Human
ugaaagauggcugugccu

SEQ ID NO: 1979297 - RNA, 20 nt, Human
ugaaaccccuguaggccuca

SEQ ID NO: 1979298 - RNA, 23 nt, Human
ugaaagaggccaaacaggcccuc

SEQ ID NO: 1979299 - RNA, 15 nt, Human
ugaaagagucuuucu

SEQ ID NO: 1979300 - RNA, 23 nt, Human
ugaaagggaguauuacaaaaaca

SEQ ID NO: 1979301 - RNA, 13 nt, Human
ugaaagggcccag

SEQ ID NO: 1979302 - RNA, 22 nt, Human
ugaaagccuuagggaagcuggc

SEQ ID NO: 1979303 - RNA, 20 nt, Human
ugaaaggcaguagucauuuu

SEQ ID NO: 1979304 - RNA, 11 nt, Human
ugaaaggcuuu

SEQ ID NO: 1979305 - RNA, 15 nt, Human
ugaaaggcuuuucaa

SEQ ID NO: 1979306 - RNA, 21 nt, Human
ugaaaggcuuuucaaccacaa

SEQ ID NO: 1979307 - RNA, 19 nt, Human
ugaaaauuuugauguuuua

SEQ ID NO: 1979308 - RNA, 21 nt, Human
ugaaaauuuugauguuuuaag

SEQ ID NO: 1979309 - RNA, 13 nt, Human
ugaaaauuuugau

SEQ ID NO: 1979310 - RNA, 20 nt, Human
ugaaaagcuccauuuuuagu

SEQ ID NO: 1979311 - RNA, 14 nt, Human
ugaaacauuuuguc

SEQ ID NO: 1979312 - RNA, 19 nt, Human
ugaaacauugcuuuuaaaa

SEQ ID NO: 1979313 - RNA, 21 nt, Human
ugaaacauugcuuuuaaaacu

SEQ ID NO: 1979314 - RNA, 18 nt, Human
ugaaaccaaauguaacua

SEQ ID NO: 1979315 - RNA, 17 nt, Human
ugaaaucaguaaacacu

SEQ ID NO: 1979316 - RNA, 16 nt, Human
ugaaaucaguuacucu

SEQ ID NO: 1979317 - RNA, 17 nt, Human
ugaaaucaguuacucuu

SEQ ID NO: 1979318 - RNA, 19 nt, Human
ugaaaucaguaaacacugu

SEQ ID NO: 1979319 - RNA, 20 nt, Human
ugaaaucaguaaacacugug

SEQ ID NO: 1979320 - RNA, 22 nt, Human
ugaaaucaguaaacacugugua

SEQ ID NO: 1979321 - RNA, 17 nt, Human
ugaaaucauauuuggaa

SEQ ID NO: 1979322 - RNA, 13 nt, Human
ugaaaugucaacc

SEQ ID NO: 1979323 - RNA, 12 nt, Human
ugaaaugugugu

SEQ ID NO: 1979324 - RNA, 14 nt, Human
ugaaauguguguga

SEQ ID NO: 1979325 - RNA, 16 nt, Human
ugaaaugugugugaug

SEQ ID NO: 1979326 - RNA, 17 nt, Human
ugaaaugugugugaugu

SEQ ID NO: 1979327 - RNA, 19 nt, Human
ugaaaugugugugauguga

SEQ ID NO: 1979328 - RNA, 20 nt, Human
ugaaaugugugugaugugac

SEQ ID NO: 1979329 - RNA, 21 nt, Human
ugaaaugugugugaugugaca

SEQ ID NO: 1979330 - RNA, 22 nt, Human
ugaaaugugugugaugugacau

SEQ ID NO: 1979331 - RNA, 24 nt, Human
ugaaaugugugugaugugacauuu

SEQ ID NO: 1979332 - RNA, 12 nt, Human
ugaaauuacccu

SEQ ID NO: 1979333 - RNA, 12 nt, Human
ugaaauuauuca

SEQ ID NO: 1979334 - RNA, 14 nt, Human
ugaaauucacaaag

SEQ ID NO: 1979335 - RNA, 18 nt, Human
ugaaauucacaaaguuaa

SEQ ID NO: 1979336 - RNA, 20 nt, Human
ugaacauugguucuuucauu

SEQ ID NO: 1979337 - RNA, 12 nt, Human
ugaacauugcau

SEQ ID NO: 1979338 - RNA, 22 nt, Human
ugaacauugcauauaacuuaua

SEQ ID NO: 1979339 - RNA, 22 nt, Human
ugaaccaagaacuuuccaggaa

SEQ ID NO: 1979340 - RNA, 19 nt, Human
ugaaccacaucuugcucug

SEQ ID NO: 1979341 - RNA, 23 nt, Human
ugaaccacaucuugcucugcuga

SEQ ID NO: 1979342 - RNA, 17 nt, Human
ugaaccaccacacccag

SEQ ID NO: 1979343 - RNA, 20 nt, Human
ugaaccaccacacccagccc

SEQ ID NO: 1979344 - RNA, 16 nt, Human
ugaacuccuggccuca

SEQ ID NO: 1979345 - RNA, 15 nt, Human
ugaacagcggcugga

SEQ ID NO: 1979346 - RNA, 19 nt, Human
ugaacagaggccacauuac

SEQ ID NO: 1979347 - RNA, 21 nt, Human
ugaacagaugaccccugccca

SEQ ID NO: 1979348 - RNA, 21 nt, Human
ugaacagcggcuggacuugga

SEQ ID NO: 1979349 - RNA, 22 nt, Human
ugaacagcggcuggacuuggag

SEQ ID NO: 1979350 - RNA, 19 nt, Human
ugaacaguuguguuugaag

SEQ ID NO: 1979351 - RNA, 12 nt, Human
ugaacagugcac

SEQ ID NO: 1979352 - RNA, 19 nt, Human
ugaacaggugggugucugc

SEQ ID NO: 1979353 - RNA, 15 nt, Human
ugaacaagcauucuc

SEQ ID NO: 1979354 - RNA, 15 nt, Human
ugaacaagucccugu

SEQ ID NO: 1979355 - RNA, 21 nt, Human
ucuuucagccaagaauucuua

SEQ ID NO: 1979356 - RNA, 20 nt, Human
ucuuucagccaagaauucuu

SEQ ID NO: 1979357 - RNA, 19 nt, Human
ucuuucagccaagaauucu

SEQ ID NO: 1979358 - RNA, 16 nt, Human
ucuuucagccaagaau

SEQ ID NO: 1979359 - RNA, 13 nt, Human
ucuuuccaaagua

SEQ ID NO: 1979360 - RNA, 14 nt, Human
ucuuuccaaaguac

SEQ ID NO: 1979361 - RNA, 18 nt, Human
ucuuucacucacaucuuu

SEQ ID NO: 1979362 - RNA, 21 nt, Human
ucuuuccacuccuccuagcca

SEQ ID NO: 1979363 - RNA, 22 nt, Human
ucuuuccacuccuccuagccac

SEQ ID NO: 1979364 - RNA, 21 nt, Human
ucuuucauuugcuuuggaagu

SEQ ID NO: 1979365 - RNA, 17 nt, Human
ucuuuccaaaguacacu

SEQ ID NO: 1979366 - RNA, 22 nt, Human
ucuuucuucuucaaaccuuugu

SEQ ID NO: 1979367 - RNA, 14 nt, Human
ucuuucuugcuccc

SEQ ID NO: 1979368 - RNA, 18 nt, Human
ucuuucuugcucccugac

SEQ ID NO: 1979369 - RNA, 19 nt, Human
ucuuucuugcucccugacu

SEQ ID NO: 1979370 - RNA, 16 nt, Human
ucuuuccauaauaaaa

SEQ ID NO: 1979371 - RNA, 15 nt, Human
ucuuuccauauccau

SEQ ID NO: 1979372 - RNA, 16 nt, Human
ucuuuccauauccaua

SEQ ID NO: 1979373 - RNA, 13 nt, Human
ucuuuccacucug

SEQ ID NO: 1979374 - RNA, 14 nt, Human
ucuuuccacucugg

SEQ ID NO: 1979375 - RNA, 15 nt, Human
ucuuuccacucugga

SEQ ID NO: 1979376 - RNA, 16 nt, Human
ucuuuccacucuggau

SEQ ID NO: 1979377 - RNA, 17 nt, Human
ucuuuccacucuggauu

SEQ ID NO: 1979378 - RNA, 23 nt, Human
ucuuuccacucuggauucagccu

SEQ ID NO: 1979379 - RNA, 20 nt, Human
ucuuucuugcucccugacug

SEQ ID NO: 1979380 - RNA, 18 nt, Human
ucuuugcaguucccaucu

SEQ ID NO: 1979381 - RNA, 21 nt, Human
ucuuuggaaaaggaagguagu

SEQ ID NO: 1979382 - RNA, 17 nt, Human
ucuuuggacacucacac

SEQ ID NO: 1979383 - RNA, 13 nt, Human
ucuuugauguguu

SEQ ID NO: 1979384 - RNA, 14 nt, Human
ucuuugaucaugaa

SEQ ID NO: 1979385 - RNA, 20 nt, Human
ucuuugaucaugaauaacug

SEQ ID NO: 1979386 - RNA, 14 nt, Human
ucuuugauguguug

SEQ ID NO: 1979387 - RNA, 16 nt, Human
ucuuugauguguuguu

SEQ ID NO: 1979388 - RNA, 16 nt, Human
ucuuugauaacaggga

SEQ ID NO: 1979389 - RNA, 11 nt, Human
ucuuucuuuuu

SEQ ID NO: 1979390 - RNA, 20 nt, Human
ucuuugaaaauaguuauuca

SEQ ID NO: 1979391 - RNA, 19 nt, Human
ucuuugaaacaugcuugug

SEQ ID NO: 1979392 - RNA, 13 nt, Human
ucuuugauucugu

SEQ ID NO: 1979393 - RNA, 22 nt, Human
ucuuugcaaaaauccaaauauu

SEQ ID NO: 1979394 - RNA, 14 nt, Human
ucuuugcaguuccc

SEQ ID NO: 1979395 - RNA, 12 nt, Human
ucuuugccaagu

SEQ ID NO: 1979396 - RNA, 23 nt, Human
ucuugcaauggcagccuuggcaa

SEQ ID NO: 1979397 - RNA, 17 nt, Human
ucuccucuugccacugc

SEQ ID NO: 1979398 - RNA, 20 nt, Human
ucuccucugcugcuggcugg

SEQ ID NO: 1979399 - RNA, 16 nt, Human
ucucccuucauccuuc

SEQ ID NO: 1979400 - RNA, 13 nt, Human
ucuccucuugcca

SEQ ID NO: 1979401 - RNA, 16 nt, Human
ucuccucuugccacug

SEQ ID NO: 1979402 - RNA, 15 nt, Human
ucuugcaugaggcua

SEQ ID NO: 1979403 - RNA, 23 nt, Human
ucuuucacccuuuucuguuugcu

SEQ ID NO: 1979404 - RNA, 18 nt, Human
ucuuucaagggcuuuccu

SEQ ID NO: 1979405 - RNA, 20 nt, Human
ucuuucaagggcuuuccugu

SEQ ID NO: 1979406 - RNA, 21 nt, Human
ucuuucaagggcuuuccugug

SEQ ID NO: 1979407 - RNA, 17 nt, Human
ucuuucacauuuaaaua

SEQ ID NO: 1979408 - RNA, 20 nt, Human
ucuuucaacaguuucaaaau

SEQ ID NO: 1979409 - RNA, 17 nt, Human
ucuuucaacucauugca

SEQ ID NO: 1979410 - RNA, 16 nt, Human
ucuuguuuugcuuccc

SEQ ID NO: 1979411 - RNA, 16 nt, Human
ucuuguuuuuaaguuu

SEQ ID NO: 1979412 - RNA, 17 nt, Human
ucuuguuuuuaaguuug

SEQ ID NO: 1979413 - RNA, 21 nt, Human
ucuuguuuuuaaguuugcacu

SEQ ID NO: 1979414 - RNA, 23 nt, Human
ucuuguuuuuaaguuugcacuca

SEQ ID NO: 1979415 - RNA, 21 nt, Human
ucuuguguguuuauugucaaa

SEQ ID NO: 1979416 - RNA, 16 nt, Human
ucuuguguguuuauug

SEQ ID NO: 1979417 - RNA, 14 nt, Human
ucuugcuugaacuu

SEQ ID NO: 1979418 - RNA, 11 nt, Human
ucuuguugguu

SEQ ID NO: 1979419 - RNA, 14 nt, Human
ucuuguuucucccg

SEQ ID NO: 1979420 - RNA, 13 nt, Human
ucuuguuuugcuu

SEQ ID NO: 1979421 - RNA, 13 nt, Human
ugacagaggcagc

SEQ ID NO: 1979422 - RNA, 16 nt, Human
ugacagacagcccucc

SEQ ID NO: 1979423 - RNA, 20 nt, Human
ugacagacacaggcccggcu

SEQ ID NO: 1979424 - RNA, 23 nt, Human
ugacagacacaggcccggcucca

SEQ ID NO: 1979425 - RNA, 14 nt, Human
ugacagaggcagcc

SEQ ID NO: 1979426 - RNA, 15 nt, Human
ugacagaggcagccc

SEQ ID NO: 1979427 - RNA, 16 nt, Human
ugacagaggcagcccc

SEQ ID NO: 1979428 - RNA, 17 nt, Human
ugacagaggcagcccca

SEQ ID NO: 1979429 - RNA, 18 nt, Human
ugacagaggcagccccau

SEQ ID NO: 1979430 - RNA, 23 nt, Human
ugacagaggcagccccauucugc

SEQ ID NO: 1979431 - RNA, 14 nt, Human
ugacagagugagac

SEQ ID NO: 1979432 - RNA, 17 nt, Human
ugacagagugagacucu

SEQ ID NO: 1979433 - RNA, 17 nt, Human
ugacauacauccaacau

SEQ ID NO: 1979434 - RNA, 23 nt, Human
ugacauaaguauuuaauucaugu

SEQ ID NO: 1979435 - RNA, 19 nt, Human
ugacagagugagacucugu

SEQ ID NO: 1979436 - RNA, 22 nt, Human
ugacagagggauggaggaagaa

SEQ ID NO: 1979437 - RNA, 20 nt, Human
ugacagaaaauauguauuaa

SEQ ID NO: 1979438 - RNA, 23 nt, Human
ugacagaaaauauguauuaacac

SEQ ID NO: 1979439 - RNA, 14 nt, Human
ugacagaaaauaug

SEQ ID NO: 1979440 - RNA, 19 nt, Human
ugacagaaaauauguauua

SEQ ID NO: 1979441 - RNA, 14 nt, Human
ugacaauguuuaca

SEQ ID NO: 1979442 - RNA, 18 nt, Human
ugacaaggauugcuacug

SEQ ID NO: 1979443 - RNA, 14 nt, Human
ugacaagcuggcuu

SEQ ID NO: 1979444 - RNA, 21 nt, Human
ugacaagcuggcuuacacugg

SEQ ID NO: 1979445 - RNA, 23 nt, Human
ugacaagcuggcuuacacuggca

SEQ ID NO: 1979446 - RNA, 14 nt, Human
ugaauuggaaugca

SEQ ID NO: 1979447 - RNA, 15 nt, Human
ugaauuggaaugcac

SEQ ID NO: 1979448 - RNA, 20 nt, Human
ugaccacugcagaagacagu

SEQ ID NO: 1979449 - RNA, 19 nt, Human
ugaccagcaccaucucucc

SEQ ID NO: 1979450 - RNA, 15 nt, Human
ugacaugucuuuucu

SEQ ID NO: 1979451 - RNA, 13 nt, Human
ugacaugucuuuu

SEQ ID NO: 1979452 - RNA, 18 nt, Human
ugacauguauuuuuuccu

SEQ ID NO: 1979453 - RNA, 15 nt, Human
ugacauauuggcucu

SEQ ID NO: 1979454 - RNA, 20 nt, Human
ugaccgugaggccagagaca

SEQ ID NO: 1979455 - RNA, 16 nt, Human
ugaccgugaggccaga

SEQ ID NO: 1979456 - RNA, 14 nt, Human
ugaccgugaggcca

SEQ ID NO: 1979457 - RNA, 13 nt, Human
ugaccgugaggcc

SEQ ID NO: 1979458 - RNA, 18 nt, Human
ugaccgacagcuuuccag

SEQ ID NO: 1979459 - RNA, 19 nt, Human
ugaccauucuccaccugcc

SEQ ID NO: 1979460 - RNA, 13 nt, Human
ugaccauaaaauu

SEQ ID NO: 1979461 - RNA, 14 nt, Human
ugaccaucauuuca

SEQ ID NO: 1979462 - RNA, 18 nt, Human
ugaccauucuccaccugc

SEQ ID NO: 1979463 - RNA, 17 nt, Human
ugaccauucuccaccug

SEQ ID NO: 1979464 - RNA, 16 nt, Human
ugaccauucuccaccu

SEQ ID NO: 1979465 - RNA, 20 nt, Human
ugaccagcaccaucucuccu

SEQ ID NO: 1979466 - RNA, 22 nt, Human
ugaccaggcaccuccccucccg

SEQ ID NO: 1979467 - RNA, 19 nt, Human
ugaccaguggcuauggccu

SEQ ID NO: 1979468 - RNA, 21 nt, Human
ugaaguucugccucugaugua

SEQ ID NO: 1979469 - RNA, 22 nt, Human
ugaaguucugccucugauguau

SEQ ID NO: 1979470 - RNA, 20 nt, Human
ugaauaaacuagauuacauu

SEQ ID NO: 1979471 - RNA, 12 nt, Human
ugaaguuauauu

SEQ ID NO: 1979472 - RNA, 13 nt, Human
ugaaguuauauuu

SEQ ID NO: 1979473 - RNA, 16 nt, Human
ugaaguuauauuuccu

SEQ ID NO: 1979474 - RNA, 19 nt, Human
ugaaguuauguguauguga

SEQ ID NO: 1979475 - RNA, 16 nt, Human
ugaagugccuuaaaua

SEQ ID NO: 1979476 - RNA, 10 nt, Human
ugaaguguug

SEQ ID NO: 1979477 - RNA, 17 nt, Human
ugaaggccccgcccagg

SEQ ID NO: 1979478 - RNA, 18 nt, Human
ugaaggcagaaagcaaaa

SEQ ID NO: 1979479 - RNA, 16 nt, Human
ugaaggccacuugagu

SEQ ID NO: 1979480 - RNA, 16 nt, Human
ugaagucaugcucccc

SEQ ID NO: 1979481 - RNA, 22 nt, Human
ugaagucaugcuccccugugcc

SEQ ID NO: 1979482 - RNA, 13 nt, Human
ugaagugccuuaa

SEQ ID NO: 1979483 - RNA, 16 nt, Human
ugaaggccccgcccag

SEQ ID NO: 1979484 - RNA, 15 nt, Human
ugaaggccccgccca

SEQ ID NO: 1979485 - RNA, 15 nt, Human
ugaaggcagaaagca

SEQ ID NO: 1979486 - RNA, 16 nt, Human
ugaaggagagcccuuc

SEQ ID NO: 1979487 - RNA, 21 nt, Human
ugaaggaccuucacucuaaga

SEQ ID NO: 1979488 - RNA, 22 nt, Human
ugaaggacauugcggacagcca

SEQ ID NO: 1979489 - RNA, 19 nt, Human
ugaaggacauugcggacag

SEQ ID NO: 1979490 - RNA, 20 nt, Human
ugaaggacauugcggacagc

SEQ ID NO: 1979491 - RNA, 15 nt, Human
ugaagauacugaaau

SEQ ID NO: 1979492 - RNA, 16 nt, Human
ugaagauacugaaaua

SEQ ID NO: 1979493 - RNA, 18 nt, Human
ugaagauacugaaauaaa

SEQ ID NO: 1979494 - RNA, 12 nt, Human
ugaagauacuuu

SEQ ID NO: 1979495 - RNA, 14 nt, Human
ugaagauacuuugu

SEQ ID NO: 1979496 - RNA, 15 nt, Human
ugaagauacuuugua

SEQ ID NO: 1979497 - RNA, 20 nt, Human
ugaaggaauaaauugcuccu

SEQ ID NO: 1979498 - RNA, 16 nt, Human
ugaagauacuuuguau

SEQ ID NO: 1979499 - RNA, 17 nt, Human
ugaagauacuuuguauu

SEQ ID NO: 1979500 - RNA, 19 nt, Human
ugaagauacuuuguauugu

SEQ ID NO: 1979501 - RNA, 17 nt, Human
ugaacuccuggccucaa

SEQ ID NO: 1979502 - RNA, 16 nt, Human
ugaacucugacaacag

SEQ ID NO: 1979503 - RNA, 14 nt, Human
ugaacucugagaga

SEQ ID NO: 1979504 - RNA, 16 nt, Human
ugaacauaauucuuau

SEQ ID NO: 1979505 - RNA, 12 nt, Human
ugaacucugaga

SEQ ID NO: 1979506 - RNA, 14 nt, Human
ugaagauacugaaa

SEQ ID NO: 1979507 - RNA, 17 nt, Human
ugaauugacuuauuuca

SEQ ID NO: 1979508 - RNA, 17 nt, Human
ugaauugagccuaaaaa

SEQ ID NO: 1979509 - RNA, 18 nt, Human
ugaauugagccuaaaaau

SEQ ID NO: 1979510 - RNA, 20 nt, Human
ugaauugagccuaaaaauaa

SEQ ID NO: 1979511 - RNA, 19 nt, Human
ugaauucaccacagacuuu

SEQ ID NO: 1979512 - RNA, 13 nt, Human
ugaauuaugaaac

SEQ ID NO: 1979513 - RNA, 15 nt, Human
ugaauuaugaaacuu

SEQ ID NO: 1979514 - RNA, 17 nt, Human
ugaauuaugaaacuuuu

SEQ ID NO: 1979515 - RNA, 16 nt, Human
ugaauuauuuucucuc

SEQ ID NO: 1979516 - RNA, 13 nt, Human
ugaauuacuaacu

SEQ ID NO: 1979517 - RNA, 15 nt, Human
ugaauuacuaacuuc

SEQ ID NO: 1979518 - RNA, 16 nt, Human
ugaauuacuaacuucu

SEQ ID NO: 1979519 - RNA, 18 nt, Human
ugaauuacuaacuucuaa

SEQ ID NO: 1979520 - RNA, 19 nt, Human
ugaauuacuaacuucuaaa

SEQ ID NO: 1979521 - RNA, 20 nt, Human
ugaauuacuaacuucuaaaa

SEQ ID NO: 1979522 - RNA, 21 nt, Human
ugaauuacuaacuucuaaaac

SEQ ID NO: 1979523 - RNA, 21 nt, Human
ugaaugacuuccccaauaucu

SEQ ID NO: 1979524 - RNA, 22 nt, Human
ugaaugacuuccccaauaucuu

SEQ ID NO: 1979525 - RNA, 17 nt, Human
ugaaugacuaagaggaa

SEQ ID NO: 1979526 - RNA, 23 nt, Human
ugaaucauuuuaccuuugacaaa

SEQ ID NO: 1979527 - RNA, 22 nt, Human
ugaaucauuuuaccuuugacaa

SEQ ID NO: 1979528 - RNA, 14 nt, Human
ugaauaaagacacc

SEQ ID NO: 1979529 - RNA, 15 nt, Human
ugaauaaagacaccu

SEQ ID NO: 1979530 - RNA, 13 nt, Human
ugaaucuuuaauu

SEQ ID NO: 1979531 - RNA, 17 nt, Human
ugaauccaaaagaaaaa

SEQ ID NO: 1979532 - RNA, 18 nt, Human
ugaauccaaaagaaaaac

SEQ ID NO: 1979533 - RNA, 21 nt, Human
ugaauccaaaagaaaaacagc

SEQ ID NO: 1979534 - RNA, 15 nt, Human
ucuccagccccugga

SEQ ID NO: 1979535 - RNA, 14 nt, Human
ucuccagccccugg

SEQ ID NO: 1979536 - RNA, 13 nt, Human
ucuccagccccug

SEQ ID NO: 1979537 - RNA, 12 nt, Human
ucuccagccccu

SEQ ID NO: 1979538 - RNA, 11 nt, Human
ucuccagcagg

SEQ ID NO: 1979539 - RNA, 14 nt, Human
ucuccagcaggccc

SEQ ID NO: 1979540 - RNA, 14 nt, Human
ucuccacugccuuc

SEQ ID NO: 1979541 - RNA, 18 nt, Human
ucuccagccccuggaugc

SEQ ID NO: 1979542 - RNA, 16 nt, Human
ucuccagccccuggau

SEQ ID NO: 1979543 - RNA, 22 nt, Human
ucuccagccccuggaugcagcc

SEQ ID NO: 1979544 - RNA, 14 nt, Human
ucucccucccuugg

SEQ ID NO: 1979545 - RNA, 23 nt, Human
ucucccucagucuggcccuuccu

SEQ ID NO: 1979546 - RNA, 18 nt, Human
ucucccucagucuggccc

SEQ ID NO: 1979547 - RNA, 11 nt, Human
ucuccaggcug

SEQ ID NO: 1979548 - RNA, 13 nt, Human
ucucccccacccu

SEQ ID NO: 1979549 - RNA, 20 nt, Human
ucucccccacccuuguucca

SEQ ID NO: 1979550 - RNA, 21 nt, Human
ucucccccacccuuguuccag

SEQ ID NO: 1979551 - RNA, 23 nt, Human
ucucccccacccuuguuccaguu

SEQ ID NO: 1979552 - RNA, 12 nt, Human
ucucccccagcc

SEQ ID NO: 1979553 - RNA, 13 nt, Human
ucuccccucagag

SEQ ID NO: 1979554 - RNA, 18 nt, Human
ucuccccucagagugcaa

SEQ ID NO: 1979555 - RNA, 13 nt, Human
ucucccccagccc

SEQ ID NO: 1979556 - RNA, 16 nt, Human
ucuccccgcaguguuu

SEQ ID NO: 1979557 - RNA, 16 nt, Human
ucuccaccugccaggg

SEQ ID NO: 1979558 - RNA, 15 nt, Human
ucuccaccugccagg

SEQ ID NO: 1979559 - RNA, 14 nt, Human
ucuccaccugccag

SEQ ID NO: 1979560 - RNA, 19 nt, Human
ucuccaccugccagggaca

SEQ ID NO: 1979561 - RNA, 17 nt, Human
ucuccaccugccaggga

SEQ ID NO: 1979562 - RNA, 22 nt, Human
ucuccaccugccagggacagag

SEQ ID NO: 1979563 - RNA, 13 nt, Human
ucuccacuccaga

SEQ ID NO: 1979564 - RNA, 13 nt, Human
ucucaugccucag

SEQ ID NO: 1979565 - RNA, 13 nt, Human
ucuccacccugcu

SEQ ID NO: 1979566 - RNA, 16 nt, Human
ucucaugccucagccu

SEQ ID NO: 1979567 - RNA, 19 nt, Human
ucucaugccucagccuccu

SEQ ID NO: 1979568 - RNA, 17 nt, Human
ucuccacccugcucucc

SEQ ID NO: 1979569 - RNA, 14 nt, Human
ucuccacccugcuc

SEQ ID NO: 1979570 - RNA, 16 nt, Human
ucuccacccugcucuc

SEQ ID NO: 1979571 - RNA, 22 nt, Human
ucucaucuugacagagccugcc

SEQ ID NO: 1979572 - RNA, 17 nt, Human
ucucaucuugacagagc

SEQ ID NO: 1979573 - RNA, 13 nt, Human
ucucagucucaca

SEQ ID NO: 1979574 - RNA, 18 nt, Human
ucucauacucaccucacc

SEQ ID NO: 1979575 - RNA, 16 nt, Human
ucucauacucaccuca

SEQ ID NO: 1979576 - RNA, 19 nt, Human
ucuaugggacucaaugcac

SEQ ID NO: 1979577 - RNA, 12 nt, Human
ucuaugggacuc

SEQ ID NO: 1979578 - RNA, 13 nt, Human
ucuaugggacuca

SEQ ID NO: 1979579 - RNA, 23 nt, Human
ucucaguccaugaagauguagag

SEQ ID NO: 1979580 - RNA, 12 nt, Human
ucucagucucac

SEQ ID NO: 1979581 - RNA, 16 nt, Human
ucuacugggagccuac

SEQ ID NO: 1979582 - RNA, 19 nt, Human
ucuacugggagccuaccca

SEQ ID NO: 1979583 - RNA, 15 nt, Human
ucuacuuccaagacu

SEQ ID NO: 1979584 - RNA, 20 nt, Human
ucuacuucauguaauccaaa

SEQ ID NO: 1979585 - RNA, 14 nt, Human
ucuaccuuccugca

SEQ ID NO: 1979586 - RNA, 14 nt, Human
ucuaccuucauaag

SEQ ID NO: 1979587 - RNA, 17 nt, Human
ucuacaaauuuuucugu

SEQ ID NO: 1979588 - RNA, 21 nt, Human
ucuacacauauaaauugucuu

SEQ ID NO: 1979589 - RNA, 15 nt, Human
ucuacagaggccaug

SEQ ID NO: 1979590 - RNA, 16 nt, Human
ucuacagaggccaugg

SEQ ID NO: 1979591 - RNA, 13 nt, Human
ucuagugcuguga

SEQ ID NO: 1979592 - RNA, 14 nt, Human
ucuagugcugugaa

SEQ ID NO: 1979593 - RNA, 15 nt, Human
ucuagugcugugaaa

SEQ ID NO: 1979594 - RNA, 16 nt, Human
ucuagugcugugaaaa

SEQ ID NO: 1979595 - RNA, 19 nt, Human
ucuagugcugugaaaaaaa

SEQ ID NO: 1979596 - RNA, 23 nt, Human
ucuagugcugugaaaaaaaaaau

SEQ ID NO: 1979597 - RNA, 21 nt, Human
ucuaggaagacuuuggaaaga

SEQ ID NO: 1979598 - RNA, 19 nt, Human
ucuaggaagacuuuggaaa

SEQ ID NO: 1979599 - RNA, 16 nt, Human
ucuaggaagacuuugg

SEQ ID NO: 1979600 - RNA, 15 nt, Human
ucuaggaagacuuug

SEQ ID NO: 1979601 - RNA, 14 nt, Human
ucuaugacacaugc

SEQ ID NO: 1979602 - RNA, 17 nt, Human
ucuaugacacaugcaag

SEQ ID NO: 1979603 - RNA, 14 nt, Human
ucuaucaccaagga

SEQ ID NO: 1979604 - RNA, 13 nt, Human
ucuaucauuguug

SEQ ID NO: 1979605 - RNA, 18 nt, Human
ucuaaaggcuaccuuugu

SEQ ID NO: 1979606 - RNA, 17 nt, Human
ucuaaaggcuaccuuug

SEQ ID NO: 1979607 - RNA, 19 nt, Human
ucuaaaggcuaccuuugua

SEQ ID NO: 1979608 - RNA, 20 nt, Human
ucuaaaggcuaccuuuguau

SEQ ID NO: 1979609 - RNA, 16 nt, Human
ucguguccccuauccu

SEQ ID NO: 1979610 - RNA, 22 nt, Human
ucgugucauacucgagucugag

SEQ ID NO: 1979611 - RNA, 17 nt, Human
ucuaaaguaauugguua

SEQ ID NO: 1979612 - RNA, 16 nt, Human
ucuaaaguacugagca

SEQ ID NO: 1979613 - RNA, 16 nt, Human
uccuuagaaaagccau

SEQ ID NO: 1979614 - RNA, 18 nt, Human
ucggacuuagcugggaga

SEQ ID NO: 1979615 - RNA, 15 nt, Human
ucggauccccuuccu

SEQ ID NO: 1979616 - RNA, 13 nt, Human
ucggcacagccug

SEQ ID NO: 1979617 - RNA, 14 nt, Human
ucggcacagccugg

SEQ ID NO: 1979618 - RNA, 13 nt, Human
ucggauccccuuc

SEQ ID NO: 1979619 - RNA, 19 nt, Human
ucggaucagcugagccuuc

SEQ ID NO: 1979620 - RNA, 16 nt, Human
ucggaucaggcuccca

SEQ ID NO: 1979621 - RNA, 12 nt, Human
ucggaguucuuc

SEQ ID NO: 1979622 - RNA, 13 nt, Human
ucggaguucuucu

SEQ ID NO: 1979623 - RNA, 14 nt, Human
ucggaucagcugag

SEQ ID NO: 1979624 - RNA, 13 nt, Human
ucgugacaacacu

SEQ ID NO: 1979625 - RNA, 18 nt, Human
ucgugacaauguuuacaa

SEQ ID NO: 1979626 - RNA, 15 nt, Human
ucgucuuucccaaag

SEQ ID NO: 1979627 - RNA, 15 nt, Human
ucccccuuccaugga

SEQ ID NO: 1979628 - RNA, 21 nt, Human
ucccccuguuucagaggcuca

SEQ ID NO: 1979629 - RNA, 22 nt, Human
ucccuucaaccauuccccaugg

SEQ ID NO: 1979630 - RNA, 16 nt, Human
ucccuuccucuuucca

SEQ ID NO: 1979631 - RNA, 15 nt, Human
ucccuuccucuuucc

SEQ ID NO: 1979632 - RNA, 13 nt, Human
ucccuuccuccau

SEQ ID NO: 1979633 - RNA, 14 nt, Human
uccgccucuugggu

SEQ ID NO: 1979634 - RNA, 15 nt, Human
uccgcagaagcccug

SEQ ID NO: 1979635 - RNA, 13 nt, Human
uccgaguguguuu

SEQ ID NO: 1979636 - RNA, 19 nt, Human
uccgaguguguuucauccu

SEQ ID NO: 1979637 - RNA, 23 nt, Human
uccgaguguguuucauccuuccc

SEQ ID NO: 1979638 - RNA, 15 nt, Human
ucccuuggacauuuu

SEQ ID NO: 1979639 - RNA, 16 nt, Human
ucccuuggacauuuua

SEQ ID NO: 1979640 - RNA, 18 nt, Human
ucccuuggacauuuuaug

SEQ ID NO: 1979641 - RNA, 19 nt, Human
ucccuuggacauuuuaugu

SEQ ID NO: 1979642 - RNA, 21 nt, Human
ucccuuggacauuuuaugucu

SEQ ID NO: 1979643 - RNA, 21 nt, Human
uccuaagcuauucaguaauaa

SEQ ID NO: 1979644 - RNA, 20 nt, Human
uccuaagcuauucaguaaua

SEQ ID NO: 1979645 - RNA, 18 nt, Human
uccgcuuucuacccagcg

SEQ ID NO: 1979646 - RNA, 20 nt, Human
uccgcuuucuacccagcgag

SEQ ID NO: 1979647 - RNA, 16 nt, Human
uccgcuuucuacccag

SEQ ID NO: 1979648 - RNA, 16 nt, Human
uccgcuucccugguuc

SEQ ID NO: 1979649 - RNA, 12 nt, Human
uccgcuucccug

SEQ ID NO: 1979650 - RNA, 13 nt, Human
uccgcuucccugg

SEQ ID NO: 1979651 - RNA, 20 nt, Human
uccgcuccccugcuccuguc

SEQ ID NO: 1979652 - RNA, 15 nt, Human
uccuccauccuccuc

SEQ ID NO: 1979653 - RNA, 12 nt, Human
uccucccaccuc

SEQ ID NO: 1979654 - RNA, 10 nt, Human
uccuccaggu

SEQ ID NO: 1979655 - RNA, 19 nt, Human
uccuccagggcucaacacu

SEQ ID NO: 1979656 - RNA, 14 nt, Human
uccuccaagccagc

SEQ ID NO: 1979657 - RNA, 12 nt, Human
uccuccaagcca

SEQ ID NO: 1979658 - RNA, 14 nt, Human
uccuccaaggacag

SEQ ID NO: 1979659 - RNA, 18 nt, Human
uccucauuagcauuuugc

SEQ ID NO: 1979660 - RNA, 17 nt, Human
uccuaucagaaguuucu

SEQ ID NO: 1979661 - RNA, 22 nt, Human
uccucauucccucgucuuuccc

SEQ ID NO: 1979662 - RNA, 23 nt, Human
uccucauucccucgucuuuccca

SEQ ID NO: 1979663 - RNA, 19 nt, Human
uccuaguucaucccuucuc

SEQ ID NO: 1979664 - RNA, 20 nt, Human
uccuaguucaucccuucucu

SEQ ID NO: 1979665 - RNA, 23 nt, Human
uccuauauuguuuucaguguaca

SEQ ID NO: 1979666 - RNA, 12 nt, Human
uccuaguuccac

SEQ ID NO: 1979667 - RNA, 13 nt, Human
uccuaaggaaccu

SEQ ID NO: 1979668 - RNA, 12 nt, Human
uccuacacagga

SEQ ID NO: 1979669 - RNA, 14 nt, Human
uccuacacaggaca

SEQ ID NO: 1979670 - RNA, 15 nt, Human
uccuacacaggacag

SEQ ID NO: 1979671 - RNA, 16 nt, Human
uccuacacaggacagg

SEQ ID NO: 1979672 - RNA, 17 nt, Human
uccugcccuuaccugcc

SEQ ID NO: 1979673 - RNA, 21 nt, Human
uccugcccugggaggcaguga

SEQ ID NO: 1979674 - RNA, 16 nt, Human
uccugcccugcuguuu

SEQ ID NO: 1979675 - RNA, 11 nt, Human
uccugcccugg

SEQ ID NO: 1979676 - RNA, 12 nt, Human
uccugcccuggg

SEQ ID NO: 1979677 - RNA, 14 nt, Human
uccugcccugggag

SEQ ID NO: 1979678 - RNA, 15 nt, Human
uccugcccugggagg

SEQ ID NO: 1979679 - RNA, 20 nt, Human
uccugcccuuaccugccagg

SEQ ID NO: 1979680 - RNA, 23 nt, Human
uccuggaggcucaaauuuugagu

SEQ ID NO: 1979681 - RNA, 14 nt, Human
uccuggaguucugg

SEQ ID NO: 1979682 - RNA, 16 nt, Human
uccugccuaaggcuga

SEQ ID NO: 1979683 - RNA, 19 nt, Human
uccugccuaaggcugaacu

SEQ ID NO: 1979684 - RNA, 17 nt, Human
uccuggacaggccaggu

SEQ ID NO: 1979685 - RNA, 15 nt, Human
uccuggacaggccag

SEQ ID NO: 1979686 - RNA, 13 nt, Human
uccuguagcccua

SEQ ID NO: 1979687 - RNA, 11 nt, Human
uccuguagccc

SEQ ID NO: 1979688 - RNA, 12 nt, Human
uccuggccucaa

SEQ ID NO: 1979689 - RNA, 19 nt, Human
uccuggccggugugggggc

SEQ ID NO: 1979690 - RNA, 22 nt, Human
uccuggcacuaccaaaggacac

SEQ ID NO: 1979691 - RNA, 16 nt, Human
uccuggcacugcuucc

SEQ ID NO: 1979692 - RNA, 13 nt, Human
uccuggcacugcu

SEQ ID NO: 1979693 - RNA, 23 nt, Human
uccuggcacccggccccugcugg

SEQ ID NO: 1979694 - RNA, 17 nt, Human
uccugccccugagccca

SEQ ID NO: 1979695 - RNA, 18 nt, Human
uccugccccugagcccau

SEQ ID NO: 1979696 - RNA, 10 nt, Human
uccugcccug

SEQ ID NO: 1979697 - RNA, 15 nt, Human
uccugcccacugaua

SEQ ID NO: 1979698 - RNA, 14 nt, Human
uccugccaggcaug

SEQ ID NO: 1979699 - RNA, 13 nt, Human
uccugccaggcau

SEQ ID NO: 1979700 - RNA, 11 nt, Human
uccugccacca

SEQ ID NO: 1979701 - RNA, 16 nt, Human
uccugccaccacgccc

SEQ ID NO: 1979702 - RNA, 19 nt, Human
uccugaggcuccacuuggu

SEQ ID NO: 1979703 - RNA, 20 nt, Human
uccugaggcuccacuugguc

SEQ ID NO: 1979704 - RNA, 21 nt, Human
uccugaggcuccacuuggucu

SEQ ID NO: 1979705 - RNA, 16 nt, Human
uccugcauuugugaaa

SEQ ID NO: 1979706 - RNA, 16 nt, Human
uccuccuccuuccuag

SEQ ID NO: 1979707 - RNA, 18 nt, Human
uccuccuccuuccuaguu

SEQ ID NO: 1979708 - RNA, 16 nt, Human
uccucuuaacuguggu

SEQ ID NO: 1979709 - RNA, 16 nt, Human
uccuccugacacccca

SEQ ID NO: 1979710 - RNA, 13 nt, Human
uccuccugacacc

SEQ ID NO: 1979711 - RNA, 11 nt, Human
uccugagcccc

SEQ ID NO: 1979712 - RNA, 13 nt, Human
uccugagccccca

SEQ ID NO: 1979713 - RNA, 16 nt, Human
uccugagcccccagcu

SEQ ID NO: 1979714 - RNA, 17 nt, Human
uccugagcccccagcuu

SEQ ID NO: 1979715 - RNA, 18 nt, Human
uccugagcccccagcuuc

SEQ ID NO: 1979716 - RNA, 19 nt, Human
uccugagcccccagcuucc

SEQ ID NO: 1979717 - RNA, 21 nt, Human
uccacuuggucugugagaugc

SEQ ID NO: 1979718 - RNA, 17 nt, Human
uccacuuggucugugag

SEQ ID NO: 1979719 - RNA, 14 nt, Human
uccaaaguacacug

SEQ ID NO: 1979720 - RNA, 16 nt, Human
uccaaaguacacuguu

SEQ ID NO: 1979721 - RNA, 19 nt, Human
uccacuuucuagccagagg

SEQ ID NO: 1979722 - RNA, 16 nt, Human
uccaaagguuucaacu

SEQ ID NO: 1979723 - RNA, 23 nt, Human
uccacuuggucugugagaugcua

SEQ ID NO: 1979724 - RNA, 21 nt, Human
uccacuuucuagccagaggag

SEQ ID NO: 1979725 - RNA, 20 nt, Human
uccacuuucuagccagagga

SEQ ID NO: 1979726 - RNA, 18 nt, Human
uccacuuuuccaguauuu

SEQ ID NO: 1979727 - RNA, 23 nt, Human
uccagaaagaaaacuuguauuau

SEQ ID NO: 1979728 - RNA, 24 nt, Human
uccacuuuuuaacucguuugcuga

SEQ ID NO: 1979729 - RNA, 17 nt, Human
uccagaaacacccacag

SEQ ID NO: 1979730 - RNA, 15 nt, Human
uccagaaacuuguuc

SEQ ID NO: 1979731 - RNA, 16 nt, Human
uccagaaacuuguucu

SEQ ID NO: 1979732 - RNA, 17 nt, Human
uccagaaacuuguucuu

SEQ ID NO: 1979733 - RNA, 20 nt, Human
uccagaaacuuguucuucca

SEQ ID NO: 1979734 - RNA, 15 nt, Human
uccaggagcagccac

SEQ ID NO: 1979735 - RNA, 14 nt, Human
uccaggagcagcca

SEQ ID NO: 1979736 - RNA, 13 nt, Human
uccaggagcagcc

SEQ ID NO: 1979737 - RNA, 12 nt, Human
uccaggagcagc

SEQ ID NO: 1979738 - RNA, 20 nt, Human
uccaggggugggacacccug

SEQ ID NO: 1979739 - RNA, 19 nt, Human
uccaggggugggacacccu

SEQ ID NO: 1979740 - RNA, 15 nt, Human
uccagcucuggcaug

SEQ ID NO: 1979741 - RNA, 21 nt, Human
uccagcacaaccuucaagcug

SEQ ID NO: 1979742 - RNA, 14 nt, Human
uccagcaccacacu

SEQ ID NO: 1979743 - RNA, 21 nt, Human
uccagcaauucuccugccuca

SEQ ID NO: 1979744 - RNA, 22 nt, Human
uccagcaauucuccugccucag

SEQ ID NO: 1979745 - RNA, 15 nt, Human
uccauagagagcaag

SEQ ID NO: 1979746 - RNA, 14 nt, Human
uccauagagagcaa

SEQ ID NO: 1979747 - RNA, 21 nt, Human
uccauaaucuggacuccucug

SEQ ID NO: 1979748 - RNA, 14 nt, Human
uccaucaggccacu

SEQ ID NO: 1979749 - RNA, 22 nt, Human
uccaucaagccaagccuccugu

SEQ ID NO: 1979750 - RNA, 17 nt, Human
uccauauuuuuuuccuu

SEQ ID NO: 1979751 - RNA, 18 nt, Human
uccauauuuuuuuccuua

SEQ ID NO: 1979752 - RNA, 22 nt, Human
uccauauuuuuuuccuuacaua

SEQ ID NO: 1979753 - RNA, 23 nt, Human
uccauauuuuuuuccuuacauaa

SEQ ID NO: 1979754 - RNA, 16 nt, Human
uccauauuuuuacaac

SEQ ID NO: 1979755 - RNA, 16 nt, Human
uccauauuuuuuuccu

SEQ ID NO: 1979756 - RNA, 20 nt, Human
uccaugggccauaugaaaag

SEQ ID NO: 1979757 - RNA, 14 nt, Human
uccaugcugccucc

SEQ ID NO: 1979758 - RNA, 15 nt, Human
uccaugcugccucca

SEQ ID NO: 1979759 - RNA, 21 nt, Human
uccaggguucucuuguuuuga

SEQ ID NO: 1979760 - RNA, 22 nt, Human
uccaggggugggacacccugug

SEQ ID NO: 1979761 - RNA, 20 nt, Human
uccagguuuaagcuguuacu

SEQ ID NO: 1979762 - RNA, 15 nt, Human
uccaguaagaucacu

SEQ ID NO: 1979763 - RNA, 17 nt, Human
uccaguaagaucacugu

SEQ ID NO: 1979764 - RNA, 18 nt, Human
uccaguaagaucacuguu

SEQ ID NO: 1979765 - RNA, 19 nt, Human
uccaguaagaucacuguuu

SEQ ID NO: 1979766 - RNA, 20 nt, Human
uccaguaagaucacuguuua

SEQ ID NO: 1979767 - RNA, 19 nt, Human
uccaguuucagaguucuca

SEQ ID NO: 1979768 - RNA, 14 nt, Human
uccaguuuuucaua

SEQ ID NO: 1979769 - RNA, 22 nt, Human
uccauaaucuggacuccucugu

SEQ ID NO: 1979770 - RNA, 21 nt, Human
uccaguaagaucacuguuuag

SEQ ID NO: 1979771 - RNA, 16 nt, Human
uccaguuacuuuccaa

SEQ ID NO: 1979772 - RNA, 15 nt, Human
uccaguuuauuccag

SEQ ID NO: 1979773 - RNA, 13 nt, Human
uccaguuuauucc

SEQ ID NO: 1979774 - RNA, 19 nt, Human
uccccagccagccuggcug

SEQ ID NO: 1979775 - RNA, 20 nt, Human
uccccagccagccuggcugg

SEQ ID NO: 1979776 - RNA, 21 nt, Human
uccccagccagccuggcuggg

SEQ ID NO: 1979777 - RNA, 13 nt, Human
uccccagccagcc

SEQ ID NO: 1979778 - RNA, 14 nt, Human
uccccagccagccu

SEQ ID NO: 1979779 - RNA, 16 nt, Human
uccccagccagccugg

SEQ ID NO: 1979780 - RNA, 14 nt, Human
uccccaggaggcca

SEQ ID NO: 1979781 - RNA, 18 nt, Human
uccccagcccuuccucug

SEQ ID NO: 1979782 - RNA, 20 nt, Human
uccccagcccuuccucugcu

SEQ ID NO: 1979783 - RNA, 21 nt, Human
uccccagcccuuccucugcuc

SEQ ID NO: 1979784 - RNA, 22 nt, Human
uccccagcccuuccucugcucc

SEQ ID NO: 1979785 - RNA, 17 nt, Human
uccccaggaggccagcc

SEQ ID NO: 1979786 - RNA, 17 nt, Human
ucccccagccccauccu

SEQ ID NO: 1979787 - RNA, 16 nt, Human
uccccaggaggccagc

SEQ ID NO: 1979788 - RNA, 15 nt, Human
uccccaggaggccag

SEQ ID NO: 1979789 - RNA, 21 nt, Human
ucccccagccccauccucugu

SEQ ID NO: 1979790 - RNA, 20 nt, Human
ucccccagccccauccucug

SEQ ID NO: 1979791 - RNA, 22 nt, Human
ucccccagccccauccucugua

SEQ ID NO: 1979792 - RNA, 19 nt, Human
uccccagauugcaacaggc

SEQ ID NO: 1979793 - RNA, 20 nt, Human
uccccagauugcaacaggcu

SEQ ID NO: 1979794 - RNA, 22 nt, Human
uccccagauugcaacaggcugg

SEQ ID NO: 1979795 - RNA, 23 nt, Human
uccccagauugcaacaggcuggg

SEQ ID NO: 1979796 - RNA, 20 nt, Human
uccccagcaagugagagcug

SEQ ID NO: 1979797 - RNA, 21 nt, Human
uccccagcaagugagagcugg

SEQ ID NO: 1979798 - RNA, 22 nt, Human
uccccagcaagugagagcuggg

SEQ ID NO: 1979799 - RNA, 20 nt, Human
ucccaugagccucagcaucc

SEQ ID NO: 1979800 - RNA, 13 nt, Human
uccccagauugca

SEQ ID NO: 1979801 - RNA, 18 nt, Human
uccccagauugcaacagg

SEQ ID NO: 1979802 - RNA, 22 nt, Human
ucccaccucucucacuccuuga

SEQ ID NO: 1979803 - RNA, 20 nt, Human
uccaugugggcuaguugggc

SEQ ID NO: 1979804 - RNA, 16 nt, Human
uccauguggacuuagg

SEQ ID NO: 1979805 - RNA, 18 nt, Human
uccauguggacuuaggaa

SEQ ID NO: 1979806 - RNA, 19 nt, Human
uccauguggacuuaggaag

SEQ ID NO: 1979807 - RNA, 20 nt, Human
uccauguggacuuaggaagg

SEQ ID NO: 1979808 - RNA, 13 nt, Human
ucccaccuuggcu

SEQ ID NO: 1979809 - RNA, 16 nt, Human
ucccaccuuggcugca

SEQ ID NO: 1979810 - RNA, 17 nt, Human
ucccaccuuggcugcag

SEQ ID NO: 1979811 - RNA, 20 nt, Human
ucccagcugugcucuggaca

SEQ ID NO: 1979812 - RNA, 18 nt, Human
ucccaccuuggcugcagg

SEQ ID NO: 1979813 - RNA, 15 nt, Human
ucccaucuuccaagg

SEQ ID NO: 1979814 - RNA, 16 nt, Human
ucccaggcgccccuuc

SEQ ID NO: 1979815 - RNA, 21 nt, Human
ucccaucuuuuuaaccucugu

SEQ ID NO: 1979816 - RNA, 21 nt, Human
ucccaucugugaaaggaaaga

SEQ ID NO: 1979817 - RNA, 18 nt, Human
ucccaugagccucagcau

SEQ ID NO: 1979818 - RNA, 19 nt, Human
ucccaugagccucagcauc

SEQ ID NO: 1979819 - RNA, 23 nt, Human
ucccaucuuuuuaaccucuguuc

SEQ ID NO: 1979820 - RNA, 23 nt, Human
ucccagcugugcucuggacaggc

SEQ ID NO: 1979821 - RNA, 19 nt, Human
ucccagcuucggcauuuga

SEQ ID NO: 1979822 - RNA, 20 nt, Human
ucccaggaaagaagcauuuc

SEQ ID NO: 1979823 - RNA, 21 nt, Human
ucccagcugugcucuggacag

SEQ ID NO: 1979824 - RNA, 22 nt, Human
ucccagcugugcucuggacagg

SEQ ID NO: 1979825 - RNA, 24 nt, Human
ucccaggcauuccccaggaggcca

SEQ ID NO: 1979826 - RNA, 23 nt, Human
ucccaggcauuccccaggaggcc

SEQ ID NO: 1979827 - RNA, 17 nt, Human
ucagggaccaccagagg

SEQ ID NO: 1979828 - RNA, 16 nt, Human
ucaggcucuucuccuu

SEQ ID NO: 1979829 - RNA, 21 nt, Human
ucaggcucuucuccuuucaca

SEQ ID NO: 1979830 - RNA, 14 nt, Human
ucaggcugagcuga

SEQ ID NO: 1979831 - RNA, 16 nt, Human
ucagggaagauaaguu

SEQ ID NO: 1979832 - RNA, 20 nt, Human
ucagggaagauaaguuggaa

SEQ ID NO: 1979833 - RNA, 23 nt, Human
ucaggugagaagcagaggaagga

SEQ ID NO: 1979834 - RNA, 16 nt, Human
ucaggugauccaccca

SEQ ID NO: 1979835 - RNA, 12 nt, Human
ucaggucccugc

SEQ ID NO: 1979836 - RNA, 21 nt, Human
ucaggugaaacuccagaugcc

SEQ ID NO: 1979837 - RNA, 14 nt, Human
ucagguccugcuca

SEQ ID NO: 1979838 - RNA, 16 nt, Human
ucagguccugcucagc

SEQ ID NO: 1979839 - RNA, 18 nt, Human
ucagguccugcucagcag

SEQ ID NO: 1979840 - RNA, 23 nt, Human
ucaggugauccacccaccucagc

SEQ ID NO: 1979841 - RNA, 18 nt, Human
ucagguggggcagcuuga

SEQ ID NO: 1979842 - RNA, 19 nt, Human
ucagguggggcagcuugag

SEQ ID NO: 1979843 - RNA, 21 nt, Human
ucagucugauucccaagcucu

SEQ ID NO: 1979844 - RNA, 22 nt, Human
ucagucugauucccaagcucug

SEQ ID NO: 1979845 - RNA, 23 nt, Human
ucagucugauucccaagcucugc

SEQ ID NO: 1979846 - RNA, 15 nt, Human
ucagugaugugccua

SEQ ID NO: 1979847 - RNA, 16 nt, Human
ucagugaugugccuaa

SEQ ID NO: 1979848 - RNA, 22 nt, Human
ucagugaccuacuacgcagagg

SEQ ID NO: 1979849 - RNA, 22 nt, Human
ucagucuuuaaucugagaggcc

SEQ ID NO: 1979850 - RNA, 23 nt, Human
ucagucgccuuucagcaggcagc

SEQ ID NO: 1979851 - RNA, 16 nt, Human
ucagucucccucccuu

SEQ ID NO: 1979852 - RNA, 20 nt, Human
ucagguggggcagcuugagg

SEQ ID NO: 1979853 - RNA, 23 nt, Human
ucaggaagcucagggccuggcuc

SEQ ID NO: 1979854 - RNA, 13 nt, Human
ucagcuuccccag

SEQ ID NO: 1979855 - RNA, 17 nt, Human
ucagcuuccccaguagc

SEQ ID NO: 1979856 - RNA, 19 nt, Human
ucagcucuuggcuccacug

SEQ ID NO: 1979857 - RNA, 23 nt, Human
ucagcucugcaagaauugaagca

SEQ ID NO: 1979858 - RNA, 23 nt, Human
ucagcuccagcucaccagcccca

SEQ ID NO: 1979859 - RNA, 24 nt, Human
ucagcuccagcucaccagccccag

SEQ ID NO: 1979860 - RNA, 17 nt, Human
ucaccuaauuaauuuca

SEQ ID NO: 1979861 - RNA, 16 nt, Human
ucaccuaauuaauuuc

SEQ ID NO: 1979862 - RNA, 20 nt, Human
ucaggaauugcccauuguuu

SEQ ID NO: 1979863 - RNA, 18 nt, Human
ucagcuuccccaguagcu

SEQ ID NO: 1979864 - RNA, 19 nt, Human
ucagcuuccccaguagcug

SEQ ID NO: 1979865 - RNA, 15 nt, Human
ucaggagcccuggga

SEQ ID NO: 1979866 - RNA, 14 nt, Human
ucaggagcccuggg

SEQ ID NO: 1979867 - RNA, 12 nt, Human
ucaggagcccug

SEQ ID NO: 1979868 - RNA, 11 nt, Human
ucaggagcccu

SEQ ID NO: 1979869 - RNA, 20 nt, Human
ucaggaucaaaccccgacca

SEQ ID NO: 1979870 - RNA, 15 nt, Human
ucaggcucuucuccu

SEQ ID NO: 1979871 - RNA, 21 nt, Human
ucaggccugggggcugggcag

SEQ ID NO: 1979872 - RNA, 18 nt, Human
ucaggccgggcagagcac

SEQ ID NO: 1979873 - RNA, 20 nt, Human
ucaggccgggcagagcacag

SEQ ID NO: 1979874 - RNA, 17 nt, Human
ucaugcuguucaugaaa

SEQ ID NO: 1979875 - RNA, 19 nt, Human
ucaucuugacagagccugc

SEQ ID NO: 1979876 - RNA, 21 nt, Human
ucaucuugacagagccugccc

SEQ ID NO: 1979877 - RNA, 16 nt, Human
ucaucuccccaucauu

SEQ ID NO: 1979878 - RNA, 18 nt, Human
ucauccacugugccaugu

SEQ ID NO: 1979879 - RNA, 14 nt, Human
ucauccacugugcc

SEQ ID NO: 1979880 - RNA, 17 nt, Human
ucauccacugugccaug

SEQ ID NO: 1979881 - RNA, 20 nt, Human
ucaguguacauggaauaaca

SEQ ID NO: 1979882 - RNA, 11 nt, Human
ucauagcagcu

SEQ ID NO: 1979883 - RNA, 12 nt, Human
ucauagcagcuu

SEQ ID NO: 1979884 - RNA, 17 nt, Human
ucaucaaugaaugaaug

SEQ ID NO: 1979885 - RNA, 14 nt, Human
ucaucauccuaagc

SEQ ID NO: 1979886 - RNA, 15 nt, Human
ucaucauguuuugau

SEQ ID NO: 1979887 - RNA, 14 nt, Human
uccaaaagaaaaac

SEQ ID NO: 1979888 - RNA, 22 nt, Human
uccaaacaugagguucucucua

SEQ ID NO: 1979889 - RNA, 13 nt, Human
uccaaaagaaaaa

SEQ ID NO: 1979890 - RNA, 12 nt, Human
uccaaaacugcc

SEQ ID NO: 1979891 - RNA, 13 nt, Human
uccaaaacugccu

SEQ ID NO: 1979892 - RNA, 14 nt, Human
uccaaacacaggca

SEQ ID NO: 1979893 - RNA, 22 nt, Human
uccaaacaugguuuauugguga

SEQ ID NO: 1979894 - RNA, 13 nt, Human
uccaaaguacacu

SEQ ID NO: 1979895 - RNA, 14 nt, Human
ucauggugcucaga

SEQ ID NO: 1979896 - RNA, 12 nt, Human
ucauuagcaaaa

SEQ ID NO: 1979897 - RNA, 16 nt, Human
ucauuagcaaaaaaag

SEQ ID NO: 1979898 - RNA, 16 nt, Human
ucauuaggauggcuag

SEQ ID NO: 1979899 - RNA, 17 nt, Human
ucauuagcaaaaaaagu

SEQ ID NO: 1979900 - RNA, 18 nt, Human
ucauuagcaaaaaaaguu

SEQ ID NO: 1979901 - RNA, 20 nt, Human
ucauuagcaaaaaaaguugu

SEQ ID NO: 1979902 - RNA, 22 nt, Human
ucauuagcaaaaaaaguuguau

SEQ ID NO: 1979903 - RNA, 19 nt, Human
ucauuguaauguugugaau

SEQ ID NO: 1979904 - RNA, 21 nt, Human
ucauuuacaagacaacauugu

SEQ ID NO: 1979905 - RNA, 18 nt, Human
ucauuguuggacauuugg

SEQ ID NO: 1979906 - RNA, 15 nt, Human
ucauuguccagagcu

SEQ ID NO: 1979907 - RNA, 22 nt, Human
ucauuguccagagcugcuuccc

SEQ ID NO: 1979908 - RNA, 12 nt, Human
uauuuauaugua

SEQ ID NO: 1979909 - RNA, 14 nt, Human
uauuuauauguaug

SEQ ID NO: 1979910 - RNA, 15 nt, Human
uauuuauauguaugu

SEQ ID NO: 1979911 - RNA, 16 nt, Human
uauuuauauguaugug

SEQ ID NO: 1979912 - RNA, 17 nt, Human
uauuuauauguaugugu

SEQ ID NO: 1979913 - RNA, 18 nt, Human
uauuuauauguauguguu

SEQ ID NO: 1979914 - RNA, 19 nt, Human
uauuuauauguauguguuu

SEQ ID NO: 1979915 - RNA, 21 nt, Human
uauuuauauguauguguuuag

SEQ ID NO: 1979916 - RNA, 22 nt, Human
uauuuauauguauguguuuaga

SEQ ID NO: 1979917 - RNA, 15 nt, Human
uauuuauauuuauug

SEQ ID NO: 1979918 - RNA, 16 nt, Human
uauuuauauuuauuga

SEQ ID NO: 1979919 - RNA, 17 nt, Human
uauuuauauuuauugac

SEQ ID NO: 1979920 - RNA, 18 nt, Human
uauuuauauuuauugacu

SEQ ID NO: 1979921 - RNA, 16 nt, Human
uauuuaucuguucaaa

SEQ ID NO: 1979922 - RNA, 14 nt, Human
uauuuaugaagaaa

SEQ ID NO: 1979923 - RNA, 15 nt, Human
uauuuaugaagaaaa

SEQ ID NO: 1979924 - RNA, 20 nt, Human
uauuuaugaagaaaauacuu

SEQ ID NO: 1979925 - RNA, 17 nt, Human
uauuuaugggauccugg

SEQ ID NO: 1979926 - RNA, 12 nt, Human
uauuuaaaggga

SEQ ID NO: 1979927 - RNA, 18 nt, Human
uauuuaaagggaaauuga

SEQ ID NO: 1979928 - RNA, 21 nt, Human
uauuugaauguaugcuucaua

SEQ ID NO: 1979929 - RNA, 15 nt, Human
uauuugaaagugccu

SEQ ID NO: 1979930 - RNA, 20 nt, Human
uauuugaaagugccuuugca

SEQ ID NO: 1979931 - RNA, 14 nt, Human
uauuugaaagugcc

SEQ ID NO: 1979932 - RNA, 14 nt, Human
uauuugaaaacaga

SEQ ID NO: 1979933 - RNA, 18 nt, Human
uauuugaaaacagaaauu

SEQ ID NO: 1979934 - RNA, 19 nt, Human
uauuugaaaacagaaauug

SEQ ID NO: 1979935 - RNA, 20 nt, Human
uauuugaaaacagaaauugg

SEQ ID NO: 1979936 - RNA, 22 nt, Human
uauuugaaaacagaaauuggua

SEQ ID NO: 1979937 - RNA, 11 nt, Human
uauuuauuaaa

SEQ ID NO: 1979938 - RNA, 21 nt, Human
uauuuaugaagaaaauacuua

SEQ ID NO: 1979939 - RNA, 22 nt, Human
uauuuauuaaaugcccagcccc

SEQ ID NO: 1979940 - RNA, 15 nt, Human
uauugugcuguucua

SEQ ID NO: 1979941 - RNA, 22 nt, Human
uauugcugauggugcaaugacc

SEQ ID NO: 1979942 - RNA, 23 nt, Human
uauugcugauggugcaaugaccu

SEQ ID NO: 1979943 - RNA, 13 nt, Human
uauugcccacgcu

SEQ ID NO: 1979944 - RNA, 14 nt, Human
uauugcccacgcug

SEQ ID NO: 1979945 - RNA, 15 nt, Human
uauugcccacgcugg

SEQ ID NO: 1979946 - RNA, 18 nt, Human
uauugccaaacauuaaug

SEQ ID NO: 1979947 - RNA, 19 nt, Human
uauugccaaacauuaaugu

SEQ ID NO: 1979948 - RNA, 21 nt, Human
uauugccaaacauuaauguug

SEQ ID NO: 1979949 - RNA, 22 nt, Human
uauugccaaacauuaauguuga

SEQ ID NO: 1979950 - RNA, 18 nt, Human
uauucauuguggucauag

SEQ ID NO: 1979951 - RNA, 18 nt, Human
uauucauucuuuuugaaa

SEQ ID NO: 1979952 - RNA, 23 nt, Human
uauucauucuuuuugaaauguca

SEQ ID NO: 1979953 - RNA, 20 nt, Human
uauugauaugcuuauacacu

SEQ ID NO: 1979954 - RNA, 18 nt, Human
uauugccaaaacccagcu

SEQ ID NO: 1979955 - RNA, 19 nt, Human
uauugccaaaacccagcug

SEQ ID NO: 1979956 - RNA, 20 nt, Human
uauugccaaaacccagcugc

SEQ ID NO: 1979957 - RNA, 21 nt, Human
uauugccaaaacccagcugca

SEQ ID NO: 1979958 - RNA, 22 nt, Human
uauugccaaaacccagcugcac

SEQ ID NO: 1979959 - RNA, 14 nt, Human
uauugccaaacauu

SEQ ID NO: 1979960 - RNA, 15 nt, Human
uauugccaaacauua

SEQ ID NO: 1979961 - RNA, 17 nt, Human
uauugccaaacauuaau

SEQ ID NO: 1979962 - RNA, 22 nt, Human
uauugcaucuggguagcuguaa

SEQ ID NO: 1979963 - RNA, 14 nt, Human
uauuaaggaagaca

SEQ ID NO: 1979964 - RNA, 22 nt, Human
uauuaagauuauaauuguugca

SEQ ID NO: 1979965 - RNA, 16 nt, Human
uauuaagcaugacaga

SEQ ID NO: 1979966 - RNA, 20 nt, Human
uauuaagcaugacagaaaau

SEQ ID NO: 1979967 - RNA, 12 nt, Human
uauuauaccuuu

SEQ ID NO: 1979968 - RNA, 13 nt, Human
uauuauaccuuuu

SEQ ID NO: 1979969 - RNA, 20 nt, Human
uauuaaguaagucucaaggu

SEQ ID NO: 1979970 - RNA, 14 nt, Human
uauuauaccuuuuu

SEQ ID NO: 1979971 - RNA, 18 nt, Human
uauuauagagcagaaauu

SEQ ID NO: 1979972 - RNA, 19 nt, Human
uauuauagagcagaaauuc

SEQ ID NO: 1979973 - RNA, 20 nt, Human
uauuauagagcagaaauucu

SEQ ID NO: 1979974 - RNA, 22 nt, Human
uauuauagagcagaaauucugu

SEQ ID NO: 1979975 - RNA, 16 nt, Human
uauuauagagcagaaa

SEQ ID NO: 1979976 - RNA, 17 nt, Human
uauuauagagcagaaau

SEQ ID NO: 1979977 - RNA, 17 nt, Human
uauuauauuuacaaaug

SEQ ID NO: 1979978 - RNA, 13 nt, Human
uauuauauucauu

SEQ ID NO: 1979979 - RNA, 11 nt, Human
uauuauauuug

SEQ ID NO: 1979980 - RNA, 12 nt, Human
uauuauauuugg

SEQ ID NO: 1979981 - RNA, 13 nt, Human
uauuauauuugga

SEQ ID NO: 1979982 - RNA, 17 nt, Human
uauuauauucauucuuu

SEQ ID NO: 1979983 - RNA, 23 nt, Human
uauuauauucauucuuuuugaaa

SEQ ID NO: 1979984 - RNA, 20 nt, Human
uauuauggaggcaggaguuu

SEQ ID NO: 1979985 - RNA, 22 nt, Human
uauuauuuauuuuuuuuaauug

SEQ ID NO: 1979986 - RNA, 14 nt, Human
uauuaucaaguaga

SEQ ID NO: 1979987 - RNA, 14 nt, Human
uauuauauuuggau

SEQ ID NO: 1979988 - RNA, 15 nt, Human
uauuauauuuggaug

SEQ ID NO: 1979989 - RNA, 16 nt, Human
uauuauauuuggaugc

SEQ ID NO: 1979990 - RNA, 17 nt, Human
uauuauauuuggaugca

SEQ ID NO: 1979991 - RNA, 16 nt, Human
uauuaucaaguagacu

SEQ ID NO: 1979992 - RNA, 22 nt, Human
uauuaucaaguagacuacuguu

SEQ ID NO: 1979993 - RNA, 19 nt, Human
uauuaaaugcccagccccu

SEQ ID NO: 1979994 - RNA, 17 nt, Human
uauuaaaugcccagccc

SEQ ID NO: 1979995 - RNA, 15 nt, Human
uauuaaaugcccagc

SEQ ID NO: 1979996 - RNA, 17 nt, Human
uauuaacacuacucaaa

SEQ ID NO: 1979997 - RNA, 16 nt, Human
uauuaagaaagacuau

SEQ ID NO: 1979998 - RNA, 19 nt, Human
uauuaacugcucaguguuu

SEQ ID NO: 1979999 - RNA, 22 nt, Human
uauuaacugcucaguguuucau

SEQ ID NO: 1980000 - RNA, 15 nt, Human
uauuaacuuaauaau

SEQ ID NO: 1980001 - RNA, 20 nt, Human
uauuaacuuaauaaucaaga

SEQ ID NO: 1980002 - RNA, 16 nt, Human
uauuaacuuaauaauc

SEQ ID NO: 1980003 - RNA, 18 nt, Human
uauuaacuuaauaaucaa

SEQ ID NO: 1980004 - RNA, 17 nt, Human
uauguucuaagaaguga

SEQ ID NO: 1980005 - RNA, 22 nt, Human
uauguucuuaguggauguucug

SEQ ID NO: 1980006 - RNA, 21 nt, Human
uauguugcuauaauaaagaag

SEQ ID NO: 1980007 - RNA, 17 nt, Human
uauguugaagccuuugu

SEQ ID NO: 1980008 - RNA, 21 nt, Human
uauguugcccaggcaggucuu

SEQ ID NO: 1980009 - RNA, 13 nt, Human
uauguguguuuua

SEQ ID NO: 1980010 - RNA, 18 nt, Human
uauggauaugaaaaauga

SEQ ID NO: 1980011 - RNA, 23 nt, Human
uauggaggagaguguuuaacuga

SEQ ID NO: 1980012 - RNA, 14 nt, Human
uauggaggcaggag

SEQ ID NO: 1980013 - RNA, 18 nt, Human
uauggacagcauugccag

SEQ ID NO: 1980014 - RNA, 16 nt, Human
uauguuaauauuucug

SEQ ID NO: 1980015 - RNA, 14 nt, Human
uauguuaauauuuu

SEQ ID NO: 1980016 - RNA, 13 nt, Human
uauguuaauauuu

SEQ ID NO: 1980017 - RNA, 13 nt, Human
uauguguuuagaa

SEQ ID NO: 1980018 - RNA, 16 nt, Human
uauguguuuagaauug

SEQ ID NO: 1980019 - RNA, 14 nt, Human
ucaccgaaaacgug

SEQ ID NO: 1980020 - RNA, 12 nt, Human
ucacccuuuucu

SEQ ID NO: 1980021 - RNA, 20 nt, Human
ucacccuggggcuaggaaau

SEQ ID NO: 1980022 - RNA, 19 nt, Human
ucacccgcuaagagggagg

SEQ ID NO: 1980023 - RNA, 16 nt, Human
ucacccggugaccucu

SEQ ID NO: 1980024 - RNA, 21 nt, Human
ucaccgaaaacguggcugcuu

SEQ ID NO: 1980025 - RNA, 20 nt, Human
ucaccgaaaacguggcugcu

SEQ ID NO: 1980026 - RNA, 19 nt, Human
ucaccgaaaacguggcugc

SEQ ID NO: 1980027 - RNA, 15 nt, Human
ucaccgaaaacgugg

SEQ ID NO: 1980028 - RNA, 23 nt, Human
ucaccgaaaacguggcugcuuca

SEQ ID NO: 1980029 - RNA, 22 nt, Human
ucaccgaaaacguggcugcuuc

SEQ ID NO: 1980030 - RNA, 18 nt, Human
ucacccgcuaagagggag

SEQ ID NO: 1980031 - RNA, 21 nt, Human
ucacccgaucgccagcaaaac

SEQ ID NO: 1980032 - RNA, 13 nt, Human
ucaccaagcccag

SEQ ID NO: 1980033 - RNA, 16 nt, Human
ucaccacaugugcaca

SEQ ID NO: 1980034 - RNA, 18 nt, Human
ucaccaacgucugugcca

SEQ ID NO: 1980035 - RNA, 17 nt, Human
ucaccaacgucugugcc

SEQ ID NO: 1980036 - RNA, 21 nt, Human
ucaccaaaucagcugcuacua

SEQ ID NO: 1980037 - RNA, 14 nt, Human
ucacauuuauucug

SEQ ID NO: 1980038 - RNA, 17 nt, Human
ucacauuggaaacaagu

SEQ ID NO: 1980039 - RNA, 22 nt, Human
ucacauuguauucagaguugau

SEQ ID NO: 1980040 - RNA, 12 nt, Human
ucacauuuaaau

SEQ ID NO: 1980041 - RNA, 20 nt, Human
ucacauuccugaacaggaua

SEQ ID NO: 1980042 - RNA, 14 nt, Human
ucacauuggaaaca

SEQ ID NO: 1980043 - RNA, 19 nt, Human
ucacaggacucugccuccu

SEQ ID NO: 1980044 - RNA, 23 nt, Human
ucacaggacucugccuccucuuc

SEQ ID NO: 1980045 - RNA, 19 nt, Human
ucacaggagggagggggaa

SEQ ID NO: 1980046 - RNA, 14 nt, Human
ucacacauuugccu

SEQ ID NO: 1980047 - RNA, 16 nt, Human
ucacaggacucugccu

SEQ ID NO: 1980048 - RNA, 17 nt, Human
ucacaggacucugccuc

SEQ ID NO: 1980049 - RNA, 18 nt, Human
ucacaggacucugccucc

SEQ ID NO: 1980050 - RNA, 23 nt, Human
ucacacaugagcaucaggccagg

SEQ ID NO: 1980051 - RNA, 22 nt, Human
ucacacaugagcaucaggccag

SEQ ID NO: 1980052 - RNA, 15 nt, Human
ucacacacuuuggcu

SEQ ID NO: 1980053 - RNA, 18 nt, Human
ucaauucccaccuaugag

SEQ ID NO: 1980054 - RNA, 22 nt, Human
ucacaagacccaaaaggcagaa

SEQ ID NO: 1980055 - RNA, 17 nt, Human
ucaauuaaagaaauaau

SEQ ID NO: 1980056 - RNA, 19 nt, Human
ucaauuaaagaaauaauuu

SEQ ID NO: 1980057 - RNA, 22 nt, Human
ucaauuauacuacuucuaaggu

SEQ ID NO: 1980058 - RNA, 15 nt, Human
ucaaauguaaaguuu

SEQ ID NO: 1980059 - RNA, 18 nt, Human
ucaaaucuuaagaaauaa

SEQ ID NO: 1980060 - RNA, 22 nt, Human
ucaaauguaauguggcuucugg

SEQ ID NO: 1980061 - RNA, 14 nt, Human
ucaaauguguuuug

SEQ ID NO: 1980062 - RNA, 16 nt, Human
ucaaauguguuuuggu

SEQ ID NO: 1980063 - RNA, 22 nt, Human
ucaaaucucuacaaauuuuucu

SEQ ID NO: 1980064 - RNA, 14 nt, Human
ucaaaucuuaagaa

SEQ ID NO: 1980065 - RNA, 17 nt, Human
ucaaaucuuaagaaaua

SEQ ID NO: 1980066 - RNA, 23 nt, Human
ucaaagagguuuuaaaaaaaucc

SEQ ID NO: 1980067 - RNA, 12 nt, Human
ucaaagagguuu

SEQ ID NO: 1980068 - RNA, 22 nt, Human
uauuugaauguaugcuucauac

SEQ ID NO: 1980069 - RNA, 23 nt, Human
uauuugaauguaugcuucauaca

SEQ ID NO: 1980070 - RNA, 15 nt, Human
uauuugaaugacuaa

SEQ ID NO: 1980071 - RNA, 23 nt, Human
uauuugauuuauuaacuuaauaa

SEQ ID NO: 1980072 - RNA, 13 nt, Human
uauuugauuuauu

SEQ ID NO: 1980073 - RNA, 15 nt, Human
uauuugauuuauuaa

SEQ ID NO: 1980074 - RNA, 16 nt, Human
uauuugauuuauuaac

SEQ ID NO: 1980075 - RNA, 19 nt, Human
uauuugauuuauuaacuua

SEQ ID NO: 1980076 - RNA, 13 nt, Human
ucaaaccugugaa

SEQ ID NO: 1980077 - RNA, 23 nt, Human
ucaaaccccgaccaccugcccaa

SEQ ID NO: 1980078 - RNA, 14 nt, Human
ucaaaccccugacc

SEQ ID NO: 1980079 - RNA, 15 nt, Human
ucaaaccccugaccu

SEQ ID NO: 1980080 - RNA, 19 nt, Human
ucaaaccccgaccaccugc

SEQ ID NO: 1980081 - RNA, 20 nt, Human
ucaaaccccgaccaccugcc

SEQ ID NO: 1980082 - RNA, 20 nt, Human
ucaaacauuaguacuuuaua

SEQ ID NO: 1980083 - RNA, 16 nt, Human
ucaaacauuaguacuu

SEQ ID NO: 1980084 - RNA, 17 nt, Human
ucaaacauuaguacuuu

SEQ ID NO: 1980085 - RNA, 18 nt, Human
ucaaacauuaguacuuua

SEQ ID NO: 1980086 - RNA, 19 nt, Human
ucaaacauuaguacuuuau

SEQ ID NO: 1980087 - RNA, 15 nt, Human
ucaaacauuaguacu

SEQ ID NO: 1980088 - RNA, 14 nt, Human
ucaacucccugccc

SEQ ID NO: 1980089 - RNA, 15 nt, Human
ucaacucccugcccc

SEQ ID NO: 1980090 - RNA, 21 nt, Human
ucaacucccugccccccagcc

SEQ ID NO: 1980091 - RNA, 22 nt, Human
ucaacucccugccccccagccc

SEQ ID NO: 1980092 - RNA, 20 nt, Human
ucaacucuccuccagaguca

SEQ ID NO: 1980093 - RNA, 24 nt, Human
ucaacugaccagccuccaugcugc

SEQ ID NO: 1980094 - RNA, 18 nt, Human
ucaacugaccagccucca

SEQ ID NO: 1980095 - RNA, 16 nt, Human
ucaaccuccugggcua

SEQ ID NO: 1980096 - RNA, 20 nt, Human
ucaaccccuucgcuccugug

SEQ ID NO: 1980097 - RNA, 15 nt, Human
ucaaccuccugggcu

SEQ ID NO: 1980098 - RNA, 18 nt, Human
ucaaccccuucgcuccug

SEQ ID NO: 1980099 - RNA, 19 nt, Human
ucaaccccuucgcuccugu

SEQ ID NO: 1980100 - RNA, 18 nt, Human
ucaaauguguuuuggucc

SEQ ID NO: 1980101 - RNA, 20 nt, Human
ucaagccaccaacauacucc

SEQ ID NO: 1980102 - RNA, 12 nt, Human
ucaagccaccaa

SEQ ID NO: 1980103 - RNA, 16 nt, Human
ucaagccagacucugc

SEQ ID NO: 1980104 - RNA, 13 nt, Human
ucaagcccaggag

SEQ ID NO: 1980105 - RNA, 14 nt, Human
ucaagcccaggagg

SEQ ID NO: 1980106 - RNA, 21 nt, Human
ucaagcgauucuucugcuuca

SEQ ID NO: 1980107 - RNA, 14 nt, Human
ucaagcuuauuuug

SEQ ID NO: 1980108 - RNA, 18 nt, Human
ucaagcgauucuucugcu

SEQ ID NO: 1980109 - RNA, 19 nt, Human
ucaagcgauucuucugcuu

SEQ ID NO: 1980110 - RNA, 17 nt, Human
ucaaggauccugagcca

SEQ ID NO: 1980111 - RNA, 16 nt, Human
ucaaggauccugagcc

SEQ ID NO: 1980112 - RNA, 15 nt, Human
ucaaggauccugagc

SEQ ID NO: 1980113 - RNA, 14 nt, Human
ucaaggauccugag

SEQ ID NO: 1980114 - RNA, 13 nt, Human
ucaaggauccuga

SEQ ID NO: 1980115 - RNA, 13 nt, Human
uaguaucaaaaga

SEQ ID NO: 1980116 - RNA, 23 nt, Human
uaggugacagagugagacucugu

SEQ ID NO: 1980117 - RNA, 21 nt, Human
uaggugauccacucgccuuca

SEQ ID NO: 1980118 - RNA, 12 nt, Human
uaguauuugaaa

SEQ ID NO: 1980119 - RNA, 14 nt, Human
uaguauuugaaaac

SEQ ID NO: 1980120 - RNA, 17 nt, Human
uaguauuugaaaacaga

SEQ ID NO: 1980121 - RNA, 22 nt, Human
uaguauuugaaaacagaaauug

SEQ ID NO: 1980122 - RNA, 18 nt, Human
uaguguggaaauuaagaa

SEQ ID NO: 1980123 - RNA, 22 nt, Human
uaguguggaaauuaagaagaaa

SEQ ID NO: 1980124 - RNA, 20 nt, Human
uaguugcaacuuuguauaaa

SEQ ID NO: 1980125 - RNA, 13 nt, Human
uaguguucauaaa

SEQ ID NO: 1980126 - RNA, 13 nt, Human
uaguguuauauga

SEQ ID NO: 1980127 - RNA, 15 nt, Human
uaguguuauaugaac

SEQ ID NO: 1980128 - RNA, 16 nt, Human
uaguguuauaugaaca

SEQ ID NO: 1980129 - RNA, 17 nt, Human
uaguguuauaugaacau

SEQ ID NO: 1980130 - RNA, 18 nt, Human
uaguguuauaugaacaua

SEQ ID NO: 1980131 - RNA, 22 nt, Human
uaguguuauaugaacauacaaa

SEQ ID NO: 1980132 - RNA, 22 nt, Human
uaguguuauugagagagaugug

SEQ ID NO: 1980133 - RNA, 16 nt, Human
uaguguucagaaaaaa

SEQ ID NO: 1980134 - RNA, 23 nt, Human
uagucaaauguaauguggcuucu

SEQ ID NO: 1980135 - RNA, 14 nt, Human
uagugcaauauauu

SEQ ID NO: 1980136 - RNA, 15 nt, Human
uagugcaauauauuu

SEQ ID NO: 1980137 - RNA, 16 nt, Human
uagugcaauauauuuu

SEQ ID NO: 1980138 - RNA, 17 nt, Human
uagugcaauauauuuug

SEQ ID NO: 1980139 - RNA, 18 nt, Human
uagugcaauauauuuugu

SEQ ID NO: 1980140 - RNA, 19 nt, Human
uagugcaauauauuuugua

SEQ ID NO: 1980141 - RNA, 22 nt, Human
uagugcaauauauuuuguaugc

SEQ ID NO: 1980142 - RNA, 23 nt, Human
uagugcaauauauuuuguaugca

SEQ ID NO: 1980143 - RNA, 15 nt, Human
uagugcagcagggca

SEQ ID NO: 1980144 - RNA, 15 nt, Human
uagugcagcugaaau

SEQ ID NO: 1980145 - RNA, 16 nt, Human
uagugcagcugaaauu

SEQ ID NO: 1980146 - RNA, 17 nt, Human
uagugcagcugaaauug

SEQ ID NO: 1980147 - RNA, 18 nt, Human
uagugcagcugaaauuga

SEQ ID NO: 1980148 - RNA, 20 nt, Human
uagugcagcugaaauugaaa

SEQ ID NO: 1980149 - RNA, 21 nt, Human
uagugcagcugaaauugaaaa

SEQ ID NO: 1980150 - RNA, 22 nt, Human
uagugcagcugaaauugaaaag

SEQ ID NO: 1980151 - RNA, 20 nt, Human
uaggcuccuucaacaaggcu

SEQ ID NO: 1980152 - RNA, 21 nt, Human
uagggaaaaaccagcguguga

SEQ ID NO: 1980153 - RNA, 20 nt, Human
uagggaaaaaccagcgugug

SEQ ID NO: 1980154 - RNA, 19 nt, Human
uagggaaaaaccagcgugu

SEQ ID NO: 1980155 - RNA, 17 nt, Human
uaggcucugccugacag

SEQ ID NO: 1980156 - RNA, 20 nt, Human
uagguauaaguggugugugu

SEQ ID NO: 1980157 - RNA, 20 nt, Human
uagguauaucucccagugcu

SEQ ID NO: 1980158 - RNA, 16 nt, Human
uagguaaauuacaguu

SEQ ID NO: 1980159 - RNA, 15 nt, Human
uagguagagucugag

SEQ ID NO: 1980160 - RNA, 19 nt, Human
uaggucguuuuaaaaacaa

SEQ ID NO: 1980161 - RNA, 15 nt, Human
uagguccuuuagaaa

SEQ ID NO: 1980162 - RNA, 16 nt, Human
uagguccuuuagaaac

SEQ ID NO: 1980163 - RNA, 15 nt, Human
uaggucucaauaccu

SEQ ID NO: 1980164 - RNA, 16 nt, Human
uaggucagugcaaaua

SEQ ID NO: 1980165 - RNA, 13 nt, Human
uaggaauauuaua

SEQ ID NO: 1980166 - RNA, 14 nt, Human
uaggaauauuauau

SEQ ID NO: 1980167 - RNA, 15 nt, Human
uaggaauauuauauu

SEQ ID NO: 1980168 - RNA, 16 nt, Human
uaggaauauuauauuu

SEQ ID NO: 1980169 - RNA, 17 nt, Human
uaggaauauuauauuug

SEQ ID NO: 1980170 - RNA, 18 nt, Human
uaggaauauuauauuugg

SEQ ID NO: 1980171 - RNA, 20 nt, Human
uaggaauauuauauuuggau

SEQ ID NO: 1980172 - RNA, 23 nt, Human
uaggaauauuauauuuggaugca

SEQ ID NO: 1980173 - RNA, 20 nt, Human
uaggacaaggugcaggcagg

SEQ ID NO: 1980174 - RNA, 16 nt, Human
uaggaauuguguuuau

SEQ ID NO: 1980175 - RNA, 19 nt, Human
uaggacaagggaaaauaaa

SEQ ID NO: 1980176 - RNA, 15 nt, Human
uaggacaaggugcag

SEQ ID NO: 1980177 - RNA, 19 nt, Human
uaggacaaggugcaggcag

SEQ ID NO: 1980178 - RNA, 12 nt, Human
uaggaauugacc

SEQ ID NO: 1980179 - RNA, 15 nt, Human
uaggccuggccagau

SEQ ID NO: 1980180 - RNA, 14 nt, Human
uaggcccuuucagu

SEQ ID NO: 1980181 - RNA, 15 nt, Human
uaggcccuuucagug

SEQ ID NO: 1980182 - RNA, 18 nt, Human
uaggccuggccagaugca

SEQ ID NO: 1980183 - RNA, 16 nt, Human
uaggccaugggacagg

SEQ ID NO: 1980184 - RNA, 18 nt, Human
uaggccaugggacaggga

SEQ ID NO: 1980185 - RNA, 16 nt, Human
uauagugcaauauauu

SEQ ID NO: 1980186 - RNA, 19 nt, Human
uauagugcaauauauuuug

SEQ ID NO: 1980187 - RNA, 19 nt, Human
uauaguuaaucuauaacua

SEQ ID NO: 1980188 - RNA, 18 nt, Human
uauaguuguuuuauaugu

SEQ ID NO: 1980189 - RNA, 22 nt, Human
uauaguuauguaaauaauucuu

SEQ ID NO: 1980190 - RNA, 16 nt, Human
uauaguuauguaaaua

SEQ ID NO: 1980191 - RNA, 20 nt, Human
uauaguuauguaaauaauuc

SEQ ID NO: 1980192 - RNA, 22 nt, Human
uauacugcaaacuauuuaaaga

SEQ ID NO: 1980193 - RNA, 16 nt, Human
uauacgagaacaggca

SEQ ID NO: 1980194 - RNA, 23 nt, Human
uauaccuguugcuuaauuacaau

SEQ ID NO: 1980195 - RNA, 17 nt, Human
uauaccuguuuaaauug

SEQ ID NO: 1980196 - RNA, 18 nt, Human
uauaccuguuuaaauugc

SEQ ID NO: 1980197 - RNA, 19 nt, Human
uauaccuguuuaaauugcu

SEQ ID NO: 1980198 - RNA, 21 nt, Human
uauaccuguuuaaauugcuca

SEQ ID NO: 1980199 - RNA, 13 nt, Human
uauacguuucaaa

SEQ ID NO: 1980200 - RNA, 21 nt, Human
uauaucuauauuuuacauaaa

SEQ ID NO: 1980201 - RNA, 17 nt, Human
uauaucucaaauuguaa

SEQ ID NO: 1980202 - RNA, 19 nt, Human
uauaucucaaauuguaauu

SEQ ID NO: 1980203 - RNA, 12 nt, Human
uauaucuccuuu

SEQ ID NO: 1980204 - RNA, 16 nt, Human
uauaucuccuuuguau

SEQ ID NO: 1980205 - RNA, 15 nt, Human
uauauguauguguuu

SEQ ID NO: 1980206 - RNA, 16 nt, Human
uauauguauguguuua

SEQ ID NO: 1980207 - RNA, 18 nt, Human
uauauguauguguuuaga

SEQ ID NO: 1980208 - RNA, 19 nt, Human
uauauguauguguuuagaa

SEQ ID NO: 1980209 - RNA, 22 nt, Human
uauauguauguguuuagaauug

SEQ ID NO: 1980210 - RNA, 13 nt, Human
uauauguguccau

SEQ ID NO: 1980211 - RNA, 17 nt, Human
uauaugugccacauuuu

SEQ ID NO: 1980212 - RNA, 21 nt, Human
uauaugcucugcauguuacau

SEQ ID NO: 1980213 - RNA, 14 nt, Human
uauauguauguguu

SEQ ID NO: 1980214 - RNA, 15 nt, Human
uauaauucacauugu

SEQ ID NO: 1980215 - RNA, 23 nt, Human
uauaauugugugauauuucagaa

SEQ ID NO: 1980216 - RNA, 13 nt, Human
uauaccuguugcu

SEQ ID NO: 1980217 - RNA, 12 nt, Human
uauaauugugug

SEQ ID NO: 1980218 - RNA, 20 nt, Human
uauaauugugugauauuuca

SEQ ID NO: 1980219 - RNA, 22 nt, Human
uauaauugugugauauuucaga

SEQ ID NO: 1980220 - RNA, 16 nt, Human
uauaaucaccagggcc

SEQ ID NO: 1980221 - RNA, 16 nt, Human
uauaauguugcccagu

SEQ ID NO: 1980222 - RNA, 15 nt, Human
uauaaauuauauucc

SEQ ID NO: 1980223 - RNA, 15 nt, Human
uauaauacacaaaau

SEQ ID NO: 1980224 - RNA, 16 nt, Human
uauaauacacaaaauc

SEQ ID NO: 1980225 - RNA, 18 nt, Human
uauaauacacaaaaucaa

SEQ ID NO: 1980226 - RNA, 23 nt, Human
uauaauacacaaaaucaaauaau

SEQ ID NO: 1980227 - RNA, 18 nt, Human
uauaaacuuuaccuuuuu

SEQ ID NO: 1980228 - RNA, 18 nt, Human
uaguugaggaaagcacag

SEQ ID NO: 1980229 - RNA, 23 nt, Human
uauaaagaagguuggugaauuuc

SEQ ID NO: 1980230 - RNA, 12 nt, Human
uauaaagaauag

SEQ ID NO: 1980231 - RNA, 17 nt, Human
uauaaagaauaggacuu

SEQ ID NO: 1980232 - RNA, 21 nt, Human
uauaaagaauaggacuuguuu

SEQ ID NO: 1980233 - RNA, 16 nt, Human
uaugauucaaaugucu

SEQ ID NO: 1980234 - RNA, 21 nt, Human
uaugauucaaaugucuauaaa

SEQ ID NO: 1980235 - RNA, 23 nt, Human
uaugagcuggggaugucucucau

SEQ ID NO: 1980236 - RNA, 23 nt, Human
uaugacuccagaauuucccaaag

SEQ ID NO: 1980237 - RNA, 17 nt, Human
uaugacuccagaauuuc

SEQ ID NO: 1980238 - RNA, 16 nt, Human
uaugacuccagaauuu

SEQ ID NO: 1980239 - RNA, 18 nt, Human
uaugauuuggaaaauaaa

SEQ ID NO: 1980240 - RNA, 15 nt, Human
uaugauuuggaaaau

SEQ ID NO: 1980241 - RNA, 17 nt, Human
uaugauuuggaaaauaa

SEQ ID NO: 1980242 - RNA, 17 nt, Human
uaugauuuaauuugaaa

SEQ ID NO: 1980243 - RNA, 18 nt, Human
uaugauuuaauuugaaau

SEQ ID NO: 1980244 - RNA, 18 nt, Human
uaugcaaucaaaucugcu

SEQ ID NO: 1980245 - RNA, 13 nt, Human
uaugcaagcaguu

SEQ ID NO: 1980246 - RNA, 16 nt, Human
uaugcaagcaguuuca

SEQ ID NO: 1980247 - RNA, 17 nt, Human
uaugcaagcaguuucaa

SEQ ID NO: 1980248 - RNA, 18 nt, Human
uaugcaagcaguuucaau

SEQ ID NO: 1980249 - RNA, 23 nt, Human
uaugcaagcaguuucaauaaagu

SEQ ID NO: 1980250 - RNA, 13 nt, Human
uaugcacacauuu

SEQ ID NO: 1980251 - RNA, 14 nt, Human
uaugcacacauuuu

SEQ ID NO: 1980252 - RNA, 15 nt, Human
uaugcacaauuccau

SEQ ID NO: 1980253 - RNA, 20 nt, Human
uaugcacaauuccaugacaa

SEQ ID NO: 1980254 - RNA, 19 nt, Human
uauggaacacucugagacu

SEQ ID NO: 1980255 - RNA, 16 nt, Human
uauggaaaugcaaacu

SEQ ID NO: 1980256 - RNA, 16 nt, Human
uauggaagguggagcg

SEQ ID NO: 1980257 - RNA, 19 nt, Human
uauggaagguggagcguuc

SEQ ID NO: 1980258 - RNA, 22 nt, Human
uauggacacuggugccauguca

SEQ ID NO: 1980259 - RNA, 17 nt, Human
uauggacaaugacccag

SEQ ID NO: 1980260 - RNA, 17 nt, Human
uaugcuucauacaggga

SEQ ID NO: 1980261 - RNA, 14 nt, Human
uaugcuuccagaaa

SEQ ID NO: 1980262 - RNA, 17 nt, Human
uaugcuuccagaaacac

SEQ ID NO: 1980263 - RNA, 23 nt, Human
uaugcuuccagaaacacccacag

SEQ ID NO: 1980264 - RNA, 19 nt, Human
uaugcuugcauauauuuca

SEQ ID NO: 1980265 - RNA, 18 nt, Human
uaugcuuguaacuaaaau

SEQ ID NO: 1980266 - RNA, 20 nt, Human
uaugcuuguaacuaaaauaa

SEQ ID NO: 1980267 - RNA, 14 nt, Human
uaugcuuuucucaa

SEQ ID NO: 1980268 - RNA, 18 nt, Human
uauggaacacucugagac

SEQ ID NO: 1980269 - RNA, 17 nt, Human
uauggaacacucugaga

SEQ ID NO: 1980270 - RNA, 16 nt, Human
uauggaacacucugag

SEQ ID NO: 1980271 - RNA, 13 nt, Human
uauggaacacucu

SEQ ID NO: 1980272 - RNA, 12 nt, Human
uaugcuucauac

SEQ ID NO: 1980273 - RNA, 13 nt, Human
uaugcuucauaca

SEQ ID NO: 1980274 - RNA, 14 nt, Human
uaugcuucauacag

SEQ ID NO: 1980275 - RNA, 16 nt, Human
uaugcuucauacaggg

SEQ ID NO: 1980276 - RNA, 22 nt, Human
uaugcuuauacacuuacacuuu

SEQ ID NO: 1980277 - RNA, 13 nt, Human
uaugcaugaagua

SEQ ID NO: 1980278 - RNA, 18 nt, Human
uaugcaugaaguaauaug

SEQ ID NO: 1980279 - RNA, 20 nt, Human
uaugcauauuauuuuauguu

SEQ ID NO: 1980280 - RNA, 19 nt, Human
uaugcauauauauaugugu

SEQ ID NO: 1980281 - RNA, 20 nt, Human
uaugcauauauauaugugug

SEQ ID NO: 1980282 - RNA, 24 nt, Human
uaugcauaauaauccugcaaagua

SEQ ID NO: 1980283 - RNA, 17 nt, Human
uaugcauauauauaugu

SEQ ID NO: 1980284 - RNA, 18 nt, Human
uaugcagagguccacaac

SEQ ID NO: 1980285 - RNA, 18 nt, Human
uaugcacuaagucucuuu

SEQ ID NO: 1980286 - RNA, 16 nt, Human
uaugcagaauggcauu

SEQ ID NO: 1980287 - RNA, 19 nt, Human
uaugcagaauggcauuugc

SEQ ID NO: 1980288 - RNA, 16 nt, Human
uaugcacuaagucucu

SEQ ID NO: 1980289 - RNA, 17 nt, Human
uaugcacuaagucucuu

SEQ ID NO: 1980290 - RNA, 22 nt, Human
uaugacacaugcaaggucauuu

SEQ ID NO: 1980291 - RNA, 17 nt, Human
uaugacaaauguuucua

SEQ ID NO: 1980292 - RNA, 12 nt, Human
uaugacacaugc

SEQ ID NO: 1980293 - RNA, 13 nt, Human
uaugacaaauguu

SEQ ID NO: 1980294 - RNA, 14 nt, Human
uaugacaaauguuu

SEQ ID NO: 1980295 - RNA, 16 nt, Human
uaugacaaauguuucu

SEQ ID NO: 1980296 - RNA, 14 nt, Human
uaugaccacacucc

SEQ ID NO: 1980297 - RNA, 19 nt, Human
uaugaccacacuccagcug

SEQ ID NO: 1980298 - RNA, 13 nt, Human
uaugaauacuuug

SEQ ID NO: 1980299 - RNA, 15 nt, Human
uaugaauacuuugca

SEQ ID NO: 1980300 - RNA, 20 nt, Human
uaugaaucuauuugugggug

SEQ ID NO: 1980301 - RNA, 16 nt, Human
uaucuguuuacagugu

SEQ ID NO: 1980302 - RNA, 17 nt, Human
uaucuguuuacaguguu

SEQ ID NO: 1980303 - RNA, 14 nt, Human
uaucuugaagacuu

SEQ ID NO: 1980304 - RNA, 18 nt, Human
uaugaauaaagacaccua

SEQ ID NO: 1980305 - RNA, 20 nt, Human
uaugaaguuuuuuuuauaca

SEQ ID NO: 1980306 - RNA, 10 nt, Human
uaucuucauc

SEQ ID NO: 1980307 - RNA, 18 nt, Human
uaucuuaucucagauauu

SEQ ID NO: 1980308 - RNA, 23 nt, Human
uaucuuaucucagauauuugcac

SEQ ID NO: 1980309 - RNA, 20 nt, Human
uaucugucauuugagcaggg

SEQ ID NO: 1980310 - RNA, 15 nt, Human
uaucuguaagagugu

SEQ ID NO: 1980311 - RNA, 21 nt, Human
uaucugucauuugagcagggc

SEQ ID NO: 1980312 - RNA, 23 nt, Human
uaucugucauuugagcagggcuc

SEQ ID NO: 1980313 - RNA, 12 nt, Human
uaucugucuuuc

SEQ ID NO: 1980314 - RNA, 14 nt, Human
uaucugucuuucca

SEQ ID NO: 1980315 - RNA, 15 nt, Human
uaucugucuuuccac

SEQ ID NO: 1980316 - RNA, 19 nt, Human
uauauguuuuaagaggcag

SEQ ID NO: 1980317 - RNA, 19 nt, Human
uauauguuuuugaaggcag

SEQ ID NO: 1980318 - RNA, 16 nt, Human
uauauuaaaagcaggc

SEQ ID NO: 1980319 - RNA, 16 nt, Human
uaucuaaauguugaaa

SEQ ID NO: 1980320 - RNA, 16 nt, Human
uaucgguauaaaggca

SEQ ID NO: 1980321 - RNA, 18 nt, Human
uaucguaaaauuaagaaa

SEQ ID NO: 1980322 - RNA, 15 nt, Human
uaucguaaaauuaag

SEQ ID NO: 1980323 - RNA, 15 nt, Human
uauccuucagccuga

SEQ ID NO: 1980324 - RNA, 14 nt, Human
uauccuucagccug

SEQ ID NO: 1980325 - RNA, 12 nt, Human
uauccuuucaca

SEQ ID NO: 1980326 - RNA, 18 nt, Human
uauccugagagcccagaa

SEQ ID NO: 1980327 - RNA, 12 nt, Human
uauccugaauaa

SEQ ID NO: 1980328 - RNA, 16 nt, Human
uaucgucacugcuuaa

SEQ ID NO: 1980329 - RNA, 16 nt, Human
uaucguauucaccuuc

SEQ ID NO: 1980330 - RNA, 18 nt, Human
uaucguauucaccuucag

SEQ ID NO: 1980331 - RNA, 21 nt, Human
uaucuaauauguaacaagcca

SEQ ID NO: 1980332 - RNA, 20 nt, Human
uaucuaccaacuuucaagaa

SEQ ID NO: 1980333 - RNA, 16 nt, Human
uaucuaccaacuuuca

SEQ ID NO: 1980334 - RNA, 17 nt, Human
uaucuaccaacuuucaa

SEQ ID NO: 1980335 - RNA, 18 nt, Human
uaucuaccaacuuucaag

SEQ ID NO: 1980336 - RNA, 19 nt, Human
uaucuaccaacuuucaaga

SEQ ID NO: 1980337 - RNA, 14 nt, Human
uaucuaauucuuua

SEQ ID NO: 1980338 - RNA, 15 nt, Human
uaucuaauucuuuaa

SEQ ID NO: 1980339 - RNA, 16 nt, Human
uaucuaauucuuuaau

SEQ ID NO: 1980340 - RNA, 15 nt, Human
uaucuaauuuggauu

SEQ ID NO: 1980341 - RNA, 15 nt, Human
uaucuaccaacuuuc

SEQ ID NO: 1980342 - RNA, 19 nt, Human
uaucugcccaccucggccu

SEQ ID NO: 1980343 - RNA, 11 nt, Human
guggccccacc

SEQ ID NO: 1980344 - RNA, 21 nt, Human
guggccacuccagaccccugg

SEQ ID NO: 1980345 - RNA, 16 nt, Human
guggccaucauuucug

SEQ ID NO: 1980346 - RNA, 15 nt, Human
guggcaguuuggcaa

SEQ ID NO: 1980347 - RNA, 19 nt, Human
guggcagugggagcugccu

SEQ ID NO: 1980348 - RNA, 21 nt, Human
guggcagugggagcugccugu

SEQ ID NO: 1980349 - RNA, 11 nt, Human
guggcagucug

SEQ ID NO: 1980350 - RNA, 15 nt, Human
guggcagugggagcu

SEQ ID NO: 1980351 - RNA, 16 nt, Human
guggcagugggagcug

SEQ ID NO: 1980352 - RNA, 17 nt, Human
guggcagugggagcugc

SEQ ID NO: 1980353 - RNA, 17 nt, Human
guggcaggacacugcag

SEQ ID NO: 1980354 - RNA, 14 nt, Human
guggcagggcacag

SEQ ID NO: 1980355 - RNA, 15 nt, Human
guggcagggcacagg

SEQ ID NO: 1980356 - RNA, 18 nt, Human
guggcagggcacagggcc

SEQ ID NO: 1980357 - RNA, 19 nt, Human
guggcagggcacagggccu

SEQ ID NO: 1980358 - RNA, 20 nt, Human
guggcagggcacagggccug

SEQ ID NO: 1980359 - RNA, 19 nt, Human
guggcagcugcgguccacc

SEQ ID NO: 1980360 - RNA, 20 nt, Human
guggaugccugguggcagcu

SEQ ID NO: 1980361 - RNA, 21 nt, Human
guggcagcugcgguccaccca

SEQ ID NO: 1980362 - RNA, 22 nt, Human
guggcagcugcgguccacccag

SEQ ID NO: 1980363 - RNA, 23 nt, Human
guggcagcugcgguccacccagg

SEQ ID NO: 1980364 - RNA, 12 nt, Human
guggcagcugcu

SEQ ID NO: 1980365 - RNA, 13 nt, Human
guggcagcugcuu

SEQ ID NO: 1980366 - RNA, 19 nt, Human
guggcagcugcuuuugucu

SEQ ID NO: 1980367 - RNA, 20 nt, Human
guggagaagcggcuggcagc

SEQ ID NO: 1980368 - RNA, 13 nt, Human
guggacuuuuauu

SEQ ID NO: 1980369 - RNA, 23 nt, Human
guggacuuaggaagguggccuuc

SEQ ID NO: 1980370 - RNA, 21 nt, Human
guggaaauuaagaagaaacua

SEQ ID NO: 1980371 - RNA, 18 nt, Human
guggagaggcccggccuc

SEQ ID NO: 1980372 - RNA, 15 nt, Human
guggagacugcuccu

SEQ ID NO: 1980373 - RNA, 22 nt, Human
guggagacugcuccugagcccc

SEQ ID NO: 1980374 - RNA, 17 nt, Human
guggagaaucacaggcu

SEQ ID NO: 1980375 - RNA, 18 nt, Human
guggagaaucacaggcug

SEQ ID NO: 1980376 - RNA, 19 nt, Human
guggagaaucacaggcugg

SEQ ID NO: 1980377 - RNA, 20 nt, Human
guggagaaucacaggcuggg

SEQ ID NO: 1980378 - RNA, 21 nt, Human
guggagaaucacaggcugggc

SEQ ID NO: 1980379 - RNA, 14 nt, Human
guggagacugcucc

SEQ ID NO: 1980380 - RNA, 14 nt, Human
guggagcccaggag

SEQ ID NO: 1980381 - RNA, 15 nt, Human
guggagcccaggagu

SEQ ID NO: 1980382 - RNA, 19 nt, Human
guggagccugacagccaga

SEQ ID NO: 1980383 - RNA, 21 nt, Human
guggagccugacagccagaac

SEQ ID NO: 1980384 - RNA, 22 nt, Human
guggagccugacagccagaacu

SEQ ID NO: 1980385 - RNA, 23 nt, Human
guggagccugacagccagaacuc

SEQ ID NO: 1980386 - RNA, 16 nt, Human
guggagcguucaccag

SEQ ID NO: 1980387 - RNA, 14 nt, Human
guggagucauuucu

SEQ ID NO: 1980388 - RNA, 20 nt, Human
guggagguugcugguacaca

SEQ ID NO: 1980389 - RNA, 22 nt, Human
guggagucagccucgcaggccu

SEQ ID NO: 1980390 - RNA, 17 nt, Human
guggaguucaucuugaa

SEQ ID NO: 1980391 - RNA, 16 nt, Human
guggaugccugguggc

SEQ ID NO: 1980392 - RNA, 18 nt, Human
guggaugccugguggcag

SEQ ID NO: 1980393 - RNA, 21 nt, Human
guggaugccacagcccagcuu

SEQ ID NO: 1980394 - RNA, 16 nt, Human
guggaugcaauuuuuc

SEQ ID NO: 1980395 - RNA, 18 nt, Human
gugcuugugaaagagguc

SEQ ID NO: 1980396 - RNA, 17 nt, Human
guggaaauuaagaagaa

SEQ ID NO: 1980397 - RNA, 18 nt, Human
guggaaauuaagaagaaa

SEQ ID NO: 1980398 - RNA, 19 nt, Human
guggaaauuaagaagaaac

SEQ ID NO: 1980399 - RNA, 20 nt, Human
guggaaauuaagaagaaacu

SEQ ID NO: 1980400 - RNA, 23 nt, Human
guggaaaagccaagaggcugcag

SEQ ID NO: 1980401 - RNA, 18 nt, Human
guggaaaaauagccugcc

SEQ ID NO: 1980402 - RNA, 18 nt, Human
gugcuuauguaugaggua

SEQ ID NO: 1980403 - RNA, 15 nt, Human
gugcuuggaggaagg

SEQ ID NO: 1980404 - RNA, 13 nt, Human
gugcuuggaggaa

SEQ ID NO: 1980405 - RNA, 12 nt, Human
gugcuuggagga

SEQ ID NO: 1980406 - RNA, 21 nt, Human
gugcuucugccacccugcuga

SEQ ID NO: 1980407 - RNA, 22 nt, Human
gugcuucugccacccugcugag

SEQ ID NO: 1980408 - RNA, 11 nt, Human
gugcugcccug

SEQ ID NO: 1980409 - RNA, 22 nt, Human
gugcugccauccagguucagcu

SEQ ID NO: 1980410 - RNA, 21 nt, Human
gugcugccacacuucaggcuc

SEQ ID NO: 1980411 - RNA, 19 nt, Human
gugcuguguuugcuccccu

SEQ ID NO: 1980412 - RNA, 19 nt, Human
gugcugagucugaaggcug

SEQ ID NO: 1980413 - RNA, 18 nt, Human
gugcugagucugaaggcu

SEQ ID NO: 1980414 - RNA, 17 nt, Human
gugcugagucugaaggc

SEQ ID NO: 1980415 - RNA, 16 nt, Human
gugcugagucugaagg

SEQ ID NO: 1980416 - RNA, 12 nt, Human
gugcugagucug

SEQ ID NO: 1980417 - RNA, 12 nt, Human
gugcugcauuua

SEQ ID NO: 1980418 - RNA, 19 nt, Human
gugcugcauuuaaaagaua

SEQ ID NO: 1980419 - RNA, 20 nt, Human
gugcugcauuuaaaagauac

SEQ ID NO: 1980420 - RNA, 15 nt, Human
gugcugccauccagg

SEQ ID NO: 1980421 - RNA, 12 nt, Human
gugcugccacac

SEQ ID NO: 1980422 - RNA, 22 nt, Human
gugcugcagggcuuuaaaauuc

SEQ ID NO: 1980423 - RNA, 13 nt, Human
gugcugcaguaug

SEQ ID NO: 1980424 - RNA, 18 nt, Human
gugcugccauccagguuc

SEQ ID NO: 1980425 - RNA, 19 nt, Human
gugcugccauccagguuca

SEQ ID NO: 1980426 - RNA, 21 nt, Human
gugccuuggggacaagagcag

SEQ ID NO: 1980427 - RNA, 22 nt, Human
gugccgagaaggaagccuccca

SEQ ID NO: 1980428 - RNA, 15 nt, Human
gugcucuggacaggc

SEQ ID NO: 1980429 - RNA, 16 nt, Human
gugcucuggacaggca

SEQ ID NO: 1980430 - RNA, 17 nt, Human
gugccuuugcagcucag

SEQ ID NO: 1980431 - RNA, 17 nt, Human
gugcucuggacaggcau

SEQ ID NO: 1980432 - RNA, 18 nt, Human
gugcucuggacaggcaug

SEQ ID NO: 1980433 - RNA, 20 nt, Human
gugcugaaugguuuucaaaa

SEQ ID NO: 1980434 - RNA, 19 nt, Human
gugcugaaugguuuucaaa

SEQ ID NO: 1980435 - RNA, 23 nt, Human
gugcugaaugguuuucaaaauaa

SEQ ID NO: 1980436 - RNA, 19 nt, Human
gugaccuuccaagagccug

SEQ ID NO: 1980437 - RNA, 20 nt, Human
gugaccuuccaagagccuga

SEQ ID NO: 1980438 - RNA, 16 nt, Human
gugacugaauuucuuu

SEQ ID NO: 1980439 - RNA, 18 nt, Human
gugacugaauuucuuuug

SEQ ID NO: 1980440 - RNA, 15 nt, Human
gugacugaauuucuu

SEQ ID NO: 1980441 - RNA, 16 nt, Human
gugacaacacuugugu

SEQ ID NO: 1980442 - RNA, 16 nt, Human
gugaccucagcuuuga

SEQ ID NO: 1980443 - RNA, 20 nt, Human
gugaccuaucaguuauuaau

SEQ ID NO: 1980444 - RNA, 19 nt, Human
gugaccucuagcccugccc

SEQ ID NO: 1980445 - RNA, 20 nt, Human
gugaccucuagcccugcccg

SEQ ID NO: 1980446 - RNA, 17 nt, Human
gugacugaucucucgug

SEQ ID NO: 1980447 - RNA, 17 nt, Human
gugagcaggcugugagu

SEQ ID NO: 1980448 - RNA, 13 nt, Human
gugagccacugca

SEQ ID NO: 1980449 - RNA, 17 nt, Human
gugagccaccgugccug

SEQ ID NO: 1980450 - RNA, 21 nt, Human
gugagccaccgugccuggcca

SEQ ID NO: 1980451 - RNA, 16 nt, Human
gugagccaccacgccc

SEQ ID NO: 1980452 - RNA, 15 nt, Human
gugagccaccgugcc

SEQ ID NO: 1980453 - RNA, 15 nt, Human
gugagccaccacgcc

SEQ ID NO: 1980454 - RNA, 19 nt, Human
gugaggaagccgcuggggc

SEQ ID NO: 1980455 - RNA, 16 nt, Human
gugaggaagccgcugg

SEQ ID NO: 1980456 - RNA, 11 nt, Human
gugaggaagcc

SEQ ID NO: 1980457 - RNA, 11 nt, Human
gugagcuggag

SEQ ID NO: 1980458 - RNA, 14 nt, Human
gugaggaaaucaaa

SEQ ID NO: 1980459 - RNA, 18 nt, Human
gugaggaaaucaaagugc

SEQ ID NO: 1980460 - RNA, 22 nt, Human
gugaggaaaucaaagugcuauu

SEQ ID NO: 1980461 - RNA, 14 nt, Human
gugagccacugcac

SEQ ID NO: 1980462 - RNA, 22 nt, Human
gugagccaccgugccuggccac

SEQ ID NO: 1980463 - RNA, 14 nt, Human
gugagcuacaaaug

SEQ ID NO: 1980464 - RNA, 13 nt, Human
gugagcugcacca

SEQ ID NO: 1980465 - RNA, 17 nt, Human
gugagcugcugccauga

SEQ ID NO: 1980466 - RNA, 19 nt, Human
gugagcugcugccaugaac

SEQ ID NO: 1980467 - RNA, 14 nt, Human
gugaaucagagcac

SEQ ID NO: 1980468 - RNA, 22 nt, Human
gugaauacugcuugaauaaaca

SEQ ID NO: 1980469 - RNA, 16 nt, Human
gugaauuacuaacuuc

SEQ ID NO: 1980470 - RNA, 18 nt, Human
gugaauuacuaacuucua

SEQ ID NO: 1980471 - RNA, 19 nt, Human
gugaauuacuaacuucuaa

SEQ ID NO: 1980472 - RNA, 19 nt, Human
gugaaaggaaagagggagg

SEQ ID NO: 1980473 - RNA, 13 nt, Human
gugaaaucauuca

SEQ ID NO: 1980474 - RNA, 12 nt, Human
gugaaauuuuuc

SEQ ID NO: 1980475 - RNA, 20 nt, Human
gugaaauuauucauaauuau

SEQ ID NO: 1980476 - RNA, 18 nt, Human
gugaaauuauucauaauu

SEQ ID NO: 1980477 - RNA, 12 nt, Human
gugaaacuggau

SEQ ID NO: 1980478 - RNA, 19 nt, Human
gugaaagaaaauaacaaua

SEQ ID NO: 1980479 - RNA, 22 nt, Human
gugaaaauaagccaugagaaug

SEQ ID NO: 1980480 - RNA, 13 nt, Human
gugaaaauaauug

SEQ ID NO: 1980481 - RNA, 12 nt, Human
gugaaaagaaua

SEQ ID NO: 1980482 - RNA, 23 nt, Human
gugaaaagaaaaaugagccuggc

SEQ ID NO: 1980483 - RNA, 14 nt, Human
gugaaaagaaaaau

SEQ ID NO: 1980484 - RNA, 16 nt, Human
gugaaaaugugugugu

SEQ ID NO: 1980485 - RNA, 14 nt, Human
gugauucuccugcc

SEQ ID NO: 1980486 - RNA, 20 nt, Human
gugauucucaugccucagcc

SEQ ID NO: 1980487 - RNA, 16 nt, Human
gugauucuccugccuc

SEQ ID NO: 1980488 - RNA, 17 nt, Human
gugauucuccugccuca

SEQ ID NO: 1980489 - RNA, 18 nt, Human
gugauucuccugccucag

SEQ ID NO: 1980490 - RNA, 19 nt, Human
gugauucuccugccucagc

SEQ ID NO: 1980491 - RNA, 20 nt, Human
gugauucuccugccucagcc

SEQ ID NO: 1980492 - RNA, 22 nt, Human
gugauucuccugccucagccuc

SEQ ID NO: 1980493 - RNA, 23 nt, Human
gugauucuccugccucagccucc

SEQ ID NO: 1980494 - RNA, 23 nt, Human
gugauccucccaccucagccucc

SEQ ID NO: 1980495 - RNA, 20 nt, Human
gugauucacagugugaaucu

SEQ ID NO: 1980496 - RNA, 20 nt, Human
gugauccucccaccucagcc

SEQ ID NO: 1980497 - RNA, 22 nt, Human
gugauccucccaccucagccuc

SEQ ID NO: 1980498 - RNA, 14 nt, Human
gugauccucccacc

SEQ ID NO: 1980499 - RNA, 14 nt, Human
gugauccacucgcc

SEQ ID NO: 1980500 - RNA, 15 nt, Human
gugauccucccaccu

SEQ ID NO: 1980501 - RNA, 18 nt, Human
gugauccucccaccucag

SEQ ID NO: 1980502 - RNA, 11 nt, Human
gugaggccaga

SEQ ID NO: 1980503 - RNA, 23 nt, Human
gugaggauuaaauaauguaaaua

SEQ ID NO: 1980504 - RNA, 22 nt, Human
gugaggagaaugaaauguaugu

SEQ ID NO: 1980505 - RNA, 13 nt, Human
gugaggccagaga

SEQ ID NO: 1980506 - RNA, 15 nt, Human
gugauccacccaccu

SEQ ID NO: 1980507 - RNA, 18 nt, Human
gugauccacccaccucag

SEQ ID NO: 1980508 - RNA, 20 nt, Human
gugauccacccaccucagcc

SEQ ID NO: 1980509 - RNA, 13 nt, Human
gugcauaccacuu

SEQ ID NO: 1980510 - RNA, 14 nt, Human
gugcauaccacuuu

SEQ ID NO: 1980511 - RNA, 21 nt, Human
gugcauaccacuuuuguucuu

SEQ ID NO: 1980512 - RNA, 15 nt, Human
gugcaucucagccca

SEQ ID NO: 1980513 - RNA, 14 nt, Human
gugcaucucagccc

SEQ ID NO: 1980514 - RNA, 18 nt, Human
gugcaucucagcccacau

SEQ ID NO: 1980515 - RNA, 18 nt, Human
gugcaugcagcaucuaag

SEQ ID NO: 1980516 - RNA, 20 nt, Human
gugccagguuuuuggucuga

SEQ ID NO: 1980517 - RNA, 22 nt, Human
gugccagguuuuuggucugacc

SEQ ID NO: 1980518 - RNA, 22 nt, Human
gugcaaaguucccuacuuccug

SEQ ID NO: 1980519 - RNA, 18 nt, Human
gugcaguaacuugggagu

SEQ ID NO: 1980520 - RNA, 13 nt, Human
gugcaguagugca

SEQ ID NO: 1980521 - RNA, 19 nt, Human
gugcauaaguuaacuucca

SEQ ID NO: 1980522 - RNA, 11 nt, Human
gugcccagcuu

SEQ ID NO: 1980523 - RNA, 20 nt, Human
gugcccacaggaucagucug

SEQ ID NO: 1980524 - RNA, 23 nt, Human
gugcccaagaauagaugcugacu

SEQ ID NO: 1980525 - RNA, 12 nt, Human
gucucugugagg

SEQ ID NO: 1980526 - RNA, 23 nt, Human
gucucucacagacaggaccccug

SEQ ID NO: 1980527 - RNA, 12 nt, Human
gucucucacaga

SEQ ID NO: 1980528 - RNA, 14 nt, Human
gucucucacagaca

SEQ ID NO: 1980529 - RNA, 16 nt, Human
gucucucacagacagg

SEQ ID NO: 1980530 - RNA, 19 nt, Human
gucucucacagacaggacc

SEQ ID NO: 1980531 - RNA, 19 nt, Human
gucucggaaccugugagcu

SEQ ID NO: 1980532 - RNA, 23 nt, Human
gucucggaaccugugagcugcac

SEQ ID NO: 1980533 - RNA, 20 nt, Human
gucucggaucaggcucccag

SEQ ID NO: 1980534 - RNA, 13 nt, Human
gucugacccacug

SEQ ID NO: 1980535 - RNA, 14 nt, Human
gucugacccacugc

SEQ ID NO: 1980536 - RNA, 15 nt, Human
gucucuucuccacug

SEQ ID NO: 1980537 - RNA, 16 nt, Human
gucucuucuccacugg

SEQ ID NO: 1980538 - RNA, 14 nt, Human
gucucuucuccacu

SEQ ID NO: 1980539 - RNA, 15 nt, Human
gucugacccacugcu

SEQ ID NO: 1980540 - RNA, 17 nt, Human
gucucuucuccacugga

SEQ ID NO: 1980541 - RNA, 11 nt, Human
gucucuucucc

SEQ ID NO: 1980542 - RNA, 18 nt, Human
gucugaggaauccagacc

SEQ ID NO: 1980543 - RNA, 19 nt, Human
gucugaggaauccagaccc

SEQ ID NO: 1980544 - RNA, 20 nt, Human
gucugauucccaagcucugc

SEQ ID NO: 1980545 - RNA, 21 nt, Human
gucugauucccaagcucugcu

SEQ ID NO: 1980546 - RNA, 17 nt, Human
gucugauucccaagcuc

SEQ ID NO: 1980547 - RNA, 14 nt, Human
gucugauauucaaa

SEQ ID NO: 1980548 - RNA, 18 nt, Human
gucugauucccaagcucu

SEQ ID NO: 1980549 - RNA, 19 nt, Human
gucugauucccaagcucug

SEQ ID NO: 1980550 - RNA, 21 nt, Human
gucugaguuguuaccccaagc

SEQ ID NO: 1980551 - RNA, 17 nt, Human
gucugagguugggagag

SEQ ID NO: 1980552 - RNA, 21 nt, Human
gucugagggcuuguaguucuu

SEQ ID NO: 1980553 - RNA, 21 nt, Human
gucugaggaauccagacccgg

SEQ ID NO: 1980554 - RNA, 18 nt, Human
gucugaggccguugcuga

SEQ ID NO: 1980555 - RNA, 22 nt, Human
gucugaggccguugcugacuua

SEQ ID NO: 1980556 - RNA, 20 nt, Human
gucugagggcuuguaguucu

SEQ ID NO: 1980557 - RNA, 15 nt, Human
gucuaauguuuaagc

SEQ ID NO: 1980558 - RNA, 17 nt, Human
gucuaauguuuaagcag

SEQ ID NO: 1980559 - RNA, 15 nt, Human
gucuacacugugcug

SEQ ID NO: 1980560 - RNA, 17 nt, Human
gucuacagcucccccag

SEQ ID NO: 1980561 - RNA, 21 nt, Human
gucuacagcucccccagcucc

SEQ ID NO: 1980562 - RNA, 13 nt, Human
gucuacagcuccc

SEQ ID NO: 1980563 - RNA, 15 nt, Human
gucuacagcuccccc

SEQ ID NO: 1980564 - RNA, 23 nt, Human
gucuaccccucccggcccugccu

SEQ ID NO: 1980565 - RNA, 15 nt, Human
gucguuuuaaaaaca

SEQ ID NO: 1980566 - RNA, 23 nt, Human
gucguuaaaaacagauuuggaaa

SEQ ID NO: 1980567 - RNA, 17 nt, Human
guccugugucaguuuau

SEQ ID NO: 1980568 - RNA, 22 nt, Human
guccugugucaguuuauguuuu

SEQ ID NO: 1980569 - RNA, 17 nt, Human
guccuuaccagcagagc

SEQ ID NO: 1980570 - RNA, 16 nt, Human
guccuuaccagcagag

SEQ ID NO: 1980571 - RNA, 15 nt, Human
guccuuaccagcaga

SEQ ID NO: 1980572 - RNA, 16 nt, Human
guccugugucaguuua

SEQ ID NO: 1980573 - RNA, 20 nt, Human
gucucacuauguugcccagg

SEQ ID NO: 1980574 - RNA, 21 nt, Human
gucucacuauguugcccaggc

SEQ ID NO: 1980575 - RNA, 13 nt, Human
gucucacuguugc

SEQ ID NO: 1980576 - RNA, 23 nt, Human
gucucacuauguugcccaggcag

SEQ ID NO: 1980577 - RNA, 16 nt, Human
gucucacuguugccca

SEQ ID NO: 1980578 - RNA, 17 nt, Human
gucucacuguugcccag

SEQ ID NO: 1980579 - RNA, 18 nt, Human
gucucacuguugcccagg

SEQ ID NO: 1980580 - RNA, 19 nt, Human
gucucacuguugcccaggc

SEQ ID NO: 1980581 - RNA, 20 nt, Human
gucucacuguugcccaggcu

SEQ ID NO: 1980582 - RNA, 21 nt, Human
gucucacuguugcccaggcug

SEQ ID NO: 1980583 - RNA, 22 nt, Human
gucucacuguugcccaggcugg

SEQ ID NO: 1980584 - RNA, 23 nt, Human
gucucacuguugcccaggcuggc

SEQ ID NO: 1980585 - RNA, 22 nt, Human
gucucgcucuguugcccaggcu

SEQ ID NO: 1980586 - RNA, 14 nt, Human
guccuccaagccag

SEQ ID NO: 1980587 - RNA, 22 nt, Human
guccucagggagcagggaaggc

SEQ ID NO: 1980588 - RNA, 12 nt, Human
guccuccagaac

SEQ ID NO: 1980589 - RNA, 13 nt, Human
guccuccagaacu

SEQ ID NO: 1980590 - RNA, 13 nt, Human
guccucagggagc

SEQ ID NO: 1980591 - RNA, 16 nt, Human
guccucagggagcagg

SEQ ID NO: 1980592 - RNA, 13 nt, Human
guccucacacuca

SEQ ID NO: 1980593 - RNA, 21 nt, Human
guccuauuauauucauucuuu

SEQ ID NO: 1980594 - RNA, 17 nt, Human
guccuauuaguguuaua

SEQ ID NO: 1980595 - RNA, 20 nt, Human
guccuauuaguguuauauga

SEQ ID NO: 1980596 - RNA, 21 nt, Human
guccuauuaguguuauaugaa

SEQ ID NO: 1980597 - RNA, 22 nt, Human
guccuauuaguguuauaugaac

SEQ ID NO: 1980598 - RNA, 19 nt, Human
guccuauuauauucauucu

SEQ ID NO: 1980599 - RNA, 23 nt, Human
guccuagaaauuccccacccuga

SEQ ID NO: 1980600 - RNA, 17 nt, Human
guccuagacuucaggga

SEQ ID NO: 1980601 - RNA, 15 nt, Human
guccuacucuguguc

SEQ ID NO: 1980602 - RNA, 23 nt, Human
guccuacucugugucaggugggg

SEQ ID NO: 1980603 - RNA, 16 nt, Human
gucccuggcuuccuua

SEQ ID NO: 1980604 - RNA, 16 nt, Human
gucccugguggcagcu

SEQ ID NO: 1980605 - RNA, 17 nt, Human
gucccugguggcagcuc

SEQ ID NO: 1980606 - RNA, 13 nt, Human
guccuacucugug

SEQ ID NO: 1980607 - RNA, 15 nt, Human
gucccuggcuuccuu

SEQ ID NO: 1980608 - RNA, 12 nt, Human
gucccagugccg

SEQ ID NO: 1980609 - RNA, 19 nt, Human
guccugggagugagcuggu

SEQ ID NO: 1980610 - RNA, 17 nt, Human
guccugggagugagcug

SEQ ID NO: 1980611 - RNA, 18 nt, Human
guccugggagugagcugg

SEQ ID NO: 1980612 - RNA, 19 nt, Human
guccuggggaaccugaccc

SEQ ID NO: 1980613 - RNA, 20 nt, Human
guccuggggaaccugacccc

SEQ ID NO: 1980614 - RNA, 18 nt, Human
guccuguaggaguucuau

SEQ ID NO: 1980615 - RNA, 15 nt, Human
guccugggagugagc

SEQ ID NO: 1980616 - RNA, 16 nt, Human
guccugggagugagcu

SEQ ID NO: 1980617 - RNA, 17 nt, Human
guccuggcaugggaaug

SEQ ID NO: 1980618 - RNA, 23 nt, Human
guccucccaucucacacaugagc

SEQ ID NO: 1980619 - RNA, 14 nt, Human
guccucccaucuca

SEQ ID NO: 1980620 - RNA, 13 nt, Human
guccucccaucuc

SEQ ID NO: 1980621 - RNA, 12 nt, Human
guccucccaucu

SEQ ID NO: 1980622 - RNA, 20 nt, Human
guccuccagaacucuuccuc

SEQ ID NO: 1980623 - RNA, 13 nt, Human
guagagugggagc

SEQ ID NO: 1980624 - RNA, 15 nt, Human
guagagguauaauug

SEQ ID NO: 1980625 - RNA, 16 nt, Human
guagagguauaauugu

SEQ ID NO: 1980626 - RNA, 19 nt, Human
guagagguauaauugugug

SEQ ID NO: 1980627 - RNA, 20 nt, Human
guauuacaguggggaaugaa

SEQ ID NO: 1980628 - RNA, 12 nt, Human
guagagucugag

SEQ ID NO: 1980629 - RNA, 14 nt, Human
guagagucugaggg

SEQ ID NO: 1980630 - RNA, 21 nt, Human
guagagucugagggcuuguag

SEQ ID NO: 1980631 - RNA, 15 nt, Human
guagagugggagcug

SEQ ID NO: 1980632 - RNA, 22 nt, Human
guauuacaguggggaaugaaga

SEQ ID NO: 1980633 - RNA, 13 nt, Human
guauuacuucugc

SEQ ID NO: 1980634 - RNA, 14 nt, Human
guauuacuucugcu

SEQ ID NO: 1980635 - RNA, 15 nt, Human
guauuacuucugcua

SEQ ID NO: 1980636 - RNA, 15 nt, Human
guauuauguguguuu

SEQ ID NO: 1980637 - RNA, 23 nt, Human
guauuauaaacaagaaugaaggu

SEQ ID NO: 1980638 - RNA, 14 nt, Human
guauuauaccuuuu

SEQ ID NO: 1980639 - RNA, 22 nt, Human
guauucaauuaaagaaauaauu

SEQ ID NO: 1980640 - RNA, 23 nt, Human
guauucagcaaggcgcuaacuug

SEQ ID NO: 1980641 - RNA, 14 nt, Human
guauucauauuugu

SEQ ID NO: 1980642 - RNA, 17 nt, Human
guauucauauuuguacu

SEQ ID NO: 1980643 - RNA, 19 nt, Human
guauucauauuuguacuuu

SEQ ID NO: 1980644 - RNA, 23 nt, Human
guauucauauuuguacuuucugu

SEQ ID NO: 1980645 - RNA, 19 nt, Human
guauuuauuuaguauuuau

SEQ ID NO: 1980646 - RNA, 12 nt, Human
guauuuauucuu

SEQ ID NO: 1980647 - RNA, 15 nt, Human
guauuugaaaacaga

SEQ ID NO: 1980648 - RNA, 16 nt, Human
guauuugaaaacagaa

SEQ ID NO: 1980649 - RNA, 19 nt, Human
guauuugaaaacagaaauu

SEQ ID NO: 1980650 - RNA, 20 nt, Human
guauuugaaaacagaaauug

SEQ ID NO: 1980651 - RNA, 17 nt, Human
guauuugaaagugccuu

SEQ ID NO: 1980652 - RNA, 17 nt, Human
guauuuggaauuagaac

SEQ ID NO: 1980653 - RNA, 15 nt, Human
gucaauuacaggaag

SEQ ID NO: 1980654 - RNA, 13 nt, Human
gucaauuacagga

SEQ ID NO: 1980655 - RNA, 16 nt, Human
gucaauuacaggaagu

SEQ ID NO: 1980656 - RNA, 14 nt, Human
gucaaguggcaaag

SEQ ID NO: 1980657 - RNA, 20 nt, Human
gucaaguggcaaagcuguuc

SEQ ID NO: 1980658 - RNA, 22 nt, Human
gucaaguggcaaagcuguucuu

SEQ ID NO: 1980659 - RNA, 15 nt, Human
gucaccccggccacc

SEQ ID NO: 1980660 - RNA, 13 nt, Human
gucaccccggcca

SEQ ID NO: 1980661 - RNA, 14 nt, Human
gucacccaugacag

SEQ ID NO: 1980662 - RNA, 20 nt, Human
gucaccugaagacucauucu

SEQ ID NO: 1980663 - RNA, 19 nt, Human
gucaccucacucagcacca

SEQ ID NO: 1980664 - RNA, 21 nt, Human
gucaccucacucagcaccacu

SEQ ID NO: 1980665 - RNA, 13 nt, Human
gucaccucacuca

SEQ ID NO: 1980666 - RNA, 15 nt, Human
gucaccucacucagc

SEQ ID NO: 1980667 - RNA, 16 nt, Human
gucaccucacucagca

SEQ ID NO: 1980668 - RNA, 12 nt, Human
guauuuggguuu

SEQ ID NO: 1980669 - RNA, 18 nt, Human
gucaagagggucugagga

SEQ ID NO: 1980670 - RNA, 19 nt, Human
gucaagagggucugaggaa

SEQ ID NO: 1980671 - RNA, 21 nt, Human
gucaagaauagcauuguaaaa

SEQ ID NO: 1980672 - RNA, 18 nt, Human
gucaagugaaaaaggagg

SEQ ID NO: 1980673 - RNA, 16 nt, Human
gucaagugaaaaagga

SEQ ID NO: 1980674 - RNA, 19 nt, Human
gucaagugaaaaaggagga

SEQ ID NO: 1980675 - RNA, 23 nt, Human
gucagcaguugcugguaaaauga

SEQ ID NO: 1980676 - RNA, 14 nt, Human
gucagcaguugcug

SEQ ID NO: 1980677 - RNA, 22 nt, Human
gucagcccaaaccaccagaagc

SEQ ID NO: 1980678 - RNA, 23 nt, Human
gucagcccaaaccaccagaagcc

SEQ ID NO: 1980679 - RNA, 17 nt, Human
gucaccugcuucucugc

SEQ ID NO: 1980680 - RNA, 22 nt, Human
gucaccugggcgucaucugguc

SEQ ID NO: 1980681 - RNA, 23 nt, Human
gucaccucacucagcaccacuca

SEQ ID NO: 1980682 - RNA, 13 nt, Human
gucaccugcuucu

SEQ ID NO: 1980683 - RNA, 14 nt, Human
gucaccugcuucuc

SEQ ID NO: 1980684 - RNA, 16 nt, Human
gucaccugcuucucug

SEQ ID NO: 1980685 - RNA, 16 nt, Human
gucagccucgcaggcc

SEQ ID NO: 1980686 - RNA, 23 nt, Human
gucagccucgcaggccucccugc

SEQ ID NO: 1980687 - RNA, 18 nt, Human
gucauacucgagucugag

SEQ ID NO: 1980688 - RNA, 19 nt, Human
gucauacucgagucugagg

SEQ ID NO: 1980689 - RNA, 20 nt, Human
gucauacucgagucugaggc

SEQ ID NO: 1980690 - RNA, 13 nt, Human
gucauacauagga

SEQ ID NO: 1980691 - RNA, 15 nt, Human
gucauaggaaguuag

SEQ ID NO: 1980692 - RNA, 16 nt, Human
gucauaggaaguuagc

SEQ ID NO: 1980693 - RNA, 21 nt, Human
gucauauaagauucauauuua

SEQ ID NO: 1980694 - RNA, 14 nt, Human
gucauauguuugcu

SEQ ID NO: 1980695 - RNA, 17 nt, Human
gucauauuuaaacagaa

SEQ ID NO: 1980696 - RNA, 16 nt, Human
gucaucucagcuggau

SEQ ID NO: 1980697 - RNA, 13 nt, Human
gucaucuagcauu

SEQ ID NO: 1980698 - RNA, 21 nt, Human
gucaucuagcauuagguauau

SEQ ID NO: 1980699 - RNA, 18 nt, Human
gucaucauguuuugauuu

SEQ ID NO: 1980700 - RNA, 13 nt, Human
gucaucugagaau

SEQ ID NO: 1980701 - RNA, 15 nt, Human
gucaucugagaauga

SEQ ID NO: 1980702 - RNA, 19 nt, Human
gucaucugagaaugaacaa

SEQ ID NO: 1980703 - RNA, 22 nt, Human
gucaugcagaguauuucuaaag

SEQ ID NO: 1980704 - RNA, 22 nt, Human
gucaugauguuuuuaaaaucuu

SEQ ID NO: 1980705 - RNA, 23 nt, Human
gucaugauguuuuuaaaaucuua

SEQ ID NO: 1980706 - RNA, 16 nt, Human
gucaugaugcucuuuc

SEQ ID NO: 1980707 - RNA, 19 nt, Human
gucaugaugcucuuuccca

SEQ ID NO: 1980708 - RNA, 13 nt, Human
gucaugauguuuu

SEQ ID NO: 1980709 - RNA, 14 nt, Human
gucaugauguuuuu

SEQ ID NO: 1980710 - RNA, 15 nt, Human
gucaugauguuuuua

SEQ ID NO: 1980711 - RNA, 16 nt, Human
gucaugauguuuuuaa

SEQ ID NO: 1980712 - RNA, 20 nt, Human
gucaugauguuuuuaaaauc

SEQ ID NO: 1980713 - RNA, 20 nt, Human
gucccagaaugccuccugca

SEQ ID NO: 1980714 - RNA, 17 nt, Human
gucccagauacuugggg

SEQ ID NO: 1980715 - RNA, 11 nt, Human
gucccagcagc

SEQ ID NO: 1980716 - RNA, 14 nt, Human
gucccagcagccag

SEQ ID NO: 1980717 - RNA, 17 nt, Human
gucccagcagccagcca

SEQ ID NO: 1980718 - RNA, 15 nt, Human
gucccagcagccagc

SEQ ID NO: 1980719 - RNA, 16 nt, Human
gucccagcagccagcc

SEQ ID NO: 1980720 - RNA, 22 nt, Human
guccaggacaggagaugcugug

SEQ ID NO: 1980721 - RNA, 23 nt, Human
guccaggccuacuccugucuucu

SEQ ID NO: 1980722 - RNA, 24 nt, Human
guccaggccuacuccugucuucug

SEQ ID NO: 1980723 - RNA, 15 nt, Human
guccaggccuacucc

SEQ ID NO: 1980724 - RNA, 19 nt, Human
guccaggccuacuccuguc

SEQ ID NO: 1980725 - RNA, 20 nt, Human
guccaggccuacuccugucu

SEQ ID NO: 1980726 - RNA, 21 nt, Human
guccaggccuacuccugucuu

SEQ ID NO: 1980727 - RNA, 14 nt, Human
gucccacucagucc

SEQ ID NO: 1980728 - RNA, 15 nt, Human
gucccacucagucca

SEQ ID NO: 1980729 - RNA, 13 nt, Human
gucccacuccaag

SEQ ID NO: 1980730 - RNA, 19 nt, Human
gucccacuccaagccagca

SEQ ID NO: 1980731 - RNA, 15 nt, Human
gucaugcuccccugu

SEQ ID NO: 1980732 - RNA, 17 nt, Human
gucaugcuccccugugc

SEQ ID NO: 1980733 - RNA, 19 nt, Human
gucaugcuccccugugcca

SEQ ID NO: 1980734 - RNA, 20 nt, Human
gucaugcuccccugugccag

SEQ ID NO: 1980735 - RNA, 23 nt, Human
gucaugcuccccugugccagccc

SEQ ID NO: 1980736 - RNA, 14 nt, Human
guccacccaggagc

SEQ ID NO: 1980737 - RNA, 15 nt, Human
guccacccaggagcc

SEQ ID NO: 1980738 - RNA, 16 nt, Human
guccacccaggagccc

SEQ ID NO: 1980739 - RNA, 12 nt, Human
guccacuuuucc

SEQ ID NO: 1980740 - RNA, 14 nt, Human
guccacuuuuccag

SEQ ID NO: 1980741 - RNA, 15 nt, Human
guccacuuuuccagu

SEQ ID NO: 1980742 - RNA, 18 nt, Human
guccacuuuuccaguauu

SEQ ID NO: 1980743 - RNA, 19 nt, Human
guccacuuuuccaguauuu

SEQ ID NO: 1980744 - RNA, 20 nt, Human
guccacuuuuccaguauuuu

SEQ ID NO: 1980745 - RNA, 21 nt, Human
guccacuuuuccaguauuuua

SEQ ID NO: 1980746 - RNA, 22 nt, Human
guccacuuuuccaguauuuuag

SEQ ID NO: 1980747 - RNA, 20 nt, Human
gggcuuggggaccagagcug

SEQ ID NO: 1980748 - RNA, 16 nt, Human
gggcuucugugcccag

SEQ ID NO: 1980749 - RNA, 19 nt, Human
gggcuucauacacaugaga

SEQ ID NO: 1980750 - RNA, 20 nt, Human
gggcuucauccuccucagau

SEQ ID NO: 1980751 - RNA, 18 nt, Human
gggcuuccugaggggaga

SEQ ID NO: 1980752 - RNA, 13 nt, Human
gggcuucauacac

SEQ ID NO: 1980753 - RNA, 19 nt, Human
gggcuucauccuccucaga

SEQ ID NO: 1980754 - RNA, 19 nt, Human
gggcuucaguggcagcugc

SEQ ID NO: 1980755 - RNA, 20 nt, Human
gggcuucaguggcagcugcu

SEQ ID NO: 1980756 - RNA, 15 nt, Human
gggcuucaguggcag

SEQ ID NO: 1980757 - RNA, 16 nt, Human
gggcuucaguggcagc

SEQ ID NO: 1980758 - RNA, 17 nt, Human
gggcuucaguggcagcu

SEQ ID NO: 1980759 - RNA, 18 nt, Human
gggcuucaguggcagcug

SEQ ID NO: 1980760 - RNA, 12 nt, Human
ggggagcuggac

SEQ ID NO: 1980761 - RNA, 20 nt, Human
ggggagggugacaguggccg

SEQ ID NO: 1980762 - RNA, 19 nt, Human
ggggagguuuucuccccca

SEQ ID NO: 1980763 - RNA, 13 nt, Human
ggggaguggccac

SEQ ID NO: 1980764 - RNA, 18 nt, Human
ggggagacuuugauguca

SEQ ID NO: 1980765 - RNA, 21 nt, Human
gggcuuggggaccagagcugc

SEQ ID NO: 1980766 - RNA, 13 nt, Human
ggggauagaugug

SEQ ID NO: 1980767 - RNA, 17 nt, Human
ggggaucacagccucug

SEQ ID NO: 1980768 - RNA, 12 nt, Human
ggggcagccucu

SEQ ID NO: 1980769 - RNA, 14 nt, Human
ggggcagccugccu

SEQ ID NO: 1980770 - RNA, 19 nt, Human
ggggcagccugccuugccc

SEQ ID NO: 1980771 - RNA, 17 nt, Human
ggggcagagcccugcuc

SEQ ID NO: 1980772 - RNA, 14 nt, Human
ggggucuuaccuug

SEQ ID NO: 1980773 - RNA, 23 nt, Human
gggguucccuuuuuuggcugcug

SEQ ID NO: 1980774 - RNA, 20 nt, Human
gggguucuuucuuccucugc

SEQ ID NO: 1980775 - RNA, 22 nt, Human
gggguucuuucuuccucugcug

SEQ ID NO: 1980776 - RNA, 18 nt, Human
gggguuccuucugggcau

SEQ ID NO: 1980777 - RNA, 18 nt, Human
ggguacccacugcucugg

SEQ ID NO: 1980778 - RNA, 11 nt, Human
ggguacaugug

SEQ ID NO: 1980779 - RNA, 13 nt, Human
ggguacccacugc

SEQ ID NO: 1980780 - RNA, 15 nt, Human
ggguacccacugcuc

SEQ ID NO: 1980781 - RNA, 19 nt, Human
ggguacuuguggacacagc

SEQ ID NO: 1980782 - RNA, 22 nt, Human
ggguacuuguggacacagcucu

SEQ ID NO: 1980783 - RNA, 23 nt, Human
ggguagagcggagaaaggaaggg

SEQ ID NO: 1980784 - RNA, 23 nt, Human
ggguacuuguggacacagcucuu

SEQ ID NO: 1980785 - RNA, 20 nt, Human
gggggaacgcccacuucccu

SEQ ID NO: 1980786 - RNA, 17 nt, Human
ggggcugggcagaggaa

SEQ ID NO: 1980787 - RNA, 16 nt, Human
ggggcugggcagagga

SEQ ID NO: 1980788 - RNA, 13 nt, Human
ggggcugggacau

SEQ ID NO: 1980789 - RNA, 20 nt, Human
gggcucugccucccaucacc

SEQ ID NO: 1980790 - RNA, 17 nt, Human
gggcucugccucccauc

SEQ ID NO: 1980791 - RNA, 16 nt, Human
gggcucugccucccau

SEQ ID NO: 1980792 - RNA, 15 nt, Human
gggcucugccuccca

SEQ ID NO: 1980793 - RNA, 13 nt, Human
gggcucugccucc

SEQ ID NO: 1980794 - RNA, 16 nt, Human
gggcugacugggccag

SEQ ID NO: 1980795 - RNA, 20 nt, Human
gggcugacugggccagggga

SEQ ID NO: 1980796 - RNA, 14 nt, Human
gggcuucaguggca

SEQ ID NO: 1980797 - RNA, 14 nt, Human
gggcugcaccggcu

SEQ ID NO: 1980798 - RNA, 16 nt, Human
gggcugaggugggagg

SEQ ID NO: 1980799 - RNA, 23 nt, Human
gggcucccuucccaccucucuca

SEQ ID NO: 1980800 - RNA, 18 nt, Human
gggcucccuucccaccuc

SEQ ID NO: 1980801 - RNA, 17 nt, Human
gggcucccuucccaccu

SEQ ID NO: 1980802 - RNA, 14 nt, Human
gggcucccuuccca

SEQ ID NO: 1980803 - RNA, 16 nt, Human
gggcgcgguggcucac

SEQ ID NO: 1980804 - RNA, 13 nt, Human
gggcucccuuccc

SEQ ID NO: 1980805 - RNA, 20 nt, Human
ggcucccacaggcccuuccu

SEQ ID NO: 1980806 - RNA, 21 nt, Human
ggcucccacaggcccuuccuc

SEQ ID NO: 1980807 - RNA, 22 nt, Human
ggcucccaaaacaccugacagc

SEQ ID NO: 1980808 - RNA, 21 nt, Human
gggcccuccgaccacuuccag

SEQ ID NO: 1980809 - RNA, 16 nt, Human
gggccuggcucaggug

SEQ ID NO: 1980810 - RNA, 14 nt, Human
gggccuggcucagg

SEQ ID NO: 1980811 - RNA, 18 nt, Human
gggccuggucguuuucaa

SEQ ID NO: 1980812 - RNA, 12 nt, Human
gggccuggccug

SEQ ID NO: 1980813 - RNA, 22 nt, Human
gggccuggcagccgugccuuca

SEQ ID NO: 1980814 - RNA, 10 nt, Human
gggccuggca

SEQ ID NO: 1980815 - RNA, 12 nt, Human
gggccuggcuca

SEQ ID NO: 1980816 - RNA, 14 nt, Human
gggccuggcccaug

SEQ ID NO: 1980817 - RNA, 19 nt, Human
gggccuggccugagcuggg

SEQ ID NO: 1980818 - RNA, 23 nt, Human
ggucagcccaaaccaccagaagc

SEQ ID NO: 1980819 - RNA, 22 nt, Human
ggucccaccccacacacgccag

SEQ ID NO: 1980820 - RNA, 22 nt, Human
ggucccacucaguccauagcag

SEQ ID NO: 1980821 - RNA, 14 nt, Human
ggucagcucagagc

SEQ ID NO: 1980822 - RNA, 12 nt, Human
ggucccacucag

SEQ ID NO: 1980823 - RNA, 14 nt, Human
ggucccacucaguc

SEQ ID NO: 1980824 - RNA, 23 nt, Human
ggucccccuuccauggacuuugu

SEQ ID NO: 1980825 - RNA, 18 nt, Human
ggucccccuuccauggac

SEQ ID NO: 1980826 - RNA, 13 nt, Human
ggucccccuucca

SEQ ID NO: 1980827 - RNA, 22 nt, Human
gguccccagcccuuccucugcu

SEQ ID NO: 1980828 - RNA, 23 nt, Human
gguccccagcccuuccucugcuc

SEQ ID NO: 1980829 - RNA, 19 nt, Human
gguccccagcccuuccucu

SEQ ID NO: 1980830 - RNA, 23 nt, Human
gguagaauguuuucaaauguucu

SEQ ID NO: 1980831 - RNA, 13 nt, Human
ggucacagccagg

SEQ ID NO: 1980832 - RNA, 14 nt, Human
ggucacagccaggc

SEQ ID NO: 1980833 - RNA, 17 nt, Human
ggucacagccaggcgcu

SEQ ID NO: 1980834 - RNA, 20 nt, Human
ggucacucuggcagcucaga

SEQ ID NO: 1980835 - RNA, 16 nt, Human
ggucacucuggcagcu

SEQ ID NO: 1980836 - RNA, 22 nt, Human
ggucacucuggcagcucagaga

SEQ ID NO: 1980837 - RNA, 12 nt, Human
ggucagagccug

SEQ ID NO: 1980838 - RNA, 13 nt, Human
ggucagagccugc

SEQ ID NO: 1980839 - RNA, 14 nt, Human
ggucagagccugca

SEQ ID NO: 1980840 - RNA, 15 nt, Human
ggucagagccugcag

SEQ ID NO: 1980841 - RNA, 16 nt, Human
ggucagagccugcagu

SEQ ID NO: 1980842 - RNA, 18 nt, Human
gggugcugggccccugcc

SEQ ID NO: 1980843 - RNA, 19 nt, Human
gggugcugggccccugccu

SEQ ID NO: 1980844 - RNA, 22 nt, Human
ggguaccacugaaucuguacag

SEQ ID NO: 1980845 - RNA, 19 nt, Human
ggguuccagcaccacacuc

SEQ ID NO: 1980846 - RNA, 22 nt, Human
ggguuccagcaauucuccugcc

SEQ ID NO: 1980847 - RNA, 16 nt, Human
gggugcuguuuugcca

SEQ ID NO: 1980848 - RNA, 17 nt, Human
ggguucuacccaggugc

SEQ ID NO: 1980849 - RNA, 22 nt, Human
ggguucuacccaggugcuagga

SEQ ID NO: 1980850 - RNA, 23 nt, Human
ggguucccuuuuuuggcugcuga

SEQ ID NO: 1980851 - RNA, 16 nt, Human
ggguuggccccugccc

SEQ ID NO: 1980852 - RNA, 19 nt, Human
ggguuggccccugcccggc

SEQ ID NO: 1980853 - RNA, 14 nt, Human
ggguucuuucuucc

SEQ ID NO: 1980854 - RNA, 22 nt, Human
gguacuuguggacacagcucuu

SEQ ID NO: 1980855 - RNA, 21 nt, Human
gguacuuguggacacagcucu

SEQ ID NO: 1980856 - RNA, 17 nt, Human
gguacuguaauguuaau

SEQ ID NO: 1980857 - RNA, 11 nt, Human
gguaccuugca

SEQ ID NO: 1980858 - RNA, 12 nt, Human
gguaccuugcac

SEQ ID NO: 1980859 - RNA, 23 nt, Human
gguaccuugcacacaucaucugu

SEQ ID NO: 1980860 - RNA, 24 nt, Human
gguaccuugcacacaucaucugua

SEQ ID NO: 1980861 - RNA, 15 nt, Human
ggguugggcuggugu

SEQ ID NO: 1980862 - RNA, 12 nt, Human
ggguuggcuuuu

SEQ ID NO: 1980863 - RNA, 20 nt, Human
ggguuucaccauguuggcca

SEQ ID NO: 1980864 - RNA, 17 nt, Human
gguacccacugcucugg

SEQ ID NO: 1980865 - RNA, 22 nt, Human
ggugcuaucucccccagcccca

SEQ ID NO: 1980866 - RNA, 23 nt, Human
ggugcuaucucccccagccccau

SEQ ID NO: 1980867 - RNA, 15 nt, Human
ggugcgaucuggguu

SEQ ID NO: 1980868 - RNA, 16 nt, Human
gguggcagugggagcu

SEQ ID NO: 1980869 - RNA, 15 nt, Human
gguggcagcugcggu

SEQ ID NO: 1980870 - RNA, 23 nt, Human
gguggcagcugcgguccacccag

SEQ ID NO: 1980871 - RNA, 13 nt, Human
gguggcagcucac

SEQ ID NO: 1980872 - RNA, 11 nt, Human
gguggcagcug

SEQ ID NO: 1980873 - RNA, 12 nt, Human
gguggcagcugc

SEQ ID NO: 1980874 - RNA, 13 nt, Human
gguggcagcugcg

SEQ ID NO: 1980875 - RNA, 22 nt, Human
ggugauagguauaaguggugug

SEQ ID NO: 1980876 - RNA, 22 nt, Human
ggugauaauagaagaguggcag

SEQ ID NO: 1980877 - RNA, 14 nt, Human
ggugaccucugccu

SEQ ID NO: 1980878 - RNA, 16 nt, Human
ggugaccucugccuga

SEQ ID NO: 1980879 - RNA, 21 nt, Human
ggugaccucugccugaaguca

SEQ ID NO: 1980880 - RNA, 21 nt, Human
ggugaccucuagcccugcccg

SEQ ID NO: 1980881 - RNA, 15 nt, Human
ggugaguccuccaga

SEQ ID NO: 1980882 - RNA, 17 nt, Human
ggugaguccuccagaac

SEQ ID NO: 1980883 - RNA, 17 nt, Human
ggucccuaauaaagcug

SEQ ID NO: 1980884 - RNA, 16 nt, Human
ggucccuaauaaagcu

SEQ ID NO: 1980885 - RNA, 13 nt, Human
ggucccuaauaaa

SEQ ID NO: 1980886 - RNA, 12 nt, Human
ggucccuaauaa

SEQ ID NO: 1980887 - RNA, 14 nt, Human
ggucccugguggca

SEQ ID NO: 1980888 - RNA, 18 nt, Human
ggucccuaauaaagcugu

SEQ ID NO: 1980889 - RNA, 16 nt, Human
gguccccuccaggagu

SEQ ID NO: 1980890 - RNA, 22 nt, Human
ggucccugguggcagcucaccu

SEQ ID NO: 1980891 - RNA, 21 nt, Human
gguccgaguguguuucauccu

SEQ ID NO: 1980892 - RNA, 23 nt, Human
gguccuagaaauuccccacccug

SEQ ID NO: 1980893 - RNA, 22 nt, Human
ggucucacuauguugcccaggc

SEQ ID NO: 1980894 - RNA, 21 nt, Human
ggucucacuauguugcccagg

SEQ ID NO: 1980895 - RNA, 17 nt, Human
ggucuccgaaaugcugu

SEQ ID NO: 1980896 - RNA, 19 nt, Human
ggucuccgaaaugcugucu

SEQ ID NO: 1980897 - RNA, 12 nt, Human
ggucucacucug

SEQ ID NO: 1980898 - RNA, 16 nt, Human
ggucucacucugucgc

SEQ ID NO: 1980899 - RNA, 15 nt, Human
ggucugacccacugc

SEQ ID NO: 1980900 - RNA, 16 nt, Human
ggucugacccacugcu

SEQ ID NO: 1980901 - RNA, 19 nt, Human
ggucucgaacuccugaccu

SEQ ID NO: 1980902 - RNA, 12 nt, Human
ggucuccucagg

SEQ ID NO: 1980903 - RNA, 15 nt, Human
ggucuccucaggacc

SEQ ID NO: 1980904 - RNA, 19 nt, Human
ggucuccucaggaccaggg

SEQ ID NO: 1980905 - RNA, 20 nt, Human
ggucucgaacuccugaccuu

SEQ ID NO: 1980906 - RNA, 16 nt, Human
ggugaacuugguuccc

SEQ ID NO: 1980907 - RNA, 19 nt, Human
ggucugaggaauccagacc

SEQ ID NO: 1980908 - RNA, 18 nt, Human
ggugaagugaagacaaug

SEQ ID NO: 1980909 - RNA, 14 nt, Human
ggugaaggaggcuc

SEQ ID NO: 1980910 - RNA, 18 nt, Human
ggugaaggaggcuccagg

SEQ ID NO: 1980911 - RNA, 22 nt, Human
ggugaaggaggcuccaggcagc

SEQ ID NO: 1980912 - RNA, 23 nt, Human
ggugaaggaggcuccaggcagca

SEQ ID NO: 1980913 - RNA, 14 nt, Human
guaagaguguuuau

SEQ ID NO: 1980914 - RNA, 13 nt, Human
guaagaucacugu

SEQ ID NO: 1980915 - RNA, 18 nt, Human
guaagaucacuguuuaga

SEQ ID NO: 1980916 - RNA, 20 nt, Human
guaagaucacuguuuagauu

SEQ ID NO: 1980917 - RNA, 13 nt, Human
guaagaaauacag

SEQ ID NO: 1980918 - RNA, 16 nt, Human
guaagaaauacagacu

SEQ ID NO: 1980919 - RNA, 12 nt, Human
guaagaaauacu

SEQ ID NO: 1980920 - RNA, 13 nt, Human
guaagaaauacug

SEQ ID NO: 1980921 - RNA, 17 nt, Human
guaagaaauacuguaca

SEQ ID NO: 1980922 - RNA, 22 nt, Human
guaacuguuuagaugaauguca

SEQ ID NO: 1980923 - RNA, 20 nt, Human
guaacuguuaccauuggaaa

SEQ ID NO: 1980924 - RNA, 21 nt, Human
guaacuguuaccauuggaaau

SEQ ID NO: 1980925 - RNA, 23 nt, Human
guaaauuaacuuuuauaaacuuu

SEQ ID NO: 1980926 - RNA, 12 nt, Human
guaacuguuacc

SEQ ID NO: 1980927 - RNA, 13 nt, Human
guaacuguuacca

SEQ ID NO: 1980928 - RNA, 17 nt, Human
guaacuguuaccauugg

SEQ ID NO: 1980929 - RNA, 22 nt, Human
guaaguauucuuauuuaaugaa

SEQ ID NO: 1980930 - RNA, 18 nt, Human
guaaguauaucucaguuu

SEQ ID NO: 1980931 - RNA, 19 nt, Human
guaagguauaucauucuaa

SEQ ID NO: 1980932 - RNA, 14 nt, Human
guaaggcaugaagg

SEQ ID NO: 1980933 - RNA, 13 nt, Human
guaaggaaugauu

SEQ ID NO: 1980934 - RNA, 23 nt, Human
guaaggaauaccugucccccuga

SEQ ID NO: 1980935 - RNA, 21 nt, Human
guaaggaauaccugucccccu

SEQ ID NO: 1980936 - RNA, 20 nt, Human
guaaggaauaccuguccccc

SEQ ID NO: 1980937 - RNA, 18 nt, Human
guaaggaauaccuguccc

SEQ ID NO: 1980938 - RNA, 18 nt, Human
guaagcuguuugguuuua

SEQ ID NO: 1980939 - RNA, 21 nt, Human
guaagcuguuugguuuuaaaa

SEQ ID NO: 1980940 - RNA, 22 nt, Human
guaagcuguuugguuuuaaaau

SEQ ID NO: 1980941 - RNA, 16 nt, Human
guaagcggcucaagcc

SEQ ID NO: 1980942 - RNA, 21 nt, Human
guaagcggcucaagcccagga

SEQ ID NO: 1980943 - RNA, 22 nt, Human
guaagcggcucaagcccaggag

SEQ ID NO: 1980944 - RNA, 14 nt, Human
guaagcguauggcu

SEQ ID NO: 1980945 - RNA, 20 nt, Human
guaagcguauggcuuuauuu

SEQ ID NO: 1980946 - RNA, 16 nt, Human
guaaauaaaggaacca

SEQ ID NO: 1980947 - RNA, 14 nt, Human
guaaauaauucuuu

SEQ ID NO: 1980948 - RNA, 15 nt, Human
guaaauaauucuuuu

SEQ ID NO: 1980949 - RNA, 13 nt, Human
guaaauaauucuu

SEQ ID NO: 1980950 - RNA, 16 nt, Human
guaaaagcauuuugua

SEQ ID NO: 1980951 - RNA, 19 nt, Human
guaaaagcagcauaaagaa

SEQ ID NO: 1980952 - RNA, 15 nt, Human
guaaauuaacuuuua

SEQ ID NO: 1980953 - RNA, 15 nt, Human
guaaauguaguucau

SEQ ID NO: 1980954 - RNA, 16 nt, Human
guaaaugguaugucau

SEQ ID NO: 1980955 - RNA, 16 nt, Human
guaaauuaacuuuuau

SEQ ID NO: 1980956 - RNA, 17 nt, Human
guaaauuaacuuuuaua

SEQ ID NO: 1980957 - RNA, 21 nt, Human
guaaauuaacuuuuauaaacu

SEQ ID NO: 1980958 - RNA, 22 nt, Human
guaaauuaacuuuuauaaacuu

SEQ ID NO: 1980959 - RNA, 18 nt, Human
guaaaucucuucuguguu

SEQ ID NO: 1980960 - RNA, 19 nt, Human
guaaaucucuucuguguuu

SEQ ID NO: 1980961 - RNA, 18 nt, Human
guaaaugggggugcauuu

SEQ ID NO: 1980962 - RNA, 19 nt, Human
guaaaugggggugcauuug

SEQ ID NO: 1980963 - RNA, 20 nt, Human
guaaaugggggugcauuuga

SEQ ID NO: 1980964 - RNA, 14 nt, Human
gguugacaggaggu

SEQ ID NO: 1980965 - RNA, 13 nt, Human
gguucuuugugua

SEQ ID NO: 1980966 - RNA, 11 nt, Human
gguugaauaaa

SEQ ID NO: 1980967 - RNA, 14 nt, Human
gguugggcuggugu

SEQ ID NO: 1980968 - RNA, 18 nt, Human
gguuggcaaaaaggcagg

SEQ ID NO: 1980969 - RNA, 13 nt, Human
gguuuaagcuguu

SEQ ID NO: 1980970 - RNA, 13 nt, Human
gguuggugggggc

SEQ ID NO: 1980971 - RNA, 20 nt, Human
gguucacugcaaccuccgcc

SEQ ID NO: 1980972 - RNA, 22 nt, Human
gguucaagcgauucuucugcuu

SEQ ID NO: 1980973 - RNA, 23 nt, Human
gguucaagcgauucuucugcuuc

SEQ ID NO: 1980974 - RNA, 12 nt, Human
gguucagcuugu

SEQ ID NO: 1980975 - RNA, 17 nt, Human
gguucuuucuuccucug

SEQ ID NO: 1980976 - RNA, 14 nt, Human
gguugaagcaccaa

SEQ ID NO: 1980977 - RNA, 18 nt, Human
gguucuuucuuccucugc

SEQ ID NO: 1980978 - RNA, 13 nt, Human
gguggccucccaa

SEQ ID NO: 1980979 - RNA, 17 nt, Human
gguggccucccaacuca

SEQ ID NO: 1980980 - RNA, 21 nt, Human
gguucaagcgauucuucugcu

SEQ ID NO: 1980981 - RNA, 16 nt, Human
gguggcccgacagccu

SEQ ID NO: 1980982 - RNA, 17 nt, Human
gguggcccgacagccug

SEQ ID NO: 1980983 - RNA, 18 nt, Human
gguggcccgacagccugg

SEQ ID NO: 1980984 - RNA, 19 nt, Human
gguggcccgacagccuggc

SEQ ID NO: 1980985 - RNA, 20 nt, Human
gguggcccgacagccuggca

SEQ ID NO: 1980986 - RNA, 12 nt, Human
guaaaagaaaaa

SEQ ID NO: 1980987 - RNA, 20 nt, Human
guaaaaacaaagaaauuaug

SEQ ID NO: 1980988 - RNA, 23 nt, Human
guaaaaaauuuaaaaagcccaac

SEQ ID NO: 1980989 - RNA, 18 nt, Human
guaaaaacaaagaaauua

SEQ ID NO: 1980990 - RNA, 14 nt, Human
guaaaaagaaaaca

SEQ ID NO: 1980991 - RNA, 14 nt, Human
guaaaaauaaaauu

SEQ ID NO: 1980992 - RNA, 18 nt, Human
guaaaaauaaccuugcag

SEQ ID NO: 1980993 - RNA, 13 nt, Human
guaaaaauaaaau

SEQ ID NO: 1980994 - RNA, 13 nt, Human
guaaaaacugaag

SEQ ID NO: 1980995 - RNA, 14 nt, Human
guaaaaacugaagu

SEQ ID NO: 1980996 - RNA, 15 nt, Human
guaaaaacugaaguu

SEQ ID NO: 1980997 - RNA, 22 nt, Human
guaaaaacugaaguucugccuc

SEQ ID NO: 1980998 - RNA, 12 nt, Human
guaaaaagaaaa

SEQ ID NO: 1980999 - RNA, 22 nt, Human
gguuuuccgcauucuuuguaca

SEQ ID NO: 1981000 - RNA, 20 nt, Human
gguuuucacauuggaaacaa

SEQ ID NO: 1981001 - RNA, 12 nt, Human
gguuuucuguuc

SEQ ID NO: 1981002 - RNA, 13 nt, Human
gguuuucuguucu

SEQ ID NO: 1981003 - RNA, 17 nt, Human
gguuuucuuaaccaucu

SEQ ID NO: 1981004 - RNA, 18 nt, Human
gguuuucuuaaccaucuu

SEQ ID NO: 1981005 - RNA, 21 nt, Human
gguuuugcacucuuguuucuc

SEQ ID NO: 1981006 - RNA, 15 nt, Human
gguuuucuguucuuu

SEQ ID NO: 1981007 - RNA, 17 nt, Human
gguuuuuauuucuccuu

SEQ ID NO: 1981008 - RNA, 18 nt, Human
gguuuuuauuucuccuuu

SEQ ID NO: 1981009 - RNA, 19 nt, Human
gguuuuuauuucuccuuuu

SEQ ID NO: 1981010 - RNA, 23 nt, Human
gguuuugccauguuggccaggcu

SEQ ID NO: 1981011 - RNA, 22 nt, Human
guacagcacuuucuucuuccca

SEQ ID NO: 1981012 - RNA, 20 nt, Human
guacagcaaggagauuuaca

SEQ ID NO: 1981013 - RNA, 20 nt, Human
guacagagccguaaaaacug

SEQ ID NO: 1981014 - RNA, 22 nt, Human
guacagagcccacgcccccacu

SEQ ID NO: 1981015 - RNA, 18 nt, Human
guacagagcccacgcccc

SEQ ID NO: 1981016 - RNA, 12 nt, Human
guacagagccca

SEQ ID NO: 1981017 - RNA, 19 nt, Human
guacacuguuucaaacuuu

SEQ ID NO: 1981018 - RNA, 20 nt, Human
guacacuguuucaaacuuua

SEQ ID NO: 1981019 - RNA, 21 nt, Human
guacacuguuucaaacuuuac

SEQ ID NO: 1981020 - RNA, 22 nt, Human
guacacuucaguuaucuugauc

SEQ ID NO: 1981021 - RNA, 15 nt, Human
guacagacagaaaaa

SEQ ID NO: 1981022 - RNA, 16 nt, Human
guacagacaacaaacc

SEQ ID NO: 1981023 - RNA, 14 nt, Human
guacagguacuuug

SEQ ID NO: 1981024 - RNA, 15 nt, Human
guacagguacuuugu

SEQ ID NO: 1981025 - RNA, 16 nt, Human
guacagguacuuuguc

SEQ ID NO: 1981026 - RNA, 20 nt, Human
guacauaaugcgugcauacc

SEQ ID NO: 1981027 - RNA, 15 nt, Human
guacauaauacugaa

SEQ ID NO: 1981028 - RNA, 16 nt, Human
guacauaauacugaac

SEQ ID NO: 1981029 - RNA, 18 nt, Human
guacauaauacugaacca

SEQ ID NO: 1981030 - RNA, 19 nt, Human
guacauaauacugaaccac

SEQ ID NO: 1981031 - RNA, 14 nt, Human
guacauaauacuga

SEQ ID NO: 1981032 - RNA, 15 nt, Human
guacccacugcucug

SEQ ID NO: 1981033 - RNA, 22 nt, Human
guacauauuagcgacaacagau

SEQ ID NO: 1981034 - RNA, 15 nt, Human
guaaugaaacuugga

SEQ ID NO: 1981035 - RNA, 17 nt, Human
guaaucuuguugguuca

SEQ ID NO: 1981036 - RNA, 16 nt, Human
guaaugaaacuuggau

SEQ ID NO: 1981037 - RNA, 13 nt, Human
guaaugaaaacca

SEQ ID NO: 1981038 - RNA, 11 nt, Human
guaaugaaaac

SEQ ID NO: 1981039 - RNA, 15 nt, Human
guaaucguguccccu

SEQ ID NO: 1981040 - RNA, 18 nt, Human
guaaugaugucguuugaa

SEQ ID NO: 1981041 - RNA, 22 nt, Human
guaauggggcagaaaucugagg

SEQ ID NO: 1981042 - RNA, 19 nt, Human
guaauguaucaaauacauu

SEQ ID NO: 1981043 - RNA, 19 nt, Human
guaauguaacugcucuugg

SEQ ID NO: 1981044 - RNA, 12 nt, Human
guaauguaacug

SEQ ID NO: 1981045 - RNA, 14 nt, Human
guaauguaacugcu

SEQ ID NO: 1981046 - RNA, 20 nt, Human
guaauuaaguacuauguauc

SEQ ID NO: 1981047 - RNA, 17 nt, Human
guaauuaaguacuaugu

SEQ ID NO: 1981048 - RNA, 14 nt, Human
guaauuaaguacua

SEQ ID NO: 1981049 - RNA, 14 nt, Human
guaauguugugaau

SEQ ID NO: 1981050 - RNA, 15 nt, Human
guaauguugugaaua

SEQ ID NO: 1981051 - RNA, 17 nt, Human
guaauguugugaauaau

SEQ ID NO: 1981052 - RNA, 18 nt, Human
guaauguugugaauaauu

SEQ ID NO: 1981053 - RNA, 21 nt, Human
guaauuaaguacuauguauca

SEQ ID NO: 1981054 - RNA, 23 nt, Human
guaauuaauaauagauugugaau

SEQ ID NO: 1981055 - RNA, 18 nt, Human
guacacuguuucaaacuu

SEQ ID NO: 1981056 - RNA, 16 nt, Human
guaauucuuauuccau

SEQ ID NO: 1981057 - RNA, 22 nt, Human
guaauucuuauuccauauuaga

SEQ ID NO: 1981058 - RNA, 13 nt, Human
guaauuauuugaa

SEQ ID NO: 1981059 - RNA, 14 nt, Human
guaauuauuugaau

SEQ ID NO: 1981060 - RNA, 15 nt, Human
guaauuauuugaaug

SEQ ID NO: 1981061 - RNA, 23 nt, Human
guacuaaggaaucuuucugcuuu

SEQ ID NO: 1981062 - RNA, 15 nt, Human
guacuaaggaaucuu

SEQ ID NO: 1981063 - RNA, 17 nt, Human
guacguugugcauuugg

SEQ ID NO: 1981064 - RNA, 20 nt, Human
guacuaaggauacaggcugg

SEQ ID NO: 1981065 - RNA, 14 nt, Human
guacuucuccaccc

SEQ ID NO: 1981066 - RNA, 15 nt, Human
guacuucuccacccu

SEQ ID NO: 1981067 - RNA, 15 nt, Human
guacguugugcauuu

SEQ ID NO: 1981068 - RNA, 16 nt, Human
guacguugugcauuug

SEQ ID NO: 1981069 - RNA, 14 nt, Human
guacguugugcauu

SEQ ID NO: 1981070 - RNA, 17 nt, Human
guacgucugacaggcaa

SEQ ID NO: 1981071 - RNA, 14 nt, Human
guacgucugacagg

SEQ ID NO: 1981072 - RNA, 15 nt, Human
guacgucugacaggc

SEQ ID NO: 1981073 - RNA, 19 nt, Human
guacgacgucagauguuua

SEQ ID NO: 1981074 - RNA, 21 nt, Human
guacgacucuuuuccaaacac

SEQ ID NO: 1981075 - RNA, 17 nt, Human
guaccuugcacacauca

SEQ ID NO: 1981076 - RNA, 23 nt, Human
guaccuugcacacaucaucugua

SEQ ID NO: 1981077 - RNA, 16 nt, Human
guaccuggguccccag

SEQ ID NO: 1981078 - RNA, 13 nt, Human
guaccucuugagc

SEQ ID NO: 1981079 - RNA, 21 nt, Human
guaccucuugagccuugaacu

SEQ ID NO: 1981080 - RNA, 22 nt, Human
guaccucuugagccuugaacuu

SEQ ID NO: 1981081 - RNA, 16 nt, Human
guacccacugcucugg

SEQ ID NO: 1981082 - RNA, 15 nt, Human
guaccgcaaugugac

SEQ ID NO: 1981083 - RNA, 19 nt, Human
guacuugcucuugaugccu

SEQ ID NO: 1981084 - RNA, 18 nt, Human
guacuugcucuugaugcc

SEQ ID NO: 1981085 - RNA, 16 nt, Human
guacuugcucuugaug

SEQ ID NO: 1981086 - RNA, 15 nt, Human
guacuugcucuugau

SEQ ID NO: 1981087 - RNA, 22 nt, Human
guacuugcucuugaugccuggc

SEQ ID NO: 1981088 - RNA, 16 nt, Human
guacuuguggacacag

SEQ ID NO: 1981089 - RNA, 20 nt, Human
guacuuguggacacagcucu

SEQ ID NO: 1981090 - RNA, 14 nt, Human
guacuugcucuuga

SEQ ID NO: 1981091 - RNA, 20 nt, Human
guacuucuccacccugcucu

SEQ ID NO: 1981092 - RNA, 21 nt, Human
guacuucuccacccugcucuc

SEQ ID NO: 1981093 - RNA, 16 nt, Human
guacuucuccacccug

SEQ ID NO: 1981094 - RNA, 17 nt, Human
guacuucuccacccugc

SEQ ID NO: 1981095 - RNA, 18 nt, Human
guacuucuccacccugcu

SEQ ID NO: 1981096 - RNA, 19 nt, Human
guacuucuccacccugcuc

SEQ ID NO: 1981097 - RNA, 15 nt, Human
guagaggagaaacug

SEQ ID NO: 1981098 - RNA, 16 nt, Human
guagagcggagaaagg

SEQ ID NO: 1981099 - RNA, 17 nt, Human
guagaaaauauguccca

SEQ ID NO: 1981100 - RNA, 20 nt, Human
guacuuugucuaagaaacau

SEQ ID NO: 1981101 - RNA, 23 nt, Human
guacuuugucuaagaaacauugg

SEQ ID NO: 1981102 - RNA, 17 nt, Human
guacuuugauucacaug

SEQ ID NO: 1981103 - RNA, 20 nt, Human
guacuuugauucacauguuu

SEQ ID NO: 1981104 - RNA, 21 nt, Human
guacuuugauucacauguuuu

SEQ ID NO: 1981105 - RNA, 23 nt, Human
guacuuugauucacauguuuuca

SEQ ID NO: 1981106 - RNA, 22 nt, Human
guacuuucauauuuuaaacaga

SEQ ID NO: 1981107 - RNA, 14 nt, Human
guacuuuaaaaauu

SEQ ID NO: 1981108 - RNA, 11 nt, Human
guacuuucugu

SEQ ID NO: 1981109 - RNA, 12 nt, Human
guacuuucuguu

SEQ ID NO: 1981110 - RNA, 13 nt, Human
guacuuucuguua

SEQ ID NO: 1981111 - RNA, 14 nt, Human
guacuuucuguuaa

SEQ ID NO: 1981112 - RNA, 15 nt, Human
guacuuucuguuaaa

SEQ ID NO: 1981113 - RNA, 16 nt, Human
guacuuucuguuaaaa

SEQ ID NO: 1981114 - RNA, 18 nt, Human
guacuuucuguuaaaaug

SEQ ID NO: 1981115 - RNA, 19 nt, Human
guacuuucuguuaaaaugc

SEQ ID NO: 1981116 - RNA, 21 nt, Human
guacuuucuguuaaaaugcau

SEQ ID NO: 1981117 - RNA, 13 nt, Human
guacuuugauuca

SEQ ID NO: 1981118 - RNA, 15 nt, Human
guacuuugauucaca

SEQ ID NO: 1981119 - RNA, 16 nt, Human
guacuuugauucacau

SEQ ID NO: 1981120 - RNA, 21 nt, Human
guacuuguggacacagcucuu

SEQ ID NO: 1981121 - RNA, 22 nt, Human
guacuuuauagaagaaugcaug

SEQ ID NO: 1981122 - RNA, 23 nt, Human
guacuuuauuuucuauaauuuaa

SEQ ID NO: 1981123 - RNA, 18 nt, Human
gcuagagguucaaagaua

SEQ ID NO: 1981124 - RNA, 20 nt, Human
gcuacuaugauuuaauuuga

SEQ ID NO: 1981125 - RNA, 22 nt, Human
gcuacuaugauuuaauuugaaa

SEQ ID NO: 1981126 - RNA, 19 nt, Human
gcuagagguucaaagauau

SEQ ID NO: 1981127 - RNA, 21 nt, Human
gcuagagguucaaagauauuu

SEQ ID NO: 1981128 - RNA, 16 nt, Human
gcuacccgugagcccu

SEQ ID NO: 1981129 - RNA, 21 nt, Human
gcuacccgggaagggggcugg

SEQ ID NO: 1981130 - RNA, 16 nt, Human
gcuacguuuacucaca

SEQ ID NO: 1981131 - RNA, 15 nt, Human
gcuacccgggaaggg

SEQ ID NO: 1981132 - RNA, 14 nt, Human
gcuacccgggaagg

SEQ ID NO: 1981133 - RNA, 17 nt, Human
gcuaagcaaaaugugau

SEQ ID NO: 1981134 - RNA, 23 nt, Human
gcuaagagggagggagggcucca

SEQ ID NO: 1981135 - RNA, 22 nt, Human
gcuaucucccccagccccaucc

SEQ ID NO: 1981136 - RNA, 21 nt, Human
gcuaucucccccagccccauc

SEQ ID NO: 1981137 - RNA, 20 nt, Human
gcuaucucccccagccccau

SEQ ID NO: 1981138 - RNA, 19 nt, Human
gcuaucucccccagcccca

SEQ ID NO: 1981139 - RNA, 23 nt, Human
gcuaucucccccagccccauccu

SEQ ID NO: 1981140 - RNA, 18 nt, Human
gcuaucucccccagcccc

SEQ ID NO: 1981141 - RNA, 17 nt, Human
gcuaucucccccagccc

SEQ ID NO: 1981142 - RNA, 16 nt, Human
gcuaucucccccagcc

SEQ ID NO: 1981143 - RNA, 19 nt, Human
gcuagcuaagccaagaggc

SEQ ID NO: 1981144 - RNA, 18 nt, Human
gcgugagccacugcaccg

SEQ ID NO: 1981145 - RNA, 15 nt, Human
gcgugagaccugccc

SEQ ID NO: 1981146 - RNA, 22 nt, Human
gcuaaagguuaccgauuucaaa

SEQ ID NO: 1981147 - RNA, 21 nt, Human
gcuaaaguaaacaacucaagg

SEQ ID NO: 1981148 - RNA, 15 nt, Human
gcgugaucaaagcca

SEQ ID NO: 1981149 - RNA, 19 nt, Human
gcgugaucaaagccacacu

SEQ ID NO: 1981150 - RNA, 23 nt, Human
gcgugagccacugcaccgggcca

SEQ ID NO: 1981151 - RNA, 16 nt, Human
gcuaacaccagacaga

SEQ ID NO: 1981152 - RNA, 20 nt, Human
gcuaaauugauguugaugca

SEQ ID NO: 1981153 - RNA, 21 nt, Human
gcuaaauugauguugaugcaa

SEQ ID NO: 1981154 - RNA, 23 nt, Human
gcuaaauugauguugaugcaauc

SEQ ID NO: 1981155 - RNA, 22 nt, Human
gcuaagagggagggagggcucc

SEQ ID NO: 1981156 - RNA, 21 nt, Human
gcuaagagggagggagggcuc

SEQ ID NO: 1981157 - RNA, 17 nt, Human
gcuaaauugauguugau

SEQ ID NO: 1981158 - RNA, 18 nt, Human
gcuaaauugauguugaug

SEQ ID NO: 1981159 - RNA, 16 nt, Human
gcuaaaugugaaugau

SEQ ID NO: 1981160 - RNA, 13 nt, Human
gcuaaaugugaau

SEQ ID NO: 1981161 - RNA, 15 nt, Human
gcgucaucugguccu

SEQ ID NO: 1981162 - RNA, 14 nt, Human
gcgucaucuggucc

SEQ ID NO: 1981163 - RNA, 19 nt, Human
gcguagugcagcagggcag

SEQ ID NO: 1981164 - RNA, 18 nt, Human
gcguauggcuuuauuuuu

SEQ ID NO: 1981165 - RNA, 18 nt, Human
gcgguccacccaggagcc

SEQ ID NO: 1981166 - RNA, 19 nt, Human
gcgguccacccaggagccc

SEQ ID NO: 1981167 - RNA, 15 nt, Human
gcgggcuuccuccug

SEQ ID NO: 1981168 - RNA, 12 nt, Human
gcggggacagcu

SEQ ID NO: 1981169 - RNA, 13 nt, Human
gcggggacagcuc

SEQ ID NO: 1981170 - RNA, 16 nt, Human
gcgguccacccaggag

SEQ ID NO: 1981171 - RNA, 23 nt, Human
gccugugagcuaggaauuguguu

SEQ ID NO: 1981172 - RNA, 17 nt, Human
gccugugaacugaacuc

SEQ ID NO: 1981173 - RNA, 14 nt, Human
gccugucaagaggc

SEQ ID NO: 1981174 - RNA, 18 nt, Human
gcucagcagugagagcag

SEQ ID NO: 1981175 - RNA, 14 nt, Human
gcucagcaaggcca

SEQ ID NO: 1981176 - RNA, 15 nt, Human
gcucagcaaggccac

SEQ ID NO: 1981177 - RNA, 21 nt, Human
gcucagaucccacuuuugcca

SEQ ID NO: 1981178 - RNA, 16 nt, Human
gcucagcaaggccacc

SEQ ID NO: 1981179 - RNA, 17 nt, Human
gcucagcaaggccaccu

SEQ ID NO: 1981180 - RNA, 18 nt, Human
gcucagcaaggccaccuc

SEQ ID NO: 1981181 - RNA, 19 nt, Human
gcucagcaaggccaccucu

SEQ ID NO: 1981182 - RNA, 23 nt, Human
gcucagcaaaagaugcuucucac

SEQ ID NO: 1981183 - RNA, 22 nt, Human
gcucagcaaaagaugcuucuca

SEQ ID NO: 1981184 - RNA, 20 nt, Human
gcucagcaaaagaugcuucu

SEQ ID NO: 1981185 - RNA, 17 nt, Human
gcucagcaaaagaugcu

SEQ ID NO: 1981186 - RNA, 20 nt, Human
gcucaccagccccagugccc

SEQ ID NO: 1981187 - RNA, 23 nt, Human
gcucaccagccccagugcccaca

SEQ ID NO: 1981188 - RNA, 17 nt, Human
gcuaugagcuggggaug

SEQ ID NO: 1981189 - RNA, 18 nt, Human
gcucaccagccccagugc

SEQ ID NO: 1981190 - RNA, 19 nt, Human
gcucaccagccccagugcc

SEQ ID NO: 1981191 - RNA, 11 nt, Human
gcuaugacuua

SEQ ID NO: 1981192 - RNA, 22 nt, Human
gcucagugucuggcugcagagc

SEQ ID NO: 1981193 - RNA, 19 nt, Human
gcucaggugucccugcacu

SEQ ID NO: 1981194 - RNA, 15 nt, Human
gcucagcggggacag

SEQ ID NO: 1981195 - RNA, 20 nt, Human
gcucagcggggacagcuccu

SEQ ID NO: 1981196 - RNA, 21 nt, Human
gcucagcggggacagcuccuu

SEQ ID NO: 1981197 - RNA, 22 nt, Human
gcucagcggggacagcuccuuc

SEQ ID NO: 1981198 - RNA, 18 nt, Human
gcucaggugucccugcac

SEQ ID NO: 1981199 - RNA, 19 nt, Human
gcuccaagcucccaggcau

SEQ ID NO: 1981200 - RNA, 18 nt, Human
gcuccaagcucccaggca

SEQ ID NO: 1981201 - RNA, 17 nt, Human
gcuccaagcucccaggc

SEQ ID NO: 1981202 - RNA, 16 nt, Human
gcuccaagcucccagg

SEQ ID NO: 1981203 - RNA, 16 nt, Human
gcuccacacacacaaa

SEQ ID NO: 1981204 - RNA, 21 nt, Human
gcuccaagcucccaggcauuc

SEQ ID NO: 1981205 - RNA, 17 nt, Human
gcuccagcuggccggga

SEQ ID NO: 1981206 - RNA, 23 nt, Human
gcuccagcuggccgggagccuga

SEQ ID NO: 1981207 - RNA, 17 nt, Human
gcuccacacacacaaaa

SEQ ID NO: 1981208 - RNA, 15 nt, Human
gcuccaagcucccag

SEQ ID NO: 1981209 - RNA, 14 nt, Human
gcuccaagcuccca

SEQ ID NO: 1981210 - RNA, 13 nt, Human
gcuccaagcuccc

SEQ ID NO: 1981211 - RNA, 13 nt, Human
gcuccaacuccaa

SEQ ID NO: 1981212 - RNA, 21 nt, Human
gcuccaacuccaacauccacu

SEQ ID NO: 1981213 - RNA, 14 nt, Human
gcuccaagaauuuc

SEQ ID NO: 1981214 - RNA, 16 nt, Human
gcuccaaaugcagcuu

SEQ ID NO: 1981215 - RNA, 20 nt, Human
gcuccaaccgggaugggagc

SEQ ID NO: 1981216 - RNA, 11 nt, Human
gcuccagcugu

SEQ ID NO: 1981217 - RNA, 13 nt, Human
gcuccaggcuccu

SEQ ID NO: 1981218 - RNA, 16 nt, Human
gcuccaggcuccuuua

SEQ ID NO: 1981219 - RNA, 23 nt, Human
gcuccaggcuccuuuagcgccca

SEQ ID NO: 1981220 - RNA, 20 nt, Human
gcuccagcuguucagcuggu

SEQ ID NO: 1981221 - RNA, 24 nt, Human
gcuccaggcuccuuuagcgcccag

SEQ ID NO: 1981222 - RNA, 17 nt, Human
gcuccauacacacgcug

SEQ ID NO: 1981223 - RNA, 20 nt, Human
gcuccauacacacgcugccu

SEQ ID NO: 1981224 - RNA, 21 nt, Human
gcuccauacacacgcugccuu

SEQ ID NO: 1981225 - RNA, 14 nt, Human
gcuccaucuccacu

SEQ ID NO: 1981226 - RNA, 14 nt, Human
gcuccaucuuauuu

SEQ ID NO: 1981227 - RNA, 20 nt, Human
gcuccauuuuuagugaaaua

SEQ ID NO: 1981228 - RNA, 16 nt, Human
gcucccucaaagaggc

SEQ ID NO: 1981229 - RNA, 17 nt, Human
gcucccucaaagaggca

SEQ ID NO: 1981230 - RNA, 19 nt, Human
gcucccucaaagaggcagu

SEQ ID NO: 1981231 - RNA, 14 nt, Human
gcucccucacucuc

SEQ ID NO: 1981232 - RNA, 15 nt, Human
gcucccucacucuca

SEQ ID NO: 1981233 - RNA, 16 nt, Human
gcucccucacucucag

SEQ ID NO: 1981234 - RNA, 17 nt, Human
gcucccucacucucagg

SEQ ID NO: 1981235 - RNA, 18 nt, Human
gcucccucacucucagga

SEQ ID NO: 1981236 - RNA, 12 nt, Human
gcucccugacug

SEQ ID NO: 1981237 - RNA, 20 nt, Human
gcucccuccgggucuuccua

SEQ ID NO: 1981238 - RNA, 23 nt, Human
gcucugcugugggcacaggucag

SEQ ID NO: 1981239 - RNA, 22 nt, Human
gcucugcuccccuaaagccuca

SEQ ID NO: 1981240 - RNA, 13 nt, Human
gcucugcucgccu

SEQ ID NO: 1981241 - RNA, 22 nt, Human
gcucugcugaugacccccccag

SEQ ID NO: 1981242 - RNA, 14 nt, Human
gcucuggacaggca

SEQ ID NO: 1981243 - RNA, 15 nt, Human
gcucuggacaggcau

SEQ ID NO: 1981244 - RNA, 16 nt, Human
gcucuggacaggcaug

SEQ ID NO: 1981245 - RNA, 21 nt, Human
gcucuggacaggcauguucuc

SEQ ID NO: 1981246 - RNA, 22 nt, Human
gcucuggacaggcauguucucu

SEQ ID NO: 1981247 - RNA, 19 nt, Human
gcucugcuccucuccccag

SEQ ID NO: 1981248 - RNA, 21 nt, Human
gcucugcuccucuccccagca

SEQ ID NO: 1981249 - RNA, 13 nt, Human
gcucugcugacag

SEQ ID NO: 1981250 - RNA, 14 nt, Human
gcucugcugacaga

SEQ ID NO: 1981251 - RNA, 18 nt, Human
gcucugcugacagacaca

SEQ ID NO: 1981252 - RNA, 19 nt, Human
gcucugcugacagacacag

SEQ ID NO: 1981253 - RNA, 20 nt, Human
gcucugcugacagacacagg

SEQ ID NO: 1981254 - RNA, 23 nt, Human
gcucugcugacagacacaggccc

SEQ ID NO: 1981255 - RNA, 22 nt, Human
gcucugccucccaucacccgcu

SEQ ID NO: 1981256 - RNA, 15 nt, Human
gcucugccucccauc

SEQ ID NO: 1981257 - RNA, 14 nt, Human
gcucugccucccau

SEQ ID NO: 1981258 - RNA, 13 nt, Human
gcucugccuccca

SEQ ID NO: 1981259 - RNA, 13 nt, Human
gcucugcuccucu

SEQ ID NO: 1981260 - RNA, 14 nt, Human
gcucugcuccucuc

SEQ ID NO: 1981261 - RNA, 16 nt, Human
gcucugccuuugcucu

SEQ ID NO: 1981262 - RNA, 16 nt, Human
gcucugccugacagag

SEQ ID NO: 1981263 - RNA, 14 nt, Human
gcucucuggccuuc

SEQ ID NO: 1981264 - RNA, 15 nt, Human
gcucucuggccuucg

SEQ ID NO: 1981265 - RNA, 19 nt, Human
gcucucuggccuucggccu

SEQ ID NO: 1981266 - RNA, 20 nt, Human
gcucucuggccuucggccuc

SEQ ID NO: 1981267 - RNA, 11 nt, Human
gcucugccucc

SEQ ID NO: 1981268 - RNA, 23 nt, Human
gcucugcccuugguuaggcauug

SEQ ID NO: 1981269 - RNA, 14 nt, Human
gcucugcccuuggu

SEQ ID NO: 1981270 - RNA, 11 nt, Human
gcucucuggcc

SEQ ID NO: 1981271 - RNA, 12 nt, Human
gcucucuggccu

SEQ ID NO: 1981272 - RNA, 13 nt, Human
gcucucuggccuu

SEQ ID NO: 1981273 - RNA, 19 nt, Human
gcucuccgaccagacaccu

SEQ ID NO: 1981274 - RNA, 20 nt, Human
gcucuccuagguagcccccu

SEQ ID NO: 1981275 - RNA, 19 nt, Human
gcucuccucuugccacugc

SEQ ID NO: 1981276 - RNA, 22 nt, Human
gcucuccucuugccacugccuc

SEQ ID NO: 1981277 - RNA, 15 nt, Human
gcucuccucuugcca

SEQ ID NO: 1981278 - RNA, 13 nt, Human
gcucuccgaccag

SEQ ID NO: 1981279 - RNA, 17 nt, Human
gcucuccgaccagacac

SEQ ID NO: 1981280 - RNA, 18 nt, Human
gcucccuucccaccucuc

SEQ ID NO: 1981281 - RNA, 16 nt, Human
gcucccuucccaccuc

SEQ ID NO: 1981282 - RNA, 15 nt, Human
gcucccuucccaccu

SEQ ID NO: 1981283 - RNA, 15 nt, Human
gcuccuucuguccua

SEQ ID NO: 1981284 - RNA, 19 nt, Human
gcucccuucccaccucucu

SEQ ID NO: 1981285 - RNA, 13 nt, Human
gcucccugacugg

SEQ ID NO: 1981286 - RNA, 21 nt, Human
gcuccuucuguccuacucugu

SEQ ID NO: 1981287 - RNA, 16 nt, Human
gcucgagcaugccugg

SEQ ID NO: 1981288 - RNA, 18 nt, Human
gcuccuuuuccagagcau

SEQ ID NO: 1981289 - RNA, 17 nt, Human
gcucgagcaugccugga

SEQ ID NO: 1981290 - RNA, 14 nt, Human
gcugacccaugggc

SEQ ID NO: 1981291 - RNA, 16 nt, Human
gcugacccaugggcag

SEQ ID NO: 1981292 - RNA, 18 nt, Human
gcugacccaugggcagga

SEQ ID NO: 1981293 - RNA, 19 nt, Human
gcugacccaugggcaggag

SEQ ID NO: 1981294 - RNA, 20 nt, Human
gcugacccaugggcaggaga

SEQ ID NO: 1981295 - RNA, 21 nt, Human
gcugacccaugggcaggagac

SEQ ID NO: 1981296 - RNA, 17 nt, Human
gcugacuacagggccgc

SEQ ID NO: 1981297 - RNA, 18 nt, Human
gcugacuguacuccuccc

SEQ ID NO: 1981298 - RNA, 19 nt, Human
gcugacuguacuccuccca

SEQ ID NO: 1981299 - RNA, 16 nt, Human
gcugacuacagggccg

SEQ ID NO: 1981300 - RNA, 17 nt, Human
gcucuugaugccuggcg

SEQ ID NO: 1981301 - RNA, 20 nt, Human
gcucuuucccacccagccug

SEQ ID NO: 1981302 - RNA, 22 nt, Human
gcucuuucccacccagccuggg

SEQ ID NO: 1981303 - RNA, 17 nt, Human
gcugacagacagcccuc

SEQ ID NO: 1981304 - RNA, 21 nt, Human
gcugacagacacaggcccggc

SEQ ID NO: 1981305 - RNA, 16 nt, Human
gcucuugaugccuggc

SEQ ID NO: 1981306 - RNA, 15 nt, Human
gcucuugaugccugg

SEQ ID NO: 1981307 - RNA, 14 nt, Human
gcucuugaugccug

SEQ ID NO: 1981308 - RNA, 23 nt, Human
gcucuucuccuuucacaaccuuc

SEQ ID NO: 1981309 - RNA, 22 nt, Human
gcucuuccuggacaggccaggu

SEQ ID NO: 1981310 - RNA, 13 nt, Human
gcucuucuccuuu

SEQ ID NO: 1981311 - RNA, 17 nt, Human
gcucuucuccuuucaca

SEQ ID NO: 1981312 - RNA, 21 nt, Human
gcucuucuccuuucacaaccu

SEQ ID NO: 1981313 - RNA, 14 nt, Human
gcucuucuccaggc

SEQ ID NO: 1981314 - RNA, 16 nt, Human
gcucuucuccaggcug

SEQ ID NO: 1981315 - RNA, 18 nt, Human
gcucuuccaggcugggag

SEQ ID NO: 1981316 - RNA, 19 nt, Human
gcucuuccaggcugggaga

SEQ ID NO: 1981317 - RNA, 20 nt, Human
gcucuuccgaaaaccaggcc

SEQ ID NO: 1981318 - RNA, 19 nt, Human
gcucuuccuggacaggcca

SEQ ID NO: 1981319 - RNA, 22 nt, Human
gcucuuccaggcugggagagcc

SEQ ID NO: 1981320 - RNA, 12 nt, Human
gcucuucuccag

SEQ ID NO: 1981321 - RNA, 22 nt, Human
gcugagugaggaauggcaguga

SEQ ID NO: 1981322 - RNA, 14 nt, Human
gcugagugcaggcc

SEQ ID NO: 1981323 - RNA, 15 nt, Human
gcugagugcaggccc

SEQ ID NO: 1981324 - RNA, 16 nt, Human
gcugagugcaggccca

SEQ ID NO: 1981325 - RNA, 18 nt, Human
gcugagugcaggcccacc

SEQ ID NO: 1981326 - RNA, 19 nt, Human
gcugagucugaaggcuggg

SEQ ID NO: 1981327 - RNA, 18 nt, Human
gcugagucugaaggcugg

SEQ ID NO: 1981328 - RNA, 16 nt, Human
gcugagucugaaggcu

SEQ ID NO: 1981329 - RNA, 15 nt, Human
gcugagucugaaggc

SEQ ID NO: 1981330 - RNA, 15 nt, Human
gcugaguccgaccug

SEQ ID NO: 1981331 - RNA, 16 nt, Human
gcugacugggccaggg

SEQ ID NO: 1981332 - RNA, 21 nt, Human
gcugacuguacuccucccagg

SEQ ID NO: 1981333 - RNA, 17 nt, Human
gcugagucccaggcuga

SEQ ID NO: 1981334 - RNA, 21 nt, Human
gcugagucccaggcugagccu

SEQ ID NO: 1981335 - RNA, 22 nt, Human
gcugagucccaggcugagccuc

SEQ ID NO: 1981336 - RNA, 23 nt, Human
gcugagugggggaucacagccuc

SEQ ID NO: 1981337 - RNA, 22 nt, Human
gcugagugggggaucacagccu

SEQ ID NO: 1981338 - RNA, 20 nt, Human
gcugagugcaggcccacccu

SEQ ID NO: 1981339 - RNA, 21 nt, Human
gcugagugcaggcccacccug

SEQ ID NO: 1981340 - RNA, 22 nt, Human
gcugagugcaggcccacccugc

SEQ ID NO: 1981341 - RNA, 23 nt, Human
gcugagugcaggcccacccugcu

SEQ ID NO: 1981342 - RNA, 16 nt, Human
gcugauggugcaauga

SEQ ID NO: 1981343 - RNA, 15 nt, Human
gcugauggugcaaug

SEQ ID NO: 1981344 - RNA, 20 nt, Human
gcugcaguugccagucaccc

SEQ ID NO: 1981345 - RNA, 18 nt, Human
gcugcaguugccagucac

SEQ ID NO: 1981346 - RNA, 21 nt, Human
gcugcaguugccagucacccc

SEQ ID NO: 1981347 - RNA, 21 nt, Human
gcugauggugcaaugaccuuu

SEQ ID NO: 1981348 - RNA, 18 nt, Human
gcugauggugcaaugacc

SEQ ID NO: 1981349 - RNA, 19 nt, Human
gccucucugcaggucccua

SEQ ID NO: 1981350 - RNA, 19 nt, Human
gccucuccgccccugagcc

SEQ ID NO: 1981351 - RNA, 20 nt, Human
gccucuccgccccugagccc

SEQ ID NO: 1981352 - RNA, 21 nt, Human
gccucuccgccccugagccca

SEQ ID NO: 1981353 - RNA, 22 nt, Human
gccucuccgccccugagcccac

SEQ ID NO: 1981354 - RNA, 23 nt, Human
gccucuccgccccugagcccacu

SEQ ID NO: 1981355 - RNA, 24 nt, Human
gccucuccgccccugagcccacug

SEQ ID NO: 1981356 - RNA, 20 nt, Human
gccucguuggaagaggaaca

SEQ ID NO: 1981357 - RNA, 11 nt, Human
gccucuagcug

SEQ ID NO: 1981358 - RNA, 13 nt, Human
gccucuagcugaa

SEQ ID NO: 1981359 - RNA, 17 nt, Human
gccucggauccccuucc

SEQ ID NO: 1981360 - RNA, 18 nt, Human
gccucggauccccuuccu

SEQ ID NO: 1981361 - RNA, 22 nt, Human
gccucggauccccuuccuacca

SEQ ID NO: 1981362 - RNA, 17 nt, Human
gccucccgaguagcugg

SEQ ID NO: 1981363 - RNA, 20 nt, Human
gccucggacuuagcugggag

SEQ ID NO: 1981364 - RNA, 21 nt, Human
gccucggacuuagcugggaga

SEQ ID NO: 1981365 - RNA, 23 nt, Human
gccucccgaauagcugggacuac

SEQ ID NO: 1981366 - RNA, 15 nt, Human
gccucccgaguagcu

SEQ ID NO: 1981367 - RNA, 13 nt, Human
gccucccacagac

SEQ ID NO: 1981368 - RNA, 14 nt, Human
gccucccacagugc

SEQ ID NO: 1981369 - RNA, 23 nt, Human
gccucccaacucaccccagcccc

SEQ ID NO: 1981370 - RNA, 22 nt, Human
gccucccaacucaccccagccc

SEQ ID NO: 1981371 - RNA, 21 nt, Human
gccucccaacucaccccagcc

SEQ ID NO: 1981372 - RNA, 15 nt, Human
gccucagugccacua

SEQ ID NO: 1981373 - RNA, 19 nt, Human
gccuccccucuccuuccug

SEQ ID NO: 1981374 - RNA, 21 nt, Human
gccuccccucuccuuccugug

SEQ ID NO: 1981375 - RNA, 21 nt, Human
gccucccgaauagcugggacu

SEQ ID NO: 1981376 - RNA, 14 nt, Human
gccucccacgacug

SEQ ID NO: 1981377 - RNA, 16 nt, Human
gccucccacagugcug

SEQ ID NO: 1981378 - RNA, 18 nt, Human
gccuccccucuccuuccu

SEQ ID NO: 1981379 - RNA, 21 nt, Human
gccucccacgacugcccggca

SEQ ID NO: 1981380 - RNA, 14 nt, Human
gccucagccucccg

SEQ ID NO: 1981381 - RNA, 23 nt, Human
gccucagccucccaaagugcugg

SEQ ID NO: 1981382 - RNA, 17 nt, Human
gccucagcuuccccagu

SEQ ID NO: 1981383 - RNA, 16 nt, Human
gccucagcuuccccag

SEQ ID NO: 1981384 - RNA, 12 nt, Human
gccucagugcca

SEQ ID NO: 1981385 - RNA, 14 nt, Human
gccucagugccacu

SEQ ID NO: 1981386 - RNA, 15 nt, Human
gccucagucucccuc

SEQ ID NO: 1981387 - RNA, 18 nt, Human
gccucagucucccucccu

SEQ ID NO: 1981388 - RNA, 22 nt, Human
gccuauauuuuuuguuaaauga

SEQ ID NO: 1981389 - RNA, 22 nt, Human
gccuauaagccaaaauuaaggu

SEQ ID NO: 1981390 - RNA, 15 nt, Human
gccuauauuuuccug

SEQ ID NO: 1981391 - RNA, 17 nt, Human
gccuaagugcagccccg

SEQ ID NO: 1981392 - RNA, 16 nt, Human
gccuaaggcugaacuu

SEQ ID NO: 1981393 - RNA, 19 nt, Human
gccgagauagccaaggcca

SEQ ID NO: 1981394 - RNA, 21 nt, Human
gccgagcccuugcccaugcug

SEQ ID NO: 1981395 - RNA, 14 nt, Human
gccucaaccuccug

SEQ ID NO: 1981396 - RNA, 16 nt, Human
gccucaaccuccuggg

SEQ ID NO: 1981397 - RNA, 16 nt, Human
gccuauccuaagagcu

SEQ ID NO: 1981398 - RNA, 17 nt, Human
gccucaaccuccugggc

SEQ ID NO: 1981399 - RNA, 19 nt, Human
gccucaagugauucuccug

SEQ ID NO: 1981400 - RNA, 20 nt, Human
gccucaagugauucuccugc

SEQ ID NO: 1981401 - RNA, 21 nt, Human
gccucaagugauucuccugcc

SEQ ID NO: 1981402 - RNA, 22 nt, Human
gccugagugagaggggaggcca

SEQ ID NO: 1981403 - RNA, 19 nt, Human
gccugaugaccaauuuuaa

SEQ ID NO: 1981404 - RNA, 13 nt, Human
gccugagucaccu

SEQ ID NO: 1981405 - RNA, 17 nt, Human
gccugacagccagaacu

SEQ ID NO: 1981406 - RNA, 16 nt, Human
gccugacagccagaac

SEQ ID NO: 1981407 - RNA, 21 nt, Human
gccucucugcaggucccuaau

SEQ ID NO: 1981408 - RNA, 20 nt, Human
gccucucugcaggucccuaa

SEQ ID NO: 1981409 - RNA, 18 nt, Human
gccucucugcaggucccu

SEQ ID NO: 1981410 - RNA, 23 nt, Human
gccucucugcaggucccuaauaa

SEQ ID NO: 1981411 - RNA, 12 nt, Human
gccucugccugu

SEQ ID NO: 1981412 - RNA, 22 nt, Human
gccugaagucacacagugaguc

SEQ ID NO: 1981413 - RNA, 19 nt, Human
gccucugcugauccuccca

SEQ ID NO: 1981414 - RNA, 18 nt, Human
gccucugcugauccuccc

SEQ ID NO: 1981415 - RNA, 13 nt, Human
gccucugccuguc

SEQ ID NO: 1981416 - RNA, 22 nt, Human
gccugcuuuuuauggccuguga

SEQ ID NO: 1981417 - RNA, 19 nt, Human
gccugcuuuuuauggccug

SEQ ID NO: 1981418 - RNA, 18 nt, Human
gccugcuuuuuauggccu

SEQ ID NO: 1981419 - RNA, 18 nt, Human
gccugcuccagcuguuca

SEQ ID NO: 1981420 - RNA, 16 nt, Human
gccugcuccagcuguu

SEQ ID NO: 1981421 - RNA, 17 nt, Human
gccugcuuugucuccuc

SEQ ID NO: 1981422 - RNA, 16 nt, Human
gccugauuuguuccuu

SEQ ID NO: 1981423 - RNA, 19 nt, Human
gccugcacuugggggcuca

SEQ ID NO: 1981424 - RNA, 21 nt, Human
gccugcacuugggggcucagc

SEQ ID NO: 1981425 - RNA, 22 nt, Human
gccugcacuugggggcucagca

SEQ ID NO: 1981426 - RNA, 23 nt, Human
gccugcacuugggggcucagcaa

SEQ ID NO: 1981427 - RNA, 12 nt, Human
gccugcagagcu

SEQ ID NO: 1981428 - RNA, 15 nt, Human
gccugcagagcugcg

SEQ ID NO: 1981429 - RNA, 15 nt, Human
gccugcuccagcugu

SEQ ID NO: 1981430 - RNA, 17 nt, Human
gccugggcagaaggaag

SEQ ID NO: 1981431 - RNA, 16 nt, Human
gccugggcagaaggaa

SEQ ID NO: 1981432 - RNA, 18 nt, Human
gccugggcagaaggaaga

SEQ ID NO: 1981433 - RNA, 20 nt, Human
gccugggggcugggcagagg

SEQ ID NO: 1981434 - RNA, 21 nt, Human
gccugggggcugggcagagga

SEQ ID NO: 1981435 - RNA, 15 nt, Human
gccugggcagaagga

SEQ ID NO: 1981436 - RNA, 23 nt, Human
gccuggccagcagguccccagcu

SEQ ID NO: 1981437 - RNA, 14 nt, Human
gccuggccagaugc

SEQ ID NO: 1981438 - RNA, 15 nt, Human
gccuggccagaugca

SEQ ID NO: 1981439 - RNA, 14 nt, Human
gccuggauggggcu

SEQ ID NO: 1981440 - RNA, 15 nt, Human
gccuggauggggcug

SEQ ID NO: 1981441 - RNA, 13 nt, Human
gccuggccacgcc

SEQ ID NO: 1981442 - RNA, 15 nt, Human
gcagacucuacagag

SEQ ID NO: 1981443 - RNA, 12 nt, Human
gccccucccuuc

SEQ ID NO: 1981444 - RNA, 14 nt, Human
gccccucccuucaa

SEQ ID NO: 1981445 - RNA, 15 nt, Human
gccccucccuucaac

SEQ ID NO: 1981446 - RNA, 18 nt, Human
gccccuccucucugcccu

SEQ ID NO: 1981447 - RNA, 19 nt, Human
gccccuccucucugcccua

SEQ ID NO: 1981448 - RNA, 13 nt, Human
gccccugccaccc

SEQ ID NO: 1981449 - RNA, 20 nt, Human
gccccucuccccgcaguguu

SEQ ID NO: 1981450 - RNA, 21 nt, Human
gccccuguucuggcagaguug

SEQ ID NO: 1981451 - RNA, 14 nt, Human
gccccugccacccu

SEQ ID NO: 1981452 - RNA, 15 nt, Human
gccccugccacccug

SEQ ID NO: 1981453 - RNA, 16 nt, Human
gcccggcuccaggcuc

SEQ ID NO: 1981454 - RNA, 12 nt, Human
gccccuuccccc

SEQ ID NO: 1981455 - RNA, 16 nt, Human
gcccgacagccuggca

SEQ ID NO: 1981456 - RNA, 17 nt, Human
gcccgacagccuggcac

SEQ ID NO: 1981457 - RNA, 19 nt, Human
gcccgacagccuggcacag

SEQ ID NO: 1981458 - RNA, 12 nt, Human
gcccgccaccac

SEQ ID NO: 1981459 - RNA, 22 nt, Human
gcccuggacugugugcucagga

SEQ ID NO: 1981460 - RNA, 16 nt, Human
gcccuggacugugugc

SEQ ID NO: 1981461 - RNA, 12 nt, Human
gcccuggacugu

SEQ ID NO: 1981462 - RNA, 22 nt, Human
gcccugcuuugggcugcccugg

SEQ ID NO: 1981463 - RNA, 23 nt, Human
gcccugcuuugggcugcccuggu

SEQ ID NO: 1981464 - RNA, 16 nt, Human
gcccugaguuccuagc

SEQ ID NO: 1981465 - RNA, 18 nt, Human
gcccugaguuccuagcca

SEQ ID NO: 1981466 - RNA, 22 nt, Human
gcccugauguguccucagggag

SEQ ID NO: 1981467 - RNA, 20 nt, Human
gcccugcuuugggcugcccu

SEQ ID NO: 1981468 - RNA, 21 nt, Human
gcccugcuuugggcugcccug

SEQ ID NO: 1981469 - RNA, 19 nt, Human
gcccugcuuugggcugccc

SEQ ID NO: 1981470 - RNA, 17 nt, Human
gcccggcuccaggcucc

SEQ ID NO: 1981471 - RNA, 18 nt, Human
gcccggcuccaggcuccu

SEQ ID NO: 1981472 - RNA, 16 nt, Human
gcccugagcuuucugc

SEQ ID NO: 1981473 - RNA, 16 nt, Human
gcccugaggaggccuu

SEQ ID NO: 1981474 - RNA, 12 nt, Human
gcccucugccca

SEQ ID NO: 1981475 - RNA, 20 nt, Human
gcccucucugaaggaggcca

SEQ ID NO: 1981476 - RNA, 22 nt, Human
gcccucucugaaggaggccacc

SEQ ID NO: 1981477 - RNA, 23 nt, Human
gcccucucugaaggaggccaccu

SEQ ID NO: 1981478 - RNA, 21 nt, Human
gcccugggaggcucuggagcc

SEQ ID NO: 1981479 - RNA, 19 nt, Human
gcccugggaggcucuggag

SEQ ID NO: 1981480 - RNA, 18 nt, Human
gcccugggaggcucugga

SEQ ID NO: 1981481 - RNA, 17 nt, Human
gcccugggaggcucugg

SEQ ID NO: 1981482 - RNA, 23 nt, Human
gcccugggaggcucuggagccca

SEQ ID NO: 1981483 - RNA, 16 nt, Human
gcccugggaggcagug

SEQ ID NO: 1981484 - RNA, 15 nt, Human
gcccuggugcugcca

SEQ ID NO: 1981485 - RNA, 16 nt, Human
gcccuggugcugccac

SEQ ID NO: 1981486 - RNA, 17 nt, Human
gcccuggugcugccaca

SEQ ID NO: 1981487 - RNA, 21 nt, Human
gcccuggugcugccacacuuc

SEQ ID NO: 1981488 - RNA, 16 nt, Human
gcccugggaggcucug

SEQ ID NO: 1981489 - RNA, 15 nt, Human
gcccugggaggcucu

SEQ ID NO: 1981490 - RNA, 14 nt, Human
gcccugggaggcuc

SEQ ID NO: 1981491 - RNA, 13 nt, Human
gcccugggaggcu

SEQ ID NO: 1981492 - RNA, 11 nt, Human
gcccugggagg

SEQ ID NO: 1981493 - RNA, 14 nt, Human
gcccugggaggcag

SEQ ID NO: 1981494 - RNA, 15 nt, Human
gcccuggcucccaca

SEQ ID NO: 1981495 - RNA, 19 nt, Human
gcccuggcucccacaggcc

SEQ ID NO: 1981496 - RNA, 20 nt, Human
gcccuggcucccacaggccc

SEQ ID NO: 1981497 - RNA, 12 nt, Human
gcccuggcagcc

SEQ ID NO: 1981498 - RNA, 14 nt, Human
gcccuggcaggcag

SEQ ID NO: 1981499 - RNA, 15 nt, Human
gcccuggcaggcagg

SEQ ID NO: 1981500 - RNA, 16 nt, Human
gcccuggcaggcaggg

SEQ ID NO: 1981501 - RNA, 13 nt, Human
gcccuggccccca

SEQ ID NO: 1981502 - RNA, 16 nt, Human
gcccuggcccccacau

SEQ ID NO: 1981503 - RNA, 17 nt, Human
gcccuggcccccacaug

SEQ ID NO: 1981504 - RNA, 14 nt, Human
gcccugguggcagu

SEQ ID NO: 1981505 - RNA, 17 nt, Human
gcccugguggcaguggg

SEQ ID NO: 1981506 - RNA, 18 nt, Human
gcccugguggcaguggga

SEQ ID NO: 1981507 - RNA, 19 nt, Human
gcccugguggcagugggag

SEQ ID NO: 1981508 - RNA, 20 nt, Human
gcccugguggcagugggagc

SEQ ID NO: 1981509 - RNA, 21 nt, Human
gcccugguggcagugggagcu

SEQ ID NO: 1981510 - RNA, 22 nt, Human
gcccugguggcagugggagcug

SEQ ID NO: 1981511 - RNA, 23 nt, Human
gcccugguggcagugggagcugc

SEQ ID NO: 1981512 - RNA, 17 nt, Human
gcccugguuuccugccc

SEQ ID NO: 1981513 - RNA, 18 nt, Human
gcccugguuuccugcccu

SEQ ID NO: 1981514 - RNA, 19 nt, Human
gcccugguuuccugcccug

SEQ ID NO: 1981515 - RNA, 20 nt, Human
gcccugguuuccugcccugg

SEQ ID NO: 1981516 - RNA, 21 nt, Human
gcccugguuuccugcccuggg

SEQ ID NO: 1981517 - RNA, 23 nt, Human
gcccugguuuccugcccugggag

SEQ ID NO: 1981518 - RNA, 15 nt, Human
gcccugucaggaggc

SEQ ID NO: 1981519 - RNA, 17 nt, Human
gcccugucaggaggcag

SEQ ID NO: 1981520 - RNA, 18 nt, Human
gcccugucaggaggcaga

SEQ ID NO: 1981521 - RNA, 14 nt, Human
gcccugguuuccug

SEQ ID NO: 1981522 - RNA, 15 nt, Human
gcccugguuuccugc

SEQ ID NO: 1981523 - RNA, 19 nt, Human
gcccuucucuccagccccu

SEQ ID NO: 1981524 - RNA, 21 nt, Human
gcccuuccucuccacugccuu

SEQ ID NO: 1981525 - RNA, 17 nt, Human
gcccuuccucuccacug

SEQ ID NO: 1981526 - RNA, 16 nt, Human
gcccuuccucuccacu

SEQ ID NO: 1981527 - RNA, 18 nt, Human
gcccuuccucuccacugc

SEQ ID NO: 1981528 - RNA, 19 nt, Human
gcccuuccucuccacugcc

SEQ ID NO: 1981529 - RNA, 22 nt, Human
gcccuucucuccagccccugga

SEQ ID NO: 1981530 - RNA, 21 nt, Human
gcccuucucuccagccccugg

SEQ ID NO: 1981531 - RNA, 23 nt, Human
gcccuucucuccagccccuggau

SEQ ID NO: 1981532 - RNA, 20 nt, Human
gcccuuccucuccacugccu

SEQ ID NO: 1981533 - RNA, 20 nt, Human
gcccuuuacuugucuuucug

SEQ ID NO: 1981534 - RNA, 17 nt, Human
gcccuuuacuugucuuu

SEQ ID NO: 1981535 - RNA, 21 nt, Human
gcccuuuacuugucuuucugg

SEQ ID NO: 1981536 - RNA, 23 nt, Human
gcccuuuacuugucuuucugggg

SEQ ID NO: 1981537 - RNA, 17 nt, Human
gccgagauugcaccacu

SEQ ID NO: 1981538 - RNA, 18 nt, Human
gccgagauugcaccacug

SEQ ID NO: 1981539 - RNA, 18 nt, Human
gccgagaucacgccacug

SEQ ID NO: 1981540 - RNA, 19 nt, Human
gccgagaucacgccacugc

SEQ ID NO: 1981541 - RNA, 16 nt, Human
gccgagaucacgccac

SEQ ID NO: 1981542 - RNA, 18 nt, Human
gcccuuuguccuccugcu

SEQ ID NO: 1981543 - RNA, 22 nt, Human
gcccuuuguccuccugcugcca

SEQ ID NO: 1981544 - RNA, 23 nt, Human
ggaauguauaguauuugaaaaca

SEQ ID NO: 1981545 - RNA, 16 nt, Human
ggaauguauaguauuu

SEQ ID NO: 1981546 - RNA, 21 nt, Human
ggaauguauaguauuugaaaa

SEQ ID NO: 1981547 - RNA, 24 nt, Human
ggaaugauuaauuaaaacacaaca

SEQ ID NO: 1981548 - RNA, 12 nt, Human
ggaaugcagugg

SEQ ID NO: 1981549 - RNA, 16 nt, Human
ggaauuauuuuaaaag

SEQ ID NO: 1981550 - RNA, 17 nt, Human
ggaauuauuuuaaaaga

SEQ ID NO: 1981551 - RNA, 14 nt, Human
ggaauuauuuuaaa

SEQ ID NO: 1981552 - RNA, 15 nt, Human
ggaauuauuuuaaaa

SEQ ID NO: 1981553 - RNA, 19 nt, Human
ggaauguuugccucugccu

SEQ ID NO: 1981554 - RNA, 19 nt, Human
ggaauuuggaaaucucuuu

SEQ ID NO: 1981555 - RNA, 23 nt, Human
ggaauuggguggggggcuucaua

SEQ ID NO: 1981556 - RNA, 12 nt, Human
ggaauuguguuu

SEQ ID NO: 1981557 - RNA, 16 nt, Human
ggacaaaauggaauac

SEQ ID NO: 1981558 - RNA, 17 nt, Human
ggacaaaauggaauacu

SEQ ID NO: 1981559 - RNA, 13 nt, Human
ggaauuuuuuugu

SEQ ID NO: 1981560 - RNA, 19 nt, Human
ggaauuuucaucuaggauu

SEQ ID NO: 1981561 - RNA, 17 nt, Human
ggacaaccuuggcuugg

SEQ ID NO: 1981562 - RNA, 22 nt, Human
ggacaaccuuggcuuggcccug

SEQ ID NO: 1981563 - RNA, 23 nt, Human
ggaaggggagauaaggguaucug

SEQ ID NO: 1981564 - RNA, 23 nt, Human
ggaagggacaccaagccuuggcu

SEQ ID NO: 1981565 - RNA, 17 nt, Human
ggaaggcugagaggaga

SEQ ID NO: 1981566 - RNA, 14 nt, Human
ggaaggcccagcac

SEQ ID NO: 1981567 - RNA, 15 nt, Human
ggaaggcccagcacc

SEQ ID NO: 1981568 - RNA, 20 nt, Human
ggaaggccugacuucugcug

SEQ ID NO: 1981569 - RNA, 12 nt, Human
ggaaggccugac

SEQ ID NO: 1981570 - RNA, 13 nt, Human
ggaaccugacccc

SEQ ID NO: 1981571 - RNA, 11 nt, Human
ggaaccugcca

SEQ ID NO: 1981572 - RNA, 13 nt, Human
ggaaccugccaug

SEQ ID NO: 1981573 - RNA, 22 nt, Human
ggaaccuguccuaaggaaccuu

SEQ ID NO: 1981574 - RNA, 18 nt, Human
ggaaccugugagcugcac

SEQ ID NO: 1981575 - RNA, 16 nt, Human
ggaaccuuccuuccug

SEQ ID NO: 1981576 - RNA, 19 nt, Human
ggaaccuuccuuccugcuu

SEQ ID NO: 1981577 - RNA, 20 nt, Human
ggaaccuuccuuccugcuug

SEQ ID NO: 1981578 - RNA, 21 nt, Human
ggaaccuuccuuccugcuuga

SEQ ID NO: 1981579 - RNA, 13 nt, Human
ggaacgcccacuu

SEQ ID NO: 1981580 - RNA, 14 nt, Human
ggaaggcagggagg

SEQ ID NO: 1981581 - RNA, 18 nt, Human
ggaaggcacuucugccug

SEQ ID NO: 1981582 - RNA, 19 nt, Human
ggaacgcccacuucccugg

SEQ ID NO: 1981583 - RNA, 19 nt, Human
ggaaguccuuaucuagcug

SEQ ID NO: 1981584 - RNA, 17 nt, Human
ggaaguagcacaggcug

SEQ ID NO: 1981585 - RNA, 18 nt, Human
ggaaguagcacaggcuga

SEQ ID NO: 1981586 - RNA, 20 nt, Human
ggaagugacgguuuaauggg

SEQ ID NO: 1981587 - RNA, 18 nt, Human
ggaagugcuaauuuugaa

SEQ ID NO: 1981588 - RNA, 14 nt, Human
ggaaugauuaauua

SEQ ID NO: 1981589 - RNA, 21 nt, Human
ggaagguaguucaagaaauga

SEQ ID NO: 1981590 - RNA, 20 nt, Human
ggaagguaguucaagaaaug

SEQ ID NO: 1981591 - RNA, 17 nt, Human
ggaaggggggucagaag

SEQ ID NO: 1981592 - RNA, 16 nt, Human
ggaaguacuggagaaa

SEQ ID NO: 1981593 - RNA, 12 nt, Human
ggaaguacugga

SEQ ID NO: 1981594 - RNA, 18 nt, Human
ggaaguacuggagaaaau

SEQ ID NO: 1981595 - RNA, 14 nt, Human
ggaaguagcacagg

SEQ ID NO: 1981596 - RNA, 15 nt, Human
ggaaguagcacaggc

SEQ ID NO: 1981597 - RNA, 23 nt, Human
ggaccucaggugagaagcagagg

SEQ ID NO: 1981598 - RNA, 19 nt, Human
ggaccucaggugagaagca

SEQ ID NO: 1981599 - RNA, 23 nt, Human
ggaccacgucuauuucaucagaa

SEQ ID NO: 1981600 - RNA, 13 nt, Human
ggaccagagcugc

SEQ ID NO: 1981601 - RNA, 18 nt, Human
ggaccacaggugcccgcc

SEQ ID NO: 1981602 - RNA, 20 nt, Human
ggaccacaggugcccgccac

SEQ ID NO: 1981603 - RNA, 20 nt, Human
ggacgcuacccgggaagggg

SEQ ID NO: 1981604 - RNA, 19 nt, Human
ggacgcuacccgggaaggg

SEQ ID NO: 1981605 - RNA, 17 nt, Human
ggacgcuacccgggaag

SEQ ID NO: 1981606 - RNA, 17 nt, Human
ggaccuucgggcugugc

SEQ ID NO: 1981607 - RNA, 18 nt, Human
ggaccuucgggcugugcc

SEQ ID NO: 1981608 - RNA, 19 nt, Human
ggaccuucgggcugugccc

SEQ ID NO: 1981609 - RNA, 20 nt, Human
ggaccuucgggcugugcccg

SEQ ID NO: 1981610 - RNA, 15 nt, Human
ggaccuugaacuggg

SEQ ID NO: 1981611 - RNA, 17 nt, Human
ggaccuugaacugggua

SEQ ID NO: 1981612 - RNA, 22 nt, Human
ggacacucaaaagcugggcagg

SEQ ID NO: 1981613 - RNA, 17 nt, Human
ggacacucaaaagcugg

SEQ ID NO: 1981614 - RNA, 15 nt, Human
ggacagccacggcca

SEQ ID NO: 1981615 - RNA, 19 nt, Human
ggacagccacggccaggcc

SEQ ID NO: 1981616 - RNA, 20 nt, Human
ggacagccacggccaggcca

SEQ ID NO: 1981617 - RNA, 21 nt, Human
ggacagccacggccaggccag

SEQ ID NO: 1981618 - RNA, 22 nt, Human
ggacagccacggccaggccaga

SEQ ID NO: 1981619 - RNA, 17 nt, Human
ggacagcauugccagua

SEQ ID NO: 1981620 - RNA, 21 nt, Human
ggacauggcuucugaaccugu

SEQ ID NO: 1981621 - RNA, 20 nt, Human
ggacauugcggacagccacg

SEQ ID NO: 1981622 - RNA, 20 nt, Human
ggacugugauuugaauccag

SEQ ID NO: 1981623 - RNA, 17 nt, Human
ggacugugugcucagga

SEQ ID NO: 1981624 - RNA, 15 nt, Human
ggagaaucacuugaa

SEQ ID NO: 1981625 - RNA, 19 nt, Human
ggagaaucacuugaacccg

SEQ ID NO: 1981626 - RNA, 18 nt, Human
ggagaagcggcuggcagc

SEQ ID NO: 1981627 - RNA, 17 nt, Human
ggagaagcggcuggcag

SEQ ID NO: 1981628 - RNA, 13 nt, Human
ggacgcucucugg

SEQ ID NO: 1981629 - RNA, 14 nt, Human
ggacgcucucuggc

SEQ ID NO: 1981630 - RNA, 15 nt, Human
ggacgcucucuggcc

SEQ ID NO: 1981631 - RNA, 18 nt, Human
ggacuggccucugcugau

SEQ ID NO: 1981632 - RNA, 17 nt, Human
ggacugggaacagaacu

SEQ ID NO: 1981633 - RNA, 20 nt, Human
ggagaaugcaccauacucau

SEQ ID NO: 1981634 - RNA, 22 nt, Human
ggagacagagcaaccccuggac

SEQ ID NO: 1981635 - RNA, 22 nt, Human
ggagaaugucaguauguggaag

SEQ ID NO: 1981636 - RNA, 17 nt, Human
ggagaaugcaccauacu

SEQ ID NO: 1981637 - RNA, 19 nt, Human
ggagaaucauguuucuuug

SEQ ID NO: 1981638 - RNA, 20 nt, Human
ggagaaucauguuucuuuga

SEQ ID NO: 1981639 - RNA, 18 nt, Human
ggagaaucauguuucuuu

SEQ ID NO: 1981640 - RNA, 12 nt, Human
ggagaggagccc

SEQ ID NO: 1981641 - RNA, 15 nt, Human
ggagaggagcccugc

SEQ ID NO: 1981642 - RNA, 16 nt, Human
ggagaggagcccugcc

SEQ ID NO: 1981643 - RNA, 20 nt, Human
ggagauagccccacaggagg

SEQ ID NO: 1981644 - RNA, 21 nt, Human
ggagauagccccacaggaggu

SEQ ID NO: 1981645 - RNA, 22 nt, Human
ggagauacuuggucacagccag

SEQ ID NO: 1981646 - RNA, 23 nt, Human
ggagauacuuggucacagccagg

SEQ ID NO: 1981647 - RNA, 18 nt, Human
ggagauccuuguguuuau

SEQ ID NO: 1981648 - RNA, 18 nt, Human
ggaaaagcagcucucccc

SEQ ID NO: 1981649 - RNA, 14 nt, Human
ggaaaagcagcucu

SEQ ID NO: 1981650 - RNA, 21 nt, Human
ggaaaaccaagccguggcuuc

SEQ ID NO: 1981651 - RNA, 17 nt, Human
ggaaaacacccagggaa

SEQ ID NO: 1981652 - RNA, 19 nt, Human
ggaaaagcggacaucagcu

SEQ ID NO: 1981653 - RNA, 11 nt, Human
ggaaaagcuga

SEQ ID NO: 1981654 - RNA, 20 nt, Human
ggaaaagccaagaggcugca

SEQ ID NO: 1981655 - RNA, 14 nt, Human
ggaaaagcugcuga

SEQ ID NO: 1981656 - RNA, 11 nt, Human
ggaaaaggaag

SEQ ID NO: 1981657 - RNA, 23 nt, Human
ggaaaaggaagguaguucaagaa

SEQ ID NO: 1981658 - RNA, 15 nt, Human
ggaaaaggcauauau

SEQ ID NO: 1981659 - RNA, 18 nt, Human
ggaaaagcugcugacagu

SEQ ID NO: 1981660 - RNA, 20 nt, Human
ggaaaagcugcugacagugu

SEQ ID NO: 1981661 - RNA, 18 nt, Human
ggaaaacaugcuacacac

SEQ ID NO: 1981662 - RNA, 11 nt, Human
ggaaaaauuca

SEQ ID NO: 1981663 - RNA, 22 nt, Human
gcuuuucacugcuggcugccuu

SEQ ID NO: 1981664 - RNA, 23 nt, Human
gcuuuucacugcuggcugccuua

SEQ ID NO: 1981665 - RNA, 21 nt, Human
gcuuuguuuguugucagcuga

SEQ ID NO: 1981666 - RNA, 23 nt, Human
gcuuuguugugugccucuagcug

SEQ ID NO: 1981667 - RNA, 14 nt, Human
gcuuuguuuguucu

SEQ ID NO: 1981668 - RNA, 18 nt, Human
gcuuuguugugugccucu

SEQ ID NO: 1981669 - RNA, 19 nt, Human
gcuuuguugugugccucua

SEQ ID NO: 1981670 - RNA, 21 nt, Human
gcuuuguugugugccucuagc

SEQ ID NO: 1981671 - RNA, 22 nt, Human
gcuuuguugugugccucuagcu

SEQ ID NO: 1981672 - RNA, 13 nt, Human
gcuuuucacugcu

SEQ ID NO: 1981673 - RNA, 15 nt, Human
gcuuuguuuguucuu

SEQ ID NO: 1981674 - RNA, 14 nt, Human
gcuuuucacugcug

SEQ ID NO: 1981675 - RNA, 18 nt, Human
gcuuuucacugcuggcug

SEQ ID NO: 1981676 - RNA, 18 nt, Human
gcuugaggguugggcugg

SEQ ID NO: 1981677 - RNA, 20 nt, Human
gcuugaggguugggcuggug

SEQ ID NO: 1981678 - RNA, 23 nt, Human
gcuuucaaaggagcucgaaggau

SEQ ID NO: 1981679 - RNA, 16 nt, Human
gcuuuauuuuuuugaa

SEQ ID NO: 1981680 - RNA, 12 nt, Human
gcuuuagacuug

SEQ ID NO: 1981681 - RNA, 14 nt, Human
gcuuuagacuugaa

SEQ ID NO: 1981682 - RNA, 15 nt, Human
gcuuuagacuugaaa

SEQ ID NO: 1981683 - RNA, 17 nt, Human
gcuuuagacuugaaaag

SEQ ID NO: 1981684 - RNA, 18 nt, Human
gcuuuagacuugaaaaga

SEQ ID NO: 1981685 - RNA, 21 nt, Human
gcuuuagacuugaaaagagac

SEQ ID NO: 1981686 - RNA, 24 nt, Human
gcuuuagacuugaaaagagacagg

SEQ ID NO: 1981687 - RNA, 12 nt, Human
gcuuuagcuuau

SEQ ID NO: 1981688 - RNA, 20 nt, Human
gcuuuaggcauaugcuucuu

SEQ ID NO: 1981689 - RNA, 21 nt, Human
gcuuuaguggccaucauuucu

SEQ ID NO: 1981690 - RNA, 15 nt, Human
gcuuugugauuuuug

SEQ ID NO: 1981691 - RNA, 18 nt, Human
gcuuugucuacuucaaaa

SEQ ID NO: 1981692 - RNA, 15 nt, Human
gcuuucaggagcucc

SEQ ID NO: 1981693 - RNA, 13 nt, Human
gcuuugucuccuc

SEQ ID NO: 1981694 - RNA, 19 nt, Human
gcuuugucuccucuauccu

SEQ ID NO: 1981695 - RNA, 15 nt, Human
gcuuuguugugugcc

SEQ ID NO: 1981696 - RNA, 17 nt, Human
gcuuuguugugugccuc

SEQ ID NO: 1981697 - RNA, 15 nt, Human
gcuuuguaugcacuu

SEQ ID NO: 1981698 - RNA, 21 nt, Human
ggaaaggcuccaggagcagcc

SEQ ID NO: 1981699 - RNA, 20 nt, Human
ggaaaggcuccaggagcagc

SEQ ID NO: 1981700 - RNA, 19 nt, Human
ggaaaggcuccaggagcag

SEQ ID NO: 1981701 - RNA, 17 nt, Human
ggaaaggcuccaggagc

SEQ ID NO: 1981702 - RNA, 22 nt, Human
ggaaaggcuccaggagcagcca

SEQ ID NO: 1981703 - RNA, 14 nt, Human
ggaaaggcuccagg

SEQ ID NO: 1981704 - RNA, 13 nt, Human
ggaaaggcuccag

SEQ ID NO: 1981705 - RNA, 12 nt, Human
ggaaaggcucca

SEQ ID NO: 1981706 - RNA, 19 nt, Human
ggaaaaucagccugcucca

SEQ ID NO: 1981707 - RNA, 22 nt, Human
ggaaaauuaguucccauucuuu

SEQ ID NO: 1981708 - RNA, 23 nt, Human
ggaaaaucagccugcuccagcug

SEQ ID NO: 1981709 - RNA, 14 nt, Human
ggaaaucaccgaaa

SEQ ID NO: 1981710 - RNA, 21 nt, Human
ggaaaucaccgaaaacguggc

SEQ ID NO: 1981711 - RNA, 18 nt, Human
ggaaaucaaauguaaagu

SEQ ID NO: 1981712 - RNA, 17 nt, Human
ggaaaucaaauguaaag

SEQ ID NO: 1981713 - RNA, 16 nt, Human
ggaaauaccaguucug

SEQ ID NO: 1981714 - RNA, 14 nt, Human
ggaaaguuucuuug

SEQ ID NO: 1981715 - RNA, 17 nt, Human
ggaaaguuucuuugaaa

SEQ ID NO: 1981716 - RNA, 21 nt, Human
ggaaccaaagcgaauuuuaaa

SEQ ID NO: 1981717 - RNA, 16 nt, Human
ggaacaggaaacugau

SEQ ID NO: 1981718 - RNA, 22 nt, Human
ggaaccaaagcgaauuuuaaaa

SEQ ID NO: 1981719 - RNA, 21 nt, Human
gcuuagaggcaugggcuugcu

SEQ ID NO: 1981720 - RNA, 12 nt, Human
gcuuagaggcau

SEQ ID NO: 1981721 - RNA, 18 nt, Human
gcuuagaggcaugggcuu

SEQ ID NO: 1981722 - RNA, 21 nt, Human
gcuuaggagaagucuucuauu

SEQ ID NO: 1981723 - RNA, 13 nt, Human
gcuguugaccagg

SEQ ID NO: 1981724 - RNA, 15 nt, Human
gcuguugaccaggca

SEQ ID NO: 1981725 - RNA, 18 nt, Human
gcuguugaccaggcaccu

SEQ ID NO: 1981726 - RNA, 23 nt, Human
gcuguugaccaggcaccuccccu

SEQ ID NO: 1981727 - RNA, 22 nt, Human
gcuguugacucuaguacuguga

SEQ ID NO: 1981728 - RNA, 17 nt, Human
gcuuagucacugagaca

SEQ ID NO: 1981729 - RNA, 15 nt, Human
gcuuagucacugaga

SEQ ID NO: 1981730 - RNA, 20 nt, Human
gcuuagucacugagacagcc

SEQ ID NO: 1981731 - RNA, 19 nt, Human
gcuuagucacugagacagc

SEQ ID NO: 1981732 - RNA, 21 nt, Human
gcuuagucacugagacagccc

SEQ ID NO: 1981733 - RNA, 12 nt, Human
gcuguucuuccu

SEQ ID NO: 1981734 - RNA, 13 nt, Human
gcuguucuuccug

SEQ ID NO: 1981735 - RNA, 14 nt, Human
gcuguucuuccugg

SEQ ID NO: 1981736 - RNA, 23 nt, Human
gcuguucuuuaguagcaacuaaa

SEQ ID NO: 1981737 - RNA, 21 nt, Human
gcuguucaugaaagauucaau

SEQ ID NO: 1981738 - RNA, 12 nt, Human
gcuguucaugaa

SEQ ID NO: 1981739 - RNA, 13 nt, Human
gcuguucagcugg

SEQ ID NO: 1981740 - RNA, 14 nt, Human
gcuguucagcuggu

SEQ ID NO: 1981741 - RNA, 21 nt, Human
gcugugggcgugagaccugcc

SEQ ID NO: 1981742 - RNA, 22 nt, Human
gcugugggcgugagaccugccc

SEQ ID NO: 1981743 - RNA, 20 nt, Human
gcugugggcgugagaccugc

SEQ ID NO: 1981744 - RNA, 19 nt, Human
gcugccaaugggagcucau

SEQ ID NO: 1981745 - RNA, 16 nt, Human
gcugccaaugggagcu

SEQ ID NO: 1981746 - RNA, 15 nt, Human
gcugccaaugggagc

SEQ ID NO: 1981747 - RNA, 19 nt, Human
gcuuaucucaggggugugc

SEQ ID NO: 1981748 - RNA, 20 nt, Human
gcuuauacacuuacacuuua

SEQ ID NO: 1981749 - RNA, 12 nt, Human
gcuuauacacuu

SEQ ID NO: 1981750 - RNA, 12 nt, Human
gcuuauaaaaca

SEQ ID NO: 1981751 - RNA, 13 nt, Human
gcuuauaaaacag

SEQ ID NO: 1981752 - RNA, 19 nt, Human
gcuuauaaaacagaguaau

SEQ ID NO: 1981753 - RNA, 16 nt, Human
gcuucaguggcagcug

SEQ ID NO: 1981754 - RNA, 23 nt, Human
gcuuaugauagcaaauggccuca

SEQ ID NO: 1981755 - RNA, 22 nt, Human
gcuuauaaaacagaguaaucuu

SEQ ID NO: 1981756 - RNA, 11 nt, Human
gcuucauacag

SEQ ID NO: 1981757 - RNA, 22 nt, Human
gcuucauacagggaugguguuc

SEQ ID NO: 1981758 - RNA, 23 nt, Human
gcuucauacuucaugaaauccug

SEQ ID NO: 1981759 - RNA, 17 nt, Human
gcuucaguggcagcugc

SEQ ID NO: 1981760 - RNA, 18 nt, Human
gcuucaguggcagcugcu

SEQ ID NO: 1981761 - RNA, 15 nt, Human
gcuucauccuccuca

SEQ ID NO: 1981762 - RNA, 12 nt, Human
gcuucauccucc

SEQ ID NO: 1981763 - RNA, 13 nt, Human
gcuucauuuccug

SEQ ID NO: 1981764 - RNA, 16 nt, Human
gcuucauuuccugugu

SEQ ID NO: 1981765 - RNA, 18 nt, Human
gcuuccagugaggcucug

SEQ ID NO: 1981766 - RNA, 20 nt, Human
gcuuccagcaggagggacag

SEQ ID NO: 1981767 - RNA, 16 nt, Human
gcuuccagugaggcuc

SEQ ID NO: 1981768 - RNA, 17 nt, Human
gcuucauuuccuguguc

SEQ ID NO: 1981769 - RNA, 21 nt, Human
gcuucauccuccucagaucuu

SEQ ID NO: 1981770 - RNA, 15 nt, Human
gcuuccagugaggcu

SEQ ID NO: 1981771 - RNA, 12 nt, Human
gcuuccagcagg

SEQ ID NO: 1981772 - RNA, 13 nt, Human
gcuuccagcagga

SEQ ID NO: 1981773 - RNA, 14 nt, Human
gcuuccagcaggag

SEQ ID NO: 1981774 - RNA, 15 nt, Human
gcuuccagcaggagg

SEQ ID NO: 1981775 - RNA, 17 nt, Human
gcuuccagcaggaggga

SEQ ID NO: 1981776 - RNA, 16 nt, Human
gcuugaggguugggcu

SEQ ID NO: 1981777 - RNA, 12 nt, Human
ggagugcaguga

SEQ ID NO: 1981778 - RNA, 23 nt, Human
ggagugaguugauagcacagacc

SEQ ID NO: 1981779 - RNA, 14 nt, Human
ggagugcagugagc

SEQ ID NO: 1981780 - RNA, 18 nt, Human
ggauacaaaagcauguga

SEQ ID NO: 1981781 - RNA, 17 nt, Human
ggaucccucauccucau

SEQ ID NO: 1981782 - RNA, 13 nt, Human
ggaucccucaucc

SEQ ID NO: 1981783 - RNA, 22 nt, Human
ggaucccucauccucauaccca

SEQ ID NO: 1981784 - RNA, 22 nt, Human
ggaucaaaccccgaccaccugc

SEQ ID NO: 1981785 - RNA, 13 nt, Human
ggauccccuuccu

SEQ ID NO: 1981786 - RNA, 15 nt, Human
ggauaugaaaaauga

SEQ ID NO: 1981787 - RNA, 13 nt, Human
ggauaugaccagu

SEQ ID NO: 1981788 - RNA, 14 nt, Human
ggauaggggcagag

SEQ ID NO: 1981789 - RNA, 13 nt, Human
ggauccuccaggu

SEQ ID NO: 1981790 - RNA, 15 nt, Human
ggaugauugaagaaa

SEQ ID NO: 1981791 - RNA, 12 nt, Human
ggauccuccagg

SEQ ID NO: 1981792 - RNA, 14 nt, Human
ggauccccuuccua

SEQ ID NO: 1981793 - RNA, 17 nt, Human
ggaugcagccucacagu

SEQ ID NO: 1981794 - RNA, 16 nt, Human
ggaugcagccucacag

SEQ ID NO: 1981795 - RNA, 21 nt, Human
ggaugauuggaggggggaggu

SEQ ID NO: 1981796 - RNA, 23 nt, Human
ggaugcacagaguuguuacauuu

SEQ ID NO: 1981797 - RNA, 16 nt, Human
ggaugcauggagauag

SEQ ID NO: 1981798 - RNA, 19 nt, Human
ggaugccaagaaguuuaag

SEQ ID NO: 1981799 - RNA, 16 nt, Human
ggaugauugaagaaac

SEQ ID NO: 1981800 - RNA, 19 nt, Human
ggaugcagccucacagucc

SEQ ID NO: 1981801 - RNA, 15 nt, Human
ggaugcuuguacaua

SEQ ID NO: 1981802 - RNA, 17 nt, Human
ggauggaaugauggguc

SEQ ID NO: 1981803 - RNA, 19 nt, Human
ggauuacaagcgugagcca

SEQ ID NO: 1981804 - RNA, 17 nt, Human
ggauugggccccugcca

SEQ ID NO: 1981805 - RNA, 18 nt, Human
ggauugggccccugccag

SEQ ID NO: 1981806 - RNA, 17 nt, Human
ggauugcuacuguccua

SEQ ID NO: 1981807 - RNA, 15 nt, Human
ggauuguaaaauggu

SEQ ID NO: 1981808 - RNA, 16 nt, Human
ggcaacccccagccug

SEQ ID NO: 1981809 - RNA, 17 nt, Human
ggcaacccccagccugc

SEQ ID NO: 1981810 - RNA, 16 nt, Human
ggauucuuccucccuc

SEQ ID NO: 1981811 - RNA, 14 nt, Human
ggauugauuuuaaa

SEQ ID NO: 1981812 - RNA, 17 nt, Human
ggauugauuuuaaaaug

SEQ ID NO: 1981813 - RNA, 18 nt, Human
ggauugauuuuaaaaugu

SEQ ID NO: 1981814 - RNA, 16 nt, Human
ggauucuuauggacaa

SEQ ID NO: 1981815 - RNA, 23 nt, Human
ggauuacaagcgugagccacugc

SEQ ID NO: 1981816 - RNA, 19 nt, Human
ggauuacaggcuccugcca

SEQ ID NO: 1981817 - RNA, 15 nt, Human
ggcaauauucucugu

SEQ ID NO: 1981818 - RNA, 16 nt, Human
ggcaauauucucugua

SEQ ID NO: 1981819 - RNA, 19 nt, Human
ggcaauaaauuuugaaaag

SEQ ID NO: 1981820 - RNA, 19 nt, Human
ggcaaucauggugcucaga

SEQ ID NO: 1981821 - RNA, 18 nt, Human
ggcaacccccagccugcu

SEQ ID NO: 1981822 - RNA, 16 nt, Human
ggcaauaaauuuugaa

SEQ ID NO: 1981823 - RNA, 17 nt, Human
ggcaauaaauuuugaaa

SEQ ID NO: 1981824 - RNA, 14 nt, Human
ggcaaugcuggcug

SEQ ID NO: 1981825 - RNA, 18 nt, Human
ggcaauauucucuguaca

SEQ ID NO: 1981826 - RNA, 19 nt, Human
ggcaauauucucuguacau

SEQ ID NO: 1981827 - RNA, 20 nt, Human
ggcaauauucucuguacaua

SEQ ID NO: 1981828 - RNA, 15 nt, Human
ggcaaugcuggcugu

SEQ ID NO: 1981829 - RNA, 23 nt, Human
ggcaaugcuggcuguuggcuggg

SEQ ID NO: 1981830 - RNA, 16 nt, Human
ggcaaugguaguuucu

SEQ ID NO: 1981831 - RNA, 17 nt, Human
ggcaaugguaguuucug

SEQ ID NO: 1981832 - RNA, 18 nt, Human
ggcaaugguaguuucugu

SEQ ID NO: 1981833 - RNA, 23 nt, Human
ggcacccaccaucaugucuggcu

SEQ ID NO: 1981834 - RNA, 22 nt, Human
ggcacccggccccugcugguuc

SEQ ID NO: 1981835 - RNA, 18 nt, Human
ggcaccggggccucggac

SEQ ID NO: 1981836 - RNA, 18 nt, Human
ggcaugacacgaauauug

SEQ ID NO: 1981837 - RNA, 15 nt, Human
ggcaugaagacagau

SEQ ID NO: 1981838 - RNA, 17 nt, Human
ggcaugaaaugaacaca

SEQ ID NO: 1981839 - RNA, 19 nt, Human
ggcaugaaaugaacacaaa

SEQ ID NO: 1981840 - RNA, 13 nt, Human
ggcauggcagccc

SEQ ID NO: 1981841 - RNA, 17 nt, Human
ggcauggccagguggcc

SEQ ID NO: 1981842 - RNA, 18 nt, Human
ggcauggccagguggcca

SEQ ID NO: 1981843 - RNA, 19 nt, Human
ggcagggugucugcccccu

SEQ ID NO: 1981844 - RNA, 19 nt, Human
ggcagggucucacucuguc

SEQ ID NO: 1981845 - RNA, 20 nt, Human
ggcagggucucacucugucg

SEQ ID NO: 1981846 - RNA, 13 nt, Human
ggcagugggagcu

SEQ ID NO: 1981847 - RNA, 14 nt, Human
ggcagugggagcug

SEQ ID NO: 1981848 - RNA, 16 nt, Human
ggcagugggagcugcc

SEQ ID NO: 1981849 - RNA, 21 nt, Human
ggcagugggacagggcauggc

SEQ ID NO: 1981850 - RNA, 13 nt, Human
ggcaccugucugc

SEQ ID NO: 1981851 - RNA, 21 nt, Human
ggcaccugucugcuccagcuc

SEQ ID NO: 1981852 - RNA, 22 nt, Human
ggcaccugucugcuccagcucu

SEQ ID NO: 1981853 - RNA, 19 nt, Human
ggcacgugguugagugggg

SEQ ID NO: 1981854 - RNA, 15 nt, Human
ggcagcuauaggaaa

SEQ ID NO: 1981855 - RNA, 14 nt, Human
ggcagcucaccucu

SEQ ID NO: 1981856 - RNA, 12 nt, Human
ggcagcucaccu

SEQ ID NO: 1981857 - RNA, 12 nt, Human
ggcagcucagcu

SEQ ID NO: 1981858 - RNA, 21 nt, Human
ggcagcucagagaggguggga

SEQ ID NO: 1981859 - RNA, 13 nt, Human
ggcagcucagaga

SEQ ID NO: 1981860 - RNA, 16 nt, Human
ggcagcucaccucucc

SEQ ID NO: 1981861 - RNA, 22 nt, Human
ggcagcugcuuuugucuauggg

SEQ ID NO: 1981862 - RNA, 17 nt, Human
ggcagcuugaggguugg

SEQ ID NO: 1981863 - RNA, 16 nt, Human
ggcagcuguugucucu

SEQ ID NO: 1981864 - RNA, 17 nt, Human
ggccagcugcuugggcu

SEQ ID NO: 1981865 - RNA, 22 nt, Human
ggccagccuugaccauucucca

SEQ ID NO: 1981866 - RNA, 20 nt, Human
ggccagccuugaccauucuc

SEQ ID NO: 1981867 - RNA, 18 nt, Human
ggccaggcccucugccca

SEQ ID NO: 1981868 - RNA, 18 nt, Human
ggccaggaaguagcacag

SEQ ID NO: 1981869 - RNA, 23 nt, Human
ggccagcugcuugggcuucaucc

SEQ ID NO: 1981870 - RNA, 11 nt, Human
ggccagcuccg

SEQ ID NO: 1981871 - RNA, 17 nt, Human
ggccaggcugcucucaa

SEQ ID NO: 1981872 - RNA, 16 nt, Human
ggccaugggccuccug

SEQ ID NO: 1981873 - RNA, 14 nt, Human
ggccaggcugcucu

SEQ ID NO: 1981874 - RNA, 15 nt, Human
ggccaggcugcucuu

SEQ ID NO: 1981875 - RNA, 11 nt, Human
ggccaggcugc

SEQ ID NO: 1981876 - RNA, 19 nt, Human
ggccaggaaguagcacagg

SEQ ID NO: 1981877 - RNA, 18 nt, Human
ggcaugggaaugaauguc

SEQ ID NO: 1981878 - RNA, 17 nt, Human
ggcauuccccaggaggc

SEQ ID NO: 1981879 - RNA, 22 nt, Human
ggcaugggaaugaaugucagug

SEQ ID NO: 1981880 - RNA, 19 nt, Human
ggcauuccccaggaggcca

SEQ ID NO: 1981881 - RNA, 18 nt, Human
ggcauuccccaggaggcc

SEQ ID NO: 1981882 - RNA, 16 nt, Human
ggcauuccccaggagg

SEQ ID NO: 1981883 - RNA, 17 nt, Human
ggccacuccagaccccu

SEQ ID NO: 1981884 - RNA, 18 nt, Human
ggccacccugugcagaag

SEQ ID NO: 1981885 - RNA, 20 nt, Human
ggccaccacgccuagccuca

SEQ ID NO: 1981886 - RNA, 13 nt, Human
ggcccugccuccu

SEQ ID NO: 1981887 - RNA, 13 nt, Human
ggcccugcccugg

SEQ ID NO: 1981888 - RNA, 20 nt, Human
ggcccugcccugguuuccug

SEQ ID NO: 1981889 - RNA, 11 nt, Human
ggcccugcccu

SEQ ID NO: 1981890 - RNA, 12 nt, Human
ggcccugcagcu

SEQ ID NO: 1981891 - RNA, 12 nt, Human
ggcccugcccug

SEQ ID NO: 1981892 - RNA, 22 nt, Human
ggcccuggcucccacaggcccu

SEQ ID NO: 1981893 - RNA, 13 nt, Human
ggcccuggcuccc

SEQ ID NO: 1981894 - RNA, 13 nt, Human
ggcccuggcagcc

SEQ ID NO: 1981895 - RNA, 14 nt, Human
ggcccuggcagccc

SEQ ID NO: 1981896 - RNA, 15 nt, Human
ggcccugccuccuuu

SEQ ID NO: 1981897 - RNA, 14 nt, Human
ggcccugccuccuu

SEQ ID NO: 1981898 - RNA, 22 nt, Human
ggcccugcccugguuuccugcc

SEQ ID NO: 1981899 - RNA, 11 nt, Human
ggcccugccug

SEQ ID NO: 1981900 - RNA, 13 nt, Human
ggcccugccugcu

SEQ ID NO: 1981901 - RNA, 17 nt, Human
ggcccucugcccacucc

SEQ ID NO: 1981902 - RNA, 16 nt, Human
ggcccucugcccacuc

SEQ ID NO: 1981903 - RNA, 15 nt, Human
ggcccucugcccacu

SEQ ID NO: 1981904 - RNA, 13 nt, Human
ggcccucugccca

SEQ ID NO: 1981905 - RNA, 20 nt, Human
ggcccucugcccacucccug

SEQ ID NO: 1981906 - RNA, 19 nt, Human
ggcccucugcccacucccu

SEQ ID NO: 1981907 - RNA, 23 nt, Human
ggcccucucugaaggaggccacc

SEQ ID NO: 1981908 - RNA, 21 nt, Human
ggcccucugcccacucccugc

SEQ ID NO: 1981909 - RNA, 11 nt, Human
ggcccagagag

SEQ ID NO: 1981910 - RNA, 18 nt, Human
ggcccagagagaagagcc

SEQ ID NO: 1981911 - RNA, 20 nt, Human
ggcccagagagaagagcccc

SEQ ID NO: 1981912 - RNA, 12 nt, Human
ggcccagagagg

SEQ ID NO: 1981913 - RNA, 22 nt, Human
ggcccagagagaagagccccac

SEQ ID NO: 1981914 - RNA, 23 nt, Human
ggcccagagagaagagccccacu

SEQ ID NO: 1981915 - RNA, 20 nt, Human
ggcccucucugaaggaggcc

SEQ ID NO: 1981916 - RNA, 21 nt, Human
ggcccucucugaaggaggcca

SEQ ID NO: 1981917 - RNA, 19 nt, Human
ggcccaacaggggcuccau

SEQ ID NO: 1981918 - RNA, 20 nt, Human
ggcccaagagucuggggacc

SEQ ID NO: 1981919 - RNA, 22 nt, Human
ggcccaagagucuggggaccag

SEQ ID NO: 1981920 - RNA, 12 nt, Human
ggcccugugccu

SEQ ID NO: 1981921 - RNA, 17 nt, Human
ggccuacaugcuuugug

SEQ ID NO: 1981922 - RNA, 23 nt, Human
ggccuagcauacguacacauuuu

SEQ ID NO: 1981923 - RNA, 18 nt, Human
ggccuacaugcuuuguga

SEQ ID NO: 1981924 - RNA, 23 nt, Human
ggccuacaugcuuugugaacaag

SEQ ID NO: 1981925 - RNA, 16 nt, Human
ggccucugcacucccc

SEQ ID NO: 1981926 - RNA, 15 nt, Human
ggccucugcacuccc

SEQ ID NO: 1981927 - RNA, 14 nt, Human
ggccucugcacucc

SEQ ID NO: 1981928 - RNA, 13 nt, Human
ggccucugcacuc

SEQ ID NO: 1981929 - RNA, 17 nt, Human
ggccucuuaugggcugg

SEQ ID NO: 1981930 - RNA, 21 nt, Human
ggccucugcaaaggaaauacc

SEQ ID NO: 1981931 - RNA, 20 nt, Human
ggccucgguguggagaagcg

SEQ ID NO: 1981932 - RNA, 18 nt, Human
ggccucuuaugggcuggg

SEQ ID NO: 1981933 - RNA, 22 nt, Human
ggccucggacuuagcugggaga

SEQ ID NO: 1981934 - RNA, 20 nt, Human
ggccucggacuuagcuggga

SEQ ID NO: 1981935 - RNA, 17 nt, Human
ggccucggacuuagcug

SEQ ID NO: 1981936 - RNA, 19 nt, Human
ggccugucucggaaccugu

SEQ ID NO: 1981937 - RNA, 13 nt, Human
ggccugucuguga

SEQ ID NO: 1981938 - RNA, 22 nt, Human
ggccugucugugaagagcaaga

SEQ ID NO: 1981939 - RNA, 23 nt, Human
ggcgcugccccuggcagccccug

SEQ ID NO: 1981940 - RNA, 21 nt, Human
ggcgcugccccuggcagcccc

SEQ ID NO: 1981941 - RNA, 19 nt, Human
ggcgcugccccuggcagcc

SEQ ID NO: 1981942 - RNA, 18 nt, Human
ggcgcugccccuggcagc

SEQ ID NO: 1981943 - RNA, 22 nt, Human
ggccugggggcugggcagagga

SEQ ID NO: 1981944 - RNA, 20 nt, Human
ggccugggggcugggcagag

SEQ ID NO: 1981945 - RNA, 14 nt, Human
ggccugggggcugg

SEQ ID NO: 1981946 - RNA, 18 nt, Human
ggccuguccaacacaucu

SEQ ID NO: 1981947 - RNA, 11 nt, Human
ggccugugagc

SEQ ID NO: 1981948 - RNA, 19 nt, Human
ggccugaagaguccucuga

SEQ ID NO: 1981949 - RNA, 13 nt, Human
ggccugaagaguc

SEQ ID NO: 1981950 - RNA, 16 nt, Human
ggccugaauccaaaag

SEQ ID NO: 1981951 - RNA, 12 nt, Human
ggccugaaccac

SEQ ID NO: 1981952 - RNA, 18 nt, Human
ggccugaaccacaggaga

SEQ ID NO: 1981953 - RNA, 21 nt, Human
ggccucuuucagugaauuugu

SEQ ID NO: 1981954 - RNA, 23 nt, Human
ggccugaagaguccucugaauga

SEQ ID NO: 1981955 - RNA, 22 nt, Human
ggccugaauccaaaagaaaaac

SEQ ID NO: 1981956 - RNA, 14 nt, Human
ggccuggcucccuc

SEQ ID NO: 1981957 - RNA, 19 nt, Human
ggccuggccugagcuggga

SEQ ID NO: 1981958 - RNA, 14 nt, Human
ggccuggcuugucu

SEQ ID NO: 1981959 - RNA, 23 nt, Human
ggccuggcucccucacucucagg

SEQ ID NO: 1981960 - RNA, 17 nt, Human
ggcuagagguucaaaga

SEQ ID NO: 1981961 - RNA, 22 nt, Human
ggcuagagguucaaagauauuu

SEQ ID NO: 1981962 - RNA, 15 nt, Human
ggcuagcuaagccaa

SEQ ID NO: 1981963 - RNA, 22 nt, Human
ggcuaggaccccuccauguggg

SEQ ID NO: 1981964 - RNA, 16 nt, Human
ggcuaggaccccucca

SEQ ID NO: 1981965 - RNA, 17 nt, Human
ggcucaagcccaggagg

SEQ ID NO: 1981966 - RNA, 12 nt, Human
ggcucaaauuuu

SEQ ID NO: 1981967 - RNA, 15 nt, Human
ggcuaugcauuugaa

SEQ ID NO: 1981968 - RNA, 21 nt, Human
ggcuauggggauagaugugug

SEQ ID NO: 1981969 - RNA, 19 nt, Human
ggcuaugggggcacugagg

SEQ ID NO: 1981970 - RNA, 16 nt, Human
ggcuaguugggcuucc

SEQ ID NO: 1981971 - RNA, 23 nt, Human
ggcuagugugguguuuccuggca

SEQ ID NO: 1981972 - RNA, 15 nt, Human
ggcuaguugggcuuc

SEQ ID NO: 1981973 - RNA, 19 nt, Human
ggcuccaggagcagccaca

SEQ ID NO: 1981974 - RNA, 13 nt, Human
ggcuccaggagca

SEQ ID NO: 1981975 - RNA, 12 nt, Human
ggcuccaggagc

SEQ ID NO: 1981976 - RNA, 12 nt, Human
ggcuccagcugg

SEQ ID NO: 1981977 - RNA, 18 nt, Human
ggcucaagcccaggaggg

SEQ ID NO: 1981978 - RNA, 15 nt, Human
ggcucaaguccucuu

SEQ ID NO: 1981979 - RNA, 21 nt, Human
ggcucaaguccucuuuucuga

SEQ ID NO: 1981980 - RNA, 14 nt, Human
ggcuccaggccagg

SEQ ID NO: 1981981 - RNA, 16 nt, Human
ggcuccaggccagggg

SEQ ID NO: 1981982 - RNA, 13 nt, Human
ggcuccaggcagc

SEQ ID NO: 1981983 - RNA, 14 nt, Human
ggcuccaggcagca

SEQ ID NO: 1981984 - RNA, 18 nt, Human
ggcuccaggccagggggc

SEQ ID NO: 1981985 - RNA, 11 nt, Human
ggcuccaggcu

SEQ ID NO: 1981986 - RNA, 16 nt, Human
ggcuccaggcuccuuu

SEQ ID NO: 1981987 - RNA, 15 nt, Human
ggcuccaguccccag

SEQ ID NO: 1981988 - RNA, 12 nt, Human
ggcuccaugcca

SEQ ID NO: 1981989 - RNA, 13 nt, Human
ggcuccaugccag

SEQ ID NO: 1981990 - RNA, 14 nt, Human
ggcuccaugccagc

SEQ ID NO: 1981991 - RNA, 17 nt, Human
ggcucccacaggcccuu

SEQ ID NO: 1981992 - RNA, 18 nt, Human
ggcucccacaggcccuuc

SEQ ID NO: 1981993 - RNA, 19 nt, Human
ggcucccacaggcccuucc

SEQ ID NO: 1981994 - RNA, 14 nt, Human
gauaugauucaaau

SEQ ID NO: 1981995 - RNA, 22 nt, Human
gauaugauucaaaugucuauaa

SEQ ID NO: 1981996 - RNA, 24 nt, Human
gauaugauucaaaugucuauaaac

SEQ ID NO: 1981997 - RNA, 15 nt, Human
gauaugaaaaaugag

SEQ ID NO: 1981998 - RNA, 12 nt, Human
gaucacaaauga

SEQ ID NO: 1981999 - RNA, 13 nt, Human
gaucacaaaugac

SEQ ID NO: 1982000 - RNA, 16 nt, Human
gaucacaaaugacuuu

SEQ ID NO: 1982001 - RNA, 20 nt, Human
gaucacaaaugacuuuauua

SEQ ID NO: 1982002 - RNA, 15 nt, Human
gauauaagugugugu

SEQ ID NO: 1982003 - RNA, 18 nt, Human
gaucacggcucacugcag

SEQ ID NO: 1982004 - RNA, 14 nt, Human
gaucacuuucugaa

SEQ ID NO: 1982005 - RNA, 21 nt, Human
gaucacuguuuagauuugcca

SEQ ID NO: 1982006 - RNA, 14 nt, Human
gaucacuguuuaga

SEQ ID NO: 1982007 - RNA, 18 nt, Human
gaucacuguuuagauuug

SEQ ID NO: 1982008 - RNA, 15 nt, Human
gaucacggcucacug

SEQ ID NO: 1982009 - RNA, 16 nt, Human
gaucacggcucacugc

SEQ ID NO: 1982010 - RNA, 23 nt, Human
gauagcuucaccccaaucccagc

SEQ ID NO: 1982011 - RNA, 22 nt, Human
gauagccaaggccaaaggaagc

SEQ ID NO: 1982012 - RNA, 14 nt, Human
gauagccaaggcca

SEQ ID NO: 1982013 - RNA, 15 nt, Human
gauagcacagacccu

SEQ ID NO: 1982014 - RNA, 16 nt, Human
gauagcacagacccug

SEQ ID NO: 1982015 - RNA, 14 nt, Human
gauagaugugugga

SEQ ID NO: 1982016 - RNA, 22 nt, Human
gauagauguguggacacauugg

SEQ ID NO: 1982017 - RNA, 21 nt, Human
gauacaggaaaagcugcugac

SEQ ID NO: 1982018 - RNA, 23 nt, Human
gauacaggaaaagcugcugacag

SEQ ID NO: 1982019 - RNA, 22 nt, Human
gauaagaaccuuuugagugccu

SEQ ID NO: 1982020 - RNA, 20 nt, Human
gauacaggaaaagcugcuga

SEQ ID NO: 1982021 - RNA, 11 nt, Human
gauaagaaaac

SEQ ID NO: 1982022 - RNA, 12 nt, Human
gauaagaaaacc

SEQ ID NO: 1982023 - RNA, 13 nt, Human
gagugggugaaua

SEQ ID NO: 1982024 - RNA, 17 nt, Human
gagugacagaggcagcc

SEQ ID NO: 1982025 - RNA, 13 nt, Human
gaguguguaauuu

SEQ ID NO: 1982026 - RNA, 15 nt, Human
gagugugguuucuuu

SEQ ID NO: 1982027 - RNA, 19 nt, Human
gagugugguuucuuuuuga

SEQ ID NO: 1982028 - RNA, 20 nt, Human
gagugugccugaagucccag

SEQ ID NO: 1982029 - RNA, 12 nt, Human
gaguuacagaca

SEQ ID NO: 1982030 - RNA, 15 nt, Human
gaguuacagccuggg

SEQ ID NO: 1982031 - RNA, 15 nt, Human
gaguuacagacaaag

SEQ ID NO: 1982032 - RNA, 13 nt, Human
gaguuacagacaa

SEQ ID NO: 1982033 - RNA, 20 nt, Human
gaguucaucuugaauuguaa

SEQ ID NO: 1982034 - RNA, 19 nt, Human
gaguucaucuugaauugua

SEQ ID NO: 1982035 - RNA, 14 nt, Human
gaguucaucuugaa

SEQ ID NO: 1982036 - RNA, 20 nt, Human
gaguucauacccuguuacca

SEQ ID NO: 1982037 - RNA, 20 nt, Human
gauaaaugauucaaaaaguc

SEQ ID NO: 1982038 - RNA, 15 nt, Human
gauaaaugauucaaa

SEQ ID NO: 1982039 - RNA, 21 nt, Human
gaguugaagacagagcuacac

SEQ ID NO: 1982040 - RNA, 17 nt, Human
gaguugaagacagagcu

SEQ ID NO: 1982041 - RNA, 15 nt, Human
gaguugaagacagag

SEQ ID NO: 1982042 - RNA, 20 nt, Human
gaguacuacaguccucccau

SEQ ID NO: 1982043 - RNA, 17 nt, Human
gaguaaucuuguugguu

SEQ ID NO: 1982044 - RNA, 18 nt, Human
gaguaauugcauuugcuu

SEQ ID NO: 1982045 - RNA, 22 nt, Human
gaguaauccaagcaaaugugaa

SEQ ID NO: 1982046 - RNA, 23 nt, Human
gaguacuacaguccucccaucuc

SEQ ID NO: 1982047 - RNA, 21 nt, Human
gaguacuacaguccucccauc

SEQ ID NO: 1982048 - RNA, 12 nt, Human
gaguagaaugua

SEQ ID NO: 1982049 - RNA, 19 nt, Human
gaguagcugggacuacagg

SEQ ID NO: 1982050 - RNA, 17 nt, Human
gaguagagguauaauug

SEQ ID NO: 1982051 - RNA, 15 nt, Human
gaguagaauguaguu

SEQ ID NO: 1982052 - RNA, 17 nt, Human
gaguaggaagacuuugg

SEQ ID NO: 1982053 - RNA, 13 nt, Human
gaguaggaagacu

SEQ ID NO: 1982054 - RNA, 12 nt, Human
gaguaggaagac

SEQ ID NO: 1982055 - RNA, 22 nt, Human
gaguagcugggacuacaggcac

SEQ ID NO: 1982056 - RNA, 16 nt, Human
gagguuucaaaccucc

SEQ ID NO: 1982057 - RNA, 18 nt, Human
gagguuuauaguuaaucu

SEQ ID NO: 1982058 - RNA, 13 nt, Human
gagguuucaguga

SEQ ID NO: 1982059 - RNA, 17 nt, Human
gagguugggaggccauu

SEQ ID NO: 1982060 - RNA, 15 nt, Human
gagguugggaggcca

SEQ ID NO: 1982061 - RNA, 17 nt, Human
gaggucagagccugcag

SEQ ID NO: 1982062 - RNA, 20 nt, Human
gaggucagagccugcaguua

SEQ ID NO: 1982063 - RNA, 21 nt, Human
gagucuauuuacggaacucaa

SEQ ID NO: 1982064 - RNA, 13 nt, Human
gagucugaaggcu

SEQ ID NO: 1982065 - RNA, 12 nt, Human
gagucugaaggc

SEQ ID NO: 1982066 - RNA, 11 nt, Human
gagucuucaug

SEQ ID NO: 1982067 - RNA, 16 nt, Human
gagucuguucugguaa

SEQ ID NO: 1982068 - RNA, 14 nt, Human
gagucugaaggcug

SEQ ID NO: 1982069 - RNA, 15 nt, Human
gagucugaaggcugg

SEQ ID NO: 1982070 - RNA, 19 nt, Human
gagucuagcguagugcagc

SEQ ID NO: 1982071 - RNA, 17 nt, Human
gagugaagcugggagaa

SEQ ID NO: 1982072 - RNA, 14 nt, Human
gagugacagaggca

SEQ ID NO: 1982073 - RNA, 15 nt, Human
gagugacagaggcag

SEQ ID NO: 1982074 - RNA, 16 nt, Human
gagugacagaggcagc

SEQ ID NO: 1982075 - RNA, 11 nt, Human
gaguauauguc

SEQ ID NO: 1982076 - RNA, 15 nt, Human
gaguauauuauaaua

SEQ ID NO: 1982077 - RNA, 12 nt, Human
gaguauucuaau

SEQ ID NO: 1982078 - RNA, 20 nt, Human
gaguauucuaauaagcuagu

SEQ ID NO: 1982079 - RNA, 19 nt, Human
gaguaggaagacuuuggaa

SEQ ID NO: 1982080 - RNA, 18 nt, Human
gaguaggaagacuuugga

SEQ ID NO: 1982081 - RNA, 21 nt, Human
gaguagugaagacuccagaaa

SEQ ID NO: 1982082 - RNA, 15 nt, Human
gagucgaggacaggg

SEQ ID NO: 1982083 - RNA, 16 nt, Human
gagucgaggacaggga

SEQ ID NO: 1982084 - RNA, 13 nt, Human
gaguccucugaau

SEQ ID NO: 1982085 - RNA, 22 nt, Human
gaguccuccagaacucuuccuc

SEQ ID NO: 1982086 - RNA, 22 nt, Human
gaguccgaccuggccugucugu

SEQ ID NO: 1982087 - RNA, 14 nt, Human
gaguccuccagaac

SEQ ID NO: 1982088 - RNA, 15 nt, Human
gaguccuccagaacu

SEQ ID NO: 1982089 - RNA, 21 nt, Human
gaguccuccagaacucuuccu

SEQ ID NO: 1982090 - RNA, 14 nt, Human
gagucgaggacagg

SEQ ID NO: 1982091 - RNA, 19 nt, Human
gaguccgaaagggacuugg

SEQ ID NO: 1982092 - RNA, 20 nt, Human
gaggauugcuugagcucagg

SEQ ID NO: 1982093 - RNA, 20 nt, Human
gaggauuggcucccaucuuu

SEQ ID NO: 1982094 - RNA, 19 nt, Human
gaggaucucuugagccugg

SEQ ID NO: 1982095 - RNA, 16 nt, Human
gaggaucucuugagcc

SEQ ID NO: 1982096 - RNA, 22 nt, Human
gaggaucucuugagccugggag

SEQ ID NO: 1982097 - RNA, 13 nt, Human
gaggaucucuuga

SEQ ID NO: 1982098 - RNA, 24 nt, Human
gagcccuucggaggaccagggcug

SEQ ID NO: 1982099 - RNA, 22 nt, Human
gagcccuguccugccuaaggcu

SEQ ID NO: 1982100 - RNA, 21 nt, Human
gaggcagccccauucugccug

SEQ ID NO: 1982101 - RNA, 20 nt, Human
gaggcagccccauucugccu

SEQ ID NO: 1982102 - RNA, 9 nt, Human
gaggcaggg

SEQ ID NO: 1982103 - RNA, 19 nt, Human
gaggcagagguugcaguga

SEQ ID NO: 1982104 - RNA, 19 nt, Human
gaggcagccccauucugcc

SEQ ID NO: 1982105 - RNA, 18 nt, Human
gaggcagccccauucugc

SEQ ID NO: 1982106 - RNA, 18 nt, Human
gaggccaugggccuccug

SEQ ID NO: 1982107 - RNA, 20 nt, Human
gaggccaugggccuccugug

SEQ ID NO: 1982108 - RNA, 21 nt, Human
gaggccaugggccuccugugu

SEQ ID NO: 1982109 - RNA, 23 nt, Human
gaggccaugggccuccugugugu

SEQ ID NO: 1982110 - RNA, 14 nt, Human
gaggccaugggccu

SEQ ID NO: 1982111 - RNA, 17 nt, Human
gaggccaugggccuccu

SEQ ID NO: 1982112 - RNA, 16 nt, Human
gaggccauaaaauaag

SEQ ID NO: 1982113 - RNA, 12 nt, Human
gaggccaucugg

SEQ ID NO: 1982114 - RNA, 14 nt, Human
gaggccaucuggag

SEQ ID NO: 1982115 - RNA, 16 nt, Human
gaggccaucuggagag

SEQ ID NO: 1982116 - RNA, 18 nt, Human
gaggccaucuggagagcc

SEQ ID NO: 1982117 - RNA, 19 nt, Human
gaggccaucuggagagccc

SEQ ID NO: 1982118 - RNA, 22 nt, Human
gaggccaucuggagagcccaga

SEQ ID NO: 1982119 - RNA, 19 nt, Human
gaggccccaauaccccaug

SEQ ID NO: 1982120 - RNA, 20 nt, Human
gaggcccuucucuccagccc

SEQ ID NO: 1982121 - RNA, 15 nt, Human
gaggcccuucucucc

SEQ ID NO: 1982122 - RNA, 21 nt, Human
gaggcccuucucuccagcccc

SEQ ID NO: 1982123 - RNA, 22 nt, Human
gaggcccuucucuccagccccu

SEQ ID NO: 1982124 - RNA, 16 nt, Human
gaggcccagagggccu

SEQ ID NO: 1982125 - RNA, 15 nt, Human
gaggcccagagggcc

SEQ ID NO: 1982126 - RNA, 19 nt, Human
gaggcccagagggccugca

SEQ ID NO: 1982127 - RNA, 14 nt, Human
gaggcccagagggc

SEQ ID NO: 1982128 - RNA, 13 nt, Human
gaggcccagaggg

SEQ ID NO: 1982129 - RNA, 11 nt, Human
gaggcccagag

SEQ ID NO: 1982130 - RNA, 21 nt, Human
gaggcgcaugaauuugugaag

SEQ ID NO: 1982131 - RNA, 19 nt, Human
gaggcuggaguuggggcag

SEQ ID NO: 1982132 - RNA, 16 nt, Human
gaggcugggcucccuu

SEQ ID NO: 1982133 - RNA, 22 nt, Human
gaggccucucauuccagaggaa

SEQ ID NO: 1982134 - RNA, 21 nt, Human
gaggccguugcugacuuagaa

SEQ ID NO: 1982135 - RNA, 23 nt, Human
gaggccuccuguggccugccagu

SEQ ID NO: 1982136 - RNA, 16 nt, Human
gaggccuucucugaag

SEQ ID NO: 1982137 - RNA, 18 nt, Human
gaggccuucucugaagga

SEQ ID NO: 1982138 - RNA, 19 nt, Human
gaggccuucucugaaggac

SEQ ID NO: 1982139 - RNA, 19 nt, Human
gaggccuugggcucugcug

SEQ ID NO: 1982140 - RNA, 20 nt, Human
gaggccuugggcucugcuga

SEQ ID NO: 1982141 - RNA, 21 nt, Human
gagguaaggaauaccuguccc

SEQ ID NO: 1982142 - RNA, 23 nt, Human
gaggguuuuuaaaaauaaagcaa

SEQ ID NO: 1982143 - RNA, 24 nt, Human
gagguaaggaauaccugucccccu

SEQ ID NO: 1982144 - RNA, 14 nt, Human
gaggguugggcugg

SEQ ID NO: 1982145 - RNA, 15 nt, Human
gaggguugggcuggu

SEQ ID NO: 1982146 - RNA, 16 nt, Human
gaggguucagagagga

SEQ ID NO: 1982147 - RNA, 21 nt, Human
gagguagcuuugagguggaag

SEQ ID NO: 1982148 - RNA, 15 nt, Human
gagguauaauugugu

SEQ ID NO: 1982149 - RNA, 17 nt, Human
gaggucaaggcugcagu

SEQ ID NO: 1982150 - RNA, 12 nt, Human
gaggucagagcc

SEQ ID NO: 1982151 - RNA, 13 nt, Human
gaggucagagccu

SEQ ID NO: 1982152 - RNA, 15 nt, Human
gagggugagugcaag

SEQ ID NO: 1982153 - RNA, 19 nt, Human
gagggugaguccuccagaa

SEQ ID NO: 1982154 - RNA, 21 nt, Human
gagggugaagugaagacaaug

SEQ ID NO: 1982155 - RNA, 12 nt, Human
gaggguggaaua

SEQ ID NO: 1982156 - RNA, 15 nt, Human
gagggugggaguggg

SEQ ID NO: 1982157 - RNA, 14 nt, Human
gaggguggugaccu

SEQ ID NO: 1982158 - RNA, 21 nt, Human
gaggguggugaccucugccug

SEQ ID NO: 1982159 - RNA, 22 nt, Human
gagggugucccaaaaagaaagg

SEQ ID NO: 1982160 - RNA, 19 nt, Human
gaggguaauaaccagacac

SEQ ID NO: 1982161 - RNA, 23 nt, Human
gagggucuugguuccagccugcc

SEQ ID NO: 1982162 - RNA, 13 nt, Human
gagggugaagccu

SEQ ID NO: 1982163 - RNA, 13 nt, Human
gagggucugagga

SEQ ID NO: 1982164 - RNA, 14 nt, Human
gagggucugaggaa

SEQ ID NO: 1982165 - RNA, 17 nt, Human
gaggggcugugggcgug

SEQ ID NO: 1982166 - RNA, 17 nt, Human
gaggggguggccuccca

SEQ ID NO: 1982167 - RNA, 13 nt, Human
gagggggcaaagg

SEQ ID NO: 1982168 - RNA, 13 nt, Human
gaggguaaggcug

SEQ ID NO: 1982169 - RNA, 21 nt, Human
gagggagugacagaggcagcc

SEQ ID NO: 1982170 - RNA, 22 nt, Human
gagggagugacagaggcagccc

SEQ ID NO: 1982171 - RNA, 20 nt, Human
gagggagggcuccagacaca

SEQ ID NO: 1982172 - RNA, 20 nt, Human
gagggagggggaaggcaggg

SEQ ID NO: 1982173 - RNA, 18 nt, Human
gagggagugacagaggca

SEQ ID NO: 1982174 - RNA, 20 nt, Human
gaggcugggcucccuuccca

SEQ ID NO: 1982175 - RNA, 17 nt, Human
gagggagcacaaccccc

SEQ ID NO: 1982176 - RNA, 19 nt, Human
gagggagggcuccagacac

SEQ ID NO: 1982177 - RNA, 23 nt, Human
gcacugcuuccagugaggcucug

SEQ ID NO: 1982178 - RNA, 14 nt, Human
gcacugguggcccg

SEQ ID NO: 1982179 - RNA, 19 nt, Human
gcacugguggcccgacagc

SEQ ID NO: 1982180 - RNA, 16 nt, Human
gcacgauuucuguuua

SEQ ID NO: 1982181 - RNA, 19 nt, Human
gcacugagagagcgcagcc

SEQ ID NO: 1982182 - RNA, 21 nt, Human
gcacugagagagcgcagccgc

SEQ ID NO: 1982183 - RNA, 14 nt, Human
gcacugcugcccag

SEQ ID NO: 1982184 - RNA, 15 nt, Human
gcacugcugcccagc

SEQ ID NO: 1982185 - RNA, 18 nt, Human
gcacugcugcccagccuc

SEQ ID NO: 1982186 - RNA, 20 nt, Human
gcacugcugcccagccucca

SEQ ID NO: 1982187 - RNA, 22 nt, Human
gcagaagggagcuggcuccagc

SEQ ID NO: 1982188 - RNA, 18 nt, Human
gcagaagggagcuggcuc

SEQ ID NO: 1982189 - RNA, 20 nt, Human
gcagaagggagcuggcucca

SEQ ID NO: 1982190 - RNA, 20 nt, Human
gcagaaguaggggaagaaua

SEQ ID NO: 1982191 - RNA, 12 nt, Human
gcagacaggcaa

SEQ ID NO: 1982192 - RNA, 13 nt, Human
gcagacaggcaag

SEQ ID NO: 1982193 - RNA, 14 nt, Human
gcagacaggcaagc

SEQ ID NO: 1982194 - RNA, 19 nt, Human
gcagacacccuuggagcuc

SEQ ID NO: 1982195 - RNA, 16 nt, Human
gcacagaguuguuaca

SEQ ID NO: 1982196 - RNA, 18 nt, Human
gcacagaguuguuacauu

SEQ ID NO: 1982197 - RNA, 19 nt, Human
gcacagaguuguuacauuu

SEQ ID NO: 1982198 - RNA, 21 nt, Human
gcacagaguuguuacauuuuu

SEQ ID NO: 1982199 - RNA, 14 nt, Human
gcacagucagguug

SEQ ID NO: 1982200 - RNA, 22 nt, Human
gcacagaguuguuacauuuuua

SEQ ID NO: 1982201 - RNA, 12 nt, Human
gcacagaggccu

SEQ ID NO: 1982202 - RNA, 15 nt, Human
gcacagugcaucuca

SEQ ID NO: 1982203 - RNA, 18 nt, Human
gcacagugcaucucagcc

SEQ ID NO: 1982204 - RNA, 13 nt, Human
gcacagugcaucu

SEQ ID NO: 1982205 - RNA, 17 nt, Human
gcaccaaaauaagaaaa

SEQ ID NO: 1982206 - RNA, 18 nt, Human
gcaccaaaauaagaaaag

SEQ ID NO: 1982207 - RNA, 12 nt, Human
gcaccauaacuu

SEQ ID NO: 1982208 - RNA, 22 nt, Human
gcaccccagcuggggccaggcu

SEQ ID NO: 1982209 - RNA, 13 nt, Human
gcaccauacucau

SEQ ID NO: 1982210 - RNA, 13 nt, Human
gcaccauccccuc

SEQ ID NO: 1982211 - RNA, 14 nt, Human
gcaccauccccucc

SEQ ID NO: 1982212 - RNA, 17 nt, Human
gcaccauccccuccggc

SEQ ID NO: 1982213 - RNA, 21 nt, Human
gcaccuuagacagucccugcc

SEQ ID NO: 1982214 - RNA, 20 nt, Human
gcaccuuagacagucccugc

SEQ ID NO: 1982215 - RNA, 12 nt, Human
gcaccugucugc

SEQ ID NO: 1982216 - RNA, 14 nt, Human
gcaccugucugcuc

SEQ ID NO: 1982217 - RNA, 15 nt, Human
gcaccugucugcucc

SEQ ID NO: 1982218 - RNA, 16 nt, Human
gcaccugucugcucca

SEQ ID NO: 1982219 - RNA, 18 nt, Human
gcaccugucugcuccagc

SEQ ID NO: 1982220 - RNA, 21 nt, Human
gcaccugucugcuccagcucu

SEQ ID NO: 1982221 - RNA, 13 nt, Human
gcacgauuucugu

SEQ ID NO: 1982222 - RNA, 15 nt, Human
gcacgauuucuguuu

SEQ ID NO: 1982223 - RNA, 14 nt, Human
gcaccuucccccuc

SEQ ID NO: 1982224 - RNA, 19 nt, Human
gcaccuucccccuccccca

SEQ ID NO: 1982225 - RNA, 14 nt, Human
gcaacucaucuuag

SEQ ID NO: 1982226 - RNA, 23 nt, Human
gcaacgaucacaaaugacuuuau

SEQ ID NO: 1982227 - RNA, 16 nt, Human
gcaacgaucacaaaug

SEQ ID NO: 1982228 - RNA, 20 nt, Human
gcaacgaucacaaaugacuu

SEQ ID NO: 1982229 - RNA, 21 nt, Human
gcaacgaucacaaaugacuuu

SEQ ID NO: 1982230 - RNA, 22 nt, Human
gcaacgaucacaaaugacuuua

SEQ ID NO: 1982231 - RNA, 14 nt, Human
gcaacacacaugcu

SEQ ID NO: 1982232 - RNA, 17 nt, Human
gcaaugguaguuucugu

SEQ ID NO: 1982233 - RNA, 19 nt, Human
gcaaugguaguuucugugg

SEQ ID NO: 1982234 - RNA, 22 nt, Human
gcaauggugucaguauccaggc

SEQ ID NO: 1982235 - RNA, 23 nt, Human
gcaauggugucaguauccaggcu

SEQ ID NO: 1982236 - RNA, 13 nt, Human
gcaacucugaagg

SEQ ID NO: 1982237 - RNA, 15 nt, Human
gcaauggcagccuug

SEQ ID NO: 1982238 - RNA, 14 nt, Human
gcaauguuuugcuu

SEQ ID NO: 1982239 - RNA, 17 nt, Human
gcaauguuuugcuuuug

SEQ ID NO: 1982240 - RNA, 15 nt, Human
gcaauguuuugcuuu

SEQ ID NO: 1982241 - RNA, 22 nt, Human
gcaauguagaggggaaaagaga

SEQ ID NO: 1982242 - RNA, 14 nt, Human
gcaaugugauaaaa

SEQ ID NO: 1982243 - RNA, 20 nt, Human
gcaauucuccugccucagcc

SEQ ID NO: 1982244 - RNA, 18 nt, Human
gcaauucuccugccucag

SEQ ID NO: 1982245 - RNA, 19 nt, Human
gcaauucuccugccucagc

SEQ ID NO: 1982246 - RNA, 14 nt, Human
gcaauucuccugcc

SEQ ID NO: 1982247 - RNA, 15 nt, Human
gcaauucuccugccu

SEQ ID NO: 1982248 - RNA, 16 nt, Human
gcaauucuccugccuc

SEQ ID NO: 1982249 - RNA, 17 nt, Human
gcaauucuccugccuca

SEQ ID NO: 1982250 - RNA, 23 nt, Human
gcacaaaaagauaccuuaaaauu

SEQ ID NO: 1982251 - RNA, 14 nt, Human
gcacaaacagaggc

SEQ ID NO: 1982252 - RNA, 23 nt, Human
gcaauuuuauaaggacuuccuga

SEQ ID NO: 1982253 - RNA, 16 nt, Human
gcacaaacagaggccg

SEQ ID NO: 1982254 - RNA, 15 nt, Human
gcacaaacagaggcc

SEQ ID NO: 1982255 - RNA, 21 nt, Human
gcacagacccugcccuguggg

SEQ ID NO: 1982256 - RNA, 20 nt, Human
gcacagacccugcccugugg

SEQ ID NO: 1982257 - RNA, 19 nt, Human
gcacagacccugcccugug

SEQ ID NO: 1982258 - RNA, 18 nt, Human
gcacagacccugcccugu

SEQ ID NO: 1982259 - RNA, 22 nt, Human
gcacagacccugcccugugggc

SEQ ID NO: 1982260 - RNA, 15 nt, Human
gcacagaguuguuac

SEQ ID NO: 1982261 - RNA, 17 nt, Human
gcacagacccugcccug

SEQ ID NO: 1982262 - RNA, 16 nt, Human
gcacagacccugcccu

SEQ ID NO: 1982263 - RNA, 15 nt, Human
gcacagacccugccc

SEQ ID NO: 1982264 - RNA, 14 nt, Human
gcacagacccugcc

SEQ ID NO: 1982265 - RNA, 22 nt, Human
gcacagaaaauggaagacagcu

SEQ ID NO: 1982266 - RNA, 21 nt, Human
gcacagaaaauggaagacagc

SEQ ID NO: 1982267 - RNA, 23 nt, Human
gcacagaaaauggaagacagcuc

SEQ ID NO: 1982268 - RNA, 20 nt, Human
gcacagaaaauggaagacag

SEQ ID NO: 1982269 - RNA, 20 nt, Human
gcacacucauccccucacuu

SEQ ID NO: 1982270 - RNA, 13 nt, Human
gcacacgcugcuc

SEQ ID NO: 1982271 - RNA, 14 nt, Human
gcacacgcugcucu

SEQ ID NO: 1982272 - RNA, 15 nt, Human
gcacacgcugcucug

SEQ ID NO: 1982273 - RNA, 17 nt, Human
gcacacgcugcucugcc

SEQ ID NO: 1982274 - RNA, 18 nt, Human
gcacacgcugcucugccc

SEQ ID NO: 1982275 - RNA, 21 nt, Human
gcacacgcugcucugccccag

SEQ ID NO: 1982276 - RNA, 22 nt, Human
gcacaccuccucccacugccca

SEQ ID NO: 1982277 - RNA, 12 nt, Human
gcacacgcugcu

SEQ ID NO: 1982278 - RNA, 20 nt, Human
gcacaccgggcacucagaag

SEQ ID NO: 1982279 - RNA, 15 nt, Human
gcacaccuccuccca

SEQ ID NO: 1982280 - RNA, 19 nt, Human
gcacaccuccucccacugc

SEQ ID NO: 1982281 - RNA, 20 nt, Human
gcacaccuccucccacugcc

SEQ ID NO: 1982282 - RNA, 17 nt, Human
gcacaacccccagcucc

SEQ ID NO: 1982283 - RNA, 18 nt, Human
gcacaacccccagcuccc

SEQ ID NO: 1982284 - RNA, 18 nt, Human
gcacaaccuucaagcugc

SEQ ID NO: 1982285 - RNA, 23 nt, Human
gcacaaauucugucucuggauua

SEQ ID NO: 1982286 - RNA, 17 nt, Human
gcacaagcuccaagcuc

SEQ ID NO: 1982287 - RNA, 15 nt, Human
gcacaagcuccaagc

SEQ ID NO: 1982288 - RNA, 18 nt, Human
gcacaagcuccaagcucc

SEQ ID NO: 1982289 - RNA, 21 nt, Human
gcacaagcuccaagcucccag

SEQ ID NO: 1982290 - RNA, 16 nt, Human
gauguuuaguaaucau

SEQ ID NO: 1982291 - RNA, 13 nt, Human
gauguuuuuaaaa

SEQ ID NO: 1982292 - RNA, 14 nt, Human
gauguugaugcaau

SEQ ID NO: 1982293 - RNA, 21 nt, Human
gauguugaugcaauccuuaca

SEQ ID NO: 1982294 - RNA, 23 nt, Human
gauguugaugcaauccuuacaaa

SEQ ID NO: 1982295 - RNA, 14 nt, Human
gauguuuaaaacac

SEQ ID NO: 1982296 - RNA, 22 nt, Human
gauguuuaaaacaccuucuaua

SEQ ID NO: 1982297 - RNA, 23 nt, Human
gauguuuaaaacaccuucuauag

SEQ ID NO: 1982298 - RNA, 15 nt, Human
gauguucaccuccug

SEQ ID NO: 1982299 - RNA, 20 nt, Human
gauguuauauuuuucuuaaa

SEQ ID NO: 1982300 - RNA, 21 nt, Human
gauguuauauuuuucuuaaaa

SEQ ID NO: 1982301 - RNA, 16 nt, Human
gauguuaguuuuccuu

SEQ ID NO: 1982302 - RNA, 17 nt, Human
gauguuaguuuuccuua

SEQ ID NO: 1982303 - RNA, 13 nt, Human
gauguuauauuuu

SEQ ID NO: 1982304 - RNA, 16 nt, Human
gauguuauauuuuucu

SEQ ID NO: 1982305 - RNA, 19 nt, Human
gauguugacaucacuggca

SEQ ID NO: 1982306 - RNA, 20 nt, Human
gauuacaggcgugagccacc

SEQ ID NO: 1982307 - RNA, 17 nt, Human
gauuacaggcuccugcc

SEQ ID NO: 1982308 - RNA, 23 nt, Human
gauuacaagcgugagccacugca

SEQ ID NO: 1982309 - RNA, 15 nt, Human
gauuaaacuuaaucu

SEQ ID NO: 1982310 - RNA, 15 nt, Human
gauguuuuuaaaauc

SEQ ID NO: 1982311 - RNA, 16 nt, Human
gauguuuuuaaaaucu

SEQ ID NO: 1982312 - RNA, 17 nt, Human
gauguuuuuaaaaucuu

SEQ ID NO: 1982313 - RNA, 15 nt, Human
gauguuuuucuuacc

SEQ ID NO: 1982314 - RNA, 22 nt, Human
gauuacaagcgugagccacugc

SEQ ID NO: 1982315 - RNA, 20 nt, Human
gauuaaagaugagcuuuguc

SEQ ID NO: 1982316 - RNA, 22 nt, Human
gauuaaaaauaucaaauuaauu

SEQ ID NO: 1982317 - RNA, 16 nt, Human
gauggugcaaugaccu

SEQ ID NO: 1982318 - RNA, 15 nt, Human
gauggugcaaugacc

SEQ ID NO: 1982319 - RNA, 24 nt, Human
gaugguguucaaaaaacuuguaaa

SEQ ID NO: 1982320 - RNA, 17 nt, Human
gauggugcaaugaccuu

SEQ ID NO: 1982321 - RNA, 23 nt, Human
gaugguaucuauagucaagacga

SEQ ID NO: 1982322 - RNA, 19 nt, Human
gaugguaugcacaauucca

SEQ ID NO: 1982323 - RNA, 14 nt, Human
gauggugcaaugac

SEQ ID NO: 1982324 - RNA, 12 nt, Human
gauggugcaaug

SEQ ID NO: 1982325 - RNA, 19 nt, Human
gaugugggccaccauugca

SEQ ID NO: 1982326 - RNA, 13 nt, Human
gaugguuccccug

SEQ ID NO: 1982327 - RNA, 18 nt, Human
gaugguuccccuguucac

SEQ ID NO: 1982328 - RNA, 21 nt, Human
gaugguuccccuguucacucu

SEQ ID NO: 1982329 - RNA, 18 nt, Human
gaugcuagaacucccuuu

SEQ ID NO: 1982330 - RNA, 16 nt, Human
gaugccccgucccccu

SEQ ID NO: 1982331 - RNA, 20 nt, Human
gaugcuagaacucccuuuca

SEQ ID NO: 1982332 - RNA, 22 nt, Human
gaugcuagaacucccuuucaac

SEQ ID NO: 1982333 - RNA, 13 nt, Human
gaugcucuuuccc

SEQ ID NO: 1982334 - RNA, 14 nt, Human
gaugcucuuuccca

SEQ ID NO: 1982335 - RNA, 17 nt, Human
gaugcugacuguacucc

SEQ ID NO: 1982336 - RNA, 20 nt, Human
gaugcugacuguacuccucc

SEQ ID NO: 1982337 - RNA, 21 nt, Human
gaugccccgucccccucuggc

SEQ ID NO: 1982338 - RNA, 12 nt, Human
gaugcucuuucc

SEQ ID NO: 1982339 - RNA, 20 nt, Human
gaugcccaaagaugcagccg

SEQ ID NO: 1982340 - RNA, 19 nt, Human
gaugcccaaagaugcagcc

SEQ ID NO: 1982341 - RNA, 20 nt, Human
gaucagaccaaacagugcug

SEQ ID NO: 1982342 - RNA, 22 nt, Human
gauggccgggcgcgguggcuca

SEQ ID NO: 1982343 - RNA, 19 nt, Human
gaugggaugauugaagaaa

SEQ ID NO: 1982344 - RNA, 20 nt, Human
gaugggcaacccccagccug

SEQ ID NO: 1982345 - RNA, 24 nt, Human
gauggggcccugccuccuuuguga

SEQ ID NO: 1982346 - RNA, 21 nt, Human
gaugggcaacccccagccugc

SEQ ID NO: 1982347 - RNA, 15 nt, Human
gauggggcugcaccg

SEQ ID NO: 1982348 - RNA, 19 nt, Human
gauggggcugcaccggcug

SEQ ID NO: 1982349 - RNA, 13 nt, Human
gauggggcugcac

SEQ ID NO: 1982350 - RNA, 20 nt, Human
gaugggaugauugaagaaac

SEQ ID NO: 1982351 - RNA, 19 nt, Human
gaugggugcuuggaggaag

SEQ ID NO: 1982352 - RNA, 15 nt, Human
gaugggucaguugua

SEQ ID NO: 1982353 - RNA, 21 nt, Human
gaugggucaguuguaucagca

SEQ ID NO: 1982354 - RNA, 12 nt, Human
gcaaaccaucau

SEQ ID NO: 1982355 - RNA, 15 nt, Human
gcaaacauuuucucu

SEQ ID NO: 1982356 - RNA, 20 nt, Human
gcaaacauuuucucuuagaa

SEQ ID NO: 1982357 - RNA, 21 nt, Human
gcaaacauuuucucuuagaaa

SEQ ID NO: 1982358 - RNA, 13 nt, Human
gcaaaccaacaag

SEQ ID NO: 1982359 - RNA, 20 nt, Human
gcaaaccaacaagaauaaag

SEQ ID NO: 1982360 - RNA, 13 nt, Human
gauuuuguguuua

SEQ ID NO: 1982361 - RNA, 21 nt, Human
gauuuuguguuuauucuugau

SEQ ID NO: 1982362 - RNA, 12 nt, Human
gauuuugaucuc

SEQ ID NO: 1982363 - RNA, 21 nt, Human
gauuuugaaauuuuuauuaaa

SEQ ID NO: 1982364 - RNA, 19 nt, Human
gauuuugauccaagcuggu

SEQ ID NO: 1982365 - RNA, 15 nt, Human
gauuuuaguuuuauu

SEQ ID NO: 1982366 - RNA, 19 nt, Human
gauuuuaguuuuauuuucu

SEQ ID NO: 1982367 - RNA, 22 nt, Human
gauuuuaguuuuauuuucuaaa

SEQ ID NO: 1982368 - RNA, 23 nt, Human
gcaacaauucucccgggacucug

SEQ ID NO: 1982369 - RNA, 14 nt, Human
gcaacaauuuucag

SEQ ID NO: 1982370 - RNA, 15 nt, Human
gcaacaauuuucaga

SEQ ID NO: 1982371 - RNA, 16 nt, Human
gcaacaauuuucagau

SEQ ID NO: 1982372 - RNA, 22 nt, Human
gcaacaaacugcacaugauuuc

SEQ ID NO: 1982373 - RNA, 23 nt, Human
gcaacaaacugcacaugauuuca

SEQ ID NO: 1982374 - RNA, 14 nt, Human
gcaacaaaauacau

SEQ ID NO: 1982375 - RNA, 14 nt, Human
gcaacaaacugcac

SEQ ID NO: 1982376 - RNA, 15 nt, Human
gcaacaaacugcaca

SEQ ID NO: 1982377 - RNA, 21 nt, Human
gcaacaaacugcacaugauuu

SEQ ID NO: 1982378 - RNA, 23 nt, Human
gcaaaugugaaucauuuuaccuu

SEQ ID NO: 1982379 - RNA, 15 nt, Human
gcaaauguggcuccu

SEQ ID NO: 1982380 - RNA, 14 nt, Human
gcaaaggaaauacc

SEQ ID NO: 1982381 - RNA, 12 nt, Human
gcaaagcuguuc

SEQ ID NO: 1982382 - RNA, 17 nt, Human
gcaaagcuguucuuccu

SEQ ID NO: 1982383 - RNA, 18 nt, Human
gcaaagcuguucuuccug

SEQ ID NO: 1982384 - RNA, 19 nt, Human
gcaaagcuguucuuccugg

SEQ ID NO: 1982385 - RNA, 19 nt, Human
gcaaagcggguuauaauga

SEQ ID NO: 1982386 - RNA, 15 nt, Human
gcaaaccaucauuga

SEQ ID NO: 1982387 - RNA, 14 nt, Human
gauuuccucuugaa

SEQ ID NO: 1982388 - RNA, 21 nt, Human
gauuuccucuugaaccagaac

SEQ ID NO: 1982389 - RNA, 15 nt, Human
gauuuaacagaaaug

SEQ ID NO: 1982390 - RNA, 22 nt, Human
gauuuccguuaaaauaccagcc

SEQ ID NO: 1982391 - RNA, 15 nt, Human
gauuucuaguuauuu

SEQ ID NO: 1982392 - RNA, 20 nt, Human
gauuucuaguuauuuauucu

SEQ ID NO: 1982393 - RNA, 16 nt, Human
gauuugagcucagccc

SEQ ID NO: 1982394 - RNA, 13 nt, Human
gauuugaauccag

SEQ ID NO: 1982395 - RNA, 15 nt, Human
gauugguuucucuuc

SEQ ID NO: 1982396 - RNA, 16 nt, Human
gauugguuucucuucu

SEQ ID NO: 1982397 - RNA, 17 nt, Human
gauugguuucucuucuc

SEQ ID NO: 1982398 - RNA, 21 nt, Human
gauugguuucucuucuccccu

SEQ ID NO: 1982399 - RNA, 17 nt, Human
gauugggccccugccag

SEQ ID NO: 1982400 - RNA, 13 nt, Human
gauuuaacagaaa

SEQ ID NO: 1982401 - RNA, 14 nt, Human
gauuuaacagaaau

SEQ ID NO: 1982402 - RNA, 12 nt, Human
gauuuaaaucag

SEQ ID NO: 1982403 - RNA, 15 nt, Human
gauucucaccagcug

SEQ ID NO: 1982404 - RNA, 21 nt, Human
gauucaaugccccugaauuua

SEQ ID NO: 1982405 - RNA, 23 nt, Human
gauuacaggcaugggccaccacg

SEQ ID NO: 1982406 - RNA, 18 nt, Human
gauucaaugccucuggcu

SEQ ID NO: 1982407 - RNA, 16 nt, Human
gauucacaccccaccu

SEQ ID NO: 1982408 - RNA, 17 nt, Human
gauucacaccccaccug

SEQ ID NO: 1982409 - RNA, 18 nt, Human
gauucacaccccaccugc

SEQ ID NO: 1982410 - RNA, 19 nt, Human
gauucaaugccccugaauu

SEQ ID NO: 1982411 - RNA, 20 nt, Human
gauucaaugccccugaauuu

SEQ ID NO: 1982412 - RNA, 18 nt, Human
gauuacaggcuccugcca

SEQ ID NO: 1982413 - RNA, 21 nt, Human
gauuacaggcuccugccacca

SEQ ID NO: 1982414 - RNA, 23 nt, Human
gauugcaggagucccugccauca

SEQ ID NO: 1982415 - RNA, 19 nt, Human
gauugccggucuugacagc

SEQ ID NO: 1982416 - RNA, 15 nt, Human
gauugcaacaggcug

SEQ ID NO: 1982417 - RNA, 16 nt, Human
gauugauuuuaaaaug

SEQ ID NO: 1982418 - RNA, 17 nt, Human
gauugauuuuaaaaugu

SEQ ID NO: 1982419 - RNA, 18 nt, Human
gauugauuuuaaaaugua

SEQ ID NO: 1982420 - RNA, 20 nt, Human
gauugauuuuaaaauguaca

SEQ ID NO: 1982421 - RNA, 14 nt, Human
gauucuccugccuc

SEQ ID NO: 1982422 - RNA, 16 nt, Human
gauucucaugccucag

SEQ ID NO: 1982423 - RNA, 20 nt, Human
gaauuugauaugugaacagu

SEQ ID NO: 1982424 - RNA, 22 nt, Human
gaauuucuuuugccguuauuaa

SEQ ID NO: 1982425 - RNA, 21 nt, Human
gaauuucuucaacucccugcc

SEQ ID NO: 1982426 - RNA, 17 nt, Human
gaauuugugaacagcag

SEQ ID NO: 1982427 - RNA, 19 nt, Human
gaauuucuaggacugaauu

SEQ ID NO: 1982428 - RNA, 20 nt, Human
gaauuucuaggacugaauua

SEQ ID NO: 1982429 - RNA, 19 nt, Human
gaauuggaaugcacucaga

SEQ ID NO: 1982430 - RNA, 18 nt, Human
gaauuuccuuacucuuga

SEQ ID NO: 1982431 - RNA, 20 nt, Human
gaauuggguggggggcuuca

SEQ ID NO: 1982432 - RNA, 22 nt, Human
gaauuggguggggggcuucaua

SEQ ID NO: 1982433 - RNA, 23 nt, Human
gaauuggguggggggcuucauac

SEQ ID NO: 1982434 - RNA, 15 nt, Human
gaauuguaaggaaug

SEQ ID NO: 1982435 - RNA, 19 nt, Human
gacaacacugggaaacaga

SEQ ID NO: 1982436 - RNA, 23 nt, Human
gacaacacucauugaccugaggc

SEQ ID NO: 1982437 - RNA, 22 nt, Human
gacaacacucauugaccugagg

SEQ ID NO: 1982438 - RNA, 14 nt, Human
gacaaaucugucug

SEQ ID NO: 1982439 - RNA, 15 nt, Human
gacaaaucugucugc

SEQ ID NO: 1982440 - RNA, 14 nt, Human
gacaaauguuucua

SEQ ID NO: 1982441 - RNA, 20 nt, Human
gacaaccuuggcuuggcccu

SEQ ID NO: 1982442 - RNA, 22 nt, Human
gacaaccuuggcuuggcccugg

SEQ ID NO: 1982443 - RNA, 19 nt, Human
gacaacagauuggauuuua

SEQ ID NO: 1982444 - RNA, 16 nt, Human
gacaacagacuucuga

SEQ ID NO: 1982445 - RNA, 14 nt, Human
gacaacauuguaag

SEQ ID NO: 1982446 - RNA, 23 nt, Human
gacacauguccaagaagcccagg

SEQ ID NO: 1982447 - RNA, 20 nt, Human
gacacauguccaagaagccc

SEQ ID NO: 1982448 - RNA, 15 nt, Human
gacacauguccaaga

SEQ ID NO: 1982449 - RNA, 19 nt, Human
gacacaugcaaggucauuu

SEQ ID NO: 1982450 - RNA, 23 nt, Human
gacacauuuaagguguaguauua

SEQ ID NO: 1982451 - RNA, 14 nt, Human
gacacaugcaaggu

SEQ ID NO: 1982452 - RNA, 20 nt, Human
gacacaggcccggcuccagg

SEQ ID NO: 1982453 - RNA, 21 nt, Human
gacacaggcccggcuccaggc

SEQ ID NO: 1982454 - RNA, 16 nt, Human
gacacaagccuucggc

SEQ ID NO: 1982455 - RNA, 15 nt, Human
gacacaaacugccaa

SEQ ID NO: 1982456 - RNA, 19 nt, Human
gacacaggcccggcuccag

SEQ ID NO: 1982457 - RNA, 20 nt, Human
gacaaugugaaaagaaaaau

SEQ ID NO: 1982458 - RNA, 19 nt, Human
gacaaugugaaaagaaaaa

SEQ ID NO: 1982459 - RNA, 13 nt, Human
gacaauguuuaca

SEQ ID NO: 1982460 - RNA, 12 nt, Human
gacaauguuuac

SEQ ID NO: 1982461 - RNA, 18 nt, Human
gacaaugugaaaagaaaa

SEQ ID NO: 1982462 - RNA, 12 nt, Human
gacaaugugaaa

SEQ ID NO: 1982463 - RNA, 22 nt, Human
gacaaugcaaaccaucauugaa

SEQ ID NO: 1982464 - RNA, 21 nt, Human
gacaaggaugaucuaggaaga

SEQ ID NO: 1982465 - RNA, 18 nt, Human
gacaaggauugcuacugu

SEQ ID NO: 1982466 - RNA, 19 nt, Human
gacaaggauugcuacuguc

SEQ ID NO: 1982467 - RNA, 21 nt, Human
gacaaggauugcuacuguccu

SEQ ID NO: 1982468 - RNA, 21 nt, Human
gacaagcuguugaccaggcac

SEQ ID NO: 1982469 - RNA, 22 nt, Human
gacaagcuguugaccaggcacc

SEQ ID NO: 1982470 - RNA, 14 nt, Human
gacaagcuggcuua

SEQ ID NO: 1982471 - RNA, 20 nt, Human
gacaagcuggcuuacacugg

SEQ ID NO: 1982472 - RNA, 20 nt, Human
gacaagcuguugaccaggca

SEQ ID NO: 1982473 - RNA, 16 nt, Human
gacaaggaaaaaauaa

SEQ ID NO: 1982474 - RNA, 16 nt, Human
gaauggcagcugccac

SEQ ID NO: 1982475 - RNA, 13 nt, Human
gaauggcauuugc

SEQ ID NO: 1982476 - RNA, 13 nt, Human
gaauggcagcugc

SEQ ID NO: 1982477 - RNA, 21 nt, Human
gaaugcacaaacagaggccgc

SEQ ID NO: 1982478 - RNA, 21 nt, Human
gaaugcaccauacucaugcau

SEQ ID NO: 1982479 - RNA, 13 nt, Human
gaaugcacucaga

SEQ ID NO: 1982480 - RNA, 20 nt, Human
gaaugcacucagacuguaua

SEQ ID NO: 1982481 - RNA, 15 nt, Human
gaaugcuguauaugu

SEQ ID NO: 1982482 - RNA, 21 nt, Human
gaaugaaagggcccagagagg

SEQ ID NO: 1982483 - RNA, 21 nt, Human
gaaucuggaccccaucuguga

SEQ ID NO: 1982484 - RNA, 20 nt, Human
gaaugcacaaacagaggccg

SEQ ID NO: 1982485 - RNA, 16 nt, Human
gaaugaacaaagacca

SEQ ID NO: 1982486 - RNA, 14 nt, Human
gaaugaaauguaug

SEQ ID NO: 1982487 - RNA, 22 nt, Human
gaaucuggaccccaucugugaa

SEQ ID NO: 1982488 - RNA, 23 nt, Human
gaaucuggaccccaucugugaau

SEQ ID NO: 1982489 - RNA, 21 nt, Human
gaaucaugugcgucaguccaa

SEQ ID NO: 1982490 - RNA, 13 nt, Human
gaaucauguuucu

SEQ ID NO: 1982491 - RNA, 14 nt, Human
gaaucauguuucuu

SEQ ID NO: 1982492 - RNA, 15 nt, Human
gaaucauguuucuuu

SEQ ID NO: 1982493 - RNA, 17 nt, Human
gaaucauguuucuuuga

SEQ ID NO: 1982494 - RNA, 12 nt, Human
gaaaggcuccag

SEQ ID NO: 1982495 - RNA, 17 nt, Human
gaaucuagccagugaac

SEQ ID NO: 1982496 - RNA, 18 nt, Human
gaaucuagccagugaaca

SEQ ID NO: 1982497 - RNA, 18 nt, Human
gaauccagacccggcugc

SEQ ID NO: 1982498 - RNA, 20 nt, Human
gaauccagacccggcugcgu

SEQ ID NO: 1982499 - RNA, 21 nt, Human
gaauguuccugccuccuugau

SEQ ID NO: 1982500 - RNA, 22 nt, Human
gaauguuccugccuccuugaua

SEQ ID NO: 1982501 - RNA, 16 nt, Human
gaauugacccacaaga

SEQ ID NO: 1982502 - RNA, 21 nt, Human
gaauugacccacaagaaauga

SEQ ID NO: 1982503 - RNA, 11 nt, Human
gaauugaaggu

SEQ ID NO: 1982504 - RNA, 18 nt, Human
gaauugaagguuuuugau

SEQ ID NO: 1982505 - RNA, 21 nt, Human
gaauugaccgacagcuuucca

SEQ ID NO: 1982506 - RNA, 20 nt, Human
gaauugcccauuguuuuucu

SEQ ID NO: 1982507 - RNA, 21 nt, Human
gaauugcccauuguuuuucug

SEQ ID NO: 1982508 - RNA, 19 nt, Human
gaaugucaguauguggaag

SEQ ID NO: 1982509 - RNA, 22 nt, Human
gaaugucaguuguuauuuauug

SEQ ID NO: 1982510 - RNA, 13 nt, Human
gaaugucagugug

SEQ ID NO: 1982511 - RNA, 13 nt, Human
gaaugucaguaug

SEQ ID NO: 1982512 - RNA, 16 nt, Human
gaaugucaguaugugg

SEQ ID NO: 1982513 - RNA, 18 nt, Human
gaaugucaguauguggaa

SEQ ID NO: 1982514 - RNA, 14 nt, Human
gaauguaguuugag

SEQ ID NO: 1982515 - RNA, 16 nt, Human
gaauguaguuugagga

SEQ ID NO: 1982516 - RNA, 17 nt, Human
gaauguaguuugaggaa

SEQ ID NO: 1982517 - RNA, 22 nt, Human
gaauguaguuugaggaaauuug

SEQ ID NO: 1982518 - RNA, 15 nt, Human
gaauguauaguauuu

SEQ ID NO: 1982519 - RNA, 17 nt, Human
gaauguauaguauuuga

SEQ ID NO: 1982520 - RNA, 19 nt, Human
gaauguauaguauuugaaa

SEQ ID NO: 1982521 - RNA, 22 nt, Human
gaauguauaguauuugaaaaca

SEQ ID NO: 1982522 - RNA, 18 nt, Human
gaauggcauuugcaauaa

SEQ ID NO: 1982523 - RNA, 13 nt, Human
gacagccagaacu

SEQ ID NO: 1982524 - RNA, 21 nt, Human
gacagcugccugggaucccuc

SEQ ID NO: 1982525 - RNA, 18 nt, Human
gacagcugccugggaucc

SEQ ID NO: 1982526 - RNA, 17 nt, Human
gacagcugccugggauc

SEQ ID NO: 1982527 - RNA, 16 nt, Human
gacagcugccugggau

SEQ ID NO: 1982528 - RNA, 20 nt, Human
gacagccacggccaggccag

SEQ ID NO: 1982529 - RNA, 21 nt, Human
gacagccacggccaggccaga

SEQ ID NO: 1982530 - RNA, 20 nt, Human
gacagagugagacucugucu

SEQ ID NO: 1982531 - RNA, 22 nt, Human
gacagagugagacucugucuca

SEQ ID NO: 1982532 - RNA, 14 nt, Human
gacagccacggcca

SEQ ID NO: 1982533 - RNA, 17 nt, Human
gacagccacggccaggc

SEQ ID NO: 1982534 - RNA, 18 nt, Human
gacagccacggccaggcc

SEQ ID NO: 1982535 - RNA, 19 nt, Human
gacagccacggccaggcca

SEQ ID NO: 1982536 - RNA, 11 nt, Human
gacaccccacu

SEQ ID NO: 1982537 - RNA, 14 nt, Human
gacaccccacuuag

SEQ ID NO: 1982538 - RNA, 12 nt, Human
gacacccagaaa

SEQ ID NO: 1982539 - RNA, 21 nt, Human
gacagagcaagugagacccug

SEQ ID NO: 1982540 - RNA, 14 nt, Human
gacagaggcagccc

SEQ ID NO: 1982541 - RNA, 16 nt, Human
gacagaggcagcccca

SEQ ID NO: 1982542 - RNA, 20 nt, Human
gacagagcaaccccuggacc

SEQ ID NO: 1982543 - RNA, 19 nt, Human
gacagaggggguggccucc

SEQ ID NO: 1982544 - RNA, 18 nt, Human
gacagaggggguggccuc

SEQ ID NO: 1982545 - RNA, 15 nt, Human
gacagaggggguggc

SEQ ID NO: 1982546 - RNA, 17 nt, Human
gacagaggcagccccau

SEQ ID NO: 1982547 - RNA, 22 nt, Human
gacagaggggguggccucccaa

SEQ ID NO: 1982548 - RNA, 21 nt, Human
gacagaggggguggccuccca

SEQ ID NO: 1982549 - RNA, 23 nt, Human
gacagaggggguggccucccaac

SEQ ID NO: 1982550 - RNA, 14 nt, Human
gacagagucucacu

SEQ ID NO: 1982551 - RNA, 23 nt, Human
gacauccccccgccaaaagcugc

SEQ ID NO: 1982552 - RNA, 17 nt, Human
gacauccccugcuggcc

SEQ ID NO: 1982553 - RNA, 18 nt, Human
gacauccccugcuggccg

SEQ ID NO: 1982554 - RNA, 20 nt, Human
gacauccugucaucugagaa

SEQ ID NO: 1982555 - RNA, 21 nt, Human
gacauccugucaucugagaau

SEQ ID NO: 1982556 - RNA, 23 nt, Human
gacauccugucaucugagaauga

SEQ ID NO: 1982557 - RNA, 24 nt, Human
gacauccugucaucugagaaugaa

SEQ ID NO: 1982558 - RNA, 20 nt, Human
gacauagaauuaacacauga

SEQ ID NO: 1982559 - RNA, 22 nt, Human
gacaguuaagagaaaugagcuu

SEQ ID NO: 1982560 - RNA, 14 nt, Human
gacaugcacucagc

SEQ ID NO: 1982561 - RNA, 14 nt, Human
gacaugggaaaggg

SEQ ID NO: 1982562 - RNA, 14 nt, Human
gacaugaucuucuu

SEQ ID NO: 1982563 - RNA, 17 nt, Human
gacagggaggacgcucu

SEQ ID NO: 1982564 - RNA, 17 nt, Human
gacaggaccccugcagu

SEQ ID NO: 1982565 - RNA, 21 nt, Human
gacaggaccccugcaguuccc

SEQ ID NO: 1982566 - RNA, 14 nt, Human
gacaggaccccugc

SEQ ID NO: 1982567 - RNA, 23 nt, Human
gacaggaccagggauuuccauga

SEQ ID NO: 1982568 - RNA, 15 nt, Human
gacaggaccagggau

SEQ ID NO: 1982569 - RNA, 14 nt, Human
gacaggaccaggga

SEQ ID NO: 1982570 - RNA, 14 nt, Human
gacaguuaagagaa

SEQ ID NO: 1982571 - RNA, 24 nt, Human
gacagggcacaccgggcacucaga

SEQ ID NO: 1982572 - RNA, 23 nt, Human
gacagggcacaccgggcacucag

SEQ ID NO: 1982573 - RNA, 18 nt, Human
gacagggaggacgcucuc

SEQ ID NO: 1982574 - RNA, 16 nt, Human
gacagggaggugaccc

SEQ ID NO: 1982575 - RNA, 17 nt, Human
gaccgugaggccagaga

SEQ ID NO: 1982576 - RNA, 16 nt, Human
gaccgugaggccagag

SEQ ID NO: 1982577 - RNA, 18 nt, Human
gaccgugaggccagagac

SEQ ID NO: 1982578 - RNA, 19 nt, Human
gaccgugaggccagagaca

SEQ ID NO: 1982579 - RNA, 17 nt, Human
gaccuacuacgcagagg

SEQ ID NO: 1982580 - RNA, 19 nt, Human
gaccgaacuguuguauaaa

SEQ ID NO: 1982581 - RNA, 21 nt, Human
gacccuuguggucccacccca

SEQ ID NO: 1982582 - RNA, 20 nt, Human
gacccuuguggucccacccc

SEQ ID NO: 1982583 - RNA, 19 nt, Human
gacccuuguggucccaccc

SEQ ID NO: 1982584 - RNA, 12 nt, Human
gacccugucuca

SEQ ID NO: 1982585 - RNA, 16 nt, Human
gacccaaaaggcagaa

SEQ ID NO: 1982586 - RNA, 15 nt, Human
gacccacaagaaaug

SEQ ID NO: 1982587 - RNA, 22 nt, Human
gacccacaagaaaugaaagcag

SEQ ID NO: 1982588 - RNA, 21 nt, Human
gacccccaaccaaguggcucc

SEQ ID NO: 1982589 - RNA, 12 nt, Human
gacccccaacca

SEQ ID NO: 1982590 - RNA, 23 nt, Human
gacccugaggcccagagggccug

SEQ ID NO: 1982591 - RNA, 13 nt, Human
gacccugcacccu

SEQ ID NO: 1982592 - RNA, 14 nt, Human
gacccugcacccuc

SEQ ID NO: 1982593 - RNA, 16 nt, Human
gacccugcacccuccu

SEQ ID NO: 1982594 - RNA, 20 nt, Human
gacccugccaggcacaggca

SEQ ID NO: 1982595 - RNA, 21 nt, Human
gacccugccaggcacaggcag

SEQ ID NO: 1982596 - RNA, 22 nt, Human
gacccugccaggcacaggcagg

SEQ ID NO: 1982597 - RNA, 23 nt, Human
gacccugccaggcacaggcaggg

SEQ ID NO: 1982598 - RNA, 12 nt, Human
gacccugccagg

SEQ ID NO: 1982599 - RNA, 13 nt, Human
gacccugccaggc

SEQ ID NO: 1982600 - RNA, 14 nt, Human
gacccugccaggca

SEQ ID NO: 1982601 - RNA, 15 nt, Human
gacccugccaggcac

SEQ ID NO: 1982602 - RNA, 16 nt, Human
gacccugccaggcaca

SEQ ID NO: 1982603 - RNA, 17 nt, Human
gacccugccaggcacag

SEQ ID NO: 1982604 - RNA, 18 nt, Human
gacccugccaggcacagg

SEQ ID NO: 1982605 - RNA, 19 nt, Human
gacccugccaggcacaggc

SEQ ID NO: 1982606 - RNA, 14 nt, Human
gaccccuccaugug

SEQ ID NO: 1982607 - RNA, 18 nt, Human
gaccccuccaugugggcu

SEQ ID NO: 1982608 - RNA, 22 nt, Human
gacccugaggcccagagggccu

SEQ ID NO: 1982609 - RNA, 21 nt, Human
gaccccuccaugugggcuagu

SEQ ID NO: 1982610 - RNA, 17 nt, Human
gaccagagcugccaccu

SEQ ID NO: 1982611 - RNA, 15 nt, Human
gaccagagcugccac

SEQ ID NO: 1982612 - RNA, 14 nt, Human
gaccagagcugcca

SEQ ID NO: 1982613 - RNA, 13 nt, Human
gaccagagcugcc

SEQ ID NO: 1982614 - RNA, 19 nt, Human
gaccagagcugccaccugc

SEQ ID NO: 1982615 - RNA, 18 nt, Human
gaccagagcugccaccug

SEQ ID NO: 1982616 - RNA, 21 nt, Human
gaccagccuccaugcugccuc

SEQ ID NO: 1982617 - RNA, 22 nt, Human
gaccagccuccaugcugccucc

SEQ ID NO: 1982618 - RNA, 20 nt, Human
gaccagccuccaugcugccu

SEQ ID NO: 1982619 - RNA, 17 nt, Human
gaccagacaagcuguug

SEQ ID NO: 1982620 - RNA, 22 nt, Human
gaccauucuccaccugccaggg

SEQ ID NO: 1982621 - RNA, 21 nt, Human
gaccauucuccaccugccagg

SEQ ID NO: 1982622 - RNA, 11 nt, Human
gaccauuuucc

SEQ ID NO: 1982623 - RNA, 13 nt, Human
gaccauuuuccug

SEQ ID NO: 1982624 - RNA, 14 nt, Human
gaccauuuuccugc

SEQ ID NO: 1982625 - RNA, 19 nt, Human
gaccauuuuccugcauugg

SEQ ID NO: 1982626 - RNA, 17 nt, Human
gaccauucuccaccugc

SEQ ID NO: 1982627 - RNA, 20 nt, Human
gaccauucuccaccugccag

SEQ ID NO: 1982628 - RNA, 19 nt, Human
gaccauucuccaccugcca

SEQ ID NO: 1982629 - RNA, 18 nt, Human
gacaugggaaaggggaag

SEQ ID NO: 1982630 - RNA, 13 nt, Human
gaccaccugccca

SEQ ID NO: 1982631 - RNA, 14 nt, Human
gaccaccugcccaa

SEQ ID NO: 1982632 - RNA, 21 nt, Human
gaccacugcagaagacaguau

SEQ ID NO: 1982633 - RNA, 14 nt, Human
gaccacguuucuaa

SEQ ID NO: 1982634 - RNA, 11 nt, Human
gaccagagcug

SEQ ID NO: 1982635 - RNA, 19 nt, Human
gaccacgucuauuucauca

SEQ ID NO: 1982636 - RNA, 15 nt, Human
gaccacuuccagggg

SEQ ID NO: 1982637 - RNA, 22 nt, Human
gaccacuuccaggggaaccugc

SEQ ID NO: 1982638 - RNA, 23 nt, Human
gaccacuuccaggggaaccugcc

SEQ ID NO: 1982639 - RNA, 21 nt, Human
gagaagagccccacucucaga

SEQ ID NO: 1982640 - RNA, 16 nt, Human
gagaagcagaggaagg

SEQ ID NO: 1982641 - RNA, 11 nt, Human
gagaagagccc

SEQ ID NO: 1982642 - RNA, 15 nt, Human
gagaagagccccacu

SEQ ID NO: 1982643 - RNA, 16 nt, Human
gagaagagaaugcaca

SEQ ID NO: 1982644 - RNA, 18 nt, Human
gagaagaaaauguucuuc

SEQ ID NO: 1982645 - RNA, 11 nt, Human
gagaagaaaau

SEQ ID NO: 1982646 - RNA, 14 nt, Human
gagaacuugcugcc

SEQ ID NO: 1982647 - RNA, 16 nt, Human
gagaacuugcugccuc

SEQ ID NO: 1982648 - RNA, 14 nt, Human
gagaagagaaugca

SEQ ID NO: 1982649 - RNA, 12 nt, Human
gagaaaugaaaa

SEQ ID NO: 1982650 - RNA, 14 nt, Human
gagaaaugagcuug

SEQ ID NO: 1982651 - RNA, 21 nt, Human
gagaaaugaaaaaauauauau

SEQ ID NO: 1982652 - RNA, 22 nt, Human
gagaaaguacuucuccacccug

SEQ ID NO: 1982653 - RNA, 16 nt, Human
gagaaagguugaagca

SEQ ID NO: 1982654 - RNA, 10 nt, Human
gagaaaagaa

SEQ ID NO: 1982655 - RNA, 11 nt, Human
gagaaaagaaa

SEQ ID NO: 1982656 - RNA, 12 nt, Human
gagaaaagaaaa

SEQ ID NO: 1982657 - RNA, 13 nt, Human
gagaaaagaaaaa

SEQ ID NO: 1982658 - RNA, 14 nt, Human
gagaaaagaaaaaa

SEQ ID NO: 1982659 - RNA, 15 nt, Human
gagaaaagaaaaaaa

SEQ ID NO: 1982660 - RNA, 19 nt, Human
gagaaaagaaaaaaaaaga

SEQ ID NO: 1982661 - RNA, 20 nt, Human
gagaaaagaaaaaaaaagaa

SEQ ID NO: 1982662 - RNA, 19 nt, Human
gacuuaagcacacuugaca

SEQ ID NO: 1982663 - RNA, 21 nt, Human
gacuuaacauagccaaaaugu

SEQ ID NO: 1982664 - RNA, 23 nt, Human
gacuuaacauagccaaaauguga

SEQ ID NO: 1982665 - RNA, 19 nt, Human
gacuuaaaauauuccugca

SEQ ID NO: 1982666 - RNA, 17 nt, Human
gacuuaacauagccaaa

SEQ ID NO: 1982667 - RNA, 14 nt, Human
gacuucugcuggca

SEQ ID NO: 1982668 - RNA, 22 nt, Human
gacuugaaaagagacaggcagg

SEQ ID NO: 1982669 - RNA, 17 nt, Human
gacuugaaaagagacag

SEQ ID NO: 1982670 - RNA, 21 nt, Human
gacuugaaaagagacaggcag

SEQ ID NO: 1982671 - RNA, 11 nt, Human
gacuugaaaag

SEQ ID NO: 1982672 - RNA, 18 nt, Human
gacuucuguuuucaaucu

SEQ ID NO: 1982673 - RNA, 23 nt, Human
gacuucuguuuucaaucucguau

SEQ ID NO: 1982674 - RNA, 14 nt, Human
gacuucuguuuuca

SEQ ID NO: 1982675 - RNA, 16 nt, Human
gacuucuguuuucaau

SEQ ID NO: 1982676 - RNA, 17 nt, Human
gacuucuguuuucaauc

SEQ ID NO: 1982677 - RNA, 13 nt, Human
gacuuggaagcuc

SEQ ID NO: 1982678 - RNA, 13 nt, Human
gacuugcauuuuu

SEQ ID NO: 1982679 - RNA, 15 nt, Human
gacuugcauuuuugc

SEQ ID NO: 1982680 - RNA, 18 nt, Human
gacuuguauauucuauuu

SEQ ID NO: 1982681 - RNA, 9 nt, Human
gagaaaaga

SEQ ID NO: 1982682 - RNA, 21 nt, Human
gacuuguauauucuauuuuac

SEQ ID NO: 1982683 - RNA, 23 nt, Human
gacuagagggaccucucccaggg

SEQ ID NO: 1982684 - RNA, 20 nt, Human
gacuagagggaccucuccca

SEQ ID NO: 1982685 - RNA, 19 nt, Human
gacuagagggaccucuccc

SEQ ID NO: 1982686 - RNA, 17 nt, Human
gacuagagggaccucuc

SEQ ID NO: 1982687 - RNA, 14 nt, Human
gacucauucuucug

SEQ ID NO: 1982688 - RNA, 15 nt, Human
gacucauucuucugu

SEQ ID NO: 1982689 - RNA, 22 nt, Human
gaccucaaaugaugugccugcu

SEQ ID NO: 1982690 - RNA, 18 nt, Human
gacuacaggugugaguca

SEQ ID NO: 1982691 - RNA, 21 nt, Human
gacuacaggugugagucacca

SEQ ID NO: 1982692 - RNA, 13 nt, Human
gacuacaggugug

SEQ ID NO: 1982693 - RNA, 16 nt, Human
gaccucaaaugaugug

SEQ ID NO: 1982694 - RNA, 13 nt, Human
gacucgcgacaau

SEQ ID NO: 1982695 - RNA, 13 nt, Human
gacuccugcaggc

SEQ ID NO: 1982696 - RNA, 23 nt, Human
gacuccugcacacgcuccuuccu

SEQ ID NO: 1982697 - RNA, 12 nt, Human
gacuccugcagg

SEQ ID NO: 1982698 - RNA, 14 nt, Human
gacuccucugucca

SEQ ID NO: 1982699 - RNA, 11 nt, Human
gacuccucugu

SEQ ID NO: 1982700 - RNA, 14 nt, Human
gacuggaagcacag

SEQ ID NO: 1982701 - RNA, 15 nt, Human
gacuggaagcacagc

SEQ ID NO: 1982702 - RNA, 16 nt, Human
gacuggaagcacagcu

SEQ ID NO: 1982703 - RNA, 22 nt, Human
gacugcuccugagcccccagcu

SEQ ID NO: 1982704 - RNA, 18 nt, Human
gacuggaagcacagcuuc

SEQ ID NO: 1982705 - RNA, 16 nt, Human
gacugggccaggggag

SEQ ID NO: 1982706 - RNA, 16 nt, Human
gacugggggcagacau

SEQ ID NO: 1982707 - RNA, 23 nt, Human
gacugggggcagacauggugggg

SEQ ID NO: 1982708 - RNA, 17 nt, Human
gacucgcgacaaugcaa

SEQ ID NO: 1982709 - RNA, 18 nt, Human
gacucuaguacugugaau

SEQ ID NO: 1982710 - RNA, 19 nt, Human
gacucuaguacugugaauc

SEQ ID NO: 1982711 - RNA, 21 nt, Human
gacugaguacguugugcauuu

SEQ ID NO: 1982712 - RNA, 22 nt, Human
gacugaguacguugugcauuug

SEQ ID NO: 1982713 - RNA, 23 nt, Human
gacucuaguacugugaauccagu

SEQ ID NO: 1982714 - RNA, 15 nt, Human
gacugcccggcaggg

SEQ ID NO: 1982715 - RNA, 13 nt, Human
gacugcccggcag

SEQ ID NO: 1982716 - RNA, 23 nt, Human
gacugaguacguugugcauuugg

SEQ ID NO: 1982717 - RNA, 18 nt, Human
gagaugaugaaaauauuu

SEQ ID NO: 1982718 - RNA, 17 nt, Human
gagaugaggccgccaug

SEQ ID NO: 1982719 - RNA, 17 nt, Human
gagaugagaggggagag

SEQ ID NO: 1982720 - RNA, 18 nt, Human
gagaucacgccacugcac

SEQ ID NO: 1982721 - RNA, 19 nt, Human
gagaucacgccacugcacu

SEQ ID NO: 1982722 - RNA, 14 nt, Human
gagauagccaaggc

SEQ ID NO: 1982723 - RNA, 23 nt, Human
gagauacuuggucacagccaggc

SEQ ID NO: 1982724 - RNA, 16 nt, Human
gagauagccaaggcca

SEQ ID NO: 1982725 - RNA, 23 nt, Human
gagaucaaccccuucgcuccugu

SEQ ID NO: 1982726 - RNA, 13 nt, Human
gagcaacauuuua

SEQ ID NO: 1982727 - RNA, 22 nt, Human
gagcaaccccuggaccccagcc

SEQ ID NO: 1982728 - RNA, 18 nt, Human
gagcaacaagaaucuaaa

SEQ ID NO: 1982729 - RNA, 21 nt, Human
gagcaaccccuggaccccagc

SEQ ID NO: 1982730 - RNA, 14 nt, Human
gagcaagagagcag

SEQ ID NO: 1982731 - RNA, 15 nt, Human
gagcaagagagcagc

SEQ ID NO: 1982732 - RNA, 21 nt, Human
gagcaaggaagguaaaaaguu

SEQ ID NO: 1982733 - RNA, 18 nt, Human
gagcaagggcagggacag

SEQ ID NO: 1982734 - RNA, 11 nt, Human
gagcaagagga

SEQ ID NO: 1982735 - RNA, 20 nt, Human
gagcaccuuagacagucccu

SEQ ID NO: 1982736 - RNA, 21 nt, Human
gagcacuaaggugugcucuga

SEQ ID NO: 1982737 - RNA, 22 nt, Human
gagcaccuuagacagucccugc

SEQ ID NO: 1982738 - RNA, 21 nt, Human
gagcaccuuagacagucccug

SEQ ID NO: 1982739 - RNA, 15 nt, Human
gagcacuaaggugug

SEQ ID NO: 1982740 - RNA, 18 nt, Human
gagcacaacccccagcuc

SEQ ID NO: 1982741 - RNA, 19 nt, Human
gagcacaacccccagcucc

SEQ ID NO: 1982742 - RNA, 21 nt, Human
gagcauuggggauguuuuucu

SEQ ID NO: 1982743 - RNA, 15 nt, Human
gagcauuagauuucu

SEQ ID NO: 1982744 - RNA, 21 nt, Human
gagcauuagauuucucauuug

SEQ ID NO: 1982745 - RNA, 21 nt, Human
gagcauuauaaucaccagggc

SEQ ID NO: 1982746 - RNA, 22 nt, Human
gagcauuauaaucaccagggcc

SEQ ID NO: 1982747 - RNA, 23 nt, Human
gagcauuauaaucaccagggcca

SEQ ID NO: 1982748 - RNA, 13 nt, Human
gagcauuccaguc

SEQ ID NO: 1982749 - RNA, 20 nt, Human
gagccagauuucacucuccu

SEQ ID NO: 1982750 - RNA, 19 nt, Human
gagccaauuuaaagaaaac

SEQ ID NO: 1982751 - RNA, 16 nt, Human
gagcagagaauucucu

SEQ ID NO: 1982752 - RNA, 12 nt, Human
gagcagagacca

SEQ ID NO: 1982753 - RNA, 14 nt, Human
gagcauuacaggca

SEQ ID NO: 1982754 - RNA, 15 nt, Human
gagcauuacaggcaa

SEQ ID NO: 1982755 - RNA, 16 nt, Human
gagcauuacaggcaag

SEQ ID NO: 1982756 - RNA, 14 nt, Human
gagccagggucuca

SEQ ID NO: 1982757 - RNA, 23 nt, Human
gagccagauuucacucuccuugg

SEQ ID NO: 1982758 - RNA, 23 nt, Human
gagcccacuguacuugcucuuga

SEQ ID NO: 1982759 - RNA, 19 nt, Human
gagccagggucucacuaug

SEQ ID NO: 1982760 - RNA, 16 nt, Human
gagcccagaguccccc

SEQ ID NO: 1982761 - RNA, 18 nt, Human
gagcccagagucccccca

SEQ ID NO: 1982762 - RNA, 13 nt, Human
gagcccacugugc

SEQ ID NO: 1982763 - RNA, 18 nt, Human
gagcccugguggcagugg

SEQ ID NO: 1982764 - RNA, 21 nt, Human
gagcccaggagucccacucca

SEQ ID NO: 1982765 - RNA, 15 nt, Human
gagagagauguguaa

SEQ ID NO: 1982766 - RNA, 22 nt, Human
gagagagauguguaauuuuucu

SEQ ID NO: 1982767 - RNA, 19 nt, Human
gagagagcuucuguugcug

SEQ ID NO: 1982768 - RNA, 22 nt, Human
gagagagcuucuguugcugccu

SEQ ID NO: 1982769 - RNA, 11 nt, Human
gagagaaauau

SEQ ID NO: 1982770 - RNA, 13 nt, Human
gagagaaauauuu

SEQ ID NO: 1982771 - RNA, 15 nt, Human
gagagcaacauuuua

SEQ ID NO: 1982772 - RNA, 19 nt, Human
gagagauguguaauuuuuc

SEQ ID NO: 1982773 - RNA, 18 nt, Human
gagagauguguaauuuuu

SEQ ID NO: 1982774 - RNA, 18 nt, Human
gagagcccuagaaagcug

SEQ ID NO: 1982775 - RNA, 16 nt, Human
gagagcccuucauuug

SEQ ID NO: 1982776 - RNA, 13 nt, Human
gagaggggcacag

SEQ ID NO: 1982777 - RNA, 16 nt, Human
gagaggggaggccaag

SEQ ID NO: 1982778 - RNA, 18 nt, Human
gagaggggagagcugaac

SEQ ID NO: 1982779 - RNA, 14 nt, Human
gagaggggaggcca

SEQ ID NO: 1982780 - RNA, 19 nt, Human
gagaggggaacagacugga

SEQ ID NO: 1982781 - RNA, 16 nt, Human
gagagggugggagugg

SEQ ID NO: 1982782 - RNA, 20 nt, Human
gagagggugggagugggccc

SEQ ID NO: 1982783 - RNA, 23 nt, Human
gagagggugaguccuccagaacu

SEQ ID NO: 1982784 - RNA, 14 nt, Human
gagagggugggagu

SEQ ID NO: 1982785 - RNA, 16 nt, Human
gagaguggcuccuccc

SEQ ID NO: 1982786 - RNA, 21 nt, Human
gagaguggcuccucccggugc

SEQ ID NO: 1982787 - RNA, 14 nt, Human
gagaguuuagcugu

SEQ ID NO: 1982788 - RNA, 13 nt, Human
gagauacucuggg

SEQ ID NO: 1982789 - RNA, 21 nt, Human
gagauacuuggucacagccag

SEQ ID NO: 1982790 - RNA, 13 nt, Human
gagaguggcuccu

SEQ ID NO: 1982791 - RNA, 21 nt, Human
gagacuccugcaggcagccag

SEQ ID NO: 1982792 - RNA, 20 nt, Human
gagacuccugcaggcagcca

SEQ ID NO: 1982793 - RNA, 19 nt, Human
gagacuccugcaggcagcc

SEQ ID NO: 1982794 - RNA, 21 nt, Human
gagacucgcgacaaugcaaac

SEQ ID NO: 1982795 - RNA, 20 nt, Human
gagacucgcgacaaugcaaa

SEQ ID NO: 1982796 - RNA, 13 nt, Human
gagacucugucuc

SEQ ID NO: 1982797 - RNA, 16 nt, Human
gagacucuagggucca

SEQ ID NO: 1982798 - RNA, 19 nt, Human
gagacucuaggguccagug

SEQ ID NO: 1982799 - RNA, 20 nt, Human
gagacucuaggguccagugg

SEQ ID NO: 1982800 - RNA, 22 nt, Human
gagacugucccugaaaccuagu

SEQ ID NO: 1982801 - RNA, 13 nt, Human
gagacugucccug

SEQ ID NO: 1982802 - RNA, 17 nt, Human
gagaaugucaguaugug

SEQ ID NO: 1982803 - RNA, 20 nt, Human
gagacagcucugcauacuca

SEQ ID NO: 1982804 - RNA, 23 nt, Human
gagaaugcacaaacagaggccgc

SEQ ID NO: 1982805 - RNA, 22 nt, Human
gagaaugaacaaagaccaauuu

SEQ ID NO: 1982806 - RNA, 21 nt, Human
gagaccaucccugaaggcccc

SEQ ID NO: 1982807 - RNA, 18 nt, Human
gagaccaucccugaaggc

SEQ ID NO: 1982808 - RNA, 14 nt, Human
gagaccaucccuga

SEQ ID NO: 1982809 - RNA, 20 nt, Human
gagacaggguuucaccaugu

SEQ ID NO: 1982810 - RNA, 22 nt, Human
gagacaggguuuugccauguug

SEQ ID NO: 1982811 - RNA, 17 nt, Human
cugcugcuucauguuug

SEQ ID NO: 1982812 - RNA, 15 nt, Human
cugcuggcaucaaga

SEQ ID NO: 1982813 - RNA, 20 nt, Human
cugcuggccggacacccgac

SEQ ID NO: 1982814 - RNA, 15 nt, Human
cugcugcuggcuggu

SEQ ID NO: 1982815 - RNA, 23 nt, Human
cugcuuccagugaggcucugccc

SEQ ID NO: 1982816 - RNA, 21 nt, Human
cugcuuccagugaggcucugc

SEQ ID NO: 1982817 - RNA, 20 nt, Human
cugcuuccagugaggcucug

SEQ ID NO: 1982818 - RNA, 19 nt, Human
cugcuuccagugaggcucu

SEQ ID NO: 1982819 - RNA, 18 nt, Human
cugcuuccagugaggcuc

SEQ ID NO: 1982820 - RNA, 16 nt, Human
cugcuuccagugaggc

SEQ ID NO: 1982821 - RNA, 15 nt, Human
cugcuuccagugagg

SEQ ID NO: 1982822 - RNA, 11 nt, Human
cugcugggcuu

SEQ ID NO: 1982823 - RNA, 12 nt, Human
cugcuggcugcc

SEQ ID NO: 1982824 - RNA, 13 nt, Human
cugcugguucagg

SEQ ID NO: 1982825 - RNA, 15 nt, Human
cugcugguucagggu

SEQ ID NO: 1982826 - RNA, 23 nt, Human
cugcugguucaggguuggccccu

SEQ ID NO: 1982827 - RNA, 11 nt, Human
cugcugaaggc

SEQ ID NO: 1982828 - RNA, 14 nt, Human
cugcugcagagcag

SEQ ID NO: 1982829 - RNA, 15 nt, Human
cugcugcagagcagu

SEQ ID NO: 1982830 - RNA, 21 nt, Human
cugcugcagagcaguaaggga

SEQ ID NO: 1982831 - RNA, 21 nt, Human
cugcucuccucuugccacugc

SEQ ID NO: 1982832 - RNA, 17 nt, Human
cugcugaaggaauaaau

SEQ ID NO: 1982833 - RNA, 18 nt, Human
cugcugaaggaauaaauu

SEQ ID NO: 1982834 - RNA, 12 nt, Human
cugcugcccagc

SEQ ID NO: 1982835 - RNA, 15 nt, Human
cugcugcccagccuc

SEQ ID NO: 1982836 - RNA, 22 nt, Human
cugcugcccagccuccaagcuc

SEQ ID NO: 1982837 - RNA, 21 nt, Human
cugcugccaugaacugucaag

SEQ ID NO: 1982838 - RNA, 11 nt, Human
cugcugccagu

SEQ ID NO: 1982839 - RNA, 18 nt, Human
cugcugccaguaccagcc

SEQ ID NO: 1982840 - RNA, 16 nt, Human
cugcugccaugaacug

SEQ ID NO: 1982841 - RNA, 19 nt, Human
cugcucuccgaccagacac

SEQ ID NO: 1982842 - RNA, 14 nt, Human
cugcucuccucuug

SEQ ID NO: 1982843 - RNA, 20 nt, Human
cugcucuccucuugccacug

SEQ ID NO: 1982844 - RNA, 20 nt, Human
cugcuccagcuguucagcug

SEQ ID NO: 1982845 - RNA, 16 nt, Human
cugcgaggcuaugagu

SEQ ID NO: 1982846 - RNA, 19 nt, Human
cugcuccagcuguucagcu

SEQ ID NO: 1982847 - RNA, 19 nt, Human
cugcgaccacaagaaggau

SEQ ID NO: 1982848 - RNA, 19 nt, Human
cugccuuggggucagguug

SEQ ID NO: 1982849 - RNA, 20 nt, Human
cugccuuggggucagguuga

SEQ ID NO: 1982850 - RNA, 22 nt, Human
cugccuuggggucagguugaca

SEQ ID NO: 1982851 - RNA, 11 nt, Human
cugccucccau

SEQ ID NO: 1982852 - RNA, 14 nt, Human
cugccuaacaaaau

SEQ ID NO: 1982853 - RNA, 19 nt, Human
cugccucccaucacccgcu

SEQ ID NO: 1982854 - RNA, 16 nt, Human
cugccucccaucaccc

SEQ ID NO: 1982855 - RNA, 14 nt, Human
cugccucccaucac

SEQ ID NO: 1982856 - RNA, 12 nt, Human
cugccucccauc

SEQ ID NO: 1982857 - RNA, 22 nt, Human
cugccucucugcaggucccuaa

SEQ ID NO: 1982858 - RNA, 15 nt, Human
cugccucugacacac

SEQ ID NO: 1982859 - RNA, 22 nt, Human
cugccucugacacacagcucug

SEQ ID NO: 1982860 - RNA, 23 nt, Human
cugccucugacacacagcucugu

SEQ ID NO: 1982861 - RNA, 21 nt, Human
cugccucucugcaggucccua

SEQ ID NO: 1982862 - RNA, 20 nt, Human
cugccucucugcaggucccu

SEQ ID NO: 1982863 - RNA, 22 nt, Human
cugccuugcccacuccugcucu

SEQ ID NO: 1982864 - RNA, 21 nt, Human
cugccugggaucccucauccu

SEQ ID NO: 1982865 - RNA, 17 nt, Human
cugccuugcccacuccu

SEQ ID NO: 1982866 - RNA, 18 nt, Human
cugccuugcccacuccug

SEQ ID NO: 1982867 - RNA, 20 nt, Human
cugccuugcccacuccugcu

SEQ ID NO: 1982868 - RNA, 20 nt, Human
cugccugcccaggccccugc

SEQ ID NO: 1982869 - RNA, 15 nt, Human
cugccugaagucaca

SEQ ID NO: 1982870 - RNA, 16 nt, Human
cugccugcccaggccc

SEQ ID NO: 1982871 - RNA, 17 nt, Human
cugccugcccaggcccc

SEQ ID NO: 1982872 - RNA, 15 nt, Human
cugccucuucucuac

SEQ ID NO: 1982873 - RNA, 19 nt, Human
cugccucucugcagguccc

SEQ ID NO: 1982874 - RNA, 17 nt, Human
cucccuucccaccucuc

SEQ ID NO: 1982875 - RNA, 16 nt, Human
cucccuucccaccucu

SEQ ID NO: 1982876 - RNA, 15 nt, Human
cucccuucccaccuc

SEQ ID NO: 1982877 - RNA, 14 nt, Human
cucccuucccaccu

SEQ ID NO: 1982878 - RNA, 12 nt, Human
cugcccuccaag

SEQ ID NO: 1982879 - RNA, 22 nt, Human
cugcccugcugagucccaggcu

SEQ ID NO: 1982880 - RNA, 14 nt, Human
cugcccugcuguuu

SEQ ID NO: 1982881 - RNA, 20 nt, Human
cugcccugcgggucacagga

SEQ ID NO: 1982882 - RNA, 18 nt, Human
cugccgcagcccugcaga

SEQ ID NO: 1982883 - RNA, 17 nt, Human
cugccgcagcccugcag

SEQ ID NO: 1982884 - RNA, 15 nt, Human
cugccgcagcccugc

SEQ ID NO: 1982885 - RNA, 14 nt, Human
cugccgcagcccug

SEQ ID NO: 1982886 - RNA, 21 nt, Human
cugcccuuucugggcaccggg

SEQ ID NO: 1982887 - RNA, 14 nt, Human
cugcccuuuguccu

SEQ ID NO: 1982888 - RNA, 18 nt, Human
cugcccuuuguccuccug

SEQ ID NO: 1982889 - RNA, 20 nt, Human
cugcccuuuguccuccugcu

SEQ ID NO: 1982890 - RNA, 23 nt, Human
cugcccuuuguccuccugcugcc

SEQ ID NO: 1982891 - RNA, 23 nt, Human
cuggcugcagagcagugggccug

SEQ ID NO: 1982892 - RNA, 24 nt, Human
cuggcucuuccaggcugggagagc

SEQ ID NO: 1982893 - RNA, 22 nt, Human
cuggcucuuccaggcugggaga

SEQ ID NO: 1982894 - RNA, 21 nt, Human
cuggcucuuccaggcugggag

SEQ ID NO: 1982895 - RNA, 22 nt, Human
cuggccuugggauccaggcccc

SEQ ID NO: 1982896 - RNA, 23 nt, Human
cuggccuucggccuccauccuga

SEQ ID NO: 1982897 - RNA, 14 nt, Human
cuggccugugucua

SEQ ID NO: 1982898 - RNA, 19 nt, Human
cuggccuugggauccaggc

SEQ ID NO: 1982899 - RNA, 20 nt, Human
cuggccuugggauccaggcc

SEQ ID NO: 1982900 - RNA, 14 nt, Human
cuggcgugcagugg

SEQ ID NO: 1982901 - RNA, 15 nt, Human
cuggcgugcaguggu

SEQ ID NO: 1982902 - RNA, 19 nt, Human
cuggcccauguauggccag

SEQ ID NO: 1982903 - RNA, 21 nt, Human
cuggcccauguauggccagga

SEQ ID NO: 1982904 - RNA, 12 nt, Human
cuggccccacac

SEQ ID NO: 1982905 - RNA, 17 nt, Human
cuggccccacaccagcc

SEQ ID NO: 1982906 - RNA, 20 nt, Human
cuggccucugcacuccccug

SEQ ID NO: 1982907 - RNA, 18 nt, Human
cuggccucugcacucccc

SEQ ID NO: 1982908 - RNA, 21 nt, Human
cuggccucugcacuccccugc

SEQ ID NO: 1982909 - RNA, 16 nt, Human
cuggccucugcacucc

SEQ ID NO: 1982910 - RNA, 22 nt, Human
cuggccuucggccuccauccug

SEQ ID NO: 1982911 - RNA, 16 nt, Human
cuggccuggggucagg

SEQ ID NO: 1982912 - RNA, 18 nt, Human
cuggccuggggucaggcc

SEQ ID NO: 1982913 - RNA, 13 nt, Human
cuggccugucugu

SEQ ID NO: 1982914 - RNA, 18 nt, Human
cuggccugucugugaaga

SEQ ID NO: 1982915 - RNA, 24 nt, Human
cuggccuggccccucagggucccu

SEQ ID NO: 1982916 - RNA, 19 nt, Human
cuggccuggccccucaggg

SEQ ID NO: 1982917 - RNA, 13 nt, Human
cuggccuggcccc

SEQ ID NO: 1982918 - RNA, 20 nt, Human
cuggcacccggccccugcug

SEQ ID NO: 1982919 - RNA, 21 nt, Human
cuggcacccggccccugcugg

SEQ ID NO: 1982920 - RNA, 19 nt, Human
cuggcacccggccccugcu

SEQ ID NO: 1982921 - RNA, 20 nt, Human
cuggagugcagugagccgag

SEQ ID NO: 1982922 - RNA, 23 nt, Human
cuggcacugcuuccagugaggcu

SEQ ID NO: 1982923 - RNA, 20 nt, Human
cuggcacugcuuccagugag

SEQ ID NO: 1982924 - RNA, 19 nt, Human
cuggcacugcuuccaguga

SEQ ID NO: 1982925 - RNA, 22 nt, Human
cuggcacccggccccugcuggu

SEQ ID NO: 1982926 - RNA, 14 nt, Human
cuggcacuuggaga

SEQ ID NO: 1982927 - RNA, 18 nt, Human
cuggcacugcuuccagug

SEQ ID NO: 1982928 - RNA, 21 nt, Human
cuggcacuuggagacuuguau

SEQ ID NO: 1982929 - RNA, 14 nt, Human
cuggccagaugcac

SEQ ID NO: 1982930 - RNA, 22 nt, Human
cuggcaucaagaggugggaggg

SEQ ID NO: 1982931 - RNA, 23 nt, Human
cuggcaucaagaggugggagggc

SEQ ID NO: 1982932 - RNA, 21 nt, Human
cuggccaguggcuggaucugu

SEQ ID NO: 1982933 - RNA, 15 nt, Human
cuggcccacugcauc

SEQ ID NO: 1982934 - RNA, 15 nt, Human
cuggacucccucaag

SEQ ID NO: 1982935 - RNA, 16 nt, Human
cuggagcucugcccau

SEQ ID NO: 1982936 - RNA, 12 nt, Human
cuggagcucugc

SEQ ID NO: 1982937 - RNA, 13 nt, Human
cuggagcucugcc

SEQ ID NO: 1982938 - RNA, 17 nt, Human
cuggagguacgaaaaga

SEQ ID NO: 1982939 - RNA, 22 nt, Human
cuggagguacgaaaagagggga

SEQ ID NO: 1982940 - RNA, 12 nt, Human
cuggagguuugu

SEQ ID NO: 1982941 - RNA, 17 nt, Human
cuggagguuuguuuaga

SEQ ID NO: 1982942 - RNA, 14 nt, Human
cuggagugcaguga

SEQ ID NO: 1982943 - RNA, 15 nt, Human
cuggagugcagugag

SEQ ID NO: 1982944 - RNA, 16 nt, Human
cuggagugcagugagc

SEQ ID NO: 1982945 - RNA, 17 nt, Human
cuggagugcagugagcc

SEQ ID NO: 1982946 - RNA, 16 nt, Human
cuggaccuugaacugg

SEQ ID NO: 1982947 - RNA, 15 nt, Human
cuggacccuguggau

SEQ ID NO: 1982948 - RNA, 19 nt, Human
cuggaccccaucugugaau

SEQ ID NO: 1982949 - RNA, 20 nt, Human
cuggaccccaucugugaaua

SEQ ID NO: 1982950 - RNA, 22 nt, Human
cuggaccccaucugugaauaag

SEQ ID NO: 1982951 - RNA, 17 nt, Human
cuggaccccagccucaa

SEQ ID NO: 1982952 - RNA, 18 nt, Human
cuggacuccucuguccag

SEQ ID NO: 1982953 - RNA, 19 nt, Human
cuggacuccucuguccagg

SEQ ID NO: 1982954 - RNA, 14 nt, Human
cuggacuccucugu

SEQ ID NO: 1982955 - RNA, 17 nt, Human
cuggacuccucugucca

SEQ ID NO: 1982956 - RNA, 17 nt, Human
cuggaccuugaacuggg

SEQ ID NO: 1982957 - RNA, 20 nt, Human
cuggaccuugaacuggguac

SEQ ID NO: 1982958 - RNA, 21 nt, Human
cuggaccuugaacuggguacu

SEQ ID NO: 1982959 - RNA, 23 nt, Human
cuggacaggcauguucucugagg

SEQ ID NO: 1982960 - RNA, 14 nt, Human
cuggacaggccagg

SEQ ID NO: 1982961 - RNA, 14 nt, Human
cuggacaggcaugu

SEQ ID NO: 1982962 - RNA, 17 nt, Human
cuggacaggcauguucu

SEQ ID NO: 1982963 - RNA, 12 nt, Human
cuggaccccagc

SEQ ID NO: 1982964 - RNA, 13 nt, Human
cuggaccccagcc

SEQ ID NO: 1982965 - RNA, 14 nt, Human
cuggaccccagccu

SEQ ID NO: 1982966 - RNA, 15 nt, Human
cuggaccccagccuc

SEQ ID NO: 1982967 - RNA, 16 nt, Human
cuggaccccagccuca

SEQ ID NO: 1982968 - RNA, 17 nt, Human
cuggaccccaucuguga

SEQ ID NO: 1982969 - RNA, 18 nt, Human
cuggaccccaucugugaa

SEQ ID NO: 1982970 - RNA, 13 nt, Human
cuggaauuugaaa

SEQ ID NO: 1982971 - RNA, 16 nt, Human
cugcuuccuauaauuu

SEQ ID NO: 1982972 - RNA, 20 nt, Human
cugcuuccuauaauuuugau

SEQ ID NO: 1982973 - RNA, 14 nt, Human
cugcuuccucagag

SEQ ID NO: 1982974 - RNA, 14 nt, Human
cugugggcccccaa

SEQ ID NO: 1982975 - RNA, 21 nt, Human
cugugggcgugagaccugccc

SEQ ID NO: 1982976 - RNA, 22 nt, Human
cugugggcgugagaccugcccc

SEQ ID NO: 1982977 - RNA, 17 nt, Human
cuguggaugauaaaaca

SEQ ID NO: 1982978 - RNA, 18 nt, Human
cugugccucugggacugg

SEQ ID NO: 1982979 - RNA, 17 nt, Human
cugugccucugggacug

SEQ ID NO: 1982980 - RNA, 22 nt, Human
cugugcugcccugcccaccugg

SEQ ID NO: 1982981 - RNA, 16 nt, Human
cugugccucugggacu

SEQ ID NO: 1982982 - RNA, 14 nt, Human
cugugccucuggga

SEQ ID NO: 1982983 - RNA, 11 nt, Human
cugugccucug

SEQ ID NO: 1982984 - RNA, 23 nt, Human
cugucucaagagggcacuggugg

SEQ ID NO: 1982985 - RNA, 19 nt, Human
cugugaggggcucucucau

SEQ ID NO: 1982986 - RNA, 18 nt, Human
cugucuccauguuugaug

SEQ ID NO: 1982987 - RNA, 21 nt, Human
cugugaguacuacaguccucc

SEQ ID NO: 1982988 - RNA, 20 nt, Human
cugugaguacuacaguccuc

SEQ ID NO: 1982989 - RNA, 23 nt, Human
cugugaguacuacaguccuccca

SEQ ID NO: 1982990 - RNA, 17 nt, Human
cugugauggggcccugc

SEQ ID NO: 1982991 - RNA, 18 nt, Human
cugugauggggcccugcc

SEQ ID NO: 1982992 - RNA, 22 nt, Human
cugugaucccaguagaaaauau

SEQ ID NO: 1982993 - RNA, 20 nt, Human
cugugauggggcccugccuc

SEQ ID NO: 1982994 - RNA, 19 nt, Human
cugugauggggcccugccu

SEQ ID NO: 1982995 - RNA, 16 nt, Human
cugugccaugugccag

SEQ ID NO: 1982996 - RNA, 18 nt, Human
cugugccaugugccaggu

SEQ ID NO: 1982997 - RNA, 14 nt, Human
cugugccauuuugu

SEQ ID NO: 1982998 - RNA, 21 nt, Human
cuguucagcugguugagguuu

SEQ ID NO: 1982999 - RNA, 19 nt, Human
cuguucagcugguugaggu

SEQ ID NO: 1983000 - RNA, 20 nt, Human
cuguuacucaaugugugccg

SEQ ID NO: 1983001 - RNA, 13 nt, Human
cuguucagcuuuu

SEQ ID NO: 1983002 - RNA, 17 nt, Human
cuguucagcuuuuauuc

SEQ ID NO: 1983003 - RNA, 19 nt, Human
cuguucagcuuuuauuccu

SEQ ID NO: 1983004 - RNA, 20 nt, Human
cuguucagcuuuuauuccug

SEQ ID NO: 1983005 - RNA, 13 nt, Human
cuguuacugucuu

SEQ ID NO: 1983006 - RNA, 16 nt, Human
cuguuaccauuggaaa

SEQ ID NO: 1983007 - RNA, 17 nt, Human
cuguuaccauuggaaau

SEQ ID NO: 1983008 - RNA, 19 nt, Human
cuguuaccauuggaaauuu

SEQ ID NO: 1983009 - RNA, 21 nt, Human
cuguuaccauuggaaauuuca

SEQ ID NO: 1983010 - RNA, 22 nt, Human
cuguuaccauuggaaauuucac

SEQ ID NO: 1983011 - RNA, 19 nt, Human
cuguuacacuuuuuggaag

SEQ ID NO: 1983012 - RNA, 18 nt, Human
cuguuacaaaauguaacu

SEQ ID NO: 1983013 - RNA, 19 nt, Human
cuguuacaaaauguaacug

SEQ ID NO: 1983014 - RNA, 22 nt, Human
cuguuacaaaauguaacuguua

SEQ ID NO: 1983015 - RNA, 18 nt, Human
cuguuacacuuuuuggaa

SEQ ID NO: 1983016 - RNA, 17 nt, Human
cuguucaugaaagauuc

SEQ ID NO: 1983017 - RNA, 18 nt, Human
cuguucaugaaagauuca

SEQ ID NO: 1983018 - RNA, 23 nt, Human
cuguucaugaaagauucaaugcc

SEQ ID NO: 1983019 - RNA, 17 nt, Human
cuguucccaccugcugg

SEQ ID NO: 1983020 - RNA, 18 nt, Human
cuguucccauucuugcau

SEQ ID NO: 1983021 - RNA, 17 nt, Human
cuguucucugcccucca

SEQ ID NO: 1983022 - RNA, 16 nt, Human
cuguucucugcccucc

SEQ ID NO: 1983023 - RNA, 15 nt, Human
cuguucucugcccuc

SEQ ID NO: 1983024 - RNA, 14 nt, Human
cuguucucugcccu

SEQ ID NO: 1983025 - RNA, 19 nt, Human
cuguucucugcccuccaag

SEQ ID NO: 1983026 - RNA, 18 nt, Human
cuguucucugcccuccaa

SEQ ID NO: 1983027 - RNA, 20 nt, Human
cuguucucugcccuccaaga

SEQ ID NO: 1983028 - RNA, 13 nt, Human
cuguucucugccc

SEQ ID NO: 1983029 - RNA, 11 nt, Human
cuguuaaaaug

SEQ ID NO: 1983030 - RNA, 12 nt, Human
cuguuaaaaugc

SEQ ID NO: 1983031 - RNA, 13 nt, Human
cuguuaaaaugca

SEQ ID NO: 1983032 - RNA, 14 nt, Human
cuguuaaaaugcau

SEQ ID NO: 1983033 - RNA, 23 nt, Human
cuguuaaaaugcaugauugcaga

SEQ ID NO: 1983034 - RNA, 17 nt, Human
cuguuacaaaauguaac

SEQ ID NO: 1983035 - RNA, 22 nt, Human
cuguguuugcuccccuuccccu

SEQ ID NO: 1983036 - RNA, 14 nt, Human
cuguguuugcuccc

SEQ ID NO: 1983037 - RNA, 19 nt, Human
cuguguuugcuccccuucc

SEQ ID NO: 1983038 - RNA, 12 nt, Human
cuguguuuauuc

SEQ ID NO: 1983039 - RNA, 21 nt, Human
cuguguuuauucaaacugaaa

SEQ ID NO: 1983040 - RNA, 19 nt, Human
cuguguuugaacugaaguc

SEQ ID NO: 1983041 - RNA, 16 nt, Human
cuguguguugccuggg

SEQ ID NO: 1983042 - RNA, 17 nt, Human
cuguguuuacagagaug

SEQ ID NO: 1983043 - RNA, 16 nt, Human
cuguguguuuaugugu

SEQ ID NO: 1983044 - RNA, 17 nt, Human
cuguguguuuaugugug

SEQ ID NO: 1983045 - RNA, 20 nt, Human
cugugugugcgccuacagga

SEQ ID NO: 1983046 - RNA, 21 nt, Human
cugugucuugcaauggcagcc

SEQ ID NO: 1983047 - RNA, 22 nt, Human
cugugucuugcaauggcagccu

SEQ ID NO: 1983048 - RNA, 23 nt, Human
cugugucuugcaauggcagccuu

SEQ ID NO: 1983049 - RNA, 23 nt, Human
cugugggcgugagaccugccccu

SEQ ID NO: 1983050 - RNA, 21 nt, Human
cugugugcucaggagcccugg

SEQ ID NO: 1983051 - RNA, 20 nt, Human
cugugugcucaggagcccug

SEQ ID NO: 1983052 - RNA, 16 nt, Human
cugugugcucaggagc

SEQ ID NO: 1983053 - RNA, 19 nt, Human
cugugugcucaggagcccu

SEQ ID NO: 1983054 - RNA, 15 nt, Human
cuguguggcagucug

SEQ ID NO: 1983055 - RNA, 23 nt, Human
cugugugcucaggagcccuggga

SEQ ID NO: 1983056 - RNA, 21 nt, Human
cugguacaauuucuuuugguu

SEQ ID NO: 1983057 - RNA, 18 nt, Human
cuggguacugaaagccuu

SEQ ID NO: 1983058 - RNA, 19 nt, Human
cugguacaauuucuuuugg

SEQ ID NO: 1983059 - RNA, 20 nt, Human
cugguacaauuucuuuuggu

SEQ ID NO: 1983060 - RNA, 17 nt, Human
cuggguucuacccaggu

SEQ ID NO: 1983061 - RNA, 16 nt, Human
cuggguucuacccagg

SEQ ID NO: 1983062 - RNA, 15 nt, Human
cuggguucuacccag

SEQ ID NO: 1983063 - RNA, 14 nt, Human
cuggguucuaccca

SEQ ID NO: 1983064 - RNA, 21 nt, Human
cuggggucaggccgggcagag

SEQ ID NO: 1983065 - RNA, 24 nt, Human
cuggggucaggccgggcagagcac

SEQ ID NO: 1983066 - RNA, 17 nt, Human
cuggguacugaaagccu

SEQ ID NO: 1983067 - RNA, 20 nt, Human
cuggguaacuagggaagaua

SEQ ID NO: 1983068 - RNA, 22 nt, Human
cuggguaacuagggaagauaau

SEQ ID NO: 1983069 - RNA, 24 nt, Human
cugggcuucaguggcagcugcuuu

SEQ ID NO: 1983070 - RNA, 15 nt, Human
cuggggcugcuguga

SEQ ID NO: 1983071 - RNA, 13 nt, Human
cugggggaagaag

SEQ ID NO: 1983072 - RNA, 22 nt, Human
cugggggggauuguaaaauggu

SEQ ID NO: 1983073 - RNA, 19 nt, Human
cugggggcugggcagagga

SEQ ID NO: 1983074 - RNA, 15 nt, Human
cugggggaagaagcu

SEQ ID NO: 1983075 - RNA, 13 nt, Human
cugggggaugggc

SEQ ID NO: 1983076 - RNA, 16 nt, Human
cugggggaugggccug

SEQ ID NO: 1983077 - RNA, 18 nt, Human
cugggggaugggccugag

SEQ ID NO: 1983078 - RNA, 23 nt, Human
cuggucaaacaaacucucugaac

SEQ ID NO: 1983079 - RNA, 18 nt, Human
cuggucaaacaaacucuc

SEQ ID NO: 1983080 - RNA, 17 nt, Human
cuggucaaacaaacucu

SEQ ID NO: 1983081 - RNA, 18 nt, Human
cuggucacaggacucugc

SEQ ID NO: 1983082 - RNA, 23 nt, Human
cugguggcagcucaccucucccu

SEQ ID NO: 1983083 - RNA, 21 nt, Human
cugguggcagcucaccucucc

SEQ ID NO: 1983084 - RNA, 12 nt, Human
cuggugcugcca

SEQ ID NO: 1983085 - RNA, 13 nt, Human
cuggugcugccac

SEQ ID NO: 1983086 - RNA, 20 nt, Human
cuggugcugccacacuucag

SEQ ID NO: 1983087 - RNA, 22 nt, Human
cuggugcugccacacuucaggc

SEQ ID NO: 1983088 - RNA, 13 nt, Human
cugguggcagcug

SEQ ID NO: 1983089 - RNA, 14 nt, Human
cugguggcagcugc

SEQ ID NO: 1983090 - RNA, 20 nt, Human
cugguggcccgacagccugg

SEQ ID NO: 1983091 - RNA, 21 nt, Human
cugguggcccgacagccuggc

SEQ ID NO: 1983092 - RNA, 22 nt, Human
cugguggcccgacagccuggca

SEQ ID NO: 1983093 - RNA, 23 nt, Human
cugguggcccgacagccuggcac

SEQ ID NO: 1983094 - RNA, 23 nt, Human
cuguaaucacagcuacuugggag

SEQ ID NO: 1983095 - RNA, 13 nt, Human
cugguuccucccc

SEQ ID NO: 1983096 - RNA, 16 nt, Human
cugguuccauggccuc

SEQ ID NO: 1983097 - RNA, 17 nt, Human
cuggugcugcaguaugu

SEQ ID NO: 1983098 - RNA, 12 nt, Human
cugguuccuccc

SEQ ID NO: 1983099 - RNA, 15 nt, Human
cuguacaaaguagaa

SEQ ID NO: 1983100 - RNA, 13 nt, Human
cuguacaaaguag

SEQ ID NO: 1983101 - RNA, 14 nt, Human
cuguaauuauuuga

SEQ ID NO: 1983102 - RNA, 15 nt, Human
cuguaauuauuugaa

SEQ ID NO: 1983103 - RNA, 21 nt, Human
cuguaauaacuagaacaaaua

SEQ ID NO: 1983104 - RNA, 16 nt, Human
cuguaauguuaauaau

SEQ ID NO: 1983105 - RNA, 20 nt, Human
cuguaauccuagcacuuugg

SEQ ID NO: 1983106 - RNA, 12 nt, Human
cuguccuccaag

SEQ ID NO: 1983107 - RNA, 12 nt, Human
cuguccuaccuu

SEQ ID NO: 1983108 - RNA, 16 nt, Human
cugucuagcacuuccu

SEQ ID NO: 1983109 - RNA, 17 nt, Human
cugucuagcacuuccuu

SEQ ID NO: 1983110 - RNA, 18 nt, Human
cugucuagcacuuccuug

SEQ ID NO: 1983111 - RNA, 20 nt, Human
cugucuagcacuuccuugcc

SEQ ID NO: 1983112 - RNA, 21 nt, Human
cugucuagcacuuccuugcca

SEQ ID NO: 1983113 - RNA, 23 nt, Human
cugucuagcacuuccuugccagu

SEQ ID NO: 1983114 - RNA, 18 nt, Human
cugucucaaaaaaagaaa

SEQ ID NO: 1983115 - RNA, 22 nt, Human
cugucucaagagggcacuggug

SEQ ID NO: 1983116 - RNA, 16 nt, Human
cugucucaaaaaaaga

SEQ ID NO: 1983117 - RNA, 23 nt, Human
cugucucaaaaaaacacaaaagu

SEQ ID NO: 1983118 - RNA, 20 nt, Human
cuguccuaaggaaccuuccu

SEQ ID NO: 1983119 - RNA, 17 nt, Human
cuguccuaaggaaccuu

SEQ ID NO: 1983120 - RNA, 14 nt, Human
cuguccuacccacc

SEQ ID NO: 1983121 - RNA, 15 nt, Human
cuguccgagcuuuga

SEQ ID NO: 1983122 - RNA, 22 nt, Human
cugucccuuacgugaguccugg

SEQ ID NO: 1983123 - RNA, 20 nt, Human
cugucccuuacgugaguccu

SEQ ID NO: 1983124 - RNA, 14 nt, Human
cuguccgagcuuug

SEQ ID NO: 1983125 - RNA, 15 nt, Human
cugucccugaaaccu

SEQ ID NO: 1983126 - RNA, 22 nt, Human
cuguccccgcacugggcuuggg

SEQ ID NO: 1983127 - RNA, 19 nt, Human
cuguccccgcacugggcuu

SEQ ID NO: 1983128 - RNA, 18 nt, Human
cuguccccgcacugggcu

SEQ ID NO: 1983129 - RNA, 17 nt, Human
cuguccccgcacugggc

SEQ ID NO: 1983130 - RNA, 18 nt, Human
cugucaagaggcaaagga

SEQ ID NO: 1983131 - RNA, 13 nt, Human
cugucaaggcuca

SEQ ID NO: 1983132 - RNA, 14 nt, Human
cugucaaggcucag

SEQ ID NO: 1983133 - RNA, 12 nt, Human
cugucaaacauu

SEQ ID NO: 1983134 - RNA, 13 nt, Human
cugucaaacauua

SEQ ID NO: 1983135 - RNA, 15 nt, Human
cugucaaacauuagu

SEQ ID NO: 1983136 - RNA, 20 nt, Human
cugucaaacauuaguacuuu

SEQ ID NO: 1983137 - RNA, 21 nt, Human
cugucaaacauuaguacuuua

SEQ ID NO: 1983138 - RNA, 22 nt, Human
cugucaaacauuaguacuuuau

SEQ ID NO: 1983139 - RNA, 23 nt, Human
cugucaaacauuaguacuuuaua

SEQ ID NO: 1983140 - RNA, 23 nt, Human
cuguccaggcacugcugcccagc

SEQ ID NO: 1983141 - RNA, 17 nt, Human
cuguccaggcacugcug

SEQ ID NO: 1983142 - RNA, 23 nt, Human
cuguaucccaugagccucagcau

SEQ ID NO: 1983143 - RNA, 16 nt, Human
cuguauacguuucaaa

SEQ ID NO: 1983144 - RNA, 21 nt, Human
cuguauaucaggguacaaaaa

SEQ ID NO: 1983145 - RNA, 21 nt, Human
cuguauagacaggagaagaaa

SEQ ID NO: 1983146 - RNA, 13 nt, Human
cuguacagagccc

SEQ ID NO: 1983147 - RNA, 15 nt, Human
cuguacaaugacuuu

SEQ ID NO: 1983148 - RNA, 14 nt, Human
cuuauagacaacau

SEQ ID NO: 1983149 - RNA, 12 nt, Human
cuuauaaaacag

SEQ ID NO: 1983150 - RNA, 15 nt, Human
cuuauaaaacagagu

SEQ ID NO: 1983151 - RNA, 14 nt, Human
cuuauaaaacagag

SEQ ID NO: 1983152 - RNA, 20 nt, Human
cuuauccacgagagcgcagc

SEQ ID NO: 1983153 - RNA, 21 nt, Human
cuuauccacgagagcgcagca

SEQ ID NO: 1983154 - RNA, 19 nt, Human
cuuauaucuauauuuuaca

SEQ ID NO: 1983155 - RNA, 20 nt, Human
cuuauaucuaaaucugucca

SEQ ID NO: 1983156 - RNA, 13 nt, Human
cuuauauuaugga

SEQ ID NO: 1983157 - RNA, 14 nt, Human
cuuagucacugaga

SEQ ID NO: 1983158 - RNA, 19 nt, Human
cuuagucacugagacagcc

SEQ ID NO: 1983159 - RNA, 18 nt, Human
cuuagucacugagacagc

SEQ ID NO: 1983160 - RNA, 18 nt, Human
cuuagugggguuuuauau

SEQ ID NO: 1983161 - RNA, 20 nt, Human
cuuagugggguuuuauaucc

SEQ ID NO: 1983162 - RNA, 12 nt, Human
cuuaguggacag

SEQ ID NO: 1983163 - RNA, 13 nt, Human
cuuagauguauau

SEQ ID NO: 1983164 - RNA, 16 nt, Human
cuuagucacugagaca

SEQ ID NO: 1983165 - RNA, 19 nt, Human
cuuagauguauauauuucc

SEQ ID NO: 1983166 - RNA, 13 nt, Human
cuguucugguaau

SEQ ID NO: 1983167 - RNA, 16 nt, Human
cuguucuggcagaguu

SEQ ID NO: 1983168 - RNA, 16 nt, Human
cuguucugcacacagc

SEQ ID NO: 1983169 - RNA, 17 nt, Human
cuucaaagcaaaugucu

SEQ ID NO: 1983170 - RNA, 21 nt, Human
cuucaaaauauaaaaugccaa

SEQ ID NO: 1983171 - RNA, 21 nt, Human
cuucaaaaguuuguuugcuua

SEQ ID NO: 1983172 - RNA, 18 nt, Human
cuuauuuguauuuuuccu

SEQ ID NO: 1983173 - RNA, 18 nt, Human
cuuauuuaaugaaagacu

SEQ ID NO: 1983174 - RNA, 20 nt, Human
cuuaucucagauauuugcac

SEQ ID NO: 1983175 - RNA, 23 nt, Human
cuuauuucacuuuaguuuuugaa

SEQ ID NO: 1983176 - RNA, 17 nt, Human
cuuauuuaaugaaagac

SEQ ID NO: 1983177 - RNA, 20 nt, Human
cuuaucuagcugcauaucuu

SEQ ID NO: 1983178 - RNA, 15 nt, Human
cuuaucucagauauu

SEQ ID NO: 1983179 - RNA, 19 nt, Human
cuuaucucagauauuugca

SEQ ID NO: 1983180 - RNA, 15 nt, Human
cuuaucuagcugcau

SEQ ID NO: 1983181 - RNA, 16 nt, Human
cuucaaggauccugag

SEQ ID NO: 1983182 - RNA, 15 nt, Human
cuucaaggauccuga

SEQ ID NO: 1983183 - RNA, 13 nt, Human
cuucaaggauccu

SEQ ID NO: 1983184 - RNA, 10 nt, Human
cuucaaggau

SEQ ID NO: 1983185 - RNA, 18 nt, Human
cuucaagcugcuuuuugu

SEQ ID NO: 1983186 - RNA, 20 nt, Human
cuucaaccauuccccauggg

SEQ ID NO: 1983187 - RNA, 16 nt, Human
cuucaaccauucccca

SEQ ID NO: 1983188 - RNA, 23 nt, Human
cuucacagaugggugcuuggagg

SEQ ID NO: 1983189 - RNA, 23 nt, Human
cuucaaucaauaacagccgcucc

SEQ ID NO: 1983190 - RNA, 20 nt, Human
cuucaaucaauaacagccgc

SEQ ID NO: 1983191 - RNA, 15 nt, Human
cuuccaggggaaccu

SEQ ID NO: 1983192 - RNA, 16 nt, Human
cuuccaggggaaccug

SEQ ID NO: 1983193 - RNA, 19 nt, Human
cuuccaggggaaccugcca

SEQ ID NO: 1983194 - RNA, 21 nt, Human
cuuccaggggugggacacccu

SEQ ID NO: 1983195 - RNA, 17 nt, Human
cuuccaggggugggaca

SEQ ID NO: 1983196 - RNA, 15 nt, Human
cuuccagggguggga

SEQ ID NO: 1983197 - RNA, 14 nt, Human
cuuccagggguggg

SEQ ID NO: 1983198 - RNA, 12 nt, Human
cuuccaggcagc

SEQ ID NO: 1983199 - RNA, 13 nt, Human
cuuccaggcagcc

SEQ ID NO: 1983200 - RNA, 19 nt, Human
cuuccaggcugggagagcc

SEQ ID NO: 1983201 - RNA, 16 nt, Human
cuuccaggcugggaga

SEQ ID NO: 1983202 - RNA, 15 nt, Human
cuuccaggcugggag

SEQ ID NO: 1983203 - RNA, 13 nt, Human
cuucccccucccc

SEQ ID NO: 1983204 - RNA, 17 nt, Human
cuucccuacaguugaaa

SEQ ID NO: 1983205 - RNA, 23 nt, Human
cuucccgcucagcccucccugcc

SEQ ID NO: 1983206 - RNA, 18 nt, Human
cuucccgcucagcccucc

SEQ ID NO: 1983207 - RNA, 19 nt, Human
cuucccgcucagcccuccc

SEQ ID NO: 1983208 - RNA, 14 nt, Human
cuuccccuuccuuc

SEQ ID NO: 1983209 - RNA, 20 nt, Human
cuucccugguucaagcgauu

SEQ ID NO: 1983210 - RNA, 13 nt, Human
cuuccucccucau

SEQ ID NO: 1983211 - RNA, 14 nt, Human
cuuccuccauccuc

SEQ ID NO: 1983212 - RNA, 17 nt, Human
cuuccuccauccuccuc

SEQ ID NO: 1983213 - RNA, 23 nt, Human
cuuccuccauccuccuccuuccu

SEQ ID NO: 1983214 - RNA, 23 nt, Human
cuuccucauucccucgucuuucc

SEQ ID NO: 1983215 - RNA, 14 nt, Human
cuuccuccaaggac

SEQ ID NO: 1983216 - RNA, 13 nt, Human
cuuccuaauucca

SEQ ID NO: 1983217 - RNA, 17 nt, Human
cuuccuaauuccacagc

SEQ ID NO: 1983218 - RNA, 18 nt, Human
cuuccuaauuccacagcu

SEQ ID NO: 1983219 - RNA, 19 nt, Human
cuuccuaauuccacagcug

SEQ ID NO: 1983220 - RNA, 21 nt, Human
cuucccuugcuaccacggccu

SEQ ID NO: 1983221 - RNA, 14 nt, Human
cuuccaggcuggga

SEQ ID NO: 1983222 - RNA, 12 nt, Human
cuuccaggcugg

SEQ ID NO: 1983223 - RNA, 11 nt, Human
cuuccaggcag

SEQ ID NO: 1983224 - RNA, 16 nt, Human
cuuccacaagagccca

SEQ ID NO: 1983225 - RNA, 14 nt, Human
cuuccaccugcucu

SEQ ID NO: 1983226 - RNA, 15 nt, Human
cuuccaccugcucug

SEQ ID NO: 1983227 - RNA, 16 nt, Human
cuuccaccugcucugc

SEQ ID NO: 1983228 - RNA, 17 nt, Human
cuuccaccugcucugcu

SEQ ID NO: 1983229 - RNA, 18 nt, Human
cuuccaccugcucugcug

SEQ ID NO: 1983230 - RNA, 21 nt, Human
cuuccacaagagcccaggccu

SEQ ID NO: 1983231 - RNA, 19 nt, Human
cuuccacaagagcccaggc

SEQ ID NO: 1983232 - RNA, 17 nt, Human
cuuccacaagagcccag

SEQ ID NO: 1983233 - RNA, 20 nt, Human
cuucauucaacccaccugcg

SEQ ID NO: 1983234 - RNA, 17 nt, Human
cuucaguggcagcugcu

SEQ ID NO: 1983235 - RNA, 22 nt, Human
cuucagugccuuauggaacacu

SEQ ID NO: 1983236 - RNA, 18 nt, Human
cuucagugccuuauggaa

SEQ ID NO: 1983237 - RNA, 13 nt, Human
cuucaguggcagc

SEQ ID NO: 1983238 - RNA, 14 nt, Human
cuucaguggcagcu

SEQ ID NO: 1983239 - RNA, 15 nt, Human
cuucaguggcagcug

SEQ ID NO: 1983240 - RNA, 16 nt, Human
cuucaguggcagcugc

SEQ ID NO: 1983241 - RNA, 23 nt, Human
cuucaguaagccgugauuuucau

SEQ ID NO: 1983242 - RNA, 16 nt, Human
cuucaguaagccguga

SEQ ID NO: 1983243 - RNA, 15 nt, Human
cuucagggagugagg

SEQ ID NO: 1983244 - RNA, 20 nt, Human
cuucagggagucagcuguuu

SEQ ID NO: 1983245 - RNA, 15 nt, Human
cuucagggcagauuu

SEQ ID NO: 1983246 - RNA, 16 nt, Human
cuucagggcagauuuu

SEQ ID NO: 1983247 - RNA, 17 nt, Human
cuucagggcagauuuua

SEQ ID NO: 1983248 - RNA, 22 nt, Human
cuucagggcagauuuuaguuuu

SEQ ID NO: 1983249 - RNA, 18 nt, Human
cuucaccccaaucccagc

SEQ ID NO: 1983250 - RNA, 19 nt, Human
cuucaggcucuucuccuuu

SEQ ID NO: 1983251 - RNA, 22 nt, Human
cuucaggcucuucuccuuucac

SEQ ID NO: 1983252 - RNA, 17 nt, Human
cuucagggagucagcug

SEQ ID NO: 1983253 - RNA, 18 nt, Human
cuucagggagucagcugu

SEQ ID NO: 1983254 - RNA, 16 nt, Human
cuugagccugggaggu

SEQ ID NO: 1983255 - RNA, 19 nt, Human
cuugacguauuauuguccu

SEQ ID NO: 1983256 - RNA, 16 nt, Human
cuugaccugcugaagu

SEQ ID NO: 1983257 - RNA, 18 nt, Human
cuugaccucacucagaag

SEQ ID NO: 1983258 - RNA, 13 nt, Human
cuugacccugcac

SEQ ID NO: 1983259 - RNA, 14 nt, Human
cuugacccugcacc

SEQ ID NO: 1983260 - RNA, 15 nt, Human
cuugacccugcaccc

SEQ ID NO: 1983261 - RNA, 16 nt, Human
cuugacccugcacccu

SEQ ID NO: 1983262 - RNA, 18 nt, Human
cuugacccugcacccucc

SEQ ID NO: 1983263 - RNA, 22 nt, Human
cuugacccugcacccuccuagg

SEQ ID NO: 1983264 - RNA, 17 nt, Human
cuugagccuugaacuuu

SEQ ID NO: 1983265 - RNA, 18 nt, Human
cuugagccuugaacuuug

SEQ ID NO: 1983266 - RNA, 19 nt, Human
cuugagccugucaagaggc

SEQ ID NO: 1983267 - RNA, 15 nt, Human
cuugagccuugaacu

SEQ ID NO: 1983268 - RNA, 20 nt, Human
cuugaggaaacaacagcuuu

SEQ ID NO: 1983269 - RNA, 18 nt, Human
cuugaggaaacaacagcu

SEQ ID NO: 1983270 - RNA, 13 nt, Human
cuugaggaaacaa

SEQ ID NO: 1983271 - RNA, 21 nt, Human
cuugaggaaacaacagcuuua

SEQ ID NO: 1983272 - RNA, 21 nt, Human
cuugaggguugggcugguguc

SEQ ID NO: 1983273 - RNA, 19 nt, Human
cuugaggguugggcuggug

SEQ ID NO: 1983274 - RNA, 20 nt, Human
cuugaggguugggcuggugu

SEQ ID NO: 1983275 - RNA, 23 nt, Human
cuugaccauucuccaccugccag

SEQ ID NO: 1983276 - RNA, 22 nt, Human
cuugaccauucuccaccugcca

SEQ ID NO: 1983277 - RNA, 17 nt, Human
cuugaccgugaggccag

SEQ ID NO: 1983278 - RNA, 16 nt, Human
cuugaagacuuuucuu

SEQ ID NO: 1983279 - RNA, 20 nt, Human
cuugaccgugaggccagaga

SEQ ID NO: 1983280 - RNA, 18 nt, Human
cuugaccgugaggccaga

SEQ ID NO: 1983281 - RNA, 21 nt, Human
cuugaccgugaggccagagac

SEQ ID NO: 1983282 - RNA, 13 nt, Human
cuugaccucaggu

SEQ ID NO: 1983283 - RNA, 17 nt, Human
cuugaacuuugaccucu

SEQ ID NO: 1983284 - RNA, 21 nt, Human
cuugaacuuugaccucugcag

SEQ ID NO: 1983285 - RNA, 18 nt, Human
cuugaacuccugaccuca

SEQ ID NO: 1983286 - RNA, 14 nt, Human
cuugaaccauaaaa

SEQ ID NO: 1983287 - RNA, 17 nt, Human
cuugaaccauaaaaugu

SEQ ID NO: 1983288 - RNA, 13 nt, Human
cuugaacuccugg

SEQ ID NO: 1983289 - RNA, 13 nt, Human
cuugaacuccuga

SEQ ID NO: 1983290 - RNA, 16 nt, Human
cuugaacuccugaccu

SEQ ID NO: 1983291 - RNA, 18 nt, Human
cuugaaaauuaacaugaa

SEQ ID NO: 1983292 - RNA, 13 nt, Human
cuugaaaauuaac

SEQ ID NO: 1983293 - RNA, 12 nt, Human
cuugaaaauuaa

SEQ ID NO: 1983294 - RNA, 21 nt, Human
cuugaaaagagacaggcaggu

SEQ ID NO: 1983295 - RNA, 15 nt, Human
cuugaaaagagacag

SEQ ID NO: 1983296 - RNA, 18 nt, Human
cuugaaaagagacaggca

SEQ ID NO: 1983297 - RNA, 23 nt, Human
cuugaaaacacuguucucugccc

SEQ ID NO: 1983298 - RNA, 14 nt, Human
cuugaaaacacugu

SEQ ID NO: 1983299 - RNA, 18 nt, Human
cuugaaaaaugcauguug

SEQ ID NO: 1983300 - RNA, 12 nt, Human
cuugaaaaaugc

SEQ ID NO: 1983301 - RNA, 22 nt, Human
cuucuuuauaauucuacuuuga

SEQ ID NO: 1983302 - RNA, 17 nt, Human
cuucuuuuuuugugaug

SEQ ID NO: 1983303 - RNA, 21 nt, Human
cuucuguggguuucuaaagcu

SEQ ID NO: 1983304 - RNA, 14 nt, Human
cuucuguggguuuc

SEQ ID NO: 1983305 - RNA, 13 nt, Human
cuucuguggguuu

SEQ ID NO: 1983306 - RNA, 15 nt, Human
cuucuguggcucaca

SEQ ID NO: 1983307 - RNA, 22 nt, Human
cuucuguggcucacagaacccu

SEQ ID NO: 1983308 - RNA, 13 nt, Human
cuucuguggcuca

SEQ ID NO: 1983309 - RNA, 20 nt, Human
cuucugugcccagaauacug

SEQ ID NO: 1983310 - RNA, 21 nt, Human
cuucugugcccagaauacuga

SEQ ID NO: 1983311 - RNA, 14 nt, Human
cuucugugcccaga

SEQ ID NO: 1983312 - RNA, 19 nt, Human
cuucugugcccagaauacu

SEQ ID NO: 1983313 - RNA, 15 nt, Human
cuucuguccaagcag

SEQ ID NO: 1983314 - RNA, 15 nt, Human
cuucuguugcugccu

SEQ ID NO: 1983315 - RNA, 23 nt, Human
cuucugugcccagaauacugaug

SEQ ID NO: 1983316 - RNA, 17 nt, Human
cuucuguguuugaacug

SEQ ID NO: 1983317 - RNA, 21 nt, Human
cuucuguacgucugacaggca

SEQ ID NO: 1983318 - RNA, 14 nt, Human
cuucuguacgucug

SEQ ID NO: 1983319 - RNA, 15 nt, Human
cuucuguacgucuga

SEQ ID NO: 1983320 - RNA, 18 nt, Human
cuucuguacgucugacag

SEQ ID NO: 1983321 - RNA, 20 nt, Human
cuucuguacgucugacaggc

SEQ ID NO: 1983322 - RNA, 16 nt, Human
cuucuguccuacucug

SEQ ID NO: 1983323 - RNA, 17 nt, Human
cuucuguccuacucugu

SEQ ID NO: 1983324 - RNA, 18 nt, Human
cuucuguccuacucugug

SEQ ID NO: 1983325 - RNA, 19 nt, Human
cuucuguccuacucugugu

SEQ ID NO: 1983326 - RNA, 21 nt, Human
cuucuguccuacucuguguca

SEQ ID NO: 1983327 - RNA, 18 nt, Human
cuucuggugaccuuccaa

SEQ ID NO: 1983328 - RNA, 20 nt, Human
cuucuggugaccuuccaaga

SEQ ID NO: 1983329 - RNA, 21 nt, Human
cuucuggugaccuuccaagag

SEQ ID NO: 1983330 - RNA, 14 nt, Human
cuucugguugaugc

SEQ ID NO: 1983331 - RNA, 16 nt, Human
cuucuggguuccuucc

SEQ ID NO: 1983332 - RNA, 17 nt, Human
cuucuggguuccuuccu

SEQ ID NO: 1983333 - RNA, 23 nt, Human
cuucuggguuccuuccucugagc

SEQ ID NO: 1983334 - RNA, 13 nt, Human
cuucugcuucagc

SEQ ID NO: 1983335 - RNA, 23 nt, Human
cuucugccugaggggcagccugc

SEQ ID NO: 1983336 - RNA, 19 nt, Human
cuucucuccagccccugga

SEQ ID NO: 1983337 - RNA, 17 nt, Human
cuucucuccagccccug

SEQ ID NO: 1983338 - RNA, 15 nt, Human
cuucucuccagcccc

SEQ ID NO: 1983339 - RNA, 13 nt, Human
cuucucuccagcc

SEQ ID NO: 1983340 - RNA, 12 nt, Human
cuucucuccagc

SEQ ID NO: 1983341 - RNA, 19 nt, Human
cuucuccuucaccuuuguc

SEQ ID NO: 1983342 - RNA, 13 nt, Human
cuucucugaagga

SEQ ID NO: 1983343 - RNA, 13 nt, Human
cuucucucugcuc

SEQ ID NO: 1983344 - RNA, 14 nt, Human
cuucucucugcucu

SEQ ID NO: 1983345 - RNA, 20 nt, Human
cuucuccacuuucuagccag

SEQ ID NO: 1983346 - RNA, 11 nt, Human
cuucuccacuu

SEQ ID NO: 1983347 - RNA, 13 nt, Human
cuucuccacugga

SEQ ID NO: 1983348 - RNA, 14 nt, Human
cuucuccacuggau

SEQ ID NO: 1983349 - RNA, 15 nt, Human
cuucuccacuggaug

SEQ ID NO: 1983350 - RNA, 23 nt, Human
cuuccuggccggugugggggccc

SEQ ID NO: 1983351 - RNA, 18 nt, Human
cuuccugggcacacgcug

SEQ ID NO: 1983352 - RNA, 19 nt, Human
cuuccugggcacacgcugc

SEQ ID NO: 1983353 - RNA, 15 nt, Human
cuuccucccucauuc

SEQ ID NO: 1983354 - RNA, 20 nt, Human
cuuccugggcacacgcugcu

SEQ ID NO: 1983355 - RNA, 21 nt, Human
cuuccugggcacacgcugcuc

SEQ ID NO: 1983356 - RNA, 22 nt, Human
cuuccugggcacacgcugcucu

SEQ ID NO: 1983357 - RNA, 23 nt, Human
cuuccugggcacacgcugcucug

SEQ ID NO: 1983358 - RNA, 17 nt, Human
cuuccuggucgaaaguu

SEQ ID NO: 1983359 - RNA, 21 nt, Human
cuuccugucaagcaaucaaga

SEQ ID NO: 1983360 - RNA, 12 nt, Human
cuucuccaggcu

SEQ ID NO: 1983361 - RNA, 17 nt, Human
cuucuccacuggaugga

SEQ ID NO: 1983362 - RNA, 13 nt, Human
cuucuccaggcug

SEQ ID NO: 1983363 - RNA, 17 nt, Human
cuucucccccauccuac

SEQ ID NO: 1983364 - RNA, 15 nt, Human
cuucuccccuuccau

SEQ ID NO: 1983365 - RNA, 14 nt, Human
cuucuccccuucca

SEQ ID NO: 1983366 - RNA, 19 nt, Human
cuucuccccuuccauuucu

SEQ ID NO: 1983367 - RNA, 20 nt, Human
cuucuccccuuccauuucug

SEQ ID NO: 1983368 - RNA, 14 nt, Human
cuuugaccucugca

SEQ ID NO: 1983369 - RNA, 15 nt, Human
cuuugaccucugcag

SEQ ID NO: 1983370 - RNA, 12 nt, Human
cuuucuuccucu

SEQ ID NO: 1983371 - RNA, 13 nt, Human
cuuucuuccucug

SEQ ID NO: 1983372 - RNA, 14 nt, Human
cuuucuuccucugc

SEQ ID NO: 1983373 - RNA, 15 nt, Human
cuuucuuccucugcu

SEQ ID NO: 1983374 - RNA, 17 nt, Human
cuuugaccucugcagca

SEQ ID NO: 1983375 - RNA, 18 nt, Human
cuuugaccucugcagcaa

SEQ ID NO: 1983376 - RNA, 20 nt, Human
cuuugaccucugcagcaaua

SEQ ID NO: 1983377 - RNA, 24 nt, Human
cuuugaccucugcagcaauaaagc

SEQ ID NO: 1983378 - RNA, 21 nt, Human
cuuugcaguucccaucuccuu

SEQ ID NO: 1983379 - RNA, 16 nt, Human
cuuugcagacaggcaa

SEQ ID NO: 1983380 - RNA, 13 nt, Human
cuuugaccucugc

SEQ ID NO: 1983381 - RNA, 20 nt, Human
cuuugcagacaggcaagcac

SEQ ID NO: 1983382 - RNA, 15 nt, Human
cuuuguccccaccgc

SEQ ID NO: 1983383 - RNA, 20 nt, Human
cuuugucuaagaaacauugg

SEQ ID NO: 1983384 - RNA, 23 nt, Human
cuuugucuacuucaaaaguuugu

SEQ ID NO: 1983385 - RNA, 21 nt, Human
cuuugucuaagaaacauugga

SEQ ID NO: 1983386 - RNA, 23 nt, Human
cuuugucuaagaaacauuggaag

SEQ ID NO: 1983387 - RNA, 19 nt, Human
cuuugucuccucuauccug

SEQ ID NO: 1983388 - RNA, 15 nt, Human
cuuugugaggaagcc

SEQ ID NO: 1983389 - RNA, 14 nt, Human
cuuuguccccaccg

SEQ ID NO: 1983390 - RNA, 22 nt, Human
cuuuguauuguccuauuagugu

SEQ ID NO: 1983391 - RNA, 12 nt, Human
cuuuguauuguc

SEQ ID NO: 1983392 - RNA, 15 nt, Human
cuuuguauuguccua

SEQ ID NO: 1983393 - RNA, 16 nt, Human
cuuuguauuguccuau

SEQ ID NO: 1983394 - RNA, 22 nt, Human
cuuuggccugaugaccaauuuu

SEQ ID NO: 1983395 - RNA, 19 nt, Human
cuuuggcuaugagggccuu

SEQ ID NO: 1983396 - RNA, 19 nt, Human
cuuuggcuauuagagauca

SEQ ID NO: 1983397 - RNA, 16 nt, Human
cuuucccucccuuccu

SEQ ID NO: 1983398 - RNA, 14 nt, Human
cuuucccucccuuc

SEQ ID NO: 1983399 - RNA, 13 nt, Human
cuuucccucccuu

SEQ ID NO: 1983400 - RNA, 11 nt, Human
cuuucccuccc

SEQ ID NO: 1983401 - RNA, 12 nt, Human
cuuucccuucca

SEQ ID NO: 1983402 - RNA, 12 nt, Human
cuuuccugaggc

SEQ ID NO: 1983403 - RNA, 13 nt, Human
cuuucccuuccag

SEQ ID NO: 1983404 - RNA, 14 nt, Human
cuuucccuuccagu

SEQ ID NO: 1983405 - RNA, 14 nt, Human
cuuucccuuccucc

SEQ ID NO: 1983406 - RNA, 15 nt, Human
cuuucccaaaggcau

SEQ ID NO: 1983407 - RNA, 15 nt, Human
cuuuccaggaaggcu

SEQ ID NO: 1983408 - RNA, 23 nt, Human
cuuuccauauccauagugacuuu

SEQ ID NO: 1983409 - RNA, 15 nt, Human
cuuuccaucuacccu

SEQ ID NO: 1983410 - RNA, 14 nt, Human
cuuucucugaggac

SEQ ID NO: 1983411 - RNA, 15 nt, Human
cuuucucugaggaca

SEQ ID NO: 1983412 - RNA, 21 nt, Human
cuuucucuucauauucagcuu

SEQ ID NO: 1983413 - RNA, 15 nt, Human
cuuuccugaggcugg

SEQ ID NO: 1983414 - RNA, 13 nt, Human
cuuuccugaggcu

SEQ ID NO: 1983415 - RNA, 12 nt, Human
cuuucucugagg

SEQ ID NO: 1983416 - RNA, 15 nt, Human
cuuucccuuccucca

SEQ ID NO: 1983417 - RNA, 17 nt, Human
cuuucuggcuaugcauu

SEQ ID NO: 1983418 - RNA, 18 nt, Human
cuuucuggcuaugcauuu

SEQ ID NO: 1983419 - RNA, 19 nt, Human
cuuucuggcuaugcauuug

SEQ ID NO: 1983420 - RNA, 20 nt, Human
cuuucuggcuaugcauuuga

SEQ ID NO: 1983421 - RNA, 11 nt, Human
cuuucuuccuc

SEQ ID NO: 1983422 - RNA, 12 nt, Human
cuuucuuccuca

SEQ ID NO: 1983423 - RNA, 17 nt, Human
cuuucuuccucauuccc

SEQ ID NO: 1983424 - RNA, 21 nt, Human
cuuucuuccucauucccucgu

SEQ ID NO: 1983425 - RNA, 17 nt, Human
cuuucugggguuuuucu

SEQ ID NO: 1983426 - RNA, 18 nt, Human
cuuucugggguuuuucug

SEQ ID NO: 1983427 - RNA, 19 nt, Human
cuuucugggguuuuucugu

SEQ ID NO: 1983428 - RNA, 20 nt, Human
cuuucugggguuuuucuguu

SEQ ID NO: 1983429 - RNA, 20 nt, Human
cuuucugggcaccggggccu

SEQ ID NO: 1983430 - RNA, 16 nt, Human
cuuguaaauagcucag

SEQ ID NO: 1983431 - RNA, 23 nt, Human
cuugaguuguuuuuguauauugg

SEQ ID NO: 1983432 - RNA, 23 nt, Human
cuuggggggcugaggugggagga

SEQ ID NO: 1983433 - RNA, 21 nt, Human
cuugaguuguuuuuguauauu

SEQ ID NO: 1983434 - RNA, 22 nt, Human
cuugaguuguuuuuguauauug

SEQ ID NO: 1983435 - RNA, 21 nt, Human
cuugaguuggggccauugcuu

SEQ ID NO: 1983436 - RNA, 18 nt, Human
cuugaguuguuuuuguau

SEQ ID NO: 1983437 - RNA, 19 nt, Human
cuugaguuguuuuuguaua

SEQ ID NO: 1983438 - RNA, 20 nt, Human
cuugaguuguuuuuguauau

SEQ ID NO: 1983439 - RNA, 19 nt, Human
cuugaguuuaaauuguaau

SEQ ID NO: 1983440 - RNA, 15 nt, Human
cuuguacauaaugcg

SEQ ID NO: 1983441 - RNA, 12 nt, Human
cuuguacauaau

SEQ ID NO: 1983442 - RNA, 17 nt, Human
cuuguaaauagcucagg

SEQ ID NO: 1983443 - RNA, 18 nt, Human
cuuguaaauagcucaggu

SEQ ID NO: 1983444 - RNA, 19 nt, Human
cuuguacauaaugcgugca

SEQ ID NO: 1983445 - RNA, 21 nt, Human
cuuguacauaaugcgugcaua

SEQ ID NO: 1983446 - RNA, 22 nt, Human
cuuguacauaaugcgugcauac

SEQ ID NO: 1983447 - RNA, 21 nt, Human
cuuguaaauagcucagguguc

SEQ ID NO: 1983448 - RNA, 15 nt, Human
cuugucauuuugguc

SEQ ID NO: 1983449 - RNA, 15 nt, Human
cuuguauauucuauu

SEQ ID NO: 1983450 - RNA, 13 nt, Human
cuuguaguucuuu

SEQ ID NO: 1983451 - RNA, 15 nt, Human
cuuguaguucuuuaa

SEQ ID NO: 1983452 - RNA, 20 nt, Human
cuuguaguucuuuaaacugu

SEQ ID NO: 1983453 - RNA, 16 nt, Human
cuuguuauucaacagc

SEQ ID NO: 1983454 - RNA, 22 nt, Human
cuuuaccuuuuuuauacauaaa

SEQ ID NO: 1983455 - RNA, 12 nt, Human
cuuuaaaauucu

SEQ ID NO: 1983456 - RNA, 13 nt, Human
cuuuacuauggcc

SEQ ID NO: 1983457 - RNA, 16 nt, Human
cuuuagcaaagaacuc

SEQ ID NO: 1983458 - RNA, 19 nt, Human
cuuuauaauucuacuuuga

SEQ ID NO: 1983459 - RNA, 13 nt, Human
cuuuauaauucua

SEQ ID NO: 1983460 - RNA, 14 nt, Human
cuuuagcgcccagu

SEQ ID NO: 1983461 - RNA, 15 nt, Human
cuuuagcgcccaguu

SEQ ID NO: 1983462 - RNA, 15 nt, Human
cuuuaugcacaaaau

SEQ ID NO: 1983463 - RNA, 23 nt, Human
cuuuaucuugaauaauguaagac

SEQ ID NO: 1983464 - RNA, 19 nt, Human
cuuuaucuaccaacuuuca

SEQ ID NO: 1983465 - RNA, 20 nt, Human
cuuuaucuaccaacuuucaa

SEQ ID NO: 1983466 - RNA, 21 nt, Human
cuuuaucuaccaacuuucaag

SEQ ID NO: 1983467 - RNA, 22 nt, Human
cuuuaucuaccaacuuucaaga

SEQ ID NO: 1983468 - RNA, 21 nt, Human
cuuuaucuugaauaauguaag

SEQ ID NO: 1983469 - RNA, 18 nt, Human
cuuuaucuugaauaaugu

SEQ ID NO: 1983470 - RNA, 22 nt, Human
gaaagcagaacagugauuacca

SEQ ID NO: 1983471 - RNA, 17 nt, Human
gaaagcagaacagugau

SEQ ID NO: 1983472 - RNA, 22 nt, Human
gaaagaggguaauaaccagaca

SEQ ID NO: 1983473 - RNA, 16 nt, Human
gaaagaguaggaagac

SEQ ID NO: 1983474 - RNA, 15 nt, Human
gaaagaguaggaaga

SEQ ID NO: 1983475 - RNA, 21 nt, Human
gaaagaguacucuuguuuccu

SEQ ID NO: 1983476 - RNA, 18 nt, Human
gaaagaggcacccuucca

SEQ ID NO: 1983477 - RNA, 19 nt, Human
gaaagaggcacccuuccau

SEQ ID NO: 1983478 - RNA, 21 nt, Human
gaaagaggaaugaaguacuca

SEQ ID NO: 1983479 - RNA, 15 nt, Human
gaaagaggaaaagaa

SEQ ID NO: 1983480 - RNA, 16 nt, Human
gaaagaggaaaagaaa

SEQ ID NO: 1983481 - RNA, 17 nt, Human
gaaagacuguacaaagu

SEQ ID NO: 1983482 - RNA, 17 nt, Human
gaaacucuauggucuua

SEQ ID NO: 1983483 - RNA, 19 nt, Human
gaaagacuuuuccaacccu

SEQ ID NO: 1983484 - RNA, 14 nt, Human
gaaagcagggacuu

SEQ ID NO: 1983485 - RNA, 22 nt, Human
gaaagcccugagcuuucugcua

SEQ ID NO: 1983486 - RNA, 21 nt, Human
gaaagcccugagcuuucugcu

SEQ ID NO: 1983487 - RNA, 17 nt, Human
gaaagcccugagcuuuc

SEQ ID NO: 1983488 - RNA, 22 nt, Human
gaaagccuuucauuuugcuuua

SEQ ID NO: 1983489 - RNA, 23 nt, Human
gaaagccuuucauuuugcuuuaa

SEQ ID NO: 1983490 - RNA, 14 nt, Human
gaaagccuuucauu

SEQ ID NO: 1983491 - RNA, 17 nt, Human
gaaagccuuucauuuug

SEQ ID NO: 1983492 - RNA, 21 nt, Human
gaaagccuuucauuuugcuuu

SEQ ID NO: 1983493 - RNA, 18 nt, Human
gaaagccuuaagcugcag

SEQ ID NO: 1983494 - RNA, 19 nt, Human
gaaagccuuaagcugcagg

SEQ ID NO: 1983495 - RNA, 16 nt, Human
gaaagccuuagggaag

SEQ ID NO: 1983496 - RNA, 21 nt, Human
gaaagcugcugugaucccagu

SEQ ID NO: 1983497 - RNA, 14 nt, Human
gaaacaauuucugu

SEQ ID NO: 1983498 - RNA, 15 nt, Human
gaaaccaaagaagaa

SEQ ID NO: 1983499 - RNA, 16 nt, Human
gaaaccaaagaagaaa

SEQ ID NO: 1983500 - RNA, 19 nt, Human
gaaacccagcucuggucca

SEQ ID NO: 1983501 - RNA, 18 nt, Human
gaaacccagcucuggucc

SEQ ID NO: 1983502 - RNA, 16 nt, Human
gaaacccagcucuggu

SEQ ID NO: 1983503 - RNA, 15 nt, Human
gaaacccagcucugg

SEQ ID NO: 1983504 - RNA, 14 nt, Human
gaaacccagcucug

SEQ ID NO: 1983505 - RNA, 13 nt, Human
gaaacccagcucu

SEQ ID NO: 1983506 - RNA, 23 nt, Human
gaaacccagcucugguccauaga

SEQ ID NO: 1983507 - RNA, 19 nt, Human
gaaaccccuguaggccuca

SEQ ID NO: 1983508 - RNA, 17 nt, Human
gaaaccuaguacugccc

SEQ ID NO: 1983509 - RNA, 18 nt, Human
gaaaccuaguacugcccc

SEQ ID NO: 1983510 - RNA, 14 nt, Human
gaaacccugucucu

SEQ ID NO: 1983511 - RNA, 13 nt, Human
gaaaccugucuga

SEQ ID NO: 1983512 - RNA, 21 nt, Human
gaaacuagcuguuuaaaguuu

SEQ ID NO: 1983513 - RNA, 13 nt, Human
gaaacuaggucug

SEQ ID NO: 1983514 - RNA, 15 nt, Human
gaaacuccagaugcc

SEQ ID NO: 1983515 - RNA, 18 nt, Human
gaaacuaggucugauauu

SEQ ID NO: 1983516 - RNA, 11 nt, Human
cuuuuguucuu

SEQ ID NO: 1983517 - RNA, 12 nt, Human
cuuuuguucuug

SEQ ID NO: 1983518 - RNA, 15 nt, Human
cuuuguuaauuugga

SEQ ID NO: 1983519 - RNA, 16 nt, Human
cuuuuguucauuucau

SEQ ID NO: 1983520 - RNA, 18 nt, Human
cuuuuguucauuucaucc

SEQ ID NO: 1983521 - RNA, 19 nt, Human
cuuuuguucauuucauccu

SEQ ID NO: 1983522 - RNA, 20 nt, Human
cuuuguggauucugaggccc

SEQ ID NO: 1983523 - RNA, 18 nt, Human
cuuuguuaguuucuccaa

SEQ ID NO: 1983524 - RNA, 13 nt, Human
cuuuuuauuuaua

SEQ ID NO: 1983525 - RNA, 14 nt, Human
cuuuuuauuuauau

SEQ ID NO: 1983526 - RNA, 17 nt, Human
cuuuuuauuuauaugua

SEQ ID NO: 1983527 - RNA, 18 nt, Human
cuuuuuauuuauauguau

SEQ ID NO: 1983528 - RNA, 19 nt, Human
cuuuuuauuuauauguaug

SEQ ID NO: 1983529 - RNA, 12 nt, Human
cuuuuucuggac

SEQ ID NO: 1983530 - RNA, 16 nt, Human
cuuuuucuggacucug

SEQ ID NO: 1983531 - RNA, 19 nt, Human
cuuuuucuggacucuggac

SEQ ID NO: 1983532 - RNA, 12 nt, Human
cuuuuucuuaau

SEQ ID NO: 1983533 - RNA, 15 nt, Human
cuuuuucuuaaucau

SEQ ID NO: 1983534 - RNA, 22 nt, Human
cuuuuguucauuucauccuuuc

SEQ ID NO: 1983535 - RNA, 20 nt, Human
cuuuuguucuugguuuguaa

SEQ ID NO: 1983536 - RNA, 17 nt, Human
cuuuuuauggccuguga

SEQ ID NO: 1983537 - RNA, 16 nt, Human
cuuuuuuggcugcuga

SEQ ID NO: 1983538 - RNA, 15 nt, Human
gaaaaaggaggaaga

SEQ ID NO: 1983539 - RNA, 12 nt, Human
gaaaaaggagga

SEQ ID NO: 1983540 - RNA, 18 nt, Human
gaaaacacauuuuucuua

SEQ ID NO: 1983541 - RNA, 19 nt, Human
gaaaacacauuuuucuuag

SEQ ID NO: 1983542 - RNA, 18 nt, Human
gaaaacacuguucucugc

SEQ ID NO: 1983543 - RNA, 22 nt, Human
cuuuuuuggcugcugaaggcuc

SEQ ID NO: 1983544 - RNA, 20 nt, Human
cuuuuuuggcugcugaaggc

SEQ ID NO: 1983545 - RNA, 17 nt, Human
cuuuuuuggcugcugaa

SEQ ID NO: 1983546 - RNA, 16 nt, Human
cuuuuugaaaguaauu

SEQ ID NO: 1983547 - RNA, 13 nt, Human
gaaaacagaaauu

SEQ ID NO: 1983548 - RNA, 14 nt, Human
gaaaacagaaauug

SEQ ID NO: 1983549 - RNA, 15 nt, Human
gaaaacagaaauugg

SEQ ID NO: 1983550 - RNA, 20 nt, Human
gaaaacagaaauugguaccu

SEQ ID NO: 1983551 - RNA, 22 nt, Human
gaaaacacuguucucugcccuc

SEQ ID NO: 1983552 - RNA, 17 nt, Human
gaaaacacccagggaac

SEQ ID NO: 1983553 - RNA, 15 nt, Human
gaaaacacuguuauc

SEQ ID NO: 1983554 - RNA, 22 nt, Human
gaaaacacuguuaucauuuuuu

SEQ ID NO: 1983555 - RNA, 24 nt, Human
gaaaacacuguucucugcccucca

SEQ ID NO: 1983556 - RNA, 22 nt, Human
gaaaacguggcugcuucaagga

SEQ ID NO: 1983557 - RNA, 20 nt, Human
gaaaacguggcugcuucaag

SEQ ID NO: 1983558 - RNA, 19 nt, Human
gaaaagcugcugacagugu

SEQ ID NO: 1983559 - RNA, 19 nt, Human
gaaaacguggcugcuucaa

SEQ ID NO: 1983560 - RNA, 14 nt, Human
gaaaaguugaauuu

SEQ ID NO: 1983561 - RNA, 15 nt, Human
gaaaaguugaauuuu

SEQ ID NO: 1983562 - RNA, 16 nt, Human
gaaaaggccaagaggu

SEQ ID NO: 1983563 - RNA, 12 nt, Human
gaaaacuaaguu

SEQ ID NO: 1983564 - RNA, 14 nt, Human
gaaaagcuuuguuu

SEQ ID NO: 1983565 - RNA, 16 nt, Human
gaaaagcuuuguuugu

SEQ ID NO: 1983566 - RNA, 22 nt, Human
gaaaagcuuuguuuguucuugu

SEQ ID NO: 1983567 - RNA, 19 nt, Human
gaaaaggaagguaguucaa

SEQ ID NO: 1983568 - RNA, 13 nt, Human
gaaaauauuuaaa

SEQ ID NO: 1983569 - RNA, 16 nt, Human
gaaaauaaaaaaaaga

SEQ ID NO: 1983570 - RNA, 22 nt, Human
gaaaauaaaaaaaagaaaaaag

SEQ ID NO: 1983571 - RNA, 19 nt, Human
gaaaauaaaaaaagaaaaa

SEQ ID NO: 1983572 - RNA, 17 nt, Human
gaaaauaaaaaaaagaa

SEQ ID NO: 1983573 - RNA, 18 nt, Human
gaaaauaaaaaaaagaaa

SEQ ID NO: 1983574 - RNA, 19 nt, Human
gaaaauaaaaaaaagaaaa

SEQ ID NO: 1983575 - RNA, 21 nt, Human
gaaaauaaaaaaaagaaaaaa

SEQ ID NO: 1983576 - RNA, 22 nt, Human
gaaaaucagccugcuccagcug

SEQ ID NO: 1983577 - RNA, 20 nt, Human
gaaaaucagccugcuccagc

SEQ ID NO: 1983578 - RNA, 22 nt, Human
gaaaaucuacacuccagugaga

SEQ ID NO: 1983579 - RNA, 18 nt, Human
gaaaaucuuauaauuuaa

SEQ ID NO: 1983580 - RNA, 17 nt, Human
gaaaaucugaauuggaa

SEQ ID NO: 1983581 - RNA, 18 nt, Human
gaaaaucugaauuggaau

SEQ ID NO: 1983582 - RNA, 20 nt, Human
gaaaaucugaauuggaaugc

SEQ ID NO: 1983583 - RNA, 17 nt, Human
ccuggguuagacugcca

SEQ ID NO: 1983584 - RNA, 19 nt, Human
ccuggguuagacugccagc

SEQ ID NO: 1983585 - RNA, 20 nt, Human
ccuggguuagacugccagcu

SEQ ID NO: 1983586 - RNA, 21 nt, Human
ccuggguuagacugccagcuc

SEQ ID NO: 1983587 - RNA, 22 nt, Human
ccuggguuagacugccagcucu

SEQ ID NO: 1983588 - RNA, 20 nt, Human
ccugguccucacacucaccc

SEQ ID NO: 1983589 - RNA, 21 nt, Human
ccuggucgccuuccaccucug

SEQ ID NO: 1983590 - RNA, 16 nt, Human
ccuggucgccuuccac

SEQ ID NO: 1983591 - RNA, 21 nt, Human
ccugguggcagcucaccucuc

SEQ ID NO: 1983592 - RNA, 19 nt, Human
ccugguggcagcucaccuc

SEQ ID NO: 1983593 - RNA, 22 nt, Human
ccugguggcagcucaccucucc

SEQ ID NO: 1983594 - RNA, 14 nt, Human
ccugguggcagcug

SEQ ID NO: 1983595 - RNA, 15 nt, Human
ccugguggcagcugc

SEQ ID NO: 1983596 - RNA, 16 nt, Human
ccugguggcagcugcg

SEQ ID NO: 1983597 - RNA, 17 nt, Human
ccugguggcagcugcgg

SEQ ID NO: 1983598 - RNA, 18 nt, Human
ccugguggcagcugcggu

SEQ ID NO: 1983599 - RNA, 13 nt, Human
ccugucaggaggc

SEQ ID NO: 1983600 - RNA, 16 nt, Human
ccugucaggaggcaga

SEQ ID NO: 1983601 - RNA, 21 nt, Human
ccugucaucugagaaugaaca

SEQ ID NO: 1983602 - RNA, 15 nt, Human
ccugucccccugaca

SEQ ID NO: 1983603 - RNA, 14 nt, Human
ccugucccccugac

SEQ ID NO: 1983604 - RNA, 13 nt, Human
ccugucccccuga

SEQ ID NO: 1983605 - RNA, 12 nt, Human
ccugucccccug

SEQ ID NO: 1983606 - RNA, 10 nt, Human
ccuguaccuc

SEQ ID NO: 1983607 - RNA, 12 nt, Human
ccuguaccucuu

SEQ ID NO: 1983608 - RNA, 15 nt, Human
ccugguggcaguggg

SEQ ID NO: 1983609 - RNA, 13 nt, Human
ccuggucuuugag

SEQ ID NO: 1983610 - RNA, 20 nt, Human
ccuggucuuugagcucccac

SEQ ID NO: 1983611 - RNA, 13 nt, Human
ccugguggcagug

SEQ ID NO: 1983612 - RNA, 14 nt, Human
ccugguggcagugg

SEQ ID NO: 1983613 - RNA, 16 nt, Human
ccuguagagugggagc

SEQ ID NO: 1983614 - RNA, 15 nt, Human
ccuguagagugggag

SEQ ID NO: 1983615 - RNA, 13 nt, Human
ccuguagcccuaa

SEQ ID NO: 1983616 - RNA, 14 nt, Human
ccuggcaugggaau

SEQ ID NO: 1983617 - RNA, 21 nt, Human
ccugggguggggauagggagc

SEQ ID NO: 1983618 - RNA, 18 nt, Human
ccuggguacugaaagccu

SEQ ID NO: 1983619 - RNA, 22 nt, Human
ccuggggucaggccgggcagag

SEQ ID NO: 1983620 - RNA, 20 nt, Human
ccuggggucaggccgggcag

SEQ ID NO: 1983621 - RNA, 18 nt, Human
ccugggggcugggcagag

SEQ ID NO: 1983622 - RNA, 19 nt, Human
ccugggggcugggcagagg

SEQ ID NO: 1983623 - RNA, 21 nt, Human
ccugggggcugggcagaggaa

SEQ ID NO: 1983624 - RNA, 20 nt, Human
ccugggggcugggcagagga

SEQ ID NO: 1983625 - RNA, 22 nt, Human
ccugggaggucaaggcugcagu

SEQ ID NO: 1983626 - RNA, 16 nt, Human
ccugggagugagcugg

SEQ ID NO: 1983627 - RNA, 16 nt, Human
ccugggcagaaggaag

SEQ ID NO: 1983628 - RNA, 18 nt, Human
ccugggagugagcugguu

SEQ ID NO: 1983629 - RNA, 15 nt, Human
ccugggcagaaggaa

SEQ ID NO: 1983630 - RNA, 16 nt, Human
ccuggcccacugcauc

SEQ ID NO: 1983631 - RNA, 13 nt, Human
ccuggcccaugua

SEQ ID NO: 1983632 - RNA, 15 nt, Human
ccuggcccauguaug

SEQ ID NO: 1983633 - RNA, 21 nt, Human
ccuggcccauguauggccagg

SEQ ID NO: 1983634 - RNA, 12 nt, Human
ccuggcucccuc

SEQ ID NO: 1983635 - RNA, 14 nt, Human
ccuggcucccucac

SEQ ID NO: 1983636 - RNA, 19 nt, Human
ccuggcucccucacucuca

SEQ ID NO: 1983637 - RNA, 20 nt, Human
ccuggcucccucacucucag

SEQ ID NO: 1983638 - RNA, 21 nt, Human
ccuggcucccucacucucagg

SEQ ID NO: 1983639 - RNA, 22 nt, Human
ccuggcucccucacucucagga

SEQ ID NO: 1983640 - RNA, 17 nt, Human
ccuggcuuuucacugcu

SEQ ID NO: 1983641 - RNA, 19 nt, Human
ccugggaaagagauuuaaa

SEQ ID NO: 1983642 - RNA, 16 nt, Human
ccuggcuuuucacugc

SEQ ID NO: 1983643 - RNA, 19 nt, Human
ccugggacagggagcagcc

SEQ ID NO: 1983644 - RNA, 19 nt, Human
ccugccuguugggccagga

SEQ ID NO: 1983645 - RNA, 18 nt, Human
ccugccuguugggccagg

SEQ ID NO: 1983646 - RNA, 20 nt, Human
ccugccuguugggccaggag

SEQ ID NO: 1983647 - RNA, 21 nt, Human
ccugcuaauuccccagauugc

SEQ ID NO: 1983648 - RNA, 21 nt, Human
ccugcuacugccaaccucgcu

SEQ ID NO: 1983649 - RNA, 15 nt, Human
ccugcuacugccaac

SEQ ID NO: 1983650 - RNA, 18 nt, Human
ccugcuacugccaaccuc

SEQ ID NO: 1983651 - RNA, 13 nt, Human
ccugcuacugcca

SEQ ID NO: 1983652 - RNA, 19 nt, Human
ccuggcacccggccccugc

SEQ ID NO: 1983653 - RNA, 16 nt, Human
ccuggagaacuagaga

SEQ ID NO: 1983654 - RNA, 12 nt, Human
ccuggagaacua

SEQ ID NO: 1983655 - RNA, 13 nt, Human
ccuggagaacuag

SEQ ID NO: 1983656 - RNA, 12 nt, Human
ccuggcacugcu

SEQ ID NO: 1983657 - RNA, 20 nt, Human
ccuggcacccggccccugcu

SEQ ID NO: 1983658 - RNA, 21 nt, Human
ccuggcacccggccccugcug

SEQ ID NO: 1983659 - RNA, 13 nt, Human
ccuggcaugggaa

SEQ ID NO: 1983660 - RNA, 23 nt, Human
ccuggcaugggaaugaaugucag

SEQ ID NO: 1983661 - RNA, 16 nt, Human
ccuggcacugcuucca

SEQ ID NO: 1983662 - RNA, 13 nt, Human
ccuggcacugcuu

SEQ ID NO: 1983663 - RNA, 12 nt, Human
ccuggcaggcag

SEQ ID NO: 1983664 - RNA, 13 nt, Human
ccuggcaggcagg

SEQ ID NO: 1983665 - RNA, 14 nt, Human
ccuggcaggcaggg

SEQ ID NO: 1983666 - RNA, 15 nt, Human
ccuggcaggcagggg

SEQ ID NO: 1983667 - RNA, 21 nt, Human
ccuggcaggcaggggcccugc

SEQ ID NO: 1983668 - RNA, 23 nt, Human
ccuggcaggcaggggcccugcag

SEQ ID NO: 1983669 - RNA, 21 nt, Human
ccuggccagaugcaccagccc

SEQ ID NO: 1983670 - RNA, 23 nt, Human
ccuggccagaugcaccagcccuu

SEQ ID NO: 1983671 - RNA, 20 nt, Human
ccuggccagaugcaccagcc

SEQ ID NO: 1983672 - RNA, 14 nt, Human
ccuggcccacugca

SEQ ID NO: 1983673 - RNA, 13 nt, Human
ccuggcccacugc

SEQ ID NO: 1983674 - RNA, 13 nt, Human
ccuggccacgccc

SEQ ID NO: 1983675 - RNA, 15 nt, Human
ccugagcugggauga

SEQ ID NO: 1983676 - RNA, 15 nt, Human
ccucuuccaggcccc

SEQ ID NO: 1983677 - RNA, 16 nt, Human
ccuaugaccauaaaau

SEQ ID NO: 1983678 - RNA, 12 nt, Human
ccugaaaauauc

SEQ ID NO: 1983679 - RNA, 15 nt, Human
ccucuuccucuugac

SEQ ID NO: 1983680 - RNA, 16 nt, Human
ccucuuccucuugacc

SEQ ID NO: 1983681 - RNA, 17 nt, Human
ccucuuccucuugaccc

SEQ ID NO: 1983682 - RNA, 20 nt, Human
ccucuuccucuugacccugc

SEQ ID NO: 1983683 - RNA, 23 nt, Human
ccucuuccucuugacccugcacc

SEQ ID NO: 1983684 - RNA, 11 nt, Human
ccucuuccuga

SEQ ID NO: 1983685 - RNA, 14 nt, Human
ccucuuccuggccg

SEQ ID NO: 1983686 - RNA, 21 nt, Human
ccugaagaguccucugaauga

SEQ ID NO: 1983687 - RNA, 19 nt, Human
ccugaagagaagggcaggg

SEQ ID NO: 1983688 - RNA, 19 nt, Human
ccugaaaugugugugaugu

SEQ ID NO: 1983689 - RNA, 18 nt, Human
ccugaaagcccugagcuu

SEQ ID NO: 1983690 - RNA, 12 nt, Human
ccugaaaugugu

SEQ ID NO: 1983691 - RNA, 17 nt, Human
ccugaaaugugugugau

SEQ ID NO: 1983692 - RNA, 18 nt, Human
ccugaaaugugugugaug

SEQ ID NO: 1983693 - RNA, 14 nt, Human
ccugaaagcccuga

SEQ ID NO: 1983694 - RNA, 13 nt, Human
ccugaaagcccug

SEQ ID NO: 1983695 - RNA, 13 nt, Human
ccugaaagaggaa

SEQ ID NO: 1983696 - RNA, 20 nt, Human
ccugaaaccuaguacugccc

SEQ ID NO: 1983697 - RNA, 21 nt, Human
ccugaaggccccgcccaggcu

SEQ ID NO: 1983698 - RNA, 20 nt, Human
ccugaaggccccgcccaggc

SEQ ID NO: 1983699 - RNA, 16 nt, Human
ccugaagggguuuucu

SEQ ID NO: 1983700 - RNA, 22 nt, Human
ccugaaggccccgcccaggcuu

SEQ ID NO: 1983701 - RNA, 19 nt, Human
ccugaaggccccgcccagg

SEQ ID NO: 1983702 - RNA, 18 nt, Human
ccugaaggccccgcccag

SEQ ID NO: 1983703 - RNA, 14 nt, Human
ccugaaggccccgc

SEQ ID NO: 1983704 - RNA, 13 nt, Human
ccugagcccccag

SEQ ID NO: 1983705 - RNA, 14 nt, Human
ccugagcccccagc

SEQ ID NO: 1983706 - RNA, 15 nt, Human
ccugagcccccagcu

SEQ ID NO: 1983707 - RNA, 18 nt, Human
ccugagcccccagcuucc

SEQ ID NO: 1983708 - RNA, 22 nt, Human
ccugaagucuuuguacagacaa

SEQ ID NO: 1983709 - RNA, 19 nt, Human
ccugaaguaagcaaagacu

SEQ ID NO: 1983710 - RNA, 17 nt, Human
ccugaagggguuuucuu

SEQ ID NO: 1983711 - RNA, 20 nt, Human
ccugaaguuauguguaugug

SEQ ID NO: 1983712 - RNA, 20 nt, Human
ccugaagucacacagugagu

SEQ ID NO: 1983713 - RNA, 19 nt, Human
ccugaagucacacagugag

SEQ ID NO: 1983714 - RNA, 18 nt, Human
ccugagccagauuucacu

SEQ ID NO: 1983715 - RNA, 16 nt, Human
ccugagccagauuuca

SEQ ID NO: 1983716 - RNA, 15 nt, Human
ccugagccagauuuc

SEQ ID NO: 1983717 - RNA, 18 nt, Human
ccugaggcccagagggcc

SEQ ID NO: 1983718 - RNA, 17 nt, Human
ccugaggcccagagggc

SEQ ID NO: 1983719 - RNA, 16 nt, Human
ccugaggcccagaggg

SEQ ID NO: 1983720 - RNA, 15 nt, Human
ccugaggcccagagg

SEQ ID NO: 1983721 - RNA, 12 nt, Human
ccugagcuggga

SEQ ID NO: 1983722 - RNA, 16 nt, Human
ccugaggcugggcucc

SEQ ID NO: 1983723 - RNA, 15 nt, Human
ccugaggcugggcuc

SEQ ID NO: 1983724 - RNA, 14 nt, Human
ccugaggcugggcu

SEQ ID NO: 1983725 - RNA, 13 nt, Human
ccugaggcugggc

SEQ ID NO: 1983726 - RNA, 13 nt, Human
ccugaggcuccac

SEQ ID NO: 1983727 - RNA, 14 nt, Human
ccugaggcuccacu

SEQ ID NO: 1983728 - RNA, 17 nt, Human
ccugaggcuccacuugg

SEQ ID NO: 1983729 - RNA, 19 nt, Human
ccugccaauggacuaacuu

SEQ ID NO: 1983730 - RNA, 15 nt, Human
ccugccaccacgccc

SEQ ID NO: 1983731 - RNA, 19 nt, Human
ccugccaccacgcccggcu

SEQ ID NO: 1983732 - RNA, 23 nt, Human
ccugcauuugugaaaugauggug

SEQ ID NO: 1983733 - RNA, 12 nt, Human
ccugccacccug

SEQ ID NO: 1983734 - RNA, 13 nt, Human
ccugccacccugg

SEQ ID NO: 1983735 - RNA, 14 nt, Human
ccugccacccuggg

SEQ ID NO: 1983736 - RNA, 16 nt, Human
ccugccacccugggga

SEQ ID NO: 1983737 - RNA, 22 nt, Human
ccugccacccuggggagaaagu

SEQ ID NO: 1983738 - RNA, 23 nt, Human
ccugaucccuuccaccugcucug

SEQ ID NO: 1983739 - RNA, 19 nt, Human
ccugaucccuuccaccugc

SEQ ID NO: 1983740 - RNA, 22 nt, Human
ccugaucccuuccaccugcucu

SEQ ID NO: 1983741 - RNA, 21 nt, Human
ccugaucccugaucccuucca

SEQ ID NO: 1983742 - RNA, 17 nt, Human
ccugcaaagcccagcuu

SEQ ID NO: 1983743 - RNA, 18 nt, Human
ccugcaaagcccagcuug

SEQ ID NO: 1983744 - RNA, 22 nt, Human
ccugcacaaagcccuuccaugu

SEQ ID NO: 1983745 - RNA, 20 nt, Human
ccugcacaaagcccuuccau

SEQ ID NO: 1983746 - RNA, 15 nt, Human
ccugcaaagcccagc

SEQ ID NO: 1983747 - RNA, 16 nt, Human
ccugcaaagcccagcu

SEQ ID NO: 1983748 - RNA, 14 nt, Human
ccugcaaagcccag

SEQ ID NO: 1983749 - RNA, 23 nt, Human
ccugcacaaagcccuuccauguc

SEQ ID NO: 1983750 - RNA, 21 nt, Human
ccugcacacgcuccuuccucu

SEQ ID NO: 1983751 - RNA, 15 nt, Human
ccugcacugacucug

SEQ ID NO: 1983752 - RNA, 16 nt, Human
ccugcacugacucugg

SEQ ID NO: 1983753 - RNA, 18 nt, Human
ccugcacugacucuggaa

SEQ ID NO: 1983754 - RNA, 11 nt, Human
ccugcacccuc

SEQ ID NO: 1983755 - RNA, 14 nt, Human
ccugcacccuccua

SEQ ID NO: 1983756 - RNA, 16 nt, Human
ccugcacccuccuagg

SEQ ID NO: 1983757 - RNA, 22 nt, Human
ccugccuguugggccaggagcc

SEQ ID NO: 1983758 - RNA, 12 nt, Human
ccugccaggcau

SEQ ID NO: 1983759 - RNA, 14 nt, Human
ccugccaggcacag

SEQ ID NO: 1983760 - RNA, 15 nt, Human
ccugccaggcacagg

SEQ ID NO: 1983761 - RNA, 16 nt, Human
ccugccaggcacaggc

SEQ ID NO: 1983762 - RNA, 18 nt, Human
ccugccaggcacaggcag

SEQ ID NO: 1983763 - RNA, 19 nt, Human
ccugccaggcacaggcagg

SEQ ID NO: 1983764 - RNA, 20 nt, Human
ccugccaggcacaggcaggg

SEQ ID NO: 1983765 - RNA, 21 nt, Human
ccugccaggcacaggcagggc

SEQ ID NO: 1983766 - RNA, 13 nt, Human
ccugccaggcaca

SEQ ID NO: 1983767 - RNA, 14 nt, Human
ccugccccccagcc

SEQ ID NO: 1983768 - RNA, 15 nt, Human
ccugccaggcauggu

SEQ ID NO: 1983769 - RNA, 22 nt, Human
ccugccaggcacaggcagggca

SEQ ID NO: 1983770 - RNA, 23 nt, Human
ccugccaggcacaggcagggcag

SEQ ID NO: 1983771 - RNA, 22 nt, Human
ccugccagggacagagggggug

SEQ ID NO: 1983772 - RNA, 17 nt, Human
ccugccccugagcccau

SEQ ID NO: 1983773 - RNA, 19 nt, Human
ccugccccuccucucugcc

SEQ ID NO: 1983774 - RNA, 20 nt, Human
ccugccccuccucucugccc

SEQ ID NO: 1983775 - RNA, 21 nt, Human
ccugccccuccucucugcccu

SEQ ID NO: 1983776 - RNA, 22 nt, Human
ccugccccuccucucugcccua

SEQ ID NO: 1983777 - RNA, 15 nt, Human
ccugccccucccuuc

SEQ ID NO: 1983778 - RNA, 16 nt, Human
ccugccccucccuuca

SEQ ID NO: 1983779 - RNA, 18 nt, Human
ccugccccucccuucaac

SEQ ID NO: 1983780 - RNA, 18 nt, Human
ccugccccuccucucugc

SEQ ID NO: 1983781 - RNA, 14 nt, Human
ccugccccucccuu

SEQ ID NO: 1983782 - RNA, 14 nt, Human
ccugcccggcugcg

SEQ ID NO: 1983783 - RNA, 16 nt, Human
ccugcccggcugcgga

SEQ ID NO: 1983784 - RNA, 16 nt, Human
ccugccccugcuacug

SEQ ID NO: 1983785 - RNA, 20 nt, Human
ccugcccggauggagcgggg

SEQ ID NO: 1983786 - RNA, 14 nt, Human
ccugcccugugggc

SEQ ID NO: 1983787 - RNA, 12 nt, Human
ccugcccugugg

SEQ ID NO: 1983788 - RNA, 11 nt, Human
ccugcccugug

SEQ ID NO: 1983789 - RNA, 23 nt, Human
ccugcccugguuuccugcccugg

SEQ ID NO: 1983790 - RNA, 18 nt, Human
ccugcccugucaggaggc

SEQ ID NO: 1983791 - RNA, 21 nt, Human
ccugcccugucaggaggcaga

SEQ ID NO: 1983792 - RNA, 20 nt, Human
ccugcccugggaggcaguga

SEQ ID NO: 1983793 - RNA, 22 nt, Human
ccugcccugggaggcagugaug

SEQ ID NO: 1983794 - RNA, 14 nt, Human
ccugcccugguuuc

SEQ ID NO: 1983795 - RNA, 19 nt, Human
ccugcccugguuuccugcc

SEQ ID NO: 1983796 - RNA, 20 nt, Human
ccugcccugguuuccugccc

SEQ ID NO: 1983797 - RNA, 21 nt, Human
ccugcccugguuuccugcccu

SEQ ID NO: 1983798 - RNA, 22 nt, Human
ccugcccugguuuccugcccug

SEQ ID NO: 1983799 - RNA, 10 nt, Human
ccugcccugg

SEQ ID NO: 1983800 - RNA, 12 nt, Human
ccugcccuggga

SEQ ID NO: 1983801 - RNA, 14 nt, Human
ccugcccugggagg

SEQ ID NO: 1983802 - RNA, 15 nt, Human
ccugcccugggaggc

SEQ ID NO: 1983803 - RNA, 12 nt, Human
ccugccucagcc

SEQ ID NO: 1983804 - RNA, 13 nt, Human
ccugccucagccu

SEQ ID NO: 1983805 - RNA, 14 nt, Human
ccugccucagccuc

SEQ ID NO: 1983806 - RNA, 14 nt, Human
ccugccuguugggc

SEQ ID NO: 1983807 - RNA, 22 nt, Human
ccugccuguucccauucuugca

SEQ ID NO: 1983808 - RNA, 22 nt, Human
ccugcccuuaccugccaggaag

SEQ ID NO: 1983809 - RNA, 21 nt, Human
ccugcccuuaccugccaggaa

SEQ ID NO: 1983810 - RNA, 19 nt, Human
ccugcccuuaccugccagg

SEQ ID NO: 1983811 - RNA, 15 nt, Human
ccugcccugugggcc

SEQ ID NO: 1983812 - RNA, 19 nt, Human
ccugcccuuuguccuccug

SEQ ID NO: 1983813 - RNA, 21 nt, Human
ccugcccuuuguccuccugcu

SEQ ID NO: 1983814 - RNA, 14 nt, Human
ccuuugucccagaa

SEQ ID NO: 1983815 - RNA, 14 nt, Human
ccuuuguccccacc

SEQ ID NO: 1983816 - RNA, 18 nt, Human
ccuuuguccccaccgcag

SEQ ID NO: 1983817 - RNA, 16 nt, Human
ccuuuguccccaccgc

SEQ ID NO: 1983818 - RNA, 24 nt, Human
ccuuuguauucucuccuguaccuc

SEQ ID NO: 1983819 - RNA, 23 nt, Human
ccuuuguaaauugucagaugcug

SEQ ID NO: 1983820 - RNA, 14 nt, Human
ccuuuguauucugu

SEQ ID NO: 1983821 - RNA, 22 nt, Human
ccuuuguauucugucuucaucc

SEQ ID NO: 1983822 - RNA, 22 nt, Human
ccuuuguauucucuccuguacc

SEQ ID NO: 1983823 - RNA, 23 nt, Human
ccuuuguauucucuccuguaccu

SEQ ID NO: 1983824 - RNA, 18 nt, Human
ccuugugaucacuuucug

SEQ ID NO: 1983825 - RNA, 20 nt, Human
ccuugugaucacuuucugaa

SEQ ID NO: 1983826 - RNA, 19 nt, Human
ccuuugggugcuguuuugc

SEQ ID NO: 1983827 - RNA, 21 nt, Human
ccuuugggugcuguuuugcca

SEQ ID NO: 1983828 - RNA, 16 nt, Human
ccuuugggugcuguuu

SEQ ID NO: 1983829 - RNA, 21 nt, Human
ccuuuguaaauugucagaugc

SEQ ID NO: 1983830 - RNA, 20 nt, Human
ccuugugggugugagcagca

SEQ ID NO: 1983831 - RNA, 14 nt, Human
ccuuugugaggaag

SEQ ID NO: 1983832 - RNA, 21 nt, Human
ccuuuguccuccugcugccag

SEQ ID NO: 1983833 - RNA, 13 nt, Human
ccuuuguccuccu

SEQ ID NO: 1983834 - RNA, 16 nt, Human
ccuuuguccuccugcu

SEQ ID NO: 1983835 - RNA, 23 nt, Human
ccuuuguccccaccgcagacagg

SEQ ID NO: 1983836 - RNA, 22 nt, Human
ccuuuguccccaccgcagacag

SEQ ID NO: 1983837 - RNA, 23 nt, Human
ccuuugugaggaagccgcugggg

SEQ ID NO: 1983838 - RNA, 17 nt, Human
ccuuugugaggaagccg

SEQ ID NO: 1983839 - RNA, 16 nt, Human
ccuuugugaggaagcc

SEQ ID NO: 1983840 - RNA, 15 nt, Human
ccuuugugaggaagc

SEQ ID NO: 1983841 - RNA, 15 nt, Human
ccuuuuuuggcugcu

SEQ ID NO: 1983842 - RNA, 22 nt, Human
ccuuuuuuauaucuuggcaggu

SEQ ID NO: 1983843 - RNA, 15 nt, Human
ccuuuuuuauaucuu

SEQ ID NO: 1983844 - RNA, 17 nt, Human
ccuuuguugaacuguua

SEQ ID NO: 1983845 - RNA, 20 nt, Human
ccuuuguugaacuguuagaa

SEQ ID NO: 1983846 - RNA, 22 nt, Human
ccuuuuuuggcugcugaaggcu

SEQ ID NO: 1983847 - RNA, 20 nt, Human
ccuuuuuuggcugcugaagg

SEQ ID NO: 1983848 - RNA, 18 nt, Human
ccuuuuuuggcugcugaa

SEQ ID NO: 1983849 - RNA, 17 nt, Human
ccuuuuuuggcugcuga

SEQ ID NO: 1983850 - RNA, 23 nt, Human
cgaaagggacuuggaagcuccgc

SEQ ID NO: 1983851 - RNA, 15 nt, Human
cgaaaggucaccuca

SEQ ID NO: 1983852 - RNA, 16 nt, Human
cgaaaggucaccucac

SEQ ID NO: 1983853 - RNA, 18 nt, Human
cgaaaggucaccucacuc

SEQ ID NO: 1983854 - RNA, 21 nt, Human
cgaaaggucaccucacucagc

SEQ ID NO: 1983855 - RNA, 23 nt, Human
cgaaaggucaccucacucagcac

SEQ ID NO: 1983856 - RNA, 16 nt, Human
cgaaaguuaguaggau

SEQ ID NO: 1983857 - RNA, 15 nt, Human
cgaaaucccugcuca

SEQ ID NO: 1983858 - RNA, 16 nt, Human
cgaaaucccugcucac

SEQ ID NO: 1983859 - RNA, 22 nt, Human
cgaaaucccugcucacugcagc

SEQ ID NO: 1983860 - RNA, 13 nt, Human
cgaaaugcugucu

SEQ ID NO: 1983861 - RNA, 18 nt, Human
cgaagauuucauccagaa

SEQ ID NO: 1983862 - RNA, 18 nt, Human
cgaaaugcugucuuucuu

SEQ ID NO: 1983863 - RNA, 23 nt, Human
cgaacauguuuuucuucucccuc

SEQ ID NO: 1983864 - RNA, 21 nt, Human
cgaacauguuuuucuucuccc

SEQ ID NO: 1983865 - RNA, 14 nt, Human
cgaauauugcugau

SEQ ID NO: 1983866 - RNA, 12 nt, Human
cgaauauugcug

SEQ ID NO: 1983867 - RNA, 11 nt, Human
cgaauauugcu

SEQ ID NO: 1983868 - RNA, 16 nt, Human
cgaauagcugggacua

SEQ ID NO: 1983869 - RNA, 15 nt, Human
cgaauagcugggacu

SEQ ID NO: 1983870 - RNA, 16 nt, Human
cgagacggcacugaga

SEQ ID NO: 1983871 - RNA, 17 nt, Human
cgaauauugcugauggu

SEQ ID NO: 1983872 - RNA, 15 nt, Human
cgaauauugcugaug

SEQ ID NO: 1983873 - RNA, 14 nt, Human
cgaaucauuuguuc

SEQ ID NO: 1983874 - RNA, 17 nt, Human
cgaaucauuuguucaaa

SEQ ID NO: 1983875 - RNA, 17 nt, Human
ccuucgguacccaccac

SEQ ID NO: 1983876 - RNA, 19 nt, Human
ccuucgugacaauguuuac

SEQ ID NO: 1983877 - RNA, 20 nt, Human
ccuucgugacaauguuuaca

SEQ ID NO: 1983878 - RNA, 16 nt, Human
ccuucucuccagcccc

SEQ ID NO: 1983879 - RNA, 15 nt, Human
ccuucucuccagccc

SEQ ID NO: 1983880 - RNA, 13 nt, Human
ccuucucuccagc

SEQ ID NO: 1983881 - RNA, 12 nt, Human
ccuucucuccag

SEQ ID NO: 1983882 - RNA, 13 nt, Human
ccuuccaggggug

SEQ ID NO: 1983883 - RNA, 17 nt, Human
ccuuccauggacuuugu

SEQ ID NO: 1983884 - RNA, 16 nt, Human
ccuuccaucugauucc

SEQ ID NO: 1983885 - RNA, 13 nt, Human
ccuuccugggcac

SEQ ID NO: 1983886 - RNA, 18 nt, Human
ccuuccaugucgccucug

SEQ ID NO: 1983887 - RNA, 17 nt, Human
ccuuccugggcacacgc

SEQ ID NO: 1983888 - RNA, 21 nt, Human
ccuuccugggcacacgcugcu

SEQ ID NO: 1983889 - RNA, 22 nt, Human
ccuuccugggcacacgcugcuc

SEQ ID NO: 1983890 - RNA, 23 nt, Human
ccuuccugggcacacgcugcucu

SEQ ID NO: 1983891 - RNA, 16 nt, Human
ccuucggccuccaucc

SEQ ID NO: 1983892 - RNA, 17 nt, Human
ccuucggccuccauccu

SEQ ID NO: 1983893 - RNA, 15 nt, Human
ccuucgggcugugcc

SEQ ID NO: 1983894 - RNA, 16 nt, Human
ccuucgggcugugccc

SEQ ID NO: 1983895 - RNA, 15 nt, Human
ccuucgguacccacc

SEQ ID NO: 1983896 - RNA, 14 nt, Human
ccuucgggcugugc

SEQ ID NO: 1983897 - RNA, 18 nt, Human
ccuucggccuccauccug

SEQ ID NO: 1983898 - RNA, 20 nt, Human
ccugugggcccccaaaugga

SEQ ID NO: 1983899 - RNA, 20 nt, Human
ccuguggaugauaaaacaca

SEQ ID NO: 1983900 - RNA, 18 nt, Human
ccuguggaucaaauccag

SEQ ID NO: 1983901 - RNA, 16 nt, Human
ccuguggccugccagu

SEQ ID NO: 1983902 - RNA, 17 nt, Human
ccugugccuuuugccau

SEQ ID NO: 1983903 - RNA, 20 nt, Human
ccugugccucugggacugga

SEQ ID NO: 1983904 - RNA, 17 nt, Human
ccuguccuaaggaaccu

SEQ ID NO: 1983905 - RNA, 18 nt, Human
ccuguccuaaggaaccuu

SEQ ID NO: 1983906 - RNA, 21 nt, Human
ccuguccuaaggaaccuuccu

SEQ ID NO: 1983907 - RNA, 19 nt, Human
ccuucucuccagccccugg

SEQ ID NO: 1983908 - RNA, 23 nt, Human
ccuugacauuguagagcuucugg

SEQ ID NO: 1983909 - RNA, 18 nt, Human
ccuucucuccagccccug

SEQ ID NO: 1983910 - RNA, 17 nt, Human
ccuucucuccagccccu

SEQ ID NO: 1983911 - RNA, 18 nt, Human
ccuugacagggcacaccg

SEQ ID NO: 1983912 - RNA, 21 nt, Human
ccuugacagggcacaccgggc

SEQ ID NO: 1983913 - RNA, 21 nt, Human
ccuugaggaaacaacagcuuu

SEQ ID NO: 1983914 - RNA, 18 nt, Human
ccuugaggaaacaacagc

SEQ ID NO: 1983915 - RNA, 15 nt, Human
ccuuggauugucccc

SEQ ID NO: 1983916 - RNA, 22 nt, Human
ccuuggcucaaguccucuuuuc

SEQ ID NO: 1983917 - RNA, 14 nt, Human
ccuuggggagcagg

SEQ ID NO: 1983918 - RNA, 16 nt, Human
ccuugggcucugcuga

SEQ ID NO: 1983919 - RNA, 16 nt, Human
ccuuggcuuggcccug

SEQ ID NO: 1983920 - RNA, 18 nt, Human
ccuuggcuuggcccuggc

SEQ ID NO: 1983921 - RNA, 15 nt, Human
ccuugggcucugcug

SEQ ID NO: 1983922 - RNA, 16 nt, Human
ccuuggcugcagggag

SEQ ID NO: 1983923 - RNA, 20 nt, Human
ccuuggugucgggcaugaca

SEQ ID NO: 1983924 - RNA, 19 nt, Human
ccuuggugucgggcaugac

SEQ ID NO: 1983925 - RNA, 19 nt, Human
ccuuggggacaaccuuggc

SEQ ID NO: 1983926 - RNA, 21 nt, Human
ccuuggugucgggcaugacac

SEQ ID NO: 1983927 - RNA, 13 nt, Human
ccuugguuggaag

SEQ ID NO: 1983928 - RNA, 12 nt, Human
ccuugguuccug

SEQ ID NO: 1983929 - RNA, 17 nt, Human
ccuugguuccuggggca

SEQ ID NO: 1983930 - RNA, 15 nt, Human
ccuuguaauguaacu

SEQ ID NO: 1983931 - RNA, 16 nt, Human
ccuuguaauguaacug

SEQ ID NO: 1983932 - RNA, 18 nt, Human
ccuuguaauguaacugcu

SEQ ID NO: 1983933 - RNA, 21 nt, Human
ccuuguaauguaacugcucuu

SEQ ID NO: 1983934 - RNA, 20 nt, Human
cgggaauuuucaucuaggau

SEQ ID NO: 1983935 - RNA, 20 nt, Human
cgggaagggggcugggacau

SEQ ID NO: 1983936 - RNA, 19 nt, Human
cgggaagggggcugggaca

SEQ ID NO: 1983937 - RNA, 16 nt, Human
cgggaagggggcuggg

SEQ ID NO: 1983938 - RNA, 18 nt, Human
cgggaauuuucaucuagg

SEQ ID NO: 1983939 - RNA, 13 nt, Human
cggcuggccuggc

SEQ ID NO: 1983940 - RNA, 23 nt, Human
cggcuggcagcccaccccucaac

SEQ ID NO: 1983941 - RNA, 14 nt, Human
cggcuggccuggcc

SEQ ID NO: 1983942 - RNA, 14 nt, Human
cggcuggcagccca

SEQ ID NO: 1983943 - RNA, 11 nt, Human
cggccaggcca

SEQ ID NO: 1983944 - RNA, 14 nt, Human
cggauccccuuccu

SEQ ID NO: 1983945 - RNA, 14 nt, Human
cggaucagcugagc

SEQ ID NO: 1983946 - RNA, 16 nt, Human
cggaucaggcucccag

SEQ ID NO: 1983947 - RNA, 17 nt, Human
cggaucaggcucccagg

SEQ ID NO: 1983948 - RNA, 12 nt, Human
cggcccuaaggg

SEQ ID NO: 1983949 - RNA, 12 nt, Human
cggccaggccag

SEQ ID NO: 1983950 - RNA, 20 nt, Human
cggccaggccagagggagug

SEQ ID NO: 1983951 - RNA, 20 nt, Human
cgcccaaaccuuucccccau

SEQ ID NO: 1983952 - RNA, 19 nt, Human
cgcagcccugcagagggca

SEQ ID NO: 1983953 - RNA, 18 nt, Human
cgcagcccugcagagggc

SEQ ID NO: 1983954 - RNA, 18 nt, Human
cgcagcauccgaccaggu

SEQ ID NO: 1983955 - RNA, 13 nt, Human
cgcagcccugcuu

SEQ ID NO: 1983956 - RNA, 15 nt, Human
cgcagcccugcuuug

SEQ ID NO: 1983957 - RNA, 24 nt, Human
cgcagcccugcuuugggcugcccu

SEQ ID NO: 1983958 - RNA, 12 nt, Human
cgcccaaggccc

SEQ ID NO: 1983959 - RNA, 18 nt, Human
cgcccaacuaauuuuugu

SEQ ID NO: 1983960 - RNA, 13 nt, Human
cgcccagucugga

SEQ ID NO: 1983961 - RNA, 19 nt, Human
cgcccagucuggaaugcag

SEQ ID NO: 1983962 - RNA, 21 nt, Human
cgcccagucuggaaugcagug

SEQ ID NO: 1983963 - RNA, 13 nt, Human
cgccccuuccccc

SEQ ID NO: 1983964 - RNA, 18 nt, Human
cgcccggcuaauuuuugu

SEQ ID NO: 1983965 - RNA, 21 nt, Human
cgcgucgcccucccaggcucu

SEQ ID NO: 1983966 - RNA, 24 nt, Human
cgcuacccgggaagggggcuggga

SEQ ID NO: 1983967 - RNA, 21 nt, Human
cgcuacccgggaagggggcug

SEQ ID NO: 1983968 - RNA, 17 nt, Human
cgcuacccgggaagggg

SEQ ID NO: 1983969 - RNA, 18 nt, Human
cgcuaacuugcuuaaaug

SEQ ID NO: 1983970 - RNA, 19 nt, Human
cgcuaacuugcuuaaaugu

SEQ ID NO: 1983971 - RNA, 20 nt, Human
cgcuaacuugcuuaaaugug

SEQ ID NO: 1983972 - RNA, 18 nt, Human
cgcuacccgggaaggggg

SEQ ID NO: 1983973 - RNA, 19 nt, Human
cgcgguggcucacgccugu

SEQ ID NO: 1983974 - RNA, 15 nt, Human
cgcgacaaugcaaac

SEQ ID NO: 1983975 - RNA, 18 nt, Human
cgccuuucagcaggcagc

SEQ ID NO: 1983976 - RNA, 14 nt, Human
cgcgacaaugcaaa

SEQ ID NO: 1983977 - RNA, 17 nt, Human
cggagaaaggaagggcu

SEQ ID NO: 1983978 - RNA, 15 nt, Human
cggagaaaggaaggg

SEQ ID NO: 1983979 - RNA, 17 nt, Human
cggacuuagcugggaga

SEQ ID NO: 1983980 - RNA, 16 nt, Human
cggacuuagcugggag

SEQ ID NO: 1983981 - RNA, 21 nt, Human
cggacagccacggccaggcca

SEQ ID NO: 1983982 - RNA, 22 nt, Human
cggacagccacggccaggccag

SEQ ID NO: 1983983 - RNA, 16 nt, Human
cgcuuucuacccagcg

SEQ ID NO: 1983984 - RNA, 14 nt, Human
cgcuuucuacccag

SEQ ID NO: 1983985 - RNA, 16 nt, Human
cggaauaguuggcuag

SEQ ID NO: 1983986 - RNA, 17 nt, Human
cggaauaguuggcuagg

SEQ ID NO: 1983987 - RNA, 16 nt, Human
cgcucccuugaccugc

SEQ ID NO: 1983988 - RNA, 20 nt, Human
cgcuccgggacguggcaccu

SEQ ID NO: 1983989 - RNA, 21 nt, Human
cgcuaacuugcuuaaauguga

SEQ ID NO: 1983990 - RNA, 14 nt, Human
cgcugugcugcccu

SEQ ID NO: 1983991 - RNA, 13 nt, Human
cgcugugcugccc

SEQ ID NO: 1983992 - RNA, 11 nt, Human
cgcugugcugc

SEQ ID NO: 1983993 - RNA, 19 nt, Human
cgcugugcugcccugccca

SEQ ID NO: 1983994 - RNA, 23 nt, Human
cgcugugcugcccugcccaccug

SEQ ID NO: 1983995 - RNA, 21 nt, Human
cgcugugcugcccugcccacc

SEQ ID NO: 1983996 - RNA, 20 nt, Human
cgcuucccugguucaagcga

SEQ ID NO: 1983997 - RNA, 22 nt, Human
cgcuucccugguucaagcgauu

SEQ ID NO: 1983998 - RNA, 11 nt, Human
cgcuucacagg

SEQ ID NO: 1983999 - RNA, 21 nt, Human
cgagccuuuucacccuucuac

SEQ ID NO: 1984000 - RNA, 14 nt, Human
cgaggacagggagg

SEQ ID NO: 1984001 - RNA, 22 nt, Human
cgagcccuugcccaugcugggc

SEQ ID NO: 1984002 - RNA, 18 nt, Human
cgagcccugguggcagug

SEQ ID NO: 1984003 - RNA, 19 nt, Human
cgagcccugguggcagugg

SEQ ID NO: 1984004 - RNA, 12 nt, Human
cgagagcgcagc

SEQ ID NO: 1984005 - RNA, 16 nt, Human
cgaggacagggaggug

SEQ ID NO: 1984006 - RNA, 17 nt, Human
cgcagcccugcagaggg

SEQ ID NO: 1984007 - RNA, 15 nt, Human
cgcagcccugcagag

SEQ ID NO: 1984008 - RNA, 20 nt, Human
cgcagcauauucaggaagcu

SEQ ID NO: 1984009 - RNA, 19 nt, Human
cgcagcauauucaggaagc

SEQ ID NO: 1984010 - RNA, 19 nt, Human
cgcagagggaauuuuuccc

SEQ ID NO: 1984011 - RNA, 17 nt, Human
cgcacugggcuugggga

SEQ ID NO: 1984012 - RNA, 13 nt, Human
cgcacucuggcag

SEQ ID NO: 1984013 - RNA, 23 nt, Human
cgcacuucgggaggucgaggcag

SEQ ID NO: 1984014 - RNA, 13 nt, Human
cgcacugggcuug

SEQ ID NO: 1984015 - RNA, 18 nt, Human
cgauggauauauguuuuu

SEQ ID NO: 1984016 - RNA, 23 nt, Human
cgaugcagacagggggccagaac

SEQ ID NO: 1984017 - RNA, 19 nt, Human
cgaugcaaacauuggaaga

SEQ ID NO: 1984018 - RNA, 15 nt, Human
cgaugcagacagggg

SEQ ID NO: 1984019 - RNA, 14 nt, Human
cucacuguugccca

SEQ ID NO: 1984020 - RNA, 15 nt, Human
cucacuguugcccag

SEQ ID NO: 1984021 - RNA, 20 nt, Human
cucacuguggugucuguguu

SEQ ID NO: 1984022 - RNA, 20 nt, Human
cucacugcuaagaauauuug

SEQ ID NO: 1984023 - RNA, 21 nt, Human
cucacugcuaagaauauuuga

SEQ ID NO: 1984024 - RNA, 22 nt, Human
cucacugcuaagaauauuugaa

SEQ ID NO: 1984025 - RNA, 23 nt, Human
cucacugcuaagaauauuugaau

SEQ ID NO: 1984026 - RNA, 20 nt, Human
cucacugcauccuccgccuc

SEQ ID NO: 1984027 - RNA, 14 nt, Human
cucacugccucccc

SEQ ID NO: 1984028 - RNA, 14 nt, Human
cucacugcagccuc

SEQ ID NO: 1984029 - RNA, 15 nt, Human
cucacugcagccuca

SEQ ID NO: 1984030 - RNA, 16 nt, Human
cucacugcagccucaa

SEQ ID NO: 1984031 - RNA, 20 nt, Human
cucacagacaggaccccugc

SEQ ID NO: 1984032 - RNA, 22 nt, Human
cucacagacaggaccccugcag

SEQ ID NO: 1984033 - RNA, 23 nt, Human
cucacagacaggaccccugcagu

SEQ ID NO: 1984034 - RNA, 13 nt, Human
cucagaggcccca

SEQ ID NO: 1984035 - RNA, 21 nt, Human
cucagaggccccaauacccca

SEQ ID NO: 1984036 - RNA, 22 nt, Human
cucagaggccccaauaccccau

SEQ ID NO: 1984037 - RNA, 23 nt, Human
cucagaggccccaauaccccaug

SEQ ID NO: 1984038 - RNA, 18 nt, Human
cucagaggacccuuucca

SEQ ID NO: 1984039 - RNA, 19 nt, Human
cucagaggacccuuuccag

SEQ ID NO: 1984040 - RNA, 12 nt, Human
cucagaggcccc

SEQ ID NO: 1984041 - RNA, 16 nt, Human
cucagaucuucugugg

SEQ ID NO: 1984042 - RNA, 19 nt, Human
cucagagagggugggagug

SEQ ID NO: 1984043 - RNA, 23 nt, Human
cucagagagggugggagugggcc

SEQ ID NO: 1984044 - RNA, 15 nt, Human
cucagagccaccccu

SEQ ID NO: 1984045 - RNA, 16 nt, Human
cucacuguugcccagg

SEQ ID NO: 1984046 - RNA, 17 nt, Human
cucacuguugcccaggc

SEQ ID NO: 1984047 - RNA, 18 nt, Human
cucacuguugcccaggcu

SEQ ID NO: 1984048 - RNA, 19 nt, Human
cucacuguugcccaggcug

SEQ ID NO: 1984049 - RNA, 15 nt, Human
cucagcauccuggca

SEQ ID NO: 1984050 - RNA, 15 nt, Human
cucagcauuaccucu

SEQ ID NO: 1984051 - RNA, 19 nt, Human
cucagcauuaccucuuugg

SEQ ID NO: 1984052 - RNA, 20 nt, Human
cucagcauuaccucuuugga

SEQ ID NO: 1984053 - RNA, 22 nt, Human
cucagcauuaccucuuuggaaa

SEQ ID NO: 1984054 - RNA, 14 nt, Human
cucagcccucccug

SEQ ID NO: 1984055 - RNA, 19 nt, Human
cucagcccucccugccccu

SEQ ID NO: 1984056 - RNA, 20 nt, Human
cucagcccucccugccccuc

SEQ ID NO: 1984057 - RNA, 21 nt, Human
cucagcccucccugccccucc

SEQ ID NO: 1984058 - RNA, 21 nt, Human
cucagcaaaagaugcuucuca

SEQ ID NO: 1984059 - RNA, 16 nt, Human
cucagcaggggagggu

SEQ ID NO: 1984060 - RNA, 20 nt, Human
cucagcaaaagaugcuucuc

SEQ ID NO: 1984061 - RNA, 19 nt, Human
cucagcaaaagaugcuucu

SEQ ID NO: 1984062 - RNA, 17 nt, Human
cucagcagugagagcag

SEQ ID NO: 1984063 - RNA, 13 nt, Human
cucagcauccugg

SEQ ID NO: 1984064 - RNA, 21 nt, Human
cucagcauccuggcacccggc

SEQ ID NO: 1984065 - RNA, 22 nt, Human
cucagcauccuggcacccggcc

SEQ ID NO: 1984066 - RNA, 14 nt, Human
cucagcggggacag

SEQ ID NO: 1984067 - RNA, 15 nt, Human
cucagcggggacagc

SEQ ID NO: 1984068 - RNA, 16 nt, Human
cucagcggggacagcu

SEQ ID NO: 1984069 - RNA, 18 nt, Human
cucagcggggacagcucc

SEQ ID NO: 1984070 - RNA, 19 nt, Human
cucagcggggacagcuccu

SEQ ID NO: 1984071 - RNA, 20 nt, Human
cucagcggggacagcuccuu

SEQ ID NO: 1984072 - RNA, 21 nt, Human
cucagcggggacagcuccuuc

SEQ ID NO: 1984073 - RNA, 23 nt, Human
cucagcggggacagcuccuucug

SEQ ID NO: 1984074 - RNA, 19 nt, Human
cucagcucccaaggcucug

SEQ ID NO: 1984075 - RNA, 15 nt, Human
cucagcucccaaggc

SEQ ID NO: 1984076 - RNA, 22 nt, Human
cucagggucccugguggcagcu

SEQ ID NO: 1984077 - RNA, 21 nt, Human
cucagggucccugguggcagc

SEQ ID NO: 1984078 - RNA, 20 nt, Human
cucagggucccugguggcag

SEQ ID NO: 1984079 - RNA, 14 nt, Human
cucagggccugguc

SEQ ID NO: 1984080 - RNA, 24 nt, Human
cucagggucccugguggcagcuca

SEQ ID NO: 1984081 - RNA, 20 nt, Human
cucagguaaucgaccugccu

SEQ ID NO: 1984082 - RNA, 22 nt, Human
cucagguaaucgaccugccucg

SEQ ID NO: 1984083 - RNA, 24 nt, Human
cucagguaaucgaccugccucggc

SEQ ID NO: 1984084 - RNA, 21 nt, Human
cucagguggggucacucuggc

SEQ ID NO: 1984085 - RNA, 20 nt, Human
cucagguggggucacucugg

SEQ ID NO: 1984086 - RNA, 19 nt, Human
cucagguggggucacucug

SEQ ID NO: 1984087 - RNA, 22 nt, Human
cucaggugauccacccaccuca

SEQ ID NO: 1984088 - RNA, 23 nt, Human
cucaggugauccacccaccucag

SEQ ID NO: 1984089 - RNA, 20 nt, Human
cucagggccuggcucaggug

SEQ ID NO: 1984090 - RNA, 19 nt, Human
cucagggccuggcucaggu

SEQ ID NO: 1984091 - RNA, 18 nt, Human
cucagggccuggcucagg

SEQ ID NO: 1984092 - RNA, 18 nt, Human
cucaggcaggugggaugg

SEQ ID NO: 1984093 - RNA, 15 nt, Human
cucaggcagguggga

SEQ ID NO: 1984094 - RNA, 16 nt, Human
cucaggaggcaggacc

SEQ ID NO: 1984095 - RNA, 17 nt, Human
cucaggaggcaggaccu

SEQ ID NO: 1984096 - RNA, 18 nt, Human
cucaggaggcaggaccuu

SEQ ID NO: 1984097 - RNA, 24 nt, Human
cucaggagcccugggaggcucugg

SEQ ID NO: 1984098 - RNA, 23 nt, Human
cucaggagcccugggaggcucug

SEQ ID NO: 1984099 - RNA, 22 nt, Human
cucaggagcccugggaggcucu

SEQ ID NO: 1984100 - RNA, 21 nt, Human
cucaggagcccugggaggcuc

SEQ ID NO: 1984101 - RNA, 20 nt, Human
cucaggagcccugggaggcu

SEQ ID NO: 1984102 - RNA, 17 nt, Human
cucaggagcccugggag

SEQ ID NO: 1984103 - RNA, 16 nt, Human
cucaggagcccuggga

SEQ ID NO: 1984104 - RNA, 15 nt, Human
cucaggagcccuggg

SEQ ID NO: 1984105 - RNA, 14 nt, Human
cucaggagcccugg

SEQ ID NO: 1984106 - RNA, 12 nt, Human
cucaggaccagg

SEQ ID NO: 1984107 - RNA, 13 nt, Human
cucaggagcccug

SEQ ID NO: 1984108 - RNA, 12 nt, Human
cucaggagcccu

SEQ ID NO: 1984109 - RNA, 20 nt, Human
cucaggaaaugcugacccau

SEQ ID NO: 1984110 - RNA, 21 nt, Human
cucaggaaaugcugacccaug

SEQ ID NO: 1984111 - RNA, 22 nt, Human
cucaggaaaugcugacccaugg

SEQ ID NO: 1984112 - RNA, 23 nt, Human
cucaggaaaugcugacccauggg

SEQ ID NO: 1984113 - RNA, 14 nt, Human
cucagcuuccccag

SEQ ID NO: 1984114 - RNA, 18 nt, Human
cucagcuuccccaguagc

SEQ ID NO: 1984115 - RNA, 19 nt, Human
cucagcuuccccaguagcu

SEQ ID NO: 1984116 - RNA, 15 nt, Human
cucaggaaaugcuga

SEQ ID NO: 1984117 - RNA, 19 nt, Human
cucaggaaaugcugaccca

SEQ ID NO: 1984118 - RNA, 18 nt, Human
cucagcucuuggcuccac

SEQ ID NO: 1984119 - RNA, 17 nt, Human
cucagcucuuggcucca

SEQ ID NO: 1984120 - RNA, 20 nt, Human
cucagcucuuggcuccacug

SEQ ID NO: 1984121 - RNA, 19 nt, Human
cucagcugucaaggcucag

SEQ ID NO: 1984122 - RNA, 18 nt, Human
cucagcugucaaggcuca

SEQ ID NO: 1984123 - RNA, 13 nt, Human
cuccccucuuccu

SEQ ID NO: 1984124 - RNA, 14 nt, Human
cuccccucuuccuc

SEQ ID NO: 1984125 - RNA, 15 nt, Human
cuccccucuuccucu

SEQ ID NO: 1984126 - RNA, 16 nt, Human
cuccccucuuccucuu

SEQ ID NO: 1984127 - RNA, 17 nt, Human
cuccccucuuccucuug

SEQ ID NO: 1984128 - RNA, 23 nt, Human
cuccccugcuggguguggcgcag

SEQ ID NO: 1984129 - RNA, 21 nt, Human
cuccccugcuggguguggcgc

SEQ ID NO: 1984130 - RNA, 14 nt, Human
cuccccugcugggu

SEQ ID NO: 1984131 - RNA, 18 nt, Human
cuccccagccagccuggc

SEQ ID NO: 1984132 - RNA, 20 nt, Human
cuccccagccagccuggcug

SEQ ID NO: 1984133 - RNA, 15 nt, Human
cuccccagccagccu

SEQ ID NO: 1984134 - RNA, 16 nt, Human
cuccccagccagccug

SEQ ID NO: 1984135 - RNA, 17 nt, Human
cuccccagccagccugg

SEQ ID NO: 1984136 - RNA, 16 nt, Human
cuccccucuccuuccu

SEQ ID NO: 1984137 - RNA, 20 nt, Human
cuccccagccccaucccaaa

SEQ ID NO: 1984138 - RNA, 18 nt, Human
cucccucagucuggcccu

SEQ ID NO: 1984139 - RNA, 15 nt, Human
cucccuucauccuuc

SEQ ID NO: 1984140 - RNA, 22 nt, Human
cucccuucaaccauuccccaug

SEQ ID NO: 1984141 - RNA, 23 nt, Human
cucccuucaaccauuccccaugg

SEQ ID NO: 1984142 - RNA, 21 nt, Human
cucccuucaaccauuccccau

SEQ ID NO: 1984143 - RNA, 20 nt, Human
cucccgaauagcugggacua

SEQ ID NO: 1984144 - RNA, 23 nt, Human
cucccgaauagcugggacuacag

SEQ ID NO: 1984145 - RNA, 12 nt, Human
cuccccuggacu

SEQ ID NO: 1984146 - RNA, 14 nt, Human
cuccccuggacucc

SEQ ID NO: 1984147 - RNA, 16 nt, Human
cuccccugugccagcc

SEQ ID NO: 1984148 - RNA, 22 nt, Human
cucccucaagccagacucugcc

SEQ ID NO: 1984149 - RNA, 14 nt, Human
cucccucacucuca

SEQ ID NO: 1984150 - RNA, 15 nt, Human
cucccucacucucag

SEQ ID NO: 1984151 - RNA, 16 nt, Human
cucccucacucucagg

SEQ ID NO: 1984152 - RNA, 17 nt, Human
cucccucacucucagga

SEQ ID NO: 1984153 - RNA, 18 nt, Human
cucccucacucucaggaa

SEQ ID NO: 1984154 - RNA, 14 nt, Human
cuccccugugccag

SEQ ID NO: 1984155 - RNA, 20 nt, Human
cucccgagacggcacugaga

SEQ ID NO: 1984156 - RNA, 22 nt, Human
cuccagcucuggcauggcuagg

SEQ ID NO: 1984157 - RNA, 16 nt, Human
cuccagcucuggcaug

SEQ ID NO: 1984158 - RNA, 22 nt, Human
cuccagcuggccgggagccuga

SEQ ID NO: 1984159 - RNA, 23 nt, Human
cuccagcuggccgggagccugau

SEQ ID NO: 1984160 - RNA, 13 nt, Human
cuccaugcugccu

SEQ ID NO: 1984161 - RNA, 14 nt, Human
cuccaugcugccuc

SEQ ID NO: 1984162 - RNA, 15 nt, Human
cuccaugcugccucc

SEQ ID NO: 1984163 - RNA, 16 nt, Human
cuccaugcugccucca

SEQ ID NO: 1984164 - RNA, 17 nt, Human
cuccaugcugccuccag

SEQ ID NO: 1984165 - RNA, 15 nt, Human
cucccaacucacccc

SEQ ID NO: 1984166 - RNA, 14 nt, Human
cucccaacucaccc

SEQ ID NO: 1984167 - RNA, 15 nt, Human
cucccacaaaggaga

SEQ ID NO: 1984168 - RNA, 16 nt, Human
cucccaaagugcuggg

SEQ ID NO: 1984169 - RNA, 23 nt, Human
cucccaaagugcugggauuacag

SEQ ID NO: 1984170 - RNA, 22 nt, Human
cucccaaaagcuagaacacugc

SEQ ID NO: 1984171 - RNA, 16 nt, Human
cuccauuucacuggcu

SEQ ID NO: 1984172 - RNA, 21 nt, Human
cuccauuuuggugucuuucuc

SEQ ID NO: 1984173 - RNA, 22 nt, Human
cuccauuuuggugucuuucucu

SEQ ID NO: 1984174 - RNA, 16 nt, Human
cucccaaaagcuagaa

SEQ ID NO: 1984175 - RNA, 16 nt, Human
cucccaucacuucccu

SEQ ID NO: 1984176 - RNA, 22 nt, Human
cucccagggagcaagggcaggg

SEQ ID NO: 1984177 - RNA, 13 nt, Human
cucccaggcucuc

SEQ ID NO: 1984178 - RNA, 12 nt, Human
cucccaggcucu

SEQ ID NO: 1984179 - RNA, 20 nt, Human
cucccagggagcaagggcag

SEQ ID NO: 1984180 - RNA, 20 nt, Human
cucccaggcgccccuucccc

SEQ ID NO: 1984181 - RNA, 22 nt, Human
cucccaggcgccccuucccccu

SEQ ID NO: 1984182 - RNA, 17 nt, Human
cucccaggcgccccuuc

SEQ ID NO: 1984183 - RNA, 19 nt, Human
cucccaggcgccccuuccc

SEQ ID NO: 1984184 - RNA, 14 nt, Human
cuccaaggccaggc

SEQ ID NO: 1984185 - RNA, 19 nt, Human
cuccaaggccaggccuugg

SEQ ID NO: 1984186 - RNA, 20 nt, Human
cuccaaggccaggccuuggg

SEQ ID NO: 1984187 - RNA, 14 nt, Human
cuccacucuccucu

SEQ ID NO: 1984188 - RNA, 13 nt, Human
cuccacugccuuc

SEQ ID NO: 1984189 - RNA, 14 nt, Human
cuccacugccuucg

SEQ ID NO: 1984190 - RNA, 15 nt, Human
cuccacugccuucga

SEQ ID NO: 1984191 - RNA, 16 nt, Human
cuccacugccuucgau

SEQ ID NO: 1984192 - RNA, 13 nt, Human
cuccacuggaugg

SEQ ID NO: 1984193 - RNA, 14 nt, Human
cuccagccccugga

SEQ ID NO: 1984194 - RNA, 13 nt, Human
cuccagccccugg

SEQ ID NO: 1984195 - RNA, 11 nt, Human
cuccagccccu

SEQ ID NO: 1984196 - RNA, 15 nt, Human
cuccagcucaccagc

SEQ ID NO: 1984197 - RNA, 16 nt, Human
cuccagcucaccagcc

SEQ ID NO: 1984198 - RNA, 18 nt, Human
cuccagcucaccagcccc

SEQ ID NO: 1984199 - RNA, 21 nt, Human
cuccagaccccuggcuuuuca

SEQ ID NO: 1984200 - RNA, 14 nt, Human
cuccacuggaugga

SEQ ID NO: 1984201 - RNA, 20 nt, Human
cuccagaguggggaugacau

SEQ ID NO: 1984202 - RNA, 21 nt, Human
cuccagagcugcggugucucc

SEQ ID NO: 1984203 - RNA, 16 nt, Human
cuccagagucagaagu

SEQ ID NO: 1984204 - RNA, 18 nt, Human
cuccaaaauaaaacuuuu

SEQ ID NO: 1984205 - RNA, 13 nt, Human
cucauuuugcuug

SEQ ID NO: 1984206 - RNA, 17 nt, Human
cuccaagcucccaggca

SEQ ID NO: 1984207 - RNA, 17 nt, Human
cuccaaggacagaaggc

SEQ ID NO: 1984208 - RNA, 20 nt, Human
cuccaaggacagaaggcucc

SEQ ID NO: 1984209 - RNA, 21 nt, Human
cucauuugucacacacuuugg

SEQ ID NO: 1984210 - RNA, 18 nt, Human
cucauuuuaaugauuguu

SEQ ID NO: 1984211 - RNA, 20 nt, Human
cucauuuuaaugauuguuua

SEQ ID NO: 1984212 - RNA, 21 nt, Human
cucauuuuaaugauuguuuaa

SEQ ID NO: 1984213 - RNA, 21 nt, Human
cucauugaccugaggcccuuc

SEQ ID NO: 1984214 - RNA, 19 nt, Human
cucauugaccugaggcccu

SEQ ID NO: 1984215 - RNA, 18 nt, Human
cucauucuccuuguguua

SEQ ID NO: 1984216 - RNA, 22 nt, Human
cucauucuccuuguguuacuaa

SEQ ID NO: 1984217 - RNA, 17 nt, Human
cucauugaccugaggcc

SEQ ID NO: 1984218 - RNA, 12 nt, Human
cucauucuucug

SEQ ID NO: 1984219 - RNA, 16 nt, Human
cucaguucucuucacu

SEQ ID NO: 1984220 - RNA, 17 nt, Human
cucaguucucuucacuc

SEQ ID NO: 1984221 - RNA, 15 nt, Human
cucaguuuuuuuccu

SEQ ID NO: 1984222 - RNA, 12 nt, Human
cucaguuuuucu

SEQ ID NO: 1984223 - RNA, 14 nt, Human
cucaguuuuucuua

SEQ ID NO: 1984224 - RNA, 19 nt, Human
cuauuggggaacucauugu

SEQ ID NO: 1984225 - RNA, 16 nt, Human
cuauugcugcuugagg

SEQ ID NO: 1984226 - RNA, 21 nt, Human
cuauuuaaagaaauauguauu

SEQ ID NO: 1984227 - RNA, 13 nt, Human
cuauuuaaagaaa

SEQ ID NO: 1984228 - RNA, 18 nt, Human
cuauuguuagucucuuga

SEQ ID NO: 1984229 - RNA, 11 nt, Human
cuauugguaaa

SEQ ID NO: 1984230 - RNA, 17 nt, Human
cucacagaacccuugga

SEQ ID NO: 1984231 - RNA, 12 nt, Human
cucacagacagg

SEQ ID NO: 1984232 - RNA, 13 nt, Human
cucacagacagga

SEQ ID NO: 1984233 - RNA, 15 nt, Human
cucacagacaggacc

SEQ ID NO: 1984234 - RNA, 16 nt, Human
cucacagacaggaccc

SEQ ID NO: 1984235 - RNA, 18 nt, Human
cucacagacaggaccccu

SEQ ID NO: 1984236 - RNA, 13 nt, Human
cucacacucaccc

SEQ ID NO: 1984237 - RNA, 23 nt, Human
cucacacggacacucaaaagcug

SEQ ID NO: 1984238 - RNA, 14 nt, Human
cucaaguccucuuu

SEQ ID NO: 1984239 - RNA, 19 nt, Human
cucaagccagacucugcca

SEQ ID NO: 1984240 - RNA, 15 nt, Human
cucaagcccaggagg

SEQ ID NO: 1984241 - RNA, 13 nt, Human
cucaagccaccag

SEQ ID NO: 1984242 - RNA, 21 nt, Human
cucaagccaccagaugugaca

SEQ ID NO: 1984243 - RNA, 16 nt, Human
cucaagcccaggaggg

SEQ ID NO: 1984244 - RNA, 18 nt, Human
cucaacucuccuccagag

SEQ ID NO: 1984245 - RNA, 16 nt, Human
cucaacucuccuccag

SEQ ID NO: 1984246 - RNA, 12 nt, Human
cuauuuauuuau

SEQ ID NO: 1984247 - RNA, 19 nt, Human
cuauuuauuuauuuauuca

SEQ ID NO: 1984248 - RNA, 18 nt, Human
cuauuucaacuucaggaa

SEQ ID NO: 1984249 - RNA, 11 nt, Human
cuauuucuuga

SEQ ID NO: 1984250 - RNA, 14 nt, Human
cucaaauuucuaaa

SEQ ID NO: 1984251 - RNA, 22 nt, Human
cucaacaugucuccuacugagg

SEQ ID NO: 1984252 - RNA, 15 nt, Human
cucaaauuucuaaau

SEQ ID NO: 1984253 - RNA, 17 nt, Human
cucaaauuucuaaaucu

SEQ ID NO: 1984254 - RNA, 14 nt, Human
cucaaccaaauggu

SEQ ID NO: 1984255 - RNA, 20 nt, Human
cucaaccaaaugguacaaaa

SEQ ID NO: 1984256 - RNA, 14 nt, Human
cucaacucuccucc

SEQ ID NO: 1984257 - RNA, 19 nt, Human
cuauagccuaggugacaga

SEQ ID NO: 1984258 - RNA, 18 nt, Human
cuauagccuaggugacag

SEQ ID NO: 1984259 - RNA, 20 nt, Human
cuauagccuaggugacagag

SEQ ID NO: 1984260 - RNA, 21 nt, Human
cuauagccuaggugacagagu

SEQ ID NO: 1984261 - RNA, 21 nt, Human
cuauaccauuuccguaauucu

SEQ ID NO: 1984262 - RNA, 17 nt, Human
cuaggaagacuuuggaa

SEQ ID NO: 1984263 - RNA, 15 nt, Human
cuaggaagacuuugg

SEQ ID NO: 1984264 - RNA, 20 nt, Human
cuaggaacacuccuucacag

SEQ ID NO: 1984265 - RNA, 12 nt, Human
cuauaauuuaaa

SEQ ID NO: 1984266 - RNA, 13 nt, Human
cuauaauuuaaau

SEQ ID NO: 1984267 - RNA, 18 nt, Human
cuauaauuauuauucaga

SEQ ID NO: 1984268 - RNA, 22 nt, Human
cuaugaaguuuuuuuuauacag

SEQ ID NO: 1984269 - RNA, 20 nt, Human
cuaugauguuaguuuuccuu

SEQ ID NO: 1984270 - RNA, 14 nt, Human
cuaugcaaaaagcu

SEQ ID NO: 1984271 - RNA, 19 nt, Human
cuaugauuuggaaaauaaa

SEQ ID NO: 1984272 - RNA, 15 nt, Human
cuaugauuuggaaaa

SEQ ID NO: 1984273 - RNA, 19 nt, Human
cuaugauuuaauuugaaau

SEQ ID NO: 1984274 - RNA, 20 nt, Human
cuaugauuuaauuugaaaua

SEQ ID NO: 1984275 - RNA, 17 nt, Human
cuauucaguaauaacuc

SEQ ID NO: 1984276 - RNA, 16 nt, Human
cuauguaucaaugagu

SEQ ID NO: 1984277 - RNA, 18 nt, Human
cuauuaguguuauaugaa

SEQ ID NO: 1984278 - RNA, 19 nt, Human
cuauuaguguuauaugaac

SEQ ID NO: 1984279 - RNA, 13 nt, Human
cuauguaucaaug

SEQ ID NO: 1984280 - RNA, 19 nt, Human
cuauggggauagaugugug

SEQ ID NO: 1984281 - RNA, 20 nt, Human
cuauggggauagaugugugg

SEQ ID NO: 1984282 - RNA, 21 nt, Human
cuauggggauagaugugugga

SEQ ID NO: 1984283 - RNA, 19 nt, Human
cuaugggggcacugaggac

SEQ ID NO: 1984284 - RNA, 23 nt, Human
cuauucaguaauaacucuacccu

SEQ ID NO: 1984285 - RNA, 16 nt, Human
cuauugagucuucaug

SEQ ID NO: 1984286 - RNA, 17 nt, Human
cuauugagucuucaugu

SEQ ID NO: 1984287 - RNA, 11 nt, Human
cuaggaaaaaa

SEQ ID NO: 1984288 - RNA, 14 nt, Human
cuaggaaaagaaau

SEQ ID NO: 1984289 - RNA, 19 nt, Human
cuaggaaaagaaaucuaua

SEQ ID NO: 1984290 - RNA, 22 nt, Human
cuagcuggagaggagcccugcc

SEQ ID NO: 1984291 - RNA, 23 nt, Human
cuagcuggagaggagcccugccu

SEQ ID NO: 1984292 - RNA, 13 nt, Human
cuagcuggagagg

SEQ ID NO: 1984293 - RNA, 18 nt, Human
cuagcuggagaggagccc

SEQ ID NO: 1984294 - RNA, 19 nt, Human
cuagcuggagaggagcccu

SEQ ID NO: 1984295 - RNA, 21 nt, Human
cuagcuggagaggagcccugc

SEQ ID NO: 1984296 - RNA, 10 nt, Human
cuagcugaau

SEQ ID NO: 1984297 - RNA, 24 nt, Human
cuagauacuguaucaugacaaaga

SEQ ID NO: 1984298 - RNA, 13 nt, Human
cuagauacuguau

SEQ ID NO: 1984299 - RNA, 16 nt, Human
cuagauacuguaucau

SEQ ID NO: 1984300 - RNA, 19 nt, Human
cuagccugugccucuggga

SEQ ID NO: 1984301 - RNA, 21 nt, Human
cuagccugugccucugggacu

SEQ ID NO: 1984302 - RNA, 22 nt, Human
cuagccugugccucugggacug

SEQ ID NO: 1984303 - RNA, 21 nt, Human
cuagccuuagaagucacacag

SEQ ID NO: 1984304 - RNA, 22 nt, Human
cuagccuuagaagucacacagu

SEQ ID NO: 1984305 - RNA, 23 nt, Human
cuagccuuagaagucacacagua

SEQ ID NO: 1984306 - RNA, 16 nt, Human
cuagcguagugcagca

SEQ ID NO: 1984307 - RNA, 19 nt, Human
cuagcguagugcagcaggg

SEQ ID NO: 1984308 - RNA, 20 nt, Human
cuagcguagugcagcagggc

SEQ ID NO: 1984309 - RNA, 22 nt, Human
cuagcguagugcagcagggcag

SEQ ID NO: 1984310 - RNA, 22 nt, Human
cuacucuagagaaguggacugg

SEQ ID NO: 1984311 - RNA, 19 nt, Human
cuacuccugucuucugcuu

SEQ ID NO: 1984312 - RNA, 20 nt, Human
cuacuccugucuucugcuuu

SEQ ID NO: 1984313 - RNA, 21 nt, Human
cuacuccugucuucugcuuug

SEQ ID NO: 1984314 - RNA, 22 nt, Human
cuacuccugucuucugcuuugu

SEQ ID NO: 1984315 - RNA, 22 nt, Human
cuacucuggagguuuguuuaga

SEQ ID NO: 1984316 - RNA, 12 nt, Human
cuacucuguguc

SEQ ID NO: 1984317 - RNA, 13 nt, Human
cuacucuguguca

SEQ ID NO: 1984318 - RNA, 14 nt, Human
cuacugggagccua

SEQ ID NO: 1984319 - RNA, 15 nt, Human
cuacugggagccuac

SEQ ID NO: 1984320 - RNA, 21 nt, Human
cuacuggcagcugauacguuu

SEQ ID NO: 1984321 - RNA, 16 nt, Human
cuacugcauuuaggga

SEQ ID NO: 1984322 - RNA, 17 nt, Human
cuacugcauuuagggag

SEQ ID NO: 1984323 - RNA, 19 nt, Human
cuacugcauuuagggagua

SEQ ID NO: 1984324 - RNA, 14 nt, Human
cuacugccaaccuc

SEQ ID NO: 1984325 - RNA, 19 nt, Human
cuacugccaaccucgcucc

SEQ ID NO: 1984326 - RNA, 22 nt, Human
cuacugccaaccucgcuccaac

SEQ ID NO: 1984327 - RNA, 23 nt, Human
cuacugccaaccucgcuccaacu

SEQ ID NO: 1984328 - RNA, 18 nt, Human
cuacugggagccuaccca

SEQ ID NO: 1984329 - RNA, 17 nt, Human
cuacuggguguagacug

SEQ ID NO: 1984330 - RNA, 19 nt, Human
cuacugguccucuuaacug

SEQ ID NO: 1984331 - RNA, 19 nt, Human
cuacuguccuacccacccu

SEQ ID NO: 1984332 - RNA, 19 nt, Human
cuacucgaguuacagacaa

SEQ ID NO: 1984333 - RNA, 16 nt, Human
cuacucgaguuacaga

SEQ ID NO: 1984334 - RNA, 15 nt, Human
cuacucgaguuacag

SEQ ID NO: 1984335 - RNA, 13 nt, Human
cuacuccugucuu

SEQ ID NO: 1984336 - RNA, 14 nt, Human
cuacuccugucuuc

SEQ ID NO: 1984337 - RNA, 16 nt, Human
cuacuccugucuucug

SEQ ID NO: 1984338 - RNA, 17 nt, Human
cuacuccugucuucugc

SEQ ID NO: 1984339 - RNA, 12 nt, Human
cuacucauuuua

SEQ ID NO: 1984340 - RNA, 16 nt, Human
cuacucauuuuaauga

SEQ ID NO: 1984341 - RNA, 17 nt, Human
cuaccgagucucuucuc

SEQ ID NO: 1984342 - RNA, 19 nt, Human
cuaccgagucucuucucca

SEQ ID NO: 1984343 - RNA, 23 nt, Human
cuaccgagucucuucuccacugg

SEQ ID NO: 1984344 - RNA, 21 nt, Human
cuaccgagucucuucuccacu

SEQ ID NO: 1984345 - RNA, 22 nt, Human
cuaccgagucucuucuccacug

SEQ ID NO: 1984346 - RNA, 14 nt, Human
cuaccuaacccaga

SEQ ID NO: 1984347 - RNA, 21 nt, Human
cuagagaaguggacuggagga

SEQ ID NO: 1984348 - RNA, 22 nt, Human
cuagagaaguggacuggaggag

SEQ ID NO: 1984349 - RNA, 23 nt, Human
cuagagaaguggacuggaggagc

SEQ ID NO: 1984350 - RNA, 20 nt, Human
cuagagagugugauguucac

SEQ ID NO: 1984351 - RNA, 17 nt, Human
cuagagggaccucuccc

SEQ ID NO: 1984352 - RNA, 16 nt, Human
cuagaguagagguaua

SEQ ID NO: 1984353 - RNA, 20 nt, Human
cuagaguagagguauaauug

SEQ ID NO: 1984354 - RNA, 21 nt, Human
cuagaguagagguauaauugu

SEQ ID NO: 1984355 - RNA, 15 nt, Human
cuagagguucaaaga

SEQ ID NO: 1984356 - RNA, 16 nt, Human
cuagagggaccucucc

SEQ ID NO: 1984357 - RNA, 15 nt, Human
cuagagggaccucuc

SEQ ID NO: 1984358 - RNA, 14 nt, Human
cuagagggaccucu

SEQ ID NO: 1984359 - RNA, 23 nt, Human
cuagaggccuuuaguuauaaagg

SEQ ID NO: 1984360 - RNA, 17 nt, Human
cuagagguucaaagaua

SEQ ID NO: 1984361 - RNA, 18 nt, Human
cuagagguucaaagauau

SEQ ID NO: 1984362 - RNA, 21 nt, Human
cuagagguucaaagauauuuu

SEQ ID NO: 1984363 - RNA, 18 nt, Human
cuagacugccacaaggaa

SEQ ID NO: 1984364 - RNA, 22 nt, Human
cuacuuuuaaagaauuucuuua

SEQ ID NO: 1984365 - RNA, 18 nt, Human
cuacuguuuaagugaauu

SEQ ID NO: 1984366 - RNA, 23 nt, Human
cuacuguucagcuuuuauuccug

SEQ ID NO: 1984367 - RNA, 20 nt, Human
cuacuguccuacccacccuc

SEQ ID NO: 1984368 - RNA, 15 nt, Human
cuacuuuuuaacaga

SEQ ID NO: 1984369 - RNA, 17 nt, Human
cuacuuagcaugucccu

SEQ ID NO: 1984370 - RNA, 16 nt, Human
cuacuuagcacuucag

SEQ ID NO: 1984371 - RNA, 22 nt, Human
cuacuuagcaugucccuaccga

SEQ ID NO: 1984372 - RNA, 19 nt, Human
cuacuuagcacuucagggc

SEQ ID NO: 1984373 - RNA, 11 nt, Human
cuacagggccg

SEQ ID NO: 1984374 - RNA, 15 nt, Human
cuacaggcacccacc

SEQ ID NO: 1984375 - RNA, 17 nt, Human
cuacaggcacccaccau

SEQ ID NO: 1984376 - RNA, 14 nt, Human
cuacaggagugagc

SEQ ID NO: 1984377 - RNA, 15 nt, Human
cuacaggagugagca

SEQ ID NO: 1984378 - RNA, 16 nt, Human
cuacaggagugagcac

SEQ ID NO: 1984379 - RNA, 14 nt, Human
cuacaggugugagu

SEQ ID NO: 1984380 - RNA, 16 nt, Human
cuacaggugugaguca

SEQ ID NO: 1984381 - RNA, 20 nt, Human
cuacauggaguauaugucaa

SEQ ID NO: 1984382 - RNA, 18 nt, Human
cuacauggaguauauguc

SEQ ID NO: 1984383 - RNA, 13 nt, Human
cuacaguccuccc

SEQ ID NO: 1984384 - RNA, 22 nt, Human
cuacagcuugaccgugaggcca

SEQ ID NO: 1984385 - RNA, 19 nt, Human
cuacagcuugaccgugagg

SEQ ID NO: 1984386 - RNA, 23 nt, Human
cuacagcuugaccgugaggccag

SEQ ID NO: 1984387 - RNA, 21 nt, Human
cuacagcuaaucagcauucuc

SEQ ID NO: 1984388 - RNA, 22 nt, Human
cuacagcuaaucagcauucuca

SEQ ID NO: 1984389 - RNA, 14 nt, Human
cuacagcuccccca

SEQ ID NO: 1984390 - RNA, 19 nt, Human
cuacagcucccccagcucc

SEQ ID NO: 1984391 - RNA, 18 nt, Human
cuacagcuaaucagcauu

SEQ ID NO: 1984392 - RNA, 19 nt, Human
cuacagcuaaucagcauuc

SEQ ID NO: 1984393 - RNA, 17 nt, Human
cuacacugugcugaguc

SEQ ID NO: 1984394 - RNA, 14 nt, Human
cuacacugugcuga

SEQ ID NO: 1984395 - RNA, 13 nt, Human
cuacacugugcug

SEQ ID NO: 1984396 - RNA, 22 nt, Human
cuacagaggccaugggccuccu

SEQ ID NO: 1984397 - RNA, 18 nt, Human
cuacagaggccaugggcc

SEQ ID NO: 1984398 - RNA, 20 nt, Human
cuacagaggccaugggccuc

SEQ ID NO: 1984399 - RNA, 17 nt, Human
cuacccucuuagaaaaa

SEQ ID NO: 1984400 - RNA, 13 nt, Human
cuacccaggugcu

SEQ ID NO: 1984401 - RNA, 18 nt, Human
cuacccagcgagcccugg

SEQ ID NO: 1984402 - RNA, 13 nt, Human
cuacccacccucc

SEQ ID NO: 1984403 - RNA, 15 nt, Human
cuacccagcgagccc

SEQ ID NO: 1984404 - RNA, 17 nt, Human
cuacccagcgagcccug

SEQ ID NO: 1984405 - RNA, 14 nt, Human
cuacauuuccgcca

SEQ ID NO: 1984406 - RNA, 13 nt, Human
cuacauucuguua

SEQ ID NO: 1984407 - RNA, 14 nt, Human
cuacauucuguuaa

SEQ ID NO: 1984408 - RNA, 22 nt, Human
cuacauuauaaaugucucuuua

SEQ ID NO: 1984409 - RNA, 17 nt, Human
cuacaugcuuugugaac

SEQ ID NO: 1984410 - RNA, 19 nt, Human
cuacaugcuuguugacaga

SEQ ID NO: 1984411 - RNA, 22 nt, Human
cuacauggggucuggguggggg

SEQ ID NO: 1984412 - RNA, 18 nt, Human
cuaccacggccuccuuuc

SEQ ID NO: 1984413 - RNA, 19 nt, Human
cuaccacggccuccuuucc

SEQ ID NO: 1984414 - RNA, 21 nt, Human
cuaccacggccuccuuuccgu

SEQ ID NO: 1984415 - RNA, 18 nt, Human
cuaccauccccuguagag

SEQ ID NO: 1984416 - RNA, 15 nt, Human
cuaccaaaggacacu

SEQ ID NO: 1984417 - RNA, 13 nt, Human
cuaccaacuuuca

SEQ ID NO: 1984418 - RNA, 14 nt, Human
cuaccaacuuucaa

SEQ ID NO: 1984419 - RNA, 23 nt, Human
cuaccaacuuucaagaacuuguu

SEQ ID NO: 1984420 - RNA, 21 nt, Human
cuacacaggggaaaagaggag

SEQ ID NO: 1984421 - RNA, 13 nt, Human
cuacacaggacag

SEQ ID NO: 1984422 - RNA, 21 nt, Human
cuacacauauaaauugucuua

SEQ ID NO: 1984423 - RNA, 15 nt, Human
cuacacaggacaggg

SEQ ID NO: 1984424 - RNA, 22 nt, Human
cuacacaggacagggguuccuu

SEQ ID NO: 1984425 - RNA, 14 nt, Human
cuaauuccacagcu

SEQ ID NO: 1984426 - RNA, 15 nt, Human
cuaauuccacagcug

SEQ ID NO: 1984427 - RNA, 16 nt, Human
cuaauuccacagcugc

SEQ ID NO: 1984428 - RNA, 23 nt, Human
cuacacgguucaaaccugugaag

SEQ ID NO: 1984429 - RNA, 23 nt, Human
cuacacgagauacagaauuuuau

SEQ ID NO: 1984430 - RNA, 22 nt, Human
cuaaugcgcaggcuggcccugc

SEQ ID NO: 1984431 - RNA, 23 nt, Human
cuaaugcgcaggcuggcccugcc

SEQ ID NO: 1984432 - RNA, 12 nt, Human
cuaaugggacac

SEQ ID NO: 1984433 - RNA, 13 nt, Human
cuaaugggacacu

SEQ ID NO: 1984434 - RNA, 22 nt, Human
cuaauuauacccccugcaaagc

SEQ ID NO: 1984435 - RNA, 14 nt, Human
cuaauuaauuucag

SEQ ID NO: 1984436 - RNA, 15 nt, Human
cuaauuaauuucagu

SEQ ID NO: 1984437 - RNA, 17 nt, Human
cuaauuaauuucaguaa

SEQ ID NO: 1984438 - RNA, 18 nt, Human
cuaauauguaacaagcca

SEQ ID NO: 1984439 - RNA, 22 nt, Human
cuaauauccacuuguccaugug

SEQ ID NO: 1984440 - RNA, 20 nt, Human
cuaaucagcauucucacucc

SEQ ID NO: 1984441 - RNA, 21 nt, Human
cuaaucagcauucucacuccu

SEQ ID NO: 1984442 - RNA, 15 nt, Human
cuaaugcgcaggcug

SEQ ID NO: 1984443 - RNA, 16 nt, Human
cuaaugcgcaggcugg

SEQ ID NO: 1984444 - RNA, 19 nt, Human
cuaaugcgcaggcuggccc

SEQ ID NO: 1984445 - RNA, 20 nt, Human
cuaaugcgcaggcuggcccu

SEQ ID NO: 1984446 - RNA, 22 nt, Human
cuaagcuauucaguaauaacuc

SEQ ID NO: 1984447 - RNA, 13 nt, Human
cuaagauguuaua

SEQ ID NO: 1984448 - RNA, 14 nt, Human
cuaagauguuauau

SEQ ID NO: 1984449 - RNA, 19 nt, Human
cuaagauguuauauuuuuc

SEQ ID NO: 1984450 - RNA, 20 nt, Human
cuaagauguuauauuuuucu

SEQ ID NO: 1984451 - RNA, 15 nt, Human
cuaagauuaauagca

SEQ ID NO: 1984452 - RNA, 21 nt, Human
cuaagcuucacuguaaaauaa

SEQ ID NO: 1984453 - RNA, 14 nt, Human
cuaaggaaccuucc

SEQ ID NO: 1984454 - RNA, 15 nt, Human
cuaaggaaccuuccu

SEQ ID NO: 1984455 - RNA, 21 nt, Human
cuaaggacaagguaaggaggg

SEQ ID NO: 1984456 - RNA, 14 nt, Human
cuaauaaagcugug

SEQ ID NO: 1984457 - RNA, 17 nt, Human
cuaauaacaugugaaaa

SEQ ID NO: 1984458 - RNA, 18 nt, Human
cuaauaaucauuggauuc

SEQ ID NO: 1984459 - RNA, 17 nt, Human
cuaauaagcuaguugaa

SEQ ID NO: 1984460 - RNA, 22 nt, Human
cuaauaagcuaguugaauacuu

SEQ ID NO: 1984461 - RNA, 12 nt, Human
cuaauaauaaau

SEQ ID NO: 1984462 - RNA, 13 nt, Human
cuaauaauaaaua

SEQ ID NO: 1984463 - RNA, 14 nt, Human
cuaauaauaaauag

SEQ ID NO: 1984464 - RNA, 15 nt, Human
cuaauaauaaauagu

SEQ ID NO: 1984465 - RNA, 16 nt, Human
cuaauaauaaauaguu

SEQ ID NO: 1984466 - RNA, 17 nt, Human
cuaauaauaaauaguuc

SEQ ID NO: 1984467 - RNA, 20 nt, Human
cuaauaauaaauaguucuuc

SEQ ID NO: 1984468 - RNA, 21 nt, Human
cuaauacagccccuuuucccu

SEQ ID NO: 1984469 - RNA, 17 nt, Human
cuaauagacaauuuauu

SEQ ID NO: 1984470 - RNA, 19 nt, Human
cuaauagacaauuuauuau

SEQ ID NO: 1984471 - RNA, 23 nt, Human
cuaauagacaauuuauuauggca

SEQ ID NO: 1984472 - RNA, 19 nt, Human
cuaauagcuacaucuacuu

SEQ ID NO: 1984473 - RNA, 16 nt, Human
cuaauauccacuuguc

SEQ ID NO: 1984474 - RNA, 13 nt, Human
cguuuucaaaauu

SEQ ID NO: 1984475 - RNA, 13 nt, Human
cguuuuaaggacu

SEQ ID NO: 1984476 - RNA, 16 nt, Human
cguuuuaaggacugac

SEQ ID NO: 1984477 - RNA, 23 nt, Human
cguuuuaaggacugacugaggca

SEQ ID NO: 1984478 - RNA, 13 nt, Human
cuaaaaauaaagc

SEQ ID NO: 1984479 - RNA, 14 nt, Human
cuaaaaauaaagca

SEQ ID NO: 1984480 - RNA, 15 nt, Human
cuaaaaauaaagcac

SEQ ID NO: 1984481 - RNA, 17 nt, Human
cuaaaaauaacuguaau

SEQ ID NO: 1984482 - RNA, 22 nt, Human
cuaaaaauaacuguaauuauuu

SEQ ID NO: 1984483 - RNA, 23 nt, Human
cuaaaaauaacuguaauuauuug

SEQ ID NO: 1984484 - RNA, 14 nt, Human
cuaaaauaagaaua

SEQ ID NO: 1984485 - RNA, 15 nt, Human
cuaaaauaauuuugu

SEQ ID NO: 1984486 - RNA, 17 nt, Human
cuaaaauaauuuuguaa

SEQ ID NO: 1984487 - RNA, 18 nt, Human
cuaaaauaauuuuguaau

SEQ ID NO: 1984488 - RNA, 23 nt, Human
cgggaggauguucugggacacag

SEQ ID NO: 1984489 - RNA, 18 nt, Human
cgggacguggcaccuccu

SEQ ID NO: 1984490 - RNA, 21 nt, Human
cgggaggauguucugggacac

SEQ ID NO: 1984491 - RNA, 15 nt, Human
cgggacguggcaccu

SEQ ID NO: 1984492 - RNA, 20 nt, Human
cguuuguuccccaagacauu

SEQ ID NO: 1984493 - RNA, 19 nt, Human
cguuugauuugucacugcu

SEQ ID NO: 1984494 - RNA, 20 nt, Human
cgggaggcagagguugcagu

SEQ ID NO: 1984495 - RNA, 15 nt, Human
cuaaacuaggcuccu

SEQ ID NO: 1984496 - RNA, 17 nt, Human
cuaaacuaggcuccuuc

SEQ ID NO: 1984497 - RNA, 16 nt, Human
cuaaacucugaauaag

SEQ ID NO: 1984498 - RNA, 12 nt, Human
cuaaacugcccc

SEQ ID NO: 1984499 - RNA, 13 nt, Human
cuaaacugccccc

SEQ ID NO: 1984500 - RNA, 22 nt, Human
cuaaaauauuuaugaagaaaau

SEQ ID NO: 1984501 - RNA, 20 nt, Human
cuaaaauauuuaugaagaaa

SEQ ID NO: 1984502 - RNA, 21 nt, Human
cuaaaauauuuaugaagaaaa

SEQ ID NO: 1984503 - RNA, 22 nt, Human
cuaaaauaucuggguggcuuaa

SEQ ID NO: 1984504 - RNA, 10 nt, Human
cuaaaauauu

SEQ ID NO: 1984505 - RNA, 15 nt, Human
cuaaaauauuuauga

SEQ ID NO: 1984506 - RNA, 16 nt, Human
cuaaaauauuuaugaa

SEQ ID NO: 1984507 - RNA, 21 nt, Human
cuaaaucuccaaaauaaaacu

SEQ ID NO: 1984508 - RNA, 17 nt, Human
cuaaauauauuuuaaga

SEQ ID NO: 1984509 - RNA, 22 nt, Human
cuaaaugaaaaucgugacaaca

SEQ ID NO: 1984510 - RNA, 18 nt, Human
cuaaauaaguuauaaaga

SEQ ID NO: 1984511 - RNA, 21 nt, Human
cuaaacugcccccucugcccu

SEQ ID NO: 1984512 - RNA, 13 nt, Human
cuaaaauguucua

SEQ ID NO: 1984513 - RNA, 18 nt, Human
cuaagauauacuuguuuu

SEQ ID NO: 1984514 - RNA, 22 nt, Human
cuaagauauacuuguuuuugua

SEQ ID NO: 1984515 - RNA, 23 nt, Human
cuaagauauacuuguuuuuguaa

SEQ ID NO: 1984516 - RNA, 17 nt, Human
cuaagaucgguuaacaa

SEQ ID NO: 1984517 - RNA, 18 nt, Human
cuaagaucgguuaacaaa

SEQ ID NO: 1984518 - RNA, 20 nt, Human
cuaagaucgguuaacaaaua

SEQ ID NO: 1984519 - RNA, 21 nt, Human
cuaagaucgguuaacaaauaa

SEQ ID NO: 1984520 - RNA, 23 nt, Human
cuaagagggagggagggcuccag

SEQ ID NO: 1984521 - RNA, 22 nt, Human
cuaagagggagggagggcucca

SEQ ID NO: 1984522 - RNA, 15 nt, Human
cuaagagggagggag

SEQ ID NO: 1984523 - RNA, 13 nt, Human
cuaagagggaggg

SEQ ID NO: 1984524 - RNA, 18 nt, Human
cuaagaggaaaguacauu

SEQ ID NO: 1984525 - RNA, 12 nt, Human
cuaaccagggcc

SEQ ID NO: 1984526 - RNA, 12 nt, Human
cuaaccacgcug

SEQ ID NO: 1984527 - RNA, 14 nt, Human
cuaaccacgcugga

SEQ ID NO: 1984528 - RNA, 15 nt, Human
cuaaccacagcuccu

SEQ ID NO: 1984529 - RNA, 21 nt, Human
cuaacagcaguuucagguaga

SEQ ID NO: 1984530 - RNA, 19 nt, Human
cuaaauucuuucauuuuag

SEQ ID NO: 1984531 - RNA, 19 nt, Human
cuaaauugacacuuaaaaa

SEQ ID NO: 1984532 - RNA, 16 nt, Human
cuaaauucaugcugcu

SEQ ID NO: 1984533 - RNA, 20 nt, Human
cuaacaacauuguagccuca

SEQ ID NO: 1984534 - RNA, 23 nt, Human
cuaacaaacagauucuuuuaugu

SEQ ID NO: 1984535 - RNA, 23 nt, Human
cccucccucuuucccucccuucc

SEQ ID NO: 1984536 - RNA, 17 nt, Human
cccucccggcccugccu

SEQ ID NO: 1984537 - RNA, 14 nt, Human
cccucccugccccu

SEQ ID NO: 1984538 - RNA, 21 nt, Human
cccucgucuuucccaaaggca

SEQ ID NO: 1984539 - RNA, 14 nt, Human
cccgcucagcccuc

SEQ ID NO: 1984540 - RNA, 12 nt, Human
cccgcucagccc

SEQ ID NO: 1984541 - RNA, 13 nt, Human
cccgcucagcccu

SEQ ID NO: 1984542 - RNA, 15 nt, Human
cccgcucagcccucc

SEQ ID NO: 1984543 - RNA, 22 nt, Human
cccucuggcuccagcuggccgg

SEQ ID NO: 1984544 - RNA, 12 nt, Human
cccucuggcucc

SEQ ID NO: 1984545 - RNA, 16 nt, Human
cccucuggcuccagcu

SEQ ID NO: 1984546 - RNA, 17 nt, Human
cccucuggcuccagcug

SEQ ID NO: 1984547 - RNA, 20 nt, Human
cccucuguucugcacacagc

SEQ ID NO: 1984548 - RNA, 21 nt, Human
cccucuguucugcacacagca

SEQ ID NO: 1984549 - RNA, 14 nt, Human
cccucuucccuggu

SEQ ID NO: 1984550 - RNA, 22 nt, Human
cccucuucccugguaagaaaaa

SEQ ID NO: 1984551 - RNA, 12 nt, Human
cccucuuccucu

SEQ ID NO: 1984552 - RNA, 13 nt, Human
cccucuuccucuu

SEQ ID NO: 1984553 - RNA, 18 nt, Human
cccucuuccucuugaccc

SEQ ID NO: 1984554 - RNA, 23 nt, Human
cccucuuccucuugacccugcac

SEQ ID NO: 1984555 - RNA, 20 nt, Human
cccucuuucccucccuuccu

SEQ ID NO: 1984556 - RNA, 17 nt, Human
cccucuuucccucccuu

SEQ ID NO: 1984557 - RNA, 12 nt, Human
cccucuuucccu

SEQ ID NO: 1984558 - RNA, 16 nt, Human
cccucuucuucucaag

SEQ ID NO: 1984559 - RNA, 12 nt, Human
cccucugcccug

SEQ ID NO: 1984560 - RNA, 13 nt, Human
cccucugcccugc

SEQ ID NO: 1984561 - RNA, 14 nt, Human
cccucugcccugcg

SEQ ID NO: 1984562 - RNA, 17 nt, Human
cccucuccuuccugugu

SEQ ID NO: 1984563 - RNA, 19 nt, Human
cccucugcccacucccugc

SEQ ID NO: 1984564 - RNA, 18 nt, Human
cccucugcccacucccug

SEQ ID NO: 1984565 - RNA, 15 nt, Human
cccucugcccacucc

SEQ ID NO: 1984566 - RNA, 14 nt, Human
cccucuccuuccug

SEQ ID NO: 1984567 - RNA, 11 nt, Human
cccucugccca

SEQ ID NO: 1984568 - RNA, 13 nt, Human
cccucuccagcag

SEQ ID NO: 1984569 - RNA, 17 nt, Human
cccugcaguuccccugg

SEQ ID NO: 1984570 - RNA, 21 nt, Human
cccugcaguuccccuggaagc

SEQ ID NO: 1984571 - RNA, 22 nt, Human
cccugcaguuccccuggaagca

SEQ ID NO: 1984572 - RNA, 11 nt, Human
cccugccuccu

SEQ ID NO: 1984573 - RNA, 14 nt, Human
cccugccucucugc

SEQ ID NO: 1984574 - RNA, 13 nt, Human
cccugccucucug

SEQ ID NO: 1984575 - RNA, 21 nt, Human
cccugaggcagguccccagac

SEQ ID NO: 1984576 - RNA, 13 nt, Human
cccugcagcucuc

SEQ ID NO: 1984577 - RNA, 21 nt, Human
cccugcagcucucaugcugcc

SEQ ID NO: 1984578 - RNA, 17 nt, Human
cccugaggcaggucccc

SEQ ID NO: 1984579 - RNA, 18 nt, Human
cccugaggcaggucccca

SEQ ID NO: 1984580 - RNA, 20 nt, Human
cccugaggcagguccccaga

SEQ ID NO: 1984581 - RNA, 12 nt, Human
cccugaggccca

SEQ ID NO: 1984582 - RNA, 19 nt, Human
cccugcuccagaagauagc

SEQ ID NO: 1984583 - RNA, 10 nt, Human
cccugcuccc

SEQ ID NO: 1984584 - RNA, 11 nt, Human
cccugcucccu

SEQ ID NO: 1984585 - RNA, 22 nt, Human
cccugcuacugccaaccucgcu

SEQ ID NO: 1984586 - RNA, 13 nt, Human
cccugcucacugc

SEQ ID NO: 1984587 - RNA, 19 nt, Human
cccugcgggucacaggagg

SEQ ID NO: 1984588 - RNA, 21 nt, Human
cccugcgggucacaggaggga

SEQ ID NO: 1984589 - RNA, 15 nt, Human
cccugccucucugca

SEQ ID NO: 1984590 - RNA, 13 nt, Human
cccugccucuccg

SEQ ID NO: 1984591 - RNA, 14 nt, Human
cccugccucuccgc

SEQ ID NO: 1984592 - RNA, 16 nt, Human
cccugccucuccgccc

SEQ ID NO: 1984593 - RNA, 21 nt, Human
cccugccucuccgccccugag

SEQ ID NO: 1984594 - RNA, 22 nt, Human
cccugccucuccgccccugagc

SEQ ID NO: 1984595 - RNA, 23 nt, Human
cccugccucuccgccccugagcc

SEQ ID NO: 1984596 - RNA, 22 nt, Human
cccugcucuccgaccagacacc

SEQ ID NO: 1984597 - RNA, 21 nt, Human
cccugcugagucccaggcuga

SEQ ID NO: 1984598 - RNA, 21 nt, Human
cccugcucuccgaccagacac

SEQ ID NO: 1984599 - RNA, 23 nt, Human
cccugcucccuccgggucuuccu

SEQ ID NO: 1984600 - RNA, 23 nt, Human
cccugcugagucccaggcugagc

SEQ ID NO: 1984601 - RNA, 16 nt, Human
cccuggugcugccaca

SEQ ID NO: 1984602 - RNA, 14 nt, Human
cccuuccccuuccu

SEQ ID NO: 1984603 - RNA, 15 nt, Human
cccuuccccuuccuu

SEQ ID NO: 1984604 - RNA, 18 nt, Human
cccuuccccuuccuucuu

SEQ ID NO: 1984605 - RNA, 22 nt, Human
cccuugaggaaacaacagcuuu

SEQ ID NO: 1984606 - RNA, 22 nt, Human
cccuugcuaccacggccuccuu

SEQ ID NO: 1984607 - RNA, 13 nt, Human
cccuugccagcug

SEQ ID NO: 1984608 - RNA, 14 nt, Human
cccuugccagcugc

SEQ ID NO: 1984609 - RNA, 18 nt, Human
cccuugccagcugcugag

SEQ ID NO: 1984610 - RNA, 20 nt, Human
cccuugccagcugcugagcc

SEQ ID NO: 1984611 - RNA, 21 nt, Human
cccuugccagcugcugagccg

SEQ ID NO: 1984612 - RNA, 19 nt, Human
cccuugcccaugcugggcu

SEQ ID NO: 1984613 - RNA, 18 nt, Human
cccuucaaccauucccca

SEQ ID NO: 1984614 - RNA, 14 nt, Human
cccuucaaccauuc

SEQ ID NO: 1984615 - RNA, 18 nt, Human
cccuuccaguuuauucca

SEQ ID NO: 1984616 - RNA, 19 nt, Human
cccuuccaccugcucugcu

SEQ ID NO: 1984617 - RNA, 16 nt, Human
cccuuccaccugcucu

SEQ ID NO: 1984618 - RNA, 17 nt, Human
cccuuccaccugcucug

SEQ ID NO: 1984619 - RNA, 12 nt, Human
cccuuccaugga

SEQ ID NO: 1984620 - RNA, 20 nt, Human
cccuuccaugucgccucugc

SEQ ID NO: 1984621 - RNA, 17 nt, Human
cccuuccaucugauucc

SEQ ID NO: 1984622 - RNA, 23 nt, Human
cccuuccaucugauuccagcaca

SEQ ID NO: 1984623 - RNA, 18 nt, Human
cccuuccauuucugccuu

SEQ ID NO: 1984624 - RNA, 20 nt, Human
cccuuccauuucugccuuuu

SEQ ID NO: 1984625 - RNA, 23 nt, Human
cccuuagcagggaaacagcuaau

SEQ ID NO: 1984626 - RNA, 14 nt, Human
cccuuaucccugcu

SEQ ID NO: 1984627 - RNA, 17 nt, Human
cccuuacgugaguccug

SEQ ID NO: 1984628 - RNA, 15 nt, Human
cccuuacgugagucc

SEQ ID NO: 1984629 - RNA, 14 nt, Human
cccuuagcagggaa

SEQ ID NO: 1984630 - RNA, 20 nt, Human
cccuuagaaguuuguuguga

SEQ ID NO: 1984631 - RNA, 23 nt, Human
cccuuaagaaugaguuucuuaga

SEQ ID NO: 1984632 - RNA, 13 nt, Human
cccuggugcugcc

SEQ ID NO: 1984633 - RNA, 14 nt, Human
cccuggugcugcca

SEQ ID NO: 1984634 - RNA, 21 nt, Human
cccuggugaccagcaccaucu

SEQ ID NO: 1984635 - RNA, 21 nt, Human
cccugguggcagcucaccucu

SEQ ID NO: 1984636 - RNA, 13 nt, Human
cccugguggcagu

SEQ ID NO: 1984637 - RNA, 14 nt, Human
cccugguggcagug

SEQ ID NO: 1984638 - RNA, 18 nt, Human
cccugcuuggcccagggg

SEQ ID NO: 1984639 - RNA, 14 nt, Human
cccugcuuggccca

SEQ ID NO: 1984640 - RNA, 16 nt, Human
cccugcuuggcccagg

SEQ ID NO: 1984641 - RNA, 20 nt, Human
cccugcugucauugcuucuu

SEQ ID NO: 1984642 - RNA, 13 nt, Human
cccugcuguuuau

SEQ ID NO: 1984643 - RNA, 14 nt, Human
cccugcuguuuauc

SEQ ID NO: 1984644 - RNA, 15 nt, Human
cccuguaggccucag

SEQ ID NO: 1984645 - RNA, 15 nt, Human
cccuggugcugccac

SEQ ID NO: 1984646 - RNA, 14 nt, Human
cccuguaggccuca

SEQ ID NO: 1984647 - RNA, 15 nt, Human
cccugucaaacauua

SEQ ID NO: 1984648 - RNA, 14 nt, Human
cccugucaggaggc

SEQ ID NO: 1984649 - RNA, 14 nt, Human
cccuguucuggcag

SEQ ID NO: 1984650 - RNA, 13 nt, Human
cccuguucuggca

SEQ ID NO: 1984651 - RNA, 23 nt, Human
cccuuaccugccaggaagccagc

SEQ ID NO: 1984652 - RNA, 20 nt, Human
cccuuaccugccaggaagcc

SEQ ID NO: 1984653 - RNA, 17 nt, Human
cccuuaccugccaggaa

SEQ ID NO: 1984654 - RNA, 19 nt, Human
cccuguuuguuucugaaag

SEQ ID NO: 1984655 - RNA, 15 nt, Human
ccuaacgaaguaucc

SEQ ID NO: 1984656 - RNA, 18 nt, Human
ccuacaggagugagcacu

SEQ ID NO: 1984657 - RNA, 18 nt, Human
ccuaaccagggccagaag

SEQ ID NO: 1984658 - RNA, 19 nt, Human
ccuaacccagaaaaucuga

SEQ ID NO: 1984659 - RNA, 12 nt, Human
ccuaacccuggc

SEQ ID NO: 1984660 - RNA, 14 nt, Human
ccguugcugacuua

SEQ ID NO: 1984661 - RNA, 15 nt, Human
ccguugcugacuuag

SEQ ID NO: 1984662 - RNA, 17 nt, Human
ccguugcugacuuagaa

SEQ ID NO: 1984663 - RNA, 22 nt, Human
ccgggucaucuguaccucugcc

SEQ ID NO: 1984664 - RNA, 11 nt, Human
ccguggcuucc

SEQ ID NO: 1984665 - RNA, 20 nt, Human
ccuacucuucucucugcucu

SEQ ID NO: 1984666 - RNA, 21 nt, Human
ccuacucuucucucugcucug

SEQ ID NO: 1984667 - RNA, 23 nt, Human
ccuaggcauuugcugaauacaga

SEQ ID NO: 1984668 - RNA, 13 nt, Human
ccuacucuucucu

SEQ ID NO: 1984669 - RNA, 18 nt, Human
ccuacucuucucucugcu

SEQ ID NO: 1984670 - RNA, 19 nt, Human
ccuacucuucucucugcuc

SEQ ID NO: 1984671 - RNA, 15 nt, Human
ccuacuccugucuuc

SEQ ID NO: 1984672 - RNA, 16 nt, Human
ccuacuccugucuucu

SEQ ID NO: 1984673 - RNA, 18 nt, Human
ccuacuccugucuucugc

SEQ ID NO: 1984674 - RNA, 19 nt, Human
ccuacuccugucuucugcu

SEQ ID NO: 1984675 - RNA, 20 nt, Human
ccuacuccugucuucugcuu

SEQ ID NO: 1984676 - RNA, 22 nt, Human
ccuacuccugucuucugcuuug

SEQ ID NO: 1984677 - RNA, 18 nt, Human
ccuaggugacagagugag

SEQ ID NO: 1984678 - RNA, 13 nt, Human
ccuaguacugccc

SEQ ID NO: 1984679 - RNA, 21 nt, Human
ccuacaguugaaaaacagcug

SEQ ID NO: 1984680 - RNA, 16 nt, Human
ccuaccgagucucuuc

SEQ ID NO: 1984681 - RNA, 17 nt, Human
ccuaccgagucucuucu

SEQ ID NO: 1984682 - RNA, 21 nt, Human
ccuaccgagucucuucuccac

SEQ ID NO: 1984683 - RNA, 19 nt, Human
ccuaccgagucucuucucc

SEQ ID NO: 1984684 - RNA, 20 nt, Human
ccuaccgagucucuucucca

SEQ ID NO: 1984685 - RNA, 14 nt, Human
ccguggcuucccgc

SEQ ID NO: 1984686 - RNA, 17 nt, Human
ccgccuccuacagccca

SEQ ID NO: 1984687 - RNA, 12 nt, Human
ccgccucuuccc

SEQ ID NO: 1984688 - RNA, 11 nt, Human
ccgcuggggcc

SEQ ID NO: 1984689 - RNA, 14 nt, Human
ccgcuggggccagu

SEQ ID NO: 1984690 - RNA, 15 nt, Human
ccggaggggccuggc

SEQ ID NO: 1984691 - RNA, 16 nt, Human
ccggaggggccuggca

SEQ ID NO: 1984692 - RNA, 14 nt, Human
ccggaggggccugg

SEQ ID NO: 1984693 - RNA, 15 nt, Human
ccgggcucugccucc

SEQ ID NO: 1984694 - RNA, 14 nt, Human
ccgggcucugccuc

SEQ ID NO: 1984695 - RNA, 13 nt, Human
ccgggcucugccu

SEQ ID NO: 1984696 - RNA, 18 nt, Human
ccgggcucugccucccau

SEQ ID NO: 1984697 - RNA, 18 nt, Human
ccgugaggccagagacac

SEQ ID NO: 1984698 - RNA, 16 nt, Human
ccggcuccaggcuccu

SEQ ID NO: 1984699 - RNA, 21 nt, Human
ccggcuccaggcuccuuuagc

SEQ ID NO: 1984700 - RNA, 22 nt, Human
ccgggcacucagaagacacuga

SEQ ID NO: 1984701 - RNA, 13 nt, Human
ccgggcagagcac

SEQ ID NO: 1984702 - RNA, 20 nt, Human
ccgggcagagcacagcgggg

SEQ ID NO: 1984703 - RNA, 13 nt, Human
ccgggccacagag

SEQ ID NO: 1984704 - RNA, 14 nt, Human
ccgcagaagcccug

SEQ ID NO: 1984705 - RNA, 23 nt, Human
ccgcacugggcuuggggaccaga

SEQ ID NO: 1984706 - RNA, 19 nt, Human
ccgagucucuucuccacug

SEQ ID NO: 1984707 - RNA, 20 nt, Human
ccgagucucuucuccacugg

SEQ ID NO: 1984708 - RNA, 21 nt, Human
ccgagucucuucuccacugga

SEQ ID NO: 1984709 - RNA, 22 nt, Human
ccgccggcaauaaaagcccagg

SEQ ID NO: 1984710 - RNA, 20 nt, Human
ccgccggcaauaaaagccca

SEQ ID NO: 1984711 - RNA, 21 nt, Human
ccgccggcaauaaaagcccag

SEQ ID NO: 1984712 - RNA, 14 nt, Human
ccgaguagcuggga

SEQ ID NO: 1984713 - RNA, 16 nt, Human
ccgaguagcugggacu

SEQ ID NO: 1984714 - RNA, 20 nt, Human
ccgaguagcugagauuauag

SEQ ID NO: 1984715 - RNA, 14 nt, Human
ccgagucucuucuc

SEQ ID NO: 1984716 - RNA, 16 nt, Human
ccgagucucuucucca

SEQ ID NO: 1984717 - RNA, 18 nt, Human
ccgagucucuucuccacu

SEQ ID NO: 1984718 - RNA, 19 nt, Human
ccgagcuuugaaaauucag

SEQ ID NO: 1984719 - RNA, 19 nt, Human
ccgagauugcaccacugca

SEQ ID NO: 1984720 - RNA, 15 nt, Human
ccgagauugcaccac

SEQ ID NO: 1984721 - RNA, 21 nt, Human
ccgagauugcaccacugcacu

SEQ ID NO: 1984722 - RNA, 18 nt, Human
ccgaccuggccugucugu

SEQ ID NO: 1984723 - RNA, 22 nt, Human
ccgaccugaggacauggcuucu

SEQ ID NO: 1984724 - RNA, 14 nt, Human
ccgacuagacacac

SEQ ID NO: 1984725 - RNA, 20 nt, Human
ccgacuagacacacaaagca

SEQ ID NO: 1984726 - RNA, 16 nt, Human
ccgacuagacacacaa

SEQ ID NO: 1984727 - RNA, 17 nt, Human
ccgacuagacacacaaa

SEQ ID NO: 1984728 - RNA, 16 nt, Human
ccccaauaccccaugg

SEQ ID NO: 1984729 - RNA, 19 nt, Human
ccccaauaccccauggacc

SEQ ID NO: 1984730 - RNA, 16 nt, Human
ccccaauaucuugcuu

SEQ ID NO: 1984731 - RNA, 13 nt, Human
ccccaaucccagc

SEQ ID NO: 1984732 - RNA, 18 nt, Human
cccauucagagacugucc

SEQ ID NO: 1984733 - RNA, 21 nt, Human
ccccacccaagggccuggccu

SEQ ID NO: 1984734 - RNA, 11 nt, Human
ccccaccugcg

SEQ ID NO: 1984735 - RNA, 14 nt, Human
ccccaccugcgcuu

SEQ ID NO: 1984736 - RNA, 17 nt, Human
ccccaccugcgcuucac

SEQ ID NO: 1984737 - RNA, 14 nt, Human
ccccaccuggcccu

SEQ ID NO: 1984738 - RNA, 20 nt, Human
ccccaccuggcccucucuga

SEQ ID NO: 1984739 - RNA, 19 nt, Human
ccccaccgcagacaggacc

SEQ ID NO: 1984740 - RNA, 15 nt, Human
ccccaccgcagacag

SEQ ID NO: 1984741 - RNA, 13 nt, Human
ccccacucccagc

SEQ ID NO: 1984742 - RNA, 15 nt, Human
ccccacucccagcau

SEQ ID NO: 1984743 - RNA, 11 nt, Human
ccccacucuca

SEQ ID NO: 1984744 - RNA, 12 nt, Human
ccccacucucag

SEQ ID NO: 1984745 - RNA, 13 nt, Human
ccccacucucaga

SEQ ID NO: 1984746 - RNA, 14 nt, Human
ccccacucucagag

SEQ ID NO: 1984747 - RNA, 16 nt, Human
ccccacucucagaggc

SEQ ID NO: 1984748 - RNA, 17 nt, Human
ccccacucucagaggcc

SEQ ID NO: 1984749 - RNA, 20 nt, Human
ccccacucucagaggcccca

SEQ ID NO: 1984750 - RNA, 15 nt, Human
ccccagaacucugcc

SEQ ID NO: 1984751 - RNA, 17 nt, Human
ccccagaacucugccug

SEQ ID NO: 1984752 - RNA, 17 nt, Human
cccagaaugaggcugcu

SEQ ID NO: 1984753 - RNA, 18 nt, Human
cccagaaugccuccugca

SEQ ID NO: 1984754 - RNA, 17 nt, Human
cccagagagaagagccc

SEQ ID NO: 1984755 - RNA, 18 nt, Human
cccagagagaagagcccc

SEQ ID NO: 1984756 - RNA, 14 nt, Human
cccaguugggugga

SEQ ID NO: 1984757 - RNA, 19 nt, Human
cccaucucuacaaaaagca

SEQ ID NO: 1984758 - RNA, 14 nt, Human
cccaucucuucugg

SEQ ID NO: 1984759 - RNA, 18 nt, Human
cccaugcugggcucccgu

SEQ ID NO: 1984760 - RNA, 22 nt, Human
cccaugagccucagcauccugg

SEQ ID NO: 1984761 - RNA, 12 nt, Human
cccaucugugaa

SEQ ID NO: 1984762 - RNA, 14 nt, Human
cccaugagccucag

SEQ ID NO: 1984763 - RNA, 13 nt, Human
cccccacccaagg

SEQ ID NO: 1984764 - RNA, 24 nt, Human
cccccacccaagggccuggccuga

SEQ ID NO: 1984765 - RNA, 16 nt, Human
cccccacauggugaug

SEQ ID NO: 1984766 - RNA, 14 nt, Human
ccccauccucugua

SEQ ID NO: 1984767 - RNA, 17 nt, Human
ccccaucauugguaccc

SEQ ID NO: 1984768 - RNA, 19 nt, Human
cccccacugaaucccugua

SEQ ID NO: 1984769 - RNA, 13 nt, Human
cccccacugguga

SEQ ID NO: 1984770 - RNA, 11 nt, Human
cccccacuggu

SEQ ID NO: 1984771 - RNA, 15 nt, Human
cccccacuggugaca

SEQ ID NO: 1984772 - RNA, 11 nt, Human
ccccagggcac

SEQ ID NO: 1984773 - RNA, 17 nt, Human
ccccaguagcugggacc

SEQ ID NO: 1984774 - RNA, 17 nt, Human
ccccaguccccuucccg

SEQ ID NO: 1984775 - RNA, 14 nt, Human
ccccagugcccaca

SEQ ID NO: 1984776 - RNA, 15 nt, Human
ccccagugcccacag

SEQ ID NO: 1984777 - RNA, 16 nt, Human
ccccagugcccacagg

SEQ ID NO: 1984778 - RNA, 20 nt, Human
ccccagugcccacaggauca

SEQ ID NO: 1984779 - RNA, 22 nt, Human
ccccauaauuuuuuuuuuccuu

SEQ ID NO: 1984780 - RNA, 15 nt, Human
ccccucaacaccucu

SEQ ID NO: 1984781 - RNA, 23 nt, Human
ccccucaacucuccuccagaguc

SEQ ID NO: 1984782 - RNA, 16 nt, Human
ccccucaacaccucug

SEQ ID NO: 1984783 - RNA, 12 nt, Human
cccccagcuccc

SEQ ID NO: 1984784 - RNA, 22 nt, Human
cccccgucuaaccacagcuccu

SEQ ID NO: 1984785 - RNA, 18 nt, Human
cccccucccccagccacu

SEQ ID NO: 1984786 - RNA, 19 nt, Human
cccccucccccagccacuc

SEQ ID NO: 1984787 - RNA, 12 nt, Human
cccccagccugc

SEQ ID NO: 1984788 - RNA, 19 nt, Human
cccccugacaacacucauu

SEQ ID NO: 1984789 - RNA, 18 nt, Human
cccccugcaaagcccagc

SEQ ID NO: 1984790 - RNA, 19 nt, Human
cccccugcaaagcccagcu

SEQ ID NO: 1984791 - RNA, 21 nt, Human
cccccugcaaagcccagcuug

SEQ ID NO: 1984792 - RNA, 14 nt, Human
cccccucuucccug

SEQ ID NO: 1984793 - RNA, 17 nt, Human
cccccugacaacacuca

SEQ ID NO: 1984794 - RNA, 21 nt, Human
cccccucuggcuccagcuggc

SEQ ID NO: 1984795 - RNA, 12 nt, Human
cccccucuggcu

SEQ ID NO: 1984796 - RNA, 19 nt, Human
cccccucuggcuccagcug

SEQ ID NO: 1984797 - RNA, 13 nt, Human
ccccuccaccugc

SEQ ID NO: 1984798 - RNA, 23 nt, Human
ccccuccaaucccaccaacccuc

SEQ ID NO: 1984799 - RNA, 20 nt, Human
ccccucauagcccucacccu

SEQ ID NO: 1984800 - RNA, 16 nt, Human
ccccucagggucccug

SEQ ID NO: 1984801 - RNA, 15 nt, Human
ccccucccuucaacc

SEQ ID NO: 1984802 - RNA, 13 nt, Human
ccccucccaggga

SEQ ID NO: 1984803 - RNA, 14 nt, Human
ccccucccucucca

SEQ ID NO: 1984804 - RNA, 15 nt, Human
ccccucccucuccag

SEQ ID NO: 1984805 - RNA, 12 nt, Human
ccccuccaugug

SEQ ID NO: 1984806 - RNA, 14 nt, Human
ccccucgcccaguc

SEQ ID NO: 1984807 - RNA, 22 nt, Human
ccccucgcccagucccagcagc

SEQ ID NO: 1984808 - RNA, 23 nt, Human
ccccucgcccagucccagcagcc

SEQ ID NO: 1984809 - RNA, 14 nt, Human
ccccucuccuuccu

SEQ ID NO: 1984810 - RNA, 19 nt, Human
ccccucuccuuccugugug

SEQ ID NO: 1984811 - RNA, 18 nt, Human
ccccuccuccuggacucc

SEQ ID NO: 1984812 - RNA, 22 nt, Human
ccccuccuccuggacuccugca

SEQ ID NO: 1984813 - RNA, 15 nt, Human
ccccuccucucugcc

SEQ ID NO: 1984814 - RNA, 17 nt, Human
ccccuccucucugcccu

SEQ ID NO: 1984815 - RNA, 15 nt, Human
cccgccaaaagcugc

SEQ ID NO: 1984816 - RNA, 13 nt, Human
ccccugccugccc

SEQ ID NO: 1984817 - RNA, 19 nt, Human
ccccugccucucugcaggu

SEQ ID NO: 1984818 - RNA, 17 nt, Human
ccccugccucucugcag

SEQ ID NO: 1984819 - RNA, 16 nt, Human
ccccugccucucugca

SEQ ID NO: 1984820 - RNA, 15 nt, Human
ccccugccucucugc

SEQ ID NO: 1984821 - RNA, 14 nt, Human
ccccugccucucug

SEQ ID NO: 1984822 - RNA, 18 nt, Human
ccccugccccugcuacug

SEQ ID NO: 1984823 - RNA, 17 nt, Human
ccccugcccggcugcgg

SEQ ID NO: 1984824 - RNA, 19 nt, Human
ccccugcccggcugcggaa

SEQ ID NO: 1984825 - RNA, 13 nt, Human
ccccucugcccug

SEQ ID NO: 1984826 - RNA, 12 nt, Human
ccccucugcccu

SEQ ID NO: 1984827 - RNA, 17 nt, Human
ccccugcuggguguggc

SEQ ID NO: 1984828 - RNA, 14 nt, Human
ccccugcugggugu

SEQ ID NO: 1984829 - RNA, 19 nt, Human
ccccugccugcccugucag

SEQ ID NO: 1984830 - RNA, 15 nt, Human
ccccugcuacugcca

SEQ ID NO: 1984831 - RNA, 11 nt, Human
ccccugcuggu

SEQ ID NO: 1984832 - RNA, 13 nt, Human
ccccugcugguuc

SEQ ID NO: 1984833 - RNA, 15 nt, Human
ccccugcugguucag

SEQ ID NO: 1984834 - RNA, 20 nt, Human
ccccugcugguucaggguug

SEQ ID NO: 1984835 - RNA, 15 nt, Human
ccccuggaugcagcc

SEQ ID NO: 1984836 - RNA, 20 nt, Human
ccccuggaagcagugcccag

SEQ ID NO: 1984837 - RNA, 21 nt, Human
ccccuggaagcagugcccagg

SEQ ID NO: 1984838 - RNA, 23 nt, Human
ccccuggaagcagugcccaggug

SEQ ID NO: 1984839 - RNA, 11 nt, Human
ccccuggaccc

SEQ ID NO: 1984840 - RNA, 14 nt, Human
ccccuggaccccag

SEQ ID NO: 1984841 - RNA, 16 nt, Human
ccccuggaccccagcc

SEQ ID NO: 1984842 - RNA, 18 nt, Human
ccccuggaccccagccuc

SEQ ID NO: 1984843 - RNA, 19 nt, Human
ccccuggaccccagccuca

SEQ ID NO: 1984844 - RNA, 17 nt, Human
ccccuggaagcagugcc

SEQ ID NO: 1984845 - RNA, 18 nt, Human
ccccuggaagcagugccc

SEQ ID NO: 1984846 - RNA, 19 nt, Human
ccccuggaagcagugccca

SEQ ID NO: 1984847 - RNA, 19 nt, Human
ccccuggaugcagccucac

SEQ ID NO: 1984848 - RNA, 18 nt, Human
ccccuggaugcagccuca

SEQ ID NO: 1984849 - RNA, 19 nt, Human
cccgcccaaaccuuucccc

SEQ ID NO: 1984850 - RNA, 23 nt, Human
cccgcuaagagggagggagggcu

SEQ ID NO: 1984851 - RNA, 22 nt, Human
cccgcccaggcuuagucacuga

SEQ ID NO: 1984852 - RNA, 20 nt, Human
cccgcccaggcuuagucacu

SEQ ID NO: 1984853 - RNA, 15 nt, Human
cccgacagccuggca

SEQ ID NO: 1984854 - RNA, 18 nt, Human
cccgacagccuggcacag

SEQ ID NO: 1984855 - RNA, 12 nt, Human
cccgacuccagu

SEQ ID NO: 1984856 - RNA, 18 nt, Human
cccgagacggcacugaga

SEQ ID NO: 1984857 - RNA, 12 nt, Human
ccccuggugguu

SEQ ID NO: 1984858 - RNA, 15 nt, Human
ccccuggucuuugag

SEQ ID NO: 1984859 - RNA, 11 nt, Human
ccccuggccuu

SEQ ID NO: 1984860 - RNA, 15 nt, Human
ccccuggccuuggga

SEQ ID NO: 1984861 - RNA, 20 nt, Human
ccccuggcuccaggccaggg

SEQ ID NO: 1984862 - RNA, 18 nt, Human
ccccuggcuuuucacugc

SEQ ID NO: 1984863 - RNA, 20 nt, Human
ccccuggcuuuucacugcug

SEQ ID NO: 1984864 - RNA, 22 nt, Human
ccccuggcuuuucacugcuggc

SEQ ID NO: 1984865 - RNA, 20 nt, Human
ccccuuccauggacuuuguu

SEQ ID NO: 1984866 - RNA, 13 nt, Human
ccccuuccaugga

SEQ ID NO: 1984867 - RNA, 14 nt, Human
cccgacagccuggc

SEQ ID NO: 1984868 - RNA, 17 nt, Human
ccccuuccauuucugcc

SEQ ID NO: 1984869 - RNA, 11 nt, Human
ccccuucccau

SEQ ID NO: 1984870 - RNA, 15 nt, Human
ccccuguucacucua

SEQ ID NO: 1984871 - RNA, 14 nt, Human
ccagagcccaccuu

SEQ ID NO: 1984872 - RNA, 14 nt, Human
ccagauugcaacag

SEQ ID NO: 1984873 - RNA, 16 nt, Human
ccagauugcaacaggc

SEQ ID NO: 1984874 - RNA, 15 nt, Human
ccagauuucacucuc

SEQ ID NO: 1984875 - RNA, 19 nt, Human
ccagauuucacucuccuug

SEQ ID NO: 1984876 - RNA, 18 nt, Human
ccagauuucacucuccuu

SEQ ID NO: 1984877 - RNA, 23 nt, Human
ccagauugcaacaggcugggcuu

SEQ ID NO: 1984878 - RNA, 18 nt, Human
ccagauugcaacaggcug

SEQ ID NO: 1984879 - RNA, 22 nt, Human
ccagauugcaacaggcugggcu

SEQ ID NO: 1984880 - RNA, 24 nt, Human
ccagauuuuuuacagcugccugca

SEQ ID NO: 1984881 - RNA, 12 nt, Human
ccagcacacucc

SEQ ID NO: 1984882 - RNA, 13 nt, Human
ccagcacacuccc

SEQ ID NO: 1984883 - RNA, 23 nt, Human
ccagcacaaccuucaagcugcuu

SEQ ID NO: 1984884 - RNA, 14 nt, Human
ccagcacacucccg

SEQ ID NO: 1984885 - RNA, 15 nt, Human
ccagcacacucccga

SEQ ID NO: 1984886 - RNA, 16 nt, Human
ccagcacacucccgag

SEQ ID NO: 1984887 - RNA, 17 nt, Human
ccagcacacucccgaga

SEQ ID NO: 1984888 - RNA, 17 nt, Human
ccagcaagugagagcug

SEQ ID NO: 1984889 - RNA, 18 nt, Human
ccagcaagugagagcugg

SEQ ID NO: 1984890 - RNA, 19 nt, Human
ccagcaagugagagcuggg

SEQ ID NO: 1984891 - RNA, 18 nt, Human
ccagcaggcucucaggcc

SEQ ID NO: 1984892 - RNA, 17 nt, Human
ccagcaggcucucaggc

SEQ ID NO: 1984893 - RNA, 16 nt, Human
ccagcaggcucucagg

SEQ ID NO: 1984894 - RNA, 18 nt, Human
ccagcaccaucucuccuc

SEQ ID NO: 1984895 - RNA, 17 nt, Human
ccagcaccaucucuccu

SEQ ID NO: 1984896 - RNA, 13 nt, Human
ccagcaccacccu

SEQ ID NO: 1984897 - RNA, 20 nt, Human
ccagcaccacccuccuuccc

SEQ ID NO: 1984898 - RNA, 10 nt, Human
ccagccugcc

SEQ ID NO: 1984899 - RNA, 19 nt, Human
ccagccugagcgacaguga

SEQ ID NO: 1984900 - RNA, 13 nt, Human
ccagccuggguga

SEQ ID NO: 1984901 - RNA, 20 nt, Human
ccagccuggcugggacuggg

SEQ ID NO: 1984902 - RNA, 21 nt, Human
ccagccugggauaggggcaga

SEQ ID NO: 1984903 - RNA, 20 nt, Human
ccagccuggaaaccugucug

SEQ ID NO: 1984904 - RNA, 21 nt, Human
ccagccuggaaaccugucuga

SEQ ID NO: 1984905 - RNA, 23 nt, Human
ccagccuugaccauucuccaccu

SEQ ID NO: 1984906 - RNA, 13 nt, Human
ccagcgagcccug

SEQ ID NO: 1984907 - RNA, 23 nt, Human
ccagcaggcucucaggccagcug

SEQ ID NO: 1984908 - RNA, 21 nt, Human
ccagcaggcucucaggccagc

SEQ ID NO: 1984909 - RNA, 20 nt, Human
ccagcaggcucucaggccag

SEQ ID NO: 1984910 - RNA, 19 nt, Human
ccagcaggcucucaggcca

SEQ ID NO: 1984911 - RNA, 21 nt, Human
ccagcccacgcugacuacagg

SEQ ID NO: 1984912 - RNA, 13 nt, Human
ccagcccagaggc

SEQ ID NO: 1984913 - RNA, 16 nt, Human
ccagcccagaggccga

SEQ ID NO: 1984914 - RNA, 16 nt, Human
ccagcccacuucugcc

SEQ ID NO: 1984915 - RNA, 17 nt, Human
ccagcccacuucugcca

SEQ ID NO: 1984916 - RNA, 18 nt, Human
ccagcccaccccauggcc

SEQ ID NO: 1984917 - RNA, 15 nt, Human
ccagcccaccccaug

SEQ ID NO: 1984918 - RNA, 17 nt, Human
ccagcccaccccauggc

SEQ ID NO: 1984919 - RNA, 13 nt, Human
ccagcccacgcug

SEQ ID NO: 1984920 - RNA, 14 nt, Human
ccagcccugaguuc

SEQ ID NO: 1984921 - RNA, 18 nt, Human
ccagcccugaguuccuag

SEQ ID NO: 1984922 - RNA, 19 nt, Human
ccagccccaaaacucuccu

SEQ ID NO: 1984923 - RNA, 17 nt, Human
ccagcccauuugggcag

SEQ ID NO: 1984924 - RNA, 18 nt, Human
ccagcccauuugggcaga

SEQ ID NO: 1984925 - RNA, 22 nt, Human
ccagcccauuugggcagagagg

SEQ ID NO: 1984926 - RNA, 22 nt, Human
ccagccgagauagccaaggcca

SEQ ID NO: 1984927 - RNA, 20 nt, Human
ccagccgagauagccaaggc

SEQ ID NO: 1984928 - RNA, 17 nt, Human
ccagccgagauagccaa

SEQ ID NO: 1984929 - RNA, 13 nt, Human
ccaccuuggcuca

SEQ ID NO: 1984930 - RNA, 16 nt, Human
ccacccccaggacccc

SEQ ID NO: 1984931 - RNA, 18 nt, Human
ccacccccaggaccccug

SEQ ID NO: 1984932 - RNA, 19 nt, Human
ccacccccaggaccccuga

SEQ ID NO: 1984933 - RNA, 19 nt, Human
ccacccccacccaagggcc

SEQ ID NO: 1984934 - RNA, 14 nt, Human
ccacccuccuuuca

SEQ ID NO: 1984935 - RNA, 14 nt, Human
ccacccuccuuccc

SEQ ID NO: 1984936 - RNA, 15 nt, Human
ccaccugccagggac

SEQ ID NO: 1984937 - RNA, 15 nt, Human
ccaccugcucugcug

SEQ ID NO: 1984938 - RNA, 12 nt, Human
ccaccugccagg

SEQ ID NO: 1984939 - RNA, 14 nt, Human
ccaccugccaggga

SEQ ID NO: 1984940 - RNA, 13 nt, Human
ccaccugccaggg

SEQ ID NO: 1984941 - RNA, 13 nt, Human
ccaccucuuccug

SEQ ID NO: 1984942 - RNA, 17 nt, Human
ccaccucuuccuggccg

SEQ ID NO: 1984943 - RNA, 20 nt, Human
ccaccuggccucugcacucc

SEQ ID NO: 1984944 - RNA, 18 nt, Human
ccaccuggccucugcacu

SEQ ID NO: 1984945 - RNA, 13 nt, Human
ccaccuggccucu

SEQ ID NO: 1984946 - RNA, 12 nt, Human
ccaccuggcccu

SEQ ID NO: 1984947 - RNA, 17 nt, Human
ccaccuggcccucucug

SEQ ID NO: 1984948 - RNA, 18 nt, Human
ccaccuggcccucucuga

SEQ ID NO: 1984949 - RNA, 20 nt, Human
ccaccucucucacuccuuga

SEQ ID NO: 1984950 - RNA, 19 nt, Human
ccaccucucucacuccuug

SEQ ID NO: 1984951 - RNA, 16 nt, Human
ccaccucucucacucc

SEQ ID NO: 1984952 - RNA, 14 nt, Human
ccaccucucucacu

SEQ ID NO: 1984953 - RNA, 18 nt, Human
ccaccuccuaaaaggccc

SEQ ID NO: 1984954 - RNA, 20 nt, Human
ccaccuccuaaaaggcccag

SEQ ID NO: 1984955 - RNA, 21 nt, Human
ccaccuccuaaaaggcccaga

SEQ ID NO: 1984956 - RNA, 22 nt, Human
ccaccuccuaaaaggcccagag

SEQ ID NO: 1984957 - RNA, 23 nt, Human
ccaccuccuaaaaggcccagaga

SEQ ID NO: 1984958 - RNA, 11 nt, Human
ccacccugcuc

SEQ ID NO: 1984959 - RNA, 12 nt, Human
ccacccugcucu

SEQ ID NO: 1984960 - RNA, 18 nt, Human
ccagagaguggcuccucc

SEQ ID NO: 1984961 - RNA, 22 nt, Human
ccagagaguggcuccucccggu

SEQ ID NO: 1984962 - RNA, 16 nt, Human
ccagacccggcugcgu

SEQ ID NO: 1984963 - RNA, 14 nt, Human
ccagagaguggcuc

SEQ ID NO: 1984964 - RNA, 15 nt, Human
ccagagaguggcucc

SEQ ID NO: 1984965 - RNA, 16 nt, Human
ccagagaguggcuccu

SEQ ID NO: 1984966 - RNA, 14 nt, Human
ccagacccggcugc

SEQ ID NO: 1984967 - RNA, 15 nt, Human
ccagacccggcugcg

SEQ ID NO: 1984968 - RNA, 20 nt, Human
ccagacacauguccaagaag

SEQ ID NO: 1984969 - RNA, 17 nt, Human
ccagacacauguccaag

SEQ ID NO: 1984970 - RNA, 22 nt, Human
ccagacacauguccaagaagcc

SEQ ID NO: 1984971 - RNA, 14 nt, Human
ccagacaucaacag

SEQ ID NO: 1984972 - RNA, 24 nt, Human
ccagaccccuggcuuuucacugcu

SEQ ID NO: 1984973 - RNA, 18 nt, Human
ccagaccccuggcuuuuc

SEQ ID NO: 1984974 - RNA, 15 nt, Human
ccagaaugaggcugc

SEQ ID NO: 1984975 - RNA, 11 nt, Human
ccagaaugaag

SEQ ID NO: 1984976 - RNA, 13 nt, Human
ccagaagucaaca

SEQ ID NO: 1984977 - RNA, 12 nt, Human
ccagaauacuga

SEQ ID NO: 1984978 - RNA, 15 nt, Human
ccagaauacugaugg

SEQ ID NO: 1984979 - RNA, 21 nt, Human
ccagaauacugauggaauuuu

SEQ ID NO: 1984980 - RNA, 23 nt, Human
ccagaauacugauggaauuuuuu

SEQ ID NO: 1984981 - RNA, 15 nt, Human
ccagaaguagcuuug

SEQ ID NO: 1984982 - RNA, 16 nt, Human
ccagaaguagcuuugc

SEQ ID NO: 1984983 - RNA, 17 nt, Human
ccagaaguagcuuugca

SEQ ID NO: 1984984 - RNA, 23 nt, Human
ccacugcaucguuucaucuucca

SEQ ID NO: 1984985 - RNA, 21 nt, Human
ccacugcaucguuucaucuuc

SEQ ID NO: 1984986 - RNA, 14 nt, Human
ccaccuucccaugc

SEQ ID NO: 1984987 - RNA, 13 nt, Human
ccacugccucuuc

SEQ ID NO: 1984988 - RNA, 16 nt, Human
ccacugccucuuccuc

SEQ ID NO: 1984989 - RNA, 15 nt, Human
ccacugguucuucuu

SEQ ID NO: 1984990 - RNA, 21 nt, Human
ccacugggguggccugacucc

SEQ ID NO: 1984991 - RNA, 23 nt, Human
ccacuggugacaugucuuuucuu

SEQ ID NO: 1984992 - RNA, 15 nt, Human
ccacugugaagagaa

SEQ ID NO: 1984993 - RNA, 14 nt, Human
ccacugugaagaga

SEQ ID NO: 1984994 - RNA, 11 nt, Human
ccacugcucug

SEQ ID NO: 1984995 - RNA, 12 nt, Human
ccacugcucugg

SEQ ID NO: 1984996 - RNA, 13 nt, Human
ccacugcucuggu

SEQ ID NO: 1984997 - RNA, 15 nt, Human
ccacugcucugguua

SEQ ID NO: 1984998 - RNA, 20 nt, Human
ccacugcuuuuggucugugu

SEQ ID NO: 1984999 - RNA, 21 nt, Human
ccacugccuucgauacaccgg

SEQ ID NO: 1985000 - RNA, 22 nt, Human
ccacugcuuuuggucuguguga

SEQ ID NO: 1985001 - RNA, 16 nt, Human
ccagaacucugccugc

SEQ ID NO: 1985002 - RNA, 17 nt, Human
ccagaacucugccugcc

SEQ ID NO: 1985003 - RNA, 19 nt, Human
ccagaacucugccugcccu

SEQ ID NO: 1985004 - RNA, 20 nt, Human
ccagaacucugccugcccuu

SEQ ID NO: 1985005 - RNA, 15 nt, Human
ccagaacucuguguc

SEQ ID NO: 1985006 - RNA, 14 nt, Human
ccagaacucuuccu

SEQ ID NO: 1985007 - RNA, 15 nt, Human
ccagaacucuuccuc

SEQ ID NO: 1985008 - RNA, 24 nt, Human
ccagaacucuuccuccaaggacag

SEQ ID NO: 1985009 - RNA, 22 nt, Human
ccagaagaaaauagugguguga

SEQ ID NO: 1985010 - RNA, 15 nt, Human
ccagaagcccagaau

SEQ ID NO: 1985011 - RNA, 18 nt, Human
ccagaaaccuuuguuugc

SEQ ID NO: 1985012 - RNA, 21 nt, Human
ccagaaacacccacaggcaug

SEQ ID NO: 1985013 - RNA, 18 nt, Human
ccagaaacgccacauccc

SEQ ID NO: 1985014 - RNA, 19 nt, Human
ccacugugccaugugccag

SEQ ID NO: 1985015 - RNA, 15 nt, Human
ccacugugccaugug

SEQ ID NO: 1985016 - RNA, 16 nt, Human
ccacugugccaugugc

SEQ ID NO: 1985017 - RNA, 19 nt, Human
ccacugugcguggggcucc

SEQ ID NO: 1985018 - RNA, 23 nt, Human
ccaggcugggagagccuuccagg

SEQ ID NO: 1985019 - RNA, 15 nt, Human
ccaggcccucugccc

SEQ ID NO: 1985020 - RNA, 16 nt, Human
ccaggcugggucgccc

SEQ ID NO: 1985021 - RNA, 12 nt, Human
ccaggcuggguc

SEQ ID NO: 1985022 - RNA, 24 nt, Human
ccaggcugggucgcccuggacugu

SEQ ID NO: 1985023 - RNA, 23 nt, Human
ccaggcugggucgcccuggacug

SEQ ID NO: 1985024 - RNA, 22 nt, Human
ccaggcugggucgcccuggacu

SEQ ID NO: 1985025 - RNA, 21 nt, Human
ccaggcugggucgcccuggac

SEQ ID NO: 1985026 - RNA, 23 nt, Human
ccaggcuuagucacugagacagc

SEQ ID NO: 1985027 - RNA, 22 nt, Human
ccaggcuuagucacugagacag

SEQ ID NO: 1985028 - RNA, 21 nt, Human
ccaggcuuagucacugagaca

SEQ ID NO: 1985029 - RNA, 14 nt, Human
ccaggcuggucuca

SEQ ID NO: 1985030 - RNA, 16 nt, Human
ccaggccacuggcccc

SEQ ID NO: 1985031 - RNA, 21 nt, Human
ccaggccacaagacccuugug

SEQ ID NO: 1985032 - RNA, 20 nt, Human
ccaggaggccagccuugacc

SEQ ID NO: 1985033 - RNA, 18 nt, Human
ccaggaggccagccuuga

SEQ ID NO: 1985034 - RNA, 15 nt, Human
ccaggaggccagccu

SEQ ID NO: 1985035 - RNA, 23 nt, Human
ccaggccacuggccccugagauc

SEQ ID NO: 1985036 - RNA, 14 nt, Human
ccaggcccucugcc

SEQ ID NO: 1985037 - RNA, 13 nt, Human
ccaggcccucugc

SEQ ID NO: 1985038 - RNA, 12 nt, Human
ccaggccagagg

SEQ ID NO: 1985039 - RNA, 14 nt, Human
ccaggccccugcca

SEQ ID NO: 1985040 - RNA, 15 nt, Human
ccaggccccugccac

SEQ ID NO: 1985041 - RNA, 16 nt, Human
ccaggccccugccacc

SEQ ID NO: 1985042 - RNA, 16 nt, Human
ccagggcccgggaagc

SEQ ID NO: 1985043 - RNA, 23 nt, Human
ccagugcccacaggaucagucug

SEQ ID NO: 1985044 - RNA, 20 nt, Human
ccauccugaggcuccacuug

SEQ ID NO: 1985045 - RNA, 18 nt, Human
ccauccugaggcuccacu

SEQ ID NO: 1985046 - RNA, 17 nt, Human
ccaucauugaaaucuuu

SEQ ID NO: 1985047 - RNA, 16 nt, Human
ccaucauugaaaucuu

SEQ ID NO: 1985048 - RNA, 14 nt, Human
ccaucauugaaauc

SEQ ID NO: 1985049 - RNA, 15 nt, Human
ccaucucuccuccuu

SEQ ID NO: 1985050 - RNA, 21 nt, Human
ccaucuaggggagccuugauu

SEQ ID NO: 1985051 - RNA, 21 nt, Human
ccaucucacacaugagcauca

SEQ ID NO: 1985052 - RNA, 20 nt, Human
ccaucucacacaugagcauc

SEQ ID NO: 1985053 - RNA, 18 nt, Human
ccaucucacacaugagca

SEQ ID NO: 1985054 - RNA, 17 nt, Human
ccaucucacacaugagc

SEQ ID NO: 1985055 - RNA, 15 nt, Human
ccaucucacacauga

SEQ ID NO: 1985056 - RNA, 14 nt, Human
ccaucucacacaug

SEQ ID NO: 1985057 - RNA, 14 nt, Human
ccaucaagccacca

SEQ ID NO: 1985058 - RNA, 13 nt, Human
ccaucaagccacc

SEQ ID NO: 1985059 - RNA, 16 nt, Human
ccaucaagccaccaac

SEQ ID NO: 1985060 - RNA, 12 nt, Human
ccaucaugucug

SEQ ID NO: 1985061 - RNA, 12 nt, Human
ccaucauugaaa

SEQ ID NO: 1985062 - RNA, 13 nt, Human
ccaucaugucugg

SEQ ID NO: 1985063 - RNA, 15 nt, Human
ccauaugccugggca

SEQ ID NO: 1985064 - RNA, 12 nt, Human
ccaucaagccac

SEQ ID NO: 1985065 - RNA, 22 nt, Human
ccauauuaaguaagucucaagg

SEQ ID NO: 1985066 - RNA, 13 nt, Human
ccauaugccuggg

SEQ ID NO: 1985067 - RNA, 14 nt, Human
ccagugugacaagg

SEQ ID NO: 1985068 - RNA, 23 nt, Human
ccagugugacaaggauugcuacu

SEQ ID NO: 1985069 - RNA, 13 nt, Human
ccagugaggcucu

SEQ ID NO: 1985070 - RNA, 15 nt, Human
ccaguggcagggcac

SEQ ID NO: 1985071 - RNA, 16 nt, Human
ccaguggcagggcaca

SEQ ID NO: 1985072 - RNA, 18 nt, Human
ccaguggcagggcacagg

SEQ ID NO: 1985073 - RNA, 19 nt, Human
ccaguggcagggcacaggg

SEQ ID NO: 1985074 - RNA, 20 nt, Human
ccaguggcagggcacagggc

SEQ ID NO: 1985075 - RNA, 21 nt, Human
ccaguggcagggcacagggcc

SEQ ID NO: 1985076 - RNA, 22 nt, Human
ccaguggcagggcacagggccu

SEQ ID NO: 1985077 - RNA, 23 nt, Human
ccaguggcagggcacagggccug

SEQ ID NO: 1985078 - RNA, 18 nt, Human
ccaguggcuauggccugu

SEQ ID NO: 1985079 - RNA, 23 nt, Human
ccaguaaaugggggugcauuuga

SEQ ID NO: 1985080 - RNA, 23 nt, Human
ccagguuuugcacucuuguuucu

SEQ ID NO: 1985081 - RNA, 20 nt, Human
ccagguuuuguuccgcccag

SEQ ID NO: 1985082 - RNA, 23 nt, Human
ccagguuuuguuccgcccagugg

SEQ ID NO: 1985083 - RNA, 12 nt, Human
ccagugaccugg

SEQ ID NO: 1985084 - RNA, 20 nt, Human
ccagugaccuggaaggccca

SEQ ID NO: 1985085 - RNA, 23 nt, Human
ccagugaccuggaaggcccagca

SEQ ID NO: 1985086 - RNA, 20 nt, Human
ccaguaaaugggggugcauu

SEQ ID NO: 1985087 - RNA, 18 nt, Human
ccagguuuugcacucuug

SEQ ID NO: 1985088 - RNA, 21 nt, Human
ccaguaaaugggggugcauuu

SEQ ID NO: 1985089 - RNA, 22 nt, Human
ccaguaaaugggggugcauuug

SEQ ID NO: 1985090 - RNA, 13 nt, Human
ccagguuuaagcu

SEQ ID NO: 1985091 - RNA, 16 nt, Human
ccagguuucuaugugu

SEQ ID NO: 1985092 - RNA, 17 nt, Human
ccagguugucacugaga

SEQ ID NO: 1985093 - RNA, 20 nt, Human
ccagguggagguggcauccc

SEQ ID NO: 1985094 - RNA, 21 nt, Human
ccaggugcuaggaacacuccu

SEQ ID NO: 1985095 - RNA, 16 nt, Human
ccagguggccacucca

SEQ ID NO: 1985096 - RNA, 21 nt, Human
ccagguggccacuccagaccc

SEQ ID NO: 1985097 - RNA, 17 nt, Human
ccagguagaacgccagg

SEQ ID NO: 1985098 - RNA, 21 nt, Human
ccauucguacauaauacugaa

SEQ ID NO: 1985099 - RNA, 21 nt, Human
ccauuauuaucaaguagacua

SEQ ID NO: 1985100 - RNA, 20 nt, Human
ccauucguacauaauacuga

SEQ ID NO: 1985101 - RNA, 13 nt, Human
ccauuugcuccuu

SEQ ID NO: 1985102 - RNA, 18 nt, Human
ccauuuggagggccuggg

SEQ ID NO: 1985103 - RNA, 11 nt, Human
ccauuuuccug

SEQ ID NO: 1985104 - RNA, 15 nt, Human
ccauucugccugccc

SEQ ID NO: 1985105 - RNA, 13 nt, Human
ccauuucugccuu

SEQ ID NO: 1985106 - RNA, 14 nt, Human
ccauuucugccuuu

SEQ ID NO: 1985107 - RNA, 18 nt, Human
ccauguuuuguuuacggu

SEQ ID NO: 1985108 - RNA, 14 nt, Human
ccauuaacugcuuc

SEQ ID NO: 1985109 - RNA, 18 nt, Human
ccauuaaaauaugcacua

SEQ ID NO: 1985110 - RNA, 12 nt, Human
ccaucugugaau

SEQ ID NO: 1985111 - RNA, 16 nt, Human
ccaucugguuuucucu

SEQ ID NO: 1985112 - RNA, 14 nt, Human
ccaucugugaauaa

SEQ ID NO: 1985113 - RNA, 15 nt, Human
ccaucugugaauaag

SEQ ID NO: 1985114 - RNA, 13 nt, Human
ccaucucugcucc

SEQ ID NO: 1985115 - RNA, 14 nt, Human
ccaucucugcucca

SEQ ID NO: 1985116 - RNA, 14 nt, Human
cccaagggccuggc

SEQ ID NO: 1985117 - RNA, 12 nt, Human
cccaagggccug

SEQ ID NO: 1985118 - RNA, 20 nt, Human
ccauuuuuuauauuucaagu

SEQ ID NO: 1985119 - RNA, 21 nt, Human
ccauuuggagggccugggccu

SEQ ID NO: 1985120 - RNA, 14 nt, Human
ccauuuuuuauauu

SEQ ID NO: 1985121 - RNA, 16 nt, Human
ccauuuuuuauauuuc

SEQ ID NO: 1985122 - RNA, 17 nt, Human
ccauuuuuuauauuuca

SEQ ID NO: 1985123 - RNA, 21 nt, Human
ccauuuuguauuuuacuaaua

SEQ ID NO: 1985124 - RNA, 20 nt, Human
ccauuuugcugucccuuuuc

SEQ ID NO: 1985125 - RNA, 13 nt, Human
ccauuuuccugca

SEQ ID NO: 1985126 - RNA, 16 nt, Human
cccaagggccuggccu

SEQ ID NO: 1985127 - RNA, 21 nt, Human
cccaagguucugggugcagga

SEQ ID NO: 1985128 - RNA, 22 nt, Human
cccaagguucugggugcaggag

SEQ ID NO: 1985129 - RNA, 17 nt, Human
cccacaggaucagucug

SEQ ID NO: 1985130 - RNA, 13 nt, Human
cccacaggaucag

SEQ ID NO: 1985131 - RNA, 23 nt, Human
cccacagacucaaaugcucagac

SEQ ID NO: 1985132 - RNA, 13 nt, Human
cccacagacucaa

SEQ ID NO: 1985133 - RNA, 19 nt, Human
cccacauagugaugguucc

SEQ ID NO: 1985134 - RNA, 16 nt, Human
cccacaggcccuuccu

SEQ ID NO: 1985135 - RNA, 18 nt, Human
cccacaggcccuuccucu

SEQ ID NO: 1985136 - RNA, 22 nt, Human
cccagaauaaacuggcagcuca

SEQ ID NO: 1985137 - RNA, 24 nt, Human
cccagaauaaacuggcagcucagc

SEQ ID NO: 1985138 - RNA, 16 nt, Human
cccagaaugaggcugc

SEQ ID NO: 1985139 - RNA, 14 nt, Human
cccagaagugcaga

SEQ ID NO: 1985140 - RNA, 14 nt, Human
cccagaauacugau

SEQ ID NO: 1985141 - RNA, 14 nt, Human
cccacgcuggagug

SEQ ID NO: 1985142 - RNA, 21 nt, Human
cccacgcugacuacagggccg

SEQ ID NO: 1985143 - RNA, 19 nt, Human
cccacgcccccacugguga

SEQ ID NO: 1985144 - RNA, 17 nt, Human
cccacgcccccacuggu

SEQ ID NO: 1985145 - RNA, 14 nt, Human
cccacgcugacuac

SEQ ID NO: 1985146 - RNA, 16 nt, Human
cccacgcugacuacag

SEQ ID NO: 1985147 - RNA, 19 nt, Human
cccacgcugacuacagggc

SEQ ID NO: 1985148 - RNA, 20 nt, Human
cccacgcugacuacagggcc

SEQ ID NO: 1985149 - RNA, 15 nt, Human
cccaccuuggcucaa

SEQ ID NO: 1985150 - RNA, 22 nt, Human
cccaccuuggcucaaguccucu

SEQ ID NO: 1985151 - RNA, 14 nt, Human
cccaccuuggcugc

SEQ ID NO: 1985152 - RNA, 15 nt, Human
cccaccuuggcugca

SEQ ID NO: 1985153 - RNA, 19 nt, Human
cccaccucucucacuccuu

SEQ ID NO: 1985154 - RNA, 12 nt, Human
cccaccuuggcu

SEQ ID NO: 1985155 - RNA, 17 nt, Human
cccaccucucucacucc

SEQ ID NO: 1985156 - RNA, 14 nt, Human
cccaccucucucac

SEQ ID NO: 1985157 - RNA, 13 nt, Human
cccaccucucuca

SEQ ID NO: 1985158 - RNA, 21 nt, Human
cccaccucagccucccaaagu

SEQ ID NO: 1985159 - RNA, 12 nt, Human
cccaccucagcc

SEQ ID NO: 1985160 - RNA, 14 nt, Human
cccaccucagccuc

SEQ ID NO: 1985161 - RNA, 15 nt, Human
cccaccucagccucc

SEQ ID NO: 1985162 - RNA, 22 nt, Human
cccacauccggggccagcuccg

SEQ ID NO: 1985163 - RNA, 12 nt, Human
cccacaugccag

SEQ ID NO: 1985164 - RNA, 18 nt, Human
cccacaugccaggggccu

SEQ ID NO: 1985165 - RNA, 19 nt, Human
cccacauggugauguugac

SEQ ID NO: 1985166 - RNA, 21 nt, Human
accugugagcugcaccaggua

SEQ ID NO: 1985167 - RNA, 11 nt, Human
accugugucuc

SEQ ID NO: 1985168 - RNA, 15 nt, Human
acuaauagacaauuu

SEQ ID NO: 1985169 - RNA, 13 nt, Human
acuaacuucuaaa

SEQ ID NO: 1985170 - RNA, 16 nt, Human
acuaacuucuaaaacu

SEQ ID NO: 1985171 - RNA, 17 nt, Human
acuaacuucuaaaacug

SEQ ID NO: 1985172 - RNA, 13 nt, Human
acguggcaccucc

SEQ ID NO: 1985173 - RNA, 14 nt, Human
acguggcaccuccu

SEQ ID NO: 1985174 - RNA, 15 nt, Human
acguggcaccuccuc

SEQ ID NO: 1985175 - RNA, 16 nt, Human
acguggcaccuccucg

SEQ ID NO: 1985176 - RNA, 15 nt, Human
acgucugacaggcaa

SEQ ID NO: 1985177 - RNA, 23 nt, Human
acgucugacaggcaaugcuggcu

SEQ ID NO: 1985178 - RNA, 15 nt, Human
acggaauaguuggcu

SEQ ID NO: 1985179 - RNA, 19 nt, Human
acggacgaaccuugaaaac

SEQ ID NO: 1985180 - RNA, 16 nt, Human
acggaagagccuugcg

SEQ ID NO: 1985181 - RNA, 15 nt, Human
acggaagagccuugc

SEQ ID NO: 1985182 - RNA, 19 nt, Human
acgcuggagugcagugagc

SEQ ID NO: 1985183 - RNA, 17 nt, Human
acuagggaagauaauau

SEQ ID NO: 1985184 - RNA, 22 nt, Human
acuaggugcccagaaugaggcu

SEQ ID NO: 1985185 - RNA, 16 nt, Human
acuauuguuagucucu

SEQ ID NO: 1985186 - RNA, 18 nt, Human
acuaggucaaaaaucugu

SEQ ID NO: 1985187 - RNA, 14 nt, Human
acuauugagucuuc

SEQ ID NO: 1985188 - RNA, 17 nt, Human
accucuugagccuugaa

SEQ ID NO: 1985189 - RNA, 19 nt, Human
accucuugagccuugaacu

SEQ ID NO: 1985190 - RNA, 20 nt, Human
accucuugagccuugaacuu

SEQ ID NO: 1985191 - RNA, 21 nt, Human
accucuugagccuugaacuuu

SEQ ID NO: 1985192 - RNA, 11 nt, Human
accugccaggg

SEQ ID NO: 1985193 - RNA, 13 nt, Human
accugccagggac

SEQ ID NO: 1985194 - RNA, 12 nt, Human
accugccaggga

SEQ ID NO: 1985195 - RNA, 18 nt, Human
accugccagggacagagg

SEQ ID NO: 1985196 - RNA, 16 nt, Human
accugccaugccagga

SEQ ID NO: 1985197 - RNA, 16 nt, Human
accugccagggacaga

SEQ ID NO: 1985198 - RNA, 15 nt, Human
accugccagggacag

SEQ ID NO: 1985199 - RNA, 23 nt, Human
accugccccuccucucugcccua

SEQ ID NO: 1985200 - RNA, 19 nt, Human
accugccaugccaggaacc

SEQ ID NO: 1985201 - RNA, 15 nt, Human
accugucuuuuggga

SEQ ID NO: 1985202 - RNA, 17 nt, Human
accugucuuuugggagu

SEQ ID NO: 1985203 - RNA, 14 nt, Human
accccaaucccagc

SEQ ID NO: 1985204 - RNA, 15 nt, Human
accccaagcgcccug

SEQ ID NO: 1985205 - RNA, 16 nt, Human
accccaagcgcccugg

SEQ ID NO: 1985206 - RNA, 19 nt, Human
accccaagcgcccuggccc

SEQ ID NO: 1985207 - RNA, 21 nt, Human
accccaagcgcccuggccccc

SEQ ID NO: 1985208 - RNA, 16 nt, Human
accccacacacgccag

SEQ ID NO: 1985209 - RNA, 22 nt, Human
acccugugauggggcccugccu

SEQ ID NO: 1985210 - RNA, 20 nt, Human
acccugugcagaagggagcu

SEQ ID NO: 1985211 - RNA, 23 nt, Human
accccaagcgcccuggcccccac

SEQ ID NO: 1985212 - RNA, 15 nt, Human
acccaugcugcccug

SEQ ID NO: 1985213 - RNA, 14 nt, Human
acccaugcugcccu

SEQ ID NO: 1985214 - RNA, 17 nt, Human
acccuguuaccauuuug

SEQ ID NO: 1985215 - RNA, 18 nt, Human
acccuguuuugagcccug

SEQ ID NO: 1985216 - RNA, 17 nt, Human
acccuguuuugagcccu

SEQ ID NO: 1985217 - RNA, 15 nt, Human
accggcuggccuggc

SEQ ID NO: 1985218 - RNA, 14 nt, Human
accggcuggccugg

SEQ ID NO: 1985219 - RNA, 18 nt, Human
accggcuggccuggcccc

SEQ ID NO: 1985220 - RNA, 17 nt, Human
accggcuggccuggccc

SEQ ID NO: 1985221 - RNA, 19 nt, Human
accggcuggccuggccccu

SEQ ID NO: 1985222 - RNA, 20 nt, Human
accgggcacucagaagacac

SEQ ID NO: 1985223 - RNA, 15 nt, Human
accguccccucccag

SEQ ID NO: 1985224 - RNA, 16 nt, Human
accguccccucccagg

SEQ ID NO: 1985225 - RNA, 18 nt, Human
accguccccucccaggga

SEQ ID NO: 1985226 - RNA, 14 nt, Human
accgugaggccaga

SEQ ID NO: 1985227 - RNA, 14 nt, Human
accgugaagauacu

SEQ ID NO: 1985228 - RNA, 15 nt, Human
accgggccacagaga

SEQ ID NO: 1985229 - RNA, 19 nt, Human
accgggccacagagaaagu

SEQ ID NO: 1985230 - RNA, 13 nt, Human
accucaggccugg

SEQ ID NO: 1985231 - RNA, 12 nt, Human
accucaggccug

SEQ ID NO: 1985232 - RNA, 17 nt, Human
accgugaggccagagac

SEQ ID NO: 1985233 - RNA, 16 nt, Human
accgugaggccagaga

SEQ ID NO: 1985234 - RNA, 22 nt, Human
accucaggccugggggcugggc

SEQ ID NO: 1985235 - RNA, 14 nt, Human
accucaggccuggg

SEQ ID NO: 1985236 - RNA, 22 nt, Human
accucagguaaucgaccugccu

SEQ ID NO: 1985237 - RNA, 18 nt, Human
accgugaagauacuuugu

SEQ ID NO: 1985238 - RNA, 19 nt, Human
accgugaagauacuuugua

SEQ ID NO: 1985239 - RNA, 20 nt, Human
accgugaagauacuuuguau

SEQ ID NO: 1985240 - RNA, 21 nt, Human
accgugaagauacuuuguauu

SEQ ID NO: 1985241 - RNA, 18 nt, Human
accucaggugagaagcag

SEQ ID NO: 1985242 - RNA, 23 nt, Human
accucagguaaucgaccugccuc

SEQ ID NO: 1985243 - RNA, 14 nt, Human
acuuaaauaaugug

SEQ ID NO: 1985244 - RNA, 22 nt, Human
acuuaaaauauuccugcauuug

SEQ ID NO: 1985245 - RNA, 21 nt, Human
acuuaaaaaugguuuaaaugg

SEQ ID NO: 1985246 - RNA, 20 nt, Human
acuuaaaauauuccugcauu

SEQ ID NO: 1985247 - RNA, 13 nt, Human
acuuaaaaauggu

SEQ ID NO: 1985248 - RNA, 14 nt, Human
acuuaaaaaugguu

SEQ ID NO: 1985249 - RNA, 18 nt, Human
acuucuuauacauuugau

SEQ ID NO: 1985250 - RNA, 17 nt, Human
acuucuuauacauuuga

SEQ ID NO: 1985251 - RNA, 14 nt, Human
acuuggcucugagg

SEQ ID NO: 1985252 - RNA, 23 nt, Human
acuucugccugaggggcagccug

SEQ ID NO: 1985253 - RNA, 14 nt, Human
acuucugcuggcau

SEQ ID NO: 1985254 - RNA, 14 nt, Human
acuucuguuuucaa

SEQ ID NO: 1985255 - RNA, 15 nt, Human
acuucuguuuucaau

SEQ ID NO: 1985256 - RNA, 12 nt, Human
acuucuguuuca

SEQ ID NO: 1985257 - RNA, 16 nt, Human
acuucuguuuucaauc

SEQ ID NO: 1985258 - RNA, 17 nt, Human
acuucuguuuucaaucu

SEQ ID NO: 1985259 - RNA, 22 nt, Human
acuucuguuuucaaucucguau

SEQ ID NO: 1985260 - RNA, 23 nt, Human
acuucuguuuucaaucucguaua

SEQ ID NO: 1985261 - RNA, 20 nt, Human
acuucugccauauucuguug

SEQ ID NO: 1985262 - RNA, 13 nt, Human
acuucagcucugu

SEQ ID NO: 1985263 - RNA, 21 nt, Human
acuuucaaaguggaugcaauu

SEQ ID NO: 1985264 - RNA, 16 nt, Human
acuuucaagaacuugu

SEQ ID NO: 1985265 - RNA, 19 nt, Human
acuuucaagaacuuguuua

SEQ ID NO: 1985266 - RNA, 22 nt, Human
acuuucaggccacauggcuaaa

SEQ ID NO: 1985267 - RNA, 12 nt, Human
acuuuaugcuaa

SEQ ID NO: 1985268 - RNA, 17 nt, Human
acuuuaugcuaagugaa

SEQ ID NO: 1985269 - RNA, 15 nt, Human
acuuuauuuuguguu

SEQ ID NO: 1985270 - RNA, 22 nt, Human
acuugggaggcugagaugggag

SEQ ID NO: 1985271 - RNA, 15 nt, Human
acugcccggcagggu

SEQ ID NO: 1985272 - RNA, 19 nt, Human
acugccagucccccugccc

SEQ ID NO: 1985273 - RNA, 18 nt, Human
acugccagucccccugcc

SEQ ID NO: 1985274 - RNA, 16 nt, Human
acugcuuuuggucugu

SEQ ID NO: 1985275 - RNA, 20 nt, Human
acugcuuuuggucuguguga

SEQ ID NO: 1985276 - RNA, 22 nt, Human
acugcccggcaggguccuagaa

SEQ ID NO: 1985277 - RNA, 15 nt, Human
acugcuuuuggucug

SEQ ID NO: 1985278 - RNA, 22 nt, Human
acugauuuuuuuuuccuucagu

SEQ ID NO: 1985279 - RNA, 21 nt, Human
acugauuuuuuuuuccuucag

SEQ ID NO: 1985280 - RNA, 23 nt, Human
acugauuuuuuuuuccuucagug

SEQ ID NO: 1985281 - RNA, 22 nt, Human
acugauuaguaagucuugccua

SEQ ID NO: 1985282 - RNA, 15 nt, Human
acugaccagccucca

SEQ ID NO: 1985283 - RNA, 20 nt, Human
acugaccagccuccaugcug

SEQ ID NO: 1985284 - RNA, 13 nt, Human
acugaccagccuc

SEQ ID NO: 1985285 - RNA, 14 nt, Human
acugaccagacaag

SEQ ID NO: 1985286 - RNA, 22 nt, Human
acugacauuguuggccaaagcc

SEQ ID NO: 1985287 - RNA, 23 nt, Human
acugacauuguuggccaaagcca

SEQ ID NO: 1985288 - RNA, 13 nt, Human
acugaaucuguac

SEQ ID NO: 1985289 - RNA, 14 nt, Human
acugaaucuguaca

SEQ ID NO: 1985290 - RNA, 15 nt, Human
acugaaucuguacag

SEQ ID NO: 1985291 - RNA, 13 nt, Human
acugaucucucgu

SEQ ID NO: 1985292 - RNA, 23 nt, Human
acugaccagccuccaugcugccu

SEQ ID NO: 1985293 - RNA, 22 nt, Human
acugauggcuaauguacugcau

SEQ ID NO: 1985294 - RNA, 12 nt, Human
acugauggaauu

SEQ ID NO: 1985295 - RNA, 21 nt, Human
acugauggaauuuuuuuguac

SEQ ID NO: 1985296 - RNA, 22 nt, Human
acugauggaauuuuuuuguacg

SEQ ID NO: 1985297 - RNA, 23 nt, Human
acugauggaauuuuuuuguacga

SEQ ID NO: 1985298 - RNA, 12 nt, Human
acugaugggcaa

SEQ ID NO: 1985299 - RNA, 22 nt, Human
acugaugggcaacccccagccu

SEQ ID NO: 1985300 - RNA, 21 nt, Human
acuauuuuuauuuuuaaauua

SEQ ID NO: 1985301 - RNA, 16 nt, Human
acuauuuuuauuuuua

SEQ ID NO: 1985302 - RNA, 14 nt, Human
acucuaaagucugu

SEQ ID NO: 1985303 - RNA, 13 nt, Human
acucuaagauguu

SEQ ID NO: 1985304 - RNA, 14 nt, Human
acucuaagauguua

SEQ ID NO: 1985305 - RNA, 19 nt, Human
acucuaagauguuauauuu

SEQ ID NO: 1985306 - RNA, 16 nt, Human
acucuaaguguuugcu

SEQ ID NO: 1985307 - RNA, 23 nt, Human
acucuaaguguuugcugcaauuu

SEQ ID NO: 1985308 - RNA, 23 nt, Human
acucuaaguuuuaggguacaugu

SEQ ID NO: 1985309 - RNA, 21 nt, Human
acugaaguucugccucugaug

SEQ ID NO: 1985310 - RNA, 12 nt, Human
acugaaguuuga

SEQ ID NO: 1985311 - RNA, 15 nt, Human
acugaaguuugauaa

SEQ ID NO: 1985312 - RNA, 18 nt, Human
acugaaguuugauaaaua

SEQ ID NO: 1985313 - RNA, 19 nt, Human
acugaaguuugauaaauag

SEQ ID NO: 1985314 - RNA, 21 nt, Human
acugaaguuugauaaauagug

SEQ ID NO: 1985315 - RNA, 22 nt, Human
acugaaguuugauaaauagugu

SEQ ID NO: 1985316 - RNA, 23 nt, Human
acugaaguuugauaaauaguguu

SEQ ID NO: 1985317 - RNA, 15 nt, Human
acucugucucagucc

SEQ ID NO: 1985318 - RNA, 17 nt, Human
acucugucucaguccau

SEQ ID NO: 1985319 - RNA, 21 nt, Human
acucugugucagguggggcag

SEQ ID NO: 1985320 - RNA, 19 nt, Human
acucugugucagguggggc

SEQ ID NO: 1985321 - RNA, 19 nt, Human
acucugucucaaaaaaaca

SEQ ID NO: 1985322 - RNA, 21 nt, Human
acucuacuuagcaugucccua

SEQ ID NO: 1985323 - RNA, 20 nt, Human
acucuacuuagcaugucccu

SEQ ID NO: 1985324 - RNA, 19 nt, Human
aauuuauuuuuaagaaaga

SEQ ID NO: 1985325 - RNA, 20 nt, Human
aauuuauuuuuaagaaagaa

SEQ ID NO: 1985326 - RNA, 23 nt, Human
aauuucaacgccugccuuuggca

SEQ ID NO: 1985327 - RNA, 13 nt, Human
aauuucaagcuua

SEQ ID NO: 1985328 - RNA, 15 nt, Human
aauuucaagcuuauu

SEQ ID NO: 1985329 - RNA, 17 nt, Human
aauuucaagcuuauuuu

SEQ ID NO: 1985330 - RNA, 20 nt, Human
aauuucaagcuuauuuugga

SEQ ID NO: 1985331 - RNA, 22 nt, Human
aauuucaagcuuauuuuggaga

SEQ ID NO: 1985332 - RNA, 20 nt, Human
aauuucagagagaaucaaga

SEQ ID NO: 1985333 - RNA, 21 nt, Human
aauuucacgucauaggaaguu

SEQ ID NO: 1985334 - RNA, 22 nt, Human
aauuucacgucauaggaaguua

SEQ ID NO: 1985335 - RNA, 18 nt, Human
aauuuccugggagcuuuu

SEQ ID NO: 1985336 - RNA, 21 nt, Human
aauuuccugggagcuuuugua

SEQ ID NO: 1985337 - RNA, 17 nt, Human
aauuuccugggagcuuu

SEQ ID NO: 1985338 - RNA, 16 nt, Human
aauuucaguaagauca

SEQ ID NO: 1985339 - RNA, 11 nt, Human
aauuguauuuu

SEQ ID NO: 1985340 - RNA, 12 nt, Human
aauuguauuuuu

SEQ ID NO: 1985341 - RNA, 14 nt, Human
aauuguauuuuugu

SEQ ID NO: 1985342 - RNA, 19 nt, Human
aauuguauuuuuguuguug

SEQ ID NO: 1985343 - RNA, 12 nt, Human
aauuguaaggaa

SEQ ID NO: 1985344 - RNA, 16 nt, Human
aauuguaaggaaugau

SEQ ID NO: 1985345 - RNA, 21 nt, Human
aauuggguggggggcuucaua

SEQ ID NO: 1985346 - RNA, 22 nt, Human
aauuggguggggggcuucauac

SEQ ID NO: 1985347 - RNA, 20 nt, Human
aauugguuaucaugggaaag

SEQ ID NO: 1985348 - RNA, 15 nt, Human
aauugguaccuugca

SEQ ID NO: 1985349 - RNA, 19 nt, Human
aauugguguaauggggcag

SEQ ID NO: 1985350 - RNA, 23 nt, Human
aauuggguggggggcuucauaca

SEQ ID NO: 1985351 - RNA, 16 nt, Human
aaugucacaggcaggu

SEQ ID NO: 1985352 - RNA, 19 nt, Human
aaugucacaggcaggucca

SEQ ID NO: 1985353 - RNA, 17 nt, Human
aauuuauuauggcacau

SEQ ID NO: 1985354 - RNA, 11 nt, Human
aauugugaugu

SEQ ID NO: 1985355 - RNA, 14 nt, Human
aauugugauguguc

SEQ ID NO: 1985356 - RNA, 15 nt, Human
aauugugaugugucc

SEQ ID NO: 1985357 - RNA, 19 nt, Human
aauugucuuaauggaugaa

SEQ ID NO: 1985358 - RNA, 19 nt, Human
aauuuauugaggaaaaaua

SEQ ID NO: 1985359 - RNA, 21 nt, Human
aauuuauugaggaaaaauaug

SEQ ID NO: 1985360 - RNA, 22 nt, Human
aauuuauugaggaaaaauaugu

SEQ ID NO: 1985361 - RNA, 23 nt, Human
aauuuauugaggaaaaauaugug

SEQ ID NO: 1985362 - RNA, 20 nt, Human
aauuuauuuaugggauccug

SEQ ID NO: 1985363 - RNA, 15 nt, Human
acaagaaaugaaagc

SEQ ID NO: 1985364 - RNA, 16 nt, Human
acaagaaaugaaagca

SEQ ID NO: 1985365 - RNA, 18 nt, Human
acaaccuucuguggcuca

SEQ ID NO: 1985366 - RNA, 20 nt, Human
acaaagaaccuaacauuuau

SEQ ID NO: 1985367 - RNA, 16 nt, Human
acaacccccagcuccc

SEQ ID NO: 1985368 - RNA, 13 nt, Human
acaaaauggaaua

SEQ ID NO: 1985369 - RNA, 14 nt, Human
acaaaauggaauac

SEQ ID NO: 1985370 - RNA, 22 nt, Human
acaaaaugaaacgcaaccacca

SEQ ID NO: 1985371 - RNA, 13 nt, Human
acaaaaugaaacg

SEQ ID NO: 1985372 - RNA, 16 nt, Human
acaaagaaauuaugug

SEQ ID NO: 1985373 - RNA, 14 nt, Human
acaaagaaauuaug

SEQ ID NO: 1985374 - RNA, 12 nt, Human
acaaagaaauua

SEQ ID NO: 1985375 - RNA, 18 nt, Human
aauuuucaucuaggauuu

SEQ ID NO: 1985376 - RNA, 13 nt, Human
aauuuucagauuu

SEQ ID NO: 1985377 - RNA, 14 nt, Human
aauuuucagauuug

SEQ ID NO: 1985378 - RNA, 17 nt, Human
aauuuucagauuugcac

SEQ ID NO: 1985379 - RNA, 18 nt, Human
aauuuucagauuugcaca

SEQ ID NO: 1985380 - RNA, 20 nt, Human
aauuuucagauuugcacaaa

SEQ ID NO: 1985381 - RNA, 14 nt, Human
aauuuugauguuuu

SEQ ID NO: 1985382 - RNA, 19 nt, Human
aauuuucauuuuacaguua

SEQ ID NO: 1985383 - RNA, 15 nt, Human
aauuuucauuuuaca

SEQ ID NO: 1985384 - RNA, 16 nt, Human
aauuuucauuuuacag

SEQ ID NO: 1985385 - RNA, 10 nt, Human
aauuuucauu

SEQ ID NO: 1985386 - RNA, 12 nt, Human
aauuuucauuuu

SEQ ID NO: 1985387 - RNA, 13 nt, Human
aauuuucauuuua

SEQ ID NO: 1985388 - RNA, 16 nt, Human
aauuuugugcccccau

SEQ ID NO: 1985389 - RNA, 20 nt, Human
acaaggaugaucuaggaaga

SEQ ID NO: 1985390 - RNA, 16 nt, Human
acaaggauugcuacug

SEQ ID NO: 1985391 - RNA, 13 nt, Human
acaauuccaugac

SEQ ID NO: 1985392 - RNA, 19 nt, Human
acaauucaaagaaucaccu

SEQ ID NO: 1985393 - RNA, 14 nt, Human
acaauucagcauua

SEQ ID NO: 1985394 - RNA, 14 nt, Human
acaauuuauuaugg

SEQ ID NO: 1985395 - RNA, 13 nt, Human
acaauuuauuaug

SEQ ID NO: 1985396 - RNA, 12 nt, Human
acaauuauaaac

SEQ ID NO: 1985397 - RNA, 23 nt, Human
acaauuauaaacucauuuugcuu

SEQ ID NO: 1985398 - RNA, 16 nt, Human
acacauuuuuuaaaug

SEQ ID NO: 1985399 - RNA, 18 nt, Human
acacauuuuuuaaaugca

SEQ ID NO: 1985400 - RNA, 19 nt, Human
acacauuuuuuaaaugcac

SEQ ID NO: 1985401 - RNA, 15 nt, Human
acaccacuacauucu

SEQ ID NO: 1985402 - RNA, 14 nt, Human
acacgaauauugcu

SEQ ID NO: 1985403 - RNA, 12 nt, Human
acacgaauauug

SEQ ID NO: 1985404 - RNA, 17 nt, Human
acaccacuacauucugu

SEQ ID NO: 1985405 - RNA, 20 nt, Human
acaccacuacauucuguuaa

SEQ ID NO: 1985406 - RNA, 19 nt, Human
acacagcucuucuccaggc

SEQ ID NO: 1985407 - RNA, 17 nt, Human
acacaaaacaaauccug

SEQ ID NO: 1985408 - RNA, 12 nt, Human
acacaaaaucaa

SEQ ID NO: 1985409 - RNA, 19 nt, Human
acacaaaaguuucucuuuu

SEQ ID NO: 1985410 - RNA, 14 nt, Human
acacauuuuuuaaa

SEQ ID NO: 1985411 - RNA, 22 nt, Human
acacagcucuucuccaggcugu

SEQ ID NO: 1985412 - RNA, 20 nt, Human
acacagcucuucuccaggcu

SEQ ID NO: 1985413 - RNA, 21 nt, Human
acacagcucuucuccaggcug

SEQ ID NO: 1985414 - RNA, 21 nt, Human
acacgaauauugcugauggug

SEQ ID NO: 1985415 - RNA, 15 nt, Human
acacgaauauugcug

SEQ ID NO: 1985416 - RNA, 20 nt, Human
acacguaaugaaacuuggau

SEQ ID NO: 1985417 - RNA, 23 nt, Human
acagaggacaguauuugugggga

SEQ ID NO: 1985418 - RNA, 16 nt, Human
acagaggacacagaga

SEQ ID NO: 1985419 - RNA, 13 nt, Human
acagaggcagccc

SEQ ID NO: 1985420 - RNA, 21 nt, Human
acagaggaccagcacacuccc

SEQ ID NO: 1985421 - RNA, 12 nt, Human
acagaggaccag

SEQ ID NO: 1985422 - RNA, 14 nt, Human
acagaggaccagca

SEQ ID NO: 1985423 - RNA, 15 nt, Human
acagaggaccagcac

SEQ ID NO: 1985424 - RNA, 20 nt, Human
acagaggaccagcacacucc

SEQ ID NO: 1985425 - RNA, 17 nt, Human
acagaggccaugggccu

SEQ ID NO: 1985426 - RNA, 21 nt, Human
acagaggccaugggccuccug

SEQ ID NO: 1985427 - RNA, 23 nt, Human
acagaggccaugggccuccugug

SEQ ID NO: 1985428 - RNA, 19 nt, Human
acagaaggcuccugccccc

SEQ ID NO: 1985429 - RNA, 16 nt, Human
acagaaggcuccugcc

SEQ ID NO: 1985430 - RNA, 18 nt, Human
acagaaggcuccugcccc

SEQ ID NO: 1985431 - RNA, 14 nt, Human
acagacaaagcgug

SEQ ID NO: 1985432 - RNA, 17 nt, Human
acagaaggggacugcca

SEQ ID NO: 1985433 - RNA, 22 nt, Human
acagaaggggacugccaccucc

SEQ ID NO: 1985434 - RNA, 23 nt, Human
acagaaggggacugccaccuccc

SEQ ID NO: 1985435 - RNA, 17 nt, Human
acacugugcugagucug

SEQ ID NO: 1985436 - RNA, 22 nt, Human
acacugugcugagucugaaggc

SEQ ID NO: 1985437 - RNA, 20 nt, Human
acacugugguagguguuuga

SEQ ID NO: 1985438 - RNA, 18 nt, Human
acacugugguagguguuu

SEQ ID NO: 1985439 - RNA, 22 nt, Human
acagaacucgguguccccacca

SEQ ID NO: 1985440 - RNA, 19 nt, Human
acagaacucggugucccca

SEQ ID NO: 1985441 - RNA, 20 nt, Human
acagaacucgguguccccac

SEQ ID NO: 1985442 - RNA, 20 nt, Human
acacugggagaaaugaaaaa

SEQ ID NO: 1985443 - RNA, 14 nt, Human
acacugggaaacag

SEQ ID NO: 1985444 - RNA, 13 nt, Human
acagcugccuggg

SEQ ID NO: 1985445 - RNA, 16 nt, Human
acagcugccugcagua

SEQ ID NO: 1985446 - RNA, 12 nt, Human
acagcugccugc

SEQ ID NO: 1985447 - RNA, 20 nt, Human
acaggcaagcaccuccugcc

SEQ ID NO: 1985448 - RNA, 23 nt, Human
acaggcaagcaccuccugccucg

SEQ ID NO: 1985449 - RNA, 13 nt, Human
acagcucuguccu

SEQ ID NO: 1985450 - RNA, 16 nt, Human
acagcucuguccuggg

SEQ ID NO: 1985451 - RNA, 17 nt, Human
acagcucuguccuggga

SEQ ID NO: 1985452 - RNA, 21 nt, Human
acagaggggguggccucccaa

SEQ ID NO: 1985453 - RNA, 19 nt, Human
acagaggggguggccuccc

SEQ ID NO: 1985454 - RNA, 18 nt, Human
acagaggggguggccucc

SEQ ID NO: 1985455 - RNA, 17 nt, Human
acagaggggguggccuc

SEQ ID NO: 1985456 - RNA, 16 nt, Human
acagcuccuucugucc

SEQ ID NO: 1985457 - RNA, 18 nt, Human
acagcuccuucuguccua

SEQ ID NO: 1985458 - RNA, 23 nt, Human
acagcuccuucuguccuacucug

SEQ ID NO: 1985459 - RNA, 14 nt, Human
acagcucuguccug

SEQ ID NO: 1985460 - RNA, 22 nt, Human
acagugagucgaggacagggag

SEQ ID NO: 1985461 - RNA, 18 nt, Human
acagguguuuauaucucc

SEQ ID NO: 1985462 - RNA, 19 nt, Human
acaggugugaaccaccaca

SEQ ID NO: 1985463 - RNA, 22 nt, Human
acaggugugagucaccaagccc

SEQ ID NO: 1985464 - RNA, 23 nt, Human
acaggugugagucaccaagccca

SEQ ID NO: 1985465 - RNA, 18 nt, Human
acaggugauuaacuugga

SEQ ID NO: 1985466 - RNA, 13 nt, Human
acaggugcccgcc

SEQ ID NO: 1985467 - RNA, 21 nt, Human
acagggcugauaagcuaacac

SEQ ID NO: 1985468 - RNA, 19 nt, Human
acagggccuggcccaugua

SEQ ID NO: 1985469 - RNA, 14 nt, Human
acaggcaaugcugg

SEQ ID NO: 1985470 - RNA, 12 nt, Human
acagggccuggc

SEQ ID NO: 1985471 - RNA, 13 nt, Human
acagggccuggcc

SEQ ID NO: 1985472 - RNA, 14 nt, Human
acagggccuggccc

SEQ ID NO: 1985473 - RNA, 15 nt, Human
acagggccuggccca

SEQ ID NO: 1985474 - RNA, 16 nt, Human
acagggccuggcccau

SEQ ID NO: 1985475 - RNA, 17 nt, Human
acagggccuggcccaug

SEQ ID NO: 1985476 - RNA, 23 nt, Human
acaguguaccauuaaaauaugca

SEQ ID NO: 1985477 - RNA, 19 nt, Human
acaguguaccauuaaaaua

SEQ ID NO: 1985478 - RNA, 20 nt, Human
acaguguaccauuaaaauau

SEQ ID NO: 1985479 - RNA, 18 nt, Human
acaguguaccauuaaaau

SEQ ID NO: 1985480 - RNA, 19 nt, Human
acaguggggaaugaagaua

SEQ ID NO: 1985481 - RNA, 15 nt, Human
acaguggggaaugaa

SEQ ID NO: 1985482 - RNA, 21 nt, Human
acagugcaccugggacaggga

SEQ ID NO: 1985483 - RNA, 21 nt, Human
acagugauuaccagggacuga

SEQ ID NO: 1985484 - RNA, 20 nt, Human
acagugauuaccagggacug

SEQ ID NO: 1985485 - RNA, 23 nt, Human
acagugagucgaggacagggagg

SEQ ID NO: 1985486 - RNA, 18 nt, Human
acaugccucucucaggcc

SEQ ID NO: 1985487 - RNA, 17 nt, Human
acaugccucucucaggc

SEQ ID NO: 1985488 - RNA, 16 nt, Human
acaugccucucucagg

SEQ ID NO: 1985489 - RNA, 15 nt, Human
acaugccucucucag

SEQ ID NO: 1985490 - RNA, 15 nt, Human
acaugccaggggccu

SEQ ID NO: 1985491 - RNA, 20 nt, Human
acauccugucaucugagaau

SEQ ID NO: 1985492 - RNA, 18 nt, Human
acaugcaaggucauuuuu

SEQ ID NO: 1985493 - RNA, 17 nt, Human
acaugcaaggucauuuu

SEQ ID NO: 1985494 - RNA, 16 nt, Human
acaugcaaggucauuu

SEQ ID NO: 1985495 - RNA, 15 nt, Human
acauccuacaagaca

SEQ ID NO: 1985496 - RNA, 18 nt, Human
acauccggggccagcucc

SEQ ID NO: 1985497 - RNA, 19 nt, Human
acauccggggccagcuccg

SEQ ID NO: 1985498 - RNA, 13 nt, Human
acaucauuccuuu

SEQ ID NO: 1985499 - RNA, 19 nt, Human
acaucaucuguaagcuguu

SEQ ID NO: 1985500 - RNA, 20 nt, Human
acaucaucuguaagcuguuu

SEQ ID NO: 1985501 - RNA, 13 nt, Human
acaucaucuguaa

SEQ ID NO: 1985502 - RNA, 14 nt, Human
acaucaucuguaag

SEQ ID NO: 1985503 - RNA, 18 nt, Human
acaucaucuguaagcugu

SEQ ID NO: 1985504 - RNA, 16 nt, Human
acauaagauaaaugug

SEQ ID NO: 1985505 - RNA, 11 nt, Human
acauacaaaug

SEQ ID NO: 1985506 - RNA, 21 nt, Human
acauacaaaugcaucuuugau

SEQ ID NO: 1985507 - RNA, 20 nt, Human
acauaauucaggaagcagcu

SEQ ID NO: 1985508 - RNA, 13 nt, Human
acauaauucuuau

SEQ ID NO: 1985509 - RNA, 22 nt, Human
acaucagcuggucaaacaaacu

SEQ ID NO: 1985510 - RNA, 20 nt, Human
acaucagguuaggcaguaua

SEQ ID NO: 1985511 - RNA, 21 nt, Human
acauaauuaacacuuaagguu

SEQ ID NO: 1985512 - RNA, 13 nt, Human
accagcagagcac

SEQ ID NO: 1985513 - RNA, 12 nt, Human
accagcagagca

SEQ ID NO: 1985514 - RNA, 14 nt, Human
accagcagaaaugc

SEQ ID NO: 1985515 - RNA, 16 nt, Human
accagccccagugccc

SEQ ID NO: 1985516 - RNA, 17 nt, Human
accagccccagugccca

SEQ ID NO: 1985517 - RNA, 16 nt, Human
accagccccacccugu

SEQ ID NO: 1985518 - RNA, 18 nt, Human
accagccccagugcccac

SEQ ID NO: 1985519 - RNA, 19 nt, Human
accagccccagugcccaca

SEQ ID NO: 1985520 - RNA, 20 nt, Human
accagccccagugcccacag

SEQ ID NO: 1985521 - RNA, 20 nt, Human
accaaggcugauuaaaccaa

SEQ ID NO: 1985522 - RNA, 17 nt, Human
accacccgguccccacu

SEQ ID NO: 1985523 - RNA, 16 nt, Human
accacccgguccccac

SEQ ID NO: 1985524 - RNA, 12 nt, Human
accaccugccca

SEQ ID NO: 1985525 - RNA, 14 nt, Human
accacccuccuucc

SEQ ID NO: 1985526 - RNA, 12 nt, Human
accacccuccuu

SEQ ID NO: 1985527 - RNA, 19 nt, Human
accaaggcugauuaaacca

SEQ ID NO: 1985528 - RNA, 18 nt, Human
accaagaaaggaaccugu

SEQ ID NO: 1985529 - RNA, 19 nt, Human
acauuuccgccacaucccu

SEQ ID NO: 1985530 - RNA, 23 nt, Human
acauuucuaagucaaacacuugu

SEQ ID NO: 1985531 - RNA, 17 nt, Human
acauuucucauguugaa

SEQ ID NO: 1985532 - RNA, 17 nt, Human
acauuuccuaaauauau

SEQ ID NO: 1985533 - RNA, 16 nt, Human
acauuuccuaaauaua

SEQ ID NO: 1985534 - RNA, 19 nt, Human
acaugccucucucaggcca

SEQ ID NO: 1985535 - RNA, 23 nt, Human
acaugucuuuucuugcaugaggc

SEQ ID NO: 1985536 - RNA, 14 nt, Human
acaugugaaaagaa

SEQ ID NO: 1985537 - RNA, 17 nt, Human
acaugugaaaagaauag

SEQ ID NO: 1985538 - RNA, 18 nt, Human
acaugugaaaagaauaga

SEQ ID NO: 1985539 - RNA, 14 nt, Human
accaucucuuuacc

SEQ ID NO: 1985540 - RNA, 12 nt, Human
accauccccucc

SEQ ID NO: 1985541 - RNA, 13 nt, Human
accaucugcuguc

SEQ ID NO: 1985542 - RNA, 23 nt, Human
accaucauugaaaucuuuuugcu

SEQ ID NO: 1985543 - RNA, 16 nt, Human
accaucccugaaggcc

SEQ ID NO: 1985544 - RNA, 15 nt, Human
accaucaagccacca

SEQ ID NO: 1985545 - RNA, 14 nt, Human
accauaguugacag

SEQ ID NO: 1985546 - RNA, 15 nt, Human
accaucauugaaauc

SEQ ID NO: 1985547 - RNA, 12 nt, Human
accaucauugaa

SEQ ID NO: 1985548 - RNA, 19 nt, Human
accauaguguucauugaua

SEQ ID NO: 1985549 - RNA, 15 nt, Human
accauaguuacugua

SEQ ID NO: 1985550 - RNA, 18 nt, Human
accauaguuacuguaaaa

SEQ ID NO: 1985551 - RNA, 22 nt, Human
accauaguuacuguaaaaugca

SEQ ID NO: 1985552 - RNA, 14 nt, Human
accaucaagccacc

SEQ ID NO: 1985553 - RNA, 17 nt, Human
accauaggucaccuuua

SEQ ID NO: 1985554 - RNA, 21 nt, Human
accauacuaauuauacccccu

SEQ ID NO: 1985555 - RNA, 13 nt, Human
accauacuaauua

SEQ ID NO: 1985556 - RNA, 16 nt, Human
accauacuaauuauac

SEQ ID NO: 1985557 - RNA, 20 nt, Human
acccauccaccguccccucc

SEQ ID NO: 1985558 - RNA, 13 nt, Human
acccaugcugccc

SEQ ID NO: 1985559 - RNA, 15 nt, Human
acccacccuccuuuc

SEQ ID NO: 1985560 - RNA, 21 nt, Human
acccacccuuucuacuuccaa

SEQ ID NO: 1985561 - RNA, 15 nt, Human
acccacccccaccca

SEQ ID NO: 1985562 - RNA, 12 nt, Human
acccaccacaca

SEQ ID NO: 1985563 - RNA, 17 nt, Human
acccacccccacccaag

SEQ ID NO: 1985564 - RNA, 21 nt, Human
accaucuuuuccucauuuuca

SEQ ID NO: 1985565 - RNA, 14 nt, Human
accaucugcugucu

SEQ ID NO: 1985566 - RNA, 15 nt, Human
accaucugcugucuu

SEQ ID NO: 1985567 - RNA, 21 nt, Human
aagcagaggaaggagaggaga

SEQ ID NO: 1985568 - RNA, 14 nt, Human
aagcagaauuggaa

SEQ ID NO: 1985569 - RNA, 15 nt, Human
aagcagaauuggaaa

SEQ ID NO: 1985570 - RNA, 15 nt, Human
aagcagggacuugaa

SEQ ID NO: 1985571 - RNA, 19 nt, Human
aagccaccaacauacuccc

SEQ ID NO: 1985572 - RNA, 14 nt, Human
aagcagguuaaaug

SEQ ID NO: 1985573 - RNA, 15 nt, Human
aagcagguuaaaugu

SEQ ID NO: 1985574 - RNA, 16 nt, Human
aagcagguuaaauguu

SEQ ID NO: 1985575 - RNA, 17 nt, Human
aagcagguuaaauguuu

SEQ ID NO: 1985576 - RNA, 18 nt, Human
aagcagguuaaauguuuu

SEQ ID NO: 1985577 - RNA, 19 nt, Human
aagauuuugaaauuuuuau

SEQ ID NO: 1985578 - RNA, 13 nt, Human
aagauuuugaucu

SEQ ID NO: 1985579 - RNA, 20 nt, Human
aagauuuugaucucacauuu

SEQ ID NO: 1985580 - RNA, 21 nt, Human
aagauuuugaucucacauuuu

SEQ ID NO: 1985581 - RNA, 23 nt, Human
aagauuuugaucucacauuuuua

SEQ ID NO: 1985582 - RNA, 14 nt, Human
aagauacugaaaua

SEQ ID NO: 1985583 - RNA, 16 nt, Human
aagauacugaaauaaa

SEQ ID NO: 1985584 - RNA, 20 nt, Human
aagauacugaaauaaacguc

SEQ ID NO: 1985585 - RNA, 12 nt, Human
aagauacuuugu

SEQ ID NO: 1985586 - RNA, 13 nt, Human
aagauacuuugua

SEQ ID NO: 1985587 - RNA, 12 nt, Human
aagauacuguuu

SEQ ID NO: 1985588 - RNA, 17 nt, Human
aagauucaaucccagga

SEQ ID NO: 1985589 - RNA, 20 nt, Human
aagauuauaauuguugcaua

SEQ ID NO: 1985590 - RNA, 14 nt, Human
aagauuauaauugu

SEQ ID NO: 1985591 - RNA, 19 nt, Human
aagauuauaauuguugcau

SEQ ID NO: 1985592 - RNA, 14 nt, Human
aagauacuuuguau

SEQ ID NO: 1985593 - RNA, 16 nt, Human
aagauacuuuguauug

SEQ ID NO: 1985594 - RNA, 17 nt, Human
aagauagaguaaaaaga

SEQ ID NO: 1985595 - RNA, 19 nt, Human
aagauagaguaaaaagaaa

SEQ ID NO: 1985596 - RNA, 20 nt, Human
aagauucaaugccccugaau

SEQ ID NO: 1985597 - RNA, 21 nt, Human
aagauucaaugccccugaauu

SEQ ID NO: 1985598 - RNA, 20 nt, Human
aagauucauauuuacuucuu

SEQ ID NO: 1985599 - RNA, 21 nt, Human
aagauucuauguuaauauuuu

SEQ ID NO: 1985600 - RNA, 22 nt, Human
aagauucuauguuaauauuuua

SEQ ID NO: 1985601 - RNA, 17 nt, Human
aagauugauguuuccuu

SEQ ID NO: 1985602 - RNA, 17 nt, Human
aagagacaauuucugca

SEQ ID NO: 1985603 - RNA, 14 nt, Human
aagagacaggcagg

SEQ ID NO: 1985604 - RNA, 18 nt, Human
aagagaagggcagggcug

SEQ ID NO: 1985605 - RNA, 15 nt, Human
aagacuuuuaugaua

SEQ ID NO: 1985606 - RNA, 16 nt, Human
aagacuuuggaaagag

SEQ ID NO: 1985607 - RNA, 21 nt, Human
aagacagggcugauaagcuaa

SEQ ID NO: 1985608 - RNA, 23 nt, Human
aagacagugaaagaaaauaacaa

SEQ ID NO: 1985609 - RNA, 22 nt, Human
aacuuacaggugauuaacuugg

SEQ ID NO: 1985610 - RNA, 20 nt, Human
aacuuacauauuuauuuuua

SEQ ID NO: 1985611 - RNA, 19 nt, Human
aacuguuguauaaauuuau

SEQ ID NO: 1985612 - RNA, 13 nt, Human
aacuguuuagaug

SEQ ID NO: 1985613 - RNA, 13 nt, Human
aacuguuguauaa

SEQ ID NO: 1985614 - RNA, 14 nt, Human
aacuguuguauaaa

SEQ ID NO: 1985615 - RNA, 15 nt, Human
aacuguuguauaaau

SEQ ID NO: 1985616 - RNA, 16 nt, Human
aagacagcauuugugu

SEQ ID NO: 1985617 - RNA, 21 nt, Human
aagacagcccgauccuccccu

SEQ ID NO: 1985618 - RNA, 15 nt, Human
aacuuagagcuuuuu

SEQ ID NO: 1985619 - RNA, 23 nt, Human
aacuuacccuguauaucagggua

SEQ ID NO: 1985620 - RNA, 15 nt, Human
aaguagcacaggcug

SEQ ID NO: 1985621 - RNA, 16 nt, Human
aaguagcacaggcuga

SEQ ID NO: 1985622 - RNA, 22 nt, Human
aaguagccaccugaguuccuga

SEQ ID NO: 1985623 - RNA, 21 nt, Human
aaguagcaaaugagacagcag

SEQ ID NO: 1985624 - RNA, 14 nt, Human
aaguagcacaggcu

SEQ ID NO: 1985625 - RNA, 19 nt, Human
aaguagacuacuguucagc

SEQ ID NO: 1985626 - RNA, 12 nt, Human
aaguagaggagg

SEQ ID NO: 1985627 - RNA, 12 nt, Human
aagguguuugaa

SEQ ID NO: 1985628 - RNA, 13 nt, Human
aagguguuugaaa

SEQ ID NO: 1985629 - RNA, 17 nt, Human
aaggucuguuugcuguu

SEQ ID NO: 1985630 - RNA, 18 nt, Human
aaggucuguuugcuguug

SEQ ID NO: 1985631 - RNA, 14 nt, Human
aaggucuguuuuga

SEQ ID NO: 1985632 - RNA, 16 nt, Human
aaggucuguuuugagu

SEQ ID NO: 1985633 - RNA, 22 nt, Human
aaggucuugcauuuaaaagaca

SEQ ID NO: 1985634 - RNA, 17 nt, Human
aagggacugagaaauuu

SEQ ID NO: 1985635 - RNA, 15 nt, Human
aagggacugagaaau

SEQ ID NO: 1985636 - RNA, 20 nt, Human
aagggacuuggaagcuccgc

SEQ ID NO: 1985637 - RNA, 17 nt, Human
aagggacugauguuugu

SEQ ID NO: 1985638 - RNA, 14 nt, Human
aagggcagggacag

SEQ ID NO: 1985639 - RNA, 19 nt, Human
aagggcagaguuacuugau

SEQ ID NO: 1985640 - RNA, 18 nt, Human
aagggcagaaguagggga

SEQ ID NO: 1985641 - RNA, 13 nt, Human
aagggcagaguua

SEQ ID NO: 1985642 - RNA, 16 nt, Human
aagggcacauagaaag

SEQ ID NO: 1985643 - RNA, 14 nt, Human
aagccaccagaugu

SEQ ID NO: 1985644 - RNA, 20 nt, Human
aagcagguuaaauguuuugu

SEQ ID NO: 1985645 - RNA, 21 nt, Human
aagcagguuaaauguuuugua

SEQ ID NO: 1985646 - RNA, 21 nt, Human
aagccaccaacauacucccau

SEQ ID NO: 1985647 - RNA, 16 nt, Human
aagccacccaaagcag

SEQ ID NO: 1985648 - RNA, 18 nt, Human
aagccagcaggcucucag

SEQ ID NO: 1985649 - RNA, 15 nt, Human
aagccagcaggcucu

SEQ ID NO: 1985650 - RNA, 15 nt, Human
aagcgauucuucugc

SEQ ID NO: 1985651 - RNA, 14 nt, Human
aagcgauucuucug

SEQ ID NO: 1985652 - RNA, 16 nt, Human
aagcgauucuucugcu

SEQ ID NO: 1985653 - RNA, 17 nt, Human
aagcgauucuucugcuu

SEQ ID NO: 1985654 - RNA, 13 nt, Human
aagcugcugugau

SEQ ID NO: 1985655 - RNA, 16 nt, Human
aagcugcugacagugu

SEQ ID NO: 1985656 - RNA, 23 nt, Human
aaggaaugauuaauuaaaacaca

SEQ ID NO: 1985657 - RNA, 21 nt, Human
aaggaauaugggagaaauagu

SEQ ID NO: 1985658 - RNA, 18 nt, Human
aaggaaucuagccaguga

SEQ ID NO: 1985659 - RNA, 23 nt, Human
aaggaaucuagccagugaacaua

SEQ ID NO: 1985660 - RNA, 21 nt, Human
aagcgugagccacugcaccgg

SEQ ID NO: 1985661 - RNA, 17 nt, Human
aagcgugagccacugca

SEQ ID NO: 1985662 - RNA, 20 nt, Human
aagcgugagccacugcaccg

SEQ ID NO: 1985663 - RNA, 12 nt, Human
aagcugccagcc

SEQ ID NO: 1985664 - RNA, 11 nt, Human
aagcugccagc

SEQ ID NO: 1985665 - RNA, 22 nt, Human
aagcugccagccgagauagcca

SEQ ID NO: 1985666 - RNA, 14 nt, Human
aagcugcugacagu

SEQ ID NO: 1985667 - RNA, 13 nt, Human
aaggacuaggguc

SEQ ID NO: 1985668 - RNA, 24 nt, Human
aaggaccuucacucuaagauguua

SEQ ID NO: 1985669 - RNA, 15 nt, Human
aaggaccuaaaaauu

SEQ ID NO: 1985670 - RNA, 20 nt, Human
aaggaccuucacucuaagau

SEQ ID NO: 1985671 - RNA, 21 nt, Human
aaggaccuucacucuaagaug

SEQ ID NO: 1985672 - RNA, 22 nt, Human
aaggaccuucacucuaagaugu

SEQ ID NO: 1985673 - RNA, 23 nt, Human
aaggaccuucacucuaagauguu

SEQ ID NO: 1985674 - RNA, 12 nt, Human
aaggaauuuuau

SEQ ID NO: 1985675 - RNA, 22 nt, Human
aaggacccggaggggccuggca

SEQ ID NO: 1985676 - RNA, 19 nt, Human
aaggaauuuugcuaaguaa

SEQ ID NO: 1985677 - RNA, 15 nt, Human
aaggcaaacauuuga

SEQ ID NO: 1985678 - RNA, 22 nt, Human
aaggcaaaccuuucuauaauuu

SEQ ID NO: 1985679 - RNA, 15 nt, Human
aaggcagaaagcaaa

SEQ ID NO: 1985680 - RNA, 16 nt, Human
aaggcagaaagcaaaa

SEQ ID NO: 1985681 - RNA, 17 nt, Human
aaggcagaaagcaaaau

SEQ ID NO: 1985682 - RNA, 19 nt, Human
aaggcagaaagcaaaauua

SEQ ID NO: 1985683 - RNA, 15 nt, Human
aaugaacaagcauuc

SEQ ID NO: 1985684 - RNA, 21 nt, Human
aaugaacaagcauucucucca

SEQ ID NO: 1985685 - RNA, 14 nt, Human
aaugaacacaaauu

SEQ ID NO: 1985686 - RNA, 17 nt, Human
aaugaacacaaauuaug

SEQ ID NO: 1985687 - RNA, 20 nt, Human
aaugaacacaaauuaugcua

SEQ ID NO: 1985688 - RNA, 16 nt, Human
aaugaacaaagaccaa

SEQ ID NO: 1985689 - RNA, 13 nt, Human
aaugauuaauuaa

SEQ ID NO: 1985690 - RNA, 12 nt, Human
aaugauuaauua

SEQ ID NO: 1985691 - RNA, 19 nt, Human
aaugaugugccugcuucag

SEQ ID NO: 1985692 - RNA, 16 nt, Human
aaugauuaauuaaaac

SEQ ID NO: 1985693 - RNA, 15 nt, Human
aaugauagcuacugu

SEQ ID NO: 1985694 - RNA, 15 nt, Human
aaugauaugcuugua

SEQ ID NO: 1985695 - RNA, 17 nt, Human
aaugauaugcuuguaac

SEQ ID NO: 1985696 - RNA, 23 nt, Human
aaugauguauguugaagccuuug

SEQ ID NO: 1985697 - RNA, 19 nt, Human
aaugauaugcuuguaacua

SEQ ID NO: 1985698 - RNA, 18 nt, Human
aaugauaugcuuguaacu

SEQ ID NO: 1985699 - RNA, 19 nt, Human
aaucucguauagaagucuu

SEQ ID NO: 1985700 - RNA, 20 nt, Human
aaucucguauagaagucuuc

SEQ ID NO: 1985701 - RNA, 18 nt, Human
aaucucggcucacugcau

SEQ ID NO: 1985702 - RNA, 23 nt, Human
aaucucgcucugucgcccaggcu

SEQ ID NO: 1985703 - RNA, 14 nt, Human
aaugaaauguaugu

SEQ ID NO: 1985704 - RNA, 15 nt, Human
aaugaaauguaugug

SEQ ID NO: 1985705 - RNA, 16 nt, Human
aaugaaauguaugugc

SEQ ID NO: 1985706 - RNA, 17 nt, Human
aaugaaauguaugugcu

SEQ ID NO: 1985707 - RNA, 20 nt, Human
aaucuggacuccucugucca

SEQ ID NO: 1985708 - RNA, 17 nt, Human
aaucuggacuccucugu

SEQ ID NO: 1985709 - RNA, 18 nt, Human
aaucuggacuccucuguc

SEQ ID NO: 1985710 - RNA, 15 nt, Human
aaucuggacuccucu

SEQ ID NO: 1985711 - RNA, 16 nt, Human
aaucuggacuccucug

SEQ ID NO: 1985712 - RNA, 24 nt, Human
aaucuggaccccaucugugaauaa

SEQ ID NO: 1985713 - RNA, 15 nt, Human
aauccaaaagaaaaa

SEQ ID NO: 1985714 - RNA, 16 nt, Human
aauccaaaagaaaaac

SEQ ID NO: 1985715 - RNA, 14 nt, Human
aauccaaauauugu

SEQ ID NO: 1985716 - RNA, 16 nt, Human
aauccaaauauuguua

SEQ ID NO: 1985717 - RNA, 21 nt, Human
aauccaaauauuguuaaggga

SEQ ID NO: 1985718 - RNA, 19 nt, Human
aauccaucagugccaaacu

SEQ ID NO: 1985719 - RNA, 19 nt, Human
aauccagaaacuuguucuu

SEQ ID NO: 1985720 - RNA, 20 nt, Human
aauccagaaacuuguucuuc

SEQ ID NO: 1985721 - RNA, 18 nt, Human
aaucauuuguucaaagcu

SEQ ID NO: 1985722 - RNA, 18 nt, Human
aaucauuuuuuauauaua

SEQ ID NO: 1985723 - RNA, 19 nt, Human
aaucauuuuuuauauauau

SEQ ID NO: 1985724 - RNA, 21 nt, Human
aaucauuuuuuauauauaugc

SEQ ID NO: 1985725 - RNA, 22 nt, Human
aaucauuuuuuauauauaugca

SEQ ID NO: 1985726 - RNA, 23 nt, Human
aaucauuuuuuauauauaugcau

SEQ ID NO: 1985727 - RNA, 24 nt, Human
aaucauuuuuuauauauaugcaua

SEQ ID NO: 1985728 - RNA, 11 nt, Human
aaucauuuguu

SEQ ID NO: 1985729 - RNA, 13 nt, Human
aaucaaauaauac

SEQ ID NO: 1985730 - RNA, 13 nt, Human
aaucaaauguaaa

SEQ ID NO: 1985731 - RNA, 16 nt, Human
aaucaaauaauaccuu

SEQ ID NO: 1985732 - RNA, 21 nt, Human
aaucaaauaauaccuuagaag

SEQ ID NO: 1985733 - RNA, 14 nt, Human
aaucaaauguaaag

SEQ ID NO: 1985734 - RNA, 15 nt, Human
aaucaaauguaaagu

SEQ ID NO: 1985735 - RNA, 15 nt, Human
aaugucacaggcagg

SEQ ID NO: 1985736 - RNA, 15 nt, Human
aaugggggugcauuu

SEQ ID NO: 1985737 - RNA, 17 nt, Human
aaugggggugcauuuga

SEQ ID NO: 1985738 - RNA, 21 nt, Human
aaugggaggggaaaugggaau

SEQ ID NO: 1985739 - RNA, 14 nt, Human
aaugggagcucaug

SEQ ID NO: 1985740 - RNA, 13 nt, Human
aaugggacacuaa

SEQ ID NO: 1985741 - RNA, 15 nt, Human
aaugcucagaccagc

SEQ ID NO: 1985742 - RNA, 23 nt, Human
aaugcucuuuacuucauggacuu

SEQ ID NO: 1985743 - RNA, 21 nt, Human
aaugcgugcauaccacuuuug

SEQ ID NO: 1985744 - RNA, 23 nt, Human
aaugcgugcauaccacuuuuguu

SEQ ID NO: 1985745 - RNA, 15 nt, Human
aaugcuagaaaaauu

SEQ ID NO: 1985746 - RNA, 17 nt, Human
aaugcgcaggcuggccc

SEQ ID NO: 1985747 - RNA, 18 nt, Human
aaugcgcaggcuggcccu

SEQ ID NO: 1985748 - RNA, 19 nt, Human
aaugcgcaggcuggcccug

SEQ ID NO: 1985749 - RNA, 20 nt, Human
aaugcgcaggcuggcccugc

SEQ ID NO: 1985750 - RNA, 15 nt, Human
aaugcgcaggcuggc

SEQ ID NO: 1985751 - RNA, 14 nt, Human
aaugcgcaggcugg

SEQ ID NO: 1985752 - RNA, 23 nt, Human
aaugccucuggcucuacacauau

SEQ ID NO: 1985753 - RNA, 16 nt, Human
aaugccucuugucuuc

SEQ ID NO: 1985754 - RNA, 21 nt, Human
aaugccgcccucccagcucug

SEQ ID NO: 1985755 - RNA, 16 nt, Human
aauauaggaacuuaaa

SEQ ID NO: 1985756 - RNA, 15 nt, Human
aauauagauuaaauc

SEQ ID NO: 1985757 - RNA, 17 nt, Human
aauauagauuaaaucau

SEQ ID NO: 1985758 - RNA, 19 nt, Human
aauauagauuaaaucauac

SEQ ID NO: 1985759 - RNA, 19 nt, Human
aauacgugggcauucaaau

SEQ ID NO: 1985760 - RNA, 20 nt, Human
aauacgugggcauucaaaug

SEQ ID NO: 1985761 - RNA, 13 nt, Human
aauaccuuagaag

SEQ ID NO: 1985762 - RNA, 21 nt, Human
aauaccugucccccugacaac

SEQ ID NO: 1985763 - RNA, 21 nt, Human
aauacuguuauucuuugcacu

SEQ ID NO: 1985764 - RNA, 22 nt, Human
aauacuguuauucuuugcacuu

SEQ ID NO: 1985765 - RNA, 17 nt, Human
aauacuguuauucuuug

SEQ ID NO: 1985766 - RNA, 18 nt, Human
aauacuguuauucuuugc

SEQ ID NO: 1985767 - RNA, 19 nt, Human
aauacuguuauucuuugca

SEQ ID NO: 1985768 - RNA, 14 nt, Human
aauacuuaaauguu

SEQ ID NO: 1985769 - RNA, 15 nt, Human
aauacuuaaauguua

SEQ ID NO: 1985770 - RNA, 18 nt, Human
aauacuuaaauguuaugu

SEQ ID NO: 1985771 - RNA, 20 nt, Human
aauacuuaaauguuauguau

SEQ ID NO: 1985772 - RNA, 14 nt, Human
aauacuucuuuuua

SEQ ID NO: 1985773 - RNA, 14 nt, Human
aauacuugaaccau

SEQ ID NO: 1985774 - RNA, 17 nt, Human
aauacuugaaccauaaa

SEQ ID NO: 1985775 - RNA, 19 nt, Human
aauacuugaaccauaaaau

SEQ ID NO: 1985776 - RNA, 22 nt, Human
aauacuugaaccauaaaauguc

SEQ ID NO: 1985777 - RNA, 19 nt, Human
aauagaacaacauauacaa

SEQ ID NO: 1985778 - RNA, 22 nt, Human
aauagaagcuaagguuuagaua

SEQ ID NO: 1985779 - RNA, 20 nt, Human
aauaguuuauuuuaaaacaa

SEQ ID NO: 1985780 - RNA, 22 nt, Human
aauaguuuauuuuaaaacaaua

SEQ ID NO: 1985781 - RNA, 13 nt, Human
aauauaaaaauaa

SEQ ID NO: 1985782 - RNA, 18 nt, Human
aaguugauggugaugaaa

SEQ ID NO: 1985783 - RNA, 15 nt, Human
aaguugaucucccca

SEQ ID NO: 1985784 - RNA, 17 nt, Human
aaguugaucuccccagc

SEQ ID NO: 1985785 - RNA, 12 nt, Human
aauaaaauuuuu

SEQ ID NO: 1985786 - RNA, 10 nt, Human
aauaaaccau

SEQ ID NO: 1985787 - RNA, 12 nt, Human
aauaauaaauag

SEQ ID NO: 1985788 - RNA, 13 nt, Human
aauaauaaauagu

SEQ ID NO: 1985789 - RNA, 14 nt, Human
aauaauaaauaguu

SEQ ID NO: 1985790 - RNA, 16 nt, Human
aauaauaaauaguucu

SEQ ID NO: 1985791 - RNA, 21 nt, Human
aauaaagccuugugaucacuu

SEQ ID NO: 1985792 - RNA, 15 nt, Human
aauaaacgucuuaaa

SEQ ID NO: 1985793 - RNA, 19 nt, Human
aauaaagcuguguggcagu

SEQ ID NO: 1985794 - RNA, 11 nt, Human
aauaaagcugu

SEQ ID NO: 1985795 - RNA, 15 nt, Human
aaguggggacagagc

SEQ ID NO: 1985796 - RNA, 14 nt, Human
aaguucuuugauuc

SEQ ID NO: 1985797 - RNA, 15 nt, Human
aaguucuuugauucu

SEQ ID NO: 1985798 - RNA, 15 nt, Human
aaguucugccucuga

SEQ ID NO: 1985799 - RNA, 16 nt, Human
aaguucugccucugau

SEQ ID NO: 1985800 - RNA, 17 nt, Human
aaguucugccucugaug

SEQ ID NO: 1985801 - RNA, 22 nt, Human
aaguucugccucugauguauuu

SEQ ID NO: 1985802 - RNA, 14 nt, Human
aagugcugcauuua

SEQ ID NO: 1985803 - RNA, 13 nt, Human
aagugcugcauuu

SEQ ID NO: 1985804 - RNA, 13 nt, Human
aagugcuauuacg

SEQ ID NO: 1985805 - RNA, 18 nt, Human
aagugcuauuacgaaguu

SEQ ID NO: 1985806 - RNA, 14 nt, Human
aaguaguucuguau

SEQ ID NO: 1985807 - RNA, 16 nt, Human
aaguaguucuguauuu

SEQ ID NO: 1985808 - RNA, 19 nt, Human
aaguaguucuguauuugaa

SEQ ID NO: 1985809 - RNA, 20 nt, Human
aaguaguucuguauuugaaa

SEQ ID NO: 1985810 - RNA, 21 nt, Human
aaguaguucuguauuugaaag

SEQ ID NO: 1985811 - RNA, 22 nt, Human
aaguaguucuguauuugaaagu

SEQ ID NO: 1985812 - RNA, 23 nt, Human
aaguaguucuguauuugaaagug

SEQ ID NO: 1985813 - RNA, 17 nt, Human
aauaaagcgaaaaacuc

SEQ ID NO: 1985814 - RNA, 16 nt, Human
aauaauaccuuagaag

SEQ ID NO: 1985815 - RNA, 18 nt, Human
aauaauagauugugaaua

SEQ ID NO: 1985816 - RNA, 15 nt, Human
aauaauaccuuagaa

SEQ ID NO: 1985817 - RNA, 20 nt, Human
aauaauauguuuccuucccu

SEQ ID NO: 1985818 - RNA, 17 nt, Human
aaauggaauacucuuau

SEQ ID NO: 1985819 - RNA, 21 nt, Human
aaaugcugauuuaaacuucuu

SEQ ID NO: 1985820 - RNA, 14 nt, Human
aaauggacguguua

SEQ ID NO: 1985821 - RNA, 16 nt, Human
aaaugcugaaaauugc

SEQ ID NO: 1985822 - RNA, 22 nt, Human
aaaugcuaugucauuucauguc

SEQ ID NO: 1985823 - RNA, 20 nt, Human
aaaugcuaugucauuucaug

SEQ ID NO: 1985824 - RNA, 21 nt, Human
aaaugcuaugucauuucaugu

SEQ ID NO: 1985825 - RNA, 12 nt, Human
aaaugcugaaca

SEQ ID NO: 1985826 - RNA, 15 nt, Human
aaaugcugaacauug

SEQ ID NO: 1985827 - RNA, 17 nt, Human
aaaugcugaaaauugcc

SEQ ID NO: 1985828 - RNA, 12 nt, Human
aaaugcugaccc

SEQ ID NO: 1985829 - RNA, 16 nt, Human
aaaugcugacccaugg

SEQ ID NO: 1985830 - RNA, 14 nt, Human
aaaugcugauuuaa

SEQ ID NO: 1985831 - RNA, 17 nt, Human
aaauggacguguuauga

SEQ ID NO: 1985832 - RNA, 15 nt, Human
aaauggacguguuau

SEQ ID NO: 1985833 - RNA, 15 nt, Human
aaaucugaagauugu

SEQ ID NO: 1985834 - RNA, 16 nt, Human
aaaucugaagauuguu

SEQ ID NO: 1985835 - RNA, 17 nt, Human
aaaucugaagauuguuu

SEQ ID NO: 1985836 - RNA, 18 nt, Human
aaaucugaagauuguuua

SEQ ID NO: 1985837 - RNA, 19 nt, Human
aaaucugaagauuguuuau

SEQ ID NO: 1985838 - RNA, 20 nt, Human
aaaucugaagauuguuuauc

SEQ ID NO: 1985839 - RNA, 21 nt, Human
aaaucugaagauuguuuaucu

SEQ ID NO: 1985840 - RNA, 22 nt, Human
aaaucucuacaaauuuuucugu

SEQ ID NO: 1985841 - RNA, 13 nt, Human
aaaucucuucugu

SEQ ID NO: 1985842 - RNA, 12 nt, Human
aaaucucuucug

SEQ ID NO: 1985843 - RNA, 22 nt, Human
aaaucuccaaaauaaaacuuuu

SEQ ID NO: 1985844 - RNA, 15 nt, Human
aaaugcuagaaaaau

SEQ ID NO: 1985845 - RNA, 16 nt, Human
aaaugcuaugucauuu

SEQ ID NO: 1985846 - RNA, 17 nt, Human
aaaugcuaugucauuuc

SEQ ID NO: 1985847 - RNA, 19 nt, Human
aaaugcuaugucauuucau

SEQ ID NO: 1985848 - RNA, 16 nt, Human
aaaucuuaagaaauaa

SEQ ID NO: 1985849 - RNA, 13 nt, Human
aaaucuuaagaaa

SEQ ID NO: 1985850 - RNA, 14 nt, Human
aaaucuuaagaaau

SEQ ID NO: 1985851 - RNA, 12 nt, Human
aaaucuuaagaa

SEQ ID NO: 1985852 - RNA, 23 nt, Human
aaaucugaagauuguuuaucuag

SEQ ID NO: 1985853 - RNA, 15 nt, Human
aaaucugcaaagcau

SEQ ID NO: 1985854 - RNA, 17 nt, Human
aaaucugcaaagcaugu

SEQ ID NO: 1985855 - RNA, 23 nt, Human
aaaucugcaaagcauguuuugca

SEQ ID NO: 1985856 - RNA, 18 nt, Human
aaaucugcuuuuuaaaga

SEQ ID NO: 1985857 - RNA, 20 nt, Human
aaauguucaucaaugaauga

SEQ ID NO: 1985858 - RNA, 15 nt, Human
aaauguucuuccagu

SEQ ID NO: 1985859 - RNA, 13 nt, Human
aaauguucuucca

SEQ ID NO: 1985860 - RNA, 21 nt, Human
aaauguuuuuuuuuaaagacu

SEQ ID NO: 1985861 - RNA, 18 nt, Human
aaauguuuuuuuuuaaag

SEQ ID NO: 1985862 - RNA, 16 nt, Human
aaauugguaccuugca

SEQ ID NO: 1985863 - RNA, 18 nt, Human
aaauugguaccuugcaca

SEQ ID NO: 1985864 - RNA, 20 nt, Human
aaauugguaccuugcacaca

SEQ ID NO: 1985865 - RNA, 15 nt, Human
aaauugggguuuauu

SEQ ID NO: 1985866 - RNA, 14 nt, Human
aacaaacagaugcu

SEQ ID NO: 1985867 - RNA, 17 nt, Human
aacaaacagaugcucug

SEQ ID NO: 1985868 - RNA, 18 nt, Human
aaauugaugggauuuggu

SEQ ID NO: 1985869 - RNA, 13 nt, Human
aaauuaacuuuua

SEQ ID NO: 1985870 - RNA, 14 nt, Human
aaauuaacuuuuau

SEQ ID NO: 1985871 - RNA, 22 nt, Human
aaauugacacuuaaaaaugguu

SEQ ID NO: 1985872 - RNA, 16 nt, Human
aaauugagcugcuuuu

SEQ ID NO: 1985873 - RNA, 23 nt, Human
aaauugagcugcuuuuuuugaaa

SEQ ID NO: 1985874 - RNA, 12 nt, Human
aaauuaacuuuu

SEQ ID NO: 1985875 - RNA, 22 nt, Human
aaauguuuuuuuuuaaagacuu

SEQ ID NO: 1985876 - RNA, 13 nt, Human
aacaaaucuuccu

SEQ ID NO: 1985877 - RNA, 14 nt, Human
aacaaaucuuccug

SEQ ID NO: 1985878 - RNA, 21 nt, Human
aacacauacaggaagguagaa

SEQ ID NO: 1985879 - RNA, 16 nt, Human
aacacaggccacccug

SEQ ID NO: 1985880 - RNA, 18 nt, Human
aacaaauccugcauuuag

SEQ ID NO: 1985881 - RNA, 22 nt, Human
aacaaaggccuaauucuaugcc

SEQ ID NO: 1985882 - RNA, 16 nt, Human
aacaaacucucugaac

SEQ ID NO: 1985883 - RNA, 14 nt, Human
aacaaacugcacau

SEQ ID NO: 1985884 - RNA, 22 nt, Human
aacaaaccuguuucugcagcca

SEQ ID NO: 1985885 - RNA, 19 nt, Human
aacaccucugcacaagcug

SEQ ID NO: 1985886 - RNA, 17 nt, Human
aacacuaacaugauuug

SEQ ID NO: 1985887 - RNA, 18 nt, Human
aacacauaauuaacacuu

SEQ ID NO: 1985888 - RNA, 17 nt, Human
aacacauaauuaacacu

SEQ ID NO: 1985889 - RNA, 13 nt, Human
aaccgggauggga

SEQ ID NO: 1985890 - RNA, 22 nt, Human
aacaugcuacacacugcauguu

SEQ ID NO: 1985891 - RNA, 21 nt, Human
aaccaggcuuucuagaaagaa

SEQ ID NO: 1985892 - RNA, 15 nt, Human
aacauggaaguacua

SEQ ID NO: 1985893 - RNA, 14 nt, Human
aaccaggcuuucua

SEQ ID NO: 1985894 - RNA, 17 nt, Human
aaccaggcuuucuagaa

SEQ ID NO: 1985895 - RNA, 19 nt, Human
aaccaguguuguggauuua

SEQ ID NO: 1985896 - RNA, 17 nt, Human
aaccaguguuguggauu

SEQ ID NO: 1985897 - RNA, 13 nt, Human
aacccuucagugc

SEQ ID NO: 1985898 - RNA, 12 nt, Human
aaccauaguuac

SEQ ID NO: 1985899 - RNA, 15 nt, Human
aaccauaguuacugu

SEQ ID NO: 1985900 - RNA, 18 nt, Human
aaccauaaaauguccagu

SEQ ID NO: 1985901 - RNA, 20 nt, Human
aacagcggcuggacuuggag

SEQ ID NO: 1985902 - RNA, 16 nt, Human
aacagcuaaugggaca

SEQ ID NO: 1985903 - RNA, 13 nt, Human
aacagauuuggaa

SEQ ID NO: 1985904 - RNA, 14 nt, Human
aacagauuuggaaa

SEQ ID NO: 1985905 - RNA, 15 nt, Human
aacagauuuggaaag

SEQ ID NO: 1985906 - RNA, 15 nt, Human
aacaucccuccuggg

SEQ ID NO: 1985907 - RNA, 15 nt, Human
aacauccuacaagac

SEQ ID NO: 1985908 - RNA, 22 nt, Human
aacauccuacaagacacaguga

SEQ ID NO: 1985909 - RNA, 16 nt, Human
aacagcuaugagagga

SEQ ID NO: 1985910 - RNA, 21 nt, Human
aacugagcuuggaagcuucug

SEQ ID NO: 1985911 - RNA, 13 nt, Human
aacugagcuugga

SEQ ID NO: 1985912 - RNA, 17 nt, Human
aacugagcuuggaagcu

SEQ ID NO: 1985913 - RNA, 14 nt, Human
aacuguuaccauug

SEQ ID NO: 1985914 - RNA, 17 nt, Human
aacuguuaccauuggaa

SEQ ID NO: 1985915 - RNA, 18 nt, Human
aacuguuaccauuggaaa

SEQ ID NO: 1985916 - RNA, 19 nt, Human
aacuguuaccauuggaaau

SEQ ID NO: 1985917 - RNA, 23 nt, Human
aacuguuaccauuggaaauuuca

SEQ ID NO: 1985918 - RNA, 14 nt, Human
aacuguuagaaugu

SEQ ID NO: 1985919 - RNA, 16 nt, Human
aacuguuagaauguaa

SEQ ID NO: 1985920 - RNA, 18 nt, Human
aacuguucccaccugcug

SEQ ID NO: 1985921 - RNA, 15 nt, Human
aacuguucccaccug

SEQ ID NO: 1985922 - RNA, 13 nt, Human
aacuguucccacc

SEQ ID NO: 1985923 - RNA, 15 nt, Human
aacucauauuuucau

SEQ ID NO: 1985924 - RNA, 16 nt, Human
aacucauauuuucaug

SEQ ID NO: 1985925 - RNA, 18 nt, Human
aacucauauuuucaugcu

SEQ ID NO: 1985926 - RNA, 13 nt, Human
aacugaaguucug

SEQ ID NO: 1985927 - RNA, 20 nt, Human
aacugaauagcaaguggcau

SEQ ID NO: 1985928 - RNA, 18 nt, Human
aacucaccccagccccaa

SEQ ID NO: 1985929 - RNA, 17 nt, Human
aacucaccccagcccca

SEQ ID NO: 1985930 - RNA, 16 nt, Human
aacucaccccagcccc

SEQ ID NO: 1985931 - RNA, 17 nt, Human
aacucaaccaaauggua

SEQ ID NO: 1985932 - RNA, 19 nt, Human
aacucaaccaaaugguaca

SEQ ID NO: 1985933 - RNA, 23 nt, Human
aacucaaccaaaugguacaaaac

SEQ ID NO: 1985934 - RNA, 17 nt, Human
aacucaaacucuuaaaa

SEQ ID NO: 1985935 - RNA, 15 nt, Human
aacguauaaaagccu

SEQ ID NO: 1985936 - RNA, 21 nt, Human
aacguagucggcacagccugg

SEQ ID NO: 1985937 - RNA, 14 nt, Human
aacgaaaaucauug

SEQ ID NO: 1985938 - RNA, 17 nt, Human
aacgacaaaucugucug

SEQ ID NO: 1985939 - RNA, 18 nt, Human
aacgacaaaucugucugc

SEQ ID NO: 1985940 - RNA, 22 nt, Human
aacgaucacaaaugacuuuauu

SEQ ID NO: 1985941 - RNA, 21 nt, Human
aacgagccuuuucacccuucu

SEQ ID NO: 1985942 - RNA, 17 nt, Human
aacgaucacaaaugacu

SEQ ID NO: 1985943 - RNA, 21 nt, Human
aaagcauuuuguaauaauaaa

SEQ ID NO: 1985944 - RNA, 15 nt, Human
aaagccaaagcuagg

SEQ ID NO: 1985945 - RNA, 14 nt, Human
aaagcauuuuguaa

SEQ ID NO: 1985946 - RNA, 15 nt, Human
aaagcauuuuguaau

SEQ ID NO: 1985947 - RNA, 13 nt, Human
aaagcauuuugua

SEQ ID NO: 1985948 - RNA, 21 nt, Human
aaaggcuccaggagcagccac

SEQ ID NO: 1985949 - RNA, 22 nt, Human
aaaggcuccaggagcagccaca

SEQ ID NO: 1985950 - RNA, 13 nt, Human
aaaggcuguauuc

SEQ ID NO: 1985951 - RNA, 17 nt, Human
aaaggcuaccuuuguau

SEQ ID NO: 1985952 - RNA, 14 nt, Human
aaaggcuaccuuug

SEQ ID NO: 1985953 - RNA, 14 nt, Human
aaaggcuccaggag

SEQ ID NO: 1985954 - RNA, 12 nt, Human
aaagcccaggag

SEQ ID NO: 1985955 - RNA, 13 nt, Human
aaagcccaggagc

SEQ ID NO: 1985956 - RNA, 14 nt, Human
aaagcccaggagcc

SEQ ID NO: 1985957 - RNA, 15 nt, Human
aaagcccaggagccc

SEQ ID NO: 1985958 - RNA, 22 nt, Human
aaagcccaaccucuuccuccug

SEQ ID NO: 1985959 - RNA, 15 nt, Human
aaagcccaaccucuu

SEQ ID NO: 1985960 - RNA, 20 nt, Human
aaagcccaaccucuuccucc

SEQ ID NO: 1985961 - RNA, 15 nt, Human
aaagccaagaggcug

SEQ ID NO: 1985962 - RNA, 19 nt, Human
aaaggcagaagcaacccaa

SEQ ID NO: 1985963 - RNA, 16 nt, Human
aaagccccauuaacug

SEQ ID NO: 1985964 - RNA, 12 nt, Human
aaaggcagcugu

SEQ ID NO: 1985965 - RNA, 14 nt, Human
aaaggcagcuguug

SEQ ID NO: 1985966 - RNA, 17 nt, Human
aaaggcagcuguugucu

SEQ ID NO: 1985967 - RNA, 22 nt, Human
aaaggcagcuguugucucuucu

SEQ ID NO: 1985968 - RNA, 14 nt, Human
aaagugccuuugca

SEQ ID NO: 1985969 - RNA, 12 nt, Human
aaagugccuuug

SEQ ID NO: 1985970 - RNA, 15 nt, Human
aaauaaacgucuuaa

SEQ ID NO: 1985971 - RNA, 16 nt, Human
aaauaaacgucuuaaa

SEQ ID NO: 1985972 - RNA, 14 nt, Human
aaaggcuguauuca

SEQ ID NO: 1985973 - RNA, 18 nt, Human
aaaggcuguauucagcaa

SEQ ID NO: 1985974 - RNA, 20 nt, Human
aaaggcuguauucagcaagg

SEQ ID NO: 1985975 - RNA, 16 nt, Human
aaagucagaacaaauu

SEQ ID NO: 1985976 - RNA, 13 nt, Human
aaagucacaguua

SEQ ID NO: 1985977 - RNA, 15 nt, Human
aaagucaugauguuu

SEQ ID NO: 1985978 - RNA, 16 nt, Human
aaagucaugauguuuu

SEQ ID NO: 1985979 - RNA, 17 nt, Human
aaagucaugauguuuuu

SEQ ID NO: 1985980 - RNA, 18 nt, Human
aaagucaugauguuuuua

SEQ ID NO: 1985981 - RNA, 21 nt, Human
aaagucaugauguuuuuaaaa

SEQ ID NO: 1985982 - RNA, 22 nt, Human
aaagucaugauguuuuuaaaau

SEQ ID NO: 1985983 - RNA, 15 nt, Human
aaagugaugaacugg

SEQ ID NO: 1985984 - RNA, 11 nt, Human
aaauaaauuau

SEQ ID NO: 1985985 - RNA, 13 nt, Human
aaagaggugugca

SEQ ID NO: 1985986 - RNA, 18 nt, Human
aaagaggucgcuugggaa

SEQ ID NO: 1985987 - RNA, 14 nt, Human
aaagauaaauauua

SEQ ID NO: 1985988 - RNA, 15 nt, Human
aaagauaaauauuau

SEQ ID NO: 1985989 - RNA, 13 nt, Human
aaagauaaauauu

SEQ ID NO: 1985990 - RNA, 16 nt, Human
aaagauaaauauuaua

SEQ ID NO: 1985991 - RNA, 15 nt, Human
aaagauacaguuacu

SEQ ID NO: 1985992 - RNA, 18 nt, Human
aaacccagcucuggucca

SEQ ID NO: 1985993 - RNA, 22 nt, Human
aaacccagcugcaccccuuccu

SEQ ID NO: 1985994 - RNA, 23 nt, Human
aaacccagcugcaccccuuccug

SEQ ID NO: 1985995 - RNA, 17 nt, Human
aaaccccaucucuacaa

SEQ ID NO: 1985996 - RNA, 21 nt, Human
aaacccugucucuacuaaaaa

SEQ ID NO: 1985997 - RNA, 14 nt, Human
aaacccuucagugc

SEQ ID NO: 1985998 - RNA, 13 nt, Human
aaaccguguuugu

SEQ ID NO: 1985999 - RNA, 20 nt, Human
aaaccguguuugucucuucu

SEQ ID NO: 1986000 - RNA, 17 nt, Human
aaacccugucaaacauu

SEQ ID NO: 1986001 - RNA, 18 nt, Human
aaacccugucaaacauua

SEQ ID NO: 1986002 - RNA, 17 nt, Human
aaacucuugaccucagg

SEQ ID NO: 1986003 - RNA, 16 nt, Human
aaaccuaguacugccc

SEQ ID NO: 1986004 - RNA, 12 nt, Human
aaacucuuuaac

SEQ ID NO: 1986005 - RNA, 20 nt, Human
aaacucuuuaacuuguaaua

SEQ ID NO: 1986006 - RNA, 21 nt, Human
aaaccguguuugucucuucug

SEQ ID NO: 1986007 - RNA, 19 nt, Human
aaacugauuuuuuuuuccu

SEQ ID NO: 1986008 - RNA, 13 nt, Human
aaacugauuuuuu

SEQ ID NO: 1986009 - RNA, 23 nt, Human
aaacucuuuaacuuguaauaaac

SEQ ID NO: 1986010 - RNA, 20 nt, Human
aaacugauuuuuuuuuccuu

SEQ ID NO: 1986011 - RNA, 18 nt, Human
aaagaacuaucuucaucu

SEQ ID NO: 1986012 - RNA, 20 nt, Human
aaagaacuaucuucaucuga

SEQ ID NO: 1986013 - RNA, 22 nt, Human
aaagaacuaucuucaucugaga

SEQ ID NO: 1986014 - RNA, 19 nt, Human
aaagaagaaauaguucugu

SEQ ID NO: 1986015 - RNA, 20 nt, Human
aaagaacgcugauuuaaaga

SEQ ID NO: 1986016 - RNA, 16 nt, Human
aaagaacuaucuucau

SEQ ID NO: 1986017 - RNA, 15 nt, Human
aaagaacgcugauuu

SEQ ID NO: 1986018 - RNA, 18 nt, Human
aaagaacgcugauuuaaa

SEQ ID NO: 1986019 - RNA, 18 nt, Human
aaagaaccuaacauuuau

SEQ ID NO: 1986020 - RNA, 12 nt, Human
aaagaaacaugg

SEQ ID NO: 1986021 - RNA, 15 nt, Human
aaaauaaaaaacacu

SEQ ID NO: 1986022 - RNA, 21 nt, Human
aaaauaaaaaaaagaaaaaag

SEQ ID NO: 1986023 - RNA, 15 nt, Human
aaaauaaaaaaaaga

SEQ ID NO: 1986024 - RNA, 16 nt, Human
aaaauaaaaaaaagaa

SEQ ID NO: 1986025 - RNA, 17 nt, Human
aaaauaaaaaaaagaaa

SEQ ID NO: 1986026 - RNA, 18 nt, Human
aaaauaaaaaaaagaaaa

SEQ ID NO: 1986027 - RNA, 14 nt, Human
aaaaucaaauaaua

SEQ ID NO: 1986028 - RNA, 17 nt, Human
aaaauauuuuuuuuucu

SEQ ID NO: 1986029 - RNA, 15 nt, Human
aaaaucaaguauuau

SEQ ID NO: 1986030 - RNA, 16 nt, Human
aaaaucaaguauuaua

SEQ ID NO: 1986031 - RNA, 21 nt, Human
aaaauccacuuuaucuugaau

SEQ ID NO: 1986032 - RNA, 14 nt, Human
aaaauccaaauauu

SEQ ID NO: 1986033 - RNA, 16 nt, Human
aaaauccaaauauugu

SEQ ID NO: 1986034 - RNA, 19 nt, Human
aaaauccaaauauuguuaa

SEQ ID NO: 1986035 - RNA, 18 nt, Human
aaaaucaauaugcagaau

SEQ ID NO: 1986036 - RNA, 12 nt, Human
aaaauuaagaaa

SEQ ID NO: 1986037 - RNA, 22 nt, Human
aaaauuaacaugaauauuuagu

SEQ ID NO: 1986038 - RNA, 22 nt, Human
aaaauccaaauauuguuaaggg

SEQ ID NO: 1986039 - RNA, 12 nt, Human
aaaauccagaaa

SEQ ID NO: 1986040 - RNA, 21 nt, Human
aaaauccagaaacuuguucuu

SEQ ID NO: 1986041 - RNA, 22 nt, Human
aaaauccagaaacuuguucuuc

SEQ ID NO: 1986042 - RNA, 23 nt, Human
aaaauuaaucugggccagaauuu

SEQ ID NO: 1986043 - RNA, 17 nt, Human
aaaauuaagguguuuga

SEQ ID NO: 1986044 - RNA, 18 nt, Human
aaaauuaagguguuugaa

SEQ ID NO: 1986045 - RNA, 20 nt, Human
aaaauuaagaaaggauaaag

SEQ ID NO: 1986046 - RNA, 13 nt, Human
aaaauuaagaaag

SEQ ID NO: 1986047 - RNA, 15 nt, Human
aaaauuagccaagug

SEQ ID NO: 1986048 - RNA, 20 nt, Human
aaaauuaagguguuugaaaa

SEQ ID NO: 1986049 - RNA, 19 nt, Human
aaaauuaggauuucaugau

SEQ ID NO: 1986050 - RNA, 23 nt, Human
aaaauuauguuugccacuuugca

SEQ ID NO: 1986051 - RNA, 19 nt, Human
aaaauuauugauugcuuuu

SEQ ID NO: 1986052 - RNA, 17 nt, Human
aaaauuagccuaagaua

SEQ ID NO: 1986053 - RNA, 17 nt, Human
aaaauuccagaaugaag

SEQ ID NO: 1986054 - RNA, 17 nt, Human
aaacagcuaaugggaca

SEQ ID NO: 1986055 - RNA, 13 nt, Human
aggaccugcaaac

SEQ ID NO: 1986056 - RNA, 12 nt, Human
aggaccugcccg

SEQ ID NO: 1986057 - RNA, 20 nt, Human
aggagacuguggagacugcu

SEQ ID NO: 1986058 - RNA, 21 nt, Human
aggagacuguggagacugcuc

SEQ ID NO: 1986059 - RNA, 15 nt, Human
aggagaggagagggg

SEQ ID NO: 1986060 - RNA, 21 nt, Human
aggacccggaggggccuggca

SEQ ID NO: 1986061 - RNA, 22 nt, Human
aggacccggaggggccuggcag

SEQ ID NO: 1986062 - RNA, 13 nt, Human
aggacccugccag

SEQ ID NO: 1986063 - RNA, 14 nt, Human
aggacccugccagg

SEQ ID NO: 1986064 - RNA, 15 nt, Human
aggacccugccaggc

SEQ ID NO: 1986065 - RNA, 16 nt, Human
aggacccugccaggca

SEQ ID NO: 1986066 - RNA, 12 nt, Human
aggaccagggcu

SEQ ID NO: 1986067 - RNA, 22 nt, Human
aggaccaggguuggcaccuucc

SEQ ID NO: 1986068 - RNA, 18 nt, Human
aggacccggaggggccug

SEQ ID NO: 1986069 - RNA, 20 nt, Human
aggacccggaggggccuggc

SEQ ID NO: 1986070 - RNA, 22 nt, Human
aggaauauuauauuuggaugca

SEQ ID NO: 1986071 - RNA, 19 nt, Human
aggaauauagauuaaauca

SEQ ID NO: 1986072 - RNA, 18 nt, Human
aggaauaugggagaaaua

SEQ ID NO: 1986073 - RNA, 14 nt, Human
aggaauauuauauu

SEQ ID NO: 1986074 - RNA, 17 nt, Human
aggaauauuauauuugg

SEQ ID NO: 1986075 - RNA, 19 nt, Human
aggaauauuauauuuggau

SEQ ID NO: 1986076 - RNA, 20 nt, Human
aggaauauuauauuuggaug

SEQ ID NO: 1986077 - RNA, 19 nt, Human
aggaacaaggcaaggcugu

SEQ ID NO: 1986078 - RNA, 17 nt, Human
aggaacaaggcaaggcu

SEQ ID NO: 1986079 - RNA, 16 nt, Human
aggaacaaggcaaggc

SEQ ID NO: 1986080 - RNA, 13 nt, Human
aggaacaaggcaa

SEQ ID NO: 1986081 - RNA, 12 nt, Human
aggaacaaggca

SEQ ID NO: 1986082 - RNA, 14 nt, Human
aggaaauuugcagc

SEQ ID NO: 1986083 - RNA, 13 nt, Human
aggaacaaaucuu

SEQ ID NO: 1986084 - RNA, 15 nt, Human
agcuuuuaugugaaa

SEQ ID NO: 1986085 - RNA, 16 nt, Human
agcuuuuacucccuga

SEQ ID NO: 1986086 - RNA, 13 nt, Human
aggaaccaaagcg

SEQ ID NO: 1986087 - RNA, 15 nt, Human
aggaaccaaagcgaa

SEQ ID NO: 1986088 - RNA, 16 nt, Human
aggaaccauaaucaau

SEQ ID NO: 1986089 - RNA, 23 nt, Human
aggaacaaggcaaggcugucaau

SEQ ID NO: 1986090 - RNA, 14 nt, Human
aggaacaaaucuuc

SEQ ID NO: 1986091 - RNA, 15 nt, Human
aggaacaaaucuucc

SEQ ID NO: 1986092 - RNA, 16 nt, Human
aggaacaaaucuuccu

SEQ ID NO: 1986093 - RNA, 17 nt, Human
aggaacaaaucuuccug

SEQ ID NO: 1986094 - RNA, 20 nt, Human
aggaacaaggcaaggcuguc

SEQ ID NO: 1986095 - RNA, 22 nt, Human
aggaacugcugggcuuggcagc

SEQ ID NO: 1986096 - RNA, 21 nt, Human
aggaacuuaaauaaugugaaa

SEQ ID NO: 1986097 - RNA, 23 nt, Human
aggaaccauaguugacaguucca

SEQ ID NO: 1986098 - RNA, 18 nt, Human
aggaauaccugucccccu

SEQ ID NO: 1986099 - RNA, 15 nt, Human
aggaauaccuguccc

SEQ ID NO: 1986100 - RNA, 22 nt, Human
aggaauaccugucccccugaca

SEQ ID NO: 1986101 - RNA, 20 nt, Human
aggaauaaauugcuccuuga

SEQ ID NO: 1986102 - RNA, 19 nt, Human
aggaauaaauugcuccuug

SEQ ID NO: 1986103 - RNA, 23 nt, Human
aggaagugauuuuugagcccuug

SEQ ID NO: 1986104 - RNA, 15 nt, Human
aggaaggcugagagg

SEQ ID NO: 1986105 - RNA, 22 nt, Human
aggaaggcugagaggagagaga

SEQ ID NO: 1986106 - RNA, 15 nt, Human
aggaaggcuuugaaa

SEQ ID NO: 1986107 - RNA, 20 nt, Human
aggaaggcugucucagauaa

SEQ ID NO: 1986108 - RNA, 15 nt, Human
aggaaggcugucuca

SEQ ID NO: 1986109 - RNA, 16 nt, Human
aggaaguagcacaggc

SEQ ID NO: 1986110 - RNA, 18 nt, Human
aggaaguagcacaggcug

SEQ ID NO: 1986111 - RNA, 19 nt, Human
aggaaguagcacaggcuga

SEQ ID NO: 1986112 - RNA, 23 nt, Human
aggaaguccuuaucuagcugcau

SEQ ID NO: 1986113 - RNA, 15 nt, Human
aggaaguagcacagg

SEQ ID NO: 1986114 - RNA, 14 nt, Human
aggaagguaaaaag

SEQ ID NO: 1986115 - RNA, 23 nt, Human
agcuuuguuuguugucagcugaa

SEQ ID NO: 1986116 - RNA, 16 nt, Human
agcuuuuaaacccuau

SEQ ID NO: 1986117 - RNA, 19 nt, Human
agcuucauuuccugugucu

SEQ ID NO: 1986118 - RNA, 17 nt, Human
agcuuccaauuuuccuu

SEQ ID NO: 1986119 - RNA, 21 nt, Human
agcuucaccccaaucccagcu

SEQ ID NO: 1986120 - RNA, 18 nt, Human
agcuucauuuccuguguc

SEQ ID NO: 1986121 - RNA, 20 nt, Human
agcuucaccccaaucccagc

SEQ ID NO: 1986122 - RNA, 18 nt, Human
agcuucaccccaauccca

SEQ ID NO: 1986123 - RNA, 18 nt, Human
agcuucacuguaaaauaa

SEQ ID NO: 1986124 - RNA, 20 nt, Human
agcuuauuuuggagagauag

SEQ ID NO: 1986125 - RNA, 14 nt, Human
agcuuauuuuuaca

SEQ ID NO: 1986126 - RNA, 22 nt, Human
agcuuauuuuuacaguuauaga

SEQ ID NO: 1986127 - RNA, 15 nt, Human
agcuguaacaguucu

SEQ ID NO: 1986128 - RNA, 16 nt, Human
agcuguaacaguucuu

SEQ ID NO: 1986129 - RNA, 17 nt, Human
agcuguaacaguucuuu

SEQ ID NO: 1986130 - RNA, 22 nt, Human
agcugguuuuuagcggagacgg

SEQ ID NO: 1986131 - RNA, 18 nt, Human
agcuggucccacucaguc

SEQ ID NO: 1986132 - RNA, 19 nt, Human
agcuggucccacucagucc

SEQ ID NO: 1986133 - RNA, 13 nt, Human
agcugcugacagu

SEQ ID NO: 1986134 - RNA, 14 nt, Human
agcugcugacagug

SEQ ID NO: 1986135 - RNA, 16 nt, Human
agcuggucccacucag

SEQ ID NO: 1986136 - RNA, 17 nt, Human
agcuggucccacucagu

SEQ ID NO: 1986137 - RNA, 15 nt, Human
agcugcgggcugggu

SEQ ID NO: 1986138 - RNA, 12 nt, Human
agcugcugacag

SEQ ID NO: 1986139 - RNA, 19 nt, Human
agcugcgguccacccagga

SEQ ID NO: 1986140 - RNA, 20 nt, Human
agcugcgguccacccaggag

SEQ ID NO: 1986141 - RNA, 13 nt, Human
agcugcgguccac

SEQ ID NO: 1986142 - RNA, 16 nt, Human
agcugcgguccaccca

SEQ ID NO: 1986143 - RNA, 17 nt, Human
agcugcgguccacccag

SEQ ID NO: 1986144 - RNA, 18 nt, Human
agcugcgguccacccagg

SEQ ID NO: 1986145 - RNA, 15 nt, Human
agcugagccuucuga

SEQ ID NO: 1986146 - RNA, 15 nt, Human
agcugaaccugggua

SEQ ID NO: 1986147 - RNA, 13 nt, Human
agcugaagagcug

SEQ ID NO: 1986148 - RNA, 15 nt, Human
agcugaagagcuggg

SEQ ID NO: 1986149 - RNA, 17 nt, Human
agcugaacacauuucuu

SEQ ID NO: 1986150 - RNA, 19 nt, Human
agcugaacacauuucuuuu

SEQ ID NO: 1986151 - RNA, 22 nt, Human
agcugaacagaugaccccugcc

SEQ ID NO: 1986152 - RNA, 14 nt, Human
agcugaacacauuu

SEQ ID NO: 1986153 - RNA, 16 nt, Human
agcugaacacauuucu

SEQ ID NO: 1986154 - RNA, 14 nt, Human
agcucagagagggu

SEQ ID NO: 1986155 - RNA, 18 nt, Human
agcucagagaggguggga

SEQ ID NO: 1986156 - RNA, 12 nt, Human
agcucagagagg

SEQ ID NO: 1986157 - RNA, 15 nt, Human
agcucagaaccacag

SEQ ID NO: 1986158 - RNA, 19 nt, Human
agcucaccucucccuugga

SEQ ID NO: 1986159 - RNA, 18 nt, Human
agcucaccucucccuugg

SEQ ID NO: 1986160 - RNA, 15 nt, Human
agcucaccucucccu

SEQ ID NO: 1986161 - RNA, 12 nt, Human
agcucaccucuc

SEQ ID NO: 1986162 - RNA, 19 nt, Human
agcucaccagccccagugc

SEQ ID NO: 1986163 - RNA, 20 nt, Human
agcucaccagccccagugcc

SEQ ID NO: 1986164 - RNA, 19 nt, Human
agcuaauucuuugaccugu

SEQ ID NO: 1986165 - RNA, 16 nt, Human
agcucaccagccccag

SEQ ID NO: 1986166 - RNA, 14 nt, Human
agcguuuugcaagg

SEQ ID NO: 1986167 - RNA, 22 nt, Human
agcguuuugcaagguaaaauuu

SEQ ID NO: 1986168 - RNA, 13 nt, Human
agcguuuugcaag

SEQ ID NO: 1986169 - RNA, 18 nt, Human
agcuaauaacaugugaaa

SEQ ID NO: 1986170 - RNA, 21 nt, Human
agcuaaucagcauucucacuc

SEQ ID NO: 1986171 - RNA, 16 nt, Human
agcuaaucagcauucu

SEQ ID NO: 1986172 - RNA, 15 nt, Human
agccuuuguugaacu

SEQ ID NO: 1986173 - RNA, 19 nt, Human
agccuuuguugaacuguua

SEQ ID NO: 1986174 - RNA, 21 nt, Human
agccuuuguugaacuguuaga

SEQ ID NO: 1986175 - RNA, 23 nt, Human
agccuuuguugaacuguuagaau

SEQ ID NO: 1986176 - RNA, 17 nt, Human
agccuuuucacccuucu

SEQ ID NO: 1986177 - RNA, 15 nt, Human
agccuuuggaaacag

SEQ ID NO: 1986178 - RNA, 17 nt, Human
agcgacagugagacucu

SEQ ID NO: 1986179 - RNA, 17 nt, Human
agcgacccauucagaga

SEQ ID NO: 1986180 - RNA, 13 nt, Human
agcgagcccuggu

SEQ ID NO: 1986181 - RNA, 19 nt, Human
agcgagcccugguggcagu

SEQ ID NO: 1986182 - RNA, 22 nt, Human
agcgagggccccagcgugaagc

SEQ ID NO: 1986183 - RNA, 20 nt, Human
agccugggaggucaaggcug

SEQ ID NO: 1986184 - RNA, 12 nt, Human
agccugggaggu

SEQ ID NO: 1986185 - RNA, 16 nt, Human
agccccaucuagggga

SEQ ID NO: 1986186 - RNA, 22 nt, Human
agcccucccugccccucccuuc

SEQ ID NO: 1986187 - RNA, 23 nt, Human
agcccucccugccccucccuuca

SEQ ID NO: 1986188 - RNA, 15 nt, Human
agcccucccugcccc

SEQ ID NO: 1986189 - RNA, 16 nt, Human
agcccucccugccccu

SEQ ID NO: 1986190 - RNA, 17 nt, Human
agcccucccugccccuc

SEQ ID NO: 1986191 - RNA, 19 nt, Human
agcccucccugccccuccc

SEQ ID NO: 1986192 - RNA, 17 nt, Human
agccuggcuucaaauug

SEQ ID NO: 1986193 - RNA, 18 nt, Human
agccuggcuucaaauugu

SEQ ID NO: 1986194 - RNA, 20 nt, Human
agggucucacuauguugccc

SEQ ID NO: 1986195 - RNA, 21 nt, Human
aggucguuuuaaaaacaaaaa

SEQ ID NO: 1986196 - RNA, 14 nt, Human
aggucuauuuggau

SEQ ID NO: 1986197 - RNA, 22 nt, Human
aggucuauuuggauuauucuuu

SEQ ID NO: 1986198 - RNA, 23 nt, Human
aggucccuaauaaagcugugugg

SEQ ID NO: 1986199 - RNA, 19 nt, Human
aggucccuuucauuugcua

SEQ ID NO: 1986200 - RNA, 14 nt, Human
agguacucuccugg

SEQ ID NO: 1986201 - RNA, 13 nt, Human
agguacucuccug

SEQ ID NO: 1986202 - RNA, 16 nt, Human
agguaacaggcagaua

SEQ ID NO: 1986203 - RNA, 22 nt, Human
agguacgaaaagaggggaagag

SEQ ID NO: 1986204 - RNA, 13 nt, Human
agguaacaggcag

SEQ ID NO: 1986205 - RNA, 14 nt, Human
agguaacaggcaga

SEQ ID NO: 1986206 - RNA, 22 nt, Human
aggguuuugccauguuggccag

SEQ ID NO: 1986207 - RNA, 23 nt, Human
aggguuuugccauguuggccagg

SEQ ID NO: 1986208 - RNA, 22 nt, Human
agggauacgagcggaguccccu

SEQ ID NO: 1986209 - RNA, 16 nt, Human
agggauacccauccca

SEQ ID NO: 1986210 - RNA, 16 nt, Human
agggaugguguucaaa

SEQ ID NO: 1986211 - RNA, 13 nt, Human
agggccuggccug

SEQ ID NO: 1986212 - RNA, 12 nt, Human
agggccuggccu

SEQ ID NO: 1986213 - RNA, 15 nt, Human
agggccugcaaggga

SEQ ID NO: 1986214 - RNA, 14 nt, Human
agggccugcaaggg

SEQ ID NO: 1986215 - RNA, 12 nt, Human
aggggcaggagg

SEQ ID NO: 1986216 - RNA, 13 nt, Human
aggggcaggagga

SEQ ID NO: 1986217 - RNA, 18 nt, Human
aggggcaggaggaagggg

SEQ ID NO: 1986218 - RNA, 14 nt, Human
agggccuggccuga

SEQ ID NO: 1986219 - RNA, 13 nt, Human
agggccuggccca

SEQ ID NO: 1986220 - RNA, 14 nt, Human
agggccuggcccau

SEQ ID NO: 1986221 - RNA, 16 nt, Human
agggccuggcccaugu

SEQ ID NO: 1986222 - RNA, 22 nt, Human
aggggcccaaauucuuucagug

SEQ ID NO: 1986223 - RNA, 22 nt, Human
agggucccugguggcagcucac

SEQ ID NO: 1986224 - RNA, 20 nt, Human
agggucccugguggcagcuc

SEQ ID NO: 1986225 - RNA, 17 nt, Human
agggucccugguggcag

SEQ ID NO: 1986226 - RNA, 16 nt, Human
agggucccugguggca

SEQ ID NO: 1986227 - RNA, 13 nt, Human
aggguauuccaga

SEQ ID NO: 1986228 - RNA, 21 nt, Human
aggguaucuggugacuuuccu

SEQ ID NO: 1986229 - RNA, 13 nt, Human
aggggccuggcag

SEQ ID NO: 1986230 - RNA, 12 nt, Human
aggggccuggca

SEQ ID NO: 1986231 - RNA, 14 nt, Human
agggucccuggugg

SEQ ID NO: 1986232 - RNA, 12 nt, Human
agggucccuggu

SEQ ID NO: 1986233 - RNA, 19 nt, Human
agggucacuggggcccaag

SEQ ID NO: 1986234 - RNA, 18 nt, Human
aggcuggguucugauccu

SEQ ID NO: 1986235 - RNA, 23 nt, Human
aggcuaauguuggcagaugcagc

SEQ ID NO: 1986236 - RNA, 19 nt, Human
aggcuaauguuggcagaug

SEQ ID NO: 1986237 - RNA, 22 nt, Human
aggcuaauguuggcagaugcag

SEQ ID NO: 1986238 - RNA, 15 nt, Human
aggcuaccuuuguau

SEQ ID NO: 1986239 - RNA, 13 nt, Human
aggcuaccuuugu

SEQ ID NO: 1986240 - RNA, 14 nt, Human
aggcuaccuuugua

SEQ ID NO: 1986241 - RNA, 15 nt, Human
agggacugaggggag

SEQ ID NO: 1986242 - RNA, 23 nt, Human
agggacugccagucccccugccc

SEQ ID NO: 1986243 - RNA, 15 nt, Human
agggacccuccacca

SEQ ID NO: 1986244 - RNA, 18 nt, Human
aggcuuagucacugagac

SEQ ID NO: 1986245 - RNA, 23 nt, Human
aggcuggucucgaacuccugacc

SEQ ID NO: 1986246 - RNA, 20 nt, Human
aggcuguaucccaugagccu

SEQ ID NO: 1986247 - RNA, 21 nt, Human
aggcuguaucccaugagccuc

SEQ ID NO: 1986248 - RNA, 17 nt, Human
aggcuuagucacugaga

SEQ ID NO: 1986249 - RNA, 22 nt, Human
aggcuguaucccaugagccuca

SEQ ID NO: 1986250 - RNA, 16 nt, Human
aggagaggauggccca

SEQ ID NO: 1986251 - RNA, 14 nt, Human
aggcagagcccaga

SEQ ID NO: 1986252 - RNA, 15 nt, Human
aggcaugguggccca

SEQ ID NO: 1986253 - RNA, 15 nt, Human
aggcaugggccacca

SEQ ID NO: 1986254 - RNA, 17 nt, Human
aggcaugggccaccacg

SEQ ID NO: 1986255 - RNA, 17 nt, Human
aggcaugugaugagagg

SEQ ID NO: 1986256 - RNA, 16 nt, Human
aggcaugggcuugcug

SEQ ID NO: 1986257 - RNA, 22 nt, Human
aggcaugucccaugugagcugc

SEQ ID NO: 1986258 - RNA, 19 nt, Human
aggcauggaugaauaaaug

SEQ ID NO: 1986259 - RNA, 18 nt, Human
aggcagcacgugcacaaa

SEQ ID NO: 1986260 - RNA, 20 nt, Human
aggcaugugaugagaggaaa

SEQ ID NO: 1986261 - RNA, 19 nt, Human
aggcaugugaugagaggaa

SEQ ID NO: 1986262 - RNA, 21 nt, Human
aggcaugugaugagaggaaau

SEQ ID NO: 1986263 - RNA, 17 nt, Human
aggcauguucucugagg

SEQ ID NO: 1986264 - RNA, 17 nt, Human
aggcauuccccaggagg

SEQ ID NO: 1986265 - RNA, 18 nt, Human
aggcauuccccaggaggc

SEQ ID NO: 1986266 - RNA, 18 nt, Human
aggcauguucucugagga

SEQ ID NO: 1986267 - RNA, 19 nt, Human
aggcauguucucugaggac

SEQ ID NO: 1986268 - RNA, 19 nt, Human
aggcccuucucuccagccc

SEQ ID NO: 1986269 - RNA, 15 nt, Human
aggcccuucucucca

SEQ ID NO: 1986270 - RNA, 12 nt, Human
aggcccuucucu

SEQ ID NO: 1986271 - RNA, 22 nt, Human
aggcccuuccucuccacugccu

SEQ ID NO: 1986272 - RNA, 12 nt, Human
aggcccugccca

SEQ ID NO: 1986273 - RNA, 23 nt, Human
aggcccucugcccacucccugca

SEQ ID NO: 1986274 - RNA, 22 nt, Human
aggcccucugcccacucccugc

SEQ ID NO: 1986275 - RNA, 21 nt, Human
aggcccucugcccacucccug

SEQ ID NO: 1986276 - RNA, 14 nt, Human
aggccaggcccucu

SEQ ID NO: 1986277 - RNA, 13 nt, Human
aggccaggcccuc

SEQ ID NO: 1986278 - RNA, 23 nt, Human
aggccagcugcuugggcuucauc

SEQ ID NO: 1986279 - RNA, 20 nt, Human
aggcauuccccaggaggcca

SEQ ID NO: 1986280 - RNA, 19 nt, Human
aggcauuccccaggaggcc

SEQ ID NO: 1986281 - RNA, 14 nt, Human
aggccaucuggaga

SEQ ID NO: 1986282 - RNA, 15 nt, Human
aggccaucuggagag

SEQ ID NO: 1986283 - RNA, 16 nt, Human
aggccaucuggagagc

SEQ ID NO: 1986284 - RNA, 20 nt, Human
aggccaucuggagagcccag

SEQ ID NO: 1986285 - RNA, 21 nt, Human
aggccaucuggagagcccaga

SEQ ID NO: 1986286 - RNA, 16 nt, Human
aggccauggaggcagu

SEQ ID NO: 1986287 - RNA, 20 nt, Human
aggccauggaggcaguagga

SEQ ID NO: 1986288 - RNA, 15 nt, Human
aggccaggccagcug

SEQ ID NO: 1986289 - RNA, 13 nt, Human
aggccaggccagc

SEQ ID NO: 1986290 - RNA, 15 nt, Human
aggccaggcccucug

SEQ ID NO: 1986291 - RNA, 10 nt, Human
aggccaucug

SEQ ID NO: 1986292 - RNA, 11 nt, Human
aggccaucugg

SEQ ID NO: 1986293 - RNA, 23 nt, Human
agccccauccucuguacagagcc

SEQ ID NO: 1986294 - RNA, 17 nt, Human
agccccauccucuguac

SEQ ID NO: 1986295 - RNA, 15 nt, Human
agccccauccucugu

SEQ ID NO: 1986296 - RNA, 17 nt, Human
agccccauucugccugc

SEQ ID NO: 1986297 - RNA, 18 nt, Human
agccccauucugccugcc

SEQ ID NO: 1986298 - RNA, 19 nt, Human
agccccauucugccugccc

SEQ ID NO: 1986299 - RNA, 21 nt, Human
agcccgggcucugccucccau

SEQ ID NO: 1986300 - RNA, 20 nt, Human
agcccgggcucugccuccca

SEQ ID NO: 1986301 - RNA, 18 nt, Human
agcccgggcucugccucc

SEQ ID NO: 1986302 - RNA, 17 nt, Human
agcccgggcucugccuc

SEQ ID NO: 1986303 - RNA, 12 nt, Human
agcccucccugc

SEQ ID NO: 1986304 - RNA, 13 nt, Human
agcccucccugcc

SEQ ID NO: 1986305 - RNA, 21 nt, Human
agcccuccaucuaaacugccc

SEQ ID NO: 1986306 - RNA, 23 nt, Human
agcccuccaucuaaacugccccc

SEQ ID NO: 1986307 - RNA, 21 nt, Human
agccccaaauugucaccugcu

SEQ ID NO: 1986308 - RNA, 13 nt, Human
agcauccuggcac

SEQ ID NO: 1986309 - RNA, 17 nt, Human
agcagcuuuagcaaaga

SEQ ID NO: 1986310 - RNA, 16 nt, Human
agccagcaggcucuca

SEQ ID NO: 1986311 - RNA, 15 nt, Human
agcccaccccucaac

SEQ ID NO: 1986312 - RNA, 16 nt, Human
agcccaccuuggcuca

SEQ ID NO: 1986313 - RNA, 14 nt, Human
agcccaccuuggcu

SEQ ID NO: 1986314 - RNA, 15 nt, Human
agcccacgcccccac

SEQ ID NO: 1986315 - RNA, 20 nt, Human
agcccacgcccccacuggug

SEQ ID NO: 1986316 - RNA, 14 nt, Human
agcccacgccccca

SEQ ID NO: 1986317 - RNA, 23 nt, Human
agcccacgcccccacuggugaca

SEQ ID NO: 1986318 - RNA, 20 nt, Human
agcccacgcugacuacaggg

SEQ ID NO: 1986319 - RNA, 21 nt, Human
agcccacgcugacuacagggc

SEQ ID NO: 1986320 - RNA, 22 nt, Human
agcccacgcugacuacagggcc

SEQ ID NO: 1986321 - RNA, 23 nt, Human
agcccacgcugacuacagggccg

SEQ ID NO: 1986322 - RNA, 18 nt, Human
agccagaggagagaggac

SEQ ID NO: 1986323 - RNA, 17 nt, Human
agccagaggagagagga

SEQ ID NO: 1986324 - RNA, 14 nt, Human
agccagcaggcucu

SEQ ID NO: 1986325 - RNA, 15 nt, Human
agccagaggagagag

SEQ ID NO: 1986326 - RNA, 13 nt, Human
agccagaggagag

SEQ ID NO: 1986327 - RNA, 20 nt, Human
agccaaggccaaaggaagca

SEQ ID NO: 1986328 - RNA, 16 nt, Human
agccaaagcuaggccu

SEQ ID NO: 1986329 - RNA, 18 nt, Human
agccaaagcuaggccugg

SEQ ID NO: 1986330 - RNA, 14 nt, Human
agcauccuggcacc

SEQ ID NO: 1986331 - RNA, 17 nt, Human
agcauccuggcacccgg

SEQ ID NO: 1986332 - RNA, 18 nt, Human
agcauccuggcacccggc

SEQ ID NO: 1986333 - RNA, 15 nt, Human
agcacuucaggaggc

SEQ ID NO: 1986334 - RNA, 19 nt, Human
agcacuucagggcagauuu

SEQ ID NO: 1986335 - RNA, 16 nt, Human
agcacuuccuugccag

SEQ ID NO: 1986336 - RNA, 18 nt, Human
agcacuuccuugccaguc

SEQ ID NO: 1986337 - RNA, 19 nt, Human
agcacuuccuugccagucu

SEQ ID NO: 1986338 - RNA, 20 nt, Human
agcacuuccuugccagucuu

SEQ ID NO: 1986339 - RNA, 17 nt, Human
agcacuucuaaguugag

SEQ ID NO: 1986340 - RNA, 20 nt, Human
agcacuucuaaguugaguau

SEQ ID NO: 1986341 - RNA, 16 nt, Human
agcacagacccugccc

SEQ ID NO: 1986342 - RNA, 17 nt, Human
agcacgauuucuguuua

SEQ ID NO: 1986343 - RNA, 19 nt, Human
agcacgauuucuguuuaga

SEQ ID NO: 1986344 - RNA, 21 nt, Human
agcacgauuucuguuuagaua

SEQ ID NO: 1986345 - RNA, 23 nt, Human
agcaauggugucaguauccaggc

SEQ ID NO: 1986346 - RNA, 22 nt, Human
agcacaaccuucaagcugcuuu

SEQ ID NO: 1986347 - RNA, 18 nt, Human
agcacaaccuucaagcug

SEQ ID NO: 1986348 - RNA, 20 nt, Human
agcacaaccuucaagcugcu

SEQ ID NO: 1986349 - RNA, 18 nt, Human
agcacaacccccagcucc

SEQ ID NO: 1986350 - RNA, 19 nt, Human
agcacaacccccagcuccc

SEQ ID NO: 1986351 - RNA, 22 nt, Human
agcacaacccccagcucccgcu

SEQ ID NO: 1986352 - RNA, 14 nt, Human
agcacaacccccag

SEQ ID NO: 1986353 - RNA, 12 nt, Human
agcacagacccu

SEQ ID NO: 1986354 - RNA, 15 nt, Human
agcacagacccugcc

SEQ ID NO: 1986355 - RNA, 14 nt, Human
agcacagacccugc

SEQ ID NO: 1986356 - RNA, 21 nt, Human
agagugcaagccccugcucca

SEQ ID NO: 1986357 - RNA, 20 nt, Human
agagugccaacuucuuucau

SEQ ID NO: 1986358 - RNA, 14 nt, Human
agaguggccccacc

SEQ ID NO: 1986359 - RNA, 21 nt, Human
agaguggccccaccuggcccu

SEQ ID NO: 1986360 - RNA, 15 nt, Human
agaguggccccaccu

SEQ ID NO: 1986361 - RNA, 19 nt, Human
agaguggccccaccuggcc

SEQ ID NO: 1986362 - RNA, 22 nt, Human
agauguagcaaacccugucaaa

SEQ ID NO: 1986363 - RNA, 23 nt, Human
agauguagcaaacccugucaaac

SEQ ID NO: 1986364 - RNA, 16 nt, Human
agauguagaggagaaa

SEQ ID NO: 1986365 - RNA, 19 nt, Human
agauguagaggagaaacug

SEQ ID NO: 1986366 - RNA, 15 nt, Human
agauguagauuuauu

SEQ ID NO: 1986367 - RNA, 18 nt, Human
agauguagauuuauuuca

SEQ ID NO: 1986368 - RNA, 21 nt, Human
agauguagcaaacccugucaa

SEQ ID NO: 1986369 - RNA, 23 nt, Human
agaugaugaaaauauuuaaaggc

SEQ ID NO: 1986370 - RNA, 19 nt, Human
agauggucauauuuaaaca

SEQ ID NO: 1986371 - RNA, 22 nt, Human
agauggucauauuuaaacagaa

SEQ ID NO: 1986372 - RNA, 18 nt, Human
agaugaugaaaauauuua

SEQ ID NO: 1986373 - RNA, 14 nt, Human
agaugagugagcau

SEQ ID NO: 1986374 - RNA, 22 nt, Human
agcaaagcggguuauaaugaau

SEQ ID NO: 1986375 - RNA, 15 nt, Human
agcaaauggccucau

SEQ ID NO: 1986376 - RNA, 20 nt, Human
agcaaauggccucaugucaa

SEQ ID NO: 1986377 - RNA, 20 nt, Human
agcaaaggagauuggaagga

SEQ ID NO: 1986378 - RNA, 20 nt, Human
agcaaagcggguuauaauga

SEQ ID NO: 1986379 - RNA, 17 nt, Human
agcaaaugucuuccugg

SEQ ID NO: 1986380 - RNA, 20 nt, Human
agcaaaugucuuccuggauu

SEQ ID NO: 1986381 - RNA, 16 nt, Human
agcaaauguggcuccu

SEQ ID NO: 1986382 - RNA, 11 nt, Human
agauucuuuua

SEQ ID NO: 1986383 - RNA, 20 nt, Human
agauugaaccugaauauugc

SEQ ID NO: 1986384 - RNA, 21 nt, Human
agauucuuuccugaggcuggg

SEQ ID NO: 1986385 - RNA, 19 nt, Human
agauucuuuccugaggcug

SEQ ID NO: 1986386 - RNA, 23 nt, Human
agauugcaacaggcugggcuuca

SEQ ID NO: 1986387 - RNA, 20 nt, Human
agauugcaacaggcugggcu

SEQ ID NO: 1986388 - RNA, 21 nt, Human
agauugcaacaggcugggcuu

SEQ ID NO: 1986389 - RNA, 18 nt, Human
agcaaaagaugcuucuca

SEQ ID NO: 1986390 - RNA, 11 nt, Human
agcaaaaggca

SEQ ID NO: 1986391 - RNA, 13 nt, Human
agcaaaaucaaga

SEQ ID NO: 1986392 - RNA, 12 nt, Human
agcaaaaggcau

SEQ ID NO: 1986393 - RNA, 16 nt, Human
agcaaacccugucaaa

SEQ ID NO: 1986394 - RNA, 15 nt, Human
agcaaaaucaagaga

SEQ ID NO: 1986395 - RNA, 20 nt, Human
agcaaaccuaauugcacaac

SEQ ID NO: 1986396 - RNA, 17 nt, Human
agcaaacccugucaaac

SEQ ID NO: 1986397 - RNA, 20 nt, Human
agcaaacccugucaaacauu

SEQ ID NO: 1986398 - RNA, 21 nt, Human
agcaaacccugucaaacauua

SEQ ID NO: 1986399 - RNA, 19 nt, Human
agcaaaccuaauugcacaa

SEQ ID NO: 1986400 - RNA, 20 nt, Human
agacaaugacuuacuguaca

SEQ ID NO: 1986401 - RNA, 17 nt, Human
agacaaauaguaggcaa

SEQ ID NO: 1986402 - RNA, 12 nt, Human
agacaaauagua

SEQ ID NO: 1986403 - RNA, 21 nt, Human
agacaaugacuuacuguacau

SEQ ID NO: 1986404 - RNA, 22 nt, Human
agacaaugacuuacuguacaug

SEQ ID NO: 1986405 - RNA, 15 nt, Human
agacagagcuacaca

SEQ ID NO: 1986406 - RNA, 23 nt, Human
agacaaugacuuacuguacauga

SEQ ID NO: 1986407 - RNA, 13 nt, Human
agacagagcuaca

SEQ ID NO: 1986408 - RNA, 11 nt, Human
agacagagucu

SEQ ID NO: 1986409 - RNA, 19 nt, Human
agacagagucucacuguug

SEQ ID NO: 1986410 - RNA, 20 nt, Human
agacagagucucacuguugc

SEQ ID NO: 1986411 - RNA, 15 nt, Human
agaccacguuucuaa

SEQ ID NO: 1986412 - RNA, 22 nt, Human
agacagccaacuauggccugug

SEQ ID NO: 1986413 - RNA, 15 nt, Human
agacagcauuugugu

SEQ ID NO: 1986414 - RNA, 20 nt, Human
agacagcauuuguguguuac

SEQ ID NO: 1986415 - RNA, 22 nt, Human
agacagauacuccuccaagguu

SEQ ID NO: 1986416 - RNA, 21 nt, Human
agacagagucucacuguugcc

SEQ ID NO: 1986417 - RNA, 13 nt, Human
agaccagcucuuc

SEQ ID NO: 1986418 - RNA, 12 nt, Human
agaccagcucuu

SEQ ID NO: 1986419 - RNA, 17 nt, Human
agacccaaaaggcagaa

SEQ ID NO: 1986420 - RNA, 19 nt, Human
agacccaaaaggcagaagc

SEQ ID NO: 1986421 - RNA, 14 nt, Human
agaauggcauuugc

SEQ ID NO: 1986422 - RNA, 18 nt, Human
agaauggcauuugcaaua

SEQ ID NO: 1986423 - RNA, 21 nt, Human
agaauggcauuugcaauaaaa

SEQ ID NO: 1986424 - RNA, 22 nt, Human
agaaugcacaaacagaggccgc

SEQ ID NO: 1986425 - RNA, 19 nt, Human
agaaugcacaaacagaggc

SEQ ID NO: 1986426 - RNA, 21 nt, Human
agaaugaccuuguaauguaac

SEQ ID NO: 1986427 - RNA, 22 nt, Human
agaaugaccuuguaauguaacu

SEQ ID NO: 1986428 - RNA, 23 nt, Human
agaaugaccuuguaauguaacug

SEQ ID NO: 1986429 - RNA, 12 nt, Human
agaaugaacaaa

SEQ ID NO: 1986430 - RNA, 13 nt, Human
agaaugaacaaag

SEQ ID NO: 1986431 - RNA, 22 nt, Human
agaaugaacaaagaccaauuuu

SEQ ID NO: 1986432 - RNA, 18 nt, Human
agaaugaagguuuuugua

SEQ ID NO: 1986433 - RNA, 19 nt, Human
agaaugaagguuuuuguaa

SEQ ID NO: 1986434 - RNA, 20 nt, Human
agaaugaagguuuuuguaaa

SEQ ID NO: 1986435 - RNA, 22 nt, Human
agaaugaagguuuuuguaaaga

SEQ ID NO: 1986436 - RNA, 12 nt, Human
agaaugaccuug

SEQ ID NO: 1986437 - RNA, 13 nt, Human
agaaugaccuugu

SEQ ID NO: 1986438 - RNA, 14 nt, Human
agaaugaccuugua

SEQ ID NO: 1986439 - RNA, 15 nt, Human
agaaugaccuuguaa

SEQ ID NO: 1986440 - RNA, 16 nt, Human
agaaugaccuuguaau

SEQ ID NO: 1986441 - RNA, 17 nt, Human
agaaugaccuuguaaug

SEQ ID NO: 1986442 - RNA, 20 nt, Human
agaaugaccuuguaauguaa

SEQ ID NO: 1986443 - RNA, 22 nt, Human
agaagucacauuccugaacagg

SEQ ID NO: 1986444 - RNA, 21 nt, Human
agaagucuucuauuuauuuau

SEQ ID NO: 1986445 - RNA, 21 nt, Human
agaagugaaaaucuacacucc

SEQ ID NO: 1986446 - RNA, 18 nt, Human
agaaugaaagggcccaga

SEQ ID NO: 1986447 - RNA, 15 nt, Human
agaaugaaauguaug

SEQ ID NO: 1986448 - RNA, 16 nt, Human
agaaugaaauguaugu

SEQ ID NO: 1986449 - RNA, 17 nt, Human
agaaugaaauguaugug

SEQ ID NO: 1986450 - RNA, 23 nt, Human
agaagagagggugaguccuccag

SEQ ID NO: 1986451 - RNA, 13 nt, Human
agaagaguggcag

SEQ ID NO: 1986452 - RNA, 13 nt, Human
agaaggucuguuu

SEQ ID NO: 1986453 - RNA, 23 nt, Human
agaagguauuaagauuauaauug

SEQ ID NO: 1986454 - RNA, 19 nt, Human
agaaguagggguggcccga

SEQ ID NO: 1986455 - RNA, 18 nt, Human
agaaguaggggaagaaua

SEQ ID NO: 1986456 - RNA, 18 nt, Human
agaagucacauuccugaa

SEQ ID NO: 1986457 - RNA, 20 nt, Human
agaaguauacguuuuucagu

SEQ ID NO: 1986458 - RNA, 20 nt, Human
agaagucacauuccugaaca

SEQ ID NO: 1986459 - RNA, 21 nt, Human
agaagucacauuccugaacag

SEQ ID NO: 1986460 - RNA, 14 nt, Human
agaaguaacuuacu

SEQ ID NO: 1986461 - RNA, 22 nt, Human
agaaguaacuggugauauaucu

SEQ ID NO: 1986462 - RNA, 18 nt, Human
agaagguuucagaaagaa

SEQ ID NO: 1986463 - RNA, 21 nt, Human
agaagguuuacuuuuuggugu

SEQ ID NO: 1986464 - RNA, 21 nt, Human
agaagagauugugguuucauu

SEQ ID NO: 1986465 - RNA, 15 nt, Human
agaagacauuugcca

SEQ ID NO: 1986466 - RNA, 13 nt, Human
agaagacacugau

SEQ ID NO: 1986467 - RNA, 21 nt, Human
agaagacacugaugggcaacc

SEQ ID NO: 1986468 - RNA, 21 nt, Human
acuuuccucuuuggucuacac

SEQ ID NO: 1986469 - RNA, 21 nt, Human
acuuuccucuuagucgagcca

SEQ ID NO: 1986470 - RNA, 13 nt, Human
agaggaaugaagu

SEQ ID NO: 1986471 - RNA, 16 nt, Human
agagggccugcaaggg

SEQ ID NO: 1986472 - RNA, 13 nt, Human
agagggccugcaa

SEQ ID NO: 1986473 - RNA, 22 nt, Human
agaggagugcguggcccaccag

SEQ ID NO: 1986474 - RNA, 19 nt, Human
agaggggguggccucccaa

SEQ ID NO: 1986475 - RNA, 17 nt, Human
agaggggguggccuccc

SEQ ID NO: 1986476 - RNA, 16 nt, Human
agaggacaagggaaau

SEQ ID NO: 1986477 - RNA, 14 nt, Human
agaggacuuuucuu

SEQ ID NO: 1986478 - RNA, 21 nt, Human
agaggacuuuucuuuguggcu

SEQ ID NO: 1986479 - RNA, 22 nt, Human
agaggacuuuucuuuguggcuu

SEQ ID NO: 1986480 - RNA, 23 nt, Human
agaggacuuuucuuuguggcuuc

SEQ ID NO: 1986481 - RNA, 23 nt, Human
agaggagggagcaucagugcccu

SEQ ID NO: 1986482 - RNA, 15 nt, Human
agagccugagaguga

SEQ ID NO: 1986483 - RNA, 14 nt, Human
agagccguaaaaac

SEQ ID NO: 1986484 - RNA, 17 nt, Human
agagccguaaaaacuga

SEQ ID NO: 1986485 - RNA, 19 nt, Human
agagccguaaaaacugaag

SEQ ID NO: 1986486 - RNA, 15 nt, Human
agagcccuucauuug

SEQ ID NO: 1986487 - RNA, 17 nt, Human
agagaggcuaaaauguu

SEQ ID NO: 1986488 - RNA, 18 nt, Human
agagaggcuaaaauguuu

SEQ ID NO: 1986489 - RNA, 19 nt, Human
agagaggcuaaaauguuuu

SEQ ID NO: 1986490 - RNA, 13 nt, Human
agagcccaccuug

SEQ ID NO: 1986491 - RNA, 22 nt, Human
agagagggugaguccuccagaa

SEQ ID NO: 1986492 - RNA, 13 nt, Human
agagccagggucu

SEQ ID NO: 1986493 - RNA, 16 nt, Human
agacugcuuugagaaa

SEQ ID NO: 1986494 - RNA, 16 nt, Human
agagagaccacuuuuc

SEQ ID NO: 1986495 - RNA, 14 nt, Human
agagagaagagccc

SEQ ID NO: 1986496 - RNA, 16 nt, Human
agagagaagagcccca

SEQ ID NO: 1986497 - RNA, 16 nt, Human
agacgcugugcugccc

SEQ ID NO: 1986498 - RNA, 19 nt, Human
agacgcucauucagcaucu

SEQ ID NO: 1986499 - RNA, 18 nt, Human
agacucugucucaaaaaa

SEQ ID NO: 1986500 - RNA, 13 nt, Human
agacucugucuca

SEQ ID NO: 1986501 - RNA, 18 nt, Human
agacucugucucagucca

SEQ ID NO: 1986502 - RNA, 20 nt, Human
agacugaguacguugugcau

SEQ ID NO: 1986503 - RNA, 22 nt, Human
agacugaguacguugugcauuu

SEQ ID NO: 1986504 - RNA, 17 nt, Human
aguugacucugcucuug

SEQ ID NO: 1986505 - RNA, 20 nt, Human
aguucaucccuucucuucca

SEQ ID NO: 1986506 - RNA, 22 nt, Human
aguucaucccuucucuuccagg

SEQ ID NO: 1986507 - RNA, 18 nt, Human
aguugacuagaaucgaca

SEQ ID NO: 1986508 - RNA, 22 nt, Human
aguucaucuugaauuguaagga

SEQ ID NO: 1986509 - RNA, 16 nt, Human
aguugauacuacaguu

SEQ ID NO: 1986510 - RNA, 23 nt, Human
aguugaguauauuauaauagauu

SEQ ID NO: 1986511 - RNA, 18 nt, Human
aguugagcuaugacuuaa

SEQ ID NO: 1986512 - RNA, 19 nt, Human
aguugaguauauuauaaua

SEQ ID NO: 1986513 - RNA, 13 nt, Human
aguugagcuauga

SEQ ID NO: 1986514 - RNA, 15 nt, Human
aguugagcuaugacu

SEQ ID NO: 1986515 - RNA, 17 nt, Human
aguugagcuaugacuua

SEQ ID NO: 1986516 - RNA, 14 nt, Human
aguucagcuugggg

SEQ ID NO: 1986517 - RNA, 19 nt, Human
aguucagggaagauaaguu

SEQ ID NO: 1986518 - RNA, 22 nt, Human
aguucagggaagauaaguugga

SEQ ID NO: 1986519 - RNA, 13 nt, Human
aguucagcuuggg

SEQ ID NO: 1986520 - RNA, 19 nt, Human
aguucaucuugaauuguaa

SEQ ID NO: 1986521 - RNA, 15 nt, Human
aguucaucuugaauu

SEQ ID NO: 1986522 - RNA, 13 nt, Human
aguucaucuugaa

SEQ ID NO: 1986523 - RNA, 18 nt, Human
aguucagguaacaggcag

SEQ ID NO: 1986524 - RNA, 20 nt, Human
agugcuaauuuugaaaaacu

SEQ ID NO: 1986525 - RNA, 18 nt, Human
agugcuaauuuugaaaaa

SEQ ID NO: 1986526 - RNA, 21 nt, Human
aguggccuccgucacuaccug

SEQ ID NO: 1986527 - RNA, 22 nt, Human
aguggccuccgucacuaccugg

SEQ ID NO: 1986528 - RNA, 21 nt, Human
aguggccucgaacuccuggca

SEQ ID NO: 1986529 - RNA, 15 nt, Human
agugccuuauggaac

SEQ ID NO: 1986530 - RNA, 14 nt, Human
agugccuuauggaa

SEQ ID NO: 1986531 - RNA, 13 nt, Human
agugccuuaugga

SEQ ID NO: 1986532 - RNA, 10 nt, Human
agugccuuau

SEQ ID NO: 1986533 - RNA, 15 nt, Human
agugcuaauuuugaa

SEQ ID NO: 1986534 - RNA, 16 nt, Human
agugccuuauggaaca

SEQ ID NO: 1986535 - RNA, 14 nt, Human
agugauucuccugc

SEQ ID NO: 1986536 - RNA, 21 nt, Human
agugauucucaugccucagcc

SEQ ID NO: 1986537 - RNA, 18 nt, Human
agugccuuacacaauggu

SEQ ID NO: 1986538 - RNA, 15 nt, Human
agugauucuccugcc

SEQ ID NO: 1986539 - RNA, 17 nt, Human
agugauucuccugccuc

SEQ ID NO: 1986540 - RNA, 14 nt, Human
agugauccucccac

SEQ ID NO: 1986541 - RNA, 15 nt, Human
agugauccucccacc

SEQ ID NO: 1986542 - RNA, 18 nt, Human
agugauccucccaccuca

SEQ ID NO: 1986543 - RNA, 24 nt, Human
agugauccucccaccucagccucc

SEQ ID NO: 1986544 - RNA, 13 nt, Human
agugucuggcugc

SEQ ID NO: 1986545 - RNA, 14 nt, Human
agugucuggcugca

SEQ ID NO: 1986546 - RNA, 19 nt, Human
agugggacagggcauggcc

SEQ ID NO: 1986547 - RNA, 21 nt, Human
agugggacagggcauggccag

SEQ ID NO: 1986548 - RNA, 12 nt, Human
agugucuggcug

SEQ ID NO: 1986549 - RNA, 19 nt, Human
agugucaaugcagccccca

SEQ ID NO: 1986550 - RNA, 22 nt, Human
aguccucuuuucugagaggacu

SEQ ID NO: 1986551 - RNA, 20 nt, Human
aguccuuaccagcagagcac

SEQ ID NO: 1986552 - RNA, 17 nt, Human
aguccugcaaccaaacu

SEQ ID NO: 1986553 - RNA, 19 nt, Human
aguccucuuuucugagagg

SEQ ID NO: 1986554 - RNA, 19 nt, Human
agucaugcguuuaaucaca

SEQ ID NO: 1986555 - RNA, 22 nt, Human
agucaugauguuuuuaaaaucu

SEQ ID NO: 1986556 - RNA, 23 nt, Human
agucaugauguuuuuaaaaucuu

SEQ ID NO: 1986557 - RNA, 13 nt, Human
agucaugauguuu

SEQ ID NO: 1986558 - RNA, 14 nt, Human
agucaugauguuuu

SEQ ID NO: 1986559 - RNA, 17 nt, Human
agucaugauguuuuuaa

SEQ ID NO: 1986560 - RNA, 18 nt, Human
agucaugauguuuuuaaa

SEQ ID NO: 1986561 - RNA, 19 nt, Human
agucaugauguuuuuaaaa

SEQ ID NO: 1986562 - RNA, 20 nt, Human
agucaugauguuuuuaaaau

SEQ ID NO: 1986563 - RNA, 21 nt, Human
agucaugauguuuuuaaaauc

SEQ ID NO: 1986564 - RNA, 14 nt, Human
agucaugugggcca

SEQ ID NO: 1986565 - RNA, 21 nt, Human
agucaugcuccccugugccag

SEQ ID NO: 1986566 - RNA, 13 nt, Human
agucaugcucccc

SEQ ID NO: 1986567 - RNA, 14 nt, Human
agucaugcuccccu

SEQ ID NO: 1986568 - RNA, 18 nt, Human
agucaugcuccccugugc

SEQ ID NO: 1986569 - RNA, 19 nt, Human
agucaugcuccccugugcc

SEQ ID NO: 1986570 - RNA, 23 nt, Human
agucaugcuccccugugccagcc

SEQ ID NO: 1986571 - RNA, 18 nt, Human
aguccuuaucuagcugca

SEQ ID NO: 1986572 - RNA, 16 nt, Human
aguccuuaucuagcug

SEQ ID NO: 1986573 - RNA, 19 nt, Human
aguccuuaccagcagagca

SEQ ID NO: 1986574 - RNA, 18 nt, Human
agucugaggccguugcug

SEQ ID NO: 1986575 - RNA, 17 nt, Human
agucugagggcuuguag

SEQ ID NO: 1986576 - RNA, 18 nt, Human
agucugagggcuuguagu

SEQ ID NO: 1986577 - RNA, 21 nt, Human
agucugagggcuuguaguucu

SEQ ID NO: 1986578 - RNA, 17 nt, Human
agugaccucagcuuuga

SEQ ID NO: 1986579 - RNA, 16 nt, Human
agucuguugauuaaag

SEQ ID NO: 1986580 - RNA, 16 nt, Human
agucuguucugguaau

SEQ ID NO: 1986581 - RNA, 18 nt, Human
agugaccucagcuuugau

SEQ ID NO: 1986582 - RNA, 22 nt, Human
agugaccuggaaggcccagcac

SEQ ID NO: 1986583 - RNA, 14 nt, Human
agugacgguuccua

SEQ ID NO: 1986584 - RNA, 20 nt, Human
agugacgguuccuacacagg

SEQ ID NO: 1986585 - RNA, 23 nt, Human
agugacgguuccuacacaggaca

SEQ ID NO: 1986586 - RNA, 15 nt, Human
agucaauuacauguu

SEQ ID NO: 1986587 - RNA, 22 nt, Human
agucacacaguauuacuucugc

SEQ ID NO: 1986588 - RNA, 17 nt, Human
aguauuuuguuucagug

SEQ ID NO: 1986589 - RNA, 23 nt, Human
aguaugaggcauuuguuugaacu

SEQ ID NO: 1986590 - RNA, 14 nt, Human
aguauuuuguuuca

SEQ ID NO: 1986591 - RNA, 17 nt, Human
aguaugaggcauuuguu

SEQ ID NO: 1986592 - RNA, 16 nt, Human
aguauuuuuguauuca

SEQ ID NO: 1986593 - RNA, 15 nt, Human
aguaucucagggccu

SEQ ID NO: 1986594 - RNA, 20 nt, Human
aguauccugagagcccagaa

SEQ ID NO: 1986595 - RNA, 20 nt, Human
aguaugaggcauuuguuuga

SEQ ID NO: 1986596 - RNA, 21 nt, Human
aguaugaggcauuuguuugaa

SEQ ID NO: 1986597 - RNA, 11 nt, Human
aguauccaggc

SEQ ID NO: 1986598 - RNA, 23 nt, Human
aguauccaggcuuuguacagagu

SEQ ID NO: 1986599 - RNA, 18 nt, Human
aguacuuuauagaagaau

SEQ ID NO: 1986600 - RNA, 19 nt, Human
aguacuuuauagaagaaug

SEQ ID NO: 1986601 - RNA, 13 nt, Human
aguacuuuauaga

SEQ ID NO: 1986602 - RNA, 16 nt, Human
aguacuuuauagaaga

SEQ ID NO: 1986603 - RNA, 17 nt, Human
aguacuuuauagaagaa

SEQ ID NO: 1986604 - RNA, 16 nt, Human
aguacguugugcauuu

SEQ ID NO: 1986605 - RNA, 17 nt, Human
aguacguugugcauuug

SEQ ID NO: 1986606 - RNA, 18 nt, Human
aguacguugugcauuugg

SEQ ID NO: 1986607 - RNA, 15 nt, Human
aguaagcauuucaaa

SEQ ID NO: 1986608 - RNA, 22 nt, Human
aguacuacaguccucccaucuc

SEQ ID NO: 1986609 - RNA, 19 nt, Human
aguacuacaguccucccau

SEQ ID NO: 1986610 - RNA, 14 nt, Human
aguacuauaauuua

SEQ ID NO: 1986611 - RNA, 17 nt, Human
aguacuucuccacccug

SEQ ID NO: 1986612 - RNA, 13 nt, Human
aguacugugaauc

SEQ ID NO: 1986613 - RNA, 17 nt, Human
aguacugugaauccagu

SEQ ID NO: 1986614 - RNA, 12 nt, Human
aguacuucuuuu

SEQ ID NO: 1986615 - RNA, 14 nt, Human
aguacuauguauca

SEQ ID NO: 1986616 - RNA, 12 nt, Human
aguacuauguau

SEQ ID NO: 1986617 - RNA, 13 nt, Human
aguacucauacau

SEQ ID NO: 1986618 - RNA, 18 nt, Human
aguaaaucucuucugugu

SEQ ID NO: 1986619 - RNA, 18 nt, Human
aguaaaugggggugcauu

SEQ ID NO: 1986620 - RNA, 13 nt, Human
aggucuguucuuu

SEQ ID NO: 1986621 - RNA, 15 nt, Human
aggucuguucuuucc

SEQ ID NO: 1986622 - RNA, 16 nt, Human
aggucuguucuuucca

SEQ ID NO: 1986623 - RNA, 14 nt, Human
aguaaaucucuucu

SEQ ID NO: 1986624 - RNA, 15 nt, Human
aguaaaucucuucug

SEQ ID NO: 1986625 - RNA, 16 nt, Human
aguaaaucucuucugu

SEQ ID NO: 1986626 - RNA, 15 nt, Human
aguacguugugcauu

SEQ ID NO: 1986627 - RNA, 14 nt, Human
aguacguugugcau

SEQ ID NO: 1986628 - RNA, 14 nt, Human
aguaagaucacugu

SEQ ID NO: 1986629 - RNA, 15 nt, Human
aguaagaucacuguu

SEQ ID NO: 1986630 - RNA, 20 nt, Human
aguaagaucacuguuuagau

SEQ ID NO: 1986631 - RNA, 21 nt, Human
aguaagaucacuguuuagauu

SEQ ID NO: 1986632 - RNA, 14 nt, Human
aguaacacaggcca

SEQ ID NO: 1986633 - RNA, 21 nt, Human
auaagccagacaucaacagau

SEQ ID NO: 1986634 - RNA, 22 nt, Human
auaagccagacaucaacagaua

SEQ ID NO: 1986635 - RNA, 23 nt, Human
auaagggacugauguuugugcag

SEQ ID NO: 1986636 - RNA, 13 nt, Human
auaagggaaaaau

SEQ ID NO: 1986637 - RNA, 15 nt, Human
auaagggaaaaauca

SEQ ID NO: 1986638 - RNA, 16 nt, Human
auaagggaaaaaucaa

SEQ ID NO: 1986639 - RNA, 16 nt, Human
auaagccaugagaaug

SEQ ID NO: 1986640 - RNA, 18 nt, Human
auaagccaugagaauguu

SEQ ID NO: 1986641 - RNA, 13 nt, Human
auaauggucagag

SEQ ID NO: 1986642 - RNA, 18 nt, Human
auaaggguaucuggugac

SEQ ID NO: 1986643 - RNA, 15 nt, Human
auaauguaaauaaag

SEQ ID NO: 1986644 - RNA, 20 nt, Human
auacccccugcaaagcccag

SEQ ID NO: 1986645 - RNA, 16 nt, Human
auaccugucccccuga

SEQ ID NO: 1986646 - RNA, 15 nt, Human
auaccugucccccug

SEQ ID NO: 1986647 - RNA, 14 nt, Human
auaccugucccccu

SEQ ID NO: 1986648 - RNA, 21 nt, Human
auacccccugcaaagcccagc

SEQ ID NO: 1986649 - RNA, 13 nt, Human
auacagaaaaguu

SEQ ID NO: 1986650 - RNA, 17 nt, Human
auacccacccccaccca

SEQ ID NO: 1986651 - RNA, 17 nt, Human
auacccccugcaaagcc

SEQ ID NO: 1986652 - RNA, 19 nt, Human
auacccccugcaaagccca

SEQ ID NO: 1986653 - RNA, 16 nt, Human
auacccacccccaccc

SEQ ID NO: 1986654 - RNA, 14 nt, Human
auacccacccccac

SEQ ID NO: 1986655 - RNA, 13 nt, Human
auacccaccccca

SEQ ID NO: 1986656 - RNA, 19 nt, Human
auacacuuggaguuugcau

SEQ ID NO: 1986657 - RNA, 21 nt, Human
auacacuuggaguuugcauuc

SEQ ID NO: 1986658 - RNA, 22 nt, Human
auacacuuacacuuuaugcaca

SEQ ID NO: 1986659 - RNA, 13 nt, Human
auacacuuacacu

SEQ ID NO: 1986660 - RNA, 14 nt, Human
auacaaugcugugc

SEQ ID NO: 1986661 - RNA, 17 nt, Human
auacaaugcugugcccu

SEQ ID NO: 1986662 - RNA, 15 nt, Human
auacaauacauagga

SEQ ID NO: 1986663 - RNA, 18 nt, Human
auacaaucauagcauugu

SEQ ID NO: 1986664 - RNA, 15 nt, Human
aguuguuagauuaag

SEQ ID NO: 1986665 - RNA, 19 nt, Human
aguuguuacauuuuuaagu

SEQ ID NO: 1986666 - RNA, 20 nt, Human
aguuguuacauuuuuaagug

SEQ ID NO: 1986667 - RNA, 22 nt, Human
aguuguuacauuuuuaagugcu

SEQ ID NO: 1986668 - RNA, 22 nt, Human
aguuguuaccccaagcgcccug

SEQ ID NO: 1986669 - RNA, 24 nt, Human
aguuguuaccccaagcgcccuggc

SEQ ID NO: 1986670 - RNA, 17 nt, Human
aguuugauuaaauucuu

SEQ ID NO: 1986671 - RNA, 18 nt, Human
aguuugauuaaauucuug

SEQ ID NO: 1986672 - RNA, 20 nt, Human
aguuugauuaaauucuugca

SEQ ID NO: 1986673 - RNA, 22 nt, Human
aguuugauuaaauucuugcaaa

SEQ ID NO: 1986674 - RNA, 19 nt, Human
aguuugagaucagccuggg

SEQ ID NO: 1986675 - RNA, 18 nt, Human
aguuugagaucagccugg

SEQ ID NO: 1986676 - RNA, 20 nt, Human
aguuugagaucagccugggc

SEQ ID NO: 1986677 - RNA, 16 nt, Human
aguuugauuaaauucu

SEQ ID NO: 1986678 - RNA, 12 nt, Human
auaaaacccuua

SEQ ID NO: 1986679 - RNA, 16 nt, Human
aguuuggcaaacucuc

SEQ ID NO: 1986680 - RNA, 18 nt, Human
aguuuggcaaacucucca

SEQ ID NO: 1986681 - RNA, 10 nt, Human
aguuugcacu

SEQ ID NO: 1986682 - RNA, 18 nt, Human
aguuugcacucaaaucuu

SEQ ID NO: 1986683 - RNA, 20 nt, Human
aguuugcacucaaaucuuaa

SEQ ID NO: 1986684 - RNA, 22 nt, Human
aguuugcacucaaaucuuaaga

SEQ ID NO: 1986685 - RNA, 23 nt, Human
aguuugcacucaaaucuuaagaa

SEQ ID NO: 1986686 - RNA, 23 nt, Human
aguuugauuaaauucuugcaaag

SEQ ID NO: 1986687 - RNA, 18 nt, Human
auaacauguaauuaagua

SEQ ID NO: 1986688 - RNA, 13 nt, Human
auaacauguaauu

SEQ ID NO: 1986689 - RNA, 12 nt, Human
auaacauguaau

SEQ ID NO: 1986690 - RNA, 20 nt, Human
auaacauguaauuaaguacu

SEQ ID NO: 1986691 - RNA, 13 nt, Human
auaaauuuugaaa

SEQ ID NO: 1986692 - RNA, 14 nt, Human
auaaauuuugaaaa

SEQ ID NO: 1986693 - RNA, 15 nt, Human
auaaauuuugaaaag

SEQ ID NO: 1986694 - RNA, 16 nt, Human
auaaauuuugaaaagu

SEQ ID NO: 1986695 - RNA, 21 nt, Human
auaaauuuugaaaaguaauau

SEQ ID NO: 1986696 - RNA, 18 nt, Human
auaaauugucuuaaugga

SEQ ID NO: 1986697 - RNA, 15 nt, Human
auaaauugucuuaau

SEQ ID NO: 1986698 - RNA, 14 nt, Human
auaaauuuauuuac

SEQ ID NO: 1986699 - RNA, 15 nt, Human
auaaauuuauuuacu

SEQ ID NO: 1986700 - RNA, 19 nt, Human
auaaauuuauuuacugcua

SEQ ID NO: 1986701 - RNA, 14 nt, Human
auaaagcaauaaga

SEQ ID NO: 1986702 - RNA, 19 nt, Human
auaaagcaauaagaacaaa

SEQ ID NO: 1986703 - RNA, 14 nt, Human
auaacaaugaaagu

SEQ ID NO: 1986704 - RNA, 22 nt, Human
auacuuugcagcacagcugaga

SEQ ID NO: 1986705 - RNA, 10 nt, Human
auacuuugua

SEQ ID NO: 1986706 - RNA, 13 nt, Human
auacuuuguauug

SEQ ID NO: 1986707 - RNA, 14 nt, Human
auacuuuguauugu

SEQ ID NO: 1986708 - RNA, 18 nt, Human
auacuuuguauuguccua

SEQ ID NO: 1986709 - RNA, 18 nt, Human
auacuuguuguuuaaugu

SEQ ID NO: 1986710 - RNA, 15 nt, Human
auacuuguuuuugua

SEQ ID NO: 1986711 - RNA, 16 nt, Human
auacuuguuuuuguaa

SEQ ID NO: 1986712 - RNA, 19 nt, Human
auacuuguuuuuguaaaga

SEQ ID NO: 1986713 - RNA, 20 nt, Human
auacuuguuuuuguaaagaa

SEQ ID NO: 1986714 - RNA, 15 nt, Human
auagcagcuuauuca

SEQ ID NO: 1986715 - RNA, 15 nt, Human
auagcauuguaaaag

SEQ ID NO: 1986716 - RNA, 15 nt, Human
auagcauugucuauu

SEQ ID NO: 1986717 - RNA, 17 nt, Human
auagcauugucuauuuu

SEQ ID NO: 1986718 - RNA, 16 nt, Human
auagcauuuaugguaa

SEQ ID NO: 1986719 - RNA, 19 nt, Human
auagccccucuccccgcag

SEQ ID NO: 1986720 - RNA, 17 nt, Human
auagcauuuaugguaau

SEQ ID NO: 1986721 - RNA, 15 nt, Human
auagaaaguguucug

SEQ ID NO: 1986722 - RNA, 17 nt, Human
auagaaaguguucuguu

SEQ ID NO: 1986723 - RNA, 18 nt, Human
auagaaaguguucuguua

SEQ ID NO: 1986724 - RNA, 19 nt, Human
auagaaaguguucuguuac

SEQ ID NO: 1986725 - RNA, 20 nt, Human
auagaaaguguucuguuaca

SEQ ID NO: 1986726 - RNA, 22 nt, Human
auagaaaguguucuguuacaaa

SEQ ID NO: 1986727 - RNA, 23 nt, Human
auagaaaguguucuguuacaaaa

SEQ ID NO: 1986728 - RNA, 15 nt, Human
auagaaagcuuuguu

SEQ ID NO: 1986729 - RNA, 23 nt, Human
auagaaacugucuagcacuuccu

SEQ ID NO: 1986730 - RNA, 15 nt, Human
auagcacagacccug

SEQ ID NO: 1986731 - RNA, 18 nt, Human
auagcacagacccugccc

SEQ ID NO: 1986732 - RNA, 17 nt, Human
auagcacagacccugcc

SEQ ID NO: 1986733 - RNA, 16 nt, Human
auaguaaauguaguuc

SEQ ID NO: 1986734 - RNA, 14 nt, Human
auaguaaauguagu

SEQ ID NO: 1986735 - RNA, 13 nt, Human
auaguaauauaau

SEQ ID NO: 1986736 - RNA, 23 nt, Human
auaguaauauaauacacaaaauc

SEQ ID NO: 1986737 - RNA, 13 nt, Human
auaguaaaaauaa

SEQ ID NO: 1986738 - RNA, 14 nt, Human
auaguaaaaauaaa

SEQ ID NO: 1986739 - RNA, 24 nt, Human
auagguuuggacaaaauggaauac

SEQ ID NO: 1986740 - RNA, 18 nt, Human
auagguuuggacaaaaug

SEQ ID NO: 1986741 - RNA, 15 nt, Human
auagccuaggugaca

SEQ ID NO: 1986742 - RNA, 17 nt, Human
auagccuaggugacaga

SEQ ID NO: 1986743 - RNA, 18 nt, Human
auauaauacacaaaauca

SEQ ID NO: 1986744 - RNA, 19 nt, Human
auauaauacacaaaaucaa

SEQ ID NO: 1986745 - RNA, 21 nt, Human
auauaauacacaaaaucaaau

SEQ ID NO: 1986746 - RNA, 18 nt, Human
auauaauauugucucuuu

SEQ ID NO: 1986747 - RNA, 21 nt, Human
auauacaacaccaaaaaauau

SEQ ID NO: 1986748 - RNA, 16 nt, Human
auauaauacacaaaau

SEQ ID NO: 1986749 - RNA, 17 nt, Human
auauaauacacaaaauc

SEQ ID NO: 1986750 - RNA, 19 nt, Human
auauuucccugaaggaacc

SEQ ID NO: 1986751 - RNA, 13 nt, Human
auauuuaugaaga

SEQ ID NO: 1986752 - RNA, 14 nt, Human
auauuuaugaagaa

SEQ ID NO: 1986753 - RNA, 15 nt, Human
auauuuaugaagaaa

SEQ ID NO: 1986754 - RNA, 17 nt, Human
auauuuaugaagaaaau

SEQ ID NO: 1986755 - RNA, 19 nt, Human
auauuuaugaagaaaauac

SEQ ID NO: 1986756 - RNA, 21 nt, Human
auauuuaugaagaaaauacuu

SEQ ID NO: 1986757 - RNA, 19 nt, Human
auauucauaguagaacuuu

SEQ ID NO: 1986758 - RNA, 17 nt, Human
auauucauucuuuuuga

SEQ ID NO: 1986759 - RNA, 22 nt, Human
auauuauuuuauguugcauaga

SEQ ID NO: 1986760 - RNA, 15 nt, Human
auauuauuuuauguu

SEQ ID NO: 1986761 - RNA, 14 nt, Human
auauuauuuuaugu

SEQ ID NO: 1986762 - RNA, 19 nt, Human
auauucaggaagcucaggg

SEQ ID NO: 1986763 - RNA, 15 nt, Human
auauucacacuugaa

SEQ ID NO: 1986764 - RNA, 16 nt, Human
auauucacacuugaac

SEQ ID NO: 1986765 - RNA, 17 nt, Human
auaugcucugcauguua

SEQ ID NO: 1986766 - RNA, 16 nt, Human
auaugcucugcauguu

SEQ ID NO: 1986767 - RNA, 17 nt, Human
auaugcagauuuugccc

SEQ ID NO: 1986768 - RNA, 19 nt, Human
auaugcacuaagucucuuu

SEQ ID NO: 1986769 - RNA, 22 nt, Human
auaugcacacauuuuuuaaaug

SEQ ID NO: 1986770 - RNA, 20 nt, Human
auaugcucugcauguuacau

SEQ ID NO: 1986771 - RNA, 23 nt, Human
auaugcacuaagucucuuuuuua

SEQ ID NO: 1986772 - RNA, 18 nt, Human
auauauuuuuuucugaaa

SEQ ID NO: 1986773 - RNA, 12 nt, Human
augaaaauauuu

SEQ ID NO: 1986774 - RNA, 13 nt, Human
augaaaauauuua

SEQ ID NO: 1986775 - RNA, 14 nt, Human
augaaaauauuuaa

SEQ ID NO: 1986776 - RNA, 16 nt, Human
augaaaauauuuaaag

SEQ ID NO: 1986777 - RNA, 16 nt, Human
augaaaacacauuuuu

SEQ ID NO: 1986778 - RNA, 14 nt, Human
augaaaacacauuu

SEQ ID NO: 1986779 - RNA, 15 nt, Human
augaaaacacauuuu

SEQ ID NO: 1986780 - RNA, 13 nt, Human
augagggucuugg

SEQ ID NO: 1986781 - RNA, 20 nt, Human
augagggucuugguuccagc

SEQ ID NO: 1986782 - RNA, 13 nt, Human
augaggcauuugu

SEQ ID NO: 1986783 - RNA, 14 nt, Human
augaggcauuuguu

SEQ ID NO: 1986784 - RNA, 21 nt, Human
augaggcauuuguuugaacug

SEQ ID NO: 1986785 - RNA, 22 nt, Human
augaggcauuuguuugaacuga

SEQ ID NO: 1986786 - RNA, 16 nt, Human
augacugaaagcacug

SEQ ID NO: 1986787 - RNA, 20 nt, Human
augaccauaaaauuagacau

SEQ ID NO: 1986788 - RNA, 18 nt, Human
augaccacacuccagcug

SEQ ID NO: 1986789 - RNA, 15 nt, Human
augaccacacuccag

SEQ ID NO: 1986790 - RNA, 19 nt, Human
augacguacaaguaguucu

SEQ ID NO: 1986791 - RNA, 20 nt, Human
augacguacaaguaguucug

SEQ ID NO: 1986792 - RNA, 23 nt, Human
augacguacaaguaguucuguau

SEQ ID NO: 1986793 - RNA, 24 nt, Human
augacguacaaguaguucuguauu

SEQ ID NO: 1986794 - RNA, 17 nt, Human
augaaaacauggaacag

SEQ ID NO: 1986795 - RNA, 20 nt, Human
augaaaacauggaacagugu

SEQ ID NO: 1986796 - RNA, 21 nt, Human
augaaguacucauacauguua

SEQ ID NO: 1986797 - RNA, 11 nt, Human
aucuauaauau

SEQ ID NO: 1986798 - RNA, 17 nt, Human
aucuauaacuacauauu

SEQ ID NO: 1986799 - RNA, 19 nt, Human
aucuauaacuacauauuga

SEQ ID NO: 1986800 - RNA, 13 nt, Human
aucuauaaacacu

SEQ ID NO: 1986801 - RNA, 14 nt, Human
aucuauaaacacug

SEQ ID NO: 1986802 - RNA, 15 nt, Human
aucuauaaacacugu

SEQ ID NO: 1986803 - RNA, 12 nt, Human
aucuaguguuug

SEQ ID NO: 1986804 - RNA, 19 nt, Human
aucuaggggagccuugauu

SEQ ID NO: 1986805 - RNA, 20 nt, Human
aucuaggggagccuugauuc

SEQ ID NO: 1986806 - RNA, 14 nt, Human
aucuaguaauauau

SEQ ID NO: 1986807 - RNA, 16 nt, Human
aucuaguaauauauuu

SEQ ID NO: 1986808 - RNA, 18 nt, Human
aucuaguaauauauuuaa

SEQ ID NO: 1986809 - RNA, 19 nt, Human
aucuaguaauauauuuaaa

SEQ ID NO: 1986810 - RNA, 22 nt, Human
aucuaguaauauauuuaaaggg

SEQ ID NO: 1986811 - RNA, 17 nt, Human
aucuaggggagccuuga

SEQ ID NO: 1986812 - RNA, 20 nt, Human
aucuccgucaacucauauuu

SEQ ID NO: 1986813 - RNA, 21 nt, Human
aucucccuuuuccaugacugu

SEQ ID NO: 1986814 - RNA, 21 nt, Human
aucuauaggaagauugaaccu

SEQ ID NO: 1986815 - RNA, 13 nt, Human
aucuauagaaagu

SEQ ID NO: 1986816 - RNA, 14 nt, Human
aucuauagaaagug

SEQ ID NO: 1986817 - RNA, 15 nt, Human
aucuauagaaagugu

SEQ ID NO: 1986818 - RNA, 16 nt, Human
aucuauagaaaguguu

SEQ ID NO: 1986819 - RNA, 17 nt, Human
aucuauagaaaguguuc

SEQ ID NO: 1986820 - RNA, 22 nt, Human
aucuauagaaaguguucuguua

SEQ ID NO: 1986821 - RNA, 23 nt, Human
aucuauagaaaguguucuguuac

SEQ ID NO: 1986822 - RNA, 14 nt, Human
aucuuccucugcua

SEQ ID NO: 1986823 - RNA, 15 nt, Human
aucuuccucugcuaa

SEQ ID NO: 1986824 - RNA, 23 nt, Human
aucuuccuggucgaaaguuagua

SEQ ID NO: 1986825 - RNA, 16 nt, Human
aucuuccucugcuaaa

SEQ ID NO: 1986826 - RNA, 18 nt, Human
aucuuccucugcuaaauu

SEQ ID NO: 1986827 - RNA, 19 nt, Human
aucuuccucugcuaaauug

SEQ ID NO: 1986828 - RNA, 20 nt, Human
aucuuccucugcuaaauuga

SEQ ID NO: 1986829 - RNA, 18 nt, Human
aucuuccuggucgaaagu

SEQ ID NO: 1986830 - RNA, 19 nt, Human
aucuuccuggucgaaaguu

SEQ ID NO: 1986831 - RNA, 20 nt, Human
aucuuccuggucgaaaguua

SEQ ID NO: 1986832 - RNA, 22 nt, Human
aucuuccuggucgaaaguuagu

SEQ ID NO: 1986833 - RNA, 19 nt, Human
aucuggagagcccagaguc

SEQ ID NO: 1986834 - RNA, 18 nt, Human
aucuggagucuuugauaa

SEQ ID NO: 1986835 - RNA, 18 nt, Human
aucuggaguucucaaaga

SEQ ID NO: 1986836 - RNA, 22 nt, Human
aucucugcaggaaauggcugug

SEQ ID NO: 1986837 - RNA, 22 nt, Human
aucuggacuccucuguccaggc

SEQ ID NO: 1986838 - RNA, 16 nt, Human
aucucugcuuuggaaa

SEQ ID NO: 1986839 - RNA, 15 nt, Human
aucuuauuaaaguuu

SEQ ID NO: 1986840 - RNA, 16 nt, Human
aucuuauuaaaguuuc

SEQ ID NO: 1986841 - RNA, 18 nt, Human
aucuuauuaaaguuucaa

SEQ ID NO: 1986842 - RNA, 19 nt, Human
aucuuauuaaaguuucaaa

SEQ ID NO: 1986843 - RNA, 20 nt, Human
aucuuauuaaaguuucaaaa

SEQ ID NO: 1986844 - RNA, 22 nt, Human
aucuuauuaaaguuucaaaaau

SEQ ID NO: 1986845 - RNA, 23 nt, Human
aucuuauuaaaguuucaaaaauc

SEQ ID NO: 1986846 - RNA, 18 nt, Human
aucugggggccucuucug

SEQ ID NO: 1986847 - RNA, 14 nt, Human
aucuuauuaaaguu

SEQ ID NO: 1986848 - RNA, 14 nt, Human
aucuggguagcugu

SEQ ID NO: 1986849 - RNA, 15 nt, Human
aucuggguagcugua

SEQ ID NO: 1986850 - RNA, 17 nt, Human
aucuggguagcuguaag

SEQ ID NO: 1986851 - RNA, 18 nt, Human
aucuggguagcuguaagg

SEQ ID NO: 1986852 - RNA, 21 nt, Human
auauuucccugaaggaaccaa

SEQ ID NO: 1986853 - RNA, 18 nt, Human
auauuuccuauaccauuu

SEQ ID NO: 1986854 - RNA, 23 nt, Human
auauuuccuauaccauuuccgua

SEQ ID NO: 1986855 - RNA, 21 nt, Human
auauuuccuauaccauuuccg

SEQ ID NO: 1986856 - RNA, 22 nt, Human
auauuuccuauaccauuuccgu

SEQ ID NO: 1986857 - RNA, 23 nt, Human
aucaaagagguuuuaaaaaaauc

SEQ ID NO: 1986858 - RNA, 20 nt, Human
aucaaagagguuuuaaaaaa

SEQ ID NO: 1986859 - RNA, 16 nt, Human
aucaaagccacacucu

SEQ ID NO: 1986860 - RNA, 14 nt, Human
aucaaagccacacu

SEQ ID NO: 1986861 - RNA, 14 nt, Human
aucaaauauauuca

SEQ ID NO: 1986862 - RNA, 13 nt, Human
aucacagccucug

SEQ ID NO: 1986863 - RNA, 22 nt, Human
aucaaauauauucagccuggcu

SEQ ID NO: 1986864 - RNA, 20 nt, Human
aucaccaacgucugugccau

SEQ ID NO: 1986865 - RNA, 13 nt, Human
aucaccagacagg

SEQ ID NO: 1986866 - RNA, 23 nt, Human
aucacccgcuaagagggagggag

SEQ ID NO: 1986867 - RNA, 13 nt, Human
aucaccagggcca

SEQ ID NO: 1986868 - RNA, 19 nt, Human
aucaccgaugcaaacauug

SEQ ID NO: 1986869 - RNA, 17 nt, Human
aucaccuaauuaauuuc

SEQ ID NO: 1986870 - RNA, 20 nt, Human
aucaccuaauuaauuucagu

SEQ ID NO: 1986871 - RNA, 15 nt, Human
aucaugaauaacuga

SEQ ID NO: 1986872 - RNA, 23 nt, Human
aucaugaauaacugauuaguaag

SEQ ID NO: 1986873 - RNA, 12 nt, Human
aucaugugaaau

SEQ ID NO: 1986874 - RNA, 14 nt, Human
aucaugucuggcua

SEQ ID NO: 1986875 - RNA, 14 nt, Human
aucgccagcaaaac

SEQ ID NO: 1986876 - RNA, 18 nt, Human
aucgcccuggcaggcagg

SEQ ID NO: 1986877 - RNA, 18 nt, Human
auccuuucacuucuuucc

SEQ ID NO: 1986878 - RNA, 19 nt, Human
auccuuucacuucuuuccc

SEQ ID NO: 1986879 - RNA, 20 nt, Human
auccuuucacuucuuucccu

SEQ ID NO: 1986880 - RNA, 22 nt, Human
auccuuucacuucuuucccuuc

SEQ ID NO: 1986881 - RNA, 19 nt, Human
auccuuguguuuaucagaa

SEQ ID NO: 1986882 - RNA, 15 nt, Human
auccuugucaguugu

SEQ ID NO: 1986883 - RNA, 14 nt, Human
auccuugacuuuuu

SEQ ID NO: 1986884 - RNA, 15 nt, Human
auccuugacuuuuua

SEQ ID NO: 1986885 - RNA, 12 nt, Human
auccuucccacu

SEQ ID NO: 1986886 - RNA, 17 nt, Human
auccucauacccacccc

SEQ ID NO: 1986887 - RNA, 21 nt, Human
auccuuaucuaguguuugauu

SEQ ID NO: 1986888 - RNA, 18 nt, Human
auccuuacaaaugauugc

SEQ ID NO: 1986889 - RNA, 21 nt, Human
auccuuacaaaugauugcuuu

SEQ ID NO: 1986890 - RNA, 16 nt, Human
auccuuacaaaugauu

SEQ ID NO: 1986891 - RNA, 17 nt, Human
auccuuacaaaugauug

SEQ ID NO: 1986892 - RNA, 19 nt, Human
auccagacccggcugcgug

SEQ ID NO: 1986893 - RNA, 13 nt, Human
auccacucgccuu

SEQ ID NO: 1986894 - RNA, 16 nt, Human
auccaccguccccucc

SEQ ID NO: 1986895 - RNA, 19 nt, Human
auccaccguccccucccag

SEQ ID NO: 1986896 - RNA, 18 nt, Human
auccccaagccuggcaag

SEQ ID NO: 1986897 - RNA, 19 nt, Human
aucccaugagccucagcau

SEQ ID NO: 1986898 - RNA, 19 nt, Human
auccucaguuuuugugaaa

SEQ ID NO: 1986899 - RNA, 15 nt, Human
aucccggcugcccuu

SEQ ID NO: 1986900 - RNA, 20 nt, Human
auccccagacuucauagaau

SEQ ID NO: 1986901 - RNA, 14 nt, Human
aucccgugcuuuua

SEQ ID NO: 1986902 - RNA, 13 nt, Human
augcacacauuuu

SEQ ID NO: 1986903 - RNA, 14 nt, Human
augcacacauuuuu

SEQ ID NO: 1986904 - RNA, 15 nt, Human
augcacacauuuuuu

SEQ ID NO: 1986905 - RNA, 19 nt, Human
augcacagaguuguuacau

SEQ ID NO: 1986906 - RNA, 21 nt, Human
augcacagaguuguuacauuu

SEQ ID NO: 1986907 - RNA, 22 nt, Human
augcacagaguuguuacauuuu

SEQ ID NO: 1986908 - RNA, 23 nt, Human
augcacagaguuguuacauuuuu

SEQ ID NO: 1986909 - RNA, 20 nt, Human
augccuggauggggcugcac

SEQ ID NO: 1986910 - RNA, 19 nt, Human
augccugcucuuuggccug

SEQ ID NO: 1986911 - RNA, 19 nt, Human
augccuggauggggcugca

SEQ ID NO: 1986912 - RNA, 12 nt, Human
augccugcucuu

SEQ ID NO: 1986913 - RNA, 17 nt, Human
augcauuaaaagaaaau

SEQ ID NO: 1986914 - RNA, 20 nt, Human
augcauuaaaagaaaauaaa

SEQ ID NO: 1986915 - RNA, 15 nt, Human
augcauuaaaagaaa

SEQ ID NO: 1986916 - RNA, 16 nt, Human
augcauuaaaagaaaa

SEQ ID NO: 1986917 - RNA, 19 nt, Human
augccugucuuaauuuucu

SEQ ID NO: 1986918 - RNA, 18 nt, Human
augaucuuugcagacagg

SEQ ID NO: 1986919 - RNA, 19 nt, Human
augaucuuugcagacaggc

SEQ ID NO: 1986920 - RNA, 13 nt, Human
augaugaaaauau

SEQ ID NO: 1986921 - RNA, 15 nt, Human
augaugaaaauauuu

SEQ ID NO: 1986922 - RNA, 21 nt, Human
augaucuuugcagacaggcaa

SEQ ID NO: 1986923 - RNA, 17 nt, Human
augaucuuugcagacag

SEQ ID NO: 1986924 - RNA, 23 nt, Human
augcacaaauucugucucuggau

SEQ ID NO: 1986925 - RNA, 14 nt, Human
augcacaauuccau

SEQ ID NO: 1986926 - RNA, 22 nt, Human
augcacaaauucugucucugga

SEQ ID NO: 1986927 - RNA, 15 nt, Human
augcacaaauucugu

SEQ ID NO: 1986928 - RNA, 16 nt, Human
augaugggucaguugu

SEQ ID NO: 1986929 - RNA, 20 nt, Human
augaugguuuccaauuucau

SEQ ID NO: 1986930 - RNA, 18 nt, Human
augcacaaacagaggccg

SEQ ID NO: 1986931 - RNA, 15 nt, Human
augaugauccuaggc

SEQ ID NO: 1986932 - RNA, 14 nt, Human
augaugauuucaga

SEQ ID NO: 1986933 - RNA, 23 nt, Human
augaugaaaugaggucagagccu

SEQ ID NO: 1986934 - RNA, 19 nt, Human
augaugaaaauauuuaaag

SEQ ID NO: 1986935 - RNA, 18 nt, Human
augaugaaaugaggucag

SEQ ID NO: 1986936 - RNA, 13 nt, Human
augcugacccaug

SEQ ID NO: 1986937 - RNA, 16 nt, Human
augcugacccaugggc

SEQ ID NO: 1986938 - RNA, 19 nt, Human
augcugacuguacuccucc

SEQ ID NO: 1986939 - RNA, 20 nt, Human
augcugacuguacuccuccc

SEQ ID NO: 1986940 - RNA, 21 nt, Human
augcugacuguacuccuccca

SEQ ID NO: 1986941 - RNA, 17 nt, Human
augcugacccaugggca

SEQ ID NO: 1986942 - RNA, 19 nt, Human
augcugacccaugggcagg

SEQ ID NO: 1986943 - RNA, 15 nt, Human
augcugcccugugag

SEQ ID NO: 1986944 - RNA, 14 nt, Human
augcugcccuguga

SEQ ID NO: 1986945 - RNA, 13 nt, Human
augcugcccugug

SEQ ID NO: 1986946 - RNA, 16 nt, Human
augcugcccugugagu

SEQ ID NO: 1986947 - RNA, 12 nt, Human
augcugccucca

SEQ ID NO: 1986948 - RNA, 15 nt, Human
augcugccuccagaa

SEQ ID NO: 1986949 - RNA, 18 nt, Human
auggcuuuugugcauuau

SEQ ID NO: 1986950 - RNA, 16 nt, Human
auggcuuuugugcauu

SEQ ID NO: 1986951 - RNA, 17 nt, Human
auggcuuuugugcauua

SEQ ID NO: 1986952 - RNA, 18 nt, Human
auggcuggagcuagaauu

SEQ ID NO: 1986953 - RNA, 15 nt, Human
auggcugugccucug

SEQ ID NO: 1986954 - RNA, 16 nt, Human
auggcugugccucugc

SEQ ID NO: 1986955 - RNA, 17 nt, Human
auggcugugccucugcc

SEQ ID NO: 1986956 - RNA, 17 nt, Human
auggauaggcacaggaa

SEQ ID NO: 1986957 - RNA, 18 nt, Human
auggauaggcacaggaaa

SEQ ID NO: 1986958 - RNA, 16 nt, Human
augcuuguacauaaug

SEQ ID NO: 1986959 - RNA, 15 nt, Human
augcuuguacauaau

SEQ ID NO: 1986960 - RNA, 15 nt, Human
augcuuguguuucuu

SEQ ID NO: 1986961 - RNA, 14 nt, Human
augcuuuagcuuau

SEQ ID NO: 1986962 - RNA, 15 nt, Human
augcuuuagcuuauu

SEQ ID NO: 1986963 - RNA, 18 nt, Human
augcuuuaggauguacag

SEQ ID NO: 1986964 - RNA, 12 nt, Human
augguaguuucu

SEQ ID NO: 1986965 - RNA, 13 nt, Human
augguaguuucug

SEQ ID NO: 1986966 - RNA, 15 nt, Human
augguaguuucugug

SEQ ID NO: 1986967 - RNA, 18 nt, Human
augguaguuucugugguu

SEQ ID NO: 1986968 - RNA, 19 nt, Human
augguaguuucugugguug

SEQ ID NO: 1986969 - RNA, 22 nt, Human
augguaguuucugugguuggcu

SEQ ID NO: 1986970 - RNA, 23 nt, Human
augguaguuucugugguuggcug

SEQ ID NO: 1986971 - RNA, 15 nt, Human
augguaguuuuacag

SEQ ID NO: 1986972 - RNA, 21 nt, Human
augguaguuuuacaguguuuc

SEQ ID NO: 1986973 - RNA, 22 nt, Human
augguaguuuuacaguguuucu

SEQ ID NO: 1986974 - RNA, 15 nt, Human
augguccauagcacu

SEQ ID NO: 1986975 - RNA, 15 nt, Human
augguaaucauauua

SEQ ID NO: 1986976 - RNA, 15 nt, Human
augguaaaauuuugu

SEQ ID NO: 1986977 - RNA, 21 nt, Human
auggguguuguauggggaggc

SEQ ID NO: 1986978 - RNA, 23 nt, Human
augggugcuuggaggaaggaaac

SEQ ID NO: 1986979 - RNA, 21 nt, Human
augggugcuuggaggaaggaa

SEQ ID NO: 1986980 - RNA, 20 nt, Human
augggugcuuggaggaagga

SEQ ID NO: 1986981 - RNA, 14 nt, Human
augugaaaucauuc

SEQ ID NO: 1986982 - RNA, 14 nt, Human
augugaaacauguu

SEQ ID NO: 1986983 - RNA, 19 nt, Human
augucacaggcagguccag

SEQ ID NO: 1986984 - RNA, 18 nt, Human
augucaaugaacaagcau

SEQ ID NO: 1986985 - RNA, 16 nt, Human
augugaacagcggcug

SEQ ID NO: 1986986 - RNA, 18 nt, Human
augugaaaucauucauuu

SEQ ID NO: 1986987 - RNA, 17 nt, Human
augugaaaucauucauu

SEQ ID NO: 1986988 - RNA, 20 nt, Human
auguaacuuugguuaaaauc

SEQ ID NO: 1986989 - RNA, 12 nt, Human
auguaauuuugu

SEQ ID NO: 1986990 - RNA, 13 nt, Human
auguaauuugugu

SEQ ID NO: 1986991 - RNA, 18 nt, Human
auguaacuguuaccauug

SEQ ID NO: 1986992 - RNA, 21 nt, Human
auguaacuguuaccauuggaa

SEQ ID NO: 1986993 - RNA, 22 nt, Human
auguaacuguuaccauuggaaa

SEQ ID NO: 1986994 - RNA, 23 nt, Human
auguaacuguuaccauuggaaau

SEQ ID NO: 1986995 - RNA, 15 nt, Human
auguaacugcucuug

SEQ ID NO: 1986996 - RNA, 20 nt, Human
auguaacugcucuugggcaa

SEQ ID NO: 1986997 - RNA, 13 nt, Human
auguaacuguuac

SEQ ID NO: 1986998 - RNA, 14 nt, Human
auguaacuguuacc

SEQ ID NO: 1986999 - RNA, 17 nt, Human
auguaacuguuaccauu

SEQ ID NO: 1987000 - RNA, 14 nt, Human
auguaacugcucuu

SEQ ID NO: 1987001 - RNA, 15 nt, Human
auguaauuuugugua

SEQ ID NO: 1987002 - RNA, 16 nt, Human
auguaauuuuguguaa

SEQ ID NO: 1987003 - RNA, 17 nt, Human
auguaauuuuguguaag

SEQ ID NO: 1987004 - RNA, 22 nt, Human
auguaauuuuguguaagaaaua

SEQ ID NO: 1987005 - RNA, 23 nt, Human
auguaauuuuguguaagaaauac

SEQ ID NO: 1987006 - RNA, 13 nt, Human
augucacaggcag

SEQ ID NO: 1987007 - RNA, 19 nt, Human
auguguaagacaaaaagcu

SEQ ID NO: 1987008 - RNA, 17 nt, Human
auguguaagacaaaaag

SEQ ID NO: 1987009 - RNA, 13 nt, Human
auguguaaguauu

SEQ ID NO: 1987010 - RNA, 15 nt, Human
auguucccacuucaa

SEQ ID NO: 1987011 - RNA, 13 nt, Human
auguucccuccgg

SEQ ID NO: 1987012 - RNA, 15 nt, Human
auguucugggacaca

SEQ ID NO: 1987013 - RNA, 17 nt, Human
auguucucugaggacac

SEQ ID NO: 1987014 - RNA, 14 nt, Human
auguucugggacac

SEQ ID NO: 1987015 - RNA, 16 nt, Human
auguucucucuucucc

SEQ ID NO: 1987016 - RNA, 17 nt, Human
auguucucucuucucca

SEQ ID NO: 1987017 - RNA, 13 nt, Human
auguucucugagg

SEQ ID NO: 1987018 - RNA, 14 nt, Human
auguucuuaauucu

SEQ ID NO: 1987019 - RNA, 14 nt, Human
auguuuccuucccu

SEQ ID NO: 1987020 - RNA, 15 nt, Human
auguuuccuucccuc

SEQ ID NO: 1987021 - RNA, 13 nt, Human
auguuucuaaggu

SEQ ID NO: 1987022 - RNA, 15 nt, Human
auguuugccucugcc

SEQ ID NO: 1987023 - RNA, 17 nt, Human
auguuugccucugccuc

SEQ ID NO: 1987024 - RNA, 14 nt, Human
auguuugccucugc

SEQ ID NO: 1987025 - RNA, 14 nt, Human
cucuuggagccugc

SEQ ID NO: 1987026 - RNA, 20 nt, Human
cugaaaaccucuccucaugu

SEQ ID NO: 1987027 - RNA, 17 nt, Human
cugaaaaccucuccuca

SEQ ID NO: 1987028 - RNA, 15 nt, Human
cugaaaaccucuccu

SEQ ID NO: 1987029 - RNA, 14 nt, Human
cugaaaaccucucc

SEQ ID NO: 1987030 - RNA, 15 nt, Human
cucuuggagccugca

SEQ ID NO: 1987031 - RNA, 16 nt, Human
cucuugccacugccuc

SEQ ID NO: 1987032 - RNA, 17 nt, Human
cucuugccacugccucu

SEQ ID NO: 1987033 - RNA, 18 nt, Human
cucuugccacugccucuu

SEQ ID NO: 1987034 - RNA, 19 nt, Human
cucuugccacugccucuuc

SEQ ID NO: 1987035 - RNA, 20 nt, Human
cucuugccacugccucuucc

SEQ ID NO: 1987036 - RNA, 18 nt, Human
cugaaggccccgcccagg

SEQ ID NO: 1987037 - RNA, 17 nt, Human
cugaaggccccgcccag

SEQ ID NO: 1987038 - RNA, 14 nt, Human
cugaaggccccgcc

SEQ ID NO: 1987039 - RNA, 13 nt, Human
cugaaggccccgc

SEQ ID NO: 1987040 - RNA, 19 nt, Human
cugaaggacauugcggaca

SEQ ID NO: 1987041 - RNA, 20 nt, Human
cugaaggacauugcggacag

SEQ ID NO: 1987042 - RNA, 21 nt, Human
cugaaggacauugcggacagc

SEQ ID NO: 1987043 - RNA, 16 nt, Human
cugaaggaggccaccu

SEQ ID NO: 1987044 - RNA, 17 nt, Human
cugaaggaggccaccuc

SEQ ID NO: 1987045 - RNA, 18 nt, Human
cugaaggaggccaccucc

SEQ ID NO: 1987046 - RNA, 19 nt, Human
cugaaggaggccaccuccu

SEQ ID NO: 1987047 - RNA, 16 nt, Human
cugaaaauguaugugu

SEQ ID NO: 1987048 - RNA, 22 nt, Human
cugaaggaauaaauugcuccuu

SEQ ID NO: 1987049 - RNA, 15 nt, Human
cugacagacacaggc

SEQ ID NO: 1987050 - RNA, 18 nt, Human
cugacagaaucucugaau

SEQ ID NO: 1987051 - RNA, 12 nt, Human
cugacagacaca

SEQ ID NO: 1987052 - RNA, 14 nt, Human
cugacagacacagg

SEQ ID NO: 1987053 - RNA, 14 nt, Human
cugacagaaggacu

SEQ ID NO: 1987054 - RNA, 19 nt, Human
cugaagggguuuucuugau

SEQ ID NO: 1987055 - RNA, 20 nt, Human
cugaagggguuuucuugaua

SEQ ID NO: 1987056 - RNA, 16 nt, Human
cugaagggguuuucuu

SEQ ID NO: 1987057 - RNA, 18 nt, Human
cugaagggguuuucuuga

SEQ ID NO: 1987058 - RNA, 12 nt, Human
cugaccucaaau

SEQ ID NO: 1987059 - RNA, 15 nt, Human
cugaccuuaaaugca

SEQ ID NO: 1987060 - RNA, 19 nt, Human
cugaccuuaaaugcaacca

SEQ ID NO: 1987061 - RNA, 20 nt, Human
cugacccaugcugcccugug

SEQ ID NO: 1987062 - RNA, 19 nt, Human
cugacccaugcugcccugu

SEQ ID NO: 1987063 - RNA, 17 nt, Human
cugacccaugcugcccu

SEQ ID NO: 1987064 - RNA, 18 nt, Human
cugacccaugcugcccug

SEQ ID NO: 1987065 - RNA, 23 nt, Human
cugacccugcuucaaauauuucc

SEQ ID NO: 1987066 - RNA, 18 nt, Human
cucugguccauagagagc

SEQ ID NO: 1987067 - RNA, 16 nt, Human
cucugguccauagaga

SEQ ID NO: 1987068 - RNA, 19 nt, Human
cucugguccauagagagca

SEQ ID NO: 1987069 - RNA, 15 nt, Human
cucugguuaucuaau

SEQ ID NO: 1987070 - RNA, 14 nt, Human
cucugguuccuccc

SEQ ID NO: 1987071 - RNA, 17 nt, Human
cucugcugacagacaca

SEQ ID NO: 1987072 - RNA, 18 nt, Human
cucugcugacagacacag

SEQ ID NO: 1987073 - RNA, 19 nt, Human
cucugcugacagacacagg

SEQ ID NO: 1987074 - RNA, 15 nt, Human
cucugguccauagag

SEQ ID NO: 1987075 - RNA, 21 nt, Human
cucuguacagagcccacgccc

SEQ ID NO: 1987076 - RNA, 17 nt, Human
cucuguacagagcccac

SEQ ID NO: 1987077 - RNA, 16 nt, Human
cucuguacauauuagc

SEQ ID NO: 1987078 - RNA, 18 nt, Human
cucuguacauauuagcga

SEQ ID NO: 1987079 - RNA, 22 nt, Human
cucuuagaaaaggugauaaaau

SEQ ID NO: 1987080 - RNA, 13 nt, Human
cucugcuaaauug

SEQ ID NO: 1987081 - RNA, 17 nt, Human
cucugcuaaauugaugu

SEQ ID NO: 1987082 - RNA, 20 nt, Human
cucugcuaaauugauguuga

SEQ ID NO: 1987083 - RNA, 22 nt, Human
cucugcuccaaccgggauggga

SEQ ID NO: 1987084 - RNA, 23 nt, Human
cucugcagcaauaaagcagcguu

SEQ ID NO: 1987085 - RNA, 18 nt, Human
cucugcagcaauaaagca

SEQ ID NO: 1987086 - RNA, 19 nt, Human
cucugcagcaauaaagcag

SEQ ID NO: 1987087 - RNA, 14 nt, Human
cucugcacuccccu

SEQ ID NO: 1987088 - RNA, 20 nt, Human
cucgggauuaguacacacuu

SEQ ID NO: 1987089 - RNA, 14 nt, Human
cuccgcuucccugg

SEQ ID NO: 1987090 - RNA, 20 nt, Human
cucuauuccccacccucccc

SEQ ID NO: 1987091 - RNA, 14 nt, Human
cucuauuucccccu

SEQ ID NO: 1987092 - RNA, 17 nt, Human
cucuauuucccccuuuc

SEQ ID NO: 1987093 - RNA, 18 nt, Human
cucuauuucccccuuucu

SEQ ID NO: 1987094 - RNA, 23 nt, Human
cucuauuuagaugcauauuacug

SEQ ID NO: 1987095 - RNA, 22 nt, Human
cucuauuucccccuuucuuccu

SEQ ID NO: 1987096 - RNA, 23 nt, Human
cucuauuucccccuuucuuccuc

SEQ ID NO: 1987097 - RNA, 14 nt, Human
cucucacuccuuga

SEQ ID NO: 1987098 - RNA, 12 nt, Human
cucucacuccuu

SEQ ID NO: 1987099 - RNA, 19 nt, Human
cucucagauuguaccauug

SEQ ID NO: 1987100 - RNA, 21 nt, Human
cucucacuuguuuuauuuaac

SEQ ID NO: 1987101 - RNA, 14 nt, Human
cucucacugccucc

SEQ ID NO: 1987102 - RNA, 15 nt, Human
cucucacuccuugaa

SEQ ID NO: 1987103 - RNA, 12 nt, Human
cucucuggccuu

SEQ ID NO: 1987104 - RNA, 20 nt, Human
cucuccucauguucugcuuu

SEQ ID NO: 1987105 - RNA, 11 nt, Human
cucucuggccu

SEQ ID NO: 1987106 - RNA, 15 nt, Human
cucugaaggacauug

SEQ ID NO: 1987107 - RNA, 15 nt, Human
cucucagaggcccca

SEQ ID NO: 1987108 - RNA, 18 nt, Human
cucuccgccccugagccc

SEQ ID NO: 1987109 - RNA, 20 nt, Human
cucuccgccccugagcccac

SEQ ID NO: 1987110 - RNA, 21 nt, Human
cucuccgaccagacaccuuga

SEQ ID NO: 1987111 - RNA, 17 nt, Human
cucuccgccccugagcc

SEQ ID NO: 1987112 - RNA, 12 nt, Human
cucauguucuua

SEQ ID NO: 1987113 - RNA, 14 nt, Human
cucauguucuuaau

SEQ ID NO: 1987114 - RNA, 18 nt, Human
cucauguucuuaauucuu

SEQ ID NO: 1987115 - RNA, 19 nt, Human
cucauguucuuaauucuua

SEQ ID NO: 1987116 - RNA, 18 nt, Human
cucaugccucagccuccu

SEQ ID NO: 1987117 - RNA, 20 nt, Human
cucaugccucagccuccuga

SEQ ID NO: 1987118 - RNA, 12 nt, Human
cucaugcugccc

SEQ ID NO: 1987119 - RNA, 14 nt, Human
cucaugcugccccu

SEQ ID NO: 1987120 - RNA, 18 nt, Human
cucaugcugccccugccu

SEQ ID NO: 1987121 - RNA, 19 nt, Human
cucaugcugccccugccuu

SEQ ID NO: 1987122 - RNA, 20 nt, Human
cucaugcugccccugccuug

SEQ ID NO: 1987123 - RNA, 15 nt, Human
cuccaaccccucgcc

SEQ ID NO: 1987124 - RNA, 18 nt, Human
cuccaaccccucgcccag

SEQ ID NO: 1987125 - RNA, 19 nt, Human
cuccaaccccucgcccagu

SEQ ID NO: 1987126 - RNA, 20 nt, Human
cuccaaccccucgcccaguc

SEQ ID NO: 1987127 - RNA, 14 nt, Human
cuccaacauccacu

SEQ ID NO: 1987128 - RNA, 16 nt, Human
cuccaaagucucugga

SEQ ID NO: 1987129 - RNA, 22 nt, Human
cuccaaaguauuguacaaauaa

SEQ ID NO: 1987130 - RNA, 21 nt, Human
cucaucuugacagagccugcc

SEQ ID NO: 1987131 - RNA, 22 nt, Human
cucaucuugacagagccugccc

SEQ ID NO: 1987132 - RNA, 13 nt, Human
cucagugccacua

SEQ ID NO: 1987133 - RNA, 18 nt, Human
cucagucuggcccuuccu

SEQ ID NO: 1987134 - RNA, 17 nt, Human
cucagucuggcccuucc

SEQ ID NO: 1987135 - RNA, 21 nt, Human
cucaggccugggggcugggca

SEQ ID NO: 1987136 - RNA, 20 nt, Human
cucaggccugggggcugggc

SEQ ID NO: 1987137 - RNA, 14 nt, Human
cucaggccuggggg

SEQ ID NO: 1987138 - RNA, 16 nt, Human
cucaggcccaaagccu

SEQ ID NO: 1987139 - RNA, 13 nt, Human
cucaggccugggg

SEQ ID NO: 1987140 - RNA, 22 nt, Human
cucagccucccaaagugcuggg

SEQ ID NO: 1987141 - RNA, 13 nt, Human
cucagccucccga

SEQ ID NO: 1987142 - RNA, 23 nt, Human
cucagccucccgaauagcuggga

SEQ ID NO: 1987143 - RNA, 21 nt, Human
cucagccucccaaagugcugg

SEQ ID NO: 1987144 - RNA, 17 nt, Human
cuaucccggcugcccuu

SEQ ID NO: 1987145 - RNA, 14 nt, Human
cucagccucccaaa

SEQ ID NO: 1987146 - RNA, 16 nt, Human
cucagccucccaaagu

SEQ ID NO: 1987147 - RNA, 13 nt, Human
cucagccucccaa

SEQ ID NO: 1987148 - RNA, 15 nt, Human
cuaucccggcugccc

SEQ ID NO: 1987149 - RNA, 16 nt, Human
cuaucccggcugcccu

SEQ ID NO: 1987150 - RNA, 12 nt, Human
cucagccuccug

SEQ ID NO: 1987151 - RNA, 13 nt, Human
cucagccuccuga

SEQ ID NO: 1987152 - RNA, 22 nt, Human
cucaggccagcugcuugggcuu

SEQ ID NO: 1987153 - RNA, 21 nt, Human
cucaggccagcugcuugggcu

SEQ ID NO: 1987154 - RNA, 20 nt, Human
cucaggccagcugcuugggc

SEQ ID NO: 1987155 - RNA, 15 nt, Human
cucaggccagcugcu

SEQ ID NO: 1987156 - RNA, 14 nt, Human
cucaggccagcugc

SEQ ID NO: 1987157 - RNA, 13 nt, Human
cucaggccagcug

SEQ ID NO: 1987158 - RNA, 14 nt, Human
cucagcgaaugaau

SEQ ID NO: 1987159 - RNA, 13 nt, Human
cucagcggggaca

SEQ ID NO: 1987160 - RNA, 19 nt, Human
cuccagacacauguccaag

SEQ ID NO: 1987161 - RNA, 17 nt, Human
cuccagacacaugucca

SEQ ID NO: 1987162 - RNA, 23 nt, Human
cuccagaagauagcuucacccca

SEQ ID NO: 1987163 - RNA, 18 nt, Human
cuccagaauuucccaaag

SEQ ID NO: 1987164 - RNA, 15 nt, Human
cuccagaauuuccca

SEQ ID NO: 1987165 - RNA, 15 nt, Human
cuccagaagauagcu

SEQ ID NO: 1987166 - RNA, 14 nt, Human
cuccagaagauagc

SEQ ID NO: 1987167 - RNA, 16 nt, Human
cuccagaacucuuccu

SEQ ID NO: 1987168 - RNA, 17 nt, Human
cuccagaacucuuccuc

SEQ ID NO: 1987169 - RNA, 19 nt, Human
cuccagaacucuuccucca

SEQ ID NO: 1987170 - RNA, 22 nt, Human
cuccaaccgggaugggagccgg

SEQ ID NO: 1987171 - RNA, 19 nt, Human
cuccagaaaugucccuuuc

SEQ ID NO: 1987172 - RNA, 20 nt, Human
cuccagaaaugucccuuucu

SEQ ID NO: 1987173 - RNA, 22 nt, Human
cuccacuuucuagccagaggag

SEQ ID NO: 1987174 - RNA, 18 nt, Human
cuccaagaccuucuccuu

SEQ ID NO: 1987175 - RNA, 17 nt, Human
cuccaagaccuucuccu

SEQ ID NO: 1987176 - RNA, 23 nt, Human
cuccaaccccucgcccaguccca

SEQ ID NO: 1987177 - RNA, 19 nt, Human
cuccaaccgggaugggagc

SEQ ID NO: 1987178 - RNA, 16 nt, Human
cuccaagaccuucucc

SEQ ID NO: 1987179 - RNA, 11 nt, Human
cuccaggugca

SEQ ID NO: 1987180 - RNA, 22 nt, Human
cuccagucauuauguuaauauu

SEQ ID NO: 1987181 - RNA, 14 nt, Human
cuccaguccccaga

SEQ ID NO: 1987182 - RNA, 15 nt, Human
cuccaguccccagaa

SEQ ID NO: 1987183 - RNA, 16 nt, Human
cuccaguccccagaac

SEQ ID NO: 1987184 - RNA, 19 nt, Human
cuccgcuuucuacccagcg

SEQ ID NO: 1987185 - RNA, 15 nt, Human
cuccgccucccgggu

SEQ ID NO: 1987186 - RNA, 12 nt, Human
cucccaccucag

SEQ ID NO: 1987187 - RNA, 13 nt, Human
cucccaccucagc

SEQ ID NO: 1987188 - RNA, 17 nt, Human
cuccaguccccagaacu

SEQ ID NO: 1987189 - RNA, 23 nt, Human
cuccaguccccagaacucugccu

SEQ ID NO: 1987190 - RNA, 21 nt, Human
cuccagugagacagcucugca

SEQ ID NO: 1987191 - RNA, 18 nt, Human
cucccuccgggucuuccu

SEQ ID NO: 1987192 - RNA, 19 nt, Human
cucccuccgggucuuccua

SEQ ID NO: 1987193 - RNA, 16 nt, Human
cuccccucagagugca

SEQ ID NO: 1987194 - RNA, 13 nt, Human
cuccccucagagu

SEQ ID NO: 1987195 - RNA, 20 nt, Human
cuccccgcaguguuugugug

SEQ ID NO: 1987196 - RNA, 14 nt, Human
cucccccuuuuccc

SEQ ID NO: 1987197 - RNA, 15 nt, Human
cucccccuuuucccu

SEQ ID NO: 1987198 - RNA, 23 nt, Human
cuccccgccguacaguucuccag

SEQ ID NO: 1987199 - RNA, 20 nt, Human
cucccuccgggucuuccuac

SEQ ID NO: 1987200 - RNA, 24 nt, Human
cucccugacugggggcagacaugg

SEQ ID NO: 1987201 - RNA, 22 nt, Human
cucccugacugggggcagacau

SEQ ID NO: 1987202 - RNA, 18 nt, Human
cuaaagauagaguaaaaa

SEQ ID NO: 1987203 - RNA, 15 nt, Human
cuaacuucaccauau

SEQ ID NO: 1987204 - RNA, 12 nt, Human
cuaagaaacauu

SEQ ID NO: 1987205 - RNA, 13 nt, Human
cuaagaaacauug

SEQ ID NO: 1987206 - RNA, 14 nt, Human
cuaagaaacauugg

SEQ ID NO: 1987207 - RNA, 18 nt, Human
cuaagaaacauuggaagc

SEQ ID NO: 1987208 - RNA, 19 nt, Human
cuaagaaacauuggaagca

SEQ ID NO: 1987209 - RNA, 22 nt, Human
cuaagaaacauuggaagcaggu

SEQ ID NO: 1987210 - RNA, 19 nt, Human
cuaacuugcuuaaauguga

SEQ ID NO: 1987211 - RNA, 17 nt, Human
cuaacuugcuuaaaugu

SEQ ID NO: 1987212 - RNA, 18 nt, Human
cuaacuugcuuaaaugug

SEQ ID NO: 1987213 - RNA, 17 nt, Human
cuaacuucuaaaacugu

SEQ ID NO: 1987214 - RNA, 18 nt, Human
cuaacuucuaaaacugua

SEQ ID NO: 1987215 - RNA, 14 nt, Human
cuaacuugcuuaaa

SEQ ID NO: 1987216 - RNA, 16 nt, Human
cuaacuugcuuaaaug

SEQ ID NO: 1987217 - RNA, 20 nt, Human
cuaacuugcuuaaaugugaa

SEQ ID NO: 1987218 - RNA, 16 nt, Human
cuaacuucaccauauu

SEQ ID NO: 1987219 - RNA, 13 nt, Human
cuaacuucuaaaa

SEQ ID NO: 1987220 - RNA, 16 nt, Human
cuaacuucuaaaacug

SEQ ID NO: 1987221 - RNA, 16 nt, Human
cgugaccuggucaggg

SEQ ID NO: 1987222 - RNA, 12 nt, Human
cgugaccugguc

SEQ ID NO: 1987223 - RNA, 23 nt, Human
cuaaacugcccccucugcccugc

SEQ ID NO: 1987224 - RNA, 22 nt, Human
cuaaacugcccccucugcccug

SEQ ID NO: 1987225 - RNA, 14 nt, Human
cguggucuuuuccu

SEQ ID NO: 1987226 - RNA, 13 nt, Human
cgugagaccugcc

SEQ ID NO: 1987227 - RNA, 14 nt, Human
cgugagaccugccc

SEQ ID NO: 1987228 - RNA, 16 nt, Human
cgugagaccugccccu

SEQ ID NO: 1987229 - RNA, 23 nt, Human
cgugagccaccgugccuggccac

SEQ ID NO: 1987230 - RNA, 20 nt, Human
cuaagugaaauaagccagac

SEQ ID NO: 1987231 - RNA, 23 nt, Human
cuaagugaaauaagccagacauc

SEQ ID NO: 1987232 - RNA, 18 nt, Human
cuacauacaauuccaaac

SEQ ID NO: 1987233 - RNA, 21 nt, Human
cuacauaaaauaaaucuacug

SEQ ID NO: 1987234 - RNA, 15 nt, Human
cuaccuccucuccug

SEQ ID NO: 1987235 - RNA, 16 nt, Human
cuaccuccucuccuga

SEQ ID NO: 1987236 - RNA, 15 nt, Human
cuacaugagguacug

SEQ ID NO: 1987237 - RNA, 13 nt, Human
cuacaguugaaaa

SEQ ID NO: 1987238 - RNA, 18 nt, Human
cuacaguccucccaucuc

SEQ ID NO: 1987239 - RNA, 17 nt, Human
cuacaguccucccaucu

SEQ ID NO: 1987240 - RNA, 16 nt, Human
cuacaguccucccauc

SEQ ID NO: 1987241 - RNA, 15 nt, Human
cuacaguccucccau

SEQ ID NO: 1987242 - RNA, 18 nt, Human
cuaagugaggaugaaaaa

SEQ ID NO: 1987243 - RNA, 20 nt, Human
cuaagugauccucccaccuc

SEQ ID NO: 1987244 - RNA, 22 nt, Human
cuaagugauccucccaccucag

SEQ ID NO: 1987245 - RNA, 16 nt, Human
cuagaacucccuuuca

SEQ ID NO: 1987246 - RNA, 17 nt, Human
cuagaacucccuuucaa

SEQ ID NO: 1987247 - RNA, 18 nt, Human
cuagaacucccuuucaac

SEQ ID NO: 1987248 - RNA, 19 nt, Human
cuagaacucccuuucaaca

SEQ ID NO: 1987249 - RNA, 22 nt, Human
cuagcagcagggagggcuucug

SEQ ID NO: 1987250 - RNA, 12 nt, Human
cuagcagcaggg

SEQ ID NO: 1987251 - RNA, 18 nt, Human
cuagccaccgccuccuac

SEQ ID NO: 1987252 - RNA, 19 nt, Human
cuagcauuucccaacacaa

SEQ ID NO: 1987253 - RNA, 17 nt, Human
cuagcauggcugccaau

SEQ ID NO: 1987254 - RNA, 23 nt, Human
cuagcagcagggagggcuucugc

SEQ ID NO: 1987255 - RNA, 19 nt, Human
cuagaaauuccccacccug

SEQ ID NO: 1987256 - RNA, 14 nt, Human
cuaccugaggggcc

SEQ ID NO: 1987257 - RNA, 11 nt, Human
cuaccugaggg

SEQ ID NO: 1987258 - RNA, 15 nt, Human
cuaccugaggggccu

SEQ ID NO: 1987259 - RNA, 13 nt, Human
cuagcccugcccg

SEQ ID NO: 1987260 - RNA, 13 nt, Human
cuagccucacgcu

SEQ ID NO: 1987261 - RNA, 22 nt, Human
cuagccucacgcuccuuucuga

SEQ ID NO: 1987262 - RNA, 23 nt, Human
cuagccucacgcuccuuucugau

SEQ ID NO: 1987263 - RNA, 19 nt, Human
cuagggaaaaaccagcgug

SEQ ID NO: 1987264 - RNA, 21 nt, Human
cuagggaaaaaccagcgugug

SEQ ID NO: 1987265 - RNA, 20 nt, Human
cuaguuccaccaucaagcca

SEQ ID NO: 1987266 - RNA, 18 nt, Human
cuaguuccaccaucaagc

SEQ ID NO: 1987267 - RNA, 13 nt, Human
cuauaacacugug

SEQ ID NO: 1987268 - RNA, 17 nt, Human
cuauaacacugugaaga

SEQ ID NO: 1987269 - RNA, 19 nt, Human
cuauaacacugugaagagc

SEQ ID NO: 1987270 - RNA, 23 nt, Human
cuaguugaauacuugaaccauaa

SEQ ID NO: 1987271 - RNA, 20 nt, Human
cuaguugaauacuugaacca

SEQ ID NO: 1987272 - RNA, 21 nt, Human
cuaguugaauacuugaaccau

SEQ ID NO: 1987273 - RNA, 13 nt, Human
cuauaaauuauau

SEQ ID NO: 1987274 - RNA, 22 nt, Human
cuaguuccaccaucaagccacc

SEQ ID NO: 1987275 - RNA, 12 nt, Human
cuaguugaauac

SEQ ID NO: 1987276 - RNA, 13 nt, Human
cuaguugaauacu

SEQ ID NO: 1987277 - RNA, 15 nt, Human
cuaguugaauacuug

SEQ ID NO: 1987278 - RNA, 17 nt, Human
cuaguugaauacuugaa

SEQ ID NO: 1987279 - RNA, 18 nt, Human
cuaguugaauacuugaac

SEQ ID NO: 1987280 - RNA, 19 nt, Human
cuauaacauagaauugcaa

SEQ ID NO: 1987281 - RNA, 20 nt, Human
cuauaacuacauauugaaua

SEQ ID NO: 1987282 - RNA, 18 nt, Human
ccuucuggccucccacag

SEQ ID NO: 1987283 - RNA, 20 nt, Human
ccuucuggccucccacagac

SEQ ID NO: 1987284 - RNA, 12 nt, Human
ccuucugggcau

SEQ ID NO: 1987285 - RNA, 22 nt, Human
ccuucugacccaugcugcccug

SEQ ID NO: 1987286 - RNA, 21 nt, Human
ccuucugacccaugcugcccu

SEQ ID NO: 1987287 - RNA, 23 nt, Human
ccuucugacccaugcugcccugu

SEQ ID NO: 1987288 - RNA, 18 nt, Human
ccuucucuuccaggcagc

SEQ ID NO: 1987289 - RNA, 19 nt, Human
ccuucucuuccaggcagcc

SEQ ID NO: 1987290 - RNA, 19 nt, Human
ccuucugagcuggccucuc

SEQ ID NO: 1987291 - RNA, 20 nt, Human
ccuucugagcuggccucuca

SEQ ID NO: 1987292 - RNA, 23 nt, Human
ccuucugcacauaaacucuuuua

SEQ ID NO: 1987293 - RNA, 17 nt, Human
ccuucuggccucccaca

SEQ ID NO: 1987294 - RNA, 22 nt, Human
ccuucuggaauaaggagaauga

SEQ ID NO: 1987295 - RNA, 20 nt, Human
ccuucugacccaugcugccc

SEQ ID NO: 1987296 - RNA, 17 nt, Human
ccuucugacccaugcug

SEQ ID NO: 1987297 - RNA, 16 nt, Human
ccuucugacccaugcu

SEQ ID NO: 1987298 - RNA, 12 nt, Human
ccuucugaccca

SEQ ID NO: 1987299 - RNA, 15 nt, Human
ccuggccugagcugg

SEQ ID NO: 1987300 - RNA, 14 nt, Human
ccuggccugagcug

SEQ ID NO: 1987301 - RNA, 20 nt, Human
ccuggccugagcugggauga

SEQ ID NO: 1987302 - RNA, 13 nt, Human
ccuucucuuccag

SEQ ID NO: 1987303 - RNA, 14 nt, Human
ccuucucuuccagg

SEQ ID NO: 1987304 - RNA, 17 nt, Human
ccuucucuuccaggcag

SEQ ID NO: 1987305 - RNA, 20 nt, Human
ccuugccgucuaccugaggg

SEQ ID NO: 1987306 - RNA, 17 nt, Human
ccuugccgucuaccuga

SEQ ID NO: 1987307 - RNA, 20 nt, Human
ccuugcccacuccugcucug

SEQ ID NO: 1987308 - RNA, 21 nt, Human
ccuugcccacuccugcucugc

SEQ ID NO: 1987309 - RNA, 22 nt, Human
ccuugcccacuccugcucugcu

SEQ ID NO: 1987310 - RNA, 23 nt, Human
ccuugcccacuccugcucugcuc

SEQ ID NO: 1987311 - RNA, 17 nt, Human
ccuugcccacuccugcu

SEQ ID NO: 1987312 - RNA, 18 nt, Human
ccuugcccacuccugcuc

SEQ ID NO: 1987313 - RNA, 19 nt, Human
ccuugcccacuccugcucu

SEQ ID NO: 1987314 - RNA, 13 nt, Human
ccuuuucuguguu

SEQ ID NO: 1987315 - RNA, 14 nt, Human
ccuuuucuguguuu

SEQ ID NO: 1987316 - RNA, 11 nt, Human
ccuuucccacu

SEQ ID NO: 1987317 - RNA, 14 nt, Human
ccuuuagcgcccag

SEQ ID NO: 1987318 - RNA, 20 nt, Human
ccuuuagcgcccaguugggu

SEQ ID NO: 1987319 - RNA, 14 nt, Human
ccuuuagcuguguu

SEQ ID NO: 1987320 - RNA, 22 nt, Human
ccuuggaaaucaaauguaaagu

SEQ ID NO: 1987321 - RNA, 20 nt, Human
ccuuggaaaucaaauguaaa

SEQ ID NO: 1987322 - RNA, 16 nt, Human
ccuuggacauuuuaug

SEQ ID NO: 1987323 - RNA, 18 nt, Human
ccuuggacauuuuauguc

SEQ ID NO: 1987324 - RNA, 21 nt, Human
ccuuggacauuuuaugucuuu

SEQ ID NO: 1987325 - RNA, 15 nt, Human
cgacagugagacucu

SEQ ID NO: 1987326 - RNA, 16 nt, Human
cgacagugagacucug

SEQ ID NO: 1987327 - RNA, 17 nt, Human
ccuuuuuuauacauaaa

SEQ ID NO: 1987328 - RNA, 18 nt, Human
ccuuuuuuauacauaaac

SEQ ID NO: 1987329 - RNA, 19 nt, Human
ccuuuuuuauacauaaaca

SEQ ID NO: 1987330 - RNA, 23 nt, Human
cgaccagacaccuugacagggca

SEQ ID NO: 1987331 - RNA, 12 nt, Human
cgaccaccugcc

SEQ ID NO: 1987332 - RNA, 14 nt, Human
cgaccaccugccca

SEQ ID NO: 1987333 - RNA, 15 nt, Human
ccuuuugcaggcucc

SEQ ID NO: 1987334 - RNA, 19 nt, Human
ccuuuuguucauuucaucc

SEQ ID NO: 1987335 - RNA, 11 nt, Human
ccuuuuguguu

SEQ ID NO: 1987336 - RNA, 12 nt, Human
ccuuuuuuauac

SEQ ID NO: 1987337 - RNA, 14 nt, Human
cggagucccaccuu

SEQ ID NO: 1987338 - RNA, 16 nt, Human
cggaggggccuggcag

SEQ ID NO: 1987339 - RNA, 18 nt, Human
cggaggggccuggcagcc

SEQ ID NO: 1987340 - RNA, 20 nt, Human
cggagcggauugcaaagcaa

SEQ ID NO: 1987341 - RNA, 23 nt, Human
cggagucauuuuguguugaagag

SEQ ID NO: 1987342 - RNA, 21 nt, Human
cggcucacugcauccuccgcc

SEQ ID NO: 1987343 - RNA, 19 nt, Human
cggcucacugcagccucaa

SEQ ID NO: 1987344 - RNA, 17 nt, Human
cggcucacugcauccuc

SEQ ID NO: 1987345 - RNA, 18 nt, Human
cggcucacugcagccuca

SEQ ID NO: 1987346 - RNA, 15 nt, Human
cggcggccucagagu

SEQ ID NO: 1987347 - RNA, 17 nt, Human
cgccucggaucagcuga

SEQ ID NO: 1987348 - RNA, 12 nt, Human
cgccaaggcugg

SEQ ID NO: 1987349 - RNA, 19 nt, Human
cgcaggcuggcccugcccu

SEQ ID NO: 1987350 - RNA, 20 nt, Human
cgcaggcuggcccugcccug

SEQ ID NO: 1987351 - RNA, 14 nt, Human
cgcaggcuggcccu

SEQ ID NO: 1987352 - RNA, 15 nt, Human
cgcaggcuggcccug

SEQ ID NO: 1987353 - RNA, 17 nt, Human
cgcaggcuggcccugcc

SEQ ID NO: 1987354 - RNA, 18 nt, Human
cgcaggcuggcccugccc

SEQ ID NO: 1987355 - RNA, 16 nt, Human
cgccaaggcuggggga

SEQ ID NO: 1987356 - RNA, 13 nt, Human
cgccaaggcuggg

SEQ ID NO: 1987357 - RNA, 23 nt, Human
cgccaaggcugggggaagaagcu

SEQ ID NO: 1987358 - RNA, 21 nt, Human
cgaguguguuucauccuuccc

SEQ ID NO: 1987359 - RNA, 15 nt, Human
cgccgcccagcccac

SEQ ID NO: 1987360 - RNA, 20 nt, Human
cgccggcaauaaaagcccag

SEQ ID NO: 1987361 - RNA, 21 nt, Human
cgccggcaauaaaagcccagg

SEQ ID NO: 1987362 - RNA, 22 nt, Human
cgccggcaauaaaagcccagga

SEQ ID NO: 1987363 - RNA, 14 nt, Human
cgccuacaggagug

SEQ ID NO: 1987364 - RNA, 17 nt, Human
cgaguguguuucauccu

SEQ ID NO: 1987365 - RNA, 18 nt, Human
cgaguuacagacaaagcg

SEQ ID NO: 1987366 - RNA, 17 nt, Human
cgaguuacagacaaagc

SEQ ID NO: 1987367 - RNA, 13 nt, Human
cgaguagcuggga

SEQ ID NO: 1987368 - RNA, 14 nt, Human
cgaguagcugggac

SEQ ID NO: 1987369 - RNA, 15 nt, Human
cgaguagcugggacu

SEQ ID NO: 1987370 - RNA, 16 nt, Human
cgaguagcugggacua

SEQ ID NO: 1987371 - RNA, 17 nt, Human
cgaccuggccugucugu

SEQ ID NO: 1987372 - RNA, 16 nt, Human
cgaccugccucggccu

SEQ ID NO: 1987373 - RNA, 23 nt, Human
cgaccugaggacauggcuucuga

SEQ ID NO: 1987374 - RNA, 12 nt, Human
cgaccagccagg

SEQ ID NO: 1987375 - RNA, 14 nt, Human
cgaccacuuccagg

SEQ ID NO: 1987376 - RNA, 18 nt, Human
ccuaggauucacacccca

SEQ ID NO: 1987377 - RNA, 19 nt, Human
ccuaggauucacaccccac

SEQ ID NO: 1987378 - RNA, 23 nt, Human
ccuaggauucacaccccaccugc

SEQ ID NO: 1987379 - RNA, 20 nt, Human
ccuaggauucacaccccacc

SEQ ID NO: 1987380 - RNA, 22 nt, Human
ccuaggauucacaccccaccug

SEQ ID NO: 1987381 - RNA, 13 nt, Human
ccuaaggaaccuu

SEQ ID NO: 1987382 - RNA, 16 nt, Human
ccuaaggaaccuuccu

SEQ ID NO: 1987383 - RNA, 21 nt, Human
ccuaagauauacuuguuuuug

SEQ ID NO: 1987384 - RNA, 18 nt, Human
ccgucucugguuccuccc

SEQ ID NO: 1987385 - RNA, 14 nt, Human
ccuaauaaagcugu

SEQ ID NO: 1987386 - RNA, 23 nt, Human
ccuaauaaagcuguguggcaguc

SEQ ID NO: 1987387 - RNA, 18 nt, Human
ccuaaucacucagagcag

SEQ ID NO: 1987388 - RNA, 16 nt, Human
ccguagguuauuuuca

SEQ ID NO: 1987389 - RNA, 22 nt, Human
ccggcuaugggggcacugagga

SEQ ID NO: 1987390 - RNA, 23 nt, Human
ccggcuaugggggcacugaggac

SEQ ID NO: 1987391 - RNA, 17 nt, Human
ccggcuaugggggcacu

SEQ ID NO: 1987392 - RNA, 19 nt, Human
ccggcuaauuuuuguauuu

SEQ ID NO: 1987393 - RNA, 21 nt, Human
ccggcuaagcaggcgcaaggg

SEQ ID NO: 1987394 - RNA, 16 nt, Human
ccggcuaagcaggcgc

SEQ ID NO: 1987395 - RNA, 13 nt, Human
ccgucacauccca

SEQ ID NO: 1987396 - RNA, 11 nt, Human
ccgucucaggu

SEQ ID NO: 1987397 - RNA, 17 nt, Human
ccgucacuaccuggcug

SEQ ID NO: 1987398 - RNA, 14 nt, Human
ccuccaaggccagg

SEQ ID NO: 1987399 - RNA, 15 nt, Human
ccucccacagugcug

SEQ ID NO: 1987400 - RNA, 14 nt, Human
ccucccaggcgccc

SEQ ID NO: 1987401 - RNA, 20 nt, Human
ccucccaggcgccccuuccc

SEQ ID NO: 1987402 - RNA, 12 nt, Human
ccucccagcucc

SEQ ID NO: 1987403 - RNA, 22 nt, Human
ccucccaaggggcccaaauucu

SEQ ID NO: 1987404 - RNA, 22 nt, Human
ccuccaaucccaccaacccuca

SEQ ID NO: 1987405 - RNA, 13 nt, Human
ccuccaaggccag

SEQ ID NO: 1987406 - RNA, 18 nt, Human
ccucauuagcauuuugcu

SEQ ID NO: 1987407 - RNA, 21 nt, Human
ccuccaagcuccaucuccacu

SEQ ID NO: 1987408 - RNA, 22 nt, Human
ccuccaagcuccaucuccacuc

SEQ ID NO: 1987409 - RNA, 19 nt, Human
ccucauguucuuaauucuu

SEQ ID NO: 1987410 - RNA, 20 nt, Human
ccucauguccacugguucuu

SEQ ID NO: 1987411 - RNA, 13 nt, Human
ccucauguucuua

SEQ ID NO: 1987412 - RNA, 15 nt, Human
ccucauguccacugg

SEQ ID NO: 1987413 - RNA, 13 nt, Human
ccucagccuccug

SEQ ID NO: 1987414 - RNA, 23 nt, Human
ccucagccucccaaagugcuggg

SEQ ID NO: 1987415 - RNA, 22 nt, Human
ccucagccucccgaauagcugg

SEQ ID NO: 1987416 - RNA, 16 nt, Human
ccucaaccuccugggc

SEQ ID NO: 1987417 - RNA, 15 nt, Human
ccuauuucuugauaa

SEQ ID NO: 1987418 - RNA, 15 nt, Human
ccuauuuuaauaaac

SEQ ID NO: 1987419 - RNA, 11 nt, Human
ccuauuucaga

SEQ ID NO: 1987420 - RNA, 12 nt, Human
ccuauuucagaa

SEQ ID NO: 1987421 - RNA, 11 nt, Human
ccucagccucc

SEQ ID NO: 1987422 - RNA, 22 nt, Human
ccucagccucccaaagugcugg

SEQ ID NO: 1987423 - RNA, 15 nt, Human
ccucaagagaaggca

SEQ ID NO: 1987424 - RNA, 15 nt, Human
ccucaacucuccucc

SEQ ID NO: 1987425 - RNA, 13 nt, Human
cccuggcagcccc

SEQ ID NO: 1987426 - RNA, 12 nt, Human
cccuggcagccc

SEQ ID NO: 1987427 - RNA, 21 nt, Human
cccugcccugugggcccccaa

SEQ ID NO: 1987428 - RNA, 20 nt, Human
cccugcccugugggccccca

SEQ ID NO: 1987429 - RNA, 16 nt, Human
cccugcccugugggcc

SEQ ID NO: 1987430 - RNA, 15 nt, Human
cccugcccugugggc

SEQ ID NO: 1987431 - RNA, 14 nt, Human
cccugcccuguggg

SEQ ID NO: 1987432 - RNA, 11 nt, Human
cccugcccugu

SEQ ID NO: 1987433 - RNA, 12 nt, Human
cccugcccugug

SEQ ID NO: 1987434 - RNA, 13 nt, Human
cccugcccugugg

SEQ ID NO: 1987435 - RNA, 15 nt, Human
cccucaaagaggcag

SEQ ID NO: 1987436 - RNA, 21 nt, Human
cccuauuuaacagggucucua

SEQ ID NO: 1987437 - RNA, 23 nt, Human
cccuauuuaacagggucucuagu

SEQ ID NO: 1987438 - RNA, 13 nt, Human
cccuggcuccagg

SEQ ID NO: 1987439 - RNA, 16 nt, Human
cccuggcuccaggcca

SEQ ID NO: 1987440 - RNA, 17 nt, Human
cccuggcucccacaggc

SEQ ID NO: 1987441 - RNA, 19 nt, Human
cccuggcucccacaggccc

SEQ ID NO: 1987442 - RNA, 13 nt, Human
cccuggcuuuuca

SEQ ID NO: 1987443 - RNA, 14 nt, Human
cccuggcuuccuua

SEQ ID NO: 1987444 - RNA, 12 nt, Human
cccuggccccca

SEQ ID NO: 1987445 - RNA, 17 nt, Human
cccuggcccccacaugg

SEQ ID NO: 1987446 - RNA, 16 nt, Human
cccuggcagccccugu

SEQ ID NO: 1987447 - RNA, 14 nt, Human
cccuggcagccccu

SEQ ID NO: 1987448 - RNA, 15 nt, Human
cccuggcagcccgca

SEQ ID NO: 1987449 - RNA, 14 nt, Human
cccuggcaggcagg

SEQ ID NO: 1987450 - RNA, 15 nt, Human
cccuggcaggcaggg

SEQ ID NO: 1987451 - RNA, 24 nt, Human
cccugugccuuggugugcuguauc

SEQ ID NO: 1987452 - RNA, 13 nt, Human
cccugugccagcc

SEQ ID NO: 1987453 - RNA, 23 nt, Human
cccuucugacccaugcugcccug

SEQ ID NO: 1987454 - RNA, 22 nt, Human
cccuucugacccaugcugcccu

SEQ ID NO: 1987455 - RNA, 21 nt, Human
cccuucugacccaugcugccc

SEQ ID NO: 1987456 - RNA, 12 nt, Human
cccuucucuucc

SEQ ID NO: 1987457 - RNA, 13 nt, Human
cccuucucuucca

SEQ ID NO: 1987458 - RNA, 16 nt, Human
cccuucuaccuuccug

SEQ ID NO: 1987459 - RNA, 16 nt, Human
cccuucgcuccugugu

SEQ ID NO: 1987460 - RNA, 18 nt, Human
cccuucgcuccugugucu

SEQ ID NO: 1987461 - RNA, 20 nt, Human
ccgcccaggcuuagucacug

SEQ ID NO: 1987462 - RNA, 16 nt, Human
ccgccaugcuccuggc

SEQ ID NO: 1987463 - RNA, 14 nt, Human
cccuucucuuccag

SEQ ID NO: 1987464 - RNA, 15 nt, Human
cccuucucuuccagg

SEQ ID NO: 1987465 - RNA, 17 nt, Human
cccuucucuuccaggca

SEQ ID NO: 1987466 - RNA, 19 nt, Human
cccuucucuuccaggcagc

SEQ ID NO: 1987467 - RNA, 20 nt, Human
ccgaauagcugggacuacag

SEQ ID NO: 1987468 - RNA, 13 nt, Human
ccgacaagcacag

SEQ ID NO: 1987469 - RNA, 17 nt, Human
ccgccaaggcuggggga

SEQ ID NO: 1987470 - RNA, 16 nt, Human
ccgacccuugccgucu

SEQ ID NO: 1987471 - RNA, 21 nt, Human
ccgccaaaagcugcucaggga

SEQ ID NO: 1987472 - RNA, 14 nt, Human
ccgccacaucccuc

SEQ ID NO: 1987473 - RNA, 15 nt, Human
ccuggccucugcacu

SEQ ID NO: 1987474 - RNA, 14 nt, Human
ccuggccucugcac

SEQ ID NO: 1987475 - RNA, 13 nt, Human
ccuggccugagcu

SEQ ID NO: 1987476 - RNA, 16 nt, Human
ccuggccucugcacuc

SEQ ID NO: 1987477 - RNA, 12 nt, Human
ccuggccucugc

SEQ ID NO: 1987478 - RNA, 20 nt, Human
ccugcuggguguggcgcagc

SEQ ID NO: 1987479 - RNA, 14 nt, Human
ccugcugggugugg

SEQ ID NO: 1987480 - RNA, 12 nt, Human
ccugcugggugu

SEQ ID NO: 1987481 - RNA, 21 nt, Human
ccugcuggccggacacccgac

SEQ ID NO: 1987482 - RNA, 14 nt, Human
ccugcccaggcccc

SEQ ID NO: 1987483 - RNA, 15 nt, Human
ccugcccaggccccu

SEQ ID NO: 1987484 - RNA, 16 nt, Human
ccugcccaggccccug

SEQ ID NO: 1987485 - RNA, 13 nt, Human
ccuggaugcagcc

SEQ ID NO: 1987486 - RNA, 21 nt, Human
ccuggauccaucaggccacuu

SEQ ID NO: 1987487 - RNA, 17 nt, Human
ccuggaugcagccucac

SEQ ID NO: 1987488 - RNA, 14 nt, Human
ccuggaugcagccu

SEQ ID NO: 1987489 - RNA, 19 nt, Human
ccuggaugcagccucacag

SEQ ID NO: 1987490 - RNA, 19 nt, Human
ccuggaggcucaaauuuug

SEQ ID NO: 1987491 - RNA, 20 nt, Human
ccuggaggcucaaauuuuga

SEQ ID NO: 1987492 - RNA, 17 nt, Human
ccuggaguucugguucc

SEQ ID NO: 1987493 - RNA, 16 nt, Human
ccuggaguucugguuc

SEQ ID NO: 1987494 - RNA, 15 nt, Human
ccuggaguucugguu

SEQ ID NO: 1987495 - RNA, 18 nt, Human
ccuggcacccggccccug

SEQ ID NO: 1987496 - RNA, 16 nt, Human
ccuggcacagggcagu

SEQ ID NO: 1987497 - RNA, 17 nt, Human
ccuggcacagggcagug

SEQ ID NO: 1987498 - RNA, 18 nt, Human
ccuggcacagggcagugg

SEQ ID NO: 1987499 - RNA, 12 nt, Human
ccucucucaggc

SEQ ID NO: 1987500 - RNA, 17 nt, Human
ccucucucacuccuuga

SEQ ID NO: 1987501 - RNA, 15 nt, Human
ccucucucacuccuu

SEQ ID NO: 1987502 - RNA, 14 nt, Human
ccucucucacuccu

SEQ ID NO: 1987503 - RNA, 13 nt, Human
ccucucucacucc

SEQ ID NO: 1987504 - RNA, 14 nt, Human
ccucucucaggcca

SEQ ID NO: 1987505 - RNA, 20 nt, Human
ccucucugcaggucccuaau

SEQ ID NO: 1987506 - RNA, 15 nt, Human
ccucucugcaggucc

SEQ ID NO: 1987507 - RNA, 13 nt, Human
ccucucugcaggu

SEQ ID NO: 1987508 - RNA, 18 nt, Human
ccucucugaaggaggcca

SEQ ID NO: 1987509 - RNA, 20 nt, Human
ccucucugaaggaggccacc

SEQ ID NO: 1987510 - RNA, 22 nt, Human
ccucucugaaggaggccaccuc

SEQ ID NO: 1987511 - RNA, 23 nt, Human
ccucucugaaggaggccaccucc

SEQ ID NO: 1987512 - RNA, 18 nt, Human
ccucugcugcuggcuggu

SEQ ID NO: 1987513 - RNA, 17 nt, Human
ccucugcugcuggcugg

SEQ ID NO: 1987514 - RNA, 16 nt, Human
ccucugcugcuggcug

SEQ ID NO: 1987515 - RNA, 15 nt, Human
ccucugcugcuggcu

SEQ ID NO: 1987516 - RNA, 14 nt, Human
ccucugcugcuggc

SEQ ID NO: 1987517 - RNA, 13 nt, Human
ccucugcugcugg

SEQ ID NO: 1987518 - RNA, 15 nt, Human
ccucugcugauccuc

SEQ ID NO: 1987519 - RNA, 18 nt, Human
ccucugcugauccuccca

SEQ ID NO: 1987520 - RNA, 22 nt, Human
ccucucugcaggucccuaauaa

SEQ ID NO: 1987521 - RNA, 21 nt, Human
ccucucugcaggucccuaaua

SEQ ID NO: 1987522 - RNA, 23 nt, Human
ccucucugcaggucccuaauaaa

SEQ ID NO: 1987523 - RNA, 12 nt, Human
ccucucugcccu

SEQ ID NO: 1987524 - RNA, 19 nt, Human
ccucugcucccccuuuucc

SEQ ID NO: 1987525 - RNA, 12 nt, Human
ccucugccuguc

SEQ ID NO: 1987526 - RNA, 22 nt, Human
ccucugccugaagucacacagu

SEQ ID NO: 1987527 - RNA, 10 nt, Human
ccugcagcuc

SEQ ID NO: 1987528 - RNA, 12 nt, Human
ccugcagcuccc

SEQ ID NO: 1987529 - RNA, 12 nt, Human
ccugcagcucuc

SEQ ID NO: 1987530 - RNA, 15 nt, Human
ccugcagcucucaug

SEQ ID NO: 1987531 - RNA, 22 nt, Human
ccugcacuugcagacucuacag

SEQ ID NO: 1987532 - RNA, 21 nt, Human
ccugcacuugggggcucagca

SEQ ID NO: 1987533 - RNA, 22 nt, Human
ccugcacuugggggcucagcaa

SEQ ID NO: 1987534 - RNA, 15 nt, Human
ccugcacuugggggc

SEQ ID NO: 1987535 - RNA, 16 nt, Human
ccugcacuugggggcu

SEQ ID NO: 1987536 - RNA, 18 nt, Human
ccugcacuugggggcuca

SEQ ID NO: 1987537 - RNA, 20 nt, Human
ccugcacuugggggcucagc

SEQ ID NO: 1987538 - RNA, 22 nt, Human
ccugaguaaaaaagcugugugc

SEQ ID NO: 1987539 - RNA, 15 nt, Human
ccugagaggggaagc

SEQ ID NO: 1987540 - RNA, 20 nt, Human
ccugagaggggaagcggccc

SEQ ID NO: 1987541 - RNA, 13 nt, Human
ccucuugagccuu

SEQ ID NO: 1987542 - RNA, 19 nt, Human
ccucuugagccuugaacuu

SEQ ID NO: 1987543 - RNA, 15 nt, Human
ccucuugacccugca

SEQ ID NO: 1987544 - RNA, 16 nt, Human
ccucuugacccugcac

SEQ ID NO: 1987545 - RNA, 17 nt, Human
ccucuugacccugcacc

SEQ ID NO: 1987546 - RNA, 22 nt, Human
ccugaccucaaaugaugugccu

SEQ ID NO: 1987547 - RNA, 22 nt, Human
ccucuugucuuccuauuucaga

SEQ ID NO: 1987548 - RNA, 14 nt, Human
ccucuugcauuuca

SEQ ID NO: 1987549 - RNA, 19 nt, Human
ccucuugucuuccuauuuc

SEQ ID NO: 1987550 - RNA, 13 nt, Human
ccucuuggguuca

SEQ ID NO: 1987551 - RNA, 14 nt, Human
ccugacucucagca

SEQ ID NO: 1987552 - RNA, 16 nt, Human
ccugacugggggcaga

SEQ ID NO: 1987553 - RNA, 17 nt, Human
ccugacugggggcagac

SEQ ID NO: 1987554 - RNA, 19 nt, Human
ccugacugggggcagacau

SEQ ID NO: 1987555 - RNA, 13 nt, Human
ccccuuucuuccu

SEQ ID NO: 1987556 - RNA, 14 nt, Human
ccccuuucuuccuc

SEQ ID NO: 1987557 - RNA, 14 nt, Human
ccccucuucccugg

SEQ ID NO: 1987558 - RNA, 12 nt, Human
ccccucuuccuc

SEQ ID NO: 1987559 - RNA, 13 nt, Human
ccccucuuccucu

SEQ ID NO: 1987560 - RNA, 14 nt, Human
ccccucuuccucuu

SEQ ID NO: 1987561 - RNA, 15 nt, Human
ccccucuuccucuug

SEQ ID NO: 1987562 - RNA, 19 nt, Human
ccccucuuccucuugaccc

SEQ ID NO: 1987563 - RNA, 22 nt, Human
ccccucuuccucuugacccugc

SEQ ID NO: 1987564 - RNA, 12 nt, Human
ccccucuucccu

SEQ ID NO: 1987565 - RNA, 16 nt, Human
ccccuugccagcugcu

SEQ ID NO: 1987566 - RNA, 19 nt, Human
ccccuugccagcugcugag

SEQ ID NO: 1987567 - RNA, 21 nt, Human
ccccuugccagcugcugagcc

SEQ ID NO: 1987568 - RNA, 15 nt, Human
ccccuuucuuccuca

SEQ ID NO: 1987569 - RNA, 14 nt, Human
cccgaauagcuggg

SEQ ID NO: 1987570 - RNA, 21 nt, Human
cccgaaagaggcacccuucca

SEQ ID NO: 1987571 - RNA, 22 nt, Human
cccgaaagaggcacccuuccau

SEQ ID NO: 1987572 - RNA, 24 nt, Human
cccgaaagaggcacccuuccaucu

SEQ ID NO: 1987573 - RNA, 17 nt, Human
cccgaaaggucaccuca

SEQ ID NO: 1987574 - RNA, 19 nt, Human
cccgaaaggucaccucacu

SEQ ID NO: 1987575 - RNA, 20 nt, Human
cccgaaaggucaccucacuc

SEQ ID NO: 1987576 - RNA, 21 nt, Human
cccgaaaggucaccucacuca

SEQ ID NO: 1987577 - RNA, 14 nt, Human
cccggccaccugcg

SEQ ID NO: 1987578 - RNA, 13 nt, Human
cccggccaccugc

SEQ ID NO: 1987579 - RNA, 11 nt, Human
cccggcuccag

SEQ ID NO: 1987580 - RNA, 12 nt, Human
cccggcuccagg

SEQ ID NO: 1987581 - RNA, 13 nt, Human
cccggcuccaggc

SEQ ID NO: 1987582 - RNA, 14 nt, Human
cccggcuccaggcu

SEQ ID NO: 1987583 - RNA, 15 nt, Human
cccggcuccaggcuc

SEQ ID NO: 1987584 - RNA, 16 nt, Human
cccggcuccaggcucc

SEQ ID NO: 1987585 - RNA, 17 nt, Human
cccggccaccugcggug

SEQ ID NO: 1987586 - RNA, 13 nt, Human
cccgggacucugc

SEQ ID NO: 1987587 - RNA, 23 nt, Human
cccgggaggcagagguugcagug

SEQ ID NO: 1987588 - RNA, 18 nt, Human
cccuauuagagaagagau

SEQ ID NO: 1987589 - RNA, 17 nt, Human
cccuauugguaaagaau

SEQ ID NO: 1987590 - RNA, 19 nt, Human
ccccucuggcuccagcugg

SEQ ID NO: 1987591 - RNA, 21 nt, Human
ccccagacuccaccaagccug

SEQ ID NO: 1987592 - RNA, 20 nt, Human
ccccagacuccaccaagccu

SEQ ID NO: 1987593 - RNA, 23 nt, Human
ccccaaaacucuccucugcugcu

SEQ ID NO: 1987594 - RNA, 22 nt, Human
cccauuguggucacaggaagua

SEQ ID NO: 1987595 - RNA, 23 nt, Human
cccauuguggucacaggaaguag

SEQ ID NO: 1987596 - RNA, 22 nt, Human
ccccaaaacucuccucugcugc

SEQ ID NO: 1987597 - RNA, 22 nt, Human
cccccaaauggaaaugggcaga

SEQ ID NO: 1987598 - RNA, 23 nt, Human
ccccgacccuugccgucuaccug

SEQ ID NO: 1987599 - RNA, 21 nt, Human
ccccagcaagugagagcuggg

SEQ ID NO: 1987600 - RNA, 22 nt, Human
ccccagcaagugagagcugggu

SEQ ID NO: 1987601 - RNA, 23 nt, Human
ccccgaggccuucucugaaggac

SEQ ID NO: 1987602 - RNA, 13 nt, Human
cccauccuccagg

SEQ ID NO: 1987603 - RNA, 13 nt, Human
cccauccucugua

SEQ ID NO: 1987604 - RNA, 16 nt, Human
cccaggaaaggcccag

SEQ ID NO: 1987605 - RNA, 22 nt, Human
cccagcuugggcagaucuccca

SEQ ID NO: 1987606 - RNA, 15 nt, Human
cccagcuugaaaccu

SEQ ID NO: 1987607 - RNA, 18 nt, Human
cccagcuuccagcaggag

SEQ ID NO: 1987608 - RNA, 19 nt, Human
cccagcuuccagcaggagg

SEQ ID NO: 1987609 - RNA, 16 nt, Human
cccagcuucucagcuc

SEQ ID NO: 1987610 - RNA, 14 nt, Human
cccagcuugggcag

SEQ ID NO: 1987611 - RNA, 17 nt, Human
cccagcuucacuucuga

SEQ ID NO: 1987612 - RNA, 22 nt, Human
cccagcuucacuucugacucuu

SEQ ID NO: 1987613 - RNA, 13 nt, Human
cccagcuuccagc

SEQ ID NO: 1987614 - RNA, 15 nt, Human
cccagcuuccagcag

SEQ ID NO: 1987615 - RNA, 16 nt, Human
cccagcuuccagcagg

SEQ ID NO: 1987616 - RNA, 17 nt, Human
cccagcuuccagcagga

SEQ ID NO: 1987617 - RNA, 19 nt, Human
cccaggcuggagugcagug

SEQ ID NO: 1987618 - RNA, 18 nt, Human
cccaggcuggagugcagu

SEQ ID NO: 1987619 - RNA, 13 nt, Human
cccaggcuggcgu

SEQ ID NO: 1987620 - RNA, 17 nt, Human
cccaggcuggcgugcag

SEQ ID NO: 1987621 - RNA, 20 nt, Human
cccauauuuguacaccaaua

SEQ ID NO: 1987622 - RNA, 23 nt, Human
cccagcucugguccauagagagc

SEQ ID NO: 1987623 - RNA, 14 nt, Human
cccagccacucccc

SEQ ID NO: 1987624 - RNA, 15 nt, Human
cccagccacucccca

SEQ ID NO: 1987625 - RNA, 16 nt, Human
cccagccacuccccag

SEQ ID NO: 1987626 - RNA, 12 nt, Human
cccagcugcacc

SEQ ID NO: 1987627 - RNA, 13 nt, Human
cccagcugcaccc

SEQ ID NO: 1987628 - RNA, 18 nt, Human
cccagcugcaccccuucc

SEQ ID NO: 1987629 - RNA, 20 nt, Human
cccagcugcaccccuuccug

SEQ ID NO: 1987630 - RNA, 22 nt, Human
cccacugcuuuuggucugugug

SEQ ID NO: 1987631 - RNA, 19 nt, Human
cccacugcuuuuggucugu

SEQ ID NO: 1987632 - RNA, 12 nt, Human
cccacugcucug

SEQ ID NO: 1987633 - RNA, 13 nt, Human
cccacugcucugg

SEQ ID NO: 1987634 - RNA, 20 nt, Human
cccacugugcguggggcucc

SEQ ID NO: 1987635 - RNA, 21 nt, Human
cccacccugcuuggcccaggg

SEQ ID NO: 1987636 - RNA, 20 nt, Human
cccacccugcuuggcccagg

SEQ ID NO: 1987637 - RNA, 18 nt, Human
cccacuagacccacugga

SEQ ID NO: 1987638 - RNA, 18 nt, Human
cccacuccaagccagcaa

SEQ ID NO: 1987639 - RNA, 22 nt, Human
cccacccaagggccuggccuga

SEQ ID NO: 1987640 - RNA, 21 nt, Human
cccacccaagggccuggccug

SEQ ID NO: 1987641 - RNA, 20 nt, Human
cccacccaagggccuggccu

SEQ ID NO: 1987642 - RNA, 18 nt, Human
cccacccugaaagcccug

SEQ ID NO: 1987643 - RNA, 11 nt, Human
cccacccugcu

SEQ ID NO: 1987644 - RNA, 17 nt, Human
cccacccccacccaagg

SEQ ID NO: 1987645 - RNA, 15 nt, Human
cccacccccacccaa

SEQ ID NO: 1987646 - RNA, 12 nt, Human
cccacccccacc

SEQ ID NO: 1987647 - RNA, 15 nt, Human
ccaguucagcuuggg

SEQ ID NO: 1987648 - RNA, 17 nt, Human
ccaguuggguggaugcc

SEQ ID NO: 1987649 - RNA, 19 nt, Human
ccaguuggguggaugccug

SEQ ID NO: 1987650 - RNA, 20 nt, Human
ccaguuggguggaugccugg

SEQ ID NO: 1987651 - RNA, 20 nt, Human
ccaucccugaaggccccgcc

SEQ ID NO: 1987652 - RNA, 17 nt, Human
ccaucccugaaggcccc

SEQ ID NO: 1987653 - RNA, 15 nt, Human
ccaucccugaaggcc

SEQ ID NO: 1987654 - RNA, 14 nt, Human
ccaucccugaaggc

SEQ ID NO: 1987655 - RNA, 15 nt, Human
ccaugaauguuccug

SEQ ID NO: 1987656 - RNA, 13 nt, Human
ccaucccagcccc

SEQ ID NO: 1987657 - RNA, 15 nt, Human
ccaucccagccccaa

SEQ ID NO: 1987658 - RNA, 14 nt, Human
ccaucccagcccca

SEQ ID NO: 1987659 - RNA, 23 nt, Human
ccaguuggucccccuuccaugga

SEQ ID NO: 1987660 - RNA, 21 nt, Human
ccaguuguuagauuaagaaau

SEQ ID NO: 1987661 - RNA, 18 nt, Human
ccaguuuauuccagagcu

SEQ ID NO: 1987662 - RNA, 21 nt, Human
ccaugagccucagcauccugg

SEQ ID NO: 1987663 - RNA, 23 nt, Human
ccaugagccucagcauccuggca

SEQ ID NO: 1987664 - RNA, 20 nt, Human
ccauggucggaaaacaugcu

SEQ ID NO: 1987665 - RNA, 11 nt, Human
ccauguaugca

SEQ ID NO: 1987666 - RNA, 15 nt, Human
ccauguaugcauaau

SEQ ID NO: 1987667 - RNA, 14 nt, Human
ccauguauggccag

SEQ ID NO: 1987668 - RNA, 15 nt, Human
ccauguauggccagg

SEQ ID NO: 1987669 - RNA, 18 nt, Human
ccauguauggccaggaag

SEQ ID NO: 1987670 - RNA, 21 nt, Human
ccauguauggccaggaaguag

SEQ ID NO: 1987671 - RNA, 16 nt, Human
ccaggcacugcugccc

SEQ ID NO: 1987672 - RNA, 18 nt, Human
ccaggcacugcugcccag

SEQ ID NO: 1987673 - RNA, 13 nt, Human
ccaggcaccuccc

SEQ ID NO: 1987674 - RNA, 20 nt, Human
ccaggcacaggcagggcagg

SEQ ID NO: 1987675 - RNA, 18 nt, Human
ccaggcacaggcagggca

SEQ ID NO: 1987676 - RNA, 19 nt, Human
ccaggcacaggcagggcag

SEQ ID NO: 1987677 - RNA, 14 nt, Human
ccaggcacaggcag

SEQ ID NO: 1987678 - RNA, 15 nt, Human
ccaggcacaggcagg

SEQ ID NO: 1987679 - RNA, 16 nt, Human
ccaggcacaggcaggg

SEQ ID NO: 1987680 - RNA, 17 nt, Human
ccaggcacaggcagggc

SEQ ID NO: 1987681 - RNA, 12 nt, Human
ccaggcacaggc

SEQ ID NO: 1987682 - RNA, 13 nt, Human
ccaggcacaggca

SEQ ID NO: 1987683 - RNA, 17 nt, Human
ccaggggugggacaccc

SEQ ID NO: 1987684 - RNA, 14 nt, Human
ccaggggugggaca

SEQ ID NO: 1987685 - RNA, 19 nt, Human
ccaggggugggacacccug

SEQ ID NO: 1987686 - RNA, 23 nt, Human
ccaggggugggacacccugugau

SEQ ID NO: 1987687 - RNA, 13 nt, Human
ccaggggugggac

SEQ ID NO: 1987688 - RNA, 20 nt, Human
ccaggggaaaaucagccugc

SEQ ID NO: 1987689 - RNA, 21 nt, Human
ccagggcuggggcagccucug

SEQ ID NO: 1987690 - RNA, 22 nt, Human
ccagggcuggggcagccucugg

SEQ ID NO: 1987691 - RNA, 19 nt, Human
ccaggggaaaaucagccug

SEQ ID NO: 1987692 - RNA, 20 nt, Human
ccaggcuccuuuagcgccca

SEQ ID NO: 1987693 - RNA, 21 nt, Human
ccaggcuccuuuagcgcccag

SEQ ID NO: 1987694 - RNA, 16 nt, Human
ccaggcuggcgugcag

SEQ ID NO: 1987695 - RNA, 18 nt, Human
ccagggcuggggcagccu

SEQ ID NO: 1987696 - RNA, 19 nt, Human
ccaggcuggcgugcagugg

SEQ ID NO: 1987697 - RNA, 17 nt, Human
ccaggcuggcgugcagu

SEQ ID NO: 1987698 - RNA, 18 nt, Human
ccaggcuggcgugcagug

SEQ ID NO: 1987699 - RNA, 13 nt, Human
ccagggucccugg

SEQ ID NO: 1987700 - RNA, 18 nt, Human
ccagaugcaccagcccuu

SEQ ID NO: 1987701 - RNA, 17 nt, Human
ccagaugcaccagcccu

SEQ ID NO: 1987702 - RNA, 15 nt, Human
ccagaugcaccagcc

SEQ ID NO: 1987703 - RNA, 21 nt, Human
ccagaguggggaugacaugca

SEQ ID NO: 1987704 - RNA, 23 nt, Human
ccagagucuagcguagugcagca

SEQ ID NO: 1987705 - RNA, 23 nt, Human
ccagaguccccccacucccagca

SEQ ID NO: 1987706 - RNA, 22 nt, Human
ccagagucuagcguagugcagc

SEQ ID NO: 1987707 - RNA, 12 nt, Human
ccagauccuggg

SEQ ID NO: 1987708 - RNA, 20 nt, Human
ccagagggccugcaagggag

SEQ ID NO: 1987709 - RNA, 21 nt, Human
ccagaguccccccacucccag

SEQ ID NO: 1987710 - RNA, 22 nt, Human
ccagaguccccccacucccagc

SEQ ID NO: 1987711 - RNA, 19 nt, Human
ccagagggccugcaaggga

SEQ ID NO: 1987712 - RNA, 18 nt, Human
ccagagggccugcaaggg

SEQ ID NO: 1987713 - RNA, 17 nt, Human
ccagagggccugcaagg

SEQ ID NO: 1987714 - RNA, 16 nt, Human
ccaccuuggcucaagu

SEQ ID NO: 1987715 - RNA, 16 nt, Human
ccagcagccagccaaa

SEQ ID NO: 1987716 - RNA, 12 nt, Human
ccagcaggaggg

SEQ ID NO: 1987717 - RNA, 13 nt, Human
ccagcaggaggga

SEQ ID NO: 1987718 - RNA, 16 nt, Human
ccagcaggagggacag

SEQ ID NO: 1987719 - RNA, 20 nt, Human
ccagcaggagggacagucuc

SEQ ID NO: 1987720 - RNA, 15 nt, Human
ccagcaggcucucag

SEQ ID NO: 1987721 - RNA, 13 nt, Human
ccagcaggcucuc

SEQ ID NO: 1987722 - RNA, 12 nt, Human
ccagcagccagc

SEQ ID NO: 1987723 - RNA, 13 nt, Human
ccagcagccagcc

SEQ ID NO: 1987724 - RNA, 14 nt, Human
ccagcagccagcca

SEQ ID NO: 1987725 - RNA, 15 nt, Human
ccagcagccagccaa

SEQ ID NO: 1987726 - RNA, 13 nt, Human
ccaggaagccagc

SEQ ID NO: 1987727 - RNA, 12 nt, Human
ccaggaagccag

SEQ ID NO: 1987728 - RNA, 15 nt, Human
ccaggaaaggcucca

SEQ ID NO: 1987729 - RNA, 14 nt, Human
ccaggaaaggcucc

SEQ ID NO: 1987730 - RNA, 16 nt, Human
ccaggaaaggcuccag

SEQ ID NO: 1987731 - RNA, 12 nt, Human
ccagccccugga

SEQ ID NO: 1987732 - RNA, 11 nt, Human
ccagccccugg

SEQ ID NO: 1987733 - RNA, 12 nt, Human
ccagcaggccca

SEQ ID NO: 1987734 - RNA, 17 nt, Human
ccagcaggcccauggga

SEQ ID NO: 1987735 - RNA, 15 nt, Human
ccagcucaccagccc

SEQ ID NO: 1987736 - RNA, 16 nt, Human
ccagcucaccagcccc

SEQ ID NO: 1987737 - RNA, 16 nt, Human
ccagcuguucagcugg

SEQ ID NO: 1987738 - RNA, 22 nt, Human
ccagcucaccagccccagugcc

SEQ ID NO: 1987739 - RNA, 17 nt, Human
ccagcuguucagcuggu

SEQ ID NO: 1987740 - RNA, 19 nt, Human
ccagcuuaaaggggcuaga

SEQ ID NO: 1987741 - RNA, 21 nt, Human
cagggucucuaccauccccug

SEQ ID NO: 1987742 - RNA, 19 nt, Human
cagggucucuagugcugug

SEQ ID NO: 1987743 - RNA, 20 nt, Human
cagggucucuagugcuguga

SEQ ID NO: 1987744 - RNA, 21 nt, Human
cagggucucuagugcugugaa

SEQ ID NO: 1987745 - RNA, 22 nt, Human
cagggucucuagugcugugaaa

SEQ ID NO: 1987746 - RNA, 23 nt, Human
cagggucucuagugcugugaaaa

SEQ ID NO: 1987747 - RNA, 18 nt, Human
cagggugagcccaugugg

SEQ ID NO: 1987748 - RNA, 15 nt, Human
caggguuggccccug

SEQ ID NO: 1987749 - RNA, 16 nt, Human
caggguuggccccugc

SEQ ID NO: 1987750 - RNA, 23 nt, Human
cagggucucacucugucgcccag

SEQ ID NO: 1987751 - RNA, 15 nt, Human
caguauuugugggga

SEQ ID NO: 1987752 - RNA, 17 nt, Human
cagucaccccggccacc

SEQ ID NO: 1987753 - RNA, 16 nt, Human
cagucaccccggccac

SEQ ID NO: 1987754 - RNA, 14 nt, Human
cagucaccccggcc

SEQ ID NO: 1987755 - RNA, 13 nt, Human
caguauuuuagug

SEQ ID NO: 1987756 - RNA, 15 nt, Human
caguauuuuagugga

SEQ ID NO: 1987757 - RNA, 23 nt, Human
caguauuuuaguggacccugaaa

SEQ ID NO: 1987758 - RNA, 19 nt, Human
caguaaaugggggugcauu

SEQ ID NO: 1987759 - RNA, 18 nt, Human
caguaaaugggggugcau

SEQ ID NO: 1987760 - RNA, 20 nt, Human
caggguuucaccauguuggc

SEQ ID NO: 1987761 - RNA, 17 nt, Human
caggugcucaaaaugca

SEQ ID NO: 1987762 - RNA, 13 nt, Human
caggugcugccau

SEQ ID NO: 1987763 - RNA, 14 nt, Human
caggugcugccauc

SEQ ID NO: 1987764 - RNA, 17 nt, Human
caggguuggccccugcc

SEQ ID NO: 1987765 - RNA, 21 nt, Human
caggguuggccccugcccggc

SEQ ID NO: 1987766 - RNA, 14 nt, Human
cagguucugaaaga

SEQ ID NO: 1987767 - RNA, 18 nt, Human
cagguucugaaagagucu

SEQ ID NO: 1987768 - RNA, 23 nt, Human
cagguucugaaagagucuuucuu

SEQ ID NO: 1987769 - RNA, 15 nt, Human
cagguugaagaccua

SEQ ID NO: 1987770 - RNA, 22 nt, Human
cagguugaagaccuaaccaggg

SEQ ID NO: 1987771 - RNA, 23 nt, Human
cagguugaagaccuaaccagggc

SEQ ID NO: 1987772 - RNA, 23 nt, Human
cagguuuuuggucugacccacug

SEQ ID NO: 1987773 - RNA, 16 nt, Human
cagguugacaggaggu

SEQ ID NO: 1987774 - RNA, 11 nt, Human
cagguugacag

SEQ ID NO: 1987775 - RNA, 20 nt, Human
cagggcuggggcagccucug

SEQ ID NO: 1987776 - RNA, 15 nt, Human
cagggcuggggcagc

SEQ ID NO: 1987777 - RNA, 19 nt, Human
cagggcuggggcagccucu

SEQ ID NO: 1987778 - RNA, 22 nt, Human
caggccugggggcugggcagag

SEQ ID NO: 1987779 - RNA, 20 nt, Human
caggccugggggcugggcag

SEQ ID NO: 1987780 - RNA, 20 nt, Human
caggcugggagagccuucca

SEQ ID NO: 1987781 - RNA, 19 nt, Human
caggcugggagagccuucc

SEQ ID NO: 1987782 - RNA, 18 nt, Human
caggcugggagagccuuc

SEQ ID NO: 1987783 - RNA, 16 nt, Human
caggcugggagagccu

SEQ ID NO: 1987784 - RNA, 23 nt, Human
caggccugggggcugggcagagg

SEQ ID NO: 1987785 - RNA, 17 nt, Human
caggcuggcgugcagug

SEQ ID NO: 1987786 - RNA, 18 nt, Human
caggcuggcgugcagugg

SEQ ID NO: 1987787 - RNA, 19 nt, Human
caggcuggcgugcaguggu

SEQ ID NO: 1987788 - RNA, 14 nt, Human
caggcugggcuuca

SEQ ID NO: 1987789 - RNA, 12 nt, Human
caggcugggcug

SEQ ID NO: 1987790 - RNA, 13 nt, Human
caggcugggcugg

SEQ ID NO: 1987791 - RNA, 14 nt, Human
caggcugggcuggg

SEQ ID NO: 1987792 - RNA, 16 nt, Human
caggcugggcugggca

SEQ ID NO: 1987793 - RNA, 17 nt, Human
caggcugggcugggcac

SEQ ID NO: 1987794 - RNA, 19 nt, Human
caggcugggcugggcacug

SEQ ID NO: 1987795 - RNA, 22 nt, Human
cagggaggacgcucucuggccu

SEQ ID NO: 1987796 - RNA, 15 nt, Human
caggcugggcuucag

SEQ ID NO: 1987797 - RNA, 21 nt, Human
caggcugggcugggcacugcu

SEQ ID NO: 1987798 - RNA, 20 nt, Human
cagggcucagcggggacagc

SEQ ID NO: 1987799 - RNA, 12 nt, Human
cagggcucagcg

SEQ ID NO: 1987800 - RNA, 15 nt, Human
cagggcucagcgggg

SEQ ID NO: 1987801 - RNA, 16 nt, Human
cagggagggcuucugc

SEQ ID NO: 1987802 - RNA, 17 nt, Human
cagggagggccugggcc

SEQ ID NO: 1987803 - RNA, 18 nt, Human
cagggagggccugggccc

SEQ ID NO: 1987804 - RNA, 22 nt, Human
caggaaaggcuccaggagcagc

SEQ ID NO: 1987805 - RNA, 21 nt, Human
caggaaaggcuccaggagcag

SEQ ID NO: 1987806 - RNA, 23 nt, Human
caggaaaggcuccaggagcagcc

SEQ ID NO: 1987807 - RNA, 19 nt, Human
caggaaaagcugcugacag

SEQ ID NO: 1987808 - RNA, 20 nt, Human
caggaaaagcugcugacagu

SEQ ID NO: 1987809 - RNA, 16 nt, Human
cagcuuauucacaaga

SEQ ID NO: 1987810 - RNA, 17 nt, Human
cagcuuauucacaagac

SEQ ID NO: 1987811 - RNA, 23 nt, Human
cagcuguguccggcccaguuuug

SEQ ID NO: 1987812 - RNA, 15 nt, Human
cagcuguucagcugg

SEQ ID NO: 1987813 - RNA, 16 nt, Human
cagcuguucagcuggu

SEQ ID NO: 1987814 - RNA, 19 nt, Human
cagcuguucagcugguuga

SEQ ID NO: 1987815 - RNA, 21 nt, Human
caggaaaguggcaccugucug

SEQ ID NO: 1987816 - RNA, 22 nt, Human
caggaaaguggcaccugucugc

SEQ ID NO: 1987817 - RNA, 15 nt, Human
caggccagcugccuc

SEQ ID NO: 1987818 - RNA, 16 nt, Human
caggccaggcccucug

SEQ ID NO: 1987819 - RNA, 15 nt, Human
caggccaggcccucu

SEQ ID NO: 1987820 - RNA, 14 nt, Human
caggccaggcccuc

SEQ ID NO: 1987821 - RNA, 13 nt, Human
caggccaggcccu

SEQ ID NO: 1987822 - RNA, 15 nt, Human
caggccagcugcuug

SEQ ID NO: 1987823 - RNA, 13 nt, Human
caggccagcugcu

SEQ ID NO: 1987824 - RNA, 23 nt, Human
caggcacugcugcccagccucca

SEQ ID NO: 1987825 - RNA, 16 nt, Human
caggccacccugugca

SEQ ID NO: 1987826 - RNA, 17 nt, Human
caggccacccugugcag

SEQ ID NO: 1987827 - RNA, 21 nt, Human
caggcaaugcuggcuguuggc

SEQ ID NO: 1987828 - RNA, 14 nt, Human
caggaggcagaagg

SEQ ID NO: 1987829 - RNA, 17 nt, Human
caggaggccaagguggg

SEQ ID NO: 1987830 - RNA, 16 nt, Human
caggcacugcugccca

SEQ ID NO: 1987831 - RNA, 17 nt, Human
caggcacugcugcccag

SEQ ID NO: 1987832 - RNA, 13 nt, Human
caggaggccagcc

SEQ ID NO: 1987833 - RNA, 12 nt, Human
caggaggccagc

SEQ ID NO: 1987834 - RNA, 19 nt, Human
caggcaaugcuggcuguug

SEQ ID NO: 1987835 - RNA, 20 nt, Human
caggcaaugcuggcuguugg

SEQ ID NO: 1987836 - RNA, 17 nt, Human
caggacaggagaugcug

SEQ ID NO: 1987837 - RNA, 21 nt, Human
caggacaggagaugcugugcc

SEQ ID NO: 1987838 - RNA, 15 nt, Human
caggacagggguucc

SEQ ID NO: 1987839 - RNA, 16 nt, Human
caggacagggguuccu

SEQ ID NO: 1987840 - RNA, 17 nt, Human
caggacagggguuccuu

SEQ ID NO: 1987841 - RNA, 21 nt, Human
caggacagggguuccuucugg

SEQ ID NO: 1987842 - RNA, 12 nt, Human
caggacccugcc

SEQ ID NO: 1987843 - RNA, 13 nt, Human
caggacccugcca

SEQ ID NO: 1987844 - RNA, 14 nt, Human
caggacccugccag

SEQ ID NO: 1987845 - RNA, 15 nt, Human
caggacccugccagg

SEQ ID NO: 1987846 - RNA, 22 nt, Human
caggacccugccaggcacaggc

SEQ ID NO: 1987847 - RNA, 20 nt, Human
caggacccugccaggcacag

SEQ ID NO: 1987848 - RNA, 21 nt, Human
caggacccugccaggcacagg

SEQ ID NO: 1987849 - RNA, 16 nt, Human
caggacccugccaggc

SEQ ID NO: 1987850 - RNA, 17 nt, Human
caggacccugccaggca

SEQ ID NO: 1987851 - RNA, 18 nt, Human
caggacccugccaggcac

SEQ ID NO: 1987852 - RNA, 19 nt, Human
caggacccugccaggcaca

SEQ ID NO: 1987853 - RNA, 21 nt, Human
caggaccagggauuuccauga

SEQ ID NO: 1987854 - RNA, 13 nt, Human
caggaccagggau

SEQ ID NO: 1987855 - RNA, 15 nt, Human
caggaggcaggaccu

SEQ ID NO: 1987856 - RNA, 18 nt, Human
caggaggcaggaccuucg

SEQ ID NO: 1987857 - RNA, 13 nt, Human
caggaccucaggu

SEQ ID NO: 1987858 - RNA, 16 nt, Human
cagaucauugugaaau

SEQ ID NO: 1987859 - RNA, 22 nt, Human
cagauacuacugaccagacaag

SEQ ID NO: 1987860 - RNA, 18 nt, Human
cagauacuacugaccaga

SEQ ID NO: 1987861 - RNA, 15 nt, Human
cagauaccaagcaug

SEQ ID NO: 1987862 - RNA, 22 nt, Human
cagaucauugugaaauuauuca

SEQ ID NO: 1987863 - RNA, 23 nt, Human
cagauacaggaaaagcugcugac

SEQ ID NO: 1987864 - RNA, 16 nt, Human
cagagcugcgggcugg

SEQ ID NO: 1987865 - RNA, 16 nt, Human
cagagcugcuuccccg

SEQ ID NO: 1987866 - RNA, 22 nt, Human
cagagcugcggugucucccugc

SEQ ID NO: 1987867 - RNA, 22 nt, Human
cagagcuacacaggggaaaaga

SEQ ID NO: 1987868 - RNA, 17 nt, Human
cagagcuacacagggga

SEQ ID NO: 1987869 - RNA, 16 nt, Human
cagagcgacagagcag

SEQ ID NO: 1987870 - RNA, 16 nt, Human
cagagagggugggagu

SEQ ID NO: 1987871 - RNA, 15 nt, Human
cagagaggcuguggu

SEQ ID NO: 1987872 - RNA, 22 nt, Human
cagagagggugggagugggccc

SEQ ID NO: 1987873 - RNA, 20 nt, Human
cagagagggugggagugggc

SEQ ID NO: 1987874 - RNA, 14 nt, Human
cagagccugcaguu

SEQ ID NO: 1987875 - RNA, 13 nt, Human
cagagccugcccc

SEQ ID NO: 1987876 - RNA, 14 nt, Human
cagagccugcccca

SEQ ID NO: 1987877 - RNA, 19 nt, Human
cagagccugccccagcgcu

SEQ ID NO: 1987878 - RNA, 15 nt, Human
cagagccugccccag

SEQ ID NO: 1987879 - RNA, 17 nt, Human
cagagccugccccagcg

SEQ ID NO: 1987880 - RNA, 20 nt, Human
cagagacuccugcaggcagc

SEQ ID NO: 1987881 - RNA, 22 nt, Human
cagagacuccugcaggcagcca

SEQ ID NO: 1987882 - RNA, 21 nt, Human
cagagacuccugcaggcagcc

SEQ ID NO: 1987883 - RNA, 23 nt, Human
cagagacuccugcaggcagccag

SEQ ID NO: 1987884 - RNA, 19 nt, Human
cagagagagauacucuggg

SEQ ID NO: 1987885 - RNA, 12 nt, Human
cagagagcauua

SEQ ID NO: 1987886 - RNA, 19 nt, Human
cagcguuucuaugacacau

SEQ ID NO: 1987887 - RNA, 16 nt, Human
cagcguuucuaugaca

SEQ ID NO: 1987888 - RNA, 14 nt, Human
cagcguuucuauga

SEQ ID NO: 1987889 - RNA, 11 nt, Human
cagccugccac

SEQ ID NO: 1987890 - RNA, 12 nt, Human
cagccugccacu

SEQ ID NO: 1987891 - RNA, 16 nt, Human
cagccugccacucagg

SEQ ID NO: 1987892 - RNA, 17 nt, Human
cagccugccacucaggc

SEQ ID NO: 1987893 - RNA, 21 nt, Human
cagccugccuugcccacuccu

SEQ ID NO: 1987894 - RNA, 23 nt, Human
cagccugcacuugggggcucagc

SEQ ID NO: 1987895 - RNA, 18 nt, Human
cagccugccuugcccacu

SEQ ID NO: 1987896 - RNA, 17 nt, Human
cagcggcuggaauuggg

SEQ ID NO: 1987897 - RNA, 16 nt, Human
cagcggcuggacuugg

SEQ ID NO: 1987898 - RNA, 18 nt, Human
cagcggcuggacuuggag

SEQ ID NO: 1987899 - RNA, 16 nt, Human
cagcgggaauggcagc

SEQ ID NO: 1987900 - RNA, 22 nt, Human
cagcgggaauggcagcugccac

SEQ ID NO: 1987901 - RNA, 23 nt, Human
cagcgggaauggcagcugccacg

SEQ ID NO: 1987902 - RNA, 14 nt, Human
cagcggggacagcu

SEQ ID NO: 1987903 - RNA, 23 nt, Human
cagccugagcgacagugagacuc

SEQ ID NO: 1987904 - RNA, 13 nt, Human
cagcccuuagcag

SEQ ID NO: 1987905 - RNA, 23 nt, Human
cagccgccaugcuccuggcccac

SEQ ID NO: 1987906 - RNA, 13 nt, Human
cagccgcuccaga

SEQ ID NO: 1987907 - RNA, 14 nt, Human
cagccgcuccagag

SEQ ID NO: 1987908 - RNA, 18 nt, Human
cagccgcuccagagucag

SEQ ID NO: 1987909 - RNA, 18 nt, Human
cagccgccuucacagcag

SEQ ID NO: 1987910 - RNA, 20 nt, Human
cagccgccuucacagcaguc

SEQ ID NO: 1987911 - RNA, 13 nt, Human
cagccgccuucac

SEQ ID NO: 1987912 - RNA, 19 nt, Human
cagccccgugggguuccuc

SEQ ID NO: 1987913 - RNA, 13 nt, Human
cagcccccugguc

SEQ ID NO: 1987914 - RNA, 13 nt, Human
cagccccugcaca

SEQ ID NO: 1987915 - RNA, 18 nt, Human
cagccccucccuccucug

SEQ ID NO: 1987916 - RNA, 21 nt, Human
cagccccucccuccucugaga

SEQ ID NO: 1987917 - RNA, 19 nt, Human
cagccccauucugccugcc

SEQ ID NO: 1987918 - RNA, 20 nt, Human
cagccccauucugccugccc

SEQ ID NO: 1987919 - RNA, 22 nt, Human
cagccccauucugccugcccag

SEQ ID NO: 1987920 - RNA, 23 nt, Human
cagccccauucugccugcccagg

SEQ ID NO: 1987921 - RNA, 24 nt, Human
cagccccauucugccugcccaggc

SEQ ID NO: 1987922 - RNA, 18 nt, Human
cagauuucacucuccuug

SEQ ID NO: 1987923 - RNA, 16 nt, Human
cagauuucacucuccu

SEQ ID NO: 1987924 - RNA, 15 nt, Human
cagauuucacucucc

SEQ ID NO: 1987925 - RNA, 13 nt, Human
cagauuucacucu

SEQ ID NO: 1987926 - RNA, 13 nt, Human
cagauuugagcuc

SEQ ID NO: 1987927 - RNA, 14 nt, Human
cagauuugagcuca

SEQ ID NO: 1987928 - RNA, 16 nt, Human
cagauuugagcucagc

SEQ ID NO: 1987929 - RNA, 13 nt, Human
cagauuugcacaa

SEQ ID NO: 1987930 - RNA, 14 nt, Human
cagauuugcacaaa

SEQ ID NO: 1987931 - RNA, 17 nt, Human
cagauuugcacaaaaag

SEQ ID NO: 1987932 - RNA, 20 nt, Human
cagauuugcacaaaaagaua

SEQ ID NO: 1987933 - RNA, 13 nt, Human
cagauuuggaaag

SEQ ID NO: 1987934 - RNA, 21 nt, Human
cagauuggauuuuauguugac

SEQ ID NO: 1987935 - RNA, 23 nt, Human
cagauuggauuuuauguugacau

SEQ ID NO: 1987936 - RNA, 12 nt, Human
cagauuggauuu

SEQ ID NO: 1987937 - RNA, 15 nt, Human
cagauuggauuuuau

SEQ ID NO: 1987938 - RNA, 19 nt, Human
cagauugcugaauggaguu

SEQ ID NO: 1987939 - RNA, 21 nt, Human
cagauugcaacaggcugggcu

SEQ ID NO: 1987940 - RNA, 24 nt, Human
cagcacauaggguucccacgaagc

SEQ ID NO: 1987941 - RNA, 18 nt, Human
cagcauauucaggaagcu

SEQ ID NO: 1987942 - RNA, 17 nt, Human
cagcauauucaggaagc

SEQ ID NO: 1987943 - RNA, 16 nt, Human
cagcauauucaggaag

SEQ ID NO: 1987944 - RNA, 22 nt, Human
cauggcuggagcuagaauuuga

SEQ ID NO: 1987945 - RNA, 22 nt, Human
cauggcugccaaugggagcuca

SEQ ID NO: 1987946 - RNA, 19 nt, Human
cauggcgaaaacaucuccu

SEQ ID NO: 1987947 - RNA, 21 nt, Human
cauguucccacuucaaaacaa

SEQ ID NO: 1987948 - RNA, 21 nt, Human
cauggcgaaaacaucuccuua

SEQ ID NO: 1987949 - RNA, 15 nt, Human
cauuaggauggcuag

SEQ ID NO: 1987950 - RNA, 12 nt, Human
cauuaucuagau

SEQ ID NO: 1987951 - RNA, 16 nt, Human
cauuaucuagauacug

SEQ ID NO: 1987952 - RNA, 17 nt, Human
cauuaucuagauacugu

SEQ ID NO: 1987953 - RNA, 15 nt, Human
cauguucucugagga

SEQ ID NO: 1987954 - RNA, 18 nt, Human
cauuagcaguuugcuuug

SEQ ID NO: 1987955 - RNA, 16 nt, Human
cauucuccuuguguua

SEQ ID NO: 1987956 - RNA, 20 nt, Human
cauucuccuuagcuucuggc

SEQ ID NO: 1987957 - RNA, 18 nt, Human
cauuaucuagauacugua

SEQ ID NO: 1987958 - RNA, 13 nt, Human
cauuaugaugugu

SEQ ID NO: 1987959 - RNA, 13 nt, Human
cauucucaguuuu

SEQ ID NO: 1987960 - RNA, 15 nt, Human
cauucucaguuuuuc

SEQ ID NO: 1987961 - RNA, 18 nt, Human
cauucucaguuuuucuua

SEQ ID NO: 1987962 - RNA, 19 nt, Human
cauucucaguuuuucuuaa

SEQ ID NO: 1987963 - RNA, 20 nt, Human
cauucucaguuuuucuuaau

SEQ ID NO: 1987964 - RNA, 17 nt, Human
cauucucacuccuaccu

SEQ ID NO: 1987965 - RNA, 14 nt, Human
cauuauguuaauau

SEQ ID NO: 1987966 - RNA, 16 nt, Human
cauucucacuccuacc

SEQ ID NO: 1987967 - RNA, 18 nt, Human
cauugcugggcuugucug

SEQ ID NO: 1987968 - RNA, 14 nt, Human
cauugcggacagcc

SEQ ID NO: 1987969 - RNA, 15 nt, Human
cauugcggacagcca

SEQ ID NO: 1987970 - RNA, 17 nt, Human
cauugcggacagccacg

SEQ ID NO: 1987971 - RNA, 21 nt, Human
cauugcggacagccacggcca

SEQ ID NO: 1987972 - RNA, 21 nt, Human
cauugccugauuuguuccuuc

SEQ ID NO: 1987973 - RNA, 23 nt, Human
cauugccugauuuguuccuucug

SEQ ID NO: 1987974 - RNA, 22 nt, Human
cauuuggugguuucagaaaugu

SEQ ID NO: 1987975 - RNA, 23 nt, Human
cauuuggugguuucagaaaugug

SEQ ID NO: 1987976 - RNA, 23 nt, Human
cauuuuucuuagggaaggauaca

SEQ ID NO: 1987977 - RNA, 18 nt, Human
cauuuuugaauacaggca

SEQ ID NO: 1987978 - RNA, 20 nt, Human
cauuuuugaauacaggcaua

SEQ ID NO: 1987979 - RNA, 17 nt, Human
ccaaaacucuccucugc

SEQ ID NO: 1987980 - RNA, 17 nt, Human
ccaaaaaaugcuugcuu

SEQ ID NO: 1987981 - RNA, 14 nt, Human
cauugcuuaccuug

SEQ ID NO: 1987982 - RNA, 17 nt, Human
cauugcuuaccuugguu

SEQ ID NO: 1987983 - RNA, 22 nt, Human
cauuggcucuugaacugagcuu

SEQ ID NO: 1987984 - RNA, 16 nt, Human
cauuuauucugcucac

SEQ ID NO: 1987985 - RNA, 15 nt, Human
cauuucacugucugu

SEQ ID NO: 1987986 - RNA, 18 nt, Human
cauuucauuugugccaga

SEQ ID NO: 1987987 - RNA, 11 nt, Human
cauuucagaaa

SEQ ID NO: 1987988 - RNA, 17 nt, Human
cauuucagaaagccuuu

SEQ ID NO: 1987989 - RNA, 17 nt, Human
cauugggccauguuuaa

SEQ ID NO: 1987990 - RNA, 13 nt, Human
ccaaugccaaaaa

SEQ ID NO: 1987991 - RNA, 20 nt, Human
ccaauguucucucuucucca

SEQ ID NO: 1987992 - RNA, 22 nt, Human
ccaaugcacuuuguucuggcuc

SEQ ID NO: 1987993 - RNA, 20 nt, Human
ccaaugcacuuuguucuggc

SEQ ID NO: 1987994 - RNA, 23 nt, Human
ccaaugcacuuuguucuggcucu

SEQ ID NO: 1987995 - RNA, 14 nt, Human
ccaaugcagaacuc

SEQ ID NO: 1987996 - RNA, 20 nt, Human
ccaagcuggucccacucagu

SEQ ID NO: 1987997 - RNA, 22 nt, Human
ccaacuuucaagaacuuguuua

SEQ ID NO: 1987998 - RNA, 22 nt, Human
ccaagcuuaggguauuuuuccu

SEQ ID NO: 1987999 - RNA, 22 nt, Human
ccaaagugcugggauuacaggc

SEQ ID NO: 1988000 - RNA, 19 nt, Human
ccaaagugcugggauuaca

SEQ ID NO: 1988001 - RNA, 22 nt, Human
ccaaagugcugggauuacaggu

SEQ ID NO: 1988002 - RNA, 22 nt, Human
ccaaaugagggucuugguucca

SEQ ID NO: 1988003 - RNA, 18 nt, Human
ccaaauguucaucaauga

SEQ ID NO: 1988004 - RNA, 12 nt, Human
ccaaauuaagag

SEQ ID NO: 1988005 - RNA, 16 nt, Human
ccaacuuucaagaacu

SEQ ID NO: 1988006 - RNA, 19 nt, Human
ccaacuuucaagaacuugu

SEQ ID NO: 1988007 - RNA, 13 nt, Human
ccaacuugccuuu

SEQ ID NO: 1988008 - RNA, 11 nt, Human
ccaacuuguaa

SEQ ID NO: 1988009 - RNA, 14 nt, Human
ccaccagaagccca

SEQ ID NO: 1988010 - RNA, 15 nt, Human
ccaccagaagcccag

SEQ ID NO: 1988011 - RNA, 16 nt, Human
ccaccagaagcccaga

SEQ ID NO: 1988012 - RNA, 18 nt, Human
ccaccagaagcccagaau

SEQ ID NO: 1988013 - RNA, 17 nt, Human
ccaccaucaagccacca

SEQ ID NO: 1988014 - RNA, 16 nt, Human
ccaccaucaagccacc

SEQ ID NO: 1988015 - RNA, 11 nt, Human
ccaccagaagc

SEQ ID NO: 1988016 - RNA, 12 nt, Human
ccaccagaagcc

SEQ ID NO: 1988017 - RNA, 13 nt, Human
ccaccagaagccc

SEQ ID NO: 1988018 - RNA, 22 nt, Human
ccacacuucaggcucuucuccu

SEQ ID NO: 1988019 - RNA, 20 nt, Human
ccacccugcuuggcccaggg

SEQ ID NO: 1988020 - RNA, 17 nt, Human
ccaccgcagacaggacc

SEQ ID NO: 1988021 - RNA, 14 nt, Human
ccaccgcagacagg

SEQ ID NO: 1988022 - RNA, 20 nt, Human
ccaccaucaagccaccaaca

SEQ ID NO: 1988023 - RNA, 18 nt, Human
ccaccaucaccagacagg

SEQ ID NO: 1988024 - RNA, 13 nt, Human
ccacccugcucuc

SEQ ID NO: 1988025 - RNA, 17 nt, Human
ccacccugcuuggccca

SEQ ID NO: 1988026 - RNA, 18 nt, Human
ccacccugcuuggcccag

SEQ ID NO: 1988027 - RNA, 19 nt, Human
ccacccugcuuggcccagg

SEQ ID NO: 1988028 - RNA, 18 nt, Human
ccaccgcagacaggacca

SEQ ID NO: 1988029 - RNA, 19 nt, Human
ccaccgcagacaggaccag

SEQ ID NO: 1988030 - RNA, 23 nt, Human
ccaccgggcugggagcucugcag

SEQ ID NO: 1988031 - RNA, 13 nt, Human
ccaccguccccuc

SEQ ID NO: 1988032 - RNA, 14 nt, Human
ccaccguccccucc

SEQ ID NO: 1988033 - RNA, 14 nt, Human
ccaccuuggcucaa

SEQ ID NO: 1988034 - RNA, 15 nt, Human
ccaccuuggcucaag

SEQ ID NO: 1988035 - RNA, 14 nt, Human
caugacacgaauau

SEQ ID NO: 1988036 - RNA, 14 nt, Human
caugaauuugugaa

SEQ ID NO: 1988037 - RNA, 18 nt, Human
caugacacgaauauugcu

SEQ ID NO: 1988038 - RNA, 17 nt, Human
caugacacgaauauugc

SEQ ID NO: 1988039 - RNA, 18 nt, Human
caugcugcccugugagua

SEQ ID NO: 1988040 - RNA, 16 nt, Human
caugcugcccugugag

SEQ ID NO: 1988041 - RNA, 19 nt, Human
cauggccuuugcuugaaag

SEQ ID NO: 1988042 - RNA, 22 nt, Human
cauggccuuugcuugaaagaaa

SEQ ID NO: 1988043 - RNA, 14 nt, Human
caugcugccuccag

SEQ ID NO: 1988044 - RNA, 12 nt, Human
caugcugccucc

SEQ ID NO: 1988045 - RNA, 17 nt, Human
caugcaaggucauuuuu

SEQ ID NO: 1988046 - RNA, 18 nt, Human
caugcaaggucauuuuuu

SEQ ID NO: 1988047 - RNA, 20 nt, Human
caugauugcagaauuguuua

SEQ ID NO: 1988048 - RNA, 22 nt, Human
caugauugcagaauuguuuaga

SEQ ID NO: 1988049 - RNA, 16 nt, Human
caugcaaguauucuca

SEQ ID NO: 1988050 - RNA, 22 nt, Human
caugcaaggucauuuuuuuuaa

SEQ ID NO: 1988051 - RNA, 19 nt, Human
caucagcacgauuucuguu

SEQ ID NO: 1988052 - RNA, 13 nt, Human
caucaggccaggc

SEQ ID NO: 1988053 - RNA, 17 nt, Human
caucagcacgauuucug

SEQ ID NO: 1988054 - RNA, 18 nt, Human
caucagcacgauuucugu

SEQ ID NO: 1988055 - RNA, 23 nt, Human
cauccuggcacccggccccugcu

SEQ ID NO: 1988056 - RNA, 16 nt, Human
cauccugucaucugag

SEQ ID NO: 1988057 - RNA, 19 nt, Human
cauccugucaucugagaau

SEQ ID NO: 1988058 - RNA, 22 nt, Human
cauccccacguggacaagaaag

SEQ ID NO: 1988059 - RNA, 23 nt, Human
caucaggccaggcccucugccca

SEQ ID NO: 1988060 - RNA, 22 nt, Human
caucaggccaggcccucugccc

SEQ ID NO: 1988061 - RNA, 21 nt, Human
caucaggccaggcccucugcc

SEQ ID NO: 1988062 - RNA, 20 nt, Human
caucaggccaggcccucugc

SEQ ID NO: 1988063 - RNA, 14 nt, Human
caucaggccaggcc

SEQ ID NO: 1988064 - RNA, 14 nt, Human
caucccagccccaa

SEQ ID NO: 1988065 - RNA, 13 nt, Human
caucccagcccca

SEQ ID NO: 1988066 - RNA, 16 nt, Human
caucccagccccaaug

SEQ ID NO: 1988067 - RNA, 17 nt, Human
caucccagccccaauga

SEQ ID NO: 1988068 - RNA, 22 nt, Human
caucuuagguuggcaaaaaggc

SEQ ID NO: 1988069 - RNA, 21 nt, Human
caucuuagguuggcaaaaagg

SEQ ID NO: 1988070 - RNA, 11 nt, Human
caucugugaau

SEQ ID NO: 1988071 - RNA, 13 nt, Human
caucugugaauaa

SEQ ID NO: 1988072 - RNA, 19 nt, Human
caucugugaaaggaaagag

SEQ ID NO: 1988073 - RNA, 18 nt, Human
caucugugaaaggaaaga

SEQ ID NO: 1988074 - RNA, 12 nt, Human
caucgcaaugua

SEQ ID NO: 1988075 - RNA, 17 nt, Human
cauccuuucacuucuuu

SEQ ID NO: 1988076 - RNA, 19 nt, Human
cauccuuucacuucuuucc

SEQ ID NO: 1988077 - RNA, 20 nt, Human
cauccuuucacuucuuuccc

SEQ ID NO: 1988078 - RNA, 21 nt, Human
cauccuuucacuucuuucccu

SEQ ID NO: 1988079 - RNA, 18 nt, Human
cagucaccccggccaccu

SEQ ID NO: 1988080 - RNA, 13 nt, Human
caguuguuugaug

SEQ ID NO: 1988081 - RNA, 14 nt, Human
cauaaugcgugcau

SEQ ID NO: 1988082 - RNA, 17 nt, Human
cauaaugcgugcauacc

SEQ ID NO: 1988083 - RNA, 23 nt, Human
cauaaucuggacuccucugucca

SEQ ID NO: 1988084 - RNA, 21 nt, Human
cauaaucuggacuccucuguc

SEQ ID NO: 1988085 - RNA, 22 nt, Human
cauaaucuggacuccucugucc

SEQ ID NO: 1988086 - RNA, 20 nt, Human
cauaaucuggacuccucugu

SEQ ID NO: 1988087 - RNA, 19 nt, Human
cauaaucuggacuccucug

SEQ ID NO: 1988088 - RNA, 17 nt, Human
caguuuggcaaacucuc

SEQ ID NO: 1988089 - RNA, 12 nt, Human
caguuugcuuug

SEQ ID NO: 1988090 - RNA, 14 nt, Human
caguuugcuuugua

SEQ ID NO: 1988091 - RNA, 21 nt, Human
caguuugcuuuguaugcacuu

SEQ ID NO: 1988092 - RNA, 14 nt, Human
caguuuauauggaa

SEQ ID NO: 1988093 - RNA, 15 nt, Human
caguuuacugguuua

SEQ ID NO: 1988094 - RNA, 16 nt, Human
cauaggccugcuuugu

SEQ ID NO: 1988095 - RNA, 19 nt, Human
cauaggaaguuaaaagcac

SEQ ID NO: 1988096 - RNA, 17 nt, Human
cauaggaaguuagccuu

SEQ ID NO: 1988097 - RNA, 20 nt, Human
cauaggaaguuagccuuuau

SEQ ID NO: 1988098 - RNA, 17 nt, Human
cauauuaccacagacau

SEQ ID NO: 1988099 - RNA, 20 nt, Human
cauauuaccacagacauacu

SEQ ID NO: 1988100 - RNA, 21 nt, Human
cauauuaccacagacauacua

SEQ ID NO: 1988101 - RNA, 22 nt, Human
cauacaaaugcaucuuugaugu

SEQ ID NO: 1988102 - RNA, 15 nt, Human
cauacaauuccaaac

SEQ ID NO: 1988103 - RNA, 21 nt, Human
cauaaugcgugcauaccacuu

SEQ ID NO: 1988104 - RNA, 17 nt, Human
cauacaaacaagcauau

SEQ ID NO: 1988105 - RNA, 21 nt, Human
cauacaaacaagcauauaaaa

SEQ ID NO: 1988106 - RNA, 19 nt, Human
cauacaaaugcaucuuuga

SEQ ID NO: 1988107 - RNA, 20 nt, Human
cauacaaaugcaucuuugau

SEQ ID NO: 1988108 - RNA, 22 nt, Human
cauacacaagcgugucaggcug

SEQ ID NO: 1988109 - RNA, 14 nt, Human
cauagcauaggaca

SEQ ID NO: 1988110 - RNA, 14 nt, Human
cauagccaaaaugu

SEQ ID NO: 1988111 - RNA, 16 nt, Human
cauagccaaaauguga

SEQ ID NO: 1988112 - RNA, 12 nt, Human
cauagcccucac

SEQ ID NO: 1988113 - RNA, 15 nt, Human
cauagcccucacccu

SEQ ID NO: 1988114 - RNA, 19 nt, Human
cauagcccucacccugggg

SEQ ID NO: 1988115 - RNA, 17 nt, Human
cacacagcucuguccug

SEQ ID NO: 1988116 - RNA, 20 nt, Human
cacacagcucuguccuggga

SEQ ID NO: 1988117 - RNA, 14 nt, Human
cacaagagcccagg

SEQ ID NO: 1988118 - RNA, 15 nt, Human
cacaagcuccaagcu

SEQ ID NO: 1988119 - RNA, 14 nt, Human
cacaagcuccaagc

SEQ ID NO: 1988120 - RNA, 13 nt, Human
cacaagcuccaag

SEQ ID NO: 1988121 - RNA, 16 nt, Human
cacaagagcccaggcc

SEQ ID NO: 1988122 - RNA, 23 nt, Human
cacaagcugcacccucaggcagg

SEQ ID NO: 1988123 - RNA, 17 nt, Human
cacaagcugcacccuca

SEQ ID NO: 1988124 - RNA, 23 nt, Human
cacaagcuccaagcucccaggca

SEQ ID NO: 1988125 - RNA, 17 nt, Human
cacaagcuccaagcucc

SEQ ID NO: 1988126 - RNA, 17 nt, Human
cacaagagcccaggccu

SEQ ID NO: 1988127 - RNA, 11 nt, Human
caauggcagcc

SEQ ID NO: 1988128 - RNA, 12 nt, Human
caauggcagccu

SEQ ID NO: 1988129 - RNA, 15 nt, Human
caauucuugccaaau

SEQ ID NO: 1988130 - RNA, 20 nt, Human
caauggagacugucucaaga

SEQ ID NO: 1988131 - RNA, 22 nt, Human
cacaggcccuuccucuccacug

SEQ ID NO: 1988132 - RNA, 23 nt, Human
cacaggcccuuccucuccacugc

SEQ ID NO: 1988133 - RNA, 13 nt, Human
cacagccugcacu

SEQ ID NO: 1988134 - RNA, 14 nt, Human
cacagccugcacuu

SEQ ID NO: 1988135 - RNA, 22 nt, Human
cacagccugcacuugggggcuc

SEQ ID NO: 1988136 - RNA, 23 nt, Human
cacagccugcacuugggggcuca

SEQ ID NO: 1988137 - RNA, 18 nt, Human
cacaggggaaaagaggag

SEQ ID NO: 1988138 - RNA, 17 nt, Human
cacaggggaaaagagga

SEQ ID NO: 1988139 - RNA, 15 nt, Human
cacaggugcccgcca

SEQ ID NO: 1988140 - RNA, 17 nt, Human
cacaggggacacccaga

SEQ ID NO: 1988141 - RNA, 19 nt, Human
cacaggggaaaagaggagu

SEQ ID NO: 1988142 - RNA, 20 nt, Human
cacaguauuacuucugcuac

SEQ ID NO: 1988143 - RNA, 21 nt, Human
cacaguauuacuucugcuaca

SEQ ID NO: 1988144 - RNA, 18 nt, Human
cacaggugcccgccacca

SEQ ID NO: 1988145 - RNA, 14 nt, Human
cacagucagguuga

SEQ ID NO: 1988146 - RNA, 17 nt, Human
cacagucagguugaaga

SEQ ID NO: 1988147 - RNA, 22 nt, Human
cacagaaaauggaagacagcuc

SEQ ID NO: 1988148 - RNA, 20 nt, Human
cacagaaaauggaagacagc

SEQ ID NO: 1988149 - RNA, 19 nt, Human
cacagaaaauggaagacag

SEQ ID NO: 1988150 - RNA, 18 nt, Human
cacagaaaauggaagaca

SEQ ID NO: 1988151 - RNA, 22 nt, Human
cacacaugagcaucaggccagg

SEQ ID NO: 1988152 - RNA, 21 nt, Human
cacacaugagcaucaggccag

SEQ ID NO: 1988153 - RNA, 18 nt, Human
cacagacauacuaaccag

SEQ ID NO: 1988154 - RNA, 19 nt, Human
cacagaaaauucuucucca

SEQ ID NO: 1988155 - RNA, 23 nt, Human
cacagaaaauggaagacagcucu

SEQ ID NO: 1988156 - RNA, 13 nt, Human
cacagacccugcc

SEQ ID NO: 1988157 - RNA, 11 nt, Human
cacagccucug

SEQ ID NO: 1988158 - RNA, 19 nt, Human
cacagacauacuaaccagc

SEQ ID NO: 1988159 - RNA, 21 nt, Human
cacagacauacuaaccagcag

SEQ ID NO: 1988160 - RNA, 16 nt, Human
cacacagcucuguccu

SEQ ID NO: 1988161 - RNA, 18 nt, Human
cacacagugagucgagga

SEQ ID NO: 1988162 - RNA, 20 nt, Human
cacacaguauuacuucugcu

SEQ ID NO: 1988163 - RNA, 23 nt, Human
cacacaguauuacuucugcuaca

SEQ ID NO: 1988164 - RNA, 15 nt, Human
cacacauacacacac

SEQ ID NO: 1988165 - RNA, 21 nt, Human
cacacagugagucgaggacag

SEQ ID NO: 1988166 - RNA, 23 nt, Human
cacacagugagucgaggacaggg

SEQ ID NO: 1988167 - RNA, 20 nt, Human
cacacaugagcaucaggcca

SEQ ID NO: 1988168 - RNA, 14 nt, Human
cacacaucaucugu

SEQ ID NO: 1988169 - RNA, 15 nt, Human
cacacaucaucugua

SEQ ID NO: 1988170 - RNA, 21 nt, Human
cacacaucaucuguaagcugu

SEQ ID NO: 1988171 - RNA, 22 nt, Human
cacacaucaucuguaagcuguu

SEQ ID NO: 1988172 - RNA, 17 nt, Human
caauaaagcaauaagaa

SEQ ID NO: 1988173 - RNA, 19 nt, Human
caauaaagcagcguuucua

SEQ ID NO: 1988174 - RNA, 11 nt, Human
caauaaagcaa

SEQ ID NO: 1988175 - RNA, 16 nt, Human
caaggccaaaggaagc

SEQ ID NO: 1988176 - RNA, 15 nt, Human
caaggccaaaggaag

SEQ ID NO: 1988177 - RNA, 18 nt, Human
caaggccaaaggaagcac

SEQ ID NO: 1988178 - RNA, 17 nt, Human
caaggccaaaggaagca

SEQ ID NO: 1988179 - RNA, 16 nt, Human
caaguaugaauaaaga

SEQ ID NO: 1988180 - RNA, 17 nt, Human
caaguaguucuguauuu

SEQ ID NO: 1988181 - RNA, 18 nt, Human
caaguaguucuguauuug

SEQ ID NO: 1988182 - RNA, 19 nt, Human
caaguaguucuguauuuga

SEQ ID NO: 1988183 - RNA, 20 nt, Human
caaguaguucuguauuugaa

SEQ ID NO: 1988184 - RNA, 21 nt, Human
caaguaguucuguauuugaaa

SEQ ID NO: 1988185 - RNA, 23 nt, Human
caaguaguucuguauuugaaagu

SEQ ID NO: 1988186 - RNA, 17 nt, Human
caagucaagugaaaaag

SEQ ID NO: 1988187 - RNA, 13 nt, Human
caagucaagugaa

SEQ ID NO: 1988188 - RNA, 19 nt, Human
caaguaugaauaaagacac

SEQ ID NO: 1988189 - RNA, 21 nt, Human
caaguaugaauaaagacaccu

SEQ ID NO: 1988190 - RNA, 20 nt, Human
caagcugcacccucaggcag

SEQ ID NO: 1988191 - RNA, 18 nt, Human
caagcugcacccucaggc

SEQ ID NO: 1988192 - RNA, 14 nt, Human
caagcugcacccuc

SEQ ID NO: 1988193 - RNA, 13 nt, Human
caagcugcacccu

SEQ ID NO: 1988194 - RNA, 14 nt, Human
caagcucugcuccu

SEQ ID NO: 1988195 - RNA, 12 nt, Human
caagcuccaagc

SEQ ID NO: 1988196 - RNA, 13 nt, Human
caagcucugcucc

SEQ ID NO: 1988197 - RNA, 19 nt, Human
caagcucuaucaccaagga

SEQ ID NO: 1988198 - RNA, 14 nt, Human
caagcucacuugcu

SEQ ID NO: 1988199 - RNA, 18 nt, Human
caagcucacuugcuuuag

SEQ ID NO: 1988200 - RNA, 18 nt, Human
cacugggaaacagaggcu

SEQ ID NO: 1988201 - RNA, 13 nt, Human
cacugggaaacag

SEQ ID NO: 1988202 - RNA, 18 nt, Human
cacugggagaaaugaaaa

SEQ ID NO: 1988203 - RNA, 16 nt, Human
cacugcauguuuguga

SEQ ID NO: 1988204 - RNA, 14 nt, Human
cacugcauccuccg

SEQ ID NO: 1988205 - RNA, 16 nt, Human
cacugcauccuccgcc

SEQ ID NO: 1988206 - RNA, 21 nt, Human
cacugcagaacagcuucaugu

SEQ ID NO: 1988207 - RNA, 13 nt, Human
cacugcagccuca

SEQ ID NO: 1988208 - RNA, 18 nt, Human
cacugcauccuccgccuc

SEQ ID NO: 1988209 - RNA, 19 nt, Human
cacugcacuauagccuagg

SEQ ID NO: 1988210 - RNA, 19 nt, Human
cacugcacuccagccuggg

SEQ ID NO: 1988211 - RNA, 18 nt, Human
cacugcacuccagccugg

SEQ ID NO: 1988212 - RNA, 16 nt, Human
cacugcacuccagccu

SEQ ID NO: 1988213 - RNA, 15 nt, Human
cacugcacuccagcc

SEQ ID NO: 1988214 - RNA, 20 nt, Human
cacugcacuccagccugggu

SEQ ID NO: 1988215 - RNA, 21 nt, Human
cacugcagaagacaguauggc

SEQ ID NO: 1988216 - RNA, 12 nt, Human
cacugcagccuc

SEQ ID NO: 1988217 - RNA, 22 nt, Human
cacugguucuucuuggucucag

SEQ ID NO: 1988218 - RNA, 23 nt, Human
cacugguggcccgacagccuggc

SEQ ID NO: 1988219 - RNA, 21 nt, Human
cacuuaccugaguugaagagg

SEQ ID NO: 1988220 - RNA, 18 nt, Human
cacuuacacuuuaugcac

SEQ ID NO: 1988221 - RNA, 16 nt, Human
cacuuacacuuuaugc

SEQ ID NO: 1988222 - RNA, 16 nt, Human
cacuuguagauuugau

SEQ ID NO: 1988223 - RNA, 17 nt, Human
cacuuguagauuugauu

SEQ ID NO: 1988224 - RNA, 14 nt, Human
cacuuguagauuug

SEQ ID NO: 1988225 - RNA, 15 nt, Human
cacuuguagauuuga

SEQ ID NO: 1988226 - RNA, 23 nt, Human
cacuuaggaacguaaucgugucc

SEQ ID NO: 1988227 - RNA, 24 nt, Human
cacuuagaaauugcauuuccugac

SEQ ID NO: 1988228 - RNA, 20 nt, Human
cacuuagccuuucuuuucuu

SEQ ID NO: 1988229 - RNA, 21 nt, Human
cacuuagcuggagaugucucu

SEQ ID NO: 1988230 - RNA, 15 nt, Human
cacuccaagccagca

SEQ ID NO: 1988231 - RNA, 16 nt, Human
cacuccagccugggug

SEQ ID NO: 1988232 - RNA, 11 nt, Human
cacuccagcug

SEQ ID NO: 1988233 - RNA, 12 nt, Human
cacuccagcugg

SEQ ID NO: 1988234 - RNA, 15 nt, Human
cacuccagcugggau

SEQ ID NO: 1988235 - RNA, 14 nt, Human
cacuaggcuucugg

SEQ ID NO: 1988236 - RNA, 22 nt, Human
cacugaauuuuuaugugugauu

SEQ ID NO: 1988237 - RNA, 15 nt, Human
cacugaaguuugaua

SEQ ID NO: 1988238 - RNA, 21 nt, Human
cacugaaguuugauaaauagu

SEQ ID NO: 1988239 - RNA, 22 nt, Human
cacugaaguuugauaaauagug

SEQ ID NO: 1988240 - RNA, 15 nt, Human
cacugaaucccugua

SEQ ID NO: 1988241 - RNA, 13 nt, Human
cacugaaucugua

SEQ ID NO: 1988242 - RNA, 14 nt, Human
cacugaaucuguac

SEQ ID NO: 1988243 - RNA, 15 nt, Human
cacugaaucuguaca

SEQ ID NO: 1988244 - RNA, 16 nt, Human
cacugaaucuguacag

SEQ ID NO: 1988245 - RNA, 17 nt, Human
cacugaaucuguacaga

SEQ ID NO: 1988246 - RNA, 20 nt, Human
cacugaaucuguacagagcc

SEQ ID NO: 1988247 - RNA, 15 nt, Human
cacuccccugcuggg

SEQ ID NO: 1988248 - RNA, 14 nt, Human
cacuccccugcugg

SEQ ID NO: 1988249 - RNA, 13 nt, Human
cacuccccugcug

SEQ ID NO: 1988250 - RNA, 12 nt, Human
cacuccccugcu

SEQ ID NO: 1988251 - RNA, 21 nt, Human
cacucuuggagccugcagagc

SEQ ID NO: 1988252 - RNA, 22 nt, Human
cacucuuggagccugcagagcu

SEQ ID NO: 1988253 - RNA, 23 nt, Human
cacucuuggagccugcagagcug

SEQ ID NO: 1988254 - RNA, 14 nt, Human
cacucuuguuucuc

SEQ ID NO: 1988255 - RNA, 21 nt, Human
cacucuuguuucucccgugcu

SEQ ID NO: 1988256 - RNA, 11 nt, Human
caccccagccc

SEQ ID NO: 1988257 - RNA, 13 nt, Human
caccccaccugcg

SEQ ID NO: 1988258 - RNA, 16 nt, Human
caccccaccugcgcuu

SEQ ID NO: 1988259 - RNA, 12 nt, Human
caccccaccugc

SEQ ID NO: 1988260 - RNA, 24 nt, Human
caccugccuguugggccaggagcc

SEQ ID NO: 1988261 - RNA, 19 nt, Human
caccugccuguugggccag

SEQ ID NO: 1988262 - RNA, 17 nt, Human
caccugccuguugggcc

SEQ ID NO: 1988263 - RNA, 14 nt, Human
caccuuggcugcag

SEQ ID NO: 1988264 - RNA, 14 nt, Human
caccuuggcucaag

SEQ ID NO: 1988265 - RNA, 15 nt, Human
caccuuggcucaagu

SEQ ID NO: 1988266 - RNA, 13 nt, Human
caccuuggcugca

SEQ ID NO: 1988267 - RNA, 16 nt, Human
caccugccccucaacu

SEQ ID NO: 1988268 - RNA, 15 nt, Human
caccugccccucaac

SEQ ID NO: 1988269 - RNA, 14 nt, Human
caccugccccucaa

SEQ ID NO: 1988270 - RNA, 14 nt, Human
caccucagccuccc

SEQ ID NO: 1988271 - RNA, 15 nt, Human
caccuaauuaauuuc

SEQ ID NO: 1988272 - RNA, 13 nt, Human
caccucagccucc

SEQ ID NO: 1988273 - RNA, 17 nt, Human
cacccugaaagcccuga

SEQ ID NO: 1988274 - RNA, 21 nt, Human
cacccugaacaacgagccuuu

SEQ ID NO: 1988275 - RNA, 15 nt, Human
cacccuggggagaaa

SEQ ID NO: 1988276 - RNA, 16 nt, Human
cacccuggggagaaag

SEQ ID NO: 1988277 - RNA, 14 nt, Human
cacccucaggcagg

SEQ ID NO: 1988278 - RNA, 16 nt, Human
cacccuccccuuccca

SEQ ID NO: 1988279 - RNA, 20 nt, Human
cacccuccccuucccagggc

SEQ ID NO: 1988280 - RNA, 18 nt, Human
caaagauauuuugcuuug

SEQ ID NO: 1988281 - RNA, 20 nt, Human
caaagauauuuugcuuugug

SEQ ID NO: 1988282 - RNA, 17 nt, Human
caaaaggcauuucccac

SEQ ID NO: 1988283 - RNA, 21 nt, Human
caaaaggcauuucccacccug

SEQ ID NO: 1988284 - RNA, 15 nt, Human
caaaaggcagaagca

SEQ ID NO: 1988285 - RNA, 18 nt, Human
caaaagaugcuucucacu

SEQ ID NO: 1988286 - RNA, 20 nt, Human
caaaaaaaaaaaaaaauuag

SEQ ID NO: 1988287 - RNA, 18 nt, Human
auuuuuuuuuuuaaucua

SEQ ID NO: 1988288 - RNA, 21 nt, Human
auuuuuuuuuuuaaucuacug

SEQ ID NO: 1988289 - RNA, 16 nt, Human
caaaagaugcuucuca

SEQ ID NO: 1988290 - RNA, 20 nt, Human
caaaagaguguaaaauauuu

SEQ ID NO: 1988291 - RNA, 15 nt, Human
caaaagaguguaaaa

SEQ ID NO: 1988292 - RNA, 16 nt, Human
caaaagaguguaaaau

SEQ ID NO: 1988293 - RNA, 18 nt, Human
caaaagaguguaaaauau

SEQ ID NO: 1988294 - RNA, 19 nt, Human
caaaagaguguaaaauauu

SEQ ID NO: 1988295 - RNA, 16 nt, Human
auuuuuuuuucuuuca

SEQ ID NO: 1988296 - RNA, 19 nt, Human
caaaccaucauugaaaucu

SEQ ID NO: 1988297 - RNA, 21 nt, Human
caaaccaucauugaaaucuuu

SEQ ID NO: 1988298 - RNA, 17 nt, Human
caaacccacccuuucua

SEQ ID NO: 1988299 - RNA, 15 nt, Human
caaaaggcuugcaga

SEQ ID NO: 1988300 - RNA, 19 nt, Human
caaaaggcuugcagaacuu

SEQ ID NO: 1988301 - RNA, 16 nt, Human
caaacagaugcucuga

SEQ ID NO: 1988302 - RNA, 18 nt, Human
caaacagauucuuuuaug

SEQ ID NO: 1988303 - RNA, 14 nt, Human
caacaauucagcau

SEQ ID NO: 1988304 - RNA, 17 nt, Human
caacaaucccaaggccc

SEQ ID NO: 1988305 - RNA, 23 nt, Human
caacaauucucccgggacucugc

SEQ ID NO: 1988306 - RNA, 20 nt, Human
caacaccucugcacaagcug

SEQ ID NO: 1988307 - RNA, 22 nt, Human
caaauggaaaugggcagagcag

SEQ ID NO: 1988308 - RNA, 21 nt, Human
caaauggaaaugggcagagca

SEQ ID NO: 1988309 - RNA, 16 nt, Human
caacaaggcaaaaaca

SEQ ID NO: 1988310 - RNA, 19 nt, Human
caacaaggcuugcugcaga

SEQ ID NO: 1988311 - RNA, 20 nt, Human
caaauggaaaugggcagagc

SEQ ID NO: 1988312 - RNA, 14 nt, Human
caaauggaaacaga

SEQ ID NO: 1988313 - RNA, 20 nt, Human
caaauggaaacagaggacca

SEQ ID NO: 1988314 - RNA, 21 nt, Human
caaauggaaacagaggaccag

SEQ ID NO: 1988315 - RNA, 18 nt, Human
caaauccugcauuuagau

SEQ ID NO: 1988316 - RNA, 14 nt, Human
caacacuaacauga

SEQ ID NO: 1988317 - RNA, 17 nt, Human
caaagcagugcaugcug

SEQ ID NO: 1988318 - RNA, 15 nt, Human
caaagcagugcaugc

SEQ ID NO: 1988319 - RNA, 22 nt, Human
caaaguacacuguuucaaacuu

SEQ ID NO: 1988320 - RNA, 17 nt, Human
caaaguacagguacuuu

SEQ ID NO: 1988321 - RNA, 19 nt, Human
caaaguacagguacuuugu

SEQ ID NO: 1988322 - RNA, 20 nt, Human
caaaguacagguacuuuguc

SEQ ID NO: 1988323 - RNA, 21 nt, Human
caaaguacagguacuuugucu

SEQ ID NO: 1988324 - RNA, 21 nt, Human
caaaguagaagucuuagaugu

SEQ ID NO: 1988325 - RNA, 14 nt, Human
caaaguagaagucu

SEQ ID NO: 1988326 - RNA, 21 nt, Human
caaagucucuggaauuugaaa

SEQ ID NO: 1988327 - RNA, 15 nt, Human
caaauccgaaaucag

SEQ ID NO: 1988328 - RNA, 21 nt, Human
caaauccaggacccugccagg

SEQ ID NO: 1988329 - RNA, 22 nt, Human
caaauccaggacccugccaggc

SEQ ID NO: 1988330 - RNA, 22 nt, Human
caaagugcuauuacgaaguuca

SEQ ID NO: 1988331 - RNA, 22 nt, Human
caaagauauuuugcuuugugau

SEQ ID NO: 1988332 - RNA, 23 nt, Human
caaagauauuuugcuuugugauu

SEQ ID NO: 1988333 - RNA, 17 nt, Human
caaagcaaaccaacaag

SEQ ID NO: 1988334 - RNA, 15 nt, Human
caaagcagagagcau

SEQ ID NO: 1988335 - RNA, 18 nt, Human
caaagcagcaacacacau

SEQ ID NO: 1988336 - RNA, 17 nt, Human
caaagcaccaaaauaag

SEQ ID NO: 1988337 - RNA, 18 nt, Human
caaagcaccaaaauaaga

SEQ ID NO: 1988338 - RNA, 19 nt, Human
caaagcaccaaaauaagaa

SEQ ID NO: 1988339 - RNA, 21 nt, Human
caaagcaccaaaauaagaaaa

SEQ ID NO: 1988340 - RNA, 22 nt, Human
caaagcaccaaaauaagaaaag

SEQ ID NO: 1988341 - RNA, 24 nt, Human
caaagcaccaaaauaagaaaagau

SEQ ID NO: 1988342 - RNA, 16 nt, Human
auuugcagcuuccaau

SEQ ID NO: 1988343 - RNA, 16 nt, Human
auuugauuuguacaga

SEQ ID NO: 1988344 - RNA, 19 nt, Human
auuugauuuuuauuauuaa

SEQ ID NO: 1988345 - RNA, 14 nt, Human
auuugauuuauuaa

SEQ ID NO: 1988346 - RNA, 15 nt, Human
auuugauuuauuaac

SEQ ID NO: 1988347 - RNA, 17 nt, Human
auuugauuuauuaacuu

SEQ ID NO: 1988348 - RNA, 18 nt, Human
auuugauuuauuaacuua

SEQ ID NO: 1988349 - RNA, 22 nt, Human
auuugauuuauuaacuuaauaa

SEQ ID NO: 1988350 - RNA, 16 nt, Human
auuugcuaugagcugg

SEQ ID NO: 1988351 - RNA, 20 nt, Human
auuugcuaugagcuggggau

SEQ ID NO: 1988352 - RNA, 15 nt, Human
auuugccaauaauaa

SEQ ID NO: 1988353 - RNA, 16 nt, Human
auuugccaauaauaau

SEQ ID NO: 1988354 - RNA, 13 nt, Human
auuugccauagag

SEQ ID NO: 1988355 - RNA, 15 nt, Human
auuugccauagagua

SEQ ID NO: 1988356 - RNA, 21 nt, Human
auuugccauagaguacacugc

SEQ ID NO: 1988357 - RNA, 15 nt, Human
auuugugauacaaug

SEQ ID NO: 1988358 - RNA, 17 nt, Human
auuugugauacaaugcu

SEQ ID NO: 1988359 - RNA, 20 nt, Human
auuugugauacaaugcugug

SEQ ID NO: 1988360 - RNA, 17 nt, Human
auuugugauguacugua

SEQ ID NO: 1988361 - RNA, 14 nt, Human
auuugugccagaau

SEQ ID NO: 1988362 - RNA, 13 nt, Human
auuugcuccuuuc

SEQ ID NO: 1988363 - RNA, 15 nt, Human
auuugcuaucucuau

SEQ ID NO: 1988364 - RNA, 13 nt, Human
auuuggaaaauaa

SEQ ID NO: 1988365 - RNA, 12 nt, Human
auuuggaaaaua

SEQ ID NO: 1988366 - RNA, 22 nt, Human
auuugcuuaaauauccauauua

SEQ ID NO: 1988367 - RNA, 14 nt, Human
auuugcuuuggaag

SEQ ID NO: 1988368 - RNA, 15 nt, Human
auuugcuuuggaagu

SEQ ID NO: 1988369 - RNA, 13 nt, Human
auuugcuuuggaa

SEQ ID NO: 1988370 - RNA, 15 nt, Human
auuugcucauaugaa

SEQ ID NO: 1988371 - RNA, 14 nt, Human
auuugugugcuaaa

SEQ ID NO: 1988372 - RNA, 15 nt, Human
auuugugugcuaaac

SEQ ID NO: 1988373 - RNA, 16 nt, Human
auuuguugauucucuc

SEQ ID NO: 1988374 - RNA, 15 nt, Human
auuuguggugauuug

SEQ ID NO: 1988375 - RNA, 22 nt, Human
auuuguggggagggauuugggg

SEQ ID NO: 1988376 - RNA, 22 nt, Human
auuuguuugaacugauaaagau

SEQ ID NO: 1988377 - RNA, 23 nt, Human
auuuguuugaacugauaaagaug

SEQ ID NO: 1988378 - RNA, 18 nt, Human
auuuguugauucucucca

SEQ ID NO: 1988379 - RNA, 14 nt, Human
auuuguuuaaagua

SEQ ID NO: 1988380 - RNA, 17 nt, Human
auuuuauagcuacuaau

SEQ ID NO: 1988381 - RNA, 21 nt, Human
auuuguuugguuauagugcaa

SEQ ID NO: 1988382 - RNA, 23 nt, Human
auuuguuugguuauagugcaaua

SEQ ID NO: 1988383 - RNA, 19 nt, Human
auuuuauagcuacuaauuu

SEQ ID NO: 1988384 - RNA, 19 nt, Human
auucauagcagcuuauuca

SEQ ID NO: 1988385 - RNA, 22 nt, Human
auucauagcagcuuauucacaa

SEQ ID NO: 1988386 - RNA, 19 nt, Human
auucauaaugacuuaagca

SEQ ID NO: 1988387 - RNA, 21 nt, Human
auucauaauuauuauuuggcc

SEQ ID NO: 1988388 - RNA, 15 nt, Human
auucauaaugacuua

SEQ ID NO: 1988389 - RNA, 14 nt, Human
auucauaaugacuu

SEQ ID NO: 1988390 - RNA, 23 nt, Human
auuaugcaugaaguaauaugcac

SEQ ID NO: 1988391 - RNA, 18 nt, Human
auucaauuaaagaaauaa

SEQ ID NO: 1988392 - RNA, 19 nt, Human
auucaauuaaagaaauaau

SEQ ID NO: 1988393 - RNA, 21 nt, Human
auucaauuaaagaaauaauuu

SEQ ID NO: 1988394 - RNA, 22 nt, Human
auucaauuaaagaaauaauuuu

SEQ ID NO: 1988395 - RNA, 12 nt, Human
auucaauuaaag

SEQ ID NO: 1988396 - RNA, 17 nt, Human
auucaauuaaagaaaua

SEQ ID NO: 1988397 - RNA, 16 nt, Human
auucaaauguauuaca

SEQ ID NO: 1988398 - RNA, 18 nt, Human
auucaaugccccugaauu

SEQ ID NO: 1988399 - RNA, 20 nt, Human
auucaaugccccugaauuua

SEQ ID NO: 1988400 - RNA, 14 nt, Human
auucacaccccacc

SEQ ID NO: 1988401 - RNA, 15 nt, Human
auucacaccccaccu

SEQ ID NO: 1988402 - RNA, 16 nt, Human
auucacaccccaccug

SEQ ID NO: 1988403 - RNA, 17 nt, Human
auucacaccccaccugc

SEQ ID NO: 1988404 - RNA, 18 nt, Human
auucacaccccaccugcg

SEQ ID NO: 1988405 - RNA, 16 nt, Human
auucacacuugaacca

SEQ ID NO: 1988406 - RNA, 19 nt, Human
auucacaagacccaaaagg

SEQ ID NO: 1988407 - RNA, 18 nt, Human
auuaugaaacuuuuggaa

SEQ ID NO: 1988408 - RNA, 21 nt, Human
auuaggugugacugaauuucu

SEQ ID NO: 1988409 - RNA, 15 nt, Human
auuagguauaucucc

SEQ ID NO: 1988410 - RNA, 17 nt, Human
auuagggcucuaauuuc

SEQ ID NO: 1988411 - RNA, 16 nt, Human
auuaggugugacugaa

SEQ ID NO: 1988412 - RNA, 18 nt, Human
auuaggugugacugaauu

SEQ ID NO: 1988413 - RNA, 14 nt, Human
auuaauucucuuuc

SEQ ID NO: 1988414 - RNA, 16 nt, Human
auuaauuaucgugucu

SEQ ID NO: 1988415 - RNA, 16 nt, Human
auuaauguugauuucu

SEQ ID NO: 1988416 - RNA, 17 nt, Human
auuaauguugauuucua

SEQ ID NO: 1988417 - RNA, 20 nt, Human
auuacaagccuggaaaaaaa

SEQ ID NO: 1988418 - RNA, 12 nt, Human
auuaauguugau

SEQ ID NO: 1988419 - RNA, 14 nt, Human
auuaauguugauuu

SEQ ID NO: 1988420 - RNA, 15 nt, Human
auuaauguugauuuc

SEQ ID NO: 1988421 - RNA, 20 nt, Human
auuagcgacaacagauugga

SEQ ID NO: 1988422 - RNA, 17 nt, Human
auuagcaguuugcuuug

SEQ ID NO: 1988423 - RNA, 23 nt, Human
auuagauuucucauuugccaaua

SEQ ID NO: 1988424 - RNA, 20 nt, Human
auuagauuuuaaaacuucau

SEQ ID NO: 1988425 - RNA, 14 nt, Human
auuagcaaaaaaag

SEQ ID NO: 1988426 - RNA, 16 nt, Human
auuagcaaaaaaaguu

SEQ ID NO: 1988427 - RNA, 17 nt, Human
auuagcaaaaaaaguug

SEQ ID NO: 1988428 - RNA, 18 nt, Human
auuagcaaaaaaaguugu

SEQ ID NO: 1988429 - RNA, 19 nt, Human
auuagcaaaaaaaguugua

SEQ ID NO: 1988430 - RNA, 20 nt, Human
auuagcaaaaaaaguuguau

SEQ ID NO: 1988431 - RNA, 21 nt, Human
auuagcaaaaaaaguuguaug

SEQ ID NO: 1988432 - RNA, 22 nt, Human
auuagcaaaaaaaguuguauga

SEQ ID NO: 1988433 - RNA, 19 nt, Human
auuacaguggggaaugaag

SEQ ID NO: 1988434 - RNA, 23 nt, Human
auuacagucucacucagaacugu

SEQ ID NO: 1988435 - RNA, 15 nt, Human
auuacagugccuaaa

SEQ ID NO: 1988436 - RNA, 18 nt, Human
auuacagugccuaaaaua

SEQ ID NO: 1988437 - RNA, 19 nt, Human
auuacagugccuaaaauaa

SEQ ID NO: 1988438 - RNA, 17 nt, Human
auuacaggaaguacugg

SEQ ID NO: 1988439 - RNA, 16 nt, Human
auuacaggugugaacc

SEQ ID NO: 1988440 - RNA, 18 nt, Human
auguuugccucugccucu

SEQ ID NO: 1988441 - RNA, 23 nt, Human
auguuugggagacugcugaguca

SEQ ID NO: 1988442 - RNA, 17 nt, Human
auguuugguaccaagaa

SEQ ID NO: 1988443 - RNA, 14 nt, Human
auguuuguacaaga

SEQ ID NO: 1988444 - RNA, 18 nt, Human
auguuuguacaagauugu

SEQ ID NO: 1988445 - RNA, 17 nt, Human
auguuugugcaguaacu

SEQ ID NO: 1988446 - RNA, 19 nt, Human
auguuugugcaguaacuug

SEQ ID NO: 1988447 - RNA, 22 nt, Human
auguuugugcaguaacuuggga

SEQ ID NO: 1988448 - RNA, 22 nt, Human
auuguuguccgguuuacuuuaa

SEQ ID NO: 1988449 - RNA, 20 nt, Human
auuguugcauagguuagaua

SEQ ID NO: 1988450 - RNA, 19 nt, Human
auugcugauggugcaauga

SEQ ID NO: 1988451 - RNA, 18 nt, Human
auugcugauggugcaaug

SEQ ID NO: 1988452 - RNA, 16 nt, Human
auugcugauggugcaa

SEQ ID NO: 1988453 - RNA, 15 nt, Human
auugcugauggugca

SEQ ID NO: 1988454 - RNA, 21 nt, Human
auugcugaauggaguuaaacu

SEQ ID NO: 1988455 - RNA, 12 nt, Human
auugcuccuuga

SEQ ID NO: 1988456 - RNA, 20 nt, Human
auugcuccugcucagaucuu

SEQ ID NO: 1988457 - RNA, 13 nt, Human
auugcucacaguu

SEQ ID NO: 1988458 - RNA, 17 nt, Human
auugcucacaguuauua

SEQ ID NO: 1988459 - RNA, 21 nt, Human
auugcucacaguuauuacaua

SEQ ID NO: 1988460 - RNA, 14 nt, Human
auugcuugagcuca

SEQ ID NO: 1988461 - RNA, 13 nt, Human
auugcuucuucug

SEQ ID NO: 1988462 - RNA, 14 nt, Human
auugcuucuucuga

SEQ ID NO: 1988463 - RNA, 10 nt, Human
auugcuucuu

SEQ ID NO: 1988464 - RNA, 23 nt, Human
auugcugauggugcaaugaccuu

SEQ ID NO: 1988465 - RNA, 12 nt, Human
auugcugcuuga

SEQ ID NO: 1988466 - RNA, 23 nt, Human
auugugucucuugguccugcugc

SEQ ID NO: 1988467 - RNA, 21 nt, Human
auugugucucuugguccugcu

SEQ ID NO: 1988468 - RNA, 22 nt, Human
auuguaauguugugaauaauua

SEQ ID NO: 1988469 - RNA, 23 nt, Human
auuguaauguugugaauaauuac

SEQ ID NO: 1988470 - RNA, 18 nt, Human
auuguaauuaauaauaga

SEQ ID NO: 1988471 - RNA, 14 nt, Human
auugugugaacuug

SEQ ID NO: 1988472 - RNA, 18 nt, Human
auugugugauauuucaga

SEQ ID NO: 1988473 - RNA, 20 nt, Human
auugugugauauuucagaaa

SEQ ID NO: 1988474 - RNA, 16 nt, Human
auuguuagucucuuga

SEQ ID NO: 1988475 - RNA, 15 nt, Human
auuguuacuccauau

SEQ ID NO: 1988476 - RNA, 15 nt, Human
auuguucaauuccca

SEQ ID NO: 1988477 - RNA, 14 nt, Human
auuguaaaauggug

SEQ ID NO: 1988478 - RNA, 18 nt, Human
auugcuugagcucaggag

SEQ ID NO: 1988479 - RNA, 23 nt, Human
auuguaauaggcguaacuaauuu

SEQ ID NO: 1988480 - RNA, 12 nt, Human
auuguaauguug

SEQ ID NO: 1988481 - RNA, 14 nt, Human
auuguaauguugug

SEQ ID NO: 1988482 - RNA, 17 nt, Human
auuguaauguugugaau

SEQ ID NO: 1988483 - RNA, 20 nt, Human
auuguaauguugugaauaau

SEQ ID NO: 1988484 - RNA, 13 nt, Human
auucuuuccugag

SEQ ID NO: 1988485 - RNA, 12 nt, Human
auucugaaguua

SEQ ID NO: 1988486 - RNA, 14 nt, Human
auucugaaguuaua

SEQ ID NO: 1988487 - RNA, 15 nt, Human
auucugaaguuauau

SEQ ID NO: 1988488 - RNA, 18 nt, Human
auucugaaguuauauuuc

SEQ ID NO: 1988489 - RNA, 20 nt, Human
auucugaaguuauauuuccu

SEQ ID NO: 1988490 - RNA, 22 nt, Human
auucugaaguuauauuuccuau

SEQ ID NO: 1988491 - RNA, 12 nt, Human
auucucuuuuca

SEQ ID NO: 1988492 - RNA, 11 nt, Human
auucuucugcu

SEQ ID NO: 1988493 - RNA, 12 nt, Human
auucuucugcuu

SEQ ID NO: 1988494 - RNA, 14 nt, Human
auucugaccuuaaa

SEQ ID NO: 1988495 - RNA, 11 nt, Human
auucuuuccug

SEQ ID NO: 1988496 - RNA, 21 nt, Human
auucuugaugaaaagcuuugu

SEQ ID NO: 1988497 - RNA, 22 nt, Human
auucuugaugaaaagcuuuguu

SEQ ID NO: 1988498 - RNA, 17 nt, Human
auucuugaucaguaguu

SEQ ID NO: 1988499 - RNA, 19 nt, Human
auucuugaucaguaguuug

SEQ ID NO: 1988500 - RNA, 21 nt, Human
auucuugaucaguaguuugca

SEQ ID NO: 1988501 - RNA, 22 nt, Human
auucuugaucaguaguuugcau

SEQ ID NO: 1988502 - RNA, 10 nt, Human
auucuugaug

SEQ ID NO: 1988503 - RNA, 14 nt, Human
auucuugaugaaaa

SEQ ID NO: 1988504 - RNA, 18 nt, Human
auucuugaugaaaagcuu

SEQ ID NO: 1988505 - RNA, 14 nt, Human
auucuucugcuuca

SEQ ID NO: 1988506 - RNA, 12 nt, Human
auucuucugauc

SEQ ID NO: 1988507 - RNA, 15 nt, Human
auucuucugaucacu

SEQ ID NO: 1988508 - RNA, 22 nt, Human
auugagucauuuuauauaugaa

SEQ ID NO: 1988509 - RNA, 21 nt, Human
auugauaagaaccuuuugagu

SEQ ID NO: 1988510 - RNA, 17 nt, Human
auugauaaccauagcau

SEQ ID NO: 1988511 - RNA, 15 nt, Human
auugcuacuguccua

SEQ ID NO: 1988512 - RNA, 13 nt, Human
auugauagaauaa

SEQ ID NO: 1988513 - RNA, 17 nt, Human
auugauaugcuuauaca

SEQ ID NO: 1988514 - RNA, 20 nt, Human
auugcuacuguccuacccac

SEQ ID NO: 1988515 - RNA, 22 nt, Human
auugcuacuguccuacccaccc

SEQ ID NO: 1988516 - RNA, 17 nt, Human
gccuccaaccccucgcc

SEQ ID NO: 1988517 - RNA, 17 nt, Human
gccuccaagcuccaucu

SEQ ID NO: 1988518 - RNA, 20 nt, Human
gccuccaaccccucgcccag

SEQ ID NO: 1988519 - RNA, 21 nt, Human
gccuccaaccccucgcccagu

SEQ ID NO: 1988520 - RNA, 22 nt, Human
gccuccaaccccucgcccaguc

SEQ ID NO: 1988521 - RNA, 22 nt, Human
gccuccaauuuuuuaagugaaa

SEQ ID NO: 1988522 - RNA, 16 nt, Human
gccuccauccugaggc

SEQ ID NO: 1988523 - RNA, 20 nt, Human
gccuccauccugaggcucca

SEQ ID NO: 1988524 - RNA, 21 nt, Human
gccuccuuugugaggaagccg

SEQ ID NO: 1988525 - RNA, 20 nt, Human
gccuccuuugugaggaagcc

SEQ ID NO: 1988526 - RNA, 19 nt, Human
gccuccuuugugaggaagc

SEQ ID NO: 1988527 - RNA, 11 nt, Human
gccuccaugcu

SEQ ID NO: 1988528 - RNA, 13 nt, Human
gccugcuccagcu

SEQ ID NO: 1988529 - RNA, 18 nt, Human
gccucgcaggccucccug

SEQ ID NO: 1988530 - RNA, 19 nt, Human
gccucgcaggccucccugc

SEQ ID NO: 1988531 - RNA, 21 nt, Human
gccucgcaggccucccugcca

SEQ ID NO: 1988532 - RNA, 15 nt, Human
gccucgacacguggg

SEQ ID NO: 1988533 - RNA, 22 nt, Human
gccucgacacgugggcuccccu

SEQ ID NO: 1988534 - RNA, 20 nt, Human
gccuccuugauauuuguauu

SEQ ID NO: 1988535 - RNA, 13 nt, Human
gccucggacuuag

SEQ ID NO: 1988536 - RNA, 17 nt, Human
gccugcuaauuccccag

SEQ ID NO: 1988537 - RNA, 23 nt, Human
gccugcuaauuccccagauugca

SEQ ID NO: 1988538 - RNA, 13 nt, Human
gccugcccuguca

SEQ ID NO: 1988539 - RNA, 19 nt, Human
gccugcccugucaggaggc

SEQ ID NO: 1988540 - RNA, 16 nt, Human
gccugcccuuuguccu

SEQ ID NO: 1988541 - RNA, 19 nt, Human
gccugcccuuuguccuccu

SEQ ID NO: 1988542 - RNA, 20 nt, Human
gccugcccuuuguccuccug

SEQ ID NO: 1988543 - RNA, 22 nt, Human
gccugcccuuuguccuccugcu

SEQ ID NO: 1988544 - RNA, 17 nt, Human
gcgauucuucugcuuca

SEQ ID NO: 1988545 - RNA, 21 nt, Human
gcgauucucuugccucagcuu

SEQ ID NO: 1988546 - RNA, 14 nt, Human
gcgauucuucugcu

SEQ ID NO: 1988547 - RNA, 13 nt, Human
gcgauucuucugc

SEQ ID NO: 1988548 - RNA, 15 nt, Human
gcgagagucccugca

SEQ ID NO: 1988549 - RNA, 13 nt, Human
gcggccucagagu

SEQ ID NO: 1988550 - RNA, 18 nt, Human
gcgugcacacaccagagc

SEQ ID NO: 1988551 - RNA, 20 nt, Human
gcgugaucaaagccacacuc

SEQ ID NO: 1988552 - RNA, 14 nt, Human
gcgugcacacacca

SEQ ID NO: 1988553 - RNA, 20 nt, Human
gcgugguggacaugcacagc

SEQ ID NO: 1988554 - RNA, 22 nt, Human
gcguggcccaccaggccccccu

SEQ ID NO: 1988555 - RNA, 17 nt, Human
gcguggcccaccaggcc

SEQ ID NO: 1988556 - RNA, 13 nt, Human
gcguggggcuccc

SEQ ID NO: 1988557 - RNA, 18 nt, Human
gcguggggcucccgccuc

SEQ ID NO: 1988558 - RNA, 17 nt, Human
gcuacuugggaggcuga

SEQ ID NO: 1988559 - RNA, 19 nt, Human
gcuagaaaaauuguuaagg

SEQ ID NO: 1988560 - RNA, 16 nt, Human
gcuacuugguggguuu

SEQ ID NO: 1988561 - RNA, 19 nt, Human
gcuacuguaaggcaaucau

SEQ ID NO: 1988562 - RNA, 18 nt, Human
gcuacuguaaggcaauca

SEQ ID NO: 1988563 - RNA, 19 nt, Human
gcuacuguccuacccaccc

SEQ ID NO: 1988564 - RNA, 20 nt, Human
gcuacuguccuacccacccu

SEQ ID NO: 1988565 - RNA, 17 nt, Human
gcguuucuaugacacau

SEQ ID NO: 1988566 - RNA, 14 nt, Human
gcuaauucuuugca

SEQ ID NO: 1988567 - RNA, 15 nt, Human
gcuaauucuuugcaa

SEQ ID NO: 1988568 - RNA, 17 nt, Human
gcuaauucuuugcaaaa

SEQ ID NO: 1988569 - RNA, 12 nt, Human
gcuaauuguacc

SEQ ID NO: 1988570 - RNA, 18 nt, Human
gcuaauuuugaaaaacug

SEQ ID NO: 1988571 - RNA, 16 nt, Human
gcuaauuuuucauuuu

SEQ ID NO: 1988572 - RNA, 17 nt, Human
gcccaggccccugccac

SEQ ID NO: 1988573 - RNA, 18 nt, Human
gcccaggccccugccacc

SEQ ID NO: 1988574 - RNA, 13 nt, Human
gcccaggcagguc

SEQ ID NO: 1988575 - RNA, 12 nt, Human
gcccaggcaggu

SEQ ID NO: 1988576 - RNA, 13 nt, Human
gcccaggagggag

SEQ ID NO: 1988577 - RNA, 14 nt, Human
gcccaggcaggucu

SEQ ID NO: 1988578 - RNA, 16 nt, Human
gcccaggcaggucuug

SEQ ID NO: 1988579 - RNA, 15 nt, Human
gcccaggccccugcc

SEQ ID NO: 1988580 - RNA, 13 nt, Human
gcccaggccccug

SEQ ID NO: 1988581 - RNA, 16 nt, Human
gccaugugcuucugcc

SEQ ID NO: 1988582 - RNA, 15 nt, Human
gcccaggagcccauu

SEQ ID NO: 1988583 - RNA, 11 nt, Human
gcccaggagcc

SEQ ID NO: 1988584 - RNA, 13 nt, Human
gcccaggagccca

SEQ ID NO: 1988585 - RNA, 14 nt, Human
gcccaggagcccau

SEQ ID NO: 1988586 - RNA, 15 nt, Human
gccaucaacuaaagu

SEQ ID NO: 1988587 - RNA, 21 nt, Human
gccaucaacuaaaguuguacu

SEQ ID NO: 1988588 - RNA, 14 nt, Human
gccaugugccaggu

SEQ ID NO: 1988589 - RNA, 11 nt, Human
gcccuaucugu

SEQ ID NO: 1988590 - RNA, 16 nt, Human
gcccucacccuggggc

SEQ ID NO: 1988591 - RNA, 17 nt, Human
gcccuauuucuugauaa

SEQ ID NO: 1988592 - RNA, 17 nt, Human
gcccucacccuggggcu

SEQ ID NO: 1988593 - RNA, 15 nt, Human
gccccuggaugcagc

SEQ ID NO: 1988594 - RNA, 21 nt, Human
gccccaaguuuugugaaauuu

SEQ ID NO: 1988595 - RNA, 15 nt, Human
gccccacaccagccc

SEQ ID NO: 1988596 - RNA, 16 nt, Human
gccccugccucucugc

SEQ ID NO: 1988597 - RNA, 15 nt, Human
gccccugccucucug

SEQ ID NO: 1988598 - RNA, 18 nt, Human
gccccugccucucugcag

SEQ ID NO: 1988599 - RNA, 17 nt, Human
gccccugccucucugca

SEQ ID NO: 1988600 - RNA, 22 nt, Human
gccccugcugguucaggguugg

SEQ ID NO: 1988601 - RNA, 14 nt, Human
gccaggauggaaug

SEQ ID NO: 1988602 - RNA, 12 nt, Human
gccaggcacagg

SEQ ID NO: 1988603 - RNA, 13 nt, Human
gccaggcacaggc

SEQ ID NO: 1988604 - RNA, 14 nt, Human
gccaggcacaggca

SEQ ID NO: 1988605 - RNA, 15 nt, Human
gccaggcacaggcag

SEQ ID NO: 1988606 - RNA, 16 nt, Human
gccaggcacaggcagg

SEQ ID NO: 1988607 - RNA, 17 nt, Human
gccaggcacaggcaggg

SEQ ID NO: 1988608 - RNA, 19 nt, Human
gccaggcacaggcagggca

SEQ ID NO: 1988609 - RNA, 20 nt, Human
gccaggcacaggcagggcag

SEQ ID NO: 1988610 - RNA, 16 nt, Human
gccagcccagaggccg

SEQ ID NO: 1988611 - RNA, 17 nt, Human
gccagcccauuugggca

SEQ ID NO: 1988612 - RNA, 18 nt, Human
gccagcccauuugggcag

SEQ ID NO: 1988613 - RNA, 19 nt, Human
gccagcccauuugggcaga

SEQ ID NO: 1988614 - RNA, 22 nt, Human
gccagcccauuugggcagagag

SEQ ID NO: 1988615 - RNA, 13 nt, Human
gccaggccagcug

SEQ ID NO: 1988616 - RNA, 14 nt, Human
gccaggcccucugc

SEQ ID NO: 1988617 - RNA, 13 nt, Human
gccaggcccucug

SEQ ID NO: 1988618 - RNA, 18 nt, Human
gccaggccacaagacccu

SEQ ID NO: 1988619 - RNA, 13 nt, Human
gccaggccacaag

SEQ ID NO: 1988620 - RNA, 21 nt, Human
gccaggccacaagacccuugu

SEQ ID NO: 1988621 - RNA, 15 nt, Human
gccaggccagaggga

SEQ ID NO: 1988622 - RNA, 12 nt, Human
gccaggccagcu

SEQ ID NO: 1988623 - RNA, 22 nt, Human
gccaggccagagggagugacag

SEQ ID NO: 1988624 - RNA, 13 nt, Human
gccaguugguccc

SEQ ID NO: 1988625 - RNA, 18 nt, Human
gccagugcgggugcagac

SEQ ID NO: 1988626 - RNA, 13 nt, Human
gccagugugacaa

SEQ ID NO: 1988627 - RNA, 14 nt, Human
gccaguggcuggau

SEQ ID NO: 1988628 - RNA, 23 nt, Human
gccaguggcuggaucugugaggg

SEQ ID NO: 1988629 - RNA, 21 nt, Human
gccaguuggucccccuuccau

SEQ ID NO: 1988630 - RNA, 20 nt, Human
gccaguuggucccccuucca

SEQ ID NO: 1988631 - RNA, 18 nt, Human
gccaguuggucccccuuc

SEQ ID NO: 1988632 - RNA, 16 nt, Human
gccaguuggucccccu

SEQ ID NO: 1988633 - RNA, 20 nt, Human
gccaguuuuguuuccuuuca

SEQ ID NO: 1988634 - RNA, 21 nt, Human
gccaguucuuuccauaauaaa

SEQ ID NO: 1988635 - RNA, 23 nt, Human
gccaguuggucccccuuccaugg

SEQ ID NO: 1988636 - RNA, 22 nt, Human
gccaguuggucccccuuccaug

SEQ ID NO: 1988637 - RNA, 16 nt, Human
gccauaugaaaaggcu

SEQ ID NO: 1988638 - RNA, 20 nt, Human
gccauaagcaacaauuuuca

SEQ ID NO: 1988639 - RNA, 21 nt, Human
gccauaagcaacaauuuucag

SEQ ID NO: 1988640 - RNA, 23 nt, Human
gccauaagcaacaauuuucagau

SEQ ID NO: 1988641 - RNA, 17 nt, Human
gccauagaguacacugc

SEQ ID NO: 1988642 - RNA, 18 nt, Human
gccauagaguacacugcc

SEQ ID NO: 1988643 - RNA, 19 nt, Human
gccauagaguacacugccu

SEQ ID NO: 1988644 - RNA, 22 nt, Human
gccauagaguacacugccugcc

SEQ ID NO: 1988645 - RNA, 15 nt, Human
gccauaggcccuuuc

SEQ ID NO: 1988646 - RNA, 16 nt, Human
gccauaggcccuuuca

SEQ ID NO: 1988647 - RNA, 17 nt, Human
gcuuugaucccuucuua

SEQ ID NO: 1988648 - RNA, 14 nt, Human
gcuuugaucccuuc

SEQ ID NO: 1988649 - RNA, 15 nt, Human
gcuuuuggucugugu

SEQ ID NO: 1988650 - RNA, 18 nt, Human
gcuuuugucuaugggacu

SEQ ID NO: 1988651 - RNA, 12 nt, Human
gcuuuugugcau

SEQ ID NO: 1988652 - RNA, 20 nt, Human
gcuuuuuuaucaugugaaau

SEQ ID NO: 1988653 - RNA, 18 nt, Human
gcuuuuuuaucaugugaa

SEQ ID NO: 1988654 - RNA, 15 nt, Human
gcuuuuuuaucaugu

SEQ ID NO: 1988655 - RNA, 15 nt, Human
ggaaacagaggacca

SEQ ID NO: 1988656 - RNA, 16 nt, Human
ggaaacagaggaccag

SEQ ID NO: 1988657 - RNA, 17 nt, Human
ggaaacagaggaccagc

SEQ ID NO: 1988658 - RNA, 23 nt, Human
ggaaacacuaaauguuaaagaug

SEQ ID NO: 1988659 - RNA, 16 nt, Human
ggaaacacuaaauguu

SEQ ID NO: 1988660 - RNA, 17 nt, Human
ggaaacacuaaauguua

SEQ ID NO: 1988661 - RNA, 19 nt, Human
ggaaacacuaaauguuaaa

SEQ ID NO: 1988662 - RNA, 21 nt, Human
ggaaacacuaaauguuaaaga

SEQ ID NO: 1988663 - RNA, 16 nt, Human
ggaaacccagcucugg

SEQ ID NO: 1988664 - RNA, 16 nt, Human
ggaaacaacagcuuua

SEQ ID NO: 1988665 - RNA, 13 nt, Human
ggaaacaacagcu

SEQ ID NO: 1988666 - RNA, 13 nt, Human
gcuuuuuuugaaa

SEQ ID NO: 1988667 - RNA, 22 nt, Human
gcuuuuuucucugauacagaaa

SEQ ID NO: 1988668 - RNA, 18 nt, Human
ggaaaauuuuaaaaauac

SEQ ID NO: 1988669 - RNA, 20 nt, Human
ggaagacuucaucccucugg

SEQ ID NO: 1988670 - RNA, 17 nt, Human
ggaagacuucaucccuc

SEQ ID NO: 1988671 - RNA, 19 nt, Human
ggaagaauuuacuuuggaa

SEQ ID NO: 1988672 - RNA, 19 nt, Human
ggaacacuccuucacagau

SEQ ID NO: 1988673 - RNA, 15 nt, Human
ggaacacuccuucac

SEQ ID NO: 1988674 - RNA, 23 nt, Human
ggaacaaggcaaggcugucaauu

SEQ ID NO: 1988675 - RNA, 13 nt, Human
ggaacaaguugag

SEQ ID NO: 1988676 - RNA, 23 nt, Human
ggaacaaguugagcuaugacuua

SEQ ID NO: 1988677 - RNA, 13 nt, Human
ggaacaccuccuc

SEQ ID NO: 1988678 - RNA, 17 nt, Human
ggaacaccauaggucac

SEQ ID NO: 1988679 - RNA, 14 nt, Human
ggaacugcugggcu

SEQ ID NO: 1988680 - RNA, 15 nt, Human
ggaacugcugggcuu

SEQ ID NO: 1988681 - RNA, 15 nt, Human
ggaagaaaacacugu

SEQ ID NO: 1988682 - RNA, 16 nt, Human
ggaagacaaugugaaa

SEQ ID NO: 1988683 - RNA, 14 nt, Human
ggaagacaauguga

SEQ ID NO: 1988684 - RNA, 21 nt, Human
ggaacaaggcaaggcugucaa

SEQ ID NO: 1988685 - RNA, 17 nt, Human
ggaacaaggcaaggcug

SEQ ID NO: 1988686 - RNA, 15 nt, Human
ggaacaaggcaaggc

SEQ ID NO: 1988687 - RNA, 13 nt, Human
ggaacaaaucuuc

SEQ ID NO: 1988688 - RNA, 15 nt, Human
ggaacaaaucuuccu

SEQ ID NO: 1988689 - RNA, 17 nt, Human
ggaaaugucaacaagua

SEQ ID NO: 1988690 - RNA, 18 nt, Human
ggaaaugguauccagaau

SEQ ID NO: 1988691 - RNA, 14 nt, Human
ggaaauuaagaaga

SEQ ID NO: 1988692 - RNA, 19 nt, Human
ggaaauuaagaagaaacua

SEQ ID NO: 1988693 - RNA, 12 nt, Human
ggaaauuucacg

SEQ ID NO: 1988694 - RNA, 22 nt, Human
ggaaaugggcagagcagagacc

SEQ ID NO: 1988695 - RNA, 18 nt, Human
ggaaaugggcagagcaga

SEQ ID NO: 1988696 - RNA, 17 nt, Human
ggaaaugggcagagcag

SEQ ID NO: 1988697 - RNA, 16 nt, Human
ggaaaugggcagagca

SEQ ID NO: 1988698 - RNA, 14 nt, Human
ggaaaugggcagag

SEQ ID NO: 1988699 - RNA, 14 nt, Human
ggaaaugcugauuu

SEQ ID NO: 1988700 - RNA, 14 nt, Human
ggaaaccugucuga

SEQ ID NO: 1988701 - RNA, 23 nt, Human
gcugguucaggguuggccccugc

SEQ ID NO: 1988702 - RNA, 20 nt, Human
gcuguagacauuugcuauga

SEQ ID NO: 1988703 - RNA, 19 nt, Human
gcuguauuagucacagaga

SEQ ID NO: 1988704 - RNA, 13 nt, Human
gcuggaucuguga

SEQ ID NO: 1988705 - RNA, 17 nt, Human
gcuggaguuggggcaga

SEQ ID NO: 1988706 - RNA, 20 nt, Human
gcuggaguuggggcagagga

SEQ ID NO: 1988707 - RNA, 19 nt, Human
gcuggagugcaguggcgaa

SEQ ID NO: 1988708 - RNA, 14 nt, Human
gcuucaaggauccu

SEQ ID NO: 1988709 - RNA, 16 nt, Human
gcuucaaauuguaagc

SEQ ID NO: 1988710 - RNA, 14 nt, Human
gcuucaguggcagc

SEQ ID NO: 1988711 - RNA, 15 nt, Human
gcuucaguggcagcu

SEQ ID NO: 1988712 - RNA, 17 nt, Human
gcuuaaaaaaaacucuu

SEQ ID NO: 1988713 - RNA, 13 nt, Human
gcuuaauuccaau

SEQ ID NO: 1988714 - RNA, 22 nt, Human
gcuuaauuauugauguuuucau

SEQ ID NO: 1988715 - RNA, 13 nt, Human
gcuguuggcuggg

SEQ ID NO: 1988716 - RNA, 21 nt, Human
gcuguugcugauuuuauucuu

SEQ ID NO: 1988717 - RNA, 14 nt, Human
gcuguuggcugggg

SEQ ID NO: 1988718 - RNA, 23 nt, Human
gcuguuggccucugcaaaggaaa

SEQ ID NO: 1988719 - RNA, 16 nt, Human
gcuguuugguuuuaaa

SEQ ID NO: 1988720 - RNA, 19 nt, Human
gcuguuugguuuuaaaaua

SEQ ID NO: 1988721 - RNA, 12 nt, Human
gcugugccucug

SEQ ID NO: 1988722 - RNA, 22 nt, Human
gcuuccagugaggcucugcccu

SEQ ID NO: 1988723 - RNA, 19 nt, Human
gcuuugagguggaagaggg

SEQ ID NO: 1988724 - RNA, 22 nt, Human
gcuuugagguggaagagggcug

SEQ ID NO: 1988725 - RNA, 12 nt, Human
gcuuugauauau

SEQ ID NO: 1988726 - RNA, 19 nt, Human
gcuuuccucaucaggccau

SEQ ID NO: 1988727 - RNA, 17 nt, Human
gcuuuccuacuugcacu

SEQ ID NO: 1988728 - RNA, 13 nt, Human
gcuuucucuucau

SEQ ID NO: 1988729 - RNA, 14 nt, Human
gcuuucucuucaua

SEQ ID NO: 1988730 - RNA, 15 nt, Human
gcuuucucuucauau

SEQ ID NO: 1988731 - RNA, 16 nt, Human
gcuuuccucuuccuga

SEQ ID NO: 1988732 - RNA, 15 nt, Human
gcuuuccuaaaacag

SEQ ID NO: 1988733 - RNA, 18 nt, Human
gcuuguaaauagcucagg

SEQ ID NO: 1988734 - RNA, 19 nt, Human
gcuuguaaauagcucaggu

SEQ ID NO: 1988735 - RNA, 22 nt, Human
gcuuuccccaugucucgacuca

SEQ ID NO: 1988736 - RNA, 21 nt, Human
gcuuuccccaugucucgacuc

SEQ ID NO: 1988737 - RNA, 18 nt, Human
gcuugaccuuuaagagaa

SEQ ID NO: 1988738 - RNA, 23 nt, Human
gcuugaccgugaggccagagaca

SEQ ID NO: 1988739 - RNA, 22 nt, Human
gcuugaccuuuaagagaaauga

SEQ ID NO: 1988740 - RNA, 17 nt, Human
gcuuguaaauagcucag

SEQ ID NO: 1988741 - RNA, 18 nt, Human
gcuugaagcaaacaguug

SEQ ID NO: 1988742 - RNA, 20 nt, Human
gcuugaccgugaggccagag

SEQ ID NO: 1988743 - RNA, 15 nt, Human
gcuucuucagagacu

SEQ ID NO: 1988744 - RNA, 12 nt, Human
gcuucuucagag

SEQ ID NO: 1988745 - RNA, 15 nt, Human
gcuuccugaggggag

SEQ ID NO: 1988746 - RNA, 23 nt, Human
gcuuccugaggggagacagagca

SEQ ID NO: 1988747 - RNA, 23 nt, Human
gcuuccagugaggcucugcccuu

SEQ ID NO: 1988748 - RNA, 21 nt, Human
gcuggagaggagcccugccuc

SEQ ID NO: 1988749 - RNA, 22 nt, Human
gcuggagaggagcccugccucu

SEQ ID NO: 1988750 - RNA, 22 nt, Human
gcuggagauacuuggucacagc

SEQ ID NO: 1988751 - RNA, 12 nt, Human
gcugcugugaag

SEQ ID NO: 1988752 - RNA, 17 nt, Human
gcugccccuggcagccc

SEQ ID NO: 1988753 - RNA, 13 nt, Human
gcugccccugccu

SEQ ID NO: 1988754 - RNA, 14 nt, Human
gcugccccugccuu

SEQ ID NO: 1988755 - RNA, 16 nt, Human
gcugccccuggcagcc

SEQ ID NO: 1988756 - RNA, 15 nt, Human
gcugccccuggcagc

SEQ ID NO: 1988757 - RNA, 13 nt, Human
gcugccccuggca

SEQ ID NO: 1988758 - RNA, 17 nt, Human
gcugccauccagguuca

SEQ ID NO: 1988759 - RNA, 12 nt, Human
gcugcugacagu

SEQ ID NO: 1988760 - RNA, 12 nt, Human
gcugcugagccg

SEQ ID NO: 1988761 - RNA, 14 nt, Human
gcugcugagccgca

SEQ ID NO: 1988762 - RNA, 18 nt, Human
gcugcugagccgcagaga

SEQ ID NO: 1988763 - RNA, 15 nt, Human
gcugcugagccgcag

SEQ ID NO: 1988764 - RNA, 16 nt, Human
gcugcugagccgcaga

SEQ ID NO: 1988765 - RNA, 15 nt, Human
gcugcaccagguaga

SEQ ID NO: 1988766 - RNA, 14 nt, Human
gcugcaccccuucc

SEQ ID NO: 1988767 - RNA, 15 nt, Human
gcugcaccccuuccu

SEQ ID NO: 1988768 - RNA, 16 nt, Human
gcugcaccccuuccug

SEQ ID NO: 1988769 - RNA, 15 nt, Human
gcugcacccucaggc

SEQ ID NO: 1988770 - RNA, 13 nt, Human
gcugcacccucag

SEQ ID NO: 1988771 - RNA, 21 nt, Human
gcugcagagcagugggccugg

SEQ ID NO: 1988772 - RNA, 13 nt, Human
gcugcagagcagu

SEQ ID NO: 1988773 - RNA, 20 nt, Human
gcugcagagcagugggccug

SEQ ID NO: 1988774 - RNA, 19 nt, Human
gcugcaccccuuccugggc

SEQ ID NO: 1988775 - RNA, 20 nt, Human
gcugcaccccuuccugggca

SEQ ID NO: 1988776 - RNA, 21 nt, Human
gcugcaccccuuccugggcac

SEQ ID NO: 1988777 - RNA, 16 nt, Human
gcugcacccucaggca

SEQ ID NO: 1988778 - RNA, 16 nt, Human
gcugcagccugcgcca

SEQ ID NO: 1988779 - RNA, 21 nt, Human
gcugcagccugcgccaccgcc

SEQ ID NO: 1988780 - RNA, 17 nt, Human
gcugcagggcuuuaaaa

SEQ ID NO: 1988781 - RNA, 19 nt, Human
gcugcagggcuuuaaaauu

SEQ ID NO: 1988782 - RNA, 22 nt, Human
gcugccaguggggccugaggcu

SEQ ID NO: 1988783 - RNA, 17 nt, Human
gcugccaguaccagccc

SEQ ID NO: 1988784 - RNA, 12 nt, Human
gcugccauccag

SEQ ID NO: 1988785 - RNA, 13 nt, Human
gcugccauccagg

SEQ ID NO: 1988786 - RNA, 15 nt, Human
gcugaguagcucugc

SEQ ID NO: 1988787 - RNA, 18 nt, Human
gcugaguagcucugccuu

SEQ ID NO: 1988788 - RNA, 15 nt, Human
gcugaggugggagga

SEQ ID NO: 1988789 - RNA, 20 nt, Human
gcucucaggccagcugcuug

SEQ ID NO: 1988790 - RNA, 19 nt, Human
gcucucaggccagcugcuu

SEQ ID NO: 1988791 - RNA, 18 nt, Human
gcucucaggccagcugcu

SEQ ID NO: 1988792 - RNA, 17 nt, Human
gcucucaggccagcugc

SEQ ID NO: 1988793 - RNA, 18 nt, Human
gcucucaaguuaucaggg

SEQ ID NO: 1988794 - RNA, 19 nt, Human
gcucucaccuugguuccug

SEQ ID NO: 1988795 - RNA, 21 nt, Human
gcucucaccuugguuccuggg

SEQ ID NO: 1988796 - RNA, 19 nt, Human
gcucuacugaggugcuaug

SEQ ID NO: 1988797 - RNA, 16 nt, Human
gcuccucuccccagca

SEQ ID NO: 1988798 - RNA, 19 nt, Human
gcuccucuccccagcaagu

SEQ ID NO: 1988799 - RNA, 20 nt, Human
gcuccacuuggucugugaga

SEQ ID NO: 1988800 - RNA, 9 nt, Human
gcuccagac

SEQ ID NO: 1988801 - RNA, 21 nt, Human
gcuccagacacauguccaaga

SEQ ID NO: 1988802 - RNA, 18 nt, Human
gcuccagacacaugucca

SEQ ID NO: 1988803 - RNA, 23 nt, Human
gcuccagacacauguccaagaag

SEQ ID NO: 1988804 - RNA, 19 nt, Human
gcuccucccggugcccaag

SEQ ID NO: 1988805 - RNA, 16 nt, Human
gcuccucccggugccc

SEQ ID NO: 1988806 - RNA, 15 nt, Human
gcuccucuccccagc

SEQ ID NO: 1988807 - RNA, 13 nt, Human
gcuccagcucacc

SEQ ID NO: 1988808 - RNA, 14 nt, Human
gcuccagcucacca

SEQ ID NO: 1988809 - RNA, 11 nt, Human
gcuccagccug

SEQ ID NO: 1988810 - RNA, 23 nt, Human
gcucccaggcauuccccaggagg

SEQ ID NO: 1988811 - RNA, 17 nt, Human
gcuccagcucaccagcc

SEQ ID NO: 1988812 - RNA, 20 nt, Human
gcucugaucauccacugugc

SEQ ID NO: 1988813 - RNA, 14 nt, Human
gcucugacaaagcu

SEQ ID NO: 1988814 - RNA, 17 nt, Human
gcucucuuuuauucugu

SEQ ID NO: 1988815 - RNA, 21 nt, Human
gcucugcccauccugccccug

SEQ ID NO: 1988816 - RNA, 16 nt, Human
gcucuggagcccacug

SEQ ID NO: 1988817 - RNA, 15 nt, Human
gcucuggagcccacu

SEQ ID NO: 1988818 - RNA, 15 nt, Human
gcucugcccauccug

SEQ ID NO: 1988819 - RNA, 19 nt, Human
gcucugacaaagcuucccg

SEQ ID NO: 1988820 - RNA, 21 nt, Human
gcucugaucauccacugugcc

SEQ ID NO: 1988821 - RNA, 22 nt, Human
gcucugaucauccacugugcca

SEQ ID NO: 1988822 - RNA, 17 nt, Human
gcugaauacagaggcaa

SEQ ID NO: 1988823 - RNA, 22 nt, Human
gcugaauugagccuaaaaauaa

SEQ ID NO: 1988824 - RNA, 23 nt, Human
gcugaaggcucgagcaugccugg

SEQ ID NO: 1988825 - RNA, 20 nt, Human
gcugaacuuguuuucuggga

SEQ ID NO: 1988826 - RNA, 14 nt, Human
gcugaggccucuca

SEQ ID NO: 1988827 - RNA, 16 nt, Human
gcugagccuucugagc

SEQ ID NO: 1988828 - RNA, 13 nt, Human
gcugacagacaca

SEQ ID NO: 1988829 - RNA, 12 nt, Human
gcugagccucag

SEQ ID NO: 1988830 - RNA, 16 nt, Human
gcugagccucagucuc

SEQ ID NO: 1988831 - RNA, 22 nt, Human
gcugaaaauugccuuucugugu

SEQ ID NO: 1988832 - RNA, 23 nt, Human
gcugaacagaugaccccugccca

SEQ ID NO: 1988833 - RNA, 15 nt, Human
gcugaacauugcaua

SEQ ID NO: 1988834 - RNA, 17 nt, Human
gcugaacauugcauaua

SEQ ID NO: 1988835 - RNA, 12 nt, Human
gcucuuuuccua

SEQ ID NO: 1988836 - RNA, 17 nt, Human
gcucuggagcccacugu

SEQ ID NO: 1988837 - RNA, 17 nt, Human
gcucugugcccacccuc

SEQ ID NO: 1988838 - RNA, 23 nt, Human
gcucugucgcccaggcuggagug

SEQ ID NO: 1988839 - RNA, 12 nt, Human
ggccugagcugg

SEQ ID NO: 1988840 - RNA, 15 nt, Human
ggccugagcugggau

SEQ ID NO: 1988841 - RNA, 13 nt, Human
ggccuccauccug

SEQ ID NO: 1988842 - RNA, 16 nt, Human
ggccuugaguccccca

SEQ ID NO: 1988843 - RNA, 15 nt, Human
ggccuucucugaagg

SEQ ID NO: 1988844 - RNA, 16 nt, Human
ggccuucucugaagga

SEQ ID NO: 1988845 - RNA, 13 nt, Human
ggccuuuggcuuc

SEQ ID NO: 1988846 - RNA, 13 nt, Human
ggccuuucccacu

SEQ ID NO: 1988847 - RNA, 22 nt, Human
ggcgagaccugauuucuccugc

SEQ ID NO: 1988848 - RNA, 14 nt, Human
ggccuuuggcuuca

SEQ ID NO: 1988849 - RNA, 18 nt, Human
ggcgaaaucccugcucac

SEQ ID NO: 1988850 - RNA, 22 nt, Human
ggcgaaaucccugcucacugca

SEQ ID NO: 1988851 - RNA, 15 nt, Human
ggcgaaucauuuguu

SEQ ID NO: 1988852 - RNA, 22 nt, Human
ggccugagugagaggggaggcc

SEQ ID NO: 1988853 - RNA, 20 nt, Human
ggccugagugagaggggagg

SEQ ID NO: 1988854 - RNA, 21 nt, Human
ggccuggccagaugcaccagc

SEQ ID NO: 1988855 - RNA, 21 nt, Human
ggccugugucuaguuguuuga

SEQ ID NO: 1988856 - RNA, 12 nt, Human
ggccuggcccau

SEQ ID NO: 1988857 - RNA, 20 nt, Human
ggccuguggaucaaauccag

SEQ ID NO: 1988858 - RNA, 23 nt, Human
ggccuucggccuccauccugagg

SEQ ID NO: 1988859 - RNA, 12 nt, Human
ggccuucucuga

SEQ ID NO: 1988860 - RNA, 17 nt, Human
ggcucacugcagccuca

SEQ ID NO: 1988861 - RNA, 16 nt, Human
ggcucacugcauccuc

SEQ ID NO: 1988862 - RNA, 19 nt, Human
ggcucacugcauccuccgc

SEQ ID NO: 1988863 - RNA, 16 nt, Human
ggcucacugcagccuc

SEQ ID NO: 1988864 - RNA, 14 nt, Human
ggcgugcaguggug

SEQ ID NO: 1988865 - RNA, 19 nt, Human
ggcgugcaguggugcgauc

SEQ ID NO: 1988866 - RNA, 14 nt, Human
ggcucagcaaggcc

SEQ ID NO: 1988867 - RNA, 15 nt, Human
ggcucagcaaggcca

SEQ ID NO: 1988868 - RNA, 17 nt, Human
ggcucagcaaggccacc

SEQ ID NO: 1988869 - RNA, 18 nt, Human
ggcucagcaaggccaccu

SEQ ID NO: 1988870 - RNA, 19 nt, Human
ggcucagcaaggccaccuc

SEQ ID NO: 1988871 - RNA, 20 nt, Human
ggcucagcaaggccaccucu

SEQ ID NO: 1988872 - RNA, 21 nt, Human
ggcucagcaaggccaccucuu

SEQ ID NO: 1988873 - RNA, 22 nt, Human
ggcucagcaaggccaccucuuc

SEQ ID NO: 1988874 - RNA, 19 nt, Human
ggcucagcaaaagaugcuu

SEQ ID NO: 1988875 - RNA, 13 nt, Human
ggcucagcaaggc

SEQ ID NO: 1988876 - RNA, 23 nt, Human
ggcucagcaaaagaugcuucuca

SEQ ID NO: 1988877 - RNA, 21 nt, Human
ggcucagcggggacagcuccu

SEQ ID NO: 1988878 - RNA, 22 nt, Human
ggcucagcggggacagcuccuu

SEQ ID NO: 1988879 - RNA, 23 nt, Human
ggcucagcggggacagcuccuuc

SEQ ID NO: 1988880 - RNA, 17 nt, Human
ggcagugggagcugccu

SEQ ID NO: 1988881 - RNA, 20 nt, Human
ggcacagggccuggcccaug

SEQ ID NO: 1988882 - RNA, 16 nt, Human
ggcaccagcagccugg

SEQ ID NO: 1988883 - RNA, 15 nt, Human
ggcaccagcagccug

SEQ ID NO: 1988884 - RNA, 24 nt, Human
ggcacugcuuccagugaggcucug

SEQ ID NO: 1988885 - RNA, 18 nt, Human
ggcagugggagcugccug

SEQ ID NO: 1988886 - RNA, 19 nt, Human
ggcagugggagcugccugu

SEQ ID NO: 1988887 - RNA, 23 nt, Human
ggcauauauguacuaguggcaug

SEQ ID NO: 1988888 - RNA, 18 nt, Human
ggcauccaguaucuugaa

SEQ ID NO: 1988889 - RNA, 21 nt, Human
ggcaucaagaggugggagggc

SEQ ID NO: 1988890 - RNA, 20 nt, Human
ggcauauauuaaaagcaggc

SEQ ID NO: 1988891 - RNA, 13 nt, Human
ggcauccaugggg

SEQ ID NO: 1988892 - RNA, 22 nt, Human
ggcauccauggggucucucaca

SEQ ID NO: 1988893 - RNA, 18 nt, Human
ggcauuuuacuguacaga

SEQ ID NO: 1988894 - RNA, 22 nt, Human
ggcauuuucccccuuggcucuc

SEQ ID NO: 1988895 - RNA, 16 nt, Human
ggccaggcuggucuca

SEQ ID NO: 1988896 - RNA, 18 nt, Human
ggccaggcuggucucaaa

SEQ ID NO: 1988897 - RNA, 14 nt, Human
ggccaggcuggucu

SEQ ID NO: 1988898 - RNA, 23 nt, Human
ggccaaaagcuucccucccugcu

SEQ ID NO: 1988899 - RNA, 15 nt, Human
ggccaaacaggcccu

SEQ ID NO: 1988900 - RNA, 15 nt, Human
ggccaaaagcuuccc

SEQ ID NO: 1988901 - RNA, 17 nt, Human
ggccaaacucaccugcc

SEQ ID NO: 1988902 - RNA, 21 nt, Human
ggccaaacucaccugccccuc

SEQ ID NO: 1988903 - RNA, 19 nt, Human
ggccaguggcuggaucugu

SEQ ID NO: 1988904 - RNA, 16 nt, Human
ggccagugugacaagg

SEQ ID NO: 1988905 - RNA, 14 nt, Human
ggccaucuggagag

SEQ ID NO: 1988906 - RNA, 16 nt, Human
ggccaucuggagagcc

SEQ ID NO: 1988907 - RNA, 20 nt, Human
ggccaucuggagagcccaga

SEQ ID NO: 1988908 - RNA, 19 nt, Human
ggcccagggggcuuccuga

SEQ ID NO: 1988909 - RNA, 22 nt, Human
ggcccagggggcuuccugaggg

SEQ ID NO: 1988910 - RNA, 13 nt, Human
ggccccaccugca

SEQ ID NO: 1988911 - RNA, 16 nt, Human
ggccccaccugcagcu

SEQ ID NO: 1988912 - RNA, 19 nt, Human
ggccccaccugcagcuccc

SEQ ID NO: 1988913 - RNA, 13 nt, Human
ggccccaccuggc

SEQ ID NO: 1988914 - RNA, 15 nt, Human
ggccccaccuggccc

SEQ ID NO: 1988915 - RNA, 22 nt, Human
ggccccaccuggcccucucuga

SEQ ID NO: 1988916 - RNA, 17 nt, Human
ggcccugugccuuggug

SEQ ID NO: 1988917 - RNA, 17 nt, Human
ggcccuucucuccagcc

SEQ ID NO: 1988918 - RNA, 16 nt, Human
ggcccuucucuccagc

SEQ ID NO: 1988919 - RNA, 13 nt, Human
ggcccuuccucuc

SEQ ID NO: 1988920 - RNA, 15 nt, Human
ggcccuuccucucca

SEQ ID NO: 1988921 - RNA, 18 nt, Human
ggcccuucucuccagccc

SEQ ID NO: 1988922 - RNA, 17 nt, Human
ggcccuuccucuccacu

SEQ ID NO: 1988923 - RNA, 16 nt, Human
ggccgauggggcaguc

SEQ ID NO: 1988924 - RNA, 22 nt, Human
ggagcauuggggauguuuuucu

SEQ ID NO: 1988925 - RNA, 16 nt, Human
ggagcaucagugcccu

SEQ ID NO: 1988926 - RNA, 20 nt, Human
ggaggucaaggcugcaguga

SEQ ID NO: 1988927 - RNA, 14 nt, Human
ggaggucgaggcag

SEQ ID NO: 1988928 - RNA, 14 nt, Human
ggaggugaccccag

SEQ ID NO: 1988929 - RNA, 21 nt, Human
ggagguagcuuugagguggaa

SEQ ID NO: 1988930 - RNA, 20 nt, Human
ggaggccuugggcucugcug

SEQ ID NO: 1988931 - RNA, 16 nt, Human
ggaggggggagguggg

SEQ ID NO: 1988932 - RNA, 11 nt, Human
ggaggccagcc

SEQ ID NO: 1988933 - RNA, 13 nt, Human
ggaggccaccucc

SEQ ID NO: 1988934 - RNA, 14 nt, Human
ggaggccaccuccu

SEQ ID NO: 1988935 - RNA, 18 nt, Human
ggaggccaccuccuaaaa

SEQ ID NO: 1988936 - RNA, 12 nt, Human
ggaggccagccu

SEQ ID NO: 1988937 - RNA, 22 nt, Human
ggaggaccagggcuggggcagc

SEQ ID NO: 1988938 - RNA, 13 nt, Human
ggaggaccagggc

SEQ ID NO: 1988939 - RNA, 12 nt, Human
ggaggaccaggg

SEQ ID NO: 1988940 - RNA, 18 nt, Human
ggagcuggcuccagccug

SEQ ID NO: 1988941 - RNA, 20 nt, Human
ggagcuggcuccagccugga

SEQ ID NO: 1988942 - RNA, 19 nt, Human
ggaggaaggaaacccagcu

SEQ ID NO: 1988943 - RNA, 23 nt, Human
ggaggaaggaaacccagcucugg

SEQ ID NO: 1988944 - RNA, 20 nt, Human
ggaggaaggaaacccagcuc

SEQ ID NO: 1988945 - RNA, 13 nt, Human
ggagccaggaggg

SEQ ID NO: 1988946 - RNA, 12 nt, Human
ggagcccaggag

SEQ ID NO: 1988947 - RNA, 13 nt, Human
ggagcccaggagu

SEQ ID NO: 1988948 - RNA, 18 nt, Human
ggagcccaggagucccac

SEQ ID NO: 1988949 - RNA, 16 nt, Human
ggagccaauggagacu

SEQ ID NO: 1988950 - RNA, 16 nt, Human
ggagccccgaggccuu

SEQ ID NO: 1988951 - RNA, 22 nt, Human
ggagccccgaggccuucucuga

SEQ ID NO: 1988952 - RNA, 12 nt, Human
ggagcugccugu

SEQ ID NO: 1988953 - RNA, 21 nt, Human
ggagcugccuguucagcucca

SEQ ID NO: 1988954 - RNA, 22 nt, Human
ggauguugaaaaaguucugcag

SEQ ID NO: 1988955 - RNA, 16 nt, Human
ggauguucugggacac

SEQ ID NO: 1988956 - RNA, 13 nt, Human
ggauguucuggga

SEQ ID NO: 1988957 - RNA, 13 nt, Human
ggaugucugggcc

SEQ ID NO: 1988958 - RNA, 15 nt, Human
ggauguucugggaca

SEQ ID NO: 1988959 - RNA, 16 nt, Human
ggcaauguuuugcuuu

SEQ ID NO: 1988960 - RNA, 24 nt, Human
ggcacagaaaauggaagacagcuc

SEQ ID NO: 1988961 - RNA, 22 nt, Human
ggcacaaucucggcucacugca

SEQ ID NO: 1988962 - RNA, 13 nt, Human
ggcacagggagag

SEQ ID NO: 1988963 - RNA, 21 nt, Human
ggcacaggcagggcaggacca

SEQ ID NO: 1988964 - RNA, 12 nt, Human
ggcacaggcagg

SEQ ID NO: 1988965 - RNA, 13 nt, Human
ggcacaggcaggg

SEQ ID NO: 1988966 - RNA, 14 nt, Human
ggcacaggcagggc

SEQ ID NO: 1988967 - RNA, 15 nt, Human
ggcacaggcagggca

SEQ ID NO: 1988968 - RNA, 16 nt, Human
ggcacaggcagggcag

SEQ ID NO: 1988969 - RNA, 14 nt, Human
ggcacagggccugg

SEQ ID NO: 1988970 - RNA, 15 nt, Human
ggcacagggccuggc

SEQ ID NO: 1988971 - RNA, 17 nt, Human
ggcacagggccuggccc

SEQ ID NO: 1988972 - RNA, 18 nt, Human
ggcacagggccuggccca

SEQ ID NO: 1988973 - RNA, 16 nt, Human
ggcacagggcaguggg

SEQ ID NO: 1988974 - RNA, 16 nt, Human
ggcacagggcaugaaa

SEQ ID NO: 1988975 - RNA, 19 nt, Human
ggcacagggcaugaaauga

SEQ ID NO: 1988976 - RNA, 12 nt, Human
ggcacagggccu

SEQ ID NO: 1988977 - RNA, 13 nt, Human
ggcacagggccug

SEQ ID NO: 1988978 - RNA, 12 nt, Human
ggcacagccugc

SEQ ID NO: 1988979 - RNA, 13 nt, Human
ggcacagccugca

SEQ ID NO: 1988980 - RNA, 12 nt, Human
ggcacagccugg

SEQ ID NO: 1988981 - RNA, 14 nt, Human
ggcacagccugcac

SEQ ID NO: 1988982 - RNA, 15 nt, Human
ggcacagccugcacu

SEQ ID NO: 1988983 - RNA, 15 nt, Human
ggagugcagugagcc

SEQ ID NO: 1988984 - RNA, 12 nt, Human
ggagugcagugg

SEQ ID NO: 1988985 - RNA, 22 nt, Human
ggagugcaguggcgaaaucccu

SEQ ID NO: 1988986 - RNA, 14 nt, Human
ggaguggccacaga

SEQ ID NO: 1988987 - RNA, 12 nt, Human
ggaguucuucuu

SEQ ID NO: 1988988 - RNA, 15 nt, Human
ggaguucugguuccu

SEQ ID NO: 1988989 - RNA, 21 nt, Human
ggaguuggaagugugugaucu

SEQ ID NO: 1988990 - RNA, 18 nt, Human
ggaguuggaguagaaugu

SEQ ID NO: 1988991 - RNA, 14 nt, Human
ggauccugagccag

SEQ ID NO: 1988992 - RNA, 13 nt, Human
ggauccugagcca

SEQ ID NO: 1988993 - RNA, 14 nt, Human
ggauccuccaggug

SEQ ID NO: 1988994 - RNA, 15 nt, Human
ggauccuccaggugc

SEQ ID NO: 1988995 - RNA, 16 nt, Human
ggauggggcugcaccg

SEQ ID NO: 1988996 - RNA, 21 nt, Human
ggauguacaaggacagccccu

SEQ ID NO: 1988997 - RNA, 22 nt, Human
ggaugggcagucauuuugcaga

SEQ ID NO: 1988998 - RNA, 15 nt, Human
ggauggcccagggug

SEQ ID NO: 1988999 - RNA, 18 nt, Human
ggauggauuuccagccaa

SEQ ID NO: 1989000 - RNA, 18 nt, Human
ggauggaggaagaacuga

SEQ ID NO: 1989001 - RNA, 16 nt, Human
gggaagagcuuagaaa

SEQ ID NO: 1989002 - RNA, 16 nt, Human
gggacagcuccuucug

SEQ ID NO: 1989003 - RNA, 23 nt, Human
gggacagaggggguggccuccca

SEQ ID NO: 1989004 - RNA, 22 nt, Human
gggacagaggggguggccuccc

SEQ ID NO: 1989005 - RNA, 13 nt, Human
gggacagaggggg

SEQ ID NO: 1989006 - RNA, 13 nt, Human
gggaaggauacaa

SEQ ID NO: 1989007 - RNA, 16 nt, Human
gggaaggauacaaaag

SEQ ID NO: 1989008 - RNA, 15 nt, Human
gggaagcuggccuga

SEQ ID NO: 1989009 - RNA, 16 nt, Human
gggaagcuggccugag

SEQ ID NO: 1989010 - RNA, 21 nt, Human
gggacagcuccuucuguccua

SEQ ID NO: 1989011 - RNA, 23 nt, Human
gggacagggaggugugaggcagg

SEQ ID NO: 1989012 - RNA, 21 nt, Human
aaaaauaugaccacacuccag

SEQ ID NO: 1989013 - RNA, 23 nt, Human
aaaaauaugaccacacuccagcu

SEQ ID NO: 1989014 - RNA, 14 nt, Human
aaaaauaucaaauu

SEQ ID NO: 1989015 - RNA, 15 nt, Human
aaaaauaucaaauua

SEQ ID NO: 1989016 - RNA, 16 nt, Human
aaaaauaucaaauuaa

SEQ ID NO: 1989017 - RNA, 15 nt, Human
aaaaauaucuguaag

SEQ ID NO: 1989018 - RNA, 18 nt, Human
aaaaauauacauguuuau

SEQ ID NO: 1989019 - RNA, 12 nt, Human
aaaaauauacau

SEQ ID NO: 1989020 - RNA, 14 nt, Human
aaaaauauacaugu

SEQ ID NO: 1989021 - RNA, 16 nt, Human
aaaaauauacauguuu

SEQ ID NO: 1989022 - RNA, 17 nt, Human
aaaaauauacauguuua

SEQ ID NO: 1989023 - RNA, 18 nt, Human
aaaaauccaaauauuguu

SEQ ID NO: 1989024 - RNA, 21 nt, Human
aaaaauccaaauauuguuaag

SEQ ID NO: 1989025 - RNA, 14 nt, Human
aaaaauccagaaac

SEQ ID NO: 1989026 - RNA, 12 nt, Human
aaaaaucaagua

SEQ ID NO: 1989027 - RNA, 18 nt, Human
aaaaauauuuuuuuuucu

SEQ ID NO: 1989028 - RNA, 13 nt, Human
aaaaauaugugaa

SEQ ID NO: 1989029 - RNA, 16 nt, Human
aaaaauaugugaagga

SEQ ID NO: 1989030 - RNA, 23 nt, Human
aaaaauaugugaaggaccuucac

SEQ ID NO: 1989031 - RNA, 13 nt, Human
aaaaauauuuaau

SEQ ID NO: 1989032 - RNA, 15 nt, Human
aaaaauauuuaaugu

SEQ ID NO: 1989033 - RNA, 16 nt, Human
aaaaauauuuaauguu

SEQ ID NO: 1989034 - RNA, 13 nt, Human
aaaagaugcuucu

SEQ ID NO: 1989035 - RNA, 23 nt, Human
aaaacugcugacuguuuucucuu

SEQ ID NO: 1989036 - RNA, 15 nt, Human
aaaacuguacuuuga

SEQ ID NO: 1989037 - RNA, 19 nt, Human
aaaacuguacuuugauuca

SEQ ID NO: 1989038 - RNA, 20 nt, Human
aaaacuguacuuugauucac

SEQ ID NO: 1989039 - RNA, 21 nt, Human
aaaacuguacuuugauucaca

SEQ ID NO: 1989040 - RNA, 22 nt, Human
aaaacugcugacuguuuucucu

SEQ ID NO: 1989041 - RNA, 12 nt, Human
aaaacccagcug

SEQ ID NO: 1989042 - RNA, 14 nt, Human
aaaacccagcugca

SEQ ID NO: 1989043 - RNA, 19 nt, Human
aaaacccagcugcaccccu

SEQ ID NO: 1989044 - RNA, 22 nt, Human
aaaacccagcugcaccccuucc

SEQ ID NO: 1989045 - RNA, 15 nt, Human
aaaacccagauaaag

SEQ ID NO: 1989046 - RNA, 19 nt, Human
aaaacucaaccaaauggua

SEQ ID NO: 1989047 - RNA, 23 nt, Human
aaaacucaaccaaaugguacaaa

SEQ ID NO: 1989048 - RNA, 19 nt, Human
aaaaccguguuugucucuu

SEQ ID NO: 1989049 - RNA, 21 nt, Human
aaaaccguguuugucucuucu

SEQ ID NO: 1989050 - RNA, 23 nt, Human
aaaaccguguuugucucuucugg

SEQ ID NO: 1989051 - RNA, 21 nt, Human
aaaaccaauguucucucuucu

SEQ ID NO: 1989052 - RNA, 14 nt, Human
aaaacaucauuccu

SEQ ID NO: 1989053 - RNA, 15 nt, Human
aaaacaugcuacaca

SEQ ID NO: 1989054 - RNA, 13 nt, Human
aaaacauguaugu

SEQ ID NO: 1989055 - RNA, 19 nt, Human
aaaacaucauuccuuuuua

SEQ ID NO: 1989056 - RNA, 21 nt, Human
aaaacaucauuccuuuuuauu

SEQ ID NO: 1989057 - RNA, 18 nt, Human
aaaacaguaguguauuaa

SEQ ID NO: 1989058 - RNA, 19 nt, Human
aaaaaugcugaacauugca

SEQ ID NO: 1989059 - RNA, 15 nt, Human
aaaaaugcugaacau

SEQ ID NO: 1989060 - RNA, 16 nt, Human
aaaaaugcugaacauu

SEQ ID NO: 1989061 - RNA, 14 nt, Human
aaaaaucucaaauu

SEQ ID NO: 1989062 - RNA, 14 nt, Human
aaaaaugcugaaca

SEQ ID NO: 1989063 - RNA, 14 nt, Human
gggaugggccugag

SEQ ID NO: 1989064 - RNA, 14 nt, Human
gggauggggcuggg

SEQ ID NO: 1989065 - RNA, 15 nt, Human
gggaugggagccggg

SEQ ID NO: 1989066 - RNA, 16 nt, Human
gggaugggagccgggc

SEQ ID NO: 1989067 - RNA, 13 nt, Human
gggauguuuuucu

SEQ ID NO: 1989068 - RNA, 22 nt, Human
gggaugugugugugcagagcug

SEQ ID NO: 1989069 - RNA, 14 nt, Human
gggaugucucucau

SEQ ID NO: 1989070 - RNA, 16 nt, Human
gggaugguguucaaaa

SEQ ID NO: 1989071 - RNA, 19 nt, Human
gggaggucgaggcaggagg

SEQ ID NO: 1989072 - RNA, 18 nt, Human
gggaggucgaggcaggag

SEQ ID NO: 1989073 - RNA, 17 nt, Human
gggaggucgaggcagga

SEQ ID NO: 1989074 - RNA, 18 nt, Human
gggagggcuccagacaca

SEQ ID NO: 1989075 - RNA, 17 nt, Human
gggagggcuccagacac

SEQ ID NO: 1989076 - RNA, 15 nt, Human
gggagggcuccagac

SEQ ID NO: 1989077 - RNA, 14 nt, Human
gggagggcuccaga

SEQ ID NO: 1989078 - RNA, 22 nt, Human
gggaggcucuggagcccacugu

SEQ ID NO: 1989079 - RNA, 19 nt, Human
gggagaaugucaguaugug

SEQ ID NO: 1989080 - RNA, 22 nt, Human
gggagaaugucaguauguggaa

SEQ ID NO: 1989081 - RNA, 16 nt, Human
aaaagcagcucucccc

SEQ ID NO: 1989082 - RNA, 14 nt, Human
aaaagcagcauaaa

SEQ ID NO: 1989083 - RNA, 17 nt, Human
aaaagcagcucuccccu

SEQ ID NO: 1989084 - RNA, 22 nt, Human
aaaagcaggcuucuaugaaaga

SEQ ID NO: 1989085 - RNA, 21 nt, Human
aaaagcacacucauccccuca

SEQ ID NO: 1989086 - RNA, 22 nt, Human
aaaacuguacuuugauucacau

SEQ ID NO: 1989087 - RNA, 14 nt, Human
aaaagauguagauu

SEQ ID NO: 1989088 - RNA, 22 nt, Human
aaaagauguagauuuauuucau

SEQ ID NO: 1989089 - RNA, 15 nt, Human
aaaagaugcaaugua

SEQ ID NO: 1989090 - RNA, 13 nt, Human
aaaagauguagau

SEQ ID NO: 1989091 - RNA, 13 nt, Human
gggagacagagca

SEQ ID NO: 1989092 - RNA, 19 nt, Human
gggaggccaucuggagagc

SEQ ID NO: 1989093 - RNA, 12 nt, Human
gggagcagcccc

SEQ ID NO: 1989094 - RNA, 19 nt, Human
gggaggccaaggugggagg

SEQ ID NO: 1989095 - RNA, 15 nt, Human
gggauuacaggugug

SEQ ID NO: 1989096 - RNA, 12 nt, Human
gggauuacaggu

SEQ ID NO: 1989097 - RNA, 14 nt, Human
gggauuacaggcgu

SEQ ID NO: 1989098 - RNA, 13 nt, Human
gggauuacaggcu

SEQ ID NO: 1989099 - RNA, 16 nt, Human
gggauuacaggcuccu

SEQ ID NO: 1989100 - RNA, 21 nt, Human
gggauuacaggcuccugccac

SEQ ID NO: 1989101 - RNA, 15 nt, Human
gggauugggccccug

SEQ ID NO: 1989102 - RNA, 18 nt, Human
gggauugauuuuaaaaug

SEQ ID NO: 1989103 - RNA, 16 nt, Human
gggauuguaaaauggu

SEQ ID NO: 1989104 - RNA, 17 nt, Human
gggauuguaaaauggug

SEQ ID NO: 1989105 - RNA, 14 nt, Human
gggcagaggaaagc

SEQ ID NO: 1989106 - RNA, 22 nt, Human
gggcagagcagagaccaucccu

SEQ ID NO: 1989107 - RNA, 17 nt, Human
gggcagagcagagacca

SEQ ID NO: 1989108 - RNA, 16 nt, Human
gggcaacccccagccu

SEQ ID NO: 1989109 - RNA, 18 nt, Human
gggcaacccccagccugc

SEQ ID NO: 1989110 - RNA, 16 nt, Human
gggcagagcagagacc

SEQ ID NO: 1989111 - RNA, 19 nt, Human
aaaagguaugcaaucaaau

SEQ ID NO: 1989112 - RNA, 19 nt, Human
aaaagggacugagaaauuu

SEQ ID NO: 1989113 - RNA, 14 nt, Human
gggcagccugccuu

SEQ ID NO: 1989114 - RNA, 16 nt, Human
gggcagaucucccaca

SEQ ID NO: 1989115 - RNA, 23 nt, Human
gggcagaggagaacuugcugccu

SEQ ID NO: 1989116 - RNA, 15 nt, Human
gggcagaggagaacu

SEQ ID NO: 1989117 - RNA, 21 nt, Human
gggcagaggagaacuugcugc

SEQ ID NO: 1989118 - RNA, 20 nt, Human
gggcuggguucuacccaggu

SEQ ID NO: 1989119 - RNA, 16 nt, Human
gggcugggcacugcuc

SEQ ID NO: 1989120 - RNA, 17 nt, Human
gggcugggcacugcucu

SEQ ID NO: 1989121 - RNA, 20 nt, Human
gggcugggcacugcucucac

SEQ ID NO: 1989122 - RNA, 16 nt, Human
gggcugggagcucugc

SEQ ID NO: 1989123 - RNA, 18 nt, Human
gggcugggagcucugcag

SEQ ID NO: 1989124 - RNA, 13 nt, Human
gggcugcccuggu

SEQ ID NO: 1989125 - RNA, 14 nt, Human
gggcugcccuggug

SEQ ID NO: 1989126 - RNA, 15 nt, Human
gggcugcccuggugc

SEQ ID NO: 1989127 - RNA, 21 nt, Human
gggcugcccuggugcugccac

SEQ ID NO: 1989128 - RNA, 18 nt, Human
gggcucagcaaaagaugc

SEQ ID NO: 1989129 - RNA, 22 nt, Human
gggcugcaccggcuggccuggc

SEQ ID NO: 1989130 - RNA, 10 nt, Human
gggcucagca

SEQ ID NO: 1989131 - RNA, 18 nt, Human
gggcucagagugggguag

SEQ ID NO: 1989132 - RNA, 18 nt, Human
gggcugcaugcgggcuuc

SEQ ID NO: 1989133 - RNA, 21 nt, Human
gggcugcaugcgggcuuccuc

SEQ ID NO: 1989134 - RNA, 20 nt, Human
aaaaugugagugguugaaua

SEQ ID NO: 1989135 - RNA, 18 nt, Human
aaaaugugagugguugaa

SEQ ID NO: 1989136 - RNA, 15 nt, Human
aaaaugugauaugua

SEQ ID NO: 1989137 - RNA, 22 nt, Human
gggcuggguucuacccaggugc

SEQ ID NO: 1989138 - RNA, 22 nt, Human
gggcugggcacugcucucaccu

SEQ ID NO: 1989139 - RNA, 20 nt, Human
aaaauuucuuagaaaacaau

SEQ ID NO: 1989140 - RNA, 12 nt, Human
aaaauuugaaac

SEQ ID NO: 1989141 - RNA, 13 nt, Human
aaaauuugaaaca

SEQ ID NO: 1989142 - RNA, 14 nt, Human
aaaauuugaaacau

SEQ ID NO: 1989143 - RNA, 15 nt, Human
aaaauuugaaacauu

SEQ ID NO: 1989144 - RNA, 16 nt, Human
aaaauuugaaacauug

SEQ ID NO: 1989145 - RNA, 17 nt, Human
aaaauuugaaacauugc

SEQ ID NO: 1989146 - RNA, 14 nt, Human
aaaauguuaggaca

SEQ ID NO: 1989147 - RNA, 12 nt, Human
aaaaugugugug

SEQ ID NO: 1989148 - RNA, 14 nt, Human
aaaauguuaagcau

SEQ ID NO: 1989149 - RNA, 21 nt, Human
aaaauuugaaacauugcuuuu

SEQ ID NO: 1989150 - RNA, 19 nt, Human
aaaauuugaaacauugcuu

SEQ ID NO: 1989151 - RNA, 20 nt, Human
aaaauuugaaacauugcuuu

SEQ ID NO: 1989152 - RNA, 13 nt, Human
aaaauuuguuuaa

SEQ ID NO: 1989153 - RNA, 16 nt, Human
ggggccugaggcuccu

SEQ ID NO: 1989154 - RNA, 23 nt, Human
aaacaugagguucucucuacugg

SEQ ID NO: 1989155 - RNA, 13 nt, Human
aaacaucucagag

SEQ ID NO: 1989156 - RNA, 13 nt, Human
aaacaucuccuua

SEQ ID NO: 1989157 - RNA, 22 nt, Human
aaacauccuacaagacacagug

SEQ ID NO: 1989158 - RNA, 21 nt, Human
aaacaucauuccuuuuuauuu

SEQ ID NO: 1989159 - RNA, 22 nt, Human
aaacaucauuccuuuuuauuua

SEQ ID NO: 1989160 - RNA, 18 nt, Human
aaacauccuacaagacac

SEQ ID NO: 1989161 - RNA, 16 nt, Human
aaacaucauuccuuuu

SEQ ID NO: 1989162 - RNA, 18 nt, Human
aaacaucauuccuuuuua

SEQ ID NO: 1989163 - RNA, 19 nt, Human
aaacaucauuccuuuuuau

SEQ ID NO: 1989164 - RNA, 20 nt, Human
aaacaucauuccuuuuuauu

SEQ ID NO: 1989165 - RNA, 12 nt, Human
ggggacagcucc

SEQ ID NO: 1989166 - RNA, 14 nt, Human
ggggacagcuccuu

SEQ ID NO: 1989167 - RNA, 20 nt, Human
ggggacagcuccuucugucc

SEQ ID NO: 1989168 - RNA, 17 nt, Human
aaacaccggguuccagc

SEQ ID NO: 1989169 - RNA, 18 nt, Human
aaacaccugacagccccu

SEQ ID NO: 1989170 - RNA, 23 nt, Human
aaacaccugacagccccucccuc

SEQ ID NO: 1989171 - RNA, 14 nt, Human
aaacagugcuguuu

SEQ ID NO: 1989172 - RNA, 20 nt, Human
aaacaagaccacguuucuaa

SEQ ID NO: 1989173 - RNA, 16 nt, Human
aaacacauuuuucuua

SEQ ID NO: 1989174 - RNA, 12 nt, Human
aaacacauuuuu

SEQ ID NO: 1989175 - RNA, 20 nt, Human
aaacaagcacuaaacaaaga

SEQ ID NO: 1989176 - RNA, 14 nt, Human
aaaaguauugccaa

SEQ ID NO: 1989177 - RNA, 18 nt, Human
aaaaguagaacuuuguau

SEQ ID NO: 1989178 - RNA, 20 nt, Human
aaaaguagaacuuuguauag

SEQ ID NO: 1989179 - RNA, 22 nt, Human
aaaaucuuauuaaaguuucaaa

SEQ ID NO: 1989180 - RNA, 23 nt, Human
aaaaucuuauuaaaguuucaaaa

SEQ ID NO: 1989181 - RNA, 12 nt, Human
aaaaucuuauua

SEQ ID NO: 1989182 - RNA, 16 nt, Human
aaaaucuuauuaaagu

SEQ ID NO: 1989183 - RNA, 18 nt, Human
aaaaucuuauuaaaguuu

SEQ ID NO: 1989184 - RNA, 21 nt, Human
aaaaucuuauuaaaguuucaa

SEQ ID NO: 1989185 - RNA, 16 nt, Human
aaaaguauugccaaac

SEQ ID NO: 1989186 - RNA, 16 nt, Human
aaaaucuuaauacugu

SEQ ID NO: 1989187 - RNA, 17 nt, Human
aaaaucuuaauacuguu

SEQ ID NO: 1989188 - RNA, 18 nt, Human
aaaaucuuaauacuguua

SEQ ID NO: 1989189 - RNA, 20 nt, Human
aaaaucuuaauacuguuauu

SEQ ID NO: 1989190 - RNA, 22 nt, Human
aaaaucuuaauacuguuauucu

SEQ ID NO: 1989191 - RNA, 21 nt, Human
aaaaugagccuggcaagaaug

SEQ ID NO: 1989192 - RNA, 14 nt, Human
aaaaugagccuggc

SEQ ID NO: 1989193 - RNA, 11 nt, Human
aaaaugaagaa

SEQ ID NO: 1989194 - RNA, 14 nt, Human
aaaaugaagaauuu

SEQ ID NO: 1989195 - RNA, 15 nt, Human
aaaaugaagaauuua

SEQ ID NO: 1989196 - RNA, 16 nt, Human
aaaaugaagaauuuaa

SEQ ID NO: 1989197 - RNA, 20 nt, Human
aaaaugcugaacauugcaua

SEQ ID NO: 1989198 - RNA, 15 nt, Human
aaaaugcugaacauu

SEQ ID NO: 1989199 - RNA, 16 nt, Human
aaaaugcugaacauug

SEQ ID NO: 1989200 - RNA, 18 nt, Human
aaaaugcugaacauugca

SEQ ID NO: 1989201 - RNA, 11 nt, Human
gggccaggagc

SEQ ID NO: 1989202 - RNA, 13 nt, Human
gggccaggcuggg

SEQ ID NO: 1989203 - RNA, 11 nt, Human
gggccagcucc

SEQ ID NO: 1989204 - RNA, 21 nt, Human
gggccaggcugggucgcccug

SEQ ID NO: 1989205 - RNA, 15 nt, Human
gggccaggcuggguc

SEQ ID NO: 1989206 - RNA, 14 nt, Human
gggccaggcugggu

SEQ ID NO: 1989207 - RNA, 21 nt, Human
gggccagucccugaggcaggu

SEQ ID NO: 1989208 - RNA, 18 nt, Human
gggccagucccugaggca

SEQ ID NO: 1989209 - RNA, 15 nt, Human
gggcgggaggauguu

SEQ ID NO: 1989210 - RNA, 23 nt, Human
gggcuacaccuuagccugcccuc

SEQ ID NO: 1989211 - RNA, 20 nt, Human
gggcuacccgugagcccuuc

SEQ ID NO: 1989212 - RNA, 22 nt, Human
gggccucggacuuagcugggag

SEQ ID NO: 1989213 - RNA, 15 nt, Human
gggccuccugugugu

SEQ ID NO: 1989214 - RNA, 13 nt, Human
gggccuccugugu

SEQ ID NO: 1989215 - RNA, 19 nt, Human
gggccucuuaugggcuggg

SEQ ID NO: 1989216 - RNA, 20 nt, Human
gggccucuuaugggcugggu

SEQ ID NO: 1989217 - RNA, 17 nt, Human
gggccugaggcuccuua

SEQ ID NO: 1989218 - RNA, 18 nt, Human
gggccugaggcuccuuag

SEQ ID NO: 1989219 - RNA, 23 nt, Human
gggccaguuggucccccuuccau

SEQ ID NO: 1989220 - RNA, 22 nt, Human
gggccaguuggucccccuucca

SEQ ID NO: 1989221 - RNA, 18 nt, Human
gggccaguuggucccccu

SEQ ID NO: 1989222 - RNA, 14 nt, Human
gggccaguuggucc

SEQ ID NO: 1989223 - RNA, 15 nt, Human
gggccgagccugccu

SEQ ID NO: 1989224 - RNA, 20 nt, Human
ggucuguguguguguaugug

SEQ ID NO: 1989225 - RNA, 21 nt, Human
ggucuguguguguguaugugg

SEQ ID NO: 1989226 - RNA, 13 nt, Human
ggucuuauauuua

SEQ ID NO: 1989227 - RNA, 20 nt, Human
ggugcaaugaccuuucaaua

SEQ ID NO: 1989228 - RNA, 19 nt, Human
ggugcaaugaccuuucaau

SEQ ID NO: 1989229 - RNA, 18 nt, Human
ggugcaaugaccuuucaa

SEQ ID NO: 1989230 - RNA, 10 nt, Human
ggucuuccua

SEQ ID NO: 1989231 - RNA, 17 nt, Human
ggucuuccuacucuucu

SEQ ID NO: 1989232 - RNA, 18 nt, Human
ggucuuccuacucuucuc

SEQ ID NO: 1989233 - RNA, 19 nt, Human
ggucuuccuacucuucucu

SEQ ID NO: 1989234 - RNA, 20 nt, Human
ggugcugggccccugccucu

SEQ ID NO: 1989235 - RNA, 19 nt, Human
ggugcugggccccugccuc

SEQ ID NO: 1989236 - RNA, 21 nt, Human
ggucuuccuacucuucucucu

SEQ ID NO: 1989237 - RNA, 18 nt, Human
aaagcagcucuccccuca

SEQ ID NO: 1989238 - RNA, 17 nt, Human
aaagcagggacuugaac

SEQ ID NO: 1989239 - RNA, 19 nt, Human
aaagcaggcagaacucauc

SEQ ID NO: 1989240 - RNA, 15 nt, Human
aaagcagcucucccc

SEQ ID NO: 1989241 - RNA, 15 nt, Human
aaagcagcguuucua

SEQ ID NO: 1989242 - RNA, 17 nt, Human
aaagcaggcagaacuca

SEQ ID NO: 1989243 - RNA, 16 nt, Human
aaagcagcguuucuau

SEQ ID NO: 1989244 - RNA, 18 nt, Human
aaagcagcguuucuauga

SEQ ID NO: 1989245 - RNA, 22 nt, Human
aaagcagcguuucuaugacaca

SEQ ID NO: 1989246 - RNA, 14 nt, Human
gguggaugccuggu

SEQ ID NO: 1989247 - RNA, 18 nt, Human
ggugcuguuuugccagcc

SEQ ID NO: 1989248 - RNA, 21 nt, Human
gguggaugccugguggcagcu

SEQ ID NO: 1989249 - RNA, 18 nt, Human
ggucgcuugggaauuuua

SEQ ID NO: 1989250 - RNA, 14 nt, Human
ggucggaaaacaug

SEQ ID NO: 1989251 - RNA, 14 nt, Human
ggucgggggggacc

SEQ ID NO: 1989252 - RNA, 21 nt, Human
ggucguuuuaaaaacaaaaau

SEQ ID NO: 1989253 - RNA, 11 nt, Human
ggucugugugu

SEQ ID NO: 1989254 - RNA, 17 nt, Human
ggucuguguguguguau

SEQ ID NO: 1989255 - RNA, 17 nt, Human
ggucuacacugugcuga

SEQ ID NO: 1989256 - RNA, 13 nt, Human
ggucuaauguuua

SEQ ID NO: 1989257 - RNA, 18 nt, Human
gguccuggaggcucaaau

SEQ ID NO: 1989258 - RNA, 20 nt, Human
ggucgcccuggacugugugc

SEQ ID NO: 1989259 - RNA, 13 nt, Human
ggucggaaaacau

SEQ ID NO: 1989260 - RNA, 13 nt, Human
aaagauuucuguu

SEQ ID NO: 1989261 - RNA, 14 nt, Human
aaagauuucuguuc

SEQ ID NO: 1989262 - RNA, 13 nt, Human
aaagcaaaaggca

SEQ ID NO: 1989263 - RNA, 13 nt, Human
aaagcaaaggaga

SEQ ID NO: 1989264 - RNA, 14 nt, Human
aaagcaaaagugcu

SEQ ID NO: 1989265 - RNA, 22 nt, Human
aaagauucugaccuuaaaugca

SEQ ID NO: 1989266 - RNA, 18 nt, Human
aaagauugacaccagguu

SEQ ID NO: 1989267 - RNA, 16 nt, Human
aaagauuguguggugu

SEQ ID NO: 1989268 - RNA, 13 nt, Human
aaagacuaagauc

SEQ ID NO: 1989269 - RNA, 23 nt, Human
gguccugcugcaguugccaguca

SEQ ID NO: 1989270 - RNA, 21 nt, Human
gguccugcugcaguugccagu

SEQ ID NO: 1989271 - RNA, 13 nt, Human
aaagcaaaugucu

SEQ ID NO: 1989272 - RNA, 18 nt, Human
ggguggggggggugcugg

SEQ ID NO: 1989273 - RNA, 15 nt, Human
ggguggggggggugc

SEQ ID NO: 1989274 - RNA, 12 nt, Human
ggguggugaccu

SEQ ID NO: 1989275 - RNA, 17 nt, Human
ggguguggcgcagcaua

SEQ ID NO: 1989276 - RNA, 20 nt, Human
ggguggggaccucaggccug

SEQ ID NO: 1989277 - RNA, 19 nt, Human
gggugggacacccugugau

SEQ ID NO: 1989278 - RNA, 13 nt, Human
ggguggaugccug

SEQ ID NO: 1989279 - RNA, 11 nt, Human
ggggccuggca

SEQ ID NO: 1989280 - RNA, 12 nt, Human
ggggccuggcag

SEQ ID NO: 1989281 - RNA, 15 nt, Human
ggguggcaccagcag

SEQ ID NO: 1989282 - RNA, 17 nt, Human
ggguggaugccuggugg

SEQ ID NO: 1989283 - RNA, 15 nt, Human
gguaaucauauuaga

SEQ ID NO: 1989284 - RNA, 18 nt, Human
gguaaucgaccugccucg

SEQ ID NO: 1989285 - RNA, 14 nt, Human
gguaaucgaccugc

SEQ ID NO: 1989286 - RNA, 17 nt, Human
gguaaucgaccugccuc

SEQ ID NO: 1989287 - RNA, 24 nt, Human
gguacaaccuguucugcuuuccuc

SEQ ID NO: 1989288 - RNA, 16 nt, Human
gguacaauuucuuuug

SEQ ID NO: 1989289 - RNA, 23 nt, Human
gguacaaccuguucugcuuuccu

SEQ ID NO: 1989290 - RNA, 13 nt, Human
gguaccacugaau

SEQ ID NO: 1989291 - RNA, 20 nt, Human
gguaccacugaaucuguaca

SEQ ID NO: 1989292 - RNA, 17 nt, Human
ggguuucuaaagcugcc

SEQ ID NO: 1989293 - RNA, 18 nt, Human
gguaacuagggaagauaa

SEQ ID NO: 1989294 - RNA, 14 nt, Human
gguaauaagggaaa

SEQ ID NO: 1989295 - RNA, 14 nt, Human
gguaacaggcagau

SEQ ID NO: 1989296 - RNA, 20 nt, Human
gguaacaggcagauacagga

SEQ ID NO: 1989297 - RNA, 17 nt, Human
aaagacuaucuaaaugu

SEQ ID NO: 1989298 - RNA, 13 nt, Human
aaagacaccuacu

SEQ ID NO: 1989299 - RNA, 19 nt, Human
aaagacaccuacugagugg

SEQ ID NO: 1989300 - RNA, 16 nt, Human
aaagaauagaagcuaa

SEQ ID NO: 1989301 - RNA, 14 nt, Human
aaagaauaggacuu

SEQ ID NO: 1989302 - RNA, 19 nt, Human
aaagaauaggacuuguuuu

SEQ ID NO: 1989303 - RNA, 22 nt, Human
aaagaaucaccuaauuaauuuc

SEQ ID NO: 1989304 - RNA, 18 nt, Human
aaagacaaauaguaggca

SEQ ID NO: 1989305 - RNA, 12 nt, Human
aaacuuuacuau

SEQ ID NO: 1989306 - RNA, 18 nt, Human
aaacuuuacuauggcccu

SEQ ID NO: 1989307 - RNA, 18 nt, Human
aaagaaguggggacagag

SEQ ID NO: 1989308 - RNA, 17 nt, Human
aaacuuuaccuuuuuua

SEQ ID NO: 1989309 - RNA, 22 nt, Human
aaacuuuaccuuuuuuauacau

SEQ ID NO: 1989310 - RNA, 15 nt, Human
gguccauagagagca

SEQ ID NO: 1989311 - RNA, 18 nt, Human
gguccaguggaugccaca

SEQ ID NO: 1989312 - RNA, 15 nt, Human
gguccauagcugugg

SEQ ID NO: 1989313 - RNA, 12 nt, Human
gguccacccagg

SEQ ID NO: 1989314 - RNA, 13 nt, Human
gguccacccagga

SEQ ID NO: 1989315 - RNA, 15 nt, Human
gguccacccaggagc

SEQ ID NO: 1989316 - RNA, 16 nt, Human
gguccacccaggagcc

SEQ ID NO: 1989317 - RNA, 17 nt, Human
gguccacccaggagccc

SEQ ID NO: 1989318 - RNA, 17 nt, Human
gguagcuuugaggugga

SEQ ID NO: 1989319 - RNA, 21 nt, Human
gguagcuguaaggcaugaagg

SEQ ID NO: 1989320 - RNA, 12 nt, Human
gguagcuguaag

SEQ ID NO: 1989321 - RNA, 14 nt, Human
gguagcuuuucccu

SEQ ID NO: 1989322 - RNA, 14 nt, Human
gguaugcaaucaaa

SEQ ID NO: 1989323 - RNA, 22 nt, Human
gguaugaucacggcucacugca

SEQ ID NO: 1989324 - RNA, 16 nt, Human
gguccacaacacacag

SEQ ID NO: 1989325 - RNA, 15 nt, Human
ggugggauccuccag

SEQ ID NO: 1989326 - RNA, 14 nt, Human
ggugggauccucca

SEQ ID NO: 1989327 - RNA, 14 nt, Human
aaagcgaauuuuaa

SEQ ID NO: 1989328 - RNA, 13 nt, Human
aaagccuuucauu

SEQ ID NO: 1989329 - RNA, 18 nt, Human
aaagccuuucauuuugcu

SEQ ID NO: 1989330 - RNA, 20 nt, Human
ggugggaggauugcuugagc

SEQ ID NO: 1989331 - RNA, 18 nt, Human
aaagccuguuuaagagac

SEQ ID NO: 1989332 - RNA, 16 nt, Human
aaagccuguuuaagag

SEQ ID NO: 1989333 - RNA, 19 nt, Human
aaagccuuagggaagcugg

SEQ ID NO: 1989334 - RNA, 15 nt, Human
aaagccuuagggaag

SEQ ID NO: 1989335 - RNA, 17 nt, Human
aaagcaugccaauuucu

SEQ ID NO: 1989336 - RNA, 22 nt, Human
aaagccuuucauuuugcuuuaa

SEQ ID NO: 1989337 - RNA, 19 nt, Human
ggugggauccuccaggugc

SEQ ID NO: 1989338 - RNA, 13 nt, Human
gguggggcagcuu

SEQ ID NO: 1989339 - RNA, 17 nt, Human
gguggggcagcuugagg

SEQ ID NO: 1989340 - RNA, 23 nt, Human
gguggggucacucuggcagcuca

SEQ ID NO: 1989341 - RNA, 15 nt, Human
gguggggucacucug

SEQ ID NO: 1989342 - RNA, 17 nt, Human
gguggggggggugcugg

SEQ ID NO: 1989343 - RNA, 16 nt, Human
ggugucgggcaugaca

SEQ ID NO: 1989344 - RNA, 13 nt, Human
ggugucgggcaug

SEQ ID NO: 1989345 - RNA, 23 nt, Human
ggugucuguguuccaaccacuga

SEQ ID NO: 1989346 - RNA, 16 nt, Human
ggugugaccacugcag

SEQ ID NO: 1989347 - RNA, 16 nt, Human
ggugugacugaauuuc

SEQ ID NO: 1989348 - RNA, 14 nt, Human
ggugucuuucucuu

SEQ ID NO: 1989349 - RNA, 15 nt, Human
ggugucuuucucuuu

SEQ ID NO: 1989350 - RNA, 13 nt, Human
ggugugagcagca

SEQ ID NO: 1989351 - RNA, 22 nt, Human
ggugugagggcagugcaaggag

SEQ ID NO: 1989352 - RNA, 19 nt, Human
ggugugaggacauaaaucu

SEQ ID NO: 1989353 - RNA, 16 nt, Human
ggugugaggcaggaga

SEQ ID NO: 1989354 - RNA, 18 nt, Human
ggugugagucaccaagcc

SEQ ID NO: 1989355 - RNA, 12 nt, Human
gguguggaagag

SEQ ID NO: 1989356 - RNA, 21 nt, Human
ggugugcggccuuuggcuuca

SEQ ID NO: 1989357 - RNA, 13 nt, Human
ggugugcucugau

SEQ ID NO: 1989358 - RNA, 22 nt, Human
gguucaggguuggccccugccc

SEQ ID NO: 1989359 - RNA, 14 nt, Human
ggugugcuauagcu

SEQ ID NO: 1989360 - RNA, 15 nt, Human
gguucaguguuucug

SEQ ID NO: 1989361 - RNA, 18 nt, Human
gguucaggguuggccccu

SEQ ID NO: 1989362 - RNA, 21 nt, Human
gguucaggguuggccccugcc

SEQ ID NO: 1989363 - RNA, 24 nt, Human
gguuccagcaauucuccugccuca

SEQ ID NO: 1989364 - RNA, 15 nt, Human
gguuccccuguucac

SEQ ID NO: 1989365 - RNA, 23 nt, Human
gguuccagcaauucuccugccuc

SEQ ID NO: 1989366 - RNA, 21 nt, Human
gguucauuuucagauucaggc

SEQ ID NO: 1989367 - RNA, 23 nt, Human
gguucauuuucagauucaggcau

SEQ ID NO: 1989368 - RNA, 22 nt, Human
gguucccuuugacgccauccca

SEQ ID NO: 1989369 - RNA, 15 nt, Human
gguuccuacacagga

SEQ ID NO: 1989370 - RNA, 16 nt, Human
gguuccuccccuccuc

SEQ ID NO: 1989371 - RNA, 18 nt, Human
gguuccuacacaggacag

SEQ ID NO: 1989372 - RNA, 17 nt, Human
gguuccuacacaggaca

SEQ ID NO: 1989373 - RNA, 21 nt, Human
gguucccuuugacgccauccc

SEQ ID NO: 1989374 - RNA, 15 nt, Human
gguuucucuucuccc

SEQ ID NO: 1989375 - RNA, 22 nt, Human
gguuucucuucuccccuuccau

SEQ ID NO: 1989376 - RNA, 13 nt, Human
gguuucucuucuc

SEQ ID NO: 1989377 - RNA, 14 nt, Human
gguuucagaaaugu

SEQ ID NO: 1989378 - RNA, 12 nt, Human
gguuucagaaau

SEQ ID NO: 1989379 - RNA, 13 nt, Human
gguuucagaaaug

SEQ ID NO: 1989380 - RNA, 23 nt, Human
gguuuaucgcccuggcaggcagg

SEQ ID NO: 1989381 - RNA, 19 nt, Human
gguuucaccauguuggcca

SEQ ID NO: 1989382 - RNA, 16 nt, Human
gguuuagaaagcuugc

SEQ ID NO: 1989383 - RNA, 19 nt, Human
gguuccuuccucugagccu

SEQ ID NO: 1989384 - RNA, 20 nt, Human
gguuccuuccucugagccuu

SEQ ID NO: 1989385 - RNA, 22 nt, Human
gguuccuggggcauccaugggg

SEQ ID NO: 1989386 - RNA, 15 nt, Human
guaaauucugauuuc

SEQ ID NO: 1989387 - RNA, 18 nt, Human
guaaauucugauuucuuu

SEQ ID NO: 1989388 - RNA, 12 nt, Human
guaaauucugau

SEQ ID NO: 1989389 - RNA, 13 nt, Human
guaaauucugauu

SEQ ID NO: 1989390 - RNA, 14 nt, Human
guaaauucugauuu

SEQ ID NO: 1989391 - RNA, 16 nt, Human
guaaauuuaugugaug

SEQ ID NO: 1989392 - RNA, 17 nt, Human
guaaauuuaugugaugg

SEQ ID NO: 1989393 - RNA, 14 nt, Human
guaaagauuucugu

SEQ ID NO: 1989394 - RNA, 16 nt, Human
guaaagauuucuguuc

SEQ ID NO: 1989395 - RNA, 19 nt, Human
guaaagcaaccaaaaagaa

SEQ ID NO: 1989396 - RNA, 20 nt, Human
guaaagcaaccaaaaagaaa

SEQ ID NO: 1989397 - RNA, 14 nt, Human
guaaaaugaagaau

SEQ ID NO: 1989398 - RNA, 16 nt, Human
guaaaaugaagaauuu

SEQ ID NO: 1989399 - RNA, 17 nt, Human
guaaaaugaagaauuua

SEQ ID NO: 1989400 - RNA, 15 nt, Human
aaaguuuucccuuga

SEQ ID NO: 1989401 - RNA, 13 nt, Human
aaauaaaaaaaag

SEQ ID NO: 1989402 - RNA, 13 nt, Human
aaaguuuugccua

SEQ ID NO: 1989403 - RNA, 15 nt, Human
aaauaaaaaaaagaa

SEQ ID NO: 1989404 - RNA, 17 nt, Human
aaauaaaaaaaagaaaa

SEQ ID NO: 1989405 - RNA, 20 nt, Human
aaauaaaaaaaagaaaaaag

SEQ ID NO: 1989406 - RNA, 22 nt, Human
aaauaaaaaaaagaaaaaagag

SEQ ID NO: 1989407 - RNA, 18 nt, Human
aaauaaaaaaagaaaaaa

SEQ ID NO: 1989408 - RNA, 13 nt, Human
aaauaaugugaaa

SEQ ID NO: 1989409 - RNA, 12 nt, Human
aaauaaugugaa

SEQ ID NO: 1989410 - RNA, 13 nt, Human
aaauaaugcuguu

SEQ ID NO: 1989411 - RNA, 20 nt, Human
aaaguuauuucccuuuagcu

SEQ ID NO: 1989412 - RNA, 19 nt, Human
aaaguguucuguuacaaaa

SEQ ID NO: 1989413 - RNA, 21 nt, Human
aaaguucccuacuuccuguga

SEQ ID NO: 1989414 - RNA, 16 nt, Human
aaaguguucuguuaca

SEQ ID NO: 1989415 - RNA, 17 nt, Human
aaaguguucuguuacaa

SEQ ID NO: 1989416 - RNA, 18 nt, Human
aaaguguucuguuacaaa

SEQ ID NO: 1989417 - RNA, 22 nt, Human
gguuucuuuuugaaucuuuaau

SEQ ID NO: 1989418 - RNA, 20 nt, Human
gguuuggacaaaauggaaua

SEQ ID NO: 1989419 - RNA, 12 nt, Human
aaaguggugaga

SEQ ID NO: 1989420 - RNA, 14 nt, Human
gguuuggcuccugc

SEQ ID NO: 1989421 - RNA, 17 nt, Human
gguuuggcuccugccca

SEQ ID NO: 1989422 - RNA, 16 nt, Human
aaaguugaauuuuaca

SEQ ID NO: 1989423 - RNA, 23 nt, Human
aaaguucccuacuuccugugacu

SEQ ID NO: 1989424 - RNA, 21 nt, Human
aaaguuucucuuuucaaaaca

SEQ ID NO: 1989425 - RNA, 23 nt, Human
aaaguuucucuuuucaaaacauu

SEQ ID NO: 1989426 - RNA, 12 nt, Human
aaaguuucaaaa

SEQ ID NO: 1989427 - RNA, 18 nt, Human
aaaguuucaaaaaucuga

SEQ ID NO: 1989428 - RNA, 11 nt, Human
aaaguuucaug

SEQ ID NO: 1989429 - RNA, 19 nt, Human
aaaguuucaaaaaucugaa

SEQ ID NO: 1989430 - RNA, 20 nt, Human
aaaguuucaaaaaucugaag

SEQ ID NO: 1989431 - RNA, 21 nt, Human
aaaguuucaaaaaucugaaga

SEQ ID NO: 1989432 - RNA, 24 nt, Human
aaaguuugaucuuccucugcuaaa

SEQ ID NO: 1989433 - RNA, 14 nt, Human
aaaguuuguuugcu

SEQ ID NO: 1989434 - RNA, 16 nt, Human
aaaguuuguugaaaca

SEQ ID NO: 1989435 - RNA, 13 nt, Human
aaaguuucuuuga

SEQ ID NO: 1989436 - RNA, 13 nt, Human
aaaguuugaucuu

SEQ ID NO: 1989437 - RNA, 14 nt, Human
aaaguuugaucuuc

SEQ ID NO: 1989438 - RNA, 22 nt, Human
aaaguuugaucuuccucugcua

SEQ ID NO: 1989439 - RNA, 11 nt, Human
gauucucucca

SEQ ID NO: 1989440 - RNA, 22 nt, Human
gauucucuccauuuuggugucu

SEQ ID NO: 1989441 - RNA, 23 nt, Human
gauucucuugccucagcuucccc

SEQ ID NO: 1989442 - RNA, 14 nt, Human
gauuaguaagucuu

SEQ ID NO: 1989443 - RNA, 13 nt, Human
gauuaguuuagaa

SEQ ID NO: 1989444 - RNA, 13 nt, Human
gauuauaauuguu

SEQ ID NO: 1989445 - RNA, 14 nt, Human
gauuaguuuagaac

SEQ ID NO: 1989446 - RNA, 15 nt, Human
gauuaguuuagaaca

SEQ ID NO: 1989447 - RNA, 20 nt, Human
gauuacaggugugaaccacc

SEQ ID NO: 1989448 - RNA, 20 nt, Human
gauuacaggugugagccacc

SEQ ID NO: 1989449 - RNA, 14 nt, Human
gaugugacauuugu

SEQ ID NO: 1989450 - RNA, 17 nt, Human
gaugugacauuugucau

SEQ ID NO: 1989451 - RNA, 18 nt, Human
gauuacugccuauuuuaa

SEQ ID NO: 1989452 - RNA, 14 nt, Human
gauuaccagggacu

SEQ ID NO: 1989453 - RNA, 15 nt, Human
gauuacauucaguug

SEQ ID NO: 1989454 - RNA, 17 nt, Human
gaucucuugagccuggg

SEQ ID NO: 1989455 - RNA, 16 nt, Human
gaucucuugagccugg

SEQ ID NO: 1989456 - RNA, 12 nt, Human
gaucucuugagc

SEQ ID NO: 1989457 - RNA, 21 nt, Human
gauccaggccccucccucucc

SEQ ID NO: 1989458 - RNA, 16 nt, Human
gauauuuugcuuugug

SEQ ID NO: 1989459 - RNA, 21 nt, Human
gauauucuuuguuaauuugga

SEQ ID NO: 1989460 - RNA, 13 nt, Human
gauauuuuuaaua

SEQ ID NO: 1989461 - RNA, 15 nt, Human
gauauuuuuuucuuu

SEQ ID NO: 1989462 - RNA, 17 nt, Human
gaucucccuuuccuaua

SEQ ID NO: 1989463 - RNA, 16 nt, Human
gauccauuuuuuauau

SEQ ID NO: 1989464 - RNA, 23 nt, Human
gaucucagugguuaagauuccua

SEQ ID NO: 1989465 - RNA, 18 nt, Human
gauccauuuuuuauauuu

SEQ ID NO: 1989466 - RNA, 21 nt, Human
gaucucauuguucaauuccca

SEQ ID NO: 1989467 - RNA, 21 nt, Human
gaugaugaaaugaggucagag

SEQ ID NO: 1989468 - RNA, 20 nt, Human
gaugaucuuugcagacaggc

SEQ ID NO: 1989469 - RNA, 21 nt, Human
gaugaucuuugcagacaggca

SEQ ID NO: 1989470 - RNA, 14 nt, Human
gaugaucuuugcag

SEQ ID NO: 1989471 - RNA, 14 nt, Human
gauacccaucccau

SEQ ID NO: 1989472 - RNA, 13 nt, Human
gauacccauccca

SEQ ID NO: 1989473 - RNA, 14 nt, Human
gauaccuuaaaauu

SEQ ID NO: 1989474 - RNA, 17 nt, Human
gauaccuuaaaauuuga

SEQ ID NO: 1989475 - RNA, 21 nt, Human
gauaccuuaaaauuugaaaca

SEQ ID NO: 1989476 - RNA, 16 nt, Human
gauacuacaguuuguu

SEQ ID NO: 1989477 - RNA, 11 nt, Human
gauacuacagu

SEQ ID NO: 1989478 - RNA, 19 nt, Human
gauaccuuaaaauuugaaa

SEQ ID NO: 1989479 - RNA, 18 nt, Human
gauaugccugcucuuugg

SEQ ID NO: 1989480 - RNA, 12 nt, Human
gauaugcuugua

SEQ ID NO: 1989481 - RNA, 22 nt, Human
gauaugcuuguaacuaaaauaa

SEQ ID NO: 1989482 - RNA, 17 nt, Human
gauacuugaaaauuaac

SEQ ID NO: 1989483 - RNA, 16 nt, Human
gauaugccugcucuuu

SEQ ID NO: 1989484 - RNA, 16 nt, Human
gauacuugaaaauuaa

SEQ ID NO: 1989485 - RNA, 11 nt, Human
gauacucuggg

SEQ ID NO: 1989486 - RNA, 13 nt, Human
gauacucugggaa

SEQ ID NO: 1989487 - RNA, 16 nt, Human
gauacuacugaccaga

SEQ ID NO: 1989488 - RNA, 14 nt, Human
gauacucugggaac

SEQ ID NO: 1989489 - RNA, 13 nt, Human
gauauuaauguau

SEQ ID NO: 1989490 - RNA, 15 nt, Human
gauauucuuuguuaa

SEQ ID NO: 1989491 - RNA, 18 nt, Human
gauauucuuuguuaauuu

SEQ ID NO: 1989492 - RNA, 13 nt, Human
gauaugugaacag

SEQ ID NO: 1989493 - RNA, 14 nt, Human
gauaugugaacagu

SEQ ID NO: 1989494 - RNA, 20 nt, Human
gauauguaccuaacgaagua

SEQ ID NO: 1989495 - RNA, 20 nt, Human
gaguuugggguaugggagag

SEQ ID NO: 1989496 - RNA, 18 nt, Human
gaguuucacagugugauu

SEQ ID NO: 1989497 - RNA, 23 nt, Human
gaguuugccccguucuguuugua

SEQ ID NO: 1989498 - RNA, 19 nt, Human
gaguggacuguucccugag

SEQ ID NO: 1989499 - RNA, 16 nt, Human
gaguuguuacauuuuu

SEQ ID NO: 1989500 - RNA, 20 nt, Human
gaguuguuacauuuuuaagu

SEQ ID NO: 1989501 - RNA, 18 nt, Human
gagugccuuacacaaugg

SEQ ID NO: 1989502 - RNA, 13 nt, Human
gaggucuguucuu

SEQ ID NO: 1989503 - RNA, 14 nt, Human
gaggucuguucuuu

SEQ ID NO: 1989504 - RNA, 16 nt, Human
gaggugcaugccuaau

SEQ ID NO: 1989505 - RNA, 11 nt, Human
gaggugggagg

SEQ ID NO: 1989506 - RNA, 13 nt, Human
gaggugggagggc

SEQ ID NO: 1989507 - RNA, 14 nt, Human
gaggugggagggcc

SEQ ID NO: 1989508 - RNA, 12 nt, Human
gaggugggaucc

SEQ ID NO: 1989509 - RNA, 16 nt, Human
gagucccaccuuggcu

SEQ ID NO: 1989510 - RNA, 20 nt, Human
gagucccaccuuggcugcag

SEQ ID NO: 1989511 - RNA, 15 nt, Human
gagucaccaagccca

SEQ ID NO: 1989512 - RNA, 13 nt, Human
gagucaccaagcc

SEQ ID NO: 1989513 - RNA, 14 nt, Human
gagucaccaagccc

SEQ ID NO: 1989514 - RNA, 18 nt, Human
gagugaggaugucugggc

SEQ ID NO: 1989515 - RNA, 19 nt, Human
gagugaggaauggcaguga

SEQ ID NO: 1989516 - RNA, 16 nt, Human
gagugcaggcccaccc

SEQ ID NO: 1989517 - RNA, 18 nt, Human
gagugcaggcccacccug

SEQ ID NO: 1989518 - RNA, 11 nt, Human
gagugcaguga

SEQ ID NO: 1989519 - RNA, 12 nt, Human
gagugcagugag

SEQ ID NO: 1989520 - RNA, 24 nt, Human
gagugagcacuaaggugugcucug

SEQ ID NO: 1989521 - RNA, 21 nt, Human
gagucccaccuuggcugcagg

SEQ ID NO: 1989522 - RNA, 13 nt, Human
gagucccaccuug

SEQ ID NO: 1989523 - RNA, 12 nt, Human
gagugagcuggu

SEQ ID NO: 1989524 - RNA, 14 nt, Human
gcauacguacacau

SEQ ID NO: 1989525 - RNA, 23 nt, Human
gcauaauucugaaguuauauuuc

SEQ ID NO: 1989526 - RNA, 17 nt, Human
gcauaauaauccugcaa

SEQ ID NO: 1989527 - RNA, 22 nt, Human
gcauaacguauaaaagccuguu

SEQ ID NO: 1989528 - RNA, 17 nt, Human
gcauaccacuuuuguuc

SEQ ID NO: 1989529 - RNA, 20 nt, Human
gcauaccacuuuuguucuug

SEQ ID NO: 1989530 - RNA, 19 nt, Human
gcaguuugaggauuaguuu

SEQ ID NO: 1989531 - RNA, 12 nt, Human
gcaguuucaaua

SEQ ID NO: 1989532 - RNA, 17 nt, Human
gcaguuucaauaaaguu

SEQ ID NO: 1989533 - RNA, 20 nt, Human
gcaguuucaauaaaguuuga

SEQ ID NO: 1989534 - RNA, 12 nt, Human
gcagucauuuug

SEQ ID NO: 1989535 - RNA, 23 nt, Human
gcaggcucucaggccagcugcuu

SEQ ID NO: 1989536 - RNA, 14 nt, Human
gcaggcuggcccug

SEQ ID NO: 1989537 - RNA, 15 nt, Human
gcaggcuggcccugc

SEQ ID NO: 1989538 - RNA, 16 nt, Human
gcaggcuggcccugcc

SEQ ID NO: 1989539 - RNA, 17 nt, Human
gcaggcuggcccugccc

SEQ ID NO: 1989540 - RNA, 18 nt, Human
gcaggcuggcccugcccu

SEQ ID NO: 1989541 - RNA, 19 nt, Human
gcaggcuggcccugcccug

SEQ ID NO: 1989542 - RNA, 20 nt, Human
gcaggcuggcccugcccugg

SEQ ID NO: 1989543 - RNA, 21 nt, Human
gcaggcuggcccugcccuggu

SEQ ID NO: 1989544 - RNA, 22 nt, Human
gcaggcucucaggccagcugcu

SEQ ID NO: 1989545 - RNA, 20 nt, Human
gcaggcucucaggccagcug

SEQ ID NO: 1989546 - RNA, 17 nt, Human
gcagcugcgguccaccc

SEQ ID NO: 1989547 - RNA, 19 nt, Human
gcagcugcgguccacccag

SEQ ID NO: 1989548 - RNA, 20 nt, Human
gcaguauaaagaauaggacu

SEQ ID NO: 1989549 - RNA, 12 nt, Human
gcaguaucauga

SEQ ID NO: 1989550 - RNA, 15 nt, Human
gcaguaucaugaagc

SEQ ID NO: 1989551 - RNA, 13 nt, Human
gcaguaacuuggg

SEQ ID NO: 1989552 - RNA, 16 nt, Human
gcaguaacuugggagu

SEQ ID NO: 1989553 - RNA, 19 nt, Human
gcagggacuugaacccaua

SEQ ID NO: 1989554 - RNA, 13 nt, Human
gcagggaaacagc

SEQ ID NO: 1989555 - RNA, 10 nt, Human
gcagggaggg

SEQ ID NO: 1989556 - RNA, 13 nt, Human
gcagggagggccu

SEQ ID NO: 1989557 - RNA, 14 nt, Human
gcagccaggccaca

SEQ ID NO: 1989558 - RNA, 13 nt, Human
gcagccaggccac

SEQ ID NO: 1989559 - RNA, 16 nt, Human
gcagccaggccacaag

SEQ ID NO: 1989560 - RNA, 22 nt, Human
gcagccccaaauugucaccugc

SEQ ID NO: 1989561 - RNA, 16 nt, Human
gcagccacauuccuga

SEQ ID NO: 1989562 - RNA, 16 nt, Human
gcagagcccugcuccc

SEQ ID NO: 1989563 - RNA, 11 nt, Human
gcagagcccug

SEQ ID NO: 1989564 - RNA, 13 nt, Human
gcagagcccugcu

SEQ ID NO: 1989565 - RNA, 15 nt, Human
gcagagcccugcucc

SEQ ID NO: 1989566 - RNA, 14 nt, Human
gcagccacuauugu

SEQ ID NO: 1989567 - RNA, 18 nt, Human
gcagccacuuaggacaaa

SEQ ID NO: 1989568 - RNA, 12 nt, Human
gcagccaggcca

SEQ ID NO: 1989569 - RNA, 14 nt, Human
gauucugagagcug

SEQ ID NO: 1989570 - RNA, 23 nt, Human
gauucugaccuuaaaugcaacca

SEQ ID NO: 1989571 - RNA, 13 nt, Human
gauucugagagcu

SEQ ID NO: 1989572 - RNA, 20 nt, Human
gauucugaccuuaaaugcaa

SEQ ID NO: 1989573 - RNA, 21 nt, Human
gauucugaccuuaaaugcaac

SEQ ID NO: 1989574 - RNA, 16 nt, Human
gcaaguccugcaacca

SEQ ID NO: 1989575 - RNA, 13 nt, Human
gcaagugagagcu

SEQ ID NO: 1989576 - RNA, 13 nt, Human
gcaauaaauuuug

SEQ ID NO: 1989577 - RNA, 14 nt, Human
gcaauaaauuuuga

SEQ ID NO: 1989578 - RNA, 15 nt, Human
gcaauaaauuuugaa

SEQ ID NO: 1989579 - RNA, 16 nt, Human
gcaauaaauuuugaaa

SEQ ID NO: 1989580 - RNA, 18 nt, Human
gcaauaaauuuugaaaag

SEQ ID NO: 1989581 - RNA, 21 nt, Human
gcaauaaagcagcguuucuau

SEQ ID NO: 1989582 - RNA, 14 nt, Human
gcacaagcugcacc

SEQ ID NO: 1989583 - RNA, 23 nt, Human
gcacaagcuccaagcucccaggc

SEQ ID NO: 1989584 - RNA, 22 nt, Human
gcacaagcuccaagcucccagg

SEQ ID NO: 1989585 - RNA, 19 nt, Human
gcaccggcuggccuggccc

SEQ ID NO: 1989586 - RNA, 19 nt, Human
gcaccgacuagacacacaa

SEQ ID NO: 1989587 - RNA, 20 nt, Human
gcaccgacuagacacacaaa

SEQ ID NO: 1989588 - RNA, 14 nt, Human
gcaccgccucuucc

SEQ ID NO: 1989589 - RNA, 17 nt, Human
gcaccgccucuucccgc

SEQ ID NO: 1989590 - RNA, 20 nt, Human
gcacccuuccaucugauucc

SEQ ID NO: 1989591 - RNA, 23 nt, Human
gcaccggcuggccuggccccuca

SEQ ID NO: 1989592 - RNA, 21 nt, Human
gcaccggcuggccuggccccu

SEQ ID NO: 1989593 - RNA, 18 nt, Human
gcaccggcuggccuggcc

SEQ ID NO: 1989594 - RNA, 19 nt, Human
gcacaugccucucucaggc

SEQ ID NO: 1989595 - RNA, 18 nt, Human
gcacaugccucucucagg

SEQ ID NO: 1989596 - RNA, 17 nt, Human
gcacaugccucucucag

SEQ ID NO: 1989597 - RNA, 14 nt, Human
gcacaugccucucu

SEQ ID NO: 1989598 - RNA, 21 nt, Human
gcacaugccucucucaggcca

SEQ ID NO: 1989599 - RNA, 20 nt, Human
gcacaugccucucucaggcc

SEQ ID NO: 1989600 - RNA, 22 nt, Human
gcacaugccucucucaggccaa

SEQ ID NO: 1989601 - RNA, 20 nt, Human
gcacaugauuucacaaauau

SEQ ID NO: 1989602 - RNA, 22 nt, Human
gcacaugauuucacaaauauua

SEQ ID NO: 1989603 - RNA, 15 nt, Human
gcacccuccuagggc

SEQ ID NO: 1989604 - RNA, 19 nt, Human
gcacaucagcacgauuucu

SEQ ID NO: 1989605 - RNA, 20 nt, Human
gcacaucagcacgauuucug

SEQ ID NO: 1989606 - RNA, 21 nt, Human
gcacaucagcacgauuucugu

SEQ ID NO: 1989607 - RNA, 15 nt, Human
gcacaucuguuuugu

SEQ ID NO: 1989608 - RNA, 13 nt, Human
gcacaugccucuc

SEQ ID NO: 1989609 - RNA, 12 nt, Human
gcacaugauuuc

SEQ ID NO: 1989610 - RNA, 13 nt, Human
gcacaugauuuca

SEQ ID NO: 1989611 - RNA, 14 nt, Human
gcacaugauuucac

SEQ ID NO: 1989612 - RNA, 15 nt, Human
gcacaugauuucaca

SEQ ID NO: 1989613 - RNA, 17 nt, Human
gcacaugauuucacaaa

SEQ ID NO: 1989614 - RNA, 19 nt, Human
gcacaugauuucacaaaua

SEQ ID NO: 1989615 - RNA, 22 nt, Human
gcacaaucucggcucacugcau

SEQ ID NO: 1989616 - RNA, 12 nt, Human
gcacaauuauaa

SEQ ID NO: 1989617 - RNA, 21 nt, Human
gcacaaucucggcucacugca

SEQ ID NO: 1989618 - RNA, 22 nt, Human
gcaauaacaguaguguuacaug

SEQ ID NO: 1989619 - RNA, 14 nt, Human
gcaauaagaacaaa

SEQ ID NO: 1989620 - RNA, 12 nt, Human
gcacugacauug

SEQ ID NO: 1989621 - RNA, 14 nt, Human
gcacugaaguuuga

SEQ ID NO: 1989622 - RNA, 14 nt, Human
gcacugacucugga

SEQ ID NO: 1989623 - RNA, 16 nt, Human
gcacugacucuggaaa

SEQ ID NO: 1989624 - RNA, 17 nt, Human
gcacugacucuggaaaa

SEQ ID NO: 1989625 - RNA, 18 nt, Human
gcacugacucuggaaaag

SEQ ID NO: 1989626 - RNA, 13 nt, Human
gcacugacucugg

SEQ ID NO: 1989627 - RNA, 23 nt, Human
gcagagcaccuuagacagucccu

SEQ ID NO: 1989628 - RNA, 22 nt, Human
gcagagcaccuuagacaguccc

SEQ ID NO: 1989629 - RNA, 19 nt, Human
gcagagcaccuuagacagu

SEQ ID NO: 1989630 - RNA, 14 nt, Human
gcagagaggcugug

SEQ ID NO: 1989631 - RNA, 21 nt, Human
gcagaaauucuguuuuuaaaa

SEQ ID NO: 1989632 - RNA, 16 nt, Human
gcagaaauucuguuuu

SEQ ID NO: 1989633 - RNA, 17 nt, Human
gcagaaauucuguuuuu

SEQ ID NO: 1989634 - RNA, 16 nt, Human
gcagaaaucugaggaa

SEQ ID NO: 1989635 - RNA, 12 nt, Human
gcagaaauucug

SEQ ID NO: 1989636 - RNA, 14 nt, Human
gcagaaauucuguu

SEQ ID NO: 1989637 - RNA, 15 nt, Human
gcagaaauucuguuu

SEQ ID NO: 1989638 - RNA, 13 nt, Human
gcagagaggcugu

SEQ ID NO: 1989639 - RNA, 15 nt, Human
gcagagcagagacca

SEQ ID NO: 1989640 - RNA, 14 nt, Human
gcagagcagagacc

SEQ ID NO: 1989641 - RNA, 12 nt, Human
gcagagcagaga

SEQ ID NO: 1989642 - RNA, 24 nt, Human
gcagagcaccuuagacagucccug

SEQ ID NO: 1989643 - RNA, 21 nt, Human
gcagagcagugggccuggcca

SEQ ID NO: 1989644 - RNA, 20 nt, Human
gcagagcagagaccaucccu

SEQ ID NO: 1989645 - RNA, 19 nt, Human
gcagagcagagaccauccc

SEQ ID NO: 1989646 - RNA, 22 nt, Human
gaaugaaugucagugugacuga

SEQ ID NO: 1989647 - RNA, 18 nt, Human
gaaugaaugucaguguga

SEQ ID NO: 1989648 - RNA, 14 nt, Human
gaaugaaugucagu

SEQ ID NO: 1989649 - RNA, 11 nt, Human
gaaugaauguc

SEQ ID NO: 1989650 - RNA, 16 nt, Human
gaaugagacuggcuug

SEQ ID NO: 1989651 - RNA, 22 nt, Human
gaaugacuaagaggaaaguaca

SEQ ID NO: 1989652 - RNA, 13 nt, Human
gaaugacucguuu

SEQ ID NO: 1989653 - RNA, 20 nt, Human
gaaugacuuccccaauaucu

SEQ ID NO: 1989654 - RNA, 18 nt, Human
gaaugaccuuguaaugua

SEQ ID NO: 1989655 - RNA, 19 nt, Human
gaaugaccuuguaauguaa

SEQ ID NO: 1989656 - RNA, 21 nt, Human
gaaugaccuuguaauguaacu

SEQ ID NO: 1989657 - RNA, 15 nt, Human
gaaugaccuuguaau

SEQ ID NO: 1989658 - RNA, 16 nt, Human
gaaugaccuuguaaug

SEQ ID NO: 1989659 - RNA, 12 nt, Human
gaaugaauuuca

SEQ ID NO: 1989660 - RNA, 19 nt, Human
gaagugugggucugugugu

SEQ ID NO: 1989661 - RNA, 17 nt, Human
gaagugugggucugugu

SEQ ID NO: 1989662 - RNA, 18 nt, Human
gaagugugggucugugug

SEQ ID NO: 1989663 - RNA, 19 nt, Human
gaaaucccugcucacugca

SEQ ID NO: 1989664 - RNA, 15 nt, Human
gaaaucccugcucac

SEQ ID NO: 1989665 - RNA, 18 nt, Human
gaaaucccugcucacugc

SEQ ID NO: 1989666 - RNA, 18 nt, Human
gaaauccagggugguggu

SEQ ID NO: 1989667 - RNA, 13 nt, Human
gaaauccagggug

SEQ ID NO: 1989668 - RNA, 22 nt, Human
gaaaucauauuuggaauaaaaa

SEQ ID NO: 1989669 - RNA, 15 nt, Human
gaagcucagggccug

SEQ ID NO: 1989670 - RNA, 14 nt, Human
gaagcucagggccu

SEQ ID NO: 1989671 - RNA, 19 nt, Human
gaagcucagggccuggcuc

SEQ ID NO: 1989672 - RNA, 18 nt, Human
gaagcucagggccuggcu

SEQ ID NO: 1989673 - RNA, 17 nt, Human
gaagcucagggccuggc

SEQ ID NO: 1989674 - RNA, 16 nt, Human
gaagcucagggccugg

SEQ ID NO: 1989675 - RNA, 21 nt, Human
gaagcucagggccuggcucag

SEQ ID NO: 1989676 - RNA, 20 nt, Human
gaagcucagggccuggcuca

SEQ ID NO: 1989677 - RNA, 23 nt, Human
gaagcucagggccuggcucaggu

SEQ ID NO: 1989678 - RNA, 15 nt, Human
gaaguggggacagag

SEQ ID NO: 1989679 - RNA, 16 nt, Human
gaagugagaaaaugaa

SEQ ID NO: 1989680 - RNA, 16 nt, Human
gaagugacgguuccua

SEQ ID NO: 1989681 - RNA, 22 nt, Human
gaagugacgguuccuacacagg

SEQ ID NO: 1989682 - RNA, 17 nt, Human
gaagugcagaacugcag

SEQ ID NO: 1989683 - RNA, 18 nt, Human
gaagugcagaacugcagu

SEQ ID NO: 1989684 - RNA, 20 nt, Human
gaagugcagaacugcaguca

SEQ ID NO: 1989685 - RNA, 19 nt, Human
gaagggcagggcugaggcc

SEQ ID NO: 1989686 - RNA, 18 nt, Human
gaagucuuuguacagaca

SEQ ID NO: 1989687 - RNA, 20 nt, Human
gaagucuuuguacagacaac

SEQ ID NO: 1989688 - RNA, 19 nt, Human
gaagucuuuguacagacaa

SEQ ID NO: 1989689 - RNA, 13 nt, Human
gaaggccugacuu

SEQ ID NO: 1989690 - RNA, 20 nt, Human
gaaggccugacuucugcugg

SEQ ID NO: 1989691 - RNA, 17 nt, Human
gaaggcucgagcaugcc

SEQ ID NO: 1989692 - RNA, 16 nt, Human
gaaggcucgagcaugc

SEQ ID NO: 1989693 - RNA, 14 nt, Human
gaagcuggccugag

SEQ ID NO: 1989694 - RNA, 15 nt, Human
gaagcuggccugaga

SEQ ID NO: 1989695 - RNA, 19 nt, Human
gaagcuggccugagagggg

SEQ ID NO: 1989696 - RNA, 22 nt, Human
gaagcuggccugagaggggaag

SEQ ID NO: 1989697 - RNA, 15 nt, Human
gaaggcuauggggau

SEQ ID NO: 1989698 - RNA, 19 nt, Human
gaaggcucgagcaugccug

SEQ ID NO: 1989699 - RNA, 21 nt, Human
gacacacagcucuguccuggg

SEQ ID NO: 1989700 - RNA, 12 nt, Human
gaauuuuaaaag

SEQ ID NO: 1989701 - RNA, 15 nt, Human
gaauuuuaaaagaug

SEQ ID NO: 1989702 - RNA, 21 nt, Human
gaauuuuaaaagaugcaaugu

SEQ ID NO: 1989703 - RNA, 23 nt, Human
gaauuuuaaaagaugcaauguag

SEQ ID NO: 1989704 - RNA, 13 nt, Human
gaauuuuaagccu

SEQ ID NO: 1989705 - RNA, 20 nt, Human
gaauuuuaagccuuuguuga

SEQ ID NO: 1989706 - RNA, 19 nt, Human
gaauuuuggcugugucucc

SEQ ID NO: 1989707 - RNA, 22 nt, Human
gaauuuucauuuuacaguuacu

SEQ ID NO: 1989708 - RNA, 21 nt, Human
gaauuuuauuuuuugggaaaa

SEQ ID NO: 1989709 - RNA, 18 nt, Human
gaauuuuauugacacagu

SEQ ID NO: 1989710 - RNA, 11 nt, Human
gaauuuucauu

SEQ ID NO: 1989711 - RNA, 12 nt, Human
gaauuuucauuu

SEQ ID NO: 1989712 - RNA, 13 nt, Human
gaauuuucauuuu

SEQ ID NO: 1989713 - RNA, 14 nt, Human
gaauuuucauuuua

SEQ ID NO: 1989714 - RNA, 16 nt, Human
gaauuuucauuuuaca

SEQ ID NO: 1989715 - RNA, 20 nt, Human
gaauuuucauuuuacaguua

SEQ ID NO: 1989716 - RNA, 12 nt, Human
gaauuaugaaac

SEQ ID NO: 1989717 - RNA, 20 nt, Human
gaauuugugaagguggaaau

SEQ ID NO: 1989718 - RNA, 15 nt, Human
gaauuuuuaugugug

SEQ ID NO: 1989719 - RNA, 18 nt, Human
gaauuuuuaugugugauu

SEQ ID NO: 1989720 - RNA, 21 nt, Human
gaauuuugugcccccauguaa

SEQ ID NO: 1989721 - RNA, 20 nt, Human
gaauuuugugcccccaugua

SEQ ID NO: 1989722 - RNA, 23 nt, Human
gaauuuuggcugugucucccuuc

SEQ ID NO: 1989723 - RNA, 15 nt, Human
gacacacagcucugu

SEQ ID NO: 1989724 - RNA, 17 nt, Human
gacacacagcucugucc

SEQ ID NO: 1989725 - RNA, 18 nt, Human
gacacacagcucuguccu

SEQ ID NO: 1989726 - RNA, 19 nt, Human
gacacacagcucuguccug

SEQ ID NO: 1989727 - RNA, 15 nt, Human
gacaaaauggaauac

SEQ ID NO: 1989728 - RNA, 14 nt, Human
gacacacagcucug

SEQ ID NO: 1989729 - RNA, 13 nt, Human
gacacugaugggc

SEQ ID NO: 1989730 - RNA, 16 nt, Human
gacacuuaaaaauggu

SEQ ID NO: 1989731 - RNA, 15 nt, Human
gacacugaugggcaa

SEQ ID NO: 1989732 - RNA, 23 nt, Human
gacacuuauccacgagagcgcag

SEQ ID NO: 1989733 - RNA, 23 nt, Human
gacagacaacacugggaaacaga

SEQ ID NO: 1989734 - RNA, 14 nt, Human
gacagaaggcuccu

SEQ ID NO: 1989735 - RNA, 19 nt, Human
gacagaaggcuccugcccc

SEQ ID NO: 1989736 - RNA, 20 nt, Human
gacagaaggcuccugccccc

SEQ ID NO: 1989737 - RNA, 23 nt, Human
gacagcccgggcucugccuccca

SEQ ID NO: 1989738 - RNA, 22 nt, Human
gacagcccgggcucugccuccc

SEQ ID NO: 1989739 - RNA, 21 nt, Human
gacagcccgggcucugccucc

SEQ ID NO: 1989740 - RNA, 12 nt, Human
gacagacacagg

SEQ ID NO: 1989741 - RNA, 20 nt, Human
gacaggguuuugccauguug

SEQ ID NO: 1989742 - RNA, 22 nt, Human
gacaggguuuugccauguuggc

SEQ ID NO: 1989743 - RNA, 15 nt, Human
gacagcgcacagcug

SEQ ID NO: 1989744 - RNA, 18 nt, Human
gacagcgcacagcugcuc

SEQ ID NO: 1989745 - RNA, 11 nt, Human
gacagcuccuu

SEQ ID NO: 1989746 - RNA, 13 nt, Human
gacagcccuccau

SEQ ID NO: 1989747 - RNA, 13 nt, Human
gacagccuggcac

SEQ ID NO: 1989748 - RNA, 19 nt, Human
gacagccuggcacagggca

SEQ ID NO: 1989749 - RNA, 15 nt, Human
gacaguauuuguggg

SEQ ID NO: 1989750 - RNA, 14 nt, Human
gacagucucaccau

SEQ ID NO: 1989751 - RNA, 23 nt, Human
gacagucucaccauuuccccagg

SEQ ID NO: 1989752 - RNA, 13 nt, Human
gacagucucacca

SEQ ID NO: 1989753 - RNA, 14 nt, Human
gacagugaaagaaa

SEQ ID NO: 1989754 - RNA, 22 nt, Human
gagaaggacccggaggggccug

SEQ ID NO: 1989755 - RNA, 23 nt, Human
gagaaggacccggaggggccugg

SEQ ID NO: 1989756 - RNA, 12 nt, Human
gagaaggaagcc

SEQ ID NO: 1989757 - RNA, 20 nt, Human
gagaaggacccggaggggcc

SEQ ID NO: 1989758 - RNA, 15 nt, Human
gagaagcggcuggca

SEQ ID NO: 1989759 - RNA, 13 nt, Human
gagaagcggcugg

SEQ ID NO: 1989760 - RNA, 16 nt, Human
gagaagcggcuggcag

SEQ ID NO: 1989761 - RNA, 23 nt, Human
gagacuaaccccaccacacccuc

SEQ ID NO: 1989762 - RNA, 11 nt, Human
gagaccugccc

SEQ ID NO: 1989763 - RNA, 12 nt, Human
gagaccugcccc

SEQ ID NO: 1989764 - RNA, 13 nt, Human
gagaccugccccu

SEQ ID NO: 1989765 - RNA, 21 nt, Human
gagacccugucucaaaaaaag

SEQ ID NO: 1989766 - RNA, 20 nt, Human
gagaagucuucuauuuauuu

SEQ ID NO: 1989767 - RNA, 21 nt, Human
gagaagucuucuauuuauuua

SEQ ID NO: 1989768 - RNA, 14 nt, Human
gagaaucacuugaa

SEQ ID NO: 1989769 - RNA, 18 nt, Human
gagaagugacgguuccua

SEQ ID NO: 1989770 - RNA, 15 nt, Human
gagaaucacuugaac

SEQ ID NO: 1989771 - RNA, 15 nt, Human
gagaaucauguuucu

SEQ ID NO: 1989772 - RNA, 16 nt, Human
gagaaucacaggcugg

SEQ ID NO: 1989773 - RNA, 16 nt, Human
gagaaucauguuucuu

SEQ ID NO: 1989774 - RNA, 17 nt, Human
gagaaucauguuucuuu

SEQ ID NO: 1989775 - RNA, 19 nt, Human
gagaaucauguuucuuuga

SEQ ID NO: 1989776 - RNA, 20 nt, Human
gagaaucauguuucuuugau

SEQ ID NO: 1989777 - RNA, 18 nt, Human
gacuuuugaaaagaggug

SEQ ID NO: 1989778 - RNA, 13 nt, Human
gacuuuugcuuua

SEQ ID NO: 1989779 - RNA, 14 nt, Human
gacuuuugcuuuaa

SEQ ID NO: 1989780 - RNA, 15 nt, Human
gacuuuugcuuuaau

SEQ ID NO: 1989781 - RNA, 17 nt, Human
gacuuuugcuuuaauuc

SEQ ID NO: 1989782 - RNA, 23 nt, Human
gacuuuucuuucagccaagaauu

SEQ ID NO: 1989783 - RNA, 21 nt, Human
gacuuuucuuuguggcuuccu

SEQ ID NO: 1989784 - RNA, 11 nt, Human
gacuuuccucu

SEQ ID NO: 1989785 - RNA, 13 nt, Human
gacuuucucuaau

SEQ ID NO: 1989786 - RNA, 16 nt, Human
gacuuucucuaauaau

SEQ ID NO: 1989787 - RNA, 18 nt, Human
gacuuucucuaauaauaa

SEQ ID NO: 1989788 - RNA, 19 nt, Human
gacuuucucuaauaauaaa

SEQ ID NO: 1989789 - RNA, 20 nt, Human
gacuuucucuaauaauaaau

SEQ ID NO: 1989790 - RNA, 21 nt, Human
gacuuucucuaauaauaaaua

SEQ ID NO: 1989791 - RNA, 22 nt, Human
gacuaucuaaauguugaaagau

SEQ ID NO: 1989792 - RNA, 18 nt, Human
gacuaggguccuggggaa

SEQ ID NO: 1989793 - RNA, 15 nt, Human
gacuaggguccuggg

SEQ ID NO: 1989794 - RNA, 16 nt, Human
gacuaggguccugggg

SEQ ID NO: 1989795 - RNA, 12 nt, Human
gacucugucuca

SEQ ID NO: 1989796 - RNA, 17 nt, Human
gacucuggacuuucucu

SEQ ID NO: 1989797 - RNA, 20 nt, Human
gacucuggacuuucucuaau

SEQ ID NO: 1989798 - RNA, 22 nt, Human
gacucuggacuuucucuaauaa

SEQ ID NO: 1989799 - RNA, 16 nt, Human
gacucugcucuugcau

SEQ ID NO: 1989800 - RNA, 20 nt, Human
gacugaaaaccucuccucau

SEQ ID NO: 1989801 - RNA, 18 nt, Human
gacugaaaaccucuccuc

SEQ ID NO: 1989802 - RNA, 17 nt, Human
gacugaaaaccucuccu

SEQ ID NO: 1989803 - RNA, 16 nt, Human
gacugaaaaccucucc

SEQ ID NO: 1989804 - RNA, 22 nt, Human
gacucuuuuccaaacacaggca

SEQ ID NO: 1989805 - RNA, 14 nt, Human
gagcagggcucagc

SEQ ID NO: 1989806 - RNA, 18 nt, Human
gagcagggaaggccugac

SEQ ID NO: 1989807 - RNA, 13 nt, Human
gagcagggaaggc

SEQ ID NO: 1989808 - RNA, 14 nt, Human
gagcagggaaggcc

SEQ ID NO: 1989809 - RNA, 16 nt, Human
gagcagggaaggccug

SEQ ID NO: 1989810 - RNA, 17 nt, Human
gagcagggaaggccuga

SEQ ID NO: 1989811 - RNA, 12 nt, Human
gagcaucaggcc

SEQ ID NO: 1989812 - RNA, 21 nt, Human
gagcagggcucagcggggaca

SEQ ID NO: 1989813 - RNA, 22 nt, Human
gagcaugccuggauggggcugc

SEQ ID NO: 1989814 - RNA, 17 nt, Human
gagcccccagcuuccag

SEQ ID NO: 1989815 - RNA, 20 nt, Human
gagcccccagcuuccagcag

SEQ ID NO: 1989816 - RNA, 21 nt, Human
gagcccccagcuuccagcagg

SEQ ID NO: 1989817 - RNA, 22 nt, Human
gagcccccagcuuccagcagga

SEQ ID NO: 1989818 - RNA, 12 nt, Human
gagccccacucu

SEQ ID NO: 1989819 - RNA, 13 nt, Human
gagccccacucuc

SEQ ID NO: 1989820 - RNA, 14 nt, Human
gagccccacucuca

SEQ ID NO: 1989821 - RNA, 16 nt, Human
gagccccacucucaga

SEQ ID NO: 1989822 - RNA, 17 nt, Human
gagccccacucucagag

SEQ ID NO: 1989823 - RNA, 18 nt, Human
gagccccacucucagagg

SEQ ID NO: 1989824 - RNA, 19 nt, Human
gagccccacucucagaggc

SEQ ID NO: 1989825 - RNA, 20 nt, Human
gagccccacucucagaggcc

SEQ ID NO: 1989826 - RNA, 21 nt, Human
gagccccacucucagaggccc

SEQ ID NO: 1989827 - RNA, 22 nt, Human
gagccccacucucagaggcccc

SEQ ID NO: 1989828 - RNA, 23 nt, Human
gagccccacucucagaggcccca

SEQ ID NO: 1989829 - RNA, 19 nt, Human
gagcuggggaugucucuca

SEQ ID NO: 1989830 - RNA, 20 nt, Human
gagcuggggagaauggggcu

SEQ ID NO: 1989831 - RNA, 18 nt, Human
gagcugggugucaagagg

SEQ ID NO: 1989832 - RNA, 21 nt, Human
gagcuggggaccagcagucug

SEQ ID NO: 1989833 - RNA, 17 nt, Human
gagccuuccaggggugg

SEQ ID NO: 1989834 - RNA, 16 nt, Human
gagccuuccaggggug

SEQ ID NO: 1989835 - RNA, 15 nt, Human
gagccuuccaggggu

SEQ ID NO: 1989836 - RNA, 14 nt, Human
gagccuuccagggg

SEQ ID NO: 1989837 - RNA, 14 nt, Human
gagcgacagagcag

SEQ ID NO: 1989838 - RNA, 15 nt, Human
gagcgacagagcagu

SEQ ID NO: 1989839 - RNA, 22 nt, Human
gagccuugaacuuugaccucug

SEQ ID NO: 1989840 - RNA, 19 nt, Human
gagccuugaacuuugaccu

SEQ ID NO: 1989841 - RNA, 21 nt, Human
gagcggagaaaggaagggcug

SEQ ID NO: 1989842 - RNA, 18 nt, Human
gagcggagaaaggaaggg

SEQ ID NO: 1989843 - RNA, 20 nt, Human
gagcggagacgggaggccug

SEQ ID NO: 1989844 - RNA, 16 nt, Human
gagcggauugcaaagc

SEQ ID NO: 1989845 - RNA, 18 nt, Human
gagcggauugcaaagcaa

SEQ ID NO: 1989846 - RNA, 21 nt, Human
gagcugccuguucagcuccag

SEQ ID NO: 1989847 - RNA, 22 nt, Human
gagcugccuguucagcuccagc

SEQ ID NO: 1989848 - RNA, 20 nt, Human
gagauuuggggcuaaagacu

SEQ ID NO: 1989849 - RNA, 13 nt, Human
gagauuuacaacu

SEQ ID NO: 1989850 - RNA, 14 nt, Human
gagauguagccccu

SEQ ID NO: 1989851 - RNA, 21 nt, Human
gagaugguaugcacaauucca

SEQ ID NO: 1989852 - RNA, 18 nt, Human
gagauugcaccacugcac

SEQ ID NO: 1989853 - RNA, 21 nt, Human
gagauugcaccacugcacucc

SEQ ID NO: 1989854 - RNA, 12 nt, Human
gagaugucucuu

SEQ ID NO: 1989855 - RNA, 16 nt, Human
gagacuccugcaggca

SEQ ID NO: 1989856 - RNA, 15 nt, Human
gagacuccugcaggc

SEQ ID NO: 1989857 - RNA, 19 nt, Human
gagacuauguaaaaauaac

SEQ ID NO: 1989858 - RNA, 18 nt, Human
gagacuccugcaggcagc

SEQ ID NO: 1989859 - RNA, 17 nt, Human
gagacuccugcaggcag

SEQ ID NO: 1989860 - RNA, 14 nt, Human
gagaggcauccagu

SEQ ID NO: 1989861 - RNA, 20 nt, Human
gagaugaugaaaauauuuaa

SEQ ID NO: 1989862 - RNA, 19 nt, Human
gagaugaugaaaauauuua

SEQ ID NO: 1989863 - RNA, 22 nt, Human
gagaggcauccaguaucuugaa

SEQ ID NO: 1989864 - RNA, 21 nt, Human
gagaugaugccaugggcccuc

SEQ ID NO: 1989865 - RNA, 15 nt, Human
gagaugcugugcccc

SEQ ID NO: 1989866 - RNA, 17 nt, Human
gagaugcugugccccug

SEQ ID NO: 1989867 - RNA, 14 nt, Human
gagaugcugugccc

SEQ ID NO: 1989868 - RNA, 22 nt, Human
cuuuccugaggcugggcucccu

SEQ ID NO: 1989869 - RNA, 13 nt, Human
cuuuccugugcca

SEQ ID NO: 1989870 - RNA, 14 nt, Human
cuuuccugugccag

SEQ ID NO: 1989871 - RNA, 15 nt, Human
cuuuccugugccagg

SEQ ID NO: 1989872 - RNA, 17 nt, Human
cuuuccuguuucucagu

SEQ ID NO: 1989873 - RNA, 19 nt, Human
cuuucaggagcuccauaca

SEQ ID NO: 1989874 - RNA, 20 nt, Human
cuuucagccaagaauucuua

SEQ ID NO: 1989875 - RNA, 23 nt, Human
cuuucagccaagaauucuuaaau

SEQ ID NO: 1989876 - RNA, 16 nt, Human
cuuucacaaccuucug

SEQ ID NO: 1989877 - RNA, 23 nt, Human
cuuucaauaggaaaaacugauuu

SEQ ID NO: 1989878 - RNA, 14 nt, Human
cuuucacaaccuuc

SEQ ID NO: 1989879 - RNA, 16 nt, Human
cuuuguagcauuuggu

SEQ ID NO: 1989880 - RNA, 20 nt, Human
cuuuguagcauuuggugcuu

SEQ ID NO: 1989881 - RNA, 12 nt, Human
cuuuguauaguu

SEQ ID NO: 1989882 - RNA, 15 nt, Human
cuuuguauaguuaug

SEQ ID NO: 1989883 - RNA, 18 nt, Human
cuuuguauaguuauguaa

SEQ ID NO: 1989884 - RNA, 19 nt, Human
cuuuguauaguuauguaaa

SEQ ID NO: 1989885 - RNA, 21 nt, Human
cuuuguauaguuauguaaaua

SEQ ID NO: 1989886 - RNA, 13 nt, Human
cuuuuauaaacuu

SEQ ID NO: 1989887 - RNA, 14 nt, Human
cuuuuauaaacuuu

SEQ ID NO: 1989888 - RNA, 20 nt, Human
cuuuuaguuuuucugucccu

SEQ ID NO: 1989889 - RNA, 14 nt, Human
cuuuuaguuuuucu

SEQ ID NO: 1989890 - RNA, 18 nt, Human
cuuuuaguuuuucugucc

SEQ ID NO: 1989891 - RNA, 14 nt, Human
cuuuuaugugaaac

SEQ ID NO: 1989892 - RNA, 13 nt, Human
cuuuguaaugaaa

SEQ ID NO: 1989893 - RNA, 15 nt, Human
cuuuguaaauuguca

SEQ ID NO: 1989894 - RNA, 15 nt, Human
cuuuguaaauucuga

SEQ ID NO: 1989895 - RNA, 16 nt, Human
cuuuguaaauucugau

SEQ ID NO: 1989896 - RNA, 17 nt, Human
cuuuguaaauucugauu

SEQ ID NO: 1989897 - RNA, 20 nt, Human
cuuugauguguuguucuugg

SEQ ID NO: 1989898 - RNA, 12 nt, Human
cuuuguaaauuc

SEQ ID NO: 1989899 - RNA, 14 nt, Human
cuuugggcugcccu

SEQ ID NO: 1989900 - RNA, 22 nt, Human
cuuugaugucagcaguugcugg

SEQ ID NO: 1989901 - RNA, 12 nt, Human
cuuugauguguu

SEQ ID NO: 1989902 - RNA, 13 nt, Human
cuuugauguguug

SEQ ID NO: 1989903 - RNA, 15 nt, Human
cuuugauguguuguu

SEQ ID NO: 1989904 - RNA, 16 nt, Human
cuuugauguguuguuc

SEQ ID NO: 1989905 - RNA, 18 nt, Human
cuuugauguguuguucuu

SEQ ID NO: 1989906 - RNA, 15 nt, Human
cuuugggcugcccug

SEQ ID NO: 1989907 - RNA, 19 nt, Human
cuuugggcugcccuggugc

SEQ ID NO: 1989908 - RNA, 20 nt, Human
cuuugggcugcccuggugcu

SEQ ID NO: 1989909 - RNA, 21 nt, Human
cuuugggcugcccuggugcug

SEQ ID NO: 1989910 - RNA, 15 nt, Human
cuuucuagccagagg

SEQ ID NO: 1989911 - RNA, 16 nt, Human
cuuucuacucauuuua

SEQ ID NO: 1989912 - RNA, 15 nt, Human
cuuucuacuuccaag

SEQ ID NO: 1989913 - RNA, 16 nt, Human
cuuucuacuuccaaga

SEQ ID NO: 1989914 - RNA, 14 nt, Human
cuuucuagaaagaa

SEQ ID NO: 1989915 - RNA, 18 nt, Human
cuuucuagaaagaauaaa

SEQ ID NO: 1989916 - RNA, 17 nt, Human
cuuucuacccagcgagc

SEQ ID NO: 1989917 - RNA, 16 nt, Human
cuuucuagccagagga

SEQ ID NO: 1989918 - RNA, 11 nt, Human
cuuugauguca

SEQ ID NO: 1989919 - RNA, 20 nt, Human
cuuugaucaugaauaacuga

SEQ ID NO: 1989920 - RNA, 14 nt, Human
cuuugaucaugaau

SEQ ID NO: 1989921 - RNA, 22 nt, Human
cuuugauauuuucaacgcagcc

SEQ ID NO: 1989922 - RNA, 22 nt, Human
cuuugauauauaggacauugau

SEQ ID NO: 1989923 - RNA, 19 nt, Human
gaaacuuugagaucuaaaa

SEQ ID NO: 1989924 - RNA, 13 nt, Human
gaaacuuuuggaa

SEQ ID NO: 1989925 - RNA, 15 nt, Human
gaaacuuuuggaagg

SEQ ID NO: 1989926 - RNA, 22 nt, Human
gaaacuuugagaucuaaaaaua

SEQ ID NO: 1989927 - RNA, 22 nt, Human
gaaaggcuccaggagcagccac

SEQ ID NO: 1989928 - RNA, 20 nt, Human
gaaaggcuccaggagcagcc

SEQ ID NO: 1989929 - RNA, 21 nt, Human
gaaaggcuccaggagcagcca

SEQ ID NO: 1989930 - RNA, 20 nt, Human
gaaagacuaucuaaauguug

SEQ ID NO: 1989931 - RNA, 21 nt, Human
gaaagaaaauaccaaggaaca

SEQ ID NO: 1989932 - RNA, 19 nt, Human
gaaaucaccgaaaacgugg

SEQ ID NO: 1989933 - RNA, 16 nt, Human
gaaaucaguaaacacu

SEQ ID NO: 1989934 - RNA, 19 nt, Human
gaaaucaguaaacacugug

SEQ ID NO: 1989935 - RNA, 16 nt, Human
gaaaucauauuuggaa

SEQ ID NO: 1989936 - RNA, 20 nt, Human
gaaagggacgcuacccggga

SEQ ID NO: 1989937 - RNA, 19 nt, Human
gaaagggacuuggaagcuc

SEQ ID NO: 1989938 - RNA, 22 nt, Human
gaaagggacuuggaagcuccgc

SEQ ID NO: 1989939 - RNA, 16 nt, Human
gaaaggucaccucacu

SEQ ID NO: 1989940 - RNA, 18 nt, Human
gaaaggucaccucacuca

SEQ ID NO: 1989941 - RNA, 20 nt, Human
gaaaggucaccucacucagc

SEQ ID NO: 1989942 - RNA, 12 nt, Human
gaaagggucucc

SEQ ID NO: 1989943 - RNA, 14 nt, Human
gaaaggucaccuca

SEQ ID NO: 1989944 - RNA, 19 nt, Human
gaaaauugccuuucugugu

SEQ ID NO: 1989945 - RNA, 20 nt, Human
gaaaauugccuuucuguguu

SEQ ID NO: 1989946 - RNA, 21 nt, Human
gaaaauugccuuucuguguuu

SEQ ID NO: 1989947 - RNA, 14 nt, Human
gaaaaacugauuuu

SEQ ID NO: 1989948 - RNA, 11 nt, Human
gaaaacuuugu

SEQ ID NO: 1989949 - RNA, 13 nt, Human
gaaaacuuuguua

SEQ ID NO: 1989950 - RNA, 16 nt, Human
gaaaacuuuguuaggc

SEQ ID NO: 1989951 - RNA, 18 nt, Human
gaaaacuuuguuaggcca

SEQ ID NO: 1989952 - RNA, 9 nt, Human
gaaaagaaa

SEQ ID NO: 1989953 - RNA, 10 nt, Human
gaaaagaaaa

SEQ ID NO: 1989954 - RNA, 11 nt, Human
gaaaagaaaaa

SEQ ID NO: 1989955 - RNA, 12 nt, Human
gaaaagaaaaaa

SEQ ID NO: 1989956 - RNA, 17 nt, Human
gaaaagaaaaaaaaaga

SEQ ID NO: 1989957 - RNA, 19 nt, Human
gaaaagaaaaaaaaagaaa

SEQ ID NO: 1989958 - RNA, 20 nt, Human
gaaaagaaaaaaaaagaaaa

SEQ ID NO: 1989959 - RNA, 18 nt, Human
gaaaagaaaaaugagccu

SEQ ID NO: 1989960 - RNA, 21 nt, Human
gaaaauggaagacagcucuua

SEQ ID NO: 1989961 - RNA, 23 nt, Human
gaaaaugcuguauuagucacaga

SEQ ID NO: 1989962 - RNA, 15 nt, Human
gaaaauguaugugua

SEQ ID NO: 1989963 - RNA, 19 nt, Human
gaaaauugcauugaagccc

SEQ ID NO: 1989964 - RNA, 17 nt, Human
gaaaauugccuuucugu

SEQ ID NO: 1989965 - RNA, 18 nt, Human
gaaaauugccuuucugug

SEQ ID NO: 1989966 - RNA, 23 nt, Human
gaaaauggacguguuaugacucc

SEQ ID NO: 1989967 - RNA, 19 nt, Human
gaaaauggacguguuauga

SEQ ID NO: 1989968 - RNA, 13 nt, Human
cuuuugccauuga

SEQ ID NO: 1989969 - RNA, 18 nt, Human
cuuuuggaagguauuuaa

SEQ ID NO: 1989970 - RNA, 16 nt, Human
cuuuugccguuauuaa

SEQ ID NO: 1989971 - RNA, 13 nt, Human
cuuuuggagucag

SEQ ID NO: 1989972 - RNA, 23 nt, Human
cuuuugcccacacuugggagcaa

SEQ ID NO: 1989973 - RNA, 15 nt, Human
cuuuuggcauuuuac

SEQ ID NO: 1989974 - RNA, 21 nt, Human
cuuuugguuaugaauacuuug

SEQ ID NO: 1989975 - RNA, 19 nt, Human
cuuuugguucauuuucaga

SEQ ID NO: 1989976 - RNA, 15 nt, Human
cuuuugggaaaugcu

SEQ ID NO: 1989977 - RNA, 18 nt, Human
cuuuugucuaugggacuc

SEQ ID NO: 1989978 - RNA, 20 nt, Human
gaaaaacucaaccaaauggu

SEQ ID NO: 1989979 - RNA, 21 nt, Human
cuuuuuuuuuuuugagacaga

SEQ ID NO: 1989980 - RNA, 11 nt, Human
gaaaaaaaaga

SEQ ID NO: 1989981 - RNA, 16 nt, Human
gaaaaaaaagaaaaaa

SEQ ID NO: 1989982 - RNA, 23 nt, Human
cuuuuuuggcugcugaaggcucg

SEQ ID NO: 1989983 - RNA, 12 nt, Human
cuuuugugcauu

SEQ ID NO: 1989984 - RNA, 13 nt, Human
cuuuugugcauua

SEQ ID NO: 1989985 - RNA, 17 nt, Human
cuuuuuuucucuagagu

SEQ ID NO: 1989986 - RNA, 20 nt, Human
cuuuuuuuuuuuugagacag

SEQ ID NO: 1989987 - RNA, 22 nt, Human
cuuuuuuuuuuaagugaaauuu

SEQ ID NO: 1989988 - RNA, 15 nt, Human
cuuuuuuuuuuaagu

SEQ ID NO: 1989989 - RNA, 21 nt, Human
cuuuuuuuuuuaagugaaauu

SEQ ID NO: 1989990 - RNA, 21 nt, Human
cuucuucccacaaagaauaua

SEQ ID NO: 1989991 - RNA, 23 nt, Human
cuucugacccaugcugcccugug

SEQ ID NO: 1989992 - RNA, 17 nt, Human
cuucugagcuggccucu

SEQ ID NO: 1989993 - RNA, 20 nt, Human
cuucugaucacugaaauaaa

SEQ ID NO: 1989994 - RNA, 22 nt, Human
cuucugcacauaaacucuuuua

SEQ ID NO: 1989995 - RNA, 22 nt, Human
cuucugacccaugcugcccugu

SEQ ID NO: 1989996 - RNA, 21 nt, Human
cuucugacccaugcugcccug

SEQ ID NO: 1989997 - RNA, 20 nt, Human
cuucugacccaugcugcccu

SEQ ID NO: 1989998 - RNA, 21 nt, Human
cuucuguugcugccucaugcu

SEQ ID NO: 1989999 - RNA, 23 nt, Human
cuucuucagagacuccugcaggc

SEQ ID NO: 1990000 - RNA, 17 nt, Human
cuucuguugcugccuca

SEQ ID NO: 1990001 - RNA, 18 nt, Human
cuucuguugcugccucau

SEQ ID NO: 1990002 - RNA, 19 nt, Human
cuucuguugcugccucaug

SEQ ID NO: 1990003 - RNA, 20 nt, Human
cuucuguugcugccucaugc

SEQ ID NO: 1990004 - RNA, 17 nt, Human
cuuccugcaacaccuug

SEQ ID NO: 1990005 - RNA, 23 nt, Human
cuuccugaggggagacagagcaa

SEQ ID NO: 1990006 - RNA, 19 nt, Human
cuuccugauugguuucucu

SEQ ID NO: 1990007 - RNA, 20 nt, Human
cuuccugauugguuucucuu

SEQ ID NO: 1990008 - RNA, 18 nt, Human
cuuccuccugacacccca

SEQ ID NO: 1990009 - RNA, 19 nt, Human
cuuccuccugacaccccac

SEQ ID NO: 1990010 - RNA, 14 nt, Human
cuuccuccugacac

SEQ ID NO: 1990011 - RNA, 15 nt, Human
cuuccuccugacacc

SEQ ID NO: 1990012 - RNA, 22 nt, Human
cuuccugauugguuucucuucu

SEQ ID NO: 1990013 - RNA, 23 nt, Human
cuuccugauugguuucucuucuc

SEQ ID NO: 1990014 - RNA, 17 nt, Human
cuucuagaaccaggcaa

SEQ ID NO: 1990015 - RNA, 13 nt, Human
cuucuagaaccag

SEQ ID NO: 1990016 - RNA, 21 nt, Human
cuucuaaguugaguauauuau

SEQ ID NO: 1990017 - RNA, 19 nt, Human
cuugaauuguaaggaauga

SEQ ID NO: 1990018 - RNA, 18 nt, Human
cuugaaggaaaaauucaa

SEQ ID NO: 1990019 - RNA, 18 nt, Human
cuugaauuguaaggaaug

SEQ ID NO: 1990020 - RNA, 13 nt, Human
cuugaaggaaaaa

SEQ ID NO: 1990021 - RNA, 14 nt, Human
cuugaaggaaaaau

SEQ ID NO: 1990022 - RNA, 15 nt, Human
cuugaaggaaaaauu

SEQ ID NO: 1990023 - RNA, 15 nt, Human
cuugaagccugcucc

SEQ ID NO: 1990024 - RNA, 16 nt, Human
cuugaagccugcuccu

SEQ ID NO: 1990025 - RNA, 20 nt, Human
cuugaagccugcuccuuccc

SEQ ID NO: 1990026 - RNA, 14 nt, Human
cuugacagggcaca

SEQ ID NO: 1990027 - RNA, 15 nt, Human
cuugacagggcacac

SEQ ID NO: 1990028 - RNA, 16 nt, Human
cuugacaaagucaagc

SEQ ID NO: 1990029 - RNA, 19 nt, Human
cuugacaaagucaagccac

SEQ ID NO: 1990030 - RNA, 13 nt, Human
cuugacagggcac

SEQ ID NO: 1990031 - RNA, 22 nt, Human
cuugacaaagucaagccacaug

SEQ ID NO: 1990032 - RNA, 20 nt, Human
cuugacagggcacaccgggc

SEQ ID NO: 1990033 - RNA, 18 nt, Human
cuugacaaacuucuuuca

SEQ ID NO: 1990034 - RNA, 19 nt, Human
cuugacaaacuucuuucac

SEQ ID NO: 1990035 - RNA, 16 nt, Human
cuugauaauuuuccuu

SEQ ID NO: 1990036 - RNA, 22 nt, Human
cuugauaauuuuccuuuaauau

SEQ ID NO: 1990037 - RNA, 23 nt, Human
cuugauagccucauuaaagcauu

SEQ ID NO: 1990038 - RNA, 20 nt, Human
cuuggcgcugccccuggcag

SEQ ID NO: 1990039 - RNA, 17 nt, Human
cuuggcgcugccccugg

SEQ ID NO: 1990040 - RNA, 14 nt, Human
cuuggcgcugcccc

SEQ ID NO: 1990041 - RNA, 12 nt, Human
cuuggcgcugcc

SEQ ID NO: 1990042 - RNA, 23 nt, Human
cuuggcagguaggaauauuauau

SEQ ID NO: 1990043 - RNA, 13 nt, Human
cuugaugccuggc

SEQ ID NO: 1990044 - RNA, 21 nt, Human
cuugaugaaauaacacagcag

SEQ ID NO: 1990045 - RNA, 22 nt, Human
cuugaugaaauaacacagcagu

SEQ ID NO: 1990046 - RNA, 12 nt, Human
cuugaugccugg

SEQ ID NO: 1990047 - RNA, 23 nt, Human
cuuggcaauaaauuuugaaaagu

SEQ ID NO: 1990048 - RNA, 14 nt, Human
cuugccuuugaaga

SEQ ID NO: 1990049 - RNA, 19 nt, Human
cugugcugagucugaaggc

SEQ ID NO: 1990050 - RNA, 14 nt, Human
cugugcugagucug

SEQ ID NO: 1990051 - RNA, 12 nt, Human
cugugcugaguc

SEQ ID NO: 1990052 - RNA, 16 nt, Human
cuuauggaacacucug

SEQ ID NO: 1990053 - RNA, 13 nt, Human
cuuauggaacacu

SEQ ID NO: 1990054 - RNA, 12 nt, Human
cuuaugcuucca

SEQ ID NO: 1990055 - RNA, 19 nt, Human
cuucacggaagagccuugc

SEQ ID NO: 1990056 - RNA, 15 nt, Human
cuucacggaagagcc

SEQ ID NO: 1990057 - RNA, 20 nt, Human
cuuauuguagcauccuggaa

SEQ ID NO: 1990058 - RNA, 22 nt, Human
cuucaccuuuguccccaccgca

SEQ ID NO: 1990059 - RNA, 18 nt, Human
cuuauuggcagcucuacu

SEQ ID NO: 1990060 - RNA, 23 nt, Human
cuuauuguagcauccuggaauau

SEQ ID NO: 1990061 - RNA, 21 nt, Human
cuucaccuuuguccccaccgc

SEQ ID NO: 1990062 - RNA, 16 nt, Human
cuuauuccauauuaga

SEQ ID NO: 1990063 - RNA, 22 nt, Human
cuuauuccauauuagaaaacuu

SEQ ID NO: 1990064 - RNA, 21 nt, Human
cuuauggaacacucugagacu

SEQ ID NO: 1990065 - RNA, 13 nt, Human
cuuaugcuuccag

SEQ ID NO: 1990066 - RNA, 14 nt, Human
cuuaugcuuccaga

SEQ ID NO: 1990067 - RNA, 15 nt, Human
cuuaugcuuccagaa

SEQ ID NO: 1990068 - RNA, 16 nt, Human
cuuaugcuuccagaaa

SEQ ID NO: 1990069 - RNA, 20 nt, Human
cuuauggaacacucugagac

SEQ ID NO: 1990070 - RNA, 19 nt, Human
cuuauggaacacucugaga

SEQ ID NO: 1990071 - RNA, 17 nt, Human
cuuauggaacacucuga

SEQ ID NO: 1990072 - RNA, 23 nt, Human
cuucccaccucucucacuccuug

SEQ ID NO: 1990073 - RNA, 21 nt, Human
cuucccaccucucucacuccu

SEQ ID NO: 1990074 - RNA, 11 nt, Human
cuucccaccuc

SEQ ID NO: 1990075 - RNA, 11 nt, Human
cuuccauaauc

SEQ ID NO: 1990076 - RNA, 21 nt, Human
cuuccauaaucuggacuccuc

SEQ ID NO: 1990077 - RNA, 17 nt, Human
cuucacucuaagauguu

SEQ ID NO: 1990078 - RNA, 23 nt, Human
cuucacuaagaacaaaagaagca

SEQ ID NO: 1990079 - RNA, 17 nt, Human
cuucagagacuccugca

SEQ ID NO: 1990080 - RNA, 15 nt, Human
cuucacuguaaaaua

SEQ ID NO: 1990081 - RNA, 19 nt, Human
cuucagagacuccugcagg

SEQ ID NO: 1990082 - RNA, 18 nt, Human
cuucagagacuccugcag

SEQ ID NO: 1990083 - RNA, 17 nt, Human
cuucacuguccuccaag

SEQ ID NO: 1990084 - RNA, 20 nt, Human
cuucagagacuccugcaggc

SEQ ID NO: 1990085 - RNA, 9 nt, Human
cuucauaca

SEQ ID NO: 1990086 - RNA, 10 nt, Human
cuucauacac

SEQ ID NO: 1990087 - RNA, 16 nt, Human
cuucaguuuuuguguu

SEQ ID NO: 1990088 - RNA, 12 nt, Human
cuucauacaggg

SEQ ID NO: 1990089 - RNA, 13 nt, Human
cuucauacaggga

SEQ ID NO: 1990090 - RNA, 22 nt, Human
cuucauacagggaugguguuca

SEQ ID NO: 1990091 - RNA, 14 nt, Human
cuucauauucagcu

SEQ ID NO: 1990092 - RNA, 16 nt, Human
cuucauagaauacuca

SEQ ID NO: 1990093 - RNA, 16 nt, Human
cuuccaguuacuuucc

SEQ ID NO: 1990094 - RNA, 19 nt, Human
cuuccaguuacuuuccaau

SEQ ID NO: 1990095 - RNA, 19 nt, Human
cuuccaguuuauuccagag

SEQ ID NO: 1990096 - RNA, 20 nt, Human
cuuccaguuuauuccagagc

SEQ ID NO: 1990097 - RNA, 21 nt, Human
cuuccaguuuauuccagagcu

SEQ ID NO: 1990098 - RNA, 23 nt, Human
cuuccaguuuauuccagagcugc

SEQ ID NO: 1990099 - RNA, 23 nt, Human
cuuccagugaggcucugcccuug

SEQ ID NO: 1990100 - RNA, 22 nt, Human
cuuccagugaggcucugcccuu

SEQ ID NO: 1990101 - RNA, 21 nt, Human
cuuccagugaggcucugcccu

SEQ ID NO: 1990102 - RNA, 13 nt, Human
cuucaugaaaugc

SEQ ID NO: 1990103 - RNA, 14 nt, Human
cuucaugaaaugcu

SEQ ID NO: 1990104 - RNA, 17 nt, Human
cuucaugaaaugcuaug

SEQ ID NO: 1990105 - RNA, 23 nt, Human
cuucaugaaaugcuaugucauuu

SEQ ID NO: 1990106 - RNA, 12 nt, Human
cuucaugaaaug

SEQ ID NO: 1990107 - RNA, 16 nt, Human
cugguuuccugcccug

SEQ ID NO: 1990108 - RNA, 22 nt, Human
cugguuuccugcccugggaggc

SEQ ID NO: 1990109 - RNA, 18 nt, Human
cugguuuccugcccuggg

SEQ ID NO: 1990110 - RNA, 21 nt, Human
cugguuuccugcccugggagg

SEQ ID NO: 1990111 - RNA, 15 nt, Human
cugucacugcugcuu

SEQ ID NO: 1990112 - RNA, 18 nt, Human
cugucagccauuccuguu

SEQ ID NO: 1990113 - RNA, 20 nt, Human
cugucauuugagcagggcuc

SEQ ID NO: 1990114 - RNA, 12 nt, Human
cuguccugccua

SEQ ID NO: 1990115 - RNA, 17 nt, Human
cugucauuugagcaggg

SEQ ID NO: 1990116 - RNA, 18 nt, Human
cugucauuugagcagggc

SEQ ID NO: 1990117 - RNA, 16 nt, Human
cugucauuugagcagg

SEQ ID NO: 1990118 - RNA, 14 nt, Human
cuguaaaaugcaaa

SEQ ID NO: 1990119 - RNA, 18 nt, Human
cuguaaaaugcaaaaaau

SEQ ID NO: 1990120 - RNA, 20 nt, Human
cuguaaaaugcaaaaaaucu

SEQ ID NO: 1990121 - RNA, 19 nt, Human
cuguaaaagcaaguccugc

SEQ ID NO: 1990122 - RNA, 20 nt, Human
cuguaaaagcaaguccugca

SEQ ID NO: 1990123 - RNA, 14 nt, Human
cuguaaaagaaaaa

SEQ ID NO: 1990124 - RNA, 23 nt, Human
cuguacuugcucuugaugccugg

SEQ ID NO: 1990125 - RNA, 12 nt, Human
cuguacuuugau

SEQ ID NO: 1990126 - RNA, 15 nt, Human
cuguacuuugauuca

SEQ ID NO: 1990127 - RNA, 19 nt, Human
cuguacuuugauucacaug

SEQ ID NO: 1990128 - RNA, 21 nt, Human
cuguacuuugauucacauguu

SEQ ID NO: 1990129 - RNA, 24 nt, Human
cuguacuuugauucacauguuuuc

SEQ ID NO: 1990130 - RNA, 21 nt, Human
cuguacuugcucuugaugccu

SEQ ID NO: 1990131 - RNA, 22 nt, Human
cuguacuugcucuugaugccug

SEQ ID NO: 1990132 - RNA, 19 nt, Human
cugucacccgaucgccagc

SEQ ID NO: 1990133 - RNA, 21 nt, Human
cuguaggaagguuaauguuca

SEQ ID NO: 1990134 - RNA, 12 nt, Human
cuguaggccuca

SEQ ID NO: 1990135 - RNA, 13 nt, Human
cuguaggccucag

SEQ ID NO: 1990136 - RNA, 22 nt, Human
cuguaggccucaggugaaacuc

SEQ ID NO: 1990137 - RNA, 18 nt, Human
cuguaggaguucuauuuu

SEQ ID NO: 1990138 - RNA, 15 nt, Human
cugugaagagaacca

SEQ ID NO: 1990139 - RNA, 16 nt, Human
cugugagaugcuagaa

SEQ ID NO: 1990140 - RNA, 21 nt, Human
cugugagaugcuagaacuccc

SEQ ID NO: 1990141 - RNA, 14 nt, Human
cugugcucuggaca

SEQ ID NO: 1990142 - RNA, 13 nt, Human
cugucgcccaguc

SEQ ID NO: 1990143 - RNA, 16 nt, Human
cugucgcccaggcugg

SEQ ID NO: 1990144 - RNA, 14 nt, Human
cugucgagccuggg

SEQ ID NO: 1990145 - RNA, 23 nt, Human
cugucgagccugggggcuggagc

SEQ ID NO: 1990146 - RNA, 20 nt, Human
cuggugaugcgcaguugcug

SEQ ID NO: 1990147 - RNA, 21 nt, Human
cuggugaugcgcaguugcugu

SEQ ID NO: 1990148 - RNA, 13 nt, Human
cuggugagcauua

SEQ ID NO: 1990149 - RNA, 19 nt, Human
cuggugaugcgcaguugcu

SEQ ID NO: 1990150 - RNA, 15 nt, Human
cuggugauauaucuc

SEQ ID NO: 1990151 - RNA, 23 nt, Human
cuggugacuuuccucuuuggucu

SEQ ID NO: 1990152 - RNA, 17 nt, Human
cuggguguggcgcagca

SEQ ID NO: 1990153 - RNA, 16 nt, Human
cuggguuagacugcca

SEQ ID NO: 1990154 - RNA, 18 nt, Human
cuggguuagacugccagc

SEQ ID NO: 1990155 - RNA, 19 nt, Human
cuggguuagacugccagcu

SEQ ID NO: 1990156 - RNA, 20 nt, Human
cuggguuagacugccagcuc

SEQ ID NO: 1990157 - RNA, 21 nt, Human
cuggguuagacugccagcucu

SEQ ID NO: 1990158 - RNA, 23 nt, Human
cuggguuagacugccagcucuuc

SEQ ID NO: 1990159 - RNA, 16 nt, Human
cuggguguggcgcagc

SEQ ID NO: 1990160 - RNA, 22 nt, Human
cuggguggcaccagcagccugg

SEQ ID NO: 1990161 - RNA, 23 nt, Human
cuggguggcaccagcagccugga

SEQ ID NO: 1990162 - RNA, 21 nt, Human
cuggugacuuuccucuuuggu

SEQ ID NO: 1990163 - RNA, 20 nt, Human
cuggugacuuuccucuuugg

SEQ ID NO: 1990164 - RNA, 15 nt, Human
cuggugacuuuccuc

SEQ ID NO: 1990165 - RNA, 23 nt, Human
cuggguuccuuccucugagccuu

SEQ ID NO: 1990166 - RNA, 14 nt, Human
cuggguucacugca

SEQ ID NO: 1990167 - RNA, 22 nt, Human
cuggguuccagcaauucuccug

SEQ ID NO: 1990168 - RNA, 18 nt, Human
cuggguuccuuccucuga

SEQ ID NO: 1990169 - RNA, 22 nt, Human
cuggguuccuuccucugagccu

SEQ ID NO: 1990170 - RNA, 17 nt, Human
cugggcagaaggaagac

SEQ ID NO: 1990171 - RNA, 16 nt, Human
cugggcagaaggaaga

SEQ ID NO: 1990172 - RNA, 18 nt, Human
cugggcagaaggaagacu

SEQ ID NO: 1990173 - RNA, 15 nt, Human
cuggggaaccugacc

SEQ ID NO: 1990174 - RNA, 16 nt, Human
cuggggaaccugaccc

SEQ ID NO: 1990175 - RNA, 17 nt, Human
cuggggaaccugacccc

SEQ ID NO: 1990176 - RNA, 18 nt, Human
cuggggauugggccccug

SEQ ID NO: 1990177 - RNA, 22 nt, Human
cuggggauugggccccugccag

SEQ ID NO: 1990178 - RNA, 16 nt, Human
cuggggauugggcccc

SEQ ID NO: 1990179 - RNA, 22 nt, Human
cuggggaugucucucaugacca

SEQ ID NO: 1990180 - RNA, 18 nt, Human
cuggggaacguucucuuu

SEQ ID NO: 1990181 - RNA, 16 nt, Human
cuggggccgaaagaac

SEQ ID NO: 1990182 - RNA, 18 nt, Human
cuggggccaggcuggguc

SEQ ID NO: 1990183 - RNA, 14 nt, Human
cugggacgcucugc

SEQ ID NO: 1990184 - RNA, 15 nt, Human
cugggacgcucugcu

SEQ ID NO: 1990185 - RNA, 16 nt, Human
cugggacgcucugcug

SEQ ID NO: 1990186 - RNA, 17 nt, Human
cugggacgcucugcugu

SEQ ID NO: 1990187 - RNA, 21 nt, Human
cuggccccucagggucccugg

SEQ ID NO: 1990188 - RNA, 20 nt, Human
cuggccccucagggucccug

SEQ ID NO: 1990189 - RNA, 18 nt, Human
cuggccccucaggguccc

SEQ ID NO: 1990190 - RNA, 17 nt, Human
cuggccccucagggucc

SEQ ID NO: 1990191 - RNA, 11 nt, Human
cuggcuccagc

SEQ ID NO: 1990192 - RNA, 13 nt, Human
cuggcuccagccu

SEQ ID NO: 1990193 - RNA, 16 nt, Human
cuggcuccaggccagg

SEQ ID NO: 1990194 - RNA, 16 nt, Human
cuggcuccagccugga

SEQ ID NO: 1990195 - RNA, 14 nt, Human
cuggcuccagccug

SEQ ID NO: 1990196 - RNA, 15 nt, Human
cuggcuccagccugg

SEQ ID NO: 1990197 - RNA, 15 nt, Human
cuggcucccacaggc

SEQ ID NO: 1990198 - RNA, 13 nt, Human
cuggcuccagcug

SEQ ID NO: 1990199 - RNA, 14 nt, Human
cuggcuccagcugg

SEQ ID NO: 1990200 - RNA, 18 nt, Human
cuggcuccagcuggccgg

SEQ ID NO: 1990201 - RNA, 20 nt, Human
cuggcuccagcuggccggga

SEQ ID NO: 1990202 - RNA, 12 nt, Human
cugggacacagu

SEQ ID NO: 1990203 - RNA, 13 nt, Human
cugggacacaguu

SEQ ID NO: 1990204 - RNA, 13 nt, Human
cuggcaggcaggg

SEQ ID NO: 1990205 - RNA, 11 nt, Human
cuggcaggcag

SEQ ID NO: 1990206 - RNA, 12 nt, Human
cuggcaggcagg

SEQ ID NO: 1990207 - RNA, 15 nt, Human
cuggcagcucagaga

SEQ ID NO: 1990208 - RNA, 21 nt, Human
cuggcaggcaggggcccugca

SEQ ID NO: 1990209 - RNA, 23 nt, Human
cuggcaggcaggggcccugcagc

SEQ ID NO: 1990210 - RNA, 13 nt, Human
cuggccccucagg

SEQ ID NO: 1990211 - RNA, 14 nt, Human
cuggcagcucagag

SEQ ID NO: 1990212 - RNA, 13 nt, Human
cuggcagcucaga

SEQ ID NO: 1990213 - RNA, 17 nt, Human
cuggagacuaaccccac

SEQ ID NO: 1990214 - RNA, 12 nt, Human
cuggcagcucag

SEQ ID NO: 1990215 - RNA, 16 nt, Human
cuggacugugugcuca

SEQ ID NO: 1990216 - RNA, 13 nt, Human
cugcuuaacuuca

SEQ ID NO: 1990217 - RNA, 22 nt, Human
cugcuuuuuaaagaaugcucuu

SEQ ID NO: 1990218 - RNA, 17 nt, Human
cugcuuuuuauggccug

SEQ ID NO: 1990219 - RNA, 14 nt, Human
cugcuucagccucc

SEQ ID NO: 1990220 - RNA, 16 nt, Human
cugcuucagccucccg

SEQ ID NO: 1990221 - RNA, 15 nt, Human
cugcuuaacuucaca

SEQ ID NO: 1990222 - RNA, 17 nt, Human
cugcuuaacuucacaua

SEQ ID NO: 1990223 - RNA, 13 nt, Human
cugcuucagccuc

SEQ ID NO: 1990224 - RNA, 22 nt, Human
cugcuuaaaagaaaauguucac

SEQ ID NO: 1990225 - RNA, 13 nt, Human
cuggacugugugc

SEQ ID NO: 1990226 - RNA, 17 nt, Human
cuggaacucuugacagc

SEQ ID NO: 1990227 - RNA, 17 nt, Human
cuggaacacuaaugagg

SEQ ID NO: 1990228 - RNA, 16 nt, Human
cugcuucagccuccca

SEQ ID NO: 1990229 - RNA, 16 nt, Human
cuggaaauauuaagaa

SEQ ID NO: 1990230 - RNA, 18 nt, Human
cugcuuuuuauggccugu

SEQ ID NO: 1990231 - RNA, 11 nt, Human
cugcugacagu

SEQ ID NO: 1990232 - RNA, 21 nt, Human
cugcugacagacacaggcccg

SEQ ID NO: 1990233 - RNA, 23 nt, Human
cugcugacagacacaggcccggc

SEQ ID NO: 1990234 - RNA, 15 nt, Human
cugcugacagacaca

SEQ ID NO: 1990235 - RNA, 18 nt, Human
cugcugacagacacaggc

SEQ ID NO: 1990236 - RNA, 19 nt, Human
cugcugacagacacaggcc

SEQ ID NO: 1990237 - RNA, 20 nt, Human
cugcugacagacacaggccc

SEQ ID NO: 1990238 - RNA, 14 nt, Human
cugcccugugggcc

SEQ ID NO: 1990239 - RNA, 15 nt, Human
cugccucgaacuggc

SEQ ID NO: 1990240 - RNA, 17 nt, Human
cugccucgaacuggcug

SEQ ID NO: 1990241 - RNA, 18 nt, Human
cugccucgaacuggcugc

SEQ ID NO: 1990242 - RNA, 22 nt, Human
cugccugggaucccucauccuc

SEQ ID NO: 1990243 - RNA, 16 nt, Human
cugccugguccucaca

SEQ ID NO: 1990244 - RNA, 14 nt, Human
cugccuguucagcu

SEQ ID NO: 1990245 - RNA, 15 nt, Human
cugccuguucagcuc

SEQ ID NO: 1990246 - RNA, 23 nt, Human
cugccugggaucccucauccuca

SEQ ID NO: 1990247 - RNA, 12 nt, Human
cugcucagaucc

SEQ ID NO: 1990248 - RNA, 23 nt, Human
cugcucagaucccacuuuugcca

SEQ ID NO: 1990249 - RNA, 21 nt, Human
cugcucagcagugagagcaga

SEQ ID NO: 1990250 - RNA, 23 nt, Human
cugcucagcagugagagcagaug

SEQ ID NO: 1990251 - RNA, 15 nt, Human
cugcuacagagcaga

SEQ ID NO: 1990252 - RNA, 12 nt, Human
cugcucacugca

SEQ ID NO: 1990253 - RNA, 19 nt, Human
cugccuguugggccaggag

SEQ ID NO: 1990254 - RNA, 18 nt, Human
cugccuguugggccagga

SEQ ID NO: 1990255 - RNA, 14 nt, Human
cugccuguugggcc

SEQ ID NO: 1990256 - RNA, 16 nt, Human
cugccuguugggccag

SEQ ID NO: 1990257 - RNA, 15 nt, Human
cugcuaauucuuugc

SEQ ID NO: 1990258 - RNA, 22 nt, Human
cugcuaauucuuugcaaaaauc

SEQ ID NO: 1990259 - RNA, 23 nt, Human
cugcuaauucuuugcaaaaaucc

SEQ ID NO: 1990260 - RNA, 16 nt, Human
cugcuaauuccccaga

SEQ ID NO: 1990261 - RNA, 13 nt, Human
cugcauguuacau

SEQ ID NO: 1990262 - RNA, 15 nt, Human
cugcauguuugugau

SEQ ID NO: 1990263 - RNA, 20 nt, Human
cugcauuuaaaagauacagu

SEQ ID NO: 1990264 - RNA, 22 nt, Human
cugcauuuaaaagauacaguua

SEQ ID NO: 1990265 - RNA, 13 nt, Human
cugcauuugugaa

SEQ ID NO: 1990266 - RNA, 13 nt, Human
cugcauuuaggga

SEQ ID NO: 1990267 - RNA, 22 nt, Human
cugcauuuagggaguauucuaa

SEQ ID NO: 1990268 - RNA, 23 nt, Human
cugcauuuagggaguauucuaau

SEQ ID NO: 1990269 - RNA, 20 nt, Human
cugcauucaggaucaaaccc

SEQ ID NO: 1990270 - RNA, 16 nt, Human
cugcauucuucugauc

SEQ ID NO: 1990271 - RNA, 22 nt, Human
cugcauucuucugaucacugaa

SEQ ID NO: 1990272 - RNA, 17 nt, Human
cugccaaugggagcuca

SEQ ID NO: 1990273 - RNA, 15 nt, Human
cugccaaugggagcu

SEQ ID NO: 1990274 - RNA, 14 nt, Human
cugccaaccucgcu

SEQ ID NO: 1990275 - RNA, 17 nt, Human
cugccaaccucgcucca

SEQ ID NO: 1990276 - RNA, 21 nt, Human
cugccaaccucgcuccaacuc

SEQ ID NO: 1990277 - RNA, 23 nt, Human
cugccaaccucgcuccaacucca

SEQ ID NO: 1990278 - RNA, 19 nt, Human
cugccaacugaucuguuau

SEQ ID NO: 1990279 - RNA, 17 nt, Human
cugcauuugucuggccu

SEQ ID NO: 1990280 - RNA, 14 nt, Human
cugcauuugugaaa

SEQ ID NO: 1990281 - RNA, 15 nt, Human
cugcauuugugaaau

SEQ ID NO: 1990282 - RNA, 17 nt, Human
cugcauuugugaaauga

SEQ ID NO: 1990283 - RNA, 22 nt, Human
cugcauuugugaaaugauggug

SEQ ID NO: 1990284 - RNA, 18 nt, Human
cugcccugugggccccca

SEQ ID NO: 1990285 - RNA, 16 nt, Human
cugcccugugggcccc

SEQ ID NO: 1990286 - RNA, 15 nt, Human
cugcccugugggccc

SEQ ID NO: 1990287 - RNA, 13 nt, Human
cugcccugugagu

SEQ ID NO: 1990288 - RNA, 12 nt, Human
cugcccugugag

SEQ ID NO: 1990289 - RNA, 17 nt, Human
cugcccugucaggaggc

SEQ ID NO: 1990290 - RNA, 20 nt, Human
cugcccugucaggaggcaga

SEQ ID NO: 1990291 - RNA, 20 nt, Human
cugcccuggugcugccacac

SEQ ID NO: 1990292 - RNA, 21 nt, Human
cugcccuggugcugccacacu

SEQ ID NO: 1990293 - RNA, 22 nt, Human
cugcccugguuuccugcccugg

SEQ ID NO: 1990294 - RNA, 23 nt, Human
cugcccugguuuccugcccuggg

SEQ ID NO: 1990295 - RNA, 22 nt, Human
cugccccucaacucuccuccag

SEQ ID NO: 1990296 - RNA, 14 nt, Human
cugccccucaacuc

SEQ ID NO: 1990297 - RNA, 16 nt, Human
cugcccccucugcccu

SEQ ID NO: 1990298 - RNA, 17 nt, Human
cugcccccucugcccug

SEQ ID NO: 1990299 - RNA, 18 nt, Human
cugcccccucugcccugc

SEQ ID NO: 1990300 - RNA, 19 nt, Human
cugcccccucugcccugcg

SEQ ID NO: 1990301 - RNA, 17 nt, Human
cugcccuggugcugcca

SEQ ID NO: 1990302 - RNA, 16 nt, Human
cugcccuggugcugcc

SEQ ID NO: 1990303 - RNA, 18 nt, Human
cugcccuggugcugccac

SEQ ID NO: 1990304 - RNA, 19 nt, Human
cugcccuggugcugccaca

SEQ ID NO: 1990305 - RNA, 14 nt, Human
cugcccccuccuga

SEQ ID NO: 1990306 - RNA, 15 nt, Human
cugcccccuccugag

SEQ ID NO: 1990307 - RNA, 19 nt, Human
cugccccagggcucccggc

SEQ ID NO: 1990308 - RNA, 13 nt, Human
cugcccccuccug

SEQ ID NO: 1990309 - RNA, 14 nt, Human
cugcccccucugcc

SEQ ID NO: 1990310 - RNA, 15 nt, Human
cugcccccucugccc

SEQ ID NO: 1990311 - RNA, 23 nt, Human
cugccaucauguuuacagaggac

SEQ ID NO: 1990312 - RNA, 19 nt, Human
cugccccagcuugggcaga

SEQ ID NO: 1990313 - RNA, 17 nt, Human
cugccaucauguuuaca

SEQ ID NO: 1990314 - RNA, 22 nt, Human
cugccaucauguuuacagagga

SEQ ID NO: 1990315 - RNA, 12 nt, Human
cugccauccagg

SEQ ID NO: 1990316 - RNA, 15 nt, Human
cugccagggacagag

SEQ ID NO: 1990317 - RNA, 12 nt, Human
cugccagggaca

SEQ ID NO: 1990318 - RNA, 11 nt, Human
cugccagggac

SEQ ID NO: 1990319 - RNA, 20 nt, Human
cugccauauucuguuggcca

SEQ ID NO: 1990320 - RNA, 21 nt, Human
cugccauauucuguuggccag

SEQ ID NO: 1990321 - RNA, 22 nt, Human
cugccauauucuguuggccagu

SEQ ID NO: 1990322 - RNA, 23 nt, Human
cugccauauucuguuggccagug

SEQ ID NO: 1990323 - RNA, 20 nt, Human
cugagacucgcgacaaugca

SEQ ID NO: 1990324 - RNA, 19 nt, Human
cugagacucgcgacaaugc

SEQ ID NO: 1990325 - RNA, 17 nt, Human
cugagacucgcgacaau

SEQ ID NO: 1990326 - RNA, 12 nt, Human
aucuguuuacag

SEQ ID NO: 1990327 - RNA, 12 nt, Human
aucuuacuuugu

SEQ ID NO: 1990328 - RNA, 13 nt, Human
aucuuacuuugua

SEQ ID NO: 1990329 - RNA, 14 nt, Human
aucuuacuuuguaa

SEQ ID NO: 1990330 - RNA, 21 nt, Human
aucuuacuuuguaaauucuga

SEQ ID NO: 1990331 - RNA, 22 nt, Human
aucuuacuuuguaaauucugau

SEQ ID NO: 1990332 - RNA, 16 nt, Human
aucuuacuuuguaaau

SEQ ID NO: 1990333 - RNA, 17 nt, Human
aucuuacuuuguaaauu

SEQ ID NO: 1990334 - RNA, 19 nt, Human
aucuuacuuuguaaauucu

SEQ ID NO: 1990335 - RNA, 20 nt, Human
aucuuacuuuguaaauucug

SEQ ID NO: 1990336 - RNA, 23 nt, Human
aucuguuauagguccuuuagaaa

SEQ ID NO: 1990337 - RNA, 11 nt, Human
aucugugaaua

SEQ ID NO: 1990338 - RNA, 12 nt, Human
aucugugaauaa

SEQ ID NO: 1990339 - RNA, 13 nt, Human
aucugugaauaag

SEQ ID NO: 1990340 - RNA, 18 nt, Human
aucuugaauuguaaggaa

SEQ ID NO: 1990341 - RNA, 14 nt, Human
aucuugacagagcc

SEQ ID NO: 1990342 - RNA, 17 nt, Human
aucuugcucugcugaca

SEQ ID NO: 1990343 - RNA, 19 nt, Human
aucuugcucugcugacaga

SEQ ID NO: 1990344 - RNA, 23 nt, Human
aucugugaaaggaaagagggagg

SEQ ID NO: 1990345 - RNA, 16 nt, Human
aucuguaccucugccu

SEQ ID NO: 1990346 - RNA, 17 nt, Human
aucuguaagaguguuua

SEQ ID NO: 1990347 - RNA, 12 nt, Human
aucuguaagcug

SEQ ID NO: 1990348 - RNA, 14 nt, Human
aucuguaagcuguu

SEQ ID NO: 1990349 - RNA, 15 nt, Human
aucuguaagcuguuu

SEQ ID NO: 1990350 - RNA, 17 nt, Human
aucuguaagcuguuugg

SEQ ID NO: 1990351 - RNA, 17 nt, Human
aucuggguucacugcaa

SEQ ID NO: 1990352 - RNA, 19 nt, Human
aucuggguucacugcaacc

SEQ ID NO: 1990353 - RNA, 22 nt, Human
uugccgcgucgcccucccaggc

SEQ ID NO: 1990354 - RNA, 18 nt, Human
uugccgucuaccugaggg

SEQ ID NO: 1990355 - RNA, 15 nt, Human
uugccgucuaccuga

SEQ ID NO: 1990356 - RNA, 19 nt, Human
uugccgucuaccugagggg

SEQ ID NO: 1990357 - RNA, 14 nt, Human
uugccguuauuaaa

SEQ ID NO: 1990358 - RNA, 21 nt, Human
uugccgcgucgcccucccagg

SEQ ID NO: 1990359 - RNA, 18 nt, Human
uugccgcgucgcccuccc

SEQ ID NO: 1990360 - RNA, 22 nt, Human
uugcccuuuacuugucuuucug

SEQ ID NO: 1990361 - RNA, 13 nt, Human
uugccgucuaccu

SEQ ID NO: 1990362 - RNA, 20 nt, Human
aucugagaggccacagugca

SEQ ID NO: 1990363 - RNA, 18 nt, Human
uugccucagcuuccccag

SEQ ID NO: 1990364 - RNA, 19 nt, Human
uugccucagcuuccccagu

SEQ ID NO: 1990365 - RNA, 20 nt, Human
uugccuauaagccaaaauua

SEQ ID NO: 1990366 - RNA, 17 nt, Human
uugccuauauuuuccug

SEQ ID NO: 1990367 - RNA, 18 nt, Human
uugccuauauuuuccuga

SEQ ID NO: 1990368 - RNA, 18 nt, Human
aucugaugcaagcaagaa

SEQ ID NO: 1990369 - RNA, 16 nt, Human
aucugcaaagcauguu

SEQ ID NO: 1990370 - RNA, 21 nt, Human
aucugcaaagcauguuuugca

SEQ ID NO: 1990371 - RNA, 14 nt, Human
aucugauuccagca

SEQ ID NO: 1990372 - RNA, 22 nt, Human
aucugcaaagcauguuuugcau

SEQ ID NO: 1990373 - RNA, 12 nt, Human
uugauguguugu

SEQ ID NO: 1990374 - RNA, 13 nt, Human
uugauguguuguu

SEQ ID NO: 1990375 - RNA, 14 nt, Human
uugauguguuguuc

SEQ ID NO: 1990376 - RNA, 14 nt, Human
uugauucacauguu

SEQ ID NO: 1990377 - RNA, 16 nt, Human
uugauucacauguuuu

SEQ ID NO: 1990378 - RNA, 18 nt, Human
uugauucacauguuuuca

SEQ ID NO: 1990379 - RNA, 19 nt, Human
uugauucacauguuuucaa

SEQ ID NO: 1990380 - RNA, 20 nt, Human
uugauucacauguuuucaaa

SEQ ID NO: 1990381 - RNA, 23 nt, Human
uugauucacauguuuucaaaugg

SEQ ID NO: 1990382 - RNA, 14 nt, Human
uugauucagacagc

SEQ ID NO: 1990383 - RNA, 23 nt, Human
uugauggugaugaaauguaaaua

SEQ ID NO: 1990384 - RNA, 14 nt, Human
uugauguaaagaug

SEQ ID NO: 1990385 - RNA, 23 nt, Human
uugauguaaagauguucuggaua

SEQ ID NO: 1990386 - RNA, 12 nt, Human
uugaugucagca

SEQ ID NO: 1990387 - RNA, 18 nt, Human
uugaugucagcaguugcu

SEQ ID NO: 1990388 - RNA, 15 nt, Human
uugaugggauuuggu

SEQ ID NO: 1990389 - RNA, 21 nt, Human
uugaugggaugauugaagaaa

SEQ ID NO: 1990390 - RNA, 22 nt, Human
uugaugggaugauugaagaaac

SEQ ID NO: 1990391 - RNA, 12 nt, Human
uugaugccuggc

SEQ ID NO: 1990392 - RNA, 19 nt, Human
aucucuucuggguuccuuc

SEQ ID NO: 1990393 - RNA, 23 nt, Human
uugaugcauuaaaagaaaauaaa

SEQ ID NO: 1990394 - RNA, 14 nt, Human
uugcaucugaaaau

SEQ ID NO: 1990395 - RNA, 18 nt, Human
uugcaucuggguagcugu

SEQ ID NO: 1990396 - RNA, 19 nt, Human
uugcaucuggguagcugua

SEQ ID NO: 1990397 - RNA, 20 nt, Human
uugcaucuggguagcuguaa

SEQ ID NO: 1990398 - RNA, 21 nt, Human
uugcaucuggguagcuguaag

SEQ ID NO: 1990399 - RNA, 16 nt, Human
uugauucagacagcug

SEQ ID NO: 1990400 - RNA, 15 nt, Human
uugauucagacagcu

SEQ ID NO: 1990401 - RNA, 15 nt, Human
uugcacaaaaagaua

SEQ ID NO: 1990402 - RNA, 22 nt, Human
uugcacaaaaagauaccuuaaa

SEQ ID NO: 1990403 - RNA, 23 nt, Human
uugcacaaaaagauaccuuaaaa

SEQ ID NO: 1990404 - RNA, 15 nt, Human
uugcacaauuauaaa

SEQ ID NO: 1990405 - RNA, 15 nt, Human
uugcacacaucaucu

SEQ ID NO: 1990406 - RNA, 17 nt, Human
uugcacacaucaucugu

SEQ ID NO: 1990407 - RNA, 20 nt, Human
uugcacacaucaucuguaag

SEQ ID NO: 1990408 - RNA, 18 nt, Human
uugcacacaucaucugua

SEQ ID NO: 1990409 - RNA, 19 nt, Human
uugcacacaucaucuguaa

SEQ ID NO: 1990410 - RNA, 13 nt, Human
aucucccccagcc

SEQ ID NO: 1990411 - RNA, 12 nt, Human
aucucccccagc

SEQ ID NO: 1990412 - RNA, 14 nt, Human
aucucccccagccc

SEQ ID NO: 1990413 - RNA, 13 nt, Human
aucucccacaugc

SEQ ID NO: 1990414 - RNA, 21 nt, Human
aucucccacaugccaggggcc

SEQ ID NO: 1990415 - RNA, 16 nt, Human
aucuccccaucauugg

SEQ ID NO: 1990416 - RNA, 23 nt, Human
aucucagugguuaagauuccuaa

SEQ ID NO: 1990417 - RNA, 13 nt, Human
aucuccaaaauaa

SEQ ID NO: 1990418 - RNA, 15 nt, Human
aucuccacuccagau

SEQ ID NO: 1990419 - RNA, 15 nt, Human
aucucacacaugagc

SEQ ID NO: 1990420 - RNA, 16 nt, Human
aucucacacaugagca

SEQ ID NO: 1990421 - RNA, 19 nt, Human
auccuaguuccaccaucaa

SEQ ID NO: 1990422 - RNA, 15 nt, Human
auccuaguuccacca

SEQ ID NO: 1990423 - RNA, 11 nt, Human
aucucagccca

SEQ ID NO: 1990424 - RNA, 14 nt, Human
aucucagauauuug

SEQ ID NO: 1990425 - RNA, 15 nt, Human
aucucagauauuugc

SEQ ID NO: 1990426 - RNA, 16 nt, Human
aucucagauauuugca

SEQ ID NO: 1990427 - RNA, 17 nt, Human
aucucagauauuugcac

SEQ ID NO: 1990428 - RNA, 14 nt, Human
aucucagggccugg

SEQ ID NO: 1990429 - RNA, 17 nt, Human
aucucagcccugcaacu

SEQ ID NO: 1990430 - RNA, 16 nt, Human
aucuuuagaaaaggca

SEQ ID NO: 1990431 - RNA, 18 nt, Human
aucuuugcagacaggcaa

SEQ ID NO: 1990432 - RNA, 21 nt, Human
aucuuuaauuuuacauuuccu

SEQ ID NO: 1990433 - RNA, 16 nt, Human
aucuuuaauuuuacau

SEQ ID NO: 1990434 - RNA, 22 nt, Human
aucuuuaauuuuacauuuccua

SEQ ID NO: 1990435 - RNA, 13 nt, Human
uuggcugcaggga

SEQ ID NO: 1990436 - RNA, 13 nt, Human
aucuuuuuauuca

SEQ ID NO: 1990437 - RNA, 22 nt, Human
aucuuuuguuacucuugggaca

SEQ ID NO: 1990438 - RNA, 19 nt, Human
aucuuuuuaaccucuguuc

SEQ ID NO: 1990439 - RNA, 12 nt, Human
augaaagauuca

SEQ ID NO: 1990440 - RNA, 19 nt, Human
augaaagcauggcuaauag

SEQ ID NO: 1990441 - RNA, 15 nt, Human
augaaagcagggacu

SEQ ID NO: 1990442 - RNA, 21 nt, Human
aucuuuuuaaccucuguucag

SEQ ID NO: 1990443 - RNA, 12 nt, Human
uuggaugaguuu

SEQ ID NO: 1990444 - RNA, 18 nt, Human
uuggaugaguuuugggaa

SEQ ID NO: 1990445 - RNA, 17 nt, Human
uuggaguuggaguagaa

SEQ ID NO: 1990446 - RNA, 19 nt, Human
uuggaguuugcauucuuau

SEQ ID NO: 1990447 - RNA, 14 nt, Human
uuggaguucauuca

SEQ ID NO: 1990448 - RNA, 16 nt, Human
uuggaguucauucaua

SEQ ID NO: 1990449 - RNA, 12 nt, Human
aucuugcuugaa

SEQ ID NO: 1990450 - RNA, 18 nt, Human
uuggaguucauucauauu

SEQ ID NO: 1990451 - RNA, 19 nt, Human
uuggaguucauucauauua

SEQ ID NO: 1990452 - RNA, 21 nt, Human
uuggaguucauucauauuaca

SEQ ID NO: 1990453 - RNA, 22 nt, Human
uuggaguucauucauauuacaa

SEQ ID NO: 1990454 - RNA, 23 nt, Human
uuggcgcugccccuggcagcccc

SEQ ID NO: 1990455 - RNA, 17 nt, Human
uuggauuauucuuucuc

SEQ ID NO: 1990456 - RNA, 21 nt, Human
uuggauuauucuuucuccuuu

SEQ ID NO: 1990457 - RNA, 18 nt, Human
uuggcuagagguucaaag

SEQ ID NO: 1990458 - RNA, 12 nt, Human
uuggcucugagg

SEQ ID NO: 1990459 - RNA, 15 nt, Human
augaacuuauuaaua

SEQ ID NO: 1990460 - RNA, 16 nt, Human
augaagauacugaaau

SEQ ID NO: 1990461 - RNA, 17 nt, Human
augaagauacugaaaua

SEQ ID NO: 1990462 - RNA, 18 nt, Human
augaagauguagaggaga

SEQ ID NO: 1990463 - RNA, 13 nt, Human
augaaugaauggc

SEQ ID NO: 1990464 - RNA, 22 nt, Human
augaaugacuuccccaauaucu

SEQ ID NO: 1990465 - RNA, 23 nt, Human
augaaugacuuccccaauaucuu

SEQ ID NO: 1990466 - RNA, 20 nt, Human
augaaugucagugugacuga

SEQ ID NO: 1990467 - RNA, 13 nt, Human
aucuuuuucacug

SEQ ID NO: 1990468 - RNA, 15 nt, Human
augaaagggcccaga

SEQ ID NO: 1990469 - RNA, 15 nt, Human
augaagauacugaaa

SEQ ID NO: 1990470 - RNA, 24 nt, Human
augaaccuucuggccucccacaga

SEQ ID NO: 1990471 - RNA, 21 nt, Human
augaaccuucuggccucccac

SEQ ID NO: 1990472 - RNA, 12 nt, Human
augaacugaaag

SEQ ID NO: 1990473 - RNA, 16 nt, Human
uuggggauguuuuucu

SEQ ID NO: 1990474 - RNA, 22 nt, Human
uugggggaggggagacuuugau

SEQ ID NO: 1990475 - RNA, 23 nt, Human
uugggggaggggagacuuugaug

SEQ ID NO: 1990476 - RNA, 15 nt, Human
uugggggcucagcaa

SEQ ID NO: 1990477 - RNA, 22 nt, Human
uuggggggcugaggugggagga

SEQ ID NO: 1990478 - RNA, 13 nt, Human
uugguuccugggg

SEQ ID NO: 1990479 - RNA, 14 nt, Human
uuggggauauuuuu

SEQ ID NO: 1990480 - RNA, 18 nt, Human
uugggccccagaggcugg

SEQ ID NO: 1990481 - RNA, 13 nt, Human
augaauguuccug

SEQ ID NO: 1990482 - RNA, 23 nt, Human
augaauguuccugccuccuugau

SEQ ID NO: 1990483 - RNA, 22 nt, Human
uugguuuagcccaaguggagcc

SEQ ID NO: 1990484 - RNA, 12 nt, Human
uugguuggaagg

SEQ ID NO: 1990485 - RNA, 13 nt, Human
uugguugaauaaa

SEQ ID NO: 1990486 - RNA, 16 nt, Human
uugguugaauaaacua

SEQ ID NO: 1990487 - RNA, 20 nt, Human
uuguaggcgaaucauuuguu

SEQ ID NO: 1990488 - RNA, 19 nt, Human
uuguauauugguuuuauga

SEQ ID NO: 1990489 - RNA, 22 nt, Human
uuguauauugguuuuaugauga

SEQ ID NO: 1990490 - RNA, 19 nt, Human
uuguauaguuauguaaaua

SEQ ID NO: 1990491 - RNA, 20 nt, Human
uuguauaguuauguaaauaa

SEQ ID NO: 1990492 - RNA, 21 nt, Human
uuguauaguuauguaaauaau

SEQ ID NO: 1990493 - RNA, 14 nt, Human
uuguauauucuauu

SEQ ID NO: 1990494 - RNA, 22 nt, Human
uuguauauucuauuuuacaacu

SEQ ID NO: 1990495 - RNA, 13 nt, Human
uuguauauugguu

SEQ ID NO: 1990496 - RNA, 14 nt, Human
uuguauauugguuu

SEQ ID NO: 1990497 - RNA, 16 nt, Human
uuguauauugguuuua

SEQ ID NO: 1990498 - RNA, 14 nt, Human
uuguauaguuaugu

SEQ ID NO: 1990499 - RNA, 16 nt, Human
uuguauaguuauguaa

SEQ ID NO: 1990500 - RNA, 17 nt, Human
uuguauaguuauguaaa

SEQ ID NO: 1990501 - RNA, 18 nt, Human
uuguauaguuauguaaau

SEQ ID NO: 1990502 - RNA, 19 nt, Human
uuguaguguucagaaaaaa

SEQ ID NO: 1990503 - RNA, 14 nt, Human
augacacaugcaag

SEQ ID NO: 1990504 - RNA, 22 nt, Human
augacacaugcaaggucauuuu

SEQ ID NO: 1990505 - RNA, 20 nt, Human
augaauuuuuuuauuucugu

SEQ ID NO: 1990506 - RNA, 18 nt, Human
augacacgaauauugcug

SEQ ID NO: 1990507 - RNA, 23 nt, Human
augaccaaauaucaccaggacug

SEQ ID NO: 1990508 - RNA, 13 nt, Human
augaccaauuuua

SEQ ID NO: 1990509 - RNA, 17 nt, Human
augaccaauuuuaacuu

SEQ ID NO: 1990510 - RNA, 20 nt, Human
augaccaauuuuaacuuaga

SEQ ID NO: 1990511 - RNA, 22 nt, Human
augacuuaagcacacuugacau

SEQ ID NO: 1990512 - RNA, 14 nt, Human
augacuuacuguac

SEQ ID NO: 1990513 - RNA, 14 nt, Human
augacuuuuugaaa

SEQ ID NO: 1990514 - RNA, 18 nt, Human
augacuuuuugaaaguaa

SEQ ID NO: 1990515 - RNA, 18 nt, Human
augacuuuauuauuuauu

SEQ ID NO: 1990516 - RNA, 21 nt, Human
augacuuuauugcaucugggu

SEQ ID NO: 1990517 - RNA, 17 nt, Human
augacuuuauuauuuau

SEQ ID NO: 1990518 - RNA, 13 nt, Human
augacuuuauugc

SEQ ID NO: 1990519 - RNA, 16 nt, Human
augacuuuauugcauc

SEQ ID NO: 1990520 - RNA, 16 nt, Human
augacuuacuguacau

SEQ ID NO: 1990521 - RNA, 17 nt, Human
augacuuacuguacaug

SEQ ID NO: 1990522 - RNA, 22 nt, Human
augacuuccccaauaucuugcu

SEQ ID NO: 1990523 - RNA, 19 nt, Human
augacuuccccaauaucuu

SEQ ID NO: 1990524 - RNA, 18 nt, Human
augagaaaucuaaaaaac

SEQ ID NO: 1990525 - RNA, 15 nt, Human
augagaaaucuaaaa

SEQ ID NO: 1990526 - RNA, 21 nt, Human
augagaaagguugaagcacca

SEQ ID NO: 1990527 - RNA, 22 nt, Human
augagaaagguugaagcaccaa

SEQ ID NO: 1990528 - RNA, 23 nt, Human
augagaaaucuaaaaaacgaaaa

SEQ ID NO: 1990529 - RNA, 17 nt, Human
augagaacagauaaaga

SEQ ID NO: 1990530 - RNA, 18 nt, Human
augagaacagauaaagau

SEQ ID NO: 1990531 - RNA, 19 nt, Human
augagaacagauaaagauu

SEQ ID NO: 1990532 - RNA, 11 nt, Human
augagaauguu

SEQ ID NO: 1990533 - RNA, 22 nt, Human
augagacuauguaaaaauaacc

SEQ ID NO: 1990534 - RNA, 15 nt, Human
augagacucuagggu

SEQ ID NO: 1990535 - RNA, 22 nt, Human
augagaacagauaaagauugug

SEQ ID NO: 1990536 - RNA, 13 nt, Human
augcuucauacag

SEQ ID NO: 1990537 - RNA, 15 nt, Human
augcuucauacaggg

SEQ ID NO: 1990538 - RNA, 16 nt, Human
augcuucauacaggga

SEQ ID NO: 1990539 - RNA, 19 nt, Human
augcuucauacagggaugg

SEQ ID NO: 1990540 - RNA, 11 nt, Human
augcuucauac

SEQ ID NO: 1990541 - RNA, 12 nt, Human
augcuucauaca

SEQ ID NO: 1990542 - RNA, 10 nt, Human
augcuucaua

SEQ ID NO: 1990543 - RNA, 23 nt, Human
augcugucccuuacgugaguccu

SEQ ID NO: 1990544 - RNA, 19 nt, Human
augcugucccuuacgugag

SEQ ID NO: 1990545 - RNA, 15 nt, Human
auggaacacucugag

SEQ ID NO: 1990546 - RNA, 14 nt, Human
auggaacacucuga

SEQ ID NO: 1990547 - RNA, 23 nt, Human
augcuucauacagggaugguguu

SEQ ID NO: 1990548 - RNA, 11 nt, Human
auggaacacuc

SEQ ID NO: 1990549 - RNA, 16 nt, Human
auggaacacucugaga

SEQ ID NO: 1990550 - RNA, 16 nt, Human
augcuguaaaagcaag

SEQ ID NO: 1990551 - RNA, 15 nt, Human
auggaagacagcucu

SEQ ID NO: 1990552 - RNA, 20 nt, Human
augcuggccgaagauuucau

SEQ ID NO: 1990553 - RNA, 22 nt, Human
augcuguaacuuucugaaauaa

SEQ ID NO: 1990554 - RNA, 15 nt, Human
augcucugcauguua

SEQ ID NO: 1990555 - RNA, 15 nt, Human
augcuagaacucccu

SEQ ID NO: 1990556 - RNA, 16 nt, Human
augcuagaacucccuu

SEQ ID NO: 1990557 - RNA, 19 nt, Human
augcuagaacucccuuuca

SEQ ID NO: 1990558 - RNA, 22 nt, Human
uuuagauuuuguguuuauucuu

SEQ ID NO: 1990559 - RNA, 23 nt, Human
uuuagcaaagcggguuauaauga

SEQ ID NO: 1990560 - RNA, 17 nt, Human
uuuagauguaauuuugu

SEQ ID NO: 1990561 - RNA, 22 nt, Human
uuuagaugaaugucaguuguua

SEQ ID NO: 1990562 - RNA, 19 nt, Human
uuuagaugugcugcuuuga

SEQ ID NO: 1990563 - RNA, 18 nt, Human
uuuagaugaaugucaguu

SEQ ID NO: 1990564 - RNA, 16 nt, Human
uuuagcuguguuauua

SEQ ID NO: 1990565 - RNA, 17 nt, Human
uuuagcuguguuauuau

SEQ ID NO: 1990566 - RNA, 15 nt, Human
uuuaguagagacagg

SEQ ID NO: 1990567 - RNA, 15 nt, Human
uuuaggacaugaaaa

SEQ ID NO: 1990568 - RNA, 17 nt, Human
uuuaggacaugaaaaua

SEQ ID NO: 1990569 - RNA, 16 nt, Human
uuuaguaucuuuuuau

SEQ ID NO: 1990570 - RNA, 12 nt, Human
uuuaugugaugg

SEQ ID NO: 1990571 - RNA, 11 nt, Human
uuuaugugugu

SEQ ID NO: 1990572 - RNA, 13 nt, Human
uuuaugugugugu

SEQ ID NO: 1990573 - RNA, 16 nt, Human
uuuaugugugauucaa

SEQ ID NO: 1990574 - RNA, 11 nt, Human
uuuauguugac

SEQ ID NO: 1990575 - RNA, 13 nt, Human
uuuauguugacau

SEQ ID NO: 1990576 - RNA, 14 nt, Human
uuuauguugacauu

SEQ ID NO: 1990577 - RNA, 15 nt, Human
uuuauguugacauuu

SEQ ID NO: 1990578 - RNA, 17 nt, Human
uuuauguugacauuugu

SEQ ID NO: 1990579 - RNA, 18 nt, Human
uuuauguugacauuuguu

SEQ ID NO: 1990580 - RNA, 22 nt, Human
uuuauguugacauuuguuuggu

SEQ ID NO: 1990581 - RNA, 13 nt, Human
uuuauguuuuggu

SEQ ID NO: 1990582 - RNA, 14 nt, Human
uuuauguuuugguc

SEQ ID NO: 1990583 - RNA, 20 nt, Human
uuuauguuuugguccacuuu

SEQ ID NO: 1990584 - RNA, 24 nt, Human
uuuauggcuuuugugcauuaucua

SEQ ID NO: 1990585 - RNA, 18 nt, Human
uuuauaguuaaucuauaa

SEQ ID NO: 1990586 - RNA, 22 nt, Human
uuuauauaaugguaugcuugca

SEQ ID NO: 1990587 - RNA, 18 nt, Human
uuuaugguaaucauauua

SEQ ID NO: 1990588 - RNA, 20 nt, Human
uuuauggcuuuugugcauua

SEQ ID NO: 1990589 - RNA, 14 nt, Human
uuuauagcuuuauu

SEQ ID NO: 1990590 - RNA, 14 nt, Human
uuuauaguuaaucu

SEQ ID NO: 1990591 - RNA, 16 nt, Human
uuuauaguuaaucuau

SEQ ID NO: 1990592 - RNA, 17 nt, Human
uuuauaguuaaucuaua

SEQ ID NO: 1990593 - RNA, 22 nt, Human
uuucauguccugugucaguuua

SEQ ID NO: 1990594 - RNA, 17 nt, Human
uuucauguccuguguca

SEQ ID NO: 1990595 - RNA, 21 nt, Human
uuucauguccugugucaguuu

SEQ ID NO: 1990596 - RNA, 12 nt, Human
uuucaugugcuc

SEQ ID NO: 1990597 - RNA, 14 nt, Human
uuuccccagggcac

SEQ ID NO: 1990598 - RNA, 14 nt, Human
uuucccauuuagaa

SEQ ID NO: 1990599 - RNA, 18 nt, Human
auggacagcauugccagu

SEQ ID NO: 1990600 - RNA, 14 nt, Human
auggacaugaucuu

SEQ ID NO: 1990601 - RNA, 22 nt, Human
uuucagaaguuuaaauauuaag

SEQ ID NO: 1990602 - RNA, 21 nt, Human
uuucagaaguuuaaauauuaa

SEQ ID NO: 1990603 - RNA, 23 nt, Human
uuucacugacuuuuuuugugggg

SEQ ID NO: 1990604 - RNA, 17 nt, Human
uuucaucagaacagcug

SEQ ID NO: 1990605 - RNA, 24 nt, Human
uuucaucagaacagcuguugacuc

SEQ ID NO: 1990606 - RNA, 16 nt, Human
uuucaucauauuauac

SEQ ID NO: 1990607 - RNA, 17 nt, Human
uuucaucauauuauaca

SEQ ID NO: 1990608 - RNA, 17 nt, Human
uuucauauuuuaaacag

SEQ ID NO: 1990609 - RNA, 17 nt, Human
uuucauauuuuucaaaa

SEQ ID NO: 1990610 - RNA, 18 nt, Human
uuucauauuuuucaaaau

SEQ ID NO: 1990611 - RNA, 18 nt, Human
uuucauauuuuaauuuca

SEQ ID NO: 1990612 - RNA, 22 nt, Human
uuucauauuuuaauuucaagcu

SEQ ID NO: 1990613 - RNA, 21 nt, Human
auggaaugaugggucaguugu

SEQ ID NO: 1990614 - RNA, 17 nt, Human
auggaauacucuuauau

SEQ ID NO: 1990615 - RNA, 16 nt, Human
auggaauacucuuaua

SEQ ID NO: 1990616 - RNA, 16 nt, Human
auggaagacagcucuu

SEQ ID NO: 1990617 - RNA, 13 nt, Human
uuucagaaaugug

SEQ ID NO: 1990618 - RNA, 20 nt, Human
uuucacugcuggcugccuua

SEQ ID NO: 1990619 - RNA, 22 nt, Human
uuucacugcuggcugccuuaga

SEQ ID NO: 1990620 - RNA, 14 nt, Human
uuucacugcuggcu

SEQ ID NO: 1990621 - RNA, 17 nt, Human
uuucacugcuggcugcc

SEQ ID NO: 1990622 - RNA, 18 nt, Human
uuucacugcuggcugccu

SEQ ID NO: 1990623 - RNA, 17 nt, Human
auggcaacaaacugcac

SEQ ID NO: 1990624 - RNA, 19 nt, Human
auggcaacaaacugcacau

SEQ ID NO: 1990625 - RNA, 20 nt, Human
auggcaacaaacugcacaug

SEQ ID NO: 1990626 - RNA, 22 nt, Human
auggcaacaaacugcacaugau

SEQ ID NO: 1990627 - RNA, 14 nt, Human
auggcaacaaacug

SEQ ID NO: 1990628 - RNA, 23 nt, Human
auggacguguuaugacuccagaa

SEQ ID NO: 1990629 - RNA, 18 nt, Human
auggauuuccagccaaag

SEQ ID NO: 1990630 - RNA, 20 nt, Human
auggacguguuaugacucca

SEQ ID NO: 1990631 - RNA, 19 nt, Human
auggacguguuaugacucc

SEQ ID NO: 1990632 - RNA, 15 nt, Human
auggcacagggcaug

SEQ ID NO: 1990633 - RNA, 22 nt, Human
auggcacaaucucggcucacug

SEQ ID NO: 1990634 - RNA, 16 nt, Human
auggcaauguuuugcu

SEQ ID NO: 1990635 - RNA, 23 nt, Human
auggcaaguuuuccauauuuuua

SEQ ID NO: 1990636 - RNA, 20 nt, Human
auggcaauguuuugcuuuug

SEQ ID NO: 1990637 - RNA, 19 nt, Human
auggcaaggacugcaggga

SEQ ID NO: 1990638 - RNA, 17 nt, Human
auggcacaucagcacga

SEQ ID NO: 1990639 - RNA, 23 nt, Human
auggcacaucagcacgauuucug

SEQ ID NO: 1990640 - RNA, 21 nt, Human
auggcacagggcaugaaauga

SEQ ID NO: 1990641 - RNA, 19 nt, Human
auggcacagggcaugaaau

SEQ ID NO: 1990642 - RNA, 20 nt, Human
auggcacagggcaugaaaug

SEQ ID NO: 1990643 - RNA, 21 nt, Human
auggccgggcgcgguggcuca

SEQ ID NO: 1990644 - RNA, 22 nt, Human
auggccagguggccacuccaga

SEQ ID NO: 1990645 - RNA, 22 nt, Human
auggccaggaaguagcacaggc

SEQ ID NO: 1990646 - RNA, 23 nt, Human
auggccaggaaguagcacaggcu

SEQ ID NO: 1990647 - RNA, 16 nt, Human
auggccagguggccac

SEQ ID NO: 1990648 - RNA, 21 nt, Human
auggccaggaaguagcacagg

SEQ ID NO: 1990649 - RNA, 16 nt, Human
auggccugggggaugu

SEQ ID NO: 1990650 - RNA, 20 nt, Human
auggccuuugcuugaaagaa

SEQ ID NO: 1990651 - RNA, 20 nt, Human
auggcuaguaucaaaagaaa

SEQ ID NO: 1990652 - RNA, 17 nt, Human
auggcuacuugcuuuga

SEQ ID NO: 1990653 - RNA, 15 nt, Human
augccacuaaauuga

SEQ ID NO: 1990654 - RNA, 17 nt, Human
augccacuaaauugaca

SEQ ID NO: 1990655 - RNA, 16 nt, Human
augccaagcacuucag

SEQ ID NO: 1990656 - RNA, 23 nt, Human
augccaagaaguuuaaggaauau

SEQ ID NO: 1990657 - RNA, 14 nt, Human
uuuaauuuuuaaau

SEQ ID NO: 1990658 - RNA, 17 nt, Human
uuuaauuuuuaaaugca

SEQ ID NO: 1990659 - RNA, 13 nt, Human
augcagccucaca

SEQ ID NO: 1990660 - RNA, 15 nt, Human
augcagccucacagu

SEQ ID NO: 1990661 - RNA, 14 nt, Human
augcagccucacag

SEQ ID NO: 1990662 - RNA, 17 nt, Human
augcagccucacagucc

SEQ ID NO: 1990663 - RNA, 22 nt, Human
augcagguuagaaauaauguca

SEQ ID NO: 1990664 - RNA, 13 nt, Human
augcagucuuaga

SEQ ID NO: 1990665 - RNA, 21 nt, Human
augcagucuuagaucauaguu

SEQ ID NO: 1990666 - RNA, 22 nt, Human
augcagucuuagaucauaguuu

SEQ ID NO: 1990667 - RNA, 17 nt, Human
uuuaagugcugcauuua

SEQ ID NO: 1990668 - RNA, 19 nt, Human
uuuaagugcugcauuuaaa

SEQ ID NO: 1990669 - RNA, 16 nt, Human
uuuaaugauuguuuaa

SEQ ID NO: 1990670 - RNA, 15 nt, Human
uuuaagugcugcauu

SEQ ID NO: 1990671 - RNA, 16 nt, Human
uuuaagugcugcauuu

SEQ ID NO: 1990672 - RNA, 16 nt, Human
uuuaagccuaaagauu

SEQ ID NO: 1990673 - RNA, 21 nt, Human
uuuaagccuaaagauuuugau

SEQ ID NO: 1990674 - RNA, 23 nt, Human
uuuaagcuaggaaaagaaaucua

SEQ ID NO: 1990675 - RNA, 20 nt, Human
uuuaagcuaggaaaagaaau

SEQ ID NO: 1990676 - RNA, 22 nt, Human
uuuaagcuaggaaaagaaaucu

SEQ ID NO: 1990677 - RNA, 12 nt, Human
uuuaagccuuug

SEQ ID NO: 1990678 - RNA, 18 nt, Human
uuuaagccuuuguugaac

SEQ ID NO: 1990679 - RNA, 21 nt, Human
uuuaagccuuuguugaacugu

SEQ ID NO: 1990680 - RNA, 23 nt, Human
uuuaagccuuuguugaacuguua

SEQ ID NO: 1990681 - RNA, 19 nt, Human
uuuaaugcuaaucuuguga

SEQ ID NO: 1990682 - RNA, 12 nt, Human
uuuaauuuuaca

SEQ ID NO: 1990683 - RNA, 13 nt, Human
uuuaauuguauuu

SEQ ID NO: 1990684 - RNA, 14 nt, Human
uuuaauuguauuuu

SEQ ID NO: 1990685 - RNA, 17 nt, Human
uuuaauuguauuuuugu

SEQ ID NO: 1990686 - RNA, 20 nt, Human
uuuaauugaaagaauguaaa

SEQ ID NO: 1990687 - RNA, 21 nt, Human
uuuaauugaaagaauguaaag

SEQ ID NO: 1990688 - RNA, 17 nt, Human
uuuaauuccaugaaugu

SEQ ID NO: 1990689 - RNA, 17 nt, Human
uuuaauugaaagaaugu

SEQ ID NO: 1990690 - RNA, 14 nt, Human
uuuaaauguuuuuu

SEQ ID NO: 1990691 - RNA, 13 nt, Human
uuuaaaugucaaa

SEQ ID NO: 1990692 - RNA, 15 nt, Human
uuguuuuacugucuu

SEQ ID NO: 1990693 - RNA, 16 nt, Human
uuguuuucaguguaca

SEQ ID NO: 1990694 - RNA, 13 nt, Human
uuguuuucagugu

SEQ ID NO: 1990695 - RNA, 15 nt, Human
augcacuuuguucug

SEQ ID NO: 1990696 - RNA, 14 nt, Human
uuuaagcagaauug

SEQ ID NO: 1990697 - RNA, 15 nt, Human
uuuaagcagaauugg

SEQ ID NO: 1990698 - RNA, 17 nt, Human
uuuaagcagaauuggaa

SEQ ID NO: 1990699 - RNA, 18 nt, Human
uuuaagcagaauuggaaa

SEQ ID NO: 1990700 - RNA, 19 nt, Human
uuuaagcagaauuggaaaa

SEQ ID NO: 1990701 - RNA, 19 nt, Human
uuuaaauuauguuuuacug

SEQ ID NO: 1990702 - RNA, 23 nt, Human
uuuaaauugcucacaguuauuac

SEQ ID NO: 1990703 - RNA, 15 nt, Human
uuguugucugcaacu

SEQ ID NO: 1990704 - RNA, 19 nt, Human
augauuaaccacuucagcu

SEQ ID NO: 1990705 - RNA, 21 nt, Human
augauuaaccacuucagcuga

SEQ ID NO: 1990706 - RNA, 20 nt, Human
augauuaaccacuucagcug

SEQ ID NO: 1990707 - RNA, 15 nt, Human
augauuccagguggc

SEQ ID NO: 1990708 - RNA, 16 nt, Human
augauuccagguggca

SEQ ID NO: 1990709 - RNA, 15 nt, Human
augauuucacaaaua

SEQ ID NO: 1990710 - RNA, 16 nt, Human
augauuucacaaauau

SEQ ID NO: 1990711 - RNA, 17 nt, Human
augauuucacaaauauu

SEQ ID NO: 1990712 - RNA, 18 nt, Human
augauuucacaaauauua

SEQ ID NO: 1990713 - RNA, 22 nt, Human
augauuucacaaauauuaaaaa

SEQ ID NO: 1990714 - RNA, 13 nt, Human
augauuucacagu

SEQ ID NO: 1990715 - RNA, 17 nt, Human
augauuucagcucacug

SEQ ID NO: 1990716 - RNA, 23 nt, Human
augauuucacaaauauuaaaaag

SEQ ID NO: 1990717 - RNA, 13 nt, Human
augauuucagaaa

SEQ ID NO: 1990718 - RNA, 14 nt, Human
augauuucagaaac

SEQ ID NO: 1990719 - RNA, 21 nt, Human
augauucaaaugucuauaaac

SEQ ID NO: 1990720 - RNA, 13 nt, Human
augauucaaaaag

SEQ ID NO: 1990721 - RNA, 21 nt, Human
augauucaacagguuuuccug

SEQ ID NO: 1990722 - RNA, 19 nt, Human
augauuucagcucacugca

SEQ ID NO: 1990723 - RNA, 15 nt, Human
augauuucagaaaca

SEQ ID NO: 1990724 - RNA, 16 nt, Human
augauuucagaaacaa

SEQ ID NO: 1990725 - RNA, 20 nt, Human
augauuuggggauucagauu

SEQ ID NO: 1990726 - RNA, 12 nt, Human
augcacuuuguu

SEQ ID NO: 1990727 - RNA, 14 nt, Human
augcaccagcccuu

SEQ ID NO: 1990728 - RNA, 13 nt, Human
augcaccagcccu

SEQ ID NO: 1990729 - RNA, 19 nt, Human
uuguucuggcucuuccagg

SEQ ID NO: 1990730 - RNA, 17 nt, Human
uuguguguuuauuguca

SEQ ID NO: 1990731 - RNA, 22 nt, Human
uuguguguucacuaaacucuga

SEQ ID NO: 1990732 - RNA, 22 nt, Human
uuguucuggcucuuccaggcug

SEQ ID NO: 1990733 - RNA, 20 nt, Human
uuguucuggcucuuccaggc

SEQ ID NO: 1990734 - RNA, 13 nt, Human
uugugguuaaucu

SEQ ID NO: 1990735 - RNA, 14 nt, Human
uuguguaagaaaua

SEQ ID NO: 1990736 - RNA, 18 nt, Human
uuguguaagaaauacaga

SEQ ID NO: 1990737 - RNA, 13 nt, Human
uugugugaacuug

SEQ ID NO: 1990738 - RNA, 16 nt, Human
uugugugaacuuggaa

SEQ ID NO: 1990739 - RNA, 17 nt, Human
uugugugauauuucaga

SEQ ID NO: 1990740 - RNA, 18 nt, Human
uugugugauauuucagaa

SEQ ID NO: 1990741 - RNA, 19 nt, Human
uugugugauauuucagaaa

SEQ ID NO: 1990742 - RNA, 20 nt, Human
uugugugauauuucagaaau

SEQ ID NO: 1990743 - RNA, 21 nt, Human
uugugugauauuucagaaaua

SEQ ID NO: 1990744 - RNA, 21 nt, Human
uugugugcuaaacguguaugu

SEQ ID NO: 1990745 - RNA, 23 nt, Human
uugugugccucuagcugaauuga

SEQ ID NO: 1990746 - RNA, 21 nt, Human
uugugugcggagucauuuugu

SEQ ID NO: 1990747 - RNA, 17 nt, Human
uugugugccucuagcug

SEQ ID NO: 1990748 - RNA, 20 nt, Human
uugugugccucuagcugaau

SEQ ID NO: 1990749 - RNA, 21 nt, Human
uugugaggaagccgcuggggc

SEQ ID NO: 1990750 - RNA, 17 nt, Human
uugugacuuuugcuuua

SEQ ID NO: 1990751 - RNA, 17 nt, Human
augagacucuagggucc

SEQ ID NO: 1990752 - RNA, 18 nt, Human
augagacucuagggucca

SEQ ID NO: 1990753 - RNA, 18 nt, Human
uuguggcuccacacacac

SEQ ID NO: 1990754 - RNA, 18 nt, Human
uugugauacaaugcugug

SEQ ID NO: 1990755 - RNA, 14 nt, Human
uugugaguuuguuu

SEQ ID NO: 1990756 - RNA, 18 nt, Human
uugugacuuuugcuuuaa

SEQ ID NO: 1990757 - RNA, 19 nt, Human
uugugauacaaugcugugc

SEQ ID NO: 1990758 - RNA, 16 nt, Human
uugugaguuuguuucu

SEQ ID NO: 1990759 - RNA, 19 nt, Human
uugugaguuuguuucuuug

SEQ ID NO: 1990760 - RNA, 21 nt, Human
uugugaguuuguuucuuugaa

SEQ ID NO: 1990761 - RNA, 22 nt, Human
uugugaguuuguuucuuugaau

SEQ ID NO: 1990762 - RNA, 17 nt, Human
uuccugucacccugagg

SEQ ID NO: 1990763 - RNA, 13 nt, Human
uuccucuccacug

SEQ ID NO: 1990764 - RNA, 14 nt, Human
uuccucuccacugc

SEQ ID NO: 1990765 - RNA, 15 nt, Human
uuccucuccacugcc

SEQ ID NO: 1990766 - RNA, 12 nt, Human
uuccucuccacu

SEQ ID NO: 1990767 - RNA, 20 nt, Human
uuccuacucuucucucugcu

SEQ ID NO: 1990768 - RNA, 21 nt, Human
uuccuacucuucucucugcuc

SEQ ID NO: 1990769 - RNA, 22 nt, Human
uuccuacucuucucucugcucu

SEQ ID NO: 1990770 - RNA, 11 nt, Human
auauuuuccug

SEQ ID NO: 1990771 - RNA, 19 nt, Human
auauuuuccugauagcaua

SEQ ID NO: 1990772 - RNA, 20 nt, Human
uuccuucaaagcaaaugucu

SEQ ID NO: 1990773 - RNA, 15 nt, Human
uuccuucagauauuu

SEQ ID NO: 1990774 - RNA, 22 nt, Human
auauuuuguaugcaagcaguuu

SEQ ID NO: 1990775 - RNA, 13 nt, Human
aucaaauguaaag

SEQ ID NO: 1990776 - RNA, 14 nt, Human
aucaaauguaaagu

SEQ ID NO: 1990777 - RNA, 14 nt, Human
aucaaguuauuuuu

SEQ ID NO: 1990778 - RNA, 22 nt, Human
aucaaguuggcuucuaaucaaa

SEQ ID NO: 1990779 - RNA, 23 nt, Human
aucaaguuggcuucuaaucaaag

SEQ ID NO: 1990780 - RNA, 19 nt, Human
aucaaccccuucgcuccug

SEQ ID NO: 1990781 - RNA, 20 nt, Human
aucaaccccuucgcuccugu

SEQ ID NO: 1990782 - RNA, 22 nt, Human
aucaaccccuucgcuccugugu

SEQ ID NO: 1990783 - RNA, 15 nt, Human
auauuuuacauaaau

SEQ ID NO: 1990784 - RNA, 16 nt, Human
auauuuuaauuucaag

SEQ ID NO: 1990785 - RNA, 17 nt, Human
auauuuuaauuucaagc

SEQ ID NO: 1990786 - RNA, 13 nt, Human
auauuuuaauuuu

SEQ ID NO: 1990787 - RNA, 15 nt, Human
auauuuuaauuuuua

SEQ ID NO: 1990788 - RNA, 16 nt, Human
auauuuuacauaaauu

SEQ ID NO: 1990789 - RNA, 20 nt, Human
auauuuuacauaaauuuagu

SEQ ID NO: 1990790 - RNA, 14 nt, Human
auauuuuaauuuca

SEQ ID NO: 1990791 - RNA, 15 nt, Human
auauuuuaauuucaa

SEQ ID NO: 1990792 - RNA, 23 nt, Human
uucccacugguccaucugguuuu

SEQ ID NO: 1990793 - RNA, 20 nt, Human
uucccacucugucgagccug

SEQ ID NO: 1990794 - RNA, 14 nt, Human
uucccacucuucuc

SEQ ID NO: 1990795 - RNA, 20 nt, Human
uuccccuaaucuuuucugaa

SEQ ID NO: 1990796 - RNA, 14 nt, Human
uucccccuuucuuc

SEQ ID NO: 1990797 - RNA, 15 nt, Human
uucccccuuucuucc

SEQ ID NO: 1990798 - RNA, 16 nt, Human
uucccccuuucuuccu

SEQ ID NO: 1990799 - RNA, 22 nt, Human
uucccccuguuucagaggcuca

SEQ ID NO: 1990800 - RNA, 14 nt, Human
uucccccuccccca

SEQ ID NO: 1990801 - RNA, 20 nt, Human
uucccuuuuuuggcugcuga

SEQ ID NO: 1990802 - RNA, 19 nt, Human
uucccuuuuuuggcugcug

SEQ ID NO: 1990803 - RNA, 18 nt, Human
uucccuuuuuuggcugcu

SEQ ID NO: 1990804 - RNA, 12 nt, Human
uuccuacucuuc

SEQ ID NO: 1990805 - RNA, 15 nt, Human
uuccuacucuucucu

SEQ ID NO: 1990806 - RNA, 17 nt, Human
uuccuacucuucucucu

SEQ ID NO: 1990807 - RNA, 18 nt, Human
uuccuacucuucucucug

SEQ ID NO: 1990808 - RNA, 19 nt, Human
uuccuacucuucucucugc

SEQ ID NO: 1990809 - RNA, 17 nt, Human
uuccuacacaggacagg

SEQ ID NO: 1990810 - RNA, 21 nt, Human
uuccuaccacccgguccccac

SEQ ID NO: 1990811 - RNA, 17 nt, Human
uuccccuguucacucua

SEQ ID NO: 1990812 - RNA, 14 nt, Human
uuccccuguucacu

SEQ ID NO: 1990813 - RNA, 22 nt, Human
uuccccuuccuaauuccacagc

SEQ ID NO: 1990814 - RNA, 13 nt, Human
uuccccuuccuuc

SEQ ID NO: 1990815 - RNA, 14 nt, Human
uuccccuuccuucu

SEQ ID NO: 1990816 - RNA, 17 nt, Human
uucccuacuuccuguga

SEQ ID NO: 1990817 - RNA, 14 nt, Human
uucccuacuuccug

SEQ ID NO: 1990818 - RNA, 16 nt, Human
uucccuacuuccugug

SEQ ID NO: 1990819 - RNA, 15 nt, Human
uuccccuuccuucuu

SEQ ID NO: 1990820 - RNA, 13 nt, Human
uucccuacuuccu

SEQ ID NO: 1990821 - RNA, 13 nt, Human
uucuaaaguaaaa

SEQ ID NO: 1990822 - RNA, 13 nt, Human
uucuaaaguacug

SEQ ID NO: 1990823 - RNA, 17 nt, Human
uucuaaaguacugagca

SEQ ID NO: 1990824 - RNA, 15 nt, Human
uucuaaaguaaaaac

SEQ ID NO: 1990825 - RNA, 13 nt, Human
uucgcuccugugu

SEQ ID NO: 1990826 - RNA, 19 nt, Human
uucuaaaucuccaaaauaa

SEQ ID NO: 1990827 - RNA, 22 nt, Human
uucuaaauaucccuuggacauu

SEQ ID NO: 1990828 - RNA, 14 nt, Human
uucuaacuucauaa

SEQ ID NO: 1990829 - RNA, 22 nt, Human
aucaauaacagccgcuccagag

SEQ ID NO: 1990830 - RNA, 18 nt, Human
aucaauaacagccgcucc

SEQ ID NO: 1990831 - RNA, 14 nt, Human
uucgaccagccagg

SEQ ID NO: 1990832 - RNA, 17 nt, Human
uucgacuugcauuuuug

SEQ ID NO: 1990833 - RNA, 21 nt, Human
uucgcaggauucuuccucccu

SEQ ID NO: 1990834 - RNA, 20 nt, Human
uucgauacaccgggccugga

SEQ ID NO: 1990835 - RNA, 21 nt, Human
uucucacugccaugccagcuu

SEQ ID NO: 1990836 - RNA, 13 nt, Human
uucuauaauuuaa

SEQ ID NO: 1990837 - RNA, 14 nt, Human
uucuauaauuuaaa

SEQ ID NO: 1990838 - RNA, 20 nt, Human
uucuaguaauaaagacucua

SEQ ID NO: 1990839 - RNA, 17 nt, Human
uucuaguuauuuauucu

SEQ ID NO: 1990840 - RNA, 18 nt, Human
uucuagugcagcugaaau

SEQ ID NO: 1990841 - RNA, 13 nt, Human
uucucagaaucuc

SEQ ID NO: 1990842 - RNA, 13 nt, Human
uucucagcuccca

SEQ ID NO: 1990843 - RNA, 14 nt, Human
aucaggccaggccc

SEQ ID NO: 1990844 - RNA, 19 nt, Human
aucaggauuuccucuugaa

SEQ ID NO: 1990845 - RNA, 13 nt, Human
aucaggccaggcc

SEQ ID NO: 1990846 - RNA, 19 nt, Human
aucagacuaugaaguuuuu

SEQ ID NO: 1990847 - RNA, 13 nt, Human
uucuuuuaauuuu

SEQ ID NO: 1990848 - RNA, 19 nt, Human
uucuuuuguuuuuugaagu

SEQ ID NO: 1990849 - RNA, 22 nt, Human
uucuuuuguuuuuugaaguguu

SEQ ID NO: 1990850 - RNA, 16 nt, Human
uugaaaguuuacagga

SEQ ID NO: 1990851 - RNA, 13 nt, Human
uucuuuuucugga

SEQ ID NO: 1990852 - RNA, 14 nt, Human
uucuuuuucuggac

SEQ ID NO: 1990853 - RNA, 16 nt, Human
uucuuuuucuggacuc

SEQ ID NO: 1990854 - RNA, 14 nt, Human
uucuuuuugaaaug

SEQ ID NO: 1990855 - RNA, 15 nt, Human
uucuuuuugaaaugu

SEQ ID NO: 1990856 - RNA, 16 nt, Human
uugaaauaaaaagagu

SEQ ID NO: 1990857 - RNA, 17 nt, Human
uugaaauaaaaagagua

SEQ ID NO: 1990858 - RNA, 20 nt, Human
uugaaauauaggaacuuaaa

SEQ ID NO: 1990859 - RNA, 11 nt, Human
uugaaaucuuu

SEQ ID NO: 1990860 - RNA, 21 nt, Human
uugaaauauggucuuuugguu

SEQ ID NO: 1990861 - RNA, 21 nt, Human
uugaaaucaguaaacacugug

SEQ ID NO: 1990862 - RNA, 23 nt, Human
uugaaaucaguaaacacugugua

SEQ ID NO: 1990863 - RNA, 23 nt, Human
uugaaauauauggucuaauguuu

SEQ ID NO: 1990864 - RNA, 20 nt, Human
uugaaauauauggucuaaug

SEQ ID NO: 1990865 - RNA, 22 nt, Human
uugaaauauauggucuaauguu

SEQ ID NO: 1990866 - RNA, 12 nt, Human
uugaacaaaaua

SEQ ID NO: 1990867 - RNA, 14 nt, Human
uugaacaaaauaaa

SEQ ID NO: 1990868 - RNA, 16 nt, Human
uugaacaaaauaaauu

SEQ ID NO: 1990869 - RNA, 21 nt, Human
uugaaauuuuuauuaaauuau

SEQ ID NO: 1990870 - RNA, 14 nt, Human
uugaaaugauuuca

SEQ ID NO: 1990871 - RNA, 15 nt, Human
uugaacauguggcuu

SEQ ID NO: 1990872 - RNA, 18 nt, Human
uugaacccgggaggcaga

SEQ ID NO: 1990873 - RNA, 14 nt, Human
uugaaccauaaaau

SEQ ID NO: 1990874 - RNA, 16 nt, Human
uugaaccauaaaaugu

SEQ ID NO: 1990875 - RNA, 17 nt, Human
uugaaccauaaaauguc

SEQ ID NO: 1990876 - RNA, 21 nt, Human
uugaaccauaaaauguccagu

SEQ ID NO: 1990877 - RNA, 14 nt, Human
uugaaccauaguua

SEQ ID NO: 1990878 - RNA, 13 nt, Human
auccuaguuccac

SEQ ID NO: 1990879 - RNA, 21 nt, Human
auccuaggcauuugcugaaua

SEQ ID NO: 1990880 - RNA, 12 nt, Human
auccuaaugaau

SEQ ID NO: 1990881 - RNA, 13 nt, Human
auccuaaugaaug

SEQ ID NO: 1990882 - RNA, 14 nt, Human
auccuacaagacac

SEQ ID NO: 1990883 - RNA, 19 nt, Human
auccuaaugaaugcauaaa

SEQ ID NO: 1990884 - RNA, 23 nt, Human
uucuuuguuaauuuggaccauuu

SEQ ID NO: 1990885 - RNA, 11 nt, Human
uucuuugugua

SEQ ID NO: 1990886 - RNA, 16 nt, Human
uucuuuguaaugaaaa

SEQ ID NO: 1990887 - RNA, 11 nt, Human
uucuuugaaaa

SEQ ID NO: 1990888 - RNA, 22 nt, Human
uucuuuguacacccaugaaaga

SEQ ID NO: 1990889 - RNA, 15 nt, Human
uucuuuguagcauuu

SEQ ID NO: 1990890 - RNA, 22 nt, Human
uucuuugaaaauaguuauucag

SEQ ID NO: 1990891 - RNA, 23 nt, Human
uucuuugaaaauaguuauucagu

SEQ ID NO: 1990892 - RNA, 22 nt, Human
uucuuucuggcuaugcauuuga

SEQ ID NO: 1990893 - RNA, 13 nt, Human
uucuuucuuccuc

SEQ ID NO: 1990894 - RNA, 15 nt, Human
uucuuucuuccucug

SEQ ID NO: 1990895 - RNA, 13 nt, Human
uucuugcaaagua

SEQ ID NO: 1990896 - RNA, 21 nt, Human
uucuuggcaauaaauuuugaa

SEQ ID NO: 1990897 - RNA, 22 nt, Human
uucuuggcaauaaauuuugaaa

SEQ ID NO: 1990898 - RNA, 20 nt, Human
uucuugaucaguaguuugca

SEQ ID NO: 1990899 - RNA, 20 nt, Human
uucuugauaauuuuccuuua

SEQ ID NO: 1990900 - RNA, 12 nt, Human
uucuugcaaagu

SEQ ID NO: 1990901 - RNA, 18 nt, Human
uucuugauuaaagugauu

SEQ ID NO: 1990902 - RNA, 22 nt, Human
uucuugaucaguaguuugcauu

SEQ ID NO: 1990903 - RNA, 20 nt, Human
uucuguuuuucuaggccugg

SEQ ID NO: 1990904 - RNA, 13 nt, Human
uucuuaaaaagua

SEQ ID NO: 1990905 - RNA, 14 nt, Human
uucuuaaaaaguaa

SEQ ID NO: 1990906 - RNA, 21 nt, Human
uucuguuggccagugugacaa

SEQ ID NO: 1990907 - RNA, 17 nt, Human
uucuguugcugccucau

SEQ ID NO: 1990908 - RNA, 22 nt, Human
uucuguuuuuaaaaauuagccu

SEQ ID NO: 1990909 - RNA, 18 nt, Human
uucuguucuuucuggcua

SEQ ID NO: 1990910 - RNA, 15 nt, Human
uucuguugcugccuc

SEQ ID NO: 1990911 - RNA, 16 nt, Human
uucuguugcugccuca

SEQ ID NO: 1990912 - RNA, 18 nt, Human
aucccaccccauccucca

SEQ ID NO: 1990913 - RNA, 20 nt, Human
aucccaccccauccuccagg

SEQ ID NO: 1990914 - RNA, 23 nt, Human
uucuuccucccucccucuuuccc

SEQ ID NO: 1990915 - RNA, 11 nt, Human
uucuuccucug

SEQ ID NO: 1990916 - RNA, 12 nt, Human
uucuuccucugc

SEQ ID NO: 1990917 - RNA, 13 nt, Human
uucuuccucugcu

SEQ ID NO: 1990918 - RNA, 11 nt, Human
uucuuccuggu

SEQ ID NO: 1990919 - RNA, 13 nt, Human
uucuuaauucuua

SEQ ID NO: 1990920 - RNA, 20 nt, Human
aucaggccaggcccucugcc

SEQ ID NO: 1990921 - RNA, 23 nt, Human
aucaggccaggcccucugcccac

SEQ ID NO: 1990922 - RNA, 22 nt, Human
aucaggccaggcccucugccca

SEQ ID NO: 1990923 - RNA, 21 nt, Human
aucaggccaggcccucugccc

SEQ ID NO: 1990924 - RNA, 21 nt, Human
aucauuggauucugagagcug

SEQ ID NO: 1990925 - RNA, 22 nt, Human
aucauuggauucugagagcugu

SEQ ID NO: 1990926 - RNA, 21 nt, Human
aucauugaaaucuuuuugcuu

SEQ ID NO: 1990927 - RNA, 14 nt, Human
uucuccugccucag

SEQ ID NO: 1990928 - RNA, 12 nt, Human
uucuccugccuc

SEQ ID NO: 1990929 - RNA, 13 nt, Human
uucuccugccuca

SEQ ID NO: 1990930 - RNA, 19 nt, Human
aucauuuacaagacaacau

SEQ ID NO: 1990931 - RNA, 14 nt, Human
aucauuuacaagac

SEQ ID NO: 1990932 - RNA, 22 nt, Human
aucauuucaccugcugcuugcc

SEQ ID NO: 1990933 - RNA, 13 nt, Human
uucugccgcagcc

SEQ ID NO: 1990934 - RNA, 14 nt, Human
uucugacccaugcu

SEQ ID NO: 1990935 - RNA, 22 nt, Human
uucugacacgacuucuguuuca

SEQ ID NO: 1990936 - RNA, 15 nt, Human
uucugcacacagcac

SEQ ID NO: 1990937 - RNA, 12 nt, Human
uucucuuugaaa

SEQ ID NO: 1990938 - RNA, 21 nt, Human
uucucuuuucaagaaguucuu

SEQ ID NO: 1990939 - RNA, 16 nt, Human
uucucuuuucaaaaca

SEQ ID NO: 1990940 - RNA, 17 nt, Human
uucucuacucuagggaa

SEQ ID NO: 1990941 - RNA, 13 nt, Human
uucucuaauaaua

SEQ ID NO: 1990942 - RNA, 14 nt, Human
uucucuaauaauaa

SEQ ID NO: 1990943 - RNA, 15 nt, Human
uucucuaauaauaaa

SEQ ID NO: 1990944 - RNA, 17 nt, Human
uucucuaauaauaaaua

SEQ ID NO: 1990945 - RNA, 19 nt, Human
uucucuaauaauaaauagu

SEQ ID NO: 1990946 - RNA, 20 nt, Human
uucucuaauaauaaauaguu

SEQ ID NO: 1990947 - RNA, 15 nt, Human
uucugccgcagcccu

SEQ ID NO: 1990948 - RNA, 14 nt, Human
uucugccgcagccc

SEQ ID NO: 1990949 - RNA, 18 nt, Human
uucuggcuaugcauuuga

SEQ ID NO: 1990950 - RNA, 20 nt, Human
uucuggcuaugcauuugaaa

SEQ ID NO: 1990951 - RNA, 22 nt, Human
uucugguugaugccugugaacu

SEQ ID NO: 1990952 - RNA, 19 nt, Human
uucugguuguuuuuaaaca

SEQ ID NO: 1990953 - RNA, 16 nt, Human
aucauuuuuuauauau

SEQ ID NO: 1990954 - RNA, 17 nt, Human
aucauuuuuuauauaua

SEQ ID NO: 1990955 - RNA, 18 nt, Human
aucauuuuuuauauauau

SEQ ID NO: 1990956 - RNA, 21 nt, Human
aucauuuuuuauauauaugca

SEQ ID NO: 1990957 - RNA, 14 nt, Human
aucauuuuuuccug

SEQ ID NO: 1990958 - RNA, 15 nt, Human
aucauuuuuuccugu

SEQ ID NO: 1990959 - RNA, 21 nt, Human
aucauuuuuuccuguuuggga

SEQ ID NO: 1990960 - RNA, 23 nt, Human
aucauuuuuuccuguuugggaag

SEQ ID NO: 1990961 - RNA, 15 nt, Human
auccaaaagaaaaac

SEQ ID NO: 1990962 - RNA, 12 nt, Human
auccaaguggcc

SEQ ID NO: 1990963 - RNA, 13 nt, Human
auccaaguggccu

SEQ ID NO: 1990964 - RNA, 12 nt, Human
auccaaaagaaa

SEQ ID NO: 1990965 - RNA, 14 nt, Human
auccaaaagaaaaa

SEQ ID NO: 1990966 - RNA, 14 nt, Human
auccaguuuuucau

SEQ ID NO: 1990967 - RNA, 15 nt, Human
aucccaccaacccuc

SEQ ID NO: 1990968 - RNA, 17 nt, Human
uucaaaauaaaaaugag

SEQ ID NO: 1990969 - RNA, 20 nt, Human
uucaaaaguuuguuugcuua

SEQ ID NO: 1990970 - RNA, 21 nt, Human
uucaaaauuguuacaaauugu

SEQ ID NO: 1990971 - RNA, 15 nt, Human
uucaagaacuuguuu

SEQ ID NO: 1990972 - RNA, 23 nt, Human
uucaagaaguucuuugauucugu

SEQ ID NO: 1990973 - RNA, 16 nt, Human
uucaaaauuguuacaa

SEQ ID NO: 1990974 - RNA, 19 nt, Human
uucaagaaaugaagagcug

SEQ ID NO: 1990975 - RNA, 14 nt, Human
uucaagaacuuguu

SEQ ID NO: 1990976 - RNA, 17 nt, Human
uucaagcugcuuuuugu

SEQ ID NO: 1990977 - RNA, 14 nt, Human
uucaagcuuauuuu

SEQ ID NO: 1990978 - RNA, 19 nt, Human
uucaagcuuauuuuggaga

SEQ ID NO: 1990979 - RNA, 20 nt, Human
uucaagcuuauuuuggagag

SEQ ID NO: 1990980 - RNA, 21 nt, Human
uucaagcgauucuucugcuuc

SEQ ID NO: 1990981 - RNA, 16 nt, Human
uucaagcgauucucuu

SEQ ID NO: 1990982 - RNA, 23 nt, Human
uucaagcgauucucuugccucag

SEQ ID NO: 1990983 - RNA, 14 nt, Human
uucaagcugcuuuu

SEQ ID NO: 1990984 - RNA, 13 nt, Human
uucaagaucaaaa

SEQ ID NO: 1990985 - RNA, 18 nt, Human
uucaagacugaauuccaa

SEQ ID NO: 1990986 - RNA, 18 nt, Human
uuauuuuuagacagaguc

SEQ ID NO: 1990987 - RNA, 14 nt, Human
uuauuuuuagaauu

SEQ ID NO: 1990988 - RNA, 20 nt, Human
uuauuuuuagaauuuuguga

SEQ ID NO: 1990989 - RNA, 17 nt, Human
uuauuuuuagacagagu

SEQ ID NO: 1990990 - RNA, 16 nt, Human
uuauuuuuaagaaaga

SEQ ID NO: 1990991 - RNA, 22 nt, Human
uuaguuuugcuuuuaguuuuuc

SEQ ID NO: 1990992 - RNA, 14 nt, Human
uuaguuuugcuuuu

SEQ ID NO: 1990993 - RNA, 18 nt, Human
uuaguuuugcuuuuaguu

SEQ ID NO: 1990994 - RNA, 15 nt, Human
uuaguuuuucugucc

SEQ ID NO: 1990995 - RNA, 14 nt, Human
uuaguuuugugcuu

SEQ ID NO: 1990996 - RNA, 22 nt, Human
uuaguuuugugcuuaguuaaau

SEQ ID NO: 1990997 - RNA, 13 nt, Human
uuaguuuugcaua

SEQ ID NO: 1990998 - RNA, 13 nt, Human
uuaguuuugcuuu

SEQ ID NO: 1990999 - RNA, 17 nt, Human
uuaguuuuauuuucuaa

SEQ ID NO: 1991000 - RNA, 13 nt, Human
uuauuuuuuucug

SEQ ID NO: 1991001 - RNA, 17 nt, Human
uuauuuuuuucugaauu

SEQ ID NO: 1991002 - RNA, 23 nt, Human
uucaaaacaaacagaugcucuga

SEQ ID NO: 1991003 - RNA, 16 nt, Human
uucaaaacaaacagau

SEQ ID NO: 1991004 - RNA, 12 nt, Human
uuauuuuugcuu

SEQ ID NO: 1991005 - RNA, 22 nt, Human
uuauuuuuagaauuuugugaaa

SEQ ID NO: 1991006 - RNA, 13 nt, Human
uucacaguucucu

SEQ ID NO: 1991007 - RNA, 15 nt, Human
uucacauguuuucaa

SEQ ID NO: 1991008 - RNA, 20 nt, Human
uucacaguucucuccuucuu

SEQ ID NO: 1991009 - RNA, 15 nt, Human
uucacaguucucucc

SEQ ID NO: 1991010 - RNA, 20 nt, Human
uucacagaugggugcuugga

SEQ ID NO: 1991011 - RNA, 12 nt, Human
uucacacuugaa

SEQ ID NO: 1991012 - RNA, 14 nt, Human
uucacaccccaccu

SEQ ID NO: 1991013 - RNA, 15 nt, Human
uucacaccccaccug

SEQ ID NO: 1991014 - RNA, 16 nt, Human
uucaaguauuuaagcc

SEQ ID NO: 1991015 - RNA, 14 nt, Human
uucacaccugcaga

SEQ ID NO: 1991016 - RNA, 16 nt, Human
uucacaccccaccugc

SEQ ID NO: 1991017 - RNA, 17 nt, Human
uucacaccccaccugcg

SEQ ID NO: 1991018 - RNA, 19 nt, Human
uucacaccccaccugcgcu

SEQ ID NO: 1991019 - RNA, 23 nt, Human
uucacaagacccaaaaggcagaa

SEQ ID NO: 1991020 - RNA, 17 nt, Human
uucaagugauucucaug

SEQ ID NO: 1991021 - RNA, 17 nt, Human
uucaaguacacugaauu

SEQ ID NO: 1991022 - RNA, 14 nt, Human
uucaaguauuuaag

SEQ ID NO: 1991023 - RNA, 15 nt, Human
uucaaguauuuaagc

SEQ ID NO: 1991024 - RNA, 15 nt, Human
uucaaguacacugaa

SEQ ID NO: 1991025 - RNA, 17 nt, Human
auaggaaaaacugauuu

SEQ ID NO: 1991026 - RNA, 16 nt, Human
auaggaaaaacugauu

SEQ ID NO: 1991027 - RNA, 14 nt, Human
auaggaaaaacuga

SEQ ID NO: 1991028 - RNA, 12 nt, Human
auaggaaaaacu

SEQ ID NO: 1991029 - RNA, 15 nt, Human
auagcuuuuuucucu

SEQ ID NO: 1991030 - RNA, 22 nt, Human
auagcuuuucccuuuuuuuaag

SEQ ID NO: 1991031 - RNA, 16 nt, Human
uucacauguuuucaaa

SEQ ID NO: 1991032 - RNA, 17 nt, Human
uucacauguuuucaaau

SEQ ID NO: 1991033 - RNA, 18 nt, Human
uucacauguuuucaaaug

SEQ ID NO: 1991034 - RNA, 19 nt, Human
uucacauguuuucaaaugg

SEQ ID NO: 1991035 - RNA, 20 nt, Human
uucacauguuuucaaaugga

SEQ ID NO: 1991036 - RNA, 22 nt, Human
auaggaauugacccacaagaaa

SEQ ID NO: 1991037 - RNA, 21 nt, Human
auaggaaaugguauccagaau

SEQ ID NO: 1991038 - RNA, 17 nt, Human
auaggcguaacuaauuu

SEQ ID NO: 1991039 - RNA, 13 nt, Human
auaggacuuguuu

SEQ ID NO: 1991040 - RNA, 15 nt, Human
auaggacuuguuuuu

SEQ ID NO: 1991041 - RNA, 16 nt, Human
auaggacuuguuuuug

SEQ ID NO: 1991042 - RNA, 22 nt, Human
auaggccugcuuugucuccucu

SEQ ID NO: 1991043 - RNA, 16 nt, Human
auauaacuuauauugu

SEQ ID NO: 1991044 - RNA, 20 nt, Human
auauaacuuauauuguaaga

SEQ ID NO: 1991045 - RNA, 21 nt, Human
auauaacuuauauuguaagaa

SEQ ID NO: 1991046 - RNA, 13 nt, Human
auauauaaccagu

SEQ ID NO: 1991047 - RNA, 12 nt, Human
auauauaaccag

SEQ ID NO: 1991048 - RNA, 22 nt, Human
auauaacuuauauuguaagaaa

SEQ ID NO: 1991049 - RNA, 15 nt, Human
auauauauauauauu

SEQ ID NO: 1991050 - RNA, 16 nt, Human
auauauauaucuguau

SEQ ID NO: 1991051 - RNA, 21 nt, Human
auauauauuuuuuucugaaau

SEQ ID NO: 1991052 - RNA, 16 nt, Human
auauauaugugugugu

SEQ ID NO: 1991053 - RNA, 22 nt, Human
auauauaugcauauauauaugu

SEQ ID NO: 1991054 - RNA, 15 nt, Human
uucacugucugucug

SEQ ID NO: 1991055 - RNA, 16 nt, Human
uucacugucugucugg

SEQ ID NO: 1991056 - RNA, 22 nt, Human
uucacuguccuccaagccagcg

SEQ ID NO: 1991057 - RNA, 15 nt, Human
uucacuuacagcacc

SEQ ID NO: 1991058 - RNA, 22 nt, Human
uucacuuaaguuaguuccacug

SEQ ID NO: 1991059 - RNA, 18 nt, Human
auauauccacacauuugu

SEQ ID NO: 1991060 - RNA, 16 nt, Human
auauaucccugauaaa

SEQ ID NO: 1991061 - RNA, 17 nt, Human
auauaucccugauaaau

SEQ ID NO: 1991062 - RNA, 20 nt, Human
auauaucccugauaaauauu

SEQ ID NO: 1991063 - RNA, 22 nt, Human
auauaucccugauaaauauuca

SEQ ID NO: 1991064 - RNA, 14 nt, Human
auauaucucaaauu

SEQ ID NO: 1991065 - RNA, 16 nt, Human
auauaucucaaauugu

SEQ ID NO: 1991066 - RNA, 19 nt, Human
auauaucucaaauuguaau

SEQ ID NO: 1991067 - RNA, 19 nt, Human
auauaugaaaacuaaguuc

SEQ ID NO: 1991068 - RNA, 18 nt, Human
auaguucuagugcagcug

SEQ ID NO: 1991069 - RNA, 19 nt, Human
auaguuauguaaauaauuc

SEQ ID NO: 1991070 - RNA, 14 nt, Human
auaguuauguaaau

SEQ ID NO: 1991071 - RNA, 15 nt, Human
auaguuauguaaaua

SEQ ID NO: 1991072 - RNA, 16 nt, Human
auaguuauguaaauaa

SEQ ID NO: 1991073 - RNA, 17 nt, Human
auaguuauguaaauaau

SEQ ID NO: 1991074 - RNA, 18 nt, Human
auaguuauguaaauaauu

SEQ ID NO: 1991075 - RNA, 21 nt, Human
auaguuacuguaaaaugcaaa

SEQ ID NO: 1991076 - RNA, 22 nt, Human
auaguuaagcgugcauaaguua

SEQ ID NO: 1991077 - RNA, 13 nt, Human
auaguuacuguaa

SEQ ID NO: 1991078 - RNA, 15 nt, Human
auaguuacuguaaaa

SEQ ID NO: 1991079 - RNA, 17 nt, Human
auaguuacuguaaaaug

SEQ ID NO: 1991080 - RNA, 18 nt, Human
auaguuacuguaaaaugc

SEQ ID NO: 1991081 - RNA, 18 nt, Human
auaguuuuauuuauauuu

SEQ ID NO: 1991082 - RNA, 24 nt, Human
auaguuuuauuuauauuuauugac

SEQ ID NO: 1991083 - RNA, 16 nt, Human
auaguuuuauuuauau

SEQ ID NO: 1991084 - RNA, 20 nt, Human
auaguuguaccgcaauguga

SEQ ID NO: 1991085 - RNA, 22 nt, Human
auaguuggcuaggaccccucca

SEQ ID NO: 1991086 - RNA, 17 nt, Human
auaguguuauugagaga

SEQ ID NO: 1991087 - RNA, 23 nt, Human
auaguguggaaauuaagaagaaa

SEQ ID NO: 1991088 - RNA, 16 nt, Human
auaguggggagacuuc

SEQ ID NO: 1991089 - RNA, 16 nt, Human
auagugggaccacaua

SEQ ID NO: 1991090 - RNA, 15 nt, Human
auaguggugugauuu

SEQ ID NO: 1991091 - RNA, 17 nt, Human
auaguggcuuaaaacaa

SEQ ID NO: 1991092 - RNA, 21 nt, Human
auagugaggcaucgcaaugua

SEQ ID NO: 1991093 - RNA, 23 nt, Human
auagugacuuuucaaguauuuaa

SEQ ID NO: 1991094 - RNA, 20 nt, Human
auagugcaauauauuuugua

SEQ ID NO: 1991095 - RNA, 12 nt, Human
auagugcaauau

SEQ ID NO: 1991096 - RNA, 13 nt, Human
auagugcaauaua

SEQ ID NO: 1991097 - RNA, 15 nt, Human
auagugcaauauauu

SEQ ID NO: 1991098 - RNA, 18 nt, Human
auagugcaauauauuuug

SEQ ID NO: 1991099 - RNA, 12 nt, Human
auagugacuuuu

SEQ ID NO: 1991100 - RNA, 17 nt, Human
auagugacuuuucaagu

SEQ ID NO: 1991101 - RNA, 18 nt, Human
auagugacuuuucaagua

SEQ ID NO: 1991102 - RNA, 21 nt, Human
auagugacuuuucaaguauuu

SEQ ID NO: 1991103 - RNA, 22 nt, Human
uucccaccucucucacuccuug

SEQ ID NO: 1991104 - RNA, 12 nt, Human
uucccaccucuc

SEQ ID NO: 1991105 - RNA, 14 nt, Human
uucccacccagccu

SEQ ID NO: 1991106 - RNA, 15 nt, Human
uucccacccagccug

SEQ ID NO: 1991107 - RNA, 16 nt, Human
uucccacccagccugg

SEQ ID NO: 1991108 - RNA, 18 nt, Human
uucccaagcucugcuccu

SEQ ID NO: 1991109 - RNA, 13 nt, Human
uucccaacacaaa

SEQ ID NO: 1991110 - RNA, 15 nt, Human
uucccaacacaaaga

SEQ ID NO: 1991111 - RNA, 23 nt, Human
uucccaacuugccuuugaagagu

SEQ ID NO: 1991112 - RNA, 15 nt, Human
uucccaacuugccuu

SEQ ID NO: 1991113 - RNA, 19 nt, Human
uucccaacuugccuuugaa

SEQ ID NO: 1991114 - RNA, 20 nt, Human
uucccaacuugccuuugaag

SEQ ID NO: 1991115 - RNA, 13 nt, Human
uucccaagcucug

SEQ ID NO: 1991116 - RNA, 14 nt, Human
uucccaagcucugc

SEQ ID NO: 1991117 - RNA, 15 nt, Human
uucccaagcucugcu

SEQ ID NO: 1991118 - RNA, 16 nt, Human
uucccaagcucugcuc

SEQ ID NO: 1991119 - RNA, 22 nt, Human
uuccagugaggcucugcccuug

SEQ ID NO: 1991120 - RNA, 21 nt, Human
uuccagugaggcucugcccuu

SEQ ID NO: 1991121 - RNA, 20 nt, Human
uuccagugaggcucugcccu

SEQ ID NO: 1991122 - RNA, 19 nt, Human
uuccagugaggcucugccc

SEQ ID NO: 1991123 - RNA, 17 nt, Human
uuccagugaggcucugc

SEQ ID NO: 1991124 - RNA, 21 nt, Human
uuccaggggugggacacccug

SEQ ID NO: 1991125 - RNA, 20 nt, Human
uuccaguuuauuccagagcu

SEQ ID NO: 1991126 - RNA, 17 nt, Human
uuccaguuacuuuccaa

SEQ ID NO: 1991127 - RNA, 19 nt, Human
uuccauaaucuggacuccu

SEQ ID NO: 1991128 - RNA, 22 nt, Human
uuccauaaucuggacuccucug

SEQ ID NO: 1991129 - RNA, 23 nt, Human
uuccauaaucuggacuccucugu

SEQ ID NO: 1991130 - RNA, 23 nt, Human
uucccaaagcagugcaugcuguc

SEQ ID NO: 1991131 - RNA, 20 nt, Human
uucccaaaugugugcccagc

SEQ ID NO: 1991132 - RNA, 22 nt, Human
uucccaaaugugugcccagcuu

SEQ ID NO: 1991133 - RNA, 16 nt, Human
uuccauaguuaaagaa

SEQ ID NO: 1991134 - RNA, 17 nt, Human
uuccauaguuaaagaag

SEQ ID NO: 1991135 - RNA, 11 nt, Human
uuccaggcagc

SEQ ID NO: 1991136 - RNA, 17 nt, Human
uuccaggcccgaagcau

SEQ ID NO: 1991137 - RNA, 17 nt, Human
uuccaggggugggacac

SEQ ID NO: 1991138 - RNA, 19 nt, Human
uuccaccaucaagccacca

SEQ ID NO: 1991139 - RNA, 19 nt, Human
uuccaaugccucuugucuu

SEQ ID NO: 1991140 - RNA, 22 nt, Human
uuccacaagagcccaggccucc

SEQ ID NO: 1991141 - RNA, 13 nt, Human
uuccaauauguga

SEQ ID NO: 1991142 - RNA, 14 nt, Human
uuccaauaugugau

SEQ ID NO: 1991143 - RNA, 16 nt, Human
uuccaagucuuugcua

SEQ ID NO: 1991144 - RNA, 15 nt, Human
auauguggaguucau

SEQ ID NO: 1991145 - RNA, 16 nt, Human
auaugugccacauuuu

SEQ ID NO: 1991146 - RNA, 12 nt, Human
auaugugauuuu

SEQ ID NO: 1991147 - RNA, 16 nt, Human
auauguggaguucauc

SEQ ID NO: 1991148 - RNA, 12 nt, Human
uucauucauauu

SEQ ID NO: 1991149 - RNA, 18 nt, Human
auaugugccacauuuucu

SEQ ID NO: 1991150 - RNA, 13 nt, Human
uucauucauauua

SEQ ID NO: 1991151 - RNA, 14 nt, Human
uucauucauauuac

SEQ ID NO: 1991152 - RNA, 18 nt, Human
uucauucauauuacaaua

SEQ ID NO: 1991153 - RNA, 23 nt, Human
uucauucauauuacaauauuugu

SEQ ID NO: 1991154 - RNA, 14 nt, Human
uuccaagagccuga

SEQ ID NO: 1991155 - RNA, 22 nt, Human
uuccaagagccugagagugagg

SEQ ID NO: 1991156 - RNA, 20 nt, Human
uuccaagacuuauuuucaca

SEQ ID NO: 1991157 - RNA, 17 nt, Human
uuccaaggguacuaagg

SEQ ID NO: 1991158 - RNA, 15 nt, Human
uuccaaggguacuaa

SEQ ID NO: 1991159 - RNA, 13 nt, Human
uuccaagagccug

SEQ ID NO: 1991160 - RNA, 18 nt, Human
uucauuuaggugaggaag

SEQ ID NO: 1991161 - RNA, 19 nt, Human
auaucuccgucaacucaua

SEQ ID NO: 1991162 - RNA, 20 nt, Human
auaucuccgucaacucauau

SEQ ID NO: 1991163 - RNA, 21 nt, Human
auaucuccgucaacucauauu

SEQ ID NO: 1991164 - RNA, 17 nt, Human
auaucuauaaacacugu

SEQ ID NO: 1991165 - RNA, 22 nt, Human
auaucuaguaauauauuuaaag

SEQ ID NO: 1991166 - RNA, 14 nt, Human
auauauuuuaagac

SEQ ID NO: 1991167 - RNA, 17 nt, Human
auaucuccuuuguauuc

SEQ ID NO: 1991168 - RNA, 23 nt, Human
auaucuccuuuguauucugucuu

SEQ ID NO: 1991169 - RNA, 15 nt, Human
auaugaaaaaugaga

SEQ ID NO: 1991170 - RNA, 16 nt, Human
auaugaaaaaugagau

SEQ ID NO: 1991171 - RNA, 16 nt, Human
auaugaaaacuaaguu

SEQ ID NO: 1991172 - RNA, 20 nt, Human
auaucugaaaauguaugugu

SEQ ID NO: 1991173 - RNA, 17 nt, Human
auaucugaaaauguaug

SEQ ID NO: 1991174 - RNA, 16 nt, Human
auaucugaaaauguau

SEQ ID NO: 1991175 - RNA, 14 nt, Human
auaucuccuuugua

SEQ ID NO: 1991176 - RNA, 14 nt, Human
auaugcacacauuu

SEQ ID NO: 1991177 - RNA, 15 nt, Human
auaugcacacauuuu

SEQ ID NO: 1991178 - RNA, 16 nt, Human
auaugcacacauuuuu

SEQ ID NO: 1991179 - RNA, 21 nt, Human
auaugauuaaaaauaucaaau

SEQ ID NO: 1991180 - RNA, 22 nt, Human
auaugauuaaaaauaucaaauu

SEQ ID NO: 1991181 - RNA, 17 nt, Human
auaugauuaaaaauauc

SEQ ID NO: 1991182 - RNA, 11 nt, Human
auaugauuaaa

SEQ ID NO: 1991183 - RNA, 16 nt, Human
auauguaacaagccac

SEQ ID NO: 1991184 - RNA, 13 nt, Human
auauggucuaaug

SEQ ID NO: 1991185 - RNA, 14 nt, Human
auauggucuaaugu

SEQ ID NO: 1991186 - RNA, 15 nt, Human
auauggucuaauguu

SEQ ID NO: 1991187 - RNA, 16 nt, Human
auauggucuaauguuu

SEQ ID NO: 1991188 - RNA, 17 nt, Human
auauggucuaauguuua

SEQ ID NO: 1991189 - RNA, 21 nt, Human
auauggugguaauaagggaaa

SEQ ID NO: 1991190 - RNA, 17 nt, Human
auauguaacaagccacc

SEQ ID NO: 1991191 - RNA, 22 nt, Human
auauguaaaugguaugucauuc

SEQ ID NO: 1991192 - RNA, 12 nt, Human
auauguacauuu

SEQ ID NO: 1991193 - RNA, 13 nt, Human
auauguacauuuc

SEQ ID NO: 1991194 - RNA, 15 nt, Human
auauguacauuucua

SEQ ID NO: 1991195 - RNA, 18 nt, Human
auaugugaacgcccagag

SEQ ID NO: 1991196 - RNA, 22 nt, Human
auaugugaaggaccuucacucu

SEQ ID NO: 1991197 - RNA, 15 nt, Human
auauaugugugugug

SEQ ID NO: 1991198 - RNA, 14 nt, Human
auauauuuaaaggg

SEQ ID NO: 1991199 - RNA, 20 nt, Human
auauauuuaaagggaaauug

SEQ ID NO: 1991200 - RNA, 21 nt, Human
auauauuuaaagggaaauuga

SEQ ID NO: 1991201 - RNA, 13 nt, Human
auauauuuuaaga

SEQ ID NO: 1991202 - RNA, 12 nt, Human
auauauuuuaag

SEQ ID NO: 1991203 - RNA, 19 nt, Human
uucauauuuaauauaugug

SEQ ID NO: 1991204 - RNA, 13 nt, Human
uucauauuuaauu

SEQ ID NO: 1991205 - RNA, 17 nt, Human
uucaucccucuggggcu

SEQ ID NO: 1991206 - RNA, 14 nt, Human
uucauccccucaga

SEQ ID NO: 1991207 - RNA, 15 nt, Human
uucauccccucagaa

SEQ ID NO: 1991208 - RNA, 19 nt, Human
auauauggucuaauguuua

SEQ ID NO: 1991209 - RNA, 20 nt, Human
auauauggucuaauguuuaa

SEQ ID NO: 1991210 - RNA, 21 nt, Human
uucaucccucuggggcuguuc

SEQ ID NO: 1991211 - RNA, 20 nt, Human
uucagaaagccuuucauuuu

SEQ ID NO: 1991212 - RNA, 21 nt, Human
uucagaaagccuuucauuuug

SEQ ID NO: 1991213 - RNA, 19 nt, Human
uucagaaagccuuucauuu

SEQ ID NO: 1991214 - RNA, 19 nt, Human
uucagaaauacagauaaau

SEQ ID NO: 1991215 - RNA, 11 nt, Human
uucagaaaugu

SEQ ID NO: 1991216 - RNA, 13 nt, Human
uucagaaaugugu

SEQ ID NO: 1991217 - RNA, 13 nt, Human
uucagugccuuau

SEQ ID NO: 1991218 - RNA, 12 nt, Human
uucagugccuua

SEQ ID NO: 1991219 - RNA, 16 nt, Human
uucagugccaaaaaca

SEQ ID NO: 1991220 - RNA, 21 nt, Human
uucauacagggaugguguuca

SEQ ID NO: 1991221 - RNA, 18 nt, Human
uucagugccuuauggaac

SEQ ID NO: 1991222 - RNA, 19 nt, Human
uucauaauuauuauuuggc

SEQ ID NO: 1991223 - RNA, 14 nt, Human
uucauauucagcuu

SEQ ID NO: 1991224 - RNA, 18 nt, Human
uucauauucaugcaagua

SEQ ID NO: 1991225 - RNA, 13 nt, Human
uucauauuacaau

SEQ ID NO: 1991226 - RNA, 15 nt, Human
uucauauuacaauau

SEQ ID NO: 1991227 - RNA, 16 nt, Human
uucauauuacaauauu

SEQ ID NO: 1991228 - RNA, 23 nt, Human
auuucuuuugccguuauuaaaaa

SEQ ID NO: 1991229 - RNA, 24 nt, Human
auuuguacuuucuguuaaaaugca

SEQ ID NO: 1991230 - RNA, 20 nt, Human
auuuuacuguacagacagaa

SEQ ID NO: 1991231 - RNA, 22 nt, Human
auuuuacuguacagacagaaaa

SEQ ID NO: 1991232 - RNA, 13 nt, Human
auuuuaauuucaa

SEQ ID NO: 1991233 - RNA, 18 nt, Human
auuuuaauuucaagcuua

SEQ ID NO: 1991234 - RNA, 19 nt, Human
auuuuaauuucaagcuuau

SEQ ID NO: 1991235 - RNA, 17 nt, Human
auuuuaauuuuuaaaug

SEQ ID NO: 1991236 - RNA, 18 nt, Human
auuuuaauuuuuaaaugc

SEQ ID NO: 1991237 - RNA, 19 nt, Human
auuuuaauuuuuaaaugca

SEQ ID NO: 1991238 - RNA, 16 nt, Human
auuuuauucuugauca

SEQ ID NO: 1991239 - RNA, 18 nt, Human
auuuuauucuugaucagu

SEQ ID NO: 1991240 - RNA, 17 nt, Human
auuuuauuaugcaugaa

SEQ ID NO: 1991241 - RNA, 14 nt, Human
auuuuauuaugcau

SEQ ID NO: 1991242 - RNA, 15 nt, Human
auuuuauuaugcaug

SEQ ID NO: 1991243 - RNA, 13 nt, Human
auuuuauuaugca

SEQ ID NO: 1991244 - RNA, 14 nt, Human
auuuuauguugcau

SEQ ID NO: 1991245 - RNA, 21 nt, Human
auuuuauguugcauagaauaa

SEQ ID NO: 1991246 - RNA, 18 nt, Human
auuuuauguugcauagaa

SEQ ID NO: 1991247 - RNA, 21 nt, Human
auuuuacuuuaaaaggagcca

SEQ ID NO: 1991248 - RNA, 21 nt, Human
auuucuaagucaaacacuugu

SEQ ID NO: 1991249 - RNA, 21 nt, Human
auuucuaaaucuccaaaauaa

SEQ ID NO: 1991250 - RNA, 12 nt, Human
auuucuaaaucu

SEQ ID NO: 1991251 - RNA, 13 nt, Human
auuucuaaaucuc

SEQ ID NO: 1991252 - RNA, 23 nt, Human
auuuccugggagcuuuuguagaa

SEQ ID NO: 1991253 - RNA, 22 nt, Human
auuuccugggagcuuuuguaga

SEQ ID NO: 1991254 - RNA, 16 nt, Human
auuuauuauggcacau

SEQ ID NO: 1991255 - RNA, 14 nt, Human
auuuccugugucuu

SEQ ID NO: 1991256 - RNA, 16 nt, Human
auuuagggaguauucu

SEQ ID NO: 1991257 - RNA, 18 nt, Human
auuuagggaguauucuaa

SEQ ID NO: 1991258 - RNA, 19 nt, Human
auuuagggaguauucuaau

SEQ ID NO: 1991259 - RNA, 20 nt, Human
auuuagggaguauucuaaua

SEQ ID NO: 1991260 - RNA, 24 nt, Human
auuuagggaguauucuaauaagcu

SEQ ID NO: 1991261 - RNA, 20 nt, Human
auuuauuaaaugcccagccc

SEQ ID NO: 1991262 - RNA, 22 nt, Human
auuuauuaaaugcccagccccu

SEQ ID NO: 1991263 - RNA, 13 nt, Human
auuuauuauggca

SEQ ID NO: 1991264 - RNA, 21 nt, Human
auuuggaauaaaaauuccaga

SEQ ID NO: 1991265 - RNA, 22 nt, Human
auuuggaauaaaaauuccagaa

SEQ ID NO: 1991266 - RNA, 14 nt, Human
auuuggaauuagaa

SEQ ID NO: 1991267 - RNA, 15 nt, Human
auuugggguauuuau

SEQ ID NO: 1991268 - RNA, 18 nt, Human
auuuggaccauuuuccug

SEQ ID NO: 1991269 - RNA, 22 nt, Human
auuuggggauucagauuucucu

SEQ ID NO: 1991270 - RNA, 14 nt, Human
auuuggaccauuuu

SEQ ID NO: 1991271 - RNA, 17 nt, Human
auuuggaccauuuuccu

SEQ ID NO: 1991272 - RNA, 18 nt, Human
auuugguaauguuuuuaa

SEQ ID NO: 1991273 - RNA, 15 nt, Human
auuugguauccuuau

SEQ ID NO: 1991274 - RNA, 17 nt, Human
auuuggugguuucagaa

SEQ ID NO: 1991275 - RNA, 15 nt, Human
auuuguacuuucugu

SEQ ID NO: 1991276 - RNA, 18 nt, Human
auuuguacuuucuguuaa

SEQ ID NO: 1991277 - RNA, 19 nt, Human
auuuguacuuucuguuaaa

SEQ ID NO: 1991278 - RNA, 20 nt, Human
auuuguacuuucuguuaaaa

SEQ ID NO: 1991279 - RNA, 22 nt, Human
auuuguacuuucuguuaaaaug

SEQ ID NO: 1991280 - RNA, 21 nt, Human
auuugguuuucacauuggaaa

SEQ ID NO: 1991281 - RNA, 22 nt, Human
auuugguuuucacauuggaaac

SEQ ID NO: 1991282 - RNA, 15 nt, Human
auuugguuuucacau

SEQ ID NO: 1991283 - RNA, 17 nt, Human
auuugguuuucacauug

SEQ ID NO: 1991284 - RNA, 18 nt, Human
auuuggugguuucagaaa

SEQ ID NO: 1991285 - RNA, 20 nt, Human
auuuggugguuucagaaaug

SEQ ID NO: 1991286 - RNA, 20 nt, Human
auuugaauguaugcuucaua

SEQ ID NO: 1991287 - RNA, 21 nt, Human
auuugaauguaugcuucauac

SEQ ID NO: 1991288 - RNA, 22 nt, Human
auuugaauguaugcuucauaca

SEQ ID NO: 1991289 - RNA, 17 nt, Human
auuugaauguaugcuuc

SEQ ID NO: 1991290 - RNA, 18 nt, Human
auuugaauguaugcuuca

SEQ ID NO: 1991291 - RNA, 20 nt, Human
auuucuuuugccguuauuaa

SEQ ID NO: 1991292 - RNA, 20 nt, Human
auuucuuuucaccauucgua

SEQ ID NO: 1991293 - RNA, 15 nt, Human
auuugaggucuguuc

SEQ ID NO: 1991294 - RNA, 23 nt, Human
auuugaggucuguucuuuccaaa

SEQ ID NO: 1991295 - RNA, 17 nt, Human
auuugagcagggcucag

SEQ ID NO: 1991296 - RNA, 22 nt, Human
auuugaggucuguucuuuccaa

SEQ ID NO: 1991297 - RNA, 14 nt, Human
auugcuacuguccu

SEQ ID NO: 1991298 - RNA, 23 nt, Human
auugcaggagucccugccaucau

SEQ ID NO: 1991299 - RNA, 13 nt, Human
auugcagaauugu

SEQ ID NO: 1991300 - RNA, 16 nt, Human
auugcagaauuguuua

SEQ ID NO: 1991301 - RNA, 19 nt, Human
auugcagaauuguuuagau

SEQ ID NO: 1991302 - RNA, 20 nt, Human
auugcagaauuguuuagauu

SEQ ID NO: 1991303 - RNA, 21 nt, Human
auugcaacaaaauacauucuu

SEQ ID NO: 1991304 - RNA, 22 nt, Human
auugcaacaaaauacauucuuu

SEQ ID NO: 1991305 - RNA, 19 nt, Human
auugcaaucuauaauauuu

SEQ ID NO: 1991306 - RNA, 16 nt, Human
auugcaacaggcuggg

SEQ ID NO: 1991307 - RNA, 13 nt, Human
auugcaacaaaau

SEQ ID NO: 1991308 - RNA, 14 nt, Human
auugcaacaaaaua

SEQ ID NO: 1991309 - RNA, 16 nt, Human
auugcaacaaaauaca

SEQ ID NO: 1991310 - RNA, 17 nt, Human
auugcaacaaaauacau

SEQ ID NO: 1991311 - RNA, 21 nt, Human
auugcaacaggcugggcuuca

SEQ ID NO: 1991312 - RNA, 21 nt, Human
auugaccgacagcuuuccagu

SEQ ID NO: 1991313 - RNA, 21 nt, Human
auugacccacaagaaaugaaa

SEQ ID NO: 1991314 - RNA, 18 nt, Human
auugacaggauuauugga

SEQ ID NO: 1991315 - RNA, 13 nt, Human
auugaccugaggc

SEQ ID NO: 1991316 - RNA, 13 nt, Human
auugcaaagcaaa

SEQ ID NO: 1991317 - RNA, 15 nt, Human
auugcaacaggcugg

SEQ ID NO: 1991318 - RNA, 16 nt, Human
auugcggacagccacg

SEQ ID NO: 1991319 - RNA, 18 nt, Human
auugcggacagccacggc

SEQ ID NO: 1991320 - RNA, 19 nt, Human
auugcggacagccacggcc

SEQ ID NO: 1991321 - RNA, 17 nt, Human
auugcccacgcuggagu

SEQ ID NO: 1991322 - RNA, 21 nt, Human
auugcccacgcuggagugcag

SEQ ID NO: 1991323 - RNA, 23 nt, Human
auugccauuucuuccacaagagc

SEQ ID NO: 1991324 - RNA, 21 nt, Human
auugccaaacauuaauguuga

SEQ ID NO: 1991325 - RNA, 22 nt, Human
auugccaaacauuaauguugau

SEQ ID NO: 1991326 - RNA, 16 nt, Human
auugccaaaacccagc

SEQ ID NO: 1991327 - RNA, 16 nt, Human
auugcauuugcuuuug

SEQ ID NO: 1991328 - RNA, 17 nt, Human
auugccaaaacccagcu

SEQ ID NO: 1991329 - RNA, 18 nt, Human
auugccaaaacccagcug

SEQ ID NO: 1991330 - RNA, 19 nt, Human
auugccaaaacccagcugc

SEQ ID NO: 1991331 - RNA, 20 nt, Human
auugccaaaacccagcugca

SEQ ID NO: 1991332 - RNA, 22 nt, Human
auugccaaaacccagcugcacc

SEQ ID NO: 1991333 - RNA, 13 nt, Human
auugccaaacauu

SEQ ID NO: 1991334 - RNA, 14 nt, Human
auugccaaacauua

SEQ ID NO: 1991335 - RNA, 19 nt, Human
auugccaaacauuaauguu

SEQ ID NO: 1991336 - RNA, 16 nt, Human
auugcauuuccugaca

SEQ ID NO: 1991337 - RNA, 17 nt, Human
auugcauuuccugacag

SEQ ID NO: 1991338 - RNA, 18 nt, Human
auucuccaccugccaggg

SEQ ID NO: 1991339 - RNA, 16 nt, Human
auucuacuuugagugc

SEQ ID NO: 1991340 - RNA, 13 nt, Human
auucuacuuugag

SEQ ID NO: 1991341 - RNA, 21 nt, Human
auucucacagcuccaagaauu

SEQ ID NO: 1991342 - RNA, 22 nt, Human
auucucacagcuccaagaauuu

SEQ ID NO: 1991343 - RNA, 19 nt, Human
auucucacagcuccaagaa

SEQ ID NO: 1991344 - RNA, 14 nt, Human
auucucagaaucuc

SEQ ID NO: 1991345 - RNA, 15 nt, Human
auucucaccagcugu

SEQ ID NO: 1991346 - RNA, 18 nt, Human
auucucaccagcuguguc

SEQ ID NO: 1991347 - RNA, 13 nt, Human
auucuccaccugc

SEQ ID NO: 1991348 - RNA, 20 nt, Human
auucucagaaucucaaauaa

SEQ ID NO: 1991349 - RNA, 18 nt, Human
auucucagaaucucaaau

SEQ ID NO: 1991350 - RNA, 17 nt, Human
auucuccaccugccagg

SEQ ID NO: 1991351 - RNA, 16 nt, Human
auucuccaccugccag

SEQ ID NO: 1991352 - RNA, 20 nt, Human
auugacacuuaaaaaugguu

SEQ ID NO: 1991353 - RNA, 19 nt, Human
auuuaaaauugugaugugu

SEQ ID NO: 1991354 - RNA, 14 nt, Human
auuuaaaagacagc

SEQ ID NO: 1991355 - RNA, 17 nt, Human
auuuaaaagacagcuuu

SEQ ID NO: 1991356 - RNA, 20 nt, Human
auuuaaaauugugauguguc

SEQ ID NO: 1991357 - RNA, 19 nt, Human
auuuaaaacauuaaaauau

SEQ ID NO: 1991358 - RNA, 20 nt, Human
auuuaaaacauuaaaauaua

SEQ ID NO: 1991359 - RNA, 21 nt, Human
auuuaaaacauuaaaauauaa

SEQ ID NO: 1991360 - RNA, 17 nt, Human
auuuaaaacuguaauuu

SEQ ID NO: 1991361 - RNA, 20 nt, Human
auuuaacagaaauguacagc

SEQ ID NO: 1991362 - RNA, 17 nt, Human
auuuaacagaaauguac

SEQ ID NO: 1991363 - RNA, 19 nt, Human
auuuaacagaaauguacag

SEQ ID NO: 1991364 - RNA, 18 nt, Human
auuuaaaggcccuaucug

SEQ ID NO: 1991365 - RNA, 20 nt, Human
auuuaaaggcccuaucuguu

SEQ ID NO: 1991366 - RNA, 21 nt, Human
auuuaaaggcccuaucuguuu

SEQ ID NO: 1991367 - RNA, 17 nt, Human
auuuaaagggaaauuga

SEQ ID NO: 1991368 - RNA, 15 nt, Human
auuuaacagaaaugu

SEQ ID NO: 1991369 - RNA, 16 nt, Human
auuuaacagaaaugua

SEQ ID NO: 1991370 - RNA, 22 nt, Human
auuuaacagggucucuagugcu

SEQ ID NO: 1991371 - RNA, 16 nt, Human
auuuaaccucuaaauu

SEQ ID NO: 1991372 - RNA, 18 nt, Human
auuuaaccucuaaauucu

SEQ ID NO: 1991373 - RNA, 19 nt, Human
auuuaauuuuuuugagaca

SEQ ID NO: 1991374 - RNA, 23 nt, Human
auuuaauuuuuuugagacagagu

SEQ ID NO: 1991375 - RNA, 22 nt, Human
auuuacaacugggggaggguga

SEQ ID NO: 1991376 - RNA, 20 nt, Human
auuuacaacacuuuaauggg

SEQ ID NO: 1991377 - RNA, 16 nt, Human
auuuacaaaugggaaa

SEQ ID NO: 1991378 - RNA, 16 nt, Human
auuguaucugucuuuc

SEQ ID NO: 1991379 - RNA, 21 nt, Human
auuggcucuugaacugagcuu

SEQ ID NO: 1991380 - RNA, 23 nt, Human
auuggcuuuggguugcaggaccu

SEQ ID NO: 1991381 - RNA, 15 nt, Human
auugucuuaauggau

SEQ ID NO: 1991382 - RNA, 14 nt, Human
auugucuuaaugga

SEQ ID NO: 1991383 - RNA, 17 nt, Human
auugucuuaauggauga

SEQ ID NO: 1991384 - RNA, 19 nt, Human
auugucuuaauggaugaaa

SEQ ID NO: 1991385 - RNA, 21 nt, Human
auugucuuaauggaugaaauc

SEQ ID NO: 1991386 - RNA, 23 nt, Human
auugucuuaauggaugaaaucau

SEQ ID NO: 1991387 - RNA, 13 nt, Human
auugugccccugc

SEQ ID NO: 1991388 - RNA, 15 nt, Human
auugugaaauuauuc

SEQ ID NO: 1991389 - RNA, 14 nt, Human
auuguauuacaaau

SEQ ID NO: 1991390 - RNA, 15 nt, Human
auuguauuacaaauc

SEQ ID NO: 1991391 - RNA, 20 nt, Human
auuaccucuuuggaaaagga

SEQ ID NO: 1991392 - RNA, 12 nt, Human
auuaccagggac

SEQ ID NO: 1991393 - RNA, 15 nt, Human
auuaccaccaucccg

SEQ ID NO: 1991394 - RNA, 22 nt, Human
auuaccaccaucccgugcuuuu

SEQ ID NO: 1991395 - RNA, 22 nt, Human
auuaccugaauuuuggcugugu

SEQ ID NO: 1991396 - RNA, 19 nt, Human
auuaccacagacauacuaa

SEQ ID NO: 1991397 - RNA, 19 nt, Human
auuacauuuguaauuuaag

SEQ ID NO: 1991398 - RNA, 13 nt, Human
auuacauuuguaa

SEQ ID NO: 1991399 - RNA, 14 nt, Human
auuacauuuguaau

SEQ ID NO: 1991400 - RNA, 15 nt, Human
auuacauuuguaauu

SEQ ID NO: 1991401 - RNA, 18 nt, Human
auuacauuuguaauuuaa

SEQ ID NO: 1991402 - RNA, 12 nt, Human
auuaauauucau

SEQ ID NO: 1991403 - RNA, 14 nt, Human
uuuuuguuuuucug

SEQ ID NO: 1991404 - RNA, 16 nt, Human
uuuuuguuuuucugcu

SEQ ID NO: 1991405 - RNA, 18 nt, Human
uuuuuguuuuguugcacu

SEQ ID NO: 1991406 - RNA, 19 nt, Human
auuaaguaagucucaaggu

SEQ ID NO: 1991407 - RNA, 15 nt, Human
auuaagguguuugaa

SEQ ID NO: 1991408 - RNA, 17 nt, Human
auuaagguguuugaaaa

SEQ ID NO: 1991409 - RNA, 18 nt, Human
auuaagguguuugaaaau

SEQ ID NO: 1991410 - RNA, 20 nt, Human
auuaagguguuugaaaauag

SEQ ID NO: 1991411 - RNA, 20 nt, Human
auuaagagagucuauuuacg

SEQ ID NO: 1991412 - RNA, 16 nt, Human
auuaagaucucagugg

SEQ ID NO: 1991413 - RNA, 22 nt, Human
uuuuuguuccacaaguuaaaua

SEQ ID NO: 1991414 - RNA, 16 nt, Human
auuauauuuacaaaug

SEQ ID NO: 1991415 - RNA, 13 nt, Human
auuauaauguauu

SEQ ID NO: 1991416 - RNA, 14 nt, Human
auuauaauguauuc

SEQ ID NO: 1991417 - RNA, 19 nt, Human
auuauaauguauucauauu

SEQ ID NO: 1991418 - RNA, 21 nt, Human
auuauaauguauucauauuug

SEQ ID NO: 1991419 - RNA, 22 nt, Human
auuauaauguauucauauuugu

SEQ ID NO: 1991420 - RNA, 13 nt, Human
auuauaauuguug

SEQ ID NO: 1991421 - RNA, 15 nt, Human
auuauaauuguugca

SEQ ID NO: 1991422 - RNA, 16 nt, Human
auuauaauuguugcau

SEQ ID NO: 1991423 - RNA, 18 nt, Human
auuauaauuguugcauag

SEQ ID NO: 1991424 - RNA, 14 nt, Human
auuauagagcagaa

SEQ ID NO: 1991425 - RNA, 16 nt, Human
auuauagagcagaaau

SEQ ID NO: 1991426 - RNA, 17 nt, Human
auuauagagcagaaauu

SEQ ID NO: 1991427 - RNA, 19 nt, Human
auuauagagcagaaauucu

SEQ ID NO: 1991428 - RNA, 21 nt, Human
auuauagagcagaaauucugu

SEQ ID NO: 1991429 - RNA, 23 nt, Human
auuauagagcagaaauucuguuu

SEQ ID NO: 1991430 - RNA, 18 nt, Human
auuagaaaacuuuguuag

SEQ ID NO: 1991431 - RNA, 14 nt, Human
auuagaacccuugc

SEQ ID NO: 1991432 - RNA, 12 nt, Human
auuagaaaacuu

SEQ ID NO: 1991433 - RNA, 16 nt, Human
auuagaaaacuuuguu

SEQ ID NO: 1991434 - RNA, 17 nt, Human
auuagaaaacuuuguua

SEQ ID NO: 1991435 - RNA, 18 nt, Human
auuacuuguugccuauaa

SEQ ID NO: 1991436 - RNA, 18 nt, Human
auuauaaucaccagggcc

SEQ ID NO: 1991437 - RNA, 17 nt, Human
auuauauuuacaaaugg

SEQ ID NO: 1991438 - RNA, 21 nt, Human
auuaucaaguagacuacuguu

SEQ ID NO: 1991439 - RNA, 14 nt, Human
auuauguuuuacug

SEQ ID NO: 1991440 - RNA, 18 nt, Human
auuauuuuauguugcaua

SEQ ID NO: 1991441 - RNA, 14 nt, Human
auuauuuuaaaaga

SEQ ID NO: 1991442 - RNA, 16 nt, Human
auuauuuuauguugca

SEQ ID NO: 1991443 - RNA, 13 nt, Human
auuauuuuaaaag

SEQ ID NO: 1991444 - RNA, 23 nt, Human
auuauuuauuaaaugcccagccc

SEQ ID NO: 1991445 - RNA, 20 nt, Human
auuauucuuucuccuuuuuu

SEQ ID NO: 1991446 - RNA, 13 nt, Human
auuauucuuucuc

SEQ ID NO: 1991447 - RNA, 16 nt, Human
auuauucuuucuccuu

SEQ ID NO: 1991448 - RNA, 19 nt, Human
auuauugagagcccuagaa

SEQ ID NO: 1991449 - RNA, 16 nt, Human
auuauuaaugcuuugg

SEQ ID NO: 1991450 - RNA, 14 nt, Human
auuauuaaugcuuu

SEQ ID NO: 1991451 - RNA, 15 nt, Human
auuauuaaugcuuug

SEQ ID NO: 1991452 - RNA, 22 nt, Human
auucaggaagcucagggccugg

SEQ ID NO: 1991453 - RNA, 21 nt, Human
auucaggaagcucagggccug

SEQ ID NO: 1991454 - RNA, 18 nt, Human
auucagcucugcaagaau

SEQ ID NO: 1991455 - RNA, 14 nt, Human
auucagcucugcaa

SEQ ID NO: 1991456 - RNA, 16 nt, Human
auucaguuguuagugu

SEQ ID NO: 1991457 - RNA, 23 nt, Human
auucaggaagcucagggccuggc

SEQ ID NO: 1991458 - RNA, 21 nt, Human
auucaguuguuagugugucuu

SEQ ID NO: 1991459 - RNA, 14 nt, Human
auucagcucaugga

SEQ ID NO: 1991460 - RNA, 12 nt, Human
auucagccuucu

SEQ ID NO: 1991461 - RNA, 14 nt, Human
auucagccuucuuu

SEQ ID NO: 1991462 - RNA, 15 nt, Human
auucagccuucuuuu

SEQ ID NO: 1991463 - RNA, 16 nt, Human
auucagccuucuuuuu

SEQ ID NO: 1991464 - RNA, 17 nt, Human
auucagccuucuuuuuc

SEQ ID NO: 1991465 - RNA, 20 nt, Human
auucagccuucuuuuucugg

SEQ ID NO: 1991466 - RNA, 21 nt, Human
auucagccuucuuuuucugga

SEQ ID NO: 1991467 - RNA, 22 nt, Human
auucagccuucuuuuucuggac

SEQ ID NO: 1991468 - RNA, 16 nt, Human
auucaaaaugauguau

SEQ ID NO: 1991469 - RNA, 16 nt, Human
auuccccaggaggcca

SEQ ID NO: 1991470 - RNA, 20 nt, Human
auuccauuuacugcauucuu

SEQ ID NO: 1991471 - RNA, 20 nt, Human
auuccccagauugcaacagg

SEQ ID NO: 1991472 - RNA, 22 nt, Human
auuccccacccugaaagcccug

SEQ ID NO: 1991473 - RNA, 19 nt, Human
auucccuuguuauucaaca

SEQ ID NO: 1991474 - RNA, 16 nt, Human
auucccuuguuauuca

SEQ ID NO: 1991475 - RNA, 18 nt, Human
auucccuucaaugcaaaa

SEQ ID NO: 1991476 - RNA, 19 nt, Human
auuccccaggaggccagcc

SEQ ID NO: 1991477 - RNA, 13 nt, Human
auuccacagcugc

SEQ ID NO: 1991478 - RNA, 20 nt, Human
auuccacuuauaggaauuga

SEQ ID NO: 1991479 - RNA, 15 nt, Human
auuccaugaauguuc

SEQ ID NO: 1991480 - RNA, 21 nt, Human
uuuuauucagcucauggacuu

SEQ ID NO: 1991481 - RNA, 23 nt, Human
uuuuauguugacauuuguuuggu

SEQ ID NO: 1991482 - RNA, 19 nt, Human
uuuuauuauuaaugcuuug

SEQ ID NO: 1991483 - RNA, 18 nt, Human
uuuucagauuugcacaaa

SEQ ID NO: 1991484 - RNA, 19 nt, Human
uuuucagcuaggaacaaau

SEQ ID NO: 1991485 - RNA, 15 nt, Human
uuuucagauuugcac

SEQ ID NO: 1991486 - RNA, 17 nt, Human
uuuucagauuugcacaa

SEQ ID NO: 1991487 - RNA, 18 nt, Human
uuuucagauucaggcauu

SEQ ID NO: 1991488 - RNA, 13 nt, Human
uuuucagauuugc

SEQ ID NO: 1991489 - RNA, 14 nt, Human
uuuucagauuugca

SEQ ID NO: 1991490 - RNA, 14 nt, Human
uuuucagauucagg

SEQ ID NO: 1991491 - RNA, 21 nt, Human
uuuucauuagcaaaaaaaguu

SEQ ID NO: 1991492 - RNA, 22 nt, Human
uuuucauuagcaaaaaaaguug

SEQ ID NO: 1991493 - RNA, 23 nt, Human
uuuucauuagcaaaaaaaguugu

SEQ ID NO: 1991494 - RNA, 20 nt, Human
uuuucauuagcaaaaaaagu

SEQ ID NO: 1991495 - RNA, 18 nt, Human
uuuuccauauuuuuacaa

SEQ ID NO: 1991496 - RNA, 14 nt, Human
uuuuccaucuaaaa

SEQ ID NO: 1991497 - RNA, 15 nt, Human
uuuuccaucuaaaaa

SEQ ID NO: 1991498 - RNA, 16 nt, Human
uuuuccaucuaaaaau

SEQ ID NO: 1991499 - RNA, 19 nt, Human
uuuuccagguuuaagcugu

SEQ ID NO: 1991500 - RNA, 14 nt, Human
uuuuccaguauuuu

SEQ ID NO: 1991501 - RNA, 17 nt, Human
uuuuccaguauuuuagu

SEQ ID NO: 1991502 - RNA, 18 nt, Human
uuuuaugugaaacauguu

SEQ ID NO: 1991503 - RNA, 12 nt, Human
uuuuauguugac

SEQ ID NO: 1991504 - RNA, 13 nt, Human
uuuuauguugaca

SEQ ID NO: 1991505 - RNA, 19 nt, Human
uuuuaugugaaacauguuu

SEQ ID NO: 1991506 - RNA, 22 nt, Human
uuuuauguugcauagaauaaaa

SEQ ID NO: 1991507 - RNA, 15 nt, Human
uuuuauguugacauu

SEQ ID NO: 1991508 - RNA, 18 nt, Human
uuuuauguugacauuugu

SEQ ID NO: 1991509 - RNA, 15 nt, Human
uuuuauaagaaaacc

SEQ ID NO: 1991510 - RNA, 19 nt, Human
uuuuauaaggacuuccuga

SEQ ID NO: 1991511 - RNA, 20 nt, Human
uuuuauaaggacuuccugau

SEQ ID NO: 1991512 - RNA, 19 nt, Human
uuuuauaaacuuuaccuuu

SEQ ID NO: 1991513 - RNA, 14 nt, Human
uuuuauaaacuuua

SEQ ID NO: 1991514 - RNA, 17 nt, Human
uuuuauaaacuuuaccu

SEQ ID NO: 1991515 - RNA, 16 nt, Human
auguugaagccuuugu

SEQ ID NO: 1991516 - RNA, 15 nt, Human
auguugaagccuuug

SEQ ID NO: 1991517 - RNA, 19 nt, Human
auguucaucaaugaaugaa

SEQ ID NO: 1991518 - RNA, 21 nt, Human
auguucaucauccuaagcuau

SEQ ID NO: 1991519 - RNA, 14 nt, Human
auguuauauuuuuc

SEQ ID NO: 1991520 - RNA, 20 nt, Human
auguuauauuuuucuuaaaa

SEQ ID NO: 1991521 - RNA, 23 nt, Human
auguuauauuuuucuuaaaaagu

SEQ ID NO: 1991522 - RNA, 16 nt, Human
uuuuaagugcugcauu

SEQ ID NO: 1991523 - RNA, 17 nt, Human
uuuuaagugcugcauuu

SEQ ID NO: 1991524 - RNA, 21 nt, Human
uuuuaagugcugcauuuaaaa

SEQ ID NO: 1991525 - RNA, 14 nt, Human
uuuuaagugaaauu

SEQ ID NO: 1991526 - RNA, 15 nt, Human
uuuuaagugaaauuu

SEQ ID NO: 1991527 - RNA, 16 nt, Human
uuuuaagugaaauuua

SEQ ID NO: 1991528 - RNA, 14 nt, Human
auguuauagcugca

SEQ ID NO: 1991529 - RNA, 18 nt, Human
auguuaguuaguguagau

SEQ ID NO: 1991530 - RNA, 15 nt, Human
auguuaguuuuccuu

SEQ ID NO: 1991531 - RNA, 12 nt, Human
uuuuauaaacuu

SEQ ID NO: 1991532 - RNA, 13 nt, Human
uuuuauaaacuuu

SEQ ID NO: 1991533 - RNA, 19 nt, Human
uuuuaguugcaacuuugua

SEQ ID NO: 1991534 - RNA, 13 nt, Human
uuuuaguuuugcu

SEQ ID NO: 1991535 - RNA, 16 nt, Human
uuuuaguuuuucuguc

SEQ ID NO: 1991536 - RNA, 15 nt, Human
auguuggccaggcug

SEQ ID NO: 1991537 - RNA, 23 nt, Human
uuuuagaguugauacuacaguuu

SEQ ID NO: 1991538 - RNA, 19 nt, Human
uuuuagaugugcugcuuug

SEQ ID NO: 1991539 - RNA, 21 nt, Human
auguuggccaggcugcucuca

SEQ ID NO: 1991540 - RNA, 23 nt, Human
uuuuagcaaagcggguuauaaug

SEQ ID NO: 1991541 - RNA, 23 nt, Human
uuuuagcacagcguuaugugucu

SEQ ID NO: 1991542 - RNA, 13 nt, Human
auguuggccaggc

SEQ ID NO: 1991543 - RNA, 14 nt, Human
auguuggccaggcu

SEQ ID NO: 1991544 - RNA, 16 nt, Human
auguuggccaggcugg

SEQ ID NO: 1991545 - RNA, 16 nt, Human
auguuggccaggcugc

SEQ ID NO: 1991546 - RNA, 19 nt, Human
auguugacaucacuggcau

SEQ ID NO: 1991547 - RNA, 21 nt, Human
auguugacaucacuggcaugg

SEQ ID NO: 1991548 - RNA, 12 nt, Human
auguugacauuu

SEQ ID NO: 1991549 - RNA, 13 nt, Human
auguugacauuug

SEQ ID NO: 1991550 - RNA, 14 nt, Human
auguugacauuugu

SEQ ID NO: 1991551 - RNA, 16 nt, Human
auguugacauuuguuu

SEQ ID NO: 1991552 - RNA, 12 nt, Human
auguugauuucu

SEQ ID NO: 1991553 - RNA, 14 nt, Human
auguugaugcaauc

SEQ ID NO: 1991554 - RNA, 21 nt, Human
auguugaugcaauccuuacaa

SEQ ID NO: 1991555 - RNA, 22 nt, Human
auguugaugcaauccuuacaaa

SEQ ID NO: 1991556 - RNA, 13 nt, Human
auguugauuucua

SEQ ID NO: 1991557 - RNA, 15 nt, Human
auguugauuucuagu

SEQ ID NO: 1991558 - RNA, 11 nt, Human
auuaagaaaua

SEQ ID NO: 1991559 - RNA, 12 nt, Human
auuaagaaauag

SEQ ID NO: 1991560 - RNA, 14 nt, Human
auuaagaagaaaau

SEQ ID NO: 1991561 - RNA, 14 nt, Human
auuaagaagaaacu

SEQ ID NO: 1991562 - RNA, 14 nt, Human
auuaagaaagacua

SEQ ID NO: 1991563 - RNA, 13 nt, Human
auuaagaaagacu

SEQ ID NO: 1991564 - RNA, 23 nt, Human
auuaacuuuuauaaacuuuaccu

SEQ ID NO: 1991565 - RNA, 19 nt, Human
auuaacuuaauaaucaaga

SEQ ID NO: 1991566 - RNA, 19 nt, Human
auuaacuuacccuguauau

SEQ ID NO: 1991567 - RNA, 20 nt, Human
auuaacuuggaugaguuuug

SEQ ID NO: 1991568 - RNA, 16 nt, Human
auuaacuuuuauaaac

SEQ ID NO: 1991569 - RNA, 17 nt, Human
auuaacuuuuauaaacu

SEQ ID NO: 1991570 - RNA, 19 nt, Human
auuaacuuuuauaaacuuu

SEQ ID NO: 1991571 - RNA, 20 nt, Human
auuaacuuuuauaaacuuua

SEQ ID NO: 1991572 - RNA, 12 nt, Human
auuaacuuuuau

SEQ ID NO: 1991573 - RNA, 16 nt, Human
auuaacuuaauaauca

SEQ ID NO: 1991574 - RNA, 14 nt, Human
auuaacuuaauaau

SEQ ID NO: 1991575 - RNA, 17 nt, Human
auuaacugcuuccuaua

SEQ ID NO: 1991576 - RNA, 17 nt, Human
auuaaacuuaaucuaaa

SEQ ID NO: 1991577 - RNA, 16 nt, Human
auuaaacuuaaucuaa

SEQ ID NO: 1991578 - RNA, 19 nt, Human
auuaaacuuaaucuaaaug

SEQ ID NO: 1991579 - RNA, 21 nt, Human
auuaaacuuaaucuaaaugga

SEQ ID NO: 1991580 - RNA, 17 nt, Human
auuaaccacuucagcug

SEQ ID NO: 1991581 - RNA, 20 nt, Human
auuaaccacuucagcugacu

SEQ ID NO: 1991582 - RNA, 18 nt, Human
auuaaccacuucagcuga

SEQ ID NO: 1991583 - RNA, 15 nt, Human
auuaaccaagguaga

SEQ ID NO: 1991584 - RNA, 17 nt, Human
auguuuuucuucucccu

SEQ ID NO: 1991585 - RNA, 18 nt, Human
auguuuuuguacucugca

SEQ ID NO: 1991586 - RNA, 21 nt, Human
auguuuuugaaggcagaaagc

SEQ ID NO: 1991587 - RNA, 15 nt, Human
auguuuuugaaggca

SEQ ID NO: 1991588 - RNA, 19 nt, Human
auguuuuugaaggcagaaa

SEQ ID NO: 1991589 - RNA, 18 nt, Human
auguuuuucuucucccuc

SEQ ID NO: 1991590 - RNA, 12 nt, Human
auguuuuugaag

SEQ ID NO: 1991591 - RNA, 14 nt, Human
auguuuuugaaggc

SEQ ID NO: 1991592 - RNA, 13 nt, Human
auuaaaauauaau

SEQ ID NO: 1991593 - RNA, 13 nt, Human
auuaaaagcaggc

SEQ ID NO: 1991594 - RNA, 18 nt, Human
auuaaaauauaaucucua

SEQ ID NO: 1991595 - RNA, 12 nt, Human
auuaaaauaugc

SEQ ID NO: 1991596 - RNA, 13 nt, Human
auuaaaauaugca

SEQ ID NO: 1991597 - RNA, 14 nt, Human
auuaaaauaugcac

SEQ ID NO: 1991598 - RNA, 18 nt, Human
auuaaaauaugcacuaag

SEQ ID NO: 1991599 - RNA, 20 nt, Human
auuaaaauaugcacuaaguc

SEQ ID NO: 1991600 - RNA, 13 nt, Human
auuaaaaagucuu

SEQ ID NO: 1991601 - RNA, 12 nt, Human
auuaaaaagucu

SEQ ID NO: 1991602 - RNA, 17 nt, Human
auuaaaaauaucaaauu

SEQ ID NO: 1991603 - RNA, 14 nt, Human
auuaaaaagucuuu

SEQ ID NO: 1991604 - RNA, 15 nt, Human
auuaaaaagucuuuu

SEQ ID NO: 1991605 - RNA, 18 nt, Human
auuaaaaagucuuuuaaa

SEQ ID NO: 1991606 - RNA, 23 nt, Human
auuaaaaagucuuuuaaaaagua

SEQ ID NO: 1991607 - RNA, 12 nt, Human
auguugugaaua

SEQ ID NO: 1991608 - RNA, 15 nt, Human
auguugugaauaauu

SEQ ID NO: 1991609 - RNA, 17 nt, Human
auguugugaauaauuac

SEQ ID NO: 1991610 - RNA, 19 nt, Human
auguugugaauaauuacag

SEQ ID NO: 1991611 - RNA, 14 nt, Human
auguuuuccaugag

SEQ ID NO: 1991612 - RNA, 15 nt, Human
auguuuacagaggac

SEQ ID NO: 1991613 - RNA, 17 nt, Human
auguuuacagaggacag

SEQ ID NO: 1991614 - RNA, 19 nt, Human
auguuuacagaggacagua

SEQ ID NO: 1991615 - RNA, 23 nt, Human
auguccaagaagcccaggaaagg

SEQ ID NO: 1991616 - RNA, 15 nt, Human
augucaguuguuauu

SEQ ID NO: 1991617 - RNA, 17 nt, Human
augucaguuguuauuua

SEQ ID NO: 1991618 - RNA, 18 nt, Human
auguccaagaagcccagg

SEQ ID NO: 1991619 - RNA, 19 nt, Human
auguccaagaagcccagga

SEQ ID NO: 1991620 - RNA, 16 nt, Human
augucagugugacuga

SEQ ID NO: 1991621 - RNA, 15 nt, Human
augucagugugacug

SEQ ID NO: 1991622 - RNA, 14 nt, Human
augucaguaugugg

SEQ ID NO: 1991623 - RNA, 21 nt, Human
augucagugugacugaucucu

SEQ ID NO: 1991624 - RNA, 22 nt, Human
augucuauaaaccgaacugaug

SEQ ID NO: 1991625 - RNA, 16 nt, Human
auguccacugguucuu

SEQ ID NO: 1991626 - RNA, 21 nt, Human
auguccaguaagaucacuguu

SEQ ID NO: 1991627 - RNA, 20 nt, Human
augucccaacuuguaaaaau

SEQ ID NO: 1991628 - RNA, 24 nt, Human
augucccuaccgagucucuucucc

SEQ ID NO: 1991629 - RNA, 14 nt, Human
augucccagaaaug

SEQ ID NO: 1991630 - RNA, 23 nt, Human
augucaggggcggggagggugac

SEQ ID NO: 1991631 - RNA, 13 nt, Human
augucaguaugug

SEQ ID NO: 1991632 - RNA, 12 nt, Human
auguauguguaa

SEQ ID NO: 1991633 - RNA, 14 nt, Human
auguaugugcauuu

SEQ ID NO: 1991634 - RNA, 21 nt, Human
augucagcaguugcugguaaa

SEQ ID NO: 1991635 - RNA, 22 nt, Human
augucagcaguugcugguaaaa

SEQ ID NO: 1991636 - RNA, 20 nt, Human
auguaugcuucauacaggga

SEQ ID NO: 1991637 - RNA, 17 nt, Human
auguaugcuucauacag

SEQ ID NO: 1991638 - RNA, 16 nt, Human
auguaucugaaaguca

SEQ ID NO: 1991639 - RNA, 15 nt, Human
auguaucugagcagg

SEQ ID NO: 1991640 - RNA, 15 nt, Human
auguaucaaugagua

SEQ ID NO: 1991641 - RNA, 14 nt, Human
auguaguucauacu

SEQ ID NO: 1991642 - RNA, 14 nt, Human
auguaguuugagga

SEQ ID NO: 1991643 - RNA, 15 nt, Human
auguaguuugaggaa

SEQ ID NO: 1991644 - RNA, 19 nt, Human
auguaguuugaggaaauuu

SEQ ID NO: 1991645 - RNA, 20 nt, Human
auguaguuugaggaaauuug

SEQ ID NO: 1991646 - RNA, 23 nt, Human
auguaguuugaggaaauuugcag

SEQ ID NO: 1991647 - RNA, 24 nt, Human
auguaguuugaggaaauuugcagc

SEQ ID NO: 1991648 - RNA, 22 nt, Human
uuugggggaaaauuuagaaaua

SEQ ID NO: 1991649 - RNA, 23 nt, Human
uuugcucagugucuggcugcaga

SEQ ID NO: 1991650 - RNA, 19 nt, Human
uuugcuaugagcuggggau

SEQ ID NO: 1991651 - RNA, 21 nt, Human
uuugcuaaguaaaucucuucu

SEQ ID NO: 1991652 - RNA, 23 nt, Human
uuugcuaaguaaaucucuucugu

SEQ ID NO: 1991653 - RNA, 13 nt, Human
uuugcccuuuacu

SEQ ID NO: 1991654 - RNA, 23 nt, Human
uuugcccuuuacuugucuuucug

SEQ ID NO: 1991655 - RNA, 22 nt, Human
uuugcccccaaacccccauucu

SEQ ID NO: 1991656 - RNA, 23 nt, Human
uuugcccccaaacccccauucug

SEQ ID NO: 1991657 - RNA, 22 nt, Human
uuugccauguuggccaggcugg

SEQ ID NO: 1991658 - RNA, 12 nt, Human
uuugcacaaaaa

SEQ ID NO: 1991659 - RNA, 17 nt, Human
uuugcacaaaaagauac

SEQ ID NO: 1991660 - RNA, 22 nt, Human
uuuggccugaugaccaauuuua

SEQ ID NO: 1991661 - RNA, 17 nt, Human
uuugggaaguuaaaggg

SEQ ID NO: 1991662 - RNA, 21 nt, Human
uuugggaaguuaaagggaaga

SEQ ID NO: 1991663 - RNA, 22 nt, Human
uuugggaggccaaggugggagg

SEQ ID NO: 1991664 - RNA, 14 nt, Human
uuuggggauauuuu

SEQ ID NO: 1991665 - RNA, 19 nt, Human
uuuggggauucagauuucu

SEQ ID NO: 1991666 - RNA, 19 nt, Human
uuugugaggaagccgcugg

SEQ ID NO: 1991667 - RNA, 18 nt, Human
uuugugaggaagccgcug

SEQ ID NO: 1991668 - RNA, 16 nt, Human
uuugugaguuuguuuc

SEQ ID NO: 1991669 - RNA, 15 nt, Human
uuugugaguuuguuu

SEQ ID NO: 1991670 - RNA, 12 nt, Human
uuuguuugaacu

SEQ ID NO: 1991671 - RNA, 17 nt, Human
uuuguuucuuucucuga

SEQ ID NO: 1991672 - RNA, 22 nt, Human
uuuguuucuuugaauuuucauu

SEQ ID NO: 1991673 - RNA, 13 nt, Human
uuuguuugaacug

SEQ ID NO: 1991674 - RNA, 14 nt, Human
uuuguuugaacuga

SEQ ID NO: 1991675 - RNA, 17 nt, Human
uuuguagaagucacauu

SEQ ID NO: 1991676 - RNA, 17 nt, Human
uuuguacuuucuguuaa

SEQ ID NO: 1991677 - RNA, 18 nt, Human
uuuguacuuucuguuaaa

SEQ ID NO: 1991678 - RNA, 16 nt, Human
uuugugagcaggcugu

SEQ ID NO: 1991679 - RNA, 12 nt, Human
uuugucucuucu

SEQ ID NO: 1991680 - RNA, 12 nt, Human
uuugucuccucu

SEQ ID NO: 1991681 - RNA, 14 nt, Human
uuugucucuucugg

SEQ ID NO: 1991682 - RNA, 19 nt, Human
uuugucugccccaaguuuu

SEQ ID NO: 1991683 - RNA, 21 nt, Human
uuugucugccccaaguuuugu

SEQ ID NO: 1991684 - RNA, 13 nt, Human
uuugucuaagaaa

SEQ ID NO: 1991685 - RNA, 16 nt, Human
uuugucuaagaaacau

SEQ ID NO: 1991686 - RNA, 20 nt, Human
uuugucuaagaaacauugga

SEQ ID NO: 1991687 - RNA, 12 nt, Human
uuugucucagau

SEQ ID NO: 1991688 - RNA, 22 nt, Human
uuuguaacuguuuagaugaaug

SEQ ID NO: 1991689 - RNA, 23 nt, Human
uuuguaacuguuuagaugaaugu

SEQ ID NO: 1991690 - RNA, 17 nt, Human
uuuguaaauuuauguga

SEQ ID NO: 1991691 - RNA, 19 nt, Human
uuuguaaauucugauuucu

SEQ ID NO: 1991692 - RNA, 20 nt, Human
uuuguaaauucugauuucuu

SEQ ID NO: 1991693 - RNA, 13 nt, Human
uuuguaaauuguc

SEQ ID NO: 1991694 - RNA, 12 nt, Human
uuuguaaauucu

SEQ ID NO: 1991695 - RNA, 15 nt, Human
uuuguaaauucugau

SEQ ID NO: 1991696 - RNA, 16 nt, Human
uuuguaaauucugauu

SEQ ID NO: 1991697 - RNA, 13 nt, Human
uuuguagagccag

SEQ ID NO: 1991698 - RNA, 12 nt, Human
uuuguacuuucu

SEQ ID NO: 1991699 - RNA, 15 nt, Human
uuuguacuuucuguu

SEQ ID NO: 1991700 - RNA, 16 nt, Human
uuuguacuuucuguua

SEQ ID NO: 1991701 - RNA, 20 nt, Human
uuuguacaugccauugaaaa

SEQ ID NO: 1991702 - RNA, 14 nt, Human
uuuguaccauuuca

SEQ ID NO: 1991703 - RNA, 20 nt, Human
uuuguacgacgucagauguu

SEQ ID NO: 1991704 - RNA, 15 nt, Human
uuuuaagugcugcau

SEQ ID NO: 1991705 - RNA, 16 nt, Human
uuuuaaguaaggaauu

SEQ ID NO: 1991706 - RNA, 23 nt, Human
uuuuaaggguuuguggaaaauga

SEQ ID NO: 1991707 - RNA, 15 nt, Human
uuuuaaggacugacu

SEQ ID NO: 1991708 - RNA, 21 nt, Human
uuuuaagcuaggaaaagaaau

SEQ ID NO: 1991709 - RNA, 20 nt, Human
uuuuaaggguuuguggaaaa

SEQ ID NO: 1991710 - RNA, 16 nt, Human
uuuuaaggacugacug

SEQ ID NO: 1991711 - RNA, 19 nt, Human
uuuuaaggacugacugagg

SEQ ID NO: 1991712 - RNA, 22 nt, Human
uuuuaaggacugacugaggcag

SEQ ID NO: 1991713 - RNA, 19 nt, Human
uuuuaagccuuuguugaac

SEQ ID NO: 1991714 - RNA, 20 nt, Human
uuuuaagccuuuguugaacu

SEQ ID NO: 1991715 - RNA, 17 nt, Human
uuuuaacuuagagcuuu

SEQ ID NO: 1991716 - RNA, 18 nt, Human
uuuuaacuuagagcuuuu

SEQ ID NO: 1991717 - RNA, 14 nt, Human
uuuuaagaaagaaa

SEQ ID NO: 1991718 - RNA, 16 nt, Human
uuuuaagaggcagggu

SEQ ID NO: 1991719 - RNA, 15 nt, Human
uuuuaagaggcaggg

SEQ ID NO: 1991720 - RNA, 18 nt, Human
uuuuaagaaagaaauacu

SEQ ID NO: 1991721 - RNA, 22 nt, Human
uuuuaagaaagaaauacuguau

SEQ ID NO: 1991722 - RNA, 22 nt, Human
uuuguuugguuauagugcaaua

SEQ ID NO: 1991723 - RNA, 18 nt, Human
uuuguuugaacugauaaa

SEQ ID NO: 1991724 - RNA, 11 nt, Human
uuuuaaaaaca

SEQ ID NO: 1991725 - RNA, 11 nt, Human
uuuuaaaaagu

SEQ ID NO: 1991726 - RNA, 14 nt, Human
uuuuaaaaaguauu

SEQ ID NO: 1991727 - RNA, 18 nt, Human
uuuuaaaaaguauugcca

SEQ ID NO: 1991728 - RNA, 20 nt, Human
uuuuaaaaaguauugccaaa

SEQ ID NO: 1991729 - RNA, 21 nt, Human
uuuuaaaaaguauugccaaac

SEQ ID NO: 1991730 - RNA, 13 nt, Human
uuuguuuguucuu

SEQ ID NO: 1991731 - RNA, 14 nt, Human
uuuuaaaaaacuuu

SEQ ID NO: 1991732 - RNA, 16 nt, Human
uuuguuuguucuuguu

SEQ ID NO: 1991733 - RNA, 16 nt, Human
uuuuaaaacacuucca

SEQ ID NO: 1991734 - RNA, 22 nt, Human
uuuuaaaacacuuccauaaucu

SEQ ID NO: 1991735 - RNA, 14 nt, Human
uuuuaaaacuacuu

SEQ ID NO: 1991736 - RNA, 15 nt, Human
uuuuaaaacuacuua

SEQ ID NO: 1991737 - RNA, 18 nt, Human
uuuuaaaacuacuuagca

SEQ ID NO: 1991738 - RNA, 20 nt, Human
uuuuaaaacuacuuagcacu

SEQ ID NO: 1991739 - RNA, 20 nt, Human
uuaguuuagaacagguuuuu

SEQ ID NO: 1991740 - RNA, 22 nt, Human
uuaguuugcaguuacacuaaaa

SEQ ID NO: 1991741 - RNA, 15 nt, Human
uuaguuucuccaagc

SEQ ID NO: 1991742 - RNA, 21 nt, Human
uuaggugugacugaauuucuu

SEQ ID NO: 1991743 - RNA, 16 nt, Human
uuaggugaggaagcaa

SEQ ID NO: 1991744 - RNA, 16 nt, Human
uuaggugugacugaau

SEQ ID NO: 1991745 - RNA, 20 nt, Human
uuagggaaggauacaaaagc

SEQ ID NO: 1991746 - RNA, 16 nt, Human
uuagcgacaacagauu

SEQ ID NO: 1991747 - RNA, 23 nt, Human
uuagcgacaacagauuggauuuu

SEQ ID NO: 1991748 - RNA, 18 nt, Human
uuagcaaauucuguuuuu

SEQ ID NO: 1991749 - RNA, 12 nt, Human
uuagcaccaggg

SEQ ID NO: 1991750 - RNA, 18 nt, Human
uuagauuuuguguuuauu

SEQ ID NO: 1991751 - RNA, 22 nt, Human
uuagauuuuguguuuauucuug

SEQ ID NO: 1991752 - RNA, 23 nt, Human
uuagauuuuguguuuauucuuga

SEQ ID NO: 1991753 - RNA, 14 nt, Human
uuagcaaaaaaagu

SEQ ID NO: 1991754 - RNA, 16 nt, Human
uuagcaaaaaaaguug

SEQ ID NO: 1991755 - RNA, 18 nt, Human
auaauuuaccugaagucu

SEQ ID NO: 1991756 - RNA, 17 nt, Human
auaauugugugauauuu

SEQ ID NO: 1991757 - RNA, 18 nt, Human
auaauugugugauauuuc

SEQ ID NO: 1991758 - RNA, 19 nt, Human
auaauugugugauauuuca

SEQ ID NO: 1991759 - RNA, 21 nt, Human
auaauugugugauauuucaga

SEQ ID NO: 1991760 - RNA, 14 nt, Human
auaauuguugcaua

SEQ ID NO: 1991761 - RNA, 22 nt, Human
auaauugugugauauuucagaa

SEQ ID NO: 1991762 - RNA, 23 nt, Human
auaauugugugauauuucagaaa

SEQ ID NO: 1991763 - RNA, 18 nt, Human
uuagccaagugugguaga

SEQ ID NO: 1991764 - RNA, 11 nt, Human
uuagcacagcg

SEQ ID NO: 1991765 - RNA, 17 nt, Human
uuagcaucuaauuucaa

SEQ ID NO: 1991766 - RNA, 16 nt, Human
uuagccuuugucccag

SEQ ID NO: 1991767 - RNA, 14 nt, Human
uuagcggagacgga

SEQ ID NO: 1991768 - RNA, 15 nt, Human
uuagcgacaacagau

SEQ ID NO: 1991769 - RNA, 22 nt, Human
auaauugacaggauuauuggaa

SEQ ID NO: 1991770 - RNA, 14 nt, Human
auaauucuuuuuua

SEQ ID NO: 1991771 - RNA, 17 nt, Human
auaauucuuuuuuauua

SEQ ID NO: 1991772 - RNA, 19 nt, Human
auaauucuuuuuuauuaau

SEQ ID NO: 1991773 - RNA, 21 nt, Human
auaauucuuuuuuauuaauca

SEQ ID NO: 1991774 - RNA, 22 nt, Human
auaauucuuuuuuauuaaucac

SEQ ID NO: 1991775 - RNA, 14 nt, Human
auaauugugugaua

SEQ ID NO: 1991776 - RNA, 15 nt, Human
auaaugaaugaaaca

SEQ ID NO: 1991777 - RNA, 12 nt, Human
auaaugaaugac

SEQ ID NO: 1991778 - RNA, 15 nt, Human
auaaugcgugcauac

SEQ ID NO: 1991779 - RNA, 18 nt, Human
auaauccugcaaaguaca

SEQ ID NO: 1991780 - RNA, 18 nt, Human
auaaucuggacuccucug

SEQ ID NO: 1991781 - RNA, 19 nt, Human
auaaucuggacuccucugu

SEQ ID NO: 1991782 - RNA, 20 nt, Human
auaaucuggacuccucuguc

SEQ ID NO: 1991783 - RNA, 18 nt, Human
auaauccuaaacauauga

SEQ ID NO: 1991784 - RNA, 14 nt, Human
auaauccugcaaag

SEQ ID NO: 1991785 - RNA, 15 nt, Human
auaauccugcaaagu

SEQ ID NO: 1991786 - RNA, 18 nt, Human
auaauagauugugaauaa

SEQ ID NO: 1991787 - RNA, 19 nt, Human
auaauagucaccugcuguu

SEQ ID NO: 1991788 - RNA, 13 nt, Human
auaauacugaacc

SEQ ID NO: 1991789 - RNA, 14 nt, Human
auaauacugaacca

SEQ ID NO: 1991790 - RNA, 20 nt, Human
auaauacugaaccacuugua

SEQ ID NO: 1991791 - RNA, 15 nt, Human
auaauacugaaccac

SEQ ID NO: 1991792 - RNA, 16 nt, Human
auaauacugaaccacu

SEQ ID NO: 1991793 - RNA, 14 nt, Human
auaauacacaaaau

SEQ ID NO: 1991794 - RNA, 17 nt, Human
auaauacacaaaaucaa

SEQ ID NO: 1991795 - RNA, 22 nt, Human
auaauacacaaaaucaaauaau

SEQ ID NO: 1991796 - RNA, 15 nt, Human
auaauaccuuagaag

SEQ ID NO: 1991797 - RNA, 19 nt, Human
auaauacuugcuuuggaaa

SEQ ID NO: 1991798 - RNA, 18 nt, Human
auaauacaccacuacauu

SEQ ID NO: 1991799 - RNA, 20 nt, Human
auaauacaccacuacauucu

SEQ ID NO: 1991800 - RNA, 12 nt, Human
auaauacaccac

SEQ ID NO: 1991801 - RNA, 13 nt, Human
uuagaacagguuu

SEQ ID NO: 1991802 - RNA, 14 nt, Human
uuagaacagguuuu

SEQ ID NO: 1991803 - RNA, 20 nt, Human
auaagaauagaacaacauau

SEQ ID NO: 1991804 - RNA, 23 nt, Human
auaauaaagaauagcuuuaauga

SEQ ID NO: 1991805 - RNA, 13 nt, Human
auaauaaagaaua

SEQ ID NO: 1991806 - RNA, 14 nt, Human
auaauaaagaauag

SEQ ID NO: 1991807 - RNA, 11 nt, Human
auaauaaauag

SEQ ID NO: 1991808 - RNA, 12 nt, Human
auaauaaauagu

SEQ ID NO: 1991809 - RNA, 13 nt, Human
auaauaaauaguu

SEQ ID NO: 1991810 - RNA, 13 nt, Human
uuagaaacuggaa

SEQ ID NO: 1991811 - RNA, 19 nt, Human
uuagaaacuggaaauacua

SEQ ID NO: 1991812 - RNA, 23 nt, Human
uuagaaacuggaaauacuagauu

SEQ ID NO: 1991813 - RNA, 14 nt, Human
uuacucuugggaca

SEQ ID NO: 1991814 - RNA, 22 nt, Human
uuagaaacacauaauuaacacu

SEQ ID NO: 1991815 - RNA, 12 nt, Human
uuagaaacugga

SEQ ID NO: 1991816 - RNA, 23 nt, Human
uuacucuucaguuaagccuuugg

SEQ ID NO: 1991817 - RNA, 12 nt, Human
uuacucuuggga

SEQ ID NO: 1991818 - RNA, 18 nt, Human
uuaccuugaacugaaggc

SEQ ID NO: 1991819 - RNA, 16 nt, Human
uuaccuugucauuuug

SEQ ID NO: 1991820 - RNA, 20 nt, Human
uuaccuugucauuuuggucu

SEQ ID NO: 1991821 - RNA, 13 nt, Human
uuagacagagucu

SEQ ID NO: 1991822 - RNA, 13 nt, Human
uuagacagucccu

SEQ ID NO: 1991823 - RNA, 20 nt, Human
uuagacagagucucacuguu

SEQ ID NO: 1991824 - RNA, 17 nt, Human
uuagaaauugcauuucc

SEQ ID NO: 1991825 - RNA, 17 nt, Human
uuacccuauaucuauaa

SEQ ID NO: 1991826 - RNA, 21 nt, Human
uuaccucccuacuuucuuaga

SEQ ID NO: 1991827 - RNA, 20 nt, Human
uuaccuuugacaaagguaaa

SEQ ID NO: 1991828 - RNA, 13 nt, Human
uuaccuuugacaa

SEQ ID NO: 1991829 - RNA, 19 nt, Human
uuacccucauguucuuaau

SEQ ID NO: 1991830 - RNA, 16 nt, Human
uuacaggcuccugcca

SEQ ID NO: 1991831 - RNA, 18 nt, Human
uuacaggcuccugccacc

SEQ ID NO: 1991832 - RNA, 24 nt, Human
uuacaggcgugagccaccgugccu

SEQ ID NO: 1991833 - RNA, 15 nt, Human
auaacuuauauugua

SEQ ID NO: 1991834 - RNA, 20 nt, Human
auaacuuauauuguaagaaa

SEQ ID NO: 1991835 - RNA, 11 nt, Human
auaaauuauuu

SEQ ID NO: 1991836 - RNA, 20 nt, Human
auaaauccacccauguuauc

SEQ ID NO: 1991837 - RNA, 18 nt, Human
auaaauccacccauguua

SEQ ID NO: 1991838 - RNA, 14 nt, Human
auaacguauaaaag

SEQ ID NO: 1991839 - RNA, 22 nt, Human
auaacgauaaaagacagugaaa

SEQ ID NO: 1991840 - RNA, 15 nt, Human
auaaagguucaugca

SEQ ID NO: 1991841 - RNA, 21 nt, Human
uuaauugugugaacuuggaag

SEQ ID NO: 1991842 - RNA, 19 nt, Human
auaaaggugugcugugucc

SEQ ID NO: 1991843 - RNA, 13 nt, Human
uuaauuguauuuu

SEQ ID NO: 1991844 - RNA, 16 nt, Human
uuaauugugugaacuu

SEQ ID NO: 1991845 - RNA, 17 nt, Human
auaaagguucaugcaaa

SEQ ID NO: 1991846 - RNA, 13 nt, Human
auaaauaaaaaua

SEQ ID NO: 1991847 - RNA, 15 nt, Human
auaaauaguuuauga

SEQ ID NO: 1991848 - RNA, 15 nt, Human
auaaauaguguuauu

SEQ ID NO: 1991849 - RNA, 14 nt, Human
auaaauaaaaauaa

SEQ ID NO: 1991850 - RNA, 19 nt, Human
uuaacagaaauguacagca

SEQ ID NO: 1991851 - RNA, 15 nt, Human
uuaacacuacucaaa

SEQ ID NO: 1991852 - RNA, 20 nt, Human
uuaacagaaauguacagcaa

SEQ ID NO: 1991853 - RNA, 17 nt, Human
uuaacacuacucaaagc

SEQ ID NO: 1991854 - RNA, 13 nt, Human
uuaaauaauguga

SEQ ID NO: 1991855 - RNA, 16 nt, Human
uuaaauaaugugaaac

SEQ ID NO: 1991856 - RNA, 18 nt, Human
uuaaauaaugugaaacug

SEQ ID NO: 1991857 - RNA, 15 nt, Human
uuaaauaaugugaaa

SEQ ID NO: 1991858 - RNA, 16 nt, Human
uuaaaguaauuguucc

SEQ ID NO: 1991859 - RNA, 20 nt, Human
uuaaaguaauuguuccagag

SEQ ID NO: 1991860 - RNA, 22 nt, Human
uuaaaguaauuguuccagagac

SEQ ID NO: 1991861 - RNA, 16 nt, Human
uuaaacaauaaagcaa

SEQ ID NO: 1991862 - RNA, 13 nt, Human
uuaaacagaggau

SEQ ID NO: 1991863 - RNA, 14 nt, Human
uuaaaaaucucaaa

SEQ ID NO: 1991864 - RNA, 15 nt, Human
uuaaaaaucucaaau

SEQ ID NO: 1991865 - RNA, 16 nt, Human
uuaaaaaucucaaauu

SEQ ID NO: 1991866 - RNA, 17 nt, Human
uuaaaaaucucaaauuu

SEQ ID NO: 1991867 - RNA, 23 nt, Human
aguuuaauugaaagaauguaaag

SEQ ID NO: 1991868 - RNA, 17 nt, Human
uuaaaaaaaacucuuua

SEQ ID NO: 1991869 - RNA, 21 nt, Human
uuaaaaaaaacucuuuaacuu

SEQ ID NO: 1991870 - RNA, 19 nt, Human
uuaaaaaaaauuugcucau

SEQ ID NO: 1991871 - RNA, 13 nt, Human
uuaaaaaaaaucc

SEQ ID NO: 1991872 - RNA, 13 nt, Human
aguuggucccccu

SEQ ID NO: 1991873 - RNA, 11 nt, Human
aguuggucccc

SEQ ID NO: 1991874 - RNA, 17 nt, Human
aguuggucccccuucca

SEQ ID NO: 1991875 - RNA, 20 nt, Human
aguuuaaauauuaagcauga

SEQ ID NO: 1991876 - RNA, 18 nt, Human
aguuuaaauauuaagcau

SEQ ID NO: 1991877 - RNA, 14 nt, Human
aguuuaaauuguaa

SEQ ID NO: 1991878 - RNA, 23 nt, Human
aguugccagucaccccggccacc

SEQ ID NO: 1991879 - RNA, 15 nt, Human
aguugcugguaaaau

SEQ ID NO: 1991880 - RNA, 17 nt, Human
aguugcugguaaaauga

SEQ ID NO: 1991881 - RNA, 18 nt, Human
aguugcugguaaaaugaa

SEQ ID NO: 1991882 - RNA, 21 nt, Human
aguugcugguaaaaugaagaa

SEQ ID NO: 1991883 - RNA, 19 nt, Human
aguugcccagccucuuucc

SEQ ID NO: 1991884 - RNA, 22 nt, Human
aguugccgcauauuauaucaga

SEQ ID NO: 1991885 - RNA, 14 nt, Human
aguugcccagccuc

SEQ ID NO: 1991886 - RNA, 16 nt, Human
aguuggggcagaggag

SEQ ID NO: 1991887 - RNA, 19 nt, Human
aguugggcuuccucauagu

SEQ ID NO: 1991888 - RNA, 23 nt, Human
aguuggaguucauucauauuaca

SEQ ID NO: 1991889 - RNA, 20 nt, Human
aguuggaguucauucauauu

SEQ ID NO: 1991890 - RNA, 21 nt, Human
aguuggaguucauucauauua

SEQ ID NO: 1991891 - RNA, 13 nt, Human
aguugggcuuccu

SEQ ID NO: 1991892 - RNA, 16 nt, Human
aguuggaguagaaugu

SEQ ID NO: 1991893 - RNA, 23 nt, Human
aguuggaaacacuaaauguuaaa

SEQ ID NO: 1991894 - RNA, 17 nt, Human
aguuggaguagaaugua

SEQ ID NO: 1991895 - RNA, 19 nt, Human
aguuggaguucauucauau

SEQ ID NO: 1991896 - RNA, 13 nt, Human
aguuggaaacacu

SEQ ID NO: 1991897 - RNA, 21 nt, Human
aguugcugucagucuugaccu

SEQ ID NO: 1991898 - RNA, 23 nt, Human
aguugcugucagucuugaccucu

SEQ ID NO: 1991899 - RNA, 19 nt, Human
aguuggaaacacuaaaugu

SEQ ID NO: 1991900 - RNA, 20 nt, Human
aguuggaaacacuaaauguu

SEQ ID NO: 1991901 - RNA, 21 nt, Human
aguuggaaacacuaaauguua

SEQ ID NO: 1991902 - RNA, 22 nt, Human
aguuggaaacacuaaauguuaa

SEQ ID NO: 1991903 - RNA, 15 nt, Human
uuaagugcugcauuu

SEQ ID NO: 1991904 - RNA, 16 nt, Human
uuaagugcugcauuua

SEQ ID NO: 1991905 - RNA, 19 nt, Human
uuaagugcugcauuuaaaa

SEQ ID NO: 1991906 - RNA, 14 nt, Human
uuaagugcugcauu

SEQ ID NO: 1991907 - RNA, 20 nt, Human
uuaaguccuacuuuuaaaga

SEQ ID NO: 1991908 - RNA, 13 nt, Human
uuaaggucuguuu

SEQ ID NO: 1991909 - RNA, 22 nt, Human
uuaagguguuugaaaauaguuu

SEQ ID NO: 1991910 - RNA, 14 nt, Human
uuaagguguuugaa

SEQ ID NO: 1991911 - RNA, 16 nt, Human
uuaagguguuugaaaa

SEQ ID NO: 1991912 - RNA, 17 nt, Human
uuaagguguuugaaaau

SEQ ID NO: 1991913 - RNA, 13 nt, Human
uuaaggguaugau

SEQ ID NO: 1991914 - RNA, 9 nt, Human
uuaaggugg

SEQ ID NO: 1991915 - RNA, 22 nt, Human
uuaagaaagacuaucuaaaugu

SEQ ID NO: 1991916 - RNA, 22 nt, Human
uuaagaaauagacagcaugaga

SEQ ID NO: 1991917 - RNA, 20 nt, Human
uuaagaaagaaauacuguau

SEQ ID NO: 1991918 - RNA, 12 nt, Human
uuaagaaauaaa

SEQ ID NO: 1991919 - RNA, 16 nt, Human
uuaagaacuaaaaugu

SEQ ID NO: 1991920 - RNA, 19 nt, Human
uuaagaacuaaaauguucu

SEQ ID NO: 1991921 - RNA, 20 nt, Human
uuaagaacuaaaauguucua

SEQ ID NO: 1991922 - RNA, 13 nt, Human
uuaagaagaaaau

SEQ ID NO: 1991923 - RNA, 13 nt, Human
uuaagaagaaacu

SEQ ID NO: 1991924 - RNA, 22 nt, Human
uuaaucauuaggugugacugaa

SEQ ID NO: 1991925 - RNA, 23 nt, Human
uuaaucauuaggugugacugaau

SEQ ID NO: 1991926 - RNA, 21 nt, Human
uuaaucugggccagaauuuca

SEQ ID NO: 1991927 - RNA, 17 nt, Human
uuaaucucuaacagugg

SEQ ID NO: 1991928 - RNA, 19 nt, Human
uuaauauuuuuacaugcag

SEQ ID NO: 1991929 - RNA, 17 nt, Human
uuaauauuuuuacaugc

SEQ ID NO: 1991930 - RNA, 13 nt, Human
uuaaucauuaggu

SEQ ID NO: 1991931 - RNA, 22 nt, Human
uuaauauuuauaggucacuuug

SEQ ID NO: 1991932 - RNA, 12 nt, Human
uuaauugcugag

SEQ ID NO: 1991933 - RNA, 17 nt, Human
uuaauugauagaauaaa

SEQ ID NO: 1991934 - RNA, 16 nt, Human
uuaauugaucaguuuu

SEQ ID NO: 1991935 - RNA, 16 nt, Human
uuaauugaaagaaugu

SEQ ID NO: 1991936 - RNA, 20 nt, Human
uuaauugaaagaauguaaag

SEQ ID NO: 1991937 - RNA, 19 nt, Human
uuaaugaaagacuguacaa

SEQ ID NO: 1991938 - RNA, 22 nt, Human
uuaaucugguuuauuuuuguuc

SEQ ID NO: 1991939 - RNA, 18 nt, Human
uuaaucucuaacagugga

SEQ ID NO: 1991940 - RNA, 18 nt, Human
uuaaugaaagacuguaca

SEQ ID NO: 1991941 - RNA, 23 nt, Human
aguuuuuauggcuuuugugcauu

SEQ ID NO: 1991942 - RNA, 15 nt, Human
aguuuugugaaauuu

SEQ ID NO: 1991943 - RNA, 12 nt, Human
aguuuugugaaa

SEQ ID NO: 1991944 - RNA, 13 nt, Human
aguuuugugaaau

SEQ ID NO: 1991945 - RNA, 14 nt, Human
aguuuugugaaauu

SEQ ID NO: 1991946 - RNA, 19 nt, Human
aguuuugacaagcuggcuu

SEQ ID NO: 1991947 - RNA, 21 nt, Human
aguuuugcuuuuaguuuuucu

SEQ ID NO: 1991948 - RNA, 17 nt, Human
aguuuugcauaguucua

SEQ ID NO: 1991949 - RNA, 23 nt, Human
aguuuugcuuuuaguuuuucugu

SEQ ID NO: 1991950 - RNA, 16 nt, Human
aguuuugggaaguuaa

SEQ ID NO: 1991951 - RNA, 19 nt, Human
aguuuugggaaguuaaagg

SEQ ID NO: 1991952 - RNA, 20 nt, Human
aguuuugggaaguuaaaggg

SEQ ID NO: 1991953 - RNA, 16 nt, Human
aguuuucuuuuaauuu

SEQ ID NO: 1991954 - RNA, 17 nt, Human
aguuuucuuuuaauuuu

SEQ ID NO: 1991955 - RNA, 17 nt, Human
aguuuugaagauucuau

SEQ ID NO: 1991956 - RNA, 18 nt, Human
aguuuugaagauucuaug

SEQ ID NO: 1991957 - RNA, 14 nt, Human
aguuuugacaagcu

SEQ ID NO: 1991958 - RNA, 15 nt, Human
aguuuugacaagcug

SEQ ID NO: 1991959 - RNA, 18 nt, Human
aguuuugacaagcuggcu

SEQ ID NO: 1991960 - RNA, 18 nt, Human
auaaaagccuguuuaaga

SEQ ID NO: 1991961 - RNA, 16 nt, Human
auaaaagcccaggagc

SEQ ID NO: 1991962 - RNA, 13 nt, Human
auaaaagcccagg

SEQ ID NO: 1991963 - RNA, 15 nt, Human
auaaaagcccaggag

SEQ ID NO: 1991964 - RNA, 13 nt, Human
auaaaagccuguu

SEQ ID NO: 1991965 - RNA, 21 nt, Human
uuaagaaaaaggaugcacaga

SEQ ID NO: 1991966 - RNA, 20 nt, Human
uuaagaaaaaggaugcacag

SEQ ID NO: 1991967 - RNA, 19 nt, Human
uuaagaaaaaggaugcaca

SEQ ID NO: 1991968 - RNA, 16 nt, Human
agugugggucugugug

SEQ ID NO: 1991969 - RNA, 17 nt, Human
agugugggucugugugu

SEQ ID NO: 1991970 - RNA, 15 nt, Human
agugugggucugugu

SEQ ID NO: 1991971 - RNA, 20 nt, Human
aguggagccugacagccaga

SEQ ID NO: 1991972 - RNA, 17 nt, Human
aguggagguuuauaguu

SEQ ID NO: 1991973 - RNA, 19 nt, Human
aguggagccugacagccag

SEQ ID NO: 1991974 - RNA, 16 nt, Human
agugcuuuucuguuua

SEQ ID NO: 1991975 - RNA, 20 nt, Human
uguuauuauagagcagaaau

SEQ ID NO: 1991976 - RNA, 21 nt, Human
uguuauuauagagcagaaauu

SEQ ID NO: 1991977 - RNA, 22 nt, Human
uguuauuauagagcagaaauuc

SEQ ID NO: 1991978 - RNA, 16 nt, Human
uguuauucaacagcaa

SEQ ID NO: 1991979 - RNA, 13 nt, Human
uguuauucuuugc

SEQ ID NO: 1991980 - RNA, 14 nt, Human
uguuauucuuugca

SEQ ID NO: 1991981 - RNA, 16 nt, Human
uguuauucuuugcacu

SEQ ID NO: 1991982 - RNA, 20 nt, Human
uguuauugagagagaugugu

SEQ ID NO: 1991983 - RNA, 19 nt, Human
agugugggucugugugugu

SEQ ID NO: 1991984 - RNA, 23 nt, Human
agugugggucuguguguguguau

SEQ ID NO: 1991985 - RNA, 13 nt, Human
uguuauaugaaca

SEQ ID NO: 1991986 - RNA, 14 nt, Human
uguuauaugaacau

SEQ ID NO: 1991987 - RNA, 13 nt, Human
uguuaucauuuuu

SEQ ID NO: 1991988 - RNA, 18 nt, Human
uguuaucauuuuuuccug

SEQ ID NO: 1991989 - RNA, 16 nt, Human
uguuauauuuuucuua

SEQ ID NO: 1991990 - RNA, 18 nt, Human
uguuauauuuuucuuaaa

SEQ ID NO: 1991991 - RNA, 14 nt, Human
uguuauauuuuucu

SEQ ID NO: 1991992 - RNA, 15 nt, Human
uguuauaugaacaua

SEQ ID NO: 1991993 - RNA, 10 nt, Human
uguucuucca

SEQ ID NO: 1991994 - RNA, 11 nt, Human
uguucuuccaa

SEQ ID NO: 1991995 - RNA, 16 nt, Human
uguucuuccaaagcag

SEQ ID NO: 1991996 - RNA, 18 nt, Human
uguucuuaguuugcaguu

SEQ ID NO: 1991997 - RNA, 21 nt, Human
uguucuuccaguuacuuucca

SEQ ID NO: 1991998 - RNA, 22 nt, Human
uguucuuccaguuacuuuccaa

SEQ ID NO: 1991999 - RNA, 17 nt, Human
uguucuuccaaagcaga

SEQ ID NO: 1992000 - RNA, 20 nt, Human
uguucuuccaaagcagagag

SEQ ID NO: 1992001 - RNA, 11 nt, Human
uguucuuccag

SEQ ID NO: 1992002 - RNA, 13 nt, Human
uguucuuccaguu

SEQ ID NO: 1992003 - RNA, 12 nt, Human
uguucuuccugg

SEQ ID NO: 1992004 - RNA, 18 nt, Human
uguucuagcauggcugcc

SEQ ID NO: 1992005 - RNA, 19 nt, Human
uguuauuuauugaaaugau

SEQ ID NO: 1992006 - RNA, 13 nt, Human
uguuauuuauuga

SEQ ID NO: 1992007 - RNA, 15 nt, Human
uguuauuuauugaaa

SEQ ID NO: 1992008 - RNA, 17 nt, Human
uguuauuuauugaaaug

SEQ ID NO: 1992009 - RNA, 18 nt, Human
uguuauuuauugaaauga

SEQ ID NO: 1992010 - RNA, 14 nt, Human
aguuacuuuuccuu

SEQ ID NO: 1992011 - RNA, 17 nt, Human
aguuacuuuuccuugca

SEQ ID NO: 1992012 - RNA, 18 nt, Human
aguuacuuuuccuugcau

SEQ ID NO: 1992013 - RNA, 20 nt, Human
aguuacuuuuccuugcauac

SEQ ID NO: 1992014 - RNA, 13 nt, Human
aguuacuugauaa

SEQ ID NO: 1992015 - RNA, 21 nt, Human
aguuacuuuccaauucuccuu

SEQ ID NO: 1992016 - RNA, 22 nt, Human
aguuacuuuccaauucuccuuu

SEQ ID NO: 1992017 - RNA, 23 nt, Human
aguuacuuuccaauucuccuuua

SEQ ID NO: 1992018 - RNA, 21 nt, Human
aguuacuuuuccuugcauaca

SEQ ID NO: 1992019 - RNA, 23 nt, Human
aguuacuuuuccuugcauacaaa

SEQ ID NO: 1992020 - RNA, 15 nt, Human
aguuacuguaaaaug

SEQ ID NO: 1992021 - RNA, 16 nt, Human
aguuacuguaaaaugc

SEQ ID NO: 1992022 - RNA, 21 nt, Human
aguuacucuucaguuaagccu

SEQ ID NO: 1992023 - RNA, 20 nt, Human
aguguuauugagagagaugu

SEQ ID NO: 1992024 - RNA, 15 nt, Human
aguguucagaaaaaa

SEQ ID NO: 1992025 - RNA, 22 nt, Human
uguucuugguuuguaaauuaac

SEQ ID NO: 1992026 - RNA, 14 nt, Human
uguucuuguuuuua

SEQ ID NO: 1992027 - RNA, 18 nt, Human
uguucuuguuuuuaaguu

SEQ ID NO: 1992028 - RNA, 20 nt, Human
uguucuugguuuguaaauua

SEQ ID NO: 1992029 - RNA, 19 nt, Human
uguucuuucacccuuuucu

SEQ ID NO: 1992030 - RNA, 13 nt, Human
uguugcccaggcu

SEQ ID NO: 1992031 - RNA, 15 nt, Human
uguugcccaggcugg

SEQ ID NO: 1992032 - RNA, 19 nt, Human
aguguguguuuuucauaaa

SEQ ID NO: 1992033 - RNA, 19 nt, Human
uguugcccaggcuggagug

SEQ ID NO: 1992034 - RNA, 20 nt, Human
uguugcccaggcuggagugc

SEQ ID NO: 1992035 - RNA, 14 nt, Human
aguguuaugagcca

SEQ ID NO: 1992036 - RNA, 13 nt, Human
aguguuauaugaa

SEQ ID NO: 1992037 - RNA, 14 nt, Human
aguguuauaugaac

SEQ ID NO: 1992038 - RNA, 15 nt, Human
aguguuauaugaaca

SEQ ID NO: 1992039 - RNA, 16 nt, Human
aguguuauaugaacau

SEQ ID NO: 1992040 - RNA, 20 nt, Human
aguguuauaugaacauacaa

SEQ ID NO: 1992041 - RNA, 20 nt, Human
aguucggugagcuacaaaug

SEQ ID NO: 1992042 - RNA, 19 nt, Human
aguucggugagcuacaaau

SEQ ID NO: 1992043 - RNA, 20 nt, Human
aguuccuauaacacugugaa

SEQ ID NO: 1992044 - RNA, 23 nt, Human
aguucuacuucauguaauccaaa

SEQ ID NO: 1992045 - RNA, 14 nt, Human
aguucuaccggcuu

SEQ ID NO: 1992046 - RNA, 18 nt, Human
aguucuagugcagcugaa

SEQ ID NO: 1992047 - RNA, 22 nt, Human
aguucuagugcagcugaaauug

SEQ ID NO: 1992048 - RNA, 23 nt, Human
aguucuagugcagcugaaauuga

SEQ ID NO: 1992049 - RNA, 23 nt, Human
aguuccucauuagcauuuugcua

SEQ ID NO: 1992050 - RNA, 15 nt, Human
aguucccuacuuccu

SEQ ID NO: 1992051 - RNA, 22 nt, Human
aguuccccuggaagcagugccc

SEQ ID NO: 1992052 - RNA, 23 nt, Human
aguuccccuggaagcagugccca

SEQ ID NO: 1992053 - RNA, 24 nt, Human
aguuccccuggaagcagugcccag

SEQ ID NO: 1992054 - RNA, 16 nt, Human
aguucccauucuuuca

SEQ ID NO: 1992055 - RNA, 20 nt, Human
aguucccaucuccuuucucu

SEQ ID NO: 1992056 - RNA, 17 nt, Human
aguucaagaaaugaaga

SEQ ID NO: 1992057 - RNA, 18 nt, Human
aguucaagaaaugaagag

SEQ ID NO: 1992058 - RNA, 15 nt, Human
aguucaagaucaaaa

SEQ ID NO: 1992059 - RNA, 20 nt, Human
aguucaagaucaaaaaggcu

SEQ ID NO: 1992060 - RNA, 14 nt, Human
aguuauauuuccua

SEQ ID NO: 1992061 - RNA, 16 nt, Human
aguucaauucucauuu

SEQ ID NO: 1992062 - RNA, 24 nt, Human
aguucaaucuggauucauauuuaa

SEQ ID NO: 1992063 - RNA, 22 nt, Human
uguuuaucuagauguaaauuuu

SEQ ID NO: 1992064 - RNA, 13 nt, Human
uguuuauucaaac

SEQ ID NO: 1992065 - RNA, 16 nt, Human
uguuuauucaaacuga

SEQ ID NO: 1992066 - RNA, 11 nt, Human
uguuuauguaa

SEQ ID NO: 1992067 - RNA, 15 nt, Human
uguuuauguaaacaa

SEQ ID NO: 1992068 - RNA, 20 nt, Human
uguuuauguaaacaaaucuu

SEQ ID NO: 1992069 - RNA, 14 nt, Human
uguuuauugucaaa

SEQ ID NO: 1992070 - RNA, 18 nt, Human
uguuuauucaaacugaaa

SEQ ID NO: 1992071 - RNA, 21 nt, Human
uguuuauucaaacugaaaagc

SEQ ID NO: 1992072 - RNA, 21 nt, Human
uguuuauucuugaugaaaagc

SEQ ID NO: 1992073 - RNA, 13 nt, Human
uguuuauucuuga

SEQ ID NO: 1992074 - RNA, 14 nt, Human
uguuuauucuugau

SEQ ID NO: 1992075 - RNA, 17 nt, Human
uguuuaguaaucauauu

SEQ ID NO: 1992076 - RNA, 14 nt, Human
uguuuaguaaucau

SEQ ID NO: 1992077 - RNA, 20 nt, Human
uguuuagauuuuguguuuau

SEQ ID NO: 1992078 - RNA, 22 nt, Human
uguuuagcuacguuuacucaca

SEQ ID NO: 1992079 - RNA, 13 nt, Human
uguuuaguaauca

SEQ ID NO: 1992080 - RNA, 20 nt, Human
uguuuaucccuuaagaauga

SEQ ID NO: 1992081 - RNA, 16 nt, Human
uguuuaucuagaugua

SEQ ID NO: 1992082 - RNA, 17 nt, Human
uguuuaucuagauguaa

SEQ ID NO: 1992083 - RNA, 18 nt, Human
uguuuaucuagauguaaa

SEQ ID NO: 1992084 - RNA, 20 nt, Human
uguuuaucuagauguaaauu

SEQ ID NO: 1992085 - RNA, 13 nt, Human
uguugucugcaac

SEQ ID NO: 1992086 - RNA, 16 nt, Human
uguugucugcaacucu

SEQ ID NO: 1992087 - RNA, 15 nt, Human
uguugugaauaauua

SEQ ID NO: 1992088 - RNA, 17 nt, Human
uguugugaauaauuaca

SEQ ID NO: 1992089 - RNA, 19 nt, Human
uguugugaauaauuacagu

SEQ ID NO: 1992090 - RNA, 20 nt, Human
uguugugaauaauuacagug

SEQ ID NO: 1992091 - RNA, 16 nt, Human
uguuggggcucuuccu

SEQ ID NO: 1992092 - RNA, 15 nt, Human
uguugucucuucucc

SEQ ID NO: 1992093 - RNA, 17 nt, Human
uguugucucuucuccuu

SEQ ID NO: 1992094 - RNA, 13 nt, Human
uguugucucuucu

SEQ ID NO: 1992095 - RNA, 14 nt, Human
uguuguguguggga

SEQ ID NO: 1992096 - RNA, 15 nt, Human
uguugugugugggag

SEQ ID NO: 1992097 - RNA, 14 nt, Human
uguugugugccucu

SEQ ID NO: 1992098 - RNA, 16 nt, Human
uguugugugugggagu

SEQ ID NO: 1992099 - RNA, 15 nt, Human
uguugugugccucua

SEQ ID NO: 1992100 - RNA, 21 nt, Human
uguugugugccucuagcugaa

SEQ ID NO: 1992101 - RNA, 20 nt, Human
uguuuagauaauacaccacu

SEQ ID NO: 1992102 - RNA, 15 nt, Human
uguuuagaugaaugu

SEQ ID NO: 1992103 - RNA, 20 nt, Human
uguuuagaugaaugucaguu

SEQ ID NO: 1992104 - RNA, 12 nt, Human
uguuuagauuug

SEQ ID NO: 1992105 - RNA, 17 nt, Human
uguuuagauuugccaua

SEQ ID NO: 1992106 - RNA, 15 nt, Human
uguuuagauuuugug

SEQ ID NO: 1992107 - RNA, 17 nt, Human
uguuuagauuuuguguu

SEQ ID NO: 1992108 - RNA, 22 nt, Human
uguggagacugcuccugagccc

SEQ ID NO: 1992109 - RNA, 23 nt, Human
uguggagacugcuccugagcccc

SEQ ID NO: 1992110 - RNA, 15 nt, Human
ugugcugcccugccc

SEQ ID NO: 1992111 - RNA, 13 nt, Human
uguggagacugcu

SEQ ID NO: 1992112 - RNA, 15 nt, Human
uguggagacugcucc

SEQ ID NO: 1992113 - RNA, 18 nt, Human
uguggagacugcuccuga

SEQ ID NO: 1992114 - RNA, 14 nt, Human
ugugcugcccugcc

SEQ ID NO: 1992115 - RNA, 13 nt, Human
ugugcugcccugc

SEQ ID NO: 1992116 - RNA, 16 nt, Human
ugugcucuggacaggc

SEQ ID NO: 1992117 - RNA, 18 nt, Human
ugugcucuggacaggcau

SEQ ID NO: 1992118 - RNA, 18 nt, Human
ugugccucuagcugaauu

SEQ ID NO: 1992119 - RNA, 20 nt, Human
ugugccucuagcugaauuga

SEQ ID NO: 1992120 - RNA, 19 nt, Human
ugugcucuggacaggcaug

SEQ ID NO: 1992121 - RNA, 20 nt, Human
ugugcccuaaaguguauuuu

SEQ ID NO: 1992122 - RNA, 21 nt, Human
ugugcccuaaaguguauuuuu

SEQ ID NO: 1992123 - RNA, 21 nt, Human
agucucacuguugcccaggcu

SEQ ID NO: 1992124 - RNA, 23 nt, Human
agucucaccauuuccccagggca

SEQ ID NO: 1992125 - RNA, 20 nt, Human
agucucacuguugcccaggc

SEQ ID NO: 1992126 - RNA, 18 nt, Human
agucucacuguugcccag

SEQ ID NO: 1992127 - RNA, 19 nt, Human
agucucacuguugcccagg

SEQ ID NO: 1992128 - RNA, 12 nt, Human
ugugccucugcc

SEQ ID NO: 1992129 - RNA, 13 nt, Human
ugugccucugccu

SEQ ID NO: 1992130 - RNA, 14 nt, Human
ugugccucuagcug

SEQ ID NO: 1992131 - RNA, 15 nt, Human
ugugccucuagcuga

SEQ ID NO: 1992132 - RNA, 16 nt, Human
ugugccucuagcugaa

SEQ ID NO: 1992133 - RNA, 22 nt, Human
ugugcucugaucauccacugug

SEQ ID NO: 1992134 - RNA, 12 nt, Human
ugugcucugauc

SEQ ID NO: 1992135 - RNA, 23 nt, Human
ugugcucugaucauccacugugc

SEQ ID NO: 1992136 - RNA, 15 nt, Human
ugugcucuggacagg

SEQ ID NO: 1992137 - RNA, 16 nt, Human
agugcagcugaaauug

SEQ ID NO: 1992138 - RNA, 17 nt, Human
agugcagcugaaauuga

SEQ ID NO: 1992139 - RNA, 20 nt, Human
agugcaccugggacagggag

SEQ ID NO: 1992140 - RNA, 12 nt, Human
agugcaggccca

SEQ ID NO: 1992141 - RNA, 13 nt, Human
agugcaggcccac

SEQ ID NO: 1992142 - RNA, 15 nt, Human
agugcaggcccaccc

SEQ ID NO: 1992143 - RNA, 17 nt, Human
agugcaggcccacccug

SEQ ID NO: 1992144 - RNA, 18 nt, Human
agugcaggcccacccugc

SEQ ID NO: 1992145 - RNA, 19 nt, Human
agugcaggcccacccugcu

SEQ ID NO: 1992146 - RNA, 15 nt, Human
agugcaucucagccc

SEQ ID NO: 1992147 - RNA, 14 nt, Human
agugcaucucagcc

SEQ ID NO: 1992148 - RNA, 16 nt, Human
agugcaucucagccca

SEQ ID NO: 1992149 - RNA, 17 nt, Human
agugcaucucagcccac

SEQ ID NO: 1992150 - RNA, 16 nt, Human
agugccaaaaacaaca

SEQ ID NO: 1992151 - RNA, 13 nt, Human
agugcccaggugg

SEQ ID NO: 1992152 - RNA, 14 nt, Human
agugcccacaggau

SEQ ID NO: 1992153 - RNA, 16 nt, Human
agugagucgaggacag

SEQ ID NO: 1992154 - RNA, 22 nt, Human
agugauucuccugccucagccu

SEQ ID NO: 1992155 - RNA, 24 nt, Human
agugauucuccugccucagccucc

SEQ ID NO: 1992156 - RNA, 15 nt, Human
agugcaauauauuuu

SEQ ID NO: 1992157 - RNA, 16 nt, Human
agugcaauauauuuug

SEQ ID NO: 1992158 - RNA, 21 nt, Human
agugcaauauauuuuguaugc

SEQ ID NO: 1992159 - RNA, 13 nt, Human
uguguguguguau

SEQ ID NO: 1992160 - RNA, 16 nt, Human
uguguguguguaugug

SEQ ID NO: 1992161 - RNA, 14 nt, Human
uguguguuacaaug

SEQ ID NO: 1992162 - RNA, 14 nt, Human
uguguuaugaagca

SEQ ID NO: 1992163 - RNA, 14 nt, Human
uguguuauuauaga

SEQ ID NO: 1992164 - RNA, 19 nt, Human
uguguucacuaaacucuga

SEQ ID NO: 1992165 - RNA, 20 nt, Human
uguguucacuaaacucugaa

SEQ ID NO: 1992166 - RNA, 20 nt, Human
uguguuccaaacaugagguu

SEQ ID NO: 1992167 - RNA, 15 nt, Human
uguguuccaaccacu

SEQ ID NO: 1992168 - RNA, 16 nt, Human
uguguuccaaccacug

SEQ ID NO: 1992169 - RNA, 16 nt, Human
ugugucucuugguccu

SEQ ID NO: 1992170 - RNA, 11 nt, Human
ugugugugugc

SEQ ID NO: 1992171 - RNA, 13 nt, Human
ugugucucuuggu

SEQ ID NO: 1992172 - RNA, 20 nt, Human
ugugucagguggggcagcuu

SEQ ID NO: 1992173 - RNA, 17 nt, Human
ugugucagguggggcag

SEQ ID NO: 1992174 - RNA, 19 nt, Human
ugugucagguggggcagcu

SEQ ID NO: 1992175 - RNA, 19 nt, Human
aguggaaaaauagccugcc

SEQ ID NO: 1992176 - RNA, 18 nt, Human
aguggaaaaauagccugc

SEQ ID NO: 1992177 - RNA, 11 nt, Human
aguggaaaaau

SEQ ID NO: 1992178 - RNA, 19 nt, Human
uguuaaugauagcuacugu

SEQ ID NO: 1992179 - RNA, 18 nt, Human
uguguugccacuuuccaa

SEQ ID NO: 1992180 - RNA, 15 nt, Human
uguguugcuuauguu

SEQ ID NO: 1992181 - RNA, 17 nt, Human
uguguugcuuauguugu

SEQ ID NO: 1992182 - RNA, 21 nt, Human
uguuaacauggacaugaucuu

SEQ ID NO: 1992183 - RNA, 13 nt, Human
uguggucuccacu

SEQ ID NO: 1992184 - RNA, 12 nt, Human
ugugguuucauu

SEQ ID NO: 1992185 - RNA, 19 nt, Human
ugugucagcauagaaguaa

SEQ ID NO: 1992186 - RNA, 16 nt, Human
agugcuuccaaggaug

SEQ ID NO: 1992187 - RNA, 22 nt, Human
agugcugcauuuaaaagauaca

SEQ ID NO: 1992188 - RNA, 20 nt, Human
agugcugggauuacaagcgu

SEQ ID NO: 1992189 - RNA, 20 nt, Human
agugcugggauuacaggcau

SEQ ID NO: 1992190 - RNA, 20 nt, Human
agugcugggauuacaggcgu

SEQ ID NO: 1992191 - RNA, 19 nt, Human
agugcugggauuacaggug

SEQ ID NO: 1992192 - RNA, 21 nt, Human
agugccuguaaucacagcuac

SEQ ID NO: 1992193 - RNA, 15 nt, Human
agugccuuacacaau

SEQ ID NO: 1992194 - RNA, 17 nt, Human
agugccuuacacaaugg

SEQ ID NO: 1992195 - RNA, 20 nt, Human
agugcugcauuuaaaagaua

SEQ ID NO: 1992196 - RNA, 14 nt, Human
agugccuaaaauaa

SEQ ID NO: 1992197 - RNA, 19 nt, Human
agugccuaaaauaagaaua

SEQ ID NO: 1992198 - RNA, 16 nt, Human
agugccgcaucucaca

SEQ ID NO: 1992199 - RNA, 18 nt, Human
agugccgcaucucacagc

SEQ ID NO: 1992200 - RNA, 19 nt, Human
agugccgcaucucacagcu

SEQ ID NO: 1992201 - RNA, 23 nt, Human
agugccgcaucucacagcuaugc

SEQ ID NO: 1992202 - RNA, 14 nt, Human
aguauaaagaauag

SEQ ID NO: 1992203 - RNA, 14 nt, Human
aguaguuugcauuu

SEQ ID NO: 1992204 - RNA, 15 nt, Human
aguaguuugcauuuc

SEQ ID NO: 1992205 - RNA, 16 nt, Human
aguaguuugcauuuca

SEQ ID NO: 1992206 - RNA, 18 nt, Human
aguaguuugcauuucaga

SEQ ID NO: 1992207 - RNA, 20 nt, Human
aguaguuugcauuucagaaa

SEQ ID NO: 1992208 - RNA, 15 nt, Human
aguauguggaagugu

SEQ ID NO: 1992209 - RNA, 17 nt, Human
aguauguggaagugugg

SEQ ID NO: 1992210 - RNA, 19 nt, Human
aguauguggaagugugggu

SEQ ID NO: 1992211 - RNA, 22 nt, Human
aguauuugaaaacagaaauugg

SEQ ID NO: 1992212 - RNA, 20 nt, Human
aguauuugaaaacagaaauu

SEQ ID NO: 1992213 - RNA, 21 nt, Human
aguauuugaaaacagaaauug

SEQ ID NO: 1992214 - RNA, 19 nt, Human
aguauuucuaaaguaauug

SEQ ID NO: 1992215 - RNA, 12 nt, Human
aguauuugaaaa

SEQ ID NO: 1992216 - RNA, 13 nt, Human
aguauuugaaaac

SEQ ID NO: 1992217 - RNA, 17 nt, Human
aguauuugaaaacagaa

SEQ ID NO: 1992218 - RNA, 18 nt, Human
aguauuugaaaacagaaa

SEQ ID NO: 1992219 - RNA, 19 nt, Human
agucacauuccugaacagg

SEQ ID NO: 1992220 - RNA, 18 nt, Human
agucacauuccugaacag

SEQ ID NO: 1992221 - RNA, 20 nt, Human
agucacauuccugaacagga

SEQ ID NO: 1992222 - RNA, 16 nt, Human
aguauuuggaauuaga

SEQ ID NO: 1992223 - RNA, 13 nt, Human
agucaccaagccc

SEQ ID NO: 1992224 - RNA, 14 nt, Human
agucaccaagccca

SEQ ID NO: 1992225 - RNA, 16 nt, Human
ugucagcugaaccugg

SEQ ID NO: 1992226 - RNA, 13 nt, Human
agucacugcacag

SEQ ID NO: 1992227 - RNA, 20 nt, Human
agucacugcacguuuucauc

SEQ ID NO: 1992228 - RNA, 21 nt, Human
agucacugcacguuuucaucu

SEQ ID NO: 1992229 - RNA, 18 nt, Human
agucacugagacagcccg

SEQ ID NO: 1992230 - RNA, 18 nt, Human
agucacugcaaaaccagg

SEQ ID NO: 1992231 - RNA, 19 nt, Human
agucacugagacagcccgg

SEQ ID NO: 1992232 - RNA, 19 nt, Human
ugucagcugaaccugggua

SEQ ID NO: 1992233 - RNA, 19 nt, Human
ugucaggaaaacacccagg

SEQ ID NO: 1992234 - RNA, 22 nt, Human
ugucaggggcggggagggugac

SEQ ID NO: 1992235 - RNA, 19 nt, Human
ugucagggcaguacaaugu

SEQ ID NO: 1992236 - RNA, 16 nt, Human
ugucagguggggcagc

SEQ ID NO: 1992237 - RNA, 11 nt, Human
ugucaggaggc

SEQ ID NO: 1992238 - RNA, 19 nt, Human
ugucaguauguggaagugu

SEQ ID NO: 1992239 - RNA, 20 nt, Human
ugucaguauguggaagugug

SEQ ID NO: 1992240 - RNA, 18 nt, Human
ugucaguauguggaagug

SEQ ID NO: 1992241 - RNA, 14 nt, Human
ugucaguauccagg

SEQ ID NO: 1992242 - RNA, 22 nt, Human
ugucaguauguggaaguguggg

SEQ ID NO: 1992243 - RNA, 15 nt, Human
ugucaguauccaggc

SEQ ID NO: 1992244 - RNA, 23 nt, Human
ugucauuugcuggagcucugccc

SEQ ID NO: 1992245 - RNA, 19 nt, Human
aguagugaagacuccagaa

SEQ ID NO: 1992246 - RNA, 14 nt, Human
aguaguguuacaug

SEQ ID NO: 1992247 - RNA, 18 nt, Human
aguagugaagacuccaga

SEQ ID NO: 1992248 - RNA, 17 nt, Human
aguaguguuacauguau

SEQ ID NO: 1992249 - RNA, 13 nt, Human
aguaguucuguau

SEQ ID NO: 1992250 - RNA, 14 nt, Human
aguaguucuguauu

SEQ ID NO: 1992251 - RNA, 15 nt, Human
aguaguucuguauuu

SEQ ID NO: 1992252 - RNA, 16 nt, Human
aguaguucuguauuug

SEQ ID NO: 1992253 - RNA, 17 nt, Human
aguaguucuguauuuga

SEQ ID NO: 1992254 - RNA, 18 nt, Human
aguaguucuguauuugaa

SEQ ID NO: 1992255 - RNA, 21 nt, Human
aguaguucuguauuugaaagu

SEQ ID NO: 1992256 - RNA, 13 nt, Human
aguaguuugcauu

SEQ ID NO: 1992257 - RNA, 19 nt, Human
aguaggggaagaauaauuu

SEQ ID NO: 1992258 - RNA, 15 nt, Human
aguaggcaagauggc

SEQ ID NO: 1992259 - RNA, 20 nt, Human
aguaggauaugccugcucuu

SEQ ID NO: 1992260 - RNA, 22 nt, Human
aguaggauaugccugcucuuug

SEQ ID NO: 1992261 - RNA, 23 nt, Human
aguaggacaaggugcaggcaggc

SEQ ID NO: 1992262 - RNA, 17 nt, Human
aguagcuuaagaaaaaa

SEQ ID NO: 1992263 - RNA, 20 nt, Human
aguagcuuugcacuuuucua

SEQ ID NO: 1992264 - RNA, 22 nt, Human
aguaggacaaggugcaggcagg

SEQ ID NO: 1992265 - RNA, 19 nt, Human
aguagggguaccacugaau

SEQ ID NO: 1992266 - RNA, 20 nt, Human
aguagggguaccacugaauc

SEQ ID NO: 1992267 - RNA, 21 nt, Human
aguagucucugugaggccuua

SEQ ID NO: 1992268 - RNA, 16 nt, Human
aguaggaagacuuugg

SEQ ID NO: 1992269 - RNA, 16 nt, Human
aguagcuuaagaaaaa

SEQ ID NO: 1992270 - RNA, 22 nt, Human
aguaggaagacuuuggaaagac

SEQ ID NO: 1992271 - RNA, 19 nt, Human
aguaggaagacuuuggaaa

SEQ ID NO: 1992272 - RNA, 18 nt, Human
aguaggaagacuuuggaa

SEQ ID NO: 1992273 - RNA, 17 nt, Human
aguaggaagacuuugga

SEQ ID NO: 1992274 - RNA, 22 nt, Human
uguauuuugugaguuuguuucu

SEQ ID NO: 1992275 - RNA, 15 nt, Human
uguauucauauuugu

SEQ ID NO: 1992276 - RNA, 16 nt, Human
uguauucauauuugua

SEQ ID NO: 1992277 - RNA, 17 nt, Human
uguauucauauuuguac

SEQ ID NO: 1992278 - RNA, 17 nt, Human
uguauucaauuaaagaa

SEQ ID NO: 1992279 - RNA, 14 nt, Human
uguauucaauuaaa

SEQ ID NO: 1992280 - RNA, 21 nt, Human
uguauuuuuccucuuucacuu

SEQ ID NO: 1992281 - RNA, 14 nt, Human
uguauuuuuuuacu

SEQ ID NO: 1992282 - RNA, 17 nt, Human
uguauuuuuuaaugcua

SEQ ID NO: 1992283 - RNA, 16 nt, Human
uguauuuuuuuacuaa

SEQ ID NO: 1992284 - RNA, 21 nt, Human
ugucaagaauagcauuguaaa

SEQ ID NO: 1992285 - RNA, 19 nt, Human
uguauuuuuuaaugcuaau

SEQ ID NO: 1992286 - RNA, 15 nt, Human
ugucaagccauaauu

SEQ ID NO: 1992287 - RNA, 19 nt, Human
ugucaagagggucugagga

SEQ ID NO: 1992288 - RNA, 17 nt, Human
ugucccuuuuccuuuuu

SEQ ID NO: 1992289 - RNA, 12 nt, Human
ugucauuuucau

SEQ ID NO: 1992290 - RNA, 13 nt, Human
ugucauuuucauu

SEQ ID NO: 1992291 - RNA, 14 nt, Human
ugucauuuucauua

SEQ ID NO: 1992292 - RNA, 19 nt, Human
ugucauuuucauuagcaaa

SEQ ID NO: 1992293 - RNA, 20 nt, Human
ugucauuuucauuagcaaaa

SEQ ID NO: 1992294 - RNA, 16 nt, Human
uguccuaaggaaccuu

SEQ ID NO: 1992295 - RNA, 19 nt, Human
uguccuaaggaaccuuccu

SEQ ID NO: 1992296 - RNA, 15 nt, Human
uguccgauuuuucca

SEQ ID NO: 1992297 - RNA, 14 nt, Human
uguccgagcuuuga

SEQ ID NO: 1992298 - RNA, 13 nt, Human
uguccgagcuuug

SEQ ID NO: 1992299 - RNA, 16 nt, Human
uguccuacccacccuc

SEQ ID NO: 1992300 - RNA, 15 nt, Human
uguccuaauggugau

SEQ ID NO: 1992301 - RNA, 18 nt, Human
uguccuaauggugaugca

SEQ ID NO: 1992302 - RNA, 15 nt, Human
ugucgcccaggcugg

SEQ ID NO: 1992303 - RNA, 16 nt, Human
ugucgcccaggcugga

SEQ ID NO: 1992304 - RNA, 15 nt, Human
ugucgggcaugacac

SEQ ID NO: 1992305 - RNA, 14 nt, Human
ugucgggcaugaca

SEQ ID NO: 1992306 - RNA, 17 nt, Human
ugucguuaaaaacagau

SEQ ID NO: 1992307 - RNA, 22 nt, Human
ugucguaguuacucucaggcau

SEQ ID NO: 1992308 - RNA, 12 nt, Human
ugucggcuccag

SEQ ID NO: 1992309 - RNA, 17 nt, Human
ugucggcuccagucccc

SEQ ID NO: 1992310 - RNA, 19 nt, Human
ugucggcuccaguccccag

SEQ ID NO: 1992311 - RNA, 23 nt, Human
ugucggcuccaguccccagaacu

SEQ ID NO: 1992312 - RNA, 12 nt, Human
ugucgggcauga

SEQ ID NO: 1992313 - RNA, 14 nt, Human
ugucgcccagucug

SEQ ID NO: 1992314 - RNA, 15 nt, Human
ugucgcccagucugg

SEQ ID NO: 1992315 - RNA, 22 nt, Human
agucagaaguuucugccgcagc

SEQ ID NO: 1992316 - RNA, 16 nt, Human
agucagacagaugugg

SEQ ID NO: 1992317 - RNA, 19 nt, Human
agucccugaggcagguccc

SEQ ID NO: 1992318 - RNA, 20 nt, Human
agucccugaggcaggucccc

SEQ ID NO: 1992319 - RNA, 21 nt, Human
agucccucaagccaccagaug

SEQ ID NO: 1992320 - RNA, 22 nt, Human
aguccaggcuuuuuuaucaugu

SEQ ID NO: 1992321 - RNA, 17 nt, Human
agucaggcucucugggc

SEQ ID NO: 1992322 - RNA, 23 nt, Human
aguccaggacaggagaugcugug

SEQ ID NO: 1992323 - RNA, 22 nt, Human
agucccugaggcagguccccag

SEQ ID NO: 1992324 - RNA, 23 nt, Human
agucccugaggcagguccccaga

SEQ ID NO: 1992325 - RNA, 12 nt, Human
agucccugccaa

SEQ ID NO: 1992326 - RNA, 20 nt, Human
agucccuguaauuguuguuu

SEQ ID NO: 1992327 - RNA, 23 nt, Human
agucccuguaauuguuguuugua

SEQ ID NO: 1992328 - RNA, 16 nt, Human
agucccuguaauuguu

SEQ ID NO: 1992329 - RNA, 18 nt, Human
agucccuguaauuguugu

SEQ ID NO: 1992330 - RNA, 17 nt, Human
aguccgcagaagcccug

SEQ ID NO: 1992331 - RNA, 18 nt, Human
aguccgcagaagcccuga

SEQ ID NO: 1992332 - RNA, 23 nt, Human
aguccgaaagggacuuggaagcu

SEQ ID NO: 1992333 - RNA, 13 nt, Human
agucccuuuaaag

SEQ ID NO: 1992334 - RNA, 20 nt, Human
aguccgaccuggccugucug

SEQ ID NO: 1992335 - RNA, 21 nt, Human
aguccgaccuggccugucugu

SEQ ID NO: 1992336 - RNA, 15 nt, Human
aguccgcagaagccc

SEQ ID NO: 1992337 - RNA, 16 nt, Human
agucucacuguugccc

SEQ ID NO: 1992338 - RNA, 17 nt, Human
agucucacuguugccca

SEQ ID NO: 1992339 - RNA, 23 nt, Human
agucuagcguagugcagcagggc

SEQ ID NO: 1992340 - RNA, 20 nt, Human
agucucaccauuuccccagg

SEQ ID NO: 1992341 - RNA, 21 nt, Human
agucucaccauuuccccaggg

SEQ ID NO: 1992342 - RNA, 22 nt, Human
agucucaccauuuccccagggc

SEQ ID NO: 1992343 - RNA, 21 nt, Human
agucuagcguagugcagcagg

SEQ ID NO: 1992344 - RNA, 17 nt, Human
uguaauuuaaaauugug

SEQ ID NO: 1992345 - RNA, 20 nt, Human
uguaauuguuguuuguaugu

SEQ ID NO: 1992346 - RNA, 23 nt, Human
uguaauuguuguuuguauguaua

SEQ ID NO: 1992347 - RNA, 18 nt, Human
uguaauuuaaaauuguga

SEQ ID NO: 1992348 - RNA, 20 nt, Human
uguaauuuaaaauugugaug

SEQ ID NO: 1992349 - RNA, 13 nt, Human
uguaauuauuuga

SEQ ID NO: 1992350 - RNA, 14 nt, Human
uguaauuauuugaa

SEQ ID NO: 1992351 - RNA, 15 nt, Human
uguaauuauuugaau

SEQ ID NO: 1992352 - RNA, 17 nt, Human
uguaauuguuguuugua

SEQ ID NO: 1992353 - RNA, 19 nt, Human
uguaauuguuguuuguaug

SEQ ID NO: 1992354 - RNA, 23 nt, Human
uguaauuaaguacuauguaucaa

SEQ ID NO: 1992355 - RNA, 15 nt, Human
uguaaguaaacgguc

SEQ ID NO: 1992356 - RNA, 21 nt, Human
uguaagcguauggcuuuauuu

SEQ ID NO: 1992357 - RNA, 19 nt, Human
uguaagguauaucauucua

SEQ ID NO: 1992358 - RNA, 17 nt, Human
uguaagcguauggcuuu

SEQ ID NO: 1992359 - RNA, 15 nt, Human
uguaagaguguuuau

SEQ ID NO: 1992360 - RNA, 21 nt, Human
uguaacuuugguuaaaaucuc

SEQ ID NO: 1992361 - RNA, 23 nt, Human
uguaagagagaugagcacuucua

SEQ ID NO: 1992362 - RNA, 14 nt, Human
agguuggugggggc

SEQ ID NO: 1992363 - RNA, 18 nt, Human
agguugggugcugcuaau

SEQ ID NO: 1992364 - RNA, 22 nt, Human
agguugggugcugcuaauucuu

SEQ ID NO: 1992365 - RNA, 14 nt, Human
agguuggugaauuu

SEQ ID NO: 1992366 - RNA, 14 nt, Human
agguuguagcaugg

SEQ ID NO: 1992367 - RNA, 17 nt, Human
uguaacuuucugaaaua

SEQ ID NO: 1992368 - RNA, 23 nt, Human
agguugggagaaugucaguaugu

SEQ ID NO: 1992369 - RNA, 17 nt, Human
aggugguuauggagagg

SEQ ID NO: 1992370 - RNA, 15 nt, Human
agguugacaggaggu

SEQ ID NO: 1992371 - RNA, 18 nt, Human
agguggugggcauucucu

SEQ ID NO: 1992372 - RNA, 19 nt, Human
agguggugggcauucucuc

SEQ ID NO: 1992373 - RNA, 21 nt, Human
agguggugggcauucucucuc

SEQ ID NO: 1992374 - RNA, 15 nt, Human
aggugcacaagcucc

SEQ ID NO: 1992375 - RNA, 20 nt, Human
aggugcacaagcuccaagcu

SEQ ID NO: 1992376 - RNA, 18 nt, Human
aggugcacaagcuccaag

SEQ ID NO: 1992377 - RNA, 17 nt, Human
aggugcacaagcuccaa

SEQ ID NO: 1992378 - RNA, 16 nt, Human
aggugcacaagcucca

SEQ ID NO: 1992379 - RNA, 18 nt, Human
aggucuuggugccucugc

SEQ ID NO: 1992380 - RNA, 13 nt, Human
aggucuuggugcc

SEQ ID NO: 1992381 - RNA, 15 nt, Human
aggucuugcucuccu

SEQ ID NO: 1992382 - RNA, 23 nt, Human
aggucuugcucuccuagguagcc

SEQ ID NO: 1992383 - RNA, 11 nt, Human
agguccccaga

SEQ ID NO: 1992384 - RNA, 17 nt, Human
agguccccagcuuuggc

SEQ ID NO: 1992385 - RNA, 10 nt, Human
aggucccuaa

SEQ ID NO: 1992386 - RNA, 18 nt, Human
agguccccagcuuuggcu

SEQ ID NO: 1992387 - RNA, 23 nt, Human
aggucuugaacuccuggccucaa

SEQ ID NO: 1992388 - RNA, 20 nt, Human
aggugggauccuccaggugc

SEQ ID NO: 1992389 - RNA, 21 nt, Human
aggugcacaagcuccaagcuc

SEQ ID NO: 1992390 - RNA, 20 nt, Human
aggugcacuuggggcacagg

SEQ ID NO: 1992391 - RNA, 22 nt, Human
aggugcacuuggggcacaggga

SEQ ID NO: 1992392 - RNA, 23 nt, Human
aggugcacuuggggcacagggag

SEQ ID NO: 1992393 - RNA, 17 nt, Human
agguggccacuccagac

SEQ ID NO: 1992394 - RNA, 14 nt, Human
agguggccacucca

SEQ ID NO: 1992395 - RNA, 13 nt, Human
aggugcaggcagg

SEQ ID NO: 1992396 - RNA, 15 nt, Human
aggugcaggcaggcu

SEQ ID NO: 1992397 - RNA, 22 nt, Human
aguacaaugugacuuugaaaau

SEQ ID NO: 1992398 - RNA, 18 nt, Human
aguacaaugugacuuuga

SEQ ID NO: 1992399 - RNA, 19 nt, Human
aguacaaugugacuuugaa

SEQ ID NO: 1992400 - RNA, 21 nt, Human
aguaauccaagcaaaugugaa

SEQ ID NO: 1992401 - RNA, 15 nt, Human
aguaauccaagcaaa

SEQ ID NO: 1992402 - RNA, 22 nt, Human
aguaauauuuauuaaauuuuuu

SEQ ID NO: 1992403 - RNA, 13 nt, Human
aguaauauuuauu

SEQ ID NO: 1992404 - RNA, 15 nt, Human
aguaauauuuauuaa

SEQ ID NO: 1992405 - RNA, 19 nt, Human
aguaauauuuauuaaauuu

SEQ ID NO: 1992406 - RNA, 17 nt, Human
aguacacugccugccuu

SEQ ID NO: 1992407 - RNA, 19 nt, Human
aguacacugccugccuuaa

SEQ ID NO: 1992408 - RNA, 19 nt, Human
aguacuuuuggcauuuuac

SEQ ID NO: 1992409 - RNA, 16 nt, Human
aguacacuguuucaaa

SEQ ID NO: 1992410 - RNA, 20 nt, Human
aguacacuguuucaaacuuu

SEQ ID NO: 1992411 - RNA, 14 nt, Human
aguacacuguuuca

SEQ ID NO: 1992412 - RNA, 21 nt, Human
aguacacugaauuuuuaugug

SEQ ID NO: 1992413 - RNA, 13 nt, Human
aguacacugagag

SEQ ID NO: 1992414 - RNA, 12 nt, Human
aguacacugccu

SEQ ID NO: 1992415 - RNA, 20 nt, Human
uguaggaagguuaauguuca

SEQ ID NO: 1992416 - RNA, 18 nt, Human
uguaggaagguuaauguu

SEQ ID NO: 1992417 - RNA, 17 nt, Human
aguagaagucuuagaug

SEQ ID NO: 1992418 - RNA, 17 nt, Human
aguagagguauaauugu

SEQ ID NO: 1992419 - RNA, 18 nt, Human
aguagagguauaauugug

SEQ ID NO: 1992420 - RNA, 20 nt, Human
aguagagguauaauugugug

SEQ ID NO: 1992421 - RNA, 22 nt, Human
aguagagguauaauugugugau

SEQ ID NO: 1992422 - RNA, 12 nt, Human
aguagagacagg

SEQ ID NO: 1992423 - RNA, 14 nt, Human
aguagaacuuugua

SEQ ID NO: 1992424 - RNA, 15 nt, Human
aguagaacuuuguau

SEQ ID NO: 1992425 - RNA, 16 nt, Human
aguagaacuuuguaua

SEQ ID NO: 1992426 - RNA, 18 nt, Human
aguagaacuuuguauagu

SEQ ID NO: 1992427 - RNA, 19 nt, Human
aguagaacuuuguauaguu

SEQ ID NO: 1992428 - RNA, 21 nt, Human
aguagaacuuuguauaguuau

SEQ ID NO: 1992429 - RNA, 11 nt, Human
agguuuuccug

SEQ ID NO: 1992430 - RNA, 14 nt, Human
agguuuucuccccc

SEQ ID NO: 1992431 - RNA, 21 nt, Human
agguuuugcacucuuguuucu

SEQ ID NO: 1992432 - RNA, 20 nt, Human
aguaagccgugauuuucauu

SEQ ID NO: 1992433 - RNA, 15 nt, Human
aguaaaaauaaaauu

SEQ ID NO: 1992434 - RNA, 12 nt, Human
aguaaaaauaaa

SEQ ID NO: 1992435 - RNA, 18 nt, Human
aguaauaugcacacauuu

SEQ ID NO: 1992436 - RNA, 19 nt, Human
aguaauaugcacacauuuu

SEQ ID NO: 1992437 - RNA, 17 nt, Human
aguaauaugcacacauu

SEQ ID NO: 1992438 - RNA, 20 nt, Human
aguaauaugcacacauuuuu

SEQ ID NO: 1992439 - RNA, 22 nt, Human
aguaagcggcucaagcccagga

SEQ ID NO: 1992440 - RNA, 19 nt, Human
aguaagggaagcagaagga

SEQ ID NO: 1992441 - RNA, 21 nt, Human
aguaagggaacaaguugagcu

SEQ ID NO: 1992442 - RNA, 15 nt, Human
aguaagggaagcaga

SEQ ID NO: 1992443 - RNA, 21 nt, Human
aguaagcggcucaagcccagg

SEQ ID NO: 1992444 - RNA, 23 nt, Human
aguaaggaauuuuauuuuuuucu

SEQ ID NO: 1992445 - RNA, 21 nt, Human
uguaauuuaaaauugugaugu

SEQ ID NO: 1992446 - RNA, 22 nt, Human
uguaauuuaaaauugugaugug

SEQ ID NO: 1992447 - RNA, 14 nt, Human
uguaauuugugaua

SEQ ID NO: 1992448 - RNA, 19 nt, Human
uguaauuuaaggucuguuu

SEQ ID NO: 1992449 - RNA, 18 nt, Human
uguagaggagaaacugga

SEQ ID NO: 1992450 - RNA, 14 nt, Human
uguagagugggagc

SEQ ID NO: 1992451 - RNA, 13 nt, Human
uguagagugggag

SEQ ID NO: 1992452 - RNA, 18 nt, Human
aggggcuagcuaagccaa

SEQ ID NO: 1992453 - RNA, 18 nt, Human
aggggcuccaugccagcc

SEQ ID NO: 1992454 - RNA, 16 nt, Human
aggggcuccaugccag

SEQ ID NO: 1992455 - RNA, 15 nt, Human
agggggaaggcaggg

SEQ ID NO: 1992456 - RNA, 20 nt, Human
aggggcgugggaguggccug

SEQ ID NO: 1992457 - RNA, 23 nt, Human
aggggagcaaaaucgaugcagug

SEQ ID NO: 1992458 - RNA, 15 nt, Human
aggggccuggcagcc

SEQ ID NO: 1992459 - RNA, 15 nt, Human
aggggagacuuugau

SEQ ID NO: 1992460 - RNA, 18 nt, Human
aggggccuggcagccgug

SEQ ID NO: 1992461 - RNA, 23 nt, Human
aggggccuggcagccgugccuuc

SEQ ID NO: 1992462 - RNA, 19 nt, Human
uggggucacucuggcagcu

SEQ ID NO: 1992463 - RNA, 20 nt, Human
uggggucacucuggcagcuc

SEQ ID NO: 1992464 - RNA, 16 nt, Human
aggggagacagagcaa

SEQ ID NO: 1992465 - RNA, 13 nt, Human
aggggagacuuug

SEQ ID NO: 1992466 - RNA, 16 nt, Human
aggggacugccaccuc

SEQ ID NO: 1992467 - RNA, 17 nt, Human
aggggacugccaccucc

SEQ ID NO: 1992468 - RNA, 14 nt, Human
aggggagacagagc

SEQ ID NO: 1992469 - RNA, 15 nt, Human
aggggagacagagca

SEQ ID NO: 1992470 - RNA, 13 nt, Human
aggggacugccac

SEQ ID NO: 1992471 - RNA, 15 nt, Human
aggggacugccaccu

SEQ ID NO: 1992472 - RNA, 18 nt, Human
aggggguggccucccaac

SEQ ID NO: 1992473 - RNA, 17 nt, Human
aggggguggccucccaa

SEQ ID NO: 1992474 - RNA, 15 nt, Human
aggggguggccuccc

SEQ ID NO: 1992475 - RNA, 22 nt, Human
aggggugggacacccugugaug

SEQ ID NO: 1992476 - RNA, 20 nt, Human
aggggugggacacccuguga

SEQ ID NO: 1992477 - RNA, 24 nt, Human
agggguucccuuuuuuggcugcug

SEQ ID NO: 1992478 - RNA, 19 nt, Human
agggguuccuucugggcau

SEQ ID NO: 1992479 - RNA, 21 nt, Human
agggucucacuauguugccca

SEQ ID NO: 1992480 - RNA, 22 nt, Human
agggucucacuauguugcccag

SEQ ID NO: 1992481 - RNA, 23 nt, Human
agggucucacuauguugcccagg

SEQ ID NO: 1992482 - RNA, 16 nt, Human
uggguggggggcuuca

SEQ ID NO: 1992483 - RNA, 20 nt, Human
uggguggcuuaaaaaaaacu

SEQ ID NO: 1992484 - RNA, 21 nt, Human
ugggugcugcuaauucuuugc

SEQ ID NO: 1992485 - RNA, 16 nt, Human
ugguaaucauauuaga

SEQ ID NO: 1992486 - RNA, 15 nt, Human
ugguaccuugcacac

SEQ ID NO: 1992487 - RNA, 16 nt, Human
ugguaccuugcacaca

SEQ ID NO: 1992488 - RNA, 21 nt, Human
ugguaauaagggaaaaaucaa

SEQ ID NO: 1992489 - RNA, 14 nt, Human
ugguaaucauauua

SEQ ID NO: 1992490 - RNA, 16 nt, Human
ugguaauaagggaaaa

SEQ ID NO: 1992491 - RNA, 16 nt, Human
ugguacuaacuuuccu

SEQ ID NO: 1992492 - RNA, 20 nt, Human
ugguagcuuuucccuucuuu

SEQ ID NO: 1992493 - RNA, 13 nt, Human
ugguaggaacugc

SEQ ID NO: 1992494 - RNA, 21 nt, Human
ugguagcuuuucccuucuuuu

SEQ ID NO: 1992495 - RNA, 20 nt, Human
ugguaggaacugcugggcuu

SEQ ID NO: 1992496 - RNA, 17 nt, Human
ugguagcuuuucccuuc

SEQ ID NO: 1992497 - RNA, 22 nt, Human
uggucacaggacucugccuccu

SEQ ID NO: 1992498 - RNA, 23 nt, Human
uggucacaggacucugccuccuc

SEQ ID NO: 1992499 - RNA, 20 nt, Human
uggucacaggacucugccuc

SEQ ID NO: 1992500 - RNA, 19 nt, Human
ugggugcuuggaggaagga

SEQ ID NO: 1992501 - RNA, 15 nt, Human
ugggugcuuggagga

SEQ ID NO: 1992502 - RNA, 22 nt, Human
uggguggcaccagcagccugga

SEQ ID NO: 1992503 - RNA, 22 nt, Human
ugggugcuuggaggaaggaaac

SEQ ID NO: 1992504 - RNA, 12 nt, Human
ugggucugugug

SEQ ID NO: 1992505 - RNA, 13 nt, Human
ugggucuggagga

SEQ ID NO: 1992506 - RNA, 21 nt, Human
ugggucuggaggaccugcccg

SEQ ID NO: 1992507 - RNA, 15 nt, Human
agggugggagugggc

SEQ ID NO: 1992508 - RNA, 21 nt, Human
ugggucgcccuggacugugug

SEQ ID NO: 1992509 - RNA, 22 nt, Human
agggucucacucugucgcccag

SEQ ID NO: 1992510 - RNA, 21 nt, Human
agggucucacucugucgccca

SEQ ID NO: 1992511 - RNA, 16 nt, Human
agggucucuagugcug

SEQ ID NO: 1992512 - RNA, 18 nt, Human
agggucucuagugcugug

SEQ ID NO: 1992513 - RNA, 20 nt, Human
agggucucuagugcugugaa

SEQ ID NO: 1992514 - RNA, 21 nt, Human
agggucucuagugcugugaaa

SEQ ID NO: 1992515 - RNA, 22 nt, Human
agggucucuagugcugugaaaa

SEQ ID NO: 1992516 - RNA, 13 nt, Human
agguauuaagauu

SEQ ID NO: 1992517 - RNA, 19 nt, Human
aggucaccuuuauucuggc

SEQ ID NO: 1992518 - RNA, 18 nt, Human
aggucaccuuuauucugg

SEQ ID NO: 1992519 - RNA, 19 nt, Human
aggucaccucacucagcac

SEQ ID NO: 1992520 - RNA, 20 nt, Human
aggucaccucacucagcacc

SEQ ID NO: 1992521 - RNA, 21 nt, Human
aggucaccucacucagcacca

SEQ ID NO: 1992522 - RNA, 23 nt, Human
aggucaccucacucagcaccacu

SEQ ID NO: 1992523 - RNA, 14 nt, Human
aggucaccucacuc

SEQ ID NO: 1992524 - RNA, 17 nt, Human
aggucaccucacucagc

SEQ ID NO: 1992525 - RNA, 18 nt, Human
aggucaccucacucagca

SEQ ID NO: 1992526 - RNA, 17 nt, Human
aggucauuuuuuuuaag

SEQ ID NO: 1992527 - RNA, 20 nt, Human
aggucauuuuuuuuaagaaa

SEQ ID NO: 1992528 - RNA, 18 nt, Human
aggucauuuccauguaug

SEQ ID NO: 1992529 - RNA, 21 nt, Human
aggucauuuccauguaugcau

SEQ ID NO: 1992530 - RNA, 12 nt, Human
aggucagagccu

SEQ ID NO: 1992531 - RNA, 21 nt, Human
aggucauuaaggccacaucca

SEQ ID NO: 1992532 - RNA, 21 nt, Human
agguaugcaaucaaaucugcu

SEQ ID NO: 1992533 - RNA, 23 nt, Human
agguaguucaagaaaugaagagc

SEQ ID NO: 1992534 - RNA, 12 nt, Human
agguauaauugu

SEQ ID NO: 1992535 - RNA, 15 nt, Human
agguauaauugugug

SEQ ID NO: 1992536 - RNA, 19 nt, Human
agguauaauugugugauau

SEQ ID NO: 1992537 - RNA, 23 nt, Human
agguauaauucacauuguauuca

SEQ ID NO: 1992538 - RNA, 19 nt, Human
agguauaaguggugugugu

SEQ ID NO: 1992539 - RNA, 20 nt, Human
agguauaaguggugugugua

SEQ ID NO: 1992540 - RNA, 23 nt, Human
agguagaaauaucugaaaaugua

SEQ ID NO: 1992541 - RNA, 23 nt, Human
agguacuuugucuaagaaacauu

SEQ ID NO: 1992542 - RNA, 15 nt, Human
agguagaacgccagg

SEQ ID NO: 1992543 - RNA, 17 nt, Human
agguagaacgccaggga

SEQ ID NO: 1992544 - RNA, 18 nt, Human
agguagaacgccagggac

SEQ ID NO: 1992545 - RNA, 17 nt, Human
agguagaaugaccuugu

SEQ ID NO: 1992546 - RNA, 18 nt, Human
agguagaaugaccuugua

SEQ ID NO: 1992547 - RNA, 21 nt, Human
agguagaaugaccuuguaaug

SEQ ID NO: 1992548 - RNA, 17 nt, Human
agguagaauguuuucaa

SEQ ID NO: 1992549 - RNA, 17 nt, Human
agguaguucaagaaaug

SEQ ID NO: 1992550 - RNA, 19 nt, Human
agguaguucaagaaaugaa

SEQ ID NO: 1992551 - RNA, 22 nt, Human
agguaguucaagaaaugaagag

SEQ ID NO: 1992552 - RNA, 19 nt, Human
agguagaaauaucugaaaa

SEQ ID NO: 1992553 - RNA, 17 nt, Human
agguagaaauaucugaa

SEQ ID NO: 1992554 - RNA, 23 nt, Human
agguacuuucauauuuuaaacag

SEQ ID NO: 1992555 - RNA, 16 nt, Human
agguacuuugucuaag

SEQ ID NO: 1992556 - RNA, 18 nt, Human
aggguuggccccugcccg

SEQ ID NO: 1992557 - RNA, 23 nt, Human
aggguuggccccugcccggcugc

SEQ ID NO: 1992558 - RNA, 17 nt, Human
aggguuggccccugccc

SEQ ID NO: 1992559 - RNA, 19 nt, Human
aggguugggaaaauccaaa

SEQ ID NO: 1992560 - RNA, 14 nt, Human
uggucuccacuggg

SEQ ID NO: 1992561 - RNA, 19 nt, Human
uggucuauaccuuaagaau

SEQ ID NO: 1992562 - RNA, 17 nt, Human
uggucucaaacucuuga

SEQ ID NO: 1992563 - RNA, 23 nt, Human
uggucucaaacucuugaccucag

SEQ ID NO: 1992564 - RNA, 16 nt, Human
uggucucaaacucuug

SEQ ID NO: 1992565 - RNA, 19 nt, Human
uggucuaucuuugagcgcc

SEQ ID NO: 1992566 - RNA, 16 nt, Human
uggucccaccccacac

SEQ ID NO: 1992567 - RNA, 13 nt, Human
uggucccacucag

SEQ ID NO: 1992568 - RNA, 11 nt, Human
uggucagccca

SEQ ID NO: 1992569 - RNA, 12 nt, Human
uggucagcccaa

SEQ ID NO: 1992570 - RNA, 10 nt, Human
uggucagccc

SEQ ID NO: 1992571 - RNA, 20 nt, Human
uggucaccaaaucagcugcu

SEQ ID NO: 1992572 - RNA, 22 nt, Human
uggucagauuugaacucuucaa

SEQ ID NO: 1992573 - RNA, 18 nt, Human
uggucaccaaaucagcug

SEQ ID NO: 1992574 - RNA, 15 nt, Human
uggucccaccccaca

SEQ ID NO: 1992575 - RNA, 14 nt, Human
uggucccaccccac

SEQ ID NO: 1992576 - RNA, 16 nt, Human
uggucugacccacugc

SEQ ID NO: 1992577 - RNA, 17 nt, Human
uggucugacccacugcu

SEQ ID NO: 1992578 - RNA, 10 nt, Human
uggucuuuga

SEQ ID NO: 1992579 - RNA, 11 nt, Human
uggucuuugag

SEQ ID NO: 1992580 - RNA, 13 nt, Human
aggguuauaauaa

SEQ ID NO: 1992581 - RNA, 22 nt, Human
aggguguccggucccuguccca

SEQ ID NO: 1992582 - RNA, 21 nt, Human
agggugucugcccccuccuga

SEQ ID NO: 1992583 - RNA, 15 nt, Human
agggugucugccccc

SEQ ID NO: 1992584 - RNA, 16 nt, Human
ugggccaggagccucc

SEQ ID NO: 1992585 - RNA, 14 nt, Human
ugggccaggagccu

SEQ ID NO: 1992586 - RNA, 20 nt, Human
ugggcccaaugcacuuuguu

SEQ ID NO: 1992587 - RNA, 13 nt, Human
ugggccaggagcc

SEQ ID NO: 1992588 - RNA, 18 nt, Human
ugggccagaauuucaaac

SEQ ID NO: 1992589 - RNA, 17 nt, Human
ugggccagaauuucaaa

SEQ ID NO: 1992590 - RNA, 17 nt, Human
ugggcaacccccagccu

SEQ ID NO: 1992591 - RNA, 20 nt, Human
ugggcaacccccagccugcu

SEQ ID NO: 1992592 - RNA, 12 nt, Human
ugggcacacgcu

SEQ ID NO: 1992593 - RNA, 15 nt, Human
ugggcacacgcugcu

SEQ ID NO: 1992594 - RNA, 17 nt, Human
ugggcacacgcugcucu

SEQ ID NO: 1992595 - RNA, 20 nt, Human
ugggcacacgcugcucugcc

SEQ ID NO: 1992596 - RNA, 21 nt, Human
ugggcacacgcugcucugccc

SEQ ID NO: 1992597 - RNA, 22 nt, Human
ugggcacacgcugcucugcccc

SEQ ID NO: 1992598 - RNA, 23 nt, Human
ugggcacacgcugcucugcccca

SEQ ID NO: 1992599 - RNA, 13 nt, Human
ugggcacagguca

SEQ ID NO: 1992600 - RNA, 19 nt, Human
aggccuuaucuccaagacc

SEQ ID NO: 1992601 - RNA, 17 nt, Human
aggccuuaucuccaaga

SEQ ID NO: 1992602 - RNA, 17 nt, Human
ugggaggucaaggcugc

SEQ ID NO: 1992603 - RNA, 23 nt, Human
ugggaggucaaggcugcagugag

SEQ ID NO: 1992604 - RNA, 20 nt, Human
ugggaggucaaggcugcagu

SEQ ID NO: 1992605 - RNA, 19 nt, Human
ugggaggucaaggcugcag

SEQ ID NO: 1992606 - RNA, 18 nt, Human
ugggaggucaaggcugca

SEQ ID NO: 1992607 - RNA, 16 nt, Human
ugggcaacccccagcc

SEQ ID NO: 1992608 - RNA, 23 nt, Human
agggcccagagaggguggugacc

SEQ ID NO: 1992609 - RNA, 18 nt, Human
agggcccagagagggugg

SEQ ID NO: 1992610 - RNA, 18 nt, Human
agggcagggacagggccg

SEQ ID NO: 1992611 - RNA, 17 nt, Human
agggaggugaccccagg

SEQ ID NO: 1992612 - RNA, 17 nt, Human
agggagugacagaggca

SEQ ID NO: 1992613 - RNA, 18 nt, Human
agggagugacagaggcag

SEQ ID NO: 1992614 - RNA, 19 nt, Human
agggagugacagaggcagc

SEQ ID NO: 1992615 - RNA, 15 nt, Human
agggcagaguuacuu

SEQ ID NO: 1992616 - RNA, 16 nt, Human
agggcagauuuuaguu

SEQ ID NO: 1992617 - RNA, 15 nt, Human
agggagggcuucugc

SEQ ID NO: 1992618 - RNA, 14 nt, Human
ugggcccacauccg

SEQ ID NO: 1992619 - RNA, 19 nt, Human
ugggcccacccaagcagga

SEQ ID NO: 1992620 - RNA, 22 nt, Human
ugggcccacccaagcaggaggc

SEQ ID NO: 1992621 - RNA, 14 nt, Human
uggggcccugccuc

SEQ ID NO: 1992622 - RNA, 23 nt, Human
uggggaccucaggccugggggcu

SEQ ID NO: 1992623 - RNA, 12 nt, Human
uggggagaaagu

SEQ ID NO: 1992624 - RNA, 15 nt, Human
uggggaggggcugug

SEQ ID NO: 1992625 - RNA, 16 nt, Human
uggggcccugccuccu

SEQ ID NO: 1992626 - RNA, 15 nt, Human
uggggcccugccucc

SEQ ID NO: 1992627 - RNA, 20 nt, Human
uggggcuaaagacugaucuc

SEQ ID NO: 1992628 - RNA, 23 nt, Human
uggggcuaggaaauccagggugg

SEQ ID NO: 1992629 - RNA, 18 nt, Human
uggggcggugagagggga

SEQ ID NO: 1992630 - RNA, 15 nt, Human
ugggguagguuggga

SEQ ID NO: 1992631 - RNA, 21 nt, Human
ugggguagguugggagaaugu

SEQ ID NO: 1992632 - RNA, 15 nt, Human
ugggguaugggagag

SEQ ID NO: 1992633 - RNA, 18 nt, Human
uggggucacucuggcagc

SEQ ID NO: 1992634 - RNA, 17 nt, Human
uggggucacucuggcag

SEQ ID NO: 1992635 - RNA, 15 nt, Human
ugggguacccacugc

SEQ ID NO: 1992636 - RNA, 16 nt, Human
ugggguacccacugcu

SEQ ID NO: 1992637 - RNA, 20 nt, Human
ugggguacccacugcucugg

SEQ ID NO: 1992638 - RNA, 22 nt, Human
uggggcugggggaugggccuga

SEQ ID NO: 1992639 - RNA, 13 nt, Human
uggggcuggggga

SEQ ID NO: 1992640 - RNA, 16 nt, Human
uggggcugggggaugg

SEQ ID NO: 1992641 - RNA, 18 nt, Human
uggggcugggggaugggc

SEQ ID NO: 1992642 - RNA, 21 nt, Human
uggggcugggggaugggccug

SEQ ID NO: 1992643 - RNA, 14 nt, Human
uggggcugauugua

SEQ ID NO: 1992644 - RNA, 18 nt, Human
uggggcugggcccaccca

SEQ ID NO: 1992645 - RNA, 20 nt, Human
uggggcugcaccggcuggcc

SEQ ID NO: 1992646 - RNA, 14 nt, Human
ugggguacccacug

SEQ ID NO: 1992647 - RNA, 17 nt, Human
agggcuuuaaaauucuc

SEQ ID NO: 1992648 - RNA, 20 nt, Human
ugggcucccuucccaccucu

SEQ ID NO: 1992649 - RNA, 17 nt, Human
ugggcugcccuggugcu

SEQ ID NO: 1992650 - RNA, 19 nt, Human
ugggcugcccuggugcugc

SEQ ID NO: 1992651 - RNA, 20 nt, Human
ugggcugcccuggugcugcc

SEQ ID NO: 1992652 - RNA, 21 nt, Human
ugggcugcccuggugcugcca

SEQ ID NO: 1992653 - RNA, 19 nt, Human
ugggcucccuucccaccuc

SEQ ID NO: 1992654 - RNA, 18 nt, Human
ugggcucccuucccaccu

SEQ ID NO: 1992655 - RNA, 14 nt, Human
agggcuuguaguuc

SEQ ID NO: 1992656 - RNA, 15 nt, Human
agggcuuguaguucu

SEQ ID NO: 1992657 - RNA, 16 nt, Human
agggcuuguaguucuu

SEQ ID NO: 1992658 - RNA, 17 nt, Human
agggcuuguaguucuuu

SEQ ID NO: 1992659 - RNA, 19 nt, Human
agggcuuguaguucuuuaa

SEQ ID NO: 1992660 - RNA, 14 nt, Human
agggcuuuaaaauu

SEQ ID NO: 1992661 - RNA, 15 nt, Human
agggcuuuaaaauuc

SEQ ID NO: 1992662 - RNA, 16 nt, Human
agggcuuuaaaauucu

SEQ ID NO: 1992663 - RNA, 18 nt, Human
agggcuuuaaaauucucu

SEQ ID NO: 1992664 - RNA, 23 nt, Human
agggcuucugccauuucugagau

SEQ ID NO: 1992665 - RNA, 15 nt, Human
uggggaccagagcug

SEQ ID NO: 1992666 - RNA, 14 nt, Human
uggggaccagagcu

SEQ ID NO: 1992667 - RNA, 20 nt, Human
uggggacaggggcaggagga

SEQ ID NO: 1992668 - RNA, 22 nt, Human
uggggacaggggcaggaggaag

SEQ ID NO: 1992669 - RNA, 17 nt, Human
uggggacagagcagaac

SEQ ID NO: 1992670 - RNA, 18 nt, Human
uggggaccagagcugcca

SEQ ID NO: 1992671 - RNA, 17 nt, Human
uggggaccagagcugcc

SEQ ID NO: 1992672 - RNA, 13 nt, Human
uggggaccucagg

SEQ ID NO: 1992673 - RNA, 21 nt, Human
uggggaccagcagucugccug

SEQ ID NO: 1992674 - RNA, 23 nt, Human
uggggaccagcagucugccugga

SEQ ID NO: 1992675 - RNA, 14 nt, Human
uggggaaugaagau

SEQ ID NO: 1992676 - RNA, 15 nt, Human
uggggaaugaagaua

SEQ ID NO: 1992677 - RNA, 14 nt, Human
ugggcugggcacug

SEQ ID NO: 1992678 - RNA, 19 nt, Human
ugggcuggguucuacccag

SEQ ID NO: 1992679 - RNA, 18 nt, Human
ugggcuggguucuaccca

SEQ ID NO: 1992680 - RNA, 12 nt, Human
ugggcugggcac

SEQ ID NO: 1992681 - RNA, 16 nt, Human
agcuguguggcagucu

SEQ ID NO: 1992682 - RNA, 14 nt, Human
agcuguguggcagu

SEQ ID NO: 1992683 - RNA, 21 nt, Human
agcugugcucuggacaggcau

SEQ ID NO: 1992684 - RNA, 18 nt, Human
agcugugugcucuccaag

SEQ ID NO: 1992685 - RNA, 23 nt, Human
agcugugcucuggacaggcaugu

SEQ ID NO: 1992686 - RNA, 19 nt, Human
agcugugcucuggacaggc

SEQ ID NO: 1992687 - RNA, 20 nt, Human
agcugugcucuggacaggca

SEQ ID NO: 1992688 - RNA, 18 nt, Human
agcuggcuccagccugga

SEQ ID NO: 1992689 - RNA, 15 nt, Human
agcugggacuacagg

SEQ ID NO: 1992690 - RNA, 18 nt, Human
agcugggaccacaggugc

SEQ ID NO: 1992691 - RNA, 15 nt, Human
agcugggaccaguac

SEQ ID NO: 1992692 - RNA, 20 nt, Human
agcuggcuuacacuggcaau

SEQ ID NO: 1992693 - RNA, 20 nt, Human
ugccuguugggccaggagcc

SEQ ID NO: 1992694 - RNA, 19 nt, Human
ugccuguugggccaggagc

SEQ ID NO: 1992695 - RNA, 21 nt, Human
ugccuguucagcuccagcuca

SEQ ID NO: 1992696 - RNA, 16 nt, Human
ugccuuauggaacacu

SEQ ID NO: 1992697 - RNA, 15 nt, Human
ugccuuauggaacac

SEQ ID NO: 1992698 - RNA, 20 nt, Human
agcugugugcucuccaagcc

SEQ ID NO: 1992699 - RNA, 14 nt, Human
agcuguguuauuau

SEQ ID NO: 1992700 - RNA, 14 nt, Human
agcuguuacugucu

SEQ ID NO: 1992701 - RNA, 14 nt, Human
agcuguucagcugg

SEQ ID NO: 1992702 - RNA, 13 nt, Human
agcuguucagcug

SEQ ID NO: 1992703 - RNA, 18 nt, Human
ugccuguucagcuccagc

SEQ ID NO: 1992704 - RNA, 20 nt, Human
ugccuguucagcuccagcuc

SEQ ID NO: 1992705 - RNA, 15 nt, Human
ugccugcccuauucu

SEQ ID NO: 1992706 - RNA, 10 nt, Human
ugccugcccu

SEQ ID NO: 1992707 - RNA, 20 nt, Human
ugccugcccugucaggaggc

SEQ ID NO: 1992708 - RNA, 23 nt, Human
ugccugcccugucaggaggcaga

SEQ ID NO: 1992709 - RNA, 13 nt, Human
ugccugcccuuug

SEQ ID NO: 1992710 - RNA, 15 nt, Human
ugccugcccuuuguc

SEQ ID NO: 1992711 - RNA, 21 nt, Human
ugccugcccuuuguccuccug

SEQ ID NO: 1992712 - RNA, 14 nt, Human
ugccugcccaggcc

SEQ ID NO: 1992713 - RNA, 15 nt, Human
ugccugcccaggccc

SEQ ID NO: 1992714 - RNA, 16 nt, Human
ugccugcccaggcccc

SEQ ID NO: 1992715 - RNA, 12 nt, Human
ugcccaggcagg

SEQ ID NO: 1992716 - RNA, 13 nt, Human
ugcccaggcaggu

SEQ ID NO: 1992717 - RNA, 14 nt, Human
ugcccaggcagguc

SEQ ID NO: 1992718 - RNA, 13 nt, Human
ugccucugccucu

SEQ ID NO: 1992719 - RNA, 14 nt, Human
ugccucugccucug

SEQ ID NO: 1992720 - RNA, 15 nt, Human
ugccucugccucuga

SEQ ID NO: 1992721 - RNA, 22 nt, Human
agcuggaucuccauucucucag

SEQ ID NO: 1992722 - RNA, 21 nt, Human
agcugcuuuugucuaugggac

SEQ ID NO: 1992723 - RNA, 21 nt, Human
agcugcuugggcuucauccuc

SEQ ID NO: 1992724 - RNA, 19 nt, Human
agcugccuguucagcucca

SEQ ID NO: 1992725 - RNA, 21 nt, Human
agcugccuguucagcuccagc

SEQ ID NO: 1992726 - RNA, 22 nt, Human
agcugccuguucagcuccagcu

SEQ ID NO: 1992727 - RNA, 15 nt, Human
ugccuggauggggcu

SEQ ID NO: 1992728 - RNA, 14 nt, Human
ugccuggaggccag

SEQ ID NO: 1992729 - RNA, 14 nt, Human
ugccuggauggggc

SEQ ID NO: 1992730 - RNA, 20 nt, Human
agcugccuguucagcuccag

SEQ ID NO: 1992731 - RNA, 14 nt, Human
agcuugaggguugg

SEQ ID NO: 1992732 - RNA, 18 nt, Human
agcuugaggguugggcug

SEQ ID NO: 1992733 - RNA, 11 nt, Human
agcuugggcag

SEQ ID NO: 1992734 - RNA, 17 nt, Human
agcuugggcagaucucc

SEQ ID NO: 1992735 - RNA, 23 nt, Human
agcuuggggacaggggcaggagg

SEQ ID NO: 1992736 - RNA, 21 nt, Human
agcuugggcagaucucccaca

SEQ ID NO: 1992737 - RNA, 23 nt, Human
agcuugggcagaucucccacaug

SEQ ID NO: 1992738 - RNA, 18 nt, Human
agcuuguaaauagcucag

SEQ ID NO: 1992739 - RNA, 15 nt, Human
agcuuagaaacugga

SEQ ID NO: 1992740 - RNA, 13 nt, Human
agcuuacguaguu

SEQ ID NO: 1992741 - RNA, 15 nt, Human
agcuuacguaguucu

SEQ ID NO: 1992742 - RNA, 19 nt, Human
agcuugaccgugaggccag

SEQ ID NO: 1992743 - RNA, 18 nt, Human
agcuuagaauuauuugca

SEQ ID NO: 1992744 - RNA, 17 nt, Human
agcuguugaugggauga

SEQ ID NO: 1992745 - RNA, 23 nt, Human
agcuguugaugggaugauugaag

SEQ ID NO: 1992746 - RNA, 22 nt, Human
agcuguuggccucugcaaagga

SEQ ID NO: 1992747 - RNA, 13 nt, Human
agcuguugacucu

SEQ ID NO: 1992748 - RNA, 20 nt, Human
agcuguugacucuaguacug

SEQ ID NO: 1992749 - RNA, 21 nt, Human
agcuguugacucuaguacugu

SEQ ID NO: 1992750 - RNA, 23 nt, Human
agcuguugacucuaguacuguga

SEQ ID NO: 1992751 - RNA, 13 nt, Human
agcuguugaccag

SEQ ID NO: 1992752 - RNA, 15 nt, Human
agcuguucuuccugg

SEQ ID NO: 1992753 - RNA, 13 nt, Human
agcuguucuuccu

SEQ ID NO: 1992754 - RNA, 14 nt, Human
agcuguucuuccug

SEQ ID NO: 1992755 - RNA, 14 nt, Human
agcuguugaccagg

SEQ ID NO: 1992756 - RNA, 15 nt, Human
agcuguugaccaggc

SEQ ID NO: 1992757 - RNA, 16 nt, Human
agcuguugaccaggca

SEQ ID NO: 1992758 - RNA, 18 nt, Human
agcuguugaccaggcacc

SEQ ID NO: 1992759 - RNA, 18 nt, Human
ugcuaaguaaaucucuuc

SEQ ID NO: 1992760 - RNA, 20 nt, Human
ugcuaaguaaaucucuucug

SEQ ID NO: 1992761 - RNA, 21 nt, Human
ugcuaaguaaaucucuucugu

SEQ ID NO: 1992762 - RNA, 20 nt, Human
ugcgggcuuccuccuggugu

SEQ ID NO: 1992763 - RNA, 19 nt, Human
ugcggccuuuggcuucacg

SEQ ID NO: 1992764 - RNA, 17 nt, Human
ugcggccuuuggcuuca

SEQ ID NO: 1992765 - RNA, 15 nt, Human
ugcggccuuuucaug

SEQ ID NO: 1992766 - RNA, 17 nt, Human
ugcgggucacaggaggg

SEQ ID NO: 1992767 - RNA, 17 nt, Human
ugcgguccacccaggag

SEQ ID NO: 1992768 - RNA, 14 nt, Human
ugcgggucacagga

SEQ ID NO: 1992769 - RNA, 16 nt, Human
ugcgggucacaggagg

SEQ ID NO: 1992770 - RNA, 14 nt, Human
ugcggggcgggcac

SEQ ID NO: 1992771 - RNA, 18 nt, Human
ugcggggcgggcacaccu

SEQ ID NO: 1992772 - RNA, 21 nt, Human
ugcggugcuaucucccccagc

SEQ ID NO: 1992773 - RNA, 17 nt, Human
ugcggugcuaucucccc

SEQ ID NO: 1992774 - RNA, 18 nt, Human
ugcgguccacccaggagc

SEQ ID NO: 1992775 - RNA, 18 nt, Human
ugccuuugcagcucagaa

SEQ ID NO: 1992776 - RNA, 17 nt, Human
ugccuuugcucuggucu

SEQ ID NO: 1992777 - RNA, 19 nt, Human
ugccuuuggcacucugacu

SEQ ID NO: 1992778 - RNA, 18 nt, Human
ugccuuugaagagugaaa

SEQ ID NO: 1992779 - RNA, 11 nt, Human
ugccuuucugu

SEQ ID NO: 1992780 - RNA, 16 nt, Human
ugccuuucuguguuua

SEQ ID NO: 1992781 - RNA, 12 nt, Human
ugccuuugaaga

SEQ ID NO: 1992782 - RNA, 13 nt, Human
ugccuuugaagag

SEQ ID NO: 1992783 - RNA, 16 nt, Human
ugccuuugaagaguga

SEQ ID NO: 1992784 - RNA, 19 nt, Human
ugcggagucauuuuguguu

SEQ ID NO: 1992785 - RNA, 23 nt, Human
ugcggagucauuuuguguugaag

SEQ ID NO: 1992786 - RNA, 23 nt, Human
ugcggacagccacggccaggcca

SEQ ID NO: 1992787 - RNA, 22 nt, Human
ugcggacagccacggccaggcc

SEQ ID NO: 1992788 - RNA, 17 nt, Human
ugcugucccuuuuccuu

SEQ ID NO: 1992789 - RNA, 13 nt, Human
ugcugugcaaaug

SEQ ID NO: 1992790 - RNA, 12 nt, Human
ugcugugccccu

SEQ ID NO: 1992791 - RNA, 15 nt, Human
ugcugugccccuggc

SEQ ID NO: 1992792 - RNA, 16 nt, Human
ugcugugccccuggcc

SEQ ID NO: 1992793 - RNA, 15 nt, Human
ugcugucccuuuucc

SEQ ID NO: 1992794 - RNA, 19 nt, Human
ugcugucccuuacgugagu

SEQ ID NO: 1992795 - RNA, 15 nt, Human
ugcuguauucccaua

SEQ ID NO: 1992796 - RNA, 17 nt, Human
ugcugucccuuacguga

SEQ ID NO: 1992797 - RNA, 23 nt, Human
ugcuucaaggauccugagccaga

SEQ ID NO: 1992798 - RNA, 21 nt, Human
ugcuucaaggauccugagcca

SEQ ID NO: 1992799 - RNA, 20 nt, Human
ugcuucaaggauccugagcc

SEQ ID NO: 1992800 - RNA, 12 nt, Human
ugcuuccagaaa

SEQ ID NO: 1992801 - RNA, 13 nt, Human
ugcuuccagaaac

SEQ ID NO: 1992802 - RNA, 14 nt, Human
ugcuuccagaaaca

SEQ ID NO: 1992803 - RNA, 18 nt, Human
ugcuucauguuugccuuc

SEQ ID NO: 1992804 - RNA, 16 nt, Human
ugcuuccagugaggcu

SEQ ID NO: 1992805 - RNA, 18 nt, Human
aggacacuaaccacgcug

SEQ ID NO: 1992806 - RNA, 17 nt, Human
aggacagccccuccucc

SEQ ID NO: 1992807 - RNA, 16 nt, Human
aggacagaaggcuccu

SEQ ID NO: 1992808 - RNA, 17 nt, Human
aggacagaaggcuccug

SEQ ID NO: 1992809 - RNA, 19 nt, Human
aggacagaaggcuccugcc

SEQ ID NO: 1992810 - RNA, 21 nt, Human
aggacagaaggcuccugcccc

SEQ ID NO: 1992811 - RNA, 22 nt, Human
aggacagaaggcuccugccccc

SEQ ID NO: 1992812 - RNA, 17 nt, Human
aggacacugcagaacag

SEQ ID NO: 1992813 - RNA, 19 nt, Human
ugcugggauuacaagcgug

SEQ ID NO: 1992814 - RNA, 19 nt, Human
ugcuggcuguuggcugggg

SEQ ID NO: 1992815 - RNA, 21 nt, Human
ugcuggcuguuggcugggggc

SEQ ID NO: 1992816 - RNA, 13 nt, Human
ugcuggcugccuu

SEQ ID NO: 1992817 - RNA, 15 nt, Human
ugcuggccggacacc

SEQ ID NO: 1992818 - RNA, 16 nt, Human
ugcuggccggacaccc

SEQ ID NO: 1992819 - RNA, 23 nt, Human
ugcuguauccauccauggggcug

SEQ ID NO: 1992820 - RNA, 21 nt, Human
ugcugggauuacaagcgugag

SEQ ID NO: 1992821 - RNA, 17 nt, Human
ugcugggauuacaggug

SEQ ID NO: 1992822 - RNA, 15 nt, Human
ugcuguagacauuug

SEQ ID NO: 1992823 - RNA, 23 nt, Human
ugcuguaguguugucuuugauaa

SEQ ID NO: 1992824 - RNA, 18 nt, Human
ugcuggcaucaagaggug

SEQ ID NO: 1992825 - RNA, 21 nt, Human
ugcugcccugcccaccuggcc

SEQ ID NO: 1992826 - RNA, 19 nt, Human
ugcugcccugcccaccugg

SEQ ID NO: 1992827 - RNA, 11 nt, Human
ugcugcccugu

SEQ ID NO: 1992828 - RNA, 17 nt, Human
aggaauggacauuucua

SEQ ID NO: 1992829 - RNA, 18 nt, Human
ugcugcccugcccaccug

SEQ ID NO: 1992830 - RNA, 17 nt, Human
ugcugcccugcccaccu

SEQ ID NO: 1992831 - RNA, 16 nt, Human
ugcugcccugcccacc

SEQ ID NO: 1992832 - RNA, 13 nt, Human
ugcugcccugccc

SEQ ID NO: 1992833 - RNA, 15 nt, Human
aggaauggacauuuc

SEQ ID NO: 1992834 - RNA, 16 nt, Human
aggaauggacauuucu

SEQ ID NO: 1992835 - RNA, 19 nt, Human
aggaaugcacauggaauau

SEQ ID NO: 1992836 - RNA, 19 nt, Human
aggaaaucaccgaaaacgu

SEQ ID NO: 1992837 - RNA, 15 nt, Human
aggaaaucaccgaaa

SEQ ID NO: 1992838 - RNA, 17 nt, Human
aggaagcacaugccucu

SEQ ID NO: 1992839 - RNA, 16 nt, Human
aggaagcacaugccuc

SEQ ID NO: 1992840 - RNA, 11 nt, Human
aggaagcacau

SEQ ID NO: 1992841 - RNA, 14 nt, Human
aggaaauccagggu

SEQ ID NO: 1992842 - RNA, 16 nt, Human
aggaaaggcuccagga

SEQ ID NO: 1992843 - RNA, 15 nt, Human
aggaaaggcuccagg

SEQ ID NO: 1992844 - RNA, 14 nt, Human
aggaaaggcuccag

SEQ ID NO: 1992845 - RNA, 13 nt, Human
aggaaaggcucca

SEQ ID NO: 1992846 - RNA, 16 nt, Human
ugcugacuguuuucuc

SEQ ID NO: 1992847 - RNA, 21 nt, Human
ugcugacuguacuccucccag

SEQ ID NO: 1992848 - RNA, 22 nt, Human
ugcugacuguacuccucccagg

SEQ ID NO: 1992849 - RNA, 23 nt, Human
aggaagccagcaggcucucaggc

SEQ ID NO: 1992850 - RNA, 22 nt, Human
aggaagccagcaggcucucagg

SEQ ID NO: 1992851 - RNA, 21 nt, Human
aggaagccagcaggcucucag

SEQ ID NO: 1992852 - RNA, 22 nt, Human
aggaagcacaugccucucucag

SEQ ID NO: 1992853 - RNA, 20 nt, Human
aggaagccgcuggggccagu

SEQ ID NO: 1992854 - RNA, 19 nt, Human
aggaagccgcuggggccag

SEQ ID NO: 1992855 - RNA, 18 nt, Human
aggaagccgcuggggcca

SEQ ID NO: 1992856 - RNA, 22 nt, Human
aggaaggaaacccagcucuggu

SEQ ID NO: 1992857 - RNA, 20 nt, Human
aggaaggaaacccagcucug

SEQ ID NO: 1992858 - RNA, 23 nt, Human
aggaaggaaacccagcucugguc

SEQ ID NO: 1992859 - RNA, 12 nt, Human
aggaagcucagg

SEQ ID NO: 1992860 - RNA, 15 nt, Human
agcuuuaaaagaaaa

SEQ ID NO: 1992861 - RNA, 13 nt, Human
agcuuuaaaagaa

SEQ ID NO: 1992862 - RNA, 21 nt, Human
agcuuuaaugauaugcuugua

SEQ ID NO: 1992863 - RNA, 19 nt, Human
ugcuaucucccccagcccc

SEQ ID NO: 1992864 - RNA, 18 nt, Human
ugcuauuguagagccaga

SEQ ID NO: 1992865 - RNA, 17 nt, Human
ugcuaugucauuucaug

SEQ ID NO: 1992866 - RNA, 18 nt, Human
ugcuaugucauuucaugu

SEQ ID NO: 1992867 - RNA, 19 nt, Human
ugcuaugucauuucauguc

SEQ ID NO: 1992868 - RNA, 18 nt, Human
ugcuauuacgaaguucaa

SEQ ID NO: 1992869 - RNA, 19 nt, Human
ugcuauuacgaaguucaag

SEQ ID NO: 1992870 - RNA, 20 nt, Human
ugcuaucucccccagcccca

SEQ ID NO: 1992871 - RNA, 16 nt, Human
ugcuaugucauuucau

SEQ ID NO: 1992872 - RNA, 15 nt, Human
ugcuaugucauuuca

SEQ ID NO: 1992873 - RNA, 15 nt, Human
ugcuaucucuauuau

SEQ ID NO: 1992874 - RNA, 18 nt, Human
ugcuccccugugccagcc

SEQ ID NO: 1992875 - RNA, 16 nt, Human
ugcuccccuuccccuu

SEQ ID NO: 1992876 - RNA, 13 nt, Human
ugcucccccuuuu

SEQ ID NO: 1992877 - RNA, 15 nt, Human
ugcucccccuuuucc

SEQ ID NO: 1992878 - RNA, 14 nt, Human
ugcucuggacaggc

SEQ ID NO: 1992879 - RNA, 15 nt, Human
ugcucuggacaggca

SEQ ID NO: 1992880 - RNA, 16 nt, Human
ugcucuggacaggcau

SEQ ID NO: 1992881 - RNA, 14 nt, Human
ugcugacuguacuc

SEQ ID NO: 1992882 - RNA, 16 nt, Human
ugcugacuguacuccu

SEQ ID NO: 1992883 - RNA, 19 nt, Human
ugcugacuguacuccuccc

SEQ ID NO: 1992884 - RNA, 13 nt, Human
uggauuguccccg

SEQ ID NO: 1992885 - RNA, 21 nt, Human
uggauuguccccgacccuugc

SEQ ID NO: 1992886 - RNA, 17 nt, Human
uggauuauauuaugaag

SEQ ID NO: 1992887 - RNA, 16 nt, Human
uggauuauucaggcuu

SEQ ID NO: 1992888 - RNA, 16 nt, Human
uggauuauucuuucuc

SEQ ID NO: 1992889 - RNA, 22 nt, Human
uggauuauucuuucuccuuuuu

SEQ ID NO: 1992890 - RNA, 14 nt, Human
uggaguauauguca

SEQ ID NO: 1992891 - RNA, 13 nt, Human
uggaguagaaugu

SEQ ID NO: 1992892 - RNA, 16 nt, Human
uggaugggcagucauu

SEQ ID NO: 1992893 - RNA, 15 nt, Human
uggauggaaggggcu

SEQ ID NO: 1992894 - RNA, 20 nt, Human
uggagguacgaaaagagggg

SEQ ID NO: 1992895 - RNA, 23 nt, Human
aggccaagaguggccccaccugg

SEQ ID NO: 1992896 - RNA, 19 nt, Human
aggccaagaguggccccac

SEQ ID NO: 1992897 - RNA, 20 nt, Human
aggccaagaguggccccacc

SEQ ID NO: 1992898 - RNA, 21 nt, Human
aggccaagaguggccccaccu

SEQ ID NO: 1992899 - RNA, 22 nt, Human
aggccaagaguggccccaccug

SEQ ID NO: 1992900 - RNA, 16 nt, Human
aggccaaggugggagg

SEQ ID NO: 1992901 - RNA, 13 nt, Human
aggccaagagguu

SEQ ID NO: 1992902 - RNA, 14 nt, Human
aggccaagagguuu

SEQ ID NO: 1992903 - RNA, 21 nt, Human
aggccaagagguuuggcuccu

SEQ ID NO: 1992904 - RNA, 15 nt, Human
aggccaagaguggcc

SEQ ID NO: 1992905 - RNA, 16 nt, Human
aggccaagaguggccc

SEQ ID NO: 1992906 - RNA, 18 nt, Human
aggccaagaguggcccca

SEQ ID NO: 1992907 - RNA, 19 nt, Human
aggccaaaggaagcacaug

SEQ ID NO: 1992908 - RNA, 18 nt, Human
aggccaaaggaagcacau

SEQ ID NO: 1992909 - RNA, 16 nt, Human
aggccaaaggaagcac

SEQ ID NO: 1992910 - RNA, 18 nt, Human
aggcagccaggccacaag

SEQ ID NO: 1992911 - RNA, 16 nt, Human
aggcagccccauucug

SEQ ID NO: 1992912 - RNA, 17 nt, Human
aggcagccccauucugc

SEQ ID NO: 1992913 - RNA, 16 nt, Human
aggcccaugggaggcu

SEQ ID NO: 1992914 - RNA, 18 nt, Human
aggcccaugggaggcugg

SEQ ID NO: 1992915 - RNA, 21 nt, Human
aggcccaugggaggcuggagu

SEQ ID NO: 1992916 - RNA, 23 nt, Human
aggcccagcgcggacauccccug

SEQ ID NO: 1992917 - RNA, 12 nt, Human
aggcccagcacc

SEQ ID NO: 1992918 - RNA, 16 nt, Human
aggccccgcccaggcu

SEQ ID NO: 1992919 - RNA, 16 nt, Human
aggccccaauacccca

SEQ ID NO: 1992920 - RNA, 19 nt, Human
aggccccaauaccccaugg

SEQ ID NO: 1992921 - RNA, 21 nt, Human
aggcccagagggccugcaagg

SEQ ID NO: 1992922 - RNA, 20 nt, Human
aggccagagggagugacaga

SEQ ID NO: 1992923 - RNA, 19 nt, Human
uggcagcucaccucucccu

SEQ ID NO: 1992924 - RNA, 16 nt, Human
aggccacaagacccuu

SEQ ID NO: 1992925 - RNA, 15 nt, Human
uggcagcucaccucu

SEQ ID NO: 1992926 - RNA, 17 nt, Human
uggcagccuuggcaaac

SEQ ID NO: 1992927 - RNA, 18 nt, Human
aggccacaagacccuugu

SEQ ID NO: 1992928 - RNA, 17 nt, Human
aggccacaagacccuug

SEQ ID NO: 1992929 - RNA, 19 nt, Human
aggccacaagacccuugug

SEQ ID NO: 1992930 - RNA, 14 nt, Human
aggccagagggagu

SEQ ID NO: 1992931 - RNA, 18 nt, Human
uggcacagggcaguggga

SEQ ID NO: 1992932 - RNA, 20 nt, Human
uggcaauggaugaacugaaa

SEQ ID NO: 1992933 - RNA, 16 nt, Human
uggcaaugguaguuuc

SEQ ID NO: 1992934 - RNA, 17 nt, Human
uggcaaugguaguuucu

SEQ ID NO: 1992935 - RNA, 18 nt, Human
uggcaaugguaguuucug

SEQ ID NO: 1992936 - RNA, 19 nt, Human
uggcaaugguaguuucugu

SEQ ID NO: 1992937 - RNA, 21 nt, Human
uggcaaugguaguuucugugg

SEQ ID NO: 1992938 - RNA, 18 nt, Human
uggcaauguuuugcuuuu

SEQ ID NO: 1992939 - RNA, 16 nt, Human
uggcacagggcaugaa

SEQ ID NO: 1992940 - RNA, 19 nt, Human
uggcacagggcaugaaaug

SEQ ID NO: 1992941 - RNA, 20 nt, Human
uggcacagggcaugaaauga

SEQ ID NO: 1992942 - RNA, 13 nt, Human
uggcccacgcacu

SEQ ID NO: 1992943 - RNA, 14 nt, Human
uggcccugcccugg

SEQ ID NO: 1992944 - RNA, 14 nt, Human
uggcccaccaggcc

SEQ ID NO: 1992945 - RNA, 19 nt, Human
uggcccaccaggccccccu

SEQ ID NO: 1992946 - RNA, 20 nt, Human
uggcccaacaggggcuccau

SEQ ID NO: 1992947 - RNA, 23 nt, Human
uggccgggcgcgguggcucacgc

SEQ ID NO: 1992948 - RNA, 14 nt, Human
uggcccuggcagcc

SEQ ID NO: 1992949 - RNA, 13 nt, Human
uggccucuucaga

SEQ ID NO: 1992950 - RNA, 21 nt, Human
uggccugaagaguccucugaa

SEQ ID NO: 1992951 - RNA, 19 nt, Human
uggccugaaccacaggaga

SEQ ID NO: 1992952 - RNA, 20 nt, Human
uggccugaaccacaggagag

SEQ ID NO: 1992953 - RNA, 14 nt, Human
uggccugacucccc

SEQ ID NO: 1992954 - RNA, 17 nt, Human
uggccugacucccccag

SEQ ID NO: 1992955 - RNA, 18 nt, Human
uggccugagcugggauga

SEQ ID NO: 1992956 - RNA, 14 nt, Human
uggccucuucuaga

SEQ ID NO: 1992957 - RNA, 21 nt, Human
uggccuguucuucuauggguu

SEQ ID NO: 1992958 - RNA, 15 nt, Human
uggccugagagggga

SEQ ID NO: 1992959 - RNA, 21 nt, Human
uggccuggccccucagggucc

SEQ ID NO: 1992960 - RNA, 18 nt, Human
uggccuggccccucaggg

SEQ ID NO: 1992961 - RNA, 18 nt, Human
aggccugggggcugggca

SEQ ID NO: 1992962 - RNA, 12 nt, Human
aggccuggggac

SEQ ID NO: 1992963 - RNA, 20 nt, Human
aggccugggggcugggcaga

SEQ ID NO: 1992964 - RNA, 14 nt, Human
uggccuucggccuc

SEQ ID NO: 1992965 - RNA, 11 nt, Human
uggccaggugg

SEQ ID NO: 1992966 - RNA, 15 nt, Human
uggccagguggccac

SEQ ID NO: 1992967 - RNA, 15 nt, Human
uggcauuugcaauaa

SEQ ID NO: 1992968 - RNA, 17 nt, Human
uggcauuugcaauaaaa

SEQ ID NO: 1992969 - RNA, 17 nt, Human
uggccaauuaaggcauc

SEQ ID NO: 1992970 - RNA, 21 nt, Human
uggccaaagccaaagcuaggc

SEQ ID NO: 1992971 - RNA, 23 nt, Human
uggccaaagccaaagcuaggccu

SEQ ID NO: 1992972 - RNA, 14 nt, Human
uggccaucauuucu

SEQ ID NO: 1992973 - RNA, 22 nt, Human
uggccauaagcaacaauuuuca

SEQ ID NO: 1992974 - RNA, 23 nt, Human
uggccagugugacaaggauugcu

SEQ ID NO: 1992975 - RNA, 16 nt, Human
uggccagguggccacu

SEQ ID NO: 1992976 - RNA, 17 nt, Human
uggccagguggccacuc

SEQ ID NO: 1992977 - RNA, 19 nt, Human
uggccagguggccacucca

SEQ ID NO: 1992978 - RNA, 19 nt, Human
aggccugacuucugcuggc

SEQ ID NO: 1992979 - RNA, 17 nt, Human
aggccccgcccaggcuu

SEQ ID NO: 1992980 - RNA, 21 nt, Human
aggccugacuucugcuggcau

SEQ ID NO: 1992981 - RNA, 16 nt, Human
aggccugacuucugcu

SEQ ID NO: 1992982 - RNA, 17 nt, Human
aggccugacuucugcug

SEQ ID NO: 1992983 - RNA, 12 nt, Human
aggccccugcca

SEQ ID NO: 1992984 - RNA, 20 nt, Human
aggccccucccucuccagca

SEQ ID NO: 1992985 - RNA, 22 nt, Human
uggcaucaagaggugggagggc

SEQ ID NO: 1992986 - RNA, 23 nt, Human
uggcaucaagaggugggagggcc

SEQ ID NO: 1992987 - RNA, 21 nt, Human
uggacacagcucuucuccagg

SEQ ID NO: 1992988 - RNA, 22 nt, Human
uggacacagcucuucuccaggc

SEQ ID NO: 1992989 - RNA, 13 nt, Human
uggacacagcucu

SEQ ID NO: 1992990 - RNA, 14 nt, Human
uggacacagcucuu

SEQ ID NO: 1992991 - RNA, 18 nt, Human
aggaucucuugagccugg

SEQ ID NO: 1992992 - RNA, 17 nt, Human
aggaucucuugagccug

SEQ ID NO: 1992993 - RNA, 19 nt, Human
aggaucucuugagccuggg

SEQ ID NO: 1992994 - RNA, 20 nt, Human
uggaauuauuuuaaaagaua

SEQ ID NO: 1992995 - RNA, 18 nt, Human
aggcaaauccgaaaucag

SEQ ID NO: 1992996 - RNA, 23 nt, Human
aggcaaacauuuucucuuagaaa

SEQ ID NO: 1992997 - RNA, 22 nt, Human
aggcaaaccuuucuauaauuuu

SEQ ID NO: 1992998 - RNA, 18 nt, Human
aggcaaacauuuucucuu

SEQ ID NO: 1992999 - RNA, 19 nt, Human
aggcaaacauuuucucuua

SEQ ID NO: 1993000 - RNA, 22 nt, Human
aggcaaacauuuucucuuagaa

SEQ ID NO: 1993001 - RNA, 20 nt, Human
uggaccuugaacuggguacu

SEQ ID NO: 1993002 - RNA, 15 nt, Human
uggacccugaggccc

SEQ ID NO: 1993003 - RNA, 23 nt, Human
uggacccuguggaugauaaaaca

SEQ ID NO: 1993004 - RNA, 21 nt, Human
uggacccugaggcccagaggg

SEQ ID NO: 1993005 - RNA, 20 nt, Human
uggacccugaggcccagagg

SEQ ID NO: 1993006 - RNA, 19 nt, Human
uggacccugaggcccagag

SEQ ID NO: 1993007 - RNA, 18 nt, Human
uggacccugaggcccaga

SEQ ID NO: 1993008 - RNA, 16 nt, Human
uggacccugaggccca

SEQ ID NO: 1993009 - RNA, 23 nt, Human
uggacacagcucuucuccaggcu

SEQ ID NO: 1993010 - RNA, 15 nt, Human
uggacugugugcuca

SEQ ID NO: 1993011 - RNA, 14 nt, Human
uggagaacuagaga

SEQ ID NO: 1993012 - RNA, 18 nt, Human
uggacuuucucuaauaau

SEQ ID NO: 1993013 - RNA, 20 nt, Human
uggacuuucucuaauaauaa

SEQ ID NO: 1993014 - RNA, 21 nt, Human
uggacuuucucuaauaauaaa

SEQ ID NO: 1993015 - RNA, 22 nt, Human
uggacuuucucuaauaauaaau

SEQ ID NO: 1993016 - RNA, 23 nt, Human
uggacuuucucuaauaauaaaua

SEQ ID NO: 1993017 - RNA, 22 nt, Human
uggagaagcggcuggcagccca

SEQ ID NO: 1993018 - RNA, 13 nt, Human
uggagaagcggcu

SEQ ID NO: 1993019 - RNA, 13 nt, Human
aggcaaucauggu

SEQ ID NO: 1993020 - RNA, 22 nt, Human
aggcaaguuuucccugaaguua

SEQ ID NO: 1993021 - RNA, 18 nt, Human
uggagcggggcccacccg

SEQ ID NO: 1993022 - RNA, 15 nt, Human
uggagcuauuuuaaa

SEQ ID NO: 1993023 - RNA, 14 nt, Human
aggcaaugcuggcu

SEQ ID NO: 1993024 - RNA, 20 nt, Human
aggcacccaccaucaugucu

SEQ ID NO: 1993025 - RNA, 21 nt, Human
aggcacccaccaucaugucug

SEQ ID NO: 1993026 - RNA, 22 nt, Human
aggcacccaccaucaugucugg

SEQ ID NO: 1993027 - RNA, 20 nt, Human
aggcaccucacaggccccag

SEQ ID NO: 1993028 - RNA, 20 nt, Human
aggcaccuaccaccacgccc

SEQ ID NO: 1993029 - RNA, 13 nt, Human
aggcacccuucca

SEQ ID NO: 1993030 - RNA, 14 nt, Human
ugcuuguacauaau

SEQ ID NO: 1993031 - RNA, 16 nt, Human
ugcuuguacauaaugc

SEQ ID NO: 1993032 - RNA, 22 nt, Human
ugcuuguacauaaugcgugcau

SEQ ID NO: 1993033 - RNA, 12 nt, Human
ugcuuugugauu

SEQ ID NO: 1993034 - RNA, 19 nt, Human
ugcuuguauuuuuuaaugc

SEQ ID NO: 1993035 - RNA, 14 nt, Human
ugcuuugucuccuc

SEQ ID NO: 1993036 - RNA, 15 nt, Human
ugcuuugucuccucu

SEQ ID NO: 1993037 - RNA, 16 nt, Human
ugcuuugucuccucua

SEQ ID NO: 1993038 - RNA, 17 nt, Human
ugcuuugucuccucuau

SEQ ID NO: 1993039 - RNA, 14 nt, Human
ugcuuugugauuuu

SEQ ID NO: 1993040 - RNA, 16 nt, Human
ugcuuugugauuuuug

SEQ ID NO: 1993041 - RNA, 14 nt, Human
ugcuuuuggucugu

SEQ ID NO: 1993042 - RNA, 17 nt, Human
ugcuuuuggucugugug

SEQ ID NO: 1993043 - RNA, 14 nt, Human
ugcuuugugaacaa

SEQ ID NO: 1993044 - RNA, 12 nt, Human
ugcuuguacaua

SEQ ID NO: 1993045 - RNA, 13 nt, Human
ugcuuguacauaa

SEQ ID NO: 1993046 - RNA, 15 nt, Human
ugcuuguaacuaaaa

SEQ ID NO: 1993047 - RNA, 16 nt, Human
ugcuuggaggaaggaa

SEQ ID NO: 1993048 - RNA, 15 nt, Human
ugcuuggaggaagga

SEQ ID NO: 1993049 - RNA, 14 nt, Human
ugcuuggaggaagg

SEQ ID NO: 1993050 - RNA, 12 nt, Human
aggacaguauuu

SEQ ID NO: 1993051 - RNA, 19 nt, Human
aggacaguauuugugggga

SEQ ID NO: 1993052 - RNA, 15 nt, Human
aggacagggguuccu

SEQ ID NO: 1993053 - RNA, 16 nt, Human
aggacagggguuccuu

SEQ ID NO: 1993054 - RNA, 21 nt, Human
ugcuugaggcaacucaucuua

SEQ ID NO: 1993055 - RNA, 18 nt, Human
uggaaaugggcagagcag

SEQ ID NO: 1993056 - RNA, 19 nt, Human
uggaaaucaaauguaaagu

SEQ ID NO: 1993057 - RNA, 17 nt, Human
uggaaaugggcagagca

SEQ ID NO: 1993058 - RNA, 17 nt, Human
uggaaaucaaauguaaa

SEQ ID NO: 1993059 - RNA, 18 nt, Human
uggaaaucaaauguaaag

SEQ ID NO: 1993060 - RNA, 16 nt, Human
uggaagcacagcuuca

SEQ ID NO: 1993061 - RNA, 21 nt, Human
uggaagcacaccaaucuuacu

SEQ ID NO: 1993062 - RNA, 22 nt, Human
uggaagcacaccaaucuuacuu

SEQ ID NO: 1993063 - RNA, 18 nt, Human
uggaagauauuccugagu

SEQ ID NO: 1993064 - RNA, 18 nt, Human
uggaagauuauugagagc

SEQ ID NO: 1993065 - RNA, 18 nt, Human
uggaaguacuauaauuua

SEQ ID NO: 1993066 - RNA, 13 nt, Human
uggaagguauuua

SEQ ID NO: 1993067 - RNA, 17 nt, Human
uggaagguauuuaauag

SEQ ID NO: 1993068 - RNA, 23 nt, Human
uggaaggggacacgugacagccg

SEQ ID NO: 1993069 - RNA, 20 nt, Human
uggaagcuucuggugaccuu

SEQ ID NO: 1993070 - RNA, 23 nt, Human
uggaagcacaccaaucuuacuuu

SEQ ID NO: 1993071 - RNA, 13 nt, Human
uggaaggcccagc

SEQ ID NO: 1993072 - RNA, 15 nt, Human
uggaaggcccagcac

SEQ ID NO: 1993073 - RNA, 21 nt, Human
uggaaggcccagcaccacccu

SEQ ID NO: 1993074 - RNA, 14 nt, Human
aggauccugagcca

SEQ ID NO: 1993075 - RNA, 13 nt, Human
aggauccugagcc

SEQ ID NO: 1993076 - RNA, 15 nt, Human
aggauacugccuccc

SEQ ID NO: 1993077 - RNA, 18 nt, Human
aggauacugccuccccca

SEQ ID NO: 1993078 - RNA, 15 nt, Human
aggauacaggcugga

SEQ ID NO: 1993079 - RNA, 23 nt, Human
aggagcucacuguggugucugug

SEQ ID NO: 1993080 - RNA, 22 nt, Human
aggagcuccauacacacgcugc

SEQ ID NO: 1993081 - RNA, 13 nt, Human
aggagcugggccc

SEQ ID NO: 1993082 - RNA, 16 nt, Human
ugcaggucccuaauaa

SEQ ID NO: 1993083 - RNA, 15 nt, Human
ugcaggucccuaaua

SEQ ID NO: 1993084 - RNA, 14 nt, Human
ugcaggucccuaau

SEQ ID NO: 1993085 - RNA, 12 nt, Human
ugcaggucccua

SEQ ID NO: 1993086 - RNA, 18 nt, Human
ugcaguacuuuaccuccu

SEQ ID NO: 1993087 - RNA, 15 nt, Human
ugcaguaacuuggga

SEQ ID NO: 1993088 - RNA, 17 nt, Human
ugcaguaacuugggagu

SEQ ID NO: 1993089 - RNA, 17 nt, Human
ugcauaaguuaacuucc

SEQ ID NO: 1993090 - RNA, 14 nt, Human
ugcauaaguuaacu

SEQ ID NO: 1993091 - RNA, 23 nt, Human
ugcauaacguauaaaagccuguu

SEQ ID NO: 1993092 - RNA, 22 nt, Human
ugcauaacguauaaaagccugu

SEQ ID NO: 1993093 - RNA, 14 nt, Human
ugcagccugcgcca

SEQ ID NO: 1993094 - RNA, 11 nt, Human
ugcaggucccu

SEQ ID NO: 1993095 - RNA, 15 nt, Human
ugcagccucacaguc

SEQ ID NO: 1993096 - RNA, 13 nt, Human
ugcagccucacag

SEQ ID NO: 1993097 - RNA, 16 nt, Human
ugcagccucacagucc

SEQ ID NO: 1993098 - RNA, 19 nt, Human
ugcagccuccgcuucccug

SEQ ID NO: 1993099 - RNA, 20 nt, Human
ugcagccuccgcuucccugg

SEQ ID NO: 1993100 - RNA, 23 nt, Human
ugcagccuccgcuucccugguuc

SEQ ID NO: 1993101 - RNA, 22 nt, Human
agccugaaagaggaaugaagua

SEQ ID NO: 1993102 - RNA, 17 nt, Human
agccucccaaagugcug

SEQ ID NO: 1993103 - RNA, 14 nt, Human
agccugacagccag

SEQ ID NO: 1993104 - RNA, 15 nt, Human
agccugacagccaga

SEQ ID NO: 1993105 - RNA, 18 nt, Human
agccugacagccagaacu

SEQ ID NO: 1993106 - RNA, 19 nt, Human
agccugacagccagaacuc

SEQ ID NO: 1993107 - RNA, 17 nt, Human
agccucagcauccuggc

SEQ ID NO: 1993108 - RNA, 19 nt, Human
agccucagcauccuggcac

SEQ ID NO: 1993109 - RNA, 20 nt, Human
agccucagcauccuggcacc

SEQ ID NO: 1993110 - RNA, 21 nt, Human
agccucagcauccuggcaccc

SEQ ID NO: 1993111 - RNA, 15 nt, Human
agccuagauguuuua

SEQ ID NO: 1993112 - RNA, 15 nt, Human
agccucauguccacu

SEQ ID NO: 1993113 - RNA, 16 nt, Human
agccuagauguuuuau

SEQ ID NO: 1993114 - RNA, 22 nt, Human
agccucagcauccuggcacccg

SEQ ID NO: 1993115 - RNA, 23 nt, Human
agccucagcauccuggcacccgg

SEQ ID NO: 1993116 - RNA, 20 nt, Human
agccucauguccacugguuc

SEQ ID NO: 1993117 - RNA, 18 nt, Human
agccuccaugcugccucc

SEQ ID NO: 1993118 - RNA, 20 nt, Human
agccuccaugcugccuccag

SEQ ID NO: 1993119 - RNA, 16 nt, Human
agccucccaaagugcu

SEQ ID NO: 1993120 - RNA, 23 nt, Human
agcccuucuaccuuccugcaaca

SEQ ID NO: 1993121 - RNA, 21 nt, Human
agcccuuccucugcucccccu

SEQ ID NO: 1993122 - RNA, 22 nt, Human
agcccuucggaggaccagggcu

SEQ ID NO: 1993123 - RNA, 14 nt, Human
ugcacucaaaucuu

SEQ ID NO: 1993124 - RNA, 15 nt, Human
ugcacucaaaucuua

SEQ ID NO: 1993125 - RNA, 16 nt, Human
ugcacucaaaucuuaa

SEQ ID NO: 1993126 - RNA, 22 nt, Human
ugcacucaaaucuuaagaaaua

SEQ ID NO: 1993127 - RNA, 19 nt, Human
ugcacucaaaucuuaagaa

SEQ ID NO: 1993128 - RNA, 20 nt, Human
ugcacucaaaucuuaagaaa

SEQ ID NO: 1993129 - RNA, 14 nt, Human
ugcacucagacugu

SEQ ID NO: 1993130 - RNA, 15 nt, Human
ugcacucagacugua

SEQ ID NO: 1993131 - RNA, 15 nt, Human
agcccuuccucugcu

SEQ ID NO: 1993132 - RNA, 16 nt, Human
agcccuuccucugcuc

SEQ ID NO: 1993133 - RNA, 17 nt, Human
agcccuuccucugcucc

SEQ ID NO: 1993134 - RNA, 18 nt, Human
agcccuuccucugcuccc

SEQ ID NO: 1993135 - RNA, 19 nt, Human
agcccuuccucugcucccc

SEQ ID NO: 1993136 - RNA, 20 nt, Human
agcccuuccucugcuccccc

SEQ ID NO: 1993137 - RNA, 23 nt, Human
ugcacuauagccuaggugacaga

SEQ ID NO: 1993138 - RNA, 19 nt, Human
agccguuuguuccccaaga

SEQ ID NO: 1993139 - RNA, 22 nt, Human
agccguggcuucccgcucagcc

SEQ ID NO: 1993140 - RNA, 23 nt, Human
agccguggcuucccgcucagccc

SEQ ID NO: 1993141 - RNA, 14 nt, Human
agccguggcuuccc

SEQ ID NO: 1993142 - RNA, 21 nt, Human
agccguggcuucccgcucagc

SEQ ID NO: 1993143 - RNA, 13 nt, Human
agccguggcuucc

SEQ ID NO: 1993144 - RNA, 16 nt, Human
agccgaauagcugaug

SEQ ID NO: 1993145 - RNA, 19 nt, Human
agccgaccugaggacaugg

SEQ ID NO: 1993146 - RNA, 18 nt, Human
ugauucguagauuuaaua

SEQ ID NO: 1993147 - RNA, 15 nt, Human
ugauucuccugccuc

SEQ ID NO: 1993148 - RNA, 19 nt, Human
ugauucuccugccucagcc

SEQ ID NO: 1993149 - RNA, 18 nt, Human
agcccaguucagcuuggg

SEQ ID NO: 1993150 - RNA, 20 nt, Human
ugauucuccugccucagccu

SEQ ID NO: 1993151 - RNA, 18 nt, Human
agcccauggcacucuaug

SEQ ID NO: 1993152 - RNA, 20 nt, Human
agccccaaaacucuccucug

SEQ ID NO: 1993153 - RNA, 22 nt, Human
agccccaaaacucuccucugcu

SEQ ID NO: 1993154 - RNA, 21 nt, Human
agccccaaaacucuccucugc

SEQ ID NO: 1993155 - RNA, 24 nt, Human
agccccaaaacucuccucugcugc

SEQ ID NO: 1993156 - RNA, 17 nt, Human
agccccgaggccuucuc

SEQ ID NO: 1993157 - RNA, 22 nt, Human
agccccgaggccuucucugaag

SEQ ID NO: 1993158 - RNA, 16 nt, Human
agccccgaggccuucu

SEQ ID NO: 1993159 - RNA, 18 nt, Human
agccccuggaugcagccu

SEQ ID NO: 1993160 - RNA, 17 nt, Human
agccccuggaugcagcc

SEQ ID NO: 1993161 - RNA, 19 nt, Human
agccccuggaugcagccuc

SEQ ID NO: 1993162 - RNA, 22 nt, Human
agccccuggaugcagccucaca

SEQ ID NO: 1993163 - RNA, 20 nt, Human
agcccccagcuuccagcagg

SEQ ID NO: 1993164 - RNA, 16 nt, Human
agcccccagcuuccag

SEQ ID NO: 1993165 - RNA, 24 nt, Human
agccccuucugacccaugcugccc

SEQ ID NO: 1993166 - RNA, 20 nt, Human
agccccuucugacccaugcu

SEQ ID NO: 1993167 - RNA, 21 nt, Human
agcccugcuuugggcugcccu

SEQ ID NO: 1993168 - RNA, 21 nt, Human
agcccugguggcagugggagc

SEQ ID NO: 1993169 - RNA, 22 nt, Human
agcccugcuuugggcugcccug

SEQ ID NO: 1993170 - RNA, 23 nt, Human
agcccugcuuugggcugcccugg

SEQ ID NO: 1993171 - RNA, 21 nt, Human
agcccccagcuuccagcagga

SEQ ID NO: 1993172 - RNA, 21 nt, Human
ugcacaagcugcacccucagg

SEQ ID NO: 1993173 - RNA, 18 nt, Human
ugcacaagcugcacccuc

SEQ ID NO: 1993174 - RNA, 12 nt, Human
ugcacacagcac

SEQ ID NO: 1993175 - RNA, 24 nt, Human
ugcacacagcacgggggccaagga

SEQ ID NO: 1993176 - RNA, 22 nt, Human
ugcacacaccagagcccaccuu

SEQ ID NO: 1993177 - RNA, 22 nt, Human
agcccuguaucguauucaccuu

SEQ ID NO: 1993178 - RNA, 15 nt, Human
ugcacaagcugcacc

SEQ ID NO: 1993179 - RNA, 22 nt, Human
agcccugguggcagugggagcu

SEQ ID NO: 1993180 - RNA, 23 nt, Human
agcccugguggcagugggagcug

SEQ ID NO: 1993181 - RNA, 17 nt, Human
ugcacccucaggcaggu

SEQ ID NO: 1993182 - RNA, 16 nt, Human
ugcacccucaggcagg

SEQ ID NO: 1993183 - RNA, 20 nt, Human
ugcacccacuaaugugucau

SEQ ID NO: 1993184 - RNA, 14 nt, Human
ugcacgugugugca

SEQ ID NO: 1993185 - RNA, 15 nt, Human
ugcacgugugugcac

SEQ ID NO: 1993186 - RNA, 10 nt, Human
ugcacacauu

SEQ ID NO: 1993187 - RNA, 20 nt, Human
ugcacacauuuuuuaaaugc

SEQ ID NO: 1993188 - RNA, 21 nt, Human
ugcacacaucaucuguaagcu

SEQ ID NO: 1993189 - RNA, 16 nt, Human
ugcacacaucaucugu

SEQ ID NO: 1993190 - RNA, 17 nt, Human
ugcacacaucaucugua

SEQ ID NO: 1993191 - RNA, 23 nt, Human
ugcacacgagcagacacccuugg

SEQ ID NO: 1993192 - RNA, 14 nt, Human
ugcacacuguccua

SEQ ID NO: 1993193 - RNA, 21 nt, Human
ugcacacuguccuauuauauu

SEQ ID NO: 1993194 - RNA, 18 nt, Human
agcuaggaauuguguuua

SEQ ID NO: 1993195 - RNA, 15 nt, Human
agcuaggaacaaauc

SEQ ID NO: 1993196 - RNA, 16 nt, Human
agcuaggaacaaaucu

SEQ ID NO: 1993197 - RNA, 21 nt, Human
agcuaggaacaaaucuuccug

SEQ ID NO: 1993198 - RNA, 23 nt, Human
agcuaggaacaaaucuuccuggu

SEQ ID NO: 1993199 - RNA, 12 nt, Human
agcuaggccugg

SEQ ID NO: 1993200 - RNA, 16 nt, Human
agcuaggccuggccag

SEQ ID NO: 1993201 - RNA, 12 nt, Human
agcuaggcaggg

SEQ ID NO: 1993202 - RNA, 13 nt, Human
agcuaggcagggu

SEQ ID NO: 1993203 - RNA, 14 nt, Human
agcuaggccuggcc

SEQ ID NO: 1993204 - RNA, 15 nt, Human
agcuaggccuggcca

SEQ ID NO: 1993205 - RNA, 18 nt, Human
agcucaggugucccugca

SEQ ID NO: 1993206 - RNA, 22 nt, Human
agcucaggugucccugcacuug

SEQ ID NO: 1993207 - RNA, 20 nt, Human
agcucaggugucccugcacu

SEQ ID NO: 1993208 - RNA, 21 nt, Human
agcucaggugucccugcacuu

SEQ ID NO: 1993209 - RNA, 15 nt, Human
agcucaguuuucaac

SEQ ID NO: 1993210 - RNA, 20 nt, Human
agcucauucuccuuguguua

SEQ ID NO: 1993211 - RNA, 21 nt, Human
agcucauucuccuuguguuac

SEQ ID NO: 1993212 - RNA, 21 nt, Human
ugcccaagaauagaugcugac

SEQ ID NO: 1993213 - RNA, 22 nt, Human
ugcccaagaauagaugcugacu

SEQ ID NO: 1993214 - RNA, 23 nt, Human
ugcccaagaauagaugcugacug

SEQ ID NO: 1993215 - RNA, 23 nt, Human
ugcccagccucuuucccuuccag

SEQ ID NO: 1993216 - RNA, 16 nt, Human
ugcccagccucuuucc

SEQ ID NO: 1993217 - RNA, 17 nt, Human
ugcccagccucuuuccc

SEQ ID NO: 1993218 - RNA, 18 nt, Human
ugcccagccucuuucccu

SEQ ID NO: 1993219 - RNA, 20 nt, Human
ugcccagccccuucugaccc

SEQ ID NO: 1993220 - RNA, 21 nt, Human
ugcccagccccuucugaccca

SEQ ID NO: 1993221 - RNA, 20 nt, Human
ugcccacaggaucagucuga

SEQ ID NO: 1993222 - RNA, 19 nt, Human
ugcccacaggaucagucug

SEQ ID NO: 1993223 - RNA, 16 nt, Human
ugcccacaggaucagu

SEQ ID NO: 1993224 - RNA, 19 nt, Human
agcgguaccaaugcagaac

SEQ ID NO: 1993225 - RNA, 21 nt, Human
agcgguaccaaugcagaacuc

SEQ ID NO: 1993226 - RNA, 22 nt, Human
ugccagacgcucauucagcauc

SEQ ID NO: 1993227 - RNA, 23 nt, Human
ugccagacgcucauucagcaucu

SEQ ID NO: 1993228 - RNA, 17 nt, Human
ugccagacccccuggag

SEQ ID NO: 1993229 - RNA, 22 nt, Human
ugccacacuucaggcucuucuc

SEQ ID NO: 1993230 - RNA, 23 nt, Human
ugccacacuucaggcucuucucc

SEQ ID NO: 1993231 - RNA, 23 nt, Human
ugccacaaggaagaaauuaacuu

SEQ ID NO: 1993232 - RNA, 19 nt, Human
ugccacuuugcaaaggagc

SEQ ID NO: 1993233 - RNA, 15 nt, Human
agcguagugcagcag

SEQ ID NO: 1993234 - RNA, 19 nt, Human
agcgugagccacugcaccg

SEQ ID NO: 1993235 - RNA, 15 nt, Human
agcgugcauaaguua

SEQ ID NO: 1993236 - RNA, 22 nt, Human
agcgugagccacugcaccgggc

SEQ ID NO: 1993237 - RNA, 14 nt, Human
agcuaccucaacca

SEQ ID NO: 1993238 - RNA, 23 nt, Human
agcuaccucaaccaaugccaaaa

SEQ ID NO: 1993239 - RNA, 19 nt, Human
agcuacuaauuuuaaaaug

SEQ ID NO: 1993240 - RNA, 15 nt, Human
agcuacguuuacuca

SEQ ID NO: 1993241 - RNA, 17 nt, Human
agcuacuugggaggcug

SEQ ID NO: 1993242 - RNA, 18 nt, Human
agcuacuugggaggcuga

SEQ ID NO: 1993243 - RNA, 13 nt, Human
agcuagaauuuga

SEQ ID NO: 1993244 - RNA, 16 nt, Human
agcuagaauuugauau

SEQ ID NO: 1993245 - RNA, 18 nt, Human
agcuagacgagcaggcuu

SEQ ID NO: 1993246 - RNA, 17 nt, Human
agcuaggaaaagaaauc

SEQ ID NO: 1993247 - RNA, 20 nt, Human
agcuaggaaaagaaaucuau

SEQ ID NO: 1993248 - RNA, 22 nt, Human
agccugcuccagcuguucagcu

SEQ ID NO: 1993249 - RNA, 19 nt, Human
agccugcuccagcuguuca

SEQ ID NO: 1993250 - RNA, 16 nt, Human
agccugcuccuucccu

SEQ ID NO: 1993251 - RNA, 14 nt, Human
agccugcuccuucc

SEQ ID NO: 1993252 - RNA, 15 nt, Human
agccugcuccuuccc

SEQ ID NO: 1993253 - RNA, 11 nt, Human
agccugcuccu

SEQ ID NO: 1993254 - RNA, 15 nt, Human
agccuggucagccca

SEQ ID NO: 1993255 - RNA, 16 nt, Human
agccuggucagcccaa

SEQ ID NO: 1993256 - RNA, 22 nt, Human
agccugggugacagagcaagug

SEQ ID NO: 1993257 - RNA, 17 nt, Human
agccugcuccagcuguu

SEQ ID NO: 1993258 - RNA, 16 nt, Human
agccugcuccagcugu

SEQ ID NO: 1993259 - RNA, 15 nt, Human
agccugcuccagcug

SEQ ID NO: 1993260 - RNA, 14 nt, Human
ugcauaccacuuuu

SEQ ID NO: 1993261 - RNA, 12 nt, Human
ugcauaccacuu

SEQ ID NO: 1993262 - RNA, 13 nt, Human
agccuguuuaaga

SEQ ID NO: 1993263 - RNA, 11 nt, Human
agccuguguca

SEQ ID NO: 1993264 - RNA, 14 nt, Human
agccuuagggaagc

SEQ ID NO: 1993265 - RNA, 15 nt, Human
agccuuagggaagcu

SEQ ID NO: 1993266 - RNA, 20 nt, Human
agccuuagggaagcuggccu

SEQ ID NO: 1993267 - RNA, 22 nt, Human
agccuuagggaagcuggccuga

SEQ ID NO: 1993268 - RNA, 21 nt, Human
agccugugccucugggacugg

SEQ ID NO: 1993269 - RNA, 20 nt, Human
agccuggucagcccaaacca

SEQ ID NO: 1993270 - RNA, 21 nt, Human
ugccaauaauaauaccucccu

SEQ ID NO: 1993271 - RNA, 22 nt, Human
ugccaauaauaauaccucccuu

SEQ ID NO: 1993272 - RNA, 17 nt, Human
ugccacaaggaagaaau

SEQ ID NO: 1993273 - RNA, 18 nt, Human
ugccacaaggaagaaauu

SEQ ID NO: 1993274 - RNA, 22 nt, Human
ugccacaaggaagaaauuaacu

SEQ ID NO: 1993275 - RNA, 13 nt, Human
ugccacacuucag

SEQ ID NO: 1993276 - RNA, 14 nt, Human
ugccacacuucagg

SEQ ID NO: 1993277 - RNA, 15 nt, Human
ugccacacuucaggc

SEQ ID NO: 1993278 - RNA, 16 nt, Human
ugccacacuucaggcu

SEQ ID NO: 1993279 - RNA, 21 nt, Human
ugcauuaucuagauacuguau

SEQ ID NO: 1993280 - RNA, 22 nt, Human
ugcauuaucuagauacuguauc

SEQ ID NO: 1993281 - RNA, 16 nt, Human
agcggagaaaggaagg

SEQ ID NO: 1993282 - RNA, 20 nt, Human
ugcauuaucuagauacugua

SEQ ID NO: 1993283 - RNA, 20 nt, Human
agcggagaaaggaagggcug

SEQ ID NO: 1993284 - RNA, 18 nt, Human
agcggagacggaguccca

SEQ ID NO: 1993285 - RNA, 17 nt, Human
agccuuccagggguggg

SEQ ID NO: 1993286 - RNA, 16 nt, Human
agccuuccaggggugg

SEQ ID NO: 1993287 - RNA, 14 nt, Human
agccuuccaggggu

SEQ ID NO: 1993288 - RNA, 11 nt, Human
agccuuccagg

SEQ ID NO: 1993289 - RNA, 23 nt, Human
agccuugugaucacuuucugaaa

SEQ ID NO: 1993290 - RNA, 21 nt, Human
agccuugugggugugagcagc

SEQ ID NO: 1993291 - RNA, 19 nt, Human
ugauucccaagcucugcuc

SEQ ID NO: 1993292 - RNA, 21 nt, Human
ugauucccaagcucugcuccu

SEQ ID NO: 1993293 - RNA, 15 nt, Human
ugauucccaagcucu

SEQ ID NO: 1993294 - RNA, 16 nt, Human
ugauucccaagcucug

SEQ ID NO: 1993295 - RNA, 18 nt, Human
ugauucccaagcucugcu

SEQ ID NO: 1993296 - RNA, 23 nt, Human
agcccaggaaaggcuccaggagc

SEQ ID NO: 1993297 - RNA, 22 nt, Human
agcccaggaaaggcuccaggag

SEQ ID NO: 1993298 - RNA, 24 nt, Human
agcccaggaaaggcuccaggagca

SEQ ID NO: 1993299 - RNA, 14 nt, Human
ugauucagcucugc

SEQ ID NO: 1993300 - RNA, 13 nt, Human
ugauucagcucug

SEQ ID NO: 1993301 - RNA, 15 nt, Human
ugauucauaaugacu

SEQ ID NO: 1993302 - RNA, 21 nt, Human
agcccaggaaaggcuccagga

SEQ ID NO: 1993303 - RNA, 20 nt, Human
agcccaggaaaggcuccagg

SEQ ID NO: 1993304 - RNA, 19 nt, Human
agcccaggaaaggcuccag

SEQ ID NO: 1993305 - RNA, 22 nt, Human
agcccacuucugccauauucug

SEQ ID NO: 1993306 - RNA, 16 nt, Human
agcccagaagugcaga

SEQ ID NO: 1993307 - RNA, 15 nt, Human
agccaggccacuggc

SEQ ID NO: 1993308 - RNA, 22 nt, Human
agccaggccacaagacccuugu

SEQ ID NO: 1993309 - RNA, 21 nt, Human
agccaggccacaagacccuug

SEQ ID NO: 1993310 - RNA, 12 nt, Human
agccagggucuc

SEQ ID NO: 1993311 - RNA, 19 nt, Human
agccaggcgcuagcacagc

SEQ ID NO: 1993312 - RNA, 23 nt, Human
agccaggcgcuagcacagcuccc

SEQ ID NO: 1993313 - RNA, 23 nt, Human
agccaguaaaugggggugcauuu

SEQ ID NO: 1993314 - RNA, 14 nt, Human
agccagugaacaua

SEQ ID NO: 1993315 - RNA, 23 nt, Human
agccagugaacauaauucuuauu

SEQ ID NO: 1993316 - RNA, 14 nt, Human
agccauaggcccuu

SEQ ID NO: 1993317 - RNA, 14 nt, Human
agccaggccacaag

SEQ ID NO: 1993318 - RNA, 12 nt, Human
agccaggccaca

SEQ ID NO: 1993319 - RNA, 11 nt, Human
agccaggaggg

SEQ ID NO: 1993320 - RNA, 12 nt, Human
agccagcugccu

SEQ ID NO: 1993321 - RNA, 13 nt, Human
agccagacucugc

SEQ ID NO: 1993322 - RNA, 22 nt, Human
agccagaagccacccaaagcag

SEQ ID NO: 1993323 - RNA, 16 nt, Human
agccagaacucugugu

SEQ ID NO: 1993324 - RNA, 18 nt, Human
agccagaacucugugucc

SEQ ID NO: 1993325 - RNA, 16 nt, Human
ugauggugcaaugacc

SEQ ID NO: 1993326 - RNA, 23 nt, Human
ugauggugcaaugaccuuucaau

SEQ ID NO: 1993327 - RNA, 17 nt, Human
ugauggugcaaugaccu

SEQ ID NO: 1993328 - RNA, 20 nt, Human
ugaugauccuaggcauuugc

SEQ ID NO: 1993329 - RNA, 14 nt, Human
ugaugauccuaggc

SEQ ID NO: 1993330 - RNA, 17 nt, Human
ugauguuuuaaggaugc

SEQ ID NO: 1993331 - RNA, 18 nt, Human
ugauguuuuaaggaugcu

SEQ ID NO: 1993332 - RNA, 22 nt, Human
ugauuaaaaauaucaaauuaau

SEQ ID NO: 1993333 - RNA, 19 nt, Human
ugauuaaaaauaucaaauu

SEQ ID NO: 1993334 - RNA, 20 nt, Human
ugauuaaaaauaucaaauua

SEQ ID NO: 1993335 - RNA, 18 nt, Human
ugauguuuuuaaaaucuu

SEQ ID NO: 1993336 - RNA, 19 nt, Human
ugauguuuuuaaaaucuua

SEQ ID NO: 1993337 - RNA, 21 nt, Human
ugauguuuuuaaaaucuuauu

SEQ ID NO: 1993338 - RNA, 15 nt, Human
ugauuaaaaauauca

SEQ ID NO: 1993339 - RNA, 15 nt, Human
ugauguuuuuaaaau

SEQ ID NO: 1993340 - RNA, 16 nt, Human
ugauguuuuuaaaauc

SEQ ID NO: 1993341 - RNA, 17 nt, Human
ugauguuuuuaaaaucu

SEQ ID NO: 1993342 - RNA, 14 nt, Human
ugauguuugugcag

SEQ ID NO: 1993343 - RNA, 20 nt, Human
ugauguuugugcaguaacuu

SEQ ID NO: 1993344 - RNA, 14 nt, Human
agccacuuaggaca

SEQ ID NO: 1993345 - RNA, 13 nt, Human
agccacugcaccg

SEQ ID NO: 1993346 - RNA, 21 nt, Human
agccacugcaccgggccacag

SEQ ID NO: 1993347 - RNA, 22 nt, Human
agccacugcaccgggccacaga

SEQ ID NO: 1993348 - RNA, 15 nt, Human
ugauuaaagaugagc

SEQ ID NO: 1993349 - RNA, 22 nt, Human
ugauuaaagaugagcuuugucu

SEQ ID NO: 1993350 - RNA, 12 nt, Human
ugauuaaaccaa

SEQ ID NO: 1993351 - RNA, 15 nt, Human
ugauuaauuaaaaca

SEQ ID NO: 1993352 - RNA, 14 nt, Human
ugauuaccagggac

SEQ ID NO: 1993353 - RNA, 15 nt, Human
agccaccgaagccgc

SEQ ID NO: 1993354 - RNA, 20 nt, Human
agccaccgaagccgccugug

SEQ ID NO: 1993355 - RNA, 21 nt, Human
agccaccgaagccgccugugg

SEQ ID NO: 1993356 - RNA, 22 nt, Human
agccaccgaagccgccugugga

SEQ ID NO: 1993357 - RNA, 18 nt, Human
agccaccgugccuggcca

SEQ ID NO: 1993358 - RNA, 19 nt, Human
agccaccugaguuccugag

SEQ ID NO: 1993359 - RNA, 14 nt, Human
agccaccugaguuc

SEQ ID NO: 1993360 - RNA, 16 nt, Human
agccaccugaguuccu

SEQ ID NO: 1993361 - RNA, 14 nt, Human
agccacggccaggc

SEQ ID NO: 1993362 - RNA, 23 nt, Human
agccaccaacauacucccaucug

SEQ ID NO: 1993363 - RNA, 20 nt, Human
agccaccaacauacucccau

SEQ ID NO: 1993364 - RNA, 19 nt, Human
agccaccaacauacuccca

SEQ ID NO: 1993365 - RNA, 18 nt, Human
agccacauuccugaugcu

SEQ ID NO: 1993366 - RNA, 14 nt, Human
agccacauuccuga

SEQ ID NO: 1993367 - RNA, 13 nt, Human
ugaugaagaggag

SEQ ID NO: 1993368 - RNA, 14 nt, Human
ugaugaagaggagu

SEQ ID NO: 1993369 - RNA, 18 nt, Human
ugauccuuuuggagucag

SEQ ID NO: 1993370 - RNA, 17 nt, Human
ugauccagcccugaguu

SEQ ID NO: 1993371 - RNA, 18 nt, Human
ugauccagcccugaguuc

SEQ ID NO: 1993372 - RNA, 15 nt, Human
ugauccagcccugag

SEQ ID NO: 1993373 - RNA, 15 nt, Human
agccacggccaggcc

SEQ ID NO: 1993374 - RNA, 14 nt, Human
ugagucaccaagcc

SEQ ID NO: 1993375 - RNA, 14 nt, Human
ugaguagcucugcc

SEQ ID NO: 1993376 - RNA, 22 nt, Human
ugaguagcucugccuuugcucu

SEQ ID NO: 1993377 - RNA, 14 nt, Human
ugaguauauuauaa

SEQ ID NO: 1993378 - RNA, 15 nt, Human
ugaguauauuauaau

SEQ ID NO: 1993379 - RNA, 16 nt, Human
ugaguauauuauaaua

SEQ ID NO: 1993380 - RNA, 20 nt, Human
ugagugccuuacacaauggu

SEQ ID NO: 1993381 - RNA, 17 nt, Human
ugagugccuuacacaau

SEQ ID NO: 1993382 - RNA, 16 nt, Human
ugagucaccaagccca

SEQ ID NO: 1993383 - RNA, 17 nt, Human
ugagucaccaagcccag

SEQ ID NO: 1993384 - RNA, 18 nt, Human
ugaguucauaaauuuaug

SEQ ID NO: 1993385 - RNA, 17 nt, Human
ugaguuaggcuuucucu

SEQ ID NO: 1993386 - RNA, 21 nt, Human
ugaguggggggaacgcccacu

SEQ ID NO: 1993387 - RNA, 12 nt, Human
ugaguuaggaac

SEQ ID NO: 1993388 - RNA, 13 nt, Human
ugaguuaggaaca

SEQ ID NO: 1993389 - RNA, 21 nt, Human
ugagugggugaauaauacagu

SEQ ID NO: 1993390 - RNA, 23 nt, Human
ugagugggggaucacagccucug

SEQ ID NO: 1993391 - RNA, 14 nt, Human
ugauacuacaguuu

SEQ ID NO: 1993392 - RNA, 17 nt, Human
ugauacuacaguuuguu

SEQ ID NO: 1993393 - RNA, 20 nt, Human
ugauacaaugcugugcccua

SEQ ID NO: 1993394 - RNA, 12 nt, Human
ugauacagaaaa

SEQ ID NO: 1993395 - RNA, 21 nt, Human
ugauacaaugcugugcccuaa

SEQ ID NO: 1993396 - RNA, 24 nt, Human
ugauaagcagucauccucagauca

SEQ ID NO: 1993397 - RNA, 20 nt, Human
ugauaagaaccuuuugagug

SEQ ID NO: 1993398 - RNA, 17 nt, Human
ugaguucauacccuguu

SEQ ID NO: 1993399 - RNA, 19 nt, Human
ugauaagggacugauguuu

SEQ ID NO: 1993400 - RNA, 23 nt, Human
ugaguacuacaguccucccaucu

SEQ ID NO: 1993401 - RNA, 22 nt, Human
ugaguacuacaguccucccauc

SEQ ID NO: 1993402 - RNA, 21 nt, Human
ugaguacuacaguccucccau

SEQ ID NO: 1993403 - RNA, 17 nt, Human
ugaguacuacaguccuc

SEQ ID NO: 1993404 - RNA, 13 nt, Human
ugaguagcuggga

SEQ ID NO: 1993405 - RNA, 14 nt, Human
agcauauucaggaa

SEQ ID NO: 1993406 - RNA, 16 nt, Human
agcauaugacaaaugu

SEQ ID NO: 1993407 - RNA, 17 nt, Human
agcauaugacaaauguu

SEQ ID NO: 1993408 - RNA, 18 nt, Human
agcauaugacaaauguuu

SEQ ID NO: 1993409 - RNA, 19 nt, Human
agcauaugacaaauguuuc

SEQ ID NO: 1993410 - RNA, 20 nt, Human
agcauaugacaaauguuucu

SEQ ID NO: 1993411 - RNA, 21 nt, Human
agcauaugacaaauguuucua

SEQ ID NO: 1993412 - RNA, 15 nt, Human
ugaguacuacagucc

SEQ ID NO: 1993413 - RNA, 22 nt, Human
ugaguaacugauuuguaacaag

SEQ ID NO: 1993414 - RNA, 16 nt, Human
agcauacguacacauu

SEQ ID NO: 1993415 - RNA, 17 nt, Human
agcauacguacacauuu

SEQ ID NO: 1993416 - RNA, 18 nt, Human
agcauacguacacauuuu

SEQ ID NO: 1993417 - RNA, 19 nt, Human
agcauacguacacauuuua

SEQ ID NO: 1993418 - RNA, 20 nt, Human
agcauacguacacauuuuau

SEQ ID NO: 1993419 - RNA, 21 nt, Human
agcauacguacacauuuuauu

SEQ ID NO: 1993420 - RNA, 14 nt, Human
agcauaaagaauuu

SEQ ID NO: 1993421 - RNA, 12 nt, Human
ugagaauuaccc

SEQ ID NO: 1993422 - RNA, 15 nt, Human
agcauacguacacau

SEQ ID NO: 1993423 - RNA, 21 nt, Human
agcauaauacuugcuuuggaa

SEQ ID NO: 1993424 - RNA, 14 nt, Human
agcauguuuugcau

SEQ ID NO: 1993425 - RNA, 16 nt, Human
agcauguuuugcaugu

SEQ ID NO: 1993426 - RNA, 16 nt, Human
agcaugucuuauuuaa

SEQ ID NO: 1993427 - RNA, 17 nt, Human
agcaugucuuauuuaaa

SEQ ID NO: 1993428 - RNA, 22 nt, Human
agcauuguaagcguauggcuuu

SEQ ID NO: 1993429 - RNA, 15 nt, Human
agcauugucuauuuu

SEQ ID NO: 1993430 - RNA, 22 nt, Human
agcauugucuauuuuucucuuc

SEQ ID NO: 1993431 - RNA, 20 nt, Human
agcauuggggauguuuuucu

SEQ ID NO: 1993432 - RNA, 17 nt, Human
agcauuguaaaagcauu

SEQ ID NO: 1993433 - RNA, 20 nt, Human
agcaucaggccaggcccucu

SEQ ID NO: 1993434 - RNA, 19 nt, Human
agcaucaggccaggcccuc

SEQ ID NO: 1993435 - RNA, 18 nt, Human
agcaucaggccaggcccu

SEQ ID NO: 1993436 - RNA, 17 nt, Human
agcaucaggccaggccc

SEQ ID NO: 1993437 - RNA, 16 nt, Human
agcaucaggccaggcc

SEQ ID NO: 1993438 - RNA, 14 nt, Human
agcaucaggccagg

SEQ ID NO: 1993439 - RNA, 17 nt, Human
agcaugucgucaaagcu

SEQ ID NO: 1993440 - RNA, 20 nt, Human
agcaugucgucaaagcugaa

SEQ ID NO: 1993441 - RNA, 12 nt, Human
agcauggcugcc

SEQ ID NO: 1993442 - RNA, 20 nt, Human
ugauauucaaauggacaaac

SEQ ID NO: 1993443 - RNA, 15 nt, Human
ugauauucuuuguua

SEQ ID NO: 1993444 - RNA, 17 nt, Human
ugauauucuuuguuaau

SEQ ID NO: 1993445 - RNA, 12 nt, Human
ugauauuucaga

SEQ ID NO: 1993446 - RNA, 13 nt, Human
ugauauuucagaa

SEQ ID NO: 1993447 - RNA, 14 nt, Human
ugauauuucagaaa

SEQ ID NO: 1993448 - RNA, 18 nt, Human
ugauauucuuuguuaauu

SEQ ID NO: 1993449 - RNA, 21 nt, Human
ugauauuuguauuuauucuuu

SEQ ID NO: 1993450 - RNA, 15 nt, Human
ugauauuuguauuua

SEQ ID NO: 1993451 - RNA, 18 nt, Human
ugauauuuguauuuauuc

SEQ ID NO: 1993452 - RNA, 19 nt, Human
ugauauuuguauuuauucu

SEQ ID NO: 1993453 - RNA, 15 nt, Human
ugauauuucagaaau

SEQ ID NO: 1993454 - RNA, 16 nt, Human
ugauauuucagaaaua

SEQ ID NO: 1993455 - RNA, 19 nt, Human
ugauauuuucaacgcagcc

SEQ ID NO: 1993456 - RNA, 21 nt, Human
ugauauuuucaacgcagcccu

SEQ ID NO: 1993457 - RNA, 22 nt, Human
ugauauuuucaacgcagcccug

SEQ ID NO: 1993458 - RNA, 23 nt, Human
ugauauuuucaacgcagcccugc

SEQ ID NO: 1993459 - RNA, 21 nt, Human
ugauagaaggcuauggggaua

SEQ ID NO: 1993460 - RNA, 16 nt, Human
ugauacuuuuuugaaa

SEQ ID NO: 1993461 - RNA, 17 nt, Human
ugauacuuuuuugaaau

SEQ ID NO: 1993462 - RNA, 20 nt, Human
ugauacuuuuuugaaaucag

SEQ ID NO: 1993463 - RNA, 15 nt, Human
ugauaugugaacagu

SEQ ID NO: 1993464 - RNA, 16 nt, Human
ugauaugugaacaguu

SEQ ID NO: 1993465 - RNA, 18 nt, Human
ugaucaaagccacacucu

SEQ ID NO: 1993466 - RNA, 19 nt, Human
ugaucacggcucacugcag

SEQ ID NO: 1993467 - RNA, 22 nt, Human
agcauauucaggaagcucaggg

SEQ ID NO: 1993468 - RNA, 20 nt, Human
ugaucacggcucacugcagc

SEQ ID NO: 1993469 - RNA, 21 nt, Human
ugaucacggcucacugcagcc

SEQ ID NO: 1993470 - RNA, 13 nt, Human
agcaucaggccag

SEQ ID NO: 1993471 - RNA, 12 nt, Human
agcaucaggcca

SEQ ID NO: 1993472 - RNA, 16 nt, Human
agaugcagcucuuccu

SEQ ID NO: 1993473 - RNA, 17 nt, Human
agaugcagcucuuccug

SEQ ID NO: 1993474 - RNA, 18 nt, Human
agaugcagcucuuccugg

SEQ ID NO: 1993475 - RNA, 13 nt, Human
agaugcagcucuu

SEQ ID NO: 1993476 - RNA, 14 nt, Human
agaugcagcucuuc

SEQ ID NO: 1993477 - RNA, 17 nt, Human
ugacacuuaaaaauggu

SEQ ID NO: 1993478 - RNA, 16 nt, Human
ugacacuuaaaaaugg

SEQ ID NO: 1993479 - RNA, 23 nt, Human
agaugcugacuguacuccuccca

SEQ ID NO: 1993480 - RNA, 20 nt, Human
agaugcugacuguacuccuc

SEQ ID NO: 1993481 - RNA, 16 nt, Human
agaugccgcauuugga

SEQ ID NO: 1993482 - RNA, 14 nt, Human
agauguuuaaaaca

SEQ ID NO: 1993483 - RNA, 15 nt, Human
agauguuuaaaacac

SEQ ID NO: 1993484 - RNA, 16 nt, Human
agauguuuaaaacacc

SEQ ID NO: 1993485 - RNA, 16 nt, Human
ugacccaugcugcccu

SEQ ID NO: 1993486 - RNA, 12 nt, Human
ugacccaugcug

SEQ ID NO: 1993487 - RNA, 13 nt, Human
agauuaagaaaua

SEQ ID NO: 1993488 - RNA, 21 nt, Human
ugacccaugcugcccugugag

SEQ ID NO: 1993489 - RNA, 19 nt, Human
ugacccaugggcaggagac

SEQ ID NO: 1993490 - RNA, 16 nt, Human
ugacccaugggcagga

SEQ ID NO: 1993491 - RNA, 18 nt, Human
ugacccaugggcaggaga

SEQ ID NO: 1993492 - RNA, 15 nt, Human
ugacccaugcugccc

SEQ ID NO: 1993493 - RNA, 14 nt, Human
ugacccaugcugcc

SEQ ID NO: 1993494 - RNA, 19 nt, Human
ugaccuuccaagagccuga

SEQ ID NO: 1993495 - RNA, 20 nt, Human
ugaccuuccaagagccugag

SEQ ID NO: 1993496 - RNA, 18 nt, Human
ugaccuuccaagagccug

SEQ ID NO: 1993497 - RNA, 14 nt, Human
ugaccuuaaaugca

SEQ ID NO: 1993498 - RNA, 16 nt, Human
ugaccuuaaaugcaac

SEQ ID NO: 1993499 - RNA, 19 nt, Human
ugaccugaggcccuucucu

SEQ ID NO: 1993500 - RNA, 18 nt, Human
ugaccugaggcccuucuc

SEQ ID NO: 1993501 - RNA, 20 nt, Human
ugaccccugcccagaucagc

SEQ ID NO: 1993502 - RNA, 23 nt, Human
ugaccccucauagcccucacccu

SEQ ID NO: 1993503 - RNA, 13 nt, Human
ugaccccugccca

SEQ ID NO: 1993504 - RNA, 18 nt, Human
ugacucccccaguccccu

SEQ ID NO: 1993505 - RNA, 19 nt, Human
ugacucccccaguccccuu

SEQ ID NO: 1993506 - RNA, 22 nt, Human
ugacucccccaguccccuuccc

SEQ ID NO: 1993507 - RNA, 13 nt, Human
ugacuuacuguac

SEQ ID NO: 1993508 - RNA, 15 nt, Human
ugacuuacuguacau

SEQ ID NO: 1993509 - RNA, 16 nt, Human
ugacuuacuguacaug

SEQ ID NO: 1993510 - RNA, 14 nt, Human
ugacuaggaaaaaa

SEQ ID NO: 1993511 - RNA, 13 nt, Human
agauuggaaggaa

SEQ ID NO: 1993512 - RNA, 22 nt, Human
agauugcuguguguugccuggg

SEQ ID NO: 1993513 - RNA, 15 nt, Human
agauuggauuuuaug

SEQ ID NO: 1993514 - RNA, 17 nt, Human
agauuggauuuuauguu

SEQ ID NO: 1993515 - RNA, 22 nt, Human
agauuggauuuuauguugacau

SEQ ID NO: 1993516 - RNA, 19 nt, Human
ugacuuacuguacaugaaa

SEQ ID NO: 1993517 - RNA, 22 nt, Human
agauucauauuuacuucuuaua

SEQ ID NO: 1993518 - RNA, 18 nt, Human
agauuccagagaguggcu

SEQ ID NO: 1993519 - RNA, 23 nt, Human
agauuggauuuuauguugacauu

SEQ ID NO: 1993520 - RNA, 20 nt, Human
agauuucucauuugccaaua

SEQ ID NO: 1993521 - RNA, 17 nt, Human
agauuugaacucuucaa

SEQ ID NO: 1993522 - RNA, 14 nt, Human
agauuucucuuuga

SEQ ID NO: 1993523 - RNA, 13 nt, Human
agauuuuaguuuu

SEQ ID NO: 1993524 - RNA, 15 nt, Human
agauuuuaguuuuau

SEQ ID NO: 1993525 - RNA, 20 nt, Human
agauuuuaguuuuauuuucu

SEQ ID NO: 1993526 - RNA, 15 nt, Human
agauuucucuuugaa

SEQ ID NO: 1993527 - RNA, 11 nt, Human
agauuucuguu

SEQ ID NO: 1993528 - RNA, 12 nt, Human
agauuucuguuc

SEQ ID NO: 1993529 - RNA, 14 nt, Human
agauuucuguucag

SEQ ID NO: 1993530 - RNA, 21 nt, Human
agauuuugaaauuuuuauuaa

SEQ ID NO: 1993531 - RNA, 22 nt, Human
agauuuuaguuuuauuuucuaa

SEQ ID NO: 1993532 - RNA, 23 nt, Human
agauuuuaguuuuauuuucuaaa

SEQ ID NO: 1993533 - RNA, 18 nt, Human
agauuuuguguuuauucu

SEQ ID NO: 1993534 - RNA, 19 nt, Human
agauuuuguguuuauucuu

SEQ ID NO: 1993535 - RNA, 20 nt, Human
agauuuuguguuuauucuug

SEQ ID NO: 1993536 - RNA, 22 nt, Human
agauuuuguguuuauucuugau

SEQ ID NO: 1993537 - RNA, 23 nt, Human
agauuuuguguuuauucuugaug

SEQ ID NO: 1993538 - RNA, 21 nt, Human
agcaacuaaaaugugucuugc

SEQ ID NO: 1993539 - RNA, 14 nt, Human
agcaaaaacaugua

SEQ ID NO: 1993540 - RNA, 20 nt, Human
agcaaaaaaaguuguaugau

SEQ ID NO: 1993541 - RNA, 15 nt, Human
agcaaaaaaaguugu

SEQ ID NO: 1993542 - RNA, 18 nt, Human
agcaaaaaaaguuguaug

SEQ ID NO: 1993543 - RNA, 16 nt, Human
agcaagacgcugugcu

SEQ ID NO: 1993544 - RNA, 13 nt, Human
agcaagacgcugu

SEQ ID NO: 1993545 - RNA, 22 nt, Human
agcaagacgcugugcugcccug

SEQ ID NO: 1993546 - RNA, 21 nt, Human
agcaagacgcugugcugcccu

SEQ ID NO: 1993547 - RNA, 20 nt, Human
agcaagacgcugugcugccc

SEQ ID NO: 1993548 - RNA, 17 nt, Human
agcaagacgcugugcug

SEQ ID NO: 1993549 - RNA, 15 nt, Human
agcaagauguacuau

SEQ ID NO: 1993550 - RNA, 18 nt, Human
agcaagagagcagcaagg

SEQ ID NO: 1993551 - RNA, 23 nt, Human
agcaagagagcagcaaggucuug

SEQ ID NO: 1993552 - RNA, 23 nt, Human
agcaagacgcugugcugcccugc

SEQ ID NO: 1993553 - RNA, 20 nt, Human
ugagaagcagaggaaggaga

SEQ ID NO: 1993554 - RNA, 20 nt, Human
agauauuuugcuuugugauu

SEQ ID NO: 1993555 - RNA, 21 nt, Human
agauauuuugcuuugugauuu

SEQ ID NO: 1993556 - RNA, 18 nt, Human
agaucaaaagguuaauaa

SEQ ID NO: 1993557 - RNA, 14 nt, Human
agaucaaaaaggcu

SEQ ID NO: 1993558 - RNA, 15 nt, Human
agaucaaaaaggcuu

SEQ ID NO: 1993559 - RNA, 16 nt, Human
agaucaaaaaggcuua

SEQ ID NO: 1993560 - RNA, 19 nt, Human
agaucaaaaaggcuuauaa

SEQ ID NO: 1993561 - RNA, 20 nt, Human
agaucaaaaaggcuuauaaa

SEQ ID NO: 1993562 - RNA, 15 nt, Human
agauacuguaucaug

SEQ ID NO: 1993563 - RNA, 16 nt, Human
agauacuguaucauga

SEQ ID NO: 1993564 - RNA, 13 nt, Human
agauauuugcacc

SEQ ID NO: 1993565 - RNA, 11 nt, Human
agauauuuuau

SEQ ID NO: 1993566 - RNA, 22 nt, Human
agauaauauuaaggaagacaau

SEQ ID NO: 1993567 - RNA, 18 nt, Human
agauaauauuaaggaaga

SEQ ID NO: 1993568 - RNA, 13 nt, Human
agauacaguuacu

SEQ ID NO: 1993569 - RNA, 20 nt, Human
agauacaggaaaagcugcug

SEQ ID NO: 1993570 - RNA, 11 nt, Human
agauacuguau

SEQ ID NO: 1993571 - RNA, 22 nt, Human
agauacaguuacucagaauucu

SEQ ID NO: 1993572 - RNA, 17 nt, Human
agaguauuuuuguauuc

SEQ ID NO: 1993573 - RNA, 15 nt, Human
agagucacuggaaca

SEQ ID NO: 1993574 - RNA, 22 nt, Human
agagucagaaguuucugccgca

SEQ ID NO: 1993575 - RNA, 17 nt, Human
agaguuguuacauuuuu

SEQ ID NO: 1993576 - RNA, 22 nt, Human
agaguuuagcuguaacaguucu

SEQ ID NO: 1993577 - RNA, 23 nt, Human
agaguuuagcuguaacaguucuu

SEQ ID NO: 1993578 - RNA, 19 nt, Human
agaguuucguggcuucagg

SEQ ID NO: 1993579 - RNA, 19 nt, Human
agaguuguuacauuuuuaa

SEQ ID NO: 1993580 - RNA, 20 nt, Human
agaguuguuacauuuuuaag

SEQ ID NO: 1993581 - RNA, 17 nt, Human
agaguuugccuuauaaa

SEQ ID NO: 1993582 - RNA, 18 nt, Human
agauaauacaccacuaca

SEQ ID NO: 1993583 - RNA, 21 nt, Human
ugaauuugugaagguggaaau

SEQ ID NO: 1993584 - RNA, 13 nt, Human
ugaauuugugaag

SEQ ID NO: 1993585 - RNA, 23 nt, Human
ugaauuucuuuugccguuauuaa

SEQ ID NO: 1993586 - RNA, 23 nt, Human
ugaauuugugaagguggaaauaa

SEQ ID NO: 1993587 - RNA, 15 nt, Human
ugaauuuuuaugugu

SEQ ID NO: 1993588 - RNA, 18 nt, Human
ugaauuuuuaugugugau

SEQ ID NO: 1993589 - RNA, 23 nt, Human
ugaauuuuuauauauauaucugu

SEQ ID NO: 1993590 - RNA, 22 nt, Human
ugacaaacuucuuucacucaca

SEQ ID NO: 1993591 - RNA, 19 nt, Human
ugacacacagcucuguccu

SEQ ID NO: 1993592 - RNA, 19 nt, Human
ugacaaagacugaguacgu

SEQ ID NO: 1993593 - RNA, 14 nt, Human
ugacaaagcuuccc

SEQ ID NO: 1993594 - RNA, 16 nt, Human
ugacacacagcucugu

SEQ ID NO: 1993595 - RNA, 18 nt, Human
ugacacacagcucugucc

SEQ ID NO: 1993596 - RNA, 12 nt, Human
ugacacaugcaa

SEQ ID NO: 1993597 - RNA, 20 nt, Human
ugacacaugcaaggucauuu

SEQ ID NO: 1993598 - RNA, 22 nt, Human
ugacacauuacaagccuggaaa

SEQ ID NO: 1993599 - RNA, 21 nt, Human
ugacacgacuucuguuucaca

SEQ ID NO: 1993600 - RNA, 17 nt, Human
ugacaccccacuuagcc

SEQ ID NO: 1993601 - RNA, 18 nt, Human
ugaaaguccagaaacugu

SEQ ID NO: 1993602 - RNA, 16 nt, Human
ugaaaguccagaaacu

SEQ ID NO: 1993603 - RNA, 14 nt, Human
ugaaagucaguuua

SEQ ID NO: 1993604 - RNA, 21 nt, Human
ugaaagucaguuuaagaggcu

SEQ ID NO: 1993605 - RNA, 17 nt, Human
ugaaaguauguuuuacu

SEQ ID NO: 1993606 - RNA, 14 nt, Human
agaggcugucuguu

SEQ ID NO: 1993607 - RNA, 16 nt, Human
agaggcugguuccaga

SEQ ID NO: 1993608 - RNA, 16 nt, Human
agagggagggagggcu

SEQ ID NO: 1993609 - RNA, 22 nt, Human
agagggacuguucuuuuguccc

SEQ ID NO: 1993610 - RNA, 12 nt, Human
ugaagccuuugu

SEQ ID NO: 1993611 - RNA, 22 nt, Human
ugaaggggccaaggagggugag

SEQ ID NO: 1993612 - RNA, 20 nt, Human
ugaagcuaucguaaaauuaa

SEQ ID NO: 1993613 - RNA, 22 nt, Human
agaggugugcaagagagggaug

SEQ ID NO: 1993614 - RNA, 23 nt, Human
agaggugugcaagagagggaugc

SEQ ID NO: 1993615 - RNA, 16 nt, Human
agagguggggagcaga

SEQ ID NO: 1993616 - RNA, 15 nt, Human
agagguuaagguggg

SEQ ID NO: 1993617 - RNA, 15 nt, Human
agaguauggauugaa

SEQ ID NO: 1993618 - RNA, 14 nt, Human
ugaauguaugcuuc

SEQ ID NO: 1993619 - RNA, 19 nt, Human
ugaauguaugcuucauaca

SEQ ID NO: 1993620 - RNA, 20 nt, Human
ugaauguaugcuucauacag

SEQ ID NO: 1993621 - RNA, 23 nt, Human
ugaauguaugcuucauacaggga

SEQ ID NO: 1993622 - RNA, 13 nt, Human
ugaauaugauuaa

SEQ ID NO: 1993623 - RNA, 14 nt, Human
ugaauaugauuaaa

SEQ ID NO: 1993624 - RNA, 15 nt, Human
ugaauaugauuaaaa

SEQ ID NO: 1993625 - RNA, 21 nt, Human
ugaauaugauuaaaaauauca

SEQ ID NO: 1993626 - RNA, 22 nt, Human
ugaauaugauuaaaaauaucaa

SEQ ID NO: 1993627 - RNA, 16 nt, Human
ugaauauugccauuau

SEQ ID NO: 1993628 - RNA, 18 nt, Human
ugaauauugccauuaugc

SEQ ID NO: 1993629 - RNA, 15 nt, Human
ugaagucacugcaca

SEQ ID NO: 1993630 - RNA, 16 nt, Human
ugaagucacugcacag

SEQ ID NO: 1993631 - RNA, 21 nt, Human
ugaagucacugcacagugcau

SEQ ID NO: 1993632 - RNA, 16 nt, Human
ugaauaaagacaccua

SEQ ID NO: 1993633 - RNA, 22 nt, Human
ugaaggguaauuauauaguuac

SEQ ID NO: 1993634 - RNA, 15 nt, Human
ugaagggguuuucuu

SEQ ID NO: 1993635 - RNA, 18 nt, Human
ugaagguagaauguuuuc

SEQ ID NO: 1993636 - RNA, 19 nt, Human
ugaagguagaauguuuuca

SEQ ID NO: 1993637 - RNA, 14 nt, Human
ugaagucacacagu

SEQ ID NO: 1993638 - RNA, 14 nt, Human
ugaagucacugcac

SEQ ID NO: 1993639 - RNA, 15 nt, Human
ugaauacuuuauaaa

SEQ ID NO: 1993640 - RNA, 18 nt, Human
ugaauacugcuugaauaa

SEQ ID NO: 1993641 - RNA, 21 nt, Human
ugaauacugcuugaauaaaca

SEQ ID NO: 1993642 - RNA, 13 nt, Human
ugaauacugcuug

SEQ ID NO: 1993643 - RNA, 15 nt, Human
ugaauacugcuugaa

SEQ ID NO: 1993644 - RNA, 16 nt, Human
ugaauacugcuugaau

SEQ ID NO: 1993645 - RNA, 13 nt, Human
ugaauacuugaac

SEQ ID NO: 1993646 - RNA, 15 nt, Human
ugaauacuugaacca

SEQ ID NO: 1993647 - RNA, 16 nt, Human
ugaauacuugaaccau

SEQ ID NO: 1993648 - RNA, 19 nt, Human
ugaauacuugaaccauaaa

SEQ ID NO: 1993649 - RNA, 14 nt, Human
ucuucccauggugc

SEQ ID NO: 1993650 - RNA, 13 nt, Human
ucuuccccaggaa

SEQ ID NO: 1993651 - RNA, 22 nt, Human
ucuucccuacaguugaaaaaca

SEQ ID NO: 1993652 - RNA, 19 nt, Human
ucuucccuacaguugaaaa

SEQ ID NO: 1993653 - RNA, 14 nt, Human
ucuuccucccuccc

SEQ ID NO: 1993654 - RNA, 16 nt, Human
ucuuccuccaaggaca

SEQ ID NO: 1993655 - RNA, 15 nt, Human
ucuuccucccucccu

SEQ ID NO: 1993656 - RNA, 20 nt, Human
ucuuccuccaaggacagaag

SEQ ID NO: 1993657 - RNA, 12 nt, Human
ucuuccuccuga

SEQ ID NO: 1993658 - RNA, 14 nt, Human
ucuuccuccugaca

SEQ ID NO: 1993659 - RNA, 11 nt, Human
ucuuccucugc

SEQ ID NO: 1993660 - RNA, 12 nt, Human
ucuuccucugcu

SEQ ID NO: 1993661 - RNA, 14 nt, Human
ucuuccucugcuga

SEQ ID NO: 1993662 - RNA, 19 nt, Human
ucuuccucugcuaaauuga

SEQ ID NO: 1993663 - RNA, 15 nt, Human
ucuuccucuugaccc

SEQ ID NO: 1993664 - RNA, 16 nt, Human
ucuuccucuugacccu

SEQ ID NO: 1993665 - RNA, 20 nt, Human
ucuuccucuugacccugcac

SEQ ID NO: 1993666 - RNA, 21 nt, Human
ucuuccucugcuaaauugaug

SEQ ID NO: 1993667 - RNA, 17 nt, Human
ucuucucucugcucuga

SEQ ID NO: 1993668 - RNA, 12 nt, Human
ucuucucucugc

SEQ ID NO: 1993669 - RNA, 14 nt, Human
ucuucucucugcuc

SEQ ID NO: 1993670 - RNA, 14 nt, Human
agaaucacuugaac

SEQ ID NO: 1993671 - RNA, 22 nt, Human
agaaucaccuaauuaauuucag

SEQ ID NO: 1993672 - RNA, 13 nt, Human
agaaucacaggcu

SEQ ID NO: 1993673 - RNA, 15 nt, Human
agaaucacaggcugg

SEQ ID NO: 1993674 - RNA, 16 nt, Human
agaaucacaggcuggg

SEQ ID NO: 1993675 - RNA, 19 nt, Human
agaaucaccuaauuaauuu

SEQ ID NO: 1993676 - RNA, 15 nt, Human
ucuucaacucccugc

SEQ ID NO: 1993677 - RNA, 16 nt, Human
ucuucaacugaccagc

SEQ ID NO: 1993678 - RNA, 19 nt, Human
ucuucaacugaccagccuc

SEQ ID NO: 1993679 - RNA, 12 nt, Human
ucuucagagacu

SEQ ID NO: 1993680 - RNA, 18 nt, Human
ucuucagagacuccugca

SEQ ID NO: 1993681 - RNA, 17 nt, Human
ucuucagagacuccugc

SEQ ID NO: 1993682 - RNA, 20 nt, Human
ucuuccaggcugggagagcc

SEQ ID NO: 1993683 - RNA, 17 nt, Human
ucuuccaggcugggaga

SEQ ID NO: 1993684 - RNA, 15 nt, Human
ucuuccaggcuggga

SEQ ID NO: 1993685 - RNA, 20 nt, Human
ucuucagagacuccugcagg

SEQ ID NO: 1993686 - RNA, 21 nt, Human
ucuuccaggcugggagagccu

SEQ ID NO: 1993687 - RNA, 18 nt, Human
ucuucccaacuugccuuu

SEQ ID NO: 1993688 - RNA, 21 nt, Human
ucuucccaacuugccuuugaa

SEQ ID NO: 1993689 - RNA, 13 nt, Human
agacccccuggag

SEQ ID NO: 1993690 - RNA, 14 nt, Human
agacccccuggaga

SEQ ID NO: 1993691 - RNA, 15 nt, Human
agacccccuggagac

SEQ ID NO: 1993692 - RNA, 19 nt, Human
agacccccuggagacuaac

SEQ ID NO: 1993693 - RNA, 21 nt, Human
agacauagaauuaacacauga

SEQ ID NO: 1993694 - RNA, 19 nt, Human
agacauacuaaccagcaga

SEQ ID NO: 1993695 - RNA, 17 nt, Human
agacaucaacagauaaa

SEQ ID NO: 1993696 - RNA, 18 nt, Human
agacaucaacagauaaau

SEQ ID NO: 1993697 - RNA, 14 nt, Human
agacauauuuacaa

SEQ ID NO: 1993698 - RNA, 20 nt, Human
ucuucuguggguuucuaaag

SEQ ID NO: 1993699 - RNA, 12 nt, Human
ucuucuguccaa

SEQ ID NO: 1993700 - RNA, 12 nt, Human
ucuucuguguuu

SEQ ID NO: 1993701 - RNA, 15 nt, Human
ucuucuguacgucug

SEQ ID NO: 1993702 - RNA, 20 nt, Human
ucuucuguacgucugacagg

SEQ ID NO: 1993703 - RNA, 18 nt, Human
ucuucuggguuccuuccu

SEQ ID NO: 1993704 - RNA, 21 nt, Human
ucuucugaacuuggcgcugcc

SEQ ID NO: 1993705 - RNA, 12 nt, Human
ucuucugcuuca

SEQ ID NO: 1993706 - RNA, 19 nt, Human
ucuucugcuucagccuccc

SEQ ID NO: 1993707 - RNA, 19 nt, Human
ucuugguccugcugcaguu

SEQ ID NO: 1993708 - RNA, 17 nt, Human
ucuugguccugcugcag

SEQ ID NO: 1993709 - RNA, 15 nt, Human
ucuugguccugcugc

SEQ ID NO: 1993710 - RNA, 12 nt, Human
ucuuuaacuugu

SEQ ID NO: 1993711 - RNA, 16 nt, Human
ucuuuaacuuguaaua

SEQ ID NO: 1993712 - RNA, 17 nt, Human
ucuuuccugaggcuggg

SEQ ID NO: 1993713 - RNA, 18 nt, Human
ucuuucuaaugugugaau

SEQ ID NO: 1993714 - RNA, 13 nt, Human
ucuuucucugagg

SEQ ID NO: 1993715 - RNA, 15 nt, Human
ucuuucucugaggac

SEQ ID NO: 1993716 - RNA, 17 nt, Human
ucuugggcaauauucuc

SEQ ID NO: 1993717 - RNA, 21 nt, Human
ucuugggcaauauucucugua

SEQ ID NO: 1993718 - RNA, 22 nt, Human
ucuugggcaauauucucuguac

SEQ ID NO: 1993719 - RNA, 24 nt, Human
ucuugggcaauauucucuguacau

SEQ ID NO: 1993720 - RNA, 14 nt, Human
ucuugguccugcug

SEQ ID NO: 1993721 - RNA, 17 nt, Human
ucuuggucagauuugaa

SEQ ID NO: 1993722 - RNA, 16 nt, Human
ucuugggggaaaauac

SEQ ID NO: 1993723 - RNA, 17 nt, Human
ucuuggcuuggugagga

SEQ ID NO: 1993724 - RNA, 16 nt, Human
ucuuggccuuacugua

SEQ ID NO: 1993725 - RNA, 19 nt, Human
ucuugcaauggcagccuug

SEQ ID NO: 1993726 - RNA, 18 nt, Human
ucuugcaauggcagccuu

SEQ ID NO: 1993727 - RNA, 22 nt, Human
ucuugcaauggcagccuuggca

SEQ ID NO: 1993728 - RNA, 21 nt, Human
ucuugaugccuggcggggugg

SEQ ID NO: 1993729 - RNA, 23 nt, Human
ucuugauucguagauuuaauaac

SEQ ID NO: 1993730 - RNA, 13 nt, Human
ucuugauucauaa

SEQ ID NO: 1993731 - RNA, 20 nt, Human
ucuugaguuguuuuuguaua

SEQ ID NO: 1993732 - RNA, 21 nt, Human
ucuugaguuguuuuuguauau

SEQ ID NO: 1993733 - RNA, 18 nt, Human
agacuauguaaaaauaac

SEQ ID NO: 1993734 - RNA, 15 nt, Human
ucuugacucuugccu

SEQ ID NO: 1993735 - RNA, 16 nt, Human
ucuugagccugggagg

SEQ ID NO: 1993736 - RNA, 13 nt, Human
ucuugagccuggg

SEQ ID NO: 1993737 - RNA, 16 nt, Human
ucuugagccuugaacu

SEQ ID NO: 1993738 - RNA, 23 nt, Human
agaccuucuccuucaccuuuguc

SEQ ID NO: 1993739 - RNA, 21 nt, Human
agaccuucuccuucaccuuug

SEQ ID NO: 1993740 - RNA, 18 nt, Human
agaccuucuccuucaccu

SEQ ID NO: 1993741 - RNA, 15 nt, Human
agaccuucuccuuca

SEQ ID NO: 1993742 - RNA, 11 nt, Human
agaccuucucc

SEQ ID NO: 1993743 - RNA, 20 nt, Human
agaccuggggcugcugugaa

SEQ ID NO: 1993744 - RNA, 22 nt, Human
agagccuuccaggggugggaca

SEQ ID NO: 1993745 - RNA, 17 nt, Human
agagccuuccaggggug

SEQ ID NO: 1993746 - RNA, 15 nt, Human
agagccuuccagggg

SEQ ID NO: 1993747 - RNA, 13 nt, Human
agagccuuccagg

SEQ ID NO: 1993748 - RNA, 20 nt, Human
agagcuagcagcagggaggg

SEQ ID NO: 1993749 - RNA, 12 nt, Human
agagcugaacag

SEQ ID NO: 1993750 - RNA, 14 nt, Human
agagcugccaccug

SEQ ID NO: 1993751 - RNA, 14 nt, Human
agagcuaggcaggg

SEQ ID NO: 1993752 - RNA, 19 nt, Human
agagcuauggacagcauug

SEQ ID NO: 1993753 - RNA, 23 nt, Human
agagcuauggacagcauugccag

SEQ ID NO: 1993754 - RNA, 19 nt, Human
agagcaguugagaggacac

SEQ ID NO: 1993755 - RNA, 23 nt, Human
agagcaccuuagacagucccugc

SEQ ID NO: 1993756 - RNA, 21 nt, Human
agagcaccuuagacagucccu

SEQ ID NO: 1993757 - RNA, 23 nt, Human
agagcaaccccuggaccccagcc

SEQ ID NO: 1993758 - RNA, 24 nt, Human
agagcaaccccuggaccccagccu

SEQ ID NO: 1993759 - RNA, 22 nt, Human
agagcaccuuagacagucccug

SEQ ID NO: 1993760 - RNA, 19 nt, Human
agagcagcuccuuccuagc

SEQ ID NO: 1993761 - RNA, 22 nt, Human
agagacuccugcaggcagccag

SEQ ID NO: 1993762 - RNA, 21 nt, Human
agagacuccugcaggcagcca

SEQ ID NO: 1993763 - RNA, 20 nt, Human
agagacuccugcaggcagcc

SEQ ID NO: 1993764 - RNA, 19 nt, Human
agagacuccugcaggcagc

SEQ ID NO: 1993765 - RNA, 18 nt, Human
agagacuccugcaggcag

SEQ ID NO: 1993766 - RNA, 17 nt, Human
agagacuccugcaggca

SEQ ID NO: 1993767 - RNA, 15 nt, Human
agagacuccugcagg

SEQ ID NO: 1993768 - RNA, 16 nt, Human
agagacuccagcuggg

SEQ ID NO: 1993769 - RNA, 12 nt, Human
ugaaacuuuugg

SEQ ID NO: 1993770 - RNA, 12 nt, Human
ugaaacuuugag

SEQ ID NO: 1993771 - RNA, 14 nt, Human
ugaaacuuugagau

SEQ ID NO: 1993772 - RNA, 22 nt, Human
ugaaacuuugagaucuaaaaau

SEQ ID NO: 1993773 - RNA, 23 nt, Human
ugaaacuuugagaucuaaaaaua

SEQ ID NO: 1993774 - RNA, 14 nt, Human
ugaaagaauguaaa

SEQ ID NO: 1993775 - RNA, 15 nt, Human
ugaaagaauguaaag

SEQ ID NO: 1993776 - RNA, 16 nt, Human
ugaaagaauguaaagc

SEQ ID NO: 1993777 - RNA, 15 nt, Human
ugaaagacuguacaa

SEQ ID NO: 1993778 - RNA, 13 nt, Human
ugaaagacuguac

SEQ ID NO: 1993779 - RNA, 23 nt, Human
agagcaagacgcugugcugcccu

SEQ ID NO: 1993780 - RNA, 19 nt, Human
agagcaagacgcugugcug

SEQ ID NO: 1993781 - RNA, 19 nt, Human
agagauguguaauuuuucu

SEQ ID NO: 1993782 - RNA, 18 nt, Human
agagcaaccccuggaccc

SEQ ID NO: 1993783 - RNA, 21 nt, Human
agagcaaccccuggaccccag

SEQ ID NO: 1993784 - RNA, 22 nt, Human
agagcaaccccuggaccccagc

SEQ ID NO: 1993785 - RNA, 20 nt, Human
agagauggcuuacaaaaaga

SEQ ID NO: 1993786 - RNA, 23 nt, Human
agagauggcuuacaaaaagaaau

SEQ ID NO: 1993787 - RNA, 16 nt, Human
agagaugucucuuaua

SEQ ID NO: 1993788 - RNA, 13 nt, Human
agagauguguaau

SEQ ID NO: 1993789 - RNA, 14 nt, Human
agagauguguaauu

SEQ ID NO: 1993790 - RNA, 18 nt, Human
agagauguguaauuuuuc

SEQ ID NO: 1993791 - RNA, 23 nt, Human
agagacuccugcaggcagccagg

SEQ ID NO: 1993792 - RNA, 22 nt, Human
agagaucaaccccuucgcuccu

SEQ ID NO: 1993793 - RNA, 20 nt, Human
agagacaggguuucaccaug

SEQ ID NO: 1993794 - RNA, 22 nt, Human
ucuuuggucuacacugugcuga

SEQ ID NO: 1993795 - RNA, 13 nt, Human
ucuuucucuuuua

SEQ ID NO: 1993796 - RNA, 20 nt, Human
ucuuucuggcuaugcauuug

SEQ ID NO: 1993797 - RNA, 21 nt, Human
ucuuucuggcuaugcauuuga

SEQ ID NO: 1993798 - RNA, 21 nt, Human
ucuuucugguuguuuuuaaac

SEQ ID NO: 1993799 - RNA, 12 nt, Human
agagacaggcag

SEQ ID NO: 1993800 - RNA, 13 nt, Human
agagacaggcagg

SEQ ID NO: 1993801 - RNA, 22 nt, Human
agagacaggcaggugaucugcu

SEQ ID NO: 1993802 - RNA, 14 nt, Human
ucuuuguuaauuug

SEQ ID NO: 1993803 - RNA, 13 nt, Human
ucuuuuaaaaagu

SEQ ID NO: 1993804 - RNA, 14 nt, Human
ucuuuuaaaaagua

SEQ ID NO: 1993805 - RNA, 16 nt, Human
ucuuuuaaaaaguauu

SEQ ID NO: 1993806 - RNA, 17 nt, Human
ucuuuuaaaaaguauug

SEQ ID NO: 1993807 - RNA, 16 nt, Human
ugaaaaaggaggaaga

SEQ ID NO: 1993808 - RNA, 23 nt, Human
ugaaaaaauauauaucaaauaua

SEQ ID NO: 1993809 - RNA, 16 nt, Human
ugaaaaaagcaguucu

SEQ ID NO: 1993810 - RNA, 17 nt, Human
ugaaaaaagcaguucuu

SEQ ID NO: 1993811 - RNA, 22 nt, Human
ugaaaaaguucugcagauaaac

SEQ ID NO: 1993812 - RNA, 22 nt, Human
ugaaaaaggaggaagagaaaaa

SEQ ID NO: 1993813 - RNA, 20 nt, Human
ugaaaaaggaggaagagaaa

SEQ ID NO: 1993814 - RNA, 19 nt, Human
ugaaaaaugagauugaaug

SEQ ID NO: 1993815 - RNA, 14 nt, Human
ugaaaaggccaaga

SEQ ID NO: 1993816 - RNA, 17 nt, Human
ugaaaagcuuuguuugu

SEQ ID NO: 1993817 - RNA, 21 nt, Human
ugaaaagcuuuguuuguucuu

SEQ ID NO: 1993818 - RNA, 18 nt, Human
ugaaaaguaauauuuauu

SEQ ID NO: 1993819 - RNA, 19 nt, Human
ugaaaaguaauauuuauua

SEQ ID NO: 1993820 - RNA, 20 nt, Human
ugaaaaguaauauuuauuaa

SEQ ID NO: 1993821 - RNA, 20 nt, Human
ugaaaauaguuuauuuuaaa

SEQ ID NO: 1993822 - RNA, 21 nt, Human
ugaaaaguaauauuuauuaaa

SEQ ID NO: 1993823 - RNA, 22 nt, Human
ugaaaauaguuuauuuuaaaac

SEQ ID NO: 1993824 - RNA, 23 nt, Human
ugaaaauaguuuauuuuaaaaca

SEQ ID NO: 1993825 - RNA, 13 nt, Human
ugaaaauauauac

SEQ ID NO: 1993826 - RNA, 16 nt, Human
ugaaaauaucggggag

SEQ ID NO: 1993827 - RNA, 11 nt, Human
ugaaaauauuu

SEQ ID NO: 1993828 - RNA, 12 nt, Human
ugaaaauauuua

SEQ ID NO: 1993829 - RNA, 13 nt, Human
ugaaaauauuuaa

SEQ ID NO: 1993830 - RNA, 14 nt, Human
ugaaaauauuuaaa

SEQ ID NO: 1993831 - RNA, 16 nt, Human
ugaaaaucgugacaac

SEQ ID NO: 1993832 - RNA, 12 nt, Human
ugaaacuuggau

SEQ ID NO: 1993833 - RNA, 17 nt, Human
ugaaacugacuugcugu

SEQ ID NO: 1993834 - RNA, 18 nt, Human
ugaaacuccagaugccac

SEQ ID NO: 1993835 - RNA, 19 nt, Human
ugaaacuccagaugccaca

SEQ ID NO: 1993836 - RNA, 17 nt, Human
ugaaacuccagaugcca

SEQ ID NO: 1993837 - RNA, 16 nt, Human
ugaaacgcaaccacca

SEQ ID NO: 1993838 - RNA, 17 nt, Human
ugaaaauguauguguaa

SEQ ID NO: 1993839 - RNA, 19 nt, Human
ugaaaaucgugacaacacu

SEQ ID NO: 1993840 - RNA, 20 nt, Human
ugaaaaucuuauaauuuaaa

SEQ ID NO: 1993841 - RNA, 17 nt, Human
agaagccacccaaagca

SEQ ID NO: 1993842 - RNA, 18 nt, Human
agaagccacccaaagcag

SEQ ID NO: 1993843 - RNA, 12 nt, Human
agaacuuuguau

SEQ ID NO: 1993844 - RNA, 17 nt, Human
agaacuuguuuaauaaa

SEQ ID NO: 1993845 - RNA, 15 nt, Human
agaacuugcugccuc

SEQ ID NO: 1993846 - RNA, 12 nt, Human
agaacuuguuua

SEQ ID NO: 1993847 - RNA, 14 nt, Human
agaacuugcugccu

SEQ ID NO: 1993848 - RNA, 22 nt, Human
agaacuugaagccugcuccuuc

SEQ ID NO: 1993849 - RNA, 23 nt, Human
agaacugcagucacugcacguuu

SEQ ID NO: 1993850 - RNA, 17 nt, Human
agaacuugaagccugcu

SEQ ID NO: 1993851 - RNA, 16 nt, Human
agaagcagaggaagga

SEQ ID NO: 1993852 - RNA, 19 nt, Human
agaagcaacccaaauguuc

SEQ ID NO: 1993853 - RNA, 17 nt, Human
agaacuuuguauaguua

SEQ ID NO: 1993854 - RNA, 13 nt, Human
agaacuuuguaua

SEQ ID NO: 1993855 - RNA, 15 nt, Human
agaacuuuguauagu

SEQ ID NO: 1993856 - RNA, 23 nt, Human
agaagcccaggaaaggcuccagg

SEQ ID NO: 1993857 - RNA, 20 nt, Human
ucugcccauccugccccuga

SEQ ID NO: 1993858 - RNA, 17 nt, Human
ucugcccagcuuuucau

SEQ ID NO: 1993859 - RNA, 18 nt, Human
ucugcccagcuuuucauu

SEQ ID NO: 1993860 - RNA, 23 nt, Human
ucugcccacucccugcaaccuga

SEQ ID NO: 1993861 - RNA, 13 nt, Human
ucugcccagcuuu

SEQ ID NO: 1993862 - RNA, 14 nt, Human
ucugccccagcuug

SEQ ID NO: 1993863 - RNA, 18 nt, Human
ucugccccagcuugggca

SEQ ID NO: 1993864 - RNA, 22 nt, Human
ucugccccaaguuuugugaaau

SEQ ID NO: 1993865 - RNA, 15 nt, Human
ucugccccaaguuuu

SEQ ID NO: 1993866 - RNA, 16 nt, Human
ucugccccaaguuuug

SEQ ID NO: 1993867 - RNA, 23 nt, Human
ucugcccuugguuaggcauugug

SEQ ID NO: 1993868 - RNA, 12 nt, Human
ucugcccuuggu

SEQ ID NO: 1993869 - RNA, 22 nt, Human
ucugcccugcgggucacaggag

SEQ ID NO: 1993870 - RNA, 18 nt, Human
agaacuaucuucaucuga

SEQ ID NO: 1993871 - RNA, 19 nt, Human
agaacuaucuucaucugag

SEQ ID NO: 1993872 - RNA, 13 nt, Human
agaacuaucuuca

SEQ ID NO: 1993873 - RNA, 14 nt, Human
agaacuaucuucau

SEQ ID NO: 1993874 - RNA, 17 nt, Human
agaacuaucuucaucug

SEQ ID NO: 1993875 - RNA, 16 nt, Human
agaacgcugauuuaaa

SEQ ID NO: 1993876 - RNA, 20 nt, Human
agaacuaccuggauuuguau

SEQ ID NO: 1993877 - RNA, 23 nt, Human
agaaccuuuugagugccuuacac

SEQ ID NO: 1993878 - RNA, 22 nt, Human
agaacgccagggaccccagaau

SEQ ID NO: 1993879 - RNA, 19 nt, Human
agaaccuuuugagugccuu

SEQ ID NO: 1993880 - RNA, 17 nt, Human
agaacucccuuucaaca

SEQ ID NO: 1993881 - RNA, 15 nt, Human
agaacucccuuucaa

SEQ ID NO: 1993882 - RNA, 16 nt, Human
agaacucccuuucaac

SEQ ID NO: 1993883 - RNA, 16 nt, Human
agaacugcagucacug

SEQ ID NO: 1993884 - RNA, 18 nt, Human
agaacugcagucacugca

SEQ ID NO: 1993885 - RNA, 17 nt, Human
ucugaaucuucugaaac

SEQ ID NO: 1993886 - RNA, 13 nt, Human
agaaauuagggcu

SEQ ID NO: 1993887 - RNA, 19 nt, Human
agaaauuagggcucuaauu

SEQ ID NO: 1993888 - RNA, 20 nt, Human
agaaauuagggcucuaauuu

SEQ ID NO: 1993889 - RNA, 12 nt, Human
agaaauuaugug

SEQ ID NO: 1993890 - RNA, 21 nt, Human
agaaauuagggcucuaauuuc

SEQ ID NO: 1993891 - RNA, 22 nt, Human
agaaauuagggcucuaauuucc

SEQ ID NO: 1993892 - RNA, 23 nt, Human
agaaauuagggcucuaauuuccu

SEQ ID NO: 1993893 - RNA, 23 nt, Human
ucugcaggucccuaauaaagcug

SEQ ID NO: 1993894 - RNA, 22 nt, Human
ucugcaggucccuaauaaagcu

SEQ ID NO: 1993895 - RNA, 19 nt, Human
ucugcaggucccuaauaaa

SEQ ID NO: 1993896 - RNA, 21 nt, Human
ucugcaggucccuaauaaagc

SEQ ID NO: 1993897 - RNA, 15 nt, Human
ucugaaucuucugaa

SEQ ID NO: 1993898 - RNA, 19 nt, Human
ucugaauaagcacuuuuua

SEQ ID NO: 1993899 - RNA, 19 nt, Human
ucugaaguuauauuuccua

SEQ ID NO: 1993900 - RNA, 15 nt, Human
ucugaauaagcacuu

SEQ ID NO: 1993901 - RNA, 18 nt, Human
ucugaauaagcacuuuuu

SEQ ID NO: 1993902 - RNA, 14 nt, Human
ucugaaguuauauu

SEQ ID NO: 1993903 - RNA, 17 nt, Human
ucugaaguuauauuucc

SEQ ID NO: 1993904 - RNA, 18 nt, Human
ucugaaguuauauuuccu

SEQ ID NO: 1993905 - RNA, 19 nt, Human
ucuggauucauauuuaauu

SEQ ID NO: 1993906 - RNA, 16 nt, Human
ucuggauucauauuua

SEQ ID NO: 1993907 - RNA, 22 nt, Human
ucuggcaauggaugaacugaaa

SEQ ID NO: 1993908 - RNA, 13 nt, Human
ucuggcacagccu

SEQ ID NO: 1993909 - RNA, 14 nt, Human
ucuggcacagccug

SEQ ID NO: 1993910 - RNA, 22 nt, Human
ucugcuuugggguuuaucagaa

SEQ ID NO: 1993911 - RNA, 15 nt, Human
ucugcuuuguugugu

SEQ ID NO: 1993912 - RNA, 18 nt, Human
ucugcuuuguugugugcc

SEQ ID NO: 1993913 - RNA, 22 nt, Human
ucugcuuuguugugugccucua

SEQ ID NO: 1993914 - RNA, 12 nt, Human
ucugccugucuc

SEQ ID NO: 1993915 - RNA, 14 nt, Human
ucugccugucuccc

SEQ ID NO: 1993916 - RNA, 23 nt, Human
ucuggcagaguugaagacagagc

SEQ ID NO: 1993917 - RNA, 20 nt, Human
ucuggcagaguugaagacag

SEQ ID NO: 1993918 - RNA, 17 nt, Human
ucuggcagcucagagag

SEQ ID NO: 1993919 - RNA, 14 nt, Human
ucuggccucccaca

SEQ ID NO: 1993920 - RNA, 13 nt, Human
ucuggccucccac

SEQ ID NO: 1993921 - RNA, 15 nt, Human
ucuggcacagccugc

SEQ ID NO: 1993922 - RNA, 16 nt, Human
ucuggcacagccugca

SEQ ID NO: 1993923 - RNA, 17 nt, Human
ucuggcacagccugcac

SEQ ID NO: 1993924 - RNA, 21 nt, Human
ucuggcagcucagagagggug

SEQ ID NO: 1993925 - RNA, 18 nt, Human
ucuggcagcucagagagg

SEQ ID NO: 1993926 - RNA, 10 nt, Human
ucuggccuuc

SEQ ID NO: 1993927 - RNA, 13 nt, Human
agaagcccugaug

SEQ ID NO: 1993928 - RNA, 13 nt, Human
agaauaaacuggc

SEQ ID NO: 1993929 - RNA, 20 nt, Human
agaauaaacuuacauauuua

SEQ ID NO: 1993930 - RNA, 15 nt, Human
agaauaaaggcagcu

SEQ ID NO: 1993931 - RNA, 23 nt, Human
agaauaaagccuugugaucacuu

SEQ ID NO: 1993932 - RNA, 15 nt, Human
agaauaggacuuguu

SEQ ID NO: 1993933 - RNA, 16 nt, Human
agaauaggacuuguuu

SEQ ID NO: 1993934 - RNA, 17 nt, Human
agaauaggacuuguuuu

SEQ ID NO: 1993935 - RNA, 21 nt, Human
agaauaggacuuguuuuuguu

SEQ ID NO: 1993936 - RNA, 11 nt, Human
agaauacugau

SEQ ID NO: 1993937 - RNA, 14 nt, Human
agaauacugaugga

SEQ ID NO: 1993938 - RNA, 15 nt, Human
agaauacugauggaa

SEQ ID NO: 1993939 - RNA, 15 nt, Human
agaauaauuugguau

SEQ ID NO: 1993940 - RNA, 22 nt, Human
agaaguuugagaucagccuggg

SEQ ID NO: 1993941 - RNA, 13 nt, Human
agaaguuucuguc

SEQ ID NO: 1993942 - RNA, 21 nt, Human
agaaguucuuugauucuguaa

SEQ ID NO: 1993943 - RNA, 12 nt, Human
agaaguuuaaau

SEQ ID NO: 1993944 - RNA, 13 nt, Human
agaaguuuaaaua

SEQ ID NO: 1993945 - RNA, 15 nt, Human
agaaguuuaaggaau

SEQ ID NO: 1993946 - RNA, 16 nt, Human
agaaguuuaaggaaua

SEQ ID NO: 1993947 - RNA, 17 nt, Human
agaaguuuaaggaauau

SEQ ID NO: 1993948 - RNA, 15 nt, Human
agaaguucuuugauu

SEQ ID NO: 1993949 - RNA, 20 nt, Human
agaaguucuuugauucugua

SEQ ID NO: 1993950 - RNA, 16 nt, Human
agaagugacgguuccu

SEQ ID NO: 1993951 - RNA, 17 nt, Human
agaagugacgguuccua

SEQ ID NO: 1993952 - RNA, 23 nt, Human
agaagugacgguuccuacacagg

SEQ ID NO: 1993953 - RNA, 23 nt, Human
agaagcucccugaaguaagcaaa

SEQ ID NO: 1993954 - RNA, 22 nt, Human
agaaagacuaucuaaauguuga

SEQ ID NO: 1993955 - RNA, 20 nt, Human
agaaagacuaucuaaauguu

SEQ ID NO: 1993956 - RNA, 17 nt, Human
agaaagcagaacaguga

SEQ ID NO: 1993957 - RNA, 18 nt, Human
agaaagcagaacagugau

SEQ ID NO: 1993958 - RNA, 15 nt, Human
agaaagcaaaauuau

SEQ ID NO: 1993959 - RNA, 17 nt, Human
agaaagcaaaauuaugu

SEQ ID NO: 1993960 - RNA, 21 nt, Human
agaaagcaaaauuauguuugc

SEQ ID NO: 1993961 - RNA, 15 nt, Human
agaaagcaagaugua

SEQ ID NO: 1993962 - RNA, 20 nt, Human
agaaagcagaacagugauua

SEQ ID NO: 1993963 - RNA, 18 nt, Human
agaaauacagauaaauga

SEQ ID NO: 1993964 - RNA, 20 nt, Human
ucugaaggguaauuauauag

SEQ ID NO: 1993965 - RNA, 18 nt, Human
ucugaaggaggccaccuc

SEQ ID NO: 1993966 - RNA, 19 nt, Human
ucugaaggaggccaccucc

SEQ ID NO: 1993967 - RNA, 20 nt, Human
ucugaaggaggccaccuccu

SEQ ID NO: 1993968 - RNA, 18 nt, Human
ucugaaggcuggguucug

SEQ ID NO: 1993969 - RNA, 17 nt, Human
ucugaaggaggccaccu

SEQ ID NO: 1993970 - RNA, 15 nt, Human
agaaaugccuuaccc

SEQ ID NO: 1993971 - RNA, 21 nt, Human
agaaaucuauagaaaguguuc

SEQ ID NO: 1993972 - RNA, 13 nt, Human
agaaaugaaaaaa

SEQ ID NO: 1993973 - RNA, 12 nt, Human
agaaaugaaaaa

SEQ ID NO: 1993974 - RNA, 19 nt, Human
agaaaucuauagaaagugu

SEQ ID NO: 1993975 - RNA, 20 nt, Human
agaaaucuauagaaaguguu

SEQ ID NO: 1993976 - RNA, 20 nt, Human
agaaauacagauaaaugauu

SEQ ID NO: 1993977 - RNA, 13 nt, Human
agaaauacuguac

SEQ ID NO: 1993978 - RNA, 14 nt, Human
agaaauacuguaca

SEQ ID NO: 1993979 - RNA, 16 nt, Human
agaaauacuguacaau

SEQ ID NO: 1993980 - RNA, 15 nt, Human
agaaauaguucugug

SEQ ID NO: 1993981 - RNA, 16 nt, Human
agaaauaguucuguga

SEQ ID NO: 1993982 - RNA, 21 nt, Human
agaaacuguucccaccugcug

SEQ ID NO: 1993983 - RNA, 15 nt, Human
agaaacuguucccac

SEQ ID NO: 1993984 - RNA, 22 nt, Human
agaaacuguucccaccugcugg

SEQ ID NO: 1993985 - RNA, 23 nt, Human
agaaacugucuagcacuuccuug

SEQ ID NO: 1993986 - RNA, 17 nt, Human
agaaacugucuagcacu

SEQ ID NO: 1993987 - RNA, 22 nt, Human
agaaacugucuagcacuuccuu

SEQ ID NO: 1993988 - RNA, 16 nt, Human
agaaacauuggaagca

SEQ ID NO: 1993989 - RNA, 13 nt, Human
agaaacauuggaa

SEQ ID NO: 1993990 - RNA, 14 nt, Human
agaaacauuggaag

SEQ ID NO: 1993991 - RNA, 18 nt, Human
agaaacacccacaggcau

SEQ ID NO: 1993992 - RNA, 20 nt, Human
agaaacacauaauuaacacu

SEQ ID NO: 1993993 - RNA, 19 nt, Human
agaaaagauguagauuuau

SEQ ID NO: 1993994 - RNA, 13 nt, Human
agaaacaauuucu

SEQ ID NO: 1993995 - RNA, 14 nt, Human
agaaacaauuucug

SEQ ID NO: 1993996 - RNA, 15 nt, Human
agaaacaauuucugu

SEQ ID NO: 1993997 - RNA, 18 nt, Human
agaaaaaugagccuggca

SEQ ID NO: 1993998 - RNA, 13 nt, Human
agaaaaacaaauc

SEQ ID NO: 1993999 - RNA, 21 nt, Human
agaaaacaaaaccaaaaguua

SEQ ID NO: 1994000 - RNA, 16 nt, Human
agaaaaaugugaauuu

SEQ ID NO: 1994001 - RNA, 23 nt, Human
agaaaaaauauuuuccugccagg

SEQ ID NO: 1994002 - RNA, 17 nt, Human
agaaaaaauauuuuccu

SEQ ID NO: 1994003 - RNA, 19 nt, Human
agaaaaaauauuuucccua

SEQ ID NO: 1994004 - RNA, 18 nt, Human
ucucuugguccugcugca

SEQ ID NO: 1994005 - RNA, 17 nt, Human
ucucuugguccugcugc

SEQ ID NO: 1994006 - RNA, 16 nt, Human
ucucuugguccugcug

SEQ ID NO: 1994007 - RNA, 22 nt, Human
ucucugcaggucccuaauaaag

SEQ ID NO: 1994008 - RNA, 21 nt, Human
ucucugcaggucccuaauaaa

SEQ ID NO: 1994009 - RNA, 20 nt, Human
ucucugcaggucccuaauaa

SEQ ID NO: 1994010 - RNA, 19 nt, Human
ucucugcaggucccuaaua

SEQ ID NO: 1994011 - RNA, 21 nt, Human
ucucucaggccaaacucaccu

SEQ ID NO: 1994012 - RNA, 19 nt, Human
ucucuccauuucacuggcu

SEQ ID NO: 1994013 - RNA, 12 nt, Human
ucucucaggcca

SEQ ID NO: 1994014 - RNA, 21 nt, Human
ucucucacuuguuuuauuuaa

SEQ ID NO: 1994015 - RNA, 22 nt, Human
ucucucacuuguuuuauuuaac

SEQ ID NO: 1994016 - RNA, 15 nt, Human
ucucggcucacugca

SEQ ID NO: 1994017 - RNA, 20 nt, Human
ucucggaucaggcucccagg

SEQ ID NO: 1994018 - RNA, 18 nt, Human
ucucgcucuguugcccag

SEQ ID NO: 1994019 - RNA, 19 nt, Human
ucucgcucuguugcccagg

SEQ ID NO: 1994020 - RNA, 21 nt, Human
ucucgcucuguugcccaggcu

SEQ ID NO: 1994021 - RNA, 20 nt, Human
ucucgcuauugucaccaggg

SEQ ID NO: 1994022 - RNA, 17 nt, Human
ucucgaacuccugaccu

SEQ ID NO: 1994023 - RNA, 23 nt, Human
ucuccuuggugucgggcaugaca

SEQ ID NO: 1994024 - RNA, 21 nt, Human
ucuccuuggugucgggcauga

SEQ ID NO: 1994025 - RNA, 17 nt, Human
ucuccuuagcuucuggc

SEQ ID NO: 1994026 - RNA, 18 nt, Human
ucuccuuaagagacaauu

SEQ ID NO: 1994027 - RNA, 19 nt, Human
ucuccuuaagagacaauuu

SEQ ID NO: 1994028 - RNA, 20 nt, Human
agaaaaaaaugucaaaagua

SEQ ID NO: 1994029 - RNA, 19 nt, Human
agaaaaaaaugucaaaagu

SEQ ID NO: 1994030 - RNA, 13 nt, Human
agaaaaaaauguc

SEQ ID NO: 1994031 - RNA, 10 nt, Human
agaaaaaaga

SEQ ID NO: 1994032 - RNA, 18 nt, Human
acuuuguguucaccuugu

SEQ ID NO: 1994033 - RNA, 17 nt, Human
agaaaaaaaaagaaaaa

SEQ ID NO: 1994034 - RNA, 18 nt, Human
agaaaaaaaaagaaaaaa

SEQ ID NO: 1994035 - RNA, 14 nt, Human
agaaaaaaaagaaa

SEQ ID NO: 1994036 - RNA, 19 nt, Human
agaaaaaaaaagaaaaaag

SEQ ID NO: 1994037 - RNA, 23 nt, Human
acuuuguauaguuauguaaauaa

SEQ ID NO: 1994038 - RNA, 15 nt, Human
acuuuguauuguccu

SEQ ID NO: 1994039 - RNA, 24 nt, Human
acuuuguauuguccuauuaguguu

SEQ ID NO: 1994040 - RNA, 16 nt, Human
acuuugucuaagaaac

SEQ ID NO: 1994041 - RNA, 19 nt, Human
acuuugucuaagaaacauu

SEQ ID NO: 1994042 - RNA, 20 nt, Human
acuuugucuaagaaacauug

SEQ ID NO: 1994043 - RNA, 16 nt, Human
acuuuguguucaccuu

SEQ ID NO: 1994044 - RNA, 22 nt, Human
acuuguuuuauuuaaccucuaa

SEQ ID NO: 1994045 - RNA, 15 nt, Human
acuuguggacacagc

SEQ ID NO: 1994046 - RNA, 16 nt, Human
acuuguuuucugggaa

SEQ ID NO: 1994047 - RNA, 16 nt, Human
acuuuaaaaggagcca

SEQ ID NO: 1994048 - RNA, 15 nt, Human
acuuguuuuuguaaa

SEQ ID NO: 1994049 - RNA, 16 nt, Human
acuuguuuuuguaaag

SEQ ID NO: 1994050 - RNA, 20 nt, Human
acuuguuuuuguaaagaaaa

SEQ ID NO: 1994051 - RNA, 21 nt, Human
acuuguuuuuguaaagaaaaa

SEQ ID NO: 1994052 - RNA, 23 nt, Human
acuuguuuuuguuuuuguuuugu

SEQ ID NO: 1994053 - RNA, 17 nt, Human
acuugugacuuuugcuu

SEQ ID NO: 1994054 - RNA, 19 nt, Human
acuugugacuuuugcuuua

SEQ ID NO: 1994055 - RNA, 14 nt, Human
acuugucuuucugg

SEQ ID NO: 1994056 - RNA, 16 nt, Human
acuugucuuucugggg

SEQ ID NO: 1994057 - RNA, 23 nt, Human
acuugucuuucugggguuuuucu

SEQ ID NO: 1994058 - RNA, 14 nt, Human
acuugugacuuuug

SEQ ID NO: 1994059 - RNA, 13 nt, Human
acuugucuuucug

SEQ ID NO: 1994060 - RNA, 23 nt, Human
acuugugacuuuugcuuuaauuc

SEQ ID NO: 1994061 - RNA, 17 nt, Human
acuugugcacaggcaga

SEQ ID NO: 1994062 - RNA, 14 nt, Human
acuuguggacacag

SEQ ID NO: 1994063 - RNA, 13 nt, Human
acuuuagggaagu

SEQ ID NO: 1994064 - RNA, 16 nt, Human
acuuucuucuucccau

SEQ ID NO: 1994065 - RNA, 14 nt, Human
acuuuaaaaauuua

SEQ ID NO: 1994066 - RNA, 16 nt, Human
acuuuaaaaauuuacu

SEQ ID NO: 1994067 - RNA, 19 nt, Human
acuuuaaaaauuuacuaca

SEQ ID NO: 1994068 - RNA, 14 nt, Human
acuuuggaaagagu

SEQ ID NO: 1994069 - RNA, 13 nt, Human
acuuuggaaagag

SEQ ID NO: 1994070 - RNA, 12 nt, Human
acuuuggaaaga

SEQ ID NO: 1994071 - RNA, 23 nt, Human
acuuuggaaagacuuuuccaacc

SEQ ID NO: 1994072 - RNA, 23 nt, Human
acuuuggaaagaguaggaagacu

SEQ ID NO: 1994073 - RNA, 19 nt, Human
acuuuguauaaaagggacu

SEQ ID NO: 1994074 - RNA, 19 nt, Human
acuuuggaaaguagaaaag

SEQ ID NO: 1994075 - RNA, 12 nt, Human
acuuuguauagu

SEQ ID NO: 1994076 - RNA, 14 nt, Human
acuuuguauaguua

SEQ ID NO: 1994077 - RNA, 17 nt, Human
acuuuguauaguuaugu

SEQ ID NO: 1994078 - RNA, 18 nt, Human
acuuuguauaguuaugua

SEQ ID NO: 1994079 - RNA, 21 nt, Human
acuuuguauaguuauguaaau

SEQ ID NO: 1994080 - RNA, 10 nt, Human
acuuugaugu

SEQ ID NO: 1994081 - RNA, 11 nt, Human
acuuugauguc

SEQ ID NO: 1994082 - RNA, 10 nt, Human
acuuugaaau

SEQ ID NO: 1994083 - RNA, 18 nt, Human
acuuugauucacauguuu

SEQ ID NO: 1994084 - RNA, 19 nt, Human
acuuugauucacauguuuu

SEQ ID NO: 1994085 - RNA, 23 nt, Human
acuuugauucacauguuuucaaa

SEQ ID NO: 1994086 - RNA, 12 nt, Human
acuuugauguca

SEQ ID NO: 1994087 - RNA, 16 nt, Human
acuuugaugucagcag

SEQ ID NO: 1994088 - RNA, 17 nt, Human
acuuugaugucagcagu

SEQ ID NO: 1994089 - RNA, 22 nt, Human
acuuugaugucagcaguugcug

SEQ ID NO: 1994090 - RNA, 13 nt, Human
acuuugauucaca

SEQ ID NO: 1994091 - RNA, 17 nt, Human
acuuugauucacauguu

SEQ ID NO: 1994092 - RNA, 22 nt, Human
acuuugcagcacagcugagagg

SEQ ID NO: 1994093 - RNA, 16 nt, Human
acugaaaggcuuuuca

SEQ ID NO: 1994094 - RNA, 14 nt, Human
ucgcccucccaggc

SEQ ID NO: 1994095 - RNA, 13 nt, Human
ucgcccuggcagg

SEQ ID NO: 1994096 - RNA, 17 nt, Human
ucgcccuggcaggcagg

SEQ ID NO: 1994097 - RNA, 17 nt, Human
ucgcccucccaggcucu

SEQ ID NO: 1994098 - RNA, 13 nt, Human
ucgcccucccagg

SEQ ID NO: 1994099 - RNA, 18 nt, Human
ucgcccuggacugugugc

SEQ ID NO: 1994100 - RNA, 14 nt, Human
ucgcuccugugucu

SEQ ID NO: 1994101 - RNA, 17 nt, Human
ucgccucggaucagcug

SEQ ID NO: 1994102 - RNA, 23 nt, Human
ucgccucggaucagcugagccuu

SEQ ID NO: 1994103 - RNA, 15 nt, Human
acugggggcagacau

SEQ ID NO: 1994104 - RNA, 15 nt, Human
acuggguacuugugg

SEQ ID NO: 1994105 - RNA, 21 nt, Human
acugggcuuggggaccagagc

SEQ ID NO: 1994106 - RNA, 18 nt, Human
ucgcucuguugcccaggc

SEQ ID NO: 1994107 - RNA, 22 nt, Human
ucgcuggauggcggaagcugcu

SEQ ID NO: 1994108 - RNA, 23 nt, Human
ucgcugugucagcauagaaguaa

SEQ ID NO: 1994109 - RNA, 20 nt, Human
acuguacaugaaaacacauu

SEQ ID NO: 1994110 - RNA, 21 nt, Human
acuguacaugaaaacacauuu

SEQ ID NO: 1994111 - RNA, 15 nt, Human
acuguacuugcucuu

SEQ ID NO: 1994112 - RNA, 20 nt, Human
acuguacuccucccaggcgc

SEQ ID NO: 1994113 - RNA, 22 nt, Human
acuguacaaugacuuuauugca

SEQ ID NO: 1994114 - RNA, 14 nt, Human
acuguaucaugaca

SEQ ID NO: 1994115 - RNA, 16 nt, Human
acuguacuuugauuca

SEQ ID NO: 1994116 - RNA, 20 nt, Human
acuguacuuugauucacaug

SEQ ID NO: 1994117 - RNA, 22 nt, Human
acuguacuuugauucacauguu

SEQ ID NO: 1994118 - RNA, 23 nt, Human
acuguacuuugauucacauguuu

SEQ ID NO: 1994119 - RNA, 13 nt, Human
acuguacuuugau

SEQ ID NO: 1994120 - RNA, 23 nt, Human
acuguacuugcucuugaugccug

SEQ ID NO: 1994121 - RNA, 19 nt, Human
acuguacaugaaaacacau

SEQ ID NO: 1994122 - RNA, 16 nt, Human
acuguacaugaaaaca

SEQ ID NO: 1994123 - RNA, 18 nt, Human
acuguacagacagaaaaa

SEQ ID NO: 1994124 - RNA, 22 nt, Human
acuguacaaaguagaagucuua

SEQ ID NO: 1994125 - RNA, 16 nt, Human
acuguacaaaguagaa

SEQ ID NO: 1994126 - RNA, 17 nt, Human
acuggguacuuguggac

SEQ ID NO: 1994127 - RNA, 18 nt, Human
acuggguacuuguggaca

SEQ ID NO: 1994128 - RNA, 18 nt, Human
acuguccuccaagccagc

SEQ ID NO: 1994129 - RNA, 16 nt, Human
acuguccuccaagcca

SEQ ID NO: 1994130 - RNA, 18 nt, Human
acuguccuauuauauuca

SEQ ID NO: 1994131 - RNA, 15 nt, Human
acuguccuauuauau

SEQ ID NO: 1994132 - RNA, 16 nt, Human
acuguccuauuauauu

SEQ ID NO: 1994133 - RNA, 23 nt, Human
acuguauugggaaguuacuguua

SEQ ID NO: 1994134 - RNA, 16 nt, Human
acuguaucaugacaaa

SEQ ID NO: 1994135 - RNA, 20 nt, Human
acuguaucaugacaaagacu

SEQ ID NO: 1994136 - RNA, 17 nt, Human
acuguuaauaguucagg

SEQ ID NO: 1994137 - RNA, 21 nt, Human
acuguuaauaguucagguaac

SEQ ID NO: 1994138 - RNA, 13 nt, Human
acuguuaccauug

SEQ ID NO: 1994139 - RNA, 12 nt, Human
ucgggcugugcc

SEQ ID NO: 1994140 - RNA, 13 nt, Human
ucgggcugugccc

SEQ ID NO: 1994141 - RNA, 19 nt, Human
ucggggagaggcugaggac

SEQ ID NO: 1994142 - RNA, 16 nt, Human
ucguauagaagucuuc

SEQ ID NO: 1994143 - RNA, 17 nt, Human
ucguauagaagucuuca

SEQ ID NO: 1994144 - RNA, 20 nt, Human
ucguauagaagucuucauga

SEQ ID NO: 1994145 - RNA, 22 nt, Human
ucguauagaagucuucaugaaa

SEQ ID NO: 1994146 - RNA, 14 nt, Human
ucguacauaauacu

SEQ ID NO: 1994147 - RNA, 15 nt, Human
ucguacauaauacug

SEQ ID NO: 1994148 - RNA, 22 nt, Human
ucguacauaauacugaaccacu

SEQ ID NO: 1994149 - RNA, 14 nt, Human
ucuaaaauuacaua

SEQ ID NO: 1994150 - RNA, 23 nt, Human
ucgucacugcuuaacuucacaua

SEQ ID NO: 1994151 - RNA, 15 nt, Human
ucguauucaccuuca

SEQ ID NO: 1994152 - RNA, 13 nt, Human
ucuaaaggcuacc

SEQ ID NO: 1994153 - RNA, 16 nt, Human
ucuaaaggcuaccuuu

SEQ ID NO: 1994154 - RNA, 17 nt, Human
ucuaaagcugccagccg

SEQ ID NO: 1994155 - RNA, 21 nt, Human
ucuaaacuuuauuccaaguca

SEQ ID NO: 1994156 - RNA, 18 nt, Human
ucuaaacuaggcuccuuc

SEQ ID NO: 1994157 - RNA, 13 nt, Human
ucuaaacugcccc

SEQ ID NO: 1994158 - RNA, 16 nt, Human
ucuaaacugcccccuc

SEQ ID NO: 1994159 - RNA, 22 nt, Human
ucuaaacugcccccucugcccu

SEQ ID NO: 1994160 - RNA, 23 nt, Human
ucuaaacugcccccucugcccug

SEQ ID NO: 1994161 - RNA, 12 nt, Human
ucuaagauguua

SEQ ID NO: 1994162 - RNA, 14 nt, Human
ucuaagauguuaua

SEQ ID NO: 1994163 - RNA, 16 nt, Human
ucuaagauguuauauu

SEQ ID NO: 1994164 - RNA, 18 nt, Human
ucuaagauguuauauuuu

SEQ ID NO: 1994165 - RNA, 21 nt, Human
ucuaagauguuauauuuuucu

SEQ ID NO: 1994166 - RNA, 22 nt, Human
ucuaagauguuauauuuuucuu

SEQ ID NO: 1994167 - RNA, 23 nt, Human
ucuaagauguuauauuuuucuua

SEQ ID NO: 1994168 - RNA, 16 nt, Human
ucuaagaaacauugga

SEQ ID NO: 1994169 - RNA, 17 nt, Human
ucuaagaaacauuggaa

SEQ ID NO: 1994170 - RNA, 18 nt, Human
ucuaagaaacauuggaag

SEQ ID NO: 1994171 - RNA, 23 nt, Human
ucuaagaaacauuggaagcaggu

SEQ ID NO: 1994172 - RNA, 13 nt, Human
ucuaagaaacauu

SEQ ID NO: 1994173 - RNA, 14 nt, Human
ucuaagaaacauug

SEQ ID NO: 1994174 - RNA, 18 nt, Human
ucuaagauuaauagcauu

SEQ ID NO: 1994175 - RNA, 20 nt, Human
ucuaagucgguuaaaaugga

SEQ ID NO: 1994176 - RNA, 22 nt, Human
ucuaagucaaacacuugugacu

SEQ ID NO: 1994177 - RNA, 23 nt, Human
ucuaagucaaacacuugugacuu

SEQ ID NO: 1994178 - RNA, 14 nt, Human
ucuaaguguuugcu

SEQ ID NO: 1994179 - RNA, 21 nt, Human
ucuacccucuuagaaaaacca

SEQ ID NO: 1994180 - RNA, 22 nt, Human
ucuaccccucccggcccugccu

SEQ ID NO: 1994181 - RNA, 23 nt, Human
ucuaccccucccggcccugccug

SEQ ID NO: 1994182 - RNA, 19 nt, Human
ucuaaguugaguauauuau

SEQ ID NO: 1994183 - RNA, 13 nt, Human
acuuacuguacau

SEQ ID NO: 1994184 - RNA, 14 nt, Human
acuuacuguacaug

SEQ ID NO: 1994185 - RNA, 20 nt, Human
acuuagagguggggagcaga

SEQ ID NO: 1994186 - RNA, 15 nt, Human
acuuacuguacauga

SEQ ID NO: 1994187 - RNA, 15 nt, Human
ucuaccucuuggcug

SEQ ID NO: 1994188 - RNA, 19 nt, Human
ucuaccugaggggccucuu

SEQ ID NO: 1994189 - RNA, 12 nt, Human
ucuaccugaggg

SEQ ID NO: 1994190 - RNA, 16 nt, Human
acuucaggcucuucuc

SEQ ID NO: 1994191 - RNA, 15 nt, Human
acuuauauuguaaga

SEQ ID NO: 1994192 - RNA, 17 nt, Human
acuuauauuguaagaaa

SEQ ID NO: 1994193 - RNA, 18 nt, Human
acuuauauuguaagaaau

SEQ ID NO: 1994194 - RNA, 19 nt, Human
acuuauauuguaagaaaua

SEQ ID NO: 1994195 - RNA, 20 nt, Human
acuuauauuguaagaaauac

SEQ ID NO: 1994196 - RNA, 21 nt, Human
acuuauauuguaagaaauacu

SEQ ID NO: 1994197 - RNA, 19 nt, Human
acuuagcaucuaauuucaa

SEQ ID NO: 1994198 - RNA, 15 nt, Human
acuuagccuuucuuu

SEQ ID NO: 1994199 - RNA, 22 nt, Human
acuuagcacuucagggcagauu

SEQ ID NO: 1994200 - RNA, 17 nt, Human
acuuccacugccauccu

SEQ ID NO: 1994201 - RNA, 18 nt, Human
acuuccaauuuacauacu

SEQ ID NO: 1994202 - RNA, 16 nt, Human
acuuccaggggaaccu

SEQ ID NO: 1994203 - RNA, 18 nt, Human
acuuccaggggaaccugc

SEQ ID NO: 1994204 - RNA, 20 nt, Human
acuuccaggggaaccugcca

SEQ ID NO: 1994205 - RNA, 21 nt, Human
acuuccaggggaaccugccau

SEQ ID NO: 1994206 - RNA, 17 nt, Human
acuuccauaaucuggac

SEQ ID NO: 1994207 - RNA, 20 nt, Human
acuucaggcucuucuccuuu

SEQ ID NO: 1994208 - RNA, 17 nt, Human
acuucaggcucuucucc

SEQ ID NO: 1994209 - RNA, 18 nt, Human
acuucaggcucuucuccu

SEQ ID NO: 1994210 - RNA, 16 nt, Human
acuucagggcagauuu

SEQ ID NO: 1994211 - RNA, 17 nt, Human
acuucagggcagauuuu

SEQ ID NO: 1994212 - RNA, 18 nt, Human
acuucagggcagauuuua

SEQ ID NO: 1994213 - RNA, 19 nt, Human
acuucagggcagauuuuag

SEQ ID NO: 1994214 - RNA, 20 nt, Human
acuucagggcagauuuuagu

SEQ ID NO: 1994215 - RNA, 21 nt, Human
acuucagggcagauuuuaguu

SEQ ID NO: 1994216 - RNA, 14 nt, Human
acuucauugaaaau

SEQ ID NO: 1994217 - RNA, 17 nt, Human
acuucauugaaaauaua

SEQ ID NO: 1994218 - RNA, 11 nt, Human
ucuagauguaa

SEQ ID NO: 1994219 - RNA, 16 nt, Human
ucuagauguaaauuuu

SEQ ID NO: 1994220 - RNA, 22 nt, Human
acuuccccaauaucuugcuuga

SEQ ID NO: 1994221 - RNA, 18 nt, Human
acuuccccaauaucuugc

SEQ ID NO: 1994222 - RNA, 21 nt, Human
acuuccccaauaucuugcuug

SEQ ID NO: 1994223 - RNA, 24 nt, Human
ucuagauacuguaucaugacaaag

SEQ ID NO: 1994224 - RNA, 18 nt, Human
ucuagcacuuccuugcca

SEQ ID NO: 1994225 - RNA, 15 nt, Human
ucuagcguagugcag

SEQ ID NO: 1994226 - RNA, 14 nt, Human
ucuagcccugcccg

SEQ ID NO: 1994227 - RNA, 10 nt, Human
ucuagcugaa

SEQ ID NO: 1994228 - RNA, 18 nt, Human
acuuccccauacaaauaa

SEQ ID NO: 1994229 - RNA, 14 nt, Human
ucuagcacuuccuu

SEQ ID NO: 1994230 - RNA, 15 nt, Human
ucuagcacuuccuug

SEQ ID NO: 1994231 - RNA, 17 nt, Human
ucuagcacuuccuugcc

SEQ ID NO: 1994232 - RNA, 22 nt, Human
ucuagcugaauugagccuaaaa

SEQ ID NO: 1994233 - RNA, 16 nt, Human
ucuagcuuuguuuagu

SEQ ID NO: 1994234 - RNA, 17 nt, Human
ucuaguguuugauuguc

SEQ ID NO: 1994235 - RNA, 23 nt, Human
ucuaguuugauuaaauucuugca

SEQ ID NO: 1994236 - RNA, 16 nt, Human
ucuaguuauuuauucu

SEQ ID NO: 1994237 - RNA, 14 nt, Human
ucuaguuauuuauu

SEQ ID NO: 1994238 - RNA, 19 nt, Human
ucuauagcaucacuuaaaa

SEQ ID NO: 1994239 - RNA, 14 nt, Human
ucuauaauuuuaca

SEQ ID NO: 1994240 - RNA, 15 nt, Human
ucuauaauuuuacaa

SEQ ID NO: 1994241 - RNA, 20 nt, Human
ucuauagcaucacuuaaaac

SEQ ID NO: 1994242 - RNA, 14 nt, Human
ucuauaaacacugu

SEQ ID NO: 1994243 - RNA, 15 nt, Human
ucuauaaacacuguu

SEQ ID NO: 1994244 - RNA, 17 nt, Human
ucuauaaacacuguuug

SEQ ID NO: 1994245 - RNA, 21 nt, Human
ucuauaauauuuguguguuca

SEQ ID NO: 1994246 - RNA, 13 nt, Human
ucuauaauuuaaa

SEQ ID NO: 1994247 - RNA, 13 nt, Human
ucuauaaacacug

SEQ ID NO: 1994248 - RNA, 16 nt, Human
ucucaaaaaaagaaaa

SEQ ID NO: 1994249 - RNA, 16 nt, Human
ucuauuuuucucuuca

SEQ ID NO: 1994250 - RNA, 16 nt, Human
ucuauuguuucuuuca

SEQ ID NO: 1994251 - RNA, 13 nt, Human
ucucacuccuacc

SEQ ID NO: 1994252 - RNA, 20 nt, Human
ucucaccauuuccccagggc

SEQ ID NO: 1994253 - RNA, 23 nt, Human
ucucacauuuuuauaccuguuua

SEQ ID NO: 1994254 - RNA, 16 nt, Human
acuuccgucacauccc

SEQ ID NO: 1994255 - RNA, 16 nt, Human
ucucacuccuaccugg

SEQ ID NO: 1994256 - RNA, 17 nt, Human
ucucacuccuaccuggu

SEQ ID NO: 1994257 - RNA, 18 nt, Human
ucucacuccuaccuggua

SEQ ID NO: 1994258 - RNA, 20 nt, Human
acuucgggaggucgaggcag

SEQ ID NO: 1994259 - RNA, 17 nt, Human
acuucgggaggucgagg

SEQ ID NO: 1994260 - RNA, 21 nt, Human
acuuccugauugguuucucuu

SEQ ID NO: 1994261 - RNA, 22 nt, Human
acuuccugauugguuucucuuc

SEQ ID NO: 1994262 - RNA, 23 nt, Human
acuuccugauugguuucucuucu

SEQ ID NO: 1994263 - RNA, 16 nt, Human
acuuccugcuuccuca

SEQ ID NO: 1994264 - RNA, 17 nt, Human
acuuccugcuuccucag

SEQ ID NO: 1994265 - RNA, 23 nt, Human
acuucgccaagguuguagcaugg

SEQ ID NO: 1994266 - RNA, 18 nt, Human
acuucuccacccugcucu

SEQ ID NO: 1994267 - RNA, 23 nt, Human
acuugaacccgggaggcagaggu

SEQ ID NO: 1994268 - RNA, 16 nt, Human
acuugaaaauuaacau

SEQ ID NO: 1994269 - RNA, 18 nt, Human
acuugaaaauuaacauga

SEQ ID NO: 1994270 - RNA, 17 nt, Human
acuugaaaauuaacaug

SEQ ID NO: 1994271 - RNA, 19 nt, Human
acuugagaauuacccuuuu

SEQ ID NO: 1994272 - RNA, 18 nt, Human
acuugaguaaaauacucu

SEQ ID NO: 1994273 - RNA, 21 nt, Human
acuugaguaaaauacucuuuu

SEQ ID NO: 1994274 - RNA, 22 nt, Human
acuugaguggagguuuauaguu

SEQ ID NO: 1994275 - RNA, 19 nt, Human
acuugaagccugcuccuuc

SEQ ID NO: 1994276 - RNA, 20 nt, Human
acuugaagccugcuccuucc

SEQ ID NO: 1994277 - RNA, 14 nt, Human
acuugaagccugcu

SEQ ID NO: 1994278 - RNA, 16 nt, Human
acuugaagccugcucc

SEQ ID NO: 1994279 - RNA, 23 nt, Human
acuugauaagggacugauguuug

SEQ ID NO: 1994280 - RNA, 14 nt, Human
acuugcauuuuugc

SEQ ID NO: 1994281 - RNA, 19 nt, Human
acuugcauuuuugcaggag

SEQ ID NO: 1994282 - RNA, 17 nt, Human
acuugcauuuuugcagg

SEQ ID NO: 1994283 - RNA, 18 nt, Human
acuugcauuuuugcagga

SEQ ID NO: 1994284 - RNA, 23 nt, Human
acuugccgcgucgcccucccagg

SEQ ID NO: 1994285 - RNA, 22 nt, Human
acuugccgcgucgcccucccag

SEQ ID NO: 1994286 - RNA, 14 nt, Human
acuuggaagcuccg

SEQ ID NO: 1994287 - RNA, 23 nt, Human
acuuggaagcacaccaaucuuac

SEQ ID NO: 1994288 - RNA, 14 nt, Human
acuuguauuaugug

SEQ ID NO: 1994289 - RNA, 13 nt, Human
acuuguauuaugu

SEQ ID NO: 1994290 - RNA, 14 nt, Human
acuuguaugaaaga

SEQ ID NO: 1994291 - RNA, 14 nt, Human
acuugucuuuggac

SEQ ID NO: 1994292 - RNA, 15 nt, Human
acuuguauuaugugu

SEQ ID NO: 1994293 - RNA, 15 nt, Human
acuugucggcuccag

SEQ ID NO: 1994294 - RNA, 14 nt, Human
ucacucuuggagcc

SEQ ID NO: 1994295 - RNA, 16 nt, Human
ucacucuuggagccug

SEQ ID NO: 1994296 - RNA, 17 nt, Human
ucacucuuggagccugc

SEQ ID NO: 1994297 - RNA, 18 nt, Human
ucacucuuggagccugca

SEQ ID NO: 1994298 - RNA, 23 nt, Human
ucacugagacagcccgggcucug

SEQ ID NO: 1994299 - RNA, 18 nt, Human
ucacugaaauaaaagcua

SEQ ID NO: 1994300 - RNA, 23 nt, Human
ucacugaaauaaaagcuauauaa

SEQ ID NO: 1994301 - RNA, 14 nt, Human
ucacugaaauaaaa

SEQ ID NO: 1994302 - RNA, 17 nt, Human
ucacucagcaccacuca

SEQ ID NO: 1994303 - RNA, 19 nt, Human
ucacucagaaguccagagu

SEQ ID NO: 1994304 - RNA, 13 nt, Human
ucacucagagcag

SEQ ID NO: 1994305 - RNA, 14 nt, Human
ucacucagagcagu

SEQ ID NO: 1994306 - RNA, 13 nt, Human
ucacucagcacca

SEQ ID NO: 1994307 - RNA, 14 nt, Human
ucacucagcaccac

SEQ ID NO: 1994308 - RNA, 15 nt, Human
ucacucagcaccacu

SEQ ID NO: 1994309 - RNA, 16 nt, Human
ucacucagcaccacuc

SEQ ID NO: 1994310 - RNA, 13 nt, Human
ucacucacaucuu

SEQ ID NO: 1994311 - RNA, 18 nt, Human
ucacucagaaguccagag

SEQ ID NO: 1994312 - RNA, 19 nt, Human
ucacauuccugaacaggau

SEQ ID NO: 1994313 - RNA, 22 nt, Human
ucaccagccccagugcccacag

SEQ ID NO: 1994314 - RNA, 21 nt, Human
ucacuauguugcccaggcagg

SEQ ID NO: 1994315 - RNA, 15 nt, Human
ucacugcacagugca

SEQ ID NO: 1994316 - RNA, 14 nt, Human
ucacuguugcccag

SEQ ID NO: 1994317 - RNA, 18 nt, Human
ucacugcaaccuccgccu

SEQ ID NO: 1994318 - RNA, 21 nt, Human
ucacugcaaccuucgccaccu

SEQ ID NO: 1994319 - RNA, 15 nt, Human
ucacuguugcccagg

SEQ ID NO: 1994320 - RNA, 22 nt, Human
ucacuuaaguuaguuccacuga

SEQ ID NO: 1994321 - RNA, 13 nt, Human
ucacuuaaaacac

SEQ ID NO: 1994322 - RNA, 15 nt, Human
ucacuuaaaacacgu

SEQ ID NO: 1994323 - RNA, 21 nt, Human
accauucuccaccugccaggg

SEQ ID NO: 1994324 - RNA, 20 nt, Human
accauucuccaccugccagg

SEQ ID NO: 1994325 - RNA, 19 nt, Human
accauucuccaccugccag

SEQ ID NO: 1994326 - RNA, 18 nt, Human
accauguuggccaggcug

SEQ ID NO: 1994327 - RNA, 22 nt, Human
accauuuugcugucccuuuucc

SEQ ID NO: 1994328 - RNA, 20 nt, Human
accauguuggccaggcugcu

SEQ ID NO: 1994329 - RNA, 23 nt, Human
accauuuugcugucccuuuuccu

SEQ ID NO: 1994330 - RNA, 21 nt, Human
accauuuugggguacccacug

SEQ ID NO: 1994331 - RNA, 21 nt, Human
acccagauaaagguucaugca

SEQ ID NO: 1994332 - RNA, 21 nt, Human
acccacuggacucaccucccc

SEQ ID NO: 1994333 - RNA, 20 nt, Human
acccacugcuuuuggucugu

SEQ ID NO: 1994334 - RNA, 14 nt, Human
acccacuggacuca

SEQ ID NO: 1994335 - RNA, 17 nt, Human
acccacuggacucaccu

SEQ ID NO: 1994336 - RNA, 16 nt, Human
acccaaauguucauca

SEQ ID NO: 1994337 - RNA, 20 nt, Human
acccaaauguucaucaauga

SEQ ID NO: 1994338 - RNA, 11 nt, Human
acccaaagcag

SEQ ID NO: 1994339 - RNA, 13 nt, Human
acccaaagcagug

SEQ ID NO: 1994340 - RNA, 19 nt, Human
accaugucguaguuacucu

SEQ ID NO: 1994341 - RNA, 17 nt, Human
accaguacauucucagu

SEQ ID NO: 1994342 - RNA, 23 nt, Human
accaugcugucuggcacagccug

SEQ ID NO: 1994343 - RNA, 21 nt, Human
accaugcugucuggcacagcc

SEQ ID NO: 1994344 - RNA, 22 nt, Human
accaugcugucuggcacagccu

SEQ ID NO: 1994345 - RNA, 17 nt, Human
accaugcugucuggcac

SEQ ID NO: 1994346 - RNA, 18 nt, Human
accaugcugucuggcaca

SEQ ID NO: 1994347 - RNA, 20 nt, Human
accaugcugucuggcacagc

SEQ ID NO: 1994348 - RNA, 19 nt, Human
accagguuuuguuccgccc

SEQ ID NO: 1994349 - RNA, 19 nt, Human
accaggguuggcaccuucc

SEQ ID NO: 1994350 - RNA, 21 nt, Human
accaggguuggcaccuucccc

SEQ ID NO: 1994351 - RNA, 20 nt, Human
ucacuucuuucccuuccucc

SEQ ID NO: 1994352 - RNA, 22 nt, Human
ucacuucuuucccuuccuccau

SEQ ID NO: 1994353 - RNA, 13 nt, Human
ucacuucuucugu

SEQ ID NO: 1994354 - RNA, 15 nt, Human
ucacuucuucugucc

SEQ ID NO: 1994355 - RNA, 21 nt, Human
ucacuucuucuguccaagcag

SEQ ID NO: 1994356 - RNA, 13 nt, Human
ucacuucuuuccc

SEQ ID NO: 1994357 - RNA, 14 nt, Human
ucacuucuuucccu

SEQ ID NO: 1994358 - RNA, 19 nt, Human
ucacuucuuucccuuccuc

SEQ ID NO: 1994359 - RNA, 12 nt, Human
ucagaauucuca

SEQ ID NO: 1994360 - RNA, 10 nt, Human
ucagaauucu

SEQ ID NO: 1994361 - RNA, 20 nt, Human
ucagaauucucagaaucuca

SEQ ID NO: 1994362 - RNA, 22 nt, Human
ucagagacuccugcaggcagcc

SEQ ID NO: 1994363 - RNA, 16 nt, Human
ucagaauagaaauuag

SEQ ID NO: 1994364 - RNA, 23 nt, Human
ucagaaguuucugccgcagcccu

SEQ ID NO: 1994365 - RNA, 15 nt, Human
acccagcccacuucu

SEQ ID NO: 1994366 - RNA, 23 nt, Human
ucagagacuccugcaggcagcca

SEQ ID NO: 1994367 - RNA, 16 nt, Human
ucagagacuccugcag

SEQ ID NO: 1994368 - RNA, 21 nt, Human
ucagagccaccccuaaagaga

SEQ ID NO: 1994369 - RNA, 20 nt, Human
ucagagaugcauuuggaaca

SEQ ID NO: 1994370 - RNA, 21 nt, Human
ucagagcccauggcuucccug

SEQ ID NO: 1994371 - RNA, 21 nt, Human
ucagaugcugugcaaauguua

SEQ ID NO: 1994372 - RNA, 15 nt, Human
ucagaucucuaacuu

SEQ ID NO: 1994373 - RNA, 16 nt, Human
ucagaucucuaacuuc

SEQ ID NO: 1994374 - RNA, 15 nt, Human
ucagauuucucuuug

SEQ ID NO: 1994375 - RNA, 16 nt, Human
ucagauuucucuuuga

SEQ ID NO: 1994376 - RNA, 18 nt, Human
ucagauuucucuuugaaa

SEQ ID NO: 1994377 - RNA, 19 nt, Human
ucagauuucucuuugaaac

SEQ ID NO: 1994378 - RNA, 13 nt, Human
acccaggagcccc

SEQ ID NO: 1994379 - RNA, 11 nt, Human
acccagccugg

SEQ ID NO: 1994380 - RNA, 15 nt, Human
acccaggagccccga

SEQ ID NO: 1994381 - RNA, 13 nt, Human
acccagcgagccc

SEQ ID NO: 1994382 - RNA, 16 nt, Human
acccagcgagcccugg

SEQ ID NO: 1994383 - RNA, 17 nt, Human
acccagcgagcccuggu

SEQ ID NO: 1994384 - RNA, 13 nt, Human
accccagguuucu

SEQ ID NO: 1994385 - RNA, 23 nt, Human
acccaggugcuaggaacacuccu

SEQ ID NO: 1994386 - RNA, 11 nt, Human
acccaggugcu

SEQ ID NO: 1994387 - RNA, 22 nt, Human
accccagcuggggccaggcugg

SEQ ID NO: 1994388 - RNA, 19 nt, Human
accccagcuggggccaggc

SEQ ID NO: 1994389 - RNA, 22 nt, Human
accgaaaacguggcugcuucaa

SEQ ID NO: 1994390 - RNA, 21 nt, Human
accgaaaacguggcugcuuca

SEQ ID NO: 1994391 - RNA, 21 nt, Human
accgaacugauguaaguaaac

SEQ ID NO: 1994392 - RNA, 22 nt, Human
ucagguggggucacucuggcag

SEQ ID NO: 1994393 - RNA, 23 nt, Human
ucagguggggucacucuggcagc

SEQ ID NO: 1994394 - RNA, 15 nt, Human
ucaggugucccugca

SEQ ID NO: 1994395 - RNA, 17 nt, Human
ucaggugucccugcacu

SEQ ID NO: 1994396 - RNA, 18 nt, Human
ucaggugucccugcacuu

SEQ ID NO: 1994397 - RNA, 15 nt, Human
acccugcuuggccca

SEQ ID NO: 1994398 - RNA, 16 nt, Human
acccugcuuggcccag

SEQ ID NO: 1994399 - RNA, 17 nt, Human
acccugcuuggcccagg

SEQ ID NO: 1994400 - RNA, 18 nt, Human
acccugcuuggcccaggg

SEQ ID NO: 1994401 - RNA, 14 nt, Human
acccugcugagucu

SEQ ID NO: 1994402 - RNA, 20 nt, Human
acccuugccgucuaccugag

SEQ ID NO: 1994403 - RNA, 20 nt, Human
accgaaaacguggcugcuuc

SEQ ID NO: 1994404 - RNA, 14 nt, Human
acccuuggagcucu

SEQ ID NO: 1994405 - RNA, 18 nt, Human
acccuuggagcucugagu

SEQ ID NO: 1994406 - RNA, 13 nt, Human
ucaguaagccgug

SEQ ID NO: 1994407 - RNA, 13 nt, Human
ucaguaauaacuc

SEQ ID NO: 1994408 - RNA, 17 nt, Human
ucaguagcuuaagaaaa

SEQ ID NO: 1994409 - RNA, 15 nt, Human
ucaguacuuguuucu

SEQ ID NO: 1994410 - RNA, 19 nt, Human
ucaguagcuuaagaaaaaa

SEQ ID NO: 1994411 - RNA, 22 nt, Human
ucagguugucugaagucacugc

SEQ ID NO: 1994412 - RNA, 14 nt, Human
ucaguaaacacugu

SEQ ID NO: 1994413 - RNA, 15 nt, Human
ucaguaaacacugug

SEQ ID NO: 1994414 - RNA, 16 nt, Human
ucaguaaaccugucug

SEQ ID NO: 1994415 - RNA, 17 nt, Human
ucaguaaaccugucuga

SEQ ID NO: 1994416 - RNA, 22 nt, Human
ucaggugucccugcacuugcag

SEQ ID NO: 1994417 - RNA, 19 nt, Human
ucagguuaggcaguauaaa

SEQ ID NO: 1994418 - RNA, 23 nt, Human
ucagguuaggcaguauaaagaau

SEQ ID NO: 1994419 - RNA, 17 nt, Human
ucagguugacaggaggu

SEQ ID NO: 1994420 - RNA, 23 nt, Human
ucagugccuuauggaacacucug

SEQ ID NO: 1994421 - RNA, 22 nt, Human
ucagugccuuauggaacacucu

SEQ ID NO: 1994422 - RNA, 20 nt, Human
ucagugccuuauggaacacu

SEQ ID NO: 1994423 - RNA, 19 nt, Human
ucagugccuuauggaacac

SEQ ID NO: 1994424 - RNA, 14 nt, Human
ucaguaguuugcau

SEQ ID NO: 1994425 - RNA, 15 nt, Human
ucaguaguuugcauu

SEQ ID NO: 1994426 - RNA, 14 nt, Human
ucaguggcagcugc

SEQ ID NO: 1994427 - RNA, 15 nt, Human
ucaguggcagcugcu

SEQ ID NO: 1994428 - RNA, 16 nt, Human
ucaguggcagcugcuu

SEQ ID NO: 1994429 - RNA, 15 nt, Human
ucagugcuucgcaga

SEQ ID NO: 1994430 - RNA, 13 nt, Human
ucaguggcagcug

SEQ ID NO: 1994431 - RNA, 17 nt, Human
ucagugcuagcuuauuu

SEQ ID NO: 1994432 - RNA, 19 nt, Human
ucaguuguuagugugucuu

SEQ ID NO: 1994433 - RNA, 20 nt, Human
ucaguuguuauuuauugaaa

SEQ ID NO: 1994434 - RNA, 15 nt, Human
ucaguuguuauuuau

SEQ ID NO: 1994435 - RNA, 14 nt, Human
ucaguuuauguuuu

SEQ ID NO: 1994436 - RNA, 15 nt, Human
ucaguuuauguuuug

SEQ ID NO: 1994437 - RNA, 16 nt, Human
ucaguuuauguuuugg

SEQ ID NO: 1994438 - RNA, 16 nt, Human
ucaguuucaacaugaa

SEQ ID NO: 1994439 - RNA, 18 nt, Human
ucauaaauaaaguuuguu

SEQ ID NO: 1994440 - RNA, 24 nt, Human
ucauaaagcaggcagaacucaucu

SEQ ID NO: 1994441 - RNA, 16 nt, Human
ucauaagauauuuuau

SEQ ID NO: 1994442 - RNA, 15 nt, Human
acccugccaggcaca

SEQ ID NO: 1994443 - RNA, 16 nt, Human
acccugccaggcacag

SEQ ID NO: 1994444 - RNA, 17 nt, Human
acccugccaggcacagg

SEQ ID NO: 1994445 - RNA, 18 nt, Human
acccugccaggcacaggc

SEQ ID NO: 1994446 - RNA, 19 nt, Human
acccugccaggcacaggca

SEQ ID NO: 1994447 - RNA, 21 nt, Human
acccugccaggcacaggcagg

SEQ ID NO: 1994448 - RNA, 22 nt, Human
acccugccaggcacaggcaggg

SEQ ID NO: 1994449 - RNA, 23 nt, Human
acccugccaggcacaggcagggc

SEQ ID NO: 1994450 - RNA, 22 nt, Human
acccugauuauauccaguaaca

SEQ ID NO: 1994451 - RNA, 14 nt, Human
acccugccaggcac

SEQ ID NO: 1994452 - RNA, 12 nt, Human
acccugcacccu

SEQ ID NO: 1994453 - RNA, 14 nt, Human
acccugcacccucc

SEQ ID NO: 1994454 - RNA, 16 nt, Human
acccugcacccuccua

SEQ ID NO: 1994455 - RNA, 23 nt, Human
acccugaggcccagagggccugc

SEQ ID NO: 1994456 - RNA, 21 nt, Human
acccugaggcccagagggccu

SEQ ID NO: 1994457 - RNA, 19 nt, Human
acccugaggcccagagggc

SEQ ID NO: 1994458 - RNA, 13 nt, Human
acccugaggccca

SEQ ID NO: 1994459 - RNA, 11 nt, Human
acccugaggcc

SEQ ID NO: 1994460 - RNA, 21 nt, Human
acccuccuucccacucuucuc

SEQ ID NO: 1994461 - RNA, 20 nt, Human
acccgggaagggggcuggga

SEQ ID NO: 1994462 - RNA, 19 nt, Human
acccgggaagggggcuggg

SEQ ID NO: 1994463 - RNA, 15 nt, Human
acccggaggggccug

SEQ ID NO: 1994464 - RNA, 22 nt, Human
acccgggaagggggcugggaca

SEQ ID NO: 1994465 - RNA, 14 nt, Human
acccucauguucuu

SEQ ID NO: 1994466 - RNA, 15 nt, Human
acccucauguucuua

SEQ ID NO: 1994467 - RNA, 17 nt, Human
acccucauguucuuaau

SEQ ID NO: 1994468 - RNA, 15 nt, Human
acccgggaggcagag

SEQ ID NO: 1994469 - RNA, 11 nt, Human
acccuccaagg

SEQ ID NO: 1994470 - RNA, 15 nt, Human
acccuccccuuccca

SEQ ID NO: 1994471 - RNA, 17 nt, Human
acccuccccuucccagg

SEQ ID NO: 1994472 - RNA, 19 nt, Human
acccuccccuucccagggc

SEQ ID NO: 1994473 - RNA, 20 nt, Human
acccuccccuucccagggca

SEQ ID NO: 1994474 - RNA, 21 nt, Human
acccuccccuucccagggcaa

SEQ ID NO: 1994475 - RNA, 21 nt, Human
acccuccuuucaccacaugug

SEQ ID NO: 1994476 - RNA, 11 nt, Human
acccuccuucc

SEQ ID NO: 1994477 - RNA, 13 nt, Human
acccuccuuccca

SEQ ID NO: 1994478 - RNA, 15 nt, Human
acccuccuucccacu

SEQ ID NO: 1994479 - RNA, 17 nt, Human
ucaggguuggccccugc

SEQ ID NO: 1994480 - RNA, 23 nt, Human
ucaggggugugcggccuuuggcu

SEQ ID NO: 1994481 - RNA, 19 nt, Human
ucaggggugugcggccuuu

SEQ ID NO: 1994482 - RNA, 12 nt, Human
ucaggggugugc

SEQ ID NO: 1994483 - RNA, 18 nt, Human
ucaggccaggcccucugc

SEQ ID NO: 1994484 - RNA, 17 nt, Human
ucaggccaggcccucug

SEQ ID NO: 1994485 - RNA, 19 nt, Human
ucaggccaggcccucugcc

SEQ ID NO: 1994486 - RNA, 19 nt, Human
acccgcuaagagggaggga

SEQ ID NO: 1994487 - RNA, 14 nt, Human
acccgccccugccc

SEQ ID NO: 1994488 - RNA, 21 nt, Human
ucagguaaucgaccugccucg

SEQ ID NO: 1994489 - RNA, 21 nt, Human
ucagguagaggugcaugccua

SEQ ID NO: 1994490 - RNA, 23 nt, Human
ucaggguuggccccugcccggcu

SEQ ID NO: 1994491 - RNA, 18 nt, Human
ucagguaaucgaccugcc

SEQ ID NO: 1994492 - RNA, 19 nt, Human
ucagguaaucgaccugccu

SEQ ID NO: 1994493 - RNA, 20 nt, Human
ucagguaaucgaccugccuc

SEQ ID NO: 1994494 - RNA, 18 nt, Human
ucaggguuggccccugcc

SEQ ID NO: 1994495 - RNA, 19 nt, Human
ucaggguuggccccugccc

SEQ ID NO: 1994496 - RNA, 16 nt, Human
ucaggccaggcccucu

SEQ ID NO: 1994497 - RNA, 15 nt, Human
ucaggccaggcccuc

SEQ ID NO: 1994498 - RNA, 14 nt, Human
ucaggccaggcccu

SEQ ID NO: 1994499 - RNA, 13 nt, Human
ucaggccaggccc

SEQ ID NO: 1994500 - RNA, 14 nt, Human
ucaggccagcugcu

SEQ ID NO: 1994501 - RNA, 13 nt, Human
ucaggccagcugc

SEQ ID NO: 1994502 - RNA, 13 nt, Human
ucaggccacuuga

SEQ ID NO: 1994503 - RNA, 18 nt, Human
ucaggcaggugggaugga

SEQ ID NO: 1994504 - RNA, 17 nt, Human
ucaggcaggugggaugg

SEQ ID NO: 1994505 - RNA, 13 nt, Human
acccccagccugc

SEQ ID NO: 1994506 - RNA, 12 nt, Human
acccccagccug

SEQ ID NO: 1994507 - RNA, 23 nt, Human
acauuguaagagagaugagcacu

SEQ ID NO: 1994508 - RNA, 22 nt, Human
acauugguucuuucauuugcuu

SEQ ID NO: 1994509 - RNA, 14 nt, Human
acauuuaaaacauu

SEQ ID NO: 1994510 - RNA, 18 nt, Human
acauuuaaaacauuaaaa

SEQ ID NO: 1994511 - RNA, 16 nt, Human
acauuggaaacaaguc

SEQ ID NO: 1994512 - RNA, 14 nt, Human
acauugcuuuuaaa

SEQ ID NO: 1994513 - RNA, 15 nt, Human
acauugcuuuuaaaa

SEQ ID NO: 1994514 - RNA, 17 nt, Human
acauugcuuuuaaaacu

SEQ ID NO: 1994515 - RNA, 18 nt, Human
acauugcuuuuaaaacua

SEQ ID NO: 1994516 - RNA, 12 nt, Human
acauuggaagca

SEQ ID NO: 1994517 - RNA, 15 nt, Human
acauuggaagcaggu

SEQ ID NO: 1994518 - RNA, 20 nt, Human
acauuggaagcagguuaaau

SEQ ID NO: 1994519 - RNA, 23 nt, Human
acauuggaagcagguuaaauguu

SEQ ID NO: 1994520 - RNA, 21 nt, Human
acauuggaagcagguuaaaug

SEQ ID NO: 1994521 - RNA, 22 nt, Human
acauuggaagcagguuaaaugu

SEQ ID NO: 1994522 - RNA, 21 nt, Human
acauugcggacagccacggcc

SEQ ID NO: 1994523 - RNA, 22 nt, Human
acauugcggacagccacggcca

SEQ ID NO: 1994524 - RNA, 22 nt, Human
acauuuaaaacauuaaaauaua

SEQ ID NO: 1994525 - RNA, 13 nt, Human
acauuuuaugucu

SEQ ID NO: 1994526 - RNA, 15 nt, Human
acauuuuaugucuuu

SEQ ID NO: 1994527 - RNA, 15 nt, Human
acauuuuuaagugcu

SEQ ID NO: 1994528 - RNA, 18 nt, Human
acauuuuuaagugcugca

SEQ ID NO: 1994529 - RNA, 18 nt, Human
acauuuuuagccuguguc

SEQ ID NO: 1994530 - RNA, 16 nt, Human
acauuuuuauaccugu

SEQ ID NO: 1994531 - RNA, 20 nt, Human
acauuuuuauaccuguuuaa

SEQ ID NO: 1994532 - RNA, 18 nt, Human
accaaaaaaauccagaaa

SEQ ID NO: 1994533 - RNA, 20 nt, Human
acauuuuuugaaaugcugaa

SEQ ID NO: 1994534 - RNA, 15 nt, Human
acauuuuuugaaaug

SEQ ID NO: 1994535 - RNA, 13 nt, Human
acauuuuuugaaa

SEQ ID NO: 1994536 - RNA, 14 nt, Human
acauuuuuugaaau

SEQ ID NO: 1994537 - RNA, 21 nt, Human
acauuuuuauaccuguuuaaa

SEQ ID NO: 1994538 - RNA, 13 nt, Human
acauuuuucuuag

SEQ ID NO: 1994539 - RNA, 23 nt, Human
acauuuuucuuagggaaggauac

SEQ ID NO: 1994540 - RNA, 16 nt, Human
ucaagugauucuccug

SEQ ID NO: 1994541 - RNA, 21 nt, Human
ucaagugauucucaugccuca

SEQ ID NO: 1994542 - RNA, 22 nt, Human
ucaagugauucucaugccucag

SEQ ID NO: 1994543 - RNA, 19 nt, Human
ucaauaggaaaaacugauu

SEQ ID NO: 1994544 - RNA, 18 nt, Human
ucaauaggaaaaacugau

SEQ ID NO: 1994545 - RNA, 17 nt, Human
ucaagugauucuccugc

SEQ ID NO: 1994546 - RNA, 17 nt, Human
ucaauaggaaaaacuga

SEQ ID NO: 1994547 - RNA, 13 nt, Human
ucaaguacacuga

SEQ ID NO: 1994548 - RNA, 22 nt, Human
ucaauaggaaaaacugauuuuu

SEQ ID NO: 1994549 - RNA, 11 nt, Human
ucaaggcucag

SEQ ID NO: 1994550 - RNA, 19 nt, Human
ucaagaggugggagggccc

SEQ ID NO: 1994551 - RNA, 17 nt, Human
ucaagagggucugagga

SEQ ID NO: 1994552 - RNA, 20 nt, Human
ucaagagggcacugguggcc

SEQ ID NO: 1994553 - RNA, 21 nt, Human
ucaagagggcacugguggccc

SEQ ID NO: 1994554 - RNA, 18 nt, Human
ucaagaggcaaaggaauc

SEQ ID NO: 1994555 - RNA, 17 nt, Human
accacacagaggcugcc

SEQ ID NO: 1994556 - RNA, 23 nt, Human
accacacaacauccaaguggccu

SEQ ID NO: 1994557 - RNA, 15 nt, Human
accacacccagccca

SEQ ID NO: 1994558 - RNA, 14 nt, Human
accacacauuucac

SEQ ID NO: 1994559 - RNA, 21 nt, Human
accacacauuucacugucugu

SEQ ID NO: 1994560 - RNA, 16 nt, Human
accacacccagcccac

SEQ ID NO: 1994561 - RNA, 20 nt, Human
accacacccagcccacuucu

SEQ ID NO: 1994562 - RNA, 21 nt, Human
accacacccagcccacuucug

SEQ ID NO: 1994563 - RNA, 23 nt, Human
accacacccagcccacuucugcc

SEQ ID NO: 1994564 - RNA, 21 nt, Human
accaaugccaaaaaaagacag

SEQ ID NO: 1994565 - RNA, 15 nt, Human
accaacccucagagc

SEQ ID NO: 1994566 - RNA, 21 nt, Human
accaaucuuacuuuguaaauu

SEQ ID NO: 1994567 - RNA, 23 nt, Human
accaaucuuacuuuguaaauucu

SEQ ID NO: 1994568 - RNA, 15 nt, Human
accaaucuuacuuug

SEQ ID NO: 1994569 - RNA, 16 nt, Human
accaaucuuacuuugu

SEQ ID NO: 1994570 - RNA, 17 nt, Human
accaaucuuacuuugua

SEQ ID NO: 1994571 - RNA, 18 nt, Human
accaaucuuacuuuguaa

SEQ ID NO: 1994572 - RNA, 19 nt, Human
accaaucuuacuuuguaaa

SEQ ID NO: 1994573 - RNA, 20 nt, Human
accaaucuuacuuuguaaau

SEQ ID NO: 1994574 - RNA, 19 nt, Human
accaaaaacugaaagugaa

SEQ ID NO: 1994575 - RNA, 12 nt, Human
accaaaaaauau

SEQ ID NO: 1994576 - RNA, 14 nt, Human
accaaaaagaaaaa

SEQ ID NO: 1994577 - RNA, 19 nt, Human
accaaaucagcugcuacua

SEQ ID NO: 1994578 - RNA, 16 nt, Human
accaaaucagcugcua

SEQ ID NO: 1994579 - RNA, 21 nt, Human
accaaauaucaccaggacugu

SEQ ID NO: 1994580 - RNA, 16 nt, Human
accaacauacucccau

SEQ ID NO: 1994581 - RNA, 20 nt, Human
accaaccacugcgaccacaa

SEQ ID NO: 1994582 - RNA, 14 nt, Human
accaaauggaaaca

SEQ ID NO: 1994583 - RNA, 13 nt, Human
accaaaugguaca

SEQ ID NO: 1994584 - RNA, 15 nt, Human
accaaaugguacaaa

SEQ ID NO: 1994585 - RNA, 18 nt, Human
accaaauguaacuauguu

SEQ ID NO: 1994586 - RNA, 22 nt, Human
accaacaagaauaaaggcagcu

SEQ ID NO: 1994587 - RNA, 12 nt, Human
ucaauuuaaaaa

SEQ ID NO: 1994588 - RNA, 13 nt, Human
accacacccaacu

SEQ ID NO: 1994589 - RNA, 13 nt, Human
ucaauuuaaaaaa

SEQ ID NO: 1994590 - RNA, 21 nt, Human
ucacagaacccuuggagccaa

SEQ ID NO: 1994591 - RNA, 11 nt, Human
ucacagacagg

SEQ ID NO: 1994592 - RNA, 14 nt, Human
ucacagacaggacc

SEQ ID NO: 1994593 - RNA, 15 nt, Human
ucacagacaggaccc

SEQ ID NO: 1994594 - RNA, 20 nt, Human
ucacagacaggaccccugca

SEQ ID NO: 1994595 - RNA, 21 nt, Human
ucacagacaggaccccugcag

SEQ ID NO: 1994596 - RNA, 19 nt, Human
ucacagcuccaagaauuuc

SEQ ID NO: 1994597 - RNA, 20 nt, Human
ucacagccagcgaacugaca

SEQ ID NO: 1994598 - RNA, 11 nt, Human
ucacagccagg

SEQ ID NO: 1994599 - RNA, 22 nt, Human
ucacagccaggcgcuagcacag

SEQ ID NO: 1994600 - RNA, 14 nt, Human
ucacagaugggugc

SEQ ID NO: 1994601 - RNA, 15 nt, Human
ucacagaugggugcu

SEQ ID NO: 1994602 - RNA, 16 nt, Human
ucacauauugauuucc

SEQ ID NO: 1994603 - RNA, 18 nt, Human
ucacauauugauuuccgu

SEQ ID NO: 1994604 - RNA, 20 nt, Human
ucacauauugauuuccguua

SEQ ID NO: 1994605 - RNA, 15 nt, Human
ucacaucccacccca

SEQ ID NO: 1994606 - RNA, 13 nt, Human
ucacauuccugaa

SEQ ID NO: 1994607 - RNA, 17 nt, Human
ucacauuccugaacagg

SEQ ID NO: 1994608 - RNA, 17 nt, Human
ucaccagccccagugcc

SEQ ID NO: 1994609 - RNA, 23 nt, Human
ucacauguggggagguuaaucua

SEQ ID NO: 1994610 - RNA, 12 nt, Human
ucacauguuuuc

SEQ ID NO: 1994611 - RNA, 14 nt, Human
ucacauguuuucaa

SEQ ID NO: 1994612 - RNA, 15 nt, Human
ucacauguuuucaaa

SEQ ID NO: 1994613 - RNA, 17 nt, Human
ucacauguuuucaaaug

SEQ ID NO: 1994614 - RNA, 18 nt, Human
ucacauguuuucaaaugg

SEQ ID NO: 1994615 - RNA, 20 nt, Human
ucacauguuuucaaauggag

SEQ ID NO: 1994616 - RNA, 13 nt, Human
uauuuuacauaaa

SEQ ID NO: 1994617 - RNA, 13 nt, Human
uauuuuaauuuca

SEQ ID NO: 1994618 - RNA, 14 nt, Human
uauuuuaauuucaa

SEQ ID NO: 1994619 - RNA, 15 nt, Human
uauuuuaauuucaag

SEQ ID NO: 1994620 - RNA, 16 nt, Human
uauuuuaauuucaagc

SEQ ID NO: 1994621 - RNA, 16 nt, Human
uauuuuaaucucagaa

SEQ ID NO: 1994622 - RNA, 17 nt, Human
uauuuuaauaaacacuc

SEQ ID NO: 1994623 - RNA, 14 nt, Human
uauuuuaauaaaca

SEQ ID NO: 1994624 - RNA, 17 nt, Human
uauuuugauguaaagau

SEQ ID NO: 1994625 - RNA, 20 nt, Human
uauuuugcuuugugauuuuu

SEQ ID NO: 1994626 - RNA, 13 nt, Human
uauuuugcuuugu

SEQ ID NO: 1994627 - RNA, 15 nt, Human
uauuuugcuuuguga

SEQ ID NO: 1994628 - RNA, 13 nt, Human
uauuuuucaaaau

SEQ ID NO: 1994629 - RNA, 18 nt, Human
uauuuuuaagaaagaaau

SEQ ID NO: 1994630 - RNA, 17 nt, Human
uauuuuuguagagccag

SEQ ID NO: 1994631 - RNA, 14 nt, Human
uauuuugugaguuu

SEQ ID NO: 1994632 - RNA, 17 nt, Human
uauuuugugaguuuguu

SEQ ID NO: 1994633 - RNA, 12 nt, Human
uauuuuguaugc

SEQ ID NO: 1994634 - RNA, 13 nt, Human
uauuuuguaugca

SEQ ID NO: 1994635 - RNA, 14 nt, Human
uauuuuguaugcaa

SEQ ID NO: 1994636 - RNA, 16 nt, Human
uauuuuguaugcaagc

SEQ ID NO: 1994637 - RNA, 20 nt, Human
uauuuuguaugcaagcaguu

SEQ ID NO: 1994638 - RNA, 22 nt, Human
uauuuuguaugcaagcaguuuc

SEQ ID NO: 1994639 - RNA, 20 nt, Human
uauuuuguguuuaggaacua

SEQ ID NO: 1994640 - RNA, 17 nt, Human
uauuuuguguuuaggaa

SEQ ID NO: 1994641 - RNA, 23 nt, Human
uauuuugugaguuuguuucuuug

SEQ ID NO: 1994642 - RNA, 15 nt, Human
acaucuuuuucacug

SEQ ID NO: 1994643 - RNA, 19 nt, Human
acaucuuggucagauuuga

SEQ ID NO: 1994644 - RNA, 22 nt, Human
acaucuugcucugcugacagac

SEQ ID NO: 1994645 - RNA, 17 nt, Human
acaucuugcucugcuga

SEQ ID NO: 1994646 - RNA, 18 nt, Human
uaugugggggucugugug

SEQ ID NO: 1994647 - RNA, 19 nt, Human
uaugugggggucugugugu

SEQ ID NO: 1994648 - RNA, 20 nt, Human
uaugugggggucuguguguu

SEQ ID NO: 1994649 - RNA, 19 nt, Human
uaugugccagauuuaugca

SEQ ID NO: 1994650 - RNA, 14 nt, Human
uaugugccagauuu

SEQ ID NO: 1994651 - RNA, 15 nt, Human
acaucuugcucugcu

SEQ ID NO: 1994652 - RNA, 16 nt, Human
acaucuugcucugcug

SEQ ID NO: 1994653 - RNA, 18 nt, Human
uauuugugugcuaaacgu

SEQ ID NO: 1994654 - RNA, 22 nt, Human
uauuuguguguucacuaaacuc

SEQ ID NO: 1994655 - RNA, 20 nt, Human
uauuugucaguguagaucaa

SEQ ID NO: 1994656 - RNA, 14 nt, Human
uauuugucucagau

SEQ ID NO: 1994657 - RNA, 15 nt, Human
uauuugugugcuaaa

SEQ ID NO: 1994658 - RNA, 17 nt, Human
uauuuguauuuauucuu

SEQ ID NO: 1994659 - RNA, 20 nt, Human
uauuuguacuuucuguuaaa

SEQ ID NO: 1994660 - RNA, 15 nt, Human
uauuuguacuuucug

SEQ ID NO: 1994661 - RNA, 16 nt, Human
uauuuguacuuucugu

SEQ ID NO: 1994662 - RNA, 17 nt, Human
uauuuguacuuucuguu

SEQ ID NO: 1994663 - RNA, 15 nt, Human
acaugaaaacacauu

SEQ ID NO: 1994664 - RNA, 16 nt, Human
acaugaaaacacauuu

SEQ ID NO: 1994665 - RNA, 21 nt, Human
uauuuuaaaagauaaauauua

SEQ ID NO: 1994666 - RNA, 22 nt, Human
uauuuuaagacgaaacauuugu

SEQ ID NO: 1994667 - RNA, 14 nt, Human
uauuuuaagacgaa

SEQ ID NO: 1994668 - RNA, 13 nt, Human
uauuuuaaaacaa

SEQ ID NO: 1994669 - RNA, 16 nt, Human
uauuuuaaaauaaacu

SEQ ID NO: 1994670 - RNA, 16 nt, Human
ucaaaagcugggcagg

SEQ ID NO: 1994671 - RNA, 17 nt, Human
ucaaaaguagaacuuug

SEQ ID NO: 1994672 - RNA, 18 nt, Human
ucaaaaguagaacuuugu

SEQ ID NO: 1994673 - RNA, 23 nt, Human
ucaaaaguagaacuuuguauagu

SEQ ID NO: 1994674 - RNA, 18 nt, Human
ucaaacacuugugacuuu

SEQ ID NO: 1994675 - RNA, 13 nt, Human
ucaaagauauuuu

SEQ ID NO: 1994676 - RNA, 20 nt, Human
ucaaagauauuuugcuuugu

SEQ ID NO: 1994677 - RNA, 22 nt, Human
ucaaagauauuuugcuuuguga

SEQ ID NO: 1994678 - RNA, 19 nt, Human
ucaaacacuugugacuuuu

SEQ ID NO: 1994679 - RNA, 15 nt, Human
ucaaagcaaaugucu

SEQ ID NO: 1994680 - RNA, 23 nt, Human
ucaaagcaaaugucuuccuggau

SEQ ID NO: 1994681 - RNA, 16 nt, Human
ucaaagcaaaagugcu

SEQ ID NO: 1994682 - RNA, 15 nt, Human
ucaaagcaaaagugc

SEQ ID NO: 1994683 - RNA, 18 nt, Human
ucaaagcaccaaaauaag

SEQ ID NO: 1994684 - RNA, 20 nt, Human
ucaaagcaccaaaauaagaa

SEQ ID NO: 1994685 - RNA, 21 nt, Human
ucaaauacgugggcauucaaa

SEQ ID NO: 1994686 - RNA, 22 nt, Human
ucaaauacgugggcauucaaau

SEQ ID NO: 1994687 - RNA, 20 nt, Human
ucaaauacgugggcauucaa

SEQ ID NO: 1994688 - RNA, 23 nt, Human
ucaaauacgugggcauucaaaug

SEQ ID NO: 1994689 - RNA, 13 nt, Human
ucaaauauauuca

SEQ ID NO: 1994690 - RNA, 14 nt, Human
ucaaagugcuauua

SEQ ID NO: 1994691 - RNA, 16 nt, Human
ucaaaguggaugcaau

SEQ ID NO: 1994692 - RNA, 15 nt, Human
ucaaagucagaacaa

SEQ ID NO: 1994693 - RNA, 16 nt, Human
ucaaagucaugauguu

SEQ ID NO: 1994694 - RNA, 17 nt, Human
ucaaagucaugauguuu

SEQ ID NO: 1994695 - RNA, 19 nt, Human
ucaaagucaugauguuuuu

SEQ ID NO: 1994696 - RNA, 21 nt, Human
ucaaagucaugauguuuuuaa

SEQ ID NO: 1994697 - RNA, 22 nt, Human
ucaaagucaugauguuuuuaaa

SEQ ID NO: 1994698 - RNA, 22 nt, Human
ucaaagcaccaaaauaagaaaa

SEQ ID NO: 1994699 - RNA, 21 nt, Human
ucaaagcaccaaaauaagaaa

SEQ ID NO: 1994700 - RNA, 23 nt, Human
acaugaaaacacauuuuucuuag

SEQ ID NO: 1994701 - RNA, 22 nt, Human
acaugaaaacacauuuuucuua

SEQ ID NO: 1994702 - RNA, 13 nt, Human
acaugagcaucag

SEQ ID NO: 1994703 - RNA, 11 nt, Human
acauguaugug

SEQ ID NO: 1994704 - RNA, 14 nt, Human
acauguauuaaauu

SEQ ID NO: 1994705 - RNA, 19 nt, Human
acauguauuaaauuacauu

SEQ ID NO: 1994706 - RNA, 20 nt, Human
acauguauuaaauuacauuu

SEQ ID NO: 1994707 - RNA, 21 nt, Human
acauguauuaaauuacauuug

SEQ ID NO: 1994708 - RNA, 22 nt, Human
acauguauuaaauuacauuugu

SEQ ID NO: 1994709 - RNA, 15 nt, Human
acaugguuugacucu

SEQ ID NO: 1994710 - RNA, 20 nt, Human
acaugguuaccucugcauaa

SEQ ID NO: 1994711 - RNA, 19 nt, Human
acaugguggggucuccuca

SEQ ID NO: 1994712 - RNA, 23 nt, Human
acaugguggggucuccucaggac

SEQ ID NO: 1994713 - RNA, 13 nt, Human
acauuaauguuga

SEQ ID NO: 1994714 - RNA, 14 nt, Human
acauuaauguugau

SEQ ID NO: 1994715 - RNA, 15 nt, Human
acauuaauguugauu

SEQ ID NO: 1994716 - RNA, 17 nt, Human
acauuaauguugauuuc

SEQ ID NO: 1994717 - RNA, 18 nt, Human
acauuaauguugauuucu

SEQ ID NO: 1994718 - RNA, 21 nt, Human
acauuaauguugauuucuagu

SEQ ID NO: 1994719 - RNA, 22 nt, Human
acauuaauguugauuucuaguu

SEQ ID NO: 1994720 - RNA, 23 nt, Human
acauuaauguugauuucuaguua

SEQ ID NO: 1994721 - RNA, 21 nt, Human
acaugucuuuucuugcaugag

SEQ ID NO: 1994722 - RNA, 16 nt, Human
acaugagguacugaga

SEQ ID NO: 1994723 - RNA, 14 nt, Human
acauggaaguacua

SEQ ID NO: 1994724 - RNA, 18 nt, Human
acauggaauaacauguaa

SEQ ID NO: 1994725 - RNA, 20 nt, Human
acauggaauaacauguaauu

SEQ ID NO: 1994726 - RNA, 20 nt, Human
acauggaauauauuuuaaua

SEQ ID NO: 1994727 - RNA, 23 nt, Human
acaugagcaucaggccaggcccu

SEQ ID NO: 1994728 - RNA, 19 nt, Human
acauggaguauaugucaag

SEQ ID NO: 1994729 - RNA, 15 nt, Human
acauggaguauaugu

SEQ ID NO: 1994730 - RNA, 14 nt, Human
acauggccuuugcu

SEQ ID NO: 1994731 - RNA, 14 nt, Human
uccagugagacagc

SEQ ID NO: 1994732 - RNA, 17 nt, Human
uccagugaggcucugcc

SEQ ID NO: 1994733 - RNA, 19 nt, Human
uccagugaggcucugcccu

SEQ ID NO: 1994734 - RNA, 18 nt, Human
uccagugaggcucugccc

SEQ ID NO: 1994735 - RNA, 20 nt, Human
uccagugaggcucugcccuu

SEQ ID NO: 1994736 - RNA, 12 nt, Human
uccagugacuuu

SEQ ID NO: 1994737 - RNA, 16 nt, Human
uccauccuccuccuuc

SEQ ID NO: 1994738 - RNA, 15 nt, Human
acggcucacugcagc

SEQ ID NO: 1994739 - RNA, 19 nt, Human
uccagugaaaauaagccau

SEQ ID NO: 1994740 - RNA, 18 nt, Human
acggccccagcuucucag

SEQ ID NO: 1994741 - RNA, 20 nt, Human
acggccccagcuucucagcu

SEQ ID NO: 1994742 - RNA, 14 nt, Human
acggcucacugcag

SEQ ID NO: 1994743 - RNA, 13 nt, Human
acggccuccuuuc

SEQ ID NO: 1994744 - RNA, 17 nt, Human
uccaucugguuuucucu

SEQ ID NO: 1994745 - RNA, 21 nt, Human
uccaucugguuuucucuccag

SEQ ID NO: 1994746 - RNA, 11 nt, Human
uccauccugag

SEQ ID NO: 1994747 - RNA, 20 nt, Human
uccaucucuuguuuaaauuc

SEQ ID NO: 1994748 - RNA, 17 nt, Human
uccauccuccuccuucc

SEQ ID NO: 1994749 - RNA, 18 nt, Human
uccauccuccuccuuccu

SEQ ID NO: 1994750 - RNA, 16 nt, Human
uccaucugauuccagc

SEQ ID NO: 1994751 - RNA, 17 nt, Human
uccaucugauuccagca

SEQ ID NO: 1994752 - RNA, 22 nt, Human
uccaugaagauguagaggagaa

SEQ ID NO: 1994753 - RNA, 19 nt, Human
uccaugaauguuccugccu

SEQ ID NO: 1994754 - RNA, 23 nt, Human
uccaugacaauaugcccuuucug

SEQ ID NO: 1994755 - RNA, 15 nt, Human
uccaugaauguuccu

SEQ ID NO: 1994756 - RNA, 17 nt, Human
uccaugaguccccuguu

SEQ ID NO: 1994757 - RNA, 16 nt, Human
uccaugaguccccugu

SEQ ID NO: 1994758 - RNA, 15 nt, Human
uccaugaguccccug

SEQ ID NO: 1994759 - RNA, 14 nt, Human
ucccacaaaggaga

SEQ ID NO: 1994760 - RNA, 22 nt, Human
uccauuuuggugucuuucucuu

SEQ ID NO: 1994761 - RNA, 15 nt, Human
ucccacaggcccuuc

SEQ ID NO: 1994762 - RNA, 17 nt, Human
ucccacaggcccuuccu

SEQ ID NO: 1994763 - RNA, 21 nt, Human
ucccacaggcccuuccucucc

SEQ ID NO: 1994764 - RNA, 22 nt, Human
ucccacaggcccuuccucucca

SEQ ID NO: 1994765 - RNA, 21 nt, Human
ucccacagugcugggauuaca

SEQ ID NO: 1994766 - RNA, 20 nt, Human
ucccaaagugcugggauuac

SEQ ID NO: 1994767 - RNA, 16 nt, Human
ucccaaagugcuggga

SEQ ID NO: 1994768 - RNA, 13 nt, Human
uccauuuuauaaa

SEQ ID NO: 1994769 - RNA, 20 nt, Human
uccauuuuggugucuuucuc

SEQ ID NO: 1994770 - RNA, 15 nt, Human
ucccaaagugcuggg

SEQ ID NO: 1994771 - RNA, 14 nt, Human
ucccacccguggug

SEQ ID NO: 1994772 - RNA, 14 nt, Human
ucccaccccacaca

SEQ ID NO: 1994773 - RNA, 11 nt, Human
ucccaccccac

SEQ ID NO: 1994774 - RNA, 15 nt, Human
ucccacccagccugg

SEQ ID NO: 1994775 - RNA, 19 nt, Human
ucccaccaacccucagagc

SEQ ID NO: 1994776 - RNA, 15 nt, Human
ucccaccacucccug

SEQ ID NO: 1994777 - RNA, 16 nt, Human
ucccaccacucccugg

SEQ ID NO: 1994778 - RNA, 18 nt, Human
acgcugccuucgguaccc

SEQ ID NO: 1994779 - RNA, 13 nt, Human
acgcugcucugcc

SEQ ID NO: 1994780 - RNA, 14 nt, Human
acgcugcucugccc

SEQ ID NO: 1994781 - RNA, 15 nt, Human
acgcugcucugcccc

SEQ ID NO: 1994782 - RNA, 16 nt, Human
acgcugcucugcccca

SEQ ID NO: 1994783 - RNA, 17 nt, Human
acgcugcucugccccag

SEQ ID NO: 1994784 - RNA, 19 nt, Human
acgcugcucugccccagcu

SEQ ID NO: 1994785 - RNA, 20 nt, Human
acgcugcucugccccagcuu

SEQ ID NO: 1994786 - RNA, 19 nt, Human
acggagucccaccuuggcu

SEQ ID NO: 1994787 - RNA, 19 nt, Human
acggagcggauugcaaagc

SEQ ID NO: 1994788 - RNA, 20 nt, Human
acggagcggauugcaaagca

SEQ ID NO: 1994789 - RNA, 21 nt, Human
acggagcggauugcaaagcaa

SEQ ID NO: 1994790 - RNA, 17 nt, Human
acggaggagaauuaagu

SEQ ID NO: 1994791 - RNA, 17 nt, Human
acgcucucuggccuucg

SEQ ID NO: 1994792 - RNA, 11 nt, Human
acgcucugcug

SEQ ID NO: 1994793 - RNA, 17 nt, Human
acgcugacuacagggcc

SEQ ID NO: 1994794 - RNA, 18 nt, Human
acgcugacuacagggccg

SEQ ID NO: 1994795 - RNA, 16 nt, Human
acgcugacuacagggc

SEQ ID NO: 1994796 - RNA, 13 nt, Human
acggccccagcuu

SEQ ID NO: 1994797 - RNA, 22 nt, Human
acggcacugagagagcgcagcc

SEQ ID NO: 1994798 - RNA, 13 nt, Human
acggccaggccag

SEQ ID NO: 1994799 - RNA, 16 nt, Human
acggccaggccagagg

SEQ ID NO: 1994800 - RNA, 21 nt, Human
acggagucccaccuuggcugc

SEQ ID NO: 1994801 - RNA, 17 nt, Human
acgcuacccgggaaggg

SEQ ID NO: 1994802 - RNA, 13 nt, Human
acgcuacccggga

SEQ ID NO: 1994803 - RNA, 15 nt, Human
acgcucucuggccuu

SEQ ID NO: 1994804 - RNA, 16 nt, Human
acgcucucuggccuuc

SEQ ID NO: 1994805 - RNA, 18 nt, Human
acgcuacccgggaagggg

SEQ ID NO: 1994806 - RNA, 14 nt, Human
acgcccccacuggu

SEQ ID NO: 1994807 - RNA, 18 nt, Human
acgccagggaccccagaa

SEQ ID NO: 1994808 - RNA, 13 nt, Human
acgcccacuuccc

SEQ ID NO: 1994809 - RNA, 15 nt, Human
acgcccacuucccug

SEQ ID NO: 1994810 - RNA, 18 nt, Human
acgcccacuucccugggu

SEQ ID NO: 1994811 - RNA, 20 nt, Human
acgccgcccuaaaagcacac

SEQ ID NO: 1994812 - RNA, 23 nt, Human
acgcgugcacacaccagagccca

SEQ ID NO: 1994813 - RNA, 20 nt, Human
acgcgugcacacaccagagc

SEQ ID NO: 1994814 - RNA, 14 nt, Human
acgaauauugcuga

SEQ ID NO: 1994815 - RNA, 17 nt, Human
uccaggcugggagagcc

SEQ ID NO: 1994816 - RNA, 14 nt, Human
uccaggcugggaga

SEQ ID NO: 1994817 - RNA, 18 nt, Human
uccaggcugggagagccu

SEQ ID NO: 1994818 - RNA, 18 nt, Human
acgccaucccagccccaa

SEQ ID NO: 1994819 - RNA, 15 nt, Human
acgaucacaaaugac

SEQ ID NO: 1994820 - RNA, 16 nt, Human
acgaucacaaaugacu

SEQ ID NO: 1994821 - RNA, 17 nt, Human
acgaucacaaaugacuu

SEQ ID NO: 1994822 - RNA, 18 nt, Human
acgaucacaaaugacuuu

SEQ ID NO: 1994823 - RNA, 19 nt, Human
acgaucacaaaugacuuua

SEQ ID NO: 1994824 - RNA, 11 nt, Human
acgccagggac

SEQ ID NO: 1994825 - RNA, 17 nt, Human
acgccagggaccccaga

SEQ ID NO: 1994826 - RNA, 17 nt, Human
acgccaucccagcccca

SEQ ID NO: 1994827 - RNA, 16 nt, Human
acgccaucccagcccc

SEQ ID NO: 1994828 - RNA, 15 nt, Human
acgccaucccagccc

SEQ ID NO: 1994829 - RNA, 14 nt, Human
acgccaucccagcc

SEQ ID NO: 1994830 - RNA, 11 nt, Human
acgccauccca

SEQ ID NO: 1994831 - RNA, 23 nt, Human
acgccaggggaaaaucagccugc

SEQ ID NO: 1994832 - RNA, 18 nt, Human
acgccaggggaaaaucag

SEQ ID NO: 1994833 - RNA, 14 nt, Human
acgaucacaaauga

SEQ ID NO: 1994834 - RNA, 15 nt, Human
acgacugcccggcag

SEQ ID NO: 1994835 - RNA, 22 nt, Human
acgacaguacuuucaaugaaca

SEQ ID NO: 1994836 - RNA, 21 nt, Human
acgacucuuuuccaaacacag

SEQ ID NO: 1994837 - RNA, 23 nt, Human
acgacucuuuuccaaacacaggc

SEQ ID NO: 1994838 - RNA, 12 nt, Human
accugagcccca

SEQ ID NO: 1994839 - RNA, 17 nt, Human
accugagccccaaaagg

SEQ ID NO: 1994840 - RNA, 23 nt, Human
accugaggcccuucucuccagcc

SEQ ID NO: 1994841 - RNA, 22 nt, Human
accugaagcuaucguaaaauua

SEQ ID NO: 1994842 - RNA, 17 nt, Human
accugaccccugacccc

SEQ ID NO: 1994843 - RNA, 17 nt, Human
accugacagccccuccc

SEQ ID NO: 1994844 - RNA, 19 nt, Human
accugaauuuuggcugugu

SEQ ID NO: 1994845 - RNA, 18 nt, Human
accugaagacucauucuu

SEQ ID NO: 1994846 - RNA, 16 nt, Human
ucauaaguauuuggaa

SEQ ID NO: 1994847 - RNA, 12 nt, Human
ucauaaugacuu

SEQ ID NO: 1994848 - RNA, 16 nt, Human
ucauaauaaguugcau

SEQ ID NO: 1994849 - RNA, 22 nt, Human
accugcaaacgcuucaguuguu

SEQ ID NO: 1994850 - RNA, 20 nt, Human
accugcacacuguccuauua

SEQ ID NO: 1994851 - RNA, 17 nt, Human
accugccaggaagccag

SEQ ID NO: 1994852 - RNA, 16 nt, Human
accugccaggaagcca

SEQ ID NO: 1994853 - RNA, 19 nt, Human
accugccaggaagccagca

SEQ ID NO: 1994854 - RNA, 18 nt, Human
accugccaggaagccagc

SEQ ID NO: 1994855 - RNA, 17 nt, Human
accugccucggccuccc

SEQ ID NO: 1994856 - RNA, 14 nt, Human
accugaggggccuc

SEQ ID NO: 1994857 - RNA, 16 nt, Human
accugaggggccucuu

SEQ ID NO: 1994858 - RNA, 14 nt, Human
accugauugugucu

SEQ ID NO: 1994859 - RNA, 16 nt, Human
ucauuugucacacacu

SEQ ID NO: 1994860 - RNA, 13 nt, Human
ucauuuucucuuu

SEQ ID NO: 1994861 - RNA, 16 nt, Human
ucauuugcuuuggaag

SEQ ID NO: 1994862 - RNA, 14 nt, Human
ucauuugucacaca

SEQ ID NO: 1994863 - RNA, 15 nt, Human
ucauuugcuuuggaa

SEQ ID NO: 1994864 - RNA, 17 nt, Human
ucauuuuuuuuaagaaa

SEQ ID NO: 1994865 - RNA, 18 nt, Human
ucauuuuuuuuaagaaaa

SEQ ID NO: 1994866 - RNA, 14 nt, Human
ucauuuuugaauac

SEQ ID NO: 1994867 - RNA, 19 nt, Human
ucauuuuuaguagagacag

SEQ ID NO: 1994868 - RNA, 13 nt, Human
ucauuuugcuuua

SEQ ID NO: 1994869 - RNA, 17 nt, Human
ucauuuuguguugaaga

SEQ ID NO: 1994870 - RNA, 19 nt, Human
ucauuuuguguugaagagc

SEQ ID NO: 1994871 - RNA, 12 nt, Human
ucauuuugcuuu

SEQ ID NO: 1994872 - RNA, 21 nt, Human
accugcgucucauacucaccu

SEQ ID NO: 1994873 - RNA, 16 nt, Human
accugcggugcuaucu

SEQ ID NO: 1994874 - RNA, 23 nt, Human
accugccuguugggccaggagcc

SEQ ID NO: 1994875 - RNA, 13 nt, Human
accugcgcuucac

SEQ ID NO: 1994876 - RNA, 14 nt, Human
accugcgcuucacu

SEQ ID NO: 1994877 - RNA, 20 nt, Human
accuggaauauauaaccagu

SEQ ID NO: 1994878 - RNA, 14 nt, Human
accugcuucucugc

SEQ ID NO: 1994879 - RNA, 15 nt, Human
accugcuucucugcc

SEQ ID NO: 1994880 - RNA, 21 nt, Human
accugcuucucugcccagcuu

SEQ ID NO: 1994881 - RNA, 12 nt, Human
accugcucuccu

SEQ ID NO: 1994882 - RNA, 17 nt, Human
accugggauuauauauc

SEQ ID NO: 1994883 - RNA, 20 nt, Human
accuggcuuuucuuucuacc

SEQ ID NO: 1994884 - RNA, 22 nt, Human
accugggaaagagauuuaaacu

SEQ ID NO: 1994885 - RNA, 15 nt, Human
accugggacagggag

SEQ ID NO: 1994886 - RNA, 16 nt, Human
accugggacagggagc

SEQ ID NO: 1994887 - RNA, 13 nt, Human
accuggccucugc

SEQ ID NO: 1994888 - RNA, 12 nt, Human
accuggccucug

SEQ ID NO: 1994889 - RNA, 15 nt, Human
accuggcccucucug

SEQ ID NO: 1994890 - RNA, 18 nt, Human
accuggcccucucugaag

SEQ ID NO: 1994891 - RNA, 19 nt, Human
accuggcccucucugaagg

SEQ ID NO: 1994892 - RNA, 23 nt, Human
accuggcccucucugaaggaggc

SEQ ID NO: 1994893 - RNA, 18 nt, Human
uccaccaucaagccacca

SEQ ID NO: 1994894 - RNA, 12 nt, Human
uccacccaccuc

SEQ ID NO: 1994895 - RNA, 13 nt, Human
uccacccaccuca

SEQ ID NO: 1994896 - RNA, 17 nt, Human
uccacccaggagccccg

SEQ ID NO: 1994897 - RNA, 20 nt, Human
uccacccaggagccccgagg

SEQ ID NO: 1994898 - RNA, 18 nt, Human
uccaaggccaggccuugg

SEQ ID NO: 1994899 - RNA, 23 nt, Human
uccaaauuguuuaaauucacaau

SEQ ID NO: 1994900 - RNA, 16 nt, Human
uccaaggacagaaggc

SEQ ID NO: 1994901 - RNA, 23 nt, Human
uccaaggacagaaggcuccugcc

SEQ ID NO: 1994902 - RNA, 19 nt, Human
uccaaaugcagcuuuaaaa

SEQ ID NO: 1994903 - RNA, 20 nt, Human
uccaagggguccccuccagg

SEQ ID NO: 1994904 - RNA, 22 nt, Human
uccaaugccucuugucuuccua

SEQ ID NO: 1994905 - RNA, 17 nt, Human
uccaaugccucuugucu

SEQ ID NO: 1994906 - RNA, 21 nt, Human
uccaaugccucuugucuuccu

SEQ ID NO: 1994907 - RNA, 16 nt, Human
accuugacagggcaca

SEQ ID NO: 1994908 - RNA, 13 nt, Human
accuuugucccca

SEQ ID NO: 1994909 - RNA, 14 nt, Human
accuugcacacauc

SEQ ID NO: 1994910 - RNA, 16 nt, Human
accuugcacacaucau

SEQ ID NO: 1994911 - RNA, 22 nt, Human
accuugcacacaucaucuguaa

SEQ ID NO: 1994912 - RNA, 21 nt, Human
accuugcauuuuagcuaauuu

SEQ ID NO: 1994913 - RNA, 22 nt, Human
accuucuggccucccacagacu

SEQ ID NO: 1994914 - RNA, 18 nt, Human
accuucuggccucccaca

SEQ ID NO: 1994915 - RNA, 13 nt, Human
accuucugacuuu

SEQ ID NO: 1994916 - RNA, 22 nt, Human
accuucuccuucaccuuugucc

SEQ ID NO: 1994917 - RNA, 14 nt, Human
accuucuccuucac

SEQ ID NO: 1994918 - RNA, 14 nt, Human
accuuuuuuauaca

SEQ ID NO: 1994919 - RNA, 16 nt, Human
accuuuguccccaccg

SEQ ID NO: 1994920 - RNA, 15 nt, Human
accuuuguccccacc

SEQ ID NO: 1994921 - RNA, 14 nt, Human
accuuuguccccac

SEQ ID NO: 1994922 - RNA, 16 nt, Human
accuuuuuuauacaua

SEQ ID NO: 1994923 - RNA, 17 nt, Human
accuuuuuuauacauaa

SEQ ID NO: 1994924 - RNA, 18 nt, Human
accuuuuuuauacauaaa

SEQ ID NO: 1994925 - RNA, 17 nt, Human
uccacgagagcgcagca

SEQ ID NO: 1994926 - RNA, 16 nt, Human
accuuccaagagccug

SEQ ID NO: 1994927 - RNA, 17 nt, Human
accuucccaugcccugg

SEQ ID NO: 1994928 - RNA, 17 nt, Human
accuucccccuccccca

SEQ ID NO: 1994929 - RNA, 20 nt, Human
accuucccccucccccagcc

SEQ ID NO: 1994930 - RNA, 16 nt, Human
accuuccuuccugcuu

SEQ ID NO: 1994931 - RNA, 18 nt, Human
accuucgggcugugcccg

SEQ ID NO: 1994932 - RNA, 16 nt, Human
accuucgggcugugcc

SEQ ID NO: 1994933 - RNA, 17 nt, Human
accuucgggcugugccc

SEQ ID NO: 1994934 - RNA, 14 nt, Human
accuucgggcugug

SEQ ID NO: 1994935 - RNA, 15 nt, Human
accuucgggcugugc

SEQ ID NO: 1994936 - RNA, 15 nt, Human
accuucgccaccugg

SEQ ID NO: 1994937 - RNA, 17 nt, Human
accuucgccaccugggu

SEQ ID NO: 1994938 - RNA, 20 nt, Human
accuggggcugcugugaagc

SEQ ID NO: 1994939 - RNA, 21 nt, Human
accuggguaacuagggaagau

SEQ ID NO: 1994940 - RNA, 19 nt, Human
accuggggcugcugugaag

SEQ ID NO: 1994941 - RNA, 22 nt, Human
accuucacucuaagauguuaua

SEQ ID NO: 1994942 - RNA, 20 nt, Human
accuucacucuaagauguua

SEQ ID NO: 1994943 - RNA, 21 nt, Human
accuucacucuaagauguuau

SEQ ID NO: 1994944 - RNA, 14 nt, Human
accuucacucuaag

SEQ ID NO: 1994945 - RNA, 18 nt, Human
accuucacucuaagaugu

SEQ ID NO: 1994946 - RNA, 19 nt, Human
accuucacucuaagauguu

SEQ ID NO: 1994947 - RNA, 15 nt, Human
accuuccaagagccu

SEQ ID NO: 1994948 - RNA, 19 nt, Human
accuucaguuuuuguguuu

SEQ ID NO: 1994949 - RNA, 15 nt, Human
accuucauaagaucu

SEQ ID NO: 1994950 - RNA, 17 nt, Human
acugaaaaccucuccuc

SEQ ID NO: 1994951 - RNA, 20 nt, Human
acugaaagccuuagggaagc

SEQ ID NO: 1994952 - RNA, 17 nt, Human
acugaaaggcuuuucaa

SEQ ID NO: 1994953 - RNA, 16 nt, Human
acugaaaaccucuccu

SEQ ID NO: 1994954 - RNA, 15 nt, Human
acugaaaaccucucc

SEQ ID NO: 1994955 - RNA, 18 nt, Human
uccugacgagauaagcag

SEQ ID NO: 1994956 - RNA, 15 nt, Human
uccugaagaauugaa

SEQ ID NO: 1994957 - RNA, 20 nt, Human
uccucugcucccccuuuucc

SEQ ID NO: 1994958 - RNA, 19 nt, Human
uccucuugccacugccucu

SEQ ID NO: 1994959 - RNA, 15 nt, Human
uccucugcuaaauug

SEQ ID NO: 1994960 - RNA, 18 nt, Human
uccucugcuaaauugaug

SEQ ID NO: 1994961 - RNA, 19 nt, Human
uccucugcuaaauugaugu

SEQ ID NO: 1994962 - RNA, 23 nt, Human
uccucugcuaaauugauguugau

SEQ ID NO: 1994963 - RNA, 12 nt, Human
uccucugcuccc

SEQ ID NO: 1994964 - RNA, 19 nt, Human
uccucugcucccccuuuuc

SEQ ID NO: 1994965 - RNA, 14 nt, Human
uccucugaggcuga

SEQ ID NO: 1994966 - RNA, 23 nt, Human
uccucuuuggucuacacugugcu

SEQ ID NO: 1994967 - RNA, 19 nt, Human
acucuugaaaaaugcaugu

SEQ ID NO: 1994968 - RNA, 14 nt, Human
acucuugaaaaaug

SEQ ID NO: 1994969 - RNA, 21 nt, Human
acucuugaaaaaugcauguug

SEQ ID NO: 1994970 - RNA, 13 nt, Human
uccucccaccuca

SEQ ID NO: 1994971 - RNA, 14 nt, Human
uccucccaccucag

SEQ ID NO: 1994972 - RNA, 15 nt, Human
uccucccaccucagc

SEQ ID NO: 1994973 - RNA, 16 nt, Human
uccucccaccucagcc

SEQ ID NO: 1994974 - RNA, 18 nt, Human
uccucccaccucagccuc

SEQ ID NO: 1994975 - RNA, 20 nt, Human
uccucccaccucagccuccc

SEQ ID NO: 1994976 - RNA, 21 nt, Human
uccucccaccucagccucccg

SEQ ID NO: 1994977 - RNA, 16 nt, Human
uccucccacugcccac

SEQ ID NO: 1994978 - RNA, 17 nt, Human
uccucuccacugccuuc

SEQ ID NO: 1994979 - RNA, 18 nt, Human
uccucuccacugccuucg

SEQ ID NO: 1994980 - RNA, 12 nt, Human
uccucucugccc

SEQ ID NO: 1994981 - RNA, 13 nt, Human
uccucucugcccu

SEQ ID NO: 1994982 - RNA, 14 nt, Human
uccucucugcccua

SEQ ID NO: 1994983 - RNA, 15 nt, Human
uccucucugcccuaa

SEQ ID NO: 1994984 - RNA, 12 nt, Human
uccucugagccu

SEQ ID NO: 1994985 - RNA, 13 nt, Human
uccucugagccuu

SEQ ID NO: 1994986 - RNA, 17 nt, Human
uccucugagccuuggga

SEQ ID NO: 1994987 - RNA, 16 nt, Human
acucgcgacaaugcaa

SEQ ID NO: 1994988 - RNA, 15 nt, Human
acucgcgacaaugca

SEQ ID NO: 1994989 - RNA, 17 nt, Human
acucgcgacaaugcaaa

SEQ ID NO: 1994990 - RNA, 14 nt, Human
acucguauaugucu

SEQ ID NO: 1994991 - RNA, 15 nt, Human
acucgugagcgccag

SEQ ID NO: 1994992 - RNA, 14 nt, Human
acucucagaggccc

SEQ ID NO: 1994993 - RNA, 15 nt, Human
acucucagaggcccc

SEQ ID NO: 1994994 - RNA, 18 nt, Human
acucugacaacagacuuc

SEQ ID NO: 1994995 - RNA, 20 nt, Human
acucugacaacagacuucug

SEQ ID NO: 1994996 - RNA, 22 nt, Human
acucugacaacagacuucugaa

SEQ ID NO: 1994997 - RNA, 23 nt, Human
acucugacaacagacuucugaaa

SEQ ID NO: 1994998 - RNA, 16 nt, Human
acucugccugcccuuu

SEQ ID NO: 1994999 - RNA, 14 nt, Human
acucugccugcccu

SEQ ID NO: 1995000 - RNA, 13 nt, Human
acucugacaacag

SEQ ID NO: 1995001 - RNA, 17 nt, Human
acucugacaacagacuu

SEQ ID NO: 1995002 - RNA, 21 nt, Human
acucucaggaaaugcugaccc

SEQ ID NO: 1995003 - RNA, 22 nt, Human
acucucaggaaaugcugaccca

SEQ ID NO: 1995004 - RNA, 16 nt, Human
acucucagaggcccca

SEQ ID NO: 1995005 - RNA, 17 nt, Human
acucucagaggccccaa

SEQ ID NO: 1995006 - RNA, 23 nt, Human
acucuucucaucuugacagagcc

SEQ ID NO: 1995007 - RNA, 12 nt, Human
acucuucucauu

SEQ ID NO: 1995008 - RNA, 17 nt, Human
acucuucucauuacuug

SEQ ID NO: 1995009 - RNA, 18 nt, Human
acucuucucauuacuugu

SEQ ID NO: 1995010 - RNA, 24 nt, Human
acucuucucauuacuuguugccua

SEQ ID NO: 1995011 - RNA, 13 nt, Human
acucuucucucug

SEQ ID NO: 1995012 - RNA, 18 nt, Human
acucuucucucugcucug

SEQ ID NO: 1995013 - RNA, 19 nt, Human
acucuucucucugcucuga

SEQ ID NO: 1995014 - RNA, 14 nt, Human
acucuucucucugc

SEQ ID NO: 1995015 - RNA, 15 nt, Human
acucuucucucugcu

SEQ ID NO: 1995016 - RNA, 16 nt, Human
acucuucucucugcuc

SEQ ID NO: 1995017 - RNA, 17 nt, Human
acucuucucucugcucu

SEQ ID NO: 1995018 - RNA, 13 nt, Human
acucuugaaaaau

SEQ ID NO: 1995019 - RNA, 20 nt, Human
acucuucaguuaagccuuug

SEQ ID NO: 1995020 - RNA, 21 nt, Human
acucuucaguuaagccuuugg

SEQ ID NO: 1995021 - RNA, 23 nt, Human
acucuucccugaacuuccugcuu

SEQ ID NO: 1995022 - RNA, 17 nt, Human
acucuuccuccaaggac

SEQ ID NO: 1995023 - RNA, 20 nt, Human
acucuuccuccaaggacaga

SEQ ID NO: 1995024 - RNA, 17 nt, Human
acucuggcagcucagag

SEQ ID NO: 1995025 - RNA, 16 nt, Human
acucuggcagcucaga

SEQ ID NO: 1995026 - RNA, 14 nt, Human
acucugcucuugca

SEQ ID NO: 1995027 - RNA, 20 nt, Human
acucuggcagcucagagagg

SEQ ID NO: 1995028 - RNA, 19 nt, Human
acucuggcagcucagagag

SEQ ID NO: 1995029 - RNA, 21 nt, Human
acucuuauugcccacgcugga

SEQ ID NO: 1995030 - RNA, 19 nt, Human
acuccugucuucugcuuug

SEQ ID NO: 1995031 - RNA, 20 nt, Human
acuccugucuucugcuuugu

SEQ ID NO: 1995032 - RNA, 15 nt, Human
acuccugucuucugc

SEQ ID NO: 1995033 - RNA, 16 nt, Human
acuccugucuucugcu

SEQ ID NO: 1995034 - RNA, 17 nt, Human
acuccugucuucugcuu

SEQ ID NO: 1995035 - RNA, 18 nt, Human
acuccugucuucugcuuu

SEQ ID NO: 1995036 - RNA, 14 nt, Human
acucgagucugagg

SEQ ID NO: 1995037 - RNA, 15 nt, Human
acucgagucugaggc

SEQ ID NO: 1995038 - RNA, 16 nt, Human
acucgaguuacagaca

SEQ ID NO: 1995039 - RNA, 21 nt, Human
uccuagccaccgccuccuaca

SEQ ID NO: 1995040 - RNA, 21 nt, Human
uccuagccugugccucuggga

SEQ ID NO: 1995041 - RNA, 20 nt, Human
uccuagccacccaccacacu

SEQ ID NO: 1995042 - RNA, 12 nt, Human
uccuacucugug

SEQ ID NO: 1995043 - RNA, 23 nt, Human
uccuacgaguaauugcauuugcu

SEQ ID NO: 1995044 - RNA, 15 nt, Human
uccggcuaagcaggc

SEQ ID NO: 1995045 - RNA, 16 nt, Human
uccggcuaagcaggcg

SEQ ID NO: 1995046 - RNA, 17 nt, Human
uccggcuaagcaggcgc

SEQ ID NO: 1995047 - RNA, 16 nt, Human
uccggcaccaguagca

SEQ ID NO: 1995048 - RNA, 18 nt, Human
uccggcaccaguagcagg

SEQ ID NO: 1995049 - RNA, 15 nt, Human
uccguuaaaauacca

SEQ ID NO: 1995050 - RNA, 18 nt, Human
uccggcuaagcaggcgca

SEQ ID NO: 1995051 - RNA, 13 nt, Human
uccguuaaaauac

SEQ ID NO: 1995052 - RNA, 13 nt, Human
ucccccacuccca

SEQ ID NO: 1995053 - RNA, 13 nt, Human
acguacacauuuu

SEQ ID NO: 1995054 - RNA, 14 nt, Human
acguacacauuuua

SEQ ID NO: 1995055 - RNA, 12 nt, Human
acguacacauuu

SEQ ID NO: 1995056 - RNA, 13 nt, Human
acguacacacaca

SEQ ID NO: 1995057 - RNA, 21 nt, Human
acuagagggaccucucccagg

SEQ ID NO: 1995058 - RNA, 20 nt, Human
acuagagggaccucucccag

SEQ ID NO: 1995059 - RNA, 13 nt, Human
acuagacacacaa

SEQ ID NO: 1995060 - RNA, 18 nt, Human
acuagacacacaaagcag

SEQ ID NO: 1995061 - RNA, 21 nt, Human
acuagacacacaaagcaguug

SEQ ID NO: 1995062 - RNA, 22 nt, Human
acuagagggaccucucccaggg

SEQ ID NO: 1995063 - RNA, 14 nt, Human
acuacuuagcacuu

SEQ ID NO: 1995064 - RNA, 22 nt, Human
acuaccuguaaugacaggccug

SEQ ID NO: 1995065 - RNA, 13 nt, Human
ucccccagccacu

SEQ ID NO: 1995066 - RNA, 14 nt, Human
ucccccagccacuc

SEQ ID NO: 1995067 - RNA, 15 nt, Human
ucccccagccacucc

SEQ ID NO: 1995068 - RNA, 19 nt, Human
acuaccuuuggcuuaauuc

SEQ ID NO: 1995069 - RNA, 18 nt, Human
acuacggaauaguuggcu

SEQ ID NO: 1995070 - RNA, 21 nt, Human
acuauaauguaagcucuacug

SEQ ID NO: 1995071 - RNA, 15 nt, Human
acuaugauuuggaaa

SEQ ID NO: 1995072 - RNA, 19 nt, Human
acuaugauuuaauuugaaa

SEQ ID NO: 1995073 - RNA, 16 nt, Human
acuaugauuuggaaaa

SEQ ID NO: 1995074 - RNA, 14 nt, Human
acuauaauguaagc

SEQ ID NO: 1995075 - RNA, 13 nt, Human
acuauaauguaag

SEQ ID NO: 1995076 - RNA, 12 nt, Human
acuauaauguaa

SEQ ID NO: 1995077 - RNA, 12 nt, Human
acuauguaucaa

SEQ ID NO: 1995078 - RNA, 13 nt, Human
acuauguugauaa

SEQ ID NO: 1995079 - RNA, 17 nt, Human
acuauguaaaaauaacc

SEQ ID NO: 1995080 - RNA, 18 nt, Human
acuauguaaaaauaaccu

SEQ ID NO: 1995081 - RNA, 15 nt, Human
uccccuaaagccuca

SEQ ID NO: 1995082 - RNA, 22 nt, Human
uccccuaaagccucaaaacaaa

SEQ ID NO: 1995083 - RNA, 18 nt, Human
acucaaguugucucuuua

SEQ ID NO: 1995084 - RNA, 14 nt, Human
acucaaugcacuga

SEQ ID NO: 1995085 - RNA, 19 nt, Human
acucacauuuauucugcuc

SEQ ID NO: 1995086 - RNA, 20 nt, Human
acucacauuuauucugcuca

SEQ ID NO: 1995087 - RNA, 22 nt, Human
ucccugaaggccccgcccaggc

SEQ ID NO: 1995088 - RNA, 21 nt, Human
ucccugaaggccccgcccagg

SEQ ID NO: 1995089 - RNA, 18 nt, Human
ucccugaaggccccgccc

SEQ ID NO: 1995090 - RNA, 17 nt, Human
ucccugaaggccccgcc

SEQ ID NO: 1995091 - RNA, 14 nt, Human
ucccugaacuuccu

SEQ ID NO: 1995092 - RNA, 19 nt, Human
acucaccucccccaucucu

SEQ ID NO: 1995093 - RNA, 20 nt, Human
acucaccucccccaucucuu

SEQ ID NO: 1995094 - RNA, 17 nt, Human
acucaccccagccccaa

SEQ ID NO: 1995095 - RNA, 16 nt, Human
ucccugaaguuaugug

SEQ ID NO: 1995096 - RNA, 23 nt, Human
ucccugaaggccccgcccaggcu

SEQ ID NO: 1995097 - RNA, 13 nt, Human
ucccucccagcuc

SEQ ID NO: 1995098 - RNA, 13 nt, Human
ucccucuuucccu

SEQ ID NO: 1995099 - RNA, 11 nt, Human
ucccucuuucc

SEQ ID NO: 1995100 - RNA, 20 nt, Human
ucccucagucuggcccuucc

SEQ ID NO: 1995101 - RNA, 12 nt, Human
uccccucuuccu

SEQ ID NO: 1995102 - RNA, 13 nt, Human
uccccucuuccuc

SEQ ID NO: 1995103 - RNA, 15 nt, Human
uccccucuuccucuu

SEQ ID NO: 1995104 - RNA, 18 nt, Human
ucccucagucuggcccuu

SEQ ID NO: 1995105 - RNA, 14 nt, Human
ucccucacucucag

SEQ ID NO: 1995106 - RNA, 15 nt, Human
ucccucacucucagg

SEQ ID NO: 1995107 - RNA, 17 nt, Human
ucccucacucucaggaa

SEQ ID NO: 1995108 - RNA, 15 nt, Human
ucccucagaaaauga

SEQ ID NO: 1995109 - RNA, 14 nt, Human
acuccaccaagccu

SEQ ID NO: 1995110 - RNA, 22 nt, Human
acucauugaccugaggcccuuc

SEQ ID NO: 1995111 - RNA, 18 nt, Human
acucauugaccugaggcc

SEQ ID NO: 1995112 - RNA, 19 nt, Human
acucauuuuaaugauuguu

SEQ ID NO: 1995113 - RNA, 14 nt, Human
acucauuuugcuug

SEQ ID NO: 1995114 - RNA, 12 nt, Human
acucauuuugcu

SEQ ID NO: 1995115 - RNA, 17 nt, Human
acucauugaccugaggc

SEQ ID NO: 1995116 - RNA, 16 nt, Human
acucauugaccugagg

SEQ ID NO: 1995117 - RNA, 21 nt, Human
acucaucuagguaaauuacag

SEQ ID NO: 1995118 - RNA, 19 nt, Human
acucaucuggaguucucaa

SEQ ID NO: 1995119 - RNA, 22 nt, Human
acucaucuggaguucucaaaga

SEQ ID NO: 1995120 - RNA, 12 nt, Human
acucaucuuagg

SEQ ID NO: 1995121 - RNA, 16 nt, Human
acucagaaguccagag

SEQ ID NO: 1995122 - RNA, 12 nt, Human
acucagagcagu

SEQ ID NO: 1995123 - RNA, 19 nt, Human
acucagagcagucugugac

SEQ ID NO: 1995124 - RNA, 23 nt, Human
acucaucuagguaaauuacaguu

SEQ ID NO: 1995125 - RNA, 19 nt, Human
acucaccugccccucaacu

SEQ ID NO: 1995126 - RNA, 14 nt, Human
acucaccugccccu

SEQ ID NO: 1995127 - RNA, 21 nt, Human
acucaccugccccucaacucu

SEQ ID NO: 1995128 - RNA, 14 nt, Human
acucagaagacacu

SEQ ID NO: 1995129 - RNA, 15 nt, Human
acucagaagacacug

SEQ ID NO: 1995130 - RNA, 16 nt, Human
acucagaagacacuga

SEQ ID NO: 1995131 - RNA, 17 nt, Human
acucagaagacacugau

SEQ ID NO: 1995132 - RNA, 18 nt, Human
acucagaagacacugaug

SEQ ID NO: 1995133 - RNA, 21 nt, Human
acucagaauucucuaguuuga

SEQ ID NO: 1995134 - RNA, 22 nt, Human
acucagaauucucuaguuugau

SEQ ID NO: 1995135 - RNA, 14 nt, Human
acucagaauucucu

SEQ ID NO: 1995136 - RNA, 12 nt, Human
uaggauucacac

SEQ ID NO: 1995137 - RNA, 20 nt, Human
uaggauucacaccccaccug

SEQ ID NO: 1995138 - RNA, 21 nt, Human
uaggauucacaccccaccugc

SEQ ID NO: 1995139 - RNA, 13 nt, Human
uaggauguugaaa

SEQ ID NO: 1995140 - RNA, 22 nt, Human
uaggauucacaccccaccugcg

SEQ ID NO: 1995141 - RNA, 17 nt, Human
uaggcagggugucugcc

SEQ ID NO: 1995142 - RNA, 20 nt, Human
uaggcagggugucugccccc

SEQ ID NO: 1995143 - RNA, 15 nt, Human
uaggcaguauaaaga

SEQ ID NO: 1995144 - RNA, 16 nt, Human
uaggcaguauaaagaa

SEQ ID NO: 1995145 - RNA, 19 nt, Human
uaggcaguauaaagaauag

SEQ ID NO: 1995146 - RNA, 16 nt, Human
uaggcauaugcuucuu

SEQ ID NO: 1995147 - RNA, 17 nt, Human
uaggauaugccugcucu

SEQ ID NO: 1995148 - RNA, 18 nt, Human
uaggauaugccugcucuu

SEQ ID NO: 1995149 - RNA, 21 nt, Human
uaggauaugccugcucuuugg

SEQ ID NO: 1995150 - RNA, 17 nt, Human
uaggaugggcuucugug

SEQ ID NO: 1995151 - RNA, 15 nt, Human
uaggaaaagaaaucu

SEQ ID NO: 1995152 - RNA, 16 nt, Human
uaggaaaagaaaucua

SEQ ID NO: 1995153 - RNA, 21 nt, Human
uaggaaaagaaaucuauagaa

SEQ ID NO: 1995154 - RNA, 22 nt, Human
uaggaaaagaaaucuauagaaa

SEQ ID NO: 1995155 - RNA, 17 nt, Human
uaggaaaaacugauuuu

SEQ ID NO: 1995156 - RNA, 16 nt, Human
uaggaaaaacugauuu

SEQ ID NO: 1995157 - RNA, 16 nt, Human
uagggguaccacugaa

SEQ ID NO: 1995158 - RNA, 16 nt, Human
uagggcauuguaucug

SEQ ID NO: 1995159 - RNA, 24 nt, Human
uagggcauuguaucugucuuucca

SEQ ID NO: 1995160 - RNA, 15 nt, Human
uaggggaagaauaau

SEQ ID NO: 1995161 - RNA, 17 nt, Human
uaggggaagaauaauuu

SEQ ID NO: 1995162 - RNA, 17 nt, Human
uagggcucuaauuuccu

SEQ ID NO: 1995163 - RNA, 16 nt, Human
uagggcucuaauuucc

SEQ ID NO: 1995164 - RNA, 13 nt, Human
uagggaagauaau

SEQ ID NO: 1995165 - RNA, 19 nt, Human
uagggauggggcugugggg

SEQ ID NO: 1995166 - RNA, 19 nt, Human
uagggaagcuggccugaga

SEQ ID NO: 1995167 - RNA, 15 nt, Human
uagggaguauucuaa

SEQ ID NO: 1995168 - RNA, 14 nt, Human
uagcuaagccaaga

SEQ ID NO: 1995169 - RNA, 21 nt, Human
uagcuucaccccaaucccagc

SEQ ID NO: 1995170 - RNA, 23 nt, Human
uagcuuuaaugauaugcuuguaa

SEQ ID NO: 1995171 - RNA, 13 nt, Human
uagcuuuuuucuc

SEQ ID NO: 1995172 - RNA, 23 nt, Human
uagcuuuuuucucugauacagaa

SEQ ID NO: 1995173 - RNA, 14 nt, Human
uaggaaaaacugau

SEQ ID NO: 1995174 - RNA, 13 nt, Human
uaggaaaaacuga

SEQ ID NO: 1995175 - RNA, 13 nt, Human
uagcuuuucccuu

SEQ ID NO: 1995176 - RNA, 21 nt, Human
uagcuuucugagcaagaggau

SEQ ID NO: 1995177 - RNA, 19 nt, Human
acaaaucugcaaagcaugu

SEQ ID NO: 1995178 - RNA, 22 nt, Human
acaaaucugcaaagcauguuuu

SEQ ID NO: 1995179 - RNA, 14 nt, Human
acaaaucugucugc

SEQ ID NO: 1995180 - RNA, 17 nt, Human
acaaaugacugucucuu

SEQ ID NO: 1995181 - RNA, 15 nt, Human
acaaaucuuuccaua

SEQ ID NO: 1995182 - RNA, 12 nt, Human
acaaaugacuuu

SEQ ID NO: 1995183 - RNA, 13 nt, Human
acaaaugacuuua

SEQ ID NO: 1995184 - RNA, 15 nt, Human
acaaaugacuuuauu

SEQ ID NO: 1995185 - RNA, 20 nt, Human
uagccuuagaagucacacag

SEQ ID NO: 1995186 - RNA, 14 nt, Human
acaauauuucugau

SEQ ID NO: 1995187 - RNA, 12 nt, Human
acaauauuugug

SEQ ID NO: 1995188 - RNA, 14 nt, Human
acaauauuugugug

SEQ ID NO: 1995189 - RNA, 18 nt, Human
acaauauuugugugcuaa

SEQ ID NO: 1995190 - RNA, 19 nt, Human
acaauauuugugugcuaaa

SEQ ID NO: 1995191 - RNA, 21 nt, Human
uagccuuagaagucacacagu

SEQ ID NO: 1995192 - RNA, 14 nt, Human
uagcgcccaguugg

SEQ ID NO: 1995193 - RNA, 17 nt, Human
uagcgcccaguugggug

SEQ ID NO: 1995194 - RNA, 18 nt, Human
acaaugcaaaccaucauu

SEQ ID NO: 1995195 - RNA, 17 nt, Human
acaaugcaaaccaucau

SEQ ID NO: 1995196 - RNA, 16 nt, Human
acaaugcaaaccauca

SEQ ID NO: 1995197 - RNA, 11 nt, Human
acaaugcaaac

SEQ ID NO: 1995198 - RNA, 20 nt, Human
acaaugacuuacuguacaug

SEQ ID NO: 1995199 - RNA, 19 nt, Human
acaaugacuuacuguacau

SEQ ID NO: 1995200 - RNA, 22 nt, Human
acaaugacuuacuguacaugaa

SEQ ID NO: 1995201 - RNA, 13 nt, Human
acaaugacuuuau

SEQ ID NO: 1995202 - RNA, 14 nt, Human
acaaugacuuuauu

SEQ ID NO: 1995203 - RNA, 19 nt, Human
uaggguaagugagagaggg

SEQ ID NO: 1995204 - RNA, 17 nt, Human
uagggguaccacugaau

SEQ ID NO: 1995205 - RNA, 13 nt, Human
uaggguacaugug

SEQ ID NO: 1995206 - RNA, 13 nt, Human
uaggguccugggg

SEQ ID NO: 1995207 - RNA, 17 nt, Human
uaggguuauaauaaugu

SEQ ID NO: 1995208 - RNA, 15 nt, Human
uaggguuauaauaau

SEQ ID NO: 1995209 - RNA, 15 nt, Human
uagggugggccuuca

SEQ ID NO: 1995210 - RNA, 13 nt, Human
acacaagugcagu

SEQ ID NO: 1995211 - RNA, 22 nt, Human
acacaagugcaguagugcaguu

SEQ ID NO: 1995212 - RNA, 21 nt, Human
acaaugcaaaccaucauugaa

SEQ ID NO: 1995213 - RNA, 19 nt, Human
acaaugcaaaccaucauug

SEQ ID NO: 1995214 - RNA, 23 nt, Human
acaaugcaaaccaucauugaaau

SEQ ID NO: 1995215 - RNA, 16 nt, Human
acacaaauuaugcuaa

SEQ ID NO: 1995216 - RNA, 21 nt, Human
acacaaauuaugcuaagaauu

SEQ ID NO: 1995217 - RNA, 22 nt, Human
acacaaauuaugcuaagaauuu

SEQ ID NO: 1995218 - RNA, 12 nt, Human
uaguaaucauau

SEQ ID NO: 1995219 - RNA, 14 nt, Human
uaguagagacaggg

SEQ ID NO: 1995220 - RNA, 14 nt, Human
uagucacugagaca

SEQ ID NO: 1995221 - RNA, 13 nt, Human
uaguagagacggg

SEQ ID NO: 1995222 - RNA, 15 nt, Human
uaguagagacagggu

SEQ ID NO: 1995223 - RNA, 22 nt, Human
uaguagagacaggguuuugcca

SEQ ID NO: 1995224 - RNA, 15 nt, Human
uaguaauauaauaca

SEQ ID NO: 1995225 - RNA, 21 nt, Human
uaguaauauaauacacaaaau

SEQ ID NO: 1995226 - RNA, 13 nt, Human
uaguaauauauuu

SEQ ID NO: 1995227 - RNA, 16 nt, Human
uaguaauauauuuaaa

SEQ ID NO: 1995228 - RNA, 17 nt, Human
uaguaauauauuuaaag

SEQ ID NO: 1995229 - RNA, 18 nt, Human
uaguaauauauuuaaagg

SEQ ID NO: 1995230 - RNA, 19 nt, Human
uaguaauauauuuaaaggg

SEQ ID NO: 1995231 - RNA, 23 nt, Human
uaguaauauauuuaaagggaaau

SEQ ID NO: 1995232 - RNA, 13 nt, Human
uaguaaaaauaaa

SEQ ID NO: 1995233 - RNA, 16 nt, Human
uaguaaaaauaaaauu

SEQ ID NO: 1995234 - RNA, 21 nt, Human
acacaggggacacccagaaac

SEQ ID NO: 1995235 - RNA, 19 nt, Human
acacaguaccauuuaaugg

SEQ ID NO: 1995236 - RNA, 22 nt, Human
uagguuuggacaaaauggaaua

SEQ ID NO: 1995237 - RNA, 23 nt, Human
acacacagauuugagcucagccc

SEQ ID NO: 1995238 - RNA, 16 nt, Human
acacaggcccggcucc

SEQ ID NO: 1995239 - RNA, 17 nt, Human
acacaggcccggcucca

SEQ ID NO: 1995240 - RNA, 18 nt, Human
acacaggcccggcuccag

SEQ ID NO: 1995241 - RNA, 19 nt, Human
acacaggcccggcuccagg

SEQ ID NO: 1995242 - RNA, 20 nt, Human
acacaggcccggcuccaggc

SEQ ID NO: 1995243 - RNA, 21 nt, Human
acacaggcccggcuccaggcu

SEQ ID NO: 1995244 - RNA, 22 nt, Human
acacaggcccggcuccaggcuc

SEQ ID NO: 1995245 - RNA, 23 nt, Human
acacaggcccggcuccaggcucc

SEQ ID NO: 1995246 - RNA, 24 nt, Human
acacaggcccggcuccaggcuccu

SEQ ID NO: 1995247 - RNA, 16 nt, Human
acacaggccacccugu

SEQ ID NO: 1995248 - RNA, 19 nt, Human
acacaggccacccugugca

SEQ ID NO: 1995249 - RNA, 12 nt, Human
acaaaacaaauc

SEQ ID NO: 1995250 - RNA, 15 nt, Human
acaaaacaaauccug

SEQ ID NO: 1995251 - RNA, 22 nt, Human
acaaaaccacaguguaccauua

SEQ ID NO: 1995252 - RNA, 14 nt, Human
acaaaaccaaaagu

SEQ ID NO: 1995253 - RNA, 16 nt, Human
acaaaaccaaaaguua

SEQ ID NO: 1995254 - RNA, 19 nt, Human
acaaaaccaaaaguuauua

SEQ ID NO: 1995255 - RNA, 15 nt, Human
acaaaaccacagugu

SEQ ID NO: 1995256 - RNA, 10 nt, Human
acaaaaggca

SEQ ID NO: 1995257 - RNA, 19 nt, Human
acaaaaauucucaguucuc

SEQ ID NO: 1995258 - RNA, 16 nt, Human
acaaaaagcuacuuau

SEQ ID NO: 1995259 - RNA, 20 nt, Human
aauuuuacauggcuggagcu

SEQ ID NO: 1995260 - RNA, 12 nt, Human
aauuuuacauuu

SEQ ID NO: 1995261 - RNA, 13 nt, Human
acaaaauaaauug

SEQ ID NO: 1995262 - RNA, 14 nt, Human
acaaaauacauucu

SEQ ID NO: 1995263 - RNA, 16 nt, Human
acaaaauacauucuuu

SEQ ID NO: 1995264 - RNA, 13 nt, Human
acaaaaucaaaua

SEQ ID NO: 1995265 - RNA, 16 nt, Human
acaaaauauugaaagg

SEQ ID NO: 1995266 - RNA, 19 nt, Human
acaaauacaauacauagga

SEQ ID NO: 1995267 - RNA, 22 nt, Human
uagagcggagaaaggaagggcu

SEQ ID NO: 1995268 - RNA, 14 nt, Human
uagagccagggucu

SEQ ID NO: 1995269 - RNA, 22 nt, Human
acaaauaguaggcaagauggca

SEQ ID NO: 1995270 - RNA, 17 nt, Human
acaaauaguaggcaaga

SEQ ID NO: 1995271 - RNA, 19 nt, Human
acaaauaguaggcaagaug

SEQ ID NO: 1995272 - RNA, 21 nt, Human
acaaauaguaggcaagauggc

SEQ ID NO: 1995273 - RNA, 20 nt, Human
uagagggaccucucccaggg

SEQ ID NO: 1995274 - RNA, 19 nt, Human
uagagggaccucucccagg

SEQ ID NO: 1995275 - RNA, 15 nt, Human
uagagggaccucucc

SEQ ID NO: 1995276 - RNA, 24 nt, Human
uagaggggaaaagagaugaugaaa

SEQ ID NO: 1995277 - RNA, 14 nt, Human
uagcaaaaacaugu

SEQ ID NO: 1995278 - RNA, 18 nt, Human
uagcaaaaacauguaugu

SEQ ID NO: 1995279 - RNA, 18 nt, Human
uagcaaaaaaaguuguau

SEQ ID NO: 1995280 - RNA, 20 nt, Human
uagcaaaaaaaguuguauga

SEQ ID NO: 1995281 - RNA, 21 nt, Human
uagcaaaaaaaguuguaugau

SEQ ID NO: 1995282 - RNA, 23 nt, Human
uagcaaaaaaaguuguaugaucu

SEQ ID NO: 1995283 - RNA, 13 nt, Human
uagcaaaaaaagu

SEQ ID NO: 1995284 - RNA, 14 nt, Human
uagcaaaaaaaguu

SEQ ID NO: 1995285 - RNA, 15 nt, Human
uagcacagacccugc

SEQ ID NO: 1995286 - RNA, 21 nt, Human
uagcacagacccugcccugug

SEQ ID NO: 1995287 - RNA, 20 nt, Human
uagcacagacccugcccugu

SEQ ID NO: 1995288 - RNA, 14 nt, Human
uagcacagacccug

SEQ ID NO: 1995289 - RNA, 22 nt, Human
uagcaaacccugucaaacauua

SEQ ID NO: 1995290 - RNA, 17 nt, Human
uagcaaacccugucaaa

SEQ ID NO: 1995291 - RNA, 19 nt, Human
uagcaaacccugucaaaca

SEQ ID NO: 1995292 - RNA, 20 nt, Human
uagcaaacccugucaaacau

SEQ ID NO: 1995293 - RNA, 21 nt, Human
uagcaaacccugucaaacauu

SEQ ID NO: 1995294 - RNA, 19 nt, Human
uagccaccgccuccuacag

SEQ ID NO: 1995295 - RNA, 14 nt, Human
uagccaccugaguu

SEQ ID NO: 1995296 - RNA, 17 nt, Human
uagccaccugaguuccu

SEQ ID NO: 1995297 - RNA, 20 nt, Human
acaaauauuucuagacacuu

SEQ ID NO: 1995298 - RNA, 18 nt, Human
uagccacccaccacacug

SEQ ID NO: 1995299 - RNA, 18 nt, Human
uagccaccgccuccuaca

SEQ ID NO: 1995300 - RNA, 21 nt, Human
uagccaacggccccagcuucu

SEQ ID NO: 1995301 - RNA, 13 nt, Human
uagccaaggccaa

SEQ ID NO: 1995302 - RNA, 19 nt, Human
uagccaacggccccagcuu

SEQ ID NO: 1995303 - RNA, 20 nt, Human
uagccaacggccccagcuuc

SEQ ID NO: 1995304 - RNA, 18 nt, Human
uagccaacggccccagcu

SEQ ID NO: 1995305 - RNA, 23 nt, Human
uagccaaaugacugaaagcacug

SEQ ID NO: 1995306 - RNA, 12 nt, Human
uagccaaggcca

SEQ ID NO: 1995307 - RNA, 21 nt, Human
uagcacuucagggcagauuuu

SEQ ID NO: 1995308 - RNA, 20 nt, Human
uagcacuuccuugccagucu

SEQ ID NO: 1995309 - RNA, 21 nt, Human
uagcacuuccuugccagucuu

SEQ ID NO: 1995310 - RNA, 15 nt, Human
uagccaaaaugugag

SEQ ID NO: 1995311 - RNA, 16 nt, Human
uagccaaaaugugagu

SEQ ID NO: 1995312 - RNA, 23 nt, Human
uagccaaaaugugagugguugaa

SEQ ID NO: 1995313 - RNA, 24 nt, Human
uagcacagacccugcccugugggc

SEQ ID NO: 1995314 - RNA, 22 nt, Human
uagcacagacccugcccugugg

SEQ ID NO: 1995315 - RNA, 22 nt, Human
uagaauuugauaugugaacagu

SEQ ID NO: 1995316 - RNA, 20 nt, Human
uagaauuugauaugugaaca

SEQ ID NO: 1995317 - RNA, 19 nt, Human
uagaauuugauaugugaac

SEQ ID NO: 1995318 - RNA, 23 nt, Human
uagaauuuuaagccuuuguugaa

SEQ ID NO: 1995319 - RNA, 21 nt, Human
uagaaguaacuggugauauau

SEQ ID NO: 1995320 - RNA, 21 nt, Human
uagaaggaaaaccuagaaaac

SEQ ID NO: 1995321 - RNA, 12 nt, Human
uagacacacaaa

SEQ ID NO: 1995322 - RNA, 15 nt, Human
uagacacacaaagca

SEQ ID NO: 1995323 - RNA, 16 nt, Human
uagacacacaaagcag

SEQ ID NO: 1995324 - RNA, 18 nt, Human
uagacaauuuauuauggc

SEQ ID NO: 1995325 - RNA, 16 nt, Human
uagacagucccugcca

SEQ ID NO: 1995326 - RNA, 10 nt, Human
uagacagagu

SEQ ID NO: 1995327 - RNA, 18 nt, Human
aauuugggggaaaauuua

SEQ ID NO: 1995328 - RNA, 14 nt, Human
aauuugugauacaa

SEQ ID NO: 1995329 - RNA, 17 nt, Human
aauuugugauacaaugc

SEQ ID NO: 1995330 - RNA, 18 nt, Human
aauuugugauacaaugcu

SEQ ID NO: 1995331 - RNA, 20 nt, Human
aauuugugauacaaugcugu

SEQ ID NO: 1995332 - RNA, 21 nt, Human
uagacauuugcuaugagcugg

SEQ ID NO: 1995333 - RNA, 19 nt, Human
aauuuggaccauuuuccug

SEQ ID NO: 1995334 - RNA, 21 nt, Human
uagacagucccugccaaugga

SEQ ID NO: 1995335 - RNA, 17 nt, Human
uagacagucccugccaa

SEQ ID NO: 1995336 - RNA, 21 nt, Human
uagacagagucucacuguugc

SEQ ID NO: 1995337 - RNA, 14 nt, Human
uagaagaagugugu

SEQ ID NO: 1995338 - RNA, 16 nt, Human
uagaacuuuguauagu

SEQ ID NO: 1995339 - RNA, 16 nt, Human
uagaagaaugcaugcu

SEQ ID NO: 1995340 - RNA, 22 nt, Human
uagaagaaugcaugcuuuccau

SEQ ID NO: 1995341 - RNA, 14 nt, Human
uagaagaaugcaug

SEQ ID NO: 1995342 - RNA, 12 nt, Human
uagaacuuugua

SEQ ID NO: 1995343 - RNA, 13 nt, Human
uagaacuuuguau

SEQ ID NO: 1995344 - RNA, 14 nt, Human
uagaacuuuguaua

SEQ ID NO: 1995345 - RNA, 17 nt, Human
uagaacucccuuucaac

SEQ ID NO: 1995346 - RNA, 18 nt, Human
uagaacucccuuucaaca

SEQ ID NO: 1995347 - RNA, 16 nt, Human
uagaacucccuuucaa

SEQ ID NO: 1995348 - RNA, 22 nt, Human
uagaaaaggugauaaaaucaua

SEQ ID NO: 1995349 - RNA, 12 nt, Human
uagaaaagguga

SEQ ID NO: 1995350 - RNA, 21 nt, Human
uagaaaaggugauaaaaucau

SEQ ID NO: 1995351 - RNA, 11 nt, Human
uagaaaaggca

SEQ ID NO: 1995352 - RNA, 14 nt, Human
uagaaaacuuuguu

SEQ ID NO: 1995353 - RNA, 13 nt, Human
uagaaaacuuugu

SEQ ID NO: 1995354 - RNA, 16 nt, Human
uagaaacacauaauua

SEQ ID NO: 1995355 - RNA, 20 nt, Human
uagaaacacauaauuaacac

SEQ ID NO: 1995356 - RNA, 21 nt, Human
uagaaacacauaauuaacacu

SEQ ID NO: 1995357 - RNA, 17 nt, Human
uagaaacaccaaaaaaa

SEQ ID NO: 1995358 - RNA, 18 nt, Human
uacuuuguauuguccuau

SEQ ID NO: 1995359 - RNA, 15 nt, Human
uacuuuuaaagaauu

SEQ ID NO: 1995360 - RNA, 20 nt, Human
uacuuuuaaagaauuucuuu

SEQ ID NO: 1995361 - RNA, 22 nt, Human
uacuuuuaaagaauuucuuuau

SEQ ID NO: 1995362 - RNA, 14 nt, Human
uacuuuguauuguc

SEQ ID NO: 1995363 - RNA, 16 nt, Human
uacuuuguauuguccu

SEQ ID NO: 1995364 - RNA, 21 nt, Human
uacuuuuccuugcauacaaac

SEQ ID NO: 1995365 - RNA, 22 nt, Human
uacuuuuccuugcauacaaaca

SEQ ID NO: 1995366 - RNA, 11 nt, Human
uacuuuuccuu

SEQ ID NO: 1995367 - RNA, 15 nt, Human
uacuuuuccuugcau

SEQ ID NO: 1995368 - RNA, 19 nt, Human
uagaaaacauuuggcagaa

SEQ ID NO: 1995369 - RNA, 15 nt, Human
uagaaaacaauggaa

SEQ ID NO: 1995370 - RNA, 14 nt, Human
uagaaaaacaaauc

SEQ ID NO: 1995371 - RNA, 16 nt, Human
aauuccacacccucac

SEQ ID NO: 1995372 - RNA, 14 nt, Human
aauuccacagcugc

SEQ ID NO: 1995373 - RNA, 12 nt, Human
aauuccacagcu

SEQ ID NO: 1995374 - RNA, 13 nt, Human
aauuccacagcug

SEQ ID NO: 1995375 - RNA, 21 nt, Human
uacuuugauucacauguuuuc

SEQ ID NO: 1995376 - RNA, 12 nt, Human
uacuuugauuca

SEQ ID NO: 1995377 - RNA, 14 nt, Human
uacuuugauucaca

SEQ ID NO: 1995378 - RNA, 15 nt, Human
uacuuugauucacau

SEQ ID NO: 1995379 - RNA, 17 nt, Human
uacuuugauucacaugu

SEQ ID NO: 1995380 - RNA, 20 nt, Human
uacuuugauucacauguuuu

SEQ ID NO: 1995381 - RNA, 23 nt, Human
uacuuugauucacauguuuucaa

SEQ ID NO: 1995382 - RNA, 14 nt, Human
uacuuuguaaauuc

SEQ ID NO: 1995383 - RNA, 17 nt, Human
uacuuuguaaauucuga

SEQ ID NO: 1995384 - RNA, 18 nt, Human
uacuuuguaaauucugau

SEQ ID NO: 1995385 - RNA, 19 nt, Human
uacuuuguaaauucugauu

SEQ ID NO: 1995386 - RNA, 22 nt, Human
uacuuuguaaauucugauuucu

SEQ ID NO: 1995387 - RNA, 12 nt, Human
uacuuuguauug

SEQ ID NO: 1995388 - RNA, 16 nt, Human
uaucuauaaacacugu

SEQ ID NO: 1995389 - RNA, 15 nt, Human
uaucccggcugcccu

SEQ ID NO: 1995390 - RNA, 15 nt, Human
uaucagcacgugugg

SEQ ID NO: 1995391 - RNA, 19 nt, Human
uauccaacaucaacaucuu

SEQ ID NO: 1995392 - RNA, 14 nt, Human
uauccaaugaaaua

SEQ ID NO: 1995393 - RNA, 14 nt, Human
uaucagcacgugug

SEQ ID NO: 1995394 - RNA, 17 nt, Human
uaucagaauucucagaa

SEQ ID NO: 1995395 - RNA, 19 nt, Human
acagaccgaacuguuguau

SEQ ID NO: 1995396 - RNA, 18 nt, Human
acagaccgaacuguugua

SEQ ID NO: 1995397 - RNA, 23 nt, Human
uaucaaauacauuuaaaacauua

SEQ ID NO: 1995398 - RNA, 21 nt, Human
uaucaaaggcacauggaauau

SEQ ID NO: 1995399 - RNA, 19 nt, Human
uaucacccagaagaaaaua

SEQ ID NO: 1995400 - RNA, 22 nt, Human
uaucacccagaagaaaauagug

SEQ ID NO: 1995401 - RNA, 17 nt, Human
uaucaaauuaauugugu

SEQ ID NO: 1995402 - RNA, 14 nt, Human
uaucaaauuaauug

SEQ ID NO: 1995403 - RNA, 15 nt, Human
uaucaaauuaauugu

SEQ ID NO: 1995404 - RNA, 16 nt, Human
uaucaaauuaauugug

SEQ ID NO: 1995405 - RNA, 16 nt, Human
acacuuacacuuuaug

SEQ ID NO: 1995406 - RNA, 20 nt, Human
acacuguuucaaacuuuacu

SEQ ID NO: 1995407 - RNA, 17 nt, Human
acacucauugaccugag

SEQ ID NO: 1995408 - RNA, 17 nt, Human
acacuguuucaaacuuu

SEQ ID NO: 1995409 - RNA, 18 nt, Human
acacuguuucaaacuuua

SEQ ID NO: 1995410 - RNA, 21 nt, Human
acacuuacacuuuaugcacaa

SEQ ID NO: 1995411 - RNA, 18 nt, Human
acacuuacacuuuaugca

SEQ ID NO: 1995412 - RNA, 15 nt, Human
acacuuagcuggaga

SEQ ID NO: 1995413 - RNA, 23 nt, Human
acacuuaagguugggugcugcua

SEQ ID NO: 1995414 - RNA, 15 nt, Human
acacuucaggcucuu

SEQ ID NO: 1995415 - RNA, 19 nt, Human
acacuucaggcucuucucc

SEQ ID NO: 1995416 - RNA, 22 nt, Human
acacuucaggcucuucuccuuu

SEQ ID NO: 1995417 - RNA, 14 nt, Human
acacuuccauaauc

SEQ ID NO: 1995418 - RNA, 17 nt, Human
acacuucaguuaucuug

SEQ ID NO: 1995419 - RNA, 21 nt, Human
acacuuuuucuuuacaaacaa

SEQ ID NO: 1995420 - RNA, 18 nt, Human
acagacauacuaaccagc

SEQ ID NO: 1995421 - RNA, 19 nt, Human
acagacauacuaaccagca

SEQ ID NO: 1995422 - RNA, 13 nt, Human
acagaaauguaca

SEQ ID NO: 1995423 - RNA, 13 nt, Human
acagacaggaccc

SEQ ID NO: 1995424 - RNA, 18 nt, Human
acagacaggaccccugca

SEQ ID NO: 1995425 - RNA, 19 nt, Human
uauaagugauugcugguuu

SEQ ID NO: 1995426 - RNA, 21 nt, Human
acacucaaaagcugggcaggu

SEQ ID NO: 1995427 - RNA, 22 nt, Human
acacuaaugaggaaacugcacu

SEQ ID NO: 1995428 - RNA, 15 nt, Human
acacuaaugaggaaa

SEQ ID NO: 1995429 - RNA, 20 nt, Human
uagucacugagacagcccgg

SEQ ID NO: 1995430 - RNA, 17 nt, Human
uagucacugagacagcc

SEQ ID NO: 1995431 - RNA, 19 nt, Human
uauacauguuuauguaaac

SEQ ID NO: 1995432 - RNA, 15 nt, Human
uauacaugaaauuca

SEQ ID NO: 1995433 - RNA, 15 nt, Human
uauacauguuuaugu

SEQ ID NO: 1995434 - RNA, 16 nt, Human
uauacauguuuaugua

SEQ ID NO: 1995435 - RNA, 17 nt, Human
uauacauguuuauguaa

SEQ ID NO: 1995436 - RNA, 18 nt, Human
uauacauguuuauguaaa

SEQ ID NO: 1995437 - RNA, 22 nt, Human
uauacacuuggaguuugcauuc

SEQ ID NO: 1995438 - RNA, 14 nt, Human
uauaauuguugcau

SEQ ID NO: 1995439 - RNA, 15 nt, Human
uauaauuguugcaua

SEQ ID NO: 1995440 - RNA, 16 nt, Human
uauaauuguugcauag

SEQ ID NO: 1995441 - RNA, 22 nt, Human
uauacacuuacacuuuaugcac

SEQ ID NO: 1995442 - RNA, 18 nt, Human
uauaauuuaccugaaguc

SEQ ID NO: 1995443 - RNA, 11 nt, Human
uauauauuucc

SEQ ID NO: 1995444 - RNA, 19 nt, Human
uauauauuuuuuucugaaa

SEQ ID NO: 1995445 - RNA, 13 nt, Human
uauauccuuuucu

SEQ ID NO: 1995446 - RNA, 19 nt, Human
uauauccuuuucuguguuu

SEQ ID NO: 1995447 - RNA, 15 nt, Human
uauaucuaaaucugu

SEQ ID NO: 1995448 - RNA, 20 nt, Human
uauaucuauaaacacuguuu

SEQ ID NO: 1995449 - RNA, 18 nt, Human
uauaucuauaaacacugu

SEQ ID NO: 1995450 - RNA, 19 nt, Human
uauaucuaaaucuguccaa

SEQ ID NO: 1995451 - RNA, 16 nt, Human
acacucauugaccuga

SEQ ID NO: 1995452 - RNA, 17 nt, Human
uauagguccuuuagaaa

SEQ ID NO: 1995453 - RNA, 15 nt, Human
uauauagcauuuaug

SEQ ID NO: 1995454 - RNA, 18 nt, Human
uauauagcauuuauggua

SEQ ID NO: 1995455 - RNA, 12 nt, Human
uauaggaauuga

SEQ ID NO: 1995456 - RNA, 23 nt, Human
uauaggaacuuaaauaaugugaa

SEQ ID NO: 1995457 - RNA, 13 nt, Human
uauagcuuuauuu

SEQ ID NO: 1995458 - RNA, 15 nt, Human
uauaggcaccuacca

SEQ ID NO: 1995459 - RNA, 18 nt, Human
uauagccuaggugacaga

SEQ ID NO: 1995460 - RNA, 15 nt, Human
uauagcaucacuuaa

SEQ ID NO: 1995461 - RNA, 16 nt, Human
uauagcaucacuuaaa

SEQ ID NO: 1995462 - RNA, 17 nt, Human
uauagcaucacuuaaaa

SEQ ID NO: 1995463 - RNA, 18 nt, Human
uauagcaucacuuaaaac

SEQ ID NO: 1995464 - RNA, 14 nt, Human
uauagcaucacuua

SEQ ID NO: 1995465 - RNA, 15 nt, Human
uauagauuaaaucau

SEQ ID NO: 1995466 - RNA, 20 nt, Human
uaugaaaacauggaacagug

SEQ ID NO: 1995467 - RNA, 21 nt, Human
uaugaaaacauggaacagugu

SEQ ID NO: 1995468 - RNA, 13 nt, Human
uaugaaaacaugg

SEQ ID NO: 1995469 - RNA, 18 nt, Human
uaugaaaacauggaacag

SEQ ID NO: 1995470 - RNA, 21 nt, Human
acagcccgauccuccccugga

SEQ ID NO: 1995471 - RNA, 23 nt, Human
acagcccgauccuccccuggacu

SEQ ID NO: 1995472 - RNA, 14 nt, Human
uaugaggcauuugu

SEQ ID NO: 1995473 - RNA, 15 nt, Human
uaugaggcauuuguu

SEQ ID NO: 1995474 - RNA, 21 nt, Human
uaugaggcauuuguuugaacu

SEQ ID NO: 1995475 - RNA, 23 nt, Human
uaugaggcauuuguuugaacuga

SEQ ID NO: 1995476 - RNA, 23 nt, Human
uaugaagcuuuuaugugaaacau

SEQ ID NO: 1995477 - RNA, 22 nt, Human
uaugaagcuuuuaugugaaaca

SEQ ID NO: 1995478 - RNA, 20 nt, Human
uaugaagcuuuuaugugaaa

SEQ ID NO: 1995479 - RNA, 16 nt, Human
acagcccgggcucugc

SEQ ID NO: 1995480 - RNA, 23 nt, Human
acagcccuccaucuaaacugccc

SEQ ID NO: 1995481 - RNA, 16 nt, Human
acagccccucccuccu

SEQ ID NO: 1995482 - RNA, 18 nt, Human
acagccccucccuccucu

SEQ ID NO: 1995483 - RNA, 19 nt, Human
acagccccucccuccucug

SEQ ID NO: 1995484 - RNA, 16 nt, Human
acagcccgauccuccc

SEQ ID NO: 1995485 - RNA, 15 nt, Human
acagcccgggcucug

SEQ ID NO: 1995486 - RNA, 14 nt, Human
acagccccuccucc

SEQ ID NO: 1995487 - RNA, 16 nt, Human
acagccccuccuccau

SEQ ID NO: 1995488 - RNA, 19 nt, Human
acagcacgggggccaagga

SEQ ID NO: 1995489 - RNA, 17 nt, Human
acagcagccccugcaca

SEQ ID NO: 1995490 - RNA, 14 nt, Human
acagcacuggggag

SEQ ID NO: 1995491 - RNA, 16 nt, Human
acagcaagugugaaua

SEQ ID NO: 1995492 - RNA, 15 nt, Human
acagcaagugugaau

SEQ ID NO: 1995493 - RNA, 22 nt, Human
acagauuugagcucagcccugg

SEQ ID NO: 1995494 - RNA, 14 nt, Human
acagauuuggaaag

SEQ ID NO: 1995495 - RNA, 15 nt, Human
acagauuuggaaaga

SEQ ID NO: 1995496 - RNA, 21 nt, Human
acagauuuggaaagacuggac

SEQ ID NO: 1995497 - RNA, 22 nt, Human
uaugcaugaaguaauaugcaca

SEQ ID NO: 1995498 - RNA, 17 nt, Human
uaugauacuugaaaauu

SEQ ID NO: 1995499 - RNA, 24 nt, Human
uaugauagguuauuuugauguaaa

SEQ ID NO: 1995500 - RNA, 13 nt, Human
uauggucuaaugu

SEQ ID NO: 1995501 - RNA, 16 nt, Human
uauggucuaauguuua

SEQ ID NO: 1995502 - RNA, 17 nt, Human
uauggucuaauguuuaa

SEQ ID NO: 1995503 - RNA, 23 nt, Human
uauggucuaauguuuaagcagaa

SEQ ID NO: 1995504 - RNA, 18 nt, Human
acagcggcuggacuugga

SEQ ID NO: 1995505 - RNA, 19 nt, Human
acagcggcuggacuuggag

SEQ ID NO: 1995506 - RNA, 22 nt, Human
acagcuaaucagcauucucacu

SEQ ID NO: 1995507 - RNA, 22 nt, Human
uauggccaggaaguagcacagg

SEQ ID NO: 1995508 - RNA, 20 nt, Human
uauggcccuggccuagcaua

SEQ ID NO: 1995509 - RNA, 21 nt, Human
uauggcccuggccuagcauac

SEQ ID NO: 1995510 - RNA, 22 nt, Human
uauggcccuggccuagcauacg

SEQ ID NO: 1995511 - RNA, 16 nt, Human
uaugggacucaaugca

SEQ ID NO: 1995512 - RNA, 23 nt, Human
uaugggacucaaugcacugacau

SEQ ID NO: 1995513 - RNA, 21 nt, Human
uaugguaggaacugcugggcu

SEQ ID NO: 1995514 - RNA, 10 nt, Human
uaugggagag

SEQ ID NO: 1995515 - RNA, 14 nt, Human
uaugggagaaauag

SEQ ID NO: 1995516 - RNA, 23 nt, Human
uauggccaggaaguagcacaggc

SEQ ID NO: 1995517 - RNA, 23 nt, Human
acagcuugaccgugaggccagag

SEQ ID NO: 1995518 - RNA, 22 nt, Human
acagcuugaccgugaggccaga

SEQ ID NO: 1995519 - RNA, 18 nt, Human
acaggaaaagcugcugac

SEQ ID NO: 1995520 - RNA, 19 nt, Human
acaggaaaagcugcugaca

SEQ ID NO: 1995521 - RNA, 20 nt, Human
acaggaaaagcugcugacag

SEQ ID NO: 1995522 - RNA, 21 nt, Human
acaggaaaagcugcugacagu

SEQ ID NO: 1995523 - RNA, 21 nt, Human
acagcuugaccgugaggccag

SEQ ID NO: 1995524 - RNA, 20 nt, Human
acagcuugaccgugaggcca

SEQ ID NO: 1995525 - RNA, 17 nt, Human
acagcuugaccgugagg

SEQ ID NO: 1995526 - RNA, 17 nt, Human
acagcuucauuuccugu

SEQ ID NO: 1995527 - RNA, 19 nt, Human
acagcuucauuuccugugu

SEQ ID NO: 1995528 - RNA, 21 nt, Human
acagcuucauuuccugugucu

SEQ ID NO: 1995529 - RNA, 14 nt, Human
acagcuaugcaaaa

SEQ ID NO: 1995530 - RNA, 21 nt, Human
acagcuaugcaaaaagcuagu

SEQ ID NO: 1995531 - RNA, 15 nt, Human
acagcuaaugggaca

SEQ ID NO: 1995532 - RNA, 16 nt, Human
acagcuaaugggacac

SEQ ID NO: 1995533 - RNA, 17 nt, Human
acagcuaaugggacacu

SEQ ID NO: 1995534 - RNA, 19 nt, Human
acagcuaaugggacacuaa

SEQ ID NO: 1995535 - RNA, 13 nt, Human
acagcuguugacu

SEQ ID NO: 1995536 - RNA, 14 nt, Human
acagcuguugacuc

SEQ ID NO: 1995537 - RNA, 15 nt, Human
acagcuguugacucu

SEQ ID NO: 1995538 - RNA, 12 nt, Human
acagcuuagaau

SEQ ID NO: 1995539 - RNA, 16 nt, Human
acaggcgaaagaaaac

SEQ ID NO: 1995540 - RNA, 20 nt, Human
uaugucgucgagcucccccc

SEQ ID NO: 1995541 - RNA, 21 nt, Human
uaugugauuuuuuuucccauu

SEQ ID NO: 1995542 - RNA, 20 nt, Human
uaugugcacaucuguuuugu

SEQ ID NO: 1995543 - RNA, 22 nt, Human
uaugugauuuuuuuucccauuu

SEQ ID NO: 1995544 - RNA, 22 nt, Human
acaggcccuccucccucccagc

SEQ ID NO: 1995545 - RNA, 23 nt, Human
acaggcccuccucccucccagcu

SEQ ID NO: 1995546 - RNA, 13 nt, Human
acaggcccuuccu

SEQ ID NO: 1995547 - RNA, 15 nt, Human
acaggcccuuccucu

SEQ ID NO: 1995548 - RNA, 22 nt, Human
acaggcccuuccucuccacugc

SEQ ID NO: 1995549 - RNA, 18 nt, Human
acaggcccggcuccaggc

SEQ ID NO: 1995550 - RNA, 20 nt, Human
acaggcccggcuccaggcuc

SEQ ID NO: 1995551 - RNA, 21 nt, Human
acaggcccggcuccaggcucc

SEQ ID NO: 1995552 - RNA, 22 nt, Human
acaggcccggcuccaggcuccu

SEQ ID NO: 1995553 - RNA, 16 nt, Human
acaggcccggcuccag

SEQ ID NO: 1995554 - RNA, 17 nt, Human
acaggcccggcuccagg

SEQ ID NO: 1995555 - RNA, 18 nt, Human
acaggcagggcaggacca

SEQ ID NO: 1995556 - RNA, 21 nt, Human
acaggcagggcaggaccagcc

SEQ ID NO: 1995557 - RNA, 22 nt, Human
acaggcagggcaggaccagccc

SEQ ID NO: 1995558 - RNA, 23 nt, Human
acaggcagggcaggaccagccca

SEQ ID NO: 1995559 - RNA, 12 nt, Human
acaggcagggca

SEQ ID NO: 1995560 - RNA, 13 nt, Human
acaggcagggcag

SEQ ID NO: 1995561 - RNA, 20 nt, Human
acaggaaaauuuuaaaaaua

SEQ ID NO: 1995562 - RNA, 15 nt, Human
acaggcagauacagg

SEQ ID NO: 1995563 - RNA, 19 nt, Human
acaggagaugcugugcccc

SEQ ID NO: 1995564 - RNA, 14 nt, Human
acaggagaugcugu

SEQ ID NO: 1995565 - RNA, 18 nt, Human
acaggagaugcugugccc

SEQ ID NO: 1995566 - RNA, 17 nt, Human
acaggagaagaaagaac

SEQ ID NO: 1995567 - RNA, 16 nt, Human
acaggacucugccucc

SEQ ID NO: 1995568 - RNA, 15 nt, Human
acaggacucugccuc

SEQ ID NO: 1995569 - RNA, 11 nt, Human
aauucaguugu

SEQ ID NO: 1995570 - RNA, 23 nt, Human
aauucagugaugugccuaaauaa

SEQ ID NO: 1995571 - RNA, 22 nt, Human
aauucaguuguuagugugucuu

SEQ ID NO: 1995572 - RNA, 17 nt, Human
aauucaguuguuagugu

SEQ ID NO: 1995573 - RNA, 15 nt, Human
aauucaauaguaaua

SEQ ID NO: 1995574 - RNA, 16 nt, Human
aauucaauaguaauau

SEQ ID NO: 1995575 - RNA, 18 nt, Human
aauucaauaguaauauaa

SEQ ID NO: 1995576 - RNA, 20 nt, Human
aauucaauaguaauauaaua

SEQ ID NO: 1995577 - RNA, 15 nt, Human
aauuauuuuaaaaga

SEQ ID NO: 1995578 - RNA, 12 nt, Human
aauuauuuuaaa

SEQ ID NO: 1995579 - RNA, 12 nt, Human
aauuauuugaau

SEQ ID NO: 1995580 - RNA, 14 nt, Human
aauuauuugaauga

SEQ ID NO: 1995581 - RNA, 22 nt, Human
aauuauuuauuaaaugcccagc

SEQ ID NO: 1995582 - RNA, 18 nt, Human
aauuagaacccuugcaca

SEQ ID NO: 1995583 - RNA, 22 nt, Human
aauuaugugccagauuuaugca

SEQ ID NO: 1995584 - RNA, 21 nt, Human
aauuauuuauuaaaugcccag

SEQ ID NO: 1995585 - RNA, 17 nt, Human
aauuauugauugcuuuu

SEQ ID NO: 1995586 - RNA, 19 nt, Human
aauuauguugaaaagagua

SEQ ID NO: 1995587 - RNA, 22 nt, Human
aauuauguuugccacuuugcaa

SEQ ID NO: 1995588 - RNA, 14 nt, Human
uaccuguuuaaauu

SEQ ID NO: 1995589 - RNA, 13 nt, Human
uaccuguuuaaau

SEQ ID NO: 1995590 - RNA, 16 nt, Human
uaccugccaggaagcc

SEQ ID NO: 1995591 - RNA, 17 nt, Human
uaccugaguugaagagg

SEQ ID NO: 1995592 - RNA, 16 nt, Human
uaccugaggggccucu

SEQ ID NO: 1995593 - RNA, 16 nt, Human
uaccugaguugaagag

SEQ ID NO: 1995594 - RNA, 20 nt, Human
aauuacaggaaguacuggag

SEQ ID NO: 1995595 - RNA, 19 nt, Human
aauuacaggaaguacugga

SEQ ID NO: 1995596 - RNA, 17 nt, Human
aauuacaggaaguacug

SEQ ID NO: 1995597 - RNA, 12 nt, Human
uaccuuaaaauu

SEQ ID NO: 1995598 - RNA, 15 nt, Human
uaccuuaaaauuuga

SEQ ID NO: 1995599 - RNA, 16 nt, Human
uaccuuaaaauuugaa

SEQ ID NO: 1995600 - RNA, 17 nt, Human
uaccuuaaaauuugaaa

SEQ ID NO: 1995601 - RNA, 18 nt, Human
uaccuuaaaauuugaaac

SEQ ID NO: 1995602 - RNA, 20 nt, Human
uaccuuaaaauuugaaacau

SEQ ID NO: 1995603 - RNA, 21 nt, Human
uaccuuaaaauuugaaacauu

SEQ ID NO: 1995604 - RNA, 22 nt, Human
uaccuuaaaauuugaaacauug

SEQ ID NO: 1995605 - RNA, 12 nt, Human
aauuacauuugu

SEQ ID NO: 1995606 - RNA, 15 nt, Human
aauuacauuuguaau

SEQ ID NO: 1995607 - RNA, 17 nt, Human
aauuacauuuguaauuu

SEQ ID NO: 1995608 - RNA, 18 nt, Human
aauuacauuuguaauuua

SEQ ID NO: 1995609 - RNA, 19 nt, Human
aauuacauuuguaauuuaa

SEQ ID NO: 1995610 - RNA, 21 nt, Human
uaccuuaaauuaguacagcac

SEQ ID NO: 1995611 - RNA, 19 nt, Human
aauuacagugccuaaaaua

SEQ ID NO: 1995612 - RNA, 23 nt, Human
aauuacagugccuaaaauaagaa

SEQ ID NO: 1995613 - RNA, 11 nt, Human
aauuacaguuu

SEQ ID NO: 1995614 - RNA, 14 nt, Human
uaccugaagucuuu

SEQ ID NO: 1995615 - RNA, 13 nt, Human
uaccugaagucuu

SEQ ID NO: 1995616 - RNA, 23 nt, Human
uaccugaagcuaucguaaaauua

SEQ ID NO: 1995617 - RNA, 15 nt, Human
uaccugaggggccuc

SEQ ID NO: 1995618 - RNA, 13 nt, Human
uaccugaggggcc

SEQ ID NO: 1995619 - RNA, 16 nt, Human
uaccugaagucuuugu

SEQ ID NO: 1995620 - RNA, 21 nt, Human
uaccugaagggguuuucuuga

SEQ ID NO: 1995621 - RNA, 18 nt, Human
uaccugaagggguuuucu

SEQ ID NO: 1995622 - RNA, 19 nt, Human
uaccugaagggguuuucuu

SEQ ID NO: 1995623 - RNA, 22 nt, Human
uaccucuugagccuugaacuuu

SEQ ID NO: 1995624 - RNA, 23 nt, Human
uacccuauaucuauaaacacugu

SEQ ID NO: 1995625 - RNA, 13 nt, Human
uaccucuuggcug

SEQ ID NO: 1995626 - RNA, 14 nt, Human
uaccucuuuggaaa

SEQ ID NO: 1995627 - RNA, 15 nt, Human
uaccucuuuggaaaa

SEQ ID NO: 1995628 - RNA, 23 nt, Human
uaccucuugagccuugaacuuug

SEQ ID NO: 1995629 - RNA, 23 nt, Human
uacccgggaagggggcugggaca

SEQ ID NO: 1995630 - RNA, 13 nt, Human
uacccuauaucua

SEQ ID NO: 1995631 - RNA, 16 nt, Human
uacccuauaucuauaa

SEQ ID NO: 1995632 - RNA, 14 nt, Human
aauguuauguauau

SEQ ID NO: 1995633 - RNA, 13 nt, Human
aauguucaucaau

SEQ ID NO: 1995634 - RNA, 17 nt, Human
aauguuaguuaguguag

SEQ ID NO: 1995635 - RNA, 13 nt, Human
aauguuauaaagu

SEQ ID NO: 1995636 - RNA, 21 nt, Human
aaugugcugaaugguuuucaa

SEQ ID NO: 1995637 - RNA, 17 nt, Human
uacagggaugguguuca

SEQ ID NO: 1995638 - RNA, 15 nt, Human
uacagagaugucucu

SEQ ID NO: 1995639 - RNA, 16 nt, Human
uacagagaugucucuu

SEQ ID NO: 1995640 - RNA, 22 nt, Human
uacagagaugucucuuauaucu

SEQ ID NO: 1995641 - RNA, 16 nt, Human
aauguucaucaaugaa

SEQ ID NO: 1995642 - RNA, 20 nt, Human
aauguucaucaaugaaugaa

SEQ ID NO: 1995643 - RNA, 19 nt, Human
aauguucauacugaugugu

SEQ ID NO: 1995644 - RNA, 21 nt, Human
aauguuccugccuccuugaua

SEQ ID NO: 1995645 - RNA, 20 nt, Human
aauguuggcagaugcagcuc

SEQ ID NO: 1995646 - RNA, 23 nt, Human
aauguuggcagaugcagcucuuc

SEQ ID NO: 1995647 - RNA, 17 nt, Human
aauuaaguacuauguau

SEQ ID NO: 1995648 - RNA, 16 nt, Human
aauuaaguacuaugua

SEQ ID NO: 1995649 - RNA, 15 nt, Human
aauuaacuuuuauaa

SEQ ID NO: 1995650 - RNA, 16 nt, Human
aauuaacuuuuauaaa

SEQ ID NO: 1995651 - RNA, 12 nt, Human
aauuaacuuuua

SEQ ID NO: 1995652 - RNA, 13 nt, Human
aauuaacuuuuau

SEQ ID NO: 1995653 - RNA, 20 nt, Human
aauguugugaauaauuacag

SEQ ID NO: 1995654 - RNA, 21 nt, Human
aauguugugaauaauuacagu

SEQ ID NO: 1995655 - RNA, 12 nt, Human
aauguugugaau

SEQ ID NO: 1995656 - RNA, 13 nt, Human
aauguugugaaua

SEQ ID NO: 1995657 - RNA, 17 nt, Human
aauguugugaauaauua

SEQ ID NO: 1995658 - RNA, 18 nt, Human
aauguugugaauaauuac

SEQ ID NO: 1995659 - RNA, 13 nt, Human
uaccauuaaaaua

SEQ ID NO: 1995660 - RNA, 14 nt, Human
uaccauuaaaauau

SEQ ID NO: 1995661 - RNA, 21 nt, Human
uaccauuaaaauaugcacuaa

SEQ ID NO: 1995662 - RNA, 15 nt, Human
uaccauuaaaauaug

SEQ ID NO: 1995663 - RNA, 17 nt, Human
uaccauuaaaauaugca

SEQ ID NO: 1995664 - RNA, 15 nt, Human
uacccccugcaaagc

SEQ ID NO: 1995665 - RNA, 19 nt, Human
uacccccugcaaagcccag

SEQ ID NO: 1995666 - RNA, 23 nt, Human
uacccccugcaaagcccagcuug

SEQ ID NO: 1995667 - RNA, 19 nt, Human
uaccagggacugaggggag

SEQ ID NO: 1995668 - RNA, 12 nt, Human
uaccagcagagc

SEQ ID NO: 1995669 - RNA, 22 nt, Human
uacauuuccgccacaucccucu

SEQ ID NO: 1995670 - RNA, 14 nt, Human
uacauuucgauguu

SEQ ID NO: 1995671 - RNA, 19 nt, Human
uacauuucuaagucaaaca

SEQ ID NO: 1995672 - RNA, 14 nt, Human
uaccagcagagcac

SEQ ID NO: 1995673 - RNA, 13 nt, Human
uaccagcagagca

SEQ ID NO: 1995674 - RNA, 22 nt, Human
uaccagcagagcaccuuagaca

SEQ ID NO: 1995675 - RNA, 18 nt, Human
uaccagccaguaaauggg

SEQ ID NO: 1995676 - RNA, 12 nt, Human
uacauucuguua

SEQ ID NO: 1995677 - RNA, 15 nt, Human
uacauucucaguuuu

SEQ ID NO: 1995678 - RNA, 17 nt, Human
uacauucucaguuuuuc

SEQ ID NO: 1995679 - RNA, 20 nt, Human
uacauucucaguuuuucuua

SEQ ID NO: 1995680 - RNA, 21 nt, Human
uacauucucaguuuuucuuaa

SEQ ID NO: 1995681 - RNA, 22 nt, Human
aauuaaguccuacuuuuaaaga

SEQ ID NO: 1995682 - RNA, 13 nt, Human
uacauuuccuaaa

SEQ ID NO: 1995683 - RNA, 20 nt, Human
uaauuuaggaguuuugagaa

SEQ ID NO: 1995684 - RNA, 23 nt, Human
uaauuuaaggucuguuugcuguu

SEQ ID NO: 1995685 - RNA, 21 nt, Human
uaauuuaaggucuguuugcug

SEQ ID NO: 1995686 - RNA, 22 nt, Human
uaauuuaaggucuguuugcugu

SEQ ID NO: 1995687 - RNA, 18 nt, Human
uaauuuaaggucuguuug

SEQ ID NO: 1995688 - RNA, 19 nt, Human
uaauuuaaaauugugaugu

SEQ ID NO: 1995689 - RNA, 20 nt, Human
uaauuuaaaauugugaugug

SEQ ID NO: 1995690 - RNA, 22 nt, Human
uaauuccguagguuauuuucag

SEQ ID NO: 1995691 - RNA, 16 nt, Human
uaauuauugauguuuu

SEQ ID NO: 1995692 - RNA, 22 nt, Human
uaauuauuauucagaaaugacu

SEQ ID NO: 1995693 - RNA, 16 nt, Human
aaugauuucauucaau

SEQ ID NO: 1995694 - RNA, 11 nt, Human
aaugcaaacca

SEQ ID NO: 1995695 - RNA, 12 nt, Human
aaugcaaaccau

SEQ ID NO: 1995696 - RNA, 14 nt, Human
aaugcaaaaaaucu

SEQ ID NO: 1995697 - RNA, 14 nt, Human
aaugcaaaccauca

SEQ ID NO: 1995698 - RNA, 20 nt, Human
aaugcaaaacacaaaacaaa

SEQ ID NO: 1995699 - RNA, 13 nt, Human
aaugcaccuggaa

SEQ ID NO: 1995700 - RNA, 18 nt, Human
aaugcacugggaaaaagu

SEQ ID NO: 1995701 - RNA, 21 nt, Human
aaugaguuucacagugugauu

SEQ ID NO: 1995702 - RNA, 14 nt, Human
aaugaguuucuuag

SEQ ID NO: 1995703 - RNA, 19 nt, Human
aaugaguuucuuagacuuu

SEQ ID NO: 1995704 - RNA, 18 nt, Human
aaugaguccaaacuggaa

SEQ ID NO: 1995705 - RNA, 12 nt, Human
aaugauucaaaa

SEQ ID NO: 1995706 - RNA, 17 nt, Human
aaugauucaaaaaguca

SEQ ID NO: 1995707 - RNA, 22 nt, Human
aaugaguuucuuagacuuuucc

SEQ ID NO: 1995708 - RNA, 24 nt, Human
aaugauuucagcucacugcaaccu

SEQ ID NO: 1995709 - RNA, 13 nt, Human
aaugauuguuuaa

SEQ ID NO: 1995710 - RNA, 14 nt, Human
aaugauuguuuaaa

SEQ ID NO: 1995711 - RNA, 18 nt, Human
aaugauuguuuaaagguu

SEQ ID NO: 1995712 - RNA, 22 nt, Human
aaugauugcuuuuaaaauuuua

SEQ ID NO: 1995713 - RNA, 21 nt, Human
aaugauucaaaaagucacagu

SEQ ID NO: 1995714 - RNA, 13 nt, Human
aaugauugaaaau

SEQ ID NO: 1995715 - RNA, 20 nt, Human
aaugauugaaaauaaugcug

SEQ ID NO: 1995716 - RNA, 12 nt, Human
aaugauugcuuu

SEQ ID NO: 1995717 - RNA, 15 nt, Human
aaugauugcuuuuaa

SEQ ID NO: 1995718 - RNA, 16 nt, Human
aaugauugcuuuuaaa

SEQ ID NO: 1995719 - RNA, 19 nt, Human
aaugauugcuuuuaaaauu

SEQ ID NO: 1995720 - RNA, 20 nt, Human
aaugauugcuuuuaaaauuu

SEQ ID NO: 1995721 - RNA, 13 nt, Human
aaugagccuggca

SEQ ID NO: 1995722 - RNA, 12 nt, Human
aaugagccuggc

SEQ ID NO: 1995723 - RNA, 14 nt, Human
aaugagccuggcaa

SEQ ID NO: 1995724 - RNA, 16 nt, Human
aaugaggucagagccu

SEQ ID NO: 1995725 - RNA, 18 nt, Human
aaugaggucagagccugc

SEQ ID NO: 1995726 - RNA, 20 nt, Human
aaugaccuuucaauaggaaa

SEQ ID NO: 1995727 - RNA, 21 nt, Human
aaugaccuuucaauaggaaaa

SEQ ID NO: 1995728 - RNA, 22 nt, Human
aaugacuaagaggaaaguacau

SEQ ID NO: 1995729 - RNA, 13 nt, Human
aaugacuuuauua

SEQ ID NO: 1995730 - RNA, 14 nt, Human
aaugacuuuauuau

SEQ ID NO: 1995731 - RNA, 15 nt, Human
aaugacuuuauuauu

SEQ ID NO: 1995732 - RNA, 17 nt, Human
aaugacuuuauuauuua

SEQ ID NO: 1995733 - RNA, 19 nt, Human
aaugacuuccccaauaucu

SEQ ID NO: 1995734 - RNA, 21 nt, Human
aaugacuuccccaauaucuug

SEQ ID NO: 1995735 - RNA, 11 nt, Human
aaugacuuuau

SEQ ID NO: 1995736 - RNA, 18 nt, Human
aaugagcaauaucugcua

SEQ ID NO: 1995737 - RNA, 11 nt, Human
aaugagccugg

SEQ ID NO: 1995738 - RNA, 18 nt, Human
aaugagcagcuuuagcaa

SEQ ID NO: 1995739 - RNA, 22 nt, Human
aaugagaaaucuaaaaaacgaa

SEQ ID NO: 1995740 - RNA, 12 nt, Human
aaugagaaaucu

SEQ ID NO: 1995741 - RNA, 21 nt, Human
aauggaguuggaguucauuca

SEQ ID NO: 1995742 - RNA, 13 nt, Human
aauggaguuggag

SEQ ID NO: 1995743 - RNA, 19 nt, Human
aauggaguuggaguucauu

SEQ ID NO: 1995744 - RNA, 20 nt, Human
aauggaguuaaacuuuagug

SEQ ID NO: 1995745 - RNA, 16 nt, Human
aauggaagacagcucu

SEQ ID NO: 1995746 - RNA, 18 nt, Human
aauggaagacagcucuua

SEQ ID NO: 1995747 - RNA, 14 nt, Human
aaugguuuucaaaa

SEQ ID NO: 1995748 - RNA, 12 nt, Human
aauggaugaaau

SEQ ID NO: 1995749 - RNA, 13 nt, Human
aauggaugaaauc

SEQ ID NO: 1995750 - RNA, 22 nt, Human
aauguaaagcaaccaaaaagaa

SEQ ID NO: 1995751 - RNA, 16 nt, Human
aaugguuuucuugugu

SEQ ID NO: 1995752 - RNA, 16 nt, Human
aaugguuuucaaaaua

SEQ ID NO: 1995753 - RNA, 12 nt, Human
aauguaaauaaa

SEQ ID NO: 1995754 - RNA, 19 nt, Human
aauguaaaggucacuuuuc

SEQ ID NO: 1995755 - RNA, 17 nt, Human
aauguaagguauaucau

SEQ ID NO: 1995756 - RNA, 23 nt, Human
aauguaagguauaucauucuaaa

SEQ ID NO: 1995757 - RNA, 17 nt, Human
uacagagacagaaagca

SEQ ID NO: 1995758 - RNA, 19 nt, Human
uacagacaaagcguggugg

SEQ ID NO: 1995759 - RNA, 22 nt, Human
uacagagcccacgcccccacug

SEQ ID NO: 1995760 - RNA, 19 nt, Human
uacagagcccacgccccca

SEQ ID NO: 1995761 - RNA, 23 nt, Human
uacagagcagacaguuaagagaa

SEQ ID NO: 1995762 - RNA, 15 nt, Human
uacagacaaagcgug

SEQ ID NO: 1995763 - RNA, 14 nt, Human
uacagacaaagcgu

SEQ ID NO: 1995764 - RNA, 13 nt, Human
uacagacaaagcg

SEQ ID NO: 1995765 - RNA, 15 nt, Human
uacaccgggccugga

SEQ ID NO: 1995766 - RNA, 17 nt, Human
uacaccgggccuggaga

SEQ ID NO: 1995767 - RNA, 21 nt, Human
aauguaauugauuguauauag

SEQ ID NO: 1995768 - RNA, 19 nt, Human
uacacccaugaaagaaaac

SEQ ID NO: 1995769 - RNA, 20 nt, Human
uacaaugugacuuugaaaau

SEQ ID NO: 1995770 - RNA, 13 nt, Human
uacaaugcugugc

SEQ ID NO: 1995771 - RNA, 14 nt, Human
uacaaugcugugcc

SEQ ID NO: 1995772 - RNA, 16 nt, Human
uacaaugugacuuuga

SEQ ID NO: 1995773 - RNA, 17 nt, Human
uacaaugugacuuugaa

SEQ ID NO: 1995774 - RNA, 14 nt, Human
uacaaugacuuuau

SEQ ID NO: 1995775 - RNA, 18 nt, Human
uacaaugacuuuauugca

SEQ ID NO: 1995776 - RNA, 16 nt, Human
uacaaugcugugcccu

SEQ ID NO: 1995777 - RNA, 15 nt, Human
uaauuuuucuguaua

SEQ ID NO: 1995778 - RNA, 15 nt, Human
uaauuuuuguauuuu

SEQ ID NO: 1995779 - RNA, 12 nt, Human
uaauuuuucugu

SEQ ID NO: 1995780 - RNA, 14 nt, Human
uaauuuuucuguau

SEQ ID NO: 1995781 - RNA, 11 nt, Human
uaauuuuuccu

SEQ ID NO: 1995782 - RNA, 21 nt, Human
uacaaaaaaaaaaaaaaauua

SEQ ID NO: 1995783 - RNA, 22 nt, Human
uaauuuuuuuuuuccuuuuaaa

SEQ ID NO: 1995784 - RNA, 13 nt, Human
uacaaugacuuua

SEQ ID NO: 1995785 - RNA, 18 nt, Human
uaauuuuuuugagacaga

SEQ ID NO: 1995786 - RNA, 14 nt, Human
aaugcaucuuugau

SEQ ID NO: 1995787 - RNA, 15 nt, Human
aaugcaucuuugaug

SEQ ID NO: 1995788 - RNA, 18 nt, Human
aaugcaucuuugaugugu

SEQ ID NO: 1995789 - RNA, 19 nt, Human
aaugcaucuuugauguguu

SEQ ID NO: 1995790 - RNA, 20 nt, Human
aaugcaucuuugauguguug

SEQ ID NO: 1995791 - RNA, 13 nt, Human
aaugcaugcuuuc

SEQ ID NO: 1995792 - RNA, 16 nt, Human
aaugcaugcuuuccau

SEQ ID NO: 1995793 - RNA, 18 nt, Human
aaugcaugcuuuccauau

SEQ ID NO: 1995794 - RNA, 21 nt, Human
aaugcuggcuguuggcugggg

SEQ ID NO: 1995795 - RNA, 22 nt, Human
aaugcuggcuguuggcuggggg

SEQ ID NO: 1995796 - RNA, 20 nt, Human
aaugcaugcuuuccauauuu

SEQ ID NO: 1995797 - RNA, 13 nt, Human
aauggaagacagc

SEQ ID NO: 1995798 - RNA, 21 nt, Human
aaucgcuuuccuaaaacagua

SEQ ID NO: 1995799 - RNA, 15 nt, Human
aaucgggguauaaua

SEQ ID NO: 1995800 - RNA, 19 nt, Human
aaucgggguauaauaggcu

SEQ ID NO: 1995801 - RNA, 16 nt, Human
aaucuauagaaagugu

SEQ ID NO: 1995802 - RNA, 17 nt, Human
aaucuauagaaaguguu

SEQ ID NO: 1995803 - RNA, 18 nt, Human
aaucuauagaaaguguuc

SEQ ID NO: 1995804 - RNA, 23 nt, Human
aaucuauagaaaguguucuguua

SEQ ID NO: 1995805 - RNA, 20 nt, Human
aaucccuguguuaauuuaag

SEQ ID NO: 1995806 - RNA, 15 nt, Human
aaucuaugauuccag

SEQ ID NO: 1995807 - RNA, 18 nt, Human
aaucuaugauuccaggug

SEQ ID NO: 1995808 - RNA, 13 nt, Human
aaucucaaauaac

SEQ ID NO: 1995809 - RNA, 18 nt, Human
aaucugggccagaauuuc

SEQ ID NO: 1995810 - RNA, 20 nt, Human
aauccucaguuuuugugaaa

SEQ ID NO: 1995811 - RNA, 18 nt, Human
aaucccuguguuaauuua

SEQ ID NO: 1995812 - RNA, 19 nt, Human
aaucccuguguuaauuuaa

SEQ ID NO: 1995813 - RNA, 13 nt, Human
aaucccugcucac

SEQ ID NO: 1995814 - RNA, 18 nt, Human
aaucccugcucacugcag

SEQ ID NO: 1995815 - RNA, 17 nt, Human
aaucccauuuaaaaaaa

SEQ ID NO: 1995816 - RNA, 12 nt, Human
aaucccaggaug

SEQ ID NO: 1995817 - RNA, 13 nt, Human
aaucccagcgcac

SEQ ID NO: 1995818 - RNA, 21 nt, Human
uaaguauucuuauuuaaugaa

SEQ ID NO: 1995819 - RNA, 17 nt, Human
uaaguuaguuccacuga

SEQ ID NO: 1995820 - RNA, 19 nt, Human
uaaguuaguuccacugaga

SEQ ID NO: 1995821 - RNA, 17 nt, Human
uaaguguguguuuuuca

SEQ ID NO: 1995822 - RNA, 20 nt, Human
uaaguuaguuccacugagac

SEQ ID NO: 1995823 - RNA, 21 nt, Human
uaaggauacaggcuggaaagu

SEQ ID NO: 1995824 - RNA, 16 nt, Human
uaaggauacaggcugg

SEQ ID NO: 1995825 - RNA, 17 nt, Human
uaaggauacaggcugga

SEQ ID NO: 1995826 - RNA, 17 nt, Human
uaaggagaaucauguuu

SEQ ID NO: 1995827 - RNA, 20 nt, Human
uaaggagaaucauguuucuu

SEQ ID NO: 1995828 - RNA, 22 nt, Human
uaaggagaaucauguuucuuug

SEQ ID NO: 1995829 - RNA, 21 nt, Human
uaagcuauucaguaauaacuc

SEQ ID NO: 1995830 - RNA, 16 nt, Human
uaagcaggcgcaaggg

SEQ ID NO: 1995831 - RNA, 18 nt, Human
uaagcaggcgcaagggag

SEQ ID NO: 1995832 - RNA, 15 nt, Human
uaagcaaaaugugau

SEQ ID NO: 1995833 - RNA, 21 nt, Human
uaagcaaaaugugauauguac

SEQ ID NO: 1995834 - RNA, 14 nt, Human
uaagcaaaauguga

SEQ ID NO: 1995835 - RNA, 14 nt, Human
uaagauucauauuu

SEQ ID NO: 1995836 - RNA, 14 nt, Human
uaagauguuauauu

SEQ ID NO: 1995837 - RNA, 15 nt, Human
uaagauguuauauuu

SEQ ID NO: 1995838 - RNA, 19 nt, Human
uaagauguuauauuuuucu

SEQ ID NO: 1995839 - RNA, 21 nt, Human
uaagauguuauauuuuucuua

SEQ ID NO: 1995840 - RNA, 22 nt, Human
uaagauguuauauuuuucuuaa

SEQ ID NO: 1995841 - RNA, 14 nt, Human
uaagauuauaauug

SEQ ID NO: 1995842 - RNA, 15 nt, Human
uaagauuauaauugu

SEQ ID NO: 1995843 - RNA, 9 nt, Human
uaaggaaua

SEQ ID NO: 1995844 - RNA, 13 nt, Human
uaaggaagacaau

SEQ ID NO: 1995845 - RNA, 15 nt, Human
uaaggaaccuuccuu

SEQ ID NO: 1995846 - RNA, 19 nt, Human
uaaggaaccuuccuuccug

SEQ ID NO: 1995847 - RNA, 18 nt, Human
uaaggaauaccugucccc

SEQ ID NO: 1995848 - RNA, 17 nt, Human
uaaggaauaccuguccc

SEQ ID NO: 1995849 - RNA, 22 nt, Human
uaaggaauuuuauuuuuuucug

SEQ ID NO: 1995850 - RNA, 14 nt, Human
uaaggaauauggga

SEQ ID NO: 1995851 - RNA, 20 nt, Human
uaaggaauaugggagaaaua

SEQ ID NO: 1995852 - RNA, 14 nt, Human
uaaggacugacuga

SEQ ID NO: 1995853 - RNA, 18 nt, Human
uaaggacugacugaggca

SEQ ID NO: 1995854 - RNA, 19 nt, Human
uaaggacugacugaggcag

SEQ ID NO: 1995855 - RNA, 13 nt, Human
uaaggacuuccug

SEQ ID NO: 1995856 - RNA, 14 nt, Human
uaaggacuuccuga

SEQ ID NO: 1995857 - RNA, 13 nt, Human
aauauuuaugaag

SEQ ID NO: 1995858 - RNA, 14 nt, Human
aauauuuaugaaga

SEQ ID NO: 1995859 - RNA, 15 nt, Human
aauauuuaugaagaa

SEQ ID NO: 1995860 - RNA, 18 nt, Human
aauauuuaugaagaaaau

SEQ ID NO: 1995861 - RNA, 22 nt, Human
aauauuuaugaagaaaauacuu

SEQ ID NO: 1995862 - RNA, 12 nt, Human
aauauuuauuaa

SEQ ID NO: 1995863 - RNA, 15 nt, Human
aauauuuauuaaauu

SEQ ID NO: 1995864 - RNA, 15 nt, Human
aauauuuauagguca

SEQ ID NO: 1995865 - RNA, 16 nt, Human
aauauuuauuaaauuu

SEQ ID NO: 1995866 - RNA, 11 nt, Human
aaucagccugc

SEQ ID NO: 1995867 - RNA, 18 nt, Human
aaucagcauucucacucc

SEQ ID NO: 1995868 - RNA, 15 nt, Human
aaucacuguguauau

SEQ ID NO: 1995869 - RNA, 16 nt, Human
aaucacuguguauauu

SEQ ID NO: 1995870 - RNA, 17 nt, Human
aaucacuguguauauuu

SEQ ID NO: 1995871 - RNA, 18 nt, Human
aaucacuguguauauuug

SEQ ID NO: 1995872 - RNA, 19 nt, Human
aaucagcauucucacuccu

SEQ ID NO: 1995873 - RNA, 12 nt, Human
aaucagcauucu

SEQ ID NO: 1995874 - RNA, 12 nt, Human
aaucacucagag

SEQ ID NO: 1995875 - RNA, 15 nt, Human
aaucacucagagcag

SEQ ID NO: 1995876 - RNA, 16 nt, Human
aaucacucagagcagu

SEQ ID NO: 1995877 - RNA, 10 nt, Human
aaucacugug

SEQ ID NO: 1995878 - RNA, 13 nt, Human
aaucacuguguau

SEQ ID NO: 1995879 - RNA, 14 nt, Human
aaucacuguguaua

SEQ ID NO: 1995880 - RNA, 18 nt, Human
aaucagccugcuccagcu

SEQ ID NO: 1995881 - RNA, 13 nt, Human
aaucagccugcuc

SEQ ID NO: 1995882 - RNA, 19 nt, Human
aaucagccugcuccagcug

SEQ ID NO: 1995883 - RNA, 19 nt, Human
aaucacuguguauauuuga

SEQ ID NO: 1995884 - RNA, 21 nt, Human
aaucaguagcuuaagaaaaaa

SEQ ID NO: 1995885 - RNA, 14 nt, Human
aaucaguaaacacu

SEQ ID NO: 1995886 - RNA, 16 nt, Human
aaucaguaaacacugu

SEQ ID NO: 1995887 - RNA, 15 nt, Human
aauagcaauauucuu

SEQ ID NO: 1995888 - RNA, 21 nt, Human
aauagcaaguggcauaaagca

SEQ ID NO: 1995889 - RNA, 19 nt, Human
aauaccugucccccugaca

SEQ ID NO: 1995890 - RNA, 18 nt, Human
aauaccugucccccugac

SEQ ID NO: 1995891 - RNA, 15 nt, Human
aauaccugucccccu

SEQ ID NO: 1995892 - RNA, 13 nt, Human
aauaccaguucug

SEQ ID NO: 1995893 - RNA, 12 nt, Human
aauaccaaggaa

SEQ ID NO: 1995894 - RNA, 14 nt, Human
aauacauuuaaaac

SEQ ID NO: 1995895 - RNA, 17 nt, Human
aauacauuuaaaacauu

SEQ ID NO: 1995896 - RNA, 13 nt, Human
aauacauucuuuu

SEQ ID NO: 1995897 - RNA, 22 nt, Human
aauacauucuuuuugcucuaaa

SEQ ID NO: 1995898 - RNA, 20 nt, Human
aauacauuuaaaacauuaaa

SEQ ID NO: 1995899 - RNA, 21 nt, Human
aauacauuuaaaacauuaaaa

SEQ ID NO: 1995900 - RNA, 22 nt, Human
aauacauuuaaaacauuaaaau

SEQ ID NO: 1995901 - RNA, 23 nt, Human
aauacauuuaaaacauuaaaaua

SEQ ID NO: 1995902 - RNA, 19 nt, Human
aauaccagccaguaaaugg

SEQ ID NO: 1995903 - RNA, 17 nt, Human
aauaccagccaguaaau

SEQ ID NO: 1995904 - RNA, 19 nt, Human
aauacaggauuauuuugau

SEQ ID NO: 1995905 - RNA, 17 nt, Human
aauacaugaugauuuca

SEQ ID NO: 1995906 - RNA, 15 nt, Human
aauacagacuggaug

SEQ ID NO: 1995907 - RNA, 13 nt, Human
aauacagauaaau

SEQ ID NO: 1995908 - RNA, 18 nt, Human
aauacagauaaaugauuc

SEQ ID NO: 1995909 - RNA, 13 nt, Human
aauacagaggcaa

SEQ ID NO: 1995910 - RNA, 17 nt, Human
uaacaaauaacaacuuu

SEQ ID NO: 1995911 - RNA, 22 nt, Human
uaacaaagaaccuaacauuuau

SEQ ID NO: 1995912 - RNA, 21 nt, Human
uaaauuaacuuuuauaaacuu

SEQ ID NO: 1995913 - RNA, 16 nt, Human
uaaauuauguuuuacu

SEQ ID NO: 1995914 - RNA, 17 nt, Human
uaaauuauugaugaaaa

SEQ ID NO: 1995915 - RNA, 16 nt, Human
aagugccuuugcagcu

SEQ ID NO: 1995916 - RNA, 18 nt, Human
aaguguauuuuuuuacua

SEQ ID NO: 1995917 - RNA, 21 nt, Human
aaguguauuuuuuuacuaaua

SEQ ID NO: 1995918 - RNA, 18 nt, Human
uaaaugaaaaucgugaca

SEQ ID NO: 1995919 - RNA, 18 nt, Human
uaaauguuaaagauguag

SEQ ID NO: 1995920 - RNA, 21 nt, Human
uaaauguuaaagauguagcaa

SEQ ID NO: 1995921 - RNA, 22 nt, Human
uaaauguuaaagauguagcaaa

SEQ ID NO: 1995922 - RNA, 18 nt, Human
uaaauguuauagcugcau

SEQ ID NO: 1995923 - RNA, 19 nt, Human
uaaauuaacuuuuauaaac

SEQ ID NO: 1995924 - RNA, 20 nt, Human
uaaauuaacuuuuauaaacu

SEQ ID NO: 1995925 - RNA, 13 nt, Human
uaaaugugguaaa

SEQ ID NO: 1995926 - RNA, 20 nt, Human
uaaaugugugagugcaugua

SEQ ID NO: 1995927 - RNA, 13 nt, Human
uaaauguuaaaga

SEQ ID NO: 1995928 - RNA, 14 nt, Human
uaaauguuaaagau

SEQ ID NO: 1995929 - RNA, 16 nt, Human
uaaauguuaaagaugu

SEQ ID NO: 1995930 - RNA, 17 nt, Human
uaaauguuaaagaugua

SEQ ID NO: 1995931 - RNA, 15 nt, Human
uaagaauuuuuuauu

SEQ ID NO: 1995932 - RNA, 23 nt, Human
uaagaauuuuuuauuuuuuggua

SEQ ID NO: 1995933 - RNA, 23 nt, Human
uaagacaaaaagcuacuuauugu

SEQ ID NO: 1995934 - RNA, 13 nt, Human
uaagaagugaaaa

SEQ ID NO: 1995935 - RNA, 12 nt, Human
uaacuugggagu

SEQ ID NO: 1995936 - RNA, 19 nt, Human
uaacuugggagugugguuu

SEQ ID NO: 1995937 - RNA, 20 nt, Human
uaacuucuaaaacuguacuu

SEQ ID NO: 1995938 - RNA, 23 nt, Human
uaacuucuaaaacuguacuuuga

SEQ ID NO: 1995939 - RNA, 12 nt, Human
uaacuucuaaaa

SEQ ID NO: 1995940 - RNA, 14 nt, Human
uaacuucuaaaacu

SEQ ID NO: 1995941 - RNA, 15 nt, Human
uaacuucuaaaacug

SEQ ID NO: 1995942 - RNA, 16 nt, Human
uaacuucuaaaacugu

SEQ ID NO: 1995943 - RNA, 17 nt, Human
uaacuucuaaaacugua

SEQ ID NO: 1995944 - RNA, 18 nt, Human
uaacuucuaaaacuguac

SEQ ID NO: 1995945 - RNA, 20 nt, Human
uaacuugucuuuggacccug

SEQ ID NO: 1995946 - RNA, 16 nt, Human
uaacuugucuuuggac

SEQ ID NO: 1995947 - RNA, 14 nt, Human
uaacuuguaauaaa

SEQ ID NO: 1995948 - RNA, 15 nt, Human
uaacuuguaauaaac

SEQ ID NO: 1995949 - RNA, 17 nt, Human
uaacuuacccuguauau

SEQ ID NO: 1995950 - RNA, 17 nt, Human
uaacuuagagcuuuuuu

SEQ ID NO: 1995951 - RNA, 15 nt, Human
uaacuuaguuuugca

SEQ ID NO: 1995952 - RNA, 16 nt, Human
uaacuuaguuuugcau

SEQ ID NO: 1995953 - RNA, 17 nt, Human
uaacuuaguuuugcaua

SEQ ID NO: 1995954 - RNA, 17 nt, Human
uaacuuauauuguaaga

SEQ ID NO: 1995955 - RNA, 18 nt, Human
uaacuuauauuguaagaa

SEQ ID NO: 1995956 - RNA, 19 nt, Human
uaacuuauauuguaagaaa

SEQ ID NO: 1995957 - RNA, 20 nt, Human
uaacuuauauuguaagaaau

SEQ ID NO: 1995958 - RNA, 21 nt, Human
uaacuuauauuguaagaaaua

SEQ ID NO: 1995959 - RNA, 15 nt, Human
uaacgugugcugugu

SEQ ID NO: 1995960 - RNA, 17 nt, Human
uaacgugugcuguguuu

SEQ ID NO: 1995961 - RNA, 22 nt, Human
uaacgugugcuguguuugcucc

SEQ ID NO: 1995962 - RNA, 17 nt, Human
uaacguauaaaagccug

SEQ ID NO: 1995963 - RNA, 13 nt, Human
uaacguauaaaag

SEQ ID NO: 1995964 - RNA, 19 nt, Human
uaacaugaauauuuagugu

SEQ ID NO: 1995965 - RNA, 23 nt, Human
uaacagggucucuagugcuguga

SEQ ID NO: 1995966 - RNA, 22 nt, Human
aauauauuuaaagggaaauuga

SEQ ID NO: 1995967 - RNA, 17 nt, Human
aauauauuuuguaugca

SEQ ID NO: 1995968 - RNA, 18 nt, Human
aauauauuuuguaugcaa

SEQ ID NO: 1995969 - RNA, 12 nt, Human
aauauauuuuag

SEQ ID NO: 1995970 - RNA, 13 nt, Human
aauauauuuugua

SEQ ID NO: 1995971 - RNA, 14 nt, Human
aauauauuuuguau

SEQ ID NO: 1995972 - RNA, 16 nt, Human
aauauauuuuguaugc

SEQ ID NO: 1995973 - RNA, 13 nt, Human
aauaucaaauuaa

SEQ ID NO: 1995974 - RNA, 14 nt, Human
aauaucaaauuaau

SEQ ID NO: 1995975 - RNA, 17 nt, Human
uaacagggauugauuuu

SEQ ID NO: 1995976 - RNA, 18 nt, Human
uaacagggauugauuuua

SEQ ID NO: 1995977 - RNA, 20 nt, Human
aauauauuuuguaugcaagc

SEQ ID NO: 1995978 - RNA, 19 nt, Human
uaacaugugaaaagaauag

SEQ ID NO: 1995979 - RNA, 23 nt, Human
uaacgcaccgacuagacacacaa

SEQ ID NO: 1995980 - RNA, 19 nt, Human
uaacauguaauuaaguacu

SEQ ID NO: 1995981 - RNA, 14 nt, Human
uaacaugaauauuu

SEQ ID NO: 1995982 - RNA, 21 nt, Human
uaacaugaauauuuaguguuc

SEQ ID NO: 1995983 - RNA, 20 nt, Human
uaacaugaauauuuaguguu

SEQ ID NO: 1995984 - RNA, 22 nt, Human
aauaguguuauugagagagaug

SEQ ID NO: 1995985 - RNA, 23 nt, Human
aauaguguuauugagagagaugu

SEQ ID NO: 1995986 - RNA, 21 nt, Human
aauauauucagccuggcuuca

SEQ ID NO: 1995987 - RNA, 21 nt, Human
aauaguucagguaacaggcag

SEQ ID NO: 1995988 - RNA, 21 nt, Human
aauauauuuuaagacgaaaca

SEQ ID NO: 1995989 - RNA, 15 nt, Human
aauauauuuaaaggg

SEQ ID NO: 1995990 - RNA, 19 nt, Human
aauauauuuaaagggaaau

SEQ ID NO: 1995991 - RNA, 14 nt, Human
aauauauuuaaagg

SEQ ID NO: 1995992 - RNA, 21 nt, Human
aauagugccgcaauaaacaua

SEQ ID NO: 1995993 - RNA, 18 nt, Human
aauagucauuugugaauu

SEQ ID NO: 1995994 - RNA, 22 nt, Human
guggcgaaaucccugcucacug

SEQ ID NO: 1995995 - RNA, 22 nt, Human
guggcgcagcauauucaggaag

SEQ ID NO: 1995996 - RNA, 17 nt, Human
guggcgaaaucccugcu

SEQ ID NO: 1995997 - RNA, 20 nt, Human
guggcgaaaucccugcucac

SEQ ID NO: 1995998 - RNA, 13 nt, Human
gugggacacccug

SEQ ID NO: 1995999 - RNA, 15 nt, Human
gugggacacccugug

SEQ ID NO: 1996000 - RNA, 14 nt, Human
gugggagcugccug

SEQ ID NO: 1996001 - RNA, 15 nt, Human
guggggucacucugg

SEQ ID NO: 1996002 - RNA, 15 nt, Human
guggggcucccgccu

SEQ ID NO: 1996003 - RNA, 15 nt, Human
gugggagcugccugu

SEQ ID NO: 1996004 - RNA, 18 nt, Human
gugggagcugccuguuca

SEQ ID NO: 1996005 - RNA, 23 nt, Human
gugggaggaucucuugagccugg

SEQ ID NO: 1996006 - RNA, 17 nt, Human
gugggaagggcuacacc

SEQ ID NO: 1996007 - RNA, 17 nt, Human
guggccgcccaaggccc

SEQ ID NO: 1996008 - RNA, 23 nt, Human
aagaggaaugaaguacucauaca

SEQ ID NO: 1996009 - RNA, 22 nt, Human
guggccucccaacucaccccag

SEQ ID NO: 1996010 - RNA, 21 nt, Human
guggccucccaacucacccca

SEQ ID NO: 1996011 - RNA, 23 nt, Human
guggccucgaacuccuggcacua

SEQ ID NO: 1996012 - RNA, 18 nt, Human
guggccugacucccccag

SEQ ID NO: 1996013 - RNA, 16 nt, Human
guggccuggcuugucu

SEQ ID NO: 1996014 - RNA, 13 nt, Human
guggccugccagu

SEQ ID NO: 1996015 - RNA, 22 nt, Human
aagagcaucaguacuuguuucu

SEQ ID NO: 1996016 - RNA, 22 nt, Human
aagagcagcuccuuccuagccu

SEQ ID NO: 1996017 - RNA, 16 nt, Human
aagacuuuggaaagac

SEQ ID NO: 1996018 - RNA, 23 nt, Human
aagacugaguacguugugcauuu

SEQ ID NO: 1996019 - RNA, 19 nt, Human
aagacgcugugcugcccug

SEQ ID NO: 1996020 - RNA, 18 nt, Human
aagacgcugugcugcccu

SEQ ID NO: 1996021 - RNA, 17 nt, Human
aagacgcugugcugccc

SEQ ID NO: 1996022 - RNA, 15 nt, Human
aagacgcugugcugc

SEQ ID NO: 1996023 - RNA, 16 nt, Human
aagacgcaccagccca

SEQ ID NO: 1996024 - RNA, 13 nt, Human
aagacgcugugcu

SEQ ID NO: 1996025 - RNA, 12 nt, Human
aacuugcuuaaa

SEQ ID NO: 1996026 - RNA, 14 nt, Human
aacuugcuuaaaug

SEQ ID NO: 1996027 - RNA, 15 nt, Human
aacuugcuuaaaugu

SEQ ID NO: 1996028 - RNA, 16 nt, Human
aacuugcuuaaaugug

SEQ ID NO: 1996029 - RNA, 17 nt, Human
aacuugcuuaaauguga

SEQ ID NO: 1996030 - RNA, 19 nt, Human
aagaccuucuccuucaccu

SEQ ID NO: 1996031 - RNA, 18 nt, Human
aagaccuucuccuucacc

SEQ ID NO: 1996032 - RNA, 15 nt, Human
aagaccuucuccuuc

SEQ ID NO: 1996033 - RNA, 14 nt, Human
aacuugccuuugaa

SEQ ID NO: 1996034 - RNA, 15 nt, Human
aacuugccuuugaag

SEQ ID NO: 1996035 - RNA, 12 nt, Human
aacuugcugccu

SEQ ID NO: 1996036 - RNA, 14 nt, Human
aacuugcugccucg

SEQ ID NO: 1996037 - RNA, 11 nt, Human
aacuugccuuu

SEQ ID NO: 1996038 - RNA, 23 nt, Human
aacuugcaagggcggccuuuccc

SEQ ID NO: 1996039 - RNA, 13 nt, Human
guguguauguggg

SEQ ID NO: 1996040 - RNA, 15 nt, Human
guguguauguggggg

SEQ ID NO: 1996041 - RNA, 20 nt, Human
gugugucacccuuaggccag

SEQ ID NO: 1996042 - RNA, 18 nt, Human
guguguccaaaacugccu

SEQ ID NO: 1996043 - RNA, 20 nt, Human
gugugugaaaaugugugugu

SEQ ID NO: 1996044 - RNA, 19 nt, Human
gugugggggccccgucuca

SEQ ID NO: 1996045 - RNA, 21 nt, Human
gugugggggccccgucucagg

SEQ ID NO: 1996046 - RNA, 14 nt, Human
gugugggggccccg

SEQ ID NO: 1996047 - RNA, 14 nt, Human
gugugggucugugu

SEQ ID NO: 1996048 - RNA, 16 nt, Human
gugugguagagugugc

SEQ ID NO: 1996049 - RNA, 20 nt, Human
gugucagguggggcagcuug

SEQ ID NO: 1996050 - RNA, 16 nt, Human
gugucaguauccaggc

SEQ ID NO: 1996051 - RNA, 19 nt, Human
gugucaguuuauguuuugg

SEQ ID NO: 1996052 - RNA, 22 nt, Human
gugugacaaggauugcuacugu

SEQ ID NO: 1996053 - RNA, 21 nt, Human
gugugaccacugcagaagaca

SEQ ID NO: 1996054 - RNA, 16 nt, Human
gugucagcauagaagu

SEQ ID NO: 1996055 - RNA, 15 nt, Human
gugucaagcuuccug

SEQ ID NO: 1996056 - RNA, 17 nt, Human
gugucaaguggcaaagc

SEQ ID NO: 1996057 - RNA, 14 nt, Human
gugucaaguggcaa

SEQ ID NO: 1996058 - RNA, 17 nt, Human
guguauuuuuuuacuaa

SEQ ID NO: 1996059 - RNA, 23 nt, Human
guguauuuuuuuacuaauagaca

SEQ ID NO: 1996060 - RNA, 20 nt, Human
gugucaagagggucugagga

SEQ ID NO: 1996061 - RNA, 17 nt, Human
aagauguacuauaacau

SEQ ID NO: 1996062 - RNA, 13 nt, Human
aagauguagagga

SEQ ID NO: 1996063 - RNA, 14 nt, Human
aagaggcugcagcc

SEQ ID NO: 1996064 - RNA, 23 nt, Human
aagagggagggagggcuccagac

SEQ ID NO: 1996065 - RNA, 12 nt, Human
aagaguaggaag

SEQ ID NO: 1996066 - RNA, 22 nt, Human
aagagggucugaggaauccaga

SEQ ID NO: 1996067 - RNA, 19 nt, Human
gugggguagguugggagaa

SEQ ID NO: 1996068 - RNA, 20 nt, Human
guggggucuccucaggacca

SEQ ID NO: 1996069 - RNA, 22 nt, Human
guggggucacucuggcagcuca

SEQ ID NO: 1996070 - RNA, 21 nt, Human
guggggucacucuggcagcuc

SEQ ID NO: 1996071 - RNA, 20 nt, Human
guggggucacucuggcagcu

SEQ ID NO: 1996072 - RNA, 17 nt, Human
guggggucacucuggca

SEQ ID NO: 1996073 - RNA, 16 nt, Human
aagaugcuucucacug

SEQ ID NO: 1996074 - RNA, 17 nt, Human
aagaugcuucucacugc

SEQ ID NO: 1996075 - RNA, 19 nt, Human
aagaugcuucucacugcca

SEQ ID NO: 1996076 - RNA, 18 nt, Human
aagauggcugugccucug

SEQ ID NO: 1996077 - RNA, 20 nt, Human
aagauggcugugccucugcc

SEQ ID NO: 1996078 - RNA, 21 nt, Human
aagauggcugugccucugccu

SEQ ID NO: 1996079 - RNA, 23 nt, Human
aagauggcugugccucugccugu

SEQ ID NO: 1996080 - RNA, 14 nt, Human
aagaguaggaagac

SEQ ID NO: 1996081 - RNA, 13 nt, Human
aagaguaggaaga

SEQ ID NO: 1996082 - RNA, 18 nt, Human
aagaucgguuaacaaaua

SEQ ID NO: 1996083 - RNA, 19 nt, Human
aagaucgguuaacaaauaa

SEQ ID NO: 1996084 - RNA, 18 nt, Human
aagaucucagugguuaag

SEQ ID NO: 1996085 - RNA, 20 nt, Human
aagaucgguuaacaaauaac

SEQ ID NO: 1996086 - RNA, 21 nt, Human
aagaucgguuaacaaauaaca

SEQ ID NO: 1996087 - RNA, 20 nt, Human
aagccgcuggggccaguugg

SEQ ID NO: 1996088 - RNA, 23 nt, Human
aagcccuuccaugucgccucugc

SEQ ID NO: 1996089 - RNA, 15 nt, Human
aagcccuuccauguc

SEQ ID NO: 1996090 - RNA, 20 nt, Human
aagcccuuccaugucgccuc

SEQ ID NO: 1996091 - RNA, 15 nt, Human
aagccccauuaacug

SEQ ID NO: 1996092 - RNA, 19 nt, Human
aagcccugagcuuucugcu

SEQ ID NO: 1996093 - RNA, 18 nt, Human
aagcccaguucagcuugg

SEQ ID NO: 1996094 - RNA, 19 nt, Human
aagcccaguucagcuuggg

SEQ ID NO: 1996095 - RNA, 13 nt, Human
aagccaagaggca

SEQ ID NO: 1996096 - RNA, 14 nt, Human
aagcccaggagccc

SEQ ID NO: 1996097 - RNA, 15 nt, Human
aagcccaggagccca

SEQ ID NO: 1996098 - RNA, 16 nt, Human
aagcccaggagcccau

SEQ ID NO: 1996099 - RNA, 13 nt, Human
aagcccaggaggg

SEQ ID NO: 1996100 - RNA, 22 nt, Human
aagcccaggaaaggcuccagga

SEQ ID NO: 1996101 - RNA, 19 nt, Human
aagcccaggaaaggcucca

SEQ ID NO: 1996102 - RNA, 18 nt, Human
aagccaagaggcugcagc

SEQ ID NO: 1996103 - RNA, 22 nt, Human
aagccaagaggcugcagccagg

SEQ ID NO: 1996104 - RNA, 17 nt, Human
aagcccaggaaaggcuc

SEQ ID NO: 1996105 - RNA, 14 nt, Human
aagcccaggaaagg

SEQ ID NO: 1996106 - RNA, 22 nt, Human
aagccaaagcuaggccuggcca

SEQ ID NO: 1996107 - RNA, 14 nt, Human
aagccaaaauuaag

SEQ ID NO: 1996108 - RNA, 17 nt, Human
aagccaaaauuaaggug

SEQ ID NO: 1996109 - RNA, 20 nt, Human
aagccaaaauuaagguguuu

SEQ ID NO: 1996110 - RNA, 22 nt, Human
aagccaaaauuaagguguuuga

SEQ ID NO: 1996111 - RNA, 13 nt, Human
aagcauuucaaag

SEQ ID NO: 1996112 - RNA, 17 nt, Human
aagcauuuuguaauaau

SEQ ID NO: 1996113 - RNA, 14 nt, Human
aagcauuuuguaau

SEQ ID NO: 1996114 - RNA, 16 nt, Human
aagcauuuacuuugug

SEQ ID NO: 1996115 - RNA, 17 nt, Human
aagcaucuaaggacaag

SEQ ID NO: 1996116 - RNA, 13 nt, Human
aagcaucuaagga

SEQ ID NO: 1996117 - RNA, 15 nt, Human
aagcaucuaaggaca

SEQ ID NO: 1996118 - RNA, 20 nt, Human
aagcagugcaugcugucccu

SEQ ID NO: 1996119 - RNA, 13 nt, Human
aagcagugcccag

SEQ ID NO: 1996120 - RNA, 14 nt, Human
aagcagugcccagg

SEQ ID NO: 1996121 - RNA, 15 nt, Human
aagcagugcccaggu

SEQ ID NO: 1996122 - RNA, 16 nt, Human
aagcagugcccaggug

SEQ ID NO: 1996123 - RNA, 18 nt, Human
aagcagugcccagguggc

SEQ ID NO: 1996124 - RNA, 15 nt, Human
aagcagugcaugcug

SEQ ID NO: 1996125 - RNA, 14 nt, Human
aagcagugcaugcu

SEQ ID NO: 1996126 - RNA, 13 nt, Human
aagcauauaaaau

SEQ ID NO: 1996127 - RNA, 18 nt, Human
aagcaguggagcccagga

SEQ ID NO: 1996128 - RNA, 12 nt, Human
aagcaguuucaa

SEQ ID NO: 1996129 - RNA, 13 nt, Human
aagcaguuucaau

SEQ ID NO: 1996130 - RNA, 14 nt, Human
aagcaguuucaaua

SEQ ID NO: 1996131 - RNA, 19 nt, Human
aagcaguuucaauaaaguu

SEQ ID NO: 1996132 - RNA, 20 nt, Human
aagcaguuucaauaaaguuu

SEQ ID NO: 1996133 - RNA, 22 nt, Human
aagcaguuucaauaaaguuuga

SEQ ID NO: 1996134 - RNA, 12 nt, Human
aagcagugcaug

SEQ ID NO: 1996135 - RNA, 16 nt, Human
gugugugggagugugu

SEQ ID NO: 1996136 - RNA, 17 nt, Human
gugugugcagagcugaa

SEQ ID NO: 1996137 - RNA, 15 nt, Human
gugugugaugugaca

SEQ ID NO: 1996138 - RNA, 14 nt, Human
gugugugcagagcu

SEQ ID NO: 1996139 - RNA, 21 nt, Human
gugugugcgccuacaggagug

SEQ ID NO: 1996140 - RNA, 18 nt, Human
aagcuccaagcucccagg

SEQ ID NO: 1996141 - RNA, 17 nt, Human
aagcuccaagcucccag

SEQ ID NO: 1996142 - RNA, 19 nt, Human
aagcucagggccuggcuca

SEQ ID NO: 1996143 - RNA, 18 nt, Human
aagcucagggccuggcuc

SEQ ID NO: 1996144 - RNA, 20 nt, Human
aagcucagggccuggcucag

SEQ ID NO: 1996145 - RNA, 17 nt, Human
aagcucagggccuggcu

SEQ ID NO: 1996146 - RNA, 16 nt, Human
aagcucagggccuggc

SEQ ID NO: 1996147 - RNA, 13 nt, Human
aagcucagggccu

SEQ ID NO: 1996148 - RNA, 12 nt, Human
aagcucagggcc

SEQ ID NO: 1996149 - RNA, 15 nt, Human
guucagcuccagcuc

SEQ ID NO: 1996150 - RNA, 13 nt, Human
guucagcuccagc

SEQ ID NO: 1996151 - RNA, 14 nt, Human
guucaagaucaaaa

SEQ ID NO: 1996152 - RNA, 20 nt, Human
guucaagaucaaaaaggcuu

SEQ ID NO: 1996153 - RNA, 15 nt, Human
aagccucaaaacaaa

SEQ ID NO: 1996154 - RNA, 16 nt, Human
aagccucaaaacaaag

SEQ ID NO: 1996155 - RNA, 18 nt, Human
aagccucaaaacaaaggc

SEQ ID NO: 1996156 - RNA, 17 nt, Human
aagccucaaauuugaac

SEQ ID NO: 1996157 - RNA, 21 nt, Human
aagccucaaauuugaacaugu

SEQ ID NO: 1996158 - RNA, 18 nt, Human
aagccuagauguuuuaua

SEQ ID NO: 1996159 - RNA, 12 nt, Human
aagccuaaagau

SEQ ID NO: 1996160 - RNA, 13 nt, Human
aagccuaaagauu

SEQ ID NO: 1996161 - RNA, 22 nt, Human
aagcuagacgagcaggcuucuu

SEQ ID NO: 1996162 - RNA, 20 nt, Human
aagccugaguuugcuuucaa

SEQ ID NO: 1996163 - RNA, 12 nt, Human
aagcuaggccug

SEQ ID NO: 1996164 - RNA, 21 nt, Human
aagcuauucccucaaaucuga

SEQ ID NO: 1996165 - RNA, 21 nt, Human
aagcuaggaaaagaaaucuau

SEQ ID NO: 1996166 - RNA, 23 nt, Human
aagcuaggaaaagaaaucuauag

SEQ ID NO: 1996167 - RNA, 19 nt, Human
aagcuaggaaaagaaaucu

SEQ ID NO: 1996168 - RNA, 20 nt, Human
aagcuaggaaaagaaaucua

SEQ ID NO: 1996169 - RNA, 12 nt, Human
guuauucuuugc

SEQ ID NO: 1996170 - RNA, 13 nt, Human
guuauucuuugca

SEQ ID NO: 1996171 - RNA, 22 nt, Human
guuauucaacagcaagugugaa

SEQ ID NO: 1996172 - RNA, 15 nt, Human
guuauucuuugcacu

SEQ ID NO: 1996173 - RNA, 16 nt, Human
guuauucuuugcacuu

SEQ ID NO: 1996174 - RNA, 23 nt, Human
guuauuuuuauuuauuuaaauuu

SEQ ID NO: 1996175 - RNA, 19 nt, Human
guuauuuuuauaagaaaac

SEQ ID NO: 1996176 - RNA, 20 nt, Human
guuauuuugauguaaagaug

SEQ ID NO: 1996177 - RNA, 19 nt, Human
guuauugagagagaugugu

SEQ ID NO: 1996178 - RNA, 20 nt, Human
guuauugagagagaugugua

SEQ ID NO: 1996179 - RNA, 21 nt, Human
guuauugagagagauguguaa

SEQ ID NO: 1996180 - RNA, 22 nt, Human
guuauugagagagauguguaau

SEQ ID NO: 1996181 - RNA, 16 nt, Human
guucaaaccugugaag

SEQ ID NO: 1996182 - RNA, 13 nt, Human
guucaaagucaug

SEQ ID NO: 1996183 - RNA, 18 nt, Human
guucaaagucaugauguu

SEQ ID NO: 1996184 - RNA, 19 nt, Human
guucaaagucaugauguuu

SEQ ID NO: 1996185 - RNA, 20 nt, Human
guucaaagucaugauguuuu

SEQ ID NO: 1996186 - RNA, 12 nt, Human
guucaaaugugu

SEQ ID NO: 1996187 - RNA, 18 nt, Human
guucaagcgauucuucug

SEQ ID NO: 1996188 - RNA, 13 nt, Human
guucaagaaauga

SEQ ID NO: 1996189 - RNA, 20 nt, Human
guucaagaaaugaagagcug

SEQ ID NO: 1996190 - RNA, 21 nt, Human
guucaaagauauuuugcuuug

SEQ ID NO: 1996191 - RNA, 22 nt, Human
guucaaagauauuuugcuuugu

SEQ ID NO: 1996192 - RNA, 20 nt, Human
guucaaagauauuuugcuuu

SEQ ID NO: 1996193 - RNA, 13 nt, Human
guuacuuuuccuu

SEQ ID NO: 1996194 - RNA, 20 nt, Human
guuacuuuccaauucuccuu

SEQ ID NO: 1996195 - RNA, 21 nt, Human
guuacuuuccaauucuccuuu

SEQ ID NO: 1996196 - RNA, 14 nt, Human
guuacuuuuccuug

SEQ ID NO: 1996197 - RNA, 17 nt, Human
guuacuuuuccuugcau

SEQ ID NO: 1996198 - RNA, 12 nt, Human
guuaagcaucua

SEQ ID NO: 1996199 - RNA, 12 nt, Human
guuaagagaaau

SEQ ID NO: 1996200 - RNA, 11 nt, Human
guuaagagaaa

SEQ ID NO: 1996201 - RNA, 14 nt, Human
guuaagauuccuaa

SEQ ID NO: 1996202 - RNA, 18 nt, Human
guuaagagaaaugagcuu

SEQ ID NO: 1996203 - RNA, 20 nt, Human
guuaggcauugugggaaggg

SEQ ID NO: 1996204 - RNA, 19 nt, Human
guuaggcauugugggaagg

SEQ ID NO: 1996205 - RNA, 14 nt, Human
guuaggcaguauaa

SEQ ID NO: 1996206 - RNA, 19 nt, Human
guuaggccaaagacaaaua

SEQ ID NO: 1996207 - RNA, 22 nt, Human
guuaggccaaagacaaauagua

SEQ ID NO: 1996208 - RNA, 15 nt, Human
guuagaauguaaggu

SEQ ID NO: 1996209 - RNA, 19 nt, Human
uaaaaaucucaaauuucua

SEQ ID NO: 1996210 - RNA, 20 nt, Human
uaaaaaucucaaauuucuaa

SEQ ID NO: 1996211 - RNA, 21 nt, Human
uaaaaaucucaaauuucuaaa

SEQ ID NO: 1996212 - RNA, 12 nt, Human
uaaaagaauugu

SEQ ID NO: 1996213 - RNA, 22 nt, Human
uaaaacuugauguguuaucucu

SEQ ID NO: 1996214 - RNA, 20 nt, Human
uaaaacuugauguguuaucu

SEQ ID NO: 1996215 - RNA, 15 nt, Human
guuuuucuucucccu

SEQ ID NO: 1996216 - RNA, 16 nt, Human
guuuuucuuaauauau

SEQ ID NO: 1996217 - RNA, 15 nt, Human
uaaaaaguggaaaaa

SEQ ID NO: 1996218 - RNA, 20 nt, Human
guuuuugaaggcagaaagca

SEQ ID NO: 1996219 - RNA, 19 nt, Human
guuuuugaaggcagaaagc

SEQ ID NO: 1996220 - RNA, 19 nt, Human
uaaaaauaaaaaacacugg

SEQ ID NO: 1996221 - RNA, 18 nt, Human
uaaaaauaaaaaacacug

SEQ ID NO: 1996222 - RNA, 19 nt, Human
guuuuugauagcauuguaa

SEQ ID NO: 1996223 - RNA, 14 nt, Human
uaaaaaguguuuaa

SEQ ID NO: 1996224 - RNA, 11 nt, Human
uaaaaauaacc

SEQ ID NO: 1996225 - RNA, 16 nt, Human
uaaaaauaaccuugca

SEQ ID NO: 1996226 - RNA, 13 nt, Human
uaaaaauaacugu

SEQ ID NO: 1996227 - RNA, 17 nt, Human
uaaaaauaacuguaauu

SEQ ID NO: 1996228 - RNA, 15 nt, Human
uaaaaauaacuguaa

SEQ ID NO: 1996229 - RNA, 16 nt, Human
uaaaaauaacuguaau

SEQ ID NO: 1996230 - RNA, 12 nt, Human
uaaaaauaaagc

SEQ ID NO: 1996231 - RNA, 19 nt, Human
uaaaaauaaagcacaaacc

SEQ ID NO: 1996232 - RNA, 21 nt, Human
uaaaaauaaaaaacacuggga

SEQ ID NO: 1996233 - RNA, 17 nt, Human
uaaaaaguguuuaaaug

SEQ ID NO: 1996234 - RNA, 16 nt, Human
uaaaaaucucaaauuu

SEQ ID NO: 1996235 - RNA, 17 nt, Human
uaaaaaucucaaauuuc

SEQ ID NO: 1996236 - RNA, 15 nt, Human
uaaaaaucucaaauu

SEQ ID NO: 1996237 - RNA, 12 nt, Human
uaaaaguucuuu

SEQ ID NO: 1996238 - RNA, 20 nt, Human
uaaaagacagugaaagaaaa

SEQ ID NO: 1996239 - RNA, 22 nt, Human
uaaaauaccagccaguaaaugg

SEQ ID NO: 1996240 - RNA, 15 nt, Human
uaaaauaauuuugua

SEQ ID NO: 1996241 - RNA, 16 nt, Human
uaaaauaauuuuguaa

SEQ ID NO: 1996242 - RNA, 13 nt, Human
uaaaauaauuuug

SEQ ID NO: 1996243 - RNA, 14 nt, Human
uaaaauaauuuugu

SEQ ID NO: 1996244 - RNA, 21 nt, Human
uaaaauaauuuuguaauguau

SEQ ID NO: 1996245 - RNA, 12 nt, Human
uaaaauacugua

SEQ ID NO: 1996246 - RNA, 14 nt, Human
uaaaauacuguaga

SEQ ID NO: 1996247 - RNA, 16 nt, Human
uaaaauacuguagaua

SEQ ID NO: 1996248 - RNA, 17 nt, Human
uaaaauacuguagauaa

SEQ ID NO: 1996249 - RNA, 20 nt, Human
uaaaauacuguagauaauua

SEQ ID NO: 1996250 - RNA, 21 nt, Human
uaaaauacuguagauaauuaa

SEQ ID NO: 1996251 - RNA, 13 nt, Human
uaaaauacuucuu

SEQ ID NO: 1996252 - RNA, 22 nt, Human
uaaaauacuucuuuuuacaaug

SEQ ID NO: 1996253 - RNA, 20 nt, Human
aagugauucuccugccucag

SEQ ID NO: 1996254 - RNA, 21 nt, Human
aagugauucucaugccucagc

SEQ ID NO: 1996255 - RNA, 19 nt, Human
aagugauucuccugccuca

SEQ ID NO: 1996256 - RNA, 15 nt, Human
aagugauucuccugc

SEQ ID NO: 1996257 - RNA, 16 nt, Human
aagugauucuccugcc

SEQ ID NO: 1996258 - RNA, 17 nt, Human
aagugauucuccugccu

SEQ ID NO: 1996259 - RNA, 18 nt, Human
aagugauucuccugccuc

SEQ ID NO: 1996260 - RNA, 16 nt, Human
aagugaggaugaaaaa

SEQ ID NO: 1996261 - RNA, 18 nt, Human
aagugaggaaaucaaagu

SEQ ID NO: 1996262 - RNA, 21 nt, Human
aagugaggaaaucaaagugcu

SEQ ID NO: 1996263 - RNA, 20 nt, Human
aagugauucucaugccucag

SEQ ID NO: 1996264 - RNA, 14 nt, Human
uaaaauauuuauga

SEQ ID NO: 1996265 - RNA, 15 nt, Human
uaaaauauuuaugaa

SEQ ID NO: 1996266 - RNA, 16 nt, Human
uaaaauauuuaugaag

SEQ ID NO: 1996267 - RNA, 17 nt, Human
uaaaauauuuaugaaga

SEQ ID NO: 1996268 - RNA, 18 nt, Human
uaaaauauuuaugaagaa

SEQ ID NO: 1996269 - RNA, 20 nt, Human
uaaaauauuuaugaagaaaa

SEQ ID NO: 1996270 - RNA, 13 nt, Human
uaaaauaugcacu

SEQ ID NO: 1996271 - RNA, 14 nt, Human
uaaaauaugcacua

SEQ ID NO: 1996272 - RNA, 19 nt, Human
uaaaauaugcacuaagucu

SEQ ID NO: 1996273 - RNA, 23 nt, Human
uaaaauaugcacuaagucucuuu

SEQ ID NO: 1996274 - RNA, 13 nt, Human
uaaaauauuccug

SEQ ID NO: 1996275 - RNA, 22 nt, Human
uaaaauauuccugcauuuguga

SEQ ID NO: 1996276 - RNA, 13 nt, Human
aaguacacuguuu

SEQ ID NO: 1996277 - RNA, 18 nt, Human
aaguacacuguuucaaac

SEQ ID NO: 1996278 - RNA, 14 nt, Human
aaguaauauuuauu

SEQ ID NO: 1996279 - RNA, 22 nt, Human
aaguaauauuuauuaaauuuuu

SEQ ID NO: 1996280 - RNA, 22 nt, Human
guuuugcacucuuguuucuccc

SEQ ID NO: 1996281 - RNA, 23 nt, Human
guuuuggauuuggagagaaauau

SEQ ID NO: 1996282 - RNA, 15 nt, Human
guuuugcuuccccuc

SEQ ID NO: 1996283 - RNA, 15 nt, Human
guuucugccgcagcc

SEQ ID NO: 1996284 - RNA, 13 nt, Human
guuuugcacucuu

SEQ ID NO: 1996285 - RNA, 14 nt, Human
guuucugccgcagc

SEQ ID NO: 1996286 - RNA, 16 nt, Human
guuuugccauguuggc

SEQ ID NO: 1996287 - RNA, 20 nt, Human
guuuugccauguuggccagg

SEQ ID NO: 1996288 - RNA, 21 nt, Human
guuuugccauguuggccaggc

SEQ ID NO: 1996289 - RNA, 22 nt, Human
guuuugccauguuggccaggcu

SEQ ID NO: 1996290 - RNA, 23 nt, Human
aaguacacuguuucaaacuuuac

SEQ ID NO: 1996291 - RNA, 23 nt, Human
aaguacacugaauuuuuaugugu

SEQ ID NO: 1996292 - RNA, 19 nt, Human
aaguacacuguuucaaacu

SEQ ID NO: 1996293 - RNA, 20 nt, Human
aaguacacuguuucaaacuu

SEQ ID NO: 1996294 - RNA, 21 nt, Human
aaguacauuuuuugaaaugcu

SEQ ID NO: 1996295 - RNA, 15 nt, Human
aaguacagguacuuu

SEQ ID NO: 1996296 - RNA, 18 nt, Human
aaguacagguacuuuguc

SEQ ID NO: 1996297 - RNA, 16 nt, Human
aaguacauuuuuugaa

SEQ ID NO: 1996298 - RNA, 17 nt, Human
aaguacauuuuuugaaa

SEQ ID NO: 1996299 - RNA, 20 nt, Human
aaguauuuaagccuaaagau

SEQ ID NO: 1996300 - RNA, 21 nt, Human
aaguauuuaagccuaaagauu

SEQ ID NO: 1996301 - RNA, 17 nt, Human
aaguauuaauucucuuu

SEQ ID NO: 1996302 - RNA, 12 nt, Human
aagugaaaacuu

SEQ ID NO: 1996303 - RNA, 20 nt, Human
aagucuuuuaaaaaguauug

SEQ ID NO: 1996304 - RNA, 21 nt, Human
aagugaaaaaggaggaagaga

SEQ ID NO: 1996305 - RNA, 12 nt, Human
aagugaaaauau

SEQ ID NO: 1996306 - RNA, 14 nt, Human
aagugaaaauauag

SEQ ID NO: 1996307 - RNA, 10 nt, Human
aagugaaauu

SEQ ID NO: 1996308 - RNA, 11 nt, Human
aagugaaauuu

SEQ ID NO: 1996309 - RNA, 12 nt, Human
aagugaaauuua

SEQ ID NO: 1996310 - RNA, 15 nt, Human
aagugaaauuuauug

SEQ ID NO: 1996311 - RNA, 20 nt, Human
aagugaaauuuauugaggaa

SEQ ID NO: 1996312 - RNA, 17 nt, Human
aagugaagacaaugacu

SEQ ID NO: 1996313 - RNA, 19 nt, Human
aagugaagacaaugacuua

SEQ ID NO: 1996314 - RNA, 15 nt, Human
guuuuucauaaagca

SEQ ID NO: 1996315 - RNA, 15 nt, Human
aagugagagcugggu

SEQ ID NO: 1996316 - RNA, 12 nt, Human
aagugagagagg

SEQ ID NO: 1996317 - RNA, 14 nt, Human
aagugagagcuggg

SEQ ID NO: 1996318 - RNA, 21 nt, Human
aagucaugcguuuaaucacau

SEQ ID NO: 1996319 - RNA, 21 nt, Human
aagucaugcuccccugugcca

SEQ ID NO: 1996320 - RNA, 15 nt, Human
aagucaugcuccccu

SEQ ID NO: 1996321 - RNA, 19 nt, Human
aagucaugcuccccugugc

SEQ ID NO: 1996322 - RNA, 22 nt, Human
aagucuuauauauuguagauaa

SEQ ID NO: 1996323 - RNA, 16 nt, Human
aagucuuucacauuua

SEQ ID NO: 1996324 - RNA, 17 nt, Human
aagucuuuuaaaaagua

SEQ ID NO: 1996325 - RNA, 19 nt, Human
aagucuuuuaaaaaguauu

SEQ ID NO: 1996326 - RNA, 11 nt, Human
aagucuuugcu

SEQ ID NO: 1996327 - RNA, 12 nt, Human
aagucuuuuaaa

SEQ ID NO: 1996328 - RNA, 16 nt, Human
aagucuuuuaaaaagu

SEQ ID NO: 1996329 - RNA, 17 nt, Human
aagucuugccuauauuu

SEQ ID NO: 1996330 - RNA, 13 nt, Human
aagucuucuauuu

SEQ ID NO: 1996331 - RNA, 17 nt, Human
aagucuucuauuuauuu

SEQ ID NO: 1996332 - RNA, 13 nt, Human
aagucuucaugaa

SEQ ID NO: 1996333 - RNA, 14 nt, Human
aagucuucaugaaa

SEQ ID NO: 1996334 - RNA, 16 nt, Human
aagucuucaugaaaug

SEQ ID NO: 1996335 - RNA, 18 nt, Human
aagucuucaugaaaugcu

SEQ ID NO: 1996336 - RNA, 19 nt, Human
aagucuucaugaaaugcua

SEQ ID NO: 1996337 - RNA, 22 nt, Human
aagucuucaugaaaugcuaugu

SEQ ID NO: 1996338 - RNA, 22 nt, Human
guuucuaugacacaugcaaggu

SEQ ID NO: 1996339 - RNA, 20 nt, Human
aaguaagggaagcagaagga

SEQ ID NO: 1996340 - RNA, 16 nt, Human
aaguaaggaauuuuau

SEQ ID NO: 1996341 - RNA, 13 nt, Human
aaguaagcaaaga

SEQ ID NO: 1996342 - RNA, 18 nt, Human
aagguauuuaauagguuu

SEQ ID NO: 1996343 - RNA, 14 nt, Human
aaggucaccucacu

SEQ ID NO: 1996344 - RNA, 15 nt, Human
aaggucaccucacuc

SEQ ID NO: 1996345 - RNA, 17 nt, Human
aaggucaccucacucag

SEQ ID NO: 1996346 - RNA, 18 nt, Human
aaggucaccucacucagc

SEQ ID NO: 1996347 - RNA, 19 nt, Human
aaggucaccucacucagca

SEQ ID NO: 1996348 - RNA, 22 nt, Human
aaggucaccucacucagcacca

SEQ ID NO: 1996349 - RNA, 12 nt, Human
aaggucauuuuu

SEQ ID NO: 1996350 - RNA, 14 nt, Human
aaggucauuuccau

SEQ ID NO: 1996351 - RNA, 20 nt, Human
aaggucauuuccauguaugc

SEQ ID NO: 1996352 - RNA, 18 nt, Human
guuucugaaagggacgcu

SEQ ID NO: 1996353 - RNA, 13 nt, Human
guuucucuucucc

SEQ ID NO: 1996354 - RNA, 21 nt, Human
guuucucuucuccccuuccau

SEQ ID NO: 1996355 - RNA, 23 nt, Human
guuucuauuuucucugauacuuu

SEQ ID NO: 1996356 - RNA, 14 nt, Human
aaguaagucucaag

SEQ ID NO: 1996357 - RNA, 13 nt, Human
guuucuauuuucu

SEQ ID NO: 1996358 - RNA, 19 nt, Human
guuucuauguguagggcgg

SEQ ID NO: 1996359 - RNA, 20 nt, Human
aagguagaaauaucugaaaa

SEQ ID NO: 1996360 - RNA, 13 nt, Human
aagguagaaugac

SEQ ID NO: 1996361 - RNA, 17 nt, Human
aagguagaaugaccuug

SEQ ID NO: 1996362 - RNA, 19 nt, Human
aagguagaaugaccuugua

SEQ ID NO: 1996363 - RNA, 18 nt, Human
aagguacuuucauauuuu

SEQ ID NO: 1996364 - RNA, 19 nt, Human
aagguacuuucauauuuua

SEQ ID NO: 1996365 - RNA, 22 nt, Human
aagguacuuucauauuuuaaac

SEQ ID NO: 1996366 - RNA, 23 nt, Human
aagggucuccgaaaugcugucuu

SEQ ID NO: 1996367 - RNA, 24 nt, Human
aagggucuccgaaaugcugucuuu

SEQ ID NO: 1996368 - RNA, 22 nt, Human
aaggggcccaaauucuuucagu

SEQ ID NO: 1996369 - RNA, 23 nt, Human
aaggcucugagcaaauguggcuc

SEQ ID NO: 1996370 - RNA, 15 nt, Human
aaggcuccaggagca

SEQ ID NO: 1996371 - RNA, 18 nt, Human
aaggcuccaggagcagcc

SEQ ID NO: 1996372 - RNA, 16 nt, Human
aaggcuccaggagcag

SEQ ID NO: 1996373 - RNA, 14 nt, Human
guuucaaacuuuac

SEQ ID NO: 1996374 - RNA, 16 nt, Human
guuucaaacuuuacua

SEQ ID NO: 1996375 - RNA, 15 nt, Human
guuuauuuuaaaaca

SEQ ID NO: 1996376 - RNA, 16 nt, Human
guuuauuuuaaaacaa

SEQ ID NO: 1996377 - RNA, 13 nt, Human
guuucaaacuuua

SEQ ID NO: 1996378 - RNA, 18 nt, Human
aaggcucgagcaugccug

SEQ ID NO: 1996379 - RNA, 16 nt, Human
aaggcucgagcaugcc

SEQ ID NO: 1996380 - RNA, 22 nt, Human
aaggcuccaggagcagccacau

SEQ ID NO: 1996381 - RNA, 19 nt, Human
aaggcuccaggagcagcca

SEQ ID NO: 1996382 - RNA, 20 nt, Human
aaggcucgagcaugccugga

SEQ ID NO: 1996383 - RNA, 19 nt, Human
aaggcucgagcaugccugg

SEQ ID NO: 1996384 - RNA, 22 nt, Human
aaggcucgagcaugccuggaug

SEQ ID NO: 1996385 - RNA, 15 nt, Human
aaggcuccugccccc

SEQ ID NO: 1996386 - RNA, 17 nt, Human
guugggccaggagccuc

SEQ ID NO: 1996387 - RNA, 15 nt, Human
guugggccaggagcc

SEQ ID NO: 1996388 - RNA, 13 nt, Human
guugggcuggugu

SEQ ID NO: 1996389 - RNA, 15 nt, Human
guugggcugguguca

SEQ ID NO: 1996390 - RNA, 13 nt, Human
guuuacaguguuc

SEQ ID NO: 1996391 - RNA, 15 nt, Human
guuuacaguguuccg

SEQ ID NO: 1996392 - RNA, 13 nt, Human
guuuauugucaaa

SEQ ID NO: 1996393 - RNA, 21 nt, Human
guuuauuggugaguuaggaac

SEQ ID NO: 1996394 - RNA, 20 nt, Human
guuuaaugguaguuuuacag

SEQ ID NO: 1996395 - RNA, 12 nt, Human
guuuaaugguag

SEQ ID NO: 1996396 - RNA, 17 nt, Human
guuuaaugguaguuuua

SEQ ID NO: 1996397 - RNA, 22 nt, Human
aaggaaccaaagcgaauuuuaa

SEQ ID NO: 1996398 - RNA, 23 nt, Human
aaggaaccaaagcgaauuuuaaa

SEQ ID NO: 1996399 - RNA, 17 nt, Human
aaggaacagcaauggug

SEQ ID NO: 1996400 - RNA, 12 nt, Human
aaggaaccuucc

SEQ ID NO: 1996401 - RNA, 13 nt, Human
aaggaaccuuccu

SEQ ID NO: 1996402 - RNA, 21 nt, Human
aaggaaccuuccuuccugcuu

SEQ ID NO: 1996403 - RNA, 23 nt, Human
aaggaaccuuccuuccugcuuga

SEQ ID NO: 1996404 - RNA, 22 nt, Human
aaggaaauaccaguucugggca

SEQ ID NO: 1996405 - RNA, 15 nt, Human
aaggaaagagggagg

SEQ ID NO: 1996406 - RNA, 14 nt, Human
aagcuccaucucca

SEQ ID NO: 1996407 - RNA, 20 nt, Human
aagcuccaucuccacuccag

SEQ ID NO: 1996408 - RNA, 17 nt, Human
aaggaauaccugucccc

SEQ ID NO: 1996409 - RNA, 21 nt, Human
aaggaauaaauugcuccuuga

SEQ ID NO: 1996410 - RNA, 16 nt, Human
aaggaagcacaugccu

SEQ ID NO: 1996411 - RNA, 13 nt, Human
aaggaagcacaug

SEQ ID NO: 1996412 - RNA, 15 nt, Human
aaggaagacuucauc

SEQ ID NO: 1996413 - RNA, 14 nt, Human
aaggaagacuucau

SEQ ID NO: 1996414 - RNA, 11 nt, Human
aaggaagaaau

SEQ ID NO: 1996415 - RNA, 17 nt, Human
aaggaagaaauuaacuu

SEQ ID NO: 1996416 - RNA, 23 nt, Human
aaggaacuaggucaaaaaucugu

SEQ ID NO: 1996417 - RNA, 12 nt, Human
aaggaggccacc

SEQ ID NO: 1996418 - RNA, 14 nt, Human
aaggaggccaccuc

SEQ ID NO: 1996419 - RNA, 15 nt, Human
aaggaggccaccucc

SEQ ID NO: 1996420 - RNA, 14 nt, Human
aaggaggcuccagg

SEQ ID NO: 1996421 - RNA, 16 nt, Human
aaggaggccaccuccu

SEQ ID NO: 1996422 - RNA, 19 nt, Human
aaggaggccaccuccuaaa

SEQ ID NO: 1996423 - RNA, 17 nt, Human
aaggaggcuccaggcag

SEQ ID NO: 1996424 - RNA, 18 nt, Human
aaggaggcuccaggcagc

SEQ ID NO: 1996425 - RNA, 19 nt, Human
aaggaggcuccaggcagca

SEQ ID NO: 1996426 - RNA, 18 nt, Human
aaggaggaagagaaaaaa

SEQ ID NO: 1996427 - RNA, 12 nt, Human
aaggagggugag

SEQ ID NO: 1996428 - RNA, 20 nt, Human
aaggaggggauagagagaga

SEQ ID NO: 1996429 - RNA, 22 nt, Human
aaggagcucacuguggugucug

SEQ ID NO: 1996430 - RNA, 14 nt, Human
aaggagauuuacaa

SEQ ID NO: 1996431 - RNA, 11 nt, Human
aaggagagcua

SEQ ID NO: 1996432 - RNA, 18 nt, Human
aaggaauaccuguccccc

SEQ ID NO: 1996433 - RNA, 20 nt, Human
aaggaauagaucuaugauug

SEQ ID NO: 1996434 - RNA, 23 nt, Human
aaggaguuucuuuagcugacaga

SEQ ID NO: 1996435 - RNA, 15 nt, Human
aaggauacaggcugg

SEQ ID NO: 1996436 - RNA, 12 nt, Human
aaggcaugaagg

SEQ ID NO: 1996437 - RNA, 13 nt, Human
aaggauacaaaag

SEQ ID NO: 1996438 - RNA, 21 nt, Human
aaggauacaaaagcaugugag

SEQ ID NO: 1996439 - RNA, 21 nt, Human
aaggcccacgagcuuguucuu

SEQ ID NO: 1996440 - RNA, 21 nt, Human
aaggcccagagagaagagccc

SEQ ID NO: 1996441 - RNA, 22 nt, Human
aaggcccuaucuguuuacagug

SEQ ID NO: 1996442 - RNA, 23 nt, Human
aaggcccuguuagugcacugauu

SEQ ID NO: 1996443 - RNA, 16 nt, Human
aaggccaaaggaagca

SEQ ID NO: 1996444 - RNA, 15 nt, Human
aaggcauuucccacc

SEQ ID NO: 1996445 - RNA, 23 nt, Human
guugcccaggcaggucuugaacu

SEQ ID NO: 1996446 - RNA, 22 nt, Human
aaggccuaauucuaugccuguc

SEQ ID NO: 1996447 - RNA, 12 nt, Human
guugcccaggcu

SEQ ID NO: 1996448 - RNA, 13 nt, Human
guugcccaggcug

SEQ ID NO: 1996449 - RNA, 23 nt, Human
guugccuauaagccaaaauuaag

SEQ ID NO: 1996450 - RNA, 17 nt, Human
guuggaaaauaucuuug

SEQ ID NO: 1996451 - RNA, 14 nt, Human
guuggaaacacuaa

SEQ ID NO: 1996452 - RNA, 15 nt, Human
guuggaaacacuaaa

SEQ ID NO: 1996453 - RNA, 16 nt, Human
guuggaaacacuaaau

SEQ ID NO: 1996454 - RNA, 18 nt, Human
guuggaaacacuaaaugu

SEQ ID NO: 1996455 - RNA, 19 nt, Human
guuggaaacacuaaauguu

SEQ ID NO: 1996456 - RNA, 20 nt, Human
guuggaaacacuaaauguua

SEQ ID NO: 1996457 - RNA, 22 nt, Human
guuggaaacacuaaauguuaaa

SEQ ID NO: 1996458 - RNA, 15 nt, Human
guuggaagaggaaca

SEQ ID NO: 1996459 - RNA, 23 nt, Human
guuggaaacacuaaauguuaaag

SEQ ID NO: 1996460 - RNA, 18 nt, Human
gucccccuuccauggacu

SEQ ID NO: 1996461 - RNA, 16 nt, Human
gucccccuuccaugga

SEQ ID NO: 1996462 - RNA, 18 nt, Human
gucccccugacaacacuc

SEQ ID NO: 1996463 - RNA, 14 nt, Human
gucccccuuccaug

SEQ ID NO: 1996464 - RNA, 23 nt, Human
gucccuuucgacuugcauuuuug

SEQ ID NO: 1996465 - RNA, 12 nt, Human
aacagaaaugua

SEQ ID NO: 1996466 - RNA, 13 nt, Human
aacagaaauguac

SEQ ID NO: 1996467 - RNA, 14 nt, Human
aacagaaauguaca

SEQ ID NO: 1996468 - RNA, 15 nt, Human
aacagaaauguacag

SEQ ID NO: 1996469 - RNA, 16 nt, Human
guccuacccacccucc

SEQ ID NO: 1996470 - RNA, 15 nt, Human
guccuacccacccuc

SEQ ID NO: 1996471 - RNA, 15 nt, Human
gucccuuucuucucc

SEQ ID NO: 1996472 - RNA, 20 nt, Human
gucccuuucuucucccccau

SEQ ID NO: 1996473 - RNA, 12 nt, Human
guccuacucugu

SEQ ID NO: 1996474 - RNA, 16 nt, Human
aacagggauugauuuu

SEQ ID NO: 1996475 - RNA, 17 nt, Human
aacagggauugauuuua

SEQ ID NO: 1996476 - RNA, 19 nt, Human
aacagggauugauuuuaaa

SEQ ID NO: 1996477 - RNA, 21 nt, Human
aacagggauugauuuuaaaau

SEQ ID NO: 1996478 - RNA, 22 nt, Human
aacagggauugauuuuaaaaug

SEQ ID NO: 1996479 - RNA, 23 nt, Human
aacagggucucuagugcugugaa

SEQ ID NO: 1996480 - RNA, 20 nt, Human
aacagggucucuagugcugu

SEQ ID NO: 1996481 - RNA, 22 nt, Human
aacagggucucuagugcuguga

SEQ ID NO: 1996482 - RNA, 13 nt, Human
aacagggucucua

SEQ ID NO: 1996483 - RNA, 18 nt, Human
aacagggucucuagugcu

SEQ ID NO: 1996484 - RNA, 23 nt, Human
aacagugcaccugggacagggag

SEQ ID NO: 1996485 - RNA, 15 nt, Human
aacagugauuaccag

SEQ ID NO: 1996486 - RNA, 22 nt, Human
aacagugauuaccagggacuga

SEQ ID NO: 1996487 - RNA, 23 nt, Human
aacagaacucgguguccccacca

SEQ ID NO: 1996488 - RNA, 16 nt, Human
aacagauaaauaguuu

SEQ ID NO: 1996489 - RNA, 21 nt, Human
aacacaaauuaugcuaagaau

SEQ ID NO: 1996490 - RNA, 20 nt, Human
gucauuuuguguugaagagc

SEQ ID NO: 1996491 - RNA, 18 nt, Human
gucauuuuguguugaaga

SEQ ID NO: 1996492 - RNA, 17 nt, Human
gucauuuuggucuaagg

SEQ ID NO: 1996493 - RNA, 13 nt, Human
gucauuuucauua

SEQ ID NO: 1996494 - RNA, 19 nt, Human
gucauuuugcagaggcuau

SEQ ID NO: 1996495 - RNA, 19 nt, Human
gucauuuuuuuuaagaaaa

SEQ ID NO: 1996496 - RNA, 21 nt, Human
gucauuuuuuuuaagaaaaag

SEQ ID NO: 1996497 - RNA, 18 nt, Human
guccaagaagcccaggaa

SEQ ID NO: 1996498 - RNA, 17 nt, Human
guccaagaagcccagga

SEQ ID NO: 1996499 - RNA, 20 nt, Human
guccaagaagcccaggaaag

SEQ ID NO: 1996500 - RNA, 16 nt, Human
guccaagaagcccagg

SEQ ID NO: 1996501 - RNA, 15 nt, Human
guccaagaagcccag

SEQ ID NO: 1996502 - RNA, 13 nt, Human
guccaagaagccc

SEQ ID NO: 1996503 - RNA, 21 nt, Human
gucccaccccacacacgccag

SEQ ID NO: 1996504 - RNA, 16 nt, Human
guccauagcuguggug

SEQ ID NO: 1996505 - RNA, 17 nt, Human
guccauaauguucugcu

SEQ ID NO: 1996506 - RNA, 13 nt, Human
guccauagcugug

SEQ ID NO: 1996507 - RNA, 14 nt, Human
guccauagagagca

SEQ ID NO: 1996508 - RNA, 13 nt, Human
guccauagagagc

SEQ ID NO: 1996509 - RNA, 14 nt, Human
gucccaccuuggcu

SEQ ID NO: 1996510 - RNA, 15 nt, Human
gucccaccuuggcug

SEQ ID NO: 1996511 - RNA, 16 nt, Human
gucccaccuuggcugc

SEQ ID NO: 1996512 - RNA, 18 nt, Human
aaauuuugauguuuuaag

SEQ ID NO: 1996513 - RNA, 23 nt, Human
aaauuuugauguuuuaaggaugc

SEQ ID NO: 1996514 - RNA, 18 nt, Human
aaauuuuguaagggagca

SEQ ID NO: 1996515 - RNA, 22 nt, Human
aaauuuuaggcaaguuuucccu

SEQ ID NO: 1996516 - RNA, 13 nt, Human
aaauuuugaaaag

SEQ ID NO: 1996517 - RNA, 14 nt, Human
aaauuuugaaaagu

SEQ ID NO: 1996518 - RNA, 17 nt, Human
aaauuuugaaaaguaau

SEQ ID NO: 1996519 - RNA, 18 nt, Human
aaauuuugaaaaguaaua

SEQ ID NO: 1996520 - RNA, 21 nt, Human
aaauuuugaaaaguaauauuu

SEQ ID NO: 1996521 - RNA, 16 nt, Human
aacaaggcaaggcugu

SEQ ID NO: 1996522 - RNA, 15 nt, Human
aacaaggcaaggcug

SEQ ID NO: 1996523 - RNA, 12 nt, Human
aaauuuuuuugu

SEQ ID NO: 1996524 - RNA, 19 nt, Human
aaauuuuuuuguaugaaaa

SEQ ID NO: 1996525 - RNA, 13 nt, Human
aaauuuuuuugua

SEQ ID NO: 1996526 - RNA, 14 nt, Human
aaauuuuuuuguau

SEQ ID NO: 1996527 - RNA, 17 nt, Human
aaauuuuuuuguaugaa

SEQ ID NO: 1996528 - RNA, 18 nt, Human
aaauuuuuuuguaugaaa

SEQ ID NO: 1996529 - RNA, 20 nt, Human
aaauuuuuuuguaugaaaac

SEQ ID NO: 1996530 - RNA, 20 nt, Human
aacaauucaaagaaucaccu

SEQ ID NO: 1996531 - RNA, 23 nt, Human
aacaauucucccgggacucugca

SEQ ID NO: 1996532 - RNA, 22 nt, Human
aacaauucucccgggacucugc

SEQ ID NO: 1996533 - RNA, 15 nt, Human
aacaauaaagcaaua

SEQ ID NO: 1996534 - RNA, 21 nt, Human
aacaaggcaaggcugucaauu

SEQ ID NO: 1996535 - RNA, 18 nt, Human
aacaaggcaaggcuguca

SEQ ID NO: 1996536 - RNA, 16 nt, Human
aacaagcauauaaaau

SEQ ID NO: 1996537 - RNA, 17 nt, Human
aacaagcauauaaaaug

SEQ ID NO: 1996538 - RNA, 14 nt, Human
aacaaguugagcua

SEQ ID NO: 1996539 - RNA, 17 nt, Human
aacaaguugagcuauga

SEQ ID NO: 1996540 - RNA, 21 nt, Human
aacaaguugagcuaugacuua

SEQ ID NO: 1996541 - RNA, 22 nt, Human
aacaaguugagcuaugacuuaa

SEQ ID NO: 1996542 - RNA, 12 nt, Human
aacaauaaaaga

SEQ ID NO: 1996543 - RNA, 14 nt, Human
gucaggccgggcag

SEQ ID NO: 1996544 - RNA, 15 nt, Human
gucaggccgggcaga

SEQ ID NO: 1996545 - RNA, 16 nt, Human
gucaggccgggcagag

SEQ ID NO: 1996546 - RNA, 17 nt, Human
gucaggccgggcagagc

SEQ ID NO: 1996547 - RNA, 19 nt, Human
gucaggccgggcagagcac

SEQ ID NO: 1996548 - RNA, 22 nt, Human
gucaggccgggcagagcacagc

SEQ ID NO: 1996549 - RNA, 20 nt, Human
gucaggcuaauguuggcaga

SEQ ID NO: 1996550 - RNA, 14 nt, Human
gucaggcucucugg

SEQ ID NO: 1996551 - RNA, 16 nt, Human
gucaggcucucugggc

SEQ ID NO: 1996552 - RNA, 19 nt, Human
gucaggcucucugggcuga

SEQ ID NO: 1996553 - RNA, 20 nt, Human
gucaggcucucugggcugac

SEQ ID NO: 1996554 - RNA, 13 nt, Human
gucagaauagaaa

SEQ ID NO: 1996555 - RNA, 13 nt, Human
gucacagccaggc

SEQ ID NO: 1996556 - RNA, 23 nt, Human
gucagaaguuucugccgcagccc

SEQ ID NO: 1996557 - RNA, 17 nt, Human
gucagaauagaaauuag

SEQ ID NO: 1996558 - RNA, 21 nt, Human
gucacacaguauuacuucugc

SEQ ID NO: 1996559 - RNA, 12 nt, Human
gucacagccagg

SEQ ID NO: 1996560 - RNA, 22 nt, Human
gucacacaguauuacuucugcu

SEQ ID NO: 1996561 - RNA, 17 nt, Human
gucaguuuauguuuugg

SEQ ID NO: 1996562 - RNA, 18 nt, Human
aaauuuguuauaaugaau

SEQ ID NO: 1996563 - RNA, 19 nt, Human
aaauuuguuuaaaguauac

SEQ ID NO: 1996564 - RNA, 16 nt, Human
aaauuuuaagcuagga

SEQ ID NO: 1996565 - RNA, 17 nt, Human
gucaguauguggaagug

SEQ ID NO: 1996566 - RNA, 21 nt, Human
gucaguauguggaaguguggg

SEQ ID NO: 1996567 - RNA, 14 nt, Human
gucaguauccaggc

SEQ ID NO: 1996568 - RNA, 16 nt, Human
gucaguauccaggcuu

SEQ ID NO: 1996569 - RNA, 13 nt, Human
gucaguuguauca

SEQ ID NO: 1996570 - RNA, 16 nt, Human
gucaguuguuauuuau

SEQ ID NO: 1996571 - RNA, 15 nt, Human
gucagugugacugau

SEQ ID NO: 1996572 - RNA, 17 nt, Human
gucaguuguuauuuauu

SEQ ID NO: 1996573 - RNA, 18 nt, Human
gucaguuguuauuuauug

SEQ ID NO: 1996574 - RNA, 21 nt, Human
gucaguuguuauuuauugaaa

SEQ ID NO: 1996575 - RNA, 19 nt, Human
guauaaaagggacugagaa

SEQ ID NO: 1996576 - RNA, 20 nt, Human
guaguugaggaaagcacaga

SEQ ID NO: 1996577 - RNA, 19 nt, Human
guaguugaggaaagcacag

SEQ ID NO: 1996578 - RNA, 18 nt, Human
aaauguaacuauguuuua

SEQ ID NO: 1996579 - RNA, 18 nt, Human
aaauguaacuguuaccau

SEQ ID NO: 1996580 - RNA, 11 nt, Human
aaauguaacug

SEQ ID NO: 1996581 - RNA, 18 nt, Human
aaauguaacugugccagu

SEQ ID NO: 1996582 - RNA, 23 nt, Human
aaauguaacugugccaguucuuu

SEQ ID NO: 1996583 - RNA, 14 nt, Human
aaauguaacuguua

SEQ ID NO: 1996584 - RNA, 18 nt, Human
aaaugguauccagaaugg

SEQ ID NO: 1996585 - RNA, 22 nt, Human
guaacaggaaaauuuuaaaaau

SEQ ID NO: 1996586 - RNA, 12 nt, Human
guaacaggcaga

SEQ ID NO: 1996587 - RNA, 19 nt, Human
aaaugggggugcauuugag

SEQ ID NO: 1996588 - RNA, 14 nt, Human
guaacacaggccac

SEQ ID NO: 1996589 - RNA, 15 nt, Human
guauccaaugaaaua

SEQ ID NO: 1996590 - RNA, 15 nt, Human
guauccagaauggaa

SEQ ID NO: 1996591 - RNA, 19 nt, Human
guaucccaugagccucagc

SEQ ID NO: 1996592 - RNA, 14 nt, Human
guaucaugaagccu

SEQ ID NO: 1996593 - RNA, 22 nt, Human
guaucaggugcugccauccagg

SEQ ID NO: 1996594 - RNA, 12 nt, Human
guaugcuucaua

SEQ ID NO: 1996595 - RNA, 13 nt, Human
guaugcuucauac

SEQ ID NO: 1996596 - RNA, 14 nt, Human
guaugcuucauaca

SEQ ID NO: 1996597 - RNA, 15 nt, Human
guaugcuucauacag

SEQ ID NO: 1996598 - RNA, 21 nt, Human
guaucccaugagccucagcau

SEQ ID NO: 1996599 - RNA, 15 nt, Human
guaugcgugugugug

SEQ ID NO: 1996600 - RNA, 15 nt, Human
guaugguggcugggu

SEQ ID NO: 1996601 - RNA, 16 nt, Human
guaugguggcuggguu

SEQ ID NO: 1996602 - RNA, 21 nt, Human
guaugcuucauacagggaugg

SEQ ID NO: 1996603 - RNA, 14 nt, Human
guaugguggcuggg

SEQ ID NO: 1996604 - RNA, 13 nt, Human
guauauugguuuu

SEQ ID NO: 1996605 - RNA, 19 nt, Human
guauauugcacaauuauaa

SEQ ID NO: 1996606 - RNA, 12 nt, Human
guauaauaggcu

SEQ ID NO: 1996607 - RNA, 15 nt, Human
guauaaguggugugu

SEQ ID NO: 1996608 - RNA, 16 nt, Human
guauauuuuauaucaa

SEQ ID NO: 1996609 - RNA, 19 nt, Human
guauauugguuuuaugaug

SEQ ID NO: 1996610 - RNA, 17 nt, Human
guauauuugauuuauua

SEQ ID NO: 1996611 - RNA, 18 nt, Human
guauauuugauuuauuaa

SEQ ID NO: 1996612 - RNA, 19 nt, Human
guauauuugauuuauuaac

SEQ ID NO: 1996613 - RNA, 20 nt, Human
guauauuugauuuauuaacu

SEQ ID NO: 1996614 - RNA, 23 nt, Human
guauauuugauuuauuaacuuaa

SEQ ID NO: 1996615 - RNA, 16 nt, Human
guaucaggugcugcca

SEQ ID NO: 1996616 - RNA, 18 nt, Human
guaucaggugcugccauc

SEQ ID NO: 1996617 - RNA, 13 nt, Human
guaucaaauacau

SEQ ID NO: 1996618 - RNA, 14 nt, Human
guaucaaauacauu

SEQ ID NO: 1996619 - RNA, 17 nt, Human
gucaacacuaacaugau

SEQ ID NO: 1996620 - RNA, 21 nt, Human
gucaacaaguaugaauaaaga

SEQ ID NO: 1996621 - RNA, 15 nt, Human
gucaaacgugaaaau

SEQ ID NO: 1996622 - RNA, 17 nt, Human
gucaaacgugaaaaugc

SEQ ID NO: 1996623 - RNA, 14 nt, Human
gucaaacgugaaaa

SEQ ID NO: 1996624 - RNA, 19 nt, Human
gucaaacauuaguacuuua

SEQ ID NO: 1996625 - RNA, 11 nt, Human
gucaaacauua

SEQ ID NO: 1996626 - RNA, 17 nt, Human
gucaaacauuaguacuu

SEQ ID NO: 1996627 - RNA, 20 nt, Human
gucaaacaaacucucugaac

SEQ ID NO: 1996628 - RNA, 23 nt, Human
gucaaaaguagaacuuuguauag

SEQ ID NO: 1996629 - RNA, 16 nt, Human
gucaaaaguagaacuu

SEQ ID NO: 1996630 - RNA, 17 nt, Human
gucaaaaguagaacuuu

SEQ ID NO: 1996631 - RNA, 19 nt, Human
guauuuuuaauuaacuuug

SEQ ID NO: 1996632 - RNA, 22 nt, Human
guauuuuguuuuugucuuaaaa

SEQ ID NO: 1996633 - RNA, 21 nt, Human
aaauuuauuuacugcuagucu

SEQ ID NO: 1996634 - RNA, 12 nt, Human
aaauugugaugu

SEQ ID NO: 1996635 - RNA, 16 nt, Human
aaauugucuuaaugga

SEQ ID NO: 1996636 - RNA, 15 nt, Human
aaauugugauguguc

SEQ ID NO: 1996637 - RNA, 12 nt, Human
aaauuuauguga

SEQ ID NO: 1996638 - RNA, 23 nt, Human
aaauuguuguccgguuuacuuua

SEQ ID NO: 1996639 - RNA, 22 nt, Human
aaauuguuguccgguuuacuuu

SEQ ID NO: 1996640 - RNA, 19 nt, Human
aaauuguuacuccauauau

SEQ ID NO: 1996641 - RNA, 15 nt, Human
aaauuuaugugaugg

SEQ ID NO: 1996642 - RNA, 15 nt, Human
aaauuuauugaggaa

SEQ ID NO: 1996643 - RNA, 16 nt, Human
aaauuuauugaggaaa

SEQ ID NO: 1996644 - RNA, 19 nt, Human
aaauuuauugaggaaaaau

SEQ ID NO: 1996645 - RNA, 20 nt, Human
aaauuuauugaggaaaaaua

SEQ ID NO: 1996646 - RNA, 23 nt, Human
aaauuuauugaggaaaaauaugu

SEQ ID NO: 1996647 - RNA, 14 nt, Human
aaauuuauuuacug

SEQ ID NO: 1996648 - RNA, 19 nt, Human
aaauuuauuuacugcuagu

SEQ ID NO: 1996649 - RNA, 20 nt, Human
aaauuguaagcaugcacaaa

SEQ ID NO: 1996650 - RNA, 22 nt, Human
aaauucugauuucuuuucacca

SEQ ID NO: 1996651 - RNA, 18 nt, Human
aaauucugucucuggauu

SEQ ID NO: 1996652 - RNA, 19 nt, Human
aaauuguaagcaugcacaa

SEQ ID NO: 1996653 - RNA, 16 nt, Human
aaauucugucucugga

SEQ ID NO: 1996654 - RNA, 17 nt, Human
aaauucugauuucuuuu

SEQ ID NO: 1996655 - RNA, 20 nt, Human
aaauucugauuucuuuucac

SEQ ID NO: 1996656 - RNA, 12 nt, Human
aaauucugauuu

SEQ ID NO: 1996657 - RNA, 14 nt, Human
aaauucugauuucu

SEQ ID NO: 1996658 - RNA, 16 nt, Human
aaauucugauuucuuu

SEQ ID NO: 1996659 - RNA, 15 nt, Human
aaauguauuacagug

SEQ ID NO: 1996660 - RNA, 23 nt, Human
aaaugucaaaaguagaacuuugu

SEQ ID NO: 1996661 - RNA, 15 nt, Human
aaaugucaaauguga

SEQ ID NO: 1996662 - RNA, 20 nt, Human
aaaugucaaaaguagaacuu

SEQ ID NO: 1996663 - RNA, 11 nt, Human
guauguauaau

SEQ ID NO: 1996664 - RNA, 15 nt, Human
guauguauaauucaa

SEQ ID NO: 1996665 - RNA, 19 nt, Human
aaaugucuaguuguaacac

SEQ ID NO: 1996666 - RNA, 22 nt, Human
aaauguccaguaagaucacugu

SEQ ID NO: 1996667 - RNA, 20 nt, Human
aaaugucaugagauugcugu

SEQ ID NO: 1996668 - RNA, 21 nt, Human
aaauguccaguaagaucacug

SEQ ID NO: 1996669 - RNA, 24 nt, Human
aaaugucuaguuguaacaccauga

SEQ ID NO: 1996670 - RNA, 20 nt, Human
aaaugugagugguugaauau

SEQ ID NO: 1996671 - RNA, 22 nt, Human
aaaugugaauuacuaacuucua

SEQ ID NO: 1996672 - RNA, 23 nt, Human
aaaugugaauuacuaacuucuaa

SEQ ID NO: 1996673 - RNA, 15 nt, Human
aaaugugaauuacua

SEQ ID NO: 1996674 - RNA, 16 nt, Human
aaaugugaauuacuaa

SEQ ID NO: 1996675 - RNA, 13 nt, Human
aaauuaagaagaa

SEQ ID NO: 1996676 - RNA, 14 nt, Human
aaauuaagaagaaa

SEQ ID NO: 1996677 - RNA, 15 nt, Human
aaauuaagaagaaac

SEQ ID NO: 1996678 - RNA, 16 nt, Human
aaauuaagaagaaacu

SEQ ID NO: 1996679 - RNA, 14 nt, Human
aaauuaagaaagga

SEQ ID NO: 1996680 - RNA, 16 nt, Human
aaauguguuuuggucc

SEQ ID NO: 1996681 - RNA, 15 nt, Human
aaauguguuuugguc

SEQ ID NO: 1996682 - RNA, 12 nt, Human
aaaugugugugu

SEQ ID NO: 1996683 - RNA, 22 nt, Human
aaaugugugugaugugacauuu

SEQ ID NO: 1996684 - RNA, 23 nt, Human
aaaugugugugaugugacauuug

SEQ ID NO: 1996685 - RNA, 19 nt, Human
aaaugugugagugcaugua

SEQ ID NO: 1996686 - RNA, 15 nt, Human
aaaugugugugaugu

SEQ ID NO: 1996687 - RNA, 18 nt, Human
aaaugugugugaugugac

SEQ ID NO: 1996688 - RNA, 19 nt, Human
aaaugugugugaugugaca

SEQ ID NO: 1996689 - RNA, 20 nt, Human
aaaugugugugaugugacau

SEQ ID NO: 1996690 - RNA, 20 nt, Human
aaauuagggcucuaauuucc

SEQ ID NO: 1996691 - RNA, 21 nt, Human
aaauuagggcucuaauuuccu

SEQ ID NO: 1996692 - RNA, 18 nt, Human
aaauuagggcucuaauuu

SEQ ID NO: 1996693 - RNA, 19 nt, Human
aaauuagggcucuaauuuc

SEQ ID NO: 1996694 - RNA, 12 nt, Human
aaauuaaggugu

SEQ ID NO: 1996695 - RNA, 17 nt, Human
aaauuaagguguuugaa

SEQ ID NO: 1996696 - RNA, 19 nt, Human
aaauuaagguguuugaaaa

SEQ ID NO: 1996697 - RNA, 21 nt, Human
aaauuaagguguuugaaaaua

SEQ ID NO: 1996698 - RNA, 23 nt, Human
aaauuaagguguuugaaaauagu

SEQ ID NO: 1996699 - RNA, 15 nt, Human
aaauuaguucccauu

SEQ ID NO: 1996700 - RNA, 23 nt, Human
aaauuagggcucuaauuuccuua

SEQ ID NO: 1996701 - RNA, 18 nt, Human
aaauuauaccuguugcuu

SEQ ID NO: 1996702 - RNA, 22 nt, Human
aaauuauguuuuacuguucauu

SEQ ID NO: 1996703 - RNA, 19 nt, Human
aaauuauaauguauucaua

SEQ ID NO: 1996704 - RNA, 23 nt, Human
aaauuauaauguauucauauuug

SEQ ID NO: 1996705 - RNA, 12 nt, Human
aaauuauaaugu

SEQ ID NO: 1996706 - RNA, 14 nt, Human
aaauuauaauguau

SEQ ID NO: 1996707 - RNA, 15 nt, Human
aaauuauaauguauu

SEQ ID NO: 1996708 - RNA, 17 nt, Human
aaauuauaauguauuca

SEQ ID NO: 1996709 - RNA, 18 nt, Human
aacucuccuccagaguca

SEQ ID NO: 1996710 - RNA, 15 nt, Human
aacucuccuccagag

SEQ ID NO: 1996711 - RNA, 16 nt, Human
aacucuccucugcugc

SEQ ID NO: 1996712 - RNA, 17 nt, Human
aacucuccucugcugcu

SEQ ID NO: 1996713 - RNA, 24 nt, Human
aacucuauggucuuauauuuacaa

SEQ ID NO: 1996714 - RNA, 14 nt, Human
aacucuauuuagau

SEQ ID NO: 1996715 - RNA, 22 nt, Human
gugaaccaccacacccagccca

SEQ ID NO: 1996716 - RNA, 23 nt, Human
gugaaccaccacacccagcccac

SEQ ID NO: 1996717 - RNA, 12 nt, Human
aacuccuggccu

SEQ ID NO: 1996718 - RNA, 22 nt, Human
aacucaucuagguaaauuacag

SEQ ID NO: 1996719 - RNA, 20 nt, Human
aacucaucuggaguucucaa

SEQ ID NO: 1996720 - RNA, 20 nt, Human
aacucauugcaucauuuaca

SEQ ID NO: 1996721 - RNA, 17 nt, Human
aacucauuuugcuugug

SEQ ID NO: 1996722 - RNA, 21 nt, Human
aacucgguguccccaccaucu

SEQ ID NO: 1996723 - RNA, 22 nt, Human
aacucgguguccccaccaucug

SEQ ID NO: 1996724 - RNA, 23 nt, Human
aacucgguguccccaccaucugc

SEQ ID NO: 1996725 - RNA, 24 nt, Human
aacucgguguccccaccaucugcu

SEQ ID NO: 1996726 - RNA, 16 nt, Human
aacucgguguccccac

SEQ ID NO: 1996727 - RNA, 17 nt, Human
aacucgguguccccacc

SEQ ID NO: 1996728 - RNA, 18 nt, Human
aacucgguguccccacca

SEQ ID NO: 1996729 - RNA, 19 nt, Human
aacucgguguccccaccau

SEQ ID NO: 1996730 - RNA, 16 nt, Human
aacuaugauuuggaaa

SEQ ID NO: 1996731 - RNA, 21 nt, Human
aacuaugauuuggaaaauaaa

SEQ ID NO: 1996732 - RNA, 13 nt, Human
aacuaucuucauc

SEQ ID NO: 1996733 - RNA, 23 nt, Human
aacuagacucccaagcuggacua

SEQ ID NO: 1996734 - RNA, 20 nt, Human
aacuagacucccaagcugga

SEQ ID NO: 1996735 - RNA, 19 nt, Human
aaccuuggcuuggcccugg

SEQ ID NO: 1996736 - RNA, 20 nt, Human
aacuacuaccuguaaugaca

SEQ ID NO: 1996737 - RNA, 18 nt, Human
aaccuugaaaacuuuaug

SEQ ID NO: 1996738 - RNA, 12 nt, Human
aaccugugucuc

SEQ ID NO: 1996739 - RNA, 11 nt, Human
aaccugucuga

SEQ ID NO: 1996740 - RNA, 14 nt, Human
aaccugucuuuugg

SEQ ID NO: 1996741 - RNA, 16 nt, Human
aaccugucuuuuggga

SEQ ID NO: 1996742 - RNA, 18 nt, Human
aaccugugagcugcacca

SEQ ID NO: 1996743 - RNA, 15 nt, Human
aaccuguccuaagga

SEQ ID NO: 1996744 - RNA, 23 nt, Human
aaccuguccuaaggaaccuuccu

SEQ ID NO: 1996745 - RNA, 16 nt, Human
gucuuuugguuaugaa

SEQ ID NO: 1996746 - RNA, 17 nt, Human
gucuucuauuuauuuau

SEQ ID NO: 1996747 - RNA, 12 nt, Human
gucuucuauuua

SEQ ID NO: 1996748 - RNA, 14 nt, Human
gucuucuauuuauu

SEQ ID NO: 1996749 - RNA, 18 nt, Human
gucuuuggacccugaggc

SEQ ID NO: 1996750 - RNA, 16 nt, Human
gucuuucacauuuaaa

SEQ ID NO: 1996751 - RNA, 20 nt, Human
aaccugagccccaaaaggua

SEQ ID NO: 1996752 - RNA, 13 nt, Human
gucuggcacagcc

SEQ ID NO: 1996753 - RNA, 16 nt, Human
gucuggcacagccugc

SEQ ID NO: 1996754 - RNA, 17 nt, Human
gucuggcacagccugca

SEQ ID NO: 1996755 - RNA, 14 nt, Human
gucuggcccuuccu

SEQ ID NO: 1996756 - RNA, 19 nt, Human
gucugucccaguuaacugu

SEQ ID NO: 1996757 - RNA, 23 nt, Human
aacccaaauguucaucaaugaau

SEQ ID NO: 1996758 - RNA, 19 nt, Human
aaccauuugaaaccccugu

SEQ ID NO: 1996759 - RNA, 19 nt, Human
aaccauuuaucuugaagga

SEQ ID NO: 1996760 - RNA, 13 nt, Human
aaccauuuaucuu

SEQ ID NO: 1996761 - RNA, 15 nt, Human
aaccauuuaucuuga

SEQ ID NO: 1996762 - RNA, 12 nt, Human
aaccauuuaucu

SEQ ID NO: 1996763 - RNA, 23 nt, Human
aaccauuguucugacacgacuuc

SEQ ID NO: 1996764 - RNA, 15 nt, Human
aacccacccuuucua

SEQ ID NO: 1996765 - RNA, 13 nt, Human
aacccaauaguug

SEQ ID NO: 1996766 - RNA, 18 nt, Human
aaccaucauugaaaucuu

SEQ ID NO: 1996767 - RNA, 17 nt, Human
aaccaucauugaaaucu

SEQ ID NO: 1996768 - RNA, 23 nt, Human
aaccauaguuacuguaaaaugca

SEQ ID NO: 1996769 - RNA, 12 nt, Human
aaccaucauuga

SEQ ID NO: 1996770 - RNA, 23 nt, Human
aaccaagguagaaugaccuugua

SEQ ID NO: 1996771 - RNA, 16 nt, Human
aaccauaguuacugua

SEQ ID NO: 1996772 - RNA, 17 nt, Human
aaccauaguuacuguaa

SEQ ID NO: 1996773 - RNA, 18 nt, Human
aaccauaguuacuguaaa

SEQ ID NO: 1996774 - RNA, 20 nt, Human
aaccauaguuacuguaaaau

SEQ ID NO: 1996775 - RNA, 14 nt, Human
aaccaccagaagcc

SEQ ID NO: 1996776 - RNA, 17 nt, Human
aaccaccagaagcccag

SEQ ID NO: 1996777 - RNA, 21 nt, Human
aaccaccacacccagcccacu

SEQ ID NO: 1996778 - RNA, 18 nt, Human
gucuccgaaaugcugucu

SEQ ID NO: 1996779 - RNA, 20 nt, Human
gucuccgaaaugcugucuuu

SEQ ID NO: 1996780 - RNA, 16 nt, Human
gucuccgaaaugcugu

SEQ ID NO: 1996781 - RNA, 20 nt, Human
aaccacauuggagauguuua

SEQ ID NO: 1996782 - RNA, 19 nt, Human
aaccaccacacccagccca

SEQ ID NO: 1996783 - RNA, 15 nt, Human
aaccaagucaaguga

SEQ ID NO: 1996784 - RNA, 20 nt, Human
aaccaagguagaaugaccuu

SEQ ID NO: 1996785 - RNA, 22 nt, Human
aaccaagguagaaugaccuugu

SEQ ID NO: 1996786 - RNA, 13 nt, Human
gucucgaacuccu

SEQ ID NO: 1996787 - RNA, 18 nt, Human
gucucgaacuccugaccu

SEQ ID NO: 1996788 - RNA, 19 nt, Human
gucucgaacuccugaccuu

SEQ ID NO: 1996789 - RNA, 16 nt, Human
aaccaagccguggcuu

SEQ ID NO: 1996790 - RNA, 18 nt, Human
aaccaagccguggcuucc

SEQ ID NO: 1996791 - RNA, 16 nt, Human
aacccgggaggcagag

SEQ ID NO: 1996792 - RNA, 17 nt, Human
aaccccuguaggccuca

SEQ ID NO: 1996793 - RNA, 12 nt, Human
aaccccuuccca

SEQ ID NO: 1996794 - RNA, 18 nt, Human
aaccugagccccaaaagg

SEQ ID NO: 1996795 - RNA, 11 nt, Human
aaccugacccc

SEQ ID NO: 1996796 - RNA, 12 nt, Human
aaccucuaaauu

SEQ ID NO: 1996797 - RNA, 17 nt, Human
aaccucgcuccaacucc

SEQ ID NO: 1996798 - RNA, 10 nt, Human
aacccagcuc

SEQ ID NO: 1996799 - RNA, 17 nt, Human
aaccccauaccuacauu

SEQ ID NO: 1996800 - RNA, 14 nt, Human
aacccagauaaagg

SEQ ID NO: 1996801 - RNA, 17 nt, Human
aaccccccauuucuucc

SEQ ID NO: 1996802 - RNA, 20 nt, Human
aaccccuggcuccaggccag

SEQ ID NO: 1996803 - RNA, 20 nt, Human
aaccccucgcccagucccag

SEQ ID NO: 1996804 - RNA, 23 nt, Human
aaccccucgcccagucccagcag

SEQ ID NO: 1996805 - RNA, 16 nt, Human
aaccccuggaccccag

SEQ ID NO: 1996806 - RNA, 20 nt, Human
aaccccuggaccccagccuc

SEQ ID NO: 1996807 - RNA, 12 nt, Human
aaccccucgccc

SEQ ID NO: 1996808 - RNA, 15 nt, Human
aaccccucgcccagu

SEQ ID NO: 1996809 - RNA, 16 nt, Human
aaccccucgcccaguc

SEQ ID NO: 1996810 - RNA, 13 nt, Human
aacugaaagugaa

SEQ ID NO: 1996811 - RNA, 16 nt, Human
aacucuguuacacuuu

SEQ ID NO: 1996812 - RNA, 23 nt, Human
aacucuguuacacuuuuuggaag

SEQ ID NO: 1996813 - RNA, 22 nt, Human
aacucuguuacacuuuuuggaa

SEQ ID NO: 1996814 - RNA, 23 nt, Human
aacucugagagauuuggggcuaa

SEQ ID NO: 1996815 - RNA, 21 nt, Human
aacucuucaaucucuugcacu

SEQ ID NO: 1996816 - RNA, 21 nt, Human
gugagguggaauuauuuuaaa

SEQ ID NO: 1996817 - RNA, 22 nt, Human
gugagucgaggacagggaggug

SEQ ID NO: 1996818 - RNA, 22 nt, Human
aacucugacaacagacuucuga

SEQ ID NO: 1996819 - RNA, 23 nt, Human
aacucugacaacagacuucugaa

SEQ ID NO: 1996820 - RNA, 20 nt, Human
aacucugacaacagacuucu

SEQ ID NO: 1996821 - RNA, 22 nt, Human
gugaggccagagacacaagccu

SEQ ID NO: 1996822 - RNA, 17 nt, Human
gugaggccagagacaca

SEQ ID NO: 1996823 - RNA, 18 nt, Human
gugaggguaaguauuuuc

SEQ ID NO: 1996824 - RNA, 21 nt, Human
gugaacuuggugccuaauguu

SEQ ID NO: 1996825 - RNA, 14 nt, Human
gugaacuuggaagc

SEQ ID NO: 1996826 - RNA, 21 nt, Human
gugagaugcuagaacucccuu

SEQ ID NO: 1996827 - RNA, 19 nt, Human
gugaacuugggccacugug

SEQ ID NO: 1996828 - RNA, 17 nt, Human
gugaacuugggccacug

SEQ ID NO: 1996829 - RNA, 16 nt, Human
aacugcacaugauuuc

SEQ ID NO: 1996830 - RNA, 17 nt, Human
aacugcacaugauuuca

SEQ ID NO: 1996831 - RNA, 18 nt, Human
aacugcacaugauuucac

SEQ ID NO: 1996832 - RNA, 19 nt, Human
aacugcacaugauuucaca

SEQ ID NO: 1996833 - RNA, 23 nt, Human
aacugcacaugauuucacaaaua

SEQ ID NO: 1996834 - RNA, 20 nt, Human
aacugcacaugauuucacaa

SEQ ID NO: 1996835 - RNA, 21 nt, Human
aacugcacaugauuucacaaa

SEQ ID NO: 1996836 - RNA, 15 nt, Human
aacugcugacuguuu

SEQ ID NO: 1996837 - RNA, 19 nt, Human
aacugcucuugggcaauau

SEQ ID NO: 1996838 - RNA, 20 nt, Human
aacugcucuugggcaauauu

SEQ ID NO: 1996839 - RNA, 22 nt, Human
aacugcucuugggcaauauucu

SEQ ID NO: 1996840 - RNA, 23 nt, Human
aacugcucuugggcaauauucuc

SEQ ID NO: 1996841 - RNA, 21 nt, Human
aacugcugacuguuuucucuu

SEQ ID NO: 1996842 - RNA, 20 nt, Human
aacugcugacuguuuucucu

SEQ ID NO: 1996843 - RNA, 23 nt, Human
aacugcugacuguuuucucuuga

SEQ ID NO: 1996844 - RNA, 18 nt, Human
aacugcuuccuauaauuu

SEQ ID NO: 1996845 - RNA, 22 nt, Human
aacugcuuccuauaauuuugau

SEQ ID NO: 1996846 - RNA, 23 nt, Human
aacugcuuccuauaauuuugaua

SEQ ID NO: 1996847 - RNA, 19 nt, Human
aacugcuuccuuucuugau

SEQ ID NO: 1996848 - RNA, 15 nt, Human
aacugcuuucuuucg

SEQ ID NO: 1996849 - RNA, 21 nt, Human
aacugcuuucuuucguuuguu

SEQ ID NO: 1996850 - RNA, 19 nt, Human
aacuggaaauacuagauuu

SEQ ID NO: 1996851 - RNA, 16 nt, Human
aacuggauuaaacuua

SEQ ID NO: 1996852 - RNA, 11 nt, Human
aacuggcugca

SEQ ID NO: 1996853 - RNA, 15 nt, Human
aacuggauuaaacuu

SEQ ID NO: 1996854 - RNA, 21 nt, Human
aacugggggagggugaaguga

SEQ ID NO: 1996855 - RNA, 22 nt, Human
aacugggggagggugaagugaa

SEQ ID NO: 1996856 - RNA, 16 nt, Human
aacuggguacuugugg

SEQ ID NO: 1996857 - RNA, 21 nt, Human
aacuggguacuuguggacaca

SEQ ID NO: 1996858 - RNA, 19 nt, Human
aacugggcauauuucuaau

SEQ ID NO: 1996859 - RNA, 12 nt, Human
gugcaagagagg

SEQ ID NO: 1996860 - RNA, 15 nt, Human
gugcaagccccugcu

SEQ ID NO: 1996861 - RNA, 22 nt, Human
gugcaaugaccuuucaauagga

SEQ ID NO: 1996862 - RNA, 19 nt, Human
gugauggggcccugccucc

SEQ ID NO: 1996863 - RNA, 14 nt, Human
gugaugguuccccu

SEQ ID NO: 1996864 - RNA, 16 nt, Human
gugaugguuccccugu

SEQ ID NO: 1996865 - RNA, 22 nt, Human
gugaugguuccccuguucacuc

SEQ ID NO: 1996866 - RNA, 21 nt, Human
gugcacacaccagagcccacc

SEQ ID NO: 1996867 - RNA, 22 nt, Human
gugcaugcugucccuuacguga

SEQ ID NO: 1996868 - RNA, 17 nt, Human
gugcacaucuguuuugu

SEQ ID NO: 1996869 - RNA, 13 nt, Human
gugcacaggcaga

SEQ ID NO: 1996870 - RNA, 12 nt, Human
gugcacaggcag

SEQ ID NO: 1996871 - RNA, 12 nt, Human
gugccucugccu

SEQ ID NO: 1996872 - RNA, 16 nt, Human
gugccucugcaguacu

SEQ ID NO: 1996873 - RNA, 13 nt, Human
gugccucuagcug

SEQ ID NO: 1996874 - RNA, 14 nt, Human
gugccucuagcuga

SEQ ID NO: 1996875 - RNA, 15 nt, Human
gugccucuagcugaa

SEQ ID NO: 1996876 - RNA, 16 nt, Human
gugccucuagcugaau

SEQ ID NO: 1996877 - RNA, 23 nt, Human
gugcauuaucuagauacuguauc

SEQ ID NO: 1996878 - RNA, 15 nt, Human
gugccacauuuucuu

SEQ ID NO: 1996879 - RNA, 15 nt, Human
gugcauuaucuagau

SEQ ID NO: 1996880 - RNA, 19 nt, Human
gugcauuaucuagauacug

SEQ ID NO: 1996881 - RNA, 19 nt, Human
gugcauguguguucaugca

SEQ ID NO: 1996882 - RNA, 20 nt, Human
aacugguuauuuaaaaugua

SEQ ID NO: 1996883 - RNA, 15 nt, Human
aacuguaaaauacuu

SEQ ID NO: 1996884 - RNA, 15 nt, Human
aacuguaauuauuug

SEQ ID NO: 1996885 - RNA, 18 nt, Human
aacuguaauuauuugaau

SEQ ID NO: 1996886 - RNA, 20 nt, Human
aacuguaauuauuugaauga

SEQ ID NO: 1996887 - RNA, 14 nt, Human
aacuggugauauau

SEQ ID NO: 1996888 - RNA, 13 nt, Human
aacuguacuuuga

SEQ ID NO: 1996889 - RNA, 20 nt, Human
aacuguacuuugauucacau

SEQ ID NO: 1996890 - RNA, 22 nt, Human
aacuguacuuugauucacaugu

SEQ ID NO: 1996891 - RNA, 15 nt, Human
aacuguacuuugauu

SEQ ID NO: 1996892 - RNA, 17 nt, Human
aacuguacuuugauuca

SEQ ID NO: 1996893 - RNA, 18 nt, Human
aacuguacuuugauucac

SEQ ID NO: 1996894 - RNA, 19 nt, Human
aacuguacuuugauucaca

SEQ ID NO: 1996895 - RNA, 13 nt, Human
aacuuccaauuua

SEQ ID NO: 1996896 - RNA, 16 nt, Human
aacuucaucugucugu

SEQ ID NO: 1996897 - RNA, 12 nt, Human
aacuucaggaaa

SEQ ID NO: 1996898 - RNA, 16 nt, Human
aacuuccccauacaaa

SEQ ID NO: 1996899 - RNA, 23 nt, Human
aacuuccccauacaaauaagcau

SEQ ID NO: 1996900 - RNA, 14 nt, Human
gugaugagaggaaa

SEQ ID NO: 1996901 - RNA, 16 nt, Human
gugaugagaggaaauc

SEQ ID NO: 1996902 - RNA, 18 nt, Human
gugauggggcccugccuc

SEQ ID NO: 1996903 - RNA, 17 nt, Human
gugauggggcccugccu

SEQ ID NO: 1996904 - RNA, 16 nt, Human
gugauggggcccugcc

SEQ ID NO: 1996905 - RNA, 14 nt, Human
gugauggggcccug

SEQ ID NO: 1996906 - RNA, 22 nt, Human
gugaugcgcaugucacggaggg

SEQ ID NO: 1996907 - RNA, 17 nt, Human
gugaugcgcaguugcug

SEQ ID NO: 1996908 - RNA, 15 nt, Human
gugaugcgcaguugc

SEQ ID NO: 1996909 - RNA, 19 nt, Human
gugauggcgaaagagggua

SEQ ID NO: 1996910 - RNA, 13 nt, Human
cacaggaaaccag

SEQ ID NO: 1996911 - RNA, 16 nt, Human
cacaggcccuuccucu

SEQ ID NO: 1996912 - RNA, 17 nt, Human
cacaggcccuuccucuc

SEQ ID NO: 1996913 - RNA, 18 nt, Human
cacaggcccuuccucucc

SEQ ID NO: 1996914 - RNA, 19 nt, Human
cacaggcccuuccucucca

SEQ ID NO: 1996915 - RNA, 22 nt, Human
cacagcugcucaauaaaguaca

SEQ ID NO: 1996916 - RNA, 18 nt, Human
cacagcugcucugugacc

SEQ ID NO: 1996917 - RNA, 12 nt, Human
cacagcugcuca

SEQ ID NO: 1996918 - RNA, 21 nt, Human
cacaggcccuuccucuccacu

SEQ ID NO: 1996919 - RNA, 17 nt, Human
cacagugcaucucagcc

SEQ ID NO: 1996920 - RNA, 18 nt, Human
cacagugcaucucagccc

SEQ ID NO: 1996921 - RNA, 19 nt, Human
cacagugcaucucagccca

SEQ ID NO: 1996922 - RNA, 17 nt, Human
cacaguucaauucucau

SEQ ID NO: 1996923 - RNA, 13 nt, Human
cacaguuauuaca

SEQ ID NO: 1996924 - RNA, 15 nt, Human
cacaguuauuacaua

SEQ ID NO: 1996925 - RNA, 18 nt, Human
caauaggaaaaacugauu

SEQ ID NO: 1996926 - RNA, 18 nt, Human
caauaauaauaccucccu

SEQ ID NO: 1996927 - RNA, 14 nt, Human
caauaccccaugga

SEQ ID NO: 1996928 - RNA, 18 nt, Human
caauaagaacaaauacaa

SEQ ID NO: 1996929 - RNA, 22 nt, Human
caauaaauuuugaaaaguaaua

SEQ ID NO: 1996930 - RNA, 17 nt, Human
caauaggaaaaacugau

SEQ ID NO: 1996931 - RNA, 16 nt, Human
caauaggaaaaacuga

SEQ ID NO: 1996932 - RNA, 15 nt, Human
caauaggaaaaacug

SEQ ID NO: 1996933 - RNA, 18 nt, Human
caauagcauuagaaauaa

SEQ ID NO: 1996934 - RNA, 18 nt, Human
caaggcugggggaagaag

SEQ ID NO: 1996935 - RNA, 20 nt, Human
caaggcuugcugcagauacu

SEQ ID NO: 1996936 - RNA, 15 nt, Human
caaggcuugcugcag

SEQ ID NO: 1996937 - RNA, 16 nt, Human
caaggcuugcugcaga

SEQ ID NO: 1996938 - RNA, 19 nt, Human
caaggguagggugggccuu

SEQ ID NO: 1996939 - RNA, 21 nt, Human
caagggaaaauaaaaaaagaa

SEQ ID NO: 1996940 - RNA, 23 nt, Human
caagggaaaauaaaaaaagaaaa

SEQ ID NO: 1996941 - RNA, 23 nt, Human
caauaaaguuugaucuuccucug

SEQ ID NO: 1996942 - RNA, 11 nt, Human
caauaaauuuu

SEQ ID NO: 1996943 - RNA, 13 nt, Human
caauaaauuuuga

SEQ ID NO: 1996944 - RNA, 14 nt, Human
caauaaauuuugaa

SEQ ID NO: 1996945 - RNA, 15 nt, Human
caauaaauuuugaaa

SEQ ID NO: 1996946 - RNA, 16 nt, Human
caauaaauuuugaaaa

SEQ ID NO: 1996947 - RNA, 17 nt, Human
caauaaauuuugaaaag

SEQ ID NO: 1996948 - RNA, 18 nt, Human
caauaaauuuugaaaagu

SEQ ID NO: 1996949 - RNA, 19 nt, Human
caauaaaguugagcaaaca

SEQ ID NO: 1996950 - RNA, 13 nt, Human
caauaaaguuuga

SEQ ID NO: 1996951 - RNA, 20 nt, Human
caauaaaguuugaucuuccu

SEQ ID NO: 1996952 - RNA, 21 nt, Human
caauaaaguuugaucuuccuc

SEQ ID NO: 1996953 - RNA, 14 nt, Human
caauaaaguuugau

SEQ ID NO: 1996954 - RNA, 18 nt, Human
caauaaaguuugaucuuc

SEQ ID NO: 1996955 - RNA, 15 nt, Human
caagccuggucagcc

SEQ ID NO: 1996956 - RNA, 16 nt, Human
caagccuggucagccc

SEQ ID NO: 1996957 - RNA, 17 nt, Human
caagccuggucagccca

SEQ ID NO: 1996958 - RNA, 18 nt, Human
caagccuggucagcccaa

SEQ ID NO: 1996959 - RNA, 17 nt, Human
caagccuuggcucuacc

SEQ ID NO: 1996960 - RNA, 12 nt, Human
caagccugguca

SEQ ID NO: 1996961 - RNA, 15 nt, Human
caagauaccuuuuuu

SEQ ID NO: 1996962 - RNA, 14 nt, Human
caagaggcugcagc

SEQ ID NO: 1996963 - RNA, 16 nt, Human
caagagucuggggacc

SEQ ID NO: 1996964 - RNA, 14 nt, Human
caagaguggcccca

SEQ ID NO: 1996965 - RNA, 15 nt, Human
caagaguggccccac

SEQ ID NO: 1996966 - RNA, 16 nt, Human
caagaguggccccacc

SEQ ID NO: 1996967 - RNA, 17 nt, Human
caagaguggccccaccu

SEQ ID NO: 1996968 - RNA, 18 nt, Human
caagaguggccccaccug

SEQ ID NO: 1996969 - RNA, 19 nt, Human
caagaguggccccaccugg

SEQ ID NO: 1996970 - RNA, 20 nt, Human
caagaguggccccaccuggc

SEQ ID NO: 1996971 - RNA, 21 nt, Human
caagaguggccccaccuggcc

SEQ ID NO: 1996972 - RNA, 22 nt, Human
caagaguggccccaccuggccc

SEQ ID NO: 1996973 - RNA, 23 nt, Human
caagaguggccccaccuggcccu

SEQ ID NO: 1996974 - RNA, 22 nt, Human
caagcugcacccucaggcaggu

SEQ ID NO: 1996975 - RNA, 17 nt, Human
caagcgauucucuugcc

SEQ ID NO: 1996976 - RNA, 21 nt, Human
caagcuggucccacucagucc

SEQ ID NO: 1996977 - RNA, 15 nt, Human
caagcgauucuucug

SEQ ID NO: 1996978 - RNA, 17 nt, Human
caagcgauucuucugcu

SEQ ID NO: 1996979 - RNA, 21 nt, Human
caagcugcacccucaggcagg

SEQ ID NO: 1996980 - RNA, 18 nt, Human
caagcgauucuucugcuu

SEQ ID NO: 1996981 - RNA, 22 nt, Human
caaggcugcagugagccgagau

SEQ ID NO: 1996982 - RNA, 17 nt, Human
caaggcugcagugagcc

SEQ ID NO: 1996983 - RNA, 20 nt, Human
caaggauccugagccagauu

SEQ ID NO: 1996984 - RNA, 22 nt, Human
caaggauccugagccagauuuc

SEQ ID NO: 1996985 - RNA, 19 nt, Human
caaggauccugagccagau

SEQ ID NO: 1996986 - RNA, 18 nt, Human
caaggauccugagccaga

SEQ ID NO: 1996987 - RNA, 16 nt, Human
caaggagauuuacaac

SEQ ID NO: 1996988 - RNA, 22 nt, Human
caagcuggucccacucagucca

SEQ ID NO: 1996989 - RNA, 23 nt, Human
caagcuggucccacucaguccau

SEQ ID NO: 1996990 - RNA, 18 nt, Human
caaggaaaaaauaacaau

SEQ ID NO: 1996991 - RNA, 20 nt, Human
caaggaaaaaauaacaauga

SEQ ID NO: 1996992 - RNA, 15 nt, Human
caagcuuuuccuaau

SEQ ID NO: 1996993 - RNA, 16 nt, Human
cacagauuugagcuca

SEQ ID NO: 1996994 - RNA, 17 nt, Human
cacagauuugagcucag

SEQ ID NO: 1996995 - RNA, 18 nt, Human
cacagauuugagcucagc

SEQ ID NO: 1996996 - RNA, 22 nt, Human
cacagauuugagcucagcccug

SEQ ID NO: 1996997 - RNA, 14 nt, Human
cacagcugagaggc

SEQ ID NO: 1996998 - RNA, 13 nt, Human
cacagaggcugcc

SEQ ID NO: 1996999 - RNA, 15 nt, Human
cacagaggacacaga

SEQ ID NO: 1997000 - RNA, 19 nt, Human
cacagaggacacagagaag

SEQ ID NO: 1997001 - RNA, 22 nt, Human
cacagaguuguuacauuuuuaa

SEQ ID NO: 1997002 - RNA, 21 nt, Human
cacagaguuguuacauuuuua

SEQ ID NO: 1997003 - RNA, 23 nt, Human
cacagaugggugcuuggaggaag

SEQ ID NO: 1997004 - RNA, 19 nt, Human
cacagagaaaguacuucuc

SEQ ID NO: 1997005 - RNA, 20 nt, Human
cacagagaaaguacuucucc

SEQ ID NO: 1997006 - RNA, 21 nt, Human
cacagagaaaguacuucucca

SEQ ID NO: 1997007 - RNA, 21 nt, Human
cacacucccgagacggcacug

SEQ ID NO: 1997008 - RNA, 12 nt, Human
cacagagaaagu

SEQ ID NO: 1997009 - RNA, 14 nt, Human
cacacuccagcugg

SEQ ID NO: 1997010 - RNA, 20 nt, Human
caauuuuuuaagugaaaaua

SEQ ID NO: 1997011 - RNA, 21 nt, Human
caauuuuuuaagugaaaauau

SEQ ID NO: 1997012 - RNA, 18 nt, Human
caauuuuugguugaauaa

SEQ ID NO: 1997013 - RNA, 19 nt, Human
caauuuuugguugaauaaa

SEQ ID NO: 1997014 - RNA, 14 nt, Human
cacaaacagaggcc

SEQ ID NO: 1997015 - RNA, 15 nt, Human
cacaaacagaggccg

SEQ ID NO: 1997016 - RNA, 18 nt, Human
cacaaagcccuuccaugu

SEQ ID NO: 1997017 - RNA, 13 nt, Human
cacaaacagaggc

SEQ ID NO: 1997018 - RNA, 18 nt, Human
caauucccaccuaugagu

SEQ ID NO: 1997019 - RNA, 22 nt, Human
caauuccaugacaauaugcccu

SEQ ID NO: 1997020 - RNA, 15 nt, Human
caauuacauguuugg

SEQ ID NO: 1997021 - RNA, 18 nt, Human
caauuacaggaaguacug

SEQ ID NO: 1997022 - RNA, 15 nt, Human
caauuacuuuagaaa

SEQ ID NO: 1997023 - RNA, 17 nt, Human
caauuacuuuagaaaau

SEQ ID NO: 1997024 - RNA, 22 nt, Human
caaugugacuuaaugccacuaa

SEQ ID NO: 1997025 - RNA, 22 nt, Human
caauaucuugcuugaacuuaca

SEQ ID NO: 1997026 - RNA, 16 nt, Human
caauaucuugcuugaa

SEQ ID NO: 1997027 - RNA, 19 nt, Human
caauaucuugcuugaacuu

SEQ ID NO: 1997028 - RNA, 22 nt, Human
caaugugaaaagaaaaaugagc

SEQ ID NO: 1997029 - RNA, 21 nt, Human
caauaucuuuuuuuuaauaaa

SEQ ID NO: 1997030 - RNA, 15 nt, Human
caauaucuugcuuga

SEQ ID NO: 1997031 - RNA, 22 nt, Human
caaugugugccgagcccuugcc

SEQ ID NO: 1997032 - RNA, 23 nt, Human
caaugugugccgagcccuugccc

SEQ ID NO: 1997033 - RNA, 15 nt, Human
caauguuaaauuaau

SEQ ID NO: 1997034 - RNA, 17 nt, Human
caauuacaggaaguacu

SEQ ID NO: 1997035 - RNA, 11 nt, Human
caauguuuaca

SEQ ID NO: 1997036 - RNA, 20 nt, Human
caauguuaaauuaauuauaa

SEQ ID NO: 1997037 - RNA, 17 nt, Human
cacacacgcgugcacac

SEQ ID NO: 1997038 - RNA, 22 nt, Human
cacaaucaccgaugcaaacauu

SEQ ID NO: 1997039 - RNA, 12 nt, Human
cacacaaagcag

SEQ ID NO: 1997040 - RNA, 15 nt, Human
cacacaaaaaaagac

SEQ ID NO: 1997041 - RNA, 19 nt, Human
cacacaaaaaaagaccugu

SEQ ID NO: 1997042 - RNA, 11 nt, Human
cacaauuccau

SEQ ID NO: 1997043 - RNA, 22 nt, Human
cacaauugaauuaguuuuuucu

SEQ ID NO: 1997044 - RNA, 13 nt, Human
cacacaaaaaaag

SEQ ID NO: 1997045 - RNA, 20 nt, Human
cacaagaaaugaaagcaggg

SEQ ID NO: 1997046 - RNA, 21 nt, Human
cacaagaaaugaaagcaggga

SEQ ID NO: 1997047 - RNA, 13 nt, Human
cacaaaggagagc

SEQ ID NO: 1997048 - RNA, 18 nt, Human
cacaagaaaugaaagcag

SEQ ID NO: 1997049 - RNA, 13 nt, Human
caacaggcugggc

SEQ ID NO: 1997050 - RNA, 15 nt, Human
caaaccuuuaacuaa

SEQ ID NO: 1997051 - RNA, 12 nt, Human
caaaccuuuccc

SEQ ID NO: 1997052 - RNA, 13 nt, Human
caaaccuuucccc

SEQ ID NO: 1997053 - RNA, 19 nt, Human
caaaccuuucuauaauuuu

SEQ ID NO: 1997054 - RNA, 20 nt, Human
caaaccuuucuauaauuuua

SEQ ID NO: 1997055 - RNA, 13 nt, Human
caaaccugugaag

SEQ ID NO: 1997056 - RNA, 14 nt, Human
caaacucucugaac

SEQ ID NO: 1997057 - RNA, 22 nt, Human
caaaccuuucuauaauuuuaca

SEQ ID NO: 1997058 - RNA, 17 nt, Human
caaacucuugaccucag

SEQ ID NO: 1997059 - RNA, 19 nt, Human
caaacucuugaccucaggu

SEQ ID NO: 1997060 - RNA, 20 nt, Human
caaacucuugaccucaggug

SEQ ID NO: 1997061 - RNA, 21 nt, Human
caaacucuugaccucagguga

SEQ ID NO: 1997062 - RNA, 16 nt, Human
caaacugaaaagcuga

SEQ ID NO: 1997063 - RNA, 22 nt, Human
caaaaugaaacgcaaccaccac

SEQ ID NO: 1997064 - RNA, 11 nt, Human
caaaaugaaac

SEQ ID NO: 1997065 - RNA, 21 nt, Human
caaaaugagcccuguccugcc

SEQ ID NO: 1997066 - RNA, 21 nt, Human
caaacaaaagcugaacacauu

SEQ ID NO: 1997067 - RNA, 16 nt, Human
caaacaagcauauaaa

SEQ ID NO: 1997068 - RNA, 18 nt, Human
caaacaagcauauaaaau

SEQ ID NO: 1997069 - RNA, 20 nt, Human
caaacaagcauauaaaaugg

SEQ ID NO: 1997070 - RNA, 21 nt, Human
caaacacuugugacuuuugcu

SEQ ID NO: 1997071 - RNA, 15 nt, Human
caaacagaggccgcc

SEQ ID NO: 1997072 - RNA, 13 nt, Human
caaacagaggccg

SEQ ID NO: 1997073 - RNA, 21 nt, Human
caaaacgguuuuacugcagcu

SEQ ID NO: 1997074 - RNA, 15 nt, Human
caaaacgguuuuacu

SEQ ID NO: 1997075 - RNA, 18 nt, Human
auuuuauuuuauuaugca

SEQ ID NO: 1997076 - RNA, 22 nt, Human
auuuuauuuugaaauggaaauu

SEQ ID NO: 1997077 - RNA, 23 nt, Human
auuuuauuuugaaauggaaauua

SEQ ID NO: 1997078 - RNA, 16 nt, Human
caaaacucuccucugc

SEQ ID NO: 1997079 - RNA, 15 nt, Human
caaaacucuccucug

SEQ ID NO: 1997080 - RNA, 19 nt, Human
caaaacucuccucugcugc

SEQ ID NO: 1997081 - RNA, 23 nt, Human
caaaacucuccucugcugcuggc

SEQ ID NO: 1997082 - RNA, 12 nt, Human
caaaaguuauua

SEQ ID NO: 1997083 - RNA, 16 nt, Human
caaaaguuauuaaaau

SEQ ID NO: 1997084 - RNA, 18 nt, Human
caaaaguuauuaaaauug

SEQ ID NO: 1997085 - RNA, 22 nt, Human
caaaaguuauuaaaauuguugu

SEQ ID NO: 1997086 - RNA, 14 nt, Human
caaaaguuucucuu

SEQ ID NO: 1997087 - RNA, 18 nt, Human
caaaaguuuguuugcuua

SEQ ID NO: 1997088 - RNA, 16 nt, Human
caaaauaaaacuuuuu

SEQ ID NO: 1997089 - RNA, 20 nt, Human
caaaauaaaacuuuuuaaaa

SEQ ID NO: 1997090 - RNA, 14 nt, Human
caaaauaagaaaag

SEQ ID NO: 1997091 - RNA, 15 nt, Human
caaaauaagaaaaga

SEQ ID NO: 1997092 - RNA, 20 nt, Human
caaaauacauucuuuuugcu

SEQ ID NO: 1997093 - RNA, 23 nt, Human
caaaauacauucuuuuugcucua

SEQ ID NO: 1997094 - RNA, 22 nt, Human
caaaauaagaaaagauguagau

SEQ ID NO: 1997095 - RNA, 13 nt, Human
caaaauaaauugg

SEQ ID NO: 1997096 - RNA, 19 nt, Human
caaaauacaugaugauuuc

SEQ ID NO: 1997097 - RNA, 22 nt, Human
caaaauacaugaugauuucaga

SEQ ID NO: 1997098 - RNA, 11 nt, Human
caaaauacauu

SEQ ID NO: 1997099 - RNA, 16 nt, Human
caaaauaagaaaagau

SEQ ID NO: 1997100 - RNA, 18 nt, Human
caaaauaagaaaagaugu

SEQ ID NO: 1997101 - RNA, 21 nt, Human
caaaaucgaugcagugcuucc

SEQ ID NO: 1997102 - RNA, 23 nt, Human
caaagugcugggauuacaagcgu

SEQ ID NO: 1997103 - RNA, 18 nt, Human
caaagugcugggauuaca

SEQ ID NO: 1997104 - RNA, 21 nt, Human
caaaguuaaacgugaugugcu

SEQ ID NO: 1997105 - RNA, 20 nt, Human
caaaguucccuacuuccugu

SEQ ID NO: 1997106 - RNA, 15 nt, Human
caaagaaauuaugug

SEQ ID NO: 1997107 - RNA, 11 nt, Human
caaagaagaaa

SEQ ID NO: 1997108 - RNA, 13 nt, Human
caaagugcuggga

SEQ ID NO: 1997109 - RNA, 19 nt, Human
caaagugcugggauuacaa

SEQ ID NO: 1997110 - RNA, 18 nt, Human
caaauguucaucaaugaa

SEQ ID NO: 1997111 - RNA, 14 nt, Human
caaauguucaucaa

SEQ ID NO: 1997112 - RNA, 19 nt, Human
caaauggauuccuguuuca

SEQ ID NO: 1997113 - RNA, 18 nt, Human
caaauggaguuggaguuc

SEQ ID NO: 1997114 - RNA, 19 nt, Human
caaauggaguuggaguuca

SEQ ID NO: 1997115 - RNA, 21 nt, Human
caaauggaguuggaguucauu

SEQ ID NO: 1997116 - RNA, 23 nt, Human
caaauggaaaugggcagagcaga

SEQ ID NO: 1997117 - RNA, 23 nt, Human
caaauauauucagccuggcuuca

SEQ ID NO: 1997118 - RNA, 19 nt, Human
caaauaaaguaguaaaaga

SEQ ID NO: 1997119 - RNA, 13 nt, Human
caaauaacaacuu

SEQ ID NO: 1997120 - RNA, 14 nt, Human
caaauaacaacuuu

SEQ ID NO: 1997121 - RNA, 16 nt, Human
caaauaacaacuuuuu

SEQ ID NO: 1997122 - RNA, 19 nt, Human
caaauauuucuagacacuu

SEQ ID NO: 1997123 - RNA, 15 nt, Human
caacagauuggauuu

SEQ ID NO: 1997124 - RNA, 20 nt, Human
caacagauuggauuuuaugu

SEQ ID NO: 1997125 - RNA, 21 nt, Human
caacagauuggauuuuauguu

SEQ ID NO: 1997126 - RNA, 23 nt, Human
caacagauuggauuuuauguuga

SEQ ID NO: 1997127 - RNA, 15 nt, Human
caacacuuuaauggg

SEQ ID NO: 1997128 - RNA, 12 nt, Human
caaauuaauugu

SEQ ID NO: 1997129 - RNA, 16 nt, Human
caaauuaauuguguga

SEQ ID NO: 1997130 - RNA, 19 nt, Human
caaauuaauugugugaacu

SEQ ID NO: 1997131 - RNA, 20 nt, Human
caaauuaauugugugaacuu

SEQ ID NO: 1997132 - RNA, 19 nt, Human
caaauuucucuguuccaua

SEQ ID NO: 1997133 - RNA, 15 nt, Human
caaauuucuaaaucu

SEQ ID NO: 1997134 - RNA, 22 nt, Human
caaauuucuaaaucuccaaaau

SEQ ID NO: 1997135 - RNA, 16 nt, Human
caaccuggucacagga

SEQ ID NO: 1997136 - RNA, 16 nt, Human
caaccuucuguggcuc

SEQ ID NO: 1997137 - RNA, 17 nt, Human
caaccuucuguggcuca

SEQ ID NO: 1997138 - RNA, 19 nt, Human
caaccuucuguggcucaca

SEQ ID NO: 1997139 - RNA, 20 nt, Human
caaccuucuguggcucacag

SEQ ID NO: 1997140 - RNA, 14 nt, Human
caaccuuggcuugg

SEQ ID NO: 1997141 - RNA, 20 nt, Human
caacauacucccaucuguga

SEQ ID NO: 1997142 - RNA, 21 nt, Human
caaccugcucuccucuugcca

SEQ ID NO: 1997143 - RNA, 23 nt, Human
caaccugcucuccucuugccacu

SEQ ID NO: 1997144 - RNA, 18 nt, Human
caaccugcucuccucuug

SEQ ID NO: 1997145 - RNA, 12 nt, Human
caacauauacaa

SEQ ID NO: 1997146 - RNA, 19 nt, Human
caacauacucccaucugug

SEQ ID NO: 1997147 - RNA, 17 nt, Human
caacauacucccaucug

SEQ ID NO: 1997148 - RNA, 12 nt, Human
caacaggcuggg

SEQ ID NO: 1997149 - RNA, 19 nt, Human
caacagccaauauuuaaaa

SEQ ID NO: 1997150 - RNA, 17 nt, Human
caacagccacucagaaa

SEQ ID NO: 1997151 - RNA, 15 nt, Human
caagagagcagcaag

SEQ ID NO: 1997152 - RNA, 21 nt, Human
caagagagcagcaaggucuug

SEQ ID NO: 1997153 - RNA, 15 nt, Human
caagacgcugugcug

SEQ ID NO: 1997154 - RNA, 13 nt, Human
caagacgcugugc

SEQ ID NO: 1997155 - RNA, 23 nt, Human
caagaccuucuccuucaccuuug

SEQ ID NO: 1997156 - RNA, 21 nt, Human
caagaccuucuccuucaccuu

SEQ ID NO: 1997157 - RNA, 17 nt, Human
caagagcuuaacagugu

SEQ ID NO: 1997158 - RNA, 14 nt, Human
caagaggcaaagga

SEQ ID NO: 1997159 - RNA, 17 nt, Human
caagaggcaaaggaauc

SEQ ID NO: 1997160 - RNA, 13 nt, Human
caagaagcccagg

SEQ ID NO: 1997161 - RNA, 14 nt, Human
caagaagcccagga

SEQ ID NO: 1997162 - RNA, 12 nt, Human
caagaaaugaag

SEQ ID NO: 1997163 - RNA, 13 nt, Human
caagaaaugaaga

SEQ ID NO: 1997164 - RNA, 17 nt, Human
caagaaaugaagagcug

SEQ ID NO: 1997165 - RNA, 21 nt, Human
caagaagcaauguuauaaagu

SEQ ID NO: 1997166 - RNA, 17 nt, Human
caagaaaugaaagcagg

SEQ ID NO: 1997167 - RNA, 19 nt, Human
caagaaaugaaagcaggga

SEQ ID NO: 1997168 - RNA, 15 nt, Human
caagaaaugaaagca

SEQ ID NO: 1997169 - RNA, 12 nt, Human
caacuugggaac

SEQ ID NO: 1997170 - RNA, 16 nt, Human
caacuuguaaaugugg

SEQ ID NO: 1997171 - RNA, 19 nt, Human
caacuugccuuugaagagu

SEQ ID NO: 1997172 - RNA, 18 nt, Human
caacuaaaguuguacuuu

SEQ ID NO: 1997173 - RNA, 20 nt, Human
caacuaaaguuguacuuuaa

SEQ ID NO: 1997174 - RNA, 17 nt, Human
caacuugccuuugaaga

SEQ ID NO: 1997175 - RNA, 22 nt, Human
caacuaaaaugugucuugcugu

SEQ ID NO: 1997176 - RNA, 22 nt, Human
caaccuuggcuuggcccuggca

SEQ ID NO: 1997177 - RNA, 15 nt, Human
caaccuuggcuuggc

SEQ ID NO: 1997178 - RNA, 13 nt, Human
uguguuugaagca

SEQ ID NO: 1997179 - RNA, 18 nt, Human
uguguuuuucauaaagca

SEQ ID NO: 1997180 - RNA, 15 nt, Human
uguguuuuucauaaa

SEQ ID NO: 1997181 - RNA, 16 nt, Human
uguguuuauugucaaa

SEQ ID NO: 1997182 - RNA, 19 nt, Human
ugugugugcuuauguauga

SEQ ID NO: 1997183 - RNA, 18 nt, Human
ugugugugaugugacauu

SEQ ID NO: 1997184 - RNA, 13 nt, Human
ugugugugaugug

SEQ ID NO: 1997185 - RNA, 14 nt, Human
ugugugugauguga

SEQ ID NO: 1997186 - RNA, 15 nt, Human
ugugugugaugugac

SEQ ID NO: 1997187 - RNA, 20 nt, Human
ugugugugcuuauguaugag

SEQ ID NO: 1997188 - RNA, 16 nt, Human
ugugugggagugugua

SEQ ID NO: 1997189 - RNA, 20 nt, Human
uguguggagucauuucugau

SEQ ID NO: 1997190 - RNA, 14 nt, Human
uguguggucaacau

SEQ ID NO: 1997191 - RNA, 23 nt, Human
uguguggucaacauuucucaugu

SEQ ID NO: 1997192 - RNA, 17 nt, Human
ugugugugaaaaugugu

SEQ ID NO: 1997193 - RNA, 11 nt, Human
uguguaugugg

SEQ ID NO: 1997194 - RNA, 12 nt, Human
uguguauguggg

SEQ ID NO: 1997195 - RNA, 18 nt, Human
uguguaugcgugugugug

SEQ ID NO: 1997196 - RNA, 22 nt, Human
uguguaugugaguauucucauu

SEQ ID NO: 1997197 - RNA, 22 nt, Human
ugugugaagcuuaagggucaua

SEQ ID NO: 1997198 - RNA, 18 nt, Human
ugugugauauuucagaaa

SEQ ID NO: 1997199 - RNA, 20 nt, Human
ugugugauauuucagaaaua

SEQ ID NO: 1997200 - RNA, 14 nt, Human
ugugugaugugaca

SEQ ID NO: 1997201 - RNA, 15 nt, Human
ugugugaugugacau

SEQ ID NO: 1997202 - RNA, 17 nt, Human
ugugugaugugacauuu

SEQ ID NO: 1997203 - RNA, 19 nt, Human
ugugugaugugacauuugu

SEQ ID NO: 1997204 - RNA, 14 nt, Human
ugugugggagugug

SEQ ID NO: 1997205 - RNA, 15 nt, Human
ugugugggagugugu

SEQ ID NO: 1997206 - RNA, 17 nt, Human
uguguggagucauuucu

SEQ ID NO: 1997207 - RNA, 13 nt, Human
ugugugcucucca

SEQ ID NO: 1997208 - RNA, 15 nt, Human
ugugugcuuauguau

SEQ ID NO: 1997209 - RNA, 17 nt, Human
ugugugcuaaacgugua

SEQ ID NO: 1997210 - RNA, 19 nt, Human
ugugugcacguacacacac

SEQ ID NO: 1997211 - RNA, 17 nt, Human
uguucauaaauaaaguu

SEQ ID NO: 1997212 - RNA, 19 nt, Human
uguucagccacugagggac

SEQ ID NO: 1997213 - RNA, 18 nt, Human
uguucagcguuuugcaag

SEQ ID NO: 1997214 - RNA, 20 nt, Human
uguucagcuccagcucacca

SEQ ID NO: 1997215 - RNA, 18 nt, Human
uguucagccacugaggga

SEQ ID NO: 1997216 - RNA, 21 nt, Human
uguucagcuccagcucaccag

SEQ ID NO: 1997217 - RNA, 22 nt, Human
uguucagcuccagcucaccagc

SEQ ID NO: 1997218 - RNA, 21 nt, Human
uguuaggccaaagacaaauag

SEQ ID NO: 1997219 - RNA, 17 nt, Human
uguuaguaugaggcauu

SEQ ID NO: 1997220 - RNA, 19 nt, Human
uguuaguaugaggcauuug

SEQ ID NO: 1997221 - RNA, 20 nt, Human
uguuaguaugaggcauuugu

SEQ ID NO: 1997222 - RNA, 15 nt, Human
uguucagaaaaaagg

SEQ ID NO: 1997223 - RNA, 12 nt, Human
uguucagaaaaa

SEQ ID NO: 1997224 - RNA, 17 nt, Human
uguuagccccauaauuu

SEQ ID NO: 1997225 - RNA, 19 nt, Human
uguuaggccaaagacaaau

SEQ ID NO: 1997226 - RNA, 14 nt, Human
uguuacuaaguuuu

SEQ ID NO: 1997227 - RNA, 14 nt, Human
uguuacucuuggga

SEQ ID NO: 1997228 - RNA, 17 nt, Human
uguuacucuugggacau

SEQ ID NO: 1997229 - RNA, 18 nt, Human
uguuacucuugggacauc

SEQ ID NO: 1997230 - RNA, 23 nt, Human
uguuaccauuggaaauuucacgu

SEQ ID NO: 1997231 - RNA, 23 nt, Human
uguuaccccaagcgcccuggccc

SEQ ID NO: 1997232 - RNA, 23 nt, Human
uguuaaaaugcaugauugcagaa

SEQ ID NO: 1997233 - RNA, 22 nt, Human
uguuaaaauuauaccuguugcu

SEQ ID NO: 1997234 - RNA, 17 nt, Human
uguuuaagacacuuccg

SEQ ID NO: 1997235 - RNA, 18 nt, Human
uguuuaagacacuuccgu

SEQ ID NO: 1997236 - RNA, 19 nt, Human
uguuuaagacacuuccguc

SEQ ID NO: 1997237 - RNA, 13 nt, Human
uguuuaagcagaa

SEQ ID NO: 1997238 - RNA, 14 nt, Human
uguuuaagcagaau

SEQ ID NO: 1997239 - RNA, 18 nt, Human
uguuuaagcagaauugga

SEQ ID NO: 1997240 - RNA, 19 nt, Human
uguuuaagcagaauuggaa

SEQ ID NO: 1997241 - RNA, 21 nt, Human
uguuuaagugaauugacuuau

SEQ ID NO: 1997242 - RNA, 17 nt, Human
uguuuaauaaagcgaaa

SEQ ID NO: 1997243 - RNA, 12 nt, Human
uguuuacagugu

SEQ ID NO: 1997244 - RNA, 12 nt, Human
uguuuaagagac

SEQ ID NO: 1997245 - RNA, 23 nt, Human
uguuuaaagguuucuauuuucuc

SEQ ID NO: 1997246 - RNA, 13 nt, Human
uguuuaaaauuuc

SEQ ID NO: 1997247 - RNA, 21 nt, Human
uguuuaaaauuucuuagaaaa

SEQ ID NO: 1997248 - RNA, 17 nt, Human
uguuggcugggggccuc

SEQ ID NO: 1997249 - RNA, 15 nt, Human
uguuggccucugcaa

SEQ ID NO: 1997250 - RNA, 19 nt, Human
uguuggcugggggccucag

SEQ ID NO: 1997251 - RNA, 15 nt, Human
uguuggccaaagcca

SEQ ID NO: 1997252 - RNA, 14 nt, Human
uguuggcagccucu

SEQ ID NO: 1997253 - RNA, 23 nt, Human
uguuggcagaugcagcucuuccu

SEQ ID NO: 1997254 - RNA, 15 nt, Human
uguuggccaggcugg

SEQ ID NO: 1997255 - RNA, 16 nt, Human
uguuggccaggcuggu

SEQ ID NO: 1997256 - RNA, 15 nt, Human
uguuggcagaugcag

SEQ ID NO: 1997257 - RNA, 15 nt, Human
uguugauuaaagaug

SEQ ID NO: 1997258 - RNA, 16 nt, Human
uguugauuaaagauga

SEQ ID NO: 1997259 - RNA, 14 nt, Human
uguugauucucucc

SEQ ID NO: 1997260 - RNA, 20 nt, Human
uguugaugcaauccuuacaa

SEQ ID NO: 1997261 - RNA, 21 nt, Human
uguugaugcaauccuuacaaa

SEQ ID NO: 1997262 - RNA, 22 nt, Human
uguugaugcaauccuuacaaau

SEQ ID NO: 1997263 - RNA, 23 nt, Human
uguugaugcaauccuuacaaaug

SEQ ID NO: 1997264 - RNA, 16 nt, Human
uguugaugcuguauuc

SEQ ID NO: 1997265 - RNA, 21 nt, Human
uguugaugggaugauugaaga

SEQ ID NO: 1997266 - RNA, 23 nt, Human
uguugaugggaugauugaagaaa

SEQ ID NO: 1997267 - RNA, 16 nt, Human
uguucucugcccucca

SEQ ID NO: 1997268 - RNA, 15 nt, Human
uguucucugcccucc

SEQ ID NO: 1997269 - RNA, 14 nt, Human
uguucucugcccuc

SEQ ID NO: 1997270 - RNA, 13 nt, Human
uguucucugcccu

SEQ ID NO: 1997271 - RNA, 16 nt, Human
uguucuggcucuucca

SEQ ID NO: 1997272 - RNA, 13 nt, Human
uguucuggcucuu

SEQ ID NO: 1997273 - RNA, 12 nt, Human
uguucuggcucu

SEQ ID NO: 1997274 - RNA, 20 nt, Human
uguucugcuaaauuucaaau

SEQ ID NO: 1997275 - RNA, 13 nt, Human
uguucaugaaaga

SEQ ID NO: 1997276 - RNA, 14 nt, Human
uguucaugaaagau

SEQ ID NO: 1997277 - RNA, 19 nt, Human
uguucaucauccuaagcua

SEQ ID NO: 1997278 - RNA, 16 nt, Human
uguucucucuucucca

SEQ ID NO: 1997279 - RNA, 15 nt, Human
uguucucucuucucc

SEQ ID NO: 1997280 - RNA, 16 nt, Human
uguucuuuugucccag

SEQ ID NO: 1997281 - RNA, 12 nt, Human
uguucuuuucaa

SEQ ID NO: 1997282 - RNA, 23 nt, Human
uguucuuucuggcuaugcauuug

SEQ ID NO: 1997283 - RNA, 20 nt, Human
uguucuggcucuuccaggcu

SEQ ID NO: 1997284 - RNA, 17 nt, Human
uguucuggcucuuccag

SEQ ID NO: 1997285 - RNA, 21 nt, Human
uguucuggcucuuccaggcug

SEQ ID NO: 1997286 - RNA, 15 nt, Human
uguucugcuuuccuc

SEQ ID NO: 1997287 - RNA, 15 nt, Human
uguugacauuuguuu

SEQ ID NO: 1997288 - RNA, 22 nt, Human
uguugaccaggcaccuccccuc

SEQ ID NO: 1997289 - RNA, 21 nt, Human
uguugaccaggcaccuccccu

SEQ ID NO: 1997290 - RNA, 19 nt, Human
uguugacucuaguacugug

SEQ ID NO: 1997291 - RNA, 22 nt, Human
uguugacucuaguacugugaau

SEQ ID NO: 1997292 - RNA, 15 nt, Human
uguugaagccuuugu

SEQ ID NO: 1997293 - RNA, 20 nt, Human
uguugaaaagaguaguacuu

SEQ ID NO: 1997294 - RNA, 20 nt, Human
uguugacaucacuggcaugg

SEQ ID NO: 1997295 - RNA, 23 nt, Human
uuaaagaaaaaaaugucaaaagu

SEQ ID NO: 1997296 - RNA, 17 nt, Human
uuaaagaaacaugguuu

SEQ ID NO: 1997297 - RNA, 16 nt, Human
uuaaaugcccagcccc

SEQ ID NO: 1997298 - RNA, 15 nt, Human
uuaaaugcccagccc

SEQ ID NO: 1997299 - RNA, 14 nt, Human
uuaaaugcccagcc

SEQ ID NO: 1997300 - RNA, 11 nt, Human
uuaaaugcacc

SEQ ID NO: 1997301 - RNA, 22 nt, Human
uuaaaucauacuccuaugcuuu

SEQ ID NO: 1997302 - RNA, 22 nt, Human
uuaaacuuaaucuaaauggaac

SEQ ID NO: 1997303 - RNA, 21 nt, Human
uuaaacuuuagugcuacagaa

SEQ ID NO: 1997304 - RNA, 16 nt, Human
uuaaagaaaaaaaugu

SEQ ID NO: 1997305 - RNA, 14 nt, Human
uuaaaacccaagug

SEQ ID NO: 1997306 - RNA, 16 nt, Human
uuaaaacuacuuagca

SEQ ID NO: 1997307 - RNA, 14 nt, Human
uuaaaacuucaucu

SEQ ID NO: 1997308 - RNA, 20 nt, Human
uuaaaacugcaguuuucaga

SEQ ID NO: 1997309 - RNA, 13 nt, Human
uuaaaauaaacuu

SEQ ID NO: 1997310 - RNA, 16 nt, Human
uuaaaauaaacuuucu

SEQ ID NO: 1997311 - RNA, 12 nt, Human
uguuuuucugcu

SEQ ID NO: 1997312 - RNA, 16 nt, Human
uguuuuuaaguuugca

SEQ ID NO: 1997313 - RNA, 18 nt, Human
uguuuuugaaggcagaaa

SEQ ID NO: 1997314 - RNA, 20 nt, Human
uguuuuugaaggcagaaagc

SEQ ID NO: 1997315 - RNA, 14 nt, Human
uguuuuucugcuuu

SEQ ID NO: 1997316 - RNA, 15 nt, Human
uguuuuucugcuuua

SEQ ID NO: 1997317 - RNA, 18 nt, Human
uguuuuucugcuuuagac

SEQ ID NO: 1997318 - RNA, 19 nt, Human
uguuuuucugcuuuagacu

SEQ ID NO: 1997319 - RNA, 16 nt, Human
uguuuuugaaggcaga

SEQ ID NO: 1997320 - RNA, 14 nt, Human
uguuuuuguauauu

SEQ ID NO: 1997321 - RNA, 21 nt, Human
uguuuuuguauauugguuuua

SEQ ID NO: 1997322 - RNA, 22 nt, Human
uuaaaaaaaaaccugagcccca

SEQ ID NO: 1997323 - RNA, 13 nt, Human
uguuuuuguaaag

SEQ ID NO: 1997324 - RNA, 14 nt, Human
uguuuuuguaaaga

SEQ ID NO: 1997325 - RNA, 16 nt, Human
uguuuuuguaaagaaa

SEQ ID NO: 1997326 - RNA, 17 nt, Human
uguuuuuguaaagaaaa

SEQ ID NO: 1997327 - RNA, 12 nt, Human
uguuuuuguaua

SEQ ID NO: 1997328 - RNA, 13 nt, Human
uguuuuuguauau

SEQ ID NO: 1997329 - RNA, 15 nt, Human
uguuuuuaaaaucuu

SEQ ID NO: 1997330 - RNA, 16 nt, Human
uguuuuuaaaaucuua

SEQ ID NO: 1997331 - RNA, 12 nt, Human
uguuuuuaagau

SEQ ID NO: 1997332 - RNA, 21 nt, Human
uguuuuuaaaaucuuauuaaa

SEQ ID NO: 1997333 - RNA, 17 nt, Human
uguuuuuaaaaucuuau

SEQ ID NO: 1997334 - RNA, 19 nt, Human
uguuuuuaaaaucuuauua

SEQ ID NO: 1997335 - RNA, 22 nt, Human
uguuuuaaggaugcuuguacau

SEQ ID NO: 1997336 - RNA, 23 nt, Human
uguuuuaaggaugcuuguacaua

SEQ ID NO: 1997337 - RNA, 17 nt, Human
uguuuuaagaggcaggg

SEQ ID NO: 1997338 - RNA, 19 nt, Human
uguuuuaacaagaagcaau

SEQ ID NO: 1997339 - RNA, 19 nt, Human
uguuuuaaggaugcuugua

SEQ ID NO: 1997340 - RNA, 11 nt, Human
uguuucugggg

SEQ ID NO: 1997341 - RNA, 16 nt, Human
uguuugugugucaagu

SEQ ID NO: 1997342 - RNA, 14 nt, Human
uguuuguucuuguu

SEQ ID NO: 1997343 - RNA, 16 nt, Human
uguuuguucuuguuuu

SEQ ID NO: 1997344 - RNA, 16 nt, Human
uguuuuaagaggcagg

SEQ ID NO: 1997345 - RNA, 16 nt, Human
uguuuccugcaggcca

SEQ ID NO: 1997346 - RNA, 18 nt, Human
uguuucuggcuuagaaca

SEQ ID NO: 1997347 - RNA, 15 nt, Human
uguuuccuggcacug

SEQ ID NO: 1997348 - RNA, 13 nt, Human
uuacaaccuagaa

SEQ ID NO: 1997349 - RNA, 23 nt, Human
uuacaaauuauaauguauucaua

SEQ ID NO: 1997350 - RNA, 24 nt, Human
uuacaaauuauaauguauucauau

SEQ ID NO: 1997351 - RNA, 14 nt, Human
uuacaacacuuuaa

SEQ ID NO: 1997352 - RNA, 21 nt, Human
uuacaaauuauaauguauuca

SEQ ID NO: 1997353 - RNA, 16 nt, Human
uuacaaccuagaagua

SEQ ID NO: 1997354 - RNA, 19 nt, Human
uuaaugagcaauaucugcu

SEQ ID NO: 1997355 - RNA, 22 nt, Human
uuaauuaaaacacaacaucuuu

SEQ ID NO: 1997356 - RNA, 19 nt, Human
uuacauuuguauuuuucca

SEQ ID NO: 1997357 - RNA, 12 nt, Human
uuacauuuuuaa

SEQ ID NO: 1997358 - RNA, 17 nt, Human
uuacauuuuuaagugcu

SEQ ID NO: 1997359 - RNA, 13 nt, Human
uuacauucaguug

SEQ ID NO: 1997360 - RNA, 20 nt, Human
uuacacuuuaugcacaaaau

SEQ ID NO: 1997361 - RNA, 13 nt, Human
uuacacuuuaugc

SEQ ID NO: 1997362 - RNA, 16 nt, Human
uuacacuuuuuggaag

SEQ ID NO: 1997363 - RNA, 20 nt, Human
uuacacuggcaaugguaguu

SEQ ID NO: 1997364 - RNA, 21 nt, Human
uuacacuggcaaugguaguuu

SEQ ID NO: 1997365 - RNA, 22 nt, Human
uuacacuggcaaugguaguuuc

SEQ ID NO: 1997366 - RNA, 23 nt, Human
uuacacuggcaaugguaguuucu

SEQ ID NO: 1997367 - RNA, 14 nt, Human
uuaauacuguuauu

SEQ ID NO: 1997368 - RNA, 18 nt, Human
uuaauacuguuauucuuu

SEQ ID NO: 1997369 - RNA, 20 nt, Human
uuaauacuguuauucuuugc

SEQ ID NO: 1997370 - RNA, 22 nt, Human
uuaauaauagauugugaauaau

SEQ ID NO: 1997371 - RNA, 20 nt, Human
uuaauaaucaagagccuuaa

SEQ ID NO: 1997372 - RNA, 21 nt, Human
uuaauacuguuauucuuugca

SEQ ID NO: 1997373 - RNA, 23 nt, Human
uuaauacuguuauucuuugcacu

SEQ ID NO: 1997374 - RNA, 15 nt, Human
uuaagcagaauugga

SEQ ID NO: 1997375 - RNA, 17 nt, Human
uuaagcagaauuggaaa

SEQ ID NO: 1997376 - RNA, 15 nt, Human
uuaagcaugacagaa

SEQ ID NO: 1997377 - RNA, 17 nt, Human
uuaagcaugacagaaaa

SEQ ID NO: 1997378 - RNA, 15 nt, Human
uuaagccuaaagauu

SEQ ID NO: 1997379 - RNA, 16 nt, Human
uuaagccuaaagauuu

SEQ ID NO: 1997380 - RNA, 20 nt, Human
uuaagccuaaagauuuugau

SEQ ID NO: 1997381 - RNA, 19 nt, Human
uuaagccucaaauuugaac

SEQ ID NO: 1997382 - RNA, 20 nt, Human
uuaaaugcaaccauuugaaa

SEQ ID NO: 1997383 - RNA, 13 nt, Human
uuaaaugcccagc

SEQ ID NO: 1997384 - RNA, 19 nt, Human
uuaaaugucaaaugugaau

SEQ ID NO: 1997385 - RNA, 20 nt, Human
uuaaaugucaaaugugaauu

SEQ ID NO: 1997386 - RNA, 11 nt, Human
uuaaaugugaa

SEQ ID NO: 1997387 - RNA, 12 nt, Human
uuaaaugugaau

SEQ ID NO: 1997388 - RNA, 16 nt, Human
uuaaaugugaauuacu

SEQ ID NO: 1997389 - RNA, 18 nt, Human
uuaaaugugaauuacuaa

SEQ ID NO: 1997390 - RNA, 13 nt, Human
uuaaauguuaugu

SEQ ID NO: 1997391 - RNA, 14 nt, Human
uuaaauguuaugua

SEQ ID NO: 1997392 - RNA, 16 nt, Human
uuaaauguuauguaua

SEQ ID NO: 1997393 - RNA, 21 nt, Human
uuaaaugugaauuacuaacuu

SEQ ID NO: 1997394 - RNA, 22 nt, Human
uuaaaugugaauuacuaacuuc

SEQ ID NO: 1997395 - RNA, 21 nt, Human
uuaaaugugugagugcaugua

SEQ ID NO: 1997396 - RNA, 12 nt, Human
uuaacuuuuaua

SEQ ID NO: 1997397 - RNA, 13 nt, Human
uuaacuuuuauaa

SEQ ID NO: 1997398 - RNA, 14 nt, Human
uuaacuuuuauaaa

SEQ ID NO: 1997399 - RNA, 12 nt, Human
uuaagaguaaaa

SEQ ID NO: 1997400 - RNA, 14 nt, Human
uuaagauuauaauu

SEQ ID NO: 1997401 - RNA, 15 nt, Human
uuaagauuauaauug

SEQ ID NO: 1997402 - RNA, 16 nt, Human
uuaagauuauaauugu

SEQ ID NO: 1997403 - RNA, 12 nt, Human
uguccuacucug

SEQ ID NO: 1997404 - RNA, 17 nt, Human
uguccuacucuguguca

SEQ ID NO: 1997405 - RNA, 16 nt, Human
uguccccgacccuugc

SEQ ID NO: 1997406 - RNA, 17 nt, Human
uguccccgacccuugcc

SEQ ID NO: 1997407 - RNA, 20 nt, Human
uguccuacccacccuccuuu

SEQ ID NO: 1997408 - RNA, 22 nt, Human
uguccccaccgcagacaggacc

SEQ ID NO: 1997409 - RNA, 19 nt, Human
uguccccaccgcagacagg

SEQ ID NO: 1997410 - RNA, 13 nt, Human
uguccccaccgca

SEQ ID NO: 1997411 - RNA, 18 nt, Human
uguccccaccgcagacag

SEQ ID NO: 1997412 - RNA, 19 nt, Human
ugucauuugagcagggcuc

SEQ ID NO: 1997413 - RNA, 16 nt, Human
ugucauuugagcaggg

SEQ ID NO: 1997414 - RNA, 22 nt, Human
ugucauuucauguccuguguca

SEQ ID NO: 1997415 - RNA, 18 nt, Human
ugucauuucauguccugu

SEQ ID NO: 1997416 - RNA, 16 nt, Human
ugucccaacuuguaaa

SEQ ID NO: 1997417 - RNA, 16 nt, Human
uguccaguaagaucac

SEQ ID NO: 1997418 - RNA, 17 nt, Human
uguccaguaagaucacu

SEQ ID NO: 1997419 - RNA, 19 nt, Human
uguccaguaagaucacugu

SEQ ID NO: 1997420 - RNA, 20 nt, Human
uguccaguaagaucacuguu

SEQ ID NO: 1997421 - RNA, 21 nt, Human
uguccaguaagaucacuguuu

SEQ ID NO: 1997422 - RNA, 22 nt, Human
uguccaguaagaucacuguuua

SEQ ID NO: 1997423 - RNA, 16 nt, Human
ugucaucugagaauga

SEQ ID NO: 1997424 - RNA, 17 nt, Human
ugucaccugcuucucug

SEQ ID NO: 1997425 - RNA, 18 nt, Human
ugucaccugcuucucugc

SEQ ID NO: 1997426 - RNA, 20 nt, Human
ugucaccugcuucucugccc

SEQ ID NO: 1997427 - RNA, 13 nt, Human
ugucaccugaaga

SEQ ID NO: 1997428 - RNA, 20 nt, Human
ugucaugcagaguauuucua

SEQ ID NO: 1997429 - RNA, 19 nt, Human
ugucaucugagaaugaaca

SEQ ID NO: 1997430 - RNA, 18 nt, Human
uguauuguuguaaaaugu

SEQ ID NO: 1997431 - RNA, 20 nt, Human
uguauuuauuuaguauuuau

SEQ ID NO: 1997432 - RNA, 14 nt, Human
uguauuuauucuuu

SEQ ID NO: 1997433 - RNA, 15 nt, Human
uguauuuauucuuuu

SEQ ID NO: 1997434 - RNA, 22 nt, Human
ugucacccuuaggccagcacca

SEQ ID NO: 1997435 - RNA, 20 nt, Human
ugucacccgaucgccagcaa

SEQ ID NO: 1997436 - RNA, 12 nt, Human
ugucacaggcag

SEQ ID NO: 1997437 - RNA, 21 nt, Human
ugucacaggaaggcugucuca

SEQ ID NO: 1997438 - RNA, 15 nt, Human
uguauuuugugaguu

SEQ ID NO: 1997439 - RNA, 17 nt, Human
ugucacacacuuuggcu

SEQ ID NO: 1997440 - RNA, 22 nt, Human
uguauucucuccuguaccucuu

SEQ ID NO: 1997441 - RNA, 13 nt, Human
uguauucuguaaa

SEQ ID NO: 1997442 - RNA, 14 nt, Human
uguauucuguaaaa

SEQ ID NO: 1997443 - RNA, 13 nt, Human
uguauucugucuu

SEQ ID NO: 1997444 - RNA, 16 nt, Human
uguauucugucuucau

SEQ ID NO: 1997445 - RNA, 17 nt, Human
uguauucugucuucauc

SEQ ID NO: 1997446 - RNA, 19 nt, Human
uguauuguccuauuagugu

SEQ ID NO: 1997447 - RNA, 14 nt, Human
uguauuguccuauu

SEQ ID NO: 1997448 - RNA, 22 nt, Human
uguauaaaagggacugagaaau

SEQ ID NO: 1997449 - RNA, 16 nt, Human
uguaugaucugugccu

SEQ ID NO: 1997450 - RNA, 17 nt, Human
uguaugaucugugccuu

SEQ ID NO: 1997451 - RNA, 22 nt, Human
uguaguuugaggaaauuugcag

SEQ ID NO: 1997452 - RNA, 12 nt, Human
uguaguucuuua

SEQ ID NO: 1997453 - RNA, 14 nt, Human
uguaguucuuuaaa

SEQ ID NO: 1997454 - RNA, 15 nt, Human
uguaguucuuuaaac

SEQ ID NO: 1997455 - RNA, 17 nt, Human
uguaguucuuuaaacug

SEQ ID NO: 1997456 - RNA, 16 nt, Human
uguaccgcaaugugac

SEQ ID NO: 1997457 - RNA, 18 nt, Human
uguacagagcccacgccc

SEQ ID NO: 1997458 - RNA, 13 nt, Human
uguacagagccca

SEQ ID NO: 1997459 - RNA, 18 nt, Human
uguacaaugacuuuauug

SEQ ID NO: 1997460 - RNA, 17 nt, Human
uguacagagcccacgcc

SEQ ID NO: 1997461 - RNA, 16 nt, Human
uguacagagcccacgc

SEQ ID NO: 1997462 - RNA, 17 nt, Human
uguaauuaaguacuaug

SEQ ID NO: 1997463 - RNA, 14 nt, Human
uguaauguugugaa

SEQ ID NO: 1997464 - RNA, 15 nt, Human
uguaauguugugaau

SEQ ID NO: 1997465 - RNA, 16 nt, Human
uguacaaggacagccc

SEQ ID NO: 1997466 - RNA, 20 nt, Human
uguacaaggacagccccucc

SEQ ID NO: 1997467 - RNA, 23 nt, Human
uguacaaggacagccccuccucc

SEQ ID NO: 1997468 - RNA, 14 nt, Human
uggucacagccagg

SEQ ID NO: 1997469 - RNA, 23 nt, Human
ugguauuggccauaagcaacaau

SEQ ID NO: 1997470 - RNA, 15 nt, Human
uggucacagccaggc

SEQ ID NO: 1997471 - RNA, 17 nt, Human
uggucacagccaggcgc

SEQ ID NO: 1997472 - RNA, 23 nt, Human
uguaauaaacccuuaacuggcau

SEQ ID NO: 1997473 - RNA, 14 nt, Human
uguaauaaacccuu

SEQ ID NO: 1997474 - RNA, 22 nt, Human
uguaauaaacccuuaacuggca

SEQ ID NO: 1997475 - RNA, 14 nt, Human
uguaaucacagcua

SEQ ID NO: 1997476 - RNA, 14 nt, Human
uguaaucaacaugg

SEQ ID NO: 1997477 - RNA, 14 nt, Human
uguagcauccugga

SEQ ID NO: 1997478 - RNA, 16 nt, Human
uguagcauccuggaau

SEQ ID NO: 1997479 - RNA, 15 nt, Human
uguagauuuauuuca

SEQ ID NO: 1997480 - RNA, 16 nt, Human
uguagauuuauuucau

SEQ ID NO: 1997481 - RNA, 12 nt, Human
uguagauuugau

SEQ ID NO: 1997482 - RNA, 17 nt, Human
uguagcauccuggaaua

SEQ ID NO: 1997483 - RNA, 18 nt, Human
uguagcauccuggaauau

SEQ ID NO: 1997484 - RNA, 20 nt, Human
uguagaucaacucauguuaa

SEQ ID NO: 1997485 - RNA, 19 nt, Human
uguacugcauaugaaagga

SEQ ID NO: 1997486 - RNA, 14 nt, Human
uguaccucugccuc

SEQ ID NO: 1997487 - RNA, 15 nt, Human
uguacgucugacagg

SEQ ID NO: 1997488 - RNA, 22 nt, Human
uguacgacgucagauguuuaaa

SEQ ID NO: 1997489 - RNA, 23 nt, Human
uguacgacgucagauguuuaaaa

SEQ ID NO: 1997490 - RNA, 23 nt, Human
uguagccucaaucgagugagaca

SEQ ID NO: 1997491 - RNA, 18 nt, Human
uguagccccucuccugga

SEQ ID NO: 1997492 - RNA, 20 nt, Human
ugugcauuaucuagauacug

SEQ ID NO: 1997493 - RNA, 21 nt, Human
ugugcauuaucuagauacugu

SEQ ID NO: 1997494 - RNA, 23 nt, Human
ugugcauuaucuagauacuguau

SEQ ID NO: 1997495 - RNA, 17 nt, Human
ugugccuuggugugcug

SEQ ID NO: 1997496 - RNA, 23 nt, Human
ugugcauuuggugguuucagaaa

SEQ ID NO: 1997497 - RNA, 14 nt, Human
ugugcauuaucuag

SEQ ID NO: 1997498 - RNA, 16 nt, Human
ugugcauuaucuagau

SEQ ID NO: 1997499 - RNA, 19 nt, Human
ugugcauuaucuagauacu

SEQ ID NO: 1997500 - RNA, 17 nt, Human
ugugcacaucuguuuug

SEQ ID NO: 1997501 - RNA, 15 nt, Human
ugugcacaucuguuu

SEQ ID NO: 1997502 - RNA, 14 nt, Human
ugugcacguacaca

SEQ ID NO: 1997503 - RNA, 19 nt, Human
uguggaaauuaagaagaaa

SEQ ID NO: 1997504 - RNA, 16 nt, Human
ugugcucaggagcccu

SEQ ID NO: 1997505 - RNA, 15 nt, Human
ugugcucaggagccc

SEQ ID NO: 1997506 - RNA, 17 nt, Human
ugugcucaggagcccug

SEQ ID NO: 1997507 - RNA, 14 nt, Human
ugugcuuguuaacu

SEQ ID NO: 1997508 - RNA, 16 nt, Human
ugugccuuuugccauc

SEQ ID NO: 1997509 - RNA, 14 nt, Human
ugugccuuuuuuau

SEQ ID NO: 1997510 - RNA, 20 nt, Human
ugugccuuuuuuauaucuug

SEQ ID NO: 1997511 - RNA, 14 nt, Human
ugugcgccuacagg

SEQ ID NO: 1997512 - RNA, 19 nt, Human
ugugcgccuacaggaguga

SEQ ID NO: 1997513 - RNA, 14 nt, Human
ugugcucagaauua

SEQ ID NO: 1997514 - RNA, 21 nt, Human
ugugcucagaauuauuaauua

SEQ ID NO: 1997515 - RNA, 19 nt, Human
ugugcgcauaggccugcuu

SEQ ID NO: 1997516 - RNA, 22 nt, Human
ugugcgcauaggccugcuuugu

SEQ ID NO: 1997517 - RNA, 15 nt, Human
uguggaagugugggu

SEQ ID NO: 1997518 - RNA, 18 nt, Human
uguggacacagcucuucu

SEQ ID NO: 1997519 - RNA, 19 nt, Human
uguggacacagcucuucuc

SEQ ID NO: 1997520 - RNA, 14 nt, Human
ugugggagugugua

SEQ ID NO: 1997521 - RNA, 15 nt, Human
ugugggaguguguaa

SEQ ID NO: 1997522 - RNA, 10 nt, Human
uguggcucac

SEQ ID NO: 1997523 - RNA, 12 nt, Human
uguggcuccaca

SEQ ID NO: 1997524 - RNA, 20 nt, Human
uguggcuccacacacacaaa

SEQ ID NO: 1997525 - RNA, 14 nt, Human
uguggccugccagu

SEQ ID NO: 1997526 - RNA, 18 nt, Human
uguggccucuucugagcu

SEQ ID NO: 1997527 - RNA, 16 nt, Human
uguggccucuucugag

SEQ ID NO: 1997528 - RNA, 23 nt, Human
uguggcgcagcauauucaggaag

SEQ ID NO: 1997529 - RNA, 11 nt, Human
uguguaauuua

SEQ ID NO: 1997530 - RNA, 18 nt, Human
uguguaauuuaaaauugu

SEQ ID NO: 1997531 - RNA, 22 nt, Human
ugugggcuaguugggcuuccuc

SEQ ID NO: 1997532 - RNA, 22 nt, Human
ugugggcgugagaccugccccu

SEQ ID NO: 1997533 - RNA, 20 nt, Human
ugugggcgugagaccugccc

SEQ ID NO: 1997534 - RNA, 21 nt, Human
ugugggcgugagaccugcccc

SEQ ID NO: 1997535 - RNA, 15 nt, Human
ugugggcaaaagagu

SEQ ID NO: 1997536 - RNA, 19 nt, Human
uguguaauuuaaaauugug

SEQ ID NO: 1997537 - RNA, 22 nt, Human
uguguaauuuaaaauugugaug

SEQ ID NO: 1997538 - RNA, 23 nt, Human
uguguaauuuaaaauugugaugu

SEQ ID NO: 1997539 - RNA, 12 nt, Human
uguguaauuuuu

SEQ ID NO: 1997540 - RNA, 14 nt, Human
uguguaauuuuucu

SEQ ID NO: 1997541 - RNA, 15 nt, Human
uguguaauuuuucug

SEQ ID NO: 1997542 - RNA, 17 nt, Human
uguguaauuuuucugua

SEQ ID NO: 1997543 - RNA, 19 nt, Human
uguguaauuuuucuguaua

SEQ ID NO: 1997544 - RNA, 16 nt, Human
uguguagggcgggagg

SEQ ID NO: 1997545 - RNA, 12 nt, Human
uguguagggcgg

SEQ ID NO: 1997546 - RNA, 10 nt, Human
ugugacauuu

SEQ ID NO: 1997547 - RNA, 15 nt, Human
ugugacauuugucau

SEQ ID NO: 1997548 - RNA, 18 nt, Human
ugugacauuugucauuuu

SEQ ID NO: 1997549 - RNA, 19 nt, Human
ugugacauuugucauuuuc

SEQ ID NO: 1997550 - RNA, 19 nt, Human
ugugaauuacuaacuucua

SEQ ID NO: 1997551 - RNA, 20 nt, Human
ugugaauuacuaacuucuaa

SEQ ID NO: 1997552 - RNA, 16 nt, Human
ugugaaggaccuucac

SEQ ID NO: 1997553 - RNA, 23 nt, Human
ugugaaggcaggggaauguaugu

SEQ ID NO: 1997554 - RNA, 13 nt, Human
ugugaauuacuaa

SEQ ID NO: 1997555 - RNA, 15 nt, Human
ugugaauuacuaacu

SEQ ID NO: 1997556 - RNA, 16 nt, Human
ugugaauuacuaacuu

SEQ ID NO: 1997557 - RNA, 17 nt, Human
ugugaauuacuaacuuc

SEQ ID NO: 1997558 - RNA, 18 nt, Human
ugugaggaagccgcuggg

SEQ ID NO: 1997559 - RNA, 13 nt, Human
ugugaggaagccg

SEQ ID NO: 1997560 - RNA, 22 nt, Human
ugugacauuugucauuuucauu

SEQ ID NO: 1997561 - RNA, 20 nt, Human
ugugacauuugucauuuuca

SEQ ID NO: 1997562 - RNA, 21 nt, Human
ugugacauuugucauuuucau

SEQ ID NO: 1997563 - RNA, 20 nt, Human
ugugaggaagccgcuggggc

SEQ ID NO: 1997564 - RNA, 12 nt, Human
ugugaggaagcc

SEQ ID NO: 1997565 - RNA, 12 nt, Human
ugugaggcagga

SEQ ID NO: 1997566 - RNA, 14 nt, Human
ugugaggcaggaga

SEQ ID NO: 1997567 - RNA, 15 nt, Human
ugugagucaccaagc

SEQ ID NO: 1997568 - RNA, 17 nt, Human
ugugagucaccaagccc

SEQ ID NO: 1997569 - RNA, 19 nt, Human
ugugagucaccaagcccag

SEQ ID NO: 1997570 - RNA, 21 nt, Human
ugugagucaccaagcccaguu

SEQ ID NO: 1997571 - RNA, 14 nt, Human
ugugagugguugaa

SEQ ID NO: 1997572 - RNA, 16 nt, Human
ugugauauaagugugu

SEQ ID NO: 1997573 - RNA, 15 nt, Human
ugugauauuccccuu

SEQ ID NO: 1997574 - RNA, 12 nt, Human
ugugcacaggca

SEQ ID NO: 1997575 - RNA, 13 nt, Human
ugugcacaggcag

SEQ ID NO: 1997576 - RNA, 14 nt, Human
ugugcacaggcaga

SEQ ID NO: 1997577 - RNA, 16 nt, Human
ugugcacaggcagagc

SEQ ID NO: 1997578 - RNA, 13 nt, Human
ugugauauuucag

SEQ ID NO: 1997579 - RNA, 14 nt, Human
ugugauauuucaga

SEQ ID NO: 1997580 - RNA, 16 nt, Human
ugugauauuucagaaa

SEQ ID NO: 1997581 - RNA, 20 nt, Human
ugugauauuucagaaauaca

SEQ ID NO: 1997582 - RNA, 22 nt, Human
ugugauauuucagaaauacaga

SEQ ID NO: 1997583 - RNA, 14 nt, Human
uguccucagggagc

SEQ ID NO: 1997584 - RNA, 19 nt, Human
uguccucagggagcaggga

SEQ ID NO: 1997585 - RNA, 12 nt, Human
uguccucaggga

SEQ ID NO: 1997586 - RNA, 23 nt, Human
uguccucagggagcagggaaggc

SEQ ID NO: 1997587 - RNA, 14 nt, Human
uguccuccugcugc

SEQ ID NO: 1997588 - RNA, 17 nt, Human
uguccuccugcugccag

SEQ ID NO: 1997589 - RNA, 18 nt, Human
uguccuccugcugccagu

SEQ ID NO: 1997590 - RNA, 19 nt, Human
ugucugaagucacugcaca

SEQ ID NO: 1997591 - RNA, 18 nt, Human
ugucugcuggucacuucu

SEQ ID NO: 1997592 - RNA, 21 nt, Human
ugucugcuggucacuucuucu

SEQ ID NO: 1997593 - RNA, 22 nt, Human
ugucugcuggucacuucuucug

SEQ ID NO: 1997594 - RNA, 23 nt, Human
ugucugcuggucacuucuucugu

SEQ ID NO: 1997595 - RNA, 17 nt, Human
ugucugaagucacugca

SEQ ID NO: 1997596 - RNA, 18 nt, Human
ugucugaagucacugcac

SEQ ID NO: 1997597 - RNA, 16 nt, Human
ugucugaagucacugc

SEQ ID NO: 1997598 - RNA, 17 nt, Human
ugucuggcacagccugc

SEQ ID NO: 1997599 - RNA, 18 nt, Human
ugucuggcacagccugca

SEQ ID NO: 1997600 - RNA, 20 nt, Human
ugucuggcacagccugcacu

SEQ ID NO: 1997601 - RNA, 23 nt, Human
ugucuuuucuugcaugaggcuag

SEQ ID NO: 1997602 - RNA, 17 nt, Human
ugucuuucuugcucccu

SEQ ID NO: 1997603 - RNA, 19 nt, Human
ugucuuuucuuugccaucu

SEQ ID NO: 1997604 - RNA, 20 nt, Human
ugucuuuucuuugccaucuc

SEQ ID NO: 1997605 - RNA, 23 nt, Human
ugugaaaagaaaaaugagccugg

SEQ ID NO: 1997606 - RNA, 22 nt, Human
ugugaagcuuaagggucauaug

SEQ ID NO: 1997607 - RNA, 13 nt, Human
ugugaaggaccuu

SEQ ID NO: 1997608 - RNA, 18 nt, Human
ugugaaggaccuucacuc

SEQ ID NO: 1997609 - RNA, 17 nt, Human
ugugaaaaugugugugu

SEQ ID NO: 1997610 - RNA, 12 nt, Human
ugugaagcugga

SEQ ID NO: 1997611 - RNA, 21 nt, Human
ugugaagcuggaacugcggga

SEQ ID NO: 1997612 - RNA, 16 nt, Human
ugugaaaaugugugug

SEQ ID NO: 1997613 - RNA, 21 nt, Human
ugucuuuucuugcaugaggcu

SEQ ID NO: 1997614 - RNA, 16 nt, Human
ugucuuuggacccuga

SEQ ID NO: 1997615 - RNA, 14 nt, Human
ugucuuuggacccu

SEQ ID NO: 1997616 - RNA, 13 nt, Human
ugucuuucugggg

SEQ ID NO: 1997617 - RNA, 16 nt, Human
ugucugucccaguuaa

SEQ ID NO: 1997618 - RNA, 22 nt, Human
ugcucuccucuugccacugccu

SEQ ID NO: 1997619 - RNA, 17 nt, Human
ugcucuccaagcccagu

SEQ ID NO: 1997620 - RNA, 22 nt, Human
ugcucucaccuugguuccuggg

SEQ ID NO: 1997621 - RNA, 16 nt, Human
ugcucuccucuugcca

SEQ ID NO: 1997622 - RNA, 14 nt, Human
ugcucuccucuugc

SEQ ID NO: 1997623 - RNA, 18 nt, Human
ugcucuccucuugccacu

SEQ ID NO: 1997624 - RNA, 21 nt, Human
ugcucuccucuugccacugcc

SEQ ID NO: 1997625 - RNA, 22 nt, Human
ugcucgccucggaucagcugag

SEQ ID NO: 1997626 - RNA, 18 nt, Human
ugcucucaaaccccugac

SEQ ID NO: 1997627 - RNA, 19 nt, Human
ugcucucaaaccccugacc

SEQ ID NO: 1997628 - RNA, 20 nt, Human
ugcucucaaaccccugaccu

SEQ ID NO: 1997629 - RNA, 21 nt, Human
ugcucucaaaccccugaccuc

SEQ ID NO: 1997630 - RNA, 20 nt, Human
ugcucucaccuugguuccug

SEQ ID NO: 1997631 - RNA, 18 nt, Human
ugcuccuuucuuguuuua

SEQ ID NO: 1997632 - RNA, 17 nt, Human
ugcuccucuccccagca

SEQ ID NO: 1997633 - RNA, 18 nt, Human
ugcuccucuccccagcaa

SEQ ID NO: 1997634 - RNA, 17 nt, Human
ugcucagaccagcucuu

SEQ ID NO: 1997635 - RNA, 16 nt, Human
ugcucagaccagcucu

SEQ ID NO: 1997636 - RNA, 17 nt, Human
ugcucagagcaguguuu

SEQ ID NO: 1997637 - RNA, 15 nt, Human
ugcucacauaucugu

SEQ ID NO: 1997638 - RNA, 16 nt, Human
ugcucacauaucuguc

SEQ ID NO: 1997639 - RNA, 22 nt, Human
ugcucagggaaaagcagcucuc

SEQ ID NO: 1997640 - RNA, 21 nt, Human
ugcucagggaaaagcagcucu

SEQ ID NO: 1997641 - RNA, 15 nt, Human
ugcucacaguuauua

SEQ ID NO: 1997642 - RNA, 15 nt, Human
ugcucagcagugaga

SEQ ID NO: 1997643 - RNA, 17 nt, Human
ugcucagcagugagagc

SEQ ID NO: 1997644 - RNA, 20 nt, Human
ugcucagcagugagagcaga

SEQ ID NO: 1997645 - RNA, 14 nt, Human
ugcuccucucccca

SEQ ID NO: 1997646 - RNA, 19 nt, Human
ugcucagugucuggcugca

SEQ ID NO: 1997647 - RNA, 13 nt, Human
ugcugcuggcugg

SEQ ID NO: 1997648 - RNA, 14 nt, Human
ugcugcuuugauau

SEQ ID NO: 1997649 - RNA, 16 nt, Human
ugcugcuuugauauau

SEQ ID NO: 1997650 - RNA, 19 nt, Human
ugcuggaacucuugacagc

SEQ ID NO: 1997651 - RNA, 12 nt, Human
ugcuggaaagag

SEQ ID NO: 1997652 - RNA, 14 nt, Human
ugcugcuaauucuu

SEQ ID NO: 1997653 - RNA, 18 nt, Human
ugcugcuaauucuuugca

SEQ ID NO: 1997654 - RNA, 21 nt, Human
ugcugcuaauucuuugcaaaa

SEQ ID NO: 1997655 - RNA, 18 nt, Human
ugcugcaguugccaguca

SEQ ID NO: 1997656 - RNA, 23 nt, Human
ugcugcaguugccagucaccccg

SEQ ID NO: 1997657 - RNA, 17 nt, Human
ugcugauggugcaauga

SEQ ID NO: 1997658 - RNA, 15 nt, Human
ugcugauggugcaau

SEQ ID NO: 1997659 - RNA, 13 nt, Human
ugcugauggugca

SEQ ID NO: 1997660 - RNA, 18 nt, Human
ugcugauggugcaaugac

SEQ ID NO: 1997661 - RNA, 18 nt, Human
ugcugauuuuauucuuga

SEQ ID NO: 1997662 - RNA, 19 nt, Human
ugcugauuuuauucuugau

SEQ ID NO: 1997663 - RNA, 13 nt, Human
ugcugauuuuauu

SEQ ID NO: 1997664 - RNA, 16 nt, Human
ugcugauuuuauucuu

SEQ ID NO: 1997665 - RNA, 17 nt, Human
ugcugauuuuauucuug

SEQ ID NO: 1997666 - RNA, 21 nt, Human
ugcugaaggcucgagcaugcc

SEQ ID NO: 1997667 - RNA, 13 nt, Human
ugcugaaggcucg

SEQ ID NO: 1997668 - RNA, 22 nt, Human
ugcugacagacacaggcccggc

SEQ ID NO: 1997669 - RNA, 23 nt, Human
ugcugacagacacaggcccggcu

SEQ ID NO: 1997670 - RNA, 12 nt, Human
ugcugaaggcuc

SEQ ID NO: 1997671 - RNA, 23 nt, Human
ugcugaaggaauaaauugcuccu

SEQ ID NO: 1997672 - RNA, 21 nt, Human
ugcugaacauugcauauaacu

SEQ ID NO: 1997673 - RNA, 14 nt, Human
ugcugaacauugga

SEQ ID NO: 1997674 - RNA, 22 nt, Human
ugcugaacauuggagaaucuca

SEQ ID NO: 1997675 - RNA, 19 nt, Human
ugcugaacauugcauauaa

SEQ ID NO: 1997676 - RNA, 15 nt, Human
ugccucuccgccccu

SEQ ID NO: 1997677 - RNA, 20 nt, Human
ugccucuccgccccugagcc

SEQ ID NO: 1997678 - RNA, 9 nt, Human
ugccucucu

SEQ ID NO: 1997679 - RNA, 21 nt, Human
ugccucuccgccccugagccc

SEQ ID NO: 1997680 - RNA, 22 nt, Human
ugccucuccgccccugagccca

SEQ ID NO: 1997681 - RNA, 13 nt, Human
ugccucuugucuu

SEQ ID NO: 1997682 - RNA, 19 nt, Human
ugccugacagagggaugga

SEQ ID NO: 1997683 - RNA, 15 nt, Human
ugccccuggccuugg

SEQ ID NO: 1997684 - RNA, 19 nt, Human
ugccccuggccuugggauc

SEQ ID NO: 1997685 - RNA, 14 nt, Human
ugccccuggccuug

SEQ ID NO: 1997686 - RNA, 18 nt, Human
ugccccuggcagccccug

SEQ ID NO: 1997687 - RNA, 12 nt, Human
ugccucuagcug

SEQ ID NO: 1997688 - RNA, 13 nt, Human
ugccucuagcuga

SEQ ID NO: 1997689 - RNA, 14 nt, Human
ugccucuagcugaa

SEQ ID NO: 1997690 - RNA, 20 nt, Human
ugccucgaacuggcugcaaa

SEQ ID NO: 1997691 - RNA, 18 nt, Human
ugccucgaacuggcugca

SEQ ID NO: 1997692 - RNA, 19 nt, Human
ugccucgaacuggcugcaa

SEQ ID NO: 1997693 - RNA, 18 nt, Human
ugccugggcagaaggaag

SEQ ID NO: 1997694 - RNA, 21 nt, Human
ugccugggaucccucauccuc

SEQ ID NO: 1997695 - RNA, 22 nt, Human
ugccugaggggcagccugccuu

SEQ ID NO: 1997696 - RNA, 15 nt, Human
ugccuggcggggugg

SEQ ID NO: 1997697 - RNA, 15 nt, Human
ugccugaggggcagc

SEQ ID NO: 1997698 - RNA, 16 nt, Human
ugccugaggggcagcc

SEQ ID NO: 1997699 - RNA, 18 nt, Human
ugccugaggggcagccug

SEQ ID NO: 1997700 - RNA, 14 nt, Human
ugccugguggcagc

SEQ ID NO: 1997701 - RNA, 15 nt, Human
ugccugguggcagcu

SEQ ID NO: 1997702 - RNA, 18 nt, Human
ugccuguaaucacagcua

SEQ ID NO: 1997703 - RNA, 16 nt, Human
ugccugguggcagcug

SEQ ID NO: 1997704 - RNA, 14 nt, Human
ugccugugaacuga

SEQ ID NO: 1997705 - RNA, 22 nt, Human
ugcuaaacguguauguuuuuca

SEQ ID NO: 1997706 - RNA, 23 nt, Human
ugcuaaacguguauguuuuucag

SEQ ID NO: 1997707 - RNA, 15 nt, Human
ugcuaaaugugaaug

SEQ ID NO: 1997708 - RNA, 22 nt, Human
ugcuaagacucaguggggaggg

SEQ ID NO: 1997709 - RNA, 12 nt, Human
ugcuaaauuuca

SEQ ID NO: 1997710 - RNA, 15 nt, Human
ugcuaaauugauguu

SEQ ID NO: 1997711 - RNA, 16 nt, Human
ugcuaaauugauguug

SEQ ID NO: 1997712 - RNA, 17 nt, Human
ugcuaaauugauguuga

SEQ ID NO: 1997713 - RNA, 18 nt, Human
ugcuaaauugauguugau

SEQ ID NO: 1997714 - RNA, 21 nt, Human
ugcuaaauugauguugaugca

SEQ ID NO: 1997715 - RNA, 14 nt, Human
ugcgccuacaggag

SEQ ID NO: 1997716 - RNA, 16 nt, Human
ugcgccuacaggagug

SEQ ID NO: 1997717 - RNA, 22 nt, Human
ugcgccuacaggagugagcacu

SEQ ID NO: 1997718 - RNA, 17 nt, Human
ugcuaaacguguauguu

SEQ ID NO: 1997719 - RNA, 18 nt, Human
ugcuaaacguguauguuu

SEQ ID NO: 1997720 - RNA, 19 nt, Human
ugcuaaacguguauguuuu

SEQ ID NO: 1997721 - RNA, 14 nt, Human
ugcgaucuggguuc

SEQ ID NO: 1997722 - RNA, 14 nt, Human
ugccuugacaaacu

SEQ ID NO: 1997723 - RNA, 21 nt, Human
ugccuugacaaacuucuuuca

SEQ ID NO: 1997724 - RNA, 15 nt, Human
ugcgaucuggguuca

SEQ ID NO: 1997725 - RNA, 19 nt, Human
ugcgaucuggguucacugc

SEQ ID NO: 1997726 - RNA, 20 nt, Human
ugcgaucuggguucacugca

SEQ ID NO: 1997727 - RNA, 21 nt, Human
ugcgaucuggguucacugcaa

SEQ ID NO: 1997728 - RNA, 18 nt, Human
ugccuucgguacccacca

SEQ ID NO: 1997729 - RNA, 19 nt, Human
ugccuucgguacccaccac

SEQ ID NO: 1997730 - RNA, 17 nt, Human
ugccugugaacugaacu

SEQ ID NO: 1997731 - RNA, 18 nt, Human
ugccugugaacugaacuc

SEQ ID NO: 1997732 - RNA, 21 nt, Human
ugccugugaacugaacucuga

SEQ ID NO: 1997733 - RNA, 14 nt, Human
ugcacuuucagacu

SEQ ID NO: 1997734 - RNA, 21 nt, Human
ugcacuuucagacucucucug

SEQ ID NO: 1997735 - RNA, 14 nt, Human
ugcacuuuguucug

SEQ ID NO: 1997736 - RNA, 12 nt, Human
ugcacuuuguuc

SEQ ID NO: 1997737 - RNA, 20 nt, Human
ugcagcaauaaagcagcguu

SEQ ID NO: 1997738 - RNA, 23 nt, Human
ugcagcaauaaagcagcguuucu

SEQ ID NO: 1997739 - RNA, 23 nt, Human
ugcagcacagcugagaggcuguc

SEQ ID NO: 1997740 - RNA, 11 nt, Human
ugcagagcugc

SEQ ID NO: 1997741 - RNA, 19 nt, Human
ugcagaggcuaugggaaga

SEQ ID NO: 1997742 - RNA, 22 nt, Human
ugcagagcagugggccuggcca

SEQ ID NO: 1997743 - RNA, 13 nt, Human
ugcagagcugaag

SEQ ID NO: 1997744 - RNA, 21 nt, Human
ugcagagcaggaaacaugacu

SEQ ID NO: 1997745 - RNA, 17 nt, Human
ugcagagcaguaaggga

SEQ ID NO: 1997746 - RNA, 18 nt, Human
ugcagagcaguaagggaa

SEQ ID NO: 1997747 - RNA, 14 nt, Human
ugcacugacucugg

SEQ ID NO: 1997748 - RNA, 15 nt, Human
ugcacugacucugga

SEQ ID NO: 1997749 - RNA, 16 nt, Human
ugcacugacucuggaa

SEQ ID NO: 1997750 - RNA, 17 nt, Human
ugcacugacucuggaaa

SEQ ID NO: 1997751 - RNA, 12 nt, Human
ugcacugacucu

SEQ ID NO: 1997752 - RNA, 13 nt, Human
ugcacugacucug

SEQ ID NO: 1997753 - RNA, 22 nt, Human
ugcacgcugggcaaugagaauc

SEQ ID NO: 1997754 - RNA, 14 nt, Human
ugcacgcuggggaa

SEQ ID NO: 1997755 - RNA, 15 nt, Human
ugcacgcuggggaag

SEQ ID NO: 1997756 - RNA, 20 nt, Human
ugaguccccuguuuguuucu

SEQ ID NO: 1997757 - RNA, 17 nt, Human
ugcaccgggccacagag

SEQ ID NO: 1997758 - RNA, 22 nt, Human
ugcaccgggccacagagaaagu

SEQ ID NO: 1997759 - RNA, 23 nt, Human
ugcaccggcuggccuggccccuc

SEQ ID NO: 1997760 - RNA, 19 nt, Human
ugaguccccuguuuguuuc

SEQ ID NO: 1997761 - RNA, 14 nt, Human
ugcaccgggccaca

SEQ ID NO: 1997762 - RNA, 15 nt, Human
ugcaccgggccacag

SEQ ID NO: 1997763 - RNA, 14 nt, Human
ugcagcagggcagu

SEQ ID NO: 1997764 - RNA, 17 nt, Human
ugcaggauucucaccag

SEQ ID NO: 1997765 - RNA, 21 nt, Human
ugcaggauucucaccagcugu

SEQ ID NO: 1997766 - RNA, 14 nt, Human
ugcaggcagccagg

SEQ ID NO: 1997767 - RNA, 13 nt, Human
ugcaggcagccag

SEQ ID NO: 1997768 - RNA, 15 nt, Human
ugcaggcagccaggc

SEQ ID NO: 1997769 - RNA, 10 nt, Human
ugcaggcagg

SEQ ID NO: 1997770 - RNA, 15 nt, Human
ugcaggccaggccag

SEQ ID NO: 1997771 - RNA, 12 nt, Human
ugcaggcccacc

SEQ ID NO: 1997772 - RNA, 13 nt, Human
ugcaggcccaccc

SEQ ID NO: 1997773 - RNA, 14 nt, Human
ugcaggcccacccu

SEQ ID NO: 1997774 - RNA, 15 nt, Human
ugcaggcccacccug

SEQ ID NO: 1997775 - RNA, 11 nt, Human
ugcaggcaggc

SEQ ID NO: 1997776 - RNA, 13 nt, Human
ugcaggcaggcug

SEQ ID NO: 1997777 - RNA, 17 nt, Human
ugcaggcccacccugcu

SEQ ID NO: 1997778 - RNA, 16 nt, Human
ugcagugcuuccaagg

SEQ ID NO: 1997779 - RNA, 22 nt, Human
ugcagugguaugaucacggcuc

SEQ ID NO: 1997780 - RNA, 22 nt, Human
ugcaguggcgaaaucccugcuc

SEQ ID NO: 1997781 - RNA, 14 nt, Human
ugcaguugccaguc

SEQ ID NO: 1997782 - RNA, 13 nt, Human
ugcaguugccagu

SEQ ID NO: 1997783 - RNA, 13 nt, Human
ugcauauauauau

SEQ ID NO: 1997784 - RNA, 15 nt, Human
ugcauauauauaugu

SEQ ID NO: 1997785 - RNA, 17 nt, Human
ugcauauauauaugugu

SEQ ID NO: 1997786 - RNA, 22 nt, Human
ugcauauaacuuauauuguaag

SEQ ID NO: 1997787 - RNA, 20 nt, Human
ugcauauaacuuauauugua

SEQ ID NO: 1997788 - RNA, 21 nt, Human
ugcauauaacuuauauuguaa

SEQ ID NO: 1997789 - RNA, 15 nt, Human
ugcaguugccaguca

SEQ ID NO: 1997790 - RNA, 14 nt, Human
ugcccaugcugggc

SEQ ID NO: 1997791 - RNA, 17 nt, Human
ugcccaugcugggcucc

SEQ ID NO: 1997792 - RNA, 17 nt, Human
ugcccagguggcugugg

SEQ ID NO: 1997793 - RNA, 19 nt, Human
ugcccagguggcuguggaa

SEQ ID NO: 1997794 - RNA, 17 nt, Human
ugccccuggcagccccu

SEQ ID NO: 1997795 - RNA, 13 nt, Human
ugccccucccuuc

SEQ ID NO: 1997796 - RNA, 15 nt, Human
ugccccagggcuccc

SEQ ID NO: 1997797 - RNA, 15 nt, Human
ugccccagcuugggc

SEQ ID NO: 1997798 - RNA, 23 nt, Human
ugccccucaacucuccuccagag

SEQ ID NO: 1997799 - RNA, 15 nt, Human
ugcccacucccugca

SEQ ID NO: 1997800 - RNA, 14 nt, Human
ugcccacucccugc

SEQ ID NO: 1997801 - RNA, 16 nt, Human
ugcccacucccugcaa

SEQ ID NO: 1997802 - RNA, 11 nt, Human
ugcccaggcug

SEQ ID NO: 1997803 - RNA, 21 nt, Human
ugcccacucccugcaaccuga

SEQ ID NO: 1997804 - RNA, 18 nt, Human
ugcccaggcuggagugca

SEQ ID NO: 1997805 - RNA, 13 nt, Human
ugcccaggcuggc

SEQ ID NO: 1997806 - RNA, 15 nt, Human
ugcccaggcuggagu

SEQ ID NO: 1997807 - RNA, 20 nt, Human
ugcccaggcuggagugcagu

SEQ ID NO: 1997808 - RNA, 14 nt, Human
ugcccaccuggccu

SEQ ID NO: 1997809 - RNA, 13 nt, Human
ugcccaccuggcc

SEQ ID NO: 1997810 - RNA, 17 nt, Human
ugcccacccuccacucu

SEQ ID NO: 1997811 - RNA, 21 nt, Human
ugccauccagguucagcuugu

SEQ ID NO: 1997812 - RNA, 20 nt, Human
ugccauccagguucagcuug

SEQ ID NO: 1997813 - RNA, 18 nt, Human
ugccaggauggaaugaug

SEQ ID NO: 1997814 - RNA, 14 nt, Human
ugccaggcacaggc

SEQ ID NO: 1997815 - RNA, 15 nt, Human
ugccaggcacaggca

SEQ ID NO: 1997816 - RNA, 16 nt, Human
ugccaggcacaggcag

SEQ ID NO: 1997817 - RNA, 17 nt, Human
ugccaggcacaggcagg

SEQ ID NO: 1997818 - RNA, 18 nt, Human
ugccaggcacaggcaggg

SEQ ID NO: 1997819 - RNA, 19 nt, Human
ugccaggcacaggcagggc

SEQ ID NO: 1997820 - RNA, 20 nt, Human
ugccaggcacaggcagggca

SEQ ID NO: 1997821 - RNA, 21 nt, Human
ugccaggcacaggcagggcag

SEQ ID NO: 1997822 - RNA, 22 nt, Human
ugccaggcacaggcagggcagg

SEQ ID NO: 1997823 - RNA, 21 nt, Human
ugccacuaccccuugauuuuc

SEQ ID NO: 1997824 - RNA, 10 nt, Human
ugccaggcau

SEQ ID NO: 1997825 - RNA, 18 nt, Human
ugccagguuuuuggucug

SEQ ID NO: 1997826 - RNA, 19 nt, Human
ugccagguuuuuggucuga

SEQ ID NO: 1997827 - RNA, 22 nt, Human
ugccagguuuuuggucugaccc

SEQ ID NO: 1997828 - RNA, 15 nt, Human
ugccacccugcugag

SEQ ID NO: 1997829 - RNA, 20 nt, Human
ugccacuaaauugacacuua

SEQ ID NO: 1997830 - RNA, 19 nt, Human
ugccacccuggggagaaag

SEQ ID NO: 1997831 - RNA, 22 nt, Human
ugccacuacggaauaguuggcu

SEQ ID NO: 1997832 - RNA, 20 nt, Human
ugccacccuggggagaaagu

SEQ ID NO: 1997833 - RNA, 20 nt, Human
ugccacuaccccuugauuuu

SEQ ID NO: 1997834 - RNA, 14 nt, Human
ugcaucaagaugug

SEQ ID NO: 1997835 - RNA, 19 nt, Human
ugcaucaagaugugacaug

SEQ ID NO: 1997836 - RNA, 19 nt, Human
ugccaaauauaaauaaaaa

SEQ ID NO: 1997837 - RNA, 22 nt, Human
ugccaaauauaaauaaaaauaa

SEQ ID NO: 1997838 - RNA, 21 nt, Human
ugcauauuuauaaaaauaaaa

SEQ ID NO: 1997839 - RNA, 14 nt, Human
ugcauaucuucauc

SEQ ID NO: 1997840 - RNA, 20 nt, Human
ugcauauuuauaaaaauaaa

SEQ ID NO: 1997841 - RNA, 17 nt, Human
ugccaaauauaaauaaa

SEQ ID NO: 1997842 - RNA, 18 nt, Human
ugccaaauauaaauaaaa

SEQ ID NO: 1997843 - RNA, 14 nt, Human
ugggagauguggaa

SEQ ID NO: 1997844 - RNA, 13 nt, Human
ugggagcaaaaga

SEQ ID NO: 1997845 - RNA, 12 nt, Human
ugggagcugccu

SEQ ID NO: 1997846 - RNA, 13 nt, Human
ugggagcugccug

SEQ ID NO: 1997847 - RNA, 14 nt, Human
ugggagcugccugu

SEQ ID NO: 1997848 - RNA, 22 nt, Human
ugggacaacuguagaggcaguu

SEQ ID NO: 1997849 - RNA, 12 nt, Human
ugggacacccug

SEQ ID NO: 1997850 - RNA, 15 nt, Human
ugggacgcucugcug

SEQ ID NO: 1997851 - RNA, 16 nt, Human
ugggacgcucugcugu

SEQ ID NO: 1997852 - RNA, 13 nt, Human
ugggacacccugu

SEQ ID NO: 1997853 - RNA, 15 nt, Human
ugggcagaggaaagc

SEQ ID NO: 1997854 - RNA, 17 nt, Human
ugggauuacagguguga

SEQ ID NO: 1997855 - RNA, 17 nt, Human
ugggauuauauaucccu

SEQ ID NO: 1997856 - RNA, 13 nt, Human
ugggauccuggag

SEQ ID NO: 1997857 - RNA, 18 nt, Human
ugggauccuccaggugca

SEQ ID NO: 1997858 - RNA, 16 nt, Human
ugggauuacaggugug

SEQ ID NO: 1997859 - RNA, 18 nt, Human
ugggauuacaggcuccug

SEQ ID NO: 1997860 - RNA, 21 nt, Human
ugggagugaggaugucugggc

SEQ ID NO: 1997861 - RNA, 15 nt, Human
ugggauccuccaggu

SEQ ID NO: 1997862 - RNA, 15 nt, Human
ugggagugagcuggu

SEQ ID NO: 1997863 - RNA, 20 nt, Human
ugggaguaguuggagcauug

SEQ ID NO: 1997864 - RNA, 17 nt, Human
ugggagcugccuguuca

SEQ ID NO: 1997865 - RNA, 21 nt, Human
ugggagcugccuguucagcuc

SEQ ID NO: 1997866 - RNA, 22 nt, Human
ugggagcugccuguucagcucc

SEQ ID NO: 1997867 - RNA, 14 nt, Human
ugggaguacaaaag

SEQ ID NO: 1997868 - RNA, 21 nt, Human
uggcugcuucaaggauccuga

SEQ ID NO: 1997869 - RNA, 16 nt, Human
uggcugcuucaaggau

SEQ ID NO: 1997870 - RNA, 21 nt, Human
uggcugggggccucagugcca

SEQ ID NO: 1997871 - RNA, 18 nt, Human
uggcuggaagggguccag

SEQ ID NO: 1997872 - RNA, 13 nt, Human
uggcuggaagggg

SEQ ID NO: 1997873 - RNA, 18 nt, Human
uggcccauguauggccag

SEQ ID NO: 1997874 - RNA, 21 nt, Human
uggcccauguauggccaggaa

SEQ ID NO: 1997875 - RNA, 17 nt, Human
uggcccauguauggcca

SEQ ID NO: 1997876 - RNA, 18 nt, Human
uggccccacaccagcccc

SEQ ID NO: 1997877 - RNA, 12 nt, Human
uggccccaccug

SEQ ID NO: 1997878 - RNA, 13 nt, Human
uggccccaccugg

SEQ ID NO: 1997879 - RNA, 16 nt, Human
uggccccaccuggccc

SEQ ID NO: 1997880 - RNA, 17 nt, Human
uggccccaccuggcccu

SEQ ID NO: 1997881 - RNA, 19 nt, Human
uggccccaccuggcccucu

SEQ ID NO: 1997882 - RNA, 23 nt, Human
uggccccaccuggcccucucuga

SEQ ID NO: 1997883 - RNA, 18 nt, Human
uggcuugaauuaagaaga

SEQ ID NO: 1997884 - RNA, 14 nt, Human
uggcuuuugugcau

SEQ ID NO: 1997885 - RNA, 21 nt, Human
uggcuugaguuuaaauuguaa

SEQ ID NO: 1997886 - RNA, 20 nt, Human
ugggggaucacagccucuga

SEQ ID NO: 1997887 - RNA, 16 nt, Human
ugggggaugggccuga

SEQ ID NO: 1997888 - RNA, 20 nt, Human
uggggauugggccccugcca

SEQ ID NO: 1997889 - RNA, 21 nt, Human
ugggggaucacagccucugaa

SEQ ID NO: 1997890 - RNA, 13 nt, Human
uggggauucagau

SEQ ID NO: 1997891 - RNA, 16 nt, Human
uggggauucagauuuc

SEQ ID NO: 1997892 - RNA, 18 nt, Human
uggggauucagauuucuc

SEQ ID NO: 1997893 - RNA, 20 nt, Human
uggggauucagauuucucuu

SEQ ID NO: 1997894 - RNA, 11 nt, Human
ugggggaugua

SEQ ID NO: 1997895 - RNA, 17 nt, Human
ugggggaugggccugag

SEQ ID NO: 1997896 - RNA, 17 nt, Human
ugggggcucagcaaggc

SEQ ID NO: 1997897 - RNA, 18 nt, Human
ugggggcucagcaaggcc

SEQ ID NO: 1997898 - RNA, 18 nt, Human
ugggggcugggcagagga

SEQ ID NO: 1997899 - RNA, 17 nt, Human
ugggggcugggcagagg

SEQ ID NO: 1997900 - RNA, 18 nt, Human
ugggggucuguguguuua

SEQ ID NO: 1997901 - RNA, 15 nt, Human
ugggggucugugugu

SEQ ID NO: 1997902 - RNA, 19 nt, Human
ugggggcugggcagaggaa

SEQ ID NO: 1997903 - RNA, 23 nt, Human
ugggggcucagcaaggccaccuc

SEQ ID NO: 1997904 - RNA, 12 nt, Human
ugggggugcauu

SEQ ID NO: 1997905 - RNA, 15 nt, Human
ugggggugcauuuga

SEQ ID NO: 1997906 - RNA, 16 nt, Human
ugggcagaggaaagca

SEQ ID NO: 1997907 - RNA, 22 nt, Human
ugggcagaucucccacaugcca

SEQ ID NO: 1997908 - RNA, 22 nt, Human
ugggcuaagugauccucccacc

SEQ ID NO: 1997909 - RNA, 20 nt, Human
ugggcgugagaccugccccu

SEQ ID NO: 1997910 - RNA, 16 nt, Human
ugggcuaguugggcuu

SEQ ID NO: 1997911 - RNA, 23 nt, Human
ugggcuggguucuacccaggugc

SEQ ID NO: 1997912 - RNA, 17 nt, Human
ugggcuggugucaccug

SEQ ID NO: 1997913 - RNA, 15 nt, Human
ugggcuucaguggca

SEQ ID NO: 1997914 - RNA, 17 nt, Human
ugggcuucaguggcagc

SEQ ID NO: 1997915 - RNA, 14 nt, Human
uggguuagacugcc

SEQ ID NO: 1997916 - RNA, 15 nt, Human
uggguuagacugcca

SEQ ID NO: 1997917 - RNA, 16 nt, Human
uggguuagacugccag

SEQ ID NO: 1997918 - RNA, 19 nt, Human
uggguuagacugccagcuc

SEQ ID NO: 1997919 - RNA, 20 nt, Human
uggguuagacugccagcucu

SEQ ID NO: 1997920 - RNA, 16 nt, Human
uggguucuacccaggu

SEQ ID NO: 1997921 - RNA, 15 nt, Human
uggguucuacccagg

SEQ ID NO: 1997922 - RNA, 22 nt, Human
uggguucuacccaggugcuagg

SEQ ID NO: 1997923 - RNA, 14 nt, Human
uggguuaguggaug

SEQ ID NO: 1997924 - RNA, 20 nt, Human
uggguggggggcuucauaca

SEQ ID NO: 1997925 - RNA, 21 nt, Human
uggguggggggcuucauacac

SEQ ID NO: 1997926 - RNA, 18 nt, Human
uggguggggggcuucaua

SEQ ID NO: 1997927 - RNA, 19 nt, Human
ugggguuuaucagaauucu

SEQ ID NO: 1997928 - RNA, 16 nt, Human
uggguaacuagggaag

SEQ ID NO: 1997929 - RNA, 18 nt, Human
uggguuucuaaagcugcc

SEQ ID NO: 1997930 - RNA, 17 nt, Human
uggguuucuaaagcugc

SEQ ID NO: 1997931 - RNA, 21 nt, Human
uggguuucuaaagcugccagc

SEQ ID NO: 1997932 - RNA, 19 nt, Human
uggguuuucuuaaccaucu

SEQ ID NO: 1997933 - RNA, 17 nt, Human
ugguaguuucugugguu

SEQ ID NO: 1997934 - RNA, 15 nt, Human
ugguaguuuuacagu

SEQ ID NO: 1997935 - RNA, 23 nt, Human
ugguauuggcuagagguucaaag

SEQ ID NO: 1997936 - RNA, 18 nt, Human
ugguaugaucacggcuca

SEQ ID NO: 1997937 - RNA, 22 nt, Human
ugguauauccuuuucuguguuu

SEQ ID NO: 1997938 - RNA, 15 nt, Human
ugguaucuaauucuu

SEQ ID NO: 1997939 - RNA, 20 nt, Human
ugguaucuaauucuuuaaug

SEQ ID NO: 1997940 - RNA, 21 nt, Human
ugguaucuaauucuuuaauga

SEQ ID NO: 1997941 - RNA, 19 nt, Human
uggcaacaaacugcacaug

SEQ ID NO: 1997942 - RNA, 23 nt, Human
uggcaaauguaacugugccaguu

SEQ ID NO: 1997943 - RNA, 17 nt, Human
uggcaacaaacugcaca

SEQ ID NO: 1997944 - RNA, 18 nt, Human
uggcaacaaacugcacau

SEQ ID NO: 1997945 - RNA, 13 nt, Human
uggcaacaaacug

SEQ ID NO: 1997946 - RNA, 14 nt, Human
uggcaacaaacugc

SEQ ID NO: 1997947 - RNA, 15 nt, Human
uggcaacaaacugca

SEQ ID NO: 1997948 - RNA, 13 nt, Human
uggauuuuauguu

SEQ ID NO: 1997949 - RNA, 15 nt, Human
uggauuuuauguuga

SEQ ID NO: 1997950 - RNA, 16 nt, Human
uggauuuuauguugac

SEQ ID NO: 1997951 - RNA, 22 nt, Human
uggauuuuauguugacauuugu

SEQ ID NO: 1997952 - RNA, 16 nt, Human
uggauuuggagagaaa

SEQ ID NO: 1997953 - RNA, 17 nt, Human
uggauuuggagagaaau

SEQ ID NO: 1997954 - RNA, 19 nt, Human
uggauuuggagagaaauau

SEQ ID NO: 1997955 - RNA, 20 nt, Human
uggauuuggagagaaauauu

SEQ ID NO: 1997956 - RNA, 21 nt, Human
uggauuuggagagaaauauuu

SEQ ID NO: 1997957 - RNA, 22 nt, Human
uggauuuggagagaaauauuuu

SEQ ID NO: 1997958 - RNA, 18 nt, Human
uggauccuugucaguugu

SEQ ID NO: 1997959 - RNA, 12 nt, Human
uggaucaggaaa

SEQ ID NO: 1997960 - RNA, 20 nt, Human
uggauuuaacagaaauguac

SEQ ID NO: 1997961 - RNA, 24 nt, Human
uggauuuaacagaaauguacagca

SEQ ID NO: 1997962 - RNA, 15 nt, Human
uggaggaccugcccg

SEQ ID NO: 1997963 - RNA, 12 nt, Human
uggagggaaagc

SEQ ID NO: 1997964 - RNA, 12 nt, Human
uggagggccugg

SEQ ID NO: 1997965 - RNA, 13 nt, Human
uggagggccuggg

SEQ ID NO: 1997966 - RNA, 15 nt, Human
uggagggccugggcc

SEQ ID NO: 1997967 - RNA, 17 nt, Human
uggagggccugggccug

SEQ ID NO: 1997968 - RNA, 18 nt, Human
uggagggccugggccugg

SEQ ID NO: 1997969 - RNA, 22 nt, Human
uggagggccugggccuggcucc

SEQ ID NO: 1997970 - RNA, 18 nt, Human
uggaggaaggaaacccag

SEQ ID NO: 1997971 - RNA, 12 nt, Human
uggaggaaggaa

SEQ ID NO: 1997972 - RNA, 20 nt, Human
uggaggaaggaaacccagcu

SEQ ID NO: 1997973 - RNA, 15 nt, Human
uggaggaagaacuga

SEQ ID NO: 1997974 - RNA, 17 nt, Human
uggaggaagaacugaaa

SEQ ID NO: 1997975 - RNA, 20 nt, Human
uggaggaagaacugaaaggc

SEQ ID NO: 1997976 - RNA, 14 nt, Human
uggacucuaaaguc

SEQ ID NO: 1997977 - RNA, 15 nt, Human
uggacuccucugucc

SEQ ID NO: 1997978 - RNA, 18 nt, Human
uggacucagaaacuccau

SEQ ID NO: 1997979 - RNA, 14 nt, Human
uggacuccucuguc

SEQ ID NO: 1997980 - RNA, 15 nt, Human
uggacuccugcacac

SEQ ID NO: 1997981 - RNA, 20 nt, Human
uggccagaugcaccagcccu

SEQ ID NO: 1997982 - RNA, 21 nt, Human
uggccagaugcaccagcccuu

SEQ ID NO: 1997983 - RNA, 17 nt, Human
uggccacuccagacccc

SEQ ID NO: 1997984 - RNA, 20 nt, Human
uggccacuccagaccccugg

SEQ ID NO: 1997985 - RNA, 17 nt, Human
uggcagguaggaauauu

SEQ ID NO: 1997986 - RNA, 20 nt, Human
uggcagguaggaauauuaua

SEQ ID NO: 1997987 - RNA, 14 nt, Human
uggcaggugagcaa

SEQ ID NO: 1997988 - RNA, 23 nt, Human
uggcagguaggaauauuauauuu

SEQ ID NO: 1997989 - RNA, 13 nt, Human
uggcagugggagc

SEQ ID NO: 1997990 - RNA, 22 nt, Human
uggcaccuccucggcuggcugu

SEQ ID NO: 1997991 - RNA, 13 nt, Human
uggcaccugucug

SEQ ID NO: 1997992 - RNA, 14 nt, Human
uggcaccugucugc

SEQ ID NO: 1997993 - RNA, 18 nt, Human
uggcaccugucugcucca

SEQ ID NO: 1997994 - RNA, 19 nt, Human
uggcaccugucugcuccag

SEQ ID NO: 1997995 - RNA, 21 nt, Human
uggcaccugucugcuccagcu

SEQ ID NO: 1997996 - RNA, 23 nt, Human
uggcaccugucugcuccagcucu

SEQ ID NO: 1997997 - RNA, 13 nt, Human
uggcaccuucccc

SEQ ID NO: 1997998 - RNA, 21 nt, Human
uggcacccggccccugcuggu

SEQ ID NO: 1997999 - RNA, 13 nt, Human
uggcagcugcuuu

SEQ ID NO: 1998000 - RNA, 21 nt, Human
uggcaccuucccccuccccca

SEQ ID NO: 1998001 - RNA, 21 nt, Human
uggcaggacacugcagaacag

SEQ ID NO: 1998002 - RNA, 19 nt, Human
uggcaggaguuggaagugu

SEQ ID NO: 1998003 - RNA, 14 nt, Human
ugcuuuaauuuuag

SEQ ID NO: 1998004 - RNA, 15 nt, Human
ugcuuuaauuuuagc

SEQ ID NO: 1998005 - RNA, 17 nt, Human
ugcuuuaauuuuagcaa

SEQ ID NO: 1998006 - RNA, 16 nt, Human
ugcuuuagacuugaaa

SEQ ID NO: 1998007 - RNA, 18 nt, Human
ugcuuuagacuugaaaag

SEQ ID NO: 1998008 - RNA, 14 nt, Human
ugcuuuagacuuga

SEQ ID NO: 1998009 - RNA, 15 nt, Human
ugcuuuagacuugaa

SEQ ID NO: 1998010 - RNA, 22 nt, Human
ugcuuucuuucguuuguuuguu

SEQ ID NO: 1998011 - RNA, 15 nt, Human
ugcuuucuuucguuu

SEQ ID NO: 1998012 - RNA, 20 nt, Human
uggaaaaauagccugccucu

SEQ ID NO: 1998013 - RNA, 17 nt, Human
uggaaaaauagccugcc

SEQ ID NO: 1998014 - RNA, 20 nt, Human
uggaaagaguaggaagacuu

SEQ ID NO: 1998015 - RNA, 14 nt, Human
uggaaagaguacuc

SEQ ID NO: 1998016 - RNA, 17 nt, Human
uggaaacaagucaguca

SEQ ID NO: 1998017 - RNA, 13 nt, Human
uggaaacacuaaa

SEQ ID NO: 1998018 - RNA, 16 nt, Human
uggaaacacuaaaugu

SEQ ID NO: 1998019 - RNA, 17 nt, Human
uggaaacacuaaauguu

SEQ ID NO: 1998020 - RNA, 18 nt, Human
uggaaacacuaaauguua

SEQ ID NO: 1998021 - RNA, 17 nt, Human
uggaaacagcucgacuu

SEQ ID NO: 1998022 - RNA, 19 nt, Human
uggaaacacuaaauguuaa

SEQ ID NO: 1998023 - RNA, 20 nt, Human
uggaaacacuaaauguuaaa

SEQ ID NO: 1998024 - RNA, 22 nt, Human
uggaaacacuaaauguuaaaga

SEQ ID NO: 1998025 - RNA, 23 nt, Human
uggaaacacuaaauguuaaagau

SEQ ID NO: 1998026 - RNA, 21 nt, Human
uggaaagacuuuuccaacccu

SEQ ID NO: 1998027 - RNA, 18 nt, Human
uggaaacagaggaccagc

SEQ ID NO: 1998028 - RNA, 20 nt, Human
uggaaacagaggaccagcac

SEQ ID NO: 1998029 - RNA, 22 nt, Human
uggaaacagcucgacuuuaaaa

SEQ ID NO: 1998030 - RNA, 20 nt, Human
uggaaugaugggucaguugu

SEQ ID NO: 1998031 - RNA, 15 nt, Human
uggaaugagaauuua

SEQ ID NO: 1998032 - RNA, 15 nt, Human
uggaaugcacucaga

SEQ ID NO: 1998033 - RNA, 14 nt, Human
uggaauaucuacuu

SEQ ID NO: 1998034 - RNA, 21 nt, Human
uggacuagagggaccucuccc

SEQ ID NO: 1998035 - RNA, 18 nt, Human
uggacucaccucccccau

SEQ ID NO: 1998036 - RNA, 20 nt, Human
uggacucaccucccccaucu

SEQ ID NO: 1998037 - RNA, 19 nt, Human
uggacaugcacagcuaaca

SEQ ID NO: 1998038 - RNA, 13 nt, Human
uggacaugcacag

SEQ ID NO: 1998039 - RNA, 15 nt, Human
uggaauauauaacca

SEQ ID NO: 1998040 - RNA, 16 nt, Human
uggaauauauaaccag

SEQ ID NO: 1998041 - RNA, 17 nt, Human
uggaauaaggagaauga

SEQ ID NO: 1998042 - RNA, 22 nt, Human
uggaauaauccuaaacauauga

SEQ ID NO: 1998043 - RNA, 19 nt, Human
uggaauaacauguaauuaa

SEQ ID NO: 1998044 - RNA, 15 nt, Human
uggaauaacauguaa

SEQ ID NO: 1998045 - RNA, 14 nt, Human
uggaauaacaugua

SEQ ID NO: 1998046 - RNA, 18 nt, Human
uggaauaaaaauuccaga

SEQ ID NO: 1998047 - RNA, 23 nt, Human
uggaauaaaaauuccagaaugaa

SEQ ID NO: 1998048 - RNA, 15 nt, Human
uccugaggcuccacu

SEQ ID NO: 1998049 - RNA, 21 nt, Human
uccugagccagauuucacucu

SEQ ID NO: 1998050 - RNA, 22 nt, Human
uccucuguccaggcacugcugc

SEQ ID NO: 1998051 - RNA, 19 nt, Human
uccugagccagauuucacu

SEQ ID NO: 1998052 - RNA, 18 nt, Human
uccugagccagauuucac

SEQ ID NO: 1998053 - RNA, 19 nt, Human
uccucuguacagagcccac

SEQ ID NO: 1998054 - RNA, 23 nt, Human
uccucuguacagagcccacgccc

SEQ ID NO: 1998055 - RNA, 17 nt, Human
uccugagccagauuuca

SEQ ID NO: 1998056 - RNA, 17 nt, Human
uccucuguccaggcacu

SEQ ID NO: 1998057 - RNA, 16 nt, Human
uccugaggcuccacuu

SEQ ID NO: 1998058 - RNA, 17 nt, Human
uccugaggcuccacuug

SEQ ID NO: 1998059 - RNA, 12 nt, Human
uccugaggcugg

SEQ ID NO: 1998060 - RNA, 19 nt, Human
uccugaggcugggcucccu

SEQ ID NO: 1998061 - RNA, 17 nt, Human
uccugaggcugggcucc

SEQ ID NO: 1998062 - RNA, 16 nt, Human
uccugaggcugggcuc

SEQ ID NO: 1998063 - RNA, 15 nt, Human
uccugaggcugggcu

SEQ ID NO: 1998064 - RNA, 17 nt, Human
uccucugcugcuggcug

SEQ ID NO: 1998065 - RNA, 14 nt, Human
uccucuauccuggg

SEQ ID NO: 1998066 - RNA, 15 nt, Human
uccucuggccugugu

SEQ ID NO: 1998067 - RNA, 17 nt, Human
uccucugcuuaaaaacu

SEQ ID NO: 1998068 - RNA, 13 nt, Human
uccucuguacaga

SEQ ID NO: 1998069 - RNA, 15 nt, Human
uccucuguacagagc

SEQ ID NO: 1998070 - RNA, 21 nt, Human
uccucuaggaggucucuaaga

SEQ ID NO: 1998071 - RNA, 17 nt, Human
uccucuaggaggucucu

SEQ ID NO: 1998072 - RNA, 21 nt, Human
uccuccuuuucacaguucucu

SEQ ID NO: 1998073 - RNA, 13 nt, Human
uccuccuggacuc

SEQ ID NO: 1998074 - RNA, 14 nt, Human
uccuccugcugcca

SEQ ID NO: 1998075 - RNA, 15 nt, Human
uccuccugcugccag

SEQ ID NO: 1998076 - RNA, 20 nt, Human
uccucaaaacuucagacaua

SEQ ID NO: 1998077 - RNA, 13 nt, Human
uccuccaggugca

SEQ ID NO: 1998078 - RNA, 12 nt, Human
uccuccaggugc

SEQ ID NO: 1998079 - RNA, 22 nt, Human
uccuccaggugcacaagcucca

SEQ ID NO: 1998080 - RNA, 20 nt, Human
uccuccaggugcacaagcuc

SEQ ID NO: 1998081 - RNA, 18 nt, Human
uccuccaggugcacaagc

SEQ ID NO: 1998082 - RNA, 14 nt, Human
uccuccaggugcac

SEQ ID NO: 1998083 - RNA, 12 nt, Human
uccuccucagau

SEQ ID NO: 1998084 - RNA, 18 nt, Human
uccuccugacaccccacu

SEQ ID NO: 1998085 - RNA, 21 nt, Human
uccuccugacaccccacuuag

SEQ ID NO: 1998086 - RNA, 22 nt, Human
uccuccugacaccccacuuagc

SEQ ID NO: 1998087 - RNA, 17 nt, Human
uccuaguuccaccauca

SEQ ID NO: 1998088 - RNA, 14 nt, Human
uccuaguuccacca

SEQ ID NO: 1998089 - RNA, 18 nt, Human
uccuaagcuauucaguaa

SEQ ID NO: 1998090 - RNA, 16 nt, Human
uccuaagcuauucagu

SEQ ID NO: 1998091 - RNA, 21 nt, Human
uccggaacguagucggcacag

SEQ ID NO: 1998092 - RNA, 12 nt, Human
uccuauuucaga

SEQ ID NO: 1998093 - RNA, 15 nt, Human
uccuauuuagacaug

SEQ ID NO: 1998094 - RNA, 13 nt, Human
uccuauuucagaa

SEQ ID NO: 1998095 - RNA, 14 nt, Human
uccuauuucagaag

SEQ ID NO: 1998096 - RNA, 16 nt, Human
uccuauuucagaaguu

SEQ ID NO: 1998097 - RNA, 20 nt, Human
uccuauuucagaaguuuaaa

SEQ ID NO: 1998098 - RNA, 13 nt, Human
uccuaugcuuuag

SEQ ID NO: 1998099 - RNA, 21 nt, Human
uccuaguuccaccaucaagcc

SEQ ID NO: 1998100 - RNA, 22 nt, Human
uccgaaagggacuuggaagcuc

SEQ ID NO: 1998101 - RNA, 14 nt, Human
uccgaaaucagcag

SEQ ID NO: 1998102 - RNA, 17 nt, Human
uccgaaaugcugucuuu

SEQ ID NO: 1998103 - RNA, 20 nt, Human
uccgaaaugcugucuuucuu

SEQ ID NO: 1998104 - RNA, 19 nt, Human
uccgaccuggccugucugu

SEQ ID NO: 1998105 - RNA, 17 nt, Human
ucccuucuuuuucuucu

SEQ ID NO: 1998106 - RNA, 21 nt, Human
uccgaaagggacuuggaagcu

SEQ ID NO: 1998107 - RNA, 18 nt, Human
uccgaaaccaaagaagaa

SEQ ID NO: 1998108 - RNA, 19 nt, Human
uccgaaaccaaagaagaaa

SEQ ID NO: 1998109 - RNA, 21 nt, Human
uccgcuuucuacccagcgagc

SEQ ID NO: 1998110 - RNA, 18 nt, Human
uccgccccugagcccacu

SEQ ID NO: 1998111 - RNA, 19 nt, Human
uccgccccugagcccacug

SEQ ID NO: 1998112 - RNA, 20 nt, Human
uccgccccugagcccacugu

SEQ ID NO: 1998113 - RNA, 21 nt, Human
uccgccccugagcccacugug

SEQ ID NO: 1998114 - RNA, 21 nt, Human
uccgacuugugcacaggcaga

SEQ ID NO: 1998115 - RNA, 14 nt, Human
uccgccccugagcc

SEQ ID NO: 1998116 - RNA, 15 nt, Human
uccgccccugagccc

SEQ ID NO: 1998117 - RNA, 16 nt, Human
uccgccccugagccca

SEQ ID NO: 1998118 - RNA, 17 nt, Human
uccgccccugagcccac

SEQ ID NO: 1998119 - RNA, 16 nt, Human
ucccuucccaccucuc

SEQ ID NO: 1998120 - RNA, 14 nt, Human
ucccuucccaccuc

SEQ ID NO: 1998121 - RNA, 12 nt, Human
ucccuucucuuc

SEQ ID NO: 1998122 - RNA, 14 nt, Human
ucccuucucuucca

SEQ ID NO: 1998123 - RNA, 15 nt, Human
ucccuucucuuccag

SEQ ID NO: 1998124 - RNA, 21 nt, Human
ucccuucucuuccaggcagcc

SEQ ID NO: 1998125 - RNA, 16 nt, Human
ucccuucucuuccagg

SEQ ID NO: 1998126 - RNA, 20 nt, Human
ucccuucucuuccaggcagc

SEQ ID NO: 1998127 - RNA, 21 nt, Human
ucccuucccacuggaggcaug

SEQ ID NO: 1998128 - RNA, 17 nt, Human
ucccuucccaccucucu

SEQ ID NO: 1998129 - RNA, 16 nt, Human
ucccugccccccagcc

SEQ ID NO: 1998130 - RNA, 14 nt, Human
ucccugccccuccc

SEQ ID NO: 1998131 - RNA, 18 nt, Human
ucccugccccucccuuca

SEQ ID NO: 1998132 - RNA, 15 nt, Human
ucccuggcuuccuua

SEQ ID NO: 1998133 - RNA, 16 nt, Human
ucccuggcuuccuuac

SEQ ID NO: 1998134 - RNA, 17 nt, Human
ucccuggcuuccuuacu

SEQ ID NO: 1998135 - RNA, 12 nt, Human
ucccuggcuucc

SEQ ID NO: 1998136 - RNA, 23 nt, Human
ucccucuacugggagccuaccca

SEQ ID NO: 1998137 - RNA, 18 nt, Human
ucccuccgggucuuccua

SEQ ID NO: 1998138 - RNA, 15 nt, Human
ucccucuccagcagg

SEQ ID NO: 1998139 - RNA, 16 nt, Human
ucccucucugcuggac

SEQ ID NO: 1998140 - RNA, 16 nt, Human
ucccugccaauggacu

SEQ ID NO: 1998141 - RNA, 14 nt, Human
ucccugccaaugga

SEQ ID NO: 1998142 - RNA, 13 nt, Human
ucccucuggggcu

SEQ ID NO: 1998143 - RNA, 17 nt, Human
ucccucuggggcuguuc

SEQ ID NO: 1998144 - RNA, 20 nt, Human
ucccugcacuugcagacucu

SEQ ID NO: 1998145 - RNA, 18 nt, Human
ucccucuacugggagccu

SEQ ID NO: 1998146 - RNA, 22 nt, Human
ucccucuacugggagccuaccc

SEQ ID NO: 1998147 - RNA, 13 nt, Human
ucccucccuuggg

SEQ ID NO: 1998148 - RNA, 14 nt, Human
ucccucccuugggg

SEQ ID NO: 1998149 - RNA, 18 nt, Human
ucccucccuuccucuuuc

SEQ ID NO: 1998150 - RNA, 17 nt, Human
ucccuacuuccugugac

SEQ ID NO: 1998151 - RNA, 17 nt, Human
ucccaugagccucagca

SEQ ID NO: 1998152 - RNA, 22 nt, Human
ucccaugagccucagcauccug

SEQ ID NO: 1998153 - RNA, 19 nt, Human
ucccuaccgagucucuucu

SEQ ID NO: 1998154 - RNA, 21 nt, Human
ucccuaccgagucucuucucc

SEQ ID NO: 1998155 - RNA, 22 nt, Human
ucccuaccgagucucuucucca

SEQ ID NO: 1998156 - RNA, 23 nt, Human
ucccuaccgagucucuucuccac

SEQ ID NO: 1998157 - RNA, 23 nt, Human
ucgcccagucccagcagccagcc

SEQ ID NO: 1998158 - RNA, 15 nt, Human
ucggaaaacaugcua

SEQ ID NO: 1998159 - RNA, 18 nt, Human
ucggaaaacaugcuacac

SEQ ID NO: 1998160 - RNA, 14 nt, Human
ucgcccagucugga

SEQ ID NO: 1998161 - RNA, 19 nt, Human
ucgcccagucuggaaugca

SEQ ID NO: 1998162 - RNA, 23 nt, Human
ucgcccagucuggaaugcagugg

SEQ ID NO: 1998163 - RNA, 15 nt, Human
ucggccuccauccug

SEQ ID NO: 1998164 - RNA, 16 nt, Human
ucggccuccauccuga

SEQ ID NO: 1998165 - RNA, 17 nt, Human
ucggccuccauccugag

SEQ ID NO: 1998166 - RNA, 15 nt, Human
ucgcaggccucccug

SEQ ID NO: 1998167 - RNA, 19 nt, Human
ucgcaggccucccugccag

SEQ ID NO: 1998168 - RNA, 20 nt, Human
ucgcaggccucccugccagu

SEQ ID NO: 1998169 - RNA, 22 nt, Human
ucgcauagaaaucaauaauuug

SEQ ID NO: 1998170 - RNA, 23 nt, Human
ucgcaggauucuuccucccuccc

SEQ ID NO: 1998171 - RNA, 21 nt, Human
ucgcaggauucuuccucccuc

SEQ ID NO: 1998172 - RNA, 17 nt, Human
ucgcaggauucuuccuc

SEQ ID NO: 1998173 - RNA, 22 nt, Human
uccuuuucgcaggauucuuccu

SEQ ID NO: 1998174 - RNA, 14 nt, Human
uccuuuucuguguu

SEQ ID NO: 1998175 - RNA, 21 nt, Human
uccuuuguauucugucuucau

SEQ ID NO: 1998176 - RNA, 15 nt, Human
uccuuuguauucugu

SEQ ID NO: 1998177 - RNA, 17 nt, Human
uccuuuguauucugucu

SEQ ID NO: 1998178 - RNA, 18 nt, Human
uccuuuguauucugucuu

SEQ ID NO: 1998179 - RNA, 15 nt, Human
uccuuuucuguguuu

SEQ ID NO: 1998180 - RNA, 23 nt, Human
uccuugaaaacacuguucucugc

SEQ ID NO: 1998181 - RNA, 22 nt, Human
uccuugaaaacacuguucucug

SEQ ID NO: 1998182 - RNA, 17 nt, Human
uccuuaucaaaggacac

SEQ ID NO: 1998183 - RNA, 14 nt, Human
uccuuaucuagcug

SEQ ID NO: 1998184 - RNA, 15 nt, Human
uccuuaucuagcugc

SEQ ID NO: 1998185 - RNA, 14 nt, Human
uccuuaucaaagga

SEQ ID NO: 1998186 - RNA, 15 nt, Human
uccuuaucaaaggac

SEQ ID NO: 1998187 - RNA, 24 nt, Human
uccuuaggguuuucucucuauuuc

SEQ ID NO: 1998188 - RNA, 23 nt, Human
uccugaggggagacagagcaacc

SEQ ID NO: 1998189 - RNA, 19 nt, Human
uccugucaucugagaauga

SEQ ID NO: 1998190 - RNA, 20 nt, Human
uccugaggggagacagagca

SEQ ID NO: 1998191 - RNA, 19 nt, Human
uccugucccucauccauag

SEQ ID NO: 1998192 - RNA, 21 nt, Human
uccuuaccagcagagcaccuu

SEQ ID NO: 1998193 - RNA, 20 nt, Human
uccuuaccagcagagcaccu

SEQ ID NO: 1998194 - RNA, 21 nt, Human
uccuuggugucgggcaugaca

SEQ ID NO: 1998195 - RNA, 18 nt, Human
uccuuggugucgggcaug

SEQ ID NO: 1998196 - RNA, 22 nt, Human
uccuugcugcaaggcucuuccu

SEQ ID NO: 1998197 - RNA, 19 nt, Human
uccuucuuugcccuuuacu

SEQ ID NO: 1998198 - RNA, 13 nt, Human
uccuucuuugccc

SEQ ID NO: 1998199 - RNA, 22 nt, Human
uccuuugugaggaagccgcugg

SEQ ID NO: 1998200 - RNA, 18 nt, Human
uccuuugugaggaagccg

SEQ ID NO: 1998201 - RNA, 17 nt, Human
uccuuugugaggaagcc

SEQ ID NO: 1998202 - RNA, 22 nt, Human
uccuuggugucgggcaugacac

SEQ ID NO: 1998203 - RNA, 17 nt, Human
ucucacuguugcccagg

SEQ ID NO: 1998204 - RNA, 14 nt, Human
ucucagaggcccca

SEQ ID NO: 1998205 - RNA, 14 nt, Human
ucucagauauuugc

SEQ ID NO: 1998206 - RNA, 17 nt, Human
ucucagauauuugcacc

SEQ ID NO: 1998207 - RNA, 14 nt, Human
ucucacuguugccc

SEQ ID NO: 1998208 - RNA, 15 nt, Human
ucucacuguugccca

SEQ ID NO: 1998209 - RNA, 12 nt, Human
ucucaguuuuuc

SEQ ID NO: 1998210 - RNA, 13 nt, Human
ucucaguuuuucu

SEQ ID NO: 1998211 - RNA, 15 nt, Human
ucucaguuuuucuua

SEQ ID NO: 1998212 - RNA, 18 nt, Human
ucucaguuuuucuuaaua

SEQ ID NO: 1998213 - RNA, 21 nt, Human
ucucaguuuuucuuaauauau

SEQ ID NO: 1998214 - RNA, 22 nt, Human
ucucaguuuuucuuaauauaua

SEQ ID NO: 1998215 - RNA, 13 nt, Human
ucucaaauuucua

SEQ ID NO: 1998216 - RNA, 22 nt, Human
ucuaucuuugagcgcccacuag

SEQ ID NO: 1998217 - RNA, 14 nt, Human
ucucaaauuucuaa

SEQ ID NO: 1998218 - RNA, 16 nt, Human
ucucaaauuucuaaau

SEQ ID NO: 1998219 - RNA, 18 nt, Human
ucucaaauuucuaaaucu

SEQ ID NO: 1998220 - RNA, 13 nt, Human
ucucaauuuuugg

SEQ ID NO: 1998221 - RNA, 22 nt, Human
ucucaauuuuugguugaauaaa

SEQ ID NO: 1998222 - RNA, 16 nt, Human
ucucacacaugagcau

SEQ ID NO: 1998223 - RNA, 23 nt, Human
ucucacacaugagcaucaggcca

SEQ ID NO: 1998224 - RNA, 20 nt, Human
ucucacugccaugccagcuu

SEQ ID NO: 1998225 - RNA, 21 nt, Human
ucucacacaugagcaucaggc

SEQ ID NO: 1998226 - RNA, 23 nt, Human
ucucacucugucgcccagucugg

SEQ ID NO: 1998227 - RNA, 18 nt, Human
ucgucgagcuccccccag

SEQ ID NO: 1998228 - RNA, 17 nt, Human
ucuaaugacauucaaua

SEQ ID NO: 1998229 - RNA, 18 nt, Human
ucuaaugacauucaauaa

SEQ ID NO: 1998230 - RNA, 19 nt, Human
ucuaaugacauucaauaaa

SEQ ID NO: 1998231 - RNA, 13 nt, Human
ucuaauucuuuaa

SEQ ID NO: 1998232 - RNA, 21 nt, Human
ucuaauuggcuuuacuauuuu

SEQ ID NO: 1998233 - RNA, 12 nt, Human
ucuacuaaaaau

SEQ ID NO: 1998234 - RNA, 15 nt, Human
ucuacuaaaaauaca

SEQ ID NO: 1998235 - RNA, 19 nt, Human
ucuacuaaaaauacaaaaa

SEQ ID NO: 1998236 - RNA, 14 nt, Human
ucuacuauuuaugu

SEQ ID NO: 1998237 - RNA, 19 nt, Human
ucuaauuuuauuuugugaa

SEQ ID NO: 1998238 - RNA, 15 nt, Human
ucuacucauuuuaau

SEQ ID NO: 1998239 - RNA, 21 nt, Human
ucuacucgaguuacagacaaa

SEQ ID NO: 1998240 - RNA, 20 nt, Human
ucuacucgaguuacagacaa

SEQ ID NO: 1998241 - RNA, 18 nt, Human
ucuacucuagggaaaaac

SEQ ID NO: 1998242 - RNA, 18 nt, Human
ucuaggaggucucuaaga

SEQ ID NO: 1998243 - RNA, 15 nt, Human
ucuagguaaauuaca

SEQ ID NO: 1998244 - RNA, 12 nt, Human
ucuagggaaaaa

SEQ ID NO: 1998245 - RNA, 13 nt, Human
ucuauauuuuaca

SEQ ID NO: 1998246 - RNA, 17 nt, Human
ucccacuucaaaacaaa

SEQ ID NO: 1998247 - RNA, 15 nt, Human
ucccacucuucucau

SEQ ID NO: 1998248 - RNA, 13 nt, Human
ucccacugcccac

SEQ ID NO: 1998249 - RNA, 14 nt, Human
ucccacuccaagcc

SEQ ID NO: 1998250 - RNA, 16 nt, Human
ucccacuccaagccag

SEQ ID NO: 1998251 - RNA, 12 nt, Human
ucccacuccaag

SEQ ID NO: 1998252 - RNA, 18 nt, Human
ucccacuccaagccagca

SEQ ID NO: 1998253 - RNA, 19 nt, Human
ucccacuccaagccagcaa

SEQ ID NO: 1998254 - RNA, 13 nt, Human
ucccacucuucuc

SEQ ID NO: 1998255 - RNA, 18 nt, Human
ucccaggcauuccccagg

SEQ ID NO: 1998256 - RNA, 17 nt, Human
ucccaggcauuccccag

SEQ ID NO: 1998257 - RNA, 16 nt, Human
ucccaggauguacaag

SEQ ID NO: 1998258 - RNA, 15 nt, Human
ucccacuucugccag

SEQ ID NO: 1998259 - RNA, 16 nt, Human
ucccacuucugccaga

SEQ ID NO: 1998260 - RNA, 19 nt, Human
ucccaggcauuccccagga

SEQ ID NO: 1998261 - RNA, 19 nt, Human
ucccaggcugagccucagu

SEQ ID NO: 1998262 - RNA, 16 nt, Human
ucccagggagcaaggg

SEQ ID NO: 1998263 - RNA, 19 nt, Human
ucccagggagcaagggcag

SEQ ID NO: 1998264 - RNA, 21 nt, Human
ucccagggagcaagggcaggg

SEQ ID NO: 1998265 - RNA, 15 nt, Human
ucccaugagccucag

SEQ ID NO: 1998266 - RNA, 16 nt, Human
ucccaugagccucagc

SEQ ID NO: 1998267 - RNA, 18 nt, Human
ucccaccucucucacucc

SEQ ID NO: 1998268 - RNA, 17 nt, Human
ucccaccucucucacuc

SEQ ID NO: 1998269 - RNA, 14 nt, Human
ucccaccucucuca

SEQ ID NO: 1998270 - RNA, 16 nt, Human
ucccaccucagccucc

SEQ ID NO: 1998271 - RNA, 14 nt, Human
ucccaacuugccuu

SEQ ID NO: 1998272 - RNA, 20 nt, Human
ucccaacuugccuuugaaga

SEQ ID NO: 1998273 - RNA, 18 nt, Human
ucccaccucagccucccg

SEQ ID NO: 1998274 - RNA, 20 nt, Human
ucccaccucucucacuccuu

SEQ ID NO: 1998275 - RNA, 19 nt, Human
ucccaccuuggcugcaggg

SEQ ID NO: 1998276 - RNA, 21 nt, Human
ucccaccuuggcugcagggag

SEQ ID NO: 1998277 - RNA, 14 nt, Human
ucccacucagucca

SEQ ID NO: 1998278 - RNA, 17 nt, Human
uccauagagagcaagac

SEQ ID NO: 1998279 - RNA, 15 nt, Human
uccauaauguucugc

SEQ ID NO: 1998280 - RNA, 16 nt, Human
uccauaauguucugcu

SEQ ID NO: 1998281 - RNA, 17 nt, Human
uccauaauguucugcua

SEQ ID NO: 1998282 - RNA, 14 nt, Human
uccauacacacgcu

SEQ ID NO: 1998283 - RNA, 18 nt, Human
uccauacacacgcugccu

SEQ ID NO: 1998284 - RNA, 19 nt, Human
uccauacacacgcugccuu

SEQ ID NO: 1998285 - RNA, 17 nt, Human
uccagggcucaacacug

SEQ ID NO: 1998286 - RNA, 20 nt, Human
uccagggcucaacacuguga

SEQ ID NO: 1998287 - RNA, 14 nt, Human
uccaggggaaccug

SEQ ID NO: 1998288 - RNA, 23 nt, Human
uccauaaucuggacuccucuguc

SEQ ID NO: 1998289 - RNA, 20 nt, Human
uccauagagagcaagacgcu

SEQ ID NO: 1998290 - RNA, 15 nt, Human
uccauagcuguggug

SEQ ID NO: 1998291 - RNA, 19 nt, Human
uccauauaagcccuugauu

SEQ ID NO: 1998292 - RNA, 14 nt, Human
uccauagugacuuu

SEQ ID NO: 1998293 - RNA, 15 nt, Human
uccauagugacuuuu

SEQ ID NO: 1998294 - RNA, 12 nt, Human
uccauauccaua

SEQ ID NO: 1998295 - RNA, 19 nt, Human
uccauauccauagugacuu

SEQ ID NO: 1998296 - RNA, 13 nt, Human
uccauauuagaaa

SEQ ID NO: 1998297 - RNA, 15 nt, Human
uccauauuagaaaac

SEQ ID NO: 1998298 - RNA, 17 nt, Human
uccauauuagaaaacuu

SEQ ID NO: 1998299 - RNA, 18 nt, Human
uccauauuagaaaacuuu

SEQ ID NO: 1998300 - RNA, 14 nt, Human
uccauauuauugug

SEQ ID NO: 1998301 - RNA, 18 nt, Human
ucccaacucaccccagcc

SEQ ID NO: 1998302 - RNA, 17 nt, Human
ucccaacucaccccagc

SEQ ID NO: 1998303 - RNA, 21 nt, Human
ucccaacucaccccagcccca

SEQ ID NO: 1998304 - RNA, 19 nt, Human
ucccaacucaccccagccc

SEQ ID NO: 1998305 - RNA, 14 nt, Human
ucccaacuuguaaa

SEQ ID NO: 1998306 - RNA, 19 nt, Human
uccaugugaaacauguugc

SEQ ID NO: 1998307 - RNA, 18 nt, Human
uccaugugaucucauugu

SEQ ID NO: 1998308 - RNA, 19 nt, Human
uccaugucgccucugcauu

SEQ ID NO: 1998309 - RNA, 17 nt, Human
uccaugucgccucugca

SEQ ID NO: 1998310 - RNA, 18 nt, Human
uccaugucgccucugcau

SEQ ID NO: 1998311 - RNA, 16 nt, Human
uccaugucgccucugc

SEQ ID NO: 1998312 - RNA, 16 nt, Human
uccaagaagcccagga

SEQ ID NO: 1998313 - RNA, 15 nt, Human
uccaagaagcccagg

SEQ ID NO: 1998314 - RNA, 23 nt, Human
ucaugucaaauauuuagauguaa

SEQ ID NO: 1998315 - RNA, 14 nt, Human
uccaagaagcccag

SEQ ID NO: 1998316 - RNA, 13 nt, Human
uccaagagccuga

SEQ ID NO: 1998317 - RNA, 14 nt, Human
uccaagagccugag

SEQ ID NO: 1998318 - RNA, 20 nt, Human
uccaagaccuucuccuucac

SEQ ID NO: 1998319 - RNA, 19 nt, Human
uccaagaagcccaggaaag

SEQ ID NO: 1998320 - RNA, 22 nt, Human
uccaagcaggacauggacaagg

SEQ ID NO: 1998321 - RNA, 14 nt, Human
uccaagcaggacau

SEQ ID NO: 1998322 - RNA, 17 nt, Human
uccaagcaaaugugaau

SEQ ID NO: 1998323 - RNA, 15 nt, Human
uccaagcaaauguga

SEQ ID NO: 1998324 - RNA, 12 nt, Human
uccacacccgcg

SEQ ID NO: 1998325 - RNA, 19 nt, Human
uccacaagagcccaggccu

SEQ ID NO: 1998326 - RNA, 20 nt, Human
uccacaagagcccaggccuc

SEQ ID NO: 1998327 - RNA, 21 nt, Human
uccacaagagcccaggccucc

SEQ ID NO: 1998328 - RNA, 22 nt, Human
uccaagcccaguucagcuuggg

SEQ ID NO: 1998329 - RNA, 15 nt, Human
uccaagccagcggga

SEQ ID NO: 1998330 - RNA, 15 nt, Human
uccaagccagcaagc

SEQ ID NO: 1998331 - RNA, 15 nt, Human
uccagaugccacaau

SEQ ID NO: 1998332 - RNA, 16 nt, Human
uccagagcugcuuccc

SEQ ID NO: 1998333 - RNA, 22 nt, Human
uccagauuuuuuacagcugccu

SEQ ID NO: 1998334 - RNA, 19 nt, Human
uccagcaauucuccugccu

SEQ ID NO: 1998335 - RNA, 20 nt, Human
uccagcaauucuccugccuc

SEQ ID NO: 1998336 - RNA, 18 nt, Human
uccagcaauucuccugcc

SEQ ID NO: 1998337 - RNA, 18 nt, Human
uccaggacccugccaggc

SEQ ID NO: 1998338 - RNA, 19 nt, Human
uccaggacccugccaggca

SEQ ID NO: 1998339 - RNA, 21 nt, Human
uccaggacccugccaggcaca

SEQ ID NO: 1998340 - RNA, 22 nt, Human
uccaggacccugccaggcacag

SEQ ID NO: 1998341 - RNA, 18 nt, Human
uccaggacaggagaugcu

SEQ ID NO: 1998342 - RNA, 19 nt, Human
uccaggacaggagaugcug

SEQ ID NO: 1998343 - RNA, 22 nt, Human
uccaggacaggagaugcugugc

SEQ ID NO: 1998344 - RNA, 14 nt, Human
uccaggacccugcc

SEQ ID NO: 1998345 - RNA, 15 nt, Human
uccaggacccugcca

SEQ ID NO: 1998346 - RNA, 17 nt, Human
uccaggacccugccagg

SEQ ID NO: 1998347 - RNA, 19 nt, Human
uccagcuggguuggaaaac

SEQ ID NO: 1998348 - RNA, 15 nt, Human
uccagcuggccggga

SEQ ID NO: 1998349 - RNA, 21 nt, Human
uccagcuggccgggagccuga

SEQ ID NO: 1998350 - RNA, 22 nt, Human
uccagcuggccgggagccugau

SEQ ID NO: 1998351 - RNA, 14 nt, Human
uccacuuucuagcc

SEQ ID NO: 1998352 - RNA, 17 nt, Human
uccacuuuaucuugaau

SEQ ID NO: 1998353 - RNA, 13 nt, Human
uccagagcugcca

SEQ ID NO: 1998354 - RNA, 15 nt, Human
uccagagcugccagu

SEQ ID NO: 1998355 - RNA, 15 nt, Human
uccagagcugcuucc

SEQ ID NO: 1998356 - RNA, 22 nt, Human
uccagagaguggcuccucccgg

SEQ ID NO: 1998357 - RNA, 19 nt, Human
uccagagaguggcuccucc

SEQ ID NO: 1998358 - RNA, 12 nt, Human
uccagagcauuc

SEQ ID NO: 1998359 - RNA, 20 nt, Human
uccagagcauuccagucagg

SEQ ID NO: 1998360 - RNA, 15 nt, Human
uccacuuuaucuuga

SEQ ID NO: 1998361 - RNA, 21 nt, Human
uccacuuagaaauugcauuuc

SEQ ID NO: 1998362 - RNA, 23 nt, Human
uccacuuagaaauugcauuuccu

SEQ ID NO: 1998363 - RNA, 22 nt, Human
uccacugugccaugugccaggu

SEQ ID NO: 1998364 - RNA, 13 nt, Human
uccacccugcucu

SEQ ID NO: 1998365 - RNA, 14 nt, Human
uccacccugcucuc

SEQ ID NO: 1998366 - RNA, 21 nt, Human
uccacccugcucuccgaccag

SEQ ID NO: 1998367 - RNA, 16 nt, Human
ucaguuaagccuuugg

SEQ ID NO: 1998368 - RNA, 17 nt, Human
ucaguuaagccuuugga

SEQ ID NO: 1998369 - RNA, 15 nt, Human
ucaguguuuggugca

SEQ ID NO: 1998370 - RNA, 12 nt, Human
ucaguguuucau

SEQ ID NO: 1998371 - RNA, 15 nt, Human
ucaguguuucugggg

SEQ ID NO: 1998372 - RNA, 18 nt, Human
ucagugugacugaucucu

SEQ ID NO: 1998373 - RNA, 17 nt, Human
ucagucugauucccaag

SEQ ID NO: 1998374 - RNA, 19 nt, Human
ucagucugauucccaagcu

SEQ ID NO: 1998375 - RNA, 14 nt, Human
ucagguggggcagc

SEQ ID NO: 1998376 - RNA, 18 nt, Human
ucaggugcugccauccag

SEQ ID NO: 1998377 - RNA, 20 nt, Human
ucaggugcugccauccaggu

SEQ ID NO: 1998378 - RNA, 15 nt, Human
ucagguggggcagcu

SEQ ID NO: 1998379 - RNA, 16 nt, Human
ucagguggggcagcuu

SEQ ID NO: 1998380 - RNA, 21 nt, Human
ucagguggggcagcuugaggg

SEQ ID NO: 1998381 - RNA, 17 nt, Human
ucagguggggcagcuug

SEQ ID NO: 1998382 - RNA, 20 nt, Human
ucagguggggucacucuggc

SEQ ID NO: 1998383 - RNA, 17 nt, Human
ucagguggggucacucu

SEQ ID NO: 1998384 - RNA, 21 nt, Human
ucagguggggucacucuggca

SEQ ID NO: 1998385 - RNA, 18 nt, Human
ucaguccaugaagaugua

SEQ ID NO: 1998386 - RNA, 15 nt, Human
ucaguccauagcaga

SEQ ID NO: 1998387 - RNA, 18 nt, Human
ucaguccccgugaaggag

SEQ ID NO: 1998388 - RNA, 23 nt, Human
ucaguccaagggguccccuccag

SEQ ID NO: 1998389 - RNA, 14 nt, Human
ucaguucucuucac

SEQ ID NO: 1998390 - RNA, 17 nt, Human
ucaguucucuucacuca

SEQ ID NO: 1998391 - RNA, 16 nt, Human
ucauacuccuaugcuu

SEQ ID NO: 1998392 - RNA, 17 nt, Human
ucauacuccuaugcuuu

SEQ ID NO: 1998393 - RNA, 20 nt, Human
ucauacuccuaugcuuuagc

SEQ ID NO: 1998394 - RNA, 16 nt, Human
ucauacucgagucuga

SEQ ID NO: 1998395 - RNA, 17 nt, Human
ucauacucgagucugag

SEQ ID NO: 1998396 - RNA, 14 nt, Human
ucauacugaugugu

SEQ ID NO: 1998397 - RNA, 15 nt, Human
ucauacugauguguu

SEQ ID NO: 1998398 - RNA, 14 nt, Human
ucaucauauuauac

SEQ ID NO: 1998399 - RNA, 17 nt, Human
ucaucauauuauacaga

SEQ ID NO: 1998400 - RNA, 14 nt, Human
ucaucuggaguucu

SEQ ID NO: 1998401 - RNA, 20 nt, Human
ucaucuggaguucucaaaga

SEQ ID NO: 1998402 - RNA, 13 nt, Human
ucaugaaagauuc

SEQ ID NO: 1998403 - RNA, 15 nt, Human
ucaugaaagauucaa

SEQ ID NO: 1998404 - RNA, 24 nt, Human
ucauggacuucugccagcauaaua

SEQ ID NO: 1998405 - RNA, 15 nt, Human
ucagcacgauuucug

SEQ ID NO: 1998406 - RNA, 16 nt, Human
ucagcacgauuucugu

SEQ ID NO: 1998407 - RNA, 17 nt, Human
ucagcacgauuucuguu

SEQ ID NO: 1998408 - RNA, 12 nt, Human
ucagcaggcagc

SEQ ID NO: 1998409 - RNA, 13 nt, Human
ucagcaggcagcc

SEQ ID NO: 1998410 - RNA, 17 nt, Human
ucagcagugagagcaga

SEQ ID NO: 1998411 - RNA, 13 nt, Human
ucagcaguugcug

SEQ ID NO: 1998412 - RNA, 15 nt, Human
ucagcaggcagccuu

SEQ ID NO: 1998413 - RNA, 16 nt, Human
ucagcaggcagccuug

SEQ ID NO: 1998414 - RNA, 14 nt, Human
ucagcaguugcugg

SEQ ID NO: 1998415 - RNA, 16 nt, Human
ucagcaguugcuggua

SEQ ID NO: 1998416 - RNA, 17 nt, Human
ucagcaguugcugguaa

SEQ ID NO: 1998417 - RNA, 18 nt, Human
ucagcaguugcugguaaa

SEQ ID NO: 1998418 - RNA, 19 nt, Human
ucagcaguugcugguaaaa

SEQ ID NO: 1998419 - RNA, 20 nt, Human
ucagcaguugcugguaaaau

SEQ ID NO: 1998420 - RNA, 22 nt, Human
ucagcaguugcugguaaaauga

SEQ ID NO: 1998421 - RNA, 23 nt, Human
ucagcaguugcugguaaaaugaa

SEQ ID NO: 1998422 - RNA, 12 nt, Human
ucagccucccaa

SEQ ID NO: 1998423 - RNA, 13 nt, Human
ucagccucccaaa

SEQ ID NO: 1998424 - RNA, 23 nt, Human
ucagcaucugaccucuaccuuca

SEQ ID NO: 1998425 - RNA, 15 nt, Human
ucagcauccuggcac

SEQ ID NO: 1998426 - RNA, 16 nt, Human
ucagcauccuggcacc

SEQ ID NO: 1998427 - RNA, 17 nt, Human
ucagcauccuggcaccc

SEQ ID NO: 1998428 - RNA, 18 nt, Human
ucagcauccuggcacccg

SEQ ID NO: 1998429 - RNA, 13 nt, Human
ucagauauuugca

SEQ ID NO: 1998430 - RNA, 14 nt, Human
ucagauauuugcac

SEQ ID NO: 1998431 - RNA, 15 nt, Human
ucagauauuugcacc

SEQ ID NO: 1998432 - RNA, 20 nt, Human
ucagaucauuaucagccugu

SEQ ID NO: 1998433 - RNA, 21 nt, Human
ucagcacauaggguucccacg

SEQ ID NO: 1998434 - RNA, 24 nt, Human
ucagcacauaggguucccacgaag

SEQ ID NO: 1998435 - RNA, 13 nt, Human
ucagcaccacuca

SEQ ID NO: 1998436 - RNA, 15 nt, Human
ucagcaccacucaag

SEQ ID NO: 1998437 - RNA, 20 nt, Human
ucagcaccacucaagaccaa

SEQ ID NO: 1998438 - RNA, 21 nt, Human
ucagcaccacucaagaccaaa

SEQ ID NO: 1998439 - RNA, 17 nt, Human
ucagauaugauucaaau

SEQ ID NO: 1998440 - RNA, 16 nt, Human
ucagauaugauucaaa

SEQ ID NO: 1998441 - RNA, 18 nt, Human
ucagauaugauucaaaug

SEQ ID NO: 1998442 - RNA, 14 nt, Human
uaucauucuaaaga

SEQ ID NO: 1998443 - RNA, 23 nt, Human
uaucauucuaaagauagaguaaa

SEQ ID NO: 1998444 - RNA, 16 nt, Human
uaucauucuaaagaua

SEQ ID NO: 1998445 - RNA, 17 nt, Human
uaucauucuaaagauag

SEQ ID NO: 1998446 - RNA, 16 nt, Human
ucagccugcuccagcu

SEQ ID NO: 1998447 - RNA, 16 nt, Human
ucagccucccacagug

SEQ ID NO: 1998448 - RNA, 21 nt, Human
ucagccucccacagugcuggg

SEQ ID NO: 1998449 - RNA, 22 nt, Human
ucagccucccaaagugcuggga

SEQ ID NO: 1998450 - RNA, 12 nt, Human
ucagccucccga

SEQ ID NO: 1998451 - RNA, 20 nt, Human
ucagccucccgaauagcugg

SEQ ID NO: 1998452 - RNA, 18 nt, Human
ucagcuccagcucaccag

SEQ ID NO: 1998453 - RNA, 21 nt, Human
ucagcuccagcucaccagccc

SEQ ID NO: 1998454 - RNA, 22 nt, Human
ucagcuccagcucaccagcccc

SEQ ID NO: 1998455 - RNA, 17 nt, Human
ucaggaggcaggaccuu

SEQ ID NO: 1998456 - RNA, 22 nt, Human
ucaggagcuccauacacacgcu

SEQ ID NO: 1998457 - RNA, 18 nt, Human
ucaggaggccaagguggg

SEQ ID NO: 1998458 - RNA, 15 nt, Human
ucagcugcuacuacu

SEQ ID NO: 1998459 - RNA, 12 nt, Human
ucagcugcucag

SEQ ID NO: 1998460 - RNA, 24 nt, Human
ucugagaucaaaacgguuuuacug

SEQ ID NO: 1998461 - RNA, 18 nt, Human
ucugagaggacuuuucuu

SEQ ID NO: 1998462 - RNA, 12 nt, Human
ucugagagcugu

SEQ ID NO: 1998463 - RNA, 23 nt, Human
ucugacccaugcugcccugugag

SEQ ID NO: 1998464 - RNA, 22 nt, Human
ucugacccaugcugcccuguga

SEQ ID NO: 1998465 - RNA, 20 nt, Human
ucugacccaugcugcccugu

SEQ ID NO: 1998466 - RNA, 19 nt, Human
ucugacccaugcugcccug

SEQ ID NO: 1998467 - RNA, 13 nt, Human
ucugcacuccccu

SEQ ID NO: 1998468 - RNA, 13 nt, Human
ucugauuucaggg

SEQ ID NO: 1998469 - RNA, 20 nt, Human
ucugauuucuuuucaccauu

SEQ ID NO: 1998470 - RNA, 16 nt, Human
ucugcaaagcauguuu

SEQ ID NO: 1998471 - RNA, 23 nt, Human
ucugcaaagcauguuuugcaugu

SEQ ID NO: 1998472 - RNA, 22 nt, Human
ucugaggaauccagacccggcu

SEQ ID NO: 1998473 - RNA, 18 nt, Human
ucugaggaauccagaccc

SEQ ID NO: 1998474 - RNA, 21 nt, Human
ucugaggaauccagacccggc

SEQ ID NO: 1998475 - RNA, 14 nt, Human
ucugcccacucccu

SEQ ID NO: 1998476 - RNA, 13 nt, Human
ucugcccacuccc

SEQ ID NO: 1998477 - RNA, 12 nt, Human
ucugccucccau

SEQ ID NO: 1998478 - RNA, 17 nt, Human
ucugcccaccucggccu

SEQ ID NO: 1998479 - RNA, 15 nt, Human
ucugccucccaucac

SEQ ID NO: 1998480 - RNA, 13 nt, Human
ucugccucccauc

SEQ ID NO: 1998481 - RNA, 12 nt, Human
ucugcccacucc

SEQ ID NO: 1998482 - RNA, 22 nt, Human
ucugccauauucuguuggccag

SEQ ID NO: 1998483 - RNA, 23 nt, Human
ucugccauauucuguuggccagu

SEQ ID NO: 1998484 - RNA, 18 nt, Human
ucugccauauucuguugg

SEQ ID NO: 1998485 - RNA, 23 nt, Human
ucugccucugacacacagcucug

SEQ ID NO: 1998486 - RNA, 14 nt, Human
ucugccucugaugu

SEQ ID NO: 1998487 - RNA, 18 nt, Human
ucugccucugauguauuu

SEQ ID NO: 1998488 - RNA, 20 nt, Human
ucugccucugauguauuuug

SEQ ID NO: 1998489 - RNA, 21 nt, Human
ucugccucugacacacagcuc

SEQ ID NO: 1998490 - RNA, 22 nt, Human
ucugccucugacacacagcucu

SEQ ID NO: 1998491 - RNA, 19 nt, Human
ucugccugaagucacacag

SEQ ID NO: 1998492 - RNA, 21 nt, Human
ucugccugaggggcagccugc

SEQ ID NO: 1998493 - RNA, 22 nt, Human
ucugccugaggggcagccugcc

SEQ ID NO: 1998494 - RNA, 23 nt, Human
ucugccugaggggcagccugccu

SEQ ID NO: 1998495 - RNA, 20 nt, Human
ucugccugaagucacacagu

SEQ ID NO: 1998496 - RNA, 21 nt, Human
ucugccucccaucacccgcua

SEQ ID NO: 1998497 - RNA, 20 nt, Human
ucugccucccaucacccgcu

SEQ ID NO: 1998498 - RNA, 17 nt, Human
ucugccucccaucaccc

SEQ ID NO: 1998499 - RNA, 16 nt, Human
ucugccucccaucacc

SEQ ID NO: 1998500 - RNA, 15 nt, Human
ucugccucugacaca

SEQ ID NO: 1998501 - RNA, 18 nt, Human
ucugccucugacacacag

SEQ ID NO: 1998502 - RNA, 15 nt, Human
ucugccuccucuuca

SEQ ID NO: 1998503 - RNA, 15 nt, Human
ucuggcugcagagca

SEQ ID NO: 1998504 - RNA, 22 nt, Human
ucuggagcccacuguacuugcu

SEQ ID NO: 1998505 - RNA, 16 nt, Human
ucuggagcccacugua

SEQ ID NO: 1998506 - RNA, 12 nt, Human
ucuggagcccac

SEQ ID NO: 1998507 - RNA, 16 nt, Human
ucuggugaccuuccaa

SEQ ID NO: 1998508 - RNA, 18 nt, Human
ucuggugaccuuccaaga

SEQ ID NO: 1998509 - RNA, 23 nt, Human
ucuggugaccuuccaagagccug

SEQ ID NO: 1998510 - RNA, 16 nt, Human
ucuggugacuuuccuc

SEQ ID NO: 1998511 - RNA, 13 nt, Human
ucugucuaggaau

SEQ ID NO: 1998512 - RNA, 14 nt, Human
ucugucucagucca

SEQ ID NO: 1998513 - RNA, 12 nt, Human
ucuguccuggga

SEQ ID NO: 1998514 - RNA, 17 nt, Human
ucugucgcccagucugg

SEQ ID NO: 1998515 - RNA, 14 nt, Human
ucuguacagagccc

SEQ ID NO: 1998516 - RNA, 15 nt, Human
ucuguacagagccca

SEQ ID NO: 1998517 - RNA, 13 nt, Human
ucugcugcuggcu

SEQ ID NO: 1998518 - RNA, 11 nt, Human
ucugcugcugg

SEQ ID NO: 1998519 - RNA, 22 nt, Human
ucugcugaugacccccccagcu

SEQ ID NO: 1998520 - RNA, 15 nt, Human
ucugcugcagagcag

SEQ ID NO: 1998521 - RNA, 16 nt, Human
ucugcugcagagcagu

SEQ ID NO: 1998522 - RNA, 22 nt, Human
ucugcugcagagcaguaaggga

SEQ ID NO: 1998523 - RNA, 13 nt, Human
ucugcugaaggaa

SEQ ID NO: 1998524 - RNA, 13 nt, Human
ucugcucuugcau

SEQ ID NO: 1998525 - RNA, 17 nt, Human
ucugccugcccaggccc

SEQ ID NO: 1998526 - RNA, 18 nt, Human
ucugccugcccaggcccc

SEQ ID NO: 1998527 - RNA, 20 nt, Human
ucugccugcccaggccccug

SEQ ID NO: 1998528 - RNA, 23 nt, Human
ucuggaccccaucugugaauaag

SEQ ID NO: 1998529 - RNA, 15 nt, Human
ucuggacuccucugu

SEQ ID NO: 1998530 - RNA, 16 nt, Human
ucuggacuccucuguc

SEQ ID NO: 1998531 - RNA, 18 nt, Human
ucuggacuccucugucca

SEQ ID NO: 1998532 - RNA, 22 nt, Human
ucuggacuccucuguccaggca

SEQ ID NO: 1998533 - RNA, 12 nt, Human
ucuggacucugg

SEQ ID NO: 1998534 - RNA, 14 nt, Human
ucuggacucuggac

SEQ ID NO: 1998535 - RNA, 15 nt, Human
ucuggacucuggacu

SEQ ID NO: 1998536 - RNA, 20 nt, Human
ucuggacuuucucuaauaau

SEQ ID NO: 1998537 - RNA, 22 nt, Human
ucuggacuuucucuaauaauaa

SEQ ID NO: 1998538 - RNA, 15 nt, Human
ucugcugcuggcugg

SEQ ID NO: 1998539 - RNA, 14 nt, Human
ucugcugcuggcug

SEQ ID NO: 1998540 - RNA, 17 nt, Human
ucugcugcuggcugguu

SEQ ID NO: 1998541 - RNA, 14 nt, Human
ucuggaauuugaaa

SEQ ID NO: 1998542 - RNA, 15 nt, Human
ugaaacacuuugcau

SEQ ID NO: 1998543 - RNA, 12 nt, Human
ugaaaauuuuga

SEQ ID NO: 1998544 - RNA, 14 nt, Human
ugaaaauucagugg

SEQ ID NO: 1998545 - RNA, 18 nt, Human
ugaaaauugccuuucugu

SEQ ID NO: 1998546 - RNA, 19 nt, Human
ugaaaauugccuuucugug

SEQ ID NO: 1998547 - RNA, 22 nt, Human
ugaaaauugccuuucuguguuu

SEQ ID NO: 1998548 - RNA, 23 nt, Human
ugaaaauugccuuucuguguuua

SEQ ID NO: 1998549 - RNA, 22 nt, Human
ugaaaagaaaaaugagccuggc

SEQ ID NO: 1998550 - RNA, 20 nt, Human
ugaaaagaaaaaugagccug

SEQ ID NO: 1998551 - RNA, 20 nt, Human
ugaaaauuaggauuucauga

SEQ ID NO: 1998552 - RNA, 19 nt, Human
ugaaaagaaaaaugagccu

SEQ ID NO: 1998553 - RNA, 18 nt, Human
ugaaaaccacauuggaga

SEQ ID NO: 1998554 - RNA, 23 nt, Human
ugaaaacacuguucucugcccuc

SEQ ID NO: 1998555 - RNA, 22 nt, Human
ugaaaacacuguucucugcccu

SEQ ID NO: 1998556 - RNA, 14 nt, Human
ugaaaacagaaauu

SEQ ID NO: 1998557 - RNA, 15 nt, Human
ugaaaacagaaauug

SEQ ID NO: 1998558 - RNA, 17 nt, Human
ugaaaacagaaauuggu

SEQ ID NO: 1998559 - RNA, 18 nt, Human
ugaaaacagaaauuggua

SEQ ID NO: 1998560 - RNA, 21 nt, Human
ugaaaacagaaauugguaccu

SEQ ID NO: 1998561 - RNA, 22 nt, Human
ugaaaacagaaauugguaccuu

SEQ ID NO: 1998562 - RNA, 21 nt, Human
ugaaaacacuguucucugccc

SEQ ID NO: 1998563 - RNA, 20 nt, Human
ugaaaacacuguucucugcc

SEQ ID NO: 1998564 - RNA, 17 nt, Human
ugaaaacacuguucucu

SEQ ID NO: 1998565 - RNA, 19 nt, Human
ucuuuuccaaacacaggca

SEQ ID NO: 1998566 - RNA, 13 nt, Human
ucuuuuccucgcu

SEQ ID NO: 1998567 - RNA, 18 nt, Human
ucuuuuguuuuuugaagu

SEQ ID NO: 1998568 - RNA, 19 nt, Human
ucuuuuguuacucuuggga

SEQ ID NO: 1998569 - RNA, 21 nt, Human
ucuuuuguuuuuugaaguguu

SEQ ID NO: 1998570 - RNA, 21 nt, Human
ugaaaacacauuuuucuuagg

SEQ ID NO: 1998571 - RNA, 14 nt, Human
ucuuugcagacagg

SEQ ID NO: 1998572 - RNA, 17 nt, Human
ucuuugcagacaggcaa

SEQ ID NO: 1998573 - RNA, 18 nt, Human
ucuuugcacuuuuucuua

SEQ ID NO: 1998574 - RNA, 20 nt, Human
ucuuugcacuuuuucuuaau

SEQ ID NO: 1998575 - RNA, 13 nt, Human
ucuuugccaucuc

SEQ ID NO: 1998576 - RNA, 16 nt, Human
ucuuugccaucucugc

SEQ ID NO: 1998577 - RNA, 17 nt, Human
ucuuugccaucucugcu

SEQ ID NO: 1998578 - RNA, 18 nt, Human
ucuuugccaucucugcuc

SEQ ID NO: 1998579 - RNA, 19 nt, Human
ucuuugccaucucugcucc

SEQ ID NO: 1998580 - RNA, 20 nt, Human
ucuuugccaucucugcucca

SEQ ID NO: 1998581 - RNA, 21 nt, Human
ucuuugcccccaaacccccau

SEQ ID NO: 1998582 - RNA, 23 nt, Human
ucuuugagugaagcugggagaac

SEQ ID NO: 1998583 - RNA, 15 nt, Human
ucuuugaauuuucau

SEQ ID NO: 1998584 - RNA, 16 nt, Human
ucuuugaauuuucauu

SEQ ID NO: 1998585 - RNA, 19 nt, Human
ucuuugaauuuucauuuua

SEQ ID NO: 1998586 - RNA, 21 nt, Human
ucuuugaauuuucauuuuaca

SEQ ID NO: 1998587 - RNA, 13 nt, Human
ucuuugcagacag

SEQ ID NO: 1998588 - RNA, 15 nt, Human
ucuuuggacccugag

SEQ ID NO: 1998589 - RNA, 14 nt, Human
ucuuuggacccuga

SEQ ID NO: 1998590 - RNA, 16 nt, Human
ucuuuggacccugagg

SEQ ID NO: 1998591 - RNA, 13 nt, Human
ucuuuggacccug

SEQ ID NO: 1998592 - RNA, 22 nt, Human
ucuuugcccuuuacuugucuuu

SEQ ID NO: 1998593 - RNA, 13 nt, Human
ucuuugcccuuua

SEQ ID NO: 1998594 - RNA, 15 nt, Human
ucuuugcccuuuacu

SEQ ID NO: 1998595 - RNA, 13 nt, Human
ucuuguguguuua

SEQ ID NO: 1998596 - RNA, 23 nt, Human
ucuuuccaaaguacacuguuuca

SEQ ID NO: 1998597 - RNA, 17 nt, Human
ucuuguguauuucaguu

SEQ ID NO: 1998598 - RNA, 12 nt, Human
ucuuucccuccc

SEQ ID NO: 1998599 - RNA, 23 nt, Human
ucuuucccucccuuccucuuucc

SEQ ID NO: 1998600 - RNA, 13 nt, Human
ucuuucccucccu

SEQ ID NO: 1998601 - RNA, 13 nt, Human
ucuuugaauuuuc

SEQ ID NO: 1998602 - RNA, 14 nt, Human
ucuuugaauuuuca

SEQ ID NO: 1998603 - RNA, 21 nt, Human
ucuuauauuuacaacacuuua

SEQ ID NO: 1998604 - RNA, 16 nt, Human
ucuuaucucagauauu

SEQ ID NO: 1998605 - RNA, 22 nt, Human
ucuuauccaacaucaacaucuu

SEQ ID NO: 1998606 - RNA, 20 nt, Human
ucuuaucucagauauuugca

SEQ ID NO: 1998607 - RNA, 21 nt, Human
ucuuaucucagauauuugcac

SEQ ID NO: 1998608 - RNA, 21 nt, Human
ucuucagagacuccugcaggc

SEQ ID NO: 1998609 - RNA, 14 nt, Human
ucuucagaucucua

SEQ ID NO: 1998610 - RNA, 15 nt, Human
ucuucagaucucuaa

SEQ ID NO: 1998611 - RNA, 19 nt, Human
ucuucaguuaagccuuugg

SEQ ID NO: 1998612 - RNA, 20 nt, Human
ucuucaguuaagccuuugga

SEQ ID NO: 1998613 - RNA, 22 nt, Human
ucuucaguuaagccuuuggaaa

SEQ ID NO: 1998614 - RNA, 21 nt, Human
ucuuccaaagcagagagcauu

SEQ ID NO: 1998615 - RNA, 22 nt, Human
ucuucauuaccucagugagaag

SEQ ID NO: 1998616 - RNA, 14 nt, Human
ucuucauguuccca

SEQ ID NO: 1998617 - RNA, 16 nt, Human
ucuucauguucccacu

SEQ ID NO: 1998618 - RNA, 19 nt, Human
ucuucauguucccacuuca

SEQ ID NO: 1998619 - RNA, 11 nt, Human
ucugugugugu

SEQ ID NO: 1998620 - RNA, 13 nt, Human
ucugugugugugu

SEQ ID NO: 1998621 - RNA, 15 nt, Human
ucuuagauguauaua

SEQ ID NO: 1998622 - RNA, 17 nt, Human
ucugugucagguggggc

SEQ ID NO: 1998623 - RNA, 20 nt, Human
ucugugucagguggggcagc

SEQ ID NO: 1998624 - RNA, 23 nt, Human
ucuuagguuggcaaaaaggcagg

SEQ ID NO: 1998625 - RNA, 20 nt, Human
ucuuagguuggcaaaaaggc

SEQ ID NO: 1998626 - RNA, 13 nt, Human
ucuuauaauuuaa

SEQ ID NO: 1998627 - RNA, 14 nt, Human
ucuuauaauuuaaa

SEQ ID NO: 1998628 - RNA, 17 nt, Human
ucuugaacugagcuugg

SEQ ID NO: 1998629 - RNA, 20 nt, Human
ucuugaaauauaggaacuua

SEQ ID NO: 1998630 - RNA, 21 nt, Human
ucuugaaauauaggaacuuaa

SEQ ID NO: 1998631 - RNA, 18 nt, Human
ucuugaacugagcuugga

SEQ ID NO: 1998632 - RNA, 16 nt, Human
ucuugaaggaaaaauu

SEQ ID NO: 1998633 - RNA, 17 nt, Human
ucuugaaggaaaaauuc

SEQ ID NO: 1998634 - RNA, 18 nt, Human
ucuugaaggaaaaauuca

SEQ ID NO: 1998635 - RNA, 19 nt, Human
ucuugaaggaaaaauucaa

SEQ ID NO: 1998636 - RNA, 22 nt, Human
ucuugaaggaaaaauucaauag

SEQ ID NO: 1998637 - RNA, 22 nt, Human
ucuugaagacuuuucuuucagc

SEQ ID NO: 1998638 - RNA, 13 nt, Human
ucuugaagacuuu

SEQ ID NO: 1998639 - RNA, 16 nt, Human
ucuucuuggucucagu

SEQ ID NO: 1998640 - RNA, 17 nt, Human
ucuuccaaccauuuauc

SEQ ID NO: 1998641 - RNA, 19 nt, Human
ucuuccaaccauuuaucuu

SEQ ID NO: 1998642 - RNA, 21 nt, Human
ucuuccaaccauuuaucuuga

SEQ ID NO: 1998643 - RNA, 14 nt, Human
ucuugcucugcuga

SEQ ID NO: 1998644 - RNA, 16 nt, Human
ucuugccacugccucu

SEQ ID NO: 1998645 - RNA, 17 nt, Human
ucuugccacugccucuu

SEQ ID NO: 1998646 - RNA, 19 nt, Human
ucuugccaaauauaaauaa

SEQ ID NO: 1998647 - RNA, 23 nt, Human
ucuugcauggcaaggacugcagg

SEQ ID NO: 1998648 - RNA, 23 nt, Human
ucuugcauuuaaaagacagcuuu

SEQ ID NO: 1998649 - RNA, 14 nt, Human
ucuugcauuucacu

SEQ ID NO: 1998650 - RNA, 15 nt, Human
ucuugcucugcugac

SEQ ID NO: 1998651 - RNA, 23 nt, Human
ucuugcucugcugacagacacag

SEQ ID NO: 1998652 - RNA, 13 nt, Human
ugaggcagguccc

SEQ ID NO: 1998653 - RNA, 20 nt, Human
ugaggcagcacgugcacaaa

SEQ ID NO: 1998654 - RNA, 16 nt, Human
ugaggcugggcucccu

SEQ ID NO: 1998655 - RNA, 15 nt, Human
ugaggcugggcuccc

SEQ ID NO: 1998656 - RNA, 18 nt, Human
ugaggcucugcccuuggu

SEQ ID NO: 1998657 - RNA, 15 nt, Human
ugaggcucugcccuu

SEQ ID NO: 1998658 - RNA, 16 nt, Human
ugaggcucugcccuug

SEQ ID NO: 1998659 - RNA, 21 nt, Human
ugaggugaugaagacagcccg

SEQ ID NO: 1998660 - RNA, 21 nt, Human
ugaggcugggcucccuuccca

SEQ ID NO: 1998661 - RNA, 18 nt, Human
ugaggucagagccugcag

SEQ ID NO: 1998662 - RNA, 19 nt, Human
ugaggucagagccugcagu

SEQ ID NO: 1998663 - RNA, 20 nt, Human
ugagucccaggcugagccuc

SEQ ID NO: 1998664 - RNA, 21 nt, Human
ugagucccaggcugagccuca

SEQ ID NO: 1998665 - RNA, 21 nt, Human
ugaggaggccuugggcucugc

SEQ ID NO: 1998666 - RNA, 23 nt, Human
ugaggaggccuugggcucugcug

SEQ ID NO: 1998667 - RNA, 15 nt, Human
ugagcugcaccaggu

SEQ ID NO: 1998668 - RNA, 23 nt, Human
ugagcuuaagaauuuugagcagg

SEQ ID NO: 1998669 - RNA, 17 nt, Human
ugagcuuacguaguucu

SEQ ID NO: 1998670 - RNA, 18 nt, Human
ugagcuuacguaguucua

SEQ ID NO: 1998671 - RNA, 17 nt, Human
ugaggauuaguuuagaa

SEQ ID NO: 1998672 - RNA, 19 nt, Human
ugaggauuaguuuagaaca

SEQ ID NO: 1998673 - RNA, 20 nt, Human
ugaggauuaguuuagaacag

SEQ ID NO: 1998674 - RNA, 21 nt, Human
ugaggauuaguuuagaacagg

SEQ ID NO: 1998675 - RNA, 22 nt, Human
ugaggaugaaaaaauaacacug

SEQ ID NO: 1998676 - RNA, 19 nt, Human
ugaggaucagaguaaucca

SEQ ID NO: 1998677 - RNA, 17 nt, Human
ugaggaucagaguaauc

SEQ ID NO: 1998678 - RNA, 13 nt, Human
ugaggaucagagu

SEQ ID NO: 1998679 - RNA, 23 nt, Human
ugagccgagaucacgccacugca

SEQ ID NO: 1998680 - RNA, 14 nt, Human
ugagccgcagagaa

SEQ ID NO: 1998681 - RNA, 20 nt, Human
ugagcagggcucagcgggga

SEQ ID NO: 1998682 - RNA, 22 nt, Human
ugagcagggcucagcggggaca

SEQ ID NO: 1998683 - RNA, 23 nt, Human
ugagcagggcucagcggggacag

SEQ ID NO: 1998684 - RNA, 22 nt, Human
ugagccgagaucacgccacugc

SEQ ID NO: 1998685 - RNA, 19 nt, Human
ugagcucaggaguuugaga

SEQ ID NO: 1998686 - RNA, 11 nt, Human
ugagcucagga

SEQ ID NO: 1998687 - RNA, 11 nt, Human
ugagcucagcc

SEQ ID NO: 1998688 - RNA, 12 nt, Human
ugagcucagccc

SEQ ID NO: 1998689 - RNA, 20 nt, Human
ugagcucagcccuggugggc

SEQ ID NO: 1998690 - RNA, 17 nt, Human
ugagcugaaagaggcca

SEQ ID NO: 1998691 - RNA, 14 nt, Human
ugacugggggcaga

SEQ ID NO: 1998692 - RNA, 16 nt, Human
ugacuuuccucuuugg

SEQ ID NO: 1998693 - RNA, 14 nt, Human
ugacuuugaaaaua

SEQ ID NO: 1998694 - RNA, 21 nt, Human
ugacucuuucuauuguuucuu

SEQ ID NO: 1998695 - RNA, 22 nt, Human
ugacucuugaguuguuuuugua

SEQ ID NO: 1998696 - RNA, 23 nt, Human
ugacucuugaguuguuuuuguau

SEQ ID NO: 1998697 - RNA, 14 nt, Human
ugacugaacuguaa

SEQ ID NO: 1998698 - RNA, 13 nt, Human
ugacuacagggcc

SEQ ID NO: 1998699 - RNA, 14 nt, Human
ugacuacagggccg

SEQ ID NO: 1998700 - RNA, 18 nt, Human
ugacucuuccccaggaag

SEQ ID NO: 1998701 - RNA, 14 nt, Human
ugacucuugaguug

SEQ ID NO: 1998702 - RNA, 19 nt, Human
ugacucuugaguuguuuuu

SEQ ID NO: 1998703 - RNA, 21 nt, Human
ugacucuugaguuguuuuugu

SEQ ID NO: 1998704 - RNA, 13 nt, Human
ugaccauucucca

SEQ ID NO: 1998705 - RNA, 14 nt, Human
ugaccauucuccac

SEQ ID NO: 1998706 - RNA, 17 nt, Human
ugacgugucaggaaaac

SEQ ID NO: 1998707 - RNA, 13 nt, Human
ugagacauauuua

SEQ ID NO: 1998708 - RNA, 15 nt, Human
ugagaaauaaaguuu

SEQ ID NO: 1998709 - RNA, 15 nt, Human
ugacuuuuuuucacu

SEQ ID NO: 1998710 - RNA, 18 nt, Human
ugagaaaaccccuuccca

SEQ ID NO: 1998711 - RNA, 16 nt, Human
ugacuuuucaaguauu

SEQ ID NO: 1998712 - RNA, 23 nt, Human
ugacuuuucaaguauuuaagccu

SEQ ID NO: 1998713 - RNA, 22 nt, Human
ugacuuuucuguccgagcuuug

SEQ ID NO: 1998714 - RNA, 13 nt, Human
ugacuuuugcuuu

SEQ ID NO: 1998715 - RNA, 14 nt, Human
ugacuuuugcuuua

SEQ ID NO: 1998716 - RNA, 16 nt, Human
ugacuuuugcuuuaau

SEQ ID NO: 1998717 - RNA, 17 nt, Human
ugacuuuugcuuuaauu

SEQ ID NO: 1998718 - RNA, 21 nt, Human
ugacuuuugcuuuaauuccau

SEQ ID NO: 1998719 - RNA, 12 nt, Human
ugagcagcaccc

SEQ ID NO: 1998720 - RNA, 18 nt, Human
ugagaggggaacagacug

SEQ ID NO: 1998721 - RNA, 14 nt, Human
ugagaggggaacag

SEQ ID NO: 1998722 - RNA, 19 nt, Human
ugagaggcugucuguugua

SEQ ID NO: 1998723 - RNA, 14 nt, Human
ugagaccaaccugg

SEQ ID NO: 1998724 - RNA, 12 nt, Human
ugagaccugccc

SEQ ID NO: 1998725 - RNA, 13 nt, Human
ugagaccugcccc

SEQ ID NO: 1998726 - RNA, 14 nt, Human
ugagaccugccccu

SEQ ID NO: 1998727 - RNA, 15 nt, Human
ugagaccugccccuc

SEQ ID NO: 1998728 - RNA, 22 nt, Human
ugagaccugccccuccucucug

SEQ ID NO: 1998729 - RNA, 20 nt, Human
ugaagagaagggcagggcug

SEQ ID NO: 1998730 - RNA, 22 nt, Human
ugaagagaagggcagggcugag

SEQ ID NO: 1998731 - RNA, 13 nt, Human
ugaagacuccaga

SEQ ID NO: 1998732 - RNA, 14 nt, Human
ugaagacuccagaa

SEQ ID NO: 1998733 - RNA, 15 nt, Human
ugaagacuccagaaa

SEQ ID NO: 1998734 - RNA, 23 nt, Human
ugaagagcaagagagcagcaagg

SEQ ID NO: 1998735 - RNA, 17 nt, Human
ugaagagcuggggagaa

SEQ ID NO: 1998736 - RNA, 18 nt, Human
ugaagagcuggggagaau

SEQ ID NO: 1998737 - RNA, 20 nt, Human
ugaagagguuuuaaagcuuc

SEQ ID NO: 1998738 - RNA, 21 nt, Human
ugaagagguuuuaaagcuucc

SEQ ID NO: 1998739 - RNA, 19 nt, Human
ugaagagguuuuaaagcuu

SEQ ID NO: 1998740 - RNA, 18 nt, Human
ugaagagcuguugauggg

SEQ ID NO: 1998741 - RNA, 17 nt, Human
ugaagaguccucugaau

SEQ ID NO: 1998742 - RNA, 23 nt, Human
ugaagaguccucugaaugaaccu

SEQ ID NO: 1998743 - RNA, 18 nt, Human
ugaaggccccgcccaggc

SEQ ID NO: 1998744 - RNA, 14 nt, Human
ugaaggaaaaauuc

SEQ ID NO: 1998745 - RNA, 16 nt, Human
ugaagcuuuuauguga

SEQ ID NO: 1998746 - RNA, 13 nt, Human
ugaaggaaaaauu

SEQ ID NO: 1998747 - RNA, 21 nt, Human
ugaagcuuuuaugugaaacau

SEQ ID NO: 1998748 - RNA, 16 nt, Human
ugaaggaaccaaagcg

SEQ ID NO: 1998749 - RNA, 20 nt, Human
ugaaggccccgcccaggcuu

SEQ ID NO: 1998750 - RNA, 19 nt, Human
ugaaggccccgcccaggcu

SEQ ID NO: 1998751 - RNA, 16 nt, Human
ugaaacacuuugcaua

SEQ ID NO: 1998752 - RNA, 13 nt, Human
ugaaacagacuug

SEQ ID NO: 1998753 - RNA, 14 nt, Human
ugaaacagacuugu

SEQ ID NO: 1998754 - RNA, 12 nt, Human
ugaaacaugcuu

SEQ ID NO: 1998755 - RNA, 20 nt, Human
ugaaacaugcuuguguuucu

SEQ ID NO: 1998756 - RNA, 24 nt, Human
ugaaacauguugccaaaauggugg

SEQ ID NO: 1998757 - RNA, 13 nt, Human
ugaaacauguuuc

SEQ ID NO: 1998758 - RNA, 18 nt, Human
ugaaacauugcuuuuaaa

SEQ ID NO: 1998759 - RNA, 23 nt, Human
ugaacuggguacuuguggacaca

SEQ ID NO: 1998760 - RNA, 19 nt, Human
ugaacuuacaggugauuaa

SEQ ID NO: 1998761 - RNA, 16 nt, Human
ugaaacauugcuuuua

SEQ ID NO: 1998762 - RNA, 17 nt, Human
ugaaacauugcuuuuaa

SEQ ID NO: 1998763 - RNA, 13 nt, Human
ugaacuguuagaa

SEQ ID NO: 1998764 - RNA, 14 nt, Human
ugaacuguuagaau

SEQ ID NO: 1998765 - RNA, 16 nt, Human
ugaacuguuagaaugu

SEQ ID NO: 1998766 - RNA, 17 nt, Human
ugaacuguuagaaugua

SEQ ID NO: 1998767 - RNA, 19 nt, Human
ugaagacucauucuucugu

SEQ ID NO: 1998768 - RNA, 20 nt, Human
ugaagacucauucuucugua

SEQ ID NO: 1998769 - RNA, 19 nt, Human
ugaacuuccugcuuccuca

SEQ ID NO: 1998770 - RNA, 22 nt, Human
ugaaguuugauaaauaguguua

SEQ ID NO: 1998771 - RNA, 15 nt, Human
ugaaguuugauaaau

SEQ ID NO: 1998772 - RNA, 20 nt, Human
ugaaguuugauaaauagugu

SEQ ID NO: 1998773 - RNA, 14 nt, Human
ugaaguuugauaaa

SEQ ID NO: 1998774 - RNA, 21 nt, Human
ugaaucagaauaaccuucaaa

SEQ ID NO: 1998775 - RNA, 21 nt, Human
ugaaggcuggguucugauccu

SEQ ID NO: 1998776 - RNA, 20 nt, Human
ugaaggcuggguucugaucc

SEQ ID NO: 1998777 - RNA, 12 nt, Human
ugaaucuguaca

SEQ ID NO: 1998778 - RNA, 13 nt, Human
ugaaucuguacag

SEQ ID NO: 1998779 - RNA, 14 nt, Human
ugaaucuguacaga

SEQ ID NO: 1998780 - RNA, 16 nt, Human
ugaaugaaccuucugg

SEQ ID NO: 1998781 - RNA, 15 nt, Human
ugaaugaaccuucug

SEQ ID NO: 1998782 - RNA, 16 nt, Human
ugaaucuuggugucua

SEQ ID NO: 1998783 - RNA, 14 nt, Human
ugaaucuucugaaa

SEQ ID NO: 1998784 - RNA, 22 nt, Human
ugaaucuucugaaaccaaaugu

SEQ ID NO: 1998785 - RNA, 15 nt, Human
ugaaugaauggcuaa

SEQ ID NO: 1998786 - RNA, 20 nt, Human
ugaaugaauggcuaagcaaa

SEQ ID NO: 1998787 - RNA, 23 nt, Human
ugaaugaugauccuaggcauuug

SEQ ID NO: 1998788 - RNA, 14 nt, Human
ugaaugcauaaaau

SEQ ID NO: 1998789 - RNA, 16 nt, Human
ugaccacugcagaaga

SEQ ID NO: 1998790 - RNA, 17 nt, Human
ugaccacugcagaagac

SEQ ID NO: 1998791 - RNA, 18 nt, Human
ugaccacugcagaagaca

SEQ ID NO: 1998792 - RNA, 13 nt, Human
ugacauguuuuau

SEQ ID NO: 1998793 - RNA, 21 nt, Human
ugaccagccuccaugcugccu

SEQ ID NO: 1998794 - RNA, 22 nt, Human
ugaccagccuccaugcugccuc

SEQ ID NO: 1998795 - RNA, 23 nt, Human
ugaccagccuccaugcugccucc

SEQ ID NO: 1998796 - RNA, 15 nt, Human
ugaccaucauuucac

SEQ ID NO: 1998797 - RNA, 18 nt, Human
ugacaugcacucagcucu

SEQ ID NO: 1998798 - RNA, 22 nt, Human
ugacaucucuauuccccacccu

SEQ ID NO: 1998799 - RNA, 19 nt, Human
ugacauguguuggcagccu

SEQ ID NO: 1998800 - RNA, 23 nt, Human
ugacaucaacugcaucaagaugu

SEQ ID NO: 1998801 - RNA, 22 nt, Human
ugacagagccugccccagcgcu

SEQ ID NO: 1998802 - RNA, 23 nt, Human
ugacagagccugccccagcgcug

SEQ ID NO: 1998803 - RNA, 23 nt, Human
ugacagagagagauacucuggga

SEQ ID NO: 1998804 - RNA, 14 nt, Human
ugacagagccugcc

SEQ ID NO: 1998805 - RNA, 16 nt, Human
ugacagagccugcccc

SEQ ID NO: 1998806 - RNA, 20 nt, Human
ugacagagccugccccagcg

SEQ ID NO: 1998807 - RNA, 22 nt, Human
ugacagagcaagugagacccug

SEQ ID NO: 1998808 - RNA, 21 nt, Human
ugacagagagagauacucugg

SEQ ID NO: 1998809 - RNA, 22 nt, Human
ugacagagagagauacucuggg

SEQ ID NO: 1998810 - RNA, 20 nt, Human
ugacagagagagauacucug

SEQ ID NO: 1998811 - RNA, 17 nt, Human
ugacagacacaggcccg

SEQ ID NO: 1998812 - RNA, 18 nt, Human
ugacagacacaggcccgg

SEQ ID NO: 1998813 - RNA, 15 nt, Human
ugacauauuuuugcu

SEQ ID NO: 1998814 - RNA, 16 nt, Human
ugacaucacuggcaug

SEQ ID NO: 1998815 - RNA, 17 nt, Human
ugacaucacuggcaugg

SEQ ID NO: 1998816 - RNA, 14 nt, Human
ugacaucacuggca

SEQ ID NO: 1998817 - RNA, 18 nt, Human
ugacaucacuggcauggu

SEQ ID NO: 1998818 - RNA, 18 nt, Human
ugacauccacaaaugcag

SEQ ID NO: 1998819 - RNA, 23 nt, Human
ugacaacacucauugaccugagg

SEQ ID NO: 1998820 - RNA, 15 nt, Human
ugacaacagacuucu

SEQ ID NO: 1998821 - RNA, 17 nt, Human
ugacaaauguuucuaag

SEQ ID NO: 1998822 - RNA, 19 nt, Human
ugacaaauguuucuaaggu

SEQ ID NO: 1998823 - RNA, 21 nt, Human
ugacaaauguuucuaagguaa

SEQ ID NO: 1998824 - RNA, 18 nt, Human
ugacaacagacuucugaa

SEQ ID NO: 1998825 - RNA, 19 nt, Human
ugacaacagacuucugaaa

SEQ ID NO: 1998826 - RNA, 13 nt, Human
ugacaacacucau

SEQ ID NO: 1998827 - RNA, 14 nt, Human
ugacaaauguuucu

SEQ ID NO: 1998828 - RNA, 15 nt, Human
ugacaaauguuucua

SEQ ID NO: 1998829 - RNA, 16 nt, Human
ugaauuuaaauagcuu

SEQ ID NO: 1998830 - RNA, 20 nt, Human
ugacaaagguaaaucagacu

SEQ ID NO: 1998831 - RNA, 13 nt, Human
ugaauuguaagga

SEQ ID NO: 1998832 - RNA, 21 nt, Human
ugaauuguaaggaaugauuaa

SEQ ID NO: 1998833 - RNA, 14 nt, Human
ugacacacagcucu

SEQ ID NO: 1998834 - RNA, 15 nt, Human
ugacacacagcucug

SEQ ID NO: 1998835 - RNA, 14 nt, Human
ugacagacacaggc

SEQ ID NO: 1998836 - RNA, 16 nt, Human
ugacagacacaggccc

SEQ ID NO: 1998837 - RNA, 13 nt, Human
ugacagacacagg

SEQ ID NO: 1998838 - RNA, 23 nt, Human
ugacaaggauugcuacuguccua

SEQ ID NO: 1998839 - RNA, 17 nt, Human
ugacaaguuuaaaggcu

SEQ ID NO: 1998840 - RNA, 22 nt, Human
uacauggaauaacauguaauua

SEQ ID NO: 1998841 - RNA, 19 nt, Human
uacauggaauaacauguaa

SEQ ID NO: 1998842 - RNA, 18 nt, Human
uacauggaauaacaugua

SEQ ID NO: 1998843 - RNA, 14 nt, Human
uacauggaauaaca

SEQ ID NO: 1998844 - RNA, 19 nt, Human
uacauuuuuaagugcugca

SEQ ID NO: 1998845 - RNA, 22 nt, Human
uacauuuuuaagugcugcauuu

SEQ ID NO: 1998846 - RNA, 21 nt, Human
uacauggcuggagcuagaauu

SEQ ID NO: 1998847 - RNA, 14 nt, Human
uacauuuuuaagug

SEQ ID NO: 1998848 - RNA, 14 nt, Human
uacaugcuuguuga

SEQ ID NO: 1998849 - RNA, 15 nt, Human
uacaugcuuugugaa

SEQ ID NO: 1998850 - RNA, 16 nt, Human
uacaugcuuugugaac

SEQ ID NO: 1998851 - RNA, 16 nt, Human
uacaugccauugaaaa

SEQ ID NO: 1998852 - RNA, 18 nt, Human
uacaugcacacucaugug

SEQ ID NO: 1998853 - RNA, 14 nt, Human
uacaugaaauucaa

SEQ ID NO: 1998854 - RNA, 17 nt, Human
uacauaagauaaaugug

SEQ ID NO: 1998855 - RNA, 16 nt, Human
uacauaagauaaaugu

SEQ ID NO: 1998856 - RNA, 16 nt, Human
uacaugaaaacacauu

SEQ ID NO: 1998857 - RNA, 17 nt, Human
uacaugaaaacacauuu

SEQ ID NO: 1998858 - RNA, 18 nt, Human
uacaugaaaacacauuuu

SEQ ID NO: 1998859 - RNA, 19 nt, Human
uacaugaaaacacauuuuu

SEQ ID NO: 1998860 - RNA, 23 nt, Human
uacaugaaaacacauuuuucuua

SEQ ID NO: 1998861 - RNA, 19 nt, Human
uacaguuuguuaguaugag

SEQ ID NO: 1998862 - RNA, 21 nt, Human
uacaguuuguuaguaugaggc

SEQ ID NO: 1998863 - RNA, 16 nt, Human
uacauaaacaaguccu

SEQ ID NO: 1998864 - RNA, 12 nt, Human
uacauaaacauc

SEQ ID NO: 1998865 - RNA, 13 nt, Human
uacauaaacauca

SEQ ID NO: 1998866 - RNA, 13 nt, Human
uacaggaaguacu

SEQ ID NO: 1998867 - RNA, 18 nt, Human
uacaggaagguagaaaua

SEQ ID NO: 1998868 - RNA, 20 nt, Human
uacagcuugaccgugaggcc

SEQ ID NO: 1998869 - RNA, 14 nt, Human
uacagcugccugca

SEQ ID NO: 1998870 - RNA, 13 nt, Human
uacagcugccugc

SEQ ID NO: 1998871 - RNA, 16 nt, Human
uacagcucccccagcu

SEQ ID NO: 1998872 - RNA, 17 nt, Human
uacagcucccccagcuc

SEQ ID NO: 1998873 - RNA, 18 nt, Human
uacagcucccccagcucc

SEQ ID NO: 1998874 - RNA, 20 nt, Human
uacagcucccccagcucccc

SEQ ID NO: 1998875 - RNA, 14 nt, Human
uacagcucccccag

SEQ ID NO: 1998876 - RNA, 23 nt, Human
uacacugugcugagucugaaggc

SEQ ID NO: 1998877 - RNA, 22 nt, Human
uacacugugcugagucugaagg

SEQ ID NO: 1998878 - RNA, 20 nt, Human
uacacuguuucaaacuuuac

SEQ ID NO: 1998879 - RNA, 16 nt, Human
uacacugccugccuua

SEQ ID NO: 1998880 - RNA, 16 nt, Human
uacacuuacacuuuau

SEQ ID NO: 1998881 - RNA, 22 nt, Human
uacacuguuucaaacuuuacua

SEQ ID NO: 1998882 - RNA, 16 nt, Human
uacagcuaaucagcau

SEQ ID NO: 1998883 - RNA, 18 nt, Human
uacagcuaaucagcauuc

SEQ ID NO: 1998884 - RNA, 21 nt, Human
uacacugagagccuuuuugaa

SEQ ID NO: 1998885 - RNA, 16 nt, Human
uacacuucaguuaucu

SEQ ID NO: 1998886 - RNA, 19 nt, Human
uacaguugaaaaacagcug

SEQ ID NO: 1998887 - RNA, 17 nt, Human
uacaguugaaaaacagc

SEQ ID NO: 1998888 - RNA, 20 nt, Human
uacaguugaaaaacagcuga

SEQ ID NO: 1998889 - RNA, 18 nt, Human
uacaguuuguuaguauga

SEQ ID NO: 1998890 - RNA, 15 nt, Human
uacaggaaguacugg

SEQ ID NO: 1998891 - RNA, 14 nt, Human
uacaggaaguacug

SEQ ID NO: 1998892 - RNA, 22 nt, Human
uacaggaaguacuggagaaaau

SEQ ID NO: 1998893 - RNA, 15 nt, Human
uacaggagugagcac

SEQ ID NO: 1998894 - RNA, 20 nt, Human
uacaggaugaugacuaugga

SEQ ID NO: 1998895 - RNA, 23 nt, Human
uacaguucggugagcuacaaaug

SEQ ID NO: 1998896 - RNA, 13 nt, Human
uacaaaugauugc

SEQ ID NO: 1998897 - RNA, 18 nt, Human
uacaaaugauugcuuuua

SEQ ID NO: 1998898 - RNA, 19 nt, Human
uacaaaugauugcuuuuaa

SEQ ID NO: 1998899 - RNA, 20 nt, Human
uacaaaugauugcuuuuaaa

SEQ ID NO: 1998900 - RNA, 21 nt, Human
uacaaaugauugcuuuuaaaa

SEQ ID NO: 1998901 - RNA, 23 nt, Human
uacaaaugauugcuuuuaaaauu

SEQ ID NO: 1998902 - RNA, 16 nt, Human
uacaaaugcaucuuug

SEQ ID NO: 1998903 - RNA, 17 nt, Human
uacaaaugcaucuuuga

SEQ ID NO: 1998904 - RNA, 18 nt, Human
uacaaaugcaucuuugau

SEQ ID NO: 1998905 - RNA, 18 nt, Human
uacaaaguagaagucuua

SEQ ID NO: 1998906 - RNA, 14 nt, Human
uacaaaguagaagu

SEQ ID NO: 1998907 - RNA, 17 nt, Human
uacaaaggcuguauuca

SEQ ID NO: 1998908 - RNA, 16 nt, Human
uacaaaggcuguauuc

SEQ ID NO: 1998909 - RNA, 14 nt, Human
uacaaacaagcaua

SEQ ID NO: 1998910 - RNA, 15 nt, Human
uacaaacaagcauau

SEQ ID NO: 1998911 - RNA, 17 nt, Human
uacaaacaagcauauaa

SEQ ID NO: 1998912 - RNA, 18 nt, Human
uacaaacaagcauauaaa

SEQ ID NO: 1998913 - RNA, 19 nt, Human
uacaaacaagcauauaaaa

SEQ ID NO: 1998914 - RNA, 20 nt, Human
uacaaacaagcauauaaaau

SEQ ID NO: 1998915 - RNA, 13 nt, Human
uaauuuuguguaa

SEQ ID NO: 1998916 - RNA, 19 nt, Human
uaauuuuguguaagaaaua

SEQ ID NO: 1998917 - RNA, 20 nt, Human
uaauuuuguguaagaaauac

SEQ ID NO: 1998918 - RNA, 19 nt, Human
uaauuuuuaaaugcaguua

SEQ ID NO: 1998919 - RNA, 13 nt, Human
uaauuuuuaaaug

SEQ ID NO: 1998920 - RNA, 15 nt, Human
uaauuuuuaaaugca

SEQ ID NO: 1998921 - RNA, 15 nt, Human
uaauucuaugccugu

SEQ ID NO: 1998922 - RNA, 15 nt, Human
uacaaauuauaaugu

SEQ ID NO: 1998923 - RNA, 16 nt, Human
uacaaauuauaaugua

SEQ ID NO: 1998924 - RNA, 18 nt, Human
uacaaauuauaauguauu

SEQ ID NO: 1998925 - RNA, 22 nt, Human
uacaaauuauaauguauucaua

SEQ ID NO: 1998926 - RNA, 15 nt, Human
uacaaauuuuucugu

SEQ ID NO: 1998927 - RNA, 16 nt, Human
uacaaauuuuucugug

SEQ ID NO: 1998928 - RNA, 23 nt, Human
uacaaaugccuccaaaguauugu

SEQ ID NO: 1998929 - RNA, 19 nt, Human
uacaaaugcaucuuugaug

SEQ ID NO: 1998930 - RNA, 21 nt, Human
uacaaaugcaucuuugaugug

SEQ ID NO: 1998931 - RNA, 16 nt, Human
uacaacaccaaaaaau

SEQ ID NO: 1998932 - RNA, 18 nt, Human
uacaacaccaaaaaauau

SEQ ID NO: 1998933 - RNA, 19 nt, Human
uacaacaccaaaaaauauc

SEQ ID NO: 1998934 - RNA, 18 nt, Human
uacaacacuuuaaugggu

SEQ ID NO: 1998935 - RNA, 17 nt, Human
uacaauuucuuuugguu

SEQ ID NO: 1998936 - RNA, 11 nt, Human
uacacacacac

SEQ ID NO: 1998937 - RNA, 19 nt, Human
uacaauuucuuuugguuca

SEQ ID NO: 1998938 - RNA, 23 nt, Human
uacacacgcugccuucgguaccc

SEQ ID NO: 1998939 - RNA, 15 nt, Human
uacacacugcauguu

SEQ ID NO: 1998940 - RNA, 14 nt, Human
uacacaggacaggg

SEQ ID NO: 1998941 - RNA, 21 nt, Human
uacacaggacagggguuccuu

SEQ ID NO: 1998942 - RNA, 22 nt, Human
uacacaggacagggguuccuuc

SEQ ID NO: 1998943 - RNA, 20 nt, Human
uacacauauaaauugucuua

SEQ ID NO: 1998944 - RNA, 22 nt, Human
uacacaucagccaucaacuaaa

SEQ ID NO: 1998945 - RNA, 16 nt, Human
uacacauguauccuuu

SEQ ID NO: 1998946 - RNA, 20 nt, Human
uacacauguauccuuucaca

SEQ ID NO: 1998947 - RNA, 21 nt, Human
uacacugugcugagucugaag

SEQ ID NO: 1998948 - RNA, 18 nt, Human
uacacugaauuuuuaugu

SEQ ID NO: 1998949 - RNA, 20 nt, Human
uacacugaauuuuuaugugu

SEQ ID NO: 1998950 - RNA, 22 nt, Human
uacacugaauuuuuauguguga

SEQ ID NO: 1998951 - RNA, 23 nt, Human
uacacugaauuuuuaugugugau

SEQ ID NO: 1998952 - RNA, 14 nt, Human
uacuguuacuugau

SEQ ID NO: 1998953 - RNA, 15 nt, Human
uacuguuacuugaua

SEQ ID NO: 1998954 - RNA, 17 nt, Human
uacuguuacuugauaac

SEQ ID NO: 1998955 - RNA, 21 nt, Human
uacugucuucaguaagccgug

SEQ ID NO: 1998956 - RNA, 14 nt, Human
uacugugacuuuau

SEQ ID NO: 1998957 - RNA, 19 nt, Human
uacugcuagucuuaagaac

SEQ ID NO: 1998958 - RNA, 16 nt, Human
uacuguccuacccacc

SEQ ID NO: 1998959 - RNA, 18 nt, Human
uacugcuugaauaaacac

SEQ ID NO: 1998960 - RNA, 12 nt, Human
uacuugaaccau

SEQ ID NO: 1998961 - RNA, 16 nt, Human
uacuugaaccauaaaa

SEQ ID NO: 1998962 - RNA, 17 nt, Human
uacuugaaccauaaaau

SEQ ID NO: 1998963 - RNA, 19 nt, Human
uacuugaaccauaaaaugu

SEQ ID NO: 1998964 - RNA, 20 nt, Human
uacuugaaccauaaaauguc

SEQ ID NO: 1998965 - RNA, 21 nt, Human
uacuugaaccauaaaaugucc

SEQ ID NO: 1998966 - RNA, 17 nt, Human
uacuuaaauguuaugua

SEQ ID NO: 1998967 - RNA, 18 nt, Human
uacuuaaauguuauguau

SEQ ID NO: 1998968 - RNA, 19 nt, Human
uacuuaaauguuauguaua

SEQ ID NO: 1998969 - RNA, 19 nt, Human
uacuguuuaagugaauuga

SEQ ID NO: 1998970 - RNA, 13 nt, Human
uacuguuauucuu

SEQ ID NO: 1998971 - RNA, 14 nt, Human
uacuguuauucuuu

SEQ ID NO: 1998972 - RNA, 15 nt, Human
uacuguuauucuuug

SEQ ID NO: 1998973 - RNA, 16 nt, Human
uacuguuauucuuugc

SEQ ID NO: 1998974 - RNA, 17 nt, Human
uacuguuauucuuugca

SEQ ID NO: 1998975 - RNA, 20 nt, Human
uacuguuauucuuugcacuu

SEQ ID NO: 1998976 - RNA, 16 nt, Human
uacuguucagcuuuua

SEQ ID NO: 1998977 - RNA, 19 nt, Human
uacuugcucuugaugccug

SEQ ID NO: 1998978 - RNA, 18 nt, Human
uacuugcucuugaugccu

SEQ ID NO: 1998979 - RNA, 14 nt, Human
uacuugcucuugau

SEQ ID NO: 1998980 - RNA, 13 nt, Human
uacuugcucuuga

SEQ ID NO: 1998981 - RNA, 20 nt, Human
uacuugcucuugaugccugg

SEQ ID NO: 1998982 - RNA, 13 nt, Human
uacuuguggacac

SEQ ID NO: 1998983 - RNA, 20 nt, Human
uacuaaggauacaggcugga

SEQ ID NO: 1998984 - RNA, 22 nt, Human
uacuaaggauacaggcuggaaa

SEQ ID NO: 1998985 - RNA, 12 nt, Human
uacuaaggauac

SEQ ID NO: 1998986 - RNA, 19 nt, Human
uacuaaggauacaggcugg

SEQ ID NO: 1998987 - RNA, 22 nt, Human
uacuacaguccucccaucucac

SEQ ID NO: 1998988 - RNA, 13 nt, Human
uacuacaguuugu

SEQ ID NO: 1998989 - RNA, 14 nt, Human
uacuacaguuuguu

SEQ ID NO: 1998990 - RNA, 18 nt, Human
uacucgaguuacagacaa

SEQ ID NO: 1998991 - RNA, 22 nt, Human
uacucgaguuacagacaaagcg

SEQ ID NO: 1998992 - RNA, 12 nt, Human
uacuccucccag

SEQ ID NO: 1998993 - RNA, 15 nt, Human
uacuccccuccuuga

SEQ ID NO: 1998994 - RNA, 14 nt, Human
uacugccuauuuua

SEQ ID NO: 1998995 - RNA, 21 nt, Human
uacugccuauuuuaauaaaca

SEQ ID NO: 1998996 - RNA, 14 nt, Human
uacugccuccccca

SEQ ID NO: 1998997 - RNA, 19 nt, Human
uacugcccaggccugccug

SEQ ID NO: 1998998 - RNA, 20 nt, Human
uacugcccaggccugccugu

SEQ ID NO: 1998999 - RNA, 21 nt, Human
uacugcccaggccugccuguu

SEQ ID NO: 1999000 - RNA, 22 nt, Human
uacugcccaggccugccuguuc

SEQ ID NO: 1999001 - RNA, 19 nt, Human
uacugccaaccucgcucca

SEQ ID NO: 1999002 - RNA, 23 nt, Human
uacugccaaccucgcuccaacuc

SEQ ID NO: 1999003 - RNA, 13 nt, Human
uacugccaaccuc

SEQ ID NO: 1999004 - RNA, 16 nt, Human
uacugccaaccucgcu

SEQ ID NO: 1999005 - RNA, 17 nt, Human
uacugcauucuucugau

SEQ ID NO: 1999006 - RNA, 18 nt, Human
uacugcauucuucugauc

SEQ ID NO: 1999007 - RNA, 15 nt, Human
uacugcauuuaggga

SEQ ID NO: 1999008 - RNA, 18 nt, Human
uacugcauuuagggagua

SEQ ID NO: 1999009 - RNA, 14 nt, Human
uacugcauucuucu

SEQ ID NO: 1999010 - RNA, 16 nt, Human
uacucuacccucuuag

SEQ ID NO: 1999011 - RNA, 16 nt, Human
uacugcaaacuauuua

SEQ ID NO: 1999012 - RNA, 23 nt, Human
uacauuuuuaagugcugcauuua

SEQ ID NO: 1999013 - RNA, 20 nt, Human
uacauuuuuagccuguguca

SEQ ID NO: 1999014 - RNA, 13 nt, Human
uacauuuuuugaa

SEQ ID NO: 1999015 - RNA, 15 nt, Human
uacauuuuuugaaau

SEQ ID NO: 1999016 - RNA, 16 nt, Human
uacauuuuuugaaaug

SEQ ID NO: 1999017 - RNA, 22 nt, Human
uacauuuuuugaaaugcugaaa

SEQ ID NO: 1999018 - RNA, 15 nt, Human
uacccacugcucugg

SEQ ID NO: 1999019 - RNA, 20 nt, Human
uaccaaaaaaauuacaguuu

SEQ ID NO: 1999020 - RNA, 22 nt, Human
uaccuaacgaaguauccuucag

SEQ ID NO: 1999021 - RNA, 22 nt, Human
uaccgagucucuucuccacugg

SEQ ID NO: 1999022 - RNA, 17 nt, Human
uaccgagucucuucucc

SEQ ID NO: 1999023 - RNA, 15 nt, Human
uaccgacaagcacag

SEQ ID NO: 1999024 - RNA, 18 nt, Human
uaccgagucucuucucca

SEQ ID NO: 1999025 - RNA, 21 nt, Human
uaccgagucucuucuccacug

SEQ ID NO: 1999026 - RNA, 15 nt, Human
uaccuacauacaauu

SEQ ID NO: 1999027 - RNA, 21 nt, Human
uacgaaaagaggggaagagac

SEQ ID NO: 1999028 - RNA, 18 nt, Human
uacgaaaagaggggaaga

SEQ ID NO: 1999029 - RNA, 13 nt, Human
uaccuuuuuuaua

SEQ ID NO: 1999030 - RNA, 16 nt, Human
uaccuuuuuuauacau

SEQ ID NO: 1999031 - RNA, 17 nt, Human
uaccuuuuuuauacaua

SEQ ID NO: 1999032 - RNA, 15 nt, Human
uaccuuuuuuuuucu

SEQ ID NO: 1999033 - RNA, 19 nt, Human
uaccuuuuuuuuucuuuuu

SEQ ID NO: 1999034 - RNA, 20 nt, Human
uacuaauagacaauuuauua

SEQ ID NO: 1999035 - RNA, 21 nt, Human
uacuaauagacaauuuauuau

SEQ ID NO: 1999036 - RNA, 14 nt, Human
uacuaaggaaucuu

SEQ ID NO: 1999037 - RNA, 13 nt, Human
uaccuuuuuuaga

SEQ ID NO: 1999038 - RNA, 19 nt, Human
uaccuuuuuuagaguugau

SEQ ID NO: 1999039 - RNA, 22 nt, Human
uaccuuuuuuagaguugauacu

SEQ ID NO: 1999040 - RNA, 18 nt, Human
uaccucggugccuuccuc

SEQ ID NO: 1999041 - RNA, 18 nt, Human
uaccucugcauaaauauu

SEQ ID NO: 1999042 - RNA, 21 nt, Human
uaccucuugagccuugaacuu

SEQ ID NO: 1999043 - RNA, 13 nt, Human
uagcauccuggaa

SEQ ID NO: 1999044 - RNA, 15 nt, Human
uagcauccuggaaua

SEQ ID NO: 1999045 - RNA, 16 nt, Human
uagcauccuggaauau

SEQ ID NO: 1999046 - RNA, 18 nt, Human
uagcauccuggaauaucu

SEQ ID NO: 1999047 - RNA, 17 nt, Human
uagcaucacuuaaaaca

SEQ ID NO: 1999048 - RNA, 18 nt, Human
uagcaucacuuaaaacac

SEQ ID NO: 1999049 - RNA, 23 nt, Human
uagcaucacuuaaaacacguuuu

SEQ ID NO: 1999050 - RNA, 22 nt, Human
uagcauauauguguccauuucc

SEQ ID NO: 1999051 - RNA, 14 nt, Human
uagcauaugacaaa

SEQ ID NO: 1999052 - RNA, 18 nt, Human
uagcauaugacaaauguu

SEQ ID NO: 1999053 - RNA, 19 nt, Human
uagcauaugacaaauguuu

SEQ ID NO: 1999054 - RNA, 21 nt, Human
uagcauaugacaaauguuucu

SEQ ID NO: 1999055 - RNA, 22 nt, Human
uagcauaugacaaauguuucua

SEQ ID NO: 1999056 - RNA, 15 nt, Human
uagcaucacuuaaaa

SEQ ID NO: 1999057 - RNA, 16 nt, Human
uagcauacguacacau

SEQ ID NO: 1999058 - RNA, 17 nt, Human
uagcauacguacacauu

SEQ ID NO: 1999059 - RNA, 18 nt, Human
uagcauacguacacauuu

SEQ ID NO: 1999060 - RNA, 19 nt, Human
uagcauacguacacauuuu

SEQ ID NO: 1999061 - RNA, 11 nt, Human
uagcagggaaa

SEQ ID NO: 1999062 - RNA, 20 nt, Human
uagcagcugacuuucaaagu

SEQ ID NO: 1999063 - RNA, 16 nt, Human
uagauuccauuuacug

SEQ ID NO: 1999064 - RNA, 21 nt, Human
uagauuccauuuacugcauuc

SEQ ID NO: 1999065 - RNA, 21 nt, Human
uagauuaguacuggauuauuc

SEQ ID NO: 1999066 - RNA, 22 nt, Human
uagauuaguacuggauuauuca

SEQ ID NO: 1999067 - RNA, 13 nt, Human
uagauuugggaga

SEQ ID NO: 1999068 - RNA, 21 nt, Human
uagauuugccauagaguacac

SEQ ID NO: 1999069 - RNA, 14 nt, Human
uagauuuauuucau

SEQ ID NO: 1999070 - RNA, 15 nt, Human
uagauuuauuucauc

SEQ ID NO: 1999071 - RNA, 16 nt, Human
uagauacuguaucaug

SEQ ID NO: 1999072 - RNA, 15 nt, Human
uagccagugaacaua

SEQ ID NO: 1999073 - RNA, 15 nt, Human
uagcccccucuuccc

SEQ ID NO: 1999074 - RNA, 14 nt, Human
uagcccccucuucc

SEQ ID NO: 1999075 - RNA, 16 nt, Human
uagccccucuccugga

SEQ ID NO: 1999076 - RNA, 23 nt, Human
uagccccucuccccgcaguguuu

SEQ ID NO: 1999077 - RNA, 16 nt, Human
uagccuaggugacaga

SEQ ID NO: 1999078 - RNA, 18 nt, Human
uagccgugucacgggcau

SEQ ID NO: 1999079 - RNA, 14 nt, Human
uagccuaagauaua

SEQ ID NO: 1999080 - RNA, 18 nt, Human
uagccuaagauauacuug

SEQ ID NO: 1999081 - RNA, 19 nt, Human
uagccuaagauauacuugu

SEQ ID NO: 1999082 - RNA, 22 nt, Human
uagccuaagauauacuuguuuu

SEQ ID NO: 1999083 - RNA, 20 nt, Human
uagccugugccucugggacu

SEQ ID NO: 1999084 - RNA, 18 nt, Human
uagccugugccucuggga

SEQ ID NO: 1999085 - RNA, 12 nt, Human
uagcucauucuc

SEQ ID NO: 1999086 - RNA, 15 nt, Human
uagccuggugguuuu

SEQ ID NO: 1999087 - RNA, 20 nt, Human
uagcucaggugucccugcac

SEQ ID NO: 1999088 - RNA, 21 nt, Human
uagcucaggugucccugcacu

SEQ ID NO: 1999089 - RNA, 21 nt, Human
uagcugcagauaaguggccuu

SEQ ID NO: 1999090 - RNA, 17 nt, Human
uagcugacagaaucucu

SEQ ID NO: 1999091 - RNA, 14 nt, Human
uagcucuuuuccua

SEQ ID NO: 1999092 - RNA, 15 nt, Human
uagcugggacuacag

SEQ ID NO: 1999093 - RNA, 17 nt, Human
uagcugggacuacaggc

SEQ ID NO: 1999094 - RNA, 19 nt, Human
uagcugggacuacaggcac

SEQ ID NO: 1999095 - RNA, 13 nt, Human
uagaaucccugug

SEQ ID NO: 1999096 - RNA, 15 nt, Human
uagaaucccuguguu

SEQ ID NO: 1999097 - RNA, 16 nt, Human
uagaaucccuguguua

SEQ ID NO: 1999098 - RNA, 20 nt, Human
uagaaucccuguguuaauuu

SEQ ID NO: 1999099 - RNA, 17 nt, Human
uagaaugaccuuguaau

SEQ ID NO: 1999100 - RNA, 19 nt, Human
uagaaugaccuuguaaugu

SEQ ID NO: 1999101 - RNA, 20 nt, Human
uagaaugaccuuguaaugua

SEQ ID NO: 1999102 - RNA, 21 nt, Human
uagaaugaccuuguaauguaa

SEQ ID NO: 1999103 - RNA, 15 nt, Human
uagaaugaccuugua

SEQ ID NO: 1999104 - RNA, 16 nt, Human
uagaaugaccuuguaa

SEQ ID NO: 1999105 - RNA, 14 nt, Human
uagaauguaguuug

SEQ ID NO: 1999106 - RNA, 12 nt, Human
uagaauguaguu

SEQ ID NO: 1999107 - RNA, 21 nt, Human
uagaauguaguuugaggaaau

SEQ ID NO: 1999108 - RNA, 23 nt, Human
uagaauguaguuugaggaaauuu

SEQ ID NO: 1999109 - RNA, 18 nt, Human
uagaauguuuucaaaugu

SEQ ID NO: 1999110 - RNA, 20 nt, Human
uagaauggugauuuuaaaug

SEQ ID NO: 1999111 - RNA, 21 nt, Human
uagaauggugauuuuaaaugu

SEQ ID NO: 1999112 - RNA, 15 nt, Human
uagaauggugauuuu

SEQ ID NO: 1999113 - RNA, 16 nt, Human
uagaauggugauuuua

SEQ ID NO: 1999114 - RNA, 17 nt, Human
uagaauggugauuuuaa

SEQ ID NO: 1999115 - RNA, 18 nt, Human
uagaauggugauuuuaaa

SEQ ID NO: 1999116 - RNA, 19 nt, Human
uagaauggugauuuuaaau

SEQ ID NO: 1999117 - RNA, 19 nt, Human
uagaauguuuucaaauguu

SEQ ID NO: 1999118 - RNA, 15 nt, Human
uagaauuaacacaug

SEQ ID NO: 1999119 - RNA, 16 nt, Human
uagaauuaacacauga

SEQ ID NO: 1999120 - RNA, 18 nt, Human
uagaauuaacacaugauc

SEQ ID NO: 1999121 - RNA, 23 nt, Human
uagaauuaguggcacuugcuuuu

SEQ ID NO: 1999122 - RNA, 15 nt, Human
uagaauauauuuccu

SEQ ID NO: 1999123 - RNA, 14 nt, Human
uacuuguugccuau

SEQ ID NO: 1999124 - RNA, 17 nt, Human
uacuuguugccuauaag

SEQ ID NO: 1999125 - RNA, 13 nt, Human
uacuuguuguuua

SEQ ID NO: 1999126 - RNA, 17 nt, Human
uacuuguuguuuaaugu

SEQ ID NO: 1999127 - RNA, 14 nt, Human
uacuuguggacaca

SEQ ID NO: 1999128 - RNA, 14 nt, Human
uacuugucuuucug

SEQ ID NO: 1999129 - RNA, 13 nt, Human
uacuuguuucuau

SEQ ID NO: 1999130 - RNA, 15 nt, Human
uacuuguuuuuguaa

SEQ ID NO: 1999131 - RNA, 16 nt, Human
uacuuguuuuuguaaa

SEQ ID NO: 1999132 - RNA, 19 nt, Human
uacuuguuuuuguaaagaa

SEQ ID NO: 1999133 - RNA, 15 nt, Human
uagaagucuucauga

SEQ ID NO: 1999134 - RNA, 18 nt, Human
uagaagucuucaugaaau

SEQ ID NO: 1999135 - RNA, 20 nt, Human
uagaagucuucaugaaaugc

SEQ ID NO: 1999136 - RNA, 21 nt, Human
uagaagucuucaugaaaugcu

SEQ ID NO: 1999137 - RNA, 22 nt, Human
uagaagucuucaugaaaugcua

SEQ ID NO: 1999138 - RNA, 24 nt, Human
uagaagucuucaugaaaugcuaug

SEQ ID NO: 1999139 - RNA, 11 nt, Human
uagagacaggg

SEQ ID NO: 1999140 - RNA, 22 nt, Human
uagagaaggacccggaggggcc

SEQ ID NO: 1999141 - RNA, 13 nt, Human
uagagaaggaccc

SEQ ID NO: 1999142 - RNA, 10 nt, Human
uagacuugaa

SEQ ID NO: 1999143 - RNA, 12 nt, Human
uagacuugaaaa

SEQ ID NO: 1999144 - RNA, 15 nt, Human
uagacuucuguuuuc

SEQ ID NO: 1999145 - RNA, 16 nt, Human
uagacuucuguuuuca

SEQ ID NO: 1999146 - RNA, 17 nt, Human
uagacuucuguuuucaa

SEQ ID NO: 1999147 - RNA, 18 nt, Human
uagacuucuguuuucaau

SEQ ID NO: 1999148 - RNA, 14 nt, Human
uagagguucaaaga

SEQ ID NO: 1999149 - RNA, 15 nt, Human
uagagguucaaagau

SEQ ID NO: 1999150 - RNA, 22 nt, Human
uagagacagagcgacagagcag

SEQ ID NO: 1999151 - RNA, 15 nt, Human
uagagguauaauugu

SEQ ID NO: 1999152 - RNA, 16 nt, Human
uagagguauaauugug

SEQ ID NO: 1999153 - RNA, 17 nt, Human
uagagguauaauugugu

SEQ ID NO: 1999154 - RNA, 21 nt, Human
uagagguauaauugugugaua

SEQ ID NO: 1999155 - RNA, 13 nt, Human
uagacuugaaaag

SEQ ID NO: 1999156 - RNA, 12 nt, Human
uagagugggagc

SEQ ID NO: 1999157 - RNA, 15 nt, Human
uagagucugagggcu

SEQ ID NO: 1999158 - RNA, 21 nt, Human
uagagucugagggcuuguagu

SEQ ID NO: 1999159 - RNA, 13 nt, Human
uagaggugcaugc

SEQ ID NO: 1999160 - RNA, 16 nt, Human
uagaggugcaugccua

SEQ ID NO: 1999161 - RNA, 14 nt, Human
uagaguugauacua

SEQ ID NO: 1999162 - RNA, 17 nt, Human
uagaguugauacuacag

SEQ ID NO: 1999163 - RNA, 20 nt, Human
uagacccacuggacucaccu

SEQ ID NO: 1999164 - RNA, 16 nt, Human
uagaauugaagguuuu

SEQ ID NO: 1999165 - RNA, 17 nt, Human
uagaauugaagguuuuu

SEQ ID NO: 1999166 - RNA, 18 nt, Human
uagaauugaagguuuuug

SEQ ID NO: 1999167 - RNA, 14 nt, Human
uagacuacuguuca

SEQ ID NO: 1999168 - RNA, 21 nt, Human
uagacuucagggagucagcug

SEQ ID NO: 1999169 - RNA, 23 nt, Human
uagacuucagggagucagcuguu

SEQ ID NO: 1999170 - RNA, 24 nt, Human
uagacuucagggagucagcuguuu

SEQ ID NO: 1999171 - RNA, 15 nt, Human
uauaaacuuuaccuu

SEQ ID NO: 1999172 - RNA, 16 nt, Human
uauaaacuuuaccuuu

SEQ ID NO: 1999173 - RNA, 17 nt, Human
uauaaacuuuaccuuuu

SEQ ID NO: 1999174 - RNA, 13 nt, Human
uauaaacuuuacc

SEQ ID NO: 1999175 - RNA, 14 nt, Human
uauaaacuuuaccu

SEQ ID NO: 1999176 - RNA, 18 nt, Human
uauaaaccgaacugaugu

SEQ ID NO: 1999177 - RNA, 12 nt, Human
uauaaacagcuu

SEQ ID NO: 1999178 - RNA, 11 nt, Human
uauaaacuuua

SEQ ID NO: 1999179 - RNA, 22 nt, Human
uauaaacaagaaugaagguuuu

SEQ ID NO: 1999180 - RNA, 13 nt, Human
uaguuugaggaaa

SEQ ID NO: 1999181 - RNA, 14 nt, Human
uaguuugaggaaau

SEQ ID NO: 1999182 - RNA, 19 nt, Human
uaguuugaggaaauuugca

SEQ ID NO: 1999183 - RNA, 20 nt, Human
uaguuugaggaaauuugcag

SEQ ID NO: 1999184 - RNA, 15 nt, Human
uauaaaauuuacugu

SEQ ID NO: 1999185 - RNA, 22 nt, Human
uauaaacaugcuugcauuauau

SEQ ID NO: 1999186 - RNA, 13 nt, Human
uauaaacacuguu

SEQ ID NO: 1999187 - RNA, 18 nt, Human
uauaaacagaagugacug

SEQ ID NO: 1999188 - RNA, 12 nt, Human
uauaaacacugu

SEQ ID NO: 1999189 - RNA, 16 nt, Human
uaguuugauuaaauuc

SEQ ID NO: 1999190 - RNA, 21 nt, Human
uaguuugauuaaauucuugca

SEQ ID NO: 1999191 - RNA, 15 nt, Human
uaguuugauuaaauu

SEQ ID NO: 1999192 - RNA, 20 nt, Human
uaguagggguaccacugaau

SEQ ID NO: 1999193 - RNA, 12 nt, Human
uaguucuuuaaa

SEQ ID NO: 1999194 - RNA, 15 nt, Human
uaguucuuuaaacug

SEQ ID NO: 1999195 - RNA, 20 nt, Human
uaguucuuuaaacugucgug

SEQ ID NO: 1999196 - RNA, 13 nt, Human
uaguugaauacuu

SEQ ID NO: 1999197 - RNA, 15 nt, Human
uaguugaauacuuga

SEQ ID NO: 1999198 - RNA, 16 nt, Human
uaguugaauacuugaa

SEQ ID NO: 1999199 - RNA, 17 nt, Human
uaguugaauacuugaac

SEQ ID NO: 1999200 - RNA, 21 nt, Human
uaguucuguauuugaaagugc

SEQ ID NO: 1999201 - RNA, 11 nt, Human
uaguucuguga

SEQ ID NO: 1999202 - RNA, 17 nt, Human
uaguucuguauuugaaa

SEQ ID NO: 1999203 - RNA, 19 nt, Human
uaguucuguauuugaaagu

SEQ ID NO: 1999204 - RNA, 20 nt, Human
uaguuguuugauucagacag

SEQ ID NO: 1999205 - RNA, 21 nt, Human
uaguugaauacuugaaccaua

SEQ ID NO: 1999206 - RNA, 19 nt, Human
uaguugaauacuugaacca

SEQ ID NO: 1999207 - RNA, 20 nt, Human
uaguugaauacuugaaccau

SEQ ID NO: 1999208 - RNA, 22 nt, Human
uaguuguuugauucagacagcu

SEQ ID NO: 1999209 - RNA, 21 nt, Human
uaguuguuugauucagacagc

SEQ ID NO: 1999210 - RNA, 15 nt, Human
uaguaugaggcauuu

SEQ ID NO: 1999211 - RNA, 16 nt, Human
uaguagggguaccacu

SEQ ID NO: 1999212 - RNA, 17 nt, Human
uaguagggguaccacug

SEQ ID NO: 1999213 - RNA, 16 nt, Human
uaguaugguggcuggg

SEQ ID NO: 1999214 - RNA, 20 nt, Human
uaguggcuuaaaacaacacu

SEQ ID NO: 1999215 - RNA, 18 nt, Human
uaguggccaucauuucug

SEQ ID NO: 1999216 - RNA, 19 nt, Human
uaguggccaucauuucugg

SEQ ID NO: 1999217 - RNA, 15 nt, Human
uaguggcauggagaa

SEQ ID NO: 1999218 - RNA, 20 nt, Human
uagcugcauuugucuggccu

SEQ ID NO: 1999219 - RNA, 22 nt, Human
uagcuggucuuauuuguaaagc

SEQ ID NO: 1999220 - RNA, 12 nt, Human
uagcuguaaggc

SEQ ID NO: 1999221 - RNA, 17 nt, Human
uagcuguaaggcaugaa

SEQ ID NO: 1999222 - RNA, 19 nt, Human
uagcuguaaggcaugaagg

SEQ ID NO: 1999223 - RNA, 11 nt, Human
uagggaaaaac

SEQ ID NO: 1999224 - RNA, 17 nt, Human
uaggucugauauucaaa

SEQ ID NO: 1999225 - RNA, 11 nt, Human
uaggugacaga

SEQ ID NO: 1999226 - RNA, 16 nt, Human
uaggugacagagugag

SEQ ID NO: 1999227 - RNA, 17 nt, Human
uaggugugggggaagca

SEQ ID NO: 1999228 - RNA, 13 nt, Human
uagguguggggga

SEQ ID NO: 1999229 - RNA, 22 nt, Human
uagguuauuuugauguaaagau

SEQ ID NO: 1999230 - RNA, 19 nt, Human
uaggugugacugaauuucu

SEQ ID NO: 1999231 - RNA, 21 nt, Human
uaggugugacugaauuucuuu

SEQ ID NO: 1999232 - RNA, 23 nt, Human
uaggugugacugaauuucuuuug

SEQ ID NO: 1999233 - RNA, 14 nt, Human
uaguaggauaugcc

SEQ ID NO: 1999234 - RNA, 21 nt, Human
uaguaggauaugccugcucuu

SEQ ID NO: 1999235 - RNA, 13 nt, Human
uaguaggcaagau

SEQ ID NO: 1999236 - RNA, 17 nt, Human
uaguaugaggcauuugu

SEQ ID NO: 1999237 - RNA, 18 nt, Human
uaguaugaggcauuuguu

SEQ ID NO: 1999238 - RNA, 20 nt, Human
uauacuuguuuuuguaaaga

SEQ ID NO: 1999239 - RNA, 22 nt, Human
uauacuuguuuuuguaaagaaa

SEQ ID NO: 1999240 - RNA, 22 nt, Human
uauagaaagcaagauguacuau

SEQ ID NO: 1999241 - RNA, 11 nt, Human
uauagaaagug

SEQ ID NO: 1999242 - RNA, 18 nt, Human
uauagaaagcaagaugua

SEQ ID NO: 1999243 - RNA, 18 nt, Human
uauagacaggagaagaaa

SEQ ID NO: 1999244 - RNA, 20 nt, Human
uauagacaggagaagaaaga

SEQ ID NO: 1999245 - RNA, 21 nt, Human
uauagacaggagaagaaagaa

SEQ ID NO: 1999246 - RNA, 23 nt, Human
uauagaagucuucaugaaaugcu

SEQ ID NO: 1999247 - RNA, 21 nt, Human
uauagaagucuucaugaaaug

SEQ ID NO: 1999248 - RNA, 22 nt, Human
uauagaagucuucaugaaaugc

SEQ ID NO: 1999249 - RNA, 14 nt, Human
uauagaagucuuca

SEQ ID NO: 1999250 - RNA, 15 nt, Human
uauagaagucuucau

SEQ ID NO: 1999251 - RNA, 16 nt, Human
uauagaagucuucaug

SEQ ID NO: 1999252 - RNA, 19 nt, Human
uauagaagucuucaugaaa

SEQ ID NO: 1999253 - RNA, 12 nt, Human
uauagaaagugu

SEQ ID NO: 1999254 - RNA, 14 nt, Human
uauagaaaguguuc

SEQ ID NO: 1999255 - RNA, 20 nt, Human
uauagaaaguguucuguuac

SEQ ID NO: 1999256 - RNA, 21 nt, Human
uauagaaaguguucuguuaca

SEQ ID NO: 1999257 - RNA, 22 nt, Human
uauagaaaguguucuguuacaa

SEQ ID NO: 1999258 - RNA, 23 nt, Human
uauagaaaguguucuguuacaaa

SEQ ID NO: 1999259 - RNA, 13 nt, Human
uauagaagaaugc

SEQ ID NO: 1999260 - RNA, 18 nt, Human
uauagaagaaugcaugcu

SEQ ID NO: 1999261 - RNA, 20 nt, Human
uauagaagaaugcaugcuuu

SEQ ID NO: 1999262 - RNA, 13 nt, Human
uauagaagucuuc

SEQ ID NO: 1999263 - RNA, 14 nt, Human
uauagugcaauaua

SEQ ID NO: 1999264 - RNA, 15 nt, Human
uauagugcaauauau

SEQ ID NO: 1999265 - RNA, 22 nt, Human
uauaguauuugaaaacagaaau

SEQ ID NO: 1999266 - RNA, 20 nt, Human
uauagagucauuguaauguu

SEQ ID NO: 1999267 - RNA, 15 nt, Human
uauagagcagaaauu

SEQ ID NO: 1999268 - RNA, 17 nt, Human
uauagagcagaaauucu

SEQ ID NO: 1999269 - RNA, 18 nt, Human
uauagagcagaaauucug

SEQ ID NO: 1999270 - RNA, 19 nt, Human
uauagagcagaaauucugu

SEQ ID NO: 1999271 - RNA, 20 nt, Human
uauagagcagaaauucuguu

SEQ ID NO: 1999272 - RNA, 18 nt, Human
uauagagucauuguaaug

SEQ ID NO: 1999273 - RNA, 11 nt, Human
uauaguauuug

SEQ ID NO: 1999274 - RNA, 13 nt, Human
uauaguauuugaa

SEQ ID NO: 1999275 - RNA, 14 nt, Human
uauaguauuugaaa

SEQ ID NO: 1999276 - RNA, 15 nt, Human
uauaguauuugaaaa

SEQ ID NO: 1999277 - RNA, 17 nt, Human
uauaguauuugaaaaca

SEQ ID NO: 1999278 - RNA, 18 nt, Human
uauaguauuugaaaacag

SEQ ID NO: 1999279 - RNA, 20 nt, Human
uauaguauuugaaaacagaa

SEQ ID NO: 1999280 - RNA, 21 nt, Human
uauaucuuggcagguaggaau

SEQ ID NO: 1999281 - RNA, 20 nt, Human
uauauuuguaaauuuaugug

SEQ ID NO: 1999282 - RNA, 23 nt, Human
uauauuuggaugcagaguucagg

SEQ ID NO: 1999283 - RNA, 16 nt, Human
uauauuugauuuauua

SEQ ID NO: 1999284 - RNA, 17 nt, Human
uauauuugauuuauuaa

SEQ ID NO: 1999285 - RNA, 20 nt, Human
uauauuugauuuauuaacuu

SEQ ID NO: 1999286 - RNA, 22 nt, Human
uauauuugauuuauuaacuuaa

SEQ ID NO: 1999287 - RNA, 13 nt, Human
uauauuugauuua

SEQ ID NO: 1999288 - RNA, 14 nt, Human
uauaugaaaacuaa

SEQ ID NO: 1999289 - RNA, 19 nt, Human
uauaugaacauacaaaugc

SEQ ID NO: 1999290 - RNA, 18 nt, Human
uauauuuuauuuuuagaa

SEQ ID NO: 1999291 - RNA, 13 nt, Human
uauauuuguauua

SEQ ID NO: 1999292 - RNA, 22 nt, Human
uauauuuuauuuuuagaauuuu

SEQ ID NO: 1999293 - RNA, 17 nt, Human
uauauuuuguaugcaag

SEQ ID NO: 1999294 - RNA, 21 nt, Human
uauauuuuguaugcaagcagu

SEQ ID NO: 1999295 - RNA, 15 nt, Human
uauauuuuguaugca

SEQ ID NO: 1999296 - RNA, 16 nt, Human
uauauuuuguaugcaa

SEQ ID NO: 1999297 - RNA, 21 nt, Human
uauauuuuuuguuaaaugauu

SEQ ID NO: 1999298 - RNA, 16 nt, Human
uauauuuuuuucugaa

SEQ ID NO: 1999299 - RNA, 19 nt, Human
uauauuuuuuucugaaauu

SEQ ID NO: 1999300 - RNA, 20 nt, Human
uauauuuuuuucugaaauuu

SEQ ID NO: 1999301 - RNA, 19 nt, Human
uaucaaaaagauaucaaag

SEQ ID NO: 1999302 - RNA, 17 nt, Human
uaucaugacaaagacug

SEQ ID NO: 1999303 - RNA, 14 nt, Human
uaucaaaagaaaga

SEQ ID NO: 1999304 - RNA, 19 nt, Human
uaucaggugcugccaucca

SEQ ID NO: 1999305 - RNA, 20 nt, Human
uaucaaacuacuuuuuaaca

SEQ ID NO: 1999306 - RNA, 20 nt, Human
uaucaggugcugccauccag

SEQ ID NO: 1999307 - RNA, 18 nt, Human
uaucaguuuuauagcuuu

SEQ ID NO: 1999308 - RNA, 22 nt, Human
uaagugccaggauggaaugaug

SEQ ID NO: 1999309 - RNA, 14 nt, Human
uaagugcugcauuu

SEQ ID NO: 1999310 - RNA, 23 nt, Human
uaagugaggaugaaaaaauaaca

SEQ ID NO: 1999311 - RNA, 12 nt, Human
uaagugagagag

SEQ ID NO: 1999312 - RNA, 22 nt, Human
uaagugauugcugguuuuaguu

SEQ ID NO: 1999313 - RNA, 13 nt, Human
uaagugaaauuua

SEQ ID NO: 1999314 - RNA, 14 nt, Human
uaagugaaauuuau

SEQ ID NO: 1999315 - RNA, 19 nt, Human
uaagugaggaaaucaaagu

SEQ ID NO: 1999316 - RNA, 21 nt, Human
uaagugaggaaaucaaagugc

SEQ ID NO: 1999317 - RNA, 13 nt, Human
uaagugaaauaag

SEQ ID NO: 1999318 - RNA, 15 nt, Human
uaagugaaaauauag

SEQ ID NO: 1999319 - RNA, 20 nt, Human
uaagucuugccuauauuuuc

SEQ ID NO: 1999320 - RNA, 11 nt, Human
uaagugaaauu

SEQ ID NO: 1999321 - RNA, 12 nt, Human
uaagugaaauuu

SEQ ID NO: 1999322 - RNA, 17 nt, Human
uaagucuugccuauauu

SEQ ID NO: 1999323 - RNA, 15 nt, Human
uaaguccuacuuuua

SEQ ID NO: 1999324 - RNA, 20 nt, Human
uaaguccuacuuuuaaagaa

SEQ ID NO: 1999325 - RNA, 16 nt, Human
uaagucucaagguagg

SEQ ID NO: 1999326 - RNA, 14 nt, Human
uaagucucuuuuuu

SEQ ID NO: 1999327 - RNA, 17 nt, Human
uaagucucuuuuuuaca

SEQ ID NO: 1999328 - RNA, 18 nt, Human
uaagucucuuuuuuacaa

SEQ ID NO: 1999329 - RNA, 19 nt, Human
uaagucucuuuuuuacaaa

SEQ ID NO: 1999330 - RNA, 20 nt, Human
uaagucucuuuuuuacaaag

SEQ ID NO: 1999331 - RNA, 21 nt, Human
uaagucucuuuuuuacaaagg

SEQ ID NO: 1999332 - RNA, 15 nt, Human
uaagugcugcauuua

SEQ ID NO: 1999333 - RNA, 16 nt, Human
uaagugcugcauuuaa

SEQ ID NO: 1999334 - RNA, 18 nt, Human
uaagugcugcauuuaaaa

SEQ ID NO: 1999335 - RNA, 22 nt, Human
uaagugcugcauuuaaaagaua

SEQ ID NO: 1999336 - RNA, 18 nt, Human
uaagugguuuuaauaaaa

SEQ ID NO: 1999337 - RNA, 16 nt, Human
uaagugguguguguau

SEQ ID NO: 1999338 - RNA, 15 nt, Human
uaaguggugugugua

SEQ ID NO: 1999339 - RNA, 12 nt, Human
uaauaaauaguu

SEQ ID NO: 1999340 - RNA, 15 nt, Human
uaauaaauaguucuu

SEQ ID NO: 1999341 - RNA, 12 nt, Human
uaauaaagcugu

SEQ ID NO: 1999342 - RNA, 23 nt, Human
uaauaagcuaguugaauacuuga

SEQ ID NO: 1999343 - RNA, 12 nt, Human
uaauaagcuagu

SEQ ID NO: 1999344 - RNA, 16 nt, Human
uaauaagcuaguugaa

SEQ ID NO: 1999345 - RNA, 17 nt, Human
uaauaagcuaguugaau

SEQ ID NO: 1999346 - RNA, 20 nt, Human
uaauaagcuaguugaauacu

SEQ ID NO: 1999347 - RNA, 21 nt, Human
uaauaagcuaguugaauacuu

SEQ ID NO: 1999348 - RNA, 18 nt, Human
uaagccucaaauuugaac

SEQ ID NO: 1999349 - RNA, 19 nt, Human
uaagccucaaauuugaaca

SEQ ID NO: 1999350 - RNA, 17 nt, Human
uaagccaugagaauguu

SEQ ID NO: 1999351 - RNA, 20 nt, Human
uaagcggcucaagcccagga

SEQ ID NO: 1999352 - RNA, 15 nt, Human
uaagcguauggcuuu

SEQ ID NO: 1999353 - RNA, 16 nt, Human
uaagcguauggcuuua

SEQ ID NO: 1999354 - RNA, 22 nt, Human
uaagcguauggcuuuauuuuuu

SEQ ID NO: 1999355 - RNA, 19 nt, Human
uaagccauucugacucaua

SEQ ID NO: 1999356 - RNA, 20 nt, Human
uaagccauucugacucauau

SEQ ID NO: 1999357 - RNA, 12 nt, Human
uaagaggcaggg

SEQ ID NO: 1999358 - RNA, 15 nt, Human
uaagaggcagggucu

SEQ ID NO: 1999359 - RNA, 15 nt, Human
uaagggaaaaaucaa

SEQ ID NO: 1999360 - RNA, 20 nt, Human
uaagggaaaaaucaaguauu

SEQ ID NO: 1999361 - RNA, 17 nt, Human
uaagggaacaaguugag

SEQ ID NO: 1999362 - RNA, 23 nt, Human
uaagggaacaaguugagcuauga

SEQ ID NO: 1999363 - RNA, 14 nt, Human
uaaggcaaucaugg

SEQ ID NO: 1999364 - RNA, 16 nt, Human
uaaggauguucuagca

SEQ ID NO: 1999365 - RNA, 13 nt, Human
uaagcuaggaaaa

SEQ ID NO: 1999366 - RNA, 17 nt, Human
uaagcuaggaaaagaaa

SEQ ID NO: 1999367 - RNA, 20 nt, Human
uaagcuaggaaaagaaaucu

SEQ ID NO: 1999368 - RNA, 22 nt, Human
uaagcuaggaaaagaaaucuau

SEQ ID NO: 1999369 - RNA, 16 nt, Human
uaagcuaguugaauac

SEQ ID NO: 1999370 - RNA, 18 nt, Human
uaagcuaguugaauacuu

SEQ ID NO: 1999371 - RNA, 19 nt, Human
uaagcuaguugaauacuug

SEQ ID NO: 1999372 - RNA, 20 nt, Human
uaagcuaguugaauacuuga

SEQ ID NO: 1999373 - RNA, 14 nt, Human
uaagcuauucagua

SEQ ID NO: 1999374 - RNA, 21 nt, Human
uaagcuaguugaauacuugaa

SEQ ID NO: 1999375 - RNA, 22 nt, Human
uaagcuaguugaauacuugaac

SEQ ID NO: 1999376 - RNA, 22 nt, Human
uaagggacugauguuugugcag

SEQ ID NO: 1999377 - RNA, 18 nt, Human
uaaggggaauuaacaauu

SEQ ID NO: 1999378 - RNA, 22 nt, Human
uaaggggaauuaacaauugcca

SEQ ID NO: 1999379 - RNA, 15 nt, Human
uaagggacugauguu

SEQ ID NO: 1999380 - RNA, 16 nt, Human
uaagggacugauguuu

SEQ ID NO: 1999381 - RNA, 17 nt, Human
uaagggacugauguuug

SEQ ID NO: 1999382 - RNA, 18 nt, Human
uaagggacugauguuugu

SEQ ID NO: 1999383 - RNA, 13 nt, Human
uaaggucuguuug

SEQ ID NO: 1999384 - RNA, 20 nt, Human
uaagguauaucauucuaaag

SEQ ID NO: 1999385 - RNA, 21 nt, Human
uaagguauaucauucuaaaga

SEQ ID NO: 1999386 - RNA, 22 nt, Human
uaagguauaucauucuaaagau

SEQ ID NO: 1999387 - RNA, 17 nt, Human
uaaggucagcucagagc

SEQ ID NO: 1999388 - RNA, 17 nt, Human
uaaggguaucuggugac

SEQ ID NO: 1999389 - RNA, 24 nt, Human
uaagggucauauguuugcuuguau

SEQ ID NO: 1999390 - RNA, 18 nt, Human
uaaggucuguuugcuguu

SEQ ID NO: 1999391 - RNA, 19 nt, Human
uaaggucuguuugcuguug

SEQ ID NO: 1999392 - RNA, 22 nt, Human
uaaggucuguuugcuguugcug

SEQ ID NO: 1999393 - RNA, 20 nt, Human
uaagguggguacgggagggu

SEQ ID NO: 1999394 - RNA, 15 nt, Human
uaaggugugcucuga

SEQ ID NO: 1999395 - RNA, 12 nt, Human
uaagguguuuga

SEQ ID NO: 1999396 - RNA, 20 nt, Human
uaaguauuuuccuguuguca

SEQ ID NO: 1999397 - RNA, 21 nt, Human
uaaguauuuuccuguugucaa

SEQ ID NO: 1999398 - RNA, 13 nt, Human
uaaguauuuggaa

SEQ ID NO: 1999399 - RNA, 15 nt, Human
uaagguguuugaaaa

SEQ ID NO: 1999400 - RNA, 16 nt, Human
uaagguguuugaaaau

SEQ ID NO: 1999401 - RNA, 17 nt, Human
uaagguguuugaaaaua

SEQ ID NO: 1999402 - RNA, 18 nt, Human
uaagguguuugaaaauag

SEQ ID NO: 1999403 - RNA, 20 nt, Human
uaagguguuugaaaauaguu

SEQ ID NO: 1999404 - RNA, 21 nt, Human
uaagguguuugaaaauaguuu

SEQ ID NO: 1999405 - RNA, 14 nt, Human
uaaguauuuggaau

SEQ ID NO: 1999406 - RNA, 23 nt, Human
uaagucagaaacuaaaacaaaua

SEQ ID NO: 1999407 - RNA, 20 nt, Human
uaauccucuaggaggucucu

SEQ ID NO: 1999408 - RNA, 12 nt, Human
uaaucuaaaugg

SEQ ID NO: 1999409 - RNA, 13 nt, Human
uaaucuaaaugga

SEQ ID NO: 1999410 - RNA, 20 nt, Human
uaauauuaaggaagacaaug

SEQ ID NO: 1999411 - RNA, 17 nt, Human
uaaucuggacuccucug

SEQ ID NO: 1999412 - RNA, 18 nt, Human
uaaucuggacuccucugu

SEQ ID NO: 1999413 - RNA, 15 nt, Human
uaaucuggacuccuc

SEQ ID NO: 1999414 - RNA, 14 nt, Human
uaaucuacugcauu

SEQ ID NO: 1999415 - RNA, 16 nt, Human
uaaucuacugcauuua

SEQ ID NO: 1999416 - RNA, 19 nt, Human
uaaucuggacuccucuguc

SEQ ID NO: 1999417 - RNA, 20 nt, Human
uaaucuggacuccucugucc

SEQ ID NO: 1999418 - RNA, 21 nt, Human
uaaucuggacuccucugucca

SEQ ID NO: 1999419 - RNA, 22 nt, Human
uaaucuggacuccucuguccag

SEQ ID NO: 1999420 - RNA, 18 nt, Human
uaaucugggccagaauuu

SEQ ID NO: 1999421 - RNA, 23 nt, Human
uaaucugggccagaauuucaaac

SEQ ID NO: 1999422 - RNA, 19 nt, Human
uaauaaucaagagccuuaa

SEQ ID NO: 1999423 - RNA, 20 nt, Human
uaauaaucaagagccuuaaa

SEQ ID NO: 1999424 - RNA, 22 nt, Human
uaauaaucaagagccuuaaaac

SEQ ID NO: 1999425 - RNA, 16 nt, Human
uaauaauccugcaaag

SEQ ID NO: 1999426 - RNA, 23 nt, Human
uaauaaucauuggauucugagag

SEQ ID NO: 1999427 - RNA, 12 nt, Human
uaauaaucaaga

SEQ ID NO: 1999428 - RNA, 14 nt, Human
uaauaaucaagagc

SEQ ID NO: 1999429 - RNA, 16 nt, Human
uaauaucuucauuucu

SEQ ID NO: 1999430 - RNA, 14 nt, Human
uaauaugaaauuuu

SEQ ID NO: 1999431 - RNA, 15 nt, Human
uaauaugcacacauu

SEQ ID NO: 1999432 - RNA, 16 nt, Human
uaauaugcacacauuu

SEQ ID NO: 1999433 - RNA, 17 nt, Human
uaauaugcacacauuuu

SEQ ID NO: 1999434 - RNA, 18 nt, Human
uaauaugcacacauuuuu

SEQ ID NO: 1999435 - RNA, 19 nt, Human
uaauaugcacacauuuuuu

SEQ ID NO: 1999436 - RNA, 15 nt, Human
uaaugcgugcauacc

SEQ ID NO: 1999437 - RNA, 19 nt, Human
uaaugcgugcauaccacuu

SEQ ID NO: 1999438 - RNA, 22 nt, Human
uaaugcgugcauaccacuuuug

SEQ ID NO: 1999439 - RNA, 23 nt, Human
uaaugcgugcauaccacuuuugu

SEQ ID NO: 1999440 - RNA, 17 nt, Human
uaaugcuaaucuuguga

SEQ ID NO: 1999441 - RNA, 22 nt, Human
uaaugcuaaucuugugaaaaua

SEQ ID NO: 1999442 - RNA, 11 nt, Human
uaaugcuuugg

SEQ ID NO: 1999443 - RNA, 16 nt, Human
uaaugcuuugguucug

SEQ ID NO: 1999444 - RNA, 15 nt, Human
uaauggggcggugag

SEQ ID NO: 1999445 - RNA, 13 nt, Human
uaauggaugaaau

SEQ ID NO: 1999446 - RNA, 15 nt, Human
uaauggaugaaauca

SEQ ID NO: 1999447 - RNA, 16 nt, Human
uaauggaugaaaucau

SEQ ID NO: 1999448 - RNA, 17 nt, Human
uaauggaugaaaucaua

SEQ ID NO: 1999449 - RNA, 20 nt, Human
uaauuaaguacuauguauca

SEQ ID NO: 1999450 - RNA, 17 nt, Human
uaauuaaguacuaugua

SEQ ID NO: 1999451 - RNA, 14 nt, Human
uaauuaaguacuau

SEQ ID NO: 1999452 - RNA, 16 nt, Human
uaaugguaguuuuaca

SEQ ID NO: 1999453 - RNA, 13 nt, Human
uaauguugaacaa

SEQ ID NO: 1999454 - RNA, 16 nt, Human
uaauguugaacaaaau

SEQ ID NO: 1999455 - RNA, 17 nt, Human
uaauguugaacaaaaua

SEQ ID NO: 1999456 - RNA, 18 nt, Human
uaauguugugaauaauua

SEQ ID NO: 1999457 - RNA, 19 nt, Human
uaauguugugaauaauuac

SEQ ID NO: 1999458 - RNA, 21 nt, Human
uaauguugugaauaauuacag

SEQ ID NO: 1999459 - RNA, 23 nt, Human
uaauguugugaauaauuacagug

SEQ ID NO: 1999460 - RNA, 13 nt, Human
uaauguugugaau

SEQ ID NO: 1999461 - RNA, 14 nt, Human
uaauguugugaaua

SEQ ID NO: 1999462 - RNA, 16 nt, Human
uaauguugugaauaau

SEQ ID NO: 1999463 - RNA, 17 nt, Human
uaauguugauuucuagu

SEQ ID NO: 1999464 - RNA, 18 nt, Human
uaauguugauuucuaguu

SEQ ID NO: 1999465 - RNA, 18 nt, Human
uaauguugaacaaaauaa

SEQ ID NO: 1999466 - RNA, 22 nt, Human
uaauguugaacaaaauaaauug

SEQ ID NO: 1999467 - RNA, 13 nt, Human
uaauguugauuuc

SEQ ID NO: 1999468 - RNA, 14 nt, Human
uaauguugauuucu

SEQ ID NO: 1999469 - RNA, 24 nt, Human
uaagaaagacuaucuaaauguuga

SEQ ID NO: 1999470 - RNA, 21 nt, Human
uaagaaacauuggaagcaggu

SEQ ID NO: 1999471 - RNA, 12 nt, Human
uaagaaacauug

SEQ ID NO: 1999472 - RNA, 13 nt, Human
uaagaaacauugg

SEQ ID NO: 1999473 - RNA, 15 nt, Human
uaagaaacauuggaa

SEQ ID NO: 1999474 - RNA, 16 nt, Human
uaagaaacauuggaag

SEQ ID NO: 1999475 - RNA, 19 nt, Human
uaagaggaaaguacauuuu

SEQ ID NO: 1999476 - RNA, 21 nt, Human
uaagagcuuccaauuuuccuu

SEQ ID NO: 1999477 - RNA, 15 nt, Human
uaagaggaaaguaca

SEQ ID NO: 1999478 - RNA, 18 nt, Human
uaagaggaaaguacauuu

SEQ ID NO: 1999479 - RNA, 15 nt, Human
uaagaacaccugcau

SEQ ID NO: 1999480 - RNA, 19 nt, Human
uaagaaccuuuugagugcc

SEQ ID NO: 1999481 - RNA, 17 nt, Human
uaagaacaaaagaagca

SEQ ID NO: 1999482 - RNA, 18 nt, Human
uaagaacaaaagcgaccc

SEQ ID NO: 1999483 - RNA, 16 nt, Human
uaagaaaaaggaugca

SEQ ID NO: 1999484 - RNA, 18 nt, Human
uaagaaaaaggaugcaca

SEQ ID NO: 1999485 - RNA, 19 nt, Human
uaagaaaaaggaugcacag

SEQ ID NO: 1999486 - RNA, 23 nt, Human
uaagaaaaaggaugcacagaguu

SEQ ID NO: 1999487 - RNA, 19 nt, Human
uaagaaaaagcaaaaggca

SEQ ID NO: 1999488 - RNA, 16 nt, Human
uaagaaaagauguaga

SEQ ID NO: 1999489 - RNA, 14 nt, Human
uaacuguuaccauu

SEQ ID NO: 1999490 - RNA, 15 nt, Human
uaacuguuaccauug

SEQ ID NO: 1999491 - RNA, 18 nt, Human
uaacuguuaccauuggaa

SEQ ID NO: 1999492 - RNA, 19 nt, Human
uaacuguuaccauuggaaa

SEQ ID NO: 1999493 - RNA, 18 nt, Human
uaacugugccaguucuuu

SEQ ID NO: 1999494 - RNA, 13 nt, Human
uaacugugguguu

SEQ ID NO: 1999495 - RNA, 11 nt, Human
uaacuguuacc

SEQ ID NO: 1999496 - RNA, 13 nt, Human
uaacuguuaccau

SEQ ID NO: 1999497 - RNA, 23 nt, Human
uaacugcucuugggcaauauucu

SEQ ID NO: 1999498 - RNA, 13 nt, Human
uaacccagaaaau

SEQ ID NO: 1999499 - RNA, 16 nt, Human
uaaccagacacaaacu

SEQ ID NO: 1999500 - RNA, 23 nt, Human
uaaccaguguuguggauuuaaca

SEQ ID NO: 1999501 - RNA, 16 nt, Human
uaaccacuucagcuga

SEQ ID NO: 1999502 - RNA, 13 nt, Human
uaaccagaucauu

SEQ ID NO: 1999503 - RNA, 15 nt, Human
uaacauucuauuuca

SEQ ID NO: 1999504 - RNA, 19 nt, Human
uaacauucuauuucaacuu

SEQ ID NO: 1999505 - RNA, 11 nt, Human
uaacagaaaug

SEQ ID NO: 1999506 - RNA, 15 nt, Human
uaacacugugaagag

SEQ ID NO: 1999507 - RNA, 16 nt, Human
uaacacugugaagagc

SEQ ID NO: 1999508 - RNA, 21 nt, Human
uaacuccuaguagggguacca

SEQ ID NO: 1999509 - RNA, 16 nt, Human
uaacuauguugauaaa

SEQ ID NO: 1999510 - RNA, 15 nt, Human
uaacuauguuuaaag

SEQ ID NO: 1999511 - RNA, 16 nt, Human
uaacccagaaaaucug

SEQ ID NO: 1999512 - RNA, 16 nt, Human
uaacugaaauaaaaaa

SEQ ID NO: 1999513 - RNA, 11 nt, Human
uaacugcucuu

SEQ ID NO: 1999514 - RNA, 12 nt, Human
uaacugcucuug

SEQ ID NO: 1999515 - RNA, 15 nt, Human
uaacugcucuugggc

SEQ ID NO: 1999516 - RNA, 16 nt, Human
uaacugcucuugggca

SEQ ID NO: 1999517 - RNA, 19 nt, Human
uaacugcucuugggcaaua

SEQ ID NO: 1999518 - RNA, 17 nt, Human
uaaaugcccagccccuu

SEQ ID NO: 1999519 - RNA, 16 nt, Human
uaaaugcccagccccu

SEQ ID NO: 1999520 - RNA, 15 nt, Human
uaaaugcccagcccc

SEQ ID NO: 1999521 - RNA, 14 nt, Human
uaaaugcccagccc

SEQ ID NO: 1999522 - RNA, 16 nt, Human
uaaauggaaccacucu

SEQ ID NO: 1999523 - RNA, 13 nt, Human
uaaaugcccagcc

SEQ ID NO: 1999524 - RNA, 13 nt, Human
uaaaguuguacuu

SEQ ID NO: 1999525 - RNA, 16 nt, Human
uaaaguuguacuuuaa

SEQ ID NO: 1999526 - RNA, 22 nt, Human
uaaaguuguacuuuaaaaauuu

SEQ ID NO: 1999527 - RNA, 12 nt, Human
uaaaguuucaaa

SEQ ID NO: 1999528 - RNA, 13 nt, Human
uaaaguuucaaaa

SEQ ID NO: 1999529 - RNA, 17 nt, Human
uaaaguuucaaaaaucu

SEQ ID NO: 1999530 - RNA, 18 nt, Human
uaaaguuucaaaaaucug

SEQ ID NO: 1999531 - RNA, 19 nt, Human
uaaaguuucaaaaaucuga

SEQ ID NO: 1999532 - RNA, 20 nt, Human
uaaaguuucaaaaaucugaa

SEQ ID NO: 1999533 - RNA, 16 nt, Human
uaaaguugguaaaccu

SEQ ID NO: 1999534 - RNA, 17 nt, Human
uaaaguugguaaaccuu

SEQ ID NO: 1999535 - RNA, 12 nt, Human
uaaaguuguacu

SEQ ID NO: 1999536 - RNA, 18 nt, Human
uaaaugggggugcauuug

SEQ ID NO: 1999537 - RNA, 19 nt, Human
uaaaugggggugcauuuga

SEQ ID NO: 1999538 - RNA, 14 nt, Human
uaaaugggggugca

SEQ ID NO: 1999539 - RNA, 17 nt, Human
uaaaugggggugcauuu

SEQ ID NO: 1999540 - RNA, 18 nt, Human
uaaauguaguucauacuu

SEQ ID NO: 1999541 - RNA, 17 nt, Human
uaaaugucaaaugugaa

SEQ ID NO: 1999542 - RNA, 20 nt, Human
uaaaugucuaguuguaacac

SEQ ID NO: 1999543 - RNA, 22 nt, Human
uaaaugucucuuuaaugucaca

SEQ ID NO: 1999544 - RNA, 17 nt, Human
uaaauucuugcaaagua

SEQ ID NO: 1999545 - RNA, 18 nt, Human
uaaauucuugcaaaguau

SEQ ID NO: 1999546 - RNA, 22 nt, Human
uaaauucuugcaaaguaucccu

SEQ ID NO: 1999547 - RNA, 11 nt, Human
uaaauucugau

SEQ ID NO: 1999548 - RNA, 12 nt, Human
uaaauucugauu

SEQ ID NO: 1999549 - RNA, 13 nt, Human
uaaauucugauuu

SEQ ID NO: 1999550 - RNA, 14 nt, Human
uaaauucugauuuc

SEQ ID NO: 1999551 - RNA, 15 nt, Human
uaaauucugauuucu

SEQ ID NO: 1999552 - RNA, 16 nt, Human
uaaauucugauuucuu

SEQ ID NO: 1999553 - RNA, 20 nt, Human
uaaauucugauuucuuuuca

SEQ ID NO: 1999554 - RNA, 16 nt, Human
uaaauucuugcaaagu

SEQ ID NO: 1999555 - RNA, 15 nt, Human
uaaauucaaaccuaa

SEQ ID NO: 1999556 - RNA, 11 nt, Human
uaaauuauuuu

SEQ ID NO: 1999557 - RNA, 22 nt, Human
uaaaugugaauuacuaacuucu

SEQ ID NO: 1999558 - RNA, 11 nt, Human
uaaaugugaau

SEQ ID NO: 1999559 - RNA, 13 nt, Human
uaaaugugaauua

SEQ ID NO: 1999560 - RNA, 15 nt, Human
uaaaugugaauuacu

SEQ ID NO: 1999561 - RNA, 14 nt, Human
uaaauuuauuuacu

SEQ ID NO: 1999562 - RNA, 15 nt, Human
uaaauuuauuuacug

SEQ ID NO: 1999563 - RNA, 18 nt, Human
uaaauuuauuuacugcua

SEQ ID NO: 1999564 - RNA, 13 nt, Human
uaaauucuuucau

SEQ ID NO: 1999565 - RNA, 20 nt, Human
uaaauugacacuuaaaaaug

SEQ ID NO: 1999566 - RNA, 13 nt, Human
uaaauuuauguga

SEQ ID NO: 1999567 - RNA, 22 nt, Human
uaaauuuaguauuuuguuucag

SEQ ID NO: 1999568 - RNA, 23 nt, Human
uaaauugacacuuaaaaaugguu

SEQ ID NO: 1999569 - RNA, 18 nt, Human
uaacaccaugauuaacca

SEQ ID NO: 1999570 - RNA, 14 nt, Human
uaacacuacucaaa

SEQ ID NO: 1999571 - RNA, 19 nt, Human
uaacacuacucaaagcaaa

SEQ ID NO: 1999572 - RNA, 16 nt, Human
uaaaccaaaaacugaa

SEQ ID NO: 1999573 - RNA, 17 nt, Human
uaaacugucgugucaua

SEQ ID NO: 1999574 - RNA, 22 nt, Human
uaaacuugguuuuuaaaaaacu

SEQ ID NO: 1999575 - RNA, 14 nt, Human
uaaagaaaaauauu

SEQ ID NO: 1999576 - RNA, 15 nt, Human
uaaagaaaaauauuu

SEQ ID NO: 1999577 - RNA, 17 nt, Human
uaaagaaaaauauuuaa

SEQ ID NO: 1999578 - RNA, 20 nt, Human
uaaagaaaaauauuuaaugu

SEQ ID NO: 1999579 - RNA, 22 nt, Human
uaaagaaaaaaaugucaaaagu

SEQ ID NO: 1999580 - RNA, 14 nt, Human
uaaagaaaaaaaug

SEQ ID NO: 1999581 - RNA, 16 nt, Human
uaaagaaaaaaauguc

SEQ ID NO: 1999582 - RNA, 17 nt, Human
uaaagaaaaaaauguca

SEQ ID NO: 1999583 - RNA, 20 nt, Human
uaaagaaaaaaaugucaaaa

SEQ ID NO: 1999584 - RNA, 21 nt, Human
uaaacaagaccacguuucuaa

SEQ ID NO: 1999585 - RNA, 22 nt, Human
uaaacaagaccacguuucuaaa

SEQ ID NO: 1999586 - RNA, 20 nt, Human
uaaacaagaccacguuucua

SEQ ID NO: 1999587 - RNA, 19 nt, Human
uaaacaagaccacguuucu

SEQ ID NO: 1999588 - RNA, 16 nt, Human
uaaaaucuugaaaaug

SEQ ID NO: 1999589 - RNA, 23 nt, Human
uaaaaucuuauuaaaguuucaaa

SEQ ID NO: 1999590 - RNA, 14 nt, Human
uaaaaucuuauuaa

SEQ ID NO: 1999591 - RNA, 15 nt, Human
uaaaaucuuauuaaa

SEQ ID NO: 1999592 - RNA, 17 nt, Human
uaaaaucuuauuaaagu

SEQ ID NO: 1999593 - RNA, 18 nt, Human
uaaaaucuuauuaaaguu

SEQ ID NO: 1999594 - RNA, 19 nt, Human
uaaaaucuuauuaaaguuu

SEQ ID NO: 1999595 - RNA, 21 nt, Human
uaaaaucuuauuaaaguuuca

SEQ ID NO: 1999596 - RNA, 22 nt, Human
uaaaaucuuauuaaaguuucaa

SEQ ID NO: 1999597 - RNA, 21 nt, Human
uaaaaucauaaguauuuggaa

SEQ ID NO: 1999598 - RNA, 17 nt, Human
uaaacacucuugaaaaa

SEQ ID NO: 1999599 - RNA, 15 nt, Human
uaaacacucuugaaa

SEQ ID NO: 1999600 - RNA, 21 nt, Human
uaaacaucagguuaggcagua

SEQ ID NO: 1999601 - RNA, 19 nt, Human
uaaacaucagguuaggcag

SEQ ID NO: 1999602 - RNA, 20 nt, Human
uaaacaucagguuaggcagu

SEQ ID NO: 1999603 - RNA, 18 nt, Human
uaaacacucuugaaaaau

SEQ ID NO: 1999604 - RNA, 16 nt, Human
uaaacaucagguuagg

SEQ ID NO: 1999605 - RNA, 17 nt, Human
uaaacaucagguuaggc

SEQ ID NO: 1999606 - RNA, 17 nt, Human
uaaaggcuaccuuugua

SEQ ID NO: 1999607 - RNA, 20 nt, Human
uaaaggccucugccucacaa

SEQ ID NO: 1999608 - RNA, 23 nt, Human
uaaaggccucugccucacaacau

SEQ ID NO: 1999609 - RNA, 14 nt, Human
uaaaguguuugaaa

SEQ ID NO: 1999610 - RNA, 21 nt, Human
uaaaggcccuaucuguuuaca

SEQ ID NO: 1999611 - RNA, 15 nt, Human
uaaaggccucugccu

SEQ ID NO: 1999612 - RNA, 15 nt, Human
uaaaggcuaccuuug

SEQ ID NO: 1999613 - RNA, 23 nt, Human
uaaaggaaucuagccagugaaca

SEQ ID NO: 1999614 - RNA, 15 nt, Human
uaaaggcagcuguug

SEQ ID NO: 1999615 - RNA, 20 nt, Human
uaaaggcagcuguugucucu

SEQ ID NO: 1999616 - RNA, 21 nt, Human
uaaaggcagcuguugucucuu

SEQ ID NO: 1999617 - RNA, 20 nt, Human
uaaagccugaguuugcuuuc

SEQ ID NO: 1999618 - RNA, 14 nt, Human
uaaagcugaaaacu

SEQ ID NO: 1999619 - RNA, 12 nt, Human
uaaagaaaacug

SEQ ID NO: 1999620 - RNA, 21 nt, Human
uaaagaaaaauauuuaauguu

SEQ ID NO: 1999621 - RNA, 22 nt, Human
uaaagaaaaauauuuaauguug

SEQ ID NO: 1999622 - RNA, 14 nt, Human
uaaagaaacauggu

SEQ ID NO: 1999623 - RNA, 19 nt, Human
uaaagcaagcucacuugcu

SEQ ID NO: 1999624 - RNA, 21 nt, Human
uaaagcaagcucacuugcuuu

SEQ ID NO: 1999625 - RNA, 16 nt, Human
uaaagcagcguuucua

SEQ ID NO: 1999626 - RNA, 17 nt, Human
uaaagcagcguuucuau

SEQ ID NO: 1999627 - RNA, 19 nt, Human
uaaagcagcguuucuauga

SEQ ID NO: 1999628 - RNA, 18 nt, Human
uaaagcaggcagaacuca

SEQ ID NO: 1999629 - RNA, 11 nt, Human
uaaagccucaa

SEQ ID NO: 1999630 - RNA, 17 nt, Human
uaaaaacaaagaaauua

SEQ ID NO: 1999631 - RNA, 21 nt, Human
uaaaaacaaagaaauuaugug

SEQ ID NO: 1999632 - RNA, 19 nt, Human
guuuuguuuccuuucacug

SEQ ID NO: 1999633 - RNA, 21 nt, Human
guuuuuaaggguuuguggaaa

SEQ ID NO: 1999634 - RNA, 17 nt, Human
guuuuuaaguuugcacu

SEQ ID NO: 1999635 - RNA, 18 nt, Human
uaaaaaugguuuaaaugg

SEQ ID NO: 1999636 - RNA, 19 nt, Human
uaaaaaugguuuaaauggu

SEQ ID NO: 1999637 - RNA, 12 nt, Human
uaaaaagcccaa

SEQ ID NO: 1999638 - RNA, 16 nt, Human
uaaaaagcccaaccuc

SEQ ID NO: 1999639 - RNA, 20 nt, Human
uaaaaagcccaaccucuucc

SEQ ID NO: 1999640 - RNA, 20 nt, Human
uaaaaacagauuuggaaaga

SEQ ID NO: 1999641 - RNA, 22 nt, Human
uaaaaacagauuuggaaagacu

SEQ ID NO: 1999642 - RNA, 22 nt, Human
uaaaaagauaaaaaaacagcuu

SEQ ID NO: 1999643 - RNA, 15 nt, Human
uaaaacaacacucac

SEQ ID NO: 1999644 - RNA, 22 nt, Human
uaaaacaagcacuaaacaaaga

SEQ ID NO: 1999645 - RNA, 15 nt, Human
uaaaaauuuacuaca

SEQ ID NO: 1999646 - RNA, 19 nt, Human
uaaaaauuuacuacaauau

SEQ ID NO: 1999647 - RNA, 18 nt, Human
uaaaaauuagccuaagau

SEQ ID NO: 1999648 - RNA, 14 nt, Human
uaaaaauuccagaa

SEQ ID NO: 1999649 - RNA, 16 nt, Human
uaaaaauuccagaaug

SEQ ID NO: 1999650 - RNA, 19 nt, Human
uaaaaauuccagaaugaag

SEQ ID NO: 1999651 - RNA, 19 nt, Human
uaaaacagaguaaucuugu

SEQ ID NO: 1999652 - RNA, 17 nt, Human
uaaaacagaguaaucuu

SEQ ID NO: 1999653 - RNA, 19 nt, Human
uaaaacacuucauugaaaa

SEQ ID NO: 1999654 - RNA, 19 nt, Human
uaaaacacuuccauaaucu

SEQ ID NO: 1999655 - RNA, 23 nt, Human
uaaaacacaacaucuuuuucuac

SEQ ID NO: 1999656 - RNA, 22 nt, Human
uaaaacacaacaucuuuuucua

SEQ ID NO: 1999657 - RNA, 17 nt, Human
uaaaacacaacaucuuu

SEQ ID NO: 1999658 - RNA, 12 nt, Human
uaaaaggugacc

SEQ ID NO: 1999659 - RNA, 19 nt, Human
uaaaaggugaccaaugaug

SEQ ID NO: 1999660 - RNA, 16 nt, Human
uaaaaucauaaguauu

SEQ ID NO: 1999661 - RNA, 11 nt, Human
uaaaagcacac

SEQ ID NO: 1999662 - RNA, 19 nt, Human
uaaaagcacaaaggaauga

SEQ ID NO: 1999663 - RNA, 18 nt, Human
uaaaagcagcauaaagaa

SEQ ID NO: 1999664 - RNA, 21 nt, Human
uaaaagcagcauaaagaauuu

SEQ ID NO: 1999665 - RNA, 12 nt, Human
uaaaaggagcca

SEQ ID NO: 1999666 - RNA, 21 nt, Human
uaaaagguaugcaaucaaauc

SEQ ID NO: 1999667 - RNA, 15 nt, Human
uaaaacaucauuccu

SEQ ID NO: 1999668 - RNA, 12 nt, Human
uaaaacauuaaa

SEQ ID NO: 1999669 - RNA, 16 nt, Human
uaaaacaucauuccuu

SEQ ID NO: 1999670 - RNA, 17 nt, Human
uaaaacaucauuccuuu

SEQ ID NO: 1999671 - RNA, 20 nt, Human
uaaaacaucauuccuuuuua

SEQ ID NO: 1999672 - RNA, 15 nt, Human
uaaaacauuaaaaua

SEQ ID NO: 1999673 - RNA, 16 nt, Human
uaaaacauuaaaauau

SEQ ID NO: 1999674 - RNA, 19 nt, Human
uaaaacauuaaaauauaau

SEQ ID NO: 1999675 - RNA, 17 nt, Human
uaaaagauaaauauuau

SEQ ID NO: 1999676 - RNA, 14 nt, Human
uaaaagauacaguu

SEQ ID NO: 1999677 - RNA, 17 nt, Human
uaaaagauacaguuacu

SEQ ID NO: 1999678 - RNA, 20 nt, Human
uaaaagauacaguuacucag

SEQ ID NO: 1999679 - RNA, 21 nt, Human
uaaaagauacaguuacucaga

SEQ ID NO: 1999680 - RNA, 15 nt, Human
guuucauccuuccca

SEQ ID NO: 1999681 - RNA, 17 nt, Human
guuucauccuucccacu

SEQ ID NO: 1999682 - RNA, 14 nt, Human
guuucauccuuccc

SEQ ID NO: 1999683 - RNA, 22 nt, Human
guuucauauucaugcaaguauu

SEQ ID NO: 1999684 - RNA, 17 nt, Human
guuuaucuagauguaaa

SEQ ID NO: 1999685 - RNA, 18 nt, Human
guuuaucuagauguaaau

SEQ ID NO: 1999686 - RNA, 22 nt, Human
guuuaucgcccuggcaggcagg

SEQ ID NO: 1999687 - RNA, 15 nt, Human
guuuaucuagaugua

SEQ ID NO: 1999688 - RNA, 21 nt, Human
guuuaucagaaagggcagaag

SEQ ID NO: 1999689 - RNA, 16 nt, Human
guuuaucccuuaagaa

SEQ ID NO: 1999690 - RNA, 17 nt, Human
guuuaucccuuaagaau

SEQ ID NO: 1999691 - RNA, 22 nt, Human
guuuaucccuuaagaaugaguu

SEQ ID NO: 1999692 - RNA, 15 nt, Human
guuuauaucuccuuu

SEQ ID NO: 1999693 - RNA, 19 nt, Human
guuuauaucuccuuuguau

SEQ ID NO: 1999694 - RNA, 19 nt, Human
guuuaggaacuacugagga

SEQ ID NO: 1999695 - RNA, 16 nt, Human
guuuagaauugaaggu

SEQ ID NO: 1999696 - RNA, 17 nt, Human
guuuauaguuaaucuau

SEQ ID NO: 1999697 - RNA, 18 nt, Human
guuuauaguuaaucuaua

SEQ ID NO: 1999698 - RNA, 14 nt, Human
guuguuacauuuuu

SEQ ID NO: 1999699 - RNA, 15 nt, Human
guuguuacauuuuua

SEQ ID NO: 1999700 - RNA, 20 nt, Human
guuguuugauucagacagcu

SEQ ID NO: 1999701 - RNA, 19 nt, Human
guuguucuuggcaauaaau

SEQ ID NO: 1999702 - RNA, 21 nt, Human
guuguucuuggcaauaaauuu

SEQ ID NO: 1999703 - RNA, 16 nt, Human
guuuagaagaagugug

SEQ ID NO: 1999704 - RNA, 15 nt, Human
guuuacucacagcca

SEQ ID NO: 1999705 - RNA, 15 nt, Human
guuuagaacagguuu

SEQ ID NO: 1999706 - RNA, 14 nt, Human
guuuagaauugaag

SEQ ID NO: 1999707 - RNA, 12 nt, Human
guuuagaacagg

SEQ ID NO: 1999708 - RNA, 14 nt, Human
guuuagauaauaca

SEQ ID NO: 1999709 - RNA, 15 nt, Human
guuuagauaauacac

SEQ ID NO: 1999710 - RNA, 22 nt, Human
guuguuugaugcauuaaaagaa

SEQ ID NO: 1999711 - RNA, 14 nt, Human
guugugaauaauua

SEQ ID NO: 1999712 - RNA, 14 nt, Human
guugucucuucucc

SEQ ID NO: 1999713 - RNA, 17 nt, Human
guugucucuucuccuua

SEQ ID NO: 1999714 - RNA, 13 nt, Human
guugugaauaauu

SEQ ID NO: 1999715 - RNA, 19 nt, Human
guugucugcaacucugaag

SEQ ID NO: 1999716 - RNA, 22 nt, Human
guugucugaagucacugcacag

SEQ ID NO: 1999717 - RNA, 19 nt, Human
guugucugaagucacugca

SEQ ID NO: 1999718 - RNA, 12 nt, Human
guugucucuucu

SEQ ID NO: 1999719 - RNA, 14 nt, Human
guugugguuaaucu

SEQ ID NO: 1999720 - RNA, 10 nt, Human
guugugugcc

SEQ ID NO: 1999721 - RNA, 21 nt, Human
guugugugccucuagcugaau

SEQ ID NO: 1999722 - RNA, 22 nt, Human
guuguggauuuaacagaaaugu

SEQ ID NO: 1999723 - RNA, 12 nt, Human
guuguguguggg

SEQ ID NO: 1999724 - RNA, 13 nt, Human
guuguguguggga

SEQ ID NO: 1999725 - RNA, 14 nt, Human
guugugugugggag

SEQ ID NO: 1999726 - RNA, 16 nt, Human
guugugugugggagug

SEQ ID NO: 1999727 - RNA, 22 nt, Human
guugugugugggaguguguaau

SEQ ID NO: 1999728 - RNA, 19 nt, Human
guuguccgguuuacuuuaa

SEQ ID NO: 1999729 - RNA, 12 nt, Human
guugucagcuga

SEQ ID NO: 1999730 - RNA, 22 nt, Human
guugucaagaauagcauuguaa

SEQ ID NO: 1999731 - RNA, 19 nt, Human
guuggcugggggccucagu

SEQ ID NO: 1999732 - RNA, 14 nt, Human
guugucaagaauag

SEQ ID NO: 1999733 - RNA, 18 nt, Human
guugucaagaauagcauu

SEQ ID NO: 1999734 - RNA, 20 nt, Human
guuggccccugcccggcugc

SEQ ID NO: 1999735 - RNA, 13 nt, Human
guuggccucugca

SEQ ID NO: 1999736 - RNA, 13 nt, Human
guuggccccugcc

SEQ ID NO: 1999737 - RNA, 14 nt, Human
guuggccccugccc

SEQ ID NO: 1999738 - RNA, 12 nt, Human
guuggcuggggg

SEQ ID NO: 1999739 - RNA, 20 nt, Human
guuuuccaugaguccccugu

SEQ ID NO: 1999740 - RNA, 19 nt, Human
guuuuccaugaguccccug

SEQ ID NO: 1999741 - RNA, 22 nt, Human
guuuucagcuaggaacaaaucu

SEQ ID NO: 1999742 - RNA, 20 nt, Human
guuuuccagguuuaagcugu

SEQ ID NO: 1999743 - RNA, 20 nt, Human
guuuucccuugaggaaacaa

SEQ ID NO: 1999744 - RNA, 16 nt, Human
guuuucccugaaguua

SEQ ID NO: 1999745 - RNA, 21 nt, Human
guuuuccgcauucuuuguaca

SEQ ID NO: 1999746 - RNA, 15 nt, Human
guuuucccugaaguu

SEQ ID NO: 1999747 - RNA, 13 nt, Human
guuuuccugaaga

SEQ ID NO: 1999748 - RNA, 10 nt, Human
guuuuguugc

SEQ ID NO: 1999749 - RNA, 18 nt, Human
guuuuguugcacugaagu

SEQ ID NO: 1999750 - RNA, 19 nt, Human
guuuuguugcacugaaguu

SEQ ID NO: 1999751 - RNA, 18 nt, Human
guuuuguaaacuuugaaa

SEQ ID NO: 1999752 - RNA, 21 nt, Human
guuuuguaaacuuugaaauau

SEQ ID NO: 1999753 - RNA, 16 nt, Human
guuuugguccacuuuu

SEQ ID NO: 1999754 - RNA, 21 nt, Human
guuuugguccacuuuuccagu

SEQ ID NO: 1999755 - RNA, 16 nt, Human
guuuuguaaacuuuga

SEQ ID NO: 1999756 - RNA, 16 nt, Human
guuuuaaaaugagaaa

SEQ ID NO: 1999757 - RNA, 15 nt, Human
guuuuaaaaugagaa

SEQ ID NO: 1999758 - RNA, 16 nt, Human
guuuuaaaagccuugg

SEQ ID NO: 1999759 - RNA, 14 nt, Human
guuuuaaaauacug

SEQ ID NO: 1999760 - RNA, 16 nt, Human
guuuuaaaauacugua

SEQ ID NO: 1999761 - RNA, 18 nt, Human
guuuuaaaauacuguaga

SEQ ID NO: 1999762 - RNA, 19 nt, Human
guuuuaaaauacuguagau

SEQ ID NO: 1999763 - RNA, 21 nt, Human
guuuuaaaauacuguagauaa

SEQ ID NO: 1999764 - RNA, 14 nt, Human
guuuguuuguuuca

SEQ ID NO: 1999765 - RNA, 23 nt, Human
guuuguuuuuuguuuuucugcuu

SEQ ID NO: 1999766 - RNA, 20 nt, Human
guuuguuucugaaagggacg

SEQ ID NO: 1999767 - RNA, 14 nt, Human
guuuguuccagaau

SEQ ID NO: 1999768 - RNA, 16 nt, Human
guuuguuucuuugaau

SEQ ID NO: 1999769 - RNA, 17 nt, Human
guuuucaaaauaaaaau

SEQ ID NO: 1999770 - RNA, 20 nt, Human
guuuucaaaauuguuacaaa

SEQ ID NO: 1999771 - RNA, 18 nt, Human
guuuucaaccucuagaau

SEQ ID NO: 1999772 - RNA, 19 nt, Human
guuuucaaccucuagaauu

SEQ ID NO: 1999773 - RNA, 23 nt, Human
guuuucaacucuucccugaacuu

SEQ ID NO: 1999774 - RNA, 17 nt, Human
guuuuaaaaugagaaau

SEQ ID NO: 1999775 - RNA, 13 nt, Human
guuuucaaaugga

SEQ ID NO: 1999776 - RNA, 14 nt, Human
guuuucaaauggag

SEQ ID NO: 1999777 - RNA, 16 nt, Human
guuuucaaauggaguu

SEQ ID NO: 1999778 - RNA, 11 nt, Human
guuuucacucu

SEQ ID NO: 1999779 - RNA, 12 nt, Human
guuuucacucuu

SEQ ID NO: 1999780 - RNA, 21 nt, Human
guuugauucagacagcugccu

SEQ ID NO: 1999781 - RNA, 20 nt, Human
guuugauucagacagcugcc

SEQ ID NO: 1999782 - RNA, 16 nt, Human
guuugauucagacagc

SEQ ID NO: 1999783 - RNA, 15 nt, Human
guuugguccuguagg

SEQ ID NO: 1999784 - RNA, 20 nt, Human
guuuguaaauuaacuuuuau

SEQ ID NO: 1999785 - RNA, 18 nt, Human
guuuguuucugaaaggga

SEQ ID NO: 1999786 - RNA, 13 nt, Human
guuugguucaaau

SEQ ID NO: 1999787 - RNA, 22 nt, Human
guuugguucaaauguguuuugg

SEQ ID NO: 1999788 - RNA, 15 nt, Human
guuuguaacaagaaa

SEQ ID NO: 1999789 - RNA, 14 nt, Human
guuuguauguauaa

SEQ ID NO: 1999790 - RNA, 16 nt, Human
guuuguauguauaauu

SEQ ID NO: 1999791 - RNA, 18 nt, Human
guuugagaucagccuggg

SEQ ID NO: 1999792 - RNA, 23 nt, Human
guuugauuaaauucuugcaaagu

SEQ ID NO: 1999793 - RNA, 17 nt, Human
guuugagaucagccugg

SEQ ID NO: 1999794 - RNA, 19 nt, Human
guuucuuuguaaugaaaac

SEQ ID NO: 1999795 - RNA, 13 nt, Human
guuucuuuuugaa

SEQ ID NO: 1999796 - RNA, 16 nt, Human
guuucuuuuugaaucu

SEQ ID NO: 1999797 - RNA, 13 nt, Human
guuugaaaauagu

SEQ ID NO: 1999798 - RNA, 16 nt, Human
guuugaaaauaguuua

SEQ ID NO: 1999799 - RNA, 18 nt, Human
guuucuuuguaaugaaaa

SEQ ID NO: 1999800 - RNA, 11 nt, Human
guuucuuagac

SEQ ID NO: 1999801 - RNA, 22 nt, Human
guuuccuaaaauaucugggugg

SEQ ID NO: 1999802 - RNA, 23 nt, Human
guugccagucaccccggccaccu

SEQ ID NO: 1999803 - RNA, 18 nt, Human
guugccagucaccccggc

SEQ ID NO: 1999804 - RNA, 17 nt, Human
guugccagucaccccgg

SEQ ID NO: 1999805 - RNA, 16 nt, Human
guugccagucaccccg

SEQ ID NO: 1999806 - RNA, 14 nt, Human
guugccagucaccc

SEQ ID NO: 1999807 - RNA, 13 nt, Human
guugccagucacc

SEQ ID NO: 1999808 - RNA, 12 nt, Human
guugcccaggca

SEQ ID NO: 1999809 - RNA, 18 nt, Human
guugcccagccucuuucc

SEQ ID NO: 1999810 - RNA, 20 nt, Human
guugcccagccucuuucccu

SEQ ID NO: 1999811 - RNA, 21 nt, Human
guugcccagccucuuucccuu

SEQ ID NO: 1999812 - RNA, 14 nt, Human
guugcccaggcagg

SEQ ID NO: 1999813 - RNA, 14 nt, Human
guuggaguucauuc

SEQ ID NO: 1999814 - RNA, 20 nt, Human
guuggaguucauucauauua

SEQ ID NO: 1999815 - RNA, 16 nt, Human
guuggaguagaaugua

SEQ ID NO: 1999816 - RNA, 20 nt, Human
guuggaguagaauguaguuu

SEQ ID NO: 1999817 - RNA, 22 nt, Human
guugcccagccucuuucccuuc

SEQ ID NO: 1999818 - RNA, 13 nt, Human
guuggccaggcug

SEQ ID NO: 1999819 - RNA, 14 nt, Human
guuggccaggcugc

SEQ ID NO: 1999820 - RNA, 19 nt, Human
guuggccaggcugcucuca

SEQ ID NO: 1999821 - RNA, 15 nt, Human
guuggccaggcuggu

SEQ ID NO: 1999822 - RNA, 14 nt, Human
guuggccaggcugg

SEQ ID NO: 1999823 - RNA, 17 nt, Human
guuggccaggcuggucu

SEQ ID NO: 1999824 - RNA, 19 nt, Human
guuggccaggcugcucuug

SEQ ID NO: 1999825 - RNA, 18 nt, Human
guuggccaggcuggucuc

SEQ ID NO: 1999826 - RNA, 19 nt, Human
guuggccaggcuggucuca

SEQ ID NO: 1999827 - RNA, 14 nt, Human
guuggccaguguga

SEQ ID NO: 1999828 - RNA, 23 nt, Human
guuggccaaagccaaagcuaggc

SEQ ID NO: 1999829 - RNA, 23 nt, Human
guuggcagaugcagcucuuccug

SEQ ID NO: 1999830 - RNA, 18 nt, Human
guuggcagaugcagcucu

SEQ ID NO: 1999831 - RNA, 18 nt, Human
guuggcaaaaaggcagga

SEQ ID NO: 1999832 - RNA, 13 nt, Human
guuggcaccuucc

SEQ ID NO: 1999833 - RNA, 16 nt, Human
guuggcaccuuccccc

SEQ ID NO: 1999834 - RNA, 18 nt, Human
guuggcaccuucccccuc

SEQ ID NO: 1999835 - RNA, 14 nt, Human
guuggcaaaaaggc

SEQ ID NO: 1999836 - RNA, 20 nt, Human
guugaagucaugcuccccug

SEQ ID NO: 1999837 - RNA, 13 nt, Human
guugaauaugauu

SEQ ID NO: 1999838 - RNA, 13 nt, Human
guugaagccuuug

SEQ ID NO: 1999839 - RNA, 14 nt, Human
guugaagccuuugu

SEQ ID NO: 1999840 - RNA, 16 nt, Human
guugaagucaugcucc

SEQ ID NO: 1999841 - RNA, 19 nt, Human
guugaagucaugcuccccu

SEQ ID NO: 1999842 - RNA, 14 nt, Human
guugauuaaagaug

SEQ ID NO: 1999843 - RNA, 14 nt, Human
guugaacuguuaga

SEQ ID NO: 1999844 - RNA, 17 nt, Human
guugaacuguuagaaug

SEQ ID NO: 1999845 - RNA, 19 nt, Human
guugaacuguuagaaugua

SEQ ID NO: 1999846 - RNA, 19 nt, Human
guugaagaccuaaccaggg

SEQ ID NO: 1999847 - RNA, 18 nt, Human
guugaagagguuuuaaag

SEQ ID NO: 1999848 - RNA, 21 nt, Human
guugaagaccuaaccagggcc

SEQ ID NO: 1999849 - RNA, 18 nt, Human
guugaacaaaauaaauug

SEQ ID NO: 1999850 - RNA, 14 nt, Human
guugaacaaaauaa

SEQ ID NO: 1999851 - RNA, 15 nt, Human
guugaacaaaauaaa

SEQ ID NO: 1999852 - RNA, 17 nt, Human
guugaacaaaauaaauu

SEQ ID NO: 1999853 - RNA, 16 nt, Human
guugaagacagagcua

SEQ ID NO: 1999854 - RNA, 16 nt, Human
guugcacugaaguuug

SEQ ID NO: 1999855 - RNA, 21 nt, Human
guugcacugaaguuugauaaa

SEQ ID NO: 1999856 - RNA, 15 nt, Human
guugcaggaccucag

SEQ ID NO: 1999857 - RNA, 12 nt, Human
guugcacugaag

SEQ ID NO: 1999858 - RNA, 13 nt, Human
guugcacugaagu

SEQ ID NO: 1999859 - RNA, 15 nt, Human
guugcacugaaguuu

SEQ ID NO: 1999860 - RNA, 14 nt, Human
guugcaacuuugua

SEQ ID NO: 1999861 - RNA, 22 nt, Human
guugauuucuaguuauuuauuc

SEQ ID NO: 1999862 - RNA, 16 nt, Human
guugauuucuaguuau

SEQ ID NO: 1999863 - RNA, 13 nt, Human
guugauucucucc

SEQ ID NO: 1999864 - RNA, 14 nt, Human
guugauucucucca

SEQ ID NO: 1999865 - RNA, 16 nt, Human
guugcaacuuuguaua

SEQ ID NO: 1999866 - RNA, 17 nt, Human
guugaaaaacagcugag

SEQ ID NO: 1999867 - RNA, 12 nt, Human
guucuuugugua

SEQ ID NO: 1999868 - RNA, 19 nt, Human
guucuuuucaauauauuug

SEQ ID NO: 1999869 - RNA, 13 nt, Human
guucuuuccaaag

SEQ ID NO: 1999870 - RNA, 14 nt, Human
guucuuuccaaagu

SEQ ID NO: 1999871 - RNA, 18 nt, Human
guucuuuccaaaguacac

SEQ ID NO: 1999872 - RNA, 20 nt, Human
guucuuuccaaaguacacug

SEQ ID NO: 1999873 - RNA, 16 nt, Human
guucuuucuuccucug

SEQ ID NO: 1999874 - RNA, 17 nt, Human
guucuuucuuccucugc

SEQ ID NO: 1999875 - RNA, 18 nt, Human
guucuuucuuccucugcu

SEQ ID NO: 1999876 - RNA, 19 nt, Human
guucuuucuuccucugcug

SEQ ID NO: 1999877 - RNA, 14 nt, Human
guucuuucuuccuc

SEQ ID NO: 1999878 - RNA, 15 nt, Human
guucuuucuuccucu

SEQ ID NO: 1999879 - RNA, 20 nt, Human
guucuuucauuugcuuugga

SEQ ID NO: 1999880 - RNA, 22 nt, Human
guucuuucauuugcuuuggaag

SEQ ID NO: 1999881 - RNA, 20 nt, Human
guucuuuccauaauaaaagg

SEQ ID NO: 1999882 - RNA, 13 nt, Human
guucuuucucuuu

SEQ ID NO: 1999883 - RNA, 20 nt, Human
guucuggcucuuccaggcug

SEQ ID NO: 1999884 - RNA, 16 nt, Human
guucuggcucuuccag

SEQ ID NO: 1999885 - RNA, 12 nt, Human
guucuggcucuu

SEQ ID NO: 1999886 - RNA, 17 nt, Human
guucugcuaaauuucaa

SEQ ID NO: 1999887 - RNA, 19 nt, Human
guucugcuaaauuucaaau

SEQ ID NO: 1999888 - RNA, 23 nt, Human
guucuggcagaguugaagacaga

SEQ ID NO: 1999889 - RNA, 11 nt, Human
guucugggaca

SEQ ID NO: 1999890 - RNA, 12 nt, Human
guucugggacac

SEQ ID NO: 1999891 - RNA, 14 nt, Human
guucugggacacag

SEQ ID NO: 1999892 - RNA, 15 nt, Human
guucugggacacagu

SEQ ID NO: 1999893 - RNA, 16 nt, Human
guucugggacacaguu

SEQ ID NO: 1999894 - RNA, 18 nt, Human
guucuuucacccuuuucu

SEQ ID NO: 1999895 - RNA, 23 nt, Human
guucugggacacaguucaauucu

SEQ ID NO: 1999896 - RNA, 20 nt, Human
guucugccucugauguauuu

SEQ ID NO: 1999897 - RNA, 19 nt, Human
guucugauccuaguuccac

SEQ ID NO: 1999898 - RNA, 15 nt, Human
guucugcacacagca

SEQ ID NO: 1999899 - RNA, 16 nt, Human
guucugcacacagcac

SEQ ID NO: 1999900 - RNA, 15 nt, Human
guuccuucugggcau

SEQ ID NO: 1999901 - RNA, 18 nt, Human
guuccuuccucugagccu

SEQ ID NO: 1999902 - RNA, 19 nt, Human
guuccuuccucugagccuu

SEQ ID NO: 1999903 - RNA, 17 nt, Human
guuccuuccucugagcc

SEQ ID NO: 1999904 - RNA, 20 nt, Human
guuccaccaucaagccacca

SEQ ID NO: 1999905 - RNA, 17 nt, Human
guuccaccaucaagcca

SEQ ID NO: 1999906 - RNA, 14 nt, Human
guuccacagaggac

SEQ ID NO: 1999907 - RNA, 12 nt, Human
guuccacugaga

SEQ ID NO: 1999908 - RNA, 13 nt, Human
guuccacugagac

SEQ ID NO: 1999909 - RNA, 13 nt, Human
guuccagccugcc

SEQ ID NO: 1999910 - RNA, 14 nt, Human
guuccagccugcca

SEQ ID NO: 1999911 - RNA, 14 nt, Human
guuccagcaccaca

SEQ ID NO: 1999912 - RNA, 23 nt, Human
guuccagcaauucuccugccuca

SEQ ID NO: 1999913 - RNA, 20 nt, Human
guuccagcaauucuccugcc

SEQ ID NO: 1999914 - RNA, 21 nt, Human
guuccagcaauucuccugccu

SEQ ID NO: 1999915 - RNA, 14 nt, Human
guuccacugagacc

SEQ ID NO: 1999916 - RNA, 17 nt, Human
guucauucauauuacaa

SEQ ID NO: 1999917 - RNA, 14 nt, Human
guucauucauauua

SEQ ID NO: 1999918 - RNA, 16 nt, Human
guucauucauauuaca

SEQ ID NO: 1999919 - RNA, 17 nt, Human
guuccaaccacugaauc

SEQ ID NO: 1999920 - RNA, 17 nt, Human
guuccaaacaugagguu

SEQ ID NO: 1999921 - RNA, 23 nt, Human
guuccaaacaugagguucucucu

SEQ ID NO: 1999922 - RNA, 18 nt, Human
guuccaagucuuugcuau

SEQ ID NO: 1999923 - RNA, 16 nt, Human
guuccuagccaccgcc

SEQ ID NO: 1999924 - RNA, 16 nt, Human
guuccuacacaggaca

SEQ ID NO: 1999925 - RNA, 17 nt, Human
guuccuacacaggacag

SEQ ID NO: 1999926 - RNA, 15 nt, Human
guuccuacacaggac

SEQ ID NO: 1999927 - RNA, 22 nt, Human
guuccucauuagcauuuugcua

SEQ ID NO: 1999928 - RNA, 23 nt, Human
guuccuagugauggcuuaugaua

SEQ ID NO: 1999929 - RNA, 18 nt, Human
guuccuacacaggacagg

SEQ ID NO: 1999930 - RNA, 15 nt, Human
guuccagccugccac

SEQ ID NO: 1999931 - RNA, 14 nt, Human
guuccuaauccucu

SEQ ID NO: 1999932 - RNA, 17 nt, Human
guuccaggguucucuug

SEQ ID NO: 1999933 - RNA, 15 nt, Human
guuccaguuucagag

SEQ ID NO: 1999934 - RNA, 22 nt, Human
guuccuggggcauccauggggu

SEQ ID NO: 1999935 - RNA, 23 nt, Human
guuccuccccuccuccuggacuc

SEQ ID NO: 1999936 - RNA, 13 nt, Human
guucaucuugaau

SEQ ID NO: 1999937 - RNA, 12 nt, Human
guucaucuugaa

SEQ ID NO: 1999938 - RNA, 12 nt, Human
guucaugaaaga

SEQ ID NO: 1999939 - RNA, 20 nt, Human
guucaucccuucucuuccag

SEQ ID NO: 1999940 - RNA, 18 nt, Human
guucaucuugaauuguaa

SEQ ID NO: 1999941 - RNA, 17 nt, Human
guucagccacugaggga

SEQ ID NO: 1999942 - RNA, 16 nt, Human
guucaucaaugaauga

SEQ ID NO: 1999943 - RNA, 17 nt, Human
guucaucauccuaagcu

SEQ ID NO: 1999944 - RNA, 16 nt, Human
guucaucccuucucuu

SEQ ID NO: 1999945 - RNA, 18 nt, Human
guucaucccuucucuucc

SEQ ID NO: 1999946 - RNA, 19 nt, Human
guucaucccuucucuucca

SEQ ID NO: 1999947 - RNA, 20 nt, Human
guucacuaaacucugaauaa

SEQ ID NO: 1999948 - RNA, 12 nt, Human
guucagaaaaaa

SEQ ID NO: 1999949 - RNA, 21 nt, Human
guucagaaaaaagguucuuug

SEQ ID NO: 1999950 - RNA, 18 nt, Human
guucacucuuggagccug

SEQ ID NO: 1999951 - RNA, 19 nt, Human
guucacucuuggagccugc

SEQ ID NO: 1999952 - RNA, 17 nt, Human
guucacucuuggagccu

SEQ ID NO: 1999953 - RNA, 20 nt, Human
guucacucuuggagccugca

SEQ ID NO: 1999954 - RNA, 24 nt, Human
guucacucuuggagccugcagagc

SEQ ID NO: 1999955 - RNA, 19 nt, Human
guucacugcaaccuccgcc

SEQ ID NO: 1999956 - RNA, 16 nt, Human
guucacggguggccug

SEQ ID NO: 1999957 - RNA, 15 nt, Human
guucacuaaacucug

SEQ ID NO: 1999958 - RNA, 24 nt, Human
guucacucuacuuagcaugucccu

SEQ ID NO: 1999959 - RNA, 16 nt, Human
guucacuaaacucuga

SEQ ID NO: 1999960 - RNA, 18 nt, Human
guucacuaaacucugaau

SEQ ID NO: 1999961 - RNA, 15 nt, Human
guucacaccugcaga

SEQ ID NO: 1999962 - RNA, 19 nt, Human
guuacauaagauaaaugug

SEQ ID NO: 1999963 - RNA, 18 nt, Human
guuacauaagauaaaugu

SEQ ID NO: 1999964 - RNA, 20 nt, Human
guuacaugcagccacuuagg

SEQ ID NO: 1999965 - RNA, 12 nt, Human
guuacagccugg

SEQ ID NO: 1999966 - RNA, 19 nt, Human
guuacagguaccaguucuu

SEQ ID NO: 1999967 - RNA, 17 nt, Human
guuacagacaaagcgug

SEQ ID NO: 1999968 - RNA, 15 nt, Human
guuacagacaaagcg

SEQ ID NO: 1999969 - RNA, 21 nt, Human
guuacauuuuuaagugcugca

SEQ ID NO: 1999970 - RNA, 16 nt, Human
guuacccaaauuaaga

SEQ ID NO: 1999971 - RNA, 14 nt, Human
guuaccauuggaaa

SEQ ID NO: 1999972 - RNA, 16 nt, Human
guuaccauuggaaauu

SEQ ID NO: 1999973 - RNA, 19 nt, Human
guuaccauuggaaauuuca

SEQ ID NO: 1999974 - RNA, 23 nt, Human
guuaccauuuugggguacccacu

SEQ ID NO: 1999975 - RNA, 12 nt, Human
guuaccuuaaau

SEQ ID NO: 1999976 - RNA, 20 nt, Human
guuaccauuggaaauuucac

SEQ ID NO: 1999977 - RNA, 21 nt, Human
guuaccauuggaaauuucacg

SEQ ID NO: 1999978 - RNA, 19 nt, Human
guuaguuucuccaagcagg

SEQ ID NO: 1999979 - RNA, 16 nt, Human
guuaguuucuccaagc

SEQ ID NO: 1999980 - RNA, 22 nt, Human
guuaguuucuccaagcaggaca

SEQ ID NO: 1999981 - RNA, 16 nt, Human
guuaguuccacugaga

SEQ ID NO: 1999982 - RNA, 24 nt, Human
guuaguucaaucuggauucauauu

SEQ ID NO: 1999983 - RNA, 13 nt, Human
guuauaaaggaau

SEQ ID NO: 1999984 - RNA, 15 nt, Human
guuacuaccuccucu

SEQ ID NO: 1999985 - RNA, 22 nt, Human
guuacuaaguuuuuauggcuuu

SEQ ID NO: 1999986 - RNA, 15 nt, Human
guuacucagaauucu

SEQ ID NO: 1999987 - RNA, 20 nt, Human
guuaucauuuuuuccuguuu

SEQ ID NO: 1999988 - RNA, 17 nt, Human
guuaucauuuuuuccug

SEQ ID NO: 1999989 - RNA, 21 nt, Human
guuaugacuccagaauuuccc

SEQ ID NO: 1999990 - RNA, 17 nt, Human
guuauaaugaaugacuu

SEQ ID NO: 1999991 - RNA, 18 nt, Human
guuauagguccuuuagaa

SEQ ID NO: 1999992 - RNA, 15 nt, Human
guuauagugcaauau

SEQ ID NO: 1999993 - RNA, 16 nt, Human
guuauagugcaauaua

SEQ ID NO: 1999994 - RNA, 21 nt, Human
guuauagguccuuuagaaaca

SEQ ID NO: 1999995 - RNA, 17 nt, Human
guuauagugcaauauau

SEQ ID NO: 1999996 - RNA, 21 nt, Human
guuauauuuuucuuaaaaagu

SEQ ID NO: 1999997 - RNA, 23 nt, Human
guuauauuuuucuuaaaaaguaa

SEQ ID NO: 1999998 - RNA, 23 nt, Human
guucaauucucauuugucacaca

SEQ ID NO: 1999999 - RNA, 16 nt, Human
guucaauucucauuug

SEQ ID NO: 2000000 - RNA, 23 nt, Human
guucaaucuggauucauauuuaa

SEQ ID NO: 2000001 - RNA, 23 nt, Human
guuauuauagagcagaaauucug

SEQ ID NO: 2000002 - RNA, 20 nt, Human
guucaagcgauucuucugcu

SEQ ID NO: 2000003 - RNA, 23 nt, Human
guucaagugauucucaugccuca

SEQ ID NO: 2000004 - RNA, 15 nt, Human
guuauguaaauaauu

SEQ ID NO: 2000005 - RNA, 19 nt, Human
guuauuaaaaaucucaaau

SEQ ID NO: 2000006 - RNA, 21 nt, Human
guuauguaaauaauucuuuuu

SEQ ID NO: 2000007 - RNA, 14 nt, Human
guuauguauauggu

SEQ ID NO: 2000008 - RNA, 19 nt, Human
guucaagcgauucuucugc

SEQ ID NO: 2000009 - RNA, 17 nt, Human
guuauuauauuuacaaa

SEQ ID NO: 2000010 - RNA, 11 nt, Human
guuaugugucu

SEQ ID NO: 2000011 - RNA, 12 nt, Human
guuauuaaaauu

SEQ ID NO: 2000012 - RNA, 13 nt, Human
guuauuaaaauug

SEQ ID NO: 2000013 - RNA, 14 nt, Human
guggcucacgccug

SEQ ID NO: 2000014 - RNA, 15 nt, Human
gugcuaauuuugaaa

SEQ ID NO: 2000015 - RNA, 13 nt, Human
gugcuaauuuuga

SEQ ID NO: 2000016 - RNA, 14 nt, Human
guggcugcuucaag

SEQ ID NO: 2000017 - RNA, 12 nt, Human
guggcugcuuca

SEQ ID NO: 2000018 - RNA, 20 nt, Human
guggcucaagucuggcccca

SEQ ID NO: 2000019 - RNA, 21 nt, Human
guggcucaagucuggccccac

SEQ ID NO: 2000020 - RNA, 13 nt, Human
guggcuccucccg

SEQ ID NO: 2000021 - RNA, 20 nt, Human
guggcuccucccggugccca

SEQ ID NO: 2000022 - RNA, 22 nt, Human
guggcugcuucaaggauccuga

SEQ ID NO: 2000023 - RNA, 19 nt, Human
guggcugcuucaaggaucc

SEQ ID NO: 2000024 - RNA, 16 nt, Human
guggcugcuucaagga

SEQ ID NO: 2000025 - RNA, 15 nt, Human
guggcugcuucaagg

SEQ ID NO: 2000026 - RNA, 17 nt, Human
guggcuggaucugugag

SEQ ID NO: 2000027 - RNA, 23 nt, Human
guggcugcuucaaggauccugag

SEQ ID NO: 2000028 - RNA, 19 nt, Human
guggcuggguuggagggug

SEQ ID NO: 2000029 - RNA, 18 nt, Human
guggcuucccgcucagcc

SEQ ID NO: 2000030 - RNA, 19 nt, Human
guggcuucccgcucagccc

SEQ ID NO: 2000031 - RNA, 20 nt, Human
guggcuucccgcucagcccu

SEQ ID NO: 2000032 - RNA, 22 nt, Human
guggcuuaaaacaacacucaca

SEQ ID NO: 2000033 - RNA, 13 nt, Human
gugggccuggcca

SEQ ID NO: 2000034 - RNA, 15 nt, Human
gugggcauucaaaug

SEQ ID NO: 2000035 - RNA, 17 nt, Human
gugggcauucucucucc

SEQ ID NO: 2000036 - RNA, 17 nt, Human
gugggcccaaugcacuu

SEQ ID NO: 2000037 - RNA, 18 nt, Human
gugggcgugagaccugcc

SEQ ID NO: 2000038 - RNA, 21 nt, Human
gugggcgugagaccugccccu

SEQ ID NO: 2000039 - RNA, 22 nt, Human
gugggcgugagaccugccccuc

SEQ ID NO: 2000040 - RNA, 19 nt, Human
gugggccuucagggaguga

SEQ ID NO: 2000041 - RNA, 14 nt, Human
gugggcuccccucu

SEQ ID NO: 2000042 - RNA, 15 nt, Human
gugggcuccccucuu

SEQ ID NO: 2000043 - RNA, 19 nt, Human
gugggcuccccucuuccuc

SEQ ID NO: 2000044 - RNA, 20 nt, Human
gugggcuccccucuuccucu

SEQ ID NO: 2000045 - RNA, 22 nt, Human
gugggcuccccucuuccucuug

SEQ ID NO: 2000046 - RNA, 15 nt, Human
gugggcuaguugggc

SEQ ID NO: 2000047 - RNA, 13 nt, Human
guggggaggggcu

SEQ ID NO: 2000048 - RNA, 18 nt, Human
guggggaccucaggccug

SEQ ID NO: 2000049 - RNA, 15 nt, Human
guggggaccucaggc

SEQ ID NO: 2000050 - RNA, 13 nt, Human
guggggcagcuug

SEQ ID NO: 2000051 - RNA, 17 nt, Human
guggggcagcuugaggg

SEQ ID NO: 2000052 - RNA, 23 nt, Human
guggguuucuaaagcugccagcc

SEQ ID NO: 2000053 - RNA, 15 nt, Human
gugggugugagcagc

SEQ ID NO: 2000054 - RNA, 21 nt, Human
guguaaguauucuuauuuaau

SEQ ID NO: 2000055 - RNA, 17 nt, Human
guguaagacaaaaagcu

SEQ ID NO: 2000056 - RNA, 19 nt, Human
guggugcgaucuggguuca

SEQ ID NO: 2000057 - RNA, 14 nt, Human
guggucuuuuccuc

SEQ ID NO: 2000058 - RNA, 21 nt, Human
guggugagaggcauccaguau

SEQ ID NO: 2000059 - RNA, 14 nt, Human
guggugaccucugc

SEQ ID NO: 2000060 - RNA, 17 nt, Human
guggugaccucugccug

SEQ ID NO: 2000061 - RNA, 18 nt, Human
guggucuccacuggggau

SEQ ID NO: 2000062 - RNA, 18 nt, Human
gugguccuaaucuucuga

SEQ ID NO: 2000063 - RNA, 17 nt, Human
guggucccaccccacac

SEQ ID NO: 2000064 - RNA, 16 nt, Human
guggucccaccccaca

SEQ ID NO: 2000065 - RNA, 15 nt, Human
guggucccaccccac

SEQ ID NO: 2000066 - RNA, 14 nt, Human
guggucccacccca

SEQ ID NO: 2000067 - RNA, 17 nt, Human
gugguagagugugccug

SEQ ID NO: 2000068 - RNA, 19 nt, Human
gugguaugaucacggcuca

SEQ ID NO: 2000069 - RNA, 20 nt, Human
guguaugugaguauucucau

SEQ ID NO: 2000070 - RNA, 11 nt, Human
guguccccacc

SEQ ID NO: 2000071 - RNA, 12 nt, Human
guguccccacca

SEQ ID NO: 2000072 - RNA, 13 nt, Human
guguccccaccau

SEQ ID NO: 2000073 - RNA, 17 nt, Human
guguccccaccaucugc

SEQ ID NO: 2000074 - RNA, 18 nt, Human
guguccccaccaucugcu

SEQ ID NO: 2000075 - RNA, 20 nt, Human
guguccccaccaucugcugu

SEQ ID NO: 2000076 - RNA, 22 nt, Human
guguccccaccaucugcugucu

SEQ ID NO: 2000077 - RNA, 13 nt, Human
gugucccugcacu

SEQ ID NO: 2000078 - RNA, 16 nt, Human
gugucccugcacuugc

SEQ ID NO: 2000079 - RNA, 18 nt, Human
gugucccugcacuugcag

SEQ ID NO: 2000080 - RNA, 12 nt, Human
guguauauuuga

SEQ ID NO: 2000081 - RNA, 13 nt, Human
guguauauuugau

SEQ ID NO: 2000082 - RNA, 14 nt, Human
guguauauuugauu

SEQ ID NO: 2000083 - RNA, 17 nt, Human
guguauauuugauuuau

SEQ ID NO: 2000084 - RNA, 22 nt, Human
guguaauuuaaaauugugaugu

SEQ ID NO: 2000085 - RNA, 23 nt, Human
guguaauuuaaaauugugaugug

SEQ ID NO: 2000086 - RNA, 20 nt, Human
guguaauuuaaaauugugau

SEQ ID NO: 2000087 - RNA, 15 nt, Human
guguaauuuuucugu

SEQ ID NO: 2000088 - RNA, 16 nt, Human
guguaauuuuucugua

SEQ ID NO: 2000089 - RNA, 23 nt, Human
guguacagaauuuuucuucauua

SEQ ID NO: 2000090 - RNA, 17 nt, Human
guguacauggaauaaca

SEQ ID NO: 2000091 - RNA, 15 nt, Human
guguaccauuaaaau

SEQ ID NO: 2000092 - RNA, 22 nt, Human
guguacauggaauaacauguaa

SEQ ID NO: 2000093 - RNA, 17 nt, Human
guuaacaggcaaacauu

SEQ ID NO: 2000094 - RNA, 11 nt, Human
guuaaauguuu

SEQ ID NO: 2000095 - RNA, 13 nt, Human
guuaaauguuuug

SEQ ID NO: 2000096 - RNA, 17 nt, Human
guuaaauguuuuguaaa

SEQ ID NO: 2000097 - RNA, 18 nt, Human
guuaaauguuuuguaaac

SEQ ID NO: 2000098 - RNA, 19 nt, Human
guuaaauguuuuguaaacu

SEQ ID NO: 2000099 - RNA, 22 nt, Human
guuaaauguuuuguaaacuuug

SEQ ID NO: 2000100 - RNA, 23 nt, Human
guuaaauguuuuguaaacuuuga

SEQ ID NO: 2000101 - RNA, 12 nt, Human
guuaacaaauaa

SEQ ID NO: 2000102 - RNA, 17 nt, Human
guuaacaaauaacaacu

SEQ ID NO: 2000103 - RNA, 13 nt, Human
guuacagacaaag

SEQ ID NO: 2000104 - RNA, 17 nt, Human
guuacacuuuuuggaag

SEQ ID NO: 2000105 - RNA, 18 nt, Human
guuacacuuuuuggaagu

SEQ ID NO: 2000106 - RNA, 22 nt, Human
guuacacuuuuuggaagugaaa

SEQ ID NO: 2000107 - RNA, 16 nt, Human
guuacacuaaaaggug

SEQ ID NO: 2000108 - RNA, 15 nt, Human
guuacacuaaaaggu

SEQ ID NO: 2000109 - RNA, 18 nt, Human
guuaacugagugccuuuu

SEQ ID NO: 2000110 - RNA, 22 nt, Human
guuaaaauaccagccaguaaau

SEQ ID NO: 2000111 - RNA, 14 nt, Human
guuaaaauggauuu

SEQ ID NO: 2000112 - RNA, 13 nt, Human
guuaaaauuauac

SEQ ID NO: 2000113 - RNA, 20 nt, Human
guuaaaaacagauuuggaaa

SEQ ID NO: 2000114 - RNA, 16 nt, Human
guuaaagggaagaaaa

SEQ ID NO: 2000115 - RNA, 21 nt, Human
guuaaagggaagaaaacacug

SEQ ID NO: 2000116 - RNA, 18 nt, Human
guuaaaggugaacauugg

SEQ ID NO: 2000117 - RNA, 17 nt, Human
guuaaacucgcucacug

SEQ ID NO: 2000118 - RNA, 16 nt, Human
guuaaagauguagcaa

SEQ ID NO: 2000119 - RNA, 13 nt, Human
guuaaagauguag

SEQ ID NO: 2000120 - RNA, 20 nt, Human
guguuauuuuaaucucagaa

SEQ ID NO: 2000121 - RNA, 15 nt, Human
guguuaugagccagg

SEQ ID NO: 2000122 - RNA, 17 nt, Human
guguuauaugaacauac

SEQ ID NO: 2000123 - RNA, 23 nt, Human
guguuauaugaacauacaaaugc

SEQ ID NO: 2000124 - RNA, 22 nt, Human
guguuauugagagagaugugua

SEQ ID NO: 2000125 - RNA, 24 nt, Human
guguuauugagagagauguguaau

SEQ ID NO: 2000126 - RNA, 14 nt, Human
guguucagaaaaaa

SEQ ID NO: 2000127 - RNA, 23 nt, Human
guguucaguguuagcaguggguc

SEQ ID NO: 2000128 - RNA, 12 nt, Human
guguucucagag

SEQ ID NO: 2000129 - RNA, 13 nt, Human
guguucucagagg

SEQ ID NO: 2000130 - RNA, 18 nt, Human
guguuuuucauaaagcag

SEQ ID NO: 2000131 - RNA, 12 nt, Human
guguuuuggucc

SEQ ID NO: 2000132 - RNA, 18 nt, Human
guguuaugacuccagaau

SEQ ID NO: 2000133 - RNA, 14 nt, Human
guguuauaugaaca

SEQ ID NO: 2000134 - RNA, 12 nt, Human
guguuacuaagu

SEQ ID NO: 2000135 - RNA, 13 nt, Human
guguuacauguau

SEQ ID NO: 2000136 - RNA, 14 nt, Human
guguuacuaaguuu

SEQ ID NO: 2000137 - RNA, 19 nt, Human
guguguuuuaaaaugagaa

SEQ ID NO: 2000138 - RNA, 18 nt, Human
guguguuucauccuuccc

SEQ ID NO: 2000139 - RNA, 16 nt, Human
guguguuuuaaaauga

SEQ ID NO: 2000140 - RNA, 13 nt, Human
guguguuuuaaaa

SEQ ID NO: 2000141 - RNA, 14 nt, Human
guguguuuuucaua

SEQ ID NO: 2000142 - RNA, 13 nt, Human
guguuaauuuaag

SEQ ID NO: 2000143 - RNA, 16 nt, Human
guguuaauuuaaguuu

SEQ ID NO: 2000144 - RNA, 18 nt, Human
guguuaauuuaaguuuug

SEQ ID NO: 2000145 - RNA, 17 nt, Human
gugugggaguguguaau

SEQ ID NO: 2000146 - RNA, 17 nt, Human
guguggagucauuucug

SEQ ID NO: 2000147 - RNA, 21 nt, Human
guguggagucauuucugauuu

SEQ ID NO: 2000148 - RNA, 13 nt, Human
guguggagaagcg

SEQ ID NO: 2000149 - RNA, 20 nt, Human
guguggaaauuaagaagaaa

SEQ ID NO: 2000150 - RNA, 21 nt, Human
guguggagaagcggcuggcag

SEQ ID NO: 2000151 - RNA, 12 nt, Human
guguguugugug

SEQ ID NO: 2000152 - RNA, 14 nt, Human
guguguugugugug

SEQ ID NO: 2000153 - RNA, 17 nt, Human
guguguuguguguggga

SEQ ID NO: 2000154 - RNA, 14 nt, Human
guguguugcuuaug

SEQ ID NO: 2000155 - RNA, 16 nt, Human
guguguuuaugugugu

SEQ ID NO: 2000156 - RNA, 12 nt, Human
guguguuuuaaa

SEQ ID NO: 2000157 - RNA, 14 nt, Human
guguguuuaugugu

SEQ ID NO: 2000158 - RNA, 15 nt, Human
guguguuuaugugug

SEQ ID NO: 2000159 - RNA, 15 nt, Human
guguguuucugaucu

SEQ ID NO: 2000160 - RNA, 17 nt, Human
gugugcucaggagcccu

SEQ ID NO: 2000161 - RNA, 16 nt, Human
gugugcucaggagccc

SEQ ID NO: 2000162 - RNA, 13 nt, Human
gugugcccagcuu

SEQ ID NO: 2000163 - RNA, 18 nt, Human
gugugcccagcuuauaaa

SEQ ID NO: 2000164 - RNA, 11 nt, Human
gugugccucua

SEQ ID NO: 2000165 - RNA, 13 nt, Human
gugugccucuagc

SEQ ID NO: 2000166 - RNA, 14 nt, Human
gugugccucuagcu

SEQ ID NO: 2000167 - RNA, 16 nt, Human
gugugccucuagcuga

SEQ ID NO: 2000168 - RNA, 17 nt, Human
gugugccucuagcugaa

SEQ ID NO: 2000169 - RNA, 23 nt, Human
gugugccucuagcugaauugagc

SEQ ID NO: 2000170 - RNA, 19 nt, Human
gugugcucaggagcccugg

SEQ ID NO: 2000171 - RNA, 18 nt, Human
gugugcucaggagcccug

SEQ ID NO: 2000172 - RNA, 12 nt, Human
gugugcucugau

SEQ ID NO: 2000173 - RNA, 22 nt, Human
gugugcuaaacguguauguuuu

SEQ ID NO: 2000174 - RNA, 19 nt, Human
guguggaaauuaagaagaa

SEQ ID NO: 2000175 - RNA, 15 nt, Human
gugugcucugaucau

SEQ ID NO: 2000176 - RNA, 22 nt, Human
gugugcucugaucauccacugu

SEQ ID NO: 2000177 - RNA, 14 nt, Human
gugucucuuggucc

SEQ ID NO: 2000178 - RNA, 17 nt, Human
gugucucccuucauccu

SEQ ID NO: 2000179 - RNA, 14 nt, Human
guguccggucccug

SEQ ID NO: 2000180 - RNA, 23 nt, Human
gugucccugcacuugcagacucu

SEQ ID NO: 2000181 - RNA, 20 nt, Human
guguccuccugggguucuuu

SEQ ID NO: 2000182 - RNA, 15 nt, Human
gugucgggcaugaca

SEQ ID NO: 2000183 - RNA, 22 nt, Human
gugugauauuucagaaauacag

SEQ ID NO: 2000184 - RNA, 20 nt, Human
gugugagucaccaagcccag

SEQ ID NO: 2000185 - RNA, 15 nt, Human
gugugauauuucaga

SEQ ID NO: 2000186 - RNA, 17 nt, Human
gugugauauuucagaaa

SEQ ID NO: 2000187 - RNA, 17 nt, Human
gugugagugcauguacu

SEQ ID NO: 2000188 - RNA, 21 nt, Human
gugucucuugguccugcugca

SEQ ID NO: 2000189 - RNA, 20 nt, Human
gugucucuugguccugcugc

SEQ ID NO: 2000190 - RNA, 19 nt, Human
gugucucuugguccugcug

SEQ ID NO: 2000191 - RNA, 18 nt, Human
gugucucuugguccugcu

SEQ ID NO: 2000192 - RNA, 22 nt, Human
gugucucuugguccugcugcag

SEQ ID NO: 2000193 - RNA, 14 nt, Human
gugucuggcugcag

SEQ ID NO: 2000194 - RNA, 13 nt, Human
gugucugcccccu

SEQ ID NO: 2000195 - RNA, 23 nt, Human
gugauccacccaccucagccucc

SEQ ID NO: 2000196 - RNA, 24 nt, Human
gugauccacccaccucagccuccc

SEQ ID NO: 2000197 - RNA, 13 nt, Human
gugauuuuuguaa

SEQ ID NO: 2000198 - RNA, 18 nt, Human
gugauuuuuguaauuuuu

SEQ ID NO: 2000199 - RNA, 12 nt, Human
gugauuuucauu

SEQ ID NO: 2000200 - RNA, 13 nt, Human
gugauuuggaucu

SEQ ID NO: 2000201 - RNA, 16 nt, Human
gugauuuuaaaugugu

SEQ ID NO: 2000202 - RNA, 19 nt, Human
gugcaaacccacucagaga

SEQ ID NO: 2000203 - RNA, 12 nt, Human
gugcaaagccac

SEQ ID NO: 2000204 - RNA, 22 nt, Human
gugcacuaauguguaagacaaa

SEQ ID NO: 2000205 - RNA, 21 nt, Human
gugcaaaaggcuugcagaacu

SEQ ID NO: 2000206 - RNA, 18 nt, Human
gugcaaacccacucagag

SEQ ID NO: 2000207 - RNA, 18 nt, Human
gugcagacaaucuucugu

SEQ ID NO: 2000208 - RNA, 22 nt, Human
gugcagaacugcagucacugca

SEQ ID NO: 2000209 - RNA, 23 nt, Human
gugcagaagggagcuggcuccag

SEQ ID NO: 2000210 - RNA, 22 nt, Human
gugcauaccacuuuuguucuug

SEQ ID NO: 2000211 - RNA, 16 nt, Human
gugcaggcccacccug

SEQ ID NO: 2000212 - RNA, 19 nt, Human
gugcaggcccacccugcuu

SEQ ID NO: 2000213 - RNA, 13 nt, Human
gugcaucucagcc

SEQ ID NO: 2000214 - RNA, 14 nt, Human
gugccagcccagag

SEQ ID NO: 2000215 - RNA, 18 nt, Human
gugccagcccagaggccg

SEQ ID NO: 2000216 - RNA, 20 nt, Human
gugcaguggugcgaucuggg

SEQ ID NO: 2000217 - RNA, 23 nt, Human
gugcaguggugcgaucuggguuc

SEQ ID NO: 2000218 - RNA, 15 nt, Human
gugcaggagcgcucc

SEQ ID NO: 2000219 - RNA, 17 nt, Human
gugcaggagcgcucccu

SEQ ID NO: 2000220 - RNA, 11 nt, Human
gugcaggcagg

SEQ ID NO: 2000221 - RNA, 12 nt, Human
gugcaggcaggc

SEQ ID NO: 2000222 - RNA, 18 nt, Human
gugcaggcaggcuggccu

SEQ ID NO: 2000223 - RNA, 12 nt, Human
gugcaggcccac

SEQ ID NO: 2000224 - RNA, 13 nt, Human
gugcaggcccacc

SEQ ID NO: 2000225 - RNA, 14 nt, Human
gugcagcagggcag

SEQ ID NO: 2000226 - RNA, 14 nt, Human
gugcggccuuuggc

SEQ ID NO: 2000227 - RNA, 20 nt, Human
gugcgucaguccaagggguc

SEQ ID NO: 2000228 - RNA, 14 nt, Human
gugcgccuacagga

SEQ ID NO: 2000229 - RNA, 20 nt, Human
gugcuaaacguguauguuuu

SEQ ID NO: 2000230 - RNA, 14 nt, Human
gugcuaaacgugua

SEQ ID NO: 2000231 - RNA, 17 nt, Human
gugcuaaacguguaugu

SEQ ID NO: 2000232 - RNA, 20 nt, Human
gugcccaagaauagaugcug

SEQ ID NO: 2000233 - RNA, 21 nt, Human
gugccaggauggaaugauggg

SEQ ID NO: 2000234 - RNA, 14 nt, Human
gugccaucagugcc

SEQ ID NO: 2000235 - RNA, 14 nt, Human
gugccaugugccag

SEQ ID NO: 2000236 - RNA, 16 nt, Human
gugccaugugccaggu

SEQ ID NO: 2000237 - RNA, 14 nt, Human
gugccuuuugccau

SEQ ID NO: 2000238 - RNA, 21 nt, Human
gugcgaucuggguucacugca

SEQ ID NO: 2000239 - RNA, 15 nt, Human
gugccuucagcucua

SEQ ID NO: 2000240 - RNA, 15 nt, Human
gugcccgccaccaca

SEQ ID NO: 2000241 - RNA, 15 nt, Human
gugaggaugucuggg

SEQ ID NO: 2000242 - RNA, 16 nt, Human
gugagugguugaauau

SEQ ID NO: 2000243 - RNA, 17 nt, Human
gugaggaugaaaaaaua

SEQ ID NO: 2000244 - RNA, 18 nt, Human
gugaggagcuugaaaccc

SEQ ID NO: 2000245 - RNA, 19 nt, Human
gugagccgagaucacgcca

SEQ ID NO: 2000246 - RNA, 15 nt, Human
gugagccacugcacc

SEQ ID NO: 2000247 - RNA, 20 nt, Human
gugagccacugcaccgggcc

SEQ ID NO: 2000248 - RNA, 21 nt, Human
gugacuauggagcugagcagg

SEQ ID NO: 2000249 - RNA, 12 nt, Human
gugacuaggaaa

SEQ ID NO: 2000250 - RNA, 17 nt, Human
gugaguugauagcacag

SEQ ID NO: 2000251 - RNA, 15 nt, Human
gugauacaaugcugu

SEQ ID NO: 2000252 - RNA, 12 nt, Human
gugaguuuguuu

SEQ ID NO: 2000253 - RNA, 13 nt, Human
gugaguuuguuuc

SEQ ID NO: 2000254 - RNA, 15 nt, Human
gugaguuuguuucuu

SEQ ID NO: 2000255 - RNA, 17 nt, Human
gugaguuuguuucuuug

SEQ ID NO: 2000256 - RNA, 22 nt, Human
gugaguuuguuucuuugaauuu

SEQ ID NO: 2000257 - RNA, 12 nt, Human
gugauaaaauca

SEQ ID NO: 2000258 - RNA, 13 nt, Human
gugauaaaaucau

SEQ ID NO: 2000259 - RNA, 17 nt, Human
gugauacaaugcugugc

SEQ ID NO: 2000260 - RNA, 21 nt, Human
gugauaaaaucauaaguauuu

SEQ ID NO: 2000261 - RNA, 12 nt, Human
gugauauucccc

SEQ ID NO: 2000262 - RNA, 13 nt, Human
gugauauucuuug

SEQ ID NO: 2000263 - RNA, 20 nt, Human
gugauauucuuuguuaauuu

SEQ ID NO: 2000264 - RNA, 16 nt, Human
gugauauaaacagcuu

SEQ ID NO: 2000265 - RNA, 19 nt, Human
gugauauaaguguguguuu

SEQ ID NO: 2000266 - RNA, 13 nt, Human
gugaucaaagcca

SEQ ID NO: 2000267 - RNA, 22 nt, Human
gugauauucuuuguuaauuugg

SEQ ID NO: 2000268 - RNA, 23 nt, Human
gugauauucuuuguuaauuugga

SEQ ID NO: 2000269 - RNA, 13 nt, Human
gugauauuucaga

SEQ ID NO: 2000270 - RNA, 17 nt, Human
gugauauuucagaaaua

SEQ ID NO: 2000271 - RNA, 18 nt, Human
gugauauuucagaaauac

SEQ ID NO: 2000272 - RNA, 22 nt, Human
gugauccacccaccucagccuc

SEQ ID NO: 2000273 - RNA, 14 nt, Human
gugaucacuuucug

SEQ ID NO: 2000274 - RNA, 23 nt, Human
gugaucacuuucugaaauucaca

SEQ ID NO: 2000275 - RNA, 12 nt, Human
gugacagaggca

SEQ ID NO: 2000276 - RNA, 13 nt, Human
gugacagaggcag

SEQ ID NO: 2000277 - RNA, 14 nt, Human
gugacagaggcagc

SEQ ID NO: 2000278 - RNA, 12 nt, Human
gugaccucugcc

SEQ ID NO: 2000279 - RNA, 15 nt, Human
gugacagaggcagcc

SEQ ID NO: 2000280 - RNA, 13 nt, Human
gugaccucugccu

SEQ ID NO: 2000281 - RNA, 14 nt, Human
gugaccucugccug

SEQ ID NO: 2000282 - RNA, 13 nt, Human
gugacgguuccua

SEQ ID NO: 2000283 - RNA, 24 nt, Human
gugacgguuccuacacaggacagg

SEQ ID NO: 2000284 - RNA, 21 nt, Human
gugaccuuccaagagccugag

SEQ ID NO: 2000285 - RNA, 22 nt, Human
gugaccuuccaagagccugaga

SEQ ID NO: 2000286 - RNA, 15 nt, Human
gugaccucugccuga

SEQ ID NO: 2000287 - RNA, 21 nt, Human
gugaacaaauuuacagagaca

SEQ ID NO: 2000288 - RNA, 18 nt, Human
gugaaauuuuucauauuu

SEQ ID NO: 2000289 - RNA, 13 nt, Human
gugaaauuuuuca

SEQ ID NO: 2000290 - RNA, 14 nt, Human
gugaaauuuuucau

SEQ ID NO: 2000291 - RNA, 18 nt, Human
gugaaaaaaaaaaugcug

SEQ ID NO: 2000292 - RNA, 18 nt, Human
gugaaaaauguuaggaca

SEQ ID NO: 2000293 - RNA, 21 nt, Human
gucuuuuuuuuuuaagugaaa

SEQ ID NO: 2000294 - RNA, 23 nt, Human
gucuuuuuuuuuuaagugaaauu

SEQ ID NO: 2000295 - RNA, 14 nt, Human
gugaaaaaaaaaau

SEQ ID NO: 2000296 - RNA, 15 nt, Human
gugaaaaaaaaaaug

SEQ ID NO: 2000297 - RNA, 20 nt, Human
gugacaaggauugcuacugu

SEQ ID NO: 2000298 - RNA, 21 nt, Human
gugaaugaugauccuaggcau

SEQ ID NO: 2000299 - RNA, 13 nt, Human
gucugccuggagg

SEQ ID NO: 2000300 - RNA, 15 nt, Human
gucugcccccuccug

SEQ ID NO: 2000301 - RNA, 18 nt, Human
gucugccccaaguuuugu

SEQ ID NO: 2000302 - RNA, 19 nt, Human
gucugccccaaguuuugug

SEQ ID NO: 2000303 - RNA, 22 nt, Human
gucugccccaaguuuugugaaa

SEQ ID NO: 2000304 - RNA, 22 nt, Human
gucugugagaugcuagaacucc

SEQ ID NO: 2000305 - RNA, 23 nt, Human
gucugugagaugcuagaacuccc

SEQ ID NO: 2000306 - RNA, 18 nt, Human
gucugugccauuuuguau

SEQ ID NO: 2000307 - RNA, 15 nt, Human
gucugugagaugcua

SEQ ID NO: 2000308 - RNA, 16 nt, Human
gucugugagaugcuag

SEQ ID NO: 2000309 - RNA, 17 nt, Human
gucugugagaugcuaga

SEQ ID NO: 2000310 - RNA, 21 nt, Human
gucugugagaugcuagaacuc

SEQ ID NO: 2000311 - RNA, 11 nt, Human
gucuguguguu

SEQ ID NO: 2000312 - RNA, 21 nt, Human
gucuguguguuuaugugugug

SEQ ID NO: 2000313 - RNA, 22 nt, Human
gucuguguguuuaugugugugu

SEQ ID NO: 2000314 - RNA, 20 nt, Human
gucuguguuccaaccacuga

SEQ ID NO: 2000315 - RNA, 11 nt, Human
gucugugugug

SEQ ID NO: 2000316 - RNA, 12 nt, Human
gucugugugugu

SEQ ID NO: 2000317 - RNA, 16 nt, Human
gucuguguguguguau

SEQ ID NO: 2000318 - RNA, 20 nt, Human
gucuguguguguguaugugg

SEQ ID NO: 2000319 - RNA, 14 nt, Human
gucuguucuuucca

SEQ ID NO: 2000320 - RNA, 17 nt, Human
gucuguucuuuccaaag

SEQ ID NO: 2000321 - RNA, 13 nt, Human
gucuguugauuaa

SEQ ID NO: 2000322 - RNA, 16 nt, Human
gucuguugauuaaaga

SEQ ID NO: 2000323 - RNA, 19 nt, Human
gucuguugauuaaagauga

SEQ ID NO: 2000324 - RNA, 21 nt, Human
gucuugaacuccuggccucaa

SEQ ID NO: 2000325 - RNA, 18 nt, Human
gucuugaacuccuggccu

SEQ ID NO: 2000326 - RNA, 20 nt, Human
gucuugaacuccuggccuca

SEQ ID NO: 2000327 - RNA, 16 nt, Human
gucuugcaauggcagc

SEQ ID NO: 2000328 - RNA, 17 nt, Human
gucuugcaauggcagcc

SEQ ID NO: 2000329 - RNA, 18 nt, Human
gucuugcaauggcagccu

SEQ ID NO: 2000330 - RNA, 19 nt, Human
gucuugcaauggcagccuu

SEQ ID NO: 2000331 - RNA, 21 nt, Human
gucuuaaaaaguggaaaaaua

SEQ ID NO: 2000332 - RNA, 16 nt, Human
gucuugaacuccuggc

SEQ ID NO: 2000333 - RNA, 17 nt, Human
gucuugaacuccuggcc

SEQ ID NO: 2000334 - RNA, 12 nt, Human
gucuucugcuuu

SEQ ID NO: 2000335 - RNA, 13 nt, Human
gucuucugcuuug

SEQ ID NO: 2000336 - RNA, 14 nt, Human
gucuucugcuuugu

SEQ ID NO: 2000337 - RNA, 22 nt, Human
gucuucugcuuuguugugugcc

SEQ ID NO: 2000338 - RNA, 15 nt, Human
gucuugccuauauuu

SEQ ID NO: 2000339 - RNA, 23 nt, Human
gucuugcaauggcagccuuggca

SEQ ID NO: 2000340 - RNA, 20 nt, Human
gucuugcaauggcagccuug

SEQ ID NO: 2000341 - RNA, 21 nt, Human
gucuugcaauggcagccuugg

SEQ ID NO: 2000342 - RNA, 17 nt, Human
gucuugguuccagccug

SEQ ID NO: 2000343 - RNA, 19 nt, Human
gucuugguuccagccugcc

SEQ ID NO: 2000344 - RNA, 16 nt, Human
gucuuuuuucacuaca

SEQ ID NO: 2000345 - RNA, 16 nt, Human
gucuugguuccagccu

SEQ ID NO: 2000346 - RNA, 16 nt, Human
gucgggcaugacacga

SEQ ID NO: 2000347 - RNA, 11 nt, Human
gucggcuccag

SEQ ID NO: 2000348 - RNA, 12 nt, Human
gucggcuccagu

SEQ ID NO: 2000349 - RNA, 22 nt, Human
gucggcuccaguccccagaacu

SEQ ID NO: 2000350 - RNA, 21 nt, Human
gucggaaaacaugcuacacac

SEQ ID NO: 2000351 - RNA, 19 nt, Human
guccuuaccagcagagcac

SEQ ID NO: 2000352 - RNA, 18 nt, Human
guccuuaccagcagagca

SEQ ID NO: 2000353 - RNA, 21 nt, Human
guccuuaccagcagagcaccu

SEQ ID NO: 2000354 - RNA, 14 nt, Human
gucccugccaaugg

SEQ ID NO: 2000355 - RNA, 11 nt, Human
gucccugccaa

SEQ ID NO: 2000356 - RNA, 15 nt, Human
gucccugccaaugga

SEQ ID NO: 2000357 - RNA, 18 nt, Human
gucucacuauguugccca

SEQ ID NO: 2000358 - RNA, 22 nt, Human
gucucaccauuuccccagggca

SEQ ID NO: 2000359 - RNA, 23 nt, Human
gucucaccauuuccccagggcac

SEQ ID NO: 2000360 - RNA, 18 nt, Human
gucucaccauuuccccag

SEQ ID NO: 2000361 - RNA, 19 nt, Human
gucucaccauuuccccagg

SEQ ID NO: 2000362 - RNA, 20 nt, Human
gucucaccauuuccccaggg

SEQ ID NO: 2000363 - RNA, 21 nt, Human
gucucaccauuuccccagggc

SEQ ID NO: 2000364 - RNA, 11 nt, Human
gucucacucug

SEQ ID NO: 2000365 - RNA, 19 nt, Human
gucucacuauguugcccag

SEQ ID NO: 2000366 - RNA, 15 nt, Human
gucucaccauuuccc

SEQ ID NO: 2000367 - RNA, 18 nt, Human
gucuaagaaacauuggaa

SEQ ID NO: 2000368 - RNA, 19 nt, Human
gucuaagaaacauuggaag

SEQ ID NO: 2000369 - RNA, 15 nt, Human
gucuaaauuuauuau

SEQ ID NO: 2000370 - RNA, 22 nt, Human
gucuaaccacagcuccuuuucc

SEQ ID NO: 2000371 - RNA, 14 nt, Human
gucuaagaaacauu

SEQ ID NO: 2000372 - RNA, 15 nt, Human
gucuaagaaacauug

SEQ ID NO: 2000373 - RNA, 18 nt, Human
gucgucaaagcugaaaug

SEQ ID NO: 2000374 - RNA, 15 nt, Human
gucguaguuacucuc

SEQ ID NO: 2000375 - RNA, 14 nt, Human
gucucuagugcugu

SEQ ID NO: 2000376 - RNA, 16 nt, Human
gucucuagugcuguga

SEQ ID NO: 2000377 - RNA, 17 nt, Human
gucucuagugcugugaa

SEQ ID NO: 2000378 - RNA, 18 nt, Human
gucucuagugcugugaaa

SEQ ID NO: 2000379 - RNA, 15 nt, Human
gucucacucugucgc

SEQ ID NO: 2000380 - RNA, 16 nt, Human
gucucacucugucgcc

SEQ ID NO: 2000381 - RNA, 18 nt, Human
gucucacucugucgccca

SEQ ID NO: 2000382 - RNA, 19 nt, Human
gucucacucugucgcccag

SEQ ID NO: 2000383 - RNA, 22 nt, Human
gucucacucugucgcccagucu

SEQ ID NO: 2000384 - RNA, 17 nt, Human
gucucuggaauuugaaa

SEQ ID NO: 2000385 - RNA, 13 nt, Human
gucucugagcauu

SEQ ID NO: 2000386 - RNA, 21 nt, Human
gucucuggauuauauuaugaa

SEQ ID NO: 2000387 - RNA, 18 nt, Human
gucucuucuccacuggau

SEQ ID NO: 2000388 - RNA, 13 nt, Human
gucucuucuccuu

SEQ ID NO: 2000389 - RNA, 16 nt, Human
gucucugguuccuccc

SEQ ID NO: 2000390 - RNA, 17 nt, Human
gucucugguuccucccc

SEQ ID NO: 2000391 - RNA, 14 nt, Human
gucucuucuccuua

SEQ ID NO: 2000392 - RNA, 19 nt, Human
guauuuuguuuuugucuua

SEQ ID NO: 2000393 - RNA, 15 nt, Human
gucaagugaaaaagg

SEQ ID NO: 2000394 - RNA, 21 nt, Human
gucaauaauuauuugucucag

SEQ ID NO: 2000395 - RNA, 15 nt, Human
gucaaugcagccccc

SEQ ID NO: 2000396 - RNA, 18 nt, Human
gucaaugaacaagcauuc

SEQ ID NO: 2000397 - RNA, 21 nt, Human
guauuuugugaguuuguuucu

SEQ ID NO: 2000398 - RNA, 23 nt, Human
guauuuuaguggacccugaaaug

SEQ ID NO: 2000399 - RNA, 14 nt, Human
guauuuuacuaaua

SEQ ID NO: 2000400 - RNA, 16 nt, Human
guauuaagauuauaau

SEQ ID NO: 2000401 - RNA, 23 nt, Human
guauuaagauuauaauuguugca

SEQ ID NO: 2000402 - RNA, 13 nt, Human
guauuuuaaucac

SEQ ID NO: 2000403 - RNA, 15 nt, Human
guauuaauucucuuu

SEQ ID NO: 2000404 - RNA, 18 nt, Human
gucaccccggccaccugc

SEQ ID NO: 2000405 - RNA, 17 nt, Human
gucaccccggccaccug

SEQ ID NO: 2000406 - RNA, 22 nt, Human
gucaccccggccaccugcggug

SEQ ID NO: 2000407 - RNA, 14 nt, Human
gucacuaccuggcu

SEQ ID NO: 2000408 - RNA, 16 nt, Human
gucacuaccuggcugc

SEQ ID NO: 2000409 - RNA, 17 nt, Human
gucacuaccuggcugcg

SEQ ID NO: 2000410 - RNA, 16 nt, Human
gucacucuggcagcuc

SEQ ID NO: 2000411 - RNA, 14 nt, Human
gucacucuggcagc

SEQ ID NO: 2000412 - RNA, 13 nt, Human
gucacucuggcag

SEQ ID NO: 2000413 - RNA, 12 nt, Human
gucacucuggca

SEQ ID NO: 2000414 - RNA, 19 nt, Human
gucacucuggcagcucaga

SEQ ID NO: 2000415 - RNA, 17 nt, Human
gucacucuggcagcuca

SEQ ID NO: 2000416 - RNA, 22 nt, Human
gucacucuggcagcucagagag

SEQ ID NO: 2000417 - RNA, 15 nt, Human
gucagagccugcagu

SEQ ID NO: 2000418 - RNA, 16 nt, Human
gucagagccugcaguu

SEQ ID NO: 2000419 - RNA, 14 nt, Human
gucagagccugcag

SEQ ID NO: 2000420 - RNA, 18 nt, Human
gucagauguuuaaaacac

SEQ ID NO: 2000421 - RNA, 19 nt, Human
gucagauguuuaaaacacc

SEQ ID NO: 2000422 - RNA, 22 nt, Human
gucagaugcugugcaaauguua

SEQ ID NO: 2000423 - RNA, 13 nt, Human
gucagauguuuaa

SEQ ID NO: 2000424 - RNA, 15 nt, Human
gucagauguuuaaaa

SEQ ID NO: 2000425 - RNA, 17 nt, Human
gucagauguuuaaaaca

SEQ ID NO: 2000426 - RNA, 20 nt, Human
gucccuaauaaagcugugug

SEQ ID NO: 2000427 - RNA, 18 nt, Human
gucccuaauaaagcugug

SEQ ID NO: 2000428 - RNA, 21 nt, Human
gucccuaccgagucucuucuc

SEQ ID NO: 2000429 - RNA, 22 nt, Human
gucccuaccgagucucuucucc

SEQ ID NO: 2000430 - RNA, 23 nt, Human
gucccuaccgagucucuucucca

SEQ ID NO: 2000431 - RNA, 18 nt, Human
gucccugaggcagguccc

SEQ ID NO: 2000432 - RNA, 16 nt, Human
gucccugaagagaagg

SEQ ID NO: 2000433 - RNA, 22 nt, Human
gucccugaggcagguccccaga

SEQ ID NO: 2000434 - RNA, 16 nt, Human
gucccugcacuugcag

SEQ ID NO: 2000435 - RNA, 19 nt, Human
gucccugcacuugcagacu

SEQ ID NO: 2000436 - RNA, 21 nt, Human
gucccugcacuugcagacucu

SEQ ID NO: 2000437 - RNA, 17 nt, Human
guccccaccgcagacag

SEQ ID NO: 2000438 - RNA, 17 nt, Human
guccccaccaucugcug

SEQ ID NO: 2000439 - RNA, 18 nt, Human
guccccaccaucugcugu

SEQ ID NO: 2000440 - RNA, 20 nt, Human
guccccaccaucugcugucu

SEQ ID NO: 2000441 - RNA, 17 nt, Human
gucccuaauaaagcugu

SEQ ID NO: 2000442 - RNA, 16 nt, Human
gucccuaauaaagcug

SEQ ID NO: 2000443 - RNA, 13 nt, Human
guccccaccaucu

SEQ ID NO: 2000444 - RNA, 15 nt, Human
guccccaccaucugc

SEQ ID NO: 2000445 - RNA, 16 nt, Human
guccccaccaucugcu

SEQ ID NO: 2000446 - RNA, 21 nt, Human
gucccaugugagcugcugcca

SEQ ID NO: 2000447 - RNA, 22 nt, Human
gucccaugugagcugcugccau

SEQ ID NO: 2000448 - RNA, 17 nt, Human
gucccaugugagcugcu

SEQ ID NO: 2000449 - RNA, 18 nt, Human
gucccaugugagcugcug

SEQ ID NO: 2000450 - RNA, 20 nt, Human
gucccaugugagcugcugcc

SEQ ID NO: 2000451 - RNA, 20 nt, Human
gucccaccuuggcugcaggg

SEQ ID NO: 2000452 - RNA, 23 nt, Human
gucccaccuuggcugcagggagu

SEQ ID NO: 2000453 - RNA, 15 nt, Human
gucccaggcugagcc

SEQ ID NO: 2000454 - RNA, 16 nt, Human
gucccaggcugagccu

SEQ ID NO: 2000455 - RNA, 17 nt, Human
gucccaggcugagccuc

SEQ ID NO: 2000456 - RNA, 21 nt, Human
gucccaggcugagccucaguc

SEQ ID NO: 2000457 - RNA, 18 nt, Human
gucccaggcugagccuca

SEQ ID NO: 2000458 - RNA, 19 nt, Human
gucccaggcugagccucag

SEQ ID NO: 2000459 - RNA, 23 nt, Human
gucauuguaauguugugaauaau

SEQ ID NO: 2000460 - RNA, 22 nt, Human
gucauugcuucuucugaggccu

SEQ ID NO: 2000461 - RNA, 12 nt, Human
gucauuguaaug

SEQ ID NO: 2000462 - RNA, 13 nt, Human
gucauuguaaugu

SEQ ID NO: 2000463 - RNA, 21 nt, Human
gucauuguaauguugugaaua

SEQ ID NO: 2000464 - RNA, 12 nt, Human
gucauugcuucu

SEQ ID NO: 2000465 - RNA, 13 nt, Human
gucauugcuucuu

SEQ ID NO: 2000466 - RNA, 14 nt, Human
gucauugcuucuuc

SEQ ID NO: 2000467 - RNA, 15 nt, Human
gucauugcuucuucu

SEQ ID NO: 2000468 - RNA, 16 nt, Human
gucauugcuucuucug

SEQ ID NO: 2000469 - RNA, 21 nt, Human
gucauucgcuacuaugauuua

SEQ ID NO: 2000470 - RNA, 21 nt, Human
gucauucagauaugauucaaa

SEQ ID NO: 2000471 - RNA, 17 nt, Human
gucauuauguuaauauu

SEQ ID NO: 2000472 - RNA, 19 nt, Human
gucauuauguuaauauuuc

SEQ ID NO: 2000473 - RNA, 22 nt, Human
gucagcuguuucuagaguuccu

SEQ ID NO: 2000474 - RNA, 21 nt, Human
gucccaccuuggcugcaggga

SEQ ID NO: 2000475 - RNA, 23 nt, Human
guccaguaagaucacuguuuaga

SEQ ID NO: 2000476 - RNA, 22 nt, Human
guccagguggagguggcauccc

SEQ ID NO: 2000477 - RNA, 14 nt, Human
guccaguaagauca

SEQ ID NO: 2000478 - RNA, 18 nt, Human
guccaguaagaucacugu

SEQ ID NO: 2000479 - RNA, 19 nt, Human
guccaguaagaucacuguu

SEQ ID NO: 2000480 - RNA, 20 nt, Human
guccaguaagaucacuguuu

SEQ ID NO: 2000481 - RNA, 21 nt, Human
guccaguaagaucacuguuua

SEQ ID NO: 2000482 - RNA, 23 nt, Human
guccacccaggagccccgaggcc

SEQ ID NO: 2000483 - RNA, 11 nt, Human
guccacccgcc

SEQ ID NO: 2000484 - RNA, 18 nt, Human
guccacccgccccugccc

SEQ ID NO: 2000485 - RNA, 12 nt, Human
guccacccagga

SEQ ID NO: 2000486 - RNA, 13 nt, Human
guccacccaggag

SEQ ID NO: 2000487 - RNA, 16 nt, Human
guccacgugcguguuu

SEQ ID NO: 2000488 - RNA, 23 nt, Human
guccacgugcguguuuucugacu

SEQ ID NO: 2000489 - RNA, 13 nt, Human
guccacuggggug

SEQ ID NO: 2000490 - RNA, 21 nt, Human
guccacugggguggccugacu

SEQ ID NO: 2000491 - RNA, 13 nt, Human
guccagagcugcu

SEQ ID NO: 2000492 - RNA, 16 nt, Human
guccagagcugcuucc

SEQ ID NO: 2000493 - RNA, 17 nt, Human
guccagagcugcuuccc

SEQ ID NO: 2000494 - RNA, 21 nt, Human
guagccaccugaguuccugag

SEQ ID NO: 2000495 - RNA, 21 nt, Human
guagcauuuguguugaagagg

SEQ ID NO: 2000496 - RNA, 19 nt, Human
guagcccccucuucccugg

SEQ ID NO: 2000497 - RNA, 15 nt, Human
guagcccccucuucc

SEQ ID NO: 2000498 - RNA, 23 nt, Human
guagggcgggaggauguucuggg

SEQ ID NO: 2000499 - RNA, 18 nt, Human
guagggcucugacaaagc

SEQ ID NO: 2000500 - RNA, 21 nt, Human
guagggcgggaggauguucug

SEQ ID NO: 2000501 - RNA, 22 nt, Human
guagggcgggaggauguucugg

SEQ ID NO: 2000502 - RNA, 16 nt, Human
guagggcgggaggaug

SEQ ID NO: 2000503 - RNA, 16 nt, Human
guagcauccuggaaua

SEQ ID NO: 2000504 - RNA, 12 nt, Human
guagcacaggcu

SEQ ID NO: 2000505 - RNA, 14 nt, Human
guagcacaggcuga

SEQ ID NO: 2000506 - RNA, 20 nt, Human
guagcacaggcugagugcag

SEQ ID NO: 2000507 - RNA, 23 nt, Human
guagcaaacccugucaaacauua

SEQ ID NO: 2000508 - RNA, 17 nt, Human
guagcaaaugagacagc

SEQ ID NO: 2000509 - RNA, 22 nt, Human
guagauuccauuuacugcauuc

SEQ ID NO: 2000510 - RNA, 12 nt, Human
guagauuuauuu

SEQ ID NO: 2000511 - RNA, 16 nt, Human
guagauuuauuucauc

SEQ ID NO: 2000512 - RNA, 18 nt, Human
guagcaaacccugucaaa

SEQ ID NO: 2000513 - RNA, 20 nt, Human
guagcaaacccugucaaaca

SEQ ID NO: 2000514 - RNA, 21 nt, Human
guagcaaacccugucaaacau

SEQ ID NO: 2000515 - RNA, 19 nt, Human
guagauuuauuucaucaua

SEQ ID NO: 2000516 - RNA, 21 nt, Human
guagauuuauuucaucauauu

SEQ ID NO: 2000517 - RNA, 12 nt, Human
guagauuugauu

SEQ ID NO: 2000518 - RNA, 16 nt, Human
guagauuugauuuuuu

SEQ ID NO: 2000519 - RNA, 21 nt, Human
guagauauccucugcuuaaaa

SEQ ID NO: 2000520 - RNA, 15 nt, Human
guagagugugccuga

SEQ ID NO: 2000521 - RNA, 14 nt, Human
guagucggcacagc

SEQ ID NO: 2000522 - RNA, 19 nt, Human
guagugaagacuccagaaa

SEQ ID NO: 2000523 - RNA, 17 nt, Human
guauaauucacauugua

SEQ ID NO: 2000524 - RNA, 17 nt, Human
guaguguucagaaaaaa

SEQ ID NO: 2000525 - RNA, 22 nt, Human
guauaauucacccaccagacuu

SEQ ID NO: 2000526 - RNA, 12 nt, Human
guauaauugugu

SEQ ID NO: 2000527 - RNA, 14 nt, Human
guauaauuguguga

SEQ ID NO: 2000528 - RNA, 21 nt, Human
guauaauugugugauauuuca

SEQ ID NO: 2000529 - RNA, 23 nt, Human
guauaauugugugauauuucaga

SEQ ID NO: 2000530 - RNA, 14 nt, Human
guagguugggagaa

SEQ ID NO: 2000531 - RNA, 14 nt, Human
guagucaggugccu

SEQ ID NO: 2000532 - RNA, 22 nt, Human
guaguaugauagguuauuuuga

SEQ ID NO: 2000533 - RNA, 16 nt, Human
guaggguuauaauaau

SEQ ID NO: 2000534 - RNA, 17 nt, Human
guagggugggccuucag

SEQ ID NO: 2000535 - RNA, 22 nt, Human
guagggugggccuucagggagu

SEQ ID NO: 2000536 - RNA, 14 nt, Human
guagggugggccuu

SEQ ID NO: 2000537 - RNA, 15 nt, Human
guagggguggcccga

SEQ ID NO: 2000538 - RNA, 18 nt, Human
guagggguaccacugaau

SEQ ID NO: 2000539 - RNA, 13 nt, Human
guaggggaagaau

SEQ ID NO: 2000540 - RNA, 18 nt, Human
guaggggcuuagaggcau

SEQ ID NO: 2000541 - RNA, 14 nt, Human
guauaguuauguaa

SEQ ID NO: 2000542 - RNA, 15 nt, Human
guauaguuauguaaa

SEQ ID NO: 2000543 - RNA, 13 nt, Human
guauaguauuuga

SEQ ID NO: 2000544 - RNA, 14 nt, Human
guauaguauuugaa

SEQ ID NO: 2000545 - RNA, 15 nt, Human
guauaguauuugaaa

SEQ ID NO: 2000546 - RNA, 16 nt, Human
guauaguauuugaaaa

SEQ ID NO: 2000547 - RNA, 17 nt, Human
guauaguauuugaaaac

SEQ ID NO: 2000548 - RNA, 18 nt, Human
guauaguauuugaaaaca

SEQ ID NO: 2000549 - RNA, 21 nt, Human
guauaguauuugaaaacagaa

SEQ ID NO: 2000550 - RNA, 18 nt, Human
guauaguuauguaaauaa

SEQ ID NO: 2000551 - RNA, 17 nt, Human
guauagaagucuucaug

SEQ ID NO: 2000552 - RNA, 18 nt, Human
guauagaagucuucauga

SEQ ID NO: 2000553 - RNA, 21 nt, Human
guauagaagucuucaugaaau

SEQ ID NO: 2000554 - RNA, 23 nt, Human
guauagaagucuucaugaaaugc

SEQ ID NO: 2000555 - RNA, 16 nt, Human
guauagacaggagaag

SEQ ID NO: 2000556 - RNA, 21 nt, Human
guauagacaggagaagaaaga

SEQ ID NO: 2000557 - RNA, 13 nt, Human
guauaucauucua

SEQ ID NO: 2000558 - RNA, 17 nt, Human
guauaucauucuaaaga

SEQ ID NO: 2000559 - RNA, 19 nt, Human
guauaucauucuaaagaua

SEQ ID NO: 2000560 - RNA, 14 nt, Human
guauauccuuuucu

SEQ ID NO: 2000561 - RNA, 20 nt, Human
guauauccuuuucuguguuu

SEQ ID NO: 2000562 - RNA, 22 nt, Human
guauaugucaagccauaauugu

SEQ ID NO: 2000563 - RNA, 15 nt, Human
guauauggugguaau

SEQ ID NO: 2000564 - RNA, 18 nt, Human
guauauggugguaauaag

SEQ ID NO: 2000565 - RNA, 13 nt, Human
guauaugucucag

SEQ ID NO: 2000566 - RNA, 15 nt, Human
guauaugucucaggu

SEQ ID NO: 2000567 - RNA, 21 nt, Human
guauaugucucaggucccugc

SEQ ID NO: 2000568 - RNA, 16 nt, Human
guauauguugggugca

SEQ ID NO: 2000569 - RNA, 22 nt, Human
guauccuuaucuaguguuugau

SEQ ID NO: 2000570 - RNA, 17 nt, Human
guaucguauucaccuuc

SEQ ID NO: 2000571 - RNA, 19 nt, Human
guaucuggugacuuuccuc

SEQ ID NO: 2000572 - RNA, 12 nt, Human
guaucuggugac

SEQ ID NO: 2000573 - RNA, 12 nt, Human
guaucugagcag

SEQ ID NO: 2000574 - RNA, 22 nt, Human
guaugaaagauggcugugccuc

SEQ ID NO: 2000575 - RNA, 23 nt, Human
guaugaaagauggcugugccucu

SEQ ID NO: 2000576 - RNA, 13 nt, Human
guaugaaaacaug

SEQ ID NO: 2000577 - RNA, 17 nt, Human
guaugaaaacauggaac

SEQ ID NO: 2000578 - RNA, 20 nt, Human
guaugaaaacauggaacagu

SEQ ID NO: 2000579 - RNA, 15 nt, Human
guaucugugaacuga

SEQ ID NO: 2000580 - RNA, 13 nt, Human
guaucugucuuuc

SEQ ID NO: 2000581 - RNA, 15 nt, Human
guaucugucuuucca

SEQ ID NO: 2000582 - RNA, 19 nt, Human
guaucugucuuuccacucu

SEQ ID NO: 2000583 - RNA, 20 nt, Human
guaucugucuuuccacucug

SEQ ID NO: 2000584 - RNA, 22 nt, Human
guaucugucuuuccacucugga

SEQ ID NO: 2000585 - RNA, 23 nt, Human
guaucugucuuuccacucuggau

SEQ ID NO: 2000586 - RNA, 12 nt, Human
guaucugugaac

SEQ ID NO: 2000587 - RNA, 13 nt, Human
guaugaggcauuu

SEQ ID NO: 2000588 - RNA, 15 nt, Human
guaugaggcauuugu

SEQ ID NO: 2000589 - RNA, 15 nt, Human
guaugaaucuauuug

SEQ ID NO: 2000590 - RNA, 18 nt, Human
guaugaauaaagacaccu

SEQ ID NO: 2000591 - RNA, 19 nt, Human
guaugaauaaagacaccua

SEQ ID NO: 2000592 - RNA, 21 nt, Human
guaugaucacggcucacugca

SEQ ID NO: 2000593 - RNA, 13 nt, Human
guauguguuuaga

SEQ ID NO: 2000594 - RNA, 17 nt, Human
guaugaggcauuuguuu

SEQ ID NO: 2000595 - RNA, 20 nt, Human
guaugaggcauuuguuugaa

SEQ ID NO: 2000596 - RNA, 20 nt, Human
guaugaucacggcucacugc

SEQ ID NO: 2000597 - RNA, 24 nt, Human
guaugauagguuauuuugauguaa

SEQ ID NO: 2000598 - RNA, 18 nt, Human
guauguuuuucaguucaa

SEQ ID NO: 2000599 - RNA, 20 nt, Human
guauguuuuucaguucaaag

SEQ ID NO: 2000600 - RNA, 21 nt, Human
guauguuuuucaguucaaagu

SEQ ID NO: 2000601 - RNA, 15 nt, Human
guauuaaauuacauu

SEQ ID NO: 2000602 - RNA, 18 nt, Human
guauuaaauuacauuugu

SEQ ID NO: 2000603 - RNA, 21 nt, Human
guauuaaauuacauuuguaau

SEQ ID NO: 2000604 - RNA, 22 nt, Human
guauuaaauuacauuuguaauu

SEQ ID NO: 2000605 - RNA, 17 nt, Human
guauguugaagccuuug

SEQ ID NO: 2000606 - RNA, 18 nt, Human
guauguguuuagaauuga

SEQ ID NO: 2000607 - RNA, 22 nt, Human
guauguguuuagaauugaaggu

SEQ ID NO: 2000608 - RNA, 13 nt, Human
guauguuuuucag

SEQ ID NO: 2000609 - RNA, 14 nt, Human
guauguuuuucagu

SEQ ID NO: 2000610 - RNA, 21 nt, Human
uuuuaaugcuaaucuugugaa

SEQ ID NO: 2000611 - RNA, 19 nt, Human
uuuuaauguaauugauugu

SEQ ID NO: 2000612 - RNA, 21 nt, Human
uuuuaaucucuaacaguggac

SEQ ID NO: 2000613 - RNA, 18 nt, Human
uuuuaaucuacugcauuu

SEQ ID NO: 2000614 - RNA, 16 nt, Human
uuuuaaugauuguuua

SEQ ID NO: 2000615 - RNA, 17 nt, Human
uuuuaaugauuguuuaa

SEQ ID NO: 2000616 - RNA, 16 nt, Human
uuuuaacaagaagcaa

SEQ ID NO: 2000617 - RNA, 14 nt, Human
uuuuaaagaauuuc

SEQ ID NO: 2000618 - RNA, 15 nt, Human
uuuuaaagacuugca

SEQ ID NO: 2000619 - RNA, 11 nt, Human
uuuuaaaugca

SEQ ID NO: 2000620 - RNA, 12 nt, Human
uuuuaaaugcac

SEQ ID NO: 2000621 - RNA, 21 nt, Human
uuuuaaaugcaccuggaauau

SEQ ID NO: 2000622 - RNA, 14 nt, Human
uuuuaaaugcaguu

SEQ ID NO: 2000623 - RNA, 20 nt, Human
uuuuaaaugcaguuacaaau

SEQ ID NO: 2000624 - RNA, 20 nt, Human
uuuuaaaugugugagugcau

SEQ ID NO: 2000625 - RNA, 22 nt, Human
uuuuaaaugugugagugcaugu

SEQ ID NO: 2000626 - RNA, 19 nt, Human
uuuuaaauuauguuuuacu

SEQ ID NO: 2000627 - RNA, 20 nt, Human
uuuuaaaagaugcaauguag

SEQ ID NO: 2000628 - RNA, 13 nt, Human
uuuuaaaagccuu

SEQ ID NO: 2000629 - RNA, 18 nt, Human
uuuuaaaagccuuggccu

SEQ ID NO: 2000630 - RNA, 23 nt, Human
uuuuaaaagccuuggccucagag

SEQ ID NO: 2000631 - RNA, 16 nt, Human
uuuguugaaagaaagu

SEQ ID NO: 2000632 - RNA, 15 nt, Human
uuuguugaacuguua

SEQ ID NO: 2000633 - RNA, 17 nt, Human
uuuuaaagaaugcucuu

SEQ ID NO: 2000634 - RNA, 18 nt, Human
uuuuaaagacuuuuauga

SEQ ID NO: 2000635 - RNA, 12 nt, Human
uuuguaugcaag

SEQ ID NO: 2000636 - RNA, 21 nt, Human
uuuguaugcaagcaguuucaa

SEQ ID NO: 2000637 - RNA, 23 nt, Human
uuuguaugaaaacauggaacagu

SEQ ID NO: 2000638 - RNA, 15 nt, Human
uuuguaugaaaacau

SEQ ID NO: 2000639 - RNA, 23 nt, Human
uuuguaugcaagcaguuucaaua

SEQ ID NO: 2000640 - RNA, 21 nt, Human
uuuguucuggcucuuccaggc

SEQ ID NO: 2000641 - RNA, 14 nt, Human
uuuguaaaaaugua

SEQ ID NO: 2000642 - RNA, 14 nt, Human
uuuguauaguuaug

SEQ ID NO: 2000643 - RNA, 16 nt, Human
uuuguauaguuaugua

SEQ ID NO: 2000644 - RNA, 17 nt, Human
uuuguauaguuauguaa

SEQ ID NO: 2000645 - RNA, 19 nt, Human
uuuguauaguuauguaaau

SEQ ID NO: 2000646 - RNA, 21 nt, Human
uuuguauaguuauguaaauaa

SEQ ID NO: 2000647 - RNA, 22 nt, Human
uuuguauaguuauguaaauaau

SEQ ID NO: 2000648 - RNA, 13 nt, Human
uuuguaugaaaac

SEQ ID NO: 2000649 - RNA, 18 nt, Human
uuuguauauugguuuuau

SEQ ID NO: 2000650 - RNA, 20 nt, Human
uuuguauauugguuuuauga

SEQ ID NO: 2000651 - RNA, 19 nt, Human
uuugcuuuuuaguuuugcu

SEQ ID NO: 2000652 - RNA, 21 nt, Human
uuuggaaaacgauuuaauuua

SEQ ID NO: 2000653 - RNA, 14 nt, Human
uuuggaauuuugug

SEQ ID NO: 2000654 - RNA, 15 nt, Human
uuugcuuugugauuu

SEQ ID NO: 2000655 - RNA, 16 nt, Human
uuugcuuugugauuuu

SEQ ID NO: 2000656 - RNA, 22 nt, Human
uuugaauguaugcuucauacag

SEQ ID NO: 2000657 - RNA, 17 nt, Human
uuugaauguaugcuuca

SEQ ID NO: 2000658 - RNA, 13 nt, Human
uuugaaucuuuaa

SEQ ID NO: 2000659 - RNA, 15 nt, Human
uuugaaucuuuaauu

SEQ ID NO: 2000660 - RNA, 19 nt, Human
uuugaaucuuuaauuaaaa

SEQ ID NO: 2000661 - RNA, 15 nt, Human
uuugcaucugaaaau

SEQ ID NO: 2000662 - RNA, 11 nt, Human
uuugcauaucc

SEQ ID NO: 2000663 - RNA, 12 nt, Human
uuugguuuuguu

SEQ ID NO: 2000664 - RNA, 19 nt, Human
uuugguuuucacauuggaa

SEQ ID NO: 2000665 - RNA, 16 nt, Human
uuugguuugguuuuua

SEQ ID NO: 2000666 - RNA, 18 nt, Human
uuugguuuuaaaauacug

SEQ ID NO: 2000667 - RNA, 22 nt, Human
uuugguuuuaaaauacuguaga

SEQ ID NO: 2000668 - RNA, 23 nt, Human
uuugguuuuaaaauacuguagau

SEQ ID NO: 2000669 - RNA, 18 nt, Human
uuuggauuauucuuucuc

SEQ ID NO: 2000670 - RNA, 21 nt, Human
uuuggaauuuugugcccccau

SEQ ID NO: 2000671 - RNA, 13 nt, Human
uuuggaauuagaa

SEQ ID NO: 2000672 - RNA, 22 nt, Human
uuuggagagaaauauuuuaauu

SEQ ID NO: 2000673 - RNA, 20 nt, Human
uuuggagucagacagaugug

SEQ ID NO: 2000674 - RNA, 15 nt, Human
uuucucugauacaga

SEQ ID NO: 2000675 - RNA, 16 nt, Human
uuucucugauacagaa

SEQ ID NO: 2000676 - RNA, 17 nt, Human
uuucucugauacagaaa

SEQ ID NO: 2000677 - RNA, 18 nt, Human
uuucucugauacagaaaa

SEQ ID NO: 2000678 - RNA, 21 nt, Human
uuucugaaauuuccugggagc

SEQ ID NO: 2000679 - RNA, 19 nt, Human
uuucugaaauuuccuggga

SEQ ID NO: 2000680 - RNA, 17 nt, Human
uuucuagaguuccuacc

SEQ ID NO: 2000681 - RNA, 20 nt, Human
uuucuguucuuucuggcuau

SEQ ID NO: 2000682 - RNA, 20 nt, Human
uuucuaaaggcuaccuuugu

SEQ ID NO: 2000683 - RNA, 21 nt, Human
uuucuaaaggcuaccuuugua

SEQ ID NO: 2000684 - RNA, 14 nt, Human
uuucuaaaguaaaa

SEQ ID NO: 2000685 - RNA, 12 nt, Human
uuucuaaaguaa

SEQ ID NO: 2000686 - RNA, 23 nt, Human
uuucuacucgaguuacagacaaa

SEQ ID NO: 2000687 - RNA, 18 nt, Human
uuucuagacacuuuuucu

SEQ ID NO: 2000688 - RNA, 17 nt, Human
uuucuagaaagaauaaa

SEQ ID NO: 2000689 - RNA, 20 nt, Human
uuuccugauagcauaugaca

SEQ ID NO: 2000690 - RNA, 16 nt, Human
uuuccugaggcugggc

SEQ ID NO: 2000691 - RNA, 12 nt, Human
uuuccugcccug

SEQ ID NO: 2000692 - RNA, 13 nt, Human
uuuccugcccugg

SEQ ID NO: 2000693 - RNA, 14 nt, Human
uuaccacagacaua

SEQ ID NO: 2000694 - RNA, 17 nt, Human
uuaccacagacauacua

SEQ ID NO: 2000695 - RNA, 12 nt, Human
uuucuuaaaaag

SEQ ID NO: 2000696 - RNA, 11 nt, Human
uuucuucaaaa

SEQ ID NO: 2000697 - RNA, 18 nt, Human
uuucuuagggaaggauac

SEQ ID NO: 2000698 - RNA, 23 nt, Human
uuucuuagggaaggauacaaaag

SEQ ID NO: 2000699 - RNA, 12 nt, Human
uuucuucucccu

SEQ ID NO: 2000700 - RNA, 14 nt, Human
uuucuuccucugcu

SEQ ID NO: 2000701 - RNA, 16 nt, Human
uuucuuccucugcuga

SEQ ID NO: 2000702 - RNA, 13 nt, Human
uuucuucucccuc

SEQ ID NO: 2000703 - RNA, 12 nt, Human
uuucuucaaaau

SEQ ID NO: 2000704 - RNA, 22 nt, Human
uuucuucaaaauauaaaaugcc

SEQ ID NO: 2000705 - RNA, 11 nt, Human
uuucuuccucu

SEQ ID NO: 2000706 - RNA, 13 nt, Human
uuucuuccucugc

SEQ ID NO: 2000707 - RNA, 19 nt, Human
uuucuugauaauuuuccuu

SEQ ID NO: 2000708 - RNA, 21 nt, Human
uuucuugauaauuuuccuuua

SEQ ID NO: 2000709 - RNA, 23 nt, Human
uuucuucuucaaaccuuugugug

SEQ ID NO: 2000710 - RNA, 14 nt, Human
uuucuugauaauuu

SEQ ID NO: 2000711 - RNA, 14 nt, Human
uuugaacucuucaa

SEQ ID NO: 2000712 - RNA, 15 nt, Human
uuugaacugauaaag

SEQ ID NO: 2000713 - RNA, 17 nt, Human
uuugaacucuucucauu

SEQ ID NO: 2000714 - RNA, 22 nt, Human
uuugaacucuucucauuacuug

SEQ ID NO: 2000715 - RNA, 17 nt, Human
uuugaacugauaaagau

SEQ ID NO: 2000716 - RNA, 19 nt, Human
uuugaacugauaaagauga

SEQ ID NO: 2000717 - RNA, 22 nt, Human
uuugaagaugccgcauuuggau

SEQ ID NO: 2000718 - RNA, 18 nt, Human
uuugaagagugaaauacc

SEQ ID NO: 2000719 - RNA, 16 nt, Human
uuugaagauucuaugu

SEQ ID NO: 2000720 - RNA, 18 nt, Human
uuugaaucaucaagucuu

SEQ ID NO: 2000721 - RNA, 23 nt, Human
uuuuugaaaucaguaaacacugu

SEQ ID NO: 2000722 - RNA, 17 nt, Human
uuuuugaaaugcugaaa

SEQ ID NO: 2000723 - RNA, 20 nt, Human
uuuuugaaaugcugaaaauu

SEQ ID NO: 2000724 - RNA, 14 nt, Human
uuuuuuguaugaaa

SEQ ID NO: 2000725 - RNA, 13 nt, Human
uuuuuuguaugaa

SEQ ID NO: 2000726 - RNA, 19 nt, Human
uuuuugaacucuucucauu

SEQ ID NO: 2000727 - RNA, 20 nt, Human
uuuuugaacucuucucauua

SEQ ID NO: 2000728 - RNA, 23 nt, Human
uuuuucucugauacagaaaaguu

SEQ ID NO: 2000729 - RNA, 19 nt, Human
uuuuuccuucagugccuua

SEQ ID NO: 2000730 - RNA, 20 nt, Human
uuuuuccuuacauaaacauc

SEQ ID NO: 2000731 - RNA, 11 nt, Human
uuuuuccuuuu

SEQ ID NO: 2000732 - RNA, 11 nt, Human
uuuuuaaaugc

SEQ ID NO: 2000733 - RNA, 15 nt, Human
uuuuuccuuacauaa

SEQ ID NO: 2000734 - RNA, 19 nt, Human
uuuuuccuuacauaaacau

SEQ ID NO: 2000735 - RNA, 22 nt, Human
uuuuuccuaugaccauaaaauu

SEQ ID NO: 2000736 - RNA, 19 nt, Human
uuuuuccugugaacacaua

SEQ ID NO: 2000737 - RNA, 11 nt, Human
uuuuuccuuca

SEQ ID NO: 2000738 - RNA, 13 nt, Human
uuuuuaagugaaa

SEQ ID NO: 2000739 - RNA, 20 nt, Human
uuuuuaagugaaaauauagc

SEQ ID NO: 2000740 - RNA, 15 nt, Human
uuuuuaagugaaauu

SEQ ID NO: 2000741 - RNA, 14 nt, Human
uuuuuaagugaaau

SEQ ID NO: 2000742 - RNA, 18 nt, Human
uuuuuaaagacuuuuaug

SEQ ID NO: 2000743 - RNA, 13 nt, Human
uuuuuaaagacuu

SEQ ID NO: 2000744 - RNA, 12 nt, Human
uuuuuaaagacu

SEQ ID NO: 2000745 - RNA, 12 nt, Human
uuuuuaaaaucu

SEQ ID NO: 2000746 - RNA, 13 nt, Human
uuuuuaaaaucuu

SEQ ID NO: 2000747 - RNA, 14 nt, Human
uuuuuaaaaucuua

SEQ ID NO: 2000748 - RNA, 16 nt, Human
uuuuuaaacaauaaag

SEQ ID NO: 2000749 - RNA, 19 nt, Human
uuuuuaaaaucuuauuaaa

SEQ ID NO: 2000750 - RNA, 15 nt, Human
uuuuuaaaaauaaag

SEQ ID NO: 2000751 - RNA, 13 nt, Human
uuuuuaaaaaacu

SEQ ID NO: 2000752 - RNA, 14 nt, Human
uuuuuaaaaaacuu

SEQ ID NO: 2000753 - RNA, 16 nt, Human
uuuugucauauaagau

SEQ ID NO: 2000754 - RNA, 22 nt, Human
uuuuguauucaauuaaagaaau

SEQ ID NO: 2000755 - RNA, 20 nt, Human
uuuugguugaauaaacuaga

SEQ ID NO: 2000756 - RNA, 22 nt, Human
uuuugguucauuuucagauuca

SEQ ID NO: 2000757 - RNA, 15 nt, Human
uuuugguugaauaaa

SEQ ID NO: 2000758 - RNA, 16 nt, Human
uuuuguaaagauuucu

SEQ ID NO: 2000759 - RNA, 20 nt, Human
uuuuguaaagauuucuguuc

SEQ ID NO: 2000760 - RNA, 17 nt, Human
uuuuguaauaauaaaga

SEQ ID NO: 2000761 - RNA, 19 nt, Human
uuuuguaauaauaaagaau

SEQ ID NO: 2000762 - RNA, 14 nt, Human
uuuuguaaacuuug

SEQ ID NO: 2000763 - RNA, 15 nt, Human
uuuuguaaacuuuga

SEQ ID NO: 2000764 - RNA, 17 nt, Human
uuuuguaaacuuugaaa

SEQ ID NO: 2000765 - RNA, 19 nt, Human
uuuuguaaacuuugaaaua

SEQ ID NO: 2000766 - RNA, 11 nt, Human
uuuuguaaaga

SEQ ID NO: 2000767 - RNA, 16 nt, Human
uuuuguaaagaaaaau

SEQ ID NO: 2000768 - RNA, 17 nt, Human
uuuuguaaagaaaaaua

SEQ ID NO: 2000769 - RNA, 18 nt, Human
uuuuguaaagaaaaauau

SEQ ID NO: 2000770 - RNA, 13 nt, Human
uuuuguaaagauu

SEQ ID NO: 2000771 - RNA, 14 nt, Human
uuuuguaaagauuu

SEQ ID NO: 2000772 - RNA, 19 nt, Human
uuuuguagagccagggucu

SEQ ID NO: 2000773 - RNA, 14 nt, Human
uuuuguauauuggu

SEQ ID NO: 2000774 - RNA, 13 nt, Human
uuuuguaugcaag

SEQ ID NO: 2000775 - RNA, 23 nt, Human
uuuuguaugcaagcaguuucaau

SEQ ID NO: 2000776 - RNA, 20 nt, Human
uuuuggauuuggagagaaau

SEQ ID NO: 2000777 - RNA, 16 nt, Human
uuuuggccaugaaagc

SEQ ID NO: 2000778 - RNA, 20 nt, Human
uuuugacaaggggcaguggu

SEQ ID NO: 2000779 - RNA, 14 nt, Human
uuuugaaucuuuaa

SEQ ID NO: 2000780 - RNA, 16 nt, Human
uuuugaaucuuuaauu

SEQ ID NO: 2000781 - RNA, 20 nt, Human
uuuucuuuuguuuuuugaag

SEQ ID NO: 2000782 - RNA, 14 nt, Human
uuuuggcugcugaa

SEQ ID NO: 2000783 - RNA, 21 nt, Human
uuuugggaaaugcugauuuaa

SEQ ID NO: 2000784 - RNA, 18 nt, Human
uuuugggaaguuaaaggg

SEQ ID NO: 2000785 - RNA, 15 nt, Human
uuuuggucuguguga

SEQ ID NO: 2000786 - RNA, 20 nt, Human
uuuugguccacuuuuccagu

SEQ ID NO: 2000787 - RNA, 21 nt, Human
uuuugguccacuuuuccagua

SEQ ID NO: 2000788 - RNA, 18 nt, Human
uuuuggggugugaccuca

SEQ ID NO: 2000789 - RNA, 18 nt, Human
uuuucuaaaguaaaaaca

SEQ ID NO: 2000790 - RNA, 12 nt, Human
uuuucuaaagua

SEQ ID NO: 2000791 - RNA, 19 nt, Human
uuuuccuuacauaaacauc

SEQ ID NO: 2000792 - RNA, 17 nt, Human
uuuuccuucagauauuu

SEQ ID NO: 2000793 - RNA, 20 nt, Human
uuuucuuugccaucucugcu

SEQ ID NO: 2000794 - RNA, 12 nt, Human
uuuucuuucagu

SEQ ID NO: 2000795 - RNA, 15 nt, Human
uuuucuuuuaauuuu

SEQ ID NO: 2000796 - RNA, 19 nt, Human
uuuuaauuaacuuuggauu

SEQ ID NO: 2000797 - RNA, 24 nt, Human
uuuuaauugaucaguuuucaugug

SEQ ID NO: 2000798 - RNA, 12 nt, Human
uuuuaauuguau

SEQ ID NO: 2000799 - RNA, 13 nt, Human
uuuuaauuguauu

SEQ ID NO: 2000800 - RNA, 14 nt, Human
uuuuaauuguauuu

SEQ ID NO: 2000801 - RNA, 22 nt, Human
uuuuaauuguauuuuuguuguu

SEQ ID NO: 2000802 - RNA, 12 nt, Human
uuuuccuuacau

SEQ ID NO: 2000803 - RNA, 14 nt, Human
uuuuccuuacauaa

SEQ ID NO: 2000804 - RNA, 15 nt, Human
uuuuccuuacauaaa

SEQ ID NO: 2000805 - RNA, 20 nt, Human
uuuuccugggacaucuucug

SEQ ID NO: 2000806 - RNA, 13 nt, Human
uuuuccuguucua

SEQ ID NO: 2000807 - RNA, 24 nt, Human
gcccaccuggccucugcacucccc

SEQ ID NO: 2000808 - RNA, 21 nt, Human
gcccaccuggccucugcacuc

SEQ ID NO: 2000809 - RNA, 20 nt, Human
gcccaccuggccucugcacu

SEQ ID NO: 2000810 - RNA, 17 nt, Human
gcccaccuggccucugc

SEQ ID NO: 2000811 - RNA, 16 nt, Human
gcccaccuggccucug

SEQ ID NO: 2000812 - RNA, 15 nt, Human
gcccaccuggccucu

SEQ ID NO: 2000813 - RNA, 16 nt, Human
gcccaccccauggccg

SEQ ID NO: 2000814 - RNA, 17 nt, Human
gcccagaaugaggcugc

SEQ ID NO: 2000815 - RNA, 13 nt, Human
gcccagaauacug

SEQ ID NO: 2000816 - RNA, 16 nt, Human
gcccagaaugaggcug

SEQ ID NO: 2000817 - RNA, 14 nt, Human
gcccacuucugcca

SEQ ID NO: 2000818 - RNA, 13 nt, Human
gcccaccuuggcu

SEQ ID NO: 2000819 - RNA, 15 nt, Human
gcccaccuuggcuca

SEQ ID NO: 2000820 - RNA, 16 nt, Human
gcccaccuuggcucaa

SEQ ID NO: 2000821 - RNA, 17 nt, Human
gcccaccuuggcucaag

SEQ ID NO: 2000822 - RNA, 20 nt, Human
gcccacauagugaugguucc

SEQ ID NO: 2000823 - RNA, 21 nt, Human
gcccacauccggggccagcuc

SEQ ID NO: 2000824 - RNA, 19 nt, Human
gcccacccaagcaggaggc

SEQ ID NO: 2000825 - RNA, 21 nt, Human
gcccaccaggccccccuguca

SEQ ID NO: 2000826 - RNA, 22 nt, Human
gcccacauccggggccagcucc

SEQ ID NO: 2000827 - RNA, 23 nt, Human
gcccacauccggggccagcuccg

SEQ ID NO: 2000828 - RNA, 24 nt, Human
gccaugcuccuggcccacugcauc

SEQ ID NO: 2000829 - RNA, 15 nt, Human
gccaugggccuccug

SEQ ID NO: 2000830 - RNA, 16 nt, Human
gccaugggccuccugu

SEQ ID NO: 2000831 - RNA, 21 nt, Human
gcccaagaauagaugcugacu

SEQ ID NO: 2000832 - RNA, 22 nt, Human
gcccaagaauagaugcugacug

SEQ ID NO: 2000833 - RNA, 24 nt, Human
gcccaaccugcucuccucuugcca

SEQ ID NO: 2000834 - RNA, 17 nt, Human
gccaggcugggucgccc

SEQ ID NO: 2000835 - RNA, 23 nt, Human
gccaggcugggucgcccuggacu

SEQ ID NO: 2000836 - RNA, 13 nt, Human
gccaggcuggucu

SEQ ID NO: 2000837 - RNA, 23 nt, Human
gccaguaaaugggggugcauuug

SEQ ID NO: 2000838 - RNA, 22 nt, Human
gccaguaacacaggccacccug

SEQ ID NO: 2000839 - RNA, 15 nt, Human
gccaggcuggucuca

SEQ ID NO: 2000840 - RNA, 16 nt, Human
gccagucccugaggca

SEQ ID NO: 2000841 - RNA, 22 nt, Human
gccagucccugaggcagguccc

SEQ ID NO: 2000842 - RNA, 21 nt, Human
gccagucaccccggccaccug

SEQ ID NO: 2000843 - RNA, 12 nt, Human
gccaugaacugu

SEQ ID NO: 2000844 - RNA, 20 nt, Human
gccaugaggaacaaggcaag

SEQ ID NO: 2000845 - RNA, 16 nt, Human
gccaugccaggaaccu

SEQ ID NO: 2000846 - RNA, 18 nt, Human
gccaugccaggaaccugu

SEQ ID NO: 2000847 - RNA, 14 nt, Human
gccaugcuccuggc

SEQ ID NO: 2000848 - RNA, 17 nt, Human
gccaucauguuuacaga

SEQ ID NO: 2000849 - RNA, 21 nt, Human
gccaucauguuuacagaggac

SEQ ID NO: 2000850 - RNA, 14 nt, Human
gccauccagguuca

SEQ ID NO: 2000851 - RNA, 13 nt, Human
gccaucauuucug

SEQ ID NO: 2000852 - RNA, 20 nt, Human
gccaucuggagagcccagag

SEQ ID NO: 2000853 - RNA, 13 nt, Human
gccaucuggagag

SEQ ID NO: 2000854 - RNA, 14 nt, Human
gccaucuggagagc

SEQ ID NO: 2000855 - RNA, 19 nt, Human
gccaucuggagagcccaga

SEQ ID NO: 2000856 - RNA, 24 nt, Human
gccaaggccaaaggaagcacaugc

SEQ ID NO: 2000857 - RNA, 21 nt, Human
gccacuccagaccccuggcuu

SEQ ID NO: 2000858 - RNA, 20 nt, Human
gccacuccagaccccuggcu

SEQ ID NO: 2000859 - RNA, 20 nt, Human
gccaaggccaaaggaagcac

SEQ ID NO: 2000860 - RNA, 20 nt, Human
gccacugcaccgggccacag

SEQ ID NO: 2000861 - RNA, 21 nt, Human
gccacugcaccgggccacaga

SEQ ID NO: 2000862 - RNA, 22 nt, Human
gccacuccagaccccuggcuuu

SEQ ID NO: 2000863 - RNA, 13 nt, Human
gccacuccccagc

SEQ ID NO: 2000864 - RNA, 22 nt, Human
gccagagacacaagccuucggc

SEQ ID NO: 2000865 - RNA, 19 nt, Human
gccacugcaccgggccaca

SEQ ID NO: 2000866 - RNA, 21 nt, Human
gccagagacacaagccuucgg

SEQ ID NO: 2000867 - RNA, 22 nt, Human
gccacugcaccgggccacagag

SEQ ID NO: 2000868 - RNA, 19 nt, Human
gccagauucuuuccugagg

SEQ ID NO: 2000869 - RNA, 22 nt, Human
gccagccgagauagccaaggcc

SEQ ID NO: 2000870 - RNA, 13 nt, Human
gccagauuucacu

SEQ ID NO: 2000871 - RNA, 24 nt, Human
gccagauucuuuccugaggcuggg

SEQ ID NO: 2000872 - RNA, 20 nt, Human
gccagauucuuuccugaggc

SEQ ID NO: 2000873 - RNA, 15 nt, Human
gccagaugcaccagc

SEQ ID NO: 2000874 - RNA, 14 nt, Human
gccagaugcaccag

SEQ ID NO: 2000875 - RNA, 17 nt, Human
gccagagggagugacag

SEQ ID NO: 2000876 - RNA, 21 nt, Human
gccagcucuuccuagcuggag

SEQ ID NO: 2000877 - RNA, 13 nt, Human
gccagcucuuccu

SEQ ID NO: 2000878 - RNA, 17 nt, Human
gccagcucuuccuagcu

SEQ ID NO: 2000879 - RNA, 19 nt, Human
gccagcucuuccuagcugg

SEQ ID NO: 2000880 - RNA, 12 nt, Human
gccagccuggcu

SEQ ID NO: 2000881 - RNA, 13 nt, Human
gccagccuggcug

SEQ ID NO: 2000882 - RNA, 14 nt, Human
gccagccuggcugg

SEQ ID NO: 2000883 - RNA, 17 nt, Human
gccagccuggcugggac

SEQ ID NO: 2000884 - RNA, 14 nt, Human
gccaggaagccagc

SEQ ID NO: 2000885 - RNA, 13 nt, Human
gccaggaagccag

SEQ ID NO: 2000886 - RNA, 12 nt, Human
gccaggaagcca

SEQ ID NO: 2000887 - RNA, 20 nt, Human
gccagcugcuugggcuucau

SEQ ID NO: 2000888 - RNA, 14 nt, Human
gccagcugccuagg

SEQ ID NO: 2000889 - RNA, 18 nt, Human
gccagcugcuugggcuuc

SEQ ID NO: 2000890 - RNA, 17 nt, Human
gccagcugcuugggcuu

SEQ ID NO: 2000891 - RNA, 16 nt, Human
gccaggagccuccugc

SEQ ID NO: 2000892 - RNA, 14 nt, Human
gccaggagccuccu

SEQ ID NO: 2000893 - RNA, 20 nt, Human
gccaggagccuccugcccuu

SEQ ID NO: 2000894 - RNA, 19 nt, Human
gccaggagccuccugcccu

SEQ ID NO: 2000895 - RNA, 22 nt, Human
gccaggcgcuagcacagcuccc

SEQ ID NO: 2000896 - RNA, 17 nt, Human
gccaggaaguagcacag

SEQ ID NO: 2000897 - RNA, 18 nt, Human
gccaggaaguagcacagg

SEQ ID NO: 2000898 - RNA, 19 nt, Human
gccaggaaguagcacaggc

SEQ ID NO: 2000899 - RNA, 20 nt, Human
gccaggaaguagcacaggcu

SEQ ID NO: 2000900 - RNA, 21 nt, Human
gccaggaaguagcacaggcug

SEQ ID NO: 2000901 - RNA, 22 nt, Human
gccaggaaguagcacaggcuga

SEQ ID NO: 2000902 - RNA, 15 nt, Human
gccaggaagccagca

SEQ ID NO: 2000903 - RNA, 20 nt, Human
gcccaggcuggagugcagug

SEQ ID NO: 2000904 - RNA, 19 nt, Human
gcccaggcuggagugcagu

SEQ ID NO: 2000905 - RNA, 12 nt, Human
gcccaggcuggc

SEQ ID NO: 2000906 - RNA, 21 nt, Human
gcccagagaggguggugaccu

SEQ ID NO: 2000907 - RNA, 15 nt, Human
gcccagagagggugg

SEQ ID NO: 2000908 - RNA, 17 nt, Human
gcccagaauacugaugg

SEQ ID NO: 2000909 - RNA, 23 nt, Human
gcccaggccccugccacccuggg

SEQ ID NO: 2000910 - RNA, 13 nt, Human
gcccaggccuccu

SEQ ID NO: 2000911 - RNA, 15 nt, Human
gcccaggcuggagug

SEQ ID NO: 2000912 - RNA, 20 nt, Human
gcccaggcuggagugcaaug

SEQ ID NO: 2000913 - RNA, 20 nt, Human
gcccagggggcuuccugagg

SEQ ID NO: 2000914 - RNA, 21 nt, Human
gcccagggugagguggcaugg

SEQ ID NO: 2000915 - RNA, 22 nt, Human
gccccacucucagaggccccaa

SEQ ID NO: 2000916 - RNA, 16 nt, Human
gccccaccugcagcuc

SEQ ID NO: 2000917 - RNA, 17 nt, Human
gccccaccugcagcucc

SEQ ID NO: 2000918 - RNA, 18 nt, Human
gccccaccugcagcuccc

SEQ ID NO: 2000919 - RNA, 14 nt, Human
gccccaccuggccc

SEQ ID NO: 2000920 - RNA, 15 nt, Human
gccccaccuggcccu

SEQ ID NO: 2000921 - RNA, 18 nt, Human
gccccaccuggcccucuc

SEQ ID NO: 2000922 - RNA, 12 nt, Human
gccccacucuca

SEQ ID NO: 2000923 - RNA, 13 nt, Human
gccccacucucag

SEQ ID NO: 2000924 - RNA, 14 nt, Human
gccccacucucaga

SEQ ID NO: 2000925 - RNA, 16 nt, Human
gccccacucucagagg

SEQ ID NO: 2000926 - RNA, 17 nt, Human
gccccacucucagaggc

SEQ ID NO: 2000927 - RNA, 18 nt, Human
gccccacucucagaggcc

SEQ ID NO: 2000928 - RNA, 19 nt, Human
gccccacucucagaggccc

SEQ ID NO: 2000929 - RNA, 21 nt, Human
gccccacucucagaggcccca

SEQ ID NO: 2000930 - RNA, 13 nt, Human
gccccagugccca

SEQ ID NO: 2000931 - RNA, 14 nt, Human
gccccagugcccac

SEQ ID NO: 2000932 - RNA, 18 nt, Human
gccccaucccaaacccuu

SEQ ID NO: 2000933 - RNA, 19 nt, Human
gccccaguuguauuuauuu

SEQ ID NO: 2000934 - RNA, 21 nt, Human
gccccauaauuuuuuuuuucc

SEQ ID NO: 2000935 - RNA, 12 nt, Human
gccccagugccc

SEQ ID NO: 2000936 - RNA, 22 nt, Human
gccccauccucuguacagagcc

SEQ ID NO: 2000937 - RNA, 14 nt, Human
gccccauccucugu

SEQ ID NO: 2000938 - RNA, 13 nt, Human
gccccauccucug

SEQ ID NO: 2000939 - RNA, 16 nt, Human
gcccccaaacccccau

SEQ ID NO: 2000940 - RNA, 15 nt, Human
gccccauucugccug

SEQ ID NO: 2000941 - RNA, 14 nt, Human
gccccauucugccu

SEQ ID NO: 2000942 - RNA, 13 nt, Human
gccccauuaacug

SEQ ID NO: 2000943 - RNA, 13 nt, Human
gcccccugccugc

SEQ ID NO: 2000944 - RNA, 16 nt, Human
gcccccugccugcccu

SEQ ID NO: 2000945 - RNA, 16 nt, Human
gccccugagaucucug

SEQ ID NO: 2000946 - RNA, 20 nt, Human
gccccugagaucucugcagg

SEQ ID NO: 2000947 - RNA, 17 nt, Human
gccccuguucuggcaga

SEQ ID NO: 2000948 - RNA, 12 nt, Human
gcccgacagccu

SEQ ID NO: 2000949 - RNA, 14 nt, Human
gcccgacagccugg

SEQ ID NO: 2000950 - RNA, 15 nt, Human
gcccgacagccuggc

SEQ ID NO: 2000951 - RNA, 24 nt, Human
gcccgaagcaugaacagugcaccu

SEQ ID NO: 2000952 - RNA, 14 nt, Human
gcccgauccucccc

SEQ ID NO: 2000953 - RNA, 17 nt, Human
gcccgauccuccccugg

SEQ ID NO: 2000954 - RNA, 20 nt, Human
gcccgauccuccccuggacu

SEQ ID NO: 2000955 - RNA, 18 nt, Human
gccccucagggucccugg

SEQ ID NO: 2000956 - RNA, 16 nt, Human
gccccucagggucccu

SEQ ID NO: 2000957 - RNA, 13 nt, Human
gccccucccuccu

SEQ ID NO: 2000958 - RNA, 15 nt, Human
gccccucccuccucu

SEQ ID NO: 2000959 - RNA, 17 nt, Human
gccccucccuccucuga

SEQ ID NO: 2000960 - RNA, 15 nt, Human
gccccucccucucca

SEQ ID NO: 2000961 - RNA, 20 nt, Human
gccccucccucuccagcagg

SEQ ID NO: 2000962 - RNA, 23 nt, Human
gccccucccucuccagcaggccc

SEQ ID NO: 2000963 - RNA, 15 nt, Human
gccccgaggccuucu

SEQ ID NO: 2000964 - RNA, 22 nt, Human
gccccgaaaggucaccucacuc

SEQ ID NO: 2000965 - RNA, 14 nt, Human
gccccucagggucc

SEQ ID NO: 2000966 - RNA, 18 nt, Human
gccccgaggccuucucug

SEQ ID NO: 2000967 - RNA, 14 nt, Human
gcccugcagagggc

SEQ ID NO: 2000968 - RNA, 13 nt, Human
gcccugcagaggg

SEQ ID NO: 2000969 - RNA, 15 nt, Human
gcccugcagagggca

SEQ ID NO: 2000970 - RNA, 17 nt, Human
gcccucuucuucucaag

SEQ ID NO: 2000971 - RNA, 22 nt, Human
gcccuccgaccacuuccagggg

SEQ ID NO: 2000972 - RNA, 14 nt, Human
gcccugagcuuucu

SEQ ID NO: 2000973 - RNA, 19 nt, Human
gcccucugcccacucccug

SEQ ID NO: 2000974 - RNA, 18 nt, Human
gcccucugcccacucccu

SEQ ID NO: 2000975 - RNA, 16 nt, Human
gcccucugcccacucc

SEQ ID NO: 2000976 - RNA, 13 nt, Human
gcccucugcccac

SEQ ID NO: 2000977 - RNA, 21 nt, Human
gcccucccugccccucccuuc

SEQ ID NO: 2000978 - RNA, 23 nt, Human
gcccuccaagaccuucuccuuca

SEQ ID NO: 2000979 - RNA, 22 nt, Human
gcccuccaagaccuucuccuuc

SEQ ID NO: 2000980 - RNA, 15 nt, Human
gcccuccacacccgc

SEQ ID NO: 2000981 - RNA, 21 nt, Human
gcccucccaggcucucaacag

SEQ ID NO: 2000982 - RNA, 12 nt, Human
gcccucccaggc

SEQ ID NO: 2000983 - RNA, 21 nt, Human
gcccuccaucuaaacugcccc

SEQ ID NO: 2000984 - RNA, 20 nt, Human
gcccuccaucuaaacugccc

SEQ ID NO: 2000985 - RNA, 21 nt, Human
gcccuccaagaccuucuccuu

SEQ ID NO: 2000986 - RNA, 19 nt, Human
gcccuccaagaccuucucc

SEQ ID NO: 2000987 - RNA, 13 nt, Human
gcccgcaucagcu

SEQ ID NO: 2000988 - RNA, 15 nt, Human
gcccgcaucagcugc

SEQ ID NO: 2000989 - RNA, 19 nt, Human
gcccgcaucagcugcucag

SEQ ID NO: 2000990 - RNA, 20 nt, Human
gcccgcaucagcugcucaga

SEQ ID NO: 2000991 - RNA, 21 nt, Human
gcccgauccuccccuggacuc

SEQ ID NO: 2000992 - RNA, 13 nt, Human
gccuuuggcuuca

SEQ ID NO: 2000993 - RNA, 23 nt, Human
gcgacaaugcaaaccaucauuga

SEQ ID NO: 2000994 - RNA, 23 nt, Human
gcgaaaaacucaaccaaauggua

SEQ ID NO: 2000995 - RNA, 14 nt, Human
gcgaaagaaaacuc

SEQ ID NO: 2000996 - RNA, 17 nt, Human
gcgaaaucccugcucac

SEQ ID NO: 2000997 - RNA, 15 nt, Human
gccuuggccucagag

SEQ ID NO: 2000998 - RNA, 20 nt, Human
gccuuugaagagugaaauac

SEQ ID NO: 2000999 - RNA, 22 nt, Human
gccuuuggaaacagcucgacuu

SEQ ID NO: 2001000 - RNA, 18 nt, Human
gccuuugcucuggucuau

SEQ ID NO: 2001001 - RNA, 16 nt, Human
gccuuugcagcucaga

SEQ ID NO: 2001002 - RNA, 21 nt, Human
gccuuugcagcucagaaccac

SEQ ID NO: 2001003 - RNA, 20 nt, Human
gccuuauggaacacucugag

SEQ ID NO: 2001004 - RNA, 19 nt, Human
gccuuauggaacacucuga

SEQ ID NO: 2001005 - RNA, 18 nt, Human
gccuuauggaacacucug

SEQ ID NO: 2001006 - RNA, 16 nt, Human
gccuuauggaacacuc

SEQ ID NO: 2001007 - RNA, 12 nt, Human
gccuuccagggg

SEQ ID NO: 2001008 - RNA, 13 nt, Human
gccuuccaccucu

SEQ ID NO: 2001009 - RNA, 13 nt, Human
gccuucagggagu

SEQ ID NO: 2001010 - RNA, 21 nt, Human
gccuucagggagugagggauu

SEQ ID NO: 2001011 - RNA, 13 nt, Human
gccuucaucuccc

SEQ ID NO: 2001012 - RNA, 16 nt, Human
gccuuccagggguggg

SEQ ID NO: 2001013 - RNA, 15 nt, Human
gccuuccaggggugg

SEQ ID NO: 2001014 - RNA, 21 nt, Human
gccuuccaggggugggacacc

SEQ ID NO: 2001015 - RNA, 23 nt, Human
gccuucgauacaccgggccugga

SEQ ID NO: 2001016 - RNA, 18 nt, Human
gccuucgauacaccgggc

SEQ ID NO: 2001017 - RNA, 22 nt, Human
gccuucgauacaccgggccugg

SEQ ID NO: 2001018 - RNA, 20 nt, Human
gccuuacacaaugguuuucu

SEQ ID NO: 2001019 - RNA, 19 nt, Human
gccuuaaaacaucauuccu

SEQ ID NO: 2001020 - RNA, 21 nt, Human
gccuuacacaaugguuuucuu

SEQ ID NO: 2001021 - RNA, 18 nt, Human
gccuuacccucauguucu

SEQ ID NO: 2001022 - RNA, 13 nt, Human
gccuguuuaagag

SEQ ID NO: 2001023 - RNA, 16 nt, Human
gccuuaaaacaucauu

SEQ ID NO: 2001024 - RNA, 12 nt, Human
gccuguuuaaga

SEQ ID NO: 2001025 - RNA, 22 nt, Human
gccuggugaugcgcaguugcug

SEQ ID NO: 2001026 - RNA, 19 nt, Human
gccuuagaagucacacagu

SEQ ID NO: 2001027 - RNA, 17 nt, Human
gccuuagaagucacaca

SEQ ID NO: 2001028 - RNA, 18 nt, Human
gccuuagaagucacacag

SEQ ID NO: 2001029 - RNA, 23 nt, Human
gccuuaucuccaagaccagagau

SEQ ID NO: 2001030 - RNA, 14 nt, Human
gccuuauggaacac

SEQ ID NO: 2001031 - RNA, 10 nt, Human
gccuuaugga

SEQ ID NO: 2001032 - RNA, 15 nt, Human
gccugccacucaggc

SEQ ID NO: 2001033 - RNA, 23 nt, Human
gccugccacucaggcccaaagcc

SEQ ID NO: 2001034 - RNA, 22 nt, Human
gccugggggcugggcagaggaa

SEQ ID NO: 2001035 - RNA, 17 nt, Human
gccuggucgccuuccac

SEQ ID NO: 2001036 - RNA, 17 nt, Human
gccugguccucacacuc

SEQ ID NO: 2001037 - RNA, 14 nt, Human
gccuggggucaggc

SEQ ID NO: 2001038 - RNA, 13 nt, Human
gccugguggcagc

SEQ ID NO: 2001039 - RNA, 18 nt, Human
gccuggucgccuuccacc

SEQ ID NO: 2001040 - RNA, 19 nt, Human
gccugguggcagcugcggu

SEQ ID NO: 2001041 - RNA, 21 nt, Human
gccugguggcagcugcggucc

SEQ ID NO: 2001042 - RNA, 18 nt, Human
gccugguggcagcugcgg

SEQ ID NO: 2001043 - RNA, 14 nt, Human
gccugguggcagcu

SEQ ID NO: 2001044 - RNA, 19 nt, Human
gcuagaacucccuuucaac

SEQ ID NO: 2001045 - RNA, 16 nt, Human
gcuaccuuuguauucu

SEQ ID NO: 2001046 - RNA, 20 nt, Human
gcuaccuuuguauucucucc

SEQ ID NO: 2001047 - RNA, 14 nt, Human
gcuaggaacaaauc

SEQ ID NO: 2001048 - RNA, 16 nt, Human
gcuaggaacacuccuu

SEQ ID NO: 2001049 - RNA, 22 nt, Human
gcuaggaaauccaggguggugg

SEQ ID NO: 2001050 - RNA, 23 nt, Human
gcuauagcuuuagccgugucacg

SEQ ID NO: 2001051 - RNA, 15 nt, Human
gcuaggaacacuccu

SEQ ID NO: 2001052 - RNA, 19 nt, Human
gcuaggaaauccagggugg

SEQ ID NO: 2001053 - RNA, 14 nt, Human
gcuacacaggggaa

SEQ ID NO: 2001054 - RNA, 14 nt, Human
gcuaagaauuuuuu

SEQ ID NO: 2001055 - RNA, 13 nt, Human
gcuacacacugca

SEQ ID NO: 2001056 - RNA, 20 nt, Human
gcuacacacugcauguuugu

SEQ ID NO: 2001057 - RNA, 20 nt, Human
gcuaagagggagggagggcu

SEQ ID NO: 2001058 - RNA, 23 nt, Human
gcuaaacguguauguuuuucagu

SEQ ID NO: 2001059 - RNA, 17 nt, Human
gcuaagaauauuugaau

SEQ ID NO: 2001060 - RNA, 13 nt, Human
gcuaagagggagg

SEQ ID NO: 2001061 - RNA, 20 nt, Human
gcuaaagacugaucucaggg

SEQ ID NO: 2001062 - RNA, 13 nt, Human
gcgggucacagga

SEQ ID NO: 2001063 - RNA, 15 nt, Human
gcgggucacaggagg

SEQ ID NO: 2001064 - RNA, 15 nt, Human
gcggacagccacggc

SEQ ID NO: 2001065 - RNA, 19 nt, Human
gcgcucccuugaccugcug

SEQ ID NO: 2001066 - RNA, 17 nt, Human
gcgggcacaccuccucc

SEQ ID NO: 2001067 - RNA, 19 nt, Human
gcgggcacaccuccuccca

SEQ ID NO: 2001068 - RNA, 22 nt, Human
gcgggcacaccuccucccacug

SEQ ID NO: 2001069 - RNA, 19 nt, Human
gcgggucacaggagggagg

SEQ ID NO: 2001070 - RNA, 20 nt, Human
gcgggucacaggagggaggg

SEQ ID NO: 2001071 - RNA, 18 nt, Human
gcgguuuaucgcccuggc

SEQ ID NO: 2001072 - RNA, 19 nt, Human
gcgucucauacucaccuca

SEQ ID NO: 2001073 - RNA, 11 nt, Human
gcggacagcca

SEQ ID NO: 2001074 - RNA, 13 nt, Human
gcggacagccacg

SEQ ID NO: 2001075 - RNA, 21 nt, Human
gcgcuagcacagcucccuucu

SEQ ID NO: 2001076 - RNA, 13 nt, Human
gcgcuagaggcca

SEQ ID NO: 2001077 - RNA, 18 nt, Human
gcgcuagcacagcucccu

SEQ ID NO: 2001078 - RNA, 21 nt, Human
gcgcggacauccccugcuggc

SEQ ID NO: 2001079 - RNA, 15 nt, Human
gcgcuaacuugcuua

SEQ ID NO: 2001080 - RNA, 20 nt, Human
gcgcuaacuugcuuaaaugu

SEQ ID NO: 2001081 - RNA, 21 nt, Human
gcgcuaacuugcuuaaaugug

SEQ ID NO: 2001082 - RNA, 22 nt, Human
gcgcuaacuugcuuaaauguga

SEQ ID NO: 2001083 - RNA, 15 nt, Human
gcgccuacaggagug

SEQ ID NO: 2001084 - RNA, 22 nt, Human
gcgacagugagacucugucuca

SEQ ID NO: 2001085 - RNA, 12 nt, Human
gcgacagugaga

SEQ ID NO: 2001086 - RNA, 12 nt, Human
gcgacagagcag

SEQ ID NO: 2001087 - RNA, 13 nt, Human
gcgacagagcagu

SEQ ID NO: 2001088 - RNA, 18 nt, Human
gcccuucucuccagcccc

SEQ ID NO: 2001089 - RNA, 17 nt, Human
gcccuucucuccagccc

SEQ ID NO: 2001090 - RNA, 16 nt, Human
gcccuucucuccagcc

SEQ ID NO: 2001091 - RNA, 14 nt, Human
gcccuucucuccag

SEQ ID NO: 2001092 - RNA, 16 nt, Human
gcccugcuuugggcug

SEQ ID NO: 2001093 - RNA, 18 nt, Human
gcccugcuuugggcugcc

SEQ ID NO: 2001094 - RNA, 12 nt, Human
gcccugcuguuu

SEQ ID NO: 2001095 - RNA, 15 nt, Human
gccgaauagcugaug

SEQ ID NO: 2001096 - RNA, 16 nt, Human
gccggcuuucaggagc

SEQ ID NO: 2001097 - RNA, 21 nt, Human
gccgggcgcgguggcucacgc

SEQ ID NO: 2001098 - RNA, 20 nt, Human
gccgggcgugguggugagug

SEQ ID NO: 2001099 - RNA, 21 nt, Human
gccgggcuacccgugagcccu

SEQ ID NO: 2001100 - RNA, 22 nt, Human
gccgagaucacgccacugcacu

SEQ ID NO: 2001101 - RNA, 20 nt, Human
gccgagaucacgccacugca

SEQ ID NO: 2001102 - RNA, 21 nt, Human
gccgagaucacgccacugcac

SEQ ID NO: 2001103 - RNA, 11 nt, Human
gccgcagcccu

SEQ ID NO: 2001104 - RNA, 12 nt, Human
gccgcagcccug

SEQ ID NO: 2001105 - RNA, 13 nt, Human
gccgcagcccugc

SEQ ID NO: 2001106 - RNA, 18 nt, Human
gccucaaccuccugggcu

SEQ ID NO: 2001107 - RNA, 19 nt, Human
gccucaaccuccugggcua

SEQ ID NO: 2001108 - RNA, 22 nt, Human
gccuaugugcaugcagcaucua

SEQ ID NO: 2001109 - RNA, 17 nt, Human
gccucacaguccuuacc

SEQ ID NO: 2001110 - RNA, 13 nt, Human
gccucacaguccu

SEQ ID NO: 2001111 - RNA, 20 nt, Human
gccguguaaccauggaccca

SEQ ID NO: 2001112 - RNA, 21 nt, Human
gccguggcuucccgcucagcc

SEQ ID NO: 2001113 - RNA, 22 nt, Human
gccguggcuucccgcucagccc

SEQ ID NO: 2001114 - RNA, 19 nt, Human
gccguggcuucccgcucag

SEQ ID NO: 2001115 - RNA, 14 nt, Human
gccgugccuucagc

SEQ ID NO: 2001116 - RNA, 15 nt, Human
gccgugccuucagcu

SEQ ID NO: 2001117 - RNA, 17 nt, Human
gccgugccuucagcucu

SEQ ID NO: 2001118 - RNA, 19 nt, Human
gccgugccuucagcucuac

SEQ ID NO: 2001119 - RNA, 17 nt, Human
gccgucuaccugagggg

SEQ ID NO: 2001120 - RNA, 16 nt, Human
gccgucuaccugaggg

SEQ ID NO: 2001121 - RNA, 15 nt, Human
gccgucuaccugagg

SEQ ID NO: 2001122 - RNA, 16 nt, Human
gccggugugggggccc

SEQ ID NO: 2001123 - RNA, 12 nt, Human
gccguacaguuc

SEQ ID NO: 2001124 - RNA, 18 nt, Human
gccucacaguccuuacca

SEQ ID NO: 2001125 - RNA, 21 nt, Human
gccucacaguccuuaccagca

SEQ ID NO: 2001126 - RNA, 15 nt, Human
gccucagcauccugg

SEQ ID NO: 2001127 - RNA, 16 nt, Human
gccucagcauccuggc

SEQ ID NO: 2001128 - RNA, 18 nt, Human
gccucccaaagugcuggg

SEQ ID NO: 2001129 - RNA, 13 nt, Human
gccucccaacuca

SEQ ID NO: 2001130 - RNA, 19 nt, Human
gccucccaaagugcuggga

SEQ ID NO: 2001131 - RNA, 19 nt, Human
gccucccaacucaccccag

SEQ ID NO: 2001132 - RNA, 18 nt, Human
gccucccaacucacccca

SEQ ID NO: 2001133 - RNA, 17 nt, Human
gccucccaacucacccc

SEQ ID NO: 2001134 - RNA, 16 nt, Human
gccucccaacucaccc

SEQ ID NO: 2001135 - RNA, 16 nt, Human
gccucccaucacccgc

SEQ ID NO: 2001136 - RNA, 14 nt, Human
gccucccaucaccc

SEQ ID NO: 2001137 - RNA, 17 nt, Human
gccucccaucacccgcu

SEQ ID NO: 2001138 - RNA, 20 nt, Human
gccucccgaguagcugggac

SEQ ID NO: 2001139 - RNA, 18 nt, Human
gccucccgaguagcuggg

SEQ ID NO: 2001140 - RNA, 19 nt, Human
gccucccgaguagcuggga

SEQ ID NO: 2001141 - RNA, 20 nt, Human
gccuccuacagcccaccugg

SEQ ID NO: 2001142 - RNA, 20 nt, Human
gccuccgucacuaccuggcu

SEQ ID NO: 2001143 - RNA, 21 nt, Human
gccuccgucacuaccuggcug

SEQ ID NO: 2001144 - RNA, 19 nt, Human
gccucucauuccagaggaa

SEQ ID NO: 2001145 - RNA, 16 nt, Human
gccuccgcuucccugg

SEQ ID NO: 2001146 - RNA, 19 nt, Human
gccuccgucacuaccuggc

SEQ ID NO: 2001147 - RNA, 15 nt, Human
gccuccgcuucccug

SEQ ID NO: 2001148 - RNA, 20 nt, Human
gccucucauuccagaggaag

SEQ ID NO: 2001149 - RNA, 14 nt, Human
gccucucucaggcc

SEQ ID NO: 2001150 - RNA, 13 nt, Human
gccucucucaggc

SEQ ID NO: 2001151 - RNA, 16 nt, Human
gccucucucaggccaa

SEQ ID NO: 2001152 - RNA, 17 nt, Human
gccucugacacacagcu

SEQ ID NO: 2001153 - RNA, 18 nt, Human
gccucugacacacagcuc

SEQ ID NO: 2001154 - RNA, 14 nt, Human
gccucugcacuccc

SEQ ID NO: 2001155 - RNA, 19 nt, Human
gccucugacacacagcucu

SEQ ID NO: 2001156 - RNA, 20 nt, Human
gccucugacacacagcucug

SEQ ID NO: 2001157 - RNA, 21 nt, Human
gccucugacacacagcucugu

SEQ ID NO: 2001158 - RNA, 15 nt, Human
gccugcaagggagug

SEQ ID NO: 2001159 - RNA, 13 nt, Human
gccugcaagggag

SEQ ID NO: 2001160 - RNA, 13 nt, Human
gccugaggggcag

SEQ ID NO: 2001161 - RNA, 16 nt, Human
gccugaggggcagccu

SEQ ID NO: 2001162 - RNA, 19 nt, Human
gccugaggggcagccugcc

SEQ ID NO: 2001163 - RNA, 20 nt, Human
gccugaggggcagccugccu

SEQ ID NO: 2001164 - RNA, 17 nt, Human
gccucugcaaaggaaau

SEQ ID NO: 2001165 - RNA, 12 nt, Human
gccucugccucu

SEQ ID NO: 2001166 - RNA, 13 nt, Human
gccucugccucug

SEQ ID NO: 2001167 - RNA, 18 nt, Human
gccucugccucugacaca

SEQ ID NO: 2001168 - RNA, 15 nt, Human
gccugacucccccag

SEQ ID NO: 2001169 - RNA, 14 nt, Human
gccugacuccccca

SEQ ID NO: 2001170 - RNA, 16 nt, Human
gccugacuucugcugg

SEQ ID NO: 2001171 - RNA, 21 nt, Human
gccugacucccccaguccccu

SEQ ID NO: 2001172 - RNA, 23 nt, Human
gccugacucccccaguccccuuc

SEQ ID NO: 2001173 - RNA, 19 nt, Human
gccugacuucugcuggcau

SEQ ID NO: 2001174 - RNA, 22 nt, Human
gcaaugaccuuucaauaggaaa

SEQ ID NO: 2001175 - RNA, 20 nt, Human
gcaaugaccuuucaauagga

SEQ ID NO: 2001176 - RNA, 17 nt, Human
gcaaugaccuuucaaua

SEQ ID NO: 2001177 - RNA, 15 nt, Human
gcaaugaccuuucaa

SEQ ID NO: 2001178 - RNA, 17 nt, Human
gcaaucaaaucugcuuu

SEQ ID NO: 2001179 - RNA, 22 nt, Human
gcaauauucucuguacauauua

SEQ ID NO: 2001180 - RNA, 15 nt, Human
gcaaucaaaucugcu

SEQ ID NO: 2001181 - RNA, 14 nt, Human
gcaaggucauuuuu

SEQ ID NO: 2001182 - RNA, 23 nt, Human
gcaaugaccuuucaauaggaaaa

SEQ ID NO: 2001183 - RNA, 13 nt, Human
gcaaugcuggcug

SEQ ID NO: 2001184 - RNA, 14 nt, Human
gcaaugcuggcugu

SEQ ID NO: 2001185 - RNA, 22 nt, Human
gcaaugcuggcuguuggcuggg

SEQ ID NO: 2001186 - RNA, 23 nt, Human
gcaaugcuggcuguuggcugggg

SEQ ID NO: 2001187 - RNA, 11 nt, Human
gcaaggcuguc

SEQ ID NO: 2001188 - RNA, 16 nt, Human
gcaaggcgcuaacuug

SEQ ID NO: 2001189 - RNA, 18 nt, Human
gcaaggcgcuaacuugcu

SEQ ID NO: 2001190 - RNA, 20 nt, Human
gcaaggccaccucuuccugg

SEQ ID NO: 2001191 - RNA, 22 nt, Human
gcaaggccaccucuuccuggcc

SEQ ID NO: 2001192 - RNA, 13 nt, Human
gcaaggccaccuc

SEQ ID NO: 2001193 - RNA, 14 nt, Human
gcaaggccaccucu

SEQ ID NO: 2001194 - RNA, 14 nt, Human
gcaagguaaaauuu

SEQ ID NO: 2001195 - RNA, 13 nt, Human
gcaaggcugucaa

SEQ ID NO: 2001196 - RNA, 20 nt, Human
gcaaggcgcuaacuugcuua

SEQ ID NO: 2001197 - RNA, 17 nt, Human
gcaagggaggcccagcg

SEQ ID NO: 2001198 - RNA, 16 nt, Human
gcaagggcagggacag

SEQ ID NO: 2001199 - RNA, 21 nt, Human
gcaagggcagggacagggccg

SEQ ID NO: 2001200 - RNA, 19 nt, Human
gcaagggcggccuuuccca

SEQ ID NO: 2001201 - RNA, 21 nt, Human
gcaagggcggccuuucccacu

SEQ ID NO: 2001202 - RNA, 15 nt, Human
gcaagccccugcucc

SEQ ID NO: 2001203 - RNA, 18 nt, Human
gcaaggagauuuacaacu

SEQ ID NO: 2001204 - RNA, 22 nt, Human
gcaagacgcugugcugcccugc

SEQ ID NO: 2001205 - RNA, 21 nt, Human
gcaagacgcugugcugcccug

SEQ ID NO: 2001206 - RNA, 20 nt, Human
gcaagacgcugugcugcccu

SEQ ID NO: 2001207 - RNA, 14 nt, Human
gcaagacgcugugc

SEQ ID NO: 2001208 - RNA, 23 nt, Human
gcaagacgcugugcugcccugcc

SEQ ID NO: 2001209 - RNA, 22 nt, Human
gcaaauccuugugggaaaagaa

SEQ ID NO: 2001210 - RNA, 13 nt, Human
gcaagaaaagagu

SEQ ID NO: 2001211 - RNA, 17 nt, Human
gcaagaauugaagcagg

SEQ ID NO: 2001212 - RNA, 21 nt, Human
gcaaagcccagcuugaaaccu

SEQ ID NO: 2001213 - RNA, 13 nt, Human
gcaaagcccagcu

SEQ ID NO: 2001214 - RNA, 21 nt, Human
gcaaagcaugccaauuucucu

SEQ ID NO: 2001215 - RNA, 20 nt, Human
gcaaagcauguuuugcaugu

SEQ ID NO: 2001216 - RNA, 20 nt, Human
gcaaauccuugugggaaaag

SEQ ID NO: 2001217 - RNA, 16 nt, Human
gcaaauccgaaaucag

SEQ ID NO: 2001218 - RNA, 20 nt, Human
gcaaaguacagguacuuugu

SEQ ID NO: 2001219 - RNA, 19 nt, Human
gcaaaguacagguacuuug

SEQ ID NO: 2001220 - RNA, 16 nt, Human
gcaaaguaucccuacu

SEQ ID NO: 2001221 - RNA, 23 nt, Human
gcaaagggggaggagaagaaaau

SEQ ID NO: 2001222 - RNA, 21 nt, Human
gauuuuugagcccuuguuuca

SEQ ID NO: 2001223 - RNA, 11 nt, Human
gauuuuccauc

SEQ ID NO: 2001224 - RNA, 16 nt, Human
gauuuuccaucuaaaa

SEQ ID NO: 2001225 - RNA, 21 nt, Human
gauuuuccaucuaaaaauaua

SEQ ID NO: 2001226 - RNA, 19 nt, Human
gauuuguuaaugauagcua

SEQ ID NO: 2001227 - RNA, 17 nt, Human
gauuugucacugcuuca

SEQ ID NO: 2001228 - RNA, 13 nt, Human
gauuuuauguuga

SEQ ID NO: 2001229 - RNA, 14 nt, Human
gauuuuauguugac

SEQ ID NO: 2001230 - RNA, 16 nt, Human
gauuuuauguugacau

SEQ ID NO: 2001231 - RNA, 18 nt, Human
gauuuuauguugacauuu

SEQ ID NO: 2001232 - RNA, 20 nt, Human
gauuuuauguugacauuugu

SEQ ID NO: 2001233 - RNA, 13 nt, Human
gauuuuauucuug

SEQ ID NO: 2001234 - RNA, 15 nt, Human
gauuuuauucuugau

SEQ ID NO: 2001235 - RNA, 14 nt, Human
gauuucuguucagc

SEQ ID NO: 2001236 - RNA, 13 nt, Human
gauuugccauaga

SEQ ID NO: 2001237 - RNA, 11 nt, Human
gauuucuguuu

SEQ ID NO: 2001238 - RNA, 19 nt, Human
gauuucuguuuagauaaua

SEQ ID NO: 2001239 - RNA, 23 nt, Human
gauuugcucagugucuggcugca

SEQ ID NO: 2001240 - RNA, 17 nt, Human
gauuugccauagaguac

SEQ ID NO: 2001241 - RNA, 20 nt, Human
gauuuggggcucagaguggg

SEQ ID NO: 2001242 - RNA, 15 nt, Human
gauuugggagaaggg

SEQ ID NO: 2001243 - RNA, 22 nt, Human
gauuuggucaacacuaacauga

SEQ ID NO: 2001244 - RNA, 15 nt, Human
gauuuccguuaaaau

SEQ ID NO: 2001245 - RNA, 18 nt, Human
gauuuccguuaaaauacc

SEQ ID NO: 2001246 - RNA, 13 nt, Human
gauuucucuuuga

SEQ ID NO: 2001247 - RNA, 22 nt, Human
gauuucucuuugaaacaugcuu

SEQ ID NO: 2001248 - RNA, 15 nt, Human
gauugcagaauuguu

SEQ ID NO: 2001249 - RNA, 16 nt, Human
gauugcagaauuguuu

SEQ ID NO: 2001250 - RNA, 19 nt, Human
gauugcagaauuguuuaga

SEQ ID NO: 2001251 - RNA, 13 nt, Human
gauugcagaauug

SEQ ID NO: 2001252 - RNA, 19 nt, Human
gauucauauuuacuucuua

SEQ ID NO: 2001253 - RNA, 18 nt, Human
gauucauauuuacuucuu

SEQ ID NO: 2001254 - RNA, 12 nt, Human
gauucauauuua

SEQ ID NO: 2001255 - RNA, 14 nt, Human
gauucagauuucuc

SEQ ID NO: 2001256 - RNA, 12 nt, Human
gauucagccuuc

SEQ ID NO: 2001257 - RNA, 13 nt, Human
gauucagccuucu

SEQ ID NO: 2001258 - RNA, 15 nt, Human
gauucagccuucuuu

SEQ ID NO: 2001259 - RNA, 21 nt, Human
gauucagccuucuuuuucugg

SEQ ID NO: 2001260 - RNA, 23 nt, Human
gauucagccuucuuuuucuggac

SEQ ID NO: 2001261 - RNA, 17 nt, Human
gauucauauuuacuucu

SEQ ID NO: 2001262 - RNA, 17 nt, Human
gauuccagguggcauca

SEQ ID NO: 2001263 - RNA, 18 nt, Human
gauucccaagcucugcuc

SEQ ID NO: 2001264 - RNA, 19 nt, Human
gauuccagagaguggcucc

SEQ ID NO: 2001265 - RNA, 20 nt, Human
gauuccagagaguggcuccu

SEQ ID NO: 2001266 - RNA, 22 nt, Human
gauuccagagaguggcuccucc

SEQ ID NO: 2001267 - RNA, 15 nt, Human
gauuccagcacaacc

SEQ ID NO: 2001268 - RNA, 20 nt, Human
gauucagauuucucuuugaa

SEQ ID NO: 2001269 - RNA, 15 nt, Human
gauucagcucugcaa

SEQ ID NO: 2001270 - RNA, 13 nt, Human
gauucagcucugc

SEQ ID NO: 2001271 - RNA, 19 nt, Human
gauucagacagcugccugg

SEQ ID NO: 2001272 - RNA, 12 nt, Human
gauggggcuggg

SEQ ID NO: 2001273 - RNA, 23 nt, Human
gauggggcugcaccggcuggccu

SEQ ID NO: 2001274 - RNA, 12 nt, Human
gauucuuuccug

SEQ ID NO: 2001275 - RNA, 18 nt, Human
gauucguggucuuuuccu

SEQ ID NO: 2001276 - RNA, 23 nt, Human
gauucguggucuuuuccucgcuu

SEQ ID NO: 2001277 - RNA, 17 nt, Human
gauuccauuuacugcau

SEQ ID NO: 2001278 - RNA, 21 nt, Human
gauucccaagcucugcuccuc

SEQ ID NO: 2001279 - RNA, 19 nt, Human
gauucccaagcucugcucc

SEQ ID NO: 2001280 - RNA, 20 nt, Human
gauucccaagcucugcuccu

SEQ ID NO: 2001281 - RNA, 17 nt, Human
gauucuuuccugaggcu

SEQ ID NO: 2001282 - RNA, 16 nt, Human
gauucuuuccugaggc

SEQ ID NO: 2001283 - RNA, 18 nt, Human
gauucuuuccugaggcug

SEQ ID NO: 2001284 - RNA, 20 nt, Human
gauugcaacaggcugggcuu

SEQ ID NO: 2001285 - RNA, 23 nt, Human
gauugcaccacugcacuccagcc

SEQ ID NO: 2001286 - RNA, 16 nt, Human
gauugcaccacugcac

SEQ ID NO: 2001287 - RNA, 21 nt, Human
gauugcaacaggcugggcuuc

SEQ ID NO: 2001288 - RNA, 14 nt, Human
gaugaagacagccc

SEQ ID NO: 2001289 - RNA, 15 nt, Human
gaugaaaauauuuaa

SEQ ID NO: 2001290 - RNA, 16 nt, Human
gaugaaaauauuuaaa

SEQ ID NO: 2001291 - RNA, 14 nt, Human
gaugaaaauauuua

SEQ ID NO: 2001292 - RNA, 17 nt, Human
gaugaaaauauuuaaag

SEQ ID NO: 2001293 - RNA, 22 nt, Human
gaucugugccuuuuuuauaucu

SEQ ID NO: 2001294 - RNA, 21 nt, Human
gaucugugaggggcucucuca

SEQ ID NO: 2001295 - RNA, 21 nt, Human
gaucucaggggucuuaccuug

SEQ ID NO: 2001296 - RNA, 18 nt, Human
gaucuuugcagacaggca

SEQ ID NO: 2001297 - RNA, 17 nt, Human
gaucuuugcagacaggc

SEQ ID NO: 2001298 - RNA, 21 nt, Human
gauccugcacugacucuggaa

SEQ ID NO: 2001299 - RNA, 20 nt, Human
gaucgucugguuagaaaaca

SEQ ID NO: 2001300 - RNA, 16 nt, Human
gaucgguuaacaaaua

SEQ ID NO: 2001301 - RNA, 17 nt, Human
gaucgguuaacaaauaa

SEQ ID NO: 2001302 - RNA, 21 nt, Human
gaucuaaaaauaacuguaauu

SEQ ID NO: 2001303 - RNA, 22 nt, Human
gauccugagccagauuucacuc

SEQ ID NO: 2001304 - RNA, 21 nt, Human
gauccugagccagauuucacu

SEQ ID NO: 2001305 - RNA, 18 nt, Human
gauccugcacugacucug

SEQ ID NO: 2001306 - RNA, 16 nt, Human
gaucccucauccucau

SEQ ID NO: 2001307 - RNA, 15 nt, Human
gaucccucauccuca

SEQ ID NO: 2001308 - RNA, 16 nt, Human
gauccccuuccuacca

SEQ ID NO: 2001309 - RNA, 18 nt, Human
gauccccuuccuaccacc

SEQ ID NO: 2001310 - RNA, 21 nt, Human
gauggcuaguaucaaaagaaa

SEQ ID NO: 2001311 - RNA, 13 nt, Human
gauggcugugccu

SEQ ID NO: 2001312 - RNA, 17 nt, Human
gauggcugugccucugc

SEQ ID NO: 2001313 - RNA, 18 nt, Human
gauggcugugccucugcc

SEQ ID NO: 2001314 - RNA, 19 nt, Human
gauggcugugccucugccu

SEQ ID NO: 2001315 - RNA, 22 nt, Human
gauggggcccugccuccuuugu

SEQ ID NO: 2001316 - RNA, 14 nt, Human
gauggggcccugcc

SEQ ID NO: 2001317 - RNA, 13 nt, Human
gauggggcccugc

SEQ ID NO: 2001318 - RNA, 19 nt, Human
gauggcuggaaggggucca

SEQ ID NO: 2001319 - RNA, 16 nt, Human
gauggcuuacaaaaag

SEQ ID NO: 2001320 - RNA, 20 nt, Human
gauggcugugccucugccug

SEQ ID NO: 2001321 - RNA, 20 nt, Human
gauggcaaagaaggagagca

SEQ ID NO: 2001322 - RNA, 22 nt, Human
gauggauuuccagccaaagccu

SEQ ID NO: 2001323 - RNA, 20 nt, Human
gaugccugguggcagcugcg

SEQ ID NO: 2001324 - RNA, 18 nt, Human
gaugccugguggcagcug

SEQ ID NO: 2001325 - RNA, 19 nt, Human
gaugccugguggcagcugc

SEQ ID NO: 2001326 - RNA, 21 nt, Human
gaugccaagaaguuuaaggaa

SEQ ID NO: 2001327 - RNA, 22 nt, Human
gaugccacuaccccuugauuuu

SEQ ID NO: 2001328 - RNA, 12 nt, Human
gaugcagccuca

SEQ ID NO: 2001329 - RNA, 14 nt, Human
gaugcagccucaca

SEQ ID NO: 2001330 - RNA, 19 nt, Human
gaugcagccucacaguccu

SEQ ID NO: 2001331 - RNA, 20 nt, Human
gaugacaugcacucagcucu

SEQ ID NO: 2001332 - RNA, 21 nt, Human
gaugcacagaguuguuacauu

SEQ ID NO: 2001333 - RNA, 22 nt, Human
gaugcacagaguuguuacauuu

SEQ ID NO: 2001334 - RNA, 13 nt, Human
gaugcaccagccc

SEQ ID NO: 2001335 - RNA, 21 nt, Human
gaggaaggaaacccagcucug

SEQ ID NO: 2001336 - RNA, 20 nt, Human
gaggaaggaaacccagcucu

SEQ ID NO: 2001337 - RNA, 19 nt, Human
gaggaaggaaacccagcuc

SEQ ID NO: 2001338 - RNA, 13 nt, Human
gaggaaggaaacc

SEQ ID NO: 2001339 - RNA, 19 nt, Human
gauaaaguugguaaaccuu

SEQ ID NO: 2001340 - RNA, 21 nt, Human
gauaaagauugugugguguuu

SEQ ID NO: 2001341 - RNA, 13 nt, Human
gauaaagauugug

SEQ ID NO: 2001342 - RNA, 16 nt, Human
gauaaagauugugugg

SEQ ID NO: 2001343 - RNA, 20 nt, Human
gauaagcaguuaugugaccu

SEQ ID NO: 2001344 - RNA, 21 nt, Human
gauaaauauugagcagaucua

SEQ ID NO: 2001345 - RNA, 18 nt, Human
gauaagggacugauguuu

SEQ ID NO: 2001346 - RNA, 15 nt, Human
gauaaauauuauauu

SEQ ID NO: 2001347 - RNA, 22 nt, Human
gauaaauauuauauuauauaua

SEQ ID NO: 2001348 - RNA, 17 nt, Human
gauaaauaguguuauug

SEQ ID NO: 2001349 - RNA, 12 nt, Human
gauaaauauuca

SEQ ID NO: 2001350 - RNA, 20 nt, Human
gauaaauauucacacuugaa

SEQ ID NO: 2001351 - RNA, 22 nt, Human
gauaaauaguuuaugauuccac

SEQ ID NO: 2001352 - RNA, 20 nt, Human
gauagcacagacccugcccu

SEQ ID NO: 2001353 - RNA, 22 nt, Human
gauagcacagacccugcccugu

SEQ ID NO: 2001354 - RNA, 21 nt, Human
gauagcacagacccugcccug

SEQ ID NO: 2001355 - RNA, 13 nt, Human
gauagaugugugg

SEQ ID NO: 2001356 - RNA, 18 nt, Human
gauacaggaaaagcugcu

SEQ ID NO: 2001357 - RNA, 19 nt, Human
gauacaggaaaagcugcug

SEQ ID NO: 2001358 - RNA, 14 nt, Human
gauaauacaccacu

SEQ ID NO: 2001359 - RNA, 18 nt, Human
gauaauacaccacuacau

SEQ ID NO: 2001360 - RNA, 21 nt, Human
gauaauacaccacuacauucu

SEQ ID NO: 2001361 - RNA, 22 nt, Human
gauaauacaccacuacauucug

SEQ ID NO: 2001362 - RNA, 11 nt, Human
gauacagaaaa

SEQ ID NO: 2001363 - RNA, 19 nt, Human
gauacaccgggccuggaga

SEQ ID NO: 2001364 - RNA, 23 nt, Human
gauagauaggucagugcaaauac

SEQ ID NO: 2001365 - RNA, 20 nt, Human
gaucauugugaaauuauuca

SEQ ID NO: 2001366 - RNA, 15 nt, Human
gaucauuugaguuca

SEQ ID NO: 2001367 - RNA, 14 nt, Human
gaucauuaucagcc

SEQ ID NO: 2001368 - RNA, 14 nt, Human
gaucauugugaaau

SEQ ID NO: 2001369 - RNA, 20 nt, Human
gauccccaagccuggcaagg

SEQ ID NO: 2001370 - RNA, 17 nt, Human
gaucaguaguuugcauu

SEQ ID NO: 2001371 - RNA, 22 nt, Human
gaucaguaguuugcauuucaga

SEQ ID NO: 2001372 - RNA, 17 nt, Human
gaucauccacugugcca

SEQ ID NO: 2001373 - RNA, 19 nt, Human
gaucauccacugugccaug

SEQ ID NO: 2001374 - RNA, 16 nt, Human
gaucauccacugugcc

SEQ ID NO: 2001375 - RNA, 21 nt, Human
gaucauccacugugccaugug

SEQ ID NO: 2001376 - RNA, 12 nt, Human
gaucaugaauaa

SEQ ID NO: 2001377 - RNA, 12 nt, Human
gaucacggcuca

SEQ ID NO: 2001378 - RNA, 14 nt, Human
gaucagccagaagc

SEQ ID NO: 2001379 - RNA, 15 nt, Human
gaucagccagaagcc

SEQ ID NO: 2001380 - RNA, 15 nt, Human
gaucagccugggcaa

SEQ ID NO: 2001381 - RNA, 12 nt, Human
gaucagccuggg

SEQ ID NO: 2001382 - RNA, 16 nt, Human
gaucaguaguuugcau

SEQ ID NO: 2001383 - RNA, 22 nt, Human
gaucagucugauucccaagcuc

SEQ ID NO: 2001384 - RNA, 16 nt, Human
gaucacgccacugcac

SEQ ID NO: 2001385 - RNA, 18 nt, Human
gaucacgccacugcacua

SEQ ID NO: 2001386 - RNA, 21 nt, Human
gaucaaguuauuuuuaauuug

SEQ ID NO: 2001387 - RNA, 13 nt, Human
gauagugggacca

SEQ ID NO: 2001388 - RNA, 17 nt, Human
gcauuugcugaauacag

SEQ ID NO: 2001389 - RNA, 13 nt, Human
gcauuuguguguu

SEQ ID NO: 2001390 - RNA, 14 nt, Human
gcauuugcugaaua

SEQ ID NO: 2001391 - RNA, 16 nt, Human
gcauuuguguugaaga

SEQ ID NO: 2001392 - RNA, 15 nt, Human
gcauuuguguguuac

SEQ ID NO: 2001393 - RNA, 16 nt, Human
gcauuuguuugaacug

SEQ ID NO: 2001394 - RNA, 13 nt, Human
gcauuugcugaau

SEQ ID NO: 2001395 - RNA, 21 nt, Human
gcauuugaggucuguucuuuc

SEQ ID NO: 2001396 - RNA, 19 nt, Human
gcauucaaauguauuacag

SEQ ID NO: 2001397 - RNA, 14 nt, Human
gcauucuuauucau

SEQ ID NO: 2001398 - RNA, 15 nt, Human
gcauucuuauucauc

SEQ ID NO: 2001399 - RNA, 14 nt, Human
gcauucuucugauc

SEQ ID NO: 2001400 - RNA, 21 nt, Human
gcauucuucugaucacugaaa

SEQ ID NO: 2001401 - RNA, 18 nt, Human
gcauuauauuuguaaauu

SEQ ID NO: 2001402 - RNA, 17 nt, Human
gcauuaucuagauacug

SEQ ID NO: 2001403 - RNA, 20 nt, Human
gcauuauaaucaccagggcc

SEQ ID NO: 2001404 - RNA, 19 nt, Human
gccaaagccuccuccagcc

SEQ ID NO: 2001405 - RNA, 16 nt, Human
gccaaagccuccucca

SEQ ID NO: 2001406 - RNA, 13 nt, Human
gccaaagccaaag

SEQ ID NO: 2001407 - RNA, 20 nt, Human
gccaaagccaaagcuaggcc

SEQ ID NO: 2001408 - RNA, 16 nt, Human
gccaaagcuaggccug

SEQ ID NO: 2001409 - RNA, 22 nt, Human
gccaaagcuaggccuggccaga

SEQ ID NO: 2001410 - RNA, 12 nt, Human
gccaaaggaagc

SEQ ID NO: 2001411 - RNA, 16 nt, Human
gccaaacucaccugcc

SEQ ID NO: 2001412 - RNA, 14 nt, Human
gccaaacucaccug

SEQ ID NO: 2001413 - RNA, 16 nt, Human
gccaaaaaaagacagg

SEQ ID NO: 2001414 - RNA, 18 nt, Human
gcauuuguuugaacugau

SEQ ID NO: 2001415 - RNA, 22 nt, Human
gcauuuguuucuuucucugagg

SEQ ID NO: 2001416 - RNA, 14 nt, Human
gccaaaaaaagaca

SEQ ID NO: 2001417 - RNA, 16 nt, Human
gcauuuuugcaggagc

SEQ ID NO: 2001418 - RNA, 17 nt, Human
gcauuuuugcaggagca

SEQ ID NO: 2001419 - RNA, 20 nt, Human
gcauggcaaggacugcaggg

SEQ ID NO: 2001420 - RNA, 15 nt, Human
gcauguucucugagg

SEQ ID NO: 2001421 - RNA, 21 nt, Human
gcauguucucugaggacacua

SEQ ID NO: 2001422 - RNA, 22 nt, Human
gcauguucucugaggacacuaa

SEQ ID NO: 2001423 - RNA, 18 nt, Human
gcaugcgggcuuccuccu

SEQ ID NO: 2001424 - RNA, 18 nt, Human
gcauggagauagccccac

SEQ ID NO: 2001425 - RNA, 18 nt, Human
gcaugauugcagaauugu

SEQ ID NO: 2001426 - RNA, 20 nt, Human
gcaucugaccucuaccuuca

SEQ ID NO: 2001427 - RNA, 16 nt, Human
gcaucugaaaauugau

SEQ ID NO: 2001428 - RNA, 20 nt, Human
gcaucacuuaaaacacguuu

SEQ ID NO: 2001429 - RNA, 16 nt, Human
gcaucacuuaaaacac

SEQ ID NO: 2001430 - RNA, 21 nt, Human
gcaugaacagcuaauuguacc

SEQ ID NO: 2001431 - RNA, 15 nt, Human
gcaugaacagugcac

SEQ ID NO: 2001432 - RNA, 18 nt, Human
gcaugaaguaauaugcac

SEQ ID NO: 2001433 - RNA, 16 nt, Human
gcaugaaaauuguguu

SEQ ID NO: 2001434 - RNA, 16 nt, Human
gcaugaaaugaacaca

SEQ ID NO: 2001435 - RNA, 18 nt, Human
gcaugaaaugaacacaaa

SEQ ID NO: 2001436 - RNA, 19 nt, Human
gcaugaaaugaacacaaau

SEQ ID NO: 2001437 - RNA, 13 nt, Human
gcaucuuugaugu

SEQ ID NO: 2001438 - RNA, 11 nt, Human
gcaucuuugau

SEQ ID NO: 2001439 - RNA, 15 nt, Human
gcaucuuugaugugu

SEQ ID NO: 2001440 - RNA, 17 nt, Human
gcaucuuugauguguug

SEQ ID NO: 2001441 - RNA, 22 nt, Human
gcaguggugguuuucuguucuu

SEQ ID NO: 2001442 - RNA, 23 nt, Human
gcaguggugguuuucuguucuuu

SEQ ID NO: 2001443 - RNA, 13 nt, Human
gcagugggagcug

SEQ ID NO: 2001444 - RNA, 12 nt, Human
gcagugggagcu

SEQ ID NO: 2001445 - RNA, 14 nt, Human
gcagugggagcugc

SEQ ID NO: 2001446 - RNA, 15 nt, Human
gcagugggagcugcc

SEQ ID NO: 2001447 - RNA, 17 nt, Human
gcaguuauuaacacuaa

SEQ ID NO: 2001448 - RNA, 13 nt, Human
gcaguucaccaug

SEQ ID NO: 2001449 - RNA, 23 nt, Human
gcaguuaugugaccucacgugca

SEQ ID NO: 2001450 - RNA, 13 nt, Human
gcauagaaguaaa

SEQ ID NO: 2001451 - RNA, 20 nt, Human
gcauaugacaaauguuucua

SEQ ID NO: 2001452 - RNA, 18 nt, Human
gcauaugacaaauguuuc

SEQ ID NO: 2001453 - RNA, 19 nt, Human
gcauaugacaaauguuucu

SEQ ID NO: 2001454 - RNA, 14 nt, Human
gcauaugacaaaug

SEQ ID NO: 2001455 - RNA, 15 nt, Human
gcauaugacaaaugu

SEQ ID NO: 2001456 - RNA, 16 nt, Human
gcauaugacaaauguu

SEQ ID NO: 2001457 - RNA, 17 nt, Human
gcauaugacaaauguuu

SEQ ID NO: 2001458 - RNA, 22 nt, Human
gcauaugcuucuuuaaaaaagc

SEQ ID NO: 2001459 - RNA, 19 nt, Human
gcauauuuauaaaaauaaa

SEQ ID NO: 2001460 - RNA, 17 nt, Human
gcauagguuuaauaauu

SEQ ID NO: 2001461 - RNA, 16 nt, Human
gcaguucuuaacccag

SEQ ID NO: 2001462 - RNA, 17 nt, Human
gcauaguaaauguaguu

SEQ ID NO: 2001463 - RNA, 22 nt, Human
gcauauaaaauggcaacaaacu

SEQ ID NO: 2001464 - RNA, 22 nt, Human
gcauagucuacuuguuauaaau

SEQ ID NO: 2001465 - RNA, 15 nt, Human
gcauauaaaauggca

SEQ ID NO: 2001466 - RNA, 14 nt, Human
gcauauccuuuuag

SEQ ID NO: 2001467 - RNA, 19 nt, Human
gcaggggcccugcagcucu

SEQ ID NO: 2001468 - RNA, 20 nt, Human
gcaggggcccugcagcucuc

SEQ ID NO: 2001469 - RNA, 14 nt, Human
gcagggcucagcgg

SEQ ID NO: 2001470 - RNA, 22 nt, Human
gcagggcucagcggggacagcu

SEQ ID NO: 2001471 - RNA, 17 nt, Human
gcagggucucacucugu

SEQ ID NO: 2001472 - RNA, 18 nt, Human
gcagggucucacucuguc

SEQ ID NO: 2001473 - RNA, 16 nt, Human
gcaggcagccaggcca

SEQ ID NO: 2001474 - RNA, 15 nt, Human
gcaggcagccaggcc

SEQ ID NO: 2001475 - RNA, 19 nt, Human
gcagggcucagcggggaca

SEQ ID NO: 2001476 - RNA, 21 nt, Human
gcagggcucagcggggacagc

SEQ ID NO: 2001477 - RNA, 16 nt, Human
gcaguggagcccagga

SEQ ID NO: 2001478 - RNA, 17 nt, Human
gcaguggagcccaggag

SEQ ID NO: 2001479 - RNA, 20 nt, Human
gcaguggcgaaaucccugcu

SEQ ID NO: 2001480 - RNA, 16 nt, Human
gcagugcaugcugucc

SEQ ID NO: 2001481 - RNA, 16 nt, Human
gcagugcaaggaggga

SEQ ID NO: 2001482 - RNA, 14 nt, Human
gcagugcccaggug

SEQ ID NO: 2001483 - RNA, 15 nt, Human
gcagugcccaggugg

SEQ ID NO: 2001484 - RNA, 15 nt, Human
gcagugcaugcuguc

SEQ ID NO: 2001485 - RNA, 23 nt, Human
gcaggugaucugcugcagagcag

SEQ ID NO: 2001486 - RNA, 19 nt, Human
gcagggugucugcccccuc

SEQ ID NO: 2001487 - RNA, 23 nt, Human
gcagggugucugcccccuccuga

SEQ ID NO: 2001488 - RNA, 16 nt, Human
gcagguaggaauauua

SEQ ID NO: 2001489 - RNA, 20 nt, Human
gcagguaggaauauuauauu

SEQ ID NO: 2001490 - RNA, 22 nt, Human
gcagguccaggguuugaguuca

SEQ ID NO: 2001491 - RNA, 19 nt, Human
gcaggucuugaacuccugg

SEQ ID NO: 2001492 - RNA, 20 nt, Human
gcaggucuugaacuccuggc

SEQ ID NO: 2001493 - RNA, 13 nt, Human
gcagguccccaga

SEQ ID NO: 2001494 - RNA, 14 nt, Human
gcagguccccagac

SEQ ID NO: 2001495 - RNA, 13 nt, Human
gcacgugcacaaa

SEQ ID NO: 2001496 - RNA, 20 nt, Human
gcacugcuuccagugaggcu

SEQ ID NO: 2001497 - RNA, 22 nt, Human
gcacugcuuccagugaggcucu

SEQ ID NO: 2001498 - RNA, 12 nt, Human
gcacugcugccc

SEQ ID NO: 2001499 - RNA, 22 nt, Human
gcacugguggcccgacagccug

SEQ ID NO: 2001500 - RNA, 23 nt, Human
gcacugguggcccgacagccugg

SEQ ID NO: 2001501 - RNA, 24 nt, Human
gcacugguggcccgacagccuggc

SEQ ID NO: 2001502 - RNA, 13 nt, Human
gcacugcucucac

SEQ ID NO: 2001503 - RNA, 15 nt, Human
gcacugcucucaccu

SEQ ID NO: 2001504 - RNA, 18 nt, Human
gcacugcuuccagugagg

SEQ ID NO: 2001505 - RNA, 16 nt, Human
gcacugcuuccaguga

SEQ ID NO: 2001506 - RNA, 14 nt, Human
gcacuucaggaggc

SEQ ID NO: 2001507 - RNA, 13 nt, Human
gcagaauuggaaa

SEQ ID NO: 2001508 - RNA, 14 nt, Human
gcagaauuggaaaa

SEQ ID NO: 2001509 - RNA, 19 nt, Human
gcacuucagggcagauuuu

SEQ ID NO: 2001510 - RNA, 15 nt, Human
gcagacaggaccagg

SEQ ID NO: 2001511 - RNA, 13 nt, Human
gcagacaggacca

SEQ ID NO: 2001512 - RNA, 12 nt, Human
gcagacaggacc

SEQ ID NO: 2001513 - RNA, 20 nt, Human
gcagaauuggaaaagacuaa

SEQ ID NO: 2001514 - RNA, 21 nt, Human
gcagaauuguuuagauuuugu

SEQ ID NO: 2001515 - RNA, 23 nt, Human
gcagaauuguuuagauuuugugu

SEQ ID NO: 2001516 - RNA, 15 nt, Human
gcagacaaucuucug

SEQ ID NO: 2001517 - RNA, 23 nt, Human
gcagacaggcaagcaccuccugc

SEQ ID NO: 2001518 - RNA, 18 nt, Human
gcagacaggaccagggau

SEQ ID NO: 2001519 - RNA, 19 nt, Human
gcagacaggcaagcaccuc

SEQ ID NO: 2001520 - RNA, 17 nt, Human
gcaccuuagacaguccc

SEQ ID NO: 2001521 - RNA, 14 nt, Human
gcaccuuagacagu

SEQ ID NO: 2001522 - RNA, 22 nt, Human
gcaccuggaauauauaaccagu

SEQ ID NO: 2001523 - RNA, 18 nt, Human
gcaccuggaauauauaac

SEQ ID NO: 2001524 - RNA, 21 nt, Human
gcaccuggaauauauaaccag

SEQ ID NO: 2001525 - RNA, 15 nt, Human
gcacccucaggcagg

SEQ ID NO: 2001526 - RNA, 23 nt, Human
gcacccguguuuguaaaaaugua

SEQ ID NO: 2001527 - RNA, 12 nt, Human
gcacgauuucug

SEQ ID NO: 2001528 - RNA, 18 nt, Human
gcaccuuagacagucccu

SEQ ID NO: 2001529 - RNA, 19 nt, Human
gcaccuuagacagucccug

SEQ ID NO: 2001530 - RNA, 22 nt, Human
gcaccacugcacuccagccugg

SEQ ID NO: 2001531 - RNA, 21 nt, Human
gcaccacugcacuccagccug

SEQ ID NO: 2001532 - RNA, 15 nt, Human
gcaccagcagccugg

SEQ ID NO: 2001533 - RNA, 12 nt, Human
gcaauggcagcc

SEQ ID NO: 2001534 - RNA, 13 nt, Human
gcaauggcagccu

SEQ ID NO: 2001535 - RNA, 20 nt, Human
gcaccacugcacuccagccu

SEQ ID NO: 2001536 - RNA, 14 nt, Human
gcaauggcagccuu

SEQ ID NO: 2001537 - RNA, 16 nt, Human
gcaccagcagccugga

SEQ ID NO: 2001538 - RNA, 19 nt, Human
gcaccagcccagaagugca

SEQ ID NO: 2001539 - RNA, 19 nt, Human
gcacccggccccugcuggu

SEQ ID NO: 2001540 - RNA, 22 nt, Human
gcacccaccaucaugucuggcu

SEQ ID NO: 2001541 - RNA, 17 nt, Human
gcagcccugcagagggc

SEQ ID NO: 2001542 - RNA, 16 nt, Human
gcagcccugcagaggg

SEQ ID NO: 2001543 - RNA, 15 nt, Human
gcagcccugcagagg

SEQ ID NO: 2001544 - RNA, 14 nt, Human
gcagcccugcagag

SEQ ID NO: 2001545 - RNA, 13 nt, Human
gcagcccugcuuu

SEQ ID NO: 2001546 - RNA, 15 nt, Human
gcagcucaccucucc

SEQ ID NO: 2001547 - RNA, 14 nt, Human
gcagcucaccucuc

SEQ ID NO: 2001548 - RNA, 15 nt, Human
gcagccuuggcaaac

SEQ ID NO: 2001549 - RNA, 14 nt, Human
gcaggcagccaggc

SEQ ID NO: 2001550 - RNA, 13 nt, Human
gcaggcagccagg

SEQ ID NO: 2001551 - RNA, 12 nt, Human
gcaggcagccag

SEQ ID NO: 2001552 - RNA, 9 nt, Human
gcaggcagc

SEQ ID NO: 2001553 - RNA, 21 nt, Human
gcaggagggacagucucacca

SEQ ID NO: 2001554 - RNA, 20 nt, Human
gcaggaggaucacuugaguc

SEQ ID NO: 2001555 - RNA, 20 nt, Human
gcaggaaggcugagaggaga

SEQ ID NO: 2001556 - RNA, 13 nt, Human
gcaggaccagccc

SEQ ID NO: 2001557 - RNA, 14 nt, Human
gcaggacacugcag

SEQ ID NO: 2001558 - RNA, 19 nt, Human
gcaggacacugcagaacag

SEQ ID NO: 2001559 - RNA, 23 nt, Human
gcaggaggaucacuugaguccag

SEQ ID NO: 2001560 - RNA, 20 nt, Human
gcagccccgugggguuccuc

SEQ ID NO: 2001561 - RNA, 21 nt, Human
gcagccccuguucuggcagag

SEQ ID NO: 2001562 - RNA, 20 nt, Human
gcagccccuguucuggcaga

SEQ ID NO: 2001563 - RNA, 13 nt, Human
gcagcccugcaga

SEQ ID NO: 2001564 - RNA, 19 nt, Human
gcagcccgcaucagcugcu

SEQ ID NO: 2001565 - RNA, 22 nt, Human
gcagcccgcaucagcugcucag

SEQ ID NO: 2001566 - RNA, 16 nt, Human
gcagcaauaaagcagc

SEQ ID NO: 2001567 - RNA, 23 nt, Human
gcagcaauaaagcagcguuucua

SEQ ID NO: 2001568 - RNA, 17 nt, Human
gcagccccauucugccu

SEQ ID NO: 2001569 - RNA, 17 nt, Human
gcagauuuuaguuuuau

SEQ ID NO: 2001570 - RNA, 17 nt, Human
gcagcaauaauuucugu

SEQ ID NO: 2001571 - RNA, 18 nt, Human
gcagccccauucugccug

SEQ ID NO: 2001572 - RNA, 19 nt, Human
gcagccccauucugccugc

SEQ ID NO: 2001573 - RNA, 21 nt, Human
gcagccccauucugccugccc

SEQ ID NO: 2001574 - RNA, 24 nt, Human
gcagccccauucugccugcccagg

SEQ ID NO: 2001575 - RNA, 17 nt, Human
gcagauacuacugacca

SEQ ID NO: 2001576 - RNA, 22 nt, Human
gcagauacuacugaccagacaa

SEQ ID NO: 2001577 - RNA, 24 nt, Human
gcagauacuacugaccagacaagc

SEQ ID NO: 2001578 - RNA, 22 nt, Human
gcagauacaggaaaagcugcug

SEQ ID NO: 2001579 - RNA, 21 nt, Human
gcagauucuaggaccuguguc

SEQ ID NO: 2001580 - RNA, 17 nt, Human
gcagacaguuaagagaa

SEQ ID NO: 2001581 - RNA, 20 nt, Human
gcagacagggggccagaaca

SEQ ID NO: 2001582 - RNA, 20 nt, Human
gcagacaugguggggucucc

SEQ ID NO: 2001583 - RNA, 20 nt, Human
gcagaguugaagacagagcu

SEQ ID NO: 2001584 - RNA, 18 nt, Human
gcagauaaacaguaguga

SEQ ID NO: 2001585 - RNA, 21 nt, Human
gcagaguugaagacagagcua

SEQ ID NO: 2001586 - RNA, 16 nt, Human
gacuagacacacaaag

SEQ ID NO: 2001587 - RNA, 19 nt, Human
gacuagacacacaaagcag

SEQ ID NO: 2001588 - RNA, 14 nt, Human
gacuagacacacaa

SEQ ID NO: 2001589 - RNA, 22 nt, Human
gacguguuaugacuccagaauu

SEQ ID NO: 2001590 - RNA, 17 nt, Human
gacuacucccccaggug

SEQ ID NO: 2001591 - RNA, 12 nt, Human
gacuacaggcac

SEQ ID NO: 2001592 - RNA, 14 nt, Human
gacuacuguucagc

SEQ ID NO: 2001593 - RNA, 22 nt, Human
gacucccccaguccccuucccg

SEQ ID NO: 2001594 - RNA, 16 nt, Human
gacuccugcaggcagc

SEQ ID NO: 2001595 - RNA, 15 nt, Human
gacuccugcaggcag

SEQ ID NO: 2001596 - RNA, 14 nt, Human
gacuccugcaggca

SEQ ID NO: 2001597 - RNA, 15 nt, Human
gacucaguggggagg

SEQ ID NO: 2001598 - RNA, 21 nt, Human
gacucauauccccuauuuaac

SEQ ID NO: 2001599 - RNA, 15 nt, Human
gacucagguugucug

SEQ ID NO: 2001600 - RNA, 11 nt, Human
gacuccagaaa

SEQ ID NO: 2001601 - RNA, 22 nt, Human
gacuccagaaaugucccuuucu

SEQ ID NO: 2001602 - RNA, 17 nt, Human
gaccuuuccugaggaag

SEQ ID NO: 2001603 - RNA, 20 nt, Human
gaccuuguaauguaacugcu

SEQ ID NO: 2001604 - RNA, 15 nt, Human
gaccuuguaauguaa

SEQ ID NO: 2001605 - RNA, 16 nt, Human
gaccuuguaauguaac

SEQ ID NO: 2001606 - RNA, 17 nt, Human
gaccuuguaauguaacu

SEQ ID NO: 2001607 - RNA, 18 nt, Human
gaccuuguaauguaacug

SEQ ID NO: 2001608 - RNA, 21 nt, Human
gaccuuucaauaggaaaaacu

SEQ ID NO: 2001609 - RNA, 23 nt, Human
gaccuugaacuggguacuugugg

SEQ ID NO: 2001610 - RNA, 19 nt, Human
gaccugccucggccuccca

SEQ ID NO: 2001611 - RNA, 13 nt, Human
gaccugcugaagu

SEQ ID NO: 2001612 - RNA, 20 nt, Human
gaccugcugaaguccggaac

SEQ ID NO: 2001613 - RNA, 21 nt, Human
gacgucagauguuuaaaacac

SEQ ID NO: 2001614 - RNA, 20 nt, Human
gacguguuaugacuccagaa

SEQ ID NO: 2001615 - RNA, 17 nt, Human
gacguguuaugacucca

SEQ ID NO: 2001616 - RNA, 11 nt, Human
gacgguuccua

SEQ ID NO: 2001617 - RNA, 16 nt, Human
gacgguuccuacacag

SEQ ID NO: 2001618 - RNA, 18 nt, Human
gacgguuccuacacagga

SEQ ID NO: 2001619 - RNA, 19 nt, Human
gacgguuccuacacaggac

SEQ ID NO: 2001620 - RNA, 21 nt, Human
gacgguuccuacacaggacag

SEQ ID NO: 2001621 - RNA, 22 nt, Human
gacgguuccuacacaggacagg

SEQ ID NO: 2001622 - RNA, 16 nt, Human
gacguacaaguaguuc

SEQ ID NO: 2001623 - RNA, 18 nt, Human
gacguacaaguaguucug

SEQ ID NO: 2001624 - RNA, 19 nt, Human
gacguacaaguaguucugu

SEQ ID NO: 2001625 - RNA, 22 nt, Human
gacguacaaguaguucuguauu

SEQ ID NO: 2001626 - RNA, 20 nt, Human
gacgacuguuuucccaacac

SEQ ID NO: 2001627 - RNA, 14 nt, Human
gacgcaccagccca

SEQ ID NO: 2001628 - RNA, 14 nt, Human
gacggagucccacc

SEQ ID NO: 2001629 - RNA, 18 nt, Human
gacggagucccaccuugg

SEQ ID NO: 2001630 - RNA, 23 nt, Human
gacggagucccaccuuggcugca

SEQ ID NO: 2001631 - RNA, 21 nt, Human
gacggagucccaccuuggcug

SEQ ID NO: 2001632 - RNA, 17 nt, Human
gacgggguuucaccaug

SEQ ID NO: 2001633 - RNA, 17 nt, Human
gaccuaaaaauuggugu

SEQ ID NO: 2001634 - RNA, 15 nt, Human
gaccuaaccagggcc

SEQ ID NO: 2001635 - RNA, 18 nt, Human
gaccuaaccagggccaga

SEQ ID NO: 2001636 - RNA, 19 nt, Human
gaccuaaccagggccagaa

SEQ ID NO: 2001637 - RNA, 22 nt, Human
gaccuaaccagggccagaagua

SEQ ID NO: 2001638 - RNA, 16 nt, Human
gaccucaccuaggaag

SEQ ID NO: 2001639 - RNA, 17 nt, Human
gaccucaccuaggaagu

SEQ ID NO: 2001640 - RNA, 15 nt, Human
gaccgugaggccaga

SEQ ID NO: 2001641 - RNA, 19 nt, Human
gaccgugaagauacuuugu

SEQ ID NO: 2001642 - RNA, 14 nt, Human
gaccgugaggccag

SEQ ID NO: 2001643 - RNA, 15 nt, Human
gaccugaggcccuuc

SEQ ID NO: 2001644 - RNA, 13 nt, Human
gaccucaggccug

SEQ ID NO: 2001645 - RNA, 12 nt, Human
gaccucaggccu

SEQ ID NO: 2001646 - RNA, 11 nt, Human
gaccucaggcc

SEQ ID NO: 2001647 - RNA, 21 nt, Human
gaccugaggcccuucucucca

SEQ ID NO: 2001648 - RNA, 18 nt, Human
gaccugaggcccuucucu

SEQ ID NO: 2001649 - RNA, 21 nt, Human
gaccugccccuccucucugcc

SEQ ID NO: 2001650 - RNA, 15 nt, Human
gaccugccucggccu

SEQ ID NO: 2001651 - RNA, 23 nt, Human
gaccugauuucugagcauuuaau

SEQ ID NO: 2001652 - RNA, 11 nt, Human
gacccacugcu

SEQ ID NO: 2001653 - RNA, 12 nt, Human
gacccacugcuu

SEQ ID NO: 2001654 - RNA, 17 nt, Human
gacccaugcugcccugu

SEQ ID NO: 2001655 - RNA, 16 nt, Human
gacccaugcugcccug

SEQ ID NO: 2001656 - RNA, 15 nt, Human
gacccaugcugcccu

SEQ ID NO: 2001657 - RNA, 14 nt, Human
gacccaugcugccc

SEQ ID NO: 2001658 - RNA, 13 nt, Human
gacccagggggag

SEQ ID NO: 2001659 - RNA, 23 nt, Human
gacccugucucaaaaaaagaaaa

SEQ ID NO: 2001660 - RNA, 16 nt, Human
gacccugcccuguggg

SEQ ID NO: 2001661 - RNA, 15 nt, Human
gacccugcccugugg

SEQ ID NO: 2001662 - RNA, 13 nt, Human
gacccugcccugu

SEQ ID NO: 2001663 - RNA, 21 nt, Human
gacccugaggcccagagggcc

SEQ ID NO: 2001664 - RNA, 12 nt, Human
gacccugcccug

SEQ ID NO: 2001665 - RNA, 20 nt, Human
gacccugaggcccagagggc

SEQ ID NO: 2001666 - RNA, 19 nt, Human
gacccugaggcccagaggg

SEQ ID NO: 2001667 - RNA, 18 nt, Human
gacccugaggcccagagg

SEQ ID NO: 2001668 - RNA, 23 nt, Human
gaccccucauagcccucacccug

SEQ ID NO: 2001669 - RNA, 13 nt, Human
gaccccuccaugu

SEQ ID NO: 2001670 - RNA, 22 nt, Human
gaccccucauagcccucacccu

SEQ ID NO: 2001671 - RNA, 16 nt, Human
gaccccaucugugaau

SEQ ID NO: 2001672 - RNA, 19 nt, Human
gaccccaucugugaauaag

SEQ ID NO: 2001673 - RNA, 23 nt, Human
gacaugaaaauagcaauauucuu

SEQ ID NO: 2001674 - RNA, 18 nt, Human
gacauggcuucugaaccu

SEQ ID NO: 2001675 - RNA, 17 nt, Human
gacaugucuuuucuugc

SEQ ID NO: 2001676 - RNA, 12 nt, Human
gacauggugggg

SEQ ID NO: 2001677 - RNA, 21 nt, Human
gacaugucuuuucuugcauga

SEQ ID NO: 2001678 - RNA, 13 nt, Human
gaccaaauggaaa

SEQ ID NO: 2001679 - RNA, 21 nt, Human
gaccaaauggaaacagaggac

SEQ ID NO: 2001680 - RNA, 14 nt, Human
gacaucaacagaua

SEQ ID NO: 2001681 - RNA, 23 nt, Human
gacauacuaaccagcagaaaugc

SEQ ID NO: 2001682 - RNA, 15 nt, Human
gacauacuaaccagc

SEQ ID NO: 2001683 - RNA, 16 nt, Human
gacauacuaaccagca

SEQ ID NO: 2001684 - RNA, 17 nt, Human
gacaggcgaaagaaaac

SEQ ID NO: 2001685 - RNA, 16 nt, Human
gacaggcgaaagaaaa

SEQ ID NO: 2001686 - RNA, 12 nt, Human
gacagcaugaga

SEQ ID NO: 2001687 - RNA, 19 nt, Human
gacagccaacuauggccug

SEQ ID NO: 2001688 - RNA, 13 nt, Human
gacagcugccugg

SEQ ID NO: 2001689 - RNA, 12 nt, Human
gacagcugccug

SEQ ID NO: 2001690 - RNA, 22 nt, Human
gacagccaacuauggccugugg

SEQ ID NO: 2001691 - RNA, 13 nt, Human
gacagccacggcc

SEQ ID NO: 2001692 - RNA, 14 nt, Human
gacagacacaggcc

SEQ ID NO: 2001693 - RNA, 18 nt, Human
gacacgugggcuccccuc

SEQ ID NO: 2001694 - RNA, 19 nt, Human
gacacgugggcuccccucu

SEQ ID NO: 2001695 - RNA, 20 nt, Human
gacacgugggcuccccucuu

SEQ ID NO: 2001696 - RNA, 23 nt, Human
gacacgugggcuccccucuuccu

SEQ ID NO: 2001697 - RNA, 20 nt, Human
gacacuaaccacgcuggacc

SEQ ID NO: 2001698 - RNA, 21 nt, Human
gacacuaaccacgcuggaccu

SEQ ID NO: 2001699 - RNA, 15 nt, Human
gacagacacaggccc

SEQ ID NO: 2001700 - RNA, 16 nt, Human
gacagacacaggcccg

SEQ ID NO: 2001701 - RNA, 19 nt, Human
gacagaucucugcuuugga

SEQ ID NO: 2001702 - RNA, 21 nt, Human
gacagaucucugcuuuggaaa

SEQ ID NO: 2001703 - RNA, 23 nt, Human
gacagaucucugcuuuggaaauc

SEQ ID NO: 2001704 - RNA, 14 nt, Human
gacaggcaaugcug

SEQ ID NO: 2001705 - RNA, 16 nt, Human
gacaggcaaugcuggc

SEQ ID NO: 2001706 - RNA, 17 nt, Human
gacaggagaugcugugc

SEQ ID NO: 2001707 - RNA, 19 nt, Human
gacaggagaugcugugccc

SEQ ID NO: 2001708 - RNA, 22 nt, Human
gacaggagaugcugugccccug

SEQ ID NO: 2001709 - RNA, 17 nt, Human
gacaggcaaugcuggcu

SEQ ID NO: 2001710 - RNA, 18 nt, Human
gacaggcauguucucuga

SEQ ID NO: 2001711 - RNA, 19 nt, Human
gacaggcauguucucugag

SEQ ID NO: 2001712 - RNA, 15 nt, Human
gacagcugccuggga

SEQ ID NO: 2001713 - RNA, 14 nt, Human
gacagcugccuggg

SEQ ID NO: 2001714 - RNA, 17 nt, Human
gacagcuuagaauuauu

SEQ ID NO: 2001715 - RNA, 23 nt, Human
gacagcuuagaauuauuugcacu

SEQ ID NO: 2001716 - RNA, 17 nt, Human
gacaaugacuuacugua

SEQ ID NO: 2001717 - RNA, 20 nt, Human
gacaaugacuuacuguacau

SEQ ID NO: 2001718 - RNA, 12 nt, Human
gacaaugcaaac

SEQ ID NO: 2001719 - RNA, 21 nt, Human
gacaaugacuuacuguacaug

SEQ ID NO: 2001720 - RNA, 18 nt, Human
gacaaugcaaaccaucau

SEQ ID NO: 2001721 - RNA, 16 nt, Human
gacaaugcaaaccauc

SEQ ID NO: 2001722 - RNA, 12 nt, Human
gacaauuuauua

SEQ ID NO: 2001723 - RNA, 13 nt, Human
gacaaucuucugu

SEQ ID NO: 2001724 - RNA, 22 nt, Human
gacacaagccuucggcgccuua

SEQ ID NO: 2001725 - RNA, 13 nt, Human
gacacacaaagca

SEQ ID NO: 2001726 - RNA, 14 nt, Human
gacacacaaagcag

SEQ ID NO: 2001727 - RNA, 13 nt, Human
gacaauuuauuau

SEQ ID NO: 2001728 - RNA, 19 nt, Human
gacaauuuauuauggcaca

SEQ ID NO: 2001729 - RNA, 13 nt, Human
gacacacagcucu

SEQ ID NO: 2001730 - RNA, 15 nt, Human
gacacaggcccggcu

SEQ ID NO: 2001731 - RNA, 17 nt, Human
gacacaggcccggcucc

SEQ ID NO: 2001732 - RNA, 22 nt, Human
gacaagggaaaauaaaaaaaga

SEQ ID NO: 2001733 - RNA, 16 nt, Human
gacaaggugcaggcag

SEQ ID NO: 2001734 - RNA, 17 nt, Human
gacaaggugcaggcagg

SEQ ID NO: 2001735 - RNA, 18 nt, Human
gacaaggugcaggcaggc

SEQ ID NO: 2001736 - RNA, 16 nt, Human
gacaaugacccagugg

SEQ ID NO: 2001737 - RNA, 19 nt, Human
gacaauacuguaugucguc

SEQ ID NO: 2001738 - RNA, 17 nt, Human
gacaauagcauuagaaa

SEQ ID NO: 2001739 - RNA, 16 nt, Human
gaagucuuuguacaga

SEQ ID NO: 2001740 - RNA, 14 nt, Human
gaagucuuuguaca

SEQ ID NO: 2001741 - RNA, 17 nt, Human
gaagucuucaugaaaug

SEQ ID NO: 2001742 - RNA, 18 nt, Human
gaagucuucaugaaaugc

SEQ ID NO: 2001743 - RNA, 13 nt, Human
gaagucuucuauu

SEQ ID NO: 2001744 - RNA, 17 nt, Human
gaagucuucuauuuauu

SEQ ID NO: 2001745 - RNA, 22 nt, Human
gacaaggauugcuacuguccua

SEQ ID NO: 2001746 - RNA, 12 nt, Human
gacaagcacagu

SEQ ID NO: 2001747 - RNA, 15 nt, Human
gacaagcacagucag

SEQ ID NO: 2001748 - RNA, 15 nt, Human
gacacgaauauugcu

SEQ ID NO: 2001749 - RNA, 18 nt, Human
gacaccuugacagggcac

SEQ ID NO: 2001750 - RNA, 20 nt, Human
gacaccuugacagggcacac

SEQ ID NO: 2001751 - RNA, 15 nt, Human
gacaccuugacaggg

SEQ ID NO: 2001752 - RNA, 17 nt, Human
gacaccuugacagggca

SEQ ID NO: 2001753 - RNA, 18 nt, Human
gacacgaauauugcugau

SEQ ID NO: 2001754 - RNA, 17 nt, Human
gacacgaauauugcuga

SEQ ID NO: 2001755 - RNA, 19 nt, Human
gacacgaauauugcugaug

SEQ ID NO: 2001756 - RNA, 15 nt, Human
gacacuaaccacgcu

SEQ ID NO: 2001757 - RNA, 16 nt, Human
gacacuaaccacgcug

SEQ ID NO: 2001758 - RNA, 17 nt, Human
gacacuaaccacgcugg

SEQ ID NO: 2001759 - RNA, 18 nt, Human
gacacuaaccacgcugga

SEQ ID NO: 2001760 - RNA, 23 nt, Human
gacacccugugauggggcccugc

SEQ ID NO: 2001761 - RNA, 22 nt, Human
gacacccugugauggggcccug

SEQ ID NO: 2001762 - RNA, 17 nt, Human
gacaccuacugaguggc

SEQ ID NO: 2001763 - RNA, 17 nt, Human
gacacagugaccauacu

SEQ ID NO: 2001764 - RNA, 22 nt, Human
gacacaggggacacccagaaac

SEQ ID NO: 2001765 - RNA, 18 nt, Human
gacacaggcccggcucca

SEQ ID NO: 2001766 - RNA, 13 nt, Human
gacacccugugau

SEQ ID NO: 2001767 - RNA, 12 nt, Human
gacacccuguga

SEQ ID NO: 2001768 - RNA, 15 nt, Human
gacaccccacuuagc

SEQ ID NO: 2001769 - RNA, 15 nt, Human
gagacagcucugcau

SEQ ID NO: 2001770 - RNA, 18 nt, Human
gagacagcucugcauacu

SEQ ID NO: 2001771 - RNA, 13 nt, Human
gagacagcucugc

SEQ ID NO: 2001772 - RNA, 24 nt, Human
gagacagcccgggcucugccuccc

SEQ ID NO: 2001773 - RNA, 23 nt, Human
gagacagcccgggcucugccucc

SEQ ID NO: 2001774 - RNA, 22 nt, Human
gagacagcccgggcucugccuc

SEQ ID NO: 2001775 - RNA, 21 nt, Human
gagacagcccgggcucugccu

SEQ ID NO: 2001776 - RNA, 20 nt, Human
gagacagcccgggcucugcc

SEQ ID NO: 2001777 - RNA, 19 nt, Human
gagacagcccgggcucugc

SEQ ID NO: 2001778 - RNA, 18 nt, Human
gagacagcccgggcucug

SEQ ID NO: 2001779 - RNA, 17 nt, Human
gagacagcccgggcucu

SEQ ID NO: 2001780 - RNA, 14 nt, Human
gagacagcccgggc

SEQ ID NO: 2001781 - RNA, 22 nt, Human
gagacuccugcaggcagccagg

SEQ ID NO: 2001782 - RNA, 18 nt, Human
gagacucgcgacaaugca

SEQ ID NO: 2001783 - RNA, 16 nt, Human
gagacucgcgacaaug

SEQ ID NO: 2001784 - RNA, 12 nt, Human
gagaccaucccu

SEQ ID NO: 2001785 - RNA, 14 nt, Human
gagacucugucuca

SEQ ID NO: 2001786 - RNA, 22 nt, Human
gagacugucucaagagggcacu

SEQ ID NO: 2001787 - RNA, 17 nt, Human
gagacugcuccugagcc

SEQ ID NO: 2001788 - RNA, 18 nt, Human
gagacugcuccugagccc

SEQ ID NO: 2001789 - RNA, 19 nt, Human
gagacugcuccugagcccc

SEQ ID NO: 2001790 - RNA, 23 nt, Human
gagacugucucaagagggcacug

SEQ ID NO: 2001791 - RNA, 20 nt, Human
gagacuguggagacugcucc

SEQ ID NO: 2001792 - RNA, 21 nt, Human
gagacuguggagacugcuccu

SEQ ID NO: 2001793 - RNA, 13 nt, Human
gagacuuguauga

SEQ ID NO: 2001794 - RNA, 14 nt, Human
gagagaagagcccc

SEQ ID NO: 2001795 - RNA, 15 nt, Human
gagagaagagcccca

SEQ ID NO: 2001796 - RNA, 16 nt, Human
gagagaagagccccac

SEQ ID NO: 2001797 - RNA, 17 nt, Human
gagagaagagaaugcac

SEQ ID NO: 2001798 - RNA, 10 nt, Human
gagacuuuga

SEQ ID NO: 2001799 - RNA, 11 nt, Human
gagacuuugau

SEQ ID NO: 2001800 - RNA, 13 nt, Human
gagacuuugaugu

SEQ ID NO: 2001801 - RNA, 14 nt, Human
gagacuuugauguc

SEQ ID NO: 2001802 - RNA, 15 nt, Human
gagacuuugauguca

SEQ ID NO: 2001803 - RNA, 19 nt, Human
gagacuuugaugucagcag

SEQ ID NO: 2001804 - RNA, 14 nt, Human
gagagauacucugg

SEQ ID NO: 2001805 - RNA, 15 nt, Human
gagagauacucuggg

SEQ ID NO: 2001806 - RNA, 20 nt, Human
gagagaggcuaaaauguuuu

SEQ ID NO: 2001807 - RNA, 18 nt, Human
gagagaggcuaaaauguu

SEQ ID NO: 2001808 - RNA, 19 nt, Human
gagagaggcuaaaauguuu

SEQ ID NO: 2001809 - RNA, 22 nt, Human
gagagcauuauaaucaccaggg

SEQ ID NO: 2001810 - RNA, 19 nt, Human
gagagcccagagucccccc

SEQ ID NO: 2001811 - RNA, 20 nt, Human
gagagcccagagucccccca

SEQ ID NO: 2001812 - RNA, 15 nt, Human
gagagugaacaaauu

SEQ ID NO: 2001813 - RNA, 15 nt, Human
gagagugagguggaa

SEQ ID NO: 2001814 - RNA, 16 nt, Human
gagaguuuagcuguaa

SEQ ID NO: 2001815 - RNA, 19 nt, Human
gagagugaacaaauuuaca

SEQ ID NO: 2001816 - RNA, 17 nt, Human
gagauacagaauuuuau

SEQ ID NO: 2001817 - RNA, 21 nt, Human
gagagggugggagugggccca

SEQ ID NO: 2001818 - RNA, 13 nt, Human
gagaggggaacag

SEQ ID NO: 2001819 - RNA, 18 nt, Human
gagaggggaacagacugg

SEQ ID NO: 2001820 - RNA, 14 nt, Human
gagagccuuccagg

SEQ ID NO: 2001821 - RNA, 13 nt, Human
gagagccuuccag

SEQ ID NO: 2001822 - RNA, 14 nt, Human
gagaaauuuauaaa

SEQ ID NO: 2001823 - RNA, 14 nt, Human
gagaaauauuuuaa

SEQ ID NO: 2001824 - RNA, 17 nt, Human
gagaaauauuuuaauuu

SEQ ID NO: 2001825 - RNA, 17 nt, Human
gagaacagauaaagauu

SEQ ID NO: 2001826 - RNA, 23 nt, Human
gagaaaguacuucuccacccugc

SEQ ID NO: 2001827 - RNA, 18 nt, Human
gacucgcgacaaugcaaa

SEQ ID NO: 2001828 - RNA, 17 nt, Human
gacuccugcaggcagcc

SEQ ID NO: 2001829 - RNA, 19 nt, Human
gacucgcgacaaugcaaac

SEQ ID NO: 2001830 - RNA, 14 nt, Human
gacuuggaagcucc

SEQ ID NO: 2001831 - RNA, 15 nt, Human
gacuuggaagcuccg

SEQ ID NO: 2001832 - RNA, 16 nt, Human
gacuuggaagcuccgc

SEQ ID NO: 2001833 - RNA, 21 nt, Human
gagaaaauggacguguuauga

SEQ ID NO: 2001834 - RNA, 16 nt, Human
gacuuguucuugauag

SEQ ID NO: 2001835 - RNA, 18 nt, Human
gacuugugcacaggcaga

SEQ ID NO: 2001836 - RNA, 17 nt, Human
gacuugugcacaggcag

SEQ ID NO: 2001837 - RNA, 19 nt, Human
gacuugugcacaggcagag

SEQ ID NO: 2001838 - RNA, 20 nt, Human
gagaagauggauaugaccag

SEQ ID NO: 2001839 - RNA, 22 nt, Human
gagaagccagcuuuccucauca

SEQ ID NO: 2001840 - RNA, 21 nt, Human
gagaaugcacaaacagaggcc

SEQ ID NO: 2001841 - RNA, 20 nt, Human
gagaaugcacaaacagaggc

SEQ ID NO: 2001842 - RNA, 22 nt, Human
gagaaugcacaaacagaggccg

SEQ ID NO: 2001843 - RNA, 15 nt, Human
gagacagacuagaag

SEQ ID NO: 2001844 - RNA, 12 nt, Human
gagacagcccgg

SEQ ID NO: 2001845 - RNA, 16 nt, Human
gagacagccaacuaug

SEQ ID NO: 2001846 - RNA, 19 nt, Human
gagacagaguuuucacucu

SEQ ID NO: 2001847 - RNA, 17 nt, Human
gagacagacuagaaguu

SEQ ID NO: 2001848 - RNA, 19 nt, Human
gagacagagcaaccccugg

SEQ ID NO: 2001849 - RNA, 20 nt, Human
gagacagagcgacagagcag

SEQ ID NO: 2001850 - RNA, 17 nt, Human
gagacacaagccuucgg

SEQ ID NO: 2001851 - RNA, 15 nt, Human
gagacacaagccuuc

SEQ ID NO: 2001852 - RNA, 22 nt, Human
gagcuugaaacccguggcgcuu

SEQ ID NO: 2001853 - RNA, 22 nt, Human
gagcuuucugcuaucaaagagg

SEQ ID NO: 2001854 - RNA, 20 nt, Human
gagcuuugaaaauucagugg

SEQ ID NO: 2001855 - RNA, 14 nt, Human
gagcuuuuguagaa

SEQ ID NO: 2001856 - RNA, 23 nt, Human
gagcuuugucuacuucaaaaguu

SEQ ID NO: 2001857 - RNA, 13 nt, Human
gaggaaaaauaug

SEQ ID NO: 2001858 - RNA, 20 nt, Human
gaggaaaaccaagccguggc

SEQ ID NO: 2001859 - RNA, 21 nt, Human
gaggaaaaccaagccguggcu

SEQ ID NO: 2001860 - RNA, 23 nt, Human
gaggaaaaccaagccguggcuuc

SEQ ID NO: 2001861 - RNA, 14 nt, Human
gaggaaaaauaugu

SEQ ID NO: 2001862 - RNA, 17 nt, Human
gaggaaaaauaugugaa

SEQ ID NO: 2001863 - RNA, 18 nt, Human
gaggaaacaacagcuuua

SEQ ID NO: 2001864 - RNA, 17 nt, Human
gaggaaagcaaaggaga

SEQ ID NO: 2001865 - RNA, 16 nt, Human
gaggaaagcaaaggag

SEQ ID NO: 2001866 - RNA, 18 nt, Human
gaggaagccgcuggggcc

SEQ ID NO: 2001867 - RNA, 17 nt, Human
gaggaagccgcuggggc

SEQ ID NO: 2001868 - RNA, 14 nt, Human
gaggaagccgcugg

SEQ ID NO: 2001869 - RNA, 13 nt, Human
gaggaagccgcug

SEQ ID NO: 2001870 - RNA, 17 nt, Human
gaggaagagaaaaaaua

SEQ ID NO: 2001871 - RNA, 16 nt, Human
gaggaacaaggcaagg

SEQ ID NO: 2001872 - RNA, 14 nt, Human
gaggaacaaggcaa

SEQ ID NO: 2001873 - RNA, 16 nt, Human
gaggaaauccuaccuu

SEQ ID NO: 2001874 - RNA, 20 nt, Human
gaggaaaguacauuuuuuga

SEQ ID NO: 2001875 - RNA, 12 nt, Human
gaggaaaucaaa

SEQ ID NO: 2001876 - RNA, 20 nt, Human
gaggaaaucaaagugcuauu

SEQ ID NO: 2001877 - RNA, 19 nt, Human
gaggaaagcacagaggccu

SEQ ID NO: 2001878 - RNA, 20 nt, Human
gaggaaagcacagaggccuc

SEQ ID NO: 2001879 - RNA, 22 nt, Human
gaggaaagcacagaggccuccu

SEQ ID NO: 2001880 - RNA, 15 nt, Human
gagcugaguggggga

SEQ ID NO: 2001881 - RNA, 23 nt, Human
gagcucgcggcgaggacgacuuc

SEQ ID NO: 2001882 - RNA, 19 nt, Human
gagcucccacuucugccag

SEQ ID NO: 2001883 - RNA, 20 nt, Human
gagcucccacuucugccaga

SEQ ID NO: 2001884 - RNA, 18 nt, Human
gagcuccauacacacgcu

SEQ ID NO: 2001885 - RNA, 20 nt, Human
gagcuccauacacacgcugc

SEQ ID NO: 2001886 - RNA, 21 nt, Human
gagcuccauacacacgcugcc

SEQ ID NO: 2001887 - RNA, 22 nt, Human
gagcuccauacacacgcugccu

SEQ ID NO: 2001888 - RNA, 23 nt, Human
gagcuccauacacacgcugccuu

SEQ ID NO: 2001889 - RNA, 13 nt, Human
gagcuaugacuua

SEQ ID NO: 2001890 - RNA, 13 nt, Human
gagcuaggcaggg

SEQ ID NO: 2001891 - RNA, 19 nt, Human
gagcucacuguggugucug

SEQ ID NO: 2001892 - RNA, 16 nt, Human
gagcuauuuuaaacca

SEQ ID NO: 2001893 - RNA, 15 nt, Human
gagccugcaguuauu

SEQ ID NO: 2001894 - RNA, 17 nt, Human
gagccugccccagcgcu

SEQ ID NO: 2001895 - RNA, 18 nt, Human
gagccugccccagcgcug

SEQ ID NO: 2001896 - RNA, 19 nt, Human
gagccugacagccagaacu

SEQ ID NO: 2001897 - RNA, 13 nt, Human
gagccugcccagc

SEQ ID NO: 2001898 - RNA, 13 nt, Human
gagccugccccag

SEQ ID NO: 2001899 - RNA, 17 nt, Human
gagcuagcagcagggag

SEQ ID NO: 2001900 - RNA, 15 nt, Human
gagcuagcagcaggg

SEQ ID NO: 2001901 - RNA, 12 nt, Human
gagccaggaggg

SEQ ID NO: 2001902 - RNA, 13 nt, Human
gagccagauuuca

SEQ ID NO: 2001903 - RNA, 13 nt, Human
gagcccaccuugg

SEQ ID NO: 2001904 - RNA, 15 nt, Human
gagcccaccuuggcu

SEQ ID NO: 2001905 - RNA, 17 nt, Human
gagcccaccuuggcuca

SEQ ID NO: 2001906 - RNA, 18 nt, Human
gagccacugcaccgggcc

SEQ ID NO: 2001907 - RNA, 19 nt, Human
gagccacugcaccgggcca

SEQ ID NO: 2001908 - RNA, 13 nt, Human
gagccacugcacc

SEQ ID NO: 2001909 - RNA, 19 nt, Human
gagccagauuucacucucc

SEQ ID NO: 2001910 - RNA, 18 nt, Human
gagccagauuucacucuc

SEQ ID NO: 2001911 - RNA, 15 nt, Human
gagccagauuucacu

SEQ ID NO: 2001912 - RNA, 20 nt, Human
gagccacugcaccgggccac

SEQ ID NO: 2001913 - RNA, 21 nt, Human
gagcagagaccaucccugaag

SEQ ID NO: 2001914 - RNA, 19 nt, Human
gagcagagaccaucccuga

SEQ ID NO: 2001915 - RNA, 23 nt, Human
gagcagagaccaucccugaaggc

SEQ ID NO: 2001916 - RNA, 21 nt, Human
gagcagccacauuccugaugc

SEQ ID NO: 2001917 - RNA, 22 nt, Human
gagcagccacauuccugaugcu

SEQ ID NO: 2001918 - RNA, 19 nt, Human
gagauagccaaggccaaag

SEQ ID NO: 2001919 - RNA, 21 nt, Human
gagauaggaaggucauuucca

SEQ ID NO: 2001920 - RNA, 22 nt, Human
gagauaggaaggucauuuccau

SEQ ID NO: 2001921 - RNA, 16 nt, Human
gagcagagaccauccc

SEQ ID NO: 2001922 - RNA, 18 nt, Human
gagcagagaccaucccug

SEQ ID NO: 2001923 - RNA, 17 nt, Human
gagcagagaccaucccu

SEQ ID NO: 2001924 - RNA, 21 nt, Human
gagauagccaaggccaaagga

SEQ ID NO: 2001925 - RNA, 20 nt, Human
gagauagccaaggccaaagg

SEQ ID NO: 2001926 - RNA, 13 nt, Human
gagccuccugccc

SEQ ID NO: 2001927 - RNA, 12 nt, Human
gagccugcaguu

SEQ ID NO: 2001928 - RNA, 15 nt, Human
gagccugacagccag

SEQ ID NO: 2001929 - RNA, 16 nt, Human
gagccugacagccaga

SEQ ID NO: 2001930 - RNA, 15 nt, Human
gagccuacccacccc

SEQ ID NO: 2001931 - RNA, 17 nt, Human
gagccuacccaccccca

SEQ ID NO: 2001932 - RNA, 15 nt, Human
gagccuaaaaauaaa

SEQ ID NO: 2001933 - RNA, 17 nt, Human
gagccuaaaaauaaagc

SEQ ID NO: 2001934 - RNA, 19 nt, Human
gagccuaaaaauaaagcac

SEQ ID NO: 2001935 - RNA, 13 nt, Human
gagccucagcauc

SEQ ID NO: 2001936 - RNA, 17 nt, Human
gagccucagcauccugg

SEQ ID NO: 2001937 - RNA, 19 nt, Human
gagccucagucucccuccc

SEQ ID NO: 2001938 - RNA, 18 nt, Human
gagccucagucucccucc

SEQ ID NO: 2001939 - RNA, 14 nt, Human
gagccucagcaucc

SEQ ID NO: 2001940 - RNA, 15 nt, Human
gagccucagcauccu

SEQ ID NO: 2001941 - RNA, 18 nt, Human
gagcccacgcccccacug

SEQ ID NO: 2001942 - RNA, 21 nt, Human
gagcccacuguacuugcucuu

SEQ ID NO: 2001943 - RNA, 18 nt, Human
gagcccacuguacuugcu

SEQ ID NO: 2001944 - RNA, 18 nt, Human
gagcccuugcccaugcug

SEQ ID NO: 2001945 - RNA, 19 nt, Human
gagccgagaucacgccacu

SEQ ID NO: 2001946 - RNA, 20 nt, Human
gagccgagaucacgccacug

SEQ ID NO: 2001947 - RNA, 21 nt, Human
gagccgagaucacgccacugc

SEQ ID NO: 2001948 - RNA, 22 nt, Human
gagccgagaucacgccacugca

SEQ ID NO: 2001949 - RNA, 13 nt, Human
gagccgcagagaa

SEQ ID NO: 2001950 - RNA, 20 nt, Human
gagccgggcaaacuggccgc

SEQ ID NO: 2001951 - RNA, 13 nt, Human
gaaagcagaacag

SEQ ID NO: 2001952 - RNA, 14 nt, Human
gaaagcagaacagu

SEQ ID NO: 2001953 - RNA, 23 nt, Human
gaaagauggcugugccucugccu

SEQ ID NO: 2001954 - RNA, 16 nt, Human
gaaagaucaaaagguu

SEQ ID NO: 2001955 - RNA, 22 nt, Human
gaaagauggcugugccucugcc

SEQ ID NO: 2001956 - RNA, 13 nt, Human
gaaagagauuuaa

SEQ ID NO: 2001957 - RNA, 16 nt, Human
gaaagagauuuaaacu

SEQ ID NO: 2001958 - RNA, 16 nt, Human
gaaacugacuugcugu

SEQ ID NO: 2001959 - RNA, 14 nt, Human
gaaaaauguuagga

SEQ ID NO: 2001960 - RNA, 20 nt, Human
gaaaaauucaauaguaauau

SEQ ID NO: 2001961 - RNA, 22 nt, Human
gaaaaauucaauaguaauauaa

SEQ ID NO: 2001962 - RNA, 16 nt, Human
gaaaaauguuaggaca

SEQ ID NO: 2001963 - RNA, 17 nt, Human
gaaaaauuauugagcca

SEQ ID NO: 2001964 - RNA, 23 nt, Human
gaaaaagaacuuccccauacaaa

SEQ ID NO: 2001965 - RNA, 16 nt, Human
gaaaaagcaaaaggca

SEQ ID NO: 2001966 - RNA, 16 nt, Human
gaaaaaugagccuggc

SEQ ID NO: 2001967 - RNA, 20 nt, Human
gaaacuaggugcauauuuau

SEQ ID NO: 2001968 - RNA, 19 nt, Human
gaaacuaggugcauauuua

SEQ ID NO: 2001969 - RNA, 16 nt, Human
gaaaggaccugcaaac

SEQ ID NO: 2001970 - RNA, 20 nt, Human
gaaagcuuuguugaaagaaa

SEQ ID NO: 2001971 - RNA, 21 nt, Human
gaaagcuuuguugaaagaaag

SEQ ID NO: 2001972 - RNA, 22 nt, Human
gaaaggaguuucuuuagcugac

SEQ ID NO: 2001973 - RNA, 21 nt, Human
gaaagcuugcccuggugccuc

SEQ ID NO: 2001974 - RNA, 16 nt, Human
gaaaggaaagaggcuc

SEQ ID NO: 2001975 - RNA, 11 nt, Human
gaaaggaaaga

SEQ ID NO: 2001976 - RNA, 20 nt, Human
gaaagcacagaggccuccug

SEQ ID NO: 2001977 - RNA, 14 nt, Human
gaaaguguucuguu

SEQ ID NO: 2001978 - RNA, 15 nt, Human
gaaaguguucuguua

SEQ ID NO: 2001979 - RNA, 16 nt, Human
gaaaguguucuguuac

SEQ ID NO: 2001980 - RNA, 17 nt, Human
gaaaguguucuguuaca

SEQ ID NO: 2001981 - RNA, 18 nt, Human
gaaaguguucuguuacaa

SEQ ID NO: 2001982 - RNA, 19 nt, Human
gaaaguguucuguuacaaa

SEQ ID NO: 2001983 - RNA, 21 nt, Human
gaaaguguucuguuacaaaau

SEQ ID NO: 2001984 - RNA, 16 nt, Human
gaaaguuuacaggaaa

SEQ ID NO: 2001985 - RNA, 14 nt, Human
gaaaguuuacagga

SEQ ID NO: 2001986 - RNA, 14 nt, Human
gaaauaaaaagagu

SEQ ID NO: 2001987 - RNA, 16 nt, Human
gaaagugaaaguccag

SEQ ID NO: 2001988 - RNA, 15 nt, Human
gaaagugccuuugca

SEQ ID NO: 2001989 - RNA, 18 nt, Human
gaaagugccuuugcagcu

SEQ ID NO: 2001990 - RNA, 20 nt, Human
gaaagugccuuugcagcuca

SEQ ID NO: 2001991 - RNA, 23 nt, Human
gaaagugccuuugcagcucagaa

SEQ ID NO: 2001992 - RNA, 13 nt, Human
gaaaguguucugu

SEQ ID NO: 2001993 - RNA, 19 nt, Human
gaaaugggcagagcagaga

SEQ ID NO: 2001994 - RNA, 17 nt, Human
gaaaugggcagagcaga

SEQ ID NO: 2001995 - RNA, 17 nt, Human
gaaauguacagcaagga

SEQ ID NO: 2001996 - RNA, 14 nt, Human
gaaaugcugauuua

SEQ ID NO: 2001997 - RNA, 22 nt, Human
gaaaugcugauuuaaacuucuu

SEQ ID NO: 2001998 - RNA, 16 nt, Human
gaaaugugugugaugu

SEQ ID NO: 2001999 - RNA, 18 nt, Human
gaaaugugugugauguga

SEQ ID NO: 2002000 - RNA, 19 nt, Human
gaaaugugugugaugugac

SEQ ID NO: 2002001 - RNA, 20 nt, Human
gaaaugugugugaugugaca

SEQ ID NO: 2002002 - RNA, 21 nt, Human
gaaaugugugugaugugacau

SEQ ID NO: 2002003 - RNA, 23 nt, Human
gaaaugugugugaugugacauuu

SEQ ID NO: 2002004 - RNA, 20 nt, Human
gaaaugucccuuucuucucc

SEQ ID NO: 2002005 - RNA, 13 nt, Human
gaaauguguguga

SEQ ID NO: 2002006 - RNA, 17 nt, Human
gaaaugucccuuucuuc

SEQ ID NO: 2002007 - RNA, 18 nt, Human
gaaaugucccuuucuucu

SEQ ID NO: 2002008 - RNA, 15 nt, Human
gaaaugucccuuucu

SEQ ID NO: 2002009 - RNA, 16 nt, Human
gaaaugucccuuucuu

SEQ ID NO: 2002010 - RNA, 11 nt, Human
gaaaugagcug

SEQ ID NO: 2002011 - RNA, 18 nt, Human
gaaaugaggucagagccu

SEQ ID NO: 2002012 - RNA, 15 nt, Human
gaaaugggcagagca

SEQ ID NO: 2002013 - RNA, 16 nt, Human
gaaaugggcagagcag

SEQ ID NO: 2002014 - RNA, 17 nt, Human
gaaaugcuaugucauuu

SEQ ID NO: 2002015 - RNA, 18 nt, Human
gaaaugcuaugucauuuc

SEQ ID NO: 2002016 - RNA, 19 nt, Human
gaaaugcuaugucauuuca

SEQ ID NO: 2002017 - RNA, 20 nt, Human
gaaaugcuaugucauuucau

SEQ ID NO: 2002018 - RNA, 21 nt, Human
gaaaugcuaugucauuucaug

SEQ ID NO: 2002019 - RNA, 22 nt, Human
gaaaugcuaugucauuucaugu

SEQ ID NO: 2002020 - RNA, 14 nt, Human
gaaaugcugaaaau

SEQ ID NO: 2002021 - RNA, 14 nt, Human
gaaaugcugaccca

SEQ ID NO: 2002022 - RNA, 22 nt, Human
gaaaugcugacccaugggcagg

SEQ ID NO: 2002023 - RNA, 23 nt, Human
gaaauauauggucuaauguuuaa

SEQ ID NO: 2002024 - RNA, 20 nt, Human
gaaauauauggucuaauguu

SEQ ID NO: 2002025 - RNA, 22 nt, Human
gaaauauauggucuaauguuua

SEQ ID NO: 2002026 - RNA, 24 nt, Human
gaaauauauggucuaauguuuaag

SEQ ID NO: 2002027 - RNA, 14 nt, Human
gaaauaaacgucuu

SEQ ID NO: 2002028 - RNA, 16 nt, Human
gaaauaaacgucuuaa

SEQ ID NO: 2002029 - RNA, 17 nt, Human
gaaauaaacgucuuaaa

SEQ ID NO: 2002030 - RNA, 18 nt, Human
gaaauaaacgucuuaaau

SEQ ID NO: 2002031 - RNA, 21 nt, Human
gaaauaaacgucuuaaauauu

SEQ ID NO: 2002032 - RNA, 12 nt, Human
gaaauaaaagcu

SEQ ID NO: 2002033 - RNA, 17 nt, Human
gaaauauaggaacuuaa

SEQ ID NO: 2002034 - RNA, 19 nt, Human
gaaauaucugaaaauguau

SEQ ID NO: 2002035 - RNA, 18 nt, Human
gaaauaucugaaaaugua

SEQ ID NO: 2002036 - RNA, 20 nt, Human
gaaauaucugaaaauguaug

SEQ ID NO: 2002037 - RNA, 23 nt, Human
gaaauuaguacuccccuccuuga

SEQ ID NO: 2002038 - RNA, 21 nt, Human
gaaauuuccugggagcuuuug

SEQ ID NO: 2002039 - RNA, 16 nt, Human
gaacacuccuucacag

SEQ ID NO: 2002040 - RNA, 15 nt, Human
gaacacuccuucaca

SEQ ID NO: 2002041 - RNA, 17 nt, Human
gaacacuccuucacaga

SEQ ID NO: 2002042 - RNA, 20 nt, Human
gaacagacuggaagcacagc

SEQ ID NO: 2002043 - RNA, 19 nt, Human
gaacagacuggaagcacag

SEQ ID NO: 2002044 - RNA, 20 nt, Human
gaacaguuguguuugaagca

SEQ ID NO: 2002045 - RNA, 16 nt, Human
gaacagguucacguga

SEQ ID NO: 2002046 - RNA, 21 nt, Human
gaacagguuuuuuuguuuguu

SEQ ID NO: 2002047 - RNA, 17 nt, Human
gaacaggauauucucac

SEQ ID NO: 2002048 - RNA, 22 nt, Human
gaacagcuguugacucuaguac

SEQ ID NO: 2002049 - RNA, 12 nt, Human
gaacagcuguug

SEQ ID NO: 2002050 - RNA, 17 nt, Human
gaacagcuguugacucu

SEQ ID NO: 2002051 - RNA, 22 nt, Human
gaacagacuggaagcacagcuu

SEQ ID NO: 2002052 - RNA, 22 nt, Human
gaacaguuguguuugaagcaca

SEQ ID NO: 2002053 - RNA, 20 nt, Human
gaaccaaagcgaauuuuaaa

SEQ ID NO: 2002054 - RNA, 23 nt, Human
gaaccaaagcgaauuuuaaaaga

SEQ ID NO: 2002055 - RNA, 18 nt, Human
gaagucuuagauguauau

SEQ ID NO: 2002056 - RNA, 15 nt, Human
gaagucuucaugaaa

SEQ ID NO: 2002057 - RNA, 16 nt, Human
gaagucacauuccuga

SEQ ID NO: 2002058 - RNA, 20 nt, Human
gaagucacauuccugaacag

SEQ ID NO: 2002059 - RNA, 21 nt, Human
gaagucacauuccugaacagg

SEQ ID NO: 2002060 - RNA, 15 nt, Human
gaagucacugcacag

SEQ ID NO: 2002061 - RNA, 21 nt, Human
gaaggugaggagcuugaaacc

SEQ ID NO: 2002062 - RNA, 18 nt, Human
gaaguaacuggugauaua

SEQ ID NO: 2002063 - RNA, 19 nt, Human
gaaguaauaugcacacauu

SEQ ID NO: 2002064 - RNA, 20 nt, Human
gaaguaauaugcacacauuu

SEQ ID NO: 2002065 - RNA, 21 nt, Human
gaaguaauaugcacacauuuu

SEQ ID NO: 2002066 - RNA, 19 nt, Human
gaaguaacuggugauauau

SEQ ID NO: 2002067 - RNA, 13 nt, Human
gaagucacacagu

SEQ ID NO: 2002068 - RNA, 15 nt, Human
gaagggggcugggac

SEQ ID NO: 2002069 - RNA, 18 nt, Human
gaagguauuaagauuaua

SEQ ID NO: 2002070 - RNA, 14 nt, Human
gaaggucauuucca

SEQ ID NO: 2002071 - RNA, 15 nt, Human
gaaggucauuuccau

SEQ ID NO: 2002072 - RNA, 13 nt, Human
gaagggggcuggg

SEQ ID NO: 2002073 - RNA, 20 nt, Human
gaaggcagggagggccuggg

SEQ ID NO: 2002074 - RNA, 22 nt, Human
gaaggcagggagggccugggcc

SEQ ID NO: 2002075 - RNA, 23 nt, Human
gaaggcagggagggccugggccc

SEQ ID NO: 2002076 - RNA, 13 nt, Human
gaaggauuugugu

SEQ ID NO: 2002077 - RNA, 18 nt, Human
gaaggcagggagggccug

SEQ ID NO: 2002078 - RNA, 16 nt, Human
gaaggaugccaagaag

SEQ ID NO: 2002079 - RNA, 18 nt, Human
gaaggaggcuccaggcag

SEQ ID NO: 2002080 - RNA, 17 nt, Human
gaaggaggccaccuccu

SEQ ID NO: 2002081 - RNA, 19 nt, Human
gaaggaggcuccaggcagc

SEQ ID NO: 2002082 - RNA, 20 nt, Human
gaaggaggcuccaggcagca

SEQ ID NO: 2002083 - RNA, 12 nt, Human
gaaggaggccac

SEQ ID NO: 2002084 - RNA, 15 nt, Human
gaaggaggccaccuc

SEQ ID NO: 2002085 - RNA, 16 nt, Human
gaaggaggccaccucc

SEQ ID NO: 2002086 - RNA, 14 nt, Human
gaagccgcuggggc

SEQ ID NO: 2002087 - RNA, 20 nt, Human
gaagccgcuggggccaguug

SEQ ID NO: 2002088 - RNA, 18 nt, Human
gaagccgcuggggccagu

SEQ ID NO: 2002089 - RNA, 21 nt, Human
gaagccgcuggggccaguugg

SEQ ID NO: 2002090 - RNA, 20 nt, Human
gaaggaaacccagcucuggu

SEQ ID NO: 2002091 - RNA, 19 nt, Human
gaaggaaacccagcucugg

SEQ ID NO: 2002092 - RNA, 15 nt, Human
gaagccugcuccuuc

SEQ ID NO: 2002093 - RNA, 19 nt, Human
gaaggacauugcggacagc

SEQ ID NO: 2002094 - RNA, 22 nt, Human
gaaggaauaaauugcuccuuga

SEQ ID NO: 2002095 - RNA, 20 nt, Human
gaaggacauugcggacagcc

SEQ ID NO: 2002096 - RNA, 21 nt, Human
gaaggacauugcggacagcca

SEQ ID NO: 2002097 - RNA, 22 nt, Human
gaaggacccggaggggccuggc

SEQ ID NO: 2002098 - RNA, 23 nt, Human
gaaggaaccaaagcgaauuuuaa

SEQ ID NO: 2002099 - RNA, 19 nt, Human
gaaggaagacuucaucccu

SEQ ID NO: 2002100 - RNA, 22 nt, Human
gaaggaaacccagcucuggucc

SEQ ID NO: 2002101 - RNA, 21 nt, Human
gaaggaaacccagcucugguc

SEQ ID NO: 2002102 - RNA, 15 nt, Human
gaaggaacguccccu

SEQ ID NO: 2002103 - RNA, 22 nt, Human
gaagcuucuggugaccuuccaa

SEQ ID NO: 2002104 - RNA, 16 nt, Human
gaagaguccucugaau

SEQ ID NO: 2002105 - RNA, 14 nt, Human
gaagaguccucuga

SEQ ID NO: 2002106 - RNA, 17 nt, Human
gaagagcuuagaaacug

SEQ ID NO: 2002107 - RNA, 15 nt, Human
gaagagcuggggaga

SEQ ID NO: 2002108 - RNA, 20 nt, Human
gaagagcuguugaugggaug

SEQ ID NO: 2002109 - RNA, 14 nt, Human
gaagagcuuagaaa

SEQ ID NO: 2002110 - RNA, 19 nt, Human
gaagacuucaucccucugg

SEQ ID NO: 2002111 - RNA, 17 nt, Human
gaagacuucaucccucu

SEQ ID NO: 2002112 - RNA, 12 nt, Human
gaagagccuugc

SEQ ID NO: 2002113 - RNA, 12 nt, Human
gaagaauaauuu

SEQ ID NO: 2002114 - RNA, 23 nt, Human
gaagagccccacucucagaggcc

SEQ ID NO: 2002115 - RNA, 13 nt, Human
gaagaaguguguc

SEQ ID NO: 2002116 - RNA, 16 nt, Human
gaagacuucaucccuc

SEQ ID NO: 2002117 - RNA, 15 nt, Human
gaagacuucaucccu

SEQ ID NO: 2002118 - RNA, 17 nt, Human
gaagauguagaggagaa

SEQ ID NO: 2002119 - RNA, 18 nt, Human
gaagauggauaugaccag

SEQ ID NO: 2002120 - RNA, 22 nt, Human
gaagauugagauguguucacaa

SEQ ID NO: 2002121 - RNA, 17 nt, Human
gaagauugagauguguu

SEQ ID NO: 2002122 - RNA, 13 nt, Human
gaagauuguuuau

SEQ ID NO: 2002123 - RNA, 16 nt, Human
gaagauuguuuaucua

SEQ ID NO: 2002124 - RNA, 23 nt, Human
gaagauuguuuaucuagauguaa

SEQ ID NO: 2002125 - RNA, 14 nt, Human
gaagaguauggauu

SEQ ID NO: 2002126 - RNA, 13 nt, Human
gaagagugaaaua

SEQ ID NO: 2002127 - RNA, 14 nt, Human
gaagagugaaauac

SEQ ID NO: 2002128 - RNA, 16 nt, Human
gaagagugaaauacca

SEQ ID NO: 2002129 - RNA, 22 nt, Human
gaagaguggcagcuauaggaaa

SEQ ID NO: 2002130 - RNA, 17 nt, Human
gaagaucuuugggcaua

SEQ ID NO: 2002131 - RNA, 17 nt, Human
gaacuuggcgcugcccc

SEQ ID NO: 2002132 - RNA, 16 nt, Human
gaacuugaagccugcu

SEQ ID NO: 2002133 - RNA, 18 nt, Human
gaacuugaagccugcucc

SEQ ID NO: 2002134 - RNA, 19 nt, Human
gaacuugaagccugcuccu

SEQ ID NO: 2002135 - RNA, 14 nt, Human
gaacuuaaauaaug

SEQ ID NO: 2002136 - RNA, 14 nt, Human
gaacuguuguauaa

SEQ ID NO: 2002137 - RNA, 15 nt, Human
gaacuguuguauaaa

SEQ ID NO: 2002138 - RNA, 16 nt, Human
gaacuguuguauaaau

SEQ ID NO: 2002139 - RNA, 20 nt, Human
gaacuguuguauaaauuuau

SEQ ID NO: 2002140 - RNA, 17 nt, Human
gaacuuaaauaauguga

SEQ ID NO: 2002141 - RNA, 15 nt, Human
gaacuguuagaaugu

SEQ ID NO: 2002142 - RNA, 16 nt, Human
gaacucccuuucaaca

SEQ ID NO: 2002143 - RNA, 15 nt, Human
gaacuccuaaaucaa

SEQ ID NO: 2002144 - RNA, 13 nt, Human
gaacuguuguaua

SEQ ID NO: 2002145 - RNA, 16 nt, Human
gaacuccuaaaucaag

SEQ ID NO: 2002146 - RNA, 13 nt, Human
gaacuccugaccu

SEQ ID NO: 2002147 - RNA, 20 nt, Human
gaaccacaucuugcucugcu

SEQ ID NO: 2002148 - RNA, 18 nt, Human
gaaccacaucuugcucug

SEQ ID NO: 2002149 - RNA, 15 nt, Human
gaacuuguuuucugg

SEQ ID NO: 2002150 - RNA, 12 nt, Human
gaacuugguucc

SEQ ID NO: 2002151 - RNA, 14 nt, Human
gaacuuguuuaaua

SEQ ID NO: 2002152 - RNA, 17 nt, Human
gaacuuuccaggaaggc

SEQ ID NO: 2002153 - RNA, 17 nt, Human
gaacuugggccacugug

SEQ ID NO: 2002154 - RNA, 18 nt, Human
gaacuuggcgcugccccu

SEQ ID NO: 2002155 - RNA, 19 nt, Human
gaacuuggugccuaauguu

SEQ ID NO: 2002156 - RNA, 21 nt, Human
gaacuugaagccugcuccuuc

SEQ ID NO: 2002157 - RNA, 22 nt, Human
gaacuugaagccugcuccuucc

SEQ ID NO: 2002158 - RNA, 22 nt, Human
gaacuuguaaaggaauuuaaaa

SEQ ID NO: 2002159 - RNA, 20 nt, Human
gaagaaagaacuaucuucau

SEQ ID NO: 2002160 - RNA, 16 nt, Human
gaacuuugaccucugc

SEQ ID NO: 2002161 - RNA, 22 nt, Human
gaacuuugaccucugcagcaau

SEQ ID NO: 2002162 - RNA, 21 nt, Human
gaagaaauguaguuuacauuu

SEQ ID NO: 2002163 - RNA, 19 nt, Human
cuuggagccugcagagcug

SEQ ID NO: 2002164 - RNA, 20 nt, Human
cuuggagccugcagagcugc

SEQ ID NO: 2002165 - RNA, 14 nt, Human
cuuggagcucugag

SEQ ID NO: 2002166 - RNA, 21 nt, Human
cuuggaugaguuuugggaagu

SEQ ID NO: 2002167 - RNA, 15 nt, Human
cuuggagccugcaga

SEQ ID NO: 2002168 - RNA, 16 nt, Human
cuuggagccugcagag

SEQ ID NO: 2002169 - RNA, 17 nt, Human
cuuggagccugcagagc

SEQ ID NO: 2002170 - RNA, 18 nt, Human
cuuggagccugcagagcu

SEQ ID NO: 2002171 - RNA, 13 nt, Human
cuuggagccugca

SEQ ID NO: 2002172 - RNA, 19 nt, Human
cuuggacauuuuaugucuu

SEQ ID NO: 2002173 - RNA, 14 nt, Human
cuuggauugucccc

SEQ ID NO: 2002174 - RNA, 13 nt, Human
cuuggauuguccc

SEQ ID NO: 2002175 - RNA, 23 nt, Human
cuuggcucaaguccucuuuucug

SEQ ID NO: 2002176 - RNA, 12 nt, Human
cuuggcugcagg

SEQ ID NO: 2002177 - RNA, 13 nt, Human
cuuggcugcaggg

SEQ ID NO: 2002178 - RNA, 15 nt, Human
cuugcuuuuaaaauc

SEQ ID NO: 2002179 - RNA, 16 nt, Human
cuuggacauuuuaugu

SEQ ID NO: 2002180 - RNA, 17 nt, Human
cuuggacauuuuauguc

SEQ ID NO: 2002181 - RNA, 18 nt, Human
cuuggacauuuuaugucu

SEQ ID NO: 2002182 - RNA, 13 nt, Human
cuugcuugcuuuu

SEQ ID NO: 2002183 - RNA, 18 nt, Human
cuugcauuuaaaagacag

SEQ ID NO: 2002184 - RNA, 22 nt, Human
cuugcauuucacuugaguggag

SEQ ID NO: 2002185 - RNA, 16 nt, Human
cuugcauuuuagcuaa

SEQ ID NO: 2002186 - RNA, 20 nt, Human
cuugcauuuuagcuaauuua

SEQ ID NO: 2002187 - RNA, 12 nt, Human
cuugcauuuuug

SEQ ID NO: 2002188 - RNA, 17 nt, Human
cuugccaaauauaaaua

SEQ ID NO: 2002189 - RNA, 13 nt, Human
cuugcauuuuugc

SEQ ID NO: 2002190 - RNA, 14 nt, Human
cuugcauuuuugca

SEQ ID NO: 2002191 - RNA, 20 nt, Human
cuugcauuuuugcaggagca

SEQ ID NO: 2002192 - RNA, 21 nt, Human
cuugcauuuuugcaggagcag

SEQ ID NO: 2002193 - RNA, 10 nt, Human
cuugcugccu

SEQ ID NO: 2002194 - RNA, 11 nt, Human
cuugcugccuc

SEQ ID NO: 2002195 - RNA, 13 nt, Human
cuugcugccucgg

SEQ ID NO: 2002196 - RNA, 19 nt, Human
cuuggggaccagagcugcc

SEQ ID NO: 2002197 - RNA, 18 nt, Human
cuuggggaccagagcugc

SEQ ID NO: 2002198 - RNA, 17 nt, Human
cuuggggaccagagcug

SEQ ID NO: 2002199 - RNA, 16 nt, Human
cuuggggaccagagcu

SEQ ID NO: 2002200 - RNA, 22 nt, Human
cuuggcucucaaugcuguuugg

SEQ ID NO: 2002201 - RNA, 13 nt, Human
cuuggcucugagg

SEQ ID NO: 2002202 - RNA, 17 nt, Human
cuuggcuugccauuuuu

SEQ ID NO: 2002203 - RNA, 16 nt, Human
cuuggcuuggcccugg

SEQ ID NO: 2002204 - RNA, 20 nt, Human
cuugguuuguaaauuaacuu

SEQ ID NO: 2002205 - RNA, 18 nt, Human
cuuggcuuggcccuggca

SEQ ID NO: 2002206 - RNA, 18 nt, Human
cuuguaaaggaauuuaaa

SEQ ID NO: 2002207 - RNA, 18 nt, Human
cuuguaaaaauuaaaagu

SEQ ID NO: 2002208 - RNA, 18 nt, Human
cuuguauuauguguguuu

SEQ ID NO: 2002209 - RNA, 16 nt, Human
cuuguauuuuuuaaug

SEQ ID NO: 2002210 - RNA, 17 nt, Human
cuuguggacacagcucu

SEQ ID NO: 2002211 - RNA, 18 nt, Human
cuuguggacacagcucuu

SEQ ID NO: 2002212 - RNA, 16 nt, Human
cuugucauagccagug

SEQ ID NO: 2002213 - RNA, 13 nt, Human
cuuguauuaugug

SEQ ID NO: 2002214 - RNA, 21 nt, Human
cuuguaugaaagauggcugug

SEQ ID NO: 2002215 - RNA, 14 nt, Human
cuuguaacuaaaau

SEQ ID NO: 2002216 - RNA, 16 nt, Human
cuuguaacuaaaauaa

SEQ ID NO: 2002217 - RNA, 17 nt, Human
cuuguaacuaaaauaau

SEQ ID NO: 2002218 - RNA, 22 nt, Human
cuuguaacuaaaauaauuuugu

SEQ ID NO: 2002219 - RNA, 19 nt, Human
cuugaaauauaggaacuua

SEQ ID NO: 2002220 - RNA, 13 nt, Human
cuucuuuuucugg

SEQ ID NO: 2002221 - RNA, 14 nt, Human
cuucuuuuucugga

SEQ ID NO: 2002222 - RNA, 15 nt, Human
cuucuuuuucuggac

SEQ ID NO: 2002223 - RNA, 16 nt, Human
cuucuuuuucuggacu

SEQ ID NO: 2002224 - RNA, 19 nt, Human
cuucuuuuucuggacucug

SEQ ID NO: 2002225 - RNA, 21 nt, Human
cuucuuuuucuggacucugga

SEQ ID NO: 2002226 - RNA, 22 nt, Human
cuucuuuuucuggacucuggac

SEQ ID NO: 2002227 - RNA, 12 nt, Human
cuucuuugcccu

SEQ ID NO: 2002228 - RNA, 13 nt, Human
cuucuuucccuuc

SEQ ID NO: 2002229 - RNA, 14 nt, Human
cuucuuucccuucc

SEQ ID NO: 2002230 - RNA, 16 nt, Human
cuucuuucccuuccuc

SEQ ID NO: 2002231 - RNA, 18 nt, Human
cuucuuucccuuccucca

SEQ ID NO: 2002232 - RNA, 19 nt, Human
cuucuuucccuuccuccau

SEQ ID NO: 2002233 - RNA, 23 nt, Human
cuucuuucccuuccuccauccuc

SEQ ID NO: 2002234 - RNA, 19 nt, Human
cuugaacuccuggccucaa

SEQ ID NO: 2002235 - RNA, 17 nt, Human
cuugaacugagcuugga

SEQ ID NO: 2002236 - RNA, 19 nt, Human
cuugaacugagcuuggaag

SEQ ID NO: 2002237 - RNA, 16 nt, Human
cuugaacuggguacuu

SEQ ID NO: 2002238 - RNA, 15 nt, Human
cuugaacuuugaccu

SEQ ID NO: 2002239 - RNA, 18 nt, Human
cuugaacuggguacuugu

SEQ ID NO: 2002240 - RNA, 20 nt, Human
cuugaacuggguacuugugg

SEQ ID NO: 2002241 - RNA, 14 nt, Human
cuugaacccgggag

SEQ ID NO: 2002242 - RNA, 19 nt, Human
cuugaacccgggaggcaga

SEQ ID NO: 2002243 - RNA, 20 nt, Human
cuugaacccgggaggcagag

SEQ ID NO: 2002244 - RNA, 14 nt, Human
cuugaacuccuggc

SEQ ID NO: 2002245 - RNA, 15 nt, Human
cuugaacuccuggcc

SEQ ID NO: 2002246 - RNA, 17 nt, Human
cuugaacuccuggccuc

SEQ ID NO: 2002247 - RNA, 18 nt, Human
cuugaacuccuggccuca

SEQ ID NO: 2002248 - RNA, 17 nt, Human
cuugaguucccagaugg

SEQ ID NO: 2002249 - RNA, 22 nt, Human
cuugaguaaaauacucuuuuua

SEQ ID NO: 2002250 - RNA, 22 nt, Human
cuugcaaaguaucccuacugua

SEQ ID NO: 2002251 - RNA, 17 nt, Human
cuugcacucucuuggcu

SEQ ID NO: 2002252 - RNA, 17 nt, Human
cuugcacucuucuacca

SEQ ID NO: 2002253 - RNA, 18 nt, Human
cuugcacucucuuggcug

SEQ ID NO: 2002254 - RNA, 12 nt, Human
cuugcagaacuu

SEQ ID NO: 2002255 - RNA, 14 nt, Human
cuugcaauggcagc

SEQ ID NO: 2002256 - RNA, 22 nt, Human
cuugcaagggcggccuuuccca

SEQ ID NO: 2002257 - RNA, 20 nt, Human
cuugcauacaaacaagcaua

SEQ ID NO: 2002258 - RNA, 21 nt, Human
cuugcauacaaacaagcauau

SEQ ID NO: 2002259 - RNA, 21 nt, Human
cuugcauaguaaauguaguuc

SEQ ID NO: 2002260 - RNA, 21 nt, Human
cuugcaugguuuagaaagcuu

SEQ ID NO: 2002261 - RNA, 21 nt, Human
cuugcaugaggcuaguguggu

SEQ ID NO: 2002262 - RNA, 18 nt, Human
cuugcagacucuacagag

SEQ ID NO: 2002263 - RNA, 12 nt, Human
cuugcagaagcu

SEQ ID NO: 2002264 - RNA, 13 nt, Human
cuugcagaagcug

SEQ ID NO: 2002265 - RNA, 14 nt, Human
cuugcauacaaaca

SEQ ID NO: 2002266 - RNA, 15 nt, Human
cuugcauacaaacaa

SEQ ID NO: 2002267 - RNA, 21 nt, Human
cuugaguaaaauacucuuuuu

SEQ ID NO: 2002268 - RNA, 20 nt, Human
cuugagccuugaacuuugac

SEQ ID NO: 2002269 - RNA, 22 nt, Human
cuugagccuugaacuuugaccu

SEQ ID NO: 2002270 - RNA, 13 nt, Human
cuugagcucagga

SEQ ID NO: 2002271 - RNA, 21 nt, Human
cuugaccauucuccaccugcc

SEQ ID NO: 2002272 - RNA, 14 nt, Human
cuugagagggugga

SEQ ID NO: 2002273 - RNA, 20 nt, Human
cuugaccauucuccaccugc

SEQ ID NO: 2002274 - RNA, 17 nt, Human
cuugaccauucuccacc

SEQ ID NO: 2002275 - RNA, 19 nt, Human
cuugagccuugaacuuuga

SEQ ID NO: 2002276 - RNA, 16 nt, Human
cuuuuuuauacauaaa

SEQ ID NO: 2002277 - RNA, 17 nt, Human
cuuuuuuauacauaaac

SEQ ID NO: 2002278 - RNA, 15 nt, Human
cuuuuuuauacauaa

SEQ ID NO: 2002279 - RNA, 21 nt, Human
cuuuuuagaugugcugcuuug

SEQ ID NO: 2002280 - RNA, 16 nt, Human
gaaaaagaaaaaauau

SEQ ID NO: 2002281 - RNA, 11 nt, Human
gaaaaagaaaa

SEQ ID NO: 2002282 - RNA, 17 nt, Human
cuuuuuuauuaaucacu

SEQ ID NO: 2002283 - RNA, 19 nt, Human
cuuuuuuauuaaucacugu

SEQ ID NO: 2002284 - RNA, 20 nt, Human
cuuuuuuauuaaucacugug

SEQ ID NO: 2002285 - RNA, 21 nt, Human
cuuuuuuauuaaucacugugu

SEQ ID NO: 2002286 - RNA, 19 nt, Human
cuuuuuuaucaugugaaau

SEQ ID NO: 2002287 - RNA, 15 nt, Human
cuuuuuuauaucuug

SEQ ID NO: 2002288 - RNA, 13 nt, Human
cuuuuuuauuaau

SEQ ID NO: 2002289 - RNA, 14 nt, Human
cuuuuuuauuaauc

SEQ ID NO: 2002290 - RNA, 15 nt, Human
cuuuuuuauuaauca

SEQ ID NO: 2002291 - RNA, 18 nt, Human
cuuuuuuauacauaaaca

SEQ ID NO: 2002292 - RNA, 14 nt, Human
cuuuuuuauaucuu

SEQ ID NO: 2002293 - RNA, 22 nt, Human
cuuuuuaauauugauaugcuua

SEQ ID NO: 2002294 - RNA, 15 nt, Human
cuuuuuaaccucugu

SEQ ID NO: 2002295 - RNA, 16 nt, Human
cuuuuuaaccucuguu

SEQ ID NO: 2002296 - RNA, 13 nt, Human
cuuuucuuuucuu

SEQ ID NO: 2002297 - RNA, 16 nt, Human
cuuuucuuucuaccaa

SEQ ID NO: 2002298 - RNA, 17 nt, Human
cuuuucuuugccaucuc

SEQ ID NO: 2002299 - RNA, 21 nt, Human
cuuuucuuugccaucucugcu

SEQ ID NO: 2002300 - RNA, 22 nt, Human
cuuuucuuugccaucucugcuc

SEQ ID NO: 2002301 - RNA, 17 nt, Human
cuuuucuuucagccaag

SEQ ID NO: 2002302 - RNA, 22 nt, Human
cuuuucuaaacuaggcuccuuc

SEQ ID NO: 2002303 - RNA, 23 nt, Human
cuuuucuaaacuaggcuccuuca

SEQ ID NO: 2002304 - RNA, 14 nt, Human
cuuuuaaaaaguau

SEQ ID NO: 2002305 - RNA, 15 nt, Human
cuuuuaaaaaguauu

SEQ ID NO: 2002306 - RNA, 16 nt, Human
cuuuuaaaaaguauug

SEQ ID NO: 2002307 - RNA, 19 nt, Human
cuuuuaaaaaguauugcca

SEQ ID NO: 2002308 - RNA, 18 nt, Human
cuuuuaaaacacuuccau

SEQ ID NO: 2002309 - RNA, 21 nt, Human
cuuuuaaaaaguauugccaaa

SEQ ID NO: 2002310 - RNA, 23 nt, Human
cuuuuaaaaaguauugccaaaca

SEQ ID NO: 2002311 - RNA, 14 nt, Human
cuuuuaaaacuacu

SEQ ID NO: 2002312 - RNA, 19 nt, Human
cuuuuaaaacuacuuagca

SEQ ID NO: 2002313 - RNA, 15 nt, Human
cuuuuaaagaauuuc

SEQ ID NO: 2002314 - RNA, 18 nt, Human
cuuuuaaagaauuucuuu

SEQ ID NO: 2002315 - RNA, 21 nt, Human
cuuuucgcaggauucuuccuc

SEQ ID NO: 2002316 - RNA, 20 nt, Human
cuuuucgcaggauucuuccu

SEQ ID NO: 2002317 - RNA, 20 nt, Human
cuuuuccuugcauacaaaca

SEQ ID NO: 2002318 - RNA, 15 nt, Human
cuuuuccuugcauac

SEQ ID NO: 2002319 - RNA, 14 nt, Human
cuuuucccuucuuu

SEQ ID NO: 2002320 - RNA, 14 nt, Human
cuuuuccagagcau

SEQ ID NO: 2002321 - RNA, 21 nt, Human
cuuuuccagagcauuccaguc

SEQ ID NO: 2002322 - RNA, 14 nt, Human
cuuuuccaguauuu

SEQ ID NO: 2002323 - RNA, 16 nt, Human
cuuuucacugcuggcu

SEQ ID NO: 2002324 - RNA, 17 nt, Human
cuuuuccaauaugugau

SEQ ID NO: 2002325 - RNA, 19 nt, Human
cuuuuccaauaugugauuu

SEQ ID NO: 2002326 - RNA, 18 nt, Human
cuuuuccaguauuuuagu

SEQ ID NO: 2002327 - RNA, 19 nt, Human
cuuuuccucgcuucuuuca

SEQ ID NO: 2002328 - RNA, 20 nt, Human
cuuuuccucgcuucuuucaa

SEQ ID NO: 2002329 - RNA, 16 nt, Human
cuuuuccucgcuucuu

SEQ ID NO: 2002330 - RNA, 17 nt, Human
cuuuuccucgcuucuuu

SEQ ID NO: 2002331 - RNA, 18 nt, Human
cuuuuccucgcuucuuuc

SEQ ID NO: 2002332 - RNA, 23 nt, Human
cuuuuccaacccucaucaccaac

SEQ ID NO: 2002333 - RNA, 13 nt, Human
cuuuuccaacccu

SEQ ID NO: 2002334 - RNA, 22 nt, Human
cuuuucauuuaggugaggaagc

SEQ ID NO: 2002335 - RNA, 12 nt, Human
cuuuucacugcu

SEQ ID NO: 2002336 - RNA, 18 nt, Human
cuuuucacccuucuacuc

SEQ ID NO: 2002337 - RNA, 15 nt, Human
cuuuucaccauucgu

SEQ ID NO: 2002338 - RNA, 14 nt, Human
cuuuucacccuucu

SEQ ID NO: 2002339 - RNA, 16 nt, Human
cuuuucacccuucuac

SEQ ID NO: 2002340 - RNA, 17 nt, Human
cuuuucacccuucuacu

SEQ ID NO: 2002341 - RNA, 22 nt, Human
cuuuccuacuugcacucuucua

SEQ ID NO: 2002342 - RNA, 21 nt, Human
cuuuccgguguuuaagacauu

SEQ ID NO: 2002343 - RNA, 15 nt, Human
cuuuccccaugucuc

SEQ ID NO: 2002344 - RNA, 20 nt, Human
cuuuccccaugucucgacuc

SEQ ID NO: 2002345 - RNA, 21 nt, Human
cuuuccccaugucucgacuca

SEQ ID NO: 2002346 - RNA, 23 nt, Human
cuuuccaaagccaaugugaacag

SEQ ID NO: 2002347 - RNA, 18 nt, Human
cuuuccacuccuccuagc

SEQ ID NO: 2002348 - RNA, 21 nt, Human
cuuuccacuccuccuagccac

SEQ ID NO: 2002349 - RNA, 12 nt, Human
cuuuccacucug

SEQ ID NO: 2002350 - RNA, 13 nt, Human
cuuuccacucugg

SEQ ID NO: 2002351 - RNA, 14 nt, Human
cuuuccacucugga

SEQ ID NO: 2002352 - RNA, 15 nt, Human
cuuuccacucuggau

SEQ ID NO: 2002353 - RNA, 23 nt, Human
cuuuccacucuggauucagccuu

SEQ ID NO: 2002354 - RNA, 14 nt, Human
cuuuccaggaaggc

SEQ ID NO: 2002355 - RNA, 16 nt, Human
cuuuccaaaugcccag

SEQ ID NO: 2002356 - RNA, 22 nt, Human
cuuuccaaaguacacuguuuca

SEQ ID NO: 2002357 - RNA, 16 nt, Human
cuuuccaaaguacacu

SEQ ID NO: 2002358 - RNA, 19 nt, Human
cuuuauuuuguguuuagga

SEQ ID NO: 2002359 - RNA, 21 nt, Human
cuuguggacacagcucuucuc

SEQ ID NO: 2002360 - RNA, 17 nt, Human
cuuuauuuuuuugaacu

SEQ ID NO: 2002361 - RNA, 20 nt, Human
cuuuauuuuuuugaacucuu

SEQ ID NO: 2002362 - RNA, 16 nt, Human
cuuucaagaacuuguu

SEQ ID NO: 2002363 - RNA, 17 nt, Human
cuuucaagaacuuguuu

SEQ ID NO: 2002364 - RNA, 14 nt, Human
cuuucaacucauug

SEQ ID NO: 2002365 - RNA, 13 nt, Human
cuuucaagaacuu

SEQ ID NO: 2002366 - RNA, 15 nt, Human
cuuucaagaacuugu

SEQ ID NO: 2002367 - RNA, 19 nt, Human
cuuucaagggcuuuccugu

SEQ ID NO: 2002368 - RNA, 23 nt, Human
cuuuggaaagaguaggaagacuu

SEQ ID NO: 2002369 - RNA, 21 nt, Human
cuuugcccuuuacuugucuuu

SEQ ID NO: 2002370 - RNA, 19 nt, Human
cuuuggaaaguagaaaagc

SEQ ID NO: 2002371 - RNA, 19 nt, Human
cuuuggaaagaguaggaag

SEQ ID NO: 2002372 - RNA, 23 nt, Human
cuuugcccccaaacccccauucu

SEQ ID NO: 2002373 - RNA, 22 nt, Human
cuuugcacuuuuucuuaaucau

SEQ ID NO: 2002374 - RNA, 17 nt, Human
cuuugcacuuuuucuua

SEQ ID NO: 2002375 - RNA, 12 nt, Human
cuuugccaucuc

SEQ ID NO: 2002376 - RNA, 14 nt, Human
cuuugccaucucug

SEQ ID NO: 2002377 - RNA, 18 nt, Human
cuuugccaucucugcucc

SEQ ID NO: 2002378 - RNA, 19 nt, Human
cuuugccaucucugcucca

SEQ ID NO: 2002379 - RNA, 15 nt, Human
cuuugccaugugcuu

SEQ ID NO: 2002380 - RNA, 14 nt, Human
cuuugcagacaggc

SEQ ID NO: 2002381 - RNA, 15 nt, Human
cuuugcagacaggca

SEQ ID NO: 2002382 - RNA, 11 nt, Human
cuuugaauuuu

SEQ ID NO: 2002383 - RNA, 13 nt, Human
cuuugaauuuuca

SEQ ID NO: 2002384 - RNA, 14 nt, Human
cuuugaauuuucau

SEQ ID NO: 2002385 - RNA, 15 nt, Human
cuuugaauuuucauu

SEQ ID NO: 2002386 - RNA, 18 nt, Human
cuuugaauuuucauuuua

SEQ ID NO: 2002387 - RNA, 19 nt, Human
cuuugaauuuucauuuuac

SEQ ID NO: 2002388 - RNA, 21 nt, Human
cuuuccugaggcugggcuccc

SEQ ID NO: 2002389 - RNA, 20 nt, Human
cuuuccugaggcugggcucc

SEQ ID NO: 2002390 - RNA, 16 nt, Human
cuuuccugaggcuggg

SEQ ID NO: 2002391 - RNA, 17 nt, Human
cuuuccugaggcugggc

SEQ ID NO: 2002392 - RNA, 21 nt, Human
cuuucuuaauauuuuuacaug

SEQ ID NO: 2002393 - RNA, 23 nt, Human
cuuucuuaauauuuuuacaugca

SEQ ID NO: 2002394 - RNA, 15 nt, Human
cuuucuucaaaauau

SEQ ID NO: 2002395 - RNA, 16 nt, Human
cuuucuuucuuucuuu

SEQ ID NO: 2002396 - RNA, 23 nt, Human
cuuugaaauauauggucuaaugu

SEQ ID NO: 2002397 - RNA, 18 nt, Human
cuuugaagagugaaauac

SEQ ID NO: 2002398 - RNA, 21 nt, Human
cugcacuccccugcugggugu

SEQ ID NO: 2002399 - RNA, 18 nt, Human
cugcacuccccugcuggg

SEQ ID NO: 2002400 - RNA, 13 nt, Human
cugcagagggcac

SEQ ID NO: 2002401 - RNA, 15 nt, Human
cugcagcaauaaagc

SEQ ID NO: 2002402 - RNA, 16 nt, Human
cugcagcaauaaagca

SEQ ID NO: 2002403 - RNA, 10 nt, Human
cugcagaggg

SEQ ID NO: 2002404 - RNA, 20 nt, Human
cugcacuccccugcugggug

SEQ ID NO: 2002405 - RNA, 19 nt, Human
cugcacuccccugcugggu

SEQ ID NO: 2002406 - RNA, 13 nt, Human
cugcacuccccug

SEQ ID NO: 2002407 - RNA, 14 nt, Human
cugcacuccccugc

SEQ ID NO: 2002408 - RNA, 20 nt, Human
cugcacuccagccuggguga

SEQ ID NO: 2002409 - RNA, 18 nt, Human
cugcaccgggccacagag

SEQ ID NO: 2002410 - RNA, 20 nt, Human
cugcaccgggccacagagaa

SEQ ID NO: 2002411 - RNA, 14 nt, Human
cugcaccggcuggc

SEQ ID NO: 2002412 - RNA, 16 nt, Human
cugaggcccugcccaa

SEQ ID NO: 2002413 - RNA, 23 nt, Human
cugaggcccuucucuccagcccc

SEQ ID NO: 2002414 - RNA, 22 nt, Human
cugaggcccuucucuccagccc

SEQ ID NO: 2002415 - RNA, 16 nt, Human
cugcaccggcuggccu

SEQ ID NO: 2002416 - RNA, 15 nt, Human
cugcaccggcuggcc

SEQ ID NO: 2002417 - RNA, 14 nt, Human
cugcaccgggccac

SEQ ID NO: 2002418 - RNA, 15 nt, Human
cugcaccgggccaca

SEQ ID NO: 2002419 - RNA, 17 nt, Human
cugcagcaauaaagcag

SEQ ID NO: 2002420 - RNA, 18 nt, Human
cugcaggucccuaauaaa

SEQ ID NO: 2002421 - RNA, 17 nt, Human
cugcaggucccuaauaa

SEQ ID NO: 2002422 - RNA, 16 nt, Human
cugcaggucccuaaua

SEQ ID NO: 2002423 - RNA, 15 nt, Human
cugcaggucccuaau

SEQ ID NO: 2002424 - RNA, 14 nt, Human
cugcaggucccuaa

SEQ ID NO: 2002425 - RNA, 13 nt, Human
cugcaggucccua

SEQ ID NO: 2002426 - RNA, 12 nt, Human
cugcaggucccu

SEQ ID NO: 2002427 - RNA, 11 nt, Human
cugcagguccc

SEQ ID NO: 2002428 - RNA, 23 nt, Human
cugcaggucccuaauaaagcugu

SEQ ID NO: 2002429 - RNA, 22 nt, Human
cugcaggucccuaauaaagcug

SEQ ID NO: 2002430 - RNA, 21 nt, Human
cugcaggucccuaauaaagcu

SEQ ID NO: 2002431 - RNA, 20 nt, Human
cugcaggucccuaauaaagc

SEQ ID NO: 2002432 - RNA, 19 nt, Human
cugcaggucccuaauaaag

SEQ ID NO: 2002433 - RNA, 15 nt, Human
cugcaguuccccugg

SEQ ID NO: 2002434 - RNA, 17 nt, Human
cugcaguuccccuggaa

SEQ ID NO: 2002435 - RNA, 20 nt, Human
cugcaguuccccuggaagca

SEQ ID NO: 2002436 - RNA, 16 nt, Human
cugcaguugccaguca

SEQ ID NO: 2002437 - RNA, 13 nt, Human
cugcaguugccag

SEQ ID NO: 2002438 - RNA, 21 nt, Human
cugcaguuccccuggaagcag

SEQ ID NO: 2002439 - RNA, 20 nt, Human
cugcccggcaggguccuaga

SEQ ID NO: 2002440 - RNA, 13 nt, Human
cugcccggcaggg

SEQ ID NO: 2002441 - RNA, 19 nt, Human
cugccccuggcagccccug

SEQ ID NO: 2002442 - RNA, 18 nt, Human
cugccccuggcagccccu

SEQ ID NO: 2002443 - RNA, 22 nt, Human
cugcccuaaugcgcaggcuggc

SEQ ID NO: 2002444 - RNA, 20 nt, Human
cugcccuaaugcgcaggcug

SEQ ID NO: 2002445 - RNA, 21 nt, Human
cugcccuaaugcgcaggcugg

SEQ ID NO: 2002446 - RNA, 20 nt, Human
cugcccggugggggggcaga

SEQ ID NO: 2002447 - RNA, 21 nt, Human
cugcccggugggggggcagag

SEQ ID NO: 2002448 - RNA, 23 nt, Human
cugcccggugggggggcagagcc

SEQ ID NO: 2002449 - RNA, 15 nt, Human
cugccauuucugaga

SEQ ID NO: 2002450 - RNA, 12 nt, Human
cugcccaccugg

SEQ ID NO: 2002451 - RNA, 14 nt, Human
cugcccaggccccu

SEQ ID NO: 2002452 - RNA, 15 nt, Human
cugcccaggccccug

SEQ ID NO: 2002453 - RNA, 15 nt, Human
cugccccaaguuuug

SEQ ID NO: 2002454 - RNA, 17 nt, Human
cugcccaggccugccug

SEQ ID NO: 2002455 - RNA, 16 nt, Human
cugcccaggccccugc

SEQ ID NO: 2002456 - RNA, 18 nt, Human
cugcccaggccccugcca

SEQ ID NO: 2002457 - RNA, 19 nt, Human
cugcccaggccccugccac

SEQ ID NO: 2002458 - RNA, 20 nt, Human
cugcccaggccccugccacc

SEQ ID NO: 2002459 - RNA, 22 nt, Human
cugccaggaagccagcaggcuc

SEQ ID NO: 2002460 - RNA, 15 nt, Human
cugccauccucccaa

SEQ ID NO: 2002461 - RNA, 21 nt, Human
cugccauccagguucagcuug

SEQ ID NO: 2002462 - RNA, 21 nt, Human
cugccagcucuuccuagcugg

SEQ ID NO: 2002463 - RNA, 17 nt, Human
cugccagcucuuccuag

SEQ ID NO: 2002464 - RNA, 19 nt, Human
cugccagcucuuccuagcu

SEQ ID NO: 2002465 - RNA, 12 nt, Human
cugccagcucuu

SEQ ID NO: 2002466 - RNA, 14 nt, Human
cugccagcucuucc

SEQ ID NO: 2002467 - RNA, 15 nt, Human
cugccagcucuuccu

SEQ ID NO: 2002468 - RNA, 21 nt, Human
cugccaggaagccagcaggcu

SEQ ID NO: 2002469 - RNA, 20 nt, Human
cugccaggaagccagcaggc

SEQ ID NO: 2002470 - RNA, 14 nt, Human
cugccaggaagcca

SEQ ID NO: 2002471 - RNA, 13 nt, Human
cugccaggaagcc

SEQ ID NO: 2002472 - RNA, 14 nt, Human
cugcauaucuucau

SEQ ID NO: 2002473 - RNA, 20 nt, Human
cugcaucaagaugugacaug

SEQ ID NO: 2002474 - RNA, 22 nt, Human
cugcauaauucugaaguuauau

SEQ ID NO: 2002475 - RNA, 23 nt, Human
cugcauaauucugaaguuauauu

SEQ ID NO: 2002476 - RNA, 15 nt, Human
cugcauaugaaagga

SEQ ID NO: 2002477 - RNA, 17 nt, Human
cugccagacccccugga

SEQ ID NO: 2002478 - RNA, 19 nt, Human
cugccagacccccuggaga

SEQ ID NO: 2002479 - RNA, 12 nt, Human
cugccaccuccc

SEQ ID NO: 2002480 - RNA, 13 nt, Human
cugccaccucccc

SEQ ID NO: 2002481 - RNA, 17 nt, Human
cugccaccuccccuugc

SEQ ID NO: 2002482 - RNA, 18 nt, Human
cugccaccuccccuugcc

SEQ ID NO: 2002483 - RNA, 19 nt, Human
cugccaccuccccuugcca

SEQ ID NO: 2002484 - RNA, 20 nt, Human
cugccaccuccccuugccag

SEQ ID NO: 2002485 - RNA, 22 nt, Human
cugccaccuccccuugccagcu

SEQ ID NO: 2002486 - RNA, 12 nt, Human
cugccacccugg

SEQ ID NO: 2002487 - RNA, 14 nt, Human
cugccacccugggg

SEQ ID NO: 2002488 - RNA, 21 nt, Human
cugccacccuggggagaaagu

SEQ ID NO: 2002489 - RNA, 10 nt, Human
cugccaccuc

SEQ ID NO: 2002490 - RNA, 11 nt, Human
cugccaccucc

SEQ ID NO: 2002491 - RNA, 20 nt, Human
cugcuugcuugcuuuuuaau

SEQ ID NO: 2002492 - RNA, 22 nt, Human
cugcuugaggcaacucaucuua

SEQ ID NO: 2002493 - RNA, 20 nt, Human
cugcuugaguucccagaugg

SEQ ID NO: 2002494 - RNA, 18 nt, Human
cugcuugggcuucauccu

SEQ ID NO: 2002495 - RNA, 17 nt, Human
cugcuugggcuucaucc

SEQ ID NO: 2002496 - RNA, 15 nt, Human
cugcuugggcuucau

SEQ ID NO: 2002497 - RNA, 13 nt, Human
cugcuugggcuuc

SEQ ID NO: 2002498 - RNA, 19 nt, Human
cugcuugugaaaggaaaga

SEQ ID NO: 2002499 - RNA, 19 nt, Human
cugcuugggcuucauccuc

SEQ ID NO: 2002500 - RNA, 15 nt, Human
cugcuuggcccaggg

SEQ ID NO: 2002501 - RNA, 14 nt, Human
cugcuuggcccagg

SEQ ID NO: 2002502 - RNA, 23 nt, Human
cugcuuggcccagggggcuuccu

SEQ ID NO: 2002503 - RNA, 16 nt, Human
cugcuuggcccagggg

SEQ ID NO: 2002504 - RNA, 18 nt, Human
cugcuuggcccagggggc

SEQ ID NO: 2002505 - RNA, 19 nt, Human
cugcuuuugucuaugggac

SEQ ID NO: 2002506 - RNA, 17 nt, Human
cugcuuuuggucugugu

SEQ ID NO: 2002507 - RNA, 16 nt, Human
cugcuuugggcugccc

SEQ ID NO: 2002508 - RNA, 13 nt, Human
cugcuuuggaaau

SEQ ID NO: 2002509 - RNA, 15 nt, Human
cugcuuuuggucugu

SEQ ID NO: 2002510 - RNA, 17 nt, Human
cugcuuugggcugcccu

SEQ ID NO: 2002511 - RNA, 14 nt, Human
cugcuuuagacuug

SEQ ID NO: 2002512 - RNA, 16 nt, Human
cugcuuuagacuugaa

SEQ ID NO: 2002513 - RNA, 17 nt, Human
cugcuuuagacuugaaa

SEQ ID NO: 2002514 - RNA, 19 nt, Human
cugcuuuagacuugaaaag

SEQ ID NO: 2002515 - RNA, 20 nt, Human
cugcuuuagacuugaaaaga

SEQ ID NO: 2002516 - RNA, 23 nt, Human
cugcuggugggcuugucauagcc

SEQ ID NO: 2002517 - RNA, 16 nt, Human
cugcugucauugcuuc

SEQ ID NO: 2002518 - RNA, 18 nt, Human
cugcugucauugcuucuu

SEQ ID NO: 2002519 - RNA, 19 nt, Human
cugcugucauugcuucuuc

SEQ ID NO: 2002520 - RNA, 20 nt, Human
cugcugucauugcuucuucu

SEQ ID NO: 2002521 - RNA, 22 nt, Human
cugcugucauugcuucuucuga

SEQ ID NO: 2002522 - RNA, 17 nt, Human
cugcuuccuuucuugau

SEQ ID NO: 2002523 - RNA, 16 nt, Human
cugcuuccuuucuuga

SEQ ID NO: 2002524 - RNA, 22 nt, Human
cugcuugaauaaacaccacugg

SEQ ID NO: 2002525 - RNA, 19 nt, Human
cugcuucucugcccagcuu

SEQ ID NO: 2002526 - RNA, 21 nt, Human
cugcuugaggcaacucaucuu

SEQ ID NO: 2002527 - RNA, 20 nt, Human
cugcuugaggcaacucaucu

SEQ ID NO: 2002528 - RNA, 13 nt, Human
cugcuugaggcaa

SEQ ID NO: 2002529 - RNA, 17 nt, Human
cugcuggguguggcgca

SEQ ID NO: 2002530 - RNA, 18 nt, Human
cugcuggucacuucuucu

SEQ ID NO: 2002531 - RNA, 19 nt, Human
cugcuggucacuucuucug

SEQ ID NO: 2002532 - RNA, 20 nt, Human
cugcuggucacuucuucugu

SEQ ID NO: 2002533 - RNA, 17 nt, Human
cugcuggucagcacucc

SEQ ID NO: 2002534 - RNA, 17 nt, Human
cugcuggucacuucuuc

SEQ ID NO: 2002535 - RNA, 15 nt, Human
cugcuggguguggcg

SEQ ID NO: 2002536 - RNA, 14 nt, Human
cugcuggguguggc

SEQ ID NO: 2002537 - RNA, 14 nt, Human
cugcugcuggcugg

SEQ ID NO: 2002538 - RNA, 13 nt, Human
cugcuggcugccu

SEQ ID NO: 2002539 - RNA, 14 nt, Human
cugcuggcugccuu

SEQ ID NO: 2002540 - RNA, 15 nt, Human
cugcuggcugccuua

SEQ ID NO: 2002541 - RNA, 20 nt, Human
cugcugggcuccacuuggcu

SEQ ID NO: 2002542 - RNA, 13 nt, Human
cugcugcuggcug

SEQ ID NO: 2002543 - RNA, 12 nt, Human
cugcugcuggcu

SEQ ID NO: 2002544 - RNA, 13 nt, Human
cugcugcaguugc

SEQ ID NO: 2002545 - RNA, 10 nt, Human
cugcugcagu

SEQ ID NO: 2002546 - RNA, 14 nt, Human
cugcugcaguugcc

SEQ ID NO: 2002547 - RNA, 15 nt, Human
cugcugcaguugcca

SEQ ID NO: 2002548 - RNA, 23 nt, Human
cugcugccugcuuuuuauggccu

SEQ ID NO: 2002549 - RNA, 14 nt, Human
cugcugccugcuuu

SEQ ID NO: 2002550 - RNA, 16 nt, Human
cugcugccucaggaau

SEQ ID NO: 2002551 - RNA, 15 nt, Human
cugcucugugcccac

SEQ ID NO: 2002552 - RNA, 12 nt, Human
cugcucugguua

SEQ ID NO: 2002553 - RNA, 16 nt, Human
cugcucuugaacuccu

SEQ ID NO: 2002554 - RNA, 18 nt, Human
cugcucuugaacuccuga

SEQ ID NO: 2002555 - RNA, 19 nt, Human
cugcucuugaacuccugac

SEQ ID NO: 2002556 - RNA, 11 nt, Human
cugcucuugca

SEQ ID NO: 2002557 - RNA, 20 nt, Human
cugcucugaugaagaggagu

SEQ ID NO: 2002558 - RNA, 13 nt, Human
cugcucugcccca

SEQ ID NO: 2002559 - RNA, 15 nt, Human
cugcucugccccagc

SEQ ID NO: 2002560 - RNA, 17 nt, Human
cugcucugccccagcuu

SEQ ID NO: 2002561 - RNA, 22 nt, Human
cugcucugccccagcuugggca

SEQ ID NO: 2002562 - RNA, 11 nt, Human
cugcucugcuc

SEQ ID NO: 2002563 - RNA, 12 nt, Human
cugcucugcucg

SEQ ID NO: 2002564 - RNA, 15 nt, Human
cugcucugcucgccu

SEQ ID NO: 2002565 - RNA, 11 nt, Human
cugcucugcug

SEQ ID NO: 2002566 - RNA, 12 nt, Human
cugcucugcuga

SEQ ID NO: 2002567 - RNA, 23 nt, Human
cugcggugcuaucucccccagcc

SEQ ID NO: 2002568 - RNA, 22 nt, Human
cugcggugcuaucucccccagc

SEQ ID NO: 2002569 - RNA, 21 nt, Human
cugcggugcuaucucccccag

SEQ ID NO: 2002570 - RNA, 20 nt, Human
cugcggugcuaucuccccca

SEQ ID NO: 2002571 - RNA, 23 nt, Human
cugcuccucuccccagcaaguga

SEQ ID NO: 2002572 - RNA, 14 nt, Human
cugcucccccuuuu

SEQ ID NO: 2002573 - RNA, 15 nt, Human
cugcuccugagcccc

SEQ ID NO: 2002574 - RNA, 13 nt, Human
cugcuccugagcc

SEQ ID NO: 2002575 - RNA, 14 nt, Human
cugcuccugagccc

SEQ ID NO: 2002576 - RNA, 12 nt, Human
cugcuccugagc

SEQ ID NO: 2002577 - RNA, 19 nt, Human
cugcuccucuccccagcaa

SEQ ID NO: 2002578 - RNA, 20 nt, Human
cugcuccucuccccagcaag

SEQ ID NO: 2002579 - RNA, 15 nt, Human
cugcucuccgaccag

SEQ ID NO: 2002580 - RNA, 20 nt, Human
cugcucucaaaccccugacc

SEQ ID NO: 2002581 - RNA, 23 nt, Human
cugcucucaaaccccugaccuca

SEQ ID NO: 2002582 - RNA, 22 nt, Human
cugcucucaccuugguuccugg

SEQ ID NO: 2002583 - RNA, 22 nt, Human
cugccugcuuuuuauggccugu

SEQ ID NO: 2002584 - RNA, 19 nt, Human
cugcggugcuaucuccccc

SEQ ID NO: 2002585 - RNA, 18 nt, Human
cugcggugcuaucucccc

SEQ ID NO: 2002586 - RNA, 23 nt, Human
cugcgguccacccaggagccccg

SEQ ID NO: 2002587 - RNA, 22 nt, Human
cugcgggucacaggagggaggg

SEQ ID NO: 2002588 - RNA, 23 nt, Human
cugcgggucacaggagggagggg

SEQ ID NO: 2002589 - RNA, 15 nt, Human
cugcgggucacagga

SEQ ID NO: 2002590 - RNA, 21 nt, Human
cugcgggucacaggagggagg

SEQ ID NO: 2002591 - RNA, 19 nt, Human
cugcggggcgggcacaccu

SEQ ID NO: 2002592 - RNA, 22 nt, Human
cugcggggcgggcacaccuccu

SEQ ID NO: 2002593 - RNA, 17 nt, Human
cugcccugcccaccugg

SEQ ID NO: 2002594 - RNA, 20 nt, Human
cugcccugcccaccuggccu

SEQ ID NO: 2002595 - RNA, 21 nt, Human
cugcccugcccaccuggccuc

SEQ ID NO: 2002596 - RNA, 18 nt, Human
cugccugaagucacacag

SEQ ID NO: 2002597 - RNA, 16 nt, Human
cugccugaagucacac

SEQ ID NO: 2002598 - RNA, 17 nt, Human
cugccugcccuuugucc

SEQ ID NO: 2002599 - RNA, 23 nt, Human
cugccugcccuuuguccuccugc

SEQ ID NO: 2002600 - RNA, 17 nt, Human
cugccugccuuaaguga

SEQ ID NO: 2002601 - RNA, 18 nt, Human
cugccugccuuaagugag

SEQ ID NO: 2002602 - RNA, 20 nt, Human
cugccugccuuaagugagga

SEQ ID NO: 2002603 - RNA, 22 nt, Human
cugccugccuuaagugaggaaa

SEQ ID NO: 2002604 - RNA, 19 nt, Human
cugccugaagucacacagu

SEQ ID NO: 2002605 - RNA, 20 nt, Human
cugccugcaguacuuuaccu

SEQ ID NO: 2002606 - RNA, 21 nt, Human
cugccugcaguacuuuaccuc

SEQ ID NO: 2002607 - RNA, 14 nt, Human
cugucccccugaca

SEQ ID NO: 2002608 - RNA, 13 nt, Human
cugucccccugac

SEQ ID NO: 2002609 - RNA, 16 nt, Human
cuguccuacucugugu

SEQ ID NO: 2002610 - RNA, 17 nt, Human
cuguccuacucuguguc

SEQ ID NO: 2002611 - RNA, 18 nt, Human
cuguccuacucuguguca

SEQ ID NO: 2002612 - RNA, 20 nt, Human
cuguccuacucugugucagg

SEQ ID NO: 2002613 - RNA, 22 nt, Human
cugucucaaaaaaagaaaaaga

SEQ ID NO: 2002614 - RNA, 15 nt, Human
cuguccuauuauauu

SEQ ID NO: 2002615 - RNA, 21 nt, Human
cuguccuauuauauucauucu

SEQ ID NO: 2002616 - RNA, 21 nt, Human
cuguccuacucugugucaggu

SEQ ID NO: 2002617 - RNA, 18 nt, Human
cugucucaagagggcacu

SEQ ID NO: 2002618 - RNA, 19 nt, Human
cugucucaagagggcacug

SEQ ID NO: 2002619 - RNA, 20 nt, Human
cugucucaagagggcacugg

SEQ ID NO: 2002620 - RNA, 21 nt, Human
cugucucaagagggcacuggu

SEQ ID NO: 2002621 - RNA, 18 nt, Human
cugucucuacuaaaaaua

SEQ ID NO: 2002622 - RNA, 22 nt, Human
cugucccagugccgagaaggaa

SEQ ID NO: 2002623 - RNA, 21 nt, Human
cuguccauuuuuauucagggg

SEQ ID NO: 2002624 - RNA, 17 nt, Human
cuguccauuuuuauuca

SEQ ID NO: 2002625 - RNA, 20 nt, Human
cuguccaggcacugcugccc

SEQ ID NO: 2002626 - RNA, 21 nt, Human
cuguccaggcacugcugccca

SEQ ID NO: 2002627 - RNA, 22 nt, Human
cuguccaggcacugcugcccag

SEQ ID NO: 2002628 - RNA, 18 nt, Human
cuguccaggcacugcugc

SEQ ID NO: 2002629 - RNA, 19 nt, Human
cuguccaggcacugcugcc

SEQ ID NO: 2002630 - RNA, 22 nt, Human
cuguccacccgccccugccccu

SEQ ID NO: 2002631 - RNA, 15 nt, Human
cuguccaagcagauu

SEQ ID NO: 2002632 - RNA, 14 nt, Human
cuguaccucugccu

SEQ ID NO: 2002633 - RNA, 22 nt, Human
cuguaccucuugagccuugaac

SEQ ID NO: 2002634 - RNA, 14 nt, Human
cuguaucccaugag

SEQ ID NO: 2002635 - RNA, 15 nt, Human
cuguaucccaugagc

SEQ ID NO: 2002636 - RNA, 19 nt, Human
cuguauagcucuuuuccua

SEQ ID NO: 2002637 - RNA, 13 nt, Human
cuguauuugaaag

SEQ ID NO: 2002638 - RNA, 14 nt, Human
cuguauuugaaagu

SEQ ID NO: 2002639 - RNA, 16 nt, Human
cuguauuugaaagugc

SEQ ID NO: 2002640 - RNA, 17 nt, Human
cuguauuugaaagugcc

SEQ ID NO: 2002641 - RNA, 19 nt, Human
cuguauuugaaagugccuu

SEQ ID NO: 2002642 - RNA, 20 nt, Human
cuguauuugaaagugccuuu

SEQ ID NO: 2002643 - RNA, 21 nt, Human
cuguauuugaaagugccuuug

SEQ ID NO: 2002644 - RNA, 19 nt, Human
cuguaucccaugagccuca

SEQ ID NO: 2002645 - RNA, 18 nt, Human
cuguaucccaugagccuc

SEQ ID NO: 2002646 - RNA, 18 nt, Human
cuguaaggcaaucauggu

SEQ ID NO: 2002647 - RNA, 19 nt, Human
cugguucaagcgauucucu

SEQ ID NO: 2002648 - RNA, 17 nt, Human
cugguuauuuaaaaugu

SEQ ID NO: 2002649 - RNA, 20 nt, Human
cugguucaggguuggccccu

SEQ ID NO: 2002650 - RNA, 23 nt, Human
cugguuaauauuuauaggucacu

SEQ ID NO: 2002651 - RNA, 12 nt, Human
cugguggcagcu

SEQ ID NO: 2002652 - RNA, 16 nt, Human
cuggucucgaacuccu

SEQ ID NO: 2002653 - RNA, 14 nt, Human
cugguggcagcuca

SEQ ID NO: 2002654 - RNA, 13 nt, Human
cugguggcagcuc

SEQ ID NO: 2002655 - RNA, 16 nt, Human
cugguggcagcucacc

SEQ ID NO: 2002656 - RNA, 23 nt, Human
cuguacagagcccacgcccccac

SEQ ID NO: 2002657 - RNA, 21 nt, Human
cuguacagagccguaaaaacu

SEQ ID NO: 2002658 - RNA, 22 nt, Human
cuguacagagccguaaaaacug

SEQ ID NO: 2002659 - RNA, 21 nt, Human
cuguaauuugugauacaaugc

SEQ ID NO: 2002660 - RNA, 22 nt, Human
cuguaauuugugauacaaugcu

SEQ ID NO: 2002661 - RNA, 18 nt, Human
cuguaauuugugauacaa

SEQ ID NO: 2002662 - RNA, 17 nt, Human
cuguaauuugugauaca

SEQ ID NO: 2002663 - RNA, 16 nt, Human
cuguaaggcaugaagg

SEQ ID NO: 2002664 - RNA, 17 nt, Human
cuguaaggcaugaagga

SEQ ID NO: 2002665 - RNA, 21 nt, Human
cuguaccucuugagccuugaa

SEQ ID NO: 2002666 - RNA, 15 nt, Human
cuguacaugggacua

SEQ ID NO: 2002667 - RNA, 22 nt, Human
cuguacaugaaaacacauuuuu

SEQ ID NO: 2002668 - RNA, 23 nt, Human
cuguacaugaaaacacauuuuuc

SEQ ID NO: 2002669 - RNA, 22 nt, Human
cugggucgcccuggacugugug

SEQ ID NO: 2002670 - RNA, 18 nt, Human
cugggucgcccuggacug

SEQ ID NO: 2002671 - RNA, 17 nt, Human
cugggucgcccuggacu

SEQ ID NO: 2002672 - RNA, 15 nt, Human
cuggguuggagggug

SEQ ID NO: 2002673 - RNA, 22 nt, Human
cugggcucccuucccaccucuc

SEQ ID NO: 2002674 - RNA, 21 nt, Human
cugggcucccuucccaccucu

SEQ ID NO: 2002675 - RNA, 20 nt, Human
cugggcucccuucccaccuc

SEQ ID NO: 2002676 - RNA, 19 nt, Human
cugggcucccuucccaccu

SEQ ID NO: 2002677 - RNA, 19 nt, Human
cuggguacuuguggacaca

SEQ ID NO: 2002678 - RNA, 18 nt, Human
cuggguacuuguggacac

SEQ ID NO: 2002679 - RNA, 16 nt, Human
cuggguacuuguggac

SEQ ID NO: 2002680 - RNA, 14 nt, Human
cuggguacuugugg

SEQ ID NO: 2002681 - RNA, 23 nt, Human
cuggucucaaacucuugaccuca

SEQ ID NO: 2002682 - RNA, 14 nt, Human
cuggucccacucag

SEQ ID NO: 2002683 - RNA, 17 nt, Human
cugguccaucugguuuu

SEQ ID NO: 2002684 - RNA, 13 nt, Human
cuggucccacuca

SEQ ID NO: 2002685 - RNA, 21 nt, Human
cugguccauagagagcaagac

SEQ ID NO: 2002686 - RNA, 12 nt, Human
cuggucagccca

SEQ ID NO: 2002687 - RNA, 13 nt, Human
cuggucagcccaa

SEQ ID NO: 2002688 - RNA, 16 nt, Human
cuggucacuucuucug

SEQ ID NO: 2002689 - RNA, 17 nt, Human
cuggucacuucuucugu

SEQ ID NO: 2002690 - RNA, 19 nt, Human
cuggucacaggacucugcc

SEQ ID NO: 2002691 - RNA, 20 nt, Human
cuggucacaggacucugccu

SEQ ID NO: 2002692 - RNA, 21 nt, Human
cuggucacaggacucugccuc

SEQ ID NO: 2002693 - RNA, 22 nt, Human
cuggucacaggacucugccucc

SEQ ID NO: 2002694 - RNA, 23 nt, Human
cuggucacaggacucugccuccu

SEQ ID NO: 2002695 - RNA, 15 nt, Human
cuggucacuucuucu

SEQ ID NO: 2002696 - RNA, 20 nt, Human
cugggagagccuuccagggg

SEQ ID NO: 2002697 - RNA, 19 nt, Human
cugggagagccuuccaggg

SEQ ID NO: 2002698 - RNA, 21 nt, Human
cugggagagccuuccaggggu

SEQ ID NO: 2002699 - RNA, 18 nt, Human
cugggagagccuuccagg

SEQ ID NO: 2002700 - RNA, 17 nt, Human
cugggagagccuuccag

SEQ ID NO: 2002701 - RNA, 16 nt, Human
cugggaaacagaggcu

SEQ ID NO: 2002702 - RNA, 15 nt, Human
cugggaaacagaggc

SEQ ID NO: 2002703 - RNA, 11 nt, Human
cugggaaacag

SEQ ID NO: 2002704 - RNA, 23 nt, Human
cuggcuuuucacugcuggcugcc

SEQ ID NO: 2002705 - RNA, 22 nt, Human
cuggcuuucaacuguuucuaga

SEQ ID NO: 2002706 - RNA, 18 nt, Human
cuggcuguuggcuggggg

SEQ ID NO: 2002707 - RNA, 20 nt, Human
cuggcugguuagagguuccc

SEQ ID NO: 2002708 - RNA, 16 nt, Human
cuggcuguuggcuggg

SEQ ID NO: 2002709 - RNA, 17 nt, Human
cuggcuguuggcugggg

SEQ ID NO: 2002710 - RNA, 14 nt, Human
cuggcuguccaccc

SEQ ID NO: 2002711 - RNA, 18 nt, Human
cugggaugauuggagggg

SEQ ID NO: 2002712 - RNA, 20 nt, Human
cugggaucacauguggacuu

SEQ ID NO: 2002713 - RNA, 20 nt, Human
cugggaucccucauccucau

SEQ ID NO: 2002714 - RNA, 20 nt, Human
cugggauuacaggugugaac

SEQ ID NO: 2002715 - RNA, 16 nt, Human
cugggauuacaggugu

SEQ ID NO: 2002716 - RNA, 18 nt, Human
cugggauuacagguguga

SEQ ID NO: 2002717 - RNA, 20 nt, Human
cugggaugggaggagaggac

SEQ ID NO: 2002718 - RNA, 17 nt, Human
cugggauuacaggugug

SEQ ID NO: 2002719 - RNA, 15 nt, Human
cugggccccaguugu

SEQ ID NO: 2002720 - RNA, 19 nt, Human
cugggccccaguuguauuu

SEQ ID NO: 2002721 - RNA, 21 nt, Human
cugggaggucaaggcugcagu

SEQ ID NO: 2002722 - RNA, 19 nt, Human
cugggaggucaaggcugca

SEQ ID NO: 2002723 - RNA, 17 nt, Human
cugggaggcucuggagc

SEQ ID NO: 2002724 - RNA, 21 nt, Human
cugggaggcucuggagcccac

SEQ ID NO: 2002725 - RNA, 20 nt, Human
cugggaggcucuggagccca

SEQ ID NO: 2002726 - RNA, 18 nt, Human
cugggaggcucuggagcc

SEQ ID NO: 2002727 - RNA, 19 nt, Human
cugggagccuacccacccc

SEQ ID NO: 2002728 - RNA, 22 nt, Human
cugggagccuacccacccccag

SEQ ID NO: 2002729 - RNA, 16 nt, Human
cugggagccuacccac

SEQ ID NO: 2002730 - RNA, 16 nt, Human
cuggccuucggccucc

SEQ ID NO: 2002731 - RNA, 17 nt, Human
cuggccuucggccucca

SEQ ID NO: 2002732 - RNA, 18 nt, Human
cuggccuucggccuccau

SEQ ID NO: 2002733 - RNA, 21 nt, Human
cuggccuucggccuccauccu

SEQ ID NO: 2002734 - RNA, 15 nt, Human
cuggccuucggccuc

SEQ ID NO: 2002735 - RNA, 17 nt, Human
cuggccuggccccucag

SEQ ID NO: 2002736 - RNA, 16 nt, Human
cuggccuggccccuca

SEQ ID NO: 2002737 - RNA, 16 nt, Human
cuggccugagcuggga

SEQ ID NO: 2002738 - RNA, 14 nt, Human
cuggccucugcacu

SEQ ID NO: 2002739 - RNA, 13 nt, Human
cuggccucugcac

SEQ ID NO: 2002740 - RNA, 18 nt, Human
cuggccugagcugggaug

SEQ ID NO: 2002741 - RNA, 15 nt, Human
cuggccugagcuggg

SEQ ID NO: 2002742 - RNA, 14 nt, Human
cuggccuggccccu

SEQ ID NO: 2002743 - RNA, 14 nt, Human
cuggccucccacag

SEQ ID NO: 2002744 - RNA, 20 nt, Human
cuggccucucacugccuccc

SEQ ID NO: 2002745 - RNA, 13 nt, Human
cuggccucccaca

SEQ ID NO: 2002746 - RNA, 12 nt, Human
cuggccucugca

SEQ ID NO: 2002747 - RNA, 13 nt, Human
cuggcccccacau

SEQ ID NO: 2002748 - RNA, 23 nt, Human
cuggccucaagugauucuccugc

SEQ ID NO: 2002749 - RNA, 14 nt, Human
cuggcccccacaug

SEQ ID NO: 2002750 - RNA, 15 nt, Human
cuggcccccacaugg

SEQ ID NO: 2002751 - RNA, 14 nt, Human
cuggcaagaaugug

SEQ ID NO: 2002752 - RNA, 17 nt, Human
cuggcaagaaaagaguu

SEQ ID NO: 2002753 - RNA, 23 nt, Human
cuggcaagaaaagaguuaaggca

SEQ ID NO: 2002754 - RNA, 21 nt, Human
cuggaaucauuguccagagcu

SEQ ID NO: 2002755 - RNA, 18 nt, Human
cuggaauauauaaccagu

SEQ ID NO: 2002756 - RNA, 20 nt, Human
cuggaagugcuaauuuugaa

SEQ ID NO: 2002757 - RNA, 16 nt, Human
cuggcacccggccccu

SEQ ID NO: 2002758 - RNA, 17 nt, Human
cuggcacccggccccug

SEQ ID NO: 2002759 - RNA, 18 nt, Human
cuggcacccggccccugc

SEQ ID NO: 2002760 - RNA, 15 nt, Human
cuggcacagggcagu

SEQ ID NO: 2002761 - RNA, 16 nt, Human
cuggcacagggcagug

SEQ ID NO: 2002762 - RNA, 22 nt, Human
cuggcaugggaaugaaugucag

SEQ ID NO: 2002763 - RNA, 19 nt, Human
cuggcaugggaaugaaugu

SEQ ID NO: 2002764 - RNA, 18 nt, Human
cuggcaugggaaugaaug

SEQ ID NO: 2002765 - RNA, 16 nt, Human
cuggcaugggaaugaa

SEQ ID NO: 2002766 - RNA, 16 nt, Human
cuggcacuauaaugua

SEQ ID NO: 2002767 - RNA, 15 nt, Human
cuggcacuauaaugu

SEQ ID NO: 2002768 - RNA, 22 nt, Human
cuggcacuauaauguaagcucu

SEQ ID NO: 2002769 - RNA, 19 nt, Human
cuggcacuaccaaaggaca

SEQ ID NO: 2002770 - RNA, 21 nt, Human
cuggcauggugguugggaccc

SEQ ID NO: 2002771 - RNA, 24 nt, Human
cuggcaugggaaugaaugucagug

SEQ ID NO: 2002772 - RNA, 13 nt, Human
cucucuccucccu

SEQ ID NO: 2002773 - RNA, 17 nt, Human
cucucuccccugcucca

SEQ ID NO: 2002774 - RNA, 16 nt, Human
cucucugaaccccucc

SEQ ID NO: 2002775 - RNA, 21 nt, Human
cucugccugaagucacacagu

SEQ ID NO: 2002776 - RNA, 22 nt, Human
cucugccugaagucacacagug

SEQ ID NO: 2002777 - RNA, 17 nt, Human
cucucugaaggaggcca

SEQ ID NO: 2002778 - RNA, 22 nt, Human
cucugcugugggcacaggucag

SEQ ID NO: 2002779 - RNA, 11 nt, Human
cucugcugugg

SEQ ID NO: 2002780 - RNA, 15 nt, Human
cucuggacaggcaug

SEQ ID NO: 2002781 - RNA, 12 nt, Human
cucuggccuucg

SEQ ID NO: 2002782 - RNA, 16 nt, Human
cucuggcagcucagag

SEQ ID NO: 2002783 - RNA, 15 nt, Human
cucuggcagcucaga

SEQ ID NO: 2002784 - RNA, 19 nt, Human
cucuggccuucggccucca

SEQ ID NO: 2002785 - RNA, 15 nt, Human
cucuggcuccagcug

SEQ ID NO: 2002786 - RNA, 16 nt, Human
cucuggcuccagcugg

SEQ ID NO: 2002787 - RNA, 19 nt, Human
cucuggagcccacuguacu

SEQ ID NO: 2002788 - RNA, 16 nt, Human
cucuggacaggcaugu

SEQ ID NO: 2002789 - RNA, 22 nt, Human
cucuggacaggcauguucucug

SEQ ID NO: 2002790 - RNA, 14 nt, Human
cucuggcagcucag

SEQ ID NO: 2002791 - RNA, 12 nt, Human
cucuggcagcuc

SEQ ID NO: 2002792 - RNA, 19 nt, Human
cucugugucagguggggca

SEQ ID NO: 2002793 - RNA, 22 nt, Human
cucuguuacacuuuuuggaagu

SEQ ID NO: 2002794 - RNA, 15 nt, Human
cucugugucaggugg

SEQ ID NO: 2002795 - RNA, 15 nt, Human
cucuuagaaaaacca

SEQ ID NO: 2002796 - RNA, 13 nt, Human
cucuuagaaaaac

SEQ ID NO: 2002797 - RNA, 15 nt, Human
cucuuccaggcuggg

SEQ ID NO: 2002798 - RNA, 14 nt, Human
cucuuccaggcugg

SEQ ID NO: 2002799 - RNA, 13 nt, Human
cucuuccaggcug

SEQ ID NO: 2002800 - RNA, 16 nt, Human
cucuuccaaccauuua

SEQ ID NO: 2002801 - RNA, 22 nt, Human
cucugugcccacccuccacucu

SEQ ID NO: 2002802 - RNA, 22 nt, Human
cucuggcuccagcuggccggga

SEQ ID NO: 2002803 - RNA, 15 nt, Human
cucuggcucuacaca

SEQ ID NO: 2002804 - RNA, 19 nt, Human
cugaaagcccugagcuuuc

SEQ ID NO: 2002805 - RNA, 18 nt, Human
cugaaagcccugagcuuu

SEQ ID NO: 2002806 - RNA, 17 nt, Human
cugaaagcccugagcuu

SEQ ID NO: 2002807 - RNA, 16 nt, Human
cugaaagcccugagcu

SEQ ID NO: 2002808 - RNA, 21 nt, Human
cugaaauaaacgucuuaaaua

SEQ ID NO: 2002809 - RNA, 20 nt, Human
cugaaagccuuagggaagcu

SEQ ID NO: 2002810 - RNA, 23 nt, Human
cugaaagcccugagcuuucugcu

SEQ ID NO: 2002811 - RNA, 14 nt, Human
cugaaauauaaagu

SEQ ID NO: 2002812 - RNA, 22 nt, Human
cugaaauagacccacaagaggc

SEQ ID NO: 2002813 - RNA, 19 nt, Human
cugaaaggcaguagucauu

SEQ ID NO: 2002814 - RNA, 17 nt, Human
cucuuucccuuccaguu

SEQ ID NO: 2002815 - RNA, 23 nt, Human
cucuuucccuuccaguuuauucc

SEQ ID NO: 2002816 - RNA, 13 nt, Human
cucuuucccuucc

SEQ ID NO: 2002817 - RNA, 11 nt, Human
cucuuugaaac

SEQ ID NO: 2002818 - RNA, 15 nt, Human
cugaaagcccugagc

SEQ ID NO: 2002819 - RNA, 13 nt, Human
cugaaauuuccug

SEQ ID NO: 2002820 - RNA, 20 nt, Human
cugaaauugaaaaguuauuu

SEQ ID NO: 2002821 - RNA, 21 nt, Human
cugaaauugaaaaguuauuuc

SEQ ID NO: 2002822 - RNA, 23 nt, Human
cugaaauuuccugggagcuuuug

SEQ ID NO: 2002823 - RNA, 14 nt, Human
cugaaauugaaaag

SEQ ID NO: 2002824 - RNA, 15 nt, Human
cugaaauugaaaagu

SEQ ID NO: 2002825 - RNA, 16 nt, Human
cugaaauuuccuggga

SEQ ID NO: 2002826 - RNA, 22 nt, Human
cugaacagaugaccccugccca

SEQ ID NO: 2002827 - RNA, 22 nt, Human
cugaacacugaagucaguucuc

SEQ ID NO: 2002828 - RNA, 24 nt, Human
cugaacagaugaccccugcccaga

SEQ ID NO: 2002829 - RNA, 19 nt, Human
cugaagaauugaaaaacca

SEQ ID NO: 2002830 - RNA, 16 nt, Human
cugaacucugacaaca

SEQ ID NO: 2002831 - RNA, 17 nt, Human
cugaacucugacaacag

SEQ ID NO: 2002832 - RNA, 23 nt, Human
cugaacguuugguucaaaugugu

SEQ ID NO: 2002833 - RNA, 18 nt, Human
cugaacguuugguucaaa

SEQ ID NO: 2002834 - RNA, 22 nt, Human
cucuugaaauauaggaacuuaa

SEQ ID NO: 2002835 - RNA, 21 nt, Human
cucuuggguucaagcgauucu

SEQ ID NO: 2002836 - RNA, 19 nt, Human
cucuuggguucaagcgauu

SEQ ID NO: 2002837 - RNA, 15 nt, Human
cucuugaacuccuga

SEQ ID NO: 2002838 - RNA, 14 nt, Human
cucuuccuagcugg

SEQ ID NO: 2002839 - RNA, 20 nt, Human
cucuucccugaacuuccugc

SEQ ID NO: 2002840 - RNA, 15 nt, Human
cucuuccaggcagcc

SEQ ID NO: 2002841 - RNA, 22 nt, Human
cucuucccugaacuuccugcuu

SEQ ID NO: 2002842 - RNA, 13 nt, Human
cucuuccaggcag

SEQ ID NO: 2002843 - RNA, 14 nt, Human
cucuuccaggcagc

SEQ ID NO: 2002844 - RNA, 23 nt, Human
cucuucccugaacuuccugcuuc

SEQ ID NO: 2002845 - RNA, 21 nt, Human
cucuucccugguaagaaaaag

SEQ ID NO: 2002846 - RNA, 18 nt, Human
cucuuccuccugacaccc

SEQ ID NO: 2002847 - RNA, 21 nt, Human
cucuuccuccugacaccccac

SEQ ID NO: 2002848 - RNA, 12 nt, Human
cucuucuguguu

SEQ ID NO: 2002849 - RNA, 11 nt, Human
cucuuccucca

SEQ ID NO: 2002850 - RNA, 19 nt, Human
cucuuccuccaaggacaga

SEQ ID NO: 2002851 - RNA, 14 nt, Human
cucuuccuccugac

SEQ ID NO: 2002852 - RNA, 16 nt, Human
cucuuccuccugacac

SEQ ID NO: 2002853 - RNA, 14 nt, Human
cucuucuucucaag

SEQ ID NO: 2002854 - RNA, 13 nt, Human
cucuucuguguuu

SEQ ID NO: 2002855 - RNA, 13 nt, Human
cucuucuuagccu

SEQ ID NO: 2002856 - RNA, 17 nt, Human
cucuugguccugcugca

SEQ ID NO: 2002857 - RNA, 16 nt, Human
cucuugguccugcugc

SEQ ID NO: 2002858 - RNA, 15 nt, Human
cucuugguccugcug

SEQ ID NO: 2002859 - RNA, 13 nt, Human
cucuugguccugc

SEQ ID NO: 2002860 - RNA, 18 nt, Human
cucuuuaaugucacaggc

SEQ ID NO: 2002861 - RNA, 17 nt, Human
cucuuuaacuuguaaua

SEQ ID NO: 2002862 - RNA, 19 nt, Human
cucuuuaacuuguaauaaa

SEQ ID NO: 2002863 - RNA, 16 nt, Human
cucuuguucuuacuuu

SEQ ID NO: 2002864 - RNA, 19 nt, Human
cucuuguucuuacuuuccu

SEQ ID NO: 2002865 - RNA, 20 nt, Human
cucuuguucuuacuuuccug

SEQ ID NO: 2002866 - RNA, 13 nt, Human
cucuuguuucucc

SEQ ID NO: 2002867 - RNA, 20 nt, Human
cucuuuaaugucacaggcag

SEQ ID NO: 2002868 - RNA, 21 nt, Human
cucuuuaaugucacaggcagg

SEQ ID NO: 2002869 - RNA, 22 nt, Human
cucuuuaaugucacaggcaggu

SEQ ID NO: 2002870 - RNA, 23 nt, Human
cucuuuaaugucacaggcagguc

SEQ ID NO: 2002871 - RNA, 17 nt, Human
cucuuucccucccuucc

SEQ ID NO: 2002872 - RNA, 13 nt, Human
cucuuucccuccc

SEQ ID NO: 2002873 - RNA, 20 nt, Human
cugaggcccuucucuccagc

SEQ ID NO: 2002874 - RNA, 19 nt, Human
cugaggcccuucucuccag

SEQ ID NO: 2002875 - RNA, 18 nt, Human
cugaggcccuucucucca

SEQ ID NO: 2002876 - RNA, 15 nt, Human
cugaggcccuucucu

SEQ ID NO: 2002877 - RNA, 14 nt, Human
cugaggcccuucuc

SEQ ID NO: 2002878 - RNA, 23 nt, Human
cugaggcccagagggccugcaag

SEQ ID NO: 2002879 - RNA, 21 nt, Human
cugaggcccagagggccugca

SEQ ID NO: 2002880 - RNA, 19 nt, Human
cugaggcccagagggccug

SEQ ID NO: 2002881 - RNA, 18 nt, Human
cugaggcccagagggccu

SEQ ID NO: 2002882 - RNA, 17 nt, Human
cugaggcccagagggcc

SEQ ID NO: 2002883 - RNA, 16 nt, Human
cugaggcccagagggc

SEQ ID NO: 2002884 - RNA, 15 nt, Human
cugaggcccagaggg

SEQ ID NO: 2002885 - RNA, 14 nt, Human
cugaggcccagagg

SEQ ID NO: 2002886 - RNA, 13 nt, Human
cugaggcccagag

SEQ ID NO: 2002887 - RNA, 12 nt, Human
cugaggcccaga

SEQ ID NO: 2002888 - RNA, 14 nt, Human
cugaggcagguccc

SEQ ID NO: 2002889 - RNA, 17 nt, Human
cugaggcagguccccag

SEQ ID NO: 2002890 - RNA, 18 nt, Human
cugaggcagguccccaga

SEQ ID NO: 2002891 - RNA, 19 nt, Human
cugaggcagguccccagac

SEQ ID NO: 2002892 - RNA, 17 nt, Human
cugaggcaguuugagga

SEQ ID NO: 2002893 - RNA, 17 nt, Human
cugaggaucagaguaau

SEQ ID NO: 2002894 - RNA, 19 nt, Human
cugaggaucagaguaaucc

SEQ ID NO: 2002895 - RNA, 21 nt, Human
cugaggauauggacacuggug

SEQ ID NO: 2002896 - RNA, 21 nt, Human
cugagccagauuucacucucc

SEQ ID NO: 2002897 - RNA, 20 nt, Human
cugagccagauuucacucuc

SEQ ID NO: 2002898 - RNA, 19 nt, Human
cugagccagauuucacucu

SEQ ID NO: 2002899 - RNA, 18 nt, Human
cugagccagauuucacuc

SEQ ID NO: 2002900 - RNA, 17 nt, Human
cugagccagauuucacu

SEQ ID NO: 2002901 - RNA, 18 nt, Human
cugagacagcccgggcuc

SEQ ID NO: 2002902 - RNA, 17 nt, Human
cugagacagcccgggcu

SEQ ID NO: 2002903 - RNA, 16 nt, Human
cugagacagcccgggc

SEQ ID NO: 2002904 - RNA, 15 nt, Human
cugagccagauuuca

SEQ ID NO: 2002905 - RNA, 16 nt, Human
cugagccucagucucc

SEQ ID NO: 2002906 - RNA, 21 nt, Human
cugagccucagucucccuccc

SEQ ID NO: 2002907 - RNA, 16 nt, Human
cugagccgcagagaag

SEQ ID NO: 2002908 - RNA, 14 nt, Human
cugagccgcagaga

SEQ ID NO: 2002909 - RNA, 15 nt, Human
cugagccgcagagaa

SEQ ID NO: 2002910 - RNA, 22 nt, Human
cugagccucagucucccucccu

SEQ ID NO: 2002911 - RNA, 16 nt, Human
cugagcgacagugaga

SEQ ID NO: 2002912 - RNA, 20 nt, Human
cugagcgacagugagacucu

SEQ ID NO: 2002913 - RNA, 13 nt, Human
cugagccuucuga

SEQ ID NO: 2002914 - RNA, 14 nt, Human
cugagccuucugag

SEQ ID NO: 2002915 - RNA, 15 nt, Human
cugagccuucugagc

SEQ ID NO: 2002916 - RNA, 17 nt, Human
cugagccuucugagcug

SEQ ID NO: 2002917 - RNA, 15 nt, Human
cugacccaugcugcc

SEQ ID NO: 2002918 - RNA, 14 nt, Human
cugacccaugcugc

SEQ ID NO: 2002919 - RNA, 16 nt, Human
cugacccaugcugccc

SEQ ID NO: 2002920 - RNA, 13 nt, Human
cugacccaugcug

SEQ ID NO: 2002921 - RNA, 13 nt, Human
cugacccacugcu

SEQ ID NO: 2002922 - RNA, 14 nt, Human
cugacccacugcuu

SEQ ID NO: 2002923 - RNA, 12 nt, Human
cugacccacugc

SEQ ID NO: 2002924 - RNA, 22 nt, Human
cugacauuguuggccaaagcca

SEQ ID NO: 2002925 - RNA, 16 nt, Human
cugacagccagaacuc

SEQ ID NO: 2002926 - RNA, 14 nt, Human
cugacagccagaac

SEQ ID NO: 2002927 - RNA, 15 nt, Human
cugacagccagaacu

SEQ ID NO: 2002928 - RNA, 22 nt, Human
cugaagauuguuuaucuagaug

SEQ ID NO: 2002929 - RNA, 18 nt, Human
cugaagaguccucugaau

SEQ ID NO: 2002930 - RNA, 16 nt, Human
cugaagaguccucuga

SEQ ID NO: 2002931 - RNA, 15 nt, Human
cugaagaguccucug

SEQ ID NO: 2002932 - RNA, 14 nt, Human
cugaagaguccucu

SEQ ID NO: 2002933 - RNA, 19 nt, Human
cugaagacucauucuucug

SEQ ID NO: 2002934 - RNA, 14 nt, Human
cugaagauuguuua

SEQ ID NO: 2002935 - RNA, 15 nt, Human
cugaagauuguuuau

SEQ ID NO: 2002936 - RNA, 16 nt, Human
cugaagauuguuuauc

SEQ ID NO: 2002937 - RNA, 21 nt, Human
cugacauuguuggccaaagcc

SEQ ID NO: 2002938 - RNA, 21 nt, Human
cugacaggcaaugcuggcugu

SEQ ID NO: 2002939 - RNA, 18 nt, Human
cugacuguuuucucuuga

SEQ ID NO: 2002940 - RNA, 12 nt, Human
cugacuuagaau

SEQ ID NO: 2002941 - RNA, 22 nt, Human
cugacuuagaaucccuguguua

SEQ ID NO: 2002942 - RNA, 16 nt, Human
cugacuguuuucucuu

SEQ ID NO: 2002943 - RNA, 14 nt, Human
cugacucuucccca

SEQ ID NO: 2002944 - RNA, 17 nt, Human
cugagaaugaacaaaga

SEQ ID NO: 2002945 - RNA, 18 nt, Human
cugagaaugaacaaagac

SEQ ID NO: 2002946 - RNA, 15 nt, Human
cugagacagcccggg

SEQ ID NO: 2002947 - RNA, 14 nt, Human
cugagacagcccgg

SEQ ID NO: 2002948 - RNA, 14 nt, Human
cugagaaauuuaua

SEQ ID NO: 2002949 - RNA, 11 nt, Human
cugagaaauuu

SEQ ID NO: 2002950 - RNA, 13 nt, Human
cuccccugcuggg

SEQ ID NO: 2002951 - RNA, 17 nt, Human
cucccgaauagcuggga

SEQ ID NO: 2002952 - RNA, 16 nt, Human
cucccgaauagcuggg

SEQ ID NO: 2002953 - RNA, 15 nt, Human
cucccgaguagcugg

SEQ ID NO: 2002954 - RNA, 18 nt, Human
cucccgaauagcugggac

SEQ ID NO: 2002955 - RNA, 16 nt, Human
cucccgaguagcuggg

SEQ ID NO: 2002956 - RNA, 17 nt, Human
cucccgaguagcuggga

SEQ ID NO: 2002957 - RNA, 19 nt, Human
cucccgaauagcugggacu

SEQ ID NO: 2002958 - RNA, 18 nt, Human
cucccgaguagcugggac

SEQ ID NO: 2002959 - RNA, 15 nt, Human
cucccgcuccgggcu

SEQ ID NO: 2002960 - RNA, 17 nt, Human
cucccgcuccgggcucc

SEQ ID NO: 2002961 - RNA, 15 nt, Human
cucccggcccugccu

SEQ ID NO: 2002962 - RNA, 16 nt, Human
cucccggcccugccug

SEQ ID NO: 2002963 - RNA, 17 nt, Human
cucccggcccugccugc

SEQ ID NO: 2002964 - RNA, 18 nt, Human
cucccggcccugccugcu

SEQ ID NO: 2002965 - RNA, 20 nt, Human
cucccggcuaugggggcacu

SEQ ID NO: 2002966 - RNA, 15 nt, Human
cucccgggacucugc

SEQ ID NO: 2002967 - RNA, 16 nt, Human
cucccuacuuucuuag

SEQ ID NO: 2002968 - RNA, 20 nt, Human
cuccccagcaagugagagcu

SEQ ID NO: 2002969 - RNA, 12 nt, Human
cuccccugcugg

SEQ ID NO: 2002970 - RNA, 12 nt, Human
cuccccagcaag

SEQ ID NO: 2002971 - RNA, 23 nt, Human
cuccccaaggcccccugccugcc

SEQ ID NO: 2002972 - RNA, 17 nt, Human
cuccccaaggcccccug

SEQ ID NO: 2002973 - RNA, 21 nt, Human
cuccccaaggcccccugccug

SEQ ID NO: 2002974 - RNA, 22 nt, Human
cuccccaaggcccccugccugc

SEQ ID NO: 2002975 - RNA, 20 nt, Human
cucccaucuuuuguuacucu

SEQ ID NO: 2002976 - RNA, 17 nt, Human
cucccaaagugcuggga

SEQ ID NO: 2002977 - RNA, 13 nt, Human
cuccaugugggcu

SEQ ID NO: 2002978 - RNA, 13 nt, Human
cuccaugucucug

SEQ ID NO: 2002979 - RNA, 22 nt, Human
cuccaugucucugagcauuaga

SEQ ID NO: 2002980 - RNA, 16 nt, Human
cuccaucuccacucca

SEQ ID NO: 2002981 - RNA, 17 nt, Human
cuccauccuccuccuuc

SEQ ID NO: 2002982 - RNA, 19 nt, Human
cuccauccuccuccuuccu

SEQ ID NO: 2002983 - RNA, 11 nt, Human
cuccauccuga

SEQ ID NO: 2002984 - RNA, 16 nt, Human
cuccauccugaggcuc

SEQ ID NO: 2002985 - RNA, 18 nt, Human
cuccauccugaggcucca

SEQ ID NO: 2002986 - RNA, 14 nt, Human
cuccaucuccacuc

SEQ ID NO: 2002987 - RNA, 18 nt, Human
cucacuauguugcccagg

SEQ ID NO: 2002988 - RNA, 16 nt, Human
cuccauccuccuccuu

SEQ ID NO: 2002989 - RNA, 22 nt, Human
cucccaacucaccccagcccca

SEQ ID NO: 2002990 - RNA, 16 nt, Human
cucccaacucacccca

SEQ ID NO: 2002991 - RNA, 17 nt, Human
cucccaacucaccccag

SEQ ID NO: 2002992 - RNA, 22 nt, Human
cucccaaagugcugggauuaca

SEQ ID NO: 2002993 - RNA, 18 nt, Human
cucccaaagugcugggau

SEQ ID NO: 2002994 - RNA, 23 nt, Human
cucccaucugugaaaggaaagag

SEQ ID NO: 2002995 - RNA, 18 nt, Human
cucccaucugugaaagga

SEQ ID NO: 2002996 - RNA, 15 nt, Human
cucccaucugugaaa

SEQ ID NO: 2002997 - RNA, 14 nt, Human
cucccaucugugaa

SEQ ID NO: 2002998 - RNA, 11 nt, Human
cucccaucugu

SEQ ID NO: 2002999 - RNA, 21 nt, Human
cucccaucucacacaugagca

SEQ ID NO: 2003000 - RNA, 15 nt, Human
cuccugccucagccu

SEQ ID NO: 2003001 - RNA, 19 nt, Human
cuccugcguguucucagag

SEQ ID NO: 2003002 - RNA, 16 nt, Human
cuccugugugugcgcc

SEQ ID NO: 2003003 - RNA, 19 nt, Human
cuccugugugugcgccuac

SEQ ID NO: 2003004 - RNA, 15 nt, Human
cuccuguggccugcc

SEQ ID NO: 2003005 - RNA, 17 nt, Human
cuccuguggccugccag

SEQ ID NO: 2003006 - RNA, 18 nt, Human
cuccuguggccugccagu

SEQ ID NO: 2003007 - RNA, 20 nt, Human
cuccuguggccugccaguca

SEQ ID NO: 2003008 - RNA, 18 nt, Human
cuccugucuucugcuuug

SEQ ID NO: 2003009 - RNA, 13 nt, Human
cuccugucuucug

SEQ ID NO: 2003010 - RNA, 14 nt, Human
cuccugucuucugc

SEQ ID NO: 2003011 - RNA, 16 nt, Human
cuccugucuucugcuu

SEQ ID NO: 2003012 - RNA, 17 nt, Human
cuccugucuucugcuuu

SEQ ID NO: 2003013 - RNA, 22 nt, Human
cuccugaguugaagucaugcuc

SEQ ID NO: 2003014 - RNA, 14 nt, Human
cuccugauuuuucu

SEQ ID NO: 2003015 - RNA, 17 nt, Human
cuccugcaggcagccag

SEQ ID NO: 2003016 - RNA, 16 nt, Human
cuccugcaggcagcca

SEQ ID NO: 2003017 - RNA, 11 nt, Human
cuccugcaggc

SEQ ID NO: 2003018 - RNA, 20 nt, Human
cuccugcaggcagccaggcc

SEQ ID NO: 2003019 - RNA, 18 nt, Human
cuccugcaggcagccagg

SEQ ID NO: 2003020 - RNA, 11 nt, Human
cuccugcccuu

SEQ ID NO: 2003021 - RNA, 13 nt, Human
cuccugccucagc

SEQ ID NO: 2003022 - RNA, 14 nt, Human
cuccugccucagcc

SEQ ID NO: 2003023 - RNA, 15 nt, Human
cuccgaccagacacc

SEQ ID NO: 2003024 - RNA, 15 nt, Human
cuccgaaaugcuguc

SEQ ID NO: 2003025 - RNA, 16 nt, Human
cuccgaaaugcugucu

SEQ ID NO: 2003026 - RNA, 17 nt, Human
cuccgaaaugcugucuu

SEQ ID NO: 2003027 - RNA, 18 nt, Human
cuccgaaaugcugucuuu

SEQ ID NO: 2003028 - RNA, 13 nt, Human
cucccucauucca

SEQ ID NO: 2003029 - RNA, 17 nt, Human
cuccgccccugagccca

SEQ ID NO: 2003030 - RNA, 18 nt, Human
cuccgccccugagcccac

SEQ ID NO: 2003031 - RNA, 19 nt, Human
cuccgccccugagcccacu

SEQ ID NO: 2003032 - RNA, 20 nt, Human
cuccgccccugagcccacug

SEQ ID NO: 2003033 - RNA, 14 nt, Human
cuccgccccugagc

SEQ ID NO: 2003034 - RNA, 15 nt, Human
cuccgccccugagcc

SEQ ID NO: 2003035 - RNA, 16 nt, Human
cuccgccccugagccc

SEQ ID NO: 2003036 - RNA, 22 nt, Human
cuccuccagccgccaugcuccu

SEQ ID NO: 2003037 - RNA, 22 nt, Human
cuccucuccccagcaagugaga

SEQ ID NO: 2003038 - RNA, 14 nt, Human
cuccucccggugcc

SEQ ID NO: 2003039 - RNA, 15 nt, Human
cuccucccggugccc

SEQ ID NO: 2003040 - RNA, 17 nt, Human
cuccucccggugcccaa

SEQ ID NO: 2003041 - RNA, 14 nt, Human
cuccucccucccag

SEQ ID NO: 2003042 - RNA, 13 nt, Human
cuccuccuuccua

SEQ ID NO: 2003043 - RNA, 14 nt, Human
cuccuccuuccuag

SEQ ID NO: 2003044 - RNA, 15 nt, Human
cuccuccuuccuagu

SEQ ID NO: 2003045 - RNA, 13 nt, Human
cucuacaaaaagc

SEQ ID NO: 2003046 - RNA, 18 nt, Human
cucuaagauguuauauuu

SEQ ID NO: 2003047 - RNA, 19 nt, Human
cucuaagauguuauauuuu

SEQ ID NO: 2003048 - RNA, 23 nt, Human
cucuaagauguuauauuuuucuu

SEQ ID NO: 2003049 - RNA, 12 nt, Human
cucuaagauguu

SEQ ID NO: 2003050 - RNA, 15 nt, Human
cucuaagauguuaua

SEQ ID NO: 2003051 - RNA, 17 nt, Human
cucuaagauguuauauu

SEQ ID NO: 2003052 - RNA, 14 nt, Human
cucggaucagcuga

SEQ ID NO: 2003053 - RNA, 13 nt, Human
cucuacagaggcc

SEQ ID NO: 2003054 - RNA, 11 nt, Human
cucuaauuucc

SEQ ID NO: 2003055 - RNA, 19 nt, Human
cucuacagaggccaugggc

SEQ ID NO: 2003056 - RNA, 21 nt, Human
cucuacagcuaaucagcauuc

SEQ ID NO: 2003057 - RNA, 14 nt, Human
cucuacagaggcca

SEQ ID NO: 2003058 - RNA, 16 nt, Human
cucuacagaggccaug

SEQ ID NO: 2003059 - RNA, 11 nt, Human
cucgcuucuuu

SEQ ID NO: 2003060 - RNA, 14 nt, Human
cucggcucacugca

SEQ ID NO: 2003061 - RNA, 15 nt, Human
cucggaguucuucuu

SEQ ID NO: 2003062 - RNA, 17 nt, Human
cucggcucacugcaucc

SEQ ID NO: 2003063 - RNA, 18 nt, Human
cucggcucacugcauccu

SEQ ID NO: 2003064 - RNA, 16 nt, Human
cucggaguucuucuug

SEQ ID NO: 2003065 - RNA, 19 nt, Human
cuccuucacagaugggugc

SEQ ID NO: 2003066 - RNA, 13 nt, Human
cuccuucaccuuu

SEQ ID NO: 2003067 - RNA, 17 nt, Human
cuccuucacagaugggu

SEQ ID NO: 2003068 - RNA, 16 nt, Human
cuccuucacagauggg

SEQ ID NO: 2003069 - RNA, 20 nt, Human
cuccugugugugcgccuaca

SEQ ID NO: 2003070 - RNA, 23 nt, Human
cuccuucaacaaggcuugcugca

SEQ ID NO: 2003071 - RNA, 14 nt, Human
cucuagcccugccc

SEQ ID NO: 2003072 - RNA, 16 nt, Human
cucuagcccugcccgg

SEQ ID NO: 2003073 - RNA, 13 nt, Human
cucuagcugaauu

SEQ ID NO: 2003074 - RNA, 15 nt, Human
cucuagcugaauuga

SEQ ID NO: 2003075 - RNA, 11 nt, Human
cucuagcugaa

SEQ ID NO: 2003076 - RNA, 12 nt, Human
cucuagcugaau

SEQ ID NO: 2003077 - RNA, 21 nt, Human
cucuagaguagagguauaauu

SEQ ID NO: 2003078 - RNA, 23 nt, Human
cucuagaguagagguauaauugu

SEQ ID NO: 2003079 - RNA, 18 nt, Human
cucuagagaaguggacug

SEQ ID NO: 2003080 - RNA, 23 nt, Human
cucuagagaaguggacuggagga

SEQ ID NO: 2003081 - RNA, 22 nt, Human
cucuagaaaggggauuacaguu

SEQ ID NO: 2003082 - RNA, 15 nt, Human
cucuagaauuuuaag

SEQ ID NO: 2003083 - RNA, 20 nt, Human
cucuagaauuuuaagccuuu

SEQ ID NO: 2003084 - RNA, 23 nt, Human
cucuagggaaaaaccagcgugug

SEQ ID NO: 2003085 - RNA, 18 nt, Human
cucuagggaccagaacca

SEQ ID NO: 2003086 - RNA, 14 nt, Human
cucuaguacuguga

SEQ ID NO: 2003087 - RNA, 16 nt, Human
cucuaguacugugaau

SEQ ID NO: 2003088 - RNA, 12 nt, Human
cucuagggucca

SEQ ID NO: 2003089 - RNA, 18 nt, Human
cucuacugggagccuacc

SEQ ID NO: 2003090 - RNA, 21 nt, Human
cucuacugggagccuacccac

SEQ ID NO: 2003091 - RNA, 16 nt, Human
cucuacuuagcauguc

SEQ ID NO: 2003092 - RNA, 17 nt, Human
cucuacuuagcaugucc

SEQ ID NO: 2003093 - RNA, 19 nt, Human
cucuacuuagcaugucccu

SEQ ID NO: 2003094 - RNA, 20 nt, Human
cucuacuuagcaugucccua

SEQ ID NO: 2003095 - RNA, 20 nt, Human
cucuaccauccccuguagag

SEQ ID NO: 2003096 - RNA, 13 nt, Human
cucuacccuggca

SEQ ID NO: 2003097 - RNA, 18 nt, Human
cucuccagccccuggaug

SEQ ID NO: 2003098 - RNA, 17 nt, Human
cucuccagccccuggau

SEQ ID NO: 2003099 - RNA, 16 nt, Human
cucuccagccccugga

SEQ ID NO: 2003100 - RNA, 15 nt, Human
cucuccagccccugg

SEQ ID NO: 2003101 - RNA, 14 nt, Human
cucuccagccccug

SEQ ID NO: 2003102 - RNA, 12 nt, Human
cucuccacugcc

SEQ ID NO: 2003103 - RNA, 14 nt, Human
cucuccacugccuu

SEQ ID NO: 2003104 - RNA, 11 nt, Human
cucuccacugc

SEQ ID NO: 2003105 - RNA, 14 nt, Human
cucucauuugugug

SEQ ID NO: 2003106 - RNA, 16 nt, Human
cucucaugcugccccu

SEQ ID NO: 2003107 - RNA, 19 nt, Human
cucucaugcugccccugcc

SEQ ID NO: 2003108 - RNA, 21 nt, Human
cucucaugcugccccugccuu

SEQ ID NO: 2003109 - RNA, 22 nt, Human
cucucaugcugccccugccuug

SEQ ID NO: 2003110 - RNA, 21 nt, Human
cucucaggccagcugcuuggg

SEQ ID NO: 2003111 - RNA, 19 nt, Human
cucucaggccagcugcuug

SEQ ID NO: 2003112 - RNA, 18 nt, Human
cucucaggccagcugcuu

SEQ ID NO: 2003113 - RNA, 17 nt, Human
cucucaggccagcugcu

SEQ ID NO: 2003114 - RNA, 15 nt, Human
cucucaggccagcug

SEQ ID NO: 2003115 - RNA, 13 nt, Human
cucucaggccagc

SEQ ID NO: 2003116 - RNA, 23 nt, Human
cucucaggccaaacucaccugcc

SEQ ID NO: 2003117 - RNA, 22 nt, Human
cucucaggccaaacucaccugc

SEQ ID NO: 2003118 - RNA, 21 nt, Human
cucucaggccaaacucaccug

SEQ ID NO: 2003119 - RNA, 20 nt, Human
cucucaggccaaacucaccu

SEQ ID NO: 2003120 - RNA, 12 nt, Human
cucucaggccaa

SEQ ID NO: 2003121 - RNA, 12 nt, Human
cucuagugcugu

SEQ ID NO: 2003122 - RNA, 13 nt, Human
cucuagugcugug

SEQ ID NO: 2003123 - RNA, 14 nt, Human
cucuagugcuguga

SEQ ID NO: 2003124 - RNA, 15 nt, Human
cucuagugcugugaa

SEQ ID NO: 2003125 - RNA, 16 nt, Human
cucuagugcugugaaa

SEQ ID NO: 2003126 - RNA, 17 nt, Human
cucuagugcugugaaaa

SEQ ID NO: 2003127 - RNA, 15 nt, Human
cucuaguuugauuaa

SEQ ID NO: 2003128 - RNA, 18 nt, Human
cucuagugcugugaaaaa

SEQ ID NO: 2003129 - RNA, 19 nt, Human
cucuagugcugugaaaaaa

SEQ ID NO: 2003130 - RNA, 20 nt, Human
cucuagugcugugaaaaaaa

SEQ ID NO: 2003131 - RNA, 19 nt, Human
cucuaguuugauuaaauuc

SEQ ID NO: 2003132 - RNA, 20 nt, Human
cucuaguuugauuaaauucu

SEQ ID NO: 2003133 - RNA, 21 nt, Human
cucuaguuugauuaaauucuu

SEQ ID NO: 2003134 - RNA, 14 nt, Human
cucuccuuccugug

SEQ ID NO: 2003135 - RNA, 14 nt, Human
cucucuacuggucc

SEQ ID NO: 2003136 - RNA, 12 nt, Human
cucucucacucc

SEQ ID NO: 2003137 - RNA, 21 nt, Human
cucucuauuucccccuuucuu

SEQ ID NO: 2003138 - RNA, 22 nt, Human
cucucuauuucccccuuucuuc

SEQ ID NO: 2003139 - RNA, 21 nt, Human
cucucucaauuuuugguugaa

SEQ ID NO: 2003140 - RNA, 13 nt, Human
cucucucaggcca

SEQ ID NO: 2003141 - RNA, 18 nt, Human
cucuccucugcugcuggc

SEQ ID NO: 2003142 - RNA, 15 nt, Human
cucuccucugcugcu

SEQ ID NO: 2003143 - RNA, 14 nt, Human
cucuccucugcugc

SEQ ID NO: 2003144 - RNA, 13 nt, Human
cucuccucugcug

SEQ ID NO: 2003145 - RNA, 14 nt, Human
cucuccucuugcca

SEQ ID NO: 2003146 - RNA, 15 nt, Human
cucuccucuugccac

SEQ ID NO: 2003147 - RNA, 16 nt, Human
cucuccucuugccacu

SEQ ID NO: 2003148 - RNA, 17 nt, Human
cucuccucuugccacug

SEQ ID NO: 2003149 - RNA, 19 nt, Human
cucuccucuugccacugcc

SEQ ID NO: 2003150 - RNA, 22 nt, Human
cucuccucuugccacugccucu

SEQ ID NO: 2003151 - RNA, 14 nt, Human
cucuccccagcaag

SEQ ID NO: 2003152 - RNA, 22 nt, Human
cucuccccagcaagugagagcu

SEQ ID NO: 2003153 - RNA, 12 nt, Human
cucuccucugcu

SEQ ID NO: 2003154 - RNA, 24 nt, Human
cucuccccagcaagugagagcugg

SEQ ID NO: 2003155 - RNA, 19 nt, Human
cucuccagccccuggaugc

SEQ ID NO: 2003156 - RNA, 15 nt, Human
cucuccacugccuuc

SEQ ID NO: 2003157 - RNA, 13 nt, Human
cggaagagccuug

SEQ ID NO: 2003158 - RNA, 14 nt, Human
cggaauaguuggcu

SEQ ID NO: 2003159 - RNA, 17 nt, Human
cggccaccugcggugcu

SEQ ID NO: 2003160 - RNA, 16 nt, Human
cggccaccugcggugc

SEQ ID NO: 2003161 - RNA, 15 nt, Human
cggccaccugcggug

SEQ ID NO: 2003162 - RNA, 11 nt, Human
cggccaccugc

SEQ ID NO: 2003163 - RNA, 13 nt, Human
cggcauuuguuuc

SEQ ID NO: 2003164 - RNA, 13 nt, Human
cggccccugcugg

SEQ ID NO: 2003165 - RNA, 18 nt, Human
cggccccugcugguucag

SEQ ID NO: 2003166 - RNA, 19 nt, Human
cggccccugcugguucagg

SEQ ID NO: 2003167 - RNA, 24 nt, Human
cggccaggccagagggagugacag

SEQ ID NO: 2003168 - RNA, 15 nt, Human
cggcuggacuuggag

SEQ ID NO: 2003169 - RNA, 11 nt, Human
cggcugcccuu

SEQ ID NO: 2003170 - RNA, 12 nt, Human
cggcugcccuuu

SEQ ID NO: 2003171 - RNA, 12 nt, Human
cggccucagagu

SEQ ID NO: 2003172 - RNA, 12 nt, Human
cggccuccaucc

SEQ ID NO: 2003173 - RNA, 14 nt, Human
cggccuccauccug

SEQ ID NO: 2003174 - RNA, 23 nt, Human
cggggacagcuccuucuguccua

SEQ ID NO: 2003175 - RNA, 15 nt, Human
cgggggcagagaggg

SEQ ID NO: 2003176 - RNA, 23 nt, Human
cgggggcaggggaggccaucugg

SEQ ID NO: 2003177 - RNA, 11 nt, Human
cgggacucugc

SEQ ID NO: 2003178 - RNA, 19 nt, Human
cgggacguggcaccuccuc

SEQ ID NO: 2003179 - RNA, 19 nt, Human
cggcuggccuggccccuca

SEQ ID NO: 2003180 - RNA, 22 nt, Human
cggcuggccuggccccucaggg

SEQ ID NO: 2003181 - RNA, 23 nt, Human
cggcuggccuggccccucagggu

SEQ ID NO: 2003182 - RNA, 20 nt, Human
cgggaggucgaggcaggagg

SEQ ID NO: 2003183 - RNA, 18 nt, Human
cgggaggucgaggcagga

SEQ ID NO: 2003184 - RNA, 17 nt, Human
cgggauuaguacacacu

SEQ ID NO: 2003185 - RNA, 22 nt, Human
cgggaugggagccgggcaaacu

SEQ ID NO: 2003186 - RNA, 15 nt, Human
cgggcacaccuccuc

SEQ ID NO: 2003187 - RNA, 22 nt, Human
cggggacagcuccuucuguccu

SEQ ID NO: 2003188 - RNA, 12 nt, Human
cgggcagagcac

SEQ ID NO: 2003189 - RNA, 14 nt, Human
cgggcacucagaag

SEQ ID NO: 2003190 - RNA, 22 nt, Human
cgggcacucagaagacacugau

SEQ ID NO: 2003191 - RNA, 20 nt, Human
cggugagaggggaacagacu

SEQ ID NO: 2003192 - RNA, 21 nt, Human
cggugagaggggaacagacug

SEQ ID NO: 2003193 - RNA, 17 nt, Human
cggugagcuacaaaugc

SEQ ID NO: 2003194 - RNA, 19 nt, Human
cggugaccucuagcccugc

SEQ ID NO: 2003195 - RNA, 20 nt, Human
cgguccccacuuuauugcca

SEQ ID NO: 2003196 - RNA, 23 nt, Human
cggucgggggggacccuccaagg

SEQ ID NO: 2003197 - RNA, 22 nt, Human
cggucucggaucaggcucccag

SEQ ID NO: 2003198 - RNA, 23 nt, Human
cggucucggaucaggcucccagg

SEQ ID NO: 2003199 - RNA, 22 nt, Human
cgggugcagacaaucuucuguu

SEQ ID NO: 2003200 - RNA, 14 nt, Human
cgggugcagcaucu

SEQ ID NO: 2003201 - RNA, 17 nt, Human
cggguuauaaugaauga

SEQ ID NO: 2003202 - RNA, 22 nt, Human
cgggucaucuguaccucugccu

SEQ ID NO: 2003203 - RNA, 16 nt, Human
cgggucuuccuacucu

SEQ ID NO: 2003204 - RNA, 12 nt, Human
cgggucuuccua

SEQ ID NO: 2003205 - RNA, 15 nt, Human
cgggucaucuguacc

SEQ ID NO: 2003206 - RNA, 19 nt, Human
cgggucacaggagggaggg

SEQ ID NO: 2003207 - RNA, 11 nt, Human
cgggucacagg

SEQ ID NO: 2003208 - RNA, 14 nt, Human
cgguccacccagga

SEQ ID NO: 2003209 - RNA, 15 nt, Human
cgguccacccaggag

SEQ ID NO: 2003210 - RNA, 16 nt, Human
cgguccacccaggagc

SEQ ID NO: 2003211 - RNA, 20 nt, Human
cgguccacccaggagccccg

SEQ ID NO: 2003212 - RNA, 14 nt, Human
cgguaccaaugcag

SEQ ID NO: 2003213 - RNA, 19 nt, Human
cgguaccaaugcagaacuc

SEQ ID NO: 2003214 - RNA, 13 nt, Human
cgguacccaccac

SEQ ID NO: 2003215 - RNA, 18 nt, Human
cgcucucuggccuucggc

SEQ ID NO: 2003216 - RNA, 22 nt, Human
cgcugucagccauuccuguucc

SEQ ID NO: 2003217 - RNA, 17 nt, Human
cgcugugcugcccugcc

SEQ ID NO: 2003218 - RNA, 16 nt, Human
cgcugugcugcccugc

SEQ ID NO: 2003219 - RNA, 15 nt, Human
cgcugugcugcccug

SEQ ID NO: 2003220 - RNA, 18 nt, Human
cgcugugcugcccugccc

SEQ ID NO: 2003221 - RNA, 15 nt, Human
cggaaaacaugcuac

SEQ ID NO: 2003222 - RNA, 20 nt, Human
cggaaaacaugcuacacacu

SEQ ID NO: 2003223 - RNA, 14 nt, Human
cgcucucuggccuu

SEQ ID NO: 2003224 - RNA, 15 nt, Human
cgcucucuggccuuc

SEQ ID NO: 2003225 - RNA, 16 nt, Human
cgcucauucagcaucu

SEQ ID NO: 2003226 - RNA, 18 nt, Human
cgcucauucagcaucuga

SEQ ID NO: 2003227 - RNA, 14 nt, Human
cgcuccaacuccaa

SEQ ID NO: 2003228 - RNA, 15 nt, Human
cgcuccaacuccaac

SEQ ID NO: 2003229 - RNA, 16 nt, Human
cgcuacccgggaaggg

SEQ ID NO: 2003230 - RNA, 22 nt, Human
cgcuacauuuccgccacauccc

SEQ ID NO: 2003231 - RNA, 16 nt, Human
cgcucagcccucccug

SEQ ID NO: 2003232 - RNA, 21 nt, Human
cgcucagcccucccugccccu

SEQ ID NO: 2003233 - RNA, 12 nt, Human
cgcucagcccuc

SEQ ID NO: 2003234 - RNA, 22 nt, Human
cgcuaagagggagggagggcuc

SEQ ID NO: 2003235 - RNA, 20 nt, Human
cgcgccccgaaaggucaccu

SEQ ID NO: 2003236 - RNA, 17 nt, Human
cgcggacauccccugcu

SEQ ID NO: 2003237 - RNA, 20 nt, Human
ccucugcccacucccugcaa

SEQ ID NO: 2003238 - RNA, 19 nt, Human
ccucugcccacucccugca

SEQ ID NO: 2003239 - RNA, 17 nt, Human
ccucugcccacucccug

SEQ ID NO: 2003240 - RNA, 22 nt, Human
cgccagauucuuuccugaggcu

SEQ ID NO: 2003241 - RNA, 16 nt, Human
cgccaucccagcccca

SEQ ID NO: 2003242 - RNA, 14 nt, Human
cgccaucccagccc

SEQ ID NO: 2003243 - RNA, 16 nt, Human
cgccaggacuuggccu

SEQ ID NO: 2003244 - RNA, 23 nt, Human
cgccaggggaaaaucagccugcu

SEQ ID NO: 2003245 - RNA, 16 nt, Human
cgcccuggacugugug

SEQ ID NO: 2003246 - RNA, 14 nt, Human
cgcccuggcaggca

SEQ ID NO: 2003247 - RNA, 16 nt, Human
cgcccuggcaggcagg

SEQ ID NO: 2003248 - RNA, 14 nt, Human
cgcccuggccccca

SEQ ID NO: 2003249 - RNA, 15 nt, Human
cgcccuggcccccac

SEQ ID NO: 2003250 - RNA, 17 nt, Human
cgcccuggcccccacau

SEQ ID NO: 2003251 - RNA, 14 nt, Human
cgccccugagccca

SEQ ID NO: 2003252 - RNA, 15 nt, Human
cgccccugagcccac

SEQ ID NO: 2003253 - RNA, 18 nt, Human
cgccccugagcccacugu

SEQ ID NO: 2003254 - RNA, 13 nt, Human
cgcccacuucccu

SEQ ID NO: 2003255 - RNA, 12 nt, Human
cgcccacuuccc

SEQ ID NO: 2003256 - RNA, 22 nt, Human
cgcccagagacccaagcugccu

SEQ ID NO: 2003257 - RNA, 14 nt, Human
cgcccagucccagc

SEQ ID NO: 2003258 - RNA, 15 nt, Human
cgcccagucccagca

SEQ ID NO: 2003259 - RNA, 17 nt, Human
cgcccagucccagcagc

SEQ ID NO: 2003260 - RNA, 18 nt, Human
cgcccagucccagcagcc

SEQ ID NO: 2003261 - RNA, 22 nt, Human
cgcccaggcuuagucacugaga

SEQ ID NO: 2003262 - RNA, 12 nt, Human
cgccccugagcc

SEQ ID NO: 2003263 - RNA, 13 nt, Human
cgccccugagccc

SEQ ID NO: 2003264 - RNA, 12 nt, Human
cgcccagucugg

SEQ ID NO: 2003265 - RNA, 18 nt, Human
cgccccgaaaggucaccu

SEQ ID NO: 2003266 - RNA, 21 nt, Human
cgcccagucccagcagccagc

SEQ ID NO: 2003267 - RNA, 14 nt, Human
cuaaaaauuggugu

SEQ ID NO: 2003268 - RNA, 11 nt, Human
cuaaaaauaua

SEQ ID NO: 2003269 - RNA, 21 nt, Human
cuaaaaauauacauguuuaug

SEQ ID NO: 2003270 - RNA, 23 nt, Human
cuaaaaauauacauguuuaugua

SEQ ID NO: 2003271 - RNA, 22 nt, Human
cuaaaacuguacuuugauucac

SEQ ID NO: 2003272 - RNA, 18 nt, Human
cuaaaacuguacuuugau

SEQ ID NO: 2003273 - RNA, 20 nt, Human
cuaaaacuguacuuugauuc

SEQ ID NO: 2003274 - RNA, 13 nt, Human
cuaaaacuguacu

SEQ ID NO: 2003275 - RNA, 16 nt, Human
cuaaaacuguacuuug

SEQ ID NO: 2003276 - RNA, 17 nt, Human
cuaaaacuguacuuuga

SEQ ID NO: 2003277 - RNA, 13 nt, Human
cuaaaauguuuuc

SEQ ID NO: 2003278 - RNA, 14 nt, Human
cuaaaauguuuuca

SEQ ID NO: 2003279 - RNA, 15 nt, Human
cuaaaauguuuucag

SEQ ID NO: 2003280 - RNA, 17 nt, Human
cuaaaauguuuucagcu

SEQ ID NO: 2003281 - RNA, 15 nt, Human
cuaaaauuuuuuccu

SEQ ID NO: 2003282 - RNA, 16 nt, Human
cuaaauguugaaagau

SEQ ID NO: 2003283 - RNA, 13 nt, Human
cuaaauguuaaag

SEQ ID NO: 2003284 - RNA, 23 nt, Human
cuaaauugacacuuaaaaauggu

SEQ ID NO: 2003285 - RNA, 14 nt, Human
cuaaauguuaaaga

SEQ ID NO: 2003286 - RNA, 15 nt, Human
cuaaauguuaaagau

SEQ ID NO: 2003287 - RNA, 16 nt, Human
cuaaauguuaaagaug

SEQ ID NO: 2003288 - RNA, 17 nt, Human
cuaaauguuaaagaugu

SEQ ID NO: 2003289 - RNA, 19 nt, Human
cuaaauguuaaagauguag

SEQ ID NO: 2003290 - RNA, 23 nt, Human
cuaaauguuaaagauguagcaaa

SEQ ID NO: 2003291 - RNA, 18 nt, Human
cuaaauuuauuauuuaaa

SEQ ID NO: 2003292 - RNA, 17 nt, Human
cuaaauugauguugaug

SEQ ID NO: 2003293 - RNA, 14 nt, Human
cuaaauugauguug

SEQ ID NO: 2003294 - RNA, 15 nt, Human
cuaaauugauguuga

SEQ ID NO: 2003295 - RNA, 16 nt, Human
cuaaauugauguugau

SEQ ID NO: 2003296 - RNA, 15 nt, Human
cuaacaccagacaga

SEQ ID NO: 2003297 - RNA, 15 nt, Human
cuaacaugauuuggg

SEQ ID NO: 2003298 - RNA, 17 nt, Human
cuaacauggaaguacua

SEQ ID NO: 2003299 - RNA, 15 nt, Human
cuaacauggaaguac

SEQ ID NO: 2003300 - RNA, 18 nt, Human
cuaaauggaaccacucua

SEQ ID NO: 2003301 - RNA, 16 nt, Human
cuaaauggaaccacuc

SEQ ID NO: 2003302 - RNA, 17 nt, Human
cuaaauggaaccacucu

SEQ ID NO: 2003303 - RNA, 20 nt, Human
cuaaaucuccaaaauaaaac

SEQ ID NO: 2003304 - RNA, 15 nt, Human
cuaaauggaaccacu

SEQ ID NO: 2003305 - RNA, 14 nt, Human
cuaaacguguaugu

SEQ ID NO: 2003306 - RNA, 17 nt, Human
cuaaacguguauguuuu

SEQ ID NO: 2003307 - RNA, 18 nt, Human
cuaaacguguauguuuuu

SEQ ID NO: 2003308 - RNA, 19 nt, Human
cuaaacguguauguuuuuc

SEQ ID NO: 2003309 - RNA, 20 nt, Human
cuaaacguguauguuuuuca

SEQ ID NO: 2003310 - RNA, 21 nt, Human
cuaaacguguauguuuuucag

SEQ ID NO: 2003311 - RNA, 20 nt, Human
cuaaauauauuuuaagacga

SEQ ID NO: 2003312 - RNA, 18 nt, Human
cuaaauauauuuuaagac

SEQ ID NO: 2003313 - RNA, 22 nt, Human
cuaaacguguauguuuuucagu

SEQ ID NO: 2003314 - RNA, 22 nt, Human
cggugcuaucucccccagcccc

SEQ ID NO: 2003315 - RNA, 21 nt, Human
cggugcuaucucccccagccc

SEQ ID NO: 2003316 - RNA, 20 nt, Human
cggugcuaucucccccagcc

SEQ ID NO: 2003317 - RNA, 18 nt, Human
cggugcuaucucccccag

SEQ ID NO: 2003318 - RNA, 16 nt, Human
cgucuaccugaggggc

SEQ ID NO: 2003319 - RNA, 16 nt, Human
cgucucauacucaccu

SEQ ID NO: 2003320 - RNA, 16 nt, Human
cgugcacacaccagag

SEQ ID NO: 2003321 - RNA, 11 nt, Human
cgucuuuccca

SEQ ID NO: 2003322 - RNA, 18 nt, Human
cgucuuucccaaaggcau

SEQ ID NO: 2003323 - RNA, 20 nt, Human
cgucugacaggcaaugcugg

SEQ ID NO: 2003324 - RNA, 21 nt, Human
cgucugacaggcaaugcuggc

SEQ ID NO: 2003325 - RNA, 22 nt, Human
cgucugacaggcaaugcuggcu

SEQ ID NO: 2003326 - RNA, 23 nt, Human
cgugcauaccacuuuuguucuug

SEQ ID NO: 2003327 - RNA, 21 nt, Human
cgugcaguggugcgaucuggg

SEQ ID NO: 2003328 - RNA, 22 nt, Human
cgugcaguggugcgaucugggu

SEQ ID NO: 2003329 - RNA, 18 nt, Human
cgugcacacaccagagcc

SEQ ID NO: 2003330 - RNA, 19 nt, Human
cgugcacacaccagagccc

SEQ ID NO: 2003331 - RNA, 18 nt, Human
cguugcugacuuagaauc

SEQ ID NO: 2003332 - RNA, 19 nt, Human
cguugaaguugacucugcu

SEQ ID NO: 2003333 - RNA, 20 nt, Human
cguggcuucccgcucagccc

SEQ ID NO: 2003334 - RNA, 21 nt, Human
cguggcuucccgcucagcccu

SEQ ID NO: 2003335 - RNA, 15 nt, Human
cgugggcuccccucu

SEQ ID NO: 2003336 - RNA, 16 nt, Human
cgugggcuccccucuu

SEQ ID NO: 2003337 - RNA, 19 nt, Human
cgugggcuccccucuuccu

SEQ ID NO: 2003338 - RNA, 20 nt, Human
cgugggcuccccucuuccuc

SEQ ID NO: 2003339 - RNA, 18 nt, Human
cguggcuucccgcucagc

SEQ ID NO: 2003340 - RNA, 19 nt, Human
cguggcuucccgcucagcc

SEQ ID NO: 2003341 - RNA, 14 nt, Human
cguggcaccuccuc

SEQ ID NO: 2003342 - RNA, 15 nt, Human
cguggcaccuccucg

SEQ ID NO: 2003343 - RNA, 19 nt, Human
cgugcguguuuucugacug

SEQ ID NO: 2003344 - RNA, 17 nt, Human
cguggagaaucacaggc

SEQ ID NO: 2003345 - RNA, 18 nt, Human
cguggagaaucacaggcu

SEQ ID NO: 2003346 - RNA, 20 nt, Human
cguggagaaucacaggcugg

SEQ ID NO: 2003347 - RNA, 23 nt, Human
cguggagaaucacaggcugggcu

SEQ ID NO: 2003348 - RNA, 11 nt, Human
cuaugcauuug

SEQ ID NO: 2003349 - RNA, 12 nt, Human
cuaugcauuuga

SEQ ID NO: 2003350 - RNA, 16 nt, Human
cuaugacuuaacauag

SEQ ID NO: 2003351 - RNA, 21 nt, Human
cuaugcauuugaaaauuuuga

SEQ ID NO: 2003352 - RNA, 13 nt, Human
cucaccccagccc

SEQ ID NO: 2003353 - RNA, 12 nt, Human
cucaccccagcc

SEQ ID NO: 2003354 - RNA, 14 nt, Human
cucaccccagcccc

SEQ ID NO: 2003355 - RNA, 17 nt, Human
cucaccccuugccauaa

SEQ ID NO: 2003356 - RNA, 13 nt, Human
cucacuaggcuuc

SEQ ID NO: 2003357 - RNA, 16 nt, Human
cucacuaggcuucugg

SEQ ID NO: 2003358 - RNA, 16 nt, Human
cucacuauguugccca

SEQ ID NO: 2003359 - RNA, 17 nt, Human
cucacuauguugcccag

SEQ ID NO: 2003360 - RNA, 20 nt, Human
cucacuaggcuucugguuga

SEQ ID NO: 2003361 - RNA, 20 nt, Human
cucacuaucccggcugcccu

SEQ ID NO: 2003362 - RNA, 21 nt, Human
cucacuaucccggcugcccuu

SEQ ID NO: 2003363 - RNA, 18 nt, Human
cucaagugauucuccugc

SEQ ID NO: 2003364 - RNA, 19 nt, Human
cucaagugauucuccugcc

SEQ ID NO: 2003365 - RNA, 20 nt, Human
cucaagugauucuccugccu

SEQ ID NO: 2003366 - RNA, 13 nt, Human
cucacaguuauua

SEQ ID NO: 2003367 - RNA, 16 nt, Human
cucacaguuauuacau

SEQ ID NO: 2003368 - RNA, 20 nt, Human
cucaccagccccagugccca

SEQ ID NO: 2003369 - RNA, 21 nt, Human
cucaccagccccagugcccac

SEQ ID NO: 2003370 - RNA, 17 nt, Human
cucacaucuuuuucacu

SEQ ID NO: 2003371 - RNA, 19 nt, Human
cucaccagccccagugccc

SEQ ID NO: 2003372 - RNA, 13 nt, Human
cucacauuuauau

SEQ ID NO: 2003373 - RNA, 14 nt, Human
cuaugcauuugaaa

SEQ ID NO: 2003374 - RNA, 13 nt, Human
cuauuuucucuga

SEQ ID NO: 2003375 - RNA, 16 nt, Human
cuauuuucucugauac

SEQ ID NO: 2003376 - RNA, 17 nt, Human
cuauuuucucugauacu

SEQ ID NO: 2003377 - RNA, 22 nt, Human
cuauuuucucugauacuuuuuu

SEQ ID NO: 2003378 - RNA, 22 nt, Human
cuauuuuaauaaacacucuuga

SEQ ID NO: 2003379 - RNA, 18 nt, Human
cuauuuuaauaaacacuc

SEQ ID NO: 2003380 - RNA, 15 nt, Human
cucaacuaaauccaa

SEQ ID NO: 2003381 - RNA, 21 nt, Human
cucaacucuccuccagaguca

SEQ ID NO: 2003382 - RNA, 20 nt, Human
cucaacucuccuccagaguc

SEQ ID NO: 2003383 - RNA, 18 nt, Human
cucaaauuguaauuaaua

SEQ ID NO: 2003384 - RNA, 13 nt, Human
cucaaauuucuaa

SEQ ID NO: 2003385 - RNA, 19 nt, Human
cucaacucuccuccagagu

SEQ ID NO: 2003386 - RNA, 16 nt, Human
cucaacuaaauccaaa

SEQ ID NO: 2003387 - RNA, 19 nt, Human
cucaagagggcacuggugg

SEQ ID NO: 2003388 - RNA, 21 nt, Human
cucaagagggcacugguggcc

SEQ ID NO: 2003389 - RNA, 17 nt, Human
cucaagagggcacuggu

SEQ ID NO: 2003390 - RNA, 14 nt, Human
cuaguuccaccauc

SEQ ID NO: 2003391 - RNA, 14 nt, Human
cuaugacacaugca

SEQ ID NO: 2003392 - RNA, 13 nt, Human
cuaucuuggagag

SEQ ID NO: 2003393 - RNA, 21 nt, Human
cuaucuuggagagcuggggac

SEQ ID NO: 2003394 - RNA, 20 nt, Human
cuaucuuaucucagauauuu

SEQ ID NO: 2003395 - RNA, 20 nt, Human
cuaucuguuuacaguguucc

SEQ ID NO: 2003396 - RNA, 17 nt, Human
cuaucuguuuacagugu

SEQ ID NO: 2003397 - RNA, 21 nt, Human
cuaucuguuuacaguguuccg

SEQ ID NO: 2003398 - RNA, 20 nt, Human
cuaucaaguauuauaccuuu

SEQ ID NO: 2003399 - RNA, 22 nt, Human
cuauauuuuuuguuaaaugauu

SEQ ID NO: 2003400 - RNA, 13 nt, Human
cuauauuuuccug

SEQ ID NO: 2003401 - RNA, 14 nt, Human
cuauauuuuccuga

SEQ ID NO: 2003402 - RNA, 22 nt, Human
cuauauuguuuucaguguacau

SEQ ID NO: 2003403 - RNA, 20 nt, Human
cuauauuuuuuguuaaauga

SEQ ID NO: 2003404 - RNA, 23 nt, Human
cuauauuguuuucaguguacaug

SEQ ID NO: 2003405 - RNA, 17 nt, Human
cuauaucuauaaacacu

SEQ ID NO: 2003406 - RNA, 18 nt, Human
cuauaucuauaaacacug

SEQ ID NO: 2003407 - RNA, 19 nt, Human
cuauaucuauaaacacugu

SEQ ID NO: 2003408 - RNA, 18 nt, Human
cuaguguucuuucucuuu

SEQ ID NO: 2003409 - RNA, 15 nt, Human
cuaguguuugauugu

SEQ ID NO: 2003410 - RNA, 12 nt, Human
cuaguuauuuau

SEQ ID NO: 2003411 - RNA, 13 nt, Human
cuaguuauuuauu

SEQ ID NO: 2003412 - RNA, 16 nt, Human
cuaguuauuuauucug

SEQ ID NO: 2003413 - RNA, 19 nt, Human
cuaguuauuuauucuggga

SEQ ID NO: 2003414 - RNA, 20 nt, Human
cuaguuauuuauucugggaa

SEQ ID NO: 2003415 - RNA, 16 nt, Human
cuaguucaucccuucu

SEQ ID NO: 2003416 - RNA, 17 nt, Human
cuaguucaucccuucuc

SEQ ID NO: 2003417 - RNA, 18 nt, Human
cuaguucaucccuucucu

SEQ ID NO: 2003418 - RNA, 19 nt, Human
cuaguucaucccuucucuu

SEQ ID NO: 2003419 - RNA, 20 nt, Human
cuaguucaucccuucucuuc

SEQ ID NO: 2003420 - RNA, 23 nt, Human
cuaguucaucccuucucuuccag

SEQ ID NO: 2003421 - RNA, 23 nt, Human
cuagugugguguuuccuggcacu

SEQ ID NO: 2003422 - RNA, 22 nt, Human
cuagugugguguuuccuggcac

SEQ ID NO: 2003423 - RNA, 21 nt, Human
cuagugugguguuuccuggca

SEQ ID NO: 2003424 - RNA, 19 nt, Human
cuagugugguguuuccugg

SEQ ID NO: 2003425 - RNA, 13 nt, Human
cuagucuuaagaa

SEQ ID NO: 2003426 - RNA, 14 nt, Human
cuagugcagcugaa

SEQ ID NO: 2003427 - RNA, 16 nt, Human
cuagugcagcugaaau

SEQ ID NO: 2003428 - RNA, 17 nt, Human
cuagugcagcugaaauu

SEQ ID NO: 2003429 - RNA, 19 nt, Human
cuagugcagcugaaauuga

SEQ ID NO: 2003430 - RNA, 20 nt, Human
cuagucaacaguacccuggu

SEQ ID NO: 2003431 - RNA, 21 nt, Human
cuagucaacaguacccugguu

SEQ ID NO: 2003432 - RNA, 15 nt, Human
cuaguaucaaaagaa

SEQ ID NO: 2003433 - RNA, 17 nt, Human
cuaguaucaaaagaaag

SEQ ID NO: 2003434 - RNA, 23 nt, Human
cuaguaucaaaagaaagaaaauc

SEQ ID NO: 2003435 - RNA, 21 nt, Human
cuaggcauuugcugaauacag

SEQ ID NO: 2003436 - RNA, 17 nt, Human
cuaggcagggugucugc

SEQ ID NO: 2003437 - RNA, 18 nt, Human
cuaggcagggugucugcc

SEQ ID NO: 2003438 - RNA, 19 nt, Human
cuaggcagggugucugccc

SEQ ID NO: 2003439 - RNA, 20 nt, Human
cuaguagggguaccacugaa

SEQ ID NO: 2003440 - RNA, 21 nt, Human
cuaguagggguaccacugaau

SEQ ID NO: 2003441 - RNA, 14 nt, Human
cuaguacugugaau

SEQ ID NO: 2003442 - RNA, 15 nt, Human
cuaggaacacuccuu

SEQ ID NO: 2003443 - RNA, 13 nt, Human
cuaggaacacucc

SEQ ID NO: 2003444 - RNA, 14 nt, Human
cuaggaacaaaucu

SEQ ID NO: 2003445 - RNA, 16 nt, Human
cuaggaacaaaucuuc

SEQ ID NO: 2003446 - RNA, 21 nt, Human
cuaggaagacuuuggaaagag

SEQ ID NO: 2003447 - RNA, 13 nt, Human
cuagcacuuccuu

SEQ ID NO: 2003448 - RNA, 14 nt, Human
cuagcacuuccuug

SEQ ID NO: 2003449 - RNA, 16 nt, Human
cuaggaaauccagggu

SEQ ID NO: 2003450 - RNA, 17 nt, Human
cuaggaaauccagggug

SEQ ID NO: 2003451 - RNA, 22 nt, Human
cuaggaccccuccaugugggcu

SEQ ID NO: 2003452 - RNA, 22 nt, Human
cuaggaaggcacuucugccuga

SEQ ID NO: 2003453 - RNA, 14 nt, Human
cuaggaauauagau

SEQ ID NO: 2003454 - RNA, 17 nt, Human
cuaggaauauagauuaa

SEQ ID NO: 2003455 - RNA, 22 nt, Human
cuaggacugaauuaugaaacuu

SEQ ID NO: 2003456 - RNA, 17 nt, Human
cuaggaggucucuaaga

SEQ ID NO: 2003457 - RNA, 19 nt, Human
cuaggauucacaccccacc

SEQ ID NO: 2003458 - RNA, 20 nt, Human
cuaggauucacaccccaccu

SEQ ID NO: 2003459 - RNA, 21 nt, Human
cuaggauucacaccccaccug

SEQ ID NO: 2003460 - RNA, 22 nt, Human
cuaggauucacaccccaccugc

SEQ ID NO: 2003461 - RNA, 23 nt, Human
cuaggauucacaccccaccugcg

SEQ ID NO: 2003462 - RNA, 15 nt, Human
cuaaggugugcucug

SEQ ID NO: 2003463 - RNA, 14 nt, Human
cuaaggcugaacuu

SEQ ID NO: 2003464 - RNA, 19 nt, Human
cuaaggauuagucccuggc

SEQ ID NO: 2003465 - RNA, 21 nt, Human
cuaagcuauucaguaauaacu

SEQ ID NO: 2003466 - RNA, 19 nt, Human
cuaagcuauucaguaauaa

SEQ ID NO: 2003467 - RNA, 14 nt, Human
cuaagcauuuaaaa

SEQ ID NO: 2003468 - RNA, 15 nt, Human
cuaagcaaaauguga

SEQ ID NO: 2003469 - RNA, 18 nt, Human
cuaagcaaaaugugauau

SEQ ID NO: 2003470 - RNA, 14 nt, Human
cuaagcaaaaugug

SEQ ID NO: 2003471 - RNA, 17 nt, Human
cuaaccagcagaaaugc

SEQ ID NO: 2003472 - RNA, 16 nt, Human
cuaaccagcagaaaug

SEQ ID NO: 2003473 - RNA, 17 nt, Human
cuaaccacgcuggaccu

SEQ ID NO: 2003474 - RNA, 17 nt, Human
cuacagaggccaugggc

SEQ ID NO: 2003475 - RNA, 17 nt, Human
cuacccacccuccuuuc

SEQ ID NO: 2003476 - RNA, 22 nt, Human
cuacccacccuccuuucaccac

SEQ ID NO: 2003477 - RNA, 16 nt, Human
cuaccccuugauuuuc

SEQ ID NO: 2003478 - RNA, 24 nt, Human
cuaccccucccggcccugccugcu

SEQ ID NO: 2003479 - RNA, 21 nt, Human
cuaccccucccggcccugccu

SEQ ID NO: 2003480 - RNA, 12 nt, Human
cuacccaggugc

SEQ ID NO: 2003481 - RNA, 20 nt, Human
cuacccagcgagcccuggug

SEQ ID NO: 2003482 - RNA, 19 nt, Human
cuacccagcgagcccuggu

SEQ ID NO: 2003483 - RNA, 16 nt, Human
cuacacuccagugaga

SEQ ID NO: 2003484 - RNA, 21 nt, Human
cuacacacugcauguuuguga

SEQ ID NO: 2003485 - RNA, 17 nt, Human
cuacacuccagugagac

SEQ ID NO: 2003486 - RNA, 18 nt, Human
cuacacugugcugagucu

SEQ ID NO: 2003487 - RNA, 13 nt, Human
cuacacacugcau

SEQ ID NO: 2003488 - RNA, 15 nt, Human
cuacacacugcaugu

SEQ ID NO: 2003489 - RNA, 17 nt, Human
cuacagaaaagaaacuc

SEQ ID NO: 2003490 - RNA, 18 nt, Human
cuacagaaaagaaacucu

SEQ ID NO: 2003491 - RNA, 15 nt, Human
cuacagaggccaugg

SEQ ID NO: 2003492 - RNA, 19 nt, Human
cuaaucagcauucucacuc

SEQ ID NO: 2003493 - RNA, 17 nt, Human
cuaaucagcauucucac

SEQ ID NO: 2003494 - RNA, 16 nt, Human
cuaauccucuuuuucu

SEQ ID NO: 2003495 - RNA, 13 nt, Human
cuaauaaagcugu

SEQ ID NO: 2003496 - RNA, 21 nt, Human
cuaauaaaauuuaaaagucuu

SEQ ID NO: 2003497 - RNA, 12 nt, Human
cuaauaaagcug

SEQ ID NO: 2003498 - RNA, 16 nt, Human
cuaaggugugcucuga

SEQ ID NO: 2003499 - RNA, 14 nt, Human
cuaauguacugcau

SEQ ID NO: 2003500 - RNA, 16 nt, Human
cuaauguacugcauau

SEQ ID NO: 2003501 - RNA, 19 nt, Human
cuaaugaaugcauaaaaug

SEQ ID NO: 2003502 - RNA, 22 nt, Human
cuaaugaaugcauaaaauguua

SEQ ID NO: 2003503 - RNA, 15 nt, Human
cuaaugacauucaau

SEQ ID NO: 2003504 - RNA, 14 nt, Human
cuaaucuugugaaa

SEQ ID NO: 2003505 - RNA, 16 nt, Human
cuaaucuugugaaaau

SEQ ID NO: 2003506 - RNA, 19 nt, Human
cuaaucuugugaaaauaau

SEQ ID NO: 2003507 - RNA, 21 nt, Human
cuaaucuugugaaaauaauug

SEQ ID NO: 2003508 - RNA, 22 nt, Human
cuaauguuggcagaugcagcuc

SEQ ID NO: 2003509 - RNA, 16 nt, Human
cuaauguuuaagcaga

SEQ ID NO: 2003510 - RNA, 17 nt, Human
cuaauguuuaagcagaa

SEQ ID NO: 2003511 - RNA, 18 nt, Human
cuaauguuuaagcagaau

SEQ ID NO: 2003512 - RNA, 20 nt, Human
cuaauguuuaagcagaauug

SEQ ID NO: 2003513 - RNA, 22 nt, Human
cuaauguuuaagcagaauugga

SEQ ID NO: 2003514 - RNA, 14 nt, Human
cuacaauauguaca

SEQ ID NO: 2003515 - RNA, 21 nt, Human
cuacaauauguacauuucuaa

SEQ ID NO: 2003516 - RNA, 22 nt, Human
cuacaauauguacauuucuaag

SEQ ID NO: 2003517 - RNA, 15 nt, Human
cuacaagacacagug

SEQ ID NO: 2003518 - RNA, 13 nt, Human
cuaauuaauuuca

SEQ ID NO: 2003519 - RNA, 21 nt, Human
cuacuguaauuugugauacaa

SEQ ID NO: 2003520 - RNA, 15 nt, Human
cuacuugggaggcug

SEQ ID NO: 2003521 - RNA, 18 nt, Human
cuacuugggaggcugaga

SEQ ID NO: 2003522 - RNA, 19 nt, Human
cuacuugggaggcugagau

SEQ ID NO: 2003523 - RNA, 22 nt, Human
cuacuuauuguagcauccugga

SEQ ID NO: 2003524 - RNA, 22 nt, Human
cuacuguucagcuuuuauuccu

SEQ ID NO: 2003525 - RNA, 20 nt, Human
cuacuuccugugacuucagc

SEQ ID NO: 2003526 - RNA, 14 nt, Human
cuacuuccccuucc

SEQ ID NO: 2003527 - RNA, 15 nt, Human
cuacuuccccuuccu

SEQ ID NO: 2003528 - RNA, 20 nt, Human
cuacuuccccuuccuaauuc

SEQ ID NO: 2003529 - RNA, 14 nt, Human
cuacugaggugcua

SEQ ID NO: 2003530 - RNA, 19 nt, Human
cuacucuucucucugcucu

SEQ ID NO: 2003531 - RNA, 17 nt, Human
cuacucuucucucugcu

SEQ ID NO: 2003532 - RNA, 18 nt, Human
cuacucuucucucugcuc

SEQ ID NO: 2003533 - RNA, 11 nt, Human
cuacucuucuc

SEQ ID NO: 2003534 - RNA, 14 nt, Human
cuacucuucucucu

SEQ ID NO: 2003535 - RNA, 18 nt, Human
cuacugaccagacaagcu

SEQ ID NO: 2003536 - RNA, 20 nt, Human
cuacugaggauauggacacu

SEQ ID NO: 2003537 - RNA, 17 nt, Human
cuacuguaauuugugau

SEQ ID NO: 2003538 - RNA, 16 nt, Human
cuacuguaauuuguga

SEQ ID NO: 2003539 - RNA, 21 nt, Human
cuacuguaaggcaaucauggu

SEQ ID NO: 2003540 - RNA, 21 nt, Human
cuacccgggaagggggcuggg

SEQ ID NO: 2003541 - RNA, 20 nt, Human
cuacccgggaagggggcugg

SEQ ID NO: 2003542 - RNA, 15 nt, Human
cuacccgggaagggg

SEQ ID NO: 2003543 - RNA, 14 nt, Human
cuacccgggaaggg

SEQ ID NO: 2003544 - RNA, 16 nt, Human
cuacucugugucaggu

SEQ ID NO: 2003545 - RNA, 21 nt, Human
cuacucugugucagguggggc

SEQ ID NO: 2003546 - RNA, 14 nt, Human
cuagauguaaauuu

SEQ ID NO: 2003547 - RNA, 17 nt, Human
cuagcacuuugggaggc

SEQ ID NO: 2003548 - RNA, 14 nt, Human
cuagcacagcuccc

SEQ ID NO: 2003549 - RNA, 16 nt, Human
cuagcacagcucccuu

SEQ ID NO: 2003550 - RNA, 17 nt, Human
cuagcacagcucccuuc

SEQ ID NO: 2003551 - RNA, 14 nt, Human
cuagauuugggaga

SEQ ID NO: 2003552 - RNA, 21 nt, Human
cuagagggaccucucccaggg

SEQ ID NO: 2003553 - RNA, 20 nt, Human
cuagagggaccucucccagg

SEQ ID NO: 2003554 - RNA, 19 nt, Human
cuagagggaccucucccag

SEQ ID NO: 2003555 - RNA, 18 nt, Human
cuagagggaccucuccca

SEQ ID NO: 2003556 - RNA, 21 nt, Human
cuagagugaacuugggccacu

SEQ ID NO: 2003557 - RNA, 17 nt, Human
cuagagugaacuugggc

SEQ ID NO: 2003558 - RNA, 21 nt, Human
cuagacgagcaggcuucuucc

SEQ ID NO: 2003559 - RNA, 21 nt, Human
cuagacccacuggacucaccu

SEQ ID NO: 2003560 - RNA, 20 nt, Human
cuagacgagcaggcuucuuc

SEQ ID NO: 2003561 - RNA, 18 nt, Human
cuagacucccaagcugga

SEQ ID NO: 2003562 - RNA, 12 nt, Human
ccguuauuaaaa

SEQ ID NO: 2003563 - RNA, 22 nt, Human
ccuagguauaauucacauugua

SEQ ID NO: 2003564 - RNA, 13 nt, Human
ccuaggugacaga

SEQ ID NO: 2003565 - RNA, 21 nt, Human
ccuagaaauuccccacccuga

SEQ ID NO: 2003566 - RNA, 16 nt, Human
ccuacuuccccuuccu

SEQ ID NO: 2003567 - RNA, 13 nt, Human
ccuacuuccccuu

SEQ ID NO: 2003568 - RNA, 19 nt, Human
ccuacuguaauuugugaua

SEQ ID NO: 2003569 - RNA, 18 nt, Human
ccuacccacccuccuuuc

SEQ ID NO: 2003570 - RNA, 13 nt, Human
ccuacccacccuc

SEQ ID NO: 2003571 - RNA, 18 nt, Human
ccuacaugcuuugugaac

SEQ ID NO: 2003572 - RNA, 17 nt, Human
ccuacaugcuuugugaa

SEQ ID NO: 2003573 - RNA, 21 nt, Human
ccuaacaacauuguagccuca

SEQ ID NO: 2003574 - RNA, 22 nt, Human
ccuaacaacauuguagccucaa

SEQ ID NO: 2003575 - RNA, 15 nt, Human
ccuacagcccaccug

SEQ ID NO: 2003576 - RNA, 19 nt, Human
ccuacagcuugaccgugag

SEQ ID NO: 2003577 - RNA, 22 nt, Human
ccuacaguugaaaaacagcuga

SEQ ID NO: 2003578 - RNA, 16 nt, Human
ccuaaaauucagugga

SEQ ID NO: 2003579 - RNA, 18 nt, Human
ccguguuugucucuucug

SEQ ID NO: 2003580 - RNA, 14 nt, Human
ccguguuugucucu

SEQ ID NO: 2003581 - RNA, 19 nt, Human
ccguguuugucucuucugg

SEQ ID NO: 2003582 - RNA, 16 nt, Human
ccuaaaccaaaaacug

SEQ ID NO: 2003583 - RNA, 13 nt, Human
ccuaaacauauga

SEQ ID NO: 2003584 - RNA, 13 nt, Human
cccuggugguuca

SEQ ID NO: 2003585 - RNA, 13 nt, Human
cccuguucacucu

SEQ ID NO: 2003586 - RNA, 14 nt, Human
cccuguucacucua

SEQ ID NO: 2003587 - RNA, 22 nt, Human
cccuguucacucuacuuagcau

SEQ ID NO: 2003588 - RNA, 12 nt, Human
cccuucccaccu

SEQ ID NO: 2003589 - RNA, 11 nt, Human
cccuucauuug

SEQ ID NO: 2003590 - RNA, 13 nt, Human
cccuucccaccuc

SEQ ID NO: 2003591 - RNA, 13 nt, Human
cccuuccuaauuc

SEQ ID NO: 2003592 - RNA, 14 nt, Human
cccuuccuaauucc

SEQ ID NO: 2003593 - RNA, 19 nt, Human
cccuuccuaauuccacagc

SEQ ID NO: 2003594 - RNA, 20 nt, Human
cccuuccuaauuccacagcu

SEQ ID NO: 2003595 - RNA, 14 nt, Human
cccuucccagggca

SEQ ID NO: 2003596 - RNA, 17 nt, Human
cccuuggauuguccccg

SEQ ID NO: 2003597 - RNA, 12 nt, Human
cccuugaccugc

SEQ ID NO: 2003598 - RNA, 14 nt, Human
cccuuggacauuuu

SEQ ID NO: 2003599 - RNA, 15 nt, Human
cccuugaccugcuga

SEQ ID NO: 2003600 - RNA, 15 nt, Human
cccuuggacauuuua

SEQ ID NO: 2003601 - RNA, 11 nt, Human
cccuucuuuuu

SEQ ID NO: 2003602 - RNA, 21 nt, Human
cccuuccuaauuccacagcug

SEQ ID NO: 2003603 - RNA, 19 nt, Human
cccuucuuuuucuucuuuu

SEQ ID NO: 2003604 - RNA, 23 nt, Human
cccuugguuaggcauugugggaa

SEQ ID NO: 2003605 - RNA, 22 nt, Human
cccuugguuaggcauuguggga

SEQ ID NO: 2003606 - RNA, 23 nt, Human
cccuuuacuugucuuucuggggu

SEQ ID NO: 2003607 - RNA, 17 nt, Human
cccuuuagcuguguuau

SEQ ID NO: 2003608 - RNA, 12 nt, Human
cccuuguuccag

SEQ ID NO: 2003609 - RNA, 22 nt, Human
cccuuguggucccaccccacac

SEQ ID NO: 2003610 - RNA, 17 nt, Human
ccgggaagggggcuggg

SEQ ID NO: 2003611 - RNA, 17 nt, Human
ccggcaauaaaagccca

SEQ ID NO: 2003612 - RNA, 18 nt, Human
ccggcaauaaaagcccag

SEQ ID NO: 2003613 - RNA, 16 nt, Human
ccggcaauaaaagccc

SEQ ID NO: 2003614 - RNA, 17 nt, Human
ccggaggggccuggcag

SEQ ID NO: 2003615 - RNA, 21 nt, Human
ccggaggggccuggcagccgu

SEQ ID NO: 2003616 - RNA, 16 nt, Human
ccgggagccugaucac

SEQ ID NO: 2003617 - RNA, 23 nt, Human
ccgggagccugaucaccugcccu

SEQ ID NO: 2003618 - RNA, 14 nt, Human
ccgggaagcaaaug

SEQ ID NO: 2003619 - RNA, 21 nt, Human
ccgggacguggcaccuccucg

SEQ ID NO: 2003620 - RNA, 12 nt, Human
ccgggacucugc

SEQ ID NO: 2003621 - RNA, 18 nt, Human
ccggugaccucuagcccu

SEQ ID NO: 2003622 - RNA, 21 nt, Human
ccggucgggggggacccucca

SEQ ID NO: 2003623 - RNA, 21 nt, Human
ccgugcuuuuaaggaaaggca

SEQ ID NO: 2003624 - RNA, 21 nt, Human
ccggugggggggcagagcccu

SEQ ID NO: 2003625 - RNA, 17 nt, Human
ccggugugggggccccg

SEQ ID NO: 2003626 - RNA, 16 nt, Human
ccggugggggggcaga

SEQ ID NO: 2003627 - RNA, 17 nt, Human
ccggugggggggcagag

SEQ ID NO: 2003628 - RNA, 22 nt, Human
ccucaggugagaagcagaggaa

SEQ ID NO: 2003629 - RNA, 17 nt, Human
ccuauuagagaagagau

SEQ ID NO: 2003630 - RNA, 11 nt, Human
ccuauuagugu

SEQ ID NO: 2003631 - RNA, 15 nt, Human
ccuauuaguguuaua

SEQ ID NO: 2003632 - RNA, 16 nt, Human
ccuauuaguguuauau

SEQ ID NO: 2003633 - RNA, 19 nt, Human
ccuauuaguguuauaugaa

SEQ ID NO: 2003634 - RNA, 22 nt, Human
ccuaucuguuuacaguguuccg

SEQ ID NO: 2003635 - RNA, 16 nt, Human
ccuauuagagaagaga

SEQ ID NO: 2003636 - RNA, 14 nt, Human
ccucacacucaccc

SEQ ID NO: 2003637 - RNA, 23 nt, Human
ccucacaguccuuaccagcagag

SEQ ID NO: 2003638 - RNA, 24 nt, Human
ccucacaguccuuaccagcagagc

SEQ ID NO: 2003639 - RNA, 15 nt, Human
ccuaggugacagagu

SEQ ID NO: 2003640 - RNA, 23 nt, Human
ccuagguagcccccucuucccug

SEQ ID NO: 2003641 - RNA, 13 nt, Human
ccuaggucuauuu

SEQ ID NO: 2003642 - RNA, 16 nt, Human
ccuagguagcccccuc

SEQ ID NO: 2003643 - RNA, 20 nt, Human
ccuagguagcccccucuucc

SEQ ID NO: 2003644 - RNA, 21 nt, Human
ccuagguagcccccucuuccc

SEQ ID NO: 2003645 - RNA, 23 nt, Human
ccucaggccugggggcugggcag

SEQ ID NO: 2003646 - RNA, 17 nt, Human
ccucagggagcagggaa

SEQ ID NO: 2003647 - RNA, 19 nt, Human
ccucagggagcagggaagg

SEQ ID NO: 2003648 - RNA, 20 nt, Human
ccucagggagcagggaaggc

SEQ ID NO: 2003649 - RNA, 22 nt, Human
ccucagggucccugguggcagc

SEQ ID NO: 2003650 - RNA, 21 nt, Human
ccucagggagcagggaaggcc

SEQ ID NO: 2003651 - RNA, 22 nt, Human
ccucagggagcagggaaggccu

SEQ ID NO: 2003652 - RNA, 23 nt, Human
ccucagggagcagggaaggccug

SEQ ID NO: 2003653 - RNA, 20 nt, Human
ccucagggucccugguggca

SEQ ID NO: 2003654 - RNA, 17 nt, Human
ccucagggucccuggug

SEQ ID NO: 2003655 - RNA, 16 nt, Human
ccucagggucccuggu

SEQ ID NO: 2003656 - RNA, 21 nt, Human
ccucagagugcaagccccugc

SEQ ID NO: 2003657 - RNA, 14 nt, Human
ccucagagugcaag

SEQ ID NO: 2003658 - RNA, 16 nt, Human
ccucagaucuucugug

SEQ ID NO: 2003659 - RNA, 23 nt, Human
ccucacccggugaccucuagccc

SEQ ID NO: 2003660 - RNA, 14 nt, Human
ccucacccuggggc

SEQ ID NO: 2003661 - RNA, 17 nt, Human
ccucacucagcaccacu

SEQ ID NO: 2003662 - RNA, 18 nt, Human
ccucacucagcaccacuc

SEQ ID NO: 2003663 - RNA, 13 nt, Human
ccucacucucagg

SEQ ID NO: 2003664 - RNA, 14 nt, Human
ccucacucucagga

SEQ ID NO: 2003665 - RNA, 16 nt, Human
ccucagagccaccccu

SEQ ID NO: 2003666 - RNA, 12 nt, Human
ccuccuccagcc

SEQ ID NO: 2003667 - RNA, 11 nt, Human
ccuccucagau

SEQ ID NO: 2003668 - RNA, 13 nt, Human
ccucccucuuucc

SEQ ID NO: 2003669 - RNA, 13 nt, Human
ccucccucuccag

SEQ ID NO: 2003670 - RNA, 18 nt, Human
ccucccucuccagcaggc

SEQ ID NO: 2003671 - RNA, 17 nt, Human
ccucccgaguagcuggg

SEQ ID NO: 2003672 - RNA, 18 nt, Human
ccucccgaguagcuggga

SEQ ID NO: 2003673 - RNA, 21 nt, Human
ccucccgaauagcugggacua

SEQ ID NO: 2003674 - RNA, 19 nt, Human
ccucccgaauagcugggac

SEQ ID NO: 2003675 - RNA, 20 nt, Human
ccucccgaauagcugggacu

SEQ ID NO: 2003676 - RNA, 15 nt, Human
ccucccaacucaccc

SEQ ID NO: 2003677 - RNA, 18 nt, Human
ccucccgaauagcuggga

SEQ ID NO: 2003678 - RNA, 15 nt, Human
ccuccccuccuccug

SEQ ID NO: 2003679 - RNA, 18 nt, Human
ccuccauccuccuccuuc

SEQ ID NO: 2003680 - RNA, 19 nt, Human
ccuccauccuccuccuucc

SEQ ID NO: 2003681 - RNA, 20 nt, Human
ccuccauccuccuccuuccu

SEQ ID NO: 2003682 - RNA, 21 nt, Human
ccuccauccuccuccuuccua

SEQ ID NO: 2003683 - RNA, 12 nt, Human
ccuccaggugca

SEQ ID NO: 2003684 - RNA, 11 nt, Human
ccuccaggugc

SEQ ID NO: 2003685 - RNA, 17 nt, Human
ccuccaggugcacaagc

SEQ ID NO: 2003686 - RNA, 12 nt, Human
ccuccauguggg

SEQ ID NO: 2003687 - RNA, 15 nt, Human
ccuccaugugggcua

SEQ ID NO: 2003688 - RNA, 14 nt, Human
ccucccaacucacc

SEQ ID NO: 2003689 - RNA, 17 nt, Human
ccucccaaagugcuggg

SEQ ID NO: 2003690 - RNA, 12 nt, Human
ccuccauccuga

SEQ ID NO: 2003691 - RNA, 13 nt, Human
ccuccauccugag

SEQ ID NO: 2003692 - RNA, 19 nt, Human
ccuccaugcugccuccaga

SEQ ID NO: 2003693 - RNA, 16 nt, Human
ccuccaugcugccucc

SEQ ID NO: 2003694 - RNA, 13 nt, Human
ccuccacucuccu

SEQ ID NO: 2003695 - RNA, 12 nt, Human
ccuccagaacuc

SEQ ID NO: 2003696 - RNA, 17 nt, Human
ccuccagaacucuuccu

SEQ ID NO: 2003697 - RNA, 18 nt, Human
ccuccagaacucuuccuc

SEQ ID NO: 2003698 - RNA, 20 nt, Human
ccuccagaacucuuccucca

SEQ ID NO: 2003699 - RNA, 20 nt, Human
ccucaggugagaagcagagg

SEQ ID NO: 2003700 - RNA, 18 nt, Human
ccucaggugagaagcaga

SEQ ID NO: 2003701 - RNA, 17 nt, Human
ccucaggugagaagcag

SEQ ID NO: 2003702 - RNA, 17 nt, Human
ccucugauguauuuugu

SEQ ID NO: 2003703 - RNA, 17 nt, Human
ccucugcacuccccugc

SEQ ID NO: 2003704 - RNA, 16 nt, Human
ccucugcacuccccug

SEQ ID NO: 2003705 - RNA, 13 nt, Human
ccucugaggcuga

SEQ ID NO: 2003706 - RNA, 11 nt, Human
ccucugagccu

SEQ ID NO: 2003707 - RNA, 12 nt, Human
ccucugagccuu

SEQ ID NO: 2003708 - RNA, 18 nt, Human
ccucugcacuccccugcu

SEQ ID NO: 2003709 - RNA, 23 nt, Human
ccucugcacuccccugcugggug

SEQ ID NO: 2003710 - RNA, 14 nt, Human
ccucugcagcaaua

SEQ ID NO: 2003711 - RNA, 18 nt, Human
ccucugcagcaauaaagc

SEQ ID NO: 2003712 - RNA, 16 nt, Human
ccucugcccacucccu

SEQ ID NO: 2003713 - RNA, 13 nt, Human
ccucugcccacuc

SEQ ID NO: 2003714 - RNA, 19 nt, Human
ccucugcagcaauaaagca

SEQ ID NO: 2003715 - RNA, 21 nt, Human
ccucugauguauuuugugagu

SEQ ID NO: 2003716 - RNA, 21 nt, Human
ccucugacacacagcucuguc

SEQ ID NO: 2003717 - RNA, 13 nt, Human
ccucugagaggcg

SEQ ID NO: 2003718 - RNA, 18 nt, Human
ccucuccucauguucugc

SEQ ID NO: 2003719 - RNA, 15 nt, Human
ccucuccgccccuga

SEQ ID NO: 2003720 - RNA, 18 nt, Human
ccucuccgccccugagcc

SEQ ID NO: 2003721 - RNA, 19 nt, Human
ccucuccgccccugagccc

SEQ ID NO: 2003722 - RNA, 20 nt, Human
ccucuccgccccugagccca

SEQ ID NO: 2003723 - RNA, 13 nt, Human
ccucugacacaca

SEQ ID NO: 2003724 - RNA, 22 nt, Human
ccucuccgccccugagcccacu

SEQ ID NO: 2003725 - RNA, 20 nt, Human
ccucugaaugaaccuucugg

SEQ ID NO: 2003726 - RNA, 15 nt, Human
ccucugacacacagc

SEQ ID NO: 2003727 - RNA, 14 nt, Human
ccucugacacacag

SEQ ID NO: 2003728 - RNA, 19 nt, Human
ccucugacacacagcucug

SEQ ID NO: 2003729 - RNA, 20 nt, Human
ccucugacacacagcucugu

SEQ ID NO: 2003730 - RNA, 22 nt, Human
ccucucccuuggauuguccccg

SEQ ID NO: 2003731 - RNA, 13 nt, Human
ccucucccuugga

SEQ ID NO: 2003732 - RNA, 20 nt, Human
ccucuccccagcaagugaga

SEQ ID NO: 2003733 - RNA, 14 nt, Human
ccucuacugggagc

SEQ ID NO: 2003734 - RNA, 22 nt, Human
ccucuccagcaggcccauggga

SEQ ID NO: 2003735 - RNA, 11 nt, Human
ccucucccagg

SEQ ID NO: 2003736 - RNA, 15 nt, Human
ccucuccccagcaag

SEQ ID NO: 2003737 - RNA, 21 nt, Human
ccuccuccagccgccaugcuc

SEQ ID NO: 2003738 - RNA, 13 nt, Human
ccuccuccuuccu

SEQ ID NO: 2003739 - RNA, 14 nt, Human
ccuccuccuuccua

SEQ ID NO: 2003740 - RNA, 15 nt, Human
ccuccuccuuccuag

SEQ ID NO: 2003741 - RNA, 17 nt, Human
ccuccucggcuggcugu

SEQ ID NO: 2003742 - RNA, 21 nt, Human
ccuccucggcuggcuguccac

SEQ ID NO: 2003743 - RNA, 16 nt, Human
ccuccucucugcccua

SEQ ID NO: 2003744 - RNA, 13 nt, Human
ccuccucucugcc

SEQ ID NO: 2003745 - RNA, 15 nt, Human
ccuccucucugcccu

SEQ ID NO: 2003746 - RNA, 14 nt, Human
ccucgucuuuccca

SEQ ID NO: 2003747 - RNA, 19 nt, Human
cccucagggucccuggugg

SEQ ID NO: 2003748 - RNA, 18 nt, Human
cccucagggucccuggug

SEQ ID NO: 2003749 - RNA, 17 nt, Human
cccucagggucccuggu

SEQ ID NO: 2003750 - RNA, 16 nt, Human
cccucagggucccugg

SEQ ID NO: 2003751 - RNA, 15 nt, Human
cccucagggucccug

SEQ ID NO: 2003752 - RNA, 14 nt, Human
cccuaauaaagcug

SEQ ID NO: 2003753 - RNA, 13 nt, Human
cccuaauaaagcu

SEQ ID NO: 2003754 - RNA, 12 nt, Human
cccuaauaaagc

SEQ ID NO: 2003755 - RNA, 18 nt, Human
cccuaauaaagcugugug

SEQ ID NO: 2003756 - RNA, 15 nt, Human
cccuaauaaagcugu

SEQ ID NO: 2003757 - RNA, 14 nt, Human
cccuaaaagcacac

SEQ ID NO: 2003758 - RNA, 17 nt, Human
cccuaaaguguauuuuu

SEQ ID NO: 2003759 - RNA, 22 nt, Human
cccuaaaguguauuuuuuuacu

SEQ ID NO: 2003760 - RNA, 13 nt, Human
cccuaaagccuca

SEQ ID NO: 2003761 - RNA, 13 nt, Human
cccgugaccuggu

SEQ ID NO: 2003762 - RNA, 15 nt, Human
cccgugaccugguca

SEQ ID NO: 2003763 - RNA, 16 nt, Human
cccgugaccuggucag

SEQ ID NO: 2003764 - RNA, 16 nt, Human
cccggcaggguccuag

SEQ ID NO: 2003765 - RNA, 17 nt, Human
cccggaggggccuggca

SEQ ID NO: 2003766 - RNA, 18 nt, Human
cccggaggggccuggcag

SEQ ID NO: 2003767 - RNA, 22 nt, Human
cccucauccucauacccacccc

SEQ ID NO: 2003768 - RNA, 19 nt, Human
cccucauuggcucuugaac

SEQ ID NO: 2003769 - RNA, 21 nt, Human
cccuccaagaccuucuccuuc

SEQ ID NO: 2003770 - RNA, 22 nt, Human
cccucauuccaccuucccaugc

SEQ ID NO: 2003771 - RNA, 23 nt, Human
cccucauuaaaauauugaaaucu

SEQ ID NO: 2003772 - RNA, 20 nt, Human
cccucagucuggcccuuccu

SEQ ID NO: 2003773 - RNA, 21 nt, Human
cccucagggucccugguggca

SEQ ID NO: 2003774 - RNA, 13 nt, Human
cccucauagcccu

SEQ ID NO: 2003775 - RNA, 15 nt, Human
cccucauagcccuca

SEQ ID NO: 2003776 - RNA, 20 nt, Human
cccucauccucauacccacc

SEQ ID NO: 2003777 - RNA, 17 nt, Human
cccucauccucauaccc

SEQ ID NO: 2003778 - RNA, 22 nt, Human
cccucaucaccaacgucugugc

SEQ ID NO: 2003779 - RNA, 19 nt, Human
cccucauagcccucacccu

SEQ ID NO: 2003780 - RNA, 23 nt, Human
cccucccucuacugggagccuac

SEQ ID NO: 2003781 - RNA, 13 nt, Human
cccucccucuuuc

SEQ ID NO: 2003782 - RNA, 21 nt, Human
cccuccgaccacuuccagggg

SEQ ID NO: 2003783 - RNA, 14 nt, Human
cccucccucuccag

SEQ ID NO: 2003784 - RNA, 14 nt, Human
cccucccuucaacc

SEQ ID NO: 2003785 - RNA, 19 nt, Human
cccuccaucuaaacugccc

SEQ ID NO: 2003786 - RNA, 17 nt, Human
cccuccaugugggcuag

SEQ ID NO: 2003787 - RNA, 12 nt, Human
cccuccaggagu

SEQ ID NO: 2003788 - RNA, 16 nt, Human
cccuccaaggccaggc

SEQ ID NO: 2003789 - RNA, 10 nt, Human
cccuccaagg

SEQ ID NO: 2003790 - RNA, 14 nt, Human
ccccuuaccacugc

SEQ ID NO: 2003791 - RNA, 20 nt, Human
ccccuguucuggcagaguug

SEQ ID NO: 2003792 - RNA, 20 nt, Human
ccccuuccuaauuccacagc

SEQ ID NO: 2003793 - RNA, 21 nt, Human
ccccuuccuaauuccacagcu

SEQ ID NO: 2003794 - RNA, 22 nt, Human
ccccuuccuaauuccacagcug

SEQ ID NO: 2003795 - RNA, 14 nt, Human
ccccuuccuaccac

SEQ ID NO: 2003796 - RNA, 12 nt, Human
ccccuucccccu

SEQ ID NO: 2003797 - RNA, 18 nt, Human
ccccuucccgugaccugg

SEQ ID NO: 2003798 - RNA, 23 nt, Human
ccccuggugguucacucuuggag

SEQ ID NO: 2003799 - RNA, 15 nt, Human
ccccuguaggccuca

SEQ ID NO: 2003800 - RNA, 22 nt, Human
ccccuguccccgcacugggcuu

SEQ ID NO: 2003801 - RNA, 23 nt, Human
ccccuggcuuuucacugcuggcu

SEQ ID NO: 2003802 - RNA, 20 nt, Human
cccgaggccuucucugaagg

SEQ ID NO: 2003803 - RNA, 15 nt, Human
cccgaggccuucucu

SEQ ID NO: 2003804 - RNA, 19 nt, Human
cccgauccuccccuggacu

SEQ ID NO: 2003805 - RNA, 15 nt, Human
cccgaucgccagcaa

SEQ ID NO: 2003806 - RNA, 16 nt, Human
cccgcaagcaccaucc

SEQ ID NO: 2003807 - RNA, 22 nt, Human
cccgcuaagagggagggagggc

SEQ ID NO: 2003808 - RNA, 19 nt, Human
cccgcucagcccucccugc

SEQ ID NO: 2003809 - RNA, 23 nt, Human
cccgcucagcccucccugccccu

SEQ ID NO: 2003810 - RNA, 22 nt, Human
ccccaggugguuauggagaggg

SEQ ID NO: 2003811 - RNA, 14 nt, Human
ccccuggcagcccc

SEQ ID NO: 2003812 - RNA, 12 nt, Human
ccccuggcagcc

SEQ ID NO: 2003813 - RNA, 15 nt, Human
ccccuggcagccccu

SEQ ID NO: 2003814 - RNA, 12 nt, Human
ccccaggaggcc

SEQ ID NO: 2003815 - RNA, 12 nt, Human
ccccagggcacg

SEQ ID NO: 2003816 - RNA, 23 nt, Human
ccccacaggagguggucugggac

SEQ ID NO: 2003817 - RNA, 16 nt, Human
ccccagccccauccca

SEQ ID NO: 2003818 - RNA, 15 nt, Human
ccccagccccauccu

SEQ ID NO: 2003819 - RNA, 22 nt, Human
ccccagcuggggccaggcuggg

SEQ ID NO: 2003820 - RNA, 21 nt, Human
ccccagcuggggccaggcugg

SEQ ID NO: 2003821 - RNA, 13 nt, Human
ccccagccugcua

SEQ ID NO: 2003822 - RNA, 14 nt, Human
cccugguggcagcu

SEQ ID NO: 2003823 - RNA, 23 nt, Human
cccugccuccuuugugaggaagc

SEQ ID NO: 2003824 - RNA, 16 nt, Human
cccugccuccuuugug

SEQ ID NO: 2003825 - RNA, 18 nt, Human
cccugccucucugcaggu

SEQ ID NO: 2003826 - RNA, 11 nt, Human
cccugccucuc

SEQ ID NO: 2003827 - RNA, 20 nt, Human
cccugccaucauguuuacag

SEQ ID NO: 2003828 - RNA, 22 nt, Human
cccugccaggcacaggcagggc

SEQ ID NO: 2003829 - RNA, 23 nt, Human
cccugccaggcacaggcagggca

SEQ ID NO: 2003830 - RNA, 18 nt, Human
cccugccaggcacaggca

SEQ ID NO: 2003831 - RNA, 19 nt, Human
cccugccaggcacaggcag

SEQ ID NO: 2003832 - RNA, 20 nt, Human
cccugccaggcacaggcagg

SEQ ID NO: 2003833 - RNA, 21 nt, Human
cccugccaggcacaggcaggg

SEQ ID NO: 2003834 - RNA, 14 nt, Human
cccugccuccuuug

SEQ ID NO: 2003835 - RNA, 17 nt, Human
cccugccacccugggga

SEQ ID NO: 2003836 - RNA, 18 nt, Human
cccugccacccuggggag

SEQ ID NO: 2003837 - RNA, 13 nt, Human
cccugccaggcac

SEQ ID NO: 2003838 - RNA, 14 nt, Human
cccugccaggcaca

SEQ ID NO: 2003839 - RNA, 15 nt, Human
cccugccaggcacag

SEQ ID NO: 2003840 - RNA, 17 nt, Human
cccugccaggcacaggc

SEQ ID NO: 2003841 - RNA, 12 nt, Human
cccugccacccu

SEQ ID NO: 2003842 - RNA, 14 nt, Human
cccugccacccugg

SEQ ID NO: 2003843 - RNA, 15 nt, Human
cccugccacccuggg

SEQ ID NO: 2003844 - RNA, 20 nt, Human
cccugauguguccucaggga

SEQ ID NO: 2003845 - RNA, 15 nt, Human
cccugaucccuucca

SEQ ID NO: 2003846 - RNA, 16 nt, Human
cccugaucccuuccac

SEQ ID NO: 2003847 - RNA, 23 nt, Human
cccugaucccuuccaccugcucu

SEQ ID NO: 2003848 - RNA, 17 nt, Human
cccucuacugggagccu

SEQ ID NO: 2003849 - RNA, 20 nt, Human
cccucuacugggagccuacc

SEQ ID NO: 2003850 - RNA, 18 nt, Human
cccugcagagggcacaga

SEQ ID NO: 2003851 - RNA, 20 nt, Human
cccugcagagggcacagaaa

SEQ ID NO: 2003852 - RNA, 12 nt, Human
cccugcagaggg

SEQ ID NO: 2003853 - RNA, 16 nt, Human
cccugcaaccugauug

SEQ ID NO: 2003854 - RNA, 22 nt, Human
cccugcaaccugauugugucuc

SEQ ID NO: 2003855 - RNA, 22 nt, Human
cccugccucucugcaggucccu

SEQ ID NO: 2003856 - RNA, 21 nt, Human
cccugccucucugcagguccc

SEQ ID NO: 2003857 - RNA, 16 nt, Human
cccugccucucugcag

SEQ ID NO: 2003858 - RNA, 13 nt, Human
cccugccugcccu

SEQ ID NO: 2003859 - RNA, 23 nt, Human
cccugccugcccugucaggaggc

SEQ ID NO: 2003860 - RNA, 13 nt, Human
cccugcugguuca

SEQ ID NO: 2003861 - RNA, 19 nt, Human
cccugcugguucaggguug

SEQ ID NO: 2003862 - RNA, 20 nt, Human
cccugcugguucaggguugg

SEQ ID NO: 2003863 - RNA, 23 nt, Human
cccugcuuugggcugcccuggug

SEQ ID NO: 2003864 - RNA, 19 nt, Human
cccugcugucauugcuucu

SEQ ID NO: 2003865 - RNA, 22 nt, Human
cccugcuuugggcugcccuggu

SEQ ID NO: 2003866 - RNA, 21 nt, Human
cccuggaagcagugcccaggu

SEQ ID NO: 2003867 - RNA, 17 nt, Human
cccuggaagcagugccc

SEQ ID NO: 2003868 - RNA, 18 nt, Human
cccuggaagcagugccca

SEQ ID NO: 2003869 - RNA, 21 nt, Human
cccuggacugugugcucagga

SEQ ID NO: 2003870 - RNA, 15 nt, Human
cccuggaagcagugc

SEQ ID NO: 2003871 - RNA, 16 nt, Human
cccuggaagcagugcc

SEQ ID NO: 2003872 - RNA, 22 nt, Human
cccugguggcagugggagcugc

SEQ ID NO: 2003873 - RNA, 20 nt, Human
cccuggguuagacugccagc

SEQ ID NO: 2003874 - RNA, 21 nt, Human
cccuggguuagacugccagcu

SEQ ID NO: 2003875 - RNA, 22 nt, Human
cccuggguuagacugccagcuc

SEQ ID NO: 2003876 - RNA, 17 nt, Human
cccuggugcugccacac

SEQ ID NO: 2003877 - RNA, 21 nt, Human
cccuggugcugccacacuuca

SEQ ID NO: 2003878 - RNA, 16 nt, Human
cccuggguuagacugc

SEQ ID NO: 2003879 - RNA, 18 nt, Human
cccuggguuagacugcca

SEQ ID NO: 2003880 - RNA, 19 nt, Human
cccuggguuagacugccag

SEQ ID NO: 2003881 - RNA, 18 nt, Human
cccugggaggcucuggag

SEQ ID NO: 2003882 - RNA, 17 nt, Human
cccugggaggcucugga

SEQ ID NO: 2003883 - RNA, 16 nt, Human
cccugggaggcucugg

SEQ ID NO: 2003884 - RNA, 15 nt, Human
cccugggaggcucug

SEQ ID NO: 2003885 - RNA, 13 nt, Human
cccagguuucuau

SEQ ID NO: 2003886 - RNA, 18 nt, Human
cccaggcauuccccagga

SEQ ID NO: 2003887 - RNA, 16 nt, Human
cccaggagcccauuug

SEQ ID NO: 2003888 - RNA, 22 nt, Human
cccaggagcccauuuggagggc

SEQ ID NO: 2003889 - RNA, 17 nt, Human
cccaggcauuccccagg

SEQ ID NO: 2003890 - RNA, 19 nt, Human
cccagggugggaagggcua

SEQ ID NO: 2003891 - RNA, 16 nt, Human
cccaggaggccagccu

SEQ ID NO: 2003892 - RNA, 15 nt, Human
cccaggaggccagcc

SEQ ID NO: 2003893 - RNA, 15 nt, Human
cccaggcauucccca

SEQ ID NO: 2003894 - RNA, 23 nt, Human
cccaggcaggucuugaacuccug

SEQ ID NO: 2003895 - RNA, 14 nt, Human
cccaguuagcucuc

SEQ ID NO: 2003896 - RNA, 20 nt, Human
cccagugguuccuaauccuc

SEQ ID NO: 2003897 - RNA, 15 nt, Human
cccagugccgagaag

SEQ ID NO: 2003898 - RNA, 21 nt, Human
cccagugcccacaggaucagu

SEQ ID NO: 2003899 - RNA, 10 nt, Human
cccagucugg

SEQ ID NO: 2003900 - RNA, 18 nt, Human
cccagucuggaaugcagu

SEQ ID NO: 2003901 - RNA, 19 nt, Human
cccagucuggaaugcagug

SEQ ID NO: 2003902 - RNA, 13 nt, Human
cccaucucacaca

SEQ ID NO: 2003903 - RNA, 18 nt, Human
cccaucucacacaugagc

SEQ ID NO: 2003904 - RNA, 13 nt, Human
cccaucugugaau

SEQ ID NO: 2003905 - RNA, 16 nt, Human
cccaucugugaauaag

SEQ ID NO: 2003906 - RNA, 20 nt, Human
cccaucugugaaaggaaaga

SEQ ID NO: 2003907 - RNA, 13 nt, Human
cccaugcugcccu

SEQ ID NO: 2003908 - RNA, 12 nt, Human
cccaugcugccc

SEQ ID NO: 2003909 - RNA, 14 nt, Human
cccaugcugcccug

SEQ ID NO: 2003910 - RNA, 15 nt, Human
cccaugagccucagc

SEQ ID NO: 2003911 - RNA, 16 nt, Human
cccaugagccucagca

SEQ ID NO: 2003912 - RNA, 20 nt, Human
cccaugagccucagcauccu

SEQ ID NO: 2003913 - RNA, 19 nt, Human
cccauguauggccaggaag

SEQ ID NO: 2003914 - RNA, 20 nt, Human
cccauguauggccaggaagu

SEQ ID NO: 2003915 - RNA, 16 nt, Human
cccaugucucgacuca

SEQ ID NO: 2003916 - RNA, 17 nt, Human
cccaugucucgacucau

SEQ ID NO: 2003917 - RNA, 14 nt, Human
cccaugugagcugc

SEQ ID NO: 2003918 - RNA, 16 nt, Human
cccaugugagcugcug

SEQ ID NO: 2003919 - RNA, 18 nt, Human
cccaugugagcugcugcc

SEQ ID NO: 2003920 - RNA, 22 nt, Human
cccaugugagcugcugccauga

SEQ ID NO: 2003921 - RNA, 19 nt, Human
cccauguggagucagccuc

SEQ ID NO: 2003922 - RNA, 21 nt, Human
ccccaaauggaaaugggcaga

SEQ ID NO: 2003923 - RNA, 20 nt, Human
ccaugugagcugcugccaug

SEQ ID NO: 2003924 - RNA, 21 nt, Human
ccaugugagcugcugccauga

SEQ ID NO: 2003925 - RNA, 22 nt, Human
ccaugugagcugcugccaugaa

SEQ ID NO: 2003926 - RNA, 13 nt, Human
ccauguuggccag

SEQ ID NO: 2003927 - RNA, 14 nt, Human
ccauguuggccagg

SEQ ID NO: 2003928 - RNA, 22 nt, Human
ccauggagugggucuggaggac

SEQ ID NO: 2003929 - RNA, 23 nt, Human
ccauggcacucuauguucuaaga

SEQ ID NO: 2003930 - RNA, 13 nt, Human
ccaugugccaggu

SEQ ID NO: 2003931 - RNA, 19 nt, Human
ccaugugagcugcugccau

SEQ ID NO: 2003932 - RNA, 18 nt, Human
ccaugcuccuggcccacu

SEQ ID NO: 2003933 - RNA, 15 nt, Human
ccaugcuccuggccc

SEQ ID NO: 2003934 - RNA, 15 nt, Human
ccaugcugcccugug

SEQ ID NO: 2003935 - RNA, 17 nt, Human
ccaugcugcccugugag

SEQ ID NO: 2003936 - RNA, 16 nt, Human
ccaugcugcccuguga

SEQ ID NO: 2003937 - RNA, 14 nt, Human
ccaugcugccucca

SEQ ID NO: 2003938 - RNA, 23 nt, Human
ccaucuuuuuaaccucuguucag

SEQ ID NO: 2003939 - RNA, 14 nt, Human
ccaugaaagaaaac

SEQ ID NO: 2003940 - RNA, 22 nt, Human
ccaugaacugucaagugugugu

SEQ ID NO: 2003941 - RNA, 13 nt, Human
ccaugcuccuggc

SEQ ID NO: 2003942 - RNA, 12 nt, Human
ccauguggacuu

SEQ ID NO: 2003943 - RNA, 18 nt, Human
ccauguuggccaggcugg

SEQ ID NO: 2003944 - RNA, 15 nt, Human
ccauguuggccaggc

SEQ ID NO: 2003945 - RNA, 19 nt, Human
ccauguuggccaggcuggu

SEQ ID NO: 2003946 - RNA, 21 nt, Human
ccauguuggccaggcuggucu

SEQ ID NO: 2003947 - RNA, 15 nt, Human
cccaccuggccucug

SEQ ID NO: 2003948 - RNA, 12 nt, Human
cccaccuggccu

SEQ ID NO: 2003949 - RNA, 12 nt, Human
cccaccugcgcu

SEQ ID NO: 2003950 - RNA, 16 nt, Human
cccaccuuggcugcag

SEQ ID NO: 2003951 - RNA, 17 nt, Human
cccaccuuggcugcagg

SEQ ID NO: 2003952 - RNA, 19 nt, Human
cccaccuuggcugcaggga

SEQ ID NO: 2003953 - RNA, 20 nt, Human
cccaccuuggcugcagggag

SEQ ID NO: 2003954 - RNA, 14 nt, Human
cccacgcccccacu

SEQ ID NO: 2003955 - RNA, 13 nt, Human
cccacgcccccac

SEQ ID NO: 2003956 - RNA, 12 nt, Human
cccaccuggccc

SEQ ID NO: 2003957 - RNA, 13 nt, Human
cccaccuggcccu

SEQ ID NO: 2003958 - RNA, 18 nt, Human
cccaccuggcccucucug

SEQ ID NO: 2003959 - RNA, 15 nt, Human
cccacgcccccacug

SEQ ID NO: 2003960 - RNA, 17 nt, Human
cccagacccuggaggaa

SEQ ID NO: 2003961 - RNA, 20 nt, Human
cccagacgccugauauugaa

SEQ ID NO: 2003962 - RNA, 19 nt, Human
cccagagagaagagcccca

SEQ ID NO: 2003963 - RNA, 21 nt, Human
cccagagagaagagccccacu

SEQ ID NO: 2003964 - RNA, 22 nt, Human
cccagagagaagagccccacuc

SEQ ID NO: 2003965 - RNA, 18 nt, Human
cccaggaggccagccuug

SEQ ID NO: 2003966 - RNA, 16 nt, Human
cccaggaccccugagu

SEQ ID NO: 2003967 - RNA, 13 nt, Human
cccaggagccccg

SEQ ID NO: 2003968 - RNA, 14 nt, Human
cccaggagccccga

SEQ ID NO: 2003969 - RNA, 14 nt, Human
cccaggaggccagc

SEQ ID NO: 2003970 - RNA, 12 nt, Human
cccaggagccca

SEQ ID NO: 2003971 - RNA, 13 nt, Human
cccaggagcccau

SEQ ID NO: 2003972 - RNA, 21 nt, Human
cccagcuaugguucucucgca

SEQ ID NO: 2003973 - RNA, 14 nt, Human
cccagcgagcccug

SEQ ID NO: 2003974 - RNA, 23 nt, Human
cccagccugggauaggggcagag

SEQ ID NO: 2003975 - RNA, 18 nt, Human
cccagcucugguccauag

SEQ ID NO: 2003976 - RNA, 16 nt, Human
cccagcucugguccau

SEQ ID NO: 2003977 - RNA, 15 nt, Human
cccagcucuggucca

SEQ ID NO: 2003978 - RNA, 14 nt, Human
cccagcucuggucc

SEQ ID NO: 2003979 - RNA, 13 nt, Human
cccagcucugguc

SEQ ID NO: 2003980 - RNA, 12 nt, Human
cccagcucuggu

SEQ ID NO: 2003981 - RNA, 15 nt, Human
cccagccccauccuc

SEQ ID NO: 2003982 - RNA, 14 nt, Human
cccagccccauccu

SEQ ID NO: 2003983 - RNA, 14 nt, Human
cccagccccauccc

SEQ ID NO: 2003984 - RNA, 13 nt, Human
cccagccccaucc

SEQ ID NO: 2003985 - RNA, 19 nt, Human
cccagccccauccucugua

SEQ ID NO: 2003986 - RNA, 18 nt, Human
cccagccccauccucugu

SEQ ID NO: 2003987 - RNA, 13 nt, Human
cccagccucuuuc

SEQ ID NO: 2003988 - RNA, 18 nt, Human
cccagccuccaagcucca

SEQ ID NO: 2003989 - RNA, 20 nt, Human
cccagccuccaagcuccauc

SEQ ID NO: 2003990 - RNA, 23 nt, Human
cccagcccuccuuaucaaaggac

SEQ ID NO: 2003991 - RNA, 12 nt, Human
cccagccccauc

SEQ ID NO: 2003992 - RNA, 11 nt, Human
cccagccccau

SEQ ID NO: 2003993 - RNA, 17 nt, Human
cccagccccaaugaaca

SEQ ID NO: 2003994 - RNA, 20 nt, Human
cccagaggccgagagcuaug

SEQ ID NO: 2003995 - RNA, 13 nt, Human
cccagccccaaug

SEQ ID NO: 2003996 - RNA, 16 nt, Human
cccagaggcuggguga

SEQ ID NO: 2003997 - RNA, 15 nt, Human
ccauauuuuuuuccu

SEQ ID NO: 2003998 - RNA, 16 nt, Human
ccauauuuuuuuccuu

SEQ ID NO: 2003999 - RNA, 17 nt, Human
ccauauuuuuuuccuua

SEQ ID NO: 2004000 - RNA, 22 nt, Human
ccauauuuuuuuccuuacauaa

SEQ ID NO: 2004001 - RNA, 12 nt, Human
ccaucacccgcu

SEQ ID NO: 2004002 - RNA, 22 nt, Human
ccaucaacuaaaguuguacuuu

SEQ ID NO: 2004003 - RNA, 23 nt, Human
ccauagagagcaagacgcugugc

SEQ ID NO: 2004004 - RNA, 21 nt, Human
ccaguggggccugaggcuccu

SEQ ID NO: 2004005 - RNA, 16 nt, Human
ccauagaguacacugc

SEQ ID NO: 2004006 - RNA, 19 nt, Human
ccauagaguacacugccug

SEQ ID NO: 2004007 - RNA, 20 nt, Human
ccauagaguacacugccugc

SEQ ID NO: 2004008 - RNA, 22 nt, Human
ccauagaguacacugccugccu

SEQ ID NO: 2004009 - RNA, 19 nt, Human
ccauauuaccacagacaua

SEQ ID NO: 2004010 - RNA, 15 nt, Human
ccauauucuguuggc

SEQ ID NO: 2004011 - RNA, 18 nt, Human
ccauauucuguuggccag

SEQ ID NO: 2004012 - RNA, 19 nt, Human
ccauauuagaaaacuuugu

SEQ ID NO: 2004013 - RNA, 20 nt, Human
ccauauuagaaaacuuuguu

SEQ ID NO: 2004014 - RNA, 22 nt, Human
ccauauuagaaaacuuuguuag

SEQ ID NO: 2004015 - RNA, 16 nt, Human
ccaucgcugucaucuc

SEQ ID NO: 2004016 - RNA, 22 nt, Human
ccaucuuuuguuacucuuggga

SEQ ID NO: 2004017 - RNA, 20 nt, Human
ccaucuuuuuaaccucuguu

SEQ ID NO: 2004018 - RNA, 16 nt, Human
ccauccugaggcucca

SEQ ID NO: 2004019 - RNA, 15 nt, Human
ccauccugaggcucc

SEQ ID NO: 2004020 - RNA, 21 nt, Human
ccauccucuguacagagccca

SEQ ID NO: 2004021 - RNA, 22 nt, Human
ccaucauguuuacagaggacag

SEQ ID NO: 2004022 - RNA, 20 nt, Human
ccaucauguuuacagaggac

SEQ ID NO: 2004023 - RNA, 14 nt, Human
ccaucaugucuggc

SEQ ID NO: 2004024 - RNA, 16 nt, Human
ccaucaugucuggcua

SEQ ID NO: 2004025 - RNA, 18 nt, Human
ccaggccuuaucuccaag

SEQ ID NO: 2004026 - RNA, 12 nt, Human
ccaggccugccu

SEQ ID NO: 2004027 - RNA, 19 nt, Human
ccagggacagauccagcag

SEQ ID NO: 2004028 - RNA, 23 nt, Human
ccagggacagaggggguggccuc

SEQ ID NO: 2004029 - RNA, 22 nt, Human
ccaguggauucuuguuuugcuu

SEQ ID NO: 2004030 - RNA, 19 nt, Human
ccaguggaugccacagccc

SEQ ID NO: 2004031 - RNA, 21 nt, Human
ccaguggaugccacagcccag

SEQ ID NO: 2004032 - RNA, 13 nt, Human
ccaguggcagggc

SEQ ID NO: 2004033 - RNA, 14 nt, Human
ccaguggcagggca

SEQ ID NO: 2004034 - RNA, 13 nt, Human
ccaggagcagcca

SEQ ID NO: 2004035 - RNA, 12 nt, Human
ccaggagcagcc

SEQ ID NO: 2004036 - RNA, 22 nt, Human
ccaggacccugccaggcacagg

SEQ ID NO: 2004037 - RNA, 23 nt, Human
ccaggacccugccaggcacaggc

SEQ ID NO: 2004038 - RNA, 13 nt, Human
ccaggacccugcc

SEQ ID NO: 2004039 - RNA, 14 nt, Human
ccaggacccugcca

SEQ ID NO: 2004040 - RNA, 15 nt, Human
ccaggacccugccag

SEQ ID NO: 2004041 - RNA, 16 nt, Human
ccaggacccugccagg

SEQ ID NO: 2004042 - RNA, 17 nt, Human
ccaggacccugccaggc

SEQ ID NO: 2004043 - RNA, 18 nt, Human
ccaggacccugccaggca

SEQ ID NO: 2004044 - RNA, 19 nt, Human
ccaggacccugccaggcac

SEQ ID NO: 2004045 - RNA, 20 nt, Human
ccaggacccugccaggcaca

SEQ ID NO: 2004046 - RNA, 21 nt, Human
ccaggacccugccaggcacag

SEQ ID NO: 2004047 - RNA, 19 nt, Human
ccaggaagccagcaggcuc

SEQ ID NO: 2004048 - RNA, 17 nt, Human
ccaggaagccagcaggc

SEQ ID NO: 2004049 - RNA, 15 nt, Human
ccaggaagccagcag

SEQ ID NO: 2004050 - RNA, 14 nt, Human
ccaggaagccagca

SEQ ID NO: 2004051 - RNA, 22 nt, Human
ccagcugugcucuggacaggca

SEQ ID NO: 2004052 - RNA, 23 nt, Human
ccagcugugcucuggacaggcau

SEQ ID NO: 2004053 - RNA, 14 nt, Human
ccaggagcagccac

SEQ ID NO: 2004054 - RNA, 14 nt, Human
ccaggccagaggga

SEQ ID NO: 2004055 - RNA, 21 nt, Human
ccaggccagagggagugacag

SEQ ID NO: 2004056 - RNA, 21 nt, Human
ccaggccccugccacccuggg

SEQ ID NO: 2004057 - RNA, 23 nt, Human
ccaggccccugccacccugggga

SEQ ID NO: 2004058 - RNA, 19 nt, Human
ccaggccccugccacccug

SEQ ID NO: 2004059 - RNA, 19 nt, Human
ccaggccuccuacagcuug

SEQ ID NO: 2004060 - RNA, 18 nt, Human
ccaggccuccuacagcuu

SEQ ID NO: 2004061 - RNA, 13 nt, Human
ccaggccuccuac

SEQ ID NO: 2004062 - RNA, 18 nt, Human
ccaggccuacuccugucu

SEQ ID NO: 2004063 - RNA, 21 nt, Human
ccaggccuacuccugucuucu

SEQ ID NO: 2004064 - RNA, 23 nt, Human
ccaggccuacuccugucuucugc

SEQ ID NO: 2004065 - RNA, 19 nt, Human
ccaggcccucugcccacuc

SEQ ID NO: 2004066 - RNA, 18 nt, Human
ccaggcccucugcccacu

SEQ ID NO: 2004067 - RNA, 17 nt, Human
ccaggcccucugcccac

SEQ ID NO: 2004068 - RNA, 16 nt, Human
ccaggcccucugccca

SEQ ID NO: 2004069 - RNA, 15 nt, Human
ccagcugcuugggcu

SEQ ID NO: 2004070 - RNA, 13 nt, Human
ccagcugcuuggg

SEQ ID NO: 2004071 - RNA, 20 nt, Human
ccagcugcaccccuuccugg

SEQ ID NO: 2004072 - RNA, 21 nt, Human
ccagcugcaccccuuccuggg

SEQ ID NO: 2004073 - RNA, 22 nt, Human
ccagcugcaccccuuccugggc

SEQ ID NO: 2004074 - RNA, 23 nt, Human
ccagcugcaccccuuccugggca

SEQ ID NO: 2004075 - RNA, 18 nt, Human
ccagcugcuugggcuuca

SEQ ID NO: 2004076 - RNA, 16 nt, Human
ccagcugcuugggcuu

SEQ ID NO: 2004077 - RNA, 12 nt, Human
ccagcuggccgg

SEQ ID NO: 2004078 - RNA, 14 nt, Human
ccagcuggccggga

SEQ ID NO: 2004079 - RNA, 20 nt, Human
ccagcuggccgggagccuga

SEQ ID NO: 2004080 - RNA, 16 nt, Human
ccagcuggguuggaaa

SEQ ID NO: 2004081 - RNA, 17 nt, Human
ccagcuggguuggaaaa

SEQ ID NO: 2004082 - RNA, 18 nt, Human
ccagcugugcucuggaca

SEQ ID NO: 2004083 - RNA, 20 nt, Human
ccagcugugcucuggacagg

SEQ ID NO: 2004084 - RNA, 21 nt, Human
ccagcugugcucuggacaggc

SEQ ID NO: 2004085 - RNA, 16 nt, Human
ccagcucuuccuagcu

SEQ ID NO: 2004086 - RNA, 20 nt, Human
ccagcucuuccuagcuggag

SEQ ID NO: 2004087 - RNA, 13 nt, Human
ccagcugcacccc

SEQ ID NO: 2004088 - RNA, 14 nt, Human
ccagcugcaccccu

SEQ ID NO: 2004089 - RNA, 17 nt, Human
ccagcugcaccccuucc

SEQ ID NO: 2004090 - RNA, 19 nt, Human
ccagcugcaccccuuccug

SEQ ID NO: 2004091 - RNA, 13 nt, Human
ccagccucuuucc

SEQ ID NO: 2004092 - RNA, 14 nt, Human
ccagccucuuuccc

SEQ ID NO: 2004093 - RNA, 15 nt, Human
ccagccucuuucccu

SEQ ID NO: 2004094 - RNA, 14 nt, Human
ccacacacacaaaa

SEQ ID NO: 2004095 - RNA, 19 nt, Human
ccagccucguuggaagagg

SEQ ID NO: 2004096 - RNA, 22 nt, Human
ccagccucguuggaagaggaac

SEQ ID NO: 2004097 - RNA, 14 nt, Human
ccaaagaugcagcc

SEQ ID NO: 2004098 - RNA, 13 nt, Human
ccaaagaugcagc

SEQ ID NO: 2004099 - RNA, 22 nt, Human
ccaaauucuuucaguggcuacc

SEQ ID NO: 2004100 - RNA, 15 nt, Human
ccaaauucuuucagu

SEQ ID NO: 2004101 - RNA, 14 nt, Human
ccaaauugucaccu

SEQ ID NO: 2004102 - RNA, 21 nt, Human
ccaaauugucaccugcuucuc

SEQ ID NO: 2004103 - RNA, 22 nt, Human
ccaaauugucaccugcuucucu

SEQ ID NO: 2004104 - RNA, 14 nt, Human
ccaacauacuccca

SEQ ID NO: 2004105 - RNA, 16 nt, Human
ccaacaucaacaucuu

SEQ ID NO: 2004106 - RNA, 13 nt, Human
ccaacauccacuc

SEQ ID NO: 2004107 - RNA, 14 nt, Human
ccaacauccacucu

SEQ ID NO: 2004108 - RNA, 15 nt, Human
ccaacauccacucuc

SEQ ID NO: 2004109 - RNA, 17 nt, Human
ccaacauccacucucuc

SEQ ID NO: 2004110 - RNA, 15 nt, Human
ccaacccucaucacc

SEQ ID NO: 2004111 - RNA, 13 nt, Human
ccaacccucauca

SEQ ID NO: 2004112 - RNA, 18 nt, Human
ccaacccuggcacccagg

SEQ ID NO: 2004113 - RNA, 14 nt, Human
ccaaccucgcucca

SEQ ID NO: 2004114 - RNA, 13 nt, Human
ccaaccucuuccu

SEQ ID NO: 2004115 - RNA, 14 nt, Human
ccaaccucuuccuc

SEQ ID NO: 2004116 - RNA, 15 nt, Human
ccaaccucuuccucc

SEQ ID NO: 2004117 - RNA, 17 nt, Human
ccaaccucuuccuccug

SEQ ID NO: 2004118 - RNA, 15 nt, Human
ccaagaccuucuccu

SEQ ID NO: 2004119 - RNA, 12 nt, Human
ccaagagccuga

SEQ ID NO: 2004120 - RNA, 22 nt, Human
ccaagagcaaggaagguaaaaa

SEQ ID NO: 2004121 - RNA, 20 nt, Human
ccaagagcaaggaagguaaa

SEQ ID NO: 2004122 - RNA, 19 nt, Human
ccacaagagcccaggccuc

SEQ ID NO: 2004123 - RNA, 18 nt, Human
ccacaagagcccaggccu

SEQ ID NO: 2004124 - RNA, 17 nt, Human
ccacaagagcccaggcc

SEQ ID NO: 2004125 - RNA, 16 nt, Human
ccacaagagcccaggc

SEQ ID NO: 2004126 - RNA, 21 nt, Human
ccacaagagcccaggccuccu

SEQ ID NO: 2004127 - RNA, 20 nt, Human
ccacaagagcccaggccucc

SEQ ID NO: 2004128 - RNA, 15 nt, Human
ccacaaucaccgaug

SEQ ID NO: 2004129 - RNA, 21 nt, Human
ccacacaacauccaaguggcc

SEQ ID NO: 2004130 - RNA, 15 nt, Human
ccacacaagugcagu

SEQ ID NO: 2004131 - RNA, 12 nt, Human
ccacacacacaa

SEQ ID NO: 2004132 - RNA, 13 nt, Human
ccacacacacaaa

SEQ ID NO: 2004133 - RNA, 20 nt, Human
ccacaagggugcccaccucu

SEQ ID NO: 2004134 - RNA, 13 nt, Human
ccacaaggaagaa

SEQ ID NO: 2004135 - RNA, 16 nt, Human
ccacaaggaagaaauu

SEQ ID NO: 2004136 - RNA, 20 nt, Human
ccacaaguuaaauaaaucau

SEQ ID NO: 2004137 - RNA, 15 nt, Human
ccacaaguuaaauaa

SEQ ID NO: 2004138 - RNA, 18 nt, Human
ccaaggcuagaaccaccu

SEQ ID NO: 2004139 - RNA, 14 nt, Human
ccaagcuccaucuc

SEQ ID NO: 2004140 - RNA, 17 nt, Human
ccaaggcccccugccug

SEQ ID NO: 2004141 - RNA, 19 nt, Human
ccaaggcccccugccugcc

SEQ ID NO: 2004142 - RNA, 20 nt, Human
ccaaggcccccugccugccc

SEQ ID NO: 2004143 - RNA, 21 nt, Human
ccaaggcccccugccugcccu

SEQ ID NO: 2004144 - RNA, 13 nt, Human
ccaagcucccagg

SEQ ID NO: 2004145 - RNA, 12 nt, Human
ccaagcucccag

SEQ ID NO: 2004146 - RNA, 23 nt, Human
ccaagccguggcuucccgcucag

SEQ ID NO: 2004147 - RNA, 13 nt, Human
ccaagcaggaggc

SEQ ID NO: 2004148 - RNA, 14 nt, Human
ccaagcaggaggcu

SEQ ID NO: 2004149 - RNA, 14 nt, Human
ccaagcaggacaug

SEQ ID NO: 2004150 - RNA, 14 nt, Human
ccaagccguggcuu

SEQ ID NO: 2004151 - RNA, 15 nt, Human
ccaagccguggcuuc

SEQ ID NO: 2004152 - RNA, 16 nt, Human
ccaagccguggcuucc

SEQ ID NO: 2004153 - RNA, 17 nt, Human
ccaagccguggcuuccc

SEQ ID NO: 2004154 - RNA, 21 nt, Human
ccaagccguggcuucccgcuc

SEQ ID NO: 2004155 - RNA, 12 nt, Human
ccaagaggcugc

SEQ ID NO: 2004156 - RNA, 13 nt, Human
ccaagaggcugca

SEQ ID NO: 2004157 - RNA, 16 nt, Human
ccaagagccugagagu

SEQ ID NO: 2004158 - RNA, 23 nt, Human
ccaagcagagguugggaggccau

SEQ ID NO: 2004159 - RNA, 20 nt, Human
ccaauauucauagcagcuua

SEQ ID NO: 2004160 - RNA, 16 nt, Human
ccaaguggcucccaca

SEQ ID NO: 2004161 - RNA, 13 nt, Human
ccaaguggcuccc

SEQ ID NO: 2004162 - RNA, 23 nt, Human
ccaaguggagccugacagccaga

SEQ ID NO: 2004163 - RNA, 18 nt, Human
ccaaguggagccugacag

SEQ ID NO: 2004164 - RNA, 22 nt, Human
ccaaguggagccugacagccag

SEQ ID NO: 2004165 - RNA, 19 nt, Human
ccaaggcugauuaaaccaa

SEQ ID NO: 2004166 - RNA, 16 nt, Human
ccaaggcucugagcaa

SEQ ID NO: 2004167 - RNA, 14 nt, Human
ccaaggcuggggga

SEQ ID NO: 2004168 - RNA, 14 nt, Human
ccaagguucugggu

SEQ ID NO: 2004169 - RNA, 10 nt, Human
ccaauuucuc

SEQ ID NO: 2004170 - RNA, 21 nt, Human
ccaauuuuaacuuagagcuuu

SEQ ID NO: 2004171 - RNA, 12 nt, Human
ccaauuuuccuu

SEQ ID NO: 2004172 - RNA, 23 nt, Human
ccaauuuuuuaagugaaaauaua

SEQ ID NO: 2004173 - RNA, 12 nt, Human
ccaauauuuaaa

SEQ ID NO: 2004174 - RNA, 16 nt, Human
ccacaagaaaugaaag

SEQ ID NO: 2004175 - RNA, 22 nt, Human
ccacaagaaaugaaagcaggga

SEQ ID NO: 2004176 - RNA, 13 nt, Human
ccacaagagccca

SEQ ID NO: 2004177 - RNA, 16 nt, Human
ccacaagacccuugug

SEQ ID NO: 2004178 - RNA, 18 nt, Human
ccacaaaggagagcuagc

SEQ ID NO: 2004179 - RNA, 13 nt, Human
ccacaacacacag

SEQ ID NO: 2004180 - RNA, 19 nt, Human
cauugaaaucuuuuugcuu

SEQ ID NO: 2004181 - RNA, 22 nt, Human
cauugaaaauuauuaaucagaa

SEQ ID NO: 2004182 - RNA, 22 nt, Human
cauugaccugaggcccuucucu

SEQ ID NO: 2004183 - RNA, 13 nt, Human
cauugaccugagg

SEQ ID NO: 2004184 - RNA, 16 nt, Human
cauuuccguaauucuu

SEQ ID NO: 2004185 - RNA, 14 nt, Human
cauuuccccagggc

SEQ ID NO: 2004186 - RNA, 15 nt, Human
cauuuccccagggca

SEQ ID NO: 2004187 - RNA, 16 nt, Human
cauuuccccagggcac

SEQ ID NO: 2004188 - RNA, 17 nt, Human
cauuuccccagggcacg

SEQ ID NO: 2004189 - RNA, 16 nt, Human
cauuucucauguugaa

SEQ ID NO: 2004190 - RNA, 17 nt, Human
cauuucucauguugaaa

SEQ ID NO: 2004191 - RNA, 19 nt, Human
cauuuccguaauucuuauu

SEQ ID NO: 2004192 - RNA, 22 nt, Human
cauuuccguaauucuuauucca

SEQ ID NO: 2004193 - RNA, 19 nt, Human
cauuucugauacuuucugu

SEQ ID NO: 2004194 - RNA, 11 nt, Human
cauuucugauu

SEQ ID NO: 2004195 - RNA, 21 nt, Human
cauuucuuccacaagagccca

SEQ ID NO: 2004196 - RNA, 21 nt, Human
cauuuaaaagauacaguuacu

SEQ ID NO: 2004197 - RNA, 21 nt, Human
cauugcaugccgggugcagca

SEQ ID NO: 2004198 - RNA, 16 nt, Human
cauugcauauaacuua

SEQ ID NO: 2004199 - RNA, 22 nt, Human
cauugauuugauuuuuauuauu

SEQ ID NO: 2004200 - RNA, 14 nt, Human
cauugcaacaaaau

SEQ ID NO: 2004201 - RNA, 15 nt, Human
cauugcaacaaaaua

SEQ ID NO: 2004202 - RNA, 21 nt, Human
cauugcaacaaaauacauucu

SEQ ID NO: 2004203 - RNA, 18 nt, Human
cauugagaccgugaagau

SEQ ID NO: 2004204 - RNA, 13 nt, Human
cauugauuugauu

SEQ ID NO: 2004205 - RNA, 16 nt, Human
cauugauuugauuuuu

SEQ ID NO: 2004206 - RNA, 10 nt, Human
cauuuagaau

SEQ ID NO: 2004207 - RNA, 12 nt, Human
cauuuagaaugg

SEQ ID NO: 2004208 - RNA, 19 nt, Human
cauuuagaauggugauuuu

SEQ ID NO: 2004209 - RNA, 18 nt, Human
cauuucccaacacaaaga

SEQ ID NO: 2004210 - RNA, 17 nt, Human
cauuuccauguaugcau

SEQ ID NO: 2004211 - RNA, 20 nt, Human
cauuuagaauggugauuuua

SEQ ID NO: 2004212 - RNA, 21 nt, Human
cauuuagaauggugauuuuaa

SEQ ID NO: 2004213 - RNA, 12 nt, Human
cauuuccaugua

SEQ ID NO: 2004214 - RNA, 14 nt, Human
cauuuccauguaug

SEQ ID NO: 2004215 - RNA, 15 nt, Human
cauuuccauguaugc

SEQ ID NO: 2004216 - RNA, 16 nt, Human
cauuuccauguaugca

SEQ ID NO: 2004217 - RNA, 17 nt, Human
cauuuacuuuguguuca

SEQ ID NO: 2004218 - RNA, 21 nt, Human
cauuuacuuuguguucaccuu

SEQ ID NO: 2004219 - RNA, 23 nt, Human
cauuucuuccacaagagcccagg

SEQ ID NO: 2004220 - RNA, 18 nt, Human
cauuugaggucuguucuu

SEQ ID NO: 2004221 - RNA, 19 nt, Human
cauuugaggucuguucuuu

SEQ ID NO: 2004222 - RNA, 17 nt, Human
cauuugaggucuguucu

SEQ ID NO: 2004223 - RNA, 16 nt, Human
cauuugagcagggcuc

SEQ ID NO: 2004224 - RNA, 14 nt, Human
cauuugagcagggc

SEQ ID NO: 2004225 - RNA, 12 nt, Human
cauuucugauuu

SEQ ID NO: 2004226 - RNA, 18 nt, Human
cauuucugccuuuuguuc

SEQ ID NO: 2004227 - RNA, 24 nt, Human
cauuucugccuuuuguucauuuca

SEQ ID NO: 2004228 - RNA, 14 nt, Human
ccaaagaaugaauu

SEQ ID NO: 2004229 - RNA, 13 nt, Human
ccaaagacaaaua

SEQ ID NO: 2004230 - RNA, 14 nt, Human
ccaaagacaaauag

SEQ ID NO: 2004231 - RNA, 15 nt, Human
ccaaagacaaauagu

SEQ ID NO: 2004232 - RNA, 16 nt, Human
ccaaagacaaauagua

SEQ ID NO: 2004233 - RNA, 18 nt, Human
ccaaaauaaaacuuuuua

SEQ ID NO: 2004234 - RNA, 21 nt, Human
ccaaaauaaaacuuuuuaaaa

SEQ ID NO: 2004235 - RNA, 20 nt, Human
cauuuuuaguagagacaggg

SEQ ID NO: 2004236 - RNA, 14 nt, Human
ccaaaaguuauuaa

SEQ ID NO: 2004237 - RNA, 20 nt, Human
cauuuuuauaccuguuuaaa

SEQ ID NO: 2004238 - RNA, 21 nt, Human
cauuuuuauaccuguuuaaau

SEQ ID NO: 2004239 - RNA, 22 nt, Human
cauuuuuaucaggauuuccucu

SEQ ID NO: 2004240 - RNA, 18 nt, Human
ccaaaauaagaaaagaug

SEQ ID NO: 2004241 - RNA, 14 nt, Human
ccaaaauaagaaaa

SEQ ID NO: 2004242 - RNA, 16 nt, Human
ccaaaauaagaaaaga

SEQ ID NO: 2004243 - RNA, 17 nt, Human
ccaaaauaagaaaagau

SEQ ID NO: 2004244 - RNA, 22 nt, Human
cauuuuggugucuuucucuuuu

SEQ ID NO: 2004245 - RNA, 19 nt, Human
cauuuuggcgcucgaaguu

SEQ ID NO: 2004246 - RNA, 23 nt, Human
cauuuugggguacccacugcucu

SEQ ID NO: 2004247 - RNA, 15 nt, Human
cauuuuuaagugcug

SEQ ID NO: 2004248 - RNA, 20 nt, Human
cauuuuuaagugcugcauuu

SEQ ID NO: 2004249 - RNA, 19 nt, Human
cauuuuuaguagagacagg

SEQ ID NO: 2004250 - RNA, 18 nt, Human
cauuuuuaguagagacag

SEQ ID NO: 2004251 - RNA, 24 nt, Human
cauuuugcuaaaugugaaugauga

SEQ ID NO: 2004252 - RNA, 12 nt, Human
cauuuugcuuua

SEQ ID NO: 2004253 - RNA, 13 nt, Human
cauuuugcuuuaa

SEQ ID NO: 2004254 - RNA, 14 nt, Human
cauuuugcuuuaau

SEQ ID NO: 2004255 - RNA, 18 nt, Human
cauuuugcuuuaauuuua

SEQ ID NO: 2004256 - RNA, 21 nt, Human
cauuuugcuaaaugugaauga

SEQ ID NO: 2004257 - RNA, 18 nt, Human
cauuuugcuaaaugugaa

SEQ ID NO: 2004258 - RNA, 12 nt, Human
cauuuuggcgcu

SEQ ID NO: 2004259 - RNA, 20 nt, Human
cauuuugggguacccacugc

SEQ ID NO: 2004260 - RNA, 21 nt, Human
cauuuugggguacccacugcu

SEQ ID NO: 2004261 - RNA, 22 nt, Human
cauuuugggguacccacugcuc

SEQ ID NO: 2004262 - RNA, 19 nt, Human
cauuuuauuuuauuaugca

SEQ ID NO: 2004263 - RNA, 21 nt, Human
cauuuuauuuuauuaugcaug

SEQ ID NO: 2004264 - RNA, 16 nt, Human
cauuuucuuaauccag

SEQ ID NO: 2004265 - RNA, 22 nt, Human
cauuugaggucuguucuuucca

SEQ ID NO: 2004266 - RNA, 18 nt, Human
cauguuuuucuucucccu

SEQ ID NO: 2004267 - RNA, 15 nt, Human
cauguuuuguuuacg

SEQ ID NO: 2004268 - RNA, 21 nt, Human
cauuaaagccugaguuugcuu

SEQ ID NO: 2004269 - RNA, 21 nt, Human
cauuaccucagugagaagcca

SEQ ID NO: 2004270 - RNA, 22 nt, Human
cauuaccucagugagaagccag

SEQ ID NO: 2004271 - RNA, 13 nt, Human
cauuaauguugau

SEQ ID NO: 2004272 - RNA, 14 nt, Human
cauuaauguugauu

SEQ ID NO: 2004273 - RNA, 16 nt, Human
cauuaauguugauuuc

SEQ ID NO: 2004274 - RNA, 17 nt, Human
cauuaauguugauuucu

SEQ ID NO: 2004275 - RNA, 20 nt, Human
cauuaauguugauuucuagu

SEQ ID NO: 2004276 - RNA, 17 nt, Human
cauuagcaguuugcuuu

SEQ ID NO: 2004277 - RNA, 18 nt, Human
cauuagcaaaaaaaguug

SEQ ID NO: 2004278 - RNA, 19 nt, Human
cauuagcaaaaaaaguugu

SEQ ID NO: 2004279 - RNA, 20 nt, Human
cauuagcaaaaaaaguugua

SEQ ID NO: 2004280 - RNA, 22 nt, Human
cauuagcaaaaaaaguuguaug

SEQ ID NO: 2004281 - RNA, 16 nt, Human
cauuagcaaaaaaagu

SEQ ID NO: 2004282 - RNA, 17 nt, Human
cauuagcaaaaaaaguu

SEQ ID NO: 2004283 - RNA, 15 nt, Human
cauuaccucuuugga

SEQ ID NO: 2004284 - RNA, 17 nt, Human
cauuaccucuuuggaaa

SEQ ID NO: 2004285 - RNA, 23 nt, Human
cauuaccucuuuggaaaaggaag

SEQ ID NO: 2004286 - RNA, 15 nt, Human
cauguuuugcaugua

SEQ ID NO: 2004287 - RNA, 16 nt, Human
cauguuuugcauguaa

SEQ ID NO: 2004288 - RNA, 22 nt, Human
cauguuuucaaauggaguugga

SEQ ID NO: 2004289 - RNA, 13 nt, Human
cauguuuucaaau

SEQ ID NO: 2004290 - RNA, 16 nt, Human
cauguuuucaaaugga

SEQ ID NO: 2004291 - RNA, 20 nt, Human
cauguuuucaaauggaguug

SEQ ID NO: 2004292 - RNA, 23 nt, Human
cauguuugauguaucugagcagg

SEQ ID NO: 2004293 - RNA, 22 nt, Human
cauguuucuuuguaaugaaaac

SEQ ID NO: 2004294 - RNA, 15 nt, Human
cauguuugugauuga

SEQ ID NO: 2004295 - RNA, 14 nt, Human
cauguuuauguaaa

SEQ ID NO: 2004296 - RNA, 21 nt, Human
cauguuucuuuguaaugaaaa

SEQ ID NO: 2004297 - RNA, 20 nt, Human
cauguuucuuuguaaugaaa

SEQ ID NO: 2004298 - RNA, 15 nt, Human
cauguggagucagcc

SEQ ID NO: 2004299 - RNA, 18 nt, Human
cauguggagucagccucg

SEQ ID NO: 2004300 - RNA, 20 nt, Human
cauguggcuugaauuaagaa

SEQ ID NO: 2004301 - RNA, 23 nt, Human
caugugggccacacaagugcagu

SEQ ID NO: 2004302 - RNA, 22 nt, Human
cauguggggagguuaaucuagg

SEQ ID NO: 2004303 - RNA, 21 nt, Human
caugugccagguuuuuggucu

SEQ ID NO: 2004304 - RNA, 15 nt, Human
caugugcuucugcca

SEQ ID NO: 2004305 - RNA, 15 nt, Human
caugugcacaugcac

SEQ ID NO: 2004306 - RNA, 14 nt, Human
cauguaacaauguu

SEQ ID NO: 2004307 - RNA, 20 nt, Human
cauggugacuuuugaaaaga

SEQ ID NO: 2004308 - RNA, 16 nt, Human
cauggucggaaaacau

SEQ ID NO: 2004309 - RNA, 23 nt, Human
caugucuuuucuugcaugaggcu

SEQ ID NO: 2004310 - RNA, 21 nt, Human
caugucuuuucuugcaugagg

SEQ ID NO: 2004311 - RNA, 19 nt, Human
caugucuuuucuugcauga

SEQ ID NO: 2004312 - RNA, 14 nt, Human
caugucuuuucuug

SEQ ID NO: 2004313 - RNA, 17 nt, Human
caugugaaaucauucau

SEQ ID NO: 2004314 - RNA, 16 nt, Human
caugugaaaucauuca

SEQ ID NO: 2004315 - RNA, 15 nt, Human
caugugaaaucauuc

SEQ ID NO: 2004316 - RNA, 21 nt, Human
cauguaauuaaguacuaugua

SEQ ID NO: 2004317 - RNA, 18 nt, Human
cauguaauuaaguacuau

SEQ ID NO: 2004318 - RNA, 14 nt, Human
cauguaauuugugu

SEQ ID NO: 2004319 - RNA, 18 nt, Human
cauguaauuuguguaaau

SEQ ID NO: 2004320 - RNA, 18 nt, Human
caugucgccucugcauuc

SEQ ID NO: 2004321 - RNA, 20 nt, Human
caugucgccucugcauucag

SEQ ID NO: 2004322 - RNA, 15 nt, Human
cauguccugugucag

SEQ ID NO: 2004323 - RNA, 18 nt, Human
cauguccugugucaguuu

SEQ ID NO: 2004324 - RNA, 19 nt, Human
cauguccugugucaguuua

SEQ ID NO: 2004325 - RNA, 20 nt, Human
cauguccugugucaguuuau

SEQ ID NO: 2004326 - RNA, 14 nt, Human
caugucgccucugc

SEQ ID NO: 2004327 - RNA, 15 nt, Human
caugucgccucugca

SEQ ID NO: 2004328 - RNA, 13 nt, Human
caugccccugaac

SEQ ID NO: 2004329 - RNA, 13 nt, Human
caugccaggggcc

SEQ ID NO: 2004330 - RNA, 14 nt, Human
caugccaggggccu

SEQ ID NO: 2004331 - RNA, 19 nt, Human
caugccaggaaccuguccu

SEQ ID NO: 2004332 - RNA, 13 nt, Human
caugccaggaacc

SEQ ID NO: 2004333 - RNA, 20 nt, Human
caugccagcuuaucucaggg

SEQ ID NO: 2004334 - RNA, 19 nt, Human
caugccagcuuaucucagg

SEQ ID NO: 2004335 - RNA, 13 nt, Human
caugccuggaugg

SEQ ID NO: 2004336 - RNA, 19 nt, Human
caugccucucucaggccaa

SEQ ID NO: 2004337 - RNA, 18 nt, Human
caugccucucucaggcca

SEQ ID NO: 2004338 - RNA, 17 nt, Human
caugccucucucaggcc

SEQ ID NO: 2004339 - RNA, 16 nt, Human
caugccucucucaggc

SEQ ID NO: 2004340 - RNA, 15 nt, Human
caugccgggugcagc

SEQ ID NO: 2004341 - RNA, 15 nt, Human
caugccucucucagg

SEQ ID NO: 2004342 - RNA, 14 nt, Human
caugccucucucag

SEQ ID NO: 2004343 - RNA, 21 nt, Human
cauggagauagccccacagga

SEQ ID NO: 2004344 - RNA, 17 nt, Human
cauggagguuugaagau

SEQ ID NO: 2004345 - RNA, 13 nt, Human
cauggacuuuguu

SEQ ID NO: 2004346 - RNA, 11 nt, Human
cauggacuuug

SEQ ID NO: 2004347 - RNA, 16 nt, Human
cauggaguauauguca

SEQ ID NO: 2004348 - RNA, 18 nt, Human
caugggaaugaaugucag

SEQ ID NO: 2004349 - RNA, 14 nt, Human
caugguccauucuc

SEQ ID NO: 2004350 - RNA, 15 nt, Human
cauggggucucucac

SEQ ID NO: 2004351 - RNA, 16 nt, Human
cauggggucucucaca

SEQ ID NO: 2004352 - RNA, 19 nt, Human
cauggggucucucacagac

SEQ ID NO: 2004353 - RNA, 23 nt, Human
cauggggucucucacagacagga

SEQ ID NO: 2004354 - RNA, 19 nt, Human
cauggggcugauuguauuu

SEQ ID NO: 2004355 - RNA, 16 nt, Human
caugggccuccugugu

SEQ ID NO: 2004356 - RNA, 17 nt, Human
caugggccuccugugug

SEQ ID NO: 2004357 - RNA, 17 nt, Human
caugggacagggaggac

SEQ ID NO: 2004358 - RNA, 22 nt, Human
caugggaaugaaugucagugug

SEQ ID NO: 2004359 - RNA, 15 nt, Human
caugggccuccugug

SEQ ID NO: 2004360 - RNA, 22 nt, Human
cauggaaguacuauaauuuacc

SEQ ID NO: 2004361 - RNA, 20 nt, Human
cauggaaguacuauaauuua

SEQ ID NO: 2004362 - RNA, 18 nt, Human
cauggacaugaucuucuu

SEQ ID NO: 2004363 - RNA, 16 nt, Human
cauggaauaacaugua

SEQ ID NO: 2004364 - RNA, 20 nt, Human
caugcuguucaugaaagauu

SEQ ID NO: 2004365 - RNA, 19 nt, Human
caugcugucuggcacagcc

SEQ ID NO: 2004366 - RNA, 20 nt, Human
caugcugucuggcacagccu

SEQ ID NO: 2004367 - RNA, 21 nt, Human
caugcugucuggcacagccug

SEQ ID NO: 2004368 - RNA, 23 nt, Human
caugcugucuggcacagccugca

SEQ ID NO: 2004369 - RNA, 12 nt, Human
caugcugucugg

SEQ ID NO: 2004370 - RNA, 17 nt, Human
caugcugucuggcacag

SEQ ID NO: 2004371 - RNA, 18 nt, Human
caugcugucuggcacagc

SEQ ID NO: 2004372 - RNA, 22 nt, Human
caugcugucccuuacgugaguc

SEQ ID NO: 2004373 - RNA, 21 nt, Human
caugccuggauggggcugcac

SEQ ID NO: 2004374 - RNA, 18 nt, Human
caugccuggauggggcug

SEQ ID NO: 2004375 - RNA, 23 nt, Human
caugccuggauggggcugcaccg

SEQ ID NO: 2004376 - RNA, 12 nt, Human
caguggcagcug

SEQ ID NO: 2004377 - RNA, 21 nt, Human
caguggagugcaaaaggcuug

SEQ ID NO: 2004378 - RNA, 19 nt, Human
caguggagugcaaaaggcu

SEQ ID NO: 2004379 - RNA, 13 nt, Human
caguggagcccag

SEQ ID NO: 2004380 - RNA, 16 nt, Human
caguggagcccaggag

SEQ ID NO: 2004381 - RNA, 17 nt, Human
caguggagcccaggagu

SEQ ID NO: 2004382 - RNA, 13 nt, Human
caguggcagcugc

SEQ ID NO: 2004383 - RNA, 14 nt, Human
caguggcagcugcu

SEQ ID NO: 2004384 - RNA, 15 nt, Human
caguggcagcugcuu

SEQ ID NO: 2004385 - RNA, 16 nt, Human
caguggcagcugcuuu

SEQ ID NO: 2004386 - RNA, 12 nt, Human
caguggcagggc

SEQ ID NO: 2004387 - RNA, 13 nt, Human
caguggcagggca

SEQ ID NO: 2004388 - RNA, 14 nt, Human
caguggcagggcac

SEQ ID NO: 2004389 - RNA, 15 nt, Human
caguggcagggcaca

SEQ ID NO: 2004390 - RNA, 16 nt, Human
caguggcagggcacag

SEQ ID NO: 2004391 - RNA, 17 nt, Human
caguggcagggcacagg

SEQ ID NO: 2004392 - RNA, 19 nt, Human
caguggcagggcacagggc

SEQ ID NO: 2004393 - RNA, 20 nt, Human
caguggcagggcacagggcc

SEQ ID NO: 2004394 - RNA, 20 nt, Human
caguggcgaaaucccugcuc

SEQ ID NO: 2004395 - RNA, 21 nt, Human
caguggcgaaaucccugcuca

SEQ ID NO: 2004396 - RNA, 22 nt, Human
caguggcgaaaucccugcucac

SEQ ID NO: 2004397 - RNA, 23 nt, Human
caguggcgaaaucccugcucacu

SEQ ID NO: 2004398 - RNA, 23 nt, Human
caguggcugaguagcucugccuu

SEQ ID NO: 2004399 - RNA, 19 nt, Human
caguggcgaaaucccugcu

SEQ ID NO: 2004400 - RNA, 16 nt, Human
caguggcuggaucugu

SEQ ID NO: 2004401 - RNA, 18 nt, Human
caguggcuggaucuguga

SEQ ID NO: 2004402 - RNA, 20 nt, Human
caguggcuggaucugugagg

SEQ ID NO: 2004403 - RNA, 22 nt, Human
cagugguuccuaauccucuagg

SEQ ID NO: 2004404 - RNA, 11 nt, Human
cagugguuaag

SEQ ID NO: 2004405 - RNA, 11 nt, Human
cagugggaacu

SEQ ID NO: 2004406 - RNA, 12 nt, Human
cagugugauuuu

SEQ ID NO: 2004407 - RNA, 17 nt, Human
cagugugagggaaagag

SEQ ID NO: 2004408 - RNA, 19 nt, Human
cagugugagggaaagagcu

SEQ ID NO: 2004409 - RNA, 17 nt, Human
caguguguggucaacau

SEQ ID NO: 2004410 - RNA, 21 nt, Human
caguguguggucaacauuucu

SEQ ID NO: 2004411 - RNA, 19 nt, Human
caguguggccucuucugag

SEQ ID NO: 2004412 - RNA, 17 nt, Human
cagugucuggcugcaga

SEQ ID NO: 2004413 - RNA, 19 nt, Human
cagugucuggcugcagagc

SEQ ID NO: 2004414 - RNA, 12 nt, Human
cagugugacuga

SEQ ID NO: 2004415 - RNA, 14 nt, Human
cagugugacaagga

SEQ ID NO: 2004416 - RNA, 20 nt, Human
caguguccauggacucagaa

SEQ ID NO: 2004417 - RNA, 22 nt, Human
caguguccauggacucagaaac

SEQ ID NO: 2004418 - RNA, 14 nt, Human
cagugucaaugcag

SEQ ID NO: 2004419 - RNA, 23 nt, Human
caguguacauggaauaacaugua

SEQ ID NO: 2004420 - RNA, 20 nt, Human
caguguacauggaauaacau

SEQ ID NO: 2004421 - RNA, 15 nt, Human
caguguaccauuaaa

SEQ ID NO: 2004422 - RNA, 17 nt, Human
caguguaccauuaaaau

SEQ ID NO: 2004423 - RNA, 18 nt, Human
caguguaccauuaaaaua

SEQ ID NO: 2004424 - RNA, 21 nt, Human
caguguaccauuaaaauaugc

SEQ ID NO: 2004425 - RNA, 22 nt, Human
caguguaccauuaaaauaugca

SEQ ID NO: 2004426 - RNA, 16 nt, Human
caguguacauggaaua

SEQ ID NO: 2004427 - RNA, 19 nt, Human
caguugaaaaacagcugag

SEQ ID NO: 2004428 - RNA, 18 nt, Human
caguugaaaaacagcuga

SEQ ID NO: 2004429 - RNA, 12 nt, Human
caguugaaaaac

SEQ ID NO: 2004430 - RNA, 16 nt, Human
caguucucuucacuca

SEQ ID NO: 2004431 - RNA, 22 nt, Human
caguucucuccuucuucccccc

SEQ ID NO: 2004432 - RNA, 15 nt, Human
caguucucuccuucu

SEQ ID NO: 2004433 - RNA, 14 nt, Human
caguucucuccuuc

SEQ ID NO: 2004434 - RNA, 13 nt, Human
caguucucuccuu

SEQ ID NO: 2004435 - RNA, 22 nt, Human
caguucggugagcuacaaaugc

SEQ ID NO: 2004436 - RNA, 14 nt, Human
caguuacucagaau

SEQ ID NO: 2004437 - RNA, 17 nt, Human
caguuccccuggaagca

SEQ ID NO: 2004438 - RNA, 21 nt, Human
caguuccccuggaagcagugc

SEQ ID NO: 2004439 - RNA, 14 nt, Human
caguuaagagaaau

SEQ ID NO: 2004440 - RNA, 13 nt, Human
caguuaagagaaa

SEQ ID NO: 2004441 - RNA, 14 nt, Human
caguuaagccuuug

SEQ ID NO: 2004442 - RNA, 15 nt, Human
caguuaagccuuugg

SEQ ID NO: 2004443 - RNA, 17 nt, Human
caguuaagccuuuggaa

SEQ ID NO: 2004444 - RNA, 20 nt, Human
caguuaagccuuuggaaaca

SEQ ID NO: 2004445 - RNA, 14 nt, Human
caguuacaaauuau

SEQ ID NO: 2004446 - RNA, 18 nt, Human
caguuacaaauuauaaug

SEQ ID NO: 2004447 - RNA, 19 nt, Human
caguuacaaauuauaaugu

SEQ ID NO: 2004448 - RNA, 22 nt, Human
caguuacaaauuauaauguauu

SEQ ID NO: 2004449 - RNA, 18 nt, Human
caguguuccgugguuaaa

SEQ ID NO: 2004450 - RNA, 19 nt, Human
caguguuguggauuuaaca

SEQ ID NO: 2004451 - RNA, 20 nt, Human
caguguuguggauuuaacag

SEQ ID NO: 2004452 - RNA, 22 nt, Human
caguguuguggauuuaacagaa

SEQ ID NO: 2004453 - RNA, 14 nt, Human
caguguuucugggg

SEQ ID NO: 2004454 - RNA, 13 nt, Human
caguguuuggugc

SEQ ID NO: 2004455 - RNA, 13 nt, Human
caguguuugugug

SEQ ID NO: 2004456 - RNA, 21 nt, Human
caguguuuugaccuuugauac

SEQ ID NO: 2004457 - RNA, 21 nt, Human
caguucuuuaagaagaucuuu

SEQ ID NO: 2004458 - RNA, 20 nt, Human
caguugagaggacacucccg

SEQ ID NO: 2004459 - RNA, 19 nt, Human
caguugagaggacacuccc

SEQ ID NO: 2004460 - RNA, 22 nt, Human
caguuggucccccuuccaugga

SEQ ID NO: 2004461 - RNA, 21 nt, Human
caguuggucccccuuccaugg

SEQ ID NO: 2004462 - RNA, 20 nt, Human
caguuggucccccuuccaug

SEQ ID NO: 2004463 - RNA, 19 nt, Human
caguuggucccccuuccau

SEQ ID NO: 2004464 - RNA, 18 nt, Human
caguuggucccccuucca

SEQ ID NO: 2004465 - RNA, 18 nt, Human
caguuggguggaugccug

SEQ ID NO: 2004466 - RNA, 19 nt, Human
caguuggguggaugccugg

SEQ ID NO: 2004467 - RNA, 23 nt, Human
caguugccagucaccccggccac

SEQ ID NO: 2004468 - RNA, 14 nt, Human
caguugcccagccu

SEQ ID NO: 2004469 - RNA, 16 nt, Human
caguugcccagccucu

SEQ ID NO: 2004470 - RNA, 17 nt, Human
caguugcccagccucuu

SEQ ID NO: 2004471 - RNA, 18 nt, Human
caguugcccagccucuuu

SEQ ID NO: 2004472 - RNA, 19 nt, Human
caguugcccagccucuuuc

SEQ ID NO: 2004473 - RNA, 21 nt, Human
caguugcccagccucuuuccc

SEQ ID NO: 2004474 - RNA, 14 nt, Human
caguugcugguaaa

SEQ ID NO: 2004475 - RNA, 13 nt, Human
caguugcugguaa

SEQ ID NO: 2004476 - RNA, 17 nt, Human
caguugcugguaaaaug

SEQ ID NO: 2004477 - RNA, 18 nt, Human
caguugcugguaaaauga

SEQ ID NO: 2004478 - RNA, 19 nt, Human
caguugcugguaaaaugaa

SEQ ID NO: 2004479 - RNA, 20 nt, Human
caguugcugguaaaaugaag

SEQ ID NO: 2004480 - RNA, 16 nt, Human
caguuggguggaugcc

SEQ ID NO: 2004481 - RNA, 21 nt, Human
caguugcugguaaaaugaaga

SEQ ID NO: 2004482 - RNA, 22 nt, Human
caguugcugguaaaaugaagaa

SEQ ID NO: 2004483 - RNA, 23 nt, Human
caguugcugguaaaaugaagaau

SEQ ID NO: 2004484 - RNA, 22 nt, Human
caguugcugucagucuugaccu

SEQ ID NO: 2004485 - RNA, 22 nt, Human
caguuguaacauucuauuucaa

SEQ ID NO: 2004486 - RNA, 17 nt, Human
caguuguuagugugucu

SEQ ID NO: 2004487 - RNA, 21 nt, Human
caguuguuaaguccuuggcuu

SEQ ID NO: 2004488 - RNA, 23 nt, Human
caguuuuucauaagauauuuuau

SEQ ID NO: 2004489 - RNA, 21 nt, Human
caguuuuucauaagauauuuu

SEQ ID NO: 2004490 - RNA, 13 nt, Human
caguuuuucuuaa

SEQ ID NO: 2004491 - RNA, 13 nt, Human
caguuuuuguguu

SEQ ID NO: 2004492 - RNA, 15 nt, Human
caguuuuucuuaaua

SEQ ID NO: 2004493 - RNA, 16 nt, Human
caguuuuucuuaauau

SEQ ID NO: 2004494 - RNA, 19 nt, Human
caguuuuucuuaauauaua

SEQ ID NO: 2004495 - RNA, 21 nt, Human
cauaaaaauuagccaagugug

SEQ ID NO: 2004496 - RNA, 19 nt, Human
cauaaaauaaggagcauau

SEQ ID NO: 2004497 - RNA, 22 nt, Human
cauaaaauguccaguaagauca

SEQ ID NO: 2004498 - RNA, 22 nt, Human
cauaaacaagaccacguuucua

SEQ ID NO: 2004499 - RNA, 11 nt, Human
cauaaacauca

SEQ ID NO: 2004500 - RNA, 22 nt, Human
cauaaacaucagguuaggcagu

SEQ ID NO: 2004501 - RNA, 20 nt, Human
cauaaacaagaccacguuuc

SEQ ID NO: 2004502 - RNA, 21 nt, Human
cauaaacaagaccacguuucu

SEQ ID NO: 2004503 - RNA, 16 nt, Human
cauaaagcaggcagaa

SEQ ID NO: 2004504 - RNA, 14 nt, Human
cauaaagcaggcag

SEQ ID NO: 2004505 - RNA, 13 nt, Human
cauaaagaauuug

SEQ ID NO: 2004506 - RNA, 22 nt, Human
cauaaagaauuugucacaggaa

SEQ ID NO: 2004507 - RNA, 16 nt, Human
cauaaaucuuccaaag

SEQ ID NO: 2004508 - RNA, 19 nt, Human
cauaaauuuaguauuuugu

SEQ ID NO: 2004509 - RNA, 20 nt, Human
cauaaauuuaguauuuuguu

SEQ ID NO: 2004510 - RNA, 16 nt, Human
cauaaccuagccuuag

SEQ ID NO: 2004511 - RNA, 18 nt, Human
cauaaucacaacccuuca

SEQ ID NO: 2004512 - RNA, 15 nt, Human
cauaauacuugcuuu

SEQ ID NO: 2004513 - RNA, 18 nt, Human
cauaauaauccugcaaag

SEQ ID NO: 2004514 - RNA, 15 nt, Human
cauaauacugaacca

SEQ ID NO: 2004515 - RNA, 16 nt, Human
cauaauacugaaccac

SEQ ID NO: 2004516 - RNA, 17 nt, Human
cauaauacugaaccacu

SEQ ID NO: 2004517 - RNA, 18 nt, Human
cauaauacugaaccacuu

SEQ ID NO: 2004518 - RNA, 13 nt, Human
cauaccacuuuug

SEQ ID NO: 2004519 - RNA, 14 nt, Human
cauaccacuuuugu

SEQ ID NO: 2004520 - RNA, 15 nt, Human
cauaccacuuuuguu

SEQ ID NO: 2004521 - RNA, 18 nt, Human
cauaccacuuuuguucuu

SEQ ID NO: 2004522 - RNA, 12 nt, Human
cauacccacccc

SEQ ID NO: 2004523 - RNA, 11 nt, Human
cauacccaccc

SEQ ID NO: 2004524 - RNA, 19 nt, Human
cauaccacuuuuguucuug

SEQ ID NO: 2004525 - RNA, 20 nt, Human
cauaccaacucaacuuuuuu

SEQ ID NO: 2004526 - RNA, 14 nt, Human
cauaagauaaaugu

SEQ ID NO: 2004527 - RNA, 15 nt, Human
cauaagauauuuuau

SEQ ID NO: 2004528 - RNA, 15 nt, Human
cauaagcaacaauuu

SEQ ID NO: 2004529 - RNA, 17 nt, Human
cauaagcaacaauuuuc

SEQ ID NO: 2004530 - RNA, 21 nt, Human
cauaagcaacaauuuucagau

SEQ ID NO: 2004531 - RNA, 18 nt, Human
cauaaggucagcucagag

SEQ ID NO: 2004532 - RNA, 16 nt, Human
cauaagcuuuuucucu

SEQ ID NO: 2004533 - RNA, 17 nt, Human
cauaaguauuuggaauu

SEQ ID NO: 2004534 - RNA, 18 nt, Human
cauaauaaaaggcuuuga

SEQ ID NO: 2004535 - RNA, 22 nt, Human
cauaaguauuuggaauuagaac

SEQ ID NO: 2004536 - RNA, 15 nt, Human
cauaccuggcccugu

SEQ ID NO: 2004537 - RNA, 21 nt, Human
cauacccacccccacccaagg

SEQ ID NO: 2004538 - RNA, 18 nt, Human
cauacccacccccaccca

SEQ ID NO: 2004539 - RNA, 17 nt, Human
cauacccacccccaccc

SEQ ID NO: 2004540 - RNA, 14 nt, Human
cauacccaccccca

SEQ ID NO: 2004541 - RNA, 17 nt, Human
cauacguacacauuuua

SEQ ID NO: 2004542 - RNA, 18 nt, Human
cauacguacacauuuuau

SEQ ID NO: 2004543 - RNA, 14 nt, Human
cauacuaaccagca

SEQ ID NO: 2004544 - RNA, 21 nt, Human
cauacuaaccagcagaaaugc

SEQ ID NO: 2004545 - RNA, 15 nt, Human
cauacguacacauuu

SEQ ID NO: 2004546 - RNA, 16 nt, Human
cauacguacacauuuu

SEQ ID NO: 2004547 - RNA, 13 nt, Human
cauacguacacau

SEQ ID NO: 2004548 - RNA, 14 nt, Human
cauacguaaaaauc

SEQ ID NO: 2004549 - RNA, 15 nt, Human
cauacguaaaaaucu

SEQ ID NO: 2004550 - RNA, 17 nt, Human
cauaccuuggccagcaa

SEQ ID NO: 2004551 - RNA, 20 nt, Human
cauacuaauuauacccccug

SEQ ID NO: 2004552 - RNA, 16 nt, Human
cauacgugugcaugug

SEQ ID NO: 2004553 - RNA, 21 nt, Human
caucccugaaggccccgccca

SEQ ID NO: 2004554 - RNA, 19 nt, Human
caucccugaaggccccgcc

SEQ ID NO: 2004555 - RNA, 18 nt, Human
caucccugaaggccccgc

SEQ ID NO: 2004556 - RNA, 17 nt, Human
caucccugaaggccccg

SEQ ID NO: 2004557 - RNA, 22 nt, Human
caucccugaaggccccgcccag

SEQ ID NO: 2004558 - RNA, 17 nt, Human
cauccggggccagcucc

SEQ ID NO: 2004559 - RNA, 18 nt, Human
cauccggggccagcuccg

SEQ ID NO: 2004560 - RNA, 14 nt, Human
cauccuaacuccau

SEQ ID NO: 2004561 - RNA, 21 nt, Human
cauccuaacuccaugucucug

SEQ ID NO: 2004562 - RNA, 12 nt, Human
caucauuucugg

SEQ ID NO: 2004563 - RNA, 21 nt, Human
caucauugaaaucuuuuugcu

SEQ ID NO: 2004564 - RNA, 20 nt, Human
caucauugaaaucuuuuugc

SEQ ID NO: 2004565 - RNA, 15 nt, Human
caucauugaaaucuu

SEQ ID NO: 2004566 - RNA, 14 nt, Human
caucauugaaaucu

SEQ ID NO: 2004567 - RNA, 15 nt, Human
caucaccaacgucug

SEQ ID NO: 2004568 - RNA, 13 nt, Human
caucauugaaauc

SEQ ID NO: 2004569 - RNA, 20 nt, Human
cauccaccguccccucccag

SEQ ID NO: 2004570 - RNA, 14 nt, Human
cauccacagucucc

SEQ ID NO: 2004571 - RNA, 17 nt, Human
cauccaccguccccucc

SEQ ID NO: 2004572 - RNA, 23 nt, Human
cauccacaaaugcaguuuuagaa

SEQ ID NO: 2004573 - RNA, 14 nt, Human
cauccaaguggccu

SEQ ID NO: 2004574 - RNA, 19 nt, Human
caucccucuggggcuguuc

SEQ ID NO: 2004575 - RNA, 13 nt, Human
caucccugaaggc

SEQ ID NO: 2004576 - RNA, 11 nt, Human
caucccugaag

SEQ ID NO: 2004577 - RNA, 15 nt, Human
cauccagguucagcu

SEQ ID NO: 2004578 - RNA, 22 nt, Human
caucuuccaaggguacuaagga

SEQ ID NO: 2004579 - RNA, 16 nt, Human
caucucuuguuuaaau

SEQ ID NO: 2004580 - RNA, 14 nt, Human
caucugagaaugaa

SEQ ID NO: 2004581 - RNA, 16 nt, Human
caucugagaaugaaca

SEQ ID NO: 2004582 - RNA, 20 nt, Human
caucugagagaggcuaaaau

SEQ ID NO: 2004583 - RNA, 22 nt, Human
caucugagagaggcuaaaaugu

SEQ ID NO: 2004584 - RNA, 23 nt, Human
caucugagagaggcuaaaauguu

SEQ ID NO: 2004585 - RNA, 14 nt, Human
caucugauuccagc

SEQ ID NO: 2004586 - RNA, 14 nt, Human
caucuccacuccag

SEQ ID NO: 2004587 - RNA, 22 nt, Human
caucucuucuggguuccuuccu

SEQ ID NO: 2004588 - RNA, 15 nt, Human
caucuugacagagcc

SEQ ID NO: 2004589 - RNA, 20 nt, Human
caucuugacagagccugccc

SEQ ID NO: 2004590 - RNA, 22 nt, Human
caucuugacagagccugcccca

SEQ ID NO: 2004591 - RNA, 13 nt, Human
caucuugcucugc

SEQ ID NO: 2004592 - RNA, 14 nt, Human
caucuugcucugcu

SEQ ID NO: 2004593 - RNA, 20 nt, Human
caucuugcucugcugacaga

SEQ ID NO: 2004594 - RNA, 16 nt, Human
cauccucauacccacc

SEQ ID NO: 2004595 - RNA, 15 nt, Human
cauccucauacccac

SEQ ID NO: 2004596 - RNA, 16 nt, Human
cauccuacaagacaca

SEQ ID NO: 2004597 - RNA, 19 nt, Human
cauccuccucagaucuucu

SEQ ID NO: 2004598 - RNA, 18 nt, Human
cauccuccucagaucuuc

SEQ ID NO: 2004599 - RNA, 16 nt, Human
cauccuccucagaucu

SEQ ID NO: 2004600 - RNA, 15 nt, Human
cauccuccucagauc

SEQ ID NO: 2004601 - RNA, 12 nt, Human
cauccuccucag

SEQ ID NO: 2004602 - RNA, 11 nt, Human
cauccuccuca

SEQ ID NO: 2004603 - RNA, 20 nt, Human
cauccuccgccucccggguu

SEQ ID NO: 2004604 - RNA, 13 nt, Human
cauccuccagggc

SEQ ID NO: 2004605 - RNA, 22 nt, Human
cauccucauacccacccccacc

SEQ ID NO: 2004606 - RNA, 21 nt, Human
cauccucauacccacccccac

SEQ ID NO: 2004607 - RNA, 18 nt, Human
cauccucauacccacccc

SEQ ID NO: 2004608 - RNA, 17 nt, Human
cauccucauacccaccc

SEQ ID NO: 2004609 - RNA, 13 nt, Human
cauccucccaagg

SEQ ID NO: 2004610 - RNA, 18 nt, Human
cauccucuguacagagcc

SEQ ID NO: 2004611 - RNA, 15 nt, Human
cauccucuguacaga

SEQ ID NO: 2004612 - RNA, 20 nt, Human
cauccuccuccgauuucuaa

SEQ ID NO: 2004613 - RNA, 15 nt, Human
cauccuccuccuucc

SEQ ID NO: 2004614 - RNA, 16 nt, Human
cauccuccuccuuccu

SEQ ID NO: 2004615 - RNA, 17 nt, Human
cauccuccuccuuccua

SEQ ID NO: 2004616 - RNA, 19 nt, Human
cauccucuguacagagccc

SEQ ID NO: 2004617 - RNA, 21 nt, Human
cauccucuguacagagcccac

SEQ ID NO: 2004618 - RNA, 18 nt, Human
cauccuccuccuuccuag

SEQ ID NO: 2004619 - RNA, 18 nt, Human
caucuagguaaauuacag

SEQ ID NO: 2004620 - RNA, 17 nt, Human
caucuagguaaauuaca

SEQ ID NO: 2004621 - RNA, 18 nt, Human
caucuaggggagccuuga

SEQ ID NO: 2004622 - RNA, 12 nt, Human
caucuaggauuu

SEQ ID NO: 2004623 - RNA, 15 nt, Human
caucuacccuccgau

SEQ ID NO: 2004624 - RNA, 23 nt, Human
caucuaauuuuauuuugugaagu

SEQ ID NO: 2004625 - RNA, 19 nt, Human
caucuaggggagccuugau

SEQ ID NO: 2004626 - RNA, 20 nt, Human
caucuaggggagccuugauu

SEQ ID NO: 2004627 - RNA, 17 nt, Human
caucucacacaugagca

SEQ ID NO: 2004628 - RNA, 16 nt, Human
caucucacacaugagc

SEQ ID NO: 2004629 - RNA, 20 nt, Human
caucucacacaugagcauca

SEQ ID NO: 2004630 - RNA, 13 nt, Human
caucucacagcua

SEQ ID NO: 2004631 - RNA, 13 nt, Human
caucucagcccac

SEQ ID NO: 2004632 - RNA, 18 nt, Human
cauacuucaugaaauccu

SEQ ID NO: 2004633 - RNA, 20 nt, Human
cauagaaacugucuagcacu

SEQ ID NO: 2004634 - RNA, 23 nt, Human
cauagaaaguaaauaaaaggacu

SEQ ID NO: 2004635 - RNA, 23 nt, Human
cauagagagcaagacgcugugcu

SEQ ID NO: 2004636 - RNA, 21 nt, Human
cauagagagcaagacgcugug

SEQ ID NO: 2004637 - RNA, 19 nt, Human
cauagagagcaagacgcug

SEQ ID NO: 2004638 - RNA, 20 nt, Human
cauagaauaaaauuuuuaau

SEQ ID NO: 2004639 - RNA, 22 nt, Human
cauagaauugcaaucuauaaua

SEQ ID NO: 2004640 - RNA, 20 nt, Human
cauagaauugcaaucuauaa

SEQ ID NO: 2004641 - RNA, 14 nt, Human
cauagaauaaaauu

SEQ ID NO: 2004642 - RNA, 20 nt, Human
cauacucccaucugugaaag

SEQ ID NO: 2004643 - RNA, 18 nt, Human
cauacucccaucugugaa

SEQ ID NO: 2004644 - RNA, 15 nt, Human
cauacucccaucugu

SEQ ID NO: 2004645 - RNA, 16 nt, Human
cauacucccaucugug

SEQ ID NO: 2004646 - RNA, 14 nt, Human
cauacucaugcaug

SEQ ID NO: 2004647 - RNA, 17 nt, Human
cauacuccuaugcuuua

SEQ ID NO: 2004648 - RNA, 18 nt, Human
cauacuccuaugcuuuag

SEQ ID NO: 2004649 - RNA, 15 nt, Human
cauacucgagucuga

SEQ ID NO: 2004650 - RNA, 16 nt, Human
cauacucgagucugag

SEQ ID NO: 2004651 - RNA, 17 nt, Human
cauacucgagucugagg

SEQ ID NO: 2004652 - RNA, 18 nt, Human
cauacucgagucugaggc

SEQ ID NO: 2004653 - RNA, 19 nt, Human
cauacucgagucugaggcc

SEQ ID NO: 2004654 - RNA, 11 nt, Human
cauacucugcu

SEQ ID NO: 2004655 - RNA, 18 nt, Human
cauaguaugguggcuggg

SEQ ID NO: 2004656 - RNA, 19 nt, Human
cauaguaugguggcugggu

SEQ ID NO: 2004657 - RNA, 20 nt, Human
cauaguaugguggcuggguu

SEQ ID NO: 2004658 - RNA, 22 nt, Human
cauagugaugguuccccuguuc

SEQ ID NO: 2004659 - RNA, 14 nt, Human
cauagaguacacug

SEQ ID NO: 2004660 - RNA, 15 nt, Human
cauagaguacacugc

SEQ ID NO: 2004661 - RNA, 17 nt, Human
cauagaguacacugccu

SEQ ID NO: 2004662 - RNA, 18 nt, Human
cauagaguacacugccug

SEQ ID NO: 2004663 - RNA, 19 nt, Human
cauagaguacacugccugc

SEQ ID NO: 2004664 - RNA, 22 nt, Human
cauaguucuagugcagcugaaa

SEQ ID NO: 2004665 - RNA, 21 nt, Human
cauaguuacuguaaaaugcaa

SEQ ID NO: 2004666 - RNA, 17 nt, Human
cauaguuacuguaaaau

SEQ ID NO: 2004667 - RNA, 19 nt, Human
cauaguuacuguaaaaugc

SEQ ID NO: 2004668 - RNA, 22 nt, Human
cauaguggcuuaaaacaacacu

SEQ ID NO: 2004669 - RNA, 20 nt, Human
cauaguuaaagaagacauuu

SEQ ID NO: 2004670 - RNA, 13 nt, Human
cauaguuacugua

SEQ ID NO: 2004671 - RNA, 15 nt, Human
cauaguuacuguaaa

SEQ ID NO: 2004672 - RNA, 17 nt, Human
cauauaaaauggcaaca

SEQ ID NO: 2004673 - RNA, 18 nt, Human
cauauaaaauggcaacaa

SEQ ID NO: 2004674 - RNA, 19 nt, Human
cauaguuuuauuuauauuu

SEQ ID NO: 2004675 - RNA, 15 nt, Human
cauaguuuuauuuau

SEQ ID NO: 2004676 - RNA, 16 nt, Human
cauaguuuuauuuaua

SEQ ID NO: 2004677 - RNA, 21 nt, Human
cauauaaaauggcaacaaacu

SEQ ID NO: 2004678 - RNA, 18 nt, Human
cauauccauagugacuuu

SEQ ID NO: 2004679 - RNA, 19 nt, Human
cauauccauagugacuuuu

SEQ ID NO: 2004680 - RNA, 18 nt, Human
cauauccccuauuuaaca

SEQ ID NO: 2004681 - RNA, 21 nt, Human
cauaugauguacauguacuga

SEQ ID NO: 2004682 - RNA, 17 nt, Human
cauaugauguacaugua

SEQ ID NO: 2004683 - RNA, 15 nt, Human
cauaugauguacaug

SEQ ID NO: 2004684 - RNA, 23 nt, Human
cauauauauguuuuaagaggcag

SEQ ID NO: 2004685 - RNA, 13 nt, Human
cauauauauaugu

SEQ ID NO: 2004686 - RNA, 14 nt, Human
cauauauauaugug

SEQ ID NO: 2004687 - RNA, 15 nt, Human
cauauauauaugugu

SEQ ID NO: 2004688 - RNA, 22 nt, Human
cauauauauguuuuaagaggca

SEQ ID NO: 2004689 - RNA, 17 nt, Human
cauauauauaugugugu

SEQ ID NO: 2004690 - RNA, 18 nt, Human
cauauacaacaccaaaaa

SEQ ID NO: 2004691 - RNA, 20 nt, Human
cauauacaacaccaaaaaau

SEQ ID NO: 2004692 - RNA, 22 nt, Human
cauauacaacaccaaaaaauau

SEQ ID NO: 2004693 - RNA, 23 nt, Human
cauauacaacaccaaaaaauauc

SEQ ID NO: 2004694 - RNA, 12 nt, Human
cauauuuucaug

SEQ ID NO: 2004695 - RNA, 13 nt, Human
cauauuuuuacaa

SEQ ID NO: 2004696 - RNA, 14 nt, Human
cauauuuuucaaaa

SEQ ID NO: 2004697 - RNA, 15 nt, Human
cauauuuuuuuccuu

SEQ ID NO: 2004698 - RNA, 18 nt, Human
cauauuuuuuuccuuaca

SEQ ID NO: 2004699 - RNA, 22 nt, Human
cauauuuuuuuccuuacauaaa

SEQ ID NO: 2004700 - RNA, 18 nt, Human
caucaaugaaugaaugaa

SEQ ID NO: 2004701 - RNA, 14 nt, Human
caucaagaugugac

SEQ ID NO: 2004702 - RNA, 22 nt, Human
caucaagucuuucacauuuaaa

SEQ ID NO: 2004703 - RNA, 21 nt, Human
caucaagaggugggagggccc

SEQ ID NO: 2004704 - RNA, 18 nt, Human
cauauuuuaaacagagga

SEQ ID NO: 2004705 - RNA, 24 nt, Human
cauauuucuaauuggcuuuacuau

SEQ ID NO: 2004706 - RNA, 16 nt, Human
cauauuuuaauuucaa

SEQ ID NO: 2004707 - RNA, 14 nt, Human
cauauuuuaauuuc

SEQ ID NO: 2004708 - RNA, 15 nt, Human
cauauuuuaauuuca

SEQ ID NO: 2004709 - RNA, 23 nt, Human
cauauuuuaauuucaagcuuauu

SEQ ID NO: 2004710 - RNA, 17 nt, Human
cauauuuauaaaaauaa

SEQ ID NO: 2004711 - RNA, 17 nt, Human
cauauuuacuucuuaua

SEQ ID NO: 2004712 - RNA, 16 nt, Human
cauauuuacuucuuau

SEQ ID NO: 2004713 - RNA, 20 nt, Human
cauauuuacuucuuauacau

SEQ ID NO: 2004714 - RNA, 12 nt, Human
cauauuuauaaa

SEQ ID NO: 2004715 - RNA, 14 nt, Human
cauauuuacuucuu

SEQ ID NO: 2004716 - RNA, 13 nt, Human
cauaugccugggc

SEQ ID NO: 2004717 - RNA, 14 nt, Human
agggacugagaaau

SEQ ID NO: 2004718 - RNA, 13 nt, Human
agggacugagaaa

SEQ ID NO: 2004719 - RNA, 15 nt, Human
agggacugagaaauu

SEQ ID NO: 2004720 - RNA, 17 nt, Human
agggacugagaaauuua

SEQ ID NO: 2004721 - RNA, 15 nt, Human
agggaugcauggaga

SEQ ID NO: 2004722 - RNA, 14 nt, Human
agggaugguguuca

SEQ ID NO: 2004723 - RNA, 16 nt, Human
agggauggaggaagaa

SEQ ID NO: 2004724 - RNA, 22 nt, Human
agggauuccuaaucacucagag

SEQ ID NO: 2004725 - RNA, 21 nt, Human
agggcuaggaauauagauuaa

SEQ ID NO: 2004726 - RNA, 14 nt, Human
agggcucaacacug

SEQ ID NO: 2004727 - RNA, 15 nt, Human
agggcuaggaauaua

SEQ ID NO: 2004728 - RNA, 16 nt, Human
agggcuaggaauauag

SEQ ID NO: 2004729 - RNA, 18 nt, Human
agggccuggcucaggugg

SEQ ID NO: 2004730 - RNA, 13 nt, Human
agggccugggccu

SEQ ID NO: 2004731 - RNA, 16 nt, Human
agggccugggccuggc

SEQ ID NO: 2004732 - RNA, 17 nt, Human
agggccugggccuggcu

SEQ ID NO: 2004733 - RNA, 19 nt, Human
agggccugggccuggcucc

SEQ ID NO: 2004734 - RNA, 20 nt, Human
agggccugggccuggcuccc

SEQ ID NO: 2004735 - RNA, 21 nt, Human
agggccugggccuggcucccu

SEQ ID NO: 2004736 - RNA, 22 nt, Human
agggauuuggggcucagagugg

SEQ ID NO: 2004737 - RNA, 17 nt, Human
agggauugauuuuaaaa

SEQ ID NO: 2004738 - RNA, 19 nt, Human
agggauugauuuuaaaaug

SEQ ID NO: 2004739 - RNA, 14 nt, Human
agggauugauuuua

SEQ ID NO: 2004740 - RNA, 14 nt, Human
agggccuggcucag

SEQ ID NO: 2004741 - RNA, 13 nt, Human
agggccuggcuca

SEQ ID NO: 2004742 - RNA, 20 nt, Human
aggcccucugcccacucccu

SEQ ID NO: 2004743 - RNA, 19 nt, Human
aggcccucugcccacuccc

SEQ ID NO: 2004744 - RNA, 19 nt, Human
aggccagggagcaguggcu

SEQ ID NO: 2004745 - RNA, 22 nt, Human
aggcucuggagcccacuguacu

SEQ ID NO: 2004746 - RNA, 13 nt, Human
aggcugaggacuu

SEQ ID NO: 2004747 - RNA, 11 nt, Human
aggcugaggac

SEQ ID NO: 2004748 - RNA, 13 nt, Human
aggcucuucuccu

SEQ ID NO: 2004749 - RNA, 11 nt, Human
aggcugagccu

SEQ ID NO: 2004750 - RNA, 13 nt, Human
aggcugagccuca

SEQ ID NO: 2004751 - RNA, 19 nt, Human
aggcuguugaauggaauuu

SEQ ID NO: 2004752 - RNA, 13 nt, Human
agggacagucuca

SEQ ID NO: 2004753 - RNA, 16 nt, Human
agggacagucucacca

SEQ ID NO: 2004754 - RNA, 12 nt, Human
aggcugucaauu

SEQ ID NO: 2004755 - RNA, 19 nt, Human
aggcugucaauuacaggaa

SEQ ID NO: 2004756 - RNA, 24 nt, Human
aggcuguaucccaugagccucagc

SEQ ID NO: 2004757 - RNA, 16 nt, Human
aggcuguauucagcaa

SEQ ID NO: 2004758 - RNA, 19 nt, Human
aggcugcagugagccgaga

SEQ ID NO: 2004759 - RNA, 17 nt, Human
aggcugcagugagccga

SEQ ID NO: 2004760 - RNA, 23 nt, Human
aggcuguaucccaugagccucag

SEQ ID NO: 2004761 - RNA, 14 nt, Human
aggcagaaagcaaa

SEQ ID NO: 2004762 - RNA, 16 nt, Human
aggcagaaagcaaaau

SEQ ID NO: 2004763 - RNA, 19 nt, Human
aggcagaaagcaaaauuau

SEQ ID NO: 2004764 - RNA, 16 nt, Human
aggcacuucugccuga

SEQ ID NO: 2004765 - RNA, 15 nt, Human
aggcacuucugccug

SEQ ID NO: 2004766 - RNA, 16 nt, Human
aggcagccaggccaca

SEQ ID NO: 2004767 - RNA, 15 nt, Human
aggcagccaggccac

SEQ ID NO: 2004768 - RNA, 14 nt, Human
aggcagccaggcca

SEQ ID NO: 2004769 - RNA, 22 nt, Human
aggcagaacucaucuagguaaa

SEQ ID NO: 2004770 - RNA, 20 nt, Human
aggcagagguugcagugagc

SEQ ID NO: 2004771 - RNA, 13 nt, Human
aggcagauacagg

SEQ ID NO: 2004772 - RNA, 17 nt, Human
aggcaucgcaauguaag

SEQ ID NO: 2004773 - RNA, 11 nt, Human
aggcaugaagg

SEQ ID NO: 2004774 - RNA, 24 nt, Human
aggcaugugaugagaggaaaucac

SEQ ID NO: 2004775 - RNA, 23 nt, Human
aggcaugugaugagaggaaauca

SEQ ID NO: 2004776 - RNA, 12 nt, Human
aggcauguucuc

SEQ ID NO: 2004777 - RNA, 23 nt, Human
aggcauuccccaggaggccagcc

SEQ ID NO: 2004778 - RNA, 22 nt, Human
aggcauuccccaggaggccagc

SEQ ID NO: 2004779 - RNA, 12 nt, Human
aggccagcugcu

SEQ ID NO: 2004780 - RNA, 21 nt, Human
aggcauuccccaggaggccag

SEQ ID NO: 2004781 - RNA, 20 nt, Human
aggcauguucucugaggaca

SEQ ID NO: 2004782 - RNA, 22 nt, Human
aggcauguucucugaggacacu

SEQ ID NO: 2004783 - RNA, 23 nt, Human
aggccaggcccucugcccacucc

SEQ ID NO: 2004784 - RNA, 19 nt, Human
aggccaggcccucugccca

SEQ ID NO: 2004785 - RNA, 18 nt, Human
aggccaggcccucugccc

SEQ ID NO: 2004786 - RNA, 17 nt, Human
aggccaggcccucugcc

SEQ ID NO: 2004787 - RNA, 16 nt, Human
aggccaggcccucugc

SEQ ID NO: 2004788 - RNA, 16 nt, Human
aggccagcugcuuggg

SEQ ID NO: 2004789 - RNA, 14 nt, Human
aggccagcugcuug

SEQ ID NO: 2004790 - RNA, 13 nt, Human
aggccagcugcuu

SEQ ID NO: 2004791 - RNA, 14 nt, Human
aggccaugggccuc

SEQ ID NO: 2004792 - RNA, 16 nt, Human
aggccaugggccuccu

SEQ ID NO: 2004793 - RNA, 17 nt, Human
aggcccucugcccacuc

SEQ ID NO: 2004794 - RNA, 17 nt, Human
aggccaugggccuccug

SEQ ID NO: 2004795 - RNA, 19 nt, Human
aggccagggggccaguccc

SEQ ID NO: 2004796 - RNA, 23 nt, Human
aggccagggggccagucccugag

SEQ ID NO: 2004797 - RNA, 16 nt, Human
aggaugugcugcagug

SEQ ID NO: 2004798 - RNA, 13 nt, Human
aggaugucugggc

SEQ ID NO: 2004799 - RNA, 16 nt, Human
aggaugggcuucugug

SEQ ID NO: 2004800 - RNA, 17 nt, Human
aggaugggcuucugugc

SEQ ID NO: 2004801 - RNA, 14 nt, Human
aggaggucucuaag

SEQ ID NO: 2004802 - RNA, 13 nt, Human
aggaaguagagga

SEQ ID NO: 2004803 - RNA, 19 nt, Human
aggaaguacuggagaaaau

SEQ ID NO: 2004804 - RNA, 16 nt, Human
aggagagcccuucauu

SEQ ID NO: 2004805 - RNA, 15 nt, Human
aggaggucucuaaga

SEQ ID NO: 2004806 - RNA, 12 nt, Human
aggagugagcac

SEQ ID NO: 2004807 - RNA, 19 nt, Human
aggagguuggagggaaagc

SEQ ID NO: 2004808 - RNA, 13 nt, Human
aggaguaaaagag

SEQ ID NO: 2004809 - RNA, 14 nt, Human
aggagugagcacua

SEQ ID NO: 2004810 - RNA, 21 nt, Human
aggagugaaacaucauagaaa

SEQ ID NO: 2004811 - RNA, 20 nt, Human
aggagugcguggcccaccag

SEQ ID NO: 2004812 - RNA, 21 nt, Human
aggagugaucgucagaugugu

SEQ ID NO: 2004813 - RNA, 22 nt, Human
aggagugcguggcccaccaggc

SEQ ID NO: 2004814 - RNA, 23 nt, Human
aggaguucgaguuacagccuggg

SEQ ID NO: 2004815 - RNA, 18 nt, Human
aggaguuucguuuucaaa

SEQ ID NO: 2004816 - RNA, 19 nt, Human
agcuaagguuuagauaaau

SEQ ID NO: 2004817 - RNA, 13 nt, Human
agcuaaugggaca

SEQ ID NO: 2004818 - RNA, 14 nt, Human
agcuaaugggacac

SEQ ID NO: 2004819 - RNA, 15 nt, Human
agcuaaugggacacu

SEQ ID NO: 2004820 - RNA, 12 nt, Human
agcuacaaaugc

SEQ ID NO: 2004821 - RNA, 13 nt, Human
agcucaccagccc

SEQ ID NO: 2004822 - RNA, 14 nt, Human
agcucaccagcccc

SEQ ID NO: 2004823 - RNA, 15 nt, Human
agcucaccagcccca

SEQ ID NO: 2004824 - RNA, 21 nt, Human
agcucaccagccccagugccc

SEQ ID NO: 2004825 - RNA, 17 nt, Human
agcuacaacuaauaaca

SEQ ID NO: 2004826 - RNA, 13 nt, Human
agcuacaaaugca

SEQ ID NO: 2004827 - RNA, 13 nt, Human
agcgaauuuuaaa

SEQ ID NO: 2004828 - RNA, 15 nt, Human
agcgaauuuuaaaag

SEQ ID NO: 2004829 - RNA, 16 nt, Human
agcgaauuuuaaaaga

SEQ ID NO: 2004830 - RNA, 13 nt, Human
agcgacagugaga

SEQ ID NO: 2004831 - RNA, 15 nt, Human
agcgacagugagacu

SEQ ID NO: 2004832 - RNA, 17 nt, Human
agcgauucuucugcuuc

SEQ ID NO: 2004833 - RNA, 19 nt, Human
agcgauucuucugcuucag

SEQ ID NO: 2004834 - RNA, 17 nt, Human
agcgacaacagauugga

SEQ ID NO: 2004835 - RNA, 13 nt, Human
agcgacagagcag

SEQ ID NO: 2004836 - RNA, 15 nt, Human
agcgauucuucugcu

SEQ ID NO: 2004837 - RNA, 20 nt, Human
agcuaacauggaaguacuau

SEQ ID NO: 2004838 - RNA, 19 nt, Human
agcuaacauggaaguacua

SEQ ID NO: 2004839 - RNA, 19 nt, Human
agcgauucucuugccucag

SEQ ID NO: 2004840 - RNA, 13 nt, Human
agccuuucauuuu

SEQ ID NO: 2004841 - RNA, 16 nt, Human
agccuuucauuuugcu

SEQ ID NO: 2004842 - RNA, 22 nt, Human
agccugggauaggggcagagga

SEQ ID NO: 2004843 - RNA, 15 nt, Human
agccuuucuuuucuu

SEQ ID NO: 2004844 - RNA, 17 nt, Human
agccuuucauuuugcuu

SEQ ID NO: 2004845 - RNA, 18 nt, Human
agccuuucauuuugcuuu

SEQ ID NO: 2004846 - RNA, 19 nt, Human
agccuuucauuuugcuuua

SEQ ID NO: 2004847 - RNA, 20 nt, Human
agccuuucauuuugcuuuaa

SEQ ID NO: 2004848 - RNA, 21 nt, Human
agccuuucauuuugcuuuaau

SEQ ID NO: 2004849 - RNA, 23 nt, Human
agccuuucauuuugcuuuaauuu

SEQ ID NO: 2004850 - RNA, 13 nt, Human
agcgaacugacau

SEQ ID NO: 2004851 - RNA, 14 nt, Human
agccuuuuugaaag

SEQ ID NO: 2004852 - RNA, 19 nt, Human
agccuuucuuuucuuucuu

SEQ ID NO: 2004853 - RNA, 16 nt, Human
agccuuuuucuaggcc

SEQ ID NO: 2004854 - RNA, 18 nt, Human
agccugggcaaugugaua

SEQ ID NO: 2004855 - RNA, 20 nt, Human
agccugggauaggggcagag

SEQ ID NO: 2004856 - RNA, 17 nt, Human
agccugcugccugcuuu

SEQ ID NO: 2004857 - RNA, 17 nt, Human
agccugcuccuucccuu

SEQ ID NO: 2004858 - RNA, 14 nt, Human
agccuggacccugu

SEQ ID NO: 2004859 - RNA, 18 nt, Human
agccuggaaaccugucug

SEQ ID NO: 2004860 - RNA, 19 nt, Human
agccuggaaaccugucuga

SEQ ID NO: 2004861 - RNA, 20 nt, Human
agccuggcacagggcagugg

SEQ ID NO: 2004862 - RNA, 17 nt, Human
agccuggcacagggcag

SEQ ID NO: 2004863 - RNA, 18 nt, Human
agccuggcacagggcagu

SEQ ID NO: 2004864 - RNA, 22 nt, Human
agcucaccagccccagugccca

SEQ ID NO: 2004865 - RNA, 23 nt, Human
agcucaccagccccagugcccac

SEQ ID NO: 2004866 - RNA, 16 nt, Human
agcucuuggcuccacu

SEQ ID NO: 2004867 - RNA, 21 nt, Human
agcugacuuuucuguccgagc

SEQ ID NO: 2004868 - RNA, 15 nt, Human
agcugacuuuucugu

SEQ ID NO: 2004869 - RNA, 19 nt, Human
agcugacuuucaaagugga

SEQ ID NO: 2004870 - RNA, 16 nt, Human
agcugguugagguuuc

SEQ ID NO: 2004871 - RNA, 20 nt, Human
agcuggguuggaaaacagua

SEQ ID NO: 2004872 - RNA, 16 nt, Human
agcuggguuggaaaac

SEQ ID NO: 2004873 - RNA, 14 nt, Human
agcuggguuggaaa

SEQ ID NO: 2004874 - RNA, 15 nt, Human
agcuggucccacuca

SEQ ID NO: 2004875 - RNA, 16 nt, Human
agcugucaaggcucag

SEQ ID NO: 2004876 - RNA, 16 nt, Human
aggaagaaauuaacuu

SEQ ID NO: 2004877 - RNA, 19 nt, Human
aggaagaacugaaaggcuu

SEQ ID NO: 2004878 - RNA, 14 nt, Human
aggaagguagaaau

SEQ ID NO: 2004879 - RNA, 15 nt, Human
aggaaguacuggaga

SEQ ID NO: 2004880 - RNA, 11 nt, Human
aggaaguacug

SEQ ID NO: 2004881 - RNA, 14 nt, Human
aggaaggucauuuc

SEQ ID NO: 2004882 - RNA, 16 nt, Human
aggaaggucauuucca

SEQ ID NO: 2004883 - RNA, 18 nt, Human
aggaaggucauuuccaug

SEQ ID NO: 2004884 - RNA, 12 nt, Human
aggaacacuccu

SEQ ID NO: 2004885 - RNA, 12 nt, Human
aggaaaaauuca

SEQ ID NO: 2004886 - RNA, 20 nt, Human
aggaaaaccaagccguggcu

SEQ ID NO: 2004887 - RNA, 21 nt, Human
aggaaaaccaagccguggcuu

SEQ ID NO: 2004888 - RNA, 22 nt, Human
aggaaaaccaagccguggcuuc

SEQ ID NO: 2004889 - RNA, 23 nt, Human
aggaaaaccaagccguggcuucc

SEQ ID NO: 2004890 - RNA, 11 nt, Human
aggaagaaauu

SEQ ID NO: 2004891 - RNA, 23 nt, Human
aggaacuuaaauaaugugaaacu

SEQ ID NO: 2004892 - RNA, 15 nt, Human
aggaacacuccuuca

SEQ ID NO: 2004893 - RNA, 21 nt, Human
agcuuuguuuguugucagcug

SEQ ID NO: 2004894 - RNA, 22 nt, Human
agcuuuguuuguugucagcuga

SEQ ID NO: 2004895 - RNA, 13 nt, Human
agcuuuguuuguu

SEQ ID NO: 2004896 - RNA, 15 nt, Human
agcuuuguuuguucu

SEQ ID NO: 2004897 - RNA, 18 nt, Human
agcuuuguuuagucuuua

SEQ ID NO: 2004898 - RNA, 20 nt, Human
agcuuuguuuagucuuuaua

SEQ ID NO: 2004899 - RNA, 19 nt, Human
agcuuuuuucucugauaca

SEQ ID NO: 2004900 - RNA, 16 nt, Human
agcuuuguuuguucuu

SEQ ID NO: 2004901 - RNA, 17 nt, Human
agcuuuguuuguucuug

SEQ ID NO: 2004902 - RNA, 20 nt, Human
agcuuuuuucucugauacag

SEQ ID NO: 2004903 - RNA, 22 nt, Human
agcuuuuuucucugauacagaa

SEQ ID NO: 2004904 - RNA, 22 nt, Human
agcuuuuuuuuuuuaauuuugu

SEQ ID NO: 2004905 - RNA, 23 nt, Human
agcuuuuuucucugauacagaaa

SEQ ID NO: 2004906 - RNA, 16 nt, Human
aggaaaaaauugcuuu

SEQ ID NO: 2004907 - RNA, 19 nt, Human
aggaaaaccaagccguggc

SEQ ID NO: 2004908 - RNA, 18 nt, Human
aggaaaaaauaacaauga

SEQ ID NO: 2004909 - RNA, 16 nt, Human
agacucuuuggacacu

SEQ ID NO: 2004910 - RNA, 14 nt, Human
agagaaauauuuua

SEQ ID NO: 2004911 - RNA, 15 nt, Human
agagaaauauuuuaa

SEQ ID NO: 2004912 - RNA, 18 nt, Human
agagaaauauuuuaauuu

SEQ ID NO: 2004913 - RNA, 23 nt, Human
agagaaauauuuuaauuuuuaaa

SEQ ID NO: 2004914 - RNA, 12 nt, Human
agagaaaugaaa

SEQ ID NO: 2004915 - RNA, 22 nt, Human
agagaaguggacuggaggagcu

SEQ ID NO: 2004916 - RNA, 18 nt, Human
agagaagugacgguuccu

SEQ ID NO: 2004917 - RNA, 19 nt, Human
agagaagugacgguuccua

SEQ ID NO: 2004918 - RNA, 13 nt, Human
agagaaagaaauu

SEQ ID NO: 2004919 - RNA, 15 nt, Human
agagcccagaguccc

SEQ ID NO: 2004920 - RNA, 18 nt, Human
agagcccagagucccccc

SEQ ID NO: 2004921 - RNA, 22 nt, Human
agagcccagaguccccccacuc

SEQ ID NO: 2004922 - RNA, 12 nt, Human
agagccugcccc

SEQ ID NO: 2004923 - RNA, 13 nt, Human
agagccugcccca

SEQ ID NO: 2004924 - RNA, 16 nt, Human
agagccugccccagcg

SEQ ID NO: 2004925 - RNA, 17 nt, Human
agagccugccccagcgc

SEQ ID NO: 2004926 - RNA, 19 nt, Human
agagccugccccagcgcug

SEQ ID NO: 2004927 - RNA, 23 nt, Human
agagagcaagacgcugugcugcc

SEQ ID NO: 2004928 - RNA, 14 nt, Human
agagagauguguaa

SEQ ID NO: 2004929 - RNA, 18 nt, Human
agagagauguguaauuuu

SEQ ID NO: 2004930 - RNA, 19 nt, Human
agagagauguguaauuuuu

SEQ ID NO: 2004931 - RNA, 19 nt, Human
agagagcaagacgcugugc

SEQ ID NO: 2004932 - RNA, 11 nt, Human
agagagcaaga

SEQ ID NO: 2004933 - RNA, 18 nt, Human
agagcccacgcccccacu

SEQ ID NO: 2004934 - RNA, 20 nt, Human
agacgcugugcugcccugcc

SEQ ID NO: 2004935 - RNA, 19 nt, Human
agacgcugugcugcccugc

SEQ ID NO: 2004936 - RNA, 18 nt, Human
agacgcugugcugcccug

SEQ ID NO: 2004937 - RNA, 15 nt, Human
agacgacagccccug

SEQ ID NO: 2004938 - RNA, 17 nt, Human
agacgcugugcugcccu

SEQ ID NO: 2004939 - RNA, 15 nt, Human
agacuaucuaaaugu

SEQ ID NO: 2004940 - RNA, 23 nt, Human
agacagcccgggcucugccuccc

SEQ ID NO: 2004941 - RNA, 22 nt, Human
agacagcccgggcucugccucc

SEQ ID NO: 2004942 - RNA, 14 nt, Human
agacaauuuauuau

SEQ ID NO: 2004943 - RNA, 21 nt, Human
agacagcccgggcucugccuc

SEQ ID NO: 2004944 - RNA, 13 nt, Human
agacagcccucca

SEQ ID NO: 2004945 - RNA, 23 nt, Human
agaccaucccugaaggccccgcc

SEQ ID NO: 2004946 - RNA, 14 nt, Human
agaccacguuucua

SEQ ID NO: 2004947 - RNA, 14 nt, Human
agacgaacauguag

SEQ ID NO: 2004948 - RNA, 18 nt, Human
agacgaaacauuuguucu

SEQ ID NO: 2004949 - RNA, 20 nt, Human
agacaaugugaaaagaaaaa

SEQ ID NO: 2004950 - RNA, 18 nt, Human
agacaagcuguugaccag

SEQ ID NO: 2004951 - RNA, 22 nt, Human
agacaagcuguugaccaggcac

SEQ ID NO: 2004952 - RNA, 19 nt, Human
agacaaggaaaaaauaaca

SEQ ID NO: 2004953 - RNA, 14 nt, Human
agaauuuuuuauuu

SEQ ID NO: 2004954 - RNA, 15 nt, Human
agaauuuugagcagg

SEQ ID NO: 2004955 - RNA, 14 nt, Human
agaauuuugugaaa

SEQ ID NO: 2004956 - RNA, 22 nt, Human
agaauuuugugaaacagacuug

SEQ ID NO: 2004957 - RNA, 18 nt, Human
agaacaacauauacaaca

SEQ ID NO: 2004958 - RNA, 13 nt, Human
agaacacugccaa

SEQ ID NO: 2004959 - RNA, 18 nt, Human
agaaccaaaaagaggcua

SEQ ID NO: 2004960 - RNA, 17 nt, Human
agaaccaaaaagaggcu

SEQ ID NO: 2004961 - RNA, 17 nt, Human
agaacaucccuccuggg

SEQ ID NO: 2004962 - RNA, 13 nt, Human
agaacaucccucc

SEQ ID NO: 2004963 - RNA, 22 nt, Human
agaacagugauuaccagggacu

SEQ ID NO: 2004964 - RNA, 17 nt, Human
agaacagguuuuuuugu

SEQ ID NO: 2004965 - RNA, 18 nt, Human
agaacagguuuuuuuguu

SEQ ID NO: 2004966 - RNA, 21 nt, Human
agaacagguuuuuuuguuugu

SEQ ID NO: 2004967 - RNA, 12 nt, Human
agaacagcuguu

SEQ ID NO: 2004968 - RNA, 15 nt, Human
agaacagcuguugac

SEQ ID NO: 2004969 - RNA, 16 nt, Human
agaacagauaaagauu

SEQ ID NO: 2004970 - RNA, 12 nt, Human
agaaugaggcug

SEQ ID NO: 2004971 - RNA, 13 nt, Human
agaaugaggcugc

SEQ ID NO: 2004972 - RNA, 14 nt, Human
agaaugaggcugcu

SEQ ID NO: 2004973 - RNA, 20 nt, Human
agaaugaggcugcuuuccaa

SEQ ID NO: 2004974 - RNA, 23 nt, Human
agaaugcacaaacagaggccgcc

SEQ ID NO: 2004975 - RNA, 15 nt, Human
agaaugaguuucuua

SEQ ID NO: 2004976 - RNA, 14 nt, Human
agaaugaguuucuu

SEQ ID NO: 2004977 - RNA, 18 nt, Human
agaaugcucuuuacuuca

SEQ ID NO: 2004978 - RNA, 23 nt, Human
agaaugcaugcuuuccauauuuu

SEQ ID NO: 2004979 - RNA, 13 nt, Human
agaaugaugguuu

SEQ ID NO: 2004980 - RNA, 21 nt, Human
agaaugaugguuuccaauuuc

SEQ ID NO: 2004981 - RNA, 18 nt, Human
agaaugcaccauacucau

SEQ ID NO: 2004982 - RNA, 16 nt, Human
agaaugcaugcuuucc

SEQ ID NO: 2004983 - RNA, 18 nt, Human
agaaugcaugcuuuccau

SEQ ID NO: 2004984 - RNA, 16 nt, Human
agaaugaaagggccca

SEQ ID NO: 2004985 - RNA, 17 nt, Human
agaaucucaaauaacua

SEQ ID NO: 2004986 - RNA, 18 nt, Human
agaaucucaacaugucuc

SEQ ID NO: 2004987 - RNA, 12 nt, Human
agaagagcccca

SEQ ID NO: 2004988 - RNA, 13 nt, Human
agaagagccccac

SEQ ID NO: 2004989 - RNA, 23 nt, Human
agaagagaaugcacaaacagagg

SEQ ID NO: 2004990 - RNA, 15 nt, Human
agaagagaaugcaca

SEQ ID NO: 2004991 - RNA, 14 nt, Human
agaagagccccacu

SEQ ID NO: 2004992 - RNA, 17 nt, Human
agaagagccccacucuc

SEQ ID NO: 2004993 - RNA, 20 nt, Human
agaagagccccacucucaga

SEQ ID NO: 2004994 - RNA, 22 nt, Human
agaagagccccacucucagagg

SEQ ID NO: 2004995 - RNA, 21 nt, Human
agaaccaaaaagaggcuaugu

SEQ ID NO: 2004996 - RNA, 17 nt, Human
agaaccaggcaacuugg

SEQ ID NO: 2004997 - RNA, 17 nt, Human
agaaccagucuuucaac

SEQ ID NO: 2004998 - RNA, 19 nt, Human
agaaccagucuuucaacuc

SEQ ID NO: 2004999 - RNA, 20 nt, Human
agaaccaggcaacuugggaa

SEQ ID NO: 2005000 - RNA, 22 nt, Human
agaaccagucuuucaacucauu

SEQ ID NO: 2005001 - RNA, 19 nt, Human
agaagucuuagauguauau

SEQ ID NO: 2005002 - RNA, 17 nt, Human
agaagucuuagauguau

SEQ ID NO: 2005003 - RNA, 18 nt, Human
agaagucuucuauuuauu

SEQ ID NO: 2005004 - RNA, 13 nt, Human
agaagucuucaug

SEQ ID NO: 2005005 - RNA, 16 nt, Human
agaagucuucaugaaa

SEQ ID NO: 2005006 - RNA, 18 nt, Human
agaagucuucaugaaaug

SEQ ID NO: 2005007 - RNA, 19 nt, Human
agaagucuucaugaaaugc

SEQ ID NO: 2005008 - RNA, 14 nt, Human
agaagucacacagu

SEQ ID NO: 2005009 - RNA, 13 nt, Human
agaaguccagagu

SEQ ID NO: 2005010 - RNA, 15 nt, Human
agaagucaacauccu

SEQ ID NO: 2005011 - RNA, 13 nt, Human
agaagaucuuugg

SEQ ID NO: 2005012 - RNA, 15 nt, Human
agaagaucuuugggc

SEQ ID NO: 2005013 - RNA, 18 nt, Human
agaagggagcuggcucca

SEQ ID NO: 2005014 - RNA, 20 nt, Human
agaaggggacugccaccucc

SEQ ID NO: 2005015 - RNA, 15 nt, Human
agaaggggacugcca

SEQ ID NO: 2005016 - RNA, 16 nt, Human
agaaggggacugccac

SEQ ID NO: 2005017 - RNA, 19 nt, Human
agaaggggacugccaccuc

SEQ ID NO: 2005018 - RNA, 21 nt, Human
agcacagacccugcccugugg

SEQ ID NO: 2005019 - RNA, 18 nt, Human
agcacagaggccuccugu

SEQ ID NO: 2005020 - RNA, 17 nt, Human
agcaauucuccugccuc

SEQ ID NO: 2005021 - RNA, 18 nt, Human
agcaauucuccugccuca

SEQ ID NO: 2005022 - RNA, 19 nt, Human
agcaauucuccugccucag

SEQ ID NO: 2005023 - RNA, 20 nt, Human
agcaauucuccugccucagc

SEQ ID NO: 2005024 - RNA, 15 nt, Human
agcaauucuccugcc

SEQ ID NO: 2005025 - RNA, 14 nt, Human
agcagugggccugg

SEQ ID NO: 2005026 - RNA, 17 nt, Human
agcagugcaugcugucc

SEQ ID NO: 2005027 - RNA, 23 nt, Human
agcagugauauucuuuguuaauu

SEQ ID NO: 2005028 - RNA, 16 nt, Human
agcaguggagcccagg

SEQ ID NO: 2005029 - RNA, 18 nt, Human
agcaguggagcccaggag

SEQ ID NO: 2005030 - RNA, 19 nt, Human
agcagcguuucuaugacac

SEQ ID NO: 2005031 - RNA, 18 nt, Human
agcagcguuucuaugaca

SEQ ID NO: 2005032 - RNA, 20 nt, Human
agcagccuggacccugugga

SEQ ID NO: 2005033 - RNA, 16 nt, Human
agcagugcaugcuguc

SEQ ID NO: 2005034 - RNA, 13 nt, Human
agcagugcaugcu

SEQ ID NO: 2005035 - RNA, 16 nt, Human
agcagccuggacccug

SEQ ID NO: 2005036 - RNA, 14 nt, Human
agccaagaggcugc

SEQ ID NO: 2005037 - RNA, 15 nt, Human
agccaagaggcugca

SEQ ID NO: 2005038 - RNA, 22 nt, Human
agccagauuucacucuccuugg

SEQ ID NO: 2005039 - RNA, 20 nt, Human
agccagauuucacucuccuu

SEQ ID NO: 2005040 - RNA, 17 nt, Human
agccagauuucacucuc

SEQ ID NO: 2005041 - RNA, 14 nt, Human
agccagauuucacu

SEQ ID NO: 2005042 - RNA, 13 nt, Human
agcaucucccagu

SEQ ID NO: 2005043 - RNA, 17 nt, Human
agcaucuggaagagcua

SEQ ID NO: 2005044 - RNA, 17 nt, Human
agccaacuauggccugu

SEQ ID NO: 2005045 - RNA, 19 nt, Human
agcccacgcccccacuggu

SEQ ID NO: 2005046 - RNA, 18 nt, Human
agcccacgcccccacugg

SEQ ID NO: 2005047 - RNA, 17 nt, Human
agcccacgcccccacug

SEQ ID NO: 2005048 - RNA, 23 nt, Human
agcccaccccucaacaccucugc

SEQ ID NO: 2005049 - RNA, 13 nt, Human
agcccaccuuggc

SEQ ID NO: 2005050 - RNA, 17 nt, Human
agcccaaaccaccagaa

SEQ ID NO: 2005051 - RNA, 19 nt, Human
agcccaaaccaccagaagc

SEQ ID NO: 2005052 - RNA, 20 nt, Human
agcccaaaccaccagaagcc

SEQ ID NO: 2005053 - RNA, 22 nt, Human
agcccaaaccaccagaagccca

SEQ ID NO: 2005054 - RNA, 23 nt, Human
agccagcaggcucucaggccagc

SEQ ID NO: 2005055 - RNA, 21 nt, Human
agccagcaggcucucaggcca

SEQ ID NO: 2005056 - RNA, 22 nt, Human
agccagcaggcucucaggccag

SEQ ID NO: 2005057 - RNA, 16 nt, Human
agcaucuaugugagac

SEQ ID NO: 2005058 - RNA, 14 nt, Human
agauaugauucaaa

SEQ ID NO: 2005059 - RNA, 15 nt, Human
agauaugauucaaau

SEQ ID NO: 2005060 - RNA, 16 nt, Human
agauaugauucaaaug

SEQ ID NO: 2005061 - RNA, 15 nt, Human
agauauacuuguuuu

SEQ ID NO: 2005062 - RNA, 20 nt, Human
agauauacuuguuuuuguaa

SEQ ID NO: 2005063 - RNA, 21 nt, Human
agauauacuuguuuuuguaaa

SEQ ID NO: 2005064 - RNA, 23 nt, Human
agauauacuuguuuuuguaaaga

SEQ ID NO: 2005065 - RNA, 19 nt, Human
agagugggguagguuggga

SEQ ID NO: 2005066 - RNA, 15 nt, Human
agaguggcuccuccc

SEQ ID NO: 2005067 - RNA, 12 nt, Human
agaguggcuccu

SEQ ID NO: 2005068 - RNA, 13 nt, Human
agaguggcuccuc

SEQ ID NO: 2005069 - RNA, 14 nt, Human
agaguggcuccucc

SEQ ID NO: 2005070 - RNA, 20 nt, Human
agagggucugaggaauccag

SEQ ID NO: 2005071 - RNA, 21 nt, Human
agaggguaauaaccagacaca

SEQ ID NO: 2005072 - RNA, 19 nt, Human
agagggugauaauagaaga

SEQ ID NO: 2005073 - RNA, 19 nt, Human
agagggugaguccuccaga

SEQ ID NO: 2005074 - RNA, 20 nt, Human
agagggugaguccuccagaa

SEQ ID NO: 2005075 - RNA, 21 nt, Human
agagggugaguccuccagaac

SEQ ID NO: 2005076 - RNA, 23 nt, Human
agaggggguggccucccaacuca

SEQ ID NO: 2005077 - RNA, 13 nt, Human
agaguugaagaca

SEQ ID NO: 2005078 - RNA, 11 nt, Human
agaguguaaaa

SEQ ID NO: 2005079 - RNA, 21 nt, Human
agauagagagugaguacaugc

SEQ ID NO: 2005080 - RNA, 15 nt, Human
agaguugaagacaga

SEQ ID NO: 2005081 - RNA, 14 nt, Human
agaguugaagacag

SEQ ID NO: 2005082 - RNA, 20 nt, Human
agauaggaaggucauuucca

SEQ ID NO: 2005083 - RNA, 21 nt, Human
agauaggaaggucauuuccau

SEQ ID NO: 2005084 - RNA, 19 nt, Human
agauagccccacaggaggu

SEQ ID NO: 2005085 - RNA, 13 nt, Human
agauagaguaaaa

SEQ ID NO: 2005086 - RNA, 20 nt, Human
agauagccaaggccaaagga

SEQ ID NO: 2005087 - RNA, 20 nt, Human
agauagauaggucagugcaa

SEQ ID NO: 2005088 - RNA, 16 nt, Human
agauucuuuccugagg

SEQ ID NO: 2005089 - RNA, 15 nt, Human
agauucuuuccugag

SEQ ID NO: 2005090 - RNA, 18 nt, Human
agauucuuuccugaggcu

SEQ ID NO: 2005091 - RNA, 21 nt, Human
agauucuauguuaauauuuua

SEQ ID NO: 2005092 - RNA, 17 nt, Human
agauugagauguguuca

SEQ ID NO: 2005093 - RNA, 16 nt, Human
agauugcaacaggcug

SEQ ID NO: 2005094 - RNA, 16 nt, Human
agauugcaccacugca

SEQ ID NO: 2005095 - RNA, 17 nt, Human
agauugcaacaggcugg

SEQ ID NO: 2005096 - RNA, 19 nt, Human
agauugcaacaggcugggc

SEQ ID NO: 2005097 - RNA, 15 nt, Human
agcaaaaugcaugua

SEQ ID NO: 2005098 - RNA, 20 nt, Human
agcaaaaugcauguaaucaa

SEQ ID NO: 2005099 - RNA, 19 nt, Human
agcaaauucuguuuuucua

SEQ ID NO: 2005100 - RNA, 20 nt, Human
agcaaagcaugccaauuucu

SEQ ID NO: 2005101 - RNA, 18 nt, Human
agcaaacugguuauuuaa

SEQ ID NO: 2005102 - RNA, 19 nt, Human
agcaaacuuguugaauuua

SEQ ID NO: 2005103 - RNA, 11 nt, Human
agaugaauguc

SEQ ID NO: 2005104 - RNA, 18 nt, Human
agaugacaucugucuagg

SEQ ID NO: 2005105 - RNA, 15 nt, Human
agaugaaugucaguu

SEQ ID NO: 2005106 - RNA, 21 nt, Human
agauggcugugccucugccug

SEQ ID NO: 2005107 - RNA, 22 nt, Human
agauggcugugccucugccugu

SEQ ID NO: 2005108 - RNA, 15 nt, Human
agaugggggccucuu

SEQ ID NO: 2005109 - RNA, 18 nt, Human
agaugggggccucuuuca

SEQ ID NO: 2005110 - RNA, 17 nt, Human
agauggcugugccucug

SEQ ID NO: 2005111 - RNA, 18 nt, Human
agauggcugugccucugc

SEQ ID NO: 2005112 - RNA, 19 nt, Human
agauggcugugccucugcc

SEQ ID NO: 2005113 - RNA, 20 nt, Human
agauggcugugccucugccu

SEQ ID NO: 2005114 - RNA, 14 nt, Human
agauucuuuccuga

SEQ ID NO: 2005115 - RNA, 18 nt, Human
agauucuauguuaauauu

SEQ ID NO: 2005116 - RNA, 20 nt, Human
agauucuaggaccugugucc

SEQ ID NO: 2005117 - RNA, 22 nt, Human
agaugggugcuuggaggaagga

SEQ ID NO: 2005118 - RNA, 20 nt, Human
agaugggugcuuggaggaag

SEQ ID NO: 2005119 - RNA, 18 nt, Human
agaucucugcuuuggaaa

SEQ ID NO: 2005120 - RNA, 23 nt, Human
agaucucugcuuuggaaaucaca

SEQ ID NO: 2005121 - RNA, 22 nt, Human
aguuguuagugugucuuagugu

SEQ ID NO: 2005122 - RNA, 17 nt, Human
aguuguuagugugucuu

SEQ ID NO: 2005123 - RNA, 15 nt, Human
aguugaagucaugcu

SEQ ID NO: 2005124 - RNA, 17 nt, Human
aguugaagucaugcucc

SEQ ID NO: 2005125 - RNA, 14 nt, Human
aguugaauacuuga

SEQ ID NO: 2005126 - RNA, 19 nt, Human
aguugaauacuugaaccau

SEQ ID NO: 2005127 - RNA, 15 nt, Human
aguugaauacuugaa

SEQ ID NO: 2005128 - RNA, 16 nt, Human
aguugaauacuugaac

SEQ ID NO: 2005129 - RNA, 17 nt, Human
aguugaauacuugaacc

SEQ ID NO: 2005130 - RNA, 18 nt, Human
aguugaauacuugaacca

SEQ ID NO: 2005131 - RNA, 20 nt, Human
aguuguuagauuaagaaaua

SEQ ID NO: 2005132 - RNA, 17 nt, Human
aguuguuauuuauugaa

SEQ ID NO: 2005133 - RNA, 12 nt, Human
aguggccccacc

SEQ ID NO: 2005134 - RNA, 21 nt, Human
aguggcccaacaggggcucca

SEQ ID NO: 2005135 - RNA, 13 nt, Human
aguggccccaccu

SEQ ID NO: 2005136 - RNA, 16 nt, Human
aguggccaucauuucu

SEQ ID NO: 2005137 - RNA, 17 nt, Human
aguggccaucauuucug

SEQ ID NO: 2005138 - RNA, 15 nt, Human
aguggcccaacaggg

SEQ ID NO: 2005139 - RNA, 12 nt, Human
aguguuugcugc

SEQ ID NO: 2005140 - RNA, 14 nt, Human
aguggccccaccug

SEQ ID NO: 2005141 - RNA, 16 nt, Human
aguggccccaccuggc

SEQ ID NO: 2005142 - RNA, 18 nt, Human
aguggccccaccuggccc

SEQ ID NO: 2005143 - RNA, 19 nt, Human
aguggccccaccuggcccu

SEQ ID NO: 2005144 - RNA, 19 nt, Human
agugcuauuacgaaguuca

SEQ ID NO: 2005145 - RNA, 23 nt, Human
agugcuauuacgaaguucaagau

SEQ ID NO: 2005146 - RNA, 18 nt, Human
aguuaacaggcaaacauu

SEQ ID NO: 2005147 - RNA, 19 nt, Human
aguuaacaggcaaacauuu

SEQ ID NO: 2005148 - RNA, 18 nt, Human
aguugaaaaacagcugag

SEQ ID NO: 2005149 - RNA, 17 nt, Human
aguugaagacagagcua

SEQ ID NO: 2005150 - RNA, 16 nt, Human
aguugaagacagagcu

SEQ ID NO: 2005151 - RNA, 17 nt, Human
aguugaaaaacagcuga

SEQ ID NO: 2005152 - RNA, 13 nt, Human
aguuccacugaga

SEQ ID NO: 2005153 - RNA, 17 nt, Human
aguuccaaucaguagcu

SEQ ID NO: 2005154 - RNA, 16 nt, Human
aguucaucccuucucu

SEQ ID NO: 2005155 - RNA, 19 nt, Human
aguucaucccuucucuucc

SEQ ID NO: 2005156 - RNA, 15 nt, Human
aguuccacugagacc

SEQ ID NO: 2005157 - RNA, 21 nt, Human
aguuacaaauuauaauguauu

SEQ ID NO: 2005158 - RNA, 22 nt, Human
aguuacaaauuauaauguauuc

SEQ ID NO: 2005159 - RNA, 23 nt, Human
aguuacaaauuauaauguauuca

SEQ ID NO: 2005160 - RNA, 14 nt, Human
aguucauacccugu

SEQ ID NO: 2005161 - RNA, 21 nt, Human
aguuccaccaucaagccacca

SEQ ID NO: 2005162 - RNA, 18 nt, Human
aguuccaccaucaagcca

SEQ ID NO: 2005163 - RNA, 13 nt, Human
aguucaucccuuc

SEQ ID NO: 2005164 - RNA, 15 nt, Human
aguucaucccuucuc

SEQ ID NO: 2005165 - RNA, 20 nt, Human
aguuugccccguucuguuug

SEQ ID NO: 2005166 - RNA, 17 nt, Human
auaaaaaaaagaaaaaa

SEQ ID NO: 2005167 - RNA, 18 nt, Human
auaaaaaaaagaaaaaag

SEQ ID NO: 2005168 - RNA, 14 nt, Human
auaaaaaaugacaa

SEQ ID NO: 2005169 - RNA, 15 nt, Human
auaaaaaaacagcuu

SEQ ID NO: 2005170 - RNA, 12 nt, Human
auaaaaaaagaa

SEQ ID NO: 2005171 - RNA, 16 nt, Human
auaaaaaaagaaaaaa

SEQ ID NO: 2005172 - RNA, 19 nt, Human
auaaaacagaguaaucuug

SEQ ID NO: 2005173 - RNA, 21 nt, Human
auaaaacagaguaaucuuguu

SEQ ID NO: 2005174 - RNA, 16 nt, Human
auaaaacagaguaauc

SEQ ID NO: 2005175 - RNA, 16 nt, Human
auaaaagacagugaaa

SEQ ID NO: 2005176 - RNA, 15 nt, Human
auaaaagacagugaa

SEQ ID NO: 2005177 - RNA, 11 nt, Human
aguuugcaguu

SEQ ID NO: 2005178 - RNA, 15 nt, Human
aguuugcauuucaga

SEQ ID NO: 2005179 - RNA, 16 nt, Human
aguuugcauuucagaa

SEQ ID NO: 2005180 - RNA, 17 nt, Human
aguuugcauuucagaaa

SEQ ID NO: 2005181 - RNA, 23 nt, Human
aguuugcauuucagaaagccuuu

SEQ ID NO: 2005182 - RNA, 14 nt, Human
aguuugauuaaauu

SEQ ID NO: 2005183 - RNA, 22 nt, Human
aguuugaucuuccucugcuaaa

SEQ ID NO: 2005184 - RNA, 23 nt, Human
aguuugaucuuccucugcuaaau

SEQ ID NO: 2005185 - RNA, 14 nt, Human
aguuugaucuuccu

SEQ ID NO: 2005186 - RNA, 16 nt, Human
aguuugaucuuccucu

SEQ ID NO: 2005187 - RNA, 21 nt, Human
aguuugaucuuccucugcuaa

SEQ ID NO: 2005188 - RNA, 14 nt, Human
aguuugaggaaauu

SEQ ID NO: 2005189 - RNA, 18 nt, Human
aguuugaggaaauuugca

SEQ ID NO: 2005190 - RNA, 19 nt, Human
aguuugaggaaauuugcag

SEQ ID NO: 2005191 - RNA, 20 nt, Human
aguuugaggaaauuugcagc

SEQ ID NO: 2005192 - RNA, 17 nt, Human
aguuugaggauuaguuu

SEQ ID NO: 2005193 - RNA, 18 nt, Human
aguuugaggauuaguuua

SEQ ID NO: 2005194 - RNA, 16 nt, Human
aguuugauaaauagug

SEQ ID NO: 2005195 - RNA, 18 nt, Human
aguuugauaaauaguguu

SEQ ID NO: 2005196 - RNA, 19 nt, Human
aguuugauaaauaguguua

SEQ ID NO: 2005197 - RNA, 20 nt, Human
aguuucugucguuaaaaaca

SEQ ID NO: 2005198 - RNA, 22 nt, Human
aguuucugucguuaaaaacaga

SEQ ID NO: 2005199 - RNA, 23 nt, Human
aguuucugucguuaaaaacagau

SEQ ID NO: 2005200 - RNA, 13 nt, Human
aguuucugugguu

SEQ ID NO: 2005201 - RNA, 17 nt, Human
aguuucugugguuggcu

SEQ ID NO: 2005202 - RNA, 21 nt, Human
aguuucugugguuggcuggga

SEQ ID NO: 2005203 - RNA, 23 nt, Human
aguuucugugguuggcugggaaa

SEQ ID NO: 2005204 - RNA, 17 nt, Human
auacaccacuacauucu

SEQ ID NO: 2005205 - RNA, 14 nt, Human
auacaccgggccug

SEQ ID NO: 2005206 - RNA, 18 nt, Human
auacaccgggccuggaga

SEQ ID NO: 2005207 - RNA, 21 nt, Human
auacaccucaacuaaauccaa

SEQ ID NO: 2005208 - RNA, 13 nt, Human
auagaaaaacaaa

SEQ ID NO: 2005209 - RNA, 14 nt, Human
auacuuaaauguua

SEQ ID NO: 2005210 - RNA, 14 nt, Human
auacuuuuuugaaa

SEQ ID NO: 2005211 - RNA, 17 nt, Human
auacuuuuuugaaauca

SEQ ID NO: 2005212 - RNA, 20 nt, Human
auacuugaaccauaaaaugu

SEQ ID NO: 2005213 - RNA, 22 nt, Human
auacuugaaccauaaaaugucc

SEQ ID NO: 2005214 - RNA, 12 nt, Human
auacuuaaaugu

SEQ ID NO: 2005215 - RNA, 12 nt, Human
auacuugaacca

SEQ ID NO: 2005216 - RNA, 13 nt, Human
auacuugaaccau

SEQ ID NO: 2005217 - RNA, 16 nt, Human
auacuugaaccauaaa

SEQ ID NO: 2005218 - RNA, 17 nt, Human
auacuugaaccauaaaa

SEQ ID NO: 2005219 - RNA, 18 nt, Human
auacuugaaccauaaaau

SEQ ID NO: 2005220 - RNA, 19 nt, Human
auacuugaaaauuaacaug

SEQ ID NO: 2005221 - RNA, 21 nt, Human
auacuguuuuucgucauucca

SEQ ID NO: 2005222 - RNA, 20 nt, Human
auacuguuauucuuugcacu

SEQ ID NO: 2005223 - RNA, 22 nt, Human
auacuguuauucuuugcacuuu

SEQ ID NO: 2005224 - RNA, 15 nt, Human
auacuguuauucuuu

SEQ ID NO: 2005225 - RNA, 16 nt, Human
auacuguuauucuuug

SEQ ID NO: 2005226 - RNA, 18 nt, Human
auacuguuauucuuugca

SEQ ID NO: 2005227 - RNA, 21 nt, Human
auaaagaugagugagcaugcc

SEQ ID NO: 2005228 - RNA, 16 nt, Human
auaaagacccaggggg

SEQ ID NO: 2005229 - RNA, 21 nt, Human
auaagcuaacaccagacagac

SEQ ID NO: 2005230 - RNA, 14 nt, Human
auaagcuaguugaa

SEQ ID NO: 2005231 - RNA, 15 nt, Human
auaagcuaguugaau

SEQ ID NO: 2005232 - RNA, 22 nt, Human
auaagcuaguugaauacuugaa

SEQ ID NO: 2005233 - RNA, 23 nt, Human
auaagcuaguugaauacuugaac

SEQ ID NO: 2005234 - RNA, 17 nt, Human
auaagcuaguugaauac

SEQ ID NO: 2005235 - RNA, 18 nt, Human
auaagcuaguugaauacu

SEQ ID NO: 2005236 - RNA, 20 nt, Human
auaagcuaguugaauacuug

SEQ ID NO: 2005237 - RNA, 21 nt, Human
auaagcuaguugaauacuuga

SEQ ID NO: 2005238 - RNA, 15 nt, Human
auacaccacuacauu

SEQ ID NO: 2005239 - RNA, 12 nt, Human
auaauguuaaca

SEQ ID NO: 2005240 - RNA, 14 nt, Human
auaauguucugcua

SEQ ID NO: 2005241 - RNA, 22 nt, Human
auaauguucugcuaaauuucaa

SEQ ID NO: 2005242 - RNA, 23 nt, Human
auacaaugcugugcccuaaagug

SEQ ID NO: 2005243 - RNA, 12 nt, Human
auaauguuguca

SEQ ID NO: 2005244 - RNA, 19 nt, Human
auaaguggccuugacacau

SEQ ID NO: 2005245 - RNA, 21 nt, Human
auaaguggccuugacacauua

SEQ ID NO: 2005246 - RNA, 19 nt, Human
aggggccagacccugccca

SEQ ID NO: 2005247 - RNA, 15 nt, Human
aguacuggagaaaau

SEQ ID NO: 2005248 - RNA, 19 nt, Human
aguacugagcagugauauu

SEQ ID NO: 2005249 - RNA, 23 nt, Human
aguacugagcagugauauucuuu

SEQ ID NO: 2005250 - RNA, 19 nt, Human
aguaccuggguccccagcc

SEQ ID NO: 2005251 - RNA, 21 nt, Human
aguaccuggguccccagcccu

SEQ ID NO: 2005252 - RNA, 22 nt, Human
aguaccuggguccccagcccuu

SEQ ID NO: 2005253 - RNA, 20 nt, Human
aguaccuuaucaaaguagca

SEQ ID NO: 2005254 - RNA, 22 nt, Human
aguauauugauccagaaagaaa

SEQ ID NO: 2005255 - RNA, 16 nt, Human
aguauauuauaauaga

SEQ ID NO: 2005256 - RNA, 20 nt, Human
aguacuucuccacccugcuc

SEQ ID NO: 2005257 - RNA, 19 nt, Human
aguacuucuccacccugcu

SEQ ID NO: 2005258 - RNA, 21 nt, Human
aguacuucuccacccugcucu

SEQ ID NO: 2005259 - RNA, 22 nt, Human
aguacuucuccacccugcucuc

SEQ ID NO: 2005260 - RNA, 15 nt, Human
aguauaucucaguuu

SEQ ID NO: 2005261 - RNA, 17 nt, Human
aguaacuuacuuaggug

SEQ ID NO: 2005262 - RNA, 14 nt, Human
aguaacuugggagu

SEQ ID NO: 2005263 - RNA, 18 nt, Human
aguaacuugggagugugg

SEQ ID NO: 2005264 - RNA, 18 nt, Human
aguaacuggugauauauc

SEQ ID NO: 2005265 - RNA, 19 nt, Human
aguaaaugggggugcauuu

SEQ ID NO: 2005266 - RNA, 20 nt, Human
aguaaaugggggugcauuug

SEQ ID NO: 2005267 - RNA, 21 nt, Human
aguaaaugggggugcauuuga

SEQ ID NO: 2005268 - RNA, 15 nt, Human
aguaaauguaguuca

SEQ ID NO: 2005269 - RNA, 19 nt, Human
aguaaauguaguucauacu

SEQ ID NO: 2005270 - RNA, 12 nt, Human
aguaaauguagu

SEQ ID NO: 2005271 - RNA, 14 nt, Human
aguaaauguaguuc

SEQ ID NO: 2005272 - RNA, 16 nt, Human
aguaaaggcaaacuua

SEQ ID NO: 2005273 - RNA, 12 nt, Human
aguaaacacugu

SEQ ID NO: 2005274 - RNA, 13 nt, Human
aguaaacacugug

SEQ ID NO: 2005275 - RNA, 16 nt, Human
aguaaacacuguguau

SEQ ID NO: 2005276 - RNA, 15 nt, Human
aguaaaccugucuga

SEQ ID NO: 2005277 - RNA, 16 nt, Human
agugacagaggcagcc

SEQ ID NO: 2005278 - RNA, 19 nt, Human
agugacagaggcagcccca

SEQ ID NO: 2005279 - RNA, 14 nt, Human
agugacagaggcag

SEQ ID NO: 2005280 - RNA, 19 nt, Human
agugauccucccaccucag

SEQ ID NO: 2005281 - RNA, 20 nt, Human
agugauccucccaccucagc

SEQ ID NO: 2005282 - RNA, 22 nt, Human
agugauccucccaccucagccu

SEQ ID NO: 2005283 - RNA, 23 nt, Human
agugauccucccaccucagccuc

SEQ ID NO: 2005284 - RNA, 20 nt, Human
agugauggguuaguggaugg

SEQ ID NO: 2005285 - RNA, 13 nt, Human
agugauuaccagg

SEQ ID NO: 2005286 - RNA, 17 nt, Human
agugccuuugcagcuca

SEQ ID NO: 2005287 - RNA, 13 nt, Human
agugcguggccca

SEQ ID NO: 2005288 - RNA, 18 nt, Human
agugccuuugcagcucag

SEQ ID NO: 2005289 - RNA, 20 nt, Human
agugccuuugcagcucagaa

SEQ ID NO: 2005290 - RNA, 21 nt, Human
agugccuuugcagcucagaac

SEQ ID NO: 2005291 - RNA, 14 nt, Human
agugcuacugaaag

SEQ ID NO: 2005292 - RNA, 17 nt, Human
agugcguggcccaccag

SEQ ID NO: 2005293 - RNA, 22 nt, Human
agugccuuauggaacacucuga

SEQ ID NO: 2005294 - RNA, 21 nt, Human
agugccuuauggaacacucug

SEQ ID NO: 2005295 - RNA, 20 nt, Human
agugccuuauggaacacucu

SEQ ID NO: 2005296 - RNA, 19 nt, Human
agugccuuauggaacacuc

SEQ ID NO: 2005297 - RNA, 18 nt, Human
agugauucuccugccuca

SEQ ID NO: 2005298 - RNA, 19 nt, Human
agugauucuccugccucag

SEQ ID NO: 2005299 - RNA, 20 nt, Human
agugauucuccugccucagc

SEQ ID NO: 2005300 - RNA, 18 nt, Human
agugccuuauggaacacu

SEQ ID NO: 2005301 - RNA, 13 nt, Human
aguaucaugaagc

SEQ ID NO: 2005302 - RNA, 21 nt, Human
agucugauucccaagcucugc

SEQ ID NO: 2005303 - RNA, 22 nt, Human
agucugauucccaagcucugcu

SEQ ID NO: 2005304 - RNA, 12 nt, Human
agucugcauaua

SEQ ID NO: 2005305 - RNA, 17 nt, Human
aguccuuugagcuccug

SEQ ID NO: 2005306 - RNA, 16 nt, Human
agucgaggacagggag

SEQ ID NO: 2005307 - RNA, 18 nt, Human
agucuggcccuuccuuuu

SEQ ID NO: 2005308 - RNA, 17 nt, Human
agucuggggaccagcuu

SEQ ID NO: 2005309 - RNA, 18 nt, Human
aguccuuaccagcagagc

SEQ ID NO: 2005310 - RNA, 16 nt, Human
aguccuuaccagcaga

SEQ ID NO: 2005311 - RNA, 14 nt, Human
aguccucuuuucug

SEQ ID NO: 2005312 - RNA, 14 nt, Human
aguccucugaauga

SEQ ID NO: 2005313 - RNA, 12 nt, Human
aguccucugaau

SEQ ID NO: 2005314 - RNA, 15 nt, Human
agucauuugugaauu

SEQ ID NO: 2005315 - RNA, 13 nt, Human
agucauuuucaag

SEQ ID NO: 2005316 - RNA, 15 nt, Human
agucauuuucaagac

SEQ ID NO: 2005317 - RNA, 16 nt, Human
agucauuuuguguuga

SEQ ID NO: 2005318 - RNA, 21 nt, Human
agucauuuuguguugaagagc

SEQ ID NO: 2005319 - RNA, 15 nt, Human
agucauuucugauuu

SEQ ID NO: 2005320 - RNA, 13 nt, Human
agucauuucugau

SEQ ID NO: 2005321 - RNA, 14 nt, Human
agucauuucugauu

SEQ ID NO: 2005322 - RNA, 12 nt, Human
agucauuguaau

SEQ ID NO: 2005323 - RNA, 15 nt, Human
agucauuguaauguu

SEQ ID NO: 2005324 - RNA, 16 nt, Human
agucauuguaauguug

SEQ ID NO: 2005325 - RNA, 17 nt, Human
agucauuguaauguugu

SEQ ID NO: 2005326 - RNA, 20 nt, Human
agucauuguaauguugugaa

SEQ ID NO: 2005327 - RNA, 23 nt, Human
aucuaggaagacuuuggaaagag

SEQ ID NO: 2005328 - RNA, 11 nt, Human
aucuaggauuu

SEQ ID NO: 2005329 - RNA, 19 nt, Human
aucuaggauuuuaagggaa

SEQ ID NO: 2005330 - RNA, 22 nt, Human
augaggcugcuuuccaaagcca

SEQ ID NO: 2005331 - RNA, 21 nt, Human
augagcuuugucuacuucaaa

SEQ ID NO: 2005332 - RNA, 18 nt, Human
augaccuuucaauaggaa

SEQ ID NO: 2005333 - RNA, 18 nt, Human
augaccuuguaauguaac

SEQ ID NO: 2005334 - RNA, 19 nt, Human
augaccuuguaauguaacu

SEQ ID NO: 2005335 - RNA, 20 nt, Human
augaccuuguaauguaacug

SEQ ID NO: 2005336 - RNA, 15 nt, Human
augaccuuucaauag

SEQ ID NO: 2005337 - RNA, 13 nt, Human
augaccuuucaau

SEQ ID NO: 2005338 - RNA, 12 nt, Human
augagccuggca

SEQ ID NO: 2005339 - RNA, 11 nt, Human
augagccuggc

SEQ ID NO: 2005340 - RNA, 21 nt, Human
augagccucagcauccuggca

SEQ ID NO: 2005341 - RNA, 19 nt, Human
augagccucagcauccugg

SEQ ID NO: 2005342 - RNA, 13 nt, Human
augaaacuuggau

SEQ ID NO: 2005343 - RNA, 16 nt, Human
augaaacuuuuggaag

SEQ ID NO: 2005344 - RNA, 12 nt, Human
augaaagacugu

SEQ ID NO: 2005345 - RNA, 23 nt, Human
augaagcauuuacuuuguguuca

SEQ ID NO: 2005346 - RNA, 18 nt, Human
augaaagaaaacuuuuau

SEQ ID NO: 2005347 - RNA, 13 nt, Human
augaaguacucau

SEQ ID NO: 2005348 - RNA, 23 nt, Human
augaaguaauaugcacacauuuu

SEQ ID NO: 2005349 - RNA, 14 nt, Human
augaaguaauaugc

SEQ ID NO: 2005350 - RNA, 21 nt, Human
augaaguaauaugcacacauu

SEQ ID NO: 2005351 - RNA, 23 nt, Human
augaaguuuuuuuuauacaggau

SEQ ID NO: 2005352 - RNA, 17 nt, Human
augaauaaagacaccua

SEQ ID NO: 2005353 - RNA, 12 nt, Human
augaauacuuug

SEQ ID NO: 2005354 - RNA, 17 nt, Human
augaauacgagcaagcu

SEQ ID NO: 2005355 - RNA, 19 nt, Human
augcauguaaucaacaugg

SEQ ID NO: 2005356 - RNA, 13 nt, Human
augcauguaauca

SEQ ID NO: 2005357 - RNA, 11 nt, Human
augccuggugg

SEQ ID NO: 2005358 - RNA, 12 nt, Human
augccugguggc

SEQ ID NO: 2005359 - RNA, 13 nt, Human
augccugguggca

SEQ ID NO: 2005360 - RNA, 14 nt, Human
augccugguggcag

SEQ ID NO: 2005361 - RNA, 19 nt, Human
augccugguggcagcugcg

SEQ ID NO: 2005362 - RNA, 18 nt, Human
augccugguggcagcugc

SEQ ID NO: 2005363 - RNA, 21 nt, Human
augccugguggcagcugcggu

SEQ ID NO: 2005364 - RNA, 24 nt, Human
augcauauuauuuuauguugcaua

SEQ ID NO: 2005365 - RNA, 20 nt, Human
augcauauuauuuuauguug

SEQ ID NO: 2005366 - RNA, 19 nt, Human
augcauaauaauccugcaa

SEQ ID NO: 2005367 - RNA, 21 nt, Human
augcauaauaauccugcaaag

SEQ ID NO: 2005368 - RNA, 23 nt, Human
augcauaauaauccugcaaagua

SEQ ID NO: 2005369 - RNA, 19 nt, Human
augcucugcauguuacaua

SEQ ID NO: 2005370 - RNA, 18 nt, Human
augcucugcauguuacau

SEQ ID NO: 2005371 - RNA, 22 nt, Human
augcuucuucagagacuccugc

SEQ ID NO: 2005372 - RNA, 21 nt, Human
augcuuuaggauguacaguua

SEQ ID NO: 2005373 - RNA, 20 nt, Human
augcuucuucagagacuccu

SEQ ID NO: 2005374 - RNA, 17 nt, Human
augcuucuucagagacu

SEQ ID NO: 2005375 - RNA, 14 nt, Human
augcuucuucagag

SEQ ID NO: 2005376 - RNA, 23 nt, Human
auggagauagccccacaggaggu

SEQ ID NO: 2005377 - RNA, 23 nt, Human
augcuuuccauauuuuuuuccuu

SEQ ID NO: 2005378 - RNA, 15 nt, Human
augcuuuccauauuu

SEQ ID NO: 2005379 - RNA, 16 nt, Human
augcuuuccauauuuu

SEQ ID NO: 2005380 - RNA, 22 nt, Human
augcuuuccauauuuuuuuccu

SEQ ID NO: 2005381 - RNA, 16 nt, Human
augcuuugaucccuuc

SEQ ID NO: 2005382 - RNA, 18 nt, Human
augggaaaguauucucuu

SEQ ID NO: 2005383 - RNA, 22 nt, Human
augggaaaguauucucuuuuca

SEQ ID NO: 2005384 - RNA, 15 nt, Human
augggacagggagga

SEQ ID NO: 2005385 - RNA, 20 nt, Human
auggaguuaaacuuuagugc

SEQ ID NO: 2005386 - RNA, 18 nt, Human
auggaguuggaguucauu

SEQ ID NO: 2005387 - RNA, 23 nt, Human
auggaguuggaguucauucauau

SEQ ID NO: 2005388 - RNA, 18 nt, Human
auggcuuuauuuuuuuga

SEQ ID NO: 2005389 - RNA, 23 nt, Human
auggcuuuauuuuuuugaacucu

SEQ ID NO: 2005390 - RNA, 22 nt, Human
aucuaggaagacuuuggaaaga

SEQ ID NO: 2005391 - RNA, 14 nt, Human
aucgaccugccucg

SEQ ID NO: 2005392 - RNA, 17 nt, Human
aucgacuuguucuugau

SEQ ID NO: 2005393 - RNA, 20 nt, Human
auccaggccccucccucucc

SEQ ID NO: 2005394 - RNA, 21 nt, Human
auccaggccccucccucucca

SEQ ID NO: 2005395 - RNA, 12 nt, Human
auccaggccacu

SEQ ID NO: 2005396 - RNA, 19 nt, Human
auccaggccacucuuagcc

SEQ ID NO: 2005397 - RNA, 14 nt, Human
auccaggccccucc

SEQ ID NO: 2005398 - RNA, 21 nt, Human
auccagcccugaguuccuagc

SEQ ID NO: 2005399 - RNA, 21 nt, Human
auccacugugccaugugccag

SEQ ID NO: 2005400 - RNA, 23 nt, Human
auccacuuuaucuugaauaaugu

SEQ ID NO: 2005401 - RNA, 23 nt, Human
auccacucucucuuguucuuacu

SEQ ID NO: 2005402 - RNA, 19 nt, Human
aucauggagguuugaagau

SEQ ID NO: 2005403 - RNA, 20 nt, Human
aucaugacaaagacugagua

SEQ ID NO: 2005404 - RNA, 15 nt, Human
aucauccuaagcuau

SEQ ID NO: 2005405 - RNA, 13 nt, Human
aucaaauacauuu

SEQ ID NO: 2005406 - RNA, 14 nt, Human
aucaaauacauuua

SEQ ID NO: 2005407 - RNA, 17 nt, Human
aucaaauaauaccuuag

SEQ ID NO: 2005408 - RNA, 20 nt, Human
aucaaauaauaccuuagaag

SEQ ID NO: 2005409 - RNA, 11 nt, Human
aucaaagugcu

SEQ ID NO: 2005410 - RNA, 16 nt, Human
aucaaaguagcaaaug

SEQ ID NO: 2005411 - RNA, 14 nt, Human
auagcacagacccu

SEQ ID NO: 2005412 - RNA, 19 nt, Human
aucaaagagguuuuaaaaa

SEQ ID NO: 2005413 - RNA, 12 nt, Human
aucaaaggacac

SEQ ID NO: 2005414 - RNA, 20 nt, Human
aucaaaagguuaauaaagua

SEQ ID NO: 2005415 - RNA, 24 nt, Human
aucaaaagguuaauaaaguaauua

SEQ ID NO: 2005416 - RNA, 14 nt, Human
auauuuuuuucuga

SEQ ID NO: 2005417 - RNA, 18 nt, Human
auauuuuuuuccuuacau

SEQ ID NO: 2005418 - RNA, 19 nt, Human
auauuuuuuuccuuacaua

SEQ ID NO: 2005419 - RNA, 21 nt, Human
auauuuuuuuccuuacauaaa

SEQ ID NO: 2005420 - RNA, 22 nt, Human
auauuuuuuuccuuacauaaac

SEQ ID NO: 2005421 - RNA, 14 nt, Human
auauuuuuuuccuu

SEQ ID NO: 2005422 - RNA, 15 nt, Human
auauuuuuuuccuua

SEQ ID NO: 2005423 - RNA, 17 nt, Human
auauuuuuuuccuuaca

SEQ ID NO: 2005424 - RNA, 16 nt, Human
auauuuuuuucugaaa

SEQ ID NO: 2005425 - RNA, 18 nt, Human
auauuuuuuucugaaauu

SEQ ID NO: 2005426 - RNA, 18 nt, Human
auauuuuuuucuuuucuu

SEQ ID NO: 2005427 - RNA, 19 nt, Human
auauuuuuuucugaaauuu

SEQ ID NO: 2005428 - RNA, 12 nt, Human
aucaaaaaggcu

SEQ ID NO: 2005429 - RNA, 13 nt, Human
aucaaaaaggcuu

SEQ ID NO: 2005430 - RNA, 16 nt, Human
aucaaaaaggcuuaua

SEQ ID NO: 2005431 - RNA, 17 nt, Human
aucaaaaaggcuuauaa

SEQ ID NO: 2005432 - RNA, 21 nt, Human
aucaaaaaggcuuauaaaaca

SEQ ID NO: 2005433 - RNA, 14 nt, Human
aucaaaagaaagaa

SEQ ID NO: 2005434 - RNA, 23 nt, Human
aucaaaaaggcuuauaaaacaga

SEQ ID NO: 2005435 - RNA, 14 nt, Human
acaaacagaugcuc

SEQ ID NO: 2005436 - RNA, 14 nt, Human
acaaacaagcauau

SEQ ID NO: 2005437 - RNA, 15 nt, Human
acaaacugcuuccuu

SEQ ID NO: 2005438 - RNA, 21 nt, Human
acaaacugcuuccuuucuuga

SEQ ID NO: 2005439 - RNA, 21 nt, Human
acaaacugcacaugauuucac

SEQ ID NO: 2005440 - RNA, 23 nt, Human
acaaacugcacaugauuucacaa

SEQ ID NO: 2005441 - RNA, 14 nt, Human
acaaacugcacaug

SEQ ID NO: 2005442 - RNA, 16 nt, Human
acaaacugcacaugau

SEQ ID NO: 2005443 - RNA, 19 nt, Human
acaaacugcacaugauuuc

SEQ ID NO: 2005444 - RNA, 20 nt, Human
acaaacugcacaugauuuca

SEQ ID NO: 2005445 - RNA, 22 nt, Human
acaaacucucugaaccccuccc

SEQ ID NO: 2005446 - RNA, 15 nt, Human
acaaacucucugaac

SEQ ID NO: 2005447 - RNA, 13 nt, Human
acaacccccagcu

SEQ ID NO: 2005448 - RNA, 14 nt, Human
acaacccccagcuc

SEQ ID NO: 2005449 - RNA, 19 nt, Human
acaaggcaaggcugucaau

SEQ ID NO: 2005450 - RNA, 17 nt, Human
acaaggcaaggcuguca

SEQ ID NO: 2005451 - RNA, 16 nt, Human
acaaggcaaggcuguc

SEQ ID NO: 2005452 - RNA, 15 nt, Human
acaaguuaaauaaau

SEQ ID NO: 2005453 - RNA, 15 nt, Human
acaaggugcaggcag

SEQ ID NO: 2005454 - RNA, 16 nt, Human
acaaggugcaggcagg

SEQ ID NO: 2005455 - RNA, 14 nt, Human
acacagcauuucaa

SEQ ID NO: 2005456 - RNA, 14 nt, Human
acacagcucuucuc

SEQ ID NO: 2005457 - RNA, 16 nt, Human
acacagcucuucucca

SEQ ID NO: 2005458 - RNA, 18 nt, Human
acacagcucuucuccagg

SEQ ID NO: 2005459 - RNA, 18 nt, Human
acaccagagcccaccuug

SEQ ID NO: 2005460 - RNA, 23 nt, Human
acaccagagcccaccuuggcuca

SEQ ID NO: 2005461 - RNA, 15 nt, Human
acaccaauauucaua

SEQ ID NO: 2005462 - RNA, 13 nt, Human
acaccagagccca

SEQ ID NO: 2005463 - RNA, 16 nt, Human
acacgugggcuccccu

SEQ ID NO: 2005464 - RNA, 18 nt, Human
acacgugggcuccccucu

SEQ ID NO: 2005465 - RNA, 19 nt, Human
acacgugggcuccccucuu

SEQ ID NO: 2005466 - RNA, 20 nt, Human
acacgugggcuccccucuuc

SEQ ID NO: 2005467 - RNA, 21 nt, Human
acacgugggcuccccucuucc

SEQ ID NO: 2005468 - RNA, 23 nt, Human
acacgugggcuccccucuuccuc

SEQ ID NO: 2005469 - RNA, 17 nt, Human
acacguuuuaaggacug

SEQ ID NO: 2005470 - RNA, 22 nt, Human
acacguuuuaaggacugacuga

SEQ ID NO: 2005471 - RNA, 15 nt, Human
acacguuggaguaua

SEQ ID NO: 2005472 - RNA, 14 nt, Human
acacguuuuaagga

SEQ ID NO: 2005473 - RNA, 15 nt, Human
acacguuuuaaggac

SEQ ID NO: 2005474 - RNA, 16 nt, Human
acacguuuuaaggacu

SEQ ID NO: 2005475 - RNA, 14 nt, Human
acaccaaucuuacu

SEQ ID NO: 2005476 - RNA, 18 nt, Human
acaccaaucuuacuuugu

SEQ ID NO: 2005477 - RNA, 12 nt, Human
aauuuccuggga

SEQ ID NO: 2005478 - RNA, 15 nt, Human
aauuuccugggagcu

SEQ ID NO: 2005479 - RNA, 17 nt, Human
aauuuccccuaaucuuu

SEQ ID NO: 2005480 - RNA, 18 nt, Human
aauuuccccuaaucuuuu

SEQ ID NO: 2005481 - RNA, 17 nt, Human
aauuucccaaagcagug

SEQ ID NO: 2005482 - RNA, 15 nt, Human
aauuucccaaagcag

SEQ ID NO: 2005483 - RNA, 11 nt, Human
aauuguaauag

SEQ ID NO: 2005484 - RNA, 17 nt, Human
aauuguaauuaauaaua

SEQ ID NO: 2005485 - RNA, 11 nt, Human
aauuauauucc

SEQ ID NO: 2005486 - RNA, 23 nt, Human
aauuauauuccucuugcauuuca

SEQ ID NO: 2005487 - RNA, 21 nt, Human
aauuauagugucaugcagagu

SEQ ID NO: 2005488 - RNA, 19 nt, Human
aauuauacccccugcaaag

SEQ ID NO: 2005489 - RNA, 16 nt, Human
aauuauaauguauuca

SEQ ID NO: 2005490 - RNA, 18 nt, Human
aauuauaauguauucaua

SEQ ID NO: 2005491 - RNA, 22 nt, Human
aauuauaauguauucauauuug

SEQ ID NO: 2005492 - RNA, 16 nt, Human
aauuaugcuaagaauu

SEQ ID NO: 2005493 - RNA, 21 nt, Human
aauuauggcccagggggcuaa

SEQ ID NO: 2005494 - RNA, 18 nt, Human
aauuaugcuaagaauuuu

SEQ ID NO: 2005495 - RNA, 22 nt, Human
aauuaugcuaagaauuuuuuau

SEQ ID NO: 2005496 - RNA, 17 nt, Human
aauuaugguaaaauuuu

SEQ ID NO: 2005497 - RNA, 18 nt, Human
aauuaugguaaaauuuug

SEQ ID NO: 2005498 - RNA, 12 nt, Human
aauuaugaaacu

SEQ ID NO: 2005499 - RNA, 13 nt, Human
aauuaugaaacuu

SEQ ID NO: 2005500 - RNA, 15 nt, Human
aauuaugaaacuuuu

SEQ ID NO: 2005501 - RNA, 18 nt, Human
aauuaugaaacuuuugga

SEQ ID NO: 2005502 - RNA, 19 nt, Human
aauuaugaguuauuuuuau

SEQ ID NO: 2005503 - RNA, 22 nt, Human
aauuguaaggaaugauuaauua

SEQ ID NO: 2005504 - RNA, 13 nt, Human
aauucuuaaauau

SEQ ID NO: 2005505 - RNA, 22 nt, Human
aauuggaguuggaguagaaugu

SEQ ID NO: 2005506 - RNA, 18 nt, Human
aauucuguuuuucuaggc

SEQ ID NO: 2005507 - RNA, 14 nt, Human
aauucuguuuuucu

SEQ ID NO: 2005508 - RNA, 11 nt, Human
aauucugauuu

SEQ ID NO: 2005509 - RNA, 13 nt, Human
aauucugauuucu

SEQ ID NO: 2005510 - RNA, 14 nt, Human
aauucugauuucuu

SEQ ID NO: 2005511 - RNA, 15 nt, Human
aauucugauuucuuu

SEQ ID NO: 2005512 - RNA, 16 nt, Human
aauucugauuucuuuu

SEQ ID NO: 2005513 - RNA, 22 nt, Human
aauucugauuucuuuucaccau

SEQ ID NO: 2005514 - RNA, 17 nt, Human
aauucuguuuuuaaaaa

SEQ ID NO: 2005515 - RNA, 18 nt, Human
aauucuguuuuuaaaaau

SEQ ID NO: 2005516 - RNA, 20 nt, Human
aauucuguuuuuaaaaauua

SEQ ID NO: 2005517 - RNA, 15 nt, Human
aauucucuuauccaa

SEQ ID NO: 2005518 - RNA, 23 nt, Human
aauucucuuccaaccauuuaucu

SEQ ID NO: 2005519 - RNA, 14 nt, Human
aauucugaaguuau

SEQ ID NO: 2005520 - RNA, 15 nt, Human
aauucugaaguuaua

SEQ ID NO: 2005521 - RNA, 18 nt, Human
aauucugaaguuauauuu

SEQ ID NO: 2005522 - RNA, 19 nt, Human
aauucugaaguuauauuuc

SEQ ID NO: 2005523 - RNA, 21 nt, Human
aauucugaaguuauauuuccu

SEQ ID NO: 2005524 - RNA, 15 nt, Human
aauucucuaguuuga

SEQ ID NO: 2005525 - RNA, 17 nt, Human
aauucucuaguuugauu

SEQ ID NO: 2005526 - RNA, 21 nt, Human
aauucucauuugucacacacu

SEQ ID NO: 2005527 - RNA, 14 nt, Human
aauucuccugccuc

SEQ ID NO: 2005528 - RNA, 19 nt, Human
aauucucccgggacucugc

SEQ ID NO: 2005529 - RNA, 15 nt, Human
aauucuccugccuca

SEQ ID NO: 2005530 - RNA, 16 nt, Human
aauucuccugccucag

SEQ ID NO: 2005531 - RNA, 11 nt, Human
aauucuccuuu

SEQ ID NO: 2005532 - RNA, 13 nt, Human
aauucuaugccug

SEQ ID NO: 2005533 - RNA, 15 nt, Human
aauucuaugccuguc

SEQ ID NO: 2005534 - RNA, 19 nt, Human
aauucucagaaucucaaau

SEQ ID NO: 2005535 - RNA, 14 nt, Human
aauucuacuuugag

SEQ ID NO: 2005536 - RNA, 22 nt, Human
aauucuagcuuugagcuuaaga

SEQ ID NO: 2005537 - RNA, 16 nt, Human
accagagcugccaccu

SEQ ID NO: 2005538 - RNA, 14 nt, Human
accagagcugccac

SEQ ID NO: 2005539 - RNA, 12 nt, Human
accagagcugcc

SEQ ID NO: 2005540 - RNA, 23 nt, Human
accacgucuauuucaucagaaca

SEQ ID NO: 2005541 - RNA, 13 nt, Human
accagagcugcca

SEQ ID NO: 2005542 - RNA, 20 nt, Human
accacguugggacagggagg

SEQ ID NO: 2005543 - RNA, 18 nt, Human
accaagccuggucagccc

SEQ ID NO: 2005544 - RNA, 15 nt, Human
accaccagaagccca

SEQ ID NO: 2005545 - RNA, 16 nt, Human
accaccagaagcccag

SEQ ID NO: 2005546 - RNA, 17 nt, Human
accaccagaagcccaga

SEQ ID NO: 2005547 - RNA, 21 nt, Human
accaacgucugugccauuuug

SEQ ID NO: 2005548 - RNA, 14 nt, Human
accaagccguggcu

SEQ ID NO: 2005549 - RNA, 15 nt, Human
accaagccguggcuu

SEQ ID NO: 2005550 - RNA, 16 nt, Human
accaagccguggcuuc

SEQ ID NO: 2005551 - RNA, 17 nt, Human
accaagccguggcuucc

SEQ ID NO: 2005552 - RNA, 18 nt, Human
accaagccguggcuuccc

SEQ ID NO: 2005553 - RNA, 13 nt, Human
accacguuucuaa

SEQ ID NO: 2005554 - RNA, 14 nt, Human
accacguuucuaaa

SEQ ID NO: 2005555 - RNA, 18 nt, Human
accacgcuggaccuugaa

SEQ ID NO: 2005556 - RNA, 14 nt, Human
accacgcuggaccu

SEQ ID NO: 2005557 - RNA, 16 nt, Human
accacgcuggaccuug

SEQ ID NO: 2005558 - RNA, 17 nt, Human
accaacgucugugccau

SEQ ID NO: 2005559 - RNA, 14 nt, Human
accaacgucugugc

SEQ ID NO: 2005560 - RNA, 19 nt, Human
acauguuuuucuucucccu

SEQ ID NO: 2005561 - RNA, 16 nt, Human
acauguuuucaaaugg

SEQ ID NO: 2005562 - RNA, 17 nt, Human
acauguuuucaaaugga

SEQ ID NO: 2005563 - RNA, 18 nt, Human
acauguggcuugaauuaa

SEQ ID NO: 2005564 - RNA, 20 nt, Human
acauguggcuugaauuaaga

SEQ ID NO: 2005565 - RNA, 11 nt, Human
acauguuuuca

SEQ ID NO: 2005566 - RNA, 12 nt, Human
acauguuuucaa

SEQ ID NO: 2005567 - RNA, 13 nt, Human
acauguuuucaaa

SEQ ID NO: 2005568 - RNA, 14 nt, Human
acauguuuucaaau

SEQ ID NO: 2005569 - RNA, 15 nt, Human
acauguuuucaaaug

SEQ ID NO: 2005570 - RNA, 17 nt, Human
acauguguuggcagccu

SEQ ID NO: 2005571 - RNA, 20 nt, Human
acauaaauuuaguauuuugu

SEQ ID NO: 2005572 - RNA, 15 nt, Human
acauaagauaaaugu

SEQ ID NO: 2005573 - RNA, 20 nt, Human
acauaaguauuuaauucaug

SEQ ID NO: 2005574 - RNA, 22 nt, Human
acaucauuccuuuuuauuuaua

SEQ ID NO: 2005575 - RNA, 16 nt, Human
acaucauuccuuuuua

SEQ ID NO: 2005576 - RNA, 17 nt, Human
acaucauuccuuuuuau

SEQ ID NO: 2005577 - RNA, 21 nt, Human
acaucauuccuuuuuauuuau

SEQ ID NO: 2005578 - RNA, 20 nt, Human
acauacaggaagguagaaau

SEQ ID NO: 2005579 - RNA, 16 nt, Human
acauacaauuccaaac

SEQ ID NO: 2005580 - RNA, 17 nt, Human
acauaauacugaaccac

SEQ ID NO: 2005581 - RNA, 18 nt, Human
acauaauacugaaccacu

SEQ ID NO: 2005582 - RNA, 14 nt, Human
acauaauacugaac

SEQ ID NO: 2005583 - RNA, 16 nt, Human
acauaauacugaacca

SEQ ID NO: 2005584 - RNA, 18 nt, Human
acauccccccgccaaaag

SEQ ID NO: 2005585 - RNA, 12 nt, Human
acauccccugcu

SEQ ID NO: 2005586 - RNA, 15 nt, Human
acaucccucucugcu

SEQ ID NO: 2005587 - RNA, 16 nt, Human
acaucccucucugcug

SEQ ID NO: 2005588 - RNA, 17 nt, Human
acaugcacucagcucuu

SEQ ID NO: 2005589 - RNA, 18 nt, Human
acaugcacucagcucuug

SEQ ID NO: 2005590 - RNA, 13 nt, Human
acaugcacgugug

SEQ ID NO: 2005591 - RNA, 20 nt, Human
acaugccucucucaggccaa

SEQ ID NO: 2005592 - RNA, 23 nt, Human
acaugcagccacuuaggacaaau

SEQ ID NO: 2005593 - RNA, 19 nt, Human
acagcucuucuccaggcug

SEQ ID NO: 2005594 - RNA, 20 nt, Human
acagcucuucuccaggcugu

SEQ ID NO: 2005595 - RNA, 15 nt, Human
acaggcaaugcuggc

SEQ ID NO: 2005596 - RNA, 16 nt, Human
acaggcaaugcuggcu

SEQ ID NO: 2005597 - RNA, 14 nt, Human
acaggcacccacca

SEQ ID NO: 2005598 - RNA, 17 nt, Human
acaggcaaugcuggcug

SEQ ID NO: 2005599 - RNA, 17 nt, Human
acaguggagugcaaaag

SEQ ID NO: 2005600 - RNA, 19 nt, Human
acaguggagugcaaaaggc

SEQ ID NO: 2005601 - RNA, 15 nt, Human
acagugcuacugaaa

SEQ ID NO: 2005602 - RNA, 17 nt, Human
acagugcuacugaaagg

SEQ ID NO: 2005603 - RNA, 19 nt, Human
acagugauuaccagggacu

SEQ ID NO: 2005604 - RNA, 13 nt, Human
acagugcaucuca

SEQ ID NO: 2005605 - RNA, 15 nt, Human
acagugcaucucagc

SEQ ID NO: 2005606 - RNA, 17 nt, Human
acagugcaucucagccc

SEQ ID NO: 2005607 - RNA, 18 nt, Human
acagugcaucucagccca

SEQ ID NO: 2005608 - RNA, 23 nt, Human
acaggcacccaccaucaugucug

SEQ ID NO: 2005609 - RNA, 23 nt, Human
acagugaucaaguuauuuuuaau

SEQ ID NO: 2005610 - RNA, 20 nt, Human
acuaauguguaagacaaaaa

SEQ ID NO: 2005611 - RNA, 18 nt, Human
acuaauggggcggugaga

SEQ ID NO: 2005612 - RNA, 19 nt, Human
acguggagaaucacaggcu

SEQ ID NO: 2005613 - RNA, 21 nt, Human
acguggagaaucacaggcugg

SEQ ID NO: 2005614 - RNA, 22 nt, Human
acguggagaaucacaggcuggg

SEQ ID NO: 2005615 - RNA, 19 nt, Human
acgcugugcugcccugccc

SEQ ID NO: 2005616 - RNA, 22 nt, Human
acgcugugcugcccugcccacc

SEQ ID NO: 2005617 - RNA, 15 nt, Human
acgcaccagcccaga

SEQ ID NO: 2005618 - RNA, 12 nt, Human
acgcagcccugc

SEQ ID NO: 2005619 - RNA, 22 nt, Human
acgcagcccugcuuugggcugc

SEQ ID NO: 2005620 - RNA, 23 nt, Human
acgcagcccugcuuugggcugcc

SEQ ID NO: 2005621 - RNA, 17 nt, Human
acgugaagauaccauaa

SEQ ID NO: 2005622 - RNA, 13 nt, Human
acgucuuaaauau

SEQ ID NO: 2005623 - RNA, 14 nt, Human
acgucuuaaauauu

SEQ ID NO: 2005624 - RNA, 13 nt, Human
acgucugugccau

SEQ ID NO: 2005625 - RNA, 12 nt, Human
acgucugugcca

SEQ ID NO: 2005626 - RNA, 19 nt, Human
acggacacucaaaagcugg

SEQ ID NO: 2005627 - RNA, 17 nt, Human
acggacacucaaaagcu

SEQ ID NO: 2005628 - RNA, 19 nt, Human
acggaauaguuggcuagga

SEQ ID NO: 2005629 - RNA, 20 nt, Human
acgauuucuguuuagauaau

SEQ ID NO: 2005630 - RNA, 23 nt, Human
acgauuucuguuuagauaauaca

SEQ ID NO: 2005631 - RNA, 19 nt, Human
acgauuucuguuuagauaa

SEQ ID NO: 2005632 - RNA, 12 nt, Human
accucugccuga

SEQ ID NO: 2005633 - RNA, 20 nt, Human
accucugccugaagucacac

SEQ ID NO: 2005634 - RNA, 23 nt, Human
accucugccugaagucacacagu

SEQ ID NO: 2005635 - RNA, 20 nt, Human
accugccccucaacucuccu

SEQ ID NO: 2005636 - RNA, 15 nt, Human
accugccccucaacu

SEQ ID NO: 2005637 - RNA, 12 nt, Human
accugccccuca

SEQ ID NO: 2005638 - RNA, 23 nt, Human
accugccaggaagccagcaggcu

SEQ ID NO: 2005639 - RNA, 22 nt, Human
accugccaggaagccagcaggc

SEQ ID NO: 2005640 - RNA, 21 nt, Human
accugccaggaagccagcagg

SEQ ID NO: 2005641 - RNA, 23 nt, Human
accugugagcugcaccagguaga

SEQ ID NO: 2005642 - RNA, 14 nt, Human
acccugguugugug

SEQ ID NO: 2005643 - RNA, 18 nt, Human
acccuguauaucagggua

SEQ ID NO: 2005644 - RNA, 15 nt, Human
acccugucaaacauu

SEQ ID NO: 2005645 - RNA, 16 nt, Human
acccugucaaacauua

SEQ ID NO: 2005646 - RNA, 21 nt, Human
acccugucucuacuaaaaaua

SEQ ID NO: 2005647 - RNA, 18 nt, Human
acccugucaaacauuagu

SEQ ID NO: 2005648 - RNA, 16 nt, Human
acccugugauggggcc

SEQ ID NO: 2005649 - RNA, 16 nt, Human
acccuggggagaaagu

SEQ ID NO: 2005650 - RNA, 16 nt, Human
acccucaggcaggugg

SEQ ID NO: 2005651 - RNA, 15 nt, Human
acccucaggcaggug

SEQ ID NO: 2005652 - RNA, 13 nt, Human
acccucaucacca

SEQ ID NO: 2005653 - RNA, 14 nt, Human
acccucaggcaggu

SEQ ID NO: 2005654 - RNA, 13 nt, Human
acccucaggcagg

SEQ ID NO: 2005655 - RNA, 18 nt, Human
acccucagagccaccccu

SEQ ID NO: 2005656 - RNA, 23 nt, Human
acccucaucaccaacgucugugc

SEQ ID NO: 2005657 - RNA, 23 nt, Human
acccuggcacuauaauguaagcu

SEQ ID NO: 2005658 - RNA, 18 nt, Human
acccuggcacccagggug

SEQ ID NO: 2005659 - RNA, 22 nt, Human
acccuggcaaagcagcaacaca

SEQ ID NO: 2005660 - RNA, 19 nt, Human
acccuauugcugcuugagg

SEQ ID NO: 2005661 - RNA, 14 nt, Human
acccuauugcugcu

SEQ ID NO: 2005662 - RNA, 11 nt, Human
acccucagagc

SEQ ID NO: 2005663 - RNA, 13 nt, Human
acccuauugcugc

SEQ ID NO: 2005664 - RNA, 15 nt, Human
acccuauaucuauaa

SEQ ID NO: 2005665 - RNA, 18 nt, Human
accgugaggccagagaca

SEQ ID NO: 2005666 - RNA, 23 nt, Human
accgggcugggagcucugcagag

SEQ ID NO: 2005667 - RNA, 21 nt, Human
accgggcugggagcucugcag

SEQ ID NO: 2005668 - RNA, 23 nt, Human
accgugaggccagagacacaagc

SEQ ID NO: 2005669 - RNA, 19 nt, Human
accgugccuggccacgccc

SEQ ID NO: 2005670 - RNA, 12 nt, Human
accucagccucc

SEQ ID NO: 2005671 - RNA, 11 nt, Human
accucagccuc

SEQ ID NO: 2005672 - RNA, 21 nt, Human
acccugugauggggcccugcc

SEQ ID NO: 2005673 - RNA, 20 nt, Human
acccugugauggggcccugc

SEQ ID NO: 2005674 - RNA, 19 nt, Human
acccugugauggggcccug

SEQ ID NO: 2005675 - RNA, 17 nt, Human
acccugugauggggccc

SEQ ID NO: 2005676 - RNA, 12 nt, Human
accgggcacuca

SEQ ID NO: 2005677 - RNA, 14 nt, Human
accgggcacucaga

SEQ ID NO: 2005678 - RNA, 20 nt, Human
accgggccacagagaaagua

SEQ ID NO: 2005679 - RNA, 16 nt, Human
accgggcacucagaag

SEQ ID NO: 2005680 - RNA, 11 nt, Human
accucaggccu

SEQ ID NO: 2005681 - RNA, 20 nt, Human
accucaggugauccacccac

SEQ ID NO: 2005682 - RNA, 21 nt, Human
accucaggugauccacccacc

SEQ ID NO: 2005683 - RNA, 13 nt, Human
acuuggucuguga

SEQ ID NO: 2005684 - RNA, 18 nt, Human
acuuggucacagccaggc

SEQ ID NO: 2005685 - RNA, 23 nt, Human
acuugggggcucagcaaggccac

SEQ ID NO: 2005686 - RNA, 21 nt, Human
acuuggguccaggccuacucc

SEQ ID NO: 2005687 - RNA, 23 nt, Human
acuuggggggcugaggugggagg

SEQ ID NO: 2005688 - RNA, 22 nt, Human
acuugaaaagagacaggcaggu

SEQ ID NO: 2005689 - RNA, 18 nt, Human
acuuggggcacagggaga

SEQ ID NO: 2005690 - RNA, 15 nt, Human
acuugggggcucagc

SEQ ID NO: 2005691 - RNA, 16 nt, Human
acuugggggcucagca

SEQ ID NO: 2005692 - RNA, 17 nt, Human
acuugggggcucagcaa

SEQ ID NO: 2005693 - RNA, 20 nt, Human
acuugggggcucagcaaggc

SEQ ID NO: 2005694 - RNA, 21 nt, Human
acuugggggcucagcaaggcc

SEQ ID NO: 2005695 - RNA, 22 nt, Human
acuugggggcucagcaaggcca

SEQ ID NO: 2005696 - RNA, 14 nt, Human
acuugaaaauuaac

SEQ ID NO: 2005697 - RNA, 15 nt, Human
acuugaaaagagaca

SEQ ID NO: 2005698 - RNA, 17 nt, Human
acuugaaaagagacagg

SEQ ID NO: 2005699 - RNA, 20 nt, Human
acuugaaaagagacaggcag

SEQ ID NO: 2005700 - RNA, 21 nt, Human
acuugaaaagagacaggcagg

SEQ ID NO: 2005701 - RNA, 12 nt, Human
acuugaaaauua

SEQ ID NO: 2005702 - RNA, 11 nt, Human
acuugaaaaga

SEQ ID NO: 2005703 - RNA, 22 nt, Human
acuucuuggcuuggugaggaaa

SEQ ID NO: 2005704 - RNA, 21 nt, Human
acuucagacauagaauuaaca

SEQ ID NO: 2005705 - RNA, 12 nt, Human
acuuguagauuu

SEQ ID NO: 2005706 - RNA, 13 nt, Human
acuuguagauuug

SEQ ID NO: 2005707 - RNA, 20 nt, Human
acuuggucacagccaggcgc

SEQ ID NO: 2005708 - RNA, 14 nt, Human
acuuguagauuuga

SEQ ID NO: 2005709 - RNA, 15 nt, Human
acuuguagauuugau

SEQ ID NO: 2005710 - RNA, 16 nt, Human
acuuguagauuugauu

SEQ ID NO: 2005711 - RNA, 17 nt, Human
acuuguagauuugauuu

SEQ ID NO: 2005712 - RNA, 18 nt, Human
acuuguagauuugauuuu

SEQ ID NO: 2005713 - RNA, 18 nt, Human
acuuguauauucuauuuu

SEQ ID NO: 2005714 - RNA, 19 nt, Human
acuuguauauucuauuuua

SEQ ID NO: 2005715 - RNA, 20 nt, Human
acuuguauauucuauuuuac

SEQ ID NO: 2005716 - RNA, 22 nt, Human
acuuguauauucuauuuuacaa

SEQ ID NO: 2005717 - RNA, 22 nt, Human
acuuaaaaaugguuuaaauggu

SEQ ID NO: 2005718 - RNA, 12 nt, Human
acuuaaaacacg

SEQ ID NO: 2005719 - RNA, 14 nt, Human
acuuaaaacacguu

SEQ ID NO: 2005720 - RNA, 18 nt, Human
acuuaaaacacguuuuaa

SEQ ID NO: 2005721 - RNA, 15 nt, Human
acuucaaaaguuugu

SEQ ID NO: 2005722 - RNA, 15 nt, Human
acuguuucaaacuuu

SEQ ID NO: 2005723 - RNA, 18 nt, Human
acuguuucaaacuuuacu

SEQ ID NO: 2005724 - RNA, 19 nt, Human
acuguuucaaacuuuacua

SEQ ID NO: 2005725 - RNA, 16 nt, Human
acugucuuuuuucuaa

SEQ ID NO: 2005726 - RNA, 17 nt, Human
acuguaaaauacuucuu

SEQ ID NO: 2005727 - RNA, 13 nt, Human
acuggugauauau

SEQ ID NO: 2005728 - RNA, 15 nt, Human
acuggugauauaucu

SEQ ID NO: 2005729 - RNA, 12 nt, Human
acuguaaaaugc

SEQ ID NO: 2005730 - RNA, 13 nt, Human
acuguaaaaugca

SEQ ID NO: 2005731 - RNA, 15 nt, Human
acuguaaaaugcaaa

SEQ ID NO: 2005732 - RNA, 16 nt, Human
acuguaaaaugcaaaa

SEQ ID NO: 2005733 - RNA, 19 nt, Human
acuguaaaaugcaaaaaau

SEQ ID NO: 2005734 - RNA, 21 nt, Human
acuguaaaaugcaaaaaaucu

SEQ ID NO: 2005735 - RNA, 24 nt, Human
acuguaaaaugcaaaaaaucuuaa

SEQ ID NO: 2005736 - RNA, 16 nt, Human
acugugaagagaacca

SEQ ID NO: 2005737 - RNA, 23 nt, Human
acugucuuuuuucuaaaguaaaa

SEQ ID NO: 2005738 - RNA, 22 nt, Human
acugucuuuuuucuaaaguaaa

SEQ ID NO: 2005739 - RNA, 17 nt, Human
acugugccaugugccag

SEQ ID NO: 2005740 - RNA, 18 nt, Human
acugugccaugugccagg

SEQ ID NO: 2005741 - RNA, 19 nt, Human
acugcccaggccugccugu

SEQ ID NO: 2005742 - RNA, 14 nt, Human
acugccaugccagc

SEQ ID NO: 2005743 - RNA, 12 nt, Human
acuggaacucuc

SEQ ID NO: 2005744 - RNA, 15 nt, Human
acuggaggagcuggg

SEQ ID NO: 2005745 - RNA, 15 nt, Human
acugccuauuuuaau

SEQ ID NO: 2005746 - RNA, 17 nt, Human
acuguaaaauaauaacu

SEQ ID NO: 2005747 - RNA, 12 nt, Human
acugguggcccg

SEQ ID NO: 2005748 - RNA, 15 nt, Human
acucccaucagccca

SEQ ID NO: 2005749 - RNA, 22 nt, Human
acucccaucugugaaaggaaag

SEQ ID NO: 2005750 - RNA, 20 nt, Human
acucccagcaucgcacucug

SEQ ID NO: 2005751 - RNA, 15 nt, Human
acucccaagcuggac

SEQ ID NO: 2005752 - RNA, 21 nt, Human
acucccaagacccgagcuggg

SEQ ID NO: 2005753 - RNA, 18 nt, Human
acucccugccccccagcc

SEQ ID NO: 2005754 - RNA, 14 nt, Human
acucccuuucaaca

SEQ ID NO: 2005755 - RNA, 15 nt, Human
acucuacagaggcca

SEQ ID NO: 2005756 - RNA, 16 nt, Human
acucuacaugcuuguu

SEQ ID NO: 2005757 - RNA, 23 nt, Human
acugaauuucuuuugccguuauu

SEQ ID NO: 2005758 - RNA, 15 nt, Human
acugaauuuuuaugu

SEQ ID NO: 2005759 - RNA, 16 nt, Human
acugaauuuuuaugug

SEQ ID NO: 2005760 - RNA, 19 nt, Human
acugaauuuuuauguguga

SEQ ID NO: 2005761 - RNA, 17 nt, Human
acugacauuguuggcca

SEQ ID NO: 2005762 - RNA, 18 nt, Human
acugacauuguuggccaa

SEQ ID NO: 2005763 - RNA, 13 nt, Human
acugaauuaugaa

SEQ ID NO: 2005764 - RNA, 14 nt, Human
acugaauuaugaaa

SEQ ID NO: 2005765 - RNA, 15 nt, Human
acugaauuaugaaac

SEQ ID NO: 2005766 - RNA, 20 nt, Human
acugaauuaugaaacuuuug

SEQ ID NO: 2005767 - RNA, 12 nt, Human
acugaauuccaa

SEQ ID NO: 2005768 - RNA, 21 nt, Human
acugaauuccaaacaugguuu

SEQ ID NO: 2005769 - RNA, 12 nt, Human
acugaauuucuu

SEQ ID NO: 2005770 - RNA, 18 nt, Human
acugauguuugugcagua

SEQ ID NO: 2005771 - RNA, 16 nt, Human
acugauguuugugcag

SEQ ID NO: 2005772 - RNA, 20 nt, Human
acugauuuuguacauaaaca

SEQ ID NO: 2005773 - RNA, 16 nt, Human
acugauuuuuuuuucc

SEQ ID NO: 2005774 - RNA, 20 nt, Human
acugauuuuuuuuuccuuca

SEQ ID NO: 2005775 - RNA, 19 nt, Human
acugauuuuuuuuuccuuc

SEQ ID NO: 2005776 - RNA, 18 nt, Human
acugauuuuuuuuuccuu

SEQ ID NO: 2005777 - RNA, 17 nt, Human
acugauuuuuuuuuccu

SEQ ID NO: 2005778 - RNA, 14 nt, Human
acugauuacugccu

SEQ ID NO: 2005779 - RNA, 19 nt, Human
acugauguguugugccuua

SEQ ID NO: 2005780 - RNA, 23 nt, Human
acugaucucaggggucuuaccuu

SEQ ID NO: 2005781 - RNA, 23 nt, Human
acugaugggcaacccccagccug

SEQ ID NO: 2005782 - RNA, 16 nt, Human
acugauccagcccuga

SEQ ID NO: 2005783 - RNA, 17 nt, Human
acugauccagcccugag

SEQ ID NO: 2005784 - RNA, 15 nt, Human
aagaguccucugaau

SEQ ID NO: 2005785 - RNA, 13 nt, Human
aagagaaaaaaua

SEQ ID NO: 2005786 - RNA, 19 nt, Human
aagacuuuucuuucagcca

SEQ ID NO: 2005787 - RNA, 12 nt, Human
aagacuuuucuu

SEQ ID NO: 2005788 - RNA, 21 nt, Human
aagacuuuuccaacccucauc

SEQ ID NO: 2005789 - RNA, 15 nt, Human
aagaccacguuucua

SEQ ID NO: 2005790 - RNA, 17 nt, Human
aagaccacguuucuaaa

SEQ ID NO: 2005791 - RNA, 23 nt, Human
aagacagauacuccuccaagguu

SEQ ID NO: 2005792 - RNA, 11 nt, Human
aagagaaaaga

SEQ ID NO: 2005793 - RNA, 12 nt, Human
aagagaaaagaa

SEQ ID NO: 2005794 - RNA, 13 nt, Human
aagagaaaagaaa

SEQ ID NO: 2005795 - RNA, 17 nt, Human
aagacuuuuccaacccu

SEQ ID NO: 2005796 - RNA, 16 nt, Human
aagagaaaagaaaaaa

SEQ ID NO: 2005797 - RNA, 14 nt, Human
aagagaaaagaaaa

SEQ ID NO: 2005798 - RNA, 15 nt, Human
aagagaaaagaaaaa

SEQ ID NO: 2005799 - RNA, 12 nt, Human
aagaacuuguuu

SEQ ID NO: 2005800 - RNA, 14 nt, Human
aagaacuuguuuaa

SEQ ID NO: 2005801 - RNA, 15 nt, Human
aagaacuuguuuaau

SEQ ID NO: 2005802 - RNA, 18 nt, Human
aagaacuuguuuaauaaa

SEQ ID NO: 2005803 - RNA, 12 nt, Human
aagaacugcuuu

SEQ ID NO: 2005804 - RNA, 16 nt, Human
aagaacuaucuucauc

SEQ ID NO: 2005805 - RNA, 14 nt, Human
aagaacuaucuuca

SEQ ID NO: 2005806 - RNA, 17 nt, Human
aacgcccacuucccugg

SEQ ID NO: 2005807 - RNA, 12 nt, Human
aacgcagcccug

SEQ ID NO: 2005808 - RNA, 16 nt, Human
aacgcagcccugcuuu

SEQ ID NO: 2005809 - RNA, 17 nt, Human
aagaaccuaacauuuau

SEQ ID NO: 2005810 - RNA, 14 nt, Human
aagaacuagcauaa

SEQ ID NO: 2005811 - RNA, 23 nt, Human
aagacacaggggacacccagaaa

SEQ ID NO: 2005812 - RNA, 20 nt, Human
aagacaaugugaaaagaaaa

SEQ ID NO: 2005813 - RNA, 19 nt, Human
aagacaaugugaaaagaaa

SEQ ID NO: 2005814 - RNA, 22 nt, Human
aagacaaugacuuacuguacau

SEQ ID NO: 2005815 - RNA, 19 nt, Human
aagaacuuccccauacaaa

SEQ ID NO: 2005816 - RNA, 14 nt, Human
aagacaacauugua

SEQ ID NO: 2005817 - RNA, 17 nt, Human
aagacaacauuguaaga

SEQ ID NO: 2005818 - RNA, 21 nt, Human
aagacaaggaaaaaauaacaa

SEQ ID NO: 2005819 - RNA, 18 nt, Human
aagaagaaauaguucugu

SEQ ID NO: 2005820 - RNA, 19 nt, Human
aagcugcacccucaggcag

SEQ ID NO: 2005821 - RNA, 13 nt, Human
aagcugcacccuc

SEQ ID NO: 2005822 - RNA, 15 nt, Human
aaggcaaggcuguca

SEQ ID NO: 2005823 - RNA, 16 nt, Human
aaggcaaggcugucaa

SEQ ID NO: 2005824 - RNA, 19 nt, Human
aaggcagggagggccuggg

SEQ ID NO: 2005825 - RNA, 22 nt, Human
aaggcagggagggccugggccc

SEQ ID NO: 2005826 - RNA, 18 nt, Human
aaggcaggggaauguaug

SEQ ID NO: 2005827 - RNA, 20 nt, Human
aaggcaggggaauguaugug

SEQ ID NO: 2005828 - RNA, 13 nt, Human
aaggcaaggcugu

SEQ ID NO: 2005829 - RNA, 13 nt, Human
aagauaaguugga

SEQ ID NO: 2005830 - RNA, 15 nt, Human
aagauaaguuggaaa

SEQ ID NO: 2005831 - RNA, 16 nt, Human
aagauaaguuggaaac

SEQ ID NO: 2005832 - RNA, 17 nt, Human
aagauaaguuggaaaca

SEQ ID NO: 2005833 - RNA, 14 nt, Human
aagauaaaugugcu

SEQ ID NO: 2005834 - RNA, 21 nt, Human
aagauaauauuaaggaagaca

SEQ ID NO: 2005835 - RNA, 19 nt, Human
aagauaauauuaaggaaga

SEQ ID NO: 2005836 - RNA, 17 nt, Human
aagauacaguuacucag

SEQ ID NO: 2005837 - RNA, 19 nt, Human
aagauaaguuggaaacacu

SEQ ID NO: 2005838 - RNA, 20 nt, Human
aagauaaguuggaaacacua

SEQ ID NO: 2005839 - RNA, 22 nt, Human
aagauaaguuggaaacacuaaa

SEQ ID NO: 2005840 - RNA, 20 nt, Human
aagccagggcccgggaagca

SEQ ID NO: 2005841 - RNA, 21 nt, Human
aagccagguuccacagaggac

SEQ ID NO: 2005842 - RNA, 23 nt, Human
aagccagguuccacagaggacac

SEQ ID NO: 2005843 - RNA, 13 nt, Human
aagcuacuuauug

SEQ ID NO: 2005844 - RNA, 16 nt, Human
aagcgugagccacugc

SEQ ID NO: 2005845 - RNA, 13 nt, Human
aagcguauggcuu

SEQ ID NO: 2005846 - RNA, 15 nt, Human
aagcguauggcuuua

SEQ ID NO: 2005847 - RNA, 15 nt, Human
aagcgugagccacug

SEQ ID NO: 2005848 - RNA, 14 nt, Human
aagcggcuggcagc

SEQ ID NO: 2005849 - RNA, 21 nt, Human
aagcggcccuaagggaguguc

SEQ ID NO: 2005850 - RNA, 22 nt, Human
aagcggcucaagcccaggaggg

SEQ ID NO: 2005851 - RNA, 14 nt, Human
aagcgaaaaacuca

SEQ ID NO: 2005852 - RNA, 18 nt, Human
aagccuuuguugaacugu

SEQ ID NO: 2005853 - RNA, 10 nt, Human
aagccuuugu

SEQ ID NO: 2005854 - RNA, 17 nt, Human
aagccuuucauuuugcu

SEQ ID NO: 2005855 - RNA, 14 nt, Human
aagccuuuguugaa

SEQ ID NO: 2005856 - RNA, 15 nt, Human
aagccuuucauuuug

SEQ ID NO: 2005857 - RNA, 16 nt, Human
aauaaacacucuugaa

SEQ ID NO: 2005858 - RNA, 11 nt, Human
aauaaacacuc

SEQ ID NO: 2005859 - RNA, 23 nt, Human
aaguuuaaggaauaugggagaaa

SEQ ID NO: 2005860 - RNA, 19 nt, Human
aauaaacacucuugaaaaa

SEQ ID NO: 2005861 - RNA, 12 nt, Human
aauaaacuuucu

SEQ ID NO: 2005862 - RNA, 15 nt, Human
aaguuggaaacacua

SEQ ID NO: 2005863 - RNA, 19 nt, Human
aaguuggaaacacuaaaug

SEQ ID NO: 2005864 - RNA, 20 nt, Human
aaguuggaaacacuaaaugu

SEQ ID NO: 2005865 - RNA, 21 nt, Human
aaguuggaaacacuaaauguu

SEQ ID NO: 2005866 - RNA, 22 nt, Human
aaguuggaaacacuaaauguua

SEQ ID NO: 2005867 - RNA, 23 nt, Human
aaguuggaaacacuaaauguuaa

SEQ ID NO: 2005868 - RNA, 15 nt, Human
aaguuguacuuuaaa

SEQ ID NO: 2005869 - RNA, 18 nt, Human
aaguuguacuuuaaaaau

SEQ ID NO: 2005870 - RNA, 20 nt, Human
aaguuguacuuuaaaaauuu

SEQ ID NO: 2005871 - RNA, 21 nt, Human
aaguuguacuuuaaaaauuua

SEQ ID NO: 2005872 - RNA, 21 nt, Human
aaguuguacuccaauggcuga

SEQ ID NO: 2005873 - RNA, 12 nt, Human
aaguuguacuuu

SEQ ID NO: 2005874 - RNA, 14 nt, Human
aaguuguacuuuaa

SEQ ID NO: 2005875 - RNA, 19 nt, Human
aaguuuaaauauuaagcau

SEQ ID NO: 2005876 - RNA, 14 nt, Human
aaguuuaaggaaua

SEQ ID NO: 2005877 - RNA, 15 nt, Human
aaguuuaaggaauau

SEQ ID NO: 2005878 - RNA, 22 nt, Human
aagugcugcauuuaaaagauac

SEQ ID NO: 2005879 - RNA, 23 nt, Human
aaguggccuccgucacuaccugg

SEQ ID NO: 2005880 - RNA, 13 nt, Human
aaguggcaaagcu

SEQ ID NO: 2005881 - RNA, 19 nt, Human
aaguggcaaagcuguucuu

SEQ ID NO: 2005882 - RNA, 14 nt, Human
aaguggacuggagg

SEQ ID NO: 2005883 - RNA, 22 nt, Human
aaguggcaaagcuguucuuccu

SEQ ID NO: 2005884 - RNA, 23 nt, Human
aaguggcaaagcuguucuuccug

SEQ ID NO: 2005885 - RNA, 13 nt, Human
aaguggcaccugu

SEQ ID NO: 2005886 - RNA, 17 nt, Human
aaguggcaccugucugc

SEQ ID NO: 2005887 - RNA, 18 nt, Human
aaguggcaccugucugcu

SEQ ID NO: 2005888 - RNA, 21 nt, Human
aaguggcaccugucugcucca

SEQ ID NO: 2005889 - RNA, 12 nt, Human
aagugcugggau

SEQ ID NO: 2005890 - RNA, 19 nt, Human
aauaauguuaacauggaca

SEQ ID NO: 2005891 - RNA, 14 nt, Human
aauaaagcagcguu

SEQ ID NO: 2005892 - RNA, 17 nt, Human
aauaaugugaaacugga

SEQ ID NO: 2005893 - RNA, 22 nt, Human
aauaaugugaaacuggauuaaa

SEQ ID NO: 2005894 - RNA, 16 nt, Human
aauaaagcaauaagaa

SEQ ID NO: 2005895 - RNA, 21 nt, Human
aaucaccgaaaacguggcugc

SEQ ID NO: 2005896 - RNA, 22 nt, Human
aaucaaugcuauaacuauguug

SEQ ID NO: 2005897 - RNA, 23 nt, Human
aaucaccgaaaacguggcugcuu

SEQ ID NO: 2005898 - RNA, 19 nt, Human
aaucaccuaauuaauuuca

SEQ ID NO: 2005899 - RNA, 20 nt, Human
aaucaccuaauuaauuucag

SEQ ID NO: 2005900 - RNA, 19 nt, Human
aaucaccgaugcaaacauu

SEQ ID NO: 2005901 - RNA, 23 nt, Human
aaucaaguuggcuucuaaucaaa

SEQ ID NO: 2005902 - RNA, 13 nt, Human
aaucaaagugcua

SEQ ID NO: 2005903 - RNA, 17 nt, Human
aaucaauaacagccgcu

SEQ ID NO: 2005904 - RNA, 23 nt, Human
aaucaauaacagccgcuccagag

SEQ ID NO: 2005905 - RNA, 21 nt, Human
aauauuaagcaugacagaaaa

SEQ ID NO: 2005906 - RNA, 22 nt, Human
aauauuaagcaugacagaaaau

SEQ ID NO: 2005907 - RNA, 13 nt, Human
aauauuaagcaug

SEQ ID NO: 2005908 - RNA, 13 nt, Human
aauauuaagaaag

SEQ ID NO: 2005909 - RNA, 12 nt, Human
aauaugugauuu

SEQ ID NO: 2005910 - RNA, 19 nt, Human
aauaugugauuuuuuuucc

SEQ ID NO: 2005911 - RNA, 23 nt, Human
aauauguggaguucaucuugaau

SEQ ID NO: 2005912 - RNA, 11 nt, Human
aauaugugaag

SEQ ID NO: 2005913 - RNA, 19 nt, Human
aauaugugaaggaccuuca

SEQ ID NO: 2005914 - RNA, 21 nt, Human
aauaugugaaggaccuucacu

SEQ ID NO: 2005915 - RNA, 13 nt, Human
aauauauagcauu

SEQ ID NO: 2005916 - RNA, 14 nt, Human
aauauauagcauuu

SEQ ID NO: 2005917 - RNA, 18 nt, Human
aaucugaauuggaaugca

SEQ ID NO: 2005918 - RNA, 23 nt, Human
aaucugaggaauggacauuucua

SEQ ID NO: 2005919 - RNA, 17 nt, Human
aaucugaagauuguuua

SEQ ID NO: 2005920 - RNA, 18 nt, Human
aaucugaagauuguuuau

SEQ ID NO: 2005921 - RNA, 21 nt, Human
aaucugaagauuguuuaucua

SEQ ID NO: 2005922 - RNA, 14 nt, Human
aaucugaagauugu

SEQ ID NO: 2005923 - RNA, 15 nt, Human
aaucugaagauuguu

SEQ ID NO: 2005924 - RNA, 20 nt, Human
aaugaaagacuguacaaagu

SEQ ID NO: 2005925 - RNA, 18 nt, Human
aaugaaagacuguacaaa

SEQ ID NO: 2005926 - RNA, 20 nt, Human
aaugaagauacugaaauaaa

SEQ ID NO: 2005927 - RNA, 21 nt, Human
aaugaaagacuguacaaagua

SEQ ID NO: 2005928 - RNA, 14 nt, Human
aaugaagcaaugcu

SEQ ID NO: 2005929 - RNA, 16 nt, Human
aaucugagggagcuga

SEQ ID NO: 2005930 - RNA, 20 nt, Human
aaugaugccaugaggaacaa

SEQ ID NO: 2005931 - RNA, 20 nt, Human
aaugauguauguugaagccu

SEQ ID NO: 2005932 - RNA, 20 nt, Human
aaugaauacuuuauaaagga

SEQ ID NO: 2005933 - RNA, 18 nt, Human
aaccuuuuuauuucaaac

SEQ ID NO: 2005934 - RNA, 23 nt, Human
aaccuuuugagugccuuacacaa

SEQ ID NO: 2005935 - RNA, 16 nt, Human
aaccuuuugagugccu

SEQ ID NO: 2005936 - RNA, 18 nt, Human
aaccuuuguuugcaucug

SEQ ID NO: 2005937 - RNA, 20 nt, Human
aacauggcuacuugcuuuga

SEQ ID NO: 2005938 - RNA, 23 nt, Human
aacauggccuuugcuugaaagaa

SEQ ID NO: 2005939 - RNA, 19 nt, Human
aacccucagagccaccccu

SEQ ID NO: 2005940 - RNA, 12 nt, Human
aacccucagagc

SEQ ID NO: 2005941 - RNA, 19 nt, Human
aaccguguuugucucuucu

SEQ ID NO: 2005942 - RNA, 20 nt, Human
aaccguguuugucucuucug

SEQ ID NO: 2005943 - RNA, 21 nt, Human
aaccguguuugucucuucugg

SEQ ID NO: 2005944 - RNA, 23 nt, Human
aaauucuucuccacuuucuagcc

SEQ ID NO: 2005945 - RNA, 15 nt, Human
aaauucuugcaaagu

SEQ ID NO: 2005946 - RNA, 18 nt, Human
aaauucuugcaaaguauc

SEQ ID NO: 2005947 - RNA, 22 nt, Human
aaauucuguuuuuaaaaauuag

SEQ ID NO: 2005948 - RNA, 19 nt, Human
aacagcccuauuucuugau

SEQ ID NO: 2005949 - RNA, 11 nt, Human
aacaggcagau

SEQ ID NO: 2005950 - RNA, 22 nt, Human
aacaggcaaacauuuucucuua

SEQ ID NO: 2005951 - RNA, 15 nt, Human
aacagccgcuccaga

SEQ ID NO: 2005952 - RNA, 16 nt, Human
aacaggcccuccuccc

SEQ ID NO: 2005953 - RNA, 22 nt, Human
aacauggccuuugcuugaaaga

SEQ ID NO: 2005954 - RNA, 14 nt, Human
aaaggaugcacaga

SEQ ID NO: 2005955 - RNA, 20 nt, Human
aaaggaugcccaaagaugca

SEQ ID NO: 2005956 - RNA, 17 nt, Human
aaauauuuaauguugaa

SEQ ID NO: 2005957 - RNA, 12 nt, Human
aaauauuguuaa

SEQ ID NO: 2005958 - RNA, 13 nt, Human
aaauauuuaugaa

SEQ ID NO: 2005959 - RNA, 15 nt, Human
aaauauuuaugaaga

SEQ ID NO: 2005960 - RNA, 16 nt, Human
aaauauuuaugaagaa

SEQ ID NO: 2005961 - RNA, 22 nt, Human
aaauauuuaugaagaaaauacu

SEQ ID NO: 2005962 - RNA, 22 nt, Human
aaauauuuagauguaauuuugu

SEQ ID NO: 2005963 - RNA, 21 nt, Human
aaauauuuaauguugaacaaa

SEQ ID NO: 2005964 - RNA, 21 nt, Human
aaauauuuuuuuuucuuucag

SEQ ID NO: 2005965 - RNA, 14 nt, Human
aaaucuuuuugcuu

SEQ ID NO: 2005966 - RNA, 13 nt, Human
aaaucuuuuugcu

SEQ ID NO: 2005967 - RNA, 19 nt, Human
aaaucuccaaaauaaaacu

SEQ ID NO: 2005968 - RNA, 14 nt, Human
aaaucucaucccua

SEQ ID NO: 2005969 - RNA, 14 nt, Human
aaauggaguuggag

SEQ ID NO: 2005970 - RNA, 22 nt, Human
aaauggaguuggaguucauuca

SEQ ID NO: 2005971 - RNA, 19 nt, Human
aaaugcuguaacuuucuga

SEQ ID NO: 2005972 - RNA, 22 nt, Human
aaaugcugucuuucuugcuccc

SEQ ID NO: 2005973 - RNA, 23 nt, Human
aaaugcugucuuucuugcucccu

SEQ ID NO: 2005974 - RNA, 14 nt, Human
aaaugaaaaaauau

SEQ ID NO: 2005975 - RNA, 23 nt, Human
aaaucuuuuccaggaaaaagaac

SEQ ID NO: 2005976 - RNA, 11 nt, Human
aaauguuuuca

SEQ ID NO: 2005977 - RNA, 14 nt, Human
aaauguuuucagcu

SEQ ID NO: 2005978 - RNA, 15 nt, Human
aaauguuuucagcua

SEQ ID NO: 2005979 - RNA, 18 nt, Human
aaauguuuucagcuagga

SEQ ID NO: 2005980 - RNA, 22 nt, Human
aaauguuuucauauuuuucaaa

SEQ ID NO: 2005981 - RNA, 23 nt, Human
aaauguuuuguaaacuuugaaau

SEQ ID NO: 2005982 - RNA, 13 nt, Human
aaauguuuuguaa

SEQ ID NO: 2005983 - RNA, 14 nt, Human
aaauguuuuguaaa

SEQ ID NO: 2005984 - RNA, 16 nt, Human
aaauguuuuguaaacu

SEQ ID NO: 2005985 - RNA, 19 nt, Human
aaauguuuuguaaacuuug

SEQ ID NO: 2005986 - RNA, 20 nt, Human
aaauguuuuguaaacuuuga

SEQ ID NO: 2005987 - RNA, 21 nt, Human
aaauguuuuguaaacuuugaa

SEQ ID NO: 2005988 - RNA, 22 nt, Human
aaauguuuuguaaacuuugaaa

SEQ ID NO: 2005989 - RNA, 12 nt, Human
aaauucuguuuu

SEQ ID NO: 2005990 - RNA, 15 nt, Human
aaauucuguuuuuaa

SEQ ID NO: 2005991 - RNA, 17 nt, Human
aaauucuguuuuuaaaa

SEQ ID NO: 2005992 - RNA, 19 nt, Human
aaauucuguuuuuaaaaau

SEQ ID NO: 2005993 - RNA, 17 nt, Human
aaauguucaucaaugaa

SEQ ID NO: 2005994 - RNA, 13 nt, Human
aaauguucaucaa

SEQ ID NO: 2005995 - RNA, 23 nt, Human
aaauggaguuggaguucauucau

SEQ ID NO: 2005996 - RNA, 15 nt, Human
aaauggcaacaaacu

SEQ ID NO: 2005997 - RNA, 18 nt, Human
aaauggcaacaaacugca

SEQ ID NO: 2005998 - RNA, 20 nt, Human
aaauggcaacaaacugcaca

SEQ ID NO: 2005999 - RNA, 17 nt, Human
aaauggcaaguuuucca

SEQ ID NO: 2006000 - RNA, 19 nt, Human
aaagaaaaaaaugucaaaa

SEQ ID NO: 2006001 - RNA, 18 nt, Human
aaagaaaaaagagaaaag

SEQ ID NO: 2006002 - RNA, 10 nt, Human
aaagaaaaaa

SEQ ID NO: 2006003 - RNA, 22 nt, Human
aaagaaaaaaaaaaagaaagaa

SEQ ID NO: 2006004 - RNA, 16 nt, Human
aaagaaaaaaaaagaa

SEQ ID NO: 2006005 - RNA, 15 nt, Human
aaagaaaaaaauguc

SEQ ID NO: 2006006 - RNA, 16 nt, Human
aaagaaaaaaauguca

SEQ ID NO: 2006007 - RNA, 16 nt, Human
aaagcauguuuugcau

SEQ ID NO: 2006008 - RNA, 17 nt, Human
aaagcauguuuugcaug

SEQ ID NO: 2006009 - RNA, 15 nt, Human
aaaaucucaaauuuc

SEQ ID NO: 2006010 - RNA, 16 nt, Human
aaaaucucaaauuucu

SEQ ID NO: 2006011 - RNA, 18 nt, Human
aaaaucucaaauuucuaa

SEQ ID NO: 2006012 - RNA, 12 nt, Human
aaacugcacaug

SEQ ID NO: 2006013 - RNA, 9 nt, Human
aaagaaaaa

SEQ ID NO: 2006014 - RNA, 11 nt, Human
aaagaaaaaaa

SEQ ID NO: 2006015 - RNA, 14 nt, Human
aaacugcacaugau

SEQ ID NO: 2006016 - RNA, 17 nt, Human
aaacugcacaugauuuc

SEQ ID NO: 2006017 - RNA, 18 nt, Human
aaacugcacaugauuuca

SEQ ID NO: 2006018 - RNA, 20 nt, Human
aaacugcacaugauuucaca

SEQ ID NO: 2006019 - RNA, 21 nt, Human
aaacugcacaugauuucacaa

SEQ ID NO: 2006020 - RNA, 22 nt, Human
aaacugcacaugauuucacaaa

SEQ ID NO: 2006021 - RNA, 23 nt, Human
aaacugauuuuuuuuuccuucag

SEQ ID NO: 2006022 - RNA, 22 nt, Human
aaacugauuuuuuuuuccuuca

SEQ ID NO: 2006023 - RNA, 23 nt, Human
aaacucuuaaaacccaagugccu

SEQ ID NO: 2006024 - RNA, 12 nt, Human
aaacucuuaaaa

SEQ ID NO: 2006025 - RNA, 22 nt, Human
aaacucuguuacacuuuuugga

SEQ ID NO: 2006026 - RNA, 18 nt, Human
aaacucuguuacacuuuu

SEQ ID NO: 2006027 - RNA, 16 nt, Human
aaaccgccaaggcugg

SEQ ID NO: 2006028 - RNA, 15 nt, Human
aaaccgccaaggcug

SEQ ID NO: 2006029 - RNA, 16 nt, Human
aaacccagcucugguc

SEQ ID NO: 2006030 - RNA, 12 nt, Human
aaacccagcucu

SEQ ID NO: 2006031 - RNA, 22 nt, Human
aaaccgaacugauguaaguaaa

SEQ ID NO: 2006032 - RNA, 17 nt, Human
aaacccacccuuucuac

SEQ ID NO: 2006033 - RNA, 13 nt, Human
aaaagucacaguu

SEQ ID NO: 2006034 - RNA, 19 nt, Human
aaaagucuuuuaaaaagua

SEQ ID NO: 2006035 - RNA, 14 nt, Human
aaaagucuuuuaaa

SEQ ID NO: 2006036 - RNA, 18 nt, Human
aaaagucuuuuaaaaagu

SEQ ID NO: 2006037 - RNA, 19 nt, Human
aaaagucuuaggugaacaa

SEQ ID NO: 2006038 - RNA, 18 nt, Human
aaaaguugaauuuuacau

SEQ ID NO: 2006039 - RNA, 15 nt, Human
aaaaguuguaugauc

SEQ ID NO: 2006040 - RNA, 16 nt, Human
aaaaguuguaugaucu

SEQ ID NO: 2006041 - RNA, 18 nt, Human
aaaaguuguaugaucugu

SEQ ID NO: 2006042 - RNA, 14 nt, Human
aaaauaaaacuuuu

SEQ ID NO: 2006043 - RNA, 21 nt, Human
aaaaucagccugcuccagcug

SEQ ID NO: 2006044 - RNA, 17 nt, Human
aaaaucagccugcucca

SEQ ID NO: 2006045 - RNA, 13 nt, Human
aaaaucagccugc

SEQ ID NO: 2006046 - RNA, 16 nt, Human
aaaauaaaacuuuuua

SEQ ID NO: 2006047 - RNA, 14 nt, Human
aaaagauaaauauu

SEQ ID NO: 2006048 - RNA, 21 nt, Human
aaaagauaaaaaaacagcuuu

SEQ ID NO: 2006049 - RNA, 19 nt, Human
aaaagaguguaaaauauuu

SEQ ID NO: 2006050 - RNA, 15 nt, Human
aaaagaguuaaggca

SEQ ID NO: 2006051 - RNA, 16 nt, Human
aaaagagaugaugaaa

SEQ ID NO: 2006052 - RNA, 19 nt, Human
aaaagagaugaugaaaaua

SEQ ID NO: 2006053 - RNA, 19 nt, Human
aaaagacgcaccagcccag

SEQ ID NO: 2006054 - RNA, 17 nt, Human
aaaagacuaagaucggu

SEQ ID NO: 2006055 - RNA, 13 nt, Human
aaaagagaaaaga

SEQ ID NO: 2006056 - RNA, 14 nt, Human
aaaagagaaaagaa

SEQ ID NO: 2006057 - RNA, 16 nt, Human
aaaagagaaaagaaaa

SEQ ID NO: 2006058 - RNA, 17 nt, Human
aaaagauaaauauuaua

SEQ ID NO: 2006059 - RNA, 17 nt, Human
aaaagauaccuuaaaau

SEQ ID NO: 2006060 - RNA, 21 nt, Human
aaaagauaccuuaaaauuuga

SEQ ID NO: 2006061 - RNA, 22 nt, Human
aaaagauaccuuaaaauuugaa

SEQ ID NO: 2006062 - RNA, 22 nt, Human
aaaagaaaucuauagaaagugu

SEQ ID NO: 2006063 - RNA, 12 nt, Human
aaaagaaaucua

SEQ ID NO: 2006064 - RNA, 10 nt, Human
aaaagaaaga

SEQ ID NO: 2006065 - RNA, 20 nt, Human
aaaagaaacucuauggucuu

SEQ ID NO: 2006066 - RNA, 11 nt, Human
aaaagaaagaa

SEQ ID NO: 2006067 - RNA, 12 nt, Human
aaaagaacuucc

SEQ ID NO: 2006068 - RNA, 17 nt, Human
aaaagaaagaaaaucag

SEQ ID NO: 2006069 - RNA, 15 nt, Human
aaaacaggcaaauuc

SEQ ID NO: 2006070 - RNA, 15 nt, Human
aaaagaaaauaaaaa

SEQ ID NO: 2006071 - RNA, 16 nt, Human
aaaagaaaagucaagg

SEQ ID NO: 2006072 - RNA, 14 nt, Human
aaaagaaaauaaaa

SEQ ID NO: 2006073 - RNA, 14 nt, Human
aaaagaaaaacugu

SEQ ID NO: 2006074 - RNA, 12 nt, Human
aaaagaaaacaa

SEQ ID NO: 2006075 - RNA, 22 nt, Human
aaaagaaaaaaaaagaaaaaag

SEQ ID NO: 2006076 - RNA, 11 nt, Human
aaaagaaaaac

SEQ ID NO: 2006077 - RNA, 13 nt, Human
aaaagacagggcu

SEQ ID NO: 2006078 - RNA, 20 nt, Human
aaaagacaaggaaaaaauaa

SEQ ID NO: 2006079 - RNA, 22 nt, Human
aaaacagccauaggcccuuuca

SEQ ID NO: 2006080 - RNA, 18 nt, Human
aaaacagaguaaucuugu

SEQ ID NO: 2006081 - RNA, 19 nt, Human
aaaacagaguaaucuuguu

SEQ ID NO: 2006082 - RNA, 22 nt, Human
aaaacagaguaaucuuguuggu

SEQ ID NO: 2006083 - RNA, 11 nt, Human
aaaacuuuguu

SEQ ID NO: 2006084 - RNA, 17 nt, Human
aaaacuuuguuaggcca

SEQ ID NO: 2006085 - RNA, 19 nt, Human
aaaacuuuguuaggccaaa

SEQ ID NO: 2006086 - RNA, 9 nt, Human
aaaagaaaa

SEQ ID NO: 2006087 - RNA, 11 nt, Human
aaaagaaaaaa

SEQ ID NO: 2006088 - RNA, 12 nt, Human
aaaagaaaaaaa

SEQ ID NO: 2006089 - RNA, 11 nt, Human
aaaagaaaaag

SEQ ID NO: 2006090 - RNA, 16 nt, Human
aaaagaaaaaaaaaga

SEQ ID NO: 2006091 - RNA, 17 nt, Human
aaaagaaaaaaaaagaa

SEQ ID NO: 2006092 - RNA, 18 nt, Human
aaaagaaaaaaaaagaaa

SEQ ID NO: 2006093 - RNA, 19 nt, Human
aaaagaaaaaaaaagaaaa

SEQ ID NO: 2006094 - RNA, 13 nt, Human
aaaacagaaauug

SEQ ID NO: 2006095 - RNA, 15 nt, Human
aaaacagaaauuggu

SEQ ID NO: 2006096 - RNA, 16 nt, Human
aaaacagaaauuggua

SEQ ID NO: 2006097 - RNA, 19 nt, Human
aaaacacuguucucugccc

SEQ ID NO: 2006098 - RNA, 15 nt, Human
aaaacaccuucuaua

SEQ ID NO: 2006099 - RNA, 17 nt, Human
aaaacacauuuuucuua

SEQ ID NO: 2006100 - RNA, 14 nt, Human
aaaacaccagcuuu

SEQ ID NO: 2006101 - RNA, 17 nt, Human
cucucugggcugacugg

SEQ ID NO: 2006102 - RNA, 21 nt, Human
cucucugggcugacugggcca

SEQ ID NO: 2006103 - RNA, 14 nt, Human
cucucuggccuucg

SEQ ID NO: 2006104 - RNA, 16 nt, Human
cucucuggccuucggc

SEQ ID NO: 2006105 - RNA, 13 nt, Human
cucucuggccuuc

SEQ ID NO: 2006106 - RNA, 16 nt, Human
cucuccuccagaguca

SEQ ID NO: 2006107 - RNA, 12 nt, Human
cucuccuccaga

SEQ ID NO: 2006108 - RNA, 15 nt, Human
cucuccuccagaguc

SEQ ID NO: 2006109 - RNA, 13 nt, Human
cucuccuccagag

SEQ ID NO: 2006110 - RNA, 21 nt, Human
cucuccccucagagugcaagc

SEQ ID NO: 2006111 - RNA, 22 nt, Human
cucuccccgcaguguuugugug

SEQ ID NO: 2006112 - RNA, 19 nt, Human
cucuauguucuaagaagug

SEQ ID NO: 2006113 - RNA, 22 nt, Human
cucuauggucuuauauuuacaa

SEQ ID NO: 2006114 - RNA, 16 nt, Human
cucgguguggagaagc

SEQ ID NO: 2006115 - RNA, 23 nt, Human
cucgguguggagaagcggcuggc

SEQ ID NO: 2006116 - RNA, 13 nt, Human
cucggugucccca

SEQ ID NO: 2006117 - RNA, 15 nt, Human
cucgguguccccacc

SEQ ID NO: 2006118 - RNA, 16 nt, Human
cucgguguccccacca

SEQ ID NO: 2006119 - RNA, 20 nt, Human
cucgguguccccaccaucug

SEQ ID NO: 2006120 - RNA, 17 nt, Human
cucgguguggagaagcg

SEQ ID NO: 2006121 - RNA, 21 nt, Human
cucgguguccccaccaucugc

SEQ ID NO: 2006122 - RNA, 22 nt, Human
cucgguguccccaccaucugcu

SEQ ID NO: 2006123 - RNA, 23 nt, Human
cucgguguccccaccaucugcug

SEQ ID NO: 2006124 - RNA, 13 nt, Human
cucgucuuuccca

SEQ ID NO: 2006125 - RNA, 17 nt, Human
cuccuuuguauucuguc

SEQ ID NO: 2006126 - RNA, 18 nt, Human
cuccuuuguauucugucu

SEQ ID NO: 2006127 - RNA, 19 nt, Human
cuccuuuguauucugucuu

SEQ ID NO: 2006128 - RNA, 18 nt, Human
cuccuuugugaggaagcc

SEQ ID NO: 2006129 - RNA, 17 nt, Human
cuccuuugugaggaagc

SEQ ID NO: 2006130 - RNA, 20 nt, Human
cuccuuucacaaccuucugu

SEQ ID NO: 2006131 - RNA, 13 nt, Human
cucuguacagagc

SEQ ID NO: 2006132 - RNA, 18 nt, Human
cucugcuggacguccagg

SEQ ID NO: 2006133 - RNA, 15 nt, Human
cucuguacagagccc

SEQ ID NO: 2006134 - RNA, 14 nt, Human
cucuguacagagcc

SEQ ID NO: 2006135 - RNA, 15 nt, Human
cucugcugcuggcug

SEQ ID NO: 2006136 - RNA, 14 nt, Human
cucugcugcuggcu

SEQ ID NO: 2006137 - RNA, 16 nt, Human
cucugcugcuggcugg

SEQ ID NO: 2006138 - RNA, 16 nt, Human
cucuguacagagccca

SEQ ID NO: 2006139 - RNA, 21 nt, Human
cucugcugacagacacaggcc

SEQ ID NO: 2006140 - RNA, 22 nt, Human
cucugcugacagacacaggccc

SEQ ID NO: 2006141 - RNA, 20 nt, Human
cucugcugacagacacaggc

SEQ ID NO: 2006142 - RNA, 11 nt, Human
cucugcucuga

SEQ ID NO: 2006143 - RNA, 13 nt, Human
cucugcugcuggc

SEQ ID NO: 2006144 - RNA, 21 nt, Human
cucugcugaugacccccccag

SEQ ID NO: 2006145 - RNA, 23 nt, Human
cucugcugacagacacaggcccg

SEQ ID NO: 2006146 - RNA, 20 nt, Human
cucugcaggaaauggcugug

SEQ ID NO: 2006147 - RNA, 17 nt, Human
cucugcacuccccugcu

SEQ ID NO: 2006148 - RNA, 21 nt, Human
cucugcuccucuccccagcaa

SEQ ID NO: 2006149 - RNA, 13 nt, Human
cucugcagguccc

SEQ ID NO: 2006150 - RNA, 21 nt, Human
cucugcacaagcugcacccuc

SEQ ID NO: 2006151 - RNA, 20 nt, Human
cucugcacaagcugcacccu

SEQ ID NO: 2006152 - RNA, 16 nt, Human
cucugcacuccccugc

SEQ ID NO: 2006153 - RNA, 15 nt, Human
cucugcacuccccug

SEQ ID NO: 2006154 - RNA, 23 nt, Human
cuccgcuuucuacccagcgagcc

SEQ ID NO: 2006155 - RNA, 13 nt, Human
cuccuaccuggua

SEQ ID NO: 2006156 - RNA, 12 nt, Human
cuccuacugagg

SEQ ID NO: 2006157 - RNA, 14 nt, Human
cuccuuguguuacu

SEQ ID NO: 2006158 - RNA, 13 nt, Human
cuccuuucacaac

SEQ ID NO: 2006159 - RNA, 15 nt, Human
cuccuuucaccacau

SEQ ID NO: 2006160 - RNA, 16 nt, Human
cuccuuucacaaccuu

SEQ ID NO: 2006161 - RNA, 17 nt, Human
cuccuuucacaaccuuc

SEQ ID NO: 2006162 - RNA, 16 nt, Human
cuccuguaccucuuga

SEQ ID NO: 2006163 - RNA, 14 nt, Human
cuccucugcugcug

SEQ ID NO: 2006164 - RNA, 13 nt, Human
cuccucugcugcu

SEQ ID NO: 2006165 - RNA, 15 nt, Human
cuccucugcugcugg

SEQ ID NO: 2006166 - RNA, 12 nt, Human
cuccucugucca

SEQ ID NO: 2006167 - RNA, 15 nt, Human
cuccucuguccaggc

SEQ ID NO: 2006168 - RNA, 18 nt, Human
cuccugggcuaagugauc

SEQ ID NO: 2006169 - RNA, 19 nt, Human
cuccuggccucaagugauu

SEQ ID NO: 2006170 - RNA, 19 nt, Human
cuccuggcccacugcaucg

SEQ ID NO: 2006171 - RNA, 18 nt, Human
cuccucuugccacugccu

SEQ ID NO: 2006172 - RNA, 12 nt, Human
cuccucuugcca

SEQ ID NO: 2006173 - RNA, 15 nt, Human
cuccucuugccacug

SEQ ID NO: 2006174 - RNA, 16 nt, Human
cuccucuugccacugc

SEQ ID NO: 2006175 - RNA, 12 nt, Human
cucccacugccc

SEQ ID NO: 2006176 - RNA, 15 nt, Human
cucccacugcccacu

SEQ ID NO: 2006177 - RNA, 17 nt, Human
cucccacugcccacugg

SEQ ID NO: 2006178 - RNA, 15 nt, Human
cucccacuucugcca

SEQ ID NO: 2006179 - RNA, 16 nt, Human
cucccacuucugccag

SEQ ID NO: 2006180 - RNA, 17 nt, Human
cucccacuucugccaga

SEQ ID NO: 2006181 - RNA, 15 nt, Human
cucccacaggcccuu

SEQ ID NO: 2006182 - RNA, 14 nt, Human
cucccacaggcccu

SEQ ID NO: 2006183 - RNA, 16 nt, Human
cucccacaggcccuuc

SEQ ID NO: 2006184 - RNA, 20 nt, Human
cucccacaggcccuuccucu

SEQ ID NO: 2006185 - RNA, 21 nt, Human
cucccacaggcccuuccucuc

SEQ ID NO: 2006186 - RNA, 23 nt, Human
cuccaggugcacaagcuccaagc

SEQ ID NO: 2006187 - RNA, 15 nt, Human
cuccaggcuccuuua

SEQ ID NO: 2006188 - RNA, 23 nt, Human
cuccaggcuccuuuagcgcccag

SEQ ID NO: 2006189 - RNA, 20 nt, Human
cuccaggcuguaucccauga

SEQ ID NO: 2006190 - RNA, 20 nt, Human
cucccucuacugggagccua

SEQ ID NO: 2006191 - RNA, 16 nt, Human
cucccucccagcucca

SEQ ID NO: 2006192 - RNA, 20 nt, Human
cucccucuuucccucccuuc

SEQ ID NO: 2006193 - RNA, 16 nt, Human
cucccucuccagcagg

SEQ ID NO: 2006194 - RNA, 21 nt, Human
cucccucuccagcaggcccau

SEQ ID NO: 2006195 - RNA, 20 nt, Human
cucccugaaguaagcaaaga

SEQ ID NO: 2006196 - RNA, 13 nt, Human
cucccucuacugg

SEQ ID NO: 2006197 - RNA, 19 nt, Human
cucccucuacugggagccu

SEQ ID NO: 2006198 - RNA, 14 nt, Human
cucccucccagcuc

SEQ ID NO: 2006199 - RNA, 11 nt, Human
cucccucccag

SEQ ID NO: 2006200 - RNA, 16 nt, Human
cuccccuaaagccuca

SEQ ID NO: 2006201 - RNA, 23 nt, Human
cuccccuaaagccucaaaacaaa

SEQ ID NO: 2006202 - RNA, 18 nt, Human
cucccaggagccugccca

SEQ ID NO: 2006203 - RNA, 21 nt, Human
cucccaggagccugcccagcc

SEQ ID NO: 2006204 - RNA, 19 nt, Human
cucccaggagccugcccag

SEQ ID NO: 2006205 - RNA, 20 nt, Human
cucccaggagccugcccagc

SEQ ID NO: 2006206 - RNA, 23 nt, Human
cucaggugucccugcacuugcag

SEQ ID NO: 2006207 - RNA, 22 nt, Human
cucagguugucugaagucacug

SEQ ID NO: 2006208 - RNA, 23 nt, Human
cucaugauagaaggcuaugggga

SEQ ID NO: 2006209 - RNA, 22 nt, Human
cucagucuggcccuuccuuuuc

SEQ ID NO: 2006210 - RNA, 16 nt, Human
cucagugagcuggaga

SEQ ID NO: 2006211 - RNA, 20 nt, Human
cucagucuggcccuuccuuu

SEQ ID NO: 2006212 - RNA, 16 nt, Human
cucaguccaugaagau

SEQ ID NO: 2006213 - RNA, 14 nt, Human
cucagguugucuga

SEQ ID NO: 2006214 - RNA, 15 nt, Human
cucaguccauagcag

SEQ ID NO: 2006215 - RNA, 17 nt, Human
cucaguccauagcagag

SEQ ID NO: 2006216 - RNA, 22 nt, Human
cucagggaaaagcagcucuccc

SEQ ID NO: 2006217 - RNA, 20 nt, Human
cucagggaaaagcagcucuc

SEQ ID NO: 2006218 - RNA, 17 nt, Human
cucagggaaaagcagcu

SEQ ID NO: 2006219 - RNA, 23 nt, Human
cucagggaaaagcagcucucccc

SEQ ID NO: 2006220 - RNA, 13 nt, Human
cucagggaaagca

SEQ ID NO: 2006221 - RNA, 22 nt, Human
cucaggcauggaugaauaaaug

SEQ ID NO: 2006222 - RNA, 20 nt, Human
cucaggccaaacucaccugc

SEQ ID NO: 2006223 - RNA, 19 nt, Human
cucaggccaaacucaccug

SEQ ID NO: 2006224 - RNA, 21 nt, Human
cucaggccaaacucaccugcc

SEQ ID NO: 2006225 - RNA, 23 nt, Human
cucaggccgaaggaggagucagg

SEQ ID NO: 2006226 - RNA, 18 nt, Human
cucaggccagcugcuugg

SEQ ID NO: 2006227 - RNA, 17 nt, Human
cucaggccagcugcuug

SEQ ID NO: 2006228 - RNA, 16 nt, Human
cucaggccagcugcuu

SEQ ID NO: 2006229 - RNA, 20 nt, Human
cucaggccugacucucagca

SEQ ID NO: 2006230 - RNA, 11 nt, Human
cucaggccugg

SEQ ID NO: 2006231 - RNA, 22 nt, Human
cucaggccugggggcugggcag

SEQ ID NO: 2006232 - RNA, 17 nt, Human
cucaccuuucccaucuu

SEQ ID NO: 2006233 - RNA, 18 nt, Human
cucacgagucauccagaa

SEQ ID NO: 2006234 - RNA, 17 nt, Human
cucacgcuccuuucuga

SEQ ID NO: 2006235 - RNA, 15 nt, Human
cucacgcauucucug

SEQ ID NO: 2006236 - RNA, 13 nt, Human
cucagaagacacu

SEQ ID NO: 2006237 - RNA, 14 nt, Human
cucagaaccacagc

SEQ ID NO: 2006238 - RNA, 15 nt, Human
cucagaagacacuga

SEQ ID NO: 2006239 - RNA, 17 nt, Human
cucagaagacacugaug

SEQ ID NO: 2006240 - RNA, 20 nt, Human
cucagaagacacugaugggc

SEQ ID NO: 2006241 - RNA, 22 nt, Human
cucagaagacacugaugggcaa

SEQ ID NO: 2006242 - RNA, 19 nt, Human
cucagccucccgaauagcu

SEQ ID NO: 2006243 - RNA, 21 nt, Human
cucagccucccgaauagcugg

SEQ ID NO: 2006244 - RNA, 22 nt, Human
cucagccucccgaauagcuggg

SEQ ID NO: 2006245 - RNA, 13 nt, Human
cucagacuguaua

SEQ ID NO: 2006246 - RNA, 15 nt, Human
cucagaccagcucuu

SEQ ID NO: 2006247 - RNA, 14 nt, Human
cucagaccagcucu

SEQ ID NO: 2006248 - RNA, 16 nt, Human
cucagaccagcucuuc

SEQ ID NO: 2006249 - RNA, 23 nt, Human
cucagaagacacugaugggcaac

SEQ ID NO: 2006250 - RNA, 17 nt, Human
cuauccuacuuccccuu

SEQ ID NO: 2006251 - RNA, 23 nt, Human
cuaucaguuuuauagcuuuauuu

SEQ ID NO: 2006252 - RNA, 14 nt, Human
cuaucucccccagc

SEQ ID NO: 2006253 - RNA, 13 nt, Human
cuaucucccccag

SEQ ID NO: 2006254 - RNA, 14 nt, Human
cuaugugagaccau

SEQ ID NO: 2006255 - RNA, 17 nt, Human
cuauccugggcuuuugu

SEQ ID NO: 2006256 - RNA, 18 nt, Human
cuauguugcccaggcagg

SEQ ID NO: 2006257 - RNA, 19 nt, Human
cuauguugcccaggcaggu

SEQ ID NO: 2006258 - RNA, 21 nt, Human
cuauguugcccaggcaggucu

SEQ ID NO: 2006259 - RNA, 22 nt, Human
cuauguugcccaggcaggucuu

SEQ ID NO: 2006260 - RNA, 17 nt, Human
cuaugugagcacaaagg

SEQ ID NO: 2006261 - RNA, 14 nt, Human
cuauguuaauauuu

SEQ ID NO: 2006262 - RNA, 15 nt, Human
cuauguuaauauuuu

SEQ ID NO: 2006263 - RNA, 17 nt, Human
cuauguuaauauuuuag

SEQ ID NO: 2006264 - RNA, 18 nt, Human
cuauguucuaagaaguga

SEQ ID NO: 2006265 - RNA, 14 nt, Human
cuauguugcccagg

SEQ ID NO: 2006266 - RNA, 21 nt, Human
cuauguuaauauuuuaggugu

SEQ ID NO: 2006267 - RNA, 18 nt, Human
cucaaguuuaugucucag

SEQ ID NO: 2006268 - RNA, 21 nt, Human
cucaagugauucuccugccuc

SEQ ID NO: 2006269 - RNA, 23 nt, Human
cucaauuauuuugcauuuuuucu

SEQ ID NO: 2006270 - RNA, 21 nt, Human
cucaaugugugccgagcccuu

SEQ ID NO: 2006271 - RNA, 14 nt, Human
ccuugcauaauggu

SEQ ID NO: 2006272 - RNA, 15 nt, Human
ccuugcauacaaaca

SEQ ID NO: 2006273 - RNA, 21 nt, Human
ccuugcauuuuagcuaauuua

SEQ ID NO: 2006274 - RNA, 13 nt, Human
ccuugcacuuuca

SEQ ID NO: 2006275 - RNA, 17 nt, Human
ccuugcacacaucaucu

SEQ ID NO: 2006276 - RNA, 24 nt, Human
ccuugcacacaucaucuguaagcu

SEQ ID NO: 2006277 - RNA, 13 nt, Human
ccuugccagcugc

SEQ ID NO: 2006278 - RNA, 14 nt, Human
ccuugccagcugcu

SEQ ID NO: 2006279 - RNA, 15 nt, Human
ccuugccagcugcug

SEQ ID NO: 2006280 - RNA, 19 nt, Human
ccuugccagcugcugagcc

SEQ ID NO: 2006281 - RNA, 20 nt, Human
ccuugccagcugcugagccg

SEQ ID NO: 2006282 - RNA, 22 nt, Human
ccuugccagcugcugagccgca

SEQ ID NO: 2006283 - RNA, 23 nt, Human
ccuugccagcugcugagccgcag

SEQ ID NO: 2006284 - RNA, 24 nt, Human
ccuugccagcugcugagccgcaga

SEQ ID NO: 2006285 - RNA, 19 nt, Human
ccuugccaggucccuuuca

SEQ ID NO: 2006286 - RNA, 12 nt, Human
ccuugccagucu

SEQ ID NO: 2006287 - RNA, 18 nt, Human
ccuugcuaccacggccuc

SEQ ID NO: 2006288 - RNA, 23 nt, Human
ccuugcuaccacggccuccuuuc

SEQ ID NO: 2006289 - RNA, 15 nt, Human
ccuuuaguuauaaag

SEQ ID NO: 2006290 - RNA, 20 nt, Human
ccuuuaucuaccaacuuuca

SEQ ID NO: 2006291 - RNA, 17 nt, Human
ccuuucaauaggaaaaa

SEQ ID NO: 2006292 - RNA, 18 nt, Human
ccuuucaauaggaaaaac

SEQ ID NO: 2006293 - RNA, 14 nt, Human
ccuuuauucuggca

SEQ ID NO: 2006294 - RNA, 15 nt, Human
ccuuucaauaggaaa

SEQ ID NO: 2006295 - RNA, 17 nt, Human
ccuuccccuuccuucuu

SEQ ID NO: 2006296 - RNA, 14 nt, Human
ccuuccccuuccuu

SEQ ID NO: 2006297 - RNA, 15 nt, Human
ccuuccccuuccuuc

SEQ ID NO: 2006298 - RNA, 16 nt, Human
ccuuccccuuccuucu

SEQ ID NO: 2006299 - RNA, 13 nt, Human
ccuuccccuuccu

SEQ ID NO: 2006300 - RNA, 19 nt, Human
ccuucccccuccaauccca

SEQ ID NO: 2006301 - RNA, 22 nt, Human
ccuucccccucccccagccacu

SEQ ID NO: 2006302 - RNA, 19 nt, Human
ccuuccuaauuccacagcu

SEQ ID NO: 2006303 - RNA, 20 nt, Human
ccuuccuaauuccacagcug

SEQ ID NO: 2006304 - RNA, 18 nt, Human
ccuuccuaauuccacagc

SEQ ID NO: 2006305 - RNA, 12 nt, Human
ccuucccuugcu

SEQ ID NO: 2006306 - RNA, 20 nt, Human
ccuucucuccagccccugga

SEQ ID NO: 2006307 - RNA, 16 nt, Human
ccuuccucuccacugc

SEQ ID NO: 2006308 - RNA, 17 nt, Human
ccuuccucuccacugcc

SEQ ID NO: 2006309 - RNA, 14 nt, Human
ccuuccucuccacu

SEQ ID NO: 2006310 - RNA, 15 nt, Human
ccuuccucuccacug

SEQ ID NO: 2006311 - RNA, 21 nt, Human
ccuuccuaauuccacagcugc

SEQ ID NO: 2006312 - RNA, 14 nt, Human
ccuuccuaccaccc

SEQ ID NO: 2006313 - RNA, 21 nt, Human
ccuuccuaguucaucccuucu

SEQ ID NO: 2006314 - RNA, 21 nt, Human
ccuuccuccauccuccuccuu

SEQ ID NO: 2006315 - RNA, 23 nt, Human
ccuuccuccauccuccuccuucc

SEQ ID NO: 2006316 - RNA, 23 nt, Human
ccuucucuccagccccuggaugc

SEQ ID NO: 2006317 - RNA, 21 nt, Human
ccuucucuccagccccuggau

SEQ ID NO: 2006318 - RNA, 20 nt, Human
ccuuccucuccacugccuuc

SEQ ID NO: 2006319 - RNA, 20 nt, Human
ccuucucucucaauuuuugg

SEQ ID NO: 2006320 - RNA, 14 nt, Human
ccuucucugaagga

SEQ ID NO: 2006321 - RNA, 16 nt, Human
ccuucucugaaggaca

SEQ ID NO: 2006322 - RNA, 22 nt, Human
ccuucuguccuacucuguguca

SEQ ID NO: 2006323 - RNA, 12 nt, Human
ccuucucuucca

SEQ ID NO: 2006324 - RNA, 17 nt, Human
ccuucucuucacaguca

SEQ ID NO: 2006325 - RNA, 20 nt, Human
ccuucuguccuacucugugu

SEQ ID NO: 2006326 - RNA, 21 nt, Human
ccuucuguccuacucuguguc

SEQ ID NO: 2006327 - RNA, 13 nt, Human
ccuguucagcucc

SEQ ID NO: 2006328 - RNA, 21 nt, Human
ccuguucacucuacuuagcau

SEQ ID NO: 2006329 - RNA, 16 nt, Human
ccuuagcaaauucugu

SEQ ID NO: 2006330 - RNA, 19 nt, Human
ccuuagcagggaaacagcu

SEQ ID NO: 2006331 - RNA, 20 nt, Human
ccuuagcagggaaacagcua

SEQ ID NO: 2006332 - RNA, 20 nt, Human
ccuguugggccaggagccuc

SEQ ID NO: 2006333 - RNA, 19 nt, Human
ccuguugggccaggagccu

SEQ ID NO: 2006334 - RNA, 18 nt, Human
ccuguugggccaggagcc

SEQ ID NO: 2006335 - RNA, 17 nt, Human
ccuguugggccaggagc

SEQ ID NO: 2006336 - RNA, 16 nt, Human
ccuguugggccaggag

SEQ ID NO: 2006337 - RNA, 18 nt, Human
ccuguucccaugagauga

SEQ ID NO: 2006338 - RNA, 12 nt, Human
ccuguucccauu

SEQ ID NO: 2006339 - RNA, 17 nt, Human
ccuguucuggcagaguu

SEQ ID NO: 2006340 - RNA, 12 nt, Human
ccuguucuggca

SEQ ID NO: 2006341 - RNA, 16 nt, Human
ccuguucugcuuuccu

SEQ ID NO: 2006342 - RNA, 23 nt, Human
ccuguucagcuccagcucaccag

SEQ ID NO: 2006343 - RNA, 20 nt, Human
ccuguucagcuccagcucac

SEQ ID NO: 2006344 - RNA, 21 nt, Human
ccuguucagcuccagcucacc

SEQ ID NO: 2006345 - RNA, 14 nt, Human
ccuguucagcucca

SEQ ID NO: 2006346 - RNA, 15 nt, Human
ccuguucagcuccag

SEQ ID NO: 2006347 - RNA, 16 nt, Human
ccuguucagcuccagc

SEQ ID NO: 2006348 - RNA, 19 nt, Human
ccuguucagcuccagcuca

SEQ ID NO: 2006349 - RNA, 19 nt, Human
ccuucccaccucucucacu

SEQ ID NO: 2006350 - RNA, 14 nt, Human
ccuucccaccucuc

SEQ ID NO: 2006351 - RNA, 12 nt, Human
ccuucccaccuc

SEQ ID NO: 2006352 - RNA, 15 nt, Human
ccuucccaugcccug

SEQ ID NO: 2006353 - RNA, 18 nt, Human
ccuucccacucuucucau

SEQ ID NO: 2006354 - RNA, 22 nt, Human
ccuucccacucugucgagccug

SEQ ID NO: 2006355 - RNA, 18 nt, Human
ccuuauggaacacucuga

SEQ ID NO: 2006356 - RNA, 17 nt, Human
ccuuauggaacacucug

SEQ ID NO: 2006357 - RNA, 16 nt, Human
ccuuauggaacacucu

SEQ ID NO: 2006358 - RNA, 14 nt, Human
ccuuauggaacacu

SEQ ID NO: 2006359 - RNA, 20 nt, Human
ccuuauggaacacucugaga

SEQ ID NO: 2006360 - RNA, 19 nt, Human
ccuuauggaacacucugag

SEQ ID NO: 2006361 - RNA, 22 nt, Human
ccuuauggaacacucugagacu

SEQ ID NO: 2006362 - RNA, 22 nt, Human
ccuuaucuccaagaccagagau

SEQ ID NO: 2006363 - RNA, 16 nt, Human
ccuuaucuccaagacc

SEQ ID NO: 2006364 - RNA, 19 nt, Human
ccuuaucuaguguuugauu

SEQ ID NO: 2006365 - RNA, 15 nt, Human
ccuuaucuagcugca

SEQ ID NO: 2006366 - RNA, 12 nt, Human
ccuuauggaaca

SEQ ID NO: 2006367 - RNA, 14 nt, Human
ccuuaucaaaggac

SEQ ID NO: 2006368 - RNA, 18 nt, Human
ccuuaucaaaggacacca

SEQ ID NO: 2006369 - RNA, 14 nt, Human
ccuuaucauaaauu

SEQ ID NO: 2006370 - RNA, 16 nt, Human
ccuuaucauaaauuca

SEQ ID NO: 2006371 - RNA, 18 nt, Human
ccuuagggaagcuggccu

SEQ ID NO: 2006372 - RNA, 20 nt, Human
ccuuaggugauccacucgcc

SEQ ID NO: 2006373 - RNA, 14 nt, Human
ccuuagcuucuggc

SEQ ID NO: 2006374 - RNA, 13 nt, Human
ccuuaucaaagga

SEQ ID NO: 2006375 - RNA, 20 nt, Human
ccuuagggaagcuggccuga

SEQ ID NO: 2006376 - RNA, 21 nt, Human
ccuuagggaagcuggccugag

SEQ ID NO: 2006377 - RNA, 16 nt, Human
ccuuaggguuuucucu

SEQ ID NO: 2006378 - RNA, 17 nt, Human
cuaagaauuuuuuauuu

SEQ ID NO: 2006379 - RNA, 14 nt, Human
cuaaguuuuuaugg

SEQ ID NO: 2006380 - RNA, 20 nt, Human
cuaaguuuuaggguacaugu

SEQ ID NO: 2006381 - RNA, 21 nt, Human
cuaaguuuuaggguacaugug

SEQ ID NO: 2006382 - RNA, 17 nt, Human
cuaagucucuuuuuuac

SEQ ID NO: 2006383 - RNA, 18 nt, Human
cuaagucucuuuuuuaca

SEQ ID NO: 2006384 - RNA, 20 nt, Human
cuaagucucuuuuuuacaaa

SEQ ID NO: 2006385 - RNA, 19 nt, Human
cuaaguugaguauauuaua

SEQ ID NO: 2006386 - RNA, 21 nt, Human
cuaaguugaguauauuauaau

SEQ ID NO: 2006387 - RNA, 22 nt, Human
cuaaguugaguauauuauaaua

SEQ ID NO: 2006388 - RNA, 19 nt, Human
cuacaaaaagcauaaaaau

SEQ ID NO: 2006389 - RNA, 20 nt, Human
cuaauaaaauuuaaaagucu

SEQ ID NO: 2006390 - RNA, 18 nt, Human
cuaaguaaaucucuucug

SEQ ID NO: 2006391 - RNA, 19 nt, Human
cuaaguaaaucucuucugu

SEQ ID NO: 2006392 - RNA, 23 nt, Human
cuaaguaaaucucuucuguguuu

SEQ ID NO: 2006393 - RNA, 22 nt, Human
cgugagccacugcaccgggcca

SEQ ID NO: 2006394 - RNA, 17 nt, Human
cgugacaauguuuacaa

SEQ ID NO: 2006395 - RNA, 14 nt, Human
cgugaggccagaga

SEQ ID NO: 2006396 - RNA, 14 nt, Human
cgugagccacugca

SEQ ID NO: 2006397 - RNA, 16 nt, Human
cgugacaauguuuaca

SEQ ID NO: 2006398 - RNA, 15 nt, Human
cgugagccacugcac

SEQ ID NO: 2006399 - RNA, 20 nt, Human
cgugagccacugcaccgggc

SEQ ID NO: 2006400 - RNA, 14 nt, Human
cgugacaacacuug

SEQ ID NO: 2006401 - RNA, 15 nt, Human
cgugacaacacuugu

SEQ ID NO: 2006402 - RNA, 11 nt, Human
cuaaagcugcc

SEQ ID NO: 2006403 - RNA, 13 nt, Human
cuaaagauuuuga

SEQ ID NO: 2006404 - RNA, 17 nt, Human
cuaaagauuuugaucuc

SEQ ID NO: 2006405 - RNA, 18 nt, Human
cguuaggauacugccucc

SEQ ID NO: 2006406 - RNA, 19 nt, Human
cguguuaugacuccagaau

SEQ ID NO: 2006407 - RNA, 21 nt, Human
cguguuauuuuaaucucagaa

SEQ ID NO: 2006408 - RNA, 13 nt, Human
cguguucucagag

SEQ ID NO: 2006409 - RNA, 21 nt, Human
cgugaucaaagccacacucug

SEQ ID NO: 2006410 - RNA, 18 nt, Human
cgugaucaaagccacacu

SEQ ID NO: 2006411 - RNA, 15 nt, Human
cguguuaugacucca

SEQ ID NO: 2006412 - RNA, 18 nt, Human
cgugaguccuggcauggg

SEQ ID NO: 2006413 - RNA, 19 nt, Human
cgugaguccuggcauggga

SEQ ID NO: 2006414 - RNA, 14 nt, Human
cgugaucaaagcca

SEQ ID NO: 2006415 - RNA, 16 nt, Human
cgugaggccagagaca

SEQ ID NO: 2006416 - RNA, 20 nt, Human
cuaacgaaguauccuucagc

SEQ ID NO: 2006417 - RNA, 19 nt, Human
cuaaaguguauuuuuuuac

SEQ ID NO: 2006418 - RNA, 23 nt, Human
cuaaaguaaaaacaaagaaauua

SEQ ID NO: 2006419 - RNA, 16 nt, Human
cuaaagccucaaaaca

SEQ ID NO: 2006420 - RNA, 14 nt, Human
cuaaaguaauuggu

SEQ ID NO: 2006421 - RNA, 20 nt, Human
cuaaaguacugagcagugau

SEQ ID NO: 2006422 - RNA, 22 nt, Human
cuaaaguacugagcagugauau

SEQ ID NO: 2006423 - RNA, 23 nt, Human
cuaaaguacugagcagugauauu

SEQ ID NO: 2006424 - RNA, 23 nt, Human
cuaaaguccuuugagcuccuggg

SEQ ID NO: 2006425 - RNA, 22 nt, Human
cuaacuugucuuuggacccuga

SEQ ID NO: 2006426 - RNA, 14 nt, Human
cuaacuugucuuug

SEQ ID NO: 2006427 - RNA, 20 nt, Human
cuaagaacaaaagaagcagc

SEQ ID NO: 2006428 - RNA, 16 nt, Human
cuaacuuuccuucauu

SEQ ID NO: 2006429 - RNA, 17 nt, Human
cgcuggagugcagugag

SEQ ID NO: 2006430 - RNA, 18 nt, Human
cgcuggagugcagugagc

SEQ ID NO: 2006431 - RNA, 21 nt, Human
cgcucuuggcagguacucagc

SEQ ID NO: 2006432 - RNA, 15 nt, Human
cgcugacuacagggc

SEQ ID NO: 2006433 - RNA, 20 nt, Human
cgcucugucgcccaggcugg

SEQ ID NO: 2006434 - RNA, 13 nt, Human
cgcucugcugugg

SEQ ID NO: 2006435 - RNA, 20 nt, Human
cgcugccccuggcagccccu

SEQ ID NO: 2006436 - RNA, 19 nt, Human
cgcugccccuggcagcccc

SEQ ID NO: 2006437 - RNA, 16 nt, Human
cgcugacuacagggcc

SEQ ID NO: 2006438 - RNA, 17 nt, Human
cgcugacuacagggccg

SEQ ID NO: 2006439 - RNA, 11 nt, Human
cgccacauccc

SEQ ID NO: 2006440 - RNA, 15 nt, Human
cgccaccacacccaa

SEQ ID NO: 2006441 - RNA, 19 nt, Human
cgccugccuuuggcacucu

SEQ ID NO: 2006442 - RNA, 20 nt, Human
ccuuuucgcaggauucuucc

SEQ ID NO: 2006443 - RNA, 20 nt, Human
ccuuuuccagagcauuccag

SEQ ID NO: 2006444 - RNA, 15 nt, Human
ccuuuuccagagcau

SEQ ID NO: 2006445 - RNA, 15 nt, Human
cgcaguguuugugug

SEQ ID NO: 2006446 - RNA, 20 nt, Human
cgagucucuucuccacugga

SEQ ID NO: 2006447 - RNA, 21 nt, Human
cgagucucuucuccacuggau

SEQ ID NO: 2006448 - RNA, 13 nt, Human
cgagucugaggcc

SEQ ID NO: 2006449 - RNA, 20 nt, Human
cgagugccgcaucucacagc

SEQ ID NO: 2006450 - RNA, 21 nt, Human
cgcaggcuggcccugcccugg

SEQ ID NO: 2006451 - RNA, 22 nt, Human
cgcaggcuggcccugcccuggu

SEQ ID NO: 2006452 - RNA, 17 nt, Human
cgagucucuucuccacu

SEQ ID NO: 2006453 - RNA, 18 nt, Human
cgagucucuucuccacug

SEQ ID NO: 2006454 - RNA, 16 nt, Human
cgagucucuucuccac

SEQ ID NO: 2006455 - RNA, 20 nt, Human
cggagacggagucccaccuu

SEQ ID NO: 2006456 - RNA, 17 nt, Human
cggagacggagucccac

SEQ ID NO: 2006457 - RNA, 21 nt, Human
cggagucccaccuuggcugca

SEQ ID NO: 2006458 - RNA, 22 nt, Human
cggagucccaccuuggcugcag

SEQ ID NO: 2006459 - RNA, 23 nt, Human
cggagucccaccuuggcugcagg

SEQ ID NO: 2006460 - RNA, 15 nt, Human
cggaggggccuggca

SEQ ID NO: 2006461 - RNA, 18 nt, Human
cggcuaauuuuuguauuu

SEQ ID NO: 2006462 - RNA, 13 nt, Human
cggcuaagcaggc

SEQ ID NO: 2006463 - RNA, 12 nt, Human
cgggcugugccc

SEQ ID NO: 2006464 - RNA, 20 nt, Human
cgguggcucacgccuguaau

SEQ ID NO: 2006465 - RNA, 22 nt, Human
cguacacauuuuauuuuauuau

SEQ ID NO: 2006466 - RNA, 15 nt, Human
cguacauaauacuga

SEQ ID NO: 2006467 - RNA, 16 nt, Human
cguacauaauacugaa

SEQ ID NO: 2006468 - RNA, 20 nt, Human
cguacauaauacugaaccac

SEQ ID NO: 2006469 - RNA, 14 nt, Human
cguacuaaggauac

SEQ ID NO: 2006470 - RNA, 14 nt, Human
cguacuuauaaaga

SEQ ID NO: 2006471 - RNA, 13 nt, Human
cgggcucugccuc

SEQ ID NO: 2006472 - RNA, 12 nt, Human
cgggcucugccu

SEQ ID NO: 2006473 - RNA, 16 nt, Human
cgggcugggagcucug

SEQ ID NO: 2006474 - RNA, 20 nt, Human
cgggcugggagcucugcaga

SEQ ID NO: 2006475 - RNA, 19 nt, Human
cgggcucagcaaaagaugc

SEQ ID NO: 2006476 - RNA, 16 nt, Human
cgggccuggagaacua

SEQ ID NO: 2006477 - RNA, 20 nt, Human
cgggccuggagaacuagaga

SEQ ID NO: 2006478 - RNA, 22 nt, Human
cgggcuccgacuugugcacagg

SEQ ID NO: 2006479 - RNA, 17 nt, Human
cggcucaagcccaggag

SEQ ID NO: 2006480 - RNA, 16 nt, Human
cggcucaagcccagga

SEQ ID NO: 2006481 - RNA, 15 nt, Human
cgggccccaccugca

SEQ ID NO: 2006482 - RNA, 17 nt, Human
cgggccccaccugcagc

SEQ ID NO: 2006483 - RNA, 19 nt, Human
cgggccccaccugcagcuc

SEQ ID NO: 2006484 - RNA, 21 nt, Human
cgggccccaccugcagcuccc

SEQ ID NO: 2006485 - RNA, 17 nt, Human
ccaugggccuccugugu

SEQ ID NO: 2006486 - RNA, 12 nt, Human
ccaugggcagga

SEQ ID NO: 2006487 - RNA, 13 nt, Human
ccaugggcaggag

SEQ ID NO: 2006488 - RNA, 17 nt, Human
ccauggggucucucaca

SEQ ID NO: 2006489 - RNA, 23 nt, Human
ccauggggucucucacagacagg

SEQ ID NO: 2006490 - RNA, 20 nt, Human
ccaugucucugagcauuaga

SEQ ID NO: 2006491 - RNA, 14 nt, Human
ccaugucucgacuc

SEQ ID NO: 2006492 - RNA, 15 nt, Human
ccaugucucgacuca

SEQ ID NO: 2006493 - RNA, 16 nt, Human
ccaugugagcugcugc

SEQ ID NO: 2006494 - RNA, 23 nt, Human
ccaugagaauguuuuagcacagc

SEQ ID NO: 2006495 - RNA, 22 nt, Human
ccaugagaauguuuuagcacag

SEQ ID NO: 2006496 - RNA, 18 nt, Human
ccaugaggaacaaggcaa

SEQ ID NO: 2006497 - RNA, 17 nt, Human
ccaugaggaacaaggca

SEQ ID NO: 2006498 - RNA, 16 nt, Human
ccaugaggaacaaggc

SEQ ID NO: 2006499 - RNA, 13 nt, Human
ccaugagccucag

SEQ ID NO: 2006500 - RNA, 18 nt, Human
cccaccgcagacaggacc

SEQ ID NO: 2006501 - RNA, 15 nt, Human
cccaccgcagacagg

SEQ ID NO: 2006502 - RNA, 23 nt, Human
cccacuguacuugcucuugaugc

SEQ ID NO: 2006503 - RNA, 19 nt, Human
cccacuguacuugcucuug

SEQ ID NO: 2006504 - RNA, 18 nt, Human
cccacuguacuugcucuu

SEQ ID NO: 2006505 - RNA, 12 nt, Human
ccauuguucuga

SEQ ID NO: 2006506 - RNA, 21 nt, Human
ccauuguucaggauucuaaua

SEQ ID NO: 2006507 - RNA, 13 nt, Human
cccaaccugcucu

SEQ ID NO: 2006508 - RNA, 14 nt, Human
cccaaccugcucuc

SEQ ID NO: 2006509 - RNA, 21 nt, Human
cccaaccugcucuccucuugc

SEQ ID NO: 2006510 - RNA, 18 nt, Human
cccaacuugccuuugaag

SEQ ID NO: 2006511 - RNA, 23 nt, Human
cccaaccugcucuccucuugcca

SEQ ID NO: 2006512 - RNA, 13 nt, Human
ccauugguguuga

SEQ ID NO: 2006513 - RNA, 22 nt, Human
ccauuguggucacaggaaguag

SEQ ID NO: 2006514 - RNA, 15 nt, Human
cccacccaagggccu

SEQ ID NO: 2006515 - RNA, 16 nt, Human
cccaccaucugcuguc

SEQ ID NO: 2006516 - RNA, 17 nt, Human
cccaccaucugcugucu

SEQ ID NO: 2006517 - RNA, 19 nt, Human
cccaccaucugcugucuuu

SEQ ID NO: 2006518 - RNA, 21 nt, Human
cccaccaucugcugucuuuuc

SEQ ID NO: 2006519 - RNA, 18 nt, Human
cccaccaucaugucuggc

SEQ ID NO: 2006520 - RNA, 12 nt, Human
cccaccaucugc

SEQ ID NO: 2006521 - RNA, 13 nt, Human
cccaccaucugcu

SEQ ID NO: 2006522 - RNA, 14 nt, Human
cccaccaucugcug

SEQ ID NO: 2006523 - RNA, 15 nt, Human
cccaccaucugcugu

SEQ ID NO: 2006524 - RNA, 18 nt, Human
cccacccaagggccuggc

SEQ ID NO: 2006525 - RNA, 18 nt, Human
cccaagcgcccuggcccc

SEQ ID NO: 2006526 - RNA, 20 nt, Human
cccaagcgcccuggccccca

SEQ ID NO: 2006527 - RNA, 17 nt, Human
cccaagcucugcuccuc

SEQ ID NO: 2006528 - RNA, 14 nt, Human
cccaagcaggaggc

SEQ ID NO: 2006529 - RNA, 20 nt, Human
cccaagaauagaugcugacu

SEQ ID NO: 2006530 - RNA, 21 nt, Human
cccaagaauagaugcugacug

SEQ ID NO: 2006531 - RNA, 16 nt, Human
cccaagccuggcaagg

SEQ ID NO: 2006532 - RNA, 17 nt, Human
cccaagcgcccuggccc

SEQ ID NO: 2006533 - RNA, 23 nt, Human
cccaagccuacuuuugccauuga

SEQ ID NO: 2006534 - RNA, 15 nt, Human
ccccauuguggucac

SEQ ID NO: 2006535 - RNA, 14 nt, Human
cccccuuccaugga

SEQ ID NO: 2006536 - RNA, 18 nt, Human
ccccgcaguguuugugug

SEQ ID NO: 2006537 - RNA, 12 nt, Human
ccccgcccaggc

SEQ ID NO: 2006538 - RNA, 14 nt, Human
ccccgcccaggcuu

SEQ ID NO: 2006539 - RNA, 13 nt, Human
ccccggccaccug

SEQ ID NO: 2006540 - RNA, 18 nt, Human
ccccggccaccugcggug

SEQ ID NO: 2006541 - RNA, 14 nt, Human
ccccggccaccugc

SEQ ID NO: 2006542 - RNA, 12 nt, Human
ccccagccccaa

SEQ ID NO: 2006543 - RNA, 10 nt, Human
ccccagcccc

SEQ ID NO: 2006544 - RNA, 22 nt, Human
ccccagccagccuggcugggac

SEQ ID NO: 2006545 - RNA, 16 nt, Human
ccccagccagccuggc

SEQ ID NO: 2006546 - RNA, 18 nt, Human
ccccagccagccuggcug

SEQ ID NO: 2006547 - RNA, 14 nt, Human
ccccagccacuccc

SEQ ID NO: 2006548 - RNA, 21 nt, Human
ccccagccacuccccagccag

SEQ ID NO: 2006549 - RNA, 14 nt, Human
ccccagccccaaaa

SEQ ID NO: 2006550 - RNA, 14 nt, Human
ccccagccccaucc

SEQ ID NO: 2006551 - RNA, 21 nt, Human
ccccauucugccugcccaggc

SEQ ID NO: 2006552 - RNA, 18 nt, Human
ccccaaaacucuccucug

SEQ ID NO: 2006553 - RNA, 12 nt, Human
ccccagccacuc

SEQ ID NO: 2006554 - RNA, 20 nt, Human
ccccaaaacucuccucugcu

SEQ ID NO: 2006555 - RNA, 21 nt, Human
ccccaaaacucuccucugcug

SEQ ID NO: 2006556 - RNA, 12 nt, Human
cccauucugucc

SEQ ID NO: 2006557 - RNA, 23 nt, Human
cccauucugccugcccaggcccc

SEQ ID NO: 2006558 - RNA, 20 nt, Human
cccagcuggggccaggcugg

SEQ ID NO: 2006559 - RNA, 23 nt, Human
cccagccccaaaacucuccucug

SEQ ID NO: 2006560 - RNA, 21 nt, Human
cccagccccaaaacucuccuc

SEQ ID NO: 2006561 - RNA, 19 nt, Human
cccagcccacuucugccau

SEQ ID NO: 2006562 - RNA, 17 nt, Human
cccagcaucgcacucug

SEQ ID NO: 2006563 - RNA, 21 nt, Human
cccagcaucgcacucuggcag

SEQ ID NO: 2006564 - RNA, 19 nt, Human
cccauccucuguacagagc

SEQ ID NO: 2006565 - RNA, 15 nt, Human
cccauccucuguaca

SEQ ID NO: 2006566 - RNA, 20 nt, Human
cccauccucuguacagagcc

SEQ ID NO: 2006567 - RNA, 23 nt, Human
cccagcuggggccaggcuggguc

SEQ ID NO: 2006568 - RNA, 22 nt, Human
cccagcuggggccaggcugggu

SEQ ID NO: 2006569 - RNA, 18 nt, Human
cccaggcuggcgugcagu

SEQ ID NO: 2006570 - RNA, 19 nt, Human
cccaggcuggcgugcagug

SEQ ID NO: 2006571 - RNA, 20 nt, Human
cccaggcuggcgugcagugg

SEQ ID NO: 2006572 - RNA, 14 nt, Human
cccauccucuguac

SEQ ID NO: 2006573 - RNA, 21 nt, Human
cccauccaccguccccuccca

SEQ ID NO: 2006574 - RNA, 22 nt, Human
cccauccaccguccccucccag

SEQ ID NO: 2006575 - RNA, 13 nt, Human
cccagggcacgug

SEQ ID NO: 2006576 - RNA, 14 nt, Human
cccagggcacgugg

SEQ ID NO: 2006577 - RNA, 12 nt, Human
ccagcagccugg

SEQ ID NO: 2006578 - RNA, 11 nt, Human
ccagcagccug

SEQ ID NO: 2006579 - RNA, 16 nt, Human
ccagcagaaaugccuu

SEQ ID NO: 2006580 - RNA, 17 nt, Human
ccagcagaaaugccuua

SEQ ID NO: 2006581 - RNA, 22 nt, Human
ccagcagaaaugccuuacccuc

SEQ ID NO: 2006582 - RNA, 15 nt, Human
ccagccccuggaugc

SEQ ID NO: 2006583 - RNA, 14 nt, Human
ccagccccuggaug

SEQ ID NO: 2006584 - RNA, 13 nt, Human
ccagccccuggau

SEQ ID NO: 2006585 - RNA, 23 nt, Human
ccagccccauccucuguacagag

SEQ ID NO: 2006586 - RNA, 13 nt, Human
ccagcagccugga

SEQ ID NO: 2006587 - RNA, 17 nt, Human
ccagccccuucugaccc

SEQ ID NO: 2006588 - RNA, 16 nt, Human
ccagccccuucugacc

SEQ ID NO: 2006589 - RNA, 15 nt, Human
ccagccccuucugac

SEQ ID NO: 2006590 - RNA, 18 nt, Human
ccagccccuggaugcagc

SEQ ID NO: 2006591 - RNA, 18 nt, Human
ccagccccuucugaccca

SEQ ID NO: 2006592 - RNA, 21 nt, Human
ccagcgagcccugguggcagu

SEQ ID NO: 2006593 - RNA, 19 nt, Human
ccaggaaaggcuccaggag

SEQ ID NO: 2006594 - RNA, 18 nt, Human
ccaggaaaggcuccagga

SEQ ID NO: 2006595 - RNA, 17 nt, Human
ccaggaaaggcuccagg

SEQ ID NO: 2006596 - RNA, 20 nt, Human
ccaggaaaggcuccaggagc

SEQ ID NO: 2006597 - RNA, 23 nt, Human
ccagcgggaauggcagcugccac

SEQ ID NO: 2006598 - RNA, 17 nt, Human
ccagcgggaauggcagc

SEQ ID NO: 2006599 - RNA, 15 nt, Human
ccagcgcugacgugu

SEQ ID NO: 2006600 - RNA, 15 nt, Human
ccagcgcggacaucc

SEQ ID NO: 2006601 - RNA, 20 nt, Human
ccagcgcggacauccccugc

SEQ ID NO: 2006602 - RNA, 21 nt, Human
ccagcgcggacauccccugcu

SEQ ID NO: 2006603 - RNA, 20 nt, Human
ccagcuugaaaccuucacuu

SEQ ID NO: 2006604 - RNA, 14 nt, Human
ccagcuuggcucag

SEQ ID NO: 2006605 - RNA, 13 nt, Human
ccagcuugggcag

SEQ ID NO: 2006606 - RNA, 14 nt, Human
ccagcuugggcaga

SEQ ID NO: 2006607 - RNA, 17 nt, Human
ccagcuugggcagaucu

SEQ ID NO: 2006608 - RNA, 20 nt, Human
ccaggcagcugucacugcug

SEQ ID NO: 2006609 - RNA, 15 nt, Human
ccaggcagcacccag

SEQ ID NO: 2006610 - RNA, 16 nt, Human
ccagucaccccggcca

SEQ ID NO: 2006611 - RNA, 22 nt, Human
ccaguaucuugaagacuuuucu

SEQ ID NO: 2006612 - RNA, 19 nt, Human
ccaguaucuugaagacuuu

SEQ ID NO: 2006613 - RNA, 13 nt, Human
ccaguaucuugaa

SEQ ID NO: 2006614 - RNA, 22 nt, Human
ccaggggugggacacccuguga

SEQ ID NO: 2006615 - RNA, 21 nt, Human
ccaggggugggacacccugug

SEQ ID NO: 2006616 - RNA, 20 nt, Human
ccaggggugggacacccugu

SEQ ID NO: 2006617 - RNA, 13 nt, Human
ccaggcugagccu

SEQ ID NO: 2006618 - RNA, 14 nt, Human
ccaggcugagccuc

SEQ ID NO: 2006619 - RNA, 16 nt, Human
ccaggcugagccucag

SEQ ID NO: 2006620 - RNA, 17 nt, Human
ccaggcugagccucagu

SEQ ID NO: 2006621 - RNA, 19 nt, Human
ccaggcugagccucagucu

SEQ ID NO: 2006622 - RNA, 22 nt, Human
ccaggcugagccucagucuccc

SEQ ID NO: 2006623 - RNA, 18 nt, Human
ccagucaccccggccacc

SEQ ID NO: 2006624 - RNA, 17 nt, Human
ccagucaccccggccac

SEQ ID NO: 2006625 - RNA, 19 nt, Human
ccagucaccccggccaccu

SEQ ID NO: 2006626 - RNA, 13 nt, Human
ccacuucugccag

SEQ ID NO: 2006627 - RNA, 14 nt, Human
ccacuucugccaga

SEQ ID NO: 2006628 - RNA, 23 nt, Human
ccacuucccuggguuagacugcc

SEQ ID NO: 2006629 - RNA, 13 nt, Human
ccacuucccuggg

SEQ ID NO: 2006630 - RNA, 12 nt, Human
ccacuuggucug

SEQ ID NO: 2006631 - RNA, 19 nt, Human
ccacuucugccagaugucc

SEQ ID NO: 2006632 - RNA, 13 nt, Human
ccacuuccagggg

SEQ ID NO: 2006633 - RNA, 18 nt, Human
ccacuuccaggggaaccu

SEQ ID NO: 2006634 - RNA, 19 nt, Human
ccacuuccaggggaaccug

SEQ ID NO: 2006635 - RNA, 21 nt, Human
ccacuuccaggggaaccugcc

SEQ ID NO: 2006636 - RNA, 19 nt, Human
ccacugcacuauagccuag

SEQ ID NO: 2006637 - RNA, 20 nt, Human
ccacugcacuauagccuagg

SEQ ID NO: 2006638 - RNA, 13 nt, Human
ccacugcaccggg

SEQ ID NO: 2006639 - RNA, 14 nt, Human
ccacugcaccgggc

SEQ ID NO: 2006640 - RNA, 17 nt, Human
ccacugcaccgggccac

SEQ ID NO: 2006641 - RNA, 19 nt, Human
ccacugcaccgggccacag

SEQ ID NO: 2006642 - RNA, 16 nt, Human
ccacugaaucuguaca

SEQ ID NO: 2006643 - RNA, 11 nt, Human
ccacucuucuc

SEQ ID NO: 2006644 - RNA, 23 nt, Human
ccacucuggauucagccuucuuu

SEQ ID NO: 2006645 - RNA, 13 nt, Human
ccacuuucuagcc

SEQ ID NO: 2006646 - RNA, 14 nt, Human
ccacuuuauugcca

SEQ ID NO: 2006647 - RNA, 19 nt, Human
ccacuuucuagccagagga

SEQ ID NO: 2006648 - RNA, 18 nt, Human
ccacuuucuagccagagg

SEQ ID NO: 2006649 - RNA, 20 nt, Human
ccacuuucuagccagaggag

SEQ ID NO: 2006650 - RNA, 20 nt, Human
ccacuuuccaagucacugca

SEQ ID NO: 2006651 - RNA, 12 nt, Human
ccacuuuuccag

SEQ ID NO: 2006652 - RNA, 13 nt, Human
ccacuuuguccau

SEQ ID NO: 2006653 - RNA, 20 nt, Human
ccacuuggucugugagaugc

SEQ ID NO: 2006654 - RNA, 22 nt, Human
ccacuuggucugugagaugcua

SEQ ID NO: 2006655 - RNA, 12 nt, Human
ccacuuguagau

SEQ ID NO: 2006656 - RNA, 17 nt, Human
ccacuuguagauuugau

SEQ ID NO: 2006657 - RNA, 18 nt, Human
ccacuuguagauuugauu

SEQ ID NO: 2006658 - RNA, 20 nt, Human
ccacuuguagauuugauuuu

SEQ ID NO: 2006659 - RNA, 17 nt, Human
ccacuuguccaugugaa

SEQ ID NO: 2006660 - RNA, 15 nt, Human
ccacuuggucuguga

SEQ ID NO: 2006661 - RNA, 16 nt, Human
ccacuuggucugugag

SEQ ID NO: 2006662 - RNA, 17 nt, Human
ccacuuggucugugaga

SEQ ID NO: 2006663 - RNA, 19 nt, Human
ccacuuggucugugagaug

SEQ ID NO: 2006664 - RNA, 14 nt, Human
ccacuuuuguucuu

SEQ ID NO: 2006665 - RNA, 15 nt, Human
ccacuuuuguucuug

SEQ ID NO: 2006666 - RNA, 21 nt, Human
ccacuuuuguucuugguuugu

SEQ ID NO: 2006667 - RNA, 22 nt, Human
ccacuuuuguucuugguuugua

SEQ ID NO: 2006668 - RNA, 17 nt, Human
ccagacccggcugcgug

SEQ ID NO: 2006669 - RNA, 17 nt, Human
ccacuuuuccaguauuu

SEQ ID NO: 2006670 - RNA, 19 nt, Human
ccagacgcucauucagcau

SEQ ID NO: 2006671 - RNA, 19 nt, Human
ccagacgccugauauugaa

SEQ ID NO: 2006672 - RNA, 14 nt, Human
ccagacuccaccaa

SEQ ID NO: 2006673 - RNA, 18 nt, Human
ccagacuccaccaagccu

SEQ ID NO: 2006674 - RNA, 20 nt, Human
ccagacgcucauucagcauc

SEQ ID NO: 2006675 - RNA, 22 nt, Human
ccagacgcucauucagcaucug

SEQ ID NO: 2006676 - RNA, 22 nt, Human
ccagagaaaugaaagucaguuu

SEQ ID NO: 2006677 - RNA, 23 nt, Human
ccagagaaaugaaagucaguuua

SEQ ID NO: 2006678 - RNA, 12 nt, Human
ccagagaacaag

SEQ ID NO: 2006679 - RNA, 16 nt, Human
ccagagagaagagccc

SEQ ID NO: 2006680 - RNA, 17 nt, Human
ccagagagaagagcccc

SEQ ID NO: 2006681 - RNA, 18 nt, Human
ccagagagaagagcccca

SEQ ID NO: 2006682 - RNA, 19 nt, Human
ccagagagaagagccccac

SEQ ID NO: 2006683 - RNA, 20 nt, Human
ccagagagaagagccccacu

SEQ ID NO: 2006684 - RNA, 22 nt, Human
ccagagagaagagccccacucu

SEQ ID NO: 2006685 - RNA, 23 nt, Human
ccagagagaagagccccacucuc

SEQ ID NO: 2006686 - RNA, 18 nt, Human
ccagagacacaagccuuc

SEQ ID NO: 2006687 - RNA, 16 nt, Human
ccagagacacaagccu

SEQ ID NO: 2006688 - RNA, 13 nt, Human
ccagaugcaccag

SEQ ID NO: 2006689 - RNA, 14 nt, Human
ccagaugcaccagc

SEQ ID NO: 2006690 - RNA, 13 nt, Human
ccagaucagccag

SEQ ID NO: 2006691 - RNA, 15 nt, Human
ccagaucagccagaa

SEQ ID NO: 2006692 - RNA, 16 nt, Human
ccagaucagccagaag

SEQ ID NO: 2006693 - RNA, 13 nt, Human
ccagauccugggu

SEQ ID NO: 2006694 - RNA, 13 nt, Human
ccagagagggugg

SEQ ID NO: 2006695 - RNA, 19 nt, Human
ccagaguccccccacuccc

SEQ ID NO: 2006696 - RNA, 20 nt, Human
ccugccuccuuugugaggaa

SEQ ID NO: 2006697 - RNA, 19 nt, Human
ccugccuccuuugugagga

SEQ ID NO: 2006698 - RNA, 15 nt, Human
ccugccuccuuugug

SEQ ID NO: 2006699 - RNA, 13 nt, Human
ccugccuccuuug

SEQ ID NO: 2006700 - RNA, 22 nt, Human
ccugccuccuuugugaggaagc

SEQ ID NO: 2006701 - RNA, 21 nt, Human
ccugccuccuuugugaggaag

SEQ ID NO: 2006702 - RNA, 23 nt, Human
ccugccuccuuugugaggaagcc

SEQ ID NO: 2006703 - RNA, 17 nt, Human
ccugccucucugcaggu

SEQ ID NO: 2006704 - RNA, 15 nt, Human
ccugccucuucucua

SEQ ID NO: 2006705 - RNA, 17 nt, Human
ccugccuccuugauauu

SEQ ID NO: 2006706 - RNA, 21 nt, Human
ccugccucucugcaggucccu

SEQ ID NO: 2006707 - RNA, 20 nt, Human
ccugccucucugcagguccc

SEQ ID NO: 2006708 - RNA, 12 nt, Human
ccugccugcugg

SEQ ID NO: 2006709 - RNA, 19 nt, Human
ccugccugcccugucagga

SEQ ID NO: 2006710 - RNA, 14 nt, Human
ccugccugcccugu

SEQ ID NO: 2006711 - RNA, 16 nt, Human
ccugccugcccuguca

SEQ ID NO: 2006712 - RNA, 18 nt, Human
ccugccugcccugucagg

SEQ ID NO: 2006713 - RNA, 16 nt, Human
ccugcugcaguugcca

SEQ ID NO: 2006714 - RNA, 12 nt, Human
ccugcugcaguu

SEQ ID NO: 2006715 - RNA, 11 nt, Human
ccugcugcagu

SEQ ID NO: 2006716 - RNA, 22 nt, Human
ccugcugcaguugccagucacc

SEQ ID NO: 2006717 - RNA, 19 nt, Human
ccugcugccaguaccagcc

SEQ ID NO: 2006718 - RNA, 21 nt, Human
ccugcugccaguaccagcccc

SEQ ID NO: 2006719 - RNA, 14 nt, Human
ccucuucugagcuu

SEQ ID NO: 2006720 - RNA, 15 nt, Human
ccucuuggcugccuu

SEQ ID NO: 2006721 - RNA, 15 nt, Human
ccucuucuucucaag

SEQ ID NO: 2006722 - RNA, 19 nt, Human
ccucuuuggucuacacugu

SEQ ID NO: 2006723 - RNA, 16 nt, Human
ccucuuugagugaagc

SEQ ID NO: 2006724 - RNA, 21 nt, Human
ccucugccugaagucacacag

SEQ ID NO: 2006725 - RNA, 15 nt, Human
ccucugccugucucc

SEQ ID NO: 2006726 - RNA, 19 nt, Human
ccucugccugucuccccca

SEQ ID NO: 2006727 - RNA, 12 nt, Human
ccucugcuaaau

SEQ ID NO: 2006728 - RNA, 14 nt, Human
ccucugcuaaauug

SEQ ID NO: 2006729 - RNA, 15 nt, Human
ccucugcuaaauuga

SEQ ID NO: 2006730 - RNA, 22 nt, Human
ccucugcuaaauugauguugau

SEQ ID NO: 2006731 - RNA, 21 nt, Human
ccugcaggcagccaggccaca

SEQ ID NO: 2006732 - RNA, 20 nt, Human
ccugcaggcagccaggccac

SEQ ID NO: 2006733 - RNA, 19 nt, Human
ccugcaggcagccaggcca

SEQ ID NO: 2006734 - RNA, 18 nt, Human
ccugcaggcagccaggcc

SEQ ID NO: 2006735 - RNA, 23 nt, Human
ccugcaggcagccaggccacaag

SEQ ID NO: 2006736 - RNA, 14 nt, Human
ccugcagagggcac

SEQ ID NO: 2006737 - RNA, 12 nt, Human
ccugcagagcug

SEQ ID NO: 2006738 - RNA, 13 nt, Human
ccugcagagcugc

SEQ ID NO: 2006739 - RNA, 14 nt, Human
ccugcagagcugcg

SEQ ID NO: 2006740 - RNA, 17 nt, Human
ccugcagagcugcgggc

SEQ ID NO: 2006741 - RNA, 14 nt, Human
ccugaguuccuagc

SEQ ID NO: 2006742 - RNA, 18 nt, Human
ccugaguuaggcuuucuc

SEQ ID NO: 2006743 - RNA, 18 nt, Human
ccugaguuccuagccacc

SEQ ID NO: 2006744 - RNA, 19 nt, Human
ccugaguuaggcuuucucu

SEQ ID NO: 2006745 - RNA, 22 nt, Human
ccugaguuaggcuuucucuuca

SEQ ID NO: 2006746 - RNA, 17 nt, Human
ccugcaggcagccaggc

SEQ ID NO: 2006747 - RNA, 16 nt, Human
ccugcaggcagccagg

SEQ ID NO: 2006748 - RNA, 12 nt, Human
ccugcagagggc

SEQ ID NO: 2006749 - RNA, 15 nt, Human
ccugcaggcagccag

SEQ ID NO: 2006750 - RNA, 16 nt, Human
ccugaggggccucuua

SEQ ID NO: 2006751 - RNA, 15 nt, Human
ccugagugagagggg

SEQ ID NO: 2006752 - RNA, 16 nt, Human
ccugagugagagggga

SEQ ID NO: 2006753 - RNA, 18 nt, Human
ccugagugagaggggagg

SEQ ID NO: 2006754 - RNA, 21 nt, Human
ccugagugagaggggaggcca

SEQ ID NO: 2006755 - RNA, 22 nt, Human
ccugagugagaggggaggccaa

SEQ ID NO: 2006756 - RNA, 23 nt, Human
ccugagugagaggggaggccaag

SEQ ID NO: 2006757 - RNA, 12 nt, Human
ccugaggggccu

SEQ ID NO: 2006758 - RNA, 15 nt, Human
ccugaggggagacag

SEQ ID NO: 2006759 - RNA, 18 nt, Human
ccugaggggagacagagc

SEQ ID NO: 2006760 - RNA, 19 nt, Human
ccugaggggagacagagca

SEQ ID NO: 2006761 - RNA, 20 nt, Human
ccugaggggagacagagcaa

SEQ ID NO: 2006762 - RNA, 22 nt, Human
ccugaggggagacagagcaacc

SEQ ID NO: 2006763 - RNA, 15 nt, Human
ccugaggggcagccu

SEQ ID NO: 2006764 - RNA, 17 nt, Human
ccugaggggcagccugc

SEQ ID NO: 2006765 - RNA, 20 nt, Human
ccugaggggcagccugccuu

SEQ ID NO: 2006766 - RNA, 21 nt, Human
ccugaggggcagccugccuug

SEQ ID NO: 2006767 - RNA, 19 nt, Human
ccugacgagauaagcaguu

SEQ ID NO: 2006768 - RNA, 21 nt, Human
ccugaggcugggcucccuucc

SEQ ID NO: 2006769 - RNA, 19 nt, Human
ccugaggcugggcucccuu

SEQ ID NO: 2006770 - RNA, 17 nt, Human
ccugaggcugggcuccc

SEQ ID NO: 2006771 - RNA, 13 nt, Human
ccugacuccccca

SEQ ID NO: 2006772 - RNA, 19 nt, Human
ccugacucccccagucccc

SEQ ID NO: 2006773 - RNA, 19 nt, Human
ccucccacugcccacuggc

SEQ ID NO: 2006774 - RNA, 23 nt, Human
ccucccacugcccacuggccggc

SEQ ID NO: 2006775 - RNA, 14 nt, Human
ccucccacugccca

SEQ ID NO: 2006776 - RNA, 15 nt, Human
ccucccacugcccac

SEQ ID NO: 2006777 - RNA, 23 nt, Human
ccucccaacucaccccagcccca

SEQ ID NO: 2006778 - RNA, 21 nt, Human
ccucccaacucaccccagccc

SEQ ID NO: 2006779 - RNA, 20 nt, Human
ccucccaacucaccccagcc

SEQ ID NO: 2006780 - RNA, 17 nt, Human
ccucccaacucacccca

SEQ ID NO: 2006781 - RNA, 11 nt, Human
ccucaggcagg

SEQ ID NO: 2006782 - RNA, 19 nt, Human
ccucaggaggcaggaccuu

SEQ ID NO: 2006783 - RNA, 18 nt, Human
ccucagccuccugaguag

SEQ ID NO: 2006784 - RNA, 14 nt, Human
ccuaggaagugauu

SEQ ID NO: 2006785 - RNA, 17 nt, Human
ccuagccuugcacuuuc

SEQ ID NO: 2006786 - RNA, 23 nt, Human
ccuagccucacgcuccuuucuga

SEQ ID NO: 2006787 - RNA, 12 nt, Human
ccuagcuggaga

SEQ ID NO: 2006788 - RNA, 16 nt, Human
ccuagcuggagaggag

SEQ ID NO: 2006789 - RNA, 19 nt, Human
ccuagcuggagaggagccc

SEQ ID NO: 2006790 - RNA, 20 nt, Human
ccuagcuggagaggagcccu

SEQ ID NO: 2006791 - RNA, 21 nt, Human
ccuagcuggagaggagcccug

SEQ ID NO: 2006792 - RNA, 22 nt, Human
ccuagcuggagaggagcccugc

SEQ ID NO: 2006793 - RNA, 20 nt, Human
ccuccuuugugaggaagccg

SEQ ID NO: 2006794 - RNA, 19 nt, Human
ccuccuuugugaggaagcc

SEQ ID NO: 2006795 - RNA, 18 nt, Human
ccuccuuugugaggaagc

SEQ ID NO: 2006796 - RNA, 23 nt, Human
ccucgacacgugggcuccccucu

SEQ ID NO: 2006797 - RNA, 16 nt, Human
ccucgaacuggcugca

SEQ ID NO: 2006798 - RNA, 15 nt, Human
ccucgaacuggcugc

SEQ ID NO: 2006799 - RNA, 15 nt, Human
ccuccuaaaaggccc

SEQ ID NO: 2006800 - RNA, 16 nt, Human
ccuccuaaaaggccca

SEQ ID NO: 2006801 - RNA, 17 nt, Human
ccuccuaaaaggcccag

SEQ ID NO: 2006802 - RNA, 18 nt, Human
ccuccuaaaaggcccaga

SEQ ID NO: 2006803 - RNA, 19 nt, Human
ccuccuaaaaggcccagag

SEQ ID NO: 2006804 - RNA, 21 nt, Human
ccuccuaaaaggcccagagag

SEQ ID NO: 2006805 - RNA, 20 nt, Human
ccuccgucacuaccuggcug

SEQ ID NO: 2006806 - RNA, 14 nt, Human
ccuccggcuaagca

SEQ ID NO: 2006807 - RNA, 15 nt, Human
ccuccgggucuuccu

SEQ ID NO: 2006808 - RNA, 16 nt, Human
ccuccgggucuuccua

SEQ ID NO: 2006809 - RNA, 14 nt, Human
ccuccgucacuacc

SEQ ID NO: 2006810 - RNA, 16 nt, Human
ccuccgucacuaccug

SEQ ID NO: 2006811 - RNA, 19 nt, Human
ccuccgucacuaccuggcu

SEQ ID NO: 2006812 - RNA, 13 nt, Human
ccuccgccucccg

SEQ ID NO: 2006813 - RNA, 16 nt, Human
ccuccgccucccgggu

SEQ ID NO: 2006814 - RNA, 13 nt, Human
ccucuccuuccug

SEQ ID NO: 2006815 - RNA, 15 nt, Human
ccucuccuuccugug

SEQ ID NO: 2006816 - RNA, 17 nt, Human
ccucggcuggcugucca

SEQ ID NO: 2006817 - RNA, 14 nt, Human
ccucgcuccaacuc

SEQ ID NO: 2006818 - RNA, 12 nt, Human
ccucucucacuc

SEQ ID NO: 2006819 - RNA, 19 nt, Human
ccucucugcaggucccuaa

SEQ ID NO: 2006820 - RNA, 18 nt, Human
ccucucugcaggucccua

SEQ ID NO: 2006821 - RNA, 17 nt, Human
ccucucugcaggucccu

SEQ ID NO: 2006822 - RNA, 16 nt, Human
ccucucugcagguccc

SEQ ID NO: 2006823 - RNA, 20 nt, Human
ccucugccucugacacacag

SEQ ID NO: 2006824 - RNA, 11 nt, Human
ccucugcccug

SEQ ID NO: 2006825 - RNA, 12 nt, Human
ccucugcccugc

SEQ ID NO: 2006826 - RNA, 13 nt, Human
ccucugcccugcg

SEQ ID NO: 2006827 - RNA, 14 nt, Human
ccucugcccugcgg

SEQ ID NO: 2006828 - RNA, 21 nt, Human
ccucugccucugacacacagc

SEQ ID NO: 2006829 - RNA, 23 nt, Human
ccucugccucugacacacagcuc

SEQ ID NO: 2006830 - RNA, 11 nt, Human
ccucugccuga

SEQ ID NO: 2006831 - RNA, 20 nt, Human
ccucugccugaagucacaca

SEQ ID NO: 2006832 - RNA, 23 nt, Human
ccgaaggugaggagcuugaaacc

SEQ ID NO: 2006833 - RNA, 16 nt, Human
ccgaauagcugggacu

SEQ ID NO: 2006834 - RNA, 17 nt, Human
ccgaauagcugggacua

SEQ ID NO: 2006835 - RNA, 18 nt, Human
ccgaccagacaccuugac

SEQ ID NO: 2006836 - RNA, 15 nt, Human
ccgaccaccugccca

SEQ ID NO: 2006837 - RNA, 15 nt, Human
ccgcagacaggacca

SEQ ID NO: 2006838 - RNA, 13 nt, Human
ccgaccagacacc

SEQ ID NO: 2006839 - RNA, 17 nt, Human
ccgaccagacaccuuga

SEQ ID NO: 2006840 - RNA, 17 nt, Human
ccgaaaacguggcugcu

SEQ ID NO: 2006841 - RNA, 16 nt, Human
ccgaaaacguggcugc

SEQ ID NO: 2006842 - RNA, 19 nt, Human
ccgaaagggacuuggaagc

SEQ ID NO: 2006843 - RNA, 17 nt, Human
ccgaaaccaaagaagaa

SEQ ID NO: 2006844 - RNA, 19 nt, Human
ccgaaagaggcacccuucc

SEQ ID NO: 2006845 - RNA, 18 nt, Human
ccgaaaggucaccucacu

SEQ ID NO: 2006846 - RNA, 15 nt, Human
cccuuccucuuucca

SEQ ID NO: 2006847 - RNA, 13 nt, Human
cccuuccucugcu

SEQ ID NO: 2006848 - RNA, 14 nt, Human
cccuuccucugcuc

SEQ ID NO: 2006849 - RNA, 16 nt, Human
cccuuccucugcuccc

SEQ ID NO: 2006850 - RNA, 14 nt, Human
cccuuccugggcac

SEQ ID NO: 2006851 - RNA, 18 nt, Human
cccuuccugggcacacgc

SEQ ID NO: 2006852 - RNA, 22 nt, Human
cccuuccugggcacacgcugcu

SEQ ID NO: 2006853 - RNA, 23 nt, Human
cccuuccugggcacacgcugcuc

SEQ ID NO: 2006854 - RNA, 11 nt, Human
cccuuccugug

SEQ ID NO: 2006855 - RNA, 12 nt, Human
cccuuccuucuu

SEQ ID NO: 2006856 - RNA, 17 nt, Human
ccgcagacaggaccagg

SEQ ID NO: 2006857 - RNA, 16 nt, Human
ccgcagacaggaccag

SEQ ID NO: 2006858 - RNA, 17 nt, Human
ccgaccacuuccagggg

SEQ ID NO: 2006859 - RNA, 18 nt, Human
ccgcccaaaccuuucccc

SEQ ID NO: 2006860 - RNA, 22 nt, Human
ccgcccagagacccaagcugcc

SEQ ID NO: 2006861 - RNA, 14 nt, Human
ccgcccagcccacc

SEQ ID NO: 2006862 - RNA, 12 nt, Human
ccgcccaggcuu

SEQ ID NO: 2006863 - RNA, 22 nt, Human
cccugugauggggcccugccuc

SEQ ID NO: 2006864 - RNA, 21 nt, Human
cccugugauggggcccugccu

SEQ ID NO: 2006865 - RNA, 21 nt, Human
cccugugcagaagggagcugg

SEQ ID NO: 2006866 - RNA, 21 nt, Human
cccuuccucuccacugccuuc

SEQ ID NO: 2006867 - RNA, 23 nt, Human
cccugugauggggcccugccucc

SEQ ID NO: 2006868 - RNA, 18 nt, Human
ccggcaggguccuagaaa

SEQ ID NO: 2006869 - RNA, 16 nt, Human
ccggccaccugcggug

SEQ ID NO: 2006870 - RNA, 15 nt, Human
ccggccccugcuggu

SEQ ID NO: 2006871 - RNA, 20 nt, Human
ccuaacgaaguauccuucag

SEQ ID NO: 2006872 - RNA, 16 nt, Human
ccgugaggccagagac

SEQ ID NO: 2006873 - RNA, 14 nt, Human
ccgugaggccagag

SEQ ID NO: 2006874 - RNA, 13 nt, Human
ccgugaggccaga

SEQ ID NO: 2006875 - RNA, 12 nt, Human
ccgugaggccag

SEQ ID NO: 2006876 - RNA, 17 nt, Human
ccgucuaccugaggggc

SEQ ID NO: 2006877 - RNA, 15 nt, Human
ccgucuaccugaggg

SEQ ID NO: 2006878 - RNA, 14 nt, Human
ccgucuaccugagg

SEQ ID NO: 2006879 - RNA, 15 nt, Human
ccggcuccaggcucc

SEQ ID NO: 2006880 - RNA, 15 nt, Human
ccgucuacagcuccc

SEQ ID NO: 2006881 - RNA, 22 nt, Human
ccgucuacagcucccccagcuc

SEQ ID NO: 2006882 - RNA, 12 nt, Human
ccggcuccaggc

SEQ ID NO: 2006883 - RNA, 13 nt, Human
ccggcuccaggcu

SEQ ID NO: 2006884 - RNA, 14 nt, Human
ccggcuccaggcuc

SEQ ID NO: 2006885 - RNA, 19 nt, Human
ccuagcauacguacacauu

SEQ ID NO: 2006886 - RNA, 17 nt, Human
ccuagcacuuugggagg

SEQ ID NO: 2006887 - RNA, 20 nt, Human
ccuagccugugccucuggga

SEQ ID NO: 2006888 - RNA, 14 nt, Human
ccuaaucuucugaa

SEQ ID NO: 2006889 - RNA, 19 nt, Human
cccuggauccaucaggcca

SEQ ID NO: 2006890 - RNA, 21 nt, Human
cccuggaugcagccucacagu

SEQ ID NO: 2006891 - RNA, 17 nt, Human
cccuggaugcagccuca

SEQ ID NO: 2006892 - RNA, 13 nt, Human
cccuggaugcagc

SEQ ID NO: 2006893 - RNA, 22 nt, Human
cccugcccugguuuccugcccu

SEQ ID NO: 2006894 - RNA, 23 nt, Human
cccugcccugguuuccugcccug

SEQ ID NO: 2006895 - RNA, 11 nt, Human
cccugcccugg

SEQ ID NO: 2006896 - RNA, 12 nt, Human
cccugcccuggu

SEQ ID NO: 2006897 - RNA, 20 nt, Human
cccuggcucccacaggcccu

SEQ ID NO: 2006898 - RNA, 14 nt, Human
cccugccccccagc

SEQ ID NO: 2006899 - RNA, 20 nt, Human
cccugccccccagcccuccu

SEQ ID NO: 2006900 - RNA, 15 nt, Human
cccugccccccagcc

SEQ ID NO: 2006901 - RNA, 22 nt, Human
cccugcccaccuggccucugca

SEQ ID NO: 2006902 - RNA, 14 nt, Human
cccugcccagauca

SEQ ID NO: 2006903 - RNA, 20 nt, Human
cccugcccagaucagccaga

SEQ ID NO: 2006904 - RNA, 21 nt, Human
cccugcccagaucagccagaa

SEQ ID NO: 2006905 - RNA, 22 nt, Human
cccugcccagaucagccagaag

SEQ ID NO: 2006906 - RNA, 14 nt, Human
cccugcccggcugc

SEQ ID NO: 2006907 - RNA, 17 nt, Human
cccugcccggcugcgga

SEQ ID NO: 2006908 - RNA, 18 nt, Human
cccugccccucccuucaa

SEQ ID NO: 2006909 - RNA, 19 nt, Human
cccugccccucccuucaac

SEQ ID NO: 2006910 - RNA, 23 nt, Human
cccugccccucccuucaaccauu

SEQ ID NO: 2006911 - RNA, 17 nt, Human
cccugccccucccuuca

SEQ ID NO: 2006912 - RNA, 18 nt, Human
cccugagaucucugcagg

SEQ ID NO: 2006913 - RNA, 12 nt, Human
cccugacugggg

SEQ ID NO: 2006914 - RNA, 20 nt, Human
cccugacugggggcagacau

SEQ ID NO: 2006915 - RNA, 16 nt, Human
cccugagcuuucugcu

SEQ ID NO: 2006916 - RNA, 20 nt, Human
cccugcccaccuggccucug

SEQ ID NO: 2006917 - RNA, 12 nt, Human
cccugagcccac

SEQ ID NO: 2006918 - RNA, 13 nt, Human
cccugagcccacu

SEQ ID NO: 2006919 - RNA, 14 nt, Human
cccugagcccacug

SEQ ID NO: 2006920 - RNA, 16 nt, Human
cccugagcccacugug

SEQ ID NO: 2006921 - RNA, 17 nt, Human
cccugagcccacugugc

SEQ ID NO: 2006922 - RNA, 14 nt, Human
cccuccucucugcc

SEQ ID NO: 2006923 - RNA, 11 nt, Human
cccuccuccug

SEQ ID NO: 2006924 - RNA, 16 nt, Human
cccuccuccuggacuc

SEQ ID NO: 2006925 - RNA, 18 nt, Human
cccuccuccuggacuccu

SEQ ID NO: 2006926 - RNA, 17 nt, Human
cccuccgggucuuccua

SEQ ID NO: 2006927 - RNA, 20 nt, Human
cccucgcccagucccagcag

SEQ ID NO: 2006928 - RNA, 22 nt, Human
cccucgcccagucccagcagcc

SEQ ID NO: 2006929 - RNA, 12 nt, Human
cccucgcccagu

SEQ ID NO: 2006930 - RNA, 13 nt, Human
cccucgcccaguc

SEQ ID NO: 2006931 - RNA, 16 nt, Human
cccucgcccaguccca

SEQ ID NO: 2006932 - RNA, 18 nt, Human
cccucgcccagucccagc

SEQ ID NO: 2006933 - RNA, 18 nt, Human
cccugaaagcccugagcu

SEQ ID NO: 2006934 - RNA, 13 nt, Human
cccucgucuuucc

SEQ ID NO: 2006935 - RNA, 18 nt, Human
cccucggaguucuucuug

SEQ ID NO: 2006936 - RNA, 19 nt, Human
cccucggaguucuucuuga

SEQ ID NO: 2006937 - RNA, 19 nt, Human
cccugaaggccccgcccag

SEQ ID NO: 2006938 - RNA, 16 nt, Human
cccugaaggccccgcc

SEQ ID NO: 2006939 - RNA, 14 nt, Human
cccugaaggccccg

SEQ ID NO: 2006940 - RNA, 13 nt, Human
cccugaaggcccc

SEQ ID NO: 2006941 - RNA, 12 nt, Human
cccugaaggccc

SEQ ID NO: 2006942 - RNA, 14 nt, Human
cccugaaggaacca

SEQ ID NO: 2006943 - RNA, 22 nt, Human
cccugaacaacgagccuuuuca

SEQ ID NO: 2006944 - RNA, 14 nt, Human
cccucgucuuuccc

SEQ ID NO: 2006945 - RNA, 15 nt, Human
cccucgucuuuccca

SEQ ID NO: 2006946 - RNA, 11 nt, Human
cccugaaaugu

SEQ ID NO: 2006947 - RNA, 13 nt, Human
cccugaaaugugu

SEQ ID NO: 2006948 - RNA, 20 nt, Human
cccugaauuuaaauagcuuu

SEQ ID NO: 2006949 - RNA, 22 nt, Human
cccugacaacacucauugaccu

SEQ ID NO: 2006950 - RNA, 16 nt, Human
cccugacaacacucau

SEQ ID NO: 2006951 - RNA, 22 nt, Human
cccugaaggccccgcccaggcu

SEQ ID NO: 2006952 - RNA, 20 nt, Human
cccugaaggccccgcccagg

SEQ ID NO: 2006953 - RNA, 14 nt, Human
cccugacaacacuc

SEQ ID NO: 2006954 - RNA, 15 nt, Human
cauuggauucugaga

SEQ ID NO: 2006955 - RNA, 20 nt, Human
cauuggauucugagagcugu

SEQ ID NO: 2006956 - RNA, 16 nt, Human
cauuggagauguuuag

SEQ ID NO: 2006957 - RNA, 22 nt, Human
cauuggaagcagguuaaauguu

SEQ ID NO: 2006958 - RNA, 23 nt, Human
cauuggaagcagguuaaauguuu

SEQ ID NO: 2006959 - RNA, 21 nt, Human
cauuggaagcagguuaaaugu

SEQ ID NO: 2006960 - RNA, 16 nt, Human
cauuuaggugaggaag

SEQ ID NO: 2006961 - RNA, 18 nt, Human
cauuuaggugaggaagca

SEQ ID NO: 2006962 - RNA, 12 nt, Human
ccaaaaaauauc

SEQ ID NO: 2006963 - RNA, 17 nt, Human
ccaaaaaaauccagaaa

SEQ ID NO: 2006964 - RNA, 14 nt, Human
ccaaaagcugcuca

SEQ ID NO: 2006965 - RNA, 19 nt, Human
ccaaaaaauaucuaguaau

SEQ ID NO: 2006966 - RNA, 23 nt, Human
ccaaaaaauaucuaguaauauau

SEQ ID NO: 2006967 - RNA, 14 nt, Human
ccaaaaggcagaag

SEQ ID NO: 2006968 - RNA, 23 nt, Human
cauuuuuuuuaagaaaaaggaug

SEQ ID NO: 2006969 - RNA, 23 nt, Human
cauuuguuucuuucucugaggac

SEQ ID NO: 2006970 - RNA, 21 nt, Human
cauuuguuucuuucucugagg

SEQ ID NO: 2006971 - RNA, 22 nt, Human
cauuuguuucuuucucugagga

SEQ ID NO: 2006972 - RNA, 19 nt, Human
cauuuguugccagauuuca

SEQ ID NO: 2006973 - RNA, 14 nt, Human
cauuuguaauuuaa

SEQ ID NO: 2006974 - RNA, 12 nt, Human
cauuugggcaga

SEQ ID NO: 2006975 - RNA, 16 nt, Human
cauuugggcagagagg

SEQ ID NO: 2006976 - RNA, 21 nt, Human
cauuuggugguuucagaaaug

SEQ ID NO: 2006977 - RNA, 13 nt, Human
cauuuggugcuug

SEQ ID NO: 2006978 - RNA, 12 nt, Human
cauuuguaauuu

SEQ ID NO: 2006979 - RNA, 20 nt, Human
cauuuggguugguuccaagu

SEQ ID NO: 2006980 - RNA, 16 nt, Human
cauuuaucuugaagga

SEQ ID NO: 2006981 - RNA, 17 nt, Human
cauuuaucuugaaggaa

SEQ ID NO: 2006982 - RNA, 23 nt, Human
cauuuaucuugaaggaaaaauuc

SEQ ID NO: 2006983 - RNA, 12 nt, Human
cauuuaucuuga

SEQ ID NO: 2006984 - RNA, 14 nt, Human
cauuuaucuugaag

SEQ ID NO: 2006985 - RNA, 15 nt, Human
cauuuaucuugaagg

SEQ ID NO: 2006986 - RNA, 22 nt, Human
ccaaaguacacuguuucaaacu

SEQ ID NO: 2006987 - RNA, 14 nt, Human
ccaaaguauuguac

SEQ ID NO: 2006988 - RNA, 14 nt, Human
ccaaagugcuggga

SEQ ID NO: 2006989 - RNA, 20 nt, Human
ccaaggagggugagugcaag

SEQ ID NO: 2006990 - RNA, 22 nt, Human
ccaaggacagaaggcuccugcc

SEQ ID NO: 2006991 - RNA, 19 nt, Human
ccaauucgaacuuuuucca

SEQ ID NO: 2006992 - RNA, 14 nt, Human
ccaauucuccuuua

SEQ ID NO: 2006993 - RNA, 14 nt, Human
ccaaugggagcuca

SEQ ID NO: 2006994 - RNA, 23 nt, Human
ccaauggacuaacuugucuuugg

SEQ ID NO: 2006995 - RNA, 21 nt, Human
ccaauggagacugucucaaga

SEQ ID NO: 2006996 - RNA, 13 nt, Human
ccaacucacccca

SEQ ID NO: 2006997 - RNA, 16 nt, Human
ccaacuauggccugug

SEQ ID NO: 2006998 - RNA, 15 nt, Human
ccaacuauggccugu

SEQ ID NO: 2006999 - RNA, 14 nt, Human
ccaacuauggccug

SEQ ID NO: 2007000 - RNA, 15 nt, Human
ccaaaucagcugcua

SEQ ID NO: 2007001 - RNA, 23 nt, Human
ccaaaucagcugcuacuacuccu

SEQ ID NO: 2007002 - RNA, 16 nt, Human
ccaaaucauaguggcu

SEQ ID NO: 2007003 - RNA, 16 nt, Human
ccaagcucugcuccuc

SEQ ID NO: 2007004 - RNA, 14 nt, Human
ccaagcucugcucc

SEQ ID NO: 2007005 - RNA, 15 nt, Human
ccaagcucugcuccu

SEQ ID NO: 2007006 - RNA, 21 nt, Human
ccaacucaccccagccccaaa

SEQ ID NO: 2007007 - RNA, 16 nt, Human
ccaacuccaacaucca

SEQ ID NO: 2007008 - RNA, 17 nt, Human
ccaacuccaacauccac

SEQ ID NO: 2007009 - RNA, 18 nt, Human
ccaacuccaacauccacu

SEQ ID NO: 2007010 - RNA, 20 nt, Human
cauucuccuuguguuacuaa

SEQ ID NO: 2007011 - RNA, 20 nt, Human
cauucucuaauauccacuug

SEQ ID NO: 2007012 - RNA, 22 nt, Human
cauucucuccauuucacuggcu

SEQ ID NO: 2007013 - RNA, 12 nt, Human
cauucucucucc

SEQ ID NO: 2007014 - RNA, 21 nt, Human
cauucuccaccugccagggac

SEQ ID NO: 2007015 - RNA, 19 nt, Human
cauucuccaccugccaggg

SEQ ID NO: 2007016 - RNA, 18 nt, Human
cauucuccaccugccagg

SEQ ID NO: 2007017 - RNA, 17 nt, Human
cauucuccaccugccag

SEQ ID NO: 2007018 - RNA, 17 nt, Human
cauuaucuacuugugua

SEQ ID NO: 2007019 - RNA, 17 nt, Human
cauuauguuaauauuuc

SEQ ID NO: 2007020 - RNA, 15 nt, Human
cauuauguuaauauu

SEQ ID NO: 2007021 - RNA, 16 nt, Human
cauuauguuaauauuu

SEQ ID NO: 2007022 - RNA, 17 nt, Human
cauguuacauaagauaa

SEQ ID NO: 2007023 - RNA, 16 nt, Human
cauguuacauaagaua

SEQ ID NO: 2007024 - RNA, 16 nt, Human
cauguccaagaagccc

SEQ ID NO: 2007025 - RNA, 15 nt, Human
cauguccaagaagcc

SEQ ID NO: 2007026 - RNA, 13 nt, Human
cauguucuuaauu

SEQ ID NO: 2007027 - RNA, 16 nt, Human
cauguucuuaauucuu

SEQ ID NO: 2007028 - RNA, 21 nt, Human
cauguuacauaagauaaaugu

SEQ ID NO: 2007029 - RNA, 18 nt, Human
cauguuaauugauagaau

SEQ ID NO: 2007030 - RNA, 14 nt, Human
cauguucugcuuuc

SEQ ID NO: 2007031 - RNA, 18 nt, Human
cauguucuuaauucuuag

SEQ ID NO: 2007032 - RNA, 18 nt, Human
cauguuggccaggcuggu

SEQ ID NO: 2007033 - RNA, 17 nt, Human
cauguuggccaggcugg

SEQ ID NO: 2007034 - RNA, 19 nt, Human
cauguuggccaggcugguc

SEQ ID NO: 2007035 - RNA, 20 nt, Human
cauguuggccaggcugcucu

SEQ ID NO: 2007036 - RNA, 22 nt, Human
cauguuggccaggcugcucuca

SEQ ID NO: 2007037 - RNA, 23 nt, Human
cauguuggccaggcugcucucaa

SEQ ID NO: 2007038 - RNA, 14 nt, Human
cauguauggccagg

SEQ ID NO: 2007039 - RNA, 15 nt, Human
cauguauggccagga

SEQ ID NO: 2007040 - RNA, 12 nt, Human
cauguauggcca

SEQ ID NO: 2007041 - RNA, 12 nt, Human
cauguauuaaau

SEQ ID NO: 2007042 - RNA, 20 nt, Human
cauguauuaaauuacauuug

SEQ ID NO: 2007043 - RNA, 22 nt, Human
cauguauuaaauuacauuugua

SEQ ID NO: 2007044 - RNA, 16 nt, Human
caugcuccuggcccac

SEQ ID NO: 2007045 - RNA, 14 nt, Human
caugcuccuggccc

SEQ ID NO: 2007046 - RNA, 17 nt, Human
caugcuccuggcccacu

SEQ ID NO: 2007047 - RNA, 20 nt, Human
caugcuccuggcccacugca

SEQ ID NO: 2007048 - RNA, 15 nt, Human
cauggccagguggcc

SEQ ID NO: 2007049 - RNA, 16 nt, Human
cauggccggcuuucag

SEQ ID NO: 2007050 - RNA, 17 nt, Human
cauggccggcuuucagg

SEQ ID NO: 2007051 - RNA, 18 nt, Human
cauggccggcuuucagga

SEQ ID NO: 2007052 - RNA, 19 nt, Human
cauggccggcuuucaggag

SEQ ID NO: 2007053 - RNA, 18 nt, Human
caugggaaaggggaaguu

SEQ ID NO: 2007054 - RNA, 22 nt, Human
cauggcuucugaaccugucuuu

SEQ ID NO: 2007055 - RNA, 18 nt, Human
caugggaaaguauucucu

SEQ ID NO: 2007056 - RNA, 20 nt, Human
caugggaaaugucaacaagu

SEQ ID NO: 2007057 - RNA, 20 nt, Human
caugggaaaguauucucuuu

SEQ ID NO: 2007058 - RNA, 21 nt, Human
caugggaaaguauucucuuuu

SEQ ID NO: 2007059 - RNA, 22 nt, Human
cauggccucuucagaucucuaa

SEQ ID NO: 2007060 - RNA, 13 nt, Human
cauggcuucugaa

SEQ ID NO: 2007061 - RNA, 19 nt, Human
cauggcuucugaaccuguc

SEQ ID NO: 2007062 - RNA, 21 nt, Human
cauggccucuucagaucucua

SEQ ID NO: 2007063 - RNA, 20 nt, Human
cauggccggcuuucaggagc

SEQ ID NO: 2007064 - RNA, 22 nt, Human
cauggccggcuuucaggagcuc

SEQ ID NO: 2007065 - RNA, 14 nt, Human
cauggccgugaacu

SEQ ID NO: 2007066 - RNA, 12 nt, Human
caugcaagguca

SEQ ID NO: 2007067 - RNA, 15 nt, Human
caugcaaggucauuu

SEQ ID NO: 2007068 - RNA, 16 nt, Human
caugaugcucuuuccc

SEQ ID NO: 2007069 - RNA, 17 nt, Human
caugaugcucuuuccca

SEQ ID NO: 2007070 - RNA, 13 nt, Human
caugacaaagacu

SEQ ID NO: 2007071 - RNA, 16 nt, Human
caugaauuugugaagg

SEQ ID NO: 2007072 - RNA, 21 nt, Human
caugaauauuuaguguucaua

SEQ ID NO: 2007073 - RNA, 10 nt, Human
cagucucaca

SEQ ID NO: 2007074 - RNA, 12 nt, Human
cagucucacauu

SEQ ID NO: 2007075 - RNA, 20 nt, Human
cagucucacauuucucaaca

SEQ ID NO: 2007076 - RNA, 17 nt, Human
cagucucaccauuuccc

SEQ ID NO: 2007077 - RNA, 15 nt, Human
cagucuaucauuguu

SEQ ID NO: 2007078 - RNA, 20 nt, Human
cagucucaccauuuccccag

SEQ ID NO: 2007079 - RNA, 21 nt, Human
cagucugauucccaagcucug

SEQ ID NO: 2007080 - RNA, 22 nt, Human
cagucugauucccaagcucugc

SEQ ID NO: 2007081 - RNA, 21 nt, Human
cagucuaaauuuauuauuuaa

SEQ ID NO: 2007082 - RNA, 21 nt, Human
cagucgugguugggaacacag

SEQ ID NO: 2007083 - RNA, 20 nt, Human
cagugguaugaucacggcuc

SEQ ID NO: 2007084 - RNA, 15 nt, Human
cagugcccagguggc

SEQ ID NO: 2007085 - RNA, 22 nt, Human
cagugcccagguggcuguggaa

SEQ ID NO: 2007086 - RNA, 16 nt, Human
cagugggagcugccug

SEQ ID NO: 2007087 - RNA, 11 nt, Human
cagugcccagg

SEQ ID NO: 2007088 - RNA, 13 nt, Human
cagugcccaggug

SEQ ID NO: 2007089 - RNA, 14 nt, Human
cagugcccaggugg

SEQ ID NO: 2007090 - RNA, 17 nt, Human
cagugggagcugccugu

SEQ ID NO: 2007091 - RNA, 18 nt, Human
cagugggagcugccuguu

SEQ ID NO: 2007092 - RNA, 21 nt, Human
cagugcccacaggaucagucu

SEQ ID NO: 2007093 - RNA, 18 nt, Human
cagugcccacaggaucag

SEQ ID NO: 2007094 - RNA, 22 nt, Human
cagugcccacaggaucagucug

SEQ ID NO: 2007095 - RNA, 22 nt, Human
cagugauuaccagggacugagg

SEQ ID NO: 2007096 - RNA, 23 nt, Human
cagucugauucccaagcucugcu

SEQ ID NO: 2007097 - RNA, 20 nt, Human
caguuacucagaauucucua

SEQ ID NO: 2007098 - RNA, 23 nt, Human
caguuacuuuccaauucuccuuu

SEQ ID NO: 2007099 - RNA, 14 nt, Human
caguuacuuuuccu

SEQ ID NO: 2007100 - RNA, 15 nt, Human
caguuacuuuuccuu

SEQ ID NO: 2007101 - RNA, 16 nt, Human
caguuacuuuuccuug

SEQ ID NO: 2007102 - RNA, 19 nt, Human
caguuacuuuuccuugcau

SEQ ID NO: 2007103 - RNA, 21 nt, Human
cagugguaugaucacggcuca

SEQ ID NO: 2007104 - RNA, 19 nt, Human
caguggugcgaucuggguu

SEQ ID NO: 2007105 - RNA, 17 nt, Human
caguuauuauauuuaca

SEQ ID NO: 2007106 - RNA, 21 nt, Human
caguuauuauauuuacaaaug

SEQ ID NO: 2007107 - RNA, 13 nt, Human
caguucaaaguca

SEQ ID NO: 2007108 - RNA, 15 nt, Human
caguucaaagucaug

SEQ ID NO: 2007109 - RNA, 22 nt, Human
caguucaaagucaugauguuuu

SEQ ID NO: 2007110 - RNA, 23 nt, Human
caguucaaagucaugauguuuuu

SEQ ID NO: 2007111 - RNA, 22 nt, Human
caguuauuauauuuacaaaugg

SEQ ID NO: 2007112 - RNA, 13 nt, Human
caguuaugugacc

SEQ ID NO: 2007113 - RNA, 16 nt, Human
caguuaugugaccuca

SEQ ID NO: 2007114 - RNA, 21 nt, Human
caguuaugugaccucacgugc

SEQ ID NO: 2007115 - RNA, 17 nt, Human
caguuauugucccuggc

SEQ ID NO: 2007116 - RNA, 20 nt, Human
caguuauugucccuggcuuc

SEQ ID NO: 2007117 - RNA, 23 nt, Human
caguuauugucccuggcuuccuu

SEQ ID NO: 2007118 - RNA, 14 nt, Human
caguucagcuuggg

SEQ ID NO: 2007119 - RNA, 15 nt, Human
caguucagcuugggg

SEQ ID NO: 2007120 - RNA, 23 nt, Human
caguuccaaucaguagcuuaaga

SEQ ID NO: 2007121 - RNA, 22 nt, Human
cauccucuguacagagcccacg

SEQ ID NO: 2007122 - RNA, 12 nt, Human
caucccagcccc

SEQ ID NO: 2007123 - RNA, 11 nt, Human
caucccagccc

SEQ ID NO: 2007124 - RNA, 16 nt, Human
caucccaccccauccu

SEQ ID NO: 2007125 - RNA, 19 nt, Human
caucccaccccauccucca

SEQ ID NO: 2007126 - RNA, 20 nt, Human
caucccaaacccuucagugc

SEQ ID NO: 2007127 - RNA, 21 nt, Human
caucagcacgauuucuguuua

SEQ ID NO: 2007128 - RNA, 18 nt, Human
caucagcccaaucccuga

SEQ ID NO: 2007129 - RNA, 20 nt, Human
caucagcccaaucccugauc

SEQ ID NO: 2007130 - RNA, 11 nt, Human
caucagaaaua

SEQ ID NO: 2007131 - RNA, 19 nt, Human
caucagaaauaauaaaaaa

SEQ ID NO: 2007132 - RNA, 12 nt, Human
caucagaacagc

SEQ ID NO: 2007133 - RNA, 14 nt, Human
caucagaacagcug

SEQ ID NO: 2007134 - RNA, 17 nt, Human
caucagaacagcuguug

SEQ ID NO: 2007135 - RNA, 19 nt, Human
caucccaaacccuucagug

SEQ ID NO: 2007136 - RNA, 15 nt, Human
caucagcugcucaga

SEQ ID NO: 2007137 - RNA, 19 nt, Human
caucagcugcucagauccc

SEQ ID NO: 2007138 - RNA, 16 nt, Human
caucagcugcucagau

SEQ ID NO: 2007139 - RNA, 18 nt, Human
caucagcugcucagaucc

SEQ ID NO: 2007140 - RNA, 18 nt, Human
cauccugaggcuccacuu

SEQ ID NO: 2007141 - RNA, 19 nt, Human
cauccugaggcuccacuug

SEQ ID NO: 2007142 - RNA, 22 nt, Human
caucguuuucuucacuguccuc

SEQ ID NO: 2007143 - RNA, 13 nt, Human
caucuaaaaauau

SEQ ID NO: 2007144 - RNA, 14 nt, Human
caucuaaaaauaua

SEQ ID NO: 2007145 - RNA, 17 nt, Human
caucuaaaaauauacau

SEQ ID NO: 2007146 - RNA, 18 nt, Human
caucuaaaaauauacaug

SEQ ID NO: 2007147 - RNA, 19 nt, Human
caucuaaaaauauacaugu

SEQ ID NO: 2007148 - RNA, 21 nt, Human
caucuaaaaauauacauguuu

SEQ ID NO: 2007149 - RNA, 23 nt, Human
caucuaaaaauauacauguuuau

SEQ ID NO: 2007150 - RNA, 15 nt, Human
caucuaaacugcccc

SEQ ID NO: 2007151 - RNA, 21 nt, Human
caucuaaacugcccccucugc

SEQ ID NO: 2007152 - RNA, 17 nt, Human
caucuguaccucugccu

SEQ ID NO: 2007153 - RNA, 15 nt, Human
caucugguuuucucu

SEQ ID NO: 2007154 - RNA, 14 nt, Human
caucugguuuucuc

SEQ ID NO: 2007155 - RNA, 19 nt, Human
caucugguuuucucuccag

SEQ ID NO: 2007156 - RNA, 15 nt, Human
caucuguaagcuguu

SEQ ID NO: 2007157 - RNA, 20 nt, Human
caucuggagagcccagaguc

SEQ ID NO: 2007158 - RNA, 15 nt, Human
caucuggaguucuca

SEQ ID NO: 2007159 - RNA, 16 nt, Human
caucuggaguucucaa

SEQ ID NO: 2007160 - RNA, 20 nt, Human
cauagcagcuuauucacaag

SEQ ID NO: 2007161 - RNA, 19 nt, Human
cauagcagcuuauucacaa

SEQ ID NO: 2007162 - RNA, 23 nt, Human
cauagcagagaaugaaagggccc

SEQ ID NO: 2007163 - RNA, 16 nt, Human
cauagguuuaauaauu

SEQ ID NO: 2007164 - RNA, 16 nt, Human
cauagguuagauauag

SEQ ID NO: 2007165 - RNA, 21 nt, Human
cauauuauuuuauguugcaua

SEQ ID NO: 2007166 - RNA, 23 nt, Human
cauauuauaucagacugcuuuga

SEQ ID NO: 2007167 - RNA, 19 nt, Human
cauauuagcgacaacagau

SEQ ID NO: 2007168 - RNA, 20 nt, Human
cauauuagcgacaacagauu

SEQ ID NO: 2007169 - RNA, 23 nt, Human
cauauuagcgacaacagauugga

SEQ ID NO: 2007170 - RNA, 14 nt, Human
cauauuauaucaga

SEQ ID NO: 2007171 - RNA, 16 nt, Human
cauauuauaucagacu

SEQ ID NO: 2007172 - RNA, 19 nt, Human
cauauuacuguacauggga

SEQ ID NO: 2007173 - RNA, 22 nt, Human
cauauuacuguacaugggacua

SEQ ID NO: 2007174 - RNA, 12 nt, Human
cauauuagaaaa

SEQ ID NO: 2007175 - RNA, 13 nt, Human
cauauuagaaaac

SEQ ID NO: 2007176 - RNA, 15 nt, Human
cauauuagaaaacuu

SEQ ID NO: 2007177 - RNA, 16 nt, Human
cauauuagaaaacuuu

SEQ ID NO: 2007178 - RNA, 17 nt, Human
cauauuagaaaacuuug

SEQ ID NO: 2007179 - RNA, 18 nt, Human
cauauuagaaaacuuugu

SEQ ID NO: 2007180 - RNA, 19 nt, Human
cauauuagaaaacuuuguu

SEQ ID NO: 2007181 - RNA, 20 nt, Human
cauauuagaaaacuuuguua

SEQ ID NO: 2007182 - RNA, 21 nt, Human
cauauuagaaaacuuuguuag

SEQ ID NO: 2007183 - RNA, 18 nt, Human
cauauuagacuucuguuu

SEQ ID NO: 2007184 - RNA, 21 nt, Human
cauauuagacuucuguuuuca

SEQ ID NO: 2007185 - RNA, 22 nt, Human
cauauuagacuucuguuuucaa

SEQ ID NO: 2007186 - RNA, 20 nt, Human
cauauuagaggggaaaagcu

SEQ ID NO: 2007187 - RNA, 22 nt, Human
cauauuaccacagacauacuaa

SEQ ID NO: 2007188 - RNA, 15 nt, Human
cauauguauacaugu

SEQ ID NO: 2007189 - RNA, 16 nt, Human
cauauguauacaugug

SEQ ID NO: 2007190 - RNA, 19 nt, Human
cauacagggaugguguuca

SEQ ID NO: 2007191 - RNA, 16 nt, Human
cauacaguuugcacuu

SEQ ID NO: 2007192 - RNA, 16 nt, Human
cauacagggauggugu

SEQ ID NO: 2007193 - RNA, 23 nt, Human
cauacaggaagguagaaauaucu

SEQ ID NO: 2007194 - RNA, 18 nt, Human
cauaauuauuauuuggcc

SEQ ID NO: 2007195 - RNA, 15 nt, Human
cauaauguucugcua

SEQ ID NO: 2007196 - RNA, 13 nt, Human
cauaauuaacacu

SEQ ID NO: 2007197 - RNA, 18 nt, Human
caguuuuauagcuuuauu

SEQ ID NO: 2007198 - RNA, 23 nt, Human
cauaaugcgugcauaccacuuuu

SEQ ID NO: 2007199 - RNA, 22 nt, Human
caguuguuagugugucuuagug

SEQ ID NO: 2007200 - RNA, 21 nt, Human
caguuguuaguuacuaccucc

SEQ ID NO: 2007201 - RNA, 14 nt, Human
caguuguuauuuau

SEQ ID NO: 2007202 - RNA, 19 nt, Human
caguuguuauuuauugaaa

SEQ ID NO: 2007203 - RNA, 18 nt, Human
caguuguuagugugucuu

SEQ ID NO: 2007204 - RNA, 21 nt, Human
caguuguuauuuauugaaaug

SEQ ID NO: 2007205 - RNA, 23 nt, Human
caguuuauuccagagcugccagu

SEQ ID NO: 2007206 - RNA, 12 nt, Human
caguuucaauaa

SEQ ID NO: 2007207 - RNA, 13 nt, Human
caguuuauguuuu

SEQ ID NO: 2007208 - RNA, 14 nt, Human
caguuuauguuuug

SEQ ID NO: 2007209 - RNA, 19 nt, Human
caguuuauguuuuggucca

SEQ ID NO: 2007210 - RNA, 14 nt, Human
caguuuauuccaga

SEQ ID NO: 2007211 - RNA, 18 nt, Human
caguuuauuccagagcug

SEQ ID NO: 2007212 - RNA, 22 nt, Human
caguuuauuccagagcugccag

SEQ ID NO: 2007213 - RNA, 21 nt, Human
caguuuguuaguaugaggcau

SEQ ID NO: 2007214 - RNA, 21 nt, Human
caguuugaggauuaguuuaga

SEQ ID NO: 2007215 - RNA, 23 nt, Human
caguuugaggauuaguuuagaac

SEQ ID NO: 2007216 - RNA, 23 nt, Human
caguuuguuaguaugaggcauuu

SEQ ID NO: 2007217 - RNA, 20 nt, Human
caguuucaauaaaguuugau

SEQ ID NO: 2007218 - RNA, 13 nt, Human
caguuucaauaaa

SEQ ID NO: 2007219 - RNA, 16 nt, Human
caguuucaauaaaguu

SEQ ID NO: 2007220 - RNA, 17 nt, Human
caguuucaauaaaguuu

SEQ ID NO: 2007221 - RNA, 18 nt, Human
caguuucaauaaaguuug

SEQ ID NO: 2007222 - RNA, 19 nt, Human
cagcaccaucucuccuccu

SEQ ID NO: 2007223 - RNA, 19 nt, Human
cagcaccacccuccuuccc

SEQ ID NO: 2007224 - RNA, 14 nt, Human
cagcaccacucaag

SEQ ID NO: 2007225 - RNA, 21 nt, Human
cagcaccacucaagaccaaau

SEQ ID NO: 2007226 - RNA, 22 nt, Human
cagcaccacucaagaccaaaug

SEQ ID NO: 2007227 - RNA, 19 nt, Human
cagauuucacucuccuugg

SEQ ID NO: 2007228 - RNA, 17 nt, Human
cagcaccaucucuccuc

SEQ ID NO: 2007229 - RNA, 19 nt, Human
cagauuugaacucuucaau

SEQ ID NO: 2007230 - RNA, 16 nt, Human
cagauuucucuuugaa

SEQ ID NO: 2007231 - RNA, 17 nt, Human
cagcaccacccuccuuc

SEQ ID NO: 2007232 - RNA, 20 nt, Human
cagauuucacucuccuuggu

SEQ ID NO: 2007233 - RNA, 13 nt, Human
cagauuuaugcau

SEQ ID NO: 2007234 - RNA, 19 nt, Human
cagauugcaacaggcuggg

SEQ ID NO: 2007235 - RNA, 20 nt, Human
cagauugcaacaggcugggc

SEQ ID NO: 2007236 - RNA, 18 nt, Human
cagauugcaacaggcugg

SEQ ID NO: 2007237 - RNA, 18 nt, Human
cagccaggccacuggccc

SEQ ID NO: 2007238 - RNA, 14 nt, Human
cagcacgauuucug

SEQ ID NO: 2007239 - RNA, 15 nt, Human
cagcacgauuucugu

SEQ ID NO: 2007240 - RNA, 17 nt, Human
cagcacguguggccugu

SEQ ID NO: 2007241 - RNA, 18 nt, Human
cagcacgggggccaagga

SEQ ID NO: 2007242 - RNA, 12 nt, Human
cagagagggugg

SEQ ID NO: 2007243 - RNA, 16 nt, Human
cagagaggcugugguu

SEQ ID NO: 2007244 - RNA, 22 nt, Human
cagagagaagagccccacucuc

SEQ ID NO: 2007245 - RNA, 23 nt, Human
cagagagaagagccccacucuca

SEQ ID NO: 2007246 - RNA, 13 nt, Human
cagagaggguggg

SEQ ID NO: 2007247 - RNA, 17 nt, Human
cagagaggguggugacc

SEQ ID NO: 2007248 - RNA, 20 nt, Human
cagagaggguggugaccucu

SEQ ID NO: 2007249 - RNA, 22 nt, Human
cagagaggguggugaccucugc

SEQ ID NO: 2007250 - RNA, 21 nt, Human
cagagacugucccugaaaccu

SEQ ID NO: 2007251 - RNA, 15 nt, Human
cagagagaagagccc

SEQ ID NO: 2007252 - RNA, 16 nt, Human
cagagagaagagcccc

SEQ ID NO: 2007253 - RNA, 17 nt, Human
cagagagaagagcccca

SEQ ID NO: 2007254 - RNA, 18 nt, Human
cagagagaagagccccac

SEQ ID NO: 2007255 - RNA, 19 nt, Human
cagagagaagagccccacu

SEQ ID NO: 2007256 - RNA, 21 nt, Human
cagagagaagagccccacucu

SEQ ID NO: 2007257 - RNA, 13 nt, Human
cagagcugccacc

SEQ ID NO: 2007258 - RNA, 12 nt, Human
cagagcugaaga

SEQ ID NO: 2007259 - RNA, 20 nt, Human
cagagagguuaaggugggua

SEQ ID NO: 2007260 - RNA, 23 nt, Human
cagagagggugggagugggccca

SEQ ID NO: 2007261 - RNA, 23 nt, Human
cagagaggguggugaccucugcc

SEQ ID NO: 2007262 - RNA, 19 nt, Human
cagaggaaagcaaaggaga

SEQ ID NO: 2007263 - RNA, 17 nt, Human
cagaggaaagcaaagga

SEQ ID NO: 2007264 - RNA, 13 nt, Human
cagaggggguggc

SEQ ID NO: 2007265 - RNA, 20 nt, Human
cagaggaaagcaaaggagau

SEQ ID NO: 2007266 - RNA, 19 nt, Human
cagauacuuggggggcuga

SEQ ID NO: 2007267 - RNA, 16 nt, Human
cagaggggguggccuc

SEQ ID NO: 2007268 - RNA, 14 nt, Human
cagaggggguggcc

SEQ ID NO: 2007269 - RNA, 19 nt, Human
cagauagauauaugcucug

SEQ ID NO: 2007270 - RNA, 14 nt, Human
cagauaugauucaa

SEQ ID NO: 2007271 - RNA, 20 nt, Human
cagaucccacuuuugccaga

SEQ ID NO: 2007272 - RNA, 22 nt, Human
cagaucccagcuucggcauuug

SEQ ID NO: 2007273 - RNA, 14 nt, Human
cagauccccaagcc

SEQ ID NO: 2007274 - RNA, 14 nt, Human
cagacagcugccug

SEQ ID NO: 2007275 - RNA, 13 nt, Human
cagacagcugccu

SEQ ID NO: 2007276 - RNA, 14 nt, Human
cagacagcccucca

SEQ ID NO: 2007277 - RNA, 18 nt, Human
cagacagcugccugggau

SEQ ID NO: 2007278 - RNA, 17 nt, Human
cagacagcugccuggga

SEQ ID NO: 2007279 - RNA, 16 nt, Human
cagacagcugccuggg

SEQ ID NO: 2007280 - RNA, 15 nt, Human
cagacagcugccugg

SEQ ID NO: 2007281 - RNA, 16 nt, Human
cagacaggaccaggga

SEQ ID NO: 2007282 - RNA, 15 nt, Human
cagacaggaccaggg

SEQ ID NO: 2007283 - RNA, 13 nt, Human
cagacaggaccag

SEQ ID NO: 2007284 - RNA, 24 nt, Human
cagacaggaccagggauuuccaug

SEQ ID NO: 2007285 - RNA, 17 nt, Human
cagacaggaccagggau

SEQ ID NO: 2007286 - RNA, 11 nt, Human
cagacaggcaa

SEQ ID NO: 2007287 - RNA, 15 nt, Human
cagacaggaccccug

SEQ ID NO: 2007288 - RNA, 16 nt, Human
cagacaggaccccugc

SEQ ID NO: 2007289 - RNA, 18 nt, Human
cagacaggaccccugcag

SEQ ID NO: 2007290 - RNA, 23 nt, Human
cagacaggaccccugcaguuccc

SEQ ID NO: 2007291 - RNA, 13 nt, Human
cagacaggcaagc

SEQ ID NO: 2007292 - RNA, 18 nt, Human
cagacaggcaagcaccuc

SEQ ID NO: 2007293 - RNA, 20 nt, Human
cagacaggcaagcaccuccu

SEQ ID NO: 2007294 - RNA, 21 nt, Human
cagacaggcaagcaccuccug

SEQ ID NO: 2007295 - RNA, 20 nt, Human
cagacuggaagcacagcuuc

SEQ ID NO: 2007296 - RNA, 21 nt, Human
cagacuggaagcacagcuuca

SEQ ID NO: 2007297 - RNA, 14 nt, Human
cagacuggaagcac

SEQ ID NO: 2007298 - RNA, 16 nt, Human
cagacuggaagcacag

SEQ ID NO: 2007299 - RNA, 17 nt, Human
cagacuggaagcacagc

SEQ ID NO: 2007300 - RNA, 18 nt, Human
cagacuggaagcacagcu

SEQ ID NO: 2007301 - RNA, 13 nt, Human
cagacuggaagca

SEQ ID NO: 2007302 - RNA, 23 nt, Human
cagacucuacagaggccaugggc

SEQ ID NO: 2007303 - RNA, 18 nt, Human
cagacucuacagaggcca

SEQ ID NO: 2007304 - RNA, 19 nt, Human
cagacucuacagaggccau

SEQ ID NO: 2007305 - RNA, 20 nt, Human
cagacucuacagaggccaug

SEQ ID NO: 2007306 - RNA, 21 nt, Human
cagacucuacagaggccaugg

SEQ ID NO: 2007307 - RNA, 18 nt, Human
cagacagggggccagaac

SEQ ID NO: 2007308 - RNA, 22 nt, Human
cagacaggcaagcaccuccugc

SEQ ID NO: 2007309 - RNA, 23 nt, Human
cagacaggcaagcaccuccugcc

SEQ ID NO: 2007310 - RNA, 17 nt, Human
cagacucuacagaggcc

SEQ ID NO: 2007311 - RNA, 20 nt, Human
cagacagucacaaauuucuc

SEQ ID NO: 2007312 - RNA, 17 nt, Human
cagacagucacaaauuu

SEQ ID NO: 2007313 - RNA, 15 nt, Human
cagcguuuugcaagg

SEQ ID NO: 2007314 - RNA, 19 nt, Human
cagcguuuugcaagguaaa

SEQ ID NO: 2007315 - RNA, 15 nt, Human
cagcuaacauggaag

SEQ ID NO: 2007316 - RNA, 16 nt, Human
cagccugcuccagcug

SEQ ID NO: 2007317 - RNA, 23 nt, Human
cagcgcggacauccccugcuggc

SEQ ID NO: 2007318 - RNA, 20 nt, Human
cagcgcggacauccccugcu

SEQ ID NO: 2007319 - RNA, 22 nt, Human
cagcgcggacauccccugcugg

SEQ ID NO: 2007320 - RNA, 18 nt, Human
cagcgcucuggugcugca

SEQ ID NO: 2007321 - RNA, 12 nt, Human
cagcgcugacgu

SEQ ID NO: 2007322 - RNA, 19 nt, Human
cagccugcuccagcuguuc

SEQ ID NO: 2007323 - RNA, 17 nt, Human
cagccugcuccagcugu

SEQ ID NO: 2007324 - RNA, 16 nt, Human
cagcugagccuucuga

SEQ ID NO: 2007325 - RNA, 17 nt, Human
cagcugagccuucugag

SEQ ID NO: 2007326 - RNA, 18 nt, Human
cagcugagccuucugagc

SEQ ID NO: 2007327 - RNA, 23 nt, Human
cagcugccuaggauucacacccc

SEQ ID NO: 2007328 - RNA, 21 nt, Human
cagcugacuuuucuguccgag

SEQ ID NO: 2007329 - RNA, 14 nt, Human
cagcugagaggcug

SEQ ID NO: 2007330 - RNA, 15 nt, Human
cagcugagccuucug

SEQ ID NO: 2007331 - RNA, 17 nt, Human
caggaaaggcuccagga

SEQ ID NO: 2007332 - RNA, 16 nt, Human
caggaaaggcuccagg

SEQ ID NO: 2007333 - RNA, 20 nt, Human
caggaaaggcuccaggagca

SEQ ID NO: 2007334 - RNA, 19 nt, Human
caggaaaggcuccaggagc

SEQ ID NO: 2007335 - RNA, 16 nt, Human
cagcugucaaggcuca

SEQ ID NO: 2007336 - RNA, 14 nt, Human
cagcuucacuucug

SEQ ID NO: 2007337 - RNA, 15 nt, Human
cagcuucacuucuga

SEQ ID NO: 2007338 - RNA, 16 nt, Human
cagcuucacuucugac

SEQ ID NO: 2007339 - RNA, 16 nt, Human
caggaaagaagcauuu

SEQ ID NO: 2007340 - RNA, 23 nt, Human
caggcuaauguuggcagaugcag

SEQ ID NO: 2007341 - RNA, 21 nt, Human
caggcugggagagccuuccag

SEQ ID NO: 2007342 - RNA, 22 nt, Human
caggccuuaucuccaagaccag

SEQ ID NO: 2007343 - RNA, 17 nt, Human
caggccuuaucuccaag

SEQ ID NO: 2007344 - RNA, 16 nt, Human
caggccuuaucuccaa

SEQ ID NO: 2007345 - RNA, 21 nt, Human
caggcgugagccaccgugccu

SEQ ID NO: 2007346 - RNA, 14 nt, Human
caggccuccuacag

SEQ ID NO: 2007347 - RNA, 19 nt, Human
caggccuacuccugucuuc

SEQ ID NO: 2007348 - RNA, 15 nt, Human
caggccuguccaaca

SEQ ID NO: 2007349 - RNA, 12 nt, Human
caggccuccuac

SEQ ID NO: 2007350 - RNA, 15 nt, Human
caggccuacuccugu

SEQ ID NO: 2007351 - RNA, 16 nt, Human
caggccuacuccuguc

SEQ ID NO: 2007352 - RNA, 17 nt, Human
caggccuacuccugucu

SEQ ID NO: 2007353 - RNA, 18 nt, Human
caggccuacuccugucuu

SEQ ID NO: 2007354 - RNA, 17 nt, Human
caggccgggcagagcac

SEQ ID NO: 2007355 - RNA, 13 nt, Human
caggccgggcaga

SEQ ID NO: 2007356 - RNA, 14 nt, Human
caggccgggcagag

SEQ ID NO: 2007357 - RNA, 16 nt, Human
caggggaaaagaggag

SEQ ID NO: 2007358 - RNA, 14 nt, Human
caggggaaaagagg

SEQ ID NO: 2007359 - RNA, 17 nt, Human
caggggaaaaucagccu

SEQ ID NO: 2007360 - RNA, 13 nt, Human
cagggcuuuaaaa

SEQ ID NO: 2007361 - RNA, 14 nt, Human
cagggcuuuaaaau

SEQ ID NO: 2007362 - RNA, 15 nt, Human
cagggcuuuaaaauu

SEQ ID NO: 2007363 - RNA, 14 nt, Human
cagggagcagggaa

SEQ ID NO: 2007364 - RNA, 16 nt, Human
cagggagcagggaagg

SEQ ID NO: 2007365 - RNA, 18 nt, Human
cagggagcagggaaggcc

SEQ ID NO: 2007366 - RNA, 20 nt, Human
cagggagcagggaaggccug

SEQ ID NO: 2007367 - RNA, 21 nt, Human
cagggagcagggaaggccuga

SEQ ID NO: 2007368 - RNA, 23 nt, Human
caggcugggagagccuuccaggg

SEQ ID NO: 2007369 - RNA, 22 nt, Human
caggcugggagagccuuccagg

SEQ ID NO: 2007370 - RNA, 14 nt, Human
caggccaggccagc

SEQ ID NO: 2007371 - RNA, 12 nt, Human
caggccaggccc

SEQ ID NO: 2007372 - RNA, 11 nt, Human
caggccaggcc

SEQ ID NO: 2007373 - RNA, 23 nt, Human
caggaggcugggacgcucugcug

SEQ ID NO: 2007374 - RNA, 21 nt, Human
caggaggcugggacgcucugc

SEQ ID NO: 2007375 - RNA, 22 nt, Human
caggaggcugggacgcucugcu

SEQ ID NO: 2007376 - RNA, 14 nt, Human
caggcaaugcuggc

SEQ ID NO: 2007377 - RNA, 15 nt, Human
caggcaaugcuggcu

SEQ ID NO: 2007378 - RNA, 16 nt, Human
caggcaaugcuggcug

SEQ ID NO: 2007379 - RNA, 17 nt, Human
caggcaaugcuggcugu

SEQ ID NO: 2007380 - RNA, 19 nt, Human
caggaggaucacuugaguc

SEQ ID NO: 2007381 - RNA, 19 nt, Human
caggaggccagccuugacc

SEQ ID NO: 2007382 - RNA, 18 nt, Human
caggaggccagccuugac

SEQ ID NO: 2007383 - RNA, 22 nt, Human
caggaggccagccuugaccauu

SEQ ID NO: 2007384 - RNA, 17 nt, Human
caggaccagcccacgcu

SEQ ID NO: 2007385 - RNA, 21 nt, Human
caggaccagcccacgcugacu

SEQ ID NO: 2007386 - RNA, 19 nt, Human
caggaccaggguuggcacc

SEQ ID NO: 2007387 - RNA, 22 nt, Human
caggaccaggguuggcaccuuc

SEQ ID NO: 2007388 - RNA, 23 nt, Human
caggaccaggguuggcaccuucc

SEQ ID NO: 2007389 - RNA, 23 nt, Human
caggaccucaggugagaagcaga

SEQ ID NO: 2007390 - RNA, 16 nt, Human
caggaccucaggugag

SEQ ID NO: 2007391 - RNA, 13 nt, Human
caggaccagccca

SEQ ID NO: 2007392 - RNA, 14 nt, Human
caggaccagcccac

SEQ ID NO: 2007393 - RNA, 15 nt, Human
caggaccagcccacg

SEQ ID NO: 2007394 - RNA, 16 nt, Human
caggaccagcccacgc

SEQ ID NO: 2007395 - RNA, 22 nt, Human
auugagcugcuuuuuuugaaac

SEQ ID NO: 2007396 - RNA, 15 nt, Human
auugaggaaaaauau

SEQ ID NO: 2007397 - RNA, 17 nt, Human
auugaggaaaaauaugu

SEQ ID NO: 2007398 - RNA, 20 nt, Human
auugaggaaaaauaugugaa

SEQ ID NO: 2007399 - RNA, 21 nt, Human
auugaggaaaaauaugugaag

SEQ ID NO: 2007400 - RNA, 15 nt, Human
auucucuuauccaac

SEQ ID NO: 2007401 - RNA, 21 nt, Human
auucucuccauuucacuggcu

SEQ ID NO: 2007402 - RNA, 15 nt, Human
auucucuugccucag

SEQ ID NO: 2007403 - RNA, 17 nt, Human
auucucuugccucagcu

SEQ ID NO: 2007404 - RNA, 15 nt, Human
auucuuguuuugcuu

SEQ ID NO: 2007405 - RNA, 16 nt, Human
auucuuguuuugcuuc

SEQ ID NO: 2007406 - RNA, 15 nt, Human
auucuuuaaugauuc

SEQ ID NO: 2007407 - RNA, 19 nt, Human
auucuuuaaugauuccuau

SEQ ID NO: 2007408 - RNA, 15 nt, Human
auucuuuagagaaga

SEQ ID NO: 2007409 - RNA, 15 nt, Human
auucgggccccaccu

SEQ ID NO: 2007410 - RNA, 21 nt, Human
auucgcuacuaugauuuaauu

SEQ ID NO: 2007411 - RNA, 20 nt, Human
auuccuuuuuauuuauaugu

SEQ ID NO: 2007412 - RNA, 21 nt, Human
auuccuuuuuauuuauaugua

SEQ ID NO: 2007413 - RNA, 15 nt, Human
auuccuuuuuauuua

SEQ ID NO: 2007414 - RNA, 16 nt, Human
auuccuuuuuauuuau

SEQ ID NO: 2007415 - RNA, 18 nt, Human
auuccuuuuuauuuauau

SEQ ID NO: 2007416 - RNA, 15 nt, Human
auucauucuuuuuga

SEQ ID NO: 2007417 - RNA, 16 nt, Human
auucauucuuuuugaa

SEQ ID NO: 2007418 - RNA, 21 nt, Human
auucauucuuuuugaaauguc

SEQ ID NO: 2007419 - RNA, 14 nt, Human
auucucuuauccaa

SEQ ID NO: 2007420 - RNA, 12 nt, Human
auucucuuaucc

SEQ ID NO: 2007421 - RNA, 23 nt, Human
auucucuaguuugauuaaauucu

SEQ ID NO: 2007422 - RNA, 17 nt, Human
auucgggccccaccugc

SEQ ID NO: 2007423 - RNA, 16 nt, Human
auucguacauaauacu

SEQ ID NO: 2007424 - RNA, 18 nt, Human
auucguacauaauacuga

SEQ ID NO: 2007425 - RNA, 22 nt, Human
auucguacauaauacugaacca

SEQ ID NO: 2007426 - RNA, 23 nt, Human
auucguacauaauacugaaccac

SEQ ID NO: 2007427 - RNA, 20 nt, Human
auucucuaguuugauuaaau

SEQ ID NO: 2007428 - RNA, 16 nt, Human
auuagaggggaaaagc

SEQ ID NO: 2007429 - RNA, 23 nt, Human
auuaugugccagauuuaugcaua

SEQ ID NO: 2007430 - RNA, 21 nt, Human
auuaugugccagauuuaugca

SEQ ID NO: 2007431 - RNA, 13 nt, Human
auuaugugccaga

SEQ ID NO: 2007432 - RNA, 23 nt, Human
auucauauauuuuaugaaucaga

SEQ ID NO: 2007433 - RNA, 20 nt, Human
auucauauuacaauauuugu

SEQ ID NO: 2007434 - RNA, 15 nt, Human
auucauauuacaaua

SEQ ID NO: 2007435 - RNA, 17 nt, Human
auucauauuacaauauu

SEQ ID NO: 2007436 - RNA, 18 nt, Human
auucauauuacaauauuu

SEQ ID NO: 2007437 - RNA, 19 nt, Human
auucauauuacaauauuug

SEQ ID NO: 2007438 - RNA, 14 nt, Human
auucauauuacaau

SEQ ID NO: 2007439 - RNA, 13 nt, Human
auucauauuacaa

SEQ ID NO: 2007440 - RNA, 16 nt, Human
auucauaguagaacuu

SEQ ID NO: 2007441 - RNA, 17 nt, Human
auucauggccuggggga

SEQ ID NO: 2007442 - RNA, 14 nt, Human
auucauauuuacuu

SEQ ID NO: 2007443 - RNA, 14 nt, Human
auucauuaguuuug

SEQ ID NO: 2007444 - RNA, 15 nt, Human
auucauuaguuuuga

SEQ ID NO: 2007445 - RNA, 19 nt, Human
auuaacacuacucaaagca

SEQ ID NO: 2007446 - RNA, 21 nt, Human
auuaacacuacucaaagcaaa

SEQ ID NO: 2007447 - RNA, 21 nt, Human
auuaacaugaauauuuagugu

SEQ ID NO: 2007448 - RNA, 22 nt, Human
auuaaauuuuuuuguaugaaaa

SEQ ID NO: 2007449 - RNA, 23 nt, Human
auuaaauuuuuuuguaugaaaac

SEQ ID NO: 2007450 - RNA, 15 nt, Human
auuaaauuuuuuugu

SEQ ID NO: 2007451 - RNA, 16 nt, Human
auuaaauuuuuuugua

SEQ ID NO: 2007452 - RNA, 17 nt, Human
auuaaauuuuuuuguau

SEQ ID NO: 2007453 - RNA, 18 nt, Human
auuaaauuuuuuuguaug

SEQ ID NO: 2007454 - RNA, 19 nt, Human
auuaaauuuuuuuguauga

SEQ ID NO: 2007455 - RNA, 20 nt, Human
auuaaauuuuuuuguaugaa

SEQ ID NO: 2007456 - RNA, 21 nt, Human
auuaaauuuuuuuguaugaaa

SEQ ID NO: 2007457 - RNA, 13 nt, Human
auuacagguguga

SEQ ID NO: 2007458 - RNA, 17 nt, Human
auuacaggcuccugcca

SEQ ID NO: 2007459 - RNA, 19 nt, Human
auuacaggcuccugccacc

SEQ ID NO: 2007460 - RNA, 15 nt, Human
auuacaggcuccugc

SEQ ID NO: 2007461 - RNA, 16 nt, Human
auuacaggcuccugcc

SEQ ID NO: 2007462 - RNA, 22 nt, Human
auuacaagcgugagccacugca

SEQ ID NO: 2007463 - RNA, 14 nt, Human
auuacaauauuucu

SEQ ID NO: 2007464 - RNA, 13 nt, Human
auuacaauauuug

SEQ ID NO: 2007465 - RNA, 14 nt, Human
auuacaauauuugu

SEQ ID NO: 2007466 - RNA, 15 nt, Human
auuaauggaaauguu

SEQ ID NO: 2007467 - RNA, 12 nt, Human
auuaaugcuuug

SEQ ID NO: 2007468 - RNA, 13 nt, Human
auuaaugcuuugg

SEQ ID NO: 2007469 - RNA, 21 nt, Human
auuaauguauccaaugaaaua

SEQ ID NO: 2007470 - RNA, 11 nt, Human
auuaauugugu

SEQ ID NO: 2007471 - RNA, 14 nt, Human
auuaauugugugaa

SEQ ID NO: 2007472 - RNA, 16 nt, Human
auuaauugugugaacu

SEQ ID NO: 2007473 - RNA, 18 nt, Human
auuaauugugugaacuug

SEQ ID NO: 2007474 - RNA, 20 nt, Human
auuaauugugugaacuugga

SEQ ID NO: 2007475 - RNA, 21 nt, Human
auuaauugugugaacuuggaa

SEQ ID NO: 2007476 - RNA, 19 nt, Human
caaacaugagguucucucu

SEQ ID NO: 2007477 - RNA, 16 nt, Human
caaaccaucauugaaa

SEQ ID NO: 2007478 - RNA, 14 nt, Human
caaaccaucauuga

SEQ ID NO: 2007479 - RNA, 17 nt, Human
caaaccaucauugaaau

SEQ ID NO: 2007480 - RNA, 15 nt, Human
auuuuuaugugugau

SEQ ID NO: 2007481 - RNA, 15 nt, Human
auuuuuaucaggauu

SEQ ID NO: 2007482 - RNA, 22 nt, Human
auuuuguuuuugucuuaaaaag

SEQ ID NO: 2007483 - RNA, 16 nt, Human
auuuuuuucugaaauu

SEQ ID NO: 2007484 - RNA, 17 nt, Human
auuuuuuucugaaauuu

SEQ ID NO: 2007485 - RNA, 12 nt, Human
auuuuuuuccuu

SEQ ID NO: 2007486 - RNA, 15 nt, Human
auuuuuuuccuuaca

SEQ ID NO: 2007487 - RNA, 19 nt, Human
auuuuuuuccuuacauaaa

SEQ ID NO: 2007488 - RNA, 21 nt, Human
auuuuuuuccuuacauaaaca

SEQ ID NO: 2007489 - RNA, 15 nt, Human
auuuuuuucugaauu

SEQ ID NO: 2007490 - RNA, 22 nt, Human
auuuuuuuccuuacauaaacau

SEQ ID NO: 2007491 - RNA, 16 nt, Human
auuuuuauuaaauuau

SEQ ID NO: 2007492 - RNA, 13 nt, Human
auuuuuauuauua

SEQ ID NO: 2007493 - RNA, 17 nt, Human
auuuuuuuuaauuguau

SEQ ID NO: 2007494 - RNA, 18 nt, Human
auuuuuuuuaauuguauu

SEQ ID NO: 2007495 - RNA, 20 nt, Human
auuuuuuuuaauuguauuuu

SEQ ID NO: 2007496 - RNA, 22 nt, Human
auuuuuuuuaauuguauuuuug

SEQ ID NO: 2007497 - RNA, 22 nt, Human
auuuuuuuucaugcuuuaucaa

SEQ ID NO: 2007498 - RNA, 23 nt, Human
auuuuuuuucccauuuagaaugg

SEQ ID NO: 2007499 - RNA, 21 nt, Human
caaaagguauuuuaaucacca

SEQ ID NO: 2007500 - RNA, 19 nt, Human
caaaagcaucuaugugaga

SEQ ID NO: 2007501 - RNA, 13 nt, Human
caaaagcauguga

SEQ ID NO: 2007502 - RNA, 20 nt, Human
caaaagguuaauaaaguaau

SEQ ID NO: 2007503 - RNA, 14 nt, Human
auuuguguugaaga

SEQ ID NO: 2007504 - RNA, 15 nt, Human
auuuguguugaagag

SEQ ID NO: 2007505 - RNA, 21 nt, Human
auuuguguggagucauuucug

SEQ ID NO: 2007506 - RNA, 23 nt, Human
auuuguguggagucauuucugau

SEQ ID NO: 2007507 - RNA, 13 nt, Human
auuuguguguuac

SEQ ID NO: 2007508 - RNA, 17 nt, Human
auuuguguguuacaaug

SEQ ID NO: 2007509 - RNA, 20 nt, Human
auuugugugcuaaacgugua

SEQ ID NO: 2007510 - RNA, 20 nt, Human
auuuguguggagucauuucu

SEQ ID NO: 2007511 - RNA, 18 nt, Human
auuuguguugaagagguu

SEQ ID NO: 2007512 - RNA, 22 nt, Human
auuuguguugaagagguuuuaa

SEQ ID NO: 2007513 - RNA, 22 nt, Human
auuuguguguucacuaaacucu

SEQ ID NO: 2007514 - RNA, 18 nt, Human
auuuguguguucacuaaa

SEQ ID NO: 2007515 - RNA, 14 nt, Human
auuuguuauaauga

SEQ ID NO: 2007516 - RNA, 19 nt, Human
auuuguucuauagcuuuuc

SEQ ID NO: 2007517 - RNA, 20 nt, Human
auuuuaguggacccugaaau

SEQ ID NO: 2007518 - RNA, 21 nt, Human
auuuuaguggacccugaaaug

SEQ ID NO: 2007519 - RNA, 22 nt, Human
auuuuaguggacccugaaaugu

SEQ ID NO: 2007520 - RNA, 23 nt, Human
auuuuaguggacccugaaaugug

SEQ ID NO: 2007521 - RNA, 15 nt, Human
auuuugaaaaacugc

SEQ ID NO: 2007522 - RNA, 13 nt, Human
auuuugaaaaacu

SEQ ID NO: 2007523 - RNA, 14 nt, Human
auuuucucuuagaa

SEQ ID NO: 2007524 - RNA, 16 nt, Human
auuuucucuuagaaaa

SEQ ID NO: 2007525 - RNA, 13 nt, Human
auuuucucuuaga

SEQ ID NO: 2007526 - RNA, 22 nt, Human
auuuuaguuuugugcuuaguua

SEQ ID NO: 2007527 - RNA, 17 nt, Human
auuuucucugauacuuu

SEQ ID NO: 2007528 - RNA, 18 nt, Human
auuuucucugauacuuuu

SEQ ID NO: 2007529 - RNA, 19 nt, Human
auuuucucugauacuuuuu

SEQ ID NO: 2007530 - RNA, 17 nt, Human
auuuucuauaauuuaaa

SEQ ID NO: 2007531 - RNA, 18 nt, Human
auuuucuauaauuuaaau

SEQ ID NO: 2007532 - RNA, 22 nt, Human
auuuuaguuuuauuuucuaaag

SEQ ID NO: 2007533 - RNA, 14 nt, Human
auuuuaguuuuauu

SEQ ID NO: 2007534 - RNA, 20 nt, Human
auuuuaguuuuauuuucuaa

SEQ ID NO: 2007535 - RNA, 21 nt, Human
auuuuaguuuuauuuucuaaa

SEQ ID NO: 2007536 - RNA, 19 nt, Human
auuuucuauaauuuaaaua

SEQ ID NO: 2007537 - RNA, 14 nt, Human
auuuugaaaaguaa

SEQ ID NO: 2007538 - RNA, 16 nt, Human
auuuugaaaaguaaua

SEQ ID NO: 2007539 - RNA, 17 nt, Human
auuuugaaaaguaauau

SEQ ID NO: 2007540 - RNA, 21 nt, Human
auuuugaaaaguaauauuuau

SEQ ID NO: 2007541 - RNA, 12 nt, Human
auuuugaaaagu

SEQ ID NO: 2007542 - RNA, 13 nt, Human
auuucacaaauau

SEQ ID NO: 2007543 - RNA, 10 nt, Human
auuucacaag

SEQ ID NO: 2007544 - RNA, 15 nt, Human
auuucacaagcuauu

SEQ ID NO: 2007545 - RNA, 17 nt, Human
auuucacaguguguggu

SEQ ID NO: 2007546 - RNA, 14 nt, Human
auuucacaaauauu

SEQ ID NO: 2007547 - RNA, 15 nt, Human
auuucacaaauauua

SEQ ID NO: 2007548 - RNA, 18 nt, Human
auuucacaaauauuaaaa

SEQ ID NO: 2007549 - RNA, 20 nt, Human
auuucacaaauauuaaaaag

SEQ ID NO: 2007550 - RNA, 23 nt, Human
auuucacaaauauuaaaaagucu

SEQ ID NO: 2007551 - RNA, 14 nt, Human
auuucacucuccuu

SEQ ID NO: 2007552 - RNA, 16 nt, Human
auuucagcagcugcag

SEQ ID NO: 2007553 - RNA, 18 nt, Human
auuucacgucauaggaag

SEQ ID NO: 2007554 - RNA, 19 nt, Human
auuucacgucauaggaagu

SEQ ID NO: 2007555 - RNA, 12 nt, Human
auuucacucucc

SEQ ID NO: 2007556 - RNA, 18 nt, Human
auuuaauuugaaauaugg

SEQ ID NO: 2007557 - RNA, 13 nt, Human
auuuaauuugaag

SEQ ID NO: 2007558 - RNA, 15 nt, Human
auuuaauuugaaggu

SEQ ID NO: 2007559 - RNA, 22 nt, Human
auuuaauuugaagguagaaugu

SEQ ID NO: 2007560 - RNA, 22 nt, Human
auuuaauagguuuggacaaaau

SEQ ID NO: 2007561 - RNA, 12 nt, Human
auuuaaguuuug

SEQ ID NO: 2007562 - RNA, 20 nt, Human
auuuaaguuuugacaagcug

SEQ ID NO: 2007563 - RNA, 20 nt, Human
auuuaaggucuguuugcugu

SEQ ID NO: 2007564 - RNA, 22 nt, Human
auuuaaggucuguuugcuguug

SEQ ID NO: 2007565 - RNA, 15 nt, Human
auuuaagccuaaaga

SEQ ID NO: 2007566 - RNA, 16 nt, Human
auuuaagccuaaagau

SEQ ID NO: 2007567 - RNA, 17 nt, Human
auuuaagccuaaagauu

SEQ ID NO: 2007568 - RNA, 22 nt, Human
auuuaagccuaaagauuuugau

SEQ ID NO: 2007569 - RNA, 13 nt, Human
auuucucuuugaa

SEQ ID NO: 2007570 - RNA, 16 nt, Human
auuucucuuugaaaca

SEQ ID NO: 2007571 - RNA, 20 nt, Human
auuucuguuuagauaauaca

SEQ ID NO: 2007572 - RNA, 19 nt, Human
auuucuguuuagauaauac

SEQ ID NO: 2007573 - RNA, 19 nt, Human
auuucaguaaaccugucug

SEQ ID NO: 2007574 - RNA, 20 nt, Human
auuucaguaaaccugucuga

SEQ ID NO: 2007575 - RNA, 21 nt, Human
auuucaguaagaucaagcucc

SEQ ID NO: 2007576 - RNA, 12 nt, Human
auuucuccuuuu

SEQ ID NO: 2007577 - RNA, 17 nt, Human
auuucuccuuuuguguu

SEQ ID NO: 2007578 - RNA, 20 nt, Human
auuucuccuuuuguguucca

SEQ ID NO: 2007579 - RNA, 15 nt, Human
auuucucuguuccau

SEQ ID NO: 2007580 - RNA, 23 nt, Human
auuucucuguuccauaguuaaag

SEQ ID NO: 2007581 - RNA, 15 nt, Human
auuucucuuaaguac

SEQ ID NO: 2007582 - RNA, 21 nt, Human
auuucuguuuagauaauacac

SEQ ID NO: 2007583 - RNA, 18 nt, Human
auuugcacaaaaagauac

SEQ ID NO: 2007584 - RNA, 17 nt, Human
caagaaggaugauucaa

SEQ ID NO: 2007585 - RNA, 18 nt, Human
caagaagcccaggaaagg

SEQ ID NO: 2007586 - RNA, 18 nt, Human
caagaauagaugcugacu

SEQ ID NO: 2007587 - RNA, 19 nt, Human
caagaauagcauuguaaaa

SEQ ID NO: 2007588 - RNA, 13 nt, Human
caagaaugaaggu

SEQ ID NO: 2007589 - RNA, 21 nt, Human
caagaaugaagguuuuuguaa

SEQ ID NO: 2007590 - RNA, 15 nt, Human
caagaagcccaggaa

SEQ ID NO: 2007591 - RNA, 21 nt, Human
caacucccugccccccagccc

SEQ ID NO: 2007592 - RNA, 19 nt, Human
caacucccugccccccagc

SEQ ID NO: 2007593 - RNA, 20 nt, Human
caacucccugccccccagcc

SEQ ID NO: 2007594 - RNA, 14 nt, Human
caacuauggccugu

SEQ ID NO: 2007595 - RNA, 14 nt, Human
caacccccagccug

SEQ ID NO: 2007596 - RNA, 13 nt, Human
caacuauggccug

SEQ ID NO: 2007597 - RNA, 17 nt, Human
caaccccuucgcuccug

SEQ ID NO: 2007598 - RNA, 14 nt, Human
caaccccuucgcuc

SEQ ID NO: 2007599 - RNA, 16 nt, Human
caaccccuucgcuccu

SEQ ID NO: 2007600 - RNA, 14 nt, Human
caagcaccuccugc

SEQ ID NO: 2007601 - RNA, 18 nt, Human
caagcaccuagccucgcu

SEQ ID NO: 2007602 - RNA, 13 nt, Human
caagcaccauccc

SEQ ID NO: 2007603 - RNA, 17 nt, Human
caagcaccauccccucc

SEQ ID NO: 2007604 - RNA, 13 nt, Human
caagcacagucag

SEQ ID NO: 2007605 - RNA, 14 nt, Human
caagcacagucagg

SEQ ID NO: 2007606 - RNA, 13 nt, Human
caagcaccuccug

SEQ ID NO: 2007607 - RNA, 15 nt, Human
caagaccaaauggaa

SEQ ID NO: 2007608 - RNA, 16 nt, Human
caagaucaaaaaggcu

SEQ ID NO: 2007609 - RNA, 17 nt, Human
caagaucaaaaaggcuu

SEQ ID NO: 2007610 - RNA, 21 nt, Human
caagaucaaaaaggcuuauaa

SEQ ID NO: 2007611 - RNA, 14 nt, Human
caagaccacguuuc

SEQ ID NO: 2007612 - RNA, 16 nt, Human
caagaccacguuucua

SEQ ID NO: 2007613 - RNA, 18 nt, Human
caagcaagaaacacuggg

SEQ ID NO: 2007614 - RNA, 13 nt, Human
caagcaagaaaca

SEQ ID NO: 2007615 - RNA, 19 nt, Human
caagcaaaugugaaucauu

SEQ ID NO: 2007616 - RNA, 17 nt, Human
caagcaaaugugaauca

SEQ ID NO: 2007617 - RNA, 15 nt, Human
caagcaaaugugaau

SEQ ID NO: 2007618 - RNA, 15 nt, Human
caaguauuuaagccu

SEQ ID NO: 2007619 - RNA, 22 nt, Human
caaguauuuaagccuaaagauu

SEQ ID NO: 2007620 - RNA, 20 nt, Human
caaguuauuuuuaauuuggu

SEQ ID NO: 2007621 - RNA, 22 nt, Human
caaguucacaccugcagauucu

SEQ ID NO: 2007622 - RNA, 23 nt, Human
caaguucacaccugcagauucua

SEQ ID NO: 2007623 - RNA, 15 nt, Human
caaggcccccugccu

SEQ ID NO: 2007624 - RNA, 17 nt, Human
caaguauuauaccuuuu

SEQ ID NO: 2007625 - RNA, 22 nt, Human
caaguauuauaccuuuuuuaga

SEQ ID NO: 2007626 - RNA, 13 nt, Human
caaguauuauacc

SEQ ID NO: 2007627 - RNA, 14 nt, Human
caaggcaaggcugu

SEQ ID NO: 2007628 - RNA, 15 nt, Human
caaggcaaaaacaaa

SEQ ID NO: 2007629 - RNA, 19 nt, Human
caaggauugcuacuguccu

SEQ ID NO: 2007630 - RNA, 20 nt, Human
caaggauugcuacuguccua

SEQ ID NO: 2007631 - RNA, 14 nt, Human
caaggcaaaaacaa

SEQ ID NO: 2007632 - RNA, 18 nt, Human
caagcuccaagcucccag

SEQ ID NO: 2007633 - RNA, 17 nt, Human
caagcuccaagcuccca

SEQ ID NO: 2007634 - RNA, 21 nt, Human
caagcuccaagcucccaggca

SEQ ID NO: 2007635 - RNA, 19 nt, Human
caagcuccaagcucccagg

SEQ ID NO: 2007636 - RNA, 21 nt, Human
caagcuccaucuccacuccag

SEQ ID NO: 2007637 - RNA, 17 nt, Human
caagcuccaucuccacu

SEQ ID NO: 2007638 - RNA, 17 nt, Human
caagcucccaggcauuc

SEQ ID NO: 2007639 - RNA, 15 nt, Human
caagcucccaggcau

SEQ ID NO: 2007640 - RNA, 14 nt, Human
caagcucccaggca

SEQ ID NO: 2007641 - RNA, 12 nt, Human
caagcucccagg

SEQ ID NO: 2007642 - RNA, 15 nt, Human
caagcucugcuccuc

SEQ ID NO: 2007643 - RNA, 16 nt, Human
caagcucugcuccucu

SEQ ID NO: 2007644 - RNA, 23 nt, Human
caauauuugugugcuaaacgugu

SEQ ID NO: 2007645 - RNA, 19 nt, Human
caauauuugugugcuaaac

SEQ ID NO: 2007646 - RNA, 22 nt, Human
caauauuugugugcuaaacgug

SEQ ID NO: 2007647 - RNA, 16 nt, Human
caaugcuggagaaaaa

SEQ ID NO: 2007648 - RNA, 12 nt, Human
caaugcuggcug

SEQ ID NO: 2007649 - RNA, 13 nt, Human
caauggcagccuu

SEQ ID NO: 2007650 - RNA, 14 nt, Human
caauggcagccuug

SEQ ID NO: 2007651 - RNA, 15 nt, Human
caauggcagccuugg

SEQ ID NO: 2007652 - RNA, 14 nt, Human
caaucaaaucugcu

SEQ ID NO: 2007653 - RNA, 21 nt, Human
caaucaauaacagccgcucca

SEQ ID NO: 2007654 - RNA, 20 nt, Human
caaugccucuugucuuccua

SEQ ID NO: 2007655 - RNA, 16 nt, Human
caaugccucuugucuu

SEQ ID NO: 2007656 - RNA, 15 nt, Human
cacaaggaagaaauu

SEQ ID NO: 2007657 - RNA, 13 nt, Human
caauuuauuaugg

SEQ ID NO: 2007658 - RNA, 20 nt, Human
caauuuauuauggcacauca

SEQ ID NO: 2007659 - RNA, 19 nt, Human
caauuucaauuuugucugu

SEQ ID NO: 2007660 - RNA, 14 nt, Human
cacaaggaagaaau

SEQ ID NO: 2007661 - RNA, 23 nt, Human
cacaucuugcucugcugacagac

SEQ ID NO: 2007662 - RNA, 15 nt, Human
cacaucuuuuucacu

SEQ ID NO: 2007663 - RNA, 17 nt, Human
cacauuuauucugcuca

SEQ ID NO: 2007664 - RNA, 18 nt, Human
cacauuuauucugcucac

SEQ ID NO: 2007665 - RNA, 17 nt, Human
caccagccccagugccc

SEQ ID NO: 2007666 - RNA, 19 nt, Human
caccagcccuuagcaggga

SEQ ID NO: 2007667 - RNA, 18 nt, Human
caccagccccagugccca

SEQ ID NO: 2007668 - RNA, 21 nt, Human
caccagccccagugcccacag

SEQ ID NO: 2007669 - RNA, 22 nt, Human
caccagccccagugcccacagg

SEQ ID NO: 2007670 - RNA, 16 nt, Human
cacauuucacugucug

SEQ ID NO: 2007671 - RNA, 17 nt, Human
cacauuucacugucugu

SEQ ID NO: 2007672 - RNA, 12 nt, Human
cacccagcccac

SEQ ID NO: 2007673 - RNA, 11 nt, Human
cacccagggaa

SEQ ID NO: 2007674 - RNA, 21 nt, Human
cacccagggaacuaggaaggc

SEQ ID NO: 2007675 - RNA, 11 nt, Human
cacccagaaac

SEQ ID NO: 2007676 - RNA, 18 nt, Human
cacccaugaaagaaaacu

SEQ ID NO: 2007677 - RNA, 13 nt, Human
cacaucuugcucu

SEQ ID NO: 2007678 - RNA, 14 nt, Human
cacaucuugcucug

SEQ ID NO: 2007679 - RNA, 19 nt, Human
cacaucaucuguaagcugu

SEQ ID NO: 2007680 - RNA, 18 nt, Human
cacauccacagucucccc

SEQ ID NO: 2007681 - RNA, 13 nt, Human
cacaucccacccc

SEQ ID NO: 2007682 - RNA, 21 nt, Human
cacaucccaccccauccucca

SEQ ID NO: 2007683 - RNA, 15 nt, Human
cacaucuugcucugc

SEQ ID NO: 2007684 - RNA, 20 nt, Human
cacaucuugcucugcugaca

SEQ ID NO: 2007685 - RNA, 21 nt, Human
cacaucuugcucugcugacag

SEQ ID NO: 2007686 - RNA, 22 nt, Human
cacaucuugcucugcugacaga

SEQ ID NO: 2007687 - RNA, 14 nt, Human
cacaucaucuguaa

SEQ ID NO: 2007688 - RNA, 15 nt, Human
cacaucaucuguaag

SEQ ID NO: 2007689 - RNA, 20 nt, Human
caccugcggugcuaucuccc

SEQ ID NO: 2007690 - RNA, 15 nt, Human
caccugcgcuucacu

SEQ ID NO: 2007691 - RNA, 19 nt, Human
caccugcggugcuaucucc

SEQ ID NO: 2007692 - RNA, 17 nt, Human
caccugcggugcuaucu

SEQ ID NO: 2007693 - RNA, 16 nt, Human
caccugcggugcuauc

SEQ ID NO: 2007694 - RNA, 17 nt, Human
cacccuggggagaaagu

SEQ ID NO: 2007695 - RNA, 12 nt, Human
caccugccaggg

SEQ ID NO: 2007696 - RNA, 11 nt, Human
caccugccagg

SEQ ID NO: 2007697 - RNA, 21 nt, Human
caccugccccucaacucuccu

SEQ ID NO: 2007698 - RNA, 18 nt, Human
caccugccccucaacucu

SEQ ID NO: 2007699 - RNA, 12 nt, Human
cacccuccuuuc

SEQ ID NO: 2007700 - RNA, 23 nt, Human
cacccuccuucccacucuucuca

SEQ ID NO: 2007701 - RNA, 12 nt, Human
cacccuccuucc

SEQ ID NO: 2007702 - RNA, 13 nt, Human
cacccuccuuccc

SEQ ID NO: 2007703 - RNA, 14 nt, Human
cacccuccuuccca

SEQ ID NO: 2007704 - RNA, 20 nt, Human
cacccuccuucccacucuuc

SEQ ID NO: 2007705 - RNA, 22 nt, Human
cacccuccuucccacucuucuc

SEQ ID NO: 2007706 - RNA, 18 nt, Human
cacccugcuuggcccagg

SEQ ID NO: 2007707 - RNA, 16 nt, Human
cacccugcuuggccca

SEQ ID NO: 2007708 - RNA, 17 nt, Human
cacccugcuuggcccag

SEQ ID NO: 2007709 - RNA, 12 nt, Human
cacccugcucuc

SEQ ID NO: 2007710 - RNA, 16 nt, Human
cacccugcugagucug

SEQ ID NO: 2007711 - RNA, 16 nt, Human
cacuccagugagacag

SEQ ID NO: 2007712 - RNA, 21 nt, Human
cacuccagugagacagcucug

SEQ ID NO: 2007713 - RNA, 17 nt, Human
cacuccagaccccuggc

SEQ ID NO: 2007714 - RNA, 14 nt, Human
cacugaagaguaug

SEQ ID NO: 2007715 - RNA, 17 nt, Human
cacugaagucaguucuc

SEQ ID NO: 2007716 - RNA, 21 nt, Human
cacgcuggagugcagugagcc

SEQ ID NO: 2007717 - RNA, 14 nt, Human
cacgcuggggaaga

SEQ ID NO: 2007718 - RNA, 19 nt, Human
cacgcuggggaagaauuua

SEQ ID NO: 2007719 - RNA, 16 nt, Human
cacgcuggagugcagu

SEQ ID NO: 2007720 - RNA, 17 nt, Human
cacgcuggagugcagug

SEQ ID NO: 2007721 - RNA, 18 nt, Human
cacgcuggagugcaguga

SEQ ID NO: 2007722 - RNA, 20 nt, Human
cacgcuggagugcagugagc

SEQ ID NO: 2007723 - RNA, 15 nt, Human
cacgcuggagugcag

SEQ ID NO: 2007724 - RNA, 15 nt, Human
cacuacauucuguua

SEQ ID NO: 2007725 - RNA, 16 nt, Human
cacuagacccacugga

SEQ ID NO: 2007726 - RNA, 14 nt, Human
cacuccagaccccu

SEQ ID NO: 2007727 - RNA, 16 nt, Human
cacuccagaccccugg

SEQ ID NO: 2007728 - RNA, 13 nt, Human
cacuacauucugu

SEQ ID NO: 2007729 - RNA, 14 nt, Human
cacuacauucuguu

SEQ ID NO: 2007730 - RNA, 22 nt, Human
cacggaagagccuugcggaagg

SEQ ID NO: 2007731 - RNA, 16 nt, Human
cacggaagagccuugc

SEQ ID NO: 2007732 - RNA, 23 nt, Human
gcccuaaugcgcaggcuggcccu

SEQ ID NO: 2007733 - RNA, 15 nt, Human
gcccuaaaagcacac

SEQ ID NO: 2007734 - RNA, 22 nt, Human
gcccuaaaguguauuuuuuuac

SEQ ID NO: 2007735 - RNA, 15 nt, Human
gccccugccccugcc

SEQ ID NO: 2007736 - RNA, 22 nt, Human
gccccuggaugcagccucacag

SEQ ID NO: 2007737 - RNA, 18 nt, Human
gccccuggaugcagccuc

SEQ ID NO: 2007738 - RNA, 16 nt, Human
gccccuggaugcagcc

SEQ ID NO: 2007739 - RNA, 15 nt, Human
gccccugcccggcug

SEQ ID NO: 2007740 - RNA, 13 nt, Human
gccccugcccggc

SEQ ID NO: 2007741 - RNA, 14 nt, Human
gccccugcccggcu

SEQ ID NO: 2007742 - RNA, 14 nt, Human
gcccccucugcccu

SEQ ID NO: 2007743 - RNA, 19 nt, Human
gccccaaaacucuccucug

SEQ ID NO: 2007744 - RNA, 18 nt, Human
gccccaaaacucuccucu

SEQ ID NO: 2007745 - RNA, 19 nt, Human
gcccauuugggcagagagg

SEQ ID NO: 2007746 - RNA, 20 nt, Human
gcccauuugggcagagaggc

SEQ ID NO: 2007747 - RNA, 19 nt, Human
gcccauguggagucagccu

SEQ ID NO: 2007748 - RNA, 16 nt, Human
gcccauuuggagggcc

SEQ ID NO: 2007749 - RNA, 17 nt, Human
gcccauuuggagggccu

SEQ ID NO: 2007750 - RNA, 18 nt, Human
gcccauuuggagggccug

SEQ ID NO: 2007751 - RNA, 20 nt, Human
gcccauuuggagggccuggg

SEQ ID NO: 2007752 - RNA, 15 nt, Human
gcccauuugggcaga

SEQ ID NO: 2007753 - RNA, 18 nt, Human
gcccauuugggcagagag

SEQ ID NO: 2007754 - RNA, 15 nt, Human
gcccauguauggcca

SEQ ID NO: 2007755 - RNA, 16 nt, Human
gcccauguauggccag

SEQ ID NO: 2007756 - RNA, 17 nt, Human
gcccauguauggccagg

SEQ ID NO: 2007757 - RNA, 18 nt, Human
gcccauguauggccagga

SEQ ID NO: 2007758 - RNA, 20 nt, Human
gcccauguauggccaggaag

SEQ ID NO: 2007759 - RNA, 21 nt, Human
gcccauguauggccaggaagu

SEQ ID NO: 2007760 - RNA, 19 nt, Human
gcccacuccugcucugcuc

SEQ ID NO: 2007761 - RNA, 13 nt, Human
gcccacucccugc

SEQ ID NO: 2007762 - RNA, 23 nt, Human
gcccacuagacccacuggacuca

SEQ ID NO: 2007763 - RNA, 17 nt, Human
gcccacuagacccacug

SEQ ID NO: 2007764 - RNA, 22 nt, Human
gcccacgcugacuacagggccg

SEQ ID NO: 2007765 - RNA, 18 nt, Human
gcccacgcugacuacagg

SEQ ID NO: 2007766 - RNA, 19 nt, Human
gcccacgcugacuacaggg

SEQ ID NO: 2007767 - RNA, 15 nt, Human
gcccacucccugcaa

SEQ ID NO: 2007768 - RNA, 14 nt, Human
gcccacucccugca

SEQ ID NO: 2007769 - RNA, 19 nt, Human
gcccacucccugcaaccug

SEQ ID NO: 2007770 - RNA, 17 nt, Human
gcccacuccugcucugc

SEQ ID NO: 2007771 - RNA, 18 nt, Human
gcccacuccugcucugcu

SEQ ID NO: 2007772 - RNA, 13 nt, Human
gcccacuccugcu

SEQ ID NO: 2007773 - RNA, 15 nt, Human
gcccacuccugcucu

SEQ ID NO: 2007774 - RNA, 16 nt, Human
gcccacuccugcucug

SEQ ID NO: 2007775 - RNA, 22 nt, Human
gcccugccuccuuugugaggaa

SEQ ID NO: 2007776 - RNA, 16 nt, Human
gcccugccuccuuugu

SEQ ID NO: 2007777 - RNA, 16 nt, Human
gcccugcugaguccca

SEQ ID NO: 2007778 - RNA, 13 nt, Human
gcccugccucucc

SEQ ID NO: 2007779 - RNA, 15 nt, Human
gcccugccucuccgc

SEQ ID NO: 2007780 - RNA, 17 nt, Human
gcccugccucuccgccc

SEQ ID NO: 2007781 - RNA, 18 nt, Human
gcccugccucuccgcccc

SEQ ID NO: 2007782 - RNA, 21 nt, Human
gcccugccucuccgccccuga

SEQ ID NO: 2007783 - RNA, 23 nt, Human
gcccugcugagucccaggcugag

SEQ ID NO: 2007784 - RNA, 21 nt, Human
gcccugcugagucccaggcug

SEQ ID NO: 2007785 - RNA, 22 nt, Human
gcccugcugagucccaggcuga

SEQ ID NO: 2007786 - RNA, 17 nt, Human
gccgcgucgcccuccca

SEQ ID NO: 2007787 - RNA, 15 nt, Human
gccgccuucacagca

SEQ ID NO: 2007788 - RNA, 15 nt, Human
gccgccaugcuccug

SEQ ID NO: 2007789 - RNA, 20 nt, Human
gcccuuaccugccaggaagc

SEQ ID NO: 2007790 - RNA, 16 nt, Human
gcccuuaccugccagg

SEQ ID NO: 2007791 - RNA, 14 nt, Human
gccgcccaaggccc

SEQ ID NO: 2007792 - RNA, 16 nt, Human
gccgccaugcuccugg

SEQ ID NO: 2007793 - RNA, 17 nt, Human
gccuggccccucagggu

SEQ ID NO: 2007794 - RNA, 16 nt, Human
gccuggccccucaggg

SEQ ID NO: 2007795 - RNA, 15 nt, Human
gccuggccccucagg

SEQ ID NO: 2007796 - RNA, 10 nt, Human
gccuggccug

SEQ ID NO: 2007797 - RNA, 22 nt, Human
gccuggccccucagggucccug

SEQ ID NO: 2007798 - RNA, 20 nt, Human
gccuggccccucaggguccc

SEQ ID NO: 2007799 - RNA, 18 nt, Human
gccugggaucccucaucc

SEQ ID NO: 2007800 - RNA, 21 nt, Human
gccugggaucccucauccuca

SEQ ID NO: 2007801 - RNA, 17 nt, Human
gccugggauaggggcag

SEQ ID NO: 2007802 - RNA, 14 nt, Human
gccugggaucccuc

SEQ ID NO: 2007803 - RNA, 22 nt, Human
gccugggaggucaaggcugcag

SEQ ID NO: 2007804 - RNA, 21 nt, Human
gccugggaggucaaggcugca

SEQ ID NO: 2007805 - RNA, 21 nt, Human
gccugcgccaccgcccagaga

SEQ ID NO: 2007806 - RNA, 20 nt, Human
gccugccuuuggcacucuga

SEQ ID NO: 2007807 - RNA, 22 nt, Human
gccugccuugcccacuccugcu

SEQ ID NO: 2007808 - RNA, 20 nt, Human
gccugccuuaagugaggaaa

SEQ ID NO: 2007809 - RNA, 21 nt, Human
gccugccuuaagugaggaaau

SEQ ID NO: 2007810 - RNA, 16 nt, Human
gccugccucuucucua

SEQ ID NO: 2007811 - RNA, 17 nt, Human
gccugccuguucccauu

SEQ ID NO: 2007812 - RNA, 16 nt, Human
gccuacccacccccag

SEQ ID NO: 2007813 - RNA, 17 nt, Human
gccuacccacccccagg

SEQ ID NO: 2007814 - RNA, 19 nt, Human
gccuacaugcuuugugaac

SEQ ID NO: 2007815 - RNA, 23 nt, Human
gccuacuccugucuucugcuuug

SEQ ID NO: 2007816 - RNA, 13 nt, Human
gccuacuccuguc

SEQ ID NO: 2007817 - RNA, 15 nt, Human
gccuacuccugucuu

SEQ ID NO: 2007818 - RNA, 16 nt, Human
gccuacuccugucuuc

SEQ ID NO: 2007819 - RNA, 22 nt, Human
gccuacuccugucuucugcuuu

SEQ ID NO: 2007820 - RNA, 13 nt, Human
gccuccuccagcc

SEQ ID NO: 2007821 - RNA, 18 nt, Human
gccuccugcccuuaccug

SEQ ID NO: 2007822 - RNA, 12 nt, Human
gccucugggacu

SEQ ID NO: 2007823 - RNA, 19 nt, Human
gccucuggcucuacacaua

SEQ ID NO: 2007824 - RNA, 13 nt, Human
gccuccugugugu

SEQ ID NO: 2007825 - RNA, 14 nt, Human
gccuccuguggccu

SEQ ID NO: 2007826 - RNA, 18 nt, Human
gccuccuguggccugcca

SEQ ID NO: 2007827 - RNA, 20 nt, Human
gccuccuguggccugccagu

SEQ ID NO: 2007828 - RNA, 23 nt, Human
gccucuucucuacucuagggaaa

SEQ ID NO: 2007829 - RNA, 12 nt, Human
gccucuucucua

SEQ ID NO: 2007830 - RNA, 15 nt, Human
gccucuucugagcuu

SEQ ID NO: 2007831 - RNA, 22 nt, Human
gccucuuccucccucauuccac

SEQ ID NO: 2007832 - RNA, 12 nt, Human
gccucuuccucc

SEQ ID NO: 2007833 - RNA, 17 nt, Human
gccugcccaggccccug

SEQ ID NO: 2007834 - RNA, 18 nt, Human
gccugcccaggccccugc

SEQ ID NO: 2007835 - RNA, 19 nt, Human
gccugcccaggccccugcc

SEQ ID NO: 2007836 - RNA, 20 nt, Human
gccugcccaggccccugcca

SEQ ID NO: 2007837 - RNA, 23 nt, Human
gccaggccacaagacccuugugg

SEQ ID NO: 2007838 - RNA, 12 nt, Human
gccaggccagag

SEQ ID NO: 2007839 - RNA, 20 nt, Human
gccaggcccucugcccacuc

SEQ ID NO: 2007840 - RNA, 19 nt, Human
gccaggcccucugcccacu

SEQ ID NO: 2007841 - RNA, 21 nt, Human
gccaggcccucugcccacucc

SEQ ID NO: 2007842 - RNA, 17 nt, Human
gccaggcccucugccca

SEQ ID NO: 2007843 - RNA, 16 nt, Human
gccaggcccucugccc

SEQ ID NO: 2007844 - RNA, 13 nt, Human
gccaggccagagg

SEQ ID NO: 2007845 - RNA, 19 nt, Human
gccaggccacuggccccug

SEQ ID NO: 2007846 - RNA, 15 nt, Human
gccaggcccucugcc

SEQ ID NO: 2007847 - RNA, 17 nt, Human
gccagacccccuggaga

SEQ ID NO: 2007848 - RNA, 20 nt, Human
gccagcaaaacuuagaugug

SEQ ID NO: 2007849 - RNA, 22 nt, Human
gccagacgcucauucagcaucu

SEQ ID NO: 2007850 - RNA, 16 nt, Human
gccagaacucuguguc

SEQ ID NO: 2007851 - RNA, 16 nt, Human
gccagaaguagcuuug

SEQ ID NO: 2007852 - RNA, 22 nt, Human
gccagacaucaacagauaaaua

SEQ ID NO: 2007853 - RNA, 15 nt, Human
gccagaauuucaaac

SEQ ID NO: 2007854 - RNA, 18 nt, Human
gccagaaguagcuuugca

SEQ ID NO: 2007855 - RNA, 23 nt, Human
gccagcaggcucucaggccagcu

SEQ ID NO: 2007856 - RNA, 21 nt, Human
gccagcaggcucucaggccag

SEQ ID NO: 2007857 - RNA, 19 nt, Human
gccagccaaacacacagaa

SEQ ID NO: 2007858 - RNA, 20 nt, Human
gccagccaaacacacagaag

SEQ ID NO: 2007859 - RNA, 21 nt, Human
gccagccaaacacacagaagg

SEQ ID NO: 2007860 - RNA, 22 nt, Human
gccagccaaacacacagaaggg

SEQ ID NO: 2007861 - RNA, 20 nt, Human
gccagcaggcucucaggcca

SEQ ID NO: 2007862 - RNA, 19 nt, Human
gccagcaggcucucaggcc

SEQ ID NO: 2007863 - RNA, 18 nt, Human
gccagcaggcucucaggc

SEQ ID NO: 2007864 - RNA, 17 nt, Human
gccagcaggcucucagg

SEQ ID NO: 2007865 - RNA, 16 nt, Human
gccagcaggcucucag

SEQ ID NO: 2007866 - RNA, 13 nt, Human
gccagcaggcucu

SEQ ID NO: 2007867 - RNA, 19 nt, Human
gccauauucuguuggccag

SEQ ID NO: 2007868 - RNA, 20 nt, Human
gccauauucuguuggccagu

SEQ ID NO: 2007869 - RNA, 15 nt, Human
gccauguuggccagg

SEQ ID NO: 2007870 - RNA, 16 nt, Human
gccauguuggccaggc

SEQ ID NO: 2007871 - RNA, 17 nt, Human
gccauguuggccaggcu

SEQ ID NO: 2007872 - RNA, 18 nt, Human
gccauguuggccaggcug

SEQ ID NO: 2007873 - RNA, 14 nt, Human
gccauguuggccag

SEQ ID NO: 2007874 - RNA, 14 nt, Human
gcccacgcccccac

SEQ ID NO: 2007875 - RNA, 13 nt, Human
gcccacgccccca

SEQ ID NO: 2007876 - RNA, 18 nt, Human
gcccaccuuggcucaagu

SEQ ID NO: 2007877 - RNA, 15 nt, Human
gcccacgcuggagug

SEQ ID NO: 2007878 - RNA, 15 nt, Human
gcccacgcugacuac

SEQ ID NO: 2007879 - RNA, 17 nt, Human
gccauucugacucauau

SEQ ID NO: 2007880 - RNA, 16 nt, Human
gcccacgcuggagugc

SEQ ID NO: 2007881 - RNA, 17 nt, Human
gcccacgcuggagugca

SEQ ID NO: 2007882 - RNA, 17 nt, Human
gccauuccccgucucug

SEQ ID NO: 2007883 - RNA, 18 nt, Human
gccauuccccgucucugg

SEQ ID NO: 2007884 - RNA, 19 nt, Human
gccauguuggccaggcugg

SEQ ID NO: 2007885 - RNA, 20 nt, Human
gccauguuggccaggcuggu

SEQ ID NO: 2007886 - RNA, 22 nt, Human
gccauguuggccaggcuggucu

SEQ ID NO: 2007887 - RNA, 24 nt, Human
gccauguuggccaggcuggucuca

SEQ ID NO: 2007888 - RNA, 18 nt, Human
gcacuuggagacuuguau

SEQ ID NO: 2007889 - RNA, 18 nt, Human
gcacuugggggcucagca

SEQ ID NO: 2007890 - RNA, 19 nt, Human
gcacuugggggcucagcaa

SEQ ID NO: 2007891 - RNA, 21 nt, Human
gcacuugggggcucagcaagg

SEQ ID NO: 2007892 - RNA, 22 nt, Human
gcacuugggggcucagcaaggc

SEQ ID NO: 2007893 - RNA, 23 nt, Human
gcacuugggggcucagcaaggcc

SEQ ID NO: 2007894 - RNA, 21 nt, Human
gccacauugaaaaauguccac

SEQ ID NO: 2007895 - RNA, 20 nt, Human
gccacauuccugaugcuucu

SEQ ID NO: 2007896 - RNA, 16 nt, Human
gccacauuccugaugc

SEQ ID NO: 2007897 - RNA, 21 nt, Human
gccaccaacauacucccaucu

SEQ ID NO: 2007898 - RNA, 20 nt, Human
gccaccaacauacucccauc

SEQ ID NO: 2007899 - RNA, 19 nt, Human
gccaccaacauacucccau

SEQ ID NO: 2007900 - RNA, 21 nt, Human
gccaccaacagccacucagaa

SEQ ID NO: 2007901 - RNA, 22 nt, Human
gccaccaacauacucccaucug

SEQ ID NO: 2007902 - RNA, 13 nt, Human
gccaccacgcccg

SEQ ID NO: 2007903 - RNA, 23 nt, Human
gccaccaagugaaaaauguuagg

SEQ ID NO: 2007904 - RNA, 14 nt, Human
gccaccacgcccgg

SEQ ID NO: 2007905 - RNA, 17 nt, Human
gccaccacgccuagccu

SEQ ID NO: 2007906 - RNA, 24 nt, Human
gccaccacgccuagccucacgcuc

SEQ ID NO: 2007907 - RNA, 21 nt, Human
gccaccagaugugacaguguu

SEQ ID NO: 2007908 - RNA, 19 nt, Human
gccacugugaagagaacca

SEQ ID NO: 2007909 - RNA, 18 nt, Human
gccacugugaagagaacc

SEQ ID NO: 2007910 - RNA, 12 nt, Human
gccacugccucu

SEQ ID NO: 2007911 - RNA, 13 nt, Human
gccacugccucuu

SEQ ID NO: 2007912 - RNA, 16 nt, Human
gccacugccucuuccu

SEQ ID NO: 2007913 - RNA, 17 nt, Human
gccacugccucuuccuc

SEQ ID NO: 2007914 - RNA, 13 nt, Human
gccacuuuccaag

SEQ ID NO: 2007915 - RNA, 19 nt, Human
gccacuuugcaaaggagcu

SEQ ID NO: 2007916 - RNA, 18 nt, Human
gccacuuuccaagucacu

SEQ ID NO: 2007917 - RNA, 21 nt, Human
gccacuugaugacccccaacc

SEQ ID NO: 2007918 - RNA, 21 nt, Human
gccacugcacuauagccuagg

SEQ ID NO: 2007919 - RNA, 12 nt, Human
gccacccugugc

SEQ ID NO: 2007920 - RNA, 13 nt, Human
gccacccugugca

SEQ ID NO: 2007921 - RNA, 13 nt, Human
gccacccugggga

SEQ ID NO: 2007922 - RNA, 19 nt, Human
gccacccuggggagaaagu

SEQ ID NO: 2007923 - RNA, 16 nt, Human
gccaccgccuccuaca

SEQ ID NO: 2007924 - RNA, 23 nt, Human
gccacugcaccgggccacagaga

SEQ ID NO: 2007925 - RNA, 14 nt, Human
gccacccaaagcag

SEQ ID NO: 2007926 - RNA, 21 nt, Human
gcuaggaacacuccuucacag

SEQ ID NO: 2007927 - RNA, 19 nt, Human
gcuaggaacacuccuucac

SEQ ID NO: 2007928 - RNA, 18 nt, Human
gcuaggaacacuccuuca

SEQ ID NO: 2007929 - RNA, 19 nt, Human
gcuauggggauagaugugu

SEQ ID NO: 2007930 - RNA, 21 nt, Human
gcuauggggauagaugugugg

SEQ ID NO: 2007931 - RNA, 16 nt, Human
gcuauugucaccaggg

SEQ ID NO: 2007932 - RNA, 16 nt, Human
gcuaugucauuucaug

SEQ ID NO: 2007933 - RNA, 17 nt, Human
gcuaugucauuucaugu

SEQ ID NO: 2007934 - RNA, 12 nt, Human
gcuaugucauuu

SEQ ID NO: 2007935 - RNA, 20 nt, Human
gcuauugucaccagggcugg

SEQ ID NO: 2007936 - RNA, 21 nt, Human
gcuauugucaccagggcugga

SEQ ID NO: 2007937 - RNA, 22 nt, Human
gcuagucaacaguacccugguu

SEQ ID NO: 2007938 - RNA, 22 nt, Human
gcuaggcagggugucugccccc

SEQ ID NO: 2007939 - RNA, 13 nt, Human
gcuagucaacagu

SEQ ID NO: 2007940 - RNA, 16 nt, Human
gcuaguaucaaaagaa

SEQ ID NO: 2007941 - RNA, 14 nt, Human
gcuaggccuggcca

SEQ ID NO: 2007942 - RNA, 15 nt, Human
gcuaggccuggccag

SEQ ID NO: 2007943 - RNA, 19 nt, Human
gcuaggcagggugucugcc

SEQ ID NO: 2007944 - RNA, 20 nt, Human
gcuaggcagggugucugccc

SEQ ID NO: 2007945 - RNA, 20 nt, Human
gccuguucagcuccagcuca

SEQ ID NO: 2007946 - RNA, 19 nt, Human
gccuguucagcuccagcuc

SEQ ID NO: 2007947 - RNA, 22 nt, Human
gcucagguggggucacucuggc

SEQ ID NO: 2007948 - RNA, 21 nt, Human
gcucagguggggucacucugg

SEQ ID NO: 2007949 - RNA, 15 nt, Human
gcucagagagggugg

SEQ ID NO: 2007950 - RNA, 20 nt, Human
gcucagagagggugggagug

SEQ ID NO: 2007951 - RNA, 18 nt, Human
gcucagagagggugggag

SEQ ID NO: 2007952 - RNA, 22 nt, Human
gcucagagagggugggaguggg

SEQ ID NO: 2007953 - RNA, 14 nt, Human
gcucaggagcccug

SEQ ID NO: 2007954 - RNA, 18 nt, Human
gcucaggagcccugggag

SEQ ID NO: 2007955 - RNA, 15 nt, Human
gcucaggagcccugg

SEQ ID NO: 2007956 - RNA, 12 nt, Human
gcucagggccug

SEQ ID NO: 2007957 - RNA, 21 nt, Human
gcucaggagcccugggaggcu

SEQ ID NO: 2007958 - RNA, 16 nt, Human
gcucagggccuggcuc

SEQ ID NO: 2007959 - RNA, 13 nt, Human
gcucagggccugg

SEQ ID NO: 2007960 - RNA, 17 nt, Human
gcucagggccuggcuca

SEQ ID NO: 2007961 - RNA, 16 nt, Human
gcucucaggccagcug

SEQ ID NO: 2007962 - RNA, 15 nt, Human
gcucucaggccagcu

SEQ ID NO: 2007963 - RNA, 14 nt, Human
gcucucaggccagc

SEQ ID NO: 2007964 - RNA, 13 nt, Human
gcucucaggccag

SEQ ID NO: 2007965 - RNA, 20 nt, Human
gcucuacagcuaaucagcau

SEQ ID NO: 2007966 - RNA, 22 nt, Human
gcucuacagcuaaucagcauuc

SEQ ID NO: 2007967 - RNA, 21 nt, Human
gcucccaggcauuccccagga

SEQ ID NO: 2007968 - RNA, 20 nt, Human
gcucccaggcauuccccagg

SEQ ID NO: 2007969 - RNA, 19 nt, Human
gcuccccuaaagccucaaa

SEQ ID NO: 2007970 - RNA, 13 nt, Human
gcucccccuuuuc

SEQ ID NO: 2007971 - RNA, 17 nt, Human
gcucccccuuuucccuc

SEQ ID NO: 2007972 - RNA, 14 nt, Human
gcuccccagcccca

SEQ ID NO: 2007973 - RNA, 22 nt, Human
gcucccaggcauuccccaggag

SEQ ID NO: 2007974 - RNA, 14 nt, Human
gcuccugcccccau

SEQ ID NO: 2007975 - RNA, 11 nt, Human
gcuccugccca

SEQ ID NO: 2007976 - RNA, 11 nt, Human
gcuccugcccc

SEQ ID NO: 2007977 - RNA, 22 nt, Human
gcuccugccaccacgcccggcu

SEQ ID NO: 2007978 - RNA, 22 nt, Human
gcucugagagcaaacuggcuug

SEQ ID NO: 2007979 - RNA, 23 nt, Human
gcucuggagcccacuguacuugc

SEQ ID NO: 2007980 - RNA, 20 nt, Human
gcucugagcaaauguggcuc

SEQ ID NO: 2007981 - RNA, 21 nt, Human
gcucugagcaaauguggcucc

SEQ ID NO: 2007982 - RNA, 15 nt, Human
gcucuguugcccagg

SEQ ID NO: 2007983 - RNA, 16 nt, Human
gcucuguugcccaggc

SEQ ID NO: 2007984 - RNA, 18 nt, Human
gcucuguugcccaggcug

SEQ ID NO: 2007985 - RNA, 22 nt, Human
gcucuguugcccaggcuggagu

SEQ ID NO: 2007986 - RNA, 23 nt, Human
gcucuguugcccaggcuggagug

SEQ ID NO: 2007987 - RNA, 16 nt, Human
gcucuguccugggagu

SEQ ID NO: 2007988 - RNA, 19 nt, Human
gcucugucgcccaggcugg

SEQ ID NO: 2007989 - RNA, 15 nt, Human
gcucuguccugggag

SEQ ID NO: 2007990 - RNA, 14 nt, Human
gcucuguccuggga

SEQ ID NO: 2007991 - RNA, 16 nt, Human
gcucuuccaggcuggg

SEQ ID NO: 2007992 - RNA, 15 nt, Human
gcucuuccaggcugg

SEQ ID NO: 2007993 - RNA, 12 nt, Human
gcucuuccaggc

SEQ ID NO: 2007994 - RNA, 23 nt, Human
gcucuuagcaaaaacauguaugu

SEQ ID NO: 2007995 - RNA, 16 nt, Human
gcugacagacacaggc

SEQ ID NO: 2007996 - RNA, 13 nt, Human
gcugaauugagcc

SEQ ID NO: 2007997 - RNA, 21 nt, Human
gcugaauugagccuaaaaaua

SEQ ID NO: 2007998 - RNA, 14 nt, Human
gcugacagacacag

SEQ ID NO: 2007999 - RNA, 15 nt, Human
gcugacagacacagg

SEQ ID NO: 2008000 - RNA, 22 nt, Human
gcugaauacagaggcaacugca

SEQ ID NO: 2008001 - RNA, 17 nt, Human
gcugaaugguuuucaaa

SEQ ID NO: 2008002 - RNA, 20 nt, Human
gcugaaggcucgagcaugcc

SEQ ID NO: 2008003 - RNA, 12 nt, Human
gcugaaggcucg

SEQ ID NO: 2008004 - RNA, 17 nt, Human
gcugaaauugaaaaguu

SEQ ID NO: 2008005 - RNA, 16 nt, Human
gcugaacacauuucuu

SEQ ID NO: 2008006 - RNA, 18 nt, Human
gcugaacacauuucuuuu

SEQ ID NO: 2008007 - RNA, 19 nt, Human
gcugaacacauuucuuuuu

SEQ ID NO: 2008008 - RNA, 11 nt, Human
gcugaaauuga

SEQ ID NO: 2008009 - RNA, 19 nt, Human
gcugaaauugaaaaguuau

SEQ ID NO: 2008010 - RNA, 12 nt, Human
gcuucacuucug

SEQ ID NO: 2008011 - RNA, 21 nt, Human
gcuucacuucugacucuuccc

SEQ ID NO: 2008012 - RNA, 20 nt, Human
gcuucacggaagagccuugc

SEQ ID NO: 2008013 - RNA, 19 nt, Human
gcuucaccccaaucccagc

SEQ ID NO: 2008014 - RNA, 20 nt, Human
gcuucaccccaaucccagcu

SEQ ID NO: 2008015 - RNA, 14 nt, Human
gcuuaacuucacau

SEQ ID NO: 2008016 - RNA, 23 nt, Human
gcuuaaaugugaauuacuaacuu

SEQ ID NO: 2008017 - RNA, 14 nt, Human
gcuucacaggacag

SEQ ID NO: 2008018 - RNA, 22 nt, Human
gcuucacaggacaggaaagugg

SEQ ID NO: 2008019 - RNA, 20 nt, Human
gcuuaaaagaaaauguucac

SEQ ID NO: 2008020 - RNA, 22 nt, Human
gcuucaaggauccugagccaga

SEQ ID NO: 2008021 - RNA, 12 nt, Human
gcuuaaauguga

SEQ ID NO: 2008022 - RNA, 13 nt, Human
gcuuaaaugugaa

SEQ ID NO: 2008023 - RNA, 14 nt, Human
gcuuaaaugugaau

SEQ ID NO: 2008024 - RNA, 17 nt, Human
gcuuaaaugugaauuac

SEQ ID NO: 2008025 - RNA, 21 nt, Human
gcuguuggcugggggccucag

SEQ ID NO: 2008026 - RNA, 22 nt, Human
gcuguuggcugggggccucagu

SEQ ID NO: 2008027 - RNA, 14 nt, Human
gcuguugucucuuc

SEQ ID NO: 2008028 - RNA, 15 nt, Human
gcuguugucucuucu

SEQ ID NO: 2008029 - RNA, 22 nt, Human
gcugugcugcccugcccaccug

SEQ ID NO: 2008030 - RNA, 19 nt, Human
gcugugcugcccugcccac

SEQ ID NO: 2008031 - RNA, 13 nt, Human
gcugugcugcccu

SEQ ID NO: 2008032 - RNA, 12 nt, Human
gcugugcugccc

SEQ ID NO: 2008033 - RNA, 21 nt, Human
gcugugcucuggacaggcaug

SEQ ID NO: 2008034 - RNA, 23 nt, Human
gcugucuuucuugcucccugacu

SEQ ID NO: 2008035 - RNA, 18 nt, Human
gcugucuuuucuuugcca

SEQ ID NO: 2008036 - RNA, 22 nt, Human
gcugucuuuucuuugccaucuc

SEQ ID NO: 2008037 - RNA, 13 nt, Human
gcugugaaaaaaa

SEQ ID NO: 2008038 - RNA, 12 nt, Human
gcuguaaaagca

SEQ ID NO: 2008039 - RNA, 20 nt, Human
gcuguaaaagcaaguccugc

SEQ ID NO: 2008040 - RNA, 20 nt, Human
gcuguaucccaugagccuca

SEQ ID NO: 2008041 - RNA, 23 nt, Human
gcuguaucccaugagccucagca

SEQ ID NO: 2008042 - RNA, 17 nt, Human
gcuguaaggcaugaagg

SEQ ID NO: 2008043 - RNA, 18 nt, Human
gcuguaaggcaugaagga

SEQ ID NO: 2008044 - RNA, 19 nt, Human
gcuguaaggcaugaaggau

SEQ ID NO: 2008045 - RNA, 15 nt, Human
gcuggguucugaucc

SEQ ID NO: 2008046 - RNA, 15 nt, Human
gcuggguucuaccca

SEQ ID NO: 2008047 - RNA, 14 nt, Human
gcuggguuggaggg

SEQ ID NO: 2008048 - RNA, 21 nt, Human
gcuggguuggaggguguccca

SEQ ID NO: 2008049 - RNA, 23 nt, Human
gcuucccaaaugugugcccagcu

SEQ ID NO: 2008050 - RNA, 14 nt, Human
gcuuccccaguagc

SEQ ID NO: 2008051 - RNA, 16 nt, Human
gcuuccccaguagcug

SEQ ID NO: 2008052 - RNA, 12 nt, Human
gcuuccccuccc

SEQ ID NO: 2008053 - RNA, 23 nt, Human
gcuucccgcucagcccucccugc

SEQ ID NO: 2008054 - RNA, 14 nt, Human
gcuucccucccugc

SEQ ID NO: 2008055 - RNA, 15 nt, Human
gcuucccgcucagcc

SEQ ID NO: 2008056 - RNA, 16 nt, Human
gcuucccgcucagccc

SEQ ID NO: 2008057 - RNA, 17 nt, Human
gcuucccgcucagcccu

SEQ ID NO: 2008058 - RNA, 18 nt, Human
gcuucccgcucagcccuc

SEQ ID NO: 2008059 - RNA, 19 nt, Human
gcuucccugguucaagcga

SEQ ID NO: 2008060 - RNA, 14 nt, Human
gcuuguacauaaug

SEQ ID NO: 2008061 - RNA, 16 nt, Human
gcuuguacauaaugcg

SEQ ID NO: 2008062 - RNA, 19 nt, Human
gcuugggcuucauccuccu

SEQ ID NO: 2008063 - RNA, 15 nt, Human
gcuugggaauuuuau

SEQ ID NO: 2008064 - RNA, 16 nt, Human
gcuugggcagaucucc

SEQ ID NO: 2008065 - RNA, 22 nt, Human
gcuucuuucaagggcuuuccug

SEQ ID NO: 2008066 - RNA, 23 nt, Human
gcuucuuucaagggcuuuccugu

SEQ ID NO: 2008067 - RNA, 19 nt, Human
gcuugaaacccguggcgcu

SEQ ID NO: 2008068 - RNA, 20 nt, Human
gcuucuuuaaaaaagcuaua

SEQ ID NO: 2008069 - RNA, 21 nt, Human
gcuucuuucaagggcuuuccu

SEQ ID NO: 2008070 - RNA, 14 nt, Human
gcuucggcauuuga

SEQ ID NO: 2008071 - RNA, 17 nt, Human
gcuggagcucugcccau

SEQ ID NO: 2008072 - RNA, 12 nt, Human
gcuggagugcag

SEQ ID NO: 2008073 - RNA, 16 nt, Human
gcuggacucccucaag

SEQ ID NO: 2008074 - RNA, 14 nt, Human
gcuggagcucugcc

SEQ ID NO: 2008075 - RNA, 20 nt, Human
gcugggcucccuucccaccu

SEQ ID NO: 2008076 - RNA, 17 nt, Human
gcugggcucccuuccca

SEQ ID NO: 2008077 - RNA, 16 nt, Human
gcugggcucccuuccc

SEQ ID NO: 2008078 - RNA, 12 nt, Human
gcugggcucccu

SEQ ID NO: 2008079 - RNA, 19 nt, Human
gcugggcagaggaaagcaa

SEQ ID NO: 2008080 - RNA, 20 nt, Human
gcugggcacugcucucaccu

SEQ ID NO: 2008081 - RNA, 17 nt, Human
gcugggcagaggaaagc

SEQ ID NO: 2008082 - RNA, 16 nt, Human
gcugggcagaggaaag

SEQ ID NO: 2008083 - RNA, 16 nt, Human
gcugggucgcccugga

SEQ ID NO: 2008084 - RNA, 18 nt, Human
gcugggucgcccuggacu

SEQ ID NO: 2008085 - RNA, 17 nt, Human
gcugggucgcccuggac

SEQ ID NO: 2008086 - RNA, 15 nt, Human
gcuggguguggcgca

SEQ ID NO: 2008087 - RNA, 19 nt, Human
gcugggucgcccuggacug

SEQ ID NO: 2008088 - RNA, 17 nt, Human
gcuggccuggccccuca

SEQ ID NO: 2008089 - RNA, 16 nt, Human
gcuggccuggccccuc

SEQ ID NO: 2008090 - RNA, 14 nt, Human
gcuggagugcagug

SEQ ID NO: 2008091 - RNA, 15 nt, Human
gcuggagugcaguga

SEQ ID NO: 2008092 - RNA, 19 nt, Human
gcuggccuggccccucagg

SEQ ID NO: 2008093 - RNA, 18 nt, Human
gcuggccuggccccucag

SEQ ID NO: 2008094 - RNA, 16 nt, Human
gcugggauuacaggug

SEQ ID NO: 2008095 - RNA, 22 nt, Human
gcugggauuacaggcuccugcc

SEQ ID NO: 2008096 - RNA, 23 nt, Human
gcugggauuacaggcuccugcca

SEQ ID NO: 2008097 - RNA, 15 nt, Human
gcugggcagaggaaa

SEQ ID NO: 2008098 - RNA, 14 nt, Human
gcugggcagaggaa

SEQ ID NO: 2008099 - RNA, 13 nt, Human
gcugggcagagga

SEQ ID NO: 2008100 - RNA, 15 nt, Human
gcugggcacugcucu

SEQ ID NO: 2008101 - RNA, 19 nt, Human
gcugggcacugcucucacc

SEQ ID NO: 2008102 - RNA, 17 nt, Human
gcugggauuacaggugu

SEQ ID NO: 2008103 - RNA, 18 nt, Human
gcugggauuacaggugug

SEQ ID NO: 2008104 - RNA, 19 nt, Human
gcugggauuacagguguga

SEQ ID NO: 2008105 - RNA, 18 nt, Human
gcugagggugagugggug

SEQ ID NO: 2008106 - RNA, 21 nt, Human
gcugccagccgagauagccaa

SEQ ID NO: 2008107 - RNA, 19 nt, Human
gcugccagccgagauagcc

SEQ ID NO: 2008108 - RNA, 21 nt, Human
gcugccauccagguucagcuu

SEQ ID NO: 2008109 - RNA, 10 nt, Human
gcugccagua

SEQ ID NO: 2008110 - RNA, 23 nt, Human
gcugccauccagguucagcuugu

SEQ ID NO: 2008111 - RNA, 22 nt, Human
gcugcaccggcuggccuggccc

SEQ ID NO: 2008112 - RNA, 19 nt, Human
gcugcaccggcuggccugg

SEQ ID NO: 2008113 - RNA, 18 nt, Human
gcugcaccggcuggccug

SEQ ID NO: 2008114 - RNA, 17 nt, Human
gcugcaccggcuggccu

SEQ ID NO: 2008115 - RNA, 16 nt, Human
gcugcaccggcuggcc

SEQ ID NO: 2008116 - RNA, 14 nt, Human
gcugcaccggcugg

SEQ ID NO: 2008117 - RNA, 15 nt, Human
gcugccaguaccagc

SEQ ID NO: 2008118 - RNA, 13 nt, Human
gcugccugggauc

SEQ ID NO: 2008119 - RNA, 18 nt, Human
gcugccugggaucccuca

SEQ ID NO: 2008120 - RNA, 16 nt, Human
gcugccugggaucccu

SEQ ID NO: 2008121 - RNA, 19 nt, Human
gcugccugggaucccucau

SEQ ID NO: 2008122 - RNA, 12 nt, Human
gcugcucugccc

SEQ ID NO: 2008123 - RNA, 13 nt, Human
gcugcucugcccc

SEQ ID NO: 2008124 - RNA, 14 nt, Human
gcugcucugcccca

SEQ ID NO: 2008125 - RNA, 17 nt, Human
gcugcucugccccagcu

SEQ ID NO: 2008126 - RNA, 20 nt, Human
gcugcugagccgcagagaag

SEQ ID NO: 2008127 - RNA, 23 nt, Human
gcugcucugccccagcuugggca

SEQ ID NO: 2008128 - RNA, 20 nt, Human
gcugcucucaaaccccugac

SEQ ID NO: 2008129 - RNA, 19 nt, Human
gcuuguacauaaugcgugc

SEQ ID NO: 2008130 - RNA, 12 nt, Human
ggaccccagccu

SEQ ID NO: 2008131 - RNA, 13 nt, Human
ggaccccagccuc

SEQ ID NO: 2008132 - RNA, 14 nt, Human
ggaccccagccuca

SEQ ID NO: 2008133 - RNA, 15 nt, Human
ggaccccagccucaa

SEQ ID NO: 2008134 - RNA, 18 nt, Human
ggaccccuggugguucac

SEQ ID NO: 2008135 - RNA, 20 nt, Human
ggaccccaucugugaauaag

SEQ ID NO: 2008136 - RNA, 14 nt, Human
ggaccccaucugug

SEQ ID NO: 2008137 - RNA, 17 nt, Human
ggaccccaucugugaau

SEQ ID NO: 2008138 - RNA, 18 nt, Human
ggaccccaucugugaaua

SEQ ID NO: 2008139 - RNA, 18 nt, Human
ggacccugaggcccagag

SEQ ID NO: 2008140 - RNA, 15 nt, Human
ggacccugaggccca

SEQ ID NO: 2008141 - RNA, 14 nt, Human
ggacccugaggccc

SEQ ID NO: 2008142 - RNA, 20 nt, Human
ggacccggaggggccuggca

SEQ ID NO: 2008143 - RNA, 21 nt, Human
ggacccggaggggccuggcag

SEQ ID NO: 2008144 - RNA, 19 nt, Human
ggacccugaggcccagagg

SEQ ID NO: 2008145 - RNA, 16 nt, Human
ggacccuccaaggcca

SEQ ID NO: 2008146 - RNA, 15 nt, Human
ggagagcuagcagca

SEQ ID NO: 2008147 - RNA, 18 nt, Human
ggagagccuuccaggggu

SEQ ID NO: 2008148 - RNA, 17 nt, Human
ggagagccuuccagggg

SEQ ID NO: 2008149 - RNA, 22 nt, Human
ggagagccuuccagggguggga

SEQ ID NO: 2008150 - RNA, 16 nt, Human
ggagagccuuccaggg

SEQ ID NO: 2008151 - RNA, 13 nt, Human
ggagagccuucca

SEQ ID NO: 2008152 - RNA, 14 nt, Human
ggagagagacucca

SEQ ID NO: 2008153 - RNA, 23 nt, Human
ggacugugugcucaggagcccug

SEQ ID NO: 2008154 - RNA, 22 nt, Human
ggacugugugcucaggagcccu

SEQ ID NO: 2008155 - RNA, 12 nt, Human
ggacuuaggaag

SEQ ID NO: 2008156 - RNA, 17 nt, Human
ggacuuagcugggagaa

SEQ ID NO: 2008157 - RNA, 21 nt, Human
ggacuagagggaccucuccca

SEQ ID NO: 2008158 - RNA, 19 nt, Human
ggacuagagggaccucucc

SEQ ID NO: 2008159 - RNA, 18 nt, Human
ggacuagagggaccucuc

SEQ ID NO: 2008160 - RNA, 12 nt, Human
ggaccucaggcc

SEQ ID NO: 2008161 - RNA, 20 nt, Human
ggacuacaggugugagucac

SEQ ID NO: 2008162 - RNA, 17 nt, Human
ggacucagaaacuccau

SEQ ID NO: 2008163 - RNA, 16 nt, Human
ggacuaggguccuggg

SEQ ID NO: 2008164 - RNA, 22 nt, Human
ggacucaaugcacugacauugu

SEQ ID NO: 2008165 - RNA, 22 nt, Human
ggagaaccaaaaagaggcuaug

SEQ ID NO: 2008166 - RNA, 18 nt, Human
ggagaaaugaaaaaauau

SEQ ID NO: 2008167 - RNA, 13 nt, Human
ggagaacuagaga

SEQ ID NO: 2008168 - RNA, 22 nt, Human
ggagacugcugagucaacccaa

SEQ ID NO: 2008169 - RNA, 16 nt, Human
ggagacugucucaaga

SEQ ID NO: 2008170 - RNA, 11 nt, Human
ggacuuccuga

SEQ ID NO: 2008171 - RNA, 15 nt, Human
ggacuuggaagcucc

SEQ ID NO: 2008172 - RNA, 16 nt, Human
ggacuuggagguagcu

SEQ ID NO: 2008173 - RNA, 17 nt, Human
ggacuuggaagcuccgc

SEQ ID NO: 2008174 - RNA, 19 nt, Human
ggagaaaauggacguguua

SEQ ID NO: 2008175 - RNA, 18 nt, Human
ggacuuuuauuuccagug

SEQ ID NO: 2008176 - RNA, 13 nt, Human
ggagcagggaagg

SEQ ID NO: 2008177 - RNA, 16 nt, Human
ggagcagggaaggccu

SEQ ID NO: 2008178 - RNA, 17 nt, Human
ggagcagggaaggccug

SEQ ID NO: 2008179 - RNA, 19 nt, Human
ggagcagggaaggccugac

SEQ ID NO: 2008180 - RNA, 21 nt, Human
ggagcagggaaggccugacuu

SEQ ID NO: 2008181 - RNA, 18 nt, Human
ggagcaguaucaugaagc

SEQ ID NO: 2008182 - RNA, 15 nt, Human
ggagcccacuguacu

SEQ ID NO: 2008183 - RNA, 21 nt, Human
ggagcagccacauuccugaug

SEQ ID NO: 2008184 - RNA, 13 nt, Human
ggagcagccacau

SEQ ID NO: 2008185 - RNA, 15 nt, Human
ggaggcugagauggg

SEQ ID NO: 2008186 - RNA, 19 nt, Human
ggaggcugagaugggagaa

SEQ ID NO: 2008187 - RNA, 21 nt, Human
ggaggcucuggagcccacugu

SEQ ID NO: 2008188 - RNA, 16 nt, Human
ggaggucgaggcagga

SEQ ID NO: 2008189 - RNA, 15 nt, Human
ggaggucgaggcagg

SEQ ID NO: 2008190 - RNA, 15 nt, Human
ggaggugugaggcag

SEQ ID NO: 2008191 - RNA, 17 nt, Human
ggaggugugaggcagga

SEQ ID NO: 2008192 - RNA, 18 nt, Human
ggaggucgaggcaggagg

SEQ ID NO: 2008193 - RNA, 21 nt, Human
ggaggaagaacugaaaggcuu

SEQ ID NO: 2008194 - RNA, 21 nt, Human
ggaggcaugugaugagaggaa

SEQ ID NO: 2008195 - RNA, 20 nt, Human
ggaggaaaaccaagccgugg

SEQ ID NO: 2008196 - RNA, 21 nt, Human
ggaggaaaaccaagccguggc

SEQ ID NO: 2008197 - RNA, 22 nt, Human
ggaggaaaaccaagccguggcu

SEQ ID NO: 2008198 - RNA, 12 nt, Human
ggaggaagagaa

SEQ ID NO: 2008199 - RNA, 20 nt, Human
ggaggccaaggugggaggau

SEQ ID NO: 2008200 - RNA, 18 nt, Human
ggaggccaaggugggagg

SEQ ID NO: 2008201 - RNA, 13 nt, Human
ggaggccagccuu

SEQ ID NO: 2008202 - RNA, 11 nt, Human
ggaggccaaga

SEQ ID NO: 2008203 - RNA, 22 nt, Human
ggaggccaagaguggccccacc

SEQ ID NO: 2008204 - RNA, 23 nt, Human
ggaggccaagaguggccccaccu

SEQ ID NO: 2008205 - RNA, 20 nt, Human
ggaggcucuggagcccacug

SEQ ID NO: 2008206 - RNA, 17 nt, Human
ggaggcucuggagccca

SEQ ID NO: 2008207 - RNA, 21 nt, Human
ggaggcccagcgcggacaucc

SEQ ID NO: 2008208 - RNA, 17 nt, Human
ggaggccaucuggagag

SEQ ID NO: 2008209 - RNA, 22 nt, Human
ggaggcccagcgcggacauccc

SEQ ID NO: 2008210 - RNA, 12 nt, Human
ggaggccaucug

SEQ ID NO: 2008211 - RNA, 13 nt, Human
ggaggccaucugg

SEQ ID NO: 2008212 - RNA, 18 nt, Human
ggagcccauuuggagggc

SEQ ID NO: 2008213 - RNA, 21 nt, Human
ggagcccauuuggagggccug

SEQ ID NO: 2008214 - RNA, 22 nt, Human
ggagcccauuuggagggccugg

SEQ ID NO: 2008215 - RNA, 23 nt, Human
ggagcccauuuggagggccuggg

SEQ ID NO: 2008216 - RNA, 22 nt, Human
ggagcccacuguacuugcucuu

SEQ ID NO: 2008217 - RNA, 18 nt, Human
ggagcccacuguacuugc

SEQ ID NO: 2008218 - RNA, 16 nt, Human
ggagcugaguggggga

SEQ ID NO: 2008219 - RNA, 22 nt, Human
ggagcugccuguucagcuccag

SEQ ID NO: 2008220 - RNA, 17 nt, Human
ggagcuggaguccacug

SEQ ID NO: 2008221 - RNA, 19 nt, Human
ggccagguggccacuccag

SEQ ID NO: 2008222 - RNA, 12 nt, Human
ggcauucucucu

SEQ ID NO: 2008223 - RNA, 13 nt, Human
ggccaaagacaaa

SEQ ID NO: 2008224 - RNA, 15 nt, Human
ggccaaagacaaaua

SEQ ID NO: 2008225 - RNA, 16 nt, Human
ggccaaagacaaauag

SEQ ID NO: 2008226 - RNA, 16 nt, Human
ggcauuucccacccug

SEQ ID NO: 2008227 - RNA, 12 nt, Human
ggcauuguggga

SEQ ID NO: 2008228 - RNA, 16 nt, Human
ggcauuguaucugucu

SEQ ID NO: 2008229 - RNA, 19 nt, Human
ggcauuguaucugucuuuc

SEQ ID NO: 2008230 - RNA, 21 nt, Human
ggcauuguaucugucuuucca

SEQ ID NO: 2008231 - RNA, 21 nt, Human
ggccaaaggaagcacaugccu

SEQ ID NO: 2008232 - RNA, 12 nt, Human
ggccaaaggaag

SEQ ID NO: 2008233 - RNA, 15 nt, Human
ggccaaagccaaagc

SEQ ID NO: 2008234 - RNA, 13 nt, Human
ggccaagguggga

SEQ ID NO: 2008235 - RNA, 21 nt, Human
ggccaaggaugccccgucccc

SEQ ID NO: 2008236 - RNA, 16 nt, Human
ggccaaggagggugag

SEQ ID NO: 2008237 - RNA, 16 nt, Human
ggccaaguccgcagaa

SEQ ID NO: 2008238 - RNA, 23 nt, Human
ggccaaguccgcagaagcccuga

SEQ ID NO: 2008239 - RNA, 23 nt, Human
ggccagagggagugacagaggca

SEQ ID NO: 2008240 - RNA, 18 nt, Human
ggccagcaccaucucuuu

SEQ ID NO: 2008241 - RNA, 17 nt, Human
ggccagaugcaccagcc

SEQ ID NO: 2008242 - RNA, 19 nt, Human
ggccagaugcaccagcccu

SEQ ID NO: 2008243 - RNA, 20 nt, Human
ggccagaugcaccagcccuu

SEQ ID NO: 2008244 - RNA, 21 nt, Human
ggccuccgucacuaccuggcu

SEQ ID NO: 2008245 - RNA, 12 nt, Human
ggccucccugcc

SEQ ID NO: 2008246 - RNA, 13 nt, Human
ggccucccugcca

SEQ ID NO: 2008247 - RNA, 15 nt, Human
ggccucccugccagu

SEQ ID NO: 2008248 - RNA, 19 nt, Human
ggccucccugccaguaggg

SEQ ID NO: 2008249 - RNA, 14 nt, Human
ggccucccaacuca

SEQ ID NO: 2008250 - RNA, 13 nt, Human
ggccucccaacuc

SEQ ID NO: 2008251 - RNA, 14 nt, Human
ggcccuuccuuuuc

SEQ ID NO: 2008252 - RNA, 18 nt, Human
ggcccuuccucuccacug

SEQ ID NO: 2008253 - RNA, 19 nt, Human
ggcccuuccucuccacugc

SEQ ID NO: 2008254 - RNA, 22 nt, Human
ggcccuuccucuccacugccuu

SEQ ID NO: 2008255 - RNA, 23 nt, Human
ggcccuuccucuccacugccuuc

SEQ ID NO: 2008256 - RNA, 22 nt, Human
ggcccagcgcggacauccccug

SEQ ID NO: 2008257 - RNA, 17 nt, Human
ggcccauguauggccag

SEQ ID NO: 2008258 - RNA, 19 nt, Human
ggcccauguauggccagga

SEQ ID NO: 2008259 - RNA, 20 nt, Human
ggcccauguauggccaggaa

SEQ ID NO: 2008260 - RNA, 21 nt, Human
ggcccauguauggccaggaag

SEQ ID NO: 2008261 - RNA, 18 nt, Human
ggccccaggaaaggccca

SEQ ID NO: 2008262 - RNA, 13 nt, Human
ggccccacaccag

SEQ ID NO: 2008263 - RNA, 19 nt, Human
ggccccagcuucucagcuc

SEQ ID NO: 2008264 - RNA, 15 nt, Human
ggcccgacagccugg

SEQ ID NO: 2008265 - RNA, 16 nt, Human
ggcccgacagccuggc

SEQ ID NO: 2008266 - RNA, 17 nt, Human
ggcccgacagccuggca

SEQ ID NO: 2008267 - RNA, 17 nt, Human
ggcagaaagcaaaauua

SEQ ID NO: 2008268 - RNA, 12 nt, Human
ggcagaaggaag

SEQ ID NO: 2008269 - RNA, 21 nt, Human
ggcagaaguaggggaagaaua

SEQ ID NO: 2008270 - RNA, 17 nt, Human
ggcagccaggccacaag

SEQ ID NO: 2008271 - RNA, 15 nt, Human
ggcagccaggccaca

SEQ ID NO: 2008272 - RNA, 10 nt, Human
ggcagagcag

SEQ ID NO: 2008273 - RNA, 14 nt, Human
ggcagccaggccac

SEQ ID NO: 2008274 - RNA, 19 nt, Human
ggcagccgugccuucagcu

SEQ ID NO: 2008275 - RNA, 21 nt, Human
ggcagccgugccuucagcucu

SEQ ID NO: 2008276 - RNA, 18 nt, Human
ggcagccgugccuucagc

SEQ ID NO: 2008277 - RNA, 16 nt, Human
ggcagagaggcugugg

SEQ ID NO: 2008278 - RNA, 13 nt, Human
ggcagagcacagc

SEQ ID NO: 2008279 - RNA, 19 nt, Human
ggcaggacacugcagaaca

SEQ ID NO: 2008280 - RNA, 13 nt, Human
ggcaggaccagcc

SEQ ID NO: 2008281 - RNA, 14 nt, Human
ggcaggaccagccc

SEQ ID NO: 2008282 - RNA, 15 nt, Human
ggcaggaccagccca

SEQ ID NO: 2008283 - RNA, 16 nt, Human
ggcaggaccagcccac

SEQ ID NO: 2008284 - RNA, 17 nt, Human
ggcaggaccagcccacg

SEQ ID NO: 2008285 - RNA, 18 nt, Human
ggcaggaccagcccacgc

SEQ ID NO: 2008286 - RNA, 19 nt, Human
ggcaggaccagcccacgcu

SEQ ID NO: 2008287 - RNA, 22 nt, Human
ggcagccgugccuucagcucua

SEQ ID NO: 2008288 - RNA, 21 nt, Human
ggcaggaccuucgggcugugc

SEQ ID NO: 2008289 - RNA, 23 nt, Human
ggcaggaccuucgggcugugccc

SEQ ID NO: 2008290 - RNA, 23 nt, Human
ggcaggagacuguggagacugcu

SEQ ID NO: 2008291 - RNA, 11 nt, Human
ggcaggcaggg

SEQ ID NO: 2008292 - RNA, 10 nt, Human
ggcaggcagg

SEQ ID NO: 2008293 - RNA, 21 nt, Human
ggaugacaugcacucagcucu

SEQ ID NO: 2008294 - RNA, 21 nt, Human
ggaugaauuccaaauucugcu

SEQ ID NO: 2008295 - RNA, 12 nt, Human
ggaugagaaagg

SEQ ID NO: 2008296 - RNA, 22 nt, Human
ggaugagaaagguugaagcacc

SEQ ID NO: 2008297 - RNA, 16 nt, Human
ggaugugcugcagugc

SEQ ID NO: 2008298 - RNA, 16 nt, Human
ggaugugguggcagug

SEQ ID NO: 2008299 - RNA, 21 nt, Human
ggauuuugauccaagcugguc

SEQ ID NO: 2008300 - RNA, 16 nt, Human
ggauuuuauguugaca

SEQ ID NO: 2008301 - RNA, 21 nt, Human
ggauuuuauguugacauuugu

SEQ ID NO: 2008302 - RNA, 17 nt, Human
ggauuuggagagaaaua

SEQ ID NO: 2008303 - RNA, 18 nt, Human
ggauuuggagagaaauau

SEQ ID NO: 2008304 - RNA, 15 nt, Human
ggauuuuauguugac

SEQ ID NO: 2008305 - RNA, 23 nt, Human
ggauuaaacuuaaucuaaaugga

SEQ ID NO: 2008306 - RNA, 17 nt, Human
ggcaaacauuugaagga

SEQ ID NO: 2008307 - RNA, 21 nt, Human
ggcaaacauuuucucuuagaa

SEQ ID NO: 2008308 - RNA, 22 nt, Human
ggcaaacauuuucucuuagaaa

SEQ ID NO: 2008309 - RNA, 13 nt, Human
ggcaaagcuguuc

SEQ ID NO: 2008310 - RNA, 20 nt, Human
ggcaaagagacccagucaau

SEQ ID NO: 2008311 - RNA, 20 nt, Human
ggcaaagcagcaacacacau

SEQ ID NO: 2008312 - RNA, 16 nt, Human
ggcaaagggggaggag

SEQ ID NO: 2008313 - RNA, 17 nt, Human
ggcaaauccgaaaucag

SEQ ID NO: 2008314 - RNA, 20 nt, Human
ggcaaauccgaaaucagcag

SEQ ID NO: 2008315 - RNA, 16 nt, Human
ggcaacaaacugcaca

SEQ ID NO: 2008316 - RNA, 18 nt, Human
ggcaacaaacugcacaug

SEQ ID NO: 2008317 - RNA, 10 nt, Human
aaaaaaaaga

SEQ ID NO: 2008318 - RNA, 13 nt, Human
aaaaaaaaagaaa

SEQ ID NO: 2008319 - RNA, 20 nt, Human
aaaaagcuccaaaugcagcu

SEQ ID NO: 2008320 - RNA, 19 nt, Human
aaaaagcuauaaauuauau

SEQ ID NO: 2008321 - RNA, 12 nt, Human
aaaaaguauugc

SEQ ID NO: 2008322 - RNA, 15 nt, Human
aaaaaguauugccaa

SEQ ID NO: 2008323 - RNA, 19 nt, Human
aaaaaguaggaaaugaaug

SEQ ID NO: 2008324 - RNA, 14 nt, Human
aaaaagucuuuuaa

SEQ ID NO: 2008325 - RNA, 15 nt, Human
aaaaagucuuuuaaa

SEQ ID NO: 2008326 - RNA, 16 nt, Human
aaaaaguauugccaaa

SEQ ID NO: 2008327 - RNA, 20 nt, Human
aaaaaguauugccaaacauu

SEQ ID NO: 2008328 - RNA, 21 nt, Human
aaaaaguauugccaaacauua

SEQ ID NO: 2008329 - RNA, 11 nt, Human
aaaaaaaagaa

SEQ ID NO: 2008330 - RNA, 13 nt, Human
aaaaaaaacucuu

SEQ ID NO: 2008331 - RNA, 12 nt, Human
aaaaaagaaaga

SEQ ID NO: 2008332 - RNA, 13 nt, Human
aaaaaaacacaaa

SEQ ID NO: 2008333 - RNA, 12 nt, Human
aaaaaaguugua

SEQ ID NO: 2008334 - RNA, 18 nt, Human
aaaaaaggaugcaacaau

SEQ ID NO: 2008335 - RNA, 19 nt, Human
aaaaagcuagucaacagua

SEQ ID NO: 2008336 - RNA, 19 nt, Human
ggcuguaucccaugagccu

SEQ ID NO: 2008337 - RNA, 16 nt, Human
ggcuggugucaccuga

SEQ ID NO: 2008338 - RNA, 22 nt, Human
ggcugucaguguuuggugcacg

SEQ ID NO: 2008339 - RNA, 14 nt, Human
ggcuguccacccgc

SEQ ID NO: 2008340 - RNA, 15 nt, Human
ggcuucaguggcagc

SEQ ID NO: 2008341 - RNA, 20 nt, Human
ggcuguaucccaugagccuc

SEQ ID NO: 2008342 - RNA, 22 nt, Human
ggcuguaucccaugagccucag

SEQ ID NO: 2008343 - RNA, 15 nt, Human
ggcugucaauuacag

SEQ ID NO: 2008344 - RNA, 23 nt, Human
ggcuguaucccaugagccucagc

SEQ ID NO: 2008345 - RNA, 16 nt, Human
ggcuucaguggcagcu

SEQ ID NO: 2008346 - RNA, 22 nt, Human
ggcuucagggugggaguaguug

SEQ ID NO: 2008347 - RNA, 23 nt, Human
ggcuucccaaaugugugcccagc

SEQ ID NO: 2008348 - RNA, 17 nt, Human
ggcuuccugaggggaga

SEQ ID NO: 2008349 - RNA, 20 nt, Human
ggcuuccugaggggagacag

SEQ ID NO: 2008350 - RNA, 13 nt, Human
gggaaaaucagcc

SEQ ID NO: 2008351 - RNA, 17 nt, Human
ggcuuuuguuuugcuuu

SEQ ID NO: 2008352 - RNA, 13 nt, Human
gggaaaagcagcu

SEQ ID NO: 2008353 - RNA, 20 nt, Human
gggaaaaaguugaugucaau

SEQ ID NO: 2008354 - RNA, 22 nt, Human
gggaaaauaaaaaaagaaaaaa

SEQ ID NO: 2008355 - RNA, 23 nt, Human
gggaaaaucagccugcuccagcu

SEQ ID NO: 2008356 - RNA, 11 nt, Human
ggcugggaaau

SEQ ID NO: 2008357 - RNA, 22 nt, Human
ggcuggccuggccccucagggu

SEQ ID NO: 2008358 - RNA, 17 nt, Human
ggcuggccuggccccuc

SEQ ID NO: 2008359 - RNA, 13 nt, Human
ggcuggcccugcc

SEQ ID NO: 2008360 - RNA, 14 nt, Human
ggcuggcccugccc

SEQ ID NO: 2008361 - RNA, 15 nt, Human
ggcuggcccugcccu

SEQ ID NO: 2008362 - RNA, 14 nt, Human
ggcuggcgugcagu

SEQ ID NO: 2008363 - RNA, 16 nt, Human
ggcuggcccugcccug

SEQ ID NO: 2008364 - RNA, 16 nt, Human
ggcuggcgugcagugg

SEQ ID NO: 2008365 - RNA, 20 nt, Human
ggcuggcgugcaguggugcg

SEQ ID NO: 2008366 - RNA, 17 nt, Human
ggcuggaucugugaggg

SEQ ID NO: 2008367 - RNA, 17 nt, Human
ggcuggaguuggggcag

SEQ ID NO: 2008368 - RNA, 22 nt, Human
ggcuggaguuggggcagaggag

SEQ ID NO: 2008369 - RNA, 16 nt, Human
ggcucccuucccaccu

SEQ ID NO: 2008370 - RNA, 18 nt, Human
ggcucccuucccaccucu

SEQ ID NO: 2008371 - RNA, 17 nt, Human
ggcucccuucccaccuc

SEQ ID NO: 2008372 - RNA, 22 nt, Human
ggcucccuucccaccucucuca

SEQ ID NO: 2008373 - RNA, 20 nt, Human
ggcucccuucccaccucucu

SEQ ID NO: 2008374 - RNA, 17 nt, Human
ggcuccucccggugccc

SEQ ID NO: 2008375 - RNA, 12 nt, Human
ggcuccugccac

SEQ ID NO: 2008376 - RNA, 13 nt, Human
ggcuccugccacc

SEQ ID NO: 2008377 - RNA, 12 nt, Human
ggcuccugccca

SEQ ID NO: 2008378 - RNA, 12 nt, Human
ggcuccugcccc

SEQ ID NO: 2008379 - RNA, 15 nt, Human
ggcuccugcccccau

SEQ ID NO: 2008380 - RNA, 20 nt, Human
ggcucuuccaggcugggaga

SEQ ID NO: 2008381 - RNA, 24 nt, Human
ggcucuuccaggcugggagagccu

SEQ ID NO: 2008382 - RNA, 23 nt, Human
ggcucuuccaggcugggagagcc

SEQ ID NO: 2008383 - RNA, 18 nt, Human
ggcucgagcaugccugga

SEQ ID NO: 2008384 - RNA, 17 nt, Human
ggcugcagggaguccga

SEQ ID NO: 2008385 - RNA, 20 nt, Human
ggcugcaugcgggcuuccuc

SEQ ID NO: 2008386 - RNA, 22 nt, Human
ggcugcaugcgggcuuccuccu

SEQ ID NO: 2008387 - RNA, 18 nt, Human
aaaacauuuggcagaaaa

SEQ ID NO: 2008388 - RNA, 19 nt, Human
aaaaauuauugauugcuuu

SEQ ID NO: 2008389 - RNA, 15 nt, Human
aaaaccaauguucuc

SEQ ID NO: 2008390 - RNA, 20 nt, Human
aaaaccaaaaguuauuaaaa

SEQ ID NO: 2008391 - RNA, 23 nt, Human
aaaaccaaaaguuauuaaaauug

SEQ ID NO: 2008392 - RNA, 18 nt, Human
aaaacguggcugcuucaa

SEQ ID NO: 2008393 - RNA, 17 nt, Human
aaaacguggcugcuuca

SEQ ID NO: 2008394 - RNA, 16 nt, Human
aaaacguggcugcuuc

SEQ ID NO: 2008395 - RNA, 14 nt, Human
aaaacguggcugcu

SEQ ID NO: 2008396 - RNA, 13 nt, Human
aaaacuaaguucu

SEQ ID NO: 2008397 - RNA, 14 nt, Human
aaaacuacuuagca

SEQ ID NO: 2008398 - RNA, 15 nt, Human
aaaaauucaauagua

SEQ ID NO: 2008399 - RNA, 21 nt, Human
aaaacguggcugcuucaagga

SEQ ID NO: 2008400 - RNA, 19 nt, Human
aaaaccaagccguggcuuc

SEQ ID NO: 2008401 - RNA, 22 nt, Human
aaaacugauuuuuuuuuccuuc

SEQ ID NO: 2008402 - RNA, 18 nt, Human
aaaacugauuuuuuuuuc

SEQ ID NO: 2008403 - RNA, 20 nt, Human
aaaacugcugacuguuuucu

SEQ ID NO: 2008404 - RNA, 19 nt, Human
aaaacugcucauaugaugu

SEQ ID NO: 2008405 - RNA, 23 nt, Human
aaaaaucugaagauuguuuaucu

SEQ ID NO: 2008406 - RNA, 15 nt, Human
aaaaaucuuaauacu

SEQ ID NO: 2008407 - RNA, 18 nt, Human
aaaaaucuuaauacuguu

SEQ ID NO: 2008408 - RNA, 13 nt, Human
aaaaaucugaaga

SEQ ID NO: 2008409 - RNA, 14 nt, Human
aaaaaucugaagau

SEQ ID NO: 2008410 - RNA, 17 nt, Human
aaaaaucugaagauugu

SEQ ID NO: 2008411 - RNA, 20 nt, Human
aaaaaucugaagauuguuua

SEQ ID NO: 2008412 - RNA, 21 nt, Human
aaaaaucugaagauuguuuau

SEQ ID NO: 2008413 - RNA, 19 nt, Human
aaaaaucuuaauacuguua

SEQ ID NO: 2008414 - RNA, 23 nt, Human
aaaaaugucaaaaguagaacuuu

SEQ ID NO: 2008415 - RNA, 18 nt, Human
aaaaaugucaaaaguaga

SEQ ID NO: 2008416 - RNA, 13 nt, Human
aaaaauuacaguu

SEQ ID NO: 2008417 - RNA, 18 nt, Human
aaaaauguuaagcaucua

SEQ ID NO: 2008418 - RNA, 22 nt, Human
aaaaauguuaagcaucuaagga

SEQ ID NO: 2008419 - RNA, 14 nt, Human
gggaacagacugga

SEQ ID NO: 2008420 - RNA, 18 nt, Human
gggaaaugcugauuuaaa

SEQ ID NO: 2008421 - RNA, 23 nt, Human
gggaaaucgagugccgcaucuca

SEQ ID NO: 2008422 - RNA, 21 nt, Human
gggaaaguauucucuuuucaa

SEQ ID NO: 2008423 - RNA, 21 nt, Human
gggaaagccuuaagcugcagg

SEQ ID NO: 2008424 - RNA, 19 nt, Human
aaaaaucucaaauuucuaa

SEQ ID NO: 2008425 - RNA, 20 nt, Human
aaaaaucucaaauuucuaaa

SEQ ID NO: 2008426 - RNA, 17 nt, Human
aaaaaucucaaauuucu

SEQ ID NO: 2008427 - RNA, 22 nt, Human
gggaacagacuggaagcacagc

SEQ ID NO: 2008428 - RNA, 22 nt, Human
aaaacuugauguguuaucucuu

SEQ ID NO: 2008429 - RNA, 17 nt, Human
aaaacuacuuagcacuu

SEQ ID NO: 2008430 - RNA, 21 nt, Human
aaaacuuuaugcuaagugaaa

SEQ ID NO: 2008431 - RNA, 18 nt, Human
aaaagccuguuuaagaga

SEQ ID NO: 2008432 - RNA, 16 nt, Human
aaaagccuguuuaaga

SEQ ID NO: 2008433 - RNA, 20 nt, Human
aaaagcgacccauucagaga

SEQ ID NO: 2008434 - RNA, 11 nt, Human
aaaagccuugg

SEQ ID NO: 2008435 - RNA, 14 nt, Human
aaaagccuuggccu

SEQ ID NO: 2008436 - RNA, 13 nt, Human
aaaagcugcucag

SEQ ID NO: 2008437 - RNA, 18 nt, Human
aaaagcugaacacauuuc

SEQ ID NO: 2008438 - RNA, 19 nt, Human
aaaagcugaacacauuucu

SEQ ID NO: 2008439 - RNA, 20 nt, Human
aaaagcugaacacauuucuu

SEQ ID NO: 2008440 - RNA, 16 nt, Human
aaaagcugaacacauu

SEQ ID NO: 2008441 - RNA, 17 nt, Human
aaaagcuucccucccug

SEQ ID NO: 2008442 - RNA, 14 nt, Human
aaaagcugggcagg

SEQ ID NO: 2008443 - RNA, 17 nt, Human
aaaagcuagaacacugc

SEQ ID NO: 2008444 - RNA, 16 nt, Human
aaaagcuauaaauuau

SEQ ID NO: 2008445 - RNA, 22 nt, Human
aaaagcuccauuuuuagugaaa

SEQ ID NO: 2008446 - RNA, 20 nt, Human
gggaggcagagguugcagug

SEQ ID NO: 2008447 - RNA, 19 nt, Human
gggaggccaagaguggccc

SEQ ID NO: 2008448 - RNA, 22 nt, Human
gggaggccaagaguggccccac

SEQ ID NO: 2008449 - RNA, 23 nt, Human
gggaggccaagaguggccccacc

SEQ ID NO: 2008450 - RNA, 13 nt, Human
gggagggcuccag

SEQ ID NO: 2008451 - RNA, 11 nt, Human
gggagggcucc

SEQ ID NO: 2008452 - RNA, 13 nt, Human
gggagggccuggg

SEQ ID NO: 2008453 - RNA, 11 nt, Human
gggaggcagag

SEQ ID NO: 2008454 - RNA, 14 nt, Human
gggagacuuugaug

SEQ ID NO: 2008455 - RNA, 12 nt, Human
aaaauagccugc

SEQ ID NO: 2008456 - RNA, 14 nt, Human
aaaauaguuuauuu

SEQ ID NO: 2008457 - RNA, 13 nt, Human
aaaauaguuuauu

SEQ ID NO: 2008458 - RNA, 18 nt, Human
aaaauaguggugugauuu

SEQ ID NO: 2008459 - RNA, 18 nt, Human
aaaauauauaucaaauau

SEQ ID NO: 2008460 - RNA, 13 nt, Human
aaaauauguauua

SEQ ID NO: 2008461 - RNA, 13 nt, Human
aaaauauagcuaa

SEQ ID NO: 2008462 - RNA, 11 nt, Human
aaaauauacau

SEQ ID NO: 2008463 - RNA, 14 nt, Human
aaaauauacauguu

SEQ ID NO: 2008464 - RNA, 15 nt, Human
aaaaguagaacuuug

SEQ ID NO: 2008465 - RNA, 13 nt, Human
aaaaguagaacuu

SEQ ID NO: 2008466 - RNA, 13 nt, Human
aaaaguaauauuu

SEQ ID NO: 2008467 - RNA, 15 nt, Human
aaaaguaauauuuau

SEQ ID NO: 2008468 - RNA, 17 nt, Human
aaaaguagaacuuugua

SEQ ID NO: 2008469 - RNA, 11 nt, Human
aaaauaaagca

SEQ ID NO: 2008470 - RNA, 13 nt, Human
aaaauaaagcaag

SEQ ID NO: 2008471 - RNA, 12 nt, Human
aaaauaaauuau

SEQ ID NO: 2008472 - RNA, 13 nt, Human
aaaauaaauugga

SEQ ID NO: 2008473 - RNA, 14 nt, Human
aaaauaccagccag

SEQ ID NO: 2008474 - RNA, 14 nt, Human
aaaauaccaaggaa

SEQ ID NO: 2008475 - RNA, 15 nt, Human
aaaauaccagccagu

SEQ ID NO: 2008476 - RNA, 14 nt, Human
aaaauacucuuuuu

SEQ ID NO: 2008477 - RNA, 16 nt, Human
aaaagggacugagaaa

SEQ ID NO: 2008478 - RNA, 17 nt, Human
aaaaggcuuauaaaaca

SEQ ID NO: 2008479 - RNA, 19 nt, Human
aaaaggcuuauaaaacaga

SEQ ID NO: 2008480 - RNA, 20 nt, Human
aaaaggcuuauaaaacagag

SEQ ID NO: 2008481 - RNA, 15 nt, Human
gggcaggaccagccc

SEQ ID NO: 2008482 - RNA, 16 nt, Human
gggcaggaccagccca

SEQ ID NO: 2008483 - RNA, 17 nt, Human
gggcaggaccagcccac

SEQ ID NO: 2008484 - RNA, 18 nt, Human
gggcaggaccagcccacg

SEQ ID NO: 2008485 - RNA, 21 nt, Human
gggcaggaccagcccacgcug

SEQ ID NO: 2008486 - RNA, 22 nt, Human
gggcaggacagguccucccugc

SEQ ID NO: 2008487 - RNA, 13 nt, Human
gggcaggaccagc

SEQ ID NO: 2008488 - RNA, 14 nt, Human
gggcaggaccagcc

SEQ ID NO: 2008489 - RNA, 16 nt, Human
gggaggggagacuuug

SEQ ID NO: 2008490 - RNA, 15 nt, Human
gggauuuccaugaug

SEQ ID NO: 2008491 - RNA, 23 nt, Human
gggcagagcagagaccaucccug

SEQ ID NO: 2008492 - RNA, 23 nt, Human
gggauuuguugauucucuccauu

SEQ ID NO: 2008493 - RNA, 10 nt, Human
ggucuuugag

SEQ ID NO: 2008494 - RNA, 20 nt, Human
ggucuugguuccagccugcc

SEQ ID NO: 2008495 - RNA, 21 nt, Human
ggucuugguuccagccugcca

SEQ ID NO: 2008496 - RNA, 19 nt, Human
ggucuugcaaaauuccuga

SEQ ID NO: 2008497 - RNA, 16 nt, Human
ggucuugcauuuaaaa

SEQ ID NO: 2008498 - RNA, 21 nt, Human
ggugauccacucgccuucauc

SEQ ID NO: 2008499 - RNA, 22 nt, Human
ggucuuuuccucgcuucuuuca

SEQ ID NO: 2008500 - RNA, 17 nt, Human
ggucuuugagcucccac

SEQ ID NO: 2008501 - RNA, 22 nt, Human
ggugcacaagcuccaagcuccc

SEQ ID NO: 2008502 - RNA, 16 nt, Human
ggugcacaagcuccaa

SEQ ID NO: 2008503 - RNA, 22 nt, Human
ggugauguugacaucacuggca

SEQ ID NO: 2008504 - RNA, 22 nt, Human
ggugcacgcuggggaagaauuu

SEQ ID NO: 2008505 - RNA, 23 nt, Human
ggugcacuuggggcacagggaga

SEQ ID NO: 2008506 - RNA, 19 nt, Human
ggugcagacaaucuucugu

SEQ ID NO: 2008507 - RNA, 14 nt, Human
ggucuggaggaccu

SEQ ID NO: 2008508 - RNA, 19 nt, Human
ggucuggaggaccugcccg

SEQ ID NO: 2008509 - RNA, 19 nt, Human
ggucugcugccucaggaau

SEQ ID NO: 2008510 - RNA, 16 nt, Human
aaagauuuugaucuca

SEQ ID NO: 2008511 - RNA, 22 nt, Human
aaagauuuugaucucacauuuu

SEQ ID NO: 2008512 - RNA, 14 nt, Human
ggucugugagaugc

SEQ ID NO: 2008513 - RNA, 24 nt, Human
ggucugugagaugcuagaacuccc

SEQ ID NO: 2008514 - RNA, 12 nt, Human
ggucuguucuuu

SEQ ID NO: 2008515 - RNA, 17 nt, Human
ggucuguucuuuccaaa

SEQ ID NO: 2008516 - RNA, 19 nt, Human
ggucuguucuuuccaaagu

SEQ ID NO: 2008517 - RNA, 21 nt, Human
ggucuugaacuccuggccuca

SEQ ID NO: 2008518 - RNA, 22 nt, Human
ggucuugaacuccuggccucaa

SEQ ID NO: 2008519 - RNA, 19 nt, Human
aaagcggacaucagcuggu

SEQ ID NO: 2008520 - RNA, 22 nt, Human
aaagcaccaaaauaagaaaaga

SEQ ID NO: 2008521 - RNA, 18 nt, Human
aaagcggguuauaaugaa

SEQ ID NO: 2008522 - RNA, 23 nt, Human
aaagcaccaaaauaagaaaagau

SEQ ID NO: 2008523 - RNA, 22 nt, Human
aaagcagugcaugcugucccuu

SEQ ID NO: 2008524 - RNA, 21 nt, Human
aaagcagugcaugcugucccu

SEQ ID NO: 2008525 - RNA, 16 nt, Human
aaagcuacuuauugua

SEQ ID NO: 2008526 - RNA, 17 nt, Human
aaagcuacuuauuguag

SEQ ID NO: 2008527 - RNA, 18 nt, Human
aaagcuaggccuggccag

SEQ ID NO: 2008528 - RNA, 20 nt, Human
aaagcacacucauccccuca

SEQ ID NO: 2008529 - RNA, 20 nt, Human
ggugcccagaaugaggcugc

SEQ ID NO: 2008530 - RNA, 16 nt, Human
ggugccaucagugccc

SEQ ID NO: 2008531 - RNA, 22 nt, Human
ggugccaugucagcgcucuggu

SEQ ID NO: 2008532 - RNA, 17 nt, Human
aaagcagugcaugcugu

SEQ ID NO: 2008533 - RNA, 18 nt, Human
aaagcaccaaaauaagaa

SEQ ID NO: 2008534 - RNA, 19 nt, Human
aaagcaccaaaauaagaaa

SEQ ID NO: 2008535 - RNA, 20 nt, Human
aaagcaccaaaauaagaaaa

SEQ ID NO: 2008536 - RNA, 21 nt, Human
aaagcaccaaaauaagaaaag

SEQ ID NO: 2008537 - RNA, 13 nt, Human
aaagcacaaagga

SEQ ID NO: 2008538 - RNA, 16 nt, Human
aaagcaccaaaauaag

SEQ ID NO: 2008539 - RNA, 17 nt, Human
aaagcaccaaaauaaga

SEQ ID NO: 2008540 - RNA, 11 nt, Human
aaaggaaagag

SEQ ID NO: 2008541 - RNA, 13 nt, Human
aaaggaauuuaaa

SEQ ID NO: 2008542 - RNA, 19 nt, Human
aaagcuagucaacaguacc

SEQ ID NO: 2008543 - RNA, 13 nt, Human
aaagcuucugugg

SEQ ID NO: 2008544 - RNA, 13 nt, Human
aaagcuucccucc

SEQ ID NO: 2008545 - RNA, 16 nt, Human
aaagcuucccucccug

SEQ ID NO: 2008546 - RNA, 20 nt, Human
aaagcuucccucccugcugu

SEQ ID NO: 2008547 - RNA, 12 nt, Human
aaagcuucugug

SEQ ID NO: 2008548 - RNA, 14 nt, Human
aaagagacaggcag

SEQ ID NO: 2008549 - RNA, 12 nt, Human
aaagagaaaaga

SEQ ID NO: 2008550 - RNA, 13 nt, Human
aaagagaaaagaa

SEQ ID NO: 2008551 - RNA, 14 nt, Human
aaagagaaaagaaa

SEQ ID NO: 2008552 - RNA, 19 nt, Human
aaagacuuuuccaacccuc

SEQ ID NO: 2008553 - RNA, 15 nt, Human
aaagacuguacaaag

SEQ ID NO: 2008554 - RNA, 14 nt, Human
aaagacaaauagua

SEQ ID NO: 2008555 - RNA, 17 nt, Human
aaagaauggaaggugga

SEQ ID NO: 2008556 - RNA, 13 nt, Human
aaagaauguaaag

SEQ ID NO: 2008557 - RNA, 13 nt, Human
aaagaauuuguca

SEQ ID NO: 2008558 - RNA, 16 nt, Human
aaagaauuuuuggugu

SEQ ID NO: 2008559 - RNA, 11 nt, Human
aaagacaaaua

SEQ ID NO: 2008560 - RNA, 12 nt, Human
aaagacaaauag

SEQ ID NO: 2008561 - RNA, 18 nt, Human
aaagaggcuaugugagca

SEQ ID NO: 2008562 - RNA, 13 nt, Human
aaagaggcuaugu

SEQ ID NO: 2008563 - RNA, 15 nt, Human
aaagaugagugagca

SEQ ID NO: 2008564 - RNA, 20 nt, Human
aaagaggcaguugcccagcc

SEQ ID NO: 2008565 - RNA, 21 nt, Human
aaagaggccaaacaggcccuc

SEQ ID NO: 2008566 - RNA, 16 nt, Human
aaagauguucuggaua

SEQ ID NO: 2008567 - RNA, 12 nt, Human
aaagauguagca

SEQ ID NO: 2008568 - RNA, 14 nt, Human
aaagauguagcaaa

SEQ ID NO: 2008569 - RNA, 15 nt, Human
aaagauguagcaaac

SEQ ID NO: 2008570 - RNA, 14 nt, Human
aaagaugcaaugua

SEQ ID NO: 2008571 - RNA, 20 nt, Human
aaagaugagcuuugucuacu

SEQ ID NO: 2008572 - RNA, 20 nt, Human
ggucaugaugcucuuuccca

SEQ ID NO: 2008573 - RNA, 18 nt, Human
ggucaugaugcucuuucc

SEQ ID NO: 2008574 - RNA, 19 nt, Human
ggucaugaugcucuuuccc

SEQ ID NO: 2008575 - RNA, 20 nt, Human
ggucauuaaggccacaucca

SEQ ID NO: 2008576 - RNA, 20 nt, Human
ggucauuuccauguaugcau

SEQ ID NO: 2008577 - RNA, 21 nt, Human
ggucauuuccauguaugcaua

SEQ ID NO: 2008578 - RNA, 19 nt, Human
gguccacccaggagccccg

SEQ ID NO: 2008579 - RNA, 23 nt, Human
gguauuggcuagagguucaaaga

SEQ ID NO: 2008580 - RNA, 18 nt, Human
gguauuaagauuauaauu

SEQ ID NO: 2008581 - RNA, 18 nt, Human
gguauaaguggugugugu

SEQ ID NO: 2008582 - RNA, 13 nt, Human
gguaguucaagaa

SEQ ID NO: 2008583 - RNA, 14 nt, Human
gguaguucaagaaa

SEQ ID NO: 2008584 - RNA, 19 nt, Human
gguaguucaagaaaugaag

SEQ ID NO: 2008585 - RNA, 22 nt, Human
gguaguucaagaaaugaagagc

SEQ ID NO: 2008586 - RNA, 13 nt, Human
gguaguuucugug

SEQ ID NO: 2008587 - RNA, 14 nt, Human
gguagucaaaggca

SEQ ID NO: 2008588 - RNA, 22 nt, Human
aaacuguacuuugauucacaug

SEQ ID NO: 2008589 - RNA, 12 nt, Human
aaacuguacuuu

SEQ ID NO: 2008590 - RNA, 14 nt, Human
aaacuguacuuuga

SEQ ID NO: 2008591 - RNA, 15 nt, Human
aaacuguacuuugau

SEQ ID NO: 2008592 - RNA, 18 nt, Human
aaacuguacuuugauuca

SEQ ID NO: 2008593 - RNA, 20 nt, Human
aaacuguacuuugauucaca

SEQ ID NO: 2008594 - RNA, 21 nt, Human
aaacuguacuuugauucacau

SEQ ID NO: 2008595 - RNA, 14 nt, Human
aaacuuuaccuuuu

SEQ ID NO: 2008596 - RNA, 16 nt, Human
aaacuuguucuuccaa

SEQ ID NO: 2008597 - RNA, 15 nt, Human
aaacuuguugaauuu

SEQ ID NO: 2008598 - RNA, 12 nt, Human
ggucccacccca

SEQ ID NO: 2008599 - RNA, 20 nt, Human
gguccacccaggagccccga

SEQ ID NO: 2008600 - RNA, 22 nt, Human
gguccacccaggagccccgagg

SEQ ID NO: 2008601 - RNA, 20 nt, Human
gguccacuuuuccaguauuu

SEQ ID NO: 2008602 - RNA, 23 nt, Human
ggggcccugccuccuuugugagg

SEQ ID NO: 2008603 - RNA, 19 nt, Human
ggggcccugccuccuuugu

SEQ ID NO: 2008604 - RNA, 16 nt, Human
ggggcccugccuccuu

SEQ ID NO: 2008605 - RNA, 19 nt, Human
ggggccaguuggucccccu

SEQ ID NO: 2008606 - RNA, 17 nt, Human
ggggccaguuggucccc

SEQ ID NO: 2008607 - RNA, 16 nt, Human
ggggccaggcuggguc

SEQ ID NO: 2008608 - RNA, 14 nt, Human
ggggccaggcuggg

SEQ ID NO: 2008609 - RNA, 13 nt, Human
ggggccaggcugg

SEQ ID NO: 2008610 - RNA, 24 nt, Human
ggggaaaaucagccugcuccagcu

SEQ ID NO: 2008611 - RNA, 16 nt, Human
ggggaacguucucuuu

SEQ ID NO: 2008612 - RNA, 21 nt, Human
ggggaaccugccaugccagga

SEQ ID NO: 2008613 - RNA, 22 nt, Human
ggggaaccugccaugccaggaa

SEQ ID NO: 2008614 - RNA, 17 nt, Human
ggggaaaggcaaggucc

SEQ ID NO: 2008615 - RNA, 22 nt, Human
ggggaaaggcaagguccggccc

SEQ ID NO: 2008616 - RNA, 17 nt, Human
ggggaccucaggccugg

SEQ ID NO: 2008617 - RNA, 16 nt, Human
ggggaccucaggccug

SEQ ID NO: 2008618 - RNA, 15 nt, Human
ggggaccucaggccu

SEQ ID NO: 2008619 - RNA, 13 nt, Human
ggggaccucaggc

SEQ ID NO: 2008620 - RNA, 15 nt, Human
aaacaauaaagcaau

SEQ ID NO: 2008621 - RNA, 19 nt, Human
aaacaagucagucauucag

SEQ ID NO: 2008622 - RNA, 15 nt, Human
aaacaagaaugaagg

SEQ ID NO: 2008623 - RNA, 23 nt, Human
aaacaagaaugaagguuuuugua

SEQ ID NO: 2008624 - RNA, 12 nt, Human
aaacaagcauau

SEQ ID NO: 2008625 - RNA, 15 nt, Human
aaacaagcauauaaa

SEQ ID NO: 2008626 - RNA, 18 nt, Human
aaacaagcauauaaaaug

SEQ ID NO: 2008627 - RNA, 20 nt, Human
aaacaagcauauaaaauggc

SEQ ID NO: 2008628 - RNA, 16 nt, Human
aaacaugcuacacacu

SEQ ID NO: 2008629 - RNA, 22 nt, Human
aaacaugcuacacacugcaugu

SEQ ID NO: 2008630 - RNA, 16 nt, Human
aaacauacgugugcau

SEQ ID NO: 2008631 - RNA, 14 nt, Human
aaaauauguauuaa

SEQ ID NO: 2008632 - RNA, 20 nt, Human
aaaauaugucccagaaaugu

SEQ ID NO: 2008633 - RNA, 12 nt, Human
aaaauaugugaa

SEQ ID NO: 2008634 - RNA, 13 nt, Human
aaaauaugugaag

SEQ ID NO: 2008635 - RNA, 18 nt, Human
aaaauaugugaaggaccu

SEQ ID NO: 2008636 - RNA, 12 nt, Human
aaaauggaauac

SEQ ID NO: 2008637 - RNA, 21 nt, Human
aaaauggacguguuaugacuc

SEQ ID NO: 2008638 - RNA, 19 nt, Human
aaaauggcaacaaacugca

SEQ ID NO: 2008639 - RNA, 14 nt, Human
aaaauguacaugua

SEQ ID NO: 2008640 - RNA, 21 nt, Human
aaaauguaggguuauaauaau

SEQ ID NO: 2008641 - RNA, 22 nt, Human
aaaauguacauguauuaaauua

SEQ ID NO: 2008642 - RNA, 15 nt, Human
aaaauguacauguau

SEQ ID NO: 2008643 - RNA, 16 nt, Human
aaaauguacauguauu

SEQ ID NO: 2008644 - RNA, 18 nt, Human
aaaauguacauguauuaa

SEQ ID NO: 2008645 - RNA, 21 nt, Human
aaaauguacauguauuaaauu

SEQ ID NO: 2008646 - RNA, 19 nt, Human
aaaauuuuuaaucuuuaau

SEQ ID NO: 2008647 - RNA, 19 nt, Human
aaaauuuaaaaagcccaac

SEQ ID NO: 2008648 - RNA, 12 nt, Human
aaacaaaaccaa

SEQ ID NO: 2008649 - RNA, 13 nt, Human
aaacaaaaccaaa

SEQ ID NO: 2008650 - RNA, 19 nt, Human
aaacaaaagcugaacacau

SEQ ID NO: 2008651 - RNA, 23 nt, Human
aaacaaaagcugaacacauuucu

SEQ ID NO: 2008652 - RNA, 16 nt, Human
aaaauuuuuaaucuuu

SEQ ID NO: 2008653 - RNA, 15 nt, Human
aaaauuuuuaaucuu

SEQ ID NO: 2008654 - RNA, 18 nt, Human
aaaauuuaaaaagcccaa

SEQ ID NO: 2008655 - RNA, 16 nt, Human
aaaauugugauguguc

SEQ ID NO: 2008656 - RNA, 12 nt, Human
aaacaaaaggca

SEQ ID NO: 2008657 - RNA, 13 nt, Human
aaacaaagaaauu

SEQ ID NO: 2008658 - RNA, 18 nt, Human
aaacaagaccacguuucu

SEQ ID NO: 2008659 - RNA, 12 nt, Human
aaacaagaauga

SEQ ID NO: 2008660 - RNA, 20 nt, Human
aaacugggcuggaagauauu

SEQ ID NO: 2008661 - RNA, 16 nt, Human
aaacuggauuaaacuu

SEQ ID NO: 2008662 - RNA, 21 nt, Human
aaacugcccccucugcccugc

SEQ ID NO: 2008663 - RNA, 13 nt, Human
aaacugcccccuc

SEQ ID NO: 2008664 - RNA, 17 nt, Human
aaacugcccccucugcc

SEQ ID NO: 2008665 - RNA, 19 nt, Human
aaacugcccccucugcccu

SEQ ID NO: 2008666 - RNA, 20 nt, Human
aaacugcccccucugcccug

SEQ ID NO: 2008667 - RNA, 12 nt, Human
aaacugcccccu

SEQ ID NO: 2008668 - RNA, 11 nt, Human
aaacugccccc

SEQ ID NO: 2008669 - RNA, 15 nt, Human
aaacuccagaugcca

SEQ ID NO: 2008670 - RNA, 22 nt, Human
aaacuccagaugccacaaugga

SEQ ID NO: 2008671 - RNA, 15 nt, Human
aaacucauuuugcuu

SEQ ID NO: 2008672 - RNA, 20 nt, Human
aaacguggcugcuucaagga

SEQ ID NO: 2008673 - RNA, 17 nt, Human
aaacguggcugcuucaa

SEQ ID NO: 2008674 - RNA, 16 nt, Human
aaacguggcugcuuca

SEQ ID NO: 2008675 - RNA, 15 nt, Human
aaacgucuuaaauau

SEQ ID NO: 2008676 - RNA, 12 nt, Human
aaacgugaaaau

SEQ ID NO: 2008677 - RNA, 14 nt, Human
aaaccaccagaagc

SEQ ID NO: 2008678 - RNA, 21 nt, Human
aaaccacauuggagauguuua

SEQ ID NO: 2008679 - RNA, 23 nt, Human
aaacggccucacuaggcuucugg

SEQ ID NO: 2008680 - RNA, 16 nt, Human
aaacgcuucaguuguu

SEQ ID NO: 2008681 - RNA, 14 nt, Human
aaacauuaaaauau

SEQ ID NO: 2008682 - RNA, 19 nt, Human
aaacauuggaagcagguua

SEQ ID NO: 2008683 - RNA, 22 nt, Human
aaacauuggaagcagguuaaau

SEQ ID NO: 2008684 - RNA, 13 nt, Human
aaacauugcuuuu

SEQ ID NO: 2008685 - RNA, 16 nt, Human
aaacauugcuuuuaaa

SEQ ID NO: 2008686 - RNA, 13 nt, Human
aaacauuggaagc

SEQ ID NO: 2008687 - RNA, 17 nt, Human
aaacauuggaagcaggu

SEQ ID NO: 2008688 - RNA, 14 nt, Human
aaaccaagccgugg

SEQ ID NO: 2008689 - RNA, 19 nt, Human
aaaccaaaaguuauuaaaa

SEQ ID NO: 2008690 - RNA, 20 nt, Human
aaaccaaaaguuauuaaaau

SEQ ID NO: 2008691 - RNA, 22 nt, Human
aaaccaaaaguuauuaaaauug

SEQ ID NO: 2008692 - RNA, 14 nt, Human
aaaccaaagaagaa

SEQ ID NO: 2008693 - RNA, 15 nt, Human
aaaccaaagaagaaa

SEQ ID NO: 2008694 - RNA, 23 nt, Human
aaacauguuucuuuguaaugaaa

SEQ ID NO: 2008695 - RNA, 22 nt, Human
aaacauguuucuuuguaaugaa

SEQ ID NO: 2008696 - RNA, 19 nt, Human
aaacauguuucuuuguaau

SEQ ID NO: 2008697 - RNA, 20 nt, Human
aaacauguugccaaaauggu

SEQ ID NO: 2008698 - RNA, 22 nt, Human
aaacauguugccaaaauggugg

SEQ ID NO: 2008699 - RNA, 22 nt, Human
gggucucacuauguugcccagg

SEQ ID NO: 2008700 - RNA, 17 nt, Human
gggucaggccgggcaga

SEQ ID NO: 2008701 - RNA, 18 nt, Human
gggucaggccgggcagag

SEQ ID NO: 2008702 - RNA, 21 nt, Human
gggucaggccgggcagagcac

SEQ ID NO: 2008703 - RNA, 12 nt, Human
gggucucacucu

SEQ ID NO: 2008704 - RNA, 23 nt, Human
gggucucacuauguugcccaggc

SEQ ID NO: 2008705 - RNA, 23 nt, Human
ggggucuguguguuuaugugugu

SEQ ID NO: 2008706 - RNA, 23 nt, Human
ggguagcuguaaggcaugaagga

SEQ ID NO: 2008707 - RNA, 20 nt, Human
ggguaucaggugcugccauc

SEQ ID NO: 2008708 - RNA, 14 nt, Human
gggucagaagagag

SEQ ID NO: 2008709 - RNA, 19 nt, Human
ggggucucucacagacagg

SEQ ID NO: 2008710 - RNA, 23 nt, Human
ggggucucucacagacaggaccc

SEQ ID NO: 2008711 - RNA, 15 nt, Human
ggggucucucacaga

SEQ ID NO: 2008712 - RNA, 17 nt, Human
ggggucucucacagaca

SEQ ID NO: 2008713 - RNA, 15 nt, Human
ggggaagaauaauuu

SEQ ID NO: 2008714 - RNA, 20 nt, Human
ggggccuuugggugcuguuu

SEQ ID NO: 2008715 - RNA, 16 nt, Human
gacgcucucuggccuu

SEQ ID NO: 2008716 - RNA, 17 nt, Human
gacgcucucuggccuuc

SEQ ID NO: 2008717 - RNA, 15 nt, Human
gacgcucucuggccu

SEQ ID NO: 2008718 - RNA, 19 nt, Human
gacgcuacccgggaagggg

SEQ ID NO: 2008719 - RNA, 18 nt, Human
gacgcuacccgggaaggg

SEQ ID NO: 2008720 - RNA, 16 nt, Human
gacgcuacccgggaag

SEQ ID NO: 2008721 - RNA, 18 nt, Human
gacgccaucccagcccca

SEQ ID NO: 2008722 - RNA, 17 nt, Human
gacgccaucccagcccc

SEQ ID NO: 2008723 - RNA, 19 nt, Human
gaccugaggacauggcuuc

SEQ ID NO: 2008724 - RNA, 22 nt, Human
gaccugaggacauggcuucuga

SEQ ID NO: 2008725 - RNA, 16 nt, Human
gacgccaucccagccc

SEQ ID NO: 2008726 - RNA, 14 nt, Human
gaccugaggcccuu

SEQ ID NO: 2008727 - RNA, 13 nt, Human
gaccugaggcccu

SEQ ID NO: 2008728 - RNA, 11 nt, Human
gaccugaggcc

SEQ ID NO: 2008729 - RNA, 12 nt, Human
gaccucucccag

SEQ ID NO: 2008730 - RNA, 18 nt, Human
gaccucuagcccugcccg

SEQ ID NO: 2008731 - RNA, 14 nt, Human
gaccucucccaggg

SEQ ID NO: 2008732 - RNA, 14 nt, Human
gaccucugcagcaa

SEQ ID NO: 2008733 - RNA, 20 nt, Human
gaccaucccugaaggccccg

SEQ ID NO: 2008734 - RNA, 19 nt, Human
gaccaucuggaauugguuu

SEQ ID NO: 2008735 - RNA, 11 nt, Human
gacuuuauuag

SEQ ID NO: 2008736 - RNA, 13 nt, Human
gacuuuauuauuu

SEQ ID NO: 2008737 - RNA, 14 nt, Human
gacuuuauuauuua

SEQ ID NO: 2008738 - RNA, 15 nt, Human
gacuuuauuauuuau

SEQ ID NO: 2008739 - RNA, 21 nt, Human
gacuuucaaaguggaugcaau

SEQ ID NO: 2008740 - RNA, 22 nt, Human
gacuuuagccuaccuaacccag

SEQ ID NO: 2008741 - RNA, 15 nt, Human
gacuuuagcuuucug

SEQ ID NO: 2008742 - RNA, 15 nt, Human
gacucagaaacucca

SEQ ID NO: 2008743 - RNA, 16 nt, Human
gacucagaaacuccau

SEQ ID NO: 2008744 - RNA, 15 nt, Human
gacucaccuccccca

SEQ ID NO: 2008745 - RNA, 22 nt, Human
gacucaccucccccaucucuuc

SEQ ID NO: 2008746 - RNA, 12 nt, Human
gacucugccucc

SEQ ID NO: 2008747 - RNA, 16 nt, Human
gacucugccuccucuu

SEQ ID NO: 2008748 - RNA, 19 nt, Human
gacucugucucaaaaaaac

SEQ ID NO: 2008749 - RNA, 10 nt, Human
gacucuuccc

SEQ ID NO: 2008750 - RNA, 18 nt, Human
gacucuugacucuugccu

SEQ ID NO: 2008751 - RNA, 16 nt, Human
gacucuugaguuguuu

SEQ ID NO: 2008752 - RNA, 14 nt, Human
gacugaauuaugaa

SEQ ID NO: 2008753 - RNA, 14 nt, Human
gacugaauuucuuu

SEQ ID NO: 2008754 - RNA, 20 nt, Human
gacugaauuaugaaacuuuu

SEQ ID NO: 2008755 - RNA, 18 nt, Human
gacuguacuccucccagg

SEQ ID NO: 2008756 - RNA, 23 nt, Human
gacuguacuccucccaggcgccc

SEQ ID NO: 2008757 - RNA, 12 nt, Human
gacugaauucca

SEQ ID NO: 2008758 - RNA, 13 nt, Human
gacugaauuccaa

SEQ ID NO: 2008759 - RNA, 14 nt, Human
gacuuguuuuuguu

SEQ ID NO: 2008760 - RNA, 22 nt, Human
gacugugugcucaggagcccug

SEQ ID NO: 2008761 - RNA, 19 nt, Human
gacugugauuugaauccag

SEQ ID NO: 2008762 - RNA, 16 nt, Human
gacuguggagacugcu

SEQ ID NO: 2008763 - RNA, 18 nt, Human
gacuguggagacugcucc

SEQ ID NO: 2008764 - RNA, 19 nt, Human
gacuguggagacugcuccu

SEQ ID NO: 2008765 - RNA, 21 nt, Human
gacagaaagcagaacagugau

SEQ ID NO: 2008766 - RNA, 17 nt, Human
gacagcccgggcucugc

SEQ ID NO: 2008767 - RNA, 14 nt, Human
gacacagcucuucu

SEQ ID NO: 2008768 - RNA, 16 nt, Human
gacacagcucuucucc

SEQ ID NO: 2008769 - RNA, 13 nt, Human
gacacagcucuuc

SEQ ID NO: 2008770 - RNA, 17 nt, Human
gacacagcucuucucca

SEQ ID NO: 2008771 - RNA, 22 nt, Human
gacacagcucuucuccaggcug

SEQ ID NO: 2008772 - RNA, 23 nt, Human
gacacagcucuucuccaggcugu

SEQ ID NO: 2008773 - RNA, 12 nt, Human
gacacaggcccg

SEQ ID NO: 2008774 - RNA, 17 nt, Human
gacauuucuaauuccug

SEQ ID NO: 2008775 - RNA, 19 nt, Human
gacauuguuggccaaagcc

SEQ ID NO: 2008776 - RNA, 19 nt, Human
gacauuguagagcuucugg

SEQ ID NO: 2008777 - RNA, 18 nt, Human
gacauugauuugauuuuu

SEQ ID NO: 2008778 - RNA, 14 nt, Human
gacauugcggacag

SEQ ID NO: 2008779 - RNA, 15 nt, Human
gacauugcggacagc

SEQ ID NO: 2008780 - RNA, 19 nt, Human
gacagcccgggcucugccu

SEQ ID NO: 2008781 - RNA, 18 nt, Human
gacagcccgggcucugcc

SEQ ID NO: 2008782 - RNA, 20 nt, Human
gacagcccgggcucugccuc

SEQ ID NO: 2008783 - RNA, 21 nt, Human
gacagugagacucugucucag

SEQ ID NO: 2008784 - RNA, 18 nt, Human
gaccagggauuuccauga

SEQ ID NO: 2008785 - RNA, 17 nt, Human
gaccagcuuggcucagg

SEQ ID NO: 2008786 - RNA, 19 nt, Human
gaccaucccugaaggcccc

SEQ ID NO: 2008787 - RNA, 18 nt, Human
gaccaucccugaaggccc

SEQ ID NO: 2008788 - RNA, 13 nt, Human
gaccaucccugaa

SEQ ID NO: 2008789 - RNA, 12 nt, Human
gaccaucccuga

SEQ ID NO: 2008790 - RNA, 23 nt, Human
gaccagggacagauccagcaggc

SEQ ID NO: 2008791 - RNA, 20 nt, Human
gaccagggauuuccaugaug

SEQ ID NO: 2008792 - RNA, 13 nt, Human
gaccauacuaauu

SEQ ID NO: 2008793 - RNA, 23 nt, Human
gaccaucauuucaccugcugcuu

SEQ ID NO: 2008794 - RNA, 15 nt, Human
gaagcagaggaagga

SEQ ID NO: 2008795 - RNA, 23 nt, Human
gaagcacaccaaucuuacuuugu

SEQ ID NO: 2008796 - RNA, 23 nt, Human
gaagauuuugaaauuuuuauuaa

SEQ ID NO: 2008797 - RNA, 16 nt, Human
gaagacaaugacuuac

SEQ ID NO: 2008798 - RNA, 23 nt, Human
gaagacaaugugaaaagaaaaau

SEQ ID NO: 2008799 - RNA, 22 nt, Human
gaagacaaugacuuacuguaca

SEQ ID NO: 2008800 - RNA, 23 nt, Human
gaagcaacccaaauguucaucaa

SEQ ID NO: 2008801 - RNA, 20 nt, Human
gaagcaaugcuucaucccuu

SEQ ID NO: 2008802 - RNA, 20 nt, Human
gaagcacaugccucucucag

SEQ ID NO: 2008803 - RNA, 17 nt, Human
gaagcacaugccucucu

SEQ ID NO: 2008804 - RNA, 15 nt, Human
gaagcacaugccucu

SEQ ID NO: 2008805 - RNA, 22 nt, Human
gaagcacaccaaucuuacuuug

SEQ ID NO: 2008806 - RNA, 20 nt, Human
gaacucugacaacagacuuc

SEQ ID NO: 2008807 - RNA, 17 nt, Human
gaacucgguguccccac

SEQ ID NO: 2008808 - RNA, 20 nt, Human
gaacucgguguccccaccau

SEQ ID NO: 2008809 - RNA, 16 nt, Human
gaacucugccugcccu

SEQ ID NO: 2008810 - RNA, 18 nt, Human
gaacugacauuaaaauaa

SEQ ID NO: 2008811 - RNA, 17 nt, Human
gaacugcugggcuuggc

SEQ ID NO: 2008812 - RNA, 20 nt, Human
gaacugcugggcuuggcagc

SEQ ID NO: 2008813 - RNA, 16 nt, Human
gaacugcuuucuuucg

SEQ ID NO: 2008814 - RNA, 11 nt, Human
gaacuggcugc

SEQ ID NO: 2008815 - RNA, 12 nt, Human
gaacuggcugca

SEQ ID NO: 2008816 - RNA, 16 nt, Human
gaacugggcauauuuc

SEQ ID NO: 2008817 - RNA, 19 nt, Human
gaacugggcauauuucuaa

SEQ ID NO: 2008818 - RNA, 20 nt, Human
gaagaaugcaugcuuuccau

SEQ ID NO: 2008819 - RNA, 14 nt, Human
gaagaaugcaugcu

SEQ ID NO: 2008820 - RNA, 14 nt, Human
gaagaaugaagccc

SEQ ID NO: 2008821 - RNA, 12 nt, Human
gaagaauuuaaa

SEQ ID NO: 2008822 - RNA, 13 nt, Human
gaagaauuuaaag

SEQ ID NO: 2008823 - RNA, 16 nt, Human
gaaguuauguguaugu

SEQ ID NO: 2008824 - RNA, 20 nt, Human
gaaguuauguguaugugagu

SEQ ID NO: 2008825 - RNA, 15 nt, Human
gaaguucaagaucaa

SEQ ID NO: 2008826 - RNA, 13 nt, Human
gaaguuauauuuc

SEQ ID NO: 2008827 - RNA, 21 nt, Human
gaaguuauauuuccuauacca

SEQ ID NO: 2008828 - RNA, 18 nt, Human
gaaguucugccucugaug

SEQ ID NO: 2008829 - RNA, 14 nt, Human
gaaguucuuugauu

SEQ ID NO: 2008830 - RNA, 21 nt, Human
gaaguugacucugcucuugca

SEQ ID NO: 2008831 - RNA, 17 nt, Human
gaaguucugccucugau

SEQ ID NO: 2008832 - RNA, 16 nt, Human
gaaguugaucucccca

SEQ ID NO: 2008833 - RNA, 19 nt, Human
gaauagggcuaggaauaua

SEQ ID NO: 2008834 - RNA, 14 nt, Human
gaaguuuaaauauu

SEQ ID NO: 2008835 - RNA, 21 nt, Human
gaagugugggucugugugugu

SEQ ID NO: 2008836 - RNA, 24 nt, Human
gaagugugggucugugugugugua

SEQ ID NO: 2008837 - RNA, 18 nt, Human
gaaggggacugccaccuc

SEQ ID NO: 2008838 - RNA, 19 nt, Human
gaaggggacugccaccucc

SEQ ID NO: 2008839 - RNA, 15 nt, Human
gaaggggacugccac

SEQ ID NO: 2008840 - RNA, 22 nt, Human
gaaggggagauaaggguaucug

SEQ ID NO: 2008841 - RNA, 15 nt, Human
gaaguuaaagggaag

SEQ ID NO: 2008842 - RNA, 21 nt, Human
gaaguuaaagggaagaaaaca

SEQ ID NO: 2008843 - RNA, 20 nt, Human
gaaguuaaaagcacaaagga

SEQ ID NO: 2008844 - RNA, 12 nt, Human
gaaguuaaaggg

SEQ ID NO: 2008845 - RNA, 21 nt, Human
gaaguuacuguuacuugauaa

SEQ ID NO: 2008846 - RNA, 11 nt, Human
gaaguuagccu

SEQ ID NO: 2008847 - RNA, 18 nt, Human
gaaguuagccuuuaucua

SEQ ID NO: 2008848 - RNA, 21 nt, Human
gaaguuagccuuuaucuacca

SEQ ID NO: 2008849 - RNA, 22 nt, Human
gaaguuagccuuuaucuaccaa

SEQ ID NO: 2008850 - RNA, 21 nt, Human
gaauaugggagaaauagugug

SEQ ID NO: 2008851 - RNA, 15 nt, Human
gaauauugcugaugg

SEQ ID NO: 2008852 - RNA, 14 nt, Human
gaauauugcugaug

SEQ ID NO: 2008853 - RNA, 20 nt, Human
gaauauuagugaccucagcu

SEQ ID NO: 2008854 - RNA, 13 nt, Human
gaauauuauauuu

SEQ ID NO: 2008855 - RNA, 16 nt, Human
gaauauuauauuugga

SEQ ID NO: 2008856 - RNA, 19 nt, Human
gaauauuauauuuggaugc

SEQ ID NO: 2008857 - RNA, 24 nt, Human
gaauauuauauuuggaugcagagu

SEQ ID NO: 2008858 - RNA, 20 nt, Human
gaauauugcugauggugcaa

SEQ ID NO: 2008859 - RNA, 19 nt, Human
gaauauugcugauggugca

SEQ ID NO: 2008860 - RNA, 20 nt, Human
gaagcuaucguaaaauuaag

SEQ ID NO: 2008861 - RNA, 19 nt, Human
gaagcuccgcuuucuaccc

SEQ ID NO: 2008862 - RNA, 17 nt, Human
gaaggccccgcccaggc

SEQ ID NO: 2008863 - RNA, 22 nt, Human
gaagcuccgcuuucuacccagc

SEQ ID NO: 2008864 - RNA, 22 nt, Human
gaaggcuggguucugauccuag

SEQ ID NO: 2008865 - RNA, 20 nt, Human
gaaggcuggguucugauccu

SEQ ID NO: 2008866 - RNA, 19 nt, Human
gaaggccccgcccaggcuu

SEQ ID NO: 2008867 - RNA, 18 nt, Human
gaaggccccgcccaggcu

SEQ ID NO: 2008868 - RNA, 21 nt, Human
gaaggcucgagcaugccugga

SEQ ID NO: 2008869 - RNA, 19 nt, Human
gaaggcuggguucugaucc

SEQ ID NO: 2008870 - RNA, 15 nt, Human
gaaggcuggguucug

SEQ ID NO: 2008871 - RNA, 20 nt, Human
gagccuuccaggggugggac

SEQ ID NO: 2008872 - RNA, 23 nt, Human
gagccuuccaggggugggacacc

SEQ ID NO: 2008873 - RNA, 13 nt, Human
gagccuugaacuu

SEQ ID NO: 2008874 - RNA, 21 nt, Human
gagcgcccacuagacccacug

SEQ ID NO: 2008875 - RNA, 14 nt, Human
gagcgcagccgccu

SEQ ID NO: 2008876 - RNA, 22 nt, Human
gagcgcagccgccuucacagca

SEQ ID NO: 2008877 - RNA, 15 nt, Human
gagcugcugccauga

SEQ ID NO: 2008878 - RNA, 16 nt, Human
gagcuggacucccuca

SEQ ID NO: 2008879 - RNA, 13 nt, Human
gagcugcuucccc

SEQ ID NO: 2008880 - RNA, 16 nt, Human
gagcugcuuuuuuuga

SEQ ID NO: 2008881 - RNA, 18 nt, Human
gagcugcuuuuuuugaaa

SEQ ID NO: 2008882 - RNA, 21 nt, Human
gagcuggacaguggagugcaa

SEQ ID NO: 2008883 - RNA, 13 nt, Human
gaggaccugcccg

SEQ ID NO: 2008884 - RNA, 15 nt, Human
gaggacgcucucugg

SEQ ID NO: 2008885 - RNA, 14 nt, Human
gaggcagggucuca

SEQ ID NO: 2008886 - RNA, 21 nt, Human
gaggcaguugcccagccucuu

SEQ ID NO: 2008887 - RNA, 15 nt, Human
gaggcaguuugagga

SEQ ID NO: 2008888 - RNA, 21 nt, Human
gaggcaguucgaccagccagg

SEQ ID NO: 2008889 - RNA, 15 nt, Human
gaggcaguugcccag

SEQ ID NO: 2008890 - RNA, 18 nt, Human
gaggcaguugcccagccu

SEQ ID NO: 2008891 - RNA, 20 nt, Human
gaggcaguugcccagccucu

SEQ ID NO: 2008892 - RNA, 22 nt, Human
gaggccaaggugggaggauugc

SEQ ID NO: 2008893 - RNA, 17 nt, Human
gaggccaaggugggagg

SEQ ID NO: 2008894 - RNA, 13 nt, Human
gaggcaggucccc

SEQ ID NO: 2008895 - RNA, 16 nt, Human
gaggcagguccccaga

SEQ ID NO: 2008896 - RNA, 12 nt, Human
gaggcagguccc

SEQ ID NO: 2008897 - RNA, 15 nt, Human
gaggcagggucucac

SEQ ID NO: 2008898 - RNA, 12 nt, Human
gaggcuccacuu

SEQ ID NO: 2008899 - RNA, 23 nt, Human
gaggcuccacuuggucugugaga

SEQ ID NO: 2008900 - RNA, 19 nt, Human
gaggcuccacuuggucugu

SEQ ID NO: 2008901 - RNA, 18 nt, Human
gaggcuccacuuggucug

SEQ ID NO: 2008902 - RNA, 14 nt, Human
gaggcucagauugu

SEQ ID NO: 2008903 - RNA, 15 nt, Human
gaggcucaaauuuug

SEQ ID NO: 2008904 - RNA, 16 nt, Human
gaggcucaaauuuuga

SEQ ID NO: 2008905 - RNA, 18 nt, Human
gaggcuacuguaaggcaa

SEQ ID NO: 2008906 - RNA, 22 nt, Human
gaggcuagugugguguuuccug

SEQ ID NO: 2008907 - RNA, 19 nt, Human
gaggccagagacacaagcc

SEQ ID NO: 2008908 - RNA, 14 nt, Human
gaggccagagacac

SEQ ID NO: 2008909 - RNA, 13 nt, Human
gaggccagagaca

SEQ ID NO: 2008910 - RNA, 16 nt, Human
gaggcaguuugaggau

SEQ ID NO: 2008911 - RNA, 11 nt, Human
gaggccaccuc

SEQ ID NO: 2008912 - RNA, 12 nt, Human
gaggccaccucc

SEQ ID NO: 2008913 - RNA, 13 nt, Human
gaggccaccuccu

SEQ ID NO: 2008914 - RNA, 12 nt, Human
gaggggccucuu

SEQ ID NO: 2008915 - RNA, 18 nt, Human
gaggcugcagccaggcca

SEQ ID NO: 2008916 - RNA, 19 nt, Human
gaggcugcagccaggccac

SEQ ID NO: 2008917 - RNA, 15 nt, Human
gaggucgaggcagga

SEQ ID NO: 2008918 - RNA, 23 nt, Human
gaggugaccccagguuucuaugu

SEQ ID NO: 2008919 - RNA, 17 nt, Human
gaggugaaaaggccaag

SEQ ID NO: 2008920 - RNA, 15 nt, Human
gaggugaaaaggcca

SEQ ID NO: 2008921 - RNA, 16 nt, Human
gaggugaaaaggccaa

SEQ ID NO: 2008922 - RNA, 17 nt, Human
gagguggaagagggcug

SEQ ID NO: 2008923 - RNA, 20 nt, Human
gagguggaagagggcugcaa

SEQ ID NO: 2008924 - RNA, 17 nt, Human
gagucaccaagcccagu

SEQ ID NO: 2008925 - RNA, 16 nt, Human
gagucaccaagcccag

SEQ ID NO: 2008926 - RNA, 18 nt, Human
gagucagggagagcugaa

SEQ ID NO: 2008927 - RNA, 20 nt, Human
gagucagccucgcaggccuc

SEQ ID NO: 2008928 - RNA, 16 nt, Human
gagucagcuguuucua

SEQ ID NO: 2008929 - RNA, 22 nt, Human
gagucagaaguuucugccgcag

SEQ ID NO: 2008930 - RNA, 15 nt, Human
gagucagcuguuucu

SEQ ID NO: 2008931 - RNA, 12 nt, Human
gagucccaccuu

SEQ ID NO: 2008932 - RNA, 15 nt, Human
gagucagucgccuuu

SEQ ID NO: 2008933 - RNA, 18 nt, Human
gagugacagaggcagccc

SEQ ID NO: 2008934 - RNA, 20 nt, Human
gaguggagguuuauaguuaa

SEQ ID NO: 2008935 - RNA, 17 nt, Human
gaguugauucagcucug

SEQ ID NO: 2008936 - RNA, 16 nt, Human
gaguugauucagcucu

SEQ ID NO: 2008937 - RNA, 15 nt, Human
gaguugauucagcuc

SEQ ID NO: 2008938 - RNA, 13 nt, Human
gagugcaggccca

SEQ ID NO: 2008939 - RNA, 14 nt, Human
gagugcaggcccac

SEQ ID NO: 2008940 - RNA, 15 nt, Human
gagugcaggcccacc

SEQ ID NO: 2008941 - RNA, 21 nt, Human
gagugcaagccccugcuccag

SEQ ID NO: 2008942 - RNA, 23 nt, Human
gagugcaaaaggcuugcagaacu

SEQ ID NO: 2008943 - RNA, 20 nt, Human
gagugacagaggcagcccca

SEQ ID NO: 2008944 - RNA, 16 nt, Human
gaguuuaaauuguaau

SEQ ID NO: 2008945 - RNA, 13 nt, Human
gaguuguuuuugu

SEQ ID NO: 2008946 - RNA, 14 nt, Human
gaguuguuuuugua

SEQ ID NO: 2008947 - RNA, 16 nt, Human
gaguuguuuuuguaua

SEQ ID NO: 2008948 - RNA, 18 nt, Human
gaguuguuuuuguauauu

SEQ ID NO: 2008949 - RNA, 13 nt, Human
gaguuggcuggga

SEQ ID NO: 2008950 - RNA, 17 nt, Human
gaguuggaguagaaugu

SEQ ID NO: 2008951 - RNA, 20 nt, Human
gaguuggaguagaauguagu

SEQ ID NO: 2008952 - RNA, 22 nt, Human
gaguuguuacauuuuuaagugc

SEQ ID NO: 2008953 - RNA, 18 nt, Human
gaguugauucagcucugc

SEQ ID NO: 2008954 - RNA, 18 nt, Human
gauucuccugccucagcc

SEQ ID NO: 2008955 - RNA, 15 nt, Human
gauucuccugccuca

SEQ ID NO: 2008956 - RNA, 17 nt, Human
gauucuccugccucagc

SEQ ID NO: 2008957 - RNA, 15 nt, Human
gauuuauacucauuu

SEQ ID NO: 2008958 - RNA, 20 nt, Human
gauuuuuuacagcugccugc

SEQ ID NO: 2008959 - RNA, 12 nt, Human
gauuuauuaacu

SEQ ID NO: 2008960 - RNA, 18 nt, Human
gauucuuccucccucccu

SEQ ID NO: 2008961 - RNA, 17 nt, Human
gauucuuccucccuccc

SEQ ID NO: 2008962 - RNA, 12 nt, Human
gauuauuggaaa

SEQ ID NO: 2008963 - RNA, 20 nt, Human
gauuauaggcaccuaccacc

SEQ ID NO: 2008964 - RNA, 18 nt, Human
gauuauauaucccugaua

SEQ ID NO: 2008965 - RNA, 14 nt, Human
gauuauauuaugaa

SEQ ID NO: 2008966 - RNA, 17 nt, Human
gaugucagcaguugcug

SEQ ID NO: 2008967 - RNA, 21 nt, Human
gauguauguugaagccuuugu

SEQ ID NO: 2008968 - RNA, 15 nt, Human
gauguauuuugugag

SEQ ID NO: 2008969 - RNA, 16 nt, Human
gauguauuuugugagu

SEQ ID NO: 2008970 - RNA, 21 nt, Human
gauguauuuugugaguuuguu

SEQ ID NO: 2008971 - RNA, 20 nt, Human
gauguauguugaagccuuug

SEQ ID NO: 2008972 - RNA, 12 nt, Human
gaucugcugcag

SEQ ID NO: 2008973 - RNA, 21 nt, Human
gaugaucuaggaagacuuugg

SEQ ID NO: 2008974 - RNA, 15 nt, Human
gaugaucuaggaaga

SEQ ID NO: 2008975 - RNA, 19 nt, Human
gaugaguuuugggaaguua

SEQ ID NO: 2008976 - RNA, 16 nt, Human
gaugagugagcaugcc

SEQ ID NO: 2008977 - RNA, 17 nt, Human
gauguagaggagaaacu

SEQ ID NO: 2008978 - RNA, 18 nt, Human
gauguagaggagaaacug

SEQ ID NO: 2008979 - RNA, 12 nt, Human
gauguaaagaug

SEQ ID NO: 2008980 - RNA, 14 nt, Human
gauguagauuuauu

SEQ ID NO: 2008981 - RNA, 21 nt, Human
gauguagcaaacccugucaaa

SEQ ID NO: 2008982 - RNA, 15 nt, Human
gauguagauuuauuu

SEQ ID NO: 2008983 - RNA, 17 nt, Human
gauguagauuuauuuca

SEQ ID NO: 2008984 - RNA, 23 nt, Human
gcaccgggccacagagaaaguac

SEQ ID NO: 2008985 - RNA, 22 nt, Human
gcaccuaccaccacgcccggcu

SEQ ID NO: 2008986 - RNA, 21 nt, Human
gcaccuaccaccacgcccggc

SEQ ID NO: 2008987 - RNA, 22 nt, Human
gcacaucagcacgauuucuguu

SEQ ID NO: 2008988 - RNA, 23 nt, Human
gcacaucagcacgauuucuguuu

SEQ ID NO: 2008989 - RNA, 14 nt, Human
gcaccgggccacag

SEQ ID NO: 2008990 - RNA, 16 nt, Human
gcacuccccugcuggg

SEQ ID NO: 2008991 - RNA, 22 nt, Human
gcacuccccugcuggguguggc

SEQ ID NO: 2008992 - RNA, 13 nt, Human
gcacucagaagac

SEQ ID NO: 2008993 - RNA, 16 nt, Human
gcacucagaagacacu

SEQ ID NO: 2008994 - RNA, 17 nt, Human
gcacuccccugcugggu

SEQ ID NO: 2008995 - RNA, 17 nt, Human
gcacucagaagacacug

SEQ ID NO: 2008996 - RNA, 23 nt, Human
gauuuuuuuucccauuuagaaug

SEQ ID NO: 2008997 - RNA, 18 nt, Human
gcaagucagaauagaaau

SEQ ID NO: 2008998 - RNA, 13 nt, Human
gcaagugugaaua

SEQ ID NO: 2008999 - RNA, 16 nt, Human
gcaagugugaauacug

SEQ ID NO: 2009000 - RNA, 19 nt, Human
gcaagugugaauacugcuu

SEQ ID NO: 2009001 - RNA, 22 nt, Human
gcaagugugggggguccuucuc

SEQ ID NO: 2009002 - RNA, 12 nt, Human
gcaauauauuuu

SEQ ID NO: 2009003 - RNA, 14 nt, Human
gcaauauauuuugu

SEQ ID NO: 2009004 - RNA, 15 nt, Human
gcaauauauuuugua

SEQ ID NO: 2009005 - RNA, 17 nt, Human
gcaauauauuuuguaug

SEQ ID NO: 2009006 - RNA, 22 nt, Human
gcacaagcugcacccucaggca

SEQ ID NO: 2009007 - RNA, 18 nt, Human
gcaauauauuuuguaugc

SEQ ID NO: 2009008 - RNA, 19 nt, Human
gcaauauauuuuguaugca

SEQ ID NO: 2009009 - RNA, 20 nt, Human
gcaauauauuuuguaugcaa

SEQ ID NO: 2009010 - RNA, 14 nt, Human
gcaauauucucugu

SEQ ID NO: 2009011 - RNA, 17 nt, Human
gcaauauucucuguaca

SEQ ID NO: 2009012 - RNA, 19 nt, Human
gcaauauucucuguacaua

SEQ ID NO: 2009013 - RNA, 21 nt, Human
gcaauauucucuguacauauu

SEQ ID NO: 2009014 - RNA, 14 nt, Human
gcacacauuuuuua

SEQ ID NO: 2009015 - RNA, 16 nt, Human
gcacaccaaucuuacu

SEQ ID NO: 2009016 - RNA, 17 nt, Human
gcacaccaaucuuacuu

SEQ ID NO: 2009017 - RNA, 22 nt, Human
gcacaccaaucuuacuuuguaa

SEQ ID NO: 2009018 - RNA, 20 nt, Human
gcacaccaaucuuacuuugu

SEQ ID NO: 2009019 - RNA, 21 nt, Human
gcacaccaaucuuacuuugua

SEQ ID NO: 2009020 - RNA, 14 nt, Human
gcacaccgggcacu

SEQ ID NO: 2009021 - RNA, 23 nt, Human
gcacauagaaaguaaauaaaagg

SEQ ID NO: 2009022 - RNA, 19 nt, Human
gcacagugcaucucagccc

SEQ ID NO: 2009023 - RNA, 20 nt, Human
gcacagugcaucucagccca

SEQ ID NO: 2009024 - RNA, 21 nt, Human
gcacagugcaucucagcccac

SEQ ID NO: 2009025 - RNA, 15 nt, Human
cuucugacucuuccc

SEQ ID NO: 2009026 - RNA, 16 nt, Human
cuucugacucuucccc

SEQ ID NO: 2009027 - RNA, 17 nt, Human
cuucugacucuucccca

SEQ ID NO: 2009028 - RNA, 21 nt, Human
cuucuucagagacuccugcag

SEQ ID NO: 2009029 - RNA, 20 nt, Human
cuucuucagagacuccugca

SEQ ID NO: 2009030 - RNA, 13 nt, Human
cuucuguuuucaa

SEQ ID NO: 2009031 - RNA, 16 nt, Human
cuucuguuuucaaucu

SEQ ID NO: 2009032 - RNA, 19 nt, Human
cuucuguuuucaaucucgu

SEQ ID NO: 2009033 - RNA, 23 nt, Human
cuucugacucuuccccaggaagg

SEQ ID NO: 2009034 - RNA, 22 nt, Human
cuucuucagagacuccugcagg

SEQ ID NO: 2009035 - RNA, 18 nt, Human
cuucuucagagacuccug

SEQ ID NO: 2009036 - RNA, 20 nt, Human
cuugaaugaugccaugagga

SEQ ID NO: 2009037 - RNA, 23 nt, Human
cuugaauaaacaccacuggauua

SEQ ID NO: 2009038 - RNA, 11 nt, Human
cuuggcccagg

SEQ ID NO: 2009039 - RNA, 18 nt, Human
cuugcucucuuuuauucu

SEQ ID NO: 2009040 - RNA, 21 nt, Human
cuuggccagcaaguuagagaa

SEQ ID NO: 2009041 - RNA, 12 nt, Human
cuugcucugcug

SEQ ID NO: 2009042 - RNA, 23 nt, Human
cuugaaugaugccaugaggaaca

SEQ ID NO: 2009043 - RNA, 23 nt, Human
cuugccgucuaccugaggggccu

SEQ ID NO: 2009044 - RNA, 16 nt, Human
cuugacagagccugcc

SEQ ID NO: 2009045 - RNA, 19 nt, Human
cuugacagagccugcccca

SEQ ID NO: 2009046 - RNA, 12 nt, Human
cuugacagcuca

SEQ ID NO: 2009047 - RNA, 20 nt, Human
cuugccgucuaccugagggg

SEQ ID NO: 2009048 - RNA, 12 nt, Human
cuugacagggca

SEQ ID NO: 2009049 - RNA, 12 nt, Human
cuuuucaaaauc

SEQ ID NO: 2009050 - RNA, 15 nt, Human
cuuuucaaaacauuu

SEQ ID NO: 2009051 - RNA, 18 nt, Human
cuuuucaauauauuugua

SEQ ID NO: 2009052 - RNA, 14 nt, Human
cuuuucaaguauuu

SEQ ID NO: 2009053 - RNA, 17 nt, Human
cuuuucaaguauuuaag

SEQ ID NO: 2009054 - RNA, 19 nt, Human
cuuuuauuuagcaccaggg

SEQ ID NO: 2009055 - RNA, 16 nt, Human
cuuuuauaaacuuuac

SEQ ID NO: 2009056 - RNA, 18 nt, Human
cuuuuauaaacuuuaccu

SEQ ID NO: 2009057 - RNA, 15 nt, Human
cuuuuauaaacuuua

SEQ ID NO: 2009058 - RNA, 14 nt, Human
cuuugggugcuguu

SEQ ID NO: 2009059 - RNA, 16 nt, Human
cuuuggucuacacugu

SEQ ID NO: 2009060 - RNA, 20 nt, Human
cuuuggucuacacugugcug

SEQ ID NO: 2009061 - RNA, 15 nt, Human
cuuuggucacuuuua

SEQ ID NO: 2009062 - RNA, 18 nt, Human
cuuuggucacuuuuagau

SEQ ID NO: 2009063 - RNA, 20 nt, Human
cuuucgacuugcauuuuugc

SEQ ID NO: 2009064 - RNA, 22 nt, Human
cuuucggggagaggcugaggac

SEQ ID NO: 2009065 - RNA, 21 nt, Human
cuuucgacuugcauuuuugca

SEQ ID NO: 2009066 - RNA, 13 nt, Human
cuuucuccuuuuu

SEQ ID NO: 2009067 - RNA, 19 nt, Human
cuuucguuuguuuguuuca

SEQ ID NO: 2009068 - RNA, 14 nt, Human
cuuucuauaauuuu

SEQ ID NO: 2009069 - RNA, 17 nt, Human
cuuucuauaauuuuaca

SEQ ID NO: 2009070 - RNA, 18 nt, Human
cuuucuauaauuuuacaa

SEQ ID NO: 2009071 - RNA, 22 nt, Human
cuuugagguggaagagggcugc

SEQ ID NO: 2009072 - RNA, 17 nt, Human
cuuugauucacauguuu

SEQ ID NO: 2009073 - RNA, 20 nt, Human
cuuugauucacauguuuuca

SEQ ID NO: 2009074 - RNA, 21 nt, Human
cuuugauucacauguuuucaa

SEQ ID NO: 2009075 - RNA, 22 nt, Human
cuuugauucacauguuuucaaa

SEQ ID NO: 2009076 - RNA, 15 nt, Human
cuuugauucacaugu

SEQ ID NO: 2009077 - RNA, 16 nt, Human
cuuugauucacauguu

SEQ ID NO: 2009078 - RNA, 22 nt, Human
cuuugacgccaucccagcccca

SEQ ID NO: 2009079 - RNA, 21 nt, Human
cuuugacgccaucccagcccc

SEQ ID NO: 2009080 - RNA, 19 nt, Human
cuuugacgccaucccagcc

SEQ ID NO: 2009081 - RNA, 18 nt, Human
cuuugacgccaucccagc

SEQ ID NO: 2009082 - RNA, 14 nt, Human
cuuucucuaauaau

SEQ ID NO: 2009083 - RNA, 15 nt, Human
cuuucucuaauaaua

SEQ ID NO: 2009084 - RNA, 16 nt, Human
cuuucucuaauaauaa

SEQ ID NO: 2009085 - RNA, 17 nt, Human
cuuucucuaauaauaaa

SEQ ID NO: 2009086 - RNA, 18 nt, Human
cuuucucuaauaauaaau

SEQ ID NO: 2009087 - RNA, 19 nt, Human
cuuucucuaauaauaaaua

SEQ ID NO: 2009088 - RNA, 20 nt, Human
cuuucucuaauaauaaauag

SEQ ID NO: 2009089 - RNA, 22 nt, Human
cuuucucuaauaauaaauaguu

SEQ ID NO: 2009090 - RNA, 16 nt, Human
cuuugagguggaagag

SEQ ID NO: 2009091 - RNA, 17 nt, Human
cuuugagguggaagagg

SEQ ID NO: 2009092 - RNA, 14 nt, Human
cuuugagguggaag

SEQ ID NO: 2009093 - RNA, 16 nt, Human
cuuugagcuuaagaau

SEQ ID NO: 2009094 - RNA, 14 nt, Human
cuuugagcucccac

SEQ ID NO: 2009095 - RNA, 23 nt, Human
cuuugagaucuaaaaauaacugu

SEQ ID NO: 2009096 - RNA, 23 nt, Human
cuuugagcucccacuucugccag

SEQ ID NO: 2009097 - RNA, 16 nt, Human
cuuugagaucuaaaaa

SEQ ID NO: 2009098 - RNA, 17 nt, Human
cuuugagaucuaaaaau

SEQ ID NO: 2009099 - RNA, 19 nt, Human
cuuugagaucuaaaaauaa

SEQ ID NO: 2009100 - RNA, 22 nt, Human
cuuugagaucuaaaaauaacug

SEQ ID NO: 2009101 - RNA, 22 nt, Human
cuuucagacucucucugggagg

SEQ ID NO: 2009102 - RNA, 12 nt, Human
cuugugacuuuu

SEQ ID NO: 2009103 - RNA, 16 nt, Human
cuugugacuuuugcuu

SEQ ID NO: 2009104 - RNA, 17 nt, Human
cuugugacuuuugcuuu

SEQ ID NO: 2009105 - RNA, 19 nt, Human
cuugugacuuuugcuuuaa

SEQ ID NO: 2009106 - RNA, 21 nt, Human
cuugugacuuuugcuuuaauu

SEQ ID NO: 2009107 - RNA, 22 nt, Human
cuugugacuuuugcuuuaauuc

SEQ ID NO: 2009108 - RNA, 16 nt, Human
cuuguggacacagcuc

SEQ ID NO: 2009109 - RNA, 14 nt, Human
cuuguggacacagc

SEQ ID NO: 2009110 - RNA, 15 nt, Human
cuuguggacacagcu

SEQ ID NO: 2009111 - RNA, 13 nt, Human
cuuguggacacag

SEQ ID NO: 2009112 - RNA, 15 nt, Human
cuugugcacaggcag

SEQ ID NO: 2009113 - RNA, 16 nt, Human
cuugugcacaggcaga

SEQ ID NO: 2009114 - RNA, 18 nt, Human
cuugugcacaggcagagc

SEQ ID NO: 2009115 - RNA, 22 nt, Human
cuugugcacaggcagagcccag

SEQ ID NO: 2009116 - RNA, 14 nt, Human
cuuuaauaugaaau

SEQ ID NO: 2009117 - RNA, 17 nt, Human
cuuuaauaugaaauuuu

SEQ ID NO: 2009118 - RNA, 19 nt, Human
cuuuaaucagguccugcuc

SEQ ID NO: 2009119 - RNA, 18 nt, Human
cuuuacaaacaaaagcau

SEQ ID NO: 2009120 - RNA, 22 nt, Human
cuuucaauaggaaaaacugauu

SEQ ID NO: 2009121 - RNA, 21 nt, Human
cuuucaauaggaaaaacugau

SEQ ID NO: 2009122 - RNA, 20 nt, Human
cuuucaauaggaaaaacuga

SEQ ID NO: 2009123 - RNA, 23 nt, Human
cuuuacacggagcggauugcaaa

SEQ ID NO: 2009124 - RNA, 12 nt, Human
cuuucacuucuu

SEQ ID NO: 2009125 - RNA, 13 nt, Human
cuuucacuucuuu

SEQ ID NO: 2009126 - RNA, 14 nt, Human
cuuucacuucuuuc

SEQ ID NO: 2009127 - RNA, 15 nt, Human
cuuucacuucuuucc

SEQ ID NO: 2009128 - RNA, 16 nt, Human
cuuucacuucuuuccc

SEQ ID NO: 2009129 - RNA, 18 nt, Human
cuuucacuucuuucccuu

SEQ ID NO: 2009130 - RNA, 20 nt, Human
cuuucacuucuuucccuucc

SEQ ID NO: 2009131 - RNA, 21 nt, Human
cuuucacuucuuucccuuccu

SEQ ID NO: 2009132 - RNA, 19 nt, Human
cuuucagacucucucuggg

SEQ ID NO: 2009133 - RNA, 14 nt, Human
cuguugcugccuca

SEQ ID NO: 2009134 - RNA, 15 nt, Human
cuguugcugccucau

SEQ ID NO: 2009135 - RNA, 16 nt, Human
cuguugcugccucaug

SEQ ID NO: 2009136 - RNA, 17 nt, Human
cuguugcugccucaugc

SEQ ID NO: 2009137 - RNA, 20 nt, Human
cuguugggccaggagccucc

SEQ ID NO: 2009138 - RNA, 17 nt, Human
cuguugggccaggagcc

SEQ ID NO: 2009139 - RNA, 16 nt, Human
cuguugggccaggagc

SEQ ID NO: 2009140 - RNA, 13 nt, Human
cuuaaaauuugaa

SEQ ID NO: 2009141 - RNA, 14 nt, Human
cuuaaaauuugaaa

SEQ ID NO: 2009142 - RNA, 15 nt, Human
cuuaaaauuugaaac

SEQ ID NO: 2009143 - RNA, 16 nt, Human
cuuaaaauuugaaaca

SEQ ID NO: 2009144 - RNA, 19 nt, Human
cuuaaaauuugaaacauug

SEQ ID NO: 2009145 - RNA, 18 nt, Human
cuuaaaauauuccugcau

SEQ ID NO: 2009146 - RNA, 20 nt, Human
cuuaaaauauuccugcauuu

SEQ ID NO: 2009147 - RNA, 21 nt, Human
cuuacacuggcaaugguaguu

SEQ ID NO: 2009148 - RNA, 13 nt, Human
cuuacacaauggu

SEQ ID NO: 2009149 - RNA, 20 nt, Human
cuuaaaauuugaaacauugc

SEQ ID NO: 2009150 - RNA, 23 nt, Human
cuuaaaauuugaaacauugcuuu

SEQ ID NO: 2009151 - RNA, 17 nt, Human
cuuacccucauguucuu

SEQ ID NO: 2009152 - RNA, 18 nt, Human
cuuacccucauguucuua

SEQ ID NO: 2009153 - RNA, 19 nt, Human
cuuacccucauguucuuaa

SEQ ID NO: 2009154 - RNA, 13 nt, Human
cuuaccucggugc

SEQ ID NO: 2009155 - RNA, 14 nt, Human
cuuaccgacaagca

SEQ ID NO: 2009156 - RNA, 17 nt, Human
cuuaccugaguugaaga

SEQ ID NO: 2009157 - RNA, 13 nt, Human
cuuaccugccagg

SEQ ID NO: 2009158 - RNA, 21 nt, Human
cuuaccucggugccuuccucu

SEQ ID NO: 2009159 - RNA, 19 nt, Human
cuuaccucggugccuuccu

SEQ ID NO: 2009160 - RNA, 17 nt, Human
cuguucagcguuuugca

SEQ ID NO: 2009161 - RNA, 13 nt, Human
cuguucagcucca

SEQ ID NO: 2009162 - RNA, 14 nt, Human
cuguucagcguuuu

SEQ ID NO: 2009163 - RNA, 14 nt, Human
cuguucagcuccag

SEQ ID NO: 2009164 - RNA, 20 nt, Human
cugugucuugcaauggcagc

SEQ ID NO: 2009165 - RNA, 15 nt, Human
cuguucacucuacuu

SEQ ID NO: 2009166 - RNA, 16 nt, Human
cugugucuugcaaugg

SEQ ID NO: 2009167 - RNA, 19 nt, Human
cugugucuugcaauggcag

SEQ ID NO: 2009168 - RNA, 21 nt, Human
cugugacaucucuauucccca

SEQ ID NO: 2009169 - RNA, 17 nt, Human
cugugacuaggaaaaaa

SEQ ID NO: 2009170 - RNA, 17 nt, Human
cugugacuucagcucug

SEQ ID NO: 2009171 - RNA, 22 nt, Human
cugugacuucagcucuguuuua

SEQ ID NO: 2009172 - RNA, 15 nt, Human
cugugcguggggcuc

SEQ ID NO: 2009173 - RNA, 22 nt, Human
cugugcguggggcucccgccuc

SEQ ID NO: 2009174 - RNA, 14 nt, Human
cugugcguggggcu

SEQ ID NO: 2009175 - RNA, 21 nt, Human
cugugucagguggggcagcuu

SEQ ID NO: 2009176 - RNA, 20 nt, Human
cugugucagcauagaaguaa

SEQ ID NO: 2009177 - RNA, 19 nt, Human
cugugucagguggggcagc

SEQ ID NO: 2009178 - RNA, 19 nt, Human
cugugucucccuucauccu

SEQ ID NO: 2009179 - RNA, 14 nt, Human
cugugucucccuuc

SEQ ID NO: 2009180 - RNA, 14 nt, Human
cugugucuugcaau

SEQ ID NO: 2009181 - RNA, 22 nt, Human
cugugcugagucugaaggcugg

SEQ ID NO: 2009182 - RNA, 20 nt, Human
cugugcugagucugaaggcu

SEQ ID NO: 2009183 - RNA, 11 nt, Human
cugugcugccc

SEQ ID NO: 2009184 - RNA, 18 nt, Human
cuuagcagggaaacagcu

SEQ ID NO: 2009185 - RNA, 21 nt, Human
cuuagcagggaaacagcuaau

SEQ ID NO: 2009186 - RNA, 21 nt, Human
cuuaugggcuggguucuaccc

SEQ ID NO: 2009187 - RNA, 14 nt, Human
cuuaugggcugggu

SEQ ID NO: 2009188 - RNA, 23 nt, Human
cuuaugggcuggguucuacccag

SEQ ID NO: 2009189 - RNA, 22 nt, Human
cuuaugggcuggguucuaccca

SEQ ID NO: 2009190 - RNA, 18 nt, Human
cuuauuaaaacacuucau

SEQ ID NO: 2009191 - RNA, 21 nt, Human
cuuauggguagggcucugaca

SEQ ID NO: 2009192 - RNA, 12 nt, Human
cuuauugcccac

SEQ ID NO: 2009193 - RNA, 13 nt, Human
cuuauugcccacg

SEQ ID NO: 2009194 - RNA, 22 nt, Human
cuuauuaaaguuucaaaaaucu

SEQ ID NO: 2009195 - RNA, 23 nt, Human
cuuauuaaaguuucaaaaaucug

SEQ ID NO: 2009196 - RNA, 13 nt, Human
cuuauuaaaguuu

SEQ ID NO: 2009197 - RNA, 14 nt, Human
cuuauuaaaguuuc

SEQ ID NO: 2009198 - RNA, 15 nt, Human
cuuauuaaaguuuca

SEQ ID NO: 2009199 - RNA, 16 nt, Human
cuuauuaaaguuucaa

SEQ ID NO: 2009200 - RNA, 17 nt, Human
cuuauuaaaguuucaaa

SEQ ID NO: 2009201 - RNA, 18 nt, Human
cuuauuaaaguuucaaaa

SEQ ID NO: 2009202 - RNA, 19 nt, Human
cuuauuaaaguuucaaaaa

SEQ ID NO: 2009203 - RNA, 20 nt, Human
cuuauuaaaguuucaaaaau

SEQ ID NO: 2009204 - RNA, 17 nt, Human
cuuccaugucgccucug

SEQ ID NO: 2009205 - RNA, 18 nt, Human
cuuccaugucgccucugc

SEQ ID NO: 2009206 - RNA, 19 nt, Human
cuuccaugucgccucugca

SEQ ID NO: 2009207 - RNA, 20 nt, Human
cuuccaugucgccucugcau

SEQ ID NO: 2009208 - RNA, 20 nt, Human
cuuccagugaggcucugccc

SEQ ID NO: 2009209 - RNA, 19 nt, Human
cuuccagugaggcucugcc

SEQ ID NO: 2009210 - RNA, 17 nt, Human
cuuccagugaggcucug

SEQ ID NO: 2009211 - RNA, 18 nt, Human
cuuccagugaggcucugc

SEQ ID NO: 2009212 - RNA, 17 nt, Human
cuuccauggacuuuguu

SEQ ID NO: 2009213 - RNA, 16 nt, Human
cuuccauggacuuugu

SEQ ID NO: 2009214 - RNA, 15 nt, Human
cuuccaugucgccuc

SEQ ID NO: 2009215 - RNA, 16 nt, Human
cuuccaugucgccucu

SEQ ID NO: 2009216 - RNA, 11 nt, Human
cuucagacaua

SEQ ID NO: 2009217 - RNA, 14 nt, Human
cuucacuucugacu

SEQ ID NO: 2009218 - RNA, 20 nt, Human
cuucacuucugacucuuccc

SEQ ID NO: 2009219 - RNA, 21 nt, Human
cuucacuucugacucuucccc

SEQ ID NO: 2009220 - RNA, 13 nt, Human
cuucacuucugac

SEQ ID NO: 2009221 - RNA, 22 nt, Human
cuucagagacuccugcaggcag

SEQ ID NO: 2009222 - RNA, 21 nt, Human
cuucagagacuccugcaggca

SEQ ID NO: 2009223 - RNA, 16 nt, Human
cuucagagacuccugc

SEQ ID NO: 2009224 - RNA, 21 nt, Human
cuucacuguccuccaagccag

SEQ ID NO: 2009225 - RNA, 18 nt, Human
cuucacuguccuccaagc

SEQ ID NO: 2009226 - RNA, 20 nt, Human
cuucaccuuuguccccaccg

SEQ ID NO: 2009227 - RNA, 17 nt, Human
cuucaccuuugucccca

SEQ ID NO: 2009228 - RNA, 14 nt, Human
cuucaccuuugucc

SEQ ID NO: 2009229 - RNA, 18 nt, Human
cuuauugcccacgcugga

SEQ ID NO: 2009230 - RNA, 15 nt, Human
cuucauccuccucag

SEQ ID NO: 2009231 - RNA, 16 nt, Human
cuucauccccucagaa

SEQ ID NO: 2009232 - RNA, 13 nt, Human
cuucaucccucug

SEQ ID NO: 2009233 - RNA, 18 nt, Human
cuucaguuaagccuuugg

SEQ ID NO: 2009234 - RNA, 24 nt, Human
cuucagagacuccugcaggcagcc

SEQ ID NO: 2009235 - RNA, 23 nt, Human
cuucagagacuccugcaggcagc

SEQ ID NO: 2009236 - RNA, 18 nt, Human
cuucaguggcagcugcuu

SEQ ID NO: 2009237 - RNA, 17 nt, Human
cuucaguuaagccuuug

SEQ ID NO: 2009238 - RNA, 22 nt, Human
cuucaucucccaaagugcuggg

SEQ ID NO: 2009239 - RNA, 16 nt, Human
cuucauccuccucaga

SEQ ID NO: 2009240 - RNA, 22 nt, Human
cuggaugcagccucacaguccu

SEQ ID NO: 2009241 - RNA, 15 nt, Human
cuggaguucugguuc

SEQ ID NO: 2009242 - RNA, 14 nt, Human
cuggaucugugagg

SEQ ID NO: 2009243 - RNA, 17 nt, Human
cuggaguucugguuccu

SEQ ID NO: 2009244 - RNA, 16 nt, Human
cuggaguucugguucc

SEQ ID NO: 2009245 - RNA, 23 nt, Human
cuggacugugugcucaggagccc

SEQ ID NO: 2009246 - RNA, 22 nt, Human
cuggacugugugcucaggagcc

SEQ ID NO: 2009247 - RNA, 19 nt, Human
cuggacugugugcucagga

SEQ ID NO: 2009248 - RNA, 20 nt, Human
cugcuuaacuucacauauug

SEQ ID NO: 2009249 - RNA, 22 nt, Human
cugcugugggcacaggucaggc

SEQ ID NO: 2009250 - RNA, 19 nt, Human
cugcugugggcacagguca

SEQ ID NO: 2009251 - RNA, 19 nt, Human
cugcugucuuuucuuugcc

SEQ ID NO: 2009252 - RNA, 19 nt, Human
cugcugugaagcuggaacu

SEQ ID NO: 2009253 - RNA, 14 nt, Human
cugcucacauaucu

SEQ ID NO: 2009254 - RNA, 12 nt, Human
cugcugaaggcu

SEQ ID NO: 2009255 - RNA, 16 nt, Human
cugcucacauaucugu

SEQ ID NO: 2009256 - RNA, 19 nt, Human
cugcucacauaucugucau

SEQ ID NO: 2009257 - RNA, 13 nt, Human
cugcugacagugu

SEQ ID NO: 2009258 - RNA, 15 nt, Human
cugcugacaguguug

SEQ ID NO: 2009259 - RNA, 19 nt, Human
cugcugagucccaggcuga

SEQ ID NO: 2009260 - RNA, 23 nt, Human
cugcugagucccaggcugagccu

SEQ ID NO: 2009261 - RNA, 14 nt, Human
cugcugaaggcucg

SEQ ID NO: 2009262 - RNA, 13 nt, Human
cugcugaaggcuc

SEQ ID NO: 2009263 - RNA, 15 nt, Human
cugcugaaggcucga

SEQ ID NO: 2009264 - RNA, 12 nt, Human
cugcugacagug

SEQ ID NO: 2009265 - RNA, 19 nt, Human
cugcugaguccgaccuggc

SEQ ID NO: 2009266 - RNA, 21 nt, Human
cugcugaguccgaccuggccu

SEQ ID NO: 2009267 - RNA, 22 nt, Human
cugcugaguccgaccuggccug

SEQ ID NO: 2009268 - RNA, 17 nt, Human
cugcugagucuguucug

SEQ ID NO: 2009269 - RNA, 22 nt, Human
cugcugagucuguucugguaau

SEQ ID NO: 2009270 - RNA, 22 nt, Human
cugcugaugacccccccagcuu

SEQ ID NO: 2009271 - RNA, 13 nt, Human
cuggcccugugcc

SEQ ID NO: 2009272 - RNA, 12 nt, Human
cuggcccuuccu

SEQ ID NO: 2009273 - RNA, 22 nt, Human
cuggcuaugcauuugaaaauuu

SEQ ID NO: 2009274 - RNA, 23 nt, Human
cuggcucacacuuggcucugagg

SEQ ID NO: 2009275 - RNA, 15 nt, Human
cuggcuaugcauuug

SEQ ID NO: 2009276 - RNA, 16 nt, Human
cuggcuaugcauuuga

SEQ ID NO: 2009277 - RNA, 13 nt, Human
cuggcuaugcauu

SEQ ID NO: 2009278 - RNA, 14 nt, Human
cuggcuaugcauuu

SEQ ID NO: 2009279 - RNA, 22 nt, Human
cugggacaugggaaaggggaag

SEQ ID NO: 2009280 - RNA, 18 nt, Human
cugggacaugggaaaggg

SEQ ID NO: 2009281 - RNA, 14 nt, Human
cugggacaugggaa

SEQ ID NO: 2009282 - RNA, 16 nt, Human
cuggcucuacacauau

SEQ ID NO: 2009283 - RNA, 17 nt, Human
cugggacagggagcagc

SEQ ID NO: 2009284 - RNA, 13 nt, Human
cuggcucuacaca

SEQ ID NO: 2009285 - RNA, 14 nt, Human
cuggcucuacacau

SEQ ID NO: 2009286 - RNA, 22 nt, Human
cugggagaaccaaaaagaggcu

SEQ ID NO: 2009287 - RNA, 17 nt, Human
cugggagaaaugaaaaa

SEQ ID NO: 2009288 - RNA, 16 nt, Human
cugggagaaaugaaaa

SEQ ID NO: 2009289 - RNA, 21 nt, Human
cugggaccacaggugcccgcc

SEQ ID NO: 2009290 - RNA, 13 nt, Human
cugggacuacagg

SEQ ID NO: 2009291 - RNA, 15 nt, Human
cugggacuacaggca

SEQ ID NO: 2009292 - RNA, 16 nt, Human
cugggacuacaggcac

SEQ ID NO: 2009293 - RNA, 12 nt, Human
cuggugccucac

SEQ ID NO: 2009294 - RNA, 21 nt, Human
cuggugccucaccccuugcca

SEQ ID NO: 2009295 - RNA, 21 nt, Human
cuggguggcaccagcagccug

SEQ ID NO: 2009296 - RNA, 14 nt, Human
cuggguguggcgca

SEQ ID NO: 2009297 - RNA, 15 nt, Human
cuggguguggcgcag

SEQ ID NO: 2009298 - RNA, 13 nt, Human
cugggugcaggag

SEQ ID NO: 2009299 - RNA, 14 nt, Human
cugggugcaggagc

SEQ ID NO: 2009300 - RNA, 22 nt, Human
cugggugcaggagcgcucccuu

SEQ ID NO: 2009301 - RNA, 20 nt, Human
cuggguggcaccagcagccu

SEQ ID NO: 2009302 - RNA, 18 nt, Human
cuggguggcaccagcagc

SEQ ID NO: 2009303 - RNA, 13 nt, Human
cuggggagaaagu

SEQ ID NO: 2009304 - RNA, 22 nt, Human
cuggggaccagcuuggcucagg

SEQ ID NO: 2009305 - RNA, 15 nt, Human
cugggcccacauccg

SEQ ID NO: 2009306 - RNA, 18 nt, Human
cugggcccacccaagcag

SEQ ID NO: 2009307 - RNA, 21 nt, Human
cugggcccacccaagcaggag

SEQ ID NO: 2009308 - RNA, 23 nt, Human
cugggcccacccaagcaggaggc

SEQ ID NO: 2009309 - RNA, 20 nt, Human
cugggcagaggaaagcaaag

SEQ ID NO: 2009310 - RNA, 16 nt, Human
cugggcagaggaaagc

SEQ ID NO: 2009311 - RNA, 13 nt, Human
cugggcagaggaa

SEQ ID NO: 2009312 - RNA, 12 nt, Human
cugggcagagga

SEQ ID NO: 2009313 - RNA, 20 nt, Human
cugggcagguuggugggggc

SEQ ID NO: 2009314 - RNA, 19 nt, Human
cugcccugugggcccccaa

SEQ ID NO: 2009315 - RNA, 17 nt, Human
cugccccuccucucugc

SEQ ID NO: 2009316 - RNA, 18 nt, Human
cugccccuccucucugcc

SEQ ID NO: 2009317 - RNA, 13 nt, Human
cugccccucccuu

SEQ ID NO: 2009318 - RNA, 14 nt, Human
cugccccucccuuc

SEQ ID NO: 2009319 - RNA, 17 nt, Human
cugccccucccuucaac

SEQ ID NO: 2009320 - RNA, 17 nt, Human
cugcccuuaccugccag

SEQ ID NO: 2009321 - RNA, 16 nt, Human
cugcccuuaccugcca

SEQ ID NO: 2009322 - RNA, 12 nt, Human
cugcccuuaccu

SEQ ID NO: 2009323 - RNA, 19 nt, Human
cugccccuccucucugccc

SEQ ID NO: 2009324 - RNA, 16 nt, Human
cugccauauucuguug

SEQ ID NO: 2009325 - RNA, 16 nt, Human
cugccauccagguuca

SEQ ID NO: 2009326 - RNA, 18 nt, Human
cugccauccagguucagc

SEQ ID NO: 2009327 - RNA, 19 nt, Human
cugccauccagguucagcu

SEQ ID NO: 2009328 - RNA, 13 nt, Human
cugccccccagcc

SEQ ID NO: 2009329 - RNA, 22 nt, Human
cugccagggacagagggggugg

SEQ ID NO: 2009330 - RNA, 20 nt, Human
cugccagggacagagggggu

SEQ ID NO: 2009331 - RNA, 17 nt, Human
cugcauuuaaaagauac

SEQ ID NO: 2009332 - RNA, 18 nt, Human
cugcauuuaaaagauaca

SEQ ID NO: 2009333 - RNA, 23 nt, Human
cugccagggacagaggggguggc

SEQ ID NO: 2009334 - RNA, 22 nt, Human
cugccagucccccugccccagg

SEQ ID NO: 2009335 - RNA, 20 nt, Human
cugccagucccccugcccca

SEQ ID NO: 2009336 - RNA, 21 nt, Human
cugccagucccccugccccag

SEQ ID NO: 2009337 - RNA, 17 nt, Human
cugccagucccccugcc

SEQ ID NO: 2009338 - RNA, 22 nt, Human
cugccaguggggccugaggcuc

SEQ ID NO: 2009339 - RNA, 20 nt, Human
cugccaguggggccugaggc

SEQ ID NO: 2009340 - RNA, 12 nt, Human
cugccaguuuug

SEQ ID NO: 2009341 - RNA, 13 nt, Human
cugccaguuuugu

SEQ ID NO: 2009342 - RNA, 18 nt, Human
cugcauugggugaucauu

SEQ ID NO: 2009343 - RNA, 14 nt, Human
cugcauuuaaaaga

SEQ ID NO: 2009344 - RNA, 13 nt, Human
cugcauuggcuuu

SEQ ID NO: 2009345 - RNA, 23 nt, Human
cugcaggccaggccagcugccuc

SEQ ID NO: 2009346 - RNA, 18 nt, Human
cugcaggccaggccagcu

SEQ ID NO: 2009347 - RNA, 17 nt, Human
cugcaggccaggccagc

SEQ ID NO: 2009348 - RNA, 20 nt, Human
cugcaggcagccaggccaca

SEQ ID NO: 2009349 - RNA, 19 nt, Human
cugcaggcagccaggccac

SEQ ID NO: 2009350 - RNA, 18 nt, Human
cugcaggcagccaggcca

SEQ ID NO: 2009351 - RNA, 17 nt, Human
cugcaggcagccaggcc

SEQ ID NO: 2009352 - RNA, 16 nt, Human
cugcaggcagccaggc

SEQ ID NO: 2009353 - RNA, 15 nt, Human
cugcaggcagccagg

SEQ ID NO: 2009354 - RNA, 14 nt, Human
cugcaggcagccag

SEQ ID NO: 2009355 - RNA, 13 nt, Human
cugcaggcagcca

SEQ ID NO: 2009356 - RNA, 19 nt, Human
cugcaggauucucaccagc

SEQ ID NO: 2009357 - RNA, 20 nt, Human
cugcaggauucucaccagcu

SEQ ID NO: 2009358 - RNA, 17 nt, Human
cugcaggaaauggcugu

SEQ ID NO: 2009359 - RNA, 12 nt, Human
cugcagcuuugu

SEQ ID NO: 2009360 - RNA, 17 nt, Human
cugcacuccagccuggg

SEQ ID NO: 2009361 - RNA, 16 nt, Human
cugcacuccagccugg

SEQ ID NO: 2009362 - RNA, 18 nt, Human
cugcacuccagccugggu

SEQ ID NO: 2009363 - RNA, 24 nt, Human
cugcagccucaaccuccugggcua

SEQ ID NO: 2009364 - RNA, 19 nt, Human
cugcacuccagccugggug

SEQ ID NO: 2009365 - RNA, 23 nt, Human
cugcagccucaaccuccugggcu

SEQ ID NO: 2009366 - RNA, 17 nt, Human
cugcagcucucaugcug

SEQ ID NO: 2009367 - RNA, 11 nt, Human
cugcagcuccc

SEQ ID NO: 2009368 - RNA, 13 nt, Human
cugcagcucccuc

SEQ ID NO: 2009369 - RNA, 14 nt, Human
cugcagcucccuca

SEQ ID NO: 2009370 - RNA, 19 nt, Human
cugcagcucccucaaagag

SEQ ID NO: 2009371 - RNA, 23 nt, Human
cugcagcucccucaaagaggcag

SEQ ID NO: 2009372 - RNA, 18 nt, Human
cugcagcucucaugcugc

SEQ ID NO: 2009373 - RNA, 19 nt, Human
cugcagccuccgcuucccu

SEQ ID NO: 2009374 - RNA, 20 nt, Human
cugcagccuccgcuucccug

SEQ ID NO: 2009375 - RNA, 21 nt, Human
cugcagccuccgcuucccugg

SEQ ID NO: 2009376 - RNA, 16 nt, Human
cugcacuauagccuag

SEQ ID NO: 2009377 - RNA, 17 nt, Human
cugcacuauagccuagg

SEQ ID NO: 2009378 - RNA, 18 nt, Human
cugcacuauagccuaggu

SEQ ID NO: 2009379 - RNA, 20 nt, Human
cugcacuauagccuagguga

SEQ ID NO: 2009380 - RNA, 17 nt, Human
cugauggggcaaacuca

SEQ ID NO: 2009381 - RNA, 17 nt, Human
cugcacuccagccugag

SEQ ID NO: 2009382 - RNA, 20 nt, Human
cugcacuccagccugagcga

SEQ ID NO: 2009383 - RNA, 16 nt, Human
cugcacuccagccuga

SEQ ID NO: 2009384 - RNA, 15 nt, Human
cugcacuccagccug

SEQ ID NO: 2009385 - RNA, 13 nt, Human
cugcacuccagcc

SEQ ID NO: 2009386 - RNA, 22 nt, Human
cugcacuauagccuaggugaca

SEQ ID NO: 2009387 - RNA, 23 nt, Human
cugcacuauagccuaggugacag

SEQ ID NO: 2009388 - RNA, 18 nt, Human
cugcaagaauugaagcag

SEQ ID NO: 2009389 - RNA, 19 nt, Human
cugcaacuuguaaaugugg

SEQ ID NO: 2009390 - RNA, 18 nt, Human
cugcaacuuguaaaugug

SEQ ID NO: 2009391 - RNA, 22 nt, Human
cugcaaccugauugugucucuu

SEQ ID NO: 2009392 - RNA, 17 nt, Human
cugcaaccuucgccacc

SEQ ID NO: 2009393 - RNA, 19 nt, Human
cugcaaccuucgccaccug

SEQ ID NO: 2009394 - RNA, 20 nt, Human
cugcaaccuucgccaccugg

SEQ ID NO: 2009395 - RNA, 22 nt, Human
cugcaaccuucgccaccugggu

SEQ ID NO: 2009396 - RNA, 16 nt, Human
cugcaaauccuugugg

SEQ ID NO: 2009397 - RNA, 19 nt, Human
cugcaaauccuugugggaa

SEQ ID NO: 2009398 - RNA, 23 nt, Human
cugcaaaguacagguacuuuguc

SEQ ID NO: 2009399 - RNA, 21 nt, Human
cugcaaaguacagguacuuug

SEQ ID NO: 2009400 - RNA, 22 nt, Human
cugcaaaguacagguacuuugu

SEQ ID NO: 2009401 - RNA, 20 nt, Human
cugcaaccuccgccucuugg

SEQ ID NO: 2009402 - RNA, 21 nt, Human
cugcaaccaaacucccaucag

SEQ ID NO: 2009403 - RNA, 21 nt, Human
cugcaaccugauugugucucu

SEQ ID NO: 2009404 - RNA, 19 nt, Human
cugcaaccugauugugucu

SEQ ID NO: 2009405 - RNA, 14 nt, Human
cugcaaccugauug

SEQ ID NO: 2009406 - RNA, 22 nt, Human
cugcaaccuccgccucuugggu

SEQ ID NO: 2009407 - RNA, 20 nt, Human
cugcaagaauugaagcagga

SEQ ID NO: 2009408 - RNA, 12 nt, Human
cugcaagggagu

SEQ ID NO: 2009409 - RNA, 23 nt, Human
cugcaccgggccacagagaaagu

SEQ ID NO: 2009410 - RNA, 17 nt, Human
cugaugcuucuucagag

SEQ ID NO: 2009411 - RNA, 16 nt, Human
cugaugcuucuucaga

SEQ ID NO: 2009412 - RNA, 21 nt, Human
cugaugacccccccagcuuca

SEQ ID NO: 2009413 - RNA, 22 nt, Human
cugaugacccccccagcuucac

SEQ ID NO: 2009414 - RNA, 17 nt, Human
cugaugaccaauuuuaa

SEQ ID NO: 2009415 - RNA, 15 nt, Human
cucuuaugggcuggg

SEQ ID NO: 2009416 - RNA, 22 nt, Human
cucuuauaucuaaaucugucca

SEQ ID NO: 2009417 - RNA, 15 nt, Human
cucuuauaucuauau

SEQ ID NO: 2009418 - RNA, 18 nt, Human
cucuuauaucuauauuuu

SEQ ID NO: 2009419 - RNA, 14 nt, Human
cucuuaugggcugg

SEQ ID NO: 2009420 - RNA, 20 nt, Human
cugaugcuucuucagagacu

SEQ ID NO: 2009421 - RNA, 18 nt, Human
cugauggaauuuuuuugu

SEQ ID NO: 2009422 - RNA, 19 nt, Human
cugaugcuucuucagagac

SEQ ID NO: 2009423 - RNA, 18 nt, Human
cugaugcuucuucagaga

SEQ ID NO: 2009424 - RNA, 18 nt, Human
cugaugggcaacccccag

SEQ ID NO: 2009425 - RNA, 21 nt, Human
cugaugggcaacccccagccu

SEQ ID NO: 2009426 - RNA, 24 nt, Human
cugaugggcaacccccagccugcu

SEQ ID NO: 2009427 - RNA, 22 nt, Human
cugaugggcaacccccagccug

SEQ ID NO: 2009428 - RNA, 23 nt, Human
cugaugggcaacccccagccugc

SEQ ID NO: 2009429 - RNA, 21 nt, Human
cugcaaaggguaucaggugcu

SEQ ID NO: 2009430 - RNA, 17 nt, Human
cugcaaagcccagcuug

SEQ ID NO: 2009431 - RNA, 18 nt, Human
cugcaaagcccagcuuga

SEQ ID NO: 2009432 - RNA, 15 nt, Human
cugcaaaggaaauac

SEQ ID NO: 2009433 - RNA, 22 nt, Human
cugcaaaggguaucaggugcug

SEQ ID NO: 2009434 - RNA, 18 nt, Human
uuuuaaaaaacugcugac

SEQ ID NO: 2009435 - RNA, 16 nt, Human
uuuguuuuuugagucu

SEQ ID NO: 2009436 - RNA, 18 nt, Human
uuuguuuuuugagucuuu

SEQ ID NO: 2009437 - RNA, 19 nt, Human
uuuguuuuuugagucuuuu

SEQ ID NO: 2009438 - RNA, 18 nt, Human
uuuguuuuuuguuuuucu

SEQ ID NO: 2009439 - RNA, 21 nt, Human
uuuuaaaaaacugcugacugu

SEQ ID NO: 2009440 - RNA, 15 nt, Human
uuuguuuuucugcuu

SEQ ID NO: 2009441 - RNA, 16 nt, Human
uuuguuuuuugaagug

SEQ ID NO: 2009442 - RNA, 17 nt, Human
uuuguuuuuugaagugu

SEQ ID NO: 2009443 - RNA, 19 nt, Human
uuuguuuuuugaaguguug

SEQ ID NO: 2009444 - RNA, 11 nt, Human
uuuguuuuguu

SEQ ID NO: 2009445 - RNA, 14 nt, Human
uuuguuuuguugca

SEQ ID NO: 2009446 - RNA, 16 nt, Human
augugccacauuuucu

SEQ ID NO: 2009447 - RNA, 21 nt, Human
augugccagguuuuuggucug

SEQ ID NO: 2009448 - RNA, 16 nt, Human
augugcucaucagaaa

SEQ ID NO: 2009449 - RNA, 17 nt, Human
augugcucaucagaaac

SEQ ID NO: 2009450 - RNA, 13 nt, Human
augugcugcuuug

SEQ ID NO: 2009451 - RNA, 14 nt, Human
augugcugcuuuga

SEQ ID NO: 2009452 - RNA, 16 nt, Human
augugcugcuuugaua

SEQ ID NO: 2009453 - RNA, 19 nt, Human
augugcugcuuugauauau

SEQ ID NO: 2009454 - RNA, 20 nt, Human
augugcugcuuugauauaua

SEQ ID NO: 2009455 - RNA, 23 nt, Human
auguggaaaagccaagaggcugc

SEQ ID NO: 2009456 - RNA, 22 nt, Human
auguguguguguuguguguggg

SEQ ID NO: 2009457 - RNA, 23 nt, Human
auguguguguguuguguguggga

SEQ ID NO: 2009458 - RNA, 17 nt, Human
auguguuuagaauugaa

SEQ ID NO: 2009459 - RNA, 20 nt, Human
auguguuuagaauugaaggu

SEQ ID NO: 2009460 - RNA, 15 nt, Human
auguguguuuuaaaa

SEQ ID NO: 2009461 - RNA, 13 nt, Human
auguguuuagaau

SEQ ID NO: 2009462 - RNA, 14 nt, Human
auguguuuagaauu

SEQ ID NO: 2009463 - RNA, 16 nt, Human
auguguuuagaauuga

SEQ ID NO: 2009464 - RNA, 13 nt, Human
augugugugaugu

SEQ ID NO: 2009465 - RNA, 18 nt, Human
auguuaaagauguagcaa

SEQ ID NO: 2009466 - RNA, 20 nt, Human
auguuaaagauguagcaaac

SEQ ID NO: 2009467 - RNA, 13 nt, Human
auguuaaagaugu

SEQ ID NO: 2009468 - RNA, 15 nt, Human
auguuaaagauguag

SEQ ID NO: 2009469 - RNA, 17 nt, Human
auguuaaagauguagca

SEQ ID NO: 2009470 - RNA, 19 nt, Human
auguuacauaagauaaaug

SEQ ID NO: 2009471 - RNA, 20 nt, Human
auguuacauaagauaaaugu

SEQ ID NO: 2009472 - RNA, 16 nt, Human
auguuauguauauggu

SEQ ID NO: 2009473 - RNA, 12 nt, Human
auguuauguaua

SEQ ID NO: 2009474 - RNA, 13 nt, Human
auguuauguauau

SEQ ID NO: 2009475 - RNA, 16 nt, Human
auguugcccaggcagg

SEQ ID NO: 2009476 - RNA, 19 nt, Human
auguugaacaaaauaaauu

SEQ ID NO: 2009477 - RNA, 17 nt, Human
auguugcuauaauaaag

SEQ ID NO: 2009478 - RNA, 13 nt, Human
auguugaacaaaa

SEQ ID NO: 2009479 - RNA, 15 nt, Human
auguugaacaaaaua

SEQ ID NO: 2009480 - RNA, 21 nt, Human
uuuuagacccuauugcugcuu

SEQ ID NO: 2009481 - RNA, 17 nt, Human
uuuuagaguugauacua

SEQ ID NO: 2009482 - RNA, 19 nt, Human
auguuggcagaugcagcuc

SEQ ID NO: 2009483 - RNA, 20 nt, Human
auguuggcagaugcagcucu

SEQ ID NO: 2009484 - RNA, 21 nt, Human
auguuggcagaugcagcucuu

SEQ ID NO: 2009485 - RNA, 18 nt, Human
auguugaaagaucaaaag

SEQ ID NO: 2009486 - RNA, 13 nt, Human
auguugcccaggc

SEQ ID NO: 2009487 - RNA, 14 nt, Human
auguugcccaggca

SEQ ID NO: 2009488 - RNA, 15 nt, Human
auguugcccaggcag

SEQ ID NO: 2009489 - RNA, 12 nt, Human
auguugaaagau

SEQ ID NO: 2009490 - RNA, 13 nt, Human
uuuuauucuugau

SEQ ID NO: 2009491 - RNA, 18 nt, Human
uuuuauuaaucacugugu

SEQ ID NO: 2009492 - RNA, 20 nt, Human
uuuuauuaaucacuguguau

SEQ ID NO: 2009493 - RNA, 21 nt, Human
uuuuauuaaucacuguguaua

SEQ ID NO: 2009494 - RNA, 22 nt, Human
uuuuauuaaucacuguguauau

SEQ ID NO: 2009495 - RNA, 23 nt, Human
uuuuauuaaucacuguguauauu

SEQ ID NO: 2009496 - RNA, 23 nt, Human
uuuuauuccugcccugcuguuua

SEQ ID NO: 2009497 - RNA, 12 nt, Human
uuuuauuaaauu

SEQ ID NO: 2009498 - RNA, 21 nt, Human
uuuuauggcuuuugugcauua

SEQ ID NO: 2009499 - RNA, 12 nt, Human
uuuuauuaauca

SEQ ID NO: 2009500 - RNA, 13 nt, Human
uuuuauuaaucac

SEQ ID NO: 2009501 - RNA, 14 nt, Human
uuuuauuaaucacu

SEQ ID NO: 2009502 - RNA, 15 nt, Human
uuuuauuaaucacug

SEQ ID NO: 2009503 - RNA, 18 nt, Human
uuuuauggcuuuugugca

SEQ ID NO: 2009504 - RNA, 19 nt, Human
uuuuauggcuuuugugcau

SEQ ID NO: 2009505 - RNA, 20 nt, Human
uuuuaguggacccugaaaug

SEQ ID NO: 2009506 - RNA, 21 nt, Human
uuuuaguggacccugaaaugu

SEQ ID NO: 2009507 - RNA, 23 nt, Human
uuuuaguggacccugaaaugugu

SEQ ID NO: 2009508 - RNA, 15 nt, Human
uuuuaguagagacag

SEQ ID NO: 2009509 - RNA, 14 nt, Human
uuuucaguguacau

SEQ ID NO: 2009510 - RNA, 19 nt, Human
uuuuccagagcauuccagu

SEQ ID NO: 2009511 - RNA, 20 nt, Human
uuuuccagagcauuccaguc

SEQ ID NO: 2009512 - RNA, 13 nt, Human
uuuuauuguugaa

SEQ ID NO: 2009513 - RNA, 21 nt, Human
uuuucagcuaggaacaaaucu

SEQ ID NO: 2009514 - RNA, 18 nt, Human
uuuucaggugcucaaaau

SEQ ID NO: 2009515 - RNA, 21 nt, Human
uuuucaggugcucaaaaugca

SEQ ID NO: 2009516 - RNA, 22 nt, Human
uuuucagcuaggaacaaaucuu

SEQ ID NO: 2009517 - RNA, 23 nt, Human
uuuucagcuaggaacaaaucuuc

SEQ ID NO: 2009518 - RNA, 17 nt, Human
uuuucucugauacagaa

SEQ ID NO: 2009519 - RNA, 22 nt, Human
uuuucucugauacuuuuuugaa

SEQ ID NO: 2009520 - RNA, 14 nt, Human
uuuucucuuagaaa

SEQ ID NO: 2009521 - RNA, 16 nt, Human
uuuucucuuaucugug

SEQ ID NO: 2009522 - RNA, 13 nt, Human
uuuucucuucaua

SEQ ID NO: 2009523 - RNA, 14 nt, Human
uuuucucuucauau

SEQ ID NO: 2009524 - RNA, 16 nt, Human
uuuucuauaauuuaaa

SEQ ID NO: 2009525 - RNA, 15 nt, Human
auguuuuuuuuuaaa

SEQ ID NO: 2009526 - RNA, 23 nt, Human
auuaaaaaucucaaauuucuaaa

SEQ ID NO: 2009527 - RNA, 19 nt, Human
auuaaaacacaacaucuuu

SEQ ID NO: 2009528 - RNA, 23 nt, Human
auguuuuuaaaaucuuauuaaag

SEQ ID NO: 2009529 - RNA, 14 nt, Human
auguuuuuaaaauc

SEQ ID NO: 2009530 - RNA, 15 nt, Human
auguuuuuaaaaucu

SEQ ID NO: 2009531 - RNA, 16 nt, Human
auguuuuuaaaaucuu

SEQ ID NO: 2009532 - RNA, 17 nt, Human
auguuuuuaaaaucuua

SEQ ID NO: 2009533 - RNA, 22 nt, Human
auguuuuucaguucaaagucau

SEQ ID NO: 2009534 - RNA, 13 nt, Human
auguuuuucaguu

SEQ ID NO: 2009535 - RNA, 16 nt, Human
auguuuuucaguucaa

SEQ ID NO: 2009536 - RNA, 17 nt, Human
auguuuuucaguucaaa

SEQ ID NO: 2009537 - RNA, 19 nt, Human
auguuuuucaguucaaagu

SEQ ID NO: 2009538 - RNA, 13 nt, Human
auguuuuuaaaau

SEQ ID NO: 2009539 - RNA, 17 nt, Human
auguuggccaggcuggu

SEQ ID NO: 2009540 - RNA, 12 nt, Human
uuuucuuaacca

SEQ ID NO: 2009541 - RNA, 20 nt, Human
auguuuaaaauuucuuagaa

SEQ ID NO: 2009542 - RNA, 21 nt, Human
auguuuaagcagaauuggaaa

SEQ ID NO: 2009543 - RNA, 22 nt, Human
auguuuaagcagaauuggaaaa

SEQ ID NO: 2009544 - RNA, 14 nt, Human
auguuuaagcagaa

SEQ ID NO: 2009545 - RNA, 16 nt, Human
auguuuaagcagaauu

SEQ ID NO: 2009546 - RNA, 20 nt, Human
auguuuaagcagaauuggaa

SEQ ID NO: 2009547 - RNA, 14 nt, Human
auguuuaaaguaau

SEQ ID NO: 2009548 - RNA, 18 nt, Human
auguuuaaaguaauuguu

SEQ ID NO: 2009549 - RNA, 21 nt, Human
auguuuaaaguaauuguucca

SEQ ID NO: 2009550 - RNA, 22 nt, Human
auguuuaaaguaauuguuccag

SEQ ID NO: 2009551 - RNA, 12 nt, Human
uuuucuuaaaaa

SEQ ID NO: 2009552 - RNA, 13 nt, Human
uuuucuuaaaaag

SEQ ID NO: 2009553 - RNA, 14 nt, Human
uuuucuuaaaaagu

SEQ ID NO: 2009554 - RNA, 13 nt, Human
uuuucuguucuuu

SEQ ID NO: 2009555 - RNA, 21 nt, Human
uuuucuuaaccagaucauugu

SEQ ID NO: 2009556 - RNA, 22 nt, Human
uuuucugcuuuagacuugaaaa

SEQ ID NO: 2009557 - RNA, 12 nt, Human
uuuucugcuuua

SEQ ID NO: 2009558 - RNA, 15 nt, Human
uuuucugcuuuagac

SEQ ID NO: 2009559 - RNA, 19 nt, Human
uuuucugcuuuagacuuga

SEQ ID NO: 2009560 - RNA, 14 nt, Human
uuugucuuaaaaag

SEQ ID NO: 2009561 - RNA, 13 nt, Human
uuugucuuaaaaa

SEQ ID NO: 2009562 - RNA, 23 nt, Human
uuugucuuaaaaaguggaaaaau

SEQ ID NO: 2009563 - RNA, 16 nt, Human
uuugugauacaaugcu

SEQ ID NO: 2009564 - RNA, 22 nt, Human
uuugugauacaaugcugugccc

SEQ ID NO: 2009565 - RNA, 15 nt, Human
uuugugauacaaugc

SEQ ID NO: 2009566 - RNA, 19 nt, Human
uuugugcauuaucuagaua

SEQ ID NO: 2009567 - RNA, 16 nt, Human
uuugugauguacugua

SEQ ID NO: 2009568 - RNA, 22 nt, Human
uuugugcauuaucuagauacug

SEQ ID NO: 2009569 - RNA, 16 nt, Human
uuuguuucugaaaggg

SEQ ID NO: 2009570 - RNA, 14 nt, Human
uuuguuucugaaag

SEQ ID NO: 2009571 - RNA, 14 nt, Human
uuuguacagacaac

SEQ ID NO: 2009572 - RNA, 21 nt, Human
uuuguacacccaugaaagaaa

SEQ ID NO: 2009573 - RNA, 14 nt, Human
uuuguacagagugc

SEQ ID NO: 2009574 - RNA, 16 nt, Human
uuuguaauuuuuuuau

SEQ ID NO: 2009575 - RNA, 13 nt, Human
uuuguaauuuaag

SEQ ID NO: 2009576 - RNA, 17 nt, Human
uuuguacaagauuguca

SEQ ID NO: 2009577 - RNA, 15 nt, Human
augugaugagaggaa

SEQ ID NO: 2009578 - RNA, 16 nt, Human
augugaucucauuguu

SEQ ID NO: 2009579 - RNA, 18 nt, Human
augugauccuuuuggagu

SEQ ID NO: 2009580 - RNA, 11 nt, Human
augugaucuca

SEQ ID NO: 2009581 - RNA, 19 nt, Human
auguauauuuuauaucaau

SEQ ID NO: 2009582 - RNA, 12 nt, Human
auguaucaauga

SEQ ID NO: 2009583 - RNA, 17 nt, Human
auguaucaaauacauuu

SEQ ID NO: 2009584 - RNA, 13 nt, Human
augucauuucaug

SEQ ID NO: 2009585 - RNA, 14 nt, Human
augucauuucaugu

SEQ ID NO: 2009586 - RNA, 17 nt, Human
auguccaagaagcccag

SEQ ID NO: 2009587 - RNA, 16 nt, Human
auguccaagaagccca

SEQ ID NO: 2009588 - RNA, 16 nt, Human
augucccuuucuucuc

SEQ ID NO: 2009589 - RNA, 17 nt, Human
augucccuuucuucucc

SEQ ID NO: 2009590 - RNA, 18 nt, Human
augucccuuucuucuccc

SEQ ID NO: 2009591 - RNA, 15 nt, Human
auguccuaaugguga

SEQ ID NO: 2009592 - RNA, 16 nt, Human
auguccuaauggugau

SEQ ID NO: 2009593 - RNA, 15 nt, Human
auguccuagacaggu

SEQ ID NO: 2009594 - RNA, 15 nt, Human
augugagcugcugcc

SEQ ID NO: 2009595 - RNA, 16 nt, Human
augugagcugcugcca

SEQ ID NO: 2009596 - RNA, 19 nt, Human
augugagcugcugccauga

SEQ ID NO: 2009597 - RNA, 23 nt, Human
augugagcugcugccaugaacug

SEQ ID NO: 2009598 - RNA, 14 nt, Human
augugaguauucuc

SEQ ID NO: 2009599 - RNA, 17 nt, Human
augugaguauucucauu

SEQ ID NO: 2009600 - RNA, 15 nt, Human
augugagugguugaa

SEQ ID NO: 2009601 - RNA, 16 nt, Human
augugagugguugaau

SEQ ID NO: 2009602 - RNA, 19 nt, Human
augugagugguugaauaug

SEQ ID NO: 2009603 - RNA, 22 nt, Human
augugagugguugaauaugauu

SEQ ID NO: 2009604 - RNA, 18 nt, Human
augugauauaaacagcuu

SEQ ID NO: 2009605 - RNA, 19 nt, Human
augugauauaaacagcuuc

SEQ ID NO: 2009606 - RNA, 13 nt, Human
augugagaccauu

SEQ ID NO: 2009607 - RNA, 11 nt, Human
augugacauuu

SEQ ID NO: 2009608 - RNA, 13 nt, Human
augugacauuugu

SEQ ID NO: 2009609 - RNA, 14 nt, Human
augugacauuuguc

SEQ ID NO: 2009610 - RNA, 15 nt, Human
augugacauuuguca

SEQ ID NO: 2009611 - RNA, 18 nt, Human
augugacauuugucauuu

SEQ ID NO: 2009612 - RNA, 19 nt, Human
augugacauuugucauuuu

SEQ ID NO: 2009613 - RNA, 22 nt, Human
augugacauuugucauuuucau

SEQ ID NO: 2009614 - RNA, 13 nt, Human
augugacuuugaa

SEQ ID NO: 2009615 - RNA, 21 nt, Human
augugacuuugaaaauauaua

SEQ ID NO: 2009616 - RNA, 14 nt, Human
augugagacugguu

SEQ ID NO: 2009617 - RNA, 23 nt, Human
augucgucaaagcugaaauggac

SEQ ID NO: 2009618 - RNA, 15 nt, Human
augucgccucugcau

SEQ ID NO: 2009619 - RNA, 19 nt, Human
augucguaguuacucucag

SEQ ID NO: 2009620 - RNA, 22 nt, Human
augucguaguuacucucaggca

SEQ ID NO: 2009621 - RNA, 18 nt, Human
augucgucgagcuccccc

SEQ ID NO: 2009622 - RNA, 18 nt, Human
uuuggcaaacucuccacc

SEQ ID NO: 2009623 - RNA, 13 nt, Human
uuuggcuccugcc

SEQ ID NO: 2009624 - RNA, 14 nt, Human
uuuggcuccugccc

SEQ ID NO: 2009625 - RNA, 15 nt, Human
uuuggcuccugccca

SEQ ID NO: 2009626 - RNA, 13 nt, Human
uuuggcugcugaa

SEQ ID NO: 2009627 - RNA, 12 nt, Human
uuuggcugcuga

SEQ ID NO: 2009628 - RNA, 14 nt, Human
uuugggcugcccug

SEQ ID NO: 2009629 - RNA, 17 nt, Human
uuugggcagagaggcug

SEQ ID NO: 2009630 - RNA, 17 nt, Human
auguauauaaacaugcu

SEQ ID NO: 2009631 - RNA, 14 nt, Human
auguauaguauuug

SEQ ID NO: 2009632 - RNA, 16 nt, Human
auguauaguauuugaa

SEQ ID NO: 2009633 - RNA, 17 nt, Human
auguauaguauuugaaa

SEQ ID NO: 2009634 - RNA, 18 nt, Human
auguauaguauuugaaaa

SEQ ID NO: 2009635 - RNA, 20 nt, Human
auguauaguauuugaaaaca

SEQ ID NO: 2009636 - RNA, 14 nt, Human
auguauacaugugc

SEQ ID NO: 2009637 - RNA, 21 nt, Human
auguauaauucaaagcaccaa

SEQ ID NO: 2009638 - RNA, 13 nt, Human
uuuggggaagaac

SEQ ID NO: 2009639 - RNA, 23 nt, Human
uuugggcuuguuguuuguaacaa

SEQ ID NO: 2009640 - RNA, 21 nt, Human
uuugggguacccacugcucug

SEQ ID NO: 2009641 - RNA, 22 nt, Human
uuugggguacccacugcucugg

SEQ ID NO: 2009642 - RNA, 22 nt, Human
uuuggauuggaugaauuccaaa

SEQ ID NO: 2009643 - RNA, 20 nt, Human
uuugcuggagcucugcccau

SEQ ID NO: 2009644 - RNA, 19 nt, Human
uuugcuggggccgaaagaa

SEQ ID NO: 2009645 - RNA, 22 nt, Human
uuugcuggggccgaaagaacag

SEQ ID NO: 2009646 - RNA, 18 nt, Human
uuugauucagacagcugc

SEQ ID NO: 2009647 - RNA, 21 nt, Human
uuugauuuauuaacuuaauaa

SEQ ID NO: 2009648 - RNA, 14 nt, Human
uuugauuuguacag

SEQ ID NO: 2009649 - RNA, 14 nt, Human
uuugauuugucacu

SEQ ID NO: 2009650 - RNA, 13 nt, Human
uuugauuuauuaa

SEQ ID NO: 2009651 - RNA, 16 nt, Human
uuugauuuauuaacuu

SEQ ID NO: 2009652 - RNA, 22 nt, Human
uuugcaaaaauccaaauauugu

SEQ ID NO: 2009653 - RNA, 15 nt, Human
uuugcaaaggagcuc

SEQ ID NO: 2009654 - RNA, 22 nt, Human
uuugcgaauauuuuguaaauua

SEQ ID NO: 2009655 - RNA, 12 nt, Human
uuucccuuccag

SEQ ID NO: 2009656 - RNA, 13 nt, Human
uuucccuuccagu

SEQ ID NO: 2009657 - RNA, 14 nt, Human
uuucccuuccaguu

SEQ ID NO: 2009658 - RNA, 15 nt, Human
uuucccuugaggaaa

SEQ ID NO: 2009659 - RNA, 17 nt, Human
uuugaauuuucauuuua

SEQ ID NO: 2009660 - RNA, 13 nt, Human
uuucccugaaguu

SEQ ID NO: 2009661 - RNA, 21 nt, Human
uuucccugaaguuauguguau

SEQ ID NO: 2009662 - RNA, 23 nt, Human
uuucccucccuuccucuuuccau

SEQ ID NO: 2009663 - RNA, 16 nt, Human
uuucccucagaaaaug

SEQ ID NO: 2009664 - RNA, 19 nt, Human
uuugaccucugcagcaaua

SEQ ID NO: 2009665 - RNA, 21 nt, Human
uuugaccucugcagcaauaaa

SEQ ID NO: 2009666 - RNA, 14 nt, Human
uuugacaaggggca

SEQ ID NO: 2009667 - RNA, 18 nt, Human
uuugacaaagguaaauca

SEQ ID NO: 2009668 - RNA, 23 nt, Human
uuugacaagcuggcuuacacugg

SEQ ID NO: 2009669 - RNA, 20 nt, Human
uuugaauuuucauuuuacag

SEQ ID NO: 2009670 - RNA, 23 nt, Human
uuugaauuuucauuuuacaguua

SEQ ID NO: 2009671 - RNA, 15 nt, Human
uuugauucagacagc

SEQ ID NO: 2009672 - RNA, 13 nt, Human
uuugauucacaug

SEQ ID NO: 2009673 - RNA, 14 nt, Human
uuugauucacaugu

SEQ ID NO: 2009674 - RNA, 16 nt, Human
uuugauucacauguuu

SEQ ID NO: 2009675 - RNA, 18 nt, Human
uuugauucacauguuuuc

SEQ ID NO: 2009676 - RNA, 19 nt, Human
uuugauucacauguuuuca

SEQ ID NO: 2009677 - RNA, 20 nt, Human
uuugauucacauguuuucaa

SEQ ID NO: 2009678 - RNA, 21 nt, Human
uuugauucacauguuuucaaa

SEQ ID NO: 2009679 - RNA, 22 nt, Human
uuugauucacauguuuucaaau

SEQ ID NO: 2009680 - RNA, 12 nt, Human
uuugauucacau

SEQ ID NO: 2009681 - RNA, 18 nt, Human
uuugaucuuccucugcua

SEQ ID NO: 2009682 - RNA, 19 nt, Human
uuugaucuuccucugcuaa

SEQ ID NO: 2009683 - RNA, 20 nt, Human
uuugaucuuccucugcuaaa

SEQ ID NO: 2009684 - RNA, 22 nt, Human
uuugaucuuccucugcuaaauu

SEQ ID NO: 2009685 - RNA, 16 nt, Human
uuugaucucacauuuu

SEQ ID NO: 2009686 - RNA, 18 nt, Human
uuugaucucacauuuuua

SEQ ID NO: 2009687 - RNA, 14 nt, Human
uuugaucucacauu

SEQ ID NO: 2009688 - RNA, 15 nt, Human
uuugauccaagcugg

SEQ ID NO: 2009689 - RNA, 23 nt, Human
uuugaccuguugggagugaggau

SEQ ID NO: 2009690 - RNA, 18 nt, Human
uuugaccucugcagcaau

SEQ ID NO: 2009691 - RNA, 13 nt, Human
uuugagacagagu

SEQ ID NO: 2009692 - RNA, 15 nt, Human
auucagccuggcuuc

SEQ ID NO: 2009693 - RNA, 21 nt, Human
auucaaagaaucaccuaauua

SEQ ID NO: 2009694 - RNA, 19 nt, Human
auucaaagcaccaaaauaa

SEQ ID NO: 2009695 - RNA, 14 nt, Human
auucaaagaaucac

SEQ ID NO: 2009696 - RNA, 15 nt, Human
auucaaaccuaaguu

SEQ ID NO: 2009697 - RNA, 18 nt, Human
auucaaacugaaaagcug

SEQ ID NO: 2009698 - RNA, 13 nt, Human
auucaccuucagu

SEQ ID NO: 2009699 - RNA, 17 nt, Human
auuauugauguuuucau

SEQ ID NO: 2009700 - RNA, 14 nt, Human
auuauugaugaaaa

SEQ ID NO: 2009701 - RNA, 21 nt, Human
auuauuggaaaggaccuaaaa

SEQ ID NO: 2009702 - RNA, 22 nt, Human
auuauuguccuuugauuccaaa

SEQ ID NO: 2009703 - RNA, 12 nt, Human
auucaaaaaguc

SEQ ID NO: 2009704 - RNA, 19 nt, Human
auucaaaaagucacaguua

SEQ ID NO: 2009705 - RNA, 18 nt, Human
auuauaaacaagaaugaa

SEQ ID NO: 2009706 - RNA, 22 nt, Human
auuauaaacaagaaugaagguu

SEQ ID NO: 2009707 - RNA, 17 nt, Human
auuauaaacucauuuug

SEQ ID NO: 2009708 - RNA, 19 nt, Human
auuauaaacucauuuugcu

SEQ ID NO: 2009709 - RNA, 19 nt, Human
auuagacuucuguuuucaa

SEQ ID NO: 2009710 - RNA, 20 nt, Human
auuagacuucuguuuucaau

SEQ ID NO: 2009711 - RNA, 18 nt, Human
auuauaucagacugcuuu

SEQ ID NO: 2009712 - RNA, 20 nt, Human
auuauauggcuugaguuuaa

SEQ ID NO: 2009713 - RNA, 15 nt, Human
auuauucaggcuuua

SEQ ID NO: 2009714 - RNA, 16 nt, Human
auucagugaugugccu

SEQ ID NO: 2009715 - RNA, 18 nt, Human
auucaggggaaacuugau

SEQ ID NO: 2009716 - RNA, 20 nt, Human
auucagaaaugacuuuuuga

SEQ ID NO: 2009717 - RNA, 14 nt, Human
auucagccuggcuu

SEQ ID NO: 2009718 - RNA, 12 nt, Human
auucagcaucug

SEQ ID NO: 2009719 - RNA, 19 nt, Human
auucagcauuagugggaaa

SEQ ID NO: 2009720 - RNA, 14 nt, Human
auucagauuucucu

SEQ ID NO: 2009721 - RNA, 19 nt, Human
auucagauuucucuuugaa

SEQ ID NO: 2009722 - RNA, 20 nt, Human
auucagauuucucuuugaaa

SEQ ID NO: 2009723 - RNA, 20 nt, Human
auucagcaaggcgcuaacuu

SEQ ID NO: 2009724 - RNA, 21 nt, Human
auucagcaaggcgcuaacuug

SEQ ID NO: 2009725 - RNA, 23 nt, Human
auucagcaaggcgcuaacuugcu

SEQ ID NO: 2009726 - RNA, 22 nt, Human
auuccccaggaggccagccuug

SEQ ID NO: 2009727 - RNA, 20 nt, Human
auuccccaggaggccagccu

SEQ ID NO: 2009728 - RNA, 18 nt, Human
auucccaagcucugcucc

SEQ ID NO: 2009729 - RNA, 19 nt, Human
auucccaagcucugcuccu

SEQ ID NO: 2009730 - RNA, 18 nt, Human
auuccagaaugaagaauu

SEQ ID NO: 2009731 - RNA, 16 nt, Human
auuccagacagucaca

SEQ ID NO: 2009732 - RNA, 23 nt, Human
auuccagacagucacaaauuucu

SEQ ID NO: 2009733 - RNA, 17 nt, Human
auucccaagcucugcuc

SEQ ID NO: 2009734 - RNA, 18 nt, Human
auuccagagaguggcucc

SEQ ID NO: 2009735 - RNA, 17 nt, Human
auuccaagugauugaaa

SEQ ID NO: 2009736 - RNA, 12 nt, Human
auuccacagcug

SEQ ID NO: 2009737 - RNA, 23 nt, Human
auuccaagucagaaacuguuucu

SEQ ID NO: 2009738 - RNA, 17 nt, Human
uuuugugaaauuuuuca

SEQ ID NO: 2009739 - RNA, 20 nt, Human
uuuugugaaauuuuucauau

SEQ ID NO: 2009740 - RNA, 22 nt, Human
uuuugugaaauuuuucauauuu

SEQ ID NO: 2009741 - RNA, 19 nt, Human
uuuugugaagugaaggauu

SEQ ID NO: 2009742 - RNA, 12 nt, Human
uuuugugaaauu

SEQ ID NO: 2009743 - RNA, 13 nt, Human
uuuugugaaauuu

SEQ ID NO: 2009744 - RNA, 16 nt, Human
uuuuguguugaagagc

SEQ ID NO: 2009745 - RNA, 12 nt, Human
uuuuguguuuau

SEQ ID NO: 2009746 - RNA, 23 nt, Human
uuuuguguuuauucuugaugaaa

SEQ ID NO: 2009747 - RNA, 23 nt, Human
uuuugugaguuuguuucuuugaa

SEQ ID NO: 2009748 - RNA, 22 nt, Human
uuuugugcuuaguuaaaucuuu

SEQ ID NO: 2009749 - RNA, 23 nt, Human
uuuugugcauuaucuagauacug

SEQ ID NO: 2009750 - RNA, 14 nt, Human
uuuugugaguuugu

SEQ ID NO: 2009751 - RNA, 13 nt, Human
auuaaaauuguug

SEQ ID NO: 2009752 - RNA, 23 nt, Human
auuaaaauaugcacuaagucucu

SEQ ID NO: 2009753 - RNA, 17 nt, Human
uuuugcuuuaauuuuag

SEQ ID NO: 2009754 - RNA, 18 nt, Human
uuuugcuuuaauuuuagc

SEQ ID NO: 2009755 - RNA, 11 nt, Human
uuuugcuuuug

SEQ ID NO: 2009756 - RNA, 13 nt, Human
uuuugcuuccccu

SEQ ID NO: 2009757 - RNA, 22 nt, Human
uuuugcuugaagcaaacaguug

SEQ ID NO: 2009758 - RNA, 13 nt, Human
uuuugcuuuaauu

SEQ ID NO: 2009759 - RNA, 19 nt, Human
uuuugcuuuaauuccauga

SEQ ID NO: 2009760 - RNA, 22 nt, Human
uuuuggaaaacgauuuaauuua

SEQ ID NO: 2009761 - RNA, 16 nt, Human
uuuuguuacucuuggg

SEQ ID NO: 2009762 - RNA, 11 nt, Human
uuuuguugcac

SEQ ID NO: 2009763 - RNA, 12 nt, Human
uuuuguugcacu

SEQ ID NO: 2009764 - RNA, 13 nt, Human
uuuuguugcacug

SEQ ID NO: 2009765 - RNA, 15 nt, Human
uuuuguugcacugaa

SEQ ID NO: 2009766 - RNA, 18 nt, Human
uuuuguugcacugaaguu

SEQ ID NO: 2009767 - RNA, 16 nt, Human
uuuuguuuuugucuua

SEQ ID NO: 2009768 - RNA, 13 nt, Human
uuuuguuuugcuu

SEQ ID NO: 2009769 - RNA, 21 nt, Human
uuuuguugcacugaaguuuga

SEQ ID NO: 2009770 - RNA, 15 nt, Human
uuuuguuuuguugca

SEQ ID NO: 2009771 - RNA, 18 nt, Human
uuuuguuuuucugcuuua

SEQ ID NO: 2009772 - RNA, 16 nt, Human
uuuuguuuuuugaguc

SEQ ID NO: 2009773 - RNA, 13 nt, Human
uuuuuaauuguau

SEQ ID NO: 2009774 - RNA, 14 nt, Human
uuuuuauaucuugg

SEQ ID NO: 2009775 - RNA, 14 nt, Human
uuuuuauauuucaa

SEQ ID NO: 2009776 - RNA, 21 nt, Human
uuuuuauauuucaaguacacu

SEQ ID NO: 2009777 - RNA, 21 nt, Human
uuuuuauaccuguuuaaauug

SEQ ID NO: 2009778 - RNA, 17 nt, Human
uuuuuauauauaugcau

SEQ ID NO: 2009779 - RNA, 19 nt, Human
auuaaguacuauguaucaa

SEQ ID NO: 2009780 - RNA, 18 nt, Human
auuaaguacuauguauca

SEQ ID NO: 2009781 - RNA, 13 nt, Human
auuaaggaagaca

SEQ ID NO: 2009782 - RNA, 11 nt, Human
uuuuuguauuc

SEQ ID NO: 2009783 - RNA, 11 nt, Human
uuuuuguauuu

SEQ ID NO: 2009784 - RNA, 22 nt, Human
uuuuugggaaaagaaaagucaa

SEQ ID NO: 2009785 - RNA, 10 nt, Human
uuuuuguaaa

SEQ ID NO: 2009786 - RNA, 14 nt, Human
uuuuuguaaagauu

SEQ ID NO: 2009787 - RNA, 19 nt, Human
uuuuuguaaagauuucugu

SEQ ID NO: 2009788 - RNA, 9 nt, Human
uuuuuguau

SEQ ID NO: 2009789 - RNA, 22 nt, Human
uuuuuguauauugguuuuauga

SEQ ID NO: 2009790 - RNA, 19 nt, Human
uuuuuggaagugaaaacuu

SEQ ID NO: 2009791 - RNA, 15 nt, Human
uuuuuggacacauuu

SEQ ID NO: 2009792 - RNA, 15 nt, Human
uuuuuggaagugaaa

SEQ ID NO: 2009793 - RNA, 14 nt, Human
uuuuugcucuaaaa

SEQ ID NO: 2009794 - RNA, 18 nt, Human
uuuuugcaggagcaguau

SEQ ID NO: 2009795 - RNA, 13 nt, Human
uuuuugauagcau

SEQ ID NO: 2009796 - RNA, 14 nt, Human
uuuuugauagcauu

SEQ ID NO: 2009797 - RNA, 19 nt, Human
uuuuugauagcauuguaag

SEQ ID NO: 2009798 - RNA, 14 nt, Human
uuuuugaaguguug

SEQ ID NO: 2009799 - RNA, 15 nt, Human
uuuuuauuucuccuu

SEQ ID NO: 2009800 - RNA, 22 nt, Human
uuuuuauuucugucaguuauga

SEQ ID NO: 2009801 - RNA, 21 nt, Human
uuuuuauuuauauguaugugu

SEQ ID NO: 2009802 - RNA, 14 nt, Human
uuuuuauuucuccu

SEQ ID NO: 2009803 - RNA, 14 nt, Human
uuuuuauuuauaug

SEQ ID NO: 2009804 - RNA, 17 nt, Human
uuuuuauuuauauguau

SEQ ID NO: 2009805 - RNA, 22 nt, Human
uuuuuauauuucaaguacacug

SEQ ID NO: 2009806 - RNA, 13 nt, Human
uuuuuauuuauau

SEQ ID NO: 2009807 - RNA, 22 nt, Human
uuuuugaaggcagaaagcaaaa

SEQ ID NO: 2009808 - RNA, 23 nt, Human
uuuuugaaggcagaaagcaaaau

SEQ ID NO: 2009809 - RNA, 15 nt, Human
uuuuugaagcuguau

SEQ ID NO: 2009810 - RNA, 13 nt, Human
auuagagaagaga

SEQ ID NO: 2009811 - RNA, 14 nt, Human
auuagacuucuguu

SEQ ID NO: 2009812 - RNA, 15 nt, Human
auuagacuucuguuu

SEQ ID NO: 2009813 - RNA, 16 nt, Human
auuagacuucuguuuu

SEQ ID NO: 2009814 - RNA, 17 nt, Human
auuacuuguugccuaua

SEQ ID NO: 2009815 - RNA, 14 nt, Human
auuacuucugcuac

SEQ ID NO: 2009816 - RNA, 15 nt, Human
auuacuuguugccua

SEQ ID NO: 2009817 - RNA, 12 nt, Human
auuacuucugcu

SEQ ID NO: 2009818 - RNA, 13 nt, Human
auuacuucugcua

SEQ ID NO: 2009819 - RNA, 12 nt, Human
auuaaucacugu

SEQ ID NO: 2009820 - RNA, 13 nt, Human
auuaaucacugug

SEQ ID NO: 2009821 - RNA, 14 nt, Human
auuaaucacugugu

SEQ ID NO: 2009822 - RNA, 15 nt, Human
auuaaucacugugua

SEQ ID NO: 2009823 - RNA, 16 nt, Human
auuaaucacuguguau

SEQ ID NO: 2009824 - RNA, 17 nt, Human
auuaaucacuguguaua

SEQ ID NO: 2009825 - RNA, 18 nt, Human
auuaaucacuguguauau

SEQ ID NO: 2009826 - RNA, 19 nt, Human
auuaaucacuguguauauu

SEQ ID NO: 2009827 - RNA, 20 nt, Human
auuaaucacuguguauauuu

SEQ ID NO: 2009828 - RNA, 21 nt, Human
auuaaucacuguguauauuug

SEQ ID NO: 2009829 - RNA, 22 nt, Human
auuaaucacuguguauauuuga

SEQ ID NO: 2009830 - RNA, 23 nt, Human
auuaaucacuguguauauuugau

SEQ ID NO: 2009831 - RNA, 17 nt, Human
auuacuguuuaagacac

SEQ ID NO: 2009832 - RNA, 21 nt, Human
auuaaguccuacuuuuaaaga

SEQ ID NO: 2009833 - RNA, 20 nt, Human
auugaagguuuuugauagca

SEQ ID NO: 2009834 - RNA, 20 nt, Human
auugaauuuuuauuuuugaa

SEQ ID NO: 2009835 - RNA, 13 nt, Human
auugaagguuuuu

SEQ ID NO: 2009836 - RNA, 17 nt, Human
auugaagguuuuugaua

SEQ ID NO: 2009837 - RNA, 18 nt, Human
auugaagguuuuugauag

SEQ ID NO: 2009838 - RNA, 19 nt, Human
auugaagguuuuugauagc

SEQ ID NO: 2009839 - RNA, 17 nt, Human
auugcaacaggcugggc

SEQ ID NO: 2009840 - RNA, 18 nt, Human
auugcaacaggcugggcu

SEQ ID NO: 2009841 - RNA, 12 nt, Human
auugcaccacug

SEQ ID NO: 2009842 - RNA, 19 nt, Human
auugcaacaggcugggcuu

SEQ ID NO: 2009843 - RNA, 15 nt, Human
auugauuuuaaaaug

SEQ ID NO: 2009844 - RNA, 16 nt, Human
auugauuuuaaaaugu

SEQ ID NO: 2009845 - RNA, 19 nt, Human
auugauuuuaaaauguaca

SEQ ID NO: 2009846 - RNA, 20 nt, Human
auugauuuuaaaauguacau

SEQ ID NO: 2009847 - RNA, 15 nt, Human
auugauuugauuuuu

SEQ ID NO: 2009848 - RNA, 14 nt, Human
auugauguuuccuu

SEQ ID NO: 2009849 - RNA, 12 nt, Human
auugauguugau

SEQ ID NO: 2009850 - RNA, 13 nt, Human
auugauguugaug

SEQ ID NO: 2009851 - RNA, 14 nt, Human
auugauguugaugc

SEQ ID NO: 2009852 - RNA, 16 nt, Human
auugauguugaugcaa

SEQ ID NO: 2009853 - RNA, 18 nt, Human
auugauguugaugcaauc

SEQ ID NO: 2009854 - RNA, 13 nt, Human
auugauguuuuca

SEQ ID NO: 2009855 - RNA, 16 nt, Human
auugauguuuucauag

SEQ ID NO: 2009856 - RNA, 17 nt, Human
auugauguuuucauaga

SEQ ID NO: 2009857 - RNA, 23 nt, Human
auuggcuagagguucaaagauau

SEQ ID NO: 2009858 - RNA, 19 nt, Human
auuggcuagagguucaaag

SEQ ID NO: 2009859 - RNA, 20 nt, Human
auuggcuagagguucaaaga

SEQ ID NO: 2009860 - RNA, 22 nt, Human
auuggcuagagguucaaagaua

SEQ ID NO: 2009861 - RNA, 22 nt, Human
auugcauauaacuuauauugua

SEQ ID NO: 2009862 - RNA, 16 nt, Human
auugcauauaacuuau

SEQ ID NO: 2009863 - RNA, 18 nt, Human
auugcauauaacuuauau

SEQ ID NO: 2009864 - RNA, 20 nt, Human
auugcaucuggguagcugua

SEQ ID NO: 2009865 - RNA, 21 nt, Human
auugcaucuggguagcuguaa

SEQ ID NO: 2009866 - RNA, 15 nt, Human
auugcaucauuuaca

SEQ ID NO: 2009867 - RNA, 22 nt, Human
auugcaucuggguagcuguaag

SEQ ID NO: 2009868 - RNA, 19 nt, Human
auugcaugccgggugcagc

SEQ ID NO: 2009869 - RNA, 23 nt, Human
auugcaugccgggugcagcaucu

SEQ ID NO: 2009870 - RNA, 13 nt, Human
auuggaaauuuca

SEQ ID NO: 2009871 - RNA, 14 nt, Human
auuggaaauuucac

SEQ ID NO: 2009872 - RNA, 15 nt, Human
auuggaaauuucacg

SEQ ID NO: 2009873 - RNA, 17 nt, Human
auuggaaugcacucaga

SEQ ID NO: 2009874 - RNA, 12 nt, Human
auuggaagcagg

SEQ ID NO: 2009875 - RNA, 19 nt, Human
auuggaagcagguuaaaug

SEQ ID NO: 2009876 - RNA, 20 nt, Human
auuggaagcagguuaaaugu

SEQ ID NO: 2009877 - RNA, 21 nt, Human
auuggaagcagguuaaauguu

SEQ ID NO: 2009878 - RNA, 22 nt, Human
auuggaagcagguuaaauguuu

SEQ ID NO: 2009879 - RNA, 14 nt, Human
auuggaaacaaguc

SEQ ID NO: 2009880 - RNA, 13 nt, Human
auuggaaacaagu

SEQ ID NO: 2009881 - RNA, 13 nt, Human
auugccuuucugu

SEQ ID NO: 2009882 - RNA, 11 nt, Human
auuucuuuaua

SEQ ID NO: 2009883 - RNA, 15 nt, Human
auuucuuuauaaaau

SEQ ID NO: 2009884 - RNA, 22 nt, Human
auuucuuuauaaaauuuacugu

SEQ ID NO: 2009885 - RNA, 23 nt, Human
auuugaauguaugcuucauacag

SEQ ID NO: 2009886 - RNA, 20 nt, Human
auuucuugagguaaaagcau

SEQ ID NO: 2009887 - RNA, 16 nt, Human
auuucuuccacaagag

SEQ ID NO: 2009888 - RNA, 17 nt, Human
auuugaggucuguucuu

SEQ ID NO: 2009889 - RNA, 18 nt, Human
auuugaggucuguucuuu

SEQ ID NO: 2009890 - RNA, 15 nt, Human
auuugagcagggcuc

SEQ ID NO: 2009891 - RNA, 16 nt, Human
auuugagcagggcuca

SEQ ID NO: 2009892 - RNA, 12 nt, Human
auuugagauuuu

SEQ ID NO: 2009893 - RNA, 18 nt, Human
auuugauaugugaacagu

SEQ ID NO: 2009894 - RNA, 19 nt, Human
auuugauaugugaacaguu

SEQ ID NO: 2009895 - RNA, 21 nt, Human
auuugaggucuguucuuucca

SEQ ID NO: 2009896 - RNA, 16 nt, Human
auuuggagggccuggg

SEQ ID NO: 2009897 - RNA, 17 nt, Human
auuuggagggccugggc

SEQ ID NO: 2009898 - RNA, 15 nt, Human
auuuggagggccugg

SEQ ID NO: 2009899 - RNA, 14 nt, Human
auuuggagagaaau

SEQ ID NO: 2009900 - RNA, 15 nt, Human
auuuggagagaaaua

SEQ ID NO: 2009901 - RNA, 16 nt, Human
auuuggagagaaauau

SEQ ID NO: 2009902 - RNA, 17 nt, Human
auuuggagagaaauauu

SEQ ID NO: 2009903 - RNA, 18 nt, Human
auuuggagagaaauauuu

SEQ ID NO: 2009904 - RNA, 12 nt, Human
auuugguuuuca

SEQ ID NO: 2009905 - RNA, 14 nt, Human
auuugguuuucaca

SEQ ID NO: 2009906 - RNA, 13 nt, Human
auuuguaauuuaa

SEQ ID NO: 2009907 - RNA, 21 nt, Human
auuuguacagauucuuuauua

SEQ ID NO: 2009908 - RNA, 21 nt, Human
auuuggugguuucagaaaugu

SEQ ID NO: 2009909 - RNA, 14 nt, Human
auuuggaugcagag

SEQ ID NO: 2009910 - RNA, 22 nt, Human
auuuggagggccugggccuggc

SEQ ID NO: 2009911 - RNA, 19 nt, Human
auuuggauuauucuuucuc

SEQ ID NO: 2009912 - RNA, 23 nt, Human
auuuauaaaaauaaaaaacacug

SEQ ID NO: 2009913 - RNA, 17 nt, Human
auuuaguguucauaaau

SEQ ID NO: 2009914 - RNA, 20 nt, Human
auuuacuucuuauacauuug

SEQ ID NO: 2009915 - RNA, 19 nt, Human
auuuacuucuuauacauuu

SEQ ID NO: 2009916 - RNA, 16 nt, Human
auuuaguguucauaaa

SEQ ID NO: 2009917 - RNA, 15 nt, Human
auuuauaaacuuuuu

SEQ ID NO: 2009918 - RNA, 19 nt, Human
auuuaugguaaucauauua

SEQ ID NO: 2009919 - RNA, 22 nt, Human
auuuacuacaauauguacauuu

SEQ ID NO: 2009920 - RNA, 19 nt, Human
auuuacaagacaacauugu

SEQ ID NO: 2009921 - RNA, 16 nt, Human
auuuaaauagcuuuuu

SEQ ID NO: 2009922 - RNA, 15 nt, Human
auuuaaaauugugau

SEQ ID NO: 2009923 - RNA, 12 nt, Human
auuuaaaaugua

SEQ ID NO: 2009924 - RNA, 14 nt, Human
auuuaaaaaaaauc

SEQ ID NO: 2009925 - RNA, 20 nt, Human
auuguuuuucugauauguuu

SEQ ID NO: 2009926 - RNA, 19 nt, Human
auuguuuucaguguacaug

SEQ ID NO: 2009927 - RNA, 18 nt, Human
auuguuuucaguguacau

SEQ ID NO: 2009928 - RNA, 17 nt, Human
auuuaaaaaaaaaccug

SEQ ID NO: 2009929 - RNA, 20 nt, Human
auuguagcauccuggaauau

SEQ ID NO: 2009930 - RNA, 17 nt, Human
auuguuuucaguguaca

SEQ ID NO: 2009931 - RNA, 18 nt, Human
auuguagagccagagguc

SEQ ID NO: 2009932 - RNA, 17 nt, Human
auuguagcauccuggaa

SEQ ID NO: 2009933 - RNA, 17 nt, Human
auuguagagccagaggu

SEQ ID NO: 2009934 - RNA, 16 nt, Human
auuguaguccuguaau

SEQ ID NO: 2009935 - RNA, 16 nt, Human
auuuauucugggaaug

SEQ ID NO: 2009936 - RNA, 18 nt, Human
auuuauucugggaaugua

SEQ ID NO: 2009937 - RNA, 19 nt, Human
auuuauucugggaauguau

SEQ ID NO: 2009938 - RNA, 20 nt, Human
auuuauucugggaauguaua

SEQ ID NO: 2009939 - RNA, 21 nt, Human
auuuauucugggaauguauag

SEQ ID NO: 2009940 - RNA, 22 nt, Human
auuuauucugggaauguauagu

SEQ ID NO: 2009941 - RNA, 13 nt, Human
auuuauugaaaug

SEQ ID NO: 2009942 - RNA, 15 nt, Human
auuuauugaaaugau

SEQ ID NO: 2009943 - RNA, 22 nt, Human
auuuauugaaaugauuucacag

SEQ ID NO: 2009944 - RNA, 21 nt, Human
auuuauugaggaaaaauaugu

SEQ ID NO: 2009945 - RNA, 11 nt, Human
auuuauucuuu

SEQ ID NO: 2009946 - RNA, 13 nt, Human
auuuauugacucu

SEQ ID NO: 2009947 - RNA, 14 nt, Human
auuuauugacucuu

SEQ ID NO: 2009948 - RNA, 16 nt, Human
auuuauugacucuuga

SEQ ID NO: 2009949 - RNA, 19 nt, Human
auuuauugacucuugaguu

SEQ ID NO: 2009950 - RNA, 20 nt, Human
auuuauugacucuugaguug

SEQ ID NO: 2009951 - RNA, 22 nt, Human
auuuauugacucuugaguuguu

SEQ ID NO: 2009952 - RNA, 14 nt, Human
auuuauugaggaaa

SEQ ID NO: 2009953 - RNA, 15 nt, Human
auuuauugaggaaaa

SEQ ID NO: 2009954 - RNA, 17 nt, Human
auuuauugaggaaaaau

SEQ ID NO: 2009955 - RNA, 18 nt, Human
auuuauugaggaaaaaua

SEQ ID NO: 2009956 - RNA, 16 nt, Human
auuuccucuugaacca

SEQ ID NO: 2009957 - RNA, 16 nt, Human
auuucgugacuuuuuu

SEQ ID NO: 2009958 - RNA, 16 nt, Human
auuucccaaagcagug

SEQ ID NO: 2009959 - RNA, 14 nt, Human
auuucccaaagcag

SEQ ID NO: 2009960 - RNA, 17 nt, Human
auuuccguuaaaauacc

SEQ ID NO: 2009961 - RNA, 14 nt, Human
auuuccuaaauaua

SEQ ID NO: 2009962 - RNA, 15 nt, Human
auuuccuauaccauu

SEQ ID NO: 2009963 - RNA, 21 nt, Human
auuuccuaaauauauuuuaag

SEQ ID NO: 2009964 - RNA, 22 nt, Human
auuuauuuuuuuuaauuguauu

SEQ ID NO: 2009965 - RNA, 23 nt, Human
auuuauuuuuuuuaauuguauuu

SEQ ID NO: 2009966 - RNA, 17 nt, Human
auuuccauguaugcaua

SEQ ID NO: 2009967 - RNA, 18 nt, Human
auuuccauguaugcauaa

SEQ ID NO: 2009968 - RNA, 14 nt, Human
auuuccauguaugc

SEQ ID NO: 2009969 - RNA, 15 nt, Human
auuuccauguaugca

SEQ ID NO: 2009970 - RNA, 18 nt, Human
auuucauguccuguguca

SEQ ID NO: 2009971 - RNA, 21 nt, Human
auuucauguccugugucaguu

SEQ ID NO: 2009972 - RNA, 22 nt, Human
auuucauguccugugucaguuu

SEQ ID NO: 2009973 - RNA, 23 nt, Human
auuucauguccugugucaguuua

SEQ ID NO: 2009974 - RNA, 18 nt, Human
auuuauuuuuaagaaaga

SEQ ID NO: 2009975 - RNA, 19 nt, Human
auuuauuuuuaagaaagaa

SEQ ID NO: 2009976 - RNA, 20 nt, Human
auuuauuuuuaagaaagaaa

SEQ ID NO: 2009977 - RNA, 19 nt, Human
auuuauuuuuuuuaauugu

SEQ ID NO: 2009978 - RNA, 21 nt, Human
auuuauuuuuuuuaauuguau

SEQ ID NO: 2009979 - RNA, 23 nt, Human
augcacuuuguucuggcucuucc

SEQ ID NO: 2009980 - RNA, 17 nt, Human
augcagaauggcauuug

SEQ ID NO: 2009981 - RNA, 18 nt, Human
uuuaaaaaaauuccaagu

SEQ ID NO: 2009982 - RNA, 17 nt, Human
augcagagguccacaac

SEQ ID NO: 2009983 - RNA, 18 nt, Human
augcagagguccacaaca

SEQ ID NO: 2009984 - RNA, 14 nt, Human
augcacucagcucu

SEQ ID NO: 2009985 - RNA, 20 nt, Human
augcacuaagucucuuuuuu

SEQ ID NO: 2009986 - RNA, 21 nt, Human
augcacuuuguucuggcucuu

SEQ ID NO: 2009987 - RNA, 17 nt, Human
uuguucuugguuuguaa

SEQ ID NO: 2009988 - RNA, 19 nt, Human
uuguucuugguuuguaaau

SEQ ID NO: 2009989 - RNA, 14 nt, Human
uuguucuuccaaag

SEQ ID NO: 2009990 - RNA, 18 nt, Human
uuguucuuccaaagcaga

SEQ ID NO: 2009991 - RNA, 17 nt, Human
augauuuaauuugaaau

SEQ ID NO: 2009992 - RNA, 20 nt, Human
uuguucuugguuuguaaauu

SEQ ID NO: 2009993 - RNA, 13 nt, Human
uuguucuugauag

SEQ ID NO: 2009994 - RNA, 19 nt, Human
uuguucuuggcaauaaauu

SEQ ID NO: 2009995 - RNA, 21 nt, Human
uuguucuuggcaauaaauuuu

SEQ ID NO: 2009996 - RNA, 23 nt, Human
augcaaaaagcuagucaacagua

SEQ ID NO: 2009997 - RNA, 17 nt, Human
augcaaacauuggaaga

SEQ ID NO: 2009998 - RNA, 13 nt, Human
augcaaaaaaucu

SEQ ID NO: 2009999 - RNA, 14 nt, Human
augcaaaaaaucuu

SEQ ID NO: 2010000 - RNA, 15 nt, Human
augcaaaaaaucuua

SEQ ID NO: 2010001 - RNA, 17 nt, Human
augcaaaaaaucuuaau

SEQ ID NO: 2010002 - RNA, 23 nt, Human
augcaaaaaaucuuaauacuguu

SEQ ID NO: 2010003 - RNA, 13 nt, Human
augauuucauuca

SEQ ID NO: 2010004 - RNA, 13 nt, Human
augauuucacaaa

SEQ ID NO: 2010005 - RNA, 14 nt, Human
augauuucacaaau

SEQ ID NO: 2010006 - RNA, 12 nt, Human
augauuucacaa

SEQ ID NO: 2010007 - RNA, 16 nt, Human
uuuaaugaaagacugu

SEQ ID NO: 2010008 - RNA, 22 nt, Human
uuuaaggguuuguggaaaauga

SEQ ID NO: 2010009 - RNA, 15 nt, Human
uuuaaggucuguuug

SEQ ID NO: 2010010 - RNA, 17 nt, Human
uuuaaggguuuguggaa

SEQ ID NO: 2010011 - RNA, 20 nt, Human
uuuaaggguuuguggaaaau

SEQ ID NO: 2010012 - RNA, 20 nt, Human
uuuaaggaugcuuguacaua

SEQ ID NO: 2010013 - RNA, 21 nt, Human
uuuaaggaugcuuguacauaa

SEQ ID NO: 2010014 - RNA, 22 nt, Human
uuuaaggaugcuuguacauaau

SEQ ID NO: 2010015 - RNA, 18 nt, Human
uuuaaggacugacugagg

SEQ ID NO: 2010016 - RNA, 19 nt, Human
uuuaaggacugacugaggc

SEQ ID NO: 2010017 - RNA, 21 nt, Human
uuuaagcuguuacugucuuca

SEQ ID NO: 2010018 - RNA, 19 nt, Human
uuuaaggaugcuuguacau

SEQ ID NO: 2010019 - RNA, 15 nt, Human
uuuaaggaaaggcaa

SEQ ID NO: 2010020 - RNA, 12 nt, Human
uuuaaggaauau

SEQ ID NO: 2010021 - RNA, 12 nt, Human
uuuaagagaaau

SEQ ID NO: 2010022 - RNA, 14 nt, Human
uuuaagagacagcc

SEQ ID NO: 2010023 - RNA, 14 nt, Human
uuuaagaggcaggg

SEQ ID NO: 2010024 - RNA, 23 nt, Human
uuuaaaaauacagauagauauau

SEQ ID NO: 2010025 - RNA, 20 nt, Human
uuuaaaaaguguuuaaaugu

SEQ ID NO: 2010026 - RNA, 16 nt, Human
uuuaaaaaguguuuaa

SEQ ID NO: 2010027 - RNA, 13 nt, Human
uuuaaaaaguauu

SEQ ID NO: 2010028 - RNA, 16 nt, Human
uuuaaaaaguauugcc

SEQ ID NO: 2010029 - RNA, 17 nt, Human
uuuaaaaaguauugcca

SEQ ID NO: 2010030 - RNA, 20 nt, Human
uuuaaaaaguauugccaaac

SEQ ID NO: 2010031 - RNA, 21 nt, Human
uuuaaaaaauuaaucugggcc

SEQ ID NO: 2010032 - RNA, 16 nt, Human
uuuaaaaaacuuucua

SEQ ID NO: 2010033 - RNA, 14 nt, Human
uuuaaaaaacuuuc

SEQ ID NO: 2010034 - RNA, 18 nt, Human
uuuaaaaaacuuucuacu

SEQ ID NO: 2010035 - RNA, 19 nt, Human
uuuaaaaaacuuucuacuc

SEQ ID NO: 2010036 - RNA, 18 nt, Human
uuuaaaaacaaaaggcaa

SEQ ID NO: 2010037 - RNA, 11 nt, Human
uuuaaaaaacu

SEQ ID NO: 2010038 - RNA, 20 nt, Human
augcagaguucagggaagau

SEQ ID NO: 2010039 - RNA, 11 nt, Human
uuuaaaugcac

SEQ ID NO: 2010040 - RNA, 15 nt, Human
uuuaaauauuaagca

SEQ ID NO: 2010041 - RNA, 21 nt, Human
uuuaaauauaugcuaagucuu

SEQ ID NO: 2010042 - RNA, 16 nt, Human
uuguagcauccuggaa

SEQ ID NO: 2010043 - RNA, 18 nt, Human
uuguagcauccuggaaua

SEQ ID NO: 2010044 - RNA, 17 nt, Human
augagguacugagagug

SEQ ID NO: 2010045 - RNA, 18 nt, Human
augagguacugagaguga

SEQ ID NO: 2010046 - RNA, 15 nt, Human
augagguacugagag

SEQ ID NO: 2010047 - RNA, 22 nt, Human
augaggucagagccugcaguua

SEQ ID NO: 2010048 - RNA, 14 nt, Human
augagguucucucu

SEQ ID NO: 2010049 - RNA, 19 nt, Human
augaggucagagccugcag

SEQ ID NO: 2010050 - RNA, 20 nt, Human
augaggucagagccugcagu

SEQ ID NO: 2010051 - RNA, 15 nt, Human
augaggucagagccu

SEQ ID NO: 2010052 - RNA, 21 nt, Human
augagguacaaccuguucugc

SEQ ID NO: 2010053 - RNA, 16 nt, Human
augaggucagagccug

SEQ ID NO: 2010054 - RNA, 18 nt, Human
augaggucagagccugca

SEQ ID NO: 2010055 - RNA, 17 nt, Human
uugucacacacuuuggc

SEQ ID NO: 2010056 - RNA, 18 nt, Human
uugucaaugcuggagaaa

SEQ ID NO: 2010057 - RNA, 20 nt, Human
augaguuuugggaaguuaaa

SEQ ID NO: 2010058 - RNA, 20 nt, Human
uugucaaugcuggagaaaaa

SEQ ID NO: 2010059 - RNA, 16 nt, Human
uugucagaccauaaga

SEQ ID NO: 2010060 - RNA, 21 nt, Human
uugucauauaagauucauauu

SEQ ID NO: 2010061 - RNA, 16 nt, Human
uugucaucaccaugga

SEQ ID NO: 2010062 - RNA, 19 nt, Human
uugucaucagccaaaacgu

SEQ ID NO: 2010063 - RNA, 14 nt, Human
uugucauuuugguc

SEQ ID NO: 2010064 - RNA, 21 nt, Human
uuguccaauuguauaacuuug

SEQ ID NO: 2010065 - RNA, 13 nt, Human
uuguccagagcug

SEQ ID NO: 2010066 - RNA, 16 nt, Human
uuguccagagcugcuu

SEQ ID NO: 2010067 - RNA, 18 nt, Human
uuguccagagcugcuucc

SEQ ID NO: 2010068 - RNA, 19 nt, Human
uuguccagagcugcuuccc

SEQ ID NO: 2010069 - RNA, 13 nt, Human
augaguugcaguu

SEQ ID NO: 2010070 - RNA, 13 nt, Human
augaguuucacag

SEQ ID NO: 2010071 - RNA, 15 nt, Human
augaguuucacagug

SEQ ID NO: 2010072 - RNA, 22 nt, Human
augaguuucacagugugauuuu

SEQ ID NO: 2010073 - RNA, 14 nt, Human
augaguuucuuaga

SEQ ID NO: 2010074 - RNA, 15 nt, Human
augaguuucuuagac

SEQ ID NO: 2010075 - RNA, 13 nt, Human
augaguuuuggga

SEQ ID NO: 2010076 - RNA, 18 nt, Human
augaguuuugggaaguua

SEQ ID NO: 2010077 - RNA, 19 nt, Human
augaguuuugggaaguuaa

SEQ ID NO: 2010078 - RNA, 18 nt, Human
augaguuggcugggaaua

SEQ ID NO: 2010079 - RNA, 23 nt, Human
augaguccccuguuuguuucuga

SEQ ID NO: 2010080 - RNA, 13 nt, Human
augaguccccugu

SEQ ID NO: 2010081 - RNA, 16 nt, Human
augaguccaaacugga

SEQ ID NO: 2010082 - RNA, 19 nt, Human
augaguccaaacuggaaug

SEQ ID NO: 2010083 - RNA, 13 nt, Human
uugugaggaagcc

SEQ ID NO: 2010084 - RNA, 18 nt, Human
uugugaggaagccgcugg

SEQ ID NO: 2010085 - RNA, 17 nt, Human
uugugaggaagccgcug

SEQ ID NO: 2010086 - RNA, 20 nt, Human
uugugauacaaugcugugcc

SEQ ID NO: 2010087 - RNA, 16 nt, Human
uuguccccgacccuug

SEQ ID NO: 2010088 - RNA, 15 nt, Human
uuguccccgacccuu

SEQ ID NO: 2010089 - RNA, 13 nt, Human
uugugaauaauua

SEQ ID NO: 2010090 - RNA, 14 nt, Human
uugugaauaauuac

SEQ ID NO: 2010091 - RNA, 15 nt, Human
uugugaauaauuaca

SEQ ID NO: 2010092 - RNA, 21 nt, Human
uugugaauaauuacagugccu

SEQ ID NO: 2010093 - RNA, 20 nt, Human
uuguccccaccgcagacagg

SEQ ID NO: 2010094 - RNA, 18 nt, Human
uuguccccaccgcagaca

SEQ ID NO: 2010095 - RNA, 12 nt, Human
uugugauguguc

SEQ ID NO: 2010096 - RNA, 18 nt, Human
uugugaugucccaacuug

SEQ ID NO: 2010097 - RNA, 22 nt, Human
uugugaugucccaacuuguaaa

SEQ ID NO: 2010098 - RNA, 17 nt, Human
augcucagaccagcucu

SEQ ID NO: 2010099 - RNA, 14 nt, Human
augcucagaccagc

SEQ ID NO: 2010100 - RNA, 12 nt, Human
augcucagacca

SEQ ID NO: 2010101 - RNA, 14 nt, Human
uuuaucagaauucu

SEQ ID NO: 2010102 - RNA, 19 nt, Human
augcuccuggcccacugca

SEQ ID NO: 2010103 - RNA, 16 nt, Human
augcuggagaaaaaua

SEQ ID NO: 2010104 - RNA, 23 nt, Human
augcuggagaaaaauaucuguaa

SEQ ID NO: 2010105 - RNA, 14 nt, Human
augcuccuggccca

SEQ ID NO: 2010106 - RNA, 18 nt, Human
augcuggcuguuggcugg

SEQ ID NO: 2010107 - RNA, 23 nt, Human
augcuguucaugaaagauucaau

SEQ ID NO: 2010108 - RNA, 19 nt, Human
augcuggcuguuggcuggg

SEQ ID NO: 2010109 - RNA, 20 nt, Human
augcuggcuguuggcugggg

SEQ ID NO: 2010110 - RNA, 20 nt, Human
augcuucucacugccaugcc

SEQ ID NO: 2010111 - RNA, 16 nt, Human
augcuucucacugcca

SEQ ID NO: 2010112 - RNA, 18 nt, Human
auggaagacagcucuuau

SEQ ID NO: 2010113 - RNA, 17 nt, Human
auggaagacagcucuua

SEQ ID NO: 2010114 - RNA, 14 nt, Human
auggaaggggcuga

SEQ ID NO: 2010115 - RNA, 20 nt, Human
auggaagcgguggucagaag

SEQ ID NO: 2010116 - RNA, 15 nt, Human
uuucaccugcugcuu

SEQ ID NO: 2010117 - RNA, 13 nt, Human
uuucacauuggaa

SEQ ID NO: 2010118 - RNA, 14 nt, Human
uuucacauuggaaa

SEQ ID NO: 2010119 - RNA, 19 nt, Human
uuucacauuggaaacaagu

SEQ ID NO: 2010120 - RNA, 21 nt, Human
uuucagaaagaaguggggaca

SEQ ID NO: 2010121 - RNA, 21 nt, Human
uuucacgucauaggaaguuag

SEQ ID NO: 2010122 - RNA, 15 nt, Human
uuucagaaagccuuu

SEQ ID NO: 2010123 - RNA, 16 nt, Human
uuucagaaagccuuuc

SEQ ID NO: 2010124 - RNA, 21 nt, Human
uuucagaaagccuuucauuuu

SEQ ID NO: 2010125 - RNA, 13 nt, Human
uuucagaaauaca

SEQ ID NO: 2010126 - RNA, 22 nt, Human
uuucagaaauacagauaaauga

SEQ ID NO: 2010127 - RNA, 12 nt, Human
uuucaaacuuua

SEQ ID NO: 2010128 - RNA, 15 nt, Human
uuucaaacuuuacua

SEQ ID NO: 2010129 - RNA, 16 nt, Human
uuucauccuucccacu

SEQ ID NO: 2010130 - RNA, 13 nt, Human
uuucaugcuuuau

SEQ ID NO: 2010131 - RNA, 14 nt, Human
uuucaugcuuuauc

SEQ ID NO: 2010132 - RNA, 21 nt, Human
uuucaugcuguucaugaaaga

SEQ ID NO: 2010133 - RNA, 19 nt, Human
uuucaugcuguucaugaaa

SEQ ID NO: 2010134 - RNA, 11 nt, Human
uuucagaaaug

SEQ ID NO: 2010135 - RNA, 12 nt, Human
uuucagaaaugu

SEQ ID NO: 2010136 - RNA, 14 nt, Human
uuucauccaugucc

SEQ ID NO: 2010137 - RNA, 14 nt, Human
uuucauccuuccca

SEQ ID NO: 2010138 - RNA, 16 nt, Human
uuucaugcuuuaucaa

SEQ ID NO: 2010139 - RNA, 14 nt, Human
uuuccauguaugca

SEQ ID NO: 2010140 - RNA, 15 nt, Human
uuuccauguaugcau

SEQ ID NO: 2010141 - RNA, 20 nt, Human
uuuccauguaugcauaauaa

SEQ ID NO: 2010142 - RNA, 13 nt, Human
uuuccauuuuaua

SEQ ID NO: 2010143 - RNA, 18 nt, Human
uuuccauuuuauaaaugu

SEQ ID NO: 2010144 - RNA, 16 nt, Human
uuucccuauuagagaa

SEQ ID NO: 2010145 - RNA, 23 nt, Human
uuuaaugaaagacuguacaaagu

SEQ ID NO: 2010146 - RNA, 21 nt, Human
uuuaaugaaagacuguacaaa

SEQ ID NO: 2010147 - RNA, 14 nt, Human
uuuaaggucuguuu

SEQ ID NO: 2010148 - RNA, 20 nt, Human
augccaguccagaugugccu

SEQ ID NO: 2010149 - RNA, 13 nt, Human
augccaggggccu

SEQ ID NO: 2010150 - RNA, 17 nt, Human
augcccagccccuucug

SEQ ID NO: 2010151 - RNA, 15 nt, Human
augccccugaauuua

SEQ ID NO: 2010152 - RNA, 20 nt, Human
augccccugaauuuaaauag

SEQ ID NO: 2010153 - RNA, 21 nt, Human
augccccgucccccucuggcu

SEQ ID NO: 2010154 - RNA, 18 nt, Human
augccccgucccccucug

SEQ ID NO: 2010155 - RNA, 16 nt, Human
augcccagccccuucu

SEQ ID NO: 2010156 - RNA, 15 nt, Human
augcccagccccuuc

SEQ ID NO: 2010157 - RNA, 21 nt, Human
augccaugaggaacaaggcaa

SEQ ID NO: 2010158 - RNA, 15 nt, Human
augccucucucaggc

SEQ ID NO: 2010159 - RNA, 14 nt, Human
augccucucucagg

SEQ ID NO: 2010160 - RNA, 13 nt, Human
augccucucucag

SEQ ID NO: 2010161 - RNA, 22 nt, Human
augcgugcauaccacuuuuguu

SEQ ID NO: 2010162 - RNA, 20 nt, Human
augcgugcauaccacuuuug

SEQ ID NO: 2010163 - RNA, 12 nt, Human
augcgugugugu

SEQ ID NO: 2010164 - RNA, 18 nt, Human
augcuacaggauuugaaa

SEQ ID NO: 2010165 - RNA, 14 nt, Human
augcgcaggcuggc

SEQ ID NO: 2010166 - RNA, 18 nt, Human
augcgcaggcuggcccug

SEQ ID NO: 2010167 - RNA, 20 nt, Human
augcgcaggcuggcccugcc

SEQ ID NO: 2010168 - RNA, 22 nt, Human
augcgcaggcuggcccugcccu

SEQ ID NO: 2010169 - RNA, 13 nt, Human
augcgcaggcugg

SEQ ID NO: 2010170 - RNA, 13 nt, Human
uuuagucuuuaua

SEQ ID NO: 2010171 - RNA, 19 nt, Human
uuuaguggacccugaaaug

SEQ ID NO: 2010172 - RNA, 20 nt, Human
uuuaguggacccugaaaugu

SEQ ID NO: 2010173 - RNA, 21 nt, Human
uuuaguggacccugaaaugug

SEQ ID NO: 2010174 - RNA, 22 nt, Human
uuuaguggacccugaaaugugu

SEQ ID NO: 2010175 - RNA, 20 nt, Human
uuuaguggccaucauuucug

SEQ ID NO: 2010176 - RNA, 15 nt, Human
uuuauauguaugugu

SEQ ID NO: 2010177 - RNA, 14 nt, Human
uuuaguuauaaagg

SEQ ID NO: 2010178 - RNA, 20 nt, Human
uuuaggcauaugcuucuuua

SEQ ID NO: 2010179 - RNA, 21 nt, Human
uuuaggcauaugcuucuuuaa

SEQ ID NO: 2010180 - RNA, 19 nt, Human
uuuaggccaaucagaagcu

SEQ ID NO: 2010181 - RNA, 17 nt, Human
uuuagggguagcauuug

SEQ ID NO: 2010182 - RNA, 15 nt, Human
uuuagggaguauucu

SEQ ID NO: 2010183 - RNA, 18 nt, Human
uuuagggaguauucuaau

SEQ ID NO: 2010184 - RNA, 15 nt, Human
uuuacuucuuauaca

SEQ ID NO: 2010185 - RNA, 14 nt, Human
uuuacuucuuauac

SEQ ID NO: 2010186 - RNA, 13 nt, Human
uuuacuucuuaua

SEQ ID NO: 2010187 - RNA, 16 nt, Human
uuuacugcagcuuugu

SEQ ID NO: 2010188 - RNA, 11 nt, Human
uuuacuuaaac

SEQ ID NO: 2010189 - RNA, 17 nt, Human
uuuacugugacuuuauu

SEQ ID NO: 2010190 - RNA, 14 nt, Human
uuuacugcauucuu

SEQ ID NO: 2010191 - RNA, 18 nt, Human
uuuacugcauucuucuga

SEQ ID NO: 2010192 - RNA, 18 nt, Human
uuuaccugaagucuuugu

SEQ ID NO: 2010193 - RNA, 22 nt, Human
uuuaccugaagucuuuguacag

SEQ ID NO: 2010194 - RNA, 16 nt, Human
augcgugugugugugu

SEQ ID NO: 2010195 - RNA, 21 nt, Human
aucucaaauaacuaaaaggua

SEQ ID NO: 2010196 - RNA, 14 nt, Human
aucucaaauaacua

SEQ ID NO: 2010197 - RNA, 23 nt, Human
aucucaaauaacuaaaagguaug

SEQ ID NO: 2010198 - RNA, 14 nt, Human
aucucaaauuucua

SEQ ID NO: 2010199 - RNA, 19 nt, Human
aucuaggaagacuuuggaa

SEQ ID NO: 2010200 - RNA, 18 nt, Human
aucuaggaagacuuugga

SEQ ID NO: 2010201 - RNA, 17 nt, Human
aucuaggaagacuuugg

SEQ ID NO: 2010202 - RNA, 19 nt, Human
aucuagccagugaacauaa

SEQ ID NO: 2010203 - RNA, 17 nt, Human
aucuagauguaaauuuu

SEQ ID NO: 2010204 - RNA, 12 nt, Human
aucuacugcauu

SEQ ID NO: 2010205 - RNA, 13 nt, Human
aucuagauguaaa

SEQ ID NO: 2010206 - RNA, 14 nt, Human
aucuagauguaaau

SEQ ID NO: 2010207 - RNA, 15 nt, Human
aucuagauguaaauu

SEQ ID NO: 2010208 - RNA, 19 nt, Human
aucuagauacuguaucaug

SEQ ID NO: 2010209 - RNA, 18 nt, Human
aucuaaugacauucaaua

SEQ ID NO: 2010210 - RNA, 10 nt, Human
aucuacugca

SEQ ID NO: 2010211 - RNA, 18 nt, Human
aucuagauacuguaucau

SEQ ID NO: 2010212 - RNA, 19 nt, Human
aucuaccaacuuucaagaa

SEQ ID NO: 2010213 - RNA, 13 nt, Human
aucuaauucuuua

SEQ ID NO: 2010214 - RNA, 14 nt, Human
aucuaauucuuuaa

SEQ ID NO: 2010215 - RNA, 15 nt, Human
aucuaauucuuuaau

SEQ ID NO: 2010216 - RNA, 17 nt, Human
aucuaauucuuuaauga

SEQ ID NO: 2010217 - RNA, 15 nt, Human
aucuaccaacuuuca

SEQ ID NO: 2010218 - RNA, 16 nt, Human
aucuaccaacuuucaa

SEQ ID NO: 2010219 - RNA, 17 nt, Human
aucuaccaacuuucaag

SEQ ID NO: 2010220 - RNA, 18 nt, Human
aucuaccaacuuucaaga

SEQ ID NO: 2010221 - RNA, 20 nt, Human
aucuaauauguaacaagcca

SEQ ID NO: 2010222 - RNA, 23 nt, Human
aucuaauauguaacaagccaccc

SEQ ID NO: 2010223 - RNA, 15 nt, Human
uugauacuacaguuu

SEQ ID NO: 2010224 - RNA, 17 nt, Human
uugauacuacaguuugu

SEQ ID NO: 2010225 - RNA, 18 nt, Human
uugauagcacagacccug

SEQ ID NO: 2010226 - RNA, 22 nt, Human
uugaguggggggaacgcccacu

SEQ ID NO: 2010227 - RNA, 21 nt, Human
uugagugcugucuccauguuu

SEQ ID NO: 2010228 - RNA, 11 nt, Human
uugagugccuu

SEQ ID NO: 2010229 - RNA, 12 nt, Human
uugacaggaggu

SEQ ID NO: 2010230 - RNA, 16 nt, Human
uugacuuuuuagaugu

SEQ ID NO: 2010231 - RNA, 17 nt, Human
uugaccauucuccaccu

SEQ ID NO: 2010232 - RNA, 17 nt, Human
uugaccaggcaccuccc

SEQ ID NO: 2010233 - RNA, 16 nt, Human
uugagcagggcucagc

SEQ ID NO: 2010234 - RNA, 12 nt, Human
uugagcagggcu

SEQ ID NO: 2010235 - RNA, 13 nt, Human
uugagcaaacauu

SEQ ID NO: 2010236 - RNA, 10 nt, Human
uugagacaga

SEQ ID NO: 2010237 - RNA, 11 nt, Human
uugagacagag

SEQ ID NO: 2010238 - RNA, 20 nt, Human
aucccuuggacauuuuaugu

SEQ ID NO: 2010239 - RNA, 21 nt, Human
aucccuuggacauuuuauguc

SEQ ID NO: 2010240 - RNA, 21 nt, Human
aucccuucucuuccaggcagc

SEQ ID NO: 2010241 - RNA, 22 nt, Human
aucccuucucuuccaggcagcc

SEQ ID NO: 2010242 - RNA, 17 nt, Human
aucccuuggacauuuua

SEQ ID NO: 2010243 - RNA, 19 nt, Human
aucccuuggacauuuuaug

SEQ ID NO: 2010244 - RNA, 21 nt, Human
aucccuuaagaaugaguuucu

SEQ ID NO: 2010245 - RNA, 14 nt, Human
aucccuuccaccug

SEQ ID NO: 2010246 - RNA, 16 nt, Human
aucccuuccaccugcu

SEQ ID NO: 2010247 - RNA, 19 nt, Human
aucccuuccaccugcucug

SEQ ID NO: 2010248 - RNA, 22 nt, Human
aucccuuccaccugcucugcug

SEQ ID NO: 2010249 - RNA, 13 nt, Human
aucccuucucuuc

SEQ ID NO: 2010250 - RNA, 14 nt, Human
aucccuucucuucc

SEQ ID NO: 2010251 - RNA, 15 nt, Human
aucccuucucuucca

SEQ ID NO: 2010252 - RNA, 17 nt, Human
aucccuucucuuccagg

SEQ ID NO: 2010253 - RNA, 15 nt, Human
auccgaaaucagcag

SEQ ID NO: 2010254 - RNA, 19 nt, Human
uugacaggauuauuggaaa

SEQ ID NO: 2010255 - RNA, 10 nt, Human
uugacagggc

SEQ ID NO: 2010256 - RNA, 12 nt, Human
uugacagggcac

SEQ ID NO: 2010257 - RNA, 16 nt, Human
uugacaucaacugcau

SEQ ID NO: 2010258 - RNA, 13 nt, Human
uugacaucaacug

SEQ ID NO: 2010259 - RNA, 15 nt, Human
uugccaagagcccgu

SEQ ID NO: 2010260 - RNA, 21 nt, Human
uugccaaacauuaauguugau

SEQ ID NO: 2010261 - RNA, 24 nt, Human
uugccaaacauuaauguugauuuc

SEQ ID NO: 2010262 - RNA, 12 nt, Human
uugcaugaggcu

SEQ ID NO: 2010263 - RNA, 14 nt, Human
uugcaugaggcuag

SEQ ID NO: 2010264 - RNA, 17 nt, Human
uugcauguaaaagccua

SEQ ID NO: 2010265 - RNA, 21 nt, Human
uugcaccacugcacuccagcc

SEQ ID NO: 2010266 - RNA, 13 nt, Human
uugcaaucuauaa

SEQ ID NO: 2010267 - RNA, 16 nt, Human
uugcaaucuauaauau

SEQ ID NO: 2010268 - RNA, 14 nt, Human
uugcaauggcagcc

SEQ ID NO: 2010269 - RNA, 13 nt, Human
uugcccaggcagg

SEQ ID NO: 2010270 - RNA, 14 nt, Human
uugcccaggcaggu

SEQ ID NO: 2010271 - RNA, 16 nt, Human
uugcccaggcaggucu

SEQ ID NO: 2010272 - RNA, 18 nt, Human
uugcccaggcaggucuug

SEQ ID NO: 2010273 - RNA, 11 nt, Human
uugcccaggcu

SEQ ID NO: 2010274 - RNA, 12 nt, Human
uugcccaggcug

SEQ ID NO: 2010275 - RNA, 14 nt, Human
uugcccaggcuggc

SEQ ID NO: 2010276 - RNA, 23 nt, Human
uugcccaggcuggcgugcagugg

SEQ ID NO: 2010277 - RNA, 17 nt, Human
uugcccaggcuggagug

SEQ ID NO: 2010278 - RNA, 20 nt, Human
uugcccaugcugggcucccg

SEQ ID NO: 2010279 - RNA, 21 nt, Human
uugcccccaaacccccauucu

SEQ ID NO: 2010280 - RNA, 13 nt, Human
aucugagaaugaa

SEQ ID NO: 2010281 - RNA, 14 nt, Human
aucugagaaugaac

SEQ ID NO: 2010282 - RNA, 17 nt, Human
aucugagaaugaacaaa

SEQ ID NO: 2010283 - RNA, 21 nt, Human
aucugagagaggcuaaaaugu

SEQ ID NO: 2010284 - RNA, 22 nt, Human
aucugagagaggcuaaaauguu

SEQ ID NO: 2010285 - RNA, 23 nt, Human
uugauguucuuucacccuuuucu

SEQ ID NO: 2010286 - RNA, 14 nt, Human
uugauguugaugca

SEQ ID NO: 2010287 - RNA, 15 nt, Human
uugauguugaugcaa

SEQ ID NO: 2010288 - RNA, 23 nt, Human
aucugagagaggcuaaaauguuu

SEQ ID NO: 2010289 - RNA, 16 nt, Human
uugauguugaugcaau

SEQ ID NO: 2010290 - RNA, 13 nt, Human
uugauguuuccuu

SEQ ID NO: 2010291 - RNA, 18 nt, Human
uugcaacuuuguauaaaa

SEQ ID NO: 2010292 - RNA, 17 nt, Human
uugcaacuuuguauaaa

SEQ ID NO: 2010293 - RNA, 16 nt, Human
uugcaacuuuguauaa

SEQ ID NO: 2010294 - RNA, 15 nt, Human
uugauuaaauucuug

SEQ ID NO: 2010295 - RNA, 16 nt, Human
uugauuaaauucuugc

SEQ ID NO: 2010296 - RNA, 20 nt, Human
uugauuaaauucuugcaaag

SEQ ID NO: 2010297 - RNA, 21 nt, Human
uugauuaaauucuugcaaagu

SEQ ID NO: 2010298 - RNA, 23 nt, Human
aucucacacaugagcaucaggcc

SEQ ID NO: 2010299 - RNA, 19 nt, Human
aucucaaauuguaauuaau

SEQ ID NO: 2010300 - RNA, 17 nt, Human
aucucaaauuguaauua

SEQ ID NO: 2010301 - RNA, 16 nt, Human
aucucaaauuucuaaa

SEQ ID NO: 2010302 - RNA, 17 nt, Human
aucucaaauuucuaaau

SEQ ID NO: 2010303 - RNA, 14 nt, Human
aucucaacaugucu

SEQ ID NO: 2010304 - RNA, 12 nt, Human
aucucacagcua

SEQ ID NO: 2010305 - RNA, 15 nt, Human
aucucacagcuaugc

SEQ ID NO: 2010306 - RNA, 21 nt, Human
aucugaagauuguuuaucuag

SEQ ID NO: 2010307 - RNA, 14 nt, Human
aucugaagauuguu

SEQ ID NO: 2010308 - RNA, 15 nt, Human
aucugaagauuguuu

SEQ ID NO: 2010309 - RNA, 16 nt, Human
aucugaagauuguuua

SEQ ID NO: 2010310 - RNA, 20 nt, Human
aucugaagauuguuuaucua

SEQ ID NO: 2010311 - RNA, 16 nt, Human
aucucuuguuuaaauu

SEQ ID NO: 2010312 - RNA, 13 nt, Human
aucugaagauugu

SEQ ID NO: 2010313 - RNA, 15 nt, Human
uugcuuugugauuuu

SEQ ID NO: 2010314 - RNA, 13 nt, Human
uugcuuuguaugc

SEQ ID NO: 2010315 - RNA, 17 nt, Human
uugcuuuggaaguuuua

SEQ ID NO: 2010316 - RNA, 13 nt, Human
aucuuuaauuaaa

SEQ ID NO: 2010317 - RNA, 18 nt, Human
aucuuuaauuaaaaccug

SEQ ID NO: 2010318 - RNA, 11 nt, Human
aucuuuaauua

SEQ ID NO: 2010319 - RNA, 18 nt, Human
uugcucuugaugccuggc

SEQ ID NO: 2010320 - RNA, 17 nt, Human
uugcucuugaugccugg

SEQ ID NO: 2010321 - RNA, 14 nt, Human
uugcucuugaugcc

SEQ ID NO: 2010322 - RNA, 11 nt, Human
uuggagccugc

SEQ ID NO: 2010323 - RNA, 15 nt, Human
uuggagccugcagag

SEQ ID NO: 2010324 - RNA, 11 nt, Human
uuggagcauug

SEQ ID NO: 2010325 - RNA, 14 nt, Human
uugcuuuuaaaacu

SEQ ID NO: 2010326 - RNA, 17 nt, Human
uugcuuuuaaaacuacu

SEQ ID NO: 2010327 - RNA, 21 nt, Human
uugcuuuuaaaacuacuuagc

SEQ ID NO: 2010328 - RNA, 13 nt, Human
uugcuuuuaaaau

SEQ ID NO: 2010329 - RNA, 20 nt, Human
uuggaaaacgauuuaauuua

SEQ ID NO: 2010330 - RNA, 20 nt, Human
uugcuuugugauuuuuguaa

SEQ ID NO: 2010331 - RNA, 16 nt, Human
uugcuuuguaugcacu

SEQ ID NO: 2010332 - RNA, 17 nt, Human
uuggaaaauaaauuauu

SEQ ID NO: 2010333 - RNA, 12 nt, Human
uuggaaaauaaa

SEQ ID NO: 2010334 - RNA, 15 nt, Human
uuggaaaauaaauca

SEQ ID NO: 2010335 - RNA, 14 nt, Human
uuggaaacacuaaa

SEQ ID NO: 2010336 - RNA, 15 nt, Human
uuggaaacacuaaau

SEQ ID NO: 2010337 - RNA, 16 nt, Human
uuggaaacacuaaaug

SEQ ID NO: 2010338 - RNA, 17 nt, Human
uuggaaacacuaaaugu

SEQ ID NO: 2010339 - RNA, 18 nt, Human
uuggaaacacuaaauguu

SEQ ID NO: 2010340 - RNA, 23 nt, Human
aucugugccuuuuuuauaucuug

SEQ ID NO: 2010341 - RNA, 12 nt, Human
aucugucauuug

SEQ ID NO: 2010342 - RNA, 17 nt, Human
aucugucauuugagcag

SEQ ID NO: 2010343 - RNA, 21 nt, Human
aucugugaggggcucucucau

SEQ ID NO: 2010344 - RNA, 22 nt, Human
aucugugaggggcucucucaug

SEQ ID NO: 2010345 - RNA, 22 nt, Human
aucugucauuugagcagggcuc

SEQ ID NO: 2010346 - RNA, 15 nt, Human
aucuuggagagcugg

SEQ ID NO: 2010347 - RNA, 18 nt, Human
aucuuggcagguaggaau

SEQ ID NO: 2010348 - RNA, 19 nt, Human
aucuuggcagguaggaaua

SEQ ID NO: 2010349 - RNA, 20 nt, Human
aucuuggcagguaggaauau

SEQ ID NO: 2010350 - RNA, 19 nt, Human
aucuuggcccuguuaaggc

SEQ ID NO: 2010351 - RNA, 16 nt, Human
aucuuggccuuacugu

SEQ ID NO: 2010352 - RNA, 17 nt, Human
aucuuggccuuacugua

SEQ ID NO: 2010353 - RNA, 15 nt, Human
aucuugcucugcuga

SEQ ID NO: 2010354 - RNA, 16 nt, Human
aucuugcucugcugac

SEQ ID NO: 2010355 - RNA, 22 nt, Human
aucuuaauacuguuauucuuug

SEQ ID NO: 2010356 - RNA, 14 nt, Human
aucuugcucugcug

SEQ ID NO: 2010357 - RNA, 16 nt, Human
aucuuauaauuuaaaa

SEQ ID NO: 2010358 - RNA, 15 nt, Human
aucuuauaauuuaaa

SEQ ID NO: 2010359 - RNA, 13 nt, Human
aucuuaagaaaua

SEQ ID NO: 2010360 - RNA, 16 nt, Human
aucuuaagaaauaaau

SEQ ID NO: 2010361 - RNA, 13 nt, Human
aucuuaauacugu

SEQ ID NO: 2010362 - RNA, 14 nt, Human
aucuuaauacuguu

SEQ ID NO: 2010363 - RNA, 15 nt, Human
aucuuaauacuguua

SEQ ID NO: 2010364 - RNA, 17 nt, Human
aucuuaauacuguuauu

SEQ ID NO: 2010365 - RNA, 18 nt, Human
aucuuaauacuguuauuc

SEQ ID NO: 2010366 - RNA, 20 nt, Human
aucuuaauacuguuauucuu

SEQ ID NO: 2010367 - RNA, 21 nt, Human
aucuuaauacuguuauucuuu

SEQ ID NO: 2010368 - RNA, 23 nt, Human
augaaccacaucuugcucugcug

SEQ ID NO: 2010369 - RNA, 22 nt, Human
augaaccacaucuugcucugcu

SEQ ID NO: 2010370 - RNA, 15 nt, Human
augaacacaaauuau

SEQ ID NO: 2010371 - RNA, 16 nt, Human
augaacacaaauuaug

SEQ ID NO: 2010372 - RNA, 20 nt, Human
augaacacaaauuaugcuaa

SEQ ID NO: 2010373 - RNA, 13 nt, Human
augaacacaaauu

SEQ ID NO: 2010374 - RNA, 14 nt, Human
augaacacaaauua

SEQ ID NO: 2010375 - RNA, 19 nt, Human
augaacaaagaccaauuuu

SEQ ID NO: 2010376 - RNA, 18 nt, Human
uuggagccugcagagcug

SEQ ID NO: 2010377 - RNA, 13 nt, Human
uuggagcucugag

SEQ ID NO: 2010378 - RNA, 22 nt, Human
augaaauaaagacccaggggga

SEQ ID NO: 2010379 - RNA, 18 nt, Human
augaaauaacacagcagu

SEQ ID NO: 2010380 - RNA, 17 nt, Human
augaaccuucuggccuc

SEQ ID NO: 2010381 - RNA, 14 nt, Human
augaaccuucuggc

SEQ ID NO: 2010382 - RNA, 18 nt, Human
augaacuuguaaaggaau

SEQ ID NO: 2010383 - RNA, 14 nt, Human
augaagcaaugcuu

SEQ ID NO: 2010384 - RNA, 22 nt, Human
augaagaaaauacuuaaauguu

SEQ ID NO: 2010385 - RNA, 23 nt, Human
augaagaaaauacuuaaauguua

SEQ ID NO: 2010386 - RNA, 14 nt, Human
augaagaaaauacu

SEQ ID NO: 2010387 - RNA, 15 nt, Human
augaagaaaauacuu

SEQ ID NO: 2010388 - RNA, 17 nt, Human
augaagaaaauacuuaa

SEQ ID NO: 2010389 - RNA, 19 nt, Human
augaagaaaauacuuaaau

SEQ ID NO: 2010390 - RNA, 20 nt, Human
augaagaaaauacuuaaaug

SEQ ID NO: 2010391 - RNA, 21 nt, Human
augaagaaaauacuuaaaugu

SEQ ID NO: 2010392 - RNA, 17 nt, Human
augaaugaaacauuuug

SEQ ID NO: 2010393 - RNA, 15 nt, Human
augaagcaaugcuuc

SEQ ID NO: 2010394 - RNA, 19 nt, Human
uuggugucgggcaugacac

SEQ ID NO: 2010395 - RNA, 18 nt, Human
uuggugucgggcaugaca

SEQ ID NO: 2010396 - RNA, 17 nt, Human
uuggugucgggcaugac

SEQ ID NO: 2010397 - RNA, 18 nt, Human
uuggugggugaaaggaau

SEQ ID NO: 2010398 - RNA, 14 nt, Human
uugguuuguaaauu

SEQ ID NO: 2010399 - RNA, 16 nt, Human
uugguuucucuucucc

SEQ ID NO: 2010400 - RNA, 13 nt, Human
uugguuuuaaaau

SEQ ID NO: 2010401 - RNA, 16 nt, Human
uugguuuuaaaauacu

SEQ ID NO: 2010402 - RNA, 12 nt, Human
uugguuuuauga

SEQ ID NO: 2010403 - RNA, 18 nt, Human
uuggugguuucagaaaug

SEQ ID NO: 2010404 - RNA, 19 nt, Human
uuggugguuucagaaaugu

SEQ ID NO: 2010405 - RNA, 15 nt, Human
uugggugaucauuca

SEQ ID NO: 2010406 - RNA, 19 nt, Human
uugggugcugcuaauucuu

SEQ ID NO: 2010407 - RNA, 18 nt, Human
augaaugucagugugacu

SEQ ID NO: 2010408 - RNA, 16 nt, Human
augaaugucaguguga

SEQ ID NO: 2010409 - RNA, 16 nt, Human
uugguuuuaugaugac

SEQ ID NO: 2010410 - RNA, 19 nt, Human
uugguuuuaugaugacgua

SEQ ID NO: 2010411 - RNA, 20 nt, Human
uugguuuucacauuggaaac

SEQ ID NO: 2010412 - RNA, 13 nt, Human
uuguaaauuguca

SEQ ID NO: 2010413 - RNA, 19 nt, Human
uuguaaauuuaugugaugg

SEQ ID NO: 2010414 - RNA, 15 nt, Human
uuguaacaagaaaau

SEQ ID NO: 2010415 - RNA, 21 nt, Human
uuguaacauucuauuucaacu

SEQ ID NO: 2010416 - RNA, 17 nt, Human
uuguaagaaauacugua

SEQ ID NO: 2010417 - RNA, 12 nt, Human
uuguaaugaaaa

SEQ ID NO: 2010418 - RNA, 20 nt, Human
uuguaauuuaaggucuguuu

SEQ ID NO: 2010419 - RNA, 14 nt, Human
uuguaauauguaaa

SEQ ID NO: 2010420 - RNA, 15 nt, Human
uuguaauauguaaau

SEQ ID NO: 2010421 - RNA, 15 nt, Human
uuguaauaauaaaga

SEQ ID NO: 2010422 - RNA, 23 nt, Human
uuguaauaaacccuuaacuggca

SEQ ID NO: 2010423 - RNA, 13 nt, Human
auauaaacagcuu

SEQ ID NO: 2010424 - RNA, 12 nt, Human
auauaaaaugcc

SEQ ID NO: 2010425 - RNA, 13 nt, Human
auauaaaaugcca

SEQ ID NO: 2010426 - RNA, 15 nt, Human
auauaaaaugccaag

SEQ ID NO: 2010427 - RNA, 14 nt, Human
auauaaaauggcaa

SEQ ID NO: 2010428 - RNA, 19 nt, Human
auauaaaauggcaacaaac

SEQ ID NO: 2010429 - RNA, 23 nt, Human
auauaaaauggcaacaaacugca

SEQ ID NO: 2010430 - RNA, 19 nt, Human
auaguuuauuuuaaaacaa

SEQ ID NO: 2010431 - RNA, 21 nt, Human
auagucaagacgaacauguag

SEQ ID NO: 2010432 - RNA, 14 nt, Human
auagucaagacgaa

SEQ ID NO: 2010433 - RNA, 16 nt, Human
auauaaauugucuuaa

SEQ ID NO: 2010434 - RNA, 22 nt, Human
auauaagcccuugauuggaagg

SEQ ID NO: 2010435 - RNA, 14 nt, Human
auauaggacauuga

SEQ ID NO: 2010436 - RNA, 14 nt, Human
auauauagcauuua

SEQ ID NO: 2010437 - RNA, 16 nt, Human
auauauagcauuuaug

SEQ ID NO: 2010438 - RNA, 13 nt, Human
uucacugcuggcu

SEQ ID NO: 2010439 - RNA, 15 nt, Human
uucacugcuggcugc

SEQ ID NO: 2010440 - RNA, 16 nt, Human
uucacugcuggcugcc

SEQ ID NO: 2010441 - RNA, 17 nt, Human
uucacugcuggcugccu

SEQ ID NO: 2010442 - RNA, 18 nt, Human
uucacugcuggcugccuu

SEQ ID NO: 2010443 - RNA, 19 nt, Human
uucacugcuggcugccuua

SEQ ID NO: 2010444 - RNA, 13 nt, Human
uucagaaguuuaa

SEQ ID NO: 2010445 - RNA, 14 nt, Human
uucagaaguuuaaa

SEQ ID NO: 2010446 - RNA, 15 nt, Human
uucagaaguuuaaau

SEQ ID NO: 2010447 - RNA, 15 nt, Human
uucagaaagaagugg

SEQ ID NO: 2010448 - RNA, 22 nt, Human
uucagaaacaaagcauuugacu

SEQ ID NO: 2010449 - RNA, 20 nt, Human
uucacuggccacaguuguuu

SEQ ID NO: 2010450 - RNA, 17 nt, Human
uucagccacugagggac

SEQ ID NO: 2010451 - RNA, 21 nt, Human
uucagccacugagggacaaaa

SEQ ID NO: 2010452 - RNA, 19 nt, Human
uucagccaagaauucuuaa

SEQ ID NO: 2010453 - RNA, 14 nt, Human
uucagccaagaauu

SEQ ID NO: 2010454 - RNA, 22 nt, Human
uucagcaaacuuguugaauuua

SEQ ID NO: 2010455 - RNA, 17 nt, Human
uucagaucucuaacuuc

SEQ ID NO: 2010456 - RNA, 21 nt, Human
uucagauucaggcauuuuccc

SEQ ID NO: 2010457 - RNA, 15 nt, Human
uucagcaaacuuguu

SEQ ID NO: 2010458 - RNA, 21 nt, Human
uucagcaaggcgcuaacuugc

SEQ ID NO: 2010459 - RNA, 15 nt, Human
uucauagaauacuca

SEQ ID NO: 2010460 - RNA, 21 nt, Human
uucauauuuacuucuuauaca

SEQ ID NO: 2010461 - RNA, 16 nt, Human
uucauauuuacuucuu

SEQ ID NO: 2010462 - RNA, 18 nt, Human
uucauagagaauauaaaa

SEQ ID NO: 2010463 - RNA, 11 nt, Human
uucauagagaa

SEQ ID NO: 2010464 - RNA, 17 nt, Human
uucaggggaaacuugau

SEQ ID NO: 2010465 - RNA, 23 nt, Human
uucaggggcuagcuaagccaaga

SEQ ID NO: 2010466 - RNA, 14 nt, Human
uucaguaauaacuc

SEQ ID NO: 2010467 - RNA, 13 nt, Human
uucagccuaagag

SEQ ID NO: 2010468 - RNA, 16 nt, Human
uucagggcagauuuua

SEQ ID NO: 2010469 - RNA, 18 nt, Human
uucagggcagauuuuagu

SEQ ID NO: 2010470 - RNA, 20 nt, Human
uucagggcagauuuuaguuu

SEQ ID NO: 2010471 - RNA, 23 nt, Human
uucagggcagauuuuaguuuuau

SEQ ID NO: 2010472 - RNA, 21 nt, Human
uucaucauccuaagcuauuca

SEQ ID NO: 2010473 - RNA, 17 nt, Human
uucauauuuuaaacaga

SEQ ID NO: 2010474 - RNA, 20 nt, Human
uucauauuuguacuuucugu

SEQ ID NO: 2010475 - RNA, 22 nt, Human
uucauauuuguacuuucuguua

SEQ ID NO: 2010476 - RNA, 11 nt, Human
uucauauuugu

SEQ ID NO: 2010477 - RNA, 14 nt, Human
uucauauuuguacu

SEQ ID NO: 2010478 - RNA, 15 nt, Human
uucauauuuguacuu

SEQ ID NO: 2010479 - RNA, 20 nt, Human
uucauauuuaauuugaaggu

SEQ ID NO: 2010480 - RNA, 18 nt, Human
uucaucauccuaagcuau

SEQ ID NO: 2010481 - RNA, 21 nt, Human
uucauauuuuaaacagaggau

SEQ ID NO: 2010482 - RNA, 18 nt, Human
auauauguuuuugaaggc

SEQ ID NO: 2010483 - RNA, 17 nt, Human
auaucuauauuuuacau

SEQ ID NO: 2010484 - RNA, 16 nt, Human
auaucuauauuuuaca

SEQ ID NO: 2010485 - RNA, 20 nt, Human
auaucuauauuuuacauaaa

SEQ ID NO: 2010486 - RNA, 22 nt, Human
auaucuauauuuuacauaaauu

SEQ ID NO: 2010487 - RNA, 21 nt, Human
auauccuuuuagucugcauau

SEQ ID NO: 2010488 - RNA, 18 nt, Human
auaucuaaaucuguccaa

SEQ ID NO: 2010489 - RNA, 18 nt, Human
auauauucagccuggcuu

SEQ ID NO: 2010490 - RNA, 12 nt, Human
auaugauucaaa

SEQ ID NO: 2010491 - RNA, 23 nt, Human
auaucuugcuugaacuuacaggu

SEQ ID NO: 2010492 - RNA, 15 nt, Human
auaucuuggcaggua

SEQ ID NO: 2010493 - RNA, 18 nt, Human
auaucuucauuucuaaau

SEQ ID NO: 2010494 - RNA, 16 nt, Human
auaucuucauuucuaa

SEQ ID NO: 2010495 - RNA, 14 nt, Human
auaucuugcuugaa

SEQ ID NO: 2010496 - RNA, 13 nt, Human
auaugauucaaau

SEQ ID NO: 2010497 - RNA, 22 nt, Human
auaugauucaaaugucuauaaa

SEQ ID NO: 2010498 - RNA, 20 nt, Human
auaugauuuaaaucagccgu

SEQ ID NO: 2010499 - RNA, 14 nt, Human
auaucuucauuucu

SEQ ID NO: 2010500 - RNA, 22 nt, Human
auaucugaaaauguauguguaa

SEQ ID NO: 2010501 - RNA, 17 nt, Human
uucauguccugugucag

SEQ ID NO: 2010502 - RNA, 19 nt, Human
uucauguccugugucaguu

SEQ ID NO: 2010503 - RNA, 20 nt, Human
uucauguccugugucaguuu

SEQ ID NO: 2010504 - RNA, 21 nt, Human
uucauguccugugucaguuua

SEQ ID NO: 2010505 - RNA, 13 nt, Human
auaugugaacagu

SEQ ID NO: 2010506 - RNA, 14 nt, Human
auaugucaagccau

SEQ ID NO: 2010507 - RNA, 21 nt, Human
auauguauucuguaaaagaaa

SEQ ID NO: 2010508 - RNA, 13 nt, Human
auaugcacacauu

SEQ ID NO: 2010509 - RNA, 11 nt, Human
auauguaugug

SEQ ID NO: 2010510 - RNA, 13 nt, Human
auauguauguguu

SEQ ID NO: 2010511 - RNA, 14 nt, Human
auauguauguguuu

SEQ ID NO: 2010512 - RNA, 15 nt, Human
auauguauguguuua

SEQ ID NO: 2010513 - RNA, 17 nt, Human
auauguauguguuuaga

SEQ ID NO: 2010514 - RNA, 18 nt, Human
auauguauguguuuagaa

SEQ ID NO: 2010515 - RNA, 19 nt, Human
auauguauguguuuagaau

SEQ ID NO: 2010516 - RNA, 20 nt, Human
auauguauguguuuagaauu

SEQ ID NO: 2010517 - RNA, 21 nt, Human
auauguauguguuuagaauug

SEQ ID NO: 2010518 - RNA, 22 nt, Human
auauguauguguuuagaauuga

SEQ ID NO: 2010519 - RNA, 23 nt, Human
auauguauguguuuagaauugaa

SEQ ID NO: 2010520 - RNA, 21 nt, Human
auauguauuaacacuacucaa

SEQ ID NO: 2010521 - RNA, 22 nt, Human
auaucuuggcagguaggaauau

SEQ ID NO: 2010522 - RNA, 21 nt, Human
auaucuuggcagguaggaaua

SEQ ID NO: 2010523 - RNA, 13 nt, Human
uucaauaaaguuu

SEQ ID NO: 2010524 - RNA, 14 nt, Human
uucaauaaaguuug

SEQ ID NO: 2010525 - RNA, 15 nt, Human
uucaauaaaguuuga

SEQ ID NO: 2010526 - RNA, 17 nt, Human
uucacauauugauuucc

SEQ ID NO: 2010527 - RNA, 13 nt, Human
uucacauuggaaa

SEQ ID NO: 2010528 - RNA, 19 nt, Human
uucacauuguauucagagu

SEQ ID NO: 2010529 - RNA, 14 nt, Human
uucacauuggaaac

SEQ ID NO: 2010530 - RNA, 22 nt, Human
uucaccacaugugcacaugcac

SEQ ID NO: 2010531 - RNA, 15 nt, Human
uucaccacagacuuu

SEQ ID NO: 2010532 - RNA, 14 nt, Human
uucaccacagacuu

SEQ ID NO: 2010533 - RNA, 22 nt, Human
uucaccaguacauucucaguuu

SEQ ID NO: 2010534 - RNA, 23 nt, Human
uucaccaguacauucucaguuuu

SEQ ID NO: 2010535 - RNA, 17 nt, Human
auaggcacaggaaacca

SEQ ID NO: 2010536 - RNA, 22 nt, Human
auaggcaccuaccaccacgccc

SEQ ID NO: 2010537 - RNA, 19 nt, Human
auaggaaggucauuuccau

SEQ ID NO: 2010538 - RNA, 21 nt, Human
auaggaaguuagccuuuaucu

SEQ ID NO: 2010539 - RNA, 22 nt, Human
auaggaaguuagccuuuaucua

SEQ ID NO: 2010540 - RNA, 23 nt, Human
auaggaaguuagccuuuaucuac

SEQ ID NO: 2010541 - RNA, 19 nt, Human
auaggaugggcuucugugc

SEQ ID NO: 2010542 - RNA, 21 nt, Human
auaggaauugacccacaagaa

SEQ ID NO: 2010543 - RNA, 15 nt, Human
auagcuuuauuucuu

SEQ ID NO: 2010544 - RNA, 15 nt, Human
auaggaaggucauuu

SEQ ID NO: 2010545 - RNA, 17 nt, Human
auaggaaggucauuucc

SEQ ID NO: 2010546 - RNA, 19 nt, Human
auaggaacuuaaauaaugu

SEQ ID NO: 2010547 - RNA, 22 nt, Human
auagcuucaccccaaucccagc

SEQ ID NO: 2010548 - RNA, 21 nt, Human
auagcuucaccccaaucccag

SEQ ID NO: 2010549 - RNA, 22 nt, Human
uucaccauguuggccaggcugc

SEQ ID NO: 2010550 - RNA, 22 nt, Human
uucaccauguuggccaggcugg

SEQ ID NO: 2010551 - RNA, 13 nt, Human
uucaccauucgua

SEQ ID NO: 2010552 - RNA, 15 nt, Human
uucaagaaaugaaga

SEQ ID NO: 2010553 - RNA, 17 nt, Human
uucaagaaaugaagagc

SEQ ID NO: 2010554 - RNA, 22 nt, Human
uucaagggcuuuccugugccag

SEQ ID NO: 2010555 - RNA, 20 nt, Human
uucaagugauucucaugccu

SEQ ID NO: 2010556 - RNA, 22 nt, Human
uucaagugauucucaugccuca

SEQ ID NO: 2010557 - RNA, 21 nt, Human
uucaaggauccugagccagau

SEQ ID NO: 2010558 - RNA, 19 nt, Human
uucaaggauccugagccag

SEQ ID NO: 2010559 - RNA, 18 nt, Human
uucaaggauccugagcca

SEQ ID NO: 2010560 - RNA, 16 nt, Human
uucaaggauccugagc

SEQ ID NO: 2010561 - RNA, 15 nt, Human
uucaaggauccugag

SEQ ID NO: 2010562 - RNA, 11 nt, Human
uucaagaaaug

SEQ ID NO: 2010563 - RNA, 14 nt, Human
uucaagaaaugaag

SEQ ID NO: 2010564 - RNA, 16 nt, Human
uucaaaaaacuuguaa

SEQ ID NO: 2010565 - RNA, 21 nt, Human
uucaaaaagucacaguuaagg

SEQ ID NO: 2010566 - RNA, 12 nt, Human
uucaaaaaucug

SEQ ID NO: 2010567 - RNA, 14 nt, Human
uucaaaaaucugaa

SEQ ID NO: 2010568 - RNA, 16 nt, Human
uucaaaaaucugaaga

SEQ ID NO: 2010569 - RNA, 18 nt, Human
uucaaaaaucugaagauu

SEQ ID NO: 2010570 - RNA, 21 nt, Human
uucaaaaaucugaagauuguu

SEQ ID NO: 2010571 - RNA, 13 nt, Human
uuauuuuuuugaa

SEQ ID NO: 2010572 - RNA, 19 nt, Human
uuauuuuuuuuaauuguau

SEQ ID NO: 2010573 - RNA, 12 nt, Human
uuauuucuccuu

SEQ ID NO: 2010574 - RNA, 14 nt, Human
uuauuucuccuuuu

SEQ ID NO: 2010575 - RNA, 16 nt, Human
uucaacuucaggaaag

SEQ ID NO: 2010576 - RNA, 13 nt, Human
uucaaagaaucac

SEQ ID NO: 2010577 - RNA, 15 nt, Human
uucaaaccugugaag

SEQ ID NO: 2010578 - RNA, 13 nt, Human
uucaaacugaaaa

SEQ ID NO: 2010579 - RNA, 17 nt, Human
uucaaacugaaaagcug

SEQ ID NO: 2010580 - RNA, 22 nt, Human
uucaaaaaucugaagauuguuu

SEQ ID NO: 2010581 - RNA, 17 nt, Human
uucaaaauaaaauauca

SEQ ID NO: 2010582 - RNA, 21 nt, Human
uuauuuaaaauguaaaaagga

SEQ ID NO: 2010583 - RNA, 14 nt, Human
uuauuuaaauuuua

SEQ ID NO: 2010584 - RNA, 22 nt, Human
uuauuuaaugaaagacuguaca

SEQ ID NO: 2010585 - RNA, 18 nt, Human
uuauuuaaugaaagacug

SEQ ID NO: 2010586 - RNA, 23 nt, Human
auagcuggucuuauuuguaaagc

SEQ ID NO: 2010587 - RNA, 22 nt, Human
auagcuggucuuauuuguaaag

SEQ ID NO: 2010588 - RNA, 17 nt, Human
auagcugggacuacagg

SEQ ID NO: 2010589 - RNA, 16 nt, Human
uuauuuaguuccuuga

SEQ ID NO: 2010590 - RNA, 15 nt, Human
uuauuuaguauuuau

SEQ ID NO: 2010591 - RNA, 13 nt, Human
uuauuuauaugua

SEQ ID NO: 2010592 - RNA, 14 nt, Human
uuauuuauauguau

SEQ ID NO: 2010593 - RNA, 15 nt, Human
uuauuuacugcuagu

SEQ ID NO: 2010594 - RNA, 17 nt, Human
uuauuuagcaccaggga

SEQ ID NO: 2010595 - RNA, 20 nt, Human
uuauuucaucauauuauaca

SEQ ID NO: 2010596 - RNA, 12 nt, Human
uuauuuauucug

SEQ ID NO: 2010597 - RNA, 22 nt, Human
uuauuuauucugggaauguaua

SEQ ID NO: 2010598 - RNA, 11 nt, Human
uuauuuauuga

SEQ ID NO: 2010599 - RNA, 15 nt, Human
uuauuuauauguaug

SEQ ID NO: 2010600 - RNA, 16 nt, Human
uuauuuauauguaugu

SEQ ID NO: 2010601 - RNA, 15 nt, Human
uuauuuauauuuauu

SEQ ID NO: 2010602 - RNA, 16 nt, Human
uuauuuauauuuauug

SEQ ID NO: 2010603 - RNA, 17 nt, Human
uuauuuauauuuauuga

SEQ ID NO: 2010604 - RNA, 17 nt, Human
auaagauaaaugugcug

SEQ ID NO: 2010605 - RNA, 13 nt, Human
auaagauaaaugu

SEQ ID NO: 2010606 - RNA, 18 nt, Human
auagccugccucuucucu

SEQ ID NO: 2010607 - RNA, 15 nt, Human
auaagauauuuuauu

SEQ ID NO: 2010608 - RNA, 20 nt, Human
auaagauauuuuauuuugaa

SEQ ID NO: 2010609 - RNA, 22 nt, Human
auaagagcuuccaauuuuccuu

SEQ ID NO: 2010610 - RNA, 14 nt, Human
auagcuacuaauuu

SEQ ID NO: 2010611 - RNA, 17 nt, Human
auagcuacuaauuuuaa

SEQ ID NO: 2010612 - RNA, 12 nt, Human
auagcugggacu

SEQ ID NO: 2010613 - RNA, 20 nt, Human
auagcucaggugucccugca

SEQ ID NO: 2010614 - RNA, 21 nt, Human
auagcucaggugucccugcac

SEQ ID NO: 2010615 - RNA, 22 nt, Human
auagcucaggugucccugcacu

SEQ ID NO: 2010616 - RNA, 19 nt, Human
auagcucaggugucccugc

SEQ ID NO: 2010617 - RNA, 18 nt, Human
auagcuacuaauuuuaaa

SEQ ID NO: 2010618 - RNA, 14 nt, Human
uuccuucagugccu

SEQ ID NO: 2010619 - RNA, 11 nt, Human
uuccuucagug

SEQ ID NO: 2010620 - RNA, 18 nt, Human
auauuuucaugcuguuca

SEQ ID NO: 2010621 - RNA, 21 nt, Human
auauuuucaugcuguucauga

SEQ ID NO: 2010622 - RNA, 15 nt, Human
uuccuucagugccuu

SEQ ID NO: 2010623 - RNA, 19 nt, Human
auauuuucaacgcagcccu

SEQ ID NO: 2010624 - RNA, 20 nt, Human
auauuuucaacgcagcccug

SEQ ID NO: 2010625 - RNA, 16 nt, Human
uuccugggagcuuuug

SEQ ID NO: 2010626 - RNA, 16 nt, Human
uuccugggcacacgcu

SEQ ID NO: 2010627 - RNA, 19 nt, Human
uuccugggcacacgcugcu

SEQ ID NO: 2010628 - RNA, 20 nt, Human
uuccugggcacacgcugcuc

SEQ ID NO: 2010629 - RNA, 22 nt, Human
uuccugggcacacgcugcucug

SEQ ID NO: 2010630 - RNA, 19 nt, Human
uuccuggggcauccauggg

SEQ ID NO: 2010631 - RNA, 15 nt, Human
uuccugggagcuuuu

SEQ ID NO: 2010632 - RNA, 13 nt, Human
uuccucuugaacc

SEQ ID NO: 2010633 - RNA, 15 nt, Human
uuccucuugaaccag

SEQ ID NO: 2010634 - RNA, 15 nt, Human
uuccucuugacccug

SEQ ID NO: 2010635 - RNA, 17 nt, Human
uuccucuugacccugca

SEQ ID NO: 2010636 - RNA, 18 nt, Human
uuccucuugacccugcac

SEQ ID NO: 2010637 - RNA, 19 nt, Human
uuccucuugacccugcacc

SEQ ID NO: 2010638 - RNA, 22 nt, Human
uuccucuugacccugcacccuc

SEQ ID NO: 2010639 - RNA, 23 nt, Human
uuccucuugacccugcacccucc

SEQ ID NO: 2010640 - RNA, 11 nt, Human
uuccucuuucc

SEQ ID NO: 2010641 - RNA, 21 nt, Human
uuccuguguguccaaaacugc

SEQ ID NO: 2010642 - RNA, 22 nt, Human
uuccuguguguccaaaacugcc

SEQ ID NO: 2010643 - RNA, 17 nt, Human
uuccuguucccaugaga

SEQ ID NO: 2010644 - RNA, 21 nt, Human
uuccucugcucccccuuuucc

SEQ ID NO: 2010645 - RNA, 13 nt, Human
uuccucugcuccc

SEQ ID NO: 2010646 - RNA, 14 nt, Human
uuccucugcucccc

SEQ ID NO: 2010647 - RNA, 22 nt, Human
uuccucugcuaaauugauguug

SEQ ID NO: 2010648 - RNA, 11 nt, Human
uuccucugcuc

SEQ ID NO: 2010649 - RNA, 12 nt, Human
uuccucugcucc

SEQ ID NO: 2010650 - RNA, 13 nt, Human
uuccucgcuucuu

SEQ ID NO: 2010651 - RNA, 15 nt, Human
uuccucgcuucuuuc

SEQ ID NO: 2010652 - RNA, 20 nt, Human
uuccuaaucacucagagcag

SEQ ID NO: 2010653 - RNA, 15 nt, Human
uuccuaauccucuag

SEQ ID NO: 2010654 - RNA, 13 nt, Human
uuccuaauccucu

SEQ ID NO: 2010655 - RNA, 20 nt, Human
auauuuuauuuuuagaauuu

SEQ ID NO: 2010656 - RNA, 14 nt, Human
auauuuuauuuuua

SEQ ID NO: 2010657 - RNA, 14 nt, Human
auauuuuaagacga

SEQ ID NO: 2010658 - RNA, 16 nt, Human
aucacuggcauggugg

SEQ ID NO: 2010659 - RNA, 17 nt, Human
aucacuggcaugguggu

SEQ ID NO: 2010660 - RNA, 15 nt, Human
aucacuguguauauu

SEQ ID NO: 2010661 - RNA, 17 nt, Human
aucacuguguauauuug

SEQ ID NO: 2010662 - RNA, 18 nt, Human
aucacuguguauauuuga

SEQ ID NO: 2010663 - RNA, 19 nt, Human
aucacuguguauauuugau

SEQ ID NO: 2010664 - RNA, 15 nt, Human
aucacuguuuagauu

SEQ ID NO: 2010665 - RNA, 14 nt, Human
aucacuguuuagau

SEQ ID NO: 2010666 - RNA, 20 nt, Human
aucacuguguauauuugauu

SEQ ID NO: 2010667 - RNA, 23 nt, Human
uuccuuuucccaggaaagaagca

SEQ ID NO: 2010668 - RNA, 21 nt, Human
uuccuuuuaaaacacuuccau

SEQ ID NO: 2010669 - RNA, 22 nt, Human
uuccuuuuaaaacacuuccaua

SEQ ID NO: 2010670 - RNA, 20 nt, Human
uuccuuuuaaaacacuucca

SEQ ID NO: 2010671 - RNA, 16 nt, Human
aucacuguuuagauuu

SEQ ID NO: 2010672 - RNA, 22 nt, Human
aucacggcucacugcagccuca

SEQ ID NO: 2010673 - RNA, 14 nt, Human
aucacaaaugacuu

SEQ ID NO: 2010674 - RNA, 15 nt, Human
aucacaaaugacuuu

SEQ ID NO: 2010675 - RNA, 16 nt, Human
aucacaaaugacuuua

SEQ ID NO: 2010676 - RNA, 19 nt, Human
aucacaaaugacuuuauua

SEQ ID NO: 2010677 - RNA, 20 nt, Human
aucacaaaugacuuuauuau

SEQ ID NO: 2010678 - RNA, 11 nt, Human
aucacaaauga

SEQ ID NO: 2010679 - RNA, 12 nt, Human
aucacaaaugac

SEQ ID NO: 2010680 - RNA, 13 nt, Human
aucacaaaugacu

SEQ ID NO: 2010681 - RNA, 13 nt, Human
auauuuuguaaau

SEQ ID NO: 2010682 - RNA, 15 nt, Human
aucaagagccuuaaa

SEQ ID NO: 2010683 - RNA, 16 nt, Human
aucaagagccuuaaaa

SEQ ID NO: 2010684 - RNA, 18 nt, Human
aucaagagccuuaaaaca

SEQ ID NO: 2010685 - RNA, 21 nt, Human
aucaagagccuuaaaacauca

SEQ ID NO: 2010686 - RNA, 16 nt, Human
auauuuuguaugcaag

SEQ ID NO: 2010687 - RNA, 17 nt, Human
auauuuuguaugcaagc

SEQ ID NO: 2010688 - RNA, 14 nt, Human
auauuuuguaugca

SEQ ID NO: 2010689 - RNA, 14 nt, Human
aucaagagccuuaa

SEQ ID NO: 2010690 - RNA, 14 nt, Human
aucaaguauuauaa

SEQ ID NO: 2010691 - RNA, 15 nt, Human
aucaauaugcagaau

SEQ ID NO: 2010692 - RNA, 23 nt, Human
aucaauaugcagaauggcauuug

SEQ ID NO: 2010693 - RNA, 13 nt, Human
aucaaguauuaua

SEQ ID NO: 2010694 - RNA, 14 nt, Human
aucaaguauuauac

SEQ ID NO: 2010695 - RNA, 18 nt, Human
aucaaguauuauaccuuu

SEQ ID NO: 2010696 - RNA, 22 nt, Human
auauucucacagcuccaagaau

SEQ ID NO: 2010697 - RNA, 23 nt, Human
auauucucacagcuccaagaauu

SEQ ID NO: 2010698 - RNA, 21 nt, Human
auauucucacagcuccaagaa

SEQ ID NO: 2010699 - RNA, 12 nt, Human
auauucucugua

SEQ ID NO: 2010700 - RNA, 13 nt, Human
auauucucuguac

SEQ ID NO: 2010701 - RNA, 14 nt, Human
auauucucuguaca

SEQ ID NO: 2010702 - RNA, 15 nt, Human
auauucucuguacau

SEQ ID NO: 2010703 - RNA, 16 nt, Human
auauucucuguacaua

SEQ ID NO: 2010704 - RNA, 19 nt, Human
auauucucuguacauauua

SEQ ID NO: 2010705 - RNA, 16 nt, Human
auauucuguuggccag

SEQ ID NO: 2010706 - RNA, 19 nt, Human
auauugauuuccguuaaaa

SEQ ID NO: 2010707 - RNA, 21 nt, Human
auauugauuuccguuaaaaua

SEQ ID NO: 2010708 - RNA, 22 nt, Human
auauugauuuccguuaaaauac

SEQ ID NO: 2010709 - RNA, 22 nt, Human
auauugauccagaaagaaaacu

SEQ ID NO: 2010710 - RNA, 15 nt, Human
auauugauccagaaa

SEQ ID NO: 2010711 - RNA, 14 nt, Human
auauucuuuguuaa

SEQ ID NO: 2010712 - RNA, 20 nt, Human
auauucuuuguuaauuugga

SEQ ID NO: 2010713 - RNA, 20 nt, Human
auauguuuuaagaggcaggg

SEQ ID NO: 2010714 - RNA, 17 nt, Human
auauguuuccuucccuc

SEQ ID NO: 2010715 - RNA, 18 nt, Human
auauguuuuaagaggcag

SEQ ID NO: 2010716 - RNA, 16 nt, Human
auauguuuccuucccu

SEQ ID NO: 2010717 - RNA, 17 nt, Human
uucauguucccacuuca

SEQ ID NO: 2010718 - RNA, 22 nt, Human
uucauguccugugucaguuuau

SEQ ID NO: 2010719 - RNA, 23 nt, Human
uucauguccugugucaguuuaug

SEQ ID NO: 2010720 - RNA, 20 nt, Human
uucaugugggaucccaucuu

SEQ ID NO: 2010721 - RNA, 22 nt, Human
uucaugugggaucccaucuuuu

SEQ ID NO: 2010722 - RNA, 22 nt, Human
auauuaaggaagacaaugugaa

SEQ ID NO: 2010723 - RNA, 24 nt, Human
auauuaagaaagacuaucuaaaug

SEQ ID NO: 2010724 - RNA, 20 nt, Human
auauuaagcaugacagaaaa

SEQ ID NO: 2010725 - RNA, 20 nt, Human
auauuaaguaagucucaagg

SEQ ID NO: 2010726 - RNA, 23 nt, Human
auauuaagcaugacagaaaauau

SEQ ID NO: 2010727 - RNA, 20 nt, Human
auauuuguaaauuuauguga

SEQ ID NO: 2010728 - RNA, 14 nt, Human
auauuuguacuuuc

SEQ ID NO: 2010729 - RNA, 15 nt, Human
auauuuguacuuucu

SEQ ID NO: 2010730 - RNA, 17 nt, Human
auauuuguacuuucugu

SEQ ID NO: 2010731 - RNA, 19 nt, Human
auauuuguacuuucuguua

SEQ ID NO: 2010732 - RNA, 20 nt, Human
auauuuguacuuucuguuaa

SEQ ID NO: 2010733 - RNA, 21 nt, Human
auauuuguacuuucuguuaaa

SEQ ID NO: 2010734 - RNA, 19 nt, Human
auauuuguauuuauucuuu

SEQ ID NO: 2010735 - RNA, 17 nt, Human
auauuuguauuuauucu

SEQ ID NO: 2010736 - RNA, 18 nt, Human
auauuuguauuuauucuu

SEQ ID NO: 2010737 - RNA, 14 nt, Human
auauuuuaaacaga

SEQ ID NO: 2010738 - RNA, 17 nt, Human
auauuuuaaaauaaacu

SEQ ID NO: 2010739 - RNA, 11 nt, Human
auauuugugua

SEQ ID NO: 2010740 - RNA, 16 nt, Human
auauuugugugcuaaa

SEQ ID NO: 2010741 - RNA, 22 nt, Human
auauuugugugcuaaacgugua

SEQ ID NO: 2010742 - RNA, 23 nt, Human
auauuugugugcuaaacguguau

SEQ ID NO: 2010743 - RNA, 17 nt, Human
auauuuguguguucacu

SEQ ID NO: 2010744 - RNA, 22 nt, Human
auauuuaaaggcccuaucuguu

SEQ ID NO: 2010745 - RNA, 14 nt, Human
auauuuaaaacuuu

SEQ ID NO: 2010746 - RNA, 23 nt, Human
auauuucugaggagccugcaaca

SEQ ID NO: 2010747 - RNA, 12 nt, Human
auauuguuaagg

SEQ ID NO: 2010748 - RNA, 20 nt, Human
auauuguuuucaguguacau

SEQ ID NO: 2010749 - RNA, 19 nt, Human
auauuuaaaaacaaaaggc

SEQ ID NO: 2010750 - RNA, 22 nt, Human
auauuuaaaaacaaaaggcaau

SEQ ID NO: 2010751 - RNA, 21 nt, Human
auauugcugauggugcaauga

SEQ ID NO: 2010752 - RNA, 17 nt, Human
auauugcugauggugca

SEQ ID NO: 2010753 - RNA, 17 nt, Human
auauugccauuaugcuu

SEQ ID NO: 2010754 - RNA, 20 nt, Human
auauugaaaggcaaacauuu

SEQ ID NO: 2010755 - RNA, 17 nt, Human
auauugcacaauuauaa

SEQ ID NO: 2010756 - RNA, 23 nt, Human
uucugggaauguauaguauuuga

SEQ ID NO: 2010757 - RNA, 15 nt, Human
uucugggguuuuucu

SEQ ID NO: 2010758 - RNA, 11 nt, Human
uucugguaauc

SEQ ID NO: 2010759 - RNA, 23 nt, Human
uucuguaauaacuagaacaaaua

SEQ ID NO: 2010760 - RNA, 23 nt, Human
uucugccgcagcccugcagaggg

SEQ ID NO: 2010761 - RNA, 21 nt, Human
uucugccacccugcugagucu

SEQ ID NO: 2010762 - RNA, 16 nt, Human
uucugccgcagcccug

SEQ ID NO: 2010763 - RNA, 22 nt, Human
uucugccagauguccuaauggu

SEQ ID NO: 2010764 - RNA, 10 nt, Human
uucugggaca

SEQ ID NO: 2010765 - RNA, 15 nt, Human
uucugccucugaugu

SEQ ID NO: 2010766 - RNA, 16 nt, Human
uucugccucugaugua

SEQ ID NO: 2010767 - RNA, 22 nt, Human
uucugccucugauguauuuugu

SEQ ID NO: 2010768 - RNA, 21 nt, Human
uucugccugaggggcagccug

SEQ ID NO: 2010769 - RNA, 23 nt, Human
uucugccugaggggcagccugcc

SEQ ID NO: 2010770 - RNA, 11 nt, Human
uucugggacac

SEQ ID NO: 2010771 - RNA, 22 nt, Human
uucugggacacaguucaauucu

SEQ ID NO: 2010772 - RNA, 21 nt, Human
uucugaaauuuccugggagcu

SEQ ID NO: 2010773 - RNA, 16 nt, Human
uucugaaccugucuuu

SEQ ID NO: 2010774 - RNA, 13 nt, Human
uucucuucacuca

SEQ ID NO: 2010775 - RNA, 19 nt, Human
uucucuucauauucagcuu

SEQ ID NO: 2010776 - RNA, 12 nt, Human
uucucuuagaaa

SEQ ID NO: 2010777 - RNA, 22 nt, Human
uucucuuagaaaaggugauaaa

SEQ ID NO: 2010778 - RNA, 12 nt, Human
uucugaaagagu

SEQ ID NO: 2010779 - RNA, 19 nt, Human
uucugaaagagucuuucuu

SEQ ID NO: 2010780 - RNA, 15 nt, Human
uucugaaagggacgc

SEQ ID NO: 2010781 - RNA, 19 nt, Human
aucauugaaaucuuuuugc

SEQ ID NO: 2010782 - RNA, 20 nt, Human
aucauugaaaucuuuuugcu

SEQ ID NO: 2010783 - RNA, 23 nt, Human
aucauuccuuuuuauuuauaugu

SEQ ID NO: 2010784 - RNA, 17 nt, Human
aucccauaugccugggc

SEQ ID NO: 2010785 - RNA, 16 nt, Human
aucccauaugccuggg

SEQ ID NO: 2010786 - RNA, 16 nt, Human
aucccugcucacugca

SEQ ID NO: 2010787 - RNA, 20 nt, Human
aucccugcucacugcagccu

SEQ ID NO: 2010788 - RNA, 12 nt, Human
aucccugcucac

SEQ ID NO: 2010789 - RNA, 13 nt, Human
aucccugcucacu

SEQ ID NO: 2010790 - RNA, 15 nt, Human
aucccugcucacugc

SEQ ID NO: 2010791 - RNA, 15 nt, Human
aucccuguguuaauu

SEQ ID NO: 2010792 - RNA, 20 nt, Human
aucccuguguuaauuuaagu

SEQ ID NO: 2010793 - RNA, 12 nt, Human
aucccuuaagaa

SEQ ID NO: 2010794 - RNA, 14 nt, Human
aucccuuaagaaug

SEQ ID NO: 2010795 - RNA, 17 nt, Human
aucccaggauguacaag

SEQ ID NO: 2010796 - RNA, 19 nt, Human
auccauggggucucucaca

SEQ ID NO: 2010797 - RNA, 22 nt, Human
auccauggggucucucacagac

SEQ ID NO: 2010798 - RNA, 23 nt, Human
auccauggggucucucacagaca

SEQ ID NO: 2010799 - RNA, 15 nt, Human
auccagguucagcuu

SEQ ID NO: 2010800 - RNA, 16 nt, Human
auccagguucagcuug

SEQ ID NO: 2010801 - RNA, 17 nt, Human
auccaggguggugguga

SEQ ID NO: 2010802 - RNA, 11 nt, Human
aucauuucugg

SEQ ID NO: 2010803 - RNA, 19 nt, Human
aucauuuguucaaagcugu

SEQ ID NO: 2010804 - RNA, 11 nt, Human
aucauuugagu

SEQ ID NO: 2010805 - RNA, 14 nt, Human
aucauuugaguuca

SEQ ID NO: 2010806 - RNA, 12 nt, Human
aucauuuguuca

SEQ ID NO: 2010807 - RNA, 18 nt, Human
aucauguuuacagaggac

SEQ ID NO: 2010808 - RNA, 23 nt, Human
aucauguuuacagaggacaguau

SEQ ID NO: 2010809 - RNA, 12 nt, Human
aucauguuucuu

SEQ ID NO: 2010810 - RNA, 14 nt, Human
aucauguuucuuug

SEQ ID NO: 2010811 - RNA, 15 nt, Human
aucauguuucuuuga

SEQ ID NO: 2010812 - RNA, 16 nt, Human
aucauguuucuuugau

SEQ ID NO: 2010813 - RNA, 23 nt, Human
aucauguuucuuugaucaugaau

SEQ ID NO: 2010814 - RNA, 23 nt, Human
aucauaguggcuuaaaacaacac

SEQ ID NO: 2010815 - RNA, 23 nt, Human
aucauauugguauauccuuuucu

SEQ ID NO: 2010816 - RNA, 15 nt, Human
aucauauuauacaga

SEQ ID NO: 2010817 - RNA, 16 nt, Human
aucauauuauacagac

SEQ ID NO: 2010818 - RNA, 14 nt, Human
aucauucauuuucu

SEQ ID NO: 2010819 - RNA, 22 nt, Human
aucauuaaagccugaguuugcu

SEQ ID NO: 2010820 - RNA, 15 nt, Human
aucauugaaaucuuu

SEQ ID NO: 2010821 - RNA, 14 nt, Human
aucauugaaaucuu

SEQ ID NO: 2010822 - RNA, 14 nt, Human
aucauuccuuuuua

SEQ ID NO: 2010823 - RNA, 15 nt, Human
aucauuccuuuuuau

SEQ ID NO: 2010824 - RNA, 20 nt, Human
aucauuccuuuuuauuuaua

SEQ ID NO: 2010825 - RNA, 21 nt, Human
aucauuccuuuuuauuuauau

SEQ ID NO: 2010826 - RNA, 13 nt, Human
aucauucuaaaga

SEQ ID NO: 2010827 - RNA, 16 nt, Human
aucagugucuuuccac

SEQ ID NO: 2010828 - RNA, 14 nt, Human
aucauaaguauuug

SEQ ID NO: 2010829 - RNA, 17 nt, Human
aucauaaguauuuggaa

SEQ ID NO: 2010830 - RNA, 18 nt, Human
aucauaaguauuuggaau

SEQ ID NO: 2010831 - RNA, 19 nt, Human
aucauaaguauuuggaauu

SEQ ID NO: 2010832 - RNA, 23 nt, Human
aucauaaguauuuggaauuagaa

SEQ ID NO: 2010833 - RNA, 17 nt, Human
aucauacuccuaugcuu

SEQ ID NO: 2010834 - RNA, 18 nt, Human
aucauacuccuaugcuuu

SEQ ID NO: 2010835 - RNA, 19 nt, Human
aucauacuccuaugcuuua

SEQ ID NO: 2010836 - RNA, 15 nt, Human
aucagcacgauuucu

SEQ ID NO: 2010837 - RNA, 16 nt, Human
aucagcacgauuucug

SEQ ID NO: 2010838 - RNA, 17 nt, Human
aucagcacgauuucugu

SEQ ID NO: 2010839 - RNA, 18 nt, Human
aucagcacgauuucuguu

SEQ ID NO: 2010840 - RNA, 15 nt, Human
aucagaacagcuguu

SEQ ID NO: 2010841 - RNA, 13 nt, Human
aucagaacagcug

SEQ ID NO: 2010842 - RNA, 14 nt, Human
aucagaacagcugu

SEQ ID NO: 2010843 - RNA, 16 nt, Human
aucagaaauaauaaaa

SEQ ID NO: 2010844 - RNA, 20 nt, Human
uucucacagcuccaagaauu

SEQ ID NO: 2010845 - RNA, 22 nt, Human
uucucagaaucucaaauaacua

SEQ ID NO: 2010846 - RNA, 19 nt, Human
uucucagaaucucaaauaa

SEQ ID NO: 2010847 - RNA, 23 nt, Human
uucucagaaucucaaauaacuaa

SEQ ID NO: 2010848 - RNA, 14 nt, Human
uucucaguuuuucu

SEQ ID NO: 2010849 - RNA, 15 nt, Human
uucucaguuuuucuu

SEQ ID NO: 2010850 - RNA, 16 nt, Human
uucucaguuuuucuua

SEQ ID NO: 2010851 - RNA, 18 nt, Human
uucucaguuuuucuuaau

SEQ ID NO: 2010852 - RNA, 19 nt, Human
uucucaguuuuucuuaaua

SEQ ID NO: 2010853 - RNA, 21 nt, Human
uucucaagggacguccuccaa

SEQ ID NO: 2010854 - RNA, 18 nt, Human
uuccuuuuuauuuauaug

SEQ ID NO: 2010855 - RNA, 13 nt, Human
uucuaggccuggg

SEQ ID NO: 2010856 - RNA, 20 nt, Human
uuccuuuuuauuuauaugua

SEQ ID NO: 2010857 - RNA, 23 nt, Human
uucuaggacugaauuaugaaacu

SEQ ID NO: 2010858 - RNA, 17 nt, Human
agugaggcucugcccuu

SEQ ID NO: 2010859 - RNA, 16 nt, Human
agugaggcucugcccu

SEQ ID NO: 2010860 - RNA, 14 nt, Human
agugaggcucugcc

SEQ ID NO: 2010861 - RNA, 15 nt, Human
agugaggcucugccc

SEQ ID NO: 2010862 - RNA, 20 nt, Human
agugaggcucugcccuuggu

SEQ ID NO: 2010863 - RNA, 19 nt, Human
agugaggcucugcccuugg

SEQ ID NO: 2010864 - RNA, 21 nt, Human
agugaggcucugcccuugguu

SEQ ID NO: 2010865 - RNA, 14 nt, Human
agugagggauuauc

SEQ ID NO: 2010866 - RNA, 21 nt, Human
agugaguugauagcacagacc

SEQ ID NO: 2010867 - RNA, 15 nt, Human
agugagucgaggaca

SEQ ID NO: 2010868 - RNA, 21 nt, Human
ugugcccccauguaagcaccc

SEQ ID NO: 2010869 - RNA, 18 nt, Human
ugugcugcuuugauauau

SEQ ID NO: 2010870 - RNA, 17 nt, Human
ugugcccagaauacuga

SEQ ID NO: 2010871 - RNA, 18 nt, Human
ugugcccagaauacugau

SEQ ID NO: 2010872 - RNA, 21 nt, Human
ugugcccagaauacugaugga

SEQ ID NO: 2010873 - RNA, 23 nt, Human
uguggcaguuuggcaaacucucc

SEQ ID NO: 2010874 - RNA, 21 nt, Human
uguggaguucaucuugaauug

SEQ ID NO: 2010875 - RNA, 17 nt, Human
uguggagucauuucuga

SEQ ID NO: 2010876 - RNA, 22 nt, Human
uguggagucagccucgcaggcc

SEQ ID NO: 2010877 - RNA, 18 nt, Human
uguggagucauuucugau

SEQ ID NO: 2010878 - RNA, 17 nt, Human
uguggaguucaucuuga

SEQ ID NO: 2010879 - RNA, 20 nt, Human
ugugauggggcccugccucc

SEQ ID NO: 2010880 - RNA, 19 nt, Human
ugugauggggcccugccuc

SEQ ID NO: 2010881 - RNA, 18 nt, Human
ugugaugagaggaaauca

SEQ ID NO: 2010882 - RNA, 16 nt, Human
agugaacaaauuuaca

SEQ ID NO: 2010883 - RNA, 20 nt, Human
agugaacaaauuuacagaga

SEQ ID NO: 2010884 - RNA, 15 nt, Human
ugugaucucauuguu

SEQ ID NO: 2010885 - RNA, 16 nt, Human
ugugaucucauuguuc

SEQ ID NO: 2010886 - RNA, 15 nt, Human
agugaaagaaaauaa

SEQ ID NO: 2010887 - RNA, 18 nt, Human
agugaaauaccauuauua

SEQ ID NO: 2010888 - RNA, 13 nt, Human
agugaaauuuauu

SEQ ID NO: 2010889 - RNA, 18 nt, Human
ugugccagauuuaugcau

SEQ ID NO: 2010890 - RNA, 14 nt, Human
ugugcccacccucc

SEQ ID NO: 2010891 - RNA, 23 nt, Human
ugugcccacccuccacucuccuc

SEQ ID NO: 2010892 - RNA, 12 nt, Human
ugugccaugugc

SEQ ID NO: 2010893 - RNA, 16 nt, Human
ugugccaugugccagg

SEQ ID NO: 2010894 - RNA, 20 nt, Human
ugugccagauuuaugcauau

SEQ ID NO: 2010895 - RNA, 20 nt, Human
ugugccagguuuuuggucug

SEQ ID NO: 2010896 - RNA, 19 nt, Human
ugugccaggugaaggaggc

SEQ ID NO: 2010897 - RNA, 15 nt, Human
ugugagaugcuagaa

SEQ ID NO: 2010898 - RNA, 19 nt, Human
ugugagaugcuagaacucc

SEQ ID NO: 2010899 - RNA, 16 nt, Human
ugugacugaauuucuu

SEQ ID NO: 2010900 - RNA, 15 nt, Human
ugugacugaauuucu

SEQ ID NO: 2010901 - RNA, 13 nt, Human
agucucuucucca

SEQ ID NO: 2010902 - RNA, 14 nt, Human
agucucuucuccac

SEQ ID NO: 2010903 - RNA, 21 nt, Human
agucucagugcuagcuuauuu

SEQ ID NO: 2010904 - RNA, 14 nt, Human
agucuuuguacaga

SEQ ID NO: 2010905 - RNA, 16 nt, Human
agucuuucuucuucaa

SEQ ID NO: 2010906 - RNA, 11 nt, Human
agucuuuuaaa

SEQ ID NO: 2010907 - RNA, 18 nt, Human
agucuugccuauauuuuc

SEQ ID NO: 2010908 - RNA, 21 nt, Human
agucuugccuauauuuuccug

SEQ ID NO: 2010909 - RNA, 18 nt, Human
agucuucauguucccacu

SEQ ID NO: 2010910 - RNA, 14 nt, Human
agucuucaugaaau

SEQ ID NO: 2010911 - RNA, 15 nt, Human
agucuucaugaaaug

SEQ ID NO: 2010912 - RNA, 16 nt, Human
agucuucaugaaaugc

SEQ ID NO: 2010913 - RNA, 17 nt, Human
agucuucaugaaaugcu

SEQ ID NO: 2010914 - RNA, 18 nt, Human
agucuucaugaaaugcua

SEQ ID NO: 2010915 - RNA, 23 nt, Human
agucuucaugaaaugcuauguca

SEQ ID NO: 2010916 - RNA, 15 nt, Human
agucucuucuccacu

SEQ ID NO: 2010917 - RNA, 16 nt, Human
agucucuucuccacug

SEQ ID NO: 2010918 - RNA, 18 nt, Human
agucucuucuccacugga

SEQ ID NO: 2010919 - RNA, 17 nt, Human
agucucuucuccacugg

SEQ ID NO: 2010920 - RNA, 16 nt, Human
agucuuaugcuuccag

SEQ ID NO: 2010921 - RNA, 17 nt, Human
agucuuaugcuuccaga

SEQ ID NO: 2010922 - RNA, 18 nt, Human
agucuuaugcuuccagaa

SEQ ID NO: 2010923 - RNA, 15 nt, Human
ugugaacagcggcug

SEQ ID NO: 2010924 - RNA, 20 nt, Human
ugugaacaguuguguuugaa

SEQ ID NO: 2010925 - RNA, 19 nt, Human
ugugaaccaccacacccag

SEQ ID NO: 2010926 - RNA, 20 nt, Human
ugugaaccaccacacccagc

SEQ ID NO: 2010927 - RNA, 21 nt, Human
ugugaaccaccacacccagcc

SEQ ID NO: 2010928 - RNA, 20 nt, Human
ugugaaauuuuucauauuuu

SEQ ID NO: 2010929 - RNA, 15 nt, Human
ugugaacuuggaagc

SEQ ID NO: 2010930 - RNA, 18 nt, Human
ugugaacuuggaagcaca

SEQ ID NO: 2010931 - RNA, 13 nt, Human
ugugaccucacgu

SEQ ID NO: 2010932 - RNA, 14 nt, Human
ugugaagagaacca

SEQ ID NO: 2010933 - RNA, 18 nt, Human
ugugacuaggaaaaaauu

SEQ ID NO: 2010934 - RNA, 15 nt, Human
ugugaaauuuuucau

SEQ ID NO: 2010935 - RNA, 17 nt, Human
ugugaaauuuuucauau

SEQ ID NO: 2010936 - RNA, 19 nt, Human
ugugaaauuuuucauauuu

SEQ ID NO: 2010937 - RNA, 12 nt, Human
ugugaaauuauu

SEQ ID NO: 2010938 - RNA, 21 nt, Human
ugugaaaggaaagagggaggu

SEQ ID NO: 2010939 - RNA, 18 nt, Human
ugugaaaggaaagaggcu

SEQ ID NO: 2010940 - RNA, 15 nt, Human
ugugaaaggaaagag

SEQ ID NO: 2010941 - RNA, 14 nt, Human
uguuacaaauugua

SEQ ID NO: 2010942 - RNA, 21 nt, Human
uguuacaaaauguaacuguua

SEQ ID NO: 2010943 - RNA, 23 nt, Human
uguuacaaaauguaacuguuacc

SEQ ID NO: 2010944 - RNA, 16 nt, Human
uguuacaaaauguaac

SEQ ID NO: 2010945 - RNA, 17 nt, Human
uguuacaaaauguaacu

SEQ ID NO: 2010946 - RNA, 18 nt, Human
uguuacaaaauguaacug

SEQ ID NO: 2010947 - RNA, 19 nt, Human
uguuacaaaauguaacugu

SEQ ID NO: 2010948 - RNA, 17 nt, Human
aguggugcgaucugggu

SEQ ID NO: 2010949 - RNA, 16 nt, Human
aguggacccugaaaug

SEQ ID NO: 2010950 - RNA, 17 nt, Human
aguggacccugaaaugu

SEQ ID NO: 2010951 - RNA, 18 nt, Human
aguggacccugaaaugug

SEQ ID NO: 2010952 - RNA, 19 nt, Human
aguggugguuuucuguucu

SEQ ID NO: 2010953 - RNA, 20 nt, Human
aguggugguuuucuguucuu

SEQ ID NO: 2010954 - RNA, 21 nt, Human
aguggugguuuucuguucuuu

SEQ ID NO: 2010955 - RNA, 23 nt, Human
aguggugguuuucuguucuuucu

SEQ ID NO: 2010956 - RNA, 17 nt, Human
aguggugguuuucuguu

SEQ ID NO: 2010957 - RNA, 18 nt, Human
aguggugguuuucuguuc

SEQ ID NO: 2010958 - RNA, 21 nt, Human
agugguggugaacagaacaaa

SEQ ID NO: 2010959 - RNA, 16 nt, Human
aguguacuggauuuaa

SEQ ID NO: 2010960 - RNA, 22 nt, Human
aguguaaaauauuuuaaaauaa

SEQ ID NO: 2010961 - RNA, 20 nt, Human
agugugguguuuccuggcac

SEQ ID NO: 2010962 - RNA, 19 nt, Human
agugugguguuuccuggca

SEQ ID NO: 2010963 - RNA, 17 nt, Human
agugugguguuuccugg

SEQ ID NO: 2010964 - RNA, 23 nt, Human
agugugguguuuccugcaggcca

SEQ ID NO: 2010965 - RNA, 17 nt, Human
agugugcaguaucugug

SEQ ID NO: 2010966 - RNA, 16 nt, Human
agugugguguuuccug

SEQ ID NO: 2010967 - RNA, 18 nt, Human
uguucugugauauaagug

SEQ ID NO: 2010968 - RNA, 15 nt, Human
uguucugugauauaa

SEQ ID NO: 2010969 - RNA, 13 nt, Human
uguucuguuacaa

SEQ ID NO: 2010970 - RNA, 14 nt, Human
uguucuguuacaaa

SEQ ID NO: 2010971 - RNA, 15 nt, Human
uguucuguuacaaaa

SEQ ID NO: 2010972 - RNA, 16 nt, Human
uguucuguuacaaaau

SEQ ID NO: 2010973 - RNA, 18 nt, Human
uguucuguuacaaaaugu

SEQ ID NO: 2010974 - RNA, 19 nt, Human
uguucuguuacaaaaugua

SEQ ID NO: 2010975 - RNA, 22 nt, Human
uguucuguuacaaaauguaacu

SEQ ID NO: 2010976 - RNA, 23 nt, Human
uguucuguuacaaaauguaacug

SEQ ID NO: 2010977 - RNA, 11 nt, Human
uguugauuucu

SEQ ID NO: 2010978 - RNA, 14 nt, Human
uguugauuucuagu

SEQ ID NO: 2010979 - RNA, 15 nt, Human
uguugauuucuaguu

SEQ ID NO: 2010980 - RNA, 16 nt, Human
uguugauuucuaguua

SEQ ID NO: 2010981 - RNA, 18 nt, Human
uguugauuucuaguuauu

SEQ ID NO: 2010982 - RNA, 19 nt, Human
uguugauuucuaguuauuu

SEQ ID NO: 2010983 - RNA, 20 nt, Human
uguugauuucuaguuauuua

SEQ ID NO: 2010984 - RNA, 13 nt, Human
uguugcccaggca

SEQ ID NO: 2010985 - RNA, 12 nt, Human
uguugcccaggc

SEQ ID NO: 2010986 - RNA, 15 nt, Human
uguugcccaggcagg

SEQ ID NO: 2010987 - RNA, 16 nt, Human
uguugcccaggcaggu

SEQ ID NO: 2010988 - RNA, 17 nt, Human
uguugcccaggcagguc

SEQ ID NO: 2010989 - RNA, 18 nt, Human
uguugcccaggcaggucu

SEQ ID NO: 2010990 - RNA, 17 nt, Human
uguucccaccugcugga

SEQ ID NO: 2010991 - RNA, 18 nt, Human
uguuccauaguuaaagaa

SEQ ID NO: 2010992 - RNA, 10 nt, Human
uguuccaguu

SEQ ID NO: 2010993 - RNA, 21 nt, Human
uguuccgugguuaaacucgcu

SEQ ID NO: 2010994 - RNA, 22 nt, Human
uguuccgaaaccaaagaagaaa

SEQ ID NO: 2010995 - RNA, 16 nt, Human
uguucugggacacagu

SEQ ID NO: 2010996 - RNA, 20 nt, Human
agugugucuuagugugugca

SEQ ID NO: 2010997 - RNA, 12 nt, Human
uguuauaugaac

SEQ ID NO: 2010998 - RNA, 20 nt, Human
uguuccacaaguuaaauaaa

SEQ ID NO: 2010999 - RNA, 19 nt, Human
uguuauagguccuuuagaa

SEQ ID NO: 2011000 - RNA, 13 nt, Human
uguguugaagagg

SEQ ID NO: 2011001 - RNA, 17 nt, Human
uguguugaagagcagcu

SEQ ID NO: 2011002 - RNA, 13 nt, Human
uguuaaagaugua

SEQ ID NO: 2011003 - RNA, 19 nt, Human
uguuaaagauguagcaaac

SEQ ID NO: 2011004 - RNA, 15 nt, Human
uguuaaauaaggccu

SEQ ID NO: 2011005 - RNA, 14 nt, Human
uguuaaagauguag

SEQ ID NO: 2011006 - RNA, 18 nt, Human
uguuaaagauguagcaaa

SEQ ID NO: 2011007 - RNA, 14 nt, Human
uguuacaaaaugua

SEQ ID NO: 2011008 - RNA, 15 nt, Human
uguuacaaaauguaa

SEQ ID NO: 2011009 - RNA, 15 nt, Human
uguuaauuuggacca

SEQ ID NO: 2011010 - RNA, 22 nt, Human
uguuaauuuggaccauuuuccu

SEQ ID NO: 2011011 - RNA, 15 nt, Human
uguuaauuuaaguuu

SEQ ID NO: 2011012 - RNA, 16 nt, Human
uguuaauuuaaguuuu

SEQ ID NO: 2011013 - RNA, 17 nt, Human
uguuaagggaccaggga

SEQ ID NO: 2011014 - RNA, 22 nt, Human
uguuaagguggauugaggccag

SEQ ID NO: 2011015 - RNA, 15 nt, Human
uguuaaauuaauuau

SEQ ID NO: 2011016 - RNA, 20 nt, Human
ugugucucuugguccugcug

SEQ ID NO: 2011017 - RNA, 17 nt, Human
ugugucucuugguccug

SEQ ID NO: 2011018 - RNA, 17 nt, Human
uguguaagaaauacaga

SEQ ID NO: 2011019 - RNA, 21 nt, Human
ugugucucuugguccugcugc

SEQ ID NO: 2011020 - RNA, 21 nt, Human
ugugucuugcaauggcagccu

SEQ ID NO: 2011021 - RNA, 12 nt, Human
ugugugugggag

SEQ ID NO: 2011022 - RNA, 20 nt, Human
ugugugugggaguguguaau

SEQ ID NO: 2011023 - RNA, 14 nt, Human
uguguguguaugug

SEQ ID NO: 2011024 - RNA, 23 nt, Human
uguguguuuauugucaaaguggu

SEQ ID NO: 2011025 - RNA, 19 nt, Human
uguguguuuauugucaaag

SEQ ID NO: 2011026 - RNA, 20 nt, Human
uguggucacaggaaguagag

SEQ ID NO: 2011027 - RNA, 23 nt, Human
uguggguuucuaaagcugccagc

SEQ ID NO: 2011028 - RNA, 21 nt, Human
uguggguuucuaaagcugcca

SEQ ID NO: 2011029 - RNA, 12 nt, Human
agugcugugaaa

SEQ ID NO: 2011030 - RNA, 13 nt, Human
agugcugugaaaa

SEQ ID NO: 2011031 - RNA, 14 nt, Human
agugcugugaaaaa

SEQ ID NO: 2011032 - RNA, 16 nt, Human
agugcugugaaaaaaa

SEQ ID NO: 2011033 - RNA, 16 nt, Human
ugugguguuuccuggc

SEQ ID NO: 2011034 - RNA, 14 nt, Human
ugugguguuuccug

SEQ ID NO: 2011035 - RNA, 18 nt, Human
uguguaagacaaaaagcu

SEQ ID NO: 2011036 - RNA, 21 nt, Human
ugugguguuuccugcaggcca

SEQ ID NO: 2011037 - RNA, 16 nt, Human
ugugguguugaggcuu

SEQ ID NO: 2011038 - RNA, 20 nt, Human
ugugguguuuccuggcacug

SEQ ID NO: 2011039 - RNA, 15 nt, Human
uguggucccacccca

SEQ ID NO: 2011040 - RNA, 13 nt, Human
uguggucccaccc

SEQ ID NO: 2011041 - RNA, 16 nt, Human
uguggucccaccccac

SEQ ID NO: 2011042 - RNA, 14 nt, Human
uguggugucugugu

SEQ ID NO: 2011043 - RNA, 16 nt, Human
agugcugcauuuaaaa

SEQ ID NO: 2011044 - RNA, 17 nt, Human
agugcugcauuuaaaag

SEQ ID NO: 2011045 - RNA, 19 nt, Human
agugcugcauuuaaaagau

SEQ ID NO: 2011046 - RNA, 20 nt, Human
agugcugggauuacaggugu

SEQ ID NO: 2011047 - RNA, 21 nt, Human
agugcugggauuacaggugug

SEQ ID NO: 2011048 - RNA, 23 nt, Human
agugaguugauagcacagacccu

SEQ ID NO: 2011049 - RNA, 22 nt, Human
agugaguugauagcacagaccc

SEQ ID NO: 2011050 - RNA, 22 nt, Human
agugaguacaugcacacucaug

SEQ ID NO: 2011051 - RNA, 12 nt, Human
agugcugcauuu

SEQ ID NO: 2011052 - RNA, 13 nt, Human
agugcugcauuua

SEQ ID NO: 2011053 - RNA, 21 nt, Human
agugcugcagggcuuuaaaau

SEQ ID NO: 2011054 - RNA, 21 nt, Human
aguucugcagauaaacaguag

SEQ ID NO: 2011055 - RNA, 16 nt, Human
aguucugcagauaaac

SEQ ID NO: 2011056 - RNA, 13 nt, Human
uguuuugcaugua

SEQ ID NO: 2011057 - RNA, 21 nt, Human
aguucugccucugauguauuu

SEQ ID NO: 2011058 - RNA, 14 nt, Human
aguucuuaacccag

SEQ ID NO: 2011059 - RNA, 18 nt, Human
aguucuuaacccaguguc

SEQ ID NO: 2011060 - RNA, 14 nt, Human
aguucugguuccua

SEQ ID NO: 2011061 - RNA, 11 nt, Human
aguucugggca

SEQ ID NO: 2011062 - RNA, 20 nt, Human
uguuuuccaugaguccccug

SEQ ID NO: 2011063 - RNA, 21 nt, Human
uguuuuauuuaaccucuaaau

SEQ ID NO: 2011064 - RNA, 21 nt, Human
uguuuuauuuuaauucaguug

SEQ ID NO: 2011065 - RNA, 13 nt, Human
uguuuggagacag

SEQ ID NO: 2011066 - RNA, 13 nt, Human
uguuuuaucuggu

SEQ ID NO: 2011067 - RNA, 20 nt, Human
uguuugcugaacauuggaga

SEQ ID NO: 2011068 - RNA, 21 nt, Human
uguuugaugcauuaaaagaaa

SEQ ID NO: 2011069 - RNA, 19 nt, Human
uguugccuugcauaauggu

SEQ ID NO: 2011070 - RNA, 19 nt, Human
uguugcccaggcaggucuu

SEQ ID NO: 2011071 - RNA, 16 nt, Human
uguugcuauaauaaag

SEQ ID NO: 2011072 - RNA, 15 nt, Human
uguuuagucuuuaua

SEQ ID NO: 2011073 - RNA, 13 nt, Human
uguuuaugugugu

SEQ ID NO: 2011074 - RNA, 16 nt, Human
uguuuaugugugugug

SEQ ID NO: 2011075 - RNA, 17 nt, Human
uguuuaucccuuaagaa

SEQ ID NO: 2011076 - RNA, 19 nt, Human
uguuuauugucaaaguggu

SEQ ID NO: 2011077 - RNA, 17 nt, Human
uguuuauugucaaagug

SEQ ID NO: 2011078 - RNA, 22 nt, Human
uguuugagcaucgcuuaggaga

SEQ ID NO: 2011079 - RNA, 15 nt, Human
uguuucuuugaucau

SEQ ID NO: 2011080 - RNA, 16 nt, Human
uguuugaaaauaguuu

SEQ ID NO: 2011081 - RNA, 17 nt, Human
uguuugaaaauaguuua

SEQ ID NO: 2011082 - RNA, 18 nt, Human
uguuugaaaauaguuuau

SEQ ID NO: 2011083 - RNA, 19 nt, Human
uguuugaaaauaguuuauu

SEQ ID NO: 2011084 - RNA, 22 nt, Human
uguuugauucagacagcugccu

SEQ ID NO: 2011085 - RNA, 17 nt, Human
uguuugauucagacagc

SEQ ID NO: 2011086 - RNA, 13 nt, Human
uguuugaugcauu

SEQ ID NO: 2011087 - RNA, 16 nt, Human
uguuugaugcauuaaa

SEQ ID NO: 2011088 - RNA, 19 nt, Human
uguuugaugcauuaaaaga

SEQ ID NO: 2011089 - RNA, 19 nt, Human
uguuucuuuguaaugaaaa

SEQ ID NO: 2011090 - RNA, 18 nt, Human
uguuucuuuguaaugaaa

SEQ ID NO: 2011091 - RNA, 20 nt, Human
uguuucuuucucugaggaca

SEQ ID NO: 2011092 - RNA, 21 nt, Human
uguuucuuucucugaggacaa

SEQ ID NO: 2011093 - RNA, 12 nt, Human
uguuucuuugaa

SEQ ID NO: 2011094 - RNA, 13 nt, Human
uguuucuuugaau

SEQ ID NO: 2011095 - RNA, 16 nt, Human
uguuucuuugaauuuu

SEQ ID NO: 2011096 - RNA, 18 nt, Human
uguuucuuugaauuuuca

SEQ ID NO: 2011097 - RNA, 19 nt, Human
uguuucuuugaauuuucau

SEQ ID NO: 2011098 - RNA, 23 nt, Human
uguuucuuugaauuuucauuuua

SEQ ID NO: 2011099 - RNA, 12 nt, Human
uguuucuuugau

SEQ ID NO: 2011100 - RNA, 13 nt, Human
uuaaaauugugau

SEQ ID NO: 2011101 - RNA, 23 nt, Human
uuaaaauucucuuccaaccauuu

SEQ ID NO: 2011102 - RNA, 18 nt, Human
uuaaaauugugauguguc

SEQ ID NO: 2011103 - RNA, 20 nt, Human
uuaaaaaguauugccaaaca

SEQ ID NO: 2011104 - RNA, 21 nt, Human
uuaaaaaguauugccaaacau

SEQ ID NO: 2011105 - RNA, 22 nt, Human
uuaaaaaguauugccaaacauu

SEQ ID NO: 2011106 - RNA, 23 nt, Human
uuaaaaaguauugccaaacauua

SEQ ID NO: 2011107 - RNA, 12 nt, Human
uuaaaaaguauu

SEQ ID NO: 2011108 - RNA, 14 nt, Human
uuaaaaagcccaac

SEQ ID NO: 2011109 - RNA, 17 nt, Human
uuaaaaagcccaaccuc

SEQ ID NO: 2011110 - RNA, 23 nt, Human
uuaaaaagauaaaaaaacagcuu

SEQ ID NO: 2011111 - RNA, 16 nt, Human
uuaaaaacaaaaggca

SEQ ID NO: 2011112 - RNA, 17 nt, Human
uuaaaaacaaaaggcaa

SEQ ID NO: 2011113 - RNA, 12 nt, Human
uuaaaauuuuaa

SEQ ID NO: 2011114 - RNA, 21 nt, Human
uuaaaauuuuaagcuaggaaa

SEQ ID NO: 2011115 - RNA, 13 nt, Human
uuaaaauuucuua

SEQ ID NO: 2011116 - RNA, 19 nt, Human
uuaaaauuucuuagaaaac

SEQ ID NO: 2011117 - RNA, 22 nt, Human
uuaaaauuucuuagaaaacaau

SEQ ID NO: 2011118 - RNA, 13 nt, Human
uuaaaauuugaaa

SEQ ID NO: 2011119 - RNA, 14 nt, Human
uuaaaauuugaaac

SEQ ID NO: 2011120 - RNA, 15 nt, Human
uuaaaauuugaaaca

SEQ ID NO: 2011121 - RNA, 17 nt, Human
uuaaaauuugaaacauu

SEQ ID NO: 2011122 - RNA, 18 nt, Human
uuaaaauuugaaacauug

SEQ ID NO: 2011123 - RNA, 22 nt, Human
uuaaagggaagaaaacacuguu

SEQ ID NO: 2011124 - RNA, 23 nt, Human
uuaaagggaagaaaacacuguua

SEQ ID NO: 2011125 - RNA, 15 nt, Human
uuaaagggaaauuga

SEQ ID NO: 2011126 - RNA, 13 nt, Human
uuaaagggaagaa

SEQ ID NO: 2011127 - RNA, 15 nt, Human
uuaaagggaagaaaa

SEQ ID NO: 2011128 - RNA, 16 nt, Human
uuaaagggaagaaaac

SEQ ID NO: 2011129 - RNA, 18 nt, Human
uuaaagggaagaaaacac

SEQ ID NO: 2011130 - RNA, 20 nt, Human
uuaaauucuugcaaaguauc

SEQ ID NO: 2011131 - RNA, 14 nt, Human
uuaaauugcucaca

SEQ ID NO: 2011132 - RNA, 21 nt, Human
uuaaauugcucacaguuauua

SEQ ID NO: 2011133 - RNA, 11 nt, Human
uuaacaaauaa

SEQ ID NO: 2011134 - RNA, 17 nt, Human
uuaacaggcaaacauuu

SEQ ID NO: 2011135 - RNA, 18 nt, Human
uuaacaggcaaacauuuu

SEQ ID NO: 2011136 - RNA, 23 nt, Human
uuaacaggcaaacauuuucucuu

SEQ ID NO: 2011137 - RNA, 22 nt, Human
uuaacagggucucuagugcugu

SEQ ID NO: 2011138 - RNA, 17 nt, Human
uuaacaaauaacaacuu

SEQ ID NO: 2011139 - RNA, 12 nt, Human
uuaacaagaagc

SEQ ID NO: 2011140 - RNA, 16 nt, Human
aguuucagaguucuca

SEQ ID NO: 2011141 - RNA, 14 nt, Human
aguuuaaggaauau

SEQ ID NO: 2011142 - RNA, 22 nt, Human
aguuguuuuuguauauugguuu

SEQ ID NO: 2011143 - RNA, 19 nt, Human
aguuguuuuuguauauugg

SEQ ID NO: 2011144 - RNA, 20 nt, Human
aguuguuuuuguauauuggu

SEQ ID NO: 2011145 - RNA, 15 nt, Human
aguuguuuuuguaua

SEQ ID NO: 2011146 - RNA, 16 nt, Human
aguuguuuuuguauau

SEQ ID NO: 2011147 - RNA, 17 nt, Human
aguuguuuuuguauauu

SEQ ID NO: 2011148 - RNA, 18 nt, Human
aguuguuuuuguauauug

SEQ ID NO: 2011149 - RNA, 23 nt, Human
aguuguuugauucagacagcugc

SEQ ID NO: 2011150 - RNA, 21 nt, Human
aguuguuugauucagacagcu

SEQ ID NO: 2011151 - RNA, 21 nt, Human
aguuguaacauucuauuucaa

SEQ ID NO: 2011152 - RNA, 18 nt, Human
aguuggucccccuuccau

SEQ ID NO: 2011153 - RNA, 21 nt, Human
aguuggguggaugccuggugg

SEQ ID NO: 2011154 - RNA, 13 nt, Human
aguuggcuucuaa

SEQ ID NO: 2011155 - RNA, 17 nt, Human
aguuggguggaugccug

SEQ ID NO: 2011156 - RNA, 16 nt, Human
aguuggcuaggacccc

SEQ ID NO: 2011157 - RNA, 12 nt, Human
auaaauauuaua

SEQ ID NO: 2011158 - RNA, 22 nt, Human
auaaauauuauauuauauauau

SEQ ID NO: 2011159 - RNA, 19 nt, Human
auaaauauucacacuugaa

SEQ ID NO: 2011160 - RNA, 18 nt, Human
auaaaucuuccaaaguuu

SEQ ID NO: 2011161 - RNA, 13 nt, Human
auaaaguuugauc

SEQ ID NO: 2011162 - RNA, 15 nt, Human
auaaaguuugaucuu

SEQ ID NO: 2011163 - RNA, 12 nt, Human
auaaaguuugau

SEQ ID NO: 2011164 - RNA, 22 nt, Human
auaaaguuugaucuuccucugc

SEQ ID NO: 2011165 - RNA, 18 nt, Human
auaaacaccacuggauua

SEQ ID NO: 2011166 - RNA, 15 nt, Human
auaaacaagaaugaa

SEQ ID NO: 2011167 - RNA, 20 nt, Human
auaaacaccacuggauuaau

SEQ ID NO: 2011168 - RNA, 14 nt, Human
uuacaggaaguacu

SEQ ID NO: 2011169 - RNA, 14 nt, Human
uuacagcugccugc

SEQ ID NO: 2011170 - RNA, 13 nt, Human
uuacagcugccug

SEQ ID NO: 2011171 - RNA, 20 nt, Human
uuacagccugggcaauaaag

SEQ ID NO: 2011172 - RNA, 17 nt, Human
auaacuacauauugaau

SEQ ID NO: 2011173 - RNA, 15 nt, Human
auaaauguauugauu

SEQ ID NO: 2011174 - RNA, 16 nt, Human
auaacuaaaagguaug

SEQ ID NO: 2011175 - RNA, 15 nt, Human
auaaaugauucaaaa

SEQ ID NO: 2011176 - RNA, 14 nt, Human
uuacuguaaaaugc

SEQ ID NO: 2011177 - RNA, 15 nt, Human
uuacuguaaaaugca

SEQ ID NO: 2011178 - RNA, 16 nt, Human
uuacuguaaaaugcaa

SEQ ID NO: 2011179 - RNA, 20 nt, Human
uuacuguaaaaugcaaaaaa

SEQ ID NO: 2011180 - RNA, 14 nt, Human
uuagaaauauaauu

SEQ ID NO: 2011181 - RNA, 12 nt, Human
uuagaaauauaa

SEQ ID NO: 2011182 - RNA, 11 nt, Human
uuagaaauaua

SEQ ID NO: 2011183 - RNA, 16 nt, Human
uuagaagaaguguguc

SEQ ID NO: 2011184 - RNA, 13 nt, Human
uuagaauugaagg

SEQ ID NO: 2011185 - RNA, 14 nt, Human
uuagaauugaaggu

SEQ ID NO: 2011186 - RNA, 16 nt, Human
uuagaauugaagguuu

SEQ ID NO: 2011187 - RNA, 17 nt, Human
uuagaauugaagguuuu

SEQ ID NO: 2011188 - RNA, 14 nt, Human
uuagaagaagugug

SEQ ID NO: 2011189 - RNA, 15 nt, Human
uuagaagaagugugu

SEQ ID NO: 2011190 - RNA, 15 nt, Human
uuagaacagguuuuu

SEQ ID NO: 2011191 - RNA, 13 nt, Human
uuagaaccuuucu

SEQ ID NO: 2011192 - RNA, 11 nt, Human
uuagacagagu

SEQ ID NO: 2011193 - RNA, 18 nt, Human
uuagaauugaagguuuuu

SEQ ID NO: 2011194 - RNA, 19 nt, Human
uuagaauuuugugaaacag

SEQ ID NO: 2011195 - RNA, 21 nt, Human
auaacuuauauuguaagaaau

SEQ ID NO: 2011196 - RNA, 22 nt, Human
auaacuuauauuguaagaaaua

SEQ ID NO: 2011197 - RNA, 23 nt, Human
auaacuuauauuguaagaaauac

SEQ ID NO: 2011198 - RNA, 15 nt, Human
uuacucacagccagc

SEQ ID NO: 2011199 - RNA, 20 nt, Human
uuacugaccucaccuaggaa

SEQ ID NO: 2011200 - RNA, 18 nt, Human
uuacucagaauucucuag

SEQ ID NO: 2011201 - RNA, 23 nt, Human
uuacucagaauucucuaguuuga

SEQ ID NO: 2011202 - RNA, 18 nt, Human
uuacuauucgguguguuu

SEQ ID NO: 2011203 - RNA, 15 nt, Human
uuacucaaugugugc

SEQ ID NO: 2011204 - RNA, 19 nt, Human
uuacauauguauacaugug

SEQ ID NO: 2011205 - RNA, 20 nt, Human
uuacauaagauaaaugugcu

SEQ ID NO: 2011206 - RNA, 14 nt, Human
auaaaauggcaaca

SEQ ID NO: 2011207 - RNA, 16 nt, Human
auaaaauggcaacaaa

SEQ ID NO: 2011208 - RNA, 19 nt, Human
auaaaauguccaguaagau

SEQ ID NO: 2011209 - RNA, 21 nt, Human
auaaaauguccaguaagauca

SEQ ID NO: 2011210 - RNA, 23 nt, Human
auaaaauguccaguaagaucacu

SEQ ID NO: 2011211 - RNA, 22 nt, Human
auaaaauggcaacaaacugcac

SEQ ID NO: 2011212 - RNA, 12 nt, Human
auaaaaucauaa

SEQ ID NO: 2011213 - RNA, 15 nt, Human
auaaaaucauaagua

SEQ ID NO: 2011214 - RNA, 16 nt, Human
auaaaaucauaaguau

SEQ ID NO: 2011215 - RNA, 19 nt, Human
auaaaaucauaaguauuug

SEQ ID NO: 2011216 - RNA, 20 nt, Human
auaaaaucauaaguauuugg

SEQ ID NO: 2011217 - RNA, 22 nt, Human
auaaaaucauaaguauuuggaa

SEQ ID NO: 2011218 - RNA, 22 nt, Human
auaaaagggacugagaaauuua

SEQ ID NO: 2011219 - RNA, 17 nt, Human
uuaaguacuauguauca

SEQ ID NO: 2011220 - RNA, 17 nt, Human
uuaagugaaaauauagc

SEQ ID NO: 2011221 - RNA, 12 nt, Human
uuaagugaaauu

SEQ ID NO: 2011222 - RNA, 13 nt, Human
uuaagugaaauuu

SEQ ID NO: 2011223 - RNA, 14 nt, Human
uuaagugaaauuua

SEQ ID NO: 2011224 - RNA, 22 nt, Human
uuaagugcugcauuuaaaagau

SEQ ID NO: 2011225 - RNA, 15 nt, Human
uuaagugaaauuuau

SEQ ID NO: 2011226 - RNA, 16 nt, Human
uuaagugaggaaauca

SEQ ID NO: 2011227 - RNA, 17 nt, Human
uuaagugaggaaaucaa

SEQ ID NO: 2011228 - RNA, 19 nt, Human
uuaagugaggaaaucaaag

SEQ ID NO: 2011229 - RNA, 20 nt, Human
uuaagugaggaaaucaaagu

SEQ ID NO: 2011230 - RNA, 23 nt, Human
uuaagugaggaaaucaaagugcu

SEQ ID NO: 2011231 - RNA, 18 nt, Human
uuaaguaaggaauuuuau

SEQ ID NO: 2011232 - RNA, 15 nt, Human
uuaagaggcaggguc

SEQ ID NO: 2011233 - RNA, 16 nt, Human
uuaagaggcagggucu

SEQ ID NO: 2011234 - RNA, 13 nt, Human
uuaagaggcaggg

SEQ ID NO: 2011235 - RNA, 16 nt, Human
auaaaauuaaagcuga

SEQ ID NO: 2011236 - RNA, 12 nt, Human
uuacaaaaugua

SEQ ID NO: 2011237 - RNA, 13 nt, Human
uuacaaaauguaa

SEQ ID NO: 2011238 - RNA, 15 nt, Human
uuacaaaauguaacu

SEQ ID NO: 2011239 - RNA, 16 nt, Human
uuacaaaauguaacug

SEQ ID NO: 2011240 - RNA, 23 nt, Human
uuaauuuaaguuuugacaagcug

SEQ ID NO: 2011241 - RNA, 19 nt, Human
uuaauuuuuuugagacaga

SEQ ID NO: 2011242 - RNA, 23 nt, Human
auaaacaagaccacguuucuaaa

SEQ ID NO: 2011243 - RNA, 14 nt, Human
auaaacaagaauga

SEQ ID NO: 2011244 - RNA, 15 nt, Human
auaaacaagaccacg

SEQ ID NO: 2011245 - RNA, 22 nt, Human
auaaacaagaccacguuucuaa

SEQ ID NO: 2011246 - RNA, 20 nt, Human
auaaaauuuuuaaucuuuaa

SEQ ID NO: 2011247 - RNA, 13 nt, Human
uuaauuuaaguuu

SEQ ID NO: 2011248 - RNA, 15 nt, Human
uuaauuuaaguuuug

SEQ ID NO: 2011249 - RNA, 16 nt, Human
uuaauuuaaguuuuga

SEQ ID NO: 2011250 - RNA, 15 nt, Human
uuaauucuuagcuca

SEQ ID NO: 2011251 - RNA, 12 nt, Human
uuaauucucuuu

SEQ ID NO: 2011252 - RNA, 20 nt, Human
uuaaugaaagacuguacaaa

SEQ ID NO: 2011253 - RNA, 23 nt, Human
uuaaugaaagacuguacaaagua

SEQ ID NO: 2011254 - RNA, 20 nt, Human
uuaauaaagcgaaaaacuca

SEQ ID NO: 2011255 - RNA, 19 nt, Human
uuaauaaauccuacaguau

SEQ ID NO: 2011256 - RNA, 13 nt, Human
uuaauaaacacuc

SEQ ID NO: 2011257 - RNA, 20 nt, Human
uuaaguuaguuccacugaga

SEQ ID NO: 2011258 - RNA, 17 nt, Human
uuaauaaacacucuuga

SEQ ID NO: 2011259 - RNA, 21 nt, Human
uggguggcaccagcagccugg

SEQ ID NO: 2011260 - RNA, 20 nt, Human
uggguggcaccagcagccug

SEQ ID NO: 2011261 - RNA, 17 nt, Human
uggguggcaccagcagc

SEQ ID NO: 2011262 - RNA, 12 nt, Human
ugguaagaaaaa

SEQ ID NO: 2011263 - RNA, 13 nt, Human
ugguaagaaaaag

SEQ ID NO: 2011264 - RNA, 17 nt, Human
ugguaagaaaaagcaaa

SEQ ID NO: 2011265 - RNA, 22 nt, Human
ugguaagaaaaagcaaaaggca

SEQ ID NO: 2011266 - RNA, 20 nt, Human
ugguagagugugccugaagu

SEQ ID NO: 2011267 - RNA, 13 nt, Human
ugguaccuugcac

SEQ ID NO: 2011268 - RNA, 14 nt, Human
ugguaccuugcaca

SEQ ID NO: 2011269 - RNA, 23 nt, Human
ugguaagaaaaagcaaaaggcau

SEQ ID NO: 2011270 - RNA, 14 nt, Human
ugggugcaggagcg

SEQ ID NO: 2011271 - RNA, 20 nt, Human
ugggugcaggagcgcucccu

SEQ ID NO: 2011272 - RNA, 18 nt, Human
ugggucgcccuggacugu

SEQ ID NO: 2011273 - RNA, 16 nt, Human
ugggucgcccuggacu

SEQ ID NO: 2011274 - RNA, 19 nt, Human
uggguccccagcccuuccu

SEQ ID NO: 2011275 - RNA, 15 nt, Human
uggguccccagcccu

SEQ ID NO: 2011276 - RNA, 16 nt, Human
uggguccccagcccuu

SEQ ID NO: 2011277 - RNA, 16 nt, Human
aggguggugaccucug

SEQ ID NO: 2011278 - RNA, 15 nt, Human
aggggagccaggagg

SEQ ID NO: 2011279 - RNA, 16 nt, Human
aggggagccaggaggg

SEQ ID NO: 2011280 - RNA, 12 nt, Human
aggggagccagg

SEQ ID NO: 2011281 - RNA, 13 nt, Human
aggggagccagga

SEQ ID NO: 2011282 - RNA, 20 nt, Human
aggggaaucuggagguagcc

SEQ ID NO: 2011283 - RNA, 18 nt, Human
aggggagcaugggaagug

SEQ ID NO: 2011284 - RNA, 19 nt, Human
aggggaauguuugccucug

SEQ ID NO: 2011285 - RNA, 20 nt, Human
aggggaauguuugccucugc

SEQ ID NO: 2011286 - RNA, 21 nt, Human
aggggaauguuugccucugcc

SEQ ID NO: 2011287 - RNA, 15 nt, Human
aggguaaggcugugg

SEQ ID NO: 2011288 - RNA, 21 nt, Human
agggguuuucuugauaauuuu

SEQ ID NO: 2011289 - RNA, 14 nt, Human
agggucucacucug

SEQ ID NO: 2011290 - RNA, 15 nt, Human
agggucucacucugu

SEQ ID NO: 2011291 - RNA, 16 nt, Human
agggucucacucuguc

SEQ ID NO: 2011292 - RNA, 18 nt, Human
aggggugggacacccugu

SEQ ID NO: 2011293 - RNA, 20 nt, Human
aggggguggccucccaacuc

SEQ ID NO: 2011294 - RNA, 16 nt, Human
agggguaccacugaau

SEQ ID NO: 2011295 - RNA, 19 nt, Human
agggguaccacugaaucug

SEQ ID NO: 2011296 - RNA, 14 nt, Human
uggggagggauuug

SEQ ID NO: 2011297 - RNA, 12 nt, Human
uggggaggacaa

SEQ ID NO: 2011298 - RNA, 17 nt, Human
uggggaccucaggccug

SEQ ID NO: 2011299 - RNA, 16 nt, Human
uggggaccucaggccu

SEQ ID NO: 2011300 - RNA, 15 nt, Human
uggggaccucaggcc

SEQ ID NO: 2011301 - RNA, 14 nt, Human
uggggaccucaggc

SEQ ID NO: 2011302 - RNA, 17 nt, Human
agggcucugacaaagcu

SEQ ID NO: 2011303 - RNA, 15 nt, Human
agggcuccagacaca

SEQ ID NO: 2011304 - RNA, 12 nt, Human
agggcuccagac

SEQ ID NO: 2011305 - RNA, 15 nt, Human
uggggcucagagugg

SEQ ID NO: 2011306 - RNA, 23 nt, Human
uggggcugcaccggcuggccugg

SEQ ID NO: 2011307 - RNA, 22 nt, Human
uggggcugcaccggcuggccug

SEQ ID NO: 2011308 - RNA, 15 nt, Human
uggggcucccgccuc

SEQ ID NO: 2011309 - RNA, 16 nt, Human
uggggcucccgccucc

SEQ ID NO: 2011310 - RNA, 23 nt, Human
uggggcucccgccuccaaccccu

SEQ ID NO: 2011311 - RNA, 22 nt, Human
uggggagggauuuggggcucag

SEQ ID NO: 2011312 - RNA, 21 nt, Human
uggggccaguuggucccccuu

SEQ ID NO: 2011313 - RNA, 20 nt, Human
uggggccauugcuuaccuug

SEQ ID NO: 2011314 - RNA, 12 nt, Human
uggggcccugcc

SEQ ID NO: 2011315 - RNA, 13 nt, Human
aggggaauguuug

SEQ ID NO: 2011316 - RNA, 21 nt, Human
aggggaauaaacuguugaguc

SEQ ID NO: 2011317 - RNA, 14 nt, Human
aggggaaccugcca

SEQ ID NO: 2011318 - RNA, 15 nt, Human
aggggaaccugccau

SEQ ID NO: 2011319 - RNA, 16 nt, Human
aggggaagaauaauuu

SEQ ID NO: 2011320 - RNA, 22 nt, Human
aggggaaaaucagccugcucca

SEQ ID NO: 2011321 - RNA, 18 nt, Human
aggggaaaaucagccugc

SEQ ID NO: 2011322 - RNA, 14 nt, Human
aggggaacagacug

SEQ ID NO: 2011323 - RNA, 13 nt, Human
aggggaaccugcc

SEQ ID NO: 2011324 - RNA, 19 nt, Human
uggggucuccucaggacca

SEQ ID NO: 2011325 - RNA, 22 nt, Human
uggggucuccucaggaccaggg

SEQ ID NO: 2011326 - RNA, 17 nt, Human
uggggucucucacagac

SEQ ID NO: 2011327 - RNA, 21 nt, Human
uggggucucucacagacagga

SEQ ID NO: 2011328 - RNA, 13 nt, Human
aggggaaaagagg

SEQ ID NO: 2011329 - RNA, 23 nt, Human
agggcuuuaaaauucucuuccaa

SEQ ID NO: 2011330 - RNA, 18 nt, Human
agggcuuuccugugccag

SEQ ID NO: 2011331 - RNA, 13 nt, Human
agggcuuuucaaa

SEQ ID NO: 2011332 - RNA, 14 nt, Human
agggcuuuucaaaa

SEQ ID NO: 2011333 - RNA, 19 nt, Human
agggcuuuaaaauucucuu

SEQ ID NO: 2011334 - RNA, 20 nt, Human
agggcuuuaaaauucucuuc

SEQ ID NO: 2011335 - RNA, 17 nt, Human
ugggguacccacugcuc

SEQ ID NO: 2011336 - RNA, 18 nt, Human
ugggguacccacugcucu

SEQ ID NO: 2011337 - RNA, 14 nt, Human
uggggucacucugg

SEQ ID NO: 2011338 - RNA, 13 nt, Human
uggggucacucug

SEQ ID NO: 2011339 - RNA, 19 nt, Human
ugggguacccacugcucug

SEQ ID NO: 2011340 - RNA, 22 nt, Human
uggggucacucuggcagcucag

SEQ ID NO: 2011341 - RNA, 19 nt, Human
uggggucaggccgggcaga

SEQ ID NO: 2011342 - RNA, 16 nt, Human
uggggucacucuggca

SEQ ID NO: 2011343 - RNA, 14 nt, Human
uggggcugcuguga

SEQ ID NO: 2011344 - RNA, 22 nt, Human
uggggucagguugacaggaggu

SEQ ID NO: 2011345 - RNA, 20 nt, Human
uggggucaggccgggcagag

SEQ ID NO: 2011346 - RNA, 22 nt, Human
uggggucaggccgggcagagca

SEQ ID NO: 2011347 - RNA, 18 nt, Human
ugggcacugcucucaccu

SEQ ID NO: 2011348 - RNA, 20 nt, Human
ugggaggccaaggugggagg

SEQ ID NO: 2011349 - RNA, 19 nt, Human
ugggaggccaaggugggag

SEQ ID NO: 2011350 - RNA, 22 nt, Human
ugggaggaucucuugagccugg

SEQ ID NO: 2011351 - RNA, 21 nt, Human
ugggaggaucucuugagccug

SEQ ID NO: 2011352 - RNA, 20 nt, Human
ugggaggaucucuugagccu

SEQ ID NO: 2011353 - RNA, 13 nt, Human
ugggcagagcaga

SEQ ID NO: 2011354 - RNA, 18 nt, Human
ugggccaggagccuccug

SEQ ID NO: 2011355 - RNA, 12 nt, Human
ugggcagagcag

SEQ ID NO: 2011356 - RNA, 11 nt, Human
ugggcagagca

SEQ ID NO: 2011357 - RNA, 12 nt, Human
ugggcagaagga

SEQ ID NO: 2011358 - RNA, 21 nt, Human
ugggcccccaaauggaaaugg

SEQ ID NO: 2011359 - RNA, 16 nt, Human
ugggcccccaaaugga

SEQ ID NO: 2011360 - RNA, 22 nt, Human
ugggccccaguuguauuuauuu

SEQ ID NO: 2011361 - RNA, 18 nt, Human
ugggccccaguuguauuu

SEQ ID NO: 2011362 - RNA, 14 nt, Human
agggaggcccagcg

SEQ ID NO: 2011363 - RNA, 13 nt, Human
agggagggcucca

SEQ ID NO: 2011364 - RNA, 15 nt, Human
agggagggagggcuc

SEQ ID NO: 2011365 - RNA, 19 nt, Human
ugggccccugccucucugc

SEQ ID NO: 2011366 - RNA, 15 nt, Human
ugggccccugccucu

SEQ ID NO: 2011367 - RNA, 15 nt, Human
ugggccccugccaga

SEQ ID NO: 2011368 - RNA, 20 nt, Human
ugggccccugccucucugca

SEQ ID NO: 2011369 - RNA, 17 nt, Human
agggccagaaguagcuu

SEQ ID NO: 2011370 - RNA, 21 nt, Human
agggccauugaacucugagag

SEQ ID NO: 2011371 - RNA, 19 nt, Human
agggcucagcggggacagc

SEQ ID NO: 2011372 - RNA, 20 nt, Human
agggcucagcggggacagcu

SEQ ID NO: 2011373 - RNA, 22 nt, Human
agggcucagcggggacagcucc

SEQ ID NO: 2011374 - RNA, 23 nt, Human
agggcucagcggggacagcuccu

SEQ ID NO: 2011375 - RNA, 16 nt, Human
agggcccgggaagcaa

SEQ ID NO: 2011376 - RNA, 15 nt, Human
agggagggcuccaga

SEQ ID NO: 2011377 - RNA, 14 nt, Human
agggagggcuccag

SEQ ID NO: 2011378 - RNA, 16 nt, Human
agggagggcuccagac

SEQ ID NO: 2011379 - RNA, 19 nt, Human
agggcacagggccuggccc

SEQ ID NO: 2011380 - RNA, 20 nt, Human
agggcacagggccuggccca

SEQ ID NO: 2011381 - RNA, 16 nt, Human
agggcacugguggccc

SEQ ID NO: 2011382 - RNA, 14 nt, Human
agggcacugguggc

SEQ ID NO: 2011383 - RNA, 18 nt, Human
agggcaggaccagcccac

SEQ ID NO: 2011384 - RNA, 19 nt, Human
agggcaggaccagcccacg

SEQ ID NO: 2011385 - RNA, 13 nt, Human
agggcaggaccag

SEQ ID NO: 2011386 - RNA, 14 nt, Human
agggcaggaccagc

SEQ ID NO: 2011387 - RNA, 16 nt, Human
agggcaggaccagccc

SEQ ID NO: 2011388 - RNA, 17 nt, Human
agggcaggaccagccca

SEQ ID NO: 2011389 - RNA, 12 nt, Human
agggcaggacca

SEQ ID NO: 2011390 - RNA, 12 nt, Human
agggcaugaaau

SEQ ID NO: 2011391 - RNA, 13 nt, Human
agggcaugaaaug

SEQ ID NO: 2011392 - RNA, 14 nt, Human
agggcaugaaauga

SEQ ID NO: 2011393 - RNA, 15 nt, Human
agggaauagaaaugu

SEQ ID NO: 2011394 - RNA, 20 nt, Human
agggaaguugcuggaaagag

SEQ ID NO: 2011395 - RNA, 23 nt, Human
agggaaguugcuggaaagagcau

SEQ ID NO: 2011396 - RNA, 13 nt, Human
agggacaaaacuu

SEQ ID NO: 2011397 - RNA, 21 nt, Human
agggaauuucuucaacucccu

SEQ ID NO: 2011398 - RNA, 22 nt, Human
agggaaggauacaaaagcaugu

SEQ ID NO: 2011399 - RNA, 12 nt, Human
agggaaggccug

SEQ ID NO: 2011400 - RNA, 13 nt, Human
agggaaggggaca

SEQ ID NO: 2011401 - RNA, 22 nt, Human
agggaaggggacaaggacuagg

SEQ ID NO: 2011402 - RNA, 19 nt, Human
agggaaggggggucagaag

SEQ ID NO: 2011403 - RNA, 16 nt, Human
agggaaggccugacuu

SEQ ID NO: 2011404 - RNA, 13 nt, Human
agggaaggccuga

SEQ ID NO: 2011405 - RNA, 14 nt, Human
agggaaggccugac

SEQ ID NO: 2011406 - RNA, 21 nt, Human
aggcccggcuccaggcuccuu

SEQ ID NO: 2011407 - RNA, 18 nt, Human
aggcccggcuccaggcuc

SEQ ID NO: 2011408 - RNA, 20 nt, Human
aggcccggcuccaggcuccu

SEQ ID NO: 2011409 - RNA, 22 nt, Human
aggcccuaucuguuuacagugu

SEQ ID NO: 2011410 - RNA, 19 nt, Human
aggcccuccucccucccag

SEQ ID NO: 2011411 - RNA, 22 nt, Human
aggcccuccucccucccagcuc

SEQ ID NO: 2011412 - RNA, 13 nt, Human
agggaaauuucag

SEQ ID NO: 2011413 - RNA, 16 nt, Human
agggaacuaggaaggc

SEQ ID NO: 2011414 - RNA, 19 nt, Human
agggaagaauaaagagcug

SEQ ID NO: 2011415 - RNA, 21 nt, Human
agggaacaaguugagcuauga

SEQ ID NO: 2011416 - RNA, 23 nt, Human
aggcccuccucccucccagcucc

SEQ ID NO: 2011417 - RNA, 20 nt, Human
agggaacaaguugagcuaug

SEQ ID NO: 2011418 - RNA, 17 nt, Human
agggaagauaaguugga

SEQ ID NO: 2011419 - RNA, 18 nt, Human
agggaagauaaguuggaa

SEQ ID NO: 2011420 - RNA, 19 nt, Human
agggaagauaaguuggaaa

SEQ ID NO: 2011421 - RNA, 20 nt, Human
agggaagauaaguuggaaac

SEQ ID NO: 2011422 - RNA, 21 nt, Human
agggaagauaaguuggaaaca

SEQ ID NO: 2011423 - RNA, 16 nt, Human
agggaagcuggccuga

SEQ ID NO: 2011424 - RNA, 17 nt, Human
agggaagcuggccugag

SEQ ID NO: 2011425 - RNA, 23 nt, Human
agggaagcuggccugagagggga

SEQ ID NO: 2011426 - RNA, 23 nt, Human
agggaggacgcucucuggccuuc

SEQ ID NO: 2011427 - RNA, 21 nt, Human
agggaggacgcucucuggccu

SEQ ID NO: 2011428 - RNA, 22 nt, Human
agggaggacgcucucuggccuu

SEQ ID NO: 2011429 - RNA, 14 nt, Human
ugggacuacaggca

SEQ ID NO: 2011430 - RNA, 15 nt, Human
ugggacuacaggcac

SEQ ID NO: 2011431 - RNA, 16 nt, Human
ugggacuacaggcacc

SEQ ID NO: 2011432 - RNA, 15 nt, Human
agggagcuggcucca

SEQ ID NO: 2011433 - RNA, 16 nt, Human
agggagcuggcuccag

SEQ ID NO: 2011434 - RNA, 19 nt, Human
agggagcuggcuccagccu

SEQ ID NO: 2011435 - RNA, 20 nt, Human
agggagcuggcuccagccug

SEQ ID NO: 2011436 - RNA, 21 nt, Human
agggagcuggcuccagccugg

SEQ ID NO: 2011437 - RNA, 22 nt, Human
agggagcuggcuccagccugga

SEQ ID NO: 2011438 - RNA, 19 nt, Human
agggaggaaaguuucuuug

SEQ ID NO: 2011439 - RNA, 21 nt, Human
agggagcacaacccccagcuc

SEQ ID NO: 2011440 - RNA, 22 nt, Human
agggagcacaacccccagcucc

SEQ ID NO: 2011441 - RNA, 23 nt, Human
agggagcacaacccccagcuccc

SEQ ID NO: 2011442 - RNA, 12 nt, Human
agggagaggccg

SEQ ID NO: 2011443 - RNA, 19 nt, Human
ugggagaaugucaguaugu

SEQ ID NO: 2011444 - RNA, 20 nt, Human
ugggagaaugucaguaugug

SEQ ID NO: 2011445 - RNA, 22 nt, Human
ugggagaaugucaguaugugga

SEQ ID NO: 2011446 - RNA, 16 nt, Human
ugggagaagggcagag

SEQ ID NO: 2011447 - RNA, 17 nt, Human
ugggagaagggcagagu

SEQ ID NO: 2011448 - RNA, 22 nt, Human
ugggagaaccaaaaagaggcua

SEQ ID NO: 2011449 - RNA, 20 nt, Human
ugggacucaaugcacugaca

SEQ ID NO: 2011450 - RNA, 16 nt, Human
ugggagagccuuccag

SEQ ID NO: 2011451 - RNA, 18 nt, Human
ugggaggaucucuugagc

SEQ ID NO: 2011452 - RNA, 18 nt, Human
ugggagacugcugaguca

SEQ ID NO: 2011453 - RNA, 21 nt, Human
ugggagagaagagaaugcaca

SEQ ID NO: 2011454 - RNA, 19 nt, Human
ugggagagaagagaaugca

SEQ ID NO: 2011455 - RNA, 12 nt, Human
aguaccauuuaa

SEQ ID NO: 2011456 - RNA, 23 nt, Human
aguaccauuuaauggggaggaca

SEQ ID NO: 2011457 - RNA, 12 nt, Human
aguacccugguu

SEQ ID NO: 2011458 - RNA, 18 nt, Human
aguacccugguugugugu

SEQ ID NO: 2011459 - RNA, 19 nt, Human
aguacccugguuguguguc

SEQ ID NO: 2011460 - RNA, 20 nt, Human
aguagaagucuuagauguau

SEQ ID NO: 2011461 - RNA, 19 nt, Human
aguagaagucuuagaugua

SEQ ID NO: 2011462 - RNA, 21 nt, Human
aguagaagucuuagauguaua

SEQ ID NO: 2011463 - RNA, 13 nt, Human
aguagaauguagu

SEQ ID NO: 2011464 - RNA, 13 nt, Human
aguacauucucag

SEQ ID NO: 2011465 - RNA, 16 nt, Human
aguacauucucaguuu

SEQ ID NO: 2011466 - RNA, 17 nt, Human
aguacauucucaguuuu

SEQ ID NO: 2011467 - RNA, 20 nt, Human
aguacauucucaguuuuucu

SEQ ID NO: 2011468 - RNA, 16 nt, Human
aguacagguacuuugu

SEQ ID NO: 2011469 - RNA, 17 nt, Human
aguacagguacuuuguc

SEQ ID NO: 2011470 - RNA, 20 nt, Human
aguacagguacuuugucuaa

SEQ ID NO: 2011471 - RNA, 14 nt, Human
aguaauauaauaca

SEQ ID NO: 2011472 - RNA, 20 nt, Human
aguaauauaauacacaaaau

SEQ ID NO: 2011473 - RNA, 16 nt, Human
aguaauauauuuaaag

SEQ ID NO: 2011474 - RNA, 17 nt, Human
aguaauauauuuaaagg

SEQ ID NO: 2011475 - RNA, 21 nt, Human
aguaauauauuuaaagggaaa

SEQ ID NO: 2011476 - RNA, 19 nt, Human
aguagcgguaccaaugcag

SEQ ID NO: 2011477 - RNA, 19 nt, Human
aguagacuugcuuugguca

SEQ ID NO: 2011478 - RNA, 15 nt, Human
aguagacuacuguuc

SEQ ID NO: 2011479 - RNA, 14 nt, Human
aguagacuccaaca

SEQ ID NO: 2011480 - RNA, 11 nt, Human
aguagagacag

SEQ ID NO: 2011481 - RNA, 20 nt, Human
uguaggcauaaagucagggg

SEQ ID NO: 2011482 - RNA, 17 nt, Human
uguaggcauaaagucag

SEQ ID NO: 2011483 - RNA, 20 nt, Human
uguacuuugauucacauguu

SEQ ID NO: 2011484 - RNA, 19 nt, Human
uguacuuucuguuaaaaug

SEQ ID NO: 2011485 - RNA, 17 nt, Human
uguacuuugauucacau

SEQ ID NO: 2011486 - RNA, 18 nt, Human
uguacuuugauucacaug

SEQ ID NO: 2011487 - RNA, 19 nt, Human
uguacuuugauucacaugu

SEQ ID NO: 2011488 - RNA, 12 nt, Human
uguacuuucugu

SEQ ID NO: 2011489 - RNA, 13 nt, Human
uguacuuucuguu

SEQ ID NO: 2011490 - RNA, 15 nt, Human
uguacuuucuguuaa

SEQ ID NO: 2011491 - RNA, 19 nt, Human
uguacuugcucuugaugcc

SEQ ID NO: 2011492 - RNA, 23 nt, Human
uguacuugcucuugaugccuggc

SEQ ID NO: 2011493 - RNA, 22 nt, Human
uguacuugcucuugaugccugg

SEQ ID NO: 2011494 - RNA, 16 nt, Human
uguagaggagaaacug

SEQ ID NO: 2011495 - RNA, 23 nt, Human
agguuuguuuagaagaagugugu

SEQ ID NO: 2011496 - RNA, 14 nt, Human
uguagagcuucugg

SEQ ID NO: 2011497 - RNA, 18 nt, Human
agguuuuaaaagccuugg

SEQ ID NO: 2011498 - RNA, 16 nt, Human
uguagagccagggucu

SEQ ID NO: 2011499 - RNA, 18 nt, Human
uguagagccagggucuca

SEQ ID NO: 2011500 - RNA, 17 nt, Human
aguaaaauacucuuuuu

SEQ ID NO: 2011501 - RNA, 14 nt, Human
aguaauaugcacac

SEQ ID NO: 2011502 - RNA, 15 nt, Human
aguaauaugcacaca

SEQ ID NO: 2011503 - RNA, 23 nt, Human
agguuuuugauagcauuguaagc

SEQ ID NO: 2011504 - RNA, 13 nt, Human
agguuuuuguaaa

SEQ ID NO: 2011505 - RNA, 15 nt, Human
agguuuuuguaaaga

SEQ ID NO: 2011506 - RNA, 22 nt, Human
agguuuuuguaaagauuucugu

SEQ ID NO: 2011507 - RNA, 23 nt, Human
aguaaaagaagaaauaguucugu

SEQ ID NO: 2011508 - RNA, 16 nt, Human
agguuuuuguaaagau

SEQ ID NO: 2011509 - RNA, 17 nt, Human
agguuuuuguaaagauu

SEQ ID NO: 2011510 - RNA, 13 nt, Human
aguaaaauccaca

SEQ ID NO: 2011511 - RNA, 23 nt, Human
agucacacaguauuacuucugcu

SEQ ID NO: 2011512 - RNA, 19 nt, Human
agucaccccggccaccugc

SEQ ID NO: 2011513 - RNA, 15 nt, Human
agucacacagugagu

SEQ ID NO: 2011514 - RNA, 23 nt, Human
agucacacagugagucgaggaca

SEQ ID NO: 2011515 - RNA, 15 nt, Human
ugucaauuacaggaa

SEQ ID NO: 2011516 - RNA, 14 nt, Human
ugucaauuacagga

SEQ ID NO: 2011517 - RNA, 17 nt, Human
ugucaaguggcaaagcu

SEQ ID NO: 2011518 - RNA, 18 nt, Human
ugucaaguggcaaagcug

SEQ ID NO: 2011519 - RNA, 17 nt, Human
ugucaagugucaguaag

SEQ ID NO: 2011520 - RNA, 17 nt, Human
ugucaauuacaggaagu

SEQ ID NO: 2011521 - RNA, 19 nt, Human
ugucaauuacaggaaguac

SEQ ID NO: 2011522 - RNA, 20 nt, Human
aguaggucguuuuaaaaaca

SEQ ID NO: 2011523 - RNA, 15 nt, Human
aguaugguggcuggg

SEQ ID NO: 2011524 - RNA, 16 nt, Human
aguaugguggcugggu

SEQ ID NO: 2011525 - RNA, 20 nt, Human
aguaguaaaagaagaaauag

SEQ ID NO: 2011526 - RNA, 15 nt, Human
aguauuacuucugcu

SEQ ID NO: 2011527 - RNA, 17 nt, Human
aguaugguggcuggguu

SEQ ID NO: 2011528 - RNA, 18 nt, Human
aguauuacuucugcuaca

SEQ ID NO: 2011529 - RNA, 20 nt, Human
ugucaaacauuaguacuuua

SEQ ID NO: 2011530 - RNA, 12 nt, Human
ugucaaacauua

SEQ ID NO: 2011531 - RNA, 22 nt, Human
ugucaaaaguagaacuuuguau

SEQ ID NO: 2011532 - RNA, 12 nt, Human
ugucaaaaguag

SEQ ID NO: 2011533 - RNA, 17 nt, Human
ugucaaaaguagaacuu

SEQ ID NO: 2011534 - RNA, 20 nt, Human
ugucaaaaguagaacuuugu

SEQ ID NO: 2011535 - RNA, 21 nt, Human
ugucaaaaguagaacuuugua

SEQ ID NO: 2011536 - RNA, 19 nt, Human
uguauucucuccuguaccu

SEQ ID NO: 2011537 - RNA, 20 nt, Human
uguauucucuccuguaccuc

SEQ ID NO: 2011538 - RNA, 16 nt, Human
ugucaaaaaucaauau

SEQ ID NO: 2011539 - RNA, 18 nt, Human
uguauguuuuucaguuca

SEQ ID NO: 2011540 - RNA, 20 nt, Human
uguauguuuuucaguucaaa

SEQ ID NO: 2011541 - RNA, 21 nt, Human
uguauguuuuucaguucaaag

SEQ ID NO: 2011542 - RNA, 22 nt, Human
uguauguuuuucaguucaaagu

SEQ ID NO: 2011543 - RNA, 17 nt, Human
uguauucccauaucaaa

SEQ ID NO: 2011544 - RNA, 22 nt, Human
uguauuacaaauccaaugaaau

SEQ ID NO: 2011545 - RNA, 13 nt, Human
uguauguuuuuca

SEQ ID NO: 2011546 - RNA, 15 nt, Human
uguauguuuuucagu

SEQ ID NO: 2011547 - RNA, 16 nt, Human
uguauguuuuucaguu

SEQ ID NO: 2011548 - RNA, 13 nt, Human
uguauuacaaauc

SEQ ID NO: 2011549 - RNA, 16 nt, Human
uguaguguucagaaaa

SEQ ID NO: 2011550 - RNA, 18 nt, Human
uguaguguucagaaaaaa

SEQ ID NO: 2011551 - RNA, 17 nt, Human
uguaucaaugaguaaca

SEQ ID NO: 2011552 - RNA, 23 nt, Human
uguaucaaauacauuuaaaacau

SEQ ID NO: 2011553 - RNA, 14 nt, Human
uguaucaaauacau

SEQ ID NO: 2011554 - RNA, 21 nt, Human
uguaucaaauacauuuaaaac

SEQ ID NO: 2011555 - RNA, 13 nt, Human
uguauguauaauu

SEQ ID NO: 2011556 - RNA, 15 nt, Human
uguauguauaauuca

SEQ ID NO: 2011557 - RNA, 20 nt, Human
uguaugugggggucugugug

SEQ ID NO: 2011558 - RNA, 11 nt, Human
uguauguguuu

SEQ ID NO: 2011559 - RNA, 12 nt, Human
uguauguguuua

SEQ ID NO: 2011560 - RNA, 14 nt, Human
uguauguguuuaga

SEQ ID NO: 2011561 - RNA, 15 nt, Human
uguauguguuuagaa

SEQ ID NO: 2011562 - RNA, 16 nt, Human
uguauguguuuagaau

SEQ ID NO: 2011563 - RNA, 19 nt, Human
uguauguguuuagaauuga

SEQ ID NO: 2011564 - RNA, 20 nt, Human
uguauguguuuagaauugaa

SEQ ID NO: 2011565 - RNA, 12 nt, Human
uguauguggggg

SEQ ID NO: 2011566 - RNA, 16 nt, Human
aggugagaagcagagg

SEQ ID NO: 2011567 - RNA, 23 nt, Human
aggugagaagcagaggaaggaga

SEQ ID NO: 2011568 - RNA, 21 nt, Human
aggugagaagcagaggaagga

SEQ ID NO: 2011569 - RNA, 22 nt, Human
aggugagcaagcccaggagaau

SEQ ID NO: 2011570 - RNA, 22 nt, Human
aggugacagagugagacucugu

SEQ ID NO: 2011571 - RNA, 23 nt, Human
aggugaaggaggcuccaggcagc

SEQ ID NO: 2011572 - RNA, 13 nt, Human
aggugaccccagg

SEQ ID NO: 2011573 - RNA, 18 nt, Human
aggucuugaacuccuggc

SEQ ID NO: 2011574 - RNA, 17 nt, Human
aggucuugaacuccugg

SEQ ID NO: 2011575 - RNA, 13 nt, Human
aggugacagagug

SEQ ID NO: 2011576 - RNA, 15 nt, Human
aggugacagagugag

SEQ ID NO: 2011577 - RNA, 19 nt, Human
agguccacaacacacagau

SEQ ID NO: 2011578 - RNA, 15 nt, Human
aggucagcucagagc

SEQ ID NO: 2011579 - RNA, 15 nt, Human
uggucacuucuucug

SEQ ID NO: 2011580 - RNA, 16 nt, Human
uggucacuucuucugu

SEQ ID NO: 2011581 - RNA, 16 nt, Human
aggucuugaacuccug

SEQ ID NO: 2011582 - RNA, 15 nt, Human
uggucagauuugaac

SEQ ID NO: 2011583 - RNA, 16 nt, Human
uggucagauuugaacu

SEQ ID NO: 2011584 - RNA, 13 nt, Human
aggucagagccug

SEQ ID NO: 2011585 - RNA, 14 nt, Human
aggucagagccugc

SEQ ID NO: 2011586 - RNA, 15 nt, Human
aggucagagccugca

SEQ ID NO: 2011587 - RNA, 17 nt, Human
aggucagagccugcagu

SEQ ID NO: 2011588 - RNA, 18 nt, Human
aggucagagccugcaguu

SEQ ID NO: 2011589 - RNA, 23 nt, Human
uggugugaccacugcagaagaca

SEQ ID NO: 2011590 - RNA, 20 nt, Human
ugguuaggcauugugggaag

SEQ ID NO: 2011591 - RNA, 18 nt, Human
ugguuaggcauuguggga

SEQ ID NO: 2011592 - RNA, 14 nt, Human
ugguggcagcugcg

SEQ ID NO: 2011593 - RNA, 13 nt, Human
ugguggcagcugc

SEQ ID NO: 2011594 - RNA, 15 nt, Human
ugguggcagcugcgg

SEQ ID NO: 2011595 - RNA, 12 nt, Human
ugguggcagugg

SEQ ID NO: 2011596 - RNA, 21 nt, Human
ugguggagaggcccggccucu

SEQ ID NO: 2011597 - RNA, 18 nt, Human
uggugcuuuccuguuucu

SEQ ID NO: 2011598 - RNA, 16 nt, Human
uggugcgaucuggguu

SEQ ID NO: 2011599 - RNA, 17 nt, Human
uggugcgaucuggguuc

SEQ ID NO: 2011600 - RNA, 13 nt, Human
uggugcugccaca

SEQ ID NO: 2011601 - RNA, 18 nt, Human
uggugcugccacacuuca

SEQ ID NO: 2011602 - RNA, 15 nt, Human
aggugauaaaaucau

SEQ ID NO: 2011603 - RNA, 14 nt, Human
aggugauaaaauca

SEQ ID NO: 2011604 - RNA, 18 nt, Human
aggugccucaagagaagg

SEQ ID NO: 2011605 - RNA, 15 nt, Human
aggugggauccucca

SEQ ID NO: 2011606 - RNA, 17 nt, Human
aggugggauccuccagg

SEQ ID NO: 2011607 - RNA, 16 nt, Human
aggugggauccuccag

SEQ ID NO: 2011608 - RNA, 18 nt, Human
aggugggauccuccaggu

SEQ ID NO: 2011609 - RNA, 23 nt, Human
agguggggcagcuugaggguugg

SEQ ID NO: 2011610 - RNA, 18 nt, Human
aggugcccagaaugaggc

SEQ ID NO: 2011611 - RNA, 22 nt, Human
aggugcccagaaugaggcugcu

SEQ ID NO: 2011612 - RNA, 15 nt, Human
aggugcccgccacca

SEQ ID NO: 2011613 - RNA, 14 nt, Human
aggugauccaccca

SEQ ID NO: 2011614 - RNA, 20 nt, Human
aggugauccacccaccucag

SEQ ID NO: 2011615 - RNA, 20 nt, Human
aggugcauauuuauaaaaau

SEQ ID NO: 2011616 - RNA, 14 nt, Human
agguuuaagcuguu

SEQ ID NO: 2011617 - RNA, 12 nt, Human
agguucucucua

SEQ ID NO: 2011618 - RNA, 20 nt, Human
agguucucucuacugguccu

SEQ ID NO: 2011619 - RNA, 18 nt, Human
agguucugggugcaggag

SEQ ID NO: 2011620 - RNA, 24 nt, Human
agguguggcagaagcuugcagaug

SEQ ID NO: 2011621 - RNA, 15 nt, Human
agguguguugcagug

SEQ ID NO: 2011622 - RNA, 19 nt, Human
agguggggucacucuggca

SEQ ID NO: 2011623 - RNA, 17 nt, Human
aggugugaaccaccaca

SEQ ID NO: 2011624 - RNA, 15 nt, Human
aggugugcucugauc

SEQ ID NO: 2011625 - RNA, 20 nt, Human
aggugugcucugaucaucca

SEQ ID NO: 2011626 - RNA, 15 nt, Human
uguaaauagcucagg

SEQ ID NO: 2011627 - RNA, 16 nt, Human
uguaaauagcucaggu

SEQ ID NO: 2011628 - RNA, 21 nt, Human
uguaaauacuguuuuuaacaa

SEQ ID NO: 2011629 - RNA, 22 nt, Human
uguaaauaauucuuuuuuauua

SEQ ID NO: 2011630 - RNA, 23 nt, Human
uguaaauaauucuuuuuuauuaa

SEQ ID NO: 2011631 - RNA, 17 nt, Human
uguaaauaaaggaacca

SEQ ID NO: 2011632 - RNA, 14 nt, Human
uguaaauaauucuu

SEQ ID NO: 2011633 - RNA, 15 nt, Human
uguaaauaauucuuu

SEQ ID NO: 2011634 - RNA, 19 nt, Human
uguaaauaaagaacuagca

SEQ ID NO: 2011635 - RNA, 16 nt, Human
uguaaaggucacuuuu

SEQ ID NO: 2011636 - RNA, 18 nt, Human
uguaaaggucacuuuuca

SEQ ID NO: 2011637 - RNA, 21 nt, Human
uguaaaggucacuuuucacau

SEQ ID NO: 2011638 - RNA, 18 nt, Human
uguaaagaaaaauauuua

SEQ ID NO: 2011639 - RNA, 16 nt, Human
uguaaaggaauuuaaa

SEQ ID NO: 2011640 - RNA, 12 nt, Human
uguaaacuuuga

SEQ ID NO: 2011641 - RNA, 13 nt, Human
uguaaacuuugaa

SEQ ID NO: 2011642 - RNA, 18 nt, Human
uguaaacuuugaaauaua

SEQ ID NO: 2011643 - RNA, 13 nt, Human
uguaaagaaaaau

SEQ ID NO: 2011644 - RNA, 14 nt, Human
uguaaacuuugaaa

SEQ ID NO: 2011645 - RNA, 15 nt, Human
uguaaacuuugaaau

SEQ ID NO: 2011646 - RNA, 16 nt, Human
uguaaacuuugaaaua

SEQ ID NO: 2011647 - RNA, 17 nt, Human
uguaaacuuugaaauau

SEQ ID NO: 2011648 - RNA, 15 nt, Human
uguaaagaaaaauau

SEQ ID NO: 2011649 - RNA, 16 nt, Human
uguaaagaaaaauauu

SEQ ID NO: 2011650 - RNA, 17 nt, Human
ugguuuucaaaauaaaa

SEQ ID NO: 2011651 - RNA, 15 nt, Human
ugguuuucaaaauaa

SEQ ID NO: 2011652 - RNA, 19 nt, Human
ugguuuucaaccucuagaa

SEQ ID NO: 2011653 - RNA, 17 nt, Human
ugguuugggggagaaga

SEQ ID NO: 2011654 - RNA, 20 nt, Human
ugguuuucaaccucuagaau

SEQ ID NO: 2011655 - RNA, 21 nt, Human
ugguuuucaaccucuagaauu

SEQ ID NO: 2011656 - RNA, 14 nt, Human
ugguuuucaaaaua

SEQ ID NO: 2011657 - RNA, 15 nt, Human
ugguuuguaaauuaa

SEQ ID NO: 2011658 - RNA, 14 nt, Human
ugguuauggagagg

SEQ ID NO: 2011659 - RNA, 18 nt, Human
ugguuauagugcaauaua

SEQ ID NO: 2011660 - RNA, 19 nt, Human
ugguuauagugcaauauau

SEQ ID NO: 2011661 - RNA, 20 nt, Human
ugguuauagugcaauauauu

SEQ ID NO: 2011662 - RNA, 21 nt, Human
ugguuauagugcaauauauuu

SEQ ID NO: 2011663 - RNA, 22 nt, Human
ugguuauagugcaauauauuuu

SEQ ID NO: 2011664 - RNA, 12 nt, Human
ugguuaugaacu

SEQ ID NO: 2011665 - RNA, 13 nt, Human
ugguuagaaaaca

SEQ ID NO: 2011666 - RNA, 14 nt, Human
ugguuauagugcaa

SEQ ID NO: 2011667 - RNA, 14 nt, Human
ugguuuccugcccu

SEQ ID NO: 2011668 - RNA, 15 nt, Human
ugguuuccugcccug

SEQ ID NO: 2011669 - RNA, 20 nt, Human
ugguuuccugcccugggagg

SEQ ID NO: 2011670 - RNA, 12 nt, Human
ugguuuccugcc

SEQ ID NO: 2011671 - RNA, 13 nt, Human
ugguuuccugccc

SEQ ID NO: 2011672 - RNA, 17 nt, Human
ugguuaugaauacuuug

SEQ ID NO: 2011673 - RNA, 20 nt, Human
agcuugcccuggugccucac

SEQ ID NO: 2011674 - RNA, 14 nt, Human
agcuugcacauuug

SEQ ID NO: 2011675 - RNA, 15 nt, Human
agcuugcacauuugg

SEQ ID NO: 2011676 - RNA, 23 nt, Human
agcuugaccgugaggccagagac

SEQ ID NO: 2011677 - RNA, 22 nt, Human
agcuugaggguugggcuggugu

SEQ ID NO: 2011678 - RNA, 22 nt, Human
agcuugaccgugaggccagaga

SEQ ID NO: 2011679 - RNA, 20 nt, Human
agcuugaccgugaggccaga

SEQ ID NO: 2011680 - RNA, 19 nt, Human
agcuuaagggucauauguu

SEQ ID NO: 2011681 - RNA, 20 nt, Human
agcuuaagggucauauguuu

SEQ ID NO: 2011682 - RNA, 22 nt, Human
agcuuugagguggaagagggcu

SEQ ID NO: 2011683 - RNA, 22 nt, Human
agcuuuccccaugucucgacuc

SEQ ID NO: 2011684 - RNA, 20 nt, Human
agcuuuggcuaugagggccu

SEQ ID NO: 2011685 - RNA, 21 nt, Human
agcuuuggcuaugagggccuu

SEQ ID NO: 2011686 - RNA, 12 nt, Human
aggaaaagaaau

SEQ ID NO: 2011687 - RNA, 14 nt, Human
aggaaaagaaaucu

SEQ ID NO: 2011688 - RNA, 15 nt, Human
aggaaaagaaaucua

SEQ ID NO: 2011689 - RNA, 16 nt, Human
aggaaaagaaaucuau

SEQ ID NO: 2011690 - RNA, 17 nt, Human
aggaaaagaaaucuaua

SEQ ID NO: 2011691 - RNA, 20 nt, Human
aggaaaagcggacaucagcu

SEQ ID NO: 2011692 - RNA, 14 nt, Human
aggaaaagcugcug

SEQ ID NO: 2011693 - RNA, 18 nt, Human
ugcuacagaaaagaaacu

SEQ ID NO: 2011694 - RNA, 11 nt, Human
ugcuacacacu

SEQ ID NO: 2011695 - RNA, 20 nt, Human
ugcuaauuuugaaaaacugc

SEQ ID NO: 2011696 - RNA, 19 nt, Human
ugcuaauuuugaaaaacug

SEQ ID NO: 2011697 - RNA, 18 nt, Human
ugcuaauuuugaaaaacu

SEQ ID NO: 2011698 - RNA, 16 nt, Human
ugcuaauuuugaaaaa

SEQ ID NO: 2011699 - RNA, 13 nt, Human
agcuuaacagugu

SEQ ID NO: 2011700 - RNA, 14 nt, Human
agcuuaagaaaaaa

SEQ ID NO: 2011701 - RNA, 16 nt, Human
agcuuaagggucauau

SEQ ID NO: 2011702 - RNA, 19 nt, Human
agcuguugucucuucuccu

SEQ ID NO: 2011703 - RNA, 20 nt, Human
agcuguugucucuucuccuu

SEQ ID NO: 2011704 - RNA, 21 nt, Human
agcuguugucucuucuccuua

SEQ ID NO: 2011705 - RNA, 16 nt, Human
agcuguugucucuucu

SEQ ID NO: 2011706 - RNA, 17 nt, Human
agcuguugucucuucuc

SEQ ID NO: 2011707 - RNA, 18 nt, Human
ugcuaccacggccuccuu

SEQ ID NO: 2011708 - RNA, 20 nt, Human
ugcuaccacggccuccuuuc

SEQ ID NO: 2011709 - RNA, 21 nt, Human
ugcuaccacggccuccuuucc

SEQ ID NO: 2011710 - RNA, 16 nt, Human
ugccuuggugugcugu

SEQ ID NO: 2011711 - RNA, 14 nt, Human
ugcgguccacccag

SEQ ID NO: 2011712 - RNA, 15 nt, Human
ugcgguccacccagg

SEQ ID NO: 2011713 - RNA, 23 nt, Human
ugcuaaucuugugaaaauaauug

SEQ ID NO: 2011714 - RNA, 12 nt, Human
ugcuaauucuuu

SEQ ID NO: 2011715 - RNA, 18 nt, Human
ugcuaaucuugugaaaau

SEQ ID NO: 2011716 - RNA, 19 nt, Human
ugcuaaucuugugaaaaua

SEQ ID NO: 2011717 - RNA, 21 nt, Human
ugcuaaucuugugaaaauaau

SEQ ID NO: 2011718 - RNA, 13 nt, Human
ugcuaauucuuug

SEQ ID NO: 2011719 - RNA, 14 nt, Human
ugcuaauucuuugc

SEQ ID NO: 2011720 - RNA, 15 nt, Human
ugcuaauucuuugca

SEQ ID NO: 2011721 - RNA, 16 nt, Human
ugcuaauucuuugcaa

SEQ ID NO: 2011722 - RNA, 17 nt, Human
ugcuaauucuuugcaaa

SEQ ID NO: 2011723 - RNA, 20 nt, Human
ugcuaauucuuugcaaaaau

SEQ ID NO: 2011724 - RNA, 21 nt, Human
ugcuaauucuuugcaaaaauc

SEQ ID NO: 2011725 - RNA, 22 nt, Human
ugcuaauucuuugcaaaaaucc

SEQ ID NO: 2011726 - RNA, 13 nt, Human
ugcucaaaaugca

SEQ ID NO: 2011727 - RNA, 15 nt, Human
ugcucaaaaugcaaa

SEQ ID NO: 2011728 - RNA, 22 nt, Human
ugcuaugagcuggggaugucuc

SEQ ID NO: 2011729 - RNA, 21 nt, Human
ugcuaugauguuaguuuuccu

SEQ ID NO: 2011730 - RNA, 22 nt, Human
ugcuaugauguuaguuuuccuu

SEQ ID NO: 2011731 - RNA, 19 nt, Human
ugcuaugagcuggggaugu

SEQ ID NO: 2011732 - RNA, 20 nt, Human
ugcuaugagcuggggauguc

SEQ ID NO: 2011733 - RNA, 16 nt, Human
ugcuaugagcugggga

SEQ ID NO: 2011734 - RNA, 18 nt, Human
ugcuaucucccccagccc

SEQ ID NO: 2011735 - RNA, 17 nt, Human
ugcuaucucccccagcc

SEQ ID NO: 2011736 - RNA, 14 nt, Human
ugcuaucuccccca

SEQ ID NO: 2011737 - RNA, 13 nt, Human
ugcuaucuccccc

SEQ ID NO: 2011738 - RNA, 15 nt, Human
aggaaacaacagcuu

SEQ ID NO: 2011739 - RNA, 14 nt, Human
aggaaacaacagcu

SEQ ID NO: 2011740 - RNA, 16 nt, Human
aggaaaagcugcugac

SEQ ID NO: 2011741 - RNA, 21 nt, Human
ugcuccagcuguucagcuggu

SEQ ID NO: 2011742 - RNA, 20 nt, Human
ugcuccagcuguucagcugg

SEQ ID NO: 2011743 - RNA, 17 nt, Human
ugcucugccccagcuug

SEQ ID NO: 2011744 - RNA, 23 nt, Human
ugcucugccccagcuugggcaga

SEQ ID NO: 2011745 - RNA, 23 nt, Human
ugcucugagagcaaacuggcuug

SEQ ID NO: 2011746 - RNA, 12 nt, Human
ugcucugagagc

SEQ ID NO: 2011747 - RNA, 13 nt, Human
ugcugacuuagaa

SEQ ID NO: 2011748 - RNA, 14 nt, Human
ugcugacuuagaau

SEQ ID NO: 2011749 - RNA, 15 nt, Human
ugcugacuuagaauc

SEQ ID NO: 2011750 - RNA, 20 nt, Human
ugcucuugaacuccugaccu

SEQ ID NO: 2011751 - RNA, 22 nt, Human
ugcucuugaacuccugaccuca

SEQ ID NO: 2011752 - RNA, 15 nt, Human
ugcucuugaacuccu

SEQ ID NO: 2011753 - RNA, 14 nt, Human
ugcucugcugacag

SEQ ID NO: 2011754 - RNA, 15 nt, Human
ugcucugcugacaga

SEQ ID NO: 2011755 - RNA, 16 nt, Human
ugcucugcugacagac

SEQ ID NO: 2011756 - RNA, 14 nt, Human
ugcucugcucgccu

SEQ ID NO: 2011757 - RNA, 10 nt, Human
ugcucugcug

SEQ ID NO: 2011758 - RNA, 14 nt, Human
aggaaaguacauuu

SEQ ID NO: 2011759 - RNA, 17 nt, Human
aggaaaguacauuuuuu

SEQ ID NO: 2011760 - RNA, 23 nt, Human
aggaaaggcuccaggagcagcca

SEQ ID NO: 2011761 - RNA, 22 nt, Human
aggaaaguggcaccugucugcu

SEQ ID NO: 2011762 - RNA, 20 nt, Human
aggaaaguuucuuugaaaau

SEQ ID NO: 2011763 - RNA, 15 nt, Human
aggaaggcacuucug

SEQ ID NO: 2011764 - RNA, 16 nt, Human
aggaagcucagggccu

SEQ ID NO: 2011765 - RNA, 15 nt, Human
aggaagcucagggcc

SEQ ID NO: 2011766 - RNA, 14 nt, Human
aggaagcucagggc

SEQ ID NO: 2011767 - RNA, 13 nt, Human
aggaagcucaggg

SEQ ID NO: 2011768 - RNA, 13 nt, Human
aggaagccagcag

SEQ ID NO: 2011769 - RNA, 18 nt, Human
aggaagcagcuuucccca

SEQ ID NO: 2011770 - RNA, 21 nt, Human
ugccugcuuuuuauggccugu

SEQ ID NO: 2011771 - RNA, 20 nt, Human
ugccugcuuuuuauggccug

SEQ ID NO: 2011772 - RNA, 22 nt, Human
ugccugcuuuuuauggccugug

SEQ ID NO: 2011773 - RNA, 24 nt, Human
ugccugcccaggccccugccaccc

SEQ ID NO: 2011774 - RNA, 12 nt, Human
ugccucugccug

SEQ ID NO: 2011775 - RNA, 20 nt, Human
ugccugcccaggccccugcc

SEQ ID NO: 2011776 - RNA, 22 nt, Human
ugccugcccaggccccugccac

SEQ ID NO: 2011777 - RNA, 23 nt, Human
ugccugcccaggccccugccacc

SEQ ID NO: 2011778 - RNA, 14 nt, Human
ugccucagccuccc

SEQ ID NO: 2011779 - RNA, 18 nt, Human
ugccucugccucugacac

SEQ ID NO: 2011780 - RNA, 20 nt, Human
ugccucugccucugacacac

SEQ ID NO: 2011781 - RNA, 17 nt, Human
ugccucugccucugaca

SEQ ID NO: 2011782 - RNA, 19 nt, Human
agcuggccgggagccugau

SEQ ID NO: 2011783 - RNA, 18 nt, Human
agcuggccgggagccuga

SEQ ID NO: 2011784 - RNA, 12 nt, Human
agcuggcuccag

SEQ ID NO: 2011785 - RNA, 15 nt, Human
agcuggcuccagccu

SEQ ID NO: 2011786 - RNA, 16 nt, Human
agcuggccucucacug

SEQ ID NO: 2011787 - RNA, 22 nt, Human
agcuggccucucacugccuccc

SEQ ID NO: 2011788 - RNA, 12 nt, Human
agcuggccugag

SEQ ID NO: 2011789 - RNA, 21 nt, Human
agcuggccugagaggggaagc

SEQ ID NO: 2011790 - RNA, 16 nt, Human
agcugcuugggcuuca

SEQ ID NO: 2011791 - RNA, 20 nt, Human
agcugcuugggcuucauccu

SEQ ID NO: 2011792 - RNA, 12 nt, Human
agcugcugccau

SEQ ID NO: 2011793 - RNA, 13 nt, Human
agcugcugagccg

SEQ ID NO: 2011794 - RNA, 16 nt, Human
agcugcugagccgcag

SEQ ID NO: 2011795 - RNA, 17 nt, Human
agcugcugagccgcaga

SEQ ID NO: 2011796 - RNA, 21 nt, Human
agcugcugagccgcagagaag

SEQ ID NO: 2011797 - RNA, 21 nt, Human
ugccuggauggggcugcaccg

SEQ ID NO: 2011798 - RNA, 20 nt, Human
ugccuggauggggcugcacc

SEQ ID NO: 2011799 - RNA, 17 nt, Human
ugccuggauggggcugc

SEQ ID NO: 2011800 - RNA, 16 nt, Human
ugccuggauggggcug

SEQ ID NO: 2011801 - RNA, 18 nt, Human
agcugccuguucagcucc

SEQ ID NO: 2011802 - RNA, 14 nt, Human
agcugccuguucag

SEQ ID NO: 2011803 - RNA, 16 nt, Human
agcugccuguucagcu

SEQ ID NO: 2011804 - RNA, 18 nt, Human
agcuguuacugucuucag

SEQ ID NO: 2011805 - RNA, 22 nt, Human
agcugugggcaaaagaguguaa

SEQ ID NO: 2011806 - RNA, 23 nt, Human
agcugugggcaaaagaguguaaa

SEQ ID NO: 2011807 - RNA, 20 nt, Human
agcuguguccggcccaguuu

SEQ ID NO: 2011808 - RNA, 17 nt, Human
agcugugcucuggacag

SEQ ID NO: 2011809 - RNA, 18 nt, Human
agcugugcucuggacagg

SEQ ID NO: 2011810 - RNA, 16 nt, Human
agcuggcuccagccug

SEQ ID NO: 2011811 - RNA, 17 nt, Human
agcuggcuccagccugg

SEQ ID NO: 2011812 - RNA, 23 nt, Human
agcugggguggggaccucaggcc

SEQ ID NO: 2011813 - RNA, 22 nt, Human
agcugggguggggaccucaggc

SEQ ID NO: 2011814 - RNA, 20 nt, Human
agcugggacuacaggcaccc

SEQ ID NO: 2011815 - RNA, 23 nt, Human
agcugggacuacaggcacccacc

SEQ ID NO: 2011816 - RNA, 20 nt, Human
agcugggguggggaccucag

SEQ ID NO: 2011817 - RNA, 16 nt, Human
agcugggacuacaggu

SEQ ID NO: 2011818 - RNA, 17 nt, Human
ugccuguugggccagga

SEQ ID NO: 2011819 - RNA, 16 nt, Human
ugccuguugggccagg

SEQ ID NO: 2011820 - RNA, 20 nt, Human
ugccuuacccucauguucuu

SEQ ID NO: 2011821 - RNA, 24 nt, Human
ugccuuaaagacaagacagcauuu

SEQ ID NO: 2011822 - RNA, 15 nt, Human
ugccuuaagugagga

SEQ ID NO: 2011823 - RNA, 16 nt, Human
ugccuuggggacaaga

SEQ ID NO: 2011824 - RNA, 21 nt, Human
ugccuuacccucauguucuua

SEQ ID NO: 2011825 - RNA, 21 nt, Human
ugccuuaagugaggaaaucaa

SEQ ID NO: 2011826 - RNA, 22 nt, Human
ugccuuaagugaggaaaucaaa

SEQ ID NO: 2011827 - RNA, 19 nt, Human
agcuguuacugucuucagu

SEQ ID NO: 2011828 - RNA, 14 nt, Human
ugccuguucccauu

SEQ ID NO: 2011829 - RNA, 19 nt, Human
agcugcagauaaguggccu

SEQ ID NO: 2011830 - RNA, 20 nt, Human
agcugccagccgagauagcc

SEQ ID NO: 2011831 - RNA, 13 nt, Human
agcugcaccccuu

SEQ ID NO: 2011832 - RNA, 15 nt, Human
agcugcaccccuucc

SEQ ID NO: 2011833 - RNA, 19 nt, Human
agcugcaaucgcuuuccua

SEQ ID NO: 2011834 - RNA, 16 nt, Human
agcucuguccugggag

SEQ ID NO: 2011835 - RNA, 21 nt, Human
agcucuguccugggagugagc

SEQ ID NO: 2011836 - RNA, 21 nt, Human
agcugauuuugaggguuuuua

SEQ ID NO: 2011837 - RNA, 23 nt, Human
agcucuguccugggagugagcug

SEQ ID NO: 2011838 - RNA, 16 nt, Human
ugccgagcccuugccc

SEQ ID NO: 2011839 - RNA, 14 nt, Human
ugccgcagcccugc

SEQ ID NO: 2011840 - RNA, 12 nt, Human
ugccgcagcccu

SEQ ID NO: 2011841 - RNA, 12 nt, Human
ugccucagccuc

SEQ ID NO: 2011842 - RNA, 13 nt, Human
ugccucagccucc

SEQ ID NO: 2011843 - RNA, 18 nt, Human
ugcccuuaccugccagga

SEQ ID NO: 2011844 - RNA, 17 nt, Human
agcucugguccauagag

SEQ ID NO: 2011845 - RNA, 14 nt, Human
agcucuguccuggg

SEQ ID NO: 2011846 - RNA, 12 nt, Human
agcucuggucca

SEQ ID NO: 2011847 - RNA, 14 nt, Human
agcuccuuuuccag

SEQ ID NO: 2011848 - RNA, 18 nt, Human
agcuccuuuuccagagca

SEQ ID NO: 2011849 - RNA, 19 nt, Human
agcuccuuuuccagagcau

SEQ ID NO: 2011850 - RNA, 16 nt, Human
agcuccuucuguccua

SEQ ID NO: 2011851 - RNA, 21 nt, Human
agcuccuucuguccuacucug

SEQ ID NO: 2011852 - RNA, 18 nt, Human
agcuccauacacacgcug

SEQ ID NO: 2011853 - RNA, 19 nt, Human
agcuccauacacacgcugc

SEQ ID NO: 2011854 - RNA, 20 nt, Human
agcuccauacacacgcugcc

SEQ ID NO: 2011855 - RNA, 22 nt, Human
agcuccauacacacgcugccuu

SEQ ID NO: 2011856 - RNA, 13 nt, Human
agcuccaucucca

SEQ ID NO: 2011857 - RNA, 15 nt, Human
agcuccaucuccacu

SEQ ID NO: 2011858 - RNA, 13 nt, Human
agcucccaggcau

SEQ ID NO: 2011859 - RNA, 16 nt, Human
agcuccaucuccacuc

SEQ ID NO: 2011860 - RNA, 23 nt, Human
agcuccauacacacgcugccuuc

SEQ ID NO: 2011861 - RNA, 15 nt, Human
agcuccuucuguccu

SEQ ID NO: 2011862 - RNA, 23 nt, Human
agcucccaggcauuccccaggag

SEQ ID NO: 2011863 - RNA, 16 nt, Human
ugccaucauguuuaca

SEQ ID NO: 2011864 - RNA, 14 nt, Human
ugccauagaguaca

SEQ ID NO: 2011865 - RNA, 15 nt, Human
ugccauagaguacac

SEQ ID NO: 2011866 - RNA, 18 nt, Human
ugccauagaguacacugc

SEQ ID NO: 2011867 - RNA, 20 nt, Human
aggcagcuguugucucuucu

SEQ ID NO: 2011868 - RNA, 21 nt, Human
aggcagcuguugucucuucuc

SEQ ID NO: 2011869 - RNA, 12 nt, Human
aggcacaggcag

SEQ ID NO: 2011870 - RNA, 13 nt, Human
aggcacaggcagg

SEQ ID NO: 2011871 - RNA, 14 nt, Human
aggcacaggcaggg

SEQ ID NO: 2011872 - RNA, 13 nt, Human
aggcagcuguugu

SEQ ID NO: 2011873 - RNA, 14 nt, Human
aggcaggggaaugu

SEQ ID NO: 2011874 - RNA, 16 nt, Human
aggcaggggaauguau

SEQ ID NO: 2011875 - RNA, 19 nt, Human
aggcaggggaauguaugug

SEQ ID NO: 2011876 - RNA, 17 nt, Human
aggcaggggcccugcag

SEQ ID NO: 2011877 - RNA, 18 nt, Human
aggcaggggcccugcagc

SEQ ID NO: 2011878 - RNA, 19 nt, Human
aggcaggggcccugcagcu

SEQ ID NO: 2011879 - RNA, 20 nt, Human
aggcaggggcccugcagcuc

SEQ ID NO: 2011880 - RNA, 21 nt, Human
aggcaggggcccugcagcucu

SEQ ID NO: 2011881 - RNA, 22 nt, Human
aggcaggggcccugcagcucuc

SEQ ID NO: 2011882 - RNA, 17 nt, Human
aggcaggugggauggau

SEQ ID NO: 2011883 - RNA, 20 nt, Human
aggcaggugaucugcugcag

SEQ ID NO: 2011884 - RNA, 23 nt, Human
aggcaggugaucugcugcagagc

SEQ ID NO: 2011885 - RNA, 15 nt, Human
aggcauaaagucagg

SEQ ID NO: 2011886 - RNA, 23 nt, Human
aggcaguuugaggauuaguuuag

SEQ ID NO: 2011887 - RNA, 12 nt, Human
aggcagggucuc

SEQ ID NO: 2011888 - RNA, 22 nt, Human
aggcaggucuugaacuccuggc

SEQ ID NO: 2011889 - RNA, 18 nt, Human
aggcauuucccacccuga

SEQ ID NO: 2011890 - RNA, 20 nt, Human
aggcauuuaggccaugggac

SEQ ID NO: 2011891 - RNA, 18 nt, Human
aggcauugugggaagggg

SEQ ID NO: 2011892 - RNA, 22 nt, Human
aggcauaaagucagggguuccc

SEQ ID NO: 2011893 - RNA, 17 nt, Human
uggacuguucccugagg

SEQ ID NO: 2011894 - RNA, 14 nt, Human
uggagaaaauggac

SEQ ID NO: 2011895 - RNA, 13 nt, Human
uggacuuaggaag

SEQ ID NO: 2011896 - RNA, 16 nt, Human
uggacuguucccugag

SEQ ID NO: 2011897 - RNA, 18 nt, Human
aggauugcuacuguccua

SEQ ID NO: 2011898 - RNA, 15 nt, Human
aggauugcuacuguc

SEQ ID NO: 2011899 - RNA, 17 nt, Human
aggauugcuacuguccu

SEQ ID NO: 2011900 - RNA, 16 nt, Human
aggcaaggcugucaau

SEQ ID NO: 2011901 - RNA, 17 nt, Human
aggcaaggcugucaauu

SEQ ID NO: 2011902 - RNA, 20 nt, Human
aggcaagcaccuccugccuc

SEQ ID NO: 2011903 - RNA, 18 nt, Human
aggcaagcaccuccugcc

SEQ ID NO: 2011904 - RNA, 19 nt, Human
aggcaagcaccuccugccu

SEQ ID NO: 2011905 - RNA, 17 nt, Human
uggagccaauggagacu

SEQ ID NO: 2011906 - RNA, 17 nt, Human
aggcaagcaccuccugc

SEQ ID NO: 2011907 - RNA, 16 nt, Human
uggauucugagagcug

SEQ ID NO: 2011908 - RNA, 17 nt, Human
uggauucugagagcugu

SEQ ID NO: 2011909 - RNA, 20 nt, Human
uggauucugaggcccugccc

SEQ ID NO: 2011910 - RNA, 17 nt, Human
uggauucuuguuuugcu

SEQ ID NO: 2011911 - RNA, 14 nt, Human
uggauuccuguuuc

SEQ ID NO: 2011912 - RNA, 23 nt, Human
uggcacaucagcacgauuucugu

SEQ ID NO: 2011913 - RNA, 17 nt, Human
uggauucauauuuaauu

SEQ ID NO: 2011914 - RNA, 13 nt, Human
uggauucagccuu

SEQ ID NO: 2011915 - RNA, 14 nt, Human
uggauucagccuuc

SEQ ID NO: 2011916 - RNA, 17 nt, Human
uggauucagccuucuuu

SEQ ID NO: 2011917 - RNA, 23 nt, Human
uggauucagccuucuuuuucugg

SEQ ID NO: 2011918 - RNA, 14 nt, Human
uggauucauauuua

SEQ ID NO: 2011919 - RNA, 19 nt, Human
uggaguucucaaagaccug

SEQ ID NO: 2011920 - RNA, 13 nt, Human
uggauggaagggg

SEQ ID NO: 2011921 - RNA, 21 nt, Human
uggaugccugguggcagcugc

SEQ ID NO: 2011922 - RNA, 23 nt, Human
uggaugccugguggcagcugcgg

SEQ ID NO: 2011923 - RNA, 11 nt, Human
uggaguuggag

SEQ ID NO: 2011924 - RNA, 20 nt, Human
aggcauuugcugaauacaga

SEQ ID NO: 2011925 - RNA, 16 nt, Human
aggcauuugcugaaua

SEQ ID NO: 2011926 - RNA, 12 nt, Human
uggagugaccaa

SEQ ID NO: 2011927 - RNA, 14 nt, Human
uggagugcagugag

SEQ ID NO: 2011928 - RNA, 16 nt, Human
uggagugcaaaaggcu

SEQ ID NO: 2011929 - RNA, 14 nt, Human
uggaguugaaaauc

SEQ ID NO: 2011930 - RNA, 15 nt, Human
aggccagccuugacc

SEQ ID NO: 2011931 - RNA, 13 nt, Human
aggccagcugccu

SEQ ID NO: 2011932 - RNA, 13 nt, Human
aggccagccuuga

SEQ ID NO: 2011933 - RNA, 14 nt, Human
aggccaccucuucc

SEQ ID NO: 2011934 - RNA, 15 nt, Human
aggccaccucuuccu

SEQ ID NO: 2011935 - RNA, 21 nt, Human
aggccaccucuuccuggccgg

SEQ ID NO: 2011936 - RNA, 23 nt, Human
aggccaccucuuccuggccggug

SEQ ID NO: 2011937 - RNA, 12 nt, Human
aggccaccuccu

SEQ ID NO: 2011938 - RNA, 13 nt, Human
aggccaccuccua

SEQ ID NO: 2011939 - RNA, 21 nt, Human
aggccaccuccuaaaaggccc

SEQ ID NO: 2011940 - RNA, 22 nt, Human
aggccaccuccuaaaaggccca

SEQ ID NO: 2011941 - RNA, 23 nt, Human
aggccaccuccuaaaaggcccag

SEQ ID NO: 2011942 - RNA, 22 nt, Human
uggcagcucaccucucccuugg

SEQ ID NO: 2011943 - RNA, 21 nt, Human
uggcagcucaccucucccuug

SEQ ID NO: 2011944 - RNA, 23 nt, Human
uggcagcucaccucucccuugga

SEQ ID NO: 2011945 - RNA, 13 nt, Human
uggcagcucagag

SEQ ID NO: 2011946 - RNA, 18 nt, Human
uggcacccggccccugcu

SEQ ID NO: 2011947 - RNA, 19 nt, Human
uggcacccggccccugcug

SEQ ID NO: 2011948 - RNA, 20 nt, Human
uggcacccggccccugcugg

SEQ ID NO: 2011949 - RNA, 15 nt, Human
aggcccccugccugc

SEQ ID NO: 2011950 - RNA, 18 nt, Human
aggcccccugccugcccu

SEQ ID NO: 2011951 - RNA, 14 nt, Human
aggccccgcccagg

SEQ ID NO: 2011952 - RNA, 13 nt, Human
aggcccggcucca

SEQ ID NO: 2011953 - RNA, 15 nt, Human
aggcccggccucuca

SEQ ID NO: 2011954 - RNA, 13 nt, Human
aggcccggccucu

SEQ ID NO: 2011955 - RNA, 14 nt, Human
aggcccggccucuc

SEQ ID NO: 2011956 - RNA, 13 nt, Human
aggcccagagggc

SEQ ID NO: 2011957 - RNA, 20 nt, Human
aggcccagagagaagagccc

SEQ ID NO: 2011958 - RNA, 14 nt, Human
aggcccacccugcu

SEQ ID NO: 2011959 - RNA, 15 nt, Human
aggcccacccugcuu

SEQ ID NO: 2011960 - RNA, 22 nt, Human
aggcccacccugcuuggcccag

SEQ ID NO: 2011961 - RNA, 23 nt, Human
aggcccacccugcuuggcccagg

SEQ ID NO: 2011962 - RNA, 12 nt, Human
aggcccacccug

SEQ ID NO: 2011963 - RNA, 13 nt, Human
aggcccacccugc

SEQ ID NO: 2011964 - RNA, 22 nt, Human
aggcccagagagaagagcccca

SEQ ID NO: 2011965 - RNA, 23 nt, Human
aggcccagagagaagagccccac

SEQ ID NO: 2011966 - RNA, 13 nt, Human
aggauauauuuua

SEQ ID NO: 2011967 - RNA, 14 nt, Human
aggauauauuuuau

SEQ ID NO: 2011968 - RNA, 18 nt, Human
aggauauauuuuauuuuu

SEQ ID NO: 2011969 - RNA, 17 nt, Human
aggaggcuccaggcagc

SEQ ID NO: 2011970 - RNA, 18 nt, Human
aggaggcuccaggcagca

SEQ ID NO: 2011971 - RNA, 21 nt, Human
aggaggccuugggcucugcug

SEQ ID NO: 2011972 - RNA, 12 nt, Human
aggaggcuccag

SEQ ID NO: 2011973 - RNA, 23 nt, Human
uggaagaggaacagcacugggga

SEQ ID NO: 2011974 - RNA, 17 nt, Human
uggaagcagguuaaaug

SEQ ID NO: 2011975 - RNA, 18 nt, Human
uggaagcagguuaaaugu

SEQ ID NO: 2011976 - RNA, 19 nt, Human
uggaagcagguuaaauguu

SEQ ID NO: 2011977 - RNA, 20 nt, Human
uggaagcagguuaaauguuu

SEQ ID NO: 2011978 - RNA, 21 nt, Human
uggaagcagguuaaauguuuu

SEQ ID NO: 2011979 - RNA, 14 nt, Human
uggaagcagugccc

SEQ ID NO: 2011980 - RNA, 16 nt, Human
uggaagcagugcccag

SEQ ID NO: 2011981 - RNA, 17 nt, Human
uggaagcagugcccagg

SEQ ID NO: 2011982 - RNA, 18 nt, Human
uggaagcagugcccaggu

SEQ ID NO: 2011983 - RNA, 19 nt, Human
uggaagcagugcccaggug

SEQ ID NO: 2011984 - RNA, 20 nt, Human
uggaagcagugcccaggugg

SEQ ID NO: 2011985 - RNA, 23 nt, Human
aggaugacaaaauucuuucuggu

SEQ ID NO: 2011986 - RNA, 13 nt, Human
aggaucagucuga

SEQ ID NO: 2011987 - RNA, 17 nt, Human
aggauaucggcauuugu

SEQ ID NO: 2011988 - RNA, 21 nt, Human
aggauaucggcauuuguuucu

SEQ ID NO: 2011989 - RNA, 14 nt, Human
aggauaugccugcu

SEQ ID NO: 2011990 - RNA, 19 nt, Human
aggauucuuccucccuccc

SEQ ID NO: 2011991 - RNA, 17 nt, Human
aggauucuuccucccuc

SEQ ID NO: 2011992 - RNA, 23 nt, Human
aggaugaucuaggaagacuuugg

SEQ ID NO: 2011993 - RNA, 22 nt, Human
aggaugaucuaggaagacuuug

SEQ ID NO: 2011994 - RNA, 22 nt, Human
aggaugcacagaguuguuacau

SEQ ID NO: 2011995 - RNA, 10 nt, Human
ugcuuuuaaa

SEQ ID NO: 2011996 - RNA, 23 nt, Human
ugcuuuguugugugccucuagcu

SEQ ID NO: 2011997 - RNA, 24 nt, Human
ugcuuuguugugugccucuagcug

SEQ ID NO: 2011998 - RNA, 16 nt, Human
ugcuuuuuauggccug

SEQ ID NO: 2011999 - RNA, 23 nt, Human
uggaaauuuguuauaaugaauga

SEQ ID NO: 2012000 - RNA, 21 nt, Human
uggaaauuuguuauaaugaau

SEQ ID NO: 2012001 - RNA, 12 nt, Human
uggaaauuucac

SEQ ID NO: 2012002 - RNA, 13 nt, Human
uggaaauuucacg

SEQ ID NO: 2012003 - RNA, 15 nt, Human
uggaagagggcugca

SEQ ID NO: 2012004 - RNA, 18 nt, Human
uggaagagcuaggcaggg

SEQ ID NO: 2012005 - RNA, 16 nt, Human
uggaagacagcucuua

SEQ ID NO: 2012006 - RNA, 14 nt, Human
uggaaauuucacgu

SEQ ID NO: 2012007 - RNA, 14 nt, Human
ugcuuugggcugcc

SEQ ID NO: 2012008 - RNA, 15 nt, Human
ugcuuugggcugccc

SEQ ID NO: 2012009 - RNA, 20 nt, Human
ugcuugaagcaaacaguuga

SEQ ID NO: 2012010 - RNA, 15 nt, Human
ugcuugaauaaacac

SEQ ID NO: 2012011 - RNA, 20 nt, Human
ugcuugaauaaacaccacug

SEQ ID NO: 2012012 - RNA, 15 nt, Human
ugcuugagcucagga

SEQ ID NO: 2012013 - RNA, 12 nt, Human
ugcuugaauaaa

SEQ ID NO: 2012014 - RNA, 17 nt, Human
ugcuugaacuuacaggu

SEQ ID NO: 2012015 - RNA, 19 nt, Human
ugcuugaagcaaacaguug

SEQ ID NO: 2012016 - RNA, 17 nt, Human
aggagccuccugcccuu

SEQ ID NO: 2012017 - RNA, 17 nt, Human
ugcuuugugauuuuugu

SEQ ID NO: 2012018 - RNA, 15 nt, Human
ugcuuuguugugugc

SEQ ID NO: 2012019 - RNA, 16 nt, Human
ugcuuuguugugugcc

SEQ ID NO: 2012020 - RNA, 18 nt, Human
ugcuuuguugugugccuc

SEQ ID NO: 2012021 - RNA, 19 nt, Human
ugcuuuguugugugccucu

SEQ ID NO: 2012022 - RNA, 20 nt, Human
ugcuuuguugugugccucua

SEQ ID NO: 2012023 - RNA, 21 nt, Human
ugcuuuguugugugccucuag

SEQ ID NO: 2012024 - RNA, 22 nt, Human
ugcuuugugauuuuuguaauuu

SEQ ID NO: 2012025 - RNA, 16 nt, Human
ugcuuugggcugcccu

SEQ ID NO: 2012026 - RNA, 23 nt, Human
ugcuuuuuaauauugauaugcuu

SEQ ID NO: 2012027 - RNA, 20 nt, Human
ugcuuuugucuaugggacuc

SEQ ID NO: 2012028 - RNA, 18 nt, Human
ugcuuuuggucuguguga

SEQ ID NO: 2012029 - RNA, 12 nt, Human
aggacucugccu

SEQ ID NO: 2012030 - RNA, 13 nt, Human
aggacucugccuc

SEQ ID NO: 2012031 - RNA, 14 nt, Human
aggacucugccucc

SEQ ID NO: 2012032 - RNA, 16 nt, Human
aggacucugccuccuc

SEQ ID NO: 2012033 - RNA, 17 nt, Human
aggacucugccuccucu

SEQ ID NO: 2012034 - RNA, 18 nt, Human
aggacucugccuccucuu

SEQ ID NO: 2012035 - RNA, 18 nt, Human
aggagaaacuggaacucu

SEQ ID NO: 2012036 - RNA, 19 nt, Human
aggagaaacuggaacucuc

SEQ ID NO: 2012037 - RNA, 22 nt, Human
aggacuuuucuuuguggcuucc

SEQ ID NO: 2012038 - RNA, 17 nt, Human
aggagaaacuggaacuc

SEQ ID NO: 2012039 - RNA, 17 nt, Human
aggacuuuucuuugugg

SEQ ID NO: 2012040 - RNA, 19 nt, Human
aggacuuuucuuuguggcu

SEQ ID NO: 2012041 - RNA, 16 nt, Human
aggagccuccugcccu

SEQ ID NO: 2012042 - RNA, 23 nt, Human
aggagcccugggaggcucuggag

SEQ ID NO: 2012043 - RNA, 17 nt, Human
aggagccccgaggccuu

SEQ ID NO: 2012044 - RNA, 22 nt, Human
aggagcccauuuggagggccug

SEQ ID NO: 2012045 - RNA, 15 nt, Human
aggagcacugaaagu

SEQ ID NO: 2012046 - RNA, 13 nt, Human
aggagcagccaca

SEQ ID NO: 2012047 - RNA, 12 nt, Human
aggagcagccac

SEQ ID NO: 2012048 - RNA, 15 nt, Human
aggagaugcugugcc

SEQ ID NO: 2012049 - RNA, 13 nt, Human
aggaccugugucc

SEQ ID NO: 2012050 - RNA, 18 nt, Human
aggaccuucgggcugugc

SEQ ID NO: 2012051 - RNA, 19 nt, Human
aggaccuucgggcugugcc

SEQ ID NO: 2012052 - RNA, 18 nt, Human
aggacaaggugcaggcag

SEQ ID NO: 2012053 - RNA, 19 nt, Human
aggacaaggugcaggcagg

SEQ ID NO: 2012054 - RNA, 20 nt, Human
aggacaaggugcaggcaggc

SEQ ID NO: 2012055 - RNA, 23 nt, Human
aggacaaggugcaggcaggcugg

SEQ ID NO: 2012056 - RNA, 16 nt, Human
aggacgcucucuggcc

SEQ ID NO: 2012057 - RNA, 17 nt, Human
aggacgcucucuggccu

SEQ ID NO: 2012058 - RNA, 19 nt, Human
aggacgcucucuggccuuc

SEQ ID NO: 2012059 - RNA, 20 nt, Human
aggacgcucucuggccuucg

SEQ ID NO: 2012060 - RNA, 20 nt, Human
aggaccuucgggcugugccc

SEQ ID NO: 2012061 - RNA, 21 nt, Human
aggaccuucacucuaagaugu

SEQ ID NO: 2012062 - RNA, 23 nt, Human
aggaccuucacucuaagauguua

SEQ ID NO: 2012063 - RNA, 13 nt, Human
aggacgcucucug

SEQ ID NO: 2012064 - RNA, 14 nt, Human
aggacgcucucugg

SEQ ID NO: 2012065 - RNA, 19 nt, Human
aggacuaggguccugggga

SEQ ID NO: 2012066 - RNA, 16 nt, Human
aggacuaggguccugg

SEQ ID NO: 2012067 - RNA, 18 nt, Human
aggacuaggguccugggg

SEQ ID NO: 2012068 - RNA, 15 nt, Human
aggacuaggguccug

SEQ ID NO: 2012069 - RNA, 17 nt, Human
aggacgcuucacaggac

SEQ ID NO: 2012070 - RNA, 19 nt, Human
aggacgcuucacaggacag

SEQ ID NO: 2012071 - RNA, 20 nt, Human
aggacgcuucacaggacagg

SEQ ID NO: 2012072 - RNA, 21 nt, Human
aggacucucacgauaugcaag

SEQ ID NO: 2012073 - RNA, 14 nt, Human
ugcaugcuuuccau

SEQ ID NO: 2012074 - RNA, 15 nt, Human
ugcaugcuuuccaua

SEQ ID NO: 2012075 - RNA, 18 nt, Human
ugcaugcuuuccauauuu

SEQ ID NO: 2012076 - RNA, 21 nt, Human
ugcaugcugucccuuacguga

SEQ ID NO: 2012077 - RNA, 19 nt, Human
ugcaugcugucccuuacgu

SEQ ID NO: 2012078 - RNA, 18 nt, Human
ugcaugcugucccuuacg

SEQ ID NO: 2012079 - RNA, 15 nt, Human
ugcaugauugcagaa

SEQ ID NO: 2012080 - RNA, 18 nt, Human
ugcaucuuugauguguug

SEQ ID NO: 2012081 - RNA, 16 nt, Human
ugcaugauugcagaau

SEQ ID NO: 2012082 - RNA, 12 nt, Human
ugcaucuuaaaa

SEQ ID NO: 2012083 - RNA, 12 nt, Human
ugcaucuuugau

SEQ ID NO: 2012084 - RNA, 16 nt, Human
ugcaucuuugaugugu

SEQ ID NO: 2012085 - RNA, 17 nt, Human
ugcaucuuugauguguu

SEQ ID NO: 2012086 - RNA, 13 nt, Human
ugcaucucagccc

SEQ ID NO: 2012087 - RNA, 14 nt, Human
ugcaucucagccca

SEQ ID NO: 2012088 - RNA, 15 nt, Human
ugcaucucagcccac

SEQ ID NO: 2012089 - RNA, 13 nt, Human
ugcauacucauua

SEQ ID NO: 2012090 - RNA, 19 nt, Human
ugcauacucauuaggaugg

SEQ ID NO: 2012091 - RNA, 17 nt, Human
ugcauagaauaaaauuu

SEQ ID NO: 2012092 - RNA, 16 nt, Human
ugcaguaucugugaac

SEQ ID NO: 2012093 - RNA, 18 nt, Human
ugcagguuaguuacauau

SEQ ID NO: 2012094 - RNA, 16 nt, Human
ugcauaccacuuuugu

SEQ ID NO: 2012095 - RNA, 13 nt, Human
ugcagucacugca

SEQ ID NO: 2012096 - RNA, 18 nt, Human
ugcauaccacuuuuguuc

SEQ ID NO: 2012097 - RNA, 20 nt, Human
ugcauaccacuuuuguucuu

SEQ ID NO: 2012098 - RNA, 17 nt, Human
agccucgacacagagug

SEQ ID NO: 2012099 - RNA, 18 nt, Human
agccucgacacagagugg

SEQ ID NO: 2012100 - RNA, 20 nt, Human
agccucgcaggccucccugc

SEQ ID NO: 2012101 - RNA, 22 nt, Human
agccucgcaggccucccugcca

SEQ ID NO: 2012102 - RNA, 23 nt, Human
agccucgcaggccucccugccag

SEQ ID NO: 2012103 - RNA, 16 nt, Human
agccucguuggaagag

SEQ ID NO: 2012104 - RNA, 21 nt, Human
agccucguuggaagaggaaca

SEQ ID NO: 2012105 - RNA, 18 nt, Human
agccuccugcccuuaccu

SEQ ID NO: 2012106 - RNA, 14 nt, Human
agccuccugcccuu

SEQ ID NO: 2012107 - RNA, 13 nt, Human
agccuccugcccu

SEQ ID NO: 2012108 - RNA, 12 nt, Human
ugcagacaggca

SEQ ID NO: 2012109 - RNA, 14 nt, Human
ugcagaauuguuua

SEQ ID NO: 2012110 - RNA, 17 nt, Human
ugcagacaaucuucugu

SEQ ID NO: 2012111 - RNA, 13 nt, Human
ugcagacaggcaa

SEQ ID NO: 2012112 - RNA, 21 nt, Human
ugcagacaggcaagcaccucc

SEQ ID NO: 2012113 - RNA, 21 nt, Human
ugcagccucacaguccuuacc

SEQ ID NO: 2012114 - RNA, 17 nt, Human
ugcagccucacaguccu

SEQ ID NO: 2012115 - RNA, 18 nt, Human
ugcagccucacaguccuu

SEQ ID NO: 2012116 - RNA, 12 nt, Human
agccucuuuccc

SEQ ID NO: 2012117 - RNA, 13 nt, Human
agccucuuucccu

SEQ ID NO: 2012118 - RNA, 20 nt, Human
agccucuuucccuuccaguu

SEQ ID NO: 2012119 - RNA, 21 nt, Human
agccucuuucccuuccaguuu

SEQ ID NO: 2012120 - RNA, 22 nt, Human
ugcaggucccuaauaaagcugu

SEQ ID NO: 2012121 - RNA, 18 nt, Human
ugcagccuccgcuucccu

SEQ ID NO: 2012122 - RNA, 17 nt, Human
ugcagggcuuuaaaauu

SEQ ID NO: 2012123 - RNA, 19 nt, Human
ugcagggcuuuaaaauucu

SEQ ID NO: 2012124 - RNA, 14 nt, Human
ugccaaugggagcu

SEQ ID NO: 2012125 - RNA, 13 nt, Human
ugccaauggacua

SEQ ID NO: 2012126 - RNA, 18 nt, Human
ugccaaugggagcucaug

SEQ ID NO: 2012127 - RNA, 16 nt, Human
ugcauuuaaaagauac

SEQ ID NO: 2012128 - RNA, 17 nt, Human
ugcauugggugaucauu

SEQ ID NO: 2012129 - RNA, 13 nt, Human
agcgcccuggccc

SEQ ID NO: 2012130 - RNA, 14 nt, Human
agcgcccuggcccc

SEQ ID NO: 2012131 - RNA, 16 nt, Human
agcgcccuggccccca

SEQ ID NO: 2012132 - RNA, 18 nt, Human
agcgcccuggcccccaca

SEQ ID NO: 2012133 - RNA, 20 nt, Human
agcgcccuggcccccacaug

SEQ ID NO: 2012134 - RNA, 22 nt, Human
ugccagccgagauagccaaggc

SEQ ID NO: 2012135 - RNA, 17 nt, Human
ugccagccgagauagcc

SEQ ID NO: 2012136 - RNA, 15 nt, Human
ugccagcccagaggc

SEQ ID NO: 2012137 - RNA, 15 nt, Human
ugccagcccauuugg

SEQ ID NO: 2012138 - RNA, 13 nt, Human
ugccauaauuacu

SEQ ID NO: 2012139 - RNA, 19 nt, Human
ugccaguuuuguuuccuuu

SEQ ID NO: 2012140 - RNA, 16 nt, Human
ugccaguggggccuga

SEQ ID NO: 2012141 - RNA, 19 nt, Human
agccuugcggaagguucua

SEQ ID NO: 2012142 - RNA, 21 nt, Human
agccuugaccauucuccaccu

SEQ ID NO: 2012143 - RNA, 19 nt, Human
agccuugaccauucuccac

SEQ ID NO: 2012144 - RNA, 18 nt, Human
agccuugaccauucucca

SEQ ID NO: 2012145 - RNA, 16 nt, Human
agccuugggaccccug

SEQ ID NO: 2012146 - RNA, 17 nt, Human
agccuuggccucagagg

SEQ ID NO: 2012147 - RNA, 13 nt, Human
agccuugaacuuu

SEQ ID NO: 2012148 - RNA, 23 nt, Human
agccuugaacuuugaccucugca

SEQ ID NO: 2012149 - RNA, 16 nt, Human
agccuucuuuuucugg

SEQ ID NO: 2012150 - RNA, 17 nt, Human
agccuucuuuuucugga

SEQ ID NO: 2012151 - RNA, 18 nt, Human
agccuucuuuuucuggac

SEQ ID NO: 2012152 - RNA, 20 nt, Human
agccuucuuuuucuggacuc

SEQ ID NO: 2012153 - RNA, 23 nt, Human
agccuucuuuuucuggacucugg

SEQ ID NO: 2012154 - RNA, 13 nt, Human
agccuucugagcu

SEQ ID NO: 2012155 - RNA, 19 nt, Human
agccuucugagcuggccuc

SEQ ID NO: 2012156 - RNA, 15 nt, Human
agccuguuuaagaga

SEQ ID NO: 2012157 - RNA, 19 nt, Human
agccuuaaaacaucauucc

SEQ ID NO: 2012158 - RNA, 22 nt, Human
agccuuaaaacaucauuccuuu

SEQ ID NO: 2012159 - RNA, 20 nt, Human
agccuuagaagucacacagu

SEQ ID NO: 2012160 - RNA, 22 nt, Human
agccuuagaagucacacaguau

SEQ ID NO: 2012161 - RNA, 14 nt, Human
agccuuaagcugca

SEQ ID NO: 2012162 - RNA, 16 nt, Human
agccuuaagcugcagg

SEQ ID NO: 2012163 - RNA, 16 nt, Human
agccugagucaccugc

SEQ ID NO: 2012164 - RNA, 19 nt, Human
agccugagucaccugcaga

SEQ ID NO: 2012165 - RNA, 19 nt, Human
agccugugccucugggacu

SEQ ID NO: 2012166 - RNA, 18 nt, Human
agccugugccucugggac

SEQ ID NO: 2012167 - RNA, 17 nt, Human
agccugugccucuggga

SEQ ID NO: 2012168 - RNA, 20 nt, Human
ugcaaaccaucauugaaauc

SEQ ID NO: 2012169 - RNA, 18 nt, Human
ugcaaaccaucauugaaa

SEQ ID NO: 2012170 - RNA, 22 nt, Human
ugcaaacugggcuggaagauau

SEQ ID NO: 2012171 - RNA, 23 nt, Human
ugcaaacugggcuggaagauauu

SEQ ID NO: 2012172 - RNA, 21 nt, Human
ugcaaaggguaucaggugcug

SEQ ID NO: 2012173 - RNA, 14 nt, Human
ugcaaagcccagcu

SEQ ID NO: 2012174 - RNA, 15 nt, Human
ugcaaagcccagcuu

SEQ ID NO: 2012175 - RNA, 17 nt, Human
ugcaaagcccagcuuga

SEQ ID NO: 2012176 - RNA, 13 nt, Human
ugcaaaggaaaua

SEQ ID NO: 2012177 - RNA, 16 nt, Human
ugcaaaggaaauacca

SEQ ID NO: 2012178 - RNA, 20 nt, Human
ugcaaaguaucccuacugua

SEQ ID NO: 2012179 - RNA, 17 nt, Human
ugcaaaguacagguacu

SEQ ID NO: 2012180 - RNA, 21 nt, Human
ugcaaaguacagguacuuugu

SEQ ID NO: 2012181 - RNA, 23 nt, Human
ugcaaaguucccuacuuccugug

SEQ ID NO: 2012182 - RNA, 13 nt, Human
ugcaaaccaucau

SEQ ID NO: 2012183 - RNA, 12 nt, Human
ugcaaaccauca

SEQ ID NO: 2012184 - RNA, 18 nt, Human
ugcaaacauuggaagauu

SEQ ID NO: 2012185 - RNA, 12 nt, Human
ugauuuggaaaa

SEQ ID NO: 2012186 - RNA, 13 nt, Human
ugauuugagauuu

SEQ ID NO: 2012187 - RNA, 14 nt, Human
ugauuugagauuuu

SEQ ID NO: 2012188 - RNA, 17 nt, Human
agccacggccaggccag

SEQ ID NO: 2012189 - RNA, 18 nt, Human
agccacggccaggccaga

SEQ ID NO: 2012190 - RNA, 12 nt, Human
ugauuuauuaac

SEQ ID NO: 2012191 - RNA, 15 nt, Human
ugauuuauuaacuua

SEQ ID NO: 2012192 - RNA, 16 nt, Human
ugauuuauuaacuuaa

SEQ ID NO: 2012193 - RNA, 13 nt, Human
ugauuucauucaa

SEQ ID NO: 2012194 - RNA, 13 nt, Human
ugauuucagaaac

SEQ ID NO: 2012195 - RNA, 19 nt, Human
ugauuuauuaacuuaauaa

SEQ ID NO: 2012196 - RNA, 22 nt, Human
ugauuuauuaacuuaauaauca

SEQ ID NO: 2012197 - RNA, 15 nt, Human
ugauuucacaaauau

SEQ ID NO: 2012198 - RNA, 16 nt, Human
ugauuucacaaauauu

SEQ ID NO: 2012199 - RNA, 19 nt, Human
ugauuucacaaauauuaaa

SEQ ID NO: 2012200 - RNA, 20 nt, Human
ugauuucacaaauauuaaaa

SEQ ID NO: 2012201 - RNA, 23 nt, Human
ugauuucacaaauauuaaaaagu

SEQ ID NO: 2012202 - RNA, 14 nt, Human
ugauuucacagugu

SEQ ID NO: 2012203 - RNA, 16 nt, Human
ugauuucacagugugu

SEQ ID NO: 2012204 - RNA, 14 nt, Human
ugcaauauauuuug

SEQ ID NO: 2012205 - RNA, 15 nt, Human
ugcaauauauuuugu

SEQ ID NO: 2012206 - RNA, 16 nt, Human
ugcaauauauuuugua

SEQ ID NO: 2012207 - RNA, 18 nt, Human
ugcaauauauuuuguaug

SEQ ID NO: 2012208 - RNA, 20 nt, Human
ugcaauauauuuuguaugca

SEQ ID NO: 2012209 - RNA, 21 nt, Human
ugcaauauauuuuguaugcaa

SEQ ID NO: 2012210 - RNA, 12 nt, Human
agcccaggccuc

SEQ ID NO: 2012211 - RNA, 18 nt, Human
ugcaaucuauaauauuug

SEQ ID NO: 2012212 - RNA, 15 nt, Human
ugcaauccuuacaaa

SEQ ID NO: 2012213 - RNA, 16 nt, Human
ugcaauccuuacaaau

SEQ ID NO: 2012214 - RNA, 17 nt, Human
ugcaauccuuacaaaug

SEQ ID NO: 2012215 - RNA, 20 nt, Human
ugcaauccuuacaaaugauu

SEQ ID NO: 2012216 - RNA, 12 nt, Human
ugcaauccuuac

SEQ ID NO: 2012217 - RNA, 14 nt, Human
ugcaauccuuacaa

SEQ ID NO: 2012218 - RNA, 20 nt, Human
ugcaagggcggccuuuccca

SEQ ID NO: 2012219 - RNA, 19 nt, Human
ugcaaggucuugcauuuaa

SEQ ID NO: 2012220 - RNA, 15 nt, Human
ugcaaggucauuuuu

SEQ ID NO: 2012221 - RNA, 15 nt, Human
ugcaagguaaaauuu

SEQ ID NO: 2012222 - RNA, 16 nt, Human
ugcaagguaaaauuuu

SEQ ID NO: 2012223 - RNA, 13 nt, Human
ugcaagcuuuucc

SEQ ID NO: 2012224 - RNA, 17 nt, Human
ugcaagcuuuuccuaau

SEQ ID NO: 2012225 - RNA, 23 nt, Human
ugcaagcaguuucaauaaaguuu

SEQ ID NO: 2012226 - RNA, 23 nt, Human
ugcaagccccugcuccagaagau

SEQ ID NO: 2012227 - RNA, 17 nt, Human
ugcaagcaguuucaaua

SEQ ID NO: 2012228 - RNA, 21 nt, Human
ugcaagcaguuucaauaaagu

SEQ ID NO: 2012229 - RNA, 15 nt, Human
ugcaagcaguuucaa

SEQ ID NO: 2012230 - RNA, 13 nt, Human
ugcaacaggcugg

SEQ ID NO: 2012231 - RNA, 16 nt, Human
ugcaacaaaauacauu

SEQ ID NO: 2012232 - RNA, 12 nt, Human
ugcaacaaaaua

SEQ ID NO: 2012233 - RNA, 15 nt, Human
agcccgggcucugcc

SEQ ID NO: 2012234 - RNA, 14 nt, Human
agcccgggcucugc

SEQ ID NO: 2012235 - RNA, 13 nt, Human
agcccgggcucug

SEQ ID NO: 2012236 - RNA, 19 nt, Human
agccccuucugacccaugc

SEQ ID NO: 2012237 - RNA, 16 nt, Human
agccccuucugaccca

SEQ ID NO: 2012238 - RNA, 15 nt, Human
agccccuucugaccc

SEQ ID NO: 2012239 - RNA, 14 nt, Human
agccccuucugacc

SEQ ID NO: 2012240 - RNA, 19 nt, Human
agcccugcagagggcacag

SEQ ID NO: 2012241 - RNA, 16 nt, Human
agcccugcagagggca

SEQ ID NO: 2012242 - RNA, 15 nt, Human
agcccugcagagggc

SEQ ID NO: 2012243 - RNA, 14 nt, Human
agcccugcagaggg

SEQ ID NO: 2012244 - RNA, 20 nt, Human
agcccugaguuccuagccac

SEQ ID NO: 2012245 - RNA, 23 nt, Human
agcccugaguuccuagccaccgc

SEQ ID NO: 2012246 - RNA, 23 nt, Human
agcccugauguguccucagggag

SEQ ID NO: 2012247 - RNA, 18 nt, Human
agcccugaguuccuagcc

SEQ ID NO: 2012248 - RNA, 16 nt, Human
agcccgggcucugccu

SEQ ID NO: 2012249 - RNA, 12 nt, Human
agcccccugguc

SEQ ID NO: 2012250 - RNA, 18 nt, Human
agcccccuggucuuugag

SEQ ID NO: 2012251 - RNA, 22 nt, Human
agcccccuggucuuugagcucc

SEQ ID NO: 2012252 - RNA, 19 nt, Human
agcccaggccuccuacagc

SEQ ID NO: 2012253 - RNA, 14 nt, Human
agcccaggccuccu

SEQ ID NO: 2012254 - RNA, 14 nt, Human
agccccgaggccuu

SEQ ID NO: 2012255 - RNA, 21 nt, Human
agccccucuccccgcaguguu

SEQ ID NO: 2012256 - RNA, 18 nt, Human
agccccgugggguuccuc

SEQ ID NO: 2012257 - RNA, 15 nt, Human
agccccucccuccuc

SEQ ID NO: 2012258 - RNA, 16 nt, Human
agccccucccuccucu

SEQ ID NO: 2012259 - RNA, 18 nt, Human
agccccucccuccucuga

SEQ ID NO: 2012260 - RNA, 15 nt, Human
ugcacuccagccuga

SEQ ID NO: 2012261 - RNA, 14 nt, Human
ugcacuccagccug

SEQ ID NO: 2012262 - RNA, 14 nt, Human
ugcacucagcucuu

SEQ ID NO: 2012263 - RNA, 16 nt, Human
ugcacucagacuguau

SEQ ID NO: 2012264 - RNA, 16 nt, Human
ugcaccggcuggccug

SEQ ID NO: 2012265 - RNA, 15 nt, Human
ugcaccggcuggccu

SEQ ID NO: 2012266 - RNA, 14 nt, Human
ugcaccggcuggcc

SEQ ID NO: 2012267 - RNA, 13 nt, Human
ugcaccccuuccu

SEQ ID NO: 2012268 - RNA, 15 nt, Human
ugcaccccuuccugg

SEQ ID NO: 2012269 - RNA, 16 nt, Human
ugcaccccuuccuggg

SEQ ID NO: 2012270 - RNA, 17 nt, Human
ugcaccccuuccugggc

SEQ ID NO: 2012271 - RNA, 18 nt, Human
ugcaccccuuccugggca

SEQ ID NO: 2012272 - RNA, 19 nt, Human
ugcaccccuuccugggcac

SEQ ID NO: 2012273 - RNA, 17 nt, Human
ugcacuccagccugagc

SEQ ID NO: 2012274 - RNA, 15 nt, Human
ugcacuccagccugg

SEQ ID NO: 2012275 - RNA, 16 nt, Human
ugcacuccagccuggg

SEQ ID NO: 2012276 - RNA, 22 nt, Human
ugcagaagacaguauggcagcu

SEQ ID NO: 2012277 - RNA, 17 nt, Human
ugcagaauggcauuugc

SEQ ID NO: 2012278 - RNA, 18 nt, Human
ugcagaauggcauuugca

SEQ ID NO: 2012279 - RNA, 21 nt, Human
ugcagaauggcauuugcaaua

SEQ ID NO: 2012280 - RNA, 22 nt, Human
ugcagaauggcauuugcaauaa

SEQ ID NO: 2012281 - RNA, 15 nt, Human
ugcagaagggagcug

SEQ ID NO: 2012282 - RNA, 22 nt, Human
ugcagaagggagcuggcuccag

SEQ ID NO: 2012283 - RNA, 21 nt, Human
ugcaccacugcacuccagccu

SEQ ID NO: 2012284 - RNA, 13 nt, Human
ugcaccagcccuu

SEQ ID NO: 2012285 - RNA, 21 nt, Human
ugcaccagguagaacgccagg

SEQ ID NO: 2012286 - RNA, 13 nt, Human
ugcaccauacuca

SEQ ID NO: 2012287 - RNA, 17 nt, Human
ugcaccauacucaugca

SEQ ID NO: 2012288 - RNA, 20 nt, Human
agcccugggaggcucuggag

SEQ ID NO: 2012289 - RNA, 18 nt, Human
agcccugggaggcucugg

SEQ ID NO: 2012290 - RNA, 17 nt, Human
agcccugggaggcucug

SEQ ID NO: 2012291 - RNA, 22 nt, Human
agcccugccucuccgccccuga

SEQ ID NO: 2012292 - RNA, 13 nt, Human
agcccugccucuc

SEQ ID NO: 2012293 - RNA, 15 nt, Human
agcccugccucuccg

SEQ ID NO: 2012294 - RNA, 16 nt, Human
agcccugccucuccgc

SEQ ID NO: 2012295 - RNA, 18 nt, Human
agcccugccucuccgccc

SEQ ID NO: 2012296 - RNA, 16 nt, Human
agcauauucaggaagc

SEQ ID NO: 2012297 - RNA, 18 nt, Human
agcaucacuuaaaacacg

SEQ ID NO: 2012298 - RNA, 22 nt, Human
agcaucacuuaaaacacguuuu

SEQ ID NO: 2012299 - RNA, 14 nt, Human
agcaucacuuaaaa

SEQ ID NO: 2012300 - RNA, 16 nt, Human
agcaucacuuaaaaca

SEQ ID NO: 2012301 - RNA, 17 nt, Human
agcaucacuuaaaacac

SEQ ID NO: 2012302 - RNA, 21 nt, Human
agcaucaggccaggcccucug

SEQ ID NO: 2012303 - RNA, 22 nt, Human
agcaucaggccaggcccucugc

SEQ ID NO: 2012304 - RNA, 23 nt, Human
agcaucaggccaggcccucugcc

SEQ ID NO: 2012305 - RNA, 20 nt, Human
agcaucaguacuuguuucua

SEQ ID NO: 2012306 - RNA, 13 nt, Human
agcauccuggaau

SEQ ID NO: 2012307 - RNA, 14 nt, Human
agcauccuggaaua

SEQ ID NO: 2012308 - RNA, 15 nt, Human
agcauccuggaauau

SEQ ID NO: 2012309 - RNA, 13 nt, Human
agcauggcugcca

SEQ ID NO: 2012310 - RNA, 21 nt, Human
ugauacagaaaaguugaauuu

SEQ ID NO: 2012311 - RNA, 18 nt, Human
ugauacaaugcugugccc

SEQ ID NO: 2012312 - RNA, 21 nt, Human
ugauaauuuuccuuuaauaug

SEQ ID NO: 2012313 - RNA, 21 nt, Human
agcauauucaggaagcucagg

SEQ ID NO: 2012314 - RNA, 20 nt, Human
agcaucacaugaacuuguaa

SEQ ID NO: 2012315 - RNA, 19 nt, Human
agcauauucaggaagcuca

SEQ ID NO: 2012316 - RNA, 17 nt, Human
agcauauucaggaagcu

SEQ ID NO: 2012317 - RNA, 18 nt, Human
ugaucacggcucacugca

SEQ ID NO: 2012318 - RNA, 14 nt, Human
ugaucaccugcccu

SEQ ID NO: 2012319 - RNA, 15 nt, Human
ugaucacggcucacu

SEQ ID NO: 2012320 - RNA, 13 nt, Human
ugaucacggcuca

SEQ ID NO: 2012321 - RNA, 14 nt, Human
ugaucacggcucac

SEQ ID NO: 2012322 - RNA, 16 nt, Human
agcauuagugggaaaa

SEQ ID NO: 2012323 - RNA, 21 nt, Human
agcauuauaaucaccagggcc

SEQ ID NO: 2012324 - RNA, 17 nt, Human
agcauuagauuucucau

SEQ ID NO: 2012325 - RNA, 19 nt, Human
agcauggcugccaauggga

SEQ ID NO: 2012326 - RNA, 14 nt, Human
agcauuacaggcaa

SEQ ID NO: 2012327 - RNA, 17 nt, Human
agcauuaccucuuugga

SEQ ID NO: 2012328 - RNA, 19 nt, Human
agcauuaccucuuuggaaa

SEQ ID NO: 2012329 - RNA, 23 nt, Human
agcauuaccucuuuggaaaagga

SEQ ID NO: 2012330 - RNA, 14 nt, Human
agcauucggaggga

SEQ ID NO: 2012331 - RNA, 18 nt, Human
agcauucucacuccuacc

SEQ ID NO: 2012332 - RNA, 20 nt, Human
agcauucucacuccuaccug

SEQ ID NO: 2012333 - RNA, 14 nt, Human
agcauuccagucag

SEQ ID NO: 2012334 - RNA, 22 nt, Human
agcauucucacuccuaccuggu

SEQ ID NO: 2012335 - RNA, 12 nt, Human
agcauucucucc

SEQ ID NO: 2012336 - RNA, 13 nt, Human
agcauuuuguaau

SEQ ID NO: 2012337 - RNA, 14 nt, Human
agcauuuuggcgcu

SEQ ID NO: 2012338 - RNA, 22 nt, Human
agcauuuugcuaaaugugaaug

SEQ ID NO: 2012339 - RNA, 15 nt, Human
agcauuuugcuaaau

SEQ ID NO: 2012340 - RNA, 23 nt, Human
agccaaaaugugagugguugaau

SEQ ID NO: 2012341 - RNA, 15 nt, Human
agccaaaauuaaggu

SEQ ID NO: 2012342 - RNA, 18 nt, Human
agccaaacauccuacaag

SEQ ID NO: 2012343 - RNA, 17 nt, Human
agccaaaauuaaggugu

SEQ ID NO: 2012344 - RNA, 18 nt, Human
agccaaaauuaagguguu

SEQ ID NO: 2012345 - RNA, 18 nt, Human
agccaaacacacagaagg

SEQ ID NO: 2012346 - RNA, 22 nt, Human
agccaaacacacagaaggggac

SEQ ID NO: 2012347 - RNA, 17 nt, Human
agcauuuguguugaaga

SEQ ID NO: 2012348 - RNA, 18 nt, Human
agcauuuguguugaagag

SEQ ID NO: 2012349 - RNA, 16 nt, Human
agcauuuguguguuac

SEQ ID NO: 2012350 - RNA, 17 nt, Human
agcauuuaugguaauca

SEQ ID NO: 2012351 - RNA, 13 nt, Human
agcauuuggugcu

SEQ ID NO: 2012352 - RNA, 14 nt, Human
agcauuuggugcuu

SEQ ID NO: 2012353 - RNA, 15 nt, Human
agcauuuggugcuug

SEQ ID NO: 2012354 - RNA, 12 nt, Human
agcauuugauau

SEQ ID NO: 2012355 - RNA, 16 nt, Human
agcauuugacuuucug

SEQ ID NO: 2012356 - RNA, 17 nt, Human
agcauuugacuuucugu

SEQ ID NO: 2012357 - RNA, 21 nt, Human
agcauuugacuuucugucugu

SEQ ID NO: 2012358 - RNA, 21 nt, Human
agccacacucugggcuccaga

SEQ ID NO: 2012359 - RNA, 13 nt, Human
agccaccacgccc

SEQ ID NO: 2012360 - RNA, 14 nt, Human
agccaccagaugug

SEQ ID NO: 2012361 - RNA, 22 nt, Human
agccaccagaugugacaguguu

SEQ ID NO: 2012362 - RNA, 18 nt, Human
ugauccucccaccucagc

SEQ ID NO: 2012363 - RNA, 20 nt, Human
ugaucccuuccaccugcucu

SEQ ID NO: 2012364 - RNA, 23 nt, Human
ugaucccuuccaccugcucugcu

SEQ ID NO: 2012365 - RNA, 13 nt, Human
ugaucuaggaaga

SEQ ID NO: 2012366 - RNA, 19 nt, Human
ugauccucccaccucagcc

SEQ ID NO: 2012367 - RNA, 20 nt, Human
ugauccucccaccucagccu

SEQ ID NO: 2012368 - RNA, 13 nt, Human
ugauccagaaaga

SEQ ID NO: 2012369 - RNA, 18 nt, Human
ugauccacucgccuucau

SEQ ID NO: 2012370 - RNA, 14 nt, Human
ugauccacucgccu

SEQ ID NO: 2012371 - RNA, 14 nt, Human
agccacccaaagca

SEQ ID NO: 2012372 - RNA, 15 nt, Human
agccacccaaagcag

SEQ ID NO: 2012373 - RNA, 18 nt, Human
agccacccaaagcagugg

SEQ ID NO: 2012374 - RNA, 23 nt, Human
ugauccagaaagaaaacuuguau

SEQ ID NO: 2012375 - RNA, 15 nt, Human
ugaugggucaguugu

SEQ ID NO: 2012376 - RNA, 17 nt, Human
ugaugggcagccugcug

SEQ ID NO: 2012377 - RNA, 22 nt, Human
ugaugggcagccugcuggucag

SEQ ID NO: 2012378 - RNA, 22 nt, Human
ugauggggcccugccuccuuug

SEQ ID NO: 2012379 - RNA, 19 nt, Human
ugauggguuaguggaugga

SEQ ID NO: 2012380 - RNA, 23 nt, Human
ugauggguuaguggauggaaggg

SEQ ID NO: 2012381 - RNA, 17 nt, Human
ugauguuuuccaugagu

SEQ ID NO: 2012382 - RNA, 21 nt, Human
ugauguuuuaaggaugcuugu

SEQ ID NO: 2012383 - RNA, 19 nt, Human
ugauguuuuccaugagucc

SEQ ID NO: 2012384 - RNA, 23 nt, Human
ugauguuuuccaugaguccccug

SEQ ID NO: 2012385 - RNA, 17 nt, Human
ugauuaaauucuugcaa

SEQ ID NO: 2012386 - RNA, 20 nt, Human
ugauuaaccacuucagcuga

SEQ ID NO: 2012387 - RNA, 13 nt, Human
ugauuaaauucuu

SEQ ID NO: 2012388 - RNA, 16 nt, Human
ugauuaaauucuugca

SEQ ID NO: 2012389 - RNA, 16 nt, Human
agccacggccaggcca

SEQ ID NO: 2012390 - RNA, 17 nt, Human
ugauuaacucaguccug

SEQ ID NO: 2012391 - RNA, 13 nt, Human
ugauuaacuugga

SEQ ID NO: 2012392 - RNA, 14 nt, Human
ugauuaacuuggau

SEQ ID NO: 2012393 - RNA, 21 nt, Human
ugauuaacuuggaugaguuuu

SEQ ID NO: 2012394 - RNA, 15 nt, Human
ugaucuaggaagacu

SEQ ID NO: 2012395 - RNA, 14 nt, Human
ugaucuaggaagac

SEQ ID NO: 2012396 - RNA, 18 nt, Human
ugaugaaaauauuuaaag

SEQ ID NO: 2012397 - RNA, 22 nt, Human
ugaugaaaugaggucagagccu

SEQ ID NO: 2012398 - RNA, 23 nt, Human
ugaugaaaugaggucagagccug

SEQ ID NO: 2012399 - RNA, 18 nt, Human
ugaugaaauguaaauacu

SEQ ID NO: 2012400 - RNA, 19 nt, Human
ugaugaucuuugcagacag

SEQ ID NO: 2012401 - RNA, 20 nt, Human
ugaugaucuuugcagacagg

SEQ ID NO: 2012402 - RNA, 17 nt, Human
ugauggcuuaugauagc

SEQ ID NO: 2012403 - RNA, 21 nt, Human
ugaugggcaacccccagccug

SEQ ID NO: 2012404 - RNA, 13 nt, Human
ugauggggcccug

SEQ ID NO: 2012405 - RNA, 22 nt, Human
ugaugggcaacccccagccugc

SEQ ID NO: 2012406 - RNA, 19 nt, Human
ugaugaaauaacacagcag

SEQ ID NO: 2012407 - RNA, 21 nt, Human
ugaugaucuuugcagacaggc

SEQ ID NO: 2012408 - RNA, 19 nt, Human
agcaggcucucaggccagc

SEQ ID NO: 2012409 - RNA, 18 nt, Human
agcaggcucucaggccag

SEQ ID NO: 2012410 - RNA, 17 nt, Human
agcaggcucucaggcca

SEQ ID NO: 2012411 - RNA, 16 nt, Human
agcaggcucucaggcc

SEQ ID NO: 2012412 - RNA, 15 nt, Human
agcaggcucucaggc

SEQ ID NO: 2012413 - RNA, 14 nt, Human
agcaggcucucagg

SEQ ID NO: 2012414 - RNA, 13 nt, Human
agcaggcucucag

SEQ ID NO: 2012415 - RNA, 17 nt, Human
agcaggcucgggcuccc

SEQ ID NO: 2012416 - RNA, 23 nt, Human
agcaggcucucaggccagcugcu

SEQ ID NO: 2012417 - RNA, 22 nt, Human
agcaggcucucaggccagcugc

SEQ ID NO: 2012418 - RNA, 21 nt, Human
agcaggcucucaggccagcug

SEQ ID NO: 2012419 - RNA, 13 nt, Human
agcagggaaacag

SEQ ID NO: 2012420 - RNA, 15 nt, Human
agcaggcugugaguu

SEQ ID NO: 2012421 - RNA, 14 nt, Human
agcagggaaacagc

SEQ ID NO: 2012422 - RNA, 15 nt, Human
agcagggaaacagcu

SEQ ID NO: 2012423 - RNA, 20 nt, Human
agcagguccccagcuuuggc

SEQ ID NO: 2012424 - RNA, 21 nt, Human
agcagguccccagcuuuggcu

SEQ ID NO: 2012425 - RNA, 22 nt, Human
agcagggcucagcggggacagc

SEQ ID NO: 2012426 - RNA, 16 nt, Human
agcagggaaggccuga

SEQ ID NO: 2012427 - RNA, 17 nt, Human
agcagggaaggccugac

SEQ ID NO: 2012428 - RNA, 12 nt, Human
agcagggaaggc

SEQ ID NO: 2012429 - RNA, 14 nt, Human
agcagggaaggccu

SEQ ID NO: 2012430 - RNA, 15 nt, Human
agcagggaaggccug

SEQ ID NO: 2012431 - RNA, 22 nt, Human
agcaggcuucuaugaaagacuc

SEQ ID NO: 2012432 - RNA, 20 nt, Human
agcagggagggcuucugcca

SEQ ID NO: 2012433 - RNA, 13 nt, Human
agcagggcucagc

SEQ ID NO: 2012434 - RNA, 14 nt, Human
agcagggcucagcg

SEQ ID NO: 2012435 - RNA, 15 nt, Human
agcagggcucagcgg

SEQ ID NO: 2012436 - RNA, 19 nt, Human
ugacccaugcugcccugug

SEQ ID NO: 2012437 - RNA, 18 nt, Human
ugacccaugcugcccugu

SEQ ID NO: 2012438 - RNA, 17 nt, Human
ugacccaugcugcccug

SEQ ID NO: 2012439 - RNA, 20 nt, Human
ugacccaugcugcccuguga

SEQ ID NO: 2012440 - RNA, 11 nt, Human
agcagccacau

SEQ ID NO: 2012441 - RNA, 15 nt, Human
agcagccacauuccu

SEQ ID NO: 2012442 - RNA, 13 nt, Human
agcaggacaugga

SEQ ID NO: 2012443 - RNA, 16 nt, Human
agcagcagggagggcu

SEQ ID NO: 2012444 - RNA, 15 nt, Human
agcaggaggcuggga

SEQ ID NO: 2012445 - RNA, 14 nt, Human
agcaggagggacag

SEQ ID NO: 2012446 - RNA, 10 nt, Human
agcaggaggc

SEQ ID NO: 2012447 - RNA, 18 nt, Human
agcaggagggacagucuc

SEQ ID NO: 2012448 - RNA, 19 nt, Human
agcaggagggacagucuca

SEQ ID NO: 2012449 - RNA, 11 nt, Human
agcaggcagcc

SEQ ID NO: 2012450 - RNA, 23 nt, Human
agcaggcccaugggaggcuggag

SEQ ID NO: 2012451 - RNA, 10 nt, Human
agcaggcagc

SEQ ID NO: 2012452 - RNA, 13 nt, Human
agcaggcagccuu

SEQ ID NO: 2012453 - RNA, 11 nt, Human
agcauaaagaa

SEQ ID NO: 2012454 - RNA, 20 nt, Human
agcaguuuucuuuuaauuuu

SEQ ID NO: 2012455 - RNA, 23 nt, Human
agcauaaaaauuagccaagugug

SEQ ID NO: 2012456 - RNA, 15 nt, Human
agcauauaaaauggc

SEQ ID NO: 2012457 - RNA, 19 nt, Human
agcauauaaaauggcaaca

SEQ ID NO: 2012458 - RNA, 23 nt, Human
agcauauaaaauggcaacaaacu

SEQ ID NO: 2012459 - RNA, 14 nt, Human
agcauauaaaaugg

SEQ ID NO: 2012460 - RNA, 16 nt, Human
agcauagcucuguaca

SEQ ID NO: 2012461 - RNA, 16 nt, Human
ugaguacguugugcau

SEQ ID NO: 2012462 - RNA, 17 nt, Human
ugaguacguugugcauu

SEQ ID NO: 2012463 - RNA, 18 nt, Human
ugaguacguugugcauuu

SEQ ID NO: 2012464 - RNA, 19 nt, Human
ugaguacguugugcauuug

SEQ ID NO: 2012465 - RNA, 22 nt, Human
agcagguuaaauguuuuguaaa

SEQ ID NO: 2012466 - RNA, 18 nt, Human
agcaggugugagggcagu

SEQ ID NO: 2012467 - RNA, 14 nt, Human
agcagguuaaaugu

SEQ ID NO: 2012468 - RNA, 15 nt, Human
agcagguuaaauguu

SEQ ID NO: 2012469 - RNA, 16 nt, Human
agcagguuaaauguuu

SEQ ID NO: 2012470 - RNA, 18 nt, Human
agcagguuaaauguuuug

SEQ ID NO: 2012471 - RNA, 20 nt, Human
agcagguuaaauguuuugua

SEQ ID NO: 2012472 - RNA, 15 nt, Human
agcaguaagggaaca

SEQ ID NO: 2012473 - RNA, 16 nt, Human
agcaguaucaugaagc

SEQ ID NO: 2012474 - RNA, 19 nt, Human
agcauaaaaauuagccaag

SEQ ID NO: 2012475 - RNA, 14 nt, Human
agcaguuugcuuug

SEQ ID NO: 2012476 - RNA, 20 nt, Human
agcaguuucaauaaaguuug

SEQ ID NO: 2012477 - RNA, 21 nt, Human
agcaguuucaauaaaguuuga

SEQ ID NO: 2012478 - RNA, 14 nt, Human
agcaguuucaggua

SEQ ID NO: 2012479 - RNA, 15 nt, Human
agcaguuucaauaaa

SEQ ID NO: 2012480 - RNA, 17 nt, Human
agcaguuucaauaaagu

SEQ ID NO: 2012481 - RNA, 14 nt, Human
ugauacaaugcugu

SEQ ID NO: 2012482 - RNA, 15 nt, Human
ugauacaaugcugug

SEQ ID NO: 2012483 - RNA, 14 nt, Human
ugauaauuuuccuu

SEQ ID NO: 2012484 - RNA, 17 nt, Human
ugauaauuuuccuuuaa

SEQ ID NO: 2012485 - RNA, 19 nt, Human
ugauaauuuuccuuuaaua

SEQ ID NO: 2012486 - RNA, 13 nt, Human
ugauaauuuuccu

SEQ ID NO: 2012487 - RNA, 13 nt, Human
ugauaauagaaga

SEQ ID NO: 2012488 - RNA, 15 nt, Human
ugauaauagaagagu

SEQ ID NO: 2012489 - RNA, 21 nt, Human
ugagugggggaucacagccuc

SEQ ID NO: 2012490 - RNA, 21 nt, Human
ugagugugauccaguuuuuca

SEQ ID NO: 2012491 - RNA, 14 nt, Human
ugaguuccuagcca

SEQ ID NO: 2012492 - RNA, 24 nt, Human
ugaguuacuugcugcccugugcuc

SEQ ID NO: 2012493 - RNA, 18 nt, Human
ugaguuccuagccaccgc

SEQ ID NO: 2012494 - RNA, 17 nt, Human
ugaguuccggcaccagu

SEQ ID NO: 2012495 - RNA, 18 nt, Human
ugaguucauacccuguua

SEQ ID NO: 2012496 - RNA, 20 nt, Human
ugaguccaaacuggaaugag

SEQ ID NO: 2012497 - RNA, 14 nt, Human
ugaguacuacaguc

SEQ ID NO: 2012498 - RNA, 20 nt, Human
ugaguacaugcacacucaug

SEQ ID NO: 2012499 - RNA, 20 nt, Human
ugaguacguugugcauuugg

SEQ ID NO: 2012500 - RNA, 18 nt, Human
ugagucaccaagcccagu

SEQ ID NO: 2012501 - RNA, 16 nt, Human
ugagugccuuacacaa

SEQ ID NO: 2012502 - RNA, 18 nt, Human
ugagugcaggcccacccu

SEQ ID NO: 2012503 - RNA, 14 nt, Human
ugagugcauguacu

SEQ ID NO: 2012504 - RNA, 14 nt, Human
ugagugccuuacac

SEQ ID NO: 2012505 - RNA, 13 nt, Human
ugagugccuuaca

SEQ ID NO: 2012506 - RNA, 17 nt, Human
ugagugcagcucuggag

SEQ ID NO: 2012507 - RNA, 13 nt, Human
ugagugcaggccc

SEQ ID NO: 2012508 - RNA, 14 nt, Human
ugagugcaggccca

SEQ ID NO: 2012509 - RNA, 15 nt, Human
ugagugcaggcccac

SEQ ID NO: 2012510 - RNA, 16 nt, Human
ugagugcaggcccacc

SEQ ID NO: 2012511 - RNA, 18 nt, Human
agagcagagaccaucccu

SEQ ID NO: 2012512 - RNA, 17 nt, Human
agagcagagaccauccc

SEQ ID NO: 2012513 - RNA, 20 nt, Human
agagcagagaccaucccuga

SEQ ID NO: 2012514 - RNA, 22 nt, Human
agagcagaaauucuguuuuuaa

SEQ ID NO: 2012515 - RNA, 12 nt, Human
agagcagcaagg

SEQ ID NO: 2012516 - RNA, 16 nt, Human
agagcagugggccugg

SEQ ID NO: 2012517 - RNA, 19 nt, Human
agagcagcaaggucuugcu

SEQ ID NO: 2012518 - RNA, 23 nt, Human
agagcauuauaaucaccagggcc

SEQ ID NO: 2012519 - RNA, 16 nt, Human
agagcauuccagucag

SEQ ID NO: 2012520 - RNA, 17 nt, Human
agagcauuccagucagg

SEQ ID NO: 2012521 - RNA, 18 nt, Human
agagcauuccagucaggc

SEQ ID NO: 2012522 - RNA, 19 nt, Human
agagcauuccagucaggcu

SEQ ID NO: 2012523 - RNA, 21 nt, Human
agagcauuccagucaggcucu

SEQ ID NO: 2012524 - RNA, 21 nt, Human
agagccuugcggaagguucua

SEQ ID NO: 2012525 - RNA, 11 nt, Human
agagccuugcg

SEQ ID NO: 2012526 - RNA, 13 nt, Human
agagcaagagagc

SEQ ID NO: 2012527 - RNA, 16 nt, Human
agagcaagagagcagc

SEQ ID NO: 2012528 - RNA, 20 nt, Human
agagcaagagagcagcaagg

SEQ ID NO: 2012529 - RNA, 17 nt, Human
agagcaaggaagguaaa

SEQ ID NO: 2012530 - RNA, 21 nt, Human
agagcaaggaagguaaaaagu

SEQ ID NO: 2012531 - RNA, 23 nt, Human
agagcaaggaagguaaaaaguua

SEQ ID NO: 2012532 - RNA, 12 nt, Human
agagcagagacc

SEQ ID NO: 2012533 - RNA, 14 nt, Human
agagcagaaauucu

SEQ ID NO: 2012534 - RNA, 15 nt, Human
agagcagaaauucug

SEQ ID NO: 2012535 - RNA, 17 nt, Human
agagcagaaauucuguu

SEQ ID NO: 2012536 - RNA, 20 nt, Human
agagcagaaauucuguuuuu

SEQ ID NO: 2012537 - RNA, 21 nt, Human
ucuuuggacccugaggcccag

SEQ ID NO: 2012538 - RNA, 17 nt, Human
ucuuuggacccugaggc

SEQ ID NO: 2012539 - RNA, 14 nt, Human
agagauuuggggcu

SEQ ID NO: 2012540 - RNA, 21 nt, Human
agagauuuggggcuaaagacu

SEQ ID NO: 2012541 - RNA, 22 nt, Human
agagauuuggggcuaaagacug

SEQ ID NO: 2012542 - RNA, 23 nt, Human
ugaaauuuccugggagcuuuugu

SEQ ID NO: 2012543 - RNA, 22 nt, Human
ugaaauacauaugauaaauuug

SEQ ID NO: 2012544 - RNA, 22 nt, Human
ugaaauauauggucuaauguuu

SEQ ID NO: 2012545 - RNA, 15 nt, Human
ugaaauuguauuaca

SEQ ID NO: 2012546 - RNA, 18 nt, Human
agagcugccaccugccug

SEQ ID NO: 2012547 - RNA, 15 nt, Human
agagcguugaaguug

SEQ ID NO: 2012548 - RNA, 12 nt, Human
agagcugccagu

SEQ ID NO: 2012549 - RNA, 13 nt, Human
agagcugccagug

SEQ ID NO: 2012550 - RNA, 18 nt, Human
agagccuuuuucuaggcc

SEQ ID NO: 2012551 - RNA, 15 nt, Human
agagcgacagagcag

SEQ ID NO: 2012552 - RNA, 16 nt, Human
agagcgacagagcagu

SEQ ID NO: 2012553 - RNA, 14 nt, Human
agagcgcagcaucc

SEQ ID NO: 2012554 - RNA, 17 nt, Human
ugaaauaagccagacau

SEQ ID NO: 2012555 - RNA, 18 nt, Human
ugaaauaagccagacauc

SEQ ID NO: 2012556 - RNA, 20 nt, Human
ugaaauaagccagacaucaa

SEQ ID NO: 2012557 - RNA, 23 nt, Human
ugaaauaagccagacaucaacag

SEQ ID NO: 2012558 - RNA, 13 nt, Human
ugaaagugccuuu

SEQ ID NO: 2012559 - RNA, 14 nt, Human
ugaaagugccuuug

SEQ ID NO: 2012560 - RNA, 16 nt, Human
ugaaagugccuuugca

SEQ ID NO: 2012561 - RNA, 17 nt, Human
ugaaagugccuuugcag

SEQ ID NO: 2012562 - RNA, 21 nt, Human
ugaaagugccuuugcagcuca

SEQ ID NO: 2012563 - RNA, 18 nt, Human
agaguaaucuuguugguu

SEQ ID NO: 2012564 - RNA, 12 nt, Human
agaguacacugc

SEQ ID NO: 2012565 - RNA, 13 nt, Human
agaguacacugcc

SEQ ID NO: 2012566 - RNA, 15 nt, Human
agaguacacugccug

SEQ ID NO: 2012567 - RNA, 19 nt, Human
agaguacacugccugccuu

SEQ ID NO: 2012568 - RNA, 12 nt, Human
agagguuuuaaa

SEQ ID NO: 2012569 - RNA, 18 nt, Human
agagguuuggcuccugcc

SEQ ID NO: 2012570 - RNA, 20 nt, Human
agagguuuggcuccugccca

SEQ ID NO: 2012571 - RNA, 22 nt, Human
agaguaauccaagcaaauguga

SEQ ID NO: 2012572 - RNA, 18 nt, Human
agaguagagguauaauug

SEQ ID NO: 2012573 - RNA, 20 nt, Human
ugaagcaaacaguugacaau

SEQ ID NO: 2012574 - RNA, 15 nt, Human
ugaagcaaacaguug

SEQ ID NO: 2012575 - RNA, 22 nt, Human
ugaagcacagugaucaaguuau

SEQ ID NO: 2012576 - RNA, 15 nt, Human
agagguugcagugag

SEQ ID NO: 2012577 - RNA, 13 nt, Human
agagguuucagug

SEQ ID NO: 2012578 - RNA, 19 nt, Human
agagguccacaacacacag

SEQ ID NO: 2012579 - RNA, 21 nt, Human
agaggucccaagguucugggu

SEQ ID NO: 2012580 - RNA, 13 nt, Human
agagguauaauug

SEQ ID NO: 2012581 - RNA, 13 nt, Human
agaggcugaggac

SEQ ID NO: 2012582 - RNA, 21 nt, Human
agaggccccaauaccccaugg

SEQ ID NO: 2012583 - RNA, 17 nt, Human
agaggcuaugugagcac

SEQ ID NO: 2012584 - RNA, 20 nt, Human
agaggccccaauaccccaug

SEQ ID NO: 2012585 - RNA, 10 nt, Human
agaggcucag

SEQ ID NO: 2012586 - RNA, 18 nt, Human
agaggcucagauuguaau

SEQ ID NO: 2012587 - RNA, 19 nt, Human
agaggccaugggccuccug

SEQ ID NO: 2012588 - RNA, 14 nt, Human
agaggccauggagg

SEQ ID NO: 2012589 - RNA, 10 nt, Human
agaggcaggg

SEQ ID NO: 2012590 - RNA, 13 nt, Human
agaggcagggucu

SEQ ID NO: 2012591 - RNA, 18 nt, Human
agagcuuagaaacuggaa

SEQ ID NO: 2012592 - RNA, 14 nt, Human
agaggaaaagaaau

SEQ ID NO: 2012593 - RNA, 13 nt, Human
agaggcagcccca

SEQ ID NO: 2012594 - RNA, 19 nt, Human
agaggcagccccauucugc

SEQ ID NO: 2012595 - RNA, 24 nt, Human
agaggcagccccauucugccugcc

SEQ ID NO: 2012596 - RNA, 19 nt, Human
ugaacuuugaccucugcag

SEQ ID NO: 2012597 - RNA, 20 nt, Human
ugaacuuugaccucugcagc

SEQ ID NO: 2012598 - RNA, 22 nt, Human
ugaacuuugaccucugcagcaa

SEQ ID NO: 2012599 - RNA, 24 nt, Human
ugaagaaaauacuuaaauguuaug

SEQ ID NO: 2012600 - RNA, 16 nt, Human
ugaagaaacagcuaug

SEQ ID NO: 2012601 - RNA, 20 nt, Human
ugaagaaaauacuuaaaugu

SEQ ID NO: 2012602 - RNA, 22 nt, Human
ugaagaaaauacuuaaauguua

SEQ ID NO: 2012603 - RNA, 12 nt, Human
ugaagaaaauac

SEQ ID NO: 2012604 - RNA, 14 nt, Human
ugaagaaaauacuu

SEQ ID NO: 2012605 - RNA, 16 nt, Human
ugaagaaaauacuuaa

SEQ ID NO: 2012606 - RNA, 18 nt, Human
ugaagaaaauacuuaaau

SEQ ID NO: 2012607 - RNA, 14 nt, Human
agagcugcgggcug

SEQ ID NO: 2012608 - RNA, 22 nt, Human
agagcuucuguugcugccucau

SEQ ID NO: 2012609 - RNA, 15 nt, Human
agagcuuaacagugu

SEQ ID NO: 2012610 - RNA, 12 nt, Human
agagcuuagaaa

SEQ ID NO: 2012611 - RNA, 13 nt, Human
agagcuuagaaac

SEQ ID NO: 2012612 - RNA, 14 nt, Human
agagcuuagaaacu

SEQ ID NO: 2012613 - RNA, 18 nt, Human
agagcuguugaugggaug

SEQ ID NO: 2012614 - RNA, 19 nt, Human
ugaacaaauuuacagagac

SEQ ID NO: 2012615 - RNA, 20 nt, Human
ugaacaaauuuacagagaca

SEQ ID NO: 2012616 - RNA, 15 nt, Human
ugaaauuuuuauuaa

SEQ ID NO: 2012617 - RNA, 18 nt, Human
ugaacaaauuuacagaga

SEQ ID NO: 2012618 - RNA, 12 nt, Human
ugaaccugaaua

SEQ ID NO: 2012619 - RNA, 22 nt, Human
ugaaccgaugagaaauaaaguu

SEQ ID NO: 2012620 - RNA, 18 nt, Human
ugaacaacgagccuuuuc

SEQ ID NO: 2012621 - RNA, 19 nt, Human
ugaacaacgagccuuuuca

SEQ ID NO: 2012622 - RNA, 13 nt, Human
ugaacgcccagag

SEQ ID NO: 2012623 - RNA, 21 nt, Human
ugaacuaggauuguaguccca

SEQ ID NO: 2012624 - RNA, 14 nt, Human
ugaacuccuggccu

SEQ ID NO: 2012625 - RNA, 15 nt, Human
ugaacuccuggccuc

SEQ ID NO: 2012626 - RNA, 12 nt, Human
ugaacuccuggc

SEQ ID NO: 2012627 - RNA, 14 nt, Human
agagucauuguaau

SEQ ID NO: 2012628 - RNA, 16 nt, Human
agagucauuguaaugu

SEQ ID NO: 2012629 - RNA, 14 nt, Human
agaguccccccacu

SEQ ID NO: 2012630 - RNA, 23 nt, Human
agagucauuguaauguugugaau

SEQ ID NO: 2012631 - RNA, 21 nt, Human
agagucauuguaauguuguga

SEQ ID NO: 2012632 - RNA, 22 nt, Human
agagucauuguaauguugugaa

SEQ ID NO: 2012633 - RNA, 20 nt, Human
ugaaugguuuucaaaauaaa

SEQ ID NO: 2012634 - RNA, 19 nt, Human
ugaaugucagugugacuga

SEQ ID NO: 2012635 - RNA, 15 nt, Human
ugaaugucaguuguu

SEQ ID NO: 2012636 - RNA, 21 nt, Human
agaguuguuacauuuuuaagu

SEQ ID NO: 2012637 - RNA, 16 nt, Human
agaguuguuacauuuu

SEQ ID NO: 2012638 - RNA, 12 nt, Human
agaguuguuaca

SEQ ID NO: 2012639 - RNA, 20 nt, Human
agaguugaugguuguacaua

SEQ ID NO: 2012640 - RNA, 17 nt, Human
agaguuggcaugacucu

SEQ ID NO: 2012641 - RNA, 17 nt, Human
agaguugauacuacagu

SEQ ID NO: 2012642 - RNA, 20 nt, Human
agaguugauacuacaguuug

SEQ ID NO: 2012643 - RNA, 22 nt, Human
agaguugauacuacaguuuguu

SEQ ID NO: 2012644 - RNA, 22 nt, Human
agagucugagggcuuguaguuc

SEQ ID NO: 2012645 - RNA, 23 nt, Human
agagucugagggcuuguaguucu

SEQ ID NO: 2012646 - RNA, 21 nt, Human
agagucuggggaccagcuugg

SEQ ID NO: 2012647 - RNA, 12 nt, Human
agagucugaggg

SEQ ID NO: 2012648 - RNA, 14 nt, Human
agagucugagggcu

SEQ ID NO: 2012649 - RNA, 21 nt, Human
agagucugagggcuuguaguu

SEQ ID NO: 2012650 - RNA, 21 nt, Human
agaguccccccacucccagca

SEQ ID NO: 2012651 - RNA, 15 nt, Human
agaguccccccacuc

SEQ ID NO: 2012652 - RNA, 18 nt, Human
agaguccccccacuccca

SEQ ID NO: 2012653 - RNA, 16 nt, Human
agauaaaugauucaaa

SEQ ID NO: 2012654 - RNA, 12 nt, Human
agauacugaaau

SEQ ID NO: 2012655 - RNA, 21 nt, Human
agauacuacugaccagacaag

SEQ ID NO: 2012656 - RNA, 23 nt, Human
agauacuacugaccagacaagcu

SEQ ID NO: 2012657 - RNA, 13 nt, Human
agauacugaaaua

SEQ ID NO: 2012658 - RNA, 15 nt, Human
agauacugaaauaaa

SEQ ID NO: 2012659 - RNA, 12 nt, Human
agauacucuggg

SEQ ID NO: 2012660 - RNA, 14 nt, Human
agauaaauauuaua

SEQ ID NO: 2012661 - RNA, 12 nt, Human
agauaaaugugc

SEQ ID NO: 2012662 - RNA, 12 nt, Human
agauaaauauua

SEQ ID NO: 2012663 - RNA, 17 nt, Human
agauaaagguucaugca

SEQ ID NO: 2012664 - RNA, 14 nt, Human
agaucacgccacug

SEQ ID NO: 2012665 - RNA, 15 nt, Human
agaucacgccacugc

SEQ ID NO: 2012666 - RNA, 16 nt, Human
agaucacgccacugca

SEQ ID NO: 2012667 - RNA, 20 nt, Human
ugacacacagcucuguccug

SEQ ID NO: 2012668 - RNA, 11 nt, Human
ugaauuuucau

SEQ ID NO: 2012669 - RNA, 12 nt, Human
ugaauuuucauu

SEQ ID NO: 2012670 - RNA, 13 nt, Human
ugaauuuucauuu

SEQ ID NO: 2012671 - RNA, 14 nt, Human
ugaauuuucauuuu

SEQ ID NO: 2012672 - RNA, 15 nt, Human
ugaauuuucauuuua

SEQ ID NO: 2012673 - RNA, 16 nt, Human
ugaauuuucauuuuac

SEQ ID NO: 2012674 - RNA, 17 nt, Human
ugaauuuucauuuuaca

SEQ ID NO: 2012675 - RNA, 18 nt, Human
ugaauuuucauuuuacag

SEQ ID NO: 2012676 - RNA, 19 nt, Human
ugaauuuucauuuuacagu

SEQ ID NO: 2012677 - RNA, 21 nt, Human
ugaauuuucauuuuacaguua

SEQ ID NO: 2012678 - RNA, 16 nt, Human
ugaauuuuacauggcu

SEQ ID NO: 2012679 - RNA, 15 nt, Human
ugaauuucuuuugcc

SEQ ID NO: 2012680 - RNA, 17 nt, Human
agaucacgccacugcac

SEQ ID NO: 2012681 - RNA, 18 nt, Human
agaucacgccacugcacu

SEQ ID NO: 2012682 - RNA, 22 nt, Human
agauguggaaaagccaagaggc

SEQ ID NO: 2012683 - RNA, 16 nt, Human
agaugugcugcuuuga

SEQ ID NO: 2012684 - RNA, 17 nt, Human
agauguggaaaagccaa

SEQ ID NO: 2012685 - RNA, 14 nt, Human
agaugugcugcuuu

SEQ ID NO: 2012686 - RNA, 17 nt, Human
agauguuauauuuuucu

SEQ ID NO: 2012687 - RNA, 19 nt, Human
agauguuauauuuuucuua

SEQ ID NO: 2012688 - RNA, 21 nt, Human
agauguuauauuuuucuuaaa

SEQ ID NO: 2012689 - RNA, 15 nt, Human
agaugcuucucacug

SEQ ID NO: 2012690 - RNA, 15 nt, Human
agaugcugugccccu

SEQ ID NO: 2012691 - RNA, 20 nt, Human
agaugcugugccccuggccu

SEQ ID NO: 2012692 - RNA, 12 nt, Human
ugacccacugcu

SEQ ID NO: 2012693 - RNA, 13 nt, Human
ugacccacugcuu

SEQ ID NO: 2012694 - RNA, 17 nt, Human
ugacccacaagaaauga

SEQ ID NO: 2012695 - RNA, 23 nt, Human
ugaccauucuccaccugccaggg

SEQ ID NO: 2012696 - RNA, 22 nt, Human
agauccauuuuuuauauuucaa

SEQ ID NO: 2012697 - RNA, 14 nt, Human
agaugcaccagccc

SEQ ID NO: 2012698 - RNA, 15 nt, Human
agaugcaccagcccu

SEQ ID NO: 2012699 - RNA, 14 nt, Human
agaugcuagaacuc

SEQ ID NO: 2012700 - RNA, 15 nt, Human
agaugcuagaacucc

SEQ ID NO: 2012701 - RNA, 11 nt, Human
agaugccuggg

SEQ ID NO: 2012702 - RNA, 17 nt, Human
ugacagcgcacagcugc

SEQ ID NO: 2012703 - RNA, 19 nt, Human
ugacagcgcacagcugcuc

SEQ ID NO: 2012704 - RNA, 20 nt, Human
ugacaggcaaugcuggcugu

SEQ ID NO: 2012705 - RNA, 16 nt, Human
ugacagcgcacagcug

SEQ ID NO: 2012706 - RNA, 21 nt, Human
ugacacacagcucuguccugg

SEQ ID NO: 2012707 - RNA, 11 nt, Human
ugacagggcac

SEQ ID NO: 2012708 - RNA, 16 nt, Human
ugacagggcacaccgg

SEQ ID NO: 2012709 - RNA, 14 nt, Human
ugacaggccugucc

SEQ ID NO: 2012710 - RNA, 18 nt, Human
ugacaggcgaaagaaaac

SEQ ID NO: 2012711 - RNA, 21 nt, Human
ugacaguggccgcccaaggcc

SEQ ID NO: 2012712 - RNA, 21 nt, Human
ugacagggcacaccgggcacu

SEQ ID NO: 2012713 - RNA, 20 nt, Human
ugacagggcacaccgggcac

SEQ ID NO: 2012714 - RNA, 18 nt, Human
ugaccaaugauggucacc

SEQ ID NO: 2012715 - RNA, 19 nt, Human
ugacauuuagucccucaag

SEQ ID NO: 2012716 - RNA, 20 nt, Human
ugacauuguuggccaaagcc

SEQ ID NO: 2012717 - RNA, 21 nt, Human
ugacauuguuggccaaagcca

SEQ ID NO: 2012718 - RNA, 22 nt, Human
ugacauuguagagcuucuggca

SEQ ID NO: 2012719 - RNA, 15 nt, Human
agaucagccugggca

SEQ ID NO: 2012720 - RNA, 13 nt, Human
agaucagccuggg

SEQ ID NO: 2012721 - RNA, 13 nt, Human
agaucauaguuuu

SEQ ID NO: 2012722 - RNA, 14 nt, Human
agaucauaguuuua

SEQ ID NO: 2012723 - RNA, 16 nt, Human
agaucauaguuuuauu

SEQ ID NO: 2012724 - RNA, 17 nt, Human
agaucauaguuuuauuu

SEQ ID NO: 2012725 - RNA, 19 nt, Human
agaucauaguuuuauuuau

SEQ ID NO: 2012726 - RNA, 20 nt, Human
agaucauaguuuuauuuaua

SEQ ID NO: 2012727 - RNA, 22 nt, Human
agaucauaguuuuauuuauauu

SEQ ID NO: 2012728 - RNA, 12 nt, Human
agaucauuguga

SEQ ID NO: 2012729 - RNA, 23 nt, Human
agaucauaguuuuauuuauauuu

SEQ ID NO: 2012730 - RNA, 17 nt, Human
ucuuuaggucuuugccu

SEQ ID NO: 2012731 - RNA, 14 nt, Human
ucuuuaauuaaaac

SEQ ID NO: 2012732 - RNA, 20 nt, Human
ucuuuaauuaaaaccuggga

SEQ ID NO: 2012733 - RNA, 14 nt, Human
ucuuuaauuuuaca

SEQ ID NO: 2012734 - RNA, 22 nt, Human
ucuuuaaugucacaggcagguc

SEQ ID NO: 2012735 - RNA, 16 nt, Human
ucuugguuuguaaauu

SEQ ID NO: 2012736 - RNA, 20 nt, Human
ucuuuaaugucacaggcagg

SEQ ID NO: 2012737 - RNA, 13 nt, Human
ucuugguuccagc

SEQ ID NO: 2012738 - RNA, 21 nt, Human
ucuugauaauuuuccuuuaau

SEQ ID NO: 2012739 - RNA, 17 nt, Human
ucuugaucaguaguuug

SEQ ID NO: 2012740 - RNA, 17 nt, Human
ucuugguuccagccugc

SEQ ID NO: 2012741 - RNA, 18 nt, Human
ucuugguuccagccugcc

SEQ ID NO: 2012742 - RNA, 19 nt, Human
ucuugguuccagccugcca

SEQ ID NO: 2012743 - RNA, 14 nt, Human
ucuugguuuguaaa

SEQ ID NO: 2012744 - RNA, 13 nt, Human
ucuuucugcuuug

SEQ ID NO: 2012745 - RNA, 20 nt, Human
ucuuuauaauucuacuuuga

SEQ ID NO: 2012746 - RNA, 18 nt, Human
ucuuucuggcuaugcauu

SEQ ID NO: 2012747 - RNA, 19 nt, Human
ucuuucuggcuaugcauuu

SEQ ID NO: 2012748 - RNA, 14 nt, Human
ucuuucuuccucug

SEQ ID NO: 2012749 - RNA, 19 nt, Human
agacucgcgacaaugcaaa

SEQ ID NO: 2012750 - RNA, 18 nt, Human
agacucgcgacaaugcaa

SEQ ID NO: 2012751 - RNA, 17 nt, Human
agacucgcgacaaugca

SEQ ID NO: 2012752 - RNA, 15 nt, Human
agacucgcgacaaug

SEQ ID NO: 2012753 - RNA, 17 nt, Human
ucuuucuuccucugcug

SEQ ID NO: 2012754 - RNA, 15 nt, Human
ucuuucuuccucugc

SEQ ID NO: 2012755 - RNA, 16 nt, Human
ucuuucuuccucugcu

SEQ ID NO: 2012756 - RNA, 14 nt, Human
agacugucucaaga

SEQ ID NO: 2012757 - RNA, 14 nt, Human
agacuuaucaacau

SEQ ID NO: 2012758 - RNA, 16 nt, Human
agacuguacaaaguag

SEQ ID NO: 2012759 - RNA, 15 nt, Human
agacuguacaaagua

SEQ ID NO: 2012760 - RNA, 20 nt, Human
agacucgcgacaaugcaaac

SEQ ID NO: 2012761 - RNA, 22 nt, Human
agagaaaaaauauuuuccugcc

SEQ ID NO: 2012762 - RNA, 19 nt, Human
agacuuuuuuuaaauagua

SEQ ID NO: 2012763 - RNA, 17 nt, Human
agacuuuagcuuucuga

SEQ ID NO: 2012764 - RNA, 18 nt, Human
agacuuguaugaaagaug

SEQ ID NO: 2012765 - RNA, 16 nt, Human
agacuuguauauucua

SEQ ID NO: 2012766 - RNA, 18 nt, Human
agacuuguauauucuauu

SEQ ID NO: 2012767 - RNA, 21 nt, Human
agacuuguauauucuauuuua

SEQ ID NO: 2012768 - RNA, 14 nt, Human
agagaaaaaagcca

SEQ ID NO: 2012769 - RNA, 15 nt, Human
agagaauuaaacgaa

SEQ ID NO: 2012770 - RNA, 24 nt, Human
agagacagaaagcagaacagugau

SEQ ID NO: 2012771 - RNA, 19 nt, Human
agagacaauagcauuagaa

SEQ ID NO: 2012772 - RNA, 20 nt, Human
ucuucugagcuuacguaguu

SEQ ID NO: 2012773 - RNA, 14 nt, Human
ucuuauuccauauu

SEQ ID NO: 2012774 - RNA, 18 nt, Human
ucuuauuccauauuagaa

SEQ ID NO: 2012775 - RNA, 19 nt, Human
ucuuauuccauauuagaaa

SEQ ID NO: 2012776 - RNA, 17 nt, Human
ucuuauuuaaugaaaga

SEQ ID NO: 2012777 - RNA, 12 nt, Human
ucuucuggaaug

SEQ ID NO: 2012778 - RNA, 21 nt, Human
ucuucuguacgucugacaggc

SEQ ID NO: 2012779 - RNA, 22 nt, Human
ucuucuguacgucugacaggca

SEQ ID NO: 2012780 - RNA, 22 nt, Human
ucuucugcuucagccucccgag

SEQ ID NO: 2012781 - RNA, 12 nt, Human
ucuucugcuuug

SEQ ID NO: 2012782 - RNA, 13 nt, Human
ucuucugcuuugu

SEQ ID NO: 2012783 - RNA, 21 nt, Human
ucuucugcuuuguugugugcc

SEQ ID NO: 2012784 - RNA, 23 nt, Human
ucuucugcuuuguugugugccuc

SEQ ID NO: 2012785 - RNA, 22 nt, Human
ucuucugagcuuacguaguucu

SEQ ID NO: 2012786 - RNA, 20 nt, Human
ucuucugaguggcuaaaacu

SEQ ID NO: 2012787 - RNA, 21 nt, Human
ucuucugaguggcuaaaacuu

SEQ ID NO: 2012788 - RNA, 19 nt, Human
ucuucugaucacugaaaua

SEQ ID NO: 2012789 - RNA, 21 nt, Human
agacauuugcuaugagcuggg

SEQ ID NO: 2012790 - RNA, 14 nt, Human
agacauagaauuaa

SEQ ID NO: 2012791 - RNA, 23 nt, Human
agacauacuaaccagcagaaaug

SEQ ID NO: 2012792 - RNA, 23 nt, Human
ucuucuguacgucugacaggcaa

SEQ ID NO: 2012793 - RNA, 15 nt, Human
ucuucuucaaaccuu

SEQ ID NO: 2012794 - RNA, 13 nt, Human
ucuucuucaaacc

SEQ ID NO: 2012795 - RNA, 20 nt, Human
ucuugagccuugaacuuuga

SEQ ID NO: 2012796 - RNA, 18 nt, Human
ucuugagccuugaacuuu

SEQ ID NO: 2012797 - RNA, 19 nt, Human
ucuugagccuugaacuuug

SEQ ID NO: 2012798 - RNA, 21 nt, Human
agacucaguggggaggggcug

SEQ ID NO: 2012799 - RNA, 17 nt, Human
ucuugagccuugaacuu

SEQ ID NO: 2012800 - RNA, 15 nt, Human
agacucauucuucug

SEQ ID NO: 2012801 - RNA, 22 nt, Human
agaccugccccuccucucugcc

SEQ ID NO: 2012802 - RNA, 23 nt, Human
agaccugccccuccucucugccc

SEQ ID NO: 2012803 - RNA, 16 nt, Human
agaccugccccuccuc

SEQ ID NO: 2012804 - RNA, 13 nt, Human
agaccugccccuc

SEQ ID NO: 2012805 - RNA, 13 nt, Human
agacucaaaugcu

SEQ ID NO: 2012806 - RNA, 14 nt, Human
agacccggcugcgu

SEQ ID NO: 2012807 - RNA, 21 nt, Human
agaccccuggcuuuucacugc

SEQ ID NO: 2012808 - RNA, 15 nt, Human
agaccccuggcuuuu

SEQ ID NO: 2012809 - RNA, 14 nt, Human
agaccccuggcuuu

SEQ ID NO: 2012810 - RNA, 16 nt, Human
agaccaaacagugcug

SEQ ID NO: 2012811 - RNA, 18 nt, Human
agaccaaacagugcuguu

SEQ ID NO: 2012812 - RNA, 20 nt, Human
agaccgaacuguuguauaaa

SEQ ID NO: 2012813 - RNA, 17 nt, Human
agaccgaacuguuguau

SEQ ID NO: 2012814 - RNA, 17 nt, Human
agaccaaauggaaacag

SEQ ID NO: 2012815 - RNA, 12 nt, Human
ucuuauucauca

SEQ ID NO: 2012816 - RNA, 19 nt, Human
agaccgugaagauacuuug

SEQ ID NO: 2012817 - RNA, 18 nt, Human
agaccgugaagauacuuu

SEQ ID NO: 2012818 - RNA, 12 nt, Human
agacagaaaaaa

SEQ ID NO: 2012819 - RNA, 22 nt, Human
agacacuuuuucuuuacaaaca

SEQ ID NO: 2012820 - RNA, 14 nt, Human
agacagcugccugg

SEQ ID NO: 2012821 - RNA, 13 nt, Human
agacagcugccug

SEQ ID NO: 2012822 - RNA, 22 nt, Human
agacacauguccaagaagccca

SEQ ID NO: 2012823 - RNA, 21 nt, Human
agacacauguccaagaagccc

SEQ ID NO: 2012824 - RNA, 23 nt, Human
agacacaggcccggcuccaggcu

SEQ ID NO: 2012825 - RNA, 19 nt, Human
agacaccuugacagggcac

SEQ ID NO: 2012826 - RNA, 24 nt, Human
agacacauguccaagaagcccagg

SEQ ID NO: 2012827 - RNA, 22 nt, Human
agacaccuugacagggcacacc

SEQ ID NO: 2012828 - RNA, 17 nt, Human
agaauucucuuauccaa

SEQ ID NO: 2012829 - RNA, 18 nt, Human
agaauucucuaguuugau

SEQ ID NO: 2012830 - RNA, 19 nt, Human
agaauucucuaguuugauu

SEQ ID NO: 2012831 - RNA, 13 nt, Human
agacacaagccuu

SEQ ID NO: 2012832 - RNA, 14 nt, Human
agacacaagccuuc

SEQ ID NO: 2012833 - RNA, 14 nt, Human
agacacacaaagca

SEQ ID NO: 2012834 - RNA, 15 nt, Human
agacacacaaagcag

SEQ ID NO: 2012835 - RNA, 19 nt, Human
agacacaggcccggcucca

SEQ ID NO: 2012836 - RNA, 20 nt, Human
agacacaggcccggcuccag

SEQ ID NO: 2012837 - RNA, 21 nt, Human
agacacaggcccggcuccagg

SEQ ID NO: 2012838 - RNA, 22 nt, Human
agacacaggcccggcuccaggc

SEQ ID NO: 2012839 - RNA, 17 nt, Human
agacacaggcccggcuc

SEQ ID NO: 2012840 - RNA, 12 nt, Human
ucuuagauguau

SEQ ID NO: 2012841 - RNA, 11 nt, Human
ucuuacuuugu

SEQ ID NO: 2012842 - RNA, 13 nt, Human
ucuuacuuuguaa

SEQ ID NO: 2012843 - RNA, 14 nt, Human
ucuuacuuuguaaa

SEQ ID NO: 2012844 - RNA, 15 nt, Human
ucuuacuuuguaaau

SEQ ID NO: 2012845 - RNA, 16 nt, Human
ucuuacuuuguaaauu

SEQ ID NO: 2012846 - RNA, 17 nt, Human
ucuuacuuuguaaauuc

SEQ ID NO: 2012847 - RNA, 18 nt, Human
ucuuacuuuguaaauucu

SEQ ID NO: 2012848 - RNA, 20 nt, Human
ucuuacuuuguaaauucuga

SEQ ID NO: 2012849 - RNA, 22 nt, Human
ucuuacuuuguaaauucugauu

SEQ ID NO: 2012850 - RNA, 15 nt, Human
ucuuagaaaagguga

SEQ ID NO: 2012851 - RNA, 19 nt, Human
ucuuauuaaaguuucaaaa

SEQ ID NO: 2012852 - RNA, 20 nt, Human
ucuuauuaaaguuucaaaaa

SEQ ID NO: 2012853 - RNA, 21 nt, Human
ucuuauuaaaguuucaaaaau

SEQ ID NO: 2012854 - RNA, 22 nt, Human
ucuuauuaaaguuucaaaaauc

SEQ ID NO: 2012855 - RNA, 14 nt, Human
ucuuauuaaaacac

SEQ ID NO: 2012856 - RNA, 12 nt, Human
ucuuauuaaagu

SEQ ID NO: 2012857 - RNA, 14 nt, Human
ucuuauuaaaguuu

SEQ ID NO: 2012858 - RNA, 15 nt, Human
ucuuauuaaaguuuc

SEQ ID NO: 2012859 - RNA, 16 nt, Human
ucuuauuaaaguuuca

SEQ ID NO: 2012860 - RNA, 17 nt, Human
ucuuauuaaaguuucaa

SEQ ID NO: 2012861 - RNA, 18 nt, Human
ucuuauuaaaguuucaaa

SEQ ID NO: 2012862 - RNA, 20 nt, Human
ucuuagaaaaggugauaaaa

SEQ ID NO: 2012863 - RNA, 22 nt, Human
ucuuagaaaaggugauaaaauc

SEQ ID NO: 2012864 - RNA, 14 nt, Human
ucuuagauguauau

SEQ ID NO: 2012865 - RNA, 19 nt, Human
ucuuacugucuuuuuucua

SEQ ID NO: 2012866 - RNA, 19 nt, Human
ucuuacuuuccugaaaaua

SEQ ID NO: 2012867 - RNA, 20 nt, Human
ucuuaccuugaacugaaggc

SEQ ID NO: 2012868 - RNA, 17 nt, Human
ucuuaccgacaagcaca

SEQ ID NO: 2012869 - RNA, 22 nt, Human
ucuuaccgacaagcacagucag

SEQ ID NO: 2012870 - RNA, 15 nt, Human
ucuuaccgacaagca

SEQ ID NO: 2012871 - RNA, 12 nt, Human
agacagucccug

SEQ ID NO: 2012872 - RNA, 15 nt, Human
agacagucacaaauu

SEQ ID NO: 2012873 - RNA, 18 nt, Human
agacagucacaaauuucu

SEQ ID NO: 2012874 - RNA, 16 nt, Human
agacagcugccuggga

SEQ ID NO: 2012875 - RNA, 15 nt, Human
agacagcugccuggg

SEQ ID NO: 2012876 - RNA, 14 nt, Human
agacagucccugcc

SEQ ID NO: 2012877 - RNA, 13 nt, Human
agacagucccugc

SEQ ID NO: 2012878 - RNA, 18 nt, Human
ucuuaauggaugaaauca

SEQ ID NO: 2012879 - RNA, 19 nt, Human
ucuuaauggaugaaaucau

SEQ ID NO: 2012880 - RNA, 23 nt, Human
ucuguuuagauaauacaccacua

SEQ ID NO: 2012881 - RNA, 16 nt, Human
ucuguuuagauaauac

SEQ ID NO: 2012882 - RNA, 19 nt, Human
ucuguuuagauaauacacc

SEQ ID NO: 2012883 - RNA, 17 nt, Human
ucuguucugcacacagc

SEQ ID NO: 2012884 - RNA, 18 nt, Human
ucuguucugcacacagca

SEQ ID NO: 2012885 - RNA, 19 nt, Human
ucuguucugcacacagcac

SEQ ID NO: 2012886 - RNA, 18 nt, Human
ucugucccaguuaacugu

SEQ ID NO: 2012887 - RNA, 12 nt, Human
ucuguauuugaa

SEQ ID NO: 2012888 - RNA, 13 nt, Human
ucuguauuugaaa

SEQ ID NO: 2012889 - RNA, 14 nt, Human
ucugugaagagcaa

SEQ ID NO: 2012890 - RNA, 16 nt, Human
ucugugaauaagccau

SEQ ID NO: 2012891 - RNA, 11 nt, Human
ucugugaauaa

SEQ ID NO: 2012892 - RNA, 12 nt, Human
ucugugaauaag

SEQ ID NO: 2012893 - RNA, 13 nt, Human
ucugugaauaagc

SEQ ID NO: 2012894 - RNA, 14 nt, Human
ucuguaugauucua

SEQ ID NO: 2012895 - RNA, 18 nt, Human
ucuguacgucugacaggc

SEQ ID NO: 2012896 - RNA, 21 nt, Human
ucugguaucuaauucuuuaau

SEQ ID NO: 2012897 - RNA, 15 nt, Human
agaaugucaguaugu

SEQ ID NO: 2012898 - RNA, 16 nt, Human
agaaugucaguaugug

SEQ ID NO: 2012899 - RNA, 22 nt, Human
agaaccccuggcuccaggccag

SEQ ID NO: 2012900 - RNA, 23 nt, Human
agaaccccaggguccuguagccc

SEQ ID NO: 2012901 - RNA, 17 nt, Human
agaaugucaguaugugg

SEQ ID NO: 2012902 - RNA, 19 nt, Human
agaaugucaguauguggaa

SEQ ID NO: 2012903 - RNA, 21 nt, Human
agaauguguuuaaacuugguu

SEQ ID NO: 2012904 - RNA, 19 nt, Human
agaauuaguggcacuugcu

SEQ ID NO: 2012905 - RNA, 23 nt, Human
agaauguugaaacugacuugcug

SEQ ID NO: 2012906 - RNA, 12 nt, Human
agaauguuuuca

SEQ ID NO: 2012907 - RNA, 13 nt, Human
ucugggcuccaga

SEQ ID NO: 2012908 - RNA, 14 nt, Human
agaauucucuaguu

SEQ ID NO: 2012909 - RNA, 20 nt, Human
agaauucucagaaucucaaa

SEQ ID NO: 2012910 - RNA, 20 nt, Human
agaauuauaauuaguuccuc

SEQ ID NO: 2012911 - RNA, 13 nt, Human
ucuggggaccagc

SEQ ID NO: 2012912 - RNA, 23 nt, Human
ucuggguuccuuccucugagccu

SEQ ID NO: 2012913 - RNA, 21 nt, Human
ucugguaaucgggguauaaua

SEQ ID NO: 2012914 - RNA, 22 nt, Human
ucuggguuccuuccucugagcc

SEQ ID NO: 2012915 - RNA, 18 nt, Human
ucuggguagcuguaaggc

SEQ ID NO: 2012916 - RNA, 14 nt, Human
ucuccuacugagga

SEQ ID NO: 2012917 - RNA, 15 nt, Human
ucuccuacugaggau

SEQ ID NO: 2012918 - RNA, 16 nt, Human
ucuccauguuugaugu

SEQ ID NO: 2012919 - RNA, 20 nt, Human
acuuuaacuuaguuuugcau

SEQ ID NO: 2012920 - RNA, 21 nt, Human
acuuuaacuuaguuuugcaua

SEQ ID NO: 2012921 - RNA, 22 nt, Human
acuuuaacuuaguuuugcauag

SEQ ID NO: 2012922 - RNA, 17 nt, Human
acuuucuagccagagga

SEQ ID NO: 2012923 - RNA, 16 nt, Human
acuuucuagccagagg

SEQ ID NO: 2012924 - RNA, 14 nt, Human
acuuugaccucugc

SEQ ID NO: 2012925 - RNA, 12 nt, Human
acuuucucuaau

SEQ ID NO: 2012926 - RNA, 14 nt, Human
acuuucucuaauaa

SEQ ID NO: 2012927 - RNA, 15 nt, Human
acuuucucuaauaau

SEQ ID NO: 2012928 - RNA, 17 nt, Human
acuuucucuaauaauaa

SEQ ID NO: 2012929 - RNA, 18 nt, Human
acuuucucuaauaauaaa

SEQ ID NO: 2012930 - RNA, 19 nt, Human
acuuucucuaauaauaaau

SEQ ID NO: 2012931 - RNA, 21 nt, Human
acuuucucuaauaauaaauag

SEQ ID NO: 2012932 - RNA, 23 nt, Human
acuuucucuaauaauaaauaguu

SEQ ID NO: 2012933 - RNA, 21 nt, Human
ucuccuccuuuucacaguucu

SEQ ID NO: 2012934 - RNA, 13 nt, Human
ucucagggccugg

SEQ ID NO: 2012935 - RNA, 12 nt, Human
ucucagggccug

SEQ ID NO: 2012936 - RNA, 16 nt, Human
ucucauuccagaggaa

SEQ ID NO: 2012937 - RNA, 14 nt, Human
ucucauuacuuguu

SEQ ID NO: 2012938 - RNA, 15 nt, Human
ucucagggccugguc

SEQ ID NO: 2012939 - RNA, 14 nt, Human
ucucagggccuggu

SEQ ID NO: 2012940 - RNA, 19 nt, Human
ucucagggccuggucguuu

SEQ ID NO: 2012941 - RNA, 17 nt, Human
ucuccaaaauaaaacuu

SEQ ID NO: 2012942 - RNA, 19 nt, Human
ucuccaaaauaaaacuuuu

SEQ ID NO: 2012943 - RNA, 22 nt, Human
ucuccaaaauaaaacuuuuuaa

SEQ ID NO: 2012944 - RNA, 16 nt, Human
ucuccaggcuguaucc

SEQ ID NO: 2012945 - RNA, 16 nt, Human
acuugccuuugaagag

SEQ ID NO: 2012946 - RNA, 14 nt, Human
acuugccuuugaag

SEQ ID NO: 2012947 - RNA, 15 nt, Human
acuugccuuugaaga

SEQ ID NO: 2012948 - RNA, 14 nt, Human
acuugcucuugaug

SEQ ID NO: 2012949 - RNA, 21 nt, Human
acuuggaugaguuuugggaag

SEQ ID NO: 2012950 - RNA, 14 nt, Human
acuuggaugaguuu

SEQ ID NO: 2012951 - RNA, 15 nt, Human
acuuggaguuugcau

SEQ ID NO: 2012952 - RNA, 16 nt, Human
acuuguggacacagcu

SEQ ID NO: 2012953 - RNA, 17 nt, Human
acuuguggacacagcuc

SEQ ID NO: 2012954 - RNA, 18 nt, Human
acuuguggacacagcucu

SEQ ID NO: 2012955 - RNA, 19 nt, Human
acuugaaccauaguuacug

SEQ ID NO: 2012956 - RNA, 21 nt, Human
acuugaacccgggaggcagag

SEQ ID NO: 2012957 - RNA, 19 nt, Human
acuugagcccagagugaac

SEQ ID NO: 2012958 - RNA, 21 nt, Human
acuugaacccauauuuguaca

SEQ ID NO: 2012959 - RNA, 14 nt, Human
acuugaaccauaaa

SEQ ID NO: 2012960 - RNA, 15 nt, Human
acuugaaccauaaaa

SEQ ID NO: 2012961 - RNA, 16 nt, Human
acuugaaccauaaaau

SEQ ID NO: 2012962 - RNA, 17 nt, Human
acuugaaccauaaaaug

SEQ ID NO: 2012963 - RNA, 19 nt, Human
acuugaaccauaaaauguc

SEQ ID NO: 2012964 - RNA, 20 nt, Human
acuugaaccauaaaaugucc

SEQ ID NO: 2012965 - RNA, 22 nt, Human
acuugaaccauaaaauguccag

SEQ ID NO: 2012966 - RNA, 19 nt, Human
acuugaacccgggaggcag

SEQ ID NO: 2012967 - RNA, 20 nt, Human
acuugaacccgggaggcaga

SEQ ID NO: 2012968 - RNA, 15 nt, Human
acuucuccacccugc

SEQ ID NO: 2012969 - RNA, 16 nt, Human
acuucuccacccugcu

SEQ ID NO: 2012970 - RNA, 21 nt, Human
ucucacagcuccaagaauuuc

SEQ ID NO: 2012971 - RNA, 23 nt, Human
ucucacagacaggaccccugcag

SEQ ID NO: 2012972 - RNA, 14 nt, Human
ucucacagcuaugc

SEQ ID NO: 2012973 - RNA, 17 nt, Human
ucucacagcuaugcaaa

SEQ ID NO: 2012974 - RNA, 18 nt, Human
ucucacagcuaugcaaaa

SEQ ID NO: 2012975 - RNA, 22 nt, Human
ucucacagcuaugcaaaaagcu

SEQ ID NO: 2012976 - RNA, 12 nt, Human
ucucacagacag

SEQ ID NO: 2012977 - RNA, 13 nt, Human
ucucacagacagg

SEQ ID NO: 2012978 - RNA, 14 nt, Human
ucucacagacagga

SEQ ID NO: 2012979 - RNA, 19 nt, Human
ucucacagacaggaccccu

SEQ ID NO: 2012980 - RNA, 20 nt, Human
ucucacagacaggaccccug

SEQ ID NO: 2012981 - RNA, 21 nt, Human
ucucacagacaggaccccugc

SEQ ID NO: 2012982 - RNA, 22 nt, Human
ucucacagacaggaccccugca

SEQ ID NO: 2012983 - RNA, 11 nt, Human
ucucacuccuu

SEQ ID NO: 2012984 - RNA, 17 nt, Human
ucucaccuugguuccug

SEQ ID NO: 2012985 - RNA, 16 nt, Human
acuucagcugacuuuu

SEQ ID NO: 2012986 - RNA, 11 nt, Human
acuucagcuga

SEQ ID NO: 2012987 - RNA, 14 nt, Human
acuucaggcucuuc

SEQ ID NO: 2012988 - RNA, 15 nt, Human
ucuauuucaucagaa

SEQ ID NO: 2012989 - RNA, 21 nt, Human
ucuauuucaucagaacagcug

SEQ ID NO: 2012990 - RNA, 18 nt, Human
ucuauuucccccuuucuu

SEQ ID NO: 2012991 - RNA, 19 nt, Human
ucuauuucccccuuucuuc

SEQ ID NO: 2012992 - RNA, 21 nt, Human
ucuauuucccccuuucuuccu

SEQ ID NO: 2012993 - RNA, 22 nt, Human
ucuauuucccccuuucuuccuc

SEQ ID NO: 2012994 - RNA, 14 nt, Human
acuucuccacccug

SEQ ID NO: 2012995 - RNA, 19 nt, Human
acuucuaaguugaguauau

SEQ ID NO: 2012996 - RNA, 23 nt, Human
acuucuaaguugaguauauuaua

SEQ ID NO: 2012997 - RNA, 14 nt, Human
acuucuaaaacugu

SEQ ID NO: 2012998 - RNA, 15 nt, Human
acuucuaaaacugua

SEQ ID NO: 2012999 - RNA, 16 nt, Human
acuucuaaaacuguac

SEQ ID NO: 2013000 - RNA, 19 nt, Human
acuucuaaaacuguacuuu

SEQ ID NO: 2013001 - RNA, 21 nt, Human
acuucuaaaacuguacuuuga

SEQ ID NO: 2013002 - RNA, 22 nt, Human
acuucuaaaacuguacuuugau

SEQ ID NO: 2013003 - RNA, 23 nt, Human
acuucuaaaacuguacuuugauu

SEQ ID NO: 2013004 - RNA, 13 nt, Human
ucucacuccuuga

SEQ ID NO: 2013005 - RNA, 16 nt, Human
ucucacuauguugccc

SEQ ID NO: 2013006 - RNA, 16 nt, Human
ucucacucugucgccc

SEQ ID NO: 2013007 - RNA, 12 nt, Human
ucucacucuguc

SEQ ID NO: 2013008 - RNA, 15 nt, Human
acuuccugugacuuc

SEQ ID NO: 2013009 - RNA, 14 nt, Human
acuuccuugccagu

SEQ ID NO: 2013010 - RNA, 22 nt, Human
acuucgggaggucgaggcagga

SEQ ID NO: 2013011 - RNA, 18 nt, Human
ucugcagcaauaaagcag

SEQ ID NO: 2013012 - RNA, 20 nt, Human
ucugcacuccccugcugggu

SEQ ID NO: 2013013 - RNA, 14 nt, Human
ucugauuccagcac

SEQ ID NO: 2013014 - RNA, 17 nt, Human
ucugcaggucccuaaua

SEQ ID NO: 2013015 - RNA, 16 nt, Human
ucugcaggucccuaau

SEQ ID NO: 2013016 - RNA, 15 nt, Human
ucugcaggucccuaa

SEQ ID NO: 2013017 - RNA, 17 nt, Human
agaaauuuauaaacuuu

SEQ ID NO: 2013018 - RNA, 16 nt, Human
agaaauuuauaaacuu

SEQ ID NO: 2013019 - RNA, 22 nt, Human
agaaauuaugugccagauuuau

SEQ ID NO: 2013020 - RNA, 21 nt, Human
agaaauuaugugccagauuua

SEQ ID NO: 2013021 - RNA, 13 nt, Human
agaaauuaugugc

SEQ ID NO: 2013022 - RNA, 18 nt, Human
ucugcaggucccuaauaa

SEQ ID NO: 2013023 - RNA, 14 nt, Human
ucugcaggucccua

SEQ ID NO: 2013024 - RNA, 23 nt, Human
ucugaguuccggcaccaguagca

SEQ ID NO: 2013025 - RNA, 19 nt, Human
ucugaguuguuaccccaag

SEQ ID NO: 2013026 - RNA, 23 nt, Human
ucugaguuguuaccccaagcgcc

SEQ ID NO: 2013027 - RNA, 20 nt, Human
ucugagagaggcuaaaaugu

SEQ ID NO: 2013028 - RNA, 21 nt, Human
ucugagagaggcuaaaauguu

SEQ ID NO: 2013029 - RNA, 22 nt, Human
ucugagagaggcuaaaauguuu

SEQ ID NO: 2013030 - RNA, 23 nt, Human
ucugagagaggcuaaaauguuuu

SEQ ID NO: 2013031 - RNA, 14 nt, Human
ucugagagauuugg

SEQ ID NO: 2013032 - RNA, 15 nt, Human
ucugagagcaaacug

SEQ ID NO: 2013033 - RNA, 16 nt, Human
ucugagagcaaacugg

SEQ ID NO: 2013034 - RNA, 23 nt, Human
ucugagacucgcgacaaugcaaa

SEQ ID NO: 2013035 - RNA, 22 nt, Human
ucugagacucgcgacaaugcaa

SEQ ID NO: 2013036 - RNA, 14 nt, Human
ucugaccuuaaaug

SEQ ID NO: 2013037 - RNA, 15 nt, Human
ucugacgggauuugu

SEQ ID NO: 2013038 - RNA, 13 nt, Human
ucugauacagaaa

SEQ ID NO: 2013039 - RNA, 23 nt, Human
ucugaugcaagcaagaaacacug

SEQ ID NO: 2013040 - RNA, 19 nt, Human
ucugcacuccccugcuggg

SEQ ID NO: 2013041 - RNA, 18 nt, Human
ucugcacuccccugcugg

SEQ ID NO: 2013042 - RNA, 18 nt, Human
ucugauucccaagcucug

SEQ ID NO: 2013043 - RNA, 15 nt, Human
ucugauguauuuugu

SEQ ID NO: 2013044 - RNA, 21 nt, Human
ucugauguauuuugugaguuu

SEQ ID NO: 2013045 - RNA, 20 nt, Human
agaaauaucugaaaauguau

SEQ ID NO: 2013046 - RNA, 19 nt, Human
agaaauaucugaaaaugua

SEQ ID NO: 2013047 - RNA, 14 nt, Human
agaaauauaauuga

SEQ ID NO: 2013048 - RNA, 17 nt, Human
agaaaugaaaaaauaua

SEQ ID NO: 2013049 - RNA, 15 nt, Human
agaaaucuaaaaaac

SEQ ID NO: 2013050 - RNA, 12 nt, Human
agaaaucuaaaa

SEQ ID NO: 2013051 - RNA, 14 nt, Human
agaaagaaaaucag

SEQ ID NO: 2013052 - RNA, 13 nt, Human
agaaacuucgccu

SEQ ID NO: 2013053 - RNA, 13 nt, Human
agaaacuuguucu

SEQ ID NO: 2013054 - RNA, 23 nt, Human
agaaacuuguucuuccaaagcag

SEQ ID NO: 2013055 - RNA, 20 nt, Human
agaaagccuuucauuuugcu

SEQ ID NO: 2013056 - RNA, 22 nt, Human
agaaagccuuucauuuugcuuu

SEQ ID NO: 2013057 - RNA, 14 nt, Human
agaaaugaaagcag

SEQ ID NO: 2013058 - RNA, 16 nt, Human
agaaaugaaaaaauau

SEQ ID NO: 2013059 - RNA, 23 nt, Human
agaaaugaaaaaauauauaucaa

SEQ ID NO: 2013060 - RNA, 18 nt, Human
agaaaugaaaaaauauau

SEQ ID NO: 2013061 - RNA, 14 nt, Human
ucugaagauuguuu

SEQ ID NO: 2013062 - RNA, 18 nt, Human
ucugaagauuguuuaucu

SEQ ID NO: 2013063 - RNA, 19 nt, Human
ucugaagauuguuuaucua

SEQ ID NO: 2013064 - RNA, 12 nt, Human
ucugacacacag

SEQ ID NO: 2013065 - RNA, 16 nt, Human
ucugacaacagacuuc

SEQ ID NO: 2013066 - RNA, 15 nt, Human
ucugacaacagacuu

SEQ ID NO: 2013067 - RNA, 15 nt, Human
ucugaagucacugca

SEQ ID NO: 2013068 - RNA, 16 nt, Human
ucugaagucacugcac

SEQ ID NO: 2013069 - RNA, 18 nt, Human
ucugaagucacugcacag

SEQ ID NO: 2013070 - RNA, 19 nt, Human
ucugaauuuaucuuugaua

SEQ ID NO: 2013071 - RNA, 21 nt, Human
ucugaauuuaucuuugauaac

SEQ ID NO: 2013072 - RNA, 20 nt, Human
ucugaauuggaaugcacuca

SEQ ID NO: 2013073 - RNA, 17 nt, Human
ucugaauuuaucuuuga

SEQ ID NO: 2013074 - RNA, 19 nt, Human
ucucucacagacaggaccc

SEQ ID NO: 2013075 - RNA, 23 nt, Human
ucucucacagacaggaccccugc

SEQ ID NO: 2013076 - RNA, 14 nt, Human
ucucucauuugugu

SEQ ID NO: 2013077 - RNA, 18 nt, Human
ucucuccaaggugugccc

SEQ ID NO: 2013078 - RNA, 19 nt, Human
ucucuccagccccuggaug

SEQ ID NO: 2013079 - RNA, 18 nt, Human
ucucuccagccccuggau

SEQ ID NO: 2013080 - RNA, 16 nt, Human
ucucuccagccccugg

SEQ ID NO: 2013081 - RNA, 17 nt, Human
ucucuccagccccugga

SEQ ID NO: 2013082 - RNA, 15 nt, Human
acuuugaccucugca

SEQ ID NO: 2013083 - RNA, 16 nt, Human
acuuugaccucugcag

SEQ ID NO: 2013084 - RNA, 18 nt, Human
acuuugaccucugcagca

SEQ ID NO: 2013085 - RNA, 17 nt, Human
ucucucacuuguuuuau

SEQ ID NO: 2013086 - RNA, 15 nt, Human
ucucucacagacagg

SEQ ID NO: 2013087 - RNA, 17 nt, Human
ucucucacagacaggac

SEQ ID NO: 2013088 - RNA, 15 nt, Human
ucucucacuccuuga

SEQ ID NO: 2013089 - RNA, 13 nt, Human
ucucucacuccuu

SEQ ID NO: 2013090 - RNA, 17 nt, Human
ucucugcccuccaagac

SEQ ID NO: 2013091 - RNA, 16 nt, Human
ucucugcccuccaaga

SEQ ID NO: 2013092 - RNA, 15 nt, Human
ucucugcccuccaag

SEQ ID NO: 2013093 - RNA, 11 nt, Human
ucucugcccuc

SEQ ID NO: 2013094 - RNA, 14 nt, Human
ucucuccuguaccu

SEQ ID NO: 2013095 - RNA, 16 nt, Human
ucucuccuguaccucu

SEQ ID NO: 2013096 - RNA, 17 nt, Human
ucucuccuguaccucuu

SEQ ID NO: 2013097 - RNA, 12 nt, Human
ucucuggccuuc

SEQ ID NO: 2013098 - RNA, 19 nt, Human
ucucuggaauuugaaacac

SEQ ID NO: 2013099 - RNA, 13 nt, Human
ucucugcuggacg

SEQ ID NO: 2013100 - RNA, 15 nt, Human
ucucuggaauuugaa

SEQ ID NO: 2013101 - RNA, 21 nt, Human
ucucuggccuucggccuccau

SEQ ID NO: 2013102 - RNA, 22 nt, Human
ucucuggccuucggccuccauc

SEQ ID NO: 2013103 - RNA, 23 nt, Human
ucucuggccuucggccuccaucc

SEQ ID NO: 2013104 - RNA, 17 nt, Human
ucucuugagccugggag

SEQ ID NO: 2013105 - RNA, 18 nt, Human
ucucuugagccugggagg

SEQ ID NO: 2013106 - RNA, 16 nt, Human
ucucuugauucauaau

SEQ ID NO: 2013107 - RNA, 14 nt, Human
ucucuugauucaua

SEQ ID NO: 2013108 - RNA, 22 nt, Human
ucucuugccucagcuuccccag

SEQ ID NO: 2013109 - RNA, 13 nt, Human
ucucuugccucag

SEQ ID NO: 2013110 - RNA, 13 nt, Human
agaaaaagaaaaa

SEQ ID NO: 2013111 - RNA, 20 nt, Human
ucucuuuaaugucacaggca

SEQ ID NO: 2013112 - RNA, 21 nt, Human
ucucuuuaaugucacaggcag

SEQ ID NO: 2013113 - RNA, 19 nt, Human
agaaaacuuguauuaugug

SEQ ID NO: 2013114 - RNA, 21 nt, Human
agaaaacuuguauuaugugug

SEQ ID NO: 2013115 - RNA, 12 nt, Human
agaaaaagcaaa

SEQ ID NO: 2013116 - RNA, 16 nt, Human
agaaaaagcaaaaggc

SEQ ID NO: 2013117 - RNA, 17 nt, Human
agaaaaagcaaaaggca

SEQ ID NO: 2013118 - RNA, 17 nt, Human
agaaaaaggaugcacag

SEQ ID NO: 2013119 - RNA, 19 nt, Human
agaaaagacgcaccagccc

SEQ ID NO: 2013120 - RNA, 17 nt, Human
agaaaagaaaaaaaaag

SEQ ID NO: 2013121 - RNA, 18 nt, Human
agaaaagaaaaaaaaaga

SEQ ID NO: 2013122 - RNA, 17 nt, Human
agaaaacuuuuaugcaa

SEQ ID NO: 2013123 - RNA, 12 nt, Human
agaaaacuuugu

SEQ ID NO: 2013124 - RNA, 14 nt, Human
agaaaacuuuguua

SEQ ID NO: 2013125 - RNA, 20 nt, Human
agaaaacuuuguuaggccaa

SEQ ID NO: 2013126 - RNA, 9 nt, Human
agaaaagaa

SEQ ID NO: 2013127 - RNA, 10 nt, Human
agaaaagaaa

SEQ ID NO: 2013128 - RNA, 11 nt, Human
agaaaagaaaa

SEQ ID NO: 2013129 - RNA, 12 nt, Human
agaaaagaaaaa

SEQ ID NO: 2013130 - RNA, 13 nt, Human
agaaaagaaaaaa

SEQ ID NO: 2013131 - RNA, 17 nt, Human
agaaacuaaaacaaaua

SEQ ID NO: 2013132 - RNA, 15 nt, Human
agaaacuccaugaug

SEQ ID NO: 2013133 - RNA, 16 nt, Human
agaaacagcuaugaga

SEQ ID NO: 2013134 - RNA, 23 nt, Human
acuggcuugaauuggugacauuu

SEQ ID NO: 2013135 - RNA, 23 nt, Human
ucgcuccaacuccaacauccacu

SEQ ID NO: 2013136 - RNA, 18 nt, Human
ucgcuauugucaccaggg

SEQ ID NO: 2013137 - RNA, 14 nt, Human
ucgcuccaacucca

SEQ ID NO: 2013138 - RNA, 23 nt, Human
ucgcuagcauuucccaacacaaa

SEQ ID NO: 2013139 - RNA, 17 nt, Human
ucgcuacauuuccgcca

SEQ ID NO: 2013140 - RNA, 18 nt, Human
ucgagcaugccuggaugg

SEQ ID NO: 2013141 - RNA, 16 nt, Human
ucgagcaugccuggau

SEQ ID NO: 2013142 - RNA, 19 nt, Human
ucgcgacaaugcaaaccau

SEQ ID NO: 2013143 - RNA, 19 nt, Human
ucgagcuccccccaggucu

SEQ ID NO: 2013144 - RNA, 16 nt, Human
ucgcgacaaugcaaac

SEQ ID NO: 2013145 - RNA, 13 nt, Human
ucgaggacaggga

SEQ ID NO: 2013146 - RNA, 22 nt, Human
uccuuuagcgcccaguugggug

SEQ ID NO: 2013147 - RNA, 23 nt, Human
uccuuuagcgcccaguugggugg

SEQ ID NO: 2013148 - RNA, 12 nt, Human
uccuuuagaaac

SEQ ID NO: 2013149 - RNA, 13 nt, Human
uccuuuagaaaca

SEQ ID NO: 2013150 - RNA, 17 nt, Human
uccuuucugaucuucac

SEQ ID NO: 2013151 - RNA, 12 nt, Human
uccuuucuugau

SEQ ID NO: 2013152 - RNA, 11 nt, Human
ucgagaauugu

SEQ ID NO: 2013153 - RNA, 14 nt, Human
ucgacuugcauuuu

SEQ ID NO: 2013154 - RNA, 13 nt, Human
uccuugucaguug

SEQ ID NO: 2013155 - RNA, 14 nt, Human
uccuuuaauaugaa

SEQ ID NO: 2013156 - RNA, 14 nt, Human
uccuuguguuacua

SEQ ID NO: 2013157 - RNA, 23 nt, Human
uccuuguguuacuaaguuuuuau

SEQ ID NO: 2013158 - RNA, 15 nt, Human
uccuuuaauaugaaa

SEQ ID NO: 2013159 - RNA, 18 nt, Human
uccuuuaauaugaaauuu

SEQ ID NO: 2013160 - RNA, 15 nt, Human
uccuuuagcgcccag

SEQ ID NO: 2013161 - RNA, 19 nt, Human
uccuuuagcgcccaguugg

SEQ ID NO: 2013162 - RNA, 23 nt, Human
acuggccaguggcuggaucugug

SEQ ID NO: 2013163 - RNA, 15 nt, Human
uccuucagugccuua

SEQ ID NO: 2013164 - RNA, 14 nt, Human
uccuucagugccuu

SEQ ID NO: 2013165 - RNA, 14 nt, Human
acuggccucugcug

SEQ ID NO: 2013166 - RNA, 17 nt, Human
acuggccgcgggggcag

SEQ ID NO: 2013167 - RNA, 15 nt, Human
uccuucccacucugu

SEQ ID NO: 2013168 - RNA, 19 nt, Human
uccuucccacucuucucau

SEQ ID NO: 2013169 - RNA, 14 nt, Human
uccuucccacucuu

SEQ ID NO: 2013170 - RNA, 17 nt, Human
uccuucccacucuucuc

SEQ ID NO: 2013171 - RNA, 17 nt, Human
uccuucagugccuuaug

SEQ ID NO: 2013172 - RNA, 16 nt, Human
uccuucagugccuuau

SEQ ID NO: 2013173 - RNA, 15 nt, Human
acugcauguuuguga

SEQ ID NO: 2013174 - RNA, 16 nt, Human
acugcauguuugugau

SEQ ID NO: 2013175 - RNA, 23 nt, Human
acugcauccuccgccucccgggu

SEQ ID NO: 2013176 - RNA, 22 nt, Human
acugcaucaagaugugacaugu

SEQ ID NO: 2013177 - RNA, 20 nt, Human
acugcaucaagaugugacau

SEQ ID NO: 2013178 - RNA, 17 nt, Human
acugcauccuccgccuc

SEQ ID NO: 2013179 - RNA, 20 nt, Human
acugcauccuccgccucccg

SEQ ID NO: 2013180 - RNA, 16 nt, Human
acugcauaugaaagga

SEQ ID NO: 2013181 - RNA, 22 nt, Human
uccuagaaauuccccacccuga

SEQ ID NO: 2013182 - RNA, 21 nt, Human
uccuagaaauuccccacccug

SEQ ID NO: 2013183 - RNA, 16 nt, Human
uccuacuuuuaaagaa

SEQ ID NO: 2013184 - RNA, 17 nt, Human
uccuacuuuuaaagaau

SEQ ID NO: 2013185 - RNA, 18 nt, Human
uccuacuuuuaaagaauu

SEQ ID NO: 2013186 - RNA, 14 nt, Human
uccuagagaacugu

SEQ ID NO: 2013187 - RNA, 18 nt, Human
uccuagacagguguuuau

SEQ ID NO: 2013188 - RNA, 18 nt, Human
acugccucccccaggguc

SEQ ID NO: 2013189 - RNA, 21 nt, Human
acugccuccccaaggcccccu

SEQ ID NO: 2013190 - RNA, 13 nt, Human
acugccuccccca

SEQ ID NO: 2013191 - RNA, 21 nt, Human
acugccuauuuuaauaaacac

SEQ ID NO: 2013192 - RNA, 16 nt, Human
acugccuauuuuaaua

SEQ ID NO: 2013193 - RNA, 17 nt, Human
acugcauucuucugauc

SEQ ID NO: 2013194 - RNA, 16 nt, Human
acugcauucuucugau

SEQ ID NO: 2013195 - RNA, 14 nt, Human
acugccucuuccuc

SEQ ID NO: 2013196 - RNA, 15 nt, Human
acugccucuuccucc

SEQ ID NO: 2013197 - RNA, 13 nt, Human
acugccugccuua

SEQ ID NO: 2013198 - RNA, 14 nt, Human
acugccugccuuaa

SEQ ID NO: 2013199 - RNA, 15 nt, Human
acugccugccuuaag

SEQ ID NO: 2013200 - RNA, 18 nt, Human
acugccugccuuaaguga

SEQ ID NO: 2013201 - RNA, 21 nt, Human
acugcuaaggauuagucccug

SEQ ID NO: 2013202 - RNA, 16 nt, Human
acugcuaagaauauuu

SEQ ID NO: 2013203 - RNA, 18 nt, Human
acugcuaagaauauuuga

SEQ ID NO: 2013204 - RNA, 18 nt, Human
acugcuuaacuucacaua

SEQ ID NO: 2013205 - RNA, 13 nt, Human
acugcucucaccu

SEQ ID NO: 2013206 - RNA, 21 nt, Human
acugcucucaccuugguuccu

SEQ ID NO: 2013207 - RNA, 22 nt, Human
acugcucucaccuugguuccug

SEQ ID NO: 2013208 - RNA, 14 nt, Human
acugcuggcugccu

SEQ ID NO: 2013209 - RNA, 15 nt, Human
acugcuggcugccuu

SEQ ID NO: 2013210 - RNA, 11 nt, Human
acugcucucac

SEQ ID NO: 2013211 - RNA, 19 nt, Human
acugcuccugagcccccag

SEQ ID NO: 2013212 - RNA, 20 nt, Human
acugcuccugagcccccagc

SEQ ID NO: 2013213 - RNA, 21 nt, Human
acugcuccugagcccccagcu

SEQ ID NO: 2013214 - RNA, 22 nt, Human
acugcuccugagcccccagcuu

SEQ ID NO: 2013215 - RNA, 13 nt, Human
acugcuccugagc

SEQ ID NO: 2013216 - RNA, 15 nt, Human
acugcuccugagccc

SEQ ID NO: 2013217 - RNA, 16 nt, Human
acugcuccugagcccc

SEQ ID NO: 2013218 - RNA, 17 nt, Human
acugcuccugagccccc

SEQ ID NO: 2013219 - RNA, 18 nt, Human
acugcuccugagccccca

SEQ ID NO: 2013220 - RNA, 20 nt, Human
acugcuuaacuucacauauu

SEQ ID NO: 2013221 - RNA, 17 nt, Human
acugcuuccagugaggc

SEQ ID NO: 2013222 - RNA, 21 nt, Human
acugcuugugaaaggaaagag

SEQ ID NO: 2013223 - RNA, 17 nt, Human
acugcuuucuuucguuu

SEQ ID NO: 2013224 - RNA, 23 nt, Human
acugcuuucuuucguuuguuugu

SEQ ID NO: 2013225 - RNA, 14 nt, Human
acugcuuuuggucu

SEQ ID NO: 2013226 - RNA, 14 nt, Human
acugcuuugagaaa

SEQ ID NO: 2013227 - RNA, 15 nt, Human
acuggauuaaacuua

SEQ ID NO: 2013228 - RNA, 21 nt, Human
acuggcaaugguaguuucugu

SEQ ID NO: 2013229 - RNA, 23 nt, Human
acuggcaaugguaguuucugugg

SEQ ID NO: 2013230 - RNA, 16 nt, Human
acuggccacaguuguu

SEQ ID NO: 2013231 - RNA, 12 nt, Human
acugugugcuca

SEQ ID NO: 2013232 - RNA, 17 nt, Human
acuguguauauuugauu

SEQ ID NO: 2013233 - RNA, 18 nt, Human
acuguguauauuugauuu

SEQ ID NO: 2013234 - RNA, 19 nt, Human
acuguguauauuugauuua

SEQ ID NO: 2013235 - RNA, 13 nt, Human
acuguguauauuu

SEQ ID NO: 2013236 - RNA, 15 nt, Human
acuguguauauuuga

SEQ ID NO: 2013237 - RNA, 16 nt, Human
acuguguauauuugau

SEQ ID NO: 2013238 - RNA, 21 nt, Human
acugugugcucaggagcccug

SEQ ID NO: 2013239 - RNA, 20 nt, Human
acugugugcucaggagcccu

SEQ ID NO: 2013240 - RNA, 19 nt, Human
acugugugcucaggagccc

SEQ ID NO: 2013241 - RNA, 15 nt, Human
acugugugcucagga

SEQ ID NO: 2013242 - RNA, 19 nt, Human
acugugguagguguuugaa

SEQ ID NO: 2013243 - RNA, 16 nt, Human
acugggagaaaugaaa

SEQ ID NO: 2013244 - RNA, 16 nt, Human
acugggaacagaacuc

SEQ ID NO: 2013245 - RNA, 18 nt, Human
acuguccuacccacccuc

SEQ ID NO: 2013246 - RNA, 23 nt, Human
acuguccuacccacccuccuuuc

SEQ ID NO: 2013247 - RNA, 17 nt, Human
acuguccuacccacccu

SEQ ID NO: 2013248 - RNA, 11 nt, Human
acuguggagac

SEQ ID NO: 2013249 - RNA, 15 nt, Human
acuguggagacugcu

SEQ ID NO: 2013250 - RNA, 17 nt, Human
acuguggagacugcucc

SEQ ID NO: 2013251 - RNA, 22 nt, Human
acuguggagacugcuccugagc

SEQ ID NO: 2013252 - RNA, 22 nt, Human
ucuaaaacuguacuuugauuca

SEQ ID NO: 2013253 - RNA, 22 nt, Human
ucuaaaauauuuaugaagaaaa

SEQ ID NO: 2013254 - RNA, 19 nt, Human
ucuaaaaauauacauguuu

SEQ ID NO: 2013255 - RNA, 18 nt, Human
ucuaaaaauaacuguaau

SEQ ID NO: 2013256 - RNA, 14 nt, Human
ucuaaaaauauaca

SEQ ID NO: 2013257 - RNA, 15 nt, Human
ucuaaaaauauacau

SEQ ID NO: 2013258 - RNA, 12 nt, Human
ucuaaaacugua

SEQ ID NO: 2013259 - RNA, 15 nt, Human
ucuaaaacuguacuu

SEQ ID NO: 2013260 - RNA, 18 nt, Human
ucuaaaacuguacuuuga

SEQ ID NO: 2013261 - RNA, 19 nt, Human
ucuaaaacuguacuuugau

SEQ ID NO: 2013262 - RNA, 16 nt, Human
ucguaaaauuaagaaa

SEQ ID NO: 2013263 - RNA, 17 nt, Human
ucguaaacaucucagag

SEQ ID NO: 2013264 - RNA, 22 nt, Human
ucguuuucaaaauuguuacaaa

SEQ ID NO: 2013265 - RNA, 17 nt, Human
ucguuugaaucacagua

SEQ ID NO: 2013266 - RNA, 13 nt, Human
ucguaaaauuaag

SEQ ID NO: 2013267 - RNA, 16 nt, Human
ucgguguccccaccau

SEQ ID NO: 2013268 - RNA, 19 nt, Human
ucgguguccccaccaucug

SEQ ID NO: 2013269 - RNA, 20 nt, Human
ucgguguccccaccaucugc

SEQ ID NO: 2013270 - RNA, 21 nt, Human
ucgguguccccaccaucugcu

SEQ ID NO: 2013271 - RNA, 15 nt, Human
ucgguuaacaaauaa

SEQ ID NO: 2013272 - RNA, 20 nt, Human
ucgguuaacaaauaacaacu

SEQ ID NO: 2013273 - RNA, 17 nt, Human
ucggugccaucagugcc

SEQ ID NO: 2013274 - RNA, 21 nt, Human
ucgggaggucgaggcaggagg

SEQ ID NO: 2013275 - RNA, 19 nt, Human
ucgggaggucgaggcagga

SEQ ID NO: 2013276 - RNA, 17 nt, Human
ucgggaggucgaggcag

SEQ ID NO: 2013277 - RNA, 18 nt, Human
ucggcucacugcauccuc

SEQ ID NO: 2013278 - RNA, 22 nt, Human
ucggcuccaguccccagaacuc

SEQ ID NO: 2013279 - RNA, 12 nt, Human
ucgggcaugaca

SEQ ID NO: 2013280 - RNA, 11 nt, Human
ucgggcaugac

SEQ ID NO: 2013281 - RNA, 15 nt, Human
ucgggccccaccugc

SEQ ID NO: 2013282 - RNA, 17 nt, Human
ucgggccccaccugcag

SEQ ID NO: 2013283 - RNA, 20 nt, Human
ucgggccccaccugcagcuc

SEQ ID NO: 2013284 - RNA, 23 nt, Human
ucgggggggacccuccaaggcca

SEQ ID NO: 2013285 - RNA, 19 nt, Human
ucgggggggacccuccaag

SEQ ID NO: 2013286 - RNA, 15 nt, Human
ucgguacccaccaca

SEQ ID NO: 2013287 - RNA, 23 nt, Human
acuuaccugaagggguuuucuug

SEQ ID NO: 2013288 - RNA, 19 nt, Human
acuuaccugaguugaagag

SEQ ID NO: 2013289 - RNA, 20 nt, Human
acuuaccugaguugaagagg

SEQ ID NO: 2013290 - RNA, 13 nt, Human
acuuaaucuaaau

SEQ ID NO: 2013291 - RNA, 23 nt, Human
acuuaauaaucaagagccuuaaa

SEQ ID NO: 2013292 - RNA, 23 nt, Human
acuuaauaucuucauuucuaaau

SEQ ID NO: 2013293 - RNA, 15 nt, Human
acuuaaucuaaaugg

SEQ ID NO: 2013294 - RNA, 16 nt, Human
acuuaaucuaaaugga

SEQ ID NO: 2013295 - RNA, 14 nt, Human
acuucagcucuguu

SEQ ID NO: 2013296 - RNA, 18 nt, Human
acuuauaaagaagguugg

SEQ ID NO: 2013297 - RNA, 13 nt, Human
acuuaguuuugca

SEQ ID NO: 2013298 - RNA, 17 nt, Human
acuuaguuuugcauagu

SEQ ID NO: 2013299 - RNA, 16 nt, Human
acuuagaaauugcauu

SEQ ID NO: 2013300 - RNA, 21 nt, Human
acuuagaaucccuguguuaau

SEQ ID NO: 2013301 - RNA, 22 nt, Human
acuuagagcuuuuuuuuuuuaa

SEQ ID NO: 2013302 - RNA, 23 nt, Human
acuuagagcuuuuuuuuuuuaau

SEQ ID NO: 2013303 - RNA, 18 nt, Human
acuuagaaucccuguguu

SEQ ID NO: 2013304 - RNA, 19 nt, Human
acuuagaaucccuguguua

SEQ ID NO: 2013305 - RNA, 20 nt, Human
acuuagaaucccuguguuaa

SEQ ID NO: 2013306 - RNA, 22 nt, Human
acuuagaaucccuguguuaauu

SEQ ID NO: 2013307 - RNA, 12 nt, Human
acuguugcccag

SEQ ID NO: 2013308 - RNA, 13 nt, Human
acuguugcccagg

SEQ ID NO: 2013309 - RNA, 14 nt, Human
acuguugcccaggc

SEQ ID NO: 2013310 - RNA, 17 nt, Human
acuguugcccaggcugg

SEQ ID NO: 2013311 - RNA, 18 nt, Human
acuguugcccaggcuggc

SEQ ID NO: 2013312 - RNA, 17 nt, Human
acuuaaauaaugugaaa

SEQ ID NO: 2013313 - RNA, 18 nt, Human
acuuaaauaaugugaaac

SEQ ID NO: 2013314 - RNA, 16 nt, Human
acuuaaauaaugugaa

SEQ ID NO: 2013315 - RNA, 15 nt, Human
acuuaaauaauguga

SEQ ID NO: 2013316 - RNA, 12 nt, Human
acuguuguauaa

SEQ ID NO: 2013317 - RNA, 13 nt, Human
acuuaauaaucaa

SEQ ID NO: 2013318 - RNA, 15 nt, Human
acuuaauaaucaaga

SEQ ID NO: 2013319 - RNA, 19 nt, Human
acuuaauaaucaagagccu

SEQ ID NO: 2013320 - RNA, 22 nt, Human
acuuaauaaucaagagccuuaa

SEQ ID NO: 2013321 - RNA, 13 nt, Human
acuguuguauaaa

SEQ ID NO: 2013322 - RNA, 12 nt, Human
acuguuauucuu

SEQ ID NO: 2013323 - RNA, 14 nt, Human
acuguuagaaugua

SEQ ID NO: 2013324 - RNA, 15 nt, Human
acuguuagaauguaa

SEQ ID NO: 2013325 - RNA, 13 nt, Human
acuguuaucauuu

SEQ ID NO: 2013326 - RNA, 14 nt, Human
acuguuaucauuuu

SEQ ID NO: 2013327 - RNA, 13 nt, Human
acuguuagaaugu

SEQ ID NO: 2013328 - RNA, 16 nt, Human
acuguuaccauuggaa

SEQ ID NO: 2013329 - RNA, 17 nt, Human
acuguuaccauuggaaa

SEQ ID NO: 2013330 - RNA, 18 nt, Human
acuguuaccauuggaaau

SEQ ID NO: 2013331 - RNA, 19 nt, Human
acuguuaccauuggaaauu

SEQ ID NO: 2013332 - RNA, 21 nt, Human
acuguuaccauuggaaauuuc

SEQ ID NO: 2013333 - RNA, 22 nt, Human
acuguuaccauuggaaauuuca

SEQ ID NO: 2013334 - RNA, 14 nt, Human
acuguuacuugaua

SEQ ID NO: 2013335 - RNA, 14 nt, Human
ucuaccaacuuuca

SEQ ID NO: 2013336 - RNA, 17 nt, Human
ucuaccaacuuucaaga

SEQ ID NO: 2013337 - RNA, 18 nt, Human
ucuaccaacuuucaagaa

SEQ ID NO: 2013338 - RNA, 22 nt, Human
ucuaccaacuuucaagaacuug

SEQ ID NO: 2013339 - RNA, 16 nt, Human
acuguucccugaggug

SEQ ID NO: 2013340 - RNA, 19 nt, Human
acuguucccugagguggga

SEQ ID NO: 2013341 - RNA, 13 nt, Human
acuguuauucuuu

SEQ ID NO: 2013342 - RNA, 15 nt, Human
acuguuauucuuugc

SEQ ID NO: 2013343 - RNA, 16 nt, Human
acuguuauucuuugca

SEQ ID NO: 2013344 - RNA, 18 nt, Human
acuguuauucuuugcacu

SEQ ID NO: 2013345 - RNA, 14 nt, Human
acuguucucugccc

SEQ ID NO: 2013346 - RNA, 19 nt, Human
acuguuauucuuugcacuu

SEQ ID NO: 2013347 - RNA, 20 nt, Human
acuguucucugcccuccaag

SEQ ID NO: 2013348 - RNA, 15 nt, Human
acuguucucugcccu

SEQ ID NO: 2013349 - RNA, 21 nt, Human
acuguucucugcccuccaaga

SEQ ID NO: 2013350 - RNA, 15 nt, Human
ucuaaagcugccagc

SEQ ID NO: 2013351 - RNA, 16 nt, Human
ucuaaagcugccagcc

SEQ ID NO: 2013352 - RNA, 11 nt, Human
ucuaaggacaa

SEQ ID NO: 2013353 - RNA, 14 nt, Human
ucuaaagcugccag

SEQ ID NO: 2013354 - RNA, 13 nt, Human
ucuaaagcugcca

SEQ ID NO: 2013355 - RNA, 20 nt, Human
ucuaaagccauuguaguccu

SEQ ID NO: 2013356 - RNA, 15 nt, Human
acuccuccuagccac

SEQ ID NO: 2013357 - RNA, 16 nt, Human
acuccuccuagccacc

SEQ ID NO: 2013358 - RNA, 18 nt, Human
acuccuccuagccaccca

SEQ ID NO: 2013359 - RNA, 14 nt, Human
acuccuccuagcca

SEQ ID NO: 2013360 - RNA, 13 nt, Human
acuccuccuagcc

SEQ ID NO: 2013361 - RNA, 13 nt, Human
acuccagccuggg

SEQ ID NO: 2013362 - RNA, 12 nt, Human
acuccagccugg

SEQ ID NO: 2013363 - RNA, 23 nt, Human
acuccagaauuucccaaagcagu

SEQ ID NO: 2013364 - RNA, 17 nt, Human
acuccugcaggcagcca

SEQ ID NO: 2013365 - RNA, 19 nt, Human
acuccugcaggcagccagg

SEQ ID NO: 2013366 - RNA, 18 nt, Human
acuccugcaggcagccag

SEQ ID NO: 2013367 - RNA, 14 nt, Human
acuccucuguccag

SEQ ID NO: 2013368 - RNA, 13 nt, Human
acuccucugucca

SEQ ID NO: 2013369 - RNA, 17 nt, Human
acuccagaauuucccaa

SEQ ID NO: 2013370 - RNA, 15 nt, Human
acuccagaauuuccc

SEQ ID NO: 2013371 - RNA, 20 nt, Human
acuccagaaaugucccuuuc

SEQ ID NO: 2013372 - RNA, 23 nt, Human
acuccagaaaugucccuuucuuc

SEQ ID NO: 2013373 - RNA, 15 nt, Human
acucauugaccugag

SEQ ID NO: 2013374 - RNA, 13 nt, Human
acucaugugauuu

SEQ ID NO: 2013375 - RNA, 18 nt, Human
acucagaaacuccaugau

SEQ ID NO: 2013376 - RNA, 23 nt, Human
acucacuggggaacguucucuuu

SEQ ID NO: 2013377 - RNA, 19 nt, Human
acucacuggugguuuuccg

SEQ ID NO: 2013378 - RNA, 14 nt, Human
acucauugaccuga

SEQ ID NO: 2013379 - RNA, 15 nt, Human
acucauucuucugua

SEQ ID NO: 2013380 - RNA, 14 nt, Human
acucauguuaauug

SEQ ID NO: 2013381 - RNA, 17 nt, Human
ucccuuacgugaguccu

SEQ ID NO: 2013382 - RNA, 19 nt, Human
ucccuuaagaaugaguuuc

SEQ ID NO: 2013383 - RNA, 22 nt, Human
ucccuuaagaaugaguuucuua

SEQ ID NO: 2013384 - RNA, 18 nt, Human
ucccuuaagaaugaguuu

SEQ ID NO: 2013385 - RNA, 20 nt, Human
ucccuguguuaauuuaaguu

SEQ ID NO: 2013386 - RNA, 17 nt, Human
ucccugguaagaaaaag

SEQ ID NO: 2013387 - RNA, 21 nt, Human
ucccuggguuagacugccagc

SEQ ID NO: 2013388 - RNA, 22 nt, Human
ucccuggguuagacugccagcu

SEQ ID NO: 2013389 - RNA, 23 nt, Human
ucccuggguuagacugccagcuc

SEQ ID NO: 2013390 - RNA, 14 nt, Human
ucccuggggugggg

SEQ ID NO: 2013391 - RNA, 20 nt, Human
ucccuggguuagacugccag

SEQ ID NO: 2013392 - RNA, 21 nt, Human
acuccugcaggcagccaggcc

SEQ ID NO: 2013393 - RNA, 12 nt, Human
ucccugucccag

SEQ ID NO: 2013394 - RNA, 15 nt, Human
ucccugguggcagcu

SEQ ID NO: 2013395 - RNA, 16 nt, Human
uccuagaaauucccca

SEQ ID NO: 2013396 - RNA, 14 nt, Human
uccuacuuccccuu

SEQ ID NO: 2013397 - RNA, 17 nt, Human
uccuacucuucucucug

SEQ ID NO: 2013398 - RNA, 18 nt, Human
uccuacucuucucucugc

SEQ ID NO: 2013399 - RNA, 20 nt, Human
uccuacucuucucucugcuc

SEQ ID NO: 2013400 - RNA, 23 nt, Human
uccuacucuucucucugcucuga

SEQ ID NO: 2013401 - RNA, 13 nt, Human
uccuaacccuggc

SEQ ID NO: 2013402 - RNA, 19 nt, Human
uccuaaauauauuuuaaga

SEQ ID NO: 2013403 - RNA, 17 nt, Human
uccggucccugucccag

SEQ ID NO: 2013404 - RNA, 14 nt, Human
uccgggucuuccua

SEQ ID NO: 2013405 - RNA, 12 nt, Human
ucccuuuuccuu

SEQ ID NO: 2013406 - RNA, 14 nt, Human
ucccuuuuccauga

SEQ ID NO: 2013407 - RNA, 16 nt, Human
ucccuuucuucucccc

SEQ ID NO: 2013408 - RNA, 21 nt, Human
uccgggacguggcaccuccuc

SEQ ID NO: 2013409 - RNA, 15 nt, Human
uccggggccagcucc

SEQ ID NO: 2013410 - RNA, 16 nt, Human
uccggggccagcuccg

SEQ ID NO: 2013411 - RNA, 14 nt, Human
ucccucuuucccuc

SEQ ID NO: 2013412 - RNA, 20 nt, Human
ucccucuuucccucccuucc

SEQ ID NO: 2013413 - RNA, 18 nt, Human
ucccucuuucccucccuu

SEQ ID NO: 2013414 - RNA, 20 nt, Human
ucccugaaggaaccaaagcg

SEQ ID NO: 2013415 - RNA, 21 nt, Human
ucccucuuucccucccuuccu

SEQ ID NO: 2013416 - RNA, 15 nt, Human
ucccugaaggccccg

SEQ ID NO: 2013417 - RNA, 11 nt, Human
ucccugaaggc

SEQ ID NO: 2013418 - RNA, 13 nt, Human
ucccggcugcccu

SEQ ID NO: 2013419 - RNA, 14 nt, Human
ucccggcugcccuu

SEQ ID NO: 2013420 - RNA, 15 nt, Human
ucccggcugcccuuu

SEQ ID NO: 2013421 - RNA, 18 nt, Human
ucccggcugcccuuucug

SEQ ID NO: 2013422 - RNA, 22 nt, Human
ucccggcugcccuuucugggca

SEQ ID NO: 2013423 - RNA, 14 nt, Human
ucccggcccugccu

SEQ ID NO: 2013424 - RNA, 15 nt, Human
ucccggcccugccug

SEQ ID NO: 2013425 - RNA, 14 nt, Human
ucccugauaaauau

SEQ ID NO: 2013426 - RNA, 15 nt, Human
ucccugauaaauauu

SEQ ID NO: 2013427 - RNA, 15 nt, Human
ucccugaucccugau

SEQ ID NO: 2013428 - RNA, 14 nt, Human
ucccugaucccuuc

SEQ ID NO: 2013429 - RNA, 15 nt, Human
ucccugaucccuucc

SEQ ID NO: 2013430 - RNA, 17 nt, Human
ucccugaucccuuccac

SEQ ID NO: 2013431 - RNA, 20 nt, Human
ucccugaggcagguccccag

SEQ ID NO: 2013432 - RNA, 21 nt, Human
ucccugaggcagguccccaga

SEQ ID NO: 2013433 - RNA, 22 nt, Human
ucccugaggcagguccccagac

SEQ ID NO: 2013434 - RNA, 11 nt, Human
ucccugaggca

SEQ ID NO: 2013435 - RNA, 12 nt, Human
ucccugacuggg

SEQ ID NO: 2013436 - RNA, 23 nt, Human
ucccugacugggggcagacaugg

SEQ ID NO: 2013437 - RNA, 16 nt, Human
ucccugaaggccccgc

SEQ ID NO: 2013438 - RNA, 15 nt, Human
uccccucuccuuccu

SEQ ID NO: 2013439 - RNA, 16 nt, Human
uccccucuccuuccug

SEQ ID NO: 2013440 - RNA, 20 nt, Human
ucccgaauagcugggacuac

SEQ ID NO: 2013441 - RNA, 15 nt, Human
ucccgaguagcuggg

SEQ ID NO: 2013442 - RNA, 19 nt, Human
ucccgagacggcacugaga

SEQ ID NO: 2013443 - RNA, 18 nt, Human
ucccgaguagcugggacu

SEQ ID NO: 2013444 - RNA, 20 nt, Human
ucccgaguagcugagauuau

SEQ ID NO: 2013445 - RNA, 16 nt, Human
ucccgaguagcuggga

SEQ ID NO: 2013446 - RNA, 17 nt, Human
ucccgaguagcugggac

SEQ ID NO: 2013447 - RNA, 17 nt, Human
acuacucccccaggugg

SEQ ID NO: 2013448 - RNA, 16 nt, Human
acuacucaaagcaaaa

SEQ ID NO: 2013449 - RNA, 18 nt, Human
acuacucaaagcaaaagu

SEQ ID NO: 2013450 - RNA, 17 nt, Human
acuaccuccucuccuga

SEQ ID NO: 2013451 - RNA, 12 nt, Human
acuaccuggcug

SEQ ID NO: 2013452 - RNA, 14 nt, Human
acuaccuggcugcg

SEQ ID NO: 2013453 - RNA, 21 nt, Human
acuacuagggaaaugccuuug

SEQ ID NO: 2013454 - RNA, 14 nt, Human
acuacuagggaaau

SEQ ID NO: 2013455 - RNA, 14 nt, Human
acuaccuccucucc

SEQ ID NO: 2013456 - RNA, 16 nt, Human
acuaccuccucuccug

SEQ ID NO: 2013457 - RNA, 21 nt, Human
acucacauuuauucugcucac

SEQ ID NO: 2013458 - RNA, 12 nt, Human
acucaccccagc

SEQ ID NO: 2013459 - RNA, 16 nt, Human
uccccuaaucuuuucu

SEQ ID NO: 2013460 - RNA, 14 nt, Human
uccccucccaggga

SEQ ID NO: 2013461 - RNA, 17 nt, Human
uccccucccagggagca

SEQ ID NO: 2013462 - RNA, 20 nt, Human
uccaucucuugcuuguuccu

SEQ ID NO: 2013463 - RNA, 13 nt, Human
uccaugaagaugu

SEQ ID NO: 2013464 - RNA, 21 nt, Human
uccaugaagauguagaggaga

SEQ ID NO: 2013465 - RNA, 20 nt, Human
uccauccugaggcuccacuu

SEQ ID NO: 2013466 - RNA, 21 nt, Human
uccauccugaggcuccacuug

SEQ ID NO: 2013467 - RNA, 23 nt, Human
acgccagauucuuuccugaggcu

SEQ ID NO: 2013468 - RNA, 22 nt, Human
acgccagauucuuuccugaggc

SEQ ID NO: 2013469 - RNA, 18 nt, Human
uccaucuaaacugccccc

SEQ ID NO: 2013470 - RNA, 16 nt, Human
uccaucuaaacugccc

SEQ ID NO: 2013471 - RNA, 14 nt, Human
uccaucuaaaaaua

SEQ ID NO: 2013472 - RNA, 15 nt, Human
uccaucuaaaaauau

SEQ ID NO: 2013473 - RNA, 16 nt, Human
uccaucuaaaaauaua

SEQ ID NO: 2013474 - RNA, 21 nt, Human
uccaucuaaaaauauacaugu

SEQ ID NO: 2013475 - RNA, 15 nt, Human
uccauccuuucuccu

SEQ ID NO: 2013476 - RNA, 18 nt, Human
ucccaaagcagugcaugc

SEQ ID NO: 2013477 - RNA, 17 nt, Human
ucccaaagcagugcaug

SEQ ID NO: 2013478 - RNA, 21 nt, Human
ucccaaagcagugcaugcugu

SEQ ID NO: 2013479 - RNA, 12 nt, Human
ucccaaaggcau

SEQ ID NO: 2013480 - RNA, 13 nt, Human
ucccaaagugcug

SEQ ID NO: 2013481 - RNA, 14 nt, Human
ucccaaagugcugg

SEQ ID NO: 2013482 - RNA, 12 nt, Human
ucccaaaagcua

SEQ ID NO: 2013483 - RNA, 15 nt, Human
uccauuuuuuauauu

SEQ ID NO: 2013484 - RNA, 17 nt, Human
uccauuuccuuaugcug

SEQ ID NO: 2013485 - RNA, 14 nt, Human
uccauuucacuggc

SEQ ID NO: 2013486 - RNA, 15 nt, Human
uccauuucacuggcu

SEQ ID NO: 2013487 - RNA, 18 nt, Human
ucccaaacccuucagugc

SEQ ID NO: 2013488 - RNA, 17 nt, Human
ucccaaaaucaccguac

SEQ ID NO: 2013489 - RNA, 16 nt, Human
ucccaaagcagugcau

SEQ ID NO: 2013490 - RNA, 17 nt, Human
acgguuuuacugcagcu

SEQ ID NO: 2013491 - RNA, 15 nt, Human
acgguuuuacugcag

SEQ ID NO: 2013492 - RNA, 22 nt, Human
acguauaaaagccuguuuaaga

SEQ ID NO: 2013493 - RNA, 20 nt, Human
acguagucggcacagccugg

SEQ ID NO: 2013494 - RNA, 13 nt, Human
acguauuauuguc

SEQ ID NO: 2013495 - RNA, 23 nt, Human
acguggcugcuucaaggauccug

SEQ ID NO: 2013496 - RNA, 19 nt, Human
acguuccucuccaccugca

SEQ ID NO: 2013497 - RNA, 11 nt, Human
acguguauguu

SEQ ID NO: 2013498 - RNA, 13 nt, Human
acguguauguuuu

SEQ ID NO: 2013499 - RNA, 16 nt, Human
acguguauguuuuuca

SEQ ID NO: 2013500 - RNA, 19 nt, Human
acguguauguuuuucaguu

SEQ ID NO: 2013501 - RNA, 23 nt, Human
acguguauguuuuucaguucaaa

SEQ ID NO: 2013502 - RNA, 15 nt, Human
acgugugcauguguc

SEQ ID NO: 2013503 - RNA, 16 nt, Human
acgugugcaugugucu

SEQ ID NO: 2013504 - RNA, 16 nt, Human
acgugggcuccccucu

SEQ ID NO: 2013505 - RNA, 17 nt, Human
acgugggcuccccucuu

SEQ ID NO: 2013506 - RNA, 19 nt, Human
acgugggcuccccucuucc

SEQ ID NO: 2013507 - RNA, 17 nt, Human
acgugggcauucaaaug

SEQ ID NO: 2013508 - RNA, 20 nt, Human
acgugggcauucaaauguau

SEQ ID NO: 2013509 - RNA, 20 nt, Human
ucccaccccacacacgccag

SEQ ID NO: 2013510 - RNA, 15 nt, Human
ucccaccccacacac

SEQ ID NO: 2013511 - RNA, 16 nt, Human
ucccacaaaggagagc

SEQ ID NO: 2013512 - RNA, 20 nt, Human
acgggaggguaaggcugugg

SEQ ID NO: 2013513 - RNA, 18 nt, Human
ucccaccccauccuccag

SEQ ID NO: 2013514 - RNA, 19 nt, Human
ucccaccccauccuccagg

SEQ ID NO: 2013515 - RNA, 19 nt, Human
acgguucaaaccugugaag

SEQ ID NO: 2013516 - RNA, 10 nt, Human
acgguuccua

SEQ ID NO: 2013517 - RNA, 17 nt, Human
acgguuccuacacagga

SEQ ID NO: 2013518 - RNA, 18 nt, Human
acgguuccuacacaggac

SEQ ID NO: 2013519 - RNA, 20 nt, Human
acgguuccuacacaggacag

SEQ ID NO: 2013520 - RNA, 21 nt, Human
uccccaccgcagacaggacca

SEQ ID NO: 2013521 - RNA, 18 nt, Human
uccccaccgcagacagga

SEQ ID NO: 2013522 - RNA, 17 nt, Human
uccccaccgcagacagg

SEQ ID NO: 2013523 - RNA, 17 nt, Human
uccccacccuccccuuc

SEQ ID NO: 2013524 - RNA, 22 nt, Human
uccccaccgcagacaggaccag

SEQ ID NO: 2013525 - RNA, 17 nt, Human
uccccaugucucgacuc

SEQ ID NO: 2013526 - RNA, 15 nt, Human
acuacauucuguuaa

SEQ ID NO: 2013527 - RNA, 15 nt, Human
acuaccaaaggacac

SEQ ID NO: 2013528 - RNA, 14 nt, Human
acuaccccuugauu

SEQ ID NO: 2013529 - RNA, 21 nt, Human
acuaccccuugauuuuccauc

SEQ ID NO: 2013530 - RNA, 22 nt, Human
ucccauaugccugggcagaagg

SEQ ID NO: 2013531 - RNA, 16 nt, Human
ucccaguagaaaauau

SEQ ID NO: 2013532 - RNA, 15 nt, Human
ucccaucacccgcua

SEQ ID NO: 2013533 - RNA, 15 nt, Human
ucccaguagaaaaua

SEQ ID NO: 2013534 - RNA, 14 nt, Human
uccccaccaucugc

SEQ ID NO: 2013535 - RNA, 15 nt, Human
uccccaccaucugcu

SEQ ID NO: 2013536 - RNA, 18 nt, Human
uccccaccaucugcuguc

SEQ ID NO: 2013537 - RNA, 19 nt, Human
uccccaccaucugcugucu

SEQ ID NO: 2013538 - RNA, 23 nt, Human
uccccaccaucugcugucuuuuc

SEQ ID NO: 2013539 - RNA, 15 nt, Human
acuacaguuuguuag

SEQ ID NO: 2013540 - RNA, 11 nt, Human
acuacauucug

SEQ ID NO: 2013541 - RNA, 12 nt, Human
acuacauucugu

SEQ ID NO: 2013542 - RNA, 13 nt, Human
acuacauucuguu

SEQ ID NO: 2013543 - RNA, 14 nt, Human
acuacauucuguua

SEQ ID NO: 2013544 - RNA, 12 nt, Human
ucccagccccaa

SEQ ID NO: 2013545 - RNA, 17 nt, Human
ucccagcugugcucugg

SEQ ID NO: 2013546 - RNA, 17 nt, Human
ucccagcaucgcacucu

SEQ ID NO: 2013547 - RNA, 13 nt, Human
ucccagcagccag

SEQ ID NO: 2013548 - RNA, 14 nt, Human
ucccagcagccagc

SEQ ID NO: 2013549 - RNA, 15 nt, Human
ucccagcagccagcc

SEQ ID NO: 2013550 - RNA, 16 nt, Human
ucccagcagccagcca

SEQ ID NO: 2013551 - RNA, 13 nt, Human
acuacaguuuguu

SEQ ID NO: 2013552 - RNA, 14 nt, Human
acuacaguuuguua

SEQ ID NO: 2013553 - RNA, 15 nt, Human
acuacaggcacccac

SEQ ID NO: 2013554 - RNA, 18 nt, Human
acuacagggccgccggca

SEQ ID NO: 2013555 - RNA, 16 nt, Human
acuacaauauguacau

SEQ ID NO: 2013556 - RNA, 18 nt, Human
acuacaauauguacauuu

SEQ ID NO: 2013557 - RNA, 13 nt, Human
acuacaauaugua

SEQ ID NO: 2013558 - RNA, 20 nt, Human
acuacaauauguacauuucu

SEQ ID NO: 2013559 - RNA, 11 nt, Human
acuacaggcac

SEQ ID NO: 2013560 - RNA, 12 nt, Human
acuaaccacgcu

SEQ ID NO: 2013561 - RNA, 14 nt, Human
accucuaaauucuu

SEQ ID NO: 2013562 - RNA, 13 nt, Human
accucucccaggg

SEQ ID NO: 2013563 - RNA, 12 nt, Human
accucuuguuuu

SEQ ID NO: 2013564 - RNA, 13 nt, Human
accucuuuggaaa

SEQ ID NO: 2013565 - RNA, 14 nt, Human
accugaggcccuuc

SEQ ID NO: 2013566 - RNA, 20 nt, Human
accugaggacauggcuucug

SEQ ID NO: 2013567 - RNA, 21 nt, Human
accugaggacauggcuucuga

SEQ ID NO: 2013568 - RNA, 21 nt, Human
accugaggcccuucucuccag

SEQ ID NO: 2013569 - RNA, 20 nt, Human
accugaggcccuucucucca

SEQ ID NO: 2013570 - RNA, 16 nt, Human
accugaggcccuucuc

SEQ ID NO: 2013571 - RNA, 15 nt, Human
accugaggcccuucu

SEQ ID NO: 2013572 - RNA, 22 nt, Human
accugaggcccuucucuccagc

SEQ ID NO: 2013573 - RNA, 18 nt, Human
accugauugugucucuug

SEQ ID NO: 2013574 - RNA, 17 nt, Human
accugauugugucucuu

SEQ ID NO: 2013575 - RNA, 15 nt, Human
accugauugugucuc

SEQ ID NO: 2013576 - RNA, 17 nt, Human
accugaguugaagaggg

SEQ ID NO: 2013577 - RNA, 14 nt, Human
accugaguuccuga

SEQ ID NO: 2013578 - RNA, 14 nt, Human
accugaguugaaga

SEQ ID NO: 2013579 - RNA, 16 nt, Human
accugaguugaagagg

SEQ ID NO: 2013580 - RNA, 17 nt, Human
accugcagauucuagga

SEQ ID NO: 2013581 - RNA, 13 nt, Human
accugcagcuccc

SEQ ID NO: 2013582 - RNA, 15 nt, Human
accugcagcucccuc

SEQ ID NO: 2013583 - RNA, 15 nt, Human
accugauuucuccug

SEQ ID NO: 2013584 - RNA, 14 nt, Human
ucauugcaucauuu

SEQ ID NO: 2013585 - RNA, 15 nt, Human
ucauugaccugaggc

SEQ ID NO: 2013586 - RNA, 14 nt, Human
ucauugaccugagg

SEQ ID NO: 2013587 - RNA, 12 nt, Human
ucauugaccuga

SEQ ID NO: 2013588 - RNA, 22 nt, Human
ucauugaaaucuuuuugcuuug

SEQ ID NO: 2013589 - RNA, 19 nt, Human
accucggugccuuccucuu

SEQ ID NO: 2013590 - RNA, 13 nt, Human
accuccugggcua

SEQ ID NO: 2013591 - RNA, 18 nt, Human
ucaugaugcucuuuccca

SEQ ID NO: 2013592 - RNA, 23 nt, Human
ucaugaugcucuuucccacccag

SEQ ID NO: 2013593 - RNA, 13 nt, Human
ucaugauguuuuu

SEQ ID NO: 2013594 - RNA, 19 nt, Human
ucaugauguuuuuaaaauc

SEQ ID NO: 2013595 - RNA, 20 nt, Human
ucaugauguuuuuaaaaucu

SEQ ID NO: 2013596 - RNA, 21 nt, Human
ucaugauguuuuuaaaaucuu

SEQ ID NO: 2013597 - RNA, 16 nt, Human
ucaugaugcucuuucc

SEQ ID NO: 2013598 - RNA, 17 nt, Human
ucaugaugcucuuuccc

SEQ ID NO: 2013599 - RNA, 13 nt, Human
ucauugaaaucuu

SEQ ID NO: 2013600 - RNA, 12 nt, Human
ucauugaaaucu

SEQ ID NO: 2013601 - RNA, 21 nt, Human
ucauucuuuuugaaaugucaa

SEQ ID NO: 2013602 - RNA, 12 nt, Human
ucauucuucugu

SEQ ID NO: 2013603 - RNA, 12 nt, Human
ucauuacuuguu

SEQ ID NO: 2013604 - RNA, 17 nt, Human
ucauuacuuguugccua

SEQ ID NO: 2013605 - RNA, 22 nt, Human
ucauccuucuggaauaaggaga

SEQ ID NO: 2013606 - RNA, 14 nt, Human
ucaucuaggauuuu

SEQ ID NO: 2013607 - RNA, 18 nt, Human
ucaucuagguaaauuaca

SEQ ID NO: 2013608 - RNA, 13 nt, Human
ucauccuucccac

SEQ ID NO: 2013609 - RNA, 18 nt, Human
ucauccuucccacucugu

SEQ ID NO: 2013610 - RNA, 20 nt, Human
ucauccuuucacuucuuucc

SEQ ID NO: 2013611 - RNA, 22 nt, Human
ucauccuuucacuucuuucccu

SEQ ID NO: 2013612 - RNA, 21 nt, Human
ucaugaauaacugauuaguaa

SEQ ID NO: 2013613 - RNA, 19 nt, Human
ucauccuccucagaucuuc

SEQ ID NO: 2013614 - RNA, 13 nt, Human
ucauccuccucag

SEQ ID NO: 2013615 - RNA, 18 nt, Human
ucauccucauacccaccc

SEQ ID NO: 2013616 - RNA, 14 nt, Human
ucauccuucuggaa

SEQ ID NO: 2013617 - RNA, 15 nt, Human
ucauccuaagcuauu

SEQ ID NO: 2013618 - RNA, 14 nt, Human
ucaucccuucucuu

SEQ ID NO: 2013619 - RNA, 16 nt, Human
ucaucccuucucuucc

SEQ ID NO: 2013620 - RNA, 21 nt, Human
ucaucccuucucuuccaggca

SEQ ID NO: 2013621 - RNA, 23 nt, Human
ucaucccuucucuuccaggcagc

SEQ ID NO: 2013622 - RNA, 17 nt, Human
ucauccccucacuugcc

SEQ ID NO: 2013623 - RNA, 14 nt, Human
ucauccccucagaa

SEQ ID NO: 2013624 - RNA, 20 nt, Human
ucauccccucagaaggucug

SEQ ID NO: 2013625 - RNA, 23 nt, Human
accuccugccucgaacuggcugc

SEQ ID NO: 2013626 - RNA, 16 nt, Human
accucaaccaaugcca

SEQ ID NO: 2013627 - RNA, 20 nt, Human
accucaaaugaugugccugc

SEQ ID NO: 2013628 - RNA, 22 nt, Human
accucaaaugaugugccugcuu

SEQ ID NO: 2013629 - RNA, 13 nt, Human
accuccugccucg

SEQ ID NO: 2013630 - RNA, 12 nt, Human
accuccugccuc

SEQ ID NO: 2013631 - RNA, 20 nt, Human
accuaacaacauuguagccu

SEQ ID NO: 2013632 - RNA, 13 nt, Human
accuaaaugaaua

SEQ ID NO: 2013633 - RNA, 14 nt, Human
accuaaccagggcc

SEQ ID NO: 2013634 - RNA, 13 nt, Human
accuaacccagaa

SEQ ID NO: 2013635 - RNA, 16 nt, Human
accuaacccagaaaau

SEQ ID NO: 2013636 - RNA, 15 nt, Human
ucaggaagcucaggg

SEQ ID NO: 2013637 - RNA, 14 nt, Human
ucaggaagcucagg

SEQ ID NO: 2013638 - RNA, 13 nt, Human
ucaggaagcucag

SEQ ID NO: 2013639 - RNA, 12 nt, Human
ucaggaagcuca

SEQ ID NO: 2013640 - RNA, 14 nt, Human
accuaguacugccc

SEQ ID NO: 2013641 - RNA, 16 nt, Human
accuaccaccacgccc

SEQ ID NO: 2013642 - RNA, 20 nt, Human
accuaccaccacgcccggcu

SEQ ID NO: 2013643 - RNA, 15 nt, Human
accuaccacuacauu

SEQ ID NO: 2013644 - RNA, 14 nt, Human
accuaauuaauuuc

SEQ ID NO: 2013645 - RNA, 15 nt, Human
accuaauuaauuuca

SEQ ID NO: 2013646 - RNA, 15 nt, Human
accuaauugcacaac

SEQ ID NO: 2013647 - RNA, 23 nt, Human
accuaauugcacaacagagacug

SEQ ID NO: 2013648 - RNA, 18 nt, Human
uccacuggggauugggcc

SEQ ID NO: 2013649 - RNA, 14 nt, Human
uccagacccggcug

SEQ ID NO: 2013650 - RNA, 13 nt, Human
uccagacacaugu

SEQ ID NO: 2013651 - RNA, 22 nt, Human
uccagaauuucccaaagcagug

SEQ ID NO: 2013652 - RNA, 20 nt, Human
uccagaauuucccaaagcag

SEQ ID NO: 2013653 - RNA, 21 nt, Human
uccacuccuccuagccaccca

SEQ ID NO: 2013654 - RNA, 13 nt, Human
uccacugccuucg

SEQ ID NO: 2013655 - RNA, 15 nt, Human
uccacugccuucgau

SEQ ID NO: 2013656 - RNA, 22 nt, Human
uccacugccuucgauacaccgg

SEQ ID NO: 2013657 - RNA, 16 nt, Human
uccagaauuucccaaa

SEQ ID NO: 2013658 - RNA, 19 nt, Human
uccagacccggcugcgugg

SEQ ID NO: 2013659 - RNA, 15 nt, Human
uccagacccggcugc

SEQ ID NO: 2013660 - RNA, 18 nt, Human
uccagacccggcugcgug

SEQ ID NO: 2013661 - RNA, 15 nt, Human
uccacuccuccuagc

SEQ ID NO: 2013662 - RNA, 18 nt, Human
uccacuccuccuagccac

SEQ ID NO: 2013663 - RNA, 16 nt, Human
uccaccuucccaugcc

SEQ ID NO: 2013664 - RNA, 18 nt, Human
uccaccuucccaugcccu

SEQ ID NO: 2013665 - RNA, 19 nt, Human
uccaccuucccaugcccug

SEQ ID NO: 2013666 - RNA, 20 nt, Human
accuuaaauuaguacagcac

SEQ ID NO: 2013667 - RNA, 12 nt, Human
accuucaagcug

SEQ ID NO: 2013668 - RNA, 14 nt, Human
accuucaagcugcu

SEQ ID NO: 2013669 - RNA, 20 nt, Human
accuucaagcugcuuuuugu

SEQ ID NO: 2013670 - RNA, 20 nt, Human
accuuuugagugccuuacac

SEQ ID NO: 2013671 - RNA, 17 nt, Human
accuuuugagugccuua

SEQ ID NO: 2013672 - RNA, 14 nt, Human
accuuuugagugcc

SEQ ID NO: 2013673 - RNA, 16 nt, Human
uccaggccagggggcc

SEQ ID NO: 2013674 - RNA, 12 nt, Human
uccaggcagcac

SEQ ID NO: 2013675 - RNA, 18 nt, Human
uccaggcagcacccaggu

SEQ ID NO: 2013676 - RNA, 11 nt, Human
uccaggcagcc

SEQ ID NO: 2013677 - RNA, 13 nt, Human
uccaggcagccgc

SEQ ID NO: 2013678 - RNA, 18 nt, Human
uccaggccagggggccag

SEQ ID NO: 2013679 - RNA, 14 nt, Human
uccaggcuguaucc

SEQ ID NO: 2013680 - RNA, 17 nt, Human
uccaggccccucccucu

SEQ ID NO: 2013681 - RNA, 16 nt, Human
uccaggccuacuccug

SEQ ID NO: 2013682 - RNA, 18 nt, Human
uccaggccuacuccuguc

SEQ ID NO: 2013683 - RNA, 12 nt, Human
uccagccccugg

SEQ ID NO: 2013684 - RNA, 16 nt, Human
uccagagaguggcucc

SEQ ID NO: 2013685 - RNA, 17 nt, Human
uccagagaguggcuccu

SEQ ID NO: 2013686 - RNA, 15 nt, Human
uccagagaguggcuc

SEQ ID NO: 2013687 - RNA, 13 nt, Human
uccagccccugga

SEQ ID NO: 2013688 - RNA, 14 nt, Human
uccagccccuggau

SEQ ID NO: 2013689 - RNA, 17 nt, Human
acgccagauucuuuccu

SEQ ID NO: 2013690 - RNA, 19 nt, Human
acgccagauucuuuccuga

SEQ ID NO: 2013691 - RNA, 16 nt, Human
acgagcaggcuucuuc

SEQ ID NO: 2013692 - RNA, 13 nt, Human
acgagccuuuuca

SEQ ID NO: 2013693 - RNA, 19 nt, Human
accuuuuuuauacauaaac

SEQ ID NO: 2013694 - RNA, 20 nt, Human
accuuuuuuauacauaaaca

SEQ ID NO: 2013695 - RNA, 21 nt, Human
uccaggcuguaucccaugagc

SEQ ID NO: 2013696 - RNA, 20 nt, Human
uccaggcuuuguacagagug

SEQ ID NO: 2013697 - RNA, 21 nt, Human
accuuuuuuauacauaaacaa

SEQ ID NO: 2013698 - RNA, 22 nt, Human
accuuuuuuauacauaaacaag

SEQ ID NO: 2013699 - RNA, 14 nt, Human
acgagaaaacaaua

SEQ ID NO: 2013700 - RNA, 20 nt, Human
accuuagacagucccugcca

SEQ ID NO: 2013701 - RNA, 19 nt, Human
accuuagacagucccugcc

SEQ ID NO: 2013702 - RNA, 18 nt, Human
accuuagacagucccugc

SEQ ID NO: 2013703 - RNA, 17 nt, Human
accuuaaaauuugaaac

SEQ ID NO: 2013704 - RNA, 20 nt, Human
accuuaaaauuugaaacauu

SEQ ID NO: 2013705 - RNA, 21 nt, Human
accuuaaaauuugaaacauug

SEQ ID NO: 2013706 - RNA, 12 nt, Human
accuuaaaauuu

SEQ ID NO: 2013707 - RNA, 13 nt, Human
accuuaaaauuug

SEQ ID NO: 2013708 - RNA, 14 nt, Human
accuuaaaauuuga

SEQ ID NO: 2013709 - RNA, 15 nt, Human
accuuaaaauuugaa

SEQ ID NO: 2013710 - RNA, 19 nt, Human
accuguuucugcagccacu

SEQ ID NO: 2013711 - RNA, 21 nt, Human
accuggucacaggacucugcc

SEQ ID NO: 2013712 - RNA, 13 nt, Human
accuguuuaaauu

SEQ ID NO: 2013713 - RNA, 15 nt, Human
accuguuuaaauugc

SEQ ID NO: 2013714 - RNA, 16 nt, Human
accuguuuaaauugcu

SEQ ID NO: 2013715 - RNA, 23 nt, Human
accuguuuaaauugcucacaguu

SEQ ID NO: 2013716 - RNA, 20 nt, Human
accuggccucugcacucccc

SEQ ID NO: 2013717 - RNA, 18 nt, Human
accuggccucugcacucc

SEQ ID NO: 2013718 - RNA, 23 nt, Human
accuggccucugcacuccccugc

SEQ ID NO: 2013719 - RNA, 15 nt, Human
accuggccugucugu

SEQ ID NO: 2013720 - RNA, 23 nt, Human
accuggguccccagcccuuccuc

SEQ ID NO: 2013721 - RNA, 22 nt, Human
accuggauugugccuaaugugu

SEQ ID NO: 2013722 - RNA, 17 nt, Human
accuggccucugcacuc

SEQ ID NO: 2013723 - RNA, 16 nt, Human
accuggccucugcacu

SEQ ID NO: 2013724 - RNA, 14 nt, Human
accuggccucugca

SEQ ID NO: 2013725 - RNA, 17 nt, Human
uccacccaccucagccu

SEQ ID NO: 2013726 - RNA, 18 nt, Human
uccacccaccucagccuc

SEQ ID NO: 2013727 - RNA, 19 nt, Human
uccacccaccucagccucc

SEQ ID NO: 2013728 - RNA, 12 nt, Human
uccacccaggag

SEQ ID NO: 2013729 - RNA, 14 nt, Human
uccacccaggagcc

SEQ ID NO: 2013730 - RNA, 15 nt, Human
uccacccaggagccc

SEQ ID NO: 2013731 - RNA, 24 nt, Human
uccaaccccucgcccagucccagc

SEQ ID NO: 2013732 - RNA, 19 nt, Human
uccaacuccaacauccacu

SEQ ID NO: 2013733 - RNA, 21 nt, Human
uccaacuccaacauccacucu

SEQ ID NO: 2013734 - RNA, 23 nt, Human
uccaacugagaaguaccuuauca

SEQ ID NO: 2013735 - RNA, 12 nt, Human
uccaagaagccc

SEQ ID NO: 2013736 - RNA, 16 nt, Human
uccaagcuggucccac

SEQ ID NO: 2013737 - RNA, 20 nt, Human
uccaagcuggucccacucag

SEQ ID NO: 2013738 - RNA, 21 nt, Human
uccaagcuggucccacucagu

SEQ ID NO: 2013739 - RNA, 18 nt, Human
uccaaggguacuaaggaa

SEQ ID NO: 2013740 - RNA, 18 nt, Human
uccaaucccaccaacccu

SEQ ID NO: 2013741 - RNA, 14 nt, Human
uccaagucacugca

SEQ ID NO: 2013742 - RNA, 19 nt, Human
uccaagucuuugcuauugu

SEQ ID NO: 2013743 - RNA, 23 nt, Human
uccaagucacugcaaaaccaggu

SEQ ID NO: 2013744 - RNA, 21 nt, Human
uccaagucuuugcuauuguga

SEQ ID NO: 2013745 - RNA, 20 nt, Human
uccaaguggccuccgucacu

SEQ ID NO: 2013746 - RNA, 13 nt, Human
uccaaccccucgc

SEQ ID NO: 2013747 - RNA, 14 nt, Human
uccaaccccucgcc

SEQ ID NO: 2013748 - RNA, 18 nt, Human
uccaaccccucgcccagu

SEQ ID NO: 2013749 - RNA, 19 nt, Human
uccaaccccucgcccaguc

SEQ ID NO: 2013750 - RNA, 14 nt, Human
uccaacccucauca

SEQ ID NO: 2013751 - RNA, 17 nt, Human
uccaacccucaucacca

SEQ ID NO: 2013752 - RNA, 16 nt, Human
uccaacccucaucacc

SEQ ID NO: 2013753 - RNA, 23 nt, Human
uccaacccucaucaccaacgucu

SEQ ID NO: 2013754 - RNA, 15 nt, Human
accugccaggaagcc

SEQ ID NO: 2013755 - RNA, 14 nt, Human
accugccaggaagc

SEQ ID NO: 2013756 - RNA, 12 nt, Human
accugccaggaa

SEQ ID NO: 2013757 - RNA, 14 nt, Human
acaguuuucuucau

SEQ ID NO: 2013758 - RNA, 16 nt, Human
acaguuuguuaguaug

SEQ ID NO: 2013759 - RNA, 20 nt, Human
acaguuuguuaguaugaggc

SEQ ID NO: 2013760 - RNA, 14 nt, Human
acauacucugcuua

SEQ ID NO: 2013761 - RNA, 17 nt, Human
acauacucccaucugug

SEQ ID NO: 2013762 - RNA, 21 nt, Human
acauacuaaccagcagaaaug

SEQ ID NO: 2013763 - RNA, 22 nt, Human
acauacuaaccagcagaaaugc

SEQ ID NO: 2013764 - RNA, 13 nt, Human
acauacucccauc

SEQ ID NO: 2013765 - RNA, 21 nt, Human
acauacgugugcaugugucuu

SEQ ID NO: 2013766 - RNA, 22 nt, Human
acauacgugugcaugugucuuu

SEQ ID NO: 2013767 - RNA, 15 nt, Human
acauacguaaaaauc

SEQ ID NO: 2013768 - RNA, 15 nt, Human
acauacgugugcaug

SEQ ID NO: 2013769 - RNA, 16 nt, Human
acauacgugugcaugu

SEQ ID NO: 2013770 - RNA, 13 nt, Human
acauacuaaccag

SEQ ID NO: 2013771 - RNA, 12 nt, Human
acaguugugcag

SEQ ID NO: 2013772 - RNA, 17 nt, Human
acaguugugcaggaggu

SEQ ID NO: 2013773 - RNA, 11 nt, Human
acaguuguuug

SEQ ID NO: 2013774 - RNA, 12 nt, Human
acaguuguuuga

SEQ ID NO: 2013775 - RNA, 13 nt, Human
acaguuguuugau

SEQ ID NO: 2013776 - RNA, 15 nt, Human
acaguuguuugaugc

SEQ ID NO: 2013777 - RNA, 22 nt, Human
acaguuguuugaugcauuaaaa

SEQ ID NO: 2013778 - RNA, 16 nt, Human
acaguugaaaaacagc

SEQ ID NO: 2013779 - RNA, 15 nt, Human
acaguugaaaaacag

SEQ ID NO: 2013780 - RNA, 20 nt, Human
acaguugaaaaacagcugag

SEQ ID NO: 2013781 - RNA, 20 nt, Human
uaugaacuuuauaguuguuu

SEQ ID NO: 2013782 - RNA, 20 nt, Human
uaugaagaaaauacuuaaau

SEQ ID NO: 2013783 - RNA, 22 nt, Human
uaugaagaaaauacuuaaaugu

SEQ ID NO: 2013784 - RNA, 14 nt, Human
uaugaagaaaauac

SEQ ID NO: 2013785 - RNA, 15 nt, Human
uaugaagaaaauacu

SEQ ID NO: 2013786 - RNA, 16 nt, Human
uaugaagaaaauacuu

SEQ ID NO: 2013787 - RNA, 22 nt, Human
uauuucccugaaggaaccaaag

SEQ ID NO: 2013788 - RNA, 22 nt, Human
uauuucccucaccuuucccauc

SEQ ID NO: 2013789 - RNA, 15 nt, Human
uauuucccccuuucu

SEQ ID NO: 2013790 - RNA, 20 nt, Human
uauuucccccuuucuuccuc

SEQ ID NO: 2013791 - RNA, 23 nt, Human
uauuuccuauauuguuuucagug

SEQ ID NO: 2013792 - RNA, 17 nt, Human
uauuuccuauaccauuu

SEQ ID NO: 2013793 - RNA, 19 nt, Human
uauuuccuauaccauuucc

SEQ ID NO: 2013794 - RNA, 13 nt, Human
uauuucccuuuag

SEQ ID NO: 2013795 - RNA, 16 nt, Human
uauuucccuuuagcug

SEQ ID NO: 2013796 - RNA, 20 nt, Human
uauuucuagacacuuuuucu

SEQ ID NO: 2013797 - RNA, 18 nt, Human
acaugaaaacacauuuuu

SEQ ID NO: 2013798 - RNA, 19 nt, Human
acaugaaaacacauuuuuc

SEQ ID NO: 2013799 - RNA, 17 nt, Human
acaugaaaacacauuuu

SEQ ID NO: 2013800 - RNA, 21 nt, Human
acaucuugcucugcugacaga

SEQ ID NO: 2013801 - RNA, 18 nt, Human
acaucuugcucugcugac

SEQ ID NO: 2013802 - RNA, 19 nt, Human
acaucuugcucugcugaca

SEQ ID NO: 2013803 - RNA, 11 nt, Human
acaucuccuua

SEQ ID NO: 2013804 - RNA, 15 nt, Human
acaucuccuuagaaa

SEQ ID NO: 2013805 - RNA, 15 nt, Human
acaucucuauucccc

SEQ ID NO: 2013806 - RNA, 13 nt, Human
acaucuugcucug

SEQ ID NO: 2013807 - RNA, 14 nt, Human
acaucuugcucugc

SEQ ID NO: 2013808 - RNA, 13 nt, Human
acaucuguuuugu

SEQ ID NO: 2013809 - RNA, 20 nt, Human
acaucagaaauaauaaaaaa

SEQ ID NO: 2013810 - RNA, 23 nt, Human
acaucucccuuuuccaugacugu

SEQ ID NO: 2013811 - RNA, 11 nt, Human
acaucucagag

SEQ ID NO: 2013812 - RNA, 12 nt, Human
acaucucagaga

SEQ ID NO: 2013813 - RNA, 12 nt, Human
acaucacuggca

SEQ ID NO: 2013814 - RNA, 14 nt, Human
acaucacuggcaug

SEQ ID NO: 2013815 - RNA, 23 nt, Human
acaucacuggcauggugguuggg

SEQ ID NO: 2013816 - RNA, 23 nt, Human
acaucaaauaauugaagagacaa

SEQ ID NO: 2013817 - RNA, 13 nt, Human
acaucaacagaua

SEQ ID NO: 2013818 - RNA, 18 nt, Human
acaucaacaucuugguca

SEQ ID NO: 2013819 - RNA, 16 nt, Human
acaucaacaucuuggu

SEQ ID NO: 2013820 - RNA, 14 nt, Human
acauagaauuaaca

SEQ ID NO: 2013821 - RNA, 18 nt, Human
acauagaauuaacacaug

SEQ ID NO: 2013822 - RNA, 16 nt, Human
acauagccaaaaugug

SEQ ID NO: 2013823 - RNA, 19 nt, Human
acauagccaaaaugugagu

SEQ ID NO: 2013824 - RNA, 21 nt, Human
acauaggaaguuaaaagcaca

SEQ ID NO: 2013825 - RNA, 16 nt, Human
acauaggguucccacg

SEQ ID NO: 2013826 - RNA, 16 nt, Human
acauagugaugguucc

SEQ ID NO: 2013827 - RNA, 21 nt, Human
acauagugaugguuccccugu

SEQ ID NO: 2013828 - RNA, 15 nt, Human
acauauacaacacca

SEQ ID NO: 2013829 - RNA, 16 nt, Human
acauauaaauugucuu

SEQ ID NO: 2013830 - RNA, 17 nt, Human
acauauaaauugucuua

SEQ ID NO: 2013831 - RNA, 22 nt, Human
acauauaaauugucuuaaugga

SEQ ID NO: 2013832 - RNA, 18 nt, Human
acauauugauuuccguua

SEQ ID NO: 2013833 - RNA, 22 nt, Human
acauauugauuuccguuaaaau

SEQ ID NO: 2013834 - RNA, 23 nt, Human
acauauugauuuccguuaaaaua

SEQ ID NO: 2013835 - RNA, 20 nt, Human
acauauuagcgacaacagau

SEQ ID NO: 2013836 - RNA, 14 nt, Human
acauauugauuucc

SEQ ID NO: 2013837 - RNA, 16 nt, Human
acauauugauuuccgu

SEQ ID NO: 2013838 - RNA, 16 nt, Human
acauauguauacaugu

SEQ ID NO: 2013839 - RNA, 17 nt, Human
acauauguauacaugug

SEQ ID NO: 2013840 - RNA, 18 nt, Human
acauauguauacaugugc

SEQ ID NO: 2013841 - RNA, 21 nt, Human
ucaacauggcuacuugcuuug

SEQ ID NO: 2013842 - RNA, 22 nt, Human
ucaacauggcuacuugcuuuga

SEQ ID NO: 2013843 - RNA, 14 nt, Human
ucaacaugucuccu

SEQ ID NO: 2013844 - RNA, 17 nt, Human
ucaacauaccuuggcca

SEQ ID NO: 2013845 - RNA, 10 nt, Human
ucaagaaaug

SEQ ID NO: 2013846 - RNA, 14 nt, Human
ucaagaaaugaaga

SEQ ID NO: 2013847 - RNA, 15 nt, Human
ucaagaaaugaagag

SEQ ID NO: 2013848 - RNA, 16 nt, Human
ucaagaaaugaagagc

SEQ ID NO: 2013849 - RNA, 14 nt, Human
ucaagaaguucuuu

SEQ ID NO: 2013850 - RNA, 18 nt, Human
ucaagaaaugaagagcug

SEQ ID NO: 2013851 - RNA, 21 nt, Human
ucaagaaaugaagagcuguug

SEQ ID NO: 2013852 - RNA, 14 nt, Human
ucaagaacuuguuu

SEQ ID NO: 2013853 - RNA, 15 nt, Human
ucaagaacuuguuua

SEQ ID NO: 2013854 - RNA, 16 nt, Human
ucaagaacuuguuuaa

SEQ ID NO: 2013855 - RNA, 16 nt, Human
ucaagacugaauucca

SEQ ID NO: 2013856 - RNA, 17 nt, Human
ucaagacugaauuccaa

SEQ ID NO: 2013857 - RNA, 11 nt, Human
ucaagagccuu

SEQ ID NO: 2013858 - RNA, 19 nt, Human
ucaagaauagcauuguaaa

SEQ ID NO: 2013859 - RNA, 22 nt, Human
ucaagaaguucuuugauucugu

SEQ ID NO: 2013860 - RNA, 13 nt, Human
ucaagaccaaaug

SEQ ID NO: 2013861 - RNA, 19 nt, Human
ucaagaccaaauggaaaca

SEQ ID NO: 2013862 - RNA, 21 nt, Human
ucaagaccaaauggaaacaga

SEQ ID NO: 2013863 - RNA, 15 nt, Human
ucaaguauuauaaac

SEQ ID NO: 2013864 - RNA, 16 nt, Human
ucaaguauuauaaaca

SEQ ID NO: 2013865 - RNA, 16 nt, Human
ucaaguauuuaagccu

SEQ ID NO: 2013866 - RNA, 23 nt, Human
ucaaguauuauaccuuuuuuaga

SEQ ID NO: 2013867 - RNA, 16 nt, Human
ucaaguauuauaccuu

SEQ ID NO: 2013868 - RNA, 21 nt, Human
ucaaguauuauaccuuuuuua

SEQ ID NO: 2013869 - RNA, 18 nt, Human
ucaaguagacuacuguuc

SEQ ID NO: 2013870 - RNA, 19 nt, Human
ucaaguagacuacuguuca

SEQ ID NO: 2013871 - RNA, 21 nt, Human
ucaaguagacuacuguucagc

SEQ ID NO: 2013872 - RNA, 14 nt, Human
ucaaguauuauaaa

SEQ ID NO: 2013873 - RNA, 15 nt, Human
ucaaguauuauaccu

SEQ ID NO: 2013874 - RNA, 11 nt, Human
ucaaguauuau

SEQ ID NO: 2013875 - RNA, 17 nt, Human
ucaaguagacuacuguu

SEQ ID NO: 2013876 - RNA, 14 nt, Human
ucaagggcuuuccu

SEQ ID NO: 2013877 - RNA, 15 nt, Human
ucaagggcuuuccug

SEQ ID NO: 2013878 - RNA, 19 nt, Human
ucaagggcuuuccugugcc

SEQ ID NO: 2013879 - RNA, 21 nt, Human
ucaagggcuuuccugugccag

SEQ ID NO: 2013880 - RNA, 17 nt, Human
ucaagaucaaaaaggcu

SEQ ID NO: 2013881 - RNA, 19 nt, Human
ucaagaucaaaaaggcuua

SEQ ID NO: 2013882 - RNA, 15 nt, Human
ucaagagccuuaaaa

SEQ ID NO: 2013883 - RNA, 16 nt, Human
ucaagagccuuaaaac

SEQ ID NO: 2013884 - RNA, 17 nt, Human
ucaagagccuuaaaaca

SEQ ID NO: 2013885 - RNA, 18 nt, Human
ucaagagccuuaaaacau

SEQ ID NO: 2013886 - RNA, 19 nt, Human
ucaagagccuuaaaacauc

SEQ ID NO: 2013887 - RNA, 20 nt, Human
ucaagagccuuaaaacauca

SEQ ID NO: 2013888 - RNA, 21 nt, Human
ucaagagccuuaaaacaucau

SEQ ID NO: 2013889 - RNA, 23 nt, Human
ucaagaucaaaaaggcuuauaaa

SEQ ID NO: 2013890 - RNA, 24 nt, Human
ucaagaucaaaaaggcuuauaaaa

SEQ ID NO: 2013891 - RNA, 14 nt, Human
ucaaauuucuaaau

SEQ ID NO: 2013892 - RNA, 15 nt, Human
acauucuguuaauca

SEQ ID NO: 2013893 - RNA, 15 nt, Human
ucaaauuucuaaauc

SEQ ID NO: 2013894 - RNA, 16 nt, Human
ucaaauuucuaaaucu

SEQ ID NO: 2013895 - RNA, 12 nt, Human
acauucuguuaa

SEQ ID NO: 2013896 - RNA, 17 nt, Human
ucaaauuucuaaaucuc

SEQ ID NO: 2013897 - RNA, 16 nt, Human
ucaacagguuuuccug

SEQ ID NO: 2013898 - RNA, 15 nt, Human
ucaacagcaagugug

SEQ ID NO: 2013899 - RNA, 16 nt, Human
ucaacagcaaguguga

SEQ ID NO: 2013900 - RNA, 22 nt, Human
ucaacagcaagugugaauacug

SEQ ID NO: 2013901 - RNA, 21 nt, Human
acauguccaagaagcccagga

SEQ ID NO: 2013902 - RNA, 13 nt, Human
acauuaacaggca

SEQ ID NO: 2013903 - RNA, 19 nt, Human
acaugucuccuacugagga

SEQ ID NO: 2013904 - RNA, 22 nt, Human
acauuaguacuuuauagaagaa

SEQ ID NO: 2013905 - RNA, 23 nt, Human
acauuaguacuuuauagaagaau

SEQ ID NO: 2013906 - RNA, 16 nt, Human
acauuaguacuuuaua

SEQ ID NO: 2013907 - RNA, 18 nt, Human
acauuaguacuuuauaga

SEQ ID NO: 2013908 - RNA, 19 nt, Human
acauuaguacuuuauagaa

SEQ ID NO: 2013909 - RNA, 18 nt, Human
acauuagcaguuugcuuu

SEQ ID NO: 2013910 - RNA, 22 nt, Human
acauuagcaguuugcuuuguau

SEQ ID NO: 2013911 - RNA, 17 nt, Human
uauuuguaaauuuaugu

SEQ ID NO: 2013912 - RNA, 22 nt, Human
uauuuguaaauuuaugugaugg

SEQ ID NO: 2013913 - RNA, 16 nt, Human
uauuuguaaauuuaug

SEQ ID NO: 2013914 - RNA, 12 nt, Human
uauuugugugcu

SEQ ID NO: 2013915 - RNA, 16 nt, Human
uauuuuuacaugcaga

SEQ ID NO: 2013916 - RNA, 13 nt, Human
uauuuuucuuaaa

SEQ ID NO: 2013917 - RNA, 18 nt, Human
ucaaaagaaagaaaauca

SEQ ID NO: 2013918 - RNA, 14 nt, Human
uauuuuugaaaaau

SEQ ID NO: 2013919 - RNA, 19 nt, Human
ucaaaauuguuacaaauug

SEQ ID NO: 2013920 - RNA, 16 nt, Human
ucaaaauuguuacaaa

SEQ ID NO: 2013921 - RNA, 13 nt, Human
ucaaaaugcaaaa

SEQ ID NO: 2013922 - RNA, 13 nt, Human
ucaaaaguuuguu

SEQ ID NO: 2013923 - RNA, 14 nt, Human
ucaaaaguuuguuu

SEQ ID NO: 2013924 - RNA, 16 nt, Human
ucaaaagagaugaaag

SEQ ID NO: 2013925 - RNA, 20 nt, Human
ucaaaagagcacuuuaauaa

SEQ ID NO: 2013926 - RNA, 17 nt, Human
ucaaaauagguuuuuau

SEQ ID NO: 2013927 - RNA, 20 nt, Human
ucaaaauauaaaaugccaag

SEQ ID NO: 2013928 - RNA, 19 nt, Human
acaugauccugcaauucca

SEQ ID NO: 2013929 - RNA, 19 nt, Human
acaugagcaucaggccagg

SEQ ID NO: 2013930 - RNA, 18 nt, Human
acaugagcaucaggccag

SEQ ID NO: 2013931 - RNA, 17 nt, Human
acaugagcaucaggcca

SEQ ID NO: 2013932 - RNA, 17 nt, Human
acaugaucuucuuuaua

SEQ ID NO: 2013933 - RNA, 15 nt, Human
acaugaucuucuuua

SEQ ID NO: 2013934 - RNA, 22 nt, Human
acaugcuacacacugcauguuu

SEQ ID NO: 2013935 - RNA, 20 nt, Human
acaugagcaucaggccaggc

SEQ ID NO: 2013936 - RNA, 18 nt, Human
ucaaauaacuaaaaggua

SEQ ID NO: 2013937 - RNA, 21 nt, Human
ucaaauacauuuaaaacauua

SEQ ID NO: 2013938 - RNA, 22 nt, Human
ucaaauacauuuaaaacauuaa

SEQ ID NO: 2013939 - RNA, 19 nt, Human
ucaaauaauaccuuagaag

SEQ ID NO: 2013940 - RNA, 21 nt, Human
ucaaauaauaccuuagaaggu

SEQ ID NO: 2013941 - RNA, 11 nt, Human
ucaaauaauac

SEQ ID NO: 2013942 - RNA, 19 nt, Human
ucaaacaaacucucugaac

SEQ ID NO: 2013943 - RNA, 15 nt, Human
ucaaagccacacucu

SEQ ID NO: 2013944 - RNA, 17 nt, Human
ucaaacacuugugacuu

SEQ ID NO: 2013945 - RNA, 14 nt, Human
ucaaagcugaaaug

SEQ ID NO: 2013946 - RNA, 18 nt, Human
ucaaagccccauuaacug

SEQ ID NO: 2013947 - RNA, 20 nt, Human
ucaaagccccauuaacugcu

SEQ ID NO: 2013948 - RNA, 21 nt, Human
ucaaagccccauuaacugcuu

SEQ ID NO: 2013949 - RNA, 17 nt, Human
ucaaagccccauuaacu

SEQ ID NO: 2013950 - RNA, 17 nt, Human
accccuguaggccucag

SEQ ID NO: 2013951 - RNA, 15 nt, Human
accccuguaggccuc

SEQ ID NO: 2013952 - RNA, 16 nt, Human
accccuguaggccuca

SEQ ID NO: 2013953 - RNA, 12 nt, Human
acccccccagcu

SEQ ID NO: 2013954 - RNA, 22 nt, Human
acccccccagcuucacuucuga

SEQ ID NO: 2013955 - RNA, 13 nt, Human
accccccccccac

SEQ ID NO: 2013956 - RNA, 12 nt, Human
acccccacccaa

SEQ ID NO: 2013957 - RNA, 23 nt, Human
accccuuccugggcacacgcugc

SEQ ID NO: 2013958 - RNA, 20 nt, Human
ucagccuucuuuuucuggac

SEQ ID NO: 2013959 - RNA, 21 nt, Human
ucagccuucuuuuucuggacu

SEQ ID NO: 2013960 - RNA, 16 nt, Human
accccuucgcuccugu

SEQ ID NO: 2013961 - RNA, 14 nt, Human
accccuucgcuccu

SEQ ID NO: 2013962 - RNA, 15 nt, Human
accccuucgcuccug

SEQ ID NO: 2013963 - RNA, 15 nt, Human
accccuuccugggca

SEQ ID NO: 2013964 - RNA, 22 nt, Human
accccuuccugggcacacgcug

SEQ ID NO: 2013965 - RNA, 12 nt, Human
ucagcucagagc

SEQ ID NO: 2013966 - RNA, 20 nt, Human
ucagcuuguaaauagcucag

SEQ ID NO: 2013967 - RNA, 14 nt, Human
ucagcggggacagc

SEQ ID NO: 2013968 - RNA, 16 nt, Human
ucagcuaggaacaaau

SEQ ID NO: 2013969 - RNA, 19 nt, Human
ucagcuaggaacaaaucuu

SEQ ID NO: 2013970 - RNA, 20 nt, Human
ucagcuaggaacaaaucuuc

SEQ ID NO: 2013971 - RNA, 21 nt, Human
ucagcuaggaacaaaucuucc

SEQ ID NO: 2013972 - RNA, 23 nt, Human
ucagcuaggaacaaaucuuccug

SEQ ID NO: 2013973 - RNA, 13 nt, Human
ucagcucacugca

SEQ ID NO: 2013974 - RNA, 16 nt, Human
ucagcucacugcaacc

SEQ ID NO: 2013975 - RNA, 16 nt, Human
ucagcuugcacauuug

SEQ ID NO: 2013976 - RNA, 17 nt, Human
ucagcuugcacauuugg

SEQ ID NO: 2013977 - RNA, 21 nt, Human
ucagcccaaaccaccagaagc

SEQ ID NO: 2013978 - RNA, 22 nt, Human
ucagcccaaaccaccagaagcc

SEQ ID NO: 2013979 - RNA, 19 nt, Human
ucagcccaaucccugaucc

SEQ ID NO: 2013980 - RNA, 21 nt, Human
ucagcccaaucccugaucccu

SEQ ID NO: 2013981 - RNA, 23 nt, Human
ucagccguguaaccauggaccca

SEQ ID NO: 2013982 - RNA, 19 nt, Human
acccagcgagcccuggugg

SEQ ID NO: 2013983 - RNA, 23 nt, Human
acccagcgagcccugguggcagu

SEQ ID NO: 2013984 - RNA, 13 nt, Human
ucagccuaagaga

SEQ ID NO: 2013985 - RNA, 17 nt, Human
ucagccaucaacuaaag

SEQ ID NO: 2013986 - RNA, 22 nt, Human
ucagccaagaauucuuaaauau

SEQ ID NO: 2013987 - RNA, 24 nt, Human
acccagcgagcccugguggcagug

SEQ ID NO: 2013988 - RNA, 11 nt, Human
accccaccugc

SEQ ID NO: 2013989 - RNA, 12 nt, Human
accccaccugcg

SEQ ID NO: 2013990 - RNA, 23 nt, Human
accccagcuggggccaggcuggg

SEQ ID NO: 2013991 - RNA, 22 nt, Human
accccacuuagccuuucuuuuc

SEQ ID NO: 2013992 - RNA, 10 nt, Human
acccacugcu

SEQ ID NO: 2013993 - RNA, 11 nt, Human
acccacugcuc

SEQ ID NO: 2013994 - RNA, 15 nt, Human
accauuuuccugcau

SEQ ID NO: 2013995 - RNA, 12 nt, Human
accauuuuccug

SEQ ID NO: 2013996 - RNA, 14 nt, Human
accauuuuccugca

SEQ ID NO: 2013997 - RNA, 23 nt, Human
accauuucuugagguaaaagcau

SEQ ID NO: 2013998 - RNA, 13 nt, Human
acccacugcucug

SEQ ID NO: 2013999 - RNA, 14 nt, Human
acccacugcucugg

SEQ ID NO: 2014000 - RNA, 15 nt, Human
acccacugcucuggu

SEQ ID NO: 2014001 - RNA, 11 nt, Human
acccacugcuu

SEQ ID NO: 2014002 - RNA, 20 nt, Human
accauuaaaauaugcacuaa

SEQ ID NO: 2014003 - RNA, 14 nt, Human
accauuaaaauaug

SEQ ID NO: 2014004 - RNA, 19 nt, Human
accauuaaaauaugcacua

SEQ ID NO: 2014005 - RNA, 17 nt, Human
accauuauuaucaagua

SEQ ID NO: 2014006 - RNA, 22 nt, Human
accauugagaccgugaagauac

SEQ ID NO: 2014007 - RNA, 15 nt, Human
accauugcaacaaaa

SEQ ID NO: 2014008 - RNA, 23 nt, Human
accauugagaccgugaagauacu

SEQ ID NO: 2014009 - RNA, 16 nt, Human
accauugcaacaaaau

SEQ ID NO: 2014010 - RNA, 18 nt, Human
accauugcaacaaaauac

SEQ ID NO: 2014011 - RNA, 13 nt, Human
accauuggaaauu

SEQ ID NO: 2014012 - RNA, 14 nt, Human
accauuggaaauuu

SEQ ID NO: 2014013 - RNA, 15 nt, Human
accauuggaaauuuc

SEQ ID NO: 2014014 - RNA, 18 nt, Human
accauuggaaauuucacg

SEQ ID NO: 2014015 - RNA, 19 nt, Human
accauuggaaauuucacgu

SEQ ID NO: 2014016 - RNA, 20 nt, Human
accauuggaaauuucacguc

SEQ ID NO: 2014017 - RNA, 13 nt, Human
ucacucuuggagc

SEQ ID NO: 2014018 - RNA, 15 nt, Human
ucacuccuaccuggu

SEQ ID NO: 2014019 - RNA, 21 nt, Human
ucacucuuauugcccacgcug

SEQ ID NO: 2014020 - RNA, 23 nt, Human
ucacucuuauugcccacgcugga

SEQ ID NO: 2014021 - RNA, 22 nt, Human
accauggucggaaaacaugcua

SEQ ID NO: 2014022 - RNA, 20 nt, Human
ucagagacuccugcaggcag

SEQ ID NO: 2014023 - RNA, 17 nt, Human
ucagagacuccugcagg

SEQ ID NO: 2014024 - RNA, 21 nt, Human
ucagagacuccugcaggcagc

SEQ ID NO: 2014025 - RNA, 19 nt, Human
ucagaaucucaaauaacua

SEQ ID NO: 2014026 - RNA, 18 nt, Human
ucagaaucucaaauaacu

SEQ ID NO: 2014027 - RNA, 23 nt, Human
ucagaaguuuaaauauuaagcau

SEQ ID NO: 2014028 - RNA, 21 nt, Human
ucagagagggugggagugggc

SEQ ID NO: 2014029 - RNA, 16 nt, Human
ucagagagggugggag

SEQ ID NO: 2014030 - RNA, 23 nt, Human
ucagagagggugggagugggccc

SEQ ID NO: 2014031 - RNA, 12 nt, Human
ucagagccugca

SEQ ID NO: 2014032 - RNA, 13 nt, Human
ucagagccugcag

SEQ ID NO: 2014033 - RNA, 14 nt, Human
ucagagccugcagu

SEQ ID NO: 2014034 - RNA, 15 nt, Human
ucagagccugcaguu

SEQ ID NO: 2014035 - RNA, 18 nt, Human
ucagagccugcaguuauu

SEQ ID NO: 2014036 - RNA, 14 nt, Human
ucagaagacacuga

SEQ ID NO: 2014037 - RNA, 22 nt, Human
ucagaaguuucugccgcagccc

SEQ ID NO: 2014038 - RNA, 19 nt, Human
ucagaaguuucugccgcag

SEQ ID NO: 2014039 - RNA, 19 nt, Human
ucagaaguuucucagcucc

SEQ ID NO: 2014040 - RNA, 15 nt, Human
ucagaaguuuaaaua

SEQ ID NO: 2014041 - RNA, 17 nt, Human
ucagaaguuuaaauauu

SEQ ID NO: 2014042 - RNA, 15 nt, Human
ucagaaguccagagu

SEQ ID NO: 2014043 - RNA, 19 nt, Human
ucagaaggucuguuuugag

SEQ ID NO: 2014044 - RNA, 17 nt, Human
ucagaagguuguuuuau

SEQ ID NO: 2014045 - RNA, 14 nt, Human
ucagaaggucuguu

SEQ ID NO: 2014046 - RNA, 14 nt, Human
accacuuccagggg

SEQ ID NO: 2014047 - RNA, 20 nt, Human
accacuuccaggggaaccug

SEQ ID NO: 2014048 - RNA, 23 nt, Human
accacuuccaggggaaccugcca

SEQ ID NO: 2014049 - RNA, 15 nt, Human
accacuuuuguucuu

SEQ ID NO: 2014050 - RNA, 16 nt, Human
accacuuuuguucuug

SEQ ID NO: 2014051 - RNA, 21 nt, Human
accacuuuuguucuugguuug

SEQ ID NO: 2014052 - RNA, 22 nt, Human
ucaccccggccaccugcggugc

SEQ ID NO: 2014053 - RNA, 21 nt, Human
accacugcacuccagccuggg

SEQ ID NO: 2014054 - RNA, 23 nt, Human
accacugcucugaugaagaggag

SEQ ID NO: 2014055 - RNA, 15 nt, Human
accacugcucugaug

SEQ ID NO: 2014056 - RNA, 17 nt, Human
accacugcucugaugaa

SEQ ID NO: 2014057 - RNA, 20 nt, Human
accacugcacuccagccugg

SEQ ID NO: 2014058 - RNA, 17 nt, Human
accacugcacuccagcc

SEQ ID NO: 2014059 - RNA, 18 nt, Human
ucaccccggccaccugcg

SEQ ID NO: 2014060 - RNA, 17 nt, Human
ucaccccggccaccugc

SEQ ID NO: 2014061 - RNA, 14 nt, Human
accagacaagcugu

SEQ ID NO: 2014062 - RNA, 16 nt, Human
accagacaagcuguug

SEQ ID NO: 2014063 - RNA, 13 nt, Human
accagacacaaac

SEQ ID NO: 2014064 - RNA, 14 nt, Human
accagaagcccaga

SEQ ID NO: 2014065 - RNA, 16 nt, Human
accagaagcccagaau

SEQ ID NO: 2014066 - RNA, 13 nt, Human
accagaagcccag

SEQ ID NO: 2014067 - RNA, 14 nt, Human
accagaaccaaacc

SEQ ID NO: 2014068 - RNA, 19 nt, Human
accagaaccagucuuucaa

SEQ ID NO: 2014069 - RNA, 22 nt, Human
accacuuuuguucuugguuugu

SEQ ID NO: 2014070 - RNA, 19 nt, Human
accacuuguagauuugauu

SEQ ID NO: 2014071 - RNA, 13 nt, Human
accacuuguagau

SEQ ID NO: 2014072 - RNA, 14 nt, Human
accacuuguagauu

SEQ ID NO: 2014073 - RNA, 16 nt, Human
accacuuguagauuug

SEQ ID NO: 2014074 - RNA, 12 nt, Human
accagagcccac

SEQ ID NO: 2014075 - RNA, 14 nt, Human
accagagcccaccu

SEQ ID NO: 2014076 - RNA, 16 nt, Human
accagagcccaccuug

SEQ ID NO: 2014077 - RNA, 14 nt, Human
accagacaccuuga

SEQ ID NO: 2014078 - RNA, 11 nt, Human
accagacaggu

SEQ ID NO: 2014079 - RNA, 13 nt, Human
ucaccugccccuc

SEQ ID NO: 2014080 - RNA, 15 nt, Human
ucaccugccccucaa

SEQ ID NO: 2014081 - RNA, 15 nt, Human
ucaccucucccuugg

SEQ ID NO: 2014082 - RNA, 16 nt, Human
ucaccugaagacucau

SEQ ID NO: 2014083 - RNA, 14 nt, Human
accagggacugagg

SEQ ID NO: 2014084 - RNA, 17 nt, Human
accagagcccaccuugg

SEQ ID NO: 2014085 - RNA, 18 nt, Human
accagacuuuuuuaaaca

SEQ ID NO: 2014086 - RNA, 14 nt, Human
accagccuccaugc

SEQ ID NO: 2014087 - RNA, 19 nt, Human
accagccuccaugcugccu

SEQ ID NO: 2014088 - RNA, 20 nt, Human
accagccuccaugcugccuc

SEQ ID NO: 2014089 - RNA, 21 nt, Human
accagccuccaugcugccucc

SEQ ID NO: 2014090 - RNA, 18 nt, Human
ucacuauguugcccaggc

SEQ ID NO: 2014091 - RNA, 17 nt, Human
ucacuauguugcccagg

SEQ ID NO: 2014092 - RNA, 19 nt, Human
ucacuauguugcccaggca

SEQ ID NO: 2014093 - RNA, 20 nt, Human
ucacuauguugcccaggcag

SEQ ID NO: 2014094 - RNA, 20 nt, Human
ucaccccagccccaaaacuc

SEQ ID NO: 2014095 - RNA, 14 nt, Human
ucaccccagcccca

SEQ ID NO: 2014096 - RNA, 13 nt, Human
ucaccccagcccc

SEQ ID NO: 2014097 - RNA, 15 nt, Human
ucaccccggccaccu

SEQ ID NO: 2014098 - RNA, 15 nt, Human
ucaccaguacauucu

SEQ ID NO: 2014099 - RNA, 17 nt, Human
ucaccaguacauucuca

SEQ ID NO: 2014100 - RNA, 19 nt, Human
ucaccaguacauucucagu

SEQ ID NO: 2014101 - RNA, 21 nt, Human
ucaccaguacauucucaguuu

SEQ ID NO: 2014102 - RNA, 19 nt, Human
ucaccagugaccuggaagg

SEQ ID NO: 2014103 - RNA, 16 nt, Human
ucacaucuuuuucacu

SEQ ID NO: 2014104 - RNA, 22 nt, Human
ucacacgucuggcuucacagau

SEQ ID NO: 2014105 - RNA, 13 nt, Human
ucacaccugcaga

SEQ ID NO: 2014106 - RNA, 14 nt, Human
ucacaaauuucucu

SEQ ID NO: 2014107 - RNA, 18 nt, Human
ucacaaauuucucuguuc

SEQ ID NO: 2014108 - RNA, 19 nt, Human
ucacaaauuucucuguucc

SEQ ID NO: 2014109 - RNA, 16 nt, Human
ucacaacaaccugguc

SEQ ID NO: 2014110 - RNA, 18 nt, Human
ucacaaaugacuuuauua

SEQ ID NO: 2014111 - RNA, 19 nt, Human
ucacaaaugacuuuauuau

SEQ ID NO: 2014112 - RNA, 20 nt, Human
ucacaaaugacuuuauuauu

SEQ ID NO: 2014113 - RNA, 23 nt, Human
ucacaaauauuaaaaagucuuuu

SEQ ID NO: 2014114 - RNA, 11 nt, Human
ucacaaaugac

SEQ ID NO: 2014115 - RNA, 12 nt, Human
ucacaaaugacu

SEQ ID NO: 2014116 - RNA, 13 nt, Human
ucacaaaugacuu

SEQ ID NO: 2014117 - RNA, 14 nt, Human
ucacaaaugacuuu

SEQ ID NO: 2014118 - RNA, 15 nt, Human
ucacaaaugacuuua

SEQ ID NO: 2014119 - RNA, 12 nt, Human
ucacauaucugu

SEQ ID NO: 2014120 - RNA, 15 nt, Human
ucacauaucugucau

SEQ ID NO: 2014121 - RNA, 16 nt, Human
ucacauccuugacuuu

SEQ ID NO: 2014122 - RNA, 19 nt, Human
ucacauccuugacuuuuua

SEQ ID NO: 2014123 - RNA, 21 nt, Human
ucacauccuugacuuuuuaga

SEQ ID NO: 2014124 - RNA, 15 nt, Human
ucacaguucucuccu

SEQ ID NO: 2014125 - RNA, 17 nt, Human
ucacaguuauuacauac

SEQ ID NO: 2014126 - RNA, 15 nt, Human
accaauguucucucu

SEQ ID NO: 2014127 - RNA, 22 nt, Human
accaacauacucccaucuguga

SEQ ID NO: 2014128 - RNA, 21 nt, Human
accaacauacucccaucugug

SEQ ID NO: 2014129 - RNA, 19 nt, Human
accaacauacucccaucug

SEQ ID NO: 2014130 - RNA, 20 nt, Human
ucaagugauucucaugccuc

SEQ ID NO: 2014131 - RNA, 17 nt, Human
accaacauacucccauc

SEQ ID NO: 2014132 - RNA, 23 nt, Human
ucaagugaaaaaggaggaagaga

SEQ ID NO: 2014133 - RNA, 17 nt, Human
ucaagugauucucaugc

SEQ ID NO: 2014134 - RNA, 22 nt, Human
ucaaguauuuaagccuaaagau

SEQ ID NO: 2014135 - RNA, 15 nt, Human
ucaagugaaaaagga

SEQ ID NO: 2014136 - RNA, 15 nt, Human
ucaauucuugccaaa

SEQ ID NO: 2014137 - RNA, 14 nt, Human
ucacaaauauuaaa

SEQ ID NO: 2014138 - RNA, 15 nt, Human
ucacaaauauuaaaa

SEQ ID NO: 2014139 - RNA, 17 nt, Human
ucacaaauauuaaaaag

SEQ ID NO: 2014140 - RNA, 18 nt, Human
ucacaaauauuaaaaagu

SEQ ID NO: 2014141 - RNA, 20 nt, Human
ucacaaauauuaaaaagucu

SEQ ID NO: 2014142 - RNA, 21 nt, Human
ucacaaauauuaaaaagucuu

SEQ ID NO: 2014143 - RNA, 20 nt, Human
ucaauuuuugguugaauaaa

SEQ ID NO: 2014144 - RNA, 22 nt, Human
accacacguaaugaaacuugga

SEQ ID NO: 2014145 - RNA, 14 nt, Human
accacacuccagcu

SEQ ID NO: 2014146 - RNA, 15 nt, Human
accaauuuuaacuua

SEQ ID NO: 2014147 - RNA, 21 nt, Human
accaauuuuuugugugugaag

SEQ ID NO: 2014148 - RNA, 22 nt, Human
accaauuuuuugugugugaagc

SEQ ID NO: 2014149 - RNA, 13 nt, Human
uagucucaagaau

SEQ ID NO: 2014150 - RNA, 17 nt, Human
uagucuuaagaacugcu

SEQ ID NO: 2014151 - RNA, 21 nt, Human
uaguacuuuauagaagaaugc

SEQ ID NO: 2014152 - RNA, 12 nt, Human
uaguagagacag

SEQ ID NO: 2014153 - RNA, 13 nt, Human
uaguagagacagg

SEQ ID NO: 2014154 - RNA, 13 nt, Human
uaguacuuuauag

SEQ ID NO: 2014155 - RNA, 14 nt, Human
uaguacuuuauaga

SEQ ID NO: 2014156 - RNA, 15 nt, Human
uaguacuuuauagaa

SEQ ID NO: 2014157 - RNA, 16 nt, Human
uaguacuuuauagaag

SEQ ID NO: 2014158 - RNA, 18 nt, Human
uaguacuuuauagaagaa

SEQ ID NO: 2014159 - RNA, 14 nt, Human
uaguaauauaauac

SEQ ID NO: 2014160 - RNA, 23 nt, Human
uaguacuggauuauucaggcuuu

SEQ ID NO: 2014161 - RNA, 14 nt, Human
uaguacugugaauc

SEQ ID NO: 2014162 - RNA, 11 nt, Human
acacagugagu

SEQ ID NO: 2014163 - RNA, 18 nt, Human
acacaggacagggguucc

SEQ ID NO: 2014164 - RNA, 22 nt, Human
uaguaagucuugccuauauuuu

SEQ ID NO: 2014165 - RNA, 14 nt, Human
uaguaauaaagacu

SEQ ID NO: 2014166 - RNA, 23 nt, Human
uaguaagcggcucaagcccagga

SEQ ID NO: 2014167 - RNA, 13 nt, Human
uaguaagauacug

SEQ ID NO: 2014168 - RNA, 21 nt, Human
uagguuggcaaaaaggcagga

SEQ ID NO: 2014169 - RNA, 13 nt, Human
acacagugagucg

SEQ ID NO: 2014170 - RNA, 17 nt, Human
acacagugaccauacua

SEQ ID NO: 2014171 - RNA, 11 nt, Human
acacacagcuc

SEQ ID NO: 2014172 - RNA, 12 nt, Human
acacacagcucu

SEQ ID NO: 2014173 - RNA, 14 nt, Human
acacacacauacac

SEQ ID NO: 2014174 - RNA, 21 nt, Human
acaaugguuuucuuguguguu

SEQ ID NO: 2014175 - RNA, 19 nt, Human
uagcuuauuuuuacaguua

SEQ ID NO: 2014176 - RNA, 15 nt, Human
acaaugguuuucuug

SEQ ID NO: 2014177 - RNA, 22 nt, Human
uauaaccaguguuguggauuua

SEQ ID NO: 2014178 - RNA, 19 nt, Human
uauaacuauguugauaaaa

SEQ ID NO: 2014179 - RNA, 18 nt, Human
uauaacuacauauugaau

SEQ ID NO: 2014180 - RNA, 13 nt, Human
uauaacuacauau

SEQ ID NO: 2014181 - RNA, 16 nt, Human
acacuaaccacgcugg

SEQ ID NO: 2014182 - RNA, 17 nt, Human
acacuaaccacgcugga

SEQ ID NO: 2014183 - RNA, 19 nt, Human
acacuaaccacgcuggacc

SEQ ID NO: 2014184 - RNA, 19 nt, Human
acaccucugcacaagcugc

SEQ ID NO: 2014185 - RNA, 14 nt, Human
acaccuugacaggg

SEQ ID NO: 2014186 - RNA, 19 nt, Human
acaccugcagauucuagga

SEQ ID NO: 2014187 - RNA, 15 nt, Human
acaccuugacagggc

SEQ ID NO: 2014188 - RNA, 16 nt, Human
acaccuugacagggca

SEQ ID NO: 2014189 - RNA, 18 nt, Human
acaccucugcacaagcug

SEQ ID NO: 2014190 - RNA, 20 nt, Human
acaccuccucccacugccca

SEQ ID NO: 2014191 - RNA, 22 nt, Human
acaccuccucccacugcccacu

SEQ ID NO: 2014192 - RNA, 14 nt, Human
acaccuccucccac

SEQ ID NO: 2014193 - RNA, 15 nt, Human
acaccuccucccacu

SEQ ID NO: 2014194 - RNA, 12 nt, Human
acacccagggaa

SEQ ID NO: 2014195 - RNA, 21 nt, Human
acaccccaccugcgcuucacu

SEQ ID NO: 2014196 - RNA, 12 nt, Human
acaccccaccug

SEQ ID NO: 2014197 - RNA, 14 nt, Human
acacccaugaaaga

SEQ ID NO: 2014198 - RNA, 13 nt, Human
acaccccaccugc

SEQ ID NO: 2014199 - RNA, 14 nt, Human
acaccccaccugcg

SEQ ID NO: 2014200 - RNA, 16 nt, Human
acaccccaccugcgcu

SEQ ID NO: 2014201 - RNA, 19 nt, Human
acacauguccaagaagccc

SEQ ID NO: 2014202 - RNA, 18 nt, Human
acacauguccaagaagcc

SEQ ID NO: 2014203 - RNA, 13 nt, Human
acacauguccaag

SEQ ID NO: 2014204 - RNA, 16 nt, Human
uauaaaauggcaacaa

SEQ ID NO: 2014205 - RNA, 20 nt, Human
uauaaaauggcaacaaacug

SEQ ID NO: 2014206 - RNA, 22 nt, Human
uauaaaauggcaacaaacugca

SEQ ID NO: 2014207 - RNA, 18 nt, Human
uauaaaauguaucaacac

SEQ ID NO: 2014208 - RNA, 22 nt, Human
acacauguccaagaagcccagg

SEQ ID NO: 2014209 - RNA, 21 nt, Human
acacauguccaagaagcccag

SEQ ID NO: 2014210 - RNA, 18 nt, Human
acacauuucacugucugu

SEQ ID NO: 2014211 - RNA, 13 nt, Human
acacauuuuauuu

SEQ ID NO: 2014212 - RNA, 11 nt, Human
acacauuucuu

SEQ ID NO: 2014213 - RNA, 22 nt, Human
acacauuuguugccagauuuca

SEQ ID NO: 2014214 - RNA, 23 nt, Human
acacauuuguugccagauuucag

SEQ ID NO: 2014215 - RNA, 12 nt, Human
acacccagccca

SEQ ID NO: 2014216 - RNA, 13 nt, Human
acacccagcccac

SEQ ID NO: 2014217 - RNA, 21 nt, Human
uauaaaaauaaaaaacacugg

SEQ ID NO: 2014218 - RNA, 20 nt, Human
uauaaaaauaaaaaacacug

SEQ ID NO: 2014219 - RNA, 21 nt, Human
uauaaaacagaguaaucuugu

SEQ ID NO: 2014220 - RNA, 23 nt, Human
uauaaaacagcccuauuucuuga

SEQ ID NO: 2014221 - RNA, 12 nt, Human
uaguuuugcaua

SEQ ID NO: 2014222 - RNA, 13 nt, Human
uaguuuugcuuuu

SEQ ID NO: 2014223 - RNA, 18 nt, Human
uaguucagguaacaggca

SEQ ID NO: 2014224 - RNA, 14 nt, Human
uaguucaagaaaug

SEQ ID NO: 2014225 - RNA, 15 nt, Human
uaguucaagaaauga

SEQ ID NO: 2014226 - RNA, 18 nt, Human
uaguucaagaaaugaaga

SEQ ID NO: 2014227 - RNA, 20 nt, Human
uaguucaagaaaugaagagc

SEQ ID NO: 2014228 - RNA, 21 nt, Human
uaguucaagaaaugaagagcu

SEQ ID NO: 2014229 - RNA, 23 nt, Human
uaguucaaucuggauucauauuu

SEQ ID NO: 2014230 - RNA, 13 nt, Human
uaguuauguaaau

SEQ ID NO: 2014231 - RNA, 15 nt, Human
uaguuauguaaauaa

SEQ ID NO: 2014232 - RNA, 19 nt, Human
uaguuauguaaauaauucu

SEQ ID NO: 2014233 - RNA, 20 nt, Human
uaguuauguaaauaauucuu

SEQ ID NO: 2014234 - RNA, 21 nt, Human
uaguuauguaaauaauucuuu

SEQ ID NO: 2014235 - RNA, 19 nt, Human
uaucccuacuguaauuugu

SEQ ID NO: 2014236 - RNA, 20 nt, Human
uaucccuacuguaauuugug

SEQ ID NO: 2014237 - RNA, 16 nt, Human
uaucccggcugcccuu

SEQ ID NO: 2014238 - RNA, 14 nt, Human
uaucccugauaaau

SEQ ID NO: 2014239 - RNA, 15 nt, Human
uaucucagggccugg

SEQ ID NO: 2014240 - RNA, 13 nt, Human
uaucucagggccu

SEQ ID NO: 2014241 - RNA, 14 nt, Human
uaucucaaauugua

SEQ ID NO: 2014242 - RNA, 16 nt, Human
uaucucagauauuugc

SEQ ID NO: 2014243 - RNA, 17 nt, Human
uaucucagauauuugca

SEQ ID NO: 2014244 - RNA, 18 nt, Human
uaucucagauauuugcac

SEQ ID NO: 2014245 - RNA, 19 nt, Human
uaucucagauauuugcacc

SEQ ID NO: 2014246 - RNA, 14 nt, Human
uauccuacuucccc

SEQ ID NO: 2014247 - RNA, 17 nt, Human
uauccuacuuccccuuc

SEQ ID NO: 2014248 - RNA, 16 nt, Human
acagagcaguugagag

SEQ ID NO: 2014249 - RNA, 21 nt, Human
acagagcaagugagacccugu

SEQ ID NO: 2014250 - RNA, 15 nt, Human
acagagaugucucuu

SEQ ID NO: 2014251 - RNA, 16 nt, Human
acagagcaaccccugg

SEQ ID NO: 2014252 - RNA, 20 nt, Human
acagagcaaccccuggaccc

SEQ ID NO: 2014253 - RNA, 22 nt, Human
acagagcaaccccuggacccca

SEQ ID NO: 2014254 - RNA, 23 nt, Human
acagagcaaccccuggaccccag

SEQ ID NO: 2014255 - RNA, 13 nt, Human
acagagaugucuc

SEQ ID NO: 2014256 - RNA, 21 nt, Human
uaucuccuuuguauucugucu

SEQ ID NO: 2014257 - RNA, 17 nt, Human
acagaguuguuacauuu

SEQ ID NO: 2014258 - RNA, 18 nt, Human
acagaguuguuacauuuu

SEQ ID NO: 2014259 - RNA, 19 nt, Human
acagaguuguuacauuuuu

SEQ ID NO: 2014260 - RNA, 20 nt, Human
acagaguuguuacauuuuua

SEQ ID NO: 2014261 - RNA, 16 nt, Human
acagaguuguuacauu

SEQ ID NO: 2014262 - RNA, 20 nt, Human
acagcaacgaucacaaauga

SEQ ID NO: 2014263 - RNA, 21 nt, Human
acagcaacgaucacaaaugac

SEQ ID NO: 2014264 - RNA, 22 nt, Human
acagcaacgaucacaaaugacu

SEQ ID NO: 2014265 - RNA, 15 nt, Human
acagcccuauuucuu

SEQ ID NO: 2014266 - RNA, 23 nt, Human
acagcccgggcucugccucccau

SEQ ID NO: 2014267 - RNA, 22 nt, Human
acagcccgggcucugccuccca

SEQ ID NO: 2014268 - RNA, 21 nt, Human
acagcccgggcucugccuccc

SEQ ID NO: 2014269 - RNA, 16 nt, Human
uaucuuggcagguagg

SEQ ID NO: 2014270 - RNA, 17 nt, Human
acagcccuauuucuuga

SEQ ID NO: 2014271 - RNA, 18 nt, Human
acagcccuauuucuugau

SEQ ID NO: 2014272 - RNA, 20 nt, Human
uaugaaagauggcugugccu

SEQ ID NO: 2014273 - RNA, 22 nt, Human
uaugaaagauggcugugccucu

SEQ ID NO: 2014274 - RNA, 23 nt, Human
uaugaaagauggcugugccucug

SEQ ID NO: 2014275 - RNA, 12 nt, Human
uaucuuugauaa

SEQ ID NO: 2014276 - RNA, 15 nt, Human
acagaguuguuacau

SEQ ID NO: 2014277 - RNA, 21 nt, Human
acagaguuguuacauuuuuaa

SEQ ID NO: 2014278 - RNA, 22 nt, Human
acagaguuguuacauuuuuaag

SEQ ID NO: 2014279 - RNA, 20 nt, Human
acagauagauauaugcucug

SEQ ID NO: 2014280 - RNA, 20 nt, Human
acagauacuccuccaagguu

SEQ ID NO: 2014281 - RNA, 23 nt, Human
acagaugggugcuuggaggaagg

SEQ ID NO: 2014282 - RNA, 13 nt, Human
acagauucuuuau

SEQ ID NO: 2014283 - RNA, 18 nt, Human
acagaaaauucuucucca

SEQ ID NO: 2014284 - RNA, 20 nt, Human
acacuuguugauuaauggaa

SEQ ID NO: 2014285 - RNA, 23 nt, Human
acacuuguugauuaauggaaaug

SEQ ID NO: 2014286 - RNA, 13 nt, Human
acacuuuaauggg

SEQ ID NO: 2014287 - RNA, 13 nt, Human
acacuuaaaaaug

SEQ ID NO: 2014288 - RNA, 15 nt, Human
acacuuaaaaauggu

SEQ ID NO: 2014289 - RNA, 16 nt, Human
acacuguuucaaacuu

SEQ ID NO: 2014290 - RNA, 15 nt, Human
acacuguuucaaacu

SEQ ID NO: 2014291 - RNA, 23 nt, Human
acacuguuucaaacuuuacuaug

SEQ ID NO: 2014292 - RNA, 19 nt, Human
acacuguuuguuccagaau

SEQ ID NO: 2014293 - RNA, 14 nt, Human
acacuugucggcuc

SEQ ID NO: 2014294 - RNA, 14 nt, Human
acacuugugacuuu

SEQ ID NO: 2014295 - RNA, 15 nt, Human
acacuugugacuuuu

SEQ ID NO: 2014296 - RNA, 18 nt, Human
acacuugugacuuuugcu

SEQ ID NO: 2014297 - RNA, 20 nt, Human
acacuugugacuuuugcuuu

SEQ ID NO: 2014298 - RNA, 21 nt, Human
acacuugugacuuuugcuuua

SEQ ID NO: 2014299 - RNA, 17 nt, Human
acagacuggaagcacag

SEQ ID NO: 2014300 - RNA, 19 nt, Human
acagacuggaagcacagcu

SEQ ID NO: 2014301 - RNA, 21 nt, Human
acagacuggaagcacagcuuc

SEQ ID NO: 2014302 - RNA, 22 nt, Human
acagacuggaagcacagcuuca

SEQ ID NO: 2014303 - RNA, 18 nt, Human
acagacacaggcccggcu

SEQ ID NO: 2014304 - RNA, 22 nt, Human
acagacacaggcccggcuccag

SEQ ID NO: 2014305 - RNA, 19 nt, Human
acagaaagcagaacaguga

SEQ ID NO: 2014306 - RNA, 17 nt, Human
acagacacaggcccggc

SEQ ID NO: 2014307 - RNA, 12 nt, Human
uauauuuacaaa

SEQ ID NO: 2014308 - RNA, 17 nt, Human
uauauucuauuuuacaa

SEQ ID NO: 2014309 - RNA, 16 nt, Human
uauauucuauuuuaca

SEQ ID NO: 2014310 - RNA, 19 nt, Human
uauauuuaaagggaaauug

SEQ ID NO: 2014311 - RNA, 20 nt, Human
uauauucauucuuuuugaaa

SEQ ID NO: 2014312 - RNA, 19 nt, Human
uauauucauucuuuuugaa

SEQ ID NO: 2014313 - RNA, 19 nt, Human
uauauuccucuugcauuuc

SEQ ID NO: 2014314 - RNA, 23 nt, Human
uauauuccuuuucccaggaaaga

SEQ ID NO: 2014315 - RNA, 16 nt, Human
acacucacccaacaau

SEQ ID NO: 2014316 - RNA, 16 nt, Human
uauaaggacuuccuga

SEQ ID NO: 2014317 - RNA, 14 nt, Human
acacuccagugaga

SEQ ID NO: 2014318 - RNA, 13 nt, Human
acacuccuucaca

SEQ ID NO: 2014319 - RNA, 13 nt, Human
acacucugagacu

SEQ ID NO: 2014320 - RNA, 11 nt, Human
acacucugaga

SEQ ID NO: 2014321 - RNA, 20 nt, Human
acacuguucucugcccucca

SEQ ID NO: 2014322 - RNA, 18 nt, Human
acacuguucucugcccuc

SEQ ID NO: 2014323 - RNA, 17 nt, Human
acacuguucucugcccu

SEQ ID NO: 2014324 - RNA, 16 nt, Human
acacuguucucugccc

SEQ ID NO: 2014325 - RNA, 10 nt, Human
acacuguuau

SEQ ID NO: 2014326 - RNA, 23 nt, Human
acacuguucucugcccuccaaga

SEQ ID NO: 2014327 - RNA, 22 nt, Human
acacuguucucugcccuccaag

SEQ ID NO: 2014328 - RNA, 15 nt, Human
acacuguucucugcc

SEQ ID NO: 2014329 - RNA, 14 nt, Human
acacuguucucugc

SEQ ID NO: 2014330 - RNA, 20 nt, Human
acacucugggcuccagagug

SEQ ID NO: 2014331 - RNA, 13 nt, Human
uacugaaagccuu

SEQ ID NO: 2014332 - RNA, 14 nt, Human
uacucuagagaagu

SEQ ID NO: 2014333 - RNA, 19 nt, Human
uacugaaauaaacgucuua

SEQ ID NO: 2014334 - RNA, 22 nt, Human
uacugaaauaaacgucuuaaau

SEQ ID NO: 2014335 - RNA, 17 nt, Human
uacugaccagacaagcu

SEQ ID NO: 2014336 - RNA, 17 nt, Human
uacugagagugaacaaa

SEQ ID NO: 2014337 - RNA, 16 nt, Human
uacugggagccuaccc

SEQ ID NO: 2014338 - RNA, 19 nt, Human
uacugagagugaacaaauu

SEQ ID NO: 2014339 - RNA, 16 nt, Human
uacuguaauuugugau

SEQ ID NO: 2014340 - RNA, 17 nt, Human
uacuguaauuugugaua

SEQ ID NO: 2014341 - RNA, 15 nt, Human
uacuguaauuuguga

SEQ ID NO: 2014342 - RNA, 22 nt, Human
aauugagcugcuuuuuuugaaa

SEQ ID NO: 2014343 - RNA, 23 nt, Human
aauugagcugcuuuuuuugaaac

SEQ ID NO: 2014344 - RNA, 12 nt, Human
aauugauguuga

SEQ ID NO: 2014345 - RNA, 13 nt, Human
aauugauguugau

SEQ ID NO: 2014346 - RNA, 14 nt, Human
aauugauguugaug

SEQ ID NO: 2014347 - RNA, 15 nt, Human
aauugauguugaugc

SEQ ID NO: 2014348 - RNA, 16 nt, Human
aauugauguugaugca

SEQ ID NO: 2014349 - RNA, 17 nt, Human
aauugauguugaugcaa

SEQ ID NO: 2014350 - RNA, 15 nt, Human
aauugcaaucuauaa

SEQ ID NO: 2014351 - RNA, 23 nt, Human
aauugagccuaaaaauaaagcac

SEQ ID NO: 2014352 - RNA, 17 nt, Human
aauugagccuaaaaaua

SEQ ID NO: 2014353 - RNA, 19 nt, Human
uacuguacaaugacuuuau

SEQ ID NO: 2014354 - RNA, 23 nt, Human
uacuguacagacagaaaaaacug

SEQ ID NO: 2014355 - RNA, 19 nt, Human
uacuguacagacagaaaaa

SEQ ID NO: 2014356 - RNA, 16 nt, Human
aaugugugcccagcuu

SEQ ID NO: 2014357 - RNA, 18 nt, Human
aaugugugagugcaugua

SEQ ID NO: 2014358 - RNA, 20 nt, Human
aaugugugagugcauguacu

SEQ ID NO: 2014359 - RNA, 21 nt, Human
aaugugugagugcauguacua

SEQ ID NO: 2014360 - RNA, 16 nt, Human
aaugugugugauguga

SEQ ID NO: 2014361 - RNA, 21 nt, Human
aaugugugugaugugacauuu

SEQ ID NO: 2014362 - RNA, 23 nt, Human
aaugugugugaugugacauuugu

SEQ ID NO: 2014363 - RNA, 24 nt, Human
uacgcuccaucgcugucaucucag

SEQ ID NO: 2014364 - RNA, 18 nt, Human
aauugacaggcgaaagaa

SEQ ID NO: 2014365 - RNA, 22 nt, Human
uacggauccugcacugacucug

SEQ ID NO: 2014366 - RNA, 15 nt, Human
uacgucugacaggca

SEQ ID NO: 2014367 - RNA, 22 nt, Human
uacucuacccucuuagaaaaac

SEQ ID NO: 2014368 - RNA, 18 nt, Human
uacuagggaaaugccuuu

SEQ ID NO: 2014369 - RNA, 18 nt, Human
uacuaaaaauacaaaaaa

SEQ ID NO: 2014370 - RNA, 18 nt, Human
uacuagacugccacaagg

SEQ ID NO: 2014371 - RNA, 16 nt, Human
uacuagaguuggcaug

SEQ ID NO: 2014372 - RNA, 16 nt, Human
uacuagauuugggaga

SEQ ID NO: 2014373 - RNA, 23 nt, Human
uacuagauuugggagaagggcag

SEQ ID NO: 2014374 - RNA, 14 nt, Human
uacuaaaaauacaa

SEQ ID NO: 2014375 - RNA, 13 nt, Human
uacgugaguccug

SEQ ID NO: 2014376 - RNA, 16 nt, Human
uacgucugacaggcaa

SEQ ID NO: 2014377 - RNA, 23 nt, Human
uacggauccugcacugacucugg

SEQ ID NO: 2014378 - RNA, 15 nt, Human
uacuugaaaauuaac

SEQ ID NO: 2014379 - RNA, 17 nt, Human
uacuuuccaauucuccu

SEQ ID NO: 2014380 - RNA, 19 nt, Human
uacuuuccaauucuccuuu

SEQ ID NO: 2014381 - RNA, 12 nt, Human
uacuuucuguua

SEQ ID NO: 2014382 - RNA, 15 nt, Human
uacuuucuguuaaaa

SEQ ID NO: 2014383 - RNA, 23 nt, Human
uacuuugauauuuucaacgcagc

SEQ ID NO: 2014384 - RNA, 21 nt, Human
uacuuugucuaagaaacauug

SEQ ID NO: 2014385 - RNA, 17 nt, Human
uacuuugucuaagaaac

SEQ ID NO: 2014386 - RNA, 19 nt, Human
uacuuugucuaagaaacau

SEQ ID NO: 2014387 - RNA, 20 nt, Human
uacuuugucuaagaaacauu

SEQ ID NO: 2014388 - RNA, 17 nt, Human
uacuuucuguuaaaaug

SEQ ID NO: 2014389 - RNA, 15 nt, Human
uacuuucuucaaaau

SEQ ID NO: 2014390 - RNA, 15 nt, Human
uacuucuuauacauu

SEQ ID NO: 2014391 - RNA, 14 nt, Human
uacuucuuauacau

SEQ ID NO: 2014392 - RNA, 16 nt, Human
uacuucuuauacauuu

SEQ ID NO: 2014393 - RNA, 20 nt, Human
uacuucuccacccugcucuc

SEQ ID NO: 2014394 - RNA, 15 nt, Human
uacuucugcuacaua

SEQ ID NO: 2014395 - RNA, 23 nt, Human
uacuuccugugacuucagcucug

SEQ ID NO: 2014396 - RNA, 13 nt, Human
uacuucuccaccc

SEQ ID NO: 2014397 - RNA, 18 nt, Human
uacuucuccacccugcuc

SEQ ID NO: 2014398 - RNA, 14 nt, Human
uacuuccccuuccu

SEQ ID NO: 2014399 - RNA, 15 nt, Human
uacuuccccuuccua

SEQ ID NO: 2014400 - RNA, 18 nt, Human
uacuuccccuuccuaauu

SEQ ID NO: 2014401 - RNA, 20 nt, Human
uacuuccccuuccuaauucc

SEQ ID NO: 2014402 - RNA, 18 nt, Human
uacuucauguaauccaaa

SEQ ID NO: 2014403 - RNA, 23 nt, Human
uacuuccaagacuuauuuucaca

SEQ ID NO: 2014404 - RNA, 22 nt, Human
uacuuauuuaugaacagacuuu

SEQ ID NO: 2014405 - RNA, 14 nt, Human
uacuuauaaagaag

SEQ ID NO: 2014406 - RNA, 11 nt, Human
aauuucuuuug

SEQ ID NO: 2014407 - RNA, 16 nt, Human
aauuugaaaaugauaa

SEQ ID NO: 2014408 - RNA, 15 nt, Human
aauuggaaaagacua

SEQ ID NO: 2014409 - RNA, 18 nt, Human
aauuggaaugcacucaga

SEQ ID NO: 2014410 - RNA, 19 nt, Human
aauuggaaaagacuaagau

SEQ ID NO: 2014411 - RNA, 16 nt, Human
aauuuaaggucuguuu

SEQ ID NO: 2014412 - RNA, 21 nt, Human
aauuuaaggucuguuugcugu

SEQ ID NO: 2014413 - RNA, 13 nt, Human
aauuuaguauuuu

SEQ ID NO: 2014414 - RNA, 14 nt, Human
aauuuacugugacu

SEQ ID NO: 2014415 - RNA, 15 nt, Human
aauuuacuuuggaaa

SEQ ID NO: 2014416 - RNA, 16 nt, Human
aauuuacuacaauaug

SEQ ID NO: 2014417 - RNA, 17 nt, Human
aauuuacuacaauaugu

SEQ ID NO: 2014418 - RNA, 21 nt, Human
aauuuacuacaauauguacau

SEQ ID NO: 2014419 - RNA, 22 nt, Human
aauuuacuacaauauguacauu

SEQ ID NO: 2014420 - RNA, 23 nt, Human
aauuuacuacaauauguacauuu

SEQ ID NO: 2014421 - RNA, 17 nt, Human
aauuuacagagacagaa

SEQ ID NO: 2014422 - RNA, 18 nt, Human
aauuuacagagacagaaa

SEQ ID NO: 2014423 - RNA, 17 nt, Human
aauuuaccugaagucuu

SEQ ID NO: 2014424 - RNA, 15 nt, Human
aauuuacauacucug

SEQ ID NO: 2014425 - RNA, 23 nt, Human
aauuucuaggacugaauuaugaa

SEQ ID NO: 2014426 - RNA, 16 nt, Human
aauuucuuuauaaaau

SEQ ID NO: 2014427 - RNA, 22 nt, Human
aauuucuuuauaaaauuuacug

SEQ ID NO: 2014428 - RNA, 13 nt, Human
aauuuauuauggc

SEQ ID NO: 2014429 - RNA, 14 nt, Human
aauuuauuauggca

SEQ ID NO: 2014430 - RNA, 18 nt, Human
aauuucuaggacugaauu

SEQ ID NO: 2014431 - RNA, 22 nt, Human
aauuucuaggacugaauuauga

SEQ ID NO: 2014432 - RNA, 17 nt, Human
aauuucuaggacugaau

SEQ ID NO: 2014433 - RNA, 22 nt, Human
aauuuauaaacuuuuuucuuac

SEQ ID NO: 2014434 - RNA, 15 nt, Human
aauuugcagcuucca

SEQ ID NO: 2014435 - RNA, 15 nt, Human
uacuuuuuugaaauc

SEQ ID NO: 2014436 - RNA, 14 nt, Human
uacuuuuuugaaau

SEQ ID NO: 2014437 - RNA, 13 nt, Human
aauuugguuuuca

SEQ ID NO: 2014438 - RNA, 15 nt, Human
aauuugguuuucaca

SEQ ID NO: 2014439 - RNA, 21 nt, Human
aauuugguuuucacauuggaa

SEQ ID NO: 2014440 - RNA, 14 nt, Human
aauuuguggugauu

SEQ ID NO: 2014441 - RNA, 16 nt, Human
aauuuguggugauuug

SEQ ID NO: 2014442 - RNA, 16 nt, Human
aauuuguuauaaugaa

SEQ ID NO: 2014443 - RNA, 19 nt, Human
aauuuguguaaauuauuga

SEQ ID NO: 2014444 - RNA, 18 nt, Human
aauuuuugguugaauaaa

SEQ ID NO: 2014445 - RNA, 14 nt, Human
aauuuuugguugaa

SEQ ID NO: 2014446 - RNA, 16 nt, Human
aauuuuugguugaaua

SEQ ID NO: 2014447 - RNA, 23 nt, Human
aauuuuuggugggugaaaggaau

SEQ ID NO: 2014448 - RNA, 22 nt, Human
aauuuuuuuaucgucacugcuu

SEQ ID NO: 2014449 - RNA, 17 nt, Human
aauuuuuuuguaugaaa

SEQ ID NO: 2014450 - RNA, 18 nt, Human
aauuuuuuuguaugaaaa

SEQ ID NO: 2014451 - RNA, 19 nt, Human
aauuuuuuuguaugaaaac

SEQ ID NO: 2014452 - RNA, 20 nt, Human
aauuuuuuuucaugcuuuau

SEQ ID NO: 2014453 - RNA, 22 nt, Human
aauuuuuaaucuuuaauuuuac

SEQ ID NO: 2014454 - RNA, 22 nt, Human
aauuuuuaccauaguuuucuca

SEQ ID NO: 2014455 - RNA, 21 nt, Human
aauuuuucuguauagacagga

SEQ ID NO: 2014456 - RNA, 14 nt, Human
acaaauaacaacuu

SEQ ID NO: 2014457 - RNA, 15 nt, Human
acaaauaacaacuuu

SEQ ID NO: 2014458 - RNA, 22 nt, Human
acaaauaacaacuuuuuuuucu

SEQ ID NO: 2014459 - RNA, 18 nt, Human
acaaaguuuaucuuggcc

SEQ ID NO: 2014460 - RNA, 21 nt, Human
acaaagcgugguggacaugca

SEQ ID NO: 2014461 - RNA, 18 nt, Human
acaaagcccuuccauguc

SEQ ID NO: 2014462 - RNA, 21 nt, Human
acaaaacuuagcaucuaauuu

SEQ ID NO: 2014463 - RNA, 14 nt, Human
acaaaacuuuucua

SEQ ID NO: 2014464 - RNA, 22 nt, Human
uagauaggucagugcaaauacu

SEQ ID NO: 2014465 - RNA, 23 nt, Human
acaaauaacaacuuuuuuuucuu

SEQ ID NO: 2014466 - RNA, 23 nt, Human
acaaauaguaggcaagauggcac

SEQ ID NO: 2014467 - RNA, 12 nt, Human
acaaauauuaaa

SEQ ID NO: 2014468 - RNA, 16 nt, Human
acaaauauuaaaaagu

SEQ ID NO: 2014469 - RNA, 20 nt, Human
acaaauauuaaaaagucuuu

SEQ ID NO: 2014470 - RNA, 18 nt, Human
acaaauauuaaaaagucu

SEQ ID NO: 2014471 - RNA, 20 nt, Human
uagaugaaugucaguuguua

SEQ ID NO: 2014472 - RNA, 19 nt, Human
acaagcuccaagcucccag

SEQ ID NO: 2014473 - RNA, 17 nt, Human
acaagcuccaagcuccc

SEQ ID NO: 2014474 - RNA, 16 nt, Human
acaagcuccaagcucc

SEQ ID NO: 2014475 - RNA, 15 nt, Human
acaagcuccaagcuc

SEQ ID NO: 2014476 - RNA, 22 nt, Human
acaagcuccaagcucccaggca

SEQ ID NO: 2014477 - RNA, 18 nt, Human
acaagcgugagccacugc

SEQ ID NO: 2014478 - RNA, 22 nt, Human
acaagccuggaaaaaaacauca

SEQ ID NO: 2014479 - RNA, 20 nt, Human
acaaguugagcuaugacuua

SEQ ID NO: 2014480 - RNA, 21 nt, Human
acaaguugagcuaugacuuaa

SEQ ID NO: 2014481 - RNA, 18 nt, Human
acaaucucggcucacugc

SEQ ID NO: 2014482 - RNA, 20 nt, Human
acaaucucggcucacugcau

SEQ ID NO: 2014483 - RNA, 21 nt, Human
acaauauaagagcuuccaauu

SEQ ID NO: 2014484 - RNA, 18 nt, Human
acaauaugcccuuucugg

SEQ ID NO: 2014485 - RNA, 17 nt, Human
acaauauguacauuucu

SEQ ID NO: 2014486 - RNA, 18 nt, Human
acaauauguacauuucua

SEQ ID NO: 2014487 - RNA, 22 nt, Human
acaauaggaugggcuucugugc

SEQ ID NO: 2014488 - RNA, 16 nt, Human
uagcucaggugucccu

SEQ ID NO: 2014489 - RNA, 19 nt, Human
uagcgacaacagauuggau

SEQ ID NO: 2014490 - RNA, 20 nt, Human
uagcgacaacagauuggauu

SEQ ID NO: 2014491 - RNA, 21 nt, Human
uagcuacguuuacucacagcc

SEQ ID NO: 2014492 - RNA, 12 nt, Human
acaaucuucugu

SEQ ID NO: 2014493 - RNA, 16 nt, Human
uagcuacuaauuuuaa

SEQ ID NO: 2014494 - RNA, 13 nt, Human
uagccuuucuuuu

SEQ ID NO: 2014495 - RNA, 17 nt, Human
acaacaucuuuuucuac

SEQ ID NO: 2014496 - RNA, 13 nt, Human
acaagacacagug

SEQ ID NO: 2014497 - RNA, 16 nt, Human
acaacauccaaguggc

SEQ ID NO: 2014498 - RNA, 17 nt, Human
acaaauuuacagagaca

SEQ ID NO: 2014499 - RNA, 22 nt, Human
acaaauuguuacuccauauaua

SEQ ID NO: 2014500 - RNA, 21 nt, Human
acaaauucugucucuggauua

SEQ ID NO: 2014501 - RNA, 15 nt, Human
acaaaugcaucuuug

SEQ ID NO: 2014502 - RNA, 16 nt, Human
acaaaugcaucuuuga

SEQ ID NO: 2014503 - RNA, 18 nt, Human
acaaaugcaucuuugaug

SEQ ID NO: 2014504 - RNA, 20 nt, Human
acaaaugcaucuuugaugug

SEQ ID NO: 2014505 - RNA, 18 nt, Human
acaaaugacuuuauuauu

SEQ ID NO: 2014506 - RNA, 21 nt, Human
acaaaugacuuuauuauuuau

SEQ ID NO: 2014507 - RNA, 23 nt, Human
acaaaugacuuuauuauuuauuu

SEQ ID NO: 2014508 - RNA, 15 nt, Human
acaaaugauugcuuu

SEQ ID NO: 2014509 - RNA, 16 nt, Human
acaaaugauugcuuuu

SEQ ID NO: 2014510 - RNA, 18 nt, Human
acaaaugauugcuuuuaa

SEQ ID NO: 2014511 - RNA, 19 nt, Human
acaaaugauugcuuuuaaa

SEQ ID NO: 2014512 - RNA, 21 nt, Human
acaaaugauugcuuuuaaaau

SEQ ID NO: 2014513 - RNA, 21 nt, Human
uagcaaagcggguuauaauga

SEQ ID NO: 2014514 - RNA, 22 nt, Human
uagcaaaugagacagcagucuu

SEQ ID NO: 2014515 - RNA, 16 nt, Human
acaaaugacuuuauua

SEQ ID NO: 2014516 - RNA, 17 nt, Human
acaaaugacuuuauuau

SEQ ID NO: 2014517 - RNA, 22 nt, Human
acaagagcccaggccuccuaca

SEQ ID NO: 2014518 - RNA, 18 nt, Human
acaagagcuuaacagugu

SEQ ID NO: 2014519 - RNA, 19 nt, Human
acaagagcuuaacagugug

SEQ ID NO: 2014520 - RNA, 16 nt, Human
acaagaccacguuucu

SEQ ID NO: 2014521 - RNA, 23 nt, Human
acaacauccaaguggccuccguc

SEQ ID NO: 2014522 - RNA, 14 nt, Human
acaagacacaguga

SEQ ID NO: 2014523 - RNA, 17 nt, Human
acaagaccacguuucua

SEQ ID NO: 2014524 - RNA, 13 nt, Human
acaagcuccaagc

SEQ ID NO: 2014525 - RNA, 17 nt, Human
acaagcgugagccacug

SEQ ID NO: 2014526 - RNA, 19 nt, Human
acaagauugucauuaguga

SEQ ID NO: 2014527 - RNA, 23 nt, Human
uaaaggucacuuuucacauccuu

SEQ ID NO: 2014528 - RNA, 20 nt, Human
uaaagguuaccgauuucaaa

SEQ ID NO: 2014529 - RNA, 20 nt, Human
guuuugaagauucuauguua

SEQ ID NO: 2014530 - RNA, 16 nt, Human
guuuugaagauucuau

SEQ ID NO: 2014531 - RNA, 17 nt, Human
guuuugaagauucuaug

SEQ ID NO: 2014532 - RNA, 20 nt, Human
guuuugaaauaaaaagagua

SEQ ID NO: 2014533 - RNA, 16 nt, Human
guuuucuugauaauuu

SEQ ID NO: 2014534 - RNA, 21 nt, Human
guuuucuugauaauuuuccuu

SEQ ID NO: 2014535 - RNA, 23 nt, Human
guuuucuugauaauuuuccuuua

SEQ ID NO: 2014536 - RNA, 16 nt, Human
guuuucuuuuaauuuu

SEQ ID NO: 2014537 - RNA, 22 nt, Human
uaaaguaaaaacaaagaaauua

SEQ ID NO: 2014538 - RNA, 21 nt, Human
uaaaguaaaaacaaagaaauu

SEQ ID NO: 2014539 - RNA, 19 nt, Human
uaaaguaaaaacaaagaaa

SEQ ID NO: 2014540 - RNA, 22 nt, Human
uaaagguucaugcaaacuuuau

SEQ ID NO: 2014541 - RNA, 21 nt, Human
uaaaguaguaaaagaagaaau

SEQ ID NO: 2014542 - RNA, 17 nt, Human
uaaaguauacucuuagg

SEQ ID NO: 2014543 - RNA, 22 nt, Human
uaaaguacugagcagugauauu

SEQ ID NO: 2014544 - RNA, 23 nt, Human
uaaaguacugagcagugauauuc

SEQ ID NO: 2014545 - RNA, 13 nt, Human
uaaaguaauuggu

SEQ ID NO: 2014546 - RNA, 17 nt, Human
uaaaguaauuguuccag

SEQ ID NO: 2014547 - RNA, 20 nt, Human
uaaaguaauuguuccagaga

SEQ ID NO: 2014548 - RNA, 19 nt, Human
uaaaguacugagcagugau

SEQ ID NO: 2014549 - RNA, 21 nt, Human
uaaagguuucuauuuucucug

SEQ ID NO: 2014550 - RNA, 15 nt, Human
aauaaaaaaaagaaa

SEQ ID NO: 2014551 - RNA, 13 nt, Human
aauaaaaaaaaga

SEQ ID NO: 2014552 - RNA, 14 nt, Human
aauaaaaaaaagaa

SEQ ID NO: 2014553 - RNA, 21 nt, Human
aaguuuugugaaauuuuucau

SEQ ID NO: 2014554 - RNA, 20 nt, Human
aaguuuuuauggcuuuugug

SEQ ID NO: 2014555 - RNA, 12 nt, Human
aaguuuugugaa

SEQ ID NO: 2014556 - RNA, 13 nt, Human
aaguuuugugaaa

SEQ ID NO: 2014557 - RNA, 14 nt, Human
aaguuuugugaaau

SEQ ID NO: 2014558 - RNA, 15 nt, Human
aaguuuugugaaauu

SEQ ID NO: 2014559 - RNA, 16 nt, Human
aaguuuugugaaauuu

SEQ ID NO: 2014560 - RNA, 18 nt, Human
aaguuuugugaaauuuuu

SEQ ID NO: 2014561 - RNA, 19 nt, Human
aaguuuugugaaauuuuuc

SEQ ID NO: 2014562 - RNA, 20 nt, Human
aaguuuugugaaauuuuuca

SEQ ID NO: 2014563 - RNA, 19 nt, Human
uaaaguauuuggguuuugu

SEQ ID NO: 2014564 - RNA, 11 nt, Human
aaguuuuguga

SEQ ID NO: 2014565 - RNA, 12 nt, Human
aauaaaguuuga

SEQ ID NO: 2014566 - RNA, 15 nt, Human
aauaaaguuugaucu

SEQ ID NO: 2014567 - RNA, 19 nt, Human
aauaaauccacccauguua

SEQ ID NO: 2014568 - RNA, 16 nt, Human
aauaaaucauaaaacu

SEQ ID NO: 2014569 - RNA, 12 nt, Human
aauaaaacuuuu

SEQ ID NO: 2014570 - RNA, 14 nt, Human
aauaaaacuuuuua

SEQ ID NO: 2014571 - RNA, 15 nt, Human
aauaaaacuuuuuaa

SEQ ID NO: 2014572 - RNA, 18 nt, Human
aauaaaacuuuuuaaaau

SEQ ID NO: 2014573 - RNA, 14 nt, Human
aauaaauuggaguu

SEQ ID NO: 2014574 - RNA, 15 nt, Human
aauaacgauaaaaga

SEQ ID NO: 2014575 - RNA, 21 nt, Human
aauaacugauuaguaagucuu

SEQ ID NO: 2014576 - RNA, 16 nt, Human
aauaaauugcuccuug

SEQ ID NO: 2014577 - RNA, 20 nt, Human
aauaaauugcuccuugacau

SEQ ID NO: 2014578 - RNA, 21 nt, Human
aauaacaaugaaaguugauaa

SEQ ID NO: 2014579 - RNA, 18 nt, Human
uaaauuaacuuuuauaaa

SEQ ID NO: 2014580 - RNA, 17 nt, Human
uaaauuaacuuuuauaa

SEQ ID NO: 2014581 - RNA, 15 nt, Human
uaaauuaacuuuuau

SEQ ID NO: 2014582 - RNA, 16 nt, Human
uaaauuaacuuuuaua

SEQ ID NO: 2014583 - RNA, 12 nt, Human
uaaauuaacuuu

SEQ ID NO: 2014584 - RNA, 14 nt, Human
uaaauuaacuuuua

SEQ ID NO: 2014585 - RNA, 24 nt, Human
uaaauguuuuuuuuuaaagacuuu

SEQ ID NO: 2014586 - RNA, 20 nt, Human
uaaauguugaaagaucaaaa

SEQ ID NO: 2014587 - RNA, 23 nt, Human
uaaauguuuuuuuuuaaagacuu

SEQ ID NO: 2014588 - RNA, 15 nt, Human
uaaauguugaaagau

SEQ ID NO: 2014589 - RNA, 14 nt, Human
uaaauguuauguau

SEQ ID NO: 2014590 - RNA, 15 nt, Human
uaaauguuauguaua

SEQ ID NO: 2014591 - RNA, 16 nt, Human
uaaauguuauguauau

SEQ ID NO: 2014592 - RNA, 19 nt, Human
uaaauguuauguauauggu

SEQ ID NO: 2014593 - RNA, 19 nt, Human
uaaaugcaaccauuugaaa

SEQ ID NO: 2014594 - RNA, 23 nt, Human
uaaaugcaccuggaauauauaac

SEQ ID NO: 2014595 - RNA, 16 nt, Human
uaaaugcaguuacaaa

SEQ ID NO: 2014596 - RNA, 17 nt, Human
uaaaugcaguuacaaau

SEQ ID NO: 2014597 - RNA, 19 nt, Human
uaaaugcaguuacaaauua

SEQ ID NO: 2014598 - RNA, 21 nt, Human
uaaaugcaguuacaaauuaua

SEQ ID NO: 2014599 - RNA, 14 nt, Human
uaaaucucuucugu

SEQ ID NO: 2014600 - RNA, 18 nt, Human
uaaaucucuucuguguuu

SEQ ID NO: 2014601 - RNA, 21 nt, Human
uaaaucuguccaacugagaag

SEQ ID NO: 2014602 - RNA, 14 nt, Human
uaaaucuccaaaau

SEQ ID NO: 2014603 - RNA, 15 nt, Human
uaaaucuccaaaaua

SEQ ID NO: 2014604 - RNA, 18 nt, Human
uaaaucuccaaaauaaaa

SEQ ID NO: 2014605 - RNA, 21 nt, Human
aauaauucuuuuuuauuaauc

SEQ ID NO: 2014606 - RNA, 23 nt, Human
aauaauucuuuuuuauuaaucac

SEQ ID NO: 2014607 - RNA, 13 nt, Human
aauaauugacagg

SEQ ID NO: 2014608 - RNA, 14 nt, Human
aauaauucuuuuuu

SEQ ID NO: 2014609 - RNA, 15 nt, Human
aauaauucuuuuuua

SEQ ID NO: 2014610 - RNA, 20 nt, Human
aauaauucuuuuuuauuaau

SEQ ID NO: 2014611 - RNA, 22 nt, Human
aauaacuguaauuauuugaaug

SEQ ID NO: 2014612 - RNA, 20 nt, Human
aauaagaauagaacaacaua

SEQ ID NO: 2014613 - RNA, 12 nt, Human
aauaagaaaaga

SEQ ID NO: 2014614 - RNA, 15 nt, Human
aauaacuguaauuau

SEQ ID NO: 2014615 - RNA, 13 nt, Human
aauaauuuuguaa

SEQ ID NO: 2014616 - RNA, 14 nt, Human
aauaauuuuguaau

SEQ ID NO: 2014617 - RNA, 15 nt, Human
aauaauuuuguaaug

SEQ ID NO: 2014618 - RNA, 17 nt, Human
aauaauuuguggugauu

SEQ ID NO: 2014619 - RNA, 19 nt, Human
uaaauaaugugaaacugga

SEQ ID NO: 2014620 - RNA, 18 nt, Human
uaaauaaguuauaaagau

SEQ ID NO: 2014621 - RNA, 12 nt, Human
uaaauaauucuu

SEQ ID NO: 2014622 - RNA, 13 nt, Human
uaaauaauucuuu

SEQ ID NO: 2014623 - RNA, 21 nt, Human
uaaauaaaguuuguugaaaca

SEQ ID NO: 2014624 - RNA, 12 nt, Human
uaaauaaaguuu

SEQ ID NO: 2014625 - RNA, 15 nt, Human
uaacuuuuauaaacu

SEQ ID NO: 2014626 - RNA, 17 nt, Human
uaacuuuuauaaacuuu

SEQ ID NO: 2014627 - RNA, 18 nt, Human
uaacuuuuauaaacuuua

SEQ ID NO: 2014628 - RNA, 21 nt, Human
uaacuaaaauaauuuuguaau

SEQ ID NO: 2014629 - RNA, 20 nt, Human
uaacuaaaauaauuuuguaa

SEQ ID NO: 2014630 - RNA, 19 nt, Human
uaacuaacaaacagauucu

SEQ ID NO: 2014631 - RNA, 18 nt, Human
uaacuacauauugaauag

SEQ ID NO: 2014632 - RNA, 17 nt, Human
uaacuaccuuuggcuua

SEQ ID NO: 2014633 - RNA, 21 nt, Human
uaacuaccuuuggcuuaauuc

SEQ ID NO: 2014634 - RNA, 22 nt, Human
uaacuaccuuuggcuuaauucc

SEQ ID NO: 2014635 - RNA, 18 nt, Human
uaagaauauuugaaugua

SEQ ID NO: 2014636 - RNA, 13 nt, Human
uaagaaugaguuu

SEQ ID NO: 2014637 - RNA, 18 nt, Human
uaagaaugaguuucuuag

SEQ ID NO: 2014638 - RNA, 17 nt, Human
uaagacauuuuuggaag

SEQ ID NO: 2014639 - RNA, 20 nt, Human
uaagaaugaguuucuuagac

SEQ ID NO: 2014640 - RNA, 20 nt, Human
aauaugaaauuuuuuuucau

SEQ ID NO: 2014641 - RNA, 23 nt, Human
aauaugaaauuuuuuuucaugcu

SEQ ID NO: 2014642 - RNA, 19 nt, Human
aauaucuuuuuuuuaauaa

SEQ ID NO: 2014643 - RNA, 20 nt, Human
aauaucugaaaauguaugug

SEQ ID NO: 2014644 - RNA, 15 nt, Human
aauaucuugcuugaa

SEQ ID NO: 2014645 - RNA, 17 nt, Human
aauaucuugcuugaacu

SEQ ID NO: 2014646 - RNA, 13 nt, Human
aauauccucaauu

SEQ ID NO: 2014647 - RNA, 16 nt, Human
aauaucuccgucaacu

SEQ ID NO: 2014648 - RNA, 16 nt, Human
aauaucuaguaauaua

SEQ ID NO: 2014649 - RNA, 18 nt, Human
aauaucuaguaauauauu

SEQ ID NO: 2014650 - RNA, 21 nt, Human
aauaucuaguaauauauuuaa

SEQ ID NO: 2014651 - RNA, 21 nt, Human
aauaucuccgucaacucauau

SEQ ID NO: 2014652 - RNA, 19 nt, Human
aauaucugaaaauguaugu

SEQ ID NO: 2014653 - RNA, 18 nt, Human
aauaucugaaaauguaug

SEQ ID NO: 2014654 - RNA, 17 nt, Human
aauaucugaaaauguau

SEQ ID NO: 2014655 - RNA, 16 nt, Human
aauaucugaaaaugua

SEQ ID NO: 2014656 - RNA, 15 nt, Human
aauaugcacacauuu

SEQ ID NO: 2014657 - RNA, 17 nt, Human
aauauugauaugcuuau

SEQ ID NO: 2014658 - RNA, 18 nt, Human
aauauugauaugcuuaua

SEQ ID NO: 2014659 - RNA, 18 nt, Human
aauaugauuaaaaauauc

SEQ ID NO: 2014660 - RNA, 22 nt, Human
aauauugcugauggugcaauga

SEQ ID NO: 2014661 - RNA, 21 nt, Human
aauauugcugauggugcaaug

SEQ ID NO: 2014662 - RNA, 18 nt, Human
aauauugcugauggugca

SEQ ID NO: 2014663 - RNA, 15 nt, Human
aauauugcugauggu

SEQ ID NO: 2014664 - RNA, 13 nt, Human
aauauugcugaug

SEQ ID NO: 2014665 - RNA, 12 nt, Human
aauauugcugau

SEQ ID NO: 2014666 - RNA, 11 nt, Human
aauauugcuga

SEQ ID NO: 2014667 - RNA, 21 nt, Human
aaucacuguguauauuugauu

SEQ ID NO: 2014668 - RNA, 23 nt, Human
aaucacuguguauauuugauuua

SEQ ID NO: 2014669 - RNA, 17 nt, Human
aauauuuucauuauaca

SEQ ID NO: 2014670 - RNA, 22 nt, Human
aaucacuguguauauuugauuu

SEQ ID NO: 2014671 - RNA, 11 nt, Human
aauauuuuaau

SEQ ID NO: 2014672 - RNA, 20 nt, Human
aauauuuuaauuuuuaaaug

SEQ ID NO: 2014673 - RNA, 21 nt, Human
aauauuuuaauuuuuaaaugc

SEQ ID NO: 2014674 - RNA, 21 nt, Human
aauauuuuagguguaaaauaa

SEQ ID NO: 2014675 - RNA, 14 nt, Human
aauauuguuaaggg

SEQ ID NO: 2014676 - RNA, 16 nt, Human
aauagaugcugacugu

SEQ ID NO: 2014677 - RNA, 20 nt, Human
aauagccugccucuucucua

SEQ ID NO: 2014678 - RNA, 13 nt, Human
aauagcugggacu

SEQ ID NO: 2014679 - RNA, 14 nt, Human
aauagcugggacua

SEQ ID NO: 2014680 - RNA, 18 nt, Human
aauagacaauuuauuaug

SEQ ID NO: 2014681 - RNA, 16 nt, Human
aauagacagcaugaga

SEQ ID NO: 2014682 - RNA, 23 nt, Human
aauagacaauuuauuauggcaca

SEQ ID NO: 2014683 - RNA, 18 nt, Human
aauagacccacaagaggc

SEQ ID NO: 2014684 - RNA, 16 nt, Human
aauaggaaaaacugau

SEQ ID NO: 2014685 - RNA, 15 nt, Human
aauaggaaaaacuga

SEQ ID NO: 2014686 - RNA, 15 nt, Human
aauagcuuuaaugau

SEQ ID NO: 2014687 - RNA, 16 nt, Human
aauagcuuuaaugaua

SEQ ID NO: 2014688 - RNA, 18 nt, Human
aauaggaaaaacugauuu

SEQ ID NO: 2014689 - RNA, 17 nt, Human
aauaggaaaaacugauu

SEQ ID NO: 2014690 - RNA, 24 nt, Human
aauagcuuuuuucucugauacaga

SEQ ID NO: 2014691 - RNA, 19 nt, Human
aauaggaaaaacugauuuu

SEQ ID NO: 2014692 - RNA, 18 nt, Human
aauaggcguaacuaauuu

SEQ ID NO: 2014693 - RNA, 14 nt, Human
aauaggacuuguuu

SEQ ID NO: 2014694 - RNA, 15 nt, Human
aauaggacuuguuuu

SEQ ID NO: 2014695 - RNA, 14 nt, Human
aauaggaugggcuu

SEQ ID NO: 2014696 - RNA, 20 nt, Human
aauaggaugggcuucugugc

SEQ ID NO: 2014697 - RNA, 16 nt, Human
aauaguaauauaauac

SEQ ID NO: 2014698 - RNA, 13 nt, Human
aauaguaggcaag

SEQ ID NO: 2014699 - RNA, 21 nt, Human
aauaguaggcaagauggcaca

SEQ ID NO: 2014700 - RNA, 18 nt, Human
aauagggcuaggaauaua

SEQ ID NO: 2014701 - RNA, 12 nt, Human
aauaguaauaua

SEQ ID NO: 2014702 - RNA, 13 nt, Human
aauaguaauauaa

SEQ ID NO: 2014703 - RNA, 14 nt, Human
aauaguaauauaau

SEQ ID NO: 2014704 - RNA, 15 nt, Human
aauaguaauauaaua

SEQ ID NO: 2014705 - RNA, 14 nt, Human
uaacaugauuuggg

SEQ ID NO: 2014706 - RNA, 14 nt, Human
uaacauggaaguac

SEQ ID NO: 2014707 - RNA, 17 nt, Human
uaacauagaauugcaau

SEQ ID NO: 2014708 - RNA, 23 nt, Human
uaacauagaauugcaaucuauaa

SEQ ID NO: 2014709 - RNA, 16 nt, Human
uaaccucuaaauucuu

SEQ ID NO: 2014710 - RNA, 14 nt, Human
uaaccucuguucag

SEQ ID NO: 2014711 - RNA, 18 nt, Human
uaaccucuguucaggaag

SEQ ID NO: 2014712 - RNA, 15 nt, Human
uaacauggaaguacu

SEQ ID NO: 2014713 - RNA, 16 nt, Human
uaacauggaaguacua

SEQ ID NO: 2014714 - RNA, 15 nt, Human
uaacuaaaagguaug

SEQ ID NO: 2014715 - RNA, 12 nt, Human
uaacuaaaauaa

SEQ ID NO: 2014716 - RNA, 18 nt, Human
uaacuaaaauaauuuugu

SEQ ID NO: 2014717 - RNA, 19 nt, Human
uaacuaaaauaauuuugua

SEQ ID NO: 2014718 - RNA, 14 nt, Human
uaacuaaaagguau

SEQ ID NO: 2014719 - RNA, 14 nt, Human
aauauccauauuaa

SEQ ID NO: 2014720 - RNA, 22 nt, Human
aauaucccuuggacauuuuaug

SEQ ID NO: 2014721 - RNA, 21 nt, Human
aauaucccuuggacauuuuau

SEQ ID NO: 2014722 - RNA, 20 nt, Human
aauaucccuuggacauuuua

SEQ ID NO: 2014723 - RNA, 21 nt, Human
aauauauuaguaagauacugu

SEQ ID NO: 2014724 - RNA, 17 nt, Human
aauaucaaauuaauugu

SEQ ID NO: 2014725 - RNA, 19 nt, Human
aauaucaaauuaauugugu

SEQ ID NO: 2014726 - RNA, 21 nt, Human
aauaucaaauuaauuguguga

SEQ ID NO: 2014727 - RNA, 17 nt, Human
aauauauggucuaaugu

SEQ ID NO: 2014728 - RNA, 18 nt, Human
aauauauggucuaauguu

SEQ ID NO: 2014729 - RNA, 19 nt, Human
aauauauggucuaauguuu

SEQ ID NO: 2014730 - RNA, 20 nt, Human
aauauauggucuaauguuua

SEQ ID NO: 2014731 - RNA, 15 nt, Human
aaucauuguccagag

SEQ ID NO: 2014732 - RNA, 17 nt, Human
aaucauuguccagagcu

SEQ ID NO: 2014733 - RNA, 12 nt, Human
aaucuaaaugga

SEQ ID NO: 2014734 - RNA, 19 nt, Human
aauccuuacaaaugauugc

SEQ ID NO: 2014735 - RNA, 18 nt, Human
aaucuaaauggaaccacu

SEQ ID NO: 2014736 - RNA, 13 nt, Human
aaucuaaauggaa

SEQ ID NO: 2014737 - RNA, 15 nt, Human
aaucuaaauggaacc

SEQ ID NO: 2014738 - RNA, 14 nt, Human
aaucuacugcauuu

SEQ ID NO: 2014739 - RNA, 13 nt, Human
aaucuacugcauu

SEQ ID NO: 2014740 - RNA, 15 nt, Human
aaucuacugcauuua

SEQ ID NO: 2014741 - RNA, 14 nt, Human
aaucuauagaaagu

SEQ ID NO: 2014742 - RNA, 22 nt, Human
aaucuagccagugaacauaauu

SEQ ID NO: 2014743 - RNA, 15 nt, Human
aaucucaaauaacua

SEQ ID NO: 2014744 - RNA, 12 nt, Human
aaucucaaauuu

SEQ ID NO: 2014745 - RNA, 14 nt, Human
aaucucaaauuucu

SEQ ID NO: 2014746 - RNA, 15 nt, Human
aaucuauagaaagug

SEQ ID NO: 2014747 - RNA, 14 nt, Human
aaucuuauaauuua

SEQ ID NO: 2014748 - RNA, 16 nt, Human
aaucuuauaauuuaaa

SEQ ID NO: 2014749 - RNA, 23 nt, Human
aaucugucugcuggucacuucuu

SEQ ID NO: 2014750 - RNA, 11 nt, Human
aaucugucugc

SEQ ID NO: 2014751 - RNA, 14 nt, Human
aaucugucugcugg

SEQ ID NO: 2014752 - RNA, 22 nt, Human
aaucugucugcuggucacuucu

SEQ ID NO: 2014753 - RNA, 17 nt, Human
aaucauggugcucagag

SEQ ID NO: 2014754 - RNA, 13 nt, Human
aaucauguuucuu

SEQ ID NO: 2014755 - RNA, 15 nt, Human
aaucaucaagucuuu

SEQ ID NO: 2014756 - RNA, 20 nt, Human
uaaguuugcacucaaaucuu

SEQ ID NO: 2014757 - RNA, 21 nt, Human
uaaguuuggcaaacagaaugu

SEQ ID NO: 2014758 - RNA, 12 nt, Human
uaaguuugcacu

SEQ ID NO: 2014759 - RNA, 13 nt, Human
uaaguuugcacuc

SEQ ID NO: 2014760 - RNA, 17 nt, Human
uaaguuugcacucaaau

SEQ ID NO: 2014761 - RNA, 21 nt, Human
uaaguuuugacaagcuggcuu

SEQ ID NO: 2014762 - RNA, 17 nt, Human
aaucagacuaugaaguu

SEQ ID NO: 2014763 - RNA, 14 nt, Human
aaucagacuaugaa

SEQ ID NO: 2014764 - RNA, 20 nt, Human
uaaguuuuuauggcuuuugu

SEQ ID NO: 2014765 - RNA, 15 nt, Human
uaaugaaacuuggau

SEQ ID NO: 2014766 - RNA, 15 nt, Human
uaaugacaggccugu

SEQ ID NO: 2014767 - RNA, 20 nt, Human
uaaugacaggccuguccaac

SEQ ID NO: 2014768 - RNA, 23 nt, Human
uaaugaaagacuguacaaaguag

SEQ ID NO: 2014769 - RNA, 22 nt, Human
uaaugaaagacuguacaaagua

SEQ ID NO: 2014770 - RNA, 21 nt, Human
uaaugacuuaagcacacuuga

SEQ ID NO: 2014771 - RNA, 17 nt, Human
uaaugagcaauaucugc

SEQ ID NO: 2014772 - RNA, 15 nt, Human
uaaugacuuaagcac

SEQ ID NO: 2014773 - RNA, 14 nt, Human
uaaugacauucaau

SEQ ID NO: 2014774 - RNA, 17 nt, Human
uaaugacauucaauaaa

SEQ ID NO: 2014775 - RNA, 19 nt, Human
uaaugacauucaauaaagu

SEQ ID NO: 2014776 - RNA, 19 nt, Human
uaaugaaagacuguacaaa

SEQ ID NO: 2014777 - RNA, 18 nt, Human
uaaugaaagacuguacaa

SEQ ID NO: 2014778 - RNA, 17 nt, Human
uaaugaaagacuguaca

SEQ ID NO: 2014779 - RNA, 14 nt, Human
uaaugaaagacugu

SEQ ID NO: 2014780 - RNA, 14 nt, Human
uaaugaaacuugga

SEQ ID NO: 2014781 - RNA, 22 nt, Human
uaaucauauuagacuucuguuu

SEQ ID NO: 2014782 - RNA, 12 nt, Human
uaaucauauuag

SEQ ID NO: 2014783 - RNA, 14 nt, Human
uaaucauauuagac

SEQ ID NO: 2014784 - RNA, 23 nt, Human
aaucuuccuggucgaaaguuagu

SEQ ID NO: 2014785 - RNA, 17 nt, Human
uaauaccuuagaaggua

SEQ ID NO: 2014786 - RNA, 22 nt, Human
uaauacugaaccacuuguagau

SEQ ID NO: 2014787 - RNA, 20 nt, Human
uaauacugaaccacuuguag

SEQ ID NO: 2014788 - RNA, 21 nt, Human
uaauacugaaccacuuguaga

SEQ ID NO: 2014789 - RNA, 13 nt, Human
uaauacugaacca

SEQ ID NO: 2014790 - RNA, 14 nt, Human
uaauacugaaccac

SEQ ID NO: 2014791 - RNA, 15 nt, Human
uaauacugaaccacu

SEQ ID NO: 2014792 - RNA, 19 nt, Human
uaauacugaaccacuugua

SEQ ID NO: 2014793 - RNA, 20 nt, Human
aaucuuauuaaaguuucaaa

SEQ ID NO: 2014794 - RNA, 21 nt, Human
aaucuuauuaaaguuucaaaa

SEQ ID NO: 2014795 - RNA, 19 nt, Human
aaucuuccuggucgaaagu

SEQ ID NO: 2014796 - RNA, 21 nt, Human
aaucuuccuggucgaaaguua

SEQ ID NO: 2014797 - RNA, 20 nt, Human
aaucuucugaacuuggcgcu

SEQ ID NO: 2014798 - RNA, 13 nt, Human
aaucuucugaacu

SEQ ID NO: 2014799 - RNA, 19 nt, Human
uaauagguuuggacaaaau

SEQ ID NO: 2014800 - RNA, 18 nt, Human
uaauaggcucugccugac

SEQ ID NO: 2014801 - RNA, 14 nt, Human
uaauagguuuggac

SEQ ID NO: 2014802 - RNA, 23 nt, Human
uaaucaagagccuuaaaacauca

SEQ ID NO: 2014803 - RNA, 23 nt, Human
uaaucaacauggcuacuugcuuu

SEQ ID NO: 2014804 - RNA, 14 nt, Human
uaaucaagagccuu

SEQ ID NO: 2014805 - RNA, 18 nt, Human
uaaucaagagccuuaaaa

SEQ ID NO: 2014806 - RNA, 19 nt, Human
uaaucaagagccuuaaaac

SEQ ID NO: 2014807 - RNA, 20 nt, Human
uaaucaagagccuuaaaaca

SEQ ID NO: 2014808 - RNA, 21 nt, Human
uaaucaccagggccaaaagcu

SEQ ID NO: 2014809 - RNA, 14 nt, Human
aaucuugugaaaau

SEQ ID NO: 2014810 - RNA, 19 nt, Human
aaucuugugaaaauaauug

SEQ ID NO: 2014811 - RNA, 18 nt, Human
aaucuuguugguucacca

SEQ ID NO: 2014812 - RNA, 19 nt, Human
aaucuuguugguucaccau

SEQ ID NO: 2014813 - RNA, 22 nt, Human
uaauguaacugcucuugggcaa

SEQ ID NO: 2014814 - RNA, 21 nt, Human
uaauguaacugcucuugggca

SEQ ID NO: 2014815 - RNA, 13 nt, Human
uaaugaggaaacu

SEQ ID NO: 2014816 - RNA, 18 nt, Human
uaaugguaguuuuacagu

SEQ ID NO: 2014817 - RNA, 18 nt, Human
uaaugagcaauaucugcu

SEQ ID NO: 2014818 - RNA, 21 nt, Human
uaaugagcaauaucugcuaga

SEQ ID NO: 2014819 - RNA, 22 nt, Human
uaauggugaugcagucuuagau

SEQ ID NO: 2014820 - RNA, 15 nt, Human
aaugagccuggcaag

SEQ ID NO: 2014821 - RNA, 19 nt, Human
aaugagacucuagggucca

SEQ ID NO: 2014822 - RNA, 15 nt, Human
aaugagaauuuaagc

SEQ ID NO: 2014823 - RNA, 13 nt, Human
aaugagacagcag

SEQ ID NO: 2014824 - RNA, 22 nt, Human
aaugagacagcagucuuaugcu

SEQ ID NO: 2014825 - RNA, 18 nt, Human
aaugacuuacuguacaug

SEQ ID NO: 2014826 - RNA, 14 nt, Human
aaugacuuacugua

SEQ ID NO: 2014827 - RNA, 17 nt, Human
aaugacuuacuguacau

SEQ ID NO: 2014828 - RNA, 15 nt, Human
aaugaaaaccacauu

SEQ ID NO: 2014829 - RNA, 22 nt, Human
aaugacagguuugggaccccug

SEQ ID NO: 2014830 - RNA, 15 nt, Human
aaugacaggccuguc

SEQ ID NO: 2014831 - RNA, 20 nt, Human
aaugacucaggacauccccc

SEQ ID NO: 2014832 - RNA, 19 nt, Human
uacauauaagugauugcug

SEQ ID NO: 2014833 - RNA, 17 nt, Human
uacauauguauacaugu

SEQ ID NO: 2014834 - RNA, 18 nt, Human
uacauauguauacaugug

SEQ ID NO: 2014835 - RNA, 23 nt, Human
uacauauguauacaugugccaug

SEQ ID NO: 2014836 - RNA, 21 nt, Human
uacauauuagcgacaacagau

SEQ ID NO: 2014837 - RNA, 12 nt, Human
aauguacugcau

SEQ ID NO: 2014838 - RNA, 12 nt, Human
uacauauugaau

SEQ ID NO: 2014839 - RNA, 19 nt, Human
uacauaaugcgugcauacc

SEQ ID NO: 2014840 - RNA, 20 nt, Human
uacauaaugcgugcauacca

SEQ ID NO: 2014841 - RNA, 15 nt, Human
uacaguaucucaggg

SEQ ID NO: 2014842 - RNA, 17 nt, Human
uacauaaugcgugcaua

SEQ ID NO: 2014843 - RNA, 14 nt, Human
aauguauguguaag

SEQ ID NO: 2014844 - RNA, 12 nt, Human
aauguaugugua

SEQ ID NO: 2014845 - RNA, 15 nt, Human
aauguauucauauuu

SEQ ID NO: 2014846 - RNA, 16 nt, Human
aauguauucauauuug

SEQ ID NO: 2014847 - RNA, 17 nt, Human
aauguauucauauuugu

SEQ ID NO: 2014848 - RNA, 20 nt, Human
aauguauucauauuuguacu

SEQ ID NO: 2014849 - RNA, 18 nt, Human
aauguaugcuucauacag

SEQ ID NO: 2014850 - RNA, 21 nt, Human
aauguaugcuucauacaggga

SEQ ID NO: 2014851 - RNA, 18 nt, Human
aauguacugcauaugaaa

SEQ ID NO: 2014852 - RNA, 14 nt, Human
aauguacugcauau

SEQ ID NO: 2014853 - RNA, 14 nt, Human
aaugugacuuugaa

SEQ ID NO: 2014854 - RNA, 22 nt, Human
aaugugagugguugaauaugau

SEQ ID NO: 2014855 - RNA, 23 nt, Human
aaugugagugguugaauaugauu

SEQ ID NO: 2014856 - RNA, 14 nt, Human
aauguggcuccugg

SEQ ID NO: 2014857 - RNA, 19 nt, Human
aaugugauauaaacagcuu

SEQ ID NO: 2014858 - RNA, 11 nt, Human
aaugugauaug

SEQ ID NO: 2014859 - RNA, 14 nt, Human
uacacuccagugag

SEQ ID NO: 2014860 - RNA, 14 nt, Human
uacagaggacagua

SEQ ID NO: 2014861 - RNA, 23 nt, Human
uacagagcccacgcccccacugg

SEQ ID NO: 2014862 - RNA, 19 nt, Human
uacagagccguaaaaacug

SEQ ID NO: 2014863 - RNA, 20 nt, Human
uacagagccguaaaaacuga

SEQ ID NO: 2014864 - RNA, 18 nt, Human
uacagaggacaguauuug

SEQ ID NO: 2014865 - RNA, 15 nt, Human
uacaggcauagaguu

SEQ ID NO: 2014866 - RNA, 18 nt, Human
uacagaggccaugggccu

SEQ ID NO: 2014867 - RNA, 17 nt, Human
uacaggcuccugccacc

SEQ ID NO: 2014868 - RNA, 22 nt, Human
uacagagccguaaaaacugaag

SEQ ID NO: 2014869 - RNA, 14 nt, Human
uacaggcuccugcc

SEQ ID NO: 2014870 - RNA, 15 nt, Human
uacaggcuccugcca

SEQ ID NO: 2014871 - RNA, 22 nt, Human
uacaggcgugagccaccgugcc

SEQ ID NO: 2014872 - RNA, 19 nt, Human
uacaccacuacauucuguu

SEQ ID NO: 2014873 - RNA, 20 nt, Human
uacaccacuacauucuguua

SEQ ID NO: 2014874 - RNA, 15 nt, Human
uacaccacuacauuc

SEQ ID NO: 2014875 - RNA, 16 nt, Human
uacaccacuacauucu

SEQ ID NO: 2014876 - RNA, 17 nt, Human
uacaccacuacauucug

SEQ ID NO: 2014877 - RNA, 18 nt, Human
uacaccacuacauucugu

SEQ ID NO: 2014878 - RNA, 21 nt, Human
aauggacguguuaugacucca

SEQ ID NO: 2014879 - RNA, 20 nt, Human
aauggacgguuuaggugaaa

SEQ ID NO: 2014880 - RNA, 14 nt, Human
aauggacauuucua

SEQ ID NO: 2014881 - RNA, 13 nt, Human
aauggaaugagaa

SEQ ID NO: 2014882 - RNA, 19 nt, Human
aauggacuuuuguacauag

SEQ ID NO: 2014883 - RNA, 11 nt, Human
uaauuucaagc

SEQ ID NO: 2014884 - RNA, 19 nt, Human
uaauuucaagcuuauuuug

SEQ ID NO: 2014885 - RNA, 15 nt, Human
uacaaaaagcauaaa

SEQ ID NO: 2014886 - RNA, 20 nt, Human
uacaaaaagcauaaaaauua

SEQ ID NO: 2014887 - RNA, 15 nt, Human
uacaaaagcauguga

SEQ ID NO: 2014888 - RNA, 20 nt, Human
uacaaaaccacaguguacca

SEQ ID NO: 2014889 - RNA, 21 nt, Human
uacaaaaccacaguguaccau

SEQ ID NO: 2014890 - RNA, 23 nt, Human
uacaaaaccacaguguaccauua

SEQ ID NO: 2014891 - RNA, 22 nt, Human
uaauuguuguuuguauguauaa

SEQ ID NO: 2014892 - RNA, 23 nt, Human
uaauuguuguuuguauguauaau

SEQ ID NO: 2014893 - RNA, 15 nt, Human
uaauuuaaaauugug

SEQ ID NO: 2014894 - RNA, 16 nt, Human
uaauuuaaaauuguga

SEQ ID NO: 2014895 - RNA, 15 nt, Human
uaauuccaugaaugu

SEQ ID NO: 2014896 - RNA, 15 nt, Human
uaauuguuguuugua

SEQ ID NO: 2014897 - RNA, 18 nt, Human
uaauuguuguuuguaugu

SEQ ID NO: 2014898 - RNA, 19 nt, Human
uaauuguuguuuguaugua

SEQ ID NO: 2014899 - RNA, 13 nt, Human
uaauuccacagcu

SEQ ID NO: 2014900 - RNA, 14 nt, Human
uaauuccacagcug

SEQ ID NO: 2014901 - RNA, 17 nt, Human
uaauuccacagcugcuc

SEQ ID NO: 2014902 - RNA, 18 nt, Human
uaauuauuucacuuuaga

SEQ ID NO: 2014903 - RNA, 12 nt, Human
uaauuauuugaa

SEQ ID NO: 2014904 - RNA, 13 nt, Human
uaauuauuugaau

SEQ ID NO: 2014905 - RNA, 16 nt, Human
uaauuauuugucucag

SEQ ID NO: 2014906 - RNA, 12 nt, Human
uaauucaaagca

SEQ ID NO: 2014907 - RNA, 19 nt, Human
uaauucaaagcaccaaaau

SEQ ID NO: 2014908 - RNA, 21 nt, Human
uaauucaaagcaccaaaauaa

SEQ ID NO: 2014909 - RNA, 18 nt, Human
uaauuauugauguuuuca

SEQ ID NO: 2014910 - RNA, 17 nt, Human
aaugcugucuuucuugc

SEQ ID NO: 2014911 - RNA, 19 nt, Human
aaugcugucuuucuugcuc

SEQ ID NO: 2014912 - RNA, 21 nt, Human
aaugcugucuuucuugcuccc

SEQ ID NO: 2014913 - RNA, 22 nt, Human
aaugcugucuuucuugcucccu

SEQ ID NO: 2014914 - RNA, 13 nt, Human
aauggacauuucu

SEQ ID NO: 2014915 - RNA, 16 nt, Human
aauggacguguuauga

SEQ ID NO: 2014916 - RNA, 17 nt, Human
aauggaaacagaggacc

SEQ ID NO: 2014917 - RNA, 18 nt, Human
aauggaaacagaggacca

SEQ ID NO: 2014918 - RNA, 24 nt, Human
aaugcccagccccuucugacccau

SEQ ID NO: 2014919 - RNA, 23 nt, Human
aaugcccagccccuucugaccca

SEQ ID NO: 2014920 - RNA, 22 nt, Human
aaugcccagccccuucugaccc

SEQ ID NO: 2014921 - RNA, 20 nt, Human
aaugcccagccccuucugac

SEQ ID NO: 2014922 - RNA, 20 nt, Human
aaugcugugcccuaaagugu

SEQ ID NO: 2014923 - RNA, 21 nt, Human
aaugcugugcccuaaagugua

SEQ ID NO: 2014924 - RNA, 21 nt, Human
aaugccccugaauuuaaauag

SEQ ID NO: 2014925 - RNA, 13 nt, Human
aaugcugugcccu

SEQ ID NO: 2014926 - RNA, 15 nt, Human
aaugcccagccccuu

SEQ ID NO: 2014927 - RNA, 14 nt, Human
aaugcccagccccu

SEQ ID NO: 2014928 - RNA, 16 nt, Human
aaugcauaaaauguua

SEQ ID NO: 2014929 - RNA, 18 nt, Human
uacaaaauguaacuguua

SEQ ID NO: 2014930 - RNA, 23 nt, Human
uacaaaauguaacuguuaccauu

SEQ ID NO: 2014931 - RNA, 12 nt, Human
uacaaaauguaa

SEQ ID NO: 2014932 - RNA, 14 nt, Human
uacaaaauguaacu

SEQ ID NO: 2014933 - RNA, 15 nt, Human
uacaaaauguaacug

SEQ ID NO: 2014934 - RNA, 14 nt, Human
uacaaggacagccc

SEQ ID NO: 2014935 - RNA, 13 nt, Human
aaugcauaaaaug

SEQ ID NO: 2014936 - RNA, 23 nt, Human
aaugcaguuacaaauuauaaugu

SEQ ID NO: 2014937 - RNA, 17 nt, Human
aaugcaguuacaaauua

SEQ ID NO: 2014938 - RNA, 20 nt, Human
aaugcaguuacaaauuauaa

SEQ ID NO: 2014939 - RNA, 22 nt, Human
uacaaguaguucuguauuugaa

SEQ ID NO: 2014940 - RNA, 23 nt, Human
uacaaguaguucuguauuugaaa

SEQ ID NO: 2014941 - RNA, 14 nt, Human
uacaaguaguucug

SEQ ID NO: 2014942 - RNA, 15 nt, Human
uacaaguaguucugu

SEQ ID NO: 2014943 - RNA, 16 nt, Human
uacaaguaguucugua

SEQ ID NO: 2014944 - RNA, 17 nt, Human
uacaaguaguucuguau

SEQ ID NO: 2014945 - RNA, 18 nt, Human
uacaaguaguucuguauu

SEQ ID NO: 2014946 - RNA, 19 nt, Human
uacaaguaguucuguauuu

SEQ ID NO: 2014947 - RNA, 21 nt, Human
uacaaguaguucuguauuuga

SEQ ID NO: 2014948 - RNA, 20 nt, Human
aagaauugucuuucugucuc

SEQ ID NO: 2014949 - RNA, 20 nt, Human
aagacaaaaagcuacuuauu

SEQ ID NO: 2014950 - RNA, 23 nt, Human
aagacaaaaagcuacuuauugua

SEQ ID NO: 2014951 - RNA, 13 nt, Human
aagaauuuaaaga

SEQ ID NO: 2014952 - RNA, 14 nt, Human
aagaauuuaaagaa

SEQ ID NO: 2014953 - RNA, 16 nt, Human
aagaauuuacuuugga

SEQ ID NO: 2014954 - RNA, 16 nt, Human
aagacaaaaagcuacu

SEQ ID NO: 2014955 - RNA, 13 nt, Human
aagacaaauagua

SEQ ID NO: 2014956 - RNA, 14 nt, Human
aagaauuucacaag

SEQ ID NO: 2014957 - RNA, 15 nt, Human
aagacccgagcuggg

SEQ ID NO: 2014958 - RNA, 16 nt, Human
aagaauugaagcagga

SEQ ID NO: 2014959 - RNA, 12 nt, Human
aagaauguaaag

SEQ ID NO: 2014960 - RNA, 13 nt, Human
aagaauguaaagc

SEQ ID NO: 2014961 - RNA, 14 nt, Human
aagaaugaguuucu

SEQ ID NO: 2014962 - RNA, 21 nt, Human
aagaaugaguuucuuagacuu

SEQ ID NO: 2014963 - RNA, 15 nt, Human
aagaaugcaugcuuu

SEQ ID NO: 2014964 - RNA, 20 nt, Human
aagaaugcaugcuuuccaua

SEQ ID NO: 2014965 - RNA, 16 nt, Human
guggcagcucaccucu

SEQ ID NO: 2014966 - RNA, 14 nt, Human
guggcagcucaccu

SEQ ID NO: 2014967 - RNA, 20 nt, Human
guggcagcucaccucucccu

SEQ ID NO: 2014968 - RNA, 17 nt, Human
guggcagcuauaggaaa

SEQ ID NO: 2014969 - RNA, 18 nt, Human
aagaaugaagguuuuugu

SEQ ID NO: 2014970 - RNA, 21 nt, Human
aagaaugaagguuuuuguaaa

SEQ ID NO: 2014971 - RNA, 22 nt, Human
aagaaugaagguuuuuguaaag

SEQ ID NO: 2014972 - RNA, 23 nt, Human
aagaaugaagguuuuuguaaaga

SEQ ID NO: 2014973 - RNA, 18 nt, Human
guggcaccagcagccugg

SEQ ID NO: 2014974 - RNA, 14 nt, Human
guggcaccugucug

SEQ ID NO: 2014975 - RNA, 15 nt, Human
guggcaccugucugc

SEQ ID NO: 2014976 - RNA, 18 nt, Human
guggcaccugucugcucc

SEQ ID NO: 2014977 - RNA, 20 nt, Human
guggcaccugucugcuccag

SEQ ID NO: 2014978 - RNA, 19 nt, Human
guggcaccagcagccugga

SEQ ID NO: 2014979 - RNA, 20 nt, Human
guggauuuaacagaaaugua

SEQ ID NO: 2014980 - RNA, 22 nt, Human
guggauucuuguuuugcuuccc

SEQ ID NO: 2014981 - RNA, 18 nt, Human
guggauucugaggcccug

SEQ ID NO: 2014982 - RNA, 18 nt, Human
guggauucuuguuuugcu

SEQ ID NO: 2014983 - RNA, 18 nt, Human
guggauuuaacagaaaug

SEQ ID NO: 2014984 - RNA, 19 nt, Human
guggauuuaacagaaaugu

SEQ ID NO: 2014985 - RNA, 22 nt, Human
gugcuaucucccccagccccau

SEQ ID NO: 2014986 - RNA, 23 nt, Human
gugcuauuguagagccagagguc

SEQ ID NO: 2014987 - RNA, 24 nt, Human
gugcuauuacgaaguucaagauca

SEQ ID NO: 2014988 - RNA, 12 nt, Human
gugcuauguucu

SEQ ID NO: 2014989 - RNA, 15 nt, Human
gugcucaggagcccu

SEQ ID NO: 2014990 - RNA, 16 nt, Human
gugcucaaaaugcaaa

SEQ ID NO: 2014991 - RNA, 21 nt, Human
gugcugggauuacaagcguga

SEQ ID NO: 2014992 - RNA, 22 nt, Human
gugcugggauuacaagcgugag

SEQ ID NO: 2014993 - RNA, 14 nt, Human
guggaagugugggu

SEQ ID NO: 2014994 - RNA, 15 nt, Human
guggaaguguggguc

SEQ ID NO: 2014995 - RNA, 19 nt, Human
guggaagugugggucugug

SEQ ID NO: 2014996 - RNA, 20 nt, Human
guggaagugugggucugugu

SEQ ID NO: 2014997 - RNA, 20 nt, Human
gugcugggauuacaggcgug

SEQ ID NO: 2014998 - RNA, 20 nt, Human
gugcugggauuacaggugug

SEQ ID NO: 2014999 - RNA, 15 nt, Human
guggaauuauuuuaa

SEQ ID NO: 2015000 - RNA, 16 nt, Human
guggaauuauuuuaaa

SEQ ID NO: 2015001 - RNA, 18 nt, Human
guggaauuauuuuaaaag

SEQ ID NO: 2015002 - RNA, 21 nt, Human
guggaagugugggucugugug

SEQ ID NO: 2015003 - RNA, 22 nt, Human
guggaagugugggucugugugu

SEQ ID NO: 2015004 - RNA, 19 nt, Human
guggaauuauuuuaaaaga

SEQ ID NO: 2015005 - RNA, 23 nt, Human
guggacacagcucuucuccaggc

SEQ ID NO: 2015006 - RNA, 18 nt, Human
guggacacagcucuucuc

SEQ ID NO: 2015007 - RNA, 22 nt, Human
guggacacagcucuucuccagg

SEQ ID NO: 2015008 - RNA, 16 nt, Human
guggacccugaaaugu

SEQ ID NO: 2015009 - RNA, 18 nt, Human
guggacccugaaaugugu

SEQ ID NO: 2015010 - RNA, 19 nt, Human
guggacccugaaaugugug

SEQ ID NO: 2015011 - RNA, 23 nt, Human
guggacccugaaaugugugugau

SEQ ID NO: 2015012 - RNA, 21 nt, Human
guggaugccugguggcagcug

SEQ ID NO: 2015013 - RNA, 21 nt, Human
guggauggaaggggcugacag

SEQ ID NO: 2015014 - RNA, 15 nt, Human
aagaaaaaggaugca

SEQ ID NO: 2015015 - RNA, 17 nt, Human
aagaaaaaggaugcaca

SEQ ID NO: 2015016 - RNA, 13 nt, Human
aagaaaaagcaaa

SEQ ID NO: 2015017 - RNA, 11 nt, Human
aagaaaaaagu

SEQ ID NO: 2015018 - RNA, 23 nt, Human
aagaaaaaaccguguuugucucu

SEQ ID NO: 2015019 - RNA, 18 nt, Human
aagaaaaaagagaaaaga

SEQ ID NO: 2015020 - RNA, 20 nt, Human
aagaaaaaagagaaaagaaa

SEQ ID NO: 2015021 - RNA, 18 nt, Human
aagaaaaaggaugcacag

SEQ ID NO: 2015022 - RNA, 17 nt, Human
aagaaaaagcaaaaggc

SEQ ID NO: 2015023 - RNA, 19 nt, Human
aagaaacucuauggucuua

SEQ ID NO: 2015024 - RNA, 21 nt, Human
aagaaacucuauggucuuaua

SEQ ID NO: 2015025 - RNA, 22 nt, Human
aagaaagacuaucuaaauguug

SEQ ID NO: 2015026 - RNA, 20 nt, Human
aagaaagacuaucuaaaugu

SEQ ID NO: 2015027 - RNA, 16 nt, Human
aagaaagaacuaucuu

SEQ ID NO: 2015028 - RNA, 20 nt, Human
aagaaauauguauucuguaa

SEQ ID NO: 2015029 - RNA, 15 nt, Human
aagaaauaguucugu

SEQ ID NO: 2015030 - RNA, 13 nt, Human
aagaaauauaccu

SEQ ID NO: 2015031 - RNA, 21 nt, Human
aagaaauaauuuuauuccaga

SEQ ID NO: 2015032 - RNA, 15 nt, Human
aagaaauacuguaca

SEQ ID NO: 2015033 - RNA, 12 nt, Human
aagaaauaauuu

SEQ ID NO: 2015034 - RNA, 13 nt, Human
aagaaauacugua

SEQ ID NO: 2015035 - RNA, 19 nt, Human
aagaagugugucacccuua

SEQ ID NO: 2015036 - RNA, 16 nt, Human
aagaagugaaaaucua

SEQ ID NO: 2015037 - RNA, 22 nt, Human
aagaagugaaaaucuacacucc

SEQ ID NO: 2015038 - RNA, 21 nt, Human
gugcuaucucccccagcccca

SEQ ID NO: 2015039 - RNA, 22 nt, Human
gugcuaggaacacuccuucaca

SEQ ID NO: 2015040 - RNA, 18 nt, Human
gugcuaggaacacuccuu

SEQ ID NO: 2015041 - RNA, 17 nt, Human
aagaauagcuuuaauga

SEQ ID NO: 2015042 - RNA, 13 nt, Human
aagaauaggacuu

SEQ ID NO: 2015043 - RNA, 17 nt, Human
aagaauaggacuuguuu

SEQ ID NO: 2015044 - RNA, 19 nt, Human
aagaauaggacuuguuuuu

SEQ ID NO: 2015045 - RNA, 21 nt, Human
aagaauaggacuuguuuuugu

SEQ ID NO: 2015046 - RNA, 22 nt, Human
aagaauaggacuuguuuuuguu

SEQ ID NO: 2015047 - RNA, 17 nt, Human
aagaauagcauuguaaa

SEQ ID NO: 2015048 - RNA, 18 nt, Human
aagaauagcauuguaaaa

SEQ ID NO: 2015049 - RNA, 23 nt, Human
aagaauagcauuguaaaagcauu

SEQ ID NO: 2015050 - RNA, 18 nt, Human
aacuugucuuuggacccu

SEQ ID NO: 2015051 - RNA, 22 nt, Human
aacuugucuuuggacccugagg

SEQ ID NO: 2015052 - RNA, 16 nt, Human
aacuuguauuaugugu

SEQ ID NO: 2015053 - RNA, 15 nt, Human
aacuuguauuaugug

SEQ ID NO: 2015054 - RNA, 11 nt, Human
gugccuuaugg

SEQ ID NO: 2015055 - RNA, 22 nt, Human
aacuugggagugugguuucuuu

SEQ ID NO: 2015056 - RNA, 23 nt, Human
aacuugggagugugguuucuuuu

SEQ ID NO: 2015057 - RNA, 12 nt, Human
aacuugggaacu

SEQ ID NO: 2015058 - RNA, 11 nt, Human
aacuugggagu

SEQ ID NO: 2015059 - RNA, 21 nt, Human
aacuuuaagaacuaaaauguu

SEQ ID NO: 2015060 - RNA, 13 nt, Human
aacuuuaccuuuu

SEQ ID NO: 2015061 - RNA, 14 nt, Human
aagaaaaaaaaaga

SEQ ID NO: 2015062 - RNA, 15 nt, Human
aagaaaaaaaaagaa

SEQ ID NO: 2015063 - RNA, 18 nt, Human
aagaaaaaaaaagaaaaa

SEQ ID NO: 2015064 - RNA, 19 nt, Human
aagaaaaaaaaagaaaaaa

SEQ ID NO: 2015065 - RNA, 13 nt, Human
aagaaaaaaaugu

SEQ ID NO: 2015066 - RNA, 20 nt, Human
aagaaaaaaaugucaaaagu

SEQ ID NO: 2015067 - RNA, 21 nt, Human
gugaaccaccacacccagccc

SEQ ID NO: 2015068 - RNA, 13 nt, Human
gugccgagcccuu

SEQ ID NO: 2015069 - RNA, 15 nt, Human
gugccucaagagaag

SEQ ID NO: 2015070 - RNA, 12 nt, Human
gugccuaaaaua

SEQ ID NO: 2015071 - RNA, 17 nt, Human
gugccuaaaauaagaau

SEQ ID NO: 2015072 - RNA, 16 nt, Human
gugccuaaauaaguua

SEQ ID NO: 2015073 - RNA, 15 nt, Human
gugccuaauguguuu

SEQ ID NO: 2015074 - RNA, 23 nt, Human
gugccuuauggaacacucugaga

SEQ ID NO: 2015075 - RNA, 21 nt, Human
gugccuuauggaacacucuga

SEQ ID NO: 2015076 - RNA, 14 nt, Human
gugccuuauggaac

SEQ ID NO: 2015077 - RNA, 15 nt, Human
gugccucugccuguc

SEQ ID NO: 2015078 - RNA, 13 nt, Human
gugccucugggac

SEQ ID NO: 2015079 - RNA, 12 nt, Human
gugccucuggga

SEQ ID NO: 2015080 - RNA, 13 nt, Human
gugccucugccug

SEQ ID NO: 2015081 - RNA, 17 nt, Human
gugucuuuccacuccuc

SEQ ID NO: 2015082 - RNA, 15 nt, Human
gugucuuucucuuuu

SEQ ID NO: 2015083 - RNA, 17 nt, Human
gugucuugcaauggcag

SEQ ID NO: 2015084 - RNA, 18 nt, Human
gugucuugcaauggcagc

SEQ ID NO: 2015085 - RNA, 12 nt, Human
aagcaaucaaga

SEQ ID NO: 2015086 - RNA, 14 nt, Human
guguguaauuuaaa

SEQ ID NO: 2015087 - RNA, 13 nt, Human
gugugaggcagga

SEQ ID NO: 2015088 - RNA, 17 nt, Human
gugugacuacuccccca

SEQ ID NO: 2015089 - RNA, 18 nt, Human
gugucuuuuuucacuaca

SEQ ID NO: 2015090 - RNA, 17 nt, Human
gugugaaaaugugugug

SEQ ID NO: 2015091 - RNA, 17 nt, Human
guguugccacuuuccaa

SEQ ID NO: 2015092 - RNA, 16 nt, Human
guguugcuuauguugu

SEQ ID NO: 2015093 - RNA, 15 nt, Human
guguuguguguggga

SEQ ID NO: 2015094 - RNA, 23 nt, Human
guguuuccuggcacugcuuccag

SEQ ID NO: 2015095 - RNA, 12 nt, Human
guguguaugugg

SEQ ID NO: 2015096 - RNA, 19 nt, Human
guguguccaaaacugccuc

SEQ ID NO: 2015097 - RNA, 18 nt, Human
guguguaugcgugugugu

SEQ ID NO: 2015098 - RNA, 12 nt, Human
aagauauuuuau

SEQ ID NO: 2015099 - RNA, 13 nt, Human
aagauauuccuga

SEQ ID NO: 2015100 - RNA, 21 nt, Human
aagauauacuuguuuuuguaa

SEQ ID NO: 2015101 - RNA, 12 nt, Human
aagaugcagccg

SEQ ID NO: 2015102 - RNA, 20 nt, Human
guggugguuuucuguucuuu

SEQ ID NO: 2015103 - RNA, 16 nt, Human
gugguuuguggcuuua

SEQ ID NO: 2015104 - RNA, 17 nt, Human
gugguuuucuguucuuu

SEQ ID NO: 2015105 - RNA, 21 nt, Human
aagagguuuggcuccugccca

SEQ ID NO: 2015106 - RNA, 14 nt, Human
aagagguuuuaaag

SEQ ID NO: 2015107 - RNA, 18 nt, Human
aagagguuuuaaagcuuc

SEQ ID NO: 2015108 - RNA, 18 nt, Human
aagagguuuuaaaaaaau

SEQ ID NO: 2015109 - RNA, 15 nt, Human
aagauauacuuguuu

SEQ ID NO: 2015110 - RNA, 16 nt, Human
aagauauacuuguuuu

SEQ ID NO: 2015111 - RNA, 19 nt, Human
aagauauacuuguuuuugu

SEQ ID NO: 2015112 - RNA, 18 nt, Human
aagaugugacauguuuua

SEQ ID NO: 2015113 - RNA, 14 nt, Human
aagaugugacaugu

SEQ ID NO: 2015114 - RNA, 22 nt, Human
aagcaaagacuuuccucuuagu

SEQ ID NO: 2015115 - RNA, 13 nt, Human
aagcaaaggagau

SEQ ID NO: 2015116 - RNA, 12 nt, Human
aagcaaaggaga

SEQ ID NO: 2015117 - RNA, 22 nt, Human
gugggacacccugugauggggc

SEQ ID NO: 2015118 - RNA, 23 nt, Human
guggcgcagcauauucaggaagc

SEQ ID NO: 2015119 - RNA, 13 nt, Human
gugggagugugua

SEQ ID NO: 2015120 - RNA, 14 nt, Human
gugggaguguguaa

SEQ ID NO: 2015121 - RNA, 13 nt, Human
gugggauccucca

SEQ ID NO: 2015122 - RNA, 14 nt, Human
gugggagugggccc

SEQ ID NO: 2015123 - RNA, 13 nt, Human
gugggagugggcc

SEQ ID NO: 2015124 - RNA, 16 nt, Human
gugggucugugugugu

SEQ ID NO: 2015125 - RNA, 13 nt, Human
gugggucugugug

SEQ ID NO: 2015126 - RNA, 21 nt, Human
guggugggcauucucucucca

SEQ ID NO: 2015127 - RNA, 16 nt, Human
gugguuucagaaaugu

SEQ ID NO: 2015128 - RNA, 14 nt, Human
guggugguuuucug

SEQ ID NO: 2015129 - RNA, 15 nt, Human
guggggggcuucaua

SEQ ID NO: 2015130 - RNA, 19 nt, Human
gugggggccccgucucagg

SEQ ID NO: 2015131 - RNA, 20 nt, Human
gugggggccccgucucaggu

SEQ ID NO: 2015132 - RNA, 16 nt, Human
guggggggcuucauac

SEQ ID NO: 2015133 - RNA, 20 nt, Human
gugggggaucacagccucug

SEQ ID NO: 2015134 - RNA, 21 nt, Human
gugggaguaguuggagcauug

SEQ ID NO: 2015135 - RNA, 14 nt, Human
guggguacgggagg

SEQ ID NO: 2015136 - RNA, 14 nt, Human
gugggggggcagag

SEQ ID NO: 2015137 - RNA, 15 nt, Human
gugggggggcagagc

SEQ ID NO: 2015138 - RNA, 18 nt, Human
aagacuaucuaaauguug

SEQ ID NO: 2015139 - RNA, 17 nt, Human
aagacugaguacguugu

SEQ ID NO: 2015140 - RNA, 17 nt, Human
aagacuguacaaaguag

SEQ ID NO: 2015141 - RNA, 21 nt, Human
aagacugaguacguugugcau

SEQ ID NO: 2015142 - RNA, 22 nt, Human
aagacugaguacguugugcauu

SEQ ID NO: 2015143 - RNA, 21 nt, Human
aagacccuuguggucccaccc

SEQ ID NO: 2015144 - RNA, 18 nt, Human
aagacccuugugguccca

SEQ ID NO: 2015145 - RNA, 22 nt, Human
aagacccuuguggucccacccc

SEQ ID NO: 2015146 - RNA, 22 nt, Human
aagaccuaaccagggccagaag

SEQ ID NO: 2015147 - RNA, 17 nt, Human
aagacuaucuaaauguu

SEQ ID NO: 2015148 - RNA, 16 nt, Human
aagacuaucuaaaugu

SEQ ID NO: 2015149 - RNA, 23 nt, Human
aagaccuggggcugcugugaagc

SEQ ID NO: 2015150 - RNA, 18 nt, Human
guggcccgacagccuggc

SEQ ID NO: 2015151 - RNA, 19 nt, Human
guggcccgacagccuggca

SEQ ID NO: 2015152 - RNA, 22 nt, Human
guggcccgguugaacucacucc

SEQ ID NO: 2015153 - RNA, 20 nt, Human
aagaggaacagcacugggga

SEQ ID NO: 2015154 - RNA, 22 nt, Human
aagaggaacagcacuggggagu

SEQ ID NO: 2015155 - RNA, 13 nt, Human
aagaggaaaagaa

SEQ ID NO: 2015156 - RNA, 16 nt, Human
aagaggaaaagaaauc

SEQ ID NO: 2015157 - RNA, 19 nt, Human
aagaggaaaauauugacaa

SEQ ID NO: 2015158 - RNA, 16 nt, Human
aagagcuuaacagugu

SEQ ID NO: 2015159 - RNA, 13 nt, Human
aagagcuuagaaa

SEQ ID NO: 2015160 - RNA, 14 nt, Human
aagagcuuagaaac

SEQ ID NO: 2015161 - RNA, 19 nt, Human
aagagcuuagaaacuggaa

SEQ ID NO: 2015162 - RNA, 21 nt, Human
aagagcuuagaaacuggaaau

SEQ ID NO: 2015163 - RNA, 12 nt, Human
aagagcuuuccu

SEQ ID NO: 2015164 - RNA, 16 nt, Human
aagagccuuaaaacau

SEQ ID NO: 2015165 - RNA, 13 nt, Human
aagagccuuaaaa

SEQ ID NO: 2015166 - RNA, 14 nt, Human
aagagccuuaaaac

SEQ ID NO: 2015167 - RNA, 21 nt, Human
aagagauuuaaacucugaauu

SEQ ID NO: 2015168 - RNA, 17 nt, Human
aagagcaaggaagguaa

SEQ ID NO: 2015169 - RNA, 18 nt, Human
aaggaugcacagaguugu

SEQ ID NO: 2015170 - RNA, 15 nt, Human
aaggaugcuuguaca

SEQ ID NO: 2015171 - RNA, 16 nt, Human
aaggaugcuuguacau

SEQ ID NO: 2015172 - RNA, 17 nt, Human
aaggaugcuuguacaua

SEQ ID NO: 2015173 - RNA, 19 nt, Human
aaggaugcuuguacauaau

SEQ ID NO: 2015174 - RNA, 19 nt, Human
aaggaugccccgucccccu

SEQ ID NO: 2015175 - RNA, 22 nt, Human
guugaugggaugauugaagaaa

SEQ ID NO: 2015176 - RNA, 23 nt, Human
aaggaugaucuaggaagacuuug

SEQ ID NO: 2015177 - RNA, 18 nt, Human
aaggaugaucuaggaaga

SEQ ID NO: 2015178 - RNA, 17 nt, Human
aaggauccugagccaga

SEQ ID NO: 2015179 - RNA, 15 nt, Human
aaggauccugagcca

SEQ ID NO: 2015180 - RNA, 13 nt, Human
aaggauccugagc

SEQ ID NO: 2015181 - RNA, 12 nt, Human
guugaugcaauc

SEQ ID NO: 2015182 - RNA, 24 nt, Human
guugaugcaauccuuacaaaugau

SEQ ID NO: 2015183 - RNA, 17 nt, Human
guugaugggaugauuga

SEQ ID NO: 2015184 - RNA, 21 nt, Human
guugaugggaugauugaagaa

SEQ ID NO: 2015185 - RNA, 14 nt, Human
aaggauccugagcc

SEQ ID NO: 2015186 - RNA, 21 nt, Human
guugaugccugugaacugaac

SEQ ID NO: 2015187 - RNA, 23 nt, Human
guugaugaucuuugcagacaggc

SEQ ID NO: 2015188 - RNA, 23 nt, Human
aaggcuauggggauagaugugug

SEQ ID NO: 2015189 - RNA, 19 nt, Human
aaggcuaccuuuguauucu

SEQ ID NO: 2015190 - RNA, 14 nt, Human
aaggccaccucuuc

SEQ ID NO: 2015191 - RNA, 20 nt, Human
aaggccaccucuuccuggcc

SEQ ID NO: 2015192 - RNA, 21 nt, Human
aaggccaccucuuccuggccg

SEQ ID NO: 2015193 - RNA, 22 nt, Human
aaggccaccucuuccuggccgg

SEQ ID NO: 2015194 - RNA, 18 nt, Human
aaggccaaaggaagcaca

SEQ ID NO: 2015195 - RNA, 14 nt, Human
aaggcuccaggagc

SEQ ID NO: 2015196 - RNA, 17 nt, Human
guugcccaggcaggucu

SEQ ID NO: 2015197 - RNA, 18 nt, Human
guugcccaggcaggucuu

SEQ ID NO: 2015198 - RNA, 19 nt, Human
guugcccaggcaggucuug

SEQ ID NO: 2015199 - RNA, 21 nt, Human
guugcccaggcuggcgugcag

SEQ ID NO: 2015200 - RNA, 15 nt, Human
guugcccaggcaggu

SEQ ID NO: 2015201 - RNA, 16 nt, Human
guugcccagugugagg

SEQ ID NO: 2015202 - RNA, 23 nt, Human
guuuaauugaaagaauguaaagc

SEQ ID NO: 2015203 - RNA, 13 nt, Human
guuuaugugugug

SEQ ID NO: 2015204 - RNA, 16 nt, Human
guuuaugugugugugu

SEQ ID NO: 2015205 - RNA, 12 nt, Human
guuuauguuuug

SEQ ID NO: 2015206 - RNA, 23 nt, Human
guuuauguuuugguccacuuuuc

SEQ ID NO: 2015207 - RNA, 20 nt, Human
guuuaagacauuuuuggaag

SEQ ID NO: 2015208 - RNA, 23 nt, Human
guuuaaggaauaugggagaaaua

SEQ ID NO: 2015209 - RNA, 19 nt, Human
guuuaagcagaauuggaaa

SEQ ID NO: 2015210 - RNA, 12 nt, Human
guuuaagcagaa

SEQ ID NO: 2015211 - RNA, 18 nt, Human
guuuaagcagaauuggaa

SEQ ID NO: 2015212 - RNA, 18 nt, Human
guuguaucagcacgugug

SEQ ID NO: 2015213 - RNA, 14 nt, Human
guuguaugaucugu

SEQ ID NO: 2015214 - RNA, 16 nt, Human
guuguauaaauuuauu

SEQ ID NO: 2015215 - RNA, 17 nt, Human
guuguauaaauuuauuu

SEQ ID NO: 2015216 - RNA, 19 nt, Human
guuguauaaauuuauuuac

SEQ ID NO: 2015217 - RNA, 21 nt, Human
guuguauaaauuuauuuacug

SEQ ID NO: 2015218 - RNA, 12 nt, Human
guuguauucauu

SEQ ID NO: 2015219 - RNA, 13 nt, Human
guuguacuuuaaa

SEQ ID NO: 2015220 - RNA, 18 nt, Human
guuguaccgcaaugugac

SEQ ID NO: 2015221 - RNA, 14 nt, Human
guugcugguacaca

SEQ ID NO: 2015222 - RNA, 15 nt, Human
guugcugguacacac

SEQ ID NO: 2015223 - RNA, 17 nt, Human
guugcugucagucuuga

SEQ ID NO: 2015224 - RNA, 12 nt, Human
guugcugguaaa

SEQ ID NO: 2015225 - RNA, 16 nt, Human
guugcugguaaaauga

SEQ ID NO: 2015226 - RNA, 12 nt, Human
guugcugccuca

SEQ ID NO: 2015227 - RNA, 18 nt, Human
guuggucccccuuccaug

SEQ ID NO: 2015228 - RNA, 13 nt, Human
guuggguggaugc

SEQ ID NO: 2015229 - RNA, 17 nt, Human
aagggccuggccugagc

SEQ ID NO: 2015230 - RNA, 14 nt, Human
aagggccuggccug

SEQ ID NO: 2015231 - RNA, 19 nt, Human
aagggccuggccugagcug

SEQ ID NO: 2015232 - RNA, 14 nt, Human
aagggcuuuccugu

SEQ ID NO: 2015233 - RNA, 13 nt, Human
aagggaaaaauca

SEQ ID NO: 2015234 - RNA, 22 nt, Human
aaggggaauguuugccucugcc

SEQ ID NO: 2015235 - RNA, 23 nt, Human
aaggggaauguuugccucugccu

SEQ ID NO: 2015236 - RNA, 15 nt, Human
aaggggaauuaacaa

SEQ ID NO: 2015237 - RNA, 20 nt, Human
aagggcuuuucaaaaucauu

SEQ ID NO: 2015238 - RNA, 16 nt, Human
aaggggaaucuggagg

SEQ ID NO: 2015239 - RNA, 21 nt, Human
aaggggaaucuggagguagcc

SEQ ID NO: 2015240 - RNA, 13 nt, Human
aagggccuggccu

SEQ ID NO: 2015241 - RNA, 22 nt, Human
aaggcuuuucaaccacaaaacu

SEQ ID NO: 2015242 - RNA, 15 nt, Human
aaggcuugcugcaga

SEQ ID NO: 2015243 - RNA, 16 nt, Human
aaggcuuauaaaacag

SEQ ID NO: 2015244 - RNA, 13 nt, Human
guuucaaaaaucu

SEQ ID NO: 2015245 - RNA, 14 nt, Human
guuucaaaaaucug

SEQ ID NO: 2015246 - RNA, 15 nt, Human
guuucaaaaaucuga

SEQ ID NO: 2015247 - RNA, 16 nt, Human
guuucaaaaaucugaa

SEQ ID NO: 2015248 - RNA, 15 nt, Human
aaguaauaugcacac

SEQ ID NO: 2015249 - RNA, 16 nt, Human
aaguaauaugcacaca

SEQ ID NO: 2015250 - RNA, 19 nt, Human
guuucuaaaggcuaccuuu

SEQ ID NO: 2015251 - RNA, 17 nt, Human
aaguaagucucaaggua

SEQ ID NO: 2015252 - RNA, 16 nt, Human
aaguaagucucaaggu

SEQ ID NO: 2015253 - RNA, 12 nt, Human
aaguaauaugca

SEQ ID NO: 2015254 - RNA, 22 nt, Human
aaguaaaaacaaagaaauuaug

SEQ ID NO: 2015255 - RNA, 18 nt, Human
aagguuuuuguaaagauu

SEQ ID NO: 2015256 - RNA, 14 nt, Human
aagguuuuuguaaa

SEQ ID NO: 2015257 - RNA, 17 nt, Human
aagguuuuuguaaagau

SEQ ID NO: 2015258 - RNA, 20 nt, Human
aaguaaaaacaaagaaauua

SEQ ID NO: 2015259 - RNA, 13 nt, Human
aaguaaaaacaaa

SEQ ID NO: 2015260 - RNA, 14 nt, Human
aagguuuuugauag

SEQ ID NO: 2015261 - RNA, 19 nt, Human
aagguuuuugauagcauug

SEQ ID NO: 2015262 - RNA, 16 nt, Human
aaggguaucaggugcu

SEQ ID NO: 2015263 - RNA, 13 nt, Human
aagggguuuucuu

SEQ ID NO: 2015264 - RNA, 22 nt, Human
aagggguuuucuugauaauuuu

SEQ ID NO: 2015265 - RNA, 12 nt, Human
aagggguuuucu

SEQ ID NO: 2015266 - RNA, 20 nt, Human
aagggaaaaaucaaguauua

SEQ ID NO: 2015267 - RNA, 14 nt, Human
aagguaaaaaguua

SEQ ID NO: 2015268 - RNA, 11 nt, Human
guuuucuguuc

SEQ ID NO: 2015269 - RNA, 16 nt, Human
guuuucuuaacuuaaa

SEQ ID NO: 2015270 - RNA, 17 nt, Human
guuuucuuaaccaucuu

SEQ ID NO: 2015271 - RNA, 16 nt, Human
guuuucuuaaccaucu

SEQ ID NO: 2015272 - RNA, 12 nt, Human
guuuucuguucu

SEQ ID NO: 2015273 - RNA, 20 nt, Human
guuuucuuaaccagaucauu

SEQ ID NO: 2015274 - RNA, 14 nt, Human
guuuuacaguguuu

SEQ ID NO: 2015275 - RNA, 15 nt, Human
guuuuacugcagcuu

SEQ ID NO: 2015276 - RNA, 16 nt, Human
guuuuacccuauaucu

SEQ ID NO: 2015277 - RNA, 19 nt, Human
guuuuagaaacaauaugga

SEQ ID NO: 2015278 - RNA, 23 nt, Human
guuuuacaauaaaaucuugaaaa

SEQ ID NO: 2015279 - RNA, 18 nt, Human
guuuggggaugagaaagg

SEQ ID NO: 2015280 - RNA, 20 nt, Human
guuugggccccagaggcugg

SEQ ID NO: 2015281 - RNA, 19 nt, Human
guuugccccguucuguuug

SEQ ID NO: 2015282 - RNA, 14 nt, Human
guuugccccguucu

SEQ ID NO: 2015283 - RNA, 14 nt, Human
guuugcauuucaga

SEQ ID NO: 2015284 - RNA, 15 nt, Human
guuugcauuucagaa

SEQ ID NO: 2015285 - RNA, 20 nt, Human
guuugccacuuugcaaagga

SEQ ID NO: 2015286 - RNA, 22 nt, Human
guuugggaccccuggugguuca

SEQ ID NO: 2015287 - RNA, 23 nt, Human
guuugggaagagcuuagaaacug

SEQ ID NO: 2015288 - RNA, 16 nt, Human
guuugggaccccuggu

SEQ ID NO: 2015289 - RNA, 21 nt, Human
guuugggaagagcuuagaaac

SEQ ID NO: 2015290 - RNA, 13 nt, Human
guuugccucugcc

SEQ ID NO: 2015291 - RNA, 16 nt, Human
guuugccucugccucu

SEQ ID NO: 2015292 - RNA, 22 nt, Human
guuucuaaaggcuaccuuugua

SEQ ID NO: 2015293 - RNA, 23 nt, Human
guuucuaaaggcuaccuuuguau

SEQ ID NO: 2015294 - RNA, 17 nt, Human
guuucugucguuaaaaa

SEQ ID NO: 2015295 - RNA, 22 nt, Human
guuugauucagacagcugccug

SEQ ID NO: 2015296 - RNA, 21 nt, Human
guuugauuugucacugcuuca

SEQ ID NO: 2015297 - RNA, 22 nt, Human
guuucugucguuaaaaacagau

SEQ ID NO: 2015298 - RNA, 14 nt, Human
guuucugucuccuc

SEQ ID NO: 2015299 - RNA, 21 nt, Human
guuucugugguuggcugggaa

SEQ ID NO: 2015300 - RNA, 22 nt, Human
guuucugugguuggcugggaaa

SEQ ID NO: 2015301 - RNA, 13 nt, Human
guuacaaaaugua

SEQ ID NO: 2015302 - RNA, 14 nt, Human
guuacaaaauguaa

SEQ ID NO: 2015303 - RNA, 16 nt, Human
guuacaaaauguaacu

SEQ ID NO: 2015304 - RNA, 17 nt, Human
guuacaaaauguaacug

SEQ ID NO: 2015305 - RNA, 18 nt, Human
guuacaaaauguaacugu

SEQ ID NO: 2015306 - RNA, 21 nt, Human
guuacaaaauguaacuguuac

SEQ ID NO: 2015307 - RNA, 15 nt, Human
guuacaaauuauaau

SEQ ID NO: 2015308 - RNA, 17 nt, Human
guuacaaauuauaaugu

SEQ ID NO: 2015309 - RNA, 20 nt, Human
guuacaaauuauaauguauu

SEQ ID NO: 2015310 - RNA, 21 nt, Human
guuagauauagagucauugua

SEQ ID NO: 2015311 - RNA, 13 nt, Human
guuagauuaagaa

SEQ ID NO: 2015312 - RNA, 16 nt, Human
guuagauuaagaaaua

SEQ ID NO: 2015313 - RNA, 17 nt, Human
guuaguaugaggcauuu

SEQ ID NO: 2015314 - RNA, 20 nt, Human
guuaguaugaggcauuuguu

SEQ ID NO: 2015315 - RNA, 18 nt, Human
guuaaugauagcuacugu

SEQ ID NO: 2015316 - RNA, 22 nt, Human
guuaaggagaaucauguuucuu

SEQ ID NO: 2015317 - RNA, 22 nt, Human
guuaaguugauggugaugaaau

SEQ ID NO: 2015318 - RNA, 12 nt, Human
guguuugucucu

SEQ ID NO: 2015319 - RNA, 15 nt, Human
guguuugucucuucu

SEQ ID NO: 2015320 - RNA, 17 nt, Human
guguuugucucuucugg

SEQ ID NO: 2015321 - RNA, 16 nt, Human
guuaagccuuuggaaa

SEQ ID NO: 2015322 - RNA, 12 nt, Human
guuaagccuuug

SEQ ID NO: 2015323 - RNA, 13 nt, Human
guuaagccuuugg

SEQ ID NO: 2015324 - RNA, 18 nt, Human
guguuuuaaaaugagaaa

SEQ ID NO: 2015325 - RNA, 17 nt, Human
guguuucauccuuccca

SEQ ID NO: 2015326 - RNA, 17 nt, Human
guucaggguuggccccu

SEQ ID NO: 2015327 - RNA, 18 nt, Human
guucaggguuggccccug

SEQ ID NO: 2015328 - RNA, 19 nt, Human
guucaggguuggccccugc

SEQ ID NO: 2015329 - RNA, 15 nt, Human
guucaguguuucugg

SEQ ID NO: 2015330 - RNA, 17 nt, Human
guucaguguuucugggg

SEQ ID NO: 2015331 - RNA, 23 nt, Human
guuauuucccuuuagcuguguua

SEQ ID NO: 2015332 - RNA, 18 nt, Human
guuauuucccuuuagcug

SEQ ID NO: 2015333 - RNA, 22 nt, Human
guuauuuauucugggaauguau

SEQ ID NO: 2015334 - RNA, 18 nt, Human
guucagcuccagcucacc

SEQ ID NO: 2015335 - RNA, 16 nt, Human
guucagcuccagcuca

SEQ ID NO: 2015336 - RNA, 17 nt, Human
guucagcuccagcucac

SEQ ID NO: 2015337 - RNA, 17 nt, Human
aagcuaggccuggccag

SEQ ID NO: 2015338 - RNA, 18 nt, Human
aagcuaggccuggccaga

SEQ ID NO: 2015339 - RNA, 17 nt, Human
aagccuggucagcccaa

SEQ ID NO: 2015340 - RNA, 16 nt, Human
aagcuaggccuggcca

SEQ ID NO: 2015341 - RNA, 22 nt, Human
aagcuaggccuggccagaugca

SEQ ID NO: 2015342 - RNA, 15 nt, Human
aagccuggucagccc

SEQ ID NO: 2015343 - RNA, 14 nt, Human
aagccuggaaaaaa

SEQ ID NO: 2015344 - RNA, 12 nt, Human
aagccugcuccu

SEQ ID NO: 2015345 - RNA, 16 nt, Human
aagccugcuccuuccc

SEQ ID NO: 2015346 - RNA, 17 nt, Human
aagccugcuccuucccu

SEQ ID NO: 2015347 - RNA, 19 nt, Human
aagccuccuccagccgcca

SEQ ID NO: 2015348 - RNA, 15 nt, Human
aagccucgacacaga

SEQ ID NO: 2015349 - RNA, 14 nt, Human
guucuuuaaacugu

SEQ ID NO: 2015350 - RNA, 23 nt, Human
guucuuguuuuuaaguuugcacu

SEQ ID NO: 2015351 - RNA, 23 nt, Human
guucuuuaaacugucgugucaua

SEQ ID NO: 2015352 - RNA, 18 nt, Human
guucuuguuuuuaaguuu

SEQ ID NO: 2015353 - RNA, 21 nt, Human
guucuugguuuguaaauuaac

SEQ ID NO: 2015354 - RNA, 17 nt, Human
guucuuaguuugcaguu

SEQ ID NO: 2015355 - RNA, 22 nt, Human
guugaugaucuuugcagacagg

SEQ ID NO: 2015356 - RNA, 20 nt, Human
guugaggaaagcacagaggc

SEQ ID NO: 2015357 - RNA, 16 nt, Human
guucuacccaggugcu

SEQ ID NO: 2015358 - RNA, 22 nt, Human
guucccuuugacgccaucccag

SEQ ID NO: 2015359 - RNA, 21 nt, Human
guucccuuugacgccauccca

SEQ ID NO: 2015360 - RNA, 20 nt, Human
guucccuuugacgccauccc

SEQ ID NO: 2015361 - RNA, 12 nt, Human
guucuguauuug

SEQ ID NO: 2015362 - RNA, 14 nt, Human
guucuguauuugaa

SEQ ID NO: 2015363 - RNA, 12 nt, Human
guucugguguua

SEQ ID NO: 2015364 - RNA, 16 nt, Human
guucccauuugcuccu

SEQ ID NO: 2015365 - RNA, 20 nt, Human
guucccauuugcuccuuucu

SEQ ID NO: 2015366 - RNA, 20 nt, Human
guucccuacuuccugugacu

SEQ ID NO: 2015367 - RNA, 21 nt, Human
guucccagauggcuggaaggg

SEQ ID NO: 2015368 - RNA, 20 nt, Human
guuccauggccucuucagau

SEQ ID NO: 2015369 - RNA, 21 nt, Human
aagcucuacugaggugcuaug

SEQ ID NO: 2015370 - RNA, 18 nt, Human
aagcugaacacauuucuu

SEQ ID NO: 2015371 - RNA, 17 nt, Human
aagcugaacacugaagu

SEQ ID NO: 2015372 - RNA, 22 nt, Human
aagcuauucaguaauaacucua

SEQ ID NO: 2015373 - RNA, 17 nt, Human
aagcuaucguaaaauua

SEQ ID NO: 2015374 - RNA, 16 nt, Human
aagcuuauuuuggaga

SEQ ID NO: 2015375 - RNA, 17 nt, Human
guccucugaaugaaccu

SEQ ID NO: 2015376 - RNA, 13 nt, Human
guccucugaauga

SEQ ID NO: 2015377 - RNA, 18 nt, Human
guccucuuaacuguggug

SEQ ID NO: 2015378 - RNA, 18 nt, Human
guccuuaucuagcugcau

SEQ ID NO: 2015379 - RNA, 16 nt, Human
guccuuaucuagcugc

SEQ ID NO: 2015380 - RNA, 17 nt, Human
guccuuaucuagcugca

SEQ ID NO: 2015381 - RNA, 15 nt, Human
aacauacucccaucu

SEQ ID NO: 2015382 - RNA, 14 nt, Human
aacauacucccauc

SEQ ID NO: 2015383 - RNA, 22 nt, Human
aacauacaaaugcaucuuugau

SEQ ID NO: 2015384 - RNA, 14 nt, Human
aacauacaaaugca

SEQ ID NO: 2015385 - RNA, 15 nt, Human
aacauacaaaugcau

SEQ ID NO: 2015386 - RNA, 20 nt, Human
aacauacaaaugcaucuuug

SEQ ID NO: 2015387 - RNA, 21 nt, Human
aacauacaaaugcaucuuuga

SEQ ID NO: 2015388 - RNA, 14 nt, Human
aacauucuauuuca

SEQ ID NO: 2015389 - RNA, 15 nt, Human
aacauucuauuucaa

SEQ ID NO: 2015390 - RNA, 21 nt, Human
aacauacgugugcaugugucu

SEQ ID NO: 2015391 - RNA, 20 nt, Human
aacauuuguucuauagcuuu

SEQ ID NO: 2015392 - RNA, 20 nt, Human
aacauugcauauaacuuaua

SEQ ID NO: 2015393 - RNA, 21 nt, Human
aacauugcauauaacuuauau

SEQ ID NO: 2015394 - RNA, 16 nt, Human
aacauuguagccucaa

SEQ ID NO: 2015395 - RNA, 22 nt, Human
aacauugcauauaacuuauauu

SEQ ID NO: 2015396 - RNA, 14 nt, Human
aacauuguagccuc

SEQ ID NO: 2015397 - RNA, 19 nt, Human
aacaguuguguuugaagca

SEQ ID NO: 2015398 - RNA, 13 nt, Human
aacaguuucaaaa

SEQ ID NO: 2015399 - RNA, 20 nt, Human
aacaguguggccucuucuga

SEQ ID NO: 2015400 - RNA, 14 nt, Human
aacaguaaucaguu

SEQ ID NO: 2015401 - RNA, 21 nt, Human
aacaguacccugguugugugu

SEQ ID NO: 2015402 - RNA, 15 nt, Human
aacagugcuguuucc

SEQ ID NO: 2015403 - RNA, 19 nt, Human
aacagacuggaagcacagc

SEQ ID NO: 2015404 - RNA, 22 nt, Human
aacaggcugggcuucaguggca

SEQ ID NO: 2015405 - RNA, 13 nt, Human
aacaggcugggcu

SEQ ID NO: 2015406 - RNA, 23 nt, Human
aacaggcugggcuucaguggcag

SEQ ID NO: 2015407 - RNA, 22 nt, Human
aacaguagugauaguuguaccg

SEQ ID NO: 2015408 - RNA, 15 nt, Human
aacagaaauugguac

SEQ ID NO: 2015409 - RNA, 22 nt, Human
aacagaaauugguaccuugcac

SEQ ID NO: 2015410 - RNA, 10 nt, Human
aacagaaaug

SEQ ID NO: 2015411 - RNA, 11 nt, Human
aacagaaaugu

SEQ ID NO: 2015412 - RNA, 21 nt, Human
aacagaaauguacagcaagga

SEQ ID NO: 2015413 - RNA, 12 nt, Human
aacagaaauugg

SEQ ID NO: 2015414 - RNA, 13 nt, Human
aacagaaauuggu

SEQ ID NO: 2015415 - RNA, 14 nt, Human
aacagaaauuggua

SEQ ID NO: 2015416 - RNA, 21 nt, Human
guccggucccugucccagugc

SEQ ID NO: 2015417 - RNA, 14 nt, Human
aacacuuuaauggg

SEQ ID NO: 2015418 - RNA, 23 nt, Human
aacacuugugacuuuugcuuuaa

SEQ ID NO: 2015419 - RNA, 12 nt, Human
gucauuuucauu

SEQ ID NO: 2015420 - RNA, 15 nt, Human
gucccaacuuguaaa

SEQ ID NO: 2015421 - RNA, 13 nt, Human
guccgagcuuuga

SEQ ID NO: 2015422 - RNA, 23 nt, Human
aacaauaggaugggcuucugugc

SEQ ID NO: 2015423 - RNA, 18 nt, Human
aacaagucagucauucag

SEQ ID NO: 2015424 - RNA, 16 nt, Human
aacaagucccuguaau

SEQ ID NO: 2015425 - RNA, 15 nt, Human
aacaagucagucauu

SEQ ID NO: 2015426 - RNA, 23 nt, Human
aacaaggcaaggcugucaauuac

SEQ ID NO: 2015427 - RNA, 16 nt, Human
aacaaggcuugcugca

SEQ ID NO: 2015428 - RNA, 14 nt, Human
aacaauuuucagau

SEQ ID NO: 2015429 - RNA, 16 nt, Human
aacaauuuucagauuu

SEQ ID NO: 2015430 - RNA, 17 nt, Human
aacaauuuucagauuug

SEQ ID NO: 2015431 - RNA, 18 nt, Human
aacaauuuucagauuugc

SEQ ID NO: 2015432 - RNA, 19 nt, Human
aacaauuuucagauuugca

SEQ ID NO: 2015433 - RNA, 20 nt, Human
aacaauuuucagauuugcac

SEQ ID NO: 2015434 - RNA, 21 nt, Human
aacaauuuucagauuugcaca

SEQ ID NO: 2015435 - RNA, 22 nt, Human
aacaauuuucagauuugcacaa

SEQ ID NO: 2015436 - RNA, 23 nt, Human
aacaauuuucagauuugcacaaa

SEQ ID NO: 2015437 - RNA, 23 nt, Human
aaauuuuuaaucuuuaauuuuac

SEQ ID NO: 2015438 - RNA, 15 nt, Human
aaauuuuucauauuu

SEQ ID NO: 2015439 - RNA, 16 nt, Human
aaauuuuucauauuuu

SEQ ID NO: 2015440 - RNA, 17 nt, Human
aaauuuuucauauuuua

SEQ ID NO: 2015441 - RNA, 19 nt, Human
aaauuuuucauauuuuaau

SEQ ID NO: 2015442 - RNA, 12 nt, Human
aaauuuuucaua

SEQ ID NO: 2015443 - RNA, 13 nt, Human
aaauuuuucauau

SEQ ID NO: 2015444 - RNA, 14 nt, Human
aaauuuuucauauu

SEQ ID NO: 2015445 - RNA, 16 nt, Human
gucacaggcaggucca

SEQ ID NO: 2015446 - RNA, 13 nt, Human
gucacaggcaggu

SEQ ID NO: 2015447 - RNA, 15 nt, Human
gucacaggcaggucc

SEQ ID NO: 2015448 - RNA, 16 nt, Human
aacaagaccacguuuc

SEQ ID NO: 2015449 - RNA, 17 nt, Human
aacaagaccacguuucu

SEQ ID NO: 2015450 - RNA, 19 nt, Human
aacaagaccacguuucuaa

SEQ ID NO: 2015451 - RNA, 20 nt, Human
aacaagaccacguuucuaaa

SEQ ID NO: 2015452 - RNA, 21 nt, Human
aacaagccuccuuuuaaagua

SEQ ID NO: 2015453 - RNA, 21 nt, Human
aacacucauugaccugaggcc

SEQ ID NO: 2015454 - RNA, 11 nt, Human
aacacucugag

SEQ ID NO: 2015455 - RNA, 12 nt, Human
aacacuccuuca

SEQ ID NO: 2015456 - RNA, 13 nt, Human
aacacucugagac

SEQ ID NO: 2015457 - RNA, 12 nt, Human
aacacucugaga

SEQ ID NO: 2015458 - RNA, 14 nt, Human
aacacucugagacu

SEQ ID NO: 2015459 - RNA, 21 nt, Human
aacacuguguauuguuguaaa

SEQ ID NO: 2015460 - RNA, 20 nt, Human
aacacuguucucugcccucc

SEQ ID NO: 2015461 - RNA, 15 nt, Human
aacacuguucucugc

SEQ ID NO: 2015462 - RNA, 22 nt, Human
guccaagggguccccuccagga

SEQ ID NO: 2015463 - RNA, 20 nt, Human
guccaagggguccccuccag

SEQ ID NO: 2015464 - RNA, 15 nt, Human
guccacaacacacag

SEQ ID NO: 2015465 - RNA, 21 nt, Human
aacacuguucucugcccucca

SEQ ID NO: 2015466 - RNA, 12 nt, Human
aacacuguuauc

SEQ ID NO: 2015467 - RNA, 18 nt, Human
aacacuguuaucauuuuu

SEQ ID NO: 2015468 - RNA, 21 nt, Human
aacacuguuaucauuuuuucc

SEQ ID NO: 2015469 - RNA, 21 nt, Human
gucauuugagcagggcucagc

SEQ ID NO: 2015470 - RNA, 11 nt, Human
aacacuuccau

SEQ ID NO: 2015471 - RNA, 22 nt, Human
gucauuugagcagggcucagcg

SEQ ID NO: 2015472 - RNA, 21 nt, Human
aacacuugugacuuuugcuuu

SEQ ID NO: 2015473 - RNA, 16 nt, Human
aacacuugugacuuuu

SEQ ID NO: 2015474 - RNA, 22 nt, Human
aacacuugugacuuuugcuuua

SEQ ID NO: 2015475 - RNA, 13 nt, Human
guccaagcagauu

SEQ ID NO: 2015476 - RNA, 11 nt, Human
gucauuuucau

SEQ ID NO: 2015477 - RNA, 13 nt, Human
aacucccuuucaa

SEQ ID NO: 2015478 - RNA, 14 nt, Human
aacucccuuucaac

SEQ ID NO: 2015479 - RNA, 17 nt, Human
aacucuaaguguuugcu

SEQ ID NO: 2015480 - RNA, 20 nt, Human
aacucuaaguguuugcugca

SEQ ID NO: 2015481 - RNA, 19 nt, Human
gugaaccaccacacccagc

SEQ ID NO: 2015482 - RNA, 18 nt, Human
aacuaggaaggcacuucu

SEQ ID NO: 2015483 - RNA, 20 nt, Human
aacuagauuacauucaguug

SEQ ID NO: 2015484 - RNA, 13 nt, Human
aacucccugcccc

SEQ ID NO: 2015485 - RNA, 19 nt, Human
aacucccugccccccagcc

SEQ ID NO: 2015486 - RNA, 12 nt, Human
aacuccaugaug

SEQ ID NO: 2015487 - RNA, 23 nt, Human
aacuaggaaggcacuucugccug

SEQ ID NO: 2015488 - RNA, 15 nt, Human
aacuaaaguuguacu

SEQ ID NO: 2015489 - RNA, 16 nt, Human
aacuaaaguuguacuu

SEQ ID NO: 2015490 - RNA, 17 nt, Human
aacuaaaguuguacuuu

SEQ ID NO: 2015491 - RNA, 19 nt, Human
aacuaaaguuguacuuuaa

SEQ ID NO: 2015492 - RNA, 19 nt, Human
aacguggcugcuucaagga

SEQ ID NO: 2015493 - RNA, 16 nt, Human
aacguggcugcuucaa

SEQ ID NO: 2015494 - RNA, 22 nt, Human
aacguggcugcuucaaggaucc

SEQ ID NO: 2015495 - RNA, 15 nt, Human
aacguggcugcuuca

SEQ ID NO: 2015496 - RNA, 20 nt, Human
aaccugcucuccucuugcca

SEQ ID NO: 2015497 - RNA, 11 nt, Human
aaccugcucuc

SEQ ID NO: 2015498 - RNA, 15 nt, Human
aaccugcucuccucu

SEQ ID NO: 2015499 - RNA, 15 nt, Human
gucuuuggacccuga

SEQ ID NO: 2015500 - RNA, 14 nt, Human
gucuuuggacccug

SEQ ID NO: 2015501 - RNA, 17 nt, Human
gucuuuggacccugagg

SEQ ID NO: 2015502 - RNA, 19 nt, Human
gucuuuucuugcaugaggc

SEQ ID NO: 2015503 - RNA, 14 nt, Human
gucuuuucuugcau

SEQ ID NO: 2015504 - RNA, 24 nt, Human
gucuuuucuugcaugaggcuagug

SEQ ID NO: 2015505 - RNA, 17 nt, Human
gucuuuuccucgcuucu

SEQ ID NO: 2015506 - RNA, 16 nt, Human
gucuuugagcucccac

SEQ ID NO: 2015507 - RNA, 15 nt, Human
gucuuuucuuugcca

SEQ ID NO: 2015508 - RNA, 19 nt, Human
gucuuuucuuugccaucuc

SEQ ID NO: 2015509 - RNA, 20 nt, Human
gucuuuucuuugccaucucu

SEQ ID NO: 2015510 - RNA, 15 nt, Human
gucuuagauguauau

SEQ ID NO: 2015511 - RNA, 18 nt, Human
gucuuagaucauaguuuu

SEQ ID NO: 2015512 - RNA, 14 nt, Human
gucuuccuacucuu

SEQ ID NO: 2015513 - RNA, 16 nt, Human
gucuuccuacucuucu

SEQ ID NO: 2015514 - RNA, 19 nt, Human
gucuuccuacucuucucuc

SEQ ID NO: 2015515 - RNA, 22 nt, Human
gucuuccuacucuucucucugc

SEQ ID NO: 2015516 - RNA, 16 nt, Human
gucuuccuauuucaga

SEQ ID NO: 2015517 - RNA, 18 nt, Human
gucuuccuauuucagaag

SEQ ID NO: 2015518 - RNA, 20 nt, Human
gucuuccuauuucagaaguu

SEQ ID NO: 2015519 - RNA, 23 nt, Human
gucuuccuauuucagaaguuuaa

SEQ ID NO: 2015520 - RNA, 12 nt, Human
gucuggcugcag

SEQ ID NO: 2015521 - RNA, 13 nt, Human
gucuggcugcaga

SEQ ID NO: 2015522 - RNA, 14 nt, Human
gucuggcugcagag

SEQ ID NO: 2015523 - RNA, 15 nt, Human
gucuggcuucacaga

SEQ ID NO: 2015524 - RNA, 18 nt, Human
gucugcuccagcucuggc

SEQ ID NO: 2015525 - RNA, 14 nt, Human
gucugcuccagcuc

SEQ ID NO: 2015526 - RNA, 16 nt, Human
gucugcuccagcucug

SEQ ID NO: 2015527 - RNA, 12 nt, Human
aaccucuuccuc

SEQ ID NO: 2015528 - RNA, 21 nt, Human
aaccucuccucauguucugcu

SEQ ID NO: 2015529 - RNA, 18 nt, Human
aaccucuagaauuuuaag

SEQ ID NO: 2015530 - RNA, 20 nt, Human
gucugcuggucacuucuucu

SEQ ID NO: 2015531 - RNA, 22 nt, Human
gucucauaguuggacuuucuag

SEQ ID NO: 2015532 - RNA, 18 nt, Human
gucucccccacccuuguu

SEQ ID NO: 2015533 - RNA, 20 nt, Human
gucucccccacccuuguucc

SEQ ID NO: 2015534 - RNA, 22 nt, Human
gucucccccacccuuguuccag

SEQ ID NO: 2015535 - RNA, 14 nt, Human
aaccaaaaagaaaa

SEQ ID NO: 2015536 - RNA, 14 nt, Human
gucuccucaggacc

SEQ ID NO: 2015537 - RNA, 15 nt, Human
gucuccucaggacca

SEQ ID NO: 2015538 - RNA, 20 nt, Human
gucuccucuauccugggcuu

SEQ ID NO: 2015539 - RNA, 16 nt, Human
gucucccucccuuggg

SEQ ID NO: 2015540 - RNA, 16 nt, Human
gucuccuacugaggau

SEQ ID NO: 2015541 - RNA, 21 nt, Human
aaccaucauugaaaucuuuuu

SEQ ID NO: 2015542 - RNA, 23 nt, Human
aaccaucauugaaaucuuuuugc

SEQ ID NO: 2015543 - RNA, 20 nt, Human
aaccaucauugaaaucuuuu

SEQ ID NO: 2015544 - RNA, 19 nt, Human
aaccaucauugaaaucuuu

SEQ ID NO: 2015545 - RNA, 20 nt, Human
aaccacaucuugcucugcug

SEQ ID NO: 2015546 - RNA, 22 nt, Human
aaccacaucuugcucugcugac

SEQ ID NO: 2015547 - RNA, 19 nt, Human
aaccaaagcgaauuuuaaa

SEQ ID NO: 2015548 - RNA, 20 nt, Human
aaccaaaaguuauuaaaauu

SEQ ID NO: 2015549 - RNA, 22 nt, Human
aaccaaaaguuauuaaaauugu

SEQ ID NO: 2015550 - RNA, 13 nt, Human
aaccaaagaagaa

SEQ ID NO: 2015551 - RNA, 16 nt, Human
aaccacaaaacucauc

SEQ ID NO: 2015552 - RNA, 18 nt, Human
aaccacaucuugcucugc

SEQ ID NO: 2015553 - RNA, 17 nt, Human
aaccuccgccucuuggg

SEQ ID NO: 2015554 - RNA, 14 nt, Human
aaccuccugggcua

SEQ ID NO: 2015555 - RNA, 24 nt, Human
aaccucuaaauucuuucauuuuag

SEQ ID NO: 2015556 - RNA, 12 nt, Human
aacccccagcuc

SEQ ID NO: 2015557 - RNA, 17 nt, Human
aaccuaguacugccccc

SEQ ID NO: 2015558 - RNA, 13 nt, Human
aacccccagccug

SEQ ID NO: 2015559 - RNA, 14 nt, Human
aacccccagccugc

SEQ ID NO: 2015560 - RNA, 15 nt, Human
aacccccagccugcu

SEQ ID NO: 2015561 - RNA, 18 nt, Human
aacccaaauguucaucaa

SEQ ID NO: 2015562 - RNA, 11 nt, Human
aacccagcucu

SEQ ID NO: 2015563 - RNA, 14 nt, Human
aacccagcucuggu

SEQ ID NO: 2015564 - RNA, 13 nt, Human
aacccagcucugg

SEQ ID NO: 2015565 - RNA, 13 nt, Human
aacccaaauguuc

SEQ ID NO: 2015566 - RNA, 23 nt, Human
aaccauuuugcugucccuuuucc

SEQ ID NO: 2015567 - RNA, 20 nt, Human
aacccauauuuguacaccaa

SEQ ID NO: 2015568 - RNA, 16 nt, Human
aaccccaaguuaguuc

SEQ ID NO: 2015569 - RNA, 17 nt, Human
aacccagcucuggucca

SEQ ID NO: 2015570 - RNA, 11 nt, Human
aacccagcugc

SEQ ID NO: 2015571 - RNA, 15 nt, Human
aacccagcugcaccc

SEQ ID NO: 2015572 - RNA, 16 nt, Human
aacccagcugcacccc

SEQ ID NO: 2015573 - RNA, 21 nt, Human
aacccagcugcaccccuuccu

SEQ ID NO: 2015574 - RNA, 23 nt, Human
aacccagcugcaccccuuccugg

SEQ ID NO: 2015575 - RNA, 15 nt, Human
aacccagcuuacauu

SEQ ID NO: 2015576 - RNA, 19 nt, Human
aaaugagccuggcaagaau

SEQ ID NO: 2015577 - RNA, 13 nt, Human
aaaugagccuggc

SEQ ID NO: 2015578 - RNA, 16 nt, Human
aaaugagaaaucuaaa

SEQ ID NO: 2015579 - RNA, 14 nt, Human
aaaugagaaaucua

SEQ ID NO: 2015580 - RNA, 13 nt, Human
aaaugagaaaucu

SEQ ID NO: 2015581 - RNA, 9 nt, Human
aaaugaggg

SEQ ID NO: 2015582 - RNA, 22 nt, Human
aaaugaguccaaacuggaauga

SEQ ID NO: 2015583 - RNA, 23 nt, Human
aaaugagguacucuccuggaaau

SEQ ID NO: 2015584 - RNA, 16 nt, Human
aaaugagguacucucc

SEQ ID NO: 2015585 - RNA, 17 nt, Human
aaaugaggucagagccu

SEQ ID NO: 2015586 - RNA, 19 nt, Human
aaaugaggucagagccugc

SEQ ID NO: 2015587 - RNA, 11 nt, Human
aaaugagaaau

SEQ ID NO: 2015588 - RNA, 14 nt, Human
aaaugacuuuauua

SEQ ID NO: 2015589 - RNA, 15 nt, Human
aaaugacuuuauuau

SEQ ID NO: 2015590 - RNA, 18 nt, Human
aaaugacuuuauuauuua

SEQ ID NO: 2015591 - RNA, 20 nt, Human
aaaugacuuuauuauuuauu

SEQ ID NO: 2015592 - RNA, 21 nt, Human
aaaugacuuuauuauuuauuu

SEQ ID NO: 2015593 - RNA, 14 nt, Human
aaaugaacaucuau

SEQ ID NO: 2015594 - RNA, 16 nt, Human
aaaugaacacaaauua

SEQ ID NO: 2015595 - RNA, 18 nt, Human
aaaugaacacaaauuaug

SEQ ID NO: 2015596 - RNA, 13 nt, Human
aaaugaacacaaa

SEQ ID NO: 2015597 - RNA, 15 nt, Human
aaaugaacacaaauu

SEQ ID NO: 2015598 - RNA, 13 nt, Human
aaaugaagaauuu

SEQ ID NO: 2015599 - RNA, 15 nt, Human
aaaugaagaauuuaa

SEQ ID NO: 2015600 - RNA, 19 nt, Human
aaaugaagagcuguugaug

SEQ ID NO: 2015601 - RNA, 16 nt, Human
aaaugaagaauuuaaa

SEQ ID NO: 2015602 - RNA, 18 nt, Human
aaaugaagaauuuaaaga

SEQ ID NO: 2015603 - RNA, 21 nt, Human
aaaugaaagcagggacuugaa

SEQ ID NO: 2015604 - RNA, 22 nt, Human
aaaugaaagcagggacuugaac

SEQ ID NO: 2015605 - RNA, 18 nt, Human
aaaugcaugauugcagaa

SEQ ID NO: 2015606 - RNA, 21 nt, Human
aaaugcaugauugcagaauug

SEQ ID NO: 2015607 - RNA, 13 nt, Human
aaaugcauguugc

SEQ ID NO: 2015608 - RNA, 14 nt, Human
aaaugcaucuuuga

SEQ ID NO: 2015609 - RNA, 15 nt, Human
aaaugcaucuuugau

SEQ ID NO: 2015610 - RNA, 16 nt, Human
aaaugcaucuuugaug

SEQ ID NO: 2015611 - RNA, 18 nt, Human
aaaugcaucuuugaugug

SEQ ID NO: 2015612 - RNA, 19 nt, Human
aaaugcaucuuugaugugu

SEQ ID NO: 2015613 - RNA, 20 nt, Human
aaaugcaucuuugauguguu

SEQ ID NO: 2015614 - RNA, 21 nt, Human
aaaugcaucuuugauguguug

SEQ ID NO: 2015615 - RNA, 17 nt, Human
aaaugcaguuacaaauu

SEQ ID NO: 2015616 - RNA, 18 nt, Human
aaaugcaccuggaauaua

SEQ ID NO: 2015617 - RNA, 22 nt, Human
aaaugcaccuggaauauauaac

SEQ ID NO: 2015618 - RNA, 19 nt, Human
aaaugaugugccugcuuca

SEQ ID NO: 2015619 - RNA, 15 nt, Human
aaaugauuucacagu

SEQ ID NO: 2015620 - RNA, 16 nt, Human
aaaugauugcuuuuaa

SEQ ID NO: 2015621 - RNA, 17 nt, Human
aaaugauugcuuuuaaa

SEQ ID NO: 2015622 - RNA, 20 nt, Human
aaaugauugcuuuuaaaauu

SEQ ID NO: 2015623 - RNA, 22 nt, Human
aaaugauugcuuuuaaaauuuu

SEQ ID NO: 2015624 - RNA, 23 nt, Human
aaaugauugcuuuuaaaauuuua

SEQ ID NO: 2015625 - RNA, 20 nt, Human
aaaugcaaaaaaucuuaaua

SEQ ID NO: 2015626 - RNA, 22 nt, Human
aaaugcaaaaaaucuuaauacu

SEQ ID NO: 2015627 - RNA, 22 nt, Human
aaaugcaaacugggcuggaaga

SEQ ID NO: 2015628 - RNA, 14 nt, Human
aaaugcaccuggaa

SEQ ID NO: 2015629 - RNA, 20 nt, Human
aaaugggcagagcagagacc

SEQ ID NO: 2015630 - RNA, 18 nt, Human
aaaugggcagagcagaga

SEQ ID NO: 2015631 - RNA, 21 nt, Human
aaaugccuccaaaguauugua

SEQ ID NO: 2015632 - RNA, 15 nt, Human
aaaugggcagagcag

SEQ ID NO: 2015633 - RNA, 13 nt, Human
aaaugcccagcuu

SEQ ID NO: 2015634 - RNA, 18 nt, Human
aaaugcccagccccuucu

SEQ ID NO: 2015635 - RNA, 15 nt, Human
aaaugcccagccccu

SEQ ID NO: 2015636 - RNA, 14 nt, Human
aaaugcccagcccc

SEQ ID NO: 2015637 - RNA, 13 nt, Human
aaaugcccagccc

SEQ ID NO: 2015638 - RNA, 14 nt, Human
aaaugcauuucuaa

SEQ ID NO: 2015639 - RNA, 24 nt, Human
aaaggaguuucuuuagcugacaga

SEQ ID NO: 2015640 - RNA, 19 nt, Human
aaaggagacuguguuuggu

SEQ ID NO: 2015641 - RNA, 22 nt, Human
aaaggagcucgaaggauauugu

SEQ ID NO: 2015642 - RNA, 17 nt, Human
aaaggagagcuagcagc

SEQ ID NO: 2015643 - RNA, 13 nt, Human
aaaggacugugau

SEQ ID NO: 2015644 - RNA, 12 nt, Human
guagcugggacu

SEQ ID NO: 2015645 - RNA, 18 nt, Human
guagcugggacuacaggc

SEQ ID NO: 2015646 - RNA, 19 nt, Human
guagcugggacuacaggca

SEQ ID NO: 2015647 - RNA, 21 nt, Human
guagcugggacuacaggcacc

SEQ ID NO: 2015648 - RNA, 18 nt, Human
guagcugggauuacaggc

SEQ ID NO: 2015649 - RNA, 20 nt, Human
guagcuguaaggcaugaagg

SEQ ID NO: 2015650 - RNA, 22 nt, Human
guaggcagccugagagucuaga

SEQ ID NO: 2015651 - RNA, 13 nt, Human
guaggauuacuag

SEQ ID NO: 2015652 - RNA, 14 nt, Human
guaggauaugccug

SEQ ID NO: 2015653 - RNA, 22 nt, Human
guaggauaugccugcucuuugg

SEQ ID NO: 2015654 - RNA, 18 nt, Human
guaggcaagauggcacag

SEQ ID NO: 2015655 - RNA, 15 nt, Human
guaggaguucuauuu

SEQ ID NO: 2015656 - RNA, 16 nt, Human
guaggaacugcugggc

SEQ ID NO: 2015657 - RNA, 15 nt, Human
guaggaagacuuugg

SEQ ID NO: 2015658 - RNA, 15 nt, Human
guagcuuaagaaaaa

SEQ ID NO: 2015659 - RNA, 16 nt, Human
guagcuuaagaaaaaa

SEQ ID NO: 2015660 - RNA, 11 nt, Human
guagcuuugca

SEQ ID NO: 2015661 - RNA, 13 nt, Human
guagcuuugcacu

SEQ ID NO: 2015662 - RNA, 18 nt, Human
guaggaagguuaauguuc

SEQ ID NO: 2015663 - RNA, 16 nt, Human
guaggaauauuauauu

SEQ ID NO: 2015664 - RNA, 21 nt, Human
guaggacaaggugcaggcagg

SEQ ID NO: 2015665 - RNA, 21 nt, Human
guaggaauauuauauuuggau

SEQ ID NO: 2015666 - RNA, 20 nt, Human
guaggacaaggugcaggcag

SEQ ID NO: 2015667 - RNA, 17 nt, Human
guaggaauauuauauuu

SEQ ID NO: 2015668 - RNA, 18 nt, Human
guaggaauauuauauuug

SEQ ID NO: 2015669 - RNA, 19 nt, Human
guaggaauauuauauuugg

SEQ ID NO: 2015670 - RNA, 20 nt, Human
guaggaauauuauauuugga

SEQ ID NO: 2015671 - RNA, 22 nt, Human
aaaucuauagaaaguguucugu

SEQ ID NO: 2015672 - RNA, 14 nt, Human
aaaucuaugauucc

SEQ ID NO: 2015673 - RNA, 16 nt, Human
aaaucuaugauuccag

SEQ ID NO: 2015674 - RNA, 13 nt, Human
aaaucuauagaaa

SEQ ID NO: 2015675 - RNA, 14 nt, Human
aaaucuauagaaag

SEQ ID NO: 2015676 - RNA, 15 nt, Human
aaaucuauagaaagu

SEQ ID NO: 2015677 - RNA, 17 nt, Human
aaaucuauagaaagugu

SEQ ID NO: 2015678 - RNA, 19 nt, Human
aaaucuauagaaaguguuc

SEQ ID NO: 2015679 - RNA, 19 nt, Human
aaaucuaaugacauucaau

SEQ ID NO: 2015680 - RNA, 19 nt, Human
aaaucuacacuccagugag

SEQ ID NO: 2015681 - RNA, 15 nt, Human
aaaucucaaauuucu

SEQ ID NO: 2015682 - RNA, 16 nt, Human
aaaucucaaauuucua

SEQ ID NO: 2015683 - RNA, 17 nt, Human
aaaucucaaauuucuaa

SEQ ID NO: 2015684 - RNA, 19 nt, Human
aaaucucaaauuucuaaau

SEQ ID NO: 2015685 - RNA, 17 nt, Human
aaaugaaaaucgugaca

SEQ ID NO: 2015686 - RNA, 11 nt, Human
aaaugaaaauu

SEQ ID NO: 2015687 - RNA, 18 nt, Human
aaaucccuuaccucggug

SEQ ID NO: 2015688 - RNA, 15 nt, Human
aaaucccauuuaaaa

SEQ ID NO: 2015689 - RNA, 13 nt, Human
aaaucgaugcagu

SEQ ID NO: 2015690 - RNA, 14 nt, Human
guaugggagagaag

SEQ ID NO: 2015691 - RNA, 21 nt, Human
guauggcuuuauuuuuuugaa

SEQ ID NO: 2015692 - RNA, 22 nt, Human
guauggcuuuauuuuuuugaac

SEQ ID NO: 2015693 - RNA, 20 nt, Human
guauggaagguggagcguuc

SEQ ID NO: 2015694 - RNA, 16 nt, Human
guaugcacaauuccau

SEQ ID NO: 2015695 - RNA, 15 nt, Human
guaugcaagcaguuu

SEQ ID NO: 2015696 - RNA, 18 nt, Human
guaugcaagcaguuucaa

SEQ ID NO: 2015697 - RNA, 23 nt, Human
guaugcaagcaguuucaauaaag

SEQ ID NO: 2015698 - RNA, 15 nt, Human
guaugcacaauucca

SEQ ID NO: 2015699 - RNA, 19 nt, Human
guaucaacacacauuuuaa

SEQ ID NO: 2015700 - RNA, 19 nt, Human
guaucaaucuuuagaaaag

SEQ ID NO: 2015701 - RNA, 22 nt, Human
guaugaucacggcucacugcag

SEQ ID NO: 2015702 - RNA, 15 nt, Human
guaucccuacuguaa

SEQ ID NO: 2015703 - RNA, 18 nt, Human
guauguggaagugugggu

SEQ ID NO: 2015704 - RNA, 21 nt, Human
guauguggaagugugggucug

SEQ ID NO: 2015705 - RNA, 19 nt, Human
guaugugggggucugugug

SEQ ID NO: 2015706 - RNA, 20 nt, Human
guaugugggggucugugugu

SEQ ID NO: 2015707 - RNA, 16 nt, Human
guauguggaagugugg

SEQ ID NO: 2015708 - RNA, 17 nt, Human
guauguggaaguguggg

SEQ ID NO: 2015709 - RNA, 15 nt, Human
guauguggaagugug

SEQ ID NO: 2015710 - RNA, 15 nt, Human
guaugggagagaaga

SEQ ID NO: 2015711 - RNA, 16 nt, Human
guaugggacuggccuc

SEQ ID NO: 2015712 - RNA, 13 nt, Human
guaugguggcugg

SEQ ID NO: 2015713 - RNA, 15 nt, Human
guauucuuauuuaau

SEQ ID NO: 2015714 - RNA, 15 nt, Human
guauugccaaacauu

SEQ ID NO: 2015715 - RNA, 16 nt, Human
guauugccaaacauua

SEQ ID NO: 2015716 - RNA, 12 nt, Human
guauucucuuuu

SEQ ID NO: 2015717 - RNA, 14 nt, Human
guauucucuuuuca

SEQ ID NO: 2015718 - RNA, 15 nt, Human
guauucugucuucau

SEQ ID NO: 2015719 - RNA, 18 nt, Human
guauucucuuuucaagaa

SEQ ID NO: 2015720 - RNA, 21 nt, Human
guauaaaagccuguuuaagag

SEQ ID NO: 2015721 - RNA, 18 nt, Human
guauaaaagccuguuuaa

SEQ ID NO: 2015722 - RNA, 18 nt, Human
guauaaaagggacugaga

SEQ ID NO: 2015723 - RNA, 21 nt, Human
guauaaagaauaggacuuguu

SEQ ID NO: 2015724 - RNA, 22 nt, Human
guauaaagaauaggacuuguuu

SEQ ID NO: 2015725 - RNA, 18 nt, Human
guauaaaggcauugauau

SEQ ID NO: 2015726 - RNA, 22 nt, Human
guauauugauccagaaagaaaa

SEQ ID NO: 2015727 - RNA, 19 nt, Human
guaucaaauacauuuaaaa

SEQ ID NO: 2015728 - RNA, 18 nt, Human
guauauucuauuuuacaa

SEQ ID NO: 2015729 - RNA, 17 nt, Human
guauauucuauuuuaca

SEQ ID NO: 2015730 - RNA, 12 nt, Human
guauauuauaau

SEQ ID NO: 2015731 - RNA, 14 nt, Human
guauauuauaauag

SEQ ID NO: 2015732 - RNA, 12 nt, Human
guauaaauuuau

SEQ ID NO: 2015733 - RNA, 13 nt, Human
guauaaauuuauu

SEQ ID NO: 2015734 - RNA, 14 nt, Human
guauaaauuuauuu

SEQ ID NO: 2015735 - RNA, 23 nt, Human
guauaaauuuauuuacugcuagu

SEQ ID NO: 2015736 - RNA, 17 nt, Human
aaaugggggugcauuug

SEQ ID NO: 2015737 - RNA, 18 nt, Human
aaaugggggugcauuuga

SEQ ID NO: 2015738 - RNA, 15 nt, Human
aaaugggggugcauu

SEQ ID NO: 2015739 - RNA, 16 nt, Human
aaaugggggugcauuu

SEQ ID NO: 2015740 - RNA, 17 nt, Human
aaauguacauguauuaa

SEQ ID NO: 2015741 - RNA, 23 nt, Human
aaauguacauguauuaaauuaca

SEQ ID NO: 2015742 - RNA, 20 nt, Human
aaauguaauguggcuucugg

SEQ ID NO: 2015743 - RNA, 12 nt, Human
aaauguacaugu

SEQ ID NO: 2015744 - RNA, 13 nt, Human
aaauguacaugua

SEQ ID NO: 2015745 - RNA, 14 nt, Human
aaauguacauguau

SEQ ID NO: 2015746 - RNA, 16 nt, Human
aaauguacauguauua

SEQ ID NO: 2015747 - RNA, 15 nt, Human
guaguucaagaaaug

SEQ ID NO: 2015748 - RNA, 19 nt, Human
guaguucaagaaaugaaga

SEQ ID NO: 2015749 - RNA, 20 nt, Human
guaguucaagaaaugaagag

SEQ ID NO: 2015750 - RNA, 17 nt, Human
guauaaaagccuguuua

SEQ ID NO: 2015751 - RNA, 17 nt, Human
guaguucuuuaaacugu

SEQ ID NO: 2015752 - RNA, 17 nt, Human
guaguucuguauuugaa

SEQ ID NO: 2015753 - RNA, 18 nt, Human
guaguucuguauuugaaa

SEQ ID NO: 2015754 - RNA, 20 nt, Human
guaguucuguauuugaaagu

SEQ ID NO: 2015755 - RNA, 14 nt, Human
guaguucuuuaaac

SEQ ID NO: 2015756 - RNA, 16 nt, Human
guaguucuaccggcuu

SEQ ID NO: 2015757 - RNA, 14 nt, Human
guaguucuguauuu

SEQ ID NO: 2015758 - RNA, 15 nt, Human
guaguucuguauuug

SEQ ID NO: 2015759 - RNA, 16 nt, Human
guaguucuguauuuga

SEQ ID NO: 2015760 - RNA, 18 nt, Human
gucaaaguggugagaggc

SEQ ID NO: 2015761 - RNA, 19 nt, Human
gucaaaguggugagaggca

SEQ ID NO: 2015762 - RNA, 17 nt, Human
guauuuuuguauucaau

SEQ ID NO: 2015763 - RNA, 17 nt, Human
guauuuuuuaaugcuaa

SEQ ID NO: 2015764 - RNA, 17 nt, Human
guauuuuuuuacuaaua

SEQ ID NO: 2015765 - RNA, 21 nt, Human
guauuuuuuuacuaauagaca

SEQ ID NO: 2015766 - RNA, 16 nt, Human
gucaaaugcuagaaaa

SEQ ID NO: 2015767 - RNA, 13 nt, Human
gucaacauuucuc

SEQ ID NO: 2015768 - RNA, 17 nt, Human
gucaacauuucucaugu

SEQ ID NO: 2015769 - RNA, 15 nt, Human
gucacaaauuucucu

SEQ ID NO: 2015770 - RNA, 19 nt, Human
gucaacucauauuuucaug

SEQ ID NO: 2015771 - RNA, 16 nt, Human
gucacacacuuuggcu

SEQ ID NO: 2015772 - RNA, 20 nt, Human
gucacacaguauuacuucug

SEQ ID NO: 2015773 - RNA, 22 nt, Human
aaauuuccugggagcuuuugua

SEQ ID NO: 2015774 - RNA, 14 nt, Human
guauuuuuuuacua

SEQ ID NO: 2015775 - RNA, 15 nt, Human
guauuuuuuuacuaa

SEQ ID NO: 2015776 - RNA, 20 nt, Human
aaauuuaguauuuuguuuca

SEQ ID NO: 2015777 - RNA, 21 nt, Human
aaauuuacuacaauauguaca

SEQ ID NO: 2015778 - RNA, 21 nt, Human
aaauuuacugucuaagauuaa

SEQ ID NO: 2015779 - RNA, 17 nt, Human
aaauuucagcagcugca

SEQ ID NO: 2015780 - RNA, 18 nt, Human
aaauuucagcagcugcag

SEQ ID NO: 2015781 - RNA, 21 nt, Human
aaauuaacuuuuauaaacuuu

SEQ ID NO: 2015782 - RNA, 19 nt, Human
aaauuaacuuuuauaaacu

SEQ ID NO: 2015783 - RNA, 20 nt, Human
aaauguuaaguugaugguga

SEQ ID NO: 2015784 - RNA, 16 nt, Human
aaauguuaaagaugua

SEQ ID NO: 2015785 - RNA, 21 nt, Human
aaauguuaaagauguagcaaa

SEQ ID NO: 2015786 - RNA, 12 nt, Human
aaauguuaugua

SEQ ID NO: 2015787 - RNA, 13 nt, Human
aaauguuauguau

SEQ ID NO: 2015788 - RNA, 14 nt, Human
aaauguuauguaua

SEQ ID NO: 2015789 - RNA, 23 nt, Human
aaauguuauguauauggugguaa

SEQ ID NO: 2015790 - RNA, 20 nt, Human
aaauuacguacuaaggauac

SEQ ID NO: 2015791 - RNA, 22 nt, Human
aaauuaacuuuuauaaacuuua

SEQ ID NO: 2015792 - RNA, 23 nt, Human
aaauuaacuuuuauaaacuuuac

SEQ ID NO: 2015793 - RNA, 16 nt, Human
guauuuaauucauguu

SEQ ID NO: 2015794 - RNA, 12 nt, Human
aaauguuaaaga

SEQ ID NO: 2015795 - RNA, 15 nt, Human
aaauguuaaagaugu

SEQ ID NO: 2015796 - RNA, 20 nt, Human
guauuuaauagguuuggaca

SEQ ID NO: 2015797 - RNA, 17 nt, Human
guauuuaagccuaaaga

SEQ ID NO: 2015798 - RNA, 19 nt, Human
guauuuaagccuaaagauu

SEQ ID NO: 2015799 - RNA, 12 nt, Human
guauuuaagccu

SEQ ID NO: 2015800 - RNA, 22 nt, Human
guauuggcuagagguucaaaga

SEQ ID NO: 2015801 - RNA, 17 nt, Human
guauugccaaacauuaa

SEQ ID NO: 2015802 - RNA, 21 nt, Human
guauugccaaacauuaauguu

SEQ ID NO: 2015803 - RNA, 23 nt, Human
guauugccaaacauuaauguuga

SEQ ID NO: 2015804 - RNA, 24 nt, Human
guauugccaaacauuaauguugau

SEQ ID NO: 2015805 - RNA, 14 nt, Human
aaauucaugcugcu

SEQ ID NO: 2015806 - RNA, 12 nt, Human
aaauuauauucc

SEQ ID NO: 2015807 - RNA, 14 nt, Human
caagugagacccug

SEQ ID NO: 2015808 - RNA, 12 nt, Human
caagugaaaaau

SEQ ID NO: 2015809 - RNA, 23 nt, Human
caagugaaaaaggaggaagagaa

SEQ ID NO: 2015810 - RNA, 22 nt, Human
caagugaaaaaggaggaagaga

SEQ ID NO: 2015811 - RNA, 21 nt, Human
caagguucugggugcaggagc

SEQ ID NO: 2015812 - RNA, 13 nt, Human
caagguucugggu

SEQ ID NO: 2015813 - RNA, 20 nt, Human
caagugauucuccugccuca

SEQ ID NO: 2015814 - RNA, 19 nt, Human
caagugagacccugucuca

SEQ ID NO: 2015815 - RNA, 15 nt, Human
caagugagacccugu

SEQ ID NO: 2015816 - RNA, 19 nt, Human
caagugauucuccugccuc

SEQ ID NO: 2015817 - RNA, 18 nt, Human
caagugauucuccugccu

SEQ ID NO: 2015818 - RNA, 14 nt, Human
caagguaaggaggg

SEQ ID NO: 2015819 - RNA, 22 nt, Human
caaggggaaucuggagguagcc

SEQ ID NO: 2015820 - RNA, 23 nt, Human
caaggggaauguuugccucugcc

SEQ ID NO: 2015821 - RNA, 17 nt, Human
caaggugugccccgugg

SEQ ID NO: 2015822 - RNA, 13 nt, Human
caaggucauuuuu

SEQ ID NO: 2015823 - RNA, 23 nt, Human
caagguaggguaggcagccugag

SEQ ID NO: 2015824 - RNA, 13 nt, Human
caagguagaauga

SEQ ID NO: 2015825 - RNA, 18 nt, Human
caagguagaaugaccuug

SEQ ID NO: 2015826 - RNA, 20 nt, Human
caagguagaaugaccuugua

SEQ ID NO: 2015827 - RNA, 16 nt, Human
caagggaggcccagcg

SEQ ID NO: 2015828 - RNA, 14 nt, Human
caagggaggcccag

SEQ ID NO: 2015829 - RNA, 15 nt, Human
caagggaggcccagc

SEQ ID NO: 2015830 - RNA, 14 nt, Human
caagggccuggccu

SEQ ID NO: 2015831 - RNA, 13 nt, Human
caagggccuggcc

SEQ ID NO: 2015832 - RNA, 15 nt, Human
caagggccuggccug

SEQ ID NO: 2015833 - RNA, 21 nt, Human
caaggggaauguuugccucug

SEQ ID NO: 2015834 - RNA, 23 nt, Human
caagagccugagagugaggugga

SEQ ID NO: 2015835 - RNA, 12 nt, Human
caagagccuuaa

SEQ ID NO: 2015836 - RNA, 14 nt, Human
caagagccuuaaaa

SEQ ID NO: 2015837 - RNA, 15 nt, Human
caagagccuuaaaac

SEQ ID NO: 2015838 - RNA, 16 nt, Human
caagagccuuaaaaca

SEQ ID NO: 2015839 - RNA, 17 nt, Human
caagagccuuaaaacau

SEQ ID NO: 2015840 - RNA, 17 nt, Human
caagagggcacuggugg

SEQ ID NO: 2015841 - RNA, 18 nt, Human
caagagggcacugguggc

SEQ ID NO: 2015842 - RNA, 19 nt, Human
caagagggcacugguggcc

SEQ ID NO: 2015843 - RNA, 20 nt, Human
caagagggcacugguggccc

SEQ ID NO: 2015844 - RNA, 17 nt, Human
caagacuuauuuucaca

SEQ ID NO: 2015845 - RNA, 11 nt, Human
caagagccuga

SEQ ID NO: 2015846 - RNA, 13 nt, Human
caagagccugaga

SEQ ID NO: 2015847 - RNA, 17 nt, Human
caagagcccaggccucc

SEQ ID NO: 2015848 - RNA, 12 nt, Human
caagcagauucg

SEQ ID NO: 2015849 - RNA, 15 nt, Human
caagaggugggaggg

SEQ ID NO: 2015850 - RNA, 16 nt, Human
caagaggugggagggc

SEQ ID NO: 2015851 - RNA, 20 nt, Human
caagagguuuggcuccugcc

SEQ ID NO: 2015852 - RNA, 22 nt, Human
caagagguuuggcuccugccca

SEQ ID NO: 2015853 - RNA, 23 nt, Human
caagagguuuggcuccugcccac

SEQ ID NO: 2015854 - RNA, 12 nt, Human
caagagggucug

SEQ ID NO: 2015855 - RNA, 16 nt, Human
caagagggucugagga

SEQ ID NO: 2015856 - RNA, 17 nt, Human
caagagggucugaggaa

SEQ ID NO: 2015857 - RNA, 22 nt, Human
caagacgcugugcugcccugcc

SEQ ID NO: 2015858 - RNA, 21 nt, Human
caagacgcugugcugcccugc

SEQ ID NO: 2015859 - RNA, 20 nt, Human
caagacgcugugcugcccug

SEQ ID NO: 2015860 - RNA, 13 nt, Human
caagaccuucucc

SEQ ID NO: 2015861 - RNA, 13 nt, Human
caagaaaugaaag

SEQ ID NO: 2015862 - RNA, 23 nt, Human
caagacccuuguggucccacccc

SEQ ID NO: 2015863 - RNA, 14 nt, Human
caacuugcaagggc

SEQ ID NO: 2015864 - RNA, 12 nt, Human
caacuugccuuu

SEQ ID NO: 2015865 - RNA, 17 nt, Human
caagcuguugaccaggc

SEQ ID NO: 2015866 - RNA, 19 nt, Human
caagcuguugaccaggcac

SEQ ID NO: 2015867 - RNA, 14 nt, Human
caagcuuauuuugg

SEQ ID NO: 2015868 - RNA, 14 nt, Human
caaggauccugagc

SEQ ID NO: 2015869 - RNA, 20 nt, Human
caaggacuaggguccugggg

SEQ ID NO: 2015870 - RNA, 21 nt, Human
caaggacuaggguccugggga

SEQ ID NO: 2015871 - RNA, 16 nt, Human
caaggacuaggguccu

SEQ ID NO: 2015872 - RNA, 21 nt, Human
caagcuuuuacaacagugcug

SEQ ID NO: 2015873 - RNA, 14 nt, Human
caaggacuaggguc

SEQ ID NO: 2015874 - RNA, 18 nt, Human
caaggacuaggguccugg

SEQ ID NO: 2015875 - RNA, 19 nt, Human
caaggacuaggguccuggg

SEQ ID NO: 2015876 - RNA, 23 nt, Human
caagggaauuucuucaacucccu

SEQ ID NO: 2015877 - RNA, 14 nt, Human
caaggcugucaauu

SEQ ID NO: 2015878 - RNA, 13 nt, Human
caaggcugucaau

SEQ ID NO: 2015879 - RNA, 21 nt, Human
caaggcugggggaagaagcuc

SEQ ID NO: 2015880 - RNA, 16 nt, Human
caaggauccugagcca

SEQ ID NO: 2015881 - RNA, 15 nt, Human
caaggauccugagcc

SEQ ID NO: 2015882 - RNA, 17 nt, Human
caaggauccugagccag

SEQ ID NO: 2015883 - RNA, 20 nt, Human
caagcccaguucagcuuggg

SEQ ID NO: 2015884 - RNA, 14 nt, Human
caagcccaggaggg

SEQ ID NO: 2015885 - RNA, 17 nt, Human
caagcauucucuccauu

SEQ ID NO: 2015886 - RNA, 13 nt, Human
caagcauguggau

SEQ ID NO: 2015887 - RNA, 15 nt, Human
caagcaucacuuuuu

SEQ ID NO: 2015888 - RNA, 22 nt, Human
caagcaguuucaauaaaguuug

SEQ ID NO: 2015889 - RNA, 15 nt, Human
caagcaguuucaaua

SEQ ID NO: 2015890 - RNA, 16 nt, Human
caagcaguuucaauaa

SEQ ID NO: 2015891 - RNA, 20 nt, Human
caagcaguuucaauaaaguu

SEQ ID NO: 2015892 - RNA, 21 nt, Human
caagcaguuucaauaaaguuu

SEQ ID NO: 2015893 - RNA, 13 nt, Human
caagcaguuucaa

SEQ ID NO: 2015894 - RNA, 14 nt, Human
caagcaguuucaau

SEQ ID NO: 2015895 - RNA, 21 nt, Human
caaccugauugugucucuugg

SEQ ID NO: 2015896 - RNA, 19 nt, Human
caaccugauugugucucuu

SEQ ID NO: 2015897 - RNA, 17 nt, Human
caaccugauugugucuc

SEQ ID NO: 2015898 - RNA, 23 nt, Human
caacugcaucaagaugugacaug

SEQ ID NO: 2015899 - RNA, 20 nt, Human
caacugcaucaagaugugac

SEQ ID NO: 2015900 - RNA, 17 nt, Human
caacugcaucaagaugu

SEQ ID NO: 2015901 - RNA, 15 nt, Human
caacugaucuguuau

SEQ ID NO: 2015902 - RNA, 17 nt, Human
caacaggcugggcuuca

SEQ ID NO: 2015903 - RNA, 16 nt, Human
caaauuuacagagaca

SEQ ID NO: 2015904 - RNA, 17 nt, Human
caaauuuacagagacag

SEQ ID NO: 2015905 - RNA, 23 nt, Human
caaauuuacagagacagaaagca

SEQ ID NO: 2015906 - RNA, 14 nt, Human
caacaggcugggcu

SEQ ID NO: 2015907 - RNA, 16 nt, Human
caacauacucccaucu

SEQ ID NO: 2015908 - RNA, 15 nt, Human
caacauacucccauc

SEQ ID NO: 2015909 - RNA, 14 nt, Human
caacauacucccau

SEQ ID NO: 2015910 - RNA, 16 nt, Human
caacuugccuuugaag

SEQ ID NO: 2015911 - RNA, 20 nt, Human
caacaggcugggcuucagug

SEQ ID NO: 2015912 - RNA, 23 nt, Human
auuuuaaaugugugagugcaugu

SEQ ID NO: 2015913 - RNA, 16 nt, Human
auuuuaagccuuuguu

SEQ ID NO: 2015914 - RNA, 18 nt, Human
auuuuaagccuuuguuga

SEQ ID NO: 2015915 - RNA, 19 nt, Human
auuuuaagccuuuguugaa

SEQ ID NO: 2015916 - RNA, 22 nt, Human
auuuuaagccuuuguugaacug

SEQ ID NO: 2015917 - RNA, 23 nt, Human
auuuuaagccuuuguugaacugu

SEQ ID NO: 2015918 - RNA, 16 nt, Human
auuuuaagcuaggaaa

SEQ ID NO: 2015919 - RNA, 17 nt, Human
auuuuaagcuaggaaaa

SEQ ID NO: 2015920 - RNA, 16 nt, Human
auuuguaccauuucag

SEQ ID NO: 2015921 - RNA, 12 nt, Human
auuuuaaaugug

SEQ ID NO: 2015922 - RNA, 13 nt, Human
auuuuaaaugugu

SEQ ID NO: 2015923 - RNA, 18 nt, Human
auuuuaaaugugugagug

SEQ ID NO: 2015924 - RNA, 14 nt, Human
caaacugcacauga

SEQ ID NO: 2015925 - RNA, 22 nt, Human
caaacugcacaugauuucacaa

SEQ ID NO: 2015926 - RNA, 15 nt, Human
caaacugcacaugau

SEQ ID NO: 2015927 - RNA, 18 nt, Human
caaacugcacaugauuuc

SEQ ID NO: 2015928 - RNA, 19 nt, Human
caaacugcacaugauuuca

SEQ ID NO: 2015929 - RNA, 21 nt, Human
caaacugcacaugauuucaca

SEQ ID NO: 2015930 - RNA, 19 nt, Human
auuuuaagcuaggaaaaga

SEQ ID NO: 2015931 - RNA, 20 nt, Human
auuuuaagcuaggaaaagaa

SEQ ID NO: 2015932 - RNA, 22 nt, Human
auuuuaagcuaggaaaagaaau

SEQ ID NO: 2015933 - RNA, 23 nt, Human
auuuuaagcuaggaaaagaaauc

SEQ ID NO: 2015934 - RNA, 21 nt, Human
caaagagguuuuaaaaaaauc

SEQ ID NO: 2015935 - RNA, 14 nt, Human
caaagagguuuuaa

SEQ ID NO: 2015936 - RNA, 21 nt, Human
caaagaccaauuuuuugugug

SEQ ID NO: 2015937 - RNA, 13 nt, Human
caaagcccagcuu

SEQ ID NO: 2015938 - RNA, 12 nt, Human
caaagaaauuau

SEQ ID NO: 2015939 - RNA, 20 nt, Human
caaacuggaaugagcagcuu

SEQ ID NO: 2015940 - RNA, 20 nt, Human
caaacuggccgcgggggcag

SEQ ID NO: 2015941 - RNA, 22 nt, Human
caaagaaucaccuaauuaauuu

SEQ ID NO: 2015942 - RNA, 13 nt, Human
caaagaaauuaug

SEQ ID NO: 2015943 - RNA, 13 nt, Human
caaagacaaauag

SEQ ID NO: 2015944 - RNA, 23 nt, Human
caaagaaugaauuucaacgccug

SEQ ID NO: 2015945 - RNA, 14 nt, Human
caaagacaaauagu

SEQ ID NO: 2015946 - RNA, 15 nt, Human
caaagacaaauagua

SEQ ID NO: 2015947 - RNA, 16 nt, Human
caaagacaaauaguag

SEQ ID NO: 2015948 - RNA, 23 nt, Human
caaagacaaauaguaggcaagau

SEQ ID NO: 2015949 - RNA, 18 nt, Human
caaauucugucucuggau

SEQ ID NO: 2015950 - RNA, 12 nt, Human
caaauguuucua

SEQ ID NO: 2015951 - RNA, 19 nt, Human
caaauguuucuaagguaac

SEQ ID NO: 2015952 - RNA, 17 nt, Human
caaauuguaagcaugca

SEQ ID NO: 2015953 - RNA, 21 nt, Human
caaauauuuagauguaauuuu

SEQ ID NO: 2015954 - RNA, 13 nt, Human
caaauauuguuaa

SEQ ID NO: 2015955 - RNA, 22 nt, Human
caaauauuuagauguaauuuug

SEQ ID NO: 2015956 - RNA, 23 nt, Human
caaauauuuagauguaauuuugu

SEQ ID NO: 2015957 - RNA, 19 nt, Human
caaaguggugagaggcauc

SEQ ID NO: 2015958 - RNA, 21 nt, Human
caaaguucccuacuuccugug

SEQ ID NO: 2015959 - RNA, 22 nt, Human
caaaguucccuacuuccuguga

SEQ ID NO: 2015960 - RNA, 20 nt, Human
caaaggguaucaggugcugc

SEQ ID NO: 2015961 - RNA, 21 nt, Human
caaaggguaucaggugcugcc

SEQ ID NO: 2015962 - RNA, 17 nt, Human
caaaguggugagaggca

SEQ ID NO: 2015963 - RNA, 16 nt, Human
caaaguggugagaggc

SEQ ID NO: 2015964 - RNA, 23 nt, Human
caaaggguaucaggugcugccau

SEQ ID NO: 2015965 - RNA, 20 nt, Human
caaaggagauuggaaggaac

SEQ ID NO: 2015966 - RNA, 19 nt, Human
caaaggcuguauucagcaa

SEQ ID NO: 2015967 - RNA, 18 nt, Human
caaaggcuguauucagca

SEQ ID NO: 2015968 - RNA, 14 nt, Human
caaaggagauugga

SEQ ID NO: 2015969 - RNA, 17 nt, Human
caaagccccauuaacug

SEQ ID NO: 2015970 - RNA, 16 nt, Human
caaugaccuuucaaua

SEQ ID NO: 2015971 - RNA, 15 nt, Human
caaugaccuuucaau

SEQ ID NO: 2015972 - RNA, 13 nt, Human
caaugauggucac

SEQ ID NO: 2015973 - RNA, 14 nt, Human
caaugaccuuucaa

SEQ ID NO: 2015974 - RNA, 13 nt, Human
caaugaccuuuca

SEQ ID NO: 2015975 - RNA, 18 nt, Human
caaucuuuagaaaaggca

SEQ ID NO: 2015976 - RNA, 22 nt, Human
caaugcaaaccaucauugaaau

SEQ ID NO: 2015977 - RNA, 21 nt, Human
caaugcaaaccaucauugaaa

SEQ ID NO: 2015978 - RNA, 14 nt, Human
caaugcaaaccauc

SEQ ID NO: 2015979 - RNA, 14 nt, Human
caaugauggucacc

SEQ ID NO: 2015980 - RNA, 23 nt, Human
caaugcaaaccaucauugaaauc

SEQ ID NO: 2015981 - RNA, 13 nt, Human
caaugcacuuugu

SEQ ID NO: 2015982 - RNA, 14 nt, Human
caaugcacugacau

SEQ ID NO: 2015983 - RNA, 11 nt, Human
caauccuuaca

SEQ ID NO: 2015984 - RNA, 12 nt, Human
caauccuuacaa

SEQ ID NO: 2015985 - RNA, 13 nt, Human
caauccuuacaaa

SEQ ID NO: 2015986 - RNA, 14 nt, Human
caauccuuacaaau

SEQ ID NO: 2015987 - RNA, 15 nt, Human
caauccuuacaaaug

SEQ ID NO: 2015988 - RNA, 16 nt, Human
caauccuuacaaauga

SEQ ID NO: 2015989 - RNA, 17 nt, Human
caauccuuacaaaugau

SEQ ID NO: 2015990 - RNA, 20 nt, Human
caauccuuacaaaugauugc

SEQ ID NO: 2015991 - RNA, 18 nt, Human
caaucucggcucacugca

SEQ ID NO: 2015992 - RNA, 21 nt, Human
caaucucguauagaagucuuc

SEQ ID NO: 2015993 - RNA, 22 nt, Human
caaucucguauagaagucuuca

SEQ ID NO: 2015994 - RNA, 16 nt, Human
caaucuuacuuuguaa

SEQ ID NO: 2015995 - RNA, 17 nt, Human
caaucuuacuuuguaaa

SEQ ID NO: 2015996 - RNA, 19 nt, Human
caaucuuacuuuguaaauu

SEQ ID NO: 2015997 - RNA, 22 nt, Human
caaucuuacuuuguaaauucug

SEQ ID NO: 2015998 - RNA, 23 nt, Human
caaucuuacuuuguaaauucuga

SEQ ID NO: 2015999 - RNA, 14 nt, Human
cacacccagcccac

SEQ ID NO: 2016000 - RNA, 20 nt, Human
cacacccagcccacuucugc

SEQ ID NO: 2016001 - RNA, 12 nt, Human
cacaccuccucc

SEQ ID NO: 2016002 - RNA, 14 nt, Human
cacaccuccuccca

SEQ ID NO: 2016003 - RNA, 16 nt, Human
cacaccuccucccacu

SEQ ID NO: 2016004 - RNA, 19 nt, Human
cacaccuccucccacugcc

SEQ ID NO: 2016005 - RNA, 21 nt, Human
cacaccuccucccacugccca

SEQ ID NO: 2016006 - RNA, 22 nt, Human
cacaccuccucccacugcccac

SEQ ID NO: 2016007 - RNA, 21 nt, Human
cacaccagagcccaccuuggc

SEQ ID NO: 2016008 - RNA, 22 nt, Human
cacaccagagcccaccuuggcu

SEQ ID NO: 2016009 - RNA, 22 nt, Human
cacacagauuugagcucagccc

SEQ ID NO: 2016010 - RNA, 13 nt, Human
cacacagcucugu

SEQ ID NO: 2016011 - RNA, 14 nt, Human
cacacagcucuguc

SEQ ID NO: 2016012 - RNA, 15 nt, Human
cacacagcucugucc

SEQ ID NO: 2016013 - RNA, 14 nt, Human
cacacaagugcagu

SEQ ID NO: 2016014 - RNA, 20 nt, Human
cacaaucucggcucacugca

SEQ ID NO: 2016015 - RNA, 22 nt, Human
cacaaucucggcucacugcauc

SEQ ID NO: 2016016 - RNA, 23 nt, Human
cacaaucucggcucacugcaucc

SEQ ID NO: 2016017 - RNA, 24 nt, Human
cacaaucucggcucacugcauccu

SEQ ID NO: 2016018 - RNA, 15 nt, Human
cacacaccagagccc

SEQ ID NO: 2016019 - RNA, 14 nt, Human
cacacacaaaaaaa

SEQ ID NO: 2016020 - RNA, 17 nt, Human
cacacacaaaaaaagac

SEQ ID NO: 2016021 - RNA, 16 nt, Human
cacacaccagagccca

SEQ ID NO: 2016022 - RNA, 20 nt, Human
cacacaccagagcccaccuu

SEQ ID NO: 2016023 - RNA, 21 nt, Human
cacacagaggcugccucuccc

SEQ ID NO: 2016024 - RNA, 18 nt, Human
cacacagauuugagcuca

SEQ ID NO: 2016025 - RNA, 20 nt, Human
cacacagauuugagcucagc

SEQ ID NO: 2016026 - RNA, 11 nt, Human
cacacacacaa

SEQ ID NO: 2016027 - RNA, 13 nt, Human
cacacacacaaaa

SEQ ID NO: 2016028 - RNA, 14 nt, Human
cacacacuuuggcu

SEQ ID NO: 2016029 - RNA, 22 nt, Human
cacaaacugcuuccuuucuuga

SEQ ID NO: 2016030 - RNA, 17 nt, Human
cacaaacgggcucagca

SEQ ID NO: 2016031 - RNA, 20 nt, Human
caauguaaacacuuaacaga

SEQ ID NO: 2016032 - RNA, 22 nt, Human
caauuauaaacucauuuugcuu

SEQ ID NO: 2016033 - RNA, 18 nt, Human
caaugguuuucuugugug

SEQ ID NO: 2016034 - RNA, 14 nt, Human
caaugcacuuuguu

SEQ ID NO: 2016035 - RNA, 23 nt, Human
cacaagaaaugaaagcagggacu

SEQ ID NO: 2016036 - RNA, 23 nt, Human
cacaagacccaaaaggcagaagc

SEQ ID NO: 2016037 - RNA, 19 nt, Human
cacaaucucggcucacugc

SEQ ID NO: 2016038 - RNA, 13 nt, Human
cacaagaaaugaa

SEQ ID NO: 2016039 - RNA, 15 nt, Human
cacaagaaaugaaag

SEQ ID NO: 2016040 - RNA, 17 nt, Human
cacaaagguagcuuuuc

SEQ ID NO: 2016041 - RNA, 17 nt, Human
cacaaauauuaaaaagu

SEQ ID NO: 2016042 - RNA, 13 nt, Human
cacaaaugacuuu

SEQ ID NO: 2016043 - RNA, 14 nt, Human
cacaaaugacuuua

SEQ ID NO: 2016044 - RNA, 15 nt, Human
cacaaaugacuuuau

SEQ ID NO: 2016045 - RNA, 20 nt, Human
cacaaaugacuuuauuauuu

SEQ ID NO: 2016046 - RNA, 22 nt, Human
cacaaaugacuuuauuauuuau

SEQ ID NO: 2016047 - RNA, 13 nt, Human
cacaaauauuaaa

SEQ ID NO: 2016048 - RNA, 14 nt, Human
cacaaauauuaaaa

SEQ ID NO: 2016049 - RNA, 20 nt, Human
cacaaauauuaaaaagucuu

SEQ ID NO: 2016050 - RNA, 13 nt, Human
caccaagcccagu

SEQ ID NO: 2016051 - RNA, 12 nt, Human
caccaagcccag

SEQ ID NO: 2016052 - RNA, 17 nt, Human
caccaaucuuacuuugu

SEQ ID NO: 2016053 - RNA, 22 nt, Human
caccaaucuuacuuuguaaauu

SEQ ID NO: 2016054 - RNA, 18 nt, Human
caccaaucuuacuuugua

SEQ ID NO: 2016055 - RNA, 19 nt, Human
caccaaucuuacuuuguaa

SEQ ID NO: 2016056 - RNA, 22 nt, Human
cacauguccaagaagcccagga

SEQ ID NO: 2016057 - RNA, 21 nt, Human
cacauguccaagaagcccagg

SEQ ID NO: 2016058 - RNA, 19 nt, Human
cacauguccaagaagccca

SEQ ID NO: 2016059 - RNA, 18 nt, Human
cacauguccaagaagccc

SEQ ID NO: 2016060 - RNA, 17 nt, Human
caccaacgucugugcca

SEQ ID NO: 2016061 - RNA, 18 nt, Human
caccaacuacuaccugua

SEQ ID NO: 2016062 - RNA, 15 nt, Human
caccacgcccggcua

SEQ ID NO: 2016063 - RNA, 14 nt, Human
caccacgcccggcu

SEQ ID NO: 2016064 - RNA, 15 nt, Human
caccacacucagccc

SEQ ID NO: 2016065 - RNA, 19 nt, Human
caccacacugauccagccc

SEQ ID NO: 2016066 - RNA, 14 nt, Human
caccacacucagcc

SEQ ID NO: 2016067 - RNA, 19 nt, Human
caccacacccagcccacuu

SEQ ID NO: 2016068 - RNA, 17 nt, Human
caccagagcccaccuug

SEQ ID NO: 2016069 - RNA, 18 nt, Human
caccagagcccaccuugg

SEQ ID NO: 2016070 - RNA, 20 nt, Human
caccagagcccaccuuggcu

SEQ ID NO: 2016071 - RNA, 22 nt, Human
caccagagcccaccuuggcuca

SEQ ID NO: 2016072 - RNA, 15 nt, Human
caccagagcccaccu

SEQ ID NO: 2016073 - RNA, 19 nt, Human
caccauguuggccaggcug

SEQ ID NO: 2016074 - RNA, 20 nt, Human
caccauguuggccaggcugc

SEQ ID NO: 2016075 - RNA, 20 nt, Human
caccauguuggccaggcugg

SEQ ID NO: 2016076 - RNA, 22 nt, Human
caccaugagggaagaauaaaga

SEQ ID NO: 2016077 - RNA, 19 nt, Human
caccaucugcugucuuuuc

SEQ ID NO: 2016078 - RNA, 10 nt, Human
caccaucugc

SEQ ID NO: 2016079 - RNA, 15 nt, Human
caccaucugcugucu

SEQ ID NO: 2016080 - RNA, 16 nt, Human
caccaucugcugucuu

SEQ ID NO: 2016081 - RNA, 24 nt, Human
caccaucaagccaccaacauacuc

SEQ ID NO: 2016082 - RNA, 19 nt, Human
caccaucaagccaccaaca

SEQ ID NO: 2016083 - RNA, 17 nt, Human
caccaucaagccaccaa

SEQ ID NO: 2016084 - RNA, 16 nt, Human
caccaucaagccacca

SEQ ID NO: 2016085 - RNA, 15 nt, Human
caccaucaugucugg

SEQ ID NO: 2016086 - RNA, 17 nt, Human
caccaucaugucuggcu

SEQ ID NO: 2016087 - RNA, 18 nt, Human
caccaucaugucuggcua

SEQ ID NO: 2016088 - RNA, 13 nt, Human
caccauccccucc

SEQ ID NO: 2016089 - RNA, 21 nt, Human
caccauauuaccacagacaua

SEQ ID NO: 2016090 - RNA, 18 nt, Human
caccauaggucaccuuua

SEQ ID NO: 2016091 - RNA, 15 nt, Human
caccaucaagccacc

SEQ ID NO: 2016092 - RNA, 14 nt, Human
caccaucaagccac

SEQ ID NO: 2016093 - RNA, 13 nt, Human
caccaucaagcca

SEQ ID NO: 2016094 - RNA, 20 nt, Human
caccagguagaacgccaggg

SEQ ID NO: 2016095 - RNA, 13 nt, Human
caccaguacauuc

SEQ ID NO: 2016096 - RNA, 21 nt, Human
caccaguacauucucaguuuu

SEQ ID NO: 2016097 - RNA, 22 nt, Human
caccaguacauucucaguuuuu

SEQ ID NO: 2016098 - RNA, 14 nt, Human
caccagugaccugg

SEQ ID NO: 2016099 - RNA, 15 nt, Human
caccagugaccugga

SEQ ID NO: 2016100 - RNA, 15 nt, Human
caccagaugugacag

SEQ ID NO: 2016101 - RNA, 16 nt, Human
caccagggccaaaagc

SEQ ID NO: 2016102 - RNA, 22 nt, Human
caccagggccaaaagcuucccu

SEQ ID NO: 2016103 - RNA, 16 nt, Human
cacaugagauaauaug

SEQ ID NO: 2016104 - RNA, 12 nt, Human
cacaugauuuca

SEQ ID NO: 2016105 - RNA, 14 nt, Human
cacaugauuucaca

SEQ ID NO: 2016106 - RNA, 16 nt, Human
cacaugauuucacaaa

SEQ ID NO: 2016107 - RNA, 17 nt, Human
cacaugauuucacaaau

SEQ ID NO: 2016108 - RNA, 17 nt, Human
cacaugcaaggucauuu

SEQ ID NO: 2016109 - RNA, 19 nt, Human
cacaugcaaggucauuuuu

SEQ ID NO: 2016110 - RNA, 20 nt, Human
cacaugcaaggucauuuuuu

SEQ ID NO: 2016111 - RNA, 18 nt, Human
cacaugcacgugugugca

SEQ ID NO: 2016112 - RNA, 18 nt, Human
cacaugauuucacaaaua

SEQ ID NO: 2016113 - RNA, 19 nt, Human
cacaugauuucacaaauau

SEQ ID NO: 2016114 - RNA, 20 nt, Human
cacaugauuucacaaauauu

SEQ ID NO: 2016115 - RNA, 17 nt, Human
cacauguccaagaagcc

SEQ ID NO: 2016116 - RNA, 16 nt, Human
cacauguccaagaagc

SEQ ID NO: 2016117 - RNA, 19 nt, Human
cacaugccaggggccuuug

SEQ ID NO: 2016118 - RNA, 14 nt, Human
cacaugccaggggc

SEQ ID NO: 2016119 - RNA, 20 nt, Human
cacaugccucucucaggcca

SEQ ID NO: 2016120 - RNA, 21 nt, Human
cacaugccucucucaggccaa

SEQ ID NO: 2016121 - RNA, 21 nt, Human
cacaugagcaucaggccaggc

SEQ ID NO: 2016122 - RNA, 20 nt, Human
cacaugagcaucaggccagg

SEQ ID NO: 2016123 - RNA, 19 nt, Human
cacaugagcaucaggccag

SEQ ID NO: 2016124 - RNA, 18 nt, Human
cacaugagcaucaggcca

SEQ ID NO: 2016125 - RNA, 17 nt, Human
cacaugagcaucaggcc

SEQ ID NO: 2016126 - RNA, 13 nt, Human
cacaugagcauca

SEQ ID NO: 2016127 - RNA, 15 nt, Human
cacaugagauaauau

SEQ ID NO: 2016128 - RNA, 19 nt, Human
cacaggcagguccaggguu

SEQ ID NO: 2016129 - RNA, 15 nt, Human
cacaggccacccugu

SEQ ID NO: 2016130 - RNA, 16 nt, Human
cacaggccacccugug

SEQ ID NO: 2016131 - RNA, 18 nt, Human
cacaggccacccugugca

SEQ ID NO: 2016132 - RNA, 23 nt, Human
cacaguccuuaccagcagagcac

SEQ ID NO: 2016133 - RNA, 23 nt, Human
cacaggccacccugugcagaagg

SEQ ID NO: 2016134 - RNA, 14 nt, Human
cacagucuccccca

SEQ ID NO: 2016135 - RNA, 14 nt, Human
cacaggcccggcuc

SEQ ID NO: 2016136 - RNA, 17 nt, Human
cacaggaucagucugau

SEQ ID NO: 2016137 - RNA, 15 nt, Human
cacaggacucugccu

SEQ ID NO: 2016138 - RNA, 16 nt, Human
cacaggacucugccuc

SEQ ID NO: 2016139 - RNA, 19 nt, Human
cacaggacagggguuccuu

SEQ ID NO: 2016140 - RNA, 23 nt, Human
cacaggacaggaaaguggcaccu

SEQ ID NO: 2016141 - RNA, 18 nt, Human
cacaggacagggguuccu

SEQ ID NO: 2016142 - RNA, 15 nt, Human
cacagcccagcuugg

SEQ ID NO: 2016143 - RNA, 21 nt, Human
cacagcucuucuccaggcugu

SEQ ID NO: 2016144 - RNA, 19 nt, Human
cacagcucuucuccaggcu

SEQ ID NO: 2016145 - RNA, 20 nt, Human
cacagcucuucuccaggcug

SEQ ID NO: 2016146 - RNA, 19 nt, Human
cacacguaaugaaacuugg

SEQ ID NO: 2016147 - RNA, 19 nt, Human
cacacgcugcucugcccca

SEQ ID NO: 2016148 - RNA, 20 nt, Human
cacacguaaugaaacuugga

SEQ ID NO: 2016149 - RNA, 20 nt, Human
cacagcaacgaucacaaaug

SEQ ID NO: 2016150 - RNA, 22 nt, Human
cacacggacacucaaaagcugg

SEQ ID NO: 2016151 - RNA, 12 nt, Human
cacacgcugccu

SEQ ID NO: 2016152 - RNA, 13 nt, Human
cacacgcugccuu

SEQ ID NO: 2016153 - RNA, 14 nt, Human
cacacgcugccuuc

SEQ ID NO: 2016154 - RNA, 13 nt, Human
cacacgcugcucu

SEQ ID NO: 2016155 - RNA, 16 nt, Human
cacacgcugcucugcc

SEQ ID NO: 2016156 - RNA, 17 nt, Human
cacacgcugcucugccc

SEQ ID NO: 2016157 - RNA, 21 nt, Human
cacagcaacgaucacaaauga

SEQ ID NO: 2016158 - RNA, 22 nt, Human
cacagcaacgaucacaaaugac

SEQ ID NO: 2016159 - RNA, 18 nt, Human
cacagcucuucuccaggc

SEQ ID NO: 2016160 - RNA, 22 nt, Human
caccauucguacauaauacuga

SEQ ID NO: 2016161 - RNA, 23 nt, Human
caccauucguacauaauacugaa

SEQ ID NO: 2016162 - RNA, 20 nt, Human
caccauucguacauaauacu

SEQ ID NO: 2016163 - RNA, 18 nt, Human
caccauguuggccaggcu

SEQ ID NO: 2016164 - RNA, 19 nt, Human
caccauugcaacaaaauac

SEQ ID NO: 2016165 - RNA, 15 nt, Human
caccauuuccccagg

SEQ ID NO: 2016166 - RNA, 17 nt, Human
caccauuuccccagggc

SEQ ID NO: 2016167 - RNA, 20 nt, Human
caccauuuccccagggcacg

SEQ ID NO: 2016168 - RNA, 18 nt, Human
caccauuuccccagggca

SEQ ID NO: 2016169 - RNA, 19 nt, Human
caccauuuccccagggcac

SEQ ID NO: 2016170 - RNA, 13 nt, Human
cacccaagggccu

SEQ ID NO: 2016171 - RNA, 16 nt, Human
cacccaagcaggaggc

SEQ ID NO: 2016172 - RNA, 13 nt, Human
uuuuuucuuacug

SEQ ID NO: 2016173 - RNA, 13 nt, Human
uuuuuugaagugu

SEQ ID NO: 2016174 - RNA, 12 nt, Human
uuuuuucuuuca

SEQ ID NO: 2016175 - RNA, 13 nt, Human
uuuuuugaaauca

SEQ ID NO: 2016176 - RNA, 12 nt, Human
uuuuuugaaaug

SEQ ID NO: 2016177 - RNA, 19 nt, Human
uuuuuugaacucuucucau

SEQ ID NO: 2016178 - RNA, 13 nt, Human
uuuugaaaaacug

SEQ ID NO: 2016179 - RNA, 22 nt, Human
uuuugaaaaaugcacugggaaa

SEQ ID NO: 2016180 - RNA, 11 nt, Human
uuuugaaaagu

SEQ ID NO: 2016181 - RNA, 20 nt, Human
uuuugaaaaguaauauuuau

SEQ ID NO: 2016182 - RNA, 22 nt, Human
uuuugaaaucaguaaacacugu

SEQ ID NO: 2016183 - RNA, 13 nt, Human
uuuuucugcuuua

SEQ ID NO: 2016184 - RNA, 20 nt, Human
uuuuucugcuuuagacuuga

SEQ ID NO: 2016185 - RNA, 11 nt, Human
uuuuucuggac

SEQ ID NO: 2016186 - RNA, 11 nt, Human
uuuuucugugg

SEQ ID NO: 2016187 - RNA, 11 nt, Human
uuuuucuguau

SEQ ID NO: 2016188 - RNA, 13 nt, Human
uuuugaaauguca

SEQ ID NO: 2016189 - RNA, 13 nt, Human
uuuugaaaugcug

SEQ ID NO: 2016190 - RNA, 16 nt, Human
uuuugaaaugcugaaa

SEQ ID NO: 2016191 - RNA, 18 nt, Human
uuuugaaaugcugaaaau

SEQ ID NO: 2016192 - RNA, 20 nt, Human
uuuugaaaugcugaaaauug

SEQ ID NO: 2016193 - RNA, 12 nt, Human
uuuuuuacuaau

SEQ ID NO: 2016194 - RNA, 15 nt, Human
uuuuucuuaaaaagu

SEQ ID NO: 2016195 - RNA, 21 nt, Human
uuuuucuuaauauauagcauu

SEQ ID NO: 2016196 - RNA, 20 nt, Human
uuuuuuauacaggaugauga

SEQ ID NO: 2016197 - RNA, 13 nt, Human
uuuuucuuaauca

SEQ ID NO: 2016198 - RNA, 17 nt, Human
uuuuuuccuucagugcc

SEQ ID NO: 2016199 - RNA, 12 nt, Human
uuuuuucugaaa

SEQ ID NO: 2016200 - RNA, 15 nt, Human
uuuguaaauuaacuu

SEQ ID NO: 2016201 - RNA, 20 nt, Human
uuugguuaugaauacuuugc

SEQ ID NO: 2016202 - RNA, 16 nt, Human
uuugguuauagugcaa

SEQ ID NO: 2016203 - RNA, 18 nt, Human
uuugguuauagugcaaua

SEQ ID NO: 2016204 - RNA, 13 nt, Human
uuugguuauagug

SEQ ID NO: 2016205 - RNA, 16 nt, Human
uuuguaaauuaacuuu

SEQ ID NO: 2016206 - RNA, 17 nt, Human
uuuguaaauuaacuuuu

SEQ ID NO: 2016207 - RNA, 16 nt, Human
uuuggugucuuucucu

SEQ ID NO: 2016208 - RNA, 19 nt, Human
uuuggugguuucagaaaug

SEQ ID NO: 2016209 - RNA, 22 nt, Human
uuuguaaauuaacuuuuauaaa

SEQ ID NO: 2016210 - RNA, 21 nt, Human
uuugguuauagugcaauauau

SEQ ID NO: 2016211 - RNA, 23 nt, Human
uuugucaguguagaucaacucau

SEQ ID NO: 2016212 - RNA, 15 nt, Human
uuugucacugcuuca

SEQ ID NO: 2016213 - RNA, 21 nt, Human
uuugucauuuucauuagcaaa

SEQ ID NO: 2016214 - RNA, 18 nt, Human
uuuguccuccugcugcca

SEQ ID NO: 2016215 - RNA, 13 nt, Human
uuuguguuccaaa

SEQ ID NO: 2016216 - RNA, 12 nt, Human
uuuguguuuauu

SEQ ID NO: 2016217 - RNA, 15 nt, Human
uuuguguuuauucuu

SEQ ID NO: 2016218 - RNA, 16 nt, Human
uuuguguuuauucuug

SEQ ID NO: 2016219 - RNA, 22 nt, Human
uuuguguuuauucuugaugaaa

SEQ ID NO: 2016220 - RNA, 21 nt, Human
uuuguccccaccgcagacagg

SEQ ID NO: 2016221 - RNA, 13 nt, Human
uuuguccccaccg

SEQ ID NO: 2016222 - RNA, 14 nt, Human
uuugucauuuucau

SEQ ID NO: 2016223 - RNA, 15 nt, Human
uuugucauuuucauu

SEQ ID NO: 2016224 - RNA, 16 nt, Human
uuugucauuuucauua

SEQ ID NO: 2016225 - RNA, 18 nt, Human
uuugucauuuucauuagc

SEQ ID NO: 2016226 - RNA, 23 nt, Human
uuuguucauuucauccuuucacu

SEQ ID NO: 2016227 - RNA, 17 nt, Human
uuuguuaauaaagugca

SEQ ID NO: 2016228 - RNA, 13 nt, Human
uuuguugugugcc

SEQ ID NO: 2016229 - RNA, 21 nt, Human
uuuguugugugccucuagcug

SEQ ID NO: 2016230 - RNA, 23 nt, Human
uuuguugugugccucuagcugaa

SEQ ID NO: 2016231 - RNA, 18 nt, Human
uuuguuccagaaucugua

SEQ ID NO: 2016232 - RNA, 16 nt, Human
uuuguugucagcugaa

SEQ ID NO: 2016233 - RNA, 16 nt, Human
uuugagguggaagagg

SEQ ID NO: 2016234 - RNA, 18 nt, Human
uuugaggaaauuugcagc

SEQ ID NO: 2016235 - RNA, 23 nt, Human
uuugagguuggaaaauaucuuug

SEQ ID NO: 2016236 - RNA, 12 nt, Human
uuugagucuuuu

SEQ ID NO: 2016237 - RNA, 22 nt, Human
uuugagucuuuuuuuuuuaagu

SEQ ID NO: 2016238 - RNA, 17 nt, Human
uuugaggucuguucuuu

SEQ ID NO: 2016239 - RNA, 22 nt, Human
uuugaggucuguucuuuccaaa

SEQ ID NO: 2016240 - RNA, 14 nt, Human
uuugagcucagccc

SEQ ID NO: 2016241 - RNA, 10 nt, Human
uuugagcucc

SEQ ID NO: 2016242 - RNA, 19 nt, Human
uuugagcucccacuucugc

SEQ ID NO: 2016243 - RNA, 17 nt, Human
uuugaggaaauuugcag

SEQ ID NO: 2016244 - RNA, 22 nt, Human
uuucuuacugucuuuuuucuaa

SEQ ID NO: 2016245 - RNA, 13 nt, Human
uuucuuagacuuu

SEQ ID NO: 2016246 - RNA, 15 nt, Human
uuugagcccuuguuu

SEQ ID NO: 2016247 - RNA, 15 nt, Human
uuugagcagggcuca

SEQ ID NO: 2016248 - RNA, 13 nt, Human
uuucuuaauauau

SEQ ID NO: 2016249 - RNA, 16 nt, Human
uuucuuaauauauagc

SEQ ID NO: 2016250 - RNA, 20 nt, Human
uuucuuaauauauagcauuu

SEQ ID NO: 2016251 - RNA, 21 nt, Human
uuucuuaaucauuuuuuauau

SEQ ID NO: 2016252 - RNA, 22 nt, Human
uuucuuaauauauagcauuuau

SEQ ID NO: 2016253 - RNA, 15 nt, Human
uuucuuaaucauuuu

SEQ ID NO: 2016254 - RNA, 23 nt, Human
uuugcauaacguauaaaagccug

SEQ ID NO: 2016255 - RNA, 19 nt, Human
uuugcauaacguauaaaag

SEQ ID NO: 2016256 - RNA, 14 nt, Human
uuugcagcucagaa

SEQ ID NO: 2016257 - RNA, 21 nt, Human
uuugcagaggcuaugggaaga

SEQ ID NO: 2016258 - RNA, 13 nt, Human
uuugcacuuuucu

SEQ ID NO: 2016259 - RNA, 22 nt, Human
uuugcacuuuuucuuaaucauu

SEQ ID NO: 2016260 - RNA, 14 nt, Human
uuugcagacaggca

SEQ ID NO: 2016261 - RNA, 18 nt, Human
uuugccauguuggccagg

SEQ ID NO: 2016262 - RNA, 21 nt, Human
uuuggaacagugcuacugaaa

SEQ ID NO: 2016263 - RNA, 20 nt, Human
uuugccaugugcuucugcca

SEQ ID NO: 2016264 - RNA, 15 nt, Human
uuugcagcuuccaau

SEQ ID NO: 2016265 - RNA, 15 nt, Human
uuugccagugggaac

SEQ ID NO: 2016266 - RNA, 16 nt, Human
uuugccagugggaacu

SEQ ID NO: 2016267 - RNA, 22 nt, Human
uuugccauagaguacacugccu

SEQ ID NO: 2016268 - RNA, 15 nt, Human
uuugccaucucugcu

SEQ ID NO: 2016269 - RNA, 18 nt, Human
uuugccaucucugcucca

SEQ ID NO: 2016270 - RNA, 14 nt, Human
uuugccaugugcuu

SEQ ID NO: 2016271 - RNA, 19 nt, Human
uuuuaauuucaagcuuauu

SEQ ID NO: 2016272 - RNA, 17 nt, Human
uuuuaauuugguuuuca

SEQ ID NO: 2016273 - RNA, 21 nt, Human
uuuuaauuugguuuucacauu

SEQ ID NO: 2016274 - RNA, 22 nt, Human
uuuuacauaaauuuaguauuuu

SEQ ID NO: 2016275 - RNA, 13 nt, Human
uuuuaauuuuguc

SEQ ID NO: 2016276 - RNA, 16 nt, Human
uuuuaauuuugucugc

SEQ ID NO: 2016277 - RNA, 16 nt, Human
uuuuacagcugccugc

SEQ ID NO: 2016278 - RNA, 22 nt, Human
uuuuaaaaugagaaaucuaaaa

SEQ ID NO: 2016279 - RNA, 14 nt, Human
uuuuaaaauguaca

SEQ ID NO: 2016280 - RNA, 15 nt, Human
uuuuaaaauguacau

SEQ ID NO: 2016281 - RNA, 12 nt, Human
uuuuaaaaugua

SEQ ID NO: 2016282 - RNA, 21 nt, Human
uuuuaaaauguacauguauua

SEQ ID NO: 2016283 - RNA, 23 nt, Human
uuuuaaaauuguacaugaacaug

SEQ ID NO: 2016284 - RNA, 13 nt, Human
uuuuaaaauuuua

SEQ ID NO: 2016285 - RNA, 15 nt, Human
uuuuaaaaugagaaa

SEQ ID NO: 2016286 - RNA, 14 nt, Human
uuuuaaaaucuuau

SEQ ID NO: 2016287 - RNA, 15 nt, Human
uuuuaaaaucuuauu

SEQ ID NO: 2016288 - RNA, 22 nt, Human
uuuuaaaaucuuauuaaaguuu

SEQ ID NO: 2016289 - RNA, 16 nt, Human
uuuuauauauaugcau

SEQ ID NO: 2016290 - RNA, 20 nt, Human
uuuuauaucaauuuaaaaaa

SEQ ID NO: 2016291 - RNA, 14 nt, Human
uuuuacuguacaga

SEQ ID NO: 2016292 - RNA, 20 nt, Human
uuuuaugauacuugaaaauu

SEQ ID NO: 2016293 - RNA, 16 nt, Human
uuuuaugauacuugaa

SEQ ID NO: 2016294 - RNA, 18 nt, Human
uuuuaucgucacugcuua

SEQ ID NO: 2016295 - RNA, 16 nt, Human
uuuuauauguugcuau

SEQ ID NO: 2016296 - RNA, 14 nt, Human
uuuuaucaggauuu

SEQ ID NO: 2016297 - RNA, 17 nt, Human
uuuuccucgcuucuuuc

SEQ ID NO: 2016298 - RNA, 18 nt, Human
uuuuccucgcuucuuuca

SEQ ID NO: 2016299 - RNA, 15 nt, Human
uuuuccauuuuauaa

SEQ ID NO: 2016300 - RNA, 19 nt, Human
uuuuccaugaguccccugu

SEQ ID NO: 2016301 - RNA, 18 nt, Human
uuuuccaugaguccccug

SEQ ID NO: 2016302 - RNA, 13 nt, Human
uuuuccauuuuau

SEQ ID NO: 2016303 - RNA, 14 nt, Human
uuuuccauuuuaua

SEQ ID NO: 2016304 - RNA, 15 nt, Human
uuuuccuucagugcc

SEQ ID NO: 2016305 - RNA, 21 nt, Human
uuuuccucgcuucuuucaagg

SEQ ID NO: 2016306 - RNA, 13 nt, Human
uuuuccuugcaua

SEQ ID NO: 2016307 - RNA, 14 nt, Human
uuuuccuugcauac

SEQ ID NO: 2016308 - RNA, 17 nt, Human
uuuucuugcaugaggcu

SEQ ID NO: 2016309 - RNA, 12 nt, Human
uuuucuugauaa

SEQ ID NO: 2016310 - RNA, 16 nt, Human
uuuucuugauaauuuu

SEQ ID NO: 2016311 - RNA, 19 nt, Human
uuuucuugauaauuuuccu

SEQ ID NO: 2016312 - RNA, 14 nt, Human
uuuucuucucccuc

SEQ ID NO: 2016313 - RNA, 16 nt, Human
uuuucaagaaguucuu

SEQ ID NO: 2016314 - RNA, 12 nt, Human
uuuucaaguauu

SEQ ID NO: 2016315 - RNA, 20 nt, Human
uuuucaaguauuuaagccua

SEQ ID NO: 2016316 - RNA, 16 nt, Human
uuuucaaguauuuaag

SEQ ID NO: 2016317 - RNA, 17 nt, Human
uuuucaaguauuuaagc

SEQ ID NO: 2016318 - RNA, 19 nt, Human
uuuucaaccucuagaauuu

SEQ ID NO: 2016319 - RNA, 17 nt, Human
uuuucaacgcagcccug

SEQ ID NO: 2016320 - RNA, 21 nt, Human
uuuucaacgcagcccugcuuu

SEQ ID NO: 2016321 - RNA, 22 nt, Human
uuuucaacgcagcccugcuuug

SEQ ID NO: 2016322 - RNA, 13 nt, Human
uuuuaugaugacg

SEQ ID NO: 2016323 - RNA, 20 nt, Human
uuuuaugaugacguacaagu

SEQ ID NO: 2016324 - RNA, 24 nt, Human
uuuucaaucucguauagaagucuu

SEQ ID NO: 2016325 - RNA, 16 nt, Human
uuuucaauauauuugu

SEQ ID NO: 2016326 - RNA, 20 nt, Human
uuuucaaucucguauagaag

SEQ ID NO: 2016327 - RNA, 13 nt, Human
uuuucaaugugau

SEQ ID NO: 2016328 - RNA, 15 nt, Human
uuuucacaguucucu

SEQ ID NO: 2016329 - RNA, 19 nt, Human
uuuucacugcuggcugccu

SEQ ID NO: 2016330 - RNA, 20 nt, Human
uuuucacugcuggcugccuu

SEQ ID NO: 2016331 - RNA, 12 nt, Human
uuucucuuugaa

SEQ ID NO: 2016332 - RNA, 13 nt, Human
uuucucuuugaaa

SEQ ID NO: 2016333 - RNA, 14 nt, Human
uuucucuuugaaac

SEQ ID NO: 2016334 - RNA, 12 nt, Human
uuucucuuagaa

SEQ ID NO: 2016335 - RNA, 13 nt, Human
uuucucuuagaaa

SEQ ID NO: 2016336 - RNA, 12 nt, Human
uuucucuucaua

SEQ ID NO: 2016337 - RNA, 13 nt, Human
uuucucuucuccc

SEQ ID NO: 2016338 - RNA, 16 nt, Human
uuucucuucuccccuu

SEQ ID NO: 2016339 - RNA, 19 nt, Human
uuucucuucuccccuucca

SEQ ID NO: 2016340 - RNA, 20 nt, Human
uuucucuucuccccuuccau

SEQ ID NO: 2016341 - RNA, 16 nt, Human
uuucuaggacugaauu

SEQ ID NO: 2016342 - RNA, 17 nt, Human
uuucuccguaugcacau

SEQ ID NO: 2016343 - RNA, 19 nt, Human
uuucuagcauauauguguc

SEQ ID NO: 2016344 - RNA, 15 nt, Human
uuucuagccagagga

SEQ ID NO: 2016345 - RNA, 15 nt, Human
uuucuaaugugugaa

SEQ ID NO: 2016346 - RNA, 20 nt, Human
uuucuaagguaacaagauga

SEQ ID NO: 2016347 - RNA, 14 nt, Human
uuuccuauaccauu

SEQ ID NO: 2016348 - RNA, 16 nt, Human
uuuccuauaccauuuc

SEQ ID NO: 2016349 - RNA, 16 nt, Human
uuuccuauaugaugau

SEQ ID NO: 2016350 - RNA, 18 nt, Human
uuuccaggaaaaagaacu

SEQ ID NO: 2016351 - RNA, 19 nt, Human
uuuccaggaaaaagaacuu

SEQ ID NO: 2016352 - RNA, 21 nt, Human
uuuccuacuugcacucuucua

SEQ ID NO: 2016353 - RNA, 21 nt, Human
uuuccucuuuggucuacacug

SEQ ID NO: 2016354 - RNA, 12 nt, Human
uuuccucuugaa

SEQ ID NO: 2016355 - RNA, 23 nt, Human
uuuccugacagaaggacucaggu

SEQ ID NO: 2016356 - RNA, 22 nt, Human
uuuccucaaaacuucagacaua

SEQ ID NO: 2016357 - RNA, 18 nt, Human
uuucuaaaggcuaccuuu

SEQ ID NO: 2016358 - RNA, 17 nt, Human
uuucuaaagcugccagc

SEQ ID NO: 2016359 - RNA, 14 nt, Human
uuucuaaagcugcc

SEQ ID NO: 2016360 - RNA, 14 nt, Human
uuucuaaaggcuac

SEQ ID NO: 2016361 - RNA, 22 nt, Human
uuucauugcugggcuugucugu

SEQ ID NO: 2016362 - RNA, 22 nt, Human
uuucagguagaggugcaugccu

SEQ ID NO: 2016363 - RNA, 16 nt, Human
uuucagccaagaauuc

SEQ ID NO: 2016364 - RNA, 15 nt, Human
uuucagccaagaauu

SEQ ID NO: 2016365 - RNA, 12 nt, Human
uuuccagagcau

SEQ ID NO: 2016366 - RNA, 13 nt, Human
uuuccagagcauu

SEQ ID NO: 2016367 - RNA, 17 nt, Human
uuuccagagcauuccag

SEQ ID NO: 2016368 - RNA, 13 nt, Human
uuuccaggaaggc

SEQ ID NO: 2016369 - RNA, 19 nt, Human
uuuccagagcauuccaguc

SEQ ID NO: 2016370 - RNA, 15 nt, Human
uuucauugcugugac

SEQ ID NO: 2016371 - RNA, 18 nt, Human
uuucauugcugugacagu

SEQ ID NO: 2016372 - RNA, 12 nt, Human
uuuccaaaguac

SEQ ID NO: 2016373 - RNA, 15 nt, Human
uuuccaaaguacacu

SEQ ID NO: 2016374 - RNA, 16 nt, Human
uuuauuuauuuauuca

SEQ ID NO: 2016375 - RNA, 16 nt, Human
uuuauuucagcaaacu

SEQ ID NO: 2016376 - RNA, 19 nt, Human
uuuauuucagcaaacuugu

SEQ ID NO: 2016377 - RNA, 16 nt, Human
uuuauuucuccuuuug

SEQ ID NO: 2016378 - RNA, 17 nt, Human
uuuauuucuccuuuugu

SEQ ID NO: 2016379 - RNA, 13 nt, Human
uuuauuucuccuu

SEQ ID NO: 2016380 - RNA, 15 nt, Human
uuuauuucuccuuuu

SEQ ID NO: 2016381 - RNA, 13 nt, Human
uuuauuuccagug

SEQ ID NO: 2016382 - RNA, 21 nt, Human
uuuauuucuccuuuuguguuc

SEQ ID NO: 2016383 - RNA, 22 nt, Human
uuucaauaggaaaaacugauuu

SEQ ID NO: 2016384 - RNA, 20 nt, Human
uuucaauaggaaaaacugau

SEQ ID NO: 2016385 - RNA, 23 nt, Human
uuucaaucucguauagaagucuu

SEQ ID NO: 2016386 - RNA, 13 nt, Human
uuucaaucucgua

SEQ ID NO: 2016387 - RNA, 19 nt, Human
uuucaaucucguauagaag

SEQ ID NO: 2016388 - RNA, 17 nt, Human
uuucaauauuuuccuuc

SEQ ID NO: 2016389 - RNA, 13 nt, Human
uuuauuuuaaaac

SEQ ID NO: 2016390 - RNA, 15 nt, Human
uuucagcagcugcag

SEQ ID NO: 2016391 - RNA, 13 nt, Human
uuucagcaggcag

SEQ ID NO: 2016392 - RNA, 14 nt, Human
uuucagcaggcagc

SEQ ID NO: 2016393 - RNA, 19 nt, Human
uuuagaagaagugugucac

SEQ ID NO: 2016394 - RNA, 14 nt, Human
uuuagaacagguuu

SEQ ID NO: 2016395 - RNA, 15 nt, Human
uuuagaacagguuuu

SEQ ID NO: 2016396 - RNA, 17 nt, Human
uuuagaagaaguguguc

SEQ ID NO: 2016397 - RNA, 13 nt, Human
uuuagacuugaaa

SEQ ID NO: 2016398 - RNA, 14 nt, Human
uuuagacuugaaaa

SEQ ID NO: 2016399 - RNA, 15 nt, Human
uuuagacuugaaaag

SEQ ID NO: 2016400 - RNA, 19 nt, Human
uuuagacuugaaaagagac

SEQ ID NO: 2016401 - RNA, 20 nt, Human
uuuagacuugaaaagagaca

SEQ ID NO: 2016402 - RNA, 21 nt, Human
uuuagacuugaaaagagacag

SEQ ID NO: 2016403 - RNA, 22 nt, Human
uuuagacuugaaaagagacagg

SEQ ID NO: 2016404 - RNA, 23 nt, Human
uuuagacuugaaaagagacaggc

SEQ ID NO: 2016405 - RNA, 12 nt, Human
uuuagacuugaa

SEQ ID NO: 2016406 - RNA, 22 nt, Human
uuuacauggcuggagcuagaau

SEQ ID NO: 2016407 - RNA, 15 nt, Human
uuuacuuuguguuca

SEQ ID NO: 2016408 - RNA, 22 nt, Human
uuuacuuuuuuuuuauuuuauu

SEQ ID NO: 2016409 - RNA, 21 nt, Human
uuuacuuuuuuuuuauuuuau

SEQ ID NO: 2016410 - RNA, 17 nt, Human
uuuacauggcuggagcu

SEQ ID NO: 2016411 - RNA, 16 nt, Human
uuuaaucuacugcauu

SEQ ID NO: 2016412 - RNA, 17 nt, Human
uuuaaucuacugcauuu

SEQ ID NO: 2016413 - RNA, 13 nt, Human
uuuaaucuacugc

SEQ ID NO: 2016414 - RNA, 18 nt, Human
uuuaaucuacugcauuua

SEQ ID NO: 2016415 - RNA, 20 nt, Human
uuuacaagacaacauuguaa

SEQ ID NO: 2016416 - RNA, 16 nt, Human
uuguauuguccuauua

SEQ ID NO: 2016417 - RNA, 21 nt, Human
uuguauucaauuaaagaaaua

SEQ ID NO: 2016418 - RNA, 14 nt, Human
uuguauucugucuu

SEQ ID NO: 2016419 - RNA, 13 nt, Human
uuguauucaauua

SEQ ID NO: 2016420 - RNA, 18 nt, Human
uuguauucaauuaaagaa

SEQ ID NO: 2016421 - RNA, 20 nt, Human
uuguauuuuacuaauaaaau

SEQ ID NO: 2016422 - RNA, 15 nt, Human
uuguauuuauuuagu

SEQ ID NO: 2016423 - RNA, 14 nt, Human
uuguauuuauucuu

SEQ ID NO: 2016424 - RNA, 9 nt, Human
uuguauuuu

SEQ ID NO: 2016425 - RNA, 16 nt, Human
uuuauugucaaagugg

SEQ ID NO: 2016426 - RNA, 14 nt, Human
uuuauugucaaagu

SEQ ID NO: 2016427 - RNA, 15 nt, Human
uuuauuuauauguau

SEQ ID NO: 2016428 - RNA, 15 nt, Human
uuuauuuauauuuau

SEQ ID NO: 2016429 - RNA, 17 nt, Human
uuuauuuauauuuauug

SEQ ID NO: 2016430 - RNA, 18 nt, Human
uuuaugcaaggucuugca

SEQ ID NO: 2016431 - RNA, 23 nt, Human
uuuauuauuuauuuuuuuuaauu

SEQ ID NO: 2016432 - RNA, 14 nt, Human
uuuauucaaacuga

SEQ ID NO: 2016433 - RNA, 14 nt, Human
uuuaugcauauuau

SEQ ID NO: 2016434 - RNA, 13 nt, Human
uuuauuccagagc

SEQ ID NO: 2016435 - RNA, 23 nt, Human
uuuauugcaucuggguagcugua

SEQ ID NO: 2016436 - RNA, 22 nt, Human
uuuauugccaaaacccagcugc

SEQ ID NO: 2016437 - RNA, 24 nt, Human
uuuauugcaucuggguagcuguaa

SEQ ID NO: 2016438 - RNA, 16 nt, Human
uuuaucuuugauaaca

SEQ ID NO: 2016439 - RNA, 12 nt, Human
uuuaucuuugau

SEQ ID NO: 2016440 - RNA, 15 nt, Human
uuuaucuagauguaa

SEQ ID NO: 2016441 - RNA, 16 nt, Human
uuuaucuagauguaaa

SEQ ID NO: 2016442 - RNA, 17 nt, Human
uuuaucuagauguaaau

SEQ ID NO: 2016443 - RNA, 20 nt, Human
uuuaucuagauguaaauuuu

SEQ ID NO: 2016444 - RNA, 15 nt, Human
uuuaugaagaaaaua

SEQ ID NO: 2016445 - RNA, 16 nt, Human
uuuaugaagaaaauac

SEQ ID NO: 2016446 - RNA, 18 nt, Human
uuuaugaagaaaauacuu

SEQ ID NO: 2016447 - RNA, 12 nt, Human
uuuaugaagaaa

SEQ ID NO: 2016448 - RNA, 13 nt, Human
uuuaugaagaaaa

SEQ ID NO: 2016449 - RNA, 14 nt, Human
uuuauaaacuuuac

SEQ ID NO: 2016450 - RNA, 16 nt, Human
uuuaucgucacugcuu

SEQ ID NO: 2016451 - RNA, 16 nt, Human
uuuauaaacuuuaccu

SEQ ID NO: 2016452 - RNA, 21 nt, Human
uuuaucgucacugcuuaacuu

SEQ ID NO: 2016453 - RNA, 21 nt, Human
uuuaucuaccaacuuucaaga

SEQ ID NO: 2016454 - RNA, 19 nt, Human
uucaggaagcucagggccu

SEQ ID NO: 2016455 - RNA, 17 nt, Human
uucaggaagcucagggc

SEQ ID NO: 2016456 - RNA, 15 nt, Human
uucaggaagcucagg

SEQ ID NO: 2016457 - RNA, 20 nt, Human
uucaggaagcucagggccug

SEQ ID NO: 2016458 - RNA, 15 nt, Human
uucaggcucuucucc

SEQ ID NO: 2016459 - RNA, 17 nt, Human
uucaggcauuuuccccc

SEQ ID NO: 2016460 - RNA, 17 nt, Human
uucagcugacuuuucug

SEQ ID NO: 2016461 - RNA, 18 nt, Human
uucagcugcauacaguuu

SEQ ID NO: 2016462 - RNA, 16 nt, Human
uucaggaagcucaggg

SEQ ID NO: 2016463 - RNA, 21 nt, Human
uucagcugguugagguuucaa

SEQ ID NO: 2016464 - RNA, 24 nt, Human
uucagcucugcaagaauugaagca

SEQ ID NO: 2016465 - RNA, 17 nt, Human
uucagcucugcaagaau

SEQ ID NO: 2016466 - RNA, 23 nt, Human
uucagcuccagcucaccagcccc

SEQ ID NO: 2016467 - RNA, 17 nt, Human
uucaccccaaucccagc

SEQ ID NO: 2016468 - RNA, 18 nt, Human
uucacucuuggagccugc

SEQ ID NO: 2016469 - RNA, 19 nt, Human
uucacucuuggagccugca

SEQ ID NO: 2016470 - RNA, 14 nt, Human
uucacucuuggagc

SEQ ID NO: 2016471 - RNA, 14 nt, Human
uucacucuccuugg

SEQ ID NO: 2016472 - RNA, 15 nt, Human
uucagagacuccugc

SEQ ID NO: 2016473 - RNA, 13 nt, Human
uucagacucucuc

SEQ ID NO: 2016474 - RNA, 13 nt, Human
uucagaggcucag

SEQ ID NO: 2016475 - RNA, 22 nt, Human
uucagaggcucagauuguaaua

SEQ ID NO: 2016476 - RNA, 12 nt, Human
uucagaggcuca

SEQ ID NO: 2016477 - RNA, 14 nt, Human
uuacgugaguccug

SEQ ID NO: 2016478 - RNA, 13 nt, Human
uuacgugaguccu

SEQ ID NO: 2016479 - RNA, 12 nt, Human
uuauuuucuaaa

SEQ ID NO: 2016480 - RNA, 13 nt, Human
uucaaagauauuu

SEQ ID NO: 2016481 - RNA, 15 nt, Human
uucaaagcaaauguc

SEQ ID NO: 2016482 - RNA, 13 nt, Human
uuauuuugaugua

SEQ ID NO: 2016483 - RNA, 16 nt, Human
uuauuuugauguaaag

SEQ ID NO: 2016484 - RNA, 14 nt, Human
uuauuuucuaaagu

SEQ ID NO: 2016485 - RNA, 23 nt, Human
uucaaauuguaagcaugcacaaa

SEQ ID NO: 2016486 - RNA, 19 nt, Human
uucaaagcaccaaaauaag

SEQ ID NO: 2016487 - RNA, 21 nt, Human
uucaaagcaccaaaauaagaa

SEQ ID NO: 2016488 - RNA, 23 nt, Human
uucaaagcaccaaaauaagaaaa

SEQ ID NO: 2016489 - RNA, 19 nt, Human
uucaacagcaagugugaau

SEQ ID NO: 2016490 - RNA, 20 nt, Human
uucaacagcaagugugaaua

SEQ ID NO: 2016491 - RNA, 20 nt, Human
uucaacaaggcuugcugcag

SEQ ID NO: 2016492 - RNA, 17 nt, Human
uucaaccauuccccaug

SEQ ID NO: 2016493 - RNA, 20 nt, Human
uucaaccauuccccauggga

SEQ ID NO: 2016494 - RNA, 13 nt, Human
uucaacgcagccc

SEQ ID NO: 2016495 - RNA, 20 nt, Human
uucaacccccuuaacuguau

SEQ ID NO: 2016496 - RNA, 14 nt, Human
uucaacgcagcccu

SEQ ID NO: 2016497 - RNA, 15 nt, Human
uucaacgcagcccug

SEQ ID NO: 2016498 - RNA, 16 nt, Human
uucaaucccaggaugu

SEQ ID NO: 2016499 - RNA, 23 nt, Human
uucaaccucuagaauuuuaagcc

SEQ ID NO: 2016500 - RNA, 15 nt, Human
uucaaccucuagaau

SEQ ID NO: 2016501 - RNA, 22 nt, Human
uucaaucucguauagaagucuu

SEQ ID NO: 2016502 - RNA, 23 nt, Human
uucaaucucguauagaagucuuc

SEQ ID NO: 2016503 - RNA, 19 nt, Human
uucaaucuggauucauauu

SEQ ID NO: 2016504 - RNA, 20 nt, Human
uucaaucuggauucauauuu

SEQ ID NO: 2016505 - RNA, 23 nt, Human
uucaaucuggauucauauuuaau

SEQ ID NO: 2016506 - RNA, 22 nt, Human
uucaaugugauauaaacagcuu

SEQ ID NO: 2016507 - RNA, 19 nt, Human
uucaaugccccugaauuua

SEQ ID NO: 2016508 - RNA, 14 nt, Human
uucaauuaaagaaa

SEQ ID NO: 2016509 - RNA, 15 nt, Human
uucaauuaaagaaau

SEQ ID NO: 2016510 - RNA, 16 nt, Human
uucaauuaaagaaaua

SEQ ID NO: 2016511 - RNA, 18 nt, Human
uucaauucucauuuguca

SEQ ID NO: 2016512 - RNA, 14 nt, Human
uuccaucugauucc

SEQ ID NO: 2016513 - RNA, 17 nt, Human
uuccaucugauuccagc

SEQ ID NO: 2016514 - RNA, 13 nt, Human
uuccaugacaaua

SEQ ID NO: 2016515 - RNA, 17 nt, Human
uuccaugaauguuccug

SEQ ID NO: 2016516 - RNA, 12 nt, Human
uuccaugaaugu

SEQ ID NO: 2016517 - RNA, 17 nt, Human
uuccaugaguccccugu

SEQ ID NO: 2016518 - RNA, 17 nt, Human
uuccaugucgccucugc

SEQ ID NO: 2016519 - RNA, 16 nt, Human
uuccaugucgccucug

SEQ ID NO: 2016520 - RNA, 18 nt, Human
uuccaugucgccucugca

SEQ ID NO: 2016521 - RNA, 19 nt, Human
uuccaugucgccucugcau

SEQ ID NO: 2016522 - RNA, 14 nt, Human
uuccccaagacauu

SEQ ID NO: 2016523 - RNA, 20 nt, Human
uuccaugucgccucugcauu

SEQ ID NO: 2016524 - RNA, 21 nt, Human
uuccaugucgccucugcauuc

SEQ ID NO: 2016525 - RNA, 17 nt, Human
uuccauuuacugcauuc

SEQ ID NO: 2016526 - RNA, 23 nt, Human
uuccagcaggagggacagucuca

SEQ ID NO: 2016527 - RNA, 12 nt, Human
uuccagcaggag

SEQ ID NO: 2016528 - RNA, 13 nt, Human
uuccagcaggagg

SEQ ID NO: 2016529 - RNA, 20 nt, Human
uuccagcacaaccuucaagc

SEQ ID NO: 2016530 - RNA, 12 nt, Human
uuccagccugcc

SEQ ID NO: 2016531 - RNA, 14 nt, Human
uuccagccugccac

SEQ ID NO: 2016532 - RNA, 16 nt, Human
uuccagccugccacuc

SEQ ID NO: 2016533 - RNA, 17 nt, Human
uuccaucuaaaaauaua

SEQ ID NO: 2016534 - RNA, 19 nt, Human
uucauuuuacaguuacuuu

SEQ ID NO: 2016535 - RNA, 13 nt, Human
uucauuuugcuuu

SEQ ID NO: 2016536 - RNA, 14 nt, Human
uucauuuugcuuua

SEQ ID NO: 2016537 - RNA, 13 nt, Human
uuccacugagacc

SEQ ID NO: 2016538 - RNA, 15 nt, Human
uucauuuugcuuuaa

SEQ ID NO: 2016539 - RNA, 17 nt, Human
uucauuuugcuuuaauu

SEQ ID NO: 2016540 - RNA, 19 nt, Human
uuccacuuauaggaauuga

SEQ ID NO: 2016541 - RNA, 21 nt, Human
uuccacuuagaaauugcauuu

SEQ ID NO: 2016542 - RNA, 23 nt, Human
uucauaaugacuuaagcacacuu

SEQ ID NO: 2016543 - RNA, 13 nt, Human
uucauaaugacuu

SEQ ID NO: 2016544 - RNA, 15 nt, Human
uucaucuaggauuuu

SEQ ID NO: 2016545 - RNA, 14 nt, Human
uucauaagauauuu

SEQ ID NO: 2016546 - RNA, 21 nt, Human
uucagugccuuauggaacacu

SEQ ID NO: 2016547 - RNA, 19 nt, Human
uucagugccuuauggaaca

SEQ ID NO: 2016548 - RNA, 16 nt, Human
uucaggcucuucuccu

SEQ ID NO: 2016549 - RNA, 23 nt, Human
uucagggaagauaaguuggaaac

SEQ ID NO: 2016550 - RNA, 20 nt, Human
uucagggaagauaaguugga

SEQ ID NO: 2016551 - RNA, 21 nt, Human
uucagggaagauaaguuggaa

SEQ ID NO: 2016552 - RNA, 22 nt, Human
uucaggcuuuaggcauaugcuu

SEQ ID NO: 2016553 - RNA, 18 nt, Human
uucagggaagauaaguug

SEQ ID NO: 2016554 - RNA, 19 nt, Human
uucagggaagauaaguugg

SEQ ID NO: 2016555 - RNA, 13 nt, Human
uucaguggcagcu

SEQ ID NO: 2016556 - RNA, 23 nt, Human
uucaucucuagggaccagaacca

SEQ ID NO: 2016557 - RNA, 11 nt, Human
uucaucuugaa

SEQ ID NO: 2016558 - RNA, 20 nt, Human
uucaucuuccaacucaaacu

SEQ ID NO: 2016559 - RNA, 18 nt, Human
uucaugaaagauucaaug

SEQ ID NO: 2016560 - RNA, 13 nt, Human
uucaugaaauccu

SEQ ID NO: 2016561 - RNA, 12 nt, Human
uucaugaaaugc

SEQ ID NO: 2016562 - RNA, 13 nt, Human
uucaugaaaugcu

SEQ ID NO: 2016563 - RNA, 23 nt, Human
uucaugaaaugcuaugucauuuc

SEQ ID NO: 2016564 - RNA, 15 nt, Human
uucaugaaaugcuau

SEQ ID NO: 2016565 - RNA, 20 nt, Human
uucaugaaaugcuaugucau

SEQ ID NO: 2016566 - RNA, 21 nt, Human
uucaugaaaugcuaugucauu

SEQ ID NO: 2016567 - RNA, 22 nt, Human
uucaugaaaugcuaugucauuu

SEQ ID NO: 2016568 - RNA, 12 nt, Human
uucaucuugaau

SEQ ID NO: 2016569 - RNA, 17 nt, Human
uucaucuugaauuguaa

SEQ ID NO: 2016570 - RNA, 19 nt, Human
uucauuuaggugaggaagc

SEQ ID NO: 2016571 - RNA, 14 nt, Human
uucauuucauccuu

SEQ ID NO: 2016572 - RNA, 16 nt, Human
uucauuucauccuuuc

SEQ ID NO: 2016573 - RNA, 21 nt, Human
uuccucccucccucuuucccu

SEQ ID NO: 2016574 - RNA, 19 nt, Human
uuccucccucccucuuucc

SEQ ID NO: 2016575 - RNA, 12 nt, Human
uuccucccuccc

SEQ ID NO: 2016576 - RNA, 12 nt, Human
uuccuccugaca

SEQ ID NO: 2016577 - RNA, 19 nt, Human
uuccuccugacaccccacu

SEQ ID NO: 2016578 - RNA, 20 nt, Human
uuccuccugacaccccacuu

SEQ ID NO: 2016579 - RNA, 22 nt, Human
uuccucccucccucuuucccuc

SEQ ID NO: 2016580 - RNA, 22 nt, Human
uuccuagccaccgccuccuaca

SEQ ID NO: 2016581 - RNA, 20 nt, Human
uuccuagguauaauucacau

SEQ ID NO: 2016582 - RNA, 22 nt, Human
uuccuagcuggagaggagcccu

SEQ ID NO: 2016583 - RNA, 18 nt, Human
uuccuaguucaucccuuc

SEQ ID NO: 2016584 - RNA, 23 nt, Human
uuccucauaguaugguggcuggg

SEQ ID NO: 2016585 - RNA, 21 nt, Human
uuccuaguucaucccuucucu

SEQ ID NO: 2016586 - RNA, 22 nt, Human
uuccuaguucaucccuucucuu

SEQ ID NO: 2016587 - RNA, 15 nt, Human
uuccuauaacacugu

SEQ ID NO: 2016588 - RNA, 15 nt, Human
uuccuagccaccgcc

SEQ ID NO: 2016589 - RNA, 21 nt, Human
uuccuagccaccgccuccuac

SEQ ID NO: 2016590 - RNA, 14 nt, Human
uuccuagccaccgc

SEQ ID NO: 2016591 - RNA, 19 nt, Human
uucccuuugacgccauccc

SEQ ID NO: 2016592 - RNA, 14 nt, Human
uuccuagagaacug

SEQ ID NO: 2016593 - RNA, 15 nt, Human
uucccuuuagcugug

SEQ ID NO: 2016594 - RNA, 20 nt, Human
uucccuuccaguuuauucca

SEQ ID NO: 2016595 - RNA, 22 nt, Human
uuccccacuugagaauuacccu

SEQ ID NO: 2016596 - RNA, 21 nt, Human
uuccccacccuccccuuccca

SEQ ID NO: 2016597 - RNA, 22 nt, Human
uuccccacccuccccuucccag

SEQ ID NO: 2016598 - RNA, 17 nt, Human
uucccugguaagaaaaa

SEQ ID NO: 2016599 - RNA, 18 nt, Human
uucccugguaagaaaaag

SEQ ID NO: 2016600 - RNA, 13 nt, Human
uucccuggguuag

SEQ ID NO: 2016601 - RNA, 21 nt, Human
uucccuggguuagacugccag

SEQ ID NO: 2016602 - RNA, 23 nt, Human
uucccuggguuagacugccagcu

SEQ ID NO: 2016603 - RNA, 16 nt, Human
uucccugguaagaaaa

SEQ ID NO: 2016604 - RNA, 22 nt, Human
uucccugguaagaaaaagcaaa

SEQ ID NO: 2016605 - RNA, 12 nt, Human
uuccuuucuuga

SEQ ID NO: 2016606 - RNA, 22 nt, Human
uucggccuccauccugaggcuc

SEQ ID NO: 2016607 - RNA, 18 nt, Human
uucggccuccauccugag

SEQ ID NO: 2016608 - RNA, 19 nt, Human
uucggccuccauccugagg

SEQ ID NO: 2016609 - RNA, 17 nt, Human
uucuaaaggcuaccuuu

SEQ ID NO: 2016610 - RNA, 18 nt, Human
uucuaaaggcuaccuuug

SEQ ID NO: 2016611 - RNA, 17 nt, Human
uucuaauaagcuaguug

SEQ ID NO: 2016612 - RNA, 19 nt, Human
uucuaauaagcuaguugaa

SEQ ID NO: 2016613 - RNA, 20 nt, Human
uucuaauaagcuaguugaau

SEQ ID NO: 2016614 - RNA, 23 nt, Human
uucuaauaagcuaguugaauacu

SEQ ID NO: 2016615 - RNA, 19 nt, Human
uucuaaacuaggcuccuuc

SEQ ID NO: 2016616 - RNA, 20 nt, Human
uucuaaacuaggcuccuuca

SEQ ID NO: 2016617 - RNA, 16 nt, Human
uucuaaaggcuaccuu

SEQ ID NO: 2016618 - RNA, 12 nt, Human
uucuaaagauag

SEQ ID NO: 2016619 - RNA, 19 nt, Human
uuccuucauucaacccacc

SEQ ID NO: 2016620 - RNA, 23 nt, Human
uuccuucagugccuuauggaaca

SEQ ID NO: 2016621 - RNA, 19 nt, Human
uuccuucagugccuuaugg

SEQ ID NO: 2016622 - RNA, 16 nt, Human
uuccuucagugccuua

SEQ ID NO: 2016623 - RNA, 13 nt, Human
uuccugcccuggg

SEQ ID NO: 2016624 - RNA, 16 nt, Human
uuccugcccugggagg

SEQ ID NO: 2016625 - RNA, 22 nt, Human
uuccugcccugggaggcaguga

SEQ ID NO: 2016626 - RNA, 19 nt, Human
uuccugcccugcuguuuau

SEQ ID NO: 2016627 - RNA, 11 nt, Human
uuccugcccug

SEQ ID NO: 2016628 - RNA, 13 nt, Human
uuccuuccucuga

SEQ ID NO: 2016629 - RNA, 17 nt, Human
uuccuuccucugagccu

SEQ ID NO: 2016630 - RNA, 23 nt, Human
uucucaucuugacagagccugcc

SEQ ID NO: 2016631 - RNA, 11 nt, Human
uucucaugccu

SEQ ID NO: 2016632 - RNA, 12 nt, Human
uucucaugccuc

SEQ ID NO: 2016633 - RNA, 14 nt, Human
uucucaugccucag

SEQ ID NO: 2016634 - RNA, 21 nt, Human
uucucaugccucagccuccug

SEQ ID NO: 2016635 - RNA, 21 nt, Human
uucuauuuauuuauuuauuca

SEQ ID NO: 2016636 - RNA, 14 nt, Human
uucuauuguuucuu

SEQ ID NO: 2016637 - RNA, 16 nt, Human
uucuauuuucucugau

SEQ ID NO: 2016638 - RNA, 22 nt, Human
uucuauuuucucugauacuuuu

SEQ ID NO: 2016639 - RNA, 13 nt, Human
uucuauuuuacaa

SEQ ID NO: 2016640 - RNA, 16 nt, Human
uucuaugacacaugca

SEQ ID NO: 2016641 - RNA, 17 nt, Human
uucuaugacacaugcaa

SEQ ID NO: 2016642 - RNA, 14 nt, Human
uucucugauacaga

SEQ ID NO: 2016643 - RNA, 15 nt, Human
uucucugauacagaa

SEQ ID NO: 2016644 - RNA, 16 nt, Human
uucucugauacagaaa

SEQ ID NO: 2016645 - RNA, 12 nt, Human
uucucucugcuc

SEQ ID NO: 2016646 - RNA, 17 nt, Human
uucucugauacagaaaa

SEQ ID NO: 2016647 - RNA, 15 nt, Human
uucucugcccagcuu

SEQ ID NO: 2016648 - RNA, 18 nt, Human
uucucugcccagcuuuuc

SEQ ID NO: 2016649 - RNA, 20 nt, Human
uucucugcccagcuuuucau

SEQ ID NO: 2016650 - RNA, 21 nt, Human
uucugacccaugcugcccugu

SEQ ID NO: 2016651 - RNA, 20 nt, Human
uucugacccaugcugcccug

SEQ ID NO: 2016652 - RNA, 18 nt, Human
uucugacccaugcugccc

SEQ ID NO: 2016653 - RNA, 16 nt, Human
uucugacccaugcugc

SEQ ID NO: 2016654 - RNA, 22 nt, Human
uucucugguacaauuucuuuug

SEQ ID NO: 2016655 - RNA, 11 nt, Human
uucucuguaca

SEQ ID NO: 2016656 - RNA, 12 nt, Human
uucucuguacau

SEQ ID NO: 2016657 - RNA, 18 nt, Human
uucucuguacauauuagc

SEQ ID NO: 2016658 - RNA, 18 nt, Human
uucucuccagccccugga

SEQ ID NO: 2016659 - RNA, 22 nt, Human
uucucuccuguaccucuugagc

SEQ ID NO: 2016660 - RNA, 20 nt, Human
uucucucuacugguccucuu

SEQ ID NO: 2016661 - RNA, 12 nt, Human
uucucuccauuu

SEQ ID NO: 2016662 - RNA, 11 nt, Human
uucuccaggcu

SEQ ID NO: 2016663 - RNA, 16 nt, Human
uucuccaagcaggaca

SEQ ID NO: 2016664 - RNA, 13 nt, Human
uucuccacccugc

SEQ ID NO: 2016665 - RNA, 17 nt, Human
uucuccagucauuaugu

SEQ ID NO: 2016666 - RNA, 19 nt, Human
uucuccagucauuauguua

SEQ ID NO: 2016667 - RNA, 12 nt, Human
uugcuuaaaugu

SEQ ID NO: 2016668 - RNA, 13 nt, Human
uugcuuaaaugug

SEQ ID NO: 2016669 - RNA, 14 nt, Human
uugcuuaaauguga

SEQ ID NO: 2016670 - RNA, 15 nt, Human
uugcuuaaaugugaa

SEQ ID NO: 2016671 - RNA, 16 nt, Human
uugcuuaaaugugaau

SEQ ID NO: 2016672 - RNA, 17 nt, Human
uugcuuaaaugugaauu

SEQ ID NO: 2016673 - RNA, 20 nt, Human
uugcuuaaaugugaauuacu

SEQ ID NO: 2016674 - RNA, 24 nt, Human
uugcuuaaaugugaauuacuaacu

SEQ ID NO: 2016675 - RNA, 21 nt, Human
uugcuuaauuacaauauuucu

SEQ ID NO: 2016676 - RNA, 20 nt, Human
uugcuggggccgaaagaaca

SEQ ID NO: 2016677 - RNA, 22 nt, Human
uugcugccucggauccccuucc

SEQ ID NO: 2016678 - RNA, 23 nt, Human
uugcugccucggauccccuuccu

SEQ ID NO: 2016679 - RNA, 15 nt, Human
uugcugguaaaauga

SEQ ID NO: 2016680 - RNA, 16 nt, Human
uugcugguaaaaugaa

SEQ ID NO: 2016681 - RNA, 23 nt, Human
uugcugguaaaaugaagaauuua

SEQ ID NO: 2016682 - RNA, 14 nt, Human
uugcugguacacac

SEQ ID NO: 2016683 - RNA, 19 nt, Human
uuggaacaguaaucaguuu

SEQ ID NO: 2016684 - RNA, 20 nt, Human
uuggaacaguaaucaguuug

SEQ ID NO: 2016685 - RNA, 13 nt, Human
uuggaaauuucac

SEQ ID NO: 2016686 - RNA, 21 nt, Human
uuggaaaucaaauguaaaguu

SEQ ID NO: 2016687 - RNA, 16 nt, Human
uuggaaaucaaaugua

SEQ ID NO: 2016688 - RNA, 18 nt, Human
uuggaaaucaaauguaaa

SEQ ID NO: 2016689 - RNA, 19 nt, Human
uuggaaaucaaauguaaag

SEQ ID NO: 2016690 - RNA, 15 nt, Human
uuggauucugagagc

SEQ ID NO: 2016691 - RNA, 17 nt, Human
uuggauucugagagcug

SEQ ID NO: 2016692 - RNA, 16 nt, Human
uuggcaaacucuccac

SEQ ID NO: 2016693 - RNA, 20 nt, Human
uuggcaaacucuccaccaca

SEQ ID NO: 2016694 - RNA, 17 nt, Human
uuggcaaaaaggcagga

SEQ ID NO: 2016695 - RNA, 14 nt, Human
uuggauuguccccg

SEQ ID NO: 2016696 - RNA, 19 nt, Human
uuggaaggaacguccccug

SEQ ID NO: 2016697 - RNA, 11 nt, Human
uuggaaggaac

SEQ ID NO: 2016698 - RNA, 20 nt, Human
uuggaagugaaaacuuugua

SEQ ID NO: 2016699 - RNA, 20 nt, Human
uuggaagggcuuuucaaaau

SEQ ID NO: 2016700 - RNA, 15 nt, Human
uuggaaguuuuaauc

SEQ ID NO: 2016701 - RNA, 14 nt, Human
uuggaccauuuucc

SEQ ID NO: 2016702 - RNA, 16 nt, Human
uuggacauuuuauguc

SEQ ID NO: 2016703 - RNA, 17 nt, Human
uuggacauuuuaugucu

SEQ ID NO: 2016704 - RNA, 18 nt, Human
uuggacauuuuaugucuu

SEQ ID NO: 2016705 - RNA, 20 nt, Human
uuggacauuuuaugucuuuc

SEQ ID NO: 2016706 - RNA, 16 nt, Human
uugccucugccucuga

SEQ ID NO: 2016707 - RNA, 18 nt, Human
uugccucugccucugaca

SEQ ID NO: 2016708 - RNA, 11 nt, Human
uugccucugcc

SEQ ID NO: 2016709 - RNA, 14 nt, Human
uugccucugccucu

SEQ ID NO: 2016710 - RNA, 12 nt, Human
uugcccagccuc

SEQ ID NO: 2016711 - RNA, 16 nt, Human
uugcccagccucuuuc

SEQ ID NO: 2016712 - RNA, 19 nt, Human
uugcccagccucuuucccu

SEQ ID NO: 2016713 - RNA, 18 nt, Human
uugccagucaccccggcc

SEQ ID NO: 2016714 - RNA, 13 nt, Human
uugccagucaccc

SEQ ID NO: 2016715 - RNA, 18 nt, Human
uugccacugccucuuccu

SEQ ID NO: 2016716 - RNA, 17 nt, Human
uugccauagaguacacu

SEQ ID NO: 2016717 - RNA, 23 nt, Human
uugcccacgcuggagugcaguga

SEQ ID NO: 2016718 - RNA, 23 nt, Human
uugccauagaguacacugccugc

SEQ ID NO: 2016719 - RNA, 15 nt, Human
uugcccacuccugcu

SEQ ID NO: 2016720 - RNA, 16 nt, Human
uugcccacuccugcuc

SEQ ID NO: 2016721 - RNA, 17 nt, Human
uugcccacuccugcucu

SEQ ID NO: 2016722 - RNA, 21 nt, Human
uugcccacuccugcucugcuc

SEQ ID NO: 2016723 - RNA, 11 nt, Human
uugcccaggca

SEQ ID NO: 2016724 - RNA, 22 nt, Human
uugcccacuccugcucugcucg

SEQ ID NO: 2016725 - RNA, 22 nt, Human
uugcugauggugcaaugaccuu

SEQ ID NO: 2016726 - RNA, 17 nt, Human
uugcugauuuuauucuu

SEQ ID NO: 2016727 - RNA, 18 nt, Human
uugcugauuuuauucuug

SEQ ID NO: 2016728 - RNA, 19 nt, Human
uugcugauuuuauucuuga

SEQ ID NO: 2016729 - RNA, 20 nt, Human
uugcugauggugcaaugacc

SEQ ID NO: 2016730 - RNA, 11 nt, Human
uugcugccuca

SEQ ID NO: 2016731 - RNA, 12 nt, Human
uugcugccucau

SEQ ID NO: 2016732 - RNA, 15 nt, Human
uugcugccucaugcu

SEQ ID NO: 2016733 - RNA, 20 nt, Human
uugcugauuuuauucuugau

SEQ ID NO: 2016734 - RNA, 18 nt, Human
uugcugcaauuuuauaag

SEQ ID NO: 2016735 - RNA, 23 nt, Human
uuggcaaacucuccaccacacgu

SEQ ID NO: 2016736 - RNA, 18 nt, Human
uuggcaauaaauuuugaa

SEQ ID NO: 2016737 - RNA, 13 nt, Human
uuggcauucccca

SEQ ID NO: 2016738 - RNA, 14 nt, Human
uuggccaggcuggu

SEQ ID NO: 2016739 - RNA, 24 nt, Human
uuggccaaagccaaagcuaggccu

SEQ ID NO: 2016740 - RNA, 18 nt, Human
uuggcugggggccucagu

SEQ ID NO: 2016741 - RNA, 16 nt, Human
uuggcugcugaaggcu

SEQ ID NO: 2016742 - RNA, 21 nt, Human
uuggccauaagcaacaauuuu

SEQ ID NO: 2016743 - RNA, 21 nt, Human
uuggcugggggccucagugcc

SEQ ID NO: 2016744 - RNA, 22 nt, Human
uuggcugggggccucagugcca

SEQ ID NO: 2016745 - RNA, 22 nt, Human
uuggcuuuggguugcaggaccu

SEQ ID NO: 2016746 - RNA, 12 nt, Human
uugggaggcuga

SEQ ID NO: 2016747 - RNA, 16 nt, Human
uugggaggccauuugu

SEQ ID NO: 2016748 - RNA, 14 nt, Human
uugguaaaccuuuu

SEQ ID NO: 2016749 - RNA, 12 nt, Human
uugguaaaccuu

SEQ ID NO: 2016750 - RNA, 20 nt, Human
uuggguggggggcuucauac

SEQ ID NO: 2016751 - RNA, 21 nt, Human
uuggguggggggcuucauaca

SEQ ID NO: 2016752 - RNA, 22 nt, Human
uuggguggggggcuucauacac

SEQ ID NO: 2016753 - RNA, 17 nt, Human
uuggguggggggcuuca

SEQ ID NO: 2016754 - RNA, 19 nt, Human
uuggguggggggcuucaua

SEQ ID NO: 2016755 - RNA, 16 nt, Human
uuggguggaugccugg

SEQ ID NO: 2016756 - RNA, 18 nt, Human
uuguacagauucuuuauu

SEQ ID NO: 2016757 - RNA, 14 nt, Human
uuguagagccaggg

SEQ ID NO: 2016758 - RNA, 15 nt, Human
uuguagagccagggu

SEQ ID NO: 2016759 - RNA, 13 nt, Human
uuguacauaaaca

SEQ ID NO: 2016760 - RNA, 21 nt, Human
uuguauucucuccuguaccuc

SEQ ID NO: 2016761 - RNA, 14 nt, Human
uuguauucagaguu

SEQ ID NO: 2016762 - RNA, 14 nt, Human
uuguauuacaaauc

SEQ ID NO: 2016763 - RNA, 12 nt, Human
uuguagauuuga

SEQ ID NO: 2016764 - RNA, 14 nt, Human
uuguagauuugauu

SEQ ID NO: 2016765 - RNA, 23 nt, Human
uuguacacccaugaaagaaaacu

SEQ ID NO: 2016766 - RNA, 13 nt, Human
uuguacagacaac

SEQ ID NO: 2016767 - RNA, 12 nt, Human
uuguacagacaa

SEQ ID NO: 2016768 - RNA, 13 nt, Human
uugguccugcugc

SEQ ID NO: 2016769 - RNA, 12 nt, Human
uugguccugcug

SEQ ID NO: 2016770 - RNA, 16 nt, Human
uuggucccccuuccau

SEQ ID NO: 2016771 - RNA, 22 nt, Human
uuggucccccuuccauggacuu

SEQ ID NO: 2016772 - RNA, 18 nt, Human
uuguaaauaaaggaacca

SEQ ID NO: 2016773 - RNA, 18 nt, Human
uuguaaagauuucuguuc

SEQ ID NO: 2016774 - RNA, 16 nt, Human
uuguaaagauuucugu

SEQ ID NO: 2016775 - RNA, 17 nt, Human
uuguaaagauuucuguu

SEQ ID NO: 2016776 - RNA, 23 nt, Human
uuguaaagaaaaauauuuaaugu

SEQ ID NO: 2016777 - RNA, 16 nt, Human
uuguaaaggaauuuaa

SEQ ID NO: 2016778 - RNA, 20 nt, Human
uugacgccaucccagcccca

SEQ ID NO: 2016779 - RNA, 19 nt, Human
uugacguauuauuguccuu

SEQ ID NO: 2016780 - RNA, 18 nt, Human
uugagcugcuuuuuuuga

SEQ ID NO: 2016781 - RNA, 20 nt, Human
uugagcugcuuuuuuugaaa

SEQ ID NO: 2016782 - RNA, 21 nt, Human
uugagcugcuuuuuuugaaac

SEQ ID NO: 2016783 - RNA, 18 nt, Human
uugaggaaacaacagcuu

SEQ ID NO: 2016784 - RNA, 17 nt, Human
uugaggaaauuugcagc

SEQ ID NO: 2016785 - RNA, 15 nt, Human
uugaggaaaaauaug

SEQ ID NO: 2016786 - RNA, 17 nt, Human
uugaggaaaaauaugug

SEQ ID NO: 2016787 - RNA, 20 nt, Human
uugaggaaaaauaugugaag

SEQ ID NO: 2016788 - RNA, 21 nt, Human
uugaggaaaaauaugugaagg

SEQ ID NO: 2016789 - RNA, 20 nt, Human
uugauagcacagacccugcc

SEQ ID NO: 2016790 - RNA, 19 nt, Human
uugauagcacagacccugc

SEQ ID NO: 2016791 - RNA, 18 nt, Human
uugaauguaugcuucaua

SEQ ID NO: 2016792 - RNA, 20 nt, Human
uugaauggcaauguuuugcu

SEQ ID NO: 2016793 - RNA, 21 nt, Human
uugaccgugaggccagagaca

SEQ ID NO: 2016794 - RNA, 20 nt, Human
uugaccgugaggccagagac

SEQ ID NO: 2016795 - RNA, 15 nt, Human
uugaccucaggugau

SEQ ID NO: 2016796 - RNA, 22 nt, Human
uugaccugaggcccuucucucc

SEQ ID NO: 2016797 - RNA, 19 nt, Human
uugaccugaggcccuucuc

SEQ ID NO: 2016798 - RNA, 12 nt, Human
uugaccugaggc

SEQ ID NO: 2016799 - RNA, 14 nt, Human
uugacgccauccca

SEQ ID NO: 2016800 - RNA, 22 nt, Human
uugacgccaucccagccccaau

SEQ ID NO: 2016801 - RNA, 15 nt, Human
uugacgccaucccag

SEQ ID NO: 2016802 - RNA, 13 nt, Human
uugauuuauuaac

SEQ ID NO: 2016803 - RNA, 14 nt, Human
uugauuuauuaacu

SEQ ID NO: 2016804 - RNA, 15 nt, Human
uugauuuauuaacuu

SEQ ID NO: 2016805 - RNA, 17 nt, Human
uugauuuauuaacuuaa

SEQ ID NO: 2016806 - RNA, 20 nt, Human
uugauuuauuaacuuaauaa

SEQ ID NO: 2016807 - RNA, 14 nt, Human
uugaugaaaagcuu

SEQ ID NO: 2016808 - RNA, 15 nt, Human
uugaugaaaagcuuu

SEQ ID NO: 2016809 - RNA, 17 nt, Human
uugaucuuccucugcua

SEQ ID NO: 2016810 - RNA, 19 nt, Human
uugaucuuccucugcuaaa

SEQ ID NO: 2016811 - RNA, 21 nt, Human
uugauagcacagacccugccc

SEQ ID NO: 2016812 - RNA, 13 nt, Human
uugcaaaaaucca

SEQ ID NO: 2016813 - RNA, 19 nt, Human
uugauuuuuuuuuuuaauc

SEQ ID NO: 2016814 - RNA, 18 nt, Human
uugauuuccguuaaaaua

SEQ ID NO: 2016815 - RNA, 21 nt, Human
uugauuuauuaacuuaauaau

SEQ ID NO: 2016816 - RNA, 22 nt, Human
uugauuucuaguuauuuauucu

SEQ ID NO: 2016817 - RNA, 19 nt, Human
uugauuuuccaucuaaaaa

SEQ ID NO: 2016818 - RNA, 22 nt, Human
uugauuuuccaucuaaaaauau

SEQ ID NO: 2016819 - RNA, 14 nt, Human
uugcaacaggcugg

SEQ ID NO: 2016820 - RNA, 17 nt, Human
uugcaacaggcugggcu

SEQ ID NO: 2016821 - RNA, 12 nt, Human
uugcaacaaaau

SEQ ID NO: 2016822 - RNA, 13 nt, Human
uugcaacaaaaua

SEQ ID NO: 2016823 - RNA, 11 nt, Human
uugcagaacuu

SEQ ID NO: 2016824 - RNA, 17 nt, Human
uugcaacaaaauacauu

SEQ ID NO: 2016825 - RNA, 16 nt, Human
uugcagacaggcaagc

SEQ ID NO: 2016826 - RNA, 21 nt, Human
uugcagaacuugaagccugcu

SEQ ID NO: 2016827 - RNA, 22 nt, Human
uugcagacaggcaagcaccucc

SEQ ID NO: 2016828 - RNA, 23 nt, Human
uugcaggagcaguaucaugaagc

SEQ ID NO: 2016829 - RNA, 14 nt, Human
uugcauagaauaaa

SEQ ID NO: 2016830 - RNA, 20 nt, Human
uugcauacaaacaagcauau

SEQ ID NO: 2016831 - RNA, 13 nt, Human
uugcauacaaaca

SEQ ID NO: 2016832 - RNA, 14 nt, Human
uugcauacaaacaa

SEQ ID NO: 2016833 - RNA, 14 nt, Human
uugccacugccucu

SEQ ID NO: 2016834 - RNA, 15 nt, Human
uugccacugccucuu

SEQ ID NO: 2016835 - RNA, 22 nt, Human
uugaaaacacuguucucugccc

SEQ ID NO: 2016836 - RNA, 14 nt, Human
uugaaacuuuaaga

SEQ ID NO: 2016837 - RNA, 14 nt, Human
uugaaacuuugaga

SEQ ID NO: 2016838 - RNA, 16 nt, Human
uugaaacuuugagauc

SEQ ID NO: 2016839 - RNA, 20 nt, Human
uugaaacuuugagaucuaaa

SEQ ID NO: 2016840 - RNA, 18 nt, Human
uucuuuauaauucuacuu

SEQ ID NO: 2016841 - RNA, 20 nt, Human
uucuuuaguagcaacuaaaa

SEQ ID NO: 2016842 - RNA, 21 nt, Human
uugaaaacacuguucucugcc

SEQ ID NO: 2016843 - RNA, 19 nt, Human
uugaaaacacuguucucug

SEQ ID NO: 2016844 - RNA, 15 nt, Human
uugaaaaaugcaugu

SEQ ID NO: 2016845 - RNA, 19 nt, Human
uucuuucaagggcuuuccu

SEQ ID NO: 2016846 - RNA, 23 nt, Human
uucuuucaagggcuuuccugugc

SEQ ID NO: 2016847 - RNA, 22 nt, Human
uugaacuuugaccucugcagca

SEQ ID NO: 2016848 - RNA, 21 nt, Human
uugaacucuucucauuacuug

SEQ ID NO: 2016849 - RNA, 12 nt, Human
uugaacugaagg

SEQ ID NO: 2016850 - RNA, 15 nt, Human
uugaacugagcuugg

SEQ ID NO: 2016851 - RNA, 16 nt, Human
uugaacugagcuugga

SEQ ID NO: 2016852 - RNA, 16 nt, Human
uugaacugauaaagau

SEQ ID NO: 2016853 - RNA, 19 nt, Human
uugaacucuucaaucucuu

SEQ ID NO: 2016854 - RNA, 16 nt, Human
uugaacucuucucauu

SEQ ID NO: 2016855 - RNA, 19 nt, Human
uugaacucuucucauuacu

SEQ ID NO: 2016856 - RNA, 20 nt, Human
uugaacucuucucauuacuu

SEQ ID NO: 2016857 - RNA, 15 nt, Human
uugaaagaauguaaa

SEQ ID NO: 2016858 - RNA, 13 nt, Human
uugaaucuuuaau

SEQ ID NO: 2016859 - RNA, 14 nt, Human
uugaaucuuuaauu

SEQ ID NO: 2016860 - RNA, 17 nt, Human
uugaagacagagcuaca

SEQ ID NO: 2016861 - RNA, 16 nt, Human
uugaaagaauguaaag

SEQ ID NO: 2016862 - RNA, 20 nt, Human
uugaagaccuaaccagggcc

SEQ ID NO: 2016863 - RNA, 19 nt, Human
uugaagacuuuucuuucag

SEQ ID NO: 2016864 - RNA, 23 nt, Human
uucuuauuuaaugaaagacugua

SEQ ID NO: 2016865 - RNA, 19 nt, Human
uucuuauuuaaugaaagac

SEQ ID NO: 2016866 - RNA, 11 nt, Human
uucuguucuuu

SEQ ID NO: 2016867 - RNA, 14 nt, Human
uucuucaacucccu

SEQ ID NO: 2016868 - RNA, 21 nt, Human
uucuucaaaauauaaaaugcc

SEQ ID NO: 2016869 - RNA, 23 nt, Human
uucuucaaaauauaaaaugccaa

SEQ ID NO: 2016870 - RNA, 16 nt, Human
uucuucaaaccuuugu

SEQ ID NO: 2016871 - RNA, 11 nt, Human
uucuucaaaau

SEQ ID NO: 2016872 - RNA, 17 nt, Human
uucuugguuuguaaauu

SEQ ID NO: 2016873 - RNA, 18 nt, Human
uucuugguuuguaaauua

SEQ ID NO: 2016874 - RNA, 23 nt, Human
uucuugguuuguaaauuaacuuu

SEQ ID NO: 2016875 - RNA, 22 nt, Human
uucuucacuguccuccaagcca

SEQ ID NO: 2016876 - RNA, 13 nt, Human
uucuugguuugua

SEQ ID NO: 2016877 - RNA, 16 nt, Human
uucuugguuuguaaau

SEQ ID NO: 2016878 - RNA, 23 nt, Human
uucuguggguuucuaaagcugcc

SEQ ID NO: 2016879 - RNA, 12 nt, Human
uucuguggcuca

SEQ ID NO: 2016880 - RNA, 16 nt, Human
uucuguggcucacaga

SEQ ID NO: 2016881 - RNA, 20 nt, Human
uucugagcuuacguaguucu

SEQ ID NO: 2016882 - RNA, 14 nt, Human
uucugagcuggccu

SEQ ID NO: 2016883 - RNA, 17 nt, Human
uucuguccuacucugug

SEQ ID NO: 2016884 - RNA, 22 nt, Human
uucuguggcgaggcaugcuauc

SEQ ID NO: 2016885 - RNA, 20 nt, Human
uucugugguuggcugggaaa

SEQ ID NO: 2016886 - RNA, 17 nt, Human
uucuguguuuauucaaa

SEQ ID NO: 2016887 - RNA, 13 nt, Human
uucuguuaaaaug

SEQ ID NO: 2016888 - RNA, 16 nt, Human
uucuguuaaaaugcau

SEQ ID NO: 2016889 - RNA, 22 nt, Human
uucuguuaaaaugcaugauugc

SEQ ID NO: 2016890 - RNA, 13 nt, Human
uucuguuacaaaa

SEQ ID NO: 2016891 - RNA, 14 nt, Human
uucuguuacaaaau

SEQ ID NO: 2016892 - RNA, 22 nt, Human
uucuguuacaaaauguaacugu

SEQ ID NO: 2016893 - RNA, 15 nt, Human
uucuguuacaaaaug

SEQ ID NO: 2016894 - RNA, 16 nt, Human
uucuguuacaaaaugu

SEQ ID NO: 2016895 - RNA, 17 nt, Human
uucuguuacaaaaugua

SEQ ID NO: 2016896 - RNA, 20 nt, Human
uucuguuacaaaauguaacu

SEQ ID NO: 2016897 - RNA, 21 nt, Human
uucuguccgagcuuugaaaau

SEQ ID NO: 2016898 - RNA, 17 nt, Human
uucuguccgagcuuuga

SEQ ID NO: 2016899 - RNA, 14 nt, Human
uucugagcauuuaa

SEQ ID NO: 2016900 - RNA, 14 nt, Human
uucugacucuuccc

SEQ ID NO: 2016901 - RNA, 20 nt, Human
ugugcgugcauguguguuca

SEQ ID NO: 2016902 - RNA, 17 nt, Human
ugugccucugggacugg

SEQ ID NO: 2016903 - RNA, 15 nt, Human
ugugccucugccugu

SEQ ID NO: 2016904 - RNA, 23 nt, Human
ugugccugcuucagccucccaca

SEQ ID NO: 2016905 - RNA, 18 nt, Human
ugugcaugugucuuuaua

SEQ ID NO: 2016906 - RNA, 14 nt, Human
ugugccugcuucag

SEQ ID NO: 2016907 - RNA, 20 nt, Human
ugugcuguguuugcuccccu

SEQ ID NO: 2016908 - RNA, 21 nt, Human
ugugcuguguuugcuccccuu

SEQ ID NO: 2016909 - RNA, 15 nt, Human
ugugcuaaacgugua

SEQ ID NO: 2016910 - RNA, 21 nt, Human
ugugcuaaacguguauguuuu

SEQ ID NO: 2016911 - RNA, 22 nt, Human
ugugcuaaacguguauguuuuu

SEQ ID NO: 2016912 - RNA, 22 nt, Human
ugugcguggggcucccgccucc

SEQ ID NO: 2016913 - RNA, 21 nt, Human
ugugcguggggcucccgccuc

SEQ ID NO: 2016914 - RNA, 22 nt, Human
ugugcuuauguaugagguacaa

SEQ ID NO: 2016915 - RNA, 15 nt, Human
ugugcuucugccacc

SEQ ID NO: 2016916 - RNA, 15 nt, Human
ugugcagagcugaag

SEQ ID NO: 2016917 - RNA, 21 nt, Human
ugugcagagcugaagagcugg

SEQ ID NO: 2016918 - RNA, 16 nt, Human
ugugcaguaucuguga

SEQ ID NO: 2016919 - RNA, 14 nt, Human
ugugcaguaacuug

SEQ ID NO: 2016920 - RNA, 16 nt, Human
ugugcacaugcacgug

SEQ ID NO: 2016921 - RNA, 22 nt, Human
ugugcacaugcacgugugugca

SEQ ID NO: 2016922 - RNA, 16 nt, Human
ugugccucugggacug

SEQ ID NO: 2016923 - RNA, 15 nt, Human
ugugccucugggacu

SEQ ID NO: 2016924 - RNA, 13 nt, Human
ugugccucuggga

SEQ ID NO: 2016925 - RNA, 14 nt, Human
ugugccucugccug

SEQ ID NO: 2016926 - RNA, 21 nt, Human
uguggagaagcggcuggcagc

SEQ ID NO: 2016927 - RNA, 12 nt, Human
uguggagaagcg

SEQ ID NO: 2016928 - RNA, 21 nt, Human
uguggcuccuggggguucuuu

SEQ ID NO: 2016929 - RNA, 15 nt, Human
uguggacacagcucu

SEQ ID NO: 2016930 - RNA, 16 nt, Human
uguggacacagcucuu

SEQ ID NO: 2016931 - RNA, 15 nt, Human
uguggacuuaggaag

SEQ ID NO: 2016932 - RNA, 19 nt, Human
uguggaaaagccaagaggc

SEQ ID NO: 2016933 - RNA, 21 nt, Human
uguggaaaagccaagaggcug

SEQ ID NO: 2016934 - RNA, 23 nt, Human
uguggaaaagccaagaggcugca

SEQ ID NO: 2016935 - RNA, 17 nt, Human
uguggaaaaugaaaauu

SEQ ID NO: 2016936 - RNA, 14 nt, Human
uguggacacagcuc

SEQ ID NO: 2016937 - RNA, 13 nt, Human
uguggacacagcu

SEQ ID NO: 2016938 - RNA, 14 nt, Human
ugugggucugugug

SEQ ID NO: 2016939 - RNA, 16 nt, Human
ugugggucugugugug

SEQ ID NO: 2016940 - RNA, 20 nt, Human
ugugggucugugugugugua

SEQ ID NO: 2016941 - RNA, 16 nt, Human
ugugggggucugugug

SEQ ID NO: 2016942 - RNA, 14 nt, Human
ugugggggguccuu

SEQ ID NO: 2016943 - RNA, 21 nt, Human
ugugggggccccgucucaggu

SEQ ID NO: 2016944 - RNA, 12 nt, Human
ugugggaagggg

SEQ ID NO: 2016945 - RNA, 12 nt, Human
uguggcuucugg

SEQ ID NO: 2016946 - RNA, 15 nt, Human
ugugagggcagugca

SEQ ID NO: 2016947 - RNA, 23 nt, Human
ugugaguacuacaguccucccau

SEQ ID NO: 2016948 - RNA, 20 nt, Human
ugugaguacuacaguccucc

SEQ ID NO: 2016949 - RNA, 19 nt, Human
ugugaguacuacaguccuc

SEQ ID NO: 2016950 - RNA, 14 nt, Human
ugugagggaaagag

SEQ ID NO: 2016951 - RNA, 15 nt, Human
ugugagggaaagagc

SEQ ID NO: 2016952 - RNA, 22 nt, Human
ugugagggaaagagcuuuccua

SEQ ID NO: 2016953 - RNA, 12 nt, Human
ugugagggcagu

SEQ ID NO: 2016954 - RNA, 18 nt, Human
ugugaggggcucucucau

SEQ ID NO: 2016955 - RNA, 18 nt, Human
ugugaguacuacaguccu

SEQ ID NO: 2016956 - RNA, 14 nt, Human
ugugcaagagaggg

SEQ ID NO: 2016957 - RNA, 13 nt, Human
ugugauauaagug

SEQ ID NO: 2016958 - RNA, 19 nt, Human
ugugcaagcuuuuccuaau

SEQ ID NO: 2016959 - RNA, 17 nt, Human
ugugauauaaacagcuu

SEQ ID NO: 2016960 - RNA, 18 nt, Human
ugugcaagcuuuuccuaa

SEQ ID NO: 2016961 - RNA, 21 nt, Human
ugugauacaaugcugugcccu

SEQ ID NO: 2016962 - RNA, 23 nt, Human
ugugaguauucucauucuuccca

SEQ ID NO: 2016963 - RNA, 13 nt, Human
ugugaguauucuc

SEQ ID NO: 2016964 - RNA, 15 nt, Human
ugugaguauucucau

SEQ ID NO: 2016965 - RNA, 17 nt, Human
ugugaguuuguuucuuu

SEQ ID NO: 2016966 - RNA, 19 nt, Human
ugugaguuuguuucuuuga

SEQ ID NO: 2016967 - RNA, 21 nt, Human
ugugaguuuguuucuuugaau

SEQ ID NO: 2016968 - RNA, 16 nt, Human
ugugaaucauuuuacc

SEQ ID NO: 2016969 - RNA, 21 nt, Human
ugugaauacugcuugaauaaa

SEQ ID NO: 2016970 - RNA, 14 nt, Human
ugugaauaauuaca

SEQ ID NO: 2016971 - RNA, 16 nt, Human
ugugaauaauuacagu

SEQ ID NO: 2016972 - RNA, 14 nt, Human
ugugaauacugcuu

SEQ ID NO: 2016973 - RNA, 18 nt, Human
ugugaauacugcuugaau

SEQ ID NO: 2016974 - RNA, 21 nt, Human
ugugacaaggauugcuacugu

SEQ ID NO: 2016975 - RNA, 22 nt, Human
ugugaccacugcagaagacagu

SEQ ID NO: 2016976 - RNA, 15 nt, Human
ugugacauguuuuau

SEQ ID NO: 2016977 - RNA, 13 nt, Human
ugugacaguguug

SEQ ID NO: 2016978 - RNA, 20 nt, Human
ugugacaucucuauucccca

SEQ ID NO: 2016979 - RNA, 21 nt, Human
ugugacaucucuauuccccac

SEQ ID NO: 2016980 - RNA, 14 nt, Human
ugugaaaggaaaga

SEQ ID NO: 2016981 - RNA, 13 nt, Human
ugugaaaggaaag

SEQ ID NO: 2016982 - RNA, 14 nt, Human
ugugaaacagacuu

SEQ ID NO: 2016983 - RNA, 13 nt, Human
ugugaaacauguu

SEQ ID NO: 2016984 - RNA, 17 nt, Human
ugugaaaaaaaaaaugc

SEQ ID NO: 2016985 - RNA, 20 nt, Human
ugugaaaaaaaaaaugcuga

SEQ ID NO: 2016986 - RNA, 18 nt, Human
ugucuuuggacccugagg

SEQ ID NO: 2016987 - RNA, 17 nt, Human
ugucuuuggacccugag

SEQ ID NO: 2016988 - RNA, 16 nt, Human
ugucugcuccagcucu

SEQ ID NO: 2016989 - RNA, 22 nt, Human
ugucuuuggacccugaggccca

SEQ ID NO: 2016990 - RNA, 19 nt, Human
ugucuuuggacccugaggc

SEQ ID NO: 2016991 - RNA, 14 nt, Human
ugucuuuuuucuaa

SEQ ID NO: 2016992 - RNA, 16 nt, Human
ugucuuuuuucacuac

SEQ ID NO: 2016993 - RNA, 19 nt, Human
ugucucaagagggcacugg

SEQ ID NO: 2016994 - RNA, 11 nt, Human
uguccccacca

SEQ ID NO: 2016995 - RNA, 12 nt, Human
uguccccaccau

SEQ ID NO: 2016996 - RNA, 14 nt, Human
uguccccaccaucu

SEQ ID NO: 2016997 - RNA, 16 nt, Human
uguccccaccaucugc

SEQ ID NO: 2016998 - RNA, 17 nt, Human
uguccccaccaucugcu

SEQ ID NO: 2016999 - RNA, 21 nt, Human
uguccccaccaucugcugucu

SEQ ID NO: 2017000 - RNA, 20 nt, Human
ugucccaugugagcugcugc

SEQ ID NO: 2017001 - RNA, 22 nt, Human
ugucccaugugagcugcugcca

SEQ ID NO: 2017002 - RNA, 23 nt, Human
ugucucaagagggcacugguggc

SEQ ID NO: 2017003 - RNA, 20 nt, Human
ugucucaagagggcacuggu

SEQ ID NO: 2017004 - RNA, 21 nt, Human
ugucucaagagggcacuggug

SEQ ID NO: 2017005 - RNA, 16 nt, Human
ugucucaggucccugc

SEQ ID NO: 2017006 - RNA, 17 nt, Human
ugucucaggucccugca

SEQ ID NO: 2017007 - RNA, 16 nt, Human
ugucugccacauuaac

SEQ ID NO: 2017008 - RNA, 18 nt, Human
ugucugccacauuaacua

SEQ ID NO: 2017009 - RNA, 21 nt, Human
ugucucaguccaugaagaugu

SEQ ID NO: 2017010 - RNA, 22 nt, Human
ugucucaguccaugaagaugua

SEQ ID NO: 2017011 - RNA, 14 nt, Human
ugucuggcugcaga

SEQ ID NO: 2017012 - RNA, 17 nt, Human
ugucugcuccagcucug

SEQ ID NO: 2017013 - RNA, 16 nt, Human
ugucuggcugcagagc

SEQ ID NO: 2017014 - RNA, 17 nt, Human
ugucuggcugcagagca

SEQ ID NO: 2017015 - RNA, 16 nt, Human
ugucugccccaaguuu

SEQ ID NO: 2017016 - RNA, 17 nt, Human
ugucugccccaaguuuu

SEQ ID NO: 2017017 - RNA, 22 nt, Human
ugucugccccaaguuuugugaa

SEQ ID NO: 2017018 - RNA, 15 nt, Human
uguaaauuuauguga

SEQ ID NO: 2017019 - RNA, 16 nt, Human
uguaaauuuaugugau

SEQ ID NO: 2017020 - RNA, 12 nt, Human
uguaaauucuga

SEQ ID NO: 2017021 - RNA, 13 nt, Human
uguaaauucugau

SEQ ID NO: 2017022 - RNA, 14 nt, Human
uguaaauucugauu

SEQ ID NO: 2017023 - RNA, 15 nt, Human
uguaaauucugauuu

SEQ ID NO: 2017024 - RNA, 18 nt, Human
uguaaauucugauuucuu

SEQ ID NO: 2017025 - RNA, 19 nt, Human
uguaaauucugauuucuuu

SEQ ID NO: 2017026 - RNA, 22 nt, Human
uguaaauucugauuucuuuuca

SEQ ID NO: 2017027 - RNA, 23 nt, Human
uguaacuaaaauaauuuuguaau

SEQ ID NO: 2017028 - RNA, 14 nt, Human
uguaacuaaaauaa

SEQ ID NO: 2017029 - RNA, 15 nt, Human
uguaacuaaaauaau

SEQ ID NO: 2017030 - RNA, 22 nt, Human
uguaacgugugcuguguuugcu

SEQ ID NO: 2017031 - RNA, 18 nt, Human
uguaacgugugcuguguu

SEQ ID NO: 2017032 - RNA, 19 nt, Human
uguaacgugugcuguguuu

SEQ ID NO: 2017033 - RNA, 15 nt, Human
uguaaucacagcuac

SEQ ID NO: 2017034 - RNA, 21 nt, Human
uguaacuguuaccauuggaaa

SEQ ID NO: 2017035 - RNA, 12 nt, Human
uguaauccagca
